United States Patent Application Publication US 2006/0257851 A1 - sequence listing, part 2

SEQ ID NO: 33407 - RNA, 32 nt, Homo Sapiens
cccuaccugugucccgccugcggccgcggcuu

SEQ ID NO: 33408 - RNA, 32 nt, Homo Sapiens
ccucuguuggaaaugcagaaaucaccugccuu

SEQ ID NO: 33409 - RNA, 32 nt, Homo Sapiens
guuuauuaaaauugauggcaaggucuaaacug

SEQ ID NO: 33410 - RNA, 32 nt, Homo Sapiens
cccgcggacuugggggcgcccgcugagccccg

SEQ ID NO: 33411 - RNA, 32 nt, Homo Sapiens
aaaauaccaaaauauuuuauaagcaacagaug

SEQ ID NO: 33412 - RNA, 32 nt, Homo Sapiens
uugcagguuaucgcaagaugucuuagaguagg

SEQ ID NO: 33413 - RNA, 32 nt, Homo Sapiens
ucucugccaagaccucuuuuuggggaggaaag

SEQ ID NO: 33414 - RNA, 32 nt, Homo Sapiens
aaacucacgggcguuauaucaaccaggguucc

SEQ ID NO: 33415 - RNA, 32 nt, Homo Sapiens
gggaggauguauaaaauggucauggggaugaa

SEQ ID NO: 33416 - RNA, 32 nt, Homo Sapiens
cuccugggccccacaccagugcccaccccaaa

SEQ ID NO: 33417 - RNA, 32 nt, Homo Sapiens
uaccuaaauauagaaaagguacaguaaaaaua

SEQ ID NO: 33418 - RNA, 32 nt, Homo Sapiens
ugggggcgccuuagagccgaaccccguuuuuu

SEQ ID NO: 33419 - RNA, 29 nt, Homo Sapiens
cgccggucguguuuacggcggcgcccgcu

SEQ ID NO: 33420 - RNA, 32 nt, Homo Sapiens
guguuauagucuuaaaaacauuuuuuccccua

SEQ ID NO: 33421 - RNA, 32 nt, Homo Sapiens
cacauggaggacgaggcccagcucagcugggc

SEQ ID NO: 33422 - RNA, 32 nt, Homo Sapiens
auuauuuguuuuugaaauaccaguucaacuuu

SEQ ID NO: 33423 - RNA, 32 nt, Homo Sapiens
gccccaacuaaauacuaccguauggcccacca

SEQ ID NO: 33424 - RNA, 32 nt, Homo Sapiens
aacaccauuucaaaacaaaacuguagaagcag

SEQ ID NO: 33425 - RNA, 32 nt, Homo Sapiens
auuguuuccaagauagagagccgacuccacuu

SEQ ID NO: 33426 - RNA, 32 nt, Homo Sapiens
ccacccaggagccccgaggccuucucugaagg

SEQ ID NO: 33427 - RNA, 32 nt, Homo Sapiens
cucugucccccgcagagcugccgcccgcgcuc

SEQ ID NO: 33428 - RNA, 32 nt, Homo Sapiens
caagguaauguuuuguuucagcauuuuaaaaa

SEQ ID NO: 33429 - RNA, 32 nt, Homo Sapiens
aaaaacuaaagcagaaauuugaguaaaauaau

SEQ ID NO: 33430 - RNA, 32 nt, Homo Sapiens
uggcagcggguagcuccuggggcugagccaga

SEQ ID NO: 33431 - RNA, 32 nt, Homo Sapiens
acaguuccuggcugcgguguccgcggacuggc

SEQ ID NO: 33432 - RNA, 32 nt, Homo Sapiens
acauacugcgguucagccuccucccgccuaag

SEQ ID NO: 33433 - RNA, 32 nt, Homo Sapiens
cuccaucaucuuaucugauuguauuucucuuu

SEQ ID NO: 33434 - RNA, 32 nt, Homo Sapiens
uuuggaagguccuguggaccgacccguacuca

SEQ ID NO: 33435 - RNA, 32 nt, Homo Sapiens
ugccacaucuucucccccuuuaucccuacaau

SEQ ID NO: 33436 - RNA, 32 nt, Homo Sapiens
cuuugaagauagaaaaaccacuuuuuaaguac

SEQ ID NO: 33437 - RNA, 32 nt, Homo Sapiens
ccugccccacugggaguagcggcuaagcuggg

SEQ ID NO: 33438 - RNA, 32 nt, Homo Sapiens
uuagcaugaaggauaguaaccacaaaguucag

SEQ ID NO: 33439 - RNA, 32 nt, Homo Sapiens
uucauauuauaggcagaacacaauggcuaaau

SEQ ID NO: 33440 - RNA, 32 nt, Homo Sapiens
auuuaaucuauuuuuauuagaaguuuuucugc

SEQ ID NO: 33441 - RNA, 32 nt, Homo Sapiens
acucugguagcucuccuugucugguuguuuug

SEQ ID NO: 33442 - RNA, 32 nt, Homo Sapiens
guuuuuauagggcuucaauacccaggugguga

SEQ ID NO: 33443 - RNA, 32 nt, Homo Sapiens
aucuacaauagggucuuagugcuuuagaaaaa

SEQ ID NO: 33444 - RNA, 32 nt, Homo Sapiens
gccugugagggggccagccccgaaacagugga

SEQ ID NO: 33445 - RNA, 32 nt, Homo Sapiens
aucuacauuuaauauaauaauuaugaguuaca

SEQ ID NO: 33446 - RNA, 32 nt, Homo Sapiens
uaguuacauacacacacacacacacacacaca

SEQ ID NO: 33447 - RNA, 32 nt, Homo Sapiens
caggagcugagcucagggugggcggaggaagc

SEQ ID NO: 33448 - RNA, 32 nt, Homo Sapiens
ugcuuuguauaugaccuugaucuuuuaccuuu

SEQ ID NO: 33449 - RNA, 32 nt, Homo Sapiens
cacgggggaggccgaggcaggggcugggcaga

SEQ ID NO: 33450 - RNA, 32 nt, Homo Sapiens
uauuaguuugacuauuugaugguuuuauagug

SEQ ID NO: 33451 - RNA, 32 nt, Homo Sapiens
cucaguuuccucaaaagcaaaaugggagauuu

SEQ ID NO: 33452 - RNA, 32 nt, Homo Sapiens
ggggaugccuggaaaacaaaauuaggagagcc

SEQ ID NO: 33453 - RNA, 32 nt, Homo Sapiens
ucccgcgcucuccagcggggccccagccccgg

SEQ ID NO: 33454 - RNA, 32 nt, Homo Sapiens
agaugacacgggggccguucacacucugaaac

SEQ ID NO: 33455 - RNA, 28 nt, Homo Sapiens
augggaggaucaggaccaggugggaaca

SEQ ID NO: 33456 - RNA, 32 nt, Homo Sapiens
ccauuguaucuaggaaguaacuagcuugcuuu

SEQ ID NO: 33457 - RNA, 30 nt, Homo Sapiens
auuaugcuggacuguuuugaccugguuuaa

SEQ ID NO: 33458 - RNA, 32 nt, Homo Sapiens
guguaagaccaucaagaacugucauccaccuc

SEQ ID NO: 33459 - RNA, 32 nt, Homo Sapiens
cuuucccccuuuucugcccccguggggaggag

SEQ ID NO: 33460 - RNA, 29 nt, Homo Sapiens
cgagccccgguccggccaggccccugcgu

SEQ ID NO: 33461 - RNA, 32 nt, Homo Sapiens
agaaagcaaauuauguauuaaguguauuuugc

SEQ ID NO: 33462 - RNA, 32 nt, Homo Sapiens
ucagguaaaccucagcucaggacugcuauuua

SEQ ID NO: 33463 - RNA, 32 nt, Homo Sapiens
uccagggauugugaaauaaacguugcaguuuu

SEQ ID NO: 33464 - RNA, 32 nt, Homo Sapiens
acguuuuauuuucucuguucccuuucuuagga

SEQ ID NO: 33465 - RNA, 32 nt, Homo Sapiens
cugacccugugcuaugcuggaaauagcacucg

SEQ ID NO: 33466 - RNA, 32 nt, Homo Sapiens
ugcagcccuagcgcccggggcuccacgcgccg

SEQ ID NO: 33467 - RNA, 32 nt, Homo Sapiens
uuuguuguugcuguuguuguuuuuuaaaaggu

SEQ ID NO: 33468 - RNA, 32 nt, Homo Sapiens
gcggucuaacuguggccaaguauggugaccuc

SEQ ID NO: 33469 - RNA, 32 nt, Homo Sapiens
ggcuaaacagaaaagcaaaagaaucagauuuu

SEQ ID NO: 33470 - RNA, 31 nt, Homo Sapiens
cuuugagcggguccauggcgaguguaucgcc

SEQ ID NO: 33471 - RNA, 32 nt, Homo Sapiens
aaauguuuuacaguguuucucaucaucuguuu

SEQ ID NO: 33472 - RNA, 32 nt, Homo Sapiens
aguuauaguuuucaggaaugcagcagaagaca

SEQ ID NO: 33473 - RNA, 32 nt, Homo Sapiens
auaagacccucauagagcuugauucuuguaua

SEQ ID NO: 33474 - RNA, 31 nt, Homo Sapiens
uugucaaauauaucaagaguauaucauugca

SEQ ID NO: 33475 - RNA, 32 nt, Homo Sapiens
cuuggcuggacacaauccugaagcaugcagau

SEQ ID NO: 33476 - RNA, 32 nt, Homo Sapiens
ccugagguuggcgucuuccuacgucccagaag

SEQ ID NO: 33477 - RNA, 32 nt, Homo Sapiens
guacugugaaacaaaccaaugcacuuaccagg

SEQ ID NO: 33478 - RNA, 32 nt, Homo Sapiens
ggauauacaaauagcugcauauguuuuagaaa

SEQ ID NO: 33479 - RNA, 32 nt, Homo Sapiens
auaagguugaacacuuuuuuauaugcuuauug

SEQ ID NO: 33480 - RNA, 32 nt, Homo Sapiens
ccccucaccccauuuuagcuuccauagucuuu

SEQ ID NO: 33481 - RNA, 32 nt, Homo Sapiens
cugcacuucuagccaguagcucugcacaaguu

SEQ ID NO: 33482 - RNA, 32 nt, Homo Sapiens
agaacugguaaagaggccccccuggcuccagg

SEQ ID NO: 33483 - RNA, 32 nt, Homo Sapiens
aagaaagggcaucagucuugagggcagccagc

SEQ ID NO: 33484 - RNA, 32 nt, Homo Sapiens
aaaaaggaauaugcccugggccugcugagaag

SEQ ID NO: 33485 - RNA, 32 nt, Homo Sapiens
agaccuggauucaaaucugccauuuaauuagc

SEQ ID NO: 33486 - RNA, 32 nt, Homo Sapiens
gcggaggagccuggcggccacccccucuuccc

SEQ ID NO: 33487 - RNA, 32 nt, Homo Sapiens
uagcagagaauauaaacugaaaaaauccauac

SEQ ID NO: 33488 - RNA, 32 nt, Homo Sapiens
ccuuauauauauuuuuugauaauaagguggga

SEQ ID NO: 33489 - RNA, 32 nt, Homo Sapiens
gagacuccugccgucacgcccggggcuccgcg

SEQ ID NO: 33490 - RNA, 32 nt, Homo Sapiens
gacaucagccccagcuggacuugggcccccac

SEQ ID NO: 33491 - RNA, 32 nt, Homo Sapiens
aagauggggcugcaccugccaacgaagacggg

SEQ ID NO: 33492 - RNA, 31 nt, Homo Sapiens
gaccaguguaacagaaagagaauguagccau

SEQ ID NO: 33493 - RNA, 32 nt, Homo Sapiens
cugucugaacucuucugcugccugccuaggaa

SEQ ID NO: 33494 - RNA, 32 nt, Homo Sapiens
acaccauucaacaugcuggggcaggauggaca

SEQ ID NO: 33495 - RNA, 32 nt, Homo Sapiens
uuugugauccugaguccagaaugguacacaau

SEQ ID NO: 33496 - RNA, 32 nt, Homo Sapiens
acaggggagcagccccuucacuggcagugaga

SEQ ID NO: 33497 - RNA, 32 nt, Homo Sapiens
uguuaugggaggugagagaagaacgaugugau

SEQ ID NO: 33498 - RNA, 32 nt, Homo Sapiens
agacuuuaaaaaaugguaaugaaaauggaaug

SEQ ID NO: 33499 - RNA, 32 nt, Homo Sapiens
gcagaacuuaguuuauaaaaacaaagaaugug

SEQ ID NO: 33500 - RNA, 32 nt, Homo Sapiens
cuaauaaaucauaaguuucuuuuuaaaaauuu

SEQ ID NO: 33501 - RNA, 32 nt, Homo Sapiens
aaccccccugacgcgacuggcgugugcuucug

SEQ ID NO: 33502 - RNA, 32 nt, Homo Sapiens
aaauuaugucauuuugucuagcuuuauccuga

SEQ ID NO: 33503 - RNA, 32 nt, Homo Sapiens
ggcuucaaggaccuaaauuuguaucauuauag

SEQ ID NO: 33504 - RNA, 32 nt, Homo Sapiens
cauauuucuauguuguaauauaaugagucaca

SEQ ID NO: 33505 - RNA, 32 nt, Homo Sapiens
caauuuuugaagaucuuaaauguuccuuuuua

SEQ ID NO: 33506 - RNA, 32 nt, Homo Sapiens
cccaccacccuuucuacacacacuggggcaga

SEQ ID NO: 33507 - RNA, 32 nt, Homo Sapiens
agcuugcuucugccuggcaucugugagcagcu

SEQ ID NO: 33508 - RNA, 32 nt, Homo Sapiens
cuuauaggggagagggaacagagcccagugaa

SEQ ID NO: 33509 - RNA, 32 nt, Homo Sapiens
uagcagagggaucgggaccucuuggaggaacc

SEQ ID NO: 33510 - RNA, 32 nt, Homo Sapiens
ccccagcccagccccaguacugccaccuuuac

SEQ ID NO: 33511 - RNA, 32 nt, Homo Sapiens
cacacacacacacacacauacacacacacgga

SEQ ID NO: 33512 - RNA, 32 nt, Homo Sapiens
uuuaaggacaagaucaggauagcuuuggugaa

SEQ ID NO: 33513 - RNA, 32 nt, Homo Sapiens
gggaguaguauggcuuuuuuuuuuuuuuuuuu

SEQ ID NO: 33514 - RNA, 32 nt, Homo Sapiens
gcaaaucaaagcaaaaaacaaacaaaacuuac

SEQ ID NO: 33515 - RNA, 32 nt, Homo Sapiens
gugaaugcugaaugauuguugcuaggggaaau

SEQ ID NO: 33516 - RNA, 32 nt, Homo Sapiens
gguggcccuuugacuguaaaauguccuuggua

SEQ ID NO: 33517 - RNA, 28 nt, Homo Sapiens
gcccagucaaaggcuccaagcgaggaca

SEQ ID NO: 33518 - RNA, 32 nt, Homo Sapiens
auugacaguaguuauuucucagcuuuucagug

SEQ ID NO: 33519 - RNA, 32 nt, Homo Sapiens
aaacauugccacagauggaggcacaugucaga

SEQ ID NO: 33520 - RNA, 32 nt, Homo Sapiens
cucuaaacaggcuuaaugauucuucagguaga

SEQ ID NO: 33521 - RNA, 30 nt, Homo Sapiens
gagcgccgcgcgcaccacugguuggaguug

SEQ ID NO: 33522 - RNA, 31 nt, Homo Sapiens
gccgccacaaagaccaaagaagugauggcuu

SEQ ID NO: 33523 - RNA, 32 nt, Homo Sapiens
caacugagugggugcgugaaaaggggggauca

SEQ ID NO: 33524 - RNA, 32 nt, Homo Sapiens
aggcccugcccucuccuuccuuacccaaacug

SEQ ID NO: 33525 - RNA, 32 nt, Homo Sapiens
uguaauccucuuuuccuccccacuccuccaca

SEQ ID NO: 33526 - RNA, 32 nt, Homo Sapiens
cuugagccaaggaaacaucauuagauccgcua

SEQ ID NO: 33527 - RNA, 32 nt, Homo Sapiens
auugaccaaugauuguagaccuugcuugagua

SEQ ID NO: 33528 - RNA, 32 nt, Homo Sapiens
ccugcggccgggcugcccuucgcugccaggac

SEQ ID NO: 33529 - RNA, 32 nt, Homo Sapiens
ucucuccacugccaaugacagccuuuccugcc

SEQ ID NO: 33530 - RNA, 32 nt, Homo Sapiens
caagccagggguuugagaaaagagauuccaau

SEQ ID NO: 33531 - RNA, 32 nt, Homo Sapiens
uauugcauuguuagccacucuuggaaaaagca

SEQ ID NO: 33532 - RNA, 32 nt, Homo Sapiens
auuucugccuccaggcuugucuccaucucacc

SEQ ID NO: 33533 - RNA, 32 nt, Homo Sapiens
uugguauaucugcgugcgcgcgucugcugggc

SEQ ID NO: 33534 - RNA, 32 nt, Homo Sapiens
uguuacuguauuuuucagaaaucaaacugcuu

SEQ ID NO: 33535 - RNA, 32 nt, Homo Sapiens
gucaagauggguggucuuuaugcugaaggucu

SEQ ID NO: 33536 - RNA, 32 nt, Homo Sapiens
uaugugagcuggagagagaaaaggugguaacu

SEQ ID NO: 33537 - RNA, 32 nt, Homo Sapiens
guccaaaugcccuagucacauggcagacccac

SEQ ID NO: 33538 - RNA, 30 nt, Homo Sapiens
cagacugugguggccugcgcagcgagcagg

SEQ ID NO: 33539 - RNA, 30 nt, Homo Sapiens
uuuuggguguguauugcagaagccucgucg

SEQ ID NO: 33540 - RNA, 32 nt, Homo Sapiens
agcaaagugaacugggcgaugggcugaagggg

SEQ ID NO: 33541 - RNA, 32 nt, Homo Sapiens
uggggccacgggaagcgguaaaagcacucagc

SEQ ID NO: 33542 - RNA, 32 nt, Homo Sapiens
aagaaugagucuucagaugaaauaucugaugc

SEQ ID NO: 33543 - RNA, 32 nt, Homo Sapiens
accagccgggaccgcgagccaugcuguccgcc

SEQ ID NO: 33544 - RNA, 32 nt, Homo Sapiens
gaaacauaagaaaaaacauaaagagagacaua

SEQ ID NO: 33545 - RNA, 32 nt, Homo Sapiens
agggaagcacuccacacccucacccagguccu

SEQ ID NO: 33546 - RNA, 32 nt, Homo Sapiens
gugaggcggauugagaaggagcucccaggagg

SEQ ID NO: 33547 - RNA, 32 nt, Homo Sapiens
uacuguuaugaguaauaacggucuuguguuuu

SEQ ID NO: 33548 - RNA, 32 nt, Homo Sapiens
agccuccccgguuccuccccugcggugacccc

SEQ ID NO: 33549 - RNA, 32 nt, Homo Sapiens
auucuguuucaagucagagacuuuuuaucuug

SEQ ID NO: 33550 - RNA, 29 nt, Homo Sapiens
aucucucggggacugaggggguggagaga

SEQ ID NO: 33551 - RNA, 32 nt, Homo Sapiens
cuucaagaucgacuugcuuauucuagguucuu

SEQ ID NO: 33552 - RNA, 32 nt, Homo Sapiens
aaauguguucauuuuucuuuguuuuauuuucu

SEQ ID NO: 33553 - RNA, 32 nt, Homo Sapiens
gaugcgcagcggggcagcgccggccccgccga

SEQ ID NO: 33554 - RNA, 32 nt, Homo Sapiens
uagagugggaguccugauaacccaggccuguc

SEQ ID NO: 33555 - RNA, 32 nt, Homo Sapiens
cucauuccuucuagcaacauuuauugacacgg

SEQ ID NO: 33556 - RNA, 32 nt, Homo Sapiens
caaccagcauauagaagugacauauuguuaua

SEQ ID NO: 33557 - RNA, 32 nt, Homo Sapiens
uaaccuggugccuuaccaaguugugcuuuucu

SEQ ID NO: 33558 - RNA, 32 nt, Homo Sapiens
cugcugaggugcccacacccacguucgaucac

SEQ ID NO: 33559 - RNA, 32 nt, Homo Sapiens
aggggcccaggcucccugagccaggaggagag

SEQ ID NO: 33560 - RNA, 32 nt, Homo Sapiens
uuuuuucugaccaggagcugaaagacccugac

SEQ ID NO: 33561 - RNA, 30 nt, Homo Sapiens
acggccuaagcgcugccgccgccgccgccg

SEQ ID NO: 33562 - RNA, 32 nt, Homo Sapiens
cccuccccacaguuugagucagagauggcucu

SEQ ID NO: 33563 - RNA, 32 nt, Homo Sapiens
cuugccugcuccaucucauaggcuaagucagc

SEQ ID NO: 33564 - RNA, 32 nt, Homo Sapiens
ggccuccagugcugccccuccucccuucggcc

SEQ ID NO: 33565 - RNA, 32 nt, Homo Sapiens
uccauuugcccugugcugaacuugcuguucau

SEQ ID NO: 33566 - RNA, 32 nt, Homo Sapiens
aauuuugauucugacuagcuuauuggauuuuu

SEQ ID NO: 33567 - RNA, 30 nt, Homo Sapiens
ucugcgccugggcgggcgggucccgagccc

SEQ ID NO: 33568 - RNA, 32 nt, Homo Sapiens
ugguagcaguugcagcaggaucaggcgccugu

SEQ ID NO: 33569 - RNA, 32 nt, Homo Sapiens
agcugaggccccaagugcccaggcuuggucac

SEQ ID NO: 33570 - RNA, 32 nt, Homo Sapiens
uuagaaaaaguaaaagagugagucgagguuuu

SEQ ID NO: 33571 - RNA, 32 nt, Homo Sapiens
aaacuggggguuucuucucaccgacucuccac

SEQ ID NO: 33572 - RNA, 32 nt, Homo Sapiens
aaauuauagcuauauuaaaaguguaacauuuu

SEQ ID NO: 33573 - RNA, 32 nt, Homo Sapiens
guuauuugcaggcagggaugggcuuguaccug

SEQ ID NO: 33574 - RNA, 32 nt, Homo Sapiens
acuuucauggaaggagacccaggagucaacuu

SEQ ID NO: 33575 - RNA, 32 nt, Homo Sapiens
cuccuaugaaacuugcuucuccaggccaauca

SEQ ID NO: 33576 - RNA, 32 nt, Homo Sapiens
ccuuugaaaugaauguuccuggggcgcccucu

SEQ ID NO: 33577 - RNA, 32 nt, Homo Sapiens
uucauacagaaauaaaacuuauaugaagagua

SEQ ID NO: 33578 - RNA, 27 nt, Homo Sapiens
accuuuuccuucuuuaaucuccugguu

SEQ ID NO: 33579 - RNA, 32 nt, Homo Sapiens
ucggcuauccuggccuuccgaggcccacgagg

SEQ ID NO: 33580 - RNA, 32 nt, Homo Sapiens
uagaguuagguacacaaaggaguacagaugua

SEQ ID NO: 33581 - RNA, 32 nt, Homo Sapiens
cauuugggcagacacuggcuagcagcaggagu

SEQ ID NO: 33582 - RNA, 32 nt, Homo Sapiens
ccucugcccccacccagcugcccucagccuuc

SEQ ID NO: 33583 - RNA, 32 nt, Homo Sapiens
ccaagcaggaagcucagacugguugaguucag

SEQ ID NO: 33584 - RNA, 32 nt, Homo Sapiens
gucaggccgcacuggcccgccccagcucucag

SEQ ID NO: 33585 - RNA, 32 nt, Homo Sapiens
caaauucacagguaauaaaaugcuaacaugaa

SEQ ID NO: 33586 - RNA, 32 nt, Homo Sapiens
ccacacauguauauuucccccugguacacuug

SEQ ID NO: 33587 - RNA, 32 nt, Homo Sapiens
acuucaaagauugggaacaggugggaauugcc

SEQ ID NO: 33588 - RNA, 32 nt, Homo Sapiens
guuucucugugcuauuuuuuggaauucuuuca

SEQ ID NO: 33589 - RNA, 32 nt, Homo Sapiens
gacucgcagcggagagcagcucugugugcccu

SEQ ID NO: 33590 - RNA, 32 nt, Homo Sapiens
agcgaggagcgcgggcagccggggcggcugcu

SEQ ID NO: 33591 - RNA, 32 nt, Homo Sapiens
gaaaagucccacuuaccgauucauucuuucac

SEQ ID NO: 33592 - RNA, 32 nt, Homo Sapiens
cgggcgaaucauuugaggugaggaauucgaga

SEQ ID NO: 33593 - RNA, 32 nt, Homo Sapiens
acggcucugcgacuccgacgccggcaagguuu

SEQ ID NO: 33594 - RNA, 32 nt, Homo Sapiens
uguccccuggaaaccuguguggcuaaagucug

SEQ ID NO: 33595 - RNA, 30 nt, Homo Sapiens
aaggaagugcuaaugggccuauuugacuuc

SEQ ID NO: 33596 - RNA, 32 nt, Homo Sapiens
ucaagccucacgcacacgguggcgauuuccag

SEQ ID NO: 33597 - RNA, 32 nt, Homo Sapiens
cggccgggccgagggacgauggucaguggacg

SEQ ID NO: 33598 - RNA, 32 nt, Homo Sapiens
cugaauggcuuuauacauccacagaguugugc

SEQ ID NO: 33599 - RNA, 32 nt, Homo Sapiens
aguacauuuuuauaagggucuaaucucacuuu

SEQ ID NO: 33600 - RNA, 32 nt, Homo Sapiens
aaaaaaauucaaagauuuuaaauggcaaacaa

SEQ ID NO: 33601 - RNA, 32 nt, Homo Sapiens
agauagagggugguauucugguaaagaagaaa

SEQ ID NO: 33602 - RNA, 32 nt, Homo Sapiens
uuuuauuuuuugcugaugacuauugauugacc

SEQ ID NO: 33603 - RNA, 32 nt, Homo Sapiens
gucaaucuuuuagguauugugucuaccugaua

SEQ ID NO: 33604 - RNA, 32 nt, Homo Sapiens
auguaccuauguguccaugaccucuuuaauuc

SEQ ID NO: 33605 - RNA, 32 nt, Homo Sapiens
ugccucugucuccucaccugcacccaccggac

SEQ ID NO: 33606 - RNA, 32 nt, Homo Sapiens
gcuacgccuugaugaaagaaccguguuggugc

SEQ ID NO: 33607 - RNA, 32 nt, Homo Sapiens
ucccuuggccccagcgcccagcccugcucucc

SEQ ID NO: 33608 - RNA, 32 nt, Homo Sapiens
ccucuacacccaccccccaaccucugacaucg

SEQ ID NO: 33609 - RNA, 32 nt, Homo Sapiens
ugcuuucagaagaauguauaucaucgggaaaa

SEQ ID NO: 33610 - RNA, 32 nt, Homo Sapiens
cgcgccgcuggcuggagcaguacuacguggga

SEQ ID NO: 33611 - RNA, 32 nt, Homo Sapiens
aagcuaugucauugucuacugcauaguuuccu

SEQ ID NO: 33612 - RNA, 32 nt, Homo Sapiens
ccuggcuggccgcuguuuucugucccacuuuu

SEQ ID NO: 33613 - RNA, 31 nt, Homo Sapiens
uuuccguggcacugcauacaaucugaggccu

SEQ ID NO: 33614 - RNA, 32 nt, Homo Sapiens
gaagcucuacugccucaguuucccuauccgga

SEQ ID NO: 33615 - RNA, 32 nt, Homo Sapiens
uaagacagagauguaucaaaacauggaugacg

SEQ ID NO: 33616 - RNA, 32 nt, Homo Sapiens
acucuaauggagaaaaaucuaauuauagcaag

SEQ ID NO: 33617 - RNA, 31 nt, Homo Sapiens
gagcugcugccggccacgccagaggcugcaa

SEQ ID NO: 33618 - RNA, 32 nt, Homo Sapiens
gaggcgcagccacacuccugcucugguccgag

SEQ ID NO: 33619 - RNA, 32 nt, Homo Sapiens
ugauuugucauguuaagacaaauaucaacagu

SEQ ID NO: 33620 - RNA, 32 nt, Homo Sapiens
uauauuuuuuaaacaaugugaucucaaauuua

SEQ ID NO: 33621 - RNA, 32 nt, Homo Sapiens
uucauauagaccacuguaguagauaaaacucu

SEQ ID NO: 33622 - RNA, 32 nt, Homo Sapiens
ccaggugugaugaagcagcaagugcugacauc

SEQ ID NO: 33623 - RNA, 32 nt, Homo Sapiens
accaaauauaugccuuacuauuguauuauagu

SEQ ID NO: 33624 - RNA, 32 nt, Homo Sapiens
ggggagggaagacacccgugcgccucgcuccc

SEQ ID NO: 33625 - RNA, 32 nt, Homo Sapiens
cccaugcaccucagggccaagcgggggcgugg

SEQ ID NO: 33626 - RNA, 32 nt, Homo Sapiens
caguguggagagcggcucuaucauaggaauga

SEQ ID NO: 33627 - RNA, 30 nt, Homo Sapiens
aaagaagcguggugggcgggucccgggcac

SEQ ID NO: 33628 - RNA, 32 nt, Homo Sapiens
uaagaaugaagaucagauucaagggcuucauc

SEQ ID NO: 33629 - RNA, 32 nt, Homo Sapiens
aaaaaucuauuauguaccuaauauugugccua

SEQ ID NO: 33630 - RNA, 32 nt, Homo Sapiens
aacaauuucuucaucuauuccuguacuaaugg

SEQ ID NO: 33631 - RNA, 32 nt, Homo Sapiens
acucauacugucauauaaugcaacagggaggc

SEQ ID NO: 33632 - RNA, 32 nt, Homo Sapiens
ugaggggacagcacauaccacccccacccaac

SEQ ID NO: 33633 - RNA, 32 nt, Homo Sapiens
aagagcaggcaccagcagcagaauggggaaug

SEQ ID NO: 33634 - RNA, 32 nt, Homo Sapiens
uggaagaaacgaauuauaucuauugaaaucga

SEQ ID NO: 33635 - RNA, 32 nt, Homo Sapiens
uccuuucuaagccccaacuuccaagccucccc

SEQ ID NO: 33636 - RNA, 32 nt, Homo Sapiens
ccugagcucugcaaacagcuggauacagauaa

SEQ ID NO: 33637 - RNA, 32 nt, Homo Sapiens
cagguugacccuccccuggccagguggcugcc

SEQ ID NO: 33638 - RNA, 32 nt, Homo Sapiens
gcaggaguucccagggucuggaucugcgcgca

SEQ ID NO: 33639 - RNA, 32 nt, Homo Sapiens
uauuuguugucuuuuuacuuucggaguccguc

SEQ ID NO: 33640 - RNA, 32 nt, Homo Sapiens
cgucgacugcggcucuuccucgggcagcggaa

SEQ ID NO: 33641 - RNA, 32 nt, Homo Sapiens
cccagcuacuccagaagcugaggcuggagaau

SEQ ID NO: 33642 - RNA, 32 nt, Homo Sapiens
uucuuuuuucuuuuuuuuuuuaacucgaacuu

SEQ ID NO: 33643 - RNA, 32 nt, Homo Sapiens
ccuuccuaaacccaaugacuucccugcuccaa

SEQ ID NO: 33644 - RNA, 32 nt, Homo Sapiens
ucgagcagcuccgagggaauguccuucucaau

SEQ ID NO: 33645 - RNA, 32 nt, Homo Sapiens
ggagcugcucuccuggccuccuuggauuuauc

SEQ ID NO: 33646 - RNA, 31 nt, Homo Sapiens
gaaagggagccccugcucaaagggagccccu

SEQ ID NO: 33647 - RNA, 32 nt, Homo Sapiens
cgcccggccggacccgggcccgagaucaugau

SEQ ID NO: 33648 - RNA, 32 nt, Homo Sapiens
cgccaagagagcacugaugaagauguggcagg

SEQ ID NO: 33649 - RNA, 32 nt, Homo Sapiens
cccuuggaaaauguagcaaaugucuggauguc

SEQ ID NO: 33650 - RNA, 32 nt, Homo Sapiens
cuuuauuguaaauuuuaagggaguuucguugg

SEQ ID NO: 33651 - RNA, 31 nt, Homo Sapiens
ccuugcccaccucacuccugaguuagcacac

SEQ ID NO: 33652 - RNA, 29 nt, Homo Sapiens
uccuuuucuaaaucuauagaucuuaugau

SEQ ID NO: 33653 - RNA, 32 nt, Homo Sapiens
uaccucaaggccauaugcaguuguggcccugc

SEQ ID NO: 33654 - RNA, 32 nt, Homo Sapiens
acagcagauaaugcuuucuuuuccagucaucu

SEQ ID NO: 33655 - RNA, 32 nt, Homo Sapiens
aggccagggauguauguugcuugcuugagagg

SEQ ID NO: 33656 - RNA, 32 nt, Homo Sapiens
cuauuugcacaaaacuauucuugcugguuugg

SEQ ID NO: 33657 - RNA, 32 nt, Homo Sapiens
uuucagugguggcugcgugaaagggagcgaca

SEQ ID NO: 33658 - RNA, 32 nt, Homo Sapiens
gguaagaauugucacccacgaugcaacacuga

SEQ ID NO: 33659 - RNA, 32 nt, Homo Sapiens
cgguugaggcugugggggcagcagaucaggag

SEQ ID NO: 33660 - RNA, 32 nt, Homo Sapiens
aagugaauuuaaccuggaaaagaauguauuug

SEQ ID NO: 33661 - RNA, 32 nt, Homo Sapiens
gacaguggaccuuuuuaugacacauaaucaga

SEQ ID NO: 33662 - RNA, 32 nt, Homo Sapiens
acgagaacaaacuuuguaaaucuuccauaagc

SEQ ID NO: 33663 - RNA, 31 nt, Homo Sapiens
guaguggggcuggagcagagccugccgcgaa

SEQ ID NO: 33664 - RNA, 32 nt, Homo Sapiens
cugcucugccccacccuccaaucugcacuuug

SEQ ID NO: 33665 - RNA, 32 nt, Homo Sapiens
gcuaucaucaucaucaucaucauccucauccu

SEQ ID NO: 33666 - RNA, 32 nt, Homo Sapiens
uuuguuauucuuuuccagaaagaaaaugaauu

SEQ ID NO: 33667 - RNA, 32 nt, Homo Sapiens
uggcucuagaugaccuagaguucugggacugu

SEQ ID NO: 33668 - RNA, 32 nt, Homo Sapiens
cucgagaagcgacggcggagggcccgcuccuc

SEQ ID NO: 33669 - RNA, 32 nt, Homo Sapiens
guuucuuucguugcucgcuacuuugugaacuc

SEQ ID NO: 33670 - RNA, 30 nt, Homo Sapiens
agcggggcgcccggcagcgcggagucagcg

SEQ ID NO: 33671 - RNA, 32 nt, Homo Sapiens
ggcuuucagacccggcucccagcccucgaacu

SEQ ID NO: 33672 - RNA, 32 nt, Homo Sapiens
aaauauuguggauauuuguccugcaucagaaa

SEQ ID NO: 33673 - RNA, 31 nt, Homo Sapiens
acucggcugccggaggccgaaggucccugac

SEQ ID NO: 33674 - RNA, 32 nt, Homo Sapiens
augcggugcgugcuucugcccagcgcaugggu

SEQ ID NO: 33675 - RNA, 32 nt, Homo Sapiens
cuuggcaauuuaaugcuguucuugaagacuaa

SEQ ID NO: 33676 - RNA, 32 nt, Homo Sapiens
cuuugcugccagccagggauguccagaggucg

SEQ ID NO: 33677 - RNA, 32 nt, Homo Sapiens
uucuccugccucagccucucaaaguguuggga

SEQ ID NO: 33678 - RNA, 32 nt, Homo Sapiens
guuucucaagauggggcgagccaggaccacag

SEQ ID NO: 33679 - RNA, 32 nt, Homo Sapiens
aaacaugaacugaacgguuaaaagcacagucu

SEQ ID NO: 33680 - RNA, 32 nt, Homo Sapiens
caggcaccucuuccuugauguuuggggucuuu

SEQ ID NO: 33681 - RNA, 32 nt, Homo Sapiens
agccugagaagcugcuggaggagaugcccaag

SEQ ID NO: 33682 - RNA, 32 nt, Homo Sapiens
aaaggaggggucugaggcagggaggguggcau

SEQ ID NO: 33683 - RNA, 32 nt, Homo Sapiens
ccucaugacuucucuuguggaccauguccgug

SEQ ID NO: 33684 - RNA, 32 nt, Homo Sapiens
acucacuuaaaagacauuuauuauuacuucau

SEQ ID NO: 33685 - RNA, 32 nt, Homo Sapiens
cuaauaguaggcaauuuuaauuuucauguagu

SEQ ID NO: 33686 - RNA, 32 nt, Homo Sapiens
ucccgccucaguucgcgccgcgccucggcuug

SEQ ID NO: 33687 - RNA, 32 nt, Homo Sapiens
ugacauuaguugaaguaaauuauuuaauuuuu

SEQ ID NO: 33688 - RNA, 32 nt, Homo Sapiens
augugauaacaucuuuauacuuugaaaaaugu

SEQ ID NO: 33689 - RNA, 32 nt, Homo Sapiens
acacaccccucccacacaccuugcucuggcuu

SEQ ID NO: 33690 - RNA, 32 nt, Homo Sapiens
gugccgaucaguggagucaguaucgagccuga

SEQ ID NO: 33691 - RNA, 32 nt, Homo Sapiens
guugggaggcgaucagcagauaccauagugaa

SEQ ID NO: 33692 - RNA, 32 nt, Homo Sapiens
gcugcucuaauaucgaugguccugcuugccag

SEQ ID NO: 33693 - RNA, 32 nt, Homo Sapiens
aaguuuugacauuuaaauuacuugaaucucau

SEQ ID NO: 33694 - RNA, 32 nt, Homo Sapiens
gcaaugcuguuuauauuuugggugaugaaaua

SEQ ID NO: 33695 - RNA, 32 nt, Homo Sapiens
ggaaccuggccagccagcuuccugcuaugcug

SEQ ID NO: 33696 - RNA, 32 nt, Homo Sapiens
ccccugcccccggccuccgacccgagccccca

SEQ ID NO: 33697 - RNA, 30 nt, Homo Sapiens
gcuggaagccucaagcagccggcgccgucu

SEQ ID NO: 33698 - RNA, 30 nt, Homo Sapiens
uuuuacuauuaguucuacaagaaguagugu

SEQ ID NO: 33699 - RNA, 32 nt, Homo Sapiens
ccccuacagaaccugauggcuggaaacacuca

SEQ ID NO: 33700 - RNA, 32 nt, Homo Sapiens
caugccugcauaucagggcagcauucuaugau

SEQ ID NO: 33701 - RNA, 32 nt, Homo Sapiens
accaagauagcuacauaguguuagaaacugaa

SEQ ID NO: 33702 - RNA, 32 nt, Homo Sapiens
agaagugacguugguuucauguugacaacuuu

SEQ ID NO: 33703 - RNA, 32 nt, Homo Sapiens
ccucccuccagucuugcaguccccagugucug

SEQ ID NO: 33704 - RNA, 32 nt, Homo Sapiens
gguguuuucaguguagguaucuuaauaucagc

SEQ ID NO: 33705 - RNA, 32 nt, Homo Sapiens
gcugaaacaucauuacagauucugcuagccug

SEQ ID NO: 33706 - RNA, 32 nt, Homo Sapiens
uuucgauccaaaugaugaguauuauuauccua

SEQ ID NO: 33707 - RNA, 32 nt, Homo Sapiens
gccccagcgcgcacgggcgauggcgaaggcga

SEQ ID NO: 33708 - RNA, 32 nt, Homo Sapiens
gccccggaggaagaggaagaagggacagugcu

SEQ ID NO: 33709 - RNA, 32 nt, Homo Sapiens
gaacugcugaucgaugcuggcuccaccuggac

SEQ ID NO: 33710 - RNA, 32 nt, Homo Sapiens
ucuucugucucccugcuuuucuaaucaagggg

SEQ ID NO: 33711 - RNA, 32 nt, Homo Sapiens
aaugaguuugaaaagaaacaaugaaauguguu

SEQ ID NO: 33712 - RNA, 31 nt, Homo Sapiens
guugucaauauaucgaacuguucccaaguua

SEQ ID NO: 33713 - RNA, 32 nt, Homo Sapiens
caccuuacucggauggccucccugccccucug

SEQ ID NO: 33714 - RNA, 32 nt, Homo Sapiens
cagcccuucggaagccccggcgccagcccggg

SEQ ID NO: 33715 - RNA, 31 nt, Homo Sapiens
ggggcugcgggguccgcaaggugcacaggag

SEQ ID NO: 33716 - RNA, 32 nt, Homo Sapiens
gccacuugacuucuugugcaacugcucaggcc

SEQ ID NO: 33717 - RNA, 32 nt, Homo Sapiens
gccgguuccgcccgcccucccggagagguggc

SEQ ID NO: 33718 - RNA, 32 nt, Homo Sapiens
acauaugcaauaauccaggcaauggauaagug

SEQ ID NO: 33719 - RNA, 32 nt, Homo Sapiens
uccuuuaaguauuugaugaucaacugaacacg

SEQ ID NO: 33720 - RNA, 32 nt, Homo Sapiens
agucaacuguggcaccaauucuaauguaaucc

SEQ ID NO: 33721 - RNA, 32 nt, Homo Sapiens
uucucacaaaucucuuuuuuuguuuuugaaaa

SEQ ID NO: 33722 - RNA, 32 nt, Homo Sapiens
aauauuuauuuuugccucuuucguuuuaccuu

SEQ ID NO: 33723 - RNA, 32 nt, Homo Sapiens
cgcuggaggaggaggaggggggcccggaguga

SEQ ID NO: 33724 - RNA, 32 nt, Homo Sapiens
agucaucuuaugugcuuaauuauuuucaguua

SEQ ID NO: 33725 - RNA, 31 nt, Homo Sapiens
ugcacugaauaaaaacagaaacuugaucauu

SEQ ID NO: 33726 - RNA, 32 nt, Homo Sapiens
ggcauugguauagaaauagacacaaugggaca

SEQ ID NO: 33727 - RNA, 32 nt, Homo Sapiens
ggagggucagcuaagagaagugggagggccag

SEQ ID NO: 33728 - RNA, 32 nt, Homo Sapiens
gugagaaacugggaucccagggggagggugca

SEQ ID NO: 33729 - RNA, 32 nt, Homo Sapiens
cagcaggaaaauuacaacuauuuucaauugac

SEQ ID NO: 33730 - RNA, 32 nt, Homo Sapiens
uuuguuccaaaauaguugcagauccugacaga

SEQ ID NO: 33731 - RNA, 32 nt, Homo Sapiens
aaaguuaaaaacaaacauaggaaaugugaaaa

SEQ ID NO: 33732 - RNA, 32 nt, Homo Sapiens
auaaauauucuauuuagucauccugauaugag

SEQ ID NO: 33733 - RNA, 32 nt, Homo Sapiens
ucauaaccugagaucaaugccuguggcagccu

SEQ ID NO: 33734 - RNA, 32 nt, Homo Sapiens
ccuguccuggugguauuuagccacuaaccuuu

SEQ ID NO: 33735 - RNA, 32 nt, Homo Sapiens
cuauuuuuguacuagaauuugcuaacuuguaa

SEQ ID NO: 33736 - RNA, 32 nt, Homo Sapiens
gaugaucuuucuucuuuuaacuugaugaugau

SEQ ID NO: 33737 - RNA, 32 nt, Homo Sapiens
agcaucuaugcugagucaaggcugguuuacag

SEQ ID NO: 33738 - RNA, 32 nt, Homo Sapiens
uguacuugauggaagaaaauggaauuacucca

SEQ ID NO: 33739 - RNA, 32 nt, Homo Sapiens
gaccaggaacaaucagaagagcaucaagaagg

SEQ ID NO: 33740 - RNA, 32 nt, Homo Sapiens
caaaauaaaaauuaaaugugagcaaagaaaaa

SEQ ID NO: 33741 - RNA, 32 nt, Homo Sapiens
guuuccagccgccgcucuccucagugcccggu

SEQ ID NO: 33742 - RNA, 32 nt, Homo Sapiens
uauuuagaaaagacaugcuccaaaaaaaaaac

SEQ ID NO: 33743 - RNA, 32 nt, Homo Sapiens
agggacacuuccuuccuccccacucgccuccu

SEQ ID NO: 33744 - RNA, 32 nt, Homo Sapiens
gagcuccuccucaggggccuggcacucaccuu

SEQ ID NO: 33745 - RNA, 32 nt, Homo Sapiens
agccuccccacggacuccaugcggcccgcugg

SEQ ID NO: 33746 - RNA, 32 nt, Homo Sapiens
cauauaggaauucagcuccacaaagcuucagg

SEQ ID NO: 33747 - RNA, 32 nt, Homo Sapiens
gaaagguuugguuuuuuaauuuuuauucuaaa

SEQ ID NO: 33748 - RNA, 32 nt, Homo Sapiens
gggucccucaaaguuugugucuggagccguag

SEQ ID NO: 33749 - RNA, 32 nt, Homo Sapiens
ugggcgagguggcaauuggggaagggguucug

SEQ ID NO: 33750 - RNA, 32 nt, Homo Sapiens
ccgccucccccaccccggggcucgcggcaggu

SEQ ID NO: 33751 - RNA, 32 nt, Homo Sapiens
gugcagcugcguguccuucaguucuuuggcuc

SEQ ID NO: 33752 - RNA, 32 nt, Homo Sapiens
gcaggccacgugacauaaccacccaaagagcc

SEQ ID NO: 33753 - RNA, 32 nt, Homo Sapiens
ucuagaugucuaauucaggauacugucuauag

SEQ ID NO: 33754 - RNA, 32 nt, Homo Sapiens
ugcccaaguauuuugugcuuugucuguguuac

SEQ ID NO: 33755 - RNA, 32 nt, Homo Sapiens
gcggcagaaaccgggaguggggccgggcgagu

SEQ ID NO: 33756 - RNA, 32 nt, Homo Sapiens
gaagggcccucccaaggcuacauccccacccc

SEQ ID NO: 33757 - RNA, 32 nt, Homo Sapiens
caguggguggccuuggaugcccggccccuccc

SEQ ID NO: 33758 - RNA, 32 nt, Homo Sapiens
auggucccaagccucgguuugaccugaccaug

SEQ ID NO: 33759 - RNA, 32 nt, Homo Sapiens
ggugcagcacaccagcauggcacagguauaca

SEQ ID NO: 33760 - RNA, 32 nt, Homo Sapiens
uuugaaauuauugucuuaauauuuuuauauag

SEQ ID NO: 33761 - RNA, 32 nt, Homo Sapiens
ggaacaguggcaggcugcuagcaaggcaguga

SEQ ID NO: 33762 - RNA, 32 nt, Homo Sapiens
caccgccucugccugccccuguggacugaugc

SEQ ID NO: 33763 - RNA, 32 nt, Homo Sapiens
cauuggcaaucugcuuuuuuucuaaaaucuga

SEQ ID NO: 33764 - RNA, 32 nt, Homo Sapiens
cuuaagcuuucugccaaaaagaugcagagagc

SEQ ID NO: 33765 - RNA, 32 nt, Homo Sapiens
gagcaggugggcagaugagggcccuaugcgca

SEQ ID NO: 33766 - RNA, 32 nt, Homo Sapiens
gacccaacaacaagcucaugacugaaauuuca

SEQ ID NO: 33767 - RNA, 32 nt, Homo Sapiens
agcggcuuccgggguguggcugccgggucggc

SEQ ID NO: 33768 - RNA, 32 nt, Homo Sapiens
auaucuucaaaaauauagcuagugaaauauug

SEQ ID NO: 33769 - RNA, 32 nt, Homo Sapiens
gccucuccaagcccggagcauccccagcgccc

SEQ ID NO: 33770 - RNA, 32 nt, Homo Sapiens
uuuuauuuuuauuuuugaacuuuagguccuuc

SEQ ID NO: 33771 - RNA, 32 nt, Homo Sapiens
caucgacaaaaauaucauuaugcaguguguga

SEQ ID NO: 33772 - RNA, 32 nt, Homo Sapiens
gguuacuguguaauaaaagaaaaaauacuugu

SEQ ID NO: 33773 - RNA, 32 nt, Homo Sapiens
guuagguagagcugucuguucacccucccauc

SEQ ID NO: 33774 - RNA, 32 nt, Homo Sapiens
aggggguuaguagacuauguggauugcggcag

SEQ ID NO: 33775 - RNA, 32 nt, Homo Sapiens
uggcaucugauaacaacgaaaaguauggaguc

SEQ ID NO: 33776 - RNA, 32 nt, Homo Sapiens
auuacaugccuucaaaaugggauuguacuaua

SEQ ID NO: 33777 - RNA, 32 nt, Homo Sapiens
ucuucguuuuaccugcuuuaacagucagagaa

SEQ ID NO: 33778 - RNA, 32 nt, Homo Sapiens
uuugaaaaugguaaaaguuugagaaacuuggg

SEQ ID NO: 33779 - RNA, 32 nt, Homo Sapiens
uuccaaugucauuguuucaguauuuauguucu

SEQ ID NO: 33780 - RNA, 32 nt, Homo Sapiens
guaagaucuagggcagggaggggggugcaaug

SEQ ID NO: 33781 - RNA, 32 nt, Homo Sapiens
ggcggugccgugguccucaccugccaugucac

SEQ ID NO: 33782 - RNA, 27 nt, Homo Sapiens
uggggguccuucuuaccggcucugacc

SEQ ID NO: 33783 - RNA, 32 nt, Homo Sapiens
uccucccugccagcaucccagucaccaccagg

SEQ ID NO: 33784 - RNA, 32 nt, Homo Sapiens
acugcuuaaaacccuuuccuacaggaugaagu

SEQ ID NO: 33785 - RNA, 32 nt, Homo Sapiens
aauuuuauauaugguuuaaauaauuguuaagc

SEQ ID NO: 33786 - RNA, 32 nt, Homo Sapiens
agaaaaguccccuguuuugugauguaggaugu

SEQ ID NO: 33787 - RNA, 32 nt, Homo Sapiens
uugaauauuacaccucauuuuacuacaccaca

SEQ ID NO: 33788 - RNA, 32 nt, Homo Sapiens
cagccacaagggggcgcucggaccaggcagcc

SEQ ID NO: 33789 - RNA, 32 nt, Homo Sapiens
ggaggcccaagcccagggcaggaaccuggagc

SEQ ID NO: 33790 - RNA, 32 nt, Homo Sapiens
gggaggcagaagccauggaucccgggcagcag

SEQ ID NO: 33791 - RNA, 32 nt, Homo Sapiens
agaagauauagaaauucuauuuuugugucuuu

SEQ ID NO: 33792 - RNA, 32 nt, Homo Sapiens
uaugcacugaugugucuucaauaaaaaucuug

SEQ ID NO: 33793 - RNA, 32 nt, Homo Sapiens
caagaguuuggggcgcggaccggaguaccuug

SEQ ID NO: 33794 - RNA, 32 nt, Homo Sapiens
cgggcaucagugacagccccccugcucccuca

SEQ ID NO: 33795 - RNA, 32 nt, Homo Sapiens
ucuguuaaaaauuaaaauaaaugauucuauuc

SEQ ID NO: 33796 - RNA, 32 nt, Homo Sapiens
accucuccucacggaggcccagccccaaagcc

SEQ ID NO: 33797 - RNA, 32 nt, Homo Sapiens
aaaaaacuucuuucuuucccccuccguuuauc

SEQ ID NO: 33798 - RNA, 32 nt, Homo Sapiens
cauaaauaaauuaaauaaaauaaccccgggca

SEQ ID NO: 33799 - RNA, 32 nt, Homo Sapiens
cgacucgggauccaaccuccccgcaccagccc

SEQ ID NO: 33800 - RNA, 32 nt, Homo Sapiens
ccguucccugcccuccucccuucccuggguga

SEQ ID NO: 33801 - RNA, 32 nt, Homo Sapiens
ggaguucuucccuguuuguccauauggugaac

SEQ ID NO: 33802 - RNA, 32 nt, Homo Sapiens
ugcuuccuuucugccaucaucucagagcauga

SEQ ID NO: 33803 - RNA, 32 nt, Homo Sapiens
ucaagaaagggagcucaggcuggauggaggaa

SEQ ID NO: 33804 - RNA, 32 nt, Homo Sapiens
acuccaggggagaugaccugggggaggaagug

SEQ ID NO: 33805 - RNA, 32 nt, Homo Sapiens
ugaaacaucuuuuagccaccaccacccuguug

SEQ ID NO: 33806 - RNA, 32 nt, Homo Sapiens
acucagauauauaucagcguaaacaugaaaaa

SEQ ID NO: 33807 - RNA, 32 nt, Homo Sapiens
cgugaccccucgcgcugccugcggccucgcgc

SEQ ID NO: 33808 - RNA, 32 nt, Homo Sapiens
ugcagagaccuccccacccccaguucugggcu

SEQ ID NO: 33809 - RNA, 32 nt, Homo Sapiens
cauuuaaaaauauuuucuaugugagaauuuuu

SEQ ID NO: 33810 - RNA, 32 nt, Homo Sapiens
gucucagccacccggggugcuguucagcugcc

SEQ ID NO: 33811 - RNA, 32 nt, Homo Sapiens
ugcggccaaggagggauucgcaggcgggccgg

SEQ ID NO: 33812 - RNA, 32 nt, Homo Sapiens
gucgugcccuucccucuccucagcccagagug

SEQ ID NO: 33813 - RNA, 31 nt, Homo Sapiens
uauacgaacauauaugagacuugaaucguag

SEQ ID NO: 33814 - RNA, 32 nt, Homo Sapiens
ccugggccacacgcaggcccuggugggaccac

SEQ ID NO: 33815 - RNA, 32 nt, Homo Sapiens
cggggcgggaggaggaagugaggccgcgcgga

SEQ ID NO: 33816 - RNA, 32 nt, Homo Sapiens
uccuguuuaugagaucgucacucucaagaggc

SEQ ID NO: 33817 - RNA, 32 nt, Homo Sapiens
cuuuugcugggccucccugcguguucccaucu

SEQ ID NO: 33818 - RNA, 32 nt, Homo Sapiens
ucaucugggggcccugguuuucuugucuacca

SEQ ID NO: 33819 - RNA, 32 nt, Homo Sapiens
gguuugagaggaacuggaaggggggugagggu

SEQ ID NO: 33820 - RNA, 32 nt, Homo Sapiens
aggcuccaaggugggaccagagcuuccagcau

SEQ ID NO: 33821 - RNA, 30 nt, Homo Sapiens
gcgaucccggguggcggcggcaacggcggu

SEQ ID NO: 33822 - RNA, 32 nt, Homo Sapiens
aauccuauucauauguuauucauugugugaaa

SEQ ID NO: 33823 - RNA, 32 nt, Homo Sapiens
agcaggagacgcccggcagccgggacggucgg

SEQ ID NO: 33824 - RNA, 32 nt, Homo Sapiens
aaguaaucaugugccaaagccagggcagagcu

SEQ ID NO: 33825 - RNA, 32 nt, Homo Sapiens
ggauuacaagcgugaaccacccugcccagcca

SEQ ID NO: 33826 - RNA, 32 nt, Homo Sapiens
aacacaggugugcugccuccucuccugccagg

SEQ ID NO: 33827 - RNA, 32 nt, Homo Sapiens
aaggauauuuauuuauaggccuuuuuuuuuuu

SEQ ID NO: 33828 - RNA, 32 nt, Homo Sapiens
gggccauguggcagccaugacacacaccacau

SEQ ID NO: 33829 - RNA, 32 nt, Homo Sapiens
auucuaaggggagucggugcaggaugccgcuu

SEQ ID NO: 33830 - RNA, 32 nt, Homo Sapiens
uuuuuuucuuuuucuuuuuuuuuuuuugagga

SEQ ID NO: 33831 - RNA, 32 nt, Homo Sapiens
cuaagcggaacaugugcuuuaucugugggaug

SEQ ID NO: 33832 - RNA, 32 nt, Homo Sapiens
gcucccacccgcccguggcccgcgcccauggc

SEQ ID NO: 33833 - RNA, 32 nt, Homo Sapiens
agcugcacacguguggaccccugugcaggguc

SEQ ID NO: 33834 - RNA, 32 nt, Homo Sapiens
uuuggauacuauuuguuuuucuuuguaggaaa

SEQ ID NO: 33835 - RNA, 32 nt, Homo Sapiens
cuaaugggaaaugugauuugauugauuuauuu

SEQ ID NO: 33836 - RNA, 32 nt, Homo Sapiens
aagaaagacacauuuuguuugugugacacuua

SEQ ID NO: 33837 - RNA, 32 nt, Homo Sapiens
uuuaagugcuuauuuuuauagaaguuugaaaa

SEQ ID NO: 33838 - RNA, 32 nt, Homo Sapiens
caacacgcaccucgugagacccgggaccugcc

SEQ ID NO: 33839 - RNA, 32 nt, Homo Sapiens
uccuuguuuuauuugcaagugcuucugacauc

SEQ ID NO: 33840 - RNA, 32 nt, Homo Sapiens
cucgaucaacuuuauaugauuaacucauauaa

SEQ ID NO: 33841 - RNA, 32 nt, Homo Sapiens
gggaggcccaggcagguggaugaccuaagguc

SEQ ID NO: 33842 - RNA, 32 nt, Homo Sapiens
acuauccccccuccuagugaagggagugggua

SEQ ID NO: 33843 - RNA, 32 nt, Homo Sapiens
cugaccuguccuuuuuuaucugcgcaugcgag

SEQ ID NO: 33844 - RNA, 32 nt, Homo Sapiens
agcagcgggaggaggcggcggcggcggcuagc

SEQ ID NO: 33845 - RNA, 32 nt, Homo Sapiens
gagaagacaaugaaaaacuguguaacagguga

SEQ ID NO: 33846 - RNA, 32 nt, Homo Sapiens
ccgcgcggggggcugauccccccaccucccuc

SEQ ID NO: 33847 - RNA, 32 nt, Homo Sapiens
gaggcaggaaaacagccagaagccaccuugac

SEQ ID NO: 33848 - RNA, 32 nt, Homo Sapiens
guggcuuacuguuuuucuuaaucucuuuuaaa

SEQ ID NO: 33849 - RNA, 32 nt, Homo Sapiens
aaaauccuacaauaauggagaugcccuagggc

SEQ ID NO: 33850 - RNA, 32 nt, Homo Sapiens
ucugagccgggcgcgggcgccuuccgcagaga

SEQ ID NO: 33851 - RNA, 28 nt, Homo Sapiens
uuuccuauugugagcauuauaaagauaa

SEQ ID NO: 33852 - RNA, 32 nt, Homo Sapiens
guuccugcuacccaucgugggaggccaccauc

SEQ ID NO: 33853 - RNA, 32 nt, Homo Sapiens
gaaugggagguucuuggugucuggccuggucu

SEQ ID NO: 33854 - RNA, 32 nt, Homo Sapiens
aagaguguauuaccauuaaagucauuaguaua

SEQ ID NO: 33855 - RNA, 32 nt, Homo Sapiens
cucugcugccccaccacgcggccugugaggag

SEQ ID NO: 33856 - RNA, 32 nt, Homo Sapiens
cauacagccuacuccuggguagacaacaauga

SEQ ID NO: 33857 - RNA, 32 nt, Homo Sapiens
uauguauguauuaauguauauacauggcuuaa

SEQ ID NO: 33858 - RNA, 32 nt, Homo Sapiens
cgucugcaaccuggcuuguucccacgacaaag

SEQ ID NO: 33859 - RNA, 32 nt, Homo Sapiens
gcccgccccaggccccagcagucuccgcuccc

SEQ ID NO: 33860 - RNA, 32 nt, Homo Sapiens
agaaacguuuauauccugugauuacucuagga

SEQ ID NO: 33861 - RNA, 32 nt, Homo Sapiens
gccuuaagugccuacuggaucccgggagccug

SEQ ID NO: 33862 - RNA, 32 nt, Homo Sapiens
auauuuugaucauuugcaaacacgccauuguc

SEQ ID NO: 33863 - RNA, 27 nt, Homo Sapiens
gaggcguucauuggcagcccccuagga

SEQ ID NO: 33864 - RNA, 32 nt, Homo Sapiens
ggagggguggucaggaugggcuggggggccca

SEQ ID NO: 33865 - RNA, 32 nt, Homo Sapiens
gcauucuccagacucugugcuuuccuaagaua

SEQ ID NO: 33866 - RNA, 32 nt, Homo Sapiens
agcgggugcggcggcugcugccgggccgggcg

SEQ ID NO: 33867 - RNA, 32 nt, Homo Sapiens
uuaauagguaaucaaggcaauucaguaucucc

SEQ ID NO: 33868 - RNA, 32 nt, Homo Sapiens
gcggccacgcgcgcuccgauggcugccaggag

SEQ ID NO: 33869 - RNA, 32 nt, Homo Sapiens
ggcccaaguauuuuuguuuacauucucucagu

SEQ ID NO: 33870 - RNA, 32 nt, Homo Sapiens
gauugacaaauauauuuaugaucuauucagcu

SEQ ID NO: 33871 - RNA, 32 nt, Homo Sapiens
auccuuccacacuuuccugacagaccagaacc

SEQ ID NO: 33872 - RNA, 32 nt, Homo Sapiens
auguuuguaaaaagagacuguuuugggggaau

SEQ ID NO: 33873 - RNA, 32 nt, Homo Sapiens
acuugaagaacaucaauuuuuagcgcuugccu

SEQ ID NO: 33874 - RNA, 32 nt, Homo Sapiens
gcaugcugggaccagccgcacccaggccccaa

SEQ ID NO: 33875 - RNA, 32 nt, Homo Sapiens
cugaacucuauuccuggccaguucacaggaag

SEQ ID NO: 33876 - RNA, 32 nt, Homo Sapiens
uuugcuuccagaauauauucacuuuaauauuu

SEQ ID NO: 33877 - RNA, 32 nt, Homo Sapiens
ccgcgucugcaccucugugguuccugcccuca

SEQ ID NO: 33878 - RNA, 32 nt, Homo Sapiens
gagcgccccugcuccagggaggaggcucaccg

SEQ ID NO: 33879 - RNA, 32 nt, Homo Sapiens
auagcuguuucaucauugucuucaggagagcu

SEQ ID NO: 33880 - RNA, 32 nt, Homo Sapiens
ucucccccaugacccaggauaacccuaugucu

SEQ ID NO: 33881 - RNA, 32 nt, Homo Sapiens
gaaaaaugcccauuugccuuuaaaaaaaaaag

SEQ ID NO: 33882 - RNA, 32 nt, Homo Sapiens
cugcauggggugcucuguugacaggcuuccca

SEQ ID NO: 33883 - RNA, 32 nt, Homo Sapiens
aggccggucuguagcggaucacuuccuuucgc

SEQ ID NO: 33884 - RNA, 32 nt, Homo Sapiens
aaauaaaugcauaauuaaaauauauuuggaca

SEQ ID NO: 33885 - RNA, 32 nt, Homo Sapiens
uuuuuauaucucacacuucacaccagugcauu

SEQ ID NO: 33886 - RNA, 32 nt, Homo Sapiens
cccaacaggguccccaggaccccgcucccauu

SEQ ID NO: 33887 - RNA, 32 nt, Homo Sapiens
acagguacuaccccuuuuuuucauuucaaacu

SEQ ID NO: 33888 - RNA, 32 nt, Homo Sapiens
cuacauaaaugucaguaaaccaaauaaaaguu

SEQ ID NO: 33889 - RNA, 32 nt, Homo Sapiens
cuuggcaaaauugaaauugaugauggggaagc

SEQ ID NO: 33890 - RNA, 32 nt, Homo Sapiens
gaccccagccccuggccuguaccuguuuccuc

SEQ ID NO: 33891 - RNA, 32 nt, Homo Sapiens
aaaagguacuaggauuagcugcaaucucuacu

SEQ ID NO: 33892 - RNA, 32 nt, Homo Sapiens
gaaaggaggaggaaugucuuucgagcuguggu

SEQ ID NO: 33893 - RNA, 32 nt, Homo Sapiens
uuaaucugucauuaaucccauccaaaguaugu

SEQ ID NO: 33894 - RNA, 32 nt, Homo Sapiens
uuccucccguacugcuuucaggucuuguaaaa

SEQ ID NO: 33895 - RNA, 32 nt, Homo Sapiens
guuuuaaaaaucacugcuucaaucuacuucaa

SEQ ID NO: 33896 - RNA, 32 nt, Homo Sapiens
auuuacaacuauauauuaacauggcuucaauu

SEQ ID NO: 33897 - RNA, 32 nt, Homo Sapiens
uuaauuuaaguacagcaauuucucauguaaug

SEQ ID NO: 33898 - RNA, 32 nt, Homo Sapiens
ucucgguggcggcggcagcggcggcggcccug

SEQ ID NO: 33899 - RNA, 32 nt, Homo Sapiens
ccgccuuccuucccuccuuuacuguauuagca

SEQ ID NO: 33900 - RNA, 32 nt, Homo Sapiens
agucuuccacacucaacugugggaugggaggg

SEQ ID NO: 33901 - RNA, 32 nt, Homo Sapiens
guaggacccaaguuucuggacuacuucagaau

SEQ ID NO: 33902 - RNA, 32 nt, Homo Sapiens
uuacuaauuuuugugauauuuucauguucaaa

SEQ ID NO: 33903 - RNA, 32 nt, Homo Sapiens
cccauucacaugccccuccuaacuccacaagc

SEQ ID NO: 33904 - RNA, 32 nt, Homo Sapiens
caaauuggaaaacaguucuauuuauccuccuc

SEQ ID NO: 33905 - RNA, 32 nt, Homo Sapiens
uuucauguacagcuuuuucuuuaccuuaccca

SEQ ID NO: 33906 - RNA, 32 nt, Homo Sapiens
gguggugcuggaugcuuguucuuuggccagcc

SEQ ID NO: 33907 - RNA, 32 nt, Homo Sapiens
aagcgggugagaaacaaaacuucuuuccauug

SEQ ID NO: 33908 - RNA, 32 nt, Homo Sapiens
acuuguuggucuguaucuuaguuucuuugggg

SEQ ID NO: 33909 - RNA, 32 nt, Homo Sapiens
uaucucaggauacauuuuuuaaaugauuuuuu

SEQ ID NO: 33910 - RNA, 32 nt, Homo Sapiens
auuguccuucaucguccaggggccuggcuccc

SEQ ID NO: 33911 - RNA, 32 nt, Homo Sapiens
uguucauguucuauccugcguguucucgagaa

SEQ ID NO: 33912 - RNA, 32 nt, Homo Sapiens
ugcucauaacugugucauuuggcuuuccaguc

SEQ ID NO: 33913 - RNA, 32 nt, Homo Sapiens
aagaggccuuagagcgagcagagcagcucugc

SEQ ID NO: 33914 - RNA, 32 nt, Homo Sapiens
guuuccugccuugcucuuuggaccacauuguc

SEQ ID NO: 33915 - RNA, 32 nt, Homo Sapiens
caaacguggcugccagcgcuagcucugcaugc

SEQ ID NO: 33916 - RNA, 32 nt, Homo Sapiens
caccauugccugcuccucccauggggcuuuag

SEQ ID NO: 33917 - RNA, 32 nt, Homo Sapiens
uaccgcuauauaaguaaagucuguaaaauuca

SEQ ID NO: 33918 - RNA, 32 nt, Homo Sapiens
gggaaccccggggugcccacaggccgcccugc

SEQ ID NO: 33919 - RNA, 32 nt, Homo Sapiens
uagcacauccuccaguuacauggcagaagagg

SEQ ID NO: 33920 - RNA, 32 nt, Homo Sapiens
caccucuuuucugcacaaauacuggaauucaa

SEQ ID NO: 33921 - RNA, 32 nt, Homo Sapiens
acgguacgcggaggcgcgaggagggaggcgcc

SEQ ID NO: 33922 - RNA, 32 nt, Homo Sapiens
cauauuggauaaggggcccacccugauccagu

SEQ ID NO: 33923 - RNA, 32 nt, Homo Sapiens
ccccacucggcuccucuccccccucgcgccca

SEQ ID NO: 33924 - RNA, 32 nt, Homo Sapiens
caggaaguaaaccgaagaagauggcccagcuc

SEQ ID NO: 33925 - RNA, 32 nt, Homo Sapiens
augggaaauggcauacguagcuuuuuaacuau

SEQ ID NO: 33926 - RNA, 32 nt, Homo Sapiens
ugucaguuuuucugccuuucccugcucuguuc

SEQ ID NO: 33927 - RNA, 32 nt, Homo Sapiens
gaugaaugugggggaacucagaggaacugggg

SEQ ID NO: 33928 - RNA, 32 nt, Homo Sapiens
cuuauaggaaaacuuucugacucugcuuggcc

SEQ ID NO: 33929 - RNA, 32 nt, Homo Sapiens
guguacacauaaaaagccaggcugcaaguggg

SEQ ID NO: 33930 - RNA, 32 nt, Homo Sapiens
gguuaaagacaccagcacuucugcuugcuggg

SEQ ID NO: 33931 - RNA, 32 nt, Homo Sapiens
uggagggggaggaggaggcggcggcggcgaag

SEQ ID NO: 33932 - RNA, 32 nt, Homo Sapiens
acauggugucugggcccuuggcacucuguuca

SEQ ID NO: 33933 - RNA, 32 nt, Homo Sapiens
acagacgagacugagguuaaacaucagaaaaa

SEQ ID NO: 33934 - RNA, 32 nt, Homo Sapiens
cggauccagaaaugcagucagaaggacccugc

SEQ ID NO: 33935 - RNA, 32 nt, Homo Sapiens
ucaccaacccaaaagcacucugagccuuguug

SEQ ID NO: 33936 - RNA, 32 nt, Homo Sapiens
cauucauugauuucaugguuaauugcuaguug

SEQ ID NO: 33937 - RNA, 32 nt, Homo Sapiens
agggaauaggggauguuuuaucagugaaugug

SEQ ID NO: 33938 - RNA, 32 nt, Homo Sapiens
cgccggugguggccguucuccguaagauggcg

SEQ ID NO: 33939 - RNA, 32 nt, Homo Sapiens
ggcggccccuccccuccccugcccuuaacccc

SEQ ID NO: 33940 - RNA, 32 nt, Homo Sapiens
aaacuagacauuaguuguuuugguugcuuugu

SEQ ID NO: 33941 - RNA, 32 nt, Homo Sapiens
agaguccgcggccggggcgcgggaggagccaa

SEQ ID NO: 33942 - RNA, 32 nt, Homo Sapiens
cacaggugacuucaccguuaggguggccggcu

SEQ ID NO: 33943 - RNA, 32 nt, Homo Sapiens
gagacacuccccccaaaccccgcugugaauac

SEQ ID NO: 33944 - RNA, 32 nt, Homo Sapiens
aguaguggagagcgggugggugggugugaagg

SEQ ID NO: 33945 - RNA, 32 nt, Homo Sapiens
acuguggcggguggagaggucugaauaaaccg

SEQ ID NO: 33946 - RNA, 32 nt, Homo Sapiens
uuuguguuguauauauucguauuccauguguu

SEQ ID NO: 33947 - RNA, 32 nt, Homo Sapiens
ucugguaaucauggcaguaagaauaauagcua

SEQ ID NO: 33948 - RNA, 29 nt, Homo Sapiens
acauacauauguaugcacagauagggucu

SEQ ID NO: 33949 - RNA, 32 nt, Homo Sapiens
cagauggaaggaccacugaggaccacaucacu

SEQ ID NO: 33950 - RNA, 32 nt, Homo Sapiens
ucuccgcaggccccggccgcggcguccucgac

SEQ ID NO: 33951 - RNA, 32 nt, Homo Sapiens
cagugucuagaaacccauuuugaaaguggaaa

SEQ ID NO: 33952 - RNA, 32 nt, Homo Sapiens
auguuuggaggaaaaaaagccuuuuuuuguaa

SEQ ID NO: 33953 - RNA, 32 nt, Homo Sapiens
gccagccuguguuccugaaugcagaugacaug

SEQ ID NO: 33954 - RNA, 32 nt, Homo Sapiens
ggcuggcgacgaacgccgggauuucggcggcc

SEQ ID NO: 33955 - RNA, 32 nt, Homo Sapiens
cacauggagugggacaggagggggcaccuucu

SEQ ID NO: 33956 - RNA, 32 nt, Homo Sapiens
guuuuggauaagcaguuucacccauuaccagu

SEQ ID NO: 33957 - RNA, 32 nt, Homo Sapiens
caccccugccccacccagggccaacaugacua

SEQ ID NO: 33958 - RNA, 32 nt, Homo Sapiens
cucuguacuugagguuucaaauaaaaauaaga

SEQ ID NO: 33959 - RNA, 32 nt, Homo Sapiens
guuccuucugguggguucguggucucacuggc

SEQ ID NO: 33960 - RNA, 32 nt, Homo Sapiens
uggucuucacccucccagacaagucaacucag

SEQ ID NO: 33961 - RNA, 32 nt, Homo Sapiens
gacugcccacccagcuguggcgggaggugcag

SEQ ID NO: 33962 - RNA, 32 nt, Homo Sapiens
ggcugggguuucuccuucuuuucaguucauug

SEQ ID NO: 33963 - RNA, 32 nt, Homo Sapiens
uaaagaagaaagaaacaaaggcugaaaaggcu

SEQ ID NO: 33964 - RNA, 32 nt, Homo Sapiens
gcacugccccucagcagggaugacucagcagg

SEQ ID NO: 33965 - RNA, 32 nt, Homo Sapiens
ccagccggugacugugguggcuccauccugca

SEQ ID NO: 33966 - RNA, 32 nt, Homo Sapiens
gaccuaaaaaaguuauuuugcagaugaaugug

SEQ ID NO: 33967 - RNA, 32 nt, Homo Sapiens
gggaaccggccgagcggcgcgcgcggaggugu

SEQ ID NO: 33968 - RNA, 32 nt, Homo Sapiens
uguaacauuucccaccaacucucuugcugucc

SEQ ID NO: 33969 - RNA, 32 nt, Homo Sapiens
auaccaguggggcucuggucuuuucccagagg

SEQ ID NO: 33970 - RNA, 32 nt, Homo Sapiens
guuuacugauccacucaacaaauauuuauuga

SEQ ID NO: 33971 - RNA, 32 nt, Homo Sapiens
uguuaaugcaauuauagaaauacaucggagac

SEQ ID NO: 33972 - RNA, 32 nt, Homo Sapiens
aaauguugagggcauauauucauuucaaagag

SEQ ID NO: 33973 - RNA, 32 nt, Homo Sapiens
aaagggcggaagcucccgcuugaggguagacg

SEQ ID NO: 33974 - RNA, 32 nt, Homo Sapiens
uauugagaaauagaccugaguucucaauuagg

SEQ ID NO: 33975 - RNA, 32 nt, Homo Sapiens
cuucaugugggaagaugagggacacacauggg

SEQ ID NO: 33976 - RNA, 32 nt, Homo Sapiens
gcaggugagagugucuagcaguucuugguaag

SEQ ID NO: 33977 - RNA, 32 nt, Homo Sapiens
ccuagcccggguccaggcagccaggcucccuc

SEQ ID NO: 33978 - RNA, 32 nt, Homo Sapiens
aucagacacacacacacacacacacacacaca

SEQ ID NO: 33979 - RNA, 32 nt, Homo Sapiens
gcccagacacguaacugggaccucaagggccu

SEQ ID NO: 33980 - RNA, 32 nt, Homo Sapiens
auccuuuccacccuauucccuaacucucggga

SEQ ID NO: 33981 - RNA, 32 nt, Homo Sapiens
cgaggccuggcggggccgcggggcccaggaau

SEQ ID NO: 33982 - RNA, 32 nt, Homo Sapiens
aggcugcgugcuagcuucggcgcggaucccug

SEQ ID NO: 33983 - RNA, 32 nt, Homo Sapiens
guguuuugagggcagaggaugaucuccuaauu

SEQ ID NO: 33984 - RNA, 32 nt, Homo Sapiens
aauuuuaccacuuuuccucuuuauaagcacau

SEQ ID NO: 33985 - RNA, 32 nt, Homo Sapiens
ucuggggacuugggugugacaccugcuugaca

SEQ ID NO: 33986 - RNA, 32 nt, Homo Sapiens
uugcugcucaucagcauccagguccucccguu

SEQ ID NO: 33987 - RNA, 32 nt, Homo Sapiens
gaaaguucacugggacucaguuuaccuuaaug

SEQ ID NO: 33988 - RNA, 32 nt, Homo Sapiens
gccucaugcucacccgggcuccagccagacac

SEQ ID NO: 33989 - RNA, 32 nt, Homo Sapiens
ugucagccacggaaacaacucuaauaucuggu

SEQ ID NO: 33990 - RNA, 32 nt, Homo Sapiens
uggcaucaauauacauaauacaugauugcaga

SEQ ID NO: 33991 - RNA, 32 nt, Homo Sapiens
agggcucugucacugcagacccagcgaccacc

SEQ ID NO: 33992 - RNA, 32 nt, Homo Sapiens
uucaguaacuucccuaagauuaugaaacugug

SEQ ID NO: 33993 - RNA, 32 nt, Homo Sapiens
augcaggagagugaccucacccugccccucug

SEQ ID NO: 33994 - RNA, 32 nt, Homo Sapiens
auuguccaguuauaagcguauuuagacugugg

SEQ ID NO: 33995 - RNA, 32 nt, Homo Sapiens
auucuaagcaaaagcacugcucugccacuggc

SEQ ID NO: 33996 - RNA, 31 nt, Homo Sapiens
acgaggagggcggucggugcuucccuccucg

SEQ ID NO: 33997 - RNA, 32 nt, Homo Sapiens
ggcuuauuuuccaucccaguucugggaggucu

SEQ ID NO: 33998 - RNA, 32 nt, Homo Sapiens
ucugccuggacgucccugcgggccccggggga

SEQ ID NO: 33999 - RNA, 32 nt, Homo Sapiens
uacaugaccacuuccucauuucuggggaagga

SEQ ID NO: 34000 - RNA, 32 nt, Homo Sapiens
uaaggugugggaaacugagaggggagagagaa

SEQ ID NO: 34001 - RNA, 32 nt, Homo Sapiens
cugaaccucagccgcgccgggaggcgagcccg

SEQ ID NO: 34002 - RNA, 32 nt, Homo Sapiens
gggaggggaagcuugagcugcugcugucacuc

SEQ ID NO: 34003 - RNA, 32 nt, Homo Sapiens
auuuaagauaaggaucuaaauacuguguuaaa

SEQ ID NO: 34004 - RNA, 32 nt, Homo Sapiens
guaacaagaugaugaauguggagggggaaaag

SEQ ID NO: 34005 - RNA, 32 nt, Homo Sapiens
gggcgagggaguggcgguucucgucccaaguu

SEQ ID NO: 34006 - RNA, 32 nt, Homo Sapiens
acccuuuccuuccuucccuggcuuguaacucc

SEQ ID NO: 34007 - RNA, 32 nt, Homo Sapiens
ggcaaagcugacuuugggaaagagggaccaga

SEQ ID NO: 34008 - RNA, 32 nt, Homo Sapiens
gggccuuucccuuuccucuuugccugcuauau

SEQ ID NO: 34009 - RNA, 32 nt, Homo Sapiens
ccagcccggcgcccagccaucuucccugagcc

SEQ ID NO: 34010 - RNA, 32 nt, Homo Sapiens
cuuugcugaauucauucauuuugaggcauaaa

SEQ ID NO: 34011 - RNA, 32 nt, Homo Sapiens
ggaguguagggaggggccgagcaggaggagga

SEQ ID NO: 34012 - RNA, 32 nt, Homo Sapiens
gccacucugauagaugagaaaguucuaauucu

SEQ ID NO: 34013 - RNA, 31 nt, Homo Sapiens
accuuuggccacugccuucccagcugcccgc

SEQ ID NO: 34014 - RNA, 32 nt, Homo Sapiens
agcguguuuuaugauuuaucauugggaaaauc

SEQ ID NO: 34015 - RNA, 32 nt, Homo Sapiens
uucagugcgacugcagucaguguugaguggug

SEQ ID NO: 34016 - RNA, 32 nt, Homo Sapiens
auguccugagggcggaucuugaucauggaugu

SEQ ID NO: 34017 - RNA, 32 nt, Homo Sapiens
gcacuuaaaaaagccagugucugguuacacau

SEQ ID NO: 34018 - RNA, 32 nt, Homo Sapiens
uccaacacauuauuuucuuuucagaguauuau

SEQ ID NO: 34019 - RNA, 32 nt, Homo Sapiens
uuuuaucagggacacuccaugggguggcuugu

SEQ ID NO: 34020 - RNA, 32 nt, Homo Sapiens
cugaccuugagccccagugcaggccugcuggu

SEQ ID NO: 34021 - RNA, 32 nt, Homo Sapiens
cgcgggugagguccgcgcagcugcuggggaag

SEQ ID NO: 34022 - RNA, 32 nt, Homo Sapiens
uggugcugcaguucuggggaaccacacagcca

SEQ ID NO: 34023 - RNA, 32 nt, Homo Sapiens
uuagucauaauggucuuuuuuauuuuguuuga

SEQ ID NO: 34024 - RNA, 32 nt, Homo Sapiens
caucuuccaggcucuccuuccaucaagucucu

SEQ ID NO: 34025 - RNA, 32 nt, Homo Sapiens
gcuggcauuagcauugcugggaucucaacuuc

SEQ ID NO: 34026 - RNA, 32 nt, Homo Sapiens
uuuuaaagcccauuucacgaggaacaaagauu

SEQ ID NO: 34027 - RNA, 32 nt, Homo Sapiens
caacccggugauaaacuugcucccucgccauu

SEQ ID NO: 34028 - RNA, 32 nt, Homo Sapiens
gcugaggagcagcuuuagguauggauugauga

SEQ ID NO: 34029 - RNA, 32 nt, Homo Sapiens
cucguaauuuuuccuguuauuuuaauaauaug

SEQ ID NO: 34030 - RNA, 32 nt, Homo Sapiens
cuuuuauacacacguaucucauuuuuaucaaa

SEQ ID NO: 34031 - RNA, 32 nt, Homo Sapiens
ucccuuugccuucccuucuucccacaaaagag

SEQ ID NO: 34032 - RNA, 32 nt, Homo Sapiens
agcuccaagcuguuaaagauauuuuuauucaa

SEQ ID NO: 34033 - RNA, 32 nt, Homo Sapiens
gccuacuuuucugcaaaaaugagauguacaga

SEQ ID NO: 34034 - RNA, 32 nt, Homo Sapiens
ggucuccggcgcccgccccucagacguaaugu

SEQ ID NO: 34035 - RNA, 32 nt, Homo Sapiens
cugccugcuugcuuucuggggacacuagcccu

SEQ ID NO: 34036 - RNA, 32 nt, Homo Sapiens
ugcagaccuugaugauacaugucucugaaaga

SEQ ID NO: 34037 - RNA, 32 nt, Homo Sapiens
auggaauacuguaucauaugcucaacucugaa

SEQ ID NO: 34038 - RNA, 32 nt, Homo Sapiens
ggaaugaauuugauguuuuuuauuuuguugag

SEQ ID NO: 34039 - RNA, 32 nt, Homo Sapiens
aaaaaaaaggagauuauaaaagggaugaugaa

SEQ ID NO: 34040 - RNA, 32 nt, Homo Sapiens
guucccuugccucuccuggauggguugucagc

SEQ ID NO: 34041 - RNA, 32 nt, Homo Sapiens
ucaaugagguguucgcagcagcagccacagga

SEQ ID NO: 34042 - RNA, 32 nt, Homo Sapiens
aacaguggcaggcacagcacuuacaagggugu

SEQ ID NO: 34043 - RNA, 32 nt, Homo Sapiens
cccaucucuaaaaaacaaaauuacccccuucu

SEQ ID NO: 34044 - RNA, 32 nt, Homo Sapiens
uuggcugaguacuggaauaaacagugagcaua

SEQ ID NO: 34045 - RNA, 32 nt, Homo Sapiens
auucuugacagcauucucgucaucucugagga

SEQ ID NO: 34046 - RNA, 32 nt, Homo Sapiens
cugggguucagugacacacuucuuaacuccca

SEQ ID NO: 34047 - RNA, 32 nt, Homo Sapiens
augaaggcaaaauaaagacuguuucugagaaa

SEQ ID NO: 34048 - RNA, 32 nt, Homo Sapiens
ugccuccuccucccuuucucccuuguggggaa

SEQ ID NO: 34049 - RNA, 32 nt, Homo Sapiens
gccgugcccgccccgccucccgcaggugagag

SEQ ID NO: 34050 - RNA, 32 nt, Homo Sapiens
uuaaccaaaauugcagaauggggggccaggcc

SEQ ID NO: 34051 - RNA, 32 nt, Homo Sapiens
gcccuacagaagacauagaagauggggaaaug

SEQ ID NO: 34052 - RNA, 32 nt, Homo Sapiens
ggcucccggugucuccucccggccgcucuacc

SEQ ID NO: 34053 - RNA, 32 nt, Homo Sapiens
cugggacccgcacugacagcgggaggcagagg

SEQ ID NO: 34054 - RNA, 32 nt, Homo Sapiens
uggcuuccuggccaccucuccucacccaucuu

SEQ ID NO: 34055 - RNA, 32 nt, Homo Sapiens
ugaaacuuaucugauggcauuuauugaaaacc

SEQ ID NO: 34056 - RNA, 32 nt, Homo Sapiens
ccauaauuuuaaaauuuacuugcaaucuuggu

SEQ ID NO: 34057 - RNA, 32 nt, Homo Sapiens
gcagagcuggaacgggagcgggcacagcugcu

SEQ ID NO: 34058 - RNA, 32 nt, Homo Sapiens
cuuucucuauuuucuuuuuuauuuaaccuaua

SEQ ID NO: 34059 - RNA, 32 nt, Homo Sapiens
aggcuugugugucuuguguugucuucgucugu

SEQ ID NO: 34060 - RNA, 32 nt, Homo Sapiens
ccuuacaaaaauuuagacuaguaacuuauuuc

SEQ ID NO: 34061 - RNA, 32 nt, Homo Sapiens
auaugcccauucuuuucacuuccucuccacag

SEQ ID NO: 34062 - RNA, 32 nt, Homo Sapiens
cuuguaauccuccaagcuucaaucugcacaca

SEQ ID NO: 34063 - RNA, 32 nt, Homo Sapiens
ggaagugggcucagaccccccucagccccagc

SEQ ID NO: 34064 - RNA, 32 nt, Homo Sapiens
guaauuauuugaugcaauuuuaucauaagagu

SEQ ID NO: 34065 - RNA, 32 nt, Homo Sapiens
cccucgccagaccaggacgcuuccucaagccc

SEQ ID NO: 34066 - RNA, 32 nt, Homo Sapiens
uuucacuuuauuccacuguuaaguaguauguu

SEQ ID NO: 34067 - RNA, 32 nt, Homo Sapiens
uugacagagugcuuugaaauuaugacaguaga

SEQ ID NO: 34068 - RNA, 32 nt, Homo Sapiens
gugaguugucuguuuugugucuuugauuuucu

SEQ ID NO: 34069 - RNA, 32 nt, Homo Sapiens
agugcuguuucugcauucauaaugcauuuauu

SEQ ID NO: 34070 - RNA, 32 nt, Homo Sapiens
agcgagcgacagagccaccaagcugggcggca

SEQ ID NO: 34071 - RNA, 32 nt, Homo Sapiens
gauggaacagagaaagcagagugcacagaaga

SEQ ID NO: 34072 - RNA, 32 nt, Homo Sapiens
gaaguugugcugaguucuguucccaccagcga

SEQ ID NO: 34073 - RNA, 32 nt, Homo Sapiens
cugcccgccuuggccucccaaagugcugacau

SEQ ID NO: 34074 - RNA, 32 nt, Homo Sapiens
uuaaguaauguaugugcgcucuguaaagugau

SEQ ID NO: 34075 - RNA, 32 nt, Homo Sapiens
auaccuauaaaacagguaauuuugacaaauag

SEQ ID NO: 34076 - RNA, 32 nt, Homo Sapiens
accaucacccucggccucuuccugugaaugcu

SEQ ID NO: 34077 - RNA, 32 nt, Homo Sapiens
gguggggugcgguggcucucggccuccgaaaa

SEQ ID NO: 34078 - RNA, 32 nt, Homo Sapiens
uccaucccaagcaugguuaagagggagcacgg

SEQ ID NO: 34079 - RNA, 32 nt, Homo Sapiens
uuuccaacuugagauguauaaaacuagagcug

SEQ ID NO: 34080 - RNA, 32 nt, Homo Sapiens
cccuaaccgccacccccucccccugucucccu

SEQ ID NO: 34081 - RNA, 32 nt, Homo Sapiens
uugaggaggagcuggccugcgguggagggauc

SEQ ID NO: 34082 - RNA, 30 nt, Homo Sapiens
ugcuuugucuguguuacaaugcuaugccca

SEQ ID NO: 34083 - RNA, 32 nt, Homo Sapiens
cugcggcagcuucagcuggcagagaggcuuuc

SEQ ID NO: 34084 - RNA, 32 nt, Homo Sapiens
cagcuuucuuccucuuuccccuccuucugagu

SEQ ID NO: 34085 - RNA, 32 nt, Homo Sapiens
gagcagcaccgcugcgcugggaagugaggcgg

SEQ ID NO: 34086 - RNA, 32 nt, Homo Sapiens
ucaguggcacacaccaaaaaaccgggauuauu

SEQ ID NO: 34087 - RNA, 32 nt, Homo Sapiens
cggccgugacgaggcgcucccggagcugagcg

SEQ ID NO: 34088 - RNA, 32 nt, Homo Sapiens
ccacgcgcccccggagacgcccuuuccgugug

SEQ ID NO: 34089 - RNA, 32 nt, Homo Sapiens
ggucuggauaucaguacaugacaacauauacu

SEQ ID NO: 34090 - RNA, 32 nt, Homo Sapiens
acuuggagccuccagugugcgucagggucugu

SEQ ID NO: 34091 - RNA, 32 nt, Homo Sapiens
gaaugugcggccagcucccuccccuugacccc

SEQ ID NO: 34092 - RNA, 32 nt, Homo Sapiens
auaccaaaggauuaucuccaauauuccagggc

SEQ ID NO: 34093 - RNA, 32 nt, Homo Sapiens
ucucuguaggaugcaaaacauccaguuguaau

SEQ ID NO: 34094 - RNA, 32 nt, Homo Sapiens
ucugcuucauuuccucugagcuguuaucuugu

SEQ ID NO: 34095 - RNA, 30 nt, Homo Sapiens
gagauuguuugcagcauagaagcuccgcgg

SEQ ID NO: 34096 - RNA, 32 nt, Homo Sapiens
cccgcccccagcugccaguccccagcagcuca

SEQ ID NO: 34097 - RNA, 32 nt, Homo Sapiens
guacgcaggguggaccggguggugagugcgaa

SEQ ID NO: 34098 - RNA, 32 nt, Homo Sapiens
uugaaguuuucaaaacaaaagcauuaaacaca

SEQ ID NO: 34099 - RNA, 32 nt, Homo Sapiens
gcccgaagccccagcuugcccuggccugugcc

SEQ ID NO: 34100 - RNA, 32 nt, Homo Sapiens
acauccacuccagagauaccuucucgaaacaa

SEQ ID NO: 34101 - RNA, 32 nt, Homo Sapiens
cacucuccugucauccaguuggcucccaugcu

SEQ ID NO: 34102 - RNA, 32 nt, Homo Sapiens
gcccagauaucaccccugaggacccaugcgcc

SEQ ID NO: 34103 - RNA, 32 nt, Homo Sapiens
cugaccugcccccgcucugccaucagccccug

SEQ ID NO: 34104 - RNA, 32 nt, Homo Sapiens
ccgugggccccgccccggcguccggagcagga

SEQ ID NO: 34105 - RNA, 32 nt, Homo Sapiens
ccagcgacucuauagucucucuaggucauagc

SEQ ID NO: 34106 - RNA, 32 nt, Homo Sapiens
uuggccaaggccagugcagccccagguucccg

SEQ ID NO: 34107 - RNA, 32 nt, Homo Sapiens
gccccuagcuuuggcccucacaaacuugugag

SEQ ID NO: 34108 - RNA, 32 nt, Homo Sapiens
aggaaggagguaggcaccuuucugagcuuauu

SEQ ID NO: 34109 - RNA, 32 nt, Homo Sapiens
caaacaaaaaauacaaaaauuagccagccacg

SEQ ID NO: 34110 - RNA, 32 nt, Homo Sapiens
ugucuggguagucauggauuucugcugacauu

SEQ ID NO: 34111 - RNA, 32 nt, Homo Sapiens
ggugugaugucugcggcucaccaucuccaccc

SEQ ID NO: 34112 - RNA, 31 nt, Homo Sapiens
uaccuaacucccuaggccugaguuagcuguu

SEQ ID NO: 34113 - RNA, 32 nt, Homo Sapiens
gacaaccgacgaagaaaccgacgacaaaucuu

SEQ ID NO: 34114 - RNA, 32 nt, Homo Sapiens
caccaaaagaggguagggagggguggacaaaa

SEQ ID NO: 34115 - RNA, 32 nt, Homo Sapiens
uguaagaaagcgguauaguccaggcgcagugg

SEQ ID NO: 34116 - RNA, 31 nt, Homo Sapiens
caugauagaaauaaacagguuguugggggua

SEQ ID NO: 34117 - RNA, 32 nt, Homo Sapiens
agguaauacuucgcaauugauuagauuuucag

SEQ ID NO: 34118 - RNA, 32 nt, Homo Sapiens
ugagacaugcuucuuugguuuauaaugagaug

SEQ ID NO: 34119 - RNA, 32 nt, Homo Sapiens
cuucccaguagggcggccgagcagaggcgccc

SEQ ID NO: 34120 - RNA, 32 nt, Homo Sapiens
agcccugcccucagcccucgugcccaccccug

SEQ ID NO: 34121 - RNA, 32 nt, Homo Sapiens
aagaacuuaagaugacgauaagagucuaaauu

SEQ ID NO: 34122 - RNA, 32 nt, Homo Sapiens
ggguggcgggguuccugcgcgcggcccgccau

SEQ ID NO: 34123 - RNA, 32 nt, Homo Sapiens
gcacagcugcugaggaaggggcugggaguaaa

SEQ ID NO: 34124 - RNA, 29 nt, Homo Sapiens
uugcaaucuauccaucugacaaaggucua

SEQ ID NO: 34125 - RNA, 32 nt, Homo Sapiens
ccugccaagcccagcccuccagagccagcccu

SEQ ID NO: 34126 - RNA, 32 nt, Homo Sapiens
aggcggcgggcucggcgggggccauggagcug

SEQ ID NO: 34127 - RNA, 32 nt, Homo Sapiens
agccccagacuugggcuagagcagaaggcaua

SEQ ID NO: 34128 - RNA, 32 nt, Homo Sapiens
aggggccccguccugagagguccucagcgucu

SEQ ID NO: 34129 - RNA, 32 nt, Homo Sapiens
acuucagccugggugacagagaaggacuccgu

SEQ ID NO: 34130 - RNA, 32 nt, Homo Sapiens
uguguuguuugguucuacugcauuguggagca

SEQ ID NO: 34131 - RNA, 32 nt, Homo Sapiens
acauauacauauacuuguaugaagauaugugu

SEQ ID NO: 34132 - RNA, 32 nt, Homo Sapiens
gccaacaccuauccuugaggaauagaaagauc

SEQ ID NO: 34133 - RNA, 32 nt, Homo Sapiens
auugaugauagcaugaccauagcuuugcugga

SEQ ID NO: 34134 - RNA, 32 nt, Homo Sapiens
ugucccagggcuggagaugcuucccaaggagg

SEQ ID NO: 34135 - RNA, 32 nt, Homo Sapiens
acauguccaggcuacucacuuuagugacuagg

SEQ ID NO: 34136 - RNA, 32 nt, Homo Sapiens
cucaggcacaaagccugcugcagcuggcccug

SEQ ID NO: 34137 - RNA, 32 nt, Homo Sapiens
uuaaccuugugguuaaaacaaccacagauacu

SEQ ID NO: 34138 - RNA, 32 nt, Homo Sapiens
cccuccuuggggugaggcauccuugagaaaca

SEQ ID NO: 34139 - RNA, 32 nt, Homo Sapiens
acguuggguugcuuccuaggccuggcugaguu

SEQ ID NO: 34140 - RNA, 32 nt, Homo Sapiens
aaagcaaugaauugcaugagaaacaaaaguuu

SEQ ID NO: 34141 - RNA, 32 nt, Homo Sapiens
gcggaagguggacgaggcaccguccgaggacc

SEQ ID NO: 34142 - RNA, 31 nt, Homo Sapiens
ccacaguggacuuccaaagugcugggauuac

SEQ ID NO: 34143 - RNA, 32 nt, Homo Sapiens
acggugugucugccaggccacggugucccagg

SEQ ID NO: 34144 - RNA, 30 nt, Homo Sapiens
gcgccgcgccgcuugccgccgggcuagcac

SEQ ID NO: 34145 - RNA, 28 nt, Homo Sapiens
gcuguuccugaauaaacucuuucuuagg

SEQ ID NO: 34146 - RNA, 32 nt, Homo Sapiens
cccauacuccagccucuuuccuccuccucccg

SEQ ID NO: 34147 - RNA, 32 nt, Homo Sapiens
aagugggguuggugggggucgagcgggcagca

SEQ ID NO: 34148 - RNA, 32 nt, Homo Sapiens
agauucucauucacgggacuaguuagcuuuaa

SEQ ID NO: 34149 - RNA, 32 nt, Homo Sapiens
gcgucccauaacccuuuccccagcuugguguu

SEQ ID NO: 34150 - RNA, 32 nt, Homo Sapiens
gaggugcagcccgcguaugcggcggccggcuu

SEQ ID NO: 34151 - RNA, 32 nt, Homo Sapiens
cacaagagaagcugauggggaguaaacccugg

SEQ ID NO: 34152 - RNA, 32 nt, Homo Sapiens
gagaccccauccccucagcccucaaccuuugu

SEQ ID NO: 34153 - RNA, 32 nt, Homo Sapiens
gaaccaagaaugcaucuugucuuguucuugca

SEQ ID NO: 34154 - RNA, 32 nt, Homo Sapiens
ccaccacccggaggagcagcuccugccccugu

SEQ ID NO: 34155 - RNA, 32 nt, Homo Sapiens
ccuuguacugaaugacagacuauuacuacguu

SEQ ID NO: 34156 - RNA, 32 nt, Homo Sapiens
cauauuuguuagcagagccccucuuaucuuga

SEQ ID NO: 34157 - RNA, 32 nt, Homo Sapiens
gaaauccuaaaaugaaugugaacaacagagug

SEQ ID NO: 34158 - RNA, 32 nt, Homo Sapiens
cgaaaaucaaaauaaaugcaagcugagguuuu

SEQ ID NO: 34159 - RNA, 32 nt, Homo Sapiens
uauguuuacaguaugauuuaaagucugauuca

SEQ ID NO: 34160 - RNA, 31 nt, Homo Sapiens
ugcacaggugcccaggcuccaaggacagcuc

SEQ ID NO: 34161 - RNA, 32 nt, Homo Sapiens
uguacuaaaugccaauaaagccacauacuuau

SEQ ID NO: 34162 - RNA, 32 nt, Homo Sapiens
ucaugucuucagggaugaccgcccuugcuuca

SEQ ID NO: 34163 - RNA, 32 nt, Homo Sapiens
uuugccucgcuggcagaguugggucaagugcc

SEQ ID NO: 34164 - RNA, 32 nt, Homo Sapiens
ugucuccaaacaaaaagaaaagauaauuacuu

SEQ ID NO: 34165 - RNA, 32 nt, Homo Sapiens
agcucacaagcacccgugggccuggggugugc

SEQ ID NO: 34166 - RNA, 32 nt, Homo Sapiens
uguacugguaugagacuaucaguacgauacga

SEQ ID NO: 34167 - RNA, 32 nt, Homo Sapiens
cccugcccuggccacuggcccuguuucucccc

SEQ ID NO: 34168 - RNA, 30 nt, Homo Sapiens
cgcccaggaugccgcgcggggacucggagc

SEQ ID NO: 34169 - RNA, 32 nt, Homo Sapiens
guacucagaacacuuagaauugcccacaguug

SEQ ID NO: 34170 - RNA, 32 nt, Homo Sapiens
augcuaagcacuuuuguaucugcacaauucag

SEQ ID NO: 34171 - RNA, 32 nt, Homo Sapiens
agcugugugaauguauguaauugugugugggg

SEQ ID NO: 34172 - RNA, 32 nt, Homo Sapiens
gaauagucuuuaugccacggacuagacccagu

SEQ ID NO: 34173 - RNA, 32 nt, Homo Sapiens
gcucuauucuuuucucuuucuucauuuaacau

SEQ ID NO: 34174 - RNA, 32 nt, Homo Sapiens
gauucauucuuuuauuucuacucauucauuca

SEQ ID NO: 34175 - RNA, 32 nt, Homo Sapiens
cuagauuuguuuucuuuuuguuuuuguuuauu

SEQ ID NO: 34176 - RNA, 32 nt, Homo Sapiens
ggaaauauugaccucugaaacuugcugagcau

SEQ ID NO: 34177 - RNA, 32 nt, Homo Sapiens
ugcgaccuagguuaaugagaccaaauucuagg

SEQ ID NO: 34178 - RNA, 32 nt, Homo Sapiens
guaggacaaggaacacaaaacccaggagaccu

SEQ ID NO: 34179 - RNA, 32 nt, Homo Sapiens
cacuuguugugaacuauuauauuguuacucuc

SEQ ID NO: 34180 - RNA, 32 nt, Homo Sapiens
uuauugaaauaaaagaagucuaagcugaccug

SEQ ID NO: 34181 - RNA, 32 nt, Homo Sapiens
uaucuugcguuuuaaauucuuaauaagguccu

SEQ ID NO: 34182 - RNA, 32 nt, Homo Sapiens
cugccacugcgcacaugcuggugcccgucuuc

SEQ ID NO: 34183 - RNA, 32 nt, Homo Sapiens
gggcaccuauuaugcuacauaucauguuaggu

SEQ ID NO: 34184 - RNA, 32 nt, Homo Sapiens
uaaauauuguuucauucuucucucuuccuguc

SEQ ID NO: 34185 - RNA, 32 nt, Homo Sapiens
ccugccccccagugcccauuccaggucaccag

SEQ ID NO: 34186 - RNA, 32 nt, Homo Sapiens
uuaaagacauauuugcacaaaaccuuuguuua

SEQ ID NO: 34187 - RNA, 30 nt, Homo Sapiens
acucgcgggcuucugcugggucccgccuga

SEQ ID NO: 34188 - RNA, 32 nt, Homo Sapiens
gagcagcccaggcucagcauggagcccacuua

SEQ ID NO: 34189 - RNA, 32 nt, Homo Sapiens
auuguuguucauaagaauuuuacuuuaguuau

SEQ ID NO: 34190 - RNA, 32 nt, Homo Sapiens
uucuuccucccccaggagcacccauucucucu

SEQ ID NO: 34191 - RNA, 32 nt, Homo Sapiens
cuguugcucagcgcccucuaagcuuugguguu

SEQ ID NO: 34192 - RNA, 32 nt, Homo Sapiens
uuuguacuuucauuuuaauuauuuucuaacag

SEQ ID NO: 34193 - RNA, 32 nt, Homo Sapiens
caaaagcagggaaaguuacagauucaaacagc

SEQ ID NO: 34194 - RNA, 32 nt, Homo Sapiens
gcuucauuguuccagauguaacagguuugaaa

SEQ ID NO: 34195 - RNA, 32 nt, Homo Sapiens
uggggaggacagcccggcacccugacccccgc

SEQ ID NO: 34196 - RNA, 32 nt, Homo Sapiens
augucucccgguuucuucuuucaaaauuuccu

SEQ ID NO: 34197 - RNA, 32 nt, Homo Sapiens
uucuuugaggggauccuggauguguguguucu

SEQ ID NO: 34198 - RNA, 32 nt, Homo Sapiens
auauuuucuucaccuacucuccaaauauugua

SEQ ID NO: 34199 - RNA, 32 nt, Homo Sapiens
cuuuucuuuuucucccuaaacuguacauguga

SEQ ID NO: 34200 - RNA, 32 nt, Homo Sapiens
ggcugcccucaggaagaccaguguugcccgag

SEQ ID NO: 34201 - RNA, 32 nt, Homo Sapiens
caugucuccaacuggggugcuucuuacaaccc

SEQ ID NO: 34202 - RNA, 32 nt, Homo Sapiens
ccucagcccucccagccuacuccccaucccag

SEQ ID NO: 34203 - RNA, 32 nt, Homo Sapiens
gcggggcagucgcgggaugcgcccgggagcca

SEQ ID NO: 34204 - RNA, 32 nt, Homo Sapiens
uugcacugugagguaagcaagagggcaaggaa

SEQ ID NO: 34205 - RNA, 32 nt, Homo Sapiens
uaucagacucggaaucuauuuuucucauugcu

SEQ ID NO: 34206 - RNA, 32 nt, Homo Sapiens
gggagccguagaggguggccgacggcggcggc

SEQ ID NO: 34207 - RNA, 32 nt, Homo Sapiens
uggcucugugaaaacauauuugugaaaagagu

SEQ ID NO: 34208 - RNA, 32 nt, Homo Sapiens
cccgaaaaaaucagcgccuggaauagaagcua

SEQ ID NO: 34209 - RNA, 32 nt, Homo Sapiens
aagagggaacugugugcuccaaugcagaugug

SEQ ID NO: 34210 - RNA, 32 nt, Homo Sapiens
ucucuccacaccuaggcaauaauuacgcuuaa

SEQ ID NO: 34211 - RNA, 32 nt, Homo Sapiens
gccccgcccucgccccgcccccgcccccgcuc

SEQ ID NO: 34212 - RNA, 32 nt, Homo Sapiens
gaagccggcggcgcagcugcccggggcgaggg

SEQ ID NO: 34213 - RNA, 32 nt, Homo Sapiens
uuuuuuuuuuuuuuuuuuuuuaauuaucucuu

SEQ ID NO: 34214 - RNA, 32 nt, Homo Sapiens
cccaugagguauggaaggagcgggcacuggcc

SEQ ID NO: 34215 - RNA, 32 nt, Homo Sapiens
cacacacacacacacacacacacacacaccgu

SEQ ID NO: 34216 - RNA, 32 nt, Homo Sapiens
ugucugguuuuccaucuguuagcauuucagac

SEQ ID NO: 34217 - RNA, 32 nt, Homo Sapiens
ugguggcgauccgcaaccuggaccccagugag

SEQ ID NO: 34218 - RNA, 32 nt, Homo Sapiens
ugguguacagcuuggacuuuggugggcaucug

SEQ ID NO: 34219 - RNA, 32 nt, Homo Sapiens
cauuaccucuagaaaccucaaacaaguagaaa

SEQ ID NO: 34220 - RNA, 32 nt, Homo Sapiens
cgcgcauguuuccucuuuuccugguuucucaa

SEQ ID NO: 34221 - RNA, 32 nt, Homo Sapiens
ccuuuugggcccagcucuugcuucauuccugg

SEQ ID NO: 34222 - RNA, 32 nt, Homo Sapiens
caaggaggggagagaaguguaugugcauuugu

SEQ ID NO: 34223 - RNA, 32 nt, Homo Sapiens
aguagagacagaguuucaccauauuagccugg

SEQ ID NO: 34224 - RNA, 32 nt, Homo Sapiens
gauaauauugccuuauuaaaucuucaaaaaau

SEQ ID NO: 34225 - RNA, 32 nt, Homo Sapiens
guggccugucuccuccacucuccuccucaccc

SEQ ID NO: 34226 - RNA, 32 nt, Homo Sapiens
augaugcuuaaaucguuaauuuuauacuuaac

SEQ ID NO: 34227 - RNA, 32 nt, Homo Sapiens
uggcucgcaccucucgagcugugcccugggca

SEQ ID NO: 34228 - RNA, 32 nt, Homo Sapiens
guguaccuuccauuuuaaaauuuuucuucaga

SEQ ID NO: 34229 - RNA, 30 nt, Homo Sapiens
ggcccaggcaggcggccuauccugauccuu

SEQ ID NO: 34230 - RNA, 32 nt, Homo Sapiens
ccuacaucagucaacaacuuacacuuauuuua

SEQ ID NO: 34231 - RNA, 32 nt, Homo Sapiens
cagccaggcccggcccagggagcuacaaaccc

SEQ ID NO: 34232 - RNA, 32 nt, Homo Sapiens
caccugcaaucccagcacuuugggagaccaag

SEQ ID NO: 34233 - RNA, 32 nt, Homo Sapiens
gggccacaggagaggaggggacaggcucucag

SEQ ID NO: 34234 - RNA, 32 nt, Homo Sapiens
gcucuacgccugcgacgccgccgcgagguucc

SEQ ID NO: 34235 - RNA, 32 nt, Homo Sapiens
cggcgggcucugccuccgccgagggacagccg

SEQ ID NO: 34236 - RNA, 32 nt, Homo Sapiens
uuuuggaaaaggaaaaacuuaauaguuacaca

SEQ ID NO: 34237 - RNA, 32 nt, Homo Sapiens
uuaaaggaggcaaguauaaauuuucuaauaag

SEQ ID NO: 34238 - RNA, 32 nt, Homo Sapiens
agcuugcaaggccagcaguggcugagagcuga

SEQ ID NO: 34239 - RNA, 32 nt, Homo Sapiens
accggggucugcggccggccccuagcuggccc

SEQ ID NO: 34240 - RNA, 32 nt, Homo Sapiens
gccgcuucccggugccccgggcaugggugcgg

SEQ ID NO: 34241 - RNA, 32 nt, Homo Sapiens
agagagaucauuauuucuuaaagauuggccau

SEQ ID NO: 34242 - RNA, 32 nt, Homo Sapiens
auuuguguuuucugcccuuuuccucuccagcc

SEQ ID NO: 34243 - RNA, 32 nt, Homo Sapiens
gauccuagaaaagaggcuguucaggaugggga

SEQ ID NO: 34244 - RNA, 32 nt, Homo Sapiens
caauuacccagucuuagauaguucuuuauagc

SEQ ID NO: 34245 - RNA, 32 nt, Homo Sapiens
uuagucauggguggaagaaaaaccacaccccc

SEQ ID NO: 34246 - RNA, 32 nt, Homo Sapiens
cucacaaucaguaaugugugucuuuguaucuc

SEQ ID NO: 34247 - RNA, 32 nt, Homo Sapiens
gauaagacagagcuuguuaacuguuuuggcag

SEQ ID NO: 34248 - RNA, 32 nt, Homo Sapiens
uugcuucugggccagaggaagagaaugagacu

SEQ ID NO: 34249 - RNA, 32 nt, Homo Sapiens
cuguucauccugucgggccgcgacgucaccua

SEQ ID NO: 34250 - RNA, 32 nt, Homo Sapiens
guaagguuuucuuuuucuauuguacaagucaa

SEQ ID NO: 34251 - RNA, 32 nt, Homo Sapiens
guccucuccaaccuggacccagccccacuugc

SEQ ID NO: 34252 - RNA, 32 nt, Homo Sapiens
uccuggcugauccaagugcagugguauuuaca

SEQ ID NO: 34253 - RNA, 32 nt, Homo Sapiens
gacaccacuccaggcucauagccccgucuuga

SEQ ID NO: 34254 - RNA, 32 nt, Homo Sapiens
ggccgcugcuggggaggacgcuggccagcgug

SEQ ID NO: 34255 - RNA, 32 nt, Homo Sapiens
ccugaaaaucauaugggcuuggauuuggauau

SEQ ID NO: 34256 - RNA, 32 nt, Homo Sapiens
cuugugaccuccccccucugaccuccagcuga

SEQ ID NO: 34257 - RNA, 32 nt, Homo Sapiens
aaagguaaugagugaaggaaagaauaguagca

SEQ ID NO: 34258 - RNA, 32 nt, Homo Sapiens
cucccacaaccugcuccgggcgcuggacguug

SEQ ID NO: 34259 - RNA, 32 nt, Homo Sapiens
acauucagcuauaaaaaggaauaaaguaucga

SEQ ID NO: 34260 - RNA, 32 nt, Homo Sapiens
ucaguuuauuuuuugcuuuggucgaacuuggu

SEQ ID NO: 34261 - RNA, 32 nt, Homo Sapiens
acauugaugaaaauaaaaauuuagcaaauugu

SEQ ID NO: 34262 - RNA, 32 nt, Homo Sapiens
caaagauggacaccacacccccugcccgcuau

SEQ ID NO: 34263 - RNA, 32 nt, Homo Sapiens
acagccccaagccugagacccggaccugagca

SEQ ID NO: 34264 - RNA, 32 nt, Homo Sapiens
aauuugagaaacuuacguauaucuuaauucug

SEQ ID NO: 34265 - RNA, 32 nt, Homo Sapiens
aggcaagacuuccauuguuuuaccaaaaaauu

SEQ ID NO: 34266 - RNA, 32 nt, Homo Sapiens
agugccccagaauugggaaucuauucaugagu

SEQ ID NO: 34267 - RNA, 32 nt, Homo Sapiens
agauaaaggacuagagccgggauacuuucaga

SEQ ID NO: 34268 - RNA, 32 nt, Homo Sapiens
acccaggaggccucugaugaccaagggcuuuc

SEQ ID NO: 34269 - RNA, 31 nt, Homo Sapiens
cccaccacuguauuuugaccaaauaaugaca

SEQ ID NO: 34270 - RNA, 32 nt, Homo Sapiens
gacaggucauggaauucucauccaccaucgaa

SEQ ID NO: 34271 - RNA, 32 nt, Homo Sapiens
cgccgaggaaaagaauggggagggucagcagu

SEQ ID NO: 34272 - RNA, 32 nt, Homo Sapiens
aaaaaggguuuuagguugauuuuuguaauuuc

SEQ ID NO: 34273 - RNA, 32 nt, Homo Sapiens
auugccuuauauuuuuaaugauuuaauguuau

SEQ ID NO: 34274 - RNA, 32 nt, Homo Sapiens
aaaaauucacugaccaaccaaccaaacuccac

SEQ ID NO: 34275 - RNA, 32 nt, Homo Sapiens
gaagucuuacagaaacagcaaaaucuuacuaa

SEQ ID NO: 34276 - RNA, 32 nt, Homo Sapiens
aaucacugggaggagggaaacugaggcccgag

SEQ ID NO: 34277 - RNA, 32 nt, Homo Sapiens
gaguggcggggcggggcagaggugagggcugg

SEQ ID NO: 34278 - RNA, 32 nt, Homo Sapiens
ggaaacuggcgguggccgcggccgccgagucg

SEQ ID NO: 34279 - RNA, 32 nt, Homo Sapiens
cagagcgggaugccaccagcuugcccaaaggg

SEQ ID NO: 34280 - RNA, 32 nt, Homo Sapiens
agugaaguugucuauuugauauuuaacccuua

SEQ ID NO: 34281 - RNA, 32 nt, Homo Sapiens
uuuuuuaaaccugauuaacauaaaaaaauuag

SEQ ID NO: 34282 - RNA, 32 nt, Homo Sapiens
ugggugccuggcuuggcaacugcuagagcagg

SEQ ID NO: 34283 - RNA, 32 nt, Homo Sapiens
aaaaauaaaauaggcacauuuagaauucagag

SEQ ID NO: 34284 - RNA, 32 nt, Homo Sapiens
aauuuaucggguggagggauugaucggagagg

SEQ ID NO: 34285 - RNA, 32 nt, Homo Sapiens
auuuuugauguuuauauauaaacucuauaucc

SEQ ID NO: 34286 - RNA, 32 nt, Homo Sapiens
ugguauacauguaauguauucuguaaaaaagu

SEQ ID NO: 34287 - RNA, 32 nt, Homo Sapiens
uagauauagacauauguagauacauaccaugu

SEQ ID NO: 34288 - RNA, 29 nt, Homo Sapiens
gccuuuuuaaaauuuaauuuucuagcugg

SEQ ID NO: 34289 - RNA, 32 nt, Homo Sapiens
aacuaacgaugggaaauguauuacuucuguac

SEQ ID NO: 34290 - RNA, 32 nt, Homo Sapiens
gcgcaggcgcggugcuucgcagcccgcuuccg

SEQ ID NO: 34291 - RNA, 30 nt, Homo Sapiens
ggcauaggcaggcagaguggaacccugccu

SEQ ID NO: 34292 - RNA, 32 nt, Homo Sapiens
uacgagugaaacucuguccucccgcgaggacc

SEQ ID NO: 34293 - RNA, 32 nt, Homo Sapiens
gucuuucagaauaaaccaaguuuuuguaaauu

SEQ ID NO: 34294 - RNA, 32 nt, Homo Sapiens
gugucauucucuucuuuucuuuuauagucaug

SEQ ID NO: 34295 - RNA, 32 nt, Homo Sapiens
uaauugagggaagagaugggagccagggcacg

SEQ ID NO: 34296 - RNA, 32 nt, Homo Sapiens
ugcaguccaauuauauaguugaggauggugua

SEQ ID NO: 34297 - RNA, 29 nt, Homo Sapiens
acccccuccuguuucagagcuuauauucu

SEQ ID NO: 34298 - RNA, 32 nt, Homo Sapiens
uagcagucacgaccuccagcacaggauguggu

SEQ ID NO: 34299 - RNA, 32 nt, Homo Sapiens
cgccucccgcgcccaagcgcgccgcucugcug

SEQ ID NO: 34300 - RNA, 32 nt, Homo Sapiens
acauuuuauaauacuuuuuuuauuuguuuaau

SEQ ID NO: 34301 - RNA, 32 nt, Homo Sapiens
ugguuucacuccccgguuuuacgccucuugag

SEQ ID NO: 34302 - RNA, 30 nt, Homo Sapiens
gccugucagcagaugggggaccccugccag

SEQ ID NO: 34303 - RNA, 32 nt, Homo Sapiens
cuuccggggcugccauguucucucuuccaucc

SEQ ID NO: 34304 - RNA, 32 nt, Homo Sapiens
gacuggcuuucugcaccugauaugaaugagac

SEQ ID NO: 34305 - RNA, 32 nt, Homo Sapiens
gccacuguacuccagccugggcgacagcaaga

SEQ ID NO: 34306 - RNA, 32 nt, Homo Sapiens
uaugaacccagcugagcauaaaccguaaucua

SEQ ID NO: 34307 - RNA, 32 nt, Homo Sapiens
gccccaguucguuuccucugcccacuaauccc

SEQ ID NO: 34308 - RNA, 32 nt, Homo Sapiens
ucuugguuuuuccguuuuguauuagaaugacu

SEQ ID NO: 34309 - RNA, 32 nt, Homo Sapiens
augaacacauaaaauuuagcaauuuaaaaucu

SEQ ID NO: 34310 - RNA, 32 nt, Homo Sapiens
uacacagaggggcugcuggcgccugacggaaa

SEQ ID NO: 34311 - RNA, 32 nt, Homo Sapiens
ggaccccccacccaagaauggcggugcccccu

SEQ ID NO: 34312 - RNA, 32 nt, Homo Sapiens
gaaccaaagagacuggagcaucugacucacaa

SEQ ID NO: 34313 - RNA, 32 nt, Homo Sapiens
aaaaccuucuauuuugggcuaguuauuuuuuu

SEQ ID NO: 34314 - RNA, 32 nt, Homo Sapiens
ccccauaaacacacucagaaagcagagaaaaa

SEQ ID NO: 34315 - RNA, 32 nt, Homo Sapiens
gcuauugcaauaacaguugauacucauuuuag

SEQ ID NO: 34316 - RNA, 30 nt, Homo Sapiens
gggugaggcaggcucccccgugcccugccu

SEQ ID NO: 34317 - RNA, 32 nt, Homo Sapiens
ccaccgaaucugaugcugcugcugccuuugca

SEQ ID NO: 34318 - RNA, 32 nt, Homo Sapiens
uuuaauaacaagguauuauugauuugcuucua

SEQ ID NO: 34319 - RNA, 32 nt, Homo Sapiens
gcggcggaagguggagauugaugcuucuguuu

SEQ ID NO: 34320 - RNA, 32 nt, Homo Sapiens
gacuucaaagcgauagacccagguuuugccug

SEQ ID NO: 34321 - RNA, 32 nt, Homo Sapiens
ugccaccucccucucucugaggcaggccugug

SEQ ID NO: 34322 - RNA, 32 nt, Homo Sapiens
ccuucuccaucccaguguccacacucuccucc

SEQ ID NO: 34323 - RNA, 32 nt, Homo Sapiens
ugggccgcuaggacuccuggggagcugggggg

SEQ ID NO: 34324 - RNA, 32 nt, Homo Sapiens
ucuuuucuauggcuuuuuguuuguuuuucuuu

SEQ ID NO: 34325 - RNA, 32 nt, Homo Sapiens
ggugugggggagccguuaggccucccaggucc

SEQ ID NO: 34326 - RNA, 32 nt, Homo Sapiens
agagaaaacaaaauaaaucaacuuuuuaaaaa

SEQ ID NO: 34327 - RNA, 32 nt, Homo Sapiens
gcugcuugguccggacucagcaucauuuugga

SEQ ID NO: 34328 - RNA, 31 nt, Homo Sapiens
augggcauguauuguaacaguuuuaugucaa

SEQ ID NO: 34329 - RNA, 32 nt, Homo Sapiens
gacuccauuauguacugacuguguguccuuag

SEQ ID NO: 34330 - RNA, 32 nt, Homo Sapiens
agcaugggagggaggcugagggggcacugagg

SEQ ID NO: 34331 - RNA, 32 nt, Homo Sapiens
cggccaacagccagcccuugccagcugacguc

SEQ ID NO: 34332 - RNA, 32 nt, Homo Sapiens
acgaggaacugggacaccaaaaggagaaacuc

SEQ ID NO: 34333 - RNA, 32 nt, Homo Sapiens
ugaagaaaacuccuuuagcaggugguccugag

SEQ ID NO: 34334 - RNA, 32 nt, Homo Sapiens
aggcccuaucuuuugcauccuacauuaauuau

SEQ ID NO: 34335 - RNA, 32 nt, Homo Sapiens
ucccuugaaucuuccgcuuccuccccaccgau

SEQ ID NO: 34336 - RNA, 32 nt, Homo Sapiens
ccgggccugcgccagagccugcaccgagcucc

SEQ ID NO: 34337 - RNA, 32 nt, Homo Sapiens
uagguaguuuaggugaaaaaugucccuuuuau

SEQ ID NO: 34338 - RNA, 32 nt, Homo Sapiens
uuggagggcugccuaggaaucuaucucccucu

SEQ ID NO: 34339 - RNA, 32 nt, Homo Sapiens
uccucucgaccccacaccgccggucgacauga

SEQ ID NO: 34340 - RNA, 32 nt, Homo Sapiens
aaggucucuucagagcugcugugcccaguggu

SEQ ID NO: 34341 - RNA, 32 nt, Homo Sapiens
gagaacgcagcccuagagccugccuggagcgu

SEQ ID NO: 34342 - RNA, 32 nt, Homo Sapiens
uccgggggagacguggcguccgcagcccgcgg

SEQ ID NO: 34343 - RNA, 32 nt, Homo Sapiens
guggaagaugucaaguuugugaucaacuauga

SEQ ID NO: 34344 - RNA, 32 nt, Homo Sapiens
uuuuauaaacuuaugcagagcacuuuuauugc

SEQ ID NO: 34345 - RNA, 32 nt, Homo Sapiens
guucccucuuuggggcaaauucuuauaaaaau

SEQ ID NO: 34346 - RNA, 32 nt, Homo Sapiens
acuuagaguuuauguaccucgugauuucuuga

SEQ ID NO: 34347 - RNA, 32 nt, Homo Sapiens
uguuucugguggguugugcugaaacagcucuu

SEQ ID NO: 34348 - RNA, 30 nt, Homo Sapiens
ccucuggccccuggcucccaucuuggucuc

SEQ ID NO: 34349 - RNA, 32 nt, Homo Sapiens
cuucaggggccucggcucaucgggugccccuc

SEQ ID NO: 34350 - RNA, 32 nt, Homo Sapiens
ucacguuucuaaaacucaccuacgaaagauag

SEQ ID NO: 34351 - RNA, 32 nt, Homo Sapiens
cguaaguguugcauuuacauggcuguuuagaa

SEQ ID NO: 34352 - RNA, 32 nt, Homo Sapiens
aaaggaccaucuaaaaucaugcuagucuaaac

SEQ ID NO: 34353 - RNA, 32 nt, Homo Sapiens
aacuaaggaacaaaaguaaugaagauuuacac

SEQ ID NO: 34354 - RNA, 32 nt, Homo Sapiens
agaaucuacacgcauguaugcaugcacaaaca

SEQ ID NO: 34355 - RNA, 32 nt, Homo Sapiens
aaaguaaaauuuauucuggaaaauaugaauua

SEQ ID NO: 34356 - RNA, 32 nt, Homo Sapiens
ccacuccagccuggccucacugucccaccccc

SEQ ID NO: 34357 - RNA, 32 nt, Homo Sapiens
caccuaaagggaagcccugacaacaacuauca

SEQ ID NO: 34358 - RNA, 32 nt, Homo Sapiens
uauuuauguaucuugauguucagacauuuaug

SEQ ID NO: 34359 - RNA, 32 nt, Homo Sapiens
ugaaaaacccaaggaaccaaauguagguggag

SEQ ID NO: 34360 - RNA, 32 nt, Homo Sapiens
auuuauucuugauagugcacgaaacuuuugcu

SEQ ID NO: 34361 - RNA, 32 nt, Homo Sapiens
aucuuagaaucacuccugaguaucucgaguug

SEQ ID NO: 34362 - RNA, 32 nt, Homo Sapiens
ucuuuagaacuguguucucaccuucccaacac

SEQ ID NO: 34363 - RNA, 32 nt, Homo Sapiens
uguggcgccugugcggcuucugagagaccggc

SEQ ID NO: 34364 - RNA, 32 nt, Homo Sapiens
cucccuuucugccugaccccaggccaccccuc

SEQ ID NO: 34365 - RNA, 32 nt, Homo Sapiens
aggaugagcuaaucaaaagaaaacacugccua

SEQ ID NO: 34366 - RNA, 32 nt, Homo Sapiens
acuuaaaaccugucuuggauagagaauauuua

SEQ ID NO: 34367 - RNA, 31 nt, Homo Sapiens
uaaucacaaaaauaaaaugaucauaauagcu

SEQ ID NO: 34368 - RNA, 32 nt, Homo Sapiens
caucuaaaucugauuucucaccuuugacacua

SEQ ID NO: 34369 - RNA, 32 nt, Homo Sapiens
gcuccgaggcggaggaggugcugacaggugcu

SEQ ID NO: 34370 - RNA, 32 nt, Homo Sapiens
aggcggcggugacaacgacggcgguggugacg

SEQ ID NO: 34371 - RNA, 32 nt, Homo Sapiens
ucguuuguucaugcaaacuauauuugcauucu

SEQ ID NO: 34372 - RNA, 32 nt, Homo Sapiens
ucauccccauccccaucgcauccccaucccca

SEQ ID NO: 34373 - RNA, 32 nt, Homo Sapiens
uuugauaaaaacacggaagugacuagagaaug

SEQ ID NO: 34374 - RNA, 32 nt, Homo Sapiens
gcccagagagagaauaaagccauguugaaacc

SEQ ID NO: 34375 - RNA, 32 nt, Homo Sapiens
uucuuagcugucuuagugcaguuuguuucuug

SEQ ID NO: 34376 - RNA, 32 nt, Homo Sapiens
aagggcgcggguggggggcgcugccggccucg

SEQ ID NO: 34377 - RNA, 32 nt, Homo Sapiens
uuuuauaagucuuuuuauauauuuagccuguc

SEQ ID NO: 34378 - RNA, 32 nt, Homo Sapiens
aggaaacccugagcuuccugaugcggagucau

SEQ ID NO: 34379 - RNA, 32 nt, Homo Sapiens
cucuuggcucauauuucuuuucuuucucaucu

SEQ ID NO: 34380 - RNA, 28 nt, Homo Sapiens
uauuuguugucuaacuccaguuuuucac

SEQ ID NO: 34381 - RNA, 32 nt, Homo Sapiens
caggcacccagcuuugggguggugcugacgcu

SEQ ID NO: 34382 - RNA, 32 nt, Homo Sapiens
ugugaggagaauugacagcaaaaguucaccac

SEQ ID NO: 34383 - RNA, 32 nt, Homo Sapiens
uugcacccgguaccugcccccauccccaaauc

SEQ ID NO: 34384 - RNA, 32 nt, Homo Sapiens
ugugaaccuuaguguauuuguauuuuguagaa

SEQ ID NO: 34385 - RNA, 32 nt, Homo Sapiens
cagaauauaugauuuuuaaacuauuuccuggg

SEQ ID NO: 34386 - RNA, 32 nt, Homo Sapiens
ggguauaggggagguguggggcgacagggucu

SEQ ID NO: 34387 - RNA, 32 nt, Homo Sapiens
aauccgucucucuuucuuuucuuugaaguucc

SEQ ID NO: 34388 - RNA, 32 nt, Homo Sapiens
gccccauaagccaggaaaagugaaaagagaac

SEQ ID NO: 34389 - RNA, 32 nt, Homo Sapiens
ggguccuucuauuugggagaaucuuuuaguau

SEQ ID NO: 34390 - RNA, 32 nt, Homo Sapiens
uuaauuugauaaagaagaguaugccucucagc

SEQ ID NO: 34391 - RNA, 32 nt, Homo Sapiens
gaccaaggagucgggaggccccugccuucugu

SEQ ID NO: 34392 - RNA, 32 nt, Homo Sapiens
auuaaaagaagauuacguuuuacaauguaacu

SEQ ID NO: 34393 - RNA, 31 nt, Homo Sapiens
auuuuuaaauaaaauaccaauaucaggaagc

SEQ ID NO: 34394 - RNA, 32 nt, Homo Sapiens
acuguggagcagccaucuaucuaccugacucc

SEQ ID NO: 34395 - RNA, 32 nt, Homo Sapiens
cuuuacguauauuugcagauucucugggauuu

SEQ ID NO: 34396 - RNA, 32 nt, Homo Sapiens
aguacccagggucagaggcccugcugaggugg

SEQ ID NO: 34397 - RNA, 32 nt, Homo Sapiens
uccagcuacuugugaggcugaggugggaggau

SEQ ID NO: 34398 - RNA, 32 nt, Homo Sapiens
cacuuaucucugaaguuuuucuccaggcugaa

SEQ ID NO: 34399 - RNA, 32 nt, Homo Sapiens
agacgcugccagcaucgccgccgccagaggag

SEQ ID NO: 34400 - RNA, 32 nt, Homo Sapiens
aucgagugggucauugugguggcugccgccua

SEQ ID NO: 34401 - RNA, 32 nt, Homo Sapiens
gggaaugcaccaaggcucucauugaggccacc

SEQ ID NO: 34402 - RNA, 32 nt, Homo Sapiens
acgggagagaaaccuuauaaguguaaugaaug

SEQ ID NO: 34403 - RNA, 32 nt, Homo Sapiens
gaccacaauugcccuauaaaucuuauuaaguu

SEQ ID NO: 34404 - RNA, 32 nt, Homo Sapiens
uguauacacacagacacacacacacaccacca

SEQ ID NO: 34405 - RNA, 32 nt, Homo Sapiens
ugcugggucaggucuccuuugugugugaagcu

SEQ ID NO: 34406 - RNA, 32 nt, Homo Sapiens
gaggcgccgggcggcgggggcaucgcguaccu

SEQ ID NO: 34407 - RNA, 30 nt, Homo Sapiens
gugccaugugguaggacacaggacacagga

SEQ ID NO: 34408 - RNA, 32 nt, Homo Sapiens
cauggugaaaguggaggcugucugcauccacc

SEQ ID NO: 34409 - RNA, 32 nt, Homo Sapiens
ucacaggagacggacaccucagccuagauccc

SEQ ID NO: 34410 - RNA, 32 nt, Homo Sapiens
guucauucguauaaaaaauaauaucagcagag

SEQ ID NO: 34411 - RNA, 32 nt, Homo Sapiens
agacauauuugcauagaggccaagguauucua

SEQ ID NO: 34412 - RNA, 29 nt, Homo Sapiens
uauuaauaaaguugguguuuauuuucugg

SEQ ID NO: 34413 - RNA, 32 nt, Homo Sapiens
uaacgggugccugcugcggcagacgggagggg

SEQ ID NO: 34414 - RNA, 32 nt, Homo Sapiens
agcuugagaagcuucuggaggauugaagagua

SEQ ID NO: 34415 - RNA, 32 nt, Homo Sapiens
ggcaugauacaacuaauuuaagagucuuuuau

SEQ ID NO: 34416 - RNA, 32 nt, Homo Sapiens
agaucucaugacugagauguggacuuugguuc

SEQ ID NO: 34417 - RNA, 32 nt, Homo Sapiens
gcugccuuuccugcaccuagugagaugcucau

SEQ ID NO: 34418 - RNA, 32 nt, Homo Sapiens
ggcggaggauagagacccuggcccccggagag

SEQ ID NO: 34419 - RNA, 32 nt, Homo Sapiens
uguugacagagccaccggauuaugacacagga

SEQ ID NO: 34420 - RNA, 32 nt, Homo Sapiens
aaauguuuuuaaaacuucaaauaucucaccac

SEQ ID NO: 34421 - RNA, 32 nt, Homo Sapiens
uuuuacgugcaaaauauaaccuuaauauuuga

SEQ ID NO: 34422 - RNA, 32 nt, Homo Sapiens
gacaacuugaguggagacauuuuuguaauuuu

SEQ ID NO: 34423 - RNA, 32 nt, Homo Sapiens
agcuauugcauaauacaaauaacccucuuaag

SEQ ID NO: 34424 - RNA, 32 nt, Homo Sapiens
acccagggcaggggugggaggggccuccagca

SEQ ID NO: 34425 - RNA, 32 nt, Homo Sapiens
ggacgugcggccgcggacugggacuuggcuuu

SEQ ID NO: 34426 - RNA, 32 nt, Homo Sapiens
accccugugacacaauccuaauagacaguguc

SEQ ID NO: 34427 - RNA, 32 nt, Homo Sapiens
aguccccgcuucagccgccgcggcggaugcgg

SEQ ID NO: 34428 - RNA, 32 nt, Homo Sapiens
cagauguaauuuccuuuuuguugucaaacaua

SEQ ID NO: 34429 - RNA, 31 nt, Homo Sapiens
gccuguuggcacugccuuugugagccuccgg

SEQ ID NO: 34430 - RNA, 32 nt, Homo Sapiens
ccugaggucuuuaaaaacaaaaacagaauguu

SEQ ID NO: 34431 - RNA, 32 nt, Homo Sapiens
cuuaggucaggaguucgagaccagccuggcca

SEQ ID NO: 34432 - RNA, 32 nt, Homo Sapiens
agagccgaggucgggccgcgagcggagccggc

SEQ ID NO: 34433 - RNA, 32 nt, Homo Sapiens
gucuccagcccgcccaguggccgcagucaccc

SEQ ID NO: 34434 - RNA, 32 nt, Homo Sapiens
ggccuucccaugcaggaugacugcucaggccc

SEQ ID NO: 34435 - RNA, 32 nt, Homo Sapiens
acucuggaagaggccacacacccgagagcugc

SEQ ID NO: 34436 - RNA, 32 nt, Homo Sapiens
aaaacauauguggagcacaaagggucaguccu

SEQ ID NO: 34437 - RNA, 32 nt, Homo Sapiens
uggcucacaccugugaucccagcacuuuggga

SEQ ID NO: 34438 - RNA, 32 nt, Homo Sapiens
uggcucgcaccuguaaucccagcacuuuggga

SEQ ID NO: 34439 - RNA, 32 nt, Homo Sapiens
ggugugcagcugcaugagggagcugucccuuc

SEQ ID NO: 34440 - RNA, 32 nt, Homo Sapiens
ggccgggcucucaguuugggguguuugugcaa

SEQ ID NO: 34441 - RNA, 32 nt, Homo Sapiens
gaagugugguggcgccuggcaaucagggaccc

SEQ ID NO: 34442 - RNA, 32 nt, Homo Sapiens
uggauaugccacuuaccuuguuuuaaucaucc

SEQ ID NO: 34443 - RNA, 32 nt, Homo Sapiens
uucauagagggagaggcagacaguugaaggaa

SEQ ID NO: 34444 - RNA, 32 nt, Homo Sapiens
gacaacccuggccucacuugauucaucucugg

SEQ ID NO: 34445 - RNA, 32 nt, Homo Sapiens
cgaucgcggaggcggcggccaggccgagaggc

SEQ ID NO: 34446 - RNA, 32 nt, Homo Sapiens
uuuuaaagauaaccaggauauuaucuaauggu

SEQ ID NO: 34447 - RNA, 32 nt, Homo Sapiens
ucuuacaucuuuauaccauuuacaauuguguu

SEQ ID NO: 34448 - RNA, 32 nt, Homo Sapiens
ggaaccgcggccggcaggccggaccgcuccgg

SEQ ID NO: 34449 - RNA, 32 nt, Homo Sapiens
acccucccacccagcagaccaggagauagcug

SEQ ID NO: 34450 - RNA, 32 nt, Homo Sapiens
cggauuaggugggggaggggcgacaguaguga

SEQ ID NO: 34451 - RNA, 32 nt, Homo Sapiens
gguauuguauucuuggacuccauuccauaacc

SEQ ID NO: 34452 - RNA, 32 nt, Homo Sapiens
uuuuaagagcauaaaaaucggcgauuuuguac

SEQ ID NO: 34453 - RNA, 32 nt, Homo Sapiens
ucagguucugccugagcccagccuaccaggcu

SEQ ID NO: 34454 - RNA, 32 nt, Homo Sapiens
agaugguggcuuccagaugucuuuuggaauug

SEQ ID NO: 34455 - RNA, 32 nt, Homo Sapiens
gcccuuucugggcaccggggccucggacuuag

SEQ ID NO: 34456 - RNA, 32 nt, Homo Sapiens
gggacugauaagcucugugcuguguccauggc

SEQ ID NO: 34457 - RNA, 32 nt, Homo Sapiens
caucuccugaagcucaccaggucacacagagg

SEQ ID NO: 34458 - RNA, 32 nt, Homo Sapiens
cugcguguccgaaagaacuuaacguuuuaaag

SEQ ID NO: 34459 - RNA, 32 nt, Homo Sapiens
gccgagcuucgccgcucuuccagcggcuccgc

SEQ ID NO: 34460 - RNA, 32 nt, Homo Sapiens
uaaguugcagauggaaauaauaugugaugguc

SEQ ID NO: 34461 - RNA, 32 nt, Homo Sapiens
gcucccucaucccaccuccauccggaguugcc

SEQ ID NO: 34462 - RNA, 32 nt, Homo Sapiens
ucaucaugaaggucauccagagcugcuuccuc

SEQ ID NO: 34463 - RNA, 32 nt, Homo Sapiens
ggcccuaacacuugcaccugccuugcucaaga

SEQ ID NO: 34464 - RNA, 32 nt, Homo Sapiens
cugaauaaacuccccccaaggagaccaggcag

SEQ ID NO: 34465 - RNA, 32 nt, Homo Sapiens
uagaaaauauuccuuuuguaauacugaauaua

SEQ ID NO: 34466 - RNA, 32 nt, Homo Sapiens
aauggggaagaauuaggaaauaaucauguugu

SEQ ID NO: 34467 - RNA, 32 nt, Homo Sapiens
uguuuuacaccuaucugcucauuuuguugugu

SEQ ID NO: 34468 - RNA, 32 nt, Homo Sapiens
cauuccugccagcccucaguugucccuuacaa

SEQ ID NO: 34469 - RNA, 32 nt, Homo Sapiens
uguuuguaaaauuuauacuucuugagauaaaa

SEQ ID NO: 34470 - RNA, 32 nt, Homo Sapiens
ggcgggguggggugggggugggcagcagcauc

SEQ ID NO: 34471 - RNA, 32 nt, Homo Sapiens
ccucaagcaguccuuccaccuuggccucccaa

SEQ ID NO: 34472 - RNA, 32 nt, Homo Sapiens
cugccaagguccccgcgccgccgccggguguu

SEQ ID NO: 34473 - RNA, 32 nt, Homo Sapiens
gcgccacaacggugaccagccggagcagccgg

SEQ ID NO: 34474 - RNA, 32 nt, Homo Sapiens
cugucuggccccagccucugcacuugggcucc

SEQ ID NO: 34475 - RNA, 32 nt, Homo Sapiens
cucaucagugauuguacauaccuugcccacuc

SEQ ID NO: 34476 - RNA, 32 nt, Homo Sapiens
uuguuucaggaaugcgugaaaauugauuuaag

SEQ ID NO: 34477 - RNA, 32 nt, Homo Sapiens
cauggcugaguaccccagacgucugguccagg

SEQ ID NO: 34478 - RNA, 32 nt, Homo Sapiens
caguccgggcuuggggccccgcggcggagaag

SEQ ID NO: 34479 - RNA, 32 nt, Homo Sapiens
cccauguauuuauaccuguauguaucaaguua

SEQ ID NO: 34480 - RNA, 30 nt, Homo Sapiens
aagcuggauaaaaaggguaugaugacagau

SEQ ID NO: 34481 - RNA, 32 nt, Homo Sapiens
ucaaguuauuuuuugcauuguuuuggaguagc

SEQ ID NO: 34482 - RNA, 32 nt, Homo Sapiens
cggaccuuccccagcccugaccaccaccagaa

SEQ ID NO: 34483 - RNA, 32 nt, Homo Sapiens
ccccccuuccaucccggcaccaugcuggauag

SEQ ID NO: 34484 - RNA, 32 nt, Homo Sapiens
gucccgcgggagcgcgcacgcucgcgcacccg

SEQ ID NO: 34485 - RNA, 32 nt, Homo Sapiens
aucuuccucagagccagcuucuccucucaaug

SEQ ID NO: 34486 - RNA, 32 nt, Homo Sapiens
ucaggcccauucuucccucuguguuugaugag

SEQ ID NO: 34487 - RNA, 32 nt, Homo Sapiens
gggauacuuaaaacuuacugaauagaaucuau

SEQ ID NO: 34488 - RNA, 32 nt, Homo Sapiens
caguuucuucuggccugagccaauggggcaug

SEQ ID NO: 34489 - RNA, 32 nt, Homo Sapiens
cgagaauuaauguacaccuguaucauguguag

SEQ ID NO: 34490 - RNA, 30 nt, Homo Sapiens
uucuggauuuaauggggggaaaagggcgga

SEQ ID NO: 34491 - RNA, 32 nt, Homo Sapiens
auccccucccccuggggugugcugugucccac

SEQ ID NO: 34492 - RNA, 32 nt, Homo Sapiens
uuuuguuuucucuuuuucaaugaacaccaauu

SEQ ID NO: 34493 - RNA, 32 nt, Homo Sapiens
uaccuguuggcuugcuuugugugucuguuaaa

SEQ ID NO: 34494 - RNA, 32 nt, Homo Sapiens
gccaccgcucggagccgaggcggacgcguccc

SEQ ID NO: 34495 - RNA, 32 nt, Homo Sapiens
uugcuccaauucauaaauuugcaguuuuaugu

SEQ ID NO: 34496 - RNA, 32 nt, Homo Sapiens
ugccuucgccuccauggccccggagccccauc

SEQ ID NO: 34497 - RNA, 32 nt, Homo Sapiens
cagguuacggggguucuugcugccguucuaau

SEQ ID NO: 34498 - RNA, 32 nt, Homo Sapiens
aaagaaacagaaaaaagaaaaacuguuuggaa

SEQ ID NO: 34499 - RNA, 32 nt, Homo Sapiens
ucuuggagauaaaaauuaaauggaucacugau

SEQ ID NO: 34500 - RNA, 32 nt, Homo Sapiens
uauaacacacuuaaguuuugcuuuuuaaaucu

SEQ ID NO: 34501 - RNA, 32 nt, Homo Sapiens
uccuaucauaaauuaauguuggaauaaauuga

SEQ ID NO: 34502 - RNA, 32 nt, Homo Sapiens
gguuccugggcuccccuucucucuaccuucuc

SEQ ID NO: 34503 - RNA, 32 nt, Homo Sapiens
uuucugaaauguaagcauuacaugacuauugg

SEQ ID NO: 34504 - RNA, 32 nt, Homo Sapiens
aaauuugggcuucauguccacaaucacauuca

SEQ ID NO: 34505 - RNA, 32 nt, Homo Sapiens
aucacuggaggcugcagggaccaagaggccau

SEQ ID NO: 34506 - RNA, 32 nt, Homo Sapiens
ucacccuucagcggacggauaccgggagcgcu

SEQ ID NO: 34507 - RNA, 32 nt, Homo Sapiens
uuuauuauaacacuaaaacuggacagucuccu

SEQ ID NO: 34508 - RNA, 32 nt, Homo Sapiens
ggaaggccuccacaaccucacgcuagagucaa

SEQ ID NO: 34509 - RNA, 32 nt, Homo Sapiens
ucuggcugccccuucaccaccccgccccaagg

SEQ ID NO: 34510 - RNA, 32 nt, Homo Sapiens
ucagaguuugucugcugugccaucgugagauc

SEQ ID NO: 34511 - RNA, 32 nt, Homo Sapiens
ccauuauccuauuuuuaguguacaccagcuga

SEQ ID NO: 34512 - RNA, 32 nt, Homo Sapiens
uucuucaugcaggagaccccaggcccuggagg

SEQ ID NO: 34513 - RNA, 32 nt, Homo Sapiens
uucgggaguaguguuucagagaaggacucaug

SEQ ID NO: 34514 - RNA, 32 nt, Homo Sapiens
ccuccccccguccccacccccaccccgauacc

SEQ ID NO: 34515 - RNA, 32 nt, Homo Sapiens
gaacccagcauuggagagagccgggagagagc

SEQ ID NO: 34516 - RNA, 32 nt, Homo Sapiens
ugggagagaucccugcagaauccaccaaccag

SEQ ID NO: 34517 - RNA, 32 nt, Homo Sapiens
ucccugcgcgcccagccugccaagcagcgugc

SEQ ID NO: 34518 - RNA, 32 nt, Homo Sapiens
gugagaaauaauccacccaguauuuugcuauu

SEQ ID NO: 34519 - RNA, 32 nt, Homo Sapiens
aaccgcuucucacccuuuggucucagcuuaaa

SEQ ID NO: 34520 - RNA, 32 nt, Homo Sapiens
auuaacuugggaagaagucucagaggaaauuu

SEQ ID NO: 34521 - RNA, 32 nt, Homo Sapiens
ggagcgaagguaggaggcagggcuugccucac

SEQ ID NO: 34522 - RNA, 32 nt, Homo Sapiens
ggcuccugccaccugcuaauagcaguucaaac

SEQ ID NO: 34523 - RNA, 32 nt, Homo Sapiens
cagcuccccccgcagccggcuccgcagugguc

SEQ ID NO: 34524 - RNA, 32 nt, Homo Sapiens
agacaccaggacuugaaacuuaucucaacccg

SEQ ID NO: 34525 - RNA, 32 nt, Homo Sapiens
gcaauuuuucccuuccuauuucaaccucuggu

SEQ ID NO: 34526 - RNA, 32 nt, Homo Sapiens
acaugcaucauuauuauauaaauagaaacuuc

SEQ ID NO: 34527 - RNA, 32 nt, Homo Sapiens
caggcaaggggaggagugggaagaccagccca

SEQ ID NO: 34528 - RNA, 32 nt, Homo Sapiens
caucagccccugggaacaggccccacgcccuc

SEQ ID NO: 34529 - RNA, 32 nt, Homo Sapiens
ucaccaagaccuggaggccuagaugaugaaau

SEQ ID NO: 34530 - RNA, 32 nt, Homo Sapiens
agacuuuacccauguuauuuucuugguuuuua

SEQ ID NO: 34531 - RNA, 32 nt, Homo Sapiens
ccccgcgccucauccgcccgcguccgguccgc

SEQ ID NO: 34532 - RNA, 32 nt, Homo Sapiens
ucuccacccuucccuucugccugcccagcugc

SEQ ID NO: 34533 - RNA, 32 nt, Homo Sapiens
ccuaacucguuuuuuccuuguuuuauuaccug

SEQ ID NO: 34534 - RNA, 32 nt, Homo Sapiens
agaguccauaaacuuuugaaaaugaucagcca

SEQ ID NO: 34535 - RNA, 32 nt, Homo Sapiens
agagguugagaaacaggaagauacagagaauc

SEQ ID NO: 34536 - RNA, 32 nt, Homo Sapiens
gcccaucccccuccccgcccuggcauccaccc

SEQ ID NO: 34537 - RNA, 32 nt, Homo Sapiens
uuccagggcagacagagcagcacagugagcau

SEQ ID NO: 34538 - RNA, 32 nt, Homo Sapiens
ucgucgcggugauuuuccugcuacugcuacug

SEQ ID NO: 34539 - RNA, 32 nt, Homo Sapiens
aaucccaccaaaaccaagacagugacaaaagu

SEQ ID NO: 34540 - RNA, 32 nt, Homo Sapiens
gccgcgcuccagccucgcucuccgccgcccgc

SEQ ID NO: 34541 - RNA, 32 nt, Homo Sapiens
uugagaguucccccucuuucugggucaagagc

SEQ ID NO: 34542 - RNA, 32 nt, Homo Sapiens
ugggggcacuguaauggaugggugcucugugg

SEQ ID NO: 34543 - RNA, 32 nt, Homo Sapiens
uuuaccuagcacuuaaauauguauaaauguac

SEQ ID NO: 34544 - RNA, 32 nt, Homo Sapiens
gaagcaugucauugucagugauaccuuuuuau

SEQ ID NO: 34545 - RNA, 32 nt, Homo Sapiens
ucugagggugacugaggcuacagcugcuauca

SEQ ID NO: 34546 - RNA, 32 nt, Homo Sapiens
guccucguuccacgccuucucaucauccugaa

SEQ ID NO: 34547 - RNA, 32 nt, Homo Sapiens
auuuaaaguaauauuucuuucuaauauaauau

SEQ ID NO: 34548 - RNA, 32 nt, Homo Sapiens
aagagaagaauguuucugucucuuccuacguu

SEQ ID NO: 34549 - RNA, 32 nt, Homo Sapiens
agugcuggaccgcgcgcauccgcgcaguuggc

SEQ ID NO: 34550 - RNA, 32 nt, Homo Sapiens
uuaaacugaugaugaagaaaguuccugauuug

SEQ ID NO: 34551 - RNA, 28 nt, Homo Sapiens
ugcauuaaagauuaauacucaauuugaa

SEQ ID NO: 34552 - RNA, 32 nt, Homo Sapiens
ccaagauucgaugggauuuaucaguguguaga

SEQ ID NO: 34553 - RNA, 32 nt, Homo Sapiens
gcuuuuuguuuguuuguuuucucuuuuugcca

SEQ ID NO: 34554 - RNA, 32 nt, Homo Sapiens
aggagcgcuuacauucaggagcuccgcguagc

SEQ ID NO: 34555 - RNA, 32 nt, Homo Sapiens
ugaggggccccgguccgucccaaagugcucug

SEQ ID NO: 34556 - RNA, 32 nt, Homo Sapiens
ugcaccaggagacagacagagaaggcagcagg

SEQ ID NO: 34557 - RNA, 32 nt, Homo Sapiens
aagucaaucuguauccuaagcauuuuaauaaa

SEQ ID NO: 34558 - RNA, 32 nt, Homo Sapiens
ucccuccccacuuuucccagagcuaauacaca

SEQ ID NO: 34559 - RNA, 32 nt, Homo Sapiens
cacuugcagguuauucuuuucuaggccaagua

SEQ ID NO: 34560 - RNA, 32 nt, Homo Sapiens
ggugucugguacccccccggcguggugcuuag

SEQ ID NO: 34561 - RNA, 32 nt, Homo Sapiens
ccugucccuggaagaggggaaaaccggcaggg

SEQ ID NO: 34562 - RNA, 32 nt, Homo Sapiens
cauagaaaaaggaaauaguaccaauccuucuc

SEQ ID NO: 34563 - RNA, 32 nt, Homo Sapiens
uguccucuggggaucugcugggcagauguccc

SEQ ID NO: 34564 - RNA, 32 nt, Homo Sapiens
ggcugcacucagagaagcugcccuuggcugcu

SEQ ID NO: 34565 - RNA, 32 nt, Homo Sapiens
uuuuugguuugugaacauggcguuuuauagaa

SEQ ID NO: 34566 - RNA, 32 nt, Homo Sapiens
ucugaaaauuaaaaauaaaauuuauuucugca

SEQ ID NO: 34567 - RNA, 32 nt, Homo Sapiens
guugcaguagcuccucaguguuucacaauccu

SEQ ID NO: 34568 - RNA, 32 nt, Homo Sapiens
cccugacauuucuuuaccaucuguagcuauaa

SEQ ID NO: 34569 - RNA, 32 nt, Homo Sapiens
uguugggggguggaaggagugccuggcccugg

SEQ ID NO: 34570 - RNA, 32 nt, Homo Sapiens
ugccccagacagagcugaggaccccuggccgu

SEQ ID NO: 34571 - RNA, 32 nt, Homo Sapiens
acacuuaggggaggaguggccccagaauucag

SEQ ID NO: 34572 - RNA, 31 nt, Homo Sapiens
cguccccggugcugccugcgcguucaccuga

SEQ ID NO: 34573 - RNA, 32 nt, Homo Sapiens
uagucgguagcagcggccgccgcagcggcucc

SEQ ID NO: 34574 - RNA, 32 nt, Homo Sapiens
cagagcuuggaaagaggcagcucugagauuug

SEQ ID NO: 34575 - RNA, 32 nt, Homo Sapiens
gcuagcgcaacacuaagaaaagcaggcuucuu

SEQ ID NO: 34576 - RNA, 32 nt, Homo Sapiens
uauguauagauauuuauuuaugcauaaaauga

SEQ ID NO: 34577 - RNA, 32 nt, Homo Sapiens
uggacccuuuccuaaugagccuccucaauaag

SEQ ID NO: 34578 - RNA, 32 nt, Homo Sapiens
gaaauaauguuuuauuagugugcuguugaggg

SEQ ID NO: 34579 - RNA, 32 nt, Homo Sapiens
ucucugucaccauggucucucaucguccagaa

SEQ ID NO: 34580 - RNA, 32 nt, Homo Sapiens
ccuugaccaaaggggagcuuugucucgugugu

SEQ ID NO: 34581 - RNA, 32 nt, Homo Sapiens
agggaagauaaagaugauauuaagaacugcug

SEQ ID NO: 34582 - RNA, 32 nt, Homo Sapiens
aaugguaauuauccugccuuucugucugggag

SEQ ID NO: 34583 - RNA, 32 nt, Homo Sapiens
ugagagcgggaccauggaugaaagguucaaca

SEQ ID NO: 34584 - RNA, 32 nt, Homo Sapiens
gcaaagcgucagggcagcuuugaaaaacuuuu

SEQ ID NO: 34585 - RNA, 32 nt, Homo Sapiens
ugucuccccuccccucugauccagcccagcgg

SEQ ID NO: 34586 - RNA, 32 nt, Homo Sapiens
cucugccaugagccuggcagugcucaggaugg

SEQ ID NO: 34587 - RNA, 32 nt, Homo Sapiens
uuaaaaaucuguguuccaaaaguggacauagc

SEQ ID NO: 34588 - RNA, 32 nt, Homo Sapiens
gaguccgcgauggagagagaaaaggaacaguu

SEQ ID NO: 34589 - RNA, 32 nt, Homo Sapiens
gagggcagccccacugccauggagcagccugu

SEQ ID NO: 34590 - RNA, 32 nt, Homo Sapiens
ucuugagaaagauuuaaaaugugucuaauaca

SEQ ID NO: 34591 - RNA, 32 nt, Homo Sapiens
ggaggacaugcaccaaggcuugccagagccaa

SEQ ID NO: 34592 - RNA, 32 nt, Homo Sapiens
gaauacagaaaacaaacuuuuauauccuucuc

SEQ ID NO: 34593 - RNA, 32 nt, Homo Sapiens
gcuaaucuuuuaaauuuuuuguagaggcagag

SEQ ID NO: 34594 - RNA, 32 nt, Homo Sapiens
ucccaggagacggggugaagcuauuccccaca

SEQ ID NO: 34595 - RNA, 32 nt, Homo Sapiens
ggcucugagguuggcuaccugauucaaacccg

SEQ ID NO: 34596 - RNA, 31 nt, Homo Sapiens
cuugcaucuuugugaaggcuaacugaagaua

SEQ ID NO: 34597 - RNA, 32 nt, Homo Sapiens
gcuggggaaagagauagaagcuguauaaacaa

SEQ ID NO: 34598 - RNA, 32 nt, Homo Sapiens
uguuuacaaaaauggauacaauagaaauguaa

SEQ ID NO: 34599 - RNA, 32 nt, Homo Sapiens
cuggggcaccucauggaccaggggcugguggc

SEQ ID NO: 34600 - RNA, 32 nt, Homo Sapiens
uuagggcagcaguuucucugguaacggaagag

SEQ ID NO: 34601 - RNA, 32 nt, Homo Sapiens
uuguuuuguuuuuucuucaacaguauugaaag

SEQ ID NO: 34602 - RNA, 32 nt, Homo Sapiens
ggccgggccugggcugcccuccagucggucag

SEQ ID NO: 34603 - RNA, 32 nt, Homo Sapiens
caccccugcccccaaggguaaccacucucccg

SEQ ID NO: 34604 - RNA, 32 nt, Homo Sapiens
aguuuuguuucaucacaugagaugucggauau

SEQ ID NO: 34605 - RNA, 29 nt, Homo Sapiens
caacauggcucggaaacgcgcggccggcg

SEQ ID NO: 34606 - RNA, 32 nt, Homo Sapiens
gauuucuaagucuucuccuggaucuacauuuc

SEQ ID NO: 34607 - RNA, 32 nt, Homo Sapiens
auuuuauuuuauucuuuuuuuuuuuugagaug

SEQ ID NO: 34608 - RNA, 32 nt, Homo Sapiens
cugcuggucacacaccgaugcccgccaggcca

SEQ ID NO: 34609 - RNA, 32 nt, Homo Sapiens
ggccuuuaacuccuccuagggaguagcagagu

SEQ ID NO: 34610 - RNA, 32 nt, Homo Sapiens
guaugacacaguucuagaaaauacugacuaua

SEQ ID NO: 34611 - RNA, 32 nt, Homo Sapiens
caaaauuugauucgucugucuaaucccuugcu

SEQ ID NO: 34612 - RNA, 32 nt, Homo Sapiens
uuucuuggcaaaauauuucuauauuauuaaua

SEQ ID NO: 34613 - RNA, 32 nt, Homo Sapiens
cuuugugauugugaaacauugacuuuuuugua

SEQ ID NO: 34614 - RNA, 32 nt, Homo Sapiens
aggguauaauuuuacacaguacucaaagcuug

SEQ ID NO: 34615 - RNA, 32 nt, Homo Sapiens
cgaugggagggacggagucuccagguuccagc

SEQ ID NO: 34616 - RNA, 32 nt, Homo Sapiens
gcuaggcagcugccuccaccaagacuucaccc

SEQ ID NO: 34617 - RNA, 32 nt, Homo Sapiens
uccuuuucuccuuguuauuugcccuucagaau

SEQ ID NO: 34618 - RNA, 32 nt, Homo Sapiens
uggaucaggaggagaagacggaggaaggcuca

SEQ ID NO: 34619 - RNA, 31 nt, Homo Sapiens
gagccaggguuauagaccugaguuuggggua

SEQ ID NO: 34620 - RNA, 32 nt, Homo Sapiens
gcugcgugccgggggcgagcggcggccgcgau

SEQ ID NO: 34621 - RNA, 32 nt, Homo Sapiens
ccgugggcucugcccgcaccugcccccaccuc

SEQ ID NO: 34622 - RNA, 32 nt, Homo Sapiens
cgcggaugaugcgggcggccaggcgggggucg

SEQ ID NO: 34623 - RNA, 32 nt, Homo Sapiens
agagggaaggucggcuucccggaaaagcaggg

SEQ ID NO: 34624 - RNA, 32 nt, Homo Sapiens
aaaaguucccugcuuuccuccucccugacugc

SEQ ID NO: 34625 - RNA, 32 nt, Homo Sapiens
cuccugggccccagccccgcgcaggccaagga

SEQ ID NO: 34626 - RNA, 30 nt, Homo Sapiens
cgguaauggguuuagcugcaucaggugcaa

SEQ ID NO: 34627 - RNA, 32 nt, Homo Sapiens
aguacgauggguggguacauggcauuaugcau

SEQ ID NO: 34628 - RNA, 32 nt, Homo Sapiens
gugugucccuuucuccuuccugaccuuccuca

SEQ ID NO: 34629 - RNA, 32 nt, Homo Sapiens
ugggcuugggccugggucuuugcugccaggug

SEQ ID NO: 34630 - RNA, 32 nt, Homo Sapiens
aagucucugggccccaggcacccccuggcuug

SEQ ID NO: 34631 - RNA, 32 nt, Homo Sapiens
auuagucuacuuaaauucacuugaugcucuuu

SEQ ID NO: 34632 - RNA, 32 nt, Homo Sapiens
ggacucgggagauggaggaaaaggagauauua

SEQ ID NO: 34633 - RNA, 32 nt, Homo Sapiens
uugggaagaaacaaagccaugccugcuccugc

SEQ ID NO: 34634 - RNA, 32 nt, Homo Sapiens
agguauuuaaacaauuauucauucauuuaagc

SEQ ID NO: 34635 - RNA, 32 nt, Homo Sapiens
auugucccaaaagugucugugcauugugcaaa

SEQ ID NO: 34636 - RNA, 32 nt, Homo Sapiens
uaugaccaauacuuguuauaacuuagaggacu

SEQ ID NO: 34637 - RNA, 32 nt, Homo Sapiens
cccgcccuccccaaagucccgccccgcccccg

SEQ ID NO: 34638 - RNA, 32 nt, Homo Sapiens
cuuccucaauacuaguaucaguucuuuggaau

SEQ ID NO: 34639 - RNA, 32 nt, Homo Sapiens
uguuuuuuugcaugcauggguuugaauucuuu

SEQ ID NO: 34640 - RNA, 32 nt, Homo Sapiens
cuguuccuguguccccuccccagccauccucc

SEQ ID NO: 34641 - RNA, 32 nt, Homo Sapiens
ugagcugagacacaaggcaaacccuuggaaau

SEQ ID NO: 34642 - RNA, 31 nt, Homo Sapiens
ccugaggcgucgaggccgcccgaggggagcg

SEQ ID NO: 34643 - RNA, 32 nt, Homo Sapiens
cggguguguacuuuuugcuuugugauacaucu

SEQ ID NO: 34644 - RNA, 32 nt, Homo Sapiens
uucaugcuagggaugguaauaccuuguucucu

SEQ ID NO: 34645 - RNA, 29 nt, Homo Sapiens
gaaaauggcagagcugcagauguuacuag

SEQ ID NO: 34646 - RNA, 32 nt, Homo Sapiens
cagacucuguaacucacccccaccaccauaca

SEQ ID NO: 34647 - RNA, 32 nt, Homo Sapiens
aggccaacuaaauauuugaugaauguaugauu

SEQ ID NO: 34648 - RNA, 32 nt, Homo Sapiens
ggcccccgcgcgcucuaugcccccgcacgcgg

SEQ ID NO: 34649 - RNA, 32 nt, Homo Sapiens
gccccgccuuuucucugcucuccugaaccuuu

SEQ ID NO: 34650 - RNA, 32 nt, Homo Sapiens
accuggcgcucuugaccccugauuccagugag

SEQ ID NO: 34651 - RNA, 32 nt, Homo Sapiens
uuuuuuuuacacacuuaaucuuagcggauuac

SEQ ID NO: 34652 - RNA, 32 nt, Homo Sapiens
cugagucucccucuucccaccaagcccuggcc

SEQ ID NO: 34653 - RNA, 32 nt, Homo Sapiens
uugcuaaguaguuuugacacaaugaaaaugga

SEQ ID NO: 34654 - RNA, 32 nt, Homo Sapiens
ggggauagugaaaugggaaauaauuuuucugu

SEQ ID NO: 34655 - RNA, 32 nt, Homo Sapiens
ccgucucaggagacccugguauuucuagagca

SEQ ID NO: 34656 - RNA, 32 nt, Homo Sapiens
acaugcucagaauugucuacuaggcugacuau

SEQ ID NO: 34657 - RNA, 32 nt, Homo Sapiens
ggugggaggggaggggaugagggggcaccugg

SEQ ID NO: 34658 - RNA, 32 nt, Homo Sapiens
uuuauaaaaaacaaaaaccuuaccgguaguaa

SEQ ID NO: 34659 - RNA, 32 nt, Homo Sapiens
cgcggagccgugggacgagggcggcggauggc

SEQ ID NO: 34660 - RNA, 32 nt, Homo Sapiens
aaucaagccuugcaugucaucauaacuucaua

SEQ ID NO: 34661 - RNA, 32 nt, Homo Sapiens
cacacaccugagccaucagcucugccaggacc

SEQ ID NO: 34662 - RNA, 32 nt, Homo Sapiens
cgcucuccuagcacguccauuuccaggaggag

SEQ ID NO: 34663 - RNA, 32 nt, Homo Sapiens
ucuggggcguccccagccuccccguccucugu

SEQ ID NO: 34664 - RNA, 32 nt, Homo Sapiens
ccaaggguaauagaaaugcauaccaguaauug

SEQ ID NO: 34665 - RNA, 32 nt, Homo Sapiens
ccugacucccccagcgcccccggaauccccca

SEQ ID NO: 34666 - RNA, 31 nt, Homo Sapiens
cucugcccugcuucucgacaagcuaccagca

SEQ ID NO: 34667 - RNA, 32 nt, Homo Sapiens
aacagugaaaaacugagaugaaagauguauaa

SEQ ID NO: 34668 - RNA, 32 nt, Homo Sapiens
cucgccgcaaccuccgccucccagguucaagu

SEQ ID NO: 34669 - RNA, 32 nt, Homo Sapiens
cagcacacggaggaugucuuggacaugugaga

SEQ ID NO: 34670 - RNA, 32 nt, Homo Sapiens
gaccagccuaccccaaaaagcugcgucuuuua

SEQ ID NO: 34671 - RNA, 32 nt, Homo Sapiens
caaugcuaguuuuaaaguguauaaauugguua

SEQ ID NO: 34672 - RNA, 32 nt, Homo Sapiens
gucaaguucuuacuaguuuccuguacugaagg

SEQ ID NO: 34673 - RNA, 32 nt, Homo Sapiens
cagcggauggacagcuuggcucucccagagag

SEQ ID NO: 34674 - RNA, 32 nt, Homo Sapiens
gaaaaucaaaaauuuucacauuugauuaugaa

SEQ ID NO: 34675 - RNA, 32 nt, Homo Sapiens
cccauuuuugcagaucuuugucuucugagccu

SEQ ID NO: 34676 - RNA, 32 nt, Homo Sapiens
aggauauaggagaggaaaaguaaggugcaguu

SEQ ID NO: 34677 - RNA, 32 nt, Homo Sapiens
aaagccucgauauccuuaauucaccaaggauc

SEQ ID NO: 34678 - RNA, 32 nt, Homo Sapiens
ggggaaauuuuaucucuuucuuucuuucuuuc

SEQ ID NO: 34679 - RNA, 32 nt, Homo Sapiens
auaacccagaaagggcccguugggugugugug

SEQ ID NO: 34680 - RNA, 32 nt, Homo Sapiens
aaggugccugagauggcugugcccgaugugca

SEQ ID NO: 34681 - RNA, 32 nt, Homo Sapiens
uuuaaugacaguuuucaugaugaugcuuuugg

SEQ ID NO: 34682 - RNA, 32 nt, Homo Sapiens
aguuauuucucacccaggaguggauuuguggu

SEQ ID NO: 34683 - RNA, 32 nt, Homo Sapiens
uuuccuuguggccacuccaugcauuuuucuug

SEQ ID NO: 34684 - RNA, 32 nt, Homo Sapiens
cucaccagcacuguggcaaggcaaggugggua

SEQ ID NO: 34685 - RNA, 32 nt, Homo Sapiens
gguguuuacagauuuaaaugcauguuaccaua

SEQ ID NO: 34686 - RNA, 32 nt, Homo Sapiens
guaccuguacugaugcaaagacuauagacugu

SEQ ID NO: 34687 - RNA, 32 nt, Homo Sapiens
aggcugcgcggcgcagacccagacgggcggcc

SEQ ID NO: 34688 - RNA, 32 nt, Homo Sapiens
cuagggaacaaauguugcucagggcugguguc

SEQ ID NO: 34689 - RNA, 31 nt, Homo Sapiens
uucuuucuugguaguaagauaacuguagguc

SEQ ID NO: 34690 - RNA, 32 nt, Homo Sapiens
ugcaccgcauguccugggguccuucuuuguac

SEQ ID NO: 34691 - RNA, 32 nt, Homo Sapiens
cggggacccguagagcccggcgcugcgcgcau

SEQ ID NO: 34692 - RNA, 32 nt, Homo Sapiens
uaaaauuuguaucuuuacuagaacaugagaau

SEQ ID NO: 34693 - RNA, 32 nt, Homo Sapiens
ucgaauauuuaaaagauauguaaguuugauug

SEQ ID NO: 34694 - RNA, 32 nt, Homo Sapiens
uuuguggauacagucuucaucuucuucacuua

SEQ ID NO: 34695 - RNA, 32 nt, Homo Sapiens
ucccaggcuaggaggaagcuggcagccccguc

SEQ ID NO: 34696 - RNA, 32 nt, Homo Sapiens
gacccuccccgcgccccuccccagcccaucuu

SEQ ID NO: 34697 - RNA, 32 nt, Homo Sapiens
ccugcagccuggaccuggcccggguuguggag

SEQ ID NO: 34698 - RNA, 32 nt, Homo Sapiens
uaaccuagugcccaaggcagggcuggguggag

SEQ ID NO: 34699 - RNA, 32 nt, Homo Sapiens
ccccaacccagccccaggcauggcuaaccccu

SEQ ID NO: 34700 - RNA, 32 nt, Homo Sapiens
ucccucaguccuccccugucccuuccaaggug

SEQ ID NO: 34701 - RNA, 32 nt, Homo Sapiens
guuaaaagggaacaaaacuuuauuuaaaauuc

SEQ ID NO: 34702 - RNA, 32 nt, Homo Sapiens
uuuuuggcccccuguuguuacaugggaccugu

SEQ ID NO: 34703 - RNA, 32 nt, Homo Sapiens
gcgccucugcccggccgcugugcaaccuucca

SEQ ID NO: 34704 - RNA, 32 nt, Homo Sapiens
cuugauccuccaaauaacucucuucuaauucc

SEQ ID NO: 34705 - RNA, 32 nt, Homo Sapiens
ucacacucauaacucauugucuguggaguuug

SEQ ID NO: 34706 - RNA, 32 nt, Homo Sapiens
ccccuguaucugcagcacuuugagcuacggga

SEQ ID NO: 34707 - RNA, 32 nt, Homo Sapiens
agugcugaauuucugcauguugaaagacuuag

SEQ ID NO: 34708 - RNA, 32 nt, Homo Sapiens
cacucuguuguccaggcuggagugcagcgaua

SEQ ID NO: 34709 - RNA, 32 nt, Homo Sapiens
ccgcgcgcuaguggccgcucuuccgcgggcua

SEQ ID NO: 34710 - RNA, 32 nt, Homo Sapiens
ugccaaggauuuccucucagagcuguugcaca

SEQ ID NO: 34711 - RNA, 32 nt, Homo Sapiens
agggguuuggggacagggacuguguccaugaa

SEQ ID NO: 34712 - RNA, 32 nt, Homo Sapiens
cuuaaggaauuuccuucuaauccaggugcuug

SEQ ID NO: 34713 - RNA, 32 nt, Homo Sapiens
gcgucucggcccggacggcccggcgaggaagc

SEQ ID NO: 34714 - RNA, 32 nt, Homo Sapiens
agagcugcggggcgcgggaggaggaaguagag

SEQ ID NO: 34715 - RNA, 32 nt, Homo Sapiens
aguugggagcccaauuguuuguugcaacucca

SEQ ID NO: 34716 - RNA, 32 nt, Homo Sapiens
ucaucucaaaaaugcugugacagcuuuuuggc

SEQ ID NO: 34717 - RNA, 31 nt, Homo Sapiens
uguacgucccgagcgcgcucgagccagcccc

SEQ ID NO: 34718 - RNA, 32 nt, Homo Sapiens
agaggagcuccaggcacagaccaggugagggg

SEQ ID NO: 34719 - RNA, 32 nt, Homo Sapiens
uuuuuuacaagccccagcuccucuucuugccc

SEQ ID NO: 34720 - RNA, 32 nt, Homo Sapiens
acuuguaggucaauauccuuaauaaacaucaa

SEQ ID NO: 34721 - RNA, 32 nt, Homo Sapiens
auaggaaggacacauguacagcccuugccccc

SEQ ID NO: 34722 - RNA, 30 nt, Homo Sapiens
agcaucuccaggcgcgggaucccgcuccga

SEQ ID NO: 34723 - RNA, 32 nt, Homo Sapiens
gccccacuguccuggggucgcucuugggaggc

SEQ ID NO: 34724 - RNA, 32 nt, Homo Sapiens
ugauguuauauuuuguaucuuuuauaucauau

SEQ ID NO: 34725 - RNA, 32 nt, Homo Sapiens
agauaaggguuccagcagccuggggcaguaug

SEQ ID NO: 34726 - RNA, 32 nt, Homo Sapiens
acuauuuguauauaugcuuuucuuucaaauaa

SEQ ID NO: 34727 - RNA, 32 nt, Homo Sapiens
ugguuugcaugugaaauucacuuuugaaagaa

SEQ ID NO: 34728 - RNA, 32 nt, Homo Sapiens
agacuuuggaauagugucuugguuucacuguu

SEQ ID NO: 34729 - RNA, 30 nt, Homo Sapiens
caccgggugaccccuuugcuuuggaaacuu

SEQ ID NO: 34730 - RNA, 32 nt, Homo Sapiens
uccagcagcgccagcaggcgggaucgaggccg

SEQ ID NO: 34731 - RNA, 31 nt, Homo Sapiens
caagcagcucgcagccagcccagaaucucuu

SEQ ID NO: 34732 - RNA, 32 nt, Homo Sapiens
cuuuccugcuugcgaauuccaagcuguuaaau

SEQ ID NO: 34733 - RNA, 32 nt, Homo Sapiens
uucagggcucccuggguccacaggacccuccc

SEQ ID NO: 34734 - RNA, 32 nt, Homo Sapiens
gcaacuuucucccucgcagcgccccgcccgcc

SEQ ID NO: 34735 - RNA, 32 nt, Homo Sapiens
ucuuaauuuuuccuucuaaaauggggaguucc

SEQ ID NO: 34736 - RNA, 31 nt, Homo Sapiens
ugcagggcccagcccgaccaggcacagacac

SEQ ID NO: 34737 - RNA, 31 nt, Homo Sapiens
uccgcggagcgcagccagaaccgggaccaag

SEQ ID NO: 34738 - RNA, 32 nt, Homo Sapiens
ugacuucugggaacugcuuugcauuucuccua

SEQ ID NO: 34739 - RNA, 32 nt, Homo Sapiens
ugcaggcaugagcuaccacgccuggcuaauuu

SEQ ID NO: 34740 - RNA, 32 nt, Homo Sapiens
cugguugaauugugucccccucaaauucacau

SEQ ID NO: 34741 - RNA, 32 nt, Homo Sapiens
cagcugcccucccuggcaccccugccccaccu

SEQ ID NO: 34742 - RNA, 32 nt, Homo Sapiens
cgguucucagaauuguuaucacucuggugcau

SEQ ID NO: 34743 - RNA, 32 nt, Homo Sapiens
uacaaugaaucuaaaaugcuuaucacaguacu

SEQ ID NO: 34744 - RNA, 32 nt, Homo Sapiens
agcaggagagagaggguaggcuagggguggga

SEQ ID NO: 34745 - RNA, 32 nt, Homo Sapiens
uguggacuuauaaugguucaauuuagauuuuu

SEQ ID NO: 34746 - RNA, 32 nt, Homo Sapiens
cuuaaugagguuagacuuuaucaaauauaagu

SEQ ID NO: 34747 - RNA, 32 nt, Homo Sapiens
cugccuaauugucaaggccuccuuggcucugg

SEQ ID NO: 34748 - RNA, 32 nt, Homo Sapiens
auauaagucuguguuaaaucuguauaauucag

SEQ ID NO: 34749 - RNA, 32 nt, Homo Sapiens
gagcgauggcgcccggcccacucagcaggauu

SEQ ID NO: 34750 - RNA, 32 nt, Homo Sapiens
ugcggggacgggccggccgcggccguagccgu

SEQ ID NO: 34751 - RNA, 31 nt, Homo Sapiens
ucuucuaaaaauuaaaaaaaaaaaaaauagg

SEQ ID NO: 34752 - RNA, 32 nt, Homo Sapiens
uauaaacuauacagaaaacuguauuugcugaa

SEQ ID NO: 34753 - RNA, 32 nt, Homo Sapiens
uccaaggccccggaccaaggggauacuguaau

SEQ ID NO: 34754 - RNA, 32 nt, Homo Sapiens
uauguggaaaugcuuucagucuuguuacuauc

SEQ ID NO: 34755 - RNA, 32 nt, Homo Sapiens
aaaggauaaaaagccgguggaagcggagcuga

SEQ ID NO: 34756 - RNA, 32 nt, Homo Sapiens
uugcgaccacaagcuucaugaugucuuaauug

SEQ ID NO: 34757 - RNA, 32 nt, Homo Sapiens
cgccuuugccccacccuacucugcccagaagu

SEQ ID NO: 34758 - RNA, 32 nt, Homo Sapiens
uaaggaauauauauggaauaaguguacauaug

SEQ ID NO: 34759 - RNA, 32 nt, Homo Sapiens
aggugugaggaucauuuaggccuggaagguug

SEQ ID NO: 34760 - RNA, 32 nt, Homo Sapiens
cuuagggguaugcgccuguaacuauagcugag

SEQ ID NO: 34761 - RNA, 32 nt, Homo Sapiens
ucuaagccuauuuuauuuuuuauaaaacuaug

SEQ ID NO: 34762 - RNA, 32 nt, Homo Sapiens
uggaaugagaaacuaaugaggaccuaaaugcc

SEQ ID NO: 34763 - RNA, 32 nt, Homo Sapiens
cuccuauucaacaaaguauuggaaguccuggu

SEQ ID NO: 34764 - RNA, 32 nt, Homo Sapiens
aaucacagccccagcuccuugacccccaucua

SEQ ID NO: 34765 - RNA, 32 nt, Homo Sapiens
aacacaaagcaucuugguuaaggagguuaggg

SEQ ID NO: 34766 - RNA, 32 nt, Homo Sapiens
agaacugcaacagaacaggagauggaauucca

SEQ ID NO: 34767 - RNA, 32 nt, Homo Sapiens
uauuuguaaauaaaaguguucaucacaaaaaa

SEQ ID NO: 34768 - RNA, 32 nt, Homo Sapiens
aauucgaugaucugaggauuuaaauucacaaa

SEQ ID NO: 34769 - RNA, 32 nt, Homo Sapiens
auguggucacacagugaaauggucaauuucua

SEQ ID NO: 34770 - RNA, 32 nt, Homo Sapiens
cccucccucagauguacuuuggcuucaaugau

SEQ ID NO: 34771 - RNA, 32 nt, Homo Sapiens
uucccaguguucaagacuggggaggaagacug

SEQ ID NO: 34772 - RNA, 32 nt, Homo Sapiens
ugaugcacaaaauaaauggcuguugaaauuug

SEQ ID NO: 34773 - RNA, 32 nt, Homo Sapiens
cgucacucgcucaggcgcgccgagggcagucc

SEQ ID NO: 34774 - RNA, 32 nt, Homo Sapiens
cccaccuggccgggcgcuggcuccucccucag

SEQ ID NO: 34775 - RNA, 32 nt, Homo Sapiens
cauuccaggaaagaagcagcuuagagaaaaug

SEQ ID NO: 34776 - RNA, 32 nt, Homo Sapiens
uaacugagacuauuuuuggagcuuaagauuug

SEQ ID NO: 34777 - RNA, 32 nt, Homo Sapiens
gggaagcauggauggauggagaaggaugccuc

SEQ ID NO: 34778 - RNA, 32 nt, Homo Sapiens
gucagauggaagcucuguggccuuuccuaacu

SEQ ID NO: 34779 - RNA, 32 nt, Homo Sapiens
acgcguccggugcggacgggcgcggaccaccu

SEQ ID NO: 34780 - RNA, 32 nt, Homo Sapiens
ucacagaaagaauaguaguuagguucccuaac

SEQ ID NO: 34781 - RNA, 32 nt, Homo Sapiens
ggggcgcggcugggcugcuggugcuuccggga

SEQ ID NO: 34782 - RNA, 31 nt, Homo Sapiens
acagugagcugaguacuucagaauuggagga

SEQ ID NO: 34783 - RNA, 32 nt, Homo Sapiens
ucugagcccccaggcccucccgcaucucaggu

SEQ ID NO: 34784 - RNA, 32 nt, Homo Sapiens
gaaggcuucacuggauuugugaggauaaaaua

SEQ ID NO: 34785 - RNA, 32 nt, Homo Sapiens
ugcgggggccgcgcgcugcuucucugaggcag

SEQ ID NO: 34786 - RNA, 32 nt, Homo Sapiens
auauuaggaacauucagaauuauuuguguuuu

SEQ ID NO: 34787 - RNA, 32 nt, Homo Sapiens
cuauguauuucugucuauuuuuucaauuuccc

SEQ ID NO: 34788 - RNA, 32 nt, Homo Sapiens
uggcuucuggacucugcaguccaggucucccu

SEQ ID NO: 34789 - RNA, 31 nt, Homo Sapiens
caccugccucauugccugcccugccagaggg

SEQ ID NO: 34790 - RNA, 32 nt, Homo Sapiens
ggguugggagacggggcuggcacggaauggua

SEQ ID NO: 34791 - RNA, 32 nt, Homo Sapiens
uuuggcucaggucauugggaacccauuacuaa

SEQ ID NO: 34792 - RNA, 32 nt, Homo Sapiens
uccuggagccccacaggagcacgugauugccu

SEQ ID NO: 34793 - RNA, 32 nt, Homo Sapiens
ggacucccaggcagaaaagaggcaggcugcag

SEQ ID NO: 34794 - RNA, 32 nt, Homo Sapiens
ccccuacuccuccgccuucucuuccuuggccg

SEQ ID NO: 34795 - RNA, 32 nt, Homo Sapiens
gguagaggaaaaauagugaaaacuuugggauu

SEQ ID NO: 34796 - RNA, 32 nt, Homo Sapiens
ugcuaaugucauugcuuauccuuaaguuuuca

SEQ ID NO: 34797 - RNA, 32 nt, Homo Sapiens
ccccggaucccgggguggggccaaguuacaca

SEQ ID NO: 34798 - RNA, 32 nt, Homo Sapiens
uggaugcucuggcuaggcucggcggccuuuuc

SEQ ID NO: 34799 - RNA, 32 nt, Homo Sapiens
gcggcauguugaccacaccagacuggguuuca

SEQ ID NO: 34800 - RNA, 32 nt, Homo Sapiens
acuuucucugaggggauaaauauuuuaucgag

SEQ ID NO: 34801 - RNA, 32 nt, Homo Sapiens
caaaguguauaaaugaaaagaugauguuucua

SEQ ID NO: 34802 - RNA, 32 nt, Homo Sapiens
gaucuuacagacuguaucagucuaauuuuuaa

SEQ ID NO: 34803 - RNA, 32 nt, Homo Sapiens
guuucagaucuaaugguuuaauuuagggagua

SEQ ID NO: 34804 - RNA, 31 nt, Homo Sapiens
guaugcacaaagaauuaauuagcauuauuaa

SEQ ID NO: 34805 - RNA, 32 nt, Homo Sapiens
auccugaguccagaaugguacacaaugugauu

SEQ ID NO: 34806 - RNA, 32 nt, Homo Sapiens
uggccauguccccaagccccacugacaugaac

SEQ ID NO: 34807 - RNA, 32 nt, Homo Sapiens
aguagccauauguaacgggauuuuaaaaauau

SEQ ID NO: 34808 - RNA, 32 nt, Homo Sapiens
ucguucccucuggccuggcggaacuugcgugg

SEQ ID NO: 34809 - RNA, 32 nt, Homo Sapiens
uugcacacacacccacccacacaccauucaga

SEQ ID NO: 34810 - RNA, 32 nt, Homo Sapiens
auuagccuggugugguggcccgcaccuguggu

SEQ ID NO: 34811 - RNA, 32 nt, Homo Sapiens
cugugcacaccugcucucuccucucucccagg

SEQ ID NO: 34812 - RNA, 32 nt, Homo Sapiens
aacuuaguaauuuagcaguaacaucaacaucc

SEQ ID NO: 34813 - RNA, 32 nt, Homo Sapiens
ucuuggcccgguuucauccccccaugacuggu

SEQ ID NO: 34814 - RNA, 32 nt, Homo Sapiens
ggcccugcagcucuggggagccaggagucgcg

SEQ ID NO: 34815 - RNA, 32 nt, Homo Sapiens
uccgccuugcgguagaaccccuggauacauua

SEQ ID NO: 34816 - RNA, 32 nt, Homo Sapiens
ggucccuggaaugucuauuuuuauuuugaugu

SEQ ID NO: 34817 - RNA, 32 nt, Homo Sapiens
ggcgcgccccucggccaguccucgguccucag

SEQ ID NO: 34818 - RNA, 32 nt, Homo Sapiens
aaggguuguaaaaaucugugaaaaaguuuuuc

SEQ ID NO: 34819 - RNA, 32 nt, Homo Sapiens
aacaaaggcauuaagaaaguacuagaugaaaa

SEQ ID NO: 34820 - RNA, 32 nt, Homo Sapiens
acacucacacuacucuguuccucuucccagag

SEQ ID NO: 34821 - RNA, 32 nt, Homo Sapiens
guucaagaacuaaaacaauccaaaacggcuac

SEQ ID NO: 34822 - RNA, 32 nt, Homo Sapiens
uguuugaggaagcucugcagaagugggagcag

SEQ ID NO: 34823 - RNA, 32 nt, Homo Sapiens
aagcuuggucuucagcuggggaagaggccaga

SEQ ID NO: 34824 - RNA, 32 nt, Homo Sapiens
cuugggaagugacaccaguucuuuuaaaauaa

SEQ ID NO: 34825 - RNA, 32 nt, Homo Sapiens
cccuggcuccuucagacacgugcuugaugcug

SEQ ID NO: 34826 - RNA, 32 nt, Homo Sapiens
uaucauuuugaacucuggaaaaguauaagagu

SEQ ID NO: 34827 - RNA, 32 nt, Homo Sapiens
gccugcuggaggaggagagagcucugcuggca

SEQ ID NO: 34828 - RNA, 32 nt, Homo Sapiens
ggagccaggccccgaggcgccacgcuuuguga

SEQ ID NO: 34829 - RNA, 32 nt, Homo Sapiens
gggcuguggagcaaagugacuauccauuugga

SEQ ID NO: 34830 - RNA, 32 nt, Homo Sapiens
cccacccgaggguccagccaccagcccccuca

SEQ ID NO: 34831 - RNA, 28 nt, Homo Sapiens
guccuggcugauuucaggaugauuacau

SEQ ID NO: 34832 - RNA, 32 nt, Homo Sapiens
acuguaucuuuaguucaugacccaucaucagc

SEQ ID NO: 34833 - RNA, 32 nt, Homo Sapiens
aaaaggauacuggagaucuaaaagauagcucu

SEQ ID NO: 34834 - RNA, 32 nt, Homo Sapiens
gccggggccgcggcggcccaaggagcagcaug

SEQ ID NO: 34835 - RNA, 32 nt, Homo Sapiens
caaccacacuccguccacggacucuccguuau

SEQ ID NO: 34836 - RNA, 32 nt, Homo Sapiens
acugaaggcuucccuuggcccaccgccuggcc

SEQ ID NO: 34837 - RNA, 32 nt, Homo Sapiens
uccagaauuaaaccuguuuuauaauucaaguu

SEQ ID NO: 34838 - RNA, 32 nt, Homo Sapiens
ccuguaaccgccccugccccccaaacuuagaa

SEQ ID NO: 34839 - RNA, 32 nt, Homo Sapiens
guuuuguuuuaagcuuuuuuuuuuugcuuguu

SEQ ID NO: 34840 - RNA, 32 nt, Homo Sapiens
accucuaacaagguuaaugugcaugcccaagg

SEQ ID NO: 34841 - RNA, 32 nt, Homo Sapiens
uaucuauaucuauaucuaaaacacuccuggac

SEQ ID NO: 34842 - RNA, 32 nt, Homo Sapiens
uacaaaauacuaguuguuuuacacucucuuuu

SEQ ID NO: 34843 - RNA, 32 nt, Homo Sapiens
cuccgagaccgagaguggguggagcgggucuu

SEQ ID NO: 34844 - RNA, 32 nt, Homo Sapiens
aaaagaggugacuguaucaaguagucuugaua

SEQ ID NO: 34845 - RNA, 32 nt, Homo Sapiens
gagaagaggcugcggcuguugcuggagggggg

SEQ ID NO: 34846 - RNA, 32 nt, Homo Sapiens
ccucuccccacuuuccaucuuuaaaugggcau

SEQ ID NO: 34847 - RNA, 32 nt, Homo Sapiens
cuguagguaaaaguacaagacgaccucuagau

SEQ ID NO: 34848 - RNA, 32 nt, Homo Sapiens
uucccuggggauccgacgggccccagaggacc

SEQ ID NO: 34849 - RNA, 32 nt, Homo Sapiens
uuucuaaacacuuuacuagaagaacauuucag

SEQ ID NO: 34850 - RNA, 32 nt, Homo Sapiens
caagaccauccugacuaacaaacacagugaaa

SEQ ID NO: 34851 - RNA, 32 nt, Homo Sapiens
agagaacugaguauagucauggccaacagcaa

SEQ ID NO: 34852 - RNA, 32 nt, Homo Sapiens
gaguuuuauagcacuauuuucagaauacaaaa

SEQ ID NO: 34853 - RNA, 32 nt, Homo Sapiens
aagccauggaugcccuggcccguggcaguguu

SEQ ID NO: 34854 - RNA, 32 nt, Homo Sapiens
guuuguuauagcaagauagcggcuacagcuua

SEQ ID NO: 34855 - RNA, 32 nt, Homo Sapiens
gagggcaucaggugcuggggccucugugucuc

SEQ ID NO: 34856 - RNA, 32 nt, Homo Sapiens
uccggggaaugggcgcccucgugaccuagugu

SEQ ID NO: 34857 - RNA, 32 nt, Homo Sapiens
gagcaggacgugccucuucuggacuugaccac

SEQ ID NO: 34858 - RNA, 32 nt, Homo Sapiens
ccgagggucaggcugcagaagcccagaauccc

SEQ ID NO: 34859 - RNA, 32 nt, Homo Sapiens
acgaagucaggagaucgagaccaaccuggcua

SEQ ID NO: 34860 - RNA, 32 nt, Homo Sapiens
cugugcgcgaugauugcuccagugaucacgcc

SEQ ID NO: 34861 - RNA, 32 nt, Homo Sapiens
uaguacguaguuuugucuuaccuguuaacuuu

SEQ ID NO: 34862 - RNA, 32 nt, Homo Sapiens
gguuugggagagaggagcaugcgcgagagagu

SEQ ID NO: 34863 - RNA, 30 nt, Homo Sapiens
acccaaccacuugcuuaaucucacuuucuu

SEQ ID NO: 34864 - RNA, 29 nt, Homo Sapiens
cagcuucggggacuggggcaaccgggcag

SEQ ID NO: 34865 - RNA, 32 nt, Homo Sapiens
cuccaguuuaucugugccccagcuuccucacu

SEQ ID NO: 34866 - RNA, 32 nt, Homo Sapiens
gggguggagcagcacuucaucgccgcgggggu

SEQ ID NO: 34867 - RNA, 32 nt, Homo Sapiens
gggauuacaagcauaagccaccgggcauggcc

SEQ ID NO: 34868 - RNA, 32 nt, Homo Sapiens
cacugcaguguuauuuucuuugaaauucaucc

SEQ ID NO: 34869 - RNA, 32 nt, Homo Sapiens
accccaccccccacccaccaccuucuggcucc

SEQ ID NO: 34870 - RNA, 32 nt, Homo Sapiens
accccucccgguuucuucugcccccuccugag

SEQ ID NO: 34871 - RNA, 32 nt, Homo Sapiens
cauuucaugcuucagcaauaaugggaaggauu

SEQ ID NO: 34872 - RNA, 32 nt, Homo Sapiens
ggagguaagaagaggagggucugugauacauc

SEQ ID NO: 34873 - RNA, 28 nt, Homo Sapiens
ugcgcaccguggcuaaggaugacgucug

SEQ ID NO: 34874 - RNA, 32 nt, Homo Sapiens
caccagagucggcguaacuaucgccugacagg

SEQ ID NO: 34875 - RNA, 32 nt, Homo Sapiens
agacauuuauaacucaaggauaccuucuuauu

SEQ ID NO: 34876 - RNA, 32 nt, Homo Sapiens
agguggcccccuuguccugcagaugggaaaac

SEQ ID NO: 34877 - RNA, 32 nt, Homo Sapiens
ggaugcccggcggcuccccgcuccuaggugcg

SEQ ID NO: 34878 - RNA, 32 nt, Homo Sapiens
caaauccauggguucuguguccguggauucaa

SEQ ID NO: 34879 - RNA, 32 nt, Homo Sapiens
ggcauagggacguggggugcaggcgccaacau

SEQ ID NO: 34880 - RNA, 32 nt, Homo Sapiens
cuugcgugugcuugcacgugcacgcacacaca

SEQ ID NO: 34881 - RNA, 32 nt, Homo Sapiens
cuauuuucaucagcuucuucucucuccccuug

SEQ ID NO: 34882 - RNA, 32 nt, Homo Sapiens
uuuccucccuuucauuugauaauuuuuccuuc

SEQ ID NO: 34883 - RNA, 31 nt, Homo Sapiens
uccauaaaguggcgugaagugagacguucuc

SEQ ID NO: 34884 - RNA, 32 nt, Homo Sapiens
gaggugguucuuccucuuacggacugcaaccu

SEQ ID NO: 34885 - RNA, 32 nt, Homo Sapiens
cguugggccagcgggggcgccgcagcugaagc

SEQ ID NO: 34886 - RNA, 32 nt, Homo Sapiens
caugucucaagauuuucuuaauuuaguucgcu

SEQ ID NO: 34887 - RNA, 32 nt, Homo Sapiens
aaaugccugcagggauuucaccaccucagggu

SEQ ID NO: 34888 - RNA, 32 nt, Homo Sapiens
uuccccugaacuuggaguacgcaacuuacaac

SEQ ID NO: 34889 - RNA, 32 nt, Homo Sapiens
cuauggggaguaccuuugguccccucacauuu

SEQ ID NO: 34890 - RNA, 32 nt, Homo Sapiens
uuuuagcauguuauuuauauuagcucauucau

SEQ ID NO: 34891 - RNA, 32 nt, Homo Sapiens
gagacugcagugagccgagauugugccacugc

SEQ ID NO: 34892 - RNA, 32 nt, Homo Sapiens
agcagggcagcuggacugcugcuguucaggag

SEQ ID NO: 34893 - RNA, 32 nt, Homo Sapiens
uaaccuacagcuugggucuauggcugugaccc

SEQ ID NO: 34894 - RNA, 32 nt, Homo Sapiens
gucugaaagaaaguaugguaugucuaaacugg

SEQ ID NO: 34895 - RNA, 32 nt, Homo Sapiens
cagauggagagugcuagugaggcggccaagaa

SEQ ID NO: 34896 - RNA, 32 nt, Homo Sapiens
ucuccuaggaaccucgggagcggcagcuccgg

SEQ ID NO: 34897 - RNA, 32 nt, Homo Sapiens
gccaugccagccuuucuguuuuccucaccuug

SEQ ID NO: 34898 - RNA, 31 nt, Homo Sapiens
uccuggugaaacaucucgagggcuuccuuuu

SEQ ID NO: 34899 - RNA, 32 nt, Homo Sapiens
ggcauugagcguagcuagcuuauuuccaucac

SEQ ID NO: 34900 - RNA, 32 nt, Homo Sapiens
agcuccugcuccuccuaaagccgaagccaaag

SEQ ID NO: 34901 - RNA, 32 nt, Homo Sapiens
ccgauguaaagccaugcuaggugguuuucaga

SEQ ID NO: 34902 - RNA, 32 nt, Homo Sapiens
ugucacuugugcuuugcucuugucccacgugu

SEQ ID NO: 34903 - RNA, 31 nt, Homo Sapiens
acauugugaaacaucgugggccucuuucuuc

SEQ ID NO: 34904 - RNA, 32 nt, Homo Sapiens
cccguguguccucaucugcggcaggcaggaga

SEQ ID NO: 34905 - RNA, 32 nt, Homo Sapiens
aggugaaauauucaacgcuuuuauuuuuucuc

SEQ ID NO: 34906 - RNA, 32 nt, Homo Sapiens
gauccucggccgcggcgacaucaccgccuggg

SEQ ID NO: 34907 - RNA, 30 nt, Homo Sapiens
uggagcggcaggcggaucgccccgacccuc

SEQ ID NO: 34908 - RNA, 32 nt, Homo Sapiens
gagcgggaucugcggcugccugcgagucucug

SEQ ID NO: 34909 - RNA, 32 nt, Homo Sapiens
ccuccuggcuggaagaaaacggcgggugggug

SEQ ID NO: 34910 - RNA, 32 nt, Homo Sapiens
uuccugcccaccuggugaggggaggcucugcc

SEQ ID NO: 34911 - RNA, 32 nt, Homo Sapiens
gacaucaacaaggcccuguaugucagugacaa

SEQ ID NO: 34912 - RNA, 32 nt, Homo Sapiens
uuuuguauuuaguagagacgggguuucaccau

SEQ ID NO: 34913 - RNA, 32 nt, Homo Sapiens
uuaauuuucuauuuagaaagaaaaguugaagc

SEQ ID NO: 34914 - RNA, 32 nt, Homo Sapiens
gcgggcgccgccgagggcuggcugggaacgcc

SEQ ID NO: 34915 - RNA, 32 nt, Homo Sapiens
auuugauuauggugaguugaauuuaagacaug

SEQ ID NO: 34916 - RNA, 32 nt, Homo Sapiens
uaguggccagcauccuccugcugcagauauag

SEQ ID NO: 34917 - RNA, 32 nt, Homo Sapiens
uuccccuggugugaggccaggcgugggcacuu

SEQ ID NO: 34918 - RNA, 32 nt, Homo Sapiens
cgguuugcagaauggaggagggaaguugaagg

SEQ ID NO: 34919 - RNA, 32 nt, Homo Sapiens
agaccagccauauggcagauacuguuguacug

SEQ ID NO: 34920 - RNA, 32 nt, Homo Sapiens
cuagaggguggacauuggcuacaggcucuucc

SEQ ID NO: 34921 - RNA, 32 nt, Homo Sapiens
ucagaacuagacaucaaugccuggauccuuca

SEQ ID NO: 34922 - RNA, 32 nt, Homo Sapiens
uagauauaaccaaaggcaucuuucaguuugua

SEQ ID NO: 34923 - RNA, 32 nt, Homo Sapiens
agcgggcuccuggguggcgagcaggcgcgugu

SEQ ID NO: 34924 - RNA, 32 nt, Homo Sapiens
gcucacugcuucugcuuuuucuuucuuuuuau

SEQ ID NO: 34925 - RNA, 32 nt, Homo Sapiens
acuuuuguaaguauauagaauaaaauguaaau

SEQ ID NO: 34926 - RNA, 32 nt, Homo Sapiens
cugcuucggaugggagcccagcuccuucgcuu

SEQ ID NO: 34927 - RNA, 32 nt, Homo Sapiens
auuucuuaacugucacaucuauugaaaaugga

SEQ ID NO: 34928 - RNA, 32 nt, Homo Sapiens
ucucccacagugggcuuucgugagccauggau

SEQ ID NO: 34929 - RNA, 32 nt, Homo Sapiens
uaaaagacugguuaaugauaauaaugcaacau

SEQ ID NO: 34930 - RNA, 32 nt, Homo Sapiens
ggacaauuuaccacaggaugcauauuaaagaa

SEQ ID NO: 34931 - RNA, 32 nt, Homo Sapiens
gcaagcacucaguaaauaucagcaaauaguuu

SEQ ID NO: 34932 - RNA, 32 nt, Homo Sapiens
aacaagaaaacaaaccacauacuuuugaagcg

SEQ ID NO: 34933 - RNA, 32 nt, Homo Sapiens
aaauccuuuucccccagcuuauuuuuauaaau

SEQ ID NO: 34934 - RNA, 32 nt, Homo Sapiens
ggugacccacuuucuuuuauacugcugcugaa

SEQ ID NO: 34935 - RNA, 32 nt, Homo Sapiens
auaaauucaaggaaauaagagauuuguaagaa

SEQ ID NO: 34936 - RNA, 32 nt, Homo Sapiens
uggaggucaaagcugaggugagccaugauuac

SEQ ID NO: 34937 - RNA, 32 nt, Homo Sapiens
gaccuccuccgcagaagagagaugcugcucug

SEQ ID NO: 34938 - RNA, 32 nt, Homo Sapiens
cauuuccucuuucuagccguccuuuucuagug

SEQ ID NO: 34939 - RNA, 32 nt, Homo Sapiens
agaugaggaaaggggacgccugucacccuucc

SEQ ID NO: 34940 - RNA, 32 nt, Homo Sapiens
ggccgggaccgcaggcccgcggcggccugcaa

SEQ ID NO: 34941 - RNA, 32 nt, Homo Sapiens
aguuuugaaaauuuacauuucccaaguauugc

SEQ ID NO: 34942 - RNA, 32 nt, Homo Sapiens
uuucucccugguuuugcuuaauuccacuuaug

SEQ ID NO: 34943 - RNA, 32 nt, Homo Sapiens
uugaaguuucaggauuugggugucacaaagga

SEQ ID NO: 34944 - RNA, 32 nt, Homo Sapiens
cuauagguucccuccaccacgcccagcuaauu

SEQ ID NO: 34945 - RNA, 32 nt, Homo Sapiens
cauuggugaauauauauguauacacauacuua

SEQ ID NO: 34946 - RNA, 32 nt, Homo Sapiens
cacugaaaacuguguccaauaucguucaguuu

SEQ ID NO: 34947 - RNA, 32 nt, Homo Sapiens
aaaaaaucagguauaauuacauacagugaaac

SEQ ID NO: 34948 - RNA, 30 nt, Homo Sapiens
gguaugggaaguggcauguucuaacuccua

SEQ ID NO: 34949 - RNA, 32 nt, Homo Sapiens
ugguaaacuaugggaugguaaauauccgagag

SEQ ID NO: 34950 - RNA, 32 nt, Homo Sapiens
guauagggaggggcaagguuauucccauccug

SEQ ID NO: 34951 - RNA, 32 nt, Homo Sapiens
caaagaaguucucauucaaugacauauuuuua

SEQ ID NO: 34952 - RNA, 32 nt, Homo Sapiens
cuguaaucucaacacuuugggaagccaaggga

SEQ ID NO: 34953 - RNA, 32 nt, Homo Sapiens
cuugugaaauuacgugcauacuggagucccuc

SEQ ID NO: 34954 - RNA, 30 nt, Homo Sapiens
aacccucugcauacccaucucccuacauuc

SEQ ID NO: 34955 - RNA, 32 nt, Homo Sapiens
aguaggggaaagggaaucauguugacaguuuu

SEQ ID NO: 34956 - RNA, 32 nt, Homo Sapiens
ccuuaggggaggaagaauugucauagagggaa

SEQ ID NO: 34957 - RNA, 32 nt, Homo Sapiens
gcgcggaggaggagggaggccaggcgggcaug

SEQ ID NO: 34958 - RNA, 32 nt, Homo Sapiens
gugagacuccgucucaacaacgaccacaacaa

SEQ ID NO: 34959 - RNA, 32 nt, Homo Sapiens
aacagugauagcugaaaauaugugggacccuu

SEQ ID NO: 34960 - RNA, 32 nt, Homo Sapiens
cgggcauuuuccucagcccagcccuaacccuc

SEQ ID NO: 34961 - RNA, 32 nt, Homo Sapiens
ucucagaccccaccccacccucaggugggcug

SEQ ID NO: 34962 - RNA, 32 nt, Homo Sapiens
ccccuggaccccugggguggccagggcuuccc

SEQ ID NO: 34963 - RNA, 32 nt, Homo Sapiens
uuaaggagaagggaaggcaggauacccagaac

SEQ ID NO: 34964 - RNA, 32 nt, Homo Sapiens
acucaagucaauccccucaaggaucugcauuc

SEQ ID NO: 34965 - RNA, 32 nt, Homo Sapiens
agugggggagggcaguccgugugugucugugu

SEQ ID NO: 34966 - RNA, 32 nt, Homo Sapiens
augaugcugucagagcugaaccacugaaagga

SEQ ID NO: 34967 - RNA, 32 nt, Homo Sapiens
cuuugccaaagacuuagaagcuaagcagaaaa

SEQ ID NO: 34968 - RNA, 32 nt, Homo Sapiens
auuuuuugagaccgagcagggauuagcugugu

SEQ ID NO: 34969 - RNA, 32 nt, Homo Sapiens
gcccugagcugcagccucggccccaggauccu

SEQ ID NO: 34970 - RNA, 32 nt, Homo Sapiens
caccucacaccugcucccugcugcugagcccc

SEQ ID NO: 34971 - RNA, 32 nt, Homo Sapiens
cgccgcgggucgcucgggcgcuguccaggcgg

SEQ ID NO: 34972 - RNA, 32 nt, Homo Sapiens
cuagaagcuggucauugggcugagggugagcu

SEQ ID NO: 34973 - RNA, 32 nt, Homo Sapiens
uuucugguccagugucccuucuccagauuaga

SEQ ID NO: 34974 - RNA, 32 nt, Homo Sapiens
caaagcuuuacuacucuuagaggacacaugcc

SEQ ID NO: 34975 - RNA, 32 nt, Homo Sapiens
cgccugcagccagcugggccgggcccccguag

SEQ ID NO: 34976 - RNA, 32 nt, Homo Sapiens
aauuguuuuuaaacccaaacuuaauuuuaugu

SEQ ID NO: 34977 - RNA, 32 nt, Homo Sapiens
uuuuugagacugagucucacuccaucagccag

SEQ ID NO: 34978 - RNA, 32 nt, Homo Sapiens
cauggauauucucuuuccucuggacaguguua

SEQ ID NO: 34979 - RNA, 32 nt, Homo Sapiens
gagcuguugggucuucaugacuccuuugcgug

SEQ ID NO: 34980 - RNA, 32 nt, Homo Sapiens
gcgcucagagggugcugguuggaggccagagc

SEQ ID NO: 34981 - RNA, 32 nt, Homo Sapiens
cccucagagauguguccccauccacacaucau

SEQ ID NO: 34982 - RNA, 32 nt, Homo Sapiens
uggcgucccgcacugggguguccucgcugucu

SEQ ID NO: 34983 - RNA, 32 nt, Homo Sapiens
aaaugugccacuuuucuguuggcucacaugca

SEQ ID NO: 34984 - RNA, 32 nt, Homo Sapiens
uucccgccacucggggacagaugggcacaagg

SEQ ID NO: 34985 - RNA, 32 nt, Homo Sapiens
ggccuucgugugcugcugcugcuauugcuguc

SEQ ID NO: 34986 - RNA, 32 nt, Homo Sapiens
uguuccucuccggcggaacacacacacccggc

SEQ ID NO: 34987 - RNA, 32 nt, Homo Sapiens
ugauagaagaaccuuggguuacaugugguuca

SEQ ID NO: 34988 - RNA, 32 nt, Homo Sapiens
cuucaccaguacccagucagugcccuucaguu

SEQ ID NO: 34989 - RNA, 32 nt, Homo Sapiens
ccaucaucagcugggaggaaaggcagaguugg

SEQ ID NO: 34990 - RNA, 32 nt, Homo Sapiens
ggcuacccauucuccccaucagcugcccaccu

SEQ ID NO: 34991 - RNA, 32 nt, Homo Sapiens
uccucccguuucuccuuccacucccagcucca

SEQ ID NO: 34992 - RNA, 32 nt, Homo Sapiens
cugagaguucccuauguacagucaucaagacu

SEQ ID NO: 34993 - RNA, 32 nt, Homo Sapiens
gggacuugcgccuccgcacgccccucccuuuc

SEQ ID NO: 34994 - RNA, 32 nt, Homo Sapiens
acucuaagccuucuagcaagaguuuucaacag

SEQ ID NO: 34995 - RNA, 32 nt, Homo Sapiens
caguucuuuguguauacuucugugucuguuau

SEQ ID NO: 34996 - RNA, 32 nt, Homo Sapiens
cugacaacaacuaucaccaaaagacgaggcgg

SEQ ID NO: 34997 - RNA, 32 nt, Homo Sapiens
ccagacacuuuuuugaguggaugauguuucgu

SEQ ID NO: 34998 - RNA, 32 nt, Homo Sapiens
agagacuggagagccagaggccccugagcccc

SEQ ID NO: 34999 - RNA, 32 nt, Homo Sapiens
gucccccaugaccuccucccacccucccccug

SEQ ID NO: 35000 - RNA, 32 nt, Homo Sapiens
cugggggccgaggggacggcucugguucccca

SEQ ID NO: 35001 - RNA, 32 nt, Homo Sapiens
cuccggagccgcgccgccgccggcccagcauc

SEQ ID NO: 35002 - RNA, 32 nt, Homo Sapiens
ggcggugcggcagcgcgaagccugcaguccua

SEQ ID NO: 35003 - RNA, 32 nt, Homo Sapiens
ugucuuacaggcggcuauugcagacggcuaau

SEQ ID NO: 35004 - RNA, 32 nt, Homo Sapiens
ugagaacaucuucccugaacucucguaucuua

SEQ ID NO: 35005 - RNA, 32 nt, Homo Sapiens
cuuuggggauggaaugaauauauuuuacaugu

SEQ ID NO: 35006 - RNA, 32 nt, Homo Sapiens
aucuucuugacaacaggagcaguccuuuuauu

SEQ ID NO: 35007 - RNA, 32 nt, Homo Sapiens
uaauuccccacuucuucaguguacgcugcuca

SEQ ID NO: 35008 - RNA, 32 nt, Homo Sapiens
cugguucccaugaacgugguugucagaggcgg

SEQ ID NO: 35009 - RNA, 32 nt, Homo Sapiens
aagugucuccuccaugcccuugggcagguucc

SEQ ID NO: 35010 - RNA, 32 nt, Homo Sapiens
aggacguucaacauggugaggggcuacaagaa

SEQ ID NO: 35011 - RNA, 32 nt, Homo Sapiens
ucaaggcagggccucccuucaucuucuuaaau

SEQ ID NO: 35012 - RNA, 32 nt, Homo Sapiens
agggcuucugucccugucagcggcagagggcg

SEQ ID NO: 35013 - RNA, 32 nt, Homo Sapiens
agaaggaagaggaggaagcugagggcccgcug

SEQ ID NO: 35014 - RNA, 32 nt, Homo Sapiens
gugaagaaugagaagggaaaagcaaaaauuau

SEQ ID NO: 35015 - RNA, 32 nt, Homo Sapiens
guaggccuauaaaauuaaaugccuuguauaaa

SEQ ID NO: 35016 - RNA, 32 nt, Homo Sapiens
cuaguggccagaggagggaggggcacagugaa

SEQ ID NO: 35017 - RNA, 32 nt, Homo Sapiens
cagccagacaccugcaucccuggcuccucuau

SEQ ID NO: 35018 - RNA, 32 nt, Homo Sapiens
aaccacagguuccauagaacuaauauccuguc

SEQ ID NO: 35019 - RNA, 32 nt, Homo Sapiens
aauuuguuuuucagagauuuaccacccaggua

SEQ ID NO: 35020 - RNA, 32 nt, Homo Sapiens
aaggagaaacgaaucgcugcugcucuucuaaa

SEQ ID NO: 35021 - RNA, 32 nt, Homo Sapiens
accaaaaagauuaaacaaaaaauacuauaaaa

SEQ ID NO: 35022 - RNA, 32 nt, Homo Sapiens
acuacuuuuuuucacuuuuuuaucccuguuua

SEQ ID NO: 35023 - RNA, 32 nt, Homo Sapiens
gcagagggaaagggcucagagaaccagauauu

SEQ ID NO: 35024 - RNA, 28 nt, Homo Sapiens
gcaucacuuacaggaccagagggacaag

SEQ ID NO: 35025 - RNA, 32 nt, Homo Sapiens
ugucagucggagcauccuggggcucccuggcu

SEQ ID NO: 35026 - RNA, 32 nt, Homo Sapiens
ucuucaccuggucacggucucaucugacagug

SEQ ID NO: 35027 - RNA, 32 nt, Homo Sapiens
acuccaccgcggcuuucgcaucggagacgugu

SEQ ID NO: 35028 - RNA, 32 nt, Homo Sapiens
cugcuccuucugcuguggcaagaagcaauagu

SEQ ID NO: 35029 - RNA, 32 nt, Homo Sapiens
auugcugcugcuaccagcgccaaauguucauc

SEQ ID NO: 35030 - RNA, 32 nt, Homo Sapiens
uucaaaauauuugcaaugggacccucacauuu

SEQ ID NO: 35031 - RNA, 32 nt, Homo Sapiens
cccuaaacuuuggccggccgccgggcgacacc

SEQ ID NO: 35032 - RNA, 32 nt, Homo Sapiens
uuccaguuccacccuuuccuggggcaccacca

SEQ ID NO: 35033 - RNA, 29 nt, Homo Sapiens
uguauuucuaaauguuucccaggcuaaua

SEQ ID NO: 35034 - RNA, 32 nt, Homo Sapiens
uacaaaacuaccccuuuuuuugucccuuuuca

SEQ ID NO: 35035 - RNA, 32 nt, Homo Sapiens
uucaaacuucuagaaagaaaauuuaacauuug

SEQ ID NO: 35036 - RNA, 32 nt, Homo Sapiens
uggugucaugcucccuccuccucgauacagaa

SEQ ID NO: 35037 - RNA, 32 nt, Homo Sapiens
uucacggcagaggcaaggcugcugcagcuccg

SEQ ID NO: 35038 - RNA, 31 nt, Homo Sapiens
uaagaucugcugguuucaggagucaaaaugu

SEQ ID NO: 35039 - RNA, 32 nt, Homo Sapiens
uuauaacucuagggauauaaaaacagauucug

SEQ ID NO: 35040 - RNA, 32 nt, Homo Sapiens
augauuaugauuaugauugaaugauagcugac

SEQ ID NO: 35041 - RNA, 32 nt, Homo Sapiens
ucgcgggaguccucgcccacgcggcgccucaa

SEQ ID NO: 35042 - RNA, 32 nt, Homo Sapiens
gggcuggaaugggagaccuguuggccuguggg

SEQ ID NO: 35043 - RNA, 32 nt, Homo Sapiens
cgggccuggcgagcuccgggcuccuccacccg

SEQ ID NO: 35044 - RNA, 32 nt, Homo Sapiens
uguccccaccccagcgcagcagcccuccccgc

SEQ ID NO: 35045 - RNA, 32 nt, Homo Sapiens
guuccuggauccuggggcugcguggggggcgg

SEQ ID NO: 35046 - RNA, 32 nt, Homo Sapiens
aaaaagaacaguuucuuccaugugcuggcacg

SEQ ID NO: 35047 - RNA, 32 nt, Homo Sapiens
uacuaaaaauacaaaaauuugcugggcuuggu

SEQ ID NO: 35048 - RNA, 30 nt, Homo Sapiens
agauguuugaggcuuucagaagcucuucua

SEQ ID NO: 35049 - RNA, 32 nt, Homo Sapiens
cccgaauugcugucacuuuggcgagggagugg

SEQ ID NO: 35050 - RNA, 32 nt, Homo Sapiens
cacucccccuccuccaccccagccugcugcug

SEQ ID NO: 35051 - RNA, 32 nt, Homo Sapiens
ggucuggaaaauuuugaugcaaagauggccac

SEQ ID NO: 35052 - RNA, 32 nt, Homo Sapiens
uuaucaaauuauugcuuuuuuauuuuauaaua

SEQ ID NO: 35053 - RNA, 32 nt, Homo Sapiens
cucuuauagaaaguucaaaaagucuacgcucu

SEQ ID NO: 35054 - RNA, 31 nt, Homo Sapiens
cggagaaccuggcccaccugacuuggcuuuc

SEQ ID NO: 35055 - RNA, 32 nt, Homo Sapiens
augaagcgcucggggacucugcggcugcucuc

SEQ ID NO: 35056 - RNA, 32 nt, Homo Sapiens
gaggacacagagccacugugcagcaggagucg

SEQ ID NO: 35057 - RNA, 32 nt, Homo Sapiens
agaggguuaauguuuggcacaauggugacugu

SEQ ID NO: 35058 - RNA, 32 nt, Homo Sapiens
ucugccccaagcagaagcugcagggaccucag

SEQ ID NO: 35059 - RNA, 32 nt, Homo Sapiens
cacugccagccgucccucugggggccauuucu

SEQ ID NO: 35060 - RNA, 32 nt, Homo Sapiens
gagcccgaccccagccagcgccuuccacucca

SEQ ID NO: 35061 - RNA, 32 nt, Homo Sapiens
ggaaggaaagccagacacaaugcugcaaugaa

SEQ ID NO: 35062 - RNA, 32 nt, Homo Sapiens
augucauggcucuguucauauuuuugucuugu

SEQ ID NO: 35063 - RNA, 32 nt, Homo Sapiens
uucaagaccugccuggccaacauggugaaacc

SEQ ID NO: 35064 - RNA, 32 nt, Homo Sapiens
cauuuuuucccagugagucacauccugggauc

SEQ ID NO: 35065 - RNA, 32 nt, Homo Sapiens
uaggcaccaaccccacccaaucaucccuuugu

SEQ ID NO: 35066 - RNA, 32 nt, Homo Sapiens
ccuggcugaagauacaugccgagucagcacau

SEQ ID NO: 35067 - RNA, 32 nt, Homo Sapiens
cucacacugacaucugcucucuaaucacagag

SEQ ID NO: 35068 - RNA, 29 nt, Homo Sapiens
ucuacugugacuucuuccuguguaaucuc

SEQ ID NO: 35069 - RNA, 32 nt, Homo Sapiens
guaaauauauauacuuacguguauaucaguau

SEQ ID NO: 35070 - RNA, 32 nt, Homo Sapiens
cccacucucccgggccuuggccugcaggugcu

SEQ ID NO: 35071 - RNA, 32 nt, Homo Sapiens
cguucauauuccaguggucaauguagauuuca

SEQ ID NO: 35072 - RNA, 32 nt, Homo Sapiens
ugaccucaguugguuuguuuugccuuaggcua

SEQ ID NO: 35073 - RNA, 32 nt, Homo Sapiens
acaacaaaaaaacaacaacauaaaaauccuug

SEQ ID NO: 35074 - RNA, 32 nt, Homo Sapiens
ucuuuuugaauauguaaggucuguggagauaa

SEQ ID NO: 35075 - RNA, 32 nt, Homo Sapiens
ccugccgcgugcuuuagacgccggcugacaaa

SEQ ID NO: 35076 - RNA, 32 nt, Homo Sapiens
uucccauccuggaugaacauguuauaauagac

SEQ ID NO: 35077 - RNA, 32 nt, Homo Sapiens
acauggacgagggacugguggcugggagggag

SEQ ID NO: 35078 - RNA, 32 nt, Homo Sapiens
uaaaaugcacaaaacuuugauucuuuuguaug

SEQ ID NO: 35079 - RNA, 32 nt, Homo Sapiens
uggcccucaaggaagaggaccagcuccugguc

SEQ ID NO: 35080 - RNA, 32 nt, Homo Sapiens
gccaguuucuucauuuuacauauggucacauu

SEQ ID NO: 35081 - RNA, 32 nt, Homo Sapiens
guuauguaaaagaccugaagaauuacuaucua

SEQ ID NO: 35082 - RNA, 32 nt, Homo Sapiens
aaaggaaauagaauuaagcaucugaagagcaa

SEQ ID NO: 35083 - RNA, 32 nt, Homo Sapiens
uguaaauaugguguugccuuuaugguuccuua

SEQ ID NO: 35084 - RNA, 32 nt, Homo Sapiens
ggcguggcaugagggcaaggcccgcaagcucu

SEQ ID NO: 35085 - RNA, 32 nt, Homo Sapiens
uucugugaaugccuauguuauugauaugugga

SEQ ID NO: 35086 - RNA, 32 nt, Homo Sapiens
accauuuaaaauugacauuuaauuuucaaauc

SEQ ID NO: 35087 - RNA, 32 nt, Homo Sapiens
auuccagcucaagaagucuacugcacaaucca

SEQ ID NO: 35088 - RNA, 32 nt, Homo Sapiens
caccaaaaaaauuucaaacaagaaaaaaaaaa

SEQ ID NO: 35089 - RNA, 32 nt, Homo Sapiens
uggaaagccugcagcggcguguagaagacgaa

SEQ ID NO: 35090 - RNA, 32 nt, Homo Sapiens
acuuaccugcucucaugaggcuuucaggcguu

SEQ ID NO: 35091 - RNA, 32 nt, Homo Sapiens
ccuggcucaugcccaacacauuucugcuaaua

SEQ ID NO: 35092 - RNA, 31 nt, Homo Sapiens
uuucaggagccccaggucaagccuugucccu

SEQ ID NO: 35093 - RNA, 32 nt, Homo Sapiens
auuuggccauuaaucuuuuuuauuuaaaaauu

SEQ ID NO: 35094 - RNA, 32 nt, Homo Sapiens
cgccucgccuccccucaccuugccucaccucg

SEQ ID NO: 35095 - RNA, 32 nt, Homo Sapiens
gaccucuguccuguuuuagcaucccgggagac

SEQ ID NO: 35096 - RNA, 32 nt, Homo Sapiens
aaauaugaaaauauucauuguucauuaugaau

SEQ ID NO: 35097 - RNA, 32 nt, Homo Sapiens
cccaugucugccauuauuuucuuucuuuaccu

SEQ ID NO: 35098 - RNA, 32 nt, Homo Sapiens
agccgagcacgcuguaccgccagccccagccc

SEQ ID NO: 35099 - RNA, 32 nt, Homo Sapiens
auggagaacaggugguguggcaggcgagcggg

SEQ ID NO: 35100 - RNA, 32 nt, Homo Sapiens
uugccucuuccuguuucuccugaggaugcucc

SEQ ID NO: 35101 - RNA, 32 nt, Homo Sapiens
gaaucauuuuggaaugaauauugacagaauca

SEQ ID NO: 35102 - RNA, 32 nt, Homo Sapiens
uuuuauggcucccagagcauauauucaguugg

SEQ ID NO: 35103 - RNA, 32 nt, Homo Sapiens
uguauuaugcugucauaucagagucaagugaa

SEQ ID NO: 35104 - RNA, 32 nt, Homo Sapiens
augggagugucuagaugccugaaagggccugg

SEQ ID NO: 35105 - RNA, 32 nt, Homo Sapiens
ugcagccgcccguagguagcgggccguuuucc

SEQ ID NO: 35106 - RNA, 30 nt, Homo Sapiens
caccacagcaggcgcuggaguccugggacc

SEQ ID NO: 35107 - RNA, 32 nt, Homo Sapiens
guccucagggaagaggacgccaggacuucgca

SEQ ID NO: 35108 - RNA, 32 nt, Homo Sapiens
ucgcuuuaaagcgccagucuuucugucaaaug

SEQ ID NO: 35109 - RNA, 32 nt, Homo Sapiens
gggagacagcaaucaauggccugcuuuuucca

SEQ ID NO: 35110 - RNA, 32 nt, Homo Sapiens
ggcaacugggcacugaaucagaggagcagagu

SEQ ID NO: 35111 - RNA, 32 nt, Homo Sapiens
ucagucccaccuuuucgggcugucccaugucu

SEQ ID NO: 35112 - RNA, 32 nt, Homo Sapiens
cgaagcccacccaugggcuggcucugggaggc

SEQ ID NO: 35113 - RNA, 32 nt, Homo Sapiens
cauugcacuccagccugggugacaagagugag

SEQ ID NO: 35114 - RNA, 32 nt, Homo Sapiens
guaaaaugauaaaauagucauuauauaguuca

SEQ ID NO: 35115 - RNA, 32 nt, Homo Sapiens
auuuucuaaaagacauaguauuuaguuuauaa

SEQ ID NO: 35116 - RNA, 32 nt, Homo Sapiens
aguguccuauuaucugugauuauuuucuuaau

SEQ ID NO: 35117 - RNA, 32 nt, Homo Sapiens
uacaugcgugacucacaggcagccaaggaccu

SEQ ID NO: 35118 - RNA, 32 nt, Homo Sapiens
cugaauuugucaaauaccccuuccaaaauuau

SEQ ID NO: 35119 - RNA, 32 nt, Homo Sapiens
ucaaauacuuuaucuagacaauuuaaguacug

SEQ ID NO: 35120 - RNA, 32 nt, Homo Sapiens
ucacuugccuugaaauggcuccagguggccug

SEQ ID NO: 35121 - RNA, 31 nt, Homo Sapiens
gguaacugauaaaaacaggaaauaugugaaa

SEQ ID NO: 35122 - RNA, 32 nt, Homo Sapiens
ccccagaggagcaugacuuggcugguccggag

SEQ ID NO: 35123 - RNA, 32 nt, Homo Sapiens
gcagacucugaccuguggcaucaggcuucucc

SEQ ID NO: 35124 - RNA, 32 nt, Homo Sapiens
auuuuauugguaggauuuauaucuaaguuugg

SEQ ID NO: 35125 - RNA, 30 nt, Homo Sapiens
uggaaggauaaaagaucuagucugggcagu

SEQ ID NO: 35126 - RNA, 32 nt, Homo Sapiens
uuggugaggagcuguugggucaugugguugau

SEQ ID NO: 35127 - RNA, 32 nt, Homo Sapiens
ucagguuccuuccuuguaccucagcacucugg

SEQ ID NO: 35128 - RNA, 32 nt, Homo Sapiens
guauucaucuucuucuucaucaagcucugauu

SEQ ID NO: 35129 - RNA, 32 nt, Homo Sapiens
agcaagcuauccuguugcaaaauagaaauuag

SEQ ID NO: 35130 - RNA, 32 nt, Homo Sapiens
ucagugugucccucaggcaccuggacacacag

SEQ ID NO: 35131 - RNA, 32 nt, Homo Sapiens
uugaauggaaaaggggccugaggaaauuuucu

SEQ ID NO: 35132 - RNA, 32 nt, Homo Sapiens
agaggccgcucugggggguugccucgaguccc

SEQ ID NO: 35133 - RNA, 32 nt, Homo Sapiens
ccuccacuuccuggggagguagcugcagaaua

SEQ ID NO: 35134 - RNA, 32 nt, Homo Sapiens
ugggagggguggggggcuggggugcugcguac

SEQ ID NO: 35135 - RNA, 32 nt, Homo Sapiens
gccgcagguggaagaggaaccggcgccccgca

SEQ ID NO: 35136 - RNA, 32 nt, Homo Sapiens
aagcugauuggaaacaauuaauuguggguguc

SEQ ID NO: 35137 - RNA, 32 nt, Homo Sapiens
ccugugauauugugaaauacauaguugaucuu

SEQ ID NO: 35138 - RNA, 31 nt, Homo Sapiens
gccucccagcgccucaggccccgcguuugug

SEQ ID NO: 35139 - RNA, 32 nt, Homo Sapiens
cucuccagcacgagcacccacuccuaguugcc

SEQ ID NO: 35140 - RNA, 32 nt, Homo Sapiens
agcagccagagccuacugcugccaucugaaga

SEQ ID NO: 35141 - RNA, 32 nt, Homo Sapiens
cacagaggcuccuguucuucugccuuggguug

SEQ ID NO: 35142 - RNA, 32 nt, Homo Sapiens
uuguggaggaggugaaagaaagggacccaccu

SEQ ID NO: 35143 - RNA, 32 nt, Homo Sapiens
cuggacacagcucccuggccccugcccccagc

SEQ ID NO: 35144 - RNA, 30 nt, Homo Sapiens
aguugcugcugcugcggcggcggcagcggc

SEQ ID NO: 35145 - RNA, 32 nt, Homo Sapiens
ucccaagagcucaggaacauggagcugaucca

SEQ ID NO: 35146 - RNA, 32 nt, Homo Sapiens
cugggaccuuggaacggcacgacgaugauggc

SEQ ID NO: 35147 - RNA, 32 nt, Homo Sapiens
uguuucccaaaauaagugcauuuauuuugaca

SEQ ID NO: 35148 - RNA, 32 nt, Homo Sapiens
gaaaagaagcucuaacagaggacccuggcugu

SEQ ID NO: 35149 - RNA, 32 nt, Homo Sapiens
ugaucccugccaugcuaucugcucugcucagc

SEQ ID NO: 35150 - RNA, 32 nt, Homo Sapiens
uuuuguuuucuuugagaaaauaaggacuuugu

SEQ ID NO: 35151 - RNA, 32 nt, Homo Sapiens
gaugaauucuuccucuccuucccacaaaagac

SEQ ID NO: 35152 - RNA, 32 nt, Homo Sapiens
ugcggcauucauuuuuaaaagaacgucuaucu

SEQ ID NO: 35153 - RNA, 32 nt, Homo Sapiens
guccacacccgccccgcgcgcggccgugggag

SEQ ID NO: 35154 - RNA, 32 nt, Homo Sapiens
ccuucucuuuuagcaccuuguuucacuccugc

SEQ ID NO: 35155 - RNA, 32 nt, Homo Sapiens
ggccuuuggcauuugggggaggaggccauugg

SEQ ID NO: 35156 - RNA, 32 nt, Homo Sapiens
agcagcacccgcagcucagagcccgggacguc

SEQ ID NO: 35157 - RNA, 32 nt, Homo Sapiens
gacugggcacagccagcagagccggggacugc

SEQ ID NO: 35158 - RNA, 32 nt, Homo Sapiens
auguaguuauaaauggaaauguuuacaccuga

SEQ ID NO: 35159 - RNA, 32 nt, Homo Sapiens
ugugcuuaggguuugcugcugcuggugagcuu

SEQ ID NO: 35160 - RNA, 32 nt, Homo Sapiens
uacagcccuccuucuuuuuuguuuucuguuga

SEQ ID NO: 35161 - RNA, 32 nt, Homo Sapiens
gaauacccauccccugaccgcauccccaguag

SEQ ID NO: 35162 - RNA, 32 nt, Homo Sapiens
gcuuugugacuauauaaauuguaacaguggau

SEQ ID NO: 35163 - RNA, 32 nt, Homo Sapiens
cuucaaccuuaggauguuuucagaccagaggc

SEQ ID NO: 35164 - RNA, 32 nt, Homo Sapiens
ccauuuuccugauucucuggcuugucaaucaa

SEQ ID NO: 35165 - RNA, 32 nt, Homo Sapiens
ccuccucuccugccagccuccuccucccugca

SEQ ID NO: 35166 - RNA, 32 nt, Homo Sapiens
ccaaccccaucccauguuuauuucacuuuuuc

SEQ ID NO: 35167 - RNA, 32 nt, Homo Sapiens
ccgacucggaacggcuuccgcggccggggcag

SEQ ID NO: 35168 - RNA, 32 nt, Homo Sapiens
cuuauauuuaaaaacagaauuaacucacauga

SEQ ID NO: 35169 - RNA, 32 nt, Homo Sapiens
gcuuuaaacacuuccaaugagauaaaauauuu

SEQ ID NO: 35170 - RNA, 32 nt, Homo Sapiens
caccccagccucagccggguuaagacaaguag

SEQ ID NO: 35171 - RNA, 32 nt, Homo Sapiens
uagauucuauuuacaaaauguuuguuuauaaa

SEQ ID NO: 35172 - RNA, 31 nt, Homo Sapiens
gccgccaugcccacggccgccgcccccauca

SEQ ID NO: 35173 - RNA, 32 nt, Homo Sapiens
gccuggguuggcgucuccugcugugagcuggc

SEQ ID NO: 35174 - RNA, 32 nt, Homo Sapiens
caguccacaaaauaaccaauccuggacaugaa

SEQ ID NO: 35175 - RNA, 32 nt, Homo Sapiens
aaaggcaguuauuugaggacuggcuauacacu

SEQ ID NO: 35176 - RNA, 32 nt, Homo Sapiens
cuggugccgccggcugcacuucugugugucuu

SEQ ID NO: 35177 - RNA, 32 nt, Homo Sapiens
gccauguugauuucugauccuugagcuuuucu

SEQ ID NO: 35178 - RNA, 32 nt, Homo Sapiens
agagguaggguggaugacccaggaaggccgcc

SEQ ID NO: 35179 - RNA, 32 nt, Homo Sapiens
uagcuuugaacauaauauuaaaacacuacuua

SEQ ID NO: 35180 - RNA, 32 nt, Homo Sapiens
gagucuuggccauggcuuuccugcaagaccac

SEQ ID NO: 35181 - RNA, 32 nt, Homo Sapiens
gagucuuauuugauuauggugggagggaaugu

SEQ ID NO: 35182 - RNA, 32 nt, Homo Sapiens
aguaaauuguacacagugaguccuuaauaaau

SEQ ID NO: 35183 - RNA, 32 nt, Homo Sapiens
cuucugccaccagccccuccccagacucucag

SEQ ID NO: 35184 - RNA, 32 nt, Homo Sapiens
agagagaaagaaggcugucugcucuuacauua

SEQ ID NO: 35185 - RNA, 32 nt, Homo Sapiens
cuuguuuguccuuuucuguggguuuagaacgu

SEQ ID NO: 35186 - RNA, 32 nt, Homo Sapiens
aaggacaauuuaauauaaauuucuguuugugc

SEQ ID NO: 35187 - RNA, 32 nt, Homo Sapiens
auauguagaacaauuugagccugagugaguuc

SEQ ID NO: 35188 - RNA, 32 nt, Homo Sapiens
ugggcaguagccacagagacuuuaguaaaggg

SEQ ID NO: 35189 - RNA, 32 nt, Homo Sapiens
gauugcugggauuguuuuuucuuuaaagaaga

SEQ ID NO: 35190 - RNA, 32 nt, Homo Sapiens
gucaacuucguuagcuuuuagaaucuaacaca

SEQ ID NO: 35191 - RNA, 32 nt, Homo Sapiens
cguuuuguucuuccccgcgagcucucccgcgc

SEQ ID NO: 35192 - RNA, 32 nt, Homo Sapiens
auuagguuaugaauaaagccucaugaaauccu

SEQ ID NO: 35193 - RNA, 32 nt, Homo Sapiens
acugauaucucccaagauuaaccuucacuuua

SEQ ID NO: 35194 - RNA, 32 nt, Homo Sapiens
gucaaaagccgugacaauuuguucuuugaugu

SEQ ID NO: 35195 - RNA, 32 nt, Homo Sapiens
cgguugcuauuuuuaguucuccacuuuccugg

SEQ ID NO: 35196 - RNA, 32 nt, Homo Sapiens
cauugcugccagccagcucugccuucccauca

SEQ ID NO: 35197 - RNA, 32 nt, Homo Sapiens
uugugcuugacuuugcacacacacgggaucuu

SEQ ID NO: 35198 - RNA, 32 nt, Homo Sapiens
aguuguuccagaaaucuucauuuuaaauagaa

SEQ ID NO: 35199 - RNA, 32 nt, Homo Sapiens
ggagcuuuggccauauauuuuuuagcaugcau

SEQ ID NO: 35200 - RNA, 32 nt, Homo Sapiens
aaggugaagcaggaagcacuugguuuucuccu

SEQ ID NO: 35201 - RNA, 32 nt, Homo Sapiens
ggcuggaggcgguggcugcgguugcgggaccg

SEQ ID NO: 35202 - RNA, 32 nt, Homo Sapiens
uccuuaaaauuuggacuuguacaguaaggacu

SEQ ID NO: 35203 - RNA, 32 nt, Homo Sapiens
agggacccgagagccgcucuggcaccggggga

SEQ ID NO: 35204 - RNA, 32 nt, Homo Sapiens
uuuuguauuuuuaucuucugucuaaugagcuu

SEQ ID NO: 35205 - RNA, 32 nt, Homo Sapiens
ggguggcccccucaacucuauuccccagacca

SEQ ID NO: 35206 - RNA, 32 nt, Homo Sapiens
cauccaugaacaugggauguguuuccauuugu

SEQ ID NO: 35207 - RNA, 32 nt, Homo Sapiens
uggcggcggggagggaggauccuguuucccac

SEQ ID NO: 35208 - RNA, 32 nt, Homo Sapiens
caauucuugauacauuuucguguuuuuuguua

SEQ ID NO: 35209 - RNA, 32 nt, Homo Sapiens
gcaauuuuuuaaaaauauguaacuggguugau

SEQ ID NO: 35210 - RNA, 32 nt, Homo Sapiens
caugcaccagaaauuugcugcagugucaguug

SEQ ID NO: 35211 - RNA, 32 nt, Homo Sapiens
cuucugcuuuacaggcuuuauuuaaaucugaa

SEQ ID NO: 35212 - RNA, 32 nt, Homo Sapiens
ggcugaaggcugccuccucuugcaggcuggcu

SEQ ID NO: 35213 - RNA, 32 nt, Homo Sapiens
gaaccaaaaacgccagucaugggaggcagagc

SEQ ID NO: 35214 - RNA, 32 nt, Homo Sapiens
acucaagacauacauagcaucucauuaggauu

SEQ ID NO: 35215 - RNA, 32 nt, Homo Sapiens
uugguucaaaaggaaagaaugauucaaagcag

SEQ ID NO: 35216 - RNA, 32 nt, Homo Sapiens
gggaggacgcccauggucggagggaucucgcc

SEQ ID NO: 35217 - RNA, 32 nt, Homo Sapiens
cugcuuuacaaaauccuuaaaacuacuaauuu

SEQ ID NO: 35218 - RNA, 32 nt, Homo Sapiens
agaguccauuguauuagucuuauuuucaucac

SEQ ID NO: 35219 - RNA, 32 nt, Homo Sapiens
acgccucgacgacagcggaccggagcugcagg

SEQ ID NO: 35220 - RNA, 32 nt, Homo Sapiens
auuguaaaacauugcccaucugucuugcucac

SEQ ID NO: 35221 - RNA, 32 nt, Homo Sapiens
uaagucauuuugcugccaccagaccagugaga

SEQ ID NO: 35222 - RNA, 32 nt, Homo Sapiens
caugucuucuaaaaauuauuuugugaagcccc

SEQ ID NO: 35223 - RNA, 32 nt, Homo Sapiens
gcucugaucucuccuuucccagagcaguugcu

SEQ ID NO: 35224 - RNA, 32 nt, Homo Sapiens
ucaccugcacuaugaagugcugcuggcugggc

SEQ ID NO: 35225 - RNA, 30 nt, Homo Sapiens
acaacuaagguggcugaagaccuuucuggc

SEQ ID NO: 35226 - RNA, 32 nt, Homo Sapiens
ggcuggaagaacuugguggccugggucccugg

SEQ ID NO: 35227 - RNA, 32 nt, Homo Sapiens
cucggcagcuaagaagcagugaccaggaugug

SEQ ID NO: 35228 - RNA, 32 nt, Homo Sapiens
acauguuuguuguuuagccaucuagucugugg

SEQ ID NO: 35229 - RNA, 32 nt, Homo Sapiens
cauggccagacaccccagucccuucaccacca

SEQ ID NO: 35230 - RNA, 32 nt, Homo Sapiens
cuucccacggcccguggaccuuugugcuccug

SEQ ID NO: 35231 - RNA, 32 nt, Homo Sapiens
gaguaaagaggacuugucuugaaucuggauac

SEQ ID NO: 35232 - RNA, 32 nt, Homo Sapiens
gcacucgccacaccgccgcugcagcuugggcc

SEQ ID NO: 35233 - RNA, 32 nt, Homo Sapiens
cagcugcaaggauggaaggcagagggugggug

SEQ ID NO: 35234 - RNA, 31 nt, Homo Sapiens
uuacugccuuccugccugcccuuuuugugca

SEQ ID NO: 35235 - RNA, 32 nt, Homo Sapiens
ccucauugaauauuauacuacuacugguaaaa

SEQ ID NO: 35236 - RNA, 32 nt, Homo Sapiens
guucugccagauguuccugggguuacuguaaa

SEQ ID NO: 35237 - RNA, 32 nt, Homo Sapiens
cugccaaauugagauaaugauacuuaaccagu

SEQ ID NO: 35238 - RNA, 32 nt, Homo Sapiens
uccacucccugcgccgccuccucccacccuga

SEQ ID NO: 35239 - RNA, 32 nt, Homo Sapiens
uauuaaaauauuagccaaauuucucucuguuu

SEQ ID NO: 35240 - RNA, 32 nt, Homo Sapiens
uuucuauaugucacuuuuuuuuuuuugguugu

SEQ ID NO: 35241 - RNA, 32 nt, Homo Sapiens
gccagcucaggauauuauguuucuuuuuucau

SEQ ID NO: 35242 - RNA, 32 nt, Homo Sapiens
aguguucugugccucuuacaugcccuggaggc

SEQ ID NO: 35243 - RNA, 32 nt, Homo Sapiens
gcucuaucgcccaggauggagugcaguggcuc

SEQ ID NO: 35244 - RNA, 32 nt, Homo Sapiens
ugcauguucuccaggaggccaggccgggguug

SEQ ID NO: 35245 - RNA, 32 nt, Homo Sapiens
cugaaggugcuggaggugccaagugagcaugu

SEQ ID NO: 35246 - RNA, 32 nt, Homo Sapiens
aggacguggaagacgaaaaucaguggacauaa

SEQ ID NO: 35247 - RNA, 32 nt, Homo Sapiens
agauucgacuguuaaucagugggucuuuuaaa

SEQ ID NO: 35248 - RNA, 32 nt, Homo Sapiens
cccgcggaaccccggcggccccgcgagcuagg

SEQ ID NO: 35249 - RNA, 32 nt, Homo Sapiens
uccaaucuguucucagggcauuuugagucaaa

SEQ ID NO: 35250 - RNA, 32 nt, Homo Sapiens
aacuguuuuccccaaagcuaaacaaguuaaaa

SEQ ID NO: 35251 - RNA, 32 nt, Homo Sapiens
auaguuucacaaaagcuucaaaaaauauacua

SEQ ID NO: 35252 - RNA, 32 nt, Homo Sapiens
accugauaauuuccuuagcagaauuaccuauu

SEQ ID NO: 35253 - RNA, 30 nt, Homo Sapiens
gaaccauggccgaugggggcgagggcgaag

SEQ ID NO: 35254 - RNA, 32 nt, Homo Sapiens
cacuggaccggaagaacaagucuauaaaaaua

SEQ ID NO: 35255 - RNA, 32 nt, Homo Sapiens
accauggagauuguuuuacaaacuuuugaugu

SEQ ID NO: 35256 - RNA, 32 nt, Homo Sapiens
uggaaaaaacaaaacacagacugcaauguuug

SEQ ID NO: 35257 - RNA, 32 nt, Homo Sapiens
accaagaacugggauuaaugaagcauuuuguu

SEQ ID NO: 35258 - RNA, 32 nt, Homo Sapiens
cuauuacauaaucaauggacgauuuauacuuu

SEQ ID NO: 35259 - RNA, 32 nt, Homo Sapiens
acacgugaggaaggcgcagcucuguggaaagg

SEQ ID NO: 35260 - RNA, 32 nt, Homo Sapiens
ugcauccuccaagcuggauuccuagacaucuc

SEQ ID NO: 35261 - RNA, 32 nt, Homo Sapiens
gcuagguccaucccggcccagccaccaugucc

SEQ ID NO: 35262 - RNA, 32 nt, Homo Sapiens
ugagauuugugcuacuuugggagauuauguuc

SEQ ID NO: 35263 - RNA, 32 nt, Homo Sapiens
uaauuuuacauguuuauaaaucuuaugcucuc

SEQ ID NO: 35264 - RNA, 32 nt, Homo Sapiens
ggggcggcggagagcgagcggcugaacagcca

SEQ ID NO: 35265 - RNA, 32 nt, Homo Sapiens
gcacagaguuugucagguuugaagccccuaug

SEQ ID NO: 35266 - RNA, 32 nt, Homo Sapiens
auccaguguuuuucuuuuuuuguaauucaaua

SEQ ID NO: 35267 - RNA, 32 nt, Homo Sapiens
gcugaccuccaagucggacaguuccaagaauc

SEQ ID NO: 35268 - RNA, 27 nt, Homo Sapiens
uggguuucccuaugcagccccccaccc

SEQ ID NO: 35269 - RNA, 28 nt, Homo Sapiens
ggcaugaugaagacucugcugcuguuug

SEQ ID NO: 35270 - RNA, 32 nt, Homo Sapiens
cagcacauccuucuucagguguuuccugcccu

SEQ ID NO: 35271 - RNA, 32 nt, Homo Sapiens
ggagugaacugaauucauacggauggcuuggg

SEQ ID NO: 35272 - RNA, 32 nt, Homo Sapiens
accagugugucugacagauggauauagaagac

SEQ ID NO: 35273 - RNA, 32 nt, Homo Sapiens
gggaccucaggaccagagacugcuugacucau

SEQ ID NO: 35274 - RNA, 32 nt, Homo Sapiens
guaauaauacuagcuagucagcauucacgccu

SEQ ID NO: 35275 - RNA, 32 nt, Homo Sapiens
ucgauaaauuuauuuucauuaaauacuuguua

SEQ ID NO: 35276 - RNA, 32 nt, Homo Sapiens
uaauacuguugguugaacuaugcugaagaggg

SEQ ID NO: 35277 - RNA, 32 nt, Homo Sapiens
uauaaaucaaggaaccaaauaucuguagccau

SEQ ID NO: 35278 - RNA, 32 nt, Homo Sapiens
uggcaauuacacacacacacaaacauacacuc

SEQ ID NO: 35279 - RNA, 32 nt, Homo Sapiens
aaaaggauaguaagcauagaaaccauuagaaa

SEQ ID NO: 35280 - RNA, 32 nt, Homo Sapiens
caugcugugauaugcuggucuucuuuccagcc

SEQ ID NO: 35281 - RNA, 32 nt, Homo Sapiens
aggcauuucacuauaaucaauaaaauaaagua

SEQ ID NO: 35282 - RNA, 32 nt, Homo Sapiens
caauccaagcaguucuuaauguuucccccacu

SEQ ID NO: 35283 - RNA, 32 nt, Homo Sapiens
gcucaggagcagcugcccaaagggcggcccag

SEQ ID NO: 35284 - RNA, 32 nt, Homo Sapiens
gggaaggaggucagcaacagggaacucauagu

SEQ ID NO: 35285 - RNA, 32 nt, Homo Sapiens
auaccuuugcuucuccuucuccuucugccaug

SEQ ID NO: 35286 - RNA, 32 nt, Homo Sapiens
gccaggugcggcccaggaucccgggaaaggca

SEQ ID NO: 35287 - RNA, 32 nt, Homo Sapiens
ggaccaagguuccauauuauauaggagcuaga

SEQ ID NO: 35288 - RNA, 32 nt, Homo Sapiens
uuguuuuguuuuaaagccaggacuugccaaau

SEQ ID NO: 35289 - RNA, 32 nt, Homo Sapiens
aacaacgauggcauggaaaacacuucccauuu

SEQ ID NO: 35290 - RNA, 32 nt, Homo Sapiens
gagagcacuugaaaaugaaaugacugucuaag

SEQ ID NO: 35291 - RNA, 32 nt, Homo Sapiens
gagauuuguccuccuugggggaccacuggauc

SEQ ID NO: 35292 - RNA, 30 nt, Homo Sapiens
guuugcacacuugccaccugcauuaccaau

SEQ ID NO: 35293 - RNA, 32 nt, Homo Sapiens
aaauuguuuaucugauauuccaauuuaacugc

SEQ ID NO: 35294 - RNA, 32 nt, Homo Sapiens
ccuuaaauauauauagauauguauauauacau

SEQ ID NO: 35295 - RNA, 32 nt, Homo Sapiens
ggcugccugcuggccuggggagggauccacag

SEQ ID NO: 35296 - RNA, 32 nt, Homo Sapiens
gggcggggccgguagcggcgggagcugcacug

SEQ ID NO: 35297 - RNA, 32 nt, Homo Sapiens
cugggggagcguggaggcagggccuccaggug

SEQ ID NO: 35298 - RNA, 30 nt, Homo Sapiens
ugaauuuugaguacugccuaauugucaguu

SEQ ID NO: 35299 - RNA, 32 nt, Homo Sapiens
ccguccuccccuccccucauuuucaguggcaa

SEQ ID NO: 35300 - RNA, 32 nt, Homo Sapiens
guggggaaagaugaacucuacuggagguucag

SEQ ID NO: 35301 - RNA, 30 nt, Homo Sapiens
uaucagccucuggcugcagaagagcaggac

SEQ ID NO: 35302 - RNA, 32 nt, Homo Sapiens
gggcugccuccagccugcacgcuggcuggcuc

SEQ ID NO: 35303 - RNA, 32 nt, Homo Sapiens
aggcgccucccucugugggccccgaggucugu

SEQ ID NO: 35304 - RNA, 32 nt, Homo Sapiens
aacuccacccgaccccagcaguggugcaggac

SEQ ID NO: 35305 - RNA, 32 nt, Homo Sapiens
guuaugaacauuaugaaaaccaccuuccuaug

SEQ ID NO: 35306 - RNA, 32 nt, Homo Sapiens
gaauuucaaacacaaacaacucgacgagcgcg

SEQ ID NO: 35307 - RNA, 32 nt, Homo Sapiens
guacuuugcuggugaguggaaagcagagggug

SEQ ID NO: 35308 - RNA, 32 nt, Homo Sapiens
ugcccaggugugagucgcugcagaccuggucc

SEQ ID NO: 35309 - RNA, 32 nt, Homo Sapiens
guucucuuccccacccuccuuugagcuuugcu

SEQ ID NO: 35310 - RNA, 32 nt, Homo Sapiens
agugccugucuccuacuucauucggaacaugg

SEQ ID NO: 35311 - RNA, 32 nt, Homo Sapiens
aauuaugcaaacuuauaauuauuagugcugaa

SEQ ID NO: 35312 - RNA, 32 nt, Homo Sapiens
agugggcgucacagagcuuucagacgcccaga

SEQ ID NO: 35313 - RNA, 32 nt, Homo Sapiens
ucaguuccaugugccucccaaauaaaaaacag

SEQ ID NO: 35314 - RNA, 32 nt, Homo Sapiens
acacaaacaucuuuaaauguugggcuucugug

SEQ ID NO: 35315 - RNA, 32 nt, Homo Sapiens
uuauauagucguuuaugguacauauugauugu

SEQ ID NO: 35316 - RNA, 32 nt, Homo Sapiens
gccgcuggucucuucugccccucccugacauu

SEQ ID NO: 35317 - RNA, 32 nt, Homo Sapiens
aucugcccaccucggccucccaaaguucuggg

SEQ ID NO: 35318 - RNA, 32 nt, Homo Sapiens
cccgggugauugucaucagccgcucccugaca

SEQ ID NO: 35319 - RNA, 32 nt, Homo Sapiens
ccgcccccuccccacaccccugcuccccacug

SEQ ID NO: 35320 - RNA, 32 nt, Homo Sapiens
aaccugcucccucugauccuccaucagggcca

SEQ ID NO: 35321 - RNA, 32 nt, Homo Sapiens
agacugcuguaaacagaagugaaucagacuuu

SEQ ID NO: 35322 - RNA, 32 nt, Homo Sapiens
uaaagcacugaauaguuugaaaaucaauacaa

SEQ ID NO: 35323 - RNA, 32 nt, Homo Sapiens
gaccugaagcaucugaagacguuugaccgggg

SEQ ID NO: 35324 - RNA, 32 nt, Homo Sapiens
cucccagguucaagugauucuugugccucagc

SEQ ID NO: 35325 - RNA, 27 nt, Homo Sapiens
ccauggcgaccauugcugcugcugcgu

SEQ ID NO: 35326 - RNA, 32 nt, Homo Sapiens
gcugcaaucgguuccaaacagcaguuagguca

SEQ ID NO: 35327 - RNA, 32 nt, Homo Sapiens
agccugcugucaucuucacugccccugcccau

SEQ ID NO: 35328 - RNA, 32 nt, Homo Sapiens
cgcugcuucguugccuggacucugguuuccgc

SEQ ID NO: 35329 - RNA, 32 nt, Homo Sapiens
cgccccucgggggcggcuguggcggaggaacg

SEQ ID NO: 35330 - RNA, 32 nt, Homo Sapiens
cucacugcaaccuccgccccccagguucaagc

SEQ ID NO: 35331 - RNA, 32 nt, Homo Sapiens
cccauuuaaaucaaaucauugaaucugguugc

SEQ ID NO: 35332 - RNA, 32 nt, Homo Sapiens
gcacaugacgauuucuauuaacauuuuauugu

SEQ ID NO: 35333 - RNA, 32 nt, Homo Sapiens
augccuugucauggggaguaaaaauucuucau

SEQ ID NO: 35334 - RNA, 32 nt, Homo Sapiens
agcacaagccuuaugaauuuuuacuuuucacu

SEQ ID NO: 35335 - RNA, 32 nt, Homo Sapiens
uaaucuauagaaauaaugcuuaucacuggcuu

SEQ ID NO: 35336 - RNA, 32 nt, Homo Sapiens
ccaggacaagcugcucagaccuacuuccuugg

SEQ ID NO: 35337 - RNA, 32 nt, Homo Sapiens
aagcggcuggcagauagccacauaacggucau

SEQ ID NO: 35338 - RNA, 32 nt, Homo Sapiens
aggggguggggaagagagacgucagcgggacc

SEQ ID NO: 35339 - RNA, 32 nt, Homo Sapiens
cgcgggucgcugcggcauccucccgccgccca

SEQ ID NO: 35340 - RNA, 32 nt, Homo Sapiens
cuucgcgaccgcugcgcgcgagccccgugucc

SEQ ID NO: 35341 - RNA, 32 nt, Homo Sapiens
cugcugcuguuccuagacugagcauugcauuu

SEQ ID NO: 35342 - RNA, 32 nt, Homo Sapiens
uccuugacgucauuccucuccuuccuugcugc

SEQ ID NO: 35343 - RNA, 32 nt, Homo Sapiens
ggguuacucgauguaagggauuccuuguuguu

SEQ ID NO: 35344 - RNA, 32 nt, Homo Sapiens
ggccgcugacuucuuucacaaguacuaucugu

SEQ ID NO: 35345 - RNA, 32 nt, Homo Sapiens
ugaacacauugaugaaguacaaaaugaaauag

SEQ ID NO: 35346 - RNA, 32 nt, Homo Sapiens
uggucugagcuggggagggaaggacaccaaug

SEQ ID NO: 35347 - RNA, 32 nt, Homo Sapiens
cccugccuuuccucugccuccuccccugccag

SEQ ID NO: 35348 - RNA, 32 nt, Homo Sapiens
acugcagaauggaaacaagcccacugagacua

SEQ ID NO: 35349 - RNA, 32 nt, Homo Sapiens
cugcugccagaggcuuccuggagguggcagcu

SEQ ID NO: 35350 - RNA, 32 nt, Homo Sapiens
gagcuuugcagggaacccuggaacccuaggaa

SEQ ID NO: 35351 - RNA, 32 nt, Homo Sapiens
cuacacauagggauuuggaugaucucgggauc

SEQ ID NO: 35352 - RNA, 32 nt, Homo Sapiens
gcugccaggggaggaggagaagccagcaggca

SEQ ID NO: 35353 - RNA, 32 nt, Homo Sapiens
ugauacaugagaaauaaggaaacuauuuugcu

SEQ ID NO: 35354 - RNA, 32 nt, Homo Sapiens
guccaccaauacuucgguguguuuccuaagaa

SEQ ID NO: 35355 - RNA, 32 nt, Homo Sapiens
aagugaccaauauguucauauuaagcaguaca

SEQ ID NO: 35356 - RNA, 32 nt, Homo Sapiens
ugaaaaguagccaggggcccaagggucacaag

SEQ ID NO: 35357 - RNA, 32 nt, Homo Sapiens
guugaggaaagauaaaaauguaugcaauuccu

SEQ ID NO: 35358 - RNA, 32 nt, Homo Sapiens
augagguguucgcagcagcagccacaggaaca

SEQ ID NO: 35359 - RNA, 32 nt, Homo Sapiens
cuuucaggggcucaugaaaauauuuuaauuua

SEQ ID NO: 35360 - RNA, 32 nt, Homo Sapiens
gauacuauaauggagacacagaagugugcaug

SEQ ID NO: 35361 - RNA, 32 nt, Homo Sapiens
aguuuuaucuggcuuuuaaaacauggaccugc

SEQ ID NO: 35362 - RNA, 32 nt, Homo Sapiens
ucucuacuuuacagugauacacacacguauuu

SEQ ID NO: 35363 - RNA, 32 nt, Homo Sapiens
cuugcagcaggaggagcugcaggccgcccacc

SEQ ID NO: 35364 - RNA, 32 nt, Homo Sapiens
cacaaucuggaacauacuggcucugaagagac

SEQ ID NO: 35365 - RNA, 32 nt, Homo Sapiens
ccauccuggaccagcugugcuuuugccugguc

SEQ ID NO: 35366 - RNA, 32 nt, Homo Sapiens
cucuaaggacauuucauagcagcaucucuuga

SEQ ID NO: 35367 - RNA, 29 nt, Homo Sapiens
ccagccuggggacagggaaccugccgggc

SEQ ID NO: 35368 - RNA, 32 nt, Homo Sapiens
aagaucaggaccaacauggugaaaccccaucu

SEQ ID NO: 35369 - RNA, 32 nt, Homo Sapiens
acuccccucacacaugcacuuccacuaccugg

SEQ ID NO: 35370 - RNA, 32 nt, Homo Sapiens
auaaccccaaaauaaccccuuggugaaggcuu

SEQ ID NO: 35371 - RNA, 32 nt, Homo Sapiens
uuccuccacaaauuauuaaugaaaauaagaau

SEQ ID NO: 35372 - RNA, 32 nt, Homo Sapiens
agagggcucuccauuugcuaccuguaguagcc

SEQ ID NO: 35373 - RNA, 32 nt, Homo Sapiens
uuguaaccaccauugugcuauuguaucucuuc

SEQ ID NO: 35374 - RNA, 32 nt, Homo Sapiens
gcucaaguaauccuccucccucugccucccaa

SEQ ID NO: 35375 - RNA, 32 nt, Homo Sapiens
cgcuccguccaagccgcagcgccgcaagagcc

SEQ ID NO: 35376 - RNA, 32 nt, Homo Sapiens
uggcaguguuaggguaucuguuuaccuuuaaa

SEQ ID NO: 35377 - RNA, 32 nt, Homo Sapiens
ucaaacagaacaaauaaguuauauuuaauguc

SEQ ID NO: 35378 - RNA, 28 nt, Homo Sapiens
cgguggccgcggccgccgagucggucug

SEQ ID NO: 35379 - RNA, 32 nt, Homo Sapiens
aauugucuucuaugucccacuccgaauaaccc

SEQ ID NO: 35380 - RNA, 32 nt, Homo Sapiens
gguuucaccauguuggccgggcuggucucgaa

SEQ ID NO: 35381 - RNA, 29 nt, Homo Sapiens
uugagugugacuugugcugaaaaccuggu

SEQ ID NO: 35382 - RNA, 32 nt, Homo Sapiens
cuucggcugcccgacgccaggaccccgcucca

SEQ ID NO: 35383 - RNA, 32 nt, Homo Sapiens
acaucuuaggauaaauauguuuccugugaauu

SEQ ID NO: 35384 - RNA, 32 nt, Homo Sapiens
ucagacgccuccgccccacgggccccgacaga

SEQ ID NO: 35385 - RNA, 32 nt, Homo Sapiens
gaaugggguggaagaguggucagagaaacagu

SEQ ID NO: 35386 - RNA, 32 nt, Homo Sapiens
gagaggauggugcauuuccagugcuuccuuac

SEQ ID NO: 35387 - RNA, 32 nt, Homo Sapiens
cuggaacucccagacgucccaggccccacuga

SEQ ID NO: 35388 - RNA, 32 nt, Homo Sapiens
uauaacuuuuaaugucuuuuuaaaagaugugg

SEQ ID NO: 35389 - RNA, 32 nt, Homo Sapiens
augucugccuuaauauuucacaauuaaaccuu

SEQ ID NO: 35390 - RNA, 32 nt, Homo Sapiens
agcucugggaaaguaggauacacauaagacag

SEQ ID NO: 35391 - RNA, 32 nt, Homo Sapiens
ugcucaccaacccggugauaaacuugcucccu

SEQ ID NO: 35392 - RNA, 32 nt, Homo Sapiens
cggaaugccggggggcccggggcucccugccu

SEQ ID NO: 35393 - RNA, 32 nt, Homo Sapiens
gcuggggcuggccugacucaccagcugccaug

SEQ ID NO: 35394 - RNA, 32 nt, Homo Sapiens
aaauauauuugaaauuugauaagccaaaaaug

SEQ ID NO: 35395 - RNA, 32 nt, Homo Sapiens
cugaggaaaaagaucacguuacacgcacacaa

SEQ ID NO: 35396 - RNA, 32 nt, Homo Sapiens
agcacccacccauuuuuugacacagcugaacc

SEQ ID NO: 35397 - RNA, 32 nt, Homo Sapiens
gcuuacuuucccucacaaagaugcccgcuuac

SEQ ID NO: 35398 - RNA, 32 nt, Homo Sapiens
uguucaggaaagaugucaguucugguaacacc

SEQ ID NO: 35399 - RNA, 32 nt, Homo Sapiens
gucaucucuguaccgaagaccucuccagcugc

SEQ ID NO: 35400 - RNA, 32 nt, Homo Sapiens
gcgcggugggagaggagaggguacccggcugg

SEQ ID NO: 35401 - RNA, 31 nt, Homo Sapiens
guacagaaauaaaauauuagauuuauaucaa

SEQ ID NO: 35402 - RNA, 32 nt, Homo Sapiens
uauugaugcaauuugauauuuuuucauaaucu

SEQ ID NO: 35403 - RNA, 32 nt, Homo Sapiens
gauccaagaacuaagggcaaccacugggcucc

SEQ ID NO: 35404 - RNA, 32 nt, Homo Sapiens
agaggagcuugccuggucucggucugagcguc

SEQ ID NO: 35405 - RNA, 32 nt, Homo Sapiens
caccggcugcacgcagcugccacacauuaaau

SEQ ID NO: 35406 - RNA, 32 nt, Homo Sapiens
ugagaaucagagagcauaaucuucuuacgggc

SEQ ID NO: 35407 - RNA, 32 nt, Homo Sapiens
ccagccugaguuucucuuucucucuuuuuaac

SEQ ID NO: 35408 - RNA, 32 nt, Homo Sapiens
uggugugucaaagaaagagaggaaugcaggau

SEQ ID NO: 35409 - RNA, 32 nt, Homo Sapiens
aggugaaacuuuaagaauauuuuugaagcaua

SEQ ID NO: 35410 - RNA, 25 nt, Homo Sapiens
auguccuccgcgccgcgcucgccca

SEQ ID NO: 35411 - RNA, 32 nt, Homo Sapiens
uuuuguauauauauuuuguaugauggauaucu

SEQ ID NO: 35412 - RNA, 32 nt, Homo Sapiens
uggcuucacaugcccaguaucauagcaugcuc

SEQ ID NO: 35413 - RNA, 32 nt, Homo Sapiens
gcgaggggcgaccggggugaagcccgccgcgc

SEQ ID NO: 35414 - RNA, 32 nt, Homo Sapiens
ucaaguuguaaaaaugaaagugacuuuaaaag

SEQ ID NO: 35415 - RNA, 32 nt, Homo Sapiens
aauacauaggugaaacaaaaauauuuuuaguu

SEQ ID NO: 35416 - RNA, 32 nt, Homo Sapiens
cucccaggacaaaggggccuuguguggcugaa

SEQ ID NO: 35417 - RNA, 32 nt, Homo Sapiens
ucucccaggcagggcucugcagguccauaugg

SEQ ID NO: 35418 - RNA, 32 nt, Homo Sapiens
gcuuccgaggggagaggacgggcuggcggggc

SEQ ID NO: 35419 - RNA, 32 nt, Homo Sapiens
cccucucgccuggcugguucggucuaacgccc

SEQ ID NO: 35420 - RNA, 32 nt, Homo Sapiens
cuauaggaccauguuauagaucagcguuuagu

SEQ ID NO: 35421 - RNA, 32 nt, Homo Sapiens
auugcuucuauuaauguaaaucaacucugugc

SEQ ID NO: 35422 - RNA, 32 nt, Homo Sapiens
acuggccucccaagcguggggcgacaagcugc

SEQ ID NO: 35423 - RNA, 29 nt, Homo Sapiens
guguguguauguauguauaggucggggag

SEQ ID NO: 35424 - RNA, 32 nt, Homo Sapiens
aagaauauuuggauugaauugaaccccugcag

SEQ ID NO: 35425 - RNA, 32 nt, Homo Sapiens
ugauccuggaagagacucggggccccccagcc

SEQ ID NO: 35426 - RNA, 32 nt, Homo Sapiens
agugcccuaguggccacuuucagagacacuac

SEQ ID NO: 35427 - RNA, 32 nt, Homo Sapiens
acugauagaaacucgcaucgccaauagucucu

SEQ ID NO: 35428 - RNA, 32 nt, Homo Sapiens
gaaagugcccuggaccggcagcuggcgcacca

SEQ ID NO: 35429 - RNA, 32 nt, Homo Sapiens
aaauuuuacauuauaaagcaauguagagagag

SEQ ID NO: 35430 - RNA, 32 nt, Homo Sapiens
acuccacucaccccugacggcuccauccaccu

SEQ ID NO: 35431 - RNA, 32 nt, Homo Sapiens
guugcccaggcuaucucaaauuccuggacuga

SEQ ID NO: 35432 - RNA, 32 nt, Homo Sapiens
cuucuaugcauaacuuuuuuuuuccucugugc

SEQ ID NO: 35433 - RNA, 32 nt, Homo Sapiens
uucuggaggaggaggggacccgcugcgcgauu

SEQ ID NO: 35434 - RNA, 32 nt, Homo Sapiens
gcagcucuggugagcuugggccugcucuccuu

SEQ ID NO: 35435 - RNA, 32 nt, Homo Sapiens
uugacuaauaaaaguacaaggcacauauacgu

SEQ ID NO: 35436 - RNA, 32 nt, Homo Sapiens
gccaccggccaccugugccccgagggcggcca

SEQ ID NO: 35437 - RNA, 32 nt, Homo Sapiens
aaugcaagcuggaugccugggucucugggcac

SEQ ID NO: 35438 - RNA, 32 nt, Homo Sapiens
gggccgggcucuccuccaccgcucccccggag

SEQ ID NO: 35439 - RNA, 32 nt, Homo Sapiens
aacgauuauaguaacuauaagauacaauaaaa

SEQ ID NO: 35440 - RNA, 27 nt, Homo Sapiens
aacuccggcuucuucaguuccccagac

SEQ ID NO: 35441 - RNA, 32 nt, Homo Sapiens
cguaggggcugcgagccggcccgggagaggga

SEQ ID NO: 35442 - RNA, 32 nt, Homo Sapiens
aacagcuguccaguguuggugauuccagugga

SEQ ID NO: 35443 - RNA, 32 nt, Homo Sapiens
ggacccugcccgcuccccucccauuguccacg

SEQ ID NO: 35444 - RNA, 32 nt, Homo Sapiens
ucaagaggccugugugggggccccaggaaucc

SEQ ID NO: 35445 - RNA, 32 nt, Homo Sapiens
gaguuucgcucuugucaccccagcuggagugc

SEQ ID NO: 35446 - RNA, 32 nt, Homo Sapiens
ggaguggcuguuggguuucgcucagaggcagg

SEQ ID NO: 35447 - RNA, 32 nt, Homo Sapiens
acuuggggaaagggcugauaaucuugugcuaa

SEQ ID NO: 35448 - RNA, 32 nt, Homo Sapiens
cccaccggagagccccgggauggagagccgaa

SEQ ID NO: 35449 - RNA, 32 nt, Homo Sapiens
ggaaagucuucagaucugucaagaaccuuuca

SEQ ID NO: 35450 - RNA, 32 nt, Homo Sapiens
auagagggaaaauggacugggauagaggacag

SEQ ID NO: 35451 - RNA, 32 nt, Homo Sapiens
acacagcaucagcucaagacgucacccuccau

SEQ ID NO: 35452 - RNA, 32 nt, Homo Sapiens
cuagcagaggauguccccaccaucccucagcc

SEQ ID NO: 35453 - RNA, 32 nt, Homo Sapiens
caaaacgaaugccuuucuuuucuuguuuauaa

SEQ ID NO: 35454 - RNA, 32 nt, Homo Sapiens
augggauuuucaggaaauggugucacaauuug

SEQ ID NO: 35455 - RNA, 32 nt, Homo Sapiens
aguaaucuuuugcaugaaccaucaccagcguu

SEQ ID NO: 35456 - RNA, 32 nt, Homo Sapiens
gcguuucagguggcgcuuuucucaucaugauu

SEQ ID NO: 35457 - RNA, 32 nt, Homo Sapiens
gcccggggggacggagggccuggucgccugga

SEQ ID NO: 35458 - RNA, 32 nt, Homo Sapiens
aacaauuuguguuugugacugauggagaauuu

SEQ ID NO: 35459 - RNA, 32 nt, Homo Sapiens
guuuuucuccuggccucuguggaggcgagugg

SEQ ID NO: 35460 - RNA, 32 nt, Homo Sapiens
accaauauaugaacucuaggcaucaugcauau

SEQ ID NO: 35461 - RNA, 32 nt, Homo Sapiens
ggcagagacugauguucguuucuccuuggggu

SEQ ID NO: 35462 - RNA, 29 nt, Homo Sapiens
aauuuaaauggugggucuauaaauuuguu

SEQ ID NO: 35463 - RNA, 32 nt, Homo Sapiens
gaccucacugucagcguuucuccaccugaagu

SEQ ID NO: 35464 - RNA, 27 nt, Homo Sapiens
ggucccagugaauucugguggcaaaua

SEQ ID NO: 35465 - RNA, 32 nt, Homo Sapiens
uaaaguccuagaagaaagagcagagagggaga

SEQ ID NO: 35466 - RNA, 32 nt, Homo Sapiens
aaauugacguggaugagcuccuggacauggag

SEQ ID NO: 35467 - RNA, 32 nt, Homo Sapiens
aagcacuaacuguggguacucauuuauuuuau

SEQ ID NO: 35468 - RNA, 32 nt, Homo Sapiens
cccagcucccagccuggcaugagcuuggacag

SEQ ID NO: 35469 - RNA, 32 nt, Homo Sapiens
augcagcgacggccgccgcggagcuccgagca

SEQ ID NO: 35470 - RNA, 32 nt, Homo Sapiens
acucggcggcggcggagcgggcggcagagcag

SEQ ID NO: 35471 - RNA, 32 nt, Homo Sapiens
ccgccgggcuccuggggccgccgccccgcgcg

SEQ ID NO: 35472 - RNA, 32 nt, Homo Sapiens
ccugccauaaccaggcgcccagcccugcggag

SEQ ID NO: 35473 - RNA, 32 nt, Homo Sapiens
acauucuauggguuuugucaaauauaugauaa

SEQ ID NO: 35474 - RNA, 32 nt, Homo Sapiens
cuuggcugucuccucuuugugccgagauuguc

SEQ ID NO: 35475 - RNA, 32 nt, Homo Sapiens
ccguguuugucacuuacaaaaauguuuacuau

SEQ ID NO: 35476 - RNA, 32 nt, Homo Sapiens
uaaguggaauggggcggggugggggguggcca

SEQ ID NO: 35477 - RNA, 32 nt, Homo Sapiens
gaaugagcauucucuuguuuuaauguuggugu

SEQ ID NO: 35478 - RNA, 32 nt, Homo Sapiens
uuuucuaagaguuuuucuauaaccuuccaaaa

SEQ ID NO: 35479 - RNA, 32 nt, Homo Sapiens
aaggacauuguuuuaaucuguaucgugccaaa

SEQ ID NO: 35480 - RNA, 32 nt, Homo Sapiens
gagccgagggccuuggcccagccccgcauccu

SEQ ID NO: 35481 - RNA, 32 nt, Homo Sapiens
cucggccagaagacagaaugguugcucugaaa

SEQ ID NO: 35482 - RNA, 32 nt, Homo Sapiens
uauugcagcuucccuuacaauguaauuugauc

SEQ ID NO: 35483 - RNA, 32 nt, Homo Sapiens
uuaaacuaacuggcaaaagcagguucucaaua

SEQ ID NO: 35484 - RNA, 32 nt, Homo Sapiens
ugaucuguuugauauuucuucgcgcuaaugug

SEQ ID NO: 35485 - RNA, 32 nt, Homo Sapiens
uauuuaaggaggaaacaaccugacguggcacc

SEQ ID NO: 35486 - RNA, 32 nt, Homo Sapiens
uucucuccugaccagcagcagguccucagcgc

SEQ ID NO: 35487 - RNA, 32 nt, Homo Sapiens
uaaauaacuuaaauaucagaguuuuguuguaa

SEQ ID NO: 35488 - RNA, 32 nt, Homo Sapiens
ggaggcugccagcagcauuuuccccaagggcc

SEQ ID NO: 35489 - RNA, 28 nt, Homo Sapiens
gagagagaaaaguaacauuuguuuuaac

SEQ ID NO: 35490 - RNA, 32 nt, Homo Sapiens
cccacuccuuuugggggaagccaggcaacagu

SEQ ID NO: 35491 - RNA, 32 nt, Homo Sapiens
gcauguuuuaacagguuuuucuuuucuuuuuu

SEQ ID NO: 35492 - RNA, 32 nt, Homo Sapiens
gcuaaaaggcuuacaguaucagacacgaucau

SEQ ID NO: 35493 - RNA, 32 nt, Homo Sapiens
ggcggcagcugcuugggcgcggugcgguguug

SEQ ID NO: 35494 - RNA, 32 nt, Homo Sapiens
guuugacuuaggaauugcuucaauuuagauga

SEQ ID NO: 35495 - RNA, 32 nt, Homo Sapiens
gccagcuccuucccagcccagccucuuggggc

SEQ ID NO: 35496 - RNA, 32 nt, Homo Sapiens
aaaauguucucuuaugaucaccauguauuuug

SEQ ID NO: 35497 - RNA, 32 nt, Homo Sapiens
uagcagaaaaucaaaacgcugauuaaaagaag

SEQ ID NO: 35498 - RNA, 32 nt, Homo Sapiens
uucuuguuuuauucccuugaugaccuagggaa

SEQ ID NO: 35499 - RNA, 32 nt, Homo Sapiens
uuaugcagauuuucuucagaauauuuuuaaaa

SEQ ID NO: 35500 - RNA, 32 nt, Homo Sapiens
ggugacggccuggcccggagcgggcagaguug

SEQ ID NO: 35501 - RNA, 32 nt, Homo Sapiens
gucauuuccuuccaucgcuugguccauaaaag

SEQ ID NO: 35502 - RNA, 32 nt, Homo Sapiens
agaaacugaugauggacuggaacgaggcauca

SEQ ID NO: 35503 - RNA, 32 nt, Homo Sapiens
ugucgucgguggcugaggcccgaguugcacac

SEQ ID NO: 35504 - RNA, 32 nt, Homo Sapiens
aaucaccaaaucuauuugaaaacaagucgauu

SEQ ID NO: 35505 - RNA, 32 nt, Homo Sapiens
ggucauuuuuaaaaauaccuaaagugccagac

SEQ ID NO: 35506 - RNA, 32 nt, Homo Sapiens
ggccacugccagccgcucuccugcccaccucu

SEQ ID NO: 35507 - RNA, 32 nt, Homo Sapiens
ucagaagacauccagaggcaucagaaggggag

SEQ ID NO: 35508 - RNA, 32 nt, Homo Sapiens
caccgggcccuccuugccuguuuuucaaucuc

SEQ ID NO: 35509 - RNA, 32 nt, Homo Sapiens
gacugcagcuucaggacccuauggaugaggcc

SEQ ID NO: 35510 - RNA, 32 nt, Homo Sapiens
guuggaacucagaaagcagagguggccccaaa

SEQ ID NO: 35511 - RNA, 32 nt, Homo Sapiens
caaaacagugauugaaauuucccaaaauaauu

SEQ ID NO: 35512 - RNA, 32 nt, Homo Sapiens
gauuuccuccucuccuuccuccugucgagaau

SEQ ID NO: 35513 - RNA, 32 nt, Homo Sapiens
ugggaagaaggggaccgcuuucugcaauuggc

SEQ ID NO: 35514 - RNA, 32 nt, Homo Sapiens
cucucuccagaggcccaggccuggacacgaag

SEQ ID NO: 35515 - RNA, 32 nt, Homo Sapiens
accguggccuccuggggcaaugcuccccgcuc

SEQ ID NO: 35516 - RNA, 32 nt, Homo Sapiens
gcuuccuccggaggcccggcccggccggagga

SEQ ID NO: 35517 - RNA, 32 nt, Homo Sapiens
uuuucauagaugauauguuacucauuguaaag

SEQ ID NO: 35518 - RNA, 32 nt, Homo Sapiens
ugugcuaaaauauauagaucuaucauauuuua

SEQ ID NO: 35519 - RNA, 32 nt, Homo Sapiens
ucugaauguaacuuaaauuugcucaaagaagc

SEQ ID NO: 35520 - RNA, 32 nt, Homo Sapiens
cagagagaagacuggcaguggagcaugcaucu

SEQ ID NO: 35521 - RNA, 32 nt, Homo Sapiens
uccugaccucaggcaaucugcccgccuggguc

SEQ ID NO: 35522 - RNA, 32 nt, Homo Sapiens
cuucccaaggccagucugaaccugagguugcu

SEQ ID NO: 35523 - RNA, 32 nt, Homo Sapiens
cuacaccccacuuugacccucgaccacaccug

SEQ ID NO: 35524 - RNA, 32 nt, Homo Sapiens
agucuuuugugaacaaggcauuuguagccauu

SEQ ID NO: 35525 - RNA, 32 nt, Homo Sapiens
gucagcaggacccgccugggggugccggcguu

SEQ ID NO: 35526 - RNA, 32 nt, Homo Sapiens
gagcagagggcagcacuuccuccagcuccaaa

SEQ ID NO: 35527 - RNA, 32 nt, Homo Sapiens
cuuggcguggauuuagggcgugcccacccugc

SEQ ID NO: 35528 - RNA, 32 nt, Homo Sapiens
ccucuuuggccauacacuccaugccuagaugc

SEQ ID NO: 35529 - RNA, 32 nt, Homo Sapiens
uccaggcagccucuggggcccgcgcccgcgcc

SEQ ID NO: 35530 - RNA, 32 nt, Homo Sapiens
cccaccucagccuccuaaagugccaaaauuau

SEQ ID NO: 35531 - RNA, 32 nt, Homo Sapiens
gccugcagccagcugggccgggcccccguagc

SEQ ID NO: 35532 - RNA, 32 nt, Homo Sapiens
gauuuguuuuucccuuuucccaaggaagcucg

SEQ ID NO: 35533 - RNA, 32 nt, Homo Sapiens
gaaaguagguaguuugaggcucuuaaauuguc

SEQ ID NO: 35534 - RNA, 31 nt, Homo Sapiens
ggccgagcugcaagcaccugaguuaccugcg

SEQ ID NO: 35535 - RNA, 32 nt, Homo Sapiens
uaucaagacaccuuccucagcuuccaugccuu

SEQ ID NO: 35536 - RNA, 32 nt, Homo Sapiens
aaagaaagagcaacuacuuuggaccaaaagcc

SEQ ID NO: 35537 - RNA, 32 nt, Homo Sapiens
uacagcuagaaagccaggcgcacaaaugcccc

SEQ ID NO: 35538 - RNA, 32 nt, Homo Sapiens
ucauggaugccacccccuuucauuucggccua

SEQ ID NO: 35539 - RNA, 32 nt, Homo Sapiens
gccagugacaaggggaguaaacugucaaaacu

SEQ ID NO: 35540 - RNA, 32 nt, Homo Sapiens
guggaucuuuuaaagguuuugaccauuuuguu

SEQ ID NO: 35541 - RNA, 32 nt, Homo Sapiens
cauuuccauccacaguguacuuuaagauuguc

SEQ ID NO: 35542 - RNA, 32 nt, Homo Sapiens
aagaucagaaauuauuuuuugcacuuuggcau

SEQ ID NO: 35543 - RNA, 32 nt, Homo Sapiens
ggaaacaucuucugcauuucaaaguccucacu

SEQ ID NO: 35544 - RNA, 32 nt, Homo Sapiens
cccuuccaauuuguauuuaccuuuaccaccca

SEQ ID NO: 35545 - RNA, 32 nt, Homo Sapiens
ugguggcuuuuccuugaauccagaacacaacc

SEQ ID NO: 35546 - RNA, 32 nt, Homo Sapiens
gccuucugucuccuaggguuauccugcucaug

SEQ ID NO: 35547 - RNA, 29 nt, Homo Sapiens
uuggugugguuugucagaggcuaauucug

SEQ ID NO: 35548 - RNA, 32 nt, Homo Sapiens
uccguccgcccggugccucucaggaacagcga

SEQ ID NO: 35549 - RNA, 32 nt, Homo Sapiens
guguccaggaggagagcaggggagagagugag

SEQ ID NO: 35550 - RNA, 32 nt, Homo Sapiens
acauauguuucacuuaaucacuaccaaauauc

SEQ ID NO: 35551 - RNA, 32 nt, Homo Sapiens
ccucugacccaaauccacggacuuugcgaaaa

SEQ ID NO: 35552 - RNA, 32 nt, Homo Sapiens
uuucgcauuuggaauguggcucugccacacag

SEQ ID NO: 35553 - RNA, 32 nt, Homo Sapiens
cacuuggaauggguaccacagaccaugucauc

SEQ ID NO: 35554 - RNA, 30 nt, Homo Sapiens
agaggugcaccagugccgcccagguagaua

SEQ ID NO: 35555 - RNA, 32 nt, Homo Sapiens
ucuccuagcugcuacccaggaccuccagaagg

SEQ ID NO: 35556 - RNA, 32 nt, Homo Sapiens
cuagcacauggggaccccggccucgaggguga

SEQ ID NO: 35557 - RNA, 26 nt, Homo Sapiens
aaugugcccagagcuuccaggccggg

SEQ ID NO: 35558 - RNA, 32 nt, Homo Sapiens
cuaagaucuggggaaaggagguccugagaacc

SEQ ID NO: 35559 - RNA, 29 nt, Homo Sapiens
ugcucuaaagugugugauuuucuagugua

SEQ ID NO: 35560 - RNA, 32 nt, Homo Sapiens
aucugcugucucucauggagauggugggcauc

SEQ ID NO: 35561 - RNA, 32 nt, Homo Sapiens
gcaggcacagaaaaccugugggagaggucacc

SEQ ID NO: 35562 - RNA, 32 nt, Homo Sapiens
ucgcucggccccgcacgcggcccgcgguagac

SEQ ID NO: 35563 - RNA, 32 nt, Homo Sapiens
acaaacuggaggaaaacccuuuucaguguaaa

SEQ ID NO: 35564 - RNA, 32 nt, Homo Sapiens
aaaaagaaacugugucucugauguugccauuu

SEQ ID NO: 35565 - RNA, 32 nt, Homo Sapiens
uuuguuaaugaaauuuaggaaagcaguuguuu

SEQ ID NO: 35566 - RNA, 32 nt, Homo Sapiens
uuggagaggaucuggaagucugggcuccaucg

SEQ ID NO: 35567 - RNA, 32 nt, Homo Sapiens
ugccgugcccuuccuggcccagcccuaaaccu

SEQ ID NO: 35568 - RNA, 32 nt, Homo Sapiens
cagauaaaaguacucuugauuuaacacaaagg

SEQ ID NO: 35569 - RNA, 32 nt, Homo Sapiens
cguuuuuuauuuagaucaguacuugauuucau

SEQ ID NO: 35570 - RNA, 32 nt, Homo Sapiens
gcucacuuaaauugauauacuuuaaaugucuc

SEQ ID NO: 35571 - RNA, 32 nt, Homo Sapiens
gugugcaggccacagcagcaugcccuuggugu

SEQ ID NO: 35572 - RNA, 32 nt, Homo Sapiens
gagagaggacugccuucagggcauccggagcu

SEQ ID NO: 35573 - RNA, 32 nt, Homo Sapiens
uguguggaggauguggugagccccaucauucu

SEQ ID NO: 35574 - RNA, 32 nt, Homo Sapiens
caagcuacaaaauguccacaucuuauaucccc

SEQ ID NO: 35575 - RNA, 32 nt, Homo Sapiens
gcuggagcacaccuugggccucagugguuucu

SEQ ID NO: 35576 - RNA, 32 nt, Homo Sapiens
ggcacacuggaaagggaauuauguggcugacu

SEQ ID NO: 35577 - RNA, 32 nt, Homo Sapiens
aacauauuuaucauuccucgauaguuaauuau

SEQ ID NO: 35578 - RNA, 32 nt, Homo Sapiens
ucccucugguggccgcgcucaggagugccaga

SEQ ID NO: 35579 - RNA, 32 nt, Homo Sapiens
acagguccugucauuucauucaucucaaauua

SEQ ID NO: 35580 - RNA, 32 nt, Homo Sapiens
caaggacauugagaagcagcggauggugacag

SEQ ID NO: 35581 - RNA, 32 nt, Homo Sapiens
agcccagcccccaccccccaccuccgacagca

SEQ ID NO: 35582 - RNA, 32 nt, Homo Sapiens
uccuauuugaaagaccuaauugaaagaaaaau

SEQ ID NO: 35583 - RNA, 32 nt, Homo Sapiens
uuguuuguauucaaaugacgauuauuuuucua

SEQ ID NO: 35584 - RNA, 31 nt, Homo Sapiens
aaugcaaaauguuaacagguacucuguuaca

SEQ ID NO: 35585 - RNA, 32 nt, Homo Sapiens
accacgcauggccagagcuagcgucccuacug

SEQ ID NO: 35586 - RNA, 32 nt, Homo Sapiens
auuucacuaaucaugagaaaaacuguucuuuu

SEQ ID NO: 35587 - RNA, 32 nt, Homo Sapiens
ugugagggcuauguugacauggcaucaccucc

SEQ ID NO: 35588 - RNA, 32 nt, Homo Sapiens
cacauauaauacugagagaugaguugcacaag

SEQ ID NO: 35589 - RNA, 32 nt, Homo Sapiens
cugcugcacugacuuuucuccgugugacccca

SEQ ID NO: 35590 - RNA, 32 nt, Homo Sapiens
cagccagccaugaacaaggugaggaagaagaa

SEQ ID NO: 35591 - RNA, 32 nt, Homo Sapiens
ucgccauccaguuuccucuccacuaguccccc

SEQ ID NO: 35592 - RNA, 30 nt, Homo Sapiens
accgccaaggucugcggcggccucugaaga

SEQ ID NO: 35593 - RNA, 32 nt, Homo Sapiens
ugagguucugaauguuugucccuaacauagga

SEQ ID NO: 35594 - RNA, 32 nt, Homo Sapiens
auaaagcucauuauaauauaaaaagugaagua

SEQ ID NO: 35595 - RNA, 32 nt, Homo Sapiens
uucuuaccaagcuagacuggguugccuuuucu

SEQ ID NO: 35596 - RNA, 32 nt, Homo Sapiens
ugaacugcucugugucgcccccugccccggag

SEQ ID NO: 35597 - RNA, 32 nt, Homo Sapiens
caaccuagaaaagagcagaguaaaagaauugu

SEQ ID NO: 35598 - RNA, 32 nt, Homo Sapiens
ucuuuucuuuugcuucaccuagucacauccug

SEQ ID NO: 35599 - RNA, 32 nt, Homo Sapiens
cuauuccuacagcgggacacccugccccacgg

SEQ ID NO: 35600 - RNA, 32 nt, Homo Sapiens
agaguaaaacaaaaaauuauaaugcucuuccu

SEQ ID NO: 35601 - RNA, 32 nt, Homo Sapiens
uucccauucgccaugcgccgggggugggugcc

SEQ ID NO: 35602 - RNA, 32 nt, Homo Sapiens
ugcugcuuaaaaucuucaguacauugauguuu

SEQ ID NO: 35603 - RNA, 32 nt, Homo Sapiens
uagugucuggcacaaucccugugggguaggug

SEQ ID NO: 35604 - RNA, 32 nt, Homo Sapiens
caccggccagaggccaugcugcugcugcucac

SEQ ID NO: 35605 - RNA, 32 nt, Homo Sapiens
ccuccgucugcuuccuucucagucuucauuag

SEQ ID NO: 35606 - RNA, 32 nt, Homo Sapiens
ucccccuuuugccaguauguccagccagagcu

SEQ ID NO: 35607 - RNA, 32 nt, Homo Sapiens
aggcaaucguggucauuuccacagccucaacc

SEQ ID NO: 35608 - RNA, 32 nt, Homo Sapiens
agcauagguaaugauaugcauucuucaaguuu

SEQ ID NO: 35609 - RNA, 32 nt, Homo Sapiens
gggagggagaggccucuuggucccuguggaga

SEQ ID NO: 35610 - RNA, 32 nt, Homo Sapiens
uugcagugagccgagaucccccgaccgcacuc

SEQ ID NO: 35611 - RNA, 32 nt, Homo Sapiens
gcgccgcgcgcccuccgccggcgccaacaccu

SEQ ID NO: 35612 - RNA, 32 nt, Homo Sapiens
cagcaacggccucuccuucaucacaggccggg

SEQ ID NO: 35613 - RNA, 32 nt, Homo Sapiens
cccguugguguugggaucaucugucucuguug

SEQ ID NO: 35614 - RNA, 32 nt, Homo Sapiens
gugccuucacugugucccaggaaaucuggguu

SEQ ID NO: 35615 - RNA, 32 nt, Homo Sapiens
cccucagaccaggcccuugucugugcccuguc

SEQ ID NO: 35616 - RNA, 32 nt, Homo Sapiens
agagggggugggugcguaggaugugugaguuu

SEQ ID NO: 35617 - RNA, 32 nt, Homo Sapiens
cuguggugcagggcacguguuaggguagacaa

SEQ ID NO: 35618 - RNA, 32 nt, Homo Sapiens
cuucagcuuccuuuucuguugguuugguuuuc

SEQ ID NO: 35619 - RNA, 32 nt, Homo Sapiens
cuccugcccucccuggcagccaggaccagcac

SEQ ID NO: 35620 - RNA, 32 nt, Homo Sapiens
guccagcccaaccgccccggcggcuucuccca

SEQ ID NO: 35621 - RNA, 32 nt, Homo Sapiens
gcaccgcugggguucggggcccgggacgccgc

SEQ ID NO: 35622 - RNA, 32 nt, Homo Sapiens
gcuugcgagucagccccuugcguaagacucca

SEQ ID NO: 35623 - RNA, 32 nt, Homo Sapiens
aaauuuuaaaauuuaggaaauguucuauuuaa

SEQ ID NO: 35624 - RNA, 32 nt, Homo Sapiens
cagugcuauuugcauuucuguuccauaugggu

SEQ ID NO: 35625 - RNA, 32 nt, Homo Sapiens
ugugcaugaacucgguaauacacaucacacgg

SEQ ID NO: 35626 - RNA, 32 nt, Homo Sapiens
ucccagcccagcugcgugguggugacuggagc

SEQ ID NO: 35627 - RNA, 32 nt, Homo Sapiens
gcugaggagcaaaggaguaaccaagagaucca

SEQ ID NO: 35628 - RNA, 32 nt, Homo Sapiens
agucugaggggaaauccaggaaauguggugcc

SEQ ID NO: 35629 - RNA, 32 nt, Homo Sapiens
cagauccauguauuuuggagcauaaaauguau

SEQ ID NO: 35630 - RNA, 32 nt, Homo Sapiens
ggugcccuuucugguacuggaggcccagaugu

SEQ ID NO: 35631 - RNA, 32 nt, Homo Sapiens
ccaccguagcagcagcagcagcagcagcagca

SEQ ID NO: 35632 - RNA, 32 nt, Homo Sapiens
cuccuuaauuuaauugcuuugaagcauagcua

SEQ ID NO: 35633 - RNA, 32 nt, Homo Sapiens
gguaagcgaggccgggccgccggcguuugacc

SEQ ID NO: 35634 - RNA, 30 nt, Homo Sapiens
cacccugggccucccguccguccgcccgcc

SEQ ID NO: 35635 - RNA, 32 nt, Homo Sapiens
ugaccugccgugguccuuuguaaacuauggcu

SEQ ID NO: 35636 - RNA, 32 nt, Homo Sapiens
cugacauuuaaaaauaauuucuauucaaaaua

SEQ ID NO: 35637 - RNA, 32 nt, Homo Sapiens
aauccagaguauguagagagccaaaaugugug

SEQ ID NO: 35638 - RNA, 32 nt, Homo Sapiens
gggcgucccgggucgcggugcccucgggacga

SEQ ID NO: 35639 - RNA, 32 nt, Homo Sapiens
cucggggcaggggccgggaggcgugggggagc

SEQ ID NO: 35640 - RNA, 32 nt, Homo Sapiens
gugacuuaccauagcagugacaauggcagucu

SEQ ID NO: 35641 - RNA, 28 nt, Homo Sapiens
gccaugacgacugaaauugguuggugga

SEQ ID NO: 35642 - RNA, 32 nt, Homo Sapiens
uucgcaaacuuguccucaacaacagcaaagcu

SEQ ID NO: 35643 - RNA, 32 nt, Homo Sapiens
ccuucgggcugcuggccuccugcagacaacuc

SEQ ID NO: 35644 - RNA, 32 nt, Homo Sapiens
gucauuagcugagauguugauuuuaaaacacc

SEQ ID NO: 35645 - RNA, 32 nt, Homo Sapiens
uuuuucuucugauuguugaauucauaaucaug

SEQ ID NO: 35646 - RNA, 32 nt, Homo Sapiens
ugucagucugugucacauccagugauuguuuu

SEQ ID NO: 35647 - RNA, 32 nt, Homo Sapiens
uaugcguuaucuccauccuuaaucucaguugu

SEQ ID NO: 35648 - RNA, 32 nt, Homo Sapiens
ugccuggccaggcuccacggaucccgccagaa

SEQ ID NO: 35649 - RNA, 32 nt, Homo Sapiens
aacgcagcggguggcugggguaggggcucauu

SEQ ID NO: 35650 - RNA, 32 nt, Homo Sapiens
uggcuagaaauucugaguuuucaacuguauau

SEQ ID NO: 35651 - RNA, 32 nt, Homo Sapiens
ucagggaaauugagacuuauuuuugcccuaaa

SEQ ID NO: 35652 - RNA, 32 nt, Homo Sapiens
gccuccuuccuucacacccccucacagacucc

SEQ ID NO: 35653 - RNA, 32 nt, Homo Sapiens
auguuauuucaaagcauuuucuuauuaaaaau

SEQ ID NO: 35654 - RNA, 32 nt, Homo Sapiens
ugaaauguucuuaauagcuaaguuuuaaaaaa

SEQ ID NO: 35655 - RNA, 32 nt, Homo Sapiens
uccgucuccgcggcagggaagcagcauggaag

SEQ ID NO: 35656 - RNA, 31 nt, Homo Sapiens
auuuguccacccacuuaguccacucugaguc

SEQ ID NO: 35657 - RNA, 32 nt, Homo Sapiens
uauaaaauuggcugucacaucuccauuuuguu

SEQ ID NO: 35658 - RNA, 32 nt, Homo Sapiens
ccccaaagccccagagagcuccuuagacaugg

SEQ ID NO: 35659 - RNA, 32 nt, Homo Sapiens
auguuaggcuuuucauuuaguuucacagaacu

SEQ ID NO: 35660 - RNA, 32 nt, Homo Sapiens
ucuggauuuuauuuuaaguucucuaacaagac

SEQ ID NO: 35661 - RNA, 32 nt, Homo Sapiens
ucuaaggaaaaccagcagaacauuaggccugu

SEQ ID NO: 35662 - RNA, 32 nt, Homo Sapiens
cggcuucagaggcagcagccgaggggaguccc

SEQ ID NO: 35663 - RNA, 32 nt, Homo Sapiens
uauggggggaggaggggcuagaacaagggccc

SEQ ID NO: 35664 - RNA, 32 nt, Homo Sapiens
ggcgagcugggcgagcugggcuggggagagcc

SEQ ID NO: 35665 - RNA, 32 nt, Homo Sapiens
ugggguguauguccgcuggauugugaggcccg

SEQ ID NO: 35666 - RNA, 32 nt, Homo Sapiens
cauccccagagagcucugcgacgcugcagccg

SEQ ID NO: 35667 - RNA, 31 nt, Homo Sapiens
ccacagaacaauaaauaugugccaucagacc

SEQ ID NO: 35668 - RNA, 32 nt, Homo Sapiens
agagccagcuguagggcgggggcgggcaggga

SEQ ID NO: 35669 - RNA, 32 nt, Homo Sapiens
ucggcccgggccugucgaugcccgccaggacu

SEQ ID NO: 35670 - RNA, 32 nt, Homo Sapiens
ccucaccccccgccccaugccuuccugguccc

SEQ ID NO: 35671 - RNA, 32 nt, Homo Sapiens
cuccagggcugcugacaagggugcugggaggg

SEQ ID NO: 35672 - RNA, 26 nt, Homo Sapiens
aauggauaacguccucccgguggacu

SEQ ID NO: 35673 - RNA, 32 nt, Homo Sapiens
aggcggcggcggugguggcgggggcgaugcgc

SEQ ID NO: 35674 - RNA, 32 nt, Homo Sapiens
aaugcuuuuaaaaaucuaccuucuguaguuuu

SEQ ID NO: 35675 - RNA, 32 nt, Homo Sapiens
uauguaaaacaauggaggagauaguuuguggu

SEQ ID NO: 35676 - RNA, 32 nt, Homo Sapiens
cauucagcucuuuucacauuugauuugauuga

SEQ ID NO: 35677 - RNA, 32 nt, Homo Sapiens
gaaaugugaauuccucuuucucugcuggagcu

SEQ ID NO: 35678 - RNA, 32 nt, Homo Sapiens
auacauuguaaguuaguaaguuagaaagcuag

SEQ ID NO: 35679 - RNA, 32 nt, Homo Sapiens
cugugcuaggauguuguccccauguuagugug

SEQ ID NO: 35680 - RNA, 32 nt, Homo Sapiens
agggagauauuguaaggggaaaacaaaguguu

SEQ ID NO: 35681 - RNA, 32 nt, Homo Sapiens
gcuggagugcucacaguguggcugggacccac

SEQ ID NO: 35682 - RNA, 32 nt, Homo Sapiens
acagaauugcuaaagaaaugcauccaauaaau

SEQ ID NO: 35683 - RNA, 32 nt, Homo Sapiens
uuacgucccuggaucugccuguggccauuauu

SEQ ID NO: 35684 - RNA, 30 nt, Homo Sapiens
accucgcgcgcgccuccaggagcaaggaug

SEQ ID NO: 35685 - RNA, 32 nt, Homo Sapiens
uucucauccuucccaaccccgugccguuuauu

SEQ ID NO: 35686 - RNA, 32 nt, Homo Sapiens
uaugguaggaggaguggaguggagcucuugcc

SEQ ID NO: 35687 - RNA, 31 nt, Homo Sapiens
ggcuaugcuucccuggcuccaagggcccauu

SEQ ID NO: 35688 - RNA, 32 nt, Homo Sapiens
agacccccaagcauagacucggguacugugau

SEQ ID NO: 35689 - RNA, 32 nt, Homo Sapiens
ccagaccaccuccuuuccuucccacagaggcc

SEQ ID NO: 35690 - RNA, 32 nt, Homo Sapiens
gaccguaaugaaagccacauuuuccugaauua

SEQ ID NO: 35691 - RNA, 32 nt, Homo Sapiens
guugauuucugcacuaucuuuuucucaguuac

SEQ ID NO: 35692 - RNA, 28 nt, Homo Sapiens
guaggggggcggcugagccgcgcagugc

SEQ ID NO: 35693 - RNA, 32 nt, Homo Sapiens
uuucuuuuuuuuuuuuuuuuuacaauuuaaaa

SEQ ID NO: 35694 - RNA, 32 nt, Homo Sapiens
ccagccccgcccucugcccccuggcccugggc

SEQ ID NO: 35695 - RNA, 32 nt, Homo Sapiens
cucgggaucuccccggcggccucccuuggccc

SEQ ID NO: 35696 - RNA, 32 nt, Homo Sapiens
cuccacuggaggaaaacacaccccggucucac

SEQ ID NO: 35697 - RNA, 32 nt, Homo Sapiens
agauuucagucuuuuccuguuuuuguuaacuu

SEQ ID NO: 35698 - RNA, 32 nt, Homo Sapiens
cugauucaaauguaagcaaaccacugaugacc

SEQ ID NO: 35699 - RNA, 32 nt, Homo Sapiens
uuggguuaauaaagauuuuaaauauuuaaaaa

SEQ ID NO: 35700 - RNA, 32 nt, Homo Sapiens
gaggccgucaacauggaaaagcagccccagaa

SEQ ID NO: 35701 - RNA, 32 nt, Homo Sapiens
guguaagggcuuugaugccagcauccuuggau

SEQ ID NO: 35702 - RNA, 26 nt, Homo Sapiens
gauggagccccugcgggugcuggagc

SEQ ID NO: 35703 - RNA, 32 nt, Homo Sapiens
agagagcuugccgacgaugccuuccugugcag

SEQ ID NO: 35704 - RNA, 32 nt, Homo Sapiens
ggggccuggagcagcggcucucgccuguaauc

SEQ ID NO: 35705 - RNA, 32 nt, Homo Sapiens
ggaggagugucuggucuccggccugccugugc

SEQ ID NO: 35706 - RNA, 32 nt, Homo Sapiens
uacaucuugcguuucucuguuguuaugucuga

SEQ ID NO: 35707 - RNA, 32 nt, Homo Sapiens
ucucucucucucucuuuuuuuuuuuuugacag

SEQ ID NO: 35708 - RNA, 32 nt, Homo Sapiens
acuuaaagaaugcuauugaaaaacuuucugga

SEQ ID NO: 35709 - RNA, 31 nt, Homo Sapiens
cucuaagcucacccagcucaaacugacagga

SEQ ID NO: 35710 - RNA, 32 nt, Homo Sapiens
accaggucgaggagagcguggagcaccugcug

SEQ ID NO: 35711 - RNA, 32 nt, Homo Sapiens
gucuuuacucuuuagccuuguuuaagaaaccu

SEQ ID NO: 35712 - RNA, 32 nt, Homo Sapiens
uuuccuuguccuucuuuuuacuuuuugccuua

SEQ ID NO: 35713 - RNA, 32 nt, Homo Sapiens
ucugcugucuguucuauucaaguucuugaggg

SEQ ID NO: 35714 - RNA, 27 nt, Homo Sapiens
ggaaaggauuuucucagcccccauccc

SEQ ID NO: 35715 - RNA, 32 nt, Homo Sapiens
cuggagggugggcuggggagggguggauuuuu

SEQ ID NO: 35716 - RNA, 32 nt, Homo Sapiens
aaaucugguagauccuauuacacuucuguuua

SEQ ID NO: 35717 - RNA, 32 nt, Homo Sapiens
cccuuuaccuuuagguuuuucuuucuauacau

SEQ ID NO: 35718 - RNA, 32 nt, Homo Sapiens
cucugaguuguuuuagaaaauuagcgcaaugu

SEQ ID NO: 35719 - RNA, 32 nt, Homo Sapiens
acuuggccuuuucucugccugcaugucccugu

SEQ ID NO: 35720 - RNA, 32 nt, Homo Sapiens
ccgaggaugcaguuaaaccaacacugaccccc

SEQ ID NO: 35721 - RNA, 32 nt, Homo Sapiens
guugguuaauuauauuaguguuuucuauuuug

SEQ ID NO: 35722 - RNA, 32 nt, Homo Sapiens
guggggccagaggagcucuccagcccugccua

SEQ ID NO: 35723 - RNA, 32 nt, Homo Sapiens
gaaccgggccgcgcuccuccccuccuagaguu

SEQ ID NO: 35724 - RNA, 32 nt, Homo Sapiens
gucuacacccucuucuucuccuccauccuuua

SEQ ID NO: 35725 - RNA, 32 nt, Homo Sapiens
ccuccaauuucuugccagacagucauucccug

SEQ ID NO: 35726 - RNA, 32 nt, Homo Sapiens
cacaguguacagcggccccaagggcagcuacu

SEQ ID NO: 35727 - RNA, 32 nt, Homo Sapiens
cacagaauauucaaauuauagaacauguuuuu

SEQ ID NO: 35728 - RNA, 32 nt, Homo Sapiens
agaaggaacaggugcaaagcaggcaauuagcc

SEQ ID NO: 35729 - RNA, 32 nt, Homo Sapiens
gaauugggccccguggcagagcccccaucccu

SEQ ID NO: 35730 - RNA, 32 nt, Homo Sapiens
uccggaaaagacugagaagcuuacauucuucc

SEQ ID NO: 35731 - RNA, 32 nt, Homo Sapiens
aagcuaucaaaauaaaaaagaauucugauugg

SEQ ID NO: 35732 - RNA, 32 nt, Homo Sapiens
uuucaguucuccuguuauguucugguugaaau

SEQ ID NO: 35733 - RNA, 32 nt, Homo Sapiens
cccucucaccgugguuaacgugacgaaggcac

SEQ ID NO: 35734 - RNA, 32 nt, Homo Sapiens
gcuuuauaugcauggaucuguuuggauacucu

SEQ ID NO: 35735 - RNA, 32 nt, Homo Sapiens
cggcgagauggacaccugagaugcugugcugc

SEQ ID NO: 35736 - RNA, 32 nt, Homo Sapiens
uugauugccuucuacuggaagauugggaauua

SEQ ID NO: 35737 - RNA, 31 nt, Homo Sapiens
guuaaaaaauaaaagguguuuuacuuucagg

SEQ ID NO: 35738 - RNA, 32 nt, Homo Sapiens
gacgcaagaacaaaaagaaccaaguagagaga

SEQ ID NO: 35739 - RNA, 32 nt, Homo Sapiens
gcuggagaagcaguuagggcggacgaagcagg

SEQ ID NO: 35740 - RNA, 32 nt, Homo Sapiens
uacuuucccucagcugacugguguucuaccug

SEQ ID NO: 35741 - RNA, 32 nt, Homo Sapiens
cucauuuauuaaaauauaucagguuggagagu

SEQ ID NO: 35742 - RNA, 32 nt, Homo Sapiens
gaggggaagcuugagcugcugcugucacuccu

SEQ ID NO: 35743 - RNA, 32 nt, Homo Sapiens
cccugacucccucugcuguccuccccucucac

SEQ ID NO: 35744 - RNA, 32 nt, Homo Sapiens
aggcagccccccacccgccgccuccugcaccg

SEQ ID NO: 35745 - RNA, 32 nt, Homo Sapiens
uuggaggauucauauaauggagaacugaugua

SEQ ID NO: 35746 - RNA, 32 nt, Homo Sapiens
gggauaugaggccucggaggcugggguugaga

SEQ ID NO: 35747 - RNA, 32 nt, Homo Sapiens
agagcuggaccccccacccccacccuggcgga

SEQ ID NO: 35748 - RNA, 32 nt, Homo Sapiens
uugcaggcaugucucugagcugcuauaccugc

SEQ ID NO: 35749 - RNA, 32 nt, Homo Sapiens
cgcccgcuccucggcucggcccgggguaguuu

SEQ ID NO: 35750 - RNA, 32 nt, Homo Sapiens
gaugguagcuaauuuuucuuuaccuauuuucu

SEQ ID NO: 35751 - RNA, 32 nt, Homo Sapiens
gaugucuuaugagaagcagagggaggaccuca

SEQ ID NO: 35752 - RNA, 32 nt, Homo Sapiens
uuccucuuccuucuccuucuugucaaagacau

SEQ ID NO: 35753 - RNA, 32 nt, Homo Sapiens
cugagcugggacagguucugguaaaugccaag

SEQ ID NO: 35754 - RNA, 32 nt, Homo Sapiens
cuuucuguggcugaggggcuggugagauuuuu

SEQ ID NO: 35755 - RNA, 32 nt, Homo Sapiens
guugucuucuuuccuucaccaccacccaggag

SEQ ID NO: 35756 - RNA, 30 nt, Homo Sapiens
acuggggagucggcaggcggcaggaaccau

SEQ ID NO: 35757 - RNA, 32 nt, Homo Sapiens
ccuauaaaaaauuuaaaaauuagccaggcauu

SEQ ID NO: 35758 - RNA, 32 nt, Homo Sapiens
aagaaaacauucaauauccaggacuauaaaau

SEQ ID NO: 35759 - RNA, 32 nt, Homo Sapiens
aaaguuccggggggcugcuugggcucugugcu

SEQ ID NO: 35760 - RNA, 32 nt, Homo Sapiens
uucucccugucagguugcacagaugcauguag

SEQ ID NO: 35761 - RNA, 32 nt, Homo Sapiens
aaaggauacuuauuuaaauagaugacauugac

SEQ ID NO: 35762 - RNA, 32 nt, Homo Sapiens
ucuuuaggagagucgacgugucugcguccagc

SEQ ID NO: 35763 - RNA, 32 nt, Homo Sapiens
guuaggacaaaguggauggaugccgggaaguu

SEQ ID NO: 35764 - RNA, 29 nt, Homo Sapiens
gagcaugagcgcgggcucggagcgcgggg

SEQ ID NO: 35765 - RNA, 32 nt, Homo Sapiens
aguccucugcaugaguucugcaccccaagccc

SEQ ID NO: 35766 - RNA, 32 nt, Homo Sapiens
auucuacuugcacagagcuggaugccacgaga

SEQ ID NO: 35767 - RNA, 32 nt, Homo Sapiens
cucuggcagccucuccugccucugcugagcuc

SEQ ID NO: 35768 - RNA, 29 nt, Homo Sapiens
uccaccucuauccaccccauaaggucccu

SEQ ID NO: 35769 - RNA, 32 nt, Homo Sapiens
cuuuccuuuaauccggcagugaccguguguca

SEQ ID NO: 35770 - RNA, 32 nt, Homo Sapiens
ccgggcucaacgcgcugcugcugcugcucuau

SEQ ID NO: 35771 - RNA, 32 nt, Homo Sapiens
ggcucuuuggagaucaaggagaggaggcaacu

SEQ ID NO: 35772 - RNA, 32 nt, Homo Sapiens
gggaaggcagcggaagacgccagcugccaggg

SEQ ID NO: 35773 - RNA, 32 nt, Homo Sapiens
ccaaaucaaagcucuuucugcuugugcaagau

SEQ ID NO: 35774 - RNA, 32 nt, Homo Sapiens
gaugcaggcuugugugcggggcagauggccag

SEQ ID NO: 35775 - RNA, 32 nt, Homo Sapiens
uuuguguacucagagaacgaaaaggaaugcug

SEQ ID NO: 35776 - RNA, 32 nt, Homo Sapiens
ugucuuauuccacugcuucucccagcauucug

SEQ ID NO: 35777 - RNA, 32 nt, Homo Sapiens
gcuggcaagagcugccgccggugcugggagag

SEQ ID NO: 35778 - RNA, 32 nt, Homo Sapiens
gaacaucuauuuuucuacaaaacuggaaaaau

SEQ ID NO: 35779 - RNA, 32 nt, Homo Sapiens
cggggagggccgggaggcgccauggucucucu

SEQ ID NO: 35780 - RNA, 32 nt, Homo Sapiens
caaugacacucauggaggaaaugcugagagaa

SEQ ID NO: 35781 - RNA, 32 nt, Homo Sapiens
gaagaccccguccaccuccuccugcuuagaau

SEQ ID NO: 35782 - RNA, 32 nt, Homo Sapiens
ugacacugugugcauggucuccagucagccuc

SEQ ID NO: 35783 - RNA, 32 nt, Homo Sapiens
acacaauagaacaacaugcaaaaaauacuuca

SEQ ID NO: 35784 - RNA, 32 nt, Homo Sapiens
uauguaucuauuuuuguguacuguuuucaagu

SEQ ID NO: 35785 - RNA, 32 nt, Homo Sapiens
gcagcugucgcacggucagaucaugggcucca

SEQ ID NO: 35786 - RNA, 32 nt, Homo Sapiens
gcccgagcugccguuuuccccucgcggggaac

SEQ ID NO: 35787 - RNA, 32 nt, Homo Sapiens
acuuuccagugcauagagccaugugagccaug

SEQ ID NO: 35788 - RNA, 32 nt, Homo Sapiens
cacuuuaccccuggauaaaggcacuuucacug

SEQ ID NO: 35789 - RNA, 32 nt, Homo Sapiens
cuaggccgggccugggccucccaucggggccg

SEQ ID NO: 35790 - RNA, 32 nt, Homo Sapiens
gcgugggccucuccccggggccgccccagguc

SEQ ID NO: 35791 - RNA, 32 nt, Homo Sapiens
gggcucggcuggaagcagcgagggucagagcg

SEQ ID NO: 35792 - RNA, 32 nt, Homo Sapiens
auaggcagaaacaaaaugacuguagaacuuau

SEQ ID NO: 35793 - RNA, 28 nt, Homo Sapiens
gccagaagagauuaacauuugagucagu

SEQ ID NO: 35794 - RNA, 32 nt, Homo Sapiens
cuggaaaagagauuauuuuugccaccuacauc

SEQ ID NO: 35795 - RNA, 32 nt, Homo Sapiens
cucccuuggccccagcgcccagcccugcucuc

SEQ ID NO: 35796 - RNA, 32 nt, Homo Sapiens
ucucacccccacccucauguucaggguggaug

SEQ ID NO: 35797 - RNA, 32 nt, Homo Sapiens
ccaggcuggucuccaacaccugggcucaagug

SEQ ID NO: 35798 - RNA, 30 nt, Homo Sapiens
ggucaaggcaggcaucucuguucucugaac

SEQ ID NO: 35799 - RNA, 32 nt, Homo Sapiens
ucguggcugggggaaaggcggggggugggggg

SEQ ID NO: 35800 - RNA, 32 nt, Homo Sapiens
uaagccauaggaguccugggggugcaaagggu

SEQ ID NO: 35801 - RNA, 32 nt, Homo Sapiens
gcagggagcgcggcagcccuggcggagggaug

SEQ ID NO: 35802 - RNA, 32 nt, Homo Sapiens
auaccugacccuugaaacuaugaacuaauaaa

SEQ ID NO: 35803 - RNA, 32 nt, Homo Sapiens
gcccuugagauuugaggccuuggagacucagg

SEQ ID NO: 35804 - RNA, 32 nt, Homo Sapiens
uuuuccagugauugcuuuggccuguacaacca

SEQ ID NO: 35805 - RNA, 32 nt, Homo Sapiens
gcaacgcguuccuuuccaggcuugcagcgggc

SEQ ID NO: 35806 - RNA, 32 nt, Homo Sapiens
gugggauacuuuaaagugcuccugcuuaaaua

SEQ ID NO: 35807 - RNA, 31 nt, Homo Sapiens
cuuaaaugugacaugaaauaauugugcugcu

SEQ ID NO: 35808 - RNA, 32 nt, Homo Sapiens
auugugcccagggcagcccuguccuugggcag

SEQ ID NO: 35809 - RNA, 32 nt, Homo Sapiens
ucacaguugagugaaauuaaaaucacuauauc

SEQ ID NO: 35810 - RNA, 32 nt, Homo Sapiens
ugccuggaguguaugacugcacaugacucggg

SEQ ID NO: 35811 - RNA, 32 nt, Homo Sapiens
ccccccauuuuuccuauuauucgcuccaagaa

SEQ ID NO: 35812 - RNA, 32 nt, Homo Sapiens
cauuucuuggggucguauuccugauuucagaa

SEQ ID NO: 35813 - RNA, 32 nt, Homo Sapiens
guuacugucauucccauuccuuuucuuuagaa

SEQ ID NO: 35814 - RNA, 32 nt, Homo Sapiens
guuucagaaucuuuuuaucuuagauguaggca

SEQ ID NO: 35815 - RNA, 32 nt, Homo Sapiens
aggauaggaugaucaccuccaguccuucggac

SEQ ID NO: 35816 - RNA, 32 nt, Homo Sapiens
guccugaauacacacacacacacacacacacg

SEQ ID NO: 35817 - RNA, 32 nt, Homo Sapiens
auuucuaucuucugaccuugccucucaucuuu

SEQ ID NO: 35818 - RNA, 32 nt, Homo Sapiens
gaagccaaccccuccugugcugccggucacug

SEQ ID NO: 35819 - RNA, 32 nt, Homo Sapiens
gugaaaauaaauaaaugggacuacaucaaucu

SEQ ID NO: 35820 - RNA, 32 nt, Homo Sapiens
gccaggccugcgccggcauccuccgagauaau

SEQ ID NO: 35821 - RNA, 32 nt, Homo Sapiens
gggaggaggaugcagacgccgcggccggcgau

SEQ ID NO: 35822 - RNA, 32 nt, Homo Sapiens
uuuuggcuucuaccaaagagaauggagaauug

SEQ ID NO: 35823 - RNA, 32 nt, Homo Sapiens
uuuguuucuaucccuuuccaucucugucuguc

SEQ ID NO: 35824 - RNA, 32 nt, Homo Sapiens
gcacaagucucaucagagaaaccccguucacc

SEQ ID NO: 35825 - RNA, 32 nt, Homo Sapiens
gagcaucuggucuggggggaccacuuugaucg

SEQ ID NO: 35826 - RNA, 32 nt, Homo Sapiens
uggauauuuccucuccuccuguagccauacuu

SEQ ID NO: 35827 - RNA, 32 nt, Homo Sapiens
cugagggcuguggugugcauuauucuuuaggg

SEQ ID NO: 35828 - RNA, 32 nt, Homo Sapiens
ccuuugucccaaguauucccaaggaagauggu

SEQ ID NO: 35829 - RNA, 32 nt, Homo Sapiens
uggcaaucacagcccgcagaaccaucaugugu

SEQ ID NO: 35830 - RNA, 32 nt, Homo Sapiens
guguuccggcaaagacagagccagcagcugcg

SEQ ID NO: 35831 - RNA, 32 nt, Homo Sapiens
uuaaaguggcaguugauuaacauggaagggga

SEQ ID NO: 35832 - RNA, 32 nt, Homo Sapiens
uuuucucagacaugcgggagccaggagagcac

SEQ ID NO: 35833 - RNA, 32 nt, Homo Sapiens
ggcgggagcugcucggaagcuacaccucgcaa

SEQ ID NO: 35834 - RNA, 32 nt, Homo Sapiens
caugcguuucuguggcagcuguggggacuuga

SEQ ID NO: 35835 - RNA, 32 nt, Homo Sapiens
ucuuuguucuuuguuagucucuugaaacuggc

SEQ ID NO: 35836 - RNA, 32 nt, Homo Sapiens
aaaccaaaaacaacuaacaagaaaccaaguau

SEQ ID NO: 35837 - RNA, 32 nt, Homo Sapiens
aaaaucagcaaccugcaucuuuuaugagagaa

SEQ ID NO: 35838 - RNA, 32 nt, Homo Sapiens
uuacugguuuguggggcacagaugccuggguu

SEQ ID NO: 35839 - RNA, 32 nt, Homo Sapiens
uccugcauauauauguaugaagggcauguaua

SEQ ID NO: 35840 - RNA, 32 nt, Homo Sapiens
uggacucacaaggaagaccaggcugaggcccc

SEQ ID NO: 35841 - RNA, 32 nt, Homo Sapiens
aggcagggaaguguaagaaacacacugaggca

SEQ ID NO: 35842 - RNA, 32 nt, Homo Sapiens
uuuaaagauuuggagaagauauguaaauuacc

SEQ ID NO: 35843 - RNA, 32 nt, Homo Sapiens
aacauagaugacuacauggauauugagggcau

SEQ ID NO: 35844 - RNA, 32 nt, Homo Sapiens
ggcuaaaauaaaaugaaaagcauaaaacucuc

SEQ ID NO: 35845 - RNA, 32 nt, Homo Sapiens
cugcagacaaaauauuugaugugccaauuaug

SEQ ID NO: 35846 - RNA, 32 nt, Homo Sapiens
ugagagcccagcugccucugcccacccuuccc

SEQ ID NO: 35847 - RNA, 32 nt, Homo Sapiens
gcccacugccagcucugcuccccaggcuauua

SEQ ID NO: 35848 - RNA, 32 nt, Homo Sapiens
ugccugaaagacugguccccuugaucgcugga

SEQ ID NO: 35849 - RNA, 28 nt, Homo Sapiens
aggauggcucggggcggggcgggggcag

SEQ ID NO: 35850 - RNA, 32 nt, Homo Sapiens
uguuuucugaaucauaacuugucuauuuuucu

SEQ ID NO: 35851 - RNA, 32 nt, Homo Sapiens
ccuccgagcucgccccgguggguguggcccgg

SEQ ID NO: 35852 - RNA, 29 nt, Homo Sapiens
ggaggggugaagauuggggccaguaucga

SEQ ID NO: 35853 - RNA, 32 nt, Homo Sapiens
cuuaaauauauucaguaaaauguggaaagggg

SEQ ID NO: 35854 - RNA, 32 nt, Homo Sapiens
ggcugcugcggagcuuccgcugccaucuucgg

SEQ ID NO: 35855 - RNA, 32 nt, Homo Sapiens
gaauuuugaucugaaauugacuuugguuuuca

SEQ ID NO: 35856 - RNA, 32 nt, Homo Sapiens
aaugcuaacacuaggacagucucugucagacu

SEQ ID NO: 35857 - RNA, 32 nt, Homo Sapiens
augcuggaugccuugcagacaucauucaguuu

SEQ ID NO: 35858 - RNA, 32 nt, Homo Sapiens
caggaugaaaauaaggaggaguugucagacaa

SEQ ID NO: 35859 - RNA, 32 nt, Homo Sapiens
gcugaaaugcaucuguuaaaaaugucaugauu

SEQ ID NO: 35860 - RNA, 32 nt, Homo Sapiens
cagagugacgcacugacucaccuagaggcugg

SEQ ID NO: 35861 - RNA, 30 nt, Homo Sapiens
cguuucccucugugcggcggccggcgggac

SEQ ID NO: 35862 - RNA, 32 nt, Homo Sapiens
aauagcacaugauuuucuuuuguuuucuucau

SEQ ID NO: 35863 - RNA, 32 nt, Homo Sapiens
cccucccggacggggcagcuggccgggcagag

SEQ ID NO: 35864 - RNA, 32 nt, Homo Sapiens
cccucccggacggggcggcuggccaggcagag

SEQ ID NO: 35865 - RNA, 32 nt, Homo Sapiens
gaccaguguggccacgaggccuggccuuguga

SEQ ID NO: 35866 - RNA, 32 nt, Homo Sapiens
acguggaucagggcuaugggugcugaugcugu

SEQ ID NO: 35867 - RNA, 32 nt, Homo Sapiens
gcuacguagccgagguuugcgcugccgccgcc

SEQ ID NO: 35868 - RNA, 32 nt, Homo Sapiens
uuauuucgcuuuuggaaucagcuuacagauuc

SEQ ID NO: 35869 - RNA, 32 nt, Homo Sapiens
ggcugccccucccaugcucuccugcuuucucc

SEQ ID NO: 35870 - RNA, 32 nt, Homo Sapiens
ucccugagggugggaggccugcuugugcugaa

SEQ ID NO: 35871 - RNA, 32 nt, Homo Sapiens
gugucauuccaagguuucuucaugagucauuc

SEQ ID NO: 35872 - RNA, 32 nt, Homo Sapiens
uauuuucacgaaucaguugcuuuguguuuguu

SEQ ID NO: 35873 - RNA, 30 nt, Homo Sapiens
caggcgcccgucaagcaggccucuggagug

SEQ ID NO: 35874 - RNA, 32 nt, Homo Sapiens
gccgaggccgggggaggcuccuguccgccccg

SEQ ID NO: 35875 - RNA, 32 nt, Homo Sapiens
ugacaggcccccagccuugcucugcgcuuucg

SEQ ID NO: 35876 - RNA, 32 nt, Homo Sapiens
acuugaagaaagugcuauccccugccugucua

SEQ ID NO: 35877 - RNA, 32 nt, Homo Sapiens
uucaggggccccagaaggaccugacccagaaa

SEQ ID NO: 35878 - RNA, 32 nt, Homo Sapiens
cuucuguuuuggagaguuuauuauuaaaaaca

SEQ ID NO: 35879 - RNA, 32 nt, Homo Sapiens
acacguucgcacgcggcggccggcgcgcugga

SEQ ID NO: 35880 - RNA, 32 nt, Homo Sapiens
ccaugggcggggguggggugguugcccccaag

SEQ ID NO: 35881 - RNA, 32 nt, Homo Sapiens
ccagaggagguagccucaggcuguaucugggu

SEQ ID NO: 35882 - RNA, 32 nt, Homo Sapiens
cuucccaucaaucccagcccauguacuaauaa

SEQ ID NO: 35883 - RNA, 32 nt, Homo Sapiens
aauagaauuuaaaggugauaaaaauacuggca

SEQ ID NO: 35884 - RNA, 32 nt, Homo Sapiens
ugaucacacaguguuagugcuggucagagaga

SEQ ID NO: 35885 - RNA, 32 nt, Homo Sapiens
agccuuccccuugcuagcuaguucuuacuuca

SEQ ID NO: 35886 - RNA, 32 nt, Homo Sapiens
cggcccuggcugcagccucccggcgccagcga

SEQ ID NO: 35887 - RNA, 32 nt, Homo Sapiens
cugaagggcuccucaagugcugccaaaguggg

SEQ ID NO: 35888 - RNA, 32 nt, Homo Sapiens
uugccgggccagcccgaacagcagcugggucg

SEQ ID NO: 35889 - RNA, 32 nt, Homo Sapiens
acauggggaggaggagggucggugccuucaag

SEQ ID NO: 35890 - RNA, 32 nt, Homo Sapiens
gcuaggaauuguguuuauaauuuuaaauguuu

SEQ ID NO: 35891 - RNA, 32 nt, Homo Sapiens
uauaucaaaauuuggaugaacaaucaaacugu

SEQ ID NO: 35892 - RNA, 32 nt, Homo Sapiens
ccaucuuccugccuacuggaugcuuacaguga

SEQ ID NO: 35893 - RNA, 32 nt, Homo Sapiens
ggccaccugggagauagcagggggcacagaga

SEQ ID NO: 35894 - RNA, 32 nt, Homo Sapiens
caccccugcccauuuucugucuuuaauuaacc

SEQ ID NO: 35895 - RNA, 32 nt, Homo Sapiens
cuccgggggaggaggaugggguugggaacgcu

SEQ ID NO: 35896 - RNA, 32 nt, Homo Sapiens
acuuuuuauuuuuuaaugauaauggagauguc

SEQ ID NO: 35897 - RNA, 32 nt, Homo Sapiens
gugugcucaggggacaaucuccccucaaccgc

SEQ ID NO: 35898 - RNA, 32 nt, Homo Sapiens
uauagguugcugucagacuauacccauggugc

SEQ ID NO: 35899 - RNA, 32 nt, Homo Sapiens
gggagaaacuaaagccagguaaugagagaggg

SEQ ID NO: 35900 - RNA, 32 nt, Homo Sapiens
ucagaguuaaacaaacaaaaaaauagcauacu

SEQ ID NO: 35901 - RNA, 32 nt, Homo Sapiens
uaauuuucuaguuuugaggaaaaauugggucc

SEQ ID NO: 35902 - RNA, 32 nt, Homo Sapiens
cugaggaaggcacacuugcuccuguugguccc

SEQ ID NO: 35903 - RNA, 32 nt, Homo Sapiens
agaagaaacaaaucagacaauggguccaagcc

SEQ ID NO: 35904 - RNA, 32 nt, Homo Sapiens
ugaccaucuucagguaugggauuucugaacgu

SEQ ID NO: 35905 - RNA, 32 nt, Homo Sapiens
cuguucuuauaaaauuuauuuuguauugcauu

SEQ ID NO: 35906 - RNA, 32 nt, Homo Sapiens
acagucuggggcgggguuccccggcuuccaag

SEQ ID NO: 35907 - RNA, 32 nt, Homo Sapiens
aucauauuuaauuauuucuugaucuuuacuca

SEQ ID NO: 35908 - RNA, 32 nt, Homo Sapiens
uggggggcucugcagcugcccagcucuuccag

SEQ ID NO: 35909 - RNA, 32 nt, Homo Sapiens
gauuucugacagucagacuuguccacaagaac

SEQ ID NO: 35910 - RNA, 32 nt, Homo Sapiens
ggucuucccauggugauucagaauagaugagc

SEQ ID NO: 35911 - RNA, 32 nt, Homo Sapiens
gacaagguucuucccuuuuacauacugcuguc

SEQ ID NO: 35912 - RNA, 32 nt, Homo Sapiens
uggacagcgcguggccggcgccgcugugggga

SEQ ID NO: 35913 - RNA, 32 nt, Homo Sapiens
cacaagaggagaaaauaacuuguuuccuugau

SEQ ID NO: 35914 - RNA, 32 nt, Homo Sapiens
gguggcugucgugaaauugugcuuguguuucg

SEQ ID NO: 35915 - RNA, 32 nt, Homo Sapiens
uuggaauggcuguauuuacccaaugccugaac

SEQ ID NO: 35916 - RNA, 32 nt, Homo Sapiens
auuuguaccuauucuccagaaaacaguaucau

SEQ ID NO: 35917 - RNA, 32 nt, Homo Sapiens
guggaggacuguuucuuccaaaaguuuccaag

SEQ ID NO: 35918 - RNA, 32 nt, Homo Sapiens
aaugcaaaaugaagucuugcaugcaaagugaa

SEQ ID NO: 35919 - RNA, 32 nt, Homo Sapiens
ugaauguacagcacuuccauuaacuuuugaaa

SEQ ID NO: 35920 - RNA, 32 nt, Homo Sapiens
caacuggaaaggaaacacaaagucucaaguga

SEQ ID NO: 35921 - RNA, 32 nt, Homo Sapiens
gagcuuggggagaggaugggagugggcagagg

SEQ ID NO: 35922 - RNA, 32 nt, Homo Sapiens
agagccgagccugaugggcgccaaggccggcu

SEQ ID NO: 35923 - RNA, 32 nt, Homo Sapiens
uugugagggaugaguugcauagcugauauguc

SEQ ID NO: 35924 - RNA, 32 nt, Homo Sapiens
uuaggacaauguuguguaaaucuuugaaggac

SEQ ID NO: 35925 - RNA, 32 nt, Homo Sapiens
cgagcacagguccgccugugugcccgugggcu

SEQ ID NO: 35926 - RNA, 32 nt, Homo Sapiens
auugugacuguaaacauuguacuguaaauguu

SEQ ID NO: 35927 - RNA, 32 nt, Homo Sapiens
gucaucuuaaauuuauaaucaucucaaaaaag

SEQ ID NO: 35928 - RNA, 32 nt, Homo Sapiens
uucccacccugccccaggccaccugcugugcc

SEQ ID NO: 35929 - RNA, 32 nt, Homo Sapiens
ugaauaaugacauacaguacugaaguaaucug

SEQ ID NO: 35930 - RNA, 32 nt, Homo Sapiens
uaaaguuuuauugaugugaaauuaaauucuua

SEQ ID NO: 35931 - RNA, 32 nt, Homo Sapiens
aguaccaguccgccuggcgauucuuuggcuuc

SEQ ID NO: 35932 - RNA, 32 nt, Homo Sapiens
cacgccucuucccacaccugucagcuucggaa

SEQ ID NO: 35933 - RNA, 32 nt, Homo Sapiens
cccaggccgcccugcugcugcaggcugcagaa

SEQ ID NO: 35934 - RNA, 32 nt, Homo Sapiens
ucgcccucuccacgucagcaucagcgugcucc

SEQ ID NO: 35935 - RNA, 32 nt, Homo Sapiens
auagaaauauuuuuguguauaauuuuucugaa

SEQ ID NO: 35936 - RNA, 32 nt, Homo Sapiens
aaguauaaaaauuuuuaccuguuuaaucauuu

SEQ ID NO: 35937 - RNA, 32 nt, Homo Sapiens
uuuccgaaauuaacucagcgugaucggcaaga

SEQ ID NO: 35938 - RNA, 32 nt, Homo Sapiens
cucagcauauauauaaaauacacguguauaug

SEQ ID NO: 35939 - RNA, 32 nt, Homo Sapiens
uaccacauacccaguagguaauaaggugucca

SEQ ID NO: 35940 - RNA, 32 nt, Homo Sapiens
uucguagccaucuccguggccaaugugacuac

SEQ ID NO: 35941 - RNA, 32 nt, Homo Sapiens
ggaaacucagugaggaggagccaggcaggcug

SEQ ID NO: 35942 - RNA, 32 nt, Homo Sapiens
ugcaccagguuucugaugaugaaauaaagcac

SEQ ID NO: 35943 - RNA, 32 nt, Homo Sapiens
gagcgcgugcgcgcauguggugcugagcuugg

SEQ ID NO: 35944 - RNA, 32 nt, Homo Sapiens
ccugccuuuucuccgguggggaugaggcugcu

SEQ ID NO: 35945 - RNA, 32 nt, Homo Sapiens
ccgucccuccaucccugucccccgucccccug

SEQ ID NO: 35946 - RNA, 32 nt, Homo Sapiens
auuuucauuuuguaaugugguuuaacauccuu

SEQ ID NO: 35947 - RNA, 32 nt, Homo Sapiens
ccaugauugugccacugcacuccagcuuggug

SEQ ID NO: 35948 - RNA, 32 nt, Homo Sapiens
caggauaaccugccuccacucacucgccugga

SEQ ID NO: 35949 - RNA, 32 nt, Homo Sapiens
ccgcccgccgcgcuccucccuccuaggaagag

SEQ ID NO: 35950 - RNA, 32 nt, Homo Sapiens
uucauggguauuaaaauugaagaaaccuuuuc

SEQ ID NO: 35951 - RNA, 32 nt, Homo Sapiens
caaacuuuauagauaacuuuauuguuauuauu

SEQ ID NO: 35952 - RNA, 32 nt, Homo Sapiens
ugcgucccuucagcucuucuccguggagcucg

SEQ ID NO: 35953 - RNA, 32 nt, Homo Sapiens
uggagggucagacgccugaggaacccuuacag

SEQ ID NO: 35954 - RNA, 32 nt, Homo Sapiens
uuugcugguguuuuaauaaauggggguguuac

SEQ ID NO: 35955 - RNA, 32 nt, Homo Sapiens
cguucuguuguguguggcuguaaaaccccaug

SEQ ID NO: 35956 - RNA, 32 nt, Homo Sapiens
auccugccucaguauugaucuuguguucuuug

SEQ ID NO: 35957 - RNA, 32 nt, Homo Sapiens
uucacuacucaaugaugugucaaaggcacgcu

SEQ ID NO: 35958 - RNA, 32 nt, Homo Sapiens
ggucgccggggcggggccagaacggcgccaag

SEQ ID NO: 35959 - RNA, 32 nt, Homo Sapiens
aacuguuucggaugcuagaaauccauggcuua

SEQ ID NO: 35960 - RNA, 32 nt, Homo Sapiens
acuagucuauagaagaugacacagaaauugga

SEQ ID NO: 35961 - RNA, 32 nt, Homo Sapiens
guagcauauuccagcuuguguguggcuguccu

SEQ ID NO: 35962 - RNA, 32 nt, Homo Sapiens
uauuacguuuccuuuuucaaacuguccauggg

SEQ ID NO: 35963 - RNA, 30 nt, Homo Sapiens
uggcugcuggacuguuccucaggagcggcc

SEQ ID NO: 35964 - RNA, 32 nt, Homo Sapiens
accagaguauuuuuaaaaucuuuuuaucuuuu

SEQ ID NO: 35965 - RNA, 32 nt, Homo Sapiens
uuuuuaucuugaugaauucaucuggcauugcu

SEQ ID NO: 35966 - RNA, 32 nt, Homo Sapiens
ugaaaagugaaggggaaacacacacacacaaa

SEQ ID NO: 35967 - RNA, 32 nt, Homo Sapiens
gcgccugcacgcugugcucgccacggaguaaa

SEQ ID NO: 35968 - RNA, 32 nt, Homo Sapiens
gugacagccuccgucagacucccgcgugaaga

SEQ ID NO: 35969 - RNA, 32 nt, Homo Sapiens
uuccagagucccaagagcuucucugggauuuu

SEQ ID NO: 35970 - RNA, 32 nt, Homo Sapiens
uacagaccucuguacaucaaccuuccguaauc

SEQ ID NO: 35971 - RNA, 32 nt, Homo Sapiens
guaguucagugagaauguuuauguuuacaacu

SEQ ID NO: 35972 - RNA, 32 nt, Homo Sapiens
uuuuguacagaauugaaugggauggaauaggu

SEQ ID NO: 35973 - RNA, 32 nt, Homo Sapiens
augacuacugucaaggucauauuuucaguaca

SEQ ID NO: 35974 - RNA, 31 nt, Homo Sapiens
aguguccggcacuguggucucagcacguucc

SEQ ID NO: 35975 - RNA, 32 nt, Homo Sapiens
aaaauaguucagaacauagagaaggaccaagg

SEQ ID NO: 35976 - RNA, 32 nt, Homo Sapiens
ugaggucagucagauuucuguucuacaggaua

SEQ ID NO: 35977 - RNA, 32 nt, Homo Sapiens
uuuuuguacguguacaggauucugcugguacg

SEQ ID NO: 35978 - RNA, 32 nt, Homo Sapiens
caggcccuggggaaucaggugacucacacaaa

SEQ ID NO: 35979 - RNA, 32 nt, Homo Sapiens
guccaggagauaccagcagagagggaguagga

SEQ ID NO: 35980 - RNA, 32 nt, Homo Sapiens
cagagccgccccacccccauccugccgcugau

SEQ ID NO: 35981 - RNA, 32 nt, Homo Sapiens
agcaaucaaagugccaguggcuccucgauguu

SEQ ID NO: 35982 - RNA, 32 nt, Homo Sapiens
auucagcugugaggagauucccuuucagacaa

SEQ ID NO: 35983 - RNA, 32 nt, Homo Sapiens
ucuuugaaggauuuccuggugcaccuuucuca

SEQ ID NO: 35984 - RNA, 32 nt, Homo Sapiens
aacaauuaggagcaaaauguccucuguagcca

SEQ ID NO: 35985 - RNA, 32 nt, Homo Sapiens
ucacuggggagaccgagcacagggaggaccag

SEQ ID NO: 35986 - RNA, 32 nt, Homo Sapiens
agauggcggcgguuuuggcugugugaggaaga

SEQ ID NO: 35987 - RNA, 32 nt, Homo Sapiens
ggagacguccagcucuguccucucuuccucac

SEQ ID NO: 35988 - RNA, 29 nt, Homo Sapiens
acauuuguauguaugucaugagugguuuu

SEQ ID NO: 35989 - RNA, 31 nt, Homo Sapiens
gguucccaccacugccuucgcugcgcacgcc

SEQ ID NO: 35990 - RNA, 32 nt, Homo Sapiens
ugacaaggauggauuuucaaaugguuugaccg

SEQ ID NO: 35991 - RNA, 32 nt, Homo Sapiens
auaaagucaugggauaaaaauaaucgauguau

SEQ ID NO: 35992 - RNA, 32 nt, Homo Sapiens
aguuuuugcuaguuauuuacuacauuuuggga

SEQ ID NO: 35993 - RNA, 32 nt, Homo Sapiens
gaguuguucuuuguaauucacugagguauaaa

SEQ ID NO: 35994 - RNA, 32 nt, Homo Sapiens
caggaugcacaaaacuauucagacuguuacuu

SEQ ID NO: 35995 - RNA, 32 nt, Homo Sapiens
ccacugacgacggacagaggagagacaccacu

SEQ ID NO: 35996 - RNA, 32 nt, Homo Sapiens
cuccuggcucugcggaauaaacuccggaagca

SEQ ID NO: 35997 - RNA, 32 nt, Homo Sapiens
gcgcgcggacuggcgucuccccucccggcgau

SEQ ID NO: 35998 - RNA, 32 nt, Homo Sapiens
uggagacccggggucccggcagccgggcggcc

SEQ ID NO: 35999 - RNA, 30 nt, Homo Sapiens
agagagaucgagcuugauguauugcucagu

SEQ ID NO: 36000 - RNA, 31 nt, Homo Sapiens
uuacaagcagacugccugugcccugugcccu

SEQ ID NO: 36001 - RNA, 32 nt, Homo Sapiens
gguacccugcaugcauauagcugcugauucua

SEQ ID NO: 36002 - RNA, 32 nt, Homo Sapiens
gggcuucgaggcuggcccugccaggcaguuuu

SEQ ID NO: 36003 - RNA, 32 nt, Homo Sapiens
cuccaagcacauuuaaguaggcuggucuuuuc

SEQ ID NO: 36004 - RNA, 32 nt, Homo Sapiens
gauaccugcacuguccugaccaucgcacaccg

SEQ ID NO: 36005 - RNA, 32 nt, Homo Sapiens
uucucagaccccccagggccccauaacagcag

SEQ ID NO: 36006 - RNA, 32 nt, Homo Sapiens
acaaggggcucaaaaccuagacuuuauaaaac

SEQ ID NO: 36007 - RNA, 32 nt, Homo Sapiens
acggcgacaggggcuuccccuucgccgccgcc

SEQ ID NO: 36008 - RNA, 32 nt, Homo Sapiens
gaucaucaggcauuagaugcucauaaggagug

SEQ ID NO: 36009 - RNA, 32 nt, Homo Sapiens
cuggaggcugaauuggaaauagggauacagag

SEQ ID NO: 36010 - RNA, 32 nt, Homo Sapiens
ggaacaaaagacgagaaguuaauuauacaaua

SEQ ID NO: 36011 - RNA, 32 nt, Homo Sapiens
guuacagacuuacguauacccuuguauaccug

SEQ ID NO: 36012 - RNA, 32 nt, Homo Sapiens
acugguggggacgcccccgccucccugucccc

SEQ ID NO: 36013 - RNA, 32 nt, Homo Sapiens
ccauguuucuucccuuucugauauuguugucu

SEQ ID NO: 36014 - RNA, 32 nt, Homo Sapiens
agauacugucuguggaugugagguggggacuu

SEQ ID NO: 36015 - RNA, 32 nt, Homo Sapiens
gcccgggcacuucccgucuccucccuugcucc

SEQ ID NO: 36016 - RNA, 32 nt, Homo Sapiens
aucugccggugacauuggauguggcagggucc

SEQ ID NO: 36017 - RNA, 32 nt, Homo Sapiens
ucucggcccaaccgcgggggcugugagcagcg

SEQ ID NO: 36018 - RNA, 32 nt, Homo Sapiens
gaaagcauaaaaauauagcauauaaucuaaaa

SEQ ID NO: 36019 - RNA, 32 nt, Homo Sapiens
guguuuggacuagaaacguauuggccccugcu

SEQ ID NO: 36020 - RNA, 32 nt, Homo Sapiens
acaacccaagauacucagauaggaagacuccu

SEQ ID NO: 36021 - RNA, 32 nt, Homo Sapiens
gacccugccccggccccgcuuccaccuugcgc

SEQ ID NO: 36022 - RNA, 32 nt, Homo Sapiens
aauuuaggaaguucugaucuguuaauuuacua

SEQ ID NO: 36023 - RNA, 32 nt, Homo Sapiens
uagcuaccacggccugugucaacgacuaaagc

SEQ ID NO: 36024 - RNA, 32 nt, Homo Sapiens
aaggugggcccggcccgcgccacaggacccuc

SEQ ID NO: 36025 - RNA, 32 nt, Homo Sapiens
aaaaagggacauuuaugugcaguugggacagc

SEQ ID NO: 36026 - RNA, 32 nt, Homo Sapiens
uauaucacccucaggaacgggaaaggaugagu

SEQ ID NO: 36027 - RNA, 32 nt, Homo Sapiens
ccagaagaaauuagggguuaaagcagacaguc

SEQ ID NO: 36028 - RNA, 32 nt, Homo Sapiens
guucugacaguauuucaugacaauggacggcg

SEQ ID NO: 36029 - RNA, 32 nt, Homo Sapiens
ugcuauagcauacugaagauaaaauuacagga

SEQ ID NO: 36030 - RNA, 32 nt, Homo Sapiens
uguuuuuacccauggcauggguggaauuagag

SEQ ID NO: 36031 - RNA, 32 nt, Homo Sapiens
uuaccaagcugaugugccguucucacccugca

SEQ ID NO: 36032 - RNA, 25 nt, Homo Sapiens
augcucuucucgcuccgggagcugg

SEQ ID NO: 36033 - RNA, 32 nt, Homo Sapiens
uuuccgcacccucuccgauuagcggucccagg

SEQ ID NO: 36034 - RNA, 32 nt, Homo Sapiens
cuuauggagagcaagaacauuuuuguucauuu

SEQ ID NO: 36035 - RNA, 31 nt, Homo Sapiens
uuuaaaacaaauuuaaagggucuguuaauuc

SEQ ID NO: 36036 - RNA, 32 nt, Homo Sapiens
cagccggcggcacgaugccggugcagcugacg

SEQ ID NO: 36037 - RNA, 32 nt, Homo Sapiens
gucaccgcaccuccauccuacccuccuaccag

SEQ ID NO: 36038 - RNA, 32 nt, Homo Sapiens
caaaucccaucucaauuuuaauccccaugugu

SEQ ID NO: 36039 - RNA, 32 nt, Homo Sapiens
aaucaauaacucgcauaugaaguaaaaaggaa

SEQ ID NO: 36040 - RNA, 32 nt, Homo Sapiens
cgagcagagggucaugcgggccccacaggaga

SEQ ID NO: 36041 - RNA, 32 nt, Homo Sapiens
ggaagcagaggcgccggaggcuggggcaccgc

SEQ ID NO: 36042 - RNA, 32 nt, Homo Sapiens
gcccgggcgaggggcgaccggggugaagcccg

SEQ ID NO: 36043 - RNA, 32 nt, Homo Sapiens
gucuuuuuaaaaaaacaaaauauuuugaagau

SEQ ID NO: 36044 - RNA, 32 nt, Homo Sapiens
cucccgccacuacgauguggguccuaagagcc

SEQ ID NO: 36045 - RNA, 32 nt, Homo Sapiens
accuggcaucaugguggauauggugcagagaa

SEQ ID NO: 36046 - RNA, 32 nt, Homo Sapiens
acuuggcuaauagaauauggcugauauuguca

SEQ ID NO: 36047 - RNA, 32 nt, Homo Sapiens
cuuugaaugucaagucagauuggucuguuuua

SEQ ID NO: 36048 - RNA, 32 nt, Homo Sapiens
cccugguggagcccuccuuccauagaaccaga

SEQ ID NO: 36049 - RNA, 32 nt, Homo Sapiens
cuugauuguuuuuucugaaggaaguguaaaga

SEQ ID NO: 36050 - RNA, 32 nt, Homo Sapiens
uccccgucucugguuccuccccuccuccugga

SEQ ID NO: 36051 - RNA, 32 nt, Homo Sapiens
aggagagcugaauuuauggaccuuaauuauua

SEQ ID NO: 36052 - RNA, 32 nt, Homo Sapiens
ccugcccucucccaaaaaacuacuucuuuuuu

SEQ ID NO: 36053 - RNA, 32 nt, Homo Sapiens
aguuguuccagaugugaugucaugguaucgag

SEQ ID NO: 36054 - RNA, 32 nt, Homo Sapiens
agcagcgauaccuagggcggaagugcucucgg

SEQ ID NO: 36055 - RNA, 32 nt, Homo Sapiens
gggguggggacaugagucccccugcugccccu

SEQ ID NO: 36056 - RNA, 32 nt, Homo Sapiens
caccugcucgggcagccccggcgggcucuggg

SEQ ID NO: 36057 - RNA, 32 nt, Homo Sapiens
uauccuaaauuaaccuaaacguauuucacuaa

SEQ ID NO: 36058 - RNA, 32 nt, Homo Sapiens
gaaggagcugccggccggggccacgcuccaca

SEQ ID NO: 36059 - RNA, 32 nt, Homo Sapiens
ucagagcaaccuccagccuucuccagcaggau

SEQ ID NO: 36060 - RNA, 32 nt, Homo Sapiens
cagccuuaggugggucauggagggauuauggu

SEQ ID NO: 36061 - RNA, 32 nt, Homo Sapiens
ggcccacuguggcugcccgggcgacaguacgc

SEQ ID NO: 36062 - RNA, 32 nt, Homo Sapiens
aguccagaucucuggagcugaaggggccagag

SEQ ID NO: 36063 - RNA, 32 nt, Homo Sapiens
cuucaaggguucuggaggagggaagggucugc

SEQ ID NO: 36064 - RNA, 32 nt, Homo Sapiens
uacccuccagcauuaacaucaacacagaccuu

SEQ ID NO: 36065 - RNA, 32 nt, Homo Sapiens
gccucgcugucuguccuccguccucccgaaca

SEQ ID NO: 36066 - RNA, 32 nt, Homo Sapiens
ugcagcugucuccuggauugugucaucauggg

SEQ ID NO: 36067 - RNA, 32 nt, Homo Sapiens
gaagaagaguaaaagaucuacaugcucauguu

SEQ ID NO: 36068 - RNA, 32 nt, Homo Sapiens
ccccaguuccccagcccugcugugacuuccau

SEQ ID NO: 36069 - RNA, 32 nt, Homo Sapiens
uauucuauaacacaaucuugagcauucuugac

SEQ ID NO: 36070 - RNA, 32 nt, Homo Sapiens
aaccagcuucuggaccuggagagaggaugaaa

SEQ ID NO: 36071 - RNA, 32 nt, Homo Sapiens
acagcucuucuacuccacugcugucuaucuug

SEQ ID NO: 36072 - RNA, 32 nt, Homo Sapiens
ucuagauggcaaagacauuuaaaccauauuuu

SEQ ID NO: 36073 - RNA, 32 nt, Homo Sapiens
aagugguggacgaccuccuggaccagaucaca

SEQ ID NO: 36074 - RNA, 32 nt, Homo Sapiens
gcgguggccaggcugugagcuggaggccugca

SEQ ID NO: 36075 - RNA, 32 nt, Homo Sapiens
ccaaaaugucauugccauacagcuucacuaga

SEQ ID NO: 36076 - RNA, 32 nt, Homo Sapiens
gcagguucaauuuagguaaaaaucacauuaug

SEQ ID NO: 36077 - RNA, 32 nt, Homo Sapiens
aaugucuuuugaaagcacuguuacaguuguau

SEQ ID NO: 36078 - RNA, 32 nt, Homo Sapiens
uuggcaucauugaggcuguucuggagaaguuu

SEQ ID NO: 36079 - RNA, 32 nt, Homo Sapiens
uggaggacaaaguggcuguaucaguucaucgu

SEQ ID NO: 36080 - RNA, 32 nt, Homo Sapiens
uucaugaggcugaccuaggaacuuggccaaca

SEQ ID NO: 36081 - RNA, 32 nt, Homo Sapiens
gugcugagugucugaggccgagccaccccucu

SEQ ID NO: 36082 - RNA, 32 nt, Homo Sapiens
uaaaugaaaaagauuaagaucucaugcaacug

SEQ ID NO: 36083 - RNA, 32 nt, Homo Sapiens
gucggccggggucgggggagggggguggugaa

SEQ ID NO: 36084 - RNA, 32 nt, Homo Sapiens
gccaggcagggcccuagccagggcuccuggac

SEQ ID NO: 36085 - RNA, 32 nt, Homo Sapiens
ggcugguuuuuguauuuuuaguagaggcaagg

SEQ ID NO: 36086 - RNA, 32 nt, Homo Sapiens
ccucacaucugcugcuggccucggugggcucu

SEQ ID NO: 36087 - RNA, 32 nt, Homo Sapiens
uuugguuucuuugagggucacucauugagaca

SEQ ID NO: 36088 - RNA, 32 nt, Homo Sapiens
cauuugagaagcuguggcugagcgcccacuag

SEQ ID NO: 36089 - RNA, 32 nt, Homo Sapiens
agucugagcaggaaggaugacuguagccugug

SEQ ID NO: 36090 - RNA, 31 nt, Homo Sapiens
caugguggcacaugccugccgucucaguuau

SEQ ID NO: 36091 - RNA, 32 nt, Homo Sapiens
agccuaaccacaagaggcuggugcuuaguacu

SEQ ID NO: 36092 - RNA, 32 nt, Homo Sapiens
cuacuuuaaaaauuauuaauaaaaccauaaau

SEQ ID NO: 36093 - RNA, 32 nt, Homo Sapiens
ccuuguauuuuuguuaccugugagugugucuc

SEQ ID NO: 36094 - RNA, 32 nt, Homo Sapiens
cgggggcuggaaccgaagcgggggcggcggga

SEQ ID NO: 36095 - RNA, 32 nt, Homo Sapiens
aaaacaccaaaggaccguuuuaucguuuucug

SEQ ID NO: 36096 - RNA, 32 nt, Homo Sapiens
ggcccacagucugcgaccuucuuguuuggaga

SEQ ID NO: 36097 - RNA, 32 nt, Homo Sapiens
ccacaugugaaugucauugcaagggugacucu

SEQ ID NO: 36098 - RNA, 32 nt, Homo Sapiens
aaacagcccucccucccaguauuucaucaagg

SEQ ID NO: 36099 - RNA, 32 nt, Homo Sapiens
aggauacaaaaauaguugaaucaggauacaga

SEQ ID NO: 36100 - RNA, 32 nt, Homo Sapiens
uuguaauagaauuuaaaguaauaucaaagaga

SEQ ID NO: 36101 - RNA, 32 nt, Homo Sapiens
ucugggccaagccccagucagccuagaggacc

SEQ ID NO: 36102 - RNA, 32 nt, Homo Sapiens
ccugcccaagcaacucauucugcacagcagcc

SEQ ID NO: 36103 - RNA, 32 nt, Homo Sapiens
uaaagacuugagauuauauaaaauuauccaga

SEQ ID NO: 36104 - RNA, 32 nt, Homo Sapiens
uugcuaauggcaacagaagaaagggcuucuuu

SEQ ID NO: 36105 - RNA, 32 nt, Homo Sapiens
aacacuacuuacugauagaccaaaaaacuaca

SEQ ID NO: 36106 - RNA, 32 nt, Homo Sapiens
auuuuaauuauuauguuuaacucugugaguau

SEQ ID NO: 36107 - RNA, 32 nt, Homo Sapiens
guuggcaaaaauaaggaggaaauuauauuauu

SEQ ID NO: 36108 - RNA, 31 nt, Homo Sapiens
ggugcguguggcccugugggaguccacuuuc

SEQ ID NO: 36109 - RNA, 32 nt, Homo Sapiens
augauuaaauuaaaauuggaucaucaaacuca

SEQ ID NO: 36110 - RNA, 32 nt, Homo Sapiens
gucaccaucuucuuugcugugauauaucucca

SEQ ID NO: 36111 - RNA, 32 nt, Homo Sapiens
ccuggccucccucagggugcugccugccucca

SEQ ID NO: 36112 - RNA, 32 nt, Homo Sapiens
ccugcugggggccucuuccucggacccgcaug

SEQ ID NO: 36113 - RNA, 32 nt, Homo Sapiens
cuucagcucuguaucuagcuacucugaugggu

SEQ ID NO: 36114 - RNA, 32 nt, Homo Sapiens
aagugaccaugaaaaggggcugucuggggcuc

SEQ ID NO: 36115 - RNA, 32 nt, Homo Sapiens
uagucauuuaggaugauuuaaggauauaguau

SEQ ID NO: 36116 - RNA, 32 nt, Homo Sapiens
gggguggggaugagggcccagcccucaugauu

SEQ ID NO: 36117 - RNA, 32 nt, Homo Sapiens
uaccugacuucagcuguggcaccaccccucag

SEQ ID NO: 36118 - RNA, 32 nt, Homo Sapiens
uggcaaaaggcacaguuagagccacacaucag

SEQ ID NO: 36119 - RNA, 32 nt, Homo Sapiens
guaagaagcauuugcauacugauuccaucauu

SEQ ID NO: 36120 - RNA, 32 nt, Homo Sapiens
auuaacuugcuuaagugucauacuuuacuggc

SEQ ID NO: 36121 - RNA, 32 nt, Homo Sapiens
uacaagguacacgggaaggaaauacuaagaac

SEQ ID NO: 36122 - RNA, 32 nt, Homo Sapiens
gugauuagcguuggaugcuuuaccauucucuu

SEQ ID NO: 36123 - RNA, 32 nt, Homo Sapiens
ucuccccagaaagccucaugugagucauaagc

SEQ ID NO: 36124 - RNA, 32 nt, Homo Sapiens
ugcucaaaaaauuuucaaagauuaaaacuauu

SEQ ID NO: 36125 - RNA, 32 nt, Homo Sapiens
agucauuuuagacauagcauuuauuaucacug

SEQ ID NO: 36126 - RNA, 32 nt, Homo Sapiens
acccguuccuuccacccagcuccaaacugccu

SEQ ID NO: 36127 - RNA, 32 nt, Homo Sapiens
cacuguugaaagaaaucagagaugacacauaa

SEQ ID NO: 36128 - RNA, 32 nt, Homo Sapiens
gccgcaaggaggaggagugccaggcaggggcu

SEQ ID NO: 36129 - RNA, 31 nt, Homo Sapiens
ugcuggcugccgggcugccccgagccggcgg

SEQ ID NO: 36130 - RNA, 32 nt, Homo Sapiens
gugaugcacgaacuuugaacauucguuauggg

SEQ ID NO: 36131 - RNA, 32 nt, Homo Sapiens
ucauggaaaagacaccaaacacagcaaguauu

SEQ ID NO: 36132 - RNA, 32 nt, Homo Sapiens
augaaacaaaaagcugguucuuugaaaagaua

SEQ ID NO: 36133 - RNA, 32 nt, Homo Sapiens
gcuucccuccccacccccauauguaucaguga

SEQ ID NO: 36134 - RNA, 32 nt, Homo Sapiens
cuggggguucugggggcgaucuggggagcuug

SEQ ID NO: 36135 - RNA, 32 nt, Homo Sapiens
gaagaugaaaacuacagagaagggauuuggcu

SEQ ID NO: 36136 - RNA, 32 nt, Homo Sapiens
accccaagccccacgaccaucguucugaauuc

SEQ ID NO: 36137 - RNA, 32 nt, Homo Sapiens
aagguaacucauuuucucauuauuuucuagcu

SEQ ID NO: 36138 - RNA, 32 nt, Homo Sapiens
guccgggcagcugguccaugguuguccaggua

SEQ ID NO: 36139 - RNA, 32 nt, Homo Sapiens
ccuuaaauccugaaacaguggcaauaaauuua

SEQ ID NO: 36140 - RNA, 32 nt, Homo Sapiens
gcccuacauaucuaaaucgguaaauaaggaca

SEQ ID NO: 36141 - RNA, 32 nt, Homo Sapiens
cgcgcccaagcgcgccgcucugcugugcccug

SEQ ID NO: 36142 - RNA, 32 nt, Homo Sapiens
ccccuggagcgcccgccgcgguccccaccucc

SEQ ID NO: 36143 - RNA, 32 nt, Homo Sapiens
gauuuuguugcauuguaggagcaaacaaggcu

SEQ ID NO: 36144 - RNA, 32 nt, Homo Sapiens
ggaggcggaggcggggguacgacggggagcac

SEQ ID NO: 36145 - RNA, 32 nt, Homo Sapiens
agaaaagcacaaaccucugggaaagacaacgu

SEQ ID NO: 36146 - RNA, 32 nt, Homo Sapiens
uuuuaauuuaugucaguugaugcaucugaaaa

SEQ ID NO: 36147 - RNA, 32 nt, Homo Sapiens
uugauauuuuaaaaauuguucuuaugacuagu

SEQ ID NO: 36148 - RNA, 32 nt, Homo Sapiens
acacugcauuucccuuuaccaacuagcgcugg

SEQ ID NO: 36149 - RNA, 32 nt, Homo Sapiens
uaccuguaaucccagcacuuugggaggccgag

SEQ ID NO: 36150 - RNA, 32 nt, Homo Sapiens
ugccuguaaucccagcacuuugggaagccgag

SEQ ID NO: 36151 - RNA, 32 nt, Homo Sapiens
augucuuuacuggaccugaaauuuaaacugca

SEQ ID NO: 36152 - RNA, 27 nt, Homo Sapiens
agaugggaccucccggcccagcacugc

SEQ ID NO: 36153 - RNA, 32 nt, Homo Sapiens
cguaggggccgcgcccuggccucuccauggac

SEQ ID NO: 36154 - RNA, 32 nt, Homo Sapiens
cugagcuccuccccgcgugccuucgcccucug

SEQ ID NO: 36155 - RNA, 32 nt, Homo Sapiens
uuaccacuuguuaagaaaauuaaauucuucag

SEQ ID NO: 36156 - RNA, 32 nt, Homo Sapiens
cgcgccuccgcggagguagccguucccugacc

SEQ ID NO: 36157 - RNA, 32 nt, Homo Sapiens
cuaaguuuauggugaacuuuuaacucaaugug

SEQ ID NO: 36158 - RNA, 32 nt, Homo Sapiens
cggcgaggagccuccgccccccacccgguugu

SEQ ID NO: 36159 - RNA, 32 nt, Homo Sapiens
uuaggacaauaauguaaaaugaaaauaaauuu

SEQ ID NO: 36160 - RNA, 32 nt, Homo Sapiens
uagggcuguaggugcugucauacguguccugc

SEQ ID NO: 36161 - RNA, 32 nt, Homo Sapiens
ggcaauguuuaaacagaagguccaugaacucc

SEQ ID NO: 36162 - RNA, 32 nt, Homo Sapiens
augugggaguggggugggagggggcagcaggc

SEQ ID NO: 36163 - RNA, 32 nt, Homo Sapiens
uagcccuugucuacuauguuuuuuccagaugu

SEQ ID NO: 36164 - RNA, 32 nt, Homo Sapiens
uguauaauuguuuacauacuuaaaaggaaaaa

SEQ ID NO: 36165 - RNA, 32 nt, Homo Sapiens
acagggucagugacaucugcagugucccaguc

SEQ ID NO: 36166 - RNA, 32 nt, Homo Sapiens
ccgcgcccgcggcgugcggaccgcgguuccug

SEQ ID NO: 36167 - RNA, 32 nt, Homo Sapiens
ugucacccaagccugcugggucucccuuccca

SEQ ID NO: 36168 - RNA, 32 nt, Homo Sapiens
uaauuggcucacgguuuugcaggcuguacagg

SEQ ID NO: 36169 - RNA, 32 nt, Homo Sapiens
aagccuaauugauuaaaauuuaucuuuuuuau

SEQ ID NO: 36170 - RNA, 32 nt, Homo Sapiens
uuuauuuaaaaauuauuuuuucuuccccucaa

SEQ ID NO: 36171 - RNA, 32 nt, Homo Sapiens
uugccccaaacacuuagcuggcuccccaugac

SEQ ID NO: 36172 - RNA, 32 nt, Homo Sapiens
guuuagggucaaaaguuuuugaauuaacuuuu

SEQ ID NO: 36173 - RNA, 29 nt, Homo Sapiens
agacaccaaggacagagacgcuggcuagg

SEQ ID NO: 36174 - RNA, 32 nt, Homo Sapiens
cugggugccgugggccguuuuguaggcugggg

SEQ ID NO: 36175 - RNA, 32 nt, Homo Sapiens
ucauguuugggguuuaucuacugaguaaggcu

SEQ ID NO: 36176 - RNA, 32 nt, Homo Sapiens
uuucucuccuccccgucagucugucuuuacuc

SEQ ID NO: 36177 - RNA, 32 nt, Homo Sapiens
acaacucuaaucuuguagcccuucauuaaucu

SEQ ID NO: 36178 - RNA, 32 nt, Homo Sapiens
cauuuuucuuugauaucuauaucagaaaggua

SEQ ID NO: 36179 - RNA, 32 nt, Homo Sapiens
gucaccaggauggcagagagccagggcagaga

SEQ ID NO: 36180 - RNA, 32 nt, Homo Sapiens
gacagaaggggagcgaggcaagauggaguuag

SEQ ID NO: 36181 - RNA, 32 nt, Homo Sapiens
aagucuggaucccuuuaagauacgaaauguau

SEQ ID NO: 36182 - RNA, 32 nt, Homo Sapiens
cacuaacaguuguaggagauccaugagcaugc

SEQ ID NO: 36183 - RNA, 32 nt, Homo Sapiens
ucugggcucucugaccccugcgcuagacugug

SEQ ID NO: 36184 - RNA, 32 nt, Homo Sapiens
gccugcuccuuccccucucagccgucucagga

SEQ ID NO: 36185 - RNA, 32 nt, Homo Sapiens
ugcugcugcuguuggugcugguuccgggacca

SEQ ID NO: 36186 - RNA, 32 nt, Homo Sapiens
cgccgccgccgccgcugccaccgccucugauc

SEQ ID NO: 36187 - RNA, 32 nt, Homo Sapiens
ugcuuauaaucaugcauauaaccuuuacuuug

SEQ ID NO: 36188 - RNA, 32 nt, Homo Sapiens
uauaccuuugugcacaguugaaugggaacugu

SEQ ID NO: 36189 - RNA, 32 nt, Homo Sapiens
gcacaaucucaacucacuacagccucgaacuc

SEQ ID NO: 36190 - RNA, 32 nt, Homo Sapiens
ucuguaggugccccggggcacaggcaagcgga

SEQ ID NO: 36191 - RNA, 32 nt, Homo Sapiens
cugagcugaguauguuucaauaaaccuuuuga

SEQ ID NO: 36192 - RNA, 32 nt, Homo Sapiens
caugccacaggccuggcuggaacuuacacuuc

SEQ ID NO: 36193 - RNA, 32 nt, Homo Sapiens
cuggagcaccugccccaccugcccacagagaa

SEQ ID NO: 36194 - RNA, 32 nt, Homo Sapiens
uuuggucuguuccuguaacuuauuuuccaacu

SEQ ID NO: 36195 - RNA, 32 nt, Homo Sapiens
cucuggugaugaagaggcgaggaaucaaguga

SEQ ID NO: 36196 - RNA, 32 nt, Homo Sapiens
uucauuuuuguuccuuuuuuuucuuuuucucu

SEQ ID NO: 36197 - RNA, 31 nt, Homo Sapiens
aguguggagccaacucucagccuuucccacc

SEQ ID NO: 36198 - RNA, 32 nt, Homo Sapiens
uuguaagagcaaaagaacguuuuuguacaauu

SEQ ID NO: 36199 - RNA, 32 nt, Homo Sapiens
aaaaauaaauguuuuaauuuacuuagagcugu

SEQ ID NO: 36200 - RNA, 32 nt, Homo Sapiens
gaaacaugcaacaaaagcacuuugaaaaauau

SEQ ID NO: 36201 - RNA, 31 nt, Homo Sapiens
ugggagcagcgcagccuccggaggaggaggc

SEQ ID NO: 36202 - RNA, 32 nt, Homo Sapiens
ugaagauauaucuaucuguauggauauauauc

SEQ ID NO: 36203 - RNA, 32 nt, Homo Sapiens
aggccuggccuggccggggcuucccuucgcuc

SEQ ID NO: 36204 - RNA, 32 nt, Homo Sapiens
gccuguaaucccaacccuuuggaagguaaaga

SEQ ID NO: 36205 - RNA, 32 nt, Homo Sapiens
caagccaaggcacaaugucccugccccccaua

SEQ ID NO: 36206 - RNA, 32 nt, Homo Sapiens
ugguuucauaguccaaggcggagauccuacug

SEQ ID NO: 36207 - RNA, 32 nt, Homo Sapiens
agaaauggacagaugugcuuugaaaggccuac

SEQ ID NO: 36208 - RNA, 32 nt, Homo Sapiens
gcccggcucagccugcccgcuggugggagccc

SEQ ID NO: 36209 - RNA, 32 nt, Homo Sapiens
ugauggcucauuuccacccagccccaggauuu

SEQ ID NO: 36210 - RNA, 32 nt, Homo Sapiens
gaauagagggcuuggacacagccccggaugug

SEQ ID NO: 36211 - RNA, 32 nt, Homo Sapiens
cccugaggagugggcuccugcuccaugaggga

SEQ ID NO: 36212 - RNA, 32 nt, Homo Sapiens
gagugggaaucaucaggcgucucaugaagugg

SEQ ID NO: 36213 - RNA, 32 nt, Homo Sapiens
guuuaaaauuuauuaauuuguaccuuaagcau

SEQ ID NO: 36214 - RNA, 32 nt, Homo Sapiens
aggcccagggguggagguuagggguggagcuu

SEQ ID NO: 36215 - RNA, 32 nt, Homo Sapiens
uuucaagaugacaagaacagagcauuaaacca

SEQ ID NO: 36216 - RNA, 32 nt, Homo Sapiens
gguggggcagagagggugguggacaccaggcu

SEQ ID NO: 36217 - RNA, 32 nt, Homo Sapiens
gccccugagcgaauucuuggcgucugcgcugg

SEQ ID NO: 36218 - RNA, 32 nt, Homo Sapiens
ggaagacccaccccacggcggggacagaugcg

SEQ ID NO: 36219 - RNA, 32 nt, Homo Sapiens
uccuguggucaaaacuggaacccauuaaggug

SEQ ID NO: 36220 - RNA, 32 nt, Homo Sapiens
acaucugcuguaauuuugguugcuuuugcccu

SEQ ID NO: 36221 - RNA, 32 nt, Homo Sapiens
gcagcgaguauuuugguauuugaccuguccaa

SEQ ID NO: 36222 - RNA, 32 nt, Homo Sapiens
uuccuucauauugaagcugcugauuucucagc

SEQ ID NO: 36223 - RNA, 32 nt, Homo Sapiens
gugucaugaauaaaguuguuuuugaaaauaaa

SEQ ID NO: 36224 - RNA, 32 nt, Homo Sapiens
aguacgguucccuccugucucccucuucuuuu

SEQ ID NO: 36225 - RNA, 32 nt, Homo Sapiens
cgccuguaaucccagcacuuugggacgccgaa

SEQ ID NO: 36226 - RNA, 30 nt, Homo Sapiens
caugagcgcgcgcccgggccagugaacugc

SEQ ID NO: 36227 - RNA, 32 nt, Homo Sapiens
caggagaugguccaugagagaggcagaaggau

SEQ ID NO: 36228 - RNA, 32 nt, Homo Sapiens
acuaggcgcgcccagccgcacguggcggaccc

SEQ ID NO: 36229 - RNA, 32 nt, Homo Sapiens
gguguucugccgggagcuggggugcggcccug

SEQ ID NO: 36230 - RNA, 32 nt, Homo Sapiens
gcagggaugcugcuucuguucccuccaggccu

SEQ ID NO: 36231 - RNA, 32 nt, Homo Sapiens
uguuccucuuucuccccgacuccaccccagcu

SEQ ID NO: 36232 - RNA, 32 nt, Homo Sapiens
cacagcccacuuuuaaauucuguuauccuugg

SEQ ID NO: 36233 - RNA, 32 nt, Homo Sapiens
gaacauuugaaaagacuuuuugaaaggagagu

SEQ ID NO: 36234 - RNA, 32 nt, Homo Sapiens
gacuccguuuuggcuccuggugcugacauggg

SEQ ID NO: 36235 - RNA, 30 nt, Homo Sapiens
aaaauugaugcauugggggaaacuggguaa

SEQ ID NO: 36236 - RNA, 32 nt, Homo Sapiens
cagugguuuaugccuguaaucccagcacugug

SEQ ID NO: 36237 - RNA, 32 nt, Homo Sapiens
gcguccuggcucgggagccgccgggagugcua

SEQ ID NO: 36238 - RNA, 32 nt, Homo Sapiens
ggaacagguguuggaggguaccucaguucaga

SEQ ID NO: 36239 - RNA, 32 nt, Homo Sapiens
guuaauugaaauuuauacaccaauugauuuua

SEQ ID NO: 36240 - RNA, 32 nt, Homo Sapiens
gcuugucugccagcucacaaggggaggcugca

SEQ ID NO: 36241 - RNA, 32 nt, Homo Sapiens
ggcgcaggaaggcgagcagagauauccucuga

SEQ ID NO: 36242 - RNA, 32 nt, Homo Sapiens
agcuguccgccucgucgggugauucaaguggc

SEQ ID NO: 36243 - RNA, 32 nt, Homo Sapiens
auccugggccucagugacacuccaucacccaa

SEQ ID NO: 36244 - RNA, 32 nt, Homo Sapiens
gcaggaguuggggacaggcuggggauccaagc

SEQ ID NO: 36245 - RNA, 32 nt, Homo Sapiens
augggggccucagggcagccugccuggaguac

SEQ ID NO: 36246 - RNA, 32 nt, Homo Sapiens
aacaaacaaaacaaaaacaacuuuaaaugcuu

SEQ ID NO: 36247 - RNA, 32 nt, Homo Sapiens
ccaucucccagcgggcgccgcggcgcggccac

SEQ ID NO: 36248 - RNA, 32 nt, Homo Sapiens
uuggaagacagaguaggaaggauauggaaaag

SEQ ID NO: 36249 - RNA, 32 nt, Homo Sapiens
ugugacuuaguagacugaugaugauauccauu

SEQ ID NO: 36250 - RNA, 32 nt, Homo Sapiens
gaccaguaaaacauaaaucaaaaguuaaugua

SEQ ID NO: 36251 - RNA, 32 nt, Homo Sapiens
cuaauauggcagguuauaaugauccuuaagug

SEQ ID NO: 36252 - RNA, 32 nt, Homo Sapiens
ucauuccuccccaccccccauuuguaggcagu

SEQ ID NO: 36253 - RNA, 32 nt, Homo Sapiens
guggcagggcucaggauuucgugggucuguuu

SEQ ID NO: 36254 - RNA, 32 nt, Homo Sapiens
uucaguuucuuacccauuggugucuauuaaga

SEQ ID NO: 36255 - RNA, 32 nt, Homo Sapiens
ucagcagcccggagcgaccgcggccccgccgc

SEQ ID NO: 36256 - RNA, 32 nt, Homo Sapiens
auugagucaccauugacaggcacuauucuaau

SEQ ID NO: 36257 - RNA, 32 nt, Homo Sapiens
acuguaucagucaauggggauuuuaacagacu

SEQ ID NO: 36258 - RNA, 32 nt, Homo Sapiens
cccggcugcagggcucuggauggggcgugaca

SEQ ID NO: 36259 - RNA, 32 nt, Homo Sapiens
uaugaauacuaguguauaagucuuugugggac

SEQ ID NO: 36260 - RNA, 32 nt, Homo Sapiens
guuggcccaagcccugccugacugaccacccc

SEQ ID NO: 36261 - RNA, 32 nt, Homo Sapiens
uccccaagagagaacagggugguauucuaagu

SEQ ID NO: 36262 - RNA, 31 nt, Homo Sapiens
aaagcccucaaugaagggauuaaccgaggca

SEQ ID NO: 36263 - RNA, 32 nt, Homo Sapiens
cuccucagccucagccuucgagaaaacuccau

SEQ ID NO: 36264 - RNA, 32 nt, Homo Sapiens
uaugguuuagggauuaauggaaccaaauccau

SEQ ID NO: 36265 - RNA, 32 nt, Homo Sapiens
auuucaagacugccuuuaugcuggaucaugug

SEQ ID NO: 36266 - RNA, 32 nt, Homo Sapiens
cggggaccgggcgaccccgcagcggggagcgc

SEQ ID NO: 36267 - RNA, 32 nt, Homo Sapiens
aaaccuuuuguuucuuuuucuacauagcagaa

SEQ ID NO: 36268 - RNA, 32 nt, Homo Sapiens
uauaguaaugaaaauuaagaaacuacuacuau

SEQ ID NO: 36269 - RNA, 32 nt, Homo Sapiens
gggggauucuccccggacuccggccagcgcca

SEQ ID NO: 36270 - RNA, 32 nt, Homo Sapiens
uuauuuucagguccuuugcuuaccaaaggagg

SEQ ID NO: 36271 - RNA, 32 nt, Homo Sapiens
cucgggccugacggguccggcuugucauggaa

SEQ ID NO: 36272 - RNA, 32 nt, Homo Sapiens
accuaaugaaaaagucagcaguggauugcuug

SEQ ID NO: 36273 - RNA, 32 nt, Homo Sapiens
gaggcucaggugggcaucauggucccaccaau

SEQ ID NO: 36274 - RNA, 32 nt, Homo Sapiens
gacaaauagaaaggcagagaaggaacuaagua

SEQ ID NO: 36275 - RNA, 32 nt, Homo Sapiens
augcuuguccuguggugacaguuugugacauu

SEQ ID NO: 36276 - RNA, 32 nt, Homo Sapiens
cuaagaaugccugccucaggcuugagccaagu

SEQ ID NO: 36277 - RNA, 32 nt, Homo Sapiens
cuuguaagugacuggcugggugcaguagcuca

SEQ ID NO: 36278 - RNA, 32 nt, Homo Sapiens
auauaugguuuuaauguaauaaacuuuaauga

SEQ ID NO: 36279 - RNA, 32 nt, Homo Sapiens
cucccccaccgccguccccuucccaaaucucg

SEQ ID NO: 36280 - RNA, 32 nt, Homo Sapiens
ucgcggcgcugacgcccgcgggccccagcugc

SEQ ID NO: 36281 - RNA, 32 nt, Homo Sapiens
aagugacggucauuuucuccuucuuucucccu

SEQ ID NO: 36282 - RNA, 31 nt, Homo Sapiens
accuaucauuugaauuagccgagucaggcag

SEQ ID NO: 36283 - RNA, 32 nt, Homo Sapiens
auguguaccuaagggaguagugucacugcuug

SEQ ID NO: 36284 - RNA, 32 nt, Homo Sapiens
cccacaguuugauguauuaaagaaaugacuua

SEQ ID NO: 36285 - RNA, 32 nt, Homo Sapiens
cuuucucccgcccgaacggucgccgcggccaa

SEQ ID NO: 36286 - RNA, 32 nt, Homo Sapiens
ugucaucaauugcuuuacuaagauuuuuaaau

SEQ ID NO: 36287 - RNA, 32 nt, Homo Sapiens
ggguccuggugcccagcacccaggcuaaaaua

SEQ ID NO: 36288 - RNA, 32 nt, Homo Sapiens
gaaaacugcuccauaauuuuuaucaagacuua

SEQ ID NO: 36289 - RNA, 28 nt, Homo Sapiens
ccaaaggaugagaacauuaugggauuau

SEQ ID NO: 36290 - RNA, 32 nt, Homo Sapiens
cucccuggaucucugagccagcagccaggagg

SEQ ID NO: 36291 - RNA, 32 nt, Homo Sapiens
ccuugggccucgcgccggcuauggccgugccc

SEQ ID NO: 36292 - RNA, 32 nt, Homo Sapiens
guacagaaucaaucugcauuuauuuauuauca

SEQ ID NO: 36293 - RNA, 32 nt, Homo Sapiens
ccccaucaaagaguagucugcuauaucaauuu

SEQ ID NO: 36294 - RNA, 32 nt, Homo Sapiens
ccuucgaaacccccuggcaacccaggcccgga

SEQ ID NO: 36295 - RNA, 32 nt, Homo Sapiens
cagcugccugcuguccuccccugcacugaccc

SEQ ID NO: 36296 - RNA, 32 nt, Homo Sapiens
uuaaggaguugggggccugggguucugguuag

SEQ ID NO: 36297 - RNA, 32 nt, Homo Sapiens
uuaauacuuuugacuagaaaugucuaaggaua

SEQ ID NO: 36298 - RNA, 32 nt, Homo Sapiens
uuucugaguguuguccuggggcucuuuggaac

SEQ ID NO: 36299 - RNA, 32 nt, Homo Sapiens
gagaaauauggacacuuaauacuaccuugaaa

SEQ ID NO: 36300 - RNA, 32 nt, Homo Sapiens
cccaaaaauauguaugugugggcuugcuuaga

SEQ ID NO: 36301 - RNA, 32 nt, Homo Sapiens
ugcccucccucuucugccuccccuccucagaa

SEQ ID NO: 36302 - RNA, 32 nt, Homo Sapiens
gugcuauuuuauacaagaacacuucaggugua

SEQ ID NO: 36303 - RNA, 32 nt, Homo Sapiens
gggaagcagauaagcauagaacugauacuuga

SEQ ID NO: 36304 - RNA, 32 nt, Homo Sapiens
uaucuguugcuguuaccucuugaaauaugauu

SEQ ID NO: 36305 - RNA, 32 nt, Homo Sapiens
aagcacuuggggaguggcagggaccacauauu

SEQ ID NO: 36306 - RNA, 32 nt, Homo Sapiens
cagaauuauauuuuaaugacuccauaaauaca

SEQ ID NO: 36307 - RNA, 32 nt, Homo Sapiens
uaucuaauaaguauuucauauuauuuccacau

SEQ ID NO: 36308 - RNA, 32 nt, Homo Sapiens
ggcaaauugcuuaaugucucuaaaacgcagug

SEQ ID NO: 36309 - RNA, 32 nt, Homo Sapiens
gaaagucugggguugacgggagcucaucuaac

SEQ ID NO: 36310 - RNA, 32 nt, Homo Sapiens
cugaugaggccaggccgacuggaccggcacgu

SEQ ID NO: 36311 - RNA, 32 nt, Homo Sapiens
cauugucgucuucggagcacugcucagaccca

SEQ ID NO: 36312 - RNA, 32 nt, Homo Sapiens
agugccugaagguaggaaugggccggcgauug

SEQ ID NO: 36313 - RNA, 32 nt, Homo Sapiens
ccaggggcgucccgcgccaccucugacucgga

SEQ ID NO: 36314 - RNA, 32 nt, Homo Sapiens
augcuuagcacuuuugagugcuagaccaacua

SEQ ID NO: 36315 - RNA, 32 nt, Homo Sapiens
aaagugcaccucgcccccgcaagccccagccc

SEQ ID NO: 36316 - RNA, 32 nt, Homo Sapiens
uuggagggccgcggcaccccguccgaggcgaa

SEQ ID NO: 36317 - RNA, 32 nt, Homo Sapiens
auuuccuaucuuccuccagcuuccagcuaggc

SEQ ID NO: 36318 - RNA, 32 nt, Homo Sapiens
ugguagaauucaacugugacuccaucuggucc

SEQ ID NO: 36319 - RNA, 32 nt, Homo Sapiens
acacgggcucugcugacggcuuucacgcacgc

SEQ ID NO: 36320 - RNA, 32 nt, Homo Sapiens
gcagagacaggucaccugggugucacacggca

SEQ ID NO: 36321 - RNA, 32 nt, Homo Sapiens
ugagagucauacucgugagaaaugagucacuu

SEQ ID NO: 36322 - RNA, 27 nt, Homo Sapiens
gaaauguccuucucuggcgucugcuug

SEQ ID NO: 36323 - RNA, 31 nt, Homo Sapiens
cccuuugugguucgaaggauauggacuauug

SEQ ID NO: 36324 - RNA, 32 nt, Homo Sapiens
ugcaucugucugaccucaaagcccugcuucua

SEQ ID NO: 36325 - RNA, 32 nt, Homo Sapiens
gcugggguccacucugacccuagacuugccua

SEQ ID NO: 36326 - RNA, 32 nt, Homo Sapiens
uguguaaguuaauauuugauacuugacaauuu

SEQ ID NO: 36327 - RNA, 32 nt, Homo Sapiens
auguguuuguuguuuccugacuuuaagcaaug

SEQ ID NO: 36328 - RNA, 32 nt, Homo Sapiens
ccacacccaagcacauggagguagguggcugc

SEQ ID NO: 36329 - RNA, 32 nt, Homo Sapiens
uggcccagcccccagcccccagccccgcacug

SEQ ID NO: 36330 - RNA, 32 nt, Homo Sapiens
gugcgcugccuggccaggcccugggucuugcc

SEQ ID NO: 36331 - RNA, 32 nt, Homo Sapiens
gcaguacauguccuuccacaagcugccggccg

SEQ ID NO: 36332 - RNA, 32 nt, Homo Sapiens
aaaaacaacaaauucaguucugaguauaugca

SEQ ID NO: 36333 - RNA, 32 nt, Homo Sapiens
guuauugcugucucaacauuuacuacagcucc

SEQ ID NO: 36334 - RNA, 32 nt, Homo Sapiens
gccucaugagcagcagguggccaggcacuaug

SEQ ID NO: 36335 - RNA, 32 nt, Homo Sapiens
ccuaccuuuuuucacuuuuccuccuccaaaga

SEQ ID NO: 36336 - RNA, 32 nt, Homo Sapiens
ccuacuacugguuuuggguugguuguucuguc

SEQ ID NO: 36337 - RNA, 31 nt, Homo Sapiens
uaagggcucuagaaaaaacgaguuauucaca

SEQ ID NO: 36338 - RNA, 32 nt, Homo Sapiens
cccauguaaaaagcggaaaauaaaaugaagau

SEQ ID NO: 36339 - RNA, 32 nt, Homo Sapiens
auaacucaaggauuugauaauacagugaagua

SEQ ID NO: 36340 - RNA, 32 nt, Homo Sapiens
ucaaaaacauaauacuuuuaugcugaugaugg

SEQ ID NO: 36341 - RNA, 32 nt, Homo Sapiens
cucagaaggacagcaagaagaacugggccugu

SEQ ID NO: 36342 - RNA, 32 nt, Homo Sapiens
acaaaaacccauauuucugaaauaaugcugau

SEQ ID NO: 36343 - RNA, 32 nt, Homo Sapiens
gcauuaucuguaguuguaaaacauuauuaaua

SEQ ID NO: 36344 - RNA, 32 nt, Homo Sapiens
cauucuuuccaagucagauagucuucugcugc

SEQ ID NO: 36345 - RNA, 32 nt, Homo Sapiens
agaauggguuccacuuucauuaacucaguuuu

SEQ ID NO: 36346 - RNA, 32 nt, Homo Sapiens
uaccucccugcuuuccucuuuucgaugugcgu

SEQ ID NO: 36347 - RNA, 32 nt, Homo Sapiens
ucauaucccaaacucacucaugaguuuccaca

SEQ ID NO: 36348 - RNA, 28 nt, Homo Sapiens
ccaagauggcggccgccgagggaccggu

SEQ ID NO: 36349 - RNA, 32 nt, Homo Sapiens
ugaaaaauuacauagaugucauuauauuuauc

SEQ ID NO: 36350 - RNA, 32 nt, Homo Sapiens
auuuuuaauguuuauuauuuacaucacuuugu

SEQ ID NO: 36351 - RNA, 32 nt, Homo Sapiens
cauuucuccaugcuuuuuguuuggggaggggg

SEQ ID NO: 36352 - RNA, 32 nt, Homo Sapiens
acugcccauuuccuguccuccucccggcuuca

SEQ ID NO: 36353 - RNA, 32 nt, Homo Sapiens
gaggugguagccuccagccacccaggaagguc

SEQ ID NO: 36354 - RNA, 31 nt, Homo Sapiens
auuaggaugcaccucucggcgguguucaacg

SEQ ID NO: 36355 - RNA, 32 nt, Homo Sapiens
uguuagucacucaaccucuuuggccuugugcu

SEQ ID NO: 36356 - RNA, 32 nt, Homo Sapiens
gaaggugguagcccagcuccuguuccugugcc

SEQ ID NO: 36357 - RNA, 32 nt, Homo Sapiens
gcgccuggucaccagggcugcuuuuaacucug

SEQ ID NO: 36358 - RNA, 32 nt, Homo Sapiens
aauaauaaaaauuauauagacguauaaaauuu

SEQ ID NO: 36359 - RNA, 32 nt, Homo Sapiens
cacccuguccuccaagcuucuauaauaaacca

SEQ ID NO: 36360 - RNA, 32 nt, Homo Sapiens
cugucuaaacacagcugggcaggcacuccugu

SEQ ID NO: 36361 - RNA, 32 nt, Homo Sapiens
gcucaggcugggaggguagaaugccauuccag

SEQ ID NO: 36362 - RNA, 29 nt, Homo Sapiens
aaagaauagauguuauauuucuaaagaau

SEQ ID NO: 36363 - RNA, 32 nt, Homo Sapiens
uguccagguggccccugaauucugcgcaaggg

SEQ ID NO: 36364 - RNA, 32 nt, Homo Sapiens
ucugugcugugaguccugcccagcggccuucc

SEQ ID NO: 36365 - RNA, 31 nt, Homo Sapiens
ugaggcuaggagguuuuuucugaccaauagc

SEQ ID NO: 36366 - RNA, 32 nt, Homo Sapiens
uaaguuuccugaggccuccccagccaugugaa

SEQ ID NO: 36367 - RNA, 32 nt, Homo Sapiens
cuuccugaccucugaggcaggagaggaauaaa

SEQ ID NO: 36368 - RNA, 32 nt, Homo Sapiens
gcaguguuccucgucacccauuucccccucag

SEQ ID NO: 36369 - RNA, 32 nt, Homo Sapiens
gugguagggggaggacagaugcuaaaggugga

SEQ ID NO: 36370 - RNA, 32 nt, Homo Sapiens
uacuguguguugcauuuuugugcccaaauaca

SEQ ID NO: 36371 - RNA, 32 nt, Homo Sapiens
guaaaguucgaaagagugaauauuuugccaug

SEQ ID NO: 36372 - RNA, 32 nt, Homo Sapiens
accauguagacauaggccaggcugguagcuuc

SEQ ID NO: 36373 - RNA, 32 nt, Homo Sapiens
ggagagcccucccugguccccauaggcacagu

SEQ ID NO: 36374 - RNA, 32 nt, Homo Sapiens
gcuagacgaccucggcgccaccaccucgcccu

SEQ ID NO: 36375 - RNA, 29 nt, Homo Sapiens
acucaacaugagauucggaggggacagau

SEQ ID NO: 36376 - RNA, 32 nt, Homo Sapiens
uuguuauuuugauguagauacguuagcagaug

SEQ ID NO: 36377 - RNA, 32 nt, Homo Sapiens
uagaggaggaaauuauuuuuuugguagaaauu

SEQ ID NO: 36378 - RNA, 30 nt, Homo Sapiens
cugugacgcuggcagaggggucccgggggg

SEQ ID NO: 36379 - RNA, 32 nt, Homo Sapiens
uuaauuuucauuuaacaauggauuagaaaaau

SEQ ID NO: 36380 - RNA, 32 nt, Homo Sapiens
ucaagaagaauaacccacagaaauaucugcgc

SEQ ID NO: 36381 - RNA, 32 nt, Homo Sapiens
ugcccggacgcuagccggccuggccauggcug

SEQ ID NO: 36382 - RNA, 32 nt, Homo Sapiens
agggguguguagauggagaaaauguaccucaa

SEQ ID NO: 36383 - RNA, 32 nt, Homo Sapiens
auugaguaugcuagcuaaaaaauaucaagugc

SEQ ID NO: 36384 - RNA, 32 nt, Homo Sapiens
agcuauuuaaguggacuguauuucggcuaugu

SEQ ID NO: 36385 - RNA, 32 nt, Homo Sapiens
ugccagcugacaucuugaauccuuccauucca

SEQ ID NO: 36386 - RNA, 32 nt, Homo Sapiens
cccuggggccccagucuggcucagucuggucc

SEQ ID NO: 36387 - RNA, 32 nt, Homo Sapiens
cccugcgcggagcugcaccgcugcugccagac

SEQ ID NO: 36388 - RNA, 32 nt, Homo Sapiens
cuggccccgcggcgccuaccgcccuggccgug

SEQ ID NO: 36389 - RNA, 32 nt, Homo Sapiens
cuucagcgaggguggggaguugcccaguagcc

SEQ ID NO: 36390 - RNA, 32 nt, Homo Sapiens
uccguuugcauuccuuggugcucucugagugc

SEQ ID NO: 36391 - RNA, 32 nt, Homo Sapiens
guuaaccucaugucucucuggucccaguggac

SEQ ID NO: 36392 - RNA, 32 nt, Homo Sapiens
gccgccuccugacaagcgggagggauccgccg

SEQ ID NO: 36393 - RNA, 32 nt, Homo Sapiens
uaagaugaucuagcucccgguagaggaucacc

SEQ ID NO: 36394 - RNA, 32 nt, Homo Sapiens
ccuuccaguucgucuguaauucccuggcgcag

SEQ ID NO: 36395 - RNA, 32 nt, Homo Sapiens
gccucuugcagcuuugccauugaucacuuccg

SEQ ID NO: 36396 - RNA, 32 nt, Homo Sapiens
cacuggaaaggcuggaggagcagaaggcagag

SEQ ID NO: 36397 - RNA, 32 nt, Homo Sapiens
ccucaagagcccaaugcauuccauuucuggaa

SEQ ID NO: 36398 - RNA, 32 nt, Homo Sapiens
uuuaggagacgugauguucacuucugauggau

SEQ ID NO: 36399 - RNA, 32 nt, Homo Sapiens
ugcaugacuccucacuccuuucuggaucucuc

SEQ ID NO: 36400 - RNA, 29 nt, Homo Sapiens
agguauguagugaugucuugugucuuuua

SEQ ID NO: 36401 - RNA, 32 nt, Homo Sapiens
uccucuucccuucccuggcccccggguguaaa

SEQ ID NO: 36402 - RNA, 32 nt, Homo Sapiens
gacaugaucuuauucuuuuuuauggcugugua

SEQ ID NO: 36403 - RNA, 32 nt, Homo Sapiens
ucugaccuccacaacuauaaaauaauaaacuu

SEQ ID NO: 36404 - RNA, 32 nt, Homo Sapiens
cucugccauguguuuuuuauuuuguuuuuuag

SEQ ID NO: 36405 - RNA, 32 nt, Homo Sapiens
ugcuacuaaucacagagaaaaaugugaagaag

SEQ ID NO: 36406 - RNA, 32 nt, Homo Sapiens
caccuauuaaggcacugguuuacugagacaau

SEQ ID NO: 36407 - RNA, 32 nt, Homo Sapiens
gaggggccaggcgggagcgcagagcacguucg

SEQ ID NO: 36408 - RNA, 32 nt, Homo Sapiens
gcgccgcugcggguccugcgaccgcuccuggc

SEQ ID NO: 36409 - RNA, 32 nt, Homo Sapiens
cacauguucuacuuacuacuuaacacaucuaa

SEQ ID NO: 36410 - RNA, 32 nt, Homo Sapiens
gaauaucacacucuucuuaugacucuuguuag

SEQ ID NO: 36411 - RNA, 32 nt, Homo Sapiens
gagauuuuaagugguauauuaaccaauaauaa

SEQ ID NO: 36412 - RNA, 32 nt, Homo Sapiens
cuagcgggcgagccggccggggcugaauggag

SEQ ID NO: 36413 - RNA, 32 nt, Homo Sapiens
caaaggguggaagagaaaggacacaguauuuu

SEQ ID NO: 36414 - RNA, 32 nt, Homo Sapiens
uccccuuccuugucuggggccuggacacacug

SEQ ID NO: 36415 - RNA, 32 nt, Homo Sapiens
gggggaggcucccgcccuccccagucccacca

SEQ ID NO: 36416 - RNA, 32 nt, Homo Sapiens
uguccucagguggccaugccucagcccugacc

SEQ ID NO: 36417 - RNA, 32 nt, Homo Sapiens
uaauggaauauuuggcauaaagggcauuuggu

SEQ ID NO: 36418 - RNA, 32 nt, Homo Sapiens
ccuguuggccccagcugcacucgcagggccuu

SEQ ID NO: 36419 - RNA, 31 nt, Homo Sapiens
ucccugugggccccaugaggaguccauuacu

SEQ ID NO: 36420 - RNA, 32 nt, Homo Sapiens
cuugugaguuuggugguggggguggagggacg

SEQ ID NO: 36421 - RNA, 32 nt, Homo Sapiens
acuauccccacuuuucagugccuccccugcuc

SEQ ID NO: 36422 - RNA, 32 nt, Homo Sapiens
accacugcaauccagccugggcgacaaagcaa

SEQ ID NO: 36423 - RNA, 32 nt, Homo Sapiens
gugaguguccugaaacaucacagggcucugau

SEQ ID NO: 36424 - RNA, 31 nt, Homo Sapiens
aaaaccucuuaauaaacuucuucugaaauau

SEQ ID NO: 36425 - RNA, 32 nt, Homo Sapiens
caugcccuucccccagccccagcgcccguucc

SEQ ID NO: 36426 - RNA, 32 nt, Homo Sapiens
uucaaaggaaauuuaucuuaagauacuguaaa

SEQ ID NO: 36427 - RNA, 32 nt, Homo Sapiens
aauuauucauucucccuuuauugauucaucga

SEQ ID NO: 36428 - RNA, 32 nt, Homo Sapiens
aaaaugucuuccuugcagaaggcuguccauug

SEQ ID NO: 36429 - RNA, 32 nt, Homo Sapiens
ggacuagaugaacaguauauggucaucccuug

SEQ ID NO: 36430 - RNA, 32 nt, Homo Sapiens
ccaccggugcagggcaugccccggggccgugg

SEQ ID NO: 36431 - RNA, 32 nt, Homo Sapiens
uacugcagaaaauuggugguauuuucacauuc

SEQ ID NO: 36432 - RNA, 32 nt, Homo Sapiens
uuuaucgcaaagauguuuuguauuuuagccaa

SEQ ID NO: 36433 - RNA, 32 nt, Homo Sapiens
aguuggaaugauggaccuguguucagagacuu

SEQ ID NO: 36434 - RNA, 32 nt, Homo Sapiens
augcccccugcccgcuccccacuuccuagaaa

SEQ ID NO: 36435 - RNA, 32 nt, Homo Sapiens
aucaagguauuugguagagguggaaucuaagu

SEQ ID NO: 36436 - RNA, 32 nt, Homo Sapiens
aaauacagaaaaguuagccaggcgugguggca

SEQ ID NO: 36437 - RNA, 32 nt, Homo Sapiens
gaaauggauuuucaaauggaucuuauauagga

SEQ ID NO: 36438 - RNA, 32 nt, Homo Sapiens
cagcuucucaggugugaccuacugugcuuggc

SEQ ID NO: 36439 - RNA, 30 nt, Homo Sapiens
agcaagcccuuggugggggaaaguauggcu

SEQ ID NO: 36440 - RNA, 32 nt, Homo Sapiens
gaagucauuucuaccaucgucugcuacccuua

SEQ ID NO: 36441 - RNA, 32 nt, Homo Sapiens
caguucccagcgcuccucacggaucccucucu

SEQ ID NO: 36442 - RNA, 32 nt, Homo Sapiens
cuggggccccaagcugugcccuggacaucucu

SEQ ID NO: 36443 - RNA, 32 nt, Homo Sapiens
gagugagauucugucuccaaauaaaaaauaaa

SEQ ID NO: 36444 - RNA, 32 nt, Homo Sapiens
aauuucuauaaauuuaagaaaacaaguauaua

SEQ ID NO: 36445 - RNA, 32 nt, Homo Sapiens
uggcacgcaccuguagucccaacuacucggga

SEQ ID NO: 36446 - RNA, 32 nt, Homo Sapiens
gagugcugugcacggaagaaacaaagacaucc

SEQ ID NO: 36447 - RNA, 32 nt, Homo Sapiens
ugcagaagaaugccuuucccucauuuuauaac

SEQ ID NO: 36448 - RNA, 32 nt, Homo Sapiens
cagcagagaagcucucccuucagccugagcug

SEQ ID NO: 36449 - RNA, 32 nt, Homo Sapiens
caguaaacgcaggauggaauuuuccugggacu

SEQ ID NO: 36450 - RNA, 32 nt, Homo Sapiens
ucucugucucgugcugggcggcgcccucggag

SEQ ID NO: 36451 - RNA, 32 nt, Homo Sapiens
agccgggagagccauggcgggggccgcagcgg

SEQ ID NO: 36452 - RNA, 32 nt, Homo Sapiens
auucauuccuuccuucuccaauaguguuuaag

SEQ ID NO: 36453 - RNA, 32 nt, Homo Sapiens
gcacgguuccacuuacuguaauuguuucuggu

SEQ ID NO: 36454 - RNA, 32 nt, Homo Sapiens
auuuauuauguuuagugugguuugaaauuacc

SEQ ID NO: 36455 - RNA, 32 nt, Homo Sapiens
gcgguggugagcagcagcgucuggugaccugc

SEQ ID NO: 36456 - RNA, 30 nt, Homo Sapiens
auauaugucugugcucccuaaaaguuguac

SEQ ID NO: 36457 - RNA, 32 nt, Homo Sapiens
ggagguaugucugcagaggcccgggccugggc

SEQ ID NO: 36458 - RNA, 32 nt, Homo Sapiens
cacuaaaauuuaugugguuuacuuuaagcgau

SEQ ID NO: 36459 - RNA, 32 nt, Homo Sapiens
gaagccaggaacagcagaacugcccacaaaac

SEQ ID NO: 36460 - RNA, 32 nt, Homo Sapiens
agagccagcaagaugcugcguccuugaagaag

SEQ ID NO: 36461 - RNA, 32 nt, Homo Sapiens
ggacgccccuccccccucuggcccagccuacc

SEQ ID NO: 36462 - RNA, 32 nt, Homo Sapiens
gcucauugaaaguuuagaagcuaagaagacug

SEQ ID NO: 36463 - RNA, 32 nt, Homo Sapiens
ucuaaucaaugaucuagucagaagcuacuuca

SEQ ID NO: 36464 - RNA, 32 nt, Homo Sapiens
cugaagaaguuaauucuuaaaacuauaacauu

SEQ ID NO: 36465 - RNA, 32 nt, Homo Sapiens
ggcauauguuuuguagacuguuuaaugacugg

SEQ ID NO: 36466 - RNA, 32 nt, Homo Sapiens
auuagccaggcauggcggcuggcaccuauaau

SEQ ID NO: 36467 - RNA, 32 nt, Homo Sapiens
gagaauauauacuggagagaaacuauaaagaa

SEQ ID NO: 36468 - RNA, 32 nt, Homo Sapiens
gaagagccgggcgagcagagcugcgcugcggg

SEQ ID NO: 36469 - RNA, 32 nt, Homo Sapiens
augcccaggaccagcugccuccuuggucugaa

SEQ ID NO: 36470 - RNA, 32 nt, Homo Sapiens
auaaaaauaaugcuguaauuucaacuucacaa

SEQ ID NO: 36471 - RNA, 32 nt, Homo Sapiens
uuugauugcuguauauggauacauggcuguuc

SEQ ID NO: 36472 - RNA, 32 nt, Homo Sapiens
gcggcgccgauccccgcgggacgcgcugcgcu

SEQ ID NO: 36473 - RNA, 32 nt, Homo Sapiens
cugggugaggccuggggguuuccgaaaaugga

SEQ ID NO: 36474 - RNA, 32 nt, Homo Sapiens
acugaaacugaauuuuuguaacaagaauguua

SEQ ID NO: 36475 - RNA, 32 nt, Homo Sapiens
cagccccucacagcuuauaaugcaaacccagc

SEQ ID NO: 36476 - RNA, 32 nt, Homo Sapiens
acuucuuuaaacaauuuuacggcaugaagaaa

SEQ ID NO: 36477 - RNA, 32 nt, Homo Sapiens
cagguagacaaaacaguucaaagcauaagguc

SEQ ID NO: 36478 - RNA, 32 nt, Homo Sapiens
aguaucugcuauuauaggaaacaucagggcgu

SEQ ID NO: 36479 - RNA, 32 nt, Homo Sapiens
aggggaccugaauuggugagauggaaucuuag

SEQ ID NO: 36480 - RNA, 32 nt, Homo Sapiens
ucuuccagcccuuuccucugcccccacccagc

SEQ ID NO: 36481 - RNA, 32 nt, Homo Sapiens
ggagccuuggagaugccuggacuaguuggagg

SEQ ID NO: 36482 - RNA, 32 nt, Homo Sapiens
uuuuaaaacuuguauuucugcacuguaaaaaa

SEQ ID NO: 36483 - RNA, 32 nt, Homo Sapiens
cucaucuucacguuuucugcaucuauugaagu

SEQ ID NO: 36484 - RNA, 32 nt, Homo Sapiens
aagcuccucacagacaggaaccauguuuuguc

SEQ ID NO: 36485 - RNA, 32 nt, Homo Sapiens
ugcaccgccucuccccgccccccagggugcgc

SEQ ID NO: 36486 - RNA, 32 nt, Homo Sapiens
acccugucgcggggcgcgccgccaccucaccg

SEQ ID NO: 36487 - RNA, 32 nt, Homo Sapiens
gcccaaaugucuauaccaaagauaaauuucua

SEQ ID NO: 36488 - RNA, 32 nt, Homo Sapiens
acaaacccccaugacacaaguuuaccuguaua

SEQ ID NO: 36489 - RNA, 32 nt, Homo Sapiens
gcuggugcugcagagucucgugccgcugcugc

SEQ ID NO: 36490 - RNA, 32 nt, Homo Sapiens
cccugggagguuccgaaggcuuccuggaggag

SEQ ID NO: 36491 - RNA, 28 nt, Homo Sapiens
aaagugaaagauuugauuuuguuuccau

SEQ ID NO: 36492 - RNA, 32 nt, Homo Sapiens
ugagaauuucaugagcacuuuaaaaucugaac

SEQ ID NO: 36493 - RNA, 32 nt, Homo Sapiens
caaccgcgauccccaacaccauucuuccccca

SEQ ID NO: 36494 - RNA, 32 nt, Homo Sapiens
cauaauucccuccaaugaguaccuucugauaa

SEQ ID NO: 36495 - RNA, 32 nt, Homo Sapiens
gcuggagaggagagggcaaaggcgaggcgggg

SEQ ID NO: 36496 - RNA, 32 nt, Homo Sapiens
cgacgaaggcccccacuccgccggcggcgcgu

SEQ ID NO: 36497 - RNA, 32 nt, Homo Sapiens
ucuuagaggucuuuaagagaauacuuuagagc

SEQ ID NO: 36498 - RNA, 32 nt, Homo Sapiens
ccaggacuuccugugugacccuggacaaguac

SEQ ID NO: 36499 - RNA, 32 nt, Homo Sapiens
caggggcccuguagacgucgcuauuuuuggua

SEQ ID NO: 36500 - RNA, 32 nt, Homo Sapiens
guuuuugcugggauuuagauauuuucaggcac

SEQ ID NO: 36501 - RNA, 32 nt, Homo Sapiens
agauuugccaaaaacuaaaauucaacaaauga

SEQ ID NO: 36502 - RNA, 32 nt, Homo Sapiens
caagcagguguuuauauggaguagcaaaggac

SEQ ID NO: 36503 - RNA, 32 nt, Homo Sapiens
ccccagcccgcggcacuaacgacaggcgaggc

SEQ ID NO: 36504 - RNA, 32 nt, Homo Sapiens
ccaaccaauuuaacugcagugucauguuucac

SEQ ID NO: 36505 - RNA, 30 nt, Homo Sapiens
ggaaaggcucacgccccccaucuuagcccc

SEQ ID NO: 36506 - RNA, 32 nt, Homo Sapiens
ggccacagcuggaaugcuauggucugaaugua

SEQ ID NO: 36507 - RNA, 32 nt, Homo Sapiens
gcuuuuauuaauacugaugacauuauauggua

SEQ ID NO: 36508 - RNA, 32 nt, Homo Sapiens
uauacaguuucgcagauagucuagucacucua

SEQ ID NO: 36509 - RNA, 32 nt, Homo Sapiens
uagccguuguggauguaacaguucauuucuua

SEQ ID NO: 36510 - RNA, 32 nt, Homo Sapiens
aauauuuguaaaaauaaugaauggacucaucu

SEQ ID NO: 36511 - RNA, 32 nt, Homo Sapiens
ugguucugauggcugggaauaaaggaagagga

SEQ ID NO: 36512 - RNA, 32 nt, Homo Sapiens
cguuaggccggcgucccugcccggccccgcug

SEQ ID NO: 36513 - RNA, 32 nt, Homo Sapiens
acuaauuuaaacauuaggcugggugugguggc

SEQ ID NO: 36514 - RNA, 32 nt, Homo Sapiens
auagcuucguggguuucccuggcaggcuugau

SEQ ID NO: 36515 - RNA, 32 nt, Homo Sapiens
ucuuucugucuuaaugugugucucucugcuua

SEQ ID NO: 36516 - RNA, 32 nt, Homo Sapiens
gcucgccucagcugcgcugugcacaccucgcc

SEQ ID NO: 36517 - RNA, 32 nt, Homo Sapiens
ugaauuuuuauuucuuuuuaauuauuuuaaaa

SEQ ID NO: 36518 - RNA, 32 nt, Homo Sapiens
uguauuaaggauuaacuggaaaaaaugugucu

SEQ ID NO: 36519 - RNA, 32 nt, Homo Sapiens
uuuuugaguguuucauaaugcauuuuccaacu

SEQ ID NO: 36520 - RNA, 32 nt, Homo Sapiens
cugaaagagggcauaauaaauaccaaaagcug

SEQ ID NO: 36521 - RNA, 32 nt, Homo Sapiens
uguucaaggguggagggcagggaauggggccu

SEQ ID NO: 36522 - RNA, 32 nt, Homo Sapiens
aauguaagaaauuggaauaaaaaagagagacc

SEQ ID NO: 36523 - RNA, 32 nt, Homo Sapiens
cagcauguggagauccuguguguggcaucacu

SEQ ID NO: 36524 - RNA, 32 nt, Homo Sapiens
uuaugcaaaaauuuuguacaguguuaaggccu

SEQ ID NO: 36525 - RNA, 32 nt, Homo Sapiens
aacuuuuuaaaauuauuauggagaauuuuacg

SEQ ID NO: 36526 - RNA, 32 nt, Homo Sapiens
agaaguuugagggacgcgcgggccccgcgccc

SEQ ID NO: 36527 - RNA, 32 nt, Homo Sapiens
cugccacaaaaaugugaauaguucagagugaa

SEQ ID NO: 36528 - RNA, 32 nt, Homo Sapiens
cuccuggcucuuccuccugcuccccuugacuu

SEQ ID NO: 36529 - RNA, 32 nt, Homo Sapiens
ucauucuagucuuuuuuucugugcauuuuaau

SEQ ID NO: 36530 - RNA, 32 nt, Homo Sapiens
cuauguccgguguggguuuuuguccucucgag

SEQ ID NO: 36531 - RNA, 32 nt, Homo Sapiens
cccuguggucacauuuucuacccagccauucu

SEQ ID NO: 36532 - RNA, 32 nt, Homo Sapiens
cugcgcuucggucccggacccgggccacccac

SEQ ID NO: 36533 - RNA, 32 nt, Homo Sapiens
agcuaugaaaaauaauaauauaaaaccuuaug

SEQ ID NO: 36534 - RNA, 32 nt, Homo Sapiens
uuuugaugucuaauaauauuuauucuuagugu

SEQ ID NO: 36535 - RNA, 32 nt, Homo Sapiens
auguacauuuauauuucuaucaauuccuuaga

SEQ ID NO: 36536 - RNA, 32 nt, Homo Sapiens
caaagauacuucuauauuuuuaucacuauaga

SEQ ID NO: 36537 - RNA, 32 nt, Homo Sapiens
gagaccgccgcccuuguccccgagggccaugg

SEQ ID NO: 36538 - RNA, 32 nt, Homo Sapiens
guccucaggucuuuuccaucuucaguuucuau

SEQ ID NO: 36539 - RNA, 32 nt, Homo Sapiens
gacucggcgcgguggcucacgccuguaaucac

SEQ ID NO: 36540 - RNA, 32 nt, Homo Sapiens
gccccggacucuccggccccucagccaugcca

SEQ ID NO: 36541 - RNA, 32 nt, Homo Sapiens
ugcgccugcaggcagagcuggagcccccagca

SEQ ID NO: 36542 - RNA, 32 nt, Homo Sapiens
uuaaaaaacauaauucaguuuucaaagaauuu

SEQ ID NO: 36543 - RNA, 32 nt, Homo Sapiens
uguuucaguuuuuucuuuucuuccaaugguac

SEQ ID NO: 36544 - RNA, 32 nt, Homo Sapiens
aaucuaucaauauaugcauacaugaauauauc

SEQ ID NO: 36545 - RNA, 32 nt, Homo Sapiens
aaccuacacacacacacacacacacacacaca

SEQ ID NO: 36546 - RNA, 32 nt, Homo Sapiens
cggugcggguggcaaaagcagccuucggggca

SEQ ID NO: 36547 - RNA, 32 nt, Homo Sapiens
aaaaggccucugaggaggaaagccuccuaauu

SEQ ID NO: 36548 - RNA, 32 nt, Homo Sapiens
aaaugaggauggaaaaguuucaugucauaagu

SEQ ID NO: 36549 - RNA, 32 nt, Homo Sapiens
ugugcgcugugugugagcccaguguccgcuuu

SEQ ID NO: 36550 - RNA, 32 nt, Homo Sapiens
ugcuaggggguaaggauuuuuauucuugggcu

SEQ ID NO: 36551 - RNA, 32 nt, Homo Sapiens
uacaagcccuggauuugcuacagagugagaag

SEQ ID NO: 36552 - RNA, 32 nt, Homo Sapiens
uuuuagcuauuuugucauuauagggugguuuu

SEQ ID NO: 36553 - RNA, 32 nt, Homo Sapiens
cgucacucggacccgggcucggcgccggggug

SEQ ID NO: 36554 - RNA, 32 nt, Homo Sapiens
cuuguguaucuugauuuuuucuuauaugcugu

SEQ ID NO: 36555 - RNA, 32 nt, Homo Sapiens
ccugccagccgggaaggaggcgugguuaugga

SEQ ID NO: 36556 - RNA, 32 nt, Homo Sapiens
uaaauguacuaaaaaucuuuuaacuuuaaguu

SEQ ID NO: 36557 - RNA, 32 nt, Homo Sapiens
cucacccccacucccacacacacacacacaca

SEQ ID NO: 36558 - RNA, 32 nt, Homo Sapiens
ccagcaugcacggggcgccggggccguccgcc

SEQ ID NO: 36559 - RNA, 32 nt, Homo Sapiens
uaacuuuaagaagagagguaaauacuaaaucc

SEQ ID NO: 36560 - RNA, 32 nt, Homo Sapiens
gacgcggccgccgagcguagguuccggccuuu

SEQ ID NO: 36561 - RNA, 32 nt, Homo Sapiens
cuccuggccccggcgcaggcugcccguacugc

SEQ ID NO: 36562 - RNA, 32 nt, Homo Sapiens
aggaagcauaucaauuccaauauuuuauaacc

SEQ ID NO: 36563 - RNA, 32 nt, Homo Sapiens
aaaacauuuagaauagcucguguuauggaaaa

SEQ ID NO: 36564 - RNA, 32 nt, Homo Sapiens
agacccugccccaccucacuucccucccuucc

SEQ ID NO: 36565 - RNA, 32 nt, Homo Sapiens
guaauucauaaauuauuugaaaagaaacuuuu

SEQ ID NO: 36566 - RNA, 32 nt, Homo Sapiens
cgcccgcaacagagccccaaccgggccuuugc

SEQ ID NO: 36567 - RNA, 32 nt, Homo Sapiens
gccuagguuccgaaggcgccauccccggaccu

SEQ ID NO: 36568 - RNA, 32 nt, Homo Sapiens
gagauaggguuggaauauaguacucuagauga

SEQ ID NO: 36569 - RNA, 32 nt, Homo Sapiens
guggugcaggugggaauagugauucagauaac

SEQ ID NO: 36570 - RNA, 32 nt, Homo Sapiens
caacauguucuauuuaguguacugcuucacca

SEQ ID NO: 36571 - RNA, 32 nt, Homo Sapiens
agggcugaacaaauaagggacuuacugauaau

SEQ ID NO: 36572 - RNA, 32 nt, Homo Sapiens
guucuuaagggaaaagaaacagaccuugugga

SEQ ID NO: 36573 - RNA, 32 nt, Homo Sapiens
agaacaccuuggaugccuuucucuugcaaugu

SEQ ID NO: 36574 - RNA, 32 nt, Homo Sapiens
uaagcaaacuaaauauggccugagaaugacua

SEQ ID NO: 36575 - RNA, 32 nt, Homo Sapiens
cugaaccucacuuuuccuggggcccucuccuu

SEQ ID NO: 36576 - RNA, 32 nt, Homo Sapiens
uguggccuugagcuaaggaaaagggacccagg

SEQ ID NO: 36577 - RNA, 32 nt, Homo Sapiens
cccuguccuugcccuuuccccccauguuguaa

SEQ ID NO: 36578 - RNA, 32 nt, Homo Sapiens
cuucauuauuugcaaaauaccacauacaguaa

SEQ ID NO: 36579 - RNA, 32 nt, Homo Sapiens
cggauaccugcgccccauggcuggccugggcu

SEQ ID NO: 36580 - RNA, 32 nt, Homo Sapiens
cauggugccuccuggggcugcgcagggaggag

SEQ ID NO: 36581 - RNA, 32 nt, Homo Sapiens
cagacugccccgagagacaaagaagcaugcgg

SEQ ID NO: 36582 - RNA, 32 nt, Homo Sapiens
guaggaaguccucaguaagguuuuccauuuaa

SEQ ID NO: 36583 - RNA, 32 nt, Homo Sapiens
aaugaucauuugguaacauguuuaccugauua

SEQ ID NO: 36584 - RNA, 32 nt, Homo Sapiens
aauuuugcauuuuuuauaaagauggggucucu

SEQ ID NO: 36585 - RNA, 32 nt, Homo Sapiens
uagagacaucagguuuaagccaguauuuguuc

SEQ ID NO: 36586 - RNA, 32 nt, Homo Sapiens
aaaggaacugggaucgcgccgcggcgguuccu

SEQ ID NO: 36587 - RNA, 32 nt, Homo Sapiens
uccugaagaacacgcagugcuaaaacugagga

SEQ ID NO: 36588 - RNA, 32 nt, Homo Sapiens
gaaccugccguggaaacuuccaguugugcguc

SEQ ID NO: 36589 - RNA, 32 nt, Homo Sapiens
auuuacuuuuuuggguauauucuuauauauau

SEQ ID NO: 36590 - RNA, 32 nt, Homo Sapiens
uucuccuguccucguccuggccugcagcucuu

SEQ ID NO: 36591 - RNA, 32 nt, Homo Sapiens
uuauuuugagacggaguuuugcucugucgcgc

SEQ ID NO: 36592 - RNA, 32 nt, Homo Sapiens
uucagguuuugccaagaaugacacuguaaaua

SEQ ID NO: 36593 - RNA, 32 nt, Homo Sapiens
ucaguuaacaaauuauuuguaauguauuuuuu

SEQ ID NO: 36594 - RNA, 32 nt, Homo Sapiens
ggagugaauguucacacacuuuucuugcguac

SEQ ID NO: 36595 - RNA, 32 nt, Homo Sapiens
gugcuggcucugccgagaggcguuggaguggc

SEQ ID NO: 36596 - RNA, 32 nt, Homo Sapiens
aaggagcccucccgggacccaggaccccccgu

SEQ ID NO: 36597 - RNA, 32 nt, Homo Sapiens
acauguuuuuaacaauuguacuauuuagucau

SEQ ID NO: 36598 - RNA, 30 nt, Homo Sapiens
gcugacuggggcgaggccucagcagcgcga

SEQ ID NO: 36599 - RNA, 32 nt, Homo Sapiens
uuggaugcacucgucaaauaauuauguauacu

SEQ ID NO: 36600 - RNA, 32 nt, Homo Sapiens
ggagguggaaggggcggggggcggggcagaca

SEQ ID NO: 36601 - RNA, 32 nt, Homo Sapiens
ccuuaaggcaacaaaauaauugguuugaggua

SEQ ID NO: 36602 - RNA, 30 nt, Homo Sapiens
cugguggggagcuugggugagucuguuuuc

SEQ ID NO: 36603 - RNA, 32 nt, Homo Sapiens
cuugugaaaaagaacuuuaaauauuuauaagg

SEQ ID NO: 36604 - RNA, 32 nt, Homo Sapiens
cguacccggccgccucggcauggcgccccgca

SEQ ID NO: 36605 - RNA, 32 nt, Homo Sapiens
ucagaccuccaaaccuucagaccuccaauaaa

SEQ ID NO: 36606 - RNA, 30 nt, Homo Sapiens
gacucugccuuggagggggaaacacgacuc

SEQ ID NO: 36607 - RNA, 32 nt, Homo Sapiens
agaagaaacacuucaaagggauacaucauggc

SEQ ID NO: 36608 - RNA, 32 nt, Homo Sapiens
auggaaggcuggcuggaauggcacugauaacc

SEQ ID NO: 36609 - RNA, 32 nt, Homo Sapiens
guguuggaaaauuuacacaauuagguuuaaau

SEQ ID NO: 36610 - RNA, 32 nt, Homo Sapiens
cuguuuucucaaagcugaagucggcuagguuu

SEQ ID NO: 36611 - RNA, 32 nt, Homo Sapiens
gcgccuucugcuucuccaccggccagggccuc

SEQ ID NO: 36612 - RNA, 32 nt, Homo Sapiens
acaugaaauuggcugaugugggaggagaucuu

SEQ ID NO: 36613 - RNA, 32 nt, Homo Sapiens
ugccacucucugggacucuccuccuccccucc

SEQ ID NO: 36614 - RNA, 32 nt, Homo Sapiens
ugcauuacugaagcaaggguccuguggacauc

SEQ ID NO: 36615 - RNA, 32 nt, Homo Sapiens
uccagaacaccgugccuuagaaaugcuuuaga

SEQ ID NO: 36616 - RNA, 31 nt, Homo Sapiens
cuggcucauuugaugccaagacugaccauua

SEQ ID NO: 36617 - RNA, 32 nt, Homo Sapiens
gaagggagaagcucuuggagcaggcaggaugc

SEQ ID NO: 36618 - RNA, 32 nt, Homo Sapiens
guagauagacauuguggggaagugugccaggg

SEQ ID NO: 36619 - RNA, 32 nt, Homo Sapiens
ccaaaaagaagcaagaucuuugaaaguggcug

SEQ ID NO: 36620 - RNA, 32 nt, Homo Sapiens
cgcccaggccccagaagucaccugccuguaug

SEQ ID NO: 36621 - RNA, 32 nt, Homo Sapiens
ugcgugugguggcucaugccuguaaucccaac

SEQ ID NO: 36622 - RNA, 32 nt, Homo Sapiens
cccucgcccaaccugcccgacauggggaaccc

SEQ ID NO: 36623 - RNA, 32 nt, Homo Sapiens
aaaguuucccauuuuccaauacaguuucacau

SEQ ID NO: 36624 - RNA, 32 nt, Homo Sapiens
augaaggcauguuuagaggugugucacaguua

SEQ ID NO: 36625 - RNA, 32 nt, Homo Sapiens
auuccauauguaugaggauauuggacuauagu

SEQ ID NO: 36626 - RNA, 32 nt, Homo Sapiens
ugguuccuggaacacuuuagaggcuugugauu

SEQ ID NO: 36627 - RNA, 32 nt, Homo Sapiens
gcagugggucacgugaccugcgcacgggugug

SEQ ID NO: 36628 - RNA, 32 nt, Homo Sapiens
caggggaggggcgggagguggagcaggguccc

SEQ ID NO: 36629 - RNA, 32 nt, Homo Sapiens
ccuguuuccggcucucucuccucaucuccauc

SEQ ID NO: 36630 - RNA, 32 nt, Homo Sapiens
ucuguggaaaaugaauauuaaaaaagacuuaa

SEQ ID NO: 36631 - RNA, 32 nt, Homo Sapiens
gggacacgcagaccgaagcggcguagucggcu

SEQ ID NO: 36632 - RNA, 32 nt, Homo Sapiens
uuucuaaggcccuuuuuccuaguggugucauu

SEQ ID NO: 36633 - RNA, 32 nt, Homo Sapiens
ccauccccagaugccugagccuuuguccaaag

SEQ ID NO: 36634 - RNA, 32 nt, Homo Sapiens
ucguuuuuguuuuguagaaaguaucucucaaa

SEQ ID NO: 36635 - RNA, 32 nt, Homo Sapiens
aucccagcauuugggaggcugaugugggugga

SEQ ID NO: 36636 - RNA, 32 nt, Homo Sapiens
uuuaugaagcaucucaacuugaagaucaaguc

SEQ ID NO: 36637 - RNA, 32 nt, Homo Sapiens
uguguuuguggcauuacaaauguaacccacau

SEQ ID NO: 36638 - RNA, 32 nt, Homo Sapiens
ucugaggagggcggguucugccaggcacagag

SEQ ID NO: 36639 - RNA, 32 nt, Homo Sapiens
cgcuccgacguguccagguccgcggccccggg

SEQ ID NO: 36640 - RNA, 32 nt, Homo Sapiens
uuaaccucucagagccucuucgaggcuugguu

SEQ ID NO: 36641 - RNA, 32 nt, Homo Sapiens
acuagauauuaaaaacuacauauaguuaauau

SEQ ID NO: 36642 - RNA, 32 nt, Homo Sapiens
cuguccauaaaguggcuguuaucccuucauau

SEQ ID NO: 36643 - RNA, 32 nt, Homo Sapiens
caacucuggccaaugcucugugccccuaaaga

SEQ ID NO: 36644 - RNA, 32 nt, Homo Sapiens
ugucccugcucugccucccacccaguugccug

SEQ ID NO: 36645 - RNA, 32 nt, Homo Sapiens
ccuuaaaaagauacacaaagaugggcuguggg

SEQ ID NO: 36646 - RNA, 32 nt, Homo Sapiens
aaguacuagcuaaaccagaaaggugauuccag

SEQ ID NO: 36647 - RNA, 32 nt, Homo Sapiens
ccuccaggagcaggacgguggcugggagggua

SEQ ID NO: 36648 - RNA, 32 nt, Homo Sapiens
caaguuuuuuauuccuuccgcccuuuuaaagg

SEQ ID NO: 36649 - RNA, 32 nt, Homo Sapiens
accucacguugcuuuccagagcccgggccuau

SEQ ID NO: 36650 - RNA, 32 nt, Homo Sapiens
uauauauaacaaguauauaucaaacaugugcu

SEQ ID NO: 36651 - RNA, 32 nt, Homo Sapiens
agcgauuugugcuuguuugugcuagaagaaca

SEQ ID NO: 36652 - RNA, 32 nt, Homo Sapiens
gagccacagcuaggaguggcucauuuagggaa

SEQ ID NO: 36653 - RNA, 32 nt, Homo Sapiens
ugggaggcgggggguugcagugagccgagauc

SEQ ID NO: 36654 - RNA, 32 nt, Homo Sapiens
gaugcugcuugggccuggcccaguggcggguc

SEQ ID NO: 36655 - RNA, 32 nt, Homo Sapiens
cccaaaccucucucgcacgcggggacugagca

SEQ ID NO: 36656 - RNA, 32 nt, Homo Sapiens
ccgcguugccgcccccucggcccgccaugcug

SEQ ID NO: 36657 - RNA, 32 nt, Homo Sapiens
aacgcaggggagaagaaggggaaagaggcuug

SEQ ID NO: 36658 - RNA, 32 nt, Homo Sapiens
gcuguugucugcuugcugcacagcagaaauua

SEQ ID NO: 36659 - RNA, 32 nt, Homo Sapiens
uuuaaccaacccucuuccuccccgucauugua

SEQ ID NO: 36660 - RNA, 32 nt, Homo Sapiens
aaaagcaucaaagcacagaacaucagucacgg

SEQ ID NO: 36661 - RNA, 32 nt, Homo Sapiens
guggcaaaucaucuacuugcuccaauucaaug

SEQ ID NO: 36662 - RNA, 32 nt, Homo Sapiens
ggucggaccguggggaagggccccacucaggg

SEQ ID NO: 36663 - RNA, 32 nt, Homo Sapiens
uccccgacuccuccccgcgcuccacggcucuu

SEQ ID NO: 36664 - RNA, 32 nt, Homo Sapiens
caccgauuccaagaggaugaggaguguuuucu

SEQ ID NO: 36665 - RNA, 32 nt, Homo Sapiens
gauggaaaaugcuaaucaacuacccuuucuuu

SEQ ID NO: 36666 - RNA, 32 nt, Homo Sapiens
auagguaaucauaucauuuguaaauaagaaua

SEQ ID NO: 36667 - RNA, 32 nt, Homo Sapiens
uuguacuuuacuacuacagcauuacacauuuu

SEQ ID NO: 36668 - RNA, 32 nt, Homo Sapiens
uagcagcaagggugggguggccagcagaugga

SEQ ID NO: 36669 - RNA, 32 nt, Homo Sapiens
gucagauaaaaagccgguuacaucaugccacu

SEQ ID NO: 36670 - RNA, 32 nt, Homo Sapiens
cagucuccucuccugaucuccuccaaucucug

SEQ ID NO: 36671 - RNA, 32 nt, Homo Sapiens
uccuguuucuucaucguugagcuuuucuggcc

SEQ ID NO: 36672 - RNA, 32 nt, Homo Sapiens
cuaauuagaaauuuauaugucagagcuguucu

SEQ ID NO: 36673 - RNA, 32 nt, Homo Sapiens
ucucuaaggcugcauccuauuaccacaauggg

SEQ ID NO: 36674 - RNA, 32 nt, Homo Sapiens
gguucccauaguccugggagagugucugcagg

SEQ ID NO: 36675 - RNA, 32 nt, Homo Sapiens
ucagauucuuuccagacacagcccuuucauau

SEQ ID NO: 36676 - RNA, 32 nt, Homo Sapiens
aagacuuuauuaugagccacuaguuucuauau

SEQ ID NO: 36677 - RNA, 32 nt, Homo Sapiens
cauuuggaagaauauaugauggguuaaagaau

SEQ ID NO: 36678 - RNA, 32 nt, Homo Sapiens
cggcgcggguggcuggagacacacagccacaa

SEQ ID NO: 36679 - RNA, 32 nt, Homo Sapiens
ugccuguaaucccagcacuuugggugaccaag

SEQ ID NO: 36680 - RNA, 32 nt, Homo Sapiens
ggagaggaggccaugggcgcgcgcggggcgcu

SEQ ID NO: 36681 - RNA, 32 nt, Homo Sapiens
cacagcaguuuuuuuuaccaacagcauacuua

SEQ ID NO: 36682 - RNA, 32 nt, Homo Sapiens
gauuugacacacugauuuuaaucuucgaauca

SEQ ID NO: 36683 - RNA, 32 nt, Homo Sapiens
gccucucaccucagagcugcggaggagccgcu

SEQ ID NO: 36684 - RNA, 32 nt, Homo Sapiens
aaggaugccuggacugcagagcccuugcuccg

SEQ ID NO: 36685 - RNA, 32 nt, Homo Sapiens
gaaagcggaugauguuaauauucuucuugaua

SEQ ID NO: 36686 - RNA, 32 nt, Homo Sapiens
caugaacuuuaguuaaugacaauuuuaauugu

SEQ ID NO: 36687 - RNA, 32 nt, Homo Sapiens
gccagagcaucucguguggaccaucuaggcuc

SEQ ID NO: 36688 - RNA, 32 nt, Homo Sapiens
ggagccagaaacgcugaauccaauuaagagag

SEQ ID NO: 36689 - RNA, 32 nt, Homo Sapiens
ugagggauuuuaaaaacaaaaauguagauugu

SEQ ID NO: 36690 - RNA, 27 nt, Homo Sapiens
uuccuucuuuccuucagccccaccaca

SEQ ID NO: 36691 - RNA, 32 nt, Homo Sapiens
ccccuggcgucaacaccgcgggccgucagggg

SEQ ID NO: 36692 - RNA, 32 nt, Homo Sapiens
cugggccgucuggccuguggcuaauggaggug

SEQ ID NO: 36693 - RNA, 32 nt, Homo Sapiens
augugauggauauacugugaugaauaugucau

SEQ ID NO: 36694 - RNA, 32 nt, Homo Sapiens
guuucuggcccgcuggacuauaaggcccuuua

SEQ ID NO: 36695 - RNA, 32 nt, Homo Sapiens
aaaauaacagagccuucauuucaaagacuacc

SEQ ID NO: 36696 - RNA, 32 nt, Homo Sapiens
cacuccaguggucagaugcucacagucuuaug

SEQ ID NO: 36697 - RNA, 32 nt, Homo Sapiens
aaccaauaucuaggaagaaugacugagggaua

SEQ ID NO: 36698 - RNA, 32 nt, Homo Sapiens
aaacucaccuccugggcggcuggcgaccugca

SEQ ID NO: 36699 - RNA, 32 nt, Homo Sapiens
cgagggcgggcggacgcgggagcugcggacgu

SEQ ID NO: 36700 - RNA, 29 nt, Homo Sapiens
auucaggaagggccauauuuucuguugag

SEQ ID NO: 36701 - RNA, 32 nt, Homo Sapiens
uuaguauaaugauggucuuggauugucugacc

SEQ ID NO: 36702 - RNA, 32 nt, Homo Sapiens
ccgcucccgggucuccuuuuggccugggguaa

SEQ ID NO: 36703 - RNA, 32 nt, Homo Sapiens
aagggagaacguguaacccuggggauugaugg

SEQ ID NO: 36704 - RNA, 32 nt, Homo Sapiens
agcuucagcgggcaccaguucucauuccucug

SEQ ID NO: 36705 - RNA, 32 nt, Homo Sapiens
auauucucaaggaaaaaagguauaucacaugu

SEQ ID NO: 36706 - RNA, 32 nt, Homo Sapiens
accacccacagcucccuucucaucucuuaugu

SEQ ID NO: 36707 - RNA, 32 nt, Homo Sapiens
aaugcccugccgcugcuucucaucgcauggcc

SEQ ID NO: 36708 - RNA, 32 nt, Homo Sapiens
uuagaaaacaaauaaacuuuucuuauauuagc

SEQ ID NO: 36709 - RNA, 32 nt, Homo Sapiens
auuacuauaauggcuguuauuauacacagcuc

SEQ ID NO: 36710 - RNA, 32 nt, Homo Sapiens
uaggauggauguuugagcgacacacacgugua

SEQ ID NO: 36711 - RNA, 32 nt, Homo Sapiens
uaugagauaauuacgcccuuauuguauaagac

SEQ ID NO: 36712 - RNA, 32 nt, Homo Sapiens
uauguagucuacggauauuuuuuaucauaaaa

SEQ ID NO: 36713 - RNA, 32 nt, Homo Sapiens
ccugguccgucaccugcgcgccgccccacgcg

SEQ ID NO: 36714 - RNA, 32 nt, Homo Sapiens
caacauugcuuauauuugaauaguagaaaacc

SEQ ID NO: 36715 - RNA, 32 nt, Homo Sapiens
gcuugcucccagccccuuccccggcgaugccc

SEQ ID NO: 36716 - RNA, 32 nt, Homo Sapiens
ggggagagcagcugaggccguguggaaaauua

SEQ ID NO: 36717 - RNA, 32 nt, Homo Sapiens
aauuuucaauuucagugacaguuucuuuugca

SEQ ID NO: 36718 - RNA, 32 nt, Homo Sapiens
aaguuuauagacucagaaaguacauuaggcca

SEQ ID NO: 36719 - RNA, 32 nt, Homo Sapiens
gucauuucaaaccauuguggucuucaagcaac

SEQ ID NO: 36720 - RNA, 32 nt, Homo Sapiens
cggccgggcgcagggccaggcugcuggggacg

SEQ ID NO: 36721 - RNA, 32 nt, Homo Sapiens
agcgccggccgagccggcuuccccucagucuc

SEQ ID NO: 36722 - RNA, 32 nt, Homo Sapiens
aaaaugcauacuguugauacaaaccacuguga

SEQ ID NO: 36723 - RNA, 32 nt, Homo Sapiens
guuauuuuucuuuuuccgugagucaaagucug

SEQ ID NO: 36724 - RNA, 32 nt, Homo Sapiens
uguuuauuauuuacuuggauuagacucauuaa

SEQ ID NO: 36725 - RNA, 32 nt, Homo Sapiens
aguugccuggcacagaucugugccuggcagaa

SEQ ID NO: 36726 - RNA, 32 nt, Homo Sapiens
uuauugaagaaagugccuucugauggccacau

SEQ ID NO: 36727 - RNA, 32 nt, Homo Sapiens
cugaaguauggaagcugacuuucuaguuuucu

SEQ ID NO: 36728 - RNA, 32 nt, Homo Sapiens
cccagggccgggcuggaagggcggcggcggcu

SEQ ID NO: 36729 - RNA, 32 nt, Homo Sapiens
uccacuaaaaauacaaaaaauuagcugggcgu

SEQ ID NO: 36730 - RNA, 32 nt, Homo Sapiens
uuccuuugauuuagccucuuugggcuggagca

SEQ ID NO: 36731 - RNA, 32 nt, Homo Sapiens
uaaauugagagaaagagaauuaaucuuauacu

SEQ ID NO: 36732 - RNA, 32 nt, Homo Sapiens
aucgcugaacucucaauauuguggggcauuuu

SEQ ID NO: 36733 - RNA, 30 nt, Homo Sapiens
uuuucccguggcccugccuauacucuggug

SEQ ID NO: 36734 - RNA, 32 nt, Homo Sapiens
cggugccccuccccggccuccggaagaucagg

SEQ ID NO: 36735 - RNA, 32 nt, Homo Sapiens
agacuucaaaaauaugucugcuauagaaauaa

SEQ ID NO: 36736 - RNA, 32 nt, Homo Sapiens
agccacgcgcagcggcuccgcggggucucggc

SEQ ID NO: 36737 - RNA, 32 nt, Homo Sapiens
aggcucaaaaggaagcacuuuuagaaaucuuc

SEQ ID NO: 36738 - RNA, 32 nt, Homo Sapiens
caucuucaaaauauuucuuuugugccuaugua

SEQ ID NO: 36739 - RNA, 32 nt, Homo Sapiens
cgugccucccccucacaggguggccaccugca

SEQ ID NO: 36740 - RNA, 32 nt, Homo Sapiens
aaaauacaaaaauuagcugggcgugguggugc

SEQ ID NO: 36741 - RNA, 32 nt, Homo Sapiens
aaaauacaaaaauuagcuggguaugguggcac

SEQ ID NO: 36742 - RNA, 31 nt, Homo Sapiens
cugcagcugcacugccgaucgccguguuugg

SEQ ID NO: 36743 - RNA, 32 nt, Homo Sapiens
ucuucauuuacuaccacuuguucuuuagccaa

SEQ ID NO: 36744 - RNA, 32 nt, Homo Sapiens
uuauaaaaacugcauguugcuaaucucaugau

SEQ ID NO: 36745 - RNA, 32 nt, Homo Sapiens
uuauugggccaaugaaaauaugcaagaaagga

SEQ ID NO: 36746 - RNA, 32 nt, Homo Sapiens
gcccgaccgaggaggagggagccuagguucaa

SEQ ID NO: 36747 - RNA, 32 nt, Homo Sapiens
cgcaguucgggcgcagcacgccggccgcagga

SEQ ID NO: 36748 - RNA, 32 nt, Homo Sapiens
ccgcaagauggacgguuucgccggcagucucg

SEQ ID NO: 36749 - RNA, 32 nt, Homo Sapiens
agcuaagguaguauuguaaaauuucaagucau

SEQ ID NO: 36750 - RNA, 32 nt, Homo Sapiens
cucccgcuucuugaccccacagauguauucca

SEQ ID NO: 36751 - RNA, 32 nt, Homo Sapiens
aaguaauuguuguuagauacuguuuagaagaa

SEQ ID NO: 36752 - RNA, 32 nt, Homo Sapiens
aagagggggaaagaugucuugauagaaucaaa

SEQ ID NO: 36753 - RNA, 32 nt, Homo Sapiens
ggacaaaaacaaagucacuauuugggacuugg

SEQ ID NO: 36754 - RNA, 32 nt, Homo Sapiens
guugacaaacaagccaccaaccacugacugca

SEQ ID NO: 36755 - RNA, 32 nt, Homo Sapiens
gcgucaggacggcgccgccgggccccgcgauu

SEQ ID NO: 36756 - RNA, 32 nt, Homo Sapiens
ggccgggagacucccuccacgccccgugugug

SEQ ID NO: 36757 - RNA, 32 nt, Homo Sapiens
agacaacuuucuccucaccaugguggcugagu

SEQ ID NO: 36758 - RNA, 32 nt, Homo Sapiens
ucagucccugguuuuuaauuuucugucugaug

SEQ ID NO: 36759 - RNA, 32 nt, Homo Sapiens
cggaaagccagacuccacgcaggaccagggau

SEQ ID NO: 36760 - RNA, 32 nt, Homo Sapiens
gcagaagaaaacaguauuucugaaggcauugu

SEQ ID NO: 36761 - RNA, 32 nt, Homo Sapiens
gauguaaauuuguaggucgaguuuacagcugg

SEQ ID NO: 36762 - RNA, 30 nt, Homo Sapiens
ugagcgcgucuucuggggccggcgcuugcc

SEQ ID NO: 36763 - RNA, 32 nt, Homo Sapiens
gccuuccugccagccugacagcucuggaagug

SEQ ID NO: 36764 - RNA, 32 nt, Homo Sapiens
gauauuccaccuguaauagcacuuuggaacug

SEQ ID NO: 36765 - RNA, 32 nt, Homo Sapiens
ggcgaccaccgccccucucaguggcuccaggg

SEQ ID NO: 36766 - RNA, 32 nt, Homo Sapiens
ugaugcaagaauguauuaggacauaaaauaga

SEQ ID NO: 36767 - RNA, 32 nt, Homo Sapiens
aaaaaugaaauacuuaaaacaucuaccagaac

SEQ ID NO: 36768 - RNA, 32 nt, Homo Sapiens
cccaagcugccuccccucuccuuccugugugu

SEQ ID NO: 36769 - RNA, 32 nt, Homo Sapiens
gcaguagguuaaaauucuauuaaacaaauaua

SEQ ID NO: 36770 - RNA, 32 nt, Homo Sapiens
cgggagccgcuggcagaagggacuucacgaag

SEQ ID NO: 36771 - RNA, 32 nt, Homo Sapiens
ucuuuuaauaaaacagaagagaaucaucugca

SEQ ID NO: 36772 - RNA, 32 nt, Homo Sapiens
guuucugaaggggauaaaagagggcacggugg

SEQ ID NO: 36773 - RNA, 32 nt, Homo Sapiens
uauauuaaucuuucauuuaaccagcuaggcag

SEQ ID NO: 36774 - RNA, 32 nt, Homo Sapiens
acuggucucacagagauucaaagguguuugag

SEQ ID NO: 36775 - RNA, 32 nt, Homo Sapiens
uccucugaaaagacaggauaagggagcugccu

SEQ ID NO: 36776 - RNA, 32 nt, Homo Sapiens
uuauugcuguggucuuucuacuccacaaaaua

SEQ ID NO: 36777 - RNA, 32 nt, Homo Sapiens
ugaaaguacuuuguuauaaauucagucaguaa

SEQ ID NO: 36778 - RNA, 32 nt, Homo Sapiens
gauuucccacugaaagaguuauuuguuguaag

SEQ ID NO: 36779 - RNA, 32 nt, Homo Sapiens
auuuccagugaaaucaguuacucuucaguuaa

SEQ ID NO: 36780 - RNA, 32 nt, Homo Sapiens
gagacauuguggguguguaucuucuuaucuca

SEQ ID NO: 36781 - RNA, 32 nt, Homo Sapiens
ggccugccaaacugcugggauuauaggcguga

SEQ ID NO: 36782 - RNA, 32 nt, Homo Sapiens
gaguuuuggcccggcgcaguggcucacaccug

SEQ ID NO: 36783 - RNA, 32 nt, Homo Sapiens
ucacugagccuugaccucccccugcagccuga

SEQ ID NO: 36784 - RNA, 32 nt, Homo Sapiens
acgcugggccaugagcuccgcggcccaccuga

SEQ ID NO: 36785 - RNA, 32 nt, Homo Sapiens
cuuaggcuuccuucucauuuccacuacucacu

SEQ ID NO: 36786 - RNA, 32 nt, Homo Sapiens
cccaaaucaaaaaguuaguuugaaagcauuuu

SEQ ID NO: 36787 - RNA, 29 nt, Homo Sapiens
ugaaaagggaucugggcacaaaguuucag

SEQ ID NO: 36788 - RNA, 32 nt, Homo Sapiens
uuaacugaaggacuuaaaauacuuguuccauu

SEQ ID NO: 36789 - RNA, 32 nt, Homo Sapiens
cacuuaaaaauauuuuuagcuuguuuuaccua

SEQ ID NO: 36790 - RNA, 32 nt, Homo Sapiens
ugauacauaccauuuuaucugucucaagcucu

SEQ ID NO: 36791 - RNA, 32 nt, Homo Sapiens
gagcacaaugcccuccuguguugaugccacuu

SEQ ID NO: 36792 - RNA, 32 nt, Homo Sapiens
cccaccccggccccggccccuccuggaaucgc

SEQ ID NO: 36793 - RNA, 32 nt, Homo Sapiens
caucuguaaucccagcacuuuuggaggcugag

SEQ ID NO: 36794 - RNA, 32 nt, Homo Sapiens
cucuugcggagacgcgcgcgucgggguuuaac

SEQ ID NO: 36795 - RNA, 32 nt, Homo Sapiens
ugaguuucaaggauguggcuguggacuucacc

SEQ ID NO: 36796 - RNA, 32 nt, Homo Sapiens
acccgcgcagccugccgcucucccgccgccgg

SEQ ID NO: 36797 - RNA, 32 nt, Homo Sapiens
cugagacccgcgggagcuggcccuaaagcaag

SEQ ID NO: 36798 - RNA, 32 nt, Homo Sapiens
gacacgcgcgucgccgccaccgcggguguggg

SEQ ID NO: 36799 - RNA, 32 nt, Homo Sapiens
uuuacaacuccaacuucuauguuuaucuuugu

SEQ ID NO: 36800 - RNA, 32 nt, Homo Sapiens
agucccaucuaaaaaugugucagcuauucuaa

SEQ ID NO: 36801 - RNA, 32 nt, Homo Sapiens
ggguuuucagcaaauccagggcuggucuggag

SEQ ID NO: 36802 - RNA, 32 nt, Homo Sapiens
ccacuggcccagccccagccccggcccccagc

SEQ ID NO: 36803 - RNA, 32 nt, Homo Sapiens
cacgaugcccugggcugugugcucuuauggga

SEQ ID NO: 36804 - RNA, 32 nt, Homo Sapiens
cuccuccgucuucuucccuggcccuggucagg

SEQ ID NO: 36805 - RNA, 32 nt, Homo Sapiens
gcuggggaaggcccggcccggcacaacagcag

SEQ ID NO: 36806 - RNA, 32 nt, Homo Sapiens
acguggcgguccgcuggcaggcugguccuggg

SEQ ID NO: 36807 - RNA, 32 nt, Homo Sapiens
ugacuaaacacuuucaagcacaguggacccuu

SEQ ID NO: 36808 - RNA, 32 nt, Homo Sapiens
cugcuuugaaaacaggacauguugacaggcag

SEQ ID NO: 36809 - RNA, 32 nt, Homo Sapiens
cucaccacuccauggugaggaaggccauggcc

SEQ ID NO: 36810 - RNA, 32 nt, Homo Sapiens
cuacuuacaaguuucauagauuugagccuaac

SEQ ID NO: 36811 - RNA, 32 nt, Homo Sapiens
ggcccgggggaaagcuggggcugggaagcccg

SEQ ID NO: 36812 - RNA, 32 nt, Homo Sapiens
guacccagcaggcuucaugugcaugugcacac

SEQ ID NO: 36813 - RNA, 32 nt, Homo Sapiens
uuguuuguucauccuuucugucagcauggauc

SEQ ID NO: 36814 - RNA, 32 nt, Homo Sapiens
ucucuucuggauauuugguuuauuuuuucuga

SEQ ID NO: 36815 - RNA, 32 nt, Homo Sapiens
auauauaugcuguuagucagaaauuuauuuug

SEQ ID NO: 36816 - RNA, 32 nt, Homo Sapiens
ugugaauuaugaaaacaccaaguuugaauaag

SEQ ID NO: 36817 - RNA, 32 nt, Homo Sapiens
cugagaaggggaggaccucugggcuuugauuc

SEQ ID NO: 36818 - RNA, 32 nt, Homo Sapiens
ccgcaggcgcuucgcuggugcagacgcagugc

SEQ ID NO: 36819 - RNA, 32 nt, Homo Sapiens
caaucuaguuuauuuuaggguacugagagccu

SEQ ID NO: 36820 - RNA, 30 nt, Homo Sapiens
gagaaauggcgaugaucgaauugggguuug

SEQ ID NO: 36821 - RNA, 32 nt, Homo Sapiens
gccauauaaaaauaaagggaacugaaaccaaa

SEQ ID NO: 36822 - RNA, 32 nt, Homo Sapiens
aaucuguaauucuauugugccuaugauaaauu

SEQ ID NO: 36823 - RNA, 32 nt, Homo Sapiens
uuucuagauuacuuauaauacacaaugcauug

SEQ ID NO: 36824 - RNA, 32 nt, Homo Sapiens
cuuuagaagugacuagguacugagaguacaaa

SEQ ID NO: 36825 - RNA, 30 nt, Homo Sapiens
gaagaaggcaggcuucuggcuuccagaggu

SEQ ID NO: 36826 - RNA, 32 nt, Homo Sapiens
caacccaagaccauggggcaucuggacaagga

SEQ ID NO: 36827 - RNA, 32 nt, Homo Sapiens
aaaauaccuaggaauacagcuaucaagggaag

SEQ ID NO: 36828 - RNA, 32 nt, Homo Sapiens
cccuggagguuuuuaagcaguacgugccucca

SEQ ID NO: 36829 - RNA, 32 nt, Homo Sapiens
aucugaauauaaacacaaucugauguuaauuu

SEQ ID NO: 36830 - RNA, 32 nt, Homo Sapiens
agguuggggcaccaaaaccaacaccaacucug

SEQ ID NO: 36831 - RNA, 32 nt, Homo Sapiens
cugucuuuuuauuguuucuugucuguuuuugc

SEQ ID NO: 36832 - RNA, 32 nt, Homo Sapiens
aaacuauaggcuccuuuuuuuuuggugggugg

SEQ ID NO: 36833 - RNA, 32 nt, Homo Sapiens
uggugugcaccuguaaucccagcuacucgaga

SEQ ID NO: 36834 - RNA, 32 nt, Homo Sapiens
ggcugggcgcgguggcucaugccuguaaucaa

SEQ ID NO: 36835 - RNA, 32 nt, Homo Sapiens
uuuggacgcguuccugcccagccccuugcugu

SEQ ID NO: 36836 - RNA, 32 nt, Homo Sapiens
aggagcaccagcggagcgcggcugcuucagcg

SEQ ID NO: 36837 - RNA, 32 nt, Homo Sapiens
aagagagaaaucaaaagagcaugaugauggcu

SEQ ID NO: 36838 - RNA, 32 nt, Homo Sapiens
auauuaauugagcauuaacuagguucuaaguc

SEQ ID NO: 36839 - RNA, 32 nt, Homo Sapiens
uuaaauuuucuuuccagguagaguagcucuuu

SEQ ID NO: 36840 - RNA, 32 nt, Homo Sapiens
gggcaggggcggggagcuuaccgaccucccgc

SEQ ID NO: 36841 - RNA, 27 nt, Homo Sapiens
auuaagggaaguaugucugaaauggca

SEQ ID NO: 36842 - RNA, 32 nt, Homo Sapiens
guccacaucugccuccucuccuccucagcugc

SEQ ID NO: 36843 - RNA, 32 nt, Homo Sapiens
accuguguccgaaaugccggugcgaggagacc

SEQ ID NO: 36844 - RNA, 32 nt, Homo Sapiens
aaggacuugacaaagcugaagaguuaucaguc

SEQ ID NO: 36845 - RNA, 27 nt, Homo Sapiens
ggaacgggucccugcagcccccagccg

SEQ ID NO: 36846 - RNA, 32 nt, Homo Sapiens
cauaugagaaaguugccuucagaaggugggaa

SEQ ID NO: 36847 - RNA, 32 nt, Homo Sapiens
auaaagauaaagucuguaaauccagccgggua

SEQ ID NO: 36848 - RNA, 32 nt, Homo Sapiens
gaccugacccugccgaacugcuccucaugggc

SEQ ID NO: 36849 - RNA, 32 nt, Homo Sapiens
auuccuucuaacuggaacauuuguguuguauc

SEQ ID NO: 36850 - RNA, 32 nt, Homo Sapiens
ggaaaaccaaccccagggugcaggccugccug

SEQ ID NO: 36851 - RNA, 32 nt, Homo Sapiens
ccugaagugggaggaguguugaguaaguuggu

SEQ ID NO: 36852 - RNA, 32 nt, Homo Sapiens
ugcugggauagccauuuccauggcucuguuau

SEQ ID NO: 36853 - RNA, 32 nt, Homo Sapiens
cagggaggcuggccgggcagggggcugacccc

SEQ ID NO: 36854 - RNA, 32 nt, Homo Sapiens
acccaaaaugacuucgaacugucuaaugccuc

SEQ ID NO: 36855 - RNA, 32 nt, Homo Sapiens
uaugauggaaugaauagaaaacuuuuucacuc

SEQ ID NO: 36856 - RNA, 32 nt, Homo Sapiens
uucugcaaggggcauccacggagccugugaua

SEQ ID NO: 36857 - RNA, 32 nt, Homo Sapiens
ugggggccaacugacuggcccgggcaaugauu

SEQ ID NO: 36858 - RNA, 32 nt, Homo Sapiens
uagcuccccugccaaaggccaggccgccacag

SEQ ID NO: 36859 - RNA, 32 nt, Homo Sapiens
uggccauuuucuuuuucuuuuucuuuauuuua

SEQ ID NO: 36860 - RNA, 32 nt, Homo Sapiens
ucccagcacuauuuguuguauaggguguaauu

SEQ ID NO: 36861 - RNA, 32 nt, Homo Sapiens
cuacaaagaacgugcggugcugcgggcgaggg

SEQ ID NO: 36862 - RNA, 32 nt, Homo Sapiens
cacacuaaauuaaauucaaauuucauuuuaga

SEQ ID NO: 36863 - RNA, 32 nt, Homo Sapiens
gggaggguggguggagacaaaggcaccacggg

SEQ ID NO: 36864 - RNA, 32 nt, Homo Sapiens
ccaggugccagcaaagaccaucuuucauaacu

SEQ ID NO: 36865 - RNA, 32 nt, Homo Sapiens
ucggcggacgaggggcccccgggaguugcugg

SEQ ID NO: 36866 - RNA, 32 nt, Homo Sapiens
ugccauuggcaguacaucaucuucacaaggau

SEQ ID NO: 36867 - RNA, 32 nt, Homo Sapiens
uaagcaaguuguuuuucuuuuguggagagguc

SEQ ID NO: 36868 - RNA, 32 nt, Homo Sapiens
cuggcuggucccugccggcagcuuugugcucu

SEQ ID NO: 36869 - RNA, 32 nt, Homo Sapiens
acacugaagaacucugcugugaagcaaaacac

SEQ ID NO: 36870 - RNA, 31 nt, Homo Sapiens
aagccgcugccgggugcccgagggccgucgu

SEQ ID NO: 36871 - RNA, 32 nt, Homo Sapiens
augacuaauuuucuggucuauaugacuucuuc

SEQ ID NO: 36872 - RNA, 32 nt, Homo Sapiens
ggagguuaaguaacuugugcaagaucaaauga

SEQ ID NO: 36873 - RNA, 32 nt, Homo Sapiens
aacaugugauuagaaugaucuauauuaauguu

SEQ ID NO: 36874 - RNA, 32 nt, Homo Sapiens
gaucaucugucccaggucacacuccuucauuu

SEQ ID NO: 36875 - RNA, 32 nt, Homo Sapiens
cugucacguauauaaauugcuucuucauuuua

SEQ ID NO: 36876 - RNA, 32 nt, Homo Sapiens
accgucggcaacacugaggauacgcagggaug

SEQ ID NO: 36877 - RNA, 32 nt, Homo Sapiens
gugccgagaaacgggcgggcccugcccucccc

SEQ ID NO: 36878 - RNA, 32 nt, Homo Sapiens
agaugccagcagcucuuccuugccagagauga

SEQ ID NO: 36879 - RNA, 25 nt, Homo Sapiens
auggcugccgcugggggcgcccggc

SEQ ID NO: 36880 - RNA, 32 nt, Homo Sapiens
acccggaagccgcgacuccuggcccugagccc

SEQ ID NO: 36881 - RNA, 32 nt, Homo Sapiens
ucccggaugaggaugaugaccuguggaaugaa

SEQ ID NO: 36882 - RNA, 31 nt, Homo Sapiens
ccggccauggggagcugcgcgcggcugcugc

SEQ ID NO: 36883 - RNA, 27 nt, Homo Sapiens
guuuucaauuucuucagcagacccuac

SEQ ID NO: 36884 - RNA, 32 nt, Homo Sapiens
gggcagccacuggcuccgcgggcacaggccuc

SEQ ID NO: 36885 - RNA, 32 nt, Homo Sapiens
ucgugucgccgggaagccgggcggagacagag

SEQ ID NO: 36886 - RNA, 32 nt, Homo Sapiens
uuuuuacuuccacuuuaauccuuagaaauuuc

SEQ ID NO: 36887 - RNA, 32 nt, Homo Sapiens
cgagcuggaggaugcccuggaacucggagcac

SEQ ID NO: 36888 - RNA, 32 nt, Homo Sapiens
cguuuuauccacuuacuaggcgauguauaguu

SEQ ID NO: 36889 - RNA, 32 nt, Homo Sapiens
uguugagauauagaguuuuucuuccacucaga

SEQ ID NO: 36890 - RNA, 32 nt, Homo Sapiens
auuacuuuacauauuugaucuaaggcuuuguu

SEQ ID NO: 36891 - RNA, 32 nt, Homo Sapiens
uuuaaagcauuaauggacaucaucauuaauuu

SEQ ID NO: 36892 - RNA, 32 nt, Homo Sapiens
ccuccaaauaccaucacauugggaguuaggac

SEQ ID NO: 36893 - RNA, 32 nt, Homo Sapiens
aguuuuaaaaauuuccccagguaaguuuaaga

SEQ ID NO: 36894 - RNA, 32 nt, Homo Sapiens
ccucacuacuucguuuuugauuguguuggugu

SEQ ID NO: 36895 - RNA, 32 nt, Homo Sapiens
acuuuuuuaagccccagcccuggcauucacua

SEQ ID NO: 36896 - RNA, 32 nt, Homo Sapiens
guuggcuuucuguaguguucugaaacaagagg

SEQ ID NO: 36897 - RNA, 32 nt, Homo Sapiens
uuauaucaaagacauuguauaauuacaugaag

SEQ ID NO: 36898 - RNA, 32 nt, Homo Sapiens
gcccccuugauuucuaagacaccugugaaggg

SEQ ID NO: 36899 - RNA, 32 nt, Homo Sapiens
ucuaugggccuugggcucucagcccuccugcu

SEQ ID NO: 36900 - RNA, 32 nt, Homo Sapiens
uaugguuauuaaaaauuguaaaugguaucaca

SEQ ID NO: 36901 - RNA, 32 nt, Homo Sapiens
ugccgggugcgguggcucacgccuguaauccc

SEQ ID NO: 36902 - RNA, 31 nt, Homo Sapiens
ccugguggcuccugccugcuccuucacuuuu

SEQ ID NO: 36903 - RNA, 32 nt, Homo Sapiens
ccucugaggcuguaggacucgcagucaggggc

SEQ ID NO: 36904 - RNA, 32 nt, Homo Sapiens
ugaccaacaucgcagacacaugugcuggccac

SEQ ID NO: 36905 - RNA, 32 nt, Homo Sapiens
cugcuggugucucuccuucucugaccgcggcc

SEQ ID NO: 36906 - RNA, 32 nt, Homo Sapiens
uguauuuguaaaaaugguuuccugugucaagu

SEQ ID NO: 36907 - RNA, 32 nt, Homo Sapiens
agggauucuccaagcagucauuucagggggcu

SEQ ID NO: 36908 - RNA, 32 nt, Homo Sapiens
agcagguucuuccaauauacuaucugagcucc

SEQ ID NO: 36909 - RNA, 32 nt, Homo Sapiens
cauucuguaauuauguuacauaaaagcaaugu

SEQ ID NO: 36910 - RNA, 32 nt, Homo Sapiens
ggauauaacaggucaggccuagcugagucagg

SEQ ID NO: 36911 - RNA, 32 nt, Homo Sapiens
augccuuugauguccuaggagcagauagggag

SEQ ID NO: 36912 - RNA, 32 nt, Homo Sapiens
gguuuagauuuuaaguugucuacugagcagau

SEQ ID NO: 36913 - RNA, 32 nt, Homo Sapiens
cuuugugccuggagagcuuucaggggaggugg

SEQ ID NO: 36914 - RNA, 32 nt, Homo Sapiens
ucaauccuaggggacaggagccaggcuacugu

SEQ ID NO: 36915 - RNA, 32 nt, Homo Sapiens
ggaaaacuuaaguuugaauguuagaaaaugaa

SEQ ID NO: 36916 - RNA, 32 nt, Homo Sapiens
guucaguuugguuucauuuuuaauuuuauggu

SEQ ID NO: 36917 - RNA, 32 nt, Homo Sapiens
uuuauagaaacgcagcaaagggaaggugugag

SEQ ID NO: 36918 - RNA, 32 nt, Homo Sapiens
uaguuugucucacucucaaguuucacaggcau

SEQ ID NO: 36919 - RNA, 32 nt, Homo Sapiens
guccacuccaggacagacugugccgccugaga

SEQ ID NO: 36920 - RNA, 32 nt, Homo Sapiens
uguacaucagggacuugcuuuauuuuuugagc

SEQ ID NO: 36921 - RNA, 32 nt, Homo Sapiens
aauagaggaauuguucuggggguccuggagac

SEQ ID NO: 36922 - RNA, 32 nt, Homo Sapiens
accugggcgcaucaugcgcagggcccgggacg

SEQ ID NO: 36923 - RNA, 32 nt, Homo Sapiens
cuauggagaaggaaaauuugagucuccagaag

SEQ ID NO: 36924 - RNA, 32 nt, Homo Sapiens
gcuccgcggcgccggcugcgaaguugagcgaa

SEQ ID NO: 36925 - RNA, 32 nt, Homo Sapiens
uuuaguuuguuaguuaccacucaagagcagac

SEQ ID NO: 36926 - RNA, 32 nt, Homo Sapiens
cucuggaacucuggggucuggucagggagugu

SEQ ID NO: 36927 - RNA, 32 nt, Homo Sapiens
uguuuuuucucgcacguugaggcuuaguggag

SEQ ID NO: 36928 - RNA, 32 nt, Homo Sapiens
gaaggaggcggcugggcagggcggcguggggc

SEQ ID NO: 36929 - RNA, 32 nt, Homo Sapiens
auguggcugagugcuuuuuuuuuggccagacu

SEQ ID NO: 36930 - RNA, 32 nt, Homo Sapiens
agauagacagagauaucuauagauagcuaugg

SEQ ID NO: 36931 - RNA, 32 nt, Homo Sapiens
ggcauccuccgcugggccccagugccuuugcg

SEQ ID NO: 36932 - RNA, 32 nt, Homo Sapiens
ggcuucucuaaaggugguugggcaagcaccua

SEQ ID NO: 36933 - RNA, 32 nt, Homo Sapiens
uugcagccuuugauuucuccaguuguagagau

SEQ ID NO: 36934 - RNA, 32 nt, Homo Sapiens
acacaacauuagugucagauagcuuugaaguu

SEQ ID NO: 36935 - RNA, 32 nt, Homo Sapiens
cacaaagagcugaguuaauugcucuuaccuga

SEQ ID NO: 36936 - RNA, 32 nt, Homo Sapiens
guuaauguauauuauucagaaacauuguauug

SEQ ID NO: 36937 - RNA, 32 nt, Homo Sapiens
ucauucuuacuaguuucauucuaaucaagaug

SEQ ID NO: 36938 - RNA, 32 nt, Homo Sapiens
agauagcggcggugcugggagggguaggugag

SEQ ID NO: 36939 - RNA, 32 nt, Homo Sapiens
aaauuuauauaaaauauuuuguucauagagcc

SEQ ID NO: 36940 - RNA, 32 nt, Homo Sapiens
caagccccuggccacucuaagcugggcagacg

SEQ ID NO: 36941 - RNA, 32 nt, Homo Sapiens
uuccucucucauuuggguuugaggauuguggu

SEQ ID NO: 36942 - RNA, 32 nt, Homo Sapiens
cauggagggugacacccacugugcauuucuca

SEQ ID NO: 36943 - RNA, 30 nt, Homo Sapiens
guuucuauuuuaaugggggggacaagguag

SEQ ID NO: 36944 - RNA, 32 nt, Homo Sapiens
aacaagagaacagauagccacaaacagagauc

SEQ ID NO: 36945 - RNA, 32 nt, Homo Sapiens
ugcccuacccgccgcugccgccgcaucccgac

SEQ ID NO: 36946 - RNA, 32 nt, Homo Sapiens
gcuagaccagggaugacacauaaaagaugaua

SEQ ID NO: 36947 - RNA, 32 nt, Homo Sapiens
ugucccccuaaaaugcauaaaaucagcuguaa

SEQ ID NO: 36948 - RNA, 27 nt, Homo Sapiens
ggcuuggccuccuccagccccccaucu

SEQ ID NO: 36949 - RNA, 32 nt, Homo Sapiens
gcagauuagucagucugagaaugucuaauauu

SEQ ID NO: 36950 - RNA, 32 nt, Homo Sapiens
cuaccugccggcucccacucccgccccucaag

SEQ ID NO: 36951 - RNA, 32 nt, Homo Sapiens
aaccaagcucucugcaucuacucccaaguaug

SEQ ID NO: 36952 - RNA, 30 nt, Homo Sapiens
acagaaugaagauauucaaauguuauuuua

SEQ ID NO: 36953 - RNA, 32 nt, Homo Sapiens
ccccucacgcgcucucgccgggaccccgcuuc

SEQ ID NO: 36954 - RNA, 32 nt, Homo Sapiens
cugaggacgcagggaaaggcugcgcgggagaa

SEQ ID NO: 36955 - RNA, 32 nt, Homo Sapiens
aggcugccaaaauagcuucaggaagaaauuuu

SEQ ID NO: 36956 - RNA, 32 nt, Homo Sapiens
ucauauggucccucaccauugggucggccuuc

SEQ ID NO: 36957 - RNA, 32 nt, Homo Sapiens
cuccacggccccagacaccuucccugaggaca

SEQ ID NO: 36958 - RNA, 32 nt, Homo Sapiens
gcaccaacagagccaaggccuugggagcagca

SEQ ID NO: 36959 - RNA, 32 nt, Homo Sapiens
ccuagcaugcuucauaaaucaggguuuggccc

SEQ ID NO: 36960 - RNA, 32 nt, Homo Sapiens
cugagaaacagcaugguggccuugacuaaguu

SEQ ID NO: 36961 - RNA, 32 nt, Homo Sapiens
cacgaggagaagauccagaccguguucgagca

SEQ ID NO: 36962 - RNA, 32 nt, Homo Sapiens
auuuuaguagcuucucaggugauucagaugcu

SEQ ID NO: 36963 - RNA, 32 nt, Homo Sapiens
ggccucugaguggccccagagcccuggcugga

SEQ ID NO: 36964 - RNA, 32 nt, Homo Sapiens
gaagguuuuuggcuguuucucaucaucucaug

SEQ ID NO: 36965 - RNA, 32 nt, Homo Sapiens
uaaccuucacuuuuaaaaaauuauuguacaug

SEQ ID NO: 36966 - RNA, 32 nt, Homo Sapiens
cacuccggccagcagcaccccucccccaaccc

SEQ ID NO: 36967 - RNA, 32 nt, Homo Sapiens
aagcuguaugaauguagaaaauuuagaaauug

SEQ ID NO: 36968 - RNA, 32 nt, Homo Sapiens
uccagggcacgcugaugcaagggguuggcucc

SEQ ID NO: 36969 - RNA, 32 nt, Homo Sapiens
cuccaggcccuggaggggcugcugcuccucag

SEQ ID NO: 36970 - RNA, 32 nt, Homo Sapiens
uccuguccaggacgcuccuuucugcugacagc

SEQ ID NO: 36971 - RNA, 32 nt, Homo Sapiens
ucaggcccagcacccaguuccuccucacaugg

SEQ ID NO: 36972 - RNA, 32 nt, Homo Sapiens
uuuggcacaaccucccagacaaggaagaauaa

SEQ ID NO: 36973 - RNA, 32 nt, Homo Sapiens
auugaauccaaggaagagagcccaaggguagg

SEQ ID NO: 36974 - RNA, 32 nt, Homo Sapiens
ugaagaccaucccauuacuuaugacccaugag

SEQ ID NO: 36975 - RNA, 32 nt, Homo Sapiens
cccccacuuccacuccccucuacucucucuag

SEQ ID NO: 36976 - RNA, 32 nt, Homo Sapiens
agcuggaucgaccccugagccuucaucugcag

SEQ ID NO: 36977 - RNA, 32 nt, Homo Sapiens
cgcgccgccuccccgcccucucucacuccccg

SEQ ID NO: 36978 - RNA, 32 nt, Homo Sapiens
auuguguucauuuuagcauaagcauuacaaag

SEQ ID NO: 36979 - RNA, 32 nt, Homo Sapiens
aguuuggcauuuggaaauuucaaggauguaug

SEQ ID NO: 36980 - RNA, 32 nt, Homo Sapiens
agaaauguaauacuucaaauguuugaugauua

SEQ ID NO: 36981 - RNA, 32 nt, Homo Sapiens
gugcuugaggcgggaccgaggcgcacagagac

SEQ ID NO: 36982 - RNA, 32 nt, Homo Sapiens
cugcuguuuccauggcccagcauucuccaccc

SEQ ID NO: 36983 - RNA, 32 nt, Homo Sapiens
ugaagccaaugcaauuuuucuuucuccacccc

SEQ ID NO: 36984 - RNA, 32 nt, Homo Sapiens
uaucccagugaacaguguguauuuuuaaaagc

SEQ ID NO: 36985 - RNA, 32 nt, Homo Sapiens
cuugcaaguauguuuuagcauguguuugguuc

SEQ ID NO: 36986 - RNA, 32 nt, Homo Sapiens
ugcaacccacccaaggaggcuacuggaucggg

SEQ ID NO: 36987 - RNA, 32 nt, Homo Sapiens
uuaaaugguguuggccauuuccccucacuuua

SEQ ID NO: 36988 - RNA, 32 nt, Homo Sapiens
aggaagggaaaggccugcaucuugugcucagu

SEQ ID NO: 36989 - RNA, 32 nt, Homo Sapiens
ggguauaagauuuuaauguaauaggucaaaaa

SEQ ID NO: 36990 - RNA, 32 nt, Homo Sapiens
gagaaaagaacaaggcuccaaaaaagaaagaa

SEQ ID NO: 36991 - RNA, 32 nt, Homo Sapiens
uauugaauaagccauuucuacugcuuacucau

SEQ ID NO: 36992 - RNA, 32 nt, Homo Sapiens
ugaggcccuucacccaccaucuacgccauaua

SEQ ID NO: 36993 - RNA, 32 nt, Homo Sapiens
uucuacaguuuaucuuuuauuuucugcaaauu

SEQ ID NO: 36994 - RNA, 30 nt, Homo Sapiens
cacaggaacagcauggaggaaaccgccccc

SEQ ID NO: 36995 - RNA, 32 nt, Homo Sapiens
ugcucacccguguccccgccccgccccuccgu

SEQ ID NO: 36996 - RNA, 32 nt, Homo Sapiens
cacugucccaggucccaggucccggcccggag

SEQ ID NO: 36997 - RNA, 32 nt, Homo Sapiens
uuuuauuugauucagcuaaauuuuauguguug

SEQ ID NO: 36998 - RNA, 32 nt, Homo Sapiens
uucucuuaaugauuuugugugcaucuuuaauc

SEQ ID NO: 36999 - RNA, 31 nt, Homo Sapiens
uccucccucaaugguagguugaaggauuggu

SEQ ID NO: 37000 - RNA, 32 nt, Homo Sapiens
gagccuuaaauaaaucuccaugcugaaaaaug

SEQ ID NO: 37001 - RNA, 32 nt, Homo Sapiens
cacaggcccaaggggcacuguccugucugcag

SEQ ID NO: 37002 - RNA, 32 nt, Homo Sapiens
cucuguucuaaaacguaagacucggggguugg

SEQ ID NO: 37003 - RNA, 32 nt, Homo Sapiens
guuacugccugaauggaguccuggacgacauu

SEQ ID NO: 37004 - RNA, 32 nt, Homo Sapiens
gggccaggccccacuggggaggccacaguucu

SEQ ID NO: 37005 - RNA, 32 nt, Homo Sapiens
cucagcaugaggaggaggagacccuggccaca

SEQ ID NO: 37006 - RNA, 32 nt, Homo Sapiens
uuauguccauuucaguugaccagccgcuggug

SEQ ID NO: 37007 - RNA, 32 nt, Homo Sapiens
gauggcgcccgcggcggccguggcggccugag

SEQ ID NO: 37008 - RNA, 32 nt, Homo Sapiens
cuuagcuccauggacguaacugcuacagaaga

SEQ ID NO: 37009 - RNA, 32 nt, Homo Sapiens
gagggcccuguuggagccuuuggaccuauagc

SEQ ID NO: 37010 - RNA, 32 nt, Homo Sapiens
ggcugggagcagccggucccuggggaauaugc

SEQ ID NO: 37011 - RNA, 32 nt, Homo Sapiens
guugcaagaauauuuuauuuuaauuuuuugga

SEQ ID NO: 37012 - RNA, 32 nt, Homo Sapiens
gggcgccucacagcagccgcggcacaggggcc

SEQ ID NO: 37013 - RNA, 32 nt, Homo Sapiens
uggagcgggcgcggcuucgcggaacccggcgc

SEQ ID NO: 37014 - RNA, 30 nt, Homo Sapiens
uccauagagaaaacgcacagcucagaaagg

SEQ ID NO: 37015 - RNA, 32 nt, Homo Sapiens
ucuucaguauauauuuuucuaagaacagauuc

SEQ ID NO: 37016 - RNA, 32 nt, Homo Sapiens
aaaucacaagguggugcccuugucuccaaauc

SEQ ID NO: 37017 - RNA, 32 nt, Homo Sapiens
uugaaacuguuguuuuuuaacuuagcaggcag

SEQ ID NO: 37018 - RNA, 32 nt, Homo Sapiens
ggggcggcgcucccggcccaucccuuagcccc

SEQ ID NO: 37019 - RNA, 32 nt, Homo Sapiens
gugccgcucuguucucuuuccuuccccuccca

SEQ ID NO: 37020 - RNA, 32 nt, Homo Sapiens
ucuccucgcaguggcccuggcucccaccuccc

SEQ ID NO: 37021 - RNA, 31 nt, Homo Sapiens
auaaaagaaauugggagaguauaucauuuua

SEQ ID NO: 37022 - RNA, 32 nt, Homo Sapiens
guuugacaaaaauacuugaaucuuggaccucu

SEQ ID NO: 37023 - RNA, 32 nt, Homo Sapiens
aaguuuguuguaggagaaaugacugcgguaau

SEQ ID NO: 37024 - RNA, 32 nt, Homo Sapiens
agcuuauugggaauuauauauuccuuaaaaua

SEQ ID NO: 37025 - RNA, 32 nt, Homo Sapiens
gaaaggaggagcugcgcagaaggcagagcccc

SEQ ID NO: 37026 - RNA, 32 nt, Homo Sapiens
gacagaaauaccauaugucaguggaguuuaaa

SEQ ID NO: 37027 - RNA, 32 nt, Homo Sapiens
acugacgccucuucauucuccccugcuccauc

SEQ ID NO: 37028 - RNA, 32 nt, Homo Sapiens
cagagaaaugcaaaucaaaaccacagugagau

SEQ ID NO: 37029 - RNA, 32 nt, Homo Sapiens
gggggacaauguacagcauucuggccauccac

SEQ ID NO: 37030 - RNA, 32 nt, Homo Sapiens
cgcugcaugcagcgcgcuggcuccagcggugg

SEQ ID NO: 37031 - RNA, 32 nt, Homo Sapiens
gcauuuacacauuuuuaauguauuaaaauuug

SEQ ID NO: 37032 - RNA, 32 nt, Homo Sapiens
ugaacagacuaaaaggaauuuagaauccuaac

SEQ ID NO: 37033 - RNA, 32 nt, Homo Sapiens
caaugccuuguugugccucaauaaaaaaguua

SEQ ID NO: 37034 - RNA, 32 nt, Homo Sapiens
ugcuucccggcaugcaugacuaauagugaguu

SEQ ID NO: 37035 - RNA, 32 nt, Homo Sapiens
cauugcccuccugggcacccccgguggacagc

SEQ ID NO: 37036 - RNA, 28 nt, Homo Sapiens
cuccgggggcggccauaccgaggaggcg

SEQ ID NO: 37037 - RNA, 30 nt, Homo Sapiens
cagcaccaugcucuucuauucuuuuuucaa

SEQ ID NO: 37038 - RNA, 32 nt, Homo Sapiens
ccaccccccacccccugcuuccccucacugcc

SEQ ID NO: 37039 - RNA, 32 nt, Homo Sapiens
caagauucagaauugaugguuguauaagaacu

SEQ ID NO: 37040 - RNA, 32 nt, Homo Sapiens
aaaucacacauaacacuucauucuaguaguua

SEQ ID NO: 37041 - RNA, 32 nt, Homo Sapiens
cacgucgaccuaacccaauauuauugguauua

SEQ ID NO: 37042 - RNA, 32 nt, Homo Sapiens
ccaagcacaacuacgacgauccugucccugcc

SEQ ID NO: 37043 - RNA, 32 nt, Homo Sapiens
gccuuauaaaacaaaaugaaagcagguuaaga

SEQ ID NO: 37044 - RNA, 32 nt, Homo Sapiens
aagcuccaagcagcacugcuccccucugacag

SEQ ID NO: 37045 - RNA, 32 nt, Homo Sapiens
acuuucaguuuaggggaaaugugaaucaauag

SEQ ID NO: 37046 - RNA, 32 nt, Homo Sapiens
ccuggggggucucagcaauucuguggcagcac

SEQ ID NO: 37047 - RNA, 32 nt, Homo Sapiens
cucccagguagucagagugagcuacauccugc

SEQ ID NO: 37048 - RNA, 32 nt, Homo Sapiens
acaugcuuguuauucagaguauaauaaaguuu

SEQ ID NO: 37049 - RNA, 32 nt, Homo Sapiens
aagcugcuggagcugguguugcagcuuguggg

SEQ ID NO: 37050 - RNA, 32 nt, Homo Sapiens
aaaaaaaaaaaaagcugaucucuaucagacuc

SEQ ID NO: 37051 - RNA, 32 nt, Homo Sapiens
gacugccggccgccgggacccgaagcggaggu

SEQ ID NO: 37052 - RNA, 32 nt, Homo Sapiens
agcgagagggggaagaggagcgugcaagcgga

SEQ ID NO: 37053 - RNA, 32 nt, Homo Sapiens
cuuugguuuuagcaguucuuugaaaagcaaac

SEQ ID NO: 37054 - RNA, 32 nt, Homo Sapiens
cuuuuguuuucucuccuuuuacuugaaaagcu

SEQ ID NO: 37055 - RNA, 32 nt, Homo Sapiens
aguuuuuauaguuauuaaauguuucaaaauag

SEQ ID NO: 37056 - RNA, 32 nt, Homo Sapiens
ucuccaaaauuccucuugguauucuuuucucg

SEQ ID NO: 37057 - RNA, 32 nt, Homo Sapiens
acuaaugacaaaccucuuuuuaagaugguaga

SEQ ID NO: 37058 - RNA, 32 nt, Homo Sapiens
uggggcacccucggccugggcggacccagggg

SEQ ID NO: 37059 - RNA, 32 nt, Homo Sapiens
uuuuucacaauuuuauguaacuuuauaaagua

SEQ ID NO: 37060 - RNA, 32 nt, Homo Sapiens
cuccugaguccuccacucgcaucucccucccc

SEQ ID NO: 37061 - RNA, 32 nt, Homo Sapiens
cgcggucccagcccagggcgcggccgcaacca

SEQ ID NO: 37062 - RNA, 32 nt, Homo Sapiens
cugaguuccugagaccgugggcacauacccca

SEQ ID NO: 37063 - RNA, 32 nt, Homo Sapiens
acaaggaggccccugacucggaugcugagggc

SEQ ID NO: 37064 - RNA, 32 nt, Homo Sapiens
ggacucaggugggaugauaucuagacacucug

SEQ ID NO: 37065 - RNA, 32 nt, Homo Sapiens
gacuugauuuccccauuguuuaaucaucacca

SEQ ID NO: 37066 - RNA, 32 nt, Homo Sapiens
ucucggugcccucuccuuuucguuuccggaaa

SEQ ID NO: 37067 - RNA, 32 nt, Homo Sapiens
ugcugagguauauaaaugaugcuacaacuuuc

SEQ ID NO: 37068 - RNA, 32 nt, Homo Sapiens
auaagagugucuaccugcucaggucuggguuc

SEQ ID NO: 37069 - RNA, 32 nt, Homo Sapiens
aguggucgagcuugggcuacccugcccgucuc

SEQ ID NO: 37070 - RNA, 32 nt, Homo Sapiens
ggucuccggaagcucgucgcaggccaucugug

SEQ ID NO: 37071 - RNA, 30 nt, Homo Sapiens
aauaggauuugcccugccugucucacaggc

SEQ ID NO: 37072 - RNA, 32 nt, Homo Sapiens
uuaaaguagacacccgcccuugccucagagaa

SEQ ID NO: 37073 - RNA, 32 nt, Homo Sapiens
aggcagcggcagcggcagcggcaguaagaggg

SEQ ID NO: 37074 - RNA, 32 nt, Homo Sapiens
aaagauauagcaaaugaagaaauauuuuaagg

SEQ ID NO: 37075 - RNA, 32 nt, Homo Sapiens
caugccuaauccuagcacuuugggaggccgag

SEQ ID NO: 37076 - RNA, 32 nt, Homo Sapiens
cuggcauguuuuacugugaacacuuuuguuau

SEQ ID NO: 37077 - RNA, 32 nt, Homo Sapiens
agagugagcaggcaagucucuucagauuucug

SEQ ID NO: 37078 - RNA, 32 nt, Homo Sapiens
acacgcucggcagcugcggggagcccggcagc

SEQ ID NO: 37079 - RNA, 32 nt, Homo Sapiens
agauuuggauauuuuuaauuuccaggcauagc

SEQ ID NO: 37080 - RNA, 32 nt, Homo Sapiens
uggauucuaccauagacucugucauuuuguag

SEQ ID NO: 37081 - RNA, 32 nt, Homo Sapiens
aaauagaaauaccuucauuuugaaagaaguuu

SEQ ID NO: 37082 - RNA, 32 nt, Homo Sapiens
ugcugagauaaggaaugcaucacucugccaga

SEQ ID NO: 37083 - RNA, 30 nt, Homo Sapiens
ugugcuuucuauuguacagaagcucuucgu

SEQ ID NO: 37084 - RNA, 32 nt, Homo Sapiens
caauacugaaagauuaaaauggggagguugca

SEQ ID NO: 37085 - RNA, 32 nt, Homo Sapiens
gucaggauaucuggaacaaaauauggagguga

SEQ ID NO: 37086 - RNA, 32 nt, Homo Sapiens
gaaugccuuucuuuucuuguuuauaaugguca

SEQ ID NO: 37087 - RNA, 32 nt, Homo Sapiens
gagucgcagacacuaugcugccucccauggcc

SEQ ID NO: 37088 - RNA, 32 nt, Homo Sapiens
aggcaaguggaucaccugaggucgggaguucg

SEQ ID NO: 37089 - RNA, 32 nt, Homo Sapiens
ggcagagggugggccuuaggacgggucucccu

SEQ ID NO: 37090 - RNA, 32 nt, Homo Sapiens
gagggccccuccccuguccccaccucagugcc

SEQ ID NO: 37091 - RNA, 32 nt, Homo Sapiens
caauauuaaaagauuauaggaacugagguuua

SEQ ID NO: 37092 - RNA, 32 nt, Homo Sapiens
aagucucugugugauggaaaacaucaagguua

SEQ ID NO: 37093 - RNA, 32 nt, Homo Sapiens
ucucagaggagcugagaguuuuguugaaugua

SEQ ID NO: 37094 - RNA, 30 nt, Homo Sapiens
ccaagauggaguuuucuggaagaaagcgga

SEQ ID NO: 37095 - RNA, 32 nt, Homo Sapiens
agagguggcuguggacuuccucuacuucuccu

SEQ ID NO: 37096 - RNA, 32 nt, Homo Sapiens
ggcuauaucagauaccauuuaugaaacauucu

SEQ ID NO: 37097 - RNA, 32 nt, Homo Sapiens
gcuagugagucgcggcgccgcgcacugguggu

SEQ ID NO: 37098 - RNA, 32 nt, Homo Sapiens
cgcagcggcggaacaccaccacgggugcuucg

SEQ ID NO: 37099 - RNA, 32 nt, Homo Sapiens
auuugccaaaaccaccugucgcucccaagcca

SEQ ID NO: 37100 - RNA, 32 nt, Homo Sapiens
uaugugcauuuucuguauuguuaugauuugac

SEQ ID NO: 37101 - RNA, 32 nt, Homo Sapiens
ccaucuguuuuuauuccuaucauuucaauuug

SEQ ID NO: 37102 - RNA, 32 nt, Homo Sapiens
uugugacauagauuauacuacuacuaauuuuu

SEQ ID NO: 37103 - RNA, 32 nt, Homo Sapiens
ucccagucaguccggaggcugcggcugcagaa

SEQ ID NO: 37104 - RNA, 32 nt, Homo Sapiens
gggcuuggcugccagcuccgcggcccgggcaa

SEQ ID NO: 37105 - RNA, 32 nt, Homo Sapiens
ucagccuagggacuccacguaccccagcuggg

SEQ ID NO: 37106 - RNA, 32 nt, Homo Sapiens
cgcuugccugccagccuucucaucugcaagcc

SEQ ID NO: 37107 - RNA, 32 nt, Homo Sapiens
ggaugagcucacgcccgcgucugcggcucucu

SEQ ID NO: 37108 - RNA, 32 nt, Homo Sapiens
uuuuggguuccauuuggugggugggggaggaa

SEQ ID NO: 37109 - RNA, 32 nt, Homo Sapiens
gugguuuuaguuggugcuuucagaacugcugc

SEQ ID NO: 37110 - RNA, 32 nt, Homo Sapiens
gagacaauaaggcaacucuacuucuugcagga

SEQ ID NO: 37111 - RNA, 32 nt, Homo Sapiens
uggcggaagaucugcgcaaagcccuuggggag

SEQ ID NO: 37112 - RNA, 32 nt, Homo Sapiens
gcugugaagcagccuccuagcuucggaaguac

SEQ ID NO: 37113 - RNA, 32 nt, Homo Sapiens
guuuucuuucccuuucacaguaacuuuaugua

SEQ ID NO: 37114 - RNA, 32 nt, Homo Sapiens
gaguucacugaggcccccacucugccauuuug

SEQ ID NO: 37115 - RNA, 32 nt, Homo Sapiens
ugaagaucuugcucuucagugcugaaaaugga

SEQ ID NO: 37116 - RNA, 32 nt, Homo Sapiens
ccccaugcugucugcccugccagcaucucagc

SEQ ID NO: 37117 - RNA, 32 nt, Homo Sapiens
cauucgucauuuccucaucugcacagucagcu

SEQ ID NO: 37118 - RNA, 32 nt, Homo Sapiens
aacaagaaaacaaaccacauacuuuugaagug

SEQ ID NO: 37119 - RNA, 32 nt, Homo Sapiens
uauuuaaggggagcaggagugcagaacaaaca

SEQ ID NO: 37120 - RNA, 32 nt, Homo Sapiens
guauuccuccacugggcugggccacggugccc

SEQ ID NO: 37121 - RNA, 32 nt, Homo Sapiens
cuuccacuccagcaucggaucccggaaaggca

SEQ ID NO: 37122 - RNA, 28 nt, Homo Sapiens
ucuggggggcggcgggagcugagcgagu

SEQ ID NO: 37123 - RNA, 32 nt, Homo Sapiens
uaccugaaauuuaaauauaccgucucauacuu

SEQ ID NO: 37124 - RNA, 32 nt, Homo Sapiens
auauauauauauauuuuaaaauauaucggaua

SEQ ID NO: 37125 - RNA, 32 nt, Homo Sapiens
ggauuacuucgugguagcugggcuugcaggga

SEQ ID NO: 37126 - RNA, 32 nt, Homo Sapiens
cauggcugaaauaguuuguaauugucugaguc

SEQ ID NO: 37127 - RNA, 30 nt, Homo Sapiens
accagguggggcgggucguggcggggggca

SEQ ID NO: 37128 - RNA, 32 nt, Homo Sapiens
acucaccccagugcccucuggaugcagguguu

SEQ ID NO: 37129 - RNA, 32 nt, Homo Sapiens
agugcuuccuuccuugccccaucuuccuccca

SEQ ID NO: 37130 - RNA, 29 nt, Homo Sapiens
gcuugugcggcuuuccugcuggaguccau

SEQ ID NO: 37131 - RNA, 32 nt, Homo Sapiens
uccaccccuaccccuuuuucccggggaaaggg

SEQ ID NO: 37132 - RNA, 32 nt, Homo Sapiens
ugaggggagcagcagcuucuguugaacuuugu

SEQ ID NO: 37133 - RNA, 32 nt, Homo Sapiens
auguuuaaauuaacuuuuuauugaauguacag

SEQ ID NO: 37134 - RNA, 32 nt, Homo Sapiens
agacgagauugugccacugcacucuagccugg

SEQ ID NO: 37135 - RNA, 32 nt, Homo Sapiens
cccagcucugcccccaucguguuucucauuuc

SEQ ID NO: 37136 - RNA, 32 nt, Homo Sapiens
aguuauuuagacagaauagcacucugcaugac

SEQ ID NO: 37137 - RNA, 32 nt, Homo Sapiens
ucuagaagaacaaagaauaugguaguagauga

SEQ ID NO: 37138 - RNA, 32 nt, Homo Sapiens
aaaaaauauaaaagcuaccaaucuuuguacaa

SEQ ID NO: 37139 - RNA, 32 nt, Homo Sapiens
gaugcacacacagauauacacauggaugcacg

SEQ ID NO: 37140 - RNA, 32 nt, Homo Sapiens
cagggcuucuuggaagacccccaaagccccag

SEQ ID NO: 37141 - RNA, 32 nt, Homo Sapiens
ccugcagcuccggcucgggggcuggaaccgaa

SEQ ID NO: 37142 - RNA, 32 nt, Homo Sapiens
guagccuuuuucugcugcuuccauguacuaau

SEQ ID NO: 37143 - RNA, 32 nt, Homo Sapiens
cagauacauaucuguguauuaucucaaggaau

SEQ ID NO: 37144 - RNA, 32 nt, Homo Sapiens
gaggcuucuucagaucaaugcuugaguuugga

SEQ ID NO: 37145 - RNA, 32 nt, Homo Sapiens
ggaccuggcuaauggaguguuugaaaacugac

SEQ ID NO: 37146 - RNA, 32 nt, Homo Sapiens
aaauagcuuuaacguaugccaccucagagaua

SEQ ID NO: 37147 - RNA, 32 nt, Homo Sapiens
cccuuccagcucuauccccuuccuccuaccug

SEQ ID NO: 37148 - RNA, 32 nt, Homo Sapiens
uguaucacaauuuuaaaguguuuaauaauuga

SEQ ID NO: 37149 - RNA, 32 nt, Homo Sapiens
auauuuauuuuuguaaacuugaaguguguggu

SEQ ID NO: 37150 - RNA, 32 nt, Homo Sapiens
gcucuugguugcaaaacaaaauguugguugcu

SEQ ID NO: 37151 - RNA, 32 nt, Homo Sapiens
gguggccauggcggccagcggggcuguggaac

SEQ ID NO: 37152 - RNA, 32 nt, Homo Sapiens
ccccauccagcaugugugugucucuaucuugc

SEQ ID NO: 37153 - RNA, 32 nt, Homo Sapiens
ccauuccugccagcagugugagugauccaguu

SEQ ID NO: 37154 - RNA, 31 nt, Homo Sapiens
aaacuugggcugaguaccgcggcgggcgcga

SEQ ID NO: 37155 - RNA, 32 nt, Homo Sapiens
aaaauuuucaauguuuauuauacuguugaaag

SEQ ID NO: 37156 - RNA, 32 nt, Homo Sapiens
ggucuucaggaacucagugucugggaggaaag

SEQ ID NO: 37157 - RNA, 32 nt, Homo Sapiens
acgaggucaggagaucgagacgauccuggcca

SEQ ID NO: 37158 - RNA, 32 nt, Homo Sapiens
gaucagcaaccucagccccaccugggaauucg

SEQ ID NO: 37159 - RNA, 32 nt, Homo Sapiens
ugugcuggaugauauguugaucuguauuggau

SEQ ID NO: 37160 - RNA, 32 nt, Homo Sapiens
ccgccggccucccagccgcguucuccuccgcc

SEQ ID NO: 37161 - RNA, 32 nt, Homo Sapiens
cacgagcggcgacugcagcugcacggcgucca

SEQ ID NO: 37162 - RNA, 32 nt, Homo Sapiens
cggcuccaugcgccuggagcgcgcggguccca

SEQ ID NO: 37163 - RNA, 32 nt, Homo Sapiens
ggccguggucagcugggaucuucugccaccau

SEQ ID NO: 37164 - RNA, 32 nt, Homo Sapiens
uucauuuuuaaauggcacaucuucaaguucuu

SEQ ID NO: 37165 - RNA, 31 nt, Homo Sapiens
gaaaaugcuguguucuccagaaguacagggu

SEQ ID NO: 37166 - RNA, 32 nt, Homo Sapiens
augaggauugcuauaggaugcuauaggaugcu

SEQ ID NO: 37167 - RNA, 32 nt, Homo Sapiens
ucaugcugaugaugaugaagauaaagaugaga

SEQ ID NO: 37168 - RNA, 32 nt, Homo Sapiens
cuguggcauggcaacugacuuaccuuccccuc

SEQ ID NO: 37169 - RNA, 32 nt, Homo Sapiens
caggugaagagcaaccacaaguuuaaugaaga

SEQ ID NO: 37170 - RNA, 32 nt, Homo Sapiens
gggucuugggccugacacccaccaaggaugac

SEQ ID NO: 37171 - RNA, 32 nt, Homo Sapiens
ugguggucaggagggucgcugcuguggaaggg

SEQ ID NO: 37172 - RNA, 32 nt, Homo Sapiens
aauaucuucuauucaaaaucuuuuuuuuauuu

SEQ ID NO: 37173 - RNA, 32 nt, Homo Sapiens
cccauacaucugaguucugcaguccagugugu

SEQ ID NO: 37174 - RNA, 32 nt, Homo Sapiens
cccgccgggaugcagugggccgugggccggcg

SEQ ID NO: 37175 - RNA, 32 nt, Homo Sapiens
uuggaaacuauugauugccaacuuuuuaagga

SEQ ID NO: 37176 - RNA, 32 nt, Homo Sapiens
uggucacaucuuauuguuuauuuuuucauauc

SEQ ID NO: 37177 - RNA, 32 nt, Homo Sapiens
cggcaacaggcacaacucggccccggaacauc

SEQ ID NO: 37178 - RNA, 31 nt, Homo Sapiens
acuugcaagucacuugucugaguuaguuucc

SEQ ID NO: 37179 - RNA, 32 nt, Homo Sapiens
ccgcgccccccgccgcugucaccguuuacaua

SEQ ID NO: 37180 - RNA, 32 nt, Homo Sapiens
ccucuaaguacaauagaagugcucuuaacgga

SEQ ID NO: 37181 - RNA, 32 nt, Homo Sapiens
caccccacuccuuagugccugcaccucaccac

SEQ ID NO: 37182 - RNA, 32 nt, Homo Sapiens
gcggcaaugugaggagggucaggccgccagcc

SEQ ID NO: 37183 - RNA, 32 nt, Homo Sapiens
uauauuucuuuuuagauugucuaucuguauaa

SEQ ID NO: 37184 - RNA, 32 nt, Homo Sapiens
ccaguccgcgcgcaccgcgucugcguccccga

SEQ ID NO: 37185 - RNA, 32 nt, Homo Sapiens
ugacuccgauccuggaggacaaggcggguggg

SEQ ID NO: 37186 - RNA, 32 nt, Homo Sapiens
aucuugcuguuuucuuuuuuuuaaaaaaaugg

SEQ ID NO: 37187 - RNA, 32 nt, Homo Sapiens
aacuuggcauuugcaggucaagcaggaagcag

SEQ ID NO: 37188 - RNA, 32 nt, Homo Sapiens
aggggcgcgcagcagcagcuccucaacgccgc

SEQ ID NO: 37189 - RNA, 32 nt, Homo Sapiens
uuagcucucacuuuucugguucuuauccauua

SEQ ID NO: 37190 - RNA, 32 nt, Homo Sapiens
uauacaaaaauggaauugauaaaccauuuuuu

SEQ ID NO: 37191 - RNA, 31 nt, Homo Sapiens
acuuuuccaaagaaaaagaacuauugacaac

SEQ ID NO: 37192 - RNA, 32 nt, Homo Sapiens
gggggucccuccccucuccuguaccccuugga

SEQ ID NO: 37193 - RNA, 32 nt, Homo Sapiens
uuucuggaaaauuggcagagaccaagcccugc

SEQ ID NO: 37194 - RNA, 32 nt, Homo Sapiens
acaauacagguccaccugaggggcugcagggu

SEQ ID NO: 37195 - RNA, 32 nt, Homo Sapiens
uuauagucuuauaaucuuuugugccaaauccu

SEQ ID NO: 37196 - RNA, 32 nt, Homo Sapiens
uauauuucggagggaaaggauuauuuggcccc

SEQ ID NO: 37197 - RNA, 32 nt, Homo Sapiens
gaagggagcauguuuuuaucuaugauacuuag

SEQ ID NO: 37198 - RNA, 32 nt, Homo Sapiens
aacggcccggaucccggcagcggccugacccg

SEQ ID NO: 37199 - RNA, 32 nt, Homo Sapiens
uuugccuugacaaauuuaaacuuauuuuucuu

SEQ ID NO: 37200 - RNA, 32 nt, Homo Sapiens
aacaugaaaaggagagacuggccuagccuccc

SEQ ID NO: 37201 - RNA, 32 nt, Homo Sapiens
cagcagcucuucucaaggcuaguugugacaga

SEQ ID NO: 37202 - RNA, 32 nt, Homo Sapiens
gggacagacuaagggcgcuugucccauccugg

SEQ ID NO: 37203 - RNA, 32 nt, Homo Sapiens
cugugcaaagggaaaaaggaaaugggcuggga

SEQ ID NO: 37204 - RNA, 32 nt, Homo Sapiens
auguuucccagggcaacuugaggucugacuuu

SEQ ID NO: 37205 - RNA, 32 nt, Homo Sapiens
ugcaauuuccuuuuuuguuauuauuacuuauu

SEQ ID NO: 37206 - RNA, 32 nt, Homo Sapiens
ccaccuaggaaccugauguauaccugaagucc

SEQ ID NO: 37207 - RNA, 32 nt, Homo Sapiens
ggccggucuaauguaggcaaguaaggcagcgu

SEQ ID NO: 37208 - RNA, 32 nt, Homo Sapiens
cgcggcugcucccgagcgcaucuucggcccgg

SEQ ID NO: 37209 - RNA, 32 nt, Homo Sapiens
uggacuuuaagugaccauucaagaaaagauga

SEQ ID NO: 37210 - RNA, 32 nt, Homo Sapiens
uuggagaaaaguacuuuauauuuucaguguuu

SEQ ID NO: 37211 - RNA, 32 nt, Homo Sapiens
aacaacuuaaaaguaagaaguagugguucauc

SEQ ID NO: 37212 - RNA, 32 nt, Homo Sapiens
cuuccugcggcaggcucaccccugccuguggg

SEQ ID NO: 37213 - RNA, 32 nt, Homo Sapiens
aaaaucucucccuggaggagaaugcagacaga

SEQ ID NO: 37214 - RNA, 30 nt, Homo Sapiens
cucggugaacggcgcgcggggucucuccug

SEQ ID NO: 37215 - RNA, 32 nt, Homo Sapiens
aacugaaaggcagaaaugaaauccacaagcag

SEQ ID NO: 37216 - RNA, 32 nt, Homo Sapiens
uggcccccagcaccuccuccccugggaggccu

SEQ ID NO: 37217 - RNA, 32 nt, Homo Sapiens
uuuucuuauaugcuguugcagauauauguaua

SEQ ID NO: 37218 - RNA, 32 nt, Homo Sapiens
aauaaaaggugaaaauguuacuguuuaguaua

SEQ ID NO: 37219 - RNA, 28 nt, Homo Sapiens
gagaugcuguugccgcugcugcugcugc

SEQ ID NO: 37220 - RNA, 28 nt, Homo Sapiens
ggggagguuacagguaccaguucuuuaa

SEQ ID NO: 37221 - RNA, 32 nt, Homo Sapiens
agccaccauucugcuuucugucucucugguuu

SEQ ID NO: 37222 - RNA, 32 nt, Homo Sapiens
cuccucggggcguggcguggcggugaaggggu

SEQ ID NO: 37223 - RNA, 32 nt, Homo Sapiens
aggaaaucugucugccuugacucuguauuuuc

SEQ ID NO: 37224 - RNA, 32 nt, Homo Sapiens
gagagcacucccuccagcuggccccugcugcu

SEQ ID NO: 37225 - RNA, 32 nt, Homo Sapiens
cagcagccuccugaacuccccccucccaccca

SEQ ID NO: 37226 - RNA, 32 nt, Homo Sapiens
cuuuguccuccccaccccccagcccuagggac

SEQ ID NO: 37227 - RNA, 32 nt, Homo Sapiens
uguuauauuaaaagugcacaaaaacugagagu

SEQ ID NO: 37228 - RNA, 32 nt, Homo Sapiens
uuaccuguuuuaaaaugauaauguuggcaucu

SEQ ID NO: 37229 - RNA, 32 nt, Homo Sapiens
aacagguggaauccgggcuggagccggagcuc

SEQ ID NO: 37230 - RNA, 32 nt, Homo Sapiens
uggggggcucccugggguugcugcggggccug

SEQ ID NO: 37231 - RNA, 32 nt, Homo Sapiens
gaauuuaauguuuaucagcucuauguauuccu

SEQ ID NO: 37232 - RNA, 32 nt, Homo Sapiens
ggacuuucaacacacuggucucuuuuaauuua

SEQ ID NO: 37233 - RNA, 32 nt, Homo Sapiens
aaaugaaaauguuuaaauuaacuguguuguac

SEQ ID NO: 37234 - RNA, 32 nt, Homo Sapiens
uugcaaacaacacuuuaaaacacuggaaccca

SEQ ID NO: 37235 - RNA, 32 nt, Homo Sapiens
ccccgccggcagcgugggcgccaugagcagcu

SEQ ID NO: 37236 - RNA, 32 nt, Homo Sapiens
gugacggggacgucgugaggggcgcgcuguga

SEQ ID NO: 37237 - RNA, 32 nt, Homo Sapiens
ugcccauaaucccagcacuuugggagauggag

SEQ ID NO: 37238 - RNA, 32 nt, Homo Sapiens
gaacugcagaaguugaagaaaaaauuggagau

SEQ ID NO: 37239 - RNA, 32 nt, Homo Sapiens
ccugugcagggcccggccgcccuccaucuggg

SEQ ID NO: 37240 - RNA, 32 nt, Homo Sapiens
caucuucugauuucuucucaccuauauucccu

SEQ ID NO: 37241 - RNA, 32 nt, Homo Sapiens
ucucaggaguguucaaggguggagggcaggga

SEQ ID NO: 37242 - RNA, 32 nt, Homo Sapiens
ucuggauuucuuuucuaucaccuagaugcuuc

SEQ ID NO: 37243 - RNA, 32 nt, Homo Sapiens
uauguuuguguuaauguucuaugugauggcuu

SEQ ID NO: 37244 - RNA, 32 nt, Homo Sapiens
ucugaggcucugcugugagcagucuccugcau

SEQ ID NO: 37245 - RNA, 32 nt, Homo Sapiens
cgcaucgugaugggcagcugguggcucuucac

SEQ ID NO: 37246 - RNA, 32 nt, Homo Sapiens
auucaaggaaacaaaguacagguaguuuuuga

SEQ ID NO: 37247 - RNA, 32 nt, Homo Sapiens
agcuuucaggagggaagaaagaugucagauga

SEQ ID NO: 37248 - RNA, 32 nt, Homo Sapiens
cucccuguccacugcccucccuggucuggccc

SEQ ID NO: 37249 - RNA, 32 nt, Homo Sapiens
cccaugcccaaccccuguggccgccgccccuc

SEQ ID NO: 37250 - RNA, 32 nt, Homo Sapiens
auaucaauguuaaugauaugucuuggccacua

SEQ ID NO: 37251 - RNA, 32 nt, Homo Sapiens
ugaggaaaagcaugaauuuguuaacagauuuu

SEQ ID NO: 37252 - RNA, 32 nt, Homo Sapiens
accgccccccuuuccgcccgcgucagggucug

SEQ ID NO: 37253 - RNA, 32 nt, Homo Sapiens
acccacaucagcugccucuagcccuuaaaaua

SEQ ID NO: 37254 - RNA, 32 nt, Homo Sapiens
caagcccuuagcucaagaauacaggaucaccu

SEQ ID NO: 37255 - RNA, 32 nt, Homo Sapiens
aaaucaaaauacuccuaacaaaaccagugauu

SEQ ID NO: 37256 - RNA, 32 nt, Homo Sapiens
uugaguggcacuuagaaaauggcgcuauucgu

SEQ ID NO: 37257 - RNA, 32 nt, Homo Sapiens
gaguaucuggugcacaaauaggugucccacag

SEQ ID NO: 37258 - RNA, 32 nt, Homo Sapiens
gaaggaccaacccaugcccugccaagccugga

SEQ ID NO: 37259 - RNA, 32 nt, Homo Sapiens
aacacagaauaaagccagcaggaagaggcagc

SEQ ID NO: 37260 - RNA, 32 nt, Homo Sapiens
ugaaccugaccagugagcugcugcagaaaugc

SEQ ID NO: 37261 - RNA, 32 nt, Homo Sapiens
ucuacuacauggaagaccucauuuugaaggga

SEQ ID NO: 37262 - RNA, 32 nt, Homo Sapiens
acuuuauuuauuucuaguucuuuccucccccu

SEQ ID NO: 37263 - RNA, 32 nt, Homo Sapiens
cacucauaauuugaccaaaauuuuaaaaaacu

SEQ ID NO: 37264 - RNA, 32 nt, Homo Sapiens
ugcagccgaggggcgagcgcgcgggcucgcac

SEQ ID NO: 37265 - RNA, 30 nt, Homo Sapiens
gcaaucaugacuguuggcaagaguagcaag

SEQ ID NO: 37266 - RNA, 32 nt, Homo Sapiens
ucccggcgccagcagccagcccgcugcguccc

SEQ ID NO: 37267 - RNA, 32 nt, Homo Sapiens
uguuggcuuagaauaaagaaacaaagacuauc

SEQ ID NO: 37268 - RNA, 32 nt, Homo Sapiens
guuccugucuucauuguuucagguauuucuuu

SEQ ID NO: 37269 - RNA, 32 nt, Homo Sapiens
uuguuucuugucuauuuugucugacuauagau

SEQ ID NO: 37270 - RNA, 32 nt, Homo Sapiens
cagugaagaaucugaggcccagagagguuggg

SEQ ID NO: 37271 - RNA, 32 nt, Homo Sapiens
uaguaguaguagcagcagcaauaguagaagua

SEQ ID NO: 37272 - RNA, 31 nt, Homo Sapiens
aacccaccugcgucagcucaggcacccagag

SEQ ID NO: 37273 - RNA, 27 nt, Homo Sapiens
guauggauaugggaaaccaacauccuu

SEQ ID NO: 37274 - RNA, 32 nt, Homo Sapiens
agggaaaaccuuccucaacaucacgccagcug

SEQ ID NO: 37275 - RNA, 32 nt, Homo Sapiens
gauccacaucacacccuguuuauuuuccuuaa

SEQ ID NO: 37276 - RNA, 32 nt, Homo Sapiens
ggcgcaggagcaucgcucggaggggacaaggg

SEQ ID NO: 37277 - RNA, 32 nt, Homo Sapiens
ggcucagcuccucccccugccguugguuaaua

SEQ ID NO: 37278 - RNA, 32 nt, Homo Sapiens
ccuuugugggauucaguguuaucccccaggaa

SEQ ID NO: 37279 - RNA, 32 nt, Homo Sapiens
aagaaaacacuggggaaaaucuccaggacauu

SEQ ID NO: 37280 - RNA, 32 nt, Homo Sapiens
aguagaugaaguucuugauggagcuguaaagc

SEQ ID NO: 37281 - RNA, 32 nt, Homo Sapiens
uucagugauccaugcauagaauaugaaaauaa

SEQ ID NO: 37282 - RNA, 32 nt, Homo Sapiens
uuccucacccgcucccaccucacaccccucag

SEQ ID NO: 37283 - RNA, 32 nt, Homo Sapiens
ggagaaaguaagucuuuuuuuuuuccaaauua

SEQ ID NO: 37284 - RNA, 32 nt, Homo Sapiens
uggugaagaaaaugcuuuauuuuuguggcagg

SEQ ID NO: 37285 - RNA, 32 nt, Homo Sapiens
cuuucugggggaagaaagauuugguggaggga

SEQ ID NO: 37286 - RNA, 32 nt, Homo Sapiens
ucuguuggcuguuuuucuuuucuuggaguggu

SEQ ID NO: 37287 - RNA, 32 nt, Homo Sapiens
ucauuugaaaauuuauuauucugccaaauuga

SEQ ID NO: 37288 - RNA, 32 nt, Homo Sapiens
gagcuguuguauuaccuggggugucuacugca

SEQ ID NO: 37289 - RNA, 29 nt, Homo Sapiens
ugugauggccucggagcgcccggagccgg

SEQ ID NO: 37290 - RNA, 32 nt, Homo Sapiens
gggugagaauaaagacgucuccucaggacccu

SEQ ID NO: 37291 - RNA, 32 nt, Homo Sapiens
ucuuaaagaauauuuucaaagcuuaaauuugu

SEQ ID NO: 37292 - RNA, 32 nt, Homo Sapiens
agccaggcguggugacucaugccuguaauccc

SEQ ID NO: 37293 - RNA, 32 nt, Homo Sapiens
cuguuacuagauuauauagagcacaugugcuu

SEQ ID NO: 37294 - RNA, 32 nt, Homo Sapiens
ggugguccgaauucugcccucaaggcaagaua

SEQ ID NO: 37295 - RNA, 32 nt, Homo Sapiens
uuugagggacagagaccaagcuagauccuuuu

SEQ ID NO: 37296 - RNA, 32 nt, Homo Sapiens
ugcuguuaggggcuaccaugggaccagcucug

SEQ ID NO: 37297 - RNA, 32 nt, Homo Sapiens
uuauuguuaucuuccaggugucuaaaucucca

SEQ ID NO: 37298 - RNA, 32 nt, Homo Sapiens
guguuaaugcaaaguuuacagacuuuugauau

SEQ ID NO: 37299 - RNA, 32 nt, Homo Sapiens
cagaauccugaacacggcucuagauaaggagg

SEQ ID NO: 37300 - RNA, 32 nt, Homo Sapiens
gcaagcagcucuugccccuagcuucccuggca

SEQ ID NO: 37301 - RNA, 32 nt, Homo Sapiens
gaagccaccagaggagcagcuuccuggcuaga

SEQ ID NO: 37302 - RNA, 32 nt, Homo Sapiens
cucgcacucaaucccgccacacccagggcuua

SEQ ID NO: 37303 - RNA, 32 nt, Homo Sapiens
aaaugaauauaaaaaucagcucuuggaauaua

SEQ ID NO: 37304 - RNA, 32 nt, Homo Sapiens
acaaaauuaccuggaacauacacgccccaagu

SEQ ID NO: 37305 - RNA, 32 nt, Homo Sapiens
aucaugguuauuuuaaaaacccuaauaagaua

SEQ ID NO: 37306 - RNA, 32 nt, Homo Sapiens
gcggcggcgggugggaaauggcggaguaucug

SEQ ID NO: 37307 - RNA, 32 nt, Homo Sapiens
acccggcucccucuccucacccuccugcaccu

SEQ ID NO: 37308 - RNA, 32 nt, Homo Sapiens
ugacuguuacuuuaacuguuagucuuaaauag

SEQ ID NO: 37309 - RNA, 32 nt, Homo Sapiens
uucuggaaggcacagggugcugcugccuccug

SEQ ID NO: 37310 - RNA, 32 nt, Homo Sapiens
acugacaggacacagcaggcuggaguuggugu

SEQ ID NO: 37311 - RNA, 32 nt, Homo Sapiens
cuuuggggccgggaacuugcggguuugaggau

SEQ ID NO: 37312 - RNA, 32 nt, Homo Sapiens
aagcccacgaggggcguuacugugcggagaug

SEQ ID NO: 37313 - RNA, 32 nt, Homo Sapiens
gauguauugcugucaucaguguggcacucugu

SEQ ID NO: 37314 - RNA, 32 nt, Homo Sapiens
guaggcuggggcuugugucuuugucauugucu

SEQ ID NO: 37315 - RNA, 32 nt, Homo Sapiens
cacacaauuccuucuuuguuaagggacauaca

SEQ ID NO: 37316 - RNA, 32 nt, Homo Sapiens
acugcaaguuuuuugucuuucuuucuuaaaag

SEQ ID NO: 37317 - RNA, 32 nt, Homo Sapiens
cccgcuagguagucccacacggcggcccucgg

SEQ ID NO: 37318 - RNA, 32 nt, Homo Sapiens
cgaguugaggauguugaacaacaugggaaggu

SEQ ID NO: 37319 - RNA, 32 nt, Homo Sapiens
uccuggcuugugcccggcacaugcuggcucga

SEQ ID NO: 37320 - RNA, 32 nt, Homo Sapiens
acauaucccagggcccucgucccgaggccgug

SEQ ID NO: 37321 - RNA, 32 nt, Homo Sapiens
caacaagguagcacacaggaccaagagcagca

SEQ ID NO: 37322 - RNA, 31 nt, Homo Sapiens
uguccuuccccauaaggagagacccugacau

SEQ ID NO: 37323 - RNA, 32 nt, Homo Sapiens
uaagaaacagaauccucuggaacuugaggaag

SEQ ID NO: 37324 - RNA, 32 nt, Homo Sapiens
ugggaaccaaacaaacaaaauauucacugaug

SEQ ID NO: 37325 - RNA, 32 nt, Homo Sapiens
uaccuauuggugaugaaguacucuguacaaca

SEQ ID NO: 37326 - RNA, 32 nt, Homo Sapiens
gcugaaagauaaagagcaaguaaaugaaucua

SEQ ID NO: 37327 - RNA, 32 nt, Homo Sapiens
ggccgggucgcagcugggcccgcggcauggac

SEQ ID NO: 37328 - RNA, 32 nt, Homo Sapiens
aagcuugaaggacugggagauguggagcgacc

SEQ ID NO: 37329 - RNA, 32 nt, Homo Sapiens
cuaaagcugcuucauccggggaggaagccugg

SEQ ID NO: 37330 - RNA, 32 nt, Homo Sapiens
cggccgaaacuuucccaagccagggugugcgg

SEQ ID NO: 37331 - RNA, 32 nt, Homo Sapiens
guagccugaguguuauacuagagaucuaaagg

SEQ ID NO: 37332 - RNA, 32 nt, Homo Sapiens
cuacagggucuucgggccccagcccuggagcu

SEQ ID NO: 37333 - RNA, 32 nt, Homo Sapiens
cgccccggcaggcgccagccaugucgaugcug

SEQ ID NO: 37334 - RNA, 32 nt, Homo Sapiens
aaucauuaugagauucaggaaaaggaaaaacu

SEQ ID NO: 37335 - RNA, 32 nt, Homo Sapiens
uuuaccccauuauaaacuucuuauugagauca

SEQ ID NO: 37336 - RNA, 32 nt, Homo Sapiens
ggggagcggggccgggaguggagcagccgccg

SEQ ID NO: 37337 - RNA, 32 nt, Homo Sapiens
uacaagaaguaaaacaagugcaacuaaaucau

SEQ ID NO: 37338 - RNA, 32 nt, Homo Sapiens
cgccuguaaccucagcacuuugggaggccgag

SEQ ID NO: 37339 - RNA, 32 nt, Homo Sapiens
ugaaucaaguguauuucaggcuuauuucaaca

SEQ ID NO: 37340 - RNA, 32 nt, Homo Sapiens
uucuuugaaguggcaccuaauaaagaaauaau

SEQ ID NO: 37341 - RNA, 32 nt, Homo Sapiens
ccuuccaccauggcaccuaagaaagcaaagaa

SEQ ID NO: 37342 - RNA, 30 nt, Homo Sapiens
ggaugggcugcuggcaugccaacucgggga

SEQ ID NO: 37343 - RNA, 32 nt, Homo Sapiens
uccuccuccuccucgcccuccccucccgaucc

SEQ ID NO: 37344 - RNA, 32 nt, Homo Sapiens
cgcagcgucgggucgcugggugcgcgggcuac

SEQ ID NO: 37345 - RNA, 32 nt, Homo Sapiens
aaugauuuguuuuuauuuguauuuuucugcuu

SEQ ID NO: 37346 - RNA, 32 nt, Homo Sapiens
cagaccaggccuuccccuagccccacaaguug

SEQ ID NO: 37347 - RNA, 32 nt, Homo Sapiens
gagagcagagggggucaugcagugagugggug

SEQ ID NO: 37348 - RNA, 32 nt, Homo Sapiens
uacaauaauguuuauuuauuauacauccagau

SEQ ID NO: 37349 - RNA, 32 nt, Homo Sapiens
uuacaauuguuauuugucaacuacaaauaaaa

SEQ ID NO: 37350 - RNA, 29 nt, Homo Sapiens
ccugcccuuuuuucauaccacaaaaguau

SEQ ID NO: 37351 - RNA, 32 nt, Homo Sapiens
cgccacccguccugcuggcagcggacuggccc

SEQ ID NO: 37352 - RNA, 32 nt, Homo Sapiens
aaagugaauccagagauuaaaaacagaaauau

SEQ ID NO: 37353 - RNA, 32 nt, Homo Sapiens
caaauuacuuggagggcugccuaggaaucuau

SEQ ID NO: 37354 - RNA, 32 nt, Homo Sapiens
cucagcuacucaggggguugaggugggaagau

SEQ ID NO: 37355 - RNA, 31 nt, Homo Sapiens
cggcggcggcgcagccgguuccggguucggc

SEQ ID NO: 37356 - RNA, 32 nt, Homo Sapiens
gccugcuggcucucccccagccccacaucccc

SEQ ID NO: 37357 - RNA, 32 nt, Homo Sapiens
ccuucccuuccuucccuucucuggaguugcua

SEQ ID NO: 37358 - RNA, 32 nt, Homo Sapiens
uuuagaaacaucuggucuaccucaguuaaaug

SEQ ID NO: 37359 - RNA, 32 nt, Homo Sapiens
cuuugugcuuugucucugcaguucuugcgccc

SEQ ID NO: 37360 - RNA, 32 nt, Homo Sapiens
gcccacgagaaacaggcugguggaggggcaga

SEQ ID NO: 37361 - RNA, 32 nt, Homo Sapiens
uucgggcgucccuccgaaacccacucgggugc

SEQ ID NO: 37362 - RNA, 32 nt, Homo Sapiens
caacuguuggauaauaacuagaucuccuguaa

SEQ ID NO: 37363 - RNA, 31 nt, Homo Sapiens
uaguguggcaaggacuuaggaguccagaagc

SEQ ID NO: 37364 - RNA, 32 nt, Homo Sapiens
gagccagucaucuccauccauccacagccaug

SEQ ID NO: 37365 - RNA, 32 nt, Homo Sapiens
cucccccguuucuccuuuuccuauccuuauag

SEQ ID NO: 37366 - RNA, 32 nt, Homo Sapiens
uuuaauggugccuauuuagaguuggaaguuga

SEQ ID NO: 37367 - RNA, 32 nt, Homo Sapiens
aaagacagaaaaggauuuaggaaggaguugcc

SEQ ID NO: 37368 - RNA, 32 nt, Homo Sapiens
acgugggcccccguggacgaugacugcagugu

SEQ ID NO: 37369 - RNA, 32 nt, Homo Sapiens
ucaggucaacugaccugaccccauuccugauc

SEQ ID NO: 37370 - RNA, 32 nt, Homo Sapiens
cguggucucuugucucuuuuuggaccaauauc

SEQ ID NO: 37371 - RNA, 32 nt, Homo Sapiens
aauaauuaucuuccugcauuuugauuucuuag

SEQ ID NO: 37372 - RNA, 32 nt, Homo Sapiens
acgugcaauucugaguuagagguaaagcccug

SEQ ID NO: 37373 - RNA, 32 nt, Homo Sapiens
gugccaucuauuccuuuuauggcaucuaucuu

SEQ ID NO: 37374 - RNA, 32 nt, Homo Sapiens
cauuauaaagagcaagcauagauggaaagugc

SEQ ID NO: 37375 - RNA, 32 nt, Homo Sapiens
cuuuaucuguuguccaacaacagugcugacug

SEQ ID NO: 37376 - RNA, 32 nt, Homo Sapiens
ccacuucuuaaaacagaacaaaacaaaaaaag

SEQ ID NO: 37377 - RNA, 32 nt, Homo Sapiens
ggccgggcgcggugacucacgccugucauccu

SEQ ID NO: 37378 - RNA, 32 nt, Homo Sapiens
uggagggggucaucaagguacacaugugccug

SEQ ID NO: 37379 - RNA, 32 nt, Homo Sapiens
gcacauaccacauagcuccauggagaugccca

SEQ ID NO: 37380 - RNA, 32 nt, Homo Sapiens
ggcgagcauggggcgccuggccucgaggccgc

SEQ ID NO: 37381 - RNA, 32 nt, Homo Sapiens
ucaaucaggcaccagcaggggcuaucagaggc

SEQ ID NO: 37382 - RNA, 32 nt, Homo Sapiens
cggcugcagaggcgcugcagcugugcuacaga

SEQ ID NO: 37383 - RNA, 32 nt, Homo Sapiens
aguuuguagaaaguggcagaugcuguucuggu

SEQ ID NO: 37384 - RNA, 32 nt, Homo Sapiens
cauauugcuuugcaauuccaggagcggcauug

SEQ ID NO: 37385 - RNA, 32 nt, Homo Sapiens
guaggggacagaggguuagggaucauguuggg

SEQ ID NO: 37386 - RNA, 32 nt, Homo Sapiens
uguaauaaaaauuuguuuaaaguuaaaaaaaa

SEQ ID NO: 37387 - RNA, 30 nt, Homo Sapiens
ccuugggcgcccguggcccugcagacucuc

SEQ ID NO: 37388 - RNA, 32 nt, Homo Sapiens
gccgggcuggcucuccuuucugugguuuuauu

SEQ ID NO: 37389 - RNA, 32 nt, Homo Sapiens
cccauuggugucauguauuagaucagccuuau

SEQ ID NO: 37390 - RNA, 32 nt, Homo Sapiens
uuauucauccuucuguacaaaaugaaaaguuu

SEQ ID NO: 37391 - RNA, 32 nt, Homo Sapiens
caccugccaaccccuguacuccccuuugcucc

SEQ ID NO: 37392 - RNA, 32 nt, Homo Sapiens
auggugagagagagggcucagaagcaggggcc

SEQ ID NO: 37393 - RNA, 32 nt, Homo Sapiens
aggagcacuguaaaacugguaggagcuauggu

SEQ ID NO: 37394 - RNA, 32 nt, Homo Sapiens
aaguucccgcggcagccgcggaucccggccaa

SEQ ID NO: 37395 - RNA, 32 nt, Homo Sapiens
cguuucaccauguuggccaggcuggucucaaa

SEQ ID NO: 37396 - RNA, 32 nt, Homo Sapiens
agcugaccgucauggacguguacgacaucgcg

SEQ ID NO: 37397 - RNA, 32 nt, Homo Sapiens
augcaguaaaaauuauaaauucuaauacaaac

SEQ ID NO: 37398 - RNA, 32 nt, Homo Sapiens
cgacacugcagcaagauugaggauaagaugga

SEQ ID NO: 37399 - RNA, 32 nt, Homo Sapiens
ccauugcuuguuuuugucagguuugucaaaga

SEQ ID NO: 37400 - RNA, 32 nt, Homo Sapiens
uagugaggccccagccuaccugcaccuccgug

SEQ ID NO: 37401 - RNA, 32 nt, Homo Sapiens
guggaacauugucugguccuagcugugguucc

SEQ ID NO: 37402 - RNA, 32 nt, Homo Sapiens
ccagcuucucccugagggcccaccagccugug

SEQ ID NO: 37403 - RNA, 32 nt, Homo Sapiens
ucaucuugaguuauaucucaccauccaucaga

SEQ ID NO: 37404 - RNA, 32 nt, Homo Sapiens
cagaaguagaaaguaaugaaaaggacaacaga

SEQ ID NO: 37405 - RNA, 32 nt, Homo Sapiens
agacugcuggagaagagaagcguguuagccca

SEQ ID NO: 37406 - RNA, 32 nt, Homo Sapiens
cggucugccugccucccugugcaguccagccc

SEQ ID NO: 37407 - RNA, 32 nt, Homo Sapiens
cccccacuuccacuccauguccccaugcuccu

SEQ ID NO: 37408 - RNA, 32 nt, Homo Sapiens
ccggguggggccuaggcgaugauccggcauua

SEQ ID NO: 37409 - RNA, 32 nt, Homo Sapiens
gcccacggccccagccgggggucuccgggauu

SEQ ID NO: 37410 - RNA, 32 nt, Homo Sapiens
agauuucuuuguuccuucuccauucccacugc

SEQ ID NO: 37411 - RNA, 32 nt, Homo Sapiens
cuaugagcccucggggccuccuccugggccuc

SEQ ID NO: 37412 - RNA, 32 nt, Homo Sapiens
uaccggaugcccccagcacuccccucucaaac

SEQ ID NO: 37413 - RNA, 32 nt, Homo Sapiens
auggcaggcucacaaaguuuauacagaauaga

SEQ ID NO: 37414 - RNA, 32 nt, Homo Sapiens
uuuuuuuguauauuauuguuuacaauaaauau

SEQ ID NO: 37415 - RNA, 32 nt, Homo Sapiens
agaauucgaaaacuuuuuaaaaauauuacuaa

SEQ ID NO: 37416 - RNA, 32 nt, Homo Sapiens
auccuuuccagaagaucucuacagagauguga

SEQ ID NO: 37417 - RNA, 32 nt, Homo Sapiens
caggggaggaggagaugggcaggauuuaguag

SEQ ID NO: 37418 - RNA, 32 nt, Homo Sapiens
gcggggagcugcugcagcuccuggcaacuggu

SEQ ID NO: 37419 - RNA, 32 nt, Homo Sapiens
uugggcagggccgugacacagguucuggccaa

SEQ ID NO: 37420 - RNA, 32 nt, Homo Sapiens
gauagaaaugaaauuuguaauugaucauacca

SEQ ID NO: 37421 - RNA, 32 nt, Homo Sapiens
uuuccagaucuccgcaaaugacuucauugcca

SEQ ID NO: 37422 - RNA, 32 nt, Homo Sapiens
aauaacaaugaaaguugauaaguacaugauaa

SEQ ID NO: 37423 - RNA, 32 nt, Homo Sapiens
aaccacuggaacucuuguccaguuuuuaaauu

SEQ ID NO: 37424 - RNA, 32 nt, Homo Sapiens
cuuaggguacucaauuuuauguuuccuuuugg

SEQ ID NO: 37425 - RNA, 32 nt, Homo Sapiens
cgggggucggagccucaaggcugcggcggcga

SEQ ID NO: 37426 - RNA, 32 nt, Homo Sapiens
gcgaugcuugugacccugcagcuccucaaacc

SEQ ID NO: 37427 - RNA, 32 nt, Homo Sapiens
acuaaccgccccacuauugugagucugaaguc

SEQ ID NO: 37428 - RNA, 32 nt, Homo Sapiens
uucauucggguggucuuccugaaccacagcca

SEQ ID NO: 37429 - RNA, 32 nt, Homo Sapiens
uuaagaagugggacuguaaauauguauauuua

SEQ ID NO: 37430 - RNA, 32 nt, Homo Sapiens
gcguucucuccgggcccagcucuucuuccugg

SEQ ID NO: 37431 - RNA, 31 nt, Homo Sapiens
gggguggagggggaaaaccaggcaauuucgu

SEQ ID NO: 37432 - RNA, 32 nt, Homo Sapiens
gcccuccccagccccagcucccuguccucccc

SEQ ID NO: 37433 - RNA, 32 nt, Homo Sapiens
cccccucgcccggccccgcgacagccuccgag

SEQ ID NO: 37434 - RNA, 32 nt, Homo Sapiens
cuuuuagaauuugaacuuaaugaaauaaucau

SEQ ID NO: 37435 - RNA, 32 nt, Homo Sapiens
cgaagccgaggcuucuuccucugaacuuuugg

SEQ ID NO: 37436 - RNA, 32 nt, Homo Sapiens
aaacuuaaaggcacaaauucuccuugaagacc

SEQ ID NO: 37437 - RNA, 32 nt, Homo Sapiens
acuauucuuuuaggaguauacuucuacuuuau

SEQ ID NO: 37438 - RNA, 32 nt, Homo Sapiens
uggcugcugcggcugugggcgagcaugggggc

SEQ ID NO: 37439 - RNA, 32 nt, Homo Sapiens
cacccugcgggccccagcggcggcagcggaga

SEQ ID NO: 37440 - RNA, 32 nt, Homo Sapiens
gcaaugcaacugcagccaagaugucuuuagau

SEQ ID NO: 37441 - RNA, 32 nt, Homo Sapiens
cacuuugguccucgguucccacccucagcaag

SEQ ID NO: 37442 - RNA, 32 nt, Homo Sapiens
cuguuuuuacacagcuaacuaaauuuggacuc

SEQ ID NO: 37443 - RNA, 32 nt, Homo Sapiens
aaauaucugacaucuauugucauuccauugcu

SEQ ID NO: 37444 - RNA, 32 nt, Homo Sapiens
agauggaaagacuguaaauguuuaauaugaau

SEQ ID NO: 37445 - RNA, 30 nt, Homo Sapiens
ggaacugauggauuaaaguggaaccaagcg

SEQ ID NO: 37446 - RNA, 32 nt, Homo Sapiens
cgccuggugcaucccacggacucauuuaaaug

SEQ ID NO: 37447 - RNA, 30 nt, Homo Sapiens
gcaaggcucaaggcgccgccggcguggacc

SEQ ID NO: 37448 - RNA, 32 nt, Homo Sapiens
cucagacgcgagggaaaggagcacuaaguggg

SEQ ID NO: 37449 - RNA, 27 nt, Homo Sapiens
uuucccugcugcugcagcccccgucgg

SEQ ID NO: 37450 - RNA, 32 nt, Homo Sapiens
uggugucacaguguuugguucuuuuguuuugu

SEQ ID NO: 37451 - RNA, 32 nt, Homo Sapiens
gugacagcgcgggguuggcggcgugggaccca

SEQ ID NO: 37452 - RNA, 32 nt, Homo Sapiens
aaauagaaauaguucuuuaaaaauauuucucu

SEQ ID NO: 37453 - RNA, 32 nt, Homo Sapiens
ucaauccaggaaggacauuuugaaagauuugg

SEQ ID NO: 37454 - RNA, 32 nt, Homo Sapiens
ggagugggaucuccugaguccuuguugggcag

SEQ ID NO: 37455 - RNA, 32 nt, Homo Sapiens
gccggagggagcggccggauggagcggaggau

SEQ ID NO: 37456 - RNA, 32 nt, Homo Sapiens
uuucuuuauuuuuucuuuuuuacuguauaaug

SEQ ID NO: 37457 - RNA, 32 nt, Homo Sapiens
caauuuaaaaugcuagggaacaggcuuacaac

SEQ ID NO: 37458 - RNA, 32 nt, Homo Sapiens
gguuucaccauauugaccaggcuggucucgaa

SEQ ID NO: 37459 - RNA, 32 nt, Homo Sapiens
gcugagaaccaucauggggaccaggauagaag

SEQ ID NO: 37460 - RNA, 32 nt, Homo Sapiens
gccggggcugggcuaggcgcgcgcuuggagag

SEQ ID NO: 37461 - RNA, 32 nt, Homo Sapiens
cagcgcggacucgcgucccguggagcguucca

SEQ ID NO: 37462 - RNA, 32 nt, Homo Sapiens
aaguaaagauaaagguugucagauuuauuuuu

SEQ ID NO: 37463 - RNA, 32 nt, Homo Sapiens
acaaauagaaaagaauauacauaaggcacuuu

SEQ ID NO: 37464 - RNA, 32 nt, Homo Sapiens
aaagugugggagugccguuguugugucuccuu

SEQ ID NO: 37465 - RNA, 32 nt, Homo Sapiens
augugauagguggucuuuuccuguuaacaagc

SEQ ID NO: 37466 - RNA, 30 nt, Homo Sapiens
augcuggguaucccuguccgucccuaucug

SEQ ID NO: 37467 - RNA, 32 nt, Homo Sapiens
uccuuuccugugccuuucccuccagaaugcgg

SEQ ID NO: 37468 - RNA, 32 nt, Homo Sapiens
ggugagcugcaggccuggggccccacuggagg

SEQ ID NO: 37469 - RNA, 32 nt, Homo Sapiens
gugaggacagaaggacuggugcgaccccccac

SEQ ID NO: 37470 - RNA, 32 nt, Homo Sapiens
aaggcugggccugggaggcccuguggacagca

SEQ ID NO: 37471 - RNA, 32 nt, Homo Sapiens
auuuuucugugaacacauccacuucacaagcc

SEQ ID NO: 37472 - RNA, 32 nt, Homo Sapiens
ucucugcagccuccccgugcuggguggaagca

SEQ ID NO: 37473 - RNA, 32 nt, Homo Sapiens
ugcuuuuuuaucagaguuggcagcuggcaugu

SEQ ID NO: 37474 - RNA, 32 nt, Homo Sapiens
ccuagucuccugcuccccccgccccgcuuguc

SEQ ID NO: 37475 - RNA, 32 nt, Homo Sapiens
uaaauccaguguuuguugggaaaggagggauc

SEQ ID NO: 37476 - RNA, 32 nt, Homo Sapiens
gagaugaacaauuuaguguagauauuuuauuc

SEQ ID NO: 37477 - RNA, 32 nt, Homo Sapiens
uuccagcuaaccccguguccccggccucagca

SEQ ID NO: 37478 - RNA, 32 nt, Homo Sapiens
gggcugaaggggauguaucagagccucacggc

SEQ ID NO: 37479 - RNA, 32 nt, Homo Sapiens
augacccuguaagggaggaagaauucuucugc

SEQ ID NO: 37480 - RNA, 32 nt, Homo Sapiens
cggcccucaggagagaccaggaggacugacag

SEQ ID NO: 37481 - RNA, 32 nt, Homo Sapiens
ggacccggggaacgcggccuggaggacgagga

SEQ ID NO: 37482 - RNA, 32 nt, Homo Sapiens
augucugauguguucuuccuuuagucaucaug

SEQ ID NO: 37483 - RNA, 32 nt, Homo Sapiens
acguuucugucaagaaagaaaauagaauagug

SEQ ID NO: 37484 - RNA, 32 nt, Homo Sapiens
agaggcccagccagcccucugcagcccaaacg

SEQ ID NO: 37485 - RNA, 32 nt, Homo Sapiens
accuguuccuuccugaaguccugggcaugcau

SEQ ID NO: 37486 - RNA, 32 nt, Homo Sapiens
uggguccaggucugcugaaccaagguucuccc

SEQ ID NO: 37487 - RNA, 32 nt, Homo Sapiens
uaacaagucucccaguugcugcugcuguuggu

SEQ ID NO: 37488 - RNA, 32 nt, Homo Sapiens
ugauaaaauuuuguccacuaccauaguauccc

SEQ ID NO: 37489 - RNA, 32 nt, Homo Sapiens
cagacuaacugggcucaaggggugcuggaagg

SEQ ID NO: 37490 - RNA, 32 nt, Homo Sapiens
ugauguuuuuauauaguaaacccauuaaauac

SEQ ID NO: 37491 - RNA, 32 nt, Homo Sapiens
cuaucugcgugccuuccacagcgccguggccc

SEQ ID NO: 37492 - RNA, 32 nt, Homo Sapiens
ggccacccauccccaccacucccgugggcucc

SEQ ID NO: 37493 - RNA, 32 nt, Homo Sapiens
cauauaaaaaagguuccauauuuguaguauac

SEQ ID NO: 37494 - RNA, 32 nt, Homo Sapiens
ucuucauauuaauacauauguauacuuuuuug

SEQ ID NO: 37495 - RNA, 32 nt, Homo Sapiens
gacaacuucaugggaaggcccuugggaaucug

SEQ ID NO: 37496 - RNA, 32 nt, Homo Sapiens
ucucagcuauacauugagggguuuuagagcau

SEQ ID NO: 37497 - RNA, 32 nt, Homo Sapiens
ccaaugucaccucuccuccuggcccccgccca

SEQ ID NO: 37498 - RNA, 32 nt, Homo Sapiens
cacuccacccugcuggccccaggacuucugau

SEQ ID NO: 37499 - RNA, 32 nt, Homo Sapiens
uuacauauauucagagauugacccucaaaaua

SEQ ID NO: 37500 - RNA, 32 nt, Homo Sapiens
uagacccgguguuccucuugguggcagauacc

SEQ ID NO: 37501 - RNA, 32 nt, Homo Sapiens
uguuucuucauuucuuuuuuuguuuuugccuu

SEQ ID NO: 37502 - RNA, 32 nt, Homo Sapiens
accagcaaacuccuaucagacaguuucaagga

SEQ ID NO: 37503 - RNA, 32 nt, Homo Sapiens
cccaugaaugucuccagagacauccugagagg

SEQ ID NO: 37504 - RNA, 32 nt, Homo Sapiens
guacuccugacgaauauaggugccaaaauccu

SEQ ID NO: 37505 - RNA, 32 nt, Homo Sapiens
gauauaggaaauguuguguuauucuugcagcc

SEQ ID NO: 37506 - RNA, 32 nt, Homo Sapiens
uaagggcagaucugggccaguggaauaggaua

SEQ ID NO: 37507 - RNA, 32 nt, Homo Sapiens
uguauuccagacacagaauacaugauaaauac

SEQ ID NO: 37508 - RNA, 32 nt, Homo Sapiens
caucuggccugccugcaccagcugccugggcc

SEQ ID NO: 37509 - RNA, 32 nt, Homo Sapiens
ccucuccugccccucgccgguaccucagcaag

SEQ ID NO: 37510 - RNA, 32 nt, Homo Sapiens
ugccaucuuaccugucucuucuccaugaggga

SEQ ID NO: 37511 - RNA, 31 nt, Homo Sapiens
gcagccagggcgucggaccaggcaauuccua

SEQ ID NO: 37512 - RNA, 32 nt, Homo Sapiens
uaaggaauaauuuggaggaaaagcguaaaggc

SEQ ID NO: 37513 - RNA, 32 nt, Homo Sapiens
acacagacgagccccagacucugcccaucccc

SEQ ID NO: 37514 - RNA, 32 nt, Homo Sapiens
acaugggaguuuagugugauaaaggcaguauu

SEQ ID NO: 37515 - RNA, 32 nt, Homo Sapiens
acgugauagcucugccuauugcaggacaauga

SEQ ID NO: 37516 - RNA, 32 nt, Homo Sapiens
uccuggugccugccucucuccuccaccccagg

SEQ ID NO: 37517 - RNA, 32 nt, Homo Sapiens
uuuccugcucuugguuuucccaggugagcucu

SEQ ID NO: 37518 - RNA, 32 nt, Homo Sapiens
ccugccucuguacagccucgaguggacagcca

SEQ ID NO: 37519 - RNA, 32 nt, Homo Sapiens
ucagagugccccaagcugccguuccuucccuu

SEQ ID NO: 37520 - RNA, 32 nt, Homo Sapiens
uggaagagggaucugcaagugcaggguguugg

SEQ ID NO: 37521 - RNA, 32 nt, Homo Sapiens
ugacguaucaggaaacauauuuuauuggagau

SEQ ID NO: 37522 - RNA, 32 nt, Homo Sapiens
ccauaaagaucacaccaauuuagaaugaauau

SEQ ID NO: 37523 - RNA, 32 nt, Homo Sapiens
caaaaagaggcaguccaguaaagguuauaaaa

SEQ ID NO: 37524 - RNA, 32 nt, Homo Sapiens
guguggcugcugugggggcaggugccagguag

SEQ ID NO: 37525 - RNA, 32 nt, Homo Sapiens
ucacuaauacuagacaucugaguccucuaaua

SEQ ID NO: 37526 - RNA, 32 nt, Homo Sapiens
gaugucuggggcgaugcugagaauguuuuuga

SEQ ID NO: 37527 - RNA, 32 nt, Homo Sapiens
acaguggccuugucuuuguccuccccaccccc

SEQ ID NO: 37528 - RNA, 31 nt, Homo Sapiens
auuuaugcaagguuugaaugcauaccagugu

SEQ ID NO: 37529 - RNA, 32 nt, Homo Sapiens
ccaacacauuuucucuuuucauuccccugaaa

SEQ ID NO: 37530 - RNA, 32 nt, Homo Sapiens
cuuugcuugcuugucccccauccuguccugag

SEQ ID NO: 37531 - RNA, 32 nt, Homo Sapiens
cuccccuccccucuccggguucccccacccac

SEQ ID NO: 37532 - RNA, 32 nt, Homo Sapiens
auuuauauuaauuuauauucaaaaggaauccu

SEQ ID NO: 37533 - RNA, 32 nt, Homo Sapiens
uuucugcccuuccucacccccacgccccaccc

SEQ ID NO: 37534 - RNA, 32 nt, Homo Sapiens
cuccaucuauaagcauggaagugucuguguga

SEQ ID NO: 37535 - RNA, 32 nt, Homo Sapiens
ccgagaccgcgcuggcccucugcuaagcccgg

SEQ ID NO: 37536 - RNA, 32 nt, Homo Sapiens
cuguccuugugcgccuucagacacuggcuccu

SEQ ID NO: 37537 - RNA, 32 nt, Homo Sapiens
acagguuuggaggugggaguguggcugucucu

SEQ ID NO: 37538 - RNA, 32 nt, Homo Sapiens
cgggagcccaugguccggggccgaaccagccc

SEQ ID NO: 37539 - RNA, 32 nt, Homo Sapiens
cccucaaaucccuccucuuacuccaugcugaa

SEQ ID NO: 37540 - RNA, 32 nt, Homo Sapiens
caccugguuaugccuccuuucaucucaaagcc

SEQ ID NO: 37541 - RNA, 32 nt, Homo Sapiens
cugggggcugcucugcugccccggcccagguc

SEQ ID NO: 37542 - RNA, 32 nt, Homo Sapiens
uggguucuacagcacccuuucccgcagguuag

SEQ ID NO: 37543 - RNA, 32 nt, Homo Sapiens
gaacagccuacgccuggccgcgccuuggguuc

SEQ ID NO: 37544 - RNA, 32 nt, Homo Sapiens
accccagauaugcugcugcugcugcugcugcc

SEQ ID NO: 37545 - RNA, 32 nt, Homo Sapiens
ugaguuggccuggccauguccaagaggcugua

SEQ ID NO: 37546 - RNA, 32 nt, Homo Sapiens
aaugcgaucaacucagaggagaaggaggggga

SEQ ID NO: 37547 - RNA, 32 nt, Homo Sapiens
ugacauaaaacgcaaaaacaggaaucaugccg

SEQ ID NO: 37548 - RNA, 32 nt, Homo Sapiens
ccccagcaggggcuggcugugcaagucagaga

SEQ ID NO: 37549 - RNA, 32 nt, Homo Sapiens
cccugaagauaaaccugguuuauccuuuuuau

SEQ ID NO: 37550 - RNA, 32 nt, Homo Sapiens
ccaauccugaagaucuggacccgguuucugaa

SEQ ID NO: 37551 - RNA, 32 nt, Homo Sapiens
cagguggcccucaucacccaauugccagugcc

SEQ ID NO: 37552 - RNA, 32 nt, Homo Sapiens
gacucccuccgcgacgugcccggagcagcucc

SEQ ID NO: 37553 - RNA, 32 nt, Homo Sapiens
uacacaucaguuaacuugauaauuucuuccca

SEQ ID NO: 37554 - RNA, 32 nt, Homo Sapiens
uucuuuucaugaucuaaaauggucuuuuguua

SEQ ID NO: 37555 - RNA, 32 nt, Homo Sapiens
aagaggaggccugauggggauaccuuccugcu

SEQ ID NO: 37556 - RNA, 32 nt, Homo Sapiens
gcggaggaugggcuugcucucaauuuugcgca

SEQ ID NO: 37557 - RNA, 32 nt, Homo Sapiens
gucacucucauccucaucgucuccuccuacgc

SEQ ID NO: 37558 - RNA, 32 nt, Homo Sapiens
ugaagaauugucugaaagaaaagcagaaggaa

SEQ ID NO: 37559 - RNA, 32 nt, Homo Sapiens
aaaaaugccaagcucacccagaaauaaccccg

SEQ ID NO: 37560 - RNA, 29 nt, Homo Sapiens
ggacuugggugcaucaggacgccuuggag

SEQ ID NO: 37561 - RNA, 32 nt, Homo Sapiens
aaauaaaaucauacucuuauuuugaaguuaaa

SEQ ID NO: 37562 - RNA, 32 nt, Homo Sapiens
uuuaauaacaugcaugggucccucucacuaau

SEQ ID NO: 37563 - RNA, 32 nt, Homo Sapiens
aaaaguauuucugaagcugaaucaaauuaaga

SEQ ID NO: 37564 - RNA, 32 nt, Homo Sapiens
cuuccuucucucaauaugcuuacaaagucucc

SEQ ID NO: 37565 - RNA, 32 nt, Homo Sapiens
agcuacugccuugcccuuccuucccucccugu

SEQ ID NO: 37566 - RNA, 32 nt, Homo Sapiens
cagaagcgccgcggcugcaccagagcgccuga

SEQ ID NO: 37567 - RNA, 32 nt, Homo Sapiens
augcaggguccagguccucuccccucauuucc

SEQ ID NO: 37568 - RNA, 32 nt, Homo Sapiens
gagccuguggagugggagacaccugccuuucu

SEQ ID NO: 37569 - RNA, 32 nt, Homo Sapiens
guugguccucugcuccuccuagcuccccaggg

SEQ ID NO: 37570 - RNA, 32 nt, Homo Sapiens
ggacacggcccggcccggccauggccucguug

SEQ ID NO: 37571 - RNA, 32 nt, Homo Sapiens
ccaccacacacacacacacacacacacacaca

SEQ ID NO: 37572 - RNA, 32 nt, Homo Sapiens
ggcuggucucaaacuccugaccucaaguaauc

SEQ ID NO: 37573 - RNA, 32 nt, Homo Sapiens
ggaccccauccuguucucggggacccugcgca

SEQ ID NO: 37574 - RNA, 32 nt, Homo Sapiens
cccauggccccggcucugcugcacuugguauu

SEQ ID NO: 37575 - RNA, 32 nt, Homo Sapiens
uuguaguucauuuaaaaauacaacauuaaaca

SEQ ID NO: 37576 - RNA, 32 nt, Homo Sapiens
ugaaacaucgucuuuacccacuucucaguuua

SEQ ID NO: 37577 - RNA, 30 nt, Homo Sapiens
ggaagaaccaguuuuauccaucuuaaaacg

SEQ ID NO: 37578 - RNA, 32 nt, Homo Sapiens
cgccccaucgccacauccugggggagcauacc

SEQ ID NO: 37579 - RNA, 32 nt, Homo Sapiens
gcucagggccccuggaggaggggcuacugucc

SEQ ID NO: 37580 - RNA, 28 nt, Homo Sapiens
agucggaggcggccggcugggcgugcgc

SEQ ID NO: 37581 - RNA, 32 nt, Homo Sapiens
auccuccuguccucucccugcguaagacuuga

SEQ ID NO: 37582 - RNA, 32 nt, Homo Sapiens
uuuauuguugauaaauuguaucauauuuaagu

SEQ ID NO: 37583 - RNA, 32 nt, Homo Sapiens
augugaaaccaucacagcugggaagacauuuc

SEQ ID NO: 37584 - RNA, 32 nt, Homo Sapiens
auaaacuuugaaaaugauuuguagagaugaau

SEQ ID NO: 37585 - RNA, 30 nt, Homo Sapiens
uucaggcuggacggcgcgggucagcccugg

SEQ ID NO: 37586 - RNA, 32 nt, Homo Sapiens
uccacuguuagagauuugagguuacaugauau

SEQ ID NO: 37587 - RNA, 32 nt, Homo Sapiens
ucuugcaauuuuuuuuuuuuuaagcucaucag

SEQ ID NO: 37588 - RNA, 32 nt, Homo Sapiens
cugauugcuuucacaaaucauuauugucacaa

SEQ ID NO: 37589 - RNA, 32 nt, Homo Sapiens
cugcugggccugcuggugcugcuggcaggugu

SEQ ID NO: 37590 - RNA, 32 nt, Homo Sapiens
aggggcugggaaaggggagagauuggaguccu

SEQ ID NO: 37591 - RNA, 32 nt, Homo Sapiens
aaagggggccggguagugccaaggcuguuacu

SEQ ID NO: 37592 - RNA, 32 nt, Homo Sapiens
gguucagaacguagucucuacucuuccccugc

SEQ ID NO: 37593 - RNA, 32 nt, Homo Sapiens
cauucagcaaucuuuauagauuuuuuggccca

SEQ ID NO: 37594 - RNA, 32 nt, Homo Sapiens
cucuuaacacagcacuuagacacgugcuguuc

SEQ ID NO: 37595 - RNA, 32 nt, Homo Sapiens
ucccuggcgggugucggggaccugggcgcaga

SEQ ID NO: 37596 - RNA, 32 nt, Homo Sapiens
agcgggcgccgggaccgggaauccccgagcug

SEQ ID NO: 37597 - RNA, 32 nt, Homo Sapiens
ugaaucccaacacuggaagaccaagaggguug

SEQ ID NO: 37598 - RNA, 32 nt, Homo Sapiens
accagcacggggccccgcuccauggugcccca

SEQ ID NO: 37599 - RNA, 32 nt, Homo Sapiens
caaguggaaaauacccauaggccuagacagcu

SEQ ID NO: 37600 - RNA, 32 nt, Homo Sapiens
agugugguagagaagacaguggaggaaaacgg

SEQ ID NO: 37601 - RNA, 32 nt, Homo Sapiens
cagcaucuauagacaauagacuauuaaaaaau

SEQ ID NO: 37602 - RNA, 32 nt, Homo Sapiens
cugcuccuuggcuuccucuccugagcccagcc

SEQ ID NO: 37603 - RNA, 32 nt, Homo Sapiens
cauuaacccacuuugcuugucucaugaaaaau

SEQ ID NO: 37604 - RNA, 32 nt, Homo Sapiens
ccacagaggggguggagaaggcgcauccucug

SEQ ID NO: 37605 - RNA, 32 nt, Homo Sapiens
auaacuagcagacacuucuccuaauccuccuc

SEQ ID NO: 37606 - RNA, 32 nt, Homo Sapiens
acaugugaaccauugcuacauuguagguugug

SEQ ID NO: 37607 - RNA, 32 nt, Homo Sapiens
ccuuugcucccucccauguuucugguggacua

SEQ ID NO: 37608 - RNA, 31 nt, Homo Sapiens
ccucacccauccaccaccugcagcuugagau

SEQ ID NO: 37609 - RNA, 32 nt, Homo Sapiens
uuuuguccuguuuacagucuuaaaagagguaa

SEQ ID NO: 37610 - RNA, 32 nt, Homo Sapiens
caccccccgagcaagcgggcccggggcuucuc

SEQ ID NO: 37611 - RNA, 32 nt, Homo Sapiens
caucgaguggguggagaccagagaagccgcuc

SEQ ID NO: 37612 - RNA, 32 nt, Homo Sapiens
cccucucauccuccccauuccucguccacacu

SEQ ID NO: 37613 - RNA, 32 nt, Homo Sapiens
acgcggugaagauagccugcggaguguccggg

SEQ ID NO: 37614 - RNA, 32 nt, Homo Sapiens
ggcuacuuccuggccugguucuggcuuugguu

SEQ ID NO: 37615 - RNA, 32 nt, Homo Sapiens
cauggcugucauuguuaaccaauacaaauaaa

SEQ ID NO: 37616 - RNA, 32 nt, Homo Sapiens
auuauuguuggaaauaaacuaauuuguauggg

SEQ ID NO: 37617 - RNA, 32 nt, Homo Sapiens
uaucuauuacguaucucauacauauuucuguu

SEQ ID NO: 37618 - RNA, 32 nt, Homo Sapiens
cgcggcgccccgagcgcuuugugagcagaugc

SEQ ID NO: 37619 - RNA, 32 nt, Homo Sapiens
uuuccaggggaagagagcaggauggagaaugg

SEQ ID NO: 37620 - RNA, 32 nt, Homo Sapiens
aggcugugguggccccgagcgcgaguguguag

SEQ ID NO: 37621 - RNA, 28 nt, Homo Sapiens
gggauguggagaguccggaaaaggggcu

SEQ ID NO: 37622 - RNA, 32 nt, Homo Sapiens
ggacaaaaguacacagaagaaccuuacuauga

SEQ ID NO: 37623 - RNA, 32 nt, Homo Sapiens
uuaaucuuacagcugguugccggcgcccgccc

SEQ ID NO: 37624 - RNA, 32 nt, Homo Sapiens
gguggauggggaggaugguugcacaacagugu

SEQ ID NO: 37625 - RNA, 32 nt, Homo Sapiens
uauguaauacuagugcaauuuugcuugaacaa

SEQ ID NO: 37626 - RNA, 32 nt, Homo Sapiens
ucuuugaaacugacaaucuuugaaaugugaau

SEQ ID NO: 37627 - RNA, 32 nt, Homo Sapiens
ccuggauuaaagauuaaggccuuaaucuguuu

SEQ ID NO: 37628 - RNA, 32 nt, Homo Sapiens
acaggaagguggaaacaaaaugccaggccucu

SEQ ID NO: 37629 - RNA, 32 nt, Homo Sapiens
auacaaaguauuuaugugguauuaaaaauuca

SEQ ID NO: 37630 - RNA, 30 nt, Homo Sapiens
ggagagcagagaaugggggaacuugagggu

SEQ ID NO: 37631 - RNA, 32 nt, Homo Sapiens
cuguaaauauuuguucuauagauaagauacaa

SEQ ID NO: 37632 - RNA, 32 nt, Homo Sapiens
caccacgcccgggaacuggcggcgggaaaagu

SEQ ID NO: 37633 - RNA, 32 nt, Homo Sapiens
acugauaaauauauuucuucauugccaaagag

SEQ ID NO: 37634 - RNA, 32 nt, Homo Sapiens
ucaacuaugcugguuugguuugaaguaaguug

SEQ ID NO: 37635 - RNA, 32 nt, Homo Sapiens
aggugagcgcggagacccccagcacucccugc

SEQ ID NO: 37636 - RNA, 32 nt, Homo Sapiens
uagcaccugcggggcggcuugcacgccgagug

SEQ ID NO: 37637 - RNA, 32 nt, Homo Sapiens
aagucacacaaauuauugcaguuacauacaga

SEQ ID NO: 37638 - RNA, 32 nt, Homo Sapiens
guguugguuuucugcacagaucuggugagaac

SEQ ID NO: 37639 - RNA, 32 nt, Homo Sapiens
agcauugaaacacuuucaaacuccugcuggua

SEQ ID NO: 37640 - RNA, 32 nt, Homo Sapiens
uugugcugagguucacagcaucaucaagucau

SEQ ID NO: 37641 - RNA, 32 nt, Homo Sapiens
aucacugacgaccucucggcaagccccucccc

SEQ ID NO: 37642 - RNA, 32 nt, Homo Sapiens
agccucccgagcugcggcgcccgcagcggagg

SEQ ID NO: 37643 - RNA, 32 nt, Homo Sapiens
guuacuuagugucagaaccaaggcaaugacuu

SEQ ID NO: 37644 - RNA, 32 nt, Homo Sapiens
uuauuuuuuccacauauaaagcuuugucuuuu

SEQ ID NO: 37645 - RNA, 32 nt, Homo Sapiens
uguccugucgcugcugagcuggcaccgacugu

SEQ ID NO: 37646 - RNA, 32 nt, Homo Sapiens
ucccgagaacagacuggcacccuugggccugc

SEQ ID NO: 37647 - RNA, 32 nt, Homo Sapiens
caagucauuucaaauagcacacaggaaucaaa

SEQ ID NO: 37648 - RNA, 32 nt, Homo Sapiens
uuuagucacguuugcuuggcucugguaccaaa

SEQ ID NO: 37649 - RNA, 32 nt, Homo Sapiens
ccuuccugcccccagcucaccccacucccuuc

SEQ ID NO: 37650 - RNA, 32 nt, Homo Sapiens
agcggcggggacagcggcgggcggcugggacg

SEQ ID NO: 37651 - RNA, 32 nt, Homo Sapiens
uccggcccggcgggcgguagcucgcugauccc

SEQ ID NO: 37652 - RNA, 32 nt, Homo Sapiens
cugaauacuggguuccagaaauuuaaaacaau

SEQ ID NO: 37653 - RNA, 32 nt, Homo Sapiens
cugaugauaugaagggccgguauaaagaaguc

SEQ ID NO: 37654 - RNA, 29 nt, Homo Sapiens
agccccauagugauuggucuucaaaacca

SEQ ID NO: 37655 - RNA, 32 nt, Homo Sapiens
augugcugaaaucucagcaugaaagcauugca

SEQ ID NO: 37656 - RNA, 32 nt, Homo Sapiens
ccuccauauuuucaggauuuuugaagcuguug

SEQ ID NO: 37657 - RNA, 32 nt, Homo Sapiens
uguauguucuucccuuuccucugcuguuuccu

SEQ ID NO: 37658 - RNA, 32 nt, Homo Sapiens
ugacuuggcucagugugugcugagagaauccg

SEQ ID NO: 37659 - RNA, 32 nt, Homo Sapiens
gaaaguuguuacauuuuuuuuaugacaggcuu

SEQ ID NO: 37660 - RNA, 32 nt, Homo Sapiens
ccuaacugcccccugccugcuccggcacugcc

SEQ ID NO: 37661 - RNA, 32 nt, Homo Sapiens
auccgcgcuguucuuugcagcagugcuuccaa

SEQ ID NO: 37662 - RNA, 32 nt, Homo Sapiens
cauggaauauauucugcguuuauaaaacuagu

SEQ ID NO: 37663 - RNA, 32 nt, Homo Sapiens
uccugccucggcucgucccuccuuccagaacg

SEQ ID NO: 37664 - RNA, 32 nt, Homo Sapiens
agcgaggcgggggcgggugaggagggggugac

SEQ ID NO: 37665 - RNA, 32 nt, Homo Sapiens
ugcaccuugcagaaaugcauugccagaaagca

SEQ ID NO: 37666 - RNA, 32 nt, Homo Sapiens
aaugcuguuugcucgaagacgucucagggcgc

SEQ ID NO: 37667 - RNA, 32 nt, Homo Sapiens
caauucagcuggagcuuuuugacuucuuagaa

SEQ ID NO: 37668 - RNA, 32 nt, Homo Sapiens
cuccaccuccaaggagaggcuccucagugugc

SEQ ID NO: 37669 - RNA, 32 nt, Homo Sapiens
aguaacuuucccuguuuuccccuguagucccc

SEQ ID NO: 37670 - RNA, 32 nt, Homo Sapiens
ccucugcgcgcccucaggccgccuuccccgcc

SEQ ID NO: 37671 - RNA, 32 nt, Homo Sapiens
ugcaacagcuguacagacaaucaauaacacac

SEQ ID NO: 37672 - RNA, 32 nt, Homo Sapiens
gaguuggcggauauucggaacugugaauguac

SEQ ID NO: 37673 - RNA, 32 nt, Homo Sapiens
aggacagaaccgagaagaguuuaggggcaggu

SEQ ID NO: 37674 - RNA, 32 nt, Homo Sapiens
cccagccccgguuacuccuucugggaccucag

SEQ ID NO: 37675 - RNA, 32 nt, Homo Sapiens
caaacuugugaucucacccaggagugagaggg

SEQ ID NO: 37676 - RNA, 32 nt, Homo Sapiens
agcuuuuccaaucuccuccccucuguuuuccc

SEQ ID NO: 37677 - RNA, 32 nt, Homo Sapiens
guuguguuuucuacuuuucucaucuuucugug

SEQ ID NO: 37678 - RNA, 32 nt, Homo Sapiens
ugaccgugacaauaguuuaucaucaucauuau

SEQ ID NO: 37679 - RNA, 32 nt, Homo Sapiens
acauucauguucuuguucugugucacucggcc

SEQ ID NO: 37680 - RNA, 32 nt, Homo Sapiens
uucaggcuggguggagcagugggaacauagaa

SEQ ID NO: 37681 - RNA, 32 nt, Homo Sapiens
aggagaauggccagaacccaggaggcagagcu

SEQ ID NO: 37682 - RNA, 30 nt, Homo Sapiens
ugauuuaauaucccuuguuccauuuuacag

SEQ ID NO: 37683 - RNA, 32 nt, Homo Sapiens
uugacaugggggugccaggugccaucaucucu

SEQ ID NO: 37684 - RNA, 32 nt, Homo Sapiens
uacaggcccacccaccgagugcgcgcgacagg

SEQ ID NO: 37685 - RNA, 32 nt, Homo Sapiens
auugaggcaacgcguuccuuuccaggcuugca

SEQ ID NO: 37686 - RNA, 32 nt, Homo Sapiens
auuaaagcaaggaaaaguguaacugaaacacu

SEQ ID NO: 37687 - RNA, 32 nt, Homo Sapiens
acuauuauuuauauuucauaccuuguguuuuc

SEQ ID NO: 37688 - RNA, 29 nt, Homo Sapiens
cucgauuggccacagaggaauccgaggcu

SEQ ID NO: 37689 - RNA, 32 nt, Homo Sapiens
ucucaucuucuuccaauaucaagagaauccag

SEQ ID NO: 37690 - RNA, 32 nt, Homo Sapiens
uaugguuccagaagcuuccaaauccugaaaua

SEQ ID NO: 37691 - RNA, 27 nt, Homo Sapiens
agcauugccuucuuccuuagucccacg

SEQ ID NO: 37692 - RNA, 32 nt, Homo Sapiens
acauaaggguauaguaaaaauaugguacuauu

SEQ ID NO: 37693 - RNA, 31 nt, Homo Sapiens
accaauauguaucugucuacuuucucuuguu

SEQ ID NO: 37694 - RNA, 32 nt, Homo Sapiens
cccgggaugcggcccgcagccggcgcagccag

SEQ ID NO: 37695 - RNA, 32 nt, Homo Sapiens
uggccuuauguccaccugaugacugcgugugu

SEQ ID NO: 37696 - RNA, 32 nt, Homo Sapiens
ccuccucccacuguguguauguguguauaugu

SEQ ID NO: 37697 - RNA, 32 nt, Homo Sapiens
ucaguacacaucauccuccucacuccaguuga

SEQ ID NO: 37698 - RNA, 32 nt, Homo Sapiens
uggcuccaggacagagaaugccagaaaucagc

SEQ ID NO: 37699 - RNA, 32 nt, Homo Sapiens
cuccucucacagacccucuuuggcccccugcc

SEQ ID NO: 37700 - RNA, 32 nt, Homo Sapiens
agagcgggccaguguccuccuccaccugaacg

SEQ ID NO: 37701 - RNA, 32 nt, Homo Sapiens
ccugcaguuggucuuuccauugcagagggaaa

SEQ ID NO: 37702 - RNA, 32 nt, Homo Sapiens
ucauuuauuacugagcuguauuacuguggagc

SEQ ID NO: 37703 - RNA, 29 nt, Homo Sapiens
acuguaauaaaauaaaauaugauguaaac

SEQ ID NO: 37704 - RNA, 32 nt, Homo Sapiens
accuccgccucccggguucgggcaguucuccu

SEQ ID NO: 37705 - RNA, 32 nt, Homo Sapiens
cuaccgggccccaggcccagccacccgguacc

SEQ ID NO: 37706 - RNA, 32 nt, Homo Sapiens
gugcaggugguggcucggcagaccgcagaccu

SEQ ID NO: 37707 - RNA, 32 nt, Homo Sapiens
acaaauaauaaauguguccuucuuuguuuuuu

SEQ ID NO: 37708 - RNA, 32 nt, Homo Sapiens
ccucggcgccgacaucgcgacagcgaagcgcu

SEQ ID NO: 37709 - RNA, 32 nt, Homo Sapiens
guuuggauuguuucaagugauaccaaaauauu

SEQ ID NO: 37710 - RNA, 32 nt, Homo Sapiens
auaugcuguauauuuauuuguuagugcaugug

SEQ ID NO: 37711 - RNA, 32 nt, Homo Sapiens
acagcagcaacugccgcacccuugaaaggagg

SEQ ID NO: 37712 - RNA, 32 nt, Homo Sapiens
gaguagacagaagaaggcgcugucugggggag

SEQ ID NO: 37713 - RNA, 32 nt, Homo Sapiens
caauccaguccagcugcaugcccucucucugc

SEQ ID NO: 37714 - RNA, 32 nt, Homo Sapiens
agauaccaggcacuuaaagccuuuuccugaau

SEQ ID NO: 37715 - RNA, 32 nt, Homo Sapiens
gcagaggcccggagaacacaacccucccgaga

SEQ ID NO: 37716 - RNA, 32 nt, Homo Sapiens
cccgagcucgggcucugaccgcggcucggcug

SEQ ID NO: 37717 - RNA, 32 nt, Homo Sapiens
ccccucgcuucccuccucccacuucccgagcu

SEQ ID NO: 37718 - RNA, 32 nt, Homo Sapiens
gucccuugcguggauuggcaagcgacgcccca

SEQ ID NO: 37719 - RNA, 32 nt, Homo Sapiens
gaccuggcucugcugcacgaugcagccauccu

SEQ ID NO: 37720 - RNA, 32 nt, Homo Sapiens
ugugugcuuuacaauaggauagauuugauacc

SEQ ID NO: 37721 - RNA, 31 nt, Homo Sapiens
cgcggugacuucugccugcgcuccuucucug

SEQ ID NO: 37722 - RNA, 32 nt, Homo Sapiens
aaaucuuguuuuuuuucuuaaccagcaagaga

SEQ ID NO: 37723 - RNA, 32 nt, Homo Sapiens
gguccgucugggagggugugucugugcagagc

SEQ ID NO: 37724 - RNA, 32 nt, Homo Sapiens
cuucucaacaguuuccuuuuuguuuuccuuua

SEQ ID NO: 37725 - RNA, 32 nt, Homo Sapiens
cucaagugaugagacagugaaguaaaauugag

SEQ ID NO: 37726 - RNA, 31 nt, Homo Sapiens
uuuaauaaauuuauuuugauaaauaauauug

SEQ ID NO: 37727 - RNA, 32 nt, Homo Sapiens
uggaggccuggaagcugcggggcccccgccca

SEQ ID NO: 37728 - RNA, 32 nt, Homo Sapiens
gacagacucucacugugucacccaggcuggag

SEQ ID NO: 37729 - RNA, 32 nt, Homo Sapiens
gacagagucucacucugucacccaggcuggag

SEQ ID NO: 37730 - RNA, 32 nt, Homo Sapiens
gacggagucucgcucugucacccaggcuggag

SEQ ID NO: 37731 - RNA, 32 nt, Homo Sapiens
gauggagucuugcucugucacccaggcuggag

SEQ ID NO: 37732 - RNA, 32 nt, Homo Sapiens
guguccuucccuggccuucucuuggcucaaag

SEQ ID NO: 37733 - RNA, 32 nt, Homo Sapiens
acuccggagguagagguuguggugagccgaga

SEQ ID NO: 37734 - RNA, 32 nt, Homo Sapiens
cuaagauucugauuuuaggagcuaaggcucua

SEQ ID NO: 37735 - RNA, 32 nt, Homo Sapiens
ugucucucuggcuuccucuccauuucaacccu

SEQ ID NO: 37736 - RNA, 32 nt, Homo Sapiens
cuggcuguggucaggaaaggccuguagaggga

SEQ ID NO: 37737 - RNA, 32 nt, Homo Sapiens
aaggaaugcagaccacugugcuuaccaaauuc

SEQ ID NO: 37738 - RNA, 32 nt, Homo Sapiens
caagaaaauaccagugaauuguuggauaugaa

SEQ ID NO: 37739 - RNA, 32 nt, Homo Sapiens
cagguaccuggacagcucuggaaggugcucac

SEQ ID NO: 37740 - RNA, 32 nt, Homo Sapiens
accugugauuagacugggcggcuggggagaaa

SEQ ID NO: 37741 - RNA, 32 nt, Homo Sapiens
gguuuaauauccuggugacuugcagucacauu

SEQ ID NO: 37742 - RNA, 32 nt, Homo Sapiens
auuuuucuccucccuccuccuacaagguuuug

SEQ ID NO: 37743 - RNA, 32 nt, Homo Sapiens
gagagaagagcugcagcccuucugggagccca

SEQ ID NO: 37744 - RNA, 32 nt, Homo Sapiens
ugcagugagggaagaaaggauccugcugggga

SEQ ID NO: 37745 - RNA, 32 nt, Homo Sapiens
accggaguuuggaggggagaggggaagguggc

SEQ ID NO: 37746 - RNA, 30 nt, Homo Sapiens
uucugagcagguggcagcugcgaaucuauu

SEQ ID NO: 37747 - RNA, 32 nt, Homo Sapiens
ugcggggaggggcuuguuuguuuguuuuuaau

SEQ ID NO: 37748 - RNA, 32 nt, Homo Sapiens
cuggacucccuaccgcaggacggaguccagga

SEQ ID NO: 37749 - RNA, 32 nt, Homo Sapiens
uuaggauaaaaggaauacagacuuuaucccau

SEQ ID NO: 37750 - RNA, 32 nt, Homo Sapiens
uuccuacucucagagagaagugggcaggaggg

SEQ ID NO: 37751 - RNA, 32 nt, Homo Sapiens
cccuguuaacucaagacugugagcugccucua

SEQ ID NO: 37752 - RNA, 29 nt, Homo Sapiens
cagggcauguguauguacaguaaugugua

SEQ ID NO: 37753 - RNA, 32 nt, Homo Sapiens
aggaggggcaccacagcccuuaaggcacgagg

SEQ ID NO: 37754 - RNA, 32 nt, Homo Sapiens
uucauccaugucccuacagaggacaugaacuc

SEQ ID NO: 37755 - RNA, 32 nt, Homo Sapiens
gcagggcuggguggaggagagaguggcacccu

SEQ ID NO: 37756 - RNA, 32 nt, Homo Sapiens
ugaaguagugcaggguuugccuugaaaccauu

SEQ ID NO: 37757 - RNA, 32 nt, Homo Sapiens
cugaucuguauauguaugauguauauauguca

SEQ ID NO: 37758 - RNA, 32 nt, Homo Sapiens
ugggaaggaauguugacuugcuaacauuccuu

SEQ ID NO: 37759 - RNA, 32 nt, Homo Sapiens
gagucaucaggagaggagaaugaggaugaggc

SEQ ID NO: 37760 - RNA, 32 nt, Homo Sapiens
ugcacgccgccacccccuccccgcagcccuca

SEQ ID NO: 37761 - RNA, 31 nt, Homo Sapiens
cuucccugggcgguguggguuucccccagcu

SEQ ID NO: 37762 - RNA, 32 nt, Homo Sapiens
cuccgcccacccagcccgcggcuuggcccagg

SEQ ID NO: 37763 - RNA, 32 nt, Homo Sapiens
uguuuaauauuaccaacuacauuggaagccug

SEQ ID NO: 37764 - RNA, 32 nt, Homo Sapiens
agaugugaaaauaaauguuauuuguugaucau

SEQ ID NO: 37765 - RNA, 32 nt, Homo Sapiens
cuucucuguccauuuuagguggcacaauguaa

SEQ ID NO: 37766 - RNA, 32 nt, Homo Sapiens
gcaaaaaaggauucaaaauaauguuagaggca

SEQ ID NO: 37767 - RNA, 32 nt, Homo Sapiens
acucgugguagaugaguggggaggccgcucag

SEQ ID NO: 37768 - RNA, 32 nt, Homo Sapiens
uacucaggagacugaggcaggagaaucgcuug

SEQ ID NO: 37769 - RNA, 32 nt, Homo Sapiens
aacuuguuucuaguaauagaaacuuuuacacu

SEQ ID NO: 37770 - RNA, 32 nt, Homo Sapiens
cauuucaccauguuguacaggcuggucucaaa

SEQ ID NO: 37771 - RNA, 32 nt, Homo Sapiens
uaucugcuuuguguuuggaaauaaaaaucucu

SEQ ID NO: 37772 - RNA, 32 nt, Homo Sapiens
cagcggcgccuggcggccggcgcgugcugggu

SEQ ID NO: 37773 - RNA, 32 nt, Homo Sapiens
gucaagguugguuaauucaggggcucaacacu

SEQ ID NO: 37774 - RNA, 32 nt, Homo Sapiens
ugagccccaccucagcaggucuccaggauccc

SEQ ID NO: 37775 - RNA, 32 nt, Homo Sapiens
aaaucuguuaaaaaucugcauuuagguugggc

SEQ ID NO: 37776 - RNA, 32 nt, Homo Sapiens
caauaacaagcaugcauaaaucaaugguucaa

SEQ ID NO: 37777 - RNA, 32 nt, Homo Sapiens
ugugucccauccccacugccugguccagggcu

SEQ ID NO: 37778 - RNA, 32 nt, Homo Sapiens
aagcugacuuguucuuuuuugagcaaaucucu

SEQ ID NO: 37779 - RNA, 32 nt, Homo Sapiens
gaaugcugauucaaggcauuauuuggauguga

SEQ ID NO: 37780 - RNA, 32 nt, Homo Sapiens
cguccggcucugaggugguggaggcggcggag

SEQ ID NO: 37781 - RNA, 32 nt, Homo Sapiens
augcucuguguguguccccaugucccuucccc

SEQ ID NO: 37782 - RNA, 32 nt, Homo Sapiens
cgucuccacuaaaaacaaaaacaauuagcugg

SEQ ID NO: 37783 - RNA, 32 nt, Homo Sapiens
acagauauacagaguucucagaccccacccca

SEQ ID NO: 37784 - RNA, 32 nt, Homo Sapiens
ggcucucaugaaauucaaagugccauuuagaa

SEQ ID NO: 37785 - RNA, 32 nt, Homo Sapiens
gagcgcggcagcccuggcggagggaugcaggu

SEQ ID NO: 37786 - RNA, 32 nt, Homo Sapiens
gaaccauuuggaaaaaugaaauguaguaguuc

SEQ ID NO: 37787 - RNA, 32 nt, Homo Sapiens
caaaggaugugagaguuuuucuauguauaaug

SEQ ID NO: 37788 - RNA, 32 nt, Homo Sapiens
auauuuguuuguuuuucuuuuuuuuuguuugu

SEQ ID NO: 37789 - RNA, 32 nt, Homo Sapiens
gucucuucugcuuccucugccccucccccagc

SEQ ID NO: 37790 - RNA, 32 nt, Homo Sapiens
augauguuggguccacccuccacgggcagguu

SEQ ID NO: 37791 - RNA, 32 nt, Homo Sapiens
acacucccacacuccagccuggguaacaguga

SEQ ID NO: 37792 - RNA, 32 nt, Homo Sapiens
caggcacuucuuccuuacuuggugcugaacuu

SEQ ID NO: 37793 - RNA, 32 nt, Homo Sapiens
cuacaguuagaaaaacaaaaauaugaagagaa

SEQ ID NO: 37794 - RNA, 32 nt, Homo Sapiens
acaacuaagguggcugaagaccuuucuggcag

SEQ ID NO: 37795 - RNA, 32 nt, Homo Sapiens
aggacuuuuuaaagaacgcuggguucuaucug

SEQ ID NO: 37796 - RNA, 32 nt, Homo Sapiens
uggauuuugagaaagaaaauaacuucucugca

SEQ ID NO: 37797 - RNA, 32 nt, Homo Sapiens
caaguucugagcugagaaauuauuuaaauagc

SEQ ID NO: 37798 - RNA, 31 nt, Homo Sapiens
caaacugcaagguucuggggccaaggccuac

SEQ ID NO: 37799 - RNA, 32 nt, Homo Sapiens
auucuccuucuucuccuucuuccacaaagacc

SEQ ID NO: 37800 - RNA, 32 nt, Homo Sapiens
auucauuuccucaaaauguggagagaaaggag

SEQ ID NO: 37801 - RNA, 32 nt, Homo Sapiens
agcuccuguggccuuguagaugacucuguacc

SEQ ID NO: 37802 - RNA, 32 nt, Homo Sapiens
cugagggcucugcagcggagugacagcaaccc

SEQ ID NO: 37803 - RNA, 32 nt, Homo Sapiens
gcccagcguccucccugccuccuuccgggaca

SEQ ID NO: 37804 - RNA, 32 nt, Homo Sapiens
uggugaggaaugccuucuccaaccugaguuug

SEQ ID NO: 37805 - RNA, 32 nt, Homo Sapiens
auagacgugcggacggcccaccaccccagccc

SEQ ID NO: 37806 - RNA, 32 nt, Homo Sapiens
gcguuggucggucuugcggggaggaggugccg

SEQ ID NO: 37807 - RNA, 31 nt, Homo Sapiens
agacauuuccaacaaggaaaguugcuaaaga

SEQ ID NO: 37808 - RNA, 32 nt, Homo Sapiens
ugaagccuggaaaguauguguggccacagggc

SEQ ID NO: 37809 - RNA, 32 nt, Homo Sapiens
caaaacucaucaccaguugccuuuuucuaacu

SEQ ID NO: 37810 - RNA, 32 nt, Homo Sapiens
ggacaugcugucccuccugccaaguaauaacu

SEQ ID NO: 37811 - RNA, 32 nt, Homo Sapiens
uagggagacagagguagaaaacugucuggccc

SEQ ID NO: 37812 - RNA, 32 nt, Homo Sapiens
gugcccgcuccagccgcggcagguuccagagc

SEQ ID NO: 37813 - RNA, 32 nt, Homo Sapiens
cguauaugaaggugacauaaaaaggaaaucug

SEQ ID NO: 37814 - RNA, 32 nt, Homo Sapiens
gagggccuccucccggccccgggcauucgcgg

SEQ ID NO: 37815 - RNA, 32 nt, Homo Sapiens
aaauuguaauggaagaaaugcauauuaaguua

SEQ ID NO: 37816 - RNA, 32 nt, Homo Sapiens
ggcuggugauccuggggugacacccugaucca

SEQ ID NO: 37817 - RNA, 32 nt, Homo Sapiens
guguuggggguaaaagcccacccuacagaaag

SEQ ID NO: 37818 - RNA, 32 nt, Homo Sapiens
uagcugcuacgggguccggccggcgcccuccc

SEQ ID NO: 37819 - RNA, 32 nt, Homo Sapiens
acauguccucaaaaguuuuucugaucccucgc

SEQ ID NO: 37820 - RNA, 32 nt, Homo Sapiens
acagacacacguaucuaacaaacaaacaaaca

SEQ ID NO: 37821 - RNA, 32 nt, Homo Sapiens
gggcugagacaguggcagcugcggccccgacc

SEQ ID NO: 37822 - RNA, 32 nt, Homo Sapiens
gcggcgggagagcggcuggugucgccggcuua

SEQ ID NO: 37823 - RNA, 32 nt, Homo Sapiens
gcagagacagcuguggguacaaugaaaaagug

SEQ ID NO: 37824 - RNA, 32 nt, Homo Sapiens
aagcaaucucgacuuucgcauuugagauucca

SEQ ID NO: 37825 - RNA, 32 nt, Homo Sapiens
guagauggcugcagcccucgaccuccugggcu

SEQ ID NO: 37826 - RNA, 32 nt, Homo Sapiens
acuugugggcaaucugggggagccacaacuuu

SEQ ID NO: 37827 - RNA, 32 nt, Homo Sapiens
ccugagcccucccuucacccugccccuccccc

SEQ ID NO: 37828 - RNA, 30 nt, Homo Sapiens
accaugugauuugccaccccgcuucuaggc

SEQ ID NO: 37829 - RNA, 31 nt, Homo Sapiens
agucauuguugcuggccuccaaggcaaauag

SEQ ID NO: 37830 - RNA, 32 nt, Homo Sapiens
uggcaguggcugugucccagugagcuuuacuc

SEQ ID NO: 37831 - RNA, 31 nt, Homo Sapiens
agaagcgcuccaguaucuccaaggguaccuu

SEQ ID NO: 37832 - RNA, 32 nt, Homo Sapiens
gccgcccggccgcuagacugacuucgcgcagc

SEQ ID NO: 37833 - RNA, 32 nt, Homo Sapiens
caaagccgagaccgagucuccuaaguccccgu

SEQ ID NO: 37834 - RNA, 32 nt, Homo Sapiens
cugccuguucuucuggaaugucuuggggguuu

SEQ ID NO: 37835 - RNA, 32 nt, Homo Sapiens
uccaguggccccugggguuccagccuguagca

SEQ ID NO: 37836 - RNA, 32 nt, Homo Sapiens
gcggcggaggugcgcgcggagccaugguuauc

SEQ ID NO: 37837 - RNA, 32 nt, Homo Sapiens
guggaggagcccaccagccccuucuucuugug

SEQ ID NO: 37838 - RNA, 32 nt, Homo Sapiens
auaaagcucuccguuccaacccuaccccaaac

SEQ ID NO: 37839 - RNA, 32 nt, Homo Sapiens
aaaauuaaaaagaucacugaagcuaucuuuua

SEQ ID NO: 37840 - RNA, 32 nt, Homo Sapiens
cuucagaaggaaacagaaggaugagaaagccu

SEQ ID NO: 37841 - RNA, 32 nt, Homo Sapiens
gauucacccacccaggagacaagauuugaaug

SEQ ID NO: 37842 - RNA, 32 nt, Homo Sapiens
ggagacuccgcucacuccccacggccagcgug

SEQ ID NO: 37843 - RNA, 32 nt, Homo Sapiens
uuaccagcagugcuaccucugucugggugguu

SEQ ID NO: 37844 - RNA, 32 nt, Homo Sapiens
ucguguggauggggcgcuggccgcccgcugug

SEQ ID NO: 37845 - RNA, 32 nt, Homo Sapiens
gccucacaaaagugguugugauugcaaggauu

SEQ ID NO: 37846 - RNA, 32 nt, Homo Sapiens
aaggcacacaguccgcuucuucguccucaggg

SEQ ID NO: 37847 - RNA, 32 nt, Homo Sapiens
ccagccgcgggccucgcucggugcuaggcuac

SEQ ID NO: 37848 - RNA, 32 nt, Homo Sapiens
gaaguccuucuaaagagcugccugccagcugc

SEQ ID NO: 37849 - RNA, 32 nt, Homo Sapiens
gccugcaucgccauggacaccaccagguacag

SEQ ID NO: 37850 - RNA, 32 nt, Homo Sapiens
gccaagggggccaagaggaaaagcaucugugg

SEQ ID NO: 37851 - RNA, 32 nt, Homo Sapiens
uucacaacaggcuuuaccauguggaugaugua

SEQ ID NO: 37852 - RNA, 32 nt, Homo Sapiens
guaaaucacagcaagugcacuuuuaaaugugu

SEQ ID NO: 37853 - RNA, 32 nt, Homo Sapiens
gugauaaggaacaauauggacuucuugcagcu

SEQ ID NO: 37854 - RNA, 32 nt, Homo Sapiens
uuggaguguucagcucuuuguauuuccucccc

SEQ ID NO: 37855 - RNA, 32 nt, Homo Sapiens
uggugaagaacacauauguccugugccgcccu

SEQ ID NO: 37856 - RNA, 32 nt, Homo Sapiens
ccaggcuggccccaagcagcacguccugguga

SEQ ID NO: 37857 - RNA, 32 nt, Homo Sapiens
aucaugcaauuuuacuuugucuagcuucuaau

SEQ ID NO: 37858 - RNA, 28 nt, Homo Sapiens
cauucaggagcugauauguguuucaaag

SEQ ID NO: 37859 - RNA, 32 nt, Homo Sapiens
aagcaacuccgucugcugcagcugacccccuc

SEQ ID NO: 37860 - RNA, 32 nt, Homo Sapiens
gcaugaggcucccgggcagagccuggaacccg

SEQ ID NO: 37861 - RNA, 32 nt, Homo Sapiens
augaucccaggcuggaggaagcagcaggcuag

SEQ ID NO: 37862 - RNA, 28 nt, Homo Sapiens
caucaaaagcacuuucauuugaaaauua

SEQ ID NO: 37863 - RNA, 32 nt, Homo Sapiens
uuucguuauuuuuagucaugucaccaugaugu

SEQ ID NO: 37864 - RNA, 32 nt, Homo Sapiens
caguggagggcucaugggugggacauggaaaa

SEQ ID NO: 37865 - RNA, 32 nt, Homo Sapiens
cgaggcucccucuuccucuccauaccugcccc

SEQ ID NO: 37866 - RNA, 32 nt, Homo Sapiens
uaagauaucccucacacccagcccccauuacc

SEQ ID NO: 37867 - RNA, 32 nt, Homo Sapiens
gccacggacuccaaugcccagcuccucucccc

SEQ ID NO: 37868 - RNA, 32 nt, Homo Sapiens
ugacagagccccgaugacacggacaccucggc

SEQ ID NO: 37869 - RNA, 32 nt, Homo Sapiens
auauauguaaauauauuaaacacauccauuaa

SEQ ID NO: 37870 - RNA, 32 nt, Homo Sapiens
cccgccuaagccuguuugggguugcugacucg

SEQ ID NO: 37871 - RNA, 32 nt, Homo Sapiens
uuugcugcgcaucaggauguuugguggacauu

SEQ ID NO: 37872 - RNA, 32 nt, Homo Sapiens
caaugaucaaaauaagaacauugcuuuuugca

SEQ ID NO: 37873 - RNA, 32 nt, Homo Sapiens
cugccucugacuugguauuuccagguccguau

SEQ ID NO: 37874 - RNA, 32 nt, Homo Sapiens
gaaaucuggcaaauacauaccuuuggagauug

SEQ ID NO: 37875 - RNA, 30 nt, Homo Sapiens
cuuuaaugggaguggaggagcugccugugu

SEQ ID NO: 37876 - RNA, 32 nt, Homo Sapiens
cuuaggucuguuuggagagaaaacaguuccuc

SEQ ID NO: 37877 - RNA, 32 nt, Homo Sapiens
gggagagaguaccauggauggcaucauugaac

SEQ ID NO: 37878 - RNA, 32 nt, Homo Sapiens
gcacuguuucaugucuguggucugccaaauac

SEQ ID NO: 37879 - RNA, 32 nt, Homo Sapiens
ggagaauuuuuuccuugugcuucuaguagacu

SEQ ID NO: 37880 - RNA, 32 nt, Homo Sapiens
uaaaacgaagggaaaagggaccacugaauugc

SEQ ID NO: 37881 - RNA, 32 nt, Homo Sapiens
aucaccuugccccuccucccugucuucucuga

SEQ ID NO: 37882 - RNA, 32 nt, Homo Sapiens
cuggcgccugacgaggugguggcgcugcuggc

SEQ ID NO: 37883 - RNA, 32 nt, Homo Sapiens
cggagccucaaacaagcauuauaccuucugug

SEQ ID NO: 37884 - RNA, 32 nt, Homo Sapiens
aaagcagacuaaaagcaugaaauugcuuucag

SEQ ID NO: 37885 - RNA, 32 nt, Homo Sapiens
cagccgcaucucggccagcucuccucgccguc

SEQ ID NO: 37886 - RNA, 32 nt, Homo Sapiens
ccauggucaccaucgacacgugcuaugggggc

SEQ ID NO: 37887 - RNA, 32 nt, Homo Sapiens
gacccacauccgaucgguaccggagcgggagg

SEQ ID NO: 37888 - RNA, 32 nt, Homo Sapiens
uuuaggauucacauauaggccuaugauucauu

SEQ ID NO: 37889 - RNA, 30 nt, Homo Sapiens
ggccgggugcccgugccccauccugaggcc

SEQ ID NO: 37890 - RNA, 32 nt, Homo Sapiens
gccccgucugcagggcagaggcagauguggca

SEQ ID NO: 37891 - RNA, 32 nt, Homo Sapiens
gcgcgguggugaugcgagccugcugggcggcg

SEQ ID NO: 37892 - RNA, 32 nt, Homo Sapiens
gagcagacagaaaagauauagcaaaugaagaa

SEQ ID NO: 37893 - RNA, 32 nt, Homo Sapiens
ugcugaaguauuuaaaucuuauccuuguaucu

SEQ ID NO: 37894 - RNA, 32 nt, Homo Sapiens
gcgaggggacccacaagcggcgccucggcccu

SEQ ID NO: 37895 - RNA, 32 nt, Homo Sapiens
uuuuguacauagugaggagcuuugaaacgagg

SEQ ID NO: 37896 - RNA, 32 nt, Homo Sapiens
ccuugcauauaaauaacggagcauacagugag

SEQ ID NO: 37897 - RNA, 32 nt, Homo Sapiens
accuggggacauaccaagaaaaacacucauca

SEQ ID NO: 37898 - RNA, 32 nt, Homo Sapiens
aucauucuaugcugauuuuacaaaagaucauu

SEQ ID NO: 37899 - RNA, 32 nt, Homo Sapiens
cggaacagggccuggguauccgcguggugggc

SEQ ID NO: 37900 - RNA, 32 nt, Homo Sapiens
cgggagagugaagggccggggaggacaaggcg

SEQ ID NO: 37901 - RNA, 30 nt, Homo Sapiens
ucuccugagaagcugggagucuuccucgcu

SEQ ID NO: 37902 - RNA, 32 nt, Homo Sapiens
ccacauugggcacccuuuauccaggucccucc

SEQ ID NO: 37903 - RNA, 32 nt, Homo Sapiens
uuuucuuugguugcuuuuuuuuuuuuuuuuuu

SEQ ID NO: 37904 - RNA, 32 nt, Homo Sapiens
ugaagauacauguuuuaaucuuguugggaaua

SEQ ID NO: 37905 - RNA, 32 nt, Homo Sapiens
uaucaugacugauagaucuguuaaguugugua

SEQ ID NO: 37906 - RNA, 32 nt, Homo Sapiens
cugccgcgcuccccggggcaccccucaauugu

SEQ ID NO: 37907 - RNA, 32 nt, Homo Sapiens
aauucaguaacauuuucugaccaagagacaug

SEQ ID NO: 37908 - RNA, 32 nt, Homo Sapiens
guucgagaccacccugaucaaaacagagaaac

SEQ ID NO: 37909 - RNA, 32 nt, Homo Sapiens
accaaauauugcaucgcaugcugcugauuuuc

SEQ ID NO: 37910 - RNA, 32 nt, Homo Sapiens
uggcucacaccuguaauaccagcacuuuggga

SEQ ID NO: 37911 - RNA, 32 nt, Homo Sapiens
auaguacuuuaccuguugaacucuugugauuu

SEQ ID NO: 37912 - RNA, 32 nt, Homo Sapiens
ccagccggcccccaccucggcugcugaucccc

SEQ ID NO: 37913 - RNA, 32 nt, Homo Sapiens
ugggccucauuucuugcugcagagaaucuuuu

SEQ ID NO: 37914 - RNA, 32 nt, Homo Sapiens
aauguuguguauauauuuuaaaaagcacuuug

SEQ ID NO: 37915 - RNA, 32 nt, Homo Sapiens
uggcacgugcagcguccuuggcaguuggccca

SEQ ID NO: 37916 - RNA, 32 nt, Homo Sapiens
acuuuuaaaaauuguuuuuaaaaauagacuuu

SEQ ID NO: 37917 - RNA, 32 nt, Homo Sapiens
uccuuaccuugauguugaacugcgaauccucc

SEQ ID NO: 37918 - RNA, 32 nt, Homo Sapiens
augacaagaacaaagccacugacugagaugga

SEQ ID NO: 37919 - RNA, 32 nt, Homo Sapiens
ucuuccuuccacugaaggucuucacgggccuc

SEQ ID NO: 37920 - RNA, 32 nt, Homo Sapiens
gcauuuucguuacauuguguccugcuuauacu

SEQ ID NO: 37921 - RNA, 32 nt, Homo Sapiens
auucauacuacuaccaucugguaaaggcaauc

SEQ ID NO: 37922 - RNA, 32 nt, Homo Sapiens
caugcaguuuaaccucuuuaaagugaccuugu

SEQ ID NO: 37923 - RNA, 32 nt, Homo Sapiens
aaggugccaucggcagggcuuggccucaugaa

SEQ ID NO: 37924 - RNA, 32 nt, Homo Sapiens
uuuuuuuuguuuguuucuuuuucaugguauua

SEQ ID NO: 37925 - RNA, 32 nt, Homo Sapiens
acuagguaucugcacucccauguucauuucag

SEQ ID NO: 37926 - RNA, 32 nt, Homo Sapiens
gagcgguaaauccuaaagaaggugauaaaugu

SEQ ID NO: 37927 - RNA, 32 nt, Homo Sapiens
ggccccgcucuccuccgagacccaggcugagc

SEQ ID NO: 37928 - RNA, 32 nt, Homo Sapiens
cuccuccagccccgccucccccguacaggcag

SEQ ID NO: 37929 - RNA, 32 nt, Homo Sapiens
cguugccuucaguaaucagggugugaaaaaag

SEQ ID NO: 37930 - RNA, 32 nt, Homo Sapiens
aguuccccucguuccuugggagaugauggccu

SEQ ID NO: 37931 - RNA, 32 nt, Homo Sapiens
caagagaggggagccuaggagcuuggauugac

SEQ ID NO: 37932 - RNA, 32 nt, Homo Sapiens
uuuggauuucuuccucaucaagagacugcugc

SEQ ID NO: 37933 - RNA, 32 nt, Homo Sapiens
gcauugcagaaagagauugaagauauuuacau

SEQ ID NO: 37934 - RNA, 32 nt, Homo Sapiens
cugcccacucgcgucuccgcagccguagccgc

SEQ ID NO: 37935 - RNA, 32 nt, Homo Sapiens
guaaaaguaugcaguuuuaaauuuauaauauu

SEQ ID NO: 37936 - RNA, 32 nt, Homo Sapiens
uccagcgcgaguuccucaaauguuuuccugcg

SEQ ID NO: 37937 - RNA, 32 nt, Homo Sapiens
uacugugggguaagggggcgccugcuugccug

SEQ ID NO: 37938 - RNA, 32 nt, Homo Sapiens
agaaauuuauaaacuuuuuucuuacugucuuu

SEQ ID NO: 37939 - RNA, 32 nt, Homo Sapiens
cccauugagagaaagaucucugugcuguaaac

SEQ ID NO: 37940 - RNA, 32 nt, Homo Sapiens
caacacuuuuuuacucacaacuuccuaugagu

SEQ ID NO: 37941 - RNA, 32 nt, Homo Sapiens
cggcggcgcggcagcggagcgcagcaucaugg

SEQ ID NO: 37942 - RNA, 32 nt, Homo Sapiens
ggguuccagaaaggcaucugugugaugguucc

SEQ ID NO: 37943 - RNA, 32 nt, Homo Sapiens
uuuagaaaaagguuguuacauaaaacacccug

SEQ ID NO: 37944 - RNA, 32 nt, Homo Sapiens
cacagggcgagggguuggugggaggguuggca

SEQ ID NO: 37945 - RNA, 32 nt, Homo Sapiens
cacuuuuuuauuuaacugauaagauuuuuguu

SEQ ID NO: 37946 - RNA, 32 nt, Homo Sapiens
auugauuucuuaccguuuuuggcucuguuuug

SEQ ID NO: 37947 - RNA, 32 nt, Homo Sapiens
gcgugcuuuuucuuugauuugagguacagcau

SEQ ID NO: 37948 - RNA, 32 nt, Homo Sapiens
auuaguauuuccuauuuuuuuaucuacugugu

SEQ ID NO: 37949 - RNA, 32 nt, Homo Sapiens
uugaaguuuaauggaauaauaguucucaggau

SEQ ID NO: 37950 - RNA, 32 nt, Homo Sapiens
uuucugcauaguuuuucuucugcuuacuuuuu

SEQ ID NO: 37951 - RNA, 32 nt, Homo Sapiens
ucucauacagugagcagauuuuucaaucuacu

SEQ ID NO: 37952 - RNA, 29 nt, Homo Sapiens
caggaugccugcccuggcaugccuccgga

SEQ ID NO: 37953 - RNA, 32 nt, Homo Sapiens
gcccagcgaaugccaauaggagagagcaccgg

SEQ ID NO: 37954 - RNA, 32 nt, Homo Sapiens
acacagauaaaacuagccaagggcaccuguaa

SEQ ID NO: 37955 - RNA, 32 nt, Homo Sapiens
cggguagcuggcggggggaggaggcaggaacc

SEQ ID NO: 37956 - RNA, 32 nt, Homo Sapiens
ucucuuaaauaagcuaugauauuaaucagauc

SEQ ID NO: 37957 - RNA, 32 nt, Homo Sapiens
uggugccgaccucacccgcuccccucaguggc

SEQ ID NO: 37958 - RNA, 32 nt, Homo Sapiens
uauaugcaucccuggugaaggaucuugccugc

SEQ ID NO: 37959 - RNA, 32 nt, Homo Sapiens
aaauugugagacaauaaaugccuguuguuuaa

SEQ ID NO: 37960 - RNA, 32 nt, Homo Sapiens
acccucgugcugcucaccuggaucccggcgcu

SEQ ID NO: 37961 - RNA, 32 nt, Homo Sapiens
uccuugcuccggagauauucccagugagucgg

SEQ ID NO: 37962 - RNA, 32 nt, Homo Sapiens
cgcaucucagaaucagugaauuuuaggaaaau

SEQ ID NO: 37963 - RNA, 32 nt, Homo Sapiens
gccggcuugggguggggccucgcgcccuagug

SEQ ID NO: 37964 - RNA, 32 nt, Homo Sapiens
auuuuuacaucauaagauguauuaguuuacag

SEQ ID NO: 37965 - RNA, 32 nt, Homo Sapiens
auggcucuucugcaagaacccccggccagcca

SEQ ID NO: 37966 - RNA, 32 nt, Homo Sapiens
uuuaggaaaauauuaagcuuuauaaaauagca

SEQ ID NO: 37967 - RNA, 32 nt, Homo Sapiens
aauugauaguaccaccugauacagggcuuugc

SEQ ID NO: 37968 - RNA, 31 nt, Homo Sapiens
auuuccccacccucggaacccagacgcaugc

SEQ ID NO: 37969 - RNA, 32 nt, Homo Sapiens
auuucuuccuuccacaguuaucuuagcuggau

SEQ ID NO: 37970 - RNA, 32 nt, Homo Sapiens
gaagcgcugcacgagcugugucuuccuucucu

SEQ ID NO: 37971 - RNA, 32 nt, Homo Sapiens
gcggcggcggcaggagagcggccgggcgucag

SEQ ID NO: 37972 - RNA, 28 nt, Homo Sapiens
uggcuguggcggccgcagcaguggcuga

SEQ ID NO: 37973 - RNA, 32 nt, Homo Sapiens
uguucuauuugcuuuaaugagaauagaaacgu

SEQ ID NO: 37974 - RNA, 32 nt, Homo Sapiens
auuuuuguauauguaauuguaauuuugcccau

SEQ ID NO: 37975 - RNA, 32 nt, Homo Sapiens
agaauagugucuagcauguaagccuuguggac

SEQ ID NO: 37976 - RNA, 32 nt, Homo Sapiens
gcagaaggauacaaauaaaaagaaauaaguaa

SEQ ID NO: 37977 - RNA, 32 nt, Homo Sapiens
uggccgcucucuccucuccccuccucagaggg

SEQ ID NO: 37978 - RNA, 32 nt, Homo Sapiens
ggguaggcgggugggaaugggguacuugggaa

SEQ ID NO: 37979 - RNA, 32 nt, Homo Sapiens
auuaguguaacuuuuuucuuuaguuccuccug

SEQ ID NO: 37980 - RNA, 30 nt, Homo Sapiens
cggacauuccaccacuagaguauacuuugc

SEQ ID NO: 37981 - RNA, 32 nt, Homo Sapiens
ugcggccauggaccggccccugucgucgucgg

SEQ ID NO: 37982 - RNA, 32 nt, Homo Sapiens
cuaagaggaccgagagguggcguggacagauu

SEQ ID NO: 37983 - RNA, 32 nt, Homo Sapiens
cuggaauauuaagaaaaugagaaauuauauuu

SEQ ID NO: 37984 - RNA, 32 nt, Homo Sapiens
uuaggugugcccagcccuccagacccggccuu

SEQ ID NO: 37985 - RNA, 32 nt, Homo Sapiens
uuuuuuggggacggagugucccucuuguugcc

SEQ ID NO: 37986 - RNA, 32 nt, Homo Sapiens
gcgcacgcgggccggggccagcugcucgcgcu

SEQ ID NO: 37987 - RNA, 32 nt, Homo Sapiens
gcgccgagccccacaauggcuuauucagaaga

SEQ ID NO: 37988 - RNA, 32 nt, Homo Sapiens
ccgccugcggagagcaccgggaggcgggcccu

SEQ ID NO: 37989 - RNA, 32 nt, Homo Sapiens
cccuggugccccugucccaccccuaccucuag

SEQ ID NO: 37990 - RNA, 32 nt, Homo Sapiens
ucccagguucgcgcccgagcucugcuagccac

SEQ ID NO: 37991 - RNA, 32 nt, Homo Sapiens
ccuuagggccgcuccggcugcccgucggccgg

SEQ ID NO: 37992 - RNA, 32 nt, Homo Sapiens
agcagguaccacgguccucggcccaucuccaa

SEQ ID NO: 37993 - RNA, 32 nt, Homo Sapiens
ugugggaggagggggcugguaucccaaacucu

SEQ ID NO: 37994 - RNA, 32 nt, Homo Sapiens
ccuggcuucugguugucauggaugcacuggua

SEQ ID NO: 37995 - RNA, 32 nt, Homo Sapiens
uggguuacagcuuuuuauucuucgaaggauca

SEQ ID NO: 37996 - RNA, 32 nt, Homo Sapiens
cauauugcauuaccuugaaauaugaagugcca

SEQ ID NO: 37997 - RNA, 32 nt, Homo Sapiens
agccccugggcaggcguccgcccgcgcagccg

SEQ ID NO: 37998 - RNA, 32 nt, Homo Sapiens
caaaugauauagacuguaaaugucacagcagu

SEQ ID NO: 37999 - RNA, 32 nt, Homo Sapiens
ccguucugguucucggagguguguccuucgcc

SEQ ID NO: 38000 - RNA, 31 nt, Homo Sapiens
aggcgugagccccagcacuaggugggaaggc

SEQ ID NO: 38001 - RNA, 32 nt, Homo Sapiens
gaggucacagggaagucacagaacaguaauac

SEQ ID NO: 38002 - RNA, 32 nt, Homo Sapiens
aaugacguaguugaaaggaaaauguacuguug

SEQ ID NO: 38003 - RNA, 32 nt, Homo Sapiens
ucuguuauacaccuguaucaugaaagcaaaaa

SEQ ID NO: 38004 - RNA, 32 nt, Homo Sapiens
cuuugcccaagugacugaaaaauacagcuucu

SEQ ID NO: 38005 - RNA, 32 nt, Homo Sapiens
uggaaaaggucucauuauauauugggugcuaa

SEQ ID NO: 38006 - RNA, 32 nt, Homo Sapiens
cauguggcaucgucauuauuguagaaggguua

SEQ ID NO: 38007 - RNA, 32 nt, Homo Sapiens
cucugcuucugugaguucaucuuucuuagauu

SEQ ID NO: 38008 - RNA, 32 nt, Homo Sapiens
aggaccccuccaugugggcuaguugggcuucc

SEQ ID NO: 38009 - RNA, 32 nt, Homo Sapiens
aaaaaugauaauuuacuuguagucuuuuauga

SEQ ID NO: 38010 - RNA, 31 nt, Homo Sapiens
uuacuaaugcaaaaaaaaaaaaaaaaaaaaa

SEQ ID NO: 38011 - RNA, 32 nt, Homo Sapiens
ggccagcuggaggugaagaagagaaugugaca

SEQ ID NO: 38012 - RNA, 32 nt, Homo Sapiens
cauccaguguaaaaaggaaguuggaaugggag

SEQ ID NO: 38013 - RNA, 32 nt, Homo Sapiens
auggaacuuggaaaugauuccaaacauggcca

SEQ ID NO: 38014 - RNA, 32 nt, Homo Sapiens
gauacacaaaaauaccaauaugauguguacag

SEQ ID NO: 38015 - RNA, 32 nt, Homo Sapiens
ccuaggccccucaggagcuuugcagagaggag

SEQ ID NO: 38016 - RNA, 32 nt, Homo Sapiens
ucugcagcccuugggcaguucucacuccuagg

SEQ ID NO: 38017 - RNA, 32 nt, Homo Sapiens
cauugcacuccagccugggugacaaagcaaga

SEQ ID NO: 38018 - RNA, 32 nt, Homo Sapiens
uuauuuuaauaucuaaaauauuggguaugaug

SEQ ID NO: 38019 - RNA, 32 nt, Homo Sapiens
ucugauuucucauuugaguauuacaauuuuug

SEQ ID NO: 38020 - RNA, 32 nt, Homo Sapiens
ggggagcaucccacccacaugcccugggcagg

SEQ ID NO: 38021 - RNA, 32 nt, Homo Sapiens
ugccgccccccucccgcccccagggaaucucu

SEQ ID NO: 38022 - RNA, 32 nt, Homo Sapiens
aauguguguagaagaggaccuggcacacaguc

SEQ ID NO: 38023 - RNA, 32 nt, Homo Sapiens
ugugccagcaggguggcugugcccagcaggag

SEQ ID NO: 38024 - RNA, 32 nt, Homo Sapiens
gugagcugggagguguucagaauagaagagca

SEQ ID NO: 38025 - RNA, 32 nt, Homo Sapiens
aaauuauuuuuguagcucaguuucauuauugu

SEQ ID NO: 38026 - RNA, 32 nt, Homo Sapiens
cgcuucccgagcgcggcggcggcggccauggc

SEQ ID NO: 38027 - RNA, 32 nt, Homo Sapiens
agaggaagaaaaacggcccaucuuuuagaguc

SEQ ID NO: 38028 - RNA, 32 nt, Homo Sapiens
gaucauugagucccacccccagcccucugcug

SEQ ID NO: 38029 - RNA, 32 nt, Homo Sapiens
ucugccuauuuuuucuuagcacauugguugcu

SEQ ID NO: 38030 - RNA, 32 nt, Homo Sapiens
ggucugccucauuggauuucgucagguuuucu

SEQ ID NO: 38031 - RNA, 32 nt, Homo Sapiens
aauaugauauugcauaugcauaguucccaugu

SEQ ID NO: 38032 - RNA, 32 nt, Homo Sapiens
cugcuccaugucugcugaucugcaggaagcag

SEQ ID NO: 38033 - RNA, 32 nt, Homo Sapiens
ucaaguggcaucaaugcagauuuuaaaugugu

SEQ ID NO: 38034 - RNA, 32 nt, Homo Sapiens
uuugauagugggucgggggauucuucaggaau

SEQ ID NO: 38035 - RNA, 32 nt, Homo Sapiens
caugagcggaagcuucgaggcaugauggucga

SEQ ID NO: 38036 - RNA, 32 nt, Homo Sapiens
uggcucuggaagggcuggugaggacucugccu

SEQ ID NO: 38037 - RNA, 32 nt, Homo Sapiens
guuugaagaacacugguaauguguggaguauc

SEQ ID NO: 38038 - RNA, 27 nt, Homo Sapiens
ccauggauccugaggugaccuugcugc

SEQ ID NO: 38039 - RNA, 32 nt, Homo Sapiens
uugggugacaaaucaccuccagguuggggaug

SEQ ID NO: 38040 - RNA, 32 nt, Homo Sapiens
aaaauacaaaaauuagccgggugugguggcag

SEQ ID NO: 38041 - RNA, 32 nt, Homo Sapiens
ccccgccccacuuucccuucuucaaaggacaa

SEQ ID NO: 38042 - RNA, 32 nt, Homo Sapiens
ucuuggguacuacuagcuauuguucaauucag

SEQ ID NO: 38043 - RNA, 32 nt, Homo Sapiens
agucuaucagcauuagaucacacccuuuaguc

SEQ ID NO: 38044 - RNA, 31 nt, Homo Sapiens
acgggcaggggcugaggaccccgcgccagcu

SEQ ID NO: 38045 - RNA, 32 nt, Homo Sapiens
gcgcgcgcggcuuuaaagagggggcagcggag

SEQ ID NO: 38046 - RNA, 32 nt, Homo Sapiens
uuuuuaaagauuuuauacuacaucuuguuaaa

SEQ ID NO: 38047 - RNA, 32 nt, Homo Sapiens
cugggcgauagacucuuccucagcagccuggc

SEQ ID NO: 38048 - RNA, 32 nt, Homo Sapiens
gcaugucaaggagaaucuccaugaugacacgg

SEQ ID NO: 38049 - RNA, 32 nt, Homo Sapiens
accuuucccagggugucaugcaggaaguagaa

SEQ ID NO: 38050 - RNA, 32 nt, Homo Sapiens
uagucucucuacaggucucucucuuuacguug

SEQ ID NO: 38051 - RNA, 32 nt, Homo Sapiens
ucgucuuauuuuauuuucuuuuccucucuuuc

SEQ ID NO: 38052 - RNA, 32 nt, Homo Sapiens
cauuuguugagccccaguccugccccccaccc

SEQ ID NO: 38053 - RNA, 32 nt, Homo Sapiens
uuuugaaauugacaauuagauuauuaauuuuc

SEQ ID NO: 38054 - RNA, 32 nt, Homo Sapiens
uccaguuucacucucagcauuccaagaucuua

SEQ ID NO: 38055 - RNA, 32 nt, Homo Sapiens
gguacugggucccagucugggacucugcugcu

SEQ ID NO: 38056 - RNA, 32 nt, Homo Sapiens
gggacagaggaacaucugucuucugaaucugu

SEQ ID NO: 38057 - RNA, 32 nt, Homo Sapiens
ggcgagcaaggcgggcggcauggugcugguga

SEQ ID NO: 38058 - RNA, 32 nt, Homo Sapiens
uugccuuguaagugucaggccuccugggcgcu

SEQ ID NO: 38059 - RNA, 32 nt, Homo Sapiens
gcuagaagaacaagaggaugaucaauaaaguu

SEQ ID NO: 38060 - RNA, 32 nt, Homo Sapiens
ucuguccccccucuggagggguugacaaggga

SEQ ID NO: 38061 - RNA, 32 nt, Homo Sapiens
cuauucuuuauuccucuuucuucugaagauua

SEQ ID NO: 38062 - RNA, 32 nt, Homo Sapiens
ggcggcggcgcgcgccaugucguucagugaaa

SEQ ID NO: 38063 - RNA, 32 nt, Homo Sapiens
cugaguggccccagcggacaccuccucaggcu

SEQ ID NO: 38064 - RNA, 32 nt, Homo Sapiens
uuagcagaucgagugucuucuuccuuagaaau

SEQ ID NO: 38065 - RNA, 32 nt, Homo Sapiens
gggcaugggaaggagcagggccugcugcuucc

SEQ ID NO: 38066 - RNA, 32 nt, Homo Sapiens
acaaaacuaucuauguucauauuuuguaauau

SEQ ID NO: 38067 - RNA, 32 nt, Homo Sapiens
caugaccuguugcauuuggcaaguucuagcaa

SEQ ID NO: 38068 - RNA, 32 nt, Homo Sapiens
ccuaaagccaaagacccgcgggcgcccucugc

SEQ ID NO: 38069 - RNA, 32 nt, Homo Sapiens
uccuuguuuugguugcaagaaccuggcucugc

SEQ ID NO: 38070 - RNA, 32 nt, Homo Sapiens
auauauuuaauauauguacacccauuauguuu

SEQ ID NO: 38071 - RNA, 32 nt, Homo Sapiens
aguguuagcuacugccuuucuagauauuaguc

SEQ ID NO: 38072 - RNA, 32 nt, Homo Sapiens
ucaaaaucggggggcggggguggacucggguu

SEQ ID NO: 38073 - RNA, 32 nt, Homo Sapiens
uagugucaugucagcaucagcucagggcuuca

SEQ ID NO: 38074 - RNA, 32 nt, Homo Sapiens
uguucuuaaauuauauguguacuuugucaugu

SEQ ID NO: 38075 - RNA, 32 nt, Homo Sapiens
cugguguugggucugaacaccccaacaucccu

SEQ ID NO: 38076 - RNA, 32 nt, Homo Sapiens
uuuuccuuucccuucaaaauuguaauuuccuu

SEQ ID NO: 38077 - RNA, 32 nt, Homo Sapiens
auaaauguugcaaugcaugauacuaucugugc

SEQ ID NO: 38078 - RNA, 32 nt, Homo Sapiens
acuuuuccacccucgggcuggcuggcucagug

SEQ ID NO: 38079 - RNA, 32 nt, Homo Sapiens
gcuucuggucugagggaggugucuccgaggau

SEQ ID NO: 38080 - RNA, 32 nt, Homo Sapiens
gagcugagggagaucgcauuucugccucccuc

SEQ ID NO: 38081 - RNA, 32 nt, Homo Sapiens
cuucacaggaggcaaauccagagccuggcugu

SEQ ID NO: 38082 - RNA, 32 nt, Homo Sapiens
aaguucaaguggcaucauuuuauauacaugua

SEQ ID NO: 38083 - RNA, 32 nt, Homo Sapiens
aaaggaaucugacaccaacuuuugagauuuau

SEQ ID NO: 38084 - RNA, 32 nt, Homo Sapiens
uaacaaguauauaucaaacaugugcugagggu

SEQ ID NO: 38085 - RNA, 32 nt, Homo Sapiens
cgcagcacacccggggaccaugggcuccaugu

SEQ ID NO: 38086 - RNA, 32 nt, Homo Sapiens
guucgcuugcugugaauuccuguccucguguc

SEQ ID NO: 38087 - RNA, 32 nt, Homo Sapiens
ccuaacuucauauauguauucuuaauugcaca

SEQ ID NO: 38088 - RNA, 32 nt, Homo Sapiens
auggcuucuccucagggcaaccccugcccaac

SEQ ID NO: 38089 - RNA, 32 nt, Homo Sapiens
cgcagacuugaccccgacgccacagcccagcc

SEQ ID NO: 38090 - RNA, 32 nt, Homo Sapiens
acguccagggcuuggccuggcuccugagccag

SEQ ID NO: 38091 - RNA, 32 nt, Homo Sapiens
ggagguccuucggccuggcucagcugggcugc

SEQ ID NO: 38092 - RNA, 32 nt, Homo Sapiens
ccuuggacaaaguggggggaaauuucuaagua

SEQ ID NO: 38093 - RNA, 32 nt, Homo Sapiens
auaugauaauuuauauaaaaccacuaauuguu

SEQ ID NO: 38094 - RNA, 32 nt, Homo Sapiens
gggcuggggaguggacagcaucaggugggaaa

SEQ ID NO: 38095 - RNA, 32 nt, Homo Sapiens
gagggccuggggugggggccaggggccaucug

SEQ ID NO: 38096 - RNA, 32 nt, Homo Sapiens
auaagcauccugaaaaaucagcuggggcauau

SEQ ID NO: 38097 - RNA, 32 nt, Homo Sapiens
gagcaggcugugaguuugggccccagaggcug

SEQ ID NO: 38098 - RNA, 32 nt, Homo Sapiens
acuucccagucugccuucuccugccagacacc

SEQ ID NO: 38099 - RNA, 32 nt, Homo Sapiens
aacaccccaagccaugggauuguccuuccugg

SEQ ID NO: 38100 - RNA, 27 nt, Homo Sapiens
cucguuuccuucuuugacauucucaca

SEQ ID NO: 38101 - RNA, 32 nt, Homo Sapiens
auucgcgguggguggggagcugccaggcuccu

SEQ ID NO: 38102 - RNA, 32 nt, Homo Sapiens
ccugcagcuccccugggcuccgcggccaguag

SEQ ID NO: 38103 - RNA, 32 nt, Homo Sapiens
acagagugaauaccuuccaaauaaaaagcuaa

SEQ ID NO: 38104 - RNA, 32 nt, Homo Sapiens
uuuuuuguuguugcuaaaauguuguaauuauc

SEQ ID NO: 38105 - RNA, 32 nt, Homo Sapiens
acugagggaagguggggguccgcccgggcugg

SEQ ID NO: 38106 - RNA, 32 nt, Homo Sapiens
agcugcaaaacauaagccaaaauacaacucac

SEQ ID NO: 38107 - RNA, 32 nt, Homo Sapiens
uuaagagacaaaauuaucauuuuugugauguu

SEQ ID NO: 38108 - RNA, 32 nt, Homo Sapiens
accaaagcaguaauucuuacuauaguuauuaa

SEQ ID NO: 38109 - RNA, 32 nt, Homo Sapiens
aaagccaguuuagaugaaaagcaaaaucuggu

SEQ ID NO: 38110 - RNA, 32 nt, Homo Sapiens
aaaaaggaagggaaaagucuuuuguugcccuc

SEQ ID NO: 38111 - RNA, 32 nt, Homo Sapiens
uuugcaucauaucguuagcauuuauuuggugg

SEQ ID NO: 38112 - RNA, 32 nt, Homo Sapiens
agggcguggggauacaguggaacaaaaguggu

SEQ ID NO: 38113 - RNA, 32 nt, Homo Sapiens
gaaacuuccuuccccugaaucugcggauugcu

SEQ ID NO: 38114 - RNA, 32 nt, Homo Sapiens
cagcuaggagaaugaagugugguguugggcag

SEQ ID NO: 38115 - RNA, 32 nt, Homo Sapiens
aguaacuauccagcugcaggugcagcagccac

SEQ ID NO: 38116 - RNA, 32 nt, Homo Sapiens
agaccaaggcuuucucuacugauuccgcagcu

SEQ ID NO: 38117 - RNA, 32 nt, Homo Sapiens
acuauguguguguuuuaaaauaaacuuuugga

SEQ ID NO: 38118 - RNA, 29 nt, Homo Sapiens
cuugugaggccuuuccugucaugacccag

SEQ ID NO: 38119 - RNA, 32 nt, Homo Sapiens
uucucccucuguguaaucuacucucucuuuau

SEQ ID NO: 38120 - RNA, 32 nt, Homo Sapiens
uuauugguuugccauccuuguucauuacaacu

SEQ ID NO: 38121 - RNA, 30 nt, Homo Sapiens
aaugaagagaagcuggaaguuuuugugauc

SEQ ID NO: 38122 - RNA, 32 nt, Homo Sapiens
auaaaauaaaaauaaaaagcguugcugaaaaa

SEQ ID NO: 38123 - RNA, 32 nt, Homo Sapiens
ccagcuccgcccccucacgcgcucucgccggg

SEQ ID NO: 38124 - RNA, 32 nt, Homo Sapiens
gggacugagccaaggaaggcguggggagcgug

SEQ ID NO: 38125 - RNA, 32 nt, Homo Sapiens
auauauuuuaucaaccuuuccaucaugucugu

SEQ ID NO: 38126 - RNA, 32 nt, Homo Sapiens
ggcgcuugcgcggggcgcguggccguggccag

SEQ ID NO: 38127 - RNA, 32 nt, Homo Sapiens
cgggaggccccggcucuccucuccccuguccu

SEQ ID NO: 38128 - RNA, 32 nt, Homo Sapiens
aaaacuuuaauaaugugucuguaaccaagaaa

SEQ ID NO: 38129 - RNA, 32 nt, Homo Sapiens
acacugugauaaaggggacuagaguggaagau

SEQ ID NO: 38130 - RNA, 32 nt, Homo Sapiens
acggggaccaauauuuuuaacuuugccuauuu

SEQ ID NO: 38131 - RNA, 32 nt, Homo Sapiens
agcuauaguuagugguaguguauuuuaugcgu

SEQ ID NO: 38132 - RNA, 32 nt, Homo Sapiens
uucgacgcacacgcgcacgcgcacgcacgcac

SEQ ID NO: 38133 - RNA, 32 nt, Homo Sapiens
uuauccugauuuuuuucuuuuuuuugguuuau

SEQ ID NO: 38134 - RNA, 32 nt, Homo Sapiens
uccgcucgggccuccacacgggccuccgaaga

SEQ ID NO: 38135 - RNA, 32 nt, Homo Sapiens
ucugggcuggcucagccccgggcccccaugcg

SEQ ID NO: 38136 - RNA, 32 nt, Homo Sapiens
ccauagcuuaaauuuuuuuucuuauugaaauc

SEQ ID NO: 38137 - RNA, 32 nt, Homo Sapiens
cguccgugcacgaccccaaacuucuccgcguu

SEQ ID NO: 38138 - RNA, 32 nt, Homo Sapiens
ugcauucauucaucagauauuuauuccaugcc

SEQ ID NO: 38139 - RNA, 32 nt, Homo Sapiens
aaguccaggcuccccaggaagccuggggugga

SEQ ID NO: 38140 - RNA, 30 nt, Homo Sapiens
cgacauguuccugcugcagauaacuagcca

SEQ ID NO: 38141 - RNA, 32 nt, Homo Sapiens
caccuagaaauuucucccuuuuuuaggcuggg

SEQ ID NO: 38142 - RNA, 32 nt, Homo Sapiens
acagucaaauguagacuaucaggccaaauuaa

SEQ ID NO: 38143 - RNA, 32 nt, Homo Sapiens
cauucuauccuccucccuuucccacaaaagaa

SEQ ID NO: 38144 - RNA, 32 nt, Homo Sapiens
ugugucaguuggaggaaaauagacuugaguag

SEQ ID NO: 38145 - RNA, 32 nt, Homo Sapiens
gagaggcgcucugauuuuuagaguuuccaguu

SEQ ID NO: 38146 - RNA, 32 nt, Homo Sapiens
cuuacgaaauacgucuuuuucagaacuguuaa

SEQ ID NO: 38147 - RNA, 32 nt, Homo Sapiens
cugcuggagagccggccgcugcccccucgucg

SEQ ID NO: 38148 - RNA, 32 nt, Homo Sapiens
gaaucugaacaaaggaauauaaaauugccauu

SEQ ID NO: 38149 - RNA, 32 nt, Homo Sapiens
gggucacugcuugucagcucagggcccugugc

SEQ ID NO: 38150 - RNA, 32 nt, Homo Sapiens
acucugcuggguugaaauuugccggggaggac

SEQ ID NO: 38151 - RNA, 32 nt, Homo Sapiens
uuaaaacucuugguggucacauauuguauaua

SEQ ID NO: 38152 - RNA, 31 nt, Homo Sapiens
aaagcucuugguaggauuaguugguucuaag

SEQ ID NO: 38153 - RNA, 32 nt, Homo Sapiens
uaaagcauucuauuugguucagauuucucaga

SEQ ID NO: 38154 - RNA, 32 nt, Homo Sapiens
uccugcugggcuccaguaacugcuauacugga

SEQ ID NO: 38155 - RNA, 32 nt, Homo Sapiens
ccauuaggaacguaucuuugcaaacugcccau

SEQ ID NO: 38156 - RNA, 32 nt, Homo Sapiens
agucaucagucuuuuuaaaucuuuuuuguugu

SEQ ID NO: 38157 - RNA, 32 nt, Homo Sapiens
guuacucauuuccaucuucucuucaacuuuca

SEQ ID NO: 38158 - RNA, 27 nt, Homo Sapiens
agcccgccugccuucagccuuccauga

SEQ ID NO: 38159 - RNA, 32 nt, Homo Sapiens
ucgcccaggcugguuucgaacucuguaauccc

SEQ ID NO: 38160 - RNA, 32 nt, Homo Sapiens
gcccgcuccuucccgcucggccgcggccucag

SEQ ID NO: 38161 - RNA, 32 nt, Homo Sapiens
cccugcccugucgcccgccgccggagcgguga

SEQ ID NO: 38162 - RNA, 32 nt, Homo Sapiens
agcuccuacacgcauacacacacacacgugua

SEQ ID NO: 38163 - RNA, 32 nt, Homo Sapiens
aagggacagcuauuuuuauugauuaucuuuaa

SEQ ID NO: 38164 - RNA, 32 nt, Homo Sapiens
gccgcagcccggagccggcagcuucggggccc

SEQ ID NO: 38165 - RNA, 32 nt, Homo Sapiens
ggagauggagggccugguggaugcccuccucc

SEQ ID NO: 38166 - RNA, 32 nt, Homo Sapiens
ccggcaaugcccugugcaugccauggucccua

SEQ ID NO: 38167 - RNA, 32 nt, Homo Sapiens
ccuuggaccccauguguccaucaccuagcugc

SEQ ID NO: 38168 - RNA, 32 nt, Homo Sapiens
uggcgggcuacaccccauucacacucaugaau

SEQ ID NO: 38169 - RNA, 32 nt, Homo Sapiens
gcggguagcuccuggggcugagccagaagcau

SEQ ID NO: 38170 - RNA, 32 nt, Homo Sapiens
cuauuaaaauugugcuuuuguaacaauguugu

SEQ ID NO: 38171 - RNA, 32 nt, Homo Sapiens
gaauagguugaaaucuuaacuggggcuaaaca

SEQ ID NO: 38172 - RNA, 32 nt, Homo Sapiens
guaaaaguaaaccauugcuaucuuucaccuua

SEQ ID NO: 38173 - RNA, 32 nt, Homo Sapiens
gggccacccggcucagcccguggaugcugacc

SEQ ID NO: 38174 - RNA, 32 nt, Homo Sapiens
ugagacaaugaaacaacagagacagugaaagu

SEQ ID NO: 38175 - RNA, 32 nt, Homo Sapiens
cccauucccuccuccgccucccccaggucggc

SEQ ID NO: 38176 - RNA, 32 nt, Homo Sapiens
augcacccagcccagggcuggcagucuuugca

SEQ ID NO: 38177 - RNA, 32 nt, Homo Sapiens
ccuugucuuuugcuuguacagaaucuguagug

SEQ ID NO: 38178 - RNA, 32 nt, Homo Sapiens
agagccccauccccccgccacacccacacggu

SEQ ID NO: 38179 - RNA, 32 nt, Homo Sapiens
gaacucaacuuuccagcauccuccucuguucu

SEQ ID NO: 38180 - RNA, 32 nt, Homo Sapiens
gcaggauucuacccuaguccgauuguauagaa

SEQ ID NO: 38181 - RNA, 32 nt, Homo Sapiens
acgaggccaagagcuacgcggcggcggcggag

SEQ ID NO: 38182 - RNA, 32 nt, Homo Sapiens
cuuggagccucuuuuuccuucuucagcaggaa

SEQ ID NO: 38183 - RNA, 32 nt, Homo Sapiens
cagcauuugggguuggguuggcccuacuccag

SEQ ID NO: 38184 - RNA, 32 nt, Homo Sapiens
gcgaggacggagaggacagcggcaucucuagg

SEQ ID NO: 38185 - RNA, 32 nt, Homo Sapiens
aaaggcaccacaaguauagacaguugcacuac

SEQ ID NO: 38186 - RNA, 32 nt, Homo Sapiens
aacagcaaccaccagaauagcauauaucuaaa

SEQ ID NO: 38187 - RNA, 32 nt, Homo Sapiens
augaaugaauaaaauguucuuugucaaguguc

SEQ ID NO: 38188 - RNA, 32 nt, Homo Sapiens
ccucagcucuuaccucaccucccuccauuuac

SEQ ID NO: 38189 - RNA, 32 nt, Homo Sapiens
gccacuuccuggcaccuccccccaugcuuguc

SEQ ID NO: 38190 - RNA, 32 nt, Homo Sapiens
cuuguccccugccugugccugccugggaguuu

SEQ ID NO: 38191 - RNA, 32 nt, Homo Sapiens
uugcucacgaaccccgccccagcccgccccgc

SEQ ID NO: 38192 - RNA, 32 nt, Homo Sapiens
ugccuacaaucccagcacuuugggaggccaaa

SEQ ID NO: 38193 - RNA, 29 nt, Homo Sapiens
gaccagccugggcaacauggcaagacccu

SEQ ID NO: 38194 - RNA, 32 nt, Homo Sapiens
ggugcccugugcuaugucgugccugcagggac

SEQ ID NO: 38195 - RNA, 32 nt, Homo Sapiens
cauauuuaaaaauuaaucauuuugcauuuuac

SEQ ID NO: 38196 - RNA, 32 nt, Homo Sapiens
uucagccgcuacuucauaaucuuuguauuaag

SEQ ID NO: 38197 - RNA, 32 nt, Homo Sapiens
gagggaagccauuuuucugcaauggaauuaaa

SEQ ID NO: 38198 - RNA, 32 nt, Homo Sapiens
cucuggugggaggcccggggcccuuccucgca

SEQ ID NO: 38199 - RNA, 32 nt, Homo Sapiens
ggcggggccguggucugguucugacuuugugu

SEQ ID NO: 38200 - RNA, 32 nt, Homo Sapiens
uuuucugaacggcaguaacaaaaaagaggagc

SEQ ID NO: 38201 - RNA, 32 nt, Homo Sapiens
ccucccuuguggcagggcugcccgugccuaug

SEQ ID NO: 38202 - RNA, 32 nt, Homo Sapiens
ugucucuuccuuguccuucucuggaaaugcca

SEQ ID NO: 38203 - RNA, 32 nt, Homo Sapiens
ggcagaucgcggcgcgcaccaggcgccggggc

SEQ ID NO: 38204 - RNA, 32 nt, Homo Sapiens
caguuggaauccacgggcccucuggagaucca

SEQ ID NO: 38205 - RNA, 27 nt, Homo Sapiens
uccugcaccuucuucaccguccaggcc

SEQ ID NO: 38206 - RNA, 32 nt, Homo Sapiens
acacuucugcucccggccgcccggcacuuacg

SEQ ID NO: 38207 - RNA, 32 nt, Homo Sapiens
ccauccggcaaguuacaggggccgccgacaga

SEQ ID NO: 38208 - RNA, 32 nt, Homo Sapiens
gauggagucuuucucugucacccaggcuggaa

SEQ ID NO: 38209 - RNA, 32 nt, Homo Sapiens
aaaauugucucaucuucuugggugcuguaacc

SEQ ID NO: 38210 - RNA, 32 nt, Homo Sapiens
cccaccuggacugacuucugcacugaagccac

SEQ ID NO: 38211 - RNA, 32 nt, Homo Sapiens
caugcucugggccagggcucugugccggcccc

SEQ ID NO: 38212 - RNA, 32 nt, Homo Sapiens
gaggcagggucugguccuggaagagccacugg

SEQ ID NO: 38213 - RNA, 32 nt, Homo Sapiens
caucucaucuucuguccucagauggauuuaca

SEQ ID NO: 38214 - RNA, 32 nt, Homo Sapiens
acacagccccgcccugccgcccugcccagacu

SEQ ID NO: 38215 - RNA, 32 nt, Homo Sapiens
aaaaacacugggagaaaugaaaaaauauauau

SEQ ID NO: 38216 - RNA, 32 nt, Homo Sapiens
acugugcuuuaucuuuuuuguuuggauugguu

SEQ ID NO: 38217 - RNA, 31 nt, Homo Sapiens
uggucucucuagggccugcccugagcucacc

SEQ ID NO: 38218 - RNA, 32 nt, Homo Sapiens
gccuaugggagagaacugggggugccuggagg

SEQ ID NO: 38219 - RNA, 32 nt, Homo Sapiens
aggcuccugcggucgccgccguugcugcuccu

SEQ ID NO: 38220 - RNA, 32 nt, Homo Sapiens
gauaagucucuugcuuuuuuuugauccugcuc

SEQ ID NO: 38221 - RNA, 32 nt, Homo Sapiens
aaauugaggugggggugucagaggaggcaaag

SEQ ID NO: 38222 - RNA, 32 nt, Homo Sapiens
aacccgagccucagauucuccucacacagcca

SEQ ID NO: 38223 - RNA, 32 nt, Homo Sapiens
ggcccaggaggugggagaaggucacagagccu

SEQ ID NO: 38224 - RNA, 32 nt, Homo Sapiens
cugguggcggggguggugcuggcucaguacau

SEQ ID NO: 38225 - RNA, 32 nt, Homo Sapiens
gggaaaggagagacggggccuccaucacgccu

SEQ ID NO: 38226 - RNA, 32 nt, Homo Sapiens
ccccgggcccugcggcagggcgacuccgggag

SEQ ID NO: 38227 - RNA, 32 nt, Homo Sapiens
aaacauuucuaaccuuuuaaauaaauggggaa

SEQ ID NO: 38228 - RNA, 32 nt, Homo Sapiens
ccucgccgcccgggaaaauccggggguggccg

SEQ ID NO: 38229 - RNA, 32 nt, Homo Sapiens
aaagcaggaaagcauauuugugagaaauaauu

SEQ ID NO: 38230 - RNA, 32 nt, Homo Sapiens
uuuugcuggaguucuguaaaucucaaaauguc

SEQ ID NO: 38231 - RNA, 32 nt, Homo Sapiens
caccuggaugcugcucagcgggcccuguacag

SEQ ID NO: 38232 - RNA, 32 nt, Homo Sapiens
ccacuuuuguaagcaucagggauuggguuuuc

SEQ ID NO: 38233 - RNA, 32 nt, Homo Sapiens
uccagccgcugccagcccggcggcgaggaccc

SEQ ID NO: 38234 - RNA, 32 nt, Homo Sapiens
cauuuguucaaguucuaauaaaauuaauguuu

SEQ ID NO: 38235 - RNA, 32 nt, Homo Sapiens
ucuagccccguccgcccacccugacccgcacc

SEQ ID NO: 38236 - RNA, 32 nt, Homo Sapiens
auuuucccuuucuacuuuuuaugagagccagu

SEQ ID NO: 38237 - RNA, 32 nt, Homo Sapiens
aauuccgggucucaaauagggauugguuuaaa

SEQ ID NO: 38238 - RNA, 32 nt, Homo Sapiens
ucaaaauggagucacuaauguuaagaaaacuu

SEQ ID NO: 38239 - RNA, 32 nt, Homo Sapiens
cggcggcagcggcugcggccaagcuggguccg

SEQ ID NO: 38240 - RNA, 32 nt, Homo Sapiens
uggguggguggauaagaaagaucaggaggugu

SEQ ID NO: 38241 - RNA, 32 nt, Homo Sapiens
cuguagagggaccucccuguacccuggccugc

SEQ ID NO: 38242 - RNA, 32 nt, Homo Sapiens
aauaauuaauaaaguuuuacuggaaaaaagaa

SEQ ID NO: 38243 - RNA, 32 nt, Homo Sapiens
cucggcgccccacuccaucagcacuaaugcuc

SEQ ID NO: 38244 - RNA, 32 nt, Homo Sapiens
uaauaccccccucccuccucgggcugaggccu

SEQ ID NO: 38245 - RNA, 32 nt, Homo Sapiens
ccaccagucccucgccagcagcuggggcacgc

SEQ ID NO: 38246 - RNA, 32 nt, Homo Sapiens
cccuucccagggcuagcuaauuccuagagaua

SEQ ID NO: 38247 - RNA, 32 nt, Homo Sapiens
cuucuagcagaucaugccauggagcucacgac

SEQ ID NO: 38248 - RNA, 32 nt, Homo Sapiens
gcaucgcagcagcagcagcagcagcagaagca

SEQ ID NO: 38249 - RNA, 32 nt, Homo Sapiens
aaagcuccaaauacccuauaucuuucuuuaau

SEQ ID NO: 38250 - RNA, 32 nt, Homo Sapiens
gucugcaaggccagcccgacccugacacugca

SEQ ID NO: 38251 - RNA, 32 nt, Homo Sapiens
gcugcaaaaucguuaaaaucuucaaggugaac

SEQ ID NO: 38252 - RNA, 32 nt, Homo Sapiens
cucugcaggccucgacaaggcccagccuccug

SEQ ID NO: 38253 - RNA, 32 nt, Homo Sapiens
gcgccuugggauguagcgcccgcucgccgccu

SEQ ID NO: 38254 - RNA, 29 nt, Homo Sapiens
caagauguggaagcgaggacguggugggu

SEQ ID NO: 38255 - RNA, 32 nt, Homo Sapiens
agcaccgcaccucugcccgccucccgcacugc

SEQ ID NO: 38256 - RNA, 32 nt, Homo Sapiens
ggaggcggccgcucgagagccaugguggaccg

SEQ ID NO: 38257 - RNA, 32 nt, Homo Sapiens
cccucacugcuugagcuaacacugccaccucu

SEQ ID NO: 38258 - RNA, 32 nt, Homo Sapiens
ucugagcccagcugccuggagagggucucgcu

SEQ ID NO: 38259 - RNA, 32 nt, Homo Sapiens
uaucuaauuuaaaagcuaugcuaaccauugug

SEQ ID NO: 38260 - RNA, 32 nt, Homo Sapiens
ucgucucucccccgcccucccugcccgacugc

SEQ ID NO: 38261 - RNA, 32 nt, Homo Sapiens
uucacucaguuuucuuguuuuuguaacuagga

SEQ ID NO: 38262 - RNA, 32 nt, Homo Sapiens
accagaagccuagagaggcaugaaacauucuc

SEQ ID NO: 38263 - RNA, 32 nt, Homo Sapiens
gacuuuguuucauugcaaauguuuugccacag

SEQ ID NO: 38264 - RNA, 32 nt, Homo Sapiens
uaauaguaaaaagcuagaaauaggaugugguu

SEQ ID NO: 38265 - RNA, 32 nt, Homo Sapiens
augcugaguauuuucacguaucuuccaaguac

SEQ ID NO: 38266 - RNA, 32 nt, Homo Sapiens
uuugucuuuguaaaaauaaaagccuguagcua

SEQ ID NO: 38267 - RNA, 32 nt, Homo Sapiens
ugaaagagcaaaucauuauguuguucuuguuu

SEQ ID NO: 38268 - RNA, 32 nt, Homo Sapiens
uauuugcugacugaauuaagauuuaagaauga

SEQ ID NO: 38269 - RNA, 32 nt, Homo Sapiens
ccagaaauucagaaauacuuucuucuccaacc

SEQ ID NO: 38270 - RNA, 32 nt, Homo Sapiens
uguagcucagcuuuugggcuagcccaggcuuc

SEQ ID NO: 38271 - RNA, 32 nt, Homo Sapiens
uagaugcugagacaucguacuccaggauaaga

SEQ ID NO: 38272 - RNA, 32 nt, Homo Sapiens
gcuguacgucugguguucucaaugcuuuucua

SEQ ID NO: 38273 - RNA, 32 nt, Homo Sapiens
uauccccuucucccggccccagccugccuccc

SEQ ID NO: 38274 - RNA, 32 nt, Homo Sapiens
ugauuucucugggcuuccuucaucucaauucu

SEQ ID NO: 38275 - RNA, 32 nt, Homo Sapiens
ccccacacauaccaccuuggcuucuucuauau

SEQ ID NO: 38276 - RNA, 32 nt, Homo Sapiens
auauauaaaauaauguguuuuacaaucagugg

SEQ ID NO: 38277 - RNA, 32 nt, Homo Sapiens
gcaaaggggggccagucuguuagcggugcaga

SEQ ID NO: 38278 - RNA, 32 nt, Homo Sapiens
uguauuggagugcacagcucuagauggcuccu

SEQ ID NO: 38279 - RNA, 32 nt, Homo Sapiens
cccgccccgaaguuugagggguguggacgguu

SEQ ID NO: 38280 - RNA, 32 nt, Homo Sapiens
ggucaucguucuccaugaccugucccagaaac

SEQ ID NO: 38281 - RNA, 32 nt, Homo Sapiens
ccaguaaaugcuuccuuugaacacauggggua

SEQ ID NO: 38282 - RNA, 32 nt, Homo Sapiens
ugucugagcuaaaagaccauuuuuugagacac

SEQ ID NO: 38283 - RNA, 32 nt, Homo Sapiens
uugucaugauggguuguucucuuucuuauugu

SEQ ID NO: 38284 - RNA, 32 nt, Homo Sapiens
auagccaaccucaaccugagacaggacagaag

SEQ ID NO: 38285 - RNA, 32 nt, Homo Sapiens
uuuccucacuaaucuuuuuuuuuuuaguccaa

SEQ ID NO: 38286 - RNA, 32 nt, Homo Sapiens
ccugcccgcccucccccacguggccccuugac

SEQ ID NO: 38287 - RNA, 32 nt, Homo Sapiens
ccucucucaaugugcaugcauuuuggagccac

SEQ ID NO: 38288 - RNA, 32 nt, Homo Sapiens
cuagggaacucgggggcagagaaacaggacag

SEQ ID NO: 38289 - RNA, 31 nt, Homo Sapiens
uccgcugugccucucauuccaagggcaggaa

SEQ ID NO: 38290 - RNA, 32 nt, Homo Sapiens
auuuuuugugccuauuucuuuuuacaccuaug

SEQ ID NO: 38291 - RNA, 32 nt, Homo Sapiens
ugagcccccaccccuacuccugucccagccgu

SEQ ID NO: 38292 - RNA, 32 nt, Homo Sapiens
agcagagaaugaaagauucugaaaauaaaggu

SEQ ID NO: 38293 - RNA, 32 nt, Homo Sapiens
augagggaagcagaggaagagauaacauggca

SEQ ID NO: 38294 - RNA, 32 nt, Homo Sapiens
ccucacccugcagugucuguggcacucacugc

SEQ ID NO: 38295 - RNA, 32 nt, Homo Sapiens
cucaaaggaagcugcaaguggauucgaacucc

SEQ ID NO: 38296 - RNA, 32 nt, Homo Sapiens
ucgagccccgggcgcacugaggucuuggccau

SEQ ID NO: 38297 - RNA, 32 nt, Homo Sapiens
auccgaggaagagaaacugaagggagaaguag

SEQ ID NO: 38298 - RNA, 32 nt, Homo Sapiens
aggaguuggggauguccuacaaaccuaccacc

SEQ ID NO: 38299 - RNA, 32 nt, Homo Sapiens
gaacaugacugccuaucaguagauugaucugu

SEQ ID NO: 38300 - RNA, 32 nt, Homo Sapiens
cagcuagagagggaugaauaugcugaacaucu

SEQ ID NO: 38301 - RNA, 32 nt, Homo Sapiens
caggucacaucauauuguaauucuauucuuug

SEQ ID NO: 38302 - RNA, 32 nt, Homo Sapiens
agugaagggcugaggauggacgcacugucaca

SEQ ID NO: 38303 - RNA, 32 nt, Homo Sapiens
accuccgccucccagguucaagugauucuccu

SEQ ID NO: 38304 - RNA, 32 nt, Homo Sapiens
uccauuccaccugacccuguguguacaaucca

SEQ ID NO: 38305 - RNA, 32 nt, Homo Sapiens
cugugccccccuccuccccgcgccccagucaa

SEQ ID NO: 38306 - RNA, 32 nt, Homo Sapiens
acgcgcugcacggcugccggagccgggccauc

SEQ ID NO: 38307 - RNA, 32 nt, Homo Sapiens
cauaugaagagauauuuguauuuuucaaaugu

SEQ ID NO: 38308 - RNA, 32 nt, Homo Sapiens
ccuuccgccucccagagcuuguggcuuugaug

SEQ ID NO: 38309 - RNA, 32 nt, Homo Sapiens
gugggggaugggcccggcacgcccagcugaaa

SEQ ID NO: 38310 - RNA, 32 nt, Homo Sapiens
acaggccguugaccccaucuuuggaaguagcc

SEQ ID NO: 38311 - RNA, 32 nt, Homo Sapiens
accuggaaggccugggucaacgcggccccgcg

SEQ ID NO: 38312 - RNA, 32 nt, Homo Sapiens
agucuugccaugccugugugccccacagaccu

SEQ ID NO: 38313 - RNA, 32 nt, Homo Sapiens
ugccucuccaugaauggccaauuuggaaaagc

SEQ ID NO: 38314 - RNA, 32 nt, Homo Sapiens
agaaaaucagagaauguaauuuauagaaagaa

SEQ ID NO: 38315 - RNA, 29 nt, Homo Sapiens
ugaaugccaaaauaaagcgugugcacugg

SEQ ID NO: 38316 - RNA, 32 nt, Homo Sapiens
agcauaaucagaggaggugaccccaagcaccu

SEQ ID NO: 38317 - RNA, 32 nt, Homo Sapiens
gauguggagggugcccggcacaaccagacgcc

SEQ ID NO: 38318 - RNA, 32 nt, Homo Sapiens
agguccucugcuucuccccacccagcaugccu

SEQ ID NO: 38319 - RNA, 32 nt, Homo Sapiens
aaagaaaaugguuagaauaagaauagucauaa

SEQ ID NO: 38320 - RNA, 32 nt, Homo Sapiens
gauaugguggagguggaggauaugaugguuac

SEQ ID NO: 38321 - RNA, 32 nt, Homo Sapiens
aggaggucaggagaucgagaccaucuuggcua

SEQ ID NO: 38322 - RNA, 32 nt, Homo Sapiens
uaucccuugguaauuauaucuguuuuguuucu

SEQ ID NO: 38323 - RNA, 32 nt, Homo Sapiens
uuucuuuuuucuucuuuugugguauuuaaagc

SEQ ID NO: 38324 - RNA, 32 nt, Homo Sapiens
gaugcuuuauauaaaaaagaucaguaauauca

SEQ ID NO: 38325 - RNA, 32 nt, Homo Sapiens
uuaauuguucccuuuugauauucaguuuauuu

SEQ ID NO: 38326 - RNA, 32 nt, Homo Sapiens
cugugguaacucauuuugauuguuauaacauc

SEQ ID NO: 38327 - RNA, 32 nt, Homo Sapiens
ugucauagcacucguggacuagguuucauggg

SEQ ID NO: 38328 - RNA, 32 nt, Homo Sapiens
cgaggaugcagagugacuggaacuucccguac

SEQ ID NO: 38329 - RNA, 32 nt, Homo Sapiens
ccacccuuggucucaugccccgccauggucac

SEQ ID NO: 38330 - RNA, 32 nt, Homo Sapiens
uuugacaauuuuggugcucauguguuuugggg

SEQ ID NO: 38331 - RNA, 32 nt, Homo Sapiens
ucucagcagcuagaugcaugccugaggcaggg

SEQ ID NO: 38332 - RNA, 32 nt, Homo Sapiens
uccagccccuccaccccuccccuacccccaca

SEQ ID NO: 38333 - RNA, 27 nt, Homo Sapiens
aaggaggauuaauucugagguaguaua

SEQ ID NO: 38334 - RNA, 32 nt, Homo Sapiens
cggagaagggaagaggaggugguggagagcac

SEQ ID NO: 38335 - RNA, 32 nt, Homo Sapiens
ccgcggcgggagcggaggcugcugcuggcagg

SEQ ID NO: 38336 - RNA, 32 nt, Homo Sapiens
ggcugcaugaauggaaaugagugacuggaaau

SEQ ID NO: 38337 - RNA, 32 nt, Homo Sapiens
cguagacguuuccgaggacgcgagacugcaga

SEQ ID NO: 38338 - RNA, 32 nt, Homo Sapiens
uggcugagggcucagagcugcccgcacuccgu

SEQ ID NO: 38339 - RNA, 32 nt, Homo Sapiens
cagccagggacgagaacacagccacgcuccca

SEQ ID NO: 38340 - RNA, 32 nt, Homo Sapiens
uggcugguucccucuuccauucuaggcccuua

SEQ ID NO: 38341 - RNA, 32 nt, Homo Sapiens
cagcagguccuaauccugugugccagggcagg

SEQ ID NO: 38342 - RNA, 32 nt, Homo Sapiens
cuuuauguuaguuuauccaaaguuugggcuag

SEQ ID NO: 38343 - RNA, 29 nt, Homo Sapiens
acuguuuuuauccaauaaacuaagucggu

SEQ ID NO: 38344 - RNA, 32 nt, Homo Sapiens
gggcaucguggccucagagaggggcaggaagu

SEQ ID NO: 38345 - RNA, 32 nt, Homo Sapiens
ccguuggauaaaacuguauugugauaucuauu

SEQ ID NO: 38346 - RNA, 32 nt, Homo Sapiens
gcuccucaucccucccucccccuuuauuaccg

SEQ ID NO: 38347 - RNA, 32 nt, Homo Sapiens
agguuugguuccucccggggcccccacugugg

SEQ ID NO: 38348 - RNA, 32 nt, Homo Sapiens
gagguagcagugcuagcucugccuucaggcau

SEQ ID NO: 38349 - RNA, 32 nt, Homo Sapiens
ccagagccucuugcuaucugccugcaggaagu

SEQ ID NO: 38350 - RNA, 32 nt, Homo Sapiens
uaaagaauuuaagcuguaaauuacauaaguua

SEQ ID NO: 38351 - RNA, 32 nt, Homo Sapiens
acuuguaucuucugcuuaacuccuuuauacua

SEQ ID NO: 38352 - RNA, 32 nt, Homo Sapiens
uaugcauuuacucuuuccugauuuaggcagag

SEQ ID NO: 38353 - RNA, 32 nt, Homo Sapiens
guggcaccaugggcccgggcggugcccuccau

SEQ ID NO: 38354 - RNA, 32 nt, Homo Sapiens
uuuacugugccuuuguuuuuacuagugucugc

SEQ ID NO: 38355 - RNA, 32 nt, Homo Sapiens
uuuuauaaaaauuuuaaaaagaaaaaagacua

SEQ ID NO: 38356 - RNA, 32 nt, Homo Sapiens
agauguucucuagccuuccaccagcagcgagg

SEQ ID NO: 38357 - RNA, 32 nt, Homo Sapiens
auuuauaaaaauuugcuagggccaaauccaua

SEQ ID NO: 38358 - RNA, 32 nt, Homo Sapiens
uaggagaggaugcacaguuugcuauuugcuuu

SEQ ID NO: 38359 - RNA, 32 nt, Homo Sapiens
ggcugucuggguccaagaacucuguucuucac

SEQ ID NO: 38360 - RNA, 32 nt, Homo Sapiens
cugugcuucccucuccauggcuuaacucccug

SEQ ID NO: 38361 - RNA, 32 nt, Homo Sapiens
gcauagagagauuaagugacuuugccacaguc

SEQ ID NO: 38362 - RNA, 32 nt, Homo Sapiens
uuguaauauggagauuuauuuacaauggcgag

SEQ ID NO: 38363 - RNA, 32 nt, Homo Sapiens
uccugggcugaaacaauccucccgccuuggcc

SEQ ID NO: 38364 - RNA, 32 nt, Homo Sapiens
cccggagccggugagugcagccgcccgcccuc

SEQ ID NO: 38365 - RNA, 32 nt, Homo Sapiens
gccgcuguggguggagggcgccgggcacaacg

SEQ ID NO: 38366 - RNA, 32 nt, Homo Sapiens
uuugcuugauaaaaaugcguuguucuuuuuuc

SEQ ID NO: 38367 - RNA, 32 nt, Homo Sapiens
acauccuccuuccccaggaccugagcucccag

SEQ ID NO: 38368 - RNA, 32 nt, Homo Sapiens
caaacauggugcaccgagugauuuccaucucu

SEQ ID NO: 38369 - RNA, 32 nt, Homo Sapiens
uuuagauccaaauaaccauguccuccuagagu

SEQ ID NO: 38370 - RNA, 32 nt, Homo Sapiens
gccaacaaggauuaauugcaaggacugguaga

SEQ ID NO: 38371 - RNA, 32 nt, Homo Sapiens
caagccgagcgcgaacgccgugucuggggcuc

SEQ ID NO: 38372 - RNA, 32 nt, Homo Sapiens
guauaaucuauuuuucuaggagccucuugccu

SEQ ID NO: 38373 - RNA, 32 nt, Homo Sapiens
uaguauuucucucuacagauagauagccugua

SEQ ID NO: 38374 - RNA, 32 nt, Homo Sapiens
agccugugccagcccuggcccggcugccacac

SEQ ID NO: 38375 - RNA, 32 nt, Homo Sapiens
auuuucuguugcaccuuguaguggauucugca

SEQ ID NO: 38376 - RNA, 32 nt, Homo Sapiens
caucaggggagcuuccgagcuucagcaaagcc

SEQ ID NO: 38377 - RNA, 32 nt, Homo Sapiens
ccucuucccacugcccuccccagccccagcuc

SEQ ID NO: 38378 - RNA, 32 nt, Homo Sapiens
uuuuuuggucucccccucccccuugagaucgc

SEQ ID NO: 38379 - RNA, 32 nt, Homo Sapiens
cauuuucuuagugucauuuucacgcuggugcu

SEQ ID NO: 38380 - RNA, 32 nt, Homo Sapiens
ggauaaagggaagcuggaagagaagaaaccug

SEQ ID NO: 38381 - RNA, 32 nt, Homo Sapiens
auuucccccagccccagccccuggcauccacc

SEQ ID NO: 38382 - RNA, 32 nt, Homo Sapiens
cccuuagacaagaguugcuuguccugcugugg

SEQ ID NO: 38383 - RNA, 32 nt, Homo Sapiens
ucaaccauaguuagagacaaauucucauguac

SEQ ID NO: 38384 - RNA, 32 nt, Homo Sapiens
aaaguuuagugucuagggcugggagccaggac

SEQ ID NO: 38385 - RNA, 32 nt, Homo Sapiens
ucuggagaagcggcuuccgggguguggcugcc

SEQ ID NO: 38386 - RNA, 32 nt, Homo Sapiens
aaauggagauaaaagcaauucugacuguccag

SEQ ID NO: 38387 - RNA, 32 nt, Homo Sapiens
ccucagggcaaggcccuuuuucccuccagcca

SEQ ID NO: 38388 - RNA, 32 nt, Homo Sapiens
gaggacagcugauguggcuggccugaaaaaua

SEQ ID NO: 38389 - RNA, 32 nt, Homo Sapiens
agagugguggcaucugagaggcuggucgugga

SEQ ID NO: 38390 - RNA, 32 nt, Homo Sapiens
gccgggcaaccucagaugaccgacuuuucccu

SEQ ID NO: 38391 - RNA, 32 nt, Homo Sapiens
gcgaggaacccggccuucucccgcuccugagg

SEQ ID NO: 38392 - RNA, 32 nt, Homo Sapiens
acgaauccaucccaaccgagaugccauuaaca

SEQ ID NO: 38393 - RNA, 32 nt, Homo Sapiens
acagcaggcuccccggccccggggccucaggg

SEQ ID NO: 38394 - RNA, 32 nt, Homo Sapiens
cucacagugugcaaagaccaguccucaguauc

SEQ ID NO: 38395 - RNA, 32 nt, Homo Sapiens
guccuuuuuuacugcuuugcccauuggaggug

SEQ ID NO: 38396 - RNA, 32 nt, Homo Sapiens
gaaggccgagaaccgcugccgccgccgacccc

SEQ ID NO: 38397 - RNA, 32 nt, Homo Sapiens
gcuauauugcagccauuaagcaguagacaaag

SEQ ID NO: 38398 - RNA, 30 nt, Homo Sapiens
aggaaaaagaagcuugauucugugauugaa

SEQ ID NO: 38399 - RNA, 32 nt, Homo Sapiens
uggucugugaauggagagagugagcuggggaa

SEQ ID NO: 38400 - RNA, 32 nt, Homo Sapiens
gaggcgcaccccuggcuugacgcccaugugcc

SEQ ID NO: 38401 - RNA, 32 nt, Homo Sapiens
uccuugguucccucuucccugguccccccaaa

SEQ ID NO: 38402 - RNA, 32 nt, Homo Sapiens
caaagauaugcacuuuuaagugaagaaaauga

SEQ ID NO: 38403 - RNA, 32 nt, Homo Sapiens
ucacuaugcugcuauggacgaccuccagcucu

SEQ ID NO: 38404 - RNA, 32 nt, Homo Sapiens
gcaccccgccccacgggagcacuuccuacccc

SEQ ID NO: 38405 - RNA, 32 nt, Homo Sapiens
ucaaugugaaagcacuauaaaaauauuaucaa

SEQ ID NO: 38406 - RNA, 32 nt, Homo Sapiens
cagaugagcagaugagcagagacugaaaggag

SEQ ID NO: 38407 - RNA, 32 nt, Homo Sapiens
cauaaaugugauuauaguuaacacaugacccu

SEQ ID NO: 38408 - RNA, 32 nt, Homo Sapiens
cagugccaggugccggcgucgggaacgugggg

SEQ ID NO: 38409 - RNA, 32 nt, Homo Sapiens
uggggaugaagaugagacgcuacaagcucuuu

SEQ ID NO: 38410 - RNA, 32 nt, Homo Sapiens
aaaguuuucuugccuuucccacagccucccaa

SEQ ID NO: 38411 - RNA, 32 nt, Homo Sapiens
gauugaacacuggacuuuuguuguggaaaaag

SEQ ID NO: 38412 - RNA, 32 nt, Homo Sapiens
augggccccccgccccccuccuuccccucccu

SEQ ID NO: 38413 - RNA, 32 nt, Homo Sapiens
cucacccugacggagaucuaaggccugcgggc

SEQ ID NO: 38414 - RNA, 29 nt, Homo Sapiens
uguuacauauguauacaugugccauguug

SEQ ID NO: 38415 - RNA, 30 nt, Homo Sapiens
cagcggggcaggcgcugugggccgggcucc

SEQ ID NO: 38416 - RNA, 32 nt, Homo Sapiens
cauuuuaccuucauuauuacucaucucuauug

SEQ ID NO: 38417 - RNA, 32 nt, Homo Sapiens
ucccacucuccacuuccccucucccugcugag

SEQ ID NO: 38418 - RNA, 32 nt, Homo Sapiens
aggacccugugcugccugugacuuugucagcu

SEQ ID NO: 38419 - RNA, 32 nt, Homo Sapiens
aucccagcacuuugggugggugaggcaggcgg

SEQ ID NO: 38420 - RNA, 32 nt, Homo Sapiens
accccagcccuguucccgcgggccaucgaccc

SEQ ID NO: 38421 - RNA, 32 nt, Homo Sapiens
gaggucuugacaagauagaaacuccagcaugg

SEQ ID NO: 38422 - RNA, 32 nt, Homo Sapiens
gggcuccagcaggaguggaggcuggucugggg

SEQ ID NO: 38423 - RNA, 32 nt, Homo Sapiens
acagccuuaaaagcccgcucucccuagcggag

SEQ ID NO: 38424 - RNA, 29 nt, Homo Sapiens
acuauauauaguaguccuauaaaagcuag

SEQ ID NO: 38425 - RNA, 32 nt, Homo Sapiens
uacccucacuuccuggaaagaucuaauuguua

SEQ ID NO: 38426 - RNA, 32 nt, Homo Sapiens
agugauuuacacaauagaaaugaggggucaau

SEQ ID NO: 38427 - RNA, 32 nt, Homo Sapiens
ucucuagaaaagaauugcuaccucuuguaugg

SEQ ID NO: 38428 - RNA, 32 nt, Homo Sapiens
agucaggcgugguggcgggcgccuguaauccc

SEQ ID NO: 38429 - RNA, 32 nt, Homo Sapiens
accacacccaauaacuguuauuagaguguuaa

SEQ ID NO: 38430 - RNA, 27 nt, Homo Sapiens
caauucucaugcuucagccuaccaagu

SEQ ID NO: 38431 - RNA, 32 nt, Homo Sapiens
uuuaaguuaugaagugcucaaagguacugaca

SEQ ID NO: 38432 - RNA, 32 nt, Homo Sapiens
aucucugaggugcaaagaaugcacuuuucccu

SEQ ID NO: 38433 - RNA, 32 nt, Homo Sapiens
aagagaagaacaaaacaaaauccguaauucau

SEQ ID NO: 38434 - RNA, 32 nt, Homo Sapiens
cuauuguguaaauuauugagguuugacugucu

SEQ ID NO: 38435 - RNA, 32 nt, Homo Sapiens
agagggcccuccccucugcccuggacuuuccc

SEQ ID NO: 38436 - RNA, 32 nt, Homo Sapiens
uuuccccuucccugccuguuucugggacuuca

SEQ ID NO: 38437 - RNA, 32 nt, Homo Sapiens
cuccaaaaacaaaaauauacuuguauauguca

SEQ ID NO: 38438 - RNA, 32 nt, Homo Sapiens
cuaaugguccacacccaauuccacucugauag

SEQ ID NO: 38439 - RNA, 32 nt, Homo Sapiens
gugaggaaaaauaaaucaauggcauuacuauu

SEQ ID NO: 38440 - RNA, 32 nt, Homo Sapiens
gucucccagaaagugguuuguugaaguuuugg

SEQ ID NO: 38441 - RNA, 32 nt, Homo Sapiens
gguggcuacuggucaucgugccacuggaguca

SEQ ID NO: 38442 - RNA, 32 nt, Homo Sapiens
uuaauaugacauuuggauuaaucuccagcuuc

SEQ ID NO: 38443 - RNA, 32 nt, Homo Sapiens
gccucccaacccgcgccgcgcuggcccucgag

SEQ ID NO: 38444 - RNA, 32 nt, Homo Sapiens
ccccuacuuccaccccacugccauuugaugca

SEQ ID NO: 38445 - RNA, 27 nt, Homo Sapiens
ucagaccauagcaacugguauauagua

SEQ ID NO: 38446 - RNA, 32 nt, Homo Sapiens
ccccugugccagcagcaccacucccucagggu

SEQ ID NO: 38447 - RNA, 32 nt, Homo Sapiens
auagugugguucagugagcugcacugaccucu

SEQ ID NO: 38448 - RNA, 32 nt, Homo Sapiens
uggggaacuaauuuccacggacggcugcccgu

SEQ ID NO: 38449 - RNA, 32 nt, Homo Sapiens
uaaagaaugguauuucacaaaaauaucuuuug

SEQ ID NO: 38450 - RNA, 32 nt, Homo Sapiens
acgcuuuccccacggggccuccccucacucug

SEQ ID NO: 38451 - RNA, 32 nt, Homo Sapiens
gggaauagguaguuuccugguuuagcccccau

SEQ ID NO: 38452 - RNA, 32 nt, Homo Sapiens
aggguggaggaguuccuggagaaggacaggag

SEQ ID NO: 38453 - RNA, 32 nt, Homo Sapiens
cucuauacauucaacagagacugaauagauau

SEQ ID NO: 38454 - RNA, 32 nt, Homo Sapiens
auguugugugaauauacuaaacaucaaagaau

SEQ ID NO: 38455 - RNA, 32 nt, Homo Sapiens
gcaacuccugguucuuccuguuuggaccaguu

SEQ ID NO: 38456 - RNA, 32 nt, Homo Sapiens
uucgugcggcuguugcagcugcugcggagaug

SEQ ID NO: 38457 - RNA, 32 nt, Homo Sapiens
guauacuuguaucuccucagcacauuuagaaa

SEQ ID NO: 38458 - RNA, 32 nt, Homo Sapiens
agaaaauaauauuuuuuuuguuuuaaaccugu

SEQ ID NO: 38459 - RNA, 32 nt, Homo Sapiens
uugauuugguugaggaggaacuguggcccucc

SEQ ID NO: 38460 - RNA, 32 nt, Homo Sapiens
ccgcucuauccuguucccugaccggcaugguu

SEQ ID NO: 38461 - RNA, 32 nt, Homo Sapiens
aucgccaaaaauuacuuggagcaaagggcagu

SEQ ID NO: 38462 - RNA, 32 nt, Homo Sapiens
caauuacuaaugagguacgcugaggccuggga

SEQ ID NO: 38463 - RNA, 32 nt, Homo Sapiens
ccagauggccccagguuuuccuuuaggucuga

SEQ ID NO: 38464 - RNA, 32 nt, Homo Sapiens
gauccacaggagaucaaaaggaaugauguauu

SEQ ID NO: 38465 - RNA, 32 nt, Homo Sapiens
cagccugggcaccaugaacagcagcaggaagc

SEQ ID NO: 38466 - RNA, 32 nt, Homo Sapiens
guccgcgucugcagucagcguccccaaccugu

SEQ ID NO: 38467 - RNA, 32 nt, Homo Sapiens
aaggacacucccacgacaguuugcaaacacca

SEQ ID NO: 38468 - RNA, 32 nt, Homo Sapiens
caacgcugggcugacugaaaaccuggcccuuu

SEQ ID NO: 38469 - RNA, 32 nt, Homo Sapiens
agcucgccgccugauucuaggcuggucacuac

SEQ ID NO: 38470 - RNA, 32 nt, Homo Sapiens
acuugacagaaagcuuucaaagaggucacugu

SEQ ID NO: 38471 - RNA, 32 nt, Homo Sapiens
uuugaccucacagauguuacaacuugaucagu

SEQ ID NO: 38472 - RNA, 32 nt, Homo Sapiens
acaaggggagacuacagucuggacccggggcu

SEQ ID NO: 38473 - RNA, 32 nt, Homo Sapiens
cgcgucgcugccgggcacggaccuacccagcu

SEQ ID NO: 38474 - RNA, 32 nt, Homo Sapiens
ccacugcuuggccaugcugacuuggacacaau

SEQ ID NO: 38475 - RNA, 31 nt, Homo Sapiens
agcuuugaccuccagaaccacccuggguccu

SEQ ID NO: 38476 - RNA, 32 nt, Homo Sapiens
gagcgcagcguccagcuggcggugcucccggg

SEQ ID NO: 38477 - RNA, 32 nt, Homo Sapiens
cugagcagcuccuucuagcauccuucauccuu

SEQ ID NO: 38478 - RNA, 32 nt, Homo Sapiens
gguguaaauaaucuauguauaguuuuucuccu

SEQ ID NO: 38479 - RNA, 32 nt, Homo Sapiens
uuuguccccccaaaccccgcccgccccacuac

SEQ ID NO: 38480 - RNA, 32 nt, Homo Sapiens
uuguaaucuuugcugcugcugcacuccccaac

SEQ ID NO: 38481 - RNA, 32 nt, Homo Sapiens
accauugcacuccagccugggcgacaagagca

SEQ ID NO: 38482 - RNA, 32 nt, Homo Sapiens
cuacugagucccauuccagaaacuuugagcca

SEQ ID NO: 38483 - RNA, 32 nt, Homo Sapiens
caccccggcggccucggcgccauggaguccug

SEQ ID NO: 38484 - RNA, 32 nt, Homo Sapiens
uugucccauguguuuguagacacacaugcaua

SEQ ID NO: 38485 - RNA, 32 nt, Homo Sapiens
aaaaaucuauagaucuaauugauacaauugua

SEQ ID NO: 38486 - RNA, 32 nt, Homo Sapiens
auggugguuuguggggagggugacagggugga

SEQ ID NO: 38487 - RNA, 32 nt, Homo Sapiens
guucuguagaaagagggaaaagaugauuguga

SEQ ID NO: 38488 - RNA, 32 nt, Homo Sapiens
aauuagccaggugugguggugcaugccuguaa

SEQ ID NO: 38489 - RNA, 32 nt, Homo Sapiens
acacccaggaagccccaccucuccucgacgcu

SEQ ID NO: 38490 - RNA, 32 nt, Homo Sapiens
guuguuuggauuccucacagccuuggcuccug

SEQ ID NO: 38491 - RNA, 32 nt, Homo Sapiens
ggagcaucagcagcaaugccuugugagaagcc

SEQ ID NO: 38492 - RNA, 32 nt, Homo Sapiens
gugaccaacaugcuuaugauaauuaagagaac

SEQ ID NO: 38493 - RNA, 32 nt, Homo Sapiens
uugcauaguugagacucccaguguuuuccuuu

SEQ ID NO: 38494 - RNA, 32 nt, Homo Sapiens
uuuuuuauugacuauuugaugguaaguuacau

SEQ ID NO: 38495 - RNA, 32 nt, Homo Sapiens
gagucgagaugaggcugugggcaccgaauguc

SEQ ID NO: 38496 - RNA, 30 nt, Homo Sapiens
agagguuuggacugccaggcugggcugugg

SEQ ID NO: 38497 - RNA, 32 nt, Homo Sapiens
cuguaaaauuauuaacaauaucaugacauagc

SEQ ID NO: 38498 - RNA, 32 nt, Homo Sapiens
cgggcgacucagguacagggccccagccagua

SEQ ID NO: 38499 - RNA, 32 nt, Homo Sapiens
ugccuuacuaaauaugggaaugucuaacuuaa

SEQ ID NO: 38500 - RNA, 32 nt, Homo Sapiens
aaauggguguuaacaaaauaaaaaauaaggaa

SEQ ID NO: 38501 - RNA, 32 nt, Homo Sapiens
aagcugcugucuuggccagagcccuguggccu

SEQ ID NO: 38502 - RNA, 32 nt, Homo Sapiens
gagcggagcuacaucacacguuuauugugcau

SEQ ID NO: 38503 - RNA, 32 nt, Homo Sapiens
gagcgcggguccucggccguggagggucaagu

SEQ ID NO: 38504 - RNA, 32 nt, Homo Sapiens
ugaaacagaugccccuggucuugcuuucauca

SEQ ID NO: 38505 - RNA, 32 nt, Homo Sapiens
cuacauacugcagcagaaccagcaauacacuu

SEQ ID NO: 38506 - RNA, 32 nt, Homo Sapiens
ugagauucccuuguuccuggggugucugcagc

SEQ ID NO: 38507 - RNA, 32 nt, Homo Sapiens
cacagcaggaggagguaggggcugggcaugca

SEQ ID NO: 38508 - RNA, 32 nt, Homo Sapiens
cccaaauauguauauauacauauauaaaauau

SEQ ID NO: 38509 - RNA, 32 nt, Homo Sapiens
aagucuguuucugaaauagucaauagucuucc

SEQ ID NO: 38510 - RNA, 32 nt, Homo Sapiens
uuuucaguacccaucuuaauuuuucuuugaac

SEQ ID NO: 38511 - RNA, 32 nt, Homo Sapiens
uguaccaaucuagcagaaugcaguggugugca

SEQ ID NO: 38512 - RNA, 32 nt, Homo Sapiens
ugaccuaccugggggaaguagcacccuugcau

SEQ ID NO: 38513 - RNA, 32 nt, Homo Sapiens
aguggauguggaggagugaccagaccagacca

SEQ ID NO: 38514 - RNA, 32 nt, Homo Sapiens
aggguggaguggcugaggcggcagaucugaac

SEQ ID NO: 38515 - RNA, 32 nt, Homo Sapiens
gccccugcaauguggugacaccuccccuuuca

SEQ ID NO: 38516 - RNA, 32 nt, Homo Sapiens
acucuaaugacuucucuuuccuccucgaacaa

SEQ ID NO: 38517 - RNA, 32 nt, Homo Sapiens
gaagacaggaggaacuggagccucauuggccg

SEQ ID NO: 38518 - RNA, 32 nt, Homo Sapiens
aacuuuuuaaagcagccaagucaacaucaggc

SEQ ID NO: 38519 - RNA, 32 nt, Homo Sapiens
accaaggggaggaaacaaggaucuggucagag

SEQ ID NO: 38520 - RNA, 32 nt, Homo Sapiens
ccuguucauuaugcuuuaauucugaggaccau

SEQ ID NO: 38521 - RNA, 32 nt, Homo Sapiens
ccuguguugcuaacagaaguggccuguaagcu

SEQ ID NO: 38522 - RNA, 32 nt, Homo Sapiens
gacagagaucaucaaacagcacuuuaaugaca

SEQ ID NO: 38523 - RNA, 32 nt, Homo Sapiens
aggggcugggccagggcuccaaggcuugcccc

SEQ ID NO: 38524 - RNA, 32 nt, Homo Sapiens
cagcuuuguuguccuuugagcuuucuguuaug

SEQ ID NO: 38525 - RNA, 32 nt, Homo Sapiens
gccacagccauggccugggggccaagccucac

SEQ ID NO: 38526 - RNA, 32 nt, Homo Sapiens
gcuuugugauuccauggauugauucagucuuc

SEQ ID NO: 38527 - RNA, 27 nt, Homo Sapiens
gaauacagcuucuucaucucccuaucu

SEQ ID NO: 38528 - RNA, 32 nt, Homo Sapiens
acuacuguuuuaaaauuacuguagcuuuaaaa

SEQ ID NO: 38529 - RNA, 32 nt, Homo Sapiens
ugcaggaugcuccuuagaaaagaaaaaauggu

SEQ ID NO: 38530 - RNA, 32 nt, Homo Sapiens
acuuaacagaugaguucuugaaucugggauga

SEQ ID NO: 38531 - RNA, 32 nt, Homo Sapiens
cuggguauauccucaugccaggucuaccccag

SEQ ID NO: 38532 - RNA, 30 nt, Homo Sapiens
ggcugccuggacuggucuggcagguugggc

SEQ ID NO: 38533 - RNA, 32 nt, Homo Sapiens
guucacuacuguguaaaguaaaaacuaaaaaa

SEQ ID NO: 38534 - RNA, 32 nt, Homo Sapiens
cuggcugaugauuugucauucuagucacuucc

SEQ ID NO: 38535 - RNA, 32 nt, Homo Sapiens
uuuaaauugucaggaguugaucaugaggacag

SEQ ID NO: 38536 - RNA, 32 nt, Homo Sapiens
gcuaggaaugaaauccugcuucaguguaugga

SEQ ID NO: 38537 - RNA, 32 nt, Homo Sapiens
cagguccccgggucggccccagccaggccccc

SEQ ID NO: 38538 - RNA, 32 nt, Homo Sapiens
cuccugcuucgggccugggccgagggccuugu

SEQ ID NO: 38539 - RNA, 32 nt, Homo Sapiens
guuaagaugcaaacacaagcaaauauaaccca

SEQ ID NO: 38540 - RNA, 32 nt, Homo Sapiens
cauggacucccucuuccucccauuccaccucc

SEQ ID NO: 38541 - RNA, 32 nt, Homo Sapiens
cuuggaccaacccgccaaccagcgcaauaacg

SEQ ID NO: 38542 - RNA, 32 nt, Homo Sapiens
acggcaguucauuacacugucaauguuaacau

SEQ ID NO: 38543 - RNA, 30 nt, Homo Sapiens
ggucuucuggacucuagucugugggguacg

SEQ ID NO: 38544 - RNA, 32 nt, Homo Sapiens
aaaauacccgagccggggcgccgggcgggugg

SEQ ID NO: 38545 - RNA, 32 nt, Homo Sapiens
aguguuuuaggaccugaagaaucuuuaugacu

SEQ ID NO: 38546 - RNA, 32 nt, Homo Sapiens
gcgggucuccauguuauauuguguguuuacug

SEQ ID NO: 38547 - RNA, 32 nt, Homo Sapiens
ccugucccagggcacuuccuccagguggugau

SEQ ID NO: 38548 - RNA, 32 nt, Homo Sapiens
uugacacauuuauuaacaaaaugcaucaugga

SEQ ID NO: 38549 - RNA, 32 nt, Homo Sapiens
uauuguuucuucauacugugucuguauuuaau

SEQ ID NO: 38550 - RNA, 32 nt, Homo Sapiens
cacuuggagaucuuugcuuccuugcuuuuaug

SEQ ID NO: 38551 - RNA, 32 nt, Homo Sapiens
uacccgggcaugguggugggcgccuguagucc

SEQ ID NO: 38552 - RNA, 32 nt, Homo Sapiens
gagaugauuuggucagauugggauaaggccca

SEQ ID NO: 38553 - RNA, 32 nt, Homo Sapiens
aggcuugcagcacccugaaacacagcaaaccu

SEQ ID NO: 38554 - RNA, 32 nt, Homo Sapiens
auguacacaguaaaaaaguaaauauauaaaug

SEQ ID NO: 38555 - RNA, 32 nt, Homo Sapiens
cccuggguuugugcggacccaggcaggcagcc

SEQ ID NO: 38556 - RNA, 32 nt, Homo Sapiens
aaaccaauuguagcaaucugcccgccuccacc

SEQ ID NO: 38557 - RNA, 32 nt, Homo Sapiens
cacuguaauuuaauguguuuuauauucuuuug

SEQ ID NO: 38558 - RNA, 32 nt, Homo Sapiens
ucuguuuuuuucuggugaaucguugcuugcug

SEQ ID NO: 38559 - RNA, 31 nt, Homo Sapiens
ccugguugcagaacauggcaggcaagcacuc

SEQ ID NO: 38560 - RNA, 32 nt, Homo Sapiens
cagccugggcgacagaaccagacuccgucuca

SEQ ID NO: 38561 - RNA, 32 nt, Homo Sapiens
agggcaaagugaucacauccugauugaguggc

SEQ ID NO: 38562 - RNA, 32 nt, Homo Sapiens
gugacuaguccuaugauguacaaagccuguau

SEQ ID NO: 38563 - RNA, 32 nt, Homo Sapiens
cugaaagccguaaaaccuuuguugcuuuaauu

SEQ ID NO: 38564 - RNA, 32 nt, Homo Sapiens
ggcuccuggcagcccccuccccuuaggcuccg

SEQ ID NO: 38565 - RNA, 31 nt, Homo Sapiens
gacacauuuuaaauaaaaucaugcauaccug

SEQ ID NO: 38566 - RNA, 32 nt, Homo Sapiens
ggcggcggccccaggcccgagggacucgggag

SEQ ID NO: 38567 - RNA, 32 nt, Homo Sapiens
uugccauccagcucucagcuuccacugcuccc

SEQ ID NO: 38568 - RNA, 32 nt, Homo Sapiens
cugguugagucaguuuuuuuuaugguguauuu

SEQ ID NO: 38569 - RNA, 32 nt, Homo Sapiens
gcuguuuucucauuucauguacacuugcccca

SEQ ID NO: 38570 - RNA, 32 nt, Homo Sapiens
aggccagcccccuuccuccccagucuccgacc

SEQ ID NO: 38571 - RNA, 32 nt, Homo Sapiens
cucccaguucccucgucccugcccaggucucu

SEQ ID NO: 38572 - RNA, 32 nt, Homo Sapiens
guuuucacuucauuuguguuuuuaaauuaagg

SEQ ID NO: 38573 - RNA, 32 nt, Homo Sapiens
aaaaacccagcugggccugggguggaggugca

SEQ ID NO: 38574 - RNA, 32 nt, Homo Sapiens
ugucucagaaccacuccuggagaaagacuucc

SEQ ID NO: 38575 - RNA, 32 nt, Homo Sapiens
aucuguaaucccaacacuuugggaggcugaga

SEQ ID NO: 38576 - RNA, 29 nt, Homo Sapiens
auucacagguguuucaaagguaaggaaua

SEQ ID NO: 38577 - RNA, 32 nt, Homo Sapiens
accugcagggaagaagcagccuuuggauggug

SEQ ID NO: 38578 - RNA, 32 nt, Homo Sapiens
gugccuggccccagucuuaucugugccuuuac

SEQ ID NO: 38579 - RNA, 32 nt, Homo Sapiens
auaaugugacauucuuacugaaucaaaucaug

SEQ ID NO: 38580 - RNA, 32 nt, Homo Sapiens
uuguaggaugcuuagcagcaucgcuggccucu

SEQ ID NO: 38581 - RNA, 32 nt, Homo Sapiens
aaaugggccucccaauugcuguuucagcaggu

SEQ ID NO: 38582 - RNA, 32 nt, Homo Sapiens
aaaaguuguuugcugcauauacccaacaugaa

SEQ ID NO: 38583 - RNA, 32 nt, Homo Sapiens
aguaacucaaaugugacaaaauuuauuuuuau

SEQ ID NO: 38584 - RNA, 32 nt, Homo Sapiens
gcauugccuggcacccaauauucaggguccau

SEQ ID NO: 38585 - RNA, 32 nt, Homo Sapiens
ucccuccccacuugcuucccugauaugugcuc

SEQ ID NO: 38586 - RNA, 32 nt, Homo Sapiens
acaggcauuucccagacccucuugccuccagu

SEQ ID NO: 38587 - RNA, 32 nt, Homo Sapiens
uguuuuuuagaaagauaagagaaucaccccua

SEQ ID NO: 38588 - RNA, 32 nt, Homo Sapiens
ggaaaagugugagauuucuacuuuuuaguuuu

SEQ ID NO: 38589 - RNA, 32 nt, Homo Sapiens
auuuuuguaguuuuaguagacacaggguuuca

SEQ ID NO: 38590 - RNA, 32 nt, Homo Sapiens
acugguuuagcacaauuuauauuuucccucuc

SEQ ID NO: 38591 - RNA, 32 nt, Homo Sapiens
gccccaaguccacaacucauguuugugagcuu

SEQ ID NO: 38592 - RNA, 32 nt, Homo Sapiens
cacauuauaaauaacaguucaucuaaagagcc

SEQ ID NO: 38593 - RNA, 32 nt, Homo Sapiens
agugacucaucgccaagauuugcuguaaugca

SEQ ID NO: 38594 - RNA, 32 nt, Homo Sapiens
ugccgggcaggugagucccuucccuccccagg

SEQ ID NO: 38595 - RNA, 32 nt, Homo Sapiens
uuccaacugcugguguucugcaagauggagcc

SEQ ID NO: 38596 - RNA, 32 nt, Homo Sapiens
ugugggagaauuauuucuauauauuagugaaa

SEQ ID NO: 38597 - RNA, 28 nt, Homo Sapiens
auugacuuaagguaucauuugaaaaaua

SEQ ID NO: 38598 - RNA, 32 nt, Homo Sapiens
aguucaacccgccccuaccucuucagauaguu

SEQ ID NO: 38599 - RNA, 32 nt, Homo Sapiens
aaccggcgcugggcaacacgggccugcaaacu

SEQ ID NO: 38600 - RNA, 32 nt, Homo Sapiens
uacugaccuggaucuuaguccuagccuuuuug

SEQ ID NO: 38601 - RNA, 32 nt, Homo Sapiens
cagaaauuguuuuaguuugugaauucccccag

SEQ ID NO: 38602 - RNA, 32 nt, Homo Sapiens
agaaugcuuuuuuuucuuucugaaggcuuugu

SEQ ID NO: 38603 - RNA, 31 nt, Homo Sapiens
aaguacgaaaagguuuuuaagucuucgaaca

SEQ ID NO: 38604 - RNA, 32 nt, Homo Sapiens
augguucagauucuuuuaaauaaagcuaguuu

SEQ ID NO: 38605 - RNA, 32 nt, Homo Sapiens
gaagccgugucugugaucaggaugcacugggc

SEQ ID NO: 38606 - RNA, 32 nt, Homo Sapiens
cacuccaaguucucucuuccugucccacacuc

SEQ ID NO: 38607 - RNA, 32 nt, Homo Sapiens
aucccggugccggggagggaagcccaacaucc

SEQ ID NO: 38608 - RNA, 32 nt, Homo Sapiens
ggcuuggcgcgguggcucacgcauguaauccc

SEQ ID NO: 38609 - RNA, 32 nt, Homo Sapiens
aaaaaauuuucagaucacucauuuucacuaaa

SEQ ID NO: 38610 - RNA, 32 nt, Homo Sapiens
gacagcggccucagccccggcagcgcccagcg

SEQ ID NO: 38611 - RNA, 32 nt, Homo Sapiens
ggggccccagagggguuuuagaggggccuuuu

SEQ ID NO: 38612 - RNA, 32 nt, Homo Sapiens
ugaccuccucccacccucccccugcuccccac

SEQ ID NO: 38613 - RNA, 32 nt, Homo Sapiens
gcccucaguguccaagacccaggcagcccggg

SEQ ID NO: 38614 - RNA, 32 nt, Homo Sapiens
cauguauaagguggcuccauagcuuuauuugu

SEQ ID NO: 38615 - RNA, 32 nt, Homo Sapiens
cuauuuugugaauucuaaaguuacauuuguaa

SEQ ID NO: 38616 - RNA, 32 nt, Homo Sapiens
cucuuccccacuucccugcacucucaucgcuc

SEQ ID NO: 38617 - RNA, 32 nt, Homo Sapiens
ccaagcguaggugucccuggcuuuuguggcca

SEQ ID NO: 38618 - RNA, 32 nt, Homo Sapiens
cccgagcccucccucccaggcacccagcacuu

SEQ ID NO: 38619 - RNA, 32 nt, Homo Sapiens
uggcuaccuugauuugaaaugcuuugugaaaa

SEQ ID NO: 38620 - RNA, 32 nt, Homo Sapiens
gagcaugaggcacaagugagcuggcaaguggu

SEQ ID NO: 38621 - RNA, 32 nt, Homo Sapiens
agacucccuggccaacagaauccuucuugaua

SEQ ID NO: 38622 - RNA, 32 nt, Homo Sapiens
uuuuuuuucuuuuccuuuuuuauggcacuaga

SEQ ID NO: 38623 - RNA, 32 nt, Homo Sapiens
auccccuaggcaugguaaaucuuguguuguuc

SEQ ID NO: 38624 - RNA, 32 nt, Homo Sapiens
uccgcuaaaucauugaugacuccaucaggaga

SEQ ID NO: 38625 - RNA, 32 nt, Homo Sapiens
cuaccucugcgucuucuuugccugcccagccu

SEQ ID NO: 38626 - RNA, 32 nt, Homo Sapiens
gugagcuaaacuucuuuuuuuaaguaacuauc

SEQ ID NO: 38627 - RNA, 32 nt, Homo Sapiens
auccagaauuccuaagguggcucugauauuau

SEQ ID NO: 38628 - RNA, 30 nt, Homo Sapiens
ccauguaauaaaacccaaaggaacagccca

SEQ ID NO: 38629 - RNA, 32 nt, Homo Sapiens
aaaccccguggccucaauggucuugaguagca

SEQ ID NO: 38630 - RNA, 32 nt, Homo Sapiens
aucuucccaagcaugucggaaagcuggcaaca

SEQ ID NO: 38631 - RNA, 32 nt, Homo Sapiens
uucuauuuucccuuuuuuccauccauggcaua

SEQ ID NO: 38632 - RNA, 32 nt, Homo Sapiens
aaguuggggaggaggagagacgcaaggccguc

SEQ ID NO: 38633 - RNA, 32 nt, Homo Sapiens
cacgggggcgcggcccggaguccuggucccuu

SEQ ID NO: 38634 - RNA, 29 nt, Homo Sapiens
acaaagaugaagaaucaggguagcugacc

SEQ ID NO: 38635 - RNA, 32 nt, Homo Sapiens
gccgcgucuuuguuccagacgcaguccaggaa

SEQ ID NO: 38636 - RNA, 32 nt, Homo Sapiens
gcugcuuaaucauauugauaucuaauuucuuu

SEQ ID NO: 38637 - RNA, 32 nt, Homo Sapiens
ggggagggcgcgaggcuuuuggagcggcugug

SEQ ID NO: 38638 - RNA, 32 nt, Homo Sapiens
cccccugcccugccaggcccaggcccggucuc

SEQ ID NO: 38639 - RNA, 32 nt, Homo Sapiens
uugcuaucauugcugacuuuuccuccuguggc

SEQ ID NO: 38640 - RNA, 32 nt, Homo Sapiens
gcuugggagaccuggaggagaaguuacccucg

SEQ ID NO: 38641 - RNA, 32 nt, Homo Sapiens
aaacccucaggcugcugaaauuucuaggcugu

SEQ ID NO: 38642 - RNA, 32 nt, Homo Sapiens
ccucuccgccgggggcucggcgcucgcccacc

SEQ ID NO: 38643 - RNA, 32 nt, Homo Sapiens
gggcccagcucuuccucccggcugcaucucca

SEQ ID NO: 38644 - RNA, 32 nt, Homo Sapiens
auguuuugauucaguauucuuuuaucauaaau

SEQ ID NO: 38645 - RNA, 32 nt, Homo Sapiens
ugaaugaggcggagcuccaggauggggagggg

SEQ ID NO: 38646 - RNA, 32 nt, Homo Sapiens
uucgcagcgcgcuccagacaagauggcgcggc

SEQ ID NO: 38647 - RNA, 32 nt, Homo Sapiens
aacaucuagcaaauguuaugcauaaagucagu

SEQ ID NO: 38648 - RNA, 32 nt, Homo Sapiens
cuuucuucuucccauccuucaaugucagagac

SEQ ID NO: 38649 - RNA, 32 nt, Homo Sapiens
aagccugacaaguuuuuaaaagggcagaagcu

SEQ ID NO: 38650 - RNA, 32 nt, Homo Sapiens
acugugcaucaaagggauguaaaauuacagua

SEQ ID NO: 38651 - RNA, 32 nt, Homo Sapiens
ucuguggauuuuugaguuaaugaugaaaugag

SEQ ID NO: 38652 - RNA, 32 nt, Homo Sapiens
gagcaucucacuuucccuuccauggugcugcu

SEQ ID NO: 38653 - RNA, 32 nt, Homo Sapiens
guuuuguucuuugcuuuacuuuucaccuugca

SEQ ID NO: 38654 - RNA, 32 nt, Homo Sapiens
gggcuuccccuuucagcugcccggccccccac

SEQ ID NO: 38655 - RNA, 32 nt, Homo Sapiens
agugccaacaaauuauugauagcugauaaugu

SEQ ID NO: 38656 - RNA, 32 nt, Homo Sapiens
auucggggagacguaguuuacuuuguucagca

SEQ ID NO: 38657 - RNA, 32 nt, Homo Sapiens
gcgaggaggaggagaaucuggccuggaucuua

SEQ ID NO: 38658 - RNA, 32 nt, Homo Sapiens
gacuccaauauuuggaaguucugguacaccaa

SEQ ID NO: 38659 - RNA, 32 nt, Homo Sapiens
ccucagcaccacccauucuccucaucccucug

SEQ ID NO: 38660 - RNA, 32 nt, Homo Sapiens
gcacguucaaaagcaagaaguggucuucuggc

SEQ ID NO: 38661 - RNA, 32 nt, Homo Sapiens
ucuauugcacuucaggauugauccugcuagag

SEQ ID NO: 38662 - RNA, 32 nt, Homo Sapiens
uuauguauauuuuguuccuguuauauuggcuu

SEQ ID NO: 38663 - RNA, 31 nt, Homo Sapiens
cauaguugggcgguggugucagcgguuucgc

SEQ ID NO: 38664 - RNA, 32 nt, Homo Sapiens
aaucuucuuugacagacuuuguauuuuccacu

SEQ ID NO: 38665 - RNA, 32 nt, Homo Sapiens
aauagaaacaaauuuagccaggcaugguggug

SEQ ID NO: 38666 - RNA, 32 nt, Homo Sapiens
ggcuggaguccuguuuucccuucaaccuggga

SEQ ID NO: 38667 - RNA, 32 nt, Homo Sapiens
uucucucaguuauauuuaaaaccguuguguac

SEQ ID NO: 38668 - RNA, 32 nt, Homo Sapiens
uucaucugcuauuaaccuugccuuagaaacac

SEQ ID NO: 38669 - RNA, 32 nt, Homo Sapiens
uauggaaugaucaaaucaggguaauuagcgua

SEQ ID NO: 38670 - RNA, 32 nt, Homo Sapiens
auuucuugaucuaaacuuuaugcugcauaaau

SEQ ID NO: 38671 - RNA, 32 nt, Homo Sapiens
gacgucagcauggccgcggccccugacuaccc

SEQ ID NO: 38672 - RNA, 32 nt, Homo Sapiens
auaaauuuuuaaauauaucuaguuuccucuau

SEQ ID NO: 38673 - RNA, 32 nt, Homo Sapiens
cuguagggccagggcugcugccugccagccug

SEQ ID NO: 38674 - RNA, 32 nt, Homo Sapiens
ugauccuuccaucacagaaggaucuugaaucu

SEQ ID NO: 38675 - RNA, 32 nt, Homo Sapiens
caugucucccccacccugccucaguucuccgu

SEQ ID NO: 38676 - RNA, 32 nt, Homo Sapiens
ccgagcugucccuagucgcccaccgcggccgg

SEQ ID NO: 38677 - RNA, 32 nt, Homo Sapiens
acucaggaucucagccucauuauuuucuuacc

SEQ ID NO: 38678 - RNA, 32 nt, Homo Sapiens
uuggcuucucccugcaccagcccuguccucag

SEQ ID NO: 38679 - RNA, 32 nt, Homo Sapiens
agagugaaggauuugucccugcccuguagaug

SEQ ID NO: 38680 - RNA, 32 nt, Homo Sapiens
guuuuauuauaaauauuguauggacuuuguau

SEQ ID NO: 38681 - RNA, 32 nt, Homo Sapiens
ucuccaccaccucgggccccgguguccccggc

SEQ ID NO: 38682 - RNA, 32 nt, Homo Sapiens
gcgcccucccucccuccacaccuccacccguc

SEQ ID NO: 38683 - RNA, 32 nt, Homo Sapiens
ggcuagaggaugcacgguggcuagagccagcu

SEQ ID NO: 38684 - RNA, 32 nt, Homo Sapiens
uaggauuuuggucuugguguuuguaugaaauu

SEQ ID NO: 38685 - RNA, 32 nt, Homo Sapiens
uguacuccucacuuacuauguaaguucaucua

SEQ ID NO: 38686 - RNA, 32 nt, Homo Sapiens
cgacuccaccgccucucugcucugacccuucu

SEQ ID NO: 38687 - RNA, 32 nt, Homo Sapiens
agauggaaacucuuuaacuucucguaaaaguc

SEQ ID NO: 38688 - RNA, 32 nt, Homo Sapiens
cucuugagcccggaaggcagagguugcaguga

SEQ ID NO: 38689 - RNA, 32 nt, Homo Sapiens
agcugcgggcuuugagaguccugagccaggca

SEQ ID NO: 38690 - RNA, 32 nt, Homo Sapiens
gccugcaacauucugggugucuccauggaagc

SEQ ID NO: 38691 - RNA, 32 nt, Homo Sapiens
uaaucguuaugaacuugaauuggauuaguauc

SEQ ID NO: 38692 - RNA, 32 nt, Homo Sapiens
acuucccccacccacacccccauuuggacauc

SEQ ID NO: 38693 - RNA, 32 nt, Homo Sapiens
gaccuuuuuauuucuauuaaacguuucugcac

SEQ ID NO: 38694 - RNA, 32 nt, Homo Sapiens
aaugguagaaugcuuuuuuaugugcuagacua

SEQ ID NO: 38695 - RNA, 32 nt, Homo Sapiens
uauuccaggacacgcuggcauuuggacucaau

SEQ ID NO: 38696 - RNA, 32 nt, Homo Sapiens
agccuggccaacauggagaaaccccgugacua

SEQ ID NO: 38697 - RNA, 32 nt, Homo Sapiens
guauuuccuccuucuuuugcuaaaaacauguu

SEQ ID NO: 38698 - RNA, 29 nt, Homo Sapiens
gcacuguggggacagggcgacgugugucc

SEQ ID NO: 38699 - RNA, 32 nt, Homo Sapiens
gccuucagggucacaggcaguagggggacagc

SEQ ID NO: 38700 - RNA, 32 nt, Homo Sapiens
uuggaagaaguugaaauugacgcugcccagga

SEQ ID NO: 38701 - RNA, 32 nt, Homo Sapiens
ggguggcgcgccccaccugccuggcugguggu

SEQ ID NO: 38702 - RNA, 32 nt, Homo Sapiens
cggaccgagcgcggaguucuggagucucggac

SEQ ID NO: 38703 - RNA, 32 nt, Homo Sapiens
ugcuagauaaaagcugaaguuacuuuauguuu

SEQ ID NO: 38704 - RNA, 32 nt, Homo Sapiens
agccgggagguggaagaggagggggagcgucu

SEQ ID NO: 38705 - RNA, 32 nt, Homo Sapiens
augggagaugggagcuguuuugucagugucuu

SEQ ID NO: 38706 - RNA, 32 nt, Homo Sapiens
uguccuaaaaauacaaaaauuaguugggugcg

SEQ ID NO: 38707 - RNA, 32 nt, Homo Sapiens
aucccuugccccacccaucccaucuccaaccc

SEQ ID NO: 38708 - RNA, 32 nt, Homo Sapiens
uggaggauauguguuggaauaauuacgucuug

SEQ ID NO: 38709 - RNA, 27 nt, Homo Sapiens
aaugaucuuuucuucagccccaccccc

SEQ ID NO: 38710 - RNA, 32 nt, Homo Sapiens
auucccguguacucagcccagagugaaagggc

SEQ ID NO: 38711 - RNA, 32 nt, Homo Sapiens
uguucauugucaacauuauuuacaauaacaug

SEQ ID NO: 38712 - RNA, 32 nt, Homo Sapiens
cugaaccaaagaaaucauuugauucaaguaac

SEQ ID NO: 38713 - RNA, 32 nt, Homo Sapiens
ccccguguucccagcccugucccucacugagc

SEQ ID NO: 38714 - RNA, 32 nt, Homo Sapiens
uacuaugcucauugcaccugggagggcaccug

SEQ ID NO: 38715 - RNA, 32 nt, Homo Sapiens
uauuuuuuacuuuauauacuuuugugcaauug

SEQ ID NO: 38716 - RNA, 30 nt, Homo Sapiens
cugggaggacaggcguggggucccggcagu

SEQ ID NO: 38717 - RNA, 32 nt, Homo Sapiens
aagugguaaaaugugcugcgagaaguggagcc

SEQ ID NO: 38718 - RNA, 32 nt, Homo Sapiens
acccagacuucauuucuuucugcaucuucccc

SEQ ID NO: 38719 - RNA, 32 nt, Homo Sapiens
aaaccuuaaguacucaaguugaccaggaggca

SEQ ID NO: 38720 - RNA, 32 nt, Homo Sapiens
augcauuuauuaccucuuaaaauuauuauuuu

SEQ ID NO: 38721 - RNA, 32 nt, Homo Sapiens
uggugaaggugcgcgccaggauguggacuacu

SEQ ID NO: 38722 - RNA, 32 nt, Homo Sapiens
cuguggccaggucuggaaagccaggcaagaca

SEQ ID NO: 38723 - RNA, 32 nt, Homo Sapiens
caaaguuguauauauaauauugcagguuaaau

SEQ ID NO: 38724 - RNA, 32 nt, Homo Sapiens
gcauggaacccagaaacaagugccagggcucc

SEQ ID NO: 38725 - RNA, 30 nt, Homo Sapiens
accugcccgucuccgccgccggcggcccuu

SEQ ID NO: 38726 - RNA, 32 nt, Homo Sapiens
auaucaccuccacagagcugcuuacccugcac

SEQ ID NO: 38727 - RNA, 30 nt, Homo Sapiens
cggagaggcaggcgcuggggcuccuacggg

SEQ ID NO: 38728 - RNA, 31 nt, Homo Sapiens
uuccucuguaacagucucagagcaacugcuu

SEQ ID NO: 38729 - RNA, 31 nt, Homo Sapiens
cuacagccccucagccaaccacagacccuuc

SEQ ID NO: 38730 - RNA, 32 nt, Homo Sapiens
cagccacugccacagagcugccacgccagccu

SEQ ID NO: 38731 - RNA, 32 nt, Homo Sapiens
ggagccgcggccgcgggucacccggcggguag

SEQ ID NO: 38732 - RNA, 32 nt, Homo Sapiens
ccacgacaaccacuuccccaucuucuccucua

SEQ ID NO: 38733 - RNA, 32 nt, Homo Sapiens
ugaaccaggaggaauggaacaggcaauggaag

SEQ ID NO: 38734 - RNA, 32 nt, Homo Sapiens
cccggagccccauucacccccaccugcccacu

SEQ ID NO: 38735 - RNA, 31 nt, Homo Sapiens
uugagacucgagucucucagaccuuggauuc

SEQ ID NO: 38736 - RNA, 32 nt, Homo Sapiens
uuuucauuccuccugcaacuauuuuccuugau

SEQ ID NO: 38737 - RNA, 32 nt, Homo Sapiens
ugcucagagcuggggagggagguuccgccgcu

SEQ ID NO: 38738 - RNA, 32 nt, Homo Sapiens
aucguggcaggagagauuaagguaauuacaac

SEQ ID NO: 38739 - RNA, 32 nt, Homo Sapiens
ccgcuuugcuccaucuggcuuaccacucucca

SEQ ID NO: 38740 - RNA, 32 nt, Homo Sapiens
cuggcugcacuguucuuaauuuuagauaauac

SEQ ID NO: 38741 - RNA, 32 nt, Homo Sapiens
gaccuuucggccugcgcagccggagcagcuug

SEQ ID NO: 38742 - RNA, 32 nt, Homo Sapiens
agugccucuguccacacccaccucccuggugu

SEQ ID NO: 38743 - RNA, 32 nt, Homo Sapiens
gggaggccgaggaggagguccccugggcacag

SEQ ID NO: 38744 - RNA, 32 nt, Homo Sapiens
ucucagggguagugaagcugcagacugacagu

SEQ ID NO: 38745 - RNA, 29 nt, Homo Sapiens
auccauauuguuguauauuuuuuccuuuc

SEQ ID NO: 38746 - RNA, 32 nt, Homo Sapiens
agugccacaaaacagucuacugaggcacaagu

SEQ ID NO: 38747 - RNA, 32 nt, Homo Sapiens
acuuccccaucccgaagccaucacuucucccc

SEQ ID NO: 38748 - RNA, 32 nt, Homo Sapiens
uucuaagcacgcuuaccugauagggugacagc

SEQ ID NO: 38749 - RNA, 32 nt, Homo Sapiens
acccgcuucccccuccaacccacagccuuugc

SEQ ID NO: 38750 - RNA, 32 nt, Homo Sapiens
ugcacuuuuuaauaucacaucuauuugucugu

SEQ ID NO: 38751 - RNA, 32 nt, Homo Sapiens
auugauucauauuuaguaccuguuggcuuugc

SEQ ID NO: 38752 - RNA, 32 nt, Homo Sapiens
cgccugcgccgcgagauccgccccggccuccc

SEQ ID NO: 38753 - RNA, 29 nt, Homo Sapiens
cgccaugaguucggcgccggccucaggcu

SEQ ID NO: 38754 - RNA, 32 nt, Homo Sapiens
agggaccagcuggggggcaggggggagagggg

SEQ ID NO: 38755 - RNA, 32 nt, Homo Sapiens
guucuuacagcuuuguuuucaaccagcuaaaa

SEQ ID NO: 38756 - RNA, 32 nt, Homo Sapiens
acccuguccacuugggugaucauuccagaccc

SEQ ID NO: 38757 - RNA, 32 nt, Homo Sapiens
ugcuaaacauauagauucuuaaguuuauuaau

SEQ ID NO: 38758 - RNA, 32 nt, Homo Sapiens
aagucucucgcccuuccgccugccgcagaccg

SEQ ID NO: 38759 - RNA, 32 nt, Homo Sapiens
ucagcaaacuacugccugugggccaaauuugc

SEQ ID NO: 38760 - RNA, 32 nt, Homo Sapiens
ccaguccugcccagccugccucauggagagga

SEQ ID NO: 38761 - RNA, 32 nt, Homo Sapiens
gugagauggagagaaagcaaccccagucugaa

SEQ ID NO: 38762 - RNA, 32 nt, Homo Sapiens
uccccugugcggccagcgucagagccauggcg

SEQ ID NO: 38763 - RNA, 32 nt, Homo Sapiens
auuuucccuaaaagguuugucccaagaucugc

SEQ ID NO: 38764 - RNA, 32 nt, Homo Sapiens
gauggaccaaaaugcauaagcuauauacuucc

SEQ ID NO: 38765 - RNA, 31 nt, Homo Sapiens
ccauggaaauaaaaaguauguuguacauacu

SEQ ID NO: 38766 - RNA, 32 nt, Homo Sapiens
cuucccuugcccacuauauggcagagauguaa

SEQ ID NO: 38767 - RNA, 32 nt, Homo Sapiens
uuucaaacauccgcauucuccucuucuuccug

SEQ ID NO: 38768 - RNA, 30 nt, Homo Sapiens
gugaaauggggaggaggaguccauucaaac

SEQ ID NO: 38769 - RNA, 29 nt, Homo Sapiens
cuuaauuuuaaauauaauauagagccuua

SEQ ID NO: 38770 - RNA, 32 nt, Homo Sapiens
auauuauuuuuccuuuaacaaaaugaagagac

SEQ ID NO: 38771 - RNA, 32 nt, Homo Sapiens
uaugaaugagcaaacauauuugaaaguuaacu

SEQ ID NO: 38772 - RNA, 32 nt, Homo Sapiens
gaagcuucaaccaaaugaaacuugaaucuguc

SEQ ID NO: 38773 - RNA, 31 nt, Homo Sapiens
acuugcaagcauaucaaccaggcaagucuug

SEQ ID NO: 38774 - RNA, 32 nt, Homo Sapiens
caauuguuaugguauaaaugugagaguauagu

SEQ ID NO: 38775 - RNA, 32 nt, Homo Sapiens
aguuguaaugucuccuuuuucauuucugauug

SEQ ID NO: 38776 - RNA, 32 nt, Homo Sapiens
cguggccugggcuuggcccgcggccugcaccg

SEQ ID NO: 38777 - RNA, 32 nt, Homo Sapiens
cgcuguuuccuucacaaauuagacauugguuu

SEQ ID NO: 38778 - RNA, 32 nt, Homo Sapiens
ccugccagcugaugauguguguuacaugacuu

SEQ ID NO: 38779 - RNA, 32 nt, Homo Sapiens
gaaucauguccaugcuggcccaggacccagcc

SEQ ID NO: 38780 - RNA, 31 nt, Homo Sapiens
acagucugagcaauuaaauagauucauaaga

SEQ ID NO: 38781 - RNA, 32 nt, Homo Sapiens
ugcaauaguauuguugaauaaguuuuauuuuu

SEQ ID NO: 38782 - RNA, 32 nt, Homo Sapiens
gaccccccagaauagaggggauaccucaggcc

SEQ ID NO: 38783 - RNA, 32 nt, Homo Sapiens
cuuucccuuugaauuucuuuuuacugucaucu

SEQ ID NO: 38784 - RNA, 32 nt, Homo Sapiens
uggaaaaucagccaaucuuaacccaaagaugg

SEQ ID NO: 38785 - RNA, 32 nt, Homo Sapiens
aggugagcaacaaccuuauggagugagcagcc

SEQ ID NO: 38786 - RNA, 32 nt, Homo Sapiens
auuaauugcaauauuuuuuucuucaggauuuu

SEQ ID NO: 38787 - RNA, 32 nt, Homo Sapiens
cccucggcucugccgcggugggccgaggccgc

SEQ ID NO: 38788 - RNA, 32 nt, Homo Sapiens
uccgcccgccucagccucccaaaguguuagga

SEQ ID NO: 38789 - RNA, 31 nt, Homo Sapiens
aaauaaaauuccuacauucuggaacuuuuca

SEQ ID NO: 38790 - RNA, 32 nt, Homo Sapiens
cgcucucggcuagcugcagcggcggcggcgcg

SEQ ID NO: 38791 - RNA, 28 nt, Homo Sapiens
gaaggaguuacagggaaguggucucccc

SEQ ID NO: 38792 - RNA, 32 nt, Homo Sapiens
auaguuugcauuuuaaaacucuguaaaaugca

SEQ ID NO: 38793 - RNA, 32 nt, Homo Sapiens
uggagauggggcugguugcugcugcagugagg

SEQ ID NO: 38794 - RNA, 32 nt, Homo Sapiens
gcccacccccgugugcuggcucccucacuucu

SEQ ID NO: 38795 - RNA, 32 nt, Homo Sapiens
guucucugccucagccucccaaguagcuggga

SEQ ID NO: 38796 - RNA, 32 nt, Homo Sapiens
cuucagauauucagaugugucuggaguuucuu

SEQ ID NO: 38797 - RNA, 32 nt, Homo Sapiens
aaguuacaugaccaggaagguuaugccacuuu

SEQ ID NO: 38798 - RNA, 32 nt, Homo Sapiens
ccuggcauggggcccauuggcguaagaaauac

SEQ ID NO: 38799 - RNA, 32 nt, Homo Sapiens
uucgcacucuggaguuuuccugcaggaucagg

SEQ ID NO: 38800 - RNA, 32 nt, Homo Sapiens
aucuguaacagcauuaacugucuuaaagagag

SEQ ID NO: 38801 - RNA, 32 nt, Homo Sapiens
aaaauacaaaaauauaaagaaaugacugaaag

SEQ ID NO: 38802 - RNA, 32 nt, Homo Sapiens
cccaaaaguauuuugaaaaaucauguauaccc

SEQ ID NO: 38803 - RNA, 32 nt, Homo Sapiens
cagaggggccucuggagcaggccuggcuuuua

SEQ ID NO: 38804 - RNA, 32 nt, Homo Sapiens
uuuguggggagcuucugauuuucuguuguuac

SEQ ID NO: 38805 - RNA, 32 nt, Homo Sapiens
ccgcggccggcgggccucagcuccugugggga

SEQ ID NO: 38806 - RNA, 32 nt, Homo Sapiens
acuuucagcaaacuucacauuaaaagacccgc

SEQ ID NO: 38807 - RNA, 32 nt, Homo Sapiens
uucuccugccagccccggcucaucucagggca

SEQ ID NO: 38808 - RNA, 32 nt, Homo Sapiens
cccucccuaaacugcucccaagaucaaugcuu

SEQ ID NO: 38809 - RNA, 32 nt, Homo Sapiens
augagccuuuugcuguacuaugcccucccugc

SEQ ID NO: 38810 - RNA, 32 nt, Homo Sapiens
agugcugcaucuuauagcacuuugaaauaccu

SEQ ID NO: 38811 - RNA, 32 nt, Homo Sapiens
ucgggggcaacgcucagcuuucucgccacauc

SEQ ID NO: 38812 - RNA, 32 nt, Homo Sapiens
ggaggcugaagcggaaggaucccuuggcccag

SEQ ID NO: 38813 - RNA, 32 nt, Homo Sapiens
gagauuuggaauauuuuugucaauguaugacu

SEQ ID NO: 38814 - RNA, 32 nt, Homo Sapiens
uuuuccaaggauuauaauaugcugaguaaacu

SEQ ID NO: 38815 - RNA, 32 nt, Homo Sapiens
ccgagggggcuucacccuguguccuuaggagg

SEQ ID NO: 38816 - RNA, 32 nt, Homo Sapiens
agugucuuucaccuguaaucccagcacuuugg

SEQ ID NO: 38817 - RNA, 32 nt, Homo Sapiens
cuuccauaucaauuauuugaacccgguaguuu

SEQ ID NO: 38818 - RNA, 31 nt, Homo Sapiens
uguuguuuuguuaauuaauccaagauuuaca

SEQ ID NO: 38819 - RNA, 32 nt, Homo Sapiens
ggaaagcugccaaauucaguccuauguugggu

SEQ ID NO: 38820 - RNA, 32 nt, Homo Sapiens
uggacuacgcgcgcagcgugcacgaggaguuu

SEQ ID NO: 38821 - RNA, 32 nt, Homo Sapiens
aggaaauaaaacuacaucuagaaguauaagca

SEQ ID NO: 38822 - RNA, 32 nt, Homo Sapiens
ggaccacuuuuauuuauugucagacacuuauu

SEQ ID NO: 38823 - RNA, 32 nt, Homo Sapiens
ggaaaccuugagugguggugcugggggaggca

SEQ ID NO: 38824 - RNA, 32 nt, Homo Sapiens
gggugaauacgggccuugauugccagaagggc

SEQ ID NO: 38825 - RNA, 32 nt, Homo Sapiens
gauaaaagaaagacaucccaggagaaggacaa

SEQ ID NO: 38826 - RNA, 32 nt, Homo Sapiens
ugugggugacuucaugccccagccuuucuccc

SEQ ID NO: 38827 - RNA, 32 nt, Homo Sapiens
cggccagcccggggcgggggcgugcagcugac

SEQ ID NO: 38828 - RNA, 32 nt, Homo Sapiens
cccggucaccucggccgggcccggggcugagg

SEQ ID NO: 38829 - RNA, 32 nt, Homo Sapiens
cgccgcacucgggaagacccggcuucgagccu

SEQ ID NO: 38830 - RNA, 32 nt, Homo Sapiens
cugcuaaaggguaaagggucagaggcugaaga

SEQ ID NO: 38831 - RNA, 32 nt, Homo Sapiens
cugagcuucgguuuccucaucuguucgagagg

SEQ ID NO: 38832 - RNA, 32 nt, Homo Sapiens
aaauuguuaauacauagucccaaucuuuuuca

SEQ ID NO: 38833 - RNA, 32 nt, Homo Sapiens
aauuccccaucccuagauacauccugggaagg

SEQ ID NO: 38834 - RNA, 32 nt, Homo Sapiens
ggccgguuucccgacguccgcggcagcccgcg

SEQ ID NO: 38835 - RNA, 32 nt, Homo Sapiens
uaggugcagugacagggcagcggcaccaucua

SEQ ID NO: 38836 - RNA, 32 nt, Homo Sapiens
uuuucaaacaauucucuggauuuauuuauuug

SEQ ID NO: 38837 - RNA, 32 nt, Homo Sapiens
aaaaagaaaaagaaaaaagaagcccaaacuag

SEQ ID NO: 38838 - RNA, 32 nt, Homo Sapiens
gcaggcaguaggggaggcgccacccauggcug

SEQ ID NO: 38839 - RNA, 32 nt, Homo Sapiens
augucuuaaaauugccaccugcacuuuguuuc

SEQ ID NO: 38840 - RNA, 32 nt, Homo Sapiens
agugagaucagaaacauuaguuucauauauug

SEQ ID NO: 38841 - RNA, 32 nt, Homo Sapiens
augggaggugagagaagaacgaugugauauuu

SEQ ID NO: 38842 - RNA, 32 nt, Homo Sapiens
gcagucuccaggcgagagagggggccagagug

SEQ ID NO: 38843 - RNA, 32 nt, Homo Sapiens
uuucaaucucauugucacuggauagugcugua

SEQ ID NO: 38844 - RNA, 32 nt, Homo Sapiens
gucauuguguggaagacugacuggucccuuua

SEQ ID NO: 38845 - RNA, 30 nt, Homo Sapiens
uucagagagaagcuuuugagagcgugcugg

SEQ ID NO: 38846 - RNA, 32 nt, Homo Sapiens
uuacucccuccucuccuuugagaggcccaugu

SEQ ID NO: 38847 - RNA, 32 nt, Homo Sapiens
aagacaccuucccacaccuguaaucucagcac

SEQ ID NO: 38848 - RNA, 32 nt, Homo Sapiens
cucucucacaacuuccucuccaccuccacuga

SEQ ID NO: 38849 - RNA, 32 nt, Homo Sapiens
agaugcuuagccugagccuguuuuauguuuug

SEQ ID NO: 38850 - RNA, 32 nt, Homo Sapiens
uuauagaugcuuaucuagguuuucauaaaugg

SEQ ID NO: 38851 - RNA, 32 nt, Homo Sapiens
aagaaaagugauaaguuuucuuaaaaaucauu

SEQ ID NO: 38852 - RNA, 32 nt, Homo Sapiens
uggaaagagauuuuaauucguugagucagggu

SEQ ID NO: 38853 - RNA, 32 nt, Homo Sapiens
ucagcagagucuucuugugcugccuuugggcu

SEQ ID NO: 38854 - RNA, 32 nt, Homo Sapiens
gaagacagaauuuggauuuggaaggcuuacau

SEQ ID NO: 38855 - RNA, 32 nt, Homo Sapiens
ucugguggucuccucgucaauccaucagcaau

SEQ ID NO: 38856 - RNA, 32 nt, Homo Sapiens
gcgucuuuguuccagacacuugccaugucuca

SEQ ID NO: 38857 - RNA, 32 nt, Homo Sapiens
guuauuuccuucccccucaccuuuuggccaug

SEQ ID NO: 38858 - RNA, 32 nt, Homo Sapiens
gcaugaccaaaauagccccacucaaaaucaau

SEQ ID NO: 38859 - RNA, 32 nt, Homo Sapiens
ccuuaacuggcugagacaucccggcccucuac

SEQ ID NO: 38860 - RNA, 32 nt, Homo Sapiens
uugcccuucccucggcucccagcccuacagac

SEQ ID NO: 38861 - RNA, 32 nt, Homo Sapiens
caaacaagugaacaaaggucucugguuuuccu

SEQ ID NO: 38862 - RNA, 32 nt, Homo Sapiens
uuugaacauauagauauguaacaugccacaaa

SEQ ID NO: 38863 - RNA, 32 nt, Homo Sapiens
aaguggagggugggcucaugggccgugcucug

SEQ ID NO: 38864 - RNA, 32 nt, Homo Sapiens
cccugggaaggggcagcugggccugcagugug

SEQ ID NO: 38865 - RNA, 32 nt, Homo Sapiens
uggcugacugcaacuucugccuccuggguuca

SEQ ID NO: 38866 - RNA, 32 nt, Homo Sapiens
gucuuucuucuccucccuauuucgcagauauc

SEQ ID NO: 38867 - RNA, 32 nt, Homo Sapiens
uuccaaaucuccuguguccucccggccccgcc

SEQ ID NO: 38868 - RNA, 32 nt, Homo Sapiens
ucugccagucuucgcucuguccccguucaauc

SEQ ID NO: 38869 - RNA, 32 nt, Homo Sapiens
ugcacaaacguuuuauacuaaauaaauaucaa

SEQ ID NO: 38870 - RNA, 32 nt, Homo Sapiens
uggaagguggaggacagaagcccuguggaucc

SEQ ID NO: 38871 - RNA, 32 nt, Homo Sapiens
gccucccaccccagccucccugaggcccauac

SEQ ID NO: 38872 - RNA, 32 nt, Homo Sapiens
uggccagcgccgaccacuucuaccuccuccug

SEQ ID NO: 38873 - RNA, 31 nt, Homo Sapiens
cgcaaaaacauuuaucucccaaauaagaugu

SEQ ID NO: 38874 - RNA, 32 nt, Homo Sapiens
guuuaccaaacaccuuggucauaauaauguca

SEQ ID NO: 38875 - RNA, 32 nt, Homo Sapiens
aaagaagcagggggguccuuugaaagaaaucu

SEQ ID NO: 38876 - RNA, 32 nt, Homo Sapiens
ccugaaugguggaaugcuguguccucucuucu

SEQ ID NO: 38877 - RNA, 32 nt, Homo Sapiens
acacaaggauuuucuuuuuuauuaauaugcaa

SEQ ID NO: 38878 - RNA, 32 nt, Homo Sapiens
aacaaaacaacacuacaugcugaggcuucuua

SEQ ID NO: 38879 - RNA, 32 nt, Homo Sapiens
gugugaacugcugcgcuacacaucaguguuaa

SEQ ID NO: 38880 - RNA, 32 nt, Homo Sapiens
acuguuagguugaguaugguggggucagugac

SEQ ID NO: 38881 - RNA, 32 nt, Homo Sapiens
auacgcaccuggaaacaaaaggacuauggaag

SEQ ID NO: 38882 - RNA, 32 nt, Homo Sapiens
cuacauugaaaaauuuaucaagaauuuaaagg

SEQ ID NO: 38883 - RNA, 32 nt, Homo Sapiens
auagcuucuggugauaucuuuucaugauuuua

SEQ ID NO: 38884 - RNA, 32 nt, Homo Sapiens
gccucuucccccuuuugucagcugagcaguuu

SEQ ID NO: 38885 - RNA, 32 nt, Homo Sapiens
ggggccccccacaacccuccccgacacccuag

SEQ ID NO: 38886 - RNA, 32 nt, Homo Sapiens
gcccccaagaucuggcauagggguacuggucu

SEQ ID NO: 38887 - RNA, 32 nt, Homo Sapiens
acuggguaggcacaacccacaguuaagaacau

SEQ ID NO: 38888 - RNA, 32 nt, Homo Sapiens
gacggagaggggcuacagcagagccuaaggga

SEQ ID NO: 38889 - RNA, 32 nt, Homo Sapiens
ccuaauugaucauuuuaccauaaauugaauua

SEQ ID NO: 38890 - RNA, 32 nt, Homo Sapiens
ggccggggcuccugcuccgguugcuggcgcug

SEQ ID NO: 38891 - RNA, 32 nt, Homo Sapiens
agggaaacacuggcuuuuguuacgggcugaau

SEQ ID NO: 38892 - RNA, 32 nt, Homo Sapiens
uagugaccacacugcuucccuuucucaguucc

SEQ ID NO: 38893 - RNA, 32 nt, Homo Sapiens
ggugugggagcagagaaaauugugaaagugac

SEQ ID NO: 38894 - RNA, 32 nt, Homo Sapiens
gcuucuggcugaguguguuuccugucaccaau

SEQ ID NO: 38895 - RNA, 32 nt, Homo Sapiens
aagguuauaauuuuccacuaagauguagauau

SEQ ID NO: 38896 - RNA, 32 nt, Homo Sapiens
acuuuaauaauaaaaaucaugcuuauaagcaa

SEQ ID NO: 38897 - RNA, 32 nt, Homo Sapiens
agacguaucuuugcccauucgagcacaaguua

SEQ ID NO: 38898 - RNA, 32 nt, Homo Sapiens
aaaacauauccacaacauuggcuugaugugau

SEQ ID NO: 38899 - RNA, 32 nt, Homo Sapiens
cagggauggcucagcagggaugacucagcauu

SEQ ID NO: 38900 - RNA, 32 nt, Homo Sapiens
cucggcuucaaggcgcugcugcugcucggggu

SEQ ID NO: 38901 - RNA, 32 nt, Homo Sapiens
cagaaggaauauauuuuguaaaauagaaugga

SEQ ID NO: 38902 - RNA, 32 nt, Homo Sapiens
cagucuuugacugccuucccauggcgaucuau

SEQ ID NO: 38903 - RNA, 32 nt, Homo Sapiens
uuugcauuccaagaagagcauguccucccucg

SEQ ID NO: 38904 - RNA, 32 nt, Homo Sapiens
cugaaaugaagauagacacuuggccauagggc

SEQ ID NO: 38905 - RNA, 32 nt, Homo Sapiens
gguccucuuuugcuuaaagaccaugcagaaac

SEQ ID NO: 38906 - RNA, 32 nt, Homo Sapiens
acaugccuuauguccucugaguuguagaguug

SEQ ID NO: 38907 - RNA, 32 nt, Homo Sapiens
gguuuggugauuguguagcauaaagaaagaga

SEQ ID NO: 38908 - RNA, 32 nt, Homo Sapiens
uccugaaaauugcaauuuuuaaaauguguaaa

SEQ ID NO: 38909 - RNA, 32 nt, Homo Sapiens
ccccgggaugacggcggcccaggccgcgggug

SEQ ID NO: 38910 - RNA, 32 nt, Homo Sapiens
gccacgccguguguaggcuuagccucaggugg

SEQ ID NO: 38911 - RNA, 32 nt, Homo Sapiens
acacagccugcacccacccccacaucugggcc

SEQ ID NO: 38912 - RNA, 32 nt, Homo Sapiens
uugcuuagaccaugcucugagccccggcaggu

SEQ ID NO: 38913 - RNA, 32 nt, Homo Sapiens
augaggccugcagcugacagcuuugaguggcu

SEQ ID NO: 38914 - RNA, 32 nt, Homo Sapiens
gguuccccagguagggagagccagaggugcca

SEQ ID NO: 38915 - RNA, 32 nt, Homo Sapiens
auauaaugaacaugucagaacuauuucuugaa

SEQ ID NO: 38916 - RNA, 32 nt, Homo Sapiens
aaguccaaaggcauuuucuccugugcugacca

SEQ ID NO: 38917 - RNA, 32 nt, Homo Sapiens
gagguugagcaaacagagcagcagaaaaggca

SEQ ID NO: 38918 - RNA, 32 nt, Homo Sapiens
ggaugcugaguucugguaaacaugcugucgga

SEQ ID NO: 38919 - RNA, 32 nt, Homo Sapiens
cugcacccgccgccgcgcugcugggggcuggg

SEQ ID NO: 38920 - RNA, 32 nt, Homo Sapiens
gaggaauggugcccgaaucugggagagauaga

SEQ ID NO: 38921 - RNA, 32 nt, Homo Sapiens
agggcuugacccugguacccagcccagccuua

SEQ ID NO: 38922 - RNA, 32 nt, Homo Sapiens
aaggaaaaacaaaaaagaagaauaaaauaauu

SEQ ID NO: 38923 - RNA, 32 nt, Homo Sapiens
ccuuucugugcacagcacuuuauuguuacaaa

SEQ ID NO: 38924 - RNA, 32 nt, Homo Sapiens
uggccaaggguaggggcggggcggggaaguga

SEQ ID NO: 38925 - RNA, 32 nt, Homo Sapiens
cugcacuugggcccuccucugggagccgcacc

SEQ ID NO: 38926 - RNA, 32 nt, Homo Sapiens
cucguagcuggguucagcucugcguccacgcc

SEQ ID NO: 38927 - RNA, 32 nt, Homo Sapiens
gaggugaaugucuuccuuuucuuucucccuaa

SEQ ID NO: 38928 - RNA, 32 nt, Homo Sapiens
ccgcggggagagaggaggagagaaguggccag

SEQ ID NO: 38929 - RNA, 32 nt, Homo Sapiens
gaaauagcagugcccgcugugucucauugugu

SEQ ID NO: 38930 - RNA, 32 nt, Homo Sapiens
ccagccgcgggcgggcgggcggcgaagauggc

SEQ ID NO: 38931 - RNA, 32 nt, Homo Sapiens
gauauuucacuagauaaagaauuuaaggcgag

SEQ ID NO: 38932 - RNA, 32 nt, Homo Sapiens
cuacuucccguccaguuccugccagagucucc

SEQ ID NO: 38933 - RNA, 32 nt, Homo Sapiens
ccaccacggucccagggcccuuacucuuccuc

SEQ ID NO: 38934 - RNA, 32 nt, Homo Sapiens
uaaagcuaggguccaagggcagagccugugcc

SEQ ID NO: 38935 - RNA, 32 nt, Homo Sapiens
gagagccccguccuggauucugucccuuucuc

SEQ ID NO: 38936 - RNA, 32 nt, Homo Sapiens
aagcuuuccucaguugucaucucuucccagcu

SEQ ID NO: 38937 - RNA, 32 nt, Homo Sapiens
cugcaggccccggcccuggggguggcuuuccc

SEQ ID NO: 38938 - RNA, 32 nt, Homo Sapiens
guuccucaguuaaggacuuguuuauuuaaaug

SEQ ID NO: 38939 - RNA, 28 nt, Homo Sapiens
aauuguggaccggcgccgagggggaaag

SEQ ID NO: 38940 - RNA, 32 nt, Homo Sapiens
caaguuguucuguugcacaucaauguuuggga

SEQ ID NO: 38941 - RNA, 32 nt, Homo Sapiens
acgcccugcauccuccucccugacucgcagcc

SEQ ID NO: 38942 - RNA, 32 nt, Homo Sapiens
ggagggcgcgucgcccucugcccccgccggca

SEQ ID NO: 38943 - RNA, 32 nt, Homo Sapiens
acgccguccgcgcgcgcagccugggaggcgcu

SEQ ID NO: 38944 - RNA, 32 nt, Homo Sapiens
cagauauuuuauuuauuggccuguuccccaaa

SEQ ID NO: 38945 - RNA, 32 nt, Homo Sapiens
cuuucacagaggcuaccaaugucuaggaagcu

SEQ ID NO: 38946 - RNA, 32 nt, Homo Sapiens
gucagaucugguccccugaggacccuugccuc

SEQ ID NO: 38947 - RNA, 32 nt, Homo Sapiens
gcacagggcuauguuugguaaaaauuagguau

SEQ ID NO: 38948 - RNA, 32 nt, Homo Sapiens
gcugcagcguccccgcccgccuccucgggagc

SEQ ID NO: 38949 - RNA, 32 nt, Homo Sapiens
gcuacaccaaaauugcauugagccaaacuugc

SEQ ID NO: 38950 - RNA, 32 nt, Homo Sapiens
aaagagggguugggacuuuuuacuucacuagg

SEQ ID NO: 38951 - RNA, 32 nt, Homo Sapiens
ucuuccugucuguuccuccccuaauccucuau

SEQ ID NO: 38952 - RNA, 32 nt, Homo Sapiens
caagguuuugaaaaggauaaucauggguuaga

SEQ ID NO: 38953 - RNA, 32 nt, Homo Sapiens
guguuuuaaaaauauauuuuuacaaguauacu

SEQ ID NO: 38954 - RNA, 32 nt, Homo Sapiens
gaaauuuguuuuuauguguacaguuugucaga

SEQ ID NO: 38955 - RNA, 32 nt, Homo Sapiens
ccuaacuccccugaggccccccugccuccccc

SEQ ID NO: 38956 - RNA, 32 nt, Homo Sapiens
ugcuaaguuccacuuggccccuuuuaaaaacg

SEQ ID NO: 38957 - RNA, 32 nt, Homo Sapiens
acacaauguuucucuguaaauauugccauuaa

SEQ ID NO: 38958 - RNA, 32 nt, Homo Sapiens
auucauugauucaaacacccaagccacaggau

SEQ ID NO: 38959 - RNA, 32 nt, Homo Sapiens
uucugccuuuuuuaaaagaaaaguauguguaa

SEQ ID NO: 38960 - RNA, 32 nt, Homo Sapiens
cugucuaugugcucaaggacaguggcuuccuu

SEQ ID NO: 38961 - RNA, 32 nt, Homo Sapiens
agaucugacagcaagauucagaguggguucuu

SEQ ID NO: 38962 - RNA, 32 nt, Homo Sapiens
cccaccgccccggccacagccccugcgcccac

SEQ ID NO: 38963 - RNA, 32 nt, Homo Sapiens
guggauccagggaacgcuuuuguccaaggauu

SEQ ID NO: 38964 - RNA, 32 nt, Homo Sapiens
uguucauggcaggccauggcccgggcaccugc

SEQ ID NO: 38965 - RNA, 28 nt, Homo Sapiens
cacgccuauugcugcaggaugacgcgca

SEQ ID NO: 38966 - RNA, 32 nt, Homo Sapiens
aaaaugucaacaaauuuuuccagcaagcugag

SEQ ID NO: 38967 - RNA, 32 nt, Homo Sapiens
uacaguggaaggacuuuaagaaagaucaacau

SEQ ID NO: 38968 - RNA, 32 nt, Homo Sapiens
ugugagcacacagagcagcaucugaugcccug

SEQ ID NO: 38969 - RNA, 32 nt, Homo Sapiens
ccauuugcuuugucccggggcuccacugaaca

SEQ ID NO: 38970 - RNA, 32 nt, Homo Sapiens
acuugaaaauguagaguagaauuuauaacuau

SEQ ID NO: 38971 - RNA, 32 nt, Homo Sapiens
guucuuguuuuacuguauugagcggcggcacc

SEQ ID NO: 38972 - RNA, 32 nt, Homo Sapiens
accggcauuuaaaauauaucuauaucacuuug

SEQ ID NO: 38973 - RNA, 32 nt, Homo Sapiens
uuucaugucuaaaaccauuuuaugauauugcc

SEQ ID NO: 38974 - RNA, 32 nt, Homo Sapiens
ccauuuugauucagguauuauuuuucauauuu

SEQ ID NO: 38975 - RNA, 32 nt, Homo Sapiens
ucucuucugucccagggcuuucuggaggacgc

SEQ ID NO: 38976 - RNA, 32 nt, Homo Sapiens
uguuacggguaccagcagagugaugauuuugg

SEQ ID NO: 38977 - RNA, 32 nt, Homo Sapiens
uuuggccacucucagagguaccucaagagacc

SEQ ID NO: 38978 - RNA, 32 nt, Homo Sapiens
cuggcucgcgcgugccuuuuccccucagguug

SEQ ID NO: 38979 - RNA, 27 nt, Homo Sapiens
uaaugaccgagccccagaacucucagg

SEQ ID NO: 38980 - RNA, 32 nt, Homo Sapiens
cggcuuucucaguuccaagauuuugcagagag

SEQ ID NO: 38981 - RNA, 32 nt, Homo Sapiens
gaugcuucaaguguugugaacagagacuuguu

SEQ ID NO: 38982 - RNA, 32 nt, Homo Sapiens
ggacccggcgccgucuucuccuccuugucacc

SEQ ID NO: 38983 - RNA, 32 nt, Homo Sapiens
ggacugaggcgucgagcuuucagcuccaccaa

SEQ ID NO: 38984 - RNA, 32 nt, Homo Sapiens
ucccagucuccaagugcuaacacauaaacaca

SEQ ID NO: 38985 - RNA, 32 nt, Homo Sapiens
auuucuaccucuuuccuggcaauugaaaugaa

SEQ ID NO: 38986 - RNA, 32 nt, Homo Sapiens
ucugcuggcgccccggcccucgcggagguguc

SEQ ID NO: 38987 - RNA, 32 nt, Homo Sapiens
cacaccggcccugcuccuuccuccucugggcc

SEQ ID NO: 38988 - RNA, 32 nt, Homo Sapiens
augugguggugcccagcugcuugggaggcuga

SEQ ID NO: 38989 - RNA, 32 nt, Homo Sapiens
aaaagugcugcuugcccacaccuucguccccu

SEQ ID NO: 38990 - RNA, 32 nt, Homo Sapiens
auagcugaaaaacaggguugugagaacagcuu

SEQ ID NO: 38991 - RNA, 32 nt, Homo Sapiens
aaaugcuguauauuugguuuugaaaaaaugaa

SEQ ID NO: 38992 - RNA, 32 nt, Homo Sapiens
gacagggagggcccgggcguccagugcaaacu

SEQ ID NO: 38993 - RNA, 32 nt, Homo Sapiens
ccaccccccgugggcuccugugcggccggagc

SEQ ID NO: 38994 - RNA, 32 nt, Homo Sapiens
augaucagauugaaggugguugguuuuuauua

SEQ ID NO: 38995 - RNA, 32 nt, Homo Sapiens
ucucauucuccauaccucccccaagcucuccu

SEQ ID NO: 38996 - RNA, 32 nt, Homo Sapiens
cccaggaggcggagauugcagugagcugagau

SEQ ID NO: 38997 - RNA, 32 nt, Homo Sapiens
cuuugggaaaaguugagaagauaguaaaagaa

SEQ ID NO: 38998 - RNA, 32 nt, Homo Sapiens
caaaggaaauaccagcuuguccaccugaggaa

SEQ ID NO: 38999 - RNA, 32 nt, Homo Sapiens
uaaauguaauuucuuuccuuuuuuggacacuu

SEQ ID NO: 39000 - RNA, 32 nt, Homo Sapiens
uuccggucaccauggcgaccaggcgccuuggg

SEQ ID NO: 39001 - RNA, 32 nt, Homo Sapiens
ggcauccagacacgugggcgcagcugcuccag

SEQ ID NO: 39002 - RNA, 32 nt, Homo Sapiens
agaaggacgacgggaggguaaugaagcugagc

SEQ ID NO: 39003 - RNA, 32 nt, Homo Sapiens
ugaagcagcuucggggacuggggcaaccgggc

SEQ ID NO: 39004 - RNA, 32 nt, Homo Sapiens
gagcaaugggucuccacaaguaccucucaucu

SEQ ID NO: 39005 - RNA, 32 nt, Homo Sapiens
acacgguuuuuaagaaagaacuucuaacccca

SEQ ID NO: 39006 - RNA, 32 nt, Homo Sapiens
aucacaugguuguuuugugucccauggucaag

SEQ ID NO: 39007 - RNA, 32 nt, Homo Sapiens
ugcggugagaggaugaggggagccuacgccuc

SEQ ID NO: 39008 - RNA, 32 nt, Homo Sapiens
ccucauuccauaugcugaaauaggccagcucu

SEQ ID NO: 39009 - RNA, 32 nt, Homo Sapiens
uugacaacuucuuuuuacgaugucccacuucg

SEQ ID NO: 39010 - RNA, 32 nt, Homo Sapiens
acaucugacaaugaggcaaggggcugauagag

SEQ ID NO: 39011 - RNA, 32 nt, Homo Sapiens
ggagcaguccggagaggcaagaugaccccacc

SEQ ID NO: 39012 - RNA, 32 nt, Homo Sapiens
ccuuugggagacugaggccagcagaucuccug

SEQ ID NO: 39013 - RNA, 32 nt, Homo Sapiens
uucuuuguugggagucaagugacagagcagac

SEQ ID NO: 39014 - RNA, 32 nt, Homo Sapiens
cccccuccccaccuccacggaccucggaccuc

SEQ ID NO: 39015 - RNA, 32 nt, Homo Sapiens
cauagcaauuuaaucaaguaaucauuaauuag

SEQ ID NO: 39016 - RNA, 32 nt, Homo Sapiens
acgcgggggacaagucgcggccaccugcuccg

SEQ ID NO: 39017 - RNA, 32 nt, Homo Sapiens
gugccuucuagucuuuugauaauuaaaccuuu

SEQ ID NO: 39018 - RNA, 32 nt, Homo Sapiens
gaaagaggggagaauaaaguuaugcuguguac

SEQ ID NO: 39019 - RNA, 32 nt, Homo Sapiens
agaggagccgcggcgaggaacaagaguguggu

SEQ ID NO: 39020 - RNA, 32 nt, Homo Sapiens
uagaauguuuuaaauugaauguucgccuuuua

SEQ ID NO: 39021 - RNA, 32 nt, Homo Sapiens
uuuuuagacaggaaaaucuuggguuucauaua

SEQ ID NO: 39022 - RNA, 32 nt, Homo Sapiens
uuaaauaugcugucacaacauuuaggaauuaa

SEQ ID NO: 39023 - RNA, 32 nt, Homo Sapiens
cccauuucucacuugugucaccagcuguuugu

SEQ ID NO: 39024 - RNA, 32 nt, Homo Sapiens
cacuggugccaaaaccaggccucugcugccgc

SEQ ID NO: 39025 - RNA, 32 nt, Homo Sapiens
gugucaaucuaagaaugcagugccaaauccag

SEQ ID NO: 39026 - RNA, 32 nt, Homo Sapiens
cauuuaugguauaaaaauuuaaacuaaucaaa

SEQ ID NO: 39027 - RNA, 32 nt, Homo Sapiens
ccaguccgcccggcggcucgcgcacggcuccg

SEQ ID NO: 39028 - RNA, 32 nt, Homo Sapiens
uagucucugcaccuccuuaggcccugccucug

SEQ ID NO: 39029 - RNA, 32 nt, Homo Sapiens
acacaaauuauuuauguuuucuuaguaucaga

SEQ ID NO: 39030 - RNA, 32 nt, Homo Sapiens
gccuaccuagacagugcaguccugcuuggggg

SEQ ID NO: 39031 - RNA, 32 nt, Homo Sapiens
cagcaucucagacgcagccuagguucccaugg

SEQ ID NO: 39032 - RNA, 32 nt, Homo Sapiens
aagucuugguuuuacuaagguaggguagcauu

SEQ ID NO: 39033 - RNA, 32 nt, Homo Sapiens
ggugagugcuguguuuugagcuuauuuugaac

SEQ ID NO: 39034 - RNA, 32 nt, Homo Sapiens
gcugucugaggugcgcgccgcgcuggggcucg

SEQ ID NO: 39035 - RNA, 32 nt, Homo Sapiens
acuguggguuucuuaccccagcccucaaggaa

SEQ ID NO: 39036 - RNA, 32 nt, Homo Sapiens
uauucugccuuguuccagaaaaguguuuaagg

SEQ ID NO: 39037 - RNA, 32 nt, Homo Sapiens
ggccgcugccuugccugcacuggcauguccau

SEQ ID NO: 39038 - RNA, 32 nt, Homo Sapiens
gaggcugcagcgagcagggaucacgucacugc

SEQ ID NO: 39039 - RNA, 32 nt, Homo Sapiens
caguaggaauaauaccguauuaaggaauaaua

SEQ ID NO: 39040 - RNA, 32 nt, Homo Sapiens
aggucugagcagagggcggggugcaggcggaa

SEQ ID NO: 39041 - RNA, 32 nt, Homo Sapiens
gcaggugugaugaccagacggcggagaagcuc

SEQ ID NO: 39042 - RNA, 32 nt, Homo Sapiens
cacccugcggacugccugcgggcuugcuugcu

SEQ ID NO: 39043 - RNA, 32 nt, Homo Sapiens
caggauaaaaacagacaucaguggaaucgaaa

SEQ ID NO: 39044 - RNA, 32 nt, Homo Sapiens
guaucacucuaaaaaacauuuuuauuuaacaa

SEQ ID NO: 39045 - RNA, 32 nt, Homo Sapiens
gagacaguggcauggagcuuugaaagacgagu

SEQ ID NO: 39046 - RNA, 32 nt, Homo Sapiens
uugggagcccggcuggccuccgcggccggcgu

SEQ ID NO: 39047 - RNA, 32 nt, Homo Sapiens
ggcagaagggaaguaagaaguaagacaaaggu

SEQ ID NO: 39048 - RNA, 32 nt, Homo Sapiens
uguuuauuuuugcaauaaagagcacaacauaa

SEQ ID NO: 39049 - RNA, 32 nt, Homo Sapiens
gucuagaaaaguccugguacuccacacugcug

SEQ ID NO: 39050 - RNA, 32 nt, Homo Sapiens
aguuaauuuuccucuagugcugauuuacauga

SEQ ID NO: 39051 - RNA, 32 nt, Homo Sapiens
cgcagagcacugggccuggcacguaguaggca

SEQ ID NO: 39052 - RNA, 32 nt, Homo Sapiens
gacauugaccuccgccauugagcuccacgguu

SEQ ID NO: 39053 - RNA, 32 nt, Homo Sapiens
cagaugaguaguaaauguugauauauccuaua

SEQ ID NO: 39054 - RNA, 32 nt, Homo Sapiens
ucaucaaaauuccacucacucauucuuaguau

SEQ ID NO: 39055 - RNA, 32 nt, Homo Sapiens
uucagccccuacccgggcucggcggccuucac

SEQ ID NO: 39056 - RNA, 32 nt, Homo Sapiens
augucuuggaaugcgcaagucucccuuuagag

SEQ ID NO: 39057 - RNA, 32 nt, Homo Sapiens
cuagccggccuggccauggcugaccgcgggug

SEQ ID NO: 39058 - RNA, 32 nt, Homo Sapiens
cagaacagguaccacagcuuugguuuuagauu

SEQ ID NO: 39059 - RNA, 32 nt, Homo Sapiens
agacaaaggcucccaaggcaagagggacugug

SEQ ID NO: 39060 - RNA, 32 nt, Homo Sapiens
gccagccugagccacauagugagacugagucc

SEQ ID NO: 39061 - RNA, 32 nt, Homo Sapiens
ucccccaaaaggaaguggucuuuucacuaccc

SEQ ID NO: 39062 - RNA, 32 nt, Homo Sapiens
gcgacuccaucgcgccauaucgcgacaccauc

SEQ ID NO: 39063 - RNA, 32 nt, Homo Sapiens
cucagcugcuucucccacuuggccaagcaggg

SEQ ID NO: 39064 - RNA, 32 nt, Homo Sapiens
auugauagacauuuggauggucuacaguuuuu

SEQ ID NO: 39065 - RNA, 32 nt, Homo Sapiens
ugagcaauaauccucacuauguuuccugauuc

SEQ ID NO: 39066 - RNA, 32 nt, Homo Sapiens
uaggaagacgaaaguauaaagaucuagaagac

SEQ ID NO: 39067 - RNA, 32 nt, Homo Sapiens
agaggucuauagaaacaucaugucacaugaaa

SEQ ID NO: 39068 - RNA, 32 nt, Homo Sapiens
uguucaggaaaacaugaguguuagaauuagaa

SEQ ID NO: 39069 - RNA, 32 nt, Homo Sapiens
cugagcuucuuggccgcaaggaugcagaaaua

SEQ ID NO: 39070 - RNA, 32 nt, Homo Sapiens
cgcccuuucugcuggagcccaggcccagugcu

SEQ ID NO: 39071 - RNA, 32 nt, Homo Sapiens
ccuacacaugugcccgcccacccgggcugccc

SEQ ID NO: 39072 - RNA, 32 nt, Homo Sapiens
uucucuuuuccacuuuggacuucucaguguau

SEQ ID NO: 39073 - RNA, 32 nt, Homo Sapiens
gaucgcgacgcggcuucuggcgcggaggcgcc

SEQ ID NO: 39074 - RNA, 32 nt, Homo Sapiens
cacggccugccagcccggggcgccagaauccu

SEQ ID NO: 39075 - RNA, 32 nt, Homo Sapiens
aauaaauuccuaacuauauaaagcagacaaga

SEQ ID NO: 39076 - RNA, 32 nt, Homo Sapiens
cugcagccucugccuccuggguuccaagcgau

SEQ ID NO: 39077 - RNA, 32 nt, Homo Sapiens
acgugaccuggugacagugcugacuuggcugu

SEQ ID NO: 39078 - RNA, 32 nt, Homo Sapiens
ccgcccugcccccugccagccagugcagcuug

SEQ ID NO: 39079 - RNA, 32 nt, Homo Sapiens
cuuguuccgaguuuguucuagaagucagaacu

SEQ ID NO: 39080 - RNA, 32 nt, Homo Sapiens
cguccggcucugcggacagcucggggcccggc

SEQ ID NO: 39081 - RNA, 32 nt, Homo Sapiens
gccggagccggagcggggagccaggcugcgug

SEQ ID NO: 39082 - RNA, 32 nt, Homo Sapiens
ugauuccaagaaaaaacacuuuucuagcaaac

SEQ ID NO: 39083 - RNA, 32 nt, Homo Sapiens
ccucaucccacccauucucagggcaguauggg

SEQ ID NO: 39084 - RNA, 32 nt, Homo Sapiens
uuagaacagaacaauucuauuugcauguuucu

SEQ ID NO: 39085 - RNA, 32 nt, Homo Sapiens
cugcccgccucagccucccaagugcugggauu

SEQ ID NO: 39086 - RNA, 32 nt, Homo Sapiens
uagagccugccauggcgaaucggcuacagcgc

SEQ ID NO: 39087 - RNA, 31 nt, Homo Sapiens
cgugcccggcacuggcagcgaggcucgugug

SEQ ID NO: 39088 - RNA, 32 nt, Homo Sapiens
cacuccaucggccccggcacccugcuccaucg

SEQ ID NO: 39089 - RNA, 32 nt, Homo Sapiens
guaaugcuuuuuucuuuuuauaacccaaaaag

SEQ ID NO: 39090 - RNA, 32 nt, Homo Sapiens
aaaagacagacaacucuagacuucauugcugg

SEQ ID NO: 39091 - RNA, 32 nt, Homo Sapiens
uguuucaugcauucagaaaugauuguuaaaau

SEQ ID NO: 39092 - RNA, 32 nt, Homo Sapiens
ucucccggccccacugccuucagguaucagga

SEQ ID NO: 39093 - RNA, 32 nt, Homo Sapiens
cuccaccaugcaggacaaacauccucucaagc

SEQ ID NO: 39094 - RNA, 32 nt, Homo Sapiens
gguuugguuuucuuucuuuucuuuuccuuuua

SEQ ID NO: 39095 - RNA, 32 nt, Homo Sapiens
acgugucugcgaaggcggccagguucugcagc

SEQ ID NO: 39096 - RNA, 32 nt, Homo Sapiens
uaauacuuggauuuauuuucauauacuuacau

SEQ ID NO: 39097 - RNA, 32 nt, Homo Sapiens
ucucuggaaugccacaucuccucccaccagcc

SEQ ID NO: 39098 - RNA, 32 nt, Homo Sapiens
agaggaagcccccucuccuucuccaugggcau

SEQ ID NO: 39099 - RNA, 32 nt, Homo Sapiens
acauuuauuguuaauaacagcuuguucauagg

SEQ ID NO: 39100 - RNA, 32 nt, Homo Sapiens
caggugggguacuggcaucagagccuggugcg

SEQ ID NO: 39101 - RNA, 32 nt, Homo Sapiens
gauggucacaugccaugugcagaauuugacuu

SEQ ID NO: 39102 - RNA, 32 nt, Homo Sapiens
acucggguugaaacuuuuggcuuucgggggaa

SEQ ID NO: 39103 - RNA, 32 nt, Homo Sapiens
cuggaugaaugucuuuuuuaauacuccgaaaa

SEQ ID NO: 39104 - RNA, 30 nt, Homo Sapiens
cuggcuccuuuccuuuggcagguuggggaa

SEQ ID NO: 39105 - RNA, 32 nt, Homo Sapiens
ucauaaagaaauuuauaauaaagugcuucgua

SEQ ID NO: 39106 - RNA, 32 nt, Homo Sapiens
agacuuaaauuaaugugagauauguaccuuca

SEQ ID NO: 39107 - RNA, 32 nt, Homo Sapiens
agaccugccuagcagagccccagucuccagcc

SEQ ID NO: 39108 - RNA, 30 nt, Homo Sapiens
gaggcccuggacggcggcggcaguggggcu

SEQ ID NO: 39109 - RNA, 32 nt, Homo Sapiens
cacacaggcuucucuguccacaaaauuugcuc

SEQ ID NO: 39110 - RNA, 32 nt, Homo Sapiens
uucaaucugaagauguaagacuuccugaaaca

SEQ ID NO: 39111 - RNA, 32 nt, Homo Sapiens
cggacgcagcagcccucuggcuccagcauggg

SEQ ID NO: 39112 - RNA, 32 nt, Homo Sapiens
accucuaugcaaacaaaccagaaaaccuaaaa

SEQ ID NO: 39113 - RNA, 32 nt, Homo Sapiens
aaguuuacuuguauacggaacaaccacaagaa

SEQ ID NO: 39114 - RNA, 32 nt, Homo Sapiens
gauuacccaagcaaaaucauggaauuauuggu

SEQ ID NO: 39115 - RNA, 32 nt, Homo Sapiens
uggggcagugagggcuuaggacaccccaagug

SEQ ID NO: 39116 - RNA, 32 nt, Homo Sapiens
gcucuugcguccucagcguuuaucucaggugc

SEQ ID NO: 39117 - RNA, 32 nt, Homo Sapiens
agguuuagggguacaugugaagguuuguuaca

SEQ ID NO: 39118 - RNA, 32 nt, Homo Sapiens
aguauuaaaguuuuauacuuaaagaguacuaa

SEQ ID NO: 39119 - RNA, 32 nt, Homo Sapiens
uaaugauaaaaauaaugcacaggcaugguuac

SEQ ID NO: 39120 - RNA, 32 nt, Homo Sapiens
ggagggaacacuuugcccaagauuacucacaa

SEQ ID NO: 39121 - RNA, 32 nt, Homo Sapiens
gccuucgcgggccaccggcgccaugggccagu

SEQ ID NO: 39122 - RNA, 32 nt, Homo Sapiens
acgcggcccgccucggucaccgcggccaggcc

SEQ ID NO: 39123 - RNA, 29 nt, Homo Sapiens
uacaagauagugauucuuggaaguuggua

SEQ ID NO: 39124 - RNA, 32 nt, Homo Sapiens
aagcagaagucuuuuucguugugugucuaucu

SEQ ID NO: 39125 - RNA, 32 nt, Homo Sapiens
ugaugaugucauuacuucuauaaccuuaagug

SEQ ID NO: 39126 - RNA, 32 nt, Homo Sapiens
cgaggccgcuccccggcgggcuggcuccuggc

SEQ ID NO: 39127 - RNA, 32 nt, Homo Sapiens
gggugcggugacucacgccuauaaucccagca

SEQ ID NO: 39128 - RNA, 32 nt, Homo Sapiens
uuugugucuuaacgugagagcaaaaugcaugu

SEQ ID NO: 39129 - RNA, 32 nt, Homo Sapiens
ugagguacaauugaggcugaugagauacugag

SEQ ID NO: 39130 - RNA, 32 nt, Homo Sapiens
aagcagauguccuccuuccccuggacaucucc

SEQ ID NO: 39131 - RNA, 32 nt, Homo Sapiens
guaauauccauggacauguaauccacuuacuc

SEQ ID NO: 39132 - RNA, 32 nt, Homo Sapiens
uuucaagagucauacugugagaugcaauguua

SEQ ID NO: 39133 - RNA, 32 nt, Homo Sapiens
auaucugagcucuuugcacuaccuguuaucag

SEQ ID NO: 39134 - RNA, 32 nt, Homo Sapiens
ccaagagguacuuuucuuuuuagaaaaucacc

SEQ ID NO: 39135 - RNA, 32 nt, Homo Sapiens
uacuguuacccauaaaacuaucucuuuaaaaa

SEQ ID NO: 39136 - RNA, 32 nt, Homo Sapiens
ugggugcacggccgggcaccacagugggacuc

SEQ ID NO: 39137 - RNA, 32 nt, Homo Sapiens
cggcagagccgcaggcgcuaggccgcccgaca

SEQ ID NO: 39138 - RNA, 32 nt, Homo Sapiens
agccgccgcgcggaccccggggcgccccuccc

SEQ ID NO: 39139 - RNA, 32 nt, Homo Sapiens
gcccuuaggauaaugacaaaacuuuuuaacac

SEQ ID NO: 39140 - RNA, 32 nt, Homo Sapiens
ggaguuuggagcucguuggagcuaucguuucc

SEQ ID NO: 39141 - RNA, 32 nt, Homo Sapiens
uguggggcggucccggccccgcagauccucgu

SEQ ID NO: 39142 - RNA, 32 nt, Homo Sapiens
guugccgugucuguguagaaagagguagacgu

SEQ ID NO: 39143 - RNA, 32 nt, Homo Sapiens
gucacucaguaccgccugcagugucgccauga

SEQ ID NO: 39144 - RNA, 32 nt, Homo Sapiens
gaggaccgagagauccgaaagcuggagcguug

SEQ ID NO: 39145 - RNA, 32 nt, Homo Sapiens
ucguuuucgacacagcagccagaaggauccuu

SEQ ID NO: 39146 - RNA, 32 nt, Homo Sapiens
aagcugucuugaauuagagauaccucacguaa

SEQ ID NO: 39147 - RNA, 30 nt, Homo Sapiens
acuauacauggugcugugcaaaauaguaag

SEQ ID NO: 39148 - RNA, 32 nt, Homo Sapiens
aggaggcacuuaggggagacucggauggggac

SEQ ID NO: 39149 - RNA, 32 nt, Homo Sapiens
gggccgcugcccgcccugggccggcacauugu

SEQ ID NO: 39150 - RNA, 32 nt, Homo Sapiens
aauuaaacagcaugcauugaacugaagauaac

SEQ ID NO: 39151 - RNA, 32 nt, Homo Sapiens
cucucuauuggguuuaucaucaucaacaagac

SEQ ID NO: 39152 - RNA, 32 nt, Homo Sapiens
aucagaccuuuuaaugaauuuucauggaugcu

SEQ ID NO: 39153 - RNA, 32 nt, Homo Sapiens
agcuacaaagguaauauuguauuaaaaucaug

SEQ ID NO: 39154 - RNA, 32 nt, Homo Sapiens
cuccaaagccccaccuuuaaguccucucuucu

SEQ ID NO: 39155 - RNA, 32 nt, Homo Sapiens
ugaaucaucauuguauuaaaccacucauccuu

SEQ ID NO: 39156 - RNA, 32 nt, Homo Sapiens
uuugcuaaccaaagagcauauauuuuacuguc

SEQ ID NO: 39157 - RNA, 31 nt, Homo Sapiens
cccugcagcccccagaacccggacuggaggg

SEQ ID NO: 39158 - RNA, 32 nt, Homo Sapiens
acccuuugggucuccaggauccucauggaagg

SEQ ID NO: 39159 - RNA, 32 nt, Homo Sapiens
guuuacucaacguuuuuccccagcugccucag

SEQ ID NO: 39160 - RNA, 32 nt, Homo Sapiens
cucacugcauccuccgccuuccagguuuaagc

SEQ ID NO: 39161 - RNA, 32 nt, Homo Sapiens
cccuggccccccguauccccagcccuuggcaa

SEQ ID NO: 39162 - RNA, 32 nt, Homo Sapiens
ggucaucgacagagaacgggucagcucagcag

SEQ ID NO: 39163 - RNA, 32 nt, Homo Sapiens
cagucaccugaggucaggucugcacaacacua

SEQ ID NO: 39164 - RNA, 31 nt, Homo Sapiens
caggaagucaaugauuucugugauugauaua

SEQ ID NO: 39165 - RNA, 32 nt, Homo Sapiens
aaaaaguggacucaauuuuguuuaccuuucug

SEQ ID NO: 39166 - RNA, 32 nt, Homo Sapiens
ucggaucaauuuccaaaugcuuuacuuuuuca

SEQ ID NO: 39167 - RNA, 32 nt, Homo Sapiens
cugggguucggggcccgggacgccgccgggag

SEQ ID NO: 39168 - RNA, 32 nt, Homo Sapiens
aggaaugucacacacgaugaaauaucucugcu

SEQ ID NO: 39169 - RNA, 31 nt, Homo Sapiens
cggggaacgcgcugccugcaugcgcgcagcu

SEQ ID NO: 39170 - RNA, 32 nt, Homo Sapiens
cuauaguguucacaguagaacuagucugaacc

SEQ ID NO: 39171 - RNA, 32 nt, Homo Sapiens
ugaugcugccgcggcugccgcgccgcccuccg

SEQ ID NO: 39172 - RNA, 32 nt, Homo Sapiens
ggaucguguggcaguggugcugccccgagugc

SEQ ID NO: 39173 - RNA, 32 nt, Homo Sapiens
caguuugccagugguuccucacuacacuggua

SEQ ID NO: 39174 - RNA, 32 nt, Homo Sapiens
ucccuucccuucuccuuucccuggaaaaauac

SEQ ID NO: 39175 - RNA, 32 nt, Homo Sapiens
acccuccccuccccaccucccccacugcgcgu

SEQ ID NO: 39176 - RNA, 32 nt, Homo Sapiens
auauauaaaagcuuagauuguagcuguucuaa

SEQ ID NO: 39177 - RNA, 32 nt, Homo Sapiens
aaucugccgucuccuggaaacgcuggggcugc

SEQ ID NO: 39178 - RNA, 32 nt, Homo Sapiens
ugauacaguugcauguuauauuauuacuaauu

SEQ ID NO: 39179 - RNA, 32 nt, Homo Sapiens
aaugggcugaagauguuauccuucauuguggu

SEQ ID NO: 39180 - RNA, 31 nt, Homo Sapiens
cuuuuuuccacauaaggaaacuggguuccug

SEQ ID NO: 39181 - RNA, 32 nt, Homo Sapiens
augguaugcccggaugcccccgcgagccccag

SEQ ID NO: 39182 - RNA, 30 nt, Homo Sapiens
ggcuuuggcuuuggcggcggcgguggagaa

SEQ ID NO: 39183 - RNA, 32 nt, Homo Sapiens
ccagcuuccaucccuucuccagcccuuggggc

SEQ ID NO: 39184 - RNA, 32 nt, Homo Sapiens
gcagcucccggcacugcccccgacgaacggaa

SEQ ID NO: 39185 - RNA, 32 nt, Homo Sapiens
uauuuucaccuuaaaaaaaaugcugaaaauac

SEQ ID NO: 39186 - RNA, 32 nt, Homo Sapiens
aguuggcaccagucaguggucuccaggaugga

SEQ ID NO: 39187 - RNA, 32 nt, Homo Sapiens
agccugcgaggagcgcgccgcccgccagcucc

SEQ ID NO: 39188 - RNA, 32 nt, Homo Sapiens
gagccauucuuccuccaacucuauccuuuucu

SEQ ID NO: 39189 - RNA, 32 nt, Homo Sapiens
ugaauuauuucugaaauuuucuauuuaacauu

SEQ ID NO: 39190 - RNA, 30 nt, Homo Sapiens
gacguuuggguugauggcggcaguaggagg

SEQ ID NO: 39191 - RNA, 32 nt, Homo Sapiens
ucaccgcucgcaccccagccgcccggcccgcg

SEQ ID NO: 39192 - RNA, 32 nt, Homo Sapiens
agacugacuugaaauucauaaacaaguugucc

SEQ ID NO: 39193 - RNA, 32 nt, Homo Sapiens
ggagcagccucuuccggggccucgauuaacca

SEQ ID NO: 39194 - RNA, 32 nt, Homo Sapiens
uuuugggggcuccagggaccaaucuggggcug

SEQ ID NO: 39195 - RNA, 32 nt, Homo Sapiens
uuaucaaaguuccuuaaauguguuaguuuaga

SEQ ID NO: 39196 - RNA, 32 nt, Homo Sapiens
uggauuuauauguuacuggcaguuggaaaugc

SEQ ID NO: 39197 - RNA, 32 nt, Homo Sapiens
cagcaugcccuucucccccacuuccuuacuuu

SEQ ID NO: 39198 - RNA, 32 nt, Homo Sapiens
cugcuccucuaccugcuccacccucaauccac

SEQ ID NO: 39199 - RNA, 32 nt, Homo Sapiens
aaccacuauguacuuuuuuauaaauacuguau

SEQ ID NO: 39200 - RNA, 32 nt, Homo Sapiens
guaccaguggagagggagcaaaaaggaaaaua

SEQ ID NO: 39201 - RNA, 32 nt, Homo Sapiens
auaauauugugucauagaauuaauuuucagcc

SEQ ID NO: 39202 - RNA, 32 nt, Homo Sapiens
cccggagccgcggaacucggcggccgccaugg

SEQ ID NO: 39203 - RNA, 32 nt, Homo Sapiens
guuuguggagggcuuguacauugugagagcau

SEQ ID NO: 39204 - RNA, 32 nt, Homo Sapiens
aagcgagagaauaaaguucccuguagguccuc

SEQ ID NO: 39205 - RNA, 32 nt, Homo Sapiens
gggcuggccccggaagcccccacgggcucuac

SEQ ID NO: 39206 - RNA, 32 nt, Homo Sapiens
cagaaagacagcagagucuguuuucuagcccc

SEQ ID NO: 39207 - RNA, 32 nt, Homo Sapiens
uaggcgcucagaggccgcucugggggguugcc

SEQ ID NO: 39208 - RNA, 32 nt, Homo Sapiens
aaaguuuaaaauuaaaaagugauuaucaaaga

SEQ ID NO: 39209 - RNA, 32 nt, Homo Sapiens
uaaucgaaggauuaaacuaaagaaaaaacuaa

SEQ ID NO: 39210 - RNA, 31 nt, Homo Sapiens
ucucccucuuggagaaagacuugaagaaugu

SEQ ID NO: 39211 - RNA, 32 nt, Homo Sapiens
gaucugucagaacaggcagcuguugagcucgg

SEQ ID NO: 39212 - RNA, 32 nt, Homo Sapiens
caggaagcuagagcacgagaauuaugugcauc

SEQ ID NO: 39213 - RNA, 31 nt, Homo Sapiens
ucagagcaccgcagccagggagaugcuggcg

SEQ ID NO: 39214 - RNA, 32 nt, Homo Sapiens
uggaccuggaccuggaccuggaccuacagcgg

SEQ ID NO: 39215 - RNA, 32 nt, Homo Sapiens
cgcaaggcugguuccuguuuucugggcuuuga

SEQ ID NO: 39216 - RNA, 30 nt, Homo Sapiens
gcucgaggagguggcgcgauggagggacug

SEQ ID NO: 39217 - RNA, 32 nt, Homo Sapiens
aucuucagaacagguucuccuuccccagucac

SEQ ID NO: 39218 - RNA, 32 nt, Homo Sapiens
agccuggaggggcugggcagugugcuggccgg

SEQ ID NO: 39219 - RNA, 32 nt, Homo Sapiens
cagcaguaaaauguauggcauuaagaaauaga

SEQ ID NO: 39220 - RNA, 32 nt, Homo Sapiens
gccuuguuaugaagcaaugugugaauggacaa

SEQ ID NO: 39221 - RNA, 32 nt, Homo Sapiens
ucagaaaaacaaugucagaaaauaacagcgug

SEQ ID NO: 39222 - RNA, 32 nt, Homo Sapiens
uugccuacagaaaauuaaaaggcaaaacaaua

SEQ ID NO: 39223 - RNA, 32 nt, Homo Sapiens
cugagugggcaccggcugccucaugguucuca

SEQ ID NO: 39224 - RNA, 32 nt, Homo Sapiens
ccgccgccgcaccagcagcagcaacagcagca

SEQ ID NO: 39225 - RNA, 32 nt, Homo Sapiens
uuuucuuagcacuucugacaugcuucugucuu

SEQ ID NO: 39226 - RNA, 32 nt, Homo Sapiens
uuaugcucuguaaaacaaagaauuguauucau

SEQ ID NO: 39227 - RNA, 32 nt, Homo Sapiens
aacccauggaaguuguuucuuacuucuuuucu

SEQ ID NO: 39228 - RNA, 32 nt, Homo Sapiens
accugcuuccccagcccugacuugguucucca

SEQ ID NO: 39229 - RNA, 27 nt, Homo Sapiens
aagccacaguccuucagccuccaauug

SEQ ID NO: 39230 - RNA, 32 nt, Homo Sapiens
ucucccuaggaugccaaaguggcauuaugucu

SEQ ID NO: 39231 - RNA, 32 nt, Homo Sapiens
gauccgcggccgcggagaagcugcugccggug

SEQ ID NO: 39232 - RNA, 32 nt, Homo Sapiens
cagauaugucauuuucauuaguuguaucauug

SEQ ID NO: 39233 - RNA, 32 nt, Homo Sapiens
ucuggcccggcgugggggcagggcauugagcc

SEQ ID NO: 39234 - RNA, 32 nt, Homo Sapiens
guuuuggagagaaagacaaguuaugaguagcu

SEQ ID NO: 39235 - RNA, 32 nt, Homo Sapiens
uuugauuguaaguugcugauggacagugauca

SEQ ID NO: 39236 - RNA, 32 nt, Homo Sapiens
ccuguagaccaucaauucuacacccuaauuac

SEQ ID NO: 39237 - RNA, 32 nt, Homo Sapiens
gcagacaggaucucccuguuuccuaggcuggu

SEQ ID NO: 39238 - RNA, 32 nt, Homo Sapiens
uuucauccccucugcccuuccccugaaacggu

SEQ ID NO: 39239 - RNA, 32 nt, Homo Sapiens
cugaaaggcagacgugcuccucagacaucaga

SEQ ID NO: 39240 - RNA, 32 nt, Homo Sapiens
auauuaccaaaaugaaugaauaaaugaaugaa

SEQ ID NO: 39241 - RNA, 32 nt, Homo Sapiens
uuggcaguuaauuugcagaaguaacugacagc

SEQ ID NO: 39242 - RNA, 32 nt, Homo Sapiens
accucuucccguuaaugaccacagcagacaga

SEQ ID NO: 39243 - RNA, 32 nt, Homo Sapiens
cuuacuaaauuaaguucugacuugcucacucu

SEQ ID NO: 39244 - RNA, 32 nt, Homo Sapiens
gccugagguuugauuuaauuuuggaugagauc

SEQ ID NO: 39245 - RNA, 32 nt, Homo Sapiens
ccagugcacuggcuacaguguauugagaggcc

SEQ ID NO: 39246 - RNA, 32 nt, Homo Sapiens
ugccucugguaccaccuugggacuaaguguau

SEQ ID NO: 39247 - RNA, 32 nt, Homo Sapiens
cuuauccuauuauacuguaauauuucuggugg

SEQ ID NO: 39248 - RNA, 32 nt, Homo Sapiens
uggucucugugcuauaguggaaucuuugguuu

SEQ ID NO: 39249 - RNA, 32 nt, Homo Sapiens
ccucaccaguugcauguucuaguccuugccag

SEQ ID NO: 39250 - RNA, 32 nt, Homo Sapiens
ggucgcggagagcugggcaguguuggccgcug

SEQ ID NO: 39251 - RNA, 32 nt, Homo Sapiens
aagcuggaggaccgcgaccugggcugggagca

SEQ ID NO: 39252 - RNA, 32 nt, Homo Sapiens
uuaaacacagagcuauaaaaugcuggauugaa

SEQ ID NO: 39253 - RNA, 32 nt, Homo Sapiens
gccgcgcuuccgccagcgccgcagcggggaau

SEQ ID NO: 39254 - RNA, 32 nt, Homo Sapiens
aaaauuucuagauggucucaugaguuucaaaa

SEQ ID NO: 39255 - RNA, 32 nt, Homo Sapiens
gguaugugaggaagaaaccuggaagaggaaga

SEQ ID NO: 39256 - RNA, 32 nt, Homo Sapiens
ccguggguguugccaggaggcucuuugggaag

SEQ ID NO: 39257 - RNA, 32 nt, Homo Sapiens
uuggcaaagaaaugcagaaugcuuaaggcuga

SEQ ID NO: 39258 - RNA, 32 nt, Homo Sapiens
cccgcccuccgcccggcccggagcuuaucucc

SEQ ID NO: 39259 - RNA, 32 nt, Homo Sapiens
ccggcacuuucauacccugaccucugaccuca

SEQ ID NO: 39260 - RNA, 32 nt, Homo Sapiens
aguuagcuuuugcuguguaacaaaccaucccc

SEQ ID NO: 39261 - RNA, 32 nt, Homo Sapiens
uaaugccuaccuugugaggguugcuucaauga

SEQ ID NO: 39262 - RNA, 32 nt, Homo Sapiens
acagagcacaaaugcaguauauaggugcugga

SEQ ID NO: 39263 - RNA, 32 nt, Homo Sapiens
ggaggagggaucuggccuccucauggcgcugc

SEQ ID NO: 39264 - RNA, 32 nt, Homo Sapiens
cgccccccagcaugcgcaccucguacaccgug

SEQ ID NO: 39265 - RNA, 32 nt, Homo Sapiens
auuagguugugaauugcaccuccagcuuugaa

SEQ ID NO: 39266 - RNA, 29 nt, Homo Sapiens
uuacaggugugagcuaccaugcccagcca

SEQ ID NO: 39267 - RNA, 32 nt, Homo Sapiens
cauuuugaagaugaaauugagccuuggagacu

SEQ ID NO: 39268 - RNA, 32 nt, Homo Sapiens
ccuauguguagauaguauacuuuuaaguguac

SEQ ID NO: 39269 - RNA, 30 nt, Homo Sapiens
gggcgauggagcagccugaggacauggcgu

SEQ ID NO: 39270 - RNA, 32 nt, Homo Sapiens
ggggcccugcucuucuggcccgucucccggac

SEQ ID NO: 39271 - RNA, 32 nt, Homo Sapiens
ggcacaacuucagaacuaauaguaucacuuug

SEQ ID NO: 39272 - RNA, 32 nt, Homo Sapiens
acugccuccccucccccucacgccuggcaucc

SEQ ID NO: 39273 - RNA, 32 nt, Homo Sapiens
uuuaaccaacaucaacaaaauaaaaacccaaa

SEQ ID NO: 39274 - RNA, 32 nt, Homo Sapiens
cugugucuagcuaaaguuuguaaacguaccaa

SEQ ID NO: 39275 - RNA, 32 nt, Homo Sapiens
ucaagcuuaucuggauauuucuuucuuuauuu

SEQ ID NO: 39276 - RNA, 32 nt, Homo Sapiens
ugcaggucgccgggaaaacccggagcggagca

SEQ ID NO: 39277 - RNA, 32 nt, Homo Sapiens
ugaguaauugugguuuccacauuugaaaacaa

SEQ ID NO: 39278 - RNA, 32 nt, Homo Sapiens
uaaauagauuuaauguauuuaacaugcuuuau

SEQ ID NO: 39279 - RNA, 32 nt, Homo Sapiens
accucaucugguuucaaucaacuuuuuuguuc

SEQ ID NO: 39280 - RNA, 32 nt, Homo Sapiens
ucuaaugucauucacuucauuugaugggguca

SEQ ID NO: 39281 - RNA, 31 nt, Homo Sapiens
cacucagcgccucgccugccccugccuuggc

SEQ ID NO: 39282 - RNA, 32 nt, Homo Sapiens
agauugaagaacagaagacuuuagacaaagca

SEQ ID NO: 39283 - RNA, 32 nt, Homo Sapiens
agggacucuggggucaugucuugcucugagag

SEQ ID NO: 39284 - RNA, 32 nt, Homo Sapiens
ggcggcggcuuugggcucaggcggcggcggcu

SEQ ID NO: 39285 - RNA, 32 nt, Homo Sapiens
aaagcucauuucgaacuguugaggagagaaau

SEQ ID NO: 39286 - RNA, 32 nt, Homo Sapiens
uaggaggguauucugggccuucugcccaggca

SEQ ID NO: 39287 - RNA, 32 nt, Homo Sapiens
aaugugaagagcucucggcugugcagugguac

SEQ ID NO: 39288 - RNA, 32 nt, Homo Sapiens
ggcucagaagaauuuaaguucuauucagcuuu

SEQ ID NO: 39289 - RNA, 32 nt, Homo Sapiens
aaaggguccauuauuucauaagaguuacuuug

SEQ ID NO: 39290 - RNA, 32 nt, Homo Sapiens
aguggaguaggggggacgcggcggcggcguug

SEQ ID NO: 39291 - RNA, 32 nt, Homo Sapiens
ugggccgaggaguuaagaaagagcagccugac

SEQ ID NO: 39292 - RNA, 32 nt, Homo Sapiens
ugcugcuccucauagucgcugcgcucgggguc

SEQ ID NO: 39293 - RNA, 32 nt, Homo Sapiens
guaacagugugaucuuuaccgaugcacucaug

SEQ ID NO: 39294 - RNA, 32 nt, Homo Sapiens
cgggaggucgggcucccggcaguguccaggcu

SEQ ID NO: 39295 - RNA, 32 nt, Homo Sapiens
cagcggcuucgggugcaggagcaggagaugga

SEQ ID NO: 39296 - RNA, 32 nt, Homo Sapiens
aaauuguuaugaacuauaguauuuuagaugau

SEQ ID NO: 39297 - RNA, 32 nt, Homo Sapiens
gggaagagaagcucccgcgugugaacagcucc

SEQ ID NO: 39298 - RNA, 32 nt, Homo Sapiens
ugguugauccugauguacaugaugaugaaaga

SEQ ID NO: 39299 - RNA, 32 nt, Homo Sapiens
aacguauagaaugagccaaaaggcuacaucau

SEQ ID NO: 39300 - RNA, 32 nt, Homo Sapiens
uucaaggaaugggaggccuuucacugggucca

SEQ ID NO: 39301 - RNA, 32 nt, Homo Sapiens
cuaguuaaucugggauuagggucaggaaaaug

SEQ ID NO: 39302 - RNA, 32 nt, Homo Sapiens
cacagugaacacaacuaaccacauuaauucag

SEQ ID NO: 39303 - RNA, 32 nt, Homo Sapiens
cgugcugguguuggaggacccucccugcuuca

SEQ ID NO: 39304 - RNA, 32 nt, Homo Sapiens
ugcugaggauggcagagcugguguccauccag

SEQ ID NO: 39305 - RNA, 31 nt, Homo Sapiens
ccgcggcuccucugccugcgcccgcaguuug

SEQ ID NO: 39306 - RNA, 32 nt, Homo Sapiens
augcuuuuccaacccaugagugcuaagagccu

SEQ ID NO: 39307 - RNA, 32 nt, Homo Sapiens
gcagucuugccagcuuaccaguggacugagga

SEQ ID NO: 39308 - RNA, 32 nt, Homo Sapiens
gccgacuccagccccagcucaucccccaugau

SEQ ID NO: 39309 - RNA, 31 nt, Homo Sapiens
aaggacuauauaugugagcaagauuguguuu

SEQ ID NO: 39310 - RNA, 29 nt, Homo Sapiens
cuuauguaguuuguauauuuuuauagguu

SEQ ID NO: 39311 - RNA, 32 nt, Homo Sapiens
cccucucccuucccugcugccuugcagugacc

SEQ ID NO: 39312 - RNA, 32 nt, Homo Sapiens
uguuuuaaugaaaucuguauggauauggaaau

SEQ ID NO: 39313 - RNA, 32 nt, Homo Sapiens
auuuugcagauagaauuuggcccagagagguu

SEQ ID NO: 39314 - RNA, 32 nt, Homo Sapiens
cugaccuacagcucccugugaaugaaacuuug

SEQ ID NO: 39315 - RNA, 28 nt, Homo Sapiens
cuagugcuugggcacauuauaaaucagu

SEQ ID NO: 39316 - RNA, 32 nt, Homo Sapiens
gcccuagcugacuggggacuaguguucauaug

SEQ ID NO: 39317 - RNA, 32 nt, Homo Sapiens
gaauauagagcuuuaugggaaaaaaugcugua

SEQ ID NO: 39318 - RNA, 32 nt, Homo Sapiens
uguuugugugaucucagaacugugccaagcag

SEQ ID NO: 39319 - RNA, 32 nt, Homo Sapiens
acgaacaccacagaauguacuuugacgaccua

SEQ ID NO: 39320 - RNA, 32 nt, Homo Sapiens
uauaggcucccucaugcugucaggcuacauca

SEQ ID NO: 39321 - RNA, 32 nt, Homo Sapiens
uucauuuguaaauuauuauucauauagaccac

SEQ ID NO: 39322 - RNA, 32 nt, Homo Sapiens
aauuccacgaagaaaauccugauuccaagaug

SEQ ID NO: 39323 - RNA, 32 nt, Homo Sapiens
uaaucuaauuaaauuucauacaguuacugcag

SEQ ID NO: 39324 - RNA, 32 nt, Homo Sapiens
gcaaaugccuuaaguaaacaaacaagaaaugu

SEQ ID NO: 39325 - RNA, 32 nt, Homo Sapiens
cuggaggagugggggcggcugcguagcugugg

SEQ ID NO: 39326 - RNA, 32 nt, Homo Sapiens
ggcuguacugaauaccgcagaccauuguaauu

SEQ ID NO: 39327 - RNA, 32 nt, Homo Sapiens
aggacggcuggagauuacuucucuaacaggau

SEQ ID NO: 39328 - RNA, 32 nt, Homo Sapiens
uccaccgcgccgcgcgcauguccuuccgucag

SEQ ID NO: 39329 - RNA, 32 nt, Homo Sapiens
ugauucaucuuccaggcucuccuuccaucaag

SEQ ID NO: 39330 - RNA, 32 nt, Homo Sapiens
uccuagccgcgugauaagaacauaugcugucg

SEQ ID NO: 39331 - RNA, 32 nt, Homo Sapiens
cccgccggggcugcaaggaaaaggggaaacuc

SEQ ID NO: 39332 - RNA, 32 nt, Homo Sapiens
aacugaaguagcaaaaucaucuuuuucauucu

SEQ ID NO: 39333 - RNA, 32 nt, Homo Sapiens
cauaguaguaguguugcuuucuaagcuauaac

SEQ ID NO: 39334 - RNA, 32 nt, Homo Sapiens
ugccgcugcuucugcacagagcccgggcgagg

SEQ ID NO: 39335 - RNA, 32 nt, Homo Sapiens
ucacuguggacugaaugaaauauuuguauaga

SEQ ID NO: 39336 - RNA, 32 nt, Homo Sapiens
uacauugcauuuccucccuagcugcacggggc

SEQ ID NO: 39337 - RNA, 32 nt, Homo Sapiens
acucgucccuccccuccuggcucugcugucug

SEQ ID NO: 39338 - RNA, 32 nt, Homo Sapiens
auugugugcuucucuuguuucugugauugcuu

SEQ ID NO: 39339 - RNA, 32 nt, Homo Sapiens
acuuaauauaugaccaugacuuugaaaggcaa

SEQ ID NO: 39340 - RNA, 32 nt, Homo Sapiens
cgagccugacggagccggaggcugggagccgc

SEQ ID NO: 39341 - RNA, 32 nt, Homo Sapiens
ccugagagcggacaucuccucccgcaggccuu

SEQ ID NO: 39342 - RNA, 32 nt, Homo Sapiens
uucuuagaacugcucccauuucugggaacuaa

SEQ ID NO: 39343 - RNA, 32 nt, Homo Sapiens
aucccuccucuucacuagcaguguagaucauu

SEQ ID NO: 39344 - RNA, 32 nt, Homo Sapiens
ucagacuuuacucagucugaaaugcaauuaac

SEQ ID NO: 39345 - RNA, 32 nt, Homo Sapiens
uuccuuauguagccauuaagauuuauaugaau

SEQ ID NO: 39346 - RNA, 32 nt, Homo Sapiens
aacucuauuucuguucauauuaauucacuugc

SEQ ID NO: 39347 - RNA, 32 nt, Homo Sapiens
aggccgcacuggcccgccccagcucucagagg

SEQ ID NO: 39348 - RNA, 32 nt, Homo Sapiens
caagaacguggaugccaagaauccacaaaaaa

SEQ ID NO: 39349 - RNA, 32 nt, Homo Sapiens
cuaggcaggcaaacagaagggaaguggaguua

SEQ ID NO: 39350 - RNA, 32 nt, Homo Sapiens
gggaggguuauuugcuuuuuuaucuuccuggc

SEQ ID NO: 39351 - RNA, 30 nt, Homo Sapiens
gcccaaggagguggaguggagagugggcuc

SEQ ID NO: 39352 - RNA, 32 nt, Homo Sapiens
aauguaaguauuuuaaauagaaucauaugacu

SEQ ID NO: 39353 - RNA, 32 nt, Homo Sapiens
ucgcucagaaaagacucagugagaaugcauuu

SEQ ID NO: 39354 - RNA, 32 nt, Homo Sapiens
ggcgagccuugccgccgcccagccccuccuug

SEQ ID NO: 39355 - RNA, 32 nt, Homo Sapiens
ugauguccauuuuauuuuuucauuuaguugcu

SEQ ID NO: 39356 - RNA, 32 nt, Homo Sapiens
guccuggcguccccauccuccaaagggccuag

SEQ ID NO: 39357 - RNA, 32 nt, Homo Sapiens
aggguuaaugaaauaauguacaucuggccuug

SEQ ID NO: 39358 - RNA, 32 nt, Homo Sapiens
uccagcaccuucccucucaccaucccacugcc

SEQ ID NO: 39359 - RNA, 32 nt, Homo Sapiens
uucgaguucagcaauaaaguuggggaggcagu

SEQ ID NO: 39360 - RNA, 30 nt, Homo Sapiens
guagagagaagcuccacaaguguuaaaaug

SEQ ID NO: 39361 - RNA, 31 nt, Homo Sapiens
aauuuccggcgcagcccagcccaguccggcg

SEQ ID NO: 39362 - RNA, 32 nt, Homo Sapiens
cccuaggcuuggccuucuggaacucacuguuc

SEQ ID NO: 39363 - RNA, 32 nt, Homo Sapiens
gacuuaaacguaaaaccaaaaacuauaaaaac

SEQ ID NO: 39364 - RNA, 32 nt, Homo Sapiens
auaugcagaaaagugagaugggggaugggaga

SEQ ID NO: 39365 - RNA, 32 nt, Homo Sapiens
aaccacuucccucccaucuccucccugcuccu

SEQ ID NO: 39366 - RNA, 32 nt, Homo Sapiens
cacccccgccuggccuuagcucagggacaccc

SEQ ID NO: 39367 - RNA, 32 nt, Homo Sapiens
uaaugcuggaagaucuuaaggacuacauacau

SEQ ID NO: 39368 - RNA, 32 nt, Homo Sapiens
ucagaaaggagaagggcugugaucuccggucc

SEQ ID NO: 39369 - RNA, 32 nt, Homo Sapiens
acugcgacucgagacagcggcccggcaggaca

SEQ ID NO: 39370 - RNA, 32 nt, Homo Sapiens
gucaggagagaaugggggaggaggcggucagg

SEQ ID NO: 39371 - RNA, 32 nt, Homo Sapiens
gauuuguuuuuggcaaaauuuuagucuaaaca

SEQ ID NO: 39372 - RNA, 32 nt, Homo Sapiens
cuuuugggcugagacuaugggguuuucuagau

SEQ ID NO: 39373 - RNA, 32 nt, Homo Sapiens
caccuucccccggccuggccccauuggcccac

SEQ ID NO: 39374 - RNA, 32 nt, Homo Sapiens
uucuggcugguuugugcugguuuaacgacauc

SEQ ID NO: 39375 - RNA, 32 nt, Homo Sapiens
cuaacagugacuuaaauaaguaguuauuuucu

SEQ ID NO: 39376 - RNA, 32 nt, Homo Sapiens
cagagcgucaugcaggucuucuggccagagcc

SEQ ID NO: 39377 - RNA, 32 nt, Homo Sapiens
gccaggccaagagccgaaggcgggggaggaag

SEQ ID NO: 39378 - RNA, 32 nt, Homo Sapiens
uugaaaggugugauuucuccaauuuacccucu

SEQ ID NO: 39379 - RNA, 32 nt, Homo Sapiens
cgguggcucaugccuguaaucccggcacuuug

SEQ ID NO: 39380 - RNA, 32 nt, Homo Sapiens
gaaggcaccauguggauggguguucaacuucu

SEQ ID NO: 39381 - RNA, 32 nt, Homo Sapiens
ugaggucaagagcccagccaucuuucacugac

SEQ ID NO: 39382 - RNA, 32 nt, Homo Sapiens
gccacguggagguggugaagcugcuggugggg

SEQ ID NO: 39383 - RNA, 32 nt, Homo Sapiens
ggauucucguagcugugccgggacuuaaccac

SEQ ID NO: 39384 - RNA, 32 nt, Homo Sapiens
ggccggagggacugcuggcccggccucccuuc

SEQ ID NO: 39385 - RNA, 32 nt, Homo Sapiens
agggaagguaaaccucuccguggaagagccag

SEQ ID NO: 39386 - RNA, 32 nt, Homo Sapiens
uggcaaguucccacaagggccuucuccggaga

SEQ ID NO: 39387 - RNA, 32 nt, Homo Sapiens
uucagguggucuuuuuugugucuggcuugcug

SEQ ID NO: 39388 - RNA, 32 nt, Homo Sapiens
gcagcauagcaaacagauggauuugaagcuaa

SEQ ID NO: 39389 - RNA, 32 nt, Homo Sapiens
gcaagcgggcgaagguagaguacagagagaug

SEQ ID NO: 39390 - RNA, 32 nt, Homo Sapiens
uacauuuuaaacaaugcuucaguguagaaggu

SEQ ID NO: 39391 - RNA, 32 nt, Homo Sapiens
gaccuaagcuaauuauuuaaaauaaauacaug

SEQ ID NO: 39392 - RNA, 32 nt, Homo Sapiens
aauauauuuuuaggaaacucucgcaguccccg

SEQ ID NO: 39393 - RNA, 32 nt, Homo Sapiens
ggauauucccaauagacuuuagaaguauaugu

SEQ ID NO: 39394 - RNA, 32 nt, Homo Sapiens
accagggaagggggcgggauguuugaaaaugc

SEQ ID NO: 39395 - RNA, 32 nt, Homo Sapiens
cccaacagccucuggaggugaggcgggagcau

SEQ ID NO: 39396 - RNA, 32 nt, Homo Sapiens
cccacgcuucuccuuccaccuuccaugaucac

SEQ ID NO: 39397 - RNA, 32 nt, Homo Sapiens
ugaaggaaggauuuuacuuuguaauaaucucc

SEQ ID NO: 39398 - RNA, 32 nt, Homo Sapiens
ggaauguucugcuuggcucaucuugcccagag

SEQ ID NO: 39399 - RNA, 32 nt, Homo Sapiens
uaagcuccaugcccgugagcugcuacggggug

SEQ ID NO: 39400 - RNA, 32 nt, Homo Sapiens
ggcucccuggagcuccuccugcguguggucug

SEQ ID NO: 39401 - RNA, 32 nt, Homo Sapiens
ugcucccaggacacugaggccaagagaaaugu

SEQ ID NO: 39402 - RNA, 32 nt, Homo Sapiens
ucugaaaugggaguuccugagauacaacaaaa

SEQ ID NO: 39403 - RNA, 32 nt, Homo Sapiens
gggaagggagcaccagaugacacauaaaucug

SEQ ID NO: 39404 - RNA, 32 nt, Homo Sapiens
gucauggccuuggggcucucagcccuccuccu

SEQ ID NO: 39405 - RNA, 32 nt, Homo Sapiens
gaaagcaugguggugcccugggccgucccugu

SEQ ID NO: 39406 - RNA, 32 nt, Homo Sapiens
uuacccauuccuuuuccagggcuuccaguguc

SEQ ID NO: 39407 - RNA, 32 nt, Homo Sapiens
ggcuccuccgugaggcacagccgcccgggggu

SEQ ID NO: 39408 - RNA, 32 nt, Homo Sapiens
ggcucaccaaaaugugcucaauuuugugagag

SEQ ID NO: 39409 - RNA, 32 nt, Homo Sapiens
guacuacuuuguuauggcaacccuagcaaacu

SEQ ID NO: 39410 - RNA, 32 nt, Homo Sapiens
uuuuguuuuuauuuaacccuuucuucaauaca

SEQ ID NO: 39411 - RNA, 32 nt, Homo Sapiens
ccacuauaaaagacaagaggaagggcagguac

SEQ ID NO: 39412 - RNA, 32 nt, Homo Sapiens
ucuaguuucuuucaucucuggcauaagauuau

SEQ ID NO: 39413 - RNA, 32 nt, Homo Sapiens
ugcgcggcuguguggggugcucccugccagca

SEQ ID NO: 39414 - RNA, 32 nt, Homo Sapiens
gguggggaaggcaggcaugggguguggcccuc

SEQ ID NO: 39415 - RNA, 32 nt, Homo Sapiens
ccugacaggcugaggcggcugucguccccggc

SEQ ID NO: 39416 - RNA, 32 nt, Homo Sapiens
aacuaucagggcaaaaucucacuggauuucuc

SEQ ID NO: 39417 - RNA, 32 nt, Homo Sapiens
accagccagcagccuuuaauucuugggcggac

SEQ ID NO: 39418 - RNA, 32 nt, Homo Sapiens
caggaagaccaccugcuuuucugacacugucc

SEQ ID NO: 39419 - RNA, 32 nt, Homo Sapiens
ucugcuuuuuugcugguacgaucucucuuucu

SEQ ID NO: 39420 - RNA, 32 nt, Homo Sapiens
cguccuguccccagcccacgugcuccuugggu

SEQ ID NO: 39421 - RNA, 32 nt, Homo Sapiens
uaaccuccacagaugcugauagucuguagagu

SEQ ID NO: 39422 - RNA, 32 nt, Homo Sapiens
caagcuuccccccacaccaguguucaucaguc

SEQ ID NO: 39423 - RNA, 31 nt, Homo Sapiens
aagaggaugcuucaaacucaggcaagcacaa

SEQ ID NO: 39424 - RNA, 32 nt, Homo Sapiens
cuguuggaauaacccagaugucugcauccccu

SEQ ID NO: 39425 - RNA, 32 nt, Homo Sapiens
agcacgugcugcuccggcgcccgugcugcccu

SEQ ID NO: 39426 - RNA, 32 nt, Homo Sapiens
cuuucugauuaaaggguuuucuuucuuuuuua

SEQ ID NO: 39427 - RNA, 32 nt, Homo Sapiens
cgcugaggucccuccgacggcccugcagcucc

SEQ ID NO: 39428 - RNA, 32 nt, Homo Sapiens
cugugguagccaaaaaccauagguuagcuaaa

SEQ ID NO: 39429 - RNA, 32 nt, Homo Sapiens
uacucucaggacuuaaggacaugcuucuagaa

SEQ ID NO: 39430 - RNA, 32 nt, Homo Sapiens
ucucugcccaaguugcucuguauguguucguc

SEQ ID NO: 39431 - RNA, 32 nt, Homo Sapiens
cugccgcccugggccuggagacccaacuggcc

SEQ ID NO: 39432 - RNA, 32 nt, Homo Sapiens
cuccucuguccucaucauguuccagcucucua

SEQ ID NO: 39433 - RNA, 32 nt, Homo Sapiens
ucuaaugaacucccauguaucauuacccagca

SEQ ID NO: 39434 - RNA, 32 nt, Homo Sapiens
cugucgggguggggcugagcugccggggaggg

SEQ ID NO: 39435 - RNA, 32 nt, Homo Sapiens
cguguccaacuggcugugggcucuugaaaccc

SEQ ID NO: 39436 - RNA, 32 nt, Homo Sapiens
guuccuagguagucuacccuuaccuugaggaa

SEQ ID NO: 39437 - RNA, 32 nt, Homo Sapiens
ccacacugccacccagcuuccaaggcugaguc

SEQ ID NO: 39438 - RNA, 32 nt, Homo Sapiens
uuggaaaggggagaaaucagaggcuuuuacag

SEQ ID NO: 39439 - RNA, 32 nt, Homo Sapiens
uuuuguggggccugggcuucugugguuuaagg

SEQ ID NO: 39440 - RNA, 32 nt, Homo Sapiens
uucaguacuuuuuaaaugcuguguauugggug

SEQ ID NO: 39441 - RNA, 32 nt, Homo Sapiens
uggaggaggugaacaaggagcuguggcgccag

SEQ ID NO: 39442 - RNA, 32 nt, Homo Sapiens
uagagaaaauuugaaggucugacagaaacuuu

SEQ ID NO: 39443 - RNA, 32 nt, Homo Sapiens
uccaugcccucccaggacccuccacucacugc

SEQ ID NO: 39444 - RNA, 32 nt, Homo Sapiens
uuuuacauuguuaucuuuacucuucacaagaa

SEQ ID NO: 39445 - RNA, 32 nt, Homo Sapiens
uccgggaggcugcaguggcggcagcugagucu

SEQ ID NO: 39446 - RNA, 32 nt, Homo Sapiens
ccagacuggggcuaagucagccaggcaggcug

SEQ ID NO: 39447 - RNA, 32 nt, Homo Sapiens
acgccuucauaaugggggcggaggcgggagug

SEQ ID NO: 39448 - RNA, 32 nt, Homo Sapiens
ugcaacggaagccagaacauuccuccuggaaa

SEQ ID NO: 39449 - RNA, 32 nt, Homo Sapiens
cucugucaucucuggugacugaguguaaaaua

SEQ ID NO: 39450 - RNA, 32 nt, Homo Sapiens
gaucccuuuuaugcaccuagaauaugcuaugc

SEQ ID NO: 39451 - RNA, 32 nt, Homo Sapiens
auucacauuguuuggaaaaauucuuuuggaac

SEQ ID NO: 39452 - RNA, 32 nt, Homo Sapiens
cacacucugcuuccuuugaguuuuuuaauaaa

SEQ ID NO: 39453 - RNA, 32 nt, Homo Sapiens
gcccgagguccugugggaagugaggaucucag

SEQ ID NO: 39454 - RNA, 32 nt, Homo Sapiens
gcugggacgcgguggguguggagcagcauccc

SEQ ID NO: 39455 - RNA, 32 nt, Homo Sapiens
gcgccccguggagaagacccgggcggggcggg

SEQ ID NO: 39456 - RNA, 32 nt, Homo Sapiens
gcucccauuuccccuucuuccugauagacuug

SEQ ID NO: 39457 - RNA, 32 nt, Homo Sapiens
ucauuggauuguauaucauuguugcacaauca

SEQ ID NO: 39458 - RNA, 32 nt, Homo Sapiens
ccacccuucuugcuccuccacacugucagacc

SEQ ID NO: 39459 - RNA, 32 nt, Homo Sapiens
cuguugcaagguguucagauuguauaaacaua

SEQ ID NO: 39460 - RNA, 28 nt, Homo Sapiens
ucugaaagauaaagaaagugcuuuguau

SEQ ID NO: 39461 - RNA, 32 nt, Homo Sapiens
agguccucauuuccaaagucccaaugcucuga

SEQ ID NO: 39462 - RNA, 32 nt, Homo Sapiens
acgggacaggcccccauggucuucccgguggc

SEQ ID NO: 39463 - RNA, 32 nt, Homo Sapiens
aucucuaauaauaagucaguguuaaaauuuua

SEQ ID NO: 39464 - RNA, 32 nt, Homo Sapiens
cuggacugggcuguaaaaaucugugaacacug

SEQ ID NO: 39465 - RNA, 32 nt, Homo Sapiens
ggccgccuccuccugcggcccgcggggaaggg

SEQ ID NO: 39466 - RNA, 32 nt, Homo Sapiens
cuauagaauuauuugcacaaguacaaguaaau

SEQ ID NO: 39467 - RNA, 32 nt, Homo Sapiens
ugccaagccuacugcagccauggaugugccag

SEQ ID NO: 39468 - RNA, 32 nt, Homo Sapiens
uuuuugccugugcuuguaugcaugcauuuuca

SEQ ID NO: 39469 - RNA, 32 nt, Homo Sapiens
gaagccugcgugagccgaggcguugaggcgcg

SEQ ID NO: 39470 - RNA, 32 nt, Homo Sapiens
acugaucugguccaugaggcugcccagagaaa

SEQ ID NO: 39471 - RNA, 32 nt, Homo Sapiens
ccagggaauuugaaugauuguauuuugugucc

SEQ ID NO: 39472 - RNA, 32 nt, Homo Sapiens
gagggagaggggcggccgcgcggaucacugag

SEQ ID NO: 39473 - RNA, 32 nt, Homo Sapiens
auuccccccaccugacgcuggugcggggccca

SEQ ID NO: 39474 - RNA, 32 nt, Homo Sapiens
ugcucuucggucaugcacuuugggauacagcg

SEQ ID NO: 39475 - RNA, 32 nt, Homo Sapiens
agggacggauauuuuuaauugauuaguguuuu

SEQ ID NO: 39476 - RNA, 32 nt, Homo Sapiens
auuauguguauauauuguuugcagacauuauu

SEQ ID NO: 39477 - RNA, 32 nt, Homo Sapiens
gcugggaucccaugggggacugguagggcaca

SEQ ID NO: 39478 - RNA, 32 nt, Homo Sapiens
ccgccggguugacugcgcugccugggccggag

SEQ ID NO: 39479 - RNA, 32 nt, Homo Sapiens
cucugcugccacauacucuacuccuccugucc

SEQ ID NO: 39480 - RNA, 32 nt, Homo Sapiens
caucagugcugugaaggcaaccucaccaugua

SEQ ID NO: 39481 - RNA, 32 nt, Homo Sapiens
aggaccagcacucuucucccagcccuuagggu

SEQ ID NO: 39482 - RNA, 32 nt, Homo Sapiens
uuuuccaaagggucuucagaaauacugccuug

SEQ ID NO: 39483 - RNA, 32 nt, Homo Sapiens
ucaguuguaaagaagagggaauacaugauaaa

SEQ ID NO: 39484 - RNA, 32 nt, Homo Sapiens
uaaaguuccuacuccaacuccuccucugaagu

SEQ ID NO: 39485 - RNA, 32 nt, Homo Sapiens
uauagggggaggaggaggcagguggucuaagu

SEQ ID NO: 39486 - RNA, 32 nt, Homo Sapiens
ggcaccagugucuucuaugaugagauggaugc

SEQ ID NO: 39487 - RNA, 32 nt, Homo Sapiens
ggcucuggccucucacccccaaggcugucucu

SEQ ID NO: 39488 - RNA, 32 nt, Homo Sapiens
uuuauuuguaucgcauuuuuuauuacaaauga

SEQ ID NO: 39489 - RNA, 32 nt, Homo Sapiens
gaagaauguaaacuccaaauguuuacagcagg

SEQ ID NO: 39490 - RNA, 30 nt, Homo Sapiens
auaucucgcagccaggcggguccugggaga

SEQ ID NO: 39491 - RNA, 32 nt, Homo Sapiens
aggccuuuaaaaauacaguguauauuuuuugu

SEQ ID NO: 39492 - RNA, 32 nt, Homo Sapiens
cccgggcauguuccgagacuucggggaacccg

SEQ ID NO: 39493 - RNA, 32 nt, Homo Sapiens
ccgagccccgguuuucccaucagcaaggggag

SEQ ID NO: 39494 - RNA, 32 nt, Homo Sapiens
cucuccacuuguuccuugugugagcugagcag

SEQ ID NO: 39495 - RNA, 32 nt, Homo Sapiens
aaagguccaaaauggaguaggaaugggaagau

SEQ ID NO: 39496 - RNA, 32 nt, Homo Sapiens
ugggaaugacuucagguuauuuucacugcaca

SEQ ID NO: 39497 - RNA, 32 nt, Homo Sapiens
ugccuggaagagagggugcauugugaggcagg

SEQ ID NO: 39498 - RNA, 32 nt, Homo Sapiens
cagaacacagguguugugaaaacuaccccuaa

SEQ ID NO: 39499 - RNA, 32 nt, Homo Sapiens
caaccuacucugaaagccuucagacauuauga

SEQ ID NO: 39500 - RNA, 32 nt, Homo Sapiens
acagccugcuccauucuccagucugaacaguu

SEQ ID NO: 39501 - RNA, 32 nt, Homo Sapiens
uuugagacuaaauucaaucaccaccagguauc

SEQ ID NO: 39502 - RNA, 32 nt, Homo Sapiens
guuaccugcuccacugcagacuagagaaauaa

SEQ ID NO: 39503 - RNA, 32 nt, Homo Sapiens
agaaagaagauaaagaaaaaacauauuuaauu

SEQ ID NO: 39504 - RNA, 32 nt, Homo Sapiens
caucugauaaaacuuacagcccccuacaccaa

SEQ ID NO: 39505 - RNA, 32 nt, Homo Sapiens
ggagaacugcuguguucucacccuaacuugga

SEQ ID NO: 39506 - RNA, 32 nt, Homo Sapiens
uagagagcuucuuuuuguuucuaccuggccaa

SEQ ID NO: 39507 - RNA, 32 nt, Homo Sapiens
ucauccaucauuucccaagcagacgaaugccc

SEQ ID NO: 39508 - RNA, 32 nt, Homo Sapiens
cagcaagggagccgcaaaugucauuccuguga

SEQ ID NO: 39509 - RNA, 32 nt, Homo Sapiens
ugacuguaaucccagcacuuugggaggccaag

SEQ ID NO: 39510 - RNA, 32 nt, Homo Sapiens
ugaaaauguggacacauccccccgccuucucc

SEQ ID NO: 39511 - RNA, 32 nt, Homo Sapiens
gugcgucguucucugcagaccuggccgccccg

SEQ ID NO: 39512 - RNA, 32 nt, Homo Sapiens
ucacuggaacucagugugacuccucaggguug

SEQ ID NO: 39513 - RNA, 32 nt, Homo Sapiens
cagagucaggguggcuuuuccccugacugugu

SEQ ID NO: 39514 - RNA, 32 nt, Homo Sapiens
ggagcgcagucgcuccgcgauggacucgccgg

SEQ ID NO: 39515 - RNA, 32 nt, Homo Sapiens
cauuaaauauaauaaacuaauuuaagaaguga

SEQ ID NO: 39516 - RNA, 32 nt, Homo Sapiens
accaaagaggaagaggaagaacucacggguga

SEQ ID NO: 39517 - RNA, 32 nt, Homo Sapiens
uugcucuuguuuauugcuuuuacaaucauauu

SEQ ID NO: 39518 - RNA, 32 nt, Homo Sapiens
auggggcaggcagaaggaaagaugcaaugagc

SEQ ID NO: 39519 - RNA, 32 nt, Homo Sapiens
guuauuauuuuuugagacaggaucucaggcug

SEQ ID NO: 39520 - RNA, 32 nt, Homo Sapiens
gugggaccgcgggcccccggcgcagcgcugcc

SEQ ID NO: 39521 - RNA, 32 nt, Homo Sapiens
cuugcauucuuggcauaacagcaagaauaugc

SEQ ID NO: 39522 - RNA, 32 nt, Homo Sapiens
auagcaugaaaauaaaccugguggcuggaguc

SEQ ID NO: 39523 - RNA, 32 nt, Homo Sapiens
aaugggugcugggccugaguacucccgucgga

SEQ ID NO: 39524 - RNA, 32 nt, Homo Sapiens
gcugggcccgaacuccuggaccucaagugauc

SEQ ID NO: 39525 - RNA, 32 nt, Homo Sapiens
agugcuccguuugugccuugggcuugcuccug

SEQ ID NO: 39526 - RNA, 32 nt, Homo Sapiens
aaauaucugguucaauaacauaggggcaugga

SEQ ID NO: 39527 - RNA, 32 nt, Homo Sapiens
gcaggauauuccaagggcuuagagaugaaugc

SEQ ID NO: 39528 - RNA, 32 nt, Homo Sapiens
aaaaccuguucugguagcuccacaagagagau

SEQ ID NO: 39529 - RNA, 32 nt, Homo Sapiens
uugccgcagcugccucccuucucucggaaccc

SEQ ID NO: 39530 - RNA, 32 nt, Homo Sapiens
uuauuuuguuccauagucaaaaguauaauaaa

SEQ ID NO: 39531 - RNA, 32 nt, Homo Sapiens
gcacaguguuuaucuuaccccaugcaagacuc

SEQ ID NO: 39532 - RNA, 32 nt, Homo Sapiens
ucagugaaaaagauguacagaacacauuucuc

SEQ ID NO: 39533 - RNA, 32 nt, Homo Sapiens
cagcggguuugguugcagcggcggcggaggcc

SEQ ID NO: 39534 - RNA, 32 nt, Homo Sapiens
uuuguucuuuugcucuuugcaauaacucuugc

SEQ ID NO: 39535 - RNA, 32 nt, Homo Sapiens
ugauugagugcagaggagacuagacagucucc

SEQ ID NO: 39536 - RNA, 32 nt, Homo Sapiens
gucccgaaccccgagcacugggaugccuggcu

SEQ ID NO: 39537 - RNA, 32 nt, Homo Sapiens
ucugugcucccucugcccuccagaacucagug

SEQ ID NO: 39538 - RNA, 28 nt, Homo Sapiens
agugagaccagguaacauuugaggagaa

SEQ ID NO: 39539 - RNA, 32 nt, Homo Sapiens
uccuggguccuccuuucugagggcccguguaa

SEQ ID NO: 39540 - RNA, 32 nt, Homo Sapiens
ggccacugcuguccucuucagcucaagauggu

SEQ ID NO: 39541 - RNA, 32 nt, Homo Sapiens
cccaaaccaaaggggcccauugcuguugauaa

SEQ ID NO: 39542 - RNA, 31 nt, Homo Sapiens
gggcaggacgcagcucagccccgcgcgcgcc

SEQ ID NO: 39543 - RNA, 32 nt, Homo Sapiens
gcagcuugaagguuuaucuauacuguucaccu

SEQ ID NO: 39544 - RNA, 32 nt, Homo Sapiens
uuuggauuuucuaaauaaaaauauugaaugcu

SEQ ID NO: 39545 - RNA, 32 nt, Homo Sapiens
uuuuauguugagaguucuuucauuuauagaga

SEQ ID NO: 39546 - RNA, 32 nt, Homo Sapiens
ugaguucaccccagcccacccccgcacccacu

SEQ ID NO: 39547 - RNA, 32 nt, Homo Sapiens
aggcuaccauugcauuuuccugcucuuucauu

SEQ ID NO: 39548 - RNA, 32 nt, Homo Sapiens
uguaagaaagacugugcagaggaguguggcaa

SEQ ID NO: 39549 - RNA, 32 nt, Homo Sapiens
cucauaccauuuggauaaaugucgugguaucc

SEQ ID NO: 39550 - RNA, 32 nt, Homo Sapiens
uauaggguguuaugcucugaaugugucccccu

SEQ ID NO: 39551 - RNA, 32 nt, Homo Sapiens
gaaggggagagcggcccggccugggcggcggc

SEQ ID NO: 39552 - RNA, 32 nt, Homo Sapiens
gcgaguggggacggggcccccgcagccacggg

SEQ ID NO: 39553 - RNA, 32 nt, Homo Sapiens
cuuagcgggaacugagcagacccggcgcggag

SEQ ID NO: 39554 - RNA, 32 nt, Homo Sapiens
ucauagccuacuaugaaugaaccaucaucuuu

SEQ ID NO: 39555 - RNA, 32 nt, Homo Sapiens
caccuaccuucaccaucuguauauacaaagaa

SEQ ID NO: 39556 - RNA, 32 nt, Homo Sapiens
uguacugaucagaucaaggaccucccccaccc

SEQ ID NO: 39557 - RNA, 32 nt, Homo Sapiens
uugaaguuauuuaaaucauaauaucaugacug

SEQ ID NO: 39558 - RNA, 32 nt, Homo Sapiens
agaacuuucuucucuuuuuuucuaguaggugu

SEQ ID NO: 39559 - RNA, 32 nt, Homo Sapiens
uuuuuaaaaaauaauauaagcuacagaaacca

SEQ ID NO: 39560 - RNA, 32 nt, Homo Sapiens
auugaaaggggaaaugugucagagagaagcga

SEQ ID NO: 39561 - RNA, 32 nt, Homo Sapiens
ccccccaccaaaacaauuccuugcucaccuau

SEQ ID NO: 39562 - RNA, 27 nt, Homo Sapiens
gcauggcgggcaucgcggccaagcugg

SEQ ID NO: 39563 - RNA, 32 nt, Homo Sapiens
ucucggguucucucuuuuuuaaaugucgaaau

SEQ ID NO: 39564 - RNA, 32 nt, Homo Sapiens
caccugcucccucgguuucugagggucugucu

SEQ ID NO: 39565 - RNA, 32 nt, Homo Sapiens
auuacugaggccuaaaaguaaacauuacucau

SEQ ID NO: 39566 - RNA, 32 nt, Homo Sapiens
uauaucuuggcaauugugaauaaugcugcaac

SEQ ID NO: 39567 - RNA, 32 nt, Homo Sapiens
ggacaaugacuauugcaucuucauugcaaaag

SEQ ID NO: 39568 - RNA, 32 nt, Homo Sapiens
guaaaagguaauuguccugcuaaugcuguaca

SEQ ID NO: 39569 - RNA, 32 nt, Homo Sapiens
ccgacgguggccucagaagauguguccacguc

SEQ ID NO: 39570 - RNA, 32 nt, Homo Sapiens
agagguccccuggccuuggccacagcauaccu

SEQ ID NO: 39571 - RNA, 32 nt, Homo Sapiens
ccucugaggcgaggaguguucugaccuacaag

SEQ ID NO: 39572 - RNA, 32 nt, Homo Sapiens
uacaauggcauucaauaaagugcacguguuuc

SEQ ID NO: 39573 - RNA, 32 nt, Homo Sapiens
guuccaacuguacauacauacuguaugaagcu

SEQ ID NO: 39574 - RNA, 32 nt, Homo Sapiens
uggaggcugcgcggggcugaggcggccucgau

SEQ ID NO: 39575 - RNA, 32 nt, Homo Sapiens
uccaucauauaaauaagccuuaauaaccagug

SEQ ID NO: 39576 - RNA, 32 nt, Homo Sapiens
aagaaagccacgugcuggcccucugccuucuc

SEQ ID NO: 39577 - RNA, 32 nt, Homo Sapiens
ccccugcuccagccaaauugaucucccagucu

SEQ ID NO: 39578 - RNA, 32 nt, Homo Sapiens
ccagccaucuuuguggaaagggggcugcuagu

SEQ ID NO: 39579 - RNA, 32 nt, Homo Sapiens
ugcaaucuggguaguucuuucagaugccucau

SEQ ID NO: 39580 - RNA, 32 nt, Homo Sapiens
ucccuuucucccuucuccacuucacugguuaa

SEQ ID NO: 39581 - RNA, 32 nt, Homo Sapiens
ggagcugugguccagccugcgcggcgggaagc

SEQ ID NO: 39582 - RNA, 32 nt, Homo Sapiens
aacacauggugaaugcauacagcaaaugcugc

SEQ ID NO: 39583 - RNA, 32 nt, Homo Sapiens
uuuuaaacgcucuuggguuuuauguccgcugc

SEQ ID NO: 39584 - RNA, 32 nt, Homo Sapiens
uuucuaaaguacauuuaauguagaugaccuaa

SEQ ID NO: 39585 - RNA, 32 nt, Homo Sapiens
uugauaaaauuccaucuuacauucuguguauu

SEQ ID NO: 39586 - RNA, 32 nt, Homo Sapiens
aggaccaggugacggcagcaucggggacacag

SEQ ID NO: 39587 - RNA, 29 nt, Homo Sapiens
agggauggggcagcugugcuggcugccgc

SEQ ID NO: 39588 - RNA, 32 nt, Homo Sapiens
guacauacaaauacagagauauauaaaguaca

SEQ ID NO: 39589 - RNA, 32 nt, Homo Sapiens
cuuuaaguaaggauaaauuacucuaaaacaaa

SEQ ID NO: 39590 - RNA, 32 nt, Homo Sapiens
accaaaaguauuuuccucaguguaucucuucu

SEQ ID NO: 39591 - RNA, 32 nt, Homo Sapiens
gguuccuauaggucauuggccuguuccagagu

SEQ ID NO: 39592 - RNA, 32 nt, Homo Sapiens
aggagccgcgcgcgccgcaugcuggccggcuc

SEQ ID NO: 39593 - RNA, 32 nt, Homo Sapiens
uggguguugggggacaggggucacuucuacuu

SEQ ID NO: 39594 - RNA, 32 nt, Homo Sapiens
cuaauaaucuuguuucugaaaagaugguauca

SEQ ID NO: 39595 - RNA, 32 nt, Homo Sapiens
cucagaggaaggaacaggaaacaaagaaagga

SEQ ID NO: 39596 - RNA, 32 nt, Homo Sapiens
gaguuguguuguaggaauuagucagggaguug

SEQ ID NO: 39597 - RNA, 32 nt, Homo Sapiens
cuguuuuuaaaaaacuguuuggauuuuaauug

SEQ ID NO: 39598 - RNA, 32 nt, Homo Sapiens
gccucccucguggucugagaccauuuggcauu

SEQ ID NO: 39599 - RNA, 32 nt, Homo Sapiens
aagagagacaaaggcuggagccgaggacugac

SEQ ID NO: 39600 - RNA, 32 nt, Homo Sapiens
ggggcauugaguggcgcagagccggguuucau

SEQ ID NO: 39601 - RNA, 32 nt, Homo Sapiens
acgagggaaaagaaacaaagccacagacgcaa

SEQ ID NO: 39602 - RNA, 30 nt, Homo Sapiens
acaccuccacuugccucuuauugucuuauu

SEQ ID NO: 39603 - RNA, 32 nt, Homo Sapiens
aucacuacauauuguaugcauguaucaaaaua

SEQ ID NO: 39604 - RNA, 32 nt, Homo Sapiens
aaaugggaugcacuuuauuugcuggugcaaag

SEQ ID NO: 39605 - RNA, 32 nt, Homo Sapiens
cgggacccgugggcauggguccaggucuguaa

SEQ ID NO: 39606 - RNA, 32 nt, Homo Sapiens
agaaggaacuaagaagcaggacagaggcaacg

SEQ ID NO: 39607 - RNA, 32 nt, Homo Sapiens
ugggggugauccccagaggagauguacacaca

SEQ ID NO: 39608 - RNA, 32 nt, Homo Sapiens
ucuuccauggauuuugguggguuuugaacaua

SEQ ID NO: 39609 - RNA, 32 nt, Homo Sapiens
gacaaaaccuuuaaucugcaccuuacaacucg

SEQ ID NO: 39610 - RNA, 32 nt, Homo Sapiens
guuaggaggggguguuggggucgggguuuuga

SEQ ID NO: 39611 - RNA, 32 nt, Homo Sapiens
ugcucuauacagauaucuuaauaaaaauuuua

SEQ ID NO: 39612 - RNA, 32 nt, Homo Sapiens
cucaagcagucuacccaccucagccuccugug

SEQ ID NO: 39613 - RNA, 32 nt, Homo Sapiens
aguacuuuuuaaaucuuuacucucuaucuuga

SEQ ID NO: 39614 - RNA, 31 nt, Homo Sapiens
agaaagagaagagaacagguaauucgaucac

SEQ ID NO: 39615 - RNA, 32 nt, Homo Sapiens
agaugagcacgcgugccgaggcgcugggcggc

SEQ ID NO: 39616 - RNA, 32 nt, Homo Sapiens
cgcucgccaaccccgcagaaccaggacggaga

SEQ ID NO: 39617 - RNA, 32 nt, Homo Sapiens
gauaucuaugaaauaugguuguuuuuuaaaac

SEQ ID NO: 39618 - RNA, 32 nt, Homo Sapiens
gcacaguuuccacaguuuuauguguguuccag

SEQ ID NO: 39619 - RNA, 32 nt, Homo Sapiens
accuguagcuuauaaauuuacuuauuauucuu

SEQ ID NO: 39620 - RNA, 32 nt, Homo Sapiens
agaacaguucaaguugacuugggauauaucau

SEQ ID NO: 39621 - RNA, 32 nt, Homo Sapiens
cccguccgggaugugaggagcgucucugcccg

SEQ ID NO: 39622 - RNA, 32 nt, Homo Sapiens
uggagcaaaccuggggcugacacgcguaagcu

SEQ ID NO: 39623 - RNA, 32 nt, Homo Sapiens
uuaaugauuugcuuuugaaacuugaagucuug

SEQ ID NO: 39624 - RNA, 32 nt, Homo Sapiens
ucacagacuaaccuauaaaaugcugaauuuug

SEQ ID NO: 39625 - RNA, 32 nt, Homo Sapiens
ccgucggccucccaggcugucuucuccucauc

SEQ ID NO: 39626 - RNA, 32 nt, Homo Sapiens
caaauuuuaaguauuaugaaauacuaaaacua

SEQ ID NO: 39627 - RNA, 32 nt, Homo Sapiens
acagaaaaggcacagugccucuuccaggucga

SEQ ID NO: 39628 - RNA, 32 nt, Homo Sapiens
agucuauucaaaccucuugccuauuuuuaauu

SEQ ID NO: 39629 - RNA, 32 nt, Homo Sapiens
uucugcuaaaaauggucuuaguugucugaaaa

SEQ ID NO: 39630 - RNA, 32 nt, Homo Sapiens
gcucccagcugccggugugaccaagaugaccc

SEQ ID NO: 39631 - RNA, 32 nt, Homo Sapiens
uacaagugcugcaaguuagugaaacagcuguc

SEQ ID NO: 39632 - RNA, 32 nt, Homo Sapiens
aucacauggagcuauuccucuaucuuaaauaa

SEQ ID NO: 39633 - RNA, 32 nt, Homo Sapiens
uuagcucacuuuccaauaacagaaggaguugu

SEQ ID NO: 39634 - RNA, 32 nt, Homo Sapiens
ccugugagccccaggcacuuugcaucacaguc

SEQ ID NO: 39635 - RNA, 31 nt, Homo Sapiens
uguccccgcuacugccuggccccuugcugac

SEQ ID NO: 39636 - RNA, 31 nt, Homo Sapiens
gacauuucuuugugcuuuggcuuacuuguuu

SEQ ID NO: 39637 - RNA, 32 nt, Homo Sapiens
gguggucaaagcaguaaaggaguuuagagaua

SEQ ID NO: 39638 - RNA, 32 nt, Homo Sapiens
uuucacuguaguauuuaaauaucuguuacagg

SEQ ID NO: 39639 - RNA, 32 nt, Homo Sapiens
ucaugucugagcugauucuguuugcuccacgu

SEQ ID NO: 39640 - RNA, 27 nt, Homo Sapiens
gagugcugguucuucagucuuuguacu

SEQ ID NO: 39641 - RNA, 32 nt, Homo Sapiens
auuucuccugccucuggaagguggguggggcc

SEQ ID NO: 39642 - RNA, 32 nt, Homo Sapiens
ccaccaguccgcugcgccugcggcggggugug

SEQ ID NO: 39643 - RNA, 32 nt, Homo Sapiens
ccucucuuuucguuccucucccgccucagacc

SEQ ID NO: 39644 - RNA, 32 nt, Homo Sapiens
gccugccguuugccacucuccagcaucuggcc

SEQ ID NO: 39645 - RNA, 32 nt, Homo Sapiens
acagguacaaugaugggcacagcaaauggaca

SEQ ID NO: 39646 - RNA, 32 nt, Homo Sapiens
acaucuuggccauccuccucuagacaaaacca

SEQ ID NO: 39647 - RNA, 32 nt, Homo Sapiens
uugcaggugaggaaacaggggcagaguaauuc

SEQ ID NO: 39648 - RNA, 32 nt, Homo Sapiens
auguucagccaaaguugagaaccaucgagccu

SEQ ID NO: 39649 - RNA, 32 nt, Homo Sapiens
cuccccaaccaccaccuggucucccagcccug

SEQ ID NO: 39650 - RNA, 32 nt, Homo Sapiens
uauauacuggagagaaacuauaaagaaaauuc

SEQ ID NO: 39651 - RNA, 32 nt, Homo Sapiens
cucacuugacuuccagaacucuuaacgugaac

SEQ ID NO: 39652 - RNA, 32 nt, Homo Sapiens
augcugggggaagagaagggacuuuuccuugu

SEQ ID NO: 39653 - RNA, 32 nt, Homo Sapiens
uucaagugacugcagcagcagcggcagcgccu

SEQ ID NO: 39654 - RNA, 32 nt, Homo Sapiens
ugcuaccagagccgcaggaucccccaugagug

SEQ ID NO: 39655 - RNA, 32 nt, Homo Sapiens
ugggauguucuuccuggccuaaggucagcuga

SEQ ID NO: 39656 - RNA, 32 nt, Homo Sapiens
ccaacugcauuacccaaaccauauugcacuuu

SEQ ID NO: 39657 - RNA, 32 nt, Homo Sapiens
uucacauucuauuugcacagguucccuggcac

SEQ ID NO: 39658 - RNA, 32 nt, Homo Sapiens
aggggcggugcaagccccgcccggcccuaccc

SEQ ID NO: 39659 - RNA, 32 nt, Homo Sapiens
gccugggaaggggcccugugcuggccccgggu

SEQ ID NO: 39660 - RNA, 32 nt, Homo Sapiens
ucuuucaaguguuuuucuuuuaauagaauguu

SEQ ID NO: 39661 - RNA, 32 nt, Homo Sapiens
agcacugccccagacucgcuggcacucaguuc

SEQ ID NO: 39662 - RNA, 30 nt, Homo Sapiens
gcaggggcgcccggagcaggcgcgcauggc

SEQ ID NO: 39663 - RNA, 32 nt, Homo Sapiens
aggaagaaggcacucaccuacacugagcgaag

SEQ ID NO: 39664 - RNA, 32 nt, Homo Sapiens
aucccugcauuuccauucagggaaaagguggu

SEQ ID NO: 39665 - RNA, 32 nt, Homo Sapiens
ccaagggcguugugaauaaucuuacuaaucug

SEQ ID NO: 39666 - RNA, 32 nt, Homo Sapiens
uuuuguuuucuuuuuuaauguccaaaaguggg

SEQ ID NO: 39667 - RNA, 32 nt, Homo Sapiens
ucgcgauucgugccggccgguccugguucucc

SEQ ID NO: 39668 - RNA, 32 nt, Homo Sapiens
uucugugaacauuuuucaacaucaucuacaug

SEQ ID NO: 39669 - RNA, 32 nt, Homo Sapiens
gcgaagccaggaagcgcugcuucugcaagggg

SEQ ID NO: 39670 - RNA, 32 nt, Homo Sapiens
ccuagcuacuugggaggcugagguggaaagau

SEQ ID NO: 39671 - RNA, 32 nt, Homo Sapiens
ucagggaaugaaauccagguggaaauuauuua

SEQ ID NO: 39672 - RNA, 31 nt, Homo Sapiens
ucccaggagcccccagcuauccaaacaacua

SEQ ID NO: 39673 - RNA, 32 nt, Homo Sapiens
gaauuuaauguuucuuauauuuauguaaacuu

SEQ ID NO: 39674 - RNA, 32 nt, Homo Sapiens
auauccagcuuccuggacuguuguguagggaa

SEQ ID NO: 39675 - RNA, 31 nt, Homo Sapiens
aucuauucucuguuggcuccaagagcuaccc

SEQ ID NO: 39676 - RNA, 32 nt, Homo Sapiens
cugauagaggaugauguagauauuaaaugggg

SEQ ID NO: 39677 - RNA, 32 nt, Homo Sapiens
uauauuccuagaauuuaaguuacuuugugaga

SEQ ID NO: 39678 - RNA, 32 nt, Homo Sapiens
ucuccucugcaccccugcugcuucugcuuuga

SEQ ID NO: 39679 - RNA, 32 nt, Homo Sapiens
gcggcccagggugcgggucuggaccgccuccu

SEQ ID NO: 39680 - RNA, 32 nt, Homo Sapiens
gaagaccugggguggggguuucugcauccggg

SEQ ID NO: 39681 - RNA, 32 nt, Homo Sapiens
acaaguagcugagacuacaggcacacaccacc

SEQ ID NO: 39682 - RNA, 32 nt, Homo Sapiens
ugagagauucaaaaccaggaucuuuaauaauc

SEQ ID NO: 39683 - RNA, 32 nt, Homo Sapiens
ucucaaaacaaaaaacaaaaccacuuauauug

SEQ ID NO: 39684 - RNA, 32 nt, Homo Sapiens
cuuucugucaacuuauuuuuuaaauaaaauug

SEQ ID NO: 39685 - RNA, 32 nt, Homo Sapiens
agaacuugggguggcaacggguccugggauac

SEQ ID NO: 39686 - RNA, 32 nt, Homo Sapiens
guuuugaauguucaauacaauuuuauguaaag

SEQ ID NO: 39687 - RNA, 32 nt, Homo Sapiens
ucacuuaguuuuccuuuuuuuauuugaaaaaa

SEQ ID NO: 39688 - RNA, 32 nt, Homo Sapiens
cuccauccagucuugacuuuggcacuugugau

SEQ ID NO: 39689 - RNA, 32 nt, Homo Sapiens
aaaacaauauaauaaugacauguacagagcca

SEQ ID NO: 39690 - RNA, 32 nt, Homo Sapiens
aaggaguagugggggucucucaugcucuguug

SEQ ID NO: 39691 - RNA, 32 nt, Homo Sapiens
ugaauuuuuuguggucauaaucaaauacuuag

SEQ ID NO: 39692 - RNA, 32 nt, Homo Sapiens
ucucuaggccccagccccaaauccgccaccau

SEQ ID NO: 39693 - RNA, 32 nt, Homo Sapiens
ccggaagcccucgccgagcaauucuguauggc

SEQ ID NO: 39694 - RNA, 32 nt, Homo Sapiens
ugguggcuggagggccugggggcugugggaaa

SEQ ID NO: 39695 - RNA, 32 nt, Homo Sapiens
uauuuuuauuuuauuuuuuauuuuuugagacg

SEQ ID NO: 39696 - RNA, 32 nt, Homo Sapiens
auuauacauaaacgcuuuauuuuuuaugucau

SEQ ID NO: 39697 - RNA, 32 nt, Homo Sapiens
aauuuccacuuaaauuuuuuaaagcuuuaacu

SEQ ID NO: 39698 - RNA, 32 nt, Homo Sapiens
uaucacuuguuaaaagcagaaaacauguauca

SEQ ID NO: 39699 - RNA, 32 nt, Homo Sapiens
agccuggccucccaagaccgugcuugcccaau

SEQ ID NO: 39700 - RNA, 32 nt, Homo Sapiens
agggcgggaugucugccuccaguuccauacaa

SEQ ID NO: 39701 - RNA, 32 nt, Homo Sapiens
uguggguuucuguucagugagaacgcaacuca

SEQ ID NO: 39702 - RNA, 32 nt, Homo Sapiens
ucuaccccaucccuggauccacaggggcuauc

SEQ ID NO: 39703 - RNA, 32 nt, Homo Sapiens
uaaagcuccaugaucauugcuauauguagaua

SEQ ID NO: 39704 - RNA, 32 nt, Homo Sapiens
ccuguagggcuccucugcagccugcccugccu

SEQ ID NO: 39705 - RNA, 32 nt, Homo Sapiens
aggugugaggggaugcuguguuugggggguug

SEQ ID NO: 39706 - RNA, 32 nt, Homo Sapiens
uaugaugcaauaaugcagaaauguguguaauu

SEQ ID NO: 39707 - RNA, 32 nt, Homo Sapiens
uuuaccguacauuauuucuugcucaccauccc

SEQ ID NO: 39708 - RNA, 32 nt, Homo Sapiens
cuuaccugaugggauagcaccaucuagugcca

SEQ ID NO: 39709 - RNA, 32 nt, Homo Sapiens
agcuuuuugguaauauguuacaauuaaaauga

SEQ ID NO: 39710 - RNA, 32 nt, Homo Sapiens
caaaauuagccgggcgugguggcaugcgccua

SEQ ID NO: 39711 - RNA, 31 nt, Homo Sapiens
gacaccauggggagcugcugcagcugccuga

SEQ ID NO: 39712 - RNA, 30 nt, Homo Sapiens
uuauguguuaaaauaaacauuguuuuugag

SEQ ID NO: 39713 - RNA, 32 nt, Homo Sapiens
ggaauguuuaugcccuaucaccauggugaugg

SEQ ID NO: 39714 - RNA, 32 nt, Homo Sapiens
ccagacuccagccggcucuccucgcccucuag

SEQ ID NO: 39715 - RNA, 32 nt, Homo Sapiens
acacuacaucuuugagcaagugccaaauuugu

SEQ ID NO: 39716 - RNA, 32 nt, Homo Sapiens
gagaauucaacauauaauuucuuaauaaauac

SEQ ID NO: 39717 - RNA, 32 nt, Homo Sapiens
uccucugggauuucuaaacagcaguuaagcua

SEQ ID NO: 39718 - RNA, 32 nt, Homo Sapiens
ugaacggccccacccuggaaucuccuacagga

SEQ ID NO: 39719 - RNA, 32 nt, Homo Sapiens
acccagaagcaggauagagaaaauauuacaga

SEQ ID NO: 39720 - RNA, 32 nt, Homo Sapiens
caccgccaccgccgccgagugcugucucuaug

SEQ ID NO: 39721 - RNA, 32 nt, Homo Sapiens
aaauaagaagaguuauacuagauccagaucau

SEQ ID NO: 39722 - RNA, 32 nt, Homo Sapiens
ucgccuuugcuuuugcacucucuuuuacauuu

SEQ ID NO: 39723 - RNA, 32 nt, Homo Sapiens
accaccaggaccagcugaucauuccagcccac

SEQ ID NO: 39724 - RNA, 32 nt, Homo Sapiens
ugcuugcaauuuacacauuccauggggaaaga

SEQ ID NO: 39725 - RNA, 32 nt, Homo Sapiens
ugaaggaagaauccaccaagacuuuagucucu

SEQ ID NO: 39726 - RNA, 32 nt, Homo Sapiens
uucucucggucaggaaaagagcuugcuucaca

SEQ ID NO: 39727 - RNA, 32 nt, Homo Sapiens
uaacuaucuuuuaaauucgugguugauguaag

SEQ ID NO: 39728 - RNA, 32 nt, Homo Sapiens
gcuccggagaagcaguaggcgaggggccuggc

SEQ ID NO: 39729 - RNA, 30 nt, Homo Sapiens
uaaugagaagcuuuuacccaucuuagucug

SEQ ID NO: 39730 - RNA, 32 nt, Homo Sapiens
caugcaggggagaggagaaggaauacugcuuc

SEQ ID NO: 39731 - RNA, 32 nt, Homo Sapiens
ucuggggggccuguaggggcugccgggcuggu

SEQ ID NO: 39732 - RNA, 32 nt, Homo Sapiens
cacagcccgucuccaguagggcuggggaaaag

SEQ ID NO: 39733 - RNA, 32 nt, Homo Sapiens
cgaggagucccuaccacccaucucaucacuuu

SEQ ID NO: 39734 - RNA, 32 nt, Homo Sapiens
cggggccgagggcggcggggaccgcgguuugg

SEQ ID NO: 39735 - RNA, 32 nt, Homo Sapiens
aaagaugggcuaauuacuccaacgauugcacc

SEQ ID NO: 39736 - RNA, 32 nt, Homo Sapiens
gaaaaaugucaauuuucccauuuuuuccauau

SEQ ID NO: 39737 - RNA, 32 nt, Homo Sapiens
cauuuuccuguccuuacaucucagcuuaaaug

SEQ ID NO: 39738 - RNA, 32 nt, Homo Sapiens
agugcagaaagagcagguaaaaaguuagccca

SEQ ID NO: 39739 - RNA, 28 nt, Homo Sapiens
aaguugcaaaaauaaaaaccaguaaacu

SEQ ID NO: 39740 - RNA, 32 nt, Homo Sapiens
gauagguaagugggggcggggaagggugcaua

SEQ ID NO: 39741 - RNA, 32 nt, Homo Sapiens
ggcgcccgcccggcugcgcuuccagagcugaa

SEQ ID NO: 39742 - RNA, 32 nt, Homo Sapiens
gcuugauaacacaaagaaaacagugucaacga

SEQ ID NO: 39743 - RNA, 32 nt, Homo Sapiens
ugcccgcgcccgccgccucccucacccggcaa

SEQ ID NO: 39744 - RNA, 32 nt, Homo Sapiens
guguccaggcgucacguccgcgcgcgcccccg

SEQ ID NO: 39745 - RNA, 32 nt, Homo Sapiens
aaaugaaaaacuggccacauguugauaauugu

SEQ ID NO: 39746 - RNA, 32 nt, Homo Sapiens
aaucaaaggggauauauguuuguggaauggau

SEQ ID NO: 39747 - RNA, 32 nt, Homo Sapiens
cccugugcuaaucccaggauuaggccauagga

SEQ ID NO: 39748 - RNA, 32 nt, Homo Sapiens
ugcuguacaacacuggcugugucucaaagcgg

SEQ ID NO: 39749 - RNA, 32 nt, Homo Sapiens
uguaauucucugcgucauccucuucuuuuucu

SEQ ID NO: 39750 - RNA, 32 nt, Homo Sapiens
agcagcuguaugaaugcugauuuuaaaaccag

SEQ ID NO: 39751 - RNA, 32 nt, Homo Sapiens
aggaguagaagcugcgccuggccugaaggcac

SEQ ID NO: 39752 - RNA, 32 nt, Homo Sapiens
auuauucccuguacaauauuuaaaauuuauug

SEQ ID NO: 39753 - RNA, 32 nt, Homo Sapiens
agagagaggcugugaagugcugaaucaccuuu

SEQ ID NO: 39754 - RNA, 32 nt, Homo Sapiens
ugugagggcaagaaaaacuuuuuuguuauugg

SEQ ID NO: 39755 - RNA, 32 nt, Homo Sapiens
uccugccugccagcuggcgucuuguauccaaa

SEQ ID NO: 39756 - RNA, 32 nt, Homo Sapiens
cgugaccagugggugcccucgcaguggguagg

SEQ ID NO: 39757 - RNA, 32 nt, Homo Sapiens
acugucaccaaaacaaacaacuaccacuuucc

SEQ ID NO: 39758 - RNA, 32 nt, Homo Sapiens
uugaagauuuuuccucuugccuuacacaugga

SEQ ID NO: 39759 - RNA, 32 nt, Homo Sapiens
gguucaggacucggucucggcucggcggcuuc

SEQ ID NO: 39760 - RNA, 32 nt, Homo Sapiens
ggcauggaccucuguccggcagagguguggac

SEQ ID NO: 39761 - RNA, 32 nt, Homo Sapiens
uaacuggagcccagagugccuuguucugagcc

SEQ ID NO: 39762 - RNA, 32 nt, Homo Sapiens
uggcccagccccagcaggcccucagccuggaa

SEQ ID NO: 39763 - RNA, 32 nt, Homo Sapiens
auggguggcugucagcuggggaccacucucag

SEQ ID NO: 39764 - RNA, 29 nt, Homo Sapiens
ucagauaaguguuucaguggccagauaag

SEQ ID NO: 39765 - RNA, 32 nt, Homo Sapiens
aagaaacauuuauauugauaagaucuuuuauu

SEQ ID NO: 39766 - RNA, 32 nt, Homo Sapiens
uuugguuucuucauucuuuacugcacucagau

SEQ ID NO: 39767 - RNA, 32 nt, Homo Sapiens
gcggcucgggagggaaggaggcggcggcgccg

SEQ ID NO: 39768 - RNA, 32 nt, Homo Sapiens
accuuuucaauaagcagaaauaacguagguac

SEQ ID NO: 39769 - RNA, 32 nt, Homo Sapiens
gacgcacaucuacgccuucgggacgccgggga

SEQ ID NO: 39770 - RNA, 32 nt, Homo Sapiens
cuuaggggaaguggagaugugggccucggagc

SEQ ID NO: 39771 - RNA, 32 nt, Homo Sapiens
ucugcaacccucacuuccuaagcacagaaauc

SEQ ID NO: 39772 - RNA, 32 nt, Homo Sapiens
cagagccugugggaagucuccauggugaagua

SEQ ID NO: 39773 - RNA, 32 nt, Homo Sapiens
uuggcgaggggagaggcgcagaaacggcguga

SEQ ID NO: 39774 - RNA, 32 nt, Homo Sapiens
cagcuucaucuuccuuuuuuuuuuuuugagau

SEQ ID NO: 39775 - RNA, 32 nt, Homo Sapiens
gagcauguuaucuggagggagagauggccaga

SEQ ID NO: 39776 - RNA, 32 nt, Homo Sapiens
agcagccuggucaacauagugaaaccccgucu

SEQ ID NO: 39777 - RNA, 32 nt, Homo Sapiens
gucugcaggccgcgcuccuguccugccgcuga

SEQ ID NO: 39778 - RNA, 32 nt, Homo Sapiens
uucaaauaaugcgagcugaggacagugaucug

SEQ ID NO: 39779 - RNA, 32 nt, Homo Sapiens
ucugccaccaccuaacaggacggaguggagug

SEQ ID NO: 39780 - RNA, 32 nt, Homo Sapiens
aacggcgguggcgcccggagcccgagaguuuc

SEQ ID NO: 39781 - RNA, 32 nt, Homo Sapiens
caggucagcggccgggccgagggcgccagagg

SEQ ID NO: 39782 - RNA, 32 nt, Homo Sapiens
cgcccagccuguuauuuuuuuauuauuauugu

SEQ ID NO: 39783 - RNA, 32 nt, Homo Sapiens
uccgcgagcucggccucacuucugccccgacu

SEQ ID NO: 39784 - RNA, 32 nt, Homo Sapiens
uggucgcagggcccgcgacagaccccgauucu

SEQ ID NO: 39785 - RNA, 32 nt, Homo Sapiens
aagcaggugcucaggacccggaagaaucaucu

SEQ ID NO: 39786 - RNA, 32 nt, Homo Sapiens
accagaucaggagagcaaggucaugaaggagg

SEQ ID NO: 39787 - RNA, 32 nt, Homo Sapiens
uuucacuuucccuacccagcuuuccuacaugc

SEQ ID NO: 39788 - RNA, 32 nt, Homo Sapiens
ugaugugcaccuguagucccagcuacucagga

SEQ ID NO: 39789 - RNA, 32 nt, Homo Sapiens
gggaaccuuuuuucuuuuuuuagagacagggu

SEQ ID NO: 39790 - RNA, 32 nt, Homo Sapiens
auguuccauuguuuuuaccauuccuguagaaa

SEQ ID NO: 39791 - RNA, 32 nt, Homo Sapiens
agcccuuaaugauugucugauguuccuuuuau

SEQ ID NO: 39792 - RNA, 32 nt, Homo Sapiens
acauuuauaauauauacacacagucuauauau

SEQ ID NO: 39793 - RNA, 32 nt, Homo Sapiens
gaccccguuguaaugugccacaacacccucaa

SEQ ID NO: 39794 - RNA, 32 nt, Homo Sapiens
uucgaagagggagagaaacuggacuggaacuu

SEQ ID NO: 39795 - RNA, 32 nt, Homo Sapiens
gucccagacuguccccagcaguggcaccaacg

SEQ ID NO: 39796 - RNA, 32 nt, Homo Sapiens
cuuccuuggggauguucaugggccccaguuuc

SEQ ID NO: 39797 - RNA, 32 nt, Homo Sapiens
uucuccuagaagcuaaucuauaccauaauauu

SEQ ID NO: 39798 - RNA, 32 nt, Homo Sapiens
ccagcccagugugcggccgccgcgcugucugc

SEQ ID NO: 39799 - RNA, 32 nt, Homo Sapiens
augagaaauauuuuaaaaauguguaucacuuu

SEQ ID NO: 39800 - RNA, 32 nt, Homo Sapiens
guccugaccccggcccggcucccgcuccgggc

SEQ ID NO: 39801 - RNA, 31 nt, Homo Sapiens
ccccgugugauccgaaaagugcuggcaaaau

SEQ ID NO: 39802 - RNA, 32 nt, Homo Sapiens
ggugcugcgguuaagaauauguacccagggcc

SEQ ID NO: 39803 - RNA, 32 nt, Homo Sapiens
guugaugggggaagaaaggaagucagagggcu

SEQ ID NO: 39804 - RNA, 32 nt, Homo Sapiens
uuccauauccucagcaccuaaaacagugcuug

SEQ ID NO: 39805 - RNA, 32 nt, Homo Sapiens
cccgcuguuaauaaauauuguuucauucuucu

SEQ ID NO: 39806 - RNA, 32 nt, Homo Sapiens
cgggcgccuccggagcgccgcggccgcaugca

SEQ ID NO: 39807 - RNA, 32 nt, Homo Sapiens
guauucauuuuuccuaguauuuggaaaacaga

SEQ ID NO: 39808 - RNA, 32 nt, Homo Sapiens
acauuugcauuacuaauugcucucuuccagaa

SEQ ID NO: 39809 - RNA, 32 nt, Homo Sapiens
ggaagacccuaucugggaccaagaaacccacc

SEQ ID NO: 39810 - RNA, 32 nt, Homo Sapiens
cccucccucaucaagucaauagauaaacaaac

SEQ ID NO: 39811 - RNA, 32 nt, Homo Sapiens
ggagaugauugagccagagaagaaacggguug

SEQ ID NO: 39812 - RNA, 32 nt, Homo Sapiens
ugauaaaacaauuuuguagaguguaauauuuc

SEQ ID NO: 39813 - RNA, 32 nt, Homo Sapiens
cucagcccugagcgucucggggcggauggcgc

SEQ ID NO: 39814 - RNA, 32 nt, Homo Sapiens
cgagggcuacgggacugggggaggcggaagca

SEQ ID NO: 39815 - RNA, 32 nt, Homo Sapiens
gaggcgccucccgcccucggcuggagacgagg

SEQ ID NO: 39816 - RNA, 32 nt, Homo Sapiens
ggggguugcgucgcucucugguaaaggcgugc

SEQ ID NO: 39817 - RNA, 32 nt, Homo Sapiens
cuaaauuuguggauucaugagaugucaaucga

SEQ ID NO: 39818 - RNA, 32 nt, Homo Sapiens
gaguccucuuugucugccuuuaauuuucucuu

SEQ ID NO: 39819 - RNA, 32 nt, Homo Sapiens
uuuaaaagcagagcauuuuuuaugauaucauu

SEQ ID NO: 39820 - RNA, 32 nt, Homo Sapiens
cugcuccgcgcgcacccggguguccucuccga

SEQ ID NO: 39821 - RNA, 32 nt, Homo Sapiens
aggcauuuaaacacuuggauuuacaccagucu

SEQ ID NO: 39822 - RNA, 32 nt, Homo Sapiens
agggagaaggauuaagggguauggcugaauuc

SEQ ID NO: 39823 - RNA, 32 nt, Homo Sapiens
augaauauagaauagacuucuuugaaauucau

SEQ ID NO: 39824 - RNA, 32 nt, Homo Sapiens
caguagaaaaauuaguagaaauccacuuacag

SEQ ID NO: 39825 - RNA, 32 nt, Homo Sapiens
aacuuucugaauuauuuuuaaagaucuucucu

SEQ ID NO: 39826 - RNA, 32 nt, Homo Sapiens
gaagcgccugaagggucgugaggcuggggcgg

SEQ ID NO: 39827 - RNA, 32 nt, Homo Sapiens
cucagcccugcagcuggagggcaacaggcugc

SEQ ID NO: 39828 - RNA, 32 nt, Homo Sapiens
gaucuacccugccuguacuacucuagggagua

SEQ ID NO: 39829 - RNA, 32 nt, Homo Sapiens
uuaauugagaaccuacuauugaccaggcacug

SEQ ID NO: 39830 - RNA, 32 nt, Homo Sapiens
aaggaacagaugacacugguagccucacuguu

SEQ ID NO: 39831 - RNA, 32 nt, Homo Sapiens
cugcuuuccccgcucgccacgcccuccuccua

SEQ ID NO: 39832 - RNA, 32 nt, Homo Sapiens
auugagaugacacuagguguaauagcagggau

SEQ ID NO: 39833 - RNA, 32 nt, Homo Sapiens
aucccaaauaccacuauauguauuuuucuuca

SEQ ID NO: 39834 - RNA, 32 nt, Homo Sapiens
aaacuuuuaauuacagaacuuaccacacauau

SEQ ID NO: 39835 - RNA, 32 nt, Homo Sapiens
ccuugucugugcuacugucugcugcagcuucc

SEQ ID NO: 39836 - RNA, 32 nt, Homo Sapiens
uucauuuuugcuuuuucuucgcuugaguucuu

SEQ ID NO: 39837 - RNA, 32 nt, Homo Sapiens
gccuccugcuccacgacgugaccauggccggg

SEQ ID NO: 39838 - RNA, 32 nt, Homo Sapiens
agugugcagagaauccaguaaagggaauguau

SEQ ID NO: 39839 - RNA, 32 nt, Homo Sapiens
guuuguuugaaaucuaaauaaaacuacuuuau

SEQ ID NO: 39840 - RNA, 32 nt, Homo Sapiens
gugcugguuuuaaaggaaucuuuccuaauuug

SEQ ID NO: 39841 - RNA, 32 nt, Homo Sapiens
aggugggagucuuuuguauauaguuguaaaua

SEQ ID NO: 39842 - RNA, 32 nt, Homo Sapiens
aaaaaccaauacuuuacaagugguuuuugaaa

SEQ ID NO: 39843 - RNA, 32 nt, Homo Sapiens
uguuauuuuuacaguuuucaguacaaaagugu

SEQ ID NO: 39844 - RNA, 32 nt, Homo Sapiens
aaucuuuauuuuuuaaauugaauguuccuuaa

SEQ ID NO: 39845 - RNA, 32 nt, Homo Sapiens
uccuaaauauauauguauccaacacaagaaca

SEQ ID NO: 39846 - RNA, 32 nt, Homo Sapiens
uuggaguaaaaugggugcuuuuggcaguuucu

SEQ ID NO: 39847 - RNA, 32 nt, Homo Sapiens
ccagccggguggcacagcggugucguggccgu

SEQ ID NO: 39848 - RNA, 32 nt, Homo Sapiens
auccacggaggguggggagcucgggcugaaau

SEQ ID NO: 39849 - RNA, 32 nt, Homo Sapiens
gugccacagagguaaaaaauuuccuugucagu

SEQ ID NO: 39850 - RNA, 32 nt, Homo Sapiens
caugaugaacucugcuguaugcguccuggugc

SEQ ID NO: 39851 - RNA, 32 nt, Homo Sapiens
guuuugaggagaaauuugauaaugacacuguu

SEQ ID NO: 39852 - RNA, 32 nt, Homo Sapiens
acaggccgacagauagaggaccguguggcccu

SEQ ID NO: 39853 - RNA, 32 nt, Homo Sapiens
cccaaacaaaaaugccauaauauaaaugugug

SEQ ID NO: 39854 - RNA, 32 nt, Homo Sapiens
uuucgggcccuccucuucaggaaucuuccuga

SEQ ID NO: 39855 - RNA, 32 nt, Homo Sapiens
ccaagccacaugccacuaaccacaagcaagcu

SEQ ID NO: 39856 - RNA, 32 nt, Homo Sapiens
acgaaugguacgucugggacaaacacaaaccc

SEQ ID NO: 39857 - RNA, 32 nt, Homo Sapiens
ccaguccaauccacgcugucuucuguugcagg

SEQ ID NO: 39858 - RNA, 32 nt, Homo Sapiens
uggugagaaaaauuauguuuuuauucgcuuuc

SEQ ID NO: 39859 - RNA, 32 nt, Homo Sapiens
gcuuugggagagaaauuuauuuuuguuugggu

SEQ ID NO: 39860 - RNA, 32 nt, Homo Sapiens
cacugccacagugacuguuagugugugccgcu

SEQ ID NO: 39861 - RNA, 32 nt, Homo Sapiens
aaggguugggguggaagggaaauauuuccggg

SEQ ID NO: 39862 - RNA, 32 nt, Homo Sapiens
aguuauuuuagucaugaaauuuuauaugcaga

SEQ ID NO: 39863 - RNA, 32 nt, Homo Sapiens
gguggggcugcagcgugcaggcagaugcuagg

SEQ ID NO: 39864 - RNA, 32 nt, Homo Sapiens
gggaccacuuagcuucccguuuccuuacuagu

SEQ ID NO: 39865 - RNA, 32 nt, Homo Sapiens
uaaauucuaauguuuaccuuguaccauggaaa

SEQ ID NO: 39866 - RNA, 32 nt, Homo Sapiens
cuccuguauacuuuaaaucaucucuagauuac

SEQ ID NO: 39867 - RNA, 32 nt, Homo Sapiens
agggaaguguaaaagccuagaagcuucuuaca

SEQ ID NO: 39868 - RNA, 32 nt, Homo Sapiens
uuuguauauauuauaaucgaugucauuguaug

SEQ ID NO: 39869 - RNA, 30 nt, Homo Sapiens
cuuccugucguggcuugcggcagggguggg

SEQ ID NO: 39870 - RNA, 32 nt, Homo Sapiens
cucuaguuuauccugcaacuccagucaauauc

SEQ ID NO: 39871 - RNA, 32 nt, Homo Sapiens
uacgggcagcuaggaacaggggacaaaaugga

SEQ ID NO: 39872 - RNA, 32 nt, Homo Sapiens
aaaauaguacuuugauuuacgacaucacagga

SEQ ID NO: 39873 - RNA, 32 nt, Homo Sapiens
ugaaauacgauuuuaaugaaaacuuuucagaa

SEQ ID NO: 39874 - RNA, 32 nt, Homo Sapiens
cacauccaccccagccccacugcccuccaggg

SEQ ID NO: 39875 - RNA, 31 nt, Homo Sapiens
uuaaaucauuugacuuugacaagcagaaauu

SEQ ID NO: 39876 - RNA, 32 nt, Homo Sapiens
aacauuggaaaaaggagagccgcugaguggca

SEQ ID NO: 39877 - RNA, 32 nt, Homo Sapiens
cugacaggagggagaagaaaaaacaaaacacu

SEQ ID NO: 39878 - RNA, 32 nt, Homo Sapiens
cuggccuuuuucugugugagaucugugcugca

SEQ ID NO: 39879 - RNA, 32 nt, Homo Sapiens
cgacgcgugcggacacaagacccgucucgcgc

SEQ ID NO: 39880 - RNA, 32 nt, Homo Sapiens
uuauucuugugguuaaaaaccugccuaaauua

SEQ ID NO: 39881 - RNA, 32 nt, Homo Sapiens
aaaaaucagaucuagaguuuagagacauacuu

SEQ ID NO: 39882 - RNA, 32 nt, Homo Sapiens
gcaggcccugucaccgacgggucaccucgccc

SEQ ID NO: 39883 - RNA, 32 nt, Homo Sapiens
ucuuugaauuguauuucuuguauauuacauac

SEQ ID NO: 39884 - RNA, 32 nt, Homo Sapiens
agcgcggcucagagucggacgaggggagacug

SEQ ID NO: 39885 - RNA, 32 nt, Homo Sapiens
ugcauugacugccaccucacuccaccuccaaa

SEQ ID NO: 39886 - RNA, 32 nt, Homo Sapiens
auucagaguggagauaguggacccaguggaua

SEQ ID NO: 39887 - RNA, 32 nt, Homo Sapiens
gggcguguucuucagaauauauaguuauuuuc

SEQ ID NO: 39888 - RNA, 32 nt, Homo Sapiens
cagggaaggggaggcagccggcacccacaagu

SEQ ID NO: 39889 - RNA, 32 nt, Homo Sapiens
gagguugcugugaaagcagcucgccacgaccc

SEQ ID NO: 39890 - RNA, 32 nt, Homo Sapiens
gacacaccacugugcugagugcuugaggacgu

SEQ ID NO: 39891 - RNA, 32 nt, Homo Sapiens
ugauagagcuuucaaaaguuaauuaugacugc

SEQ ID NO: 39892 - RNA, 32 nt, Homo Sapiens
cagcuguggaauuuuuguccaagcuucaaaua

SEQ ID NO: 39893 - RNA, 32 nt, Homo Sapiens
cuccaagaaguaagagacuugugaguaagcuc

SEQ ID NO: 39894 - RNA, 32 nt, Homo Sapiens
ucggccccauggacgcccugugcgguuccggg

SEQ ID NO: 39895 - RNA, 32 nt, Homo Sapiens
cucccacccucucuccucccaccccacagcuc

SEQ ID NO: 39896 - RNA, 32 nt, Homo Sapiens
ugugugcaaccugagcugggaaaggcauuugg

SEQ ID NO: 39897 - RNA, 32 nt, Homo Sapiens
aauuccauugugauguuuaccuuuauagccag

SEQ ID NO: 39898 - RNA, 32 nt, Homo Sapiens
auuccagaaagaaaagugagccacaugcaggc

SEQ ID NO: 39899 - RNA, 32 nt, Homo Sapiens
uuucccuucaggcauccauuaauaaaagaaau

SEQ ID NO: 39900 - RNA, 32 nt, Homo Sapiens
cggaccuauggacuauggauggaugcggacga

SEQ ID NO: 39901 - RNA, 32 nt, Homo Sapiens
gggcaacuggcaccaggagcugcuacaccugg

SEQ ID NO: 39902 - RNA, 32 nt, Homo Sapiens
uuugaggaggcuguauuuuuuauuccauuuca

SEQ ID NO: 39903 - RNA, 32 nt, Homo Sapiens
cauaaguaugagaauaaaugauuauuuuaagc

SEQ ID NO: 39904 - RNA, 32 nt, Homo Sapiens
gaaaccaaucccagguauagugucauuuauaa

SEQ ID NO: 39905 - RNA, 32 nt, Homo Sapiens
ugacugcugucugguccacaugguaccccuuu

SEQ ID NO: 39906 - RNA, 32 nt, Homo Sapiens
ucacuggggcggaggcagcggcuguagcgggg

SEQ ID NO: 39907 - RNA, 32 nt, Homo Sapiens
cuccgcgcccgcgggcaaccaagcccccagcg

SEQ ID NO: 39908 - RNA, 26 nt, Homo Sapiens
uuacaauaaaguuuuuaauguguuuu

SEQ ID NO: 39909 - RNA, 32 nt, Homo Sapiens
aaacaccaaggauuguggcaaccaucagaagc

SEQ ID NO: 39910 - RNA, 32 nt, Homo Sapiens
agagaagaugacugcagaauugagagaagcca

SEQ ID NO: 39911 - RNA, 32 nt, Homo Sapiens
agggagcccgcggcggcggcagcagcuacagc

SEQ ID NO: 39912 - RNA, 32 nt, Homo Sapiens
aggagcuuggccugaacuuccacacagaauuu

SEQ ID NO: 39913 - RNA, 32 nt, Homo Sapiens
ggccuuccgcggcucggagcccgucacuccug

SEQ ID NO: 39914 - RNA, 32 nt, Homo Sapiens
ucaacgugugacucaaagacagaggccguuuc

SEQ ID NO: 39915 - RNA, 32 nt, Homo Sapiens
acacauuucccuuggaugggacuugcaggccu

SEQ ID NO: 39916 - RNA, 32 nt, Homo Sapiens
gggcacgggcgcgggccgggccucaaggguga

SEQ ID NO: 39917 - RNA, 32 nt, Homo Sapiens
gcuccugcccccgagucgacacuguggacugu

SEQ ID NO: 39918 - RNA, 32 nt, Homo Sapiens
caguuacagaucugggacagucccuucuauga

SEQ ID NO: 39919 - RNA, 32 nt, Homo Sapiens
gggcagcucagguccgccugugguaauugaaa

SEQ ID NO: 39920 - RNA, 32 nt, Homo Sapiens
ccauuuaaagaaaaaaugaagaagcagcaaua

SEQ ID NO: 39921 - RNA, 32 nt, Homo Sapiens
uuaauaguccaacaguuggguuguguaacauc

SEQ ID NO: 39922 - RNA, 32 nt, Homo Sapiens
aaggaugcgguauuugcuuuugccaugauccc

SEQ ID NO: 39923 - RNA, 32 nt, Homo Sapiens
ucauuugucaccgaaucagauaauccucugcu

SEQ ID NO: 39924 - RNA, 32 nt, Homo Sapiens
gaguacugggaugaugggcgggauaaagaagc

SEQ ID NO: 39925 - RNA, 32 nt, Homo Sapiens
cucgaaagaaauguagaugcuaugcauuuuga

SEQ ID NO: 39926 - RNA, 32 nt, Homo Sapiens
uuaucgugguuuuugguuauguauuauaauuu

SEQ ID NO: 39927 - RNA, 32 nt, Homo Sapiens
ggggcugccgugggcggccgugacagucacag

SEQ ID NO: 39928 - RNA, 32 nt, Homo Sapiens
gagcugcagcccuggaggagggggcgggucga

SEQ ID NO: 39929 - RNA, 32 nt, Homo Sapiens
ugcuuccaucucaggaccucagcagaaggggu

SEQ ID NO: 39930 - RNA, 32 nt, Homo Sapiens
gccgagggacgccuggcagugccagcugacac

SEQ ID NO: 39931 - RNA, 29 nt, Homo Sapiens
cuggucagucauuucagaggcagcagaug

SEQ ID NO: 39932 - RNA, 32 nt, Homo Sapiens
gccugcaggcgguguagauacauguagauacu

SEQ ID NO: 39933 - RNA, 32 nt, Homo Sapiens
ugggucugggccaccaggaucagccaggaggg

SEQ ID NO: 39934 - RNA, 32 nt, Homo Sapiens
ggcgcccccuucccucacccgcuguggcuccg

SEQ ID NO: 39935 - RNA, 32 nt, Homo Sapiens
uguauggugcaaucagaccacaaaaucagaag

SEQ ID NO: 39936 - RNA, 32 nt, Homo Sapiens
cauaaaauaggagcugcaaaagcaaaaagaau

SEQ ID NO: 39937 - RNA, 32 nt, Homo Sapiens
guuggugucacccugcucggcccucagcccug

SEQ ID NO: 39938 - RNA, 32 nt, Homo Sapiens
ggucuagaauaaaacuuaggccaaaacaaaaa

SEQ ID NO: 39939 - RNA, 32 nt, Homo Sapiens
ccaggauucuggcuccggggccagcaucccuc

SEQ ID NO: 39940 - RNA, 32 nt, Homo Sapiens
aggggcccaagcccuggauuuggccugcggag

SEQ ID NO: 39941 - RNA, 32 nt, Homo Sapiens
ccauauacaccuggaacauugaggauggaaac

SEQ ID NO: 39942 - RNA, 32 nt, Homo Sapiens
ccgcgcaggcaccccucuggcugcucaguccu

SEQ ID NO: 39943 - RNA, 32 nt, Homo Sapiens
agcucagccuccccgauucacgccauucuccu

SEQ ID NO: 39944 - RNA, 32 nt, Homo Sapiens
agcuccgccucccagauucacgccauucuccu

SEQ ID NO: 39945 - RNA, 32 nt, Homo Sapiens
guacccgaucauaauaaaaauggauaauaaug

SEQ ID NO: 39946 - RNA, 32 nt, Homo Sapiens
auuuaccaaucaugccacacaagcauuuauuu

SEQ ID NO: 39947 - RNA, 32 nt, Homo Sapiens
aauuugugaaaccaguguuguuagaaguguau

SEQ ID NO: 39948 - RNA, 32 nt, Homo Sapiens
uuuuguaaauguucaagggaacuguuuggaaa

SEQ ID NO: 39949 - RNA, 32 nt, Homo Sapiens
uggggaggaaaugggaaauggcuggagucuuu

SEQ ID NO: 39950 - RNA, 31 nt, Homo Sapiens
acuauucauaaaggaaaacgauuucuaaagc

SEQ ID NO: 39951 - RNA, 32 nt, Homo Sapiens
ccagcccagcauccagcuggcccgccagggcu

SEQ ID NO: 39952 - RNA, 32 nt, Homo Sapiens
aaggacccaagcaggggacaagcaggcucacc

SEQ ID NO: 39953 - RNA, 32 nt, Homo Sapiens
gugauccaguucaaaguuugcuuaguuacaac

SEQ ID NO: 39954 - RNA, 32 nt, Homo Sapiens
aagggugcgcgaguagccgccacccguucggc

SEQ ID NO: 39955 - RNA, 32 nt, Homo Sapiens
caggccgcacagguccugccaagccucacgga

SEQ ID NO: 39956 - RNA, 32 nt, Homo Sapiens
cccagccccgggccccagcccgcggcacuaac

SEQ ID NO: 39957 - RNA, 32 nt, Homo Sapiens
ccuagccucucaccccaccuggagcuucacca

SEQ ID NO: 39958 - RNA, 32 nt, Homo Sapiens
cuuuuccaagucuuccuauuccacucagggcu

SEQ ID NO: 39959 - RNA, 32 nt, Homo Sapiens
ucccucccaucccuucccccuuuacucauagc

SEQ ID NO: 39960 - RNA, 32 nt, Homo Sapiens
aaggaggcgggcccugcgcgcagcauuuuggg

SEQ ID NO: 39961 - RNA, 32 nt, Homo Sapiens
gcaggcugucccagcccucacccggagcuccu

SEQ ID NO: 39962 - RNA, 28 nt, Homo Sapiens
aagccacuggcucccaggaugcaccucu

SEQ ID NO: 39963 - RNA, 32 nt, Homo Sapiens
acucugagauaaauaccauuaucccucugggc

SEQ ID NO: 39964 - RNA, 32 nt, Homo Sapiens
gccgcgccccucugcuggcagcgcugcucuuu

SEQ ID NO: 39965 - RNA, 32 nt, Homo Sapiens
aauuuaagcaaccuggaugugcauauguggag

SEQ ID NO: 39966 - RNA, 32 nt, Homo Sapiens
uuuuuuaccagaaaacaaaacucuccaucgcu

SEQ ID NO: 39967 - RNA, 32 nt, Homo Sapiens
gaaagggcaaaaugcagguguuuucucaguau

SEQ ID NO: 39968 - RNA, 32 nt, Homo Sapiens
cgccgcuggugccggguccuugaggagagcgc

SEQ ID NO: 39969 - RNA, 32 nt, Homo Sapiens
cucaguuacaauuuccugcagaugaacaacug

SEQ ID NO: 39970 - RNA, 32 nt, Homo Sapiens
cuaaaaucuauuuuacuaguuuuuaguguuug

SEQ ID NO: 39971 - RNA, 28 nt, Homo Sapiens
ggagggaaagauuagcuuugaacauucc

SEQ ID NO: 39972 - RNA, 32 nt, Homo Sapiens
uuaccuuccuuuucuuuuucagugcagaaauu

SEQ ID NO: 39973 - RNA, 32 nt, Homo Sapiens
ccuacagaagccacuuuuuuuuuuuuugagau

SEQ ID NO: 39974 - RNA, 32 nt, Homo Sapiens
ccuccccaaaucaggcgaucuccggagaugug

SEQ ID NO: 39975 - RNA, 32 nt, Homo Sapiens
guguggggaggggccuuguugggggagccugu

SEQ ID NO: 39976 - RNA, 32 nt, Homo Sapiens
cauggcugugcagcucccuccgugccucagau

SEQ ID NO: 39977 - RNA, 32 nt, Homo Sapiens
ggugagcgagccccggccccgcgcgcagucca

SEQ ID NO: 39978 - RNA, 32 nt, Homo Sapiens
cgggccugccccugcccccucucuggagcccu

SEQ ID NO: 39979 - RNA, 32 nt, Homo Sapiens
agacucaagacccucaggacuggccauauaau

SEQ ID NO: 39980 - RNA, 32 nt, Homo Sapiens
agaaaucugggcuguccuuccauuuucauucu

SEQ ID NO: 39981 - RNA, 32 nt, Homo Sapiens
cagcuucaacugaugccugcucgucgugacgg

SEQ ID NO: 39982 - RNA, 32 nt, Homo Sapiens
ucucaccgcgcccuccagcuucacccguacag

SEQ ID NO: 39983 - RNA, 32 nt, Homo Sapiens
ugaccccagauccuccgcuccucccccuaguc

SEQ ID NO: 39984 - RNA, 32 nt, Homo Sapiens
accaccguggguacauuguugggcaggagugu

SEQ ID NO: 39985 - RNA, 32 nt, Homo Sapiens
gagagcccccaccagcagcacaauucuguccc

SEQ ID NO: 39986 - RNA, 32 nt, Homo Sapiens
uugaaggggugguggaauaaaccauuuauuug

SEQ ID NO: 39987 - RNA, 32 nt, Homo Sapiens
gccggcccgcggcugccagucugcacggccuc

SEQ ID NO: 39988 - RNA, 32 nt, Homo Sapiens
uuuuuauuauauauuuaguguuuuauagaauu

SEQ ID NO: 39989 - RNA, 32 nt, Homo Sapiens
acucacauuuaccuugugcuagguucuaaaga

SEQ ID NO: 39990 - RNA, 32 nt, Homo Sapiens
cgcggcguggaacgcgagucgcgaccccggcu

SEQ ID NO: 39991 - RNA, 32 nt, Homo Sapiens
ugacuguaaaacuggcacauggcauuuauuaa

SEQ ID NO: 39992 - RNA, 32 nt, Homo Sapiens
uagucagacaucuaacaccuccccaagcuucu

SEQ ID NO: 39993 - RNA, 32 nt, Homo Sapiens
uccugaugcccccuuccacauguggccaggac

SEQ ID NO: 39994 - RNA, 32 nt, Homo Sapiens
uggacuguuaguguuaaaaaucuaguggguug

SEQ ID NO: 39995 - RNA, 32 nt, Homo Sapiens
uuguagauguuucacuuggaagaaauugaagg

SEQ ID NO: 39996 - RNA, 32 nt, Homo Sapiens
uuuuuugcaauaacaaggugaaaucaauauug

SEQ ID NO: 39997 - RNA, 32 nt, Homo Sapiens
uucagccuaucuugcgaggcccgggcagcugg

SEQ ID NO: 39998 - RNA, 32 nt, Homo Sapiens
cauuuucacaggcagccaacaagcaauuaaga

SEQ ID NO: 39999 - RNA, 32 nt, Homo Sapiens
ugggaugugagccccagggggccuccuccuag

SEQ ID NO: 40000 - RNA, 32 nt, Homo Sapiens
cccggagccucccgacaagaccuccccggagc

SEQ ID NO: 40001 - RNA, 32 nt, Homo Sapiens
uauucucaaauuaucaucccugguauuccaga

SEQ ID NO: 40002 - RNA, 32 nt, Homo Sapiens
aguggcauauuuacaaaaguucuuauuacugg

SEQ ID NO: 40003 - RNA, 32 nt, Homo Sapiens
caggaaggggcugcccagguguccugcacccc

SEQ ID NO: 40004 - RNA, 32 nt, Homo Sapiens
uauuuauacugaaugaguuacuguaaguacgu

SEQ ID NO: 40005 - RNA, 32 nt, Homo Sapiens
gauuuguauuaagacagcacuuauauuguaca

SEQ ID NO: 40006 - RNA, 32 nt, Homo Sapiens
guuccaaacugccccagggcuuugggggcggc

SEQ ID NO: 40007 - RNA, 32 nt, Homo Sapiens
caugucuaaaagauuuaaguuaaaaacaaagu

SEQ ID NO: 40008 - RNA, 32 nt, Homo Sapiens
augacaaacucgcucugucacccaggcuggag

SEQ ID NO: 40009 - RNA, 32 nt, Homo Sapiens
uaaaaauagagcauuccaacccuuacagguca

SEQ ID NO: 40010 - RNA, 32 nt, Homo Sapiens
gaaacaacuuuuuaaugagauuuuaucaaaca

SEQ ID NO: 40011 - RNA, 30 nt, Homo Sapiens
gggugugucugugcagagcugaggcccggg

SEQ ID NO: 40012 - RNA, 32 nt, Homo Sapiens
aauauuagcauggccacuuaugcuaaauacac

SEQ ID NO: 40013 - RNA, 32 nt, Homo Sapiens
cugcaauacuggcagcccagcugcugaccuug

SEQ ID NO: 40014 - RNA, 32 nt, Homo Sapiens
gaagagcagagcugcgcgcgcacucgggaaag

SEQ ID NO: 40015 - RNA, 28 nt, Homo Sapiens
uguggccgccgaggagucccuugcugaa

SEQ ID NO: 40016 - RNA, 32 nt, Homo Sapiens
gagccaccuggaaaacaaaauggaucauuucu

SEQ ID NO: 40017 - RNA, 32 nt, Homo Sapiens
gucuauguuuucuacuccaauucauaaaucua

SEQ ID NO: 40018 - RNA, 32 nt, Homo Sapiens
ccucaucccgcacaggccagcgcuuucccuug

SEQ ID NO: 40019 - RNA, 32 nt, Homo Sapiens
uccacagagucuucagcgcaucccccaacagc

SEQ ID NO: 40020 - RNA, 32 nt, Homo Sapiens
ucacugucaauucaaaucgcuuaaggaagcaa

SEQ ID NO: 40021 - RNA, 32 nt, Homo Sapiens
agcgauucuccuaccucagccuccucaguagc

SEQ ID NO: 40022 - RNA, 32 nt, Homo Sapiens
uaaagcaaaauauucauuuuuacuuuuucuua

SEQ ID NO: 40023 - RNA, 32 nt, Homo Sapiens
agcuggccuucuacuggcagaucaugaagccc

SEQ ID NO: 40024 - RNA, 32 nt, Homo Sapiens
cuaucuuuacuuuguucugggagcugaucaug

SEQ ID NO: 40025 - RNA, 32 nt, Homo Sapiens
gucacuuaguucuucauguuucuccuucugac

SEQ ID NO: 40026 - RNA, 32 nt, Homo Sapiens
uauccaggaaaugaaugacaagaucuauuuuc

SEQ ID NO: 40027 - RNA, 32 nt, Homo Sapiens
uugcagcugucucacagccugagcugugguac

SEQ ID NO: 40028 - RNA, 32 nt, Homo Sapiens
ccuguccccgccagcccugcuccagcccccgu

SEQ ID NO: 40029 - RNA, 32 nt, Homo Sapiens
ugauggugggauucuaacaucaacagagcaac

SEQ ID NO: 40030 - RNA, 32 nt, Homo Sapiens
ggacaccaaccucagcuggcgugauguugagg

SEQ ID NO: 40031 - RNA, 32 nt, Homo Sapiens
cucauguucuuuguuugcauuagugaguaaug

SEQ ID NO: 40032 - RNA, 32 nt, Homo Sapiens
cagacgcuggggggcgcuaguaccucgcgagc

SEQ ID NO: 40033 - RNA, 29 nt, Homo Sapiens
auuuuugcauuugagugaaacuacuguga

SEQ ID NO: 40034 - RNA, 32 nt, Homo Sapiens
uggcagguacuaguccaggaguaggcuguggg

SEQ ID NO: 40035 - RNA, 32 nt, Homo Sapiens
ggagaaauauuuacaaagaaccccaaguacaa

SEQ ID NO: 40036 - RNA, 32 nt, Homo Sapiens
gaguuuuauuuauugaacaauguagucacuug

SEQ ID NO: 40037 - RNA, 32 nt, Homo Sapiens
uauaugaaaaccuauucuggucuaaauuuugu

SEQ ID NO: 40038 - RNA, 32 nt, Homo Sapiens
gcaaauuucuucaauuucaguauuuuauaguu

SEQ ID NO: 40039 - RNA, 32 nt, Homo Sapiens
uacuguucucaacauacuguaaucaaaaggag

SEQ ID NO: 40040 - RNA, 32 nt, Homo Sapiens
aacucucuauaaguguucaguguucacauagc

SEQ ID NO: 40041 - RNA, 32 nt, Homo Sapiens
ugucuuuccuaguauguuuuuaucuucucaug

SEQ ID NO: 40042 - RNA, 32 nt, Homo Sapiens
agccuuagcauuaagaauauacaauaugccgg

SEQ ID NO: 40043 - RNA, 32 nt, Homo Sapiens
ugagagugagcccugugcaugcacacacacuu

SEQ ID NO: 40044 - RNA, 32 nt, Homo Sapiens
cuuuauccccccacccaggaguauccucuugc

SEQ ID NO: 40045 - RNA, 31 nt, Homo Sapiens
guuacugcugaccuuucagugcuguuugcuc

SEQ ID NO: 40046 - RNA, 32 nt, Homo Sapiens
cuaccaaagaagguuuguaaaaauaugccugc

SEQ ID NO: 40047 - RNA, 32 nt, Homo Sapiens
agggcccccucagcugucuccucccucccucu

SEQ ID NO: 40048 - RNA, 32 nt, Homo Sapiens
ggacacacucccuggcacugaagagucugaac

SEQ ID NO: 40049 - RNA, 32 nt, Homo Sapiens
ccaucaucuuaccauagcuaagacguaucuuu

SEQ ID NO: 40050 - RNA, 32 nt, Homo Sapiens
gucuggggggcucugcagcugcccagcucuuc

SEQ ID NO: 40051 - RNA, 32 nt, Homo Sapiens
cauuccacaucuuuccucuacucauuuugaaa

SEQ ID NO: 40052 - RNA, 32 nt, Homo Sapiens
guguccugaaaauuauuggaguuauggcagaa

SEQ ID NO: 40053 - RNA, 32 nt, Homo Sapiens
gcaugcuggcuuaugacuguaaucccagcagg

SEQ ID NO: 40054 - RNA, 32 nt, Homo Sapiens
cauuauguauauuaauuaaaacaucuuaaucc

SEQ ID NO: 40055 - RNA, 32 nt, Homo Sapiens
ccccagucccagagacccccaccuggugccca

SEQ ID NO: 40056 - RNA, 32 nt, Homo Sapiens
aucuaacaauuuuuuuuuuuuacaaaguauaa

SEQ ID NO: 40057 - RNA, 32 nt, Homo Sapiens
gccggcacuccuccuuguuagugucuuuccuu

SEQ ID NO: 40058 - RNA, 32 nt, Homo Sapiens
guuuccgcggagacgcgccgccggacccuccu

SEQ ID NO: 40059 - RNA, 32 nt, Homo Sapiens
ugccauauauuuuuaagacuuuucuuuccuua

SEQ ID NO: 40060 - RNA, 32 nt, Homo Sapiens
gaggagccucacggucacguccaacaacacca

SEQ ID NO: 40061 - RNA, 32 nt, Homo Sapiens
gugccucuggaaaugccuggaucugcgacccc

SEQ ID NO: 40062 - RNA, 32 nt, Homo Sapiens
aagccuggggaugacgucgggcagcuuuauuc

SEQ ID NO: 40063 - RNA, 32 nt, Homo Sapiens
gauacgugagcaugaauagcagugagaaaugg

SEQ ID NO: 40064 - RNA, 32 nt, Homo Sapiens
gagucgugacugccggccgccgggaccgaagc

SEQ ID NO: 40065 - RNA, 32 nt, Homo Sapiens
gcaggagggggcccaccagaccacggcaccuc

SEQ ID NO: 40066 - RNA, 32 nt, Homo Sapiens
aaaccaauucgcuucuccccacguucuaaaug

SEQ ID NO: 40067 - RNA, 32 nt, Homo Sapiens
aucuuuguucuucuucauauacuauaggcugu

SEQ ID NO: 40068 - RNA, 31 nt, Homo Sapiens
ucaagaacauggagaaagcccucuuucaagg

SEQ ID NO: 40069 - RNA, 32 nt, Homo Sapiens
uuccgagagaauuguuugcaaguuuuggguuu

SEQ ID NO: 40070 - RNA, 32 nt, Homo Sapiens
gguguauugcuagugauaggaacuugcuugcu

SEQ ID NO: 40071 - RNA, 32 nt, Homo Sapiens
uuggguugcaucagaaaugucuggagaauaau

SEQ ID NO: 40072 - RNA, 31 nt, Homo Sapiens
gauauaaguguagugaaagugcccaguuaaa

SEQ ID NO: 40073 - RNA, 32 nt, Homo Sapiens
uuuaccuuuuuacuuuuuaaaaaauucuugug

SEQ ID NO: 40074 - RNA, 32 nt, Homo Sapiens
aauucaggaagaaacguguuaauaaacauugu

SEQ ID NO: 40075 - RNA, 32 nt, Homo Sapiens
aguugagacuaagaauaauccuagggauguca

SEQ ID NO: 40076 - RNA, 32 nt, Homo Sapiens
caguuguaauaagucuuccacuuuuuauagga

SEQ ID NO: 40077 - RNA, 30 nt, Homo Sapiens
ucgagugccaucccugccaaacaacucucc

SEQ ID NO: 40078 - RNA, 32 nt, Homo Sapiens
ugucgggggugacaccaggacacagggacagg

SEQ ID NO: 40079 - RNA, 31 nt, Homo Sapiens
cuuaagcuugaaucuaaucagaauugcagac

SEQ ID NO: 40080 - RNA, 32 nt, Homo Sapiens
gcaggggccugauugacgaugugguggaagcu

SEQ ID NO: 40081 - RNA, 32 nt, Homo Sapiens
gugcccgggcccgcuuaccugcaccgcuugcu

SEQ ID NO: 40082 - RNA, 32 nt, Homo Sapiens
ucugcuccucccauuccccuuaaggagguagc

SEQ ID NO: 40083 - RNA, 32 nt, Homo Sapiens
uaaaugucaucucaggauaucucuaaaagggg

SEQ ID NO: 40084 - RNA, 32 nt, Homo Sapiens
agugaguacagcagcuaagaaauguuacauug

SEQ ID NO: 40085 - RNA, 32 nt, Homo Sapiens
aauugaauauccaucacuuaaauacagugaca

SEQ ID NO: 40086 - RNA, 32 nt, Homo Sapiens
acacuggguaugauggaggugugggcgggcuc

SEQ ID NO: 40087 - RNA, 32 nt, Homo Sapiens
ggcugccgugcaguuggggguggggcguggug

SEQ ID NO: 40088 - RNA, 32 nt, Homo Sapiens
gucauaggccccaagaaggcuuccagacagaa

SEQ ID NO: 40089 - RNA, 32 nt, Homo Sapiens
auuaagccuuccuggggugcgguacacaccgu

SEQ ID NO: 40090 - RNA, 32 nt, Homo Sapiens
agccggcugucaaagcagcuggucaauguugc

SEQ ID NO: 40091 - RNA, 32 nt, Homo Sapiens
augcccuuagucuguaagagaaugucccugac

SEQ ID NO: 40092 - RNA, 32 nt, Homo Sapiens
ugauuuuggauucuccaccuccccccagucuc

SEQ ID NO: 40093 - RNA, 32 nt, Homo Sapiens
uuaaauauuuuuauuucuuuuacuuugcuaag

SEQ ID NO: 40094 - RNA, 32 nt, Homo Sapiens
auugcauuugcuuuuguaauucuuaaugagca

SEQ ID NO: 40095 - RNA, 32 nt, Homo Sapiens
auauauguauuccaucacaucuacgucaguuu

SEQ ID NO: 40096 - RNA, 30 nt, Homo Sapiens
uuacuggauaaaauucaaaaauguuucaau

SEQ ID NO: 40097 - RNA, 32 nt, Homo Sapiens
ugcuucugcugaaacaaacaugcugaaccacc

SEQ ID NO: 40098 - RNA, 32 nt, Homo Sapiens
ucuuccaggacggccucugugcugcugggguc

SEQ ID NO: 40099 - RNA, 32 nt, Homo Sapiens
ccuaccccaaacuuccucuccugucuucaugu

SEQ ID NO: 40100 - RNA, 32 nt, Homo Sapiens
aggcaccagcaggggcuaucagaggcaaaugg

SEQ ID NO: 40101 - RNA, 32 nt, Homo Sapiens
gcaguugugggaagagccauagguauuuuauu

SEQ ID NO: 40102 - RNA, 32 nt, Homo Sapiens
caacuuuagugucagaaucuauagugguggca

SEQ ID NO: 40103 - RNA, 32 nt, Homo Sapiens
cauuaugcaaaaauuuuguacaguguuaaggc

SEQ ID NO: 40104 - RNA, 32 nt, Homo Sapiens
agaaagaaggucgguguaagugaaggaagagu

SEQ ID NO: 40105 - RNA, 32 nt, Homo Sapiens
cgauacacacaucuacacgggcgacagcuucg

SEQ ID NO: 40106 - RNA, 32 nt, Homo Sapiens
uugucuauguaaaccuggaaguagucuacuuu

SEQ ID NO: 40107 - RNA, 32 nt, Homo Sapiens
gaaucagauuucaaccguauggaaucaucuac

SEQ ID NO: 40108 - RNA, 32 nt, Homo Sapiens
acagcccuggggaaggguuuucugucuuaugg

SEQ ID NO: 40109 - RNA, 32 nt, Homo Sapiens
cagcucaggagaaaaaggagcggguuccgagu

SEQ ID NO: 40110 - RNA, 32 nt, Homo Sapiens
gcccuccgccccaacuucugacuuuggggucc

SEQ ID NO: 40111 - RNA, 23 nt, Homo Sapiens
ggacucugacucuugcgccgccg

SEQ ID NO: 40112 - RNA, 32 nt, Homo Sapiens
cauuaaaaacuggcauuauacugaacuauaca

SEQ ID NO: 40113 - RNA, 32 nt, Homo Sapiens
cuucacugguucugcaucacccgccccuggac

SEQ ID NO: 40114 - RNA, 32 nt, Homo Sapiens
cuguauuuuuauuuuugcacaacuuuugagag

SEQ ID NO: 40115 - RNA, 32 nt, Homo Sapiens
ggauaaggcacaauaaauaggcacauagagga

SEQ ID NO: 40116 - RNA, 30 nt, Homo Sapiens
gguggagagaagcuucauugagugacagga

SEQ ID NO: 40117 - RNA, 32 nt, Homo Sapiens
gguuuauauggacuuucuucucauaaauggcc

SEQ ID NO: 40118 - RNA, 32 nt, Homo Sapiens
uuuuuuuuuuuuuuuuugauaaguugguguaa

SEQ ID NO: 40119 - RNA, 32 nt, Homo Sapiens
aauagccugcguaccagagacaucugugauug

SEQ ID NO: 40120 - RNA, 32 nt, Homo Sapiens
aauagacaaaaaugaauuaaaguauuagaaac

SEQ ID NO: 40121 - RNA, 32 nt, Homo Sapiens
ucauuuuuaucccauugagacuauuuauuuau

SEQ ID NO: 40122 - RNA, 29 nt, Homo Sapiens
gaaaaauaaaguugguucuuauucaauau

SEQ ID NO: 40123 - RNA, 28 nt, Homo Sapiens
ccgguggggcggcugaucgcggaggauc

SEQ ID NO: 40124 - RNA, 32 nt, Homo Sapiens
aacuaaaaaugaugaugauauuauggauccaa

SEQ ID NO: 40125 - RNA, 32 nt, Homo Sapiens
ccucuggccggacagaacuggugcucucuucu

SEQ ID NO: 40126 - RNA, 32 nt, Homo Sapiens
ggauggacgccucucccccggagcagcacuuu

SEQ ID NO: 40127 - RNA, 32 nt, Homo Sapiens
ggaccgaggagcugccguugugcugugacucc

SEQ ID NO: 40128 - RNA, 32 nt, Homo Sapiens
aaaauuggagagaugaauaaaagauaauaugc

SEQ ID NO: 40129 - RNA, 32 nt, Homo Sapiens
ugagauauggucagacuuguagauaaccccaa

SEQ ID NO: 40130 - RNA, 32 nt, Homo Sapiens
acucguuugugguuaaaauuauaagaccuaau

SEQ ID NO: 40131 - RNA, 31 nt, Homo Sapiens
gagucaauuaaaccucuuuucuuuauaaauu

SEQ ID NO: 40132 - RNA, 32 nt, Homo Sapiens
uuugaccucacagugaaccucaaauacacugg

SEQ ID NO: 40133 - RNA, 32 nt, Homo Sapiens
ugagcguuccuaggcgguuucggggcuccccc

SEQ ID NO: 40134 - RNA, 32 nt, Homo Sapiens
gcagugauauuguggaagauugaaauccacag

SEQ ID NO: 40135 - RNA, 32 nt, Homo Sapiens
uaggaauuucuuuucuaucuuuaugaaaacaa

SEQ ID NO: 40136 - RNA, 32 nt, Homo Sapiens
ucauuguguuugugguuuaggagcugcugaca

SEQ ID NO: 40137 - RNA, 32 nt, Homo Sapiens
cccccuggaaugucuuuucuucuuaucuccgu

SEQ ID NO: 40138 - RNA, 32 nt, Homo Sapiens
cggccuuuaguuagugaccagcuccucggcgu

SEQ ID NO: 40139 - RNA, 32 nt, Homo Sapiens
uuacuggucucauaguucuuauuugccuacau

SEQ ID NO: 40140 - RNA, 32 nt, Homo Sapiens
acuccuguaaucucuguaaagguuuuuggggg

SEQ ID NO: 40141 - RNA, 32 nt, Homo Sapiens
uguuuacuccagccuauggauccgugaccaau

SEQ ID NO: 40142 - RNA, 32 nt, Homo Sapiens
ucuuccucccggcugcgucuccaggccggacu

SEQ ID NO: 40143 - RNA, 32 nt, Homo Sapiens
ucagcucuagaaugcuuaccacuguuaaaaca

SEQ ID NO: 40144 - RNA, 32 nt, Homo Sapiens
ucuaaugugagaagagaaacauccuucuguga

SEQ ID NO: 40145 - RNA, 32 nt, Homo Sapiens
uugacaaaauagggcaggcagcucaucucaug

SEQ ID NO: 40146 - RNA, 32 nt, Homo Sapiens
guuuacugccuuaguaauaucuaguuccuaau

SEQ ID NO: 40147 - RNA, 32 nt, Homo Sapiens
agugagucgagaucgugccacugcacuccagc

SEQ ID NO: 40148 - RNA, 32 nt, Homo Sapiens
cuguggcccuggugauggcagagccuugggau

SEQ ID NO: 40149 - RNA, 32 nt, Homo Sapiens
cuagucccgggcccgcgagcaccggcccccgc

SEQ ID NO: 40150 - RNA, 32 nt, Homo Sapiens
ccccgcagccugccuccugaagugugggcugc

SEQ ID NO: 40151 - RNA, 32 nt, Homo Sapiens
uuaaguuuuugacuaguccgcaauucacagaa

SEQ ID NO: 40152 - RNA, 32 nt, Homo Sapiens
gucaggauguuagaaagugcugauaaguagca

SEQ ID NO: 40153 - RNA, 32 nt, Homo Sapiens
uauaaaugacaucugacauauugugagggccc

SEQ ID NO: 40154 - RNA, 32 nt, Homo Sapiens
uugcccagccuggacugcacccuuauucuggc

SEQ ID NO: 40155 - RNA, 32 nt, Homo Sapiens
uuguccuggacuuuccucuaacucuuuggaac

SEQ ID NO: 40156 - RNA, 32 nt, Homo Sapiens
augccccucuuacuguacugucaauagauauu

SEQ ID NO: 40157 - RNA, 32 nt, Homo Sapiens
cucuuccucccggcugcgucuccaggcccgac

SEQ ID NO: 40158 - RNA, 32 nt, Homo Sapiens
uuguuggaaaauuuucucggagguagaagaug

SEQ ID NO: 40159 - RNA, 32 nt, Homo Sapiens
guauucaaacuuaugagaguauaaaggaucug

SEQ ID NO: 40160 - RNA, 32 nt, Homo Sapiens
gcuggugugccuagcguccgcgcggcugccgg

SEQ ID NO: 40161 - RNA, 32 nt, Homo Sapiens
uacccuugauaaaauguacaaagcuaggguag

SEQ ID NO: 40162 - RNA, 32 nt, Homo Sapiens
ggaaacagggaguucauuuggccacacuggaa

SEQ ID NO: 40163 - RNA, 32 nt, Homo Sapiens
uuucuuuucuuuucuuuuuuuuuuuuuuugac

SEQ ID NO: 40164 - RNA, 32 nt, Homo Sapiens
cccuuccucacagaaugcacacucuguaccac

SEQ ID NO: 40165 - RNA, 32 nt, Homo Sapiens
uuggcuauauuugcuuucucuuucucuauguc

SEQ ID NO: 40166 - RNA, 32 nt, Homo Sapiens
cucgcgagcugcuuucucuccucuucccuuuc

SEQ ID NO: 40167 - RNA, 32 nt, Homo Sapiens
auuguugauuucuuuuuuuuuauucugacuuu

SEQ ID NO: 40168 - RNA, 32 nt, Homo Sapiens
caaacgguccagagggcgggcggcugcgggcu

SEQ ID NO: 40169 - RNA, 32 nt, Homo Sapiens
ccauuuuauccuugcugugauuuuaagaguca

SEQ ID NO: 40170 - RNA, 32 nt, Homo Sapiens
ccagcagcuuugccgccucuccaucgucuugg

SEQ ID NO: 40171 - RNA, 32 nt, Homo Sapiens
aauggacugggaaaaacaucuuugaaaucagg

SEQ ID NO: 40172 - RNA, 32 nt, Homo Sapiens
cauuggauuuuuccuuaacgcuagagauugcu

SEQ ID NO: 40173 - RNA, 32 nt, Homo Sapiens
cuuucuaaacagugaguaaauaccauggaaug

SEQ ID NO: 40174 - RNA, 32 nt, Homo Sapiens
caaccccuuccacuucccacuucccccaggcu

SEQ ID NO: 40175 - RNA, 32 nt, Homo Sapiens
gguaaaauauuauguaauguuaauuuuguucc

SEQ ID NO: 40176 - RNA, 32 nt, Homo Sapiens
cagccaaggguguauuuguaaacuucggcccc

SEQ ID NO: 40177 - RNA, 32 nt, Homo Sapiens
ucauaauugagcuaaucuuguuucccuagccc

SEQ ID NO: 40178 - RNA, 32 nt, Homo Sapiens
ucaaccaucuauauucaugagcucucaauuuc

SEQ ID NO: 40179 - RNA, 32 nt, Homo Sapiens
ugacuuucuguguagcuucucauuuucaucag

SEQ ID NO: 40180 - RNA, 32 nt, Homo Sapiens
acaacgacgccggcgcuccuccgucuuccugu

SEQ ID NO: 40181 - RNA, 32 nt, Homo Sapiens
uaacagugacauuuauaucauguguuauaucu

SEQ ID NO: 40182 - RNA, 32 nt, Homo Sapiens
gagaggagaaaguccaaggaaagauggcuggc

SEQ ID NO: 40183 - RNA, 32 nt, Homo Sapiens
uuucccccaaggacucuugcuuccucaagccc

SEQ ID NO: 40184 - RNA, 32 nt, Homo Sapiens
augggaacuauguuugaauaugugcaguuuuc

SEQ ID NO: 40185 - RNA, 32 nt, Homo Sapiens
cacacacacauacacaaacacacacacacacu

SEQ ID NO: 40186 - RNA, 32 nt, Homo Sapiens
agcgagcucuugcagccuccccgccccucccg

SEQ ID NO: 40187 - RNA, 32 nt, Homo Sapiens
ggagaggcuguggggcggcuguggcuucccac

SEQ ID NO: 40188 - RNA, 32 nt, Homo Sapiens
agccacaguagagaggcuuguuuaaugcagua

SEQ ID NO: 40189 - RNA, 32 nt, Homo Sapiens
augagcugcacaauugcagauuugagcacaau

SEQ ID NO: 40190 - RNA, 32 nt, Homo Sapiens
uuaaaaucauuguuaaauugauugaggaaaac

SEQ ID NO: 40191 - RNA, 32 nt, Homo Sapiens
aacaaagaucauaauuuucaaugauuagccgu

SEQ ID NO: 40192 - RNA, 32 nt, Homo Sapiens
ucuccaucugugccucucuccucccaucucca

SEQ ID NO: 40193 - RNA, 32 nt, Homo Sapiens
gggaggaauauuuggauggucccuccauuccu

SEQ ID NO: 40194 - RNA, 32 nt, Homo Sapiens
aaaagagaugaugaaaauauuuaaaggcccua

SEQ ID NO: 40195 - RNA, 32 nt, Homo Sapiens
gaggccagaaucagcacaaucccggccccgcc

SEQ ID NO: 40196 - RNA, 32 nt, Homo Sapiens
uacacacaaaaauauuuaugaagcaguuugga

SEQ ID NO: 40197 - RNA, 32 nt, Homo Sapiens
cagcuuugaagauggauuaacuuuugacuuug

SEQ ID NO: 40198 - RNA, 32 nt, Homo Sapiens
gccagacagccuuuauacuagauucuaucaaa

SEQ ID NO: 40199 - RNA, 32 nt, Homo Sapiens
agauguugauuuaguaaacugauaaaaaucga

SEQ ID NO: 40200 - RNA, 32 nt, Homo Sapiens
auggaaaauggaauaagaaauaaucauauccu

SEQ ID NO: 40201 - RNA, 32 nt, Homo Sapiens
uuuuuaggaaaauuauagugaaaauuugacag

SEQ ID NO: 40202 - RNA, 32 nt, Homo Sapiens
auugguaaaugggaaauauaauugauucugau

SEQ ID NO: 40203 - RNA, 32 nt, Homo Sapiens
uuaagggguuaagggaggguacuguugacacc

SEQ ID NO: 40204 - RNA, 32 nt, Homo Sapiens
caaaccuggcggacagagugagacccuaucuc

SEQ ID NO: 40205 - RNA, 32 nt, Homo Sapiens
agccauuauuuuuucccaacaaauggugaauu

SEQ ID NO: 40206 - RNA, 32 nt, Homo Sapiens
acucuggguuaccaugagagagaccuuggagg

SEQ ID NO: 40207 - RNA, 32 nt, Homo Sapiens
uuaauacaagcacgacugaggcaacggcacga

SEQ ID NO: 40208 - RNA, 32 nt, Homo Sapiens
gagcaagauaucccagaggaagugacgccagc

SEQ ID NO: 40209 - RNA, 32 nt, Homo Sapiens
ugucaccugugcuacaagcuccuucagucaca

SEQ ID NO: 40210 - RNA, 32 nt, Homo Sapiens
ugaaucgaggaagauauacugccaagucagga

SEQ ID NO: 40211 - RNA, 32 nt, Homo Sapiens
uacggaaauuaauucaguuauauaauuauaaa

SEQ ID NO: 40212 - RNA, 32 nt, Homo Sapiens
uauagagugguuaugcugcaucagguccuaag

SEQ ID NO: 40213 - RNA, 32 nt, Homo Sapiens
uuuuauuuuaaaccuuauuuuggcagaguaau

SEQ ID NO: 40214 - RNA, 32 nt, Homo Sapiens
uuggguuuggaggcggccgccaggcccaggcc

SEQ ID NO: 40215 - RNA, 32 nt, Homo Sapiens
gcuccccgaugguggcguggacaugguuauuu

SEQ ID NO: 40216 - RNA, 32 nt, Homo Sapiens
aaugacuucauugaaauugaacugaagagaca

SEQ ID NO: 40217 - RNA, 32 nt, Homo Sapiens
gccucuagcuucagccagggcggguacacacc

SEQ ID NO: 40218 - RNA, 32 nt, Homo Sapiens
cagacucccuccccugcccccaucccaaauga

SEQ ID NO: 40219 - RNA, 32 nt, Homo Sapiens
gauagaaggggaggggaggagagaugcauacc

SEQ ID NO: 40220 - RNA, 32 nt, Homo Sapiens
aaaagcaauuuaagauauucauaguguuagga

SEQ ID NO: 40221 - RNA, 32 nt, Homo Sapiens
cgccccagccuggcccagggugaaggaagagg

SEQ ID NO: 40222 - RNA, 32 nt, Homo Sapiens
gcuucgcuggccauuuaggagcucugcucaaa

SEQ ID NO: 40223 - RNA, 32 nt, Homo Sapiens
gggaaaggggagacagagggugaaguggugcu

SEQ ID NO: 40224 - RNA, 32 nt, Homo Sapiens
acuggaauauauuuuucuuuuaauuuccagug

SEQ ID NO: 40225 - RNA, 32 nt, Homo Sapiens
ugccucccggugcccucugcaggcccaagucg

SEQ ID NO: 40226 - RNA, 32 nt, Homo Sapiens
ggcgguggcugagcagaggacccggcgggcgg

SEQ ID NO: 40227 - RNA, 32 nt, Homo Sapiens
aauagacagggagagacuauuuuuguuuugcg

SEQ ID NO: 40228 - RNA, 28 nt, Homo Sapiens
uauaauaaaugggaaauuauaaaucuag

SEQ ID NO: 40229 - RNA, 32 nt, Homo Sapiens
uuaagauugcugaagagcugccaaacacugcu

SEQ ID NO: 40230 - RNA, 32 nt, Homo Sapiens
aaauccacugaauuuguuuuuaucucuacaua

SEQ ID NO: 40231 - RNA, 32 nt, Homo Sapiens
cuaauauuuuugugacagaguauaaagacccu

SEQ ID NO: 40232 - RNA, 32 nt, Homo Sapiens
ugugaugauguagccaaaaauaaaguaggagc

SEQ ID NO: 40233 - RNA, 32 nt, Homo Sapiens
cuauuuuuaaacaaaauguagacaaagugaac

SEQ ID NO: 40234 - RNA, 32 nt, Homo Sapiens
cacgaguaaucaaaaacacuaugaaacuguaa

SEQ ID NO: 40235 - RNA, 32 nt, Homo Sapiens
cuaaacaggauaaacuuuugacuccccuuuug

SEQ ID NO: 40236 - RNA, 32 nt, Homo Sapiens
uccaacccaccagcugaccuagaagcagcauc

SEQ ID NO: 40237 - RNA, 32 nt, Homo Sapiens
aggcagccaggccccucaccagcccugggggg

SEQ ID NO: 40238 - RNA, 32 nt, Homo Sapiens
gcccgucccgccuuccccggcgcgccauggag

SEQ ID NO: 40239 - RNA, 32 nt, Homo Sapiens
aagaaacccacccuguccggaggcgggcguga

SEQ ID NO: 40240 - RNA, 32 nt, Homo Sapiens
gcaucaccuaaacugucuuccaaacaugagac

SEQ ID NO: 40241 - RNA, 32 nt, Homo Sapiens
ggcccagcugccacacccuuucugggagaagc

SEQ ID NO: 40242 - RNA, 32 nt, Homo Sapiens
uggguucauuggcauucuuugcaauacugcuu

SEQ ID NO: 40243 - RNA, 32 nt, Homo Sapiens
acucaucuuggugccccgguguuuacaagagc

SEQ ID NO: 40244 - RNA, 32 nt, Homo Sapiens
auaaacugcauauauuuaaaguguauacuuug

SEQ ID NO: 40245 - RNA, 32 nt, Homo Sapiens
guggcgggugaucgagccacccugcccagggg

SEQ ID NO: 40246 - RNA, 30 nt, Homo Sapiens
ccggcauggaucagugcgugacgguggagc

SEQ ID NO: 40247 - RNA, 28 nt, Homo Sapiens
ucauugaaagauuugauuaugaaagaau

SEQ ID NO: 40248 - RNA, 32 nt, Homo Sapiens
cacuguguugcccagacaagucucaaauucuc

SEQ ID NO: 40249 - RNA, 32 nt, Homo Sapiens
uaauuauucuugcugcacuuuguaugaauaau

SEQ ID NO: 40250 - RNA, 32 nt, Homo Sapiens
cccucauccggcuggaggaggagccgcagagg

SEQ ID NO: 40251 - RNA, 32 nt, Homo Sapiens
ugcuugcacucaguaaggcugcucuugaggaa

SEQ ID NO: 40252 - RNA, 32 nt, Homo Sapiens
uggaaaguauugccuuuuuuaagggaagcuau

SEQ ID NO: 40253 - RNA, 32 nt, Homo Sapiens
uggcuucagagguggaagauaaacagugacgg

SEQ ID NO: 40254 - RNA, 32 nt, Homo Sapiens
caguucuccaacaagaguucuuaaccuggaug

SEQ ID NO: 40255 - RNA, 32 nt, Homo Sapiens
cagguguguugcagugucugcuggagacauug

SEQ ID NO: 40256 - RNA, 32 nt, Homo Sapiens
aaagugaugauauuuaaaauaguucucaguug

SEQ ID NO: 40257 - RNA, 32 nt, Homo Sapiens
ucauugccucuggucauuugucuaaauaggaa

SEQ ID NO: 40258 - RNA, 32 nt, Homo Sapiens
uuuuugggagggauggggaaaacuacaaacgu

SEQ ID NO: 40259 - RNA, 32 nt, Homo Sapiens
uggacauacuggaccuuaauuccucugcuucu

SEQ ID NO: 40260 - RNA, 32 nt, Homo Sapiens
cagccuuggcagccuuccugugaacuggagga

SEQ ID NO: 40261 - RNA, 32 nt, Homo Sapiens
caaaaguacagcaggaugauugugaacaagac

SEQ ID NO: 40262 - RNA, 32 nt, Homo Sapiens
auacaugcaaauaacaagauuuucuuaccucu

SEQ ID NO: 40263 - RNA, 32 nt, Homo Sapiens
uacccauucuuggcacccccuuccucagugcc

SEQ ID NO: 40264 - RNA, 32 nt, Homo Sapiens
uugaaaggcggaagaugagcucccugcaagga

SEQ ID NO: 40265 - RNA, 32 nt, Homo Sapiens
cgccugacagaucccaccugccuguccacugc

SEQ ID NO: 40266 - RNA, 32 nt, Homo Sapiens
gucuucccugccuccccaggggccccccuggu

SEQ ID NO: 40267 - RNA, 32 nt, Homo Sapiens
gagcucacuccucggcggugccgcagcccugu

SEQ ID NO: 40268 - RNA, 32 nt, Homo Sapiens
agagccagacccugucuaaaaaacagaaacaa

SEQ ID NO: 40269 - RNA, 32 nt, Homo Sapiens
uuugcauugagagaccuuuuacuaguagcuag

SEQ ID NO: 40270 - RNA, 32 nt, Homo Sapiens
aacuuuuuucuuucuuuuuucuuucuuuuugu

SEQ ID NO: 40271 - RNA, 32 nt, Homo Sapiens
gauaguaauaaaggaagaauuaugacuucauu

SEQ ID NO: 40272 - RNA, 32 nt, Homo Sapiens
uuuuugcugugugaccugaggucacuugccug

SEQ ID NO: 40273 - RNA, 29 nt, Homo Sapiens
guggccugugguuuccugccaacaacucc

SEQ ID NO: 40274 - RNA, 32 nt, Homo Sapiens
gacgggaaaaggaagauaagcaagucgaauuu

SEQ ID NO: 40275 - RNA, 32 nt, Homo Sapiens
cauuguggaagauuauuuuuuaucuuguaaaa

SEQ ID NO: 40276 - RNA, 32 nt, Homo Sapiens
ccugguaacaauaggccaaauacugugcugau

SEQ ID NO: 40277 - RNA, 32 nt, Homo Sapiens
caggaggcucuuaucuccccagccccgcccuu

SEQ ID NO: 40278 - RNA, 32 nt, Homo Sapiens
uucauuaaacacauccaugaauaccacuguuu

SEQ ID NO: 40279 - RNA, 32 nt, Homo Sapiens
uguuuucaacuguguccacaguucagaucccu

SEQ ID NO: 40280 - RNA, 32 nt, Homo Sapiens
ccuccacuccgucccccgcgggucugcucugu

SEQ ID NO: 40281 - RNA, 32 nt, Homo Sapiens
cugaacuuucccuuuuccccaguucuuacgau

SEQ ID NO: 40282 - RNA, 32 nt, Homo Sapiens
gagcuaacuaaauguuuaucauugauaugaua

SEQ ID NO: 40283 - RNA, 32 nt, Homo Sapiens
agguuuuagggcccuccccacccacacccaca

SEQ ID NO: 40284 - RNA, 32 nt, Homo Sapiens
gagccgggcgaccuagagaacgagcgggucag

SEQ ID NO: 40285 - RNA, 32 nt, Homo Sapiens
cgaggccgagcaggcucucuccccuccccucc

SEQ ID NO: 40286 - RNA, 32 nt, Homo Sapiens
ggagaagcugaguugggaauggucacauaaau

SEQ ID NO: 40287 - RNA, 32 nt, Homo Sapiens
aggaggaggaggagcgcgagcucagcgacaca

SEQ ID NO: 40288 - RNA, 32 nt, Homo Sapiens
ugauggguaucaugcuucuacuccauggugaa

SEQ ID NO: 40289 - RNA, 32 nt, Homo Sapiens
uaggacuuaccauuuuaaccuuuuaaaaauaa

SEQ ID NO: 40290 - RNA, 31 nt, Homo Sapiens
cuucugaaauaaacaggacuugaucacaaaa

SEQ ID NO: 40291 - RNA, 32 nt, Homo Sapiens
ccaugaagccauugcacccucucccccaggaa

SEQ ID NO: 40292 - RNA, 32 nt, Homo Sapiens
guuuauauuuguaugucuuaugcugaaaaauc

SEQ ID NO: 40293 - RNA, 32 nt, Homo Sapiens
ccauccucuuauaugauccaaauaucacccua

SEQ ID NO: 40294 - RNA, 32 nt, Homo Sapiens
agauccugcagccgcccagucccggccccucu

SEQ ID NO: 40295 - RNA, 32 nt, Homo Sapiens
guaaaaugggagaggagugggguguacucacu

SEQ ID NO: 40296 - RNA, 32 nt, Homo Sapiens
ggucagcugggaguguccaucaucaggggaag

SEQ ID NO: 40297 - RNA, 32 nt, Homo Sapiens
uuuaagugucacuuucccucccugccccccgc

SEQ ID NO: 40298 - RNA, 32 nt, Homo Sapiens
ugccuguauucucuauuccaauaaagcagagu

SEQ ID NO: 40299 - RNA, 30 nt, Homo Sapiens
ccucagccacuggaaccccaucuucagccc

SEQ ID NO: 40300 - RNA, 32 nt, Homo Sapiens
cucggaugccgcuugccuggaagcugcguuag

SEQ ID NO: 40301 - RNA, 32 nt, Homo Sapiens
cucgcgcaggagaccccgggugacggggcccg

SEQ ID NO: 40302 - RNA, 32 nt, Homo Sapiens
agagaagacuaucagucuguuggugccgccaa

SEQ ID NO: 40303 - RNA, 32 nt, Homo Sapiens
aacaacuacagucuuugaaauauggaaaauca

SEQ ID NO: 40304 - RNA, 32 nt, Homo Sapiens
uagacucaaacacauuuuagugugauauuuca

SEQ ID NO: 40305 - RNA, 32 nt, Homo Sapiens
aauacaacacaucuaauuaaauguagacagau

SEQ ID NO: 40306 - RNA, 32 nt, Homo Sapiens
ugagccgccgcgcccagacaguucuuucguuu

SEQ ID NO: 40307 - RNA, 32 nt, Homo Sapiens
aaauguuggguucucagcacuuccagcccacc

SEQ ID NO: 40308 - RNA, 32 nt, Homo Sapiens
aggguccccuccccaaggcucagcucuaagac

SEQ ID NO: 40309 - RNA, 32 nt, Homo Sapiens
uaguuuguuccacaauuuuucauuucaugcuu

SEQ ID NO: 40310 - RNA, 32 nt, Homo Sapiens
ugguuuuuaaauuuuuugucaguuuaugugga

SEQ ID NO: 40311 - RNA, 28 nt, Homo Sapiens
aggaggggcugccauaggaugacaggau

SEQ ID NO: 40312 - RNA, 32 nt, Homo Sapiens
aaaaaagcguaccccaggccucaucucccaaa

SEQ ID NO: 40313 - RNA, 32 nt, Homo Sapiens
auacagcugucauggcguccaaggcgcuggcu

SEQ ID NO: 40314 - RNA, 32 nt, Homo Sapiens
cccuucuacgugaucugcaccuuuaagcucac

SEQ ID NO: 40315 - RNA, 32 nt, Homo Sapiens
uauugcauggggauuacuuuccuaucauccau

SEQ ID NO: 40316 - RNA, 32 nt, Homo Sapiens
ugagcaaaaugaauauuuggauccauguuccu

SEQ ID NO: 40317 - RNA, 32 nt, Homo Sapiens
aacagauuccuccuuauauugacuuagcaaag

SEQ ID NO: 40318 - RNA, 32 nt, Homo Sapiens
ucaaauauaugaucugcaaauauuuucuccca

SEQ ID NO: 40319 - RNA, 32 nt, Homo Sapiens
aggaguaaccuacuuggucuccugcuuucgcg

SEQ ID NO: 40320 - RNA, 32 nt, Homo Sapiens
ccuggggcccagcaugacguggaggcgcuggg

SEQ ID NO: 40321 - RNA, 32 nt, Homo Sapiens
cuucaaagcagauucucaccaugugucauccc

SEQ ID NO: 40322 - RNA, 32 nt, Homo Sapiens
gacaagaaguuccauuugaugucaauaaagca

SEQ ID NO: 40323 - RNA, 32 nt, Homo Sapiens
uaguucggauagcuuaguuuuaaaagacugau

SEQ ID NO: 40324 - RNA, 32 nt, Homo Sapiens
ucugacuaaaauuuuguuuuuuauuuuuugua

SEQ ID NO: 40325 - RNA, 32 nt, Homo Sapiens
uauccuggaagacacguggcgccuguggaccg

SEQ ID NO: 40326 - RNA, 32 nt, Homo Sapiens
augguuuugaugggcgaaagugugagaaaagg

SEQ ID NO: 40327 - RNA, 32 nt, Homo Sapiens
ugugggcagggccaugucccuuucuccucucc

SEQ ID NO: 40328 - RNA, 32 nt, Homo Sapiens
aggcgaagacccagccccucggcggcucagca

SEQ ID NO: 40329 - RNA, 32 nt, Homo Sapiens
ccuccgcgagccugcccggccccaagcacgga

SEQ ID NO: 40330 - RNA, 32 nt, Homo Sapiens
acgggaggcaucuggaaaaucuugagauaagc

SEQ ID NO: 40331 - RNA, 32 nt, Homo Sapiens
gccggcggcucuggucucggcugugagcugcg

SEQ ID NO: 40332 - RNA, 32 nt, Homo Sapiens
cacugcacuccagccuggguggacagagcaag

SEQ ID NO: 40333 - RNA, 32 nt, Homo Sapiens
guuaugccuuccaagaggaacuucagacacaa

SEQ ID NO: 40334 - RNA, 32 nt, Homo Sapiens
ccaagucauuucaaauacaugaaaaaucuuac

SEQ ID NO: 40335 - RNA, 32 nt, Homo Sapiens
uaggcuugugguuuuuuuaauuuaaagauauu

SEQ ID NO: 40336 - RNA, 32 nt, Homo Sapiens
gauuaagagauuaaagacaggcauaagaaauu

SEQ ID NO: 40337 - RNA, 32 nt, Homo Sapiens
uguauguucuuuguaucccuuaccacaaauau

SEQ ID NO: 40338 - RNA, 32 nt, Homo Sapiens
gaauaaauauauauuuaaguacaguuuucaug

SEQ ID NO: 40339 - RNA, 32 nt, Homo Sapiens
accaguuuccugguagggaacugcugacaguu

SEQ ID NO: 40340 - RNA, 32 nt, Homo Sapiens
caaugagggcuuucuugggucagaggacuuca

SEQ ID NO: 40341 - RNA, 31 nt, Homo Sapiens
cuugcauuauuauuagguucagugugaaacu

SEQ ID NO: 40342 - RNA, 32 nt, Homo Sapiens
acuucucaucuuaaaaauauugucauguuuau

SEQ ID NO: 40343 - RNA, 32 nt, Homo Sapiens
gguaaagauaaaauuugauacagguuuggugu

SEQ ID NO: 40344 - RNA, 32 nt, Homo Sapiens
uguaauugauguacauaccgcaaaccgugugu

SEQ ID NO: 40345 - RNA, 32 nt, Homo Sapiens
uaaagguggaauugucaguuuagauucauaaa

SEQ ID NO: 40346 - RNA, 32 nt, Homo Sapiens
cuggccuuggcuuuucggggcccuggggcauc

SEQ ID NO: 40347 - RNA, 32 nt, Homo Sapiens
cauccccgccccagccucccucuuaccccaga

SEQ ID NO: 40348 - RNA, 32 nt, Homo Sapiens
cccaacccaucccuuuauuucagcccaucccu

SEQ ID NO: 40349 - RNA, 32 nt, Homo Sapiens
aauacaaguaaaauauauagguauagguagau

SEQ ID NO: 40350 - RNA, 32 nt, Homo Sapiens
uuuggcauuuuacuguacagacagaaaaaacu

SEQ ID NO: 40351 - RNA, 32 nt, Homo Sapiens
ucccaggcccuccugaggucugugucacgggc

SEQ ID NO: 40352 - RNA, 32 nt, Homo Sapiens
caauaugcuaaaaaaugcuuguccccuauaug

SEQ ID NO: 40353 - RNA, 32 nt, Homo Sapiens
gagagcccaagcccgccaccucuggccugagg

SEQ ID NO: 40354 - RNA, 32 nt, Homo Sapiens
uuuucuuuucuuuguucccauuuauccaaaua

SEQ ID NO: 40355 - RNA, 32 nt, Homo Sapiens
aacauuguaugauaaccugaaauguuuacuug

SEQ ID NO: 40356 - RNA, 32 nt, Homo Sapiens
uagcuucuuguauguccacuggauaguaacag

SEQ ID NO: 40357 - RNA, 32 nt, Homo Sapiens
accaaugugaggaaaaccuaaagggaaauuaa

SEQ ID NO: 40358 - RNA, 32 nt, Homo Sapiens
cuuuguauaauuuuugauaucaugaucacagg

SEQ ID NO: 40359 - RNA, 32 nt, Homo Sapiens
gggaagaaaagagcuuucuucccgaaccccaa

SEQ ID NO: 40360 - RNA, 32 nt, Homo Sapiens
ggcucagaaguccugaugugggagaggugcgg

SEQ ID NO: 40361 - RNA, 32 nt, Homo Sapiens
uuucucuuccuuaggauuuucuuaauaauaug

SEQ ID NO: 40362 - RNA, 32 nt, Homo Sapiens
acauggcaggagacagucagaccagcagugaa

SEQ ID NO: 40363 - RNA, 32 nt, Homo Sapiens
agccauccuggcagauguaaggugauauuuca

SEQ ID NO: 40364 - RNA, 32 nt, Homo Sapiens
uaucagccagaucaccccaggaccccucuacu

SEQ ID NO: 40365 - RNA, 32 nt, Homo Sapiens
ccgcucuguggccuugcccuguaaucacucag

SEQ ID NO: 40366 - RNA, 32 nt, Homo Sapiens
aacauacauuuuacugaaauguugcuccauca

SEQ ID NO: 40367 - RNA, 32 nt, Homo Sapiens
ucacuugccuucuugcauucugggucccagcc

SEQ ID NO: 40368 - RNA, 32 nt, Homo Sapiens
ggauccgaauucgcggccgcgucgacuggaga

SEQ ID NO: 40369 - RNA, 32 nt, Homo Sapiens
aagucaggacaucagucugauuaaagguggug

SEQ ID NO: 40370 - RNA, 32 nt, Homo Sapiens
gaacauccuuuuugacagaaauccuaugcagc

SEQ ID NO: 40371 - RNA, 32 nt, Homo Sapiens
uccacuuugacaaaagauacgcccuucucccu

SEQ ID NO: 40372 - RNA, 32 nt, Homo Sapiens
ugguaacuucguauguucaguuuaugcgauga

SEQ ID NO: 40373 - RNA, 32 nt, Homo Sapiens
gaaaggguucaugcacacacgugugagaaugg

SEQ ID NO: 40374 - RNA, 32 nt, Homo Sapiens
guuuccucuaaagauagaggugguaauaauuc

SEQ ID NO: 40375 - RNA, 32 nt, Homo Sapiens
cuuaaauaaaauuuauaauugaaaaaaaaaaa

SEQ ID NO: 40376 - RNA, 32 nt, Homo Sapiens
gugauucucgccugcuuucucaucucagggga

SEQ ID NO: 40377 - RNA, 32 nt, Homo Sapiens
gagguuguaaggugguuuuucuuguuuugguu

SEQ ID NO: 40378 - RNA, 32 nt, Homo Sapiens
aagaccugggugcagggaaaagaaagagagau

SEQ ID NO: 40379 - RNA, 32 nt, Homo Sapiens
ggaaguagguagucugcacggcucugcuagag

SEQ ID NO: 40380 - RNA, 32 nt, Homo Sapiens
ugucucaucuucucaugccaucuaguucuucc

SEQ ID NO: 40381 - RNA, 32 nt, Homo Sapiens
gcaauaauauuuuuuacauccagcucuuuaag

SEQ ID NO: 40382 - RNA, 32 nt, Homo Sapiens
gggggacagccccucguguccagaaccuucca

SEQ ID NO: 40383 - RNA, 32 nt, Homo Sapiens
uccuggauuugugaaugacguacagguauuca

SEQ ID NO: 40384 - RNA, 32 nt, Homo Sapiens
cauuuucaaaacuacauuucauuaaguuaaau

SEQ ID NO: 40385 - RNA, 32 nt, Homo Sapiens
cauuucccacuacuguacuccccucauggccc

SEQ ID NO: 40386 - RNA, 29 nt, Homo Sapiens
uuuauaaugaagauuaaaaugaaggcuuu

SEQ ID NO: 40387 - RNA, 32 nt, Homo Sapiens
gccaggagguccugaggccucucugaaggaug

SEQ ID NO: 40388 - RNA, 32 nt, Homo Sapiens
ugagcccucacaguugucacacacccagcagu

SEQ ID NO: 40389 - RNA, 32 nt, Homo Sapiens
cguccauuuugagccuuggaaacuacgacgac

SEQ ID NO: 40390 - RNA, 32 nt, Homo Sapiens
cuccaggcugucuacagccccaaaaaagccaa

SEQ ID NO: 40391 - RNA, 32 nt, Homo Sapiens
cuuacagccccggaugcagauuuuagagggag

SEQ ID NO: 40392 - RNA, 32 nt, Homo Sapiens
agguggugaagcugcuggugggggccuacgac

SEQ ID NO: 40393 - RNA, 32 nt, Homo Sapiens
uauuaaaaaauggcuuuuuuuuuuuuuuggcc

SEQ ID NO: 40394 - RNA, 32 nt, Homo Sapiens
gaacacaucagagcuaucagugcuuuguacau

SEQ ID NO: 40395 - RNA, 32 nt, Homo Sapiens
ccaguaucaaguauuucuuuauagcaaugcaa

SEQ ID NO: 40396 - RNA, 32 nt, Homo Sapiens
ucucggggcuccagaagguggugcuggacguc

SEQ ID NO: 40397 - RNA, 32 nt, Homo Sapiens
ugauugcgucacuaagaggccuuguguagaag

SEQ ID NO: 40398 - RNA, 32 nt, Homo Sapiens
uuccaugcuauaauucuuauggcugcugaaau

SEQ ID NO: 40399 - RNA, 32 nt, Homo Sapiens
aauccagggcuuuggguuuugugcauggguag

SEQ ID NO: 40400 - RNA, 32 nt, Homo Sapiens
ugcaugguaauuuauaguuuauacaguuuuaa

SEQ ID NO: 40401 - RNA, 32 nt, Homo Sapiens
agggagagauacagcauagaaaaaaacaaggu

SEQ ID NO: 40402 - RNA, 32 nt, Homo Sapiens
aggaagagcaagcuguacaaagggaagcagag

SEQ ID NO: 40403 - RNA, 32 nt, Homo Sapiens
auugggcagaaucucaguguuuacuuucaauu

SEQ ID NO: 40404 - RNA, 32 nt, Homo Sapiens
gugagaaauugaucuguaaauaucugaaaaug

SEQ ID NO: 40405 - RNA, 32 nt, Homo Sapiens
aagaaaaugggcagucagaauuagggacuaga

SEQ ID NO: 40406 - RNA, 32 nt, Homo Sapiens
uuuugcuuucuauggcuucuccuuaacuuauu

SEQ ID NO: 40407 - RNA, 32 nt, Homo Sapiens
uccacuauuucugaguuuaauguguuuccaac

SEQ ID NO: 40408 - RNA, 32 nt, Homo Sapiens
uuaaccaaggaccaugggucagugcccagggc

SEQ ID NO: 40409 - RNA, 32 nt, Homo Sapiens
uuuaauauuauuauuauuguuuuugagacaag

SEQ ID NO: 40410 - RNA, 32 nt, Homo Sapiens
ggaucuuuggggggaccguuauucagccucuc

SEQ ID NO: 40411 - RNA, 32 nt, Homo Sapiens
gcugucauuuuucuuccauuauagugugagug

SEQ ID NO: 40412 - RNA, 32 nt, Homo Sapiens
gcauuuuuauuuccaauuaaagcaaagcacug

SEQ ID NO: 40413 - RNA, 32 nt, Homo Sapiens
auuaauuugacugugcaugacagcggcaaucu

SEQ ID NO: 40414 - RNA, 32 nt, Homo Sapiens
ugucugcugcgcacgcccccuccccggacagc

SEQ ID NO: 40415 - RNA, 32 nt, Homo Sapiens
uuuucacaucuuuuguuuccuguucauuuuaa

SEQ ID NO: 40416 - RNA, 32 nt, Homo Sapiens
uccguggcgcccccuggagggaggaaggggaa

SEQ ID NO: 40417 - RNA, 32 nt, Homo Sapiens
aaaauuccaaacuuaugaggaauguuuauauc

SEQ ID NO: 40418 - RNA, 32 nt, Homo Sapiens
agcaucuuucuguaccuccucccuuuggugac

SEQ ID NO: 40419 - RNA, 32 nt, Homo Sapiens
uccugagcggguggaggaggcccaagcgugcu

SEQ ID NO: 40420 - RNA, 32 nt, Homo Sapiens
agauaccugcuaaagcuuuacucuguauuuuc

SEQ ID NO: 40421 - RNA, 32 nt, Homo Sapiens
acauccucucccugcgggaccgcggccucagc

SEQ ID NO: 40422 - RNA, 32 nt, Homo Sapiens
ccuggugcgcgagagcguauccccaacuggga

SEQ ID NO: 40423 - RNA, 32 nt, Homo Sapiens
caggggcacggcaacagcaucgauggguucug

SEQ ID NO: 40424 - RNA, 32 nt, Homo Sapiens
agacuucaauuuccaaagagaagaacuagcag

SEQ ID NO: 40425 - RNA, 32 nt, Homo Sapiens
uugaagugguucucaugcaaaaauauuacaca

SEQ ID NO: 40426 - RNA, 28 nt, Homo Sapiens
ugccuuuuuaguaaaaccauuuccaagc

SEQ ID NO: 40427 - RNA, 32 nt, Homo Sapiens
ggccugcucugccugccacuggccgagacaca

SEQ ID NO: 40428 - RNA, 32 nt, Homo Sapiens
ccaaagaaggucuggaacuccccucccucccu

SEQ ID NO: 40429 - RNA, 32 nt, Homo Sapiens
cacggggccccgaggcguucggaggccaggcg

SEQ ID NO: 40430 - RNA, 32 nt, Homo Sapiens
cuacacagcaggagggauggcuggggcucuug

SEQ ID NO: 40431 - RNA, 32 nt, Homo Sapiens
gaugaagccaaugggcgaugaauagacuuaca

SEQ ID NO: 40432 - RNA, 32 nt, Homo Sapiens
aaaccacuuacccaccagcugcacgugagaag

SEQ ID NO: 40433 - RNA, 32 nt, Homo Sapiens
uccuguggucuccgcaccucuccagcuccugc

SEQ ID NO: 40434 - RNA, 32 nt, Homo Sapiens
acgucaauauacaaccauuuggcacagcuucc

SEQ ID NO: 40435 - RNA, 32 nt, Homo Sapiens
cacuuguguauauauguacauacagacauacu

SEQ ID NO: 40436 - RNA, 32 nt, Homo Sapiens
cuuaacuuauuuuaagaggccgagggagucua

SEQ ID NO: 40437 - RNA, 32 nt, Homo Sapiens
gcugcucuuuuggagacaacaaacugcauuaa

SEQ ID NO: 40438 - RNA, 29 nt, Homo Sapiens
agagaugcugaugccgguccacuuccugc

SEQ ID NO: 40439 - RNA, 32 nt, Homo Sapiens
uuuaucccauuuauuucuuuaaaaaauguaag

SEQ ID NO: 40440 - RNA, 32 nt, Homo Sapiens
uagacacaggcacuucucuccacagccugcua

SEQ ID NO: 40441 - RNA, 32 nt, Homo Sapiens
ccaugaaaccauucuucagacaucagucaaug

SEQ ID NO: 40442 - RNA, 32 nt, Homo Sapiens
uuacugguacuuuacgcuuugauuccaagaag

SEQ ID NO: 40443 - RNA, 32 nt, Homo Sapiens
ggcuuucagcuguuugcgcgucucucuguccc

SEQ ID NO: 40444 - RNA, 32 nt, Homo Sapiens
gaggggcagacuggcucuggccucaggugggg

SEQ ID NO: 40445 - RNA, 32 nt, Homo Sapiens
ucccugaccccuucuugccaucgccccagaca

SEQ ID NO: 40446 - RNA, 32 nt, Homo Sapiens
gugugagcugccuggaauacaugugguaauga

SEQ ID NO: 40447 - RNA, 32 nt, Homo Sapiens
gggagcgccggggcccugggcugcaggagguu

SEQ ID NO: 40448 - RNA, 32 nt, Homo Sapiens
cagcacugaaugagcaggcagcucccaccucc

SEQ ID NO: 40449 - RNA, 32 nt, Homo Sapiens
agaaauaaauuugucuugaagaucucaaaaaa

SEQ ID NO: 40450 - RNA, 32 nt, Homo Sapiens
uauuucauuuuggucuuaaugcuuuguaaaca

SEQ ID NO: 40451 - RNA, 30 nt, Homo Sapiens
ucauuguuguuuuugggggaaggggcauau

SEQ ID NO: 40452 - RNA, 32 nt, Homo Sapiens
cuuuuaugaaaugagucucuguguuacugggu

SEQ ID NO: 40453 - RNA, 32 nt, Homo Sapiens
cuuuuuauuuuugugacuugugagauaguuua

SEQ ID NO: 40454 - RNA, 32 nt, Homo Sapiens
uugagaaaagccgagcggccgcggcggcggcg

SEQ ID NO: 40455 - RNA, 32 nt, Homo Sapiens
uuaugacugucaaugccguuacuuuaaauguu

SEQ ID NO: 40456 - RNA, 32 nt, Homo Sapiens
uauccuaaucccaaugcugaaguaagauuguc

SEQ ID NO: 40457 - RNA, 32 nt, Homo Sapiens
gaagcuccuccccugagacaagugagggguag

SEQ ID NO: 40458 - RNA, 32 nt, Homo Sapiens
gcggggcguucucccaccuguagcgacucaga

SEQ ID NO: 40459 - RNA, 32 nt, Homo Sapiens
acuggaaucauucgggcccagcaaagcaguac

SEQ ID NO: 40460 - RNA, 32 nt, Homo Sapiens
cacacacauaugcacacacacacacacacacc

SEQ ID NO: 40461 - RNA, 32 nt, Homo Sapiens
ccaccggcuccgacgcgcaaccccgcucagca

SEQ ID NO: 40462 - RNA, 32 nt, Homo Sapiens
cugcucagaccucucagcccagcccucuguga

SEQ ID NO: 40463 - RNA, 32 nt, Homo Sapiens
ugaccuucuucaaaucuuuguauuucaaagaa

SEQ ID NO: 40464 - RNA, 32 nt, Homo Sapiens
auuggagaguucugaggccggaguaacugugu

SEQ ID NO: 40465 - RNA, 32 nt, Homo Sapiens
gucgaaagggaagacauaagagacucuauuuu

SEQ ID NO: 40466 - RNA, 32 nt, Homo Sapiens
gaguuuauacccuccccuuguuuucuugcuuu

SEQ ID NO: 40467 - RNA, 32 nt, Homo Sapiens
ucagaccucaugcccucuuccuccucuuuccu

SEQ ID NO: 40468 - RNA, 32 nt, Homo Sapiens
cugucuggaagacauguccccguggcuguggg

SEQ ID NO: 40469 - RNA, 32 nt, Homo Sapiens
accauuggaaaacagcaucccucauccuugac

SEQ ID NO: 40470 - RNA, 32 nt, Homo Sapiens
aaaccacagaaaauauuuccaaggcugucugu

SEQ ID NO: 40471 - RNA, 32 nt, Homo Sapiens
caccucuccaagcccuccuaccuaccaagaua

SEQ ID NO: 40472 - RNA, 32 nt, Homo Sapiens
ggacugagggugggaucgcagcuccgaagacg

SEQ ID NO: 40473 - RNA, 32 nt, Homo Sapiens
ccagagugagagauacgccaagaaggagaacc

SEQ ID NO: 40474 - RNA, 32 nt, Homo Sapiens
auuuaguaauaugaauauaaaucuuguaacuu

SEQ ID NO: 40475 - RNA, 32 nt, Homo Sapiens
uucagagucagucauugguuauacauguguag

SEQ ID NO: 40476 - RNA, 32 nt, Homo Sapiens
aaaaacuggucuuuuuauuuacccucuguggu

SEQ ID NO: 40477 - RNA, 32 nt, Homo Sapiens
gcaaagcuaugauauaaacugcucuugcaguc

SEQ ID NO: 40478 - RNA, 32 nt, Homo Sapiens
uaagaaugcuaaacagaauugaaaauuauauc

SEQ ID NO: 40479 - RNA, 32 nt, Homo Sapiens
ugcaaggaaaauuaggguacucaaccuaaguu

SEQ ID NO: 40480 - RNA, 32 nt, Homo Sapiens
caggggcggccauggcggcggcagccagggag

SEQ ID NO: 40481 - RNA, 32 nt, Homo Sapiens
ggacaagugcaacagucaggcugcugauuccu

SEQ ID NO: 40482 - RNA, 32 nt, Homo Sapiens
gggaggugaacaugccugauuuuugugggaca

SEQ ID NO: 40483 - RNA, 32 nt, Homo Sapiens
agcucuucugagauggccccagugaaccagcu

SEQ ID NO: 40484 - RNA, 32 nt, Homo Sapiens
cguggcccccugacgggccgcggccgccucca

SEQ ID NO: 40485 - RNA, 32 nt, Homo Sapiens
gcacaucaaacacaggagucgagagaggcagu

SEQ ID NO: 40486 - RNA, 32 nt, Homo Sapiens
cugggaacccaugaaauugacccccaaauaca

SEQ ID NO: 40487 - RNA, 32 nt, Homo Sapiens
uguucguuccugaccuucuccuuauuaucacc

SEQ ID NO: 40488 - RNA, 32 nt, Homo Sapiens
gaguuaaaugacuucaucuuguguacuuguag

SEQ ID NO: 40489 - RNA, 32 nt, Homo Sapiens
auaccaagcucuucguguuugcugcuggagug

SEQ ID NO: 40490 - RNA, 32 nt, Homo Sapiens
cgacguccgccgcgaaccugggccccccaaag

SEQ ID NO: 40491 - RNA, 32 nt, Homo Sapiens
gcuuacuaacugugguuugcacccuaacacuc

SEQ ID NO: 40492 - RNA, 32 nt, Homo Sapiens
uuuaucuuagauguaggcaaccaugaacaauc

SEQ ID NO: 40493 - RNA, 32 nt, Homo Sapiens
cucccggccuugccggcccaauaaaggacuuc

SEQ ID NO: 40494 - RNA, 32 nt, Homo Sapiens
ugagaaacaccucggcuguggucucucugcuu

SEQ ID NO: 40495 - RNA, 32 nt, Homo Sapiens
uuggaugauuugcgguugcuuagaauaaaacu

SEQ ID NO: 40496 - RNA, 32 nt, Homo Sapiens
auuacaaauuauuaauacagguaaauguuuua

SEQ ID NO: 40497 - RNA, 32 nt, Homo Sapiens
uuucucuuccuugccuggacugccuuugacaa

SEQ ID NO: 40498 - RNA, 32 nt, Homo Sapiens
uagcacaauuuugugccauuucugggagcauu

SEQ ID NO: 40499 - RNA, 32 nt, Homo Sapiens
agugauguuguaaucuaaacaagugccuuaug

SEQ ID NO: 40500 - RNA, 32 nt, Homo Sapiens
uuucugaaacuucuaagaaaucugaaaugagu

SEQ ID NO: 40501 - RNA, 32 nt, Homo Sapiens
gcggagucuccauuuucagcagcgccauauuc

SEQ ID NO: 40502 - RNA, 32 nt, Homo Sapiens
cugccugccugccugcuguccugggcauggug

SEQ ID NO: 40503 - RNA, 32 nt, Homo Sapiens
caggguaggaccacgugccaucucacacagag

SEQ ID NO: 40504 - RNA, 32 nt, Homo Sapiens
ugccuggcuuuguuuacaaacauauaucuaua

SEQ ID NO: 40505 - RNA, 32 nt, Homo Sapiens
uacuuugggcuuugaaggccacauaugucucu

SEQ ID NO: 40506 - RNA, 32 nt, Homo Sapiens
aucccgcugugggucugagauggccugggaag

SEQ ID NO: 40507 - RNA, 32 nt, Homo Sapiens
aagggagacagaguugcaggucaccuccccua

SEQ ID NO: 40508 - RNA, 32 nt, Homo Sapiens
uuuauuuuucccauucccuuccuuuaucugca

SEQ ID NO: 40509 - RNA, 32 nt, Homo Sapiens
aauuucccuccaccacccccucaaauccaguc

SEQ ID NO: 40510 - RNA, 32 nt, Homo Sapiens
uagguccuggguuucauguuuccugcugcucu

SEQ ID NO: 40511 - RNA, 32 nt, Homo Sapiens
aucagcguuuagucaccuccagguuauaugca

SEQ ID NO: 40512 - RNA, 32 nt, Homo Sapiens
ggauggagaccugagcuggagaaggagaugcg

SEQ ID NO: 40513 - RNA, 32 nt, Homo Sapiens
augaggcccugccuggucucgucugggaccug

SEQ ID NO: 40514 - RNA, 32 nt, Homo Sapiens
uugccacggagauguagaagauauuacaagcu

SEQ ID NO: 40515 - RNA, 32 nt, Homo Sapiens
aaggugcaggagaggaggugggcaagcuuaug

SEQ ID NO: 40516 - RNA, 32 nt, Homo Sapiens
cauuuaagucaucuuaaggugaaaaguuauug

SEQ ID NO: 40517 - RNA, 32 nt, Homo Sapiens
guacaauguuuucacauauauaguuucauuua

SEQ ID NO: 40518 - RNA, 32 nt, Homo Sapiens
agccaggaggagaggaaaggacauggguagca

SEQ ID NO: 40519 - RNA, 32 nt, Homo Sapiens
aaagagaugauuauuauaagcauaaugucaga

SEQ ID NO: 40520 - RNA, 32 nt, Homo Sapiens
guuacucauguacauuggucuuucuacauagu

SEQ ID NO: 40521 - RNA, 32 nt, Homo Sapiens
cccagccuggugccggcugacagcucacugga

SEQ ID NO: 40522 - RNA, 32 nt, Homo Sapiens
aaggguuuuuacaaagaacgugucucacuagg

SEQ ID NO: 40523 - RNA, 32 nt, Homo Sapiens
agaggcuggaggggcucugugacucccauuaa

SEQ ID NO: 40524 - RNA, 32 nt, Homo Sapiens
gcuguguacuucacaaggauagaguggaguug

SEQ ID NO: 40525 - RNA, 32 nt, Homo Sapiens
augccuuuaaugaaagccagcaauuaucccau

SEQ ID NO: 40526 - RNA, 32 nt, Homo Sapiens
auguuccaugcugcugacgucacauggagcac

SEQ ID NO: 40527 - RNA, 32 nt, Homo Sapiens
uuugaaaacaauuguauagauuucacaacaca

SEQ ID NO: 40528 - RNA, 32 nt, Homo Sapiens
ugcaugauggaaaaauuuuaauuuguagccau

SEQ ID NO: 40529 - RNA, 32 nt, Homo Sapiens
uuucucuggccaguggccuuggaccggcugga

SEQ ID NO: 40530 - RNA, 32 nt, Homo Sapiens
guuucuuuugcucucauagaaauaacuuuuua

SEQ ID NO: 40531 - RNA, 32 nt, Homo Sapiens
caccaauuacguagcaggccauggcucauggg

SEQ ID NO: 40532 - RNA, 32 nt, Homo Sapiens
agucauugauuaaaaugucacuuguaaggugc

SEQ ID NO: 40533 - RNA, 32 nt, Homo Sapiens
caugguauagcuugcuuggcguuugacuuaga

SEQ ID NO: 40534 - RNA, 32 nt, Homo Sapiens
caggagccucugcaugaggcggacguauaagu

SEQ ID NO: 40535 - RNA, 32 nt, Homo Sapiens
guuuauauuugcuuuuccuguuuuguaaccuc

SEQ ID NO: 40536 - RNA, 32 nt, Homo Sapiens
guugaggaauaauucagugggucaaaaugggg

SEQ ID NO: 40537 - RNA, 32 nt, Homo Sapiens
agaugcacagcacuuccuuguccucaugaaag

SEQ ID NO: 40538 - RNA, 32 nt, Homo Sapiens
ggacuuacugaauuaaaacuuuagagccgagc

SEQ ID NO: 40539 - RNA, 32 nt, Homo Sapiens
ccuccaggaccaggggcccacccucugcccag

SEQ ID NO: 40540 - RNA, 32 nt, Homo Sapiens
ggagagauguuaccaaagguacaggauuugag

SEQ ID NO: 40541 - RNA, 32 nt, Homo Sapiens
cucaucaggucauuauuuuuuacaauggccau

SEQ ID NO: 40542 - RNA, 27 nt, Homo Sapiens
ucaugcucccuccuccucgauacagaa

SEQ ID NO: 40543 - RNA, 32 nt, Homo Sapiens
agagugagggaagaggaagcuggaacgagggu

SEQ ID NO: 40544 - RNA, 32 nt, Homo Sapiens
ugggaaagugggggcugcuaccucacuacuuu

SEQ ID NO: 40545 - RNA, 32 nt, Homo Sapiens
ccccguccucuguccguaccgcccccggagcc

SEQ ID NO: 40546 - RNA, 32 nt, Homo Sapiens
ggcgggaccccgcagcagccccggccccaucc

SEQ ID NO: 40547 - RNA, 32 nt, Homo Sapiens
cagcacguucuuucucucuuuuggccucuguu

SEQ ID NO: 40548 - RNA, 32 nt, Homo Sapiens
ugauaaugucauugguauaugguggcuguuua

SEQ ID NO: 40549 - RNA, 32 nt, Homo Sapiens
ccaccccucuccucugcccacccgagccccag

SEQ ID NO: 40550 - RNA, 32 nt, Homo Sapiens
ccgcgguguccgcuucgccggugggagaggau

SEQ ID NO: 40551 - RNA, 32 nt, Homo Sapiens
uuagauucaaauuuauaguagaagaaaaaaaa

SEQ ID NO: 40552 - RNA, 32 nt, Homo Sapiens
caggggcuucaugugucuuuuugcugcauuuu

SEQ ID NO: 40553 - RNA, 32 nt, Homo Sapiens
aaacuuaaaaacagugggaauauaggaaaggg

SEQ ID NO: 40554 - RNA, 32 nt, Homo Sapiens
augcgccaugaaguacccuuugaugccgcugg

SEQ ID NO: 40555 - RNA, 32 nt, Homo Sapiens
acuuuagaugugugcucccuguuaucuacauu

SEQ ID NO: 40556 - RNA, 32 nt, Homo Sapiens
uuagaucgguccuaaauuggaaugggaugucu

SEQ ID NO: 40557 - RNA, 32 nt, Homo Sapiens
ugagguccugguuuuucuuguauaaauaggag

SEQ ID NO: 40558 - RNA, 32 nt, Homo Sapiens
aucacuggcgcaaaccacuaugcccaacuaau

SEQ ID NO: 40559 - RNA, 32 nt, Homo Sapiens
ggugcaggagacgcaggcauggccggugagcu

SEQ ID NO: 40560 - RNA, 32 nt, Homo Sapiens
ugccuuaaaaauugcuauuaauugaaauauca

SEQ ID NO: 40561 - RNA, 32 nt, Homo Sapiens
cuugcuuuuagguuagauacaaacaaaguaaa

SEQ ID NO: 40562 - RNA, 32 nt, Homo Sapiens
cacuuugugaugggcuucucucagcgguagcu

SEQ ID NO: 40563 - RNA, 32 nt, Homo Sapiens
cccccccguuugcucugggcaaaacuucgaga

SEQ ID NO: 40564 - RNA, 32 nt, Homo Sapiens
ugauugcaucauuaguuaauuauuuucuucau

SEQ ID NO: 40565 - RNA, 32 nt, Homo Sapiens
aagcccagggcccgcaaccccacacauuuugg

SEQ ID NO: 40566 - RNA, 32 nt, Homo Sapiens
cagaaacuaaguagcacaaucuguagaugagu

SEQ ID NO: 40567 - RNA, 32 nt, Homo Sapiens
cacaacugaagauaacaagagauuuaaguuuu

SEQ ID NO: 40568 - RNA, 32 nt, Homo Sapiens
cugcccugcauaauaaaauggcuaaucaggug

SEQ ID NO: 40569 - RNA, 32 nt, Homo Sapiens
guacaguacuuauguucccaaguagcaucauc

SEQ ID NO: 40570 - RNA, 32 nt, Homo Sapiens
caguuccacgguuuccugccucccugagaccc

SEQ ID NO: 40571 - RNA, 32 nt, Homo Sapiens
uaucuuuauagcaacacucauccuuaaccaac

SEQ ID NO: 40572 - RNA, 32 nt, Homo Sapiens
cauccccuugggcccugcuuccaggucucccu

SEQ ID NO: 40573 - RNA, 32 nt, Homo Sapiens
ucucgaugugcggccacaguccagccgguacc

SEQ ID NO: 40574 - RNA, 32 nt, Homo Sapiens
aaaaggggcgggacgcgccgcggucgggauga

SEQ ID NO: 40575 - RNA, 32 nt, Homo Sapiens
augcuucaaaaauugcuguguguugagcagca

SEQ ID NO: 40576 - RNA, 32 nt, Homo Sapiens
ggccaggcauggugacucauaccuguaauccc

SEQ ID NO: 40577 - RNA, 32 nt, Homo Sapiens
accacccugaucaaaacauagaaaccccaucu

SEQ ID NO: 40578 - RNA, 32 nt, Homo Sapiens
ggccggguauggugacucaugccuguaauccu

SEQ ID NO: 40579 - RNA, 32 nt, Homo Sapiens
ggcugggcauggugacucacgccuguaauccc

SEQ ID NO: 40580 - RNA, 32 nt, Homo Sapiens
gagacuuggcuaggcgcggcgcgaggcgggcg

SEQ ID NO: 40581 - RNA, 31 nt, Homo Sapiens
cugacgcggcacugcuguccuucccugaugu

SEQ ID NO: 40582 - RNA, 32 nt, Homo Sapiens
gggggcugacacccccaccucccucccggacg

SEQ ID NO: 40583 - RNA, 32 nt, Homo Sapiens
uauggagaacuaaaaguaugagcguuaggaca

SEQ ID NO: 40584 - RNA, 32 nt, Homo Sapiens
gugcaaaacgagacagaagagugagaagcaga

SEQ ID NO: 40585 - RNA, 32 nt, Homo Sapiens
acaauuuaaugagaaaaaguuuaaaauucuca

SEQ ID NO: 40586 - RNA, 32 nt, Homo Sapiens
aaaaaugaucauuguuuauuugaagcuugaaa

SEQ ID NO: 40587 - RNA, 32 nt, Homo Sapiens
auuuauuuuuauucucugcuuguugaaaacuc

SEQ ID NO: 40588 - RNA, 32 nt, Homo Sapiens
gagccucugggcggccccggggcgcgggcugu

SEQ ID NO: 40589 - RNA, 32 nt, Homo Sapiens
uaccuccggccgccccguggcagguguagaag

SEQ ID NO: 40590 - RNA, 32 nt, Homo Sapiens
uuaaaucugaagaugugaagggcacagaagug

SEQ ID NO: 40591 - RNA, 32 nt, Homo Sapiens
guuaguuucuauuuuaaaagauacaauaauau

SEQ ID NO: 40592 - RNA, 32 nt, Homo Sapiens
uagcucauuuuuauuuugauaaugaccucuaa

SEQ ID NO: 40593 - RNA, 32 nt, Homo Sapiens
ccccucagacugcggcucccugaggacggggc

SEQ ID NO: 40594 - RNA, 32 nt, Homo Sapiens
gcggacccaggcccucggccgccccgcgucau

SEQ ID NO: 40595 - RNA, 32 nt, Homo Sapiens
gaaauggcaacccccaggaccaugcacggcuc

SEQ ID NO: 40596 - RNA, 32 nt, Homo Sapiens
caagaggagaggagaagugcugagguugaugu

SEQ ID NO: 40597 - RNA, 32 nt, Homo Sapiens
auucauggguguaaacccuuuauaacuuagug

SEQ ID NO: 40598 - RNA, 32 nt, Homo Sapiens
uugaaaauucaaauuguagagaauuaugagac

SEQ ID NO: 40599 - RNA, 32 nt, Homo Sapiens
cuggcggagaugugaccgcgggcccggccggc

SEQ ID NO: 40600 - RNA, 32 nt, Homo Sapiens
gcucggcagacacgaaggucuacucaaggugu

SEQ ID NO: 40601 - RNA, 32 nt, Homo Sapiens
uuuauuguauuuuauagagcuuuucacuggaa

SEQ ID NO: 40602 - RNA, 32 nt, Homo Sapiens
uuuggagaggaccugauggcuuggacaucacu

SEQ ID NO: 40603 - RNA, 32 nt, Homo Sapiens
uuuugaguaugaacaaaguaaacuucaggguu

SEQ ID NO: 40604 - RNA, 32 nt, Homo Sapiens
gcuaucuccaguugaucauugggaugagcauc

SEQ ID NO: 40605 - RNA, 32 nt, Homo Sapiens
ggauaaacagugguuuuuguuuuguuuuguuu

SEQ ID NO: 40606 - RNA, 32 nt, Homo Sapiens
gagucucacucuguuacccaggcuagagugca

SEQ ID NO: 40607 - RNA, 32 nt, Homo Sapiens
uucaggugcuguccucuacccagcggccauuc

SEQ ID NO: 40608 - RNA, 32 nt, Homo Sapiens
guggaggccccuccccaagcagggagccuggg

SEQ ID NO: 40609 - RNA, 32 nt, Homo Sapiens
augggugauggugauccagaggccauggaaga

SEQ ID NO: 40610 - RNA, 32 nt, Homo Sapiens
uagaugcugagaugaaucgucaccuguguguu

SEQ ID NO: 40611 - RNA, 32 nt, Homo Sapiens
aauauuauuaggauguggacaugcuauuaggg

SEQ ID NO: 40612 - RNA, 28 nt, Homo Sapiens
cgggggagaggauggcagagacuuuauu

SEQ ID NO: 40613 - RNA, 32 nt, Homo Sapiens
aggugguccuggcgcucacgcugcugcgcuuc

SEQ ID NO: 40614 - RNA, 32 nt, Homo Sapiens
gagguagugucuagaauuguucuccuguuugu

SEQ ID NO: 40615 - RNA, 32 nt, Homo Sapiens
ccggcccggcgcccaccugagcggaucaugug

SEQ ID NO: 40616 - RNA, 32 nt, Homo Sapiens
ugacucacagagcugcagagccaggcuggguc

SEQ ID NO: 40617 - RNA, 32 nt, Homo Sapiens
gagagcucauuucaaaagcagaaaaagacaac

SEQ ID NO: 40618 - RNA, 32 nt, Homo Sapiens
gacucucauacacaaguucaguuagauaacaa

SEQ ID NO: 40619 - RNA, 32 nt, Homo Sapiens
cgcgguagugauauaugcaaccccagucuacu

SEQ ID NO: 40620 - RNA, 32 nt, Homo Sapiens
cugagcugaguuugaggccguccccgacuccu

SEQ ID NO: 40621 - RNA, 32 nt, Homo Sapiens
cggagucugugcuacaccguggagcggggcgg

SEQ ID NO: 40622 - RNA, 32 nt, Homo Sapiens
cucgccccgcauguacuccccguacugccuca

SEQ ID NO: 40623 - RNA, 31 nt, Homo Sapiens
uggcuuauuuggcaggugccaaauauacggg

SEQ ID NO: 40624 - RNA, 32 nt, Homo Sapiens
uccugaaguugugaugcucaugcugaaauuua

SEQ ID NO: 40625 - RNA, 32 nt, Homo Sapiens
ucccucuccccaggagccccagccccagagug

SEQ ID NO: 40626 - RNA, 32 nt, Homo Sapiens
ggggcugcugaauaaagccaugucucauuuac

SEQ ID NO: 40627 - RNA, 32 nt, Homo Sapiens
caccccggcccgaccccgacccggcccgguca

SEQ ID NO: 40628 - RNA, 32 nt, Homo Sapiens
agccauuuaucuucuuuguuuacacacacacc

SEQ ID NO: 40629 - RNA, 32 nt, Homo Sapiens
ccgaaccgccuggcucugccggcgcccuccuc

SEQ ID NO: 40630 - RNA, 32 nt, Homo Sapiens
agcgucuuucuuugcccuuccagcuucuagaa

SEQ ID NO: 40631 - RNA, 32 nt, Homo Sapiens
cagaggaugagcuagggugcacagggggagua

SEQ ID NO: 40632 - RNA, 32 nt, Homo Sapiens
gaugaggcccgcggccguggcuccggcgucgg

SEQ ID NO: 40633 - RNA, 32 nt, Homo Sapiens
aacacaagugagccaguccugguucuucccuc

SEQ ID NO: 40634 - RNA, 32 nt, Homo Sapiens
gggcaggggcagccuuccugguuuaucuccac

SEQ ID NO: 40635 - RNA, 32 nt, Homo Sapiens
uaaacaguugaugggguaucucuugauuaggg

SEQ ID NO: 40636 - RNA, 32 nt, Homo Sapiens
gcauuuauauaauuuuccuguuuaacaacaag

SEQ ID NO: 40637 - RNA, 32 nt, Homo Sapiens
cucacggguggcccugcccaccccuggcacaa

SEQ ID NO: 40638 - RNA, 32 nt, Homo Sapiens
ccagccuugcgcgucgucgcuaccuccucgga

SEQ ID NO: 40639 - RNA, 32 nt, Homo Sapiens
uauaguugcuaauucuaaagcugcuucagacu

SEQ ID NO: 40640 - RNA, 32 nt, Homo Sapiens
ccugcagcuccuggcuauguccugcuuuccuu

SEQ ID NO: 40641 - RNA, 32 nt, Homo Sapiens
uucucuugccucaaccucccaagcaguuggga

SEQ ID NO: 40642 - RNA, 32 nt, Homo Sapiens
guaagaugggugcugagaagugagucagggca

SEQ ID NO: 40643 - RNA, 32 nt, Homo Sapiens
cgccccgggucacgacggcgcccgcaagccga

SEQ ID NO: 40644 - RNA, 32 nt, Homo Sapiens
uccgguggugcucgggccgccgcagugcagcg

SEQ ID NO: 40645 - RNA, 32 nt, Homo Sapiens
gccacugccgucaccucucccuccucagcucc

SEQ ID NO: 40646 - RNA, 32 nt, Homo Sapiens
gacugcaacaaauguagaugguucuguccuca

SEQ ID NO: 40647 - RNA, 32 nt, Homo Sapiens
uuaaaauauagcacaauugaaaaaauaaaaug

SEQ ID NO: 40648 - RNA, 32 nt, Homo Sapiens
gaguggacauauauuugcguuucucuugagug

SEQ ID NO: 40649 - RNA, 32 nt, Homo Sapiens
gagaacggaaagcugaggugacugcuccgggg

SEQ ID NO: 40650 - RNA, 32 nt, Homo Sapiens
cuuugaaaaaagacacagagaauaaacuccua

SEQ ID NO: 40651 - RNA, 32 nt, Homo Sapiens
auucuagggcagaaagaaguacaggauaggaa

SEQ ID NO: 40652 - RNA, 32 nt, Homo Sapiens
uuauuagcauuuccugauauuccuuuguccau

SEQ ID NO: 40653 - RNA, 32 nt, Homo Sapiens
augcaauuuggcaaaaguaguaaaaugaucuu

SEQ ID NO: 40654 - RNA, 32 nt, Homo Sapiens
uuuacagugcaucagauacauuuuauauuucu

SEQ ID NO: 40655 - RNA, 32 nt, Homo Sapiens
cccugccaggcugggagggaauugucccugcc

SEQ ID NO: 40656 - RNA, 32 nt, Homo Sapiens
agcuggggagggccgggcgcgccggccggaua

SEQ ID NO: 40657 - RNA, 32 nt, Homo Sapiens
aaaguugaugauuucuuuuuuaucuuuaugcc

SEQ ID NO: 40658 - RNA, 32 nt, Homo Sapiens
ugauuucugggguuggauuggugcugccccag

SEQ ID NO: 40659 - RNA, 32 nt, Homo Sapiens
cuuugcaucuucuccaggcccuggacuuccuc

SEQ ID NO: 40660 - RNA, 32 nt, Homo Sapiens
agacccuacaaugaaauguucauugguuggua

SEQ ID NO: 40661 - RNA, 32 nt, Homo Sapiens
gcaaaaccuaccuuccucucucccgccucccc

SEQ ID NO: 40662 - RNA, 32 nt, Homo Sapiens
gacaaaugucuugaaguagacauggaauuuau

SEQ ID NO: 40663 - RNA, 32 nt, Homo Sapiens
ucccuauaaagccugaugugguggagagauuu

SEQ ID NO: 40664 - RNA, 32 nt, Homo Sapiens
aauucuuaauaaacaauuuauacugaagagaa

SEQ ID NO: 40665 - RNA, 32 nt, Homo Sapiens
aaccugauaauuauuuacauguuuauuacugu

SEQ ID NO: 40666 - RNA, 32 nt, Homo Sapiens
uccugggaagacuguacagacauacguauucg

SEQ ID NO: 40667 - RNA, 32 nt, Homo Sapiens
guuugucaaggaugaacuuaugagcaaacuac

SEQ ID NO: 40668 - RNA, 32 nt, Homo Sapiens
ugugcacaugcgcacgcgcaugcacgcacaca

SEQ ID NO: 40669 - RNA, 32 nt, Homo Sapiens
uuucucugcucuuguuucacuccaccaucacu

SEQ ID NO: 40670 - RNA, 32 nt, Homo Sapiens
cagaauccucuggccucuggcuuuucuugaua

SEQ ID NO: 40671 - RNA, 32 nt, Homo Sapiens
uaaauaaaaaaauuaaaaauugaaaaaaaaaa

SEQ ID NO: 40672 - RNA, 32 nt, Homo Sapiens
aggucuauuugucucccuguuacacugugagc

SEQ ID NO: 40673 - RNA, 32 nt, Homo Sapiens
guaccucccuccccuccccuccagcauggugc

SEQ ID NO: 40674 - RNA, 32 nt, Homo Sapiens
cccgggaccgccagcucuguccgcugcccaca

SEQ ID NO: 40675 - RNA, 32 nt, Homo Sapiens
aggucugguucuuacuucuccuaaaggcccag

SEQ ID NO: 40676 - RNA, 32 nt, Homo Sapiens
aaacuuuggccauaguuaauaacauuaacacu

SEQ ID NO: 40677 - RNA, 32 nt, Homo Sapiens
gacacuuagagaaaaaggaagguuuauucuug

SEQ ID NO: 40678 - RNA, 32 nt, Homo Sapiens
auuguaauuuuguuccuguuuauuuuuaaauu

SEQ ID NO: 40679 - RNA, 32 nt, Homo Sapiens
cucccgaggagcucaaggaccugccugucagg

SEQ ID NO: 40680 - RNA, 32 nt, Homo Sapiens
gucuggggccgcgagggugcggcuuccaagcu

SEQ ID NO: 40681 - RNA, 32 nt, Homo Sapiens
uagucaggcaugguggugggcgccuguaaucc

SEQ ID NO: 40682 - RNA, 32 nt, Homo Sapiens
uuuuagaaaugggaaaacugaggcccgaaggc

SEQ ID NO: 40683 - RNA, 32 nt, Homo Sapiens
ugauaauacucuuuagauugugcuuucauuau

SEQ ID NO: 40684 - RNA, 30 nt, Homo Sapiens
agucgguggggcggggacgcgaggugugga

SEQ ID NO: 40685 - RNA, 32 nt, Homo Sapiens
agauaaugaagauaaagacaaugucaauguca

SEQ ID NO: 40686 - RNA, 32 nt, Homo Sapiens
uccagcugacucagccaguguaagcagccuga

SEQ ID NO: 40687 - RNA, 29 nt, Homo Sapiens
accuucuugaagauucuuacuaguuucca

SEQ ID NO: 40688 - RNA, 32 nt, Homo Sapiens
cauggcugguggaaaaucacgauuguggcuug

SEQ ID NO: 40689 - RNA, 32 nt, Homo Sapiens
cgggccaugggagccggccgccggcagggacg

SEQ ID NO: 40690 - RNA, 32 nt, Homo Sapiens
aaucaagauguuuuguuuaaauuugcuaaugu

SEQ ID NO: 40691 - RNA, 32 nt, Homo Sapiens
ugaaauuuuuaaaaauacacuugugauuauaa

SEQ ID NO: 40692 - RNA, 32 nt, Homo Sapiens
gaaggaccgggaagaugaacaacggcggcaaa

SEQ ID NO: 40693 - RNA, 32 nt, Homo Sapiens
ucccggcgcccgaccgcccacccaucggcccg

SEQ ID NO: 40694 - RNA, 32 nt, Homo Sapiens
cgagugggccgcggaugcagcggccgggggag

SEQ ID NO: 40695 - RNA, 32 nt, Homo Sapiens
cuccuauaaagaaaacaaaaaaagguagugaa

SEQ ID NO: 40696 - RNA, 32 nt, Homo Sapiens
cucaccugcccgcuccaccaccucuggccucg

SEQ ID NO: 40697 - RNA, 32 nt, Homo Sapiens
aauuaccuuggguuuuuuuuuauugguguuuu

SEQ ID NO: 40698 - RNA, 32 nt, Homo Sapiens
acagaggcccccagcccugugccccgcuggau

SEQ ID NO: 40699 - RNA, 32 nt, Homo Sapiens
gugggcccgcggcuaucauggacuuccagaaa

SEQ ID NO: 40700 - RNA, 32 nt, Homo Sapiens
ccacacaaagauugacaguaagaugcuugaga

SEQ ID NO: 40701 - RNA, 32 nt, Homo Sapiens
auacaugggaaguggaggaaaugcuggacaag

SEQ ID NO: 40702 - RNA, 32 nt, Homo Sapiens
cccaccucuccauggccugccuagccaggcug

SEQ ID NO: 40703 - RNA, 32 nt, Homo Sapiens
ugacaaguaacaucugcccacauccuggaguc

SEQ ID NO: 40704 - RNA, 32 nt, Homo Sapiens
guaccuguaauccagcacuuugggaagccaag

SEQ ID NO: 40705 - RNA, 32 nt, Homo Sapiens
aggcuggucuugaacuucugaccugaagugau

SEQ ID NO: 40706 - RNA, 32 nt, Homo Sapiens
agccugaggucuuuagaggaccagcuauugua

SEQ ID NO: 40707 - RNA, 32 nt, Homo Sapiens
ccccacccucgcauggcuguggagccgggaca

SEQ ID NO: 40708 - RNA, 32 nt, Homo Sapiens
ggcccuuuucuuccucuuccaagcucugagca

SEQ ID NO: 40709 - RNA, 29 nt, Homo Sapiens
auuaccugaagaauauauuuuuuaguacu

SEQ ID NO: 40710 - RNA, 32 nt, Homo Sapiens
uugccugucccggcaaccaucauucccaauuu

SEQ ID NO: 40711 - RNA, 32 nt, Homo Sapiens
gccugugccugccuuugugucagaaaaaggaa

SEQ ID NO: 40712 - RNA, 32 nt, Homo Sapiens
ucugauagcaaaccucuuccuccucauugaag

SEQ ID NO: 40713 - RNA, 32 nt, Homo Sapiens
ugccucaugauacaauaaaaccacaaaaauuu

SEQ ID NO: 40714 - RNA, 32 nt, Homo Sapiens
uuggcagaaaaauuauuuguuuauaacuuuaa

SEQ ID NO: 40715 - RNA, 32 nt, Homo Sapiens
acccgcaccucggcgggcgccacacacucggc

SEQ ID NO: 40716 - RNA, 32 nt, Homo Sapiens
uuauguucccaauugagugugaauguccaagu

SEQ ID NO: 40717 - RNA, 32 nt, Homo Sapiens
uccuccgugugagccccaccacagcagcagcc

SEQ ID NO: 40718 - RNA, 32 nt, Homo Sapiens
gagggcagggagguucaacggaccuuaaaaca

SEQ ID NO: 40719 - RNA, 32 nt, Homo Sapiens
auuuuaugaucaauaucuuagauauuuuagaa

SEQ ID NO: 40720 - RNA, 32 nt, Homo Sapiens
aggcuucugaucccagccgccaggcaguuuua

SEQ ID NO: 40721 - RNA, 32 nt, Homo Sapiens
aagaaagaggauuaaagagaauugcuggugau

SEQ ID NO: 40722 - RNA, 32 nt, Homo Sapiens
gggccaagggacgucuucuccacgccgcuccg

SEQ ID NO: 40723 - RNA, 32 nt, Homo Sapiens
cccucucaggcuuugucucauccuucauucug

SEQ ID NO: 40724 - RNA, 32 nt, Homo Sapiens
ccagcaccucccaccaaccaaccacacccggu

SEQ ID NO: 40725 - RNA, 32 nt, Homo Sapiens
cacuguguccuagaggcuggaaugggaacaca

SEQ ID NO: 40726 - RNA, 32 nt, Homo Sapiens
cggggggccccggucaggcccugcccagagag

SEQ ID NO: 40727 - RNA, 32 nt, Homo Sapiens
gaggcuucugccagcccugcuuguccuucccu

SEQ ID NO: 40728 - RNA, 32 nt, Homo Sapiens
gaccaaucuuaguuucuaaccaaagagucucu

SEQ ID NO: 40729 - RNA, 32 nt, Homo Sapiens
aacccauauaaaauucccuguaggauacuuaa

SEQ ID NO: 40730 - RNA, 32 nt, Homo Sapiens
gagggcgugcugccggagacguccgccgggcu

SEQ ID NO: 40731 - RNA, 32 nt, Homo Sapiens
ugaugcgaccucaggaaggagaugagggccgg

SEQ ID NO: 40732 - RNA, 32 nt, Homo Sapiens
guguccccaagccgggggagcaggacuugagc

SEQ ID NO: 40733 - RNA, 31 nt, Homo Sapiens
agccaggagccccagcacaguccuguucuuc

SEQ ID NO: 40734 - RNA, 32 nt, Homo Sapiens
acagccagggagaggggaggagugggcaguga

SEQ ID NO: 40735 - RNA, 32 nt, Homo Sapiens
caucaguacugggauugggaacugcaagaaua

SEQ ID NO: 40736 - RNA, 32 nt, Homo Sapiens
guccaggcugaguggcucuuuuauuaaccagu

SEQ ID NO: 40737 - RNA, 32 nt, Homo Sapiens
cgccaucuuucagaaggccucaucuccacuug

SEQ ID NO: 40738 - RNA, 32 nt, Homo Sapiens
cacacagcccgaguuagaaaucuccuugcuag

SEQ ID NO: 40739 - RNA, 32 nt, Homo Sapiens
uauugauuucucaggacuuuggagggcucuga

SEQ ID NO: 40740 - RNA, 32 nt, Homo Sapiens
gucuucuggagcccuccuuggagcuggagagc

SEQ ID NO: 40741 - RNA, 32 nt, Homo Sapiens
ugggccugcagggcagugcucagcauuucaac

SEQ ID NO: 40742 - RNA, 32 nt, Homo Sapiens
ccggagccguacguggcaccgccccgccucgc

SEQ ID NO: 40743 - RNA, 32 nt, Homo Sapiens
gaugggggcugcccccggggccugagcccgcc

SEQ ID NO: 40744 - RNA, 30 nt, Homo Sapiens
aguguuuauaucccuacguuaacuuugccu

SEQ ID NO: 40745 - RNA, 32 nt, Homo Sapiens
aauuccccuaaaagccaaaaccuccauucugu

SEQ ID NO: 40746 - RNA, 32 nt, Homo Sapiens
cauuugaaauuugauauuuuguguaaaguaac

SEQ ID NO: 40747 - RNA, 32 nt, Homo Sapiens
ucuagcaccaacuaccauuagcacuauguuag

SEQ ID NO: 40748 - RNA, 32 nt, Homo Sapiens
ugugugcaacugagacugucagagcauggcua

SEQ ID NO: 40749 - RNA, 32 nt, Homo Sapiens
gaaacaauugguuaaugggggagccuaauugg

SEQ ID NO: 40750 - RNA, 32 nt, Homo Sapiens
ccaagagagggaagaagaguaugucaguauau

SEQ ID NO: 40751 - RNA, 30 nt, Homo Sapiens
auuuuagucugugcugggaggcagggcucc

SEQ ID NO: 40752 - RNA, 32 nt, Homo Sapiens
gggagccccguccuccaagggcagcaccccca

SEQ ID NO: 40753 - RNA, 32 nt, Homo Sapiens
gaggcuccucccacuggaccgccccccgacug

SEQ ID NO: 40754 - RNA, 30 nt, Homo Sapiens
uccagcggcgccuggcggccggcgcgugcu

SEQ ID NO: 40755 - RNA, 32 nt, Homo Sapiens
ucggaccccggcgcccagcccggagccguaac

SEQ ID NO: 40756 - RNA, 32 nt, Homo Sapiens
aaacaaccugaaucuuuuuuuuauauaaauau

SEQ ID NO: 40757 - RNA, 32 nt, Homo Sapiens
ggcccuugagcugggcgggcuccuugggugga

SEQ ID NO: 40758 - RNA, 32 nt, Homo Sapiens
cggaggcgggagaggcgagcucgcgaugagug

SEQ ID NO: 40759 - RNA, 32 nt, Homo Sapiens
ugagcccccugucuccuccaucauuugguuuc

SEQ ID NO: 40760 - RNA, 32 nt, Homo Sapiens
ccuucaguauuaauauauacgguauuauauaa

SEQ ID NO: 40761 - RNA, 32 nt, Homo Sapiens
cgcacccccaccagcccucucgcuucuaacac

SEQ ID NO: 40762 - RNA, 32 nt, Homo Sapiens
cagaaaggggagagaaagaaguccuguggcgg

SEQ ID NO: 40763 - RNA, 32 nt, Homo Sapiens
ccccggucccuguccgucccaggccccagccu

SEQ ID NO: 40764 - RNA, 32 nt, Homo Sapiens
cucccuuuaucccuccacuacuccaccucaga

SEQ ID NO: 40765 - RNA, 32 nt, Homo Sapiens
cugcaauaaacucaaaucacaugucugcaaga

SEQ ID NO: 40766 - RNA, 32 nt, Homo Sapiens
uguggaauagcaacccaugguuauggcgagug

SEQ ID NO: 40767 - RNA, 32 nt, Homo Sapiens
auuuguaaaggcucauaaaaaucugaagcuua

SEQ ID NO: 40768 - RNA, 32 nt, Homo Sapiens
gcccccaccccuccccacugccagauccuuau

SEQ ID NO: 40769 - RNA, 32 nt, Homo Sapiens
cugaaagaaaugucgggguuucaucagagcua

SEQ ID NO: 40770 - RNA, 32 nt, Homo Sapiens
uuagguuucagucaacucuggaucaugucagg

SEQ ID NO: 40771 - RNA, 32 nt, Homo Sapiens
ccuguguggcauuucuggaaaagggaauagaa

SEQ ID NO: 40772 - RNA, 32 nt, Homo Sapiens
aaaggcaaaaagacaagacauccaggcagggc

SEQ ID NO: 40773 - RNA, 32 nt, Homo Sapiens
auggggauaugggggaacagugaagaaaagga

SEQ ID NO: 40774 - RNA, 32 nt, Homo Sapiens
acuucuaaaaauugagguuaagauauagcuag

SEQ ID NO: 40775 - RNA, 32 nt, Homo Sapiens
ccagacacggggacugcagagaaaggcugugu

SEQ ID NO: 40776 - RNA, 32 nt, Homo Sapiens
gagggagaggggcuccggcuuucucugaaaug

SEQ ID NO: 40777 - RNA, 32 nt, Homo Sapiens
gcagucccagaauuggaauauuaagccaugga

SEQ ID NO: 40778 - RNA, 32 nt, Homo Sapiens
aucugaaauggcaggcaguaagugcagcagaa

SEQ ID NO: 40779 - RNA, 32 nt, Homo Sapiens
gucguauccagaugcacguccuaucacagcac

SEQ ID NO: 40780 - RNA, 32 nt, Homo Sapiens
gaucaccccccgcccccagcccugcaucaggc

SEQ ID NO: 40781 - RNA, 32 nt, Homo Sapiens
cacagaaagaggaggagcaagugggauguuua

SEQ ID NO: 40782 - RNA, 32 nt, Homo Sapiens
agcccggcccugcccccucccccgcugggagc

SEQ ID NO: 40783 - RNA, 32 nt, Homo Sapiens
accuuuagucaaaagguuuaagaagcaaauua

SEQ ID NO: 40784 - RNA, 32 nt, Homo Sapiens
cccuggggccccagcucggccccucgccucgc

SEQ ID NO: 40785 - RNA, 32 nt, Homo Sapiens
accugcggccccaaagccccugggcuuggcug

SEQ ID NO: 40786 - RNA, 30 nt, Homo Sapiens
cagucagagaugaugggggagaugaccggu

SEQ ID NO: 40787 - RNA, 32 nt, Homo Sapiens
ggauucuggccaaugaaauaucucccuggcag

SEQ ID NO: 40788 - RNA, 32 nt, Homo Sapiens
cgaggccuccccagcccugcccggugcaggag

SEQ ID NO: 40789 - RNA, 32 nt, Homo Sapiens
ugcucuccagggaagaggggcugggguuuaaa

SEQ ID NO: 40790 - RNA, 32 nt, Homo Sapiens
guguguguaaccucaugguugugcucaggcug

SEQ ID NO: 40791 - RNA, 32 nt, Homo Sapiens
aaaccuuuauaaaaauauaugauucuauaaag

SEQ ID NO: 40792 - RNA, 32 nt, Homo Sapiens
uuuuaucuucauaacuuccugcucuuauuaac

SEQ ID NO: 40793 - RNA, 32 nt, Homo Sapiens
agccucucaggugccugaaacuguucucggcu

SEQ ID NO: 40794 - RNA, 32 nt, Homo Sapiens
ucuccucuuuugcucuggccccgcccaccucc

SEQ ID NO: 40795 - RNA, 32 nt, Homo Sapiens
caucaaggucagcgagcagaagaugaacggug

SEQ ID NO: 40796 - RNA, 32 nt, Homo Sapiens
aucuucgggacgcccagggcccgggugauuuu

SEQ ID NO: 40797 - RNA, 32 nt, Homo Sapiens
ucagcuccggugcgcggcggccgacgacccgc

SEQ ID NO: 40798 - RNA, 32 nt, Homo Sapiens
cgggccuggggccuugaggcccggggagagcc

SEQ ID NO: 40799 - RNA, 32 nt, Homo Sapiens
gagugcgggaauccgccguuugcgcugaggca

SEQ ID NO: 40800 - RNA, 32 nt, Homo Sapiens
ucaccuuaaccugcucguuaaauaauguguug

SEQ ID NO: 40801 - RNA, 32 nt, Homo Sapiens
cuauuguaucuaccugcagucuccauuguuuc

SEQ ID NO: 40802 - RNA, 32 nt, Homo Sapiens
acaccagucuguuccuucuagagaauuuguuu

SEQ ID NO: 40803 - RNA, 32 nt, Homo Sapiens
auaaaggacgcccucccuccaguguccacauc

SEQ ID NO: 40804 - RNA, 32 nt, Homo Sapiens
gcaccuucccccagcccuggcugggcccagcg

SEQ ID NO: 40805 - RNA, 32 nt, Homo Sapiens
gcuuuucuugacucacagcccagguucuucug

SEQ ID NO: 40806 - RNA, 32 nt, Homo Sapiens
ggaaaucagcuauaaauaaaauguauuuuugu

SEQ ID NO: 40807 - RNA, 32 nt, Homo Sapiens
acucaggcauuugcuuugacuugauguugcca

SEQ ID NO: 40808 - RNA, 32 nt, Homo Sapiens
ccuccacccagcucaggaacccgcgaacccuc

SEQ ID NO: 40809 - RNA, 32 nt, Homo Sapiens
auugcuaggacuucaguuuuuacuucagacua

SEQ ID NO: 40810 - RNA, 29 nt, Homo Sapiens
aaagacccugcgcuucggacgaggagccc

SEQ ID NO: 40811 - RNA, 27 nt, Homo Sapiens
ccacgcuccuucuuuagcucugacacc

SEQ ID NO: 40812 - RNA, 32 nt, Homo Sapiens
ggcugccaggggcguguuaucgcgggggcagc

SEQ ID NO: 40813 - RNA, 32 nt, Homo Sapiens
agagggggccccagccucuccccuccucuugg

SEQ ID NO: 40814 - RNA, 32 nt, Homo Sapiens
uacaagaaaaauuugaaaaggggccagacgcu

SEQ ID NO: 40815 - RNA, 31 nt, Homo Sapiens
cugcccuuguggugccugcccagcucuagac

SEQ ID NO: 40816 - RNA, 32 nt, Homo Sapiens
uugggauauuuuuuccugcaacacuggaaagu

SEQ ID NO: 40817 - RNA, 32 nt, Homo Sapiens
cuccagcugccgggacggagggggcggccccc

SEQ ID NO: 40818 - RNA, 32 nt, Homo Sapiens
ugccagauguauggccggcagcuucccccucu

SEQ ID NO: 40819 - RNA, 32 nt, Homo Sapiens
ggacucugagcucauuuggggaccacagaggc

SEQ ID NO: 40820 - RNA, 32 nt, Homo Sapiens
caucaaguucccuucgccggcaucugggcccu

SEQ ID NO: 40821 - RNA, 32 nt, Homo Sapiens
cccaccugccucccugcccccugugacggagg

SEQ ID NO: 40822 - RNA, 32 nt, Homo Sapiens
uuacaucugcuguugaaccugggcacuaccug

SEQ ID NO: 40823 - RNA, 32 nt, Homo Sapiens
agagaaaauaaucauucuuauuucaugaaaau

SEQ ID NO: 40824 - RNA, 32 nt, Homo Sapiens
aaagcacugugcucugaaguggaucagucuca

SEQ ID NO: 40825 - RNA, 32 nt, Homo Sapiens
uguuucaccauauuggccaggcuggucucgga

SEQ ID NO: 40826 - RNA, 32 nt, Homo Sapiens
uguugcuuucccuucuaaguugucuucuucuu

SEQ ID NO: 40827 - RNA, 32 nt, Homo Sapiens
auuuguagcuauauuucauacaaagugcuuua

SEQ ID NO: 40828 - RNA, 31 nt, Homo Sapiens
aguguggcaaggucuucaguccgacuucacu

SEQ ID NO: 40829 - RNA, 32 nt, Homo Sapiens
cggugggaacagaggugaaagccugccacauu

SEQ ID NO: 40830 - RNA, 32 nt, Homo Sapiens
uauaucucccagugcuaucccuccccccuccc

SEQ ID NO: 40831 - RNA, 32 nt, Homo Sapiens
agcacuuugggaggccaagggaggcggaucac

SEQ ID NO: 40832 - RNA, 32 nt, Homo Sapiens
guuuagagguacuuguuuuuuauuaagagaaa

SEQ ID NO: 40833 - RNA, 32 nt, Homo Sapiens
guuuccucacccaaaaaccauuuggcuggcag

SEQ ID NO: 40834 - RNA, 32 nt, Homo Sapiens
uauuuacuauaauucuaaauguuuaaaugcuu

SEQ ID NO: 40835 - RNA, 32 nt, Homo Sapiens
guagcaaaaaauaugggaaguauuugcuacca

SEQ ID NO: 40836 - RNA, 32 nt, Homo Sapiens
cgagaccuugcuuggugacaugugccacuuug

SEQ ID NO: 40837 - RNA, 32 nt, Homo Sapiens
uugaaaguauauauuuaucauauaaaacuuga

SEQ ID NO: 40838 - RNA, 32 nt, Homo Sapiens
cucuuaagugaacccuuuuuuuuuucaaaugc

SEQ ID NO: 40839 - RNA, 32 nt, Homo Sapiens
cuguuaaagauauuuuuauucaaacuaccuau

SEQ ID NO: 40840 - RNA, 32 nt, Homo Sapiens
acucguguggugauaauuuaauguaauuccga

SEQ ID NO: 40841 - RNA, 32 nt, Homo Sapiens
cccggagcugagcuggcugugcaccagcaaac

SEQ ID NO: 40842 - RNA, 32 nt, Homo Sapiens
ugccuagggcgagugggcauccugucaucauc

SEQ ID NO: 40843 - RNA, 32 nt, Homo Sapiens
aucaccgugaauccggcuuccucugagcauuc

SEQ ID NO: 40844 - RNA, 32 nt, Homo Sapiens
augcuaucuaucagaauagacuggccuuggac

SEQ ID NO: 40845 - RNA, 32 nt, Homo Sapiens
gauggggaaaaucauacagauauuuuaugugu

SEQ ID NO: 40846 - RNA, 32 nt, Homo Sapiens
uaaagcgcggcuggcucucguuuuccggauaa

SEQ ID NO: 40847 - RNA, 32 nt, Homo Sapiens
uguguuaaaaugauaacuaacaugugaauaaa

SEQ ID NO: 40848 - RNA, 32 nt, Homo Sapiens
uucaccuugauuuucugugauaccaaaaucuc

SEQ ID NO: 40849 - RNA, 32 nt, Homo Sapiens
gaaauagacagagguagaacauuuauucaaaa

SEQ ID NO: 40850 - RNA, 32 nt, Homo Sapiens
cugcaaagggccucacaggggcuagacgaggg

SEQ ID NO: 40851 - RNA, 32 nt, Homo Sapiens
auaucgccucucaaaacacugucggacuugcu

SEQ ID NO: 40852 - RNA, 32 nt, Homo Sapiens
acccaguccccauaacaaaaccacuguccaac

SEQ ID NO: 40853 - RNA, 32 nt, Homo Sapiens
ugcuuguggaagacaagucuguggcuugguga

SEQ ID NO: 40854 - RNA, 32 nt, Homo Sapiens
ugagaagcucagugcagcggcgaagagaguuc

SEQ ID NO: 40855 - RNA, 30 nt, Homo Sapiens
aaguuuggauccugguuccguccgcuagga

SEQ ID NO: 40856 - RNA, 32 nt, Homo Sapiens
aaguuagcugggugugguggcucaugccugua

SEQ ID NO: 40857 - RNA, 32 nt, Homo Sapiens
uuuacuuuuuugcuuucuuguuuaccaucugu

SEQ ID NO: 40858 - RNA, 32 nt, Homo Sapiens
cuaagauauuucaacauuuuugaaagauuagu

SEQ ID NO: 40859 - RNA, 32 nt, Homo Sapiens
uccacaggacggucuugaagaaaauaacacug

SEQ ID NO: 40860 - RNA, 32 nt, Homo Sapiens
uuccggagcagacuggccgcggugcuagucgg

SEQ ID NO: 40861 - RNA, 32 nt, Homo Sapiens
ccaugccccuccccgcacccaccuccugucuc

SEQ ID NO: 40862 - RNA, 32 nt, Homo Sapiens
auacuacaaaaauacauaaacguauauauaaa

SEQ ID NO: 40863 - RNA, 32 nt, Homo Sapiens
ggccgggcgggguggcucacgccuguaauccu

SEQ ID NO: 40864 - RNA, 32 nt, Homo Sapiens
ucaggugccccuggagccccagcccugccuuc

SEQ ID NO: 40865 - RNA, 32 nt, Homo Sapiens
aggacugcugcacccaccugguccuuagucau

SEQ ID NO: 40866 - RNA, 32 nt, Homo Sapiens
acccagaaccaucacuuaugaaggauguccuc

SEQ ID NO: 40867 - RNA, 32 nt, Homo Sapiens
ccuggcuaacaaggcgaaauccugucuguacu

SEQ ID NO: 40868 - RNA, 32 nt, Homo Sapiens
agaaccaucuucucccuuuuugcacguuuugc

SEQ ID NO: 40869 - RNA, 32 nt, Homo Sapiens
cgagcgggcccagcugcagagucagcugcagc

SEQ ID NO: 40870 - RNA, 32 nt, Homo Sapiens
ugaaaacaucaaacacugcacaugacaggaug

SEQ ID NO: 40871 - RNA, 32 nt, Homo Sapiens
uagggcaaagccuugccaaauucccggccagc

SEQ ID NO: 40872 - RNA, 32 nt, Homo Sapiens
gucgugaggggucagagauggcgcugaccccc

SEQ ID NO: 40873 - RNA, 32 nt, Homo Sapiens
gucauuuauaaagagcagaaauugauuuuuca

SEQ ID NO: 40874 - RNA, 32 nt, Homo Sapiens
uguaggcucuggaaucuggagacgccagcccu

SEQ ID NO: 40875 - RNA, 32 nt, Homo Sapiens
ggacugguucaagcuuccgccucggcgggaac

SEQ ID NO: 40876 - RNA, 32 nt, Homo Sapiens
gugaaucaugguuuuucuuaguagauuuuaaa

SEQ ID NO: 40877 - RNA, 32 nt, Homo Sapiens
cacccaugcucuggcucuugucucucuggguc

SEQ ID NO: 40878 - RNA, 32 nt, Homo Sapiens
uguucaugagaaggccuugaaaaguuacucua

SEQ ID NO: 40879 - RNA, 32 nt, Homo Sapiens
auuuuccagugagaagcagagacccaaagggc

SEQ ID NO: 40880 - RNA, 32 nt, Homo Sapiens
gcucuucuuccuggauaugcggugcuuugaug

SEQ ID NO: 40881 - RNA, 32 nt, Homo Sapiens
gggaauagcagaauaggagcaagccagcacua

SEQ ID NO: 40882 - RNA, 32 nt, Homo Sapiens
cuauaaagggaaaaaaguuugcuccuccauag

SEQ ID NO: 40883 - RNA, 32 nt, Homo Sapiens
uacaugugggucugaacuuguagacucgguca

SEQ ID NO: 40884 - RNA, 29 nt, Homo Sapiens
gaaaagucauaugcagcuagagcagaccc

SEQ ID NO: 40885 - RNA, 32 nt, Homo Sapiens
auauacauuuuuccauuuuaugcucuaugauc

SEQ ID NO: 40886 - RNA, 32 nt, Homo Sapiens
aacacuugacagcagagcuuuccaccaugaaa

SEQ ID NO: 40887 - RNA, 32 nt, Homo Sapiens
ggggugacagcgugcuggcaguccucacagcc

SEQ ID NO: 40888 - RNA, 32 nt, Homo Sapiens
ggcauggaguagggcgggaaggggcagugagg

SEQ ID NO: 40889 - RNA, 32 nt, Homo Sapiens
gucugggcugcuagccgggguguuguggcuga

SEQ ID NO: 40890 - RNA, 32 nt, Homo Sapiens
ggcucgaugggcggcccgaaggccggggauca

SEQ ID NO: 40891 - RNA, 32 nt, Homo Sapiens
ugccuccugccagccagaauugguggcgggac

SEQ ID NO: 40892 - RNA, 32 nt, Homo Sapiens
cuaggucauacugccaaucuuuagacaaaugg

SEQ ID NO: 40893 - RNA, 32 nt, Homo Sapiens
aucuaaaagcaagugauguaauuuaguuagag

SEQ ID NO: 40894 - RNA, 32 nt, Homo Sapiens
ugugcuggaaaaaacaucacauagcuaucaca

SEQ ID NO: 40895 - RNA, 32 nt, Homo Sapiens
cuauucccccagccucuuucugcuuucaugcu

SEQ ID NO: 40896 - RNA, 32 nt, Homo Sapiens
aggcuuuguuuaagaacuguuuauuaagauaa

SEQ ID NO: 40897 - RNA, 32 nt, Homo Sapiens
agguggagacccuagagguccuggauucuggc

SEQ ID NO: 40898 - RNA, 32 nt, Homo Sapiens
gcuugugcgcggaccuggcgacgcucuagccc

SEQ ID NO: 40899 - RNA, 32 nt, Homo Sapiens
gcuaggagguggcaggcugugcgcucaaacuc

SEQ ID NO: 40900 - RNA, 32 nt, Homo Sapiens
uuuggaagaguuuacauuuuaauagcaagaca

SEQ ID NO: 40901 - RNA, 32 nt, Homo Sapiens
uagacaggaucuuuuucccucaagcuguuugg

SEQ ID NO: 40902 - RNA, 32 nt, Homo Sapiens
agccacuccgcggggaccgaacgagcagcccg

SEQ ID NO: 40903 - RNA, 32 nt, Homo Sapiens
ccuguauucuguauccucuccucgcaucuccu

SEQ ID NO: 40904 - RNA, 32 nt, Homo Sapiens
ucaucagagucuuuuuuaaccacuaggugaca

SEQ ID NO: 40905 - RNA, 32 nt, Homo Sapiens
gagcaaaauuaaaagagcauuugguaguaauc

SEQ ID NO: 40906 - RNA, 32 nt, Homo Sapiens
gcgcuccggccgccgaaugcccguggacgcgc

SEQ ID NO: 40907 - RNA, 32 nt, Homo Sapiens
cucgggugcacccaguucucacaugugcaguc

SEQ ID NO: 40908 - RNA, 32 nt, Homo Sapiens
aaugcugugugcuuguuccaaaugagcagcug

SEQ ID NO: 40909 - RNA, 32 nt, Homo Sapiens
uccgcguccgccccggccccgguccagacuua

SEQ ID NO: 40910 - RNA, 32 nt, Homo Sapiens
ggaccgagcggggagcaaggccugcggggagg

SEQ ID NO: 40911 - RNA, 32 nt, Homo Sapiens
cugcaaauuguccuugccagcucuugggaucc

SEQ ID NO: 40912 - RNA, 30 nt, Homo Sapiens
guguaugaugugcacuacaauggugggcaa

SEQ ID NO: 40913 - RNA, 32 nt, Homo Sapiens
cucagccaggugagacaaugggcugguucuug

SEQ ID NO: 40914 - RNA, 32 nt, Homo Sapiens
guaacuauuuuuccuucaaguguugacuaggg

SEQ ID NO: 40915 - RNA, 32 nt, Homo Sapiens
ccaccuuucccggcccaagccagcgcaccccg

SEQ ID NO: 40916 - RNA, 32 nt, Homo Sapiens
gcagacgcugccgaggggguguggacgugcuu

SEQ ID NO: 40917 - RNA, 32 nt, Homo Sapiens
cugugacguggggagccuggaaacaccuggcc

SEQ ID NO: 40918 - RNA, 32 nt, Homo Sapiens
caccucugucuccucccguccuuccgcacgug

SEQ ID NO: 40919 - RNA, 32 nt, Homo Sapiens
aucacacguucugaaaguccagcaaaauccuu

SEQ ID NO: 40920 - RNA, 32 nt, Homo Sapiens
ucuugcgcgaaagccgccggccucggaggagg

SEQ ID NO: 40921 - RNA, 32 nt, Homo Sapiens
ugacccuucccggcugcccucccuccccagcu

SEQ ID NO: 40922 - RNA, 32 nt, Homo Sapiens
uacaggcaugugccaccacaccuggcuaguuu

SEQ ID NO: 40923 - RNA, 32 nt, Homo Sapiens
aagagcgaacucccacccagcgccucccagug

SEQ ID NO: 40924 - RNA, 32 nt, Homo Sapiens
gcuccggggcugcggcggcugaggcgcgggga

SEQ ID NO: 40925 - RNA, 32 nt, Homo Sapiens
cuuccuuauuuucgucgccuguucuccugauc

SEQ ID NO: 40926 - RNA, 32 nt, Homo Sapiens
cugcuguuucggggaccccggcgcccugccuu

SEQ ID NO: 40927 - RNA, 32 nt, Homo Sapiens
cggcaccgcccacaccccgcgcgcucagagcc

SEQ ID NO: 40928 - RNA, 32 nt, Homo Sapiens
caggugcugcccuugcugcugcuggucgggca

SEQ ID NO: 40929 - RNA, 32 nt, Homo Sapiens
cucugaauuuauuuccucuccuucccccaccc

SEQ ID NO: 40930 - RNA, 32 nt, Homo Sapiens
cccgccgcgggccauacgcuggacgagucgga

SEQ ID NO: 40931 - RNA, 32 nt, Homo Sapiens
uccuggcucucccggcccugcucuguuaggac

SEQ ID NO: 40932 - RNA, 31 nt, Homo Sapiens
acauuuuugugcuuggauauaagauguauuu

SEQ ID NO: 40933 - RNA, 32 nt, Homo Sapiens
guuguuggguggcagcugcuccuucgcccucu

SEQ ID NO: 40934 - RNA, 32 nt, Homo Sapiens
ugaagugauuacaucuaaggaccuccagaagc

SEQ ID NO: 40935 - RNA, 31 nt, Homo Sapiens
ccugggcuggggcucgcuccagggcuuugca

SEQ ID NO: 40936 - RNA, 32 nt, Homo Sapiens
agugucugaggagaagcaggaagugagucccu

SEQ ID NO: 40937 - RNA, 32 nt, Homo Sapiens
acuauagggcuuuauuaaagacuacuguacuu

SEQ ID NO: 40938 - RNA, 32 nt, Homo Sapiens
cugagggacccagccgccuucuccgugcucug

SEQ ID NO: 40939 - RNA, 32 nt, Homo Sapiens
cucugggggcagccucugugggacaagaguga

SEQ ID NO: 40940 - RNA, 32 nt, Homo Sapiens
ccauuacccuuuauuucugcuaacuuuuuaaa

SEQ ID NO: 40941 - RNA, 32 nt, Homo Sapiens
ccuuucgguguuggcuccaaaccuuccuuucc

SEQ ID NO: 40942 - RNA, 30 nt, Homo Sapiens
cuaggaaggcgccugccccaucuugucugc

SEQ ID NO: 40943 - RNA, 32 nt, Homo Sapiens
acugaucuaaaugcaagaagccaggcacaaaa

SEQ ID NO: 40944 - RNA, 32 nt, Homo Sapiens
aaucguggggguacuaucucaacugcuuuugu

SEQ ID NO: 40945 - RNA, 32 nt, Homo Sapiens
gaccgugcucuaagggcauuugaaagacugcc

SEQ ID NO: 40946 - RNA, 32 nt, Homo Sapiens
ggucaggugguuggggugagaacuugcucacg

SEQ ID NO: 40947 - RNA, 32 nt, Homo Sapiens
auaucuguuauucaaauuugaugauguuaaau

SEQ ID NO: 40948 - RNA, 32 nt, Homo Sapiens
aagggcagcaagcaaucaucagagcauagagc

SEQ ID NO: 40949 - RNA, 32 nt, Homo Sapiens
gcucauuguuuaacuggcuuguccauacccuc

SEQ ID NO: 40950 - RNA, 28 nt, Homo Sapiens
cccgaggggcggcugcugcccgucgcca

SEQ ID NO: 40951 - RNA, 32 nt, Homo Sapiens
guauauuguguaucuaaacaaacauagaaaag

SEQ ID NO: 40952 - RNA, 32 nt, Homo Sapiens
ccaagacaaagacaccugaggacuaugcugac

SEQ ID NO: 40953 - RNA, 32 nt, Homo Sapiens
uuuagucauuuucuuaguguuugcccuggggg

SEQ ID NO: 40954 - RNA, 32 nt, Homo Sapiens
aggaacaaacuccggacacgcagccuuuaaga

SEQ ID NO: 40955 - RNA, 32 nt, Homo Sapiens
uacagccuauuauauucccacauccugagaaa

SEQ ID NO: 40956 - RNA, 32 nt, Homo Sapiens
caagguaaucgaauucugaauuuuggacguag

SEQ ID NO: 40957 - RNA, 32 nt, Homo Sapiens
auaccccagaaauuauugguauauuuguagau

SEQ ID NO: 40958 - RNA, 32 nt, Homo Sapiens
uacaggugcccaccaccacaccuggcuaauuu

SEQ ID NO: 40959 - RNA, 31 nt, Homo Sapiens
guccgggagccccagggcagccgccccgccg

SEQ ID NO: 40960 - RNA, 32 nt, Homo Sapiens
augcuucccgccagucaagauggucuguggac

SEQ ID NO: 40961 - RNA, 32 nt, Homo Sapiens
acugaugucuuacugucaacagagauauuuua

SEQ ID NO: 40962 - RNA, 32 nt, Homo Sapiens
aucuucccaucccaguucuuccugccccccuu

SEQ ID NO: 40963 - RNA, 32 nt, Homo Sapiens
aucaaauuuauuucucugauguuuccuuccuu

SEQ ID NO: 40964 - RNA, 32 nt, Homo Sapiens
uaaucccaccucaggaggcugaggcaggagaa

SEQ ID NO: 40965 - RNA, 32 nt, Homo Sapiens
agacccugccccagcaggcccccuuguccuuc

SEQ ID NO: 40966 - RNA, 32 nt, Homo Sapiens
guagaucuccaacaguuuuucuugaauguggc

SEQ ID NO: 40967 - RNA, 32 nt, Homo Sapiens
auauauaauaagugaaaauacaauuaaucaga

SEQ ID NO: 40968 - RNA, 32 nt, Homo Sapiens
ggugaaguaauuuaaaauauaaauccauucag

SEQ ID NO: 40969 - RNA, 32 nt, Homo Sapiens
ugggaggugggaagggugagggucugggggaa

SEQ ID NO: 40970 - RNA, 32 nt, Homo Sapiens
guaugaagguuauuauuguuuacuucauuuaa

SEQ ID NO: 40971 - RNA, 32 nt, Homo Sapiens
acuuauuaaaacuagaagauguacuucgacag

SEQ ID NO: 40972 - RNA, 32 nt, Homo Sapiens
ggggaaaguauuuauuguacauuauuuucaua

SEQ ID NO: 40973 - RNA, 32 nt, Homo Sapiens
aguguccagccaugcauaagggagaggauagu

SEQ ID NO: 40974 - RNA, 32 nt, Homo Sapiens
agcccauggguuacaaggauuugcaauauauu

SEQ ID NO: 40975 - RNA, 32 nt, Homo Sapiens
agugucauauccuccaggaauacuggccagaa

SEQ ID NO: 40976 - RNA, 32 nt, Homo Sapiens
aggcuaggaaagggcugcuugagaugacugug

SEQ ID NO: 40977 - RNA, 32 nt, Homo Sapiens
cugacgggccgcggccgccuccaugaagcgga

SEQ ID NO: 40978 - RNA, 32 nt, Homo Sapiens
cuccccagccugccaagcccagcccuccagag

SEQ ID NO: 40979 - RNA, 29 nt, Homo Sapiens
gacaagaggaagauuccagggagaaaugc

SEQ ID NO: 40980 - RNA, 32 nt, Homo Sapiens
cacucuguccgucuucugcagcagccaggcag

SEQ ID NO: 40981 - RNA, 32 nt, Homo Sapiens
cauagcauuuuuguccguggaugguacacaaa

SEQ ID NO: 40982 - RNA, 32 nt, Homo Sapiens
ugugagcgccgaggggggcgcaggacccucgc

SEQ ID NO: 40983 - RNA, 32 nt, Homo Sapiens
agucauuuuccaacuaacaucuagugagacug

SEQ ID NO: 40984 - RNA, 32 nt, Homo Sapiens
cuguucuucagcuaggagacaccaaacccuca

SEQ ID NO: 40985 - RNA, 32 nt, Homo Sapiens
accauggcacuugaugugauguggcaggaggg

SEQ ID NO: 40986 - RNA, 32 nt, Homo Sapiens
uucagcuuaccagcuaccuagcaagagaagga

SEQ ID NO: 40987 - RNA, 32 nt, Homo Sapiens
uuuaauccuaaaacugugacuuggggagguca

SEQ ID NO: 40988 - RNA, 32 nt, Homo Sapiens
ugaggaaaaugaaucucugagaggcuugagag

SEQ ID NO: 40989 - RNA, 32 nt, Homo Sapiens
gucauuggguggcauauguuaacuagcugcca

SEQ ID NO: 40990 - RNA, 32 nt, Homo Sapiens
agccccauucucuggaggagcugugggcagac

SEQ ID NO: 40991 - RNA, 32 nt, Homo Sapiens
uaagugugaaugcaagugauuaaugaauacag

SEQ ID NO: 40992 - RNA, 32 nt, Homo Sapiens
caggacggccccacagcagaccagccccacug

SEQ ID NO: 40993 - RNA, 32 nt, Homo Sapiens
caagagaagauaaggaagacaagaucucaacc

SEQ ID NO: 40994 - RNA, 32 nt, Homo Sapiens
gaggaucaucuacuggggaaagaaauaagcuu

SEQ ID NO: 40995 - RNA, 30 nt, Homo Sapiens
ggugaagggugaugcaggauaugccugaca

SEQ ID NO: 40996 - RNA, 32 nt, Homo Sapiens
aaaaggaaaaauuuuaucacugccaucacagc

SEQ ID NO: 40997 - RNA, 32 nt, Homo Sapiens
cuuugguucuuugcuguuucuauuaacccaca

SEQ ID NO: 40998 - RNA, 32 nt, Homo Sapiens
gcugucggaggaaggggagaucguagauuugc

SEQ ID NO: 40999 - RNA, 32 nt, Homo Sapiens
ccaccuggaggacacgcugcugcagaggauca

SEQ ID NO: 41000 - RNA, 32 nt, Homo Sapiens
uucugcaugagacggagcugccuccugugacu

SEQ ID NO: 41001 - RNA, 32 nt, Homo Sapiens
aggacggcuucggcuuccgcagauagucgggc

SEQ ID NO: 41002 - RNA, 32 nt, Homo Sapiens
ucaggcagccccagcguccccgggcccucggc

SEQ ID NO: 41003 - RNA, 32 nt, Homo Sapiens
ugagaucagcaguggcauuagauucuuauaga

SEQ ID NO: 41004 - RNA, 32 nt, Homo Sapiens
uucccgcccucccccugccagaggccuggugc

SEQ ID NO: 41005 - RNA, 32 nt, Homo Sapiens
uaugcuuguaaauauugauagcacuggcuucc

SEQ ID NO: 41006 - RNA, 32 nt, Homo Sapiens
uugucccacuauuguauuuuggaagcacauaa

SEQ ID NO: 41007 - RNA, 32 nt, Homo Sapiens
cagcuucucuugucgggacagguguccuuugc

SEQ ID NO: 41008 - RNA, 32 nt, Homo Sapiens
uaacaauuacaaucgagcuguuaaauauaaca

SEQ ID NO: 41009 - RNA, 32 nt, Homo Sapiens
gcauuacacuucaaaacaguggggagcaacuu

SEQ ID NO: 41010 - RNA, 32 nt, Homo Sapiens
acaguagguccuccaacaccacuguuuuguuc

SEQ ID NO: 41011 - RNA, 32 nt, Homo Sapiens
uauuuacagaugcauggaaaacaaagucucca

SEQ ID NO: 41012 - RNA, 32 nt, Homo Sapiens
cccauccggaugggccugaacucaagaagcaa

SEQ ID NO: 41013 - RNA, 27 nt, Homo Sapiens
uucagcuuuugauucagccccccaagu

SEQ ID NO: 41014 - RNA, 32 nt, Homo Sapiens
ugauugccucaauaaagcucguccccauugcu

SEQ ID NO: 41015 - RNA, 32 nt, Homo Sapiens
ggccugcgcgcgccucccgggcggauuccagc

SEQ ID NO: 41016 - RNA, 32 nt, Homo Sapiens
guaguaaauaauuuggaaacuacauuaaugua

SEQ ID NO: 41017 - RNA, 32 nt, Homo Sapiens
agugggccauggaguucccguucgauguggac

SEQ ID NO: 41018 - RNA, 32 nt, Homo Sapiens
uuccagcagugagguaacuaugcaaagauuau

SEQ ID NO: 41019 - RNA, 31 nt, Homo Sapiens
acgguuucuguuuugagggugcuguucaaua

SEQ ID NO: 41020 - RNA, 32 nt, Homo Sapiens
uuccacauuugcaucuagaaauccaaugcucu

SEQ ID NO: 41021 - RNA, 32 nt, Homo Sapiens
agugaaguaaaauaaauauuuggaauuacuaa

SEQ ID NO: 41022 - RNA, 32 nt, Homo Sapiens
aggaaagacaggacccggggcccgccucacac

SEQ ID NO: 41023 - RNA, 32 nt, Homo Sapiens
ucacuuugcuggccuccucccgacuggagccu

SEQ ID NO: 41024 - RNA, 32 nt, Homo Sapiens
cagccccggccgcuugcagaccccgccaugga

SEQ ID NO: 41025 - RNA, 31 nt, Homo Sapiens
agccgugaagucuccgcaggaggcuucagag

SEQ ID NO: 41026 - RNA, 32 nt, Homo Sapiens
caaaccaacacuuuuaaaaaauaauucagaug

SEQ ID NO: 41027 - RNA, 32 nt, Homo Sapiens
caugcgccagacggcaggacggcggcgucggg

SEQ ID NO: 41028 - RNA, 32 nt, Homo Sapiens
cuccagggcuccugcagccucgccgcgaugga

SEQ ID NO: 41029 - RNA, 28 nt, Homo Sapiens
gagccgguagcgggaaggaugaccacgc

SEQ ID NO: 41030 - RNA, 32 nt, Homo Sapiens
aaaaaauuuuuaaguauuuucuuaauuugaau

SEQ ID NO: 41031 - RNA, 30 nt, Homo Sapiens
aaaugugcgcuaaacggggaaaccuguuua

SEQ ID NO: 41032 - RNA, 32 nt, Homo Sapiens
uacguccaagguggcagaugucuucccugggc

SEQ ID NO: 41033 - RNA, 32 nt, Homo Sapiens
ucacuaagucuuuguagauaaagcagaugggg

SEQ ID NO: 41034 - RNA, 32 nt, Homo Sapiens
gaaggggaugagugaguguggguguggcugga

SEQ ID NO: 41035 - RNA, 32 nt, Homo Sapiens
ggucgggggaggaggaguggguggccuccuug

SEQ ID NO: 41036 - RNA, 32 nt, Homo Sapiens
uuuccugcccuuggaaucugaccuucagaagg

SEQ ID NO: 41037 - RNA, 32 nt, Homo Sapiens
guaagagaugcaacaguggaagcaagagguug

SEQ ID NO: 41038 - RNA, 32 nt, Homo Sapiens
agauuuacagaaaagaugauaaaccuuagaaa

SEQ ID NO: 41039 - RNA, 32 nt, Homo Sapiens
ccugccacacugcugcagcaucaagugugcua

SEQ ID NO: 41040 - RNA, 32 nt, Homo Sapiens
uccuuauccuucugcaucuccuccucaguauu

SEQ ID NO: 41041 - RNA, 32 nt, Homo Sapiens
ucugugaccacuuuuccagggacuuaggggaa

SEQ ID NO: 41042 - RNA, 32 nt, Homo Sapiens
aacucuuuguugcagcuguuuuccaagcagug

SEQ ID NO: 41043 - RNA, 32 nt, Homo Sapiens
ggagcugggccacaggcuccagugucacauaa

SEQ ID NO: 41044 - RNA, 32 nt, Homo Sapiens
auauugccaaaauauaaaguauauuuccuagu

SEQ ID NO: 41045 - RNA, 32 nt, Homo Sapiens
agaaaccaaacacaacaaaauggcuuguugcc

SEQ ID NO: 41046 - RNA, 32 nt, Homo Sapiens
uauguugcaaauuuaaagagaggaaccaagaa

SEQ ID NO: 41047 - RNA, 32 nt, Homo Sapiens
guagccguccacaaagauguaauccaaaucua

SEQ ID NO: 41048 - RNA, 32 nt, Homo Sapiens
gggcagaggcggaccugucuggagaugguacu

SEQ ID NO: 41049 - RNA, 32 nt, Homo Sapiens
cuaaggucaggaguuugagaucagccugccca

SEQ ID NO: 41050 - RNA, 27 nt, Homo Sapiens
gguggccauuaaucugaguaucucuag

SEQ ID NO: 41051 - RNA, 32 nt, Homo Sapiens
auaaaaacagagcucuaaaaucccuuucaagc

SEQ ID NO: 41052 - RNA, 32 nt, Homo Sapiens
aaaguggacugggugauucugucuggcagaga

SEQ ID NO: 41053 - RNA, 31 nt, Homo Sapiens
ggaacauaguagguuuuuaacuggaauauaa

SEQ ID NO: 41054 - RNA, 32 nt, Homo Sapiens
gcggcggagccagacgcugaccacguuccucu

SEQ ID NO: 41055 - RNA, 32 nt, Homo Sapiens
agcucacugcagccuugauuucccgggcucaa

SEQ ID NO: 41056 - RNA, 32 nt, Homo Sapiens
aaaauacaaaucaaaaucauaguaaaauauua

SEQ ID NO: 41057 - RNA, 32 nt, Homo Sapiens
uuuucauaugugaguaaaaauaaaauaguauu

SEQ ID NO: 41058 - RNA, 32 nt, Homo Sapiens
cuguaagggcuuuggggaagggggcaacauag

SEQ ID NO: 41059 - RNA, 32 nt, Homo Sapiens
guccguuuuacugugaauauagcaauauagua

SEQ ID NO: 41060 - RNA, 32 nt, Homo Sapiens
uuacuacagaaauuauuuuagaguuuuuguau

SEQ ID NO: 41061 - RNA, 32 nt, Homo Sapiens
aaauuauuauuaccugaagaaaauaaggcugc

SEQ ID NO: 41062 - RNA, 32 nt, Homo Sapiens
ucgcuucccggcgcggucgcagcccucagccc

SEQ ID NO: 41063 - RNA, 32 nt, Homo Sapiens
ggccggagcgcgagcauggacccggcgggcgc

SEQ ID NO: 41064 - RNA, 32 nt, Homo Sapiens
cgaaggaaggucgggcccugcugccccgcccc

SEQ ID NO: 41065 - RNA, 32 nt, Homo Sapiens
acucugauucugaaacagacuccagugaugaa

SEQ ID NO: 41066 - RNA, 32 nt, Homo Sapiens
gacuucucccucaccugguguuuuccacugca

SEQ ID NO: 41067 - RNA, 32 nt, Homo Sapiens
ucaguccucccgccaggucccgcggcccgcac

SEQ ID NO: 41068 - RNA, 32 nt, Homo Sapiens
gauucucugaccauccccagcugaacuccucc

SEQ ID NO: 41069 - RNA, 32 nt, Homo Sapiens
acaagaugaaacucagaagagauaauggauuu

SEQ ID NO: 41070 - RNA, 32 nt, Homo Sapiens
auuuuuuauuuuugagauggaguuucgcucug

SEQ ID NO: 41071 - RNA, 32 nt, Homo Sapiens
aagaugugucaaguagaagagaauuuguuuaa

SEQ ID NO: 41072 - RNA, 32 nt, Homo Sapiens
acauacaauggagcucuaauauaucuggcagc

SEQ ID NO: 41073 - RNA, 32 nt, Homo Sapiens
gucuuguuuuauaccaggcaaauugcuuagua

SEQ ID NO: 41074 - RNA, 32 nt, Homo Sapiens
ugcuugcaaacaacacuuuaaaacacuggaac

SEQ ID NO: 41075 - RNA, 32 nt, Homo Sapiens
ccacguggacaaagaacacucccugagcacaa

SEQ ID NO: 41076 - RNA, 32 nt, Homo Sapiens
uggaaguccuggccggccgcccacaucgggcu

SEQ ID NO: 41077 - RNA, 32 nt, Homo Sapiens
uauaaaagagugauuuuccucaccugaguaca

SEQ ID NO: 41078 - RNA, 32 nt, Homo Sapiens
ucucucauaauggcuuccauuuaauacaggca

SEQ ID NO: 41079 - RNA, 32 nt, Homo Sapiens
gcccgcugcaggccagcucugcuguucacugg

SEQ ID NO: 41080 - RNA, 32 nt, Homo Sapiens
gcugaagaaugggaagguguugaguccuggga

SEQ ID NO: 41081 - RNA, 32 nt, Homo Sapiens
ugcuggguucaguggcucuucaggggacagga

SEQ ID NO: 41082 - RNA, 32 nt, Homo Sapiens
uaacuaauugaaucauuaucuuacauuuacug

SEQ ID NO: 41083 - RNA, 32 nt, Homo Sapiens
cuccacccuggcuggauccugaaacaguggag

SEQ ID NO: 41084 - RNA, 32 nt, Homo Sapiens
aaugugggauaaaacuucuuuaauagcuagaa

SEQ ID NO: 41085 - RNA, 32 nt, Homo Sapiens
ucagucaugaacugucuguccauuccaaucuc

SEQ ID NO: 41086 - RNA, 32 nt, Homo Sapiens
ccgcuccgccucccggcccgcagauccccgac

SEQ ID NO: 41087 - RNA, 32 nt, Homo Sapiens
uaauggaugggaggagagaaacacagcgauca

SEQ ID NO: 41088 - RNA, 32 nt, Homo Sapiens
ucucgaggggggacggcgacagcgcggcucug

SEQ ID NO: 41089 - RNA, 32 nt, Homo Sapiens
ggggagcgagguggcgccggggagccugggau

SEQ ID NO: 41090 - RNA, 32 nt, Homo Sapiens
uguccuagccuaggggcccccgggccggacuu

SEQ ID NO: 41091 - RNA, 32 nt, Homo Sapiens
auccccaaacuccuuuacugcagccugggcuc

SEQ ID NO: 41092 - RNA, 32 nt, Homo Sapiens
ggagcugcgcagcgcuccacucggccggcagc

SEQ ID NO: 41093 - RNA, 32 nt, Homo Sapiens
ccaugagucccccacacccaccccauccucgg

SEQ ID NO: 41094 - RNA, 32 nt, Homo Sapiens
ggucaaaaauaagccagacuuuuacacaaagg

SEQ ID NO: 41095 - RNA, 32 nt, Homo Sapiens
uuguggucuuagguauggugcuauagguugca

SEQ ID NO: 41096 - RNA, 32 nt, Homo Sapiens
ucaggguggucugacccuucccucgguguggg

SEQ ID NO: 41097 - RNA, 32 nt, Homo Sapiens
aauaagaaaaagaauuugaggaacuggaugug

SEQ ID NO: 41098 - RNA, 32 nt, Homo Sapiens
gagaauguuguaagacuaggaaaggaacacug

SEQ ID NO: 41099 - RNA, 32 nt, Homo Sapiens
uuccuuguauaaaaugacuggauguguauaaa

SEQ ID NO: 41100 - RNA, 32 nt, Homo Sapiens
guguauuguucugcaguguugaaacagaaugg

SEQ ID NO: 41101 - RNA, 32 nt, Homo Sapiens
cagaggcggcagcaccaccgggguugacuccg

SEQ ID NO: 41102 - RNA, 32 nt, Homo Sapiens
gaaggauaaaaauaaauuuggaguaaacaaau

SEQ ID NO: 41103 - RNA, 32 nt, Homo Sapiens
ccuuuuucugcccacucugguaacuuauugcu

SEQ ID NO: 41104 - RNA, 32 nt, Homo Sapiens
uucuuccacuuucuuugggggcgacccccgau

SEQ ID NO: 41105 - RNA, 32 nt, Homo Sapiens
uuuuccuugaugaugccuaaaacuacauccau

SEQ ID NO: 41106 - RNA, 32 nt, Homo Sapiens
uucaggaaaaagacaggcguguccuaauuggg

SEQ ID NO: 41107 - RNA, 32 nt, Homo Sapiens
agcuaacuuccacuaauccauuauccuuuauu

SEQ ID NO: 41108 - RNA, 32 nt, Homo Sapiens
uaagaucuuaaaaauacaaaauguagacaauu

SEQ ID NO: 41109 - RNA, 32 nt, Homo Sapiens
auagucaauauuaucauuuuaaggauaguuaa

SEQ ID NO: 41110 - RNA, 32 nt, Homo Sapiens
ccuugccgccgcccggccccacaguugucuuu

SEQ ID NO: 41111 - RNA, 32 nt, Homo Sapiens
ugguauuuguacacagagcugaggaugaaaca

SEQ ID NO: 41112 - RNA, 32 nt, Homo Sapiens
aaaugacuuaaacuguaauccaaaugggacaa

SEQ ID NO: 41113 - RNA, 32 nt, Homo Sapiens
uugaauuccgccggcgcgggagccucugcaga

SEQ ID NO: 41114 - RNA, 32 nt, Homo Sapiens
gguuccaucuccuugggugugaggauagaauu

SEQ ID NO: 41115 - RNA, 32 nt, Homo Sapiens
ugauguaauuaguguauuaccuuaaacaauua

SEQ ID NO: 41116 - RNA, 32 nt, Homo Sapiens
gauucaccagcauuaauguuuccccugacaaa

SEQ ID NO: 41117 - RNA, 32 nt, Homo Sapiens
uacucuggguuaccaugagagagaccuuggag

SEQ ID NO: 41118 - RNA, 32 nt, Homo Sapiens
gcugacccugaggugcugcugcugggucuguc

SEQ ID NO: 41119 - RNA, 32 nt, Homo Sapiens
cacugugucuuuagccagggccgugcaacuua

SEQ ID NO: 41120 - RNA, 32 nt, Homo Sapiens
uuccccuuccccacccgaauucuuuucugaag

SEQ ID NO: 41121 - RNA, 32 nt, Homo Sapiens
uuacagacauuuaccaccuggggacccaaaag

SEQ ID NO: 41122 - RNA, 32 nt, Homo Sapiens
ugauuaaaaauaagcuuuuacuuuuuaaaacc

SEQ ID NO: 41123 - RNA, 32 nt, Homo Sapiens
aggauggcgaguuuguguuuuaauuuuucaua

SEQ ID NO: 41124 - RNA, 32 nt, Homo Sapiens
aagcgggagagccgcgggauuugcggccgccg

SEQ ID NO: 41125 - RNA, 32 nt, Homo Sapiens
aacuguuuuaaaacucuuucuggggaauccaa

SEQ ID NO: 41126 - RNA, 32 nt, Homo Sapiens
aggaacaugaugacauguucuacauuugucug

SEQ ID NO: 41127 - RNA, 32 nt, Homo Sapiens
gcagccucugggggguggccaggccgggaaaa

SEQ ID NO: 41128 - RNA, 32 nt, Homo Sapiens
uucuguauuuaaagaaaauauuacuguuacau

SEQ ID NO: 41129 - RNA, 32 nt, Homo Sapiens
aaggaauggagcaagacacagaugaauuagag

SEQ ID NO: 41130 - RNA, 32 nt, Homo Sapiens
acaauuccuccauuuuaaaugacuacuuuuau

SEQ ID NO: 41131 - RNA, 32 nt, Homo Sapiens
gaaaucaauaauugauuauuuauuugcacuua

SEQ ID NO: 41132 - RNA, 31 nt, Homo Sapiens
ucaaaaagugggugaaggauaugaacagaca

SEQ ID NO: 41133 - RNA, 32 nt, Homo Sapiens
gaguaccaggccacgggcugcagauccugaau

SEQ ID NO: 41134 - RNA, 32 nt, Homo Sapiens
gggcuccggccgcggaguagauggugcccaga

SEQ ID NO: 41135 - RNA, 29 nt, Homo Sapiens
agugcccagcaucuggcaccgagcaggug

SEQ ID NO: 41136 - RNA, 32 nt, Homo Sapiens
gccgcggcccucgagacgggaccgagagcauc

SEQ ID NO: 41137 - RNA, 32 nt, Homo Sapiens
uacaggacuuugaaagugacacguuuuuucca

SEQ ID NO: 41138 - RNA, 32 nt, Homo Sapiens
uguucauguucuauguuuuguuuuguguguag

SEQ ID NO: 41139 - RNA, 32 nt, Homo Sapiens
ggauguucauugucuugucaugugaugugucu

SEQ ID NO: 41140 - RNA, 32 nt, Homo Sapiens
ucugcucugaugcaucagaaagggagggcucu

SEQ ID NO: 41141 - RNA, 32 nt, Homo Sapiens
uccuggaggggguccagucaccagagagacca

SEQ ID NO: 41142 - RNA, 32 nt, Homo Sapiens
ugguggccugcgccuguaaucccagcuaccca

SEQ ID NO: 41143 - RNA, 32 nt, Homo Sapiens
cauguuuccaugaacugcacuauuauaaacua

SEQ ID NO: 41144 - RNA, 32 nt, Homo Sapiens
accugcagcuggaagcuagacuuccaaaccuu

SEQ ID NO: 41145 - RNA, 32 nt, Homo Sapiens
ccuauuggucugauuucacaggaacauuuuac

SEQ ID NO: 41146 - RNA, 32 nt, Homo Sapiens
gggcaagcuuauggguuucuugguaaagagcc

SEQ ID NO: 41147 - RNA, 32 nt, Homo Sapiens
uugaagcgccuggcccagcccccagcccccag

SEQ ID NO: 41148 - RNA, 32 nt, Homo Sapiens
ccgugagggagcgcugugggggcgcgcugccu

SEQ ID NO: 41149 - RNA, 32 nt, Homo Sapiens
acagugcagacacagaacauaucaucacugca

SEQ ID NO: 41150 - RNA, 32 nt, Homo Sapiens
guuaaagaaaaguuaucagagaagcaggcuua

SEQ ID NO: 41151 - RNA, 32 nt, Homo Sapiens
cacauauccaaauggaauuuuacccugagaaa

SEQ ID NO: 41152 - RNA, 32 nt, Homo Sapiens
uccgacaggaagggaagaaacacauucuggug

SEQ ID NO: 41153 - RNA, 32 nt, Homo Sapiens
aguuccucauugaacaugugauaaucuaauac

SEQ ID NO: 41154 - RNA, 32 nt, Homo Sapiens
cuaguggagaaguaaggaggggcgcgcugcgc

SEQ ID NO: 41155 - RNA, 32 nt, Homo Sapiens
gcauuuauuuuugauagagcagagauaaaaua

SEQ ID NO: 41156 - RNA, 32 nt, Homo Sapiens
uuaaaagcauauaccaccuuaguucauucaug

SEQ ID NO: 41157 - RNA, 32 nt, Homo Sapiens
acaaaaagcaugugcucgugggaaauaggcac

SEQ ID NO: 41158 - RNA, 32 nt, Homo Sapiens
cugaggucaggaguuugagaccagccugacau

SEQ ID NO: 41159 - RNA, 32 nt, Homo Sapiens
ugagugcacuccuggugauccugguuuuccuu

SEQ ID NO: 41160 - RNA, 32 nt, Homo Sapiens
aauguaguucccuacucaggcuuucguaguga

SEQ ID NO: 41161 - RNA, 32 nt, Homo Sapiens
aguaggaaucccagaagggucugggggaaccc

SEQ ID NO: 41162 - RNA, 32 nt, Homo Sapiens
aucugcuucauucuaaugcuuauauucaucuu

SEQ ID NO: 41163 - RNA, 32 nt, Homo Sapiens
ggcgggaugaugagaagugcugcggcugaggc

SEQ ID NO: 41164 - RNA, 32 nt, Homo Sapiens
ggcugugcuguauuugauauaauuguacugug

SEQ ID NO: 41165 - RNA, 32 nt, Homo Sapiens
uggacgagcucaucaucaccgacuggcuggag

SEQ ID NO: 41166 - RNA, 32 nt, Homo Sapiens
aguagaaucaagcaaauccuuccaagaauuuu

SEQ ID NO: 41167 - RNA, 32 nt, Homo Sapiens
cuuuaaaugcuguuuuuauagaugugauauga

SEQ ID NO: 41168 - RNA, 32 nt, Homo Sapiens
cuuguuuuaagugauuauauuucuuccacugu

SEQ ID NO: 41169 - RNA, 32 nt, Homo Sapiens
uucaucuugggguguguccuaugaagauccuu

SEQ ID NO: 41170 - RNA, 32 nt, Homo Sapiens
gggggugauuaccccaugcugcuguucucaug

SEQ ID NO: 41171 - RNA, 32 nt, Homo Sapiens
aagccaaguccuccuugcaaguugccaaauaa

SEQ ID NO: 41172 - RNA, 32 nt, Homo Sapiens
ccaguguacacgugcuuuuauuauauccauuu

SEQ ID NO: 41173 - RNA, 32 nt, Homo Sapiens
cauauagccaagacaaucuuaagcaaaaagaa

SEQ ID NO: 41174 - RNA, 32 nt, Homo Sapiens
aacaauucaggagcuuuuuuuuuugucuuuuu

SEQ ID NO: 41175 - RNA, 32 nt, Homo Sapiens
uguucaugugccucugcggggcagggccuucc

SEQ ID NO: 41176 - RNA, 32 nt, Homo Sapiens
guuuugagcuuguacccagcgcugcuuuugcc

SEQ ID NO: 41177 - RNA, 32 nt, Homo Sapiens
cuagaauccuugugauuuuucuuagcaccuua

SEQ ID NO: 41178 - RNA, 32 nt, Homo Sapiens
gacccccaauccccggcugcagaacuuugugc

SEQ ID NO: 41179 - RNA, 32 nt, Homo Sapiens
cugagauagaaauacuuuauuuuuguaacuuu

SEQ ID NO: 41180 - RNA, 32 nt, Homo Sapiens
uacugcccgcccucugcccccgcggcaaccgc

SEQ ID NO: 41181 - RNA, 32 nt, Homo Sapiens
caagaccucaucugccugcagugucaaaucga

SEQ ID NO: 41182 - RNA, 32 nt, Homo Sapiens
acgaggccaagaguuugaggguggguucgggg

SEQ ID NO: 41183 - RNA, 29 nt, Homo Sapiens
cccuugaaaaggaaauauuuucuguuucu

SEQ ID NO: 41184 - RNA, 32 nt, Homo Sapiens
aaaacacacugacugugggacugugccaggau

SEQ ID NO: 41185 - RNA, 32 nt, Homo Sapiens
ccuugcugaaguuuuucuugacuucuccaguu

SEQ ID NO: 41186 - RNA, 32 nt, Homo Sapiens
ugcuguuccgagucagcguaggagaaaggcca

SEQ ID NO: 41187 - RNA, 32 nt, Homo Sapiens
gggaauucccccuucuucucaugcggagcuga

SEQ ID NO: 41188 - RNA, 30 nt, Homo Sapiens
gguuggguguggaagggggaaaaggggaug

SEQ ID NO: 41189 - RNA, 32 nt, Homo Sapiens
aagaagccuguuauggucuauauccauggggg

SEQ ID NO: 41190 - RNA, 32 nt, Homo Sapiens
cauacagaggaugcauuuauuuuugcucuaug

SEQ ID NO: 41191 - RNA, 32 nt, Homo Sapiens
aucauaaaagaagaggcgaguagggcacaaca

SEQ ID NO: 41192 - RNA, 32 nt, Homo Sapiens
ggccccuccacccucccuccccucccggcucc

SEQ ID NO: 41193 - RNA, 32 nt, Homo Sapiens
auuguuuacauuuucugguacucugugaaaga

SEQ ID NO: 41194 - RNA, 32 nt, Homo Sapiens
cccagcuaauuuuuguuuuguuuucuuuuuau

SEQ ID NO: 41195 - RNA, 32 nt, Homo Sapiens
uaaguaaauuuguuaguauuugaaagagguuu

SEQ ID NO: 41196 - RNA, 32 nt, Homo Sapiens
ggguaaccuggccacugucccuguccuucuac

SEQ ID NO: 41197 - RNA, 32 nt, Homo Sapiens
ggucccagacgcccggcgcagcgggagcggcg

SEQ ID NO: 41198 - RNA, 32 nt, Homo Sapiens
cccuucccaucccaaccuugagccccaggaga

SEQ ID NO: 41199 - RNA, 32 nt, Homo Sapiens
ggcucacgccuguaaccucagcacugugggag

SEQ ID NO: 41200 - RNA, 32 nt, Homo Sapiens
gcuacucuaccacuuccugugugccucuacug

SEQ ID NO: 41201 - RNA, 32 nt, Homo Sapiens
cagugggaugacugggggaggguugcugcagg

SEQ ID NO: 41202 - RNA, 32 nt, Homo Sapiens
cguauaggcaggugugagggacaguggcuaag

SEQ ID NO: 41203 - RNA, 32 nt, Homo Sapiens
uggcccgggggaaagcuggggcugggaagccc

SEQ ID NO: 41204 - RNA, 30 nt, Homo Sapiens
aauuggaccaggcgcgguggcucuugccug

SEQ ID NO: 41205 - RNA, 32 nt, Homo Sapiens
ucgggccagcccagcccagggccugaguuaga

SEQ ID NO: 41206 - RNA, 32 nt, Homo Sapiens
ucagucuucagauuuugaacccaugaggcagg

SEQ ID NO: 41207 - RNA, 32 nt, Homo Sapiens
auuccagcggcuuggaaggcugaggcaggaga

SEQ ID NO: 41208 - RNA, 32 nt, Homo Sapiens
ggugagaugucugcagaaaacagccacacuag

SEQ ID NO: 41209 - RNA, 32 nt, Homo Sapiens
ccacggucccuggucacagccauccagacccu

SEQ ID NO: 41210 - RNA, 32 nt, Homo Sapiens
gcccggccuacauggugaaaccccgucucuac

SEQ ID NO: 41211 - RNA, 32 nt, Homo Sapiens
ccuucccggccgcccccuccccacucccccua

SEQ ID NO: 41212 - RNA, 30 nt, Homo Sapiens
acucuggauaucccugaaucccuucacuua

SEQ ID NO: 41213 - RNA, 32 nt, Homo Sapiens
cauaaggaauguuauauaggcuugucaguucc

SEQ ID NO: 41214 - RNA, 31 nt, Homo Sapiens
gcuccgcaagggcgcgcaggagccugggaag

SEQ ID NO: 41215 - RNA, 32 nt, Homo Sapiens
aaaaguguuguaauagggaaacuuggacacua

SEQ ID NO: 41216 - RNA, 32 nt, Homo Sapiens
aaaagggggacucucccugacccaggccccag

SEQ ID NO: 41217 - RNA, 32 nt, Homo Sapiens
ucagcagaugggccacugacagagcacugccc

SEQ ID NO: 41218 - RNA, 32 nt, Homo Sapiens
uuucagggcagucaggggguccugcuuagaag

SEQ ID NO: 41219 - RNA, 32 nt, Homo Sapiens
gaggagguggaggccggcgcuccgcuccgcuc

SEQ ID NO: 41220 - RNA, 31 nt, Homo Sapiens
ugugucagaaacaugaaaugcuuccaagcau

SEQ ID NO: 41221 - RNA, 32 nt, Homo Sapiens
ucucccugcugcuucauacugaaacaggugcc

SEQ ID NO: 41222 - RNA, 32 nt, Homo Sapiens
uuaaagcauccuccuccuggacuccccucccu

SEQ ID NO: 41223 - RNA, 32 nt, Homo Sapiens
ugaucuugugugccuguagguacuguguguca

SEQ ID NO: 41224 - RNA, 32 nt, Homo Sapiens
uugguaauaaaucaauaagaaauauuuacauu

SEQ ID NO: 41225 - RNA, 32 nt, Homo Sapiens
acaagaacuauccugaguuucuguggauggaa

SEQ ID NO: 41226 - RNA, 32 nt, Homo Sapiens
ugacaaaacaaggcucuucaacaccccccaaa

SEQ ID NO: 41227 - RNA, 32 nt, Homo Sapiens
ggggcccuggggugggguaggcagaugggcca

SEQ ID NO: 41228 - RNA, 29 nt, Homo Sapiens
uaaucaauaaacgauuuaauucucuugaa

SEQ ID NO: 41229 - RNA, 32 nt, Homo Sapiens
acacagaucgcucagggcacugagagauccca

SEQ ID NO: 41230 - RNA, 32 nt, Homo Sapiens
agguaggcuucaguaaaaugcacauaaauuaa

SEQ ID NO: 41231 - RNA, 32 nt, Homo Sapiens
aaaaaugucaggcucucauaguuacccuuuua

SEQ ID NO: 41232 - RNA, 32 nt, Homo Sapiens
ccaaugcuguacucaccuccaucacccuccaa

SEQ ID NO: 41233 - RNA, 32 nt, Homo Sapiens
uacgaaucuuucaucgccgauccgcacaaagc

SEQ ID NO: 41234 - RNA, 32 nt, Homo Sapiens
acaauauggaaucuaaagguuuuaucacuuag

SEQ ID NO: 41235 - RNA, 32 nt, Homo Sapiens
ccuggagccuggaggaggccgaggggaccaug

SEQ ID NO: 41236 - RNA, 32 nt, Homo Sapiens
ccugccuuuucucaucagcagaacagaauccu

SEQ ID NO: 41237 - RNA, 32 nt, Homo Sapiens
ucgcagccaaccccuggugccccugucccacc

SEQ ID NO: 41238 - RNA, 32 nt, Homo Sapiens
uaucaucagaucuuuuguacauaguggcagua

SEQ ID NO: 41239 - RNA, 32 nt, Homo Sapiens
gagcaguguuuguuucaagcuucugucaaaua

SEQ ID NO: 41240 - RNA, 32 nt, Homo Sapiens
ccgcccuucccacagcauuccuccaucuuaga

SEQ ID NO: 41241 - RNA, 32 nt, Homo Sapiens
ggcuuccgcgccccucgccauuuuccagcagc

SEQ ID NO: 41242 - RNA, 32 nt, Homo Sapiens
aacaauuuaaacaaaugguccauggggaaaag

SEQ ID NO: 41243 - RNA, 32 nt, Homo Sapiens
gaggcgcugcugcggccgcugcugcugacacu

SEQ ID NO: 41244 - RNA, 32 nt, Homo Sapiens
auccccaguguccaggcacagaguagucgguc

SEQ ID NO: 41245 - RNA, 32 nt, Homo Sapiens
agcugggccaagggagucagacucuaagacaa

SEQ ID NO: 41246 - RNA, 32 nt, Homo Sapiens
cacuguccugaagaugugaaugggugguacga

SEQ ID NO: 41247 - RNA, 32 nt, Homo Sapiens
gcaggucccgugccccggggcagcuccugcca

SEQ ID NO: 41248 - RNA, 32 nt, Homo Sapiens
uccagucugggggaaaaugcuuccucauuugc

SEQ ID NO: 41249 - RNA, 32 nt, Homo Sapiens
caacaaaugaagcucacuaaaugugcugaaag

SEQ ID NO: 41250 - RNA, 32 nt, Homo Sapiens
gaaccaacuuuuacugaggagcaugcaggcaa

SEQ ID NO: 41251 - RNA, 32 nt, Homo Sapiens
uguuuguaaucccagcacuuugggaggccgag

SEQ ID NO: 41252 - RNA, 32 nt, Homo Sapiens
guuggaaggggagggugaccagagaagaggga

SEQ ID NO: 41253 - RNA, 32 nt, Homo Sapiens
uguuuguaauccuagcacuuugggaggcugag

SEQ ID NO: 41254 - RNA, 32 nt, Homo Sapiens
aaagcuggagccugacgucagagcuuuuaacu

SEQ ID NO: 41255 - RNA, 32 nt, Homo Sapiens
cguuguucccagccucccuuccuuccaccugg

SEQ ID NO: 41256 - RNA, 32 nt, Homo Sapiens
caucuuucuccuuaguuuacagugcaauuuua

SEQ ID NO: 41257 - RNA, 32 nt, Homo Sapiens
gccggcuuucccgggucuucuccagcugccac

SEQ ID NO: 41258 - RNA, 32 nt, Homo Sapiens
cagacuguuaucuauaggcuuaucguucaaau

SEQ ID NO: 41259 - RNA, 32 nt, Homo Sapiens
gcuuucaaaugcaugaaaauggugcaguugua

SEQ ID NO: 41260 - RNA, 32 nt, Homo Sapiens
uuuuauuuuuaaauauuguacuauuuauggug

SEQ ID NO: 41261 - RNA, 32 nt, Homo Sapiens
acugcagccgaacccuggucccuccuccacaa

SEQ ID NO: 41262 - RNA, 32 nt, Homo Sapiens
ggugggguguacaaugaaugugaaugacacuu

SEQ ID NO: 41263 - RNA, 32 nt, Homo Sapiens
aacagagccacaaacuuuugccgacucccgcg

SEQ ID NO: 41264 - RNA, 32 nt, Homo Sapiens
uuacacaugggagcugccugccugcugcugcu

SEQ ID NO: 41265 - RNA, 32 nt, Homo Sapiens
ucugcccucuuccuaaugcccacacugcuugg

SEQ ID NO: 41266 - RNA, 32 nt, Homo Sapiens
cuuaggcccgucugcccgccuuccuccaucua

SEQ ID NO: 41267 - RNA, 31 nt, Homo Sapiens
caugaaacauucucccucagagccuucagaa

SEQ ID NO: 41268 - RNA, 32 nt, Homo Sapiens
cacccucuuuggagaacaugcucucuuuucac

SEQ ID NO: 41269 - RNA, 32 nt, Homo Sapiens
uauuuugcacuuugagaaaccuuguauauuaa

SEQ ID NO: 41270 - RNA, 32 nt, Homo Sapiens
aauguuuaauuguuuggaucugcacaguuugg

SEQ ID NO: 41271 - RNA, 32 nt, Homo Sapiens
ugaagagucaaagaagagaaggugaugcagaa

SEQ ID NO: 41272 - RNA, 32 nt, Homo Sapiens
aaugccugguuuuuucugugacugcuggccuu

SEQ ID NO: 41273 - RNA, 32 nt, Homo Sapiens
ugggucauuuguccuguagaguguuucccagg

SEQ ID NO: 41274 - RNA, 32 nt, Homo Sapiens
ccaccccaccuugccucuguccugcgcugggc

SEQ ID NO: 41275 - RNA, 32 nt, Homo Sapiens
aaguuaaaaaauuuccucuaaauacauguuug

SEQ ID NO: 41276 - RNA, 32 nt, Homo Sapiens
accuuaaaacaauagacauuugguaaugucug

SEQ ID NO: 41277 - RNA, 32 nt, Homo Sapiens
ccagcacuuugggaggccuaggcggguggauc

SEQ ID NO: 41278 - RNA, 29 nt, Homo Sapiens
ggaaaugaguggggugcagcuccagcccc

SEQ ID NO: 41279 - RNA, 32 nt, Homo Sapiens
cacauauacaugcucuuaauuacuccugaccu

SEQ ID NO: 41280 - RNA, 32 nt, Homo Sapiens
cucccuggaauguaaauugacuaagaggaauu

SEQ ID NO: 41281 - RNA, 32 nt, Homo Sapiens
gacgugaaaugguguguguauuuauauccgac

SEQ ID NO: 41282 - RNA, 32 nt, Homo Sapiens
aggguugggcccggcucccagccccucgccgu

SEQ ID NO: 41283 - RNA, 32 nt, Homo Sapiens
agaaggcuccaccagagcugccaugcugccgu

SEQ ID NO: 41284 - RNA, 32 nt, Homo Sapiens
ggggcaacaccguguuaggucccgcgcaucug

SEQ ID NO: 41285 - RNA, 32 nt, Homo Sapiens
agaagacuuguuuaguauuuugccaucagcac

SEQ ID NO: 41286 - RNA, 32 nt, Homo Sapiens
uagcacugcccccuuuccaccuagaagcaggu

SEQ ID NO: 41287 - RNA, 32 nt, Homo Sapiens
aguauuuuuaaaacuuuuuagaugagcuggau

SEQ ID NO: 41288 - RNA, 32 nt, Homo Sapiens
uugggggaauggggcaaaggggugggcgauuu

SEQ ID NO: 41289 - RNA, 32 nt, Homo Sapiens
cagguucuccuccuuuuaucuuuuguguuuuu

SEQ ID NO: 41290 - RNA, 32 nt, Homo Sapiens
ggggguccauuauaaaaccacccauuaggucu

SEQ ID NO: 41291 - RNA, 32 nt, Homo Sapiens
uuuucaugguauaugugagacccauuagugag

SEQ ID NO: 41292 - RNA, 32 nt, Homo Sapiens
caaaacuacauuucuguaaaucucuugcauua

SEQ ID NO: 41293 - RNA, 32 nt, Homo Sapiens
ugguccugaaaucauuacaauuucauauugaa

SEQ ID NO: 41294 - RNA, 32 nt, Homo Sapiens
gagggcugaacacguggaggcaaacaggaagg

SEQ ID NO: 41295 - RNA, 32 nt, Homo Sapiens
auugacuguauauauuugcuucuuaaaacuac

SEQ ID NO: 41296 - RNA, 32 nt, Homo Sapiens
ugcugcuaaggcucuauuuccucccccaguua

SEQ ID NO: 41297 - RNA, 32 nt, Homo Sapiens
caucacccuuccacauccuccuccucguugcc

SEQ ID NO: 41298 - RNA, 32 nt, Homo Sapiens
ggcuuuuggggaaggggaggauagcgagaaga

SEQ ID NO: 41299 - RNA, 32 nt, Homo Sapiens
caauguggacuucuuuuaaaccuuucuaaugc

SEQ ID NO: 41300 - RNA, 32 nt, Homo Sapiens
acacuuuuguguauauaacccuuggaauagau

SEQ ID NO: 41301 - RNA, 32 nt, Homo Sapiens
uacuucuagaacaaaauuauucauagugcguu

SEQ ID NO: 41302 - RNA, 30 nt, Homo Sapiens
agccgccuggacugcaggggggcggcagca

SEQ ID NO: 41303 - RNA, 32 nt, Homo Sapiens
agugguuacucgcaaggcaacaauuauuaucc

SEQ ID NO: 41304 - RNA, 32 nt, Homo Sapiens
cauauaugaguacugaaaaauuaaguugcaua

SEQ ID NO: 41305 - RNA, 32 nt, Homo Sapiens
gucaugacucuucaaagauaugaugaaaaguu

SEQ ID NO: 41306 - RNA, 32 nt, Homo Sapiens
ggugacuccuuccccggcccccacagcaguau

SEQ ID NO: 41307 - RNA, 32 nt, Homo Sapiens
uaugcccguggcgguggcacggcgccguaucc

SEQ ID NO: 41308 - RNA, 32 nt, Homo Sapiens
uuucaacucuggaaacaagauggcuccaagcu

SEQ ID NO: 41309 - RNA, 32 nt, Homo Sapiens
uagguucuaaaaugaagauguauggguacucu

SEQ ID NO: 41310 - RNA, 32 nt, Homo Sapiens
caauguauuuuauuuuaucaacuuuuucucuu

SEQ ID NO: 41311 - RNA, 32 nt, Homo Sapiens
caguucgacagcgcgcugcugccugcaguccg

SEQ ID NO: 41312 - RNA, 32 nt, Homo Sapiens
gcugccucccucugauuccccagcucaucucc

SEQ ID NO: 41313 - RNA, 32 nt, Homo Sapiens
cucaugccauuuccagaccaagaaaauacauu

SEQ ID NO: 41314 - RNA, 32 nt, Homo Sapiens
auggcauggcuuguaucugcaguguccuugcu

SEQ ID NO: 41315 - RNA, 32 nt, Homo Sapiens
gcgggcuacugggccugcgcugccgggcuuug

SEQ ID NO: 41316 - RNA, 32 nt, Homo Sapiens
aagguuugcuagccaaggaaaguaaaauguga

SEQ ID NO: 41317 - RNA, 32 nt, Homo Sapiens
auugcguuauuuucuuuuuccuuuauaauucu

SEQ ID NO: 41318 - RNA, 32 nt, Homo Sapiens
gaaaugaaucaaaguaauuuuaaugaauuuuu

SEQ ID NO: 41319 - RNA, 32 nt, Homo Sapiens
ggagggcgcgcccuguggcugccaccggagga

SEQ ID NO: 41320 - RNA, 32 nt, Homo Sapiens
guggguuggggugggggugcucucggguugug

SEQ ID NO: 41321 - RNA, 32 nt, Homo Sapiens
ccucuggagcagccuggucuuggggauuggcc

SEQ ID NO: 41322 - RNA, 32 nt, Homo Sapiens
aucuugcuaucccuaugccucuccauggaguc

SEQ ID NO: 41323 - RNA, 32 nt, Homo Sapiens
uugaagccucucuccuucucugccuacaaaga

SEQ ID NO: 41324 - RNA, 32 nt, Homo Sapiens
uuuuagcuaauagaauaaaagugcaacagaag

SEQ ID NO: 41325 - RNA, 32 nt, Homo Sapiens
gcgccuggccucagaaugcauucuuacacauc

SEQ ID NO: 41326 - RNA, 27 nt, Homo Sapiens
cgauucuccugccucagcccccugagu

SEQ ID NO: 41327 - RNA, 32 nt, Homo Sapiens
ugcaggggugagcggggcgcggcguggcucuc

SEQ ID NO: 41328 - RNA, 32 nt, Homo Sapiens
gcuccucagaauccuggugccuugaaguucuc

SEQ ID NO: 41329 - RNA, 32 nt, Homo Sapiens
ugauuuucuguauugauggacucauuucucuc

SEQ ID NO: 41330 - RNA, 32 nt, Homo Sapiens
uaauguaggaacuuaaauuuguaaguaaaugc

SEQ ID NO: 41331 - RNA, 32 nt, Homo Sapiens
cuugugcucagcaugauucuuuaauagaaguu

SEQ ID NO: 41332 - RNA, 32 nt, Homo Sapiens
agaaucuaauaggaugcugguuguguauuaaa

SEQ ID NO: 41333 - RNA, 32 nt, Homo Sapiens
gauugcuuuucucaauuuuggagaagauguuu

SEQ ID NO: 41334 - RNA, 32 nt, Homo Sapiens
gaggggguccgccagcagcuggagcugggccg

SEQ ID NO: 41335 - RNA, 32 nt, Homo Sapiens
acccugacugucuacagauuccaacuuuaaua

SEQ ID NO: 41336 - RNA, 32 nt, Homo Sapiens
agccagggcagugcgcuccacaaacccugaaa

SEQ ID NO: 41337 - RNA, 32 nt, Homo Sapiens
acauuuacaaauuuuucaagagguuagccacu

SEQ ID NO: 41338 - RNA, 32 nt, Homo Sapiens
gauuggauggaauugaaucaaacugaaaaagu

SEQ ID NO: 41339 - RNA, 32 nt, Homo Sapiens
augcucaggggccccaggcacguggguuguuu

SEQ ID NO: 41340 - RNA, 32 nt, Homo Sapiens
gccaauccagguccuuaucauccuucagguug

SEQ ID NO: 41341 - RNA, 32 nt, Homo Sapiens
auuaguugaaggaaacaaaucaucauaccuuu

SEQ ID NO: 41342 - RNA, 32 nt, Homo Sapiens
aaucauagaacgaguucuguaucccucaggcc

SEQ ID NO: 41343 - RNA, 32 nt, Homo Sapiens
ucauacuuuuuccuaggcuuggcacugccuuu

SEQ ID NO: 41344 - RNA, 32 nt, Homo Sapiens
uaaaagggaaaauaaaaacuuucuguugaauc

SEQ ID NO: 41345 - RNA, 32 nt, Homo Sapiens
augguucaaacacaaaauauuaaaugagcugu

SEQ ID NO: 41346 - RNA, 32 nt, Homo Sapiens
uagaauuuuuaaaaaagugaucuuagguuugu

SEQ ID NO: 41347 - RNA, 32 nt, Homo Sapiens
augagucuaggaccaggauucuuaugcuaugg

SEQ ID NO: 41348 - RNA, 32 nt, Homo Sapiens
ugggauccugguucccaaaaaguauggacaua

SEQ ID NO: 41349 - RNA, 32 nt, Homo Sapiens
cagguaugaugaugcgauaauaauaaacaucu

SEQ ID NO: 41350 - RNA, 32 nt, Homo Sapiens
gacuuugggaaagagggaccagaacuuccccu

SEQ ID NO: 41351 - RNA, 32 nt, Homo Sapiens
uuugcuaauaccaaaauugagcuuacaauuag

SEQ ID NO: 41352 - RNA, 32 nt, Homo Sapiens
gccaccacuguacguuacaaagggcggaaccu

SEQ ID NO: 41353 - RNA, 32 nt, Homo Sapiens
gagugggggcagauucugcugcuggggaagga

SEQ ID NO: 41354 - RNA, 32 nt, Homo Sapiens
cacggaaaaagcuaguucuguggucaggcggc

SEQ ID NO: 41355 - RNA, 32 nt, Homo Sapiens
gucuguccaccgaccugaaccuuuaccauuga

SEQ ID NO: 41356 - RNA, 32 nt, Homo Sapiens
uauuauuaaaauccuguaaauaucuaugguau

SEQ ID NO: 41357 - RNA, 32 nt, Homo Sapiens
ucuaagaaaaaauuauuuucaggagaauauuc

SEQ ID NO: 41358 - RNA, 32 nt, Homo Sapiens
gggagcuguagucuguuaacugcucucagccu

SEQ ID NO: 41359 - RNA, 32 nt, Homo Sapiens
gcccugugauuugaaaaauauagaaucauuaa

SEQ ID NO: 41360 - RNA, 32 nt, Homo Sapiens
cagccugggcgacagagcaagacacugucucu

SEQ ID NO: 41361 - RNA, 32 nt, Homo Sapiens
gcccacgucgacgagcaccauuuggccagaca

SEQ ID NO: 41362 - RNA, 32 nt, Homo Sapiens
cguuguauuucugaaaauaguuacauauguac

SEQ ID NO: 41363 - RNA, 30 nt, Homo Sapiens
cccauggugcccgugccucugugcugugua

SEQ ID NO: 41364 - RNA, 32 nt, Homo Sapiens
cugugagauucuuaaaacuuuuuugcuucaua

SEQ ID NO: 41365 - RNA, 32 nt, Homo Sapiens
aguugucuauauauuuugugccauguauauaa

SEQ ID NO: 41366 - RNA, 32 nt, Homo Sapiens
ccgccgccgccuccuccccccggaucgggugu

SEQ ID NO: 41367 - RNA, 32 nt, Homo Sapiens
uggguaccagagggagcugugcauugugaaua

SEQ ID NO: 41368 - RNA, 32 nt, Homo Sapiens
auaaacuauuuauuaacuaauguaauguccuc

SEQ ID NO: 41369 - RNA, 32 nt, Homo Sapiens
ccuacucgugcucgggcaagcugcuggagagg

SEQ ID NO: 41370 - RNA, 32 nt, Homo Sapiens
cggccuugccaggcugacgucgaggaaagcca

SEQ ID NO: 41371 - RNA, 32 nt, Homo Sapiens
ucacugauguucuuguuguguauugucuuuuu

SEQ ID NO: 41372 - RNA, 32 nt, Homo Sapiens
gcccgcccgcccagccccucgaccccuguagc

SEQ ID NO: 41373 - RNA, 32 nt, Homo Sapiens
gaguucgcgggcagggggcgccgggacucccc

SEQ ID NO: 41374 - RNA, 32 nt, Homo Sapiens
ugcccugagucuggcggugaccagagaggcug

SEQ ID NO: 41375 - RNA, 32 nt, Homo Sapiens
accacaggccccguuggagcccucacagauga

SEQ ID NO: 41376 - RNA, 32 nt, Homo Sapiens
caacaccgagugugggggccacgccccuugcc

SEQ ID NO: 41377 - RNA, 32 nt, Homo Sapiens
auuuacuauaucuuuaguguaagauuuuaaaa

SEQ ID NO: 41378 - RNA, 32 nt, Homo Sapiens
caucuaauggagauagguguauguaugugugc

SEQ ID NO: 41379 - RNA, 32 nt, Homo Sapiens
ggcagcagcguuggcccggccccgggagcgga

SEQ ID NO: 41380 - RNA, 32 nt, Homo Sapiens
auuccgguguuuuauuacaaucaaagaagagg

SEQ ID NO: 41381 - RNA, 32 nt, Homo Sapiens
ggacaucacccacaugccccagcucucggacc

SEQ ID NO: 41382 - RNA, 32 nt, Homo Sapiens
uccaaguuuuaugcugauuuuuccaaggaucu

SEQ ID NO: 41383 - RNA, 32 nt, Homo Sapiens
ccacugugggcccuuccccugggccugccauc

SEQ ID NO: 41384 - RNA, 32 nt, Homo Sapiens
cuaugguauuuuuguuaguagcagccagaacu

SEQ ID NO: 41385 - RNA, 32 nt, Homo Sapiens
uagagucuaccuugcaaagccuccugcuccua

SEQ ID NO: 41386 - RNA, 32 nt, Homo Sapiens
uguccccguccucccucacugccccauaugug

SEQ ID NO: 41387 - RNA, 32 nt, Homo Sapiens
cccuccaucccggccgccggggcccgcccucu

SEQ ID NO: 41388 - RNA, 32 nt, Homo Sapiens
cggcggcggcgguggcggcgaccgucaguuuu

SEQ ID NO: 41389 - RNA, 32 nt, Homo Sapiens
ggggcugucuaagagggaaaggagaaaacaaa

SEQ ID NO: 41390 - RNA, 32 nt, Homo Sapiens
aaacuuaaaggggaacaaaacuugaaaaagcc

SEQ ID NO: 41391 - RNA, 32 nt, Homo Sapiens
ggcgccuccguccccagccgcggcucgggaau

SEQ ID NO: 41392 - RNA, 32 nt, Homo Sapiens
guuuuccuuuuugcuuguuuuuaaagccaaaa

SEQ ID NO: 41393 - RNA, 32 nt, Homo Sapiens
cugcuacuugauuucuuucucaucccacgcac

SEQ ID NO: 41394 - RNA, 32 nt, Homo Sapiens
cauccuguuauccccugguguacacauggaag

SEQ ID NO: 41395 - RNA, 32 nt, Homo Sapiens
guuuuaguucagagaauugucuuaggacaaca

SEQ ID NO: 41396 - RNA, 32 nt, Homo Sapiens
cucuaaacaggcuuaaugauucuucaaguaga

SEQ ID NO: 41397 - RNA, 32 nt, Homo Sapiens
gucguccuuucuguugggaaccaggaugcuca

SEQ ID NO: 41398 - RNA, 32 nt, Homo Sapiens
uggaaccugcagaggccagcccggggcugggg

SEQ ID NO: 41399 - RNA, 32 nt, Homo Sapiens
ggggaucagaggugagggaacucaugguuugg

SEQ ID NO: 41400 - RNA, 32 nt, Homo Sapiens
gaguuggcauucaucauuuucuaaucaucagc

SEQ ID NO: 41401 - RNA, 32 nt, Homo Sapiens
ccuuuuucucagcaucagagccagacaggauu

SEQ ID NO: 41402 - RNA, 27 nt, Homo Sapiens
uccuuuuuaaaauaaauuuuauuuuau

SEQ ID NO: 41403 - RNA, 32 nt, Homo Sapiens
aaauuaaaaaucaacaaaauuugggauacuua

SEQ ID NO: 41404 - RNA, 32 nt, Homo Sapiens
cccccagcggcgcugccuccuccaaaugagcg

SEQ ID NO: 41405 - RNA, 32 nt, Homo Sapiens
aacauacuugguuuccuauuuccccuuaucuu

SEQ ID NO: 41406 - RNA, 32 nt, Homo Sapiens
cgagaguuggcgagggcggaggagugccggga

SEQ ID NO: 41407 - RNA, 32 nt, Homo Sapiens
ucucuccccucccccuccaguccacgacgacu

SEQ ID NO: 41408 - RNA, 32 nt, Homo Sapiens
gauauauguauuuauugucauuacugccuuug

SEQ ID NO: 41409 - RNA, 32 nt, Homo Sapiens
uaccuuuugguuaaacuaauaaacuaguuugg

SEQ ID NO: 41410 - RNA, 32 nt, Homo Sapiens
cccagggcgcccugcgggccagcguggaggcu

SEQ ID NO: 41411 - RNA, 32 nt, Homo Sapiens
ggcuggucucaaacuccugaccucaagcgauc

SEQ ID NO: 41412 - RNA, 32 nt, Homo Sapiens
gacuggucucaaacuccugaccucaggcgauc

SEQ ID NO: 41413 - RNA, 32 nt, Homo Sapiens
aacaguuccgaaucuuauuccaaaugcuauag

SEQ ID NO: 41414 - RNA, 32 nt, Homo Sapiens
cugcugguuucuaguccccccucccccucuuc

SEQ ID NO: 41415 - RNA, 32 nt, Homo Sapiens
uguccuuuucuuuugcuucaggcuaagagcug

SEQ ID NO: 41416 - RNA, 32 nt, Homo Sapiens
caagugcucacagacuagaacuuaacggaaca

SEQ ID NO: 41417 - RNA, 32 nt, Homo Sapiens
cgcagagcagcguucgguuuuguuuuuaaauu

SEQ ID NO: 41418 - RNA, 32 nt, Homo Sapiens
ccagcgccgccggcugccccagcccugcguga

SEQ ID NO: 41419 - RNA, 32 nt, Homo Sapiens
ccucuucaauuuccauccuuguuugcaaaggu

SEQ ID NO: 41420 - RNA, 32 nt, Homo Sapiens
cagaggugcgggauucugaccaacggcauuaa

SEQ ID NO: 41421 - RNA, 32 nt, Homo Sapiens
ccgugcaggggcggcccggccagugucgcuca

SEQ ID NO: 41422 - RNA, 32 nt, Homo Sapiens
auuaccuccgccaugcaauuuccacuaucaau

SEQ ID NO: 41423 - RNA, 32 nt, Homo Sapiens
ugagcagagcagagaccagccugagccccggg

SEQ ID NO: 41424 - RNA, 32 nt, Homo Sapiens
aaagaccuuuuggaagcuacuguuuuuaaaaa

SEQ ID NO: 41425 - RNA, 32 nt, Homo Sapiens
ucccuccuuguacagcugcaaggucacaagac

SEQ ID NO: 41426 - RNA, 32 nt, Homo Sapiens
cuagcccugugcgcuccgcccgcgcuccccuc

SEQ ID NO: 41427 - RNA, 32 nt, Homo Sapiens
cauccuaaugucaucacaaacucugccaaauu

SEQ ID NO: 41428 - RNA, 32 nt, Homo Sapiens
gaguaaaaaaugaaauaaaauaaauccacgcu

SEQ ID NO: 41429 - RNA, 32 nt, Homo Sapiens
uugccaagaucccagggaaugugugugcccgu

SEQ ID NO: 41430 - RNA, 32 nt, Homo Sapiens
cagugcccagaagagggaaggggaguggcugg

SEQ ID NO: 41431 - RNA, 32 nt, Homo Sapiens
aaugguucuuuacuuuugugaucuuccucccg

SEQ ID NO: 41432 - RNA, 32 nt, Homo Sapiens
aaauuuugugaccccuuucacuuaccugaaaa

SEQ ID NO: 41433 - RNA, 32 nt, Homo Sapiens
uuuuaauguauaguaaaucacgcuuuuugaaa

SEQ ID NO: 41434 - RNA, 32 nt, Homo Sapiens
cauacuccaaggaaauauaucagggacagaca

SEQ ID NO: 41435 - RNA, 32 nt, Homo Sapiens
cgucucccuuggcccagagacggaguguggga

SEQ ID NO: 41436 - RNA, 32 nt, Homo Sapiens
caugcaugcaugcaaccuuguaaaaugagcuu

SEQ ID NO: 41437 - RNA, 32 nt, Homo Sapiens
auuaguguauaaaucugaguguacuaggugga

SEQ ID NO: 41438 - RNA, 32 nt, Homo Sapiens
aaggaggcucccacccaccucucccaagagca

SEQ ID NO: 41439 - RNA, 32 nt, Homo Sapiens
ccgggacgccgcgucgggcucucggccgccca

SEQ ID NO: 41440 - RNA, 32 nt, Homo Sapiens
uguugucaagagagggcggggauggcgggcag

SEQ ID NO: 41441 - RNA, 32 nt, Homo Sapiens
ccgugguguggcggcccuggggcucuuucuua

SEQ ID NO: 41442 - RNA, 32 nt, Homo Sapiens
uccugccggcugagcgggccuggaggaaguga

SEQ ID NO: 41443 - RNA, 32 nt, Homo Sapiens
ggacucacagugccacugcaaucaagcuccca

SEQ ID NO: 41444 - RNA, 32 nt, Homo Sapiens
agaagccugcugaguucaccacaguuucaucc

SEQ ID NO: 41445 - RNA, 32 nt, Homo Sapiens
gguguggccaauggaggggggugcuggccccc

SEQ ID NO: 41446 - RNA, 32 nt, Homo Sapiens
accccugaccuucuccucagcuucauugugag

SEQ ID NO: 41447 - RNA, 32 nt, Homo Sapiens
gaaguucauacacccaauggcaggaugggaac

SEQ ID NO: 41448 - RNA, 32 nt, Homo Sapiens
aguuaugcuauccuugcagcuaauccccuucu

SEQ ID NO: 41449 - RNA, 32 nt, Homo Sapiens
ccauuguggcgccccuuuccaguguuugacag

SEQ ID NO: 41450 - RNA, 32 nt, Homo Sapiens
cucuuauuguggaaaccuguugagaucacaga

SEQ ID NO: 41451 - RNA, 32 nt, Homo Sapiens
uuaagacguccucccccuauuucuguucuuag

SEQ ID NO: 41452 - RNA, 32 nt, Homo Sapiens
uugcagggcagacagugccuggcacugagggg

SEQ ID NO: 41453 - RNA, 32 nt, Homo Sapiens
gaagagguacccacaagaagaugacuuccauc

SEQ ID NO: 41454 - RNA, 32 nt, Homo Sapiens
ggcugguucccucuuccauucuaggcccuuau

SEQ ID NO: 41455 - RNA, 32 nt, Homo Sapiens
cgcuuucucaccccgcgcuucccggccugggu

SEQ ID NO: 41456 - RNA, 32 nt, Homo Sapiens
cccgggacuugggcagcggcgccggcagccca

SEQ ID NO: 41457 - RNA, 32 nt, Homo Sapiens
cuuuuauaaaaggacauuugcauguaaccuau

SEQ ID NO: 41458 - RNA, 32 nt, Homo Sapiens
cauccgucaucucccugguagauaggcacccc

SEQ ID NO: 41459 - RNA, 32 nt, Homo Sapiens
aauucaauauaaaauaaaacuuuguggaguca

SEQ ID NO: 41460 - RNA, 32 nt, Homo Sapiens
ccaggaaaggauuuuauaaugcuuagaaaaaa

SEQ ID NO: 41461 - RNA, 32 nt, Homo Sapiens
gagacugugggaaucaggaagagguguaggga

SEQ ID NO: 41462 - RNA, 32 nt, Homo Sapiens
gcguuuguggugccagagaaaaguagccagag

SEQ ID NO: 41463 - RNA, 32 nt, Homo Sapiens
agcaaauuaaacaauaaaccagacagcaaggc

SEQ ID NO: 41464 - RNA, 32 nt, Homo Sapiens
gaguccguggcugaugucugcacugaccagac

SEQ ID NO: 41465 - RNA, 28 nt, Homo Sapiens
uccaagcucugccccaaguccacaccau

SEQ ID NO: 41466 - RNA, 32 nt, Homo Sapiens
uccuggaggaagaagggcuuagggugcuggug

SEQ ID NO: 41467 - RNA, 32 nt, Homo Sapiens
uuuuccuacuguccucagaggcgugcuggucc

SEQ ID NO: 41468 - RNA, 32 nt, Homo Sapiens
ggucgacgguucgcaggggaggaggcggcggg

SEQ ID NO: 41469 - RNA, 32 nt, Homo Sapiens
uuugcauguacaaagauguugcauucagacua

SEQ ID NO: 41470 - RNA, 32 nt, Homo Sapiens
cagaucuuccucucuuuuuuuguuuuugagac

SEQ ID NO: 41471 - RNA, 32 nt, Homo Sapiens
gccucgugccggcggcccaggcacggagaggc

SEQ ID NO: 41472 - RNA, 32 nt, Homo Sapiens
ccccagcuccaugcccggccucagcagggccg

SEQ ID NO: 41473 - RNA, 32 nt, Homo Sapiens
guauauucuuugauaacccuuuuagaggaaga

SEQ ID NO: 41474 - RNA, 31 nt, Homo Sapiens
cuguggucacggagcaaaaacauuaaccagc

SEQ ID NO: 41475 - RNA, 32 nt, Homo Sapiens
cacagcagcccaagaacauacacaucaacccg

SEQ ID NO: 41476 - RNA, 32 nt, Homo Sapiens
cgacucggacaagcaguggcgccgggcaggac

SEQ ID NO: 41477 - RNA, 30 nt, Homo Sapiens
gccaucugcagugugggggaaccaaucuuc

SEQ ID NO: 41478 - RNA, 32 nt, Homo Sapiens
ggggcggggccuggcgggaguagucucggggu

SEQ ID NO: 41479 - RNA, 32 nt, Homo Sapiens
ugaguggcuucuuuuuaaaccaaaaaucgucu

SEQ ID NO: 41480 - RNA, 32 nt, Homo Sapiens
aaaaugaacuuguguuuuuuuaacaaacgucu

SEQ ID NO: 41481 - RNA, 32 nt, Homo Sapiens
aaaagcaaacaaagcaaaccauaguggugaac

SEQ ID NO: 41482 - RNA, 32 nt, Homo Sapiens
gguuuggcucauuugaaaaugaggguccgugg

SEQ ID NO: 41483 - RNA, 32 nt, Homo Sapiens
gaggaaacgggccguggccuuauuuagcgccu

SEQ ID NO: 41484 - RNA, 32 nt, Homo Sapiens
ggaugaaugaaguggaaugugaacuucgggca

SEQ ID NO: 41485 - RNA, 32 nt, Homo Sapiens
acgguggccaucgaccgccuggaccgcaucgg

SEQ ID NO: 41486 - RNA, 32 nt, Homo Sapiens
auagugggagcuuaguauuugcugaaugaaua

SEQ ID NO: 41487 - RNA, 32 nt, Homo Sapiens
agcccugucugucuccaccccauccccucuug

SEQ ID NO: 41488 - RNA, 32 nt, Homo Sapiens
caggccggcccuccagccugcugcugcauggg

SEQ ID NO: 41489 - RNA, 32 nt, Homo Sapiens
uauauuuuuuaugcuuuugucuuucuuaccug

SEQ ID NO: 41490 - RNA, 32 nt, Homo Sapiens
cuuuaccuguaguauuucuagucugcacaaua

SEQ ID NO: 41491 - RNA, 32 nt, Homo Sapiens
aagaauuccugccaugccccagccuucuccag

SEQ ID NO: 41492 - RNA, 32 nt, Homo Sapiens
ucgccucgccuggugucucucccgaccaugga

SEQ ID NO: 41493 - RNA, 30 nt, Homo Sapiens
gcggcggcgcccgcuggcgcucaagcaugg

SEQ ID NO: 41494 - RNA, 32 nt, Homo Sapiens
ugaggucuugagggaauagugaaacacauucc

SEQ ID NO: 41495 - RNA, 32 nt, Homo Sapiens
gacgagccugaaggauucugucuuuacugggg

SEQ ID NO: 41496 - RNA, 32 nt, Homo Sapiens
uucugugcuuugucauuuuacucugauaggaa

SEQ ID NO: 41497 - RNA, 32 nt, Homo Sapiens
aaaugaaauuucuccaguccuacauuucugaa

SEQ ID NO: 41498 - RNA, 32 nt, Homo Sapiens
ucaaaggcccaccagcccggcgcucaugcuga

SEQ ID NO: 41499 - RNA, 32 nt, Homo Sapiens
gccggcccucuggaccccggcgcagggccggc

SEQ ID NO: 41500 - RNA, 32 nt, Homo Sapiens
agcguucucugcaagucaguagguguuaguau

SEQ ID NO: 41501 - RNA, 32 nt, Homo Sapiens
acuccuccaggguggggucugggcagugggga

SEQ ID NO: 41502 - RNA, 32 nt, Homo Sapiens
ccacuuccagcuuguagaggcugccuacauuc

SEQ ID NO: 41503 - RNA, 32 nt, Homo Sapiens
caguuaccagugcugggcaguguccuccaagu

SEQ ID NO: 41504 - RNA, 32 nt, Homo Sapiens
ucacuaaaauauugaugguucaacacuuaagg

SEQ ID NO: 41505 - RNA, 32 nt, Homo Sapiens
aagauuucugccuguuuggacaauagguuuug

SEQ ID NO: 41506 - RNA, 32 nt, Homo Sapiens
cuaccugccucagccucccaaagugcugagau

SEQ ID NO: 41507 - RNA, 32 nt, Homo Sapiens
aaaggauccaaguccauguaacucuuuagaac

SEQ ID NO: 41508 - RNA, 32 nt, Homo Sapiens
gccggggaagcagccgccauuguccgcggcug

SEQ ID NO: 41509 - RNA, 32 nt, Homo Sapiens
gcuuggcgccuggccgccgcgggcaggauaca

SEQ ID NO: 41510 - RNA, 32 nt, Homo Sapiens
uaacuugguaaggauaaugaugcuguagaugu

SEQ ID NO: 41511 - RNA, 32 nt, Homo Sapiens
caggucccgcggcccgcaccugccgcccgcac

SEQ ID NO: 41512 - RNA, 32 nt, Homo Sapiens
cuagacuagugcuuuaccuuuauuaaugaacu

SEQ ID NO: 41513 - RNA, 32 nt, Homo Sapiens
aguucccugccacacacccccuuccuccuacc

SEQ ID NO: 41514 - RNA, 31 nt, Homo Sapiens
ccuuagcggccggucguaccacggcagcccc

SEQ ID NO: 41515 - RNA, 32 nt, Homo Sapiens
caucuaggaugauuuucccccuugcaguuaug

SEQ ID NO: 41516 - RNA, 32 nt, Homo Sapiens
ccucggcuucccacaccagccaucgaaggccc

SEQ ID NO: 41517 - RNA, 32 nt, Homo Sapiens
uuguggaucuuuuuuuuuuuuaaucuauugcu

SEQ ID NO: 41518 - RNA, 32 nt, Homo Sapiens
gaguauaaaguugucacccaucaauaaaaauc

SEQ ID NO: 41519 - RNA, 31 nt, Homo Sapiens
cccucgaugucggcccucgaaaagagcaugc

SEQ ID NO: 41520 - RNA, 32 nt, Homo Sapiens
agguaacuuccacguagccccuugccacgcgg

SEQ ID NO: 41521 - RNA, 32 nt, Homo Sapiens
cacacacugccucaaccuccccgccccauuuu

SEQ ID NO: 41522 - RNA, 32 nt, Homo Sapiens
ugggagggguugugggccuccugcggugaggg

SEQ ID NO: 41523 - RNA, 32 nt, Homo Sapiens
uauuuaucaaggaaauggaaaaugauacagcu

SEQ ID NO: 41524 - RNA, 32 nt, Homo Sapiens
aauucagaugagaagacaaauugguuaugaau

SEQ ID NO: 41525 - RNA, 32 nt, Homo Sapiens
gagagcccaagccccaaugccagaauucuucc

SEQ ID NO: 41526 - RNA, 32 nt, Homo Sapiens
aguacggaauccacccuuauuugcucucaggc

SEQ ID NO: 41527 - RNA, 32 nt, Homo Sapiens
uaacagaaacagucuguaaaaaccuaacagug

SEQ ID NO: 41528 - RNA, 32 nt, Homo Sapiens
uuggcuggggggcuggggagggguagggggaa

SEQ ID NO: 41529 - RNA, 32 nt, Homo Sapiens
uuaagcuaauuccuuaaauacauacaguaggu

SEQ ID NO: 41530 - RNA, 32 nt, Homo Sapiens
ugccauggauuuuuuucuuuugcaagacaccu

SEQ ID NO: 41531 - RNA, 32 nt, Homo Sapiens
cuuuuaagauuauuagaaaacaugcccugaag

SEQ ID NO: 41532 - RNA, 32 nt, Homo Sapiens
ggggaucuuucaccuuuagggaucucagcaca

SEQ ID NO: 41533 - RNA, 32 nt, Homo Sapiens
ccuugcagcucuuccagcuggggacuggugcu

SEQ ID NO: 41534 - RNA, 32 nt, Homo Sapiens
gaccagaggaaacaaaagcaccaagagguuga

SEQ ID NO: 41535 - RNA, 32 nt, Homo Sapiens
caguguuuaaucuugcaaugccaaugucauuu

SEQ ID NO: 41536 - RNA, 32 nt, Homo Sapiens
gggcgggcgcggggaccgcgccagccugucac

SEQ ID NO: 41537 - RNA, 32 nt, Homo Sapiens
ggaauguagauuguguuuuuaguaauguguac

SEQ ID NO: 41538 - RNA, 32 nt, Homo Sapiens
cgggcgccaugcgggcaucgcugcugcugucg

SEQ ID NO: 41539 - RNA, 32 nt, Homo Sapiens
uugagcggggaggggaccuugguguucaggaa

SEQ ID NO: 41540 - RNA, 32 nt, Homo Sapiens
gaguagaaggugaugucagcuccagcuccccu

SEQ ID NO: 41541 - RNA, 32 nt, Homo Sapiens
cuucuacguggauuuucuuccuccucugucac

SEQ ID NO: 41542 - RNA, 32 nt, Homo Sapiens
aagaaauuucaaaaccacaggguuuuggcgga

SEQ ID NO: 41543 - RNA, 32 nt, Homo Sapiens
gcccacauuggaagagcagcaccuccucagcc

SEQ ID NO: 41544 - RNA, 32 nt, Homo Sapiens
uuccuagaucacuuuaacuuuuuugugucaug

SEQ ID NO: 41545 - RNA, 32 nt, Homo Sapiens
aauucauuagucaacuaacaagcacuccucug

SEQ ID NO: 41546 - RNA, 32 nt, Homo Sapiens
cagaagaaauuuaaucagugugacagaaaaaa

SEQ ID NO: 41547 - RNA, 32 nt, Homo Sapiens
guacagggaaaggagcuguucuucaagguccc

SEQ ID NO: 41548 - RNA, 32 nt, Homo Sapiens
uucugauaaguauaucugauggauaaucacca

SEQ ID NO: 41549 - RNA, 32 nt, Homo Sapiens
auggggcucacagucuggcugcaccggcucac

SEQ ID NO: 41550 - RNA, 32 nt, Homo Sapiens
aaacauuuuuauugcuugcuuauuuugaaggu

SEQ ID NO: 41551 - RNA, 31 nt, Homo Sapiens
ugcuacaugcuucaacauccccagguaaaag

SEQ ID NO: 41552 - RNA, 32 nt, Homo Sapiens
cgaccgcgcucgccuuccuugcagccgcgccu

SEQ ID NO: 41553 - RNA, 32 nt, Homo Sapiens
agggauuauguggcaggucauuauggccuucu

SEQ ID NO: 41554 - RNA, 32 nt, Homo Sapiens
ccuucacaccaauagauugggcacuguggaau

SEQ ID NO: 41555 - RNA, 32 nt, Homo Sapiens
aucgggcagcaugagcggcugcgggcucuucc

SEQ ID NO: 41556 - RNA, 32 nt, Homo Sapiens
acugcugguggacugaugugguucugggggug

SEQ ID NO: 41557 - RNA, 32 nt, Homo Sapiens
auccucuucacccugcccugccugcaguugag

SEQ ID NO: 41558 - RNA, 32 nt, Homo Sapiens
uguagcagauguuuuucuuaaucuagcauuug

SEQ ID NO: 41559 - RNA, 32 nt, Homo Sapiens
gacuuuuuaaaauaaaaacaaacaaacguugu

SEQ ID NO: 41560 - RNA, 32 nt, Homo Sapiens
ggccaugucaguuugucacucacccaaacuga

SEQ ID NO: 41561 - RNA, 28 nt, Homo Sapiens
acacaggugagaagacauuugaauguaa

SEQ ID NO: 41562 - RNA, 32 nt, Homo Sapiens
uuuguuguuaaugucauuuguuuuuguuuggc

SEQ ID NO: 41563 - RNA, 32 nt, Homo Sapiens
agaguacacugccugccuuaagugaggaaauc

SEQ ID NO: 41564 - RNA, 32 nt, Homo Sapiens
uucgggaggcgagggggcggggggagcagcgc

SEQ ID NO: 41565 - RNA, 29 nt, Homo Sapiens
agcaaugagcaaguugggcaaguucuuua

SEQ ID NO: 41566 - RNA, 32 nt, Homo Sapiens
ucuugccaguggcuggcaaggcgguuuuguuc

SEQ ID NO: 41567 - RNA, 32 nt, Homo Sapiens
aucaaagauuguaauaauaauuuuguaaauug

SEQ ID NO: 41568 - RNA, 32 nt, Homo Sapiens
ccuggguggcggugcggacugauguggagaug

SEQ ID NO: 41569 - RNA, 32 nt, Homo Sapiens
cagagcguuaggcucaaaagauaccuuacaaa

SEQ ID NO: 41570 - RNA, 32 nt, Homo Sapiens
gagcugucuucaccaauugaccaggagcucua

SEQ ID NO: 41571 - RNA, 32 nt, Homo Sapiens
ggggacugccccccuucccgccguggccaggc

SEQ ID NO: 41572 - RNA, 32 nt, Homo Sapiens
acugugucaacagauuucuucccgccuucuac

SEQ ID NO: 41573 - RNA, 32 nt, Homo Sapiens
caccacgcccagcugggaauguuuuuaaauua

SEQ ID NO: 41574 - RNA, 32 nt, Homo Sapiens
ccagggcucagcuucccaugggccccccgccc

SEQ ID NO: 41575 - RNA, 32 nt, Homo Sapiens
cucacuucccuccuccacuacuccagguguua

SEQ ID NO: 41576 - RNA, 32 nt, Homo Sapiens
cugcuccucuugggauggggcugggguaggcc

SEQ ID NO: 41577 - RNA, 32 nt, Homo Sapiens
agguuugucuugugaccgcgggcggccgcugc

SEQ ID NO: 41578 - RNA, 30 nt, Homo Sapiens
uggcuguggggcgggcauggggggugaagg

SEQ ID NO: 41579 - RNA, 32 nt, Homo Sapiens
ucacaggaacagagacugaaucugccucagaa

SEQ ID NO: 41580 - RNA, 30 nt, Homo Sapiens
ugucauauuaaacuucugauucaaaaaaaa

SEQ ID NO: 41581 - RNA, 32 nt, Homo Sapiens
cauuuuagagagaagucugcuauacacuuagg

SEQ ID NO: 41582 - RNA, 32 nt, Homo Sapiens
cuuuaggcacagggguaaucccagcacuuggg

SEQ ID NO: 41583 - RNA, 32 nt, Homo Sapiens
guagagaaaacaucuuaagagagcaagcucca

SEQ ID NO: 41584 - RNA, 32 nt, Homo Sapiens
cccaaggccucgugccguggcugggguccugg

SEQ ID NO: 41585 - RNA, 32 nt, Homo Sapiens
uagaaaaaaguacauacauauauauguuaaaa

SEQ ID NO: 41586 - RNA, 32 nt, Homo Sapiens
ggugugagccaccaugcccagccccuucuguc

SEQ ID NO: 41587 - RNA, 32 nt, Homo Sapiens
agcugauagagcaagggaauguuuaagccauu

SEQ ID NO: 41588 - RNA, 32 nt, Homo Sapiens
gucccgcccgcgcccuccgccggcccucaggu

SEQ ID NO: 41589 - RNA, 32 nt, Homo Sapiens
ccuggagcaagugcgcagcaucauggaugagg

SEQ ID NO: 41590 - RNA, 32 nt, Homo Sapiens
ccuucugugccccuuuccccaagcccaagacu

SEQ ID NO: 41591 - RNA, 32 nt, Homo Sapiens
ccccaaugcccuggacugggccccacagcucc

SEQ ID NO: 41592 - RNA, 32 nt, Homo Sapiens
augcaagauauuuuuucuuuuuuauaguguga

SEQ ID NO: 41593 - RNA, 32 nt, Homo Sapiens
cucccuccaggcugaaccccacuuccucggca

SEQ ID NO: 41594 - RNA, 32 nt, Homo Sapiens
cuaagauacgauauuucuuuuuuuuuccgaga

SEQ ID NO: 41595 - RNA, 32 nt, Homo Sapiens
ucccagcuacucuggaggcugagacagaauug

SEQ ID NO: 41596 - RNA, 32 nt, Homo Sapiens
uguuugggaccucacgaggcccuguucauucu

SEQ ID NO: 41597 - RNA, 32 nt, Homo Sapiens
guagcugggacuucagacgcccgccaucaugc

SEQ ID NO: 41598 - RNA, 32 nt, Homo Sapiens
cacccugagguggguuacauaccugcccaaug

SEQ ID NO: 41599 - RNA, 32 nt, Homo Sapiens
uugcuguuuggagcuuccuuuggggugggagg

SEQ ID NO: 41600 - RNA, 32 nt, Homo Sapiens
gacucgacaacaugucacccgcgcuccaagac

SEQ ID NO: 41601 - RNA, 32 nt, Homo Sapiens
acugaucucgggcuccuauuucauuuacauug

SEQ ID NO: 41602 - RNA, 32 nt, Homo Sapiens
ggucaggguuauuuauuaaauuuuauauauga

SEQ ID NO: 41603 - RNA, 32 nt, Homo Sapiens
uguacgcguggccaggcaucguuuauuguagg

SEQ ID NO: 41604 - RNA, 32 nt, Homo Sapiens
cauuuguaacuguguucuuccucuucugaaga

SEQ ID NO: 41605 - RNA, 32 nt, Homo Sapiens
ugcuuucuucauuuuuuuuucuuuuaaaaugc

SEQ ID NO: 41606 - RNA, 32 nt, Homo Sapiens
ucuuugcugugggacaacagugaauguguuua

SEQ ID NO: 41607 - RNA, 32 nt, Homo Sapiens
cuuuaagugaauggaaugaauguguuugaaug

SEQ ID NO: 41608 - RNA, 32 nt, Homo Sapiens
caccucccaucccaccuccggaaagccugaac

SEQ ID NO: 41609 - RNA, 32 nt, Homo Sapiens
gggccggccccggcuggcugcccacugugccc

SEQ ID NO: 41610 - RNA, 32 nt, Homo Sapiens
acuccuugccagcaagagaacaaaacuggaug

SEQ ID NO: 41611 - RNA, 32 nt, Homo Sapiens
gguuguguauugcauauacuguauuuauaaau

SEQ ID NO: 41612 - RNA, 32 nt, Homo Sapiens
guauuuucuaacuggagaaaagagugaggaac

SEQ ID NO: 41613 - RNA, 32 nt, Homo Sapiens
gaaugggguuuuggguuggaguucuuguuuuc

SEQ ID NO: 41614 - RNA, 32 nt, Homo Sapiens
ucugcugcuuagacauaacaaaacacucggca

SEQ ID NO: 41615 - RNA, 32 nt, Homo Sapiens
cccucacuuguggucaguauaucaguuaugac

SEQ ID NO: 41616 - RNA, 32 nt, Homo Sapiens
ugcucgcccaccacccaauccucgccucccuu

SEQ ID NO: 41617 - RNA, 32 nt, Homo Sapiens
cauuaaaaacaaaaaagaaacaagguuuauau

SEQ ID NO: 41618 - RNA, 32 nt, Homo Sapiens
ccgggggugggguggggagccaggcccgucuc

SEQ ID NO: 41619 - RNA, 32 nt, Homo Sapiens
aggacuacaaaaaaacaaaagcacuggauuga

SEQ ID NO: 41620 - RNA, 32 nt, Homo Sapiens
caucaucucacccacccccacaaggggagaaa

SEQ ID NO: 41621 - RNA, 32 nt, Homo Sapiens
aaaauucuguuguuccauuuuaugcagaagca

SEQ ID NO: 41622 - RNA, 32 nt, Homo Sapiens
cuguggaaucaaugaccagaugcugaaugagu

SEQ ID NO: 41623 - RNA, 32 nt, Homo Sapiens
ccauguggaaaaccuucaaauaaaaugaugac

SEQ ID NO: 41624 - RNA, 32 nt, Homo Sapiens
acaggggcucacggcccugccaggaguggaag

SEQ ID NO: 41625 - RNA, 32 nt, Homo Sapiens
gggcuuccugagcaccagcaguggugucucug

SEQ ID NO: 41626 - RNA, 28 nt, Homo Sapiens
aggagguggcggccgcugaggcugcggc

SEQ ID NO: 41627 - RNA, 32 nt, Homo Sapiens
ugccccacaguggucaguccccagcccugugg

SEQ ID NO: 41628 - RNA, 32 nt, Homo Sapiens
ugaagggggcccccuuucccugcccgcugggg

SEQ ID NO: 41629 - RNA, 30 nt, Homo Sapiens
gcgguggcgcccgcgggaccugcgacugcc

SEQ ID NO: 41630 - RNA, 32 nt, Homo Sapiens
ucagcaccuaauaguacuuggcacauaaguac

SEQ ID NO: 41631 - RNA, 32 nt, Homo Sapiens
gggccuacaccuccccuccccccgccagccgc

SEQ ID NO: 41632 - RNA, 32 nt, Homo Sapiens
aaggcuuuauuacaccucagaaauugaaagca

SEQ ID NO: 41633 - RNA, 32 nt, Homo Sapiens
acucaaaacaguuauuuuuuuacaauuaaucu

SEQ ID NO: 41634 - RNA, 32 nt, Homo Sapiens
gcacugcuucagagacacgaaccaccuugagu

SEQ ID NO: 41635 - RNA, 32 nt, Homo Sapiens
uucuggaauuggaaaaccaucauuuuucaacc

SEQ ID NO: 41636 - RNA, 32 nt, Homo Sapiens
cuacaggcccaaccucugccucaugggggcuu

SEQ ID NO: 41637 - RNA, 32 nt, Homo Sapiens
acuguauugcaagauagcacacagaaguuggc

SEQ ID NO: 41638 - RNA, 32 nt, Homo Sapiens
gguccccugucuccccuuccagcccugaccca

SEQ ID NO: 41639 - RNA, 32 nt, Homo Sapiens
aaccauuuucccagcucucgguuccggaagau

SEQ ID NO: 41640 - RNA, 32 nt, Homo Sapiens
ucacacgugccauccccaccccggugcuccag

SEQ ID NO: 41641 - RNA, 32 nt, Homo Sapiens
ggaagcuaaaacucaaguuaauggucugugga

SEQ ID NO: 41642 - RNA, 32 nt, Homo Sapiens
ccuuggugccggugauccauggaggggccugc

SEQ ID NO: 41643 - RNA, 32 nt, Homo Sapiens
uaggccuccucccuccuccccacgccuugcuc

SEQ ID NO: 41644 - RNA, 32 nt, Homo Sapiens
cggaccagggagccugggcgccggcaguucgg

SEQ ID NO: 41645 - RNA, 32 nt, Homo Sapiens
cuucuagcuaccccuggccucuaggccgccug

SEQ ID NO: 41646 - RNA, 32 nt, Homo Sapiens
cuccuagccaccucugcccagccccucugagu

SEQ ID NO: 41647 - RNA, 32 nt, Homo Sapiens
ugggguggccugggggugggggugggcaaggc

SEQ ID NO: 41648 - RNA, 32 nt, Homo Sapiens
ugucauggaggaagagguaacaacaauuauaa

SEQ ID NO: 41649 - RNA, 32 nt, Homo Sapiens
ucuaaaggucauauuuacauuuaaaaucaaag

SEQ ID NO: 41650 - RNA, 32 nt, Homo Sapiens
acagggcgccagcgucgccgcgaggccucugg

SEQ ID NO: 41651 - RNA, 32 nt, Homo Sapiens
cucuuggcucgggaacccccgcgggcgcuggc

SEQ ID NO: 41652 - RNA, 32 nt, Homo Sapiens
uggcucagagggggacugcugcugccuggcca

SEQ ID NO: 41653 - RNA, 32 nt, Homo Sapiens
aguggcccauucuuuuaucuuuauccugugaa

SEQ ID NO: 41654 - RNA, 32 nt, Homo Sapiens
acaaaaugucauuucugaaagaggcuuacuuu

SEQ ID NO: 41655 - RNA, 32 nt, Homo Sapiens
ggcagcagcuggaguaguuacauugucaucau

SEQ ID NO: 41656 - RNA, 32 nt, Homo Sapiens
auaguuauugcucauauguguacagacuuuau

SEQ ID NO: 41657 - RNA, 32 nt, Homo Sapiens
gguaguguccccagccuaccucuccacaaggg

SEQ ID NO: 41658 - RNA, 32 nt, Homo Sapiens
ggagacagaaugacaagauagauggagaggag

SEQ ID NO: 41659 - RNA, 32 nt, Homo Sapiens
agggagaagggaagccguuucccgcgggcuuc

SEQ ID NO: 41660 - RNA, 32 nt, Homo Sapiens
aaacuuucuaaagaugugagagagcucuuaag

SEQ ID NO: 41661 - RNA, 32 nt, Homo Sapiens
uucauuuuuuucuguucagacuuguugcaaca

SEQ ID NO: 41662 - RNA, 32 nt, Homo Sapiens
agacacucagggauggagcugcugcugaaggg

SEQ ID NO: 41663 - RNA, 32 nt, Homo Sapiens
ggauaucuaccuuggcucaucuuguuugcuua

SEQ ID NO: 41664 - RNA, 32 nt, Homo Sapiens
ugagcucaggguccagacuuuauucuuauucc

SEQ ID NO: 41665 - RNA, 32 nt, Homo Sapiens
aggggcuuguugggggugggggugcgugauaa

SEQ ID NO: 41666 - RNA, 32 nt, Homo Sapiens
uguccgcggggcggggaauggaggaggcaggc

SEQ ID NO: 41667 - RNA, 32 nt, Homo Sapiens
gcucggaauuguagccauauguuacagaucuc

SEQ ID NO: 41668 - RNA, 32 nt, Homo Sapiens
cgccccgcggagcccgcgaaccccgcucgcug

SEQ ID NO: 41669 - RNA, 32 nt, Homo Sapiens
ccuguaucagcacuccucaucaucacucaucu

SEQ ID NO: 41670 - RNA, 32 nt, Homo Sapiens
aauagaggcagagcuauuuuauauuaucaaau

SEQ ID NO: 41671 - RNA, 32 nt, Homo Sapiens
agcuccaguggaagaagaaaacacuaguaccu

SEQ ID NO: 41672 - RNA, 32 nt, Homo Sapiens
cucugugacugccccagccccauccuacccca

SEQ ID NO: 41673 - RNA, 32 nt, Homo Sapiens
acaauggagagcuaccuuguccugcugcugcc

SEQ ID NO: 41674 - RNA, 32 nt, Homo Sapiens
cugccugggguggucaguuuccaagccuuucc

SEQ ID NO: 41675 - RNA, 32 nt, Homo Sapiens
ggggcaccgggccgcggcgccaccauggcggu

SEQ ID NO: 41676 - RNA, 32 nt, Homo Sapiens
uccgccggcagcuuaucuccgcgccucccuuu

SEQ ID NO: 41677 - RNA, 32 nt, Homo Sapiens
cugcugauccugagccugcugggagaucuuaa

SEQ ID NO: 41678 - RNA, 32 nt, Homo Sapiens
ccaucccuggccuggggccucugggaccagcu

SEQ ID NO: 41679 - RNA, 29 nt, Homo Sapiens
aagcuuucuauccauuuguaaauaaccug

SEQ ID NO: 41680 - RNA, 32 nt, Homo Sapiens
agcacccauaguccaggcauggggaccucaac

SEQ ID NO: 41681 - RNA, 32 nt, Homo Sapiens
gauuuccuuuuggugauugcauuagguuuaaa

SEQ ID NO: 41682 - RNA, 32 nt, Homo Sapiens
accggcuccgagcagcagcaagcccggucgga

SEQ ID NO: 41683 - RNA, 30 nt, Homo Sapiens
ugcagaggggacggcuggggucccgagcaa

SEQ ID NO: 41684 - RNA, 32 nt, Homo Sapiens
ugcacgguaccggcccgccuucugcaaucauc

SEQ ID NO: 41685 - RNA, 32 nt, Homo Sapiens
guaauuugauauaugguauuuauauuggcauu

SEQ ID NO: 41686 - RNA, 32 nt, Homo Sapiens
agaaguucaaggaguuaaaugucacauucaua

SEQ ID NO: 41687 - RNA, 32 nt, Homo Sapiens
caugcaaagguggacaccauucuccagcuuca

SEQ ID NO: 41688 - RNA, 32 nt, Homo Sapiens
uccucuguagaucucagucucccuuuggggaa

SEQ ID NO: 41689 - RNA, 32 nt, Homo Sapiens
cucagggucaaagggcuacuuucuggaagucu

SEQ ID NO: 41690 - RNA, 32 nt, Homo Sapiens
gcucaggugcgagcgcggggccccgccgcagc

SEQ ID NO: 41691 - RNA, 32 nt, Homo Sapiens
agccggacgcgguggcucacgccuguuauccc

SEQ ID NO: 41692 - RNA, 32 nt, Homo Sapiens
acgucugucccucucugcuuucucuguagggc

SEQ ID NO: 41693 - RNA, 32 nt, Homo Sapiens
gucaucucgcucgagcucuuuggauuuguugu

SEQ ID NO: 41694 - RNA, 32 nt, Homo Sapiens
accaucacgggcuaauaaucuuucucaguuua

SEQ ID NO: 41695 - RNA, 32 nt, Homo Sapiens
gugauguguugcauuuucacuuuggggucugu

SEQ ID NO: 41696 - RNA, 30 nt, Homo Sapiens
uucuuucuggacuggcguucaccucccugc

SEQ ID NO: 41697 - RNA, 31 nt, Homo Sapiens
gcuauuauaaauuguaauauaauaguaugug

SEQ ID NO: 41698 - RNA, 32 nt, Homo Sapiens
cucuagaacgguucuuuggagagaaauauuuu

SEQ ID NO: 41699 - RNA, 30 nt, Homo Sapiens
agccaggucaguauugaugaggcugaucau

SEQ ID NO: 41700 - RNA, 32 nt, Homo Sapiens
agcccggguaaccaggccgccggcgccggcuc

SEQ ID NO: 41701 - RNA, 32 nt, Homo Sapiens
auuuuaucagcuauuucuuauauaucauaauc

SEQ ID NO: 41702 - RNA, 32 nt, Homo Sapiens
ucacaccugaacgcuguccucccgcagacgag

SEQ ID NO: 41703 - RNA, 31 nt, Homo Sapiens
uuagugcgcccgggacgccaggcaagcagcu

SEQ ID NO: 41704 - RNA, 32 nt, Homo Sapiens
caggugccgcgugccuuugccagcuccucgga

SEQ ID NO: 41705 - RNA, 29 nt, Homo Sapiens
ugggaugggggcucucacucucugucacc

SEQ ID NO: 41706 - RNA, 32 nt, Homo Sapiens
ucagaagggcuuugacacuuucauaaggauca

SEQ ID NO: 41707 - RNA, 32 nt, Homo Sapiens
uuauuugaucuggguauuuuuggaccacauua

SEQ ID NO: 41708 - RNA, 32 nt, Homo Sapiens
guuuguucuccaauccuguguagacaccauga

SEQ ID NO: 41709 - RNA, 32 nt, Homo Sapiens
aaacucuagguccagcuuacugccuucccccc

SEQ ID NO: 41710 - RNA, 32 nt, Homo Sapiens
auccugugugccauugagacgucugccaagga

SEQ ID NO: 41711 - RNA, 32 nt, Homo Sapiens
ucucuaggcuccuggauguugcugcauucuaa

SEQ ID NO: 41712 - RNA, 32 nt, Homo Sapiens
guguccuuugguacuaugguguguuguaucuu

SEQ ID NO: 41713 - RNA, 32 nt, Homo Sapiens
ucugggaaugucaaguugggggagggcgcuga

SEQ ID NO: 41714 - RNA, 32 nt, Homo Sapiens
gaaucacccagcuaagcugcucccggguugcc

SEQ ID NO: 41715 - RNA, 32 nt, Homo Sapiens
agaaauaaaauguaucucugcuuugucugucc

SEQ ID NO: 41716 - RNA, 32 nt, Homo Sapiens
aauugacaugugaugacuauuucuuauuccau

SEQ ID NO: 41717 - RNA, 32 nt, Homo Sapiens
cacaaaggaaauccgucuuuugaaagacacaa

SEQ ID NO: 41718 - RNA, 32 nt, Homo Sapiens
cuuugugaucccaaucagagggauggagcuaa

SEQ ID NO: 41719 - RNA, 32 nt, Homo Sapiens
ccuaaguguccaucaauagagaauuggguaaa

SEQ ID NO: 41720 - RNA, 32 nt, Homo Sapiens
ucaggaagggaggcuuggaggggguugaggga

SEQ ID NO: 41721 - RNA, 32 nt, Homo Sapiens
gggggaaucuucugccuccuccccacuccaag

SEQ ID NO: 41722 - RNA, 32 nt, Homo Sapiens
ugaaguuuuuugcuggcauuucaaccuuuggg

SEQ ID NO: 41723 - RNA, 32 nt, Homo Sapiens
ccuuggucaggaugaaguuggcugacacagcu

SEQ ID NO: 41724 - RNA, 32 nt, Homo Sapiens
aucaggguccccagccucugggcuccuguuuc

SEQ ID NO: 41725 - RNA, 32 nt, Homo Sapiens
uagauuauauuaacaaaauacuuuuuagguag

SEQ ID NO: 41726 - RNA, 32 nt, Homo Sapiens
ugugggggcagacauuuaccgcaggcacacag

SEQ ID NO: 41727 - RNA, 32 nt, Homo Sapiens
gacauuggaaagggcagaaagcgauuugcccc

SEQ ID NO: 41728 - RNA, 32 nt, Homo Sapiens
ugccuggaaugggagggggcaugacuggaaug

SEQ ID NO: 41729 - RNA, 32 nt, Homo Sapiens
cacgcucccucccccugccccuucuacacucu

SEQ ID NO: 41730 - RNA, 32 nt, Homo Sapiens
gagccugggcugcuccuccugcucuggggagu

SEQ ID NO: 41731 - RNA, 32 nt, Homo Sapiens
agguuacugcacugaggccaaguuaggauggc

SEQ ID NO: 41732 - RNA, 32 nt, Homo Sapiens
gggugggccccgggggucaggagcuccagaag

SEQ ID NO: 41733 - RNA, 32 nt, Homo Sapiens
gaugggcagugccucucccagugcccagaugg

SEQ ID NO: 41734 - RNA, 32 nt, Homo Sapiens
uuucauaaauguugguaguguuuguccaggua

SEQ ID NO: 41735 - RNA, 32 nt, Homo Sapiens
gaaagacagggaccgaacccuggcucaggccu

SEQ ID NO: 41736 - RNA, 32 nt, Homo Sapiens
uugauuugauucagcaguccugucaaguauaa

SEQ ID NO: 41737 - RNA, 32 nt, Homo Sapiens
auucccgccgacagaccuugggaccggggcca

SEQ ID NO: 41738 - RNA, 32 nt, Homo Sapiens
aucacuuuaaacaucauguuucagguuuuggu

SEQ ID NO: 41739 - RNA, 32 nt, Homo Sapiens
auauccguggccuucaccucuccagcuacccu

SEQ ID NO: 41740 - RNA, 32 nt, Homo Sapiens
ccuggcuaauguuuaaauuuuauguagagaug

SEQ ID NO: 41741 - RNA, 32 nt, Homo Sapiens
agucuggggggaaagaggggcuggcucucaau

SEQ ID NO: 41742 - RNA, 32 nt, Homo Sapiens
ggaugcauucgagucuguaacuucugaaaccu

SEQ ID NO: 41743 - RNA, 32 nt, Homo Sapiens
uuuguaucaaggaacuuaaaauuucucaacaa

SEQ ID NO: 41744 - RNA, 32 nt, Homo Sapiens
ugauuuuguuuaaaguuuuugaaauguuuugu

SEQ ID NO: 41745 - RNA, 32 nt, Homo Sapiens
cacacgcaggacagcucuggacagguggggca

SEQ ID NO: 41746 - RNA, 32 nt, Homo Sapiens
cuggcaccaagucaagcauuguccuccacguc

SEQ ID NO: 41747 - RNA, 32 nt, Homo Sapiens
gcaccagagcuuuuuuacccuugaccagauac

SEQ ID NO: 41748 - RNA, 32 nt, Homo Sapiens
uggacgacagagugagacguccaucucaaaaa

SEQ ID NO: 41749 - RNA, 32 nt, Homo Sapiens
gggacccaagaagacagcccccugccccaucu

SEQ ID NO: 41750 - RNA, 32 nt, Homo Sapiens
auaacauguuuccucuuuucauaccugaguac

SEQ ID NO: 41751 - RNA, 32 nt, Homo Sapiens
ugaccuucuuuucuggagucauugucuuuaua

SEQ ID NO: 41752 - RNA, 32 nt, Homo Sapiens
augcucgcaccaaguguucuguaggcuugggg

SEQ ID NO: 41753 - RNA, 32 nt, Homo Sapiens
ucggaccacaguggcucuguauggccaggaac

SEQ ID NO: 41754 - RNA, 32 nt, Homo Sapiens
cuauguaaaguaauaaaguauaauugccauau

SEQ ID NO: 41755 - RNA, 32 nt, Homo Sapiens
cuuaccuuauacuugcuuuugcuggcauucuu

SEQ ID NO: 41756 - RNA, 32 nt, Homo Sapiens
ugacaaugcuauuugccuuaguucauucguug

SEQ ID NO: 41757 - RNA, 32 nt, Homo Sapiens
ugguaucauuuucucuucucacaaaauguucc

SEQ ID NO: 41758 - RNA, 32 nt, Homo Sapiens
ccuuuacugucucuccuuuucugaccauuaaa

SEQ ID NO: 41759 - RNA, 32 nt, Homo Sapiens
aguucaauuggcuaccggaaaaaaccaggcug

SEQ ID NO: 41760 - RNA, 27 nt, Homo Sapiens
ugugaguccuucuuucuaccuuugcuu

SEQ ID NO: 41761 - RNA, 32 nt, Homo Sapiens
uaucacugucuggucuccgagcuucggcugca

SEQ ID NO: 41762 - RNA, 32 nt, Homo Sapiens
cacccccgccaggcugcccaucagggcccagg

SEQ ID NO: 41763 - RNA, 32 nt, Homo Sapiens
aauugugcccacucccccaccuccucaccaca

SEQ ID NO: 41764 - RNA, 32 nt, Homo Sapiens
uuggucugcauucucaaaaugauccuucaagg

SEQ ID NO: 41765 - RNA, 32 nt, Homo Sapiens
ggcccacguggcgguccgcuggcaggcugguc

SEQ ID NO: 41766 - RNA, 32 nt, Homo Sapiens
ucacuggcuuggucagaaaacacaugccaggg

SEQ ID NO: 41767 - RNA, 32 nt, Homo Sapiens
uccauuugaacauugauuaauucaucaaauaa

SEQ ID NO: 41768 - RNA, 32 nt, Homo Sapiens
gugauuacuuggauuuuaguaucuguucucuc

SEQ ID NO: 41769 - RNA, 32 nt, Homo Sapiens
aaaaaauuuuauuuauuuuaaauuguggcaaa

SEQ ID NO: 41770 - RNA, 32 nt, Homo Sapiens
ugguggggaaaggugucuuucuuucugcccuc

SEQ ID NO: 41771 - RNA, 32 nt, Homo Sapiens
gcuguaacacauucuuuuuuuaguagccacau

SEQ ID NO: 41772 - RNA, 32 nt, Homo Sapiens
cugcccgccucugccucccaaggugcugggau

SEQ ID NO: 41773 - RNA, 32 nt, Homo Sapiens
aagaguacaauuuugagguuuauuuuuuguau

SEQ ID NO: 41774 - RNA, 32 nt, Homo Sapiens
ucaugaguuuuucuuuguuugcauauaauuaa

SEQ ID NO: 41775 - RNA, 32 nt, Homo Sapiens
cacuguacauuccacaagcauugccuucuuau

SEQ ID NO: 41776 - RNA, 32 nt, Homo Sapiens
caaggcaggcggaucaccugaggucuggaguu

SEQ ID NO: 41777 - RNA, 27 nt, Homo Sapiens
uuaugagaggcagacaaacuaauuugg

SEQ ID NO: 41778 - RNA, 32 nt, Homo Sapiens
gaggguggggagacauaaccacugcuuccauu

SEQ ID NO: 41779 - RNA, 32 nt, Homo Sapiens
agggaucgugggggcggggagguggaguggag

SEQ ID NO: 41780 - RNA, 32 nt, Homo Sapiens
acaauuuuuuaaauaaaccagcagguugcuaa

SEQ ID NO: 41781 - RNA, 32 nt, Homo Sapiens
aaggguauuuuuaucucugugcuuucuuuuuc

SEQ ID NO: 41782 - RNA, 32 nt, Homo Sapiens
guuuauagacauucagaguagaaccacuugug

SEQ ID NO: 41783 - RNA, 32 nt, Homo Sapiens
gaagggagaggacauuucccacugaaucuguc

SEQ ID NO: 41784 - RNA, 32 nt, Homo Sapiens
uccugcaguacaagaaccucuccaucaucuuc

SEQ ID NO: 41785 - RNA, 32 nt, Homo Sapiens
gguaucuugugcuuuaauacuuuauggcagga

SEQ ID NO: 41786 - RNA, 32 nt, Homo Sapiens
cucggccggcccggagcgcggacccagccgca

SEQ ID NO: 41787 - RNA, 32 nt, Homo Sapiens
aaggcuaugcuucaguuuuucuuuguaagcca

SEQ ID NO: 41788 - RNA, 32 nt, Homo Sapiens
ugagcauagaggaaacaggucuuuuuacauuc

SEQ ID NO: 41789 - RNA, 27 nt, Homo Sapiens
ccuuuguaguccuucagccacuguggg

SEQ ID NO: 41790 - RNA, 32 nt, Homo Sapiens
uuuuaacuguuguugccauugacagcguugug

SEQ ID NO: 41791 - RNA, 32 nt, Homo Sapiens
gacggggucucacuguaucacccaggccagag

SEQ ID NO: 41792 - RNA, 32 nt, Homo Sapiens
uuaaugaaaaagaaaagaucuugcuaaaguua

SEQ ID NO: 41793 - RNA, 32 nt, Homo Sapiens
gagccccaggcuggcagcuagcaagaccucuc

SEQ ID NO: 41794 - RNA, 32 nt, Homo Sapiens
accugcauuuuucagugaacaauaaaaagauu

SEQ ID NO: 41795 - RNA, 32 nt, Homo Sapiens
gaguaaagaugaugaagcagggauaaggcuaa

SEQ ID NO: 41796 - RNA, 32 nt, Homo Sapiens
ugagcacauaggacucuagacggcauccagcc

SEQ ID NO: 41797 - RNA, 32 nt, Homo Sapiens
ccucugagaauggguugggggaggcgggugca

SEQ ID NO: 41798 - RNA, 30 nt, Homo Sapiens
uggccuguuguccugcuuuagucgacauau

SEQ ID NO: 41799 - RNA, 31 nt, Homo Sapiens
agaacuuuaaagaaaaaagaauguuauauua

SEQ ID NO: 41800 - RNA, 32 nt, Homo Sapiens
ucagaauuacugaguuuuuuauuccaguugua

SEQ ID NO: 41801 - RNA, 32 nt, Homo Sapiens
gaaucuccaugagcacuuguggaccaaaagaa

SEQ ID NO: 41802 - RNA, 32 nt, Homo Sapiens
cggcuccaguccccgggcucggccucggcgag

SEQ ID NO: 41803 - RNA, 32 nt, Homo Sapiens
agggcuugggccucucggggcuggggccuccc

SEQ ID NO: 41804 - RNA, 32 nt, Homo Sapiens
ccgccuuggcccgugucgcagaugaggacacu

SEQ ID NO: 41805 - RNA, 32 nt, Homo Sapiens
gugugugugugugugcgcacacacacaagaag

SEQ ID NO: 41806 - RNA, 32 nt, Homo Sapiens
uuuuuguuuuguuuuguuuucuuucuaaucga

SEQ ID NO: 41807 - RNA, 32 nt, Homo Sapiens
gcccugaaaguaccugaaagguuuuaagcaca

SEQ ID NO: 41808 - RNA, 32 nt, Homo Sapiens
uccaggcuagagugcaguggcuauucacagau

SEQ ID NO: 41809 - RNA, 32 nt, Homo Sapiens
augaggucaggaguucgagaccagccugacca

SEQ ID NO: 41810 - RNA, 30 nt, Homo Sapiens
ucuaauggaaucaugggggaaacggguugg

SEQ ID NO: 41811 - RNA, 32 nt, Homo Sapiens
uuccuauuucuuuucauacaaauaaaggauac

SEQ ID NO: 41812 - RNA, 32 nt, Homo Sapiens
caaagcagcuggagagacuuuggggacuuuuu

SEQ ID NO: 41813 - RNA, 32 nt, Homo Sapiens
uuuuguuuuagaugauuggaaaguauaucacc

SEQ ID NO: 41814 - RNA, 32 nt, Homo Sapiens
cagccaggcagacagacugacagacucgcuag

SEQ ID NO: 41815 - RNA, 32 nt, Homo Sapiens
cugcucgcucacucaccucccuccucagcacc

SEQ ID NO: 41816 - RNA, 32 nt, Homo Sapiens
auacaggaucaccuguacccaagcccuuagcu

SEQ ID NO: 41817 - RNA, 32 nt, Homo Sapiens
ugaagcagaugaugaugaugauccagaauaua

SEQ ID NO: 41818 - RNA, 32 nt, Homo Sapiens
cuccugagacuauuuuaacugggauugguuau

SEQ ID NO: 41819 - RNA, 28 nt, Homo Sapiens
ucauugaaagauugcggcauuuaaaaau

SEQ ID NO: 41820 - RNA, 32 nt, Homo Sapiens
gaggggaauggcaaaauguagguccucgcagg

SEQ ID NO: 41821 - RNA, 32 nt, Homo Sapiens
auaugauuuuagggaauuucugaugggcuggc

SEQ ID NO: 41822 - RNA, 32 nt, Homo Sapiens
agcauuuuaaguaauaaauguauagagagugu

SEQ ID NO: 41823 - RNA, 32 nt, Homo Sapiens
cauagagcugucugccacagccuucugacaaa

SEQ ID NO: 41824 - RNA, 32 nt, Homo Sapiens
ucacucugaaagauugaagccaagaauuugua

SEQ ID NO: 41825 - RNA, 32 nt, Homo Sapiens
cuuuucaucuucugcacguucuucgugaaacu

SEQ ID NO: 41826 - RNA, 32 nt, Homo Sapiens
ugaugacauuuuuugacaaacauuuuauacca

SEQ ID NO: 41827 - RNA, 30 nt, Homo Sapiens
acccggggcaggcggugguggcccagggcu

SEQ ID NO: 41828 - RNA, 32 nt, Homo Sapiens
agggcuuuuacagagaauuagagcaacaccaa

SEQ ID NO: 41829 - RNA, 32 nt, Homo Sapiens
acuuuauaugaaguauuaaaaugcauauuucu

SEQ ID NO: 41830 - RNA, 31 nt, Homo Sapiens
ucccgagccgccugcuagccccgcgccgcac

SEQ ID NO: 41831 - RNA, 32 nt, Homo Sapiens
cgccagguaccuggggcccagcccgggcggca

SEQ ID NO: 41832 - RNA, 32 nt, Homo Sapiens
gguccagaguuccauggguggagagaguaacc

SEQ ID NO: 41833 - RNA, 32 nt, Homo Sapiens
uuagucaaaaauauuuaaaaggagauucaacu

SEQ ID NO: 41834 - RNA, 32 nt, Homo Sapiens
uuuuuguuucugaaaaauaaaaguauaacuua

SEQ ID NO: 41835 - RNA, 27 nt, Homo Sapiens
gucuccauucucuucagcucccuacau

SEQ ID NO: 41836 - RNA, 32 nt, Homo Sapiens
ucugggugcugggugcucugcugcuggacuuu

SEQ ID NO: 41837 - RNA, 32 nt, Homo Sapiens
caugcaagaaaagaaaagaaggcauuuacucu

SEQ ID NO: 41838 - RNA, 32 nt, Homo Sapiens
gaaguggggucauuuucauauuuaggcuuaaa

SEQ ID NO: 41839 - RNA, 32 nt, Homo Sapiens
gaucucggcucacugcaccuucugccuaccga

SEQ ID NO: 41840 - RNA, 32 nt, Homo Sapiens
aagaaagaauaaaaguuuauugcacuucuuuu

SEQ ID NO: 41841 - RNA, 32 nt, Homo Sapiens
aaaguuuuccucuuccucuccucguacggagu

SEQ ID NO: 41842 - RNA, 32 nt, Homo Sapiens
aauuuccuggagcaccggcgcgugcacacggg

SEQ ID NO: 41843 - RNA, 32 nt, Homo Sapiens
aggcgggcagaucaccugaggucaggaguuug

SEQ ID NO: 41844 - RNA, 32 nt, Homo Sapiens
aagacuuuuuauuuucuaaaccuugugauucu

SEQ ID NO: 41845 - RNA, 32 nt, Homo Sapiens
acauccguguauauuucuguuacuucauccgg

SEQ ID NO: 41846 - RNA, 32 nt, Homo Sapiens
cauuuuuguaauugcuguguaccuguuacgua

SEQ ID NO: 41847 - RNA, 32 nt, Homo Sapiens
acugauguggcugagucagaaaaggaaggacu

SEQ ID NO: 41848 - RNA, 32 nt, Homo Sapiens
agucugguuuuuguuauucuucccuccccucc

SEQ ID NO: 41849 - RNA, 32 nt, Homo Sapiens
cugaauguugcacccuuugagaaauuucuucu

SEQ ID NO: 41850 - RNA, 32 nt, Homo Sapiens
gaggauaccacauacccucggaagugaggcgg

SEQ ID NO: 41851 - RNA, 32 nt, Homo Sapiens
aaaaggcccuccccaccgacccgccaccugcc

SEQ ID NO: 41852 - RNA, 32 nt, Homo Sapiens
cgagucgaaaacugaggcuccggccgcagaga

SEQ ID NO: 41853 - RNA, 32 nt, Homo Sapiens
gugccgagcccaggacgcccccggcccaggcc

SEQ ID NO: 41854 - RNA, 32 nt, Homo Sapiens
gaagaccaacugggacaaagggcccgcuuguc

SEQ ID NO: 41855 - RNA, 32 nt, Homo Sapiens
ccuggggcuggcagggaggagcuccaggcuaa

SEQ ID NO: 41856 - RNA, 32 nt, Homo Sapiens
aagggagauccggagcgaauagggggcuucgc

SEQ ID NO: 41857 - RNA, 32 nt, Homo Sapiens
uaaagaaaacucccagugguucaaacauccug

SEQ ID NO: 41858 - RNA, 32 nt, Homo Sapiens
cuauacuaagacagcagcuuuagaucuuguua

SEQ ID NO: 41859 - RNA, 32 nt, Homo Sapiens
cagggaggggagaccuuggcggacggcggagc

SEQ ID NO: 41860 - RNA, 32 nt, Homo Sapiens
augucaaaggacgaaaucauggggacaauuug

SEQ ID NO: 41861 - RNA, 32 nt, Homo Sapiens
ggagcagaagcauauaucuuuaugagaaagau

SEQ ID NO: 41862 - RNA, 32 nt, Homo Sapiens
ggaaggcgcugggccuggaccucugccacuca

SEQ ID NO: 41863 - RNA, 32 nt, Homo Sapiens
aaggaacugugccucggcgccaccuccggccc

SEQ ID NO: 41864 - RNA, 32 nt, Homo Sapiens
acggucaacauuccugucuccucccauuuggg

SEQ ID NO: 41865 - RNA, 31 nt, Homo Sapiens
aauaucaggguauaucucagagccuggagaa

SEQ ID NO: 41866 - RNA, 32 nt, Homo Sapiens
gaaaguaaugaaauugucucugguuucagaaa

SEQ ID NO: 41867 - RNA, 32 nt, Homo Sapiens
guuuggugucuggucagugcaaaccugggcug

SEQ ID NO: 41868 - RNA, 32 nt, Homo Sapiens
ccaggaguuuccucugcagagccccgcgcccc

SEQ ID NO: 41869 - RNA, 32 nt, Homo Sapiens
uugccugagccugggaaguggaaguugcagug

SEQ ID NO: 41870 - RNA, 32 nt, Homo Sapiens
aacaaccugaaucuuuuuuuuauauaaauaua

SEQ ID NO: 41871 - RNA, 32 nt, Homo Sapiens
aucuauagauuauacauaacuacaucuauugc

SEQ ID NO: 41872 - RNA, 32 nt, Homo Sapiens
ugaagacuaugaaaaugcuggcuauagauguc

SEQ ID NO: 41873 - RNA, 32 nt, Homo Sapiens
gggcuggagacgggacgaaggccacaacagac

SEQ ID NO: 41874 - RNA, 32 nt, Homo Sapiens
cagggagccuuccguccauacgcaacaaggac

SEQ ID NO: 41875 - RNA, 32 nt, Homo Sapiens
aagccuggaggcggaggcugcacugagcugag

SEQ ID NO: 41876 - RNA, 32 nt, Homo Sapiens
uuugguucuggaacugguuucuauuugucaaa

SEQ ID NO: 41877 - RNA, 32 nt, Homo Sapiens
ggagucgaaaugcuucccggugccgggaguga

SEQ ID NO: 41878 - RNA, 32 nt, Homo Sapiens
gggaagccacuacuuaagaucggaaguuaaga

SEQ ID NO: 41879 - RNA, 32 nt, Homo Sapiens
gcuaaugugauuaccucauauuagcuauuaug

SEQ ID NO: 41880 - RNA, 32 nt, Homo Sapiens
uguaaacauuuguguuuuauaagauuuaccuu

SEQ ID NO: 41881 - RNA, 32 nt, Homo Sapiens
aguucugcuuucugccucuccuccacagcccc

SEQ ID NO: 41882 - RNA, 32 nt, Homo Sapiens
aucacugagggcaucaaugaggcuguccuccu

SEQ ID NO: 41883 - RNA, 32 nt, Homo Sapiens
uauuccuuagucaaaucaggcuacuagaauuc

SEQ ID NO: 41884 - RNA, 32 nt, Homo Sapiens
agccggcccaacccaaccacucggggccccca

SEQ ID NO: 41885 - RNA, 32 nt, Homo Sapiens
ucaaaacaaaaauuuucuucaauguuuaauac

SEQ ID NO: 41886 - RNA, 32 nt, Homo Sapiens
agcaugcgccgacgaugcccagaauccagaac

SEQ ID NO: 41887 - RNA, 32 nt, Homo Sapiens
aaugacugcuccaggauuauaccacaguggag

SEQ ID NO: 41888 - RNA, 31 nt, Homo Sapiens
ucagaucuugguaagauuuacugguugggaa

SEQ ID NO: 41889 - RNA, 32 nt, Homo Sapiens
acuguacaggcccucccuccccuuggccucua

SEQ ID NO: 41890 - RNA, 32 nt, Homo Sapiens
uauaauaagccuuuuuaccucuguguaaaaaa

SEQ ID NO: 41891 - RNA, 32 nt, Homo Sapiens
uuuggggguuuaaagaaauuccaaagagucau

SEQ ID NO: 41892 - RNA, 32 nt, Homo Sapiens
aaacaaaagacguuuuauaugugcaguaugac

SEQ ID NO: 41893 - RNA, 30 nt, Homo Sapiens
gaccuggugccugugccgcccuggcugccu

SEQ ID NO: 41894 - RNA, 32 nt, Homo Sapiens
gaaggaaaaacagauagcaggaaggcagaaag

SEQ ID NO: 41895 - RNA, 32 nt, Homo Sapiens
uacacccuuuugcuuugguucugccaugccga

SEQ ID NO: 41896 - RNA, 32 nt, Homo Sapiens
agagaaagggugaaagcagagagaccagugca

SEQ ID NO: 41897 - RNA, 32 nt, Homo Sapiens
ucuggacagggggcgugaugcugcuggcacug

SEQ ID NO: 41898 - RNA, 32 nt, Homo Sapiens
cucacaucaaggagagggaaaagcacaaugca

SEQ ID NO: 41899 - RNA, 32 nt, Homo Sapiens
uuaaaaacguugucacauccugaaaaaaaaaa

SEQ ID NO: 41900 - RNA, 32 nt, Homo Sapiens
ugucucauauuucagaauaaaauguacuguau

SEQ ID NO: 41901 - RNA, 32 nt, Homo Sapiens
uuuguguggauggccuggagggcaggugcccu

SEQ ID NO: 41902 - RNA, 32 nt, Homo Sapiens
ucccagaggaagaucuggagugaaaaggcagc

SEQ ID NO: 41903 - RNA, 32 nt, Homo Sapiens
gauucuauugguuuuuuuuuuuaaacagaugg

SEQ ID NO: 41904 - RNA, 32 nt, Homo Sapiens
uauauacauauauauauacauaaaaacuuugu

SEQ ID NO: 41905 - RNA, 32 nt, Homo Sapiens
agcgucgccguuucuccuuucuugggcaguau

SEQ ID NO: 41906 - RNA, 30 nt, Homo Sapiens
gcgccauguucgcgcgugggucccggaggc

SEQ ID NO: 41907 - RNA, 32 nt, Homo Sapiens
guuuuucugcauuauacaacccuaaaacacag

SEQ ID NO: 41908 - RNA, 32 nt, Homo Sapiens
agggguugugguguggucagcggccuggggac

SEQ ID NO: 41909 - RNA, 32 nt, Homo Sapiens
gacgguauuuaugaaucaggguuaggcuccau

SEQ ID NO: 41910 - RNA, 32 nt, Homo Sapiens
cccgcauugagcaugggcgcggcggccgugcg

SEQ ID NO: 41911 - RNA, 32 nt, Homo Sapiens
aucaugcuucuacuccauggugaacugaagca

SEQ ID NO: 41912 - RNA, 32 nt, Homo Sapiens
ugaugugccgcccuuccaccuccucaaguggu

SEQ ID NO: 41913 - RNA, 32 nt, Homo Sapiens
gucucggugcccucagaaccucagccagaaag

SEQ ID NO: 41914 - RNA, 28 nt, Homo Sapiens
acagguguggcuacuggaggggccuuca

SEQ ID NO: 41915 - RNA, 32 nt, Homo Sapiens
ugagaagaagguccugggaaugaaucaucuag

SEQ ID NO: 41916 - RNA, 32 nt, Homo Sapiens
guccccaggcuccagcugggcaauccaccacu

SEQ ID NO: 41917 - RNA, 32 nt, Homo Sapiens
uguucauuagaguauuugcaaagauuacaaaa

SEQ ID NO: 41918 - RNA, 32 nt, Homo Sapiens
ggucgccaccgagugucuucucauuuuauuuc

SEQ ID NO: 41919 - RNA, 32 nt, Homo Sapiens
gagagaggaaucaacauggcugcuuugcugcu

SEQ ID NO: 41920 - RNA, 32 nt, Homo Sapiens
agcauacaaaaauauauuaaaaauauaaacaa

SEQ ID NO: 41921 - RNA, 32 nt, Homo Sapiens
ggggcaagaaagggcugcuauccaggaaugca

SEQ ID NO: 41922 - RNA, 32 nt, Homo Sapiens
gaguggggauuuuuuucuucuucccuuucucu

SEQ ID NO: 41923 - RNA, 32 nt, Homo Sapiens
cuucccaugcuucugagucuaggcguuguggu

SEQ ID NO: 41924 - RNA, 32 nt, Homo Sapiens
aaaccaaaucucuuuuugauuuucaaggaaac

SEQ ID NO: 41925 - RNA, 32 nt, Homo Sapiens
aaauuuaauuuuccaagcaaagugugaagugu

SEQ ID NO: 41926 - RNA, 32 nt, Homo Sapiens
uacacaguccucucccuauuaauaugggcaca

SEQ ID NO: 41927 - RNA, 32 nt, Homo Sapiens
uaaacaucuucagcauuuuguaccaucugcuc

SEQ ID NO: 41928 - RNA, 32 nt, Homo Sapiens
ugacuugguguuuuaaaguaaaaauuaugaug

SEQ ID NO: 41929 - RNA, 32 nt, Homo Sapiens
ucccgggaagcagcccagccuguggcugcccc

SEQ ID NO: 41930 - RNA, 32 nt, Homo Sapiens
gggcagccccagccccucuccuuuuccuggac

SEQ ID NO: 41931 - RNA, 32 nt, Homo Sapiens
gaacccauucaaagcccuccccguccccgcau

SEQ ID NO: 41932 - RNA, 32 nt, Homo Sapiens
uccacuguccagguuauaaccugguaccagca

SEQ ID NO: 41933 - RNA, 32 nt, Homo Sapiens
gcggccgagaggacgcgggacccggcgcggug

SEQ ID NO: 41934 - RNA, 32 nt, Homo Sapiens
uauguguuuuaacuauuacagugcauguuagg

SEQ ID NO: 41935 - RNA, 32 nt, Homo Sapiens
cagcugcagcagccuuggucuuucuccagaag

SEQ ID NO: 41936 - RNA, 32 nt, Homo Sapiens
caggaaaaaugguaaguucuaaguuucuccau

SEQ ID NO: 41937 - RNA, 32 nt, Homo Sapiens
ggggauggcgcaugcaugggaggaauucaucu

SEQ ID NO: 41938 - RNA, 32 nt, Homo Sapiens
gcgagagacaccuggcucccccauaucacuuc

SEQ ID NO: 41939 - RNA, 28 nt, Homo Sapiens
ccuggccacaugggaccaaguggaacca

SEQ ID NO: 41940 - RNA, 32 nt, Homo Sapiens
gugggaagaaagaucaagugacguauuauuuu

SEQ ID NO: 41941 - RNA, 32 nt, Homo Sapiens
agaggcagcucuuccuucagcuggcucucauc

SEQ ID NO: 41942 - RNA, 32 nt, Homo Sapiens
cucuccccucccagcccucgcucucucgcucg

SEQ ID NO: 41943 - RNA, 32 nt, Homo Sapiens
ucuacgucaacacagaauuuauacagcagcug

SEQ ID NO: 41944 - RNA, 32 nt, Homo Sapiens
aaaauaacaaaguugcauuggggauuaaauuu

SEQ ID NO: 41945 - RNA, 32 nt, Homo Sapiens
uguuaaaaauuagauuagugauugccugggcc

SEQ ID NO: 41946 - RNA, 32 nt, Homo Sapiens
cugaaaaauggcagaagcaguuuuccaugccc

SEQ ID NO: 41947 - RNA, 32 nt, Homo Sapiens
caauuacuauucccuuugacuucagcugccug

SEQ ID NO: 41948 - RNA, 32 nt, Homo Sapiens
agccaggaccuucugcccuugcuucuggugac

SEQ ID NO: 41949 - RNA, 32 nt, Homo Sapiens
cacugugagugauaaacuuuccaugucaggaa

SEQ ID NO: 41950 - RNA, 32 nt, Homo Sapiens
cuuguuacugguuuuauuuucauuuucuucaa

SEQ ID NO: 41951 - RNA, 32 nt, Homo Sapiens
uugcaguaagugccgccuggccugcaugcauu

SEQ ID NO: 41952 - RNA, 32 nt, Homo Sapiens
ccaagcgauccuccugccucagccuucugagu

SEQ ID NO: 41953 - RNA, 32 nt, Homo Sapiens
auuauaugguucugucacuacucuguaaauua

SEQ ID NO: 41954 - RNA, 30 nt, Homo Sapiens
agcaggacagaagauaugcaaaauguauau

SEQ ID NO: 41955 - RNA, 32 nt, Homo Sapiens
gccgugagccccgaugaggcccgagcgucccc

SEQ ID NO: 41956 - RNA, 32 nt, Homo Sapiens
ucuugucuuuaacauuuugauauuuuguucau

SEQ ID NO: 41957 - RNA, 32 nt, Homo Sapiens
acgcgggccuggcgagcuccgggcuccuccac

SEQ ID NO: 41958 - RNA, 32 nt, Homo Sapiens
ucuucccacgggggaguccgcaguugcccuug

SEQ ID NO: 41959 - RNA, 32 nt, Homo Sapiens
ugucgcuguaaauuuuauggcacuauuuuuau

SEQ ID NO: 41960 - RNA, 30 nt, Homo Sapiens
caggcaggcaggcccccucccgugcgaaac

SEQ ID NO: 41961 - RNA, 32 nt, Homo Sapiens
uuuuuggggcuuucuuuuugauuuuuguuugu

SEQ ID NO: 41962 - RNA, 32 nt, Homo Sapiens
cucaauggccagcgccagcugcagccccggcu

SEQ ID NO: 41963 - RNA, 32 nt, Homo Sapiens
aaaaauggugugcugauaaaccccaaguaaau

SEQ ID NO: 41964 - RNA, 32 nt, Homo Sapiens
caugaaacagagcugcucugcuuuucugucag

SEQ ID NO: 41965 - RNA, 32 nt, Homo Sapiens
gaugcuaggggccaggccuccucugugacucu

SEQ ID NO: 41966 - RNA, 32 nt, Homo Sapiens
gaauauaaagagaauguuacauuuuaucccuu

SEQ ID NO: 41967 - RNA, 32 nt, Homo Sapiens
uguguuuugcccuguuuuacggugagguagga

SEQ ID NO: 41968 - RNA, 32 nt, Homo Sapiens
uuggccucucaagagaccgugcagguccugca

SEQ ID NO: 41969 - RNA, 32 nt, Homo Sapiens
ggaaugggugcagcacaccagcauggcacaug

SEQ ID NO: 41970 - RNA, 32 nt, Homo Sapiens
guuauuagugccaaguuuuucagaaaguuuga

SEQ ID NO: 41971 - RNA, 32 nt, Homo Sapiens
guugaauacgugcagcaagacugcacaucuug

SEQ ID NO: 41972 - RNA, 32 nt, Homo Sapiens
auuaaacuaccauugacagucuucacagaacg

SEQ ID NO: 41973 - RNA, 32 nt, Homo Sapiens
ggggcgcagggcugcgcaggacccuuggaaau

SEQ ID NO: 41974 - RNA, 32 nt, Homo Sapiens
gcucccugcuccaggaugaaaccaagaggggg

SEQ ID NO: 41975 - RNA, 32 nt, Homo Sapiens
gucuggaggaagcugauguggaaggaggggaa

SEQ ID NO: 41976 - RNA, 32 nt, Homo Sapiens
aagguauggucggaggaggagcuccugccugc

SEQ ID NO: 41977 - RNA, 32 nt, Homo Sapiens
uguaggcacauggacccagucuacacucaggc

SEQ ID NO: 41978 - RNA, 32 nt, Homo Sapiens
agagagaaccaaugggcauguuagaauacaau

SEQ ID NO: 41979 - RNA, 32 nt, Homo Sapiens
gagcuaaaaacaaaacagaaugaggugggaaa

SEQ ID NO: 41980 - RNA, 32 nt, Homo Sapiens
ugggacaaauauuguuuccuauauauauguau

SEQ ID NO: 41981 - RNA, 32 nt, Homo Sapiens
cugggccccgggcuccucccacaagccacguu

SEQ ID NO: 41982 - RNA, 32 nt, Homo Sapiens
aaagcacagacagaaaacaacaauauggugau

SEQ ID NO: 41983 - RNA, 32 nt, Homo Sapiens
uaagcaagcugauuuaugauaacugcuuuaaa

SEQ ID NO: 41984 - RNA, 32 nt, Homo Sapiens
ggcucaccuggggauuuggggguggggugguc

SEQ ID NO: 41985 - RNA, 32 nt, Homo Sapiens
uugguauagcaaccccagagaagugcuucauu

SEQ ID NO: 41986 - RNA, 32 nt, Homo Sapiens
gcgggcgcgugggugcagcugcaucuguuuga

SEQ ID NO: 41987 - RNA, 32 nt, Homo Sapiens
acaaacauacacaccccuugacacccccuuac

SEQ ID NO: 41988 - RNA, 32 nt, Homo Sapiens
ugcccuccccaggccucuggggcccgcuggaa

SEQ ID NO: 41989 - RNA, 32 nt, Homo Sapiens
aguguuaaaaauuuuuuauucaguuauuucau

SEQ ID NO: 41990 - RNA, 32 nt, Homo Sapiens
gaagccucugagccccaggcccggcccagccc

SEQ ID NO: 41991 - RNA, 32 nt, Homo Sapiens
gguuucuucaggaugccugcagcacuugugga

SEQ ID NO: 41992 - RNA, 32 nt, Homo Sapiens
ccacgcuaccccugagagucuagaaagcuggu

SEQ ID NO: 41993 - RNA, 32 nt, Homo Sapiens
gaaacgccgcgugacuuguaggugagagaacg

SEQ ID NO: 41994 - RNA, 32 nt, Homo Sapiens
ccccagccgccggcugccagcuuuucggggcc

SEQ ID NO: 41995 - RNA, 32 nt, Homo Sapiens
cgccucggccccacguccuuagaggccagagc

SEQ ID NO: 41996 - RNA, 32 nt, Homo Sapiens
ugaaacaacccaaauguccauccaccaaccca

SEQ ID NO: 41997 - RNA, 32 nt, Homo Sapiens
gaacgacuccagaggggugcuggugggcucug

SEQ ID NO: 41998 - RNA, 32 nt, Homo Sapiens
uaaaaggggcaaaagcacuugcucuccuccca

SEQ ID NO: 41999 - RNA, 32 nt, Homo Sapiens
gguuuucuuucugcauuaaaaugcucauuucc

SEQ ID NO: 42000 - RNA, 32 nt, Homo Sapiens
cauaaagugucuauaauaaaacuaaacuuuca

SEQ ID NO: 42001 - RNA, 32 nt, Homo Sapiens
gcccgugccaccgcugcuaaugagagcaguca

SEQ ID NO: 42002 - RNA, 32 nt, Homo Sapiens
aaaaauguuugcuacuuguuaagggagucaga

SEQ ID NO: 42003 - RNA, 32 nt, Homo Sapiens
guaaagccuuuuucugccccagcucugagaca

SEQ ID NO: 42004 - RNA, 32 nt, Homo Sapiens
cuccugccaaccccacaccccuccacuuccag

SEQ ID NO: 42005 - RNA, 32 nt, Homo Sapiens
aaaacaaaaaacaaaaccaucugcccuccucc

SEQ ID NO: 42006 - RNA, 32 nt, Homo Sapiens
ucaaaauaauuucucuaaaaggcugcaaguau

SEQ ID NO: 42007 - RNA, 32 nt, Homo Sapiens
cgcgcccucucgccgcgcgcgcccucgcaguc

SEQ ID NO: 42008 - RNA, 32 nt, Homo Sapiens
auuacacuguaccuggcuucucuucuuccuuu

SEQ ID NO: 42009 - RNA, 32 nt, Homo Sapiens
gagcuugggccccagggcgcgcccugccucug

SEQ ID NO: 42010 - RNA, 32 nt, Homo Sapiens
ccggaccccuauuugcaaagguccauggcuaa

SEQ ID NO: 42011 - RNA, 32 nt, Homo Sapiens
uggaacaugccauuuuaaauauguuguaagga

SEQ ID NO: 42012 - RNA, 32 nt, Homo Sapiens
cugcuguauuccugucuuucucucucucuuuu

SEQ ID NO: 42013 - RNA, 32 nt, Homo Sapiens
guuaagaaccaucacuuacuuggauuggaugu

SEQ ID NO: 42014 - RNA, 32 nt, Homo Sapiens
aauuagccgggcgugguagcgggugccuguaa

SEQ ID NO: 42015 - RNA, 32 nt, Homo Sapiens
accgcgacaggccagaacacgggcggcggcuu

SEQ ID NO: 42016 - RNA, 32 nt, Homo Sapiens
aucccgcggggcccgggcgggggaaggaguca

SEQ ID NO: 42017 - RNA, 32 nt, Homo Sapiens
cuugucaagggguaggagaaagagacgcaaac

SEQ ID NO: 42018 - RNA, 32 nt, Homo Sapiens
ucacaucuuauauccuaaaugucagaagauau

SEQ ID NO: 42019 - RNA, 32 nt, Homo Sapiens
aaaaugacugcugacagcaaguucuugcugcu

SEQ ID NO: 42020 - RNA, 32 nt, Homo Sapiens
cugaaugaggaggcccuauagcagaagucuga

SEQ ID NO: 42021 - RNA, 32 nt, Homo Sapiens
guaaacuucacccccaggacccaggaucuucu

SEQ ID NO: 42022 - RNA, 32 nt, Homo Sapiens
ccaugaggcgccugggucuagugggagaauuu

SEQ ID NO: 42023 - RNA, 32 nt, Homo Sapiens
caaauaaauuuauaacaauugauuuucccccu

SEQ ID NO: 42024 - RNA, 32 nt, Homo Sapiens
cuacccguguuuccgggcccagcccucgcagc

SEQ ID NO: 42025 - RNA, 32 nt, Homo Sapiens
guuccuucagauucuacggaaugacaguauau

SEQ ID NO: 42026 - RNA, 32 nt, Homo Sapiens
uugggagcuccuccaucuccaauggcugggau

SEQ ID NO: 42027 - RNA, 32 nt, Homo Sapiens
uaccucagcucuaaacuagccuugaaguuuac

SEQ ID NO: 42028 - RNA, 32 nt, Homo Sapiens
caacuuuguggcgcccucaggccgcggcgacu

SEQ ID NO: 42029 - RNA, 30 nt, Homo Sapiens
gacgagcagcagcuugaugaucugcaccgc

SEQ ID NO: 42030 - RNA, 32 nt, Homo Sapiens
ucgaagccucuuaaaauggcagaugacuugga

SEQ ID NO: 42031 - RNA, 32 nt, Homo Sapiens
cagauuuuguagacauuuuucuuaauauuuuu

SEQ ID NO: 42032 - RNA, 32 nt, Homo Sapiens
cggaaguugcugugccccaucagcagcuugac

SEQ ID NO: 42033 - RNA, 32 nt, Homo Sapiens
ccugguucacugcagacaguggcaccccagca

SEQ ID NO: 42034 - RNA, 32 nt, Homo Sapiens
cgaagccggcgcgcccgcccggugcagccgcu

SEQ ID NO: 42035 - RNA, 32 nt, Homo Sapiens
gucugcgugcauauuucucuggcagcugaccu

SEQ ID NO: 42036 - RNA, 32 nt, Homo Sapiens
uggcgcggcggacgggaugaggcgcugcaguc

SEQ ID NO: 42037 - RNA, 30 nt, Homo Sapiens
cugcagagucucgugccgcugcugcugcgc

SEQ ID NO: 42038 - RNA, 32 nt, Homo Sapiens
acugguuggcauucuucuuaauguauuuagua

SEQ ID NO: 42039 - RNA, 32 nt, Homo Sapiens
ccauaaacuaaauauuuauaacuguucugaau

SEQ ID NO: 42040 - RNA, 32 nt, Homo Sapiens
uauagcuuuccacauucucacgucugcugcca

SEQ ID NO: 42041 - RNA, 32 nt, Homo Sapiens
ucauugugcaauaugcugugggacaugggaug

SEQ ID NO: 42042 - RNA, 32 nt, Homo Sapiens
gccuggcacagaccaggccuuugacaaauaaa

SEQ ID NO: 42043 - RNA, 32 nt, Homo Sapiens
aggggagagaccaggaggaaagggcagguuau

SEQ ID NO: 42044 - RNA, 32 nt, Homo Sapiens
ucccacuacaccugcgcagacucaggccaggc

SEQ ID NO: 42045 - RNA, 32 nt, Homo Sapiens
agcccccgcgacggagggcagggcccacccug

SEQ ID NO: 42046 - RNA, 32 nt, Homo Sapiens
cugccccagggccagggauccucucccugcaa

SEQ ID NO: 42047 - RNA, 32 nt, Homo Sapiens
acuuaaucuaagaaacaaaguaaucuacugua

SEQ ID NO: 42048 - RNA, 32 nt, Homo Sapiens
caacagccaaaauagaauggaauagaaugaag

SEQ ID NO: 42049 - RNA, 32 nt, Homo Sapiens
aaguccccucaaggacaaccacuauuucuaua

SEQ ID NO: 42050 - RNA, 32 nt, Homo Sapiens
aaccaaugcuuuccagagggauauccuaagga

SEQ ID NO: 42051 - RNA, 32 nt, Homo Sapiens
ucuuuaugccugcaauuuuaccuagcuaccac

SEQ ID NO: 42052 - RNA, 32 nt, Homo Sapiens
cgccgccgccauugccgcucucucggugagcg

SEQ ID NO: 42053 - RNA, 32 nt, Homo Sapiens
ccacagagcuccuggcgugggcaaggcuggcc

SEQ ID NO: 42054 - RNA, 28 nt, Homo Sapiens
augcagaaggggaggccgaggugggagg

SEQ ID NO: 42055 - RNA, 32 nt, Homo Sapiens
aaaccgugcccugguauugucagacacaccca

SEQ ID NO: 42056 - RNA, 32 nt, Homo Sapiens
ccauuggccugaggagcagagaaagggcaaga

SEQ ID NO: 42057 - RNA, 32 nt, Homo Sapiens
cuggacuugcuggcagaagauuugccucuuac

SEQ ID NO: 42058 - RNA, 32 nt, Homo Sapiens
aguccauggggagagggaagagugaccugagu

SEQ ID NO: 42059 - RNA, 32 nt, Homo Sapiens
aaacaguguauuguguuuuguaaaaugauguc

SEQ ID NO: 42060 - RNA, 32 nt, Homo Sapiens
caacuuuuaagugauauucagaauuaauugac

SEQ ID NO: 42061 - RNA, 32 nt, Homo Sapiens
auaaccaugcuucacugggcauagugaagacu

SEQ ID NO: 42062 - RNA, 32 nt, Homo Sapiens
uuugauagcaacgcuaguggcucaugccugua

SEQ ID NO: 42063 - RNA, 32 nt, Homo Sapiens
ugcucuccaccucgcagacugcucuuguuaua

SEQ ID NO: 42064 - RNA, 32 nt, Homo Sapiens
uucuccacugugaacucugugauucagaauca

SEQ ID NO: 42065 - RNA, 32 nt, Homo Sapiens
caaaagccagcuugcccguuuucuuuaugcuu

SEQ ID NO: 42066 - RNA, 32 nt, Homo Sapiens
cuagaugaggcaaauaaagacuaguugcugcu

SEQ ID NO: 42067 - RNA, 32 nt, Homo Sapiens
uaccaugcagcuuuuaaauaugacagcaauac

SEQ ID NO: 42068 - RNA, 32 nt, Homo Sapiens
acccgauuauuguguauuaccuuuaaauauuu

SEQ ID NO: 42069 - RNA, 28 nt, Homo Sapiens
cacgaaguuacaggaugcucaguuuuaa

SEQ ID NO: 42070 - RNA, 32 nt, Homo Sapiens
auggaagauagaauauaaaauaaaacguuacu

SEQ ID NO: 42071 - RNA, 32 nt, Homo Sapiens
cucaaaugucaauguagauaagagucaucuag

SEQ ID NO: 42072 - RNA, 32 nt, Homo Sapiens
uguguaaagcuucuauguauugaaauauuuuu

SEQ ID NO: 42073 - RNA, 32 nt, Homo Sapiens
uagagauguacaaaagcugaccgaauucacua

SEQ ID NO: 42074 - RNA, 32 nt, Homo Sapiens
cgguggugguggccguggaugacggagacucu

SEQ ID NO: 42075 - RNA, 32 nt, Homo Sapiens
acacaggacagaggaggcagagcuucugccca

SEQ ID NO: 42076 - RNA, 32 nt, Homo Sapiens
ggcccuaccuggcacagaguccugcuccuggg

SEQ ID NO: 42077 - RNA, 32 nt, Homo Sapiens
aaauacuauauaauuuaaauaauguaaacgca

SEQ ID NO: 42078 - RNA, 32 nt, Homo Sapiens
acccucccaucccucuguccuccuaauauagu

SEQ ID NO: 42079 - RNA, 32 nt, Homo Sapiens
ggcggggaagcggguguccgguccccgccaug

SEQ ID NO: 42080 - RNA, 32 nt, Homo Sapiens
gugagccaccgcgcccggccuacuguuaguug

SEQ ID NO: 42081 - RNA, 32 nt, Homo Sapiens
aaaacccucacagaaagucaucgaggcaaaaa

SEQ ID NO: 42082 - RNA, 32 nt, Homo Sapiens
gauuuuuaaguacaaaaaaguuuaagauugca

SEQ ID NO: 42083 - RNA, 32 nt, Homo Sapiens
aaagccgagagcccgcgcccacagccaugucc

SEQ ID NO: 42084 - RNA, 32 nt, Homo Sapiens
cugucuagauuggcuuuuuuaacauucucauu

SEQ ID NO: 42085 - RNA, 32 nt, Homo Sapiens
uuuucugugaauguuggaugaugaauuuuugu

SEQ ID NO: 42086 - RNA, 32 nt, Homo Sapiens
aaugcuggcauuaagaucaugagcccuuuuuc

SEQ ID NO: 42087 - RNA, 32 nt, Homo Sapiens
cagcggccuuggcccugaagggcccccugcug

SEQ ID NO: 42088 - RNA, 31 nt, Homo Sapiens
auccccagaaguucacagguauaucgggugg

SEQ ID NO: 42089 - RNA, 32 nt, Homo Sapiens
cagugcaucugccacaguggcugggcaggcaa

SEQ ID NO: 42090 - RNA, 31 nt, Homo Sapiens
uauaauuuugguaauuuugauuucugggcac

SEQ ID NO: 42091 - RNA, 32 nt, Homo Sapiens
ggcggcaggggaggagguggaacccgcggcga

SEQ ID NO: 42092 - RNA, 32 nt, Homo Sapiens
uuaacacugugugcuuuuguauggaaaaaaua

SEQ ID NO: 42093 - RNA, 32 nt, Homo Sapiens
acauagaaaaggauacagauuuaguaccaaga

SEQ ID NO: 42094 - RNA, 32 nt, Homo Sapiens
gucgccgcgcggccgccggugagccgcaugga

SEQ ID NO: 42095 - RNA, 29 nt, Homo Sapiens
ugaacuauauguauguguauaaggguaua

SEQ ID NO: 42096 - RNA, 32 nt, Homo Sapiens
ugagcagggaggcccggggcuuccucaucaaa

SEQ ID NO: 42097 - RNA, 32 nt, Homo Sapiens
gcacuuuugccagcugaagguccagggagaag

SEQ ID NO: 42098 - RNA, 32 nt, Homo Sapiens
ccccugaggucuuuuaaguugagggcugggaa

SEQ ID NO: 42099 - RNA, 32 nt, Homo Sapiens
cuggacccgcgugcguuacgucaggcccagau

SEQ ID NO: 42100 - RNA, 32 nt, Homo Sapiens
uccccacucucacuucccuucccuucacagac

SEQ ID NO: 42101 - RNA, 32 nt, Homo Sapiens
caaaacuuaccuugucaagucaaaauuuguuu

SEQ ID NO: 42102 - RNA, 32 nt, Homo Sapiens
gccuggcgugguagcgcacgccugugguccca

SEQ ID NO: 42103 - RNA, 32 nt, Homo Sapiens
uggucuaguaaaugaaacuuuaauuuuauguu

SEQ ID NO: 42104 - RNA, 32 nt, Homo Sapiens
gcaucugcuucuucuggggugugaggcgggug

SEQ ID NO: 42105 - RNA, 31 nt, Homo Sapiens
ggcagcauggcggggucgccgcugcucuggg

SEQ ID NO: 42106 - RNA, 32 nt, Homo Sapiens
guauguguguauauaguaugaaugcagugggg

SEQ ID NO: 42107 - RNA, 32 nt, Homo Sapiens
ggugaggcaggcucgccuccuccagcuguugu

SEQ ID NO: 42108 - RNA, 32 nt, Homo Sapiens
gcauaguacuggcacaaaaacacacguagacu

SEQ ID NO: 42109 - RNA, 32 nt, Homo Sapiens
uacuuuuugauucuaaaauaguugucuaggac

SEQ ID NO: 42110 - RNA, 32 nt, Homo Sapiens
cugggaguccgaaagcggagaguguaugacau

SEQ ID NO: 42111 - RNA, 32 nt, Homo Sapiens
gacucugcguucgcgggcgcggugcccccgcg

SEQ ID NO: 42112 - RNA, 32 nt, Homo Sapiens
aaaucauaguaauaauauuauugaacauucua

SEQ ID NO: 42113 - RNA, 32 nt, Homo Sapiens
gauggcuuugaaaaaguggaaaugaauucaca

SEQ ID NO: 42114 - RNA, 32 nt, Homo Sapiens
cucugccuugagcagagcuucuagugggugaa

SEQ ID NO: 42115 - RNA, 32 nt, Homo Sapiens
ugcacucuugucagggaagcccuaacagcgaa

SEQ ID NO: 42116 - RNA, 32 nt, Homo Sapiens
auuaaagugaugucucagugaauaccauacau

SEQ ID NO: 42117 - RNA, 32 nt, Homo Sapiens
aagcacccugugcacuuuaaucuccugucggu

SEQ ID NO: 42118 - RNA, 32 nt, Homo Sapiens
gaggcgcgggcggacugggggcggcggggcua

SEQ ID NO: 42119 - RNA, 32 nt, Homo Sapiens
ucaccggaggucgggaguuugagaccagccug

SEQ ID NO: 42120 - RNA, 32 nt, Homo Sapiens
cagaagcauguuccgggcuggccgcuuugcca

SEQ ID NO: 42121 - RNA, 32 nt, Homo Sapiens
cauccugcgggccccaggaggccuccaucuca

SEQ ID NO: 42122 - RNA, 32 nt, Homo Sapiens
uguacuaugcugcucagauagaacuggucaga

SEQ ID NO: 42123 - RNA, 32 nt, Homo Sapiens
guacaugaaacacguuaaauguccuucagccu

SEQ ID NO: 42124 - RNA, 32 nt, Homo Sapiens
aauauauacacaauauauguaauacacagcac

SEQ ID NO: 42125 - RNA, 32 nt, Homo Sapiens
ggcagcuguggcgggggccgaggagggacauu

SEQ ID NO: 42126 - RNA, 32 nt, Homo Sapiens
guggaccaaggagcuuccaucuagugacaagu

SEQ ID NO: 42127 - RNA, 32 nt, Homo Sapiens
ccccccagccccacccacucaugacucuaagu

SEQ ID NO: 42128 - RNA, 32 nt, Homo Sapiens
cacacggggcugccgcugcgggccccggacca

SEQ ID NO: 42129 - RNA, 32 nt, Homo Sapiens
uaacaaguacuauuuacauaucugcauuuaaa

SEQ ID NO: 42130 - RNA, 28 nt, Homo Sapiens
caucgaaauaaaccucuuuuuauauggc

SEQ ID NO: 42131 - RNA, 32 nt, Homo Sapiens
guguccggccccagccaccagccuguccccac

SEQ ID NO: 42132 - RNA, 32 nt, Homo Sapiens
ucacgauaucagggaagaugugccgccuccaa

SEQ ID NO: 42133 - RNA, 32 nt, Homo Sapiens
uucagaggaagagaugagaaacggaaaccccu

SEQ ID NO: 42134 - RNA, 32 nt, Homo Sapiens
aacauuucucagacaauguugaugcuacugau

SEQ ID NO: 42135 - RNA, 32 nt, Homo Sapiens
caagucaaaccauuauagacaagcauuugggg

SEQ ID NO: 42136 - RNA, 32 nt, Homo Sapiens
uagcaucuaaagaacaaaaucuguccagucaa

SEQ ID NO: 42137 - RNA, 32 nt, Homo Sapiens
aagaguggcacuaaccugggggucaggccauu

SEQ ID NO: 42138 - RNA, 32 nt, Homo Sapiens
uguccaucaguucauacugcaauuuuauguga

SEQ ID NO: 42139 - RNA, 32 nt, Homo Sapiens
agcagcaucaggugcugggaucccacccagcu

SEQ ID NO: 42140 - RNA, 32 nt, Homo Sapiens
cggccucucaauucuucaggcucagucuggac

SEQ ID NO: 42141 - RNA, 32 nt, Homo Sapiens
gaccuuuuuuuuuuuccaauucuaucuuuugu

SEQ ID NO: 42142 - RNA, 32 nt, Homo Sapiens
cuccaaagcacuuuaacuccaaacuagauuug

SEQ ID NO: 42143 - RNA, 32 nt, Homo Sapiens
ugcuucagcacgugaguggcugucccaccauc

SEQ ID NO: 42144 - RNA, 32 nt, Homo Sapiens
cuauuuauaacucuuaucuauccaugauguuu

SEQ ID NO: 42145 - RNA, 32 nt, Homo Sapiens
gcugcugcuccgcgcgcacccggguguccucu

SEQ ID NO: 42146 - RNA, 32 nt, Homo Sapiens
uagcagaaugggguaacagagaaggcaagaau

SEQ ID NO: 42147 - RNA, 32 nt, Homo Sapiens
cugauuucuaaaauaugauuaaaguaaauaua

SEQ ID NO: 42148 - RNA, 32 nt, Homo Sapiens
gggugcugggcgccuggcacauguguggggaa

SEQ ID NO: 42149 - RNA, 32 nt, Homo Sapiens
uuaugggacaguuuuucuuuuauuuauuuugc

SEQ ID NO: 42150 - RNA, 32 nt, Homo Sapiens
gcgcgcugaccgcgggcgcccggcacccucga

SEQ ID NO: 42151 - RNA, 32 nt, Homo Sapiens
aucuagugaauggagaauacauggagaaacuu

SEQ ID NO: 42152 - RNA, 32 nt, Homo Sapiens
uucacaggggagaggcagagggccugucgggg

SEQ ID NO: 42153 - RNA, 32 nt, Homo Sapiens
cugccuuugagcccacguauauuuagacuccu

SEQ ID NO: 42154 - RNA, 32 nt, Homo Sapiens
gcgggcgugucgccgccucuggcaucgccucc

SEQ ID NO: 42155 - RNA, 32 nt, Homo Sapiens
uuuaauauauauauuuaacuauaaggacaguu

SEQ ID NO: 42156 - RNA, 32 nt, Homo Sapiens
ucagcuccuggcagaagcugucgugccugaga

SEQ ID NO: 42157 - RNA, 32 nt, Homo Sapiens
ucuauaugaugauagagaaugaauaaacgucu

SEQ ID NO: 42158 - RNA, 32 nt, Homo Sapiens
uaugaccuuaaugauguacauaaaauaaaaca

SEQ ID NO: 42159 - RNA, 32 nt, Homo Sapiens
uccuguaugauuuccuaauauaaaaacaguaa

SEQ ID NO: 42160 - RNA, 32 nt, Homo Sapiens
ucauacacuacauuuacaaaaugagauaguug

SEQ ID NO: 42161 - RNA, 32 nt, Homo Sapiens
ggcagcuccuccucuucuccgccccgcuggcc

SEQ ID NO: 42162 - RNA, 32 nt, Homo Sapiens
guucugaucaccguuuuuacucuucuuaaacu

SEQ ID NO: 42163 - RNA, 32 nt, Homo Sapiens
gcacucccauucuguuucccaucugcacccuu

SEQ ID NO: 42164 - RNA, 32 nt, Homo Sapiens
uggccagacacaggcccucccuguuccccaga

SEQ ID NO: 42165 - RNA, 32 nt, Homo Sapiens
ggaggugagggggcccaggaucgcggggcgcc

SEQ ID NO: 42166 - RNA, 32 nt, Homo Sapiens
guggccgcuguccaggagcucugcucuccccu

SEQ ID NO: 42167 - RNA, 32 nt, Homo Sapiens
uucaucucuagaaagauuuauauccuggcauu

SEQ ID NO: 42168 - RNA, 32 nt, Homo Sapiens
gggggcagcgggggccggcgcuucuccaacgu

SEQ ID NO: 42169 - RNA, 32 nt, Homo Sapiens
aagagguccgcagcaaacaucuacagauggcc

SEQ ID NO: 42170 - RNA, 32 nt, Homo Sapiens
ccagcccuucccgcgcgguuccacugccuuaa

SEQ ID NO: 42171 - RNA, 32 nt, Homo Sapiens
gcuucauguuuucucugacucauggaucuggu

SEQ ID NO: 42172 - RNA, 32 nt, Homo Sapiens
uucacuuagcuacuuuagauaaccuugcauua

SEQ ID NO: 42173 - RNA, 32 nt, Homo Sapiens
uuggucucuaaguugauuuguacccagugggu

SEQ ID NO: 42174 - RNA, 30 nt, Homo Sapiens
cccgcggauaaaaggugcggaguguccccg

SEQ ID NO: 42175 - RNA, 32 nt, Homo Sapiens
auugaauuaaaaauaacacagucuuuuuaaaa

SEQ ID NO: 42176 - RNA, 32 nt, Homo Sapiens
uuuuuaaaucccguaacuucuuuuucagaacu

SEQ ID NO: 42177 - RNA, 32 nt, Homo Sapiens
agccaugcucugcauacucagaauaagaguga

SEQ ID NO: 42178 - RNA, 32 nt, Homo Sapiens
ccuuauuguuuacagauguaguucuuguuaga

SEQ ID NO: 42179 - RNA, 32 nt, Homo Sapiens
aaguauuuauugagcaucuacuguauaccaug

SEQ ID NO: 42180 - RNA, 32 nt, Homo Sapiens
ccaacagccuggggaagcucugcacagaguga

SEQ ID NO: 42181 - RNA, 32 nt, Homo Sapiens
uaaaaagaaaaguuuauaaaagugaauaaccu

SEQ ID NO: 42182 - RNA, 32 nt, Homo Sapiens
gaggagcccgcagcaaucuccacagccuccug

SEQ ID NO: 42183 - RNA, 32 nt, Homo Sapiens
uagagauacacuugcgcuccacagcacuguaa

SEQ ID NO: 42184 - RNA, 32 nt, Homo Sapiens
ucaugccagcuauaaucuccccugccuuccuu

SEQ ID NO: 42185 - RNA, 32 nt, Homo Sapiens
gguuguauacuucuugaccaugugggacuaau

SEQ ID NO: 42186 - RNA, 31 nt, Homo Sapiens
aagcagcaguuccugaaccaggaagacucau

SEQ ID NO: 42187 - RNA, 31 nt, Homo Sapiens
ugagcgccgccccagaagaggucgagggaau

SEQ ID NO: 42188 - RNA, 29 nt, Homo Sapiens
gacuacauauguauuugacccugugggag

SEQ ID NO: 42189 - RNA, 32 nt, Homo Sapiens
uuucucuucuucccuuauccugcauguacaau

SEQ ID NO: 42190 - RNA, 32 nt, Homo Sapiens
guagcacauaucuuucguuaaagaucagauca

SEQ ID NO: 42191 - RNA, 32 nt, Homo Sapiens
gauuugaggcuuuaguuugcugauuuccuaaa

SEQ ID NO: 42192 - RNA, 32 nt, Homo Sapiens
caacuucauuggcaaauuauuucaaguauuuu

SEQ ID NO: 42193 - RNA, 32 nt, Homo Sapiens
aaagccuucauuuuugaccuccccuuacugaa

SEQ ID NO: 42194 - RNA, 32 nt, Homo Sapiens
gccagccagcucagccaggcucccuguguccu

SEQ ID NO: 42195 - RNA, 32 nt, Homo Sapiens
augauacugucaauugcugucauugagaugau

SEQ ID NO: 42196 - RNA, 32 nt, Homo Sapiens
guuccaguccugagcuuggaccucaagauauu

SEQ ID NO: 42197 - RNA, 32 nt, Homo Sapiens
ccgccuccgccagcgccugucgccgucacucu

SEQ ID NO: 42198 - RNA, 32 nt, Homo Sapiens
aaaagguuggaaaauuaauuauagaagguucu

SEQ ID NO: 42199 - RNA, 32 nt, Homo Sapiens
acgguacccaacugccaccucccuucaaccau

SEQ ID NO: 42200 - RNA, 32 nt, Homo Sapiens
auacuagauuguguucugucucuguucaggua

SEQ ID NO: 42201 - RNA, 32 nt, Homo Sapiens
aauaaucuuucuuaaaaaauauaugcacuuua

SEQ ID NO: 42202 - RNA, 32 nt, Homo Sapiens
ccaaguaaaggauaaauucaaaaaauagccuc

SEQ ID NO: 42203 - RNA, 32 nt, Homo Sapiens
uccugggccuaagaacugcaucugaagcagcc

SEQ ID NO: 42204 - RNA, 32 nt, Homo Sapiens
gggugucccccuccccccuucaggggcagcua

SEQ ID NO: 42205 - RNA, 32 nt, Homo Sapiens
auucacuuaacuucuccauggcugcuuccugc

SEQ ID NO: 42206 - RNA, 32 nt, Homo Sapiens
auucugacuuuguuuggagacacacacuucag

SEQ ID NO: 42207 - RNA, 32 nt, Homo Sapiens
cucggggccgcaggaaggaagaggaggcagcg

SEQ ID NO: 42208 - RNA, 32 nt, Homo Sapiens
cugcugcagggccagccaucagucuuugcauu

SEQ ID NO: 42209 - RNA, 32 nt, Homo Sapiens
uucucugcugucagcuucccaucuggcucagc

SEQ ID NO: 42210 - RNA, 32 nt, Homo Sapiens
ggguagaguaacucucccacuccaaacugugu

SEQ ID NO: 42211 - RNA, 32 nt, Homo Sapiens
gaggccaccccggcccggccuccaggcagagg

SEQ ID NO: 42212 - RNA, 32 nt, Homo Sapiens
ccugucggcuccagcccaccagcccuccaguc

SEQ ID NO: 42213 - RNA, 32 nt, Homo Sapiens
ggaccagaacccuggggucagacccaucuccu

SEQ ID NO: 42214 - RNA, 32 nt, Homo Sapiens
cauuacacuccagccugggcaccaggaacgaa

SEQ ID NO: 42215 - RNA, 32 nt, Homo Sapiens
aaucugguggaggugcggucaguugugaccag

SEQ ID NO: 42216 - RNA, 32 nt, Homo Sapiens
uuggaggaggucggcugguuaucgggaguugg

SEQ ID NO: 42217 - RNA, 32 nt, Homo Sapiens
cagauauaggagagauucuuuuuuauuagaug

SEQ ID NO: 42218 - RNA, 32 nt, Homo Sapiens
ccuacugugggcauagcgcccgccaugacacg

SEQ ID NO: 42219 - RNA, 32 nt, Homo Sapiens
ucauccagccccaccaagugacuuugguugac

SEQ ID NO: 42220 - RNA, 32 nt, Homo Sapiens
uauuuucuuuggagaagagucuguucaaucau

SEQ ID NO: 42221 - RNA, 32 nt, Homo Sapiens
uggaagaauauuuggugcuuuuauuuuuuaga

SEQ ID NO: 42222 - RNA, 32 nt, Homo Sapiens
cggaggcccuccugggggcgggcgcggggcgc

SEQ ID NO: 42223 - RNA, 32 nt, Homo Sapiens
cugaggcgccgcggccgggucccucuccaccu

SEQ ID NO: 42224 - RNA, 32 nt, Homo Sapiens
ggguaauuuacaaagaaaagagguuuauuugg

SEQ ID NO: 42225 - RNA, 32 nt, Homo Sapiens
aggaggcaucguccccggggcugggcugcagc

SEQ ID NO: 42226 - RNA, 32 nt, Homo Sapiens
gccacugcacuccagccugggcgacagaguga

SEQ ID NO: 42227 - RNA, 32 nt, Homo Sapiens
gaugggccagaggccuggcuuggggaagggcc

SEQ ID NO: 42228 - RNA, 32 nt, Homo Sapiens
gccaccgcacuccagccugggcgacagagcga

SEQ ID NO: 42229 - RNA, 32 nt, Homo Sapiens
cagcggcgccgacaugacaaggcgcugcaugc

SEQ ID NO: 42230 - RNA, 32 nt, Homo Sapiens
acugccgcccugguggacuccucccgcuggag

SEQ ID NO: 42231 - RNA, 32 nt, Homo Sapiens
uagcauguucaaagcugacaccacugaggucg

SEQ ID NO: 42232 - RNA, 32 nt, Homo Sapiens
ugucauuugacugccuuuacugagugccuacu

SEQ ID NO: 42233 - RNA, 32 nt, Homo Sapiens
gguuggagugcagugguaugaucauagcugac

SEQ ID NO: 42234 - RNA, 32 nt, Homo Sapiens
ccgcggcagagcgagcuggcgccgggaagcga

SEQ ID NO: 42235 - RNA, 32 nt, Homo Sapiens
augaccaauuucuuaaauuucuggagcaaccc

SEQ ID NO: 42236 - RNA, 32 nt, Homo Sapiens
ccaccgggaugguggggggucuuggagccaag

SEQ ID NO: 42237 - RNA, 30 nt, Homo Sapiens
gggcgggcgcccgagcagccccauuacgcu

SEQ ID NO: 42238 - RNA, 32 nt, Homo Sapiens
cgcugccggagccccaggugaccagcgccaug

SEQ ID NO: 42239 - RNA, 32 nt, Homo Sapiens
agguggaagcuuuuuaauaaagaaauugcauu

SEQ ID NO: 42240 - RNA, 32 nt, Homo Sapiens
augaauucaaggaaucaauuaaaacacuaugu

SEQ ID NO: 42241 - RNA, 32 nt, Homo Sapiens
uaaaugucaaguauucuguuuuugggguuuuu

SEQ ID NO: 42242 - RNA, 32 nt, Homo Sapiens
aaaccucugugccaugagagccaaguggagga

SEQ ID NO: 42243 - RNA, 32 nt, Homo Sapiens
uucugcaguguacagcuguuugagagccucau

SEQ ID NO: 42244 - RNA, 32 nt, Homo Sapiens
uugugagauaaaacucuccuuuuccuuaccau

SEQ ID NO: 42245 - RNA, 32 nt, Homo Sapiens
ggacuacugggcggggcucggcgcgggggcgg

SEQ ID NO: 42246 - RNA, 32 nt, Homo Sapiens
gccggucucauuucuucucguuuucacaggcg

SEQ ID NO: 42247 - RNA, 32 nt, Homo Sapiens
acuacagagaaaaaccaaguaugcuugaguuu

SEQ ID NO: 42248 - RNA, 32 nt, Homo Sapiens
cccccaaaccauaccucagcacaggggcuugu

SEQ ID NO: 42249 - RNA, 32 nt, Homo Sapiens
ucacugcagcaggucaccgagcaggagucccu

SEQ ID NO: 42250 - RNA, 32 nt, Homo Sapiens
gugguggaaccucagguugaaauaccagggcu

SEQ ID NO: 42251 - RNA, 32 nt, Homo Sapiens
ggcguggacauccacucacuccuuccagcaau

SEQ ID NO: 42252 - RNA, 32 nt, Homo Sapiens
ugcaccacugguuuuuguagcuaucucguaag

SEQ ID NO: 42253 - RNA, 32 nt, Homo Sapiens
gaagguugcuccaugauggauuuggaaacuua

SEQ ID NO: 42254 - RNA, 32 nt, Homo Sapiens
cugccuguucuucacacuuagcuccaaaccca

SEQ ID NO: 42255 - RNA, 32 nt, Homo Sapiens
cuuuuccuacugugucuuguuacaaggccuca

SEQ ID NO: 42256 - RNA, 32 nt, Homo Sapiens
guccuacaugucuggaacuuucugggauguuc

SEQ ID NO: 42257 - RNA, 32 nt, Homo Sapiens
uucacuuuaaacaauuugauauagcuauuaaa

SEQ ID NO: 42258 - RNA, 32 nt, Homo Sapiens
cacacacacacacauauacacacacacacacu

SEQ ID NO: 42259 - RNA, 32 nt, Homo Sapiens
agcuagucuugaauuccugaccucaggugauc

SEQ ID NO: 42260 - RNA, 32 nt, Homo Sapiens
ugucaggcggguuggugaagggcgcggggccg

SEQ ID NO: 42261 - RNA, 30 nt, Homo Sapiens
acuuugccacuugcacugaguuuuggguca

SEQ ID NO: 42262 - RNA, 32 nt, Homo Sapiens
cuccuuccgccccuccuucuccggggucagcc

SEQ ID NO: 42263 - RNA, 32 nt, Homo Sapiens
uuggggguuuuguuuuauuuuaucuaauuuuu

SEQ ID NO: 42264 - RNA, 32 nt, Homo Sapiens
ucgccggcugcggcgccugggacgguugcggu

SEQ ID NO: 42265 - RNA, 32 nt, Homo Sapiens
cccagucugcuucucccuguuacacacugucc

SEQ ID NO: 42266 - RNA, 32 nt, Homo Sapiens
aagguuuguucuaggcuucucuaguuggcagg

SEQ ID NO: 42267 - RNA, 32 nt, Homo Sapiens
gagcacucgggccgcgucgccaggagccgccc

SEQ ID NO: 42268 - RNA, 32 nt, Homo Sapiens
uucauuuuuaguuuuucuaauucuggaaucug

SEQ ID NO: 42269 - RNA, 32 nt, Homo Sapiens
aaauucuuguccucugugauaauuaggacaua

SEQ ID NO: 42270 - RNA, 32 nt, Homo Sapiens
agucagagauaacuuugaaauuucauaaguuu

SEQ ID NO: 42271 - RNA, 32 nt, Homo Sapiens
ugacuuuccuucccuuucacaugaggaucugc

SEQ ID NO: 42272 - RNA, 32 nt, Homo Sapiens
agauccugggccagccccuccacacaucuccc

SEQ ID NO: 42273 - RNA, 32 nt, Homo Sapiens
augugcuuugucuuacuaauugauuuuaguuu

SEQ ID NO: 42274 - RNA, 32 nt, Homo Sapiens
uuugucgcggcugcccgcucucccagggggag

SEQ ID NO: 42275 - RNA, 32 nt, Homo Sapiens
ggcgagugcgcggcgacagagcccggggaagg

SEQ ID NO: 42276 - RNA, 32 nt, Homo Sapiens
auuccccaggacuucaauuucauugguuuuua

SEQ ID NO: 42277 - RNA, 32 nt, Homo Sapiens
gcuuacgcgccgggaaacugggaaggcuggug

SEQ ID NO: 42278 - RNA, 27 nt, Homo Sapiens
ugacccuuacacuucagccucccaagu

SEQ ID NO: 42279 - RNA, 30 nt, Homo Sapiens
gugagggauaaaagacuacauauuggagca

SEQ ID NO: 42280 - RNA, 32 nt, Homo Sapiens
guaaucacuguaaacaucuauaugaucuggga

SEQ ID NO: 42281 - RNA, 32 nt, Homo Sapiens
gagagcuguuccgucucucaauaaaauucuuc

SEQ ID NO: 42282 - RNA, 32 nt, Homo Sapiens
caauaaaacaaaucuugcaacuguucuauguu

SEQ ID NO: 42283 - RNA, 32 nt, Homo Sapiens
uugcucuucugaagaaaccauuaaaaaaaaau

SEQ ID NO: 42284 - RNA, 32 nt, Homo Sapiens
uuauauuuauguucuauucaucuuuugaaugu

SEQ ID NO: 42285 - RNA, 32 nt, Homo Sapiens
aaggcgaggaccccagcgagcguaagggcgca

SEQ ID NO: 42286 - RNA, 32 nt, Homo Sapiens
ccccugcccacccacugguggaggugcuaacu

SEQ ID NO: 42287 - RNA, 30 nt, Homo Sapiens
gagugucugcagggcggcggagggcagagc

SEQ ID NO: 42288 - RNA, 32 nt, Homo Sapiens
uaagguaauccaauaaggucuuuuuuaaauau

SEQ ID NO: 42289 - RNA, 32 nt, Homo Sapiens
cuggaguggugcgccccggccccgcccccuga

SEQ ID NO: 42290 - RNA, 32 nt, Homo Sapiens
gcguagccaagcccaucccgccugaugcggcc

SEQ ID NO: 42291 - RNA, 32 nt, Homo Sapiens
aacagaaguauuucuguggauggcaucaaaca

SEQ ID NO: 42292 - RNA, 32 nt, Homo Sapiens
gcauuuacauauauuuguacaucuauaugaca

SEQ ID NO: 42293 - RNA, 32 nt, Homo Sapiens
gggaaggagaaaaacuuuuucucaauucugaa

SEQ ID NO: 42294 - RNA, 32 nt, Homo Sapiens
aggcgcuagugggagacagggggcaggccaga

SEQ ID NO: 42295 - RNA, 32 nt, Homo Sapiens
cucaacaauuuaaaaaaucugcauuugaagau

SEQ ID NO: 42296 - RNA, 32 nt, Homo Sapiens
cagggacccgcggugcggguuaugcugggggc

SEQ ID NO: 42297 - RNA, 32 nt, Homo Sapiens
ugguggcuggaaguugggaucuguaagagaag

SEQ ID NO: 42298 - RNA, 32 nt, Homo Sapiens
uggcucacaccuguaaucccaacacuuuggga

SEQ ID NO: 42299 - RNA, 32 nt, Homo Sapiens
uggcucacaccuguaaucccagcacuuugaga

SEQ ID NO: 42300 - RNA, 32 nt, Homo Sapiens
gugcagcugagaaaaugagugacuagacguuc

SEQ ID NO: 42301 - RNA, 32 nt, Homo Sapiens
uugcugugagaauguaaaauggugcagccguu

SEQ ID NO: 42302 - RNA, 32 nt, Homo Sapiens
gguggcgggaggaggggacagcugcgggcgcg

SEQ ID NO: 42303 - RNA, 32 nt, Homo Sapiens
cgguugcugcugcccaaggaccgcggagucgg

SEQ ID NO: 42304 - RNA, 32 nt, Homo Sapiens
gcuuuauuucuaauaauaaccaagacuuuuca

SEQ ID NO: 42305 - RNA, 32 nt, Homo Sapiens
guucuguauugcugcugugacuucagaaaaaa

SEQ ID NO: 42306 - RNA, 32 nt, Homo Sapiens
uuguggagaaaggucuccauggagcgacaggc

SEQ ID NO: 42307 - RNA, 32 nt, Homo Sapiens
aggaggggcggcgggcugcuccugucacccag

SEQ ID NO: 42308 - RNA, 32 nt, Homo Sapiens
aaaagcauauaccaccuuaguucauucaugua

SEQ ID NO: 42309 - RNA, 32 nt, Homo Sapiens
uuuuaguauguggcguaucaugcaagugcuau

SEQ ID NO: 42310 - RNA, 32 nt, Homo Sapiens
uucuggagggaaggggcgggggaaucggcccc

SEQ ID NO: 42311 - RNA, 32 nt, Homo Sapiens
auuuuugaaguacaaauguuuacuucaacagc

SEQ ID NO: 42312 - RNA, 32 nt, Homo Sapiens
ugggaaggggagacagaggaugagcggcgucu

SEQ ID NO: 42313 - RNA, 32 nt, Homo Sapiens
gagccgggcgccugggcgcccggggcgugugc

SEQ ID NO: 42314 - RNA, 32 nt, Homo Sapiens
cugaaaugcugcuuucacucccuaacaccaug

SEQ ID NO: 42315 - RNA, 32 nt, Homo Sapiens
cuaauuuggcacaaaaucaacuguauuagucc

SEQ ID NO: 42316 - RNA, 32 nt, Homo Sapiens
ucagaaaaacaaauuaggcagaauugcuaugu

SEQ ID NO: 42317 - RNA, 32 nt, Homo Sapiens
uuuuuaaaaauauguggcugugaacuugaaug

SEQ ID NO: 42318 - RNA, 31 nt, Homo Sapiens
cacagcagcaagguucacggauauccgugug

SEQ ID NO: 42319 - RNA, 32 nt, Homo Sapiens
ccagcgcccucccuguccaguuccuugaaggc

SEQ ID NO: 42320 - RNA, 32 nt, Homo Sapiens
cgcccagcuggagaagcaguuagggcggacga

SEQ ID NO: 42321 - RNA, 30 nt, Homo Sapiens
ggaagaagaggcggcggcggcggggguagg

SEQ ID NO: 42322 - RNA, 27 nt, Homo Sapiens
gucaauuccuucuuccucaccucucag

SEQ ID NO: 42323 - RNA, 32 nt, Homo Sapiens
agcccccuugauucaauuaccucccccugggu

SEQ ID NO: 42324 - RNA, 32 nt, Homo Sapiens
uacucaugguggacagccaccauucuaaugcu

SEQ ID NO: 42325 - RNA, 32 nt, Homo Sapiens
gcgaggcggaggagggggugccauggccgggc

SEQ ID NO: 42326 - RNA, 32 nt, Homo Sapiens
aacuugaaagagaauagacaguaugacauaua

SEQ ID NO: 42327 - RNA, 32 nt, Homo Sapiens
gauggcuacaagcaguauuaaaauuucaggag

SEQ ID NO: 42328 - RNA, 32 nt, Homo Sapiens
cguguuguugagaggaugauguuguaagggua

SEQ ID NO: 42329 - RNA, 32 nt, Homo Sapiens
aggaaauucaugccgagaccugcuauucaaug

SEQ ID NO: 42330 - RNA, 32 nt, Homo Sapiens
caaaaaauuguaaaaaugagccaggcaugugg

SEQ ID NO: 42331 - RNA, 32 nt, Homo Sapiens
cucugucucccucugccucuccagccccugaa

SEQ ID NO: 42332 - RNA, 32 nt, Homo Sapiens
acuuugaaagagauuucaugaguaauuugaau

SEQ ID NO: 42333 - RNA, 32 nt, Homo Sapiens
cugagcccaggcguucgcccugucccaccuag

SEQ ID NO: 42334 - RNA, 28 nt, Homo Sapiens
ccgauggggcggcuggccaggcaggggg

SEQ ID NO: 42335 - RNA, 32 nt, Homo Sapiens
gaaguuacaagaguaguagaugaacaacuaaa

SEQ ID NO: 42336 - RNA, 32 nt, Homo Sapiens
aacuuggagagcuguuuucucauuucauguac

SEQ ID NO: 42337 - RNA, 32 nt, Homo Sapiens
auacuuguuuuaacauuuuugcuaucuuuuuu

SEQ ID NO: 42338 - RNA, 32 nt, Homo Sapiens
accuggaaggaccaccuggauucauucaugga

SEQ ID NO: 42339 - RNA, 32 nt, Homo Sapiens
cagaggagaugggggccggcucugccggccaa

SEQ ID NO: 42340 - RNA, 32 nt, Homo Sapiens
aaaaagacauucaacuugaggcuccuguuagu

SEQ ID NO: 42341 - RNA, 32 nt, Homo Sapiens
cagaaaagaaaauggaauaauggagcauuguu

SEQ ID NO: 42342 - RNA, 32 nt, Homo Sapiens
gauuuuugcuacaguuuagacacugugguuua

SEQ ID NO: 42343 - RNA, 32 nt, Homo Sapiens
ccaagggagagccagaacagguuuuggauacu

SEQ ID NO: 42344 - RNA, 32 nt, Homo Sapiens
gcggaggucggcggggggcugcugggaggcgc

SEQ ID NO: 42345 - RNA, 32 nt, Homo Sapiens
caucucccgagcgacccccggcgcccgcccgc

SEQ ID NO: 42346 - RNA, 32 nt, Homo Sapiens
uucaacaguauauuaagaagcucuacauucuu

SEQ ID NO: 42347 - RNA, 32 nt, Homo Sapiens
uuaaauuguaaauuuuagagcauaccaguacu

SEQ ID NO: 42348 - RNA, 32 nt, Homo Sapiens
cugggccuuucuggcucugggaaugaagcgug

SEQ ID NO: 42349 - RNA, 32 nt, Homo Sapiens
guucuaauugguucugcaauuugcucuuaaac

SEQ ID NO: 42350 - RNA, 32 nt, Homo Sapiens
augugaagcugauguuugauuccaguuuccuu

SEQ ID NO: 42351 - RNA, 32 nt, Homo Sapiens
ggaaugaggguuuuuucuuuuucuuuuuuuuu

SEQ ID NO: 42352 - RNA, 32 nt, Homo Sapiens
guuuauaguucaguagcuuaggcaaggcacac

SEQ ID NO: 42353 - RNA, 32 nt, Homo Sapiens
uggaugaugcugcagagugcuuugaaaaccuc

SEQ ID NO: 42354 - RNA, 32 nt, Homo Sapiens
uccgcacggacggggcgggcggcgcggacagg

SEQ ID NO: 42355 - RNA, 32 nt, Homo Sapiens
cccauuuccuuccuucccucagucucaaaguc

SEQ ID NO: 42356 - RNA, 32 nt, Homo Sapiens
uaauuuauagcauguauccuuucaucaagggc

SEQ ID NO: 42357 - RNA, 32 nt, Homo Sapiens
ucuuucuuaauaaagaaaaacacucaaggacu

SEQ ID NO: 42358 - RNA, 32 nt, Homo Sapiens
guguuuuugagguagaggaagaaaugggaauc

SEQ ID NO: 42359 - RNA, 32 nt, Homo Sapiens
accgucacacacaacuggcacccaggccaggg

SEQ ID NO: 42360 - RNA, 32 nt, Homo Sapiens
uugaauuagcuaccuuaaguauugaagagcuu

SEQ ID NO: 42361 - RNA, 32 nt, Homo Sapiens
ugauugaaugauuguggaacucauugugggug

SEQ ID NO: 42362 - RNA, 32 nt, Homo Sapiens
uggccugguggggccuggcuuuggggcaagac

SEQ ID NO: 42363 - RNA, 32 nt, Homo Sapiens
uucuaagacagaggaaauuaaaaauguauuag

SEQ ID NO: 42364 - RNA, 32 nt, Homo Sapiens
gauuaaggggguggacuuaucaacacuauaau

SEQ ID NO: 42365 - RNA, 32 nt, Homo Sapiens
auuggggaaacagaauagauauuuuaugauau

SEQ ID NO: 42366 - RNA, 32 nt, Homo Sapiens
gugaaguucuuugucacuguccuguauaucaa

SEQ ID NO: 42367 - RNA, 32 nt, Homo Sapiens
uugccgacugguaccucuuaaucagaaucauc

SEQ ID NO: 42368 - RNA, 32 nt, Homo Sapiens
auagucauuuaaaauuuuuucuucucuggcaa

SEQ ID NO: 42369 - RNA, 32 nt, Homo Sapiens
ccaggugaagggaugggaaaaguggacucuca

SEQ ID NO: 42370 - RNA, 32 nt, Homo Sapiens
gagggccacaggacccgggaaauacacacaga

SEQ ID NO: 42371 - RNA, 32 nt, Homo Sapiens
aguccuacaguggcugucacgcagccaccagg

SEQ ID NO: 42372 - RNA, 32 nt, Homo Sapiens
uucuugucaggaggcacagguuacccaaugca

SEQ ID NO: 42373 - RNA, 32 nt, Homo Sapiens
gguugcuccugcucccgucuccaaguccuggu

SEQ ID NO: 42374 - RNA, 32 nt, Homo Sapiens
ugaaugaaagucugauauuugcugauggcaga

SEQ ID NO: 42375 - RNA, 32 nt, Homo Sapiens
cuucuuuuauugcugcaauaggaccuuuucau

SEQ ID NO: 42376 - RNA, 32 nt, Homo Sapiens
gaccugauguaauaaaaacugauaaaagccgu

SEQ ID NO: 42377 - RNA, 32 nt, Homo Sapiens
ugcauuuggggauaaguaaguauugcacuuug

SEQ ID NO: 42378 - RNA, 32 nt, Homo Sapiens
acuguuccagguccucccaaccucugaagugc

SEQ ID NO: 42379 - RNA, 32 nt, Homo Sapiens
uacccuuccugcucuccuuuuuguagugauga

SEQ ID NO: 42380 - RNA, 32 nt, Homo Sapiens
gcccacgcccagagcccuccgccguccccagc

SEQ ID NO: 42381 - RNA, 32 nt, Homo Sapiens
gacucagaggagacucugcugcuugcucccag

SEQ ID NO: 42382 - RNA, 32 nt, Homo Sapiens
agcugcgggggcaggccgggccugcugucacc

SEQ ID NO: 42383 - RNA, 32 nt, Homo Sapiens
gggugcuagagcaucuuaaaugucccucucau

SEQ ID NO: 42384 - RNA, 32 nt, Homo Sapiens
ugguccuccccuccugacccaggccucugugg

SEQ ID NO: 42385 - RNA, 32 nt, Homo Sapiens
cgugaacagcuuggcgaccgccucagugugga

SEQ ID NO: 42386 - RNA, 32 nt, Homo Sapiens
aucaaguuauuuacauacaagauauaaugguu

SEQ ID NO: 42387 - RNA, 32 nt, Homo Sapiens
augaccuccagaagucccuucaauuucuagua

SEQ ID NO: 42388 - RNA, 32 nt, Homo Sapiens
aaaaggccaucccuguaaaggcagaaaagcuu

SEQ ID NO: 42389 - RNA, 32 nt, Homo Sapiens
ccauuuucauauauuucuuuaauaaaaauaau

SEQ ID NO: 42390 - RNA, 32 nt, Homo Sapiens
cagaacucaacagccugggaaaaucacugaca

SEQ ID NO: 42391 - RNA, 32 nt, Homo Sapiens
ucugcuuuauuacaauuugagaaauuauaaac

SEQ ID NO: 42392 - RNA, 32 nt, Homo Sapiens
uuucccuacucuuaauuuuucuuauuguuaaa

SEQ ID NO: 42393 - RNA, 32 nt, Homo Sapiens
ugagucccuaggcccugcacagaugucuaccc

SEQ ID NO: 42394 - RNA, 32 nt, Homo Sapiens
auuuuaauauauuugguuguauucacuuuaua

SEQ ID NO: 42395 - RNA, 32 nt, Homo Sapiens
agacaacacaacacuguuaguaaggcaauuua

SEQ ID NO: 42396 - RNA, 32 nt, Homo Sapiens
ucuggcucuggaguugggggccccuguggggc

SEQ ID NO: 42397 - RNA, 32 nt, Homo Sapiens
agcagcugccagcugagcucugucaccagggg

SEQ ID NO: 42398 - RNA, 32 nt, Homo Sapiens
ucaguugccaaauaucuugauccugugagugu

SEQ ID NO: 42399 - RNA, 32 nt, Homo Sapiens
agacugggcgguccgggguucuccuucggcgc

SEQ ID NO: 42400 - RNA, 32 nt, Homo Sapiens
agauuugagcugugcuggccagcgcauugccu

SEQ ID NO: 42401 - RNA, 32 nt, Homo Sapiens
ucuaaaacagaaaaaggaggaaagaaagucgu

SEQ ID NO: 42402 - RNA, 32 nt, Homo Sapiens
ucaguuuaccgaccugaauguuuaccuguggg

SEQ ID NO: 42403 - RNA, 32 nt, Homo Sapiens
uuauaauaacugaguuauauucacuguggcuc

SEQ ID NO: 42404 - RNA, 32 nt, Homo Sapiens
ggccucccugaaccccacucucucggcgccac

SEQ ID NO: 42405 - RNA, 32 nt, Homo Sapiens
uuuucugaaggauucagugacuugcuuucugu

SEQ ID NO: 42406 - RNA, 32 nt, Homo Sapiens
gugacuucucuacuucaaaaaauguacgugcu

SEQ ID NO: 42407 - RNA, 32 nt, Homo Sapiens
gcaaugcaccauuuguuuuuuauuucauuaaa

SEQ ID NO: 42408 - RNA, 32 nt, Homo Sapiens
uaguccggcccgagccgcucgcgcuaggagag

SEQ ID NO: 42409 - RNA, 32 nt, Homo Sapiens
ggagcugcugugcagaugaauuuuccuucuaa

SEQ ID NO: 42410 - RNA, 32 nt, Homo Sapiens
caccacacuccagccugggugacagagugaaa

SEQ ID NO: 42411 - RNA, 32 nt, Homo Sapiens
guuucuuacaucuuguuuuuacucauuucuga

SEQ ID NO: 42412 - RNA, 32 nt, Homo Sapiens
ucuaguucaaacaaagaaguaguaucagugug

SEQ ID NO: 42413 - RNA, 32 nt, Homo Sapiens
ugguggugugugccuguaaucccagcuacucg

SEQ ID NO: 42414 - RNA, 31 nt, Homo Sapiens
gccaucugucuggccauucagaggauucuaa

SEQ ID NO: 42415 - RNA, 32 nt, Homo Sapiens
cauaagggcaagaggagaggggcuucugcucu

SEQ ID NO: 42416 - RNA, 32 nt, Homo Sapiens
gauggagucucgcucugucacccaggcuggaa

SEQ ID NO: 42417 - RNA, 32 nt, Homo Sapiens
ggcucugagcacaccccugcccggcccagagc

SEQ ID NO: 42418 - RNA, 32 nt, Homo Sapiens
cggaaaaagggaauuauggaagaaauuguuaa

SEQ ID NO: 42419 - RNA, 32 nt, Homo Sapiens
cucuaacgugcaccagaaauaaaggcgaagac

SEQ ID NO: 42420 - RNA, 32 nt, Homo Sapiens
acgaggucaggagaucaagaccauucuggcca

SEQ ID NO: 42421 - RNA, 32 nt, Homo Sapiens
auaaaagaugacugguuuuuaaacauaaaaac

SEQ ID NO: 42422 - RNA, 32 nt, Homo Sapiens
guagggcguuuuguaaaauaaacuauaauauu

SEQ ID NO: 42423 - RNA, 32 nt, Homo Sapiens
uuucucucccucuuucccuccauccucgagcg

SEQ ID NO: 42424 - RNA, 32 nt, Homo Sapiens
aaaugucagacacuauugagaaagaaauagag

SEQ ID NO: 42425 - RNA, 32 nt, Homo Sapiens
auauauucuuuaaugauauuaaauaugccgaa

SEQ ID NO: 42426 - RNA, 32 nt, Homo Sapiens
ggccggagccgccgcugcuccccacucggccu

SEQ ID NO: 42427 - RNA, 32 nt, Homo Sapiens
uauuuugcuuugcauaauuggcucuuuuuaag

SEQ ID NO: 42428 - RNA, 32 nt, Homo Sapiens
cagccuagaggagaagcagcaggaaugaugcu

SEQ ID NO: 42429 - RNA, 32 nt, Homo Sapiens
gugggagaagagaggagaggagggcucagcgg

SEQ ID NO: 42430 - RNA, 32 nt, Homo Sapiens
ugugauagaaaugaaauuuguaauugaucaua

SEQ ID NO: 42431 - RNA, 32 nt, Homo Sapiens
agaagcagccacuugucagcugcgaugaaucc

SEQ ID NO: 42432 - RNA, 32 nt, Homo Sapiens
ugagguugucaguuuccagcaaggcugacauc

SEQ ID NO: 42433 - RNA, 32 nt, Homo Sapiens
ucaccgucaccaucaagccacuggcuguggaa

SEQ ID NO: 42434 - RNA, 31 nt, Homo Sapiens
gagccauccccggucgcaggaguccggggag

SEQ ID NO: 42435 - RNA, 31 nt, Homo Sapiens
aaauaacucaaugauggaugagcugguagaa

SEQ ID NO: 42436 - RNA, 32 nt, Homo Sapiens
uacuuuuuaacagauuuuguauauacacacac

SEQ ID NO: 42437 - RNA, 32 nt, Homo Sapiens
ggcggagggaagccggcccaggcucggugagg

SEQ ID NO: 42438 - RNA, 32 nt, Homo Sapiens
gcuguccccucuugcuucuccuugcaugagcu

SEQ ID NO: 42439 - RNA, 32 nt, Homo Sapiens
cagagagggcacgaggcccugccugccccggg

SEQ ID NO: 42440 - RNA, 32 nt, Homo Sapiens
ccgcggccccaccaugccccagcucggcggcg

SEQ ID NO: 42441 - RNA, 31 nt, Homo Sapiens
guuaggcuuuucugccugcuccugcuuaaac

SEQ ID NO: 42442 - RNA, 32 nt, Homo Sapiens
gugggcugagcuaaaauggcugaggagagagu

SEQ ID NO: 42443 - RNA, 32 nt, Homo Sapiens
cacuggcccgucuccucucaugacugcugcuc

SEQ ID NO: 42444 - RNA, 28 nt, Homo Sapiens
cugaguggccugcccaggaugacacaac

SEQ ID NO: 42445 - RNA, 32 nt, Homo Sapiens
cuguggggacuucagggggagagugcacacag

SEQ ID NO: 42446 - RNA, 32 nt, Homo Sapiens
gcacccacccauuucugugagagagaaaaaga

SEQ ID NO: 42447 - RNA, 32 nt, Homo Sapiens
gcacacacagcgguggggaggcggggaggagc

SEQ ID NO: 42448 - RNA, 32 nt, Homo Sapiens
agcccagccuucccuuccucugagcagagcag

SEQ ID NO: 42449 - RNA, 32 nt, Homo Sapiens
ugagagaggaggccuggaccgagaugugaguc

SEQ ID NO: 42450 - RNA, 32 nt, Homo Sapiens
aucaaaacaaaauaaauuugucuguuuucaac

SEQ ID NO: 42451 - RNA, 32 nt, Homo Sapiens
ugaacuuuucaaaauguaaaucauauaugcag

SEQ ID NO: 42452 - RNA, 32 nt, Homo Sapiens
acuguccuuggagcuuccugggcccuucccug

SEQ ID NO: 42453 - RNA, 32 nt, Homo Sapiens
ucacgugauaauucagaaaauccuugcucguu

SEQ ID NO: 42454 - RNA, 32 nt, Homo Sapiens
ggaggcccggugccggcggccagggaaggucg

SEQ ID NO: 42455 - RNA, 32 nt, Homo Sapiens
aaaucuccuaaaaccagucuaugaacucaggg

SEQ ID NO: 42456 - RNA, 32 nt, Homo Sapiens
cuuguucuugucaaaggcugugucgcuuaaaa

SEQ ID NO: 42457 - RNA, 32 nt, Homo Sapiens
gguguuugaagaaaugugaaauuuuguuacuu

SEQ ID NO: 42458 - RNA, 32 nt, Homo Sapiens
ccaaggggguuggaauaucaagcaagggauaa

SEQ ID NO: 42459 - RNA, 32 nt, Homo Sapiens
accgcacugugaugugaauggcaccgaaguca

SEQ ID NO: 42460 - RNA, 32 nt, Homo Sapiens
gcgccuggccuauuauuuuuuguaagaauaaa

SEQ ID NO: 42461 - RNA, 29 nt, Homo Sapiens
acuucucggggacugugggcgaugugcgc

SEQ ID NO: 42462 - RNA, 32 nt, Homo Sapiens
acaaucuuaauagauaagauagguuccuauuu

SEQ ID NO: 42463 - RNA, 32 nt, Homo Sapiens
acaugagaaaauuuauacuguagagaaacccu

SEQ ID NO: 42464 - RNA, 32 nt, Homo Sapiens
uggagcccugacgcugcuguucuccccgaaga

SEQ ID NO: 42465 - RNA, 32 nt, Homo Sapiens
ggugagccccaaaauugggguucagcguggga

SEQ ID NO: 42466 - RNA, 31 nt, Homo Sapiens
cccagggcugcugcccaaccaugggccacug

SEQ ID NO: 42467 - RNA, 27 nt, Homo Sapiens
gaugcaaauuaauucauguauauuguu

SEQ ID NO: 42468 - RNA, 32 nt, Homo Sapiens
auacuuuaagcacaacuagaaaauuguaagaa

SEQ ID NO: 42469 - RNA, 32 nt, Homo Sapiens
gcaucuaaagauuuuguggacucauaacuuau

SEQ ID NO: 42470 - RNA, 32 nt, Homo Sapiens
gugcugggucauuuuuagggugagguguaggg

SEQ ID NO: 42471 - RNA, 32 nt, Homo Sapiens
uugcucaaugucaaacugugaugacaaauauu

SEQ ID NO: 42472 - RNA, 32 nt, Homo Sapiens
uccuguucuaacucagcccugccucggaugca

SEQ ID NO: 42473 - RNA, 32 nt, Homo Sapiens
cccuacucugucaucucagaccccaggcagga

SEQ ID NO: 42474 - RNA, 32 nt, Homo Sapiens
gccuuuggacccucaccucucuccgguguccg

SEQ ID NO: 42475 - RNA, 32 nt, Homo Sapiens
cucucccuccuccucuuucaccuucauacaag

SEQ ID NO: 42476 - RNA, 32 nt, Homo Sapiens
uauuugggaaaugugaaguucguaucuuuaag

SEQ ID NO: 42477 - RNA, 32 nt, Homo Sapiens
accucgcccgggggaggacgcagacccgggca

SEQ ID NO: 42478 - RNA, 32 nt, Homo Sapiens
cuggaccucauacucuucuguuuuccauucca

SEQ ID NO: 42479 - RNA, 32 nt, Homo Sapiens
aaauaacuaugaaaaugccaguaacguuuauu

SEQ ID NO: 42480 - RNA, 32 nt, Homo Sapiens
ccuucuuuccaccgacaggggcgagggcugcu

SEQ ID NO: 42481 - RNA, 32 nt, Homo Sapiens
ccgggcgccgcaggccggcgggguccacacag

SEQ ID NO: 42482 - RNA, 32 nt, Homo Sapiens
aaucuggaguauuuuuaacaguaguguugauu

SEQ ID NO: 42483 - RNA, 32 nt, Homo Sapiens
ccuaaagugucugcaaguggaaauccagagaa

SEQ ID NO: 42484 - RNA, 32 nt, Homo Sapiens
gaagaaagagaaaaacaaaagaauuauuucuc

SEQ ID NO: 42485 - RNA, 32 nt, Homo Sapiens
uuccuuuucggccaugcuuauggcuccagguc

SEQ ID NO: 42486 - RNA, 32 nt, Homo Sapiens
ggaaguuugcagagagcagacagcuagagaua

SEQ ID NO: 42487 - RNA, 32 nt, Homo Sapiens
uguauugaaaccugcagugcugauuauuagaa

SEQ ID NO: 42488 - RNA, 32 nt, Homo Sapiens
cuggggacccuggccaccccccugcugcuguc

SEQ ID NO: 42489 - RNA, 32 nt, Homo Sapiens
aagagaaauuauucuguaaaucuaacuggugu

SEQ ID NO: 42490 - RNA, 32 nt, Homo Sapiens
uuuauguauauuugaauauagauagggaacaa

SEQ ID NO: 42491 - RNA, 32 nt, Homo Sapiens
cuuauuccacugacaagaguuguucuuauugg

SEQ ID NO: 42492 - RNA, 32 nt, Homo Sapiens
ggcagggugaguagcugcuugacaccccagug

SEQ ID NO: 42493 - RNA, 32 nt, Homo Sapiens
gagguugcgucgcgcgcggagcacucugggac

SEQ ID NO: 42494 - RNA, 32 nt, Homo Sapiens
uaggagaagaggaggaggaggagcgggguccc

SEQ ID NO: 42495 - RNA, 32 nt, Homo Sapiens
ggcaggagagucaguugugugcucuguugaag

SEQ ID NO: 42496 - RNA, 32 nt, Homo Sapiens
gaucacuguuuggugccagagguaaggaguuu

SEQ ID NO: 42497 - RNA, 32 nt, Homo Sapiens
ugucuuguguuaccauuaucuguguaggucau

SEQ ID NO: 42498 - RNA, 32 nt, Homo Sapiens
agucaauccaagucagcccguuaaggagaaag

SEQ ID NO: 42499 - RNA, 32 nt, Homo Sapiens
gaguugaaaguaaaauuucuuauuuaaagaac

SEQ ID NO: 42500 - RNA, 32 nt, Homo Sapiens
ggcaacacaggggccuggccucuagagggcug

SEQ ID NO: 42501 - RNA, 32 nt, Homo Sapiens
ggccugugcacagguagccccucaugcugggc

SEQ ID NO: 42502 - RNA, 32 nt, Homo Sapiens
cugcuuggccccagcuugucugucucuggguc

SEQ ID NO: 42503 - RNA, 32 nt, Homo Sapiens
uggucaauaaaauaaaacuggccugacuuaag

SEQ ID NO: 42504 - RNA, 32 nt, Homo Sapiens
agguuuaaugaaagagauuuuaauauauggcg

SEQ ID NO: 42505 - RNA, 32 nt, Homo Sapiens
uuaaggugaagugaggacaaaaucacauucug

SEQ ID NO: 42506 - RNA, 32 nt, Homo Sapiens
auaguauuaauagaaaguucaggauguuaaac

SEQ ID NO: 42507 - RNA, 32 nt, Homo Sapiens
aacacuccacauucuucaguuuuucacuucua

SEQ ID NO: 42508 - RNA, 32 nt, Homo Sapiens
uaauuucugcacggucaacaaacaucaaguca

SEQ ID NO: 42509 - RNA, 32 nt, Homo Sapiens
ugcccugugugcucugcugccacgguccccuu

SEQ ID NO: 42510 - RNA, 32 nt, Homo Sapiens
ugcugcugcugcgggggcgcugagaggacacg

SEQ ID NO: 42511 - RNA, 32 nt, Homo Sapiens
aaucauacaucauuauuguccagugaauucaa

SEQ ID NO: 42512 - RNA, 27 nt, Homo Sapiens
ccuccguuuaucuucagcccgacauug

SEQ ID NO: 42513 - RNA, 32 nt, Homo Sapiens
uuuaagagaaauacaaaggaaauuucuaaagc

SEQ ID NO: 42514 - RNA, 32 nt, Homo Sapiens
ucuugaagcagcuggaaguccuggauaguucc

SEQ ID NO: 42515 - RNA, 32 nt, Homo Sapiens
ccacgcugcuggcgcugugcgugcagcauucc

SEQ ID NO: 42516 - RNA, 32 nt, Homo Sapiens
ugaugacgucuggucuuuucuuuucauuguau

SEQ ID NO: 42517 - RNA, 32 nt, Homo Sapiens
uggaagaggagaaaggagaaccacugauuuua

SEQ ID NO: 42518 - RNA, 32 nt, Homo Sapiens
uguguaaauacgaugcugaauuuuaugaggcu

SEQ ID NO: 42519 - RNA, 32 nt, Homo Sapiens
gaccuugugccugcccagagccugcaggacag

SEQ ID NO: 42520 - RNA, 32 nt, Homo Sapiens
uacuauuuuuauuauuguuuguccuuuauaaa

SEQ ID NO: 42521 - RNA, 32 nt, Homo Sapiens
ccaaccuccgccuccuggguucaggcgauucu

SEQ ID NO: 42522 - RNA, 32 nt, Homo Sapiens
acauaccugauguuuaaauuuugucacgguug

SEQ ID NO: 42523 - RNA, 32 nt, Homo Sapiens
ugaaaucccaaauaaacuuaauucuaaaagaa

SEQ ID NO: 42524 - RNA, 32 nt, Homo Sapiens
acgcagagaaaacugacuguguccugccggga

SEQ ID NO: 42525 - RNA, 32 nt, Homo Sapiens
guagaccuuucugcgaguacgagccaaccggc

SEQ ID NO: 42526 - RNA, 31 nt, Homo Sapiens
uuccagaaauaaacauggagcucaguauuca

SEQ ID NO: 42527 - RNA, 32 nt, Homo Sapiens
aaaaguacaaccaaaugccagucaggcacagc

SEQ ID NO: 42528 - RNA, 32 nt, Homo Sapiens
gauccaagauuuaucaucucucuauuuugcua

SEQ ID NO: 42529 - RNA, 32 nt, Homo Sapiens
gcugcuaugacaauuugcacagcccaguggcu

SEQ ID NO: 42530 - RNA, 32 nt, Homo Sapiens
ccuucuuuaugggcucuguaggucugaaagaa

SEQ ID NO: 42531 - RNA, 32 nt, Homo Sapiens
ggauuccagaccaaaauugaaaaaaugguuga

SEQ ID NO: 42532 - RNA, 32 nt, Homo Sapiens
aggaaacaagcaugaacggcagucuagaauac

SEQ ID NO: 42533 - RNA, 32 nt, Homo Sapiens
uuuuauuacugauucaaucuccuuacuuguua

SEQ ID NO: 42534 - RNA, 32 nt, Homo Sapiens
uacagguccugccuuauuuucaucucaccaug

SEQ ID NO: 42535 - RNA, 32 nt, Homo Sapiens
gccgggcgcgucggcuaacuccuguaacccca

SEQ ID NO: 42536 - RNA, 32 nt, Homo Sapiens
uaaacaccaaaauaagauauaauaaaacauuu

SEQ ID NO: 42537 - RNA, 32 nt, Homo Sapiens
gggcuguauuuucaaguugauucauaauaaac

SEQ ID NO: 42538 - RNA, 32 nt, Homo Sapiens
aaaugaugcuauaaaugugggagugcagauau

SEQ ID NO: 42539 - RNA, 32 nt, Homo Sapiens
acugagcucccacccgcagagccucuggacgg

SEQ ID NO: 42540 - RNA, 32 nt, Homo Sapiens
gaucguagcuaauuugcauuucuuuuaacuuu

SEQ ID NO: 42541 - RNA, 32 nt, Homo Sapiens
uguucuagccccucuguucauucuucacaggc

SEQ ID NO: 42542 - RNA, 32 nt, Homo Sapiens
augaaggaccuguauuggggucgaugugaugc

SEQ ID NO: 42543 - RNA, 32 nt, Homo Sapiens
uuuaggugucauuguucccuuucugaauuagc

SEQ ID NO: 42544 - RNA, 32 nt, Homo Sapiens
cucuuccuggguggagcuggggauucaagcug

SEQ ID NO: 42545 - RNA, 32 nt, Homo Sapiens
cuguugcagccucacucucuacaggaugaggg

SEQ ID NO: 42546 - RNA, 32 nt, Homo Sapiens
ugaauuugcaacugaauggauuuuaaaaaaua

SEQ ID NO: 42547 - RNA, 32 nt, Homo Sapiens
ccauuaggugccaguagcacccccgcuagagc

SEQ ID NO: 42548 - RNA, 32 nt, Homo Sapiens
ccugucucggaaccugugagcugcaccaggua

SEQ ID NO: 42549 - RNA, 32 nt, Homo Sapiens
guguuugcuaggaauaauacaugaugacuugg

SEQ ID NO: 42550 - RNA, 29 nt, Homo Sapiens
guugacauauguauuucugcuggguauaa

SEQ ID NO: 42551 - RNA, 32 nt, Homo Sapiens
aagaaacauguuaaaaucauggcacaccugca

SEQ ID NO: 42552 - RNA, 32 nt, Homo Sapiens
gaggugcagggaagaggggccggccucagcug

SEQ ID NO: 42553 - RNA, 32 nt, Homo Sapiens
aauaaacugugguuaagaagaaaaauuggccg

SEQ ID NO: 42554 - RNA, 32 nt, Homo Sapiens
aaaaaagaugcaucuacaaagaaggcuaaugu

SEQ ID NO: 42555 - RNA, 31 nt, Homo Sapiens
augacucggaagaaaaaacuuauuaucauag

SEQ ID NO: 42556 - RNA, 32 nt, Homo Sapiens
ucccagugcagguagacuuuauuuuugaaagc

SEQ ID NO: 42557 - RNA, 32 nt, Homo Sapiens
ggagcuggaaaacaaagaucuuucugauguug

SEQ ID NO: 42558 - RNA, 32 nt, Homo Sapiens
cauucuuucaaaauaaaacuuuuugaaauuug

SEQ ID NO: 42559 - RNA, 32 nt, Homo Sapiens
cuggcccaggccucagccccugcgucggaggu

SEQ ID NO: 42560 - RNA, 32 nt, Homo Sapiens
gggacacgcacccuaugugauaccaaguuuua

SEQ ID NO: 42561 - RNA, 32 nt, Homo Sapiens
cuaaagcuugagguugucaaguaacuucgcca

SEQ ID NO: 42562 - RNA, 32 nt, Homo Sapiens
aacuuccccgguucucuggggucuccucuccu

SEQ ID NO: 42563 - RNA, 32 nt, Homo Sapiens
ugcggcgcugggcucguugcugcagccggacc

SEQ ID NO: 42564 - RNA, 32 nt, Homo Sapiens
gcgggcuccuggagccuggaggaggccgaggg

SEQ ID NO: 42565 - RNA, 32 nt, Homo Sapiens
aacugucuggucuuccucucuucugaaacucu

SEQ ID NO: 42566 - RNA, 32 nt, Homo Sapiens
uacaucaaacuuagaggugugaccuuaaauuu

SEQ ID NO: 42567 - RNA, 32 nt, Homo Sapiens
guuuaaugacagucauggcaacuuuuuggcac

SEQ ID NO: 42568 - RNA, 32 nt, Homo Sapiens
accacagcugccuccugagcugccugagccug

SEQ ID NO: 42569 - RNA, 30 nt, Homo Sapiens
cggaaggagaagcuucuugagauaccaaau

SEQ ID NO: 42570 - RNA, 32 nt, Homo Sapiens
ugcucccuuuuggaaugggaacaucuauccua

SEQ ID NO: 42571 - RNA, 32 nt, Homo Sapiens
uaaaaugaggguggaggugggaauaggaucuc

SEQ ID NO: 42572 - RNA, 32 nt, Homo Sapiens
uuuugcuucuaaauuguaccuuuugcuucuga

SEQ ID NO: 42573 - RNA, 32 nt, Homo Sapiens
aagcuauuacaaugguacuuaaaauaauguaa

SEQ ID NO: 42574 - RNA, 32 nt, Homo Sapiens
gcugcgcggggcccgcggcgaugccguuccug

SEQ ID NO: 42575 - RNA, 30 nt, Homo Sapiens
aaggaaggcaggcugcaggggcgccgucgg

SEQ ID NO: 42576 - RNA, 32 nt, Homo Sapiens
gucuguuuacucuguugauaguuucuuuugcu

SEQ ID NO: 42577 - RNA, 32 nt, Homo Sapiens
aguaaauuuuuagagaaacaacaaaacaaaga

SEQ ID NO: 42578 - RNA, 30 nt, Homo Sapiens
accccacccugccccacccaucugaacacu

SEQ ID NO: 42579 - RNA, 32 nt, Homo Sapiens
ccagcccgcggccuggaccccuggaccgcuuu

SEQ ID NO: 42580 - RNA, 32 nt, Homo Sapiens
ucauccuggggaggauacguaggcacacagag

SEQ ID NO: 42581 - RNA, 32 nt, Homo Sapiens
gggacacaaaaauaugugacuaugguguaaaa

SEQ ID NO: 42582 - RNA, 32 nt, Homo Sapiens
ugccauuucucuucuuuauuauuuuggaugau

SEQ ID NO: 42583 - RNA, 32 nt, Homo Sapiens
cucaguuuccaggaucagcuuccuccuucugu

SEQ ID NO: 42584 - RNA, 32 nt, Homo Sapiens
cgggcagugacagccggcgcggaucgcgcguc

SEQ ID NO: 42585 - RNA, 32 nt, Homo Sapiens
uggaccaccuagucuguaacucuuucugagga

SEQ ID NO: 42586 - RNA, 32 nt, Homo Sapiens
uggcgcggaagacccgagccugccggggggag

SEQ ID NO: 42587 - RNA, 32 nt, Homo Sapiens
aggugaggcugccaccugauguucccagugac

SEQ ID NO: 42588 - RNA, 32 nt, Homo Sapiens
gacauggggaaagggaaggcuaaaaauacuug

SEQ ID NO: 42589 - RNA, 30 nt, Homo Sapiens
acaggcaguccagugccgccgucagcugug

SEQ ID NO: 42590 - RNA, 32 nt, Homo Sapiens
cucaggcgcucgccgccucggggcgccuggca

SEQ ID NO: 42591 - RNA, 32 nt, Homo Sapiens
ugaagccuggggaggcuaguaacucaccccaa

SEQ ID NO: 42592 - RNA, 27 nt, Homo Sapiens
gugucuaccuucuucuccauacccuga

SEQ ID NO: 42593 - RNA, 32 nt, Homo Sapiens
guaaacuagagaaaagaaaauguuauaaggaa

SEQ ID NO: 42594 - RNA, 32 nt, Homo Sapiens
guuugacucagggaggacccagggaccucggg

SEQ ID NO: 42595 - RNA, 32 nt, Homo Sapiens
gaaguugugcuaaaccaaguuaagucccauuc

SEQ ID NO: 42596 - RNA, 32 nt, Homo Sapiens
uggaagagggauaaacauagguccugugacuu

SEQ ID NO: 42597 - RNA, 31 nt, Homo Sapiens
aaugggaaauaaaggugcaaauaucucugcu

SEQ ID NO: 42598 - RNA, 32 nt, Homo Sapiens
uuuucauuucuuccucagcugguuacucaggg

SEQ ID NO: 42599 - RNA, 32 nt, Homo Sapiens
uacuuugaagauacacagauggggacaaaaac

SEQ ID NO: 42600 - RNA, 32 nt, Homo Sapiens
gggggugggcuuugggcaauaaaggcaccucc

SEQ ID NO: 42601 - RNA, 32 nt, Homo Sapiens
cacaguuccuacuccccccaccagcuaugcuu

SEQ ID NO: 42602 - RNA, 32 nt, Homo Sapiens
cuccaccgcgcgcccgccucagccguucagcc

SEQ ID NO: 42603 - RNA, 32 nt, Homo Sapiens
uauuucacuuaaccuaaugaccuccaguucca

SEQ ID NO: 42604 - RNA, 32 nt, Homo Sapiens
cuucaccgcugcuggggcacacacacacacau

SEQ ID NO: 42605 - RNA, 32 nt, Homo Sapiens
uuagugcuaaauucuuguuaaauaauguaguu

SEQ ID NO: 42606 - RNA, 32 nt, Homo Sapiens
caucacugcugaagaagaagaggaagaagugg

SEQ ID NO: 42607 - RNA, 32 nt, Homo Sapiens
ccauguuucuuguuuccuuucauccaacccua

SEQ ID NO: 42608 - RNA, 32 nt, Homo Sapiens
uacuguagugaacagaugcauuucuguggaau

SEQ ID NO: 42609 - RNA, 32 nt, Homo Sapiens
uuaauaggacaguaaaucuguguggggcuaga

SEQ ID NO: 42610 - RNA, 32 nt, Homo Sapiens
cccugagcucacccagccccagcuccaggacu

SEQ ID NO: 42611 - RNA, 32 nt, Homo Sapiens
ucacuuugagccauauaguugaaguacaaauu

SEQ ID NO: 42612 - RNA, 28 nt, Homo Sapiens
uuccaggggugcagcaagugcuuucuau

SEQ ID NO: 42613 - RNA, 32 nt, Homo Sapiens
auccuugcaauaaaaaagagguugaucacgac

SEQ ID NO: 42614 - RNA, 32 nt, Homo Sapiens
uguguugccugaaagcacauguguguaucgcu

SEQ ID NO: 42615 - RNA, 32 nt, Homo Sapiens
gucagggcccuccuuguccauguuggguggug

SEQ ID NO: 42616 - RNA, 32 nt, Homo Sapiens
cguacuucucauaauugguauuuagcacaauu

SEQ ID NO: 42617 - RNA, 30 nt, Homo Sapiens
agucccaggcuaauggcagaaauuugcacu

SEQ ID NO: 42618 - RNA, 32 nt, Homo Sapiens
uucccaucaaggaucaaggaccugcucugggg

SEQ ID NO: 42619 - RNA, 32 nt, Homo Sapiens
cggcuacuggggccgccuccuccaggcggggc

SEQ ID NO: 42620 - RNA, 32 nt, Homo Sapiens
ggugcaccuuggacacguggacaaggcccagg

SEQ ID NO: 42621 - RNA, 32 nt, Homo Sapiens
ugccuucccccucccuuuugcgcacacaccag

SEQ ID NO: 42622 - RNA, 32 nt, Homo Sapiens
uagguaaauaaaggcagacaugguuugcaaac

SEQ ID NO: 42623 - RNA, 32 nt, Homo Sapiens
uaaaugaaguagaucaacaugguggaacaaaa

SEQ ID NO: 42624 - RNA, 32 nt, Homo Sapiens
aggucagaugaccccuuagaucugugucaucu

SEQ ID NO: 42625 - RNA, 32 nt, Homo Sapiens
cucuagcccucccugcguuuagauucaguugc

SEQ ID NO: 42626 - RNA, 32 nt, Homo Sapiens
cagauacuuuuguacccauuuugcacuagagg

SEQ ID NO: 42627 - RNA, 32 nt, Homo Sapiens
ccuccucuguaacuucuuucugggggauuggg

SEQ ID NO: 42628 - RNA, 32 nt, Homo Sapiens
uaauguuuugaaucuuuguaaaaauugauauu

SEQ ID NO: 42629 - RNA, 32 nt, Homo Sapiens
gcuggacacaccggacuucaccgacaucgugc

SEQ ID NO: 42630 - RNA, 29 nt, Homo Sapiens
ggacaaaugaagauuugaggggcagccug

SEQ ID NO: 42631 - RNA, 32 nt, Homo Sapiens
gcaacauuugaaaguagucagagagaaaugga

SEQ ID NO: 42632 - RNA, 32 nt, Homo Sapiens
ggauuucuuuggaugcugaaugcagugauguu

SEQ ID NO: 42633 - RNA, 32 nt, Homo Sapiens
caaggcgccugccuugggauaauuccuuggug

SEQ ID NO: 42634 - RNA, 32 nt, Homo Sapiens
aagccuaggucuauuuggauuauucuuucucc

SEQ ID NO: 42635 - RNA, 32 nt, Homo Sapiens
ggagacagaaaagggaagagauaauuacaaug

SEQ ID NO: 42636 - RNA, 31 nt, Homo Sapiens
ccauucccacccucagccgggcucaggcaau

SEQ ID NO: 42637 - RNA, 32 nt, Homo Sapiens
uuuggucuucuuuauuacuccccuccccccgu

SEQ ID NO: 42638 - RNA, 32 nt, Homo Sapiens
caacugagucuggaaggcacugugcagccaaa

SEQ ID NO: 42639 - RNA, 32 nt, Homo Sapiens
ggggacgacuuaagagcauuugucaagcaccu

SEQ ID NO: 42640 - RNA, 32 nt, Homo Sapiens
ccccacaggaagccuuccuccucugccuccuc

SEQ ID NO: 42641 - RNA, 32 nt, Homo Sapiens
cugucaaugucucuuccaaccucugaaaccau

SEQ ID NO: 42642 - RNA, 32 nt, Homo Sapiens
guguccugccugucugccccagcccagauucc

SEQ ID NO: 42643 - RNA, 32 nt, Homo Sapiens
uuuauuuauuuuuugacggagucuuggucugu

SEQ ID NO: 42644 - RNA, 32 nt, Homo Sapiens
cugaacaccaaaauucuuuauacauauuuaag

SEQ ID NO: 42645 - RNA, 32 nt, Homo Sapiens
ugaaccaugcacuuauggauacccagccuuuu

SEQ ID NO: 42646 - RNA, 32 nt, Homo Sapiens
cgcggggccccggcucgcaagccccagcucac

SEQ ID NO: 42647 - RNA, 32 nt, Homo Sapiens
gcaccaaaagaccaccugagcagggagggagg

SEQ ID NO: 42648 - RNA, 32 nt, Homo Sapiens
gucugccccaacugucagcaguguggaggcug

SEQ ID NO: 42649 - RNA, 32 nt, Homo Sapiens
agaggcugacuucugagaggcuuccaggagcc

SEQ ID NO: 42650 - RNA, 30 nt, Homo Sapiens
ggcgcuuccgcgucagcgccggcggggacu

SEQ ID NO: 42651 - RNA, 32 nt, Homo Sapiens
ucccgcgccggccccaggagcucccggcuucg

SEQ ID NO: 42652 - RNA, 32 nt, Homo Sapiens
ccccuccaguguucccuccuugagagcugagc

SEQ ID NO: 42653 - RNA, 32 nt, Homo Sapiens
cuguaauuuaauugaagaaaaauacauccaaa

SEQ ID NO: 42654 - RNA, 32 nt, Homo Sapiens
augccuguguguauauauagaagucauuaugg

SEQ ID NO: 42655 - RNA, 32 nt, Homo Sapiens
guuggauugaacaaaauaauauguauuuugau

SEQ ID NO: 42656 - RNA, 32 nt, Homo Sapiens
uaugaaccaaccccuggaagccaaagcggccu

SEQ ID NO: 42657 - RNA, 32 nt, Homo Sapiens
ggccguccugucaucccugugugcugcagcau

SEQ ID NO: 42658 - RNA, 29 nt, Homo Sapiens
uuugaagauuguauguaauauaggugucu

SEQ ID NO: 42659 - RNA, 32 nt, Homo Sapiens
gacacggacggcgcguccugcugaccccagcc

SEQ ID NO: 42660 - RNA, 32 nt, Homo Sapiens
uauuuguuaacagauuuuaacaguucaaauga

SEQ ID NO: 42661 - RNA, 32 nt, Homo Sapiens
guccccccguccuccuccccagcccagccugc

SEQ ID NO: 42662 - RNA, 32 nt, Homo Sapiens
ugcacccagcccacuuuuuuuuuacucugaaa

SEQ ID NO: 42663 - RNA, 32 nt, Homo Sapiens
gccacagaagcacuuaaauuuccugguuaauu

SEQ ID NO: 42664 - RNA, 32 nt, Homo Sapiens
gucuccuccccuccccccgcgaacuuggccgc

SEQ ID NO: 42665 - RNA, 32 nt, Homo Sapiens
aucuaccguuugcaauaauuugauaaauaauc

SEQ ID NO: 42666 - RNA, 32 nt, Homo Sapiens
ucagaucaguguuuuagaaaauccacacaucu

SEQ ID NO: 42667 - RNA, 32 nt, Homo Sapiens
ugagaugaugccacuuugaugaaugugcauua

SEQ ID NO: 42668 - RNA, 32 nt, Homo Sapiens
uugccucucugcccugcuucucgacaagcuac

SEQ ID NO: 42669 - RNA, 32 nt, Homo Sapiens
aaaauuaacaacccagaaacaaaaaucucuau

SEQ ID NO: 42670 - RNA, 32 nt, Homo Sapiens
uagaaaaaaguacccaaagguacuaacuuuuc

SEQ ID NO: 42671 - RNA, 32 nt, Homo Sapiens
uccuggcagaaagcaggcgaagggcaggagga

SEQ ID NO: 42672 - RNA, 32 nt, Homo Sapiens
gaaucaguaguaauaauauuuucuucugccuc

SEQ ID NO: 42673 - RNA, 32 nt, Homo Sapiens
gauagaaguuugagagaaaaacaaugaaagag

SEQ ID NO: 42674 - RNA, 32 nt, Homo Sapiens
uccagcccucgcuaugugccucugccaucuuc

SEQ ID NO: 42675 - RNA, 32 nt, Homo Sapiens
gcaauuuugggguaagacuuuuuuaugaguac

SEQ ID NO: 42676 - RNA, 28 nt, Homo Sapiens
aaguuugaaauguugcauuugaaguuau

SEQ ID NO: 42677 - RNA, 27 nt, Homo Sapiens
cgauuccccugcuucagccuccugagu

SEQ ID NO: 42678 - RNA, 27 nt, Homo Sapiens
cgauucuccugcuucagccucccgagu

SEQ ID NO: 42679 - RNA, 32 nt, Homo Sapiens
caaguuuuuggaagggaaaagcgggaaagcgc

SEQ ID NO: 42680 - RNA, 32 nt, Homo Sapiens
cuugccgccucuucuuuuuugucccuuaauca

SEQ ID NO: 42681 - RNA, 32 nt, Homo Sapiens
cuguucucaggaucacugggcucuucuuggca

SEQ ID NO: 42682 - RNA, 32 nt, Homo Sapiens
aaaucuuugucaauaaaucuccaugaauaucc

SEQ ID NO: 42683 - RNA, 32 nt, Homo Sapiens
ugagcugcuaucaauauuaaaugaaguuaugg

SEQ ID NO: 42684 - RNA, 32 nt, Homo Sapiens
uucuacauauaguggaaaucugccaauacuaa

SEQ ID NO: 42685 - RNA, 30 nt, Homo Sapiens
acugaggcgcccgggagccgccggucaccg

SEQ ID NO: 42686 - RNA, 32 nt, Homo Sapiens
gagucgagccagcgucgccgcgaugguguugu

SEQ ID NO: 42687 - RNA, 32 nt, Homo Sapiens
uccccuauuuauucuuuguuuccuucugggaa

SEQ ID NO: 42688 - RNA, 32 nt, Homo Sapiens
ggauggacaaccccauaaggacuuuccaggac

SEQ ID NO: 42689 - RNA, 30 nt, Homo Sapiens
uccagccuugaagauggggaaacugaggcu

SEQ ID NO: 42690 - RNA, 32 nt, Homo Sapiens
ucuccuuuauuacagcucucuggugucucuuc

SEQ ID NO: 42691 - RNA, 32 nt, Homo Sapiens
ucagccccucggugcuggccucuccugccugc

SEQ ID NO: 42692 - RNA, 32 nt, Homo Sapiens
agggaggggcgacgggggaggggggugauggu

SEQ ID NO: 42693 - RNA, 32 nt, Homo Sapiens
acaugucuguuuccaagagccacacauguuag

SEQ ID NO: 42694 - RNA, 32 nt, Homo Sapiens
uuuguauuucuccagcccggcgcagaccccgg

SEQ ID NO: 42695 - RNA, 32 nt, Homo Sapiens
gauaauuuucuuuucauuuuuaagagacaauu

SEQ ID NO: 42696 - RNA, 32 nt, Homo Sapiens
uuuccaaggcuaaauucaacuaccccuguuuu

SEQ ID NO: 42697 - RNA, 32 nt, Homo Sapiens
aggggucuguauauacauuucauaaggccugc

SEQ ID NO: 42698 - RNA, 32 nt, Homo Sapiens
ucgcucccaggcugcacccgccgcccuuggcg

SEQ ID NO: 42699 - RNA, 32 nt, Homo Sapiens
cgagaaagggagagggaaucggagggagcagc

SEQ ID NO: 42700 - RNA, 32 nt, Homo Sapiens
agcucaacagcuuuggcuggcaggacagucaa

SEQ ID NO: 42701 - RNA, 32 nt, Homo Sapiens
gagaagauaaacagcugcuaccucuuaguauu

SEQ ID NO: 42702 - RNA, 32 nt, Homo Sapiens
aggcggggugggacuuccuuccucuguccgga

SEQ ID NO: 42703 - RNA, 32 nt, Homo Sapiens
cuuuuaugagagaagaaagagugagagaggaa

SEQ ID NO: 42704 - RNA, 32 nt, Homo Sapiens
gugagaggccucuggaugggcaugggaagaug

SEQ ID NO: 42705 - RNA, 32 nt, Homo Sapiens
caccccuggagcaaagaggcuagggauagcau

SEQ ID NO: 42706 - RNA, 32 nt, Homo Sapiens
aaggcagccaucucgccgugagacagcaagug

SEQ ID NO: 42707 - RNA, 32 nt, Homo Sapiens
gcauuugagcugccacucuuggagcacauuga

SEQ ID NO: 42708 - RNA, 32 nt, Homo Sapiens
gccgacccuccccuccccaccucccccacugc

SEQ ID NO: 42709 - RNA, 32 nt, Homo Sapiens
uuugccgccauguugcacaggcuggucucaaa

SEQ ID NO: 42710 - RNA, 32 nt, Homo Sapiens
cgggcacucggggggcacgcgcggccaccgcu

SEQ ID NO: 42711 - RNA, 32 nt, Homo Sapiens
acccaccguccgcccugcuccucccuggcugc

SEQ ID NO: 42712 - RNA, 32 nt, Homo Sapiens
agcugcgaugaggagcuuuacgacuucccggu

SEQ ID NO: 42713 - RNA, 32 nt, Homo Sapiens
aacuacaguggagaggguuuccgcggagacgc

SEQ ID NO: 42714 - RNA, 32 nt, Homo Sapiens
ucuaaagggcuuuauauugcaaacugaucaaa

SEQ ID NO: 42715 - RNA, 32 nt, Homo Sapiens
gggaucauugcaagagcagcgugacugacauu

SEQ ID NO: 42716 - RNA, 32 nt, Homo Sapiens
aacuaaguugauuuuuuauuugccauaaacca

SEQ ID NO: 42717 - RNA, 32 nt, Homo Sapiens
cacuguagagacuuaggggcuagacagacaug

SEQ ID NO: 42718 - RNA, 32 nt, Homo Sapiens
caggauauuuuuccgcaaaucagucgguugaa

SEQ ID NO: 42719 - RNA, 32 nt, Homo Sapiens
cacauucucugucuccuucucgucggucuacc

SEQ ID NO: 42720 - RNA, 32 nt, Homo Sapiens
gucuccgggcccgggcgggugaagggucagag

SEQ ID NO: 42721 - RNA, 32 nt, Homo Sapiens
aaaacuaaacacauaaaaugcuuuuauuuugc

SEQ ID NO: 42722 - RNA, 32 nt, Homo Sapiens
cugugugcccuucucaaugucuucuacccucg

SEQ ID NO: 42723 - RNA, 32 nt, Homo Sapiens
aaagagaaccugcugguguccuggaggaaaug

SEQ ID NO: 42724 - RNA, 32 nt, Homo Sapiens
caccucuugguugauccucuuguacugggaga

SEQ ID NO: 42725 - RNA, 32 nt, Homo Sapiens
guacgaguuccccagggcugcacucuagauuc

SEQ ID NO: 42726 - RNA, 32 nt, Homo Sapiens
acuuggauguggagguuuuacuuuuuaaaaac

SEQ ID NO: 42727 - RNA, 32 nt, Homo Sapiens
uccugaacauggaagcgauggcagggcauaga

SEQ ID NO: 42728 - RNA, 32 nt, Homo Sapiens
gguggcucuucagaggagcaucagcugucugu

SEQ ID NO: 42729 - RNA, 32 nt, Homo Sapiens
ccccgggaccagccacauccacagcacaacug

SEQ ID NO: 42730 - RNA, 32 nt, Homo Sapiens
aagaagccagacaaagaugcaucuugaucucc

SEQ ID NO: 42731 - RNA, 32 nt, Homo Sapiens
aaaaguuagaugcaaauguauuacuguauaaa

SEQ ID NO: 42732 - RNA, 32 nt, Homo Sapiens
cccaccacccggccuuucccugcgccgugccc

SEQ ID NO: 42733 - RNA, 32 nt, Homo Sapiens
gaggcugcuggcugcacagacccgugagggga

SEQ ID NO: 42734 - RNA, 32 nt, Homo Sapiens
uggaucucggacccagagacucggggagaccc

SEQ ID NO: 42735 - RNA, 32 nt, Homo Sapiens
accaauaaaauuaaucauuuggcauuaaaaaa

SEQ ID NO: 42736 - RNA, 32 nt, Homo Sapiens
guaagucaaugaauuuuaaugaucauauguuc

SEQ ID NO: 42737 - RNA, 32 nt, Homo Sapiens
cccgcgcucugagcccggggccagauucccau

SEQ ID NO: 42738 - RNA, 31 nt, Homo Sapiens
acugugggcucagaaaccgugagagagcccc

SEQ ID NO: 42739 - RNA, 32 nt, Homo Sapiens
uccgggccgggcgggaagucgggucccgaggc

SEQ ID NO: 42740 - RNA, 32 nt, Homo Sapiens
gagccgcgcgcccucuggccucaagggagcau

SEQ ID NO: 42741 - RNA, 32 nt, Homo Sapiens
uaauagugccgucuaaaaaucuuuguaaaguu

SEQ ID NO: 42742 - RNA, 32 nt, Homo Sapiens
aaugcaccacagagaucucacuuuuuaaggaa

SEQ ID NO: 42743 - RNA, 32 nt, Homo Sapiens
gaggaagcauccaaagauugcaacccagggca

SEQ ID NO: 42744 - RNA, 32 nt, Homo Sapiens
uuaucacuuugcaaaacaaaaaaggggacaug

SEQ ID NO: 42745 - RNA, 32 nt, Homo Sapiens
ggauuuguuucauuaaaaagaagcacuuuaug

SEQ ID NO: 42746 - RNA, 32 nt, Homo Sapiens
cagccacagccccgccccaccucccccaggcc

SEQ ID NO: 42747 - RNA, 32 nt, Homo Sapiens
gaugaauaccugugaggauaggaaauuaguuc

SEQ ID NO: 42748 - RNA, 32 nt, Homo Sapiens
agaugggaaaacugaggccuggagguaggaag

SEQ ID NO: 42749 - RNA, 32 nt, Homo Sapiens
uggguuagcuaccugcuaugcgcuaguuagga

SEQ ID NO: 42750 - RNA, 32 nt, Homo Sapiens
ugugaaaucgugcaugaggccccagggcaccg

SEQ ID NO: 42751 - RNA, 32 nt, Homo Sapiens
ucacccuagucuggcgcucgccggcgugggcg

SEQ ID NO: 42752 - RNA, 32 nt, Homo Sapiens
ucacuuccuugaccuuguuuuccucucuucgc

SEQ ID NO: 42753 - RNA, 32 nt, Homo Sapiens
agcugcuccuggacuucuaggaucucagccgu

SEQ ID NO: 42754 - RNA, 32 nt, Homo Sapiens
ugauauuuuaaagauuucugagcuagcaggca

SEQ ID NO: 42755 - RNA, 32 nt, Homo Sapiens
uaauaucugaccacugcuaacagcugugggaa

SEQ ID NO: 42756 - RNA, 32 nt, Homo Sapiens
cugccggcccauguccucucuccggaggucac

SEQ ID NO: 42757 - RNA, 32 nt, Homo Sapiens
gaaggccgccucauugguccgcgcugucgggc

SEQ ID NO: 42758 - RNA, 32 nt, Homo Sapiens
cuaugccagaaagcugcugacugcagaacuag

SEQ ID NO: 42759 - RNA, 32 nt, Homo Sapiens
uuggcucacaugauuauggaggcugccaaguc

SEQ ID NO: 42760 - RNA, 32 nt, Homo Sapiens
uagaaacuucggguggagagggcggcggcguu

SEQ ID NO: 42761 - RNA, 30 nt, Homo Sapiens
ggagaggacagagugggggaaaccucugcc

SEQ ID NO: 42762 - RNA, 29 nt, Homo Sapiens
ggggaauaaaguucuguuauauuuccuug

SEQ ID NO: 42763 - RNA, 32 nt, Homo Sapiens
ugaugaaaggcuucuauuuggaggaagaaaaa

SEQ ID NO: 42764 - RNA, 32 nt, Homo Sapiens
gacuccacguaccccagcugggucucauuguu

SEQ ID NO: 42765 - RNA, 32 nt, Homo Sapiens
uaaucaugugaacauuugaacuaguuauagga

SEQ ID NO: 42766 - RNA, 32 nt, Homo Sapiens
ugccacccucugggaguccccaucccauuuuc

SEQ ID NO: 42767 - RNA, 32 nt, Homo Sapiens
guuagagaacuaaacuaguuuuuccuaucaug

SEQ ID NO: 42768 - RNA, 32 nt, Homo Sapiens
augaauaaguauguauuucuugagaaauguga

SEQ ID NO: 42769 - RNA, 32 nt, Homo Sapiens
ucagggcugcucuucuaagaaacaagucugcc

SEQ ID NO: 42770 - RNA, 32 nt, Homo Sapiens
uuguagccuaaguaucucuugguagaaaaaag

SEQ ID NO: 42771 - RNA, 32 nt, Homo Sapiens
caauuuauuucaugcauaagagcuaauguuau

SEQ ID NO: 42772 - RNA, 32 nt, Homo Sapiens
agugcuguaauacagacggcaaugcaauagcc

SEQ ID NO: 42773 - RNA, 32 nt, Homo Sapiens
augcagauucacucaguuuaaucuugaaugug

SEQ ID NO: 42774 - RNA, 32 nt, Homo Sapiens
uuagacaaacuuacgaaugcuuaacuucuuua

SEQ ID NO: 42775 - RNA, 30 nt, Homo Sapiens
uguggaugagggggcuaggcuccagcuggc

SEQ ID NO: 42776 - RNA, 32 nt, Homo Sapiens
ccagagcgcacugaggggcuccaggucggccc

SEQ ID NO: 42777 - RNA, 28 nt, Homo Sapiens
ggggacgggcggccugcugagugaagcc

SEQ ID NO: 42778 - RNA, 29 nt, Homo Sapiens
uucucccgaaguuuauuuuucucauuuug

SEQ ID NO: 42779 - RNA, 32 nt, Homo Sapiens
gucaaaucuuuugacaaaauuuucaugaucuu

SEQ ID NO: 42780 - RNA, 32 nt, Homo Sapiens
auguuacaagggaaacaaaaacgauuuuugca

SEQ ID NO: 42781 - RNA, 32 nt, Homo Sapiens
gccacugcacuccagccugggcgacagagacu

SEQ ID NO: 42782 - RNA, 32 nt, Homo Sapiens
aucacccaagguggcaguucucaguauuuggc

SEQ ID NO: 42783 - RNA, 32 nt, Homo Sapiens
cuggaugguggcagcagcaggggggacgcugc

SEQ ID NO: 42784 - RNA, 32 nt, Homo Sapiens
cugucuuguacuguguacaaucucuauagguc

SEQ ID NO: 42785 - RNA, 32 nt, Homo Sapiens
ucuccugccagucucuuguacucuguguccug

SEQ ID NO: 42786 - RNA, 32 nt, Homo Sapiens
gugcuggggcugcuggggggaguuaucaugau

SEQ ID NO: 42787 - RNA, 32 nt, Homo Sapiens
cucaggggucugucccgggccggccgcccgcc

SEQ ID NO: 42788 - RNA, 32 nt, Homo Sapiens
gguucagggcuuucuggcuauaaaagggagcc

SEQ ID NO: 42789 - RNA, 32 nt, Homo Sapiens
acaaaacaggguuuuucuuuuuuaucaccuuu

SEQ ID NO: 42790 - RNA, 32 nt, Homo Sapiens
uccuccccaaccccaugaccccucaucuuuuc

SEQ ID NO: 42791 - RNA, 32 nt, Homo Sapiens
uaauucaauuuaaauguguucauguacagucc

SEQ ID NO: 42792 - RNA, 32 nt, Homo Sapiens
uucagaaugauaguuucgugauuacggaaagg

SEQ ID NO: 42793 - RNA, 32 nt, Homo Sapiens
ucucgugaaggcuguaggaaaagggagaaucu

SEQ ID NO: 42794 - RNA, 32 nt, Homo Sapiens
gggcugugaccccugcccuuuccccgccagag

SEQ ID NO: 42795 - RNA, 32 nt, Homo Sapiens
gcugcauuucuugguuguucuuaaacagacuu

SEQ ID NO: 42796 - RNA, 32 nt, Homo Sapiens
uccaacaaaugggcaagcaacgcaacaauugg

SEQ ID NO: 42797 - RNA, 32 nt, Homo Sapiens
ggauuuuccuucccugcccucaccugcaaaug

SEQ ID NO: 42798 - RNA, 32 nt, Homo Sapiens
ggccccggggcaaagaggggugcagagggagu

SEQ ID NO: 42799 - RNA, 32 nt, Homo Sapiens
uauuuuauagaagucaaugcaaaugcauuaau

SEQ ID NO: 42800 - RNA, 32 nt, Homo Sapiens
gaggaggccggcccagcuccuucuuucagggu

SEQ ID NO: 42801 - RNA, 32 nt, Homo Sapiens
ugaaacaauuuaauaauguauuacauuacagu

SEQ ID NO: 42802 - RNA, 32 nt, Homo Sapiens
gcauccaguucaucuuagaaugucaacgauua

SEQ ID NO: 42803 - RNA, 31 nt, Homo Sapiens
aaggcuacaaagaaggaaaaauguuagugau

SEQ ID NO: 42804 - RNA, 32 nt, Homo Sapiens
aaguagaucuguaccaaaaugaaacagccugu

SEQ ID NO: 42805 - RNA, 32 nt, Homo Sapiens
ggccaggguaguccaggguuucccuuugggca

SEQ ID NO: 42806 - RNA, 32 nt, Homo Sapiens
cauuuggcgucgggugggaggggaaaacgcau

SEQ ID NO: 42807 - RNA, 32 nt, Homo Sapiens
ucauugggaaccccgucuuuugccagagccca

SEQ ID NO: 42808 - RNA, 32 nt, Homo Sapiens
cuuucccaaggcauccucuccauggccccuau

SEQ ID NO: 42809 - RNA, 32 nt, Homo Sapiens
uguaccauccccauccugagugacuacuaagc

SEQ ID NO: 42810 - RNA, 32 nt, Homo Sapiens
caaggccaacgggggcucccccugcucugaga

SEQ ID NO: 42811 - RNA, 32 nt, Homo Sapiens
gccugggggucuccagaggcacaaucccuuau

SEQ ID NO: 42812 - RNA, 32 nt, Homo Sapiens
guaaaaucaguaaugugauauuuuauauucug

SEQ ID NO: 42813 - RNA, 32 nt, Homo Sapiens
ccuuucucugccgaagaguggcguggaugaca

SEQ ID NO: 42814 - RNA, 32 nt, Homo Sapiens
cuguuggugguucucgccgggcagcuuagaga

SEQ ID NO: 42815 - RNA, 32 nt, Homo Sapiens
gggcagccccacugccauggagcagccugugu

SEQ ID NO: 42816 - RNA, 32 nt, Homo Sapiens
aaaacaaaacaaaacaaacaaacaaaaaagua

SEQ ID NO: 42817 - RNA, 32 nt, Homo Sapiens
acaccaggcagcaggacacacacacacucaca

SEQ ID NO: 42818 - RNA, 32 nt, Homo Sapiens
auuuuaauaguaaaaacacauuccuaggugga

SEQ ID NO: 42819 - RNA, 32 nt, Homo Sapiens
auugauggacauuuggguuguuucccaucuuu

SEQ ID NO: 42820 - RNA, 32 nt, Homo Sapiens
ucuguuuguucuguugucuaaaagcacacugc

SEQ ID NO: 42821 - RNA, 32 nt, Homo Sapiens
cguccucggucgccgcguccacgucccucucg

SEQ ID NO: 42822 - RNA, 32 nt, Homo Sapiens
uuuuucuuucccuuauuuuguacuuguaaaau

SEQ ID NO: 42823 - RNA, 32 nt, Homo Sapiens
uccuggguucacgccauucucccgccucagcc

SEQ ID NO: 42824 - RNA, 32 nt, Homo Sapiens
auggcacauaucuaucuguugccacaucuccu

SEQ ID NO: 42825 - RNA, 32 nt, Homo Sapiens
aggucaggggucagcaggagugaggcuggggc

SEQ ID NO: 42826 - RNA, 32 nt, Homo Sapiens
aaaacugauccggaagacuuguuggaggcaua

SEQ ID NO: 42827 - RNA, 32 nt, Homo Sapiens
gcggcaacauguccaugcuuuuagugaugucc

SEQ ID NO: 42828 - RNA, 32 nt, Homo Sapiens
aacuauucuuugaaacuuguuggguagaauga

SEQ ID NO: 42829 - RNA, 32 nt, Homo Sapiens
aggauauaggaagccagagaaagugcacagau

SEQ ID NO: 42830 - RNA, 32 nt, Homo Sapiens
gugcucugggacgcgugccgcgcacuggcacg

SEQ ID NO: 42831 - RNA, 32 nt, Homo Sapiens
gagucuugauacaaaaucaguuuauauucuga

SEQ ID NO: 42832 - RNA, 32 nt, Homo Sapiens
auucuggagcagcugaccgaccucuggaaauc

SEQ ID NO: 42833 - RNA, 32 nt, Homo Sapiens
ucagagacuuccauaaucaaguaaauuuuaau

SEQ ID NO: 42834 - RNA, 32 nt, Homo Sapiens
cggcccggccguggcccuccucagugccggcc

SEQ ID NO: 42835 - RNA, 32 nt, Homo Sapiens
acuuuuaaaaaauuauuguacaugugauuuuu

SEQ ID NO: 42836 - RNA, 32 nt, Homo Sapiens
ccauggaccucagggcacucuccucccugccc

SEQ ID NO: 42837 - RNA, 32 nt, Homo Sapiens
agguccacccucgggcccuagcucuguagacu

SEQ ID NO: 42838 - RNA, 32 nt, Homo Sapiens
cuguugaggcuucccccucucugagccaguuu

SEQ ID NO: 42839 - RNA, 32 nt, Homo Sapiens
uggcauuuaggaccacagcuugcuggauuugu

SEQ ID NO: 42840 - RNA, 32 nt, Homo Sapiens
ccugcuggcggaccacgaccagcuggcaccuc

SEQ ID NO: 42841 - RNA, 32 nt, Homo Sapiens
cuggagagagccugcccucguuuccaggcugc

SEQ ID NO: 42842 - RNA, 32 nt, Homo Sapiens
ccuuaaacugguuucuauggugcuucaucgau

SEQ ID NO: 42843 - RNA, 32 nt, Homo Sapiens
cucuaccauggcuggggacagcagccgaacuu

SEQ ID NO: 42844 - RNA, 32 nt, Homo Sapiens
aauagcaauaaauguaaagauguguuuuguaa

SEQ ID NO: 42845 - RNA, 32 nt, Homo Sapiens
gucaccagaaauuuuuaaagcucucaagguga

SEQ ID NO: 42846 - RNA, 31 nt, Homo Sapiens
uaaaauggaagcguaccaggaguccuuccag

SEQ ID NO: 42847 - RNA, 32 nt, Homo Sapiens
agcccccgcgcgccaucuucccguggagugug

SEQ ID NO: 42848 - RNA, 32 nt, Homo Sapiens
uacuuuucucugaaaggaaucuugucuuguua

SEQ ID NO: 42849 - RNA, 32 nt, Homo Sapiens
gccugcagcugagagcaggagcaggaaaagga

SEQ ID NO: 42850 - RNA, 32 nt, Homo Sapiens
gcucggcacggcacggggaugcaggccccuga

SEQ ID NO: 42851 - RNA, 32 nt, Homo Sapiens
cucagguucugccugccuuacugggggcuccu

SEQ ID NO: 42852 - RNA, 32 nt, Homo Sapiens
uugaccuugugguucuaaaauuccuugucuga

SEQ ID NO: 42853 - RNA, 32 nt, Homo Sapiens
gguccgucucgucgcguccggguugucacucu

SEQ ID NO: 42854 - RNA, 32 nt, Homo Sapiens
agauaugcucaugugguguugaggaaagcaga

SEQ ID NO: 42855 - RNA, 32 nt, Homo Sapiens
accuccgccucccggguucaagugauuccccu

SEQ ID NO: 42856 - RNA, 32 nt, Homo Sapiens
uggccccagccagcacgucgcgaugggccgga

SEQ ID NO: 42857 - RNA, 32 nt, Homo Sapiens
cagccccguuugcggugccuccuggucgguaa

SEQ ID NO: 42858 - RNA, 32 nt, Homo Sapiens
ucaacuuuucuuccuuauggggcuacauuugu

SEQ ID NO: 42859 - RNA, 32 nt, Homo Sapiens
agcgugcucagcagccagguguguguacauac

SEQ ID NO: 42860 - RNA, 32 nt, Homo Sapiens
ucuaguggcuacuguuuuaguuuucuaguuga

SEQ ID NO: 42861 - RNA, 32 nt, Homo Sapiens
gcagcuauauuugaaauauuaaguaugaaagg

SEQ ID NO: 42862 - RNA, 32 nt, Homo Sapiens
ucauaucugugcuacccuuuccaaacagccua

SEQ ID NO: 42863 - RNA, 32 nt, Homo Sapiens
cugcacccgcuucugccuuguuuggccucacu

SEQ ID NO: 42864 - RNA, 32 nt, Homo Sapiens
acucguugccuuugcaucuccacacauggcgu

SEQ ID NO: 42865 - RNA, 32 nt, Homo Sapiens
uauugucccuuugagcagaaauuuaucuuuca

SEQ ID NO: 42866 - RNA, 32 nt, Homo Sapiens
ucagcaugggagcuguggaaaccuuuugcccu

SEQ ID NO: 42867 - RNA, 32 nt, Homo Sapiens
ucuccuuuucuuuccuucccucuccagagaug

SEQ ID NO: 42868 - RNA, 30 nt, Homo Sapiens
ggacauuguauauaaauggaaucauacaac

SEQ ID NO: 42869 - RNA, 32 nt, Homo Sapiens
agagacacaagagcuugcucucugccauguga

SEQ ID NO: 42870 - RNA, 32 nt, Homo Sapiens
ccuuacaguaguuuccugggaaucuaagucug

SEQ ID NO: 42871 - RNA, 32 nt, Homo Sapiens
gcccccgccuuccucgcagccauccagcacuc

SEQ ID NO: 42872 - RNA, 32 nt, Homo Sapiens
caggaaaaggauuaugaguaaguucugguaaa

SEQ ID NO: 42873 - RNA, 32 nt, Homo Sapiens
ugggaguaaaauacugaauauaugaguuuuuc

SEQ ID NO: 42874 - RNA, 32 nt, Homo Sapiens
gauaaaacaacugguagaauuauuuaaacacu

SEQ ID NO: 42875 - RNA, 32 nt, Homo Sapiens
gcugcuguagccuauuuuuuuagauugagaaa

SEQ ID NO: 42876 - RNA, 32 nt, Homo Sapiens
aaaauaggcuuagagaggaaaagcugccucug

SEQ ID NO: 42877 - RNA, 31 nt, Homo Sapiens
auaauacaagagguauaccuaguccagcacu

SEQ ID NO: 42878 - RNA, 32 nt, Homo Sapiens
cccuggguugguuuccuuuuuacaacugccca

SEQ ID NO: 42879 - RNA, 32 nt, Homo Sapiens
uccacgcagacaccucguacugcuacaggugu

SEQ ID NO: 42880 - RNA, 32 nt, Homo Sapiens
cccaaaggaggcagcgggagggaggugaaaga

SEQ ID NO: 42881 - RNA, 32 nt, Homo Sapiens
aaaucuaaauuuaauuauucagguuuuacaaa

SEQ ID NO: 42882 - RNA, 32 nt, Homo Sapiens
cuacuggaaaauuaaaucuuauuaccaaaaaa

SEQ ID NO: 42883 - RNA, 32 nt, Homo Sapiens
ucauacagcucuucuucccgggacgccccugc

SEQ ID NO: 42884 - RNA, 32 nt, Homo Sapiens
gcaguuacaaccuugugcaguguaaucaugga

SEQ ID NO: 42885 - RNA, 32 nt, Homo Sapiens
uggggcagggccggugauggugccucccccuu

SEQ ID NO: 42886 - RNA, 32 nt, Homo Sapiens
aaauuuuauuggcauugcuccauuuucuguau

SEQ ID NO: 42887 - RNA, 32 nt, Homo Sapiens
acaagccuggggagguguguuggacccccagg

SEQ ID NO: 42888 - RNA, 31 nt, Homo Sapiens
accagccaggaaccucucagagcugaagcag

SEQ ID NO: 42889 - RNA, 32 nt, Homo Sapiens
cgcucccucacagaacucccccgcaccuuguc

SEQ ID NO: 42890 - RNA, 32 nt, Homo Sapiens
aggauguucaacaucaguuuacuugcagcugg

SEQ ID NO: 42891 - RNA, 32 nt, Homo Sapiens
gaaaucacggggcuucuuucugcuggcucagc

SEQ ID NO: 42892 - RNA, 32 nt, Homo Sapiens
cugugagagacacguggaccccgugccucgaa

SEQ ID NO: 42893 - RNA, 32 nt, Homo Sapiens
uggaggcgccccguccggucagcccucgcgcc

SEQ ID NO: 42894 - RNA, 32 nt, Homo Sapiens
gcggcaaguugaagaagcuguguuggacgaga

SEQ ID NO: 42895 - RNA, 32 nt, Homo Sapiens
ccuccccgcucccucaagcucuggauggcugc

SEQ ID NO: 42896 - RNA, 32 nt, Homo Sapiens
gcguuggcagugccagccuccccagccugugc

SEQ ID NO: 42897 - RNA, 32 nt, Homo Sapiens
uaugugaggauacuuucaguaccacuccuacc

SEQ ID NO: 42898 - RNA, 32 nt, Homo Sapiens
uuccgugucgccccgcagugcugcggccgccg

SEQ ID NO: 42899 - RNA, 32 nt, Homo Sapiens
agcagagacgugggugaugcgcugccucguca

SEQ ID NO: 42900 - RNA, 32 nt, Homo Sapiens
acugcacucgccucacuagggagcugccugug

SEQ ID NO: 42901 - RNA, 32 nt, Homo Sapiens
ucaucucauagccaguccuuaagcaaauuucc

SEQ ID NO: 42902 - RNA, 32 nt, Homo Sapiens
caggccugucucccagcguuugucuaauaaac

SEQ ID NO: 42903 - RNA, 32 nt, Homo Sapiens
uuauacucuaauucuuuuuuuuuuuuuuuuug

SEQ ID NO: 42904 - RNA, 32 nt, Homo Sapiens
gacuguucauuucucucugacauguuuguuga

SEQ ID NO: 42905 - RNA, 32 nt, Homo Sapiens
uuugaauucaggcuugcccaacucacauucua

SEQ ID NO: 42906 - RNA, 32 nt, Homo Sapiens
agccuguaugagaauguagaaacuauauauua

SEQ ID NO: 42907 - RNA, 32 nt, Homo Sapiens
acacaaccaaccccaacuguagaaacuugggc

SEQ ID NO: 42908 - RNA, 32 nt, Homo Sapiens
gagacugaaagaauguuaagauuuaucugcaa

SEQ ID NO: 42909 - RNA, 32 nt, Homo Sapiens
gcuauaaaaaggaauaaaguaucgaugcaugc

SEQ ID NO: 42910 - RNA, 32 nt, Homo Sapiens
agaagaugauccacaacuugagaagacauuua

SEQ ID NO: 42911 - RNA, 32 nt, Homo Sapiens
uagcaggagacauuuaaaaauauauuuaggag

SEQ ID NO: 42912 - RNA, 32 nt, Homo Sapiens
gguccccggcgagcacgcggccaggcagagaa

SEQ ID NO: 42913 - RNA, 32 nt, Homo Sapiens
gccaaaaucacggaacagaauuucauagccca

SEQ ID NO: 42914 - RNA, 32 nt, Homo Sapiens
ucucccauccugcucaggucuuuucagcaguc

SEQ ID NO: 42915 - RNA, 32 nt, Homo Sapiens
agggaaagugauuuaaacuuuauuuaaagagg

SEQ ID NO: 42916 - RNA, 32 nt, Homo Sapiens
agagaagaaaaaacagaagaacuuuaugauga

SEQ ID NO: 42917 - RNA, 32 nt, Homo Sapiens
ucaacuagaaacaaacucaguggucaaaauaa

SEQ ID NO: 42918 - RNA, 32 nt, Homo Sapiens
gaagagucgcggucgccaguccagucgggaga

SEQ ID NO: 42919 - RNA, 29 nt, Homo Sapiens
ccauguaggguucuucugccgaaacgagg

SEQ ID NO: 42920 - RNA, 32 nt, Homo Sapiens
cuucgccgccgugcccuuccccggcgcgcuca

SEQ ID NO: 42921 - RNA, 32 nt, Homo Sapiens
uggcacuuuuccuugcagaaagcacucagacc

SEQ ID NO: 42922 - RNA, 32 nt, Homo Sapiens
guauuggaaauuauaaauggcaaccaaaaacc

SEQ ID NO: 42923 - RNA, 32 nt, Homo Sapiens
aguaccaggccuccugccccagccuacuccac

SEQ ID NO: 42924 - RNA, 31 nt, Homo Sapiens
ugguggcccugcggccaaccaacauggaccg

SEQ ID NO: 42925 - RNA, 32 nt, Homo Sapiens
acugcccgcccagacgcccgcccgccaacccg

SEQ ID NO: 42926 - RNA, 32 nt, Homo Sapiens
ugcuggcacugaucuggagaucugcagaucug

SEQ ID NO: 42927 - RNA, 32 nt, Homo Sapiens
caauaaggauguuuaagugcuggucaguuguc

SEQ ID NO: 42928 - RNA, 30 nt, Homo Sapiens
uaaauagauaaaagaauguguauuuuuuca

SEQ ID NO: 42929 - RNA, 32 nt, Homo Sapiens
acacccuggaucucacucuccucuuaguaaca

SEQ ID NO: 42930 - RNA, 32 nt, Homo Sapiens
cacaagcugcacccucaggcaggugggaugga

SEQ ID NO: 42931 - RNA, 30 nt, Homo Sapiens
agcugucauaaauuaaauuuauucucugga

SEQ ID NO: 42932 - RNA, 32 nt, Homo Sapiens
aggaggucaggagaucgagaccauccuggcua

SEQ ID NO: 42933 - RNA, 32 nt, Homo Sapiens
uuggacccuuggaaaacaaaaguuuuaauuaa

SEQ ID NO: 42934 - RNA, 31 nt, Homo Sapiens
auaugucauugcguaacaccaaauaaccccc

SEQ ID NO: 42935 - RNA, 32 nt, Homo Sapiens
aaguguuuguuaauaaaagaaaaaauguaucu

SEQ ID NO: 42936 - RNA, 32 nt, Homo Sapiens
uaagggcgcgagggaaguggcgggcggggacu

SEQ ID NO: 42937 - RNA, 32 nt, Homo Sapiens
cggcguggagauggcgggagcuggucgcggag

SEQ ID NO: 42938 - RNA, 32 nt, Homo Sapiens
cucuuaggaauauuuucuuuggcuuugucaaa

SEQ ID NO: 42939 - RNA, 32 nt, Homo Sapiens
uuuuuuggaugugaguugaugacaaauguuaa

SEQ ID NO: 42940 - RNA, 32 nt, Homo Sapiens
ucagcaagauaaaagugaguguguuuugucgg

SEQ ID NO: 42941 - RNA, 32 nt, Homo Sapiens
ggaccugaaccgagacaaggagguaccacacu

SEQ ID NO: 42942 - RNA, 32 nt, Homo Sapiens
gcuagguuaaaggccagaggcuauggaacuua

SEQ ID NO: 42943 - RNA, 32 nt, Homo Sapiens
ggcccuggcccagccagcccagcccucgaggc

SEQ ID NO: 42944 - RNA, 32 nt, Homo Sapiens
aagcuccucaggaaacaggauugcugaugucu

SEQ ID NO: 42945 - RNA, 32 nt, Homo Sapiens
uuguuucgcgguucuucccguauucugccucc

SEQ ID NO: 42946 - RNA, 32 nt, Homo Sapiens
uuguaaacugaggaccacaauaaagaaaucuu

SEQ ID NO: 42947 - RNA, 32 nt, Homo Sapiens
aacuagccgggcgugguggcgggcgccuguag

SEQ ID NO: 42948 - RNA, 32 nt, Homo Sapiens
gugaagaagaugguagaaaacagucuggaugc

SEQ ID NO: 42949 - RNA, 32 nt, Homo Sapiens
cccuucauugauuuccugugucaauccagaug

SEQ ID NO: 42950 - RNA, 32 nt, Homo Sapiens
agcuaaggccugaaggaugaugagguaucagg

SEQ ID NO: 42951 - RNA, 32 nt, Homo Sapiens
gaggugucugacucuccugugcucucucagcg

SEQ ID NO: 42952 - RNA, 32 nt, Homo Sapiens
auauaaauuccuuuuucuuauuuucaaauuug

SEQ ID NO: 42953 - RNA, 32 nt, Homo Sapiens
gacagggcgcgguggcucacgccuguaauccc

SEQ ID NO: 42954 - RNA, 32 nt, Homo Sapiens
cuuacucugugcuuguguaugugaauguuaau

SEQ ID NO: 42955 - RNA, 32 nt, Homo Sapiens
accaaccaaggccagcaccuccgucggaagca

SEQ ID NO: 42956 - RNA, 32 nt, Homo Sapiens
uuuguuaacuaaauuuuuuucuuaaaauaaag

SEQ ID NO: 42957 - RNA, 32 nt, Homo Sapiens
cuauguucacgaucagacacgcacugcauucg

SEQ ID NO: 42958 - RNA, 32 nt, Homo Sapiens
acucugggagaggcugguguuggugaucucuc

SEQ ID NO: 42959 - RNA, 32 nt, Homo Sapiens
uaggggcucacagaucccaguagcacaauugg

SEQ ID NO: 42960 - RNA, 32 nt, Homo Sapiens
ugcuaaucauuguuuuuuccuuuguaaauguu

SEQ ID NO: 42961 - RNA, 32 nt, Homo Sapiens
caugcaggccccaggccccucagaaacgcccu

SEQ ID NO: 42962 - RNA, 32 nt, Homo Sapiens
uugccggcgucaccgccgcggacuucgcuuug

SEQ ID NO: 42963 - RNA, 32 nt, Homo Sapiens
ccagaggagguagacagcgccucugcugcccc

SEQ ID NO: 42964 - RNA, 27 nt, Homo Sapiens
caccuacauuaauuauuuuauauugug

SEQ ID NO: 42965 - RNA, 32 nt, Homo Sapiens
accuuuaugucuagcuaagggauuguaaauaa

SEQ ID NO: 42966 - RNA, 32 nt, Homo Sapiens
uuccgccaggacuagaguuuccucgcgguaac

SEQ ID NO: 42967 - RNA, 32 nt, Homo Sapiens
agggugaggaaaucagcugaaugguuggccug

SEQ ID NO: 42968 - RNA, 32 nt, Homo Sapiens
ggcccaaacauguccaguccucuucuucccuc

SEQ ID NO: 42969 - RNA, 32 nt, Homo Sapiens
gauauuguuuguucacucauuuagucauuaaa

SEQ ID NO: 42970 - RNA, 32 nt, Homo Sapiens
gagccccggccgccgcgaccaccagccgcgcu

SEQ ID NO: 42971 - RNA, 32 nt, Homo Sapiens
cucuaugucaagcacuguuacaaaagacugug

SEQ ID NO: 42972 - RNA, 32 nt, Homo Sapiens
uggucuuuuccacagcauagucugggacugga

SEQ ID NO: 42973 - RNA, 32 nt, Homo Sapiens
caaaaauguacaaaauaaaguuacauugcugg

SEQ ID NO: 42974 - RNA, 32 nt, Homo Sapiens
cccagaggggacauuuccauggagaagaacgg

SEQ ID NO: 42975 - RNA, 32 nt, Homo Sapiens
cuggcuuugucuccgagggggagucauguucc

SEQ ID NO: 42976 - RNA, 32 nt, Homo Sapiens
cucaggaaucauauugauguucugauuuuaaa

SEQ ID NO: 42977 - RNA, 32 nt, Homo Sapiens
uacugaggaugauguuauucacagccccuggc

SEQ ID NO: 42978 - RNA, 32 nt, Homo Sapiens
accuccacgucccggcugggccccagacccca

SEQ ID NO: 42979 - RNA, 32 nt, Homo Sapiens
uaauaauaaaacucagcauaguagcaaaaaga

SEQ ID NO: 42980 - RNA, 32 nt, Homo Sapiens
acucacuucauaaaaguacaaacaauuaaaag

SEQ ID NO: 42981 - RNA, 32 nt, Homo Sapiens
ucaaguccacacugagcuucuuucuccucccu

SEQ ID NO: 42982 - RNA, 32 nt, Homo Sapiens
cuguucuauaacaugaacauaagugcuuagcu

SEQ ID NO: 42983 - RNA, 32 nt, Homo Sapiens
ggagacgcucugcggguccuggacaccggguc

SEQ ID NO: 42984 - RNA, 32 nt, Homo Sapiens
acuuuggcauggacuguauuuauuuucaaaug

SEQ ID NO: 42985 - RNA, 32 nt, Homo Sapiens
auuuuacuuuuguucuguauuuucauguggaa

SEQ ID NO: 42986 - RNA, 32 nt, Homo Sapiens
uuugcucauuggcugcuguguucauccaaggg

SEQ ID NO: 42987 - RNA, 32 nt, Homo Sapiens
uugguucaaagucuuugcuauugugaauaaug

SEQ ID NO: 42988 - RNA, 32 nt, Homo Sapiens
aaugguuuucuuuuccauuuucauuaccaccu

SEQ ID NO: 42989 - RNA, 32 nt, Homo Sapiens
gucgauaucucacuuuuuauuuugccauggau

SEQ ID NO: 42990 - RNA, 32 nt, Homo Sapiens
cugacagaggaugucauguuguaugcggugug

SEQ ID NO: 42991 - RNA, 32 nt, Homo Sapiens
ggacaggccgucccccaccccauccuguagag

SEQ ID NO: 42992 - RNA, 32 nt, Homo Sapiens
uuuacuguaccuuuucuaugucuaaauauaca

SEQ ID NO: 42993 - RNA, 32 nt, Homo Sapiens
cacccacccacccaguuuaauugugcuuagag

SEQ ID NO: 42994 - RNA, 32 nt, Homo Sapiens
acguaguuuuguuuuuguuuucagccuaugga

SEQ ID NO: 42995 - RNA, 32 nt, Homo Sapiens
uuugacccuccccagccgcgggccauccggcu

SEQ ID NO: 42996 - RNA, 32 nt, Homo Sapiens
uaauaagcugaauuucuauggaguugcuacuu

SEQ ID NO: 42997 - RNA, 32 nt, Homo Sapiens
gauuccuaguaggagcuacuuuucuuaacaga

SEQ ID NO: 42998 - RNA, 32 nt, Homo Sapiens
uauugucugugcuaguaagaaaaagaaaggaa

SEQ ID NO: 42999 - RNA, 32 nt, Homo Sapiens
gacuaagcugucuguagaagagucugaggcag

SEQ ID NO: 43000 - RNA, 32 nt, Homo Sapiens
ugcaggaccugccuguagcccacucugcucgc

SEQ ID NO: 43001 - RNA, 32 nt, Homo Sapiens
cugggcacagaaaggagccgccugggcaggga

SEQ ID NO: 43002 - RNA, 32 nt, Homo Sapiens
cccaaaucacaaguacaguccuuuccaacacc

SEQ ID NO: 43003 - RNA, 30 nt, Homo Sapiens
caaucccuuccugggucccaucuuaccugg

SEQ ID NO: 43004 - RNA, 32 nt, Homo Sapiens
aacauuuuggggcuuuuuuaaucuuuucaauc

SEQ ID NO: 43005 - RNA, 32 nt, Homo Sapiens
gggaacccaagcaguagagagcgauauuggag

SEQ ID NO: 43006 - RNA, 28 nt, Homo Sapiens
caaaagaugccugagcauuugaaaaccu

SEQ ID NO: 43007 - RNA, 32 nt, Homo Sapiens
gauguauuaugaugaacucaugauuuaauucu

SEQ ID NO: 43008 - RNA, 32 nt, Homo Sapiens
caugggacaggaagggcagagaagggccuggg

SEQ ID NO: 43009 - RNA, 32 nt, Homo Sapiens
uuucccagcaccgcggagcugcacugcacacc

SEQ ID NO: 43010 - RNA, 32 nt, Homo Sapiens
uaggaaggucuuugggucauuuuaacuucucg

SEQ ID NO: 43011 - RNA, 32 nt, Homo Sapiens
uccgggggccccaaacgcaugcuuccugugau

SEQ ID NO: 43012 - RNA, 32 nt, Homo Sapiens
cuggagggaaggggaaggagggggucuucagg

SEQ ID NO: 43013 - RNA, 32 nt, Homo Sapiens
aggaggaagaagaagaugaugacuagcaguac

SEQ ID NO: 43014 - RNA, 32 nt, Homo Sapiens
caccgugacucggcugccugugcagaaggugg

SEQ ID NO: 43015 - RNA, 32 nt, Homo Sapiens
aagaauuucuaaaaaugagugcagauuacuga

SEQ ID NO: 43016 - RNA, 32 nt, Homo Sapiens
gcugaauaggaacagcucuggucugcagcucc

SEQ ID NO: 43017 - RNA, 32 nt, Homo Sapiens
ggacuguuuuuuuuuucuuuuucuuuuuuuua

SEQ ID NO: 43018 - RNA, 32 nt, Homo Sapiens
auuguuccaacauuuuaaaguguuccaacauu

SEQ ID NO: 43019 - RNA, 32 nt, Homo Sapiens
ggaaggcaagauucuuucccccucccugcuga

SEQ ID NO: 43020 - RNA, 32 nt, Homo Sapiens
ucguggguacguucgugccgcgucugucccag

SEQ ID NO: 43021 - RNA, 31 nt, Homo Sapiens
uuccugugucaaagccugcccucgggcucug

SEQ ID NO: 43022 - RNA, 32 nt, Homo Sapiens
aauaacaucuaccuggaccucuggcagaauuu

SEQ ID NO: 43023 - RNA, 32 nt, Homo Sapiens
acuucgucucaaaacaaacaaacaaacaaaca

SEQ ID NO: 43024 - RNA, 32 nt, Homo Sapiens
cccuacauuccucuccucuucacuagccucuc

SEQ ID NO: 43025 - RNA, 32 nt, Homo Sapiens
gauagcugcuagcgugcgacugaaggcagggu

SEQ ID NO: 43026 - RNA, 32 nt, Homo Sapiens
uaagaggcuaacuuaaguagaagugcuagaaa

SEQ ID NO: 43027 - RNA, 32 nt, Homo Sapiens
gagcacagcagcccaaauuugcuuguaauguc

SEQ ID NO: 43028 - RNA, 32 nt, Homo Sapiens
ccuuucuggaaggcgccggccggccagucacc

SEQ ID NO: 43029 - RNA, 30 nt, Homo Sapiens
cugccggguucccuugccagacaugauguc

SEQ ID NO: 43030 - RNA, 32 nt, Homo Sapiens
gugaacccugaggcuuccugagugaaccccga

SEQ ID NO: 43031 - RNA, 32 nt, Homo Sapiens
ccacccgagcccggcgccucagcugcccccgg

SEQ ID NO: 43032 - RNA, 32 nt, Homo Sapiens
gcaggcaaggccaggcgggugcugccugggac

SEQ ID NO: 43033 - RNA, 32 nt, Homo Sapiens
caacauugccagcaaauacugccuuggcauca

SEQ ID NO: 43034 - RNA, 28 nt, Homo Sapiens
auccggaggcggccggaagugucgccgg

SEQ ID NO: 43035 - RNA, 32 nt, Homo Sapiens
caccgcgcgcccccgcgcccucaccgacgggu

SEQ ID NO: 43036 - RNA, 32 nt, Homo Sapiens
agauccuucucucuggaggaagagggaagccc

SEQ ID NO: 43037 - RNA, 32 nt, Homo Sapiens
ccagccccucaacacugccauccaccuggcuc

SEQ ID NO: 43038 - RNA, 27 nt, Homo Sapiens
aaaugguccuucuguugauccugucag

SEQ ID NO: 43039 - RNA, 32 nt, Homo Sapiens
gaaggcgacguaguuucccuggagcggggcag

SEQ ID NO: 43040 - RNA, 32 nt, Homo Sapiens
ggcgccggcgucuuccaguucuccuccaagca

SEQ ID NO: 43041 - RNA, 32 nt, Homo Sapiens
uggcgggacggguggcgccgggguuccagccc

SEQ ID NO: 43042 - RNA, 32 nt, Homo Sapiens
uugcugcacucuguagcaaauuuguuuaaucu

SEQ ID NO: 43043 - RNA, 32 nt, Homo Sapiens
ccuggaguagugaaguguaggcugggagcucu

SEQ ID NO: 43044 - RNA, 32 nt, Homo Sapiens
ccuucccuggggaugaggguuggauguccaag

SEQ ID NO: 43045 - RNA, 32 nt, Homo Sapiens
uuacaugaugaaacuuuuuguuguugcuuguu

SEQ ID NO: 43046 - RNA, 32 nt, Homo Sapiens
ccgagauagguacuguuaccauccucucugca

SEQ ID NO: 43047 - RNA, 32 nt, Homo Sapiens
aagucaagcucuccaagaaguggcagccuggc

SEQ ID NO: 43048 - RNA, 32 nt, Homo Sapiens
acagagccuggcgggcggagcuagggccucca

SEQ ID NO: 43049 - RNA, 32 nt, Homo Sapiens
uuucuuuuuucuuuuucuuuuuuuuuuuuuuu

SEQ ID NO: 43050 - RNA, 32 nt, Homo Sapiens
acaucuuuugcacuuuccuauugaagacuuga

SEQ ID NO: 43051 - RNA, 32 nt, Homo Sapiens
ugguucagagccugggucucagcgcgggaccc

SEQ ID NO: 43052 - RNA, 32 nt, Homo Sapiens
agccggcggccgcggcagccauggcgcucgcu

SEQ ID NO: 43053 - RNA, 32 nt, Homo Sapiens
aagcuggcgggcugaggcgccccgcucuucuc

SEQ ID NO: 43054 - RNA, 32 nt, Homo Sapiens
ucacggcagggccagagggugguguggucucu

SEQ ID NO: 43055 - RNA, 32 nt, Homo Sapiens
uagugcccuuggaagaaaauuaggccucaaau

SEQ ID NO: 43056 - RNA, 32 nt, Homo Sapiens
aaggaauguaggucguuucuguguucuuuccc

SEQ ID NO: 43057 - RNA, 32 nt, Homo Sapiens
ggaggaugccagcagccugccuauggcuccag

SEQ ID NO: 43058 - RNA, 31 nt, Homo Sapiens
gagcguguggggcauaaagugcugugaacuu

SEQ ID NO: 43059 - RNA, 32 nt, Homo Sapiens
cuacgcggagcgggagagcggccacaccaugc

SEQ ID NO: 43060 - RNA, 32 nt, Homo Sapiens
gacuuggccaugauugguuagucucacucuau

SEQ ID NO: 43061 - RNA, 32 nt, Homo Sapiens
uucccacccugccuggcuuucucucuugguga

SEQ ID NO: 43062 - RNA, 32 nt, Homo Sapiens
ugaacauuagagaaaaucaugcucugguauga

SEQ ID NO: 43063 - RNA, 32 nt, Homo Sapiens
auacagaagcauuuguucaaaggauagaaagc

SEQ ID NO: 43064 - RNA, 32 nt, Homo Sapiens
auaguugugacuuuaaacuuuuguagaccaca

SEQ ID NO: 43065 - RNA, 32 nt, Homo Sapiens
uccucccgcgccccggaggccugccagccccg

SEQ ID NO: 43066 - RNA, 32 nt, Homo Sapiens
uggaaugcuggguaugcucugugacaaggcua

SEQ ID NO: 43067 - RNA, 32 nt, Homo Sapiens
aaaaauacacacaugcacaaagaugggagcag

SEQ ID NO: 43068 - RNA, 32 nt, Homo Sapiens
agaguucuuuuuguuguuguuuauugaaaaaa

SEQ ID NO: 43069 - RNA, 32 nt, Homo Sapiens
agaugcuugccccgcuaguggcagaugugaac

SEQ ID NO: 43070 - RNA, 32 nt, Homo Sapiens
caccgccaccuucccugccccagccccagcag

SEQ ID NO: 43071 - RNA, 32 nt, Homo Sapiens
cgggucccaggcccggcccggagcgagucccc

SEQ ID NO: 43072 - RNA, 32 nt, Homo Sapiens
aaauguuucuguuugaagaaaauagagggaga

SEQ ID NO: 43073 - RNA, 32 nt, Homo Sapiens
cauuuacaguguuucuuggagauauaauuuua

SEQ ID NO: 43074 - RNA, 32 nt, Homo Sapiens
ucggcucugcccgcuguucuggggucgacugc

SEQ ID NO: 43075 - RNA, 31 nt, Homo Sapiens
gggugggaaagcagccugccccaugcuucca

SEQ ID NO: 43076 - RNA, 32 nt, Homo Sapiens
cuagaguuccucaugagcuuguccucaagcga

SEQ ID NO: 43077 - RNA, 32 nt, Homo Sapiens
ugaaaauaaaaagcaacuuaugaaaguagaca

SEQ ID NO: 43078 - RNA, 32 nt, Homo Sapiens
gcagccucucaccugugagcuguggggaucac

SEQ ID NO: 43079 - RNA, 32 nt, Homo Sapiens
gguccugcagccccggccccuccuccgugacc

SEQ ID NO: 43080 - RNA, 32 nt, Homo Sapiens
ucuuuaauauaaaguuagagaugucuucauag

SEQ ID NO: 43081 - RNA, 32 nt, Homo Sapiens
gaugagaaagcaaaaaguacuuuguaaagugu

SEQ ID NO: 43082 - RNA, 32 nt, Homo Sapiens
ccccuacccgaguugugaaaauaaaaaauguu

SEQ ID NO: 43083 - RNA, 32 nt, Homo Sapiens
guacugccccucagcagggaugacucagcagg

SEQ ID NO: 43084 - RNA, 32 nt, Homo Sapiens
gcccgggugugccugcccuggagggaggcucu

SEQ ID NO: 43085 - RNA, 32 nt, Homo Sapiens
aaggguuuuguucuuggcuuuggacaccugag

SEQ ID NO: 43086 - RNA, 32 nt, Homo Sapiens
ugggaauguaaauuaauucagccauuguggaa

SEQ ID NO: 43087 - RNA, 32 nt, Homo Sapiens
cggccccugggcggcccgugccaugggcaccg

SEQ ID NO: 43088 - RNA, 32 nt, Homo Sapiens
auagagaaaguaccuuuaaggauagcauucca

SEQ ID NO: 43089 - RNA, 32 nt, Homo Sapiens
gcgcugccuccgagcgcacgcauccugagauc

SEQ ID NO: 43090 - RNA, 32 nt, Homo Sapiens
uaggaagccuacugucaugagaguggggagac

SEQ ID NO: 43091 - RNA, 32 nt, Homo Sapiens
cuggccacacugacucagucacagcaaccccc

SEQ ID NO: 43092 - RNA, 32 nt, Homo Sapiens
agcccaggggagaaacaaagggaaugaucuau

SEQ ID NO: 43093 - RNA, 32 nt, Homo Sapiens
aaagaugagcccaaguccaccugucuucaucc

SEQ ID NO: 43094 - RNA, 32 nt, Homo Sapiens
auguguuaugaaauucacuuaaugauaaauuu

SEQ ID NO: 43095 - RNA, 32 nt, Homo Sapiens
auuggaauaaaugugaugcauuacuucuuaug

SEQ ID NO: 43096 - RNA, 32 nt, Homo Sapiens
uggcgcgcaccuguagucccaguuacucggga

SEQ ID NO: 43097 - RNA, 32 nt, Homo Sapiens
uauagauaaaaauuagucaaaaaacacuguaa

SEQ ID NO: 43098 - RNA, 32 nt, Homo Sapiens
cucgacaggcguuuugcugaaaacgugucgga

SEQ ID NO: 43099 - RNA, 30 nt, Homo Sapiens
cuacuagaauaaacaauguggcacacauuu

SEQ ID NO: 43100 - RNA, 32 nt, Homo Sapiens
uauguguuuuuagauuaauucaaguugugugc

SEQ ID NO: 43101 - RNA, 32 nt, Homo Sapiens
ggcuuucccagcuuccuccccuugcuacagcc

SEQ ID NO: 43102 - RNA, 32 nt, Homo Sapiens
auauaaaagcuaccaaucuuuguacaauuugu

SEQ ID NO: 43103 - RNA, 32 nt, Homo Sapiens
ccgagcccccacucccaccccagccgcacagu

SEQ ID NO: 43104 - RNA, 32 nt, Homo Sapiens
auauaaagcaaauaaacuuaaaacacuuugua

SEQ ID NO: 43105 - RNA, 32 nt, Homo Sapiens
uauucucacuggcgugagauguuaucucauug

SEQ ID NO: 43106 - RNA, 32 nt, Homo Sapiens
gucccucucucuuagacucucccuuuguccuc

SEQ ID NO: 43107 - RNA, 32 nt, Homo Sapiens
cugaggcagacacuccagccccuuucugggau

SEQ ID NO: 43108 - RNA, 32 nt, Homo Sapiens
acuggcugccaugucccaauccuuccagcucu

SEQ ID NO: 43109 - RNA, 32 nt, Homo Sapiens
aaagcuaaauuccacacuaccacauuaaaaaa

SEQ ID NO: 43110 - RNA, 32 nt, Homo Sapiens
aucaguuuguuuauauacuauuuuauauacua

SEQ ID NO: 43111 - RNA, 32 nt, Homo Sapiens
cagugaugucauucuuuauuuauuuuugagac

SEQ ID NO: 43112 - RNA, 32 nt, Homo Sapiens
agcacaauagagccacugaaaaaguuagaaaa

SEQ ID NO: 43113 - RNA, 32 nt, Homo Sapiens
ugucucuaucaucaacuucacuacucauauuu

SEQ ID NO: 43114 - RNA, 32 nt, Homo Sapiens
gaguuuuuauguuuuuguuuucagguagauua

SEQ ID NO: 43115 - RNA, 32 nt, Homo Sapiens
ugcugagcggguggggugguggaggagcugca

SEQ ID NO: 43116 - RNA, 32 nt, Homo Sapiens
guagcaggccccaggcccuguuccagcaccug

SEQ ID NO: 43117 - RNA, 32 nt, Homo Sapiens
ugccucacuuaacuuaaaucugcggcagacaa

SEQ ID NO: 43118 - RNA, 32 nt, Homo Sapiens
agagagccuggugcugcugcugcuguggcgug

SEQ ID NO: 43119 - RNA, 32 nt, Homo Sapiens
aacgacaucgagaaugcgggacccucacacca

SEQ ID NO: 43120 - RNA, 32 nt, Homo Sapiens
gcgagcccggcggcgugcggcccucucuccgc

SEQ ID NO: 43121 - RNA, 32 nt, Homo Sapiens
gguugguuuuucuauuuggaaaagacuuuaua

SEQ ID NO: 43122 - RNA, 32 nt, Homo Sapiens
gcuuugcucucugguccaugaacucauuucca

SEQ ID NO: 43123 - RNA, 32 nt, Homo Sapiens
cauaugggcacaacucugguguccuucuaugg

SEQ ID NO: 43124 - RNA, 32 nt, Homo Sapiens
uuccugucuucuguuuuccccaggcagggugc

SEQ ID NO: 43125 - RNA, 32 nt, Homo Sapiens
ccgagggggaagagugugugucugcgggagaa

SEQ ID NO: 43126 - RNA, 32 nt, Homo Sapiens
cuucucccggugccccgcgucuguccauccuc

SEQ ID NO: 43127 - RNA, 32 nt, Homo Sapiens
ugggagucugcgcuaggcccgcuuggaguucu

SEQ ID NO: 43128 - RNA, 32 nt, Homo Sapiens
aaccaaaggcaucuuucaguuuguaucaaaaa

SEQ ID NO: 43129 - RNA, 32 nt, Homo Sapiens
ucaugaauuacuuucucuucucucuucucaau

SEQ ID NO: 43130 - RNA, 32 nt, Homo Sapiens
uagccuuucuucgaauaagugauacagcaaaa

SEQ ID NO: 43131 - RNA, 32 nt, Homo Sapiens
ucuccaggccuccaggccuccugguauauaaa

SEQ ID NO: 43132 - RNA, 32 nt, Homo Sapiens
ggcguccuaaccccagauaccugugaauguga

SEQ ID NO: 43133 - RNA, 32 nt, Homo Sapiens
caggugagucccuucccuccccaggccucgcu

SEQ ID NO: 43134 - RNA, 32 nt, Homo Sapiens
ugguuggugagaaucuaauaacauuaaaaugc

SEQ ID NO: 43135 - RNA, 32 nt, Homo Sapiens
gauaccugccagcacuucugcaagcugaaauu

SEQ ID NO: 43136 - RNA, 32 nt, Homo Sapiens
aauguucauuccaaguggcaagucuuauugga

SEQ ID NO: 43137 - RNA, 32 nt, Homo Sapiens
cgccgggcggguggacgugaggaccagcccuc

SEQ ID NO: 43138 - RNA, 31 nt, Homo Sapiens
cuugucacuuggagaaaggccagucccugug

SEQ ID NO: 43139 - RNA, 27 nt, Homo Sapiens
acagggccuggccucagcccccacucc

SEQ ID NO: 43140 - RNA, 32 nt, Homo Sapiens
ggcgcuggcccucgugcuggaaugguugucug

SEQ ID NO: 43141 - RNA, 32 nt, Homo Sapiens
agacuaauauuuuuagaucuuuuuacuucacc

SEQ ID NO: 43142 - RNA, 32 nt, Homo Sapiens
ccggcggggaugcgggaccggcugccagaccu

SEQ ID NO: 43143 - RNA, 32 nt, Homo Sapiens
cuguuggccaucccuuccccagccacaggugu

SEQ ID NO: 43144 - RNA, 32 nt, Homo Sapiens
cuucaggcauuugguaacucaaagaaggcugu

SEQ ID NO: 43145 - RNA, 32 nt, Homo Sapiens
aaaaaagauucuaacagcuguuaguuuuauaa

SEQ ID NO: 43146 - RNA, 32 nt, Homo Sapiens
gugaugguggucagggaagaccucucugcaga

SEQ ID NO: 43147 - RNA, 32 nt, Homo Sapiens
augaguaaguuuagaugacuggucaauaucuu

SEQ ID NO: 43148 - RNA, 32 nt, Homo Sapiens
cucaauggugcuauaauaaauaaacuucaaca

SEQ ID NO: 43149 - RNA, 31 nt, Homo Sapiens
gaaagagugugcgucauccuaaaccaucuac

SEQ ID NO: 43150 - RNA, 31 nt, Homo Sapiens
uauuuuuguagacuuuaauagagaaguugau

SEQ ID NO: 43151 - RNA, 32 nt, Homo Sapiens
cucugcuucuuacuggaucuucuuuccuggga

SEQ ID NO: 43152 - RNA, 30 nt, Homo Sapiens
cuccccgcgucccaggcgccggcgccugga

SEQ ID NO: 43153 - RNA, 28 nt, Homo Sapiens
guuucgacauguaaaauguguuugaaaa

SEQ ID NO: 43154 - RNA, 32 nt, Homo Sapiens
auacaaucuuggauucaugcaggaccuggcag

SEQ ID NO: 43155 - RNA, 31 nt, Homo Sapiens
aaaggaggcagugaggaccaggcacuauuuc

SEQ ID NO: 43156 - RNA, 32 nt, Homo Sapiens
cagaaaagagaaaaaagaaugucaguuuagga

SEQ ID NO: 43157 - RNA, 32 nt, Homo Sapiens
aauauucuuugaaaauggagaauggcuuuagu

SEQ ID NO: 43158 - RNA, 32 nt, Homo Sapiens
uugagaccagccuggccaacguggugaaaccc

SEQ ID NO: 43159 - RNA, 32 nt, Homo Sapiens
ugcaugggggugauccuggccauuggcaaugc

SEQ ID NO: 43160 - RNA, 32 nt, Homo Sapiens
cacucugccaagggcacuugcccgccucccgc

SEQ ID NO: 43161 - RNA, 32 nt, Homo Sapiens
agggucuguccccuccucuccacgucccagaa

SEQ ID NO: 43162 - RNA, 32 nt, Homo Sapiens
cggucccgcccggcugagacgcucgccccgac

SEQ ID NO: 43163 - RNA, 32 nt, Homo Sapiens
ugguggcagacaccuguggucccagcuauucg

SEQ ID NO: 43164 - RNA, 32 nt, Homo Sapiens
aaucaguuuaaugugggaaguacuuaaguggu

SEQ ID NO: 43165 - RNA, 32 nt, Homo Sapiens
cccauuguguccuuggaguguguguccugcaa

SEQ ID NO: 43166 - RNA, 32 nt, Homo Sapiens
gucagaauugcugugaggaaaagaggaauccc

SEQ ID NO: 43167 - RNA, 32 nt, Homo Sapiens
aagggagguauguuuugcgggaugggcacuag

SEQ ID NO: 43168 - RNA, 32 nt, Homo Sapiens
guacacuaaaagacuuugauaaaaagaaacaa

SEQ ID NO: 43169 - RNA, 32 nt, Homo Sapiens
ugcagauagaaagaccagcagcgaaaaagcug

SEQ ID NO: 43170 - RNA, 32 nt, Homo Sapiens
aaccggcucccggcccgaggggcguggugucc

SEQ ID NO: 43171 - RNA, 32 nt, Homo Sapiens
ucuggacuaucuucauuuacuacaucauuaau

SEQ ID NO: 43172 - RNA, 32 nt, Homo Sapiens
cugcuuuuaacccuuuccuauuugcugagaau

SEQ ID NO: 43173 - RNA, 32 nt, Homo Sapiens
uugguucaauacuacuacuguugucaccauuu

SEQ ID NO: 43174 - RNA, 29 nt, Homo Sapiens
cccagcuaauuuuuguauuuucuguacac

SEQ ID NO: 43175 - RNA, 32 nt, Homo Sapiens
gggcaggugcgguggcggaagugcagggacgg

SEQ ID NO: 43176 - RNA, 32 nt, Homo Sapiens
agagguuuguaucuggaaagauggaagaacuu

SEQ ID NO: 43177 - RNA, 30 nt, Homo Sapiens
uugaccucgugauccacccaucucggccuc

SEQ ID NO: 43178 - RNA, 32 nt, Homo Sapiens
ccagccccacccaagaggagggcagcgugugc

SEQ ID NO: 43179 - RNA, 32 nt, Homo Sapiens
caggaacacacucuauacuaagacagcagcuu

SEQ ID NO: 43180 - RNA, 29 nt, Homo Sapiens
uuuugguaauuuuuauauuuucugucuuu

SEQ ID NO: 43181 - RNA, 32 nt, Homo Sapiens
uugagaacaaaaugaacaguauggaaaaagcc

SEQ ID NO: 43182 - RNA, 32 nt, Homo Sapiens
caggagaagaccaucaggaaaagacaggacaa

SEQ ID NO: 43183 - RNA, 32 nt, Homo Sapiens
gagaucaccguaccagcaaaucugcaaaccaa

SEQ ID NO: 43184 - RNA, 32 nt, Homo Sapiens
cugaggacgguguuucggagguugccuuuugg

SEQ ID NO: 43185 - RNA, 32 nt, Homo Sapiens
uuuuguuuucuuugaauaaaugacauggcacc

SEQ ID NO: 43186 - RNA, 32 nt, Homo Sapiens
acaucggcucuggugcagcugcucccccucca

SEQ ID NO: 43187 - RNA, 32 nt, Homo Sapiens
uuuucuguguuguuuucccuggaugaaaauau

SEQ ID NO: 43188 - RNA, 32 nt, Homo Sapiens
uguaggccaagcccaugccucagggcagccuu

SEQ ID NO: 43189 - RNA, 32 nt, Homo Sapiens
ggcaaaaccagacgucugggaauaccgugaac

SEQ ID NO: 43190 - RNA, 28 nt, Homo Sapiens
gacauggcgaguguagugcugccgagcg

SEQ ID NO: 43191 - RNA, 32 nt, Homo Sapiens
gggagccgcugcccgaacucccggcccgaacu

SEQ ID NO: 43192 - RNA, 32 nt, Homo Sapiens
uuuucugcuuugcaaggcgcuagaaucuuuua

SEQ ID NO: 43193 - RNA, 32 nt, Homo Sapiens
ggcaggauacguauguguccacaccuagugag

SEQ ID NO: 43194 - RNA, 32 nt, Homo Sapiens
uuaagauuugaaauauauuucauagaaguccu

SEQ ID NO: 43195 - RNA, 32 nt, Homo Sapiens
gcauucuaggcucacugcaacuucugccuccc

SEQ ID NO: 43196 - RNA, 25 nt, Homo Sapiens
augaaauaaaaauuauguuuaauaa

SEQ ID NO: 43197 - RNA, 32 nt, Homo Sapiens
ccagcacauccaggcuucuccuccucccgagg

SEQ ID NO: 43198 - RNA, 32 nt, Homo Sapiens
ggauaugcccuccuggugacucgggggcuguc

SEQ ID NO: 43199 - RNA, 32 nt, Homo Sapiens
gauggaaaguaauugguauucuuaauauccug

SEQ ID NO: 43200 - RNA, 32 nt, Homo Sapiens
gaaaacuguauaugauacagaauuucauaaga

SEQ ID NO: 43201 - RNA, 32 nt, Homo Sapiens
cauugccacaguguguauguguucacuauaua

SEQ ID NO: 43202 - RNA, 32 nt, Homo Sapiens
agucaaagacauauuucuuuuuucuuuguuug

SEQ ID NO: 43203 - RNA, 32 nt, Homo Sapiens
ccuuaaaauagcaaauaaaauaagauauaagc

SEQ ID NO: 43204 - RNA, 32 nt, Homo Sapiens
auggaaagcaccucaugaggcuaaauauuuug

SEQ ID NO: 43205 - RNA, 32 nt, Homo Sapiens
cuccugucccuacaaggggcauguggacagca

SEQ ID NO: 43206 - RNA, 32 nt, Homo Sapiens
uaucauccuguguucuguuuaguugcaacaau

SEQ ID NO: 43207 - RNA, 30 nt, Homo Sapiens
cuccuggggugcaguggugagucugggggc

SEQ ID NO: 43208 - RNA, 32 nt, Homo Sapiens
aagauuguggauccgcuggcccggggccgggc

SEQ ID NO: 43209 - RNA, 32 nt, Homo Sapiens
cugaugauagguuaauaaagaugauugaaucc

SEQ ID NO: 43210 - RNA, 32 nt, Homo Sapiens
uucauguuaauauguggcaaaauauuuuugua

SEQ ID NO: 43211 - RNA, 32 nt, Homo Sapiens
aagaaacaaaaauuuacuuaacuucuuucuuu

SEQ ID NO: 43212 - RNA, 32 nt, Homo Sapiens
ucacaugccuucuauagaauugugggauuaug

SEQ ID NO: 43213 - RNA, 32 nt, Homo Sapiens
gcaaauuauuuagagcauagacuuuauaagca

SEQ ID NO: 43214 - RNA, 32 nt, Homo Sapiens
ggauugagggacaucaaggaacuacugccccc

SEQ ID NO: 43215 - RNA, 32 nt, Homo Sapiens
acccaggauugugacugacucugcauuuuuaa

SEQ ID NO: 43216 - RNA, 32 nt, Homo Sapiens
ggggccucaauccagucuugauaacagcgagg

SEQ ID NO: 43217 - RNA, 32 nt, Homo Sapiens
agacacuuaaaauuaugugaaaaaaaggauaa

SEQ ID NO: 43218 - RNA, 32 nt, Homo Sapiens
uuuuuuaaugcuauaaaauguuagaaugugcc

SEQ ID NO: 43219 - RNA, 32 nt, Homo Sapiens
ccaaaaaggggagagggaaguuuccagaaaga

SEQ ID NO: 43220 - RNA, 32 nt, Homo Sapiens
gucugaauucugcucuaaauaaagacgacuac

SEQ ID NO: 43221 - RNA, 32 nt, Homo Sapiens
uagaagcaaaacuuauacaacauuaaaaugau

SEQ ID NO: 43222 - RNA, 32 nt, Homo Sapiens
ccaugcgaugaaauuguuguaauaggugcuca

SEQ ID NO: 43223 - RNA, 32 nt, Homo Sapiens
gcccucggguuccaccuucauccacccacuca

SEQ ID NO: 43224 - RNA, 32 nt, Homo Sapiens
aaauuuaaaaauuucuguaaaacuuugucuuc

SEQ ID NO: 43225 - RNA, 32 nt, Homo Sapiens
gaacacccgcaggagccuuguuuggcuuccac

SEQ ID NO: 43226 - RNA, 32 nt, Homo Sapiens
guggggaggaagagucugcaagcagggcugug

SEQ ID NO: 43227 - RNA, 32 nt, Homo Sapiens
ucaucuccugaaccucuucugacagagaucag

SEQ ID NO: 43228 - RNA, 32 nt, Homo Sapiens
uccugagcgggaaggcgggagcugcgugcugu

SEQ ID NO: 43229 - RNA, 32 nt, Homo Sapiens
guaaaacauaagagaaaaaccaauuaguguau

SEQ ID NO: 43230 - RNA, 32 nt, Homo Sapiens
uucugaagugaacacuaaugguauuguccuac

SEQ ID NO: 43231 - RNA, 32 nt, Homo Sapiens
ccagcgcucgggccguagccuuggcuccugga

SEQ ID NO: 43232 - RNA, 32 nt, Homo Sapiens
aacuagaaauaccauuugacccagccauccca

SEQ ID NO: 43233 - RNA, 32 nt, Homo Sapiens
cgccggcggccgcguccacccccgacgcucug

SEQ ID NO: 43234 - RNA, 32 nt, Homo Sapiens
gagaacaaaaauuggguuuuaaaauuaaagua

SEQ ID NO: 43235 - RNA, 30 nt, Homo Sapiens
ugaauggaaagcuuugugcaaaauauacau

SEQ ID NO: 43236 - RNA, 32 nt, Homo Sapiens
uugaggauguuuuaaauacaugcauugucuuc

SEQ ID NO: 43237 - RNA, 32 nt, Homo Sapiens
ccaggggggaggaccgcccacccuuccagauc

SEQ ID NO: 43238 - RNA, 32 nt, Homo Sapiens
uaguuuucgacacuggaccggaagaacaaguc

SEQ ID NO: 43239 - RNA, 32 nt, Homo Sapiens
aauaggagcuuuguauaguaauuuaggagugu

SEQ ID NO: 43240 - RNA, 32 nt, Homo Sapiens
gugugccugugugagccugcaugcauacaugu

SEQ ID NO: 43241 - RNA, 32 nt, Homo Sapiens
guaaagagauagucauucccccugccugucuc

SEQ ID NO: 43242 - RNA, 32 nt, Homo Sapiens
gaagucaguucuccugcacuuccuccucaugu

SEQ ID NO: 43243 - RNA, 32 nt, Homo Sapiens
agccugcgcuccgaggaccccucagggaagaa

SEQ ID NO: 43244 - RNA, 32 nt, Homo Sapiens
gcuugugguuaguggucuuguauacuucucuc

SEQ ID NO: 43245 - RNA, 32 nt, Homo Sapiens
ccacugucacgaccugcauggagacgccgcau

SEQ ID NO: 43246 - RNA, 32 nt, Homo Sapiens
caaagcugcauuuaccaaaaaauacaguaaaa

SEQ ID NO: 43247 - RNA, 32 nt, Homo Sapiens
cagggcagcuuuggccagcagugagcggacag

SEQ ID NO: 43248 - RNA, 32 nt, Homo Sapiens
uacuuugcugaggguuugaauaaaccuaggac

SEQ ID NO: 43249 - RNA, 32 nt, Homo Sapiens
uugcaguucagcaacucuuaagugacacaguu

SEQ ID NO: 43250 - RNA, 32 nt, Homo Sapiens
gaaacaaacaaauaauggaugugcaagaaugc

SEQ ID NO: 43251 - RNA, 32 nt, Homo Sapiens
guuuggauuuuggcaucuuguuuuucuaacaa

SEQ ID NO: 43252 - RNA, 32 nt, Homo Sapiens
cgagggggcuugcccacccaccccgaccccag

SEQ ID NO: 43253 - RNA, 32 nt, Homo Sapiens
aaacuguaaagugcaauagaaaacugugugug

SEQ ID NO: 43254 - RNA, 32 nt, Homo Sapiens
ugaggauaggaguuauauauucuuauaagaca

SEQ ID NO: 43255 - RNA, 32 nt, Homo Sapiens
aauacuaauggauacaggcauguaucugccgu

SEQ ID NO: 43256 - RNA, 32 nt, Homo Sapiens
uaucuuggacauuuauugguaaagcuuauuua

SEQ ID NO: 43257 - RNA, 32 nt, Homo Sapiens
cagaguuuaguuuagaaaauguaaucuuuuaa

SEQ ID NO: 43258 - RNA, 32 nt, Homo Sapiens
aaucuuuuaacuuuaaguuaaaacagauacau

SEQ ID NO: 43259 - RNA, 32 nt, Homo Sapiens
cccuucuccagccccagucucuuuucccacug

SEQ ID NO: 43260 - RNA, 32 nt, Homo Sapiens
gaagccaggccagcugccagcgccgggggagg

SEQ ID NO: 43261 - RNA, 32 nt, Homo Sapiens
ggggcuuucuggagaggagggaugcugccuga

SEQ ID NO: 43262 - RNA, 32 nt, Homo Sapiens
cagugggggaggaguugugucucgucuucugu

SEQ ID NO: 43263 - RNA, 32 nt, Homo Sapiens
aacugcuugacuccaugaucuccuagaacaaa

SEQ ID NO: 43264 - RNA, 32 nt, Homo Sapiens
augcuguaagauuuauacuacugauaauuuug

SEQ ID NO: 43265 - RNA, 32 nt, Homo Sapiens
acugagcccgggccagaugcucucagaaggcc

SEQ ID NO: 43266 - RNA, 32 nt, Homo Sapiens
agauuccaggacuugugcucgcugaagauaca

SEQ ID NO: 43267 - RNA, 32 nt, Homo Sapiens
cuaauguauuaugagccaaaaugguuaauuuu

SEQ ID NO: 43268 - RNA, 32 nt, Homo Sapiens
cacgccgcgugcgcuccggcagagcccagcac

SEQ ID NO: 43269 - RNA, 32 nt, Homo Sapiens
ugugauggcaguguggcuggacugugucagcc

SEQ ID NO: 43270 - RNA, 32 nt, Homo Sapiens
aaaaacaaaguaaaaugagcaauugccuuauu

SEQ ID NO: 43271 - RNA, 32 nt, Homo Sapiens
aauguucacagcacugucacccggcuucuccg

SEQ ID NO: 43272 - RNA, 32 nt, Homo Sapiens
uccuguggcuccugggcccaugcccaaggcug

SEQ ID NO: 43273 - RNA, 32 nt, Homo Sapiens
cccaguguguguccgucucucaucucaauaaa

SEQ ID NO: 43274 - RNA, 32 nt, Homo Sapiens
aacaauccugagauuucuuaauuucaugguuc

SEQ ID NO: 43275 - RNA, 32 nt, Homo Sapiens
uguacaaguuguguuucuuaaucuucccuucu

SEQ ID NO: 43276 - RNA, 32 nt, Homo Sapiens
gaggcuucaaggauuugaggcuacacauguua

SEQ ID NO: 43277 - RNA, 32 nt, Homo Sapiens
aaacacuugaguuucuuaagauugggaucucu

SEQ ID NO: 43278 - RNA, 32 nt, Homo Sapiens
uccacacacacacacacacacacacacucagg

SEQ ID NO: 43279 - RNA, 32 nt, Homo Sapiens
cuuaaauaaggguacuccaucugccacagaau

SEQ ID NO: 43280 - RNA, 32 nt, Homo Sapiens
ugguuucugaauaaauugaacuaaauccaaac

SEQ ID NO: 43281 - RNA, 32 nt, Homo Sapiens
uaaacaguugauucuuuuuguguuuucuacaa

SEQ ID NO: 43282 - RNA, 32 nt, Homo Sapiens
cugauccucucuucuuuucccauuuacaaaug

SEQ ID NO: 43283 - RNA, 32 nt, Homo Sapiens
ccaggccugaaaaagauagacacagaagcacc

SEQ ID NO: 43284 - RNA, 32 nt, Homo Sapiens
gcauuucagggggccaccauggagcagccguu

SEQ ID NO: 43285 - RNA, 32 nt, Homo Sapiens
ggccuguaccccagccuccugucccccaggaa

SEQ ID NO: 43286 - RNA, 31 nt, Homo Sapiens
aaacagaaauaaaagauacuaucuuuaccgu

SEQ ID NO: 43287 - RNA, 32 nt, Homo Sapiens
guucaucagcggggaaucuggcuccgaauucu

SEQ ID NO: 43288 - RNA, 32 nt, Homo Sapiens
cucagguucuuugcgcgcucgguccaguggcu

SEQ ID NO: 43289 - RNA, 32 nt, Homo Sapiens
auacuugaaacaaaaaucaucauggucauuua

SEQ ID NO: 43290 - RNA, 32 nt, Homo Sapiens
auaaagucagcuuucagaggcucagggugggg

SEQ ID NO: 43291 - RNA, 32 nt, Homo Sapiens
ggcgcugaggcgggccgcguggagacgugagg

SEQ ID NO: 43292 - RNA, 32 nt, Homo Sapiens
uuccauugcuaccccaggauucccgagugcaa

SEQ ID NO: 43293 - RNA, 32 nt, Homo Sapiens
uuuuauggacucucuucagcuucuggagaccu

SEQ ID NO: 43294 - RNA, 32 nt, Homo Sapiens
cgucaaucuauuuuuguaaaccucuucauacu

SEQ ID NO: 43295 - RNA, 32 nt, Homo Sapiens
ggcggccccaggcgcgcacuuccgcccggccu

SEQ ID NO: 43296 - RNA, 32 nt, Homo Sapiens
uuucuaaaucucacagaagaggaaaguggccu

SEQ ID NO: 43297 - RNA, 31 nt, Homo Sapiens
agcaugauuuugcugugcauguaccauuuug

SEQ ID NO: 43298 - RNA, 32 nt, Homo Sapiens
cuacucuugcaaaaacagauacgauuaugauu

SEQ ID NO: 43299 - RNA, 32 nt, Homo Sapiens
ggagugagugguuuuucuucauuuuuaaaugg

SEQ ID NO: 43300 - RNA, 32 nt, Homo Sapiens
uuguuguugguagugucuugauguauuuucag

SEQ ID NO: 43301 - RNA, 32 nt, Homo Sapiens
gggacuuguacacuugaagugaaacaguuuua

SEQ ID NO: 43302 - RNA, 32 nt, Homo Sapiens
aguacugcgaaucuuguggccucauucugaac

SEQ ID NO: 43303 - RNA, 32 nt, Homo Sapiens
cuucuauuccaaggguaagguugcgauuaugg

SEQ ID NO: 43304 - RNA, 32 nt, Homo Sapiens
uguucuugacauaccugacuuuucucacauuu

SEQ ID NO: 43305 - RNA, 32 nt, Homo Sapiens
uagcucacaccuguaaucccagcacuuuggga

SEQ ID NO: 43306 - RNA, 32 nt, Homo Sapiens
ccuucucuacccaucucccccaucccccacug

SEQ ID NO: 43307 - RNA, 32 nt, Homo Sapiens
ucggccauuucccucuuccuguguccccagau

SEQ ID NO: 43308 - RNA, 32 nt, Homo Sapiens
acagaccucucggccggaaucuccagggauga

SEQ ID NO: 43309 - RNA, 32 nt, Homo Sapiens
cucccagggaagcucggagggggacagggagc

SEQ ID NO: 43310 - RNA, 32 nt, Homo Sapiens
cugcagggggaagagccgggaagggacaguca

SEQ ID NO: 43311 - RNA, 32 nt, Homo Sapiens
aaaggccugagucaggcuucucauauaaauaa

SEQ ID NO: 43312 - RNA, 32 nt, Homo Sapiens
agccccucccuuuuuucuuuaaaccuuuaaau

SEQ ID NO: 43313 - RNA, 32 nt, Homo Sapiens
ucugaacuccaguuuaaagaugcagagaugaa

SEQ ID NO: 43314 - RNA, 32 nt, Homo Sapiens
cugugcugcugcugugagcgggccccugcucc

SEQ ID NO: 43315 - RNA, 32 nt, Homo Sapiens
cuaagcaucagaccuggaauuuggaguugcaa

SEQ ID NO: 43316 - RNA, 32 nt, Homo Sapiens
aaccagucaagugucugauacacaucaucuug

SEQ ID NO: 43317 - RNA, 32 nt, Homo Sapiens
ugaaauauucuaaauaaaaugguuuagaguuu

SEQ ID NO: 43318 - RNA, 32 nt, Homo Sapiens
cucuucucauuucaaggacaugaaaaaguaaa

SEQ ID NO: 43319 - RNA, 32 nt, Homo Sapiens
uuuggaguauguuaaguugaaguaaaagcaag

SEQ ID NO: 43320 - RNA, 32 nt, Homo Sapiens
caggugaacaauuugacgugucaucaguuuuu

SEQ ID NO: 43321 - RNA, 32 nt, Homo Sapiens
aauuuuuguuuuauuauuaagaaauaaaugua

SEQ ID NO: 43322 - RNA, 32 nt, Homo Sapiens
guccugacucccagcccucauccugccuuacc

SEQ ID NO: 43323 - RNA, 32 nt, Homo Sapiens
gguucagcacacgggaggauccugucucacac

SEQ ID NO: 43324 - RNA, 32 nt, Homo Sapiens
cucuugcauguauuacuaaauaaaaugaucuc

SEQ ID NO: 43325 - RNA, 32 nt, Homo Sapiens
gggcucucggugccccggggccgcgcgccaug

SEQ ID NO: 43326 - RNA, 32 nt, Homo Sapiens
uucauaaaggaaaaguaacauaagcauguaaa

SEQ ID NO: 43327 - RNA, 32 nt, Homo Sapiens
gcggcaacauggcagagaccgcggccggagug

SEQ ID NO: 43328 - RNA, 32 nt, Homo Sapiens
gcgacagcgguggccgggaggggggaggagag

SEQ ID NO: 43329 - RNA, 32 nt, Homo Sapiens
caaggugcaaggugguuuggacacccucaaua

SEQ ID NO: 43330 - RNA, 32 nt, Homo Sapiens
cugccauacacucagcuuuacaaaaucauguc

SEQ ID NO: 43331 - RNA, 32 nt, Homo Sapiens
cccaggacgcccccggcccaggcccuuggggu

SEQ ID NO: 43332 - RNA, 32 nt, Homo Sapiens
cauacuccuuauguacagaaaucacaugaaaa

SEQ ID NO: 43333 - RNA, 32 nt, Homo Sapiens
auguaacuguuaccauuggaaauuucacguca

SEQ ID NO: 43334 - RNA, 32 nt, Homo Sapiens
aguggagggggcagcccugugcgacccagcag

SEQ ID NO: 43335 - RNA, 32 nt, Homo Sapiens
cgcuggggcagaagacaaaaagaaugugaauu

SEQ ID NO: 43336 - RNA, 27 nt, Homo Sapiens
uaccaguccuucucccgcaucuccugg

SEQ ID NO: 43337 - RNA, 32 nt, Homo Sapiens
uucagcuuuccacagcagcacccuguucaaca

SEQ ID NO: 43338 - RNA, 32 nt, Homo Sapiens
acagagcccuggaaggccccagcccugcuccc

SEQ ID NO: 43339 - RNA, 32 nt, Homo Sapiens
cugaggucgccuggggaccccagaagggacag

SEQ ID NO: 43340 - RNA, 32 nt, Homo Sapiens
ugugaauuaagaagcuaagaaaauauuucuua

SEQ ID NO: 43341 - RNA, 32 nt, Homo Sapiens
cugucccgcaaccgcgacccggggcgccucau

SEQ ID NO: 43342 - RNA, 32 nt, Homo Sapiens
uggagaugauaaacaucacauggcauuuuaag

SEQ ID NO: 43343 - RNA, 32 nt, Homo Sapiens
acagaguuucacuccuguuacccaggcuggag

SEQ ID NO: 43344 - RNA, 32 nt, Homo Sapiens
gacgcggugcggggcggagcggggcgccaagg

SEQ ID NO: 43345 - RNA, 32 nt, Homo Sapiens
gcuuggagugucuuucuggaagaaauugccuu

SEQ ID NO: 43346 - RNA, 30 nt, Homo Sapiens
cgcgcgaagaagcuugggagucguggcggg

SEQ ID NO: 43347 - RNA, 32 nt, Homo Sapiens
ucucaauggaaacaucacuggggucacuuggg

SEQ ID NO: 43348 - RNA, 32 nt, Homo Sapiens
gagccggccgcgccugggcuggagcggggcuc

SEQ ID NO: 43349 - RNA, 32 nt, Homo Sapiens
ccggcugccccgcucccgccccagcgccaucc

SEQ ID NO: 43350 - RNA, 32 nt, Homo Sapiens
gccccccgucauggggcagcccggggagcaga

SEQ ID NO: 43351 - RNA, 32 nt, Homo Sapiens
uggcgcugguggcugcggcggcggcggcggca

SEQ ID NO: 43352 - RNA, 32 nt, Homo Sapiens
acauuaauauuuuguuaauuccugucucucca

SEQ ID NO: 43353 - RNA, 32 nt, Homo Sapiens
ccuuuuuucuuaccuuuguuugcugucuuuau

SEQ ID NO: 43354 - RNA, 32 nt, Homo Sapiens
ccagagagguagcaaaaaucacaggggugguu

SEQ ID NO: 43355 - RNA, 32 nt, Homo Sapiens
guuucucagguuaacaaaguuauuuuagauuc

SEQ ID NO: 43356 - RNA, 32 nt, Homo Sapiens
aagauguacaauccugcauccuugcuuauuuc

SEQ ID NO: 43357 - RNA, 32 nt, Homo Sapiens
cacagguguuuuucuuuuugcaguuuuaccua

SEQ ID NO: 43358 - RNA, 32 nt, Homo Sapiens
aaccaguacuggagcugggucuccagguacgu

SEQ ID NO: 43359 - RNA, 32 nt, Homo Sapiens
gcccuugucccagggagggcuggccgcaccuc

SEQ ID NO: 43360 - RNA, 32 nt, Homo Sapiens
ccagcugagggucaaggcaaauguccuucuug

SEQ ID NO: 43361 - RNA, 32 nt, Homo Sapiens
ucugcccuacucucugcgugacuuccacuguu

SEQ ID NO: 43362 - RNA, 32 nt, Homo Sapiens
uccaggaguauggguccugcccugcccuccca

SEQ ID NO: 43363 - RNA, 32 nt, Homo Sapiens
ggcucaaaauuugguuccuaaguagaguauug

SEQ ID NO: 43364 - RNA, 32 nt, Homo Sapiens
gguucuacugcucuccuucuuaagaagggugg

SEQ ID NO: 43365 - RNA, 32 nt, Homo Sapiens
agcagcgucaagcagcaggacuacagcgccag

SEQ ID NO: 43366 - RNA, 32 nt, Homo Sapiens
ugcuucuccucuaguuuguaacuuacuggacu

SEQ ID NO: 43367 - RNA, 32 nt, Homo Sapiens
gcuuauauauuuuauaguagggcacuaaauac

SEQ ID NO: 43368 - RNA, 32 nt, Homo Sapiens
caggcaggagugggcugcuaugaggacccugg

SEQ ID NO: 43369 - RNA, 32 nt, Homo Sapiens
agagcaaaucauucuggaaguaccuuaaggaa

SEQ ID NO: 43370 - RNA, 32 nt, Homo Sapiens
uagaauuaucauauaaugaauuuuguaaugcu

SEQ ID NO: 43371 - RNA, 32 nt, Homo Sapiens
ggcagguucagaagcugccuucuagaagaaug

SEQ ID NO: 43372 - RNA, 32 nt, Homo Sapiens
acauuagacucagggaguuuugucugaagacc

SEQ ID NO: 43373 - RNA, 32 nt, Homo Sapiens
ggugugugggauuugucuucagcugcaaccag

SEQ ID NO: 43374 - RNA, 32 nt, Homo Sapiens
acaggagggagugagggaaaggggccaugauu

SEQ ID NO: 43375 - RNA, 32 nt, Homo Sapiens
gacaugucuauuucuaaaaauccaguaguuuc

SEQ ID NO: 43376 - RNA, 32 nt, Homo Sapiens
ggaacuaggacacucaucggcccgagaccaac

SEQ ID NO: 43377 - RNA, 32 nt, Homo Sapiens
guaugcucauaguuuaaauuuuuguaggaaac

SEQ ID NO: 43378 - RNA, 32 nt, Homo Sapiens
gcauaggacuuccuaggagcucaguugauugu

SEQ ID NO: 43379 - RNA, 30 nt, Homo Sapiens
ucguggcucuucggcguuaacaagggcccc

SEQ ID NO: 43380 - RNA, 32 nt, Homo Sapiens
uauacguuauggcagcucuguauacaguuuga

SEQ ID NO: 43381 - RNA, 32 nt, Homo Sapiens
guuccaaaaauaugguaaaaucuugguuuuug

SEQ ID NO: 43382 - RNA, 32 nt, Homo Sapiens
aauguguuauugaaacaaaucaauggcagugu

SEQ ID NO: 43383 - RNA, 32 nt, Homo Sapiens
uggugaaacugggacugaggaggaguuaauuc

SEQ ID NO: 43384 - RNA, 32 nt, Homo Sapiens
gaugugugguuuugcuugauuuuguauuuuau

SEQ ID NO: 43385 - RNA, 32 nt, Homo Sapiens
uugucauuugcucaaaucacacagcaaaaccg

SEQ ID NO: 43386 - RNA, 32 nt, Homo Sapiens
agcugacaguuaaaugcugagccugguaagaa

SEQ ID NO: 43387 - RNA, 32 nt, Homo Sapiens
ucggguaguuuuccuuuuaaaauuuguagaga

SEQ ID NO: 43388 - RNA, 32 nt, Homo Sapiens
gcgcagagaagcugagggcggucucugaucug

SEQ ID NO: 43389 - RNA, 32 nt, Homo Sapiens
auuauucaugauucagguuggaaggccugcug

SEQ ID NO: 43390 - RNA, 32 nt, Homo Sapiens
cugccgcaccgcugcaguggcucagccacagg

SEQ ID NO: 43391 - RNA, 32 nt, Homo Sapiens
aagcagcucuaaaucuaguagagcagacuuuc

SEQ ID NO: 43392 - RNA, 32 nt, Homo Sapiens
cccccucuucccuuuucucaguccaugaggcu

SEQ ID NO: 43393 - RNA, 32 nt, Homo Sapiens
aauacaauguuaucaaccaacugcacaaucag

SEQ ID NO: 43394 - RNA, 32 nt, Homo Sapiens
guuguacuaauagaaacuaaguacagaaauuu

SEQ ID NO: 43395 - RNA, 32 nt, Homo Sapiens
gucuucgugcugugucucauggguuuccauag

SEQ ID NO: 43396 - RNA, 32 nt, Homo Sapiens
uuaccuugggaucugccaggcugggguguuuu

SEQ ID NO: 43397 - RNA, 32 nt, Homo Sapiens
accuuuucgcuuuuuccaagauggcucaagau

SEQ ID NO: 43398 - RNA, 32 nt, Homo Sapiens
cucucccucccucucucaugaggcacagccaa

SEQ ID NO: 43399 - RNA, 32 nt, Homo Sapiens
ugccuguggauguauauaaaauuaagaugaua

SEQ ID NO: 43400 - RNA, 32 nt, Homo Sapiens
uucugcaucuucuuauuuccucauuagaaugc

SEQ ID NO: 43401 - RNA, 32 nt, Homo Sapiens
ugucacccugcgccuggcuguucugagaggcc

SEQ ID NO: 43402 - RNA, 31 nt, Homo Sapiens
gaacugagugugucagaagugcugguuaaug

SEQ ID NO: 43403 - RNA, 32 nt, Homo Sapiens
uucucccaaaagacacacauacaaaaauguaa

SEQ ID NO: 43404 - RNA, 32 nt, Homo Sapiens
uuuuguucauucaaaucuuggauuuuuuuuuu

SEQ ID NO: 43405 - RNA, 32 nt, Homo Sapiens
uguguugugaacguuuggugacugcuguugaa

SEQ ID NO: 43406 - RNA, 32 nt, Homo Sapiens
gcuauguaguugucaucuuugaucuggcuagg

SEQ ID NO: 43407 - RNA, 31 nt, Homo Sapiens
agaaccuauugagcuugcagggaagccaagc

SEQ ID NO: 43408 - RNA, 32 nt, Homo Sapiens
agcagccacuguuuccaccuccccaccugaag

SEQ ID NO: 43409 - RNA, 32 nt, Homo Sapiens
ucauugauagucuugugugucucacauaucag

SEQ ID NO: 43410 - RNA, 32 nt, Homo Sapiens
acccugccuucugccaugaacccaggccacua

SEQ ID NO: 43411 - RNA, 32 nt, Homo Sapiens
uuaaggagaacaaaaauucaguauuauacaga

SEQ ID NO: 43412 - RNA, 32 nt, Homo Sapiens
uucugcacagaaaugagggaaauacaaagaac

SEQ ID NO: 43413 - RNA, 32 nt, Homo Sapiens
gccaaaggcuuugggcucaucaucaaucuuuc

SEQ ID NO: 43414 - RNA, 32 nt, Homo Sapiens
uuggucacagagcugggugcugccggucaccu

SEQ ID NO: 43415 - RNA, 32 nt, Homo Sapiens
gacagaaggaaccuugaaaacuaccugauauu

SEQ ID NO: 43416 - RNA, 32 nt, Homo Sapiens
ccaguuugauacugugguuaaagacagaccca

SEQ ID NO: 43417 - RNA, 32 nt, Homo Sapiens
gucucuugggagagggaggugccuugcaaacu

SEQ ID NO: 43418 - RNA, 32 nt, Homo Sapiens
gagggaaagcuacuugaucaaacauccgauag

SEQ ID NO: 43419 - RNA, 32 nt, Homo Sapiens
ccaucuugauaaauaggaguguauguaucuua

SEQ ID NO: 43420 - RNA, 32 nt, Homo Sapiens
gaggaggcaccucgggucuugagguuccugac

SEQ ID NO: 43421 - RNA, 32 nt, Homo Sapiens
aagaaugaauuuccauguuauuuuuuccuuaa

SEQ ID NO: 43422 - RNA, 32 nt, Homo Sapiens
uuggaagauccggaaaaugaggcccauaggaa

SEQ ID NO: 43423 - RNA, 32 nt, Homo Sapiens
aaaaaucaguguucacccuuauagagacauag

SEQ ID NO: 43424 - RNA, 32 nt, Homo Sapiens
acugugucaguuccugccuuuucucaucagca

SEQ ID NO: 43425 - RNA, 32 nt, Homo Sapiens
accacagauacuacauuuuuuacaaauuaaag

SEQ ID NO: 43426 - RNA, 29 nt, Homo Sapiens
ucaaaugugcuggucucuguuaacucagg

SEQ ID NO: 43427 - RNA, 32 nt, Homo Sapiens
aacuguuaauaaauacuucugacacuacauuu

SEQ ID NO: 43428 - RNA, 32 nt, Homo Sapiens
guucucugaaaauuauuugguggguuaaaugc

SEQ ID NO: 43429 - RNA, 32 nt, Homo Sapiens
augcagauagcgaagcagaugaaaaugaacaa

SEQ ID NO: 43430 - RNA, 32 nt, Homo Sapiens
acaucuugcauugggugauaauuuagucuugc

SEQ ID NO: 43431 - RNA, 32 nt, Homo Sapiens
ggccgccaacuccaccagcgaccuccacacuc

SEQ ID NO: 43432 - RNA, 32 nt, Homo Sapiens
uuaccacaaccuggccgggcgcagcgcucaug

SEQ ID NO: 43433 - RNA, 32 nt, Homo Sapiens
gggugcugaguugggugauuucauuuuaguga

SEQ ID NO: 43434 - RNA, 30 nt, Homo Sapiens
ucuggccgguaacugggggaaggugauggg

SEQ ID NO: 43435 - RNA, 32 nt, Homo Sapiens
cacccgcguggcaguguucaaggacuggcucc

SEQ ID NO: 43436 - RNA, 32 nt, Homo Sapiens
guggagcuuguggcuuccugaugugucaccag

SEQ ID NO: 43437 - RNA, 32 nt, Homo Sapiens
agccaggcagacaugagacauggcggaguguc

SEQ ID NO: 43438 - RNA, 32 nt, Homo Sapiens
ggugggaccccaugguggcucuaguggaagau

SEQ ID NO: 43439 - RNA, 32 nt, Homo Sapiens
guggacauuuuaaaggccucuggauuuugcuc

SEQ ID NO: 43440 - RNA, 32 nt, Homo Sapiens
auuacaacugguuuuuuguuuuuguuuuguug

SEQ ID NO: 43441 - RNA, 32 nt, Homo Sapiens
gcuuaagaaaccgagaccacuucaccaaacag

SEQ ID NO: 43442 - RNA, 32 nt, Homo Sapiens
uuuacccuuccauuuuagccuuccacccagcu

SEQ ID NO: 43443 - RNA, 32 nt, Homo Sapiens
aagcauggccccagcauuugcucagcuucugg

SEQ ID NO: 43444 - RNA, 32 nt, Homo Sapiens
gcugaguggcaggacaggacuuggaccucgga

SEQ ID NO: 43445 - RNA, 32 nt, Homo Sapiens
gcuaacuuauuuuuauuuuuuauggagauggg

SEQ ID NO: 43446 - RNA, 32 nt, Homo Sapiens
ccaggauuugaaauaagacaggaauaaagagu

SEQ ID NO: 43447 - RNA, 32 nt, Homo Sapiens
gucaucucugagcucccugucacuggccugga

SEQ ID NO: 43448 - RNA, 32 nt, Homo Sapiens
ggaggagaacagccuucaucuccuccucuggu

SEQ ID NO: 43449 - RNA, 32 nt, Homo Sapiens
ccaucccaaacacagacgugaauggacagccc

SEQ ID NO: 43450 - RNA, 32 nt, Homo Sapiens
aaacucuucuuuucuuuuuauuauaaugacca

SEQ ID NO: 43451 - RNA, 32 nt, Homo Sapiens
cuaguuaauaaaucuuauucuaauggaacaua

SEQ ID NO: 43452 - RNA, 32 nt, Homo Sapiens
ucugacagucucaaauuuuucaucucuucaau

SEQ ID NO: 43453 - RNA, 32 nt, Homo Sapiens
gaugauaaaaauuguuuauauuguuaugauaa

SEQ ID NO: 43454 - RNA, 32 nt, Homo Sapiens
uagacaguugcaaauacauuauauugagggau

SEQ ID NO: 43455 - RNA, 32 nt, Homo Sapiens
ucugucuuuaggaugucuuaaauuauuagcag

SEQ ID NO: 43456 - RNA, 32 nt, Homo Sapiens
cacuucuguccucaucccagucgcgccggcgg

SEQ ID NO: 43457 - RNA, 32 nt, Homo Sapiens
ggaaugcaguugcaagcacagaugcugccacc

SEQ ID NO: 43458 - RNA, 32 nt, Homo Sapiens
aauguccuggaaaguuugcugucacaucucca

SEQ ID NO: 43459 - RNA, 32 nt, Homo Sapiens
ugaggcugcuucccuuuuccgguaggacgccc

SEQ ID NO: 43460 - RNA, 32 nt, Homo Sapiens
cgugacuauccugugcucuuccuagggagcug

SEQ ID NO: 43461 - RNA, 32 nt, Homo Sapiens
ggucgcagccgacgacgccgccgccagccuga

SEQ ID NO: 43462 - RNA, 32 nt, Homo Sapiens
agaccuuugucaaccuuaccaaguuccuuuau

SEQ ID NO: 43463 - RNA, 32 nt, Homo Sapiens
cugcucagggcucgcccccggcgugggcugcc

SEQ ID NO: 43464 - RNA, 32 nt, Homo Sapiens
uugagaaaaaaauuauaauuuugaauaaagac

SEQ ID NO: 43465 - RNA, 32 nt, Homo Sapiens
gaggagagaaaagacagggacuuugaaccuag

SEQ ID NO: 43466 - RNA, 32 nt, Homo Sapiens
uuucaaaaauuugcaugcaaaauauacacuca

SEQ ID NO: 43467 - RNA, 32 nt, Homo Sapiens
gauauugaaauaugaaauaguacaauauaaag

SEQ ID NO: 43468 - RNA, 32 nt, Homo Sapiens
gagaaauaaucauauucguaauuucaaaaguu

SEQ ID NO: 43469 - RNA, 32 nt, Homo Sapiens
gaggggacagagcugaggauuuccuggagugc

SEQ ID NO: 43470 - RNA, 32 nt, Homo Sapiens
caggcauucuuagcugagacaccaagaggugg

SEQ ID NO: 43471 - RNA, 32 nt, Homo Sapiens
acuuuucugucuuacaaagggauuguaaaaug

SEQ ID NO: 43472 - RNA, 32 nt, Homo Sapiens
cugcaaagacagaagcagaacaacuaguuugg

SEQ ID NO: 43473 - RNA, 32 nt, Homo Sapiens
ugaucaaaagggcuaugggaagggcagacccc

SEQ ID NO: 43474 - RNA, 32 nt, Homo Sapiens
cuaugugaaccauauccaacuacuuuuuugaa

SEQ ID NO: 43475 - RNA, 32 nt, Homo Sapiens
agcacauuuguuccuuuauaucuguuuacaaa

SEQ ID NO: 43476 - RNA, 32 nt, Homo Sapiens
agcgguugccgggaaacggcguggcuuccggg

SEQ ID NO: 43477 - RNA, 32 nt, Homo Sapiens
ugagcuguggaggaagcccuggugguaccaga

SEQ ID NO: 43478 - RNA, 32 nt, Homo Sapiens
uccaagugggcccuuccucaucuccaugcucu

SEQ ID NO: 43479 - RNA, 32 nt, Homo Sapiens
uacauggaauaauaaagaagacuuugaucuua

SEQ ID NO: 43480 - RNA, 32 nt, Homo Sapiens
guuagaagucaguauuucuucuaaucugaggc

SEQ ID NO: 43481 - RNA, 32 nt, Homo Sapiens
cuguuauaaacuaguauuuguuguuuagccaa

SEQ ID NO: 43482 - RNA, 32 nt, Homo Sapiens
agaggaggguggggcacagaccauagacggac

SEQ ID NO: 43483 - RNA, 32 nt, Homo Sapiens
cugcuuaauucugaaugacaauuauauccaca

SEQ ID NO: 43484 - RNA, 32 nt, Homo Sapiens
aaaagacaaaaauaaaaauuccuuuuuauucc

SEQ ID NO: 43485 - RNA, 32 nt, Homo Sapiens
uggcugggacgggugacagugugagugcaugu

SEQ ID NO: 43486 - RNA, 32 nt, Homo Sapiens
agcaggagaggagagccagagaaguaacaggg

SEQ ID NO: 43487 - RNA, 32 nt, Homo Sapiens
ggcucgugguggcaucagcagcagagacgaag

SEQ ID NO: 43488 - RNA, 32 nt, Homo Sapiens
ucauucugcaaacucccccuccccuccucugu

SEQ ID NO: 43489 - RNA, 32 nt, Homo Sapiens
ggaggagaugacuggggagcgggagcucgaga

SEQ ID NO: 43490 - RNA, 32 nt, Homo Sapiens
gaccgcuuacaccccuucuccacagcccggcc

SEQ ID NO: 43491 - RNA, 32 nt, Homo Sapiens
agacggggcucaucgggcaaugccuccacugg

SEQ ID NO: 43492 - RNA, 32 nt, Homo Sapiens
uggccgcuggacuccgcugccucccccaucuc

SEQ ID NO: 43493 - RNA, 32 nt, Homo Sapiens
ucacauugaugaugaugagugcagugggguga

SEQ ID NO: 43494 - RNA, 32 nt, Homo Sapiens
agcaaaauacuaguaaaccaaauccaucugca

SEQ ID NO: 43495 - RNA, 32 nt, Homo Sapiens
uccuguccacugugucacucuccaagugccag

SEQ ID NO: 43496 - RNA, 32 nt, Homo Sapiens
cccaggaccuauucaguggugcucucccaccc

SEQ ID NO: 43497 - RNA, 32 nt, Homo Sapiens
cugguagcuaugcuuuguguccuguugaggcc

SEQ ID NO: 43498 - RNA, 32 nt, Homo Sapiens
uguuuucuuuugcauuucauaucuuacauuua

SEQ ID NO: 43499 - RNA, 32 nt, Homo Sapiens
gaggggggccgcggcgcaaugucagagcagac

SEQ ID NO: 43500 - RNA, 32 nt, Homo Sapiens
gacaugcuccugcauacuccugggugucccag

SEQ ID NO: 43501 - RNA, 32 nt, Homo Sapiens
uauggagggaucagacagggcugggaacagcc

SEQ ID NO: 43502 - RNA, 32 nt, Homo Sapiens
agcaaauguagagaacagcaaaugauugaugc

SEQ ID NO: 43503 - RNA, 32 nt, Homo Sapiens
ccucccgccucccaggcaccuucggguccagg

SEQ ID NO: 43504 - RNA, 32 nt, Homo Sapiens
ucugcccugccacagaggggccccucauggcc

SEQ ID NO: 43505 - RNA, 32 nt, Homo Sapiens
agugaagaacagaguccauuuuccuuccuggg

SEQ ID NO: 43506 - RNA, 32 nt, Homo Sapiens
aagcuaacaaaguucaaguaaaaauuauuuuu

SEQ ID NO: 43507 - RNA, 32 nt, Homo Sapiens
uuucacuuaaacucuuauuacuguauagauua

SEQ ID NO: 43508 - RNA, 32 nt, Homo Sapiens
aaagccuuuuaaaauauauaucuuuauaaagu

SEQ ID NO: 43509 - RNA, 32 nt, Homo Sapiens
cggaaaguagagggggcgcagcuggggcggga

SEQ ID NO: 43510 - RNA, 32 nt, Homo Sapiens
cgaguggcuagcugggcagagcccugggggcg

SEQ ID NO: 43511 - RNA, 32 nt, Homo Sapiens
ggggugggaggggcugagauggcugcuggccc

SEQ ID NO: 43512 - RNA, 32 nt, Homo Sapiens
uuucuucuaguauuugcuucugaugaaugauu

SEQ ID NO: 43513 - RNA, 32 nt, Homo Sapiens
acagauuguagagauuaacauaaauuguucuu

SEQ ID NO: 43514 - RNA, 29 nt, Homo Sapiens
aaauauauguuuuaauaccacaaacacug

SEQ ID NO: 43515 - RNA, 32 nt, Homo Sapiens
uugaugcccagcugccaugcuccggccacuga

SEQ ID NO: 43516 - RNA, 32 nt, Homo Sapiens
ccacaccaccgccgccugcagaccucucccuu

SEQ ID NO: 43517 - RNA, 32 nt, Homo Sapiens
gaauucagacauuucagggguaagacuacuua

SEQ ID NO: 43518 - RNA, 29 nt, Homo Sapiens
ggugcguccugggguagaggcaaggaagu

SEQ ID NO: 43519 - RNA, 32 nt, Homo Sapiens
uaaaaagcaaaauaaacuugguuuacauuuaa

SEQ ID NO: 43520 - RNA, 32 nt, Homo Sapiens
ggaugacccgcggcgggggaggaggagauacc

SEQ ID NO: 43521 - RNA, 32 nt, Homo Sapiens
gagcucugcugagacucucaagggagccagug

SEQ ID NO: 43522 - RNA, 32 nt, Homo Sapiens
gcaccccaccaccagcagccaaggugagcaga

SEQ ID NO: 43523 - RNA, 32 nt, Homo Sapiens
gcuauuccccugcuccuccaccuuucaauccc

SEQ ID NO: 43524 - RNA, 32 nt, Homo Sapiens
gagcaaagggcugagagaagggagcugcugug

SEQ ID NO: 43525 - RNA, 32 nt, Homo Sapiens
cuaauuccuccugaccacaaaaagcacuuaua

SEQ ID NO: 43526 - RNA, 32 nt, Homo Sapiens
cacuguauuuaacuuaaucaaaugugguaugg

SEQ ID NO: 43527 - RNA, 32 nt, Homo Sapiens
cucugugcauguaggccuggaaccugaccaau

SEQ ID NO: 43528 - RNA, 32 nt, Homo Sapiens
gcugcuuugacaaaaugacuggcuccugacuu

SEQ ID NO: 43529 - RNA, 32 nt, Homo Sapiens
agcgugggggguggaggguggcgaggugcgga

SEQ ID NO: 43530 - RNA, 32 nt, Homo Sapiens
acgcuggcucuccacaccccuccuguuccaga

SEQ ID NO: 43531 - RNA, 32 nt, Homo Sapiens
cuuuaaauccgaaggcgaacgaauugauucug

SEQ ID NO: 43532 - RNA, 32 nt, Homo Sapiens
aaacuacaggacuauuugacaucauaauaaaa

SEQ ID NO: 43533 - RNA, 32 nt, Homo Sapiens
gacuaggcaacgcuagcaucuguuucugggag

SEQ ID NO: 43534 - RNA, 32 nt, Homo Sapiens
cuccgagcccucgccuggcagcucacucugga

SEQ ID NO: 43535 - RNA, 32 nt, Homo Sapiens
ggugcaucucaauaaacuuggauuuuggccag

SEQ ID NO: 43536 - RNA, 32 nt, Homo Sapiens
ucuacuaaaaagacaaaaaauuagcugggcgu

SEQ ID NO: 43537 - RNA, 32 nt, Homo Sapiens
ccaguucugaccauggacucgcagccaucggc

SEQ ID NO: 43538 - RNA, 32 nt, Homo Sapiens
uagcguggacugggcuggccccggaagccccc

SEQ ID NO: 43539 - RNA, 32 nt, Homo Sapiens
cuuuuguuauuaggagaaggugaggcaugggc

SEQ ID NO: 43540 - RNA, 32 nt, Homo Sapiens
ucuuuugaagcuugugcugagguuuuagcuuu

SEQ ID NO: 43541 - RNA, 32 nt, Homo Sapiens
ggguuggcuucaacccggggcuuccaugguuu

SEQ ID NO: 43542 - RNA, 32 nt, Homo Sapiens
auaacacuaaagauuauuaauguugguuuugu

SEQ ID NO: 43543 - RNA, 32 nt, Homo Sapiens
caccccugccccaccuggcuccuuucuacucc

SEQ ID NO: 43544 - RNA, 32 nt, Homo Sapiens
cagaaugcaaaauaaaacuugcagugaaugaa

SEQ ID NO: 43545 - RNA, 32 nt, Homo Sapiens
gaagcagccgcucaugggcccggagcagcccu

SEQ ID NO: 43546 - RNA, 32 nt, Homo Sapiens
cugugcagccugggcugcugucauugcccucc

SEQ ID NO: 43547 - RNA, 32 nt, Homo Sapiens
ccuaaccuaccuuguuguuuucucauauuaag

SEQ ID NO: 43548 - RNA, 32 nt, Homo Sapiens
acagcgccaccucuugucagugcucggcugua

SEQ ID NO: 43549 - RNA, 32 nt, Homo Sapiens
gaaagauaaacuaaguuuuaauguuauuuuuu

SEQ ID NO: 43550 - RNA, 31 nt, Homo Sapiens
gccgccccacccuaagcuuauuaugcaaaug

SEQ ID NO: 43551 - RNA, 32 nt, Homo Sapiens
cucuuuugaaaauguaaaauaaaaccaaaaau

SEQ ID NO: 43552 - RNA, 32 nt, Homo Sapiens
uaagcccccuucccuuccacuaugagcugcug

SEQ ID NO: 43553 - RNA, 32 nt, Homo Sapiens
gaaacaaccucaaagaccucaggccgccugug

SEQ ID NO: 43554 - RNA, 32 nt, Homo Sapiens
aucggaguuuuucacucggagccccggacccu

SEQ ID NO: 43555 - RNA, 32 nt, Homo Sapiens
augauaggucacuacgugauuguuagcauaua

SEQ ID NO: 43556 - RNA, 32 nt, Homo Sapiens
uuccuuaaaaauaaagaugguuuaaucacuac

SEQ ID NO: 43557 - RNA, 32 nt, Homo Sapiens
guauuucaguguaucugcaucuuugugacuau

SEQ ID NO: 43558 - RNA, 31 nt, Homo Sapiens
cugccugccgcugucugaggaguccacccga

SEQ ID NO: 43559 - RNA, 32 nt, Homo Sapiens
gagguggugcuucagaugagacuugaaggagc

SEQ ID NO: 43560 - RNA, 32 nt, Homo Sapiens
cgcugccgcugcaguggcucgugggugagagc

SEQ ID NO: 43561 - RNA, 32 nt, Homo Sapiens
gaggcugcagugagccgagauugugccacugc

SEQ ID NO: 43562 - RNA, 32 nt, Homo Sapiens
cauuccuuacacaagugccuaaagagagugau

SEQ ID NO: 43563 - RNA, 32 nt, Homo Sapiens
agcuccagcauaccccaccaccuucuccuuuc

SEQ ID NO: 43564 - RNA, 32 nt, Homo Sapiens
caugugggagcauuauagauuaugcagaagau

SEQ ID NO: 43565 - RNA, 30 nt, Homo Sapiens
ugcaucuccggcuagccgccggcgccgccc

SEQ ID NO: 43566 - RNA, 32 nt, Homo Sapiens
agcccugcccucugggguggcgggggaagcgu

SEQ ID NO: 43567 - RNA, 32 nt, Homo Sapiens
auaauuuguaauuauguagauucuuaauucua

SEQ ID NO: 43568 - RNA, 32 nt, Homo Sapiens
cgaggaggagggcgcgggaggcggaggaugcc

SEQ ID NO: 43569 - RNA, 32 nt, Homo Sapiens
agcggcaggaggaggaaggcgcacagcgggug

SEQ ID NO: 43570 - RNA, 32 nt, Homo Sapiens
aacauagaggugccaaaggaacaaagacauaa

SEQ ID NO: 43571 - RNA, 32 nt, Homo Sapiens
ugcuuccccacgagcagcaggcaacggcgucc

SEQ ID NO: 43572 - RNA, 32 nt, Homo Sapiens
uccacacacuaggaaauagaacuguguuaaua

SEQ ID NO: 43573 - RNA, 32 nt, Homo Sapiens
cucggaggggccagggcgagggcgcgcucccc

SEQ ID NO: 43574 - RNA, 32 nt, Homo Sapiens
ggucugaccccucccuccucccucuggaggug

SEQ ID NO: 43575 - RNA, 32 nt, Homo Sapiens
uuuacaaucuucuucaaauauuuuuucugauc

SEQ ID NO: 43576 - RNA, 32 nt, Homo Sapiens
cuaacacuuuuuaaauugauaauuuuguaaaa

SEQ ID NO: 43577 - RNA, 32 nt, Homo Sapiens
gaaauggcucugccuuaggcacuucucgggaa

SEQ ID NO: 43578 - RNA, 32 nt, Homo Sapiens
ucccuugugagccccaggguuaucaguugcug

SEQ ID NO: 43579 - RNA, 32 nt, Homo Sapiens
gccucuuggacuuuuuuguguguuuaggugcc

SEQ ID NO: 43580 - RNA, 29 nt, Homo Sapiens
agugucccgacggcucggacgagggcccc

SEQ ID NO: 43581 - RNA, 32 nt, Homo Sapiens
ccaauugaccaggagcucuaucuguuugauac

SEQ ID NO: 43582 - RNA, 32 nt, Homo Sapiens
accucugccucccagguucaagcgagucuccu

SEQ ID NO: 43583 - RNA, 32 nt, Homo Sapiens
guaucagcccuuggugauaggcacauuuuuua

SEQ ID NO: 43584 - RNA, 32 nt, Homo Sapiens
aaaugcuucuaaaaggcauugugcauauugac

SEQ ID NO: 43585 - RNA, 32 nt, Homo Sapiens
gggagaagaugaugacuaguggaauaaccuau

SEQ ID NO: 43586 - RNA, 32 nt, Homo Sapiens
ccuuuuuuuuucugcuguuuuuuauggauggg

SEQ ID NO: 43587 - RNA, 32 nt, Homo Sapiens
gcgcgacuucugagucucaugaccacucaacc

SEQ ID NO: 43588 - RNA, 32 nt, Homo Sapiens
ucugugggaccccuaacuuccuggacccugag

SEQ ID NO: 43589 - RNA, 32 nt, Homo Sapiens
cucugcucagcaccccagccggggcucuggac

SEQ ID NO: 43590 - RNA, 32 nt, Homo Sapiens
gugccaagagaggcauuccagaaggacugagg

SEQ ID NO: 43591 - RNA, 32 nt, Homo Sapiens
uuuaagggaacaaaaaaugguuaaaugagguc

SEQ ID NO: 43592 - RNA, 32 nt, Homo Sapiens
uuuuuuauaguuuaaaaguuaaagugccucau

SEQ ID NO: 43593 - RNA, 31 nt, Homo Sapiens
ugguauaaauuucaagcuggauaugucuaau

SEQ ID NO: 43594 - RNA, 32 nt, Homo Sapiens
ccugccaaacuccaggcucagaugaugucaca

SEQ ID NO: 43595 - RNA, 32 nt, Homo Sapiens
ccagguucaaggaauuccugugccucagcuuc

SEQ ID NO: 43596 - RNA, 32 nt, Homo Sapiens
agcggacccgagugggcgaccaggcgcuugcc

SEQ ID NO: 43597 - RNA, 32 nt, Homo Sapiens
uucgcacauccauuucuguuuaugccuggggu

SEQ ID NO: 43598 - RNA, 32 nt, Homo Sapiens
cacugcccccuccccauccccagcccagccga

SEQ ID NO: 43599 - RNA, 32 nt, Homo Sapiens
uauguacauaucuauucuaauuaaauuuaaca

SEQ ID NO: 43600 - RNA, 32 nt, Homo Sapiens
gugcaucugaaauuuucagguacaaauuugua

SEQ ID NO: 43601 - RNA, 32 nt, Homo Sapiens
ugucaaaagagauuaacauuugagucgguggg

SEQ ID NO: 43602 - RNA, 32 nt, Homo Sapiens
auacccacuuuugggauagggugcuggcagcu

SEQ ID NO: 43603 - RNA, 32 nt, Homo Sapiens
ggaaacacaaaacaaacagugauuguacagca

SEQ ID NO: 43604 - RNA, 29 nt, Homo Sapiens
uauuuuuuccuaguaaacuuugaaaagag

SEQ ID NO: 43605 - RNA, 32 nt, Homo Sapiens
ugcucacuuaccccaggcccagcccuucggac

SEQ ID NO: 43606 - RNA, 32 nt, Homo Sapiens
gccucucggacccagggcugcacuuccaaugc

SEQ ID NO: 43607 - RNA, 32 nt, Homo Sapiens
gacugaggucugacaauccuagaagcugaagu

SEQ ID NO: 43608 - RNA, 32 nt, Homo Sapiens
ccucuccuccaagagguccccucagcaucaag

SEQ ID NO: 43609 - RNA, 32 nt, Homo Sapiens
guuuccaggaggcguuuggggguggggaaggc

SEQ ID NO: 43610 - RNA, 32 nt, Homo Sapiens
cugaguagcugagacuacagcugugcgccacc

SEQ ID NO: 43611 - RNA, 32 nt, Homo Sapiens
auucuauugcuaaagaaauccuaaccuacuau

SEQ ID NO: 43612 - RNA, 32 nt, Homo Sapiens
ccuauaguucuaugaauuuuaguagauuuaau

SEQ ID NO: 43613 - RNA, 32 nt, Homo Sapiens
uucaaagcucuuucgagauucagguucucaau

SEQ ID NO: 43614 - RNA, 32 nt, Homo Sapiens
auuuguugacugaauaaaugaaugcacaacca

SEQ ID NO: 43615 - RNA, 32 nt, Homo Sapiens
uugaguuugagaggcgacacggcggcggcgcc

SEQ ID NO: 43616 - RNA, 32 nt, Homo Sapiens
ggcugguuccacuuacagcacuugaguuuacc

SEQ ID NO: 43617 - RNA, 32 nt, Homo Sapiens
cacaccuguaaucucagcauuuugggaggcca

SEQ ID NO: 43618 - RNA, 32 nt, Homo Sapiens
uaaauucguugagagcuggaauccauuuucaa

SEQ ID NO: 43619 - RNA, 32 nt, Homo Sapiens
uugugcaccucuaaauguguuuggaauugugu

SEQ ID NO: 43620 - RNA, 32 nt, Homo Sapiens
uuguuuugauuucuguuguggugcagccagcu

SEQ ID NO: 43621 - RNA, 32 nt, Homo Sapiens
guggcaauaaauuuaucugauguugacuugag

SEQ ID NO: 43622 - RNA, 32 nt, Homo Sapiens
gugacauguaggcacuccaugggggacagcug

SEQ ID NO: 43623 - RNA, 32 nt, Homo Sapiens
cuguugcaagagugaauguaaaaaauaguugu

SEQ ID NO: 43624 - RNA, 32 nt, Homo Sapiens
aauuguuuucuuuuuuaagugaauucaacaau

SEQ ID NO: 43625 - RNA, 32 nt, Homo Sapiens
auucuagcaggggacaggauuggcucagauga

SEQ ID NO: 43626 - RNA, 32 nt, Homo Sapiens
ccuacgaugacgucucuguguucgugauuccc

SEQ ID NO: 43627 - RNA, 32 nt, Homo Sapiens
cuaauaaacuaaaaagaaaguugaaauaauaa

SEQ ID NO: 43628 - RNA, 32 nt, Homo Sapiens
uucagggaaggacugaugggggugucauggau

SEQ ID NO: 43629 - RNA, 29 nt, Homo Sapiens
uguugugaccggcgggggacgccgguggu

SEQ ID NO: 43630 - RNA, 32 nt, Homo Sapiens
gacccucugggcugcuguggcuccucugcccc

SEQ ID NO: 43631 - RNA, 32 nt, Homo Sapiens
uacucagucacaauuuaacaaacagcuauaua

SEQ ID NO: 43632 - RNA, 32 nt, Homo Sapiens
cccuuggaauccacugaaauccuggguaggga

SEQ ID NO: 43633 - RNA, 32 nt, Homo Sapiens
agaauuugaaagaugcuuguaaugugaguuuu

SEQ ID NO: 43634 - RNA, 31 nt, Homo Sapiens
ugaagucucaaugauaacugggaaauguuuu

SEQ ID NO: 43635 - RNA, 32 nt, Homo Sapiens
ccuguggaaaccgacagcgagagugaguuucc

SEQ ID NO: 43636 - RNA, 32 nt, Homo Sapiens
gggaagggguucuaagucaagagccuuucagu

SEQ ID NO: 43637 - RNA, 32 nt, Homo Sapiens
gugccggcaagauggcugcgcccgagaagaug

SEQ ID NO: 43638 - RNA, 32 nt, Homo Sapiens
aguuguauugucauuggugccucuaucacaug

SEQ ID NO: 43639 - RNA, 32 nt, Homo Sapiens
aauuacagugccuaaaauaagaauagaacaac

SEQ ID NO: 43640 - RNA, 32 nt, Homo Sapiens
uuuacagaaguuucuucaguaggcagacgaag

SEQ ID NO: 43641 - RNA, 32 nt, Homo Sapiens
uucugccuucucagagugcccuugcugcaccc

SEQ ID NO: 43642 - RNA, 32 nt, Homo Sapiens
agguauuggaugugaacacacuuuucgacuga

SEQ ID NO: 43643 - RNA, 32 nt, Homo Sapiens
cagacuggcccacuucccuccuccccagggau

SEQ ID NO: 43644 - RNA, 32 nt, Homo Sapiens
cuggggagcagaauucuugucaucuaugaggg

SEQ ID NO: 43645 - RNA, 32 nt, Homo Sapiens
cucacccaggagcccuggaucccggcgcggga

SEQ ID NO: 43646 - RNA, 31 nt, Homo Sapiens
ucauauuuucagagaaaguuaccuaaucccu

SEQ ID NO: 43647 - RNA, 32 nt, Homo Sapiens
cucaccugcaccgcccgaaaccgucacggcac

SEQ ID NO: 43648 - RNA, 32 nt, Homo Sapiens
uaauugcauuuuaaguuuuccuuuauguagaa

SEQ ID NO: 43649 - RNA, 32 nt, Homo Sapiens
auuuccauauccuagauggaaacccucaugcu

SEQ ID NO: 43650 - RNA, 32 nt, Homo Sapiens
uggggacugccagagauuagguggcaguugcc

SEQ ID NO: 43651 - RNA, 32 nt, Homo Sapiens
cgaccagggaggaggaaucggcggacgcggga

SEQ ID NO: 43652 - RNA, 32 nt, Homo Sapiens
ccaccuuccuuccaguccuugcggcgaccgag

SEQ ID NO: 43653 - RNA, 32 nt, Homo Sapiens
guccagagaagcugagauauggcauauaauag

SEQ ID NO: 43654 - RNA, 32 nt, Homo Sapiens
aauagaauuuugcugcagaccaaaaucauucu

SEQ ID NO: 43655 - RNA, 30 nt, Homo Sapiens
cucggccuggacugggagcccccggccccg

SEQ ID NO: 43656 - RNA, 32 nt, Homo Sapiens
aaccuuuuauuuuuauuucugacucuuauuuu

SEQ ID NO: 43657 - RNA, 32 nt, Homo Sapiens
uaauuuguuuuuauuuccuuuauuuuuagcug

SEQ ID NO: 43658 - RNA, 32 nt, Homo Sapiens
uccucaagggcaggggcuccuggccaucuuac

SEQ ID NO: 43659 - RNA, 29 nt, Homo Sapiens
uaaaauauauguauuugagcuggggaauu

SEQ ID NO: 43660 - RNA, 32 nt, Homo Sapiens
uggccugugugagcccggcccacugaccaccc

SEQ ID NO: 43661 - RNA, 32 nt, Homo Sapiens
gacuauucucccuuggaucacuguuauugaaa

SEQ ID NO: 43662 - RNA, 32 nt, Homo Sapiens
gcuuucugaaacaaagacucauuuugaagaug

SEQ ID NO: 43663 - RNA, 32 nt, Homo Sapiens
agaaacaccguaagugucuggaaggcaaaaag

SEQ ID NO: 43664 - RNA, 32 nt, Homo Sapiens
ugccccaccugccgcgcacgcuucugcauccu

SEQ ID NO: 43665 - RNA, 32 nt, Homo Sapiens
guguagaugaggggcgggggacgggcgccagg

SEQ ID NO: 43666 - RNA, 32 nt, Homo Sapiens
gcaguguauacucuuuuucaguauucaguaaa

SEQ ID NO: 43667 - RNA, 32 nt, Homo Sapiens
caccugaccuagaaugccugcccgcuaucccu

SEQ ID NO: 43668 - RNA, 32 nt, Homo Sapiens
aauuauacaucaugcuucucauuuuuuaaacu

SEQ ID NO: 43669 - RNA, 31 nt, Homo Sapiens
gggucucagacagcaacuugaguuaaagcug

SEQ ID NO: 43670 - RNA, 32 nt, Homo Sapiens
agaacaaaagacaacugaaagaagcuguugug

SEQ ID NO: 43671 - RNA, 32 nt, Homo Sapiens
cuguggagggagaggagagcccagucauuugc

SEQ ID NO: 43672 - RNA, 32 nt, Homo Sapiens
gucagauaaugagaaugguuauaauaccaaug

SEQ ID NO: 43673 - RNA, 32 nt, Homo Sapiens
aacugcggacgcucccuccacccccugcgcaa

SEQ ID NO: 43674 - RNA, 32 nt, Homo Sapiens
uuccgggcugccaggcagcugcuguggcucca

SEQ ID NO: 43675 - RNA, 32 nt, Homo Sapiens
gucuuugucuucccugaacgugucuccacucu

SEQ ID NO: 43676 - RNA, 32 nt, Homo Sapiens
uaagcuguacugaacuaaaucuguggaaugca

SEQ ID NO: 43677 - RNA, 32 nt, Homo Sapiens
aaaggagauaaugugacacacauuuacccaua

SEQ ID NO: 43678 - RNA, 32 nt, Homo Sapiens
augaagacccugcagucauuggagcacccggg

SEQ ID NO: 43679 - RNA, 31 nt, Homo Sapiens
auugugacaaauugaucacuuguguacgaaa

SEQ ID NO: 43680 - RNA, 32 nt, Homo Sapiens
uuuauugaccaguacuugauaaucucucugua

SEQ ID NO: 43681 - RNA, 32 nt, Homo Sapiens
gcagggcucccacagagacaaggagggcacag

SEQ ID NO: 43682 - RNA, 32 nt, Homo Sapiens
gugaaauggaucccacuaauuaugacagaaau

SEQ ID NO: 43683 - RNA, 32 nt, Homo Sapiens
ggacagccugagaagggacauccaccaagacc

SEQ ID NO: 43684 - RNA, 32 nt, Homo Sapiens
guccugucccacucaggucuguacuuagggca

SEQ ID NO: 43685 - RNA, 32 nt, Homo Sapiens
uuaagccaauuccauuuauagaccaccuccag

SEQ ID NO: 43686 - RNA, 32 nt, Homo Sapiens
cagaugccuucccagacuacccuugucucacu

SEQ ID NO: 43687 - RNA, 29 nt, Homo Sapiens
accaaugcagugccggcucccgcggggcc

SEQ ID NO: 43688 - RNA, 32 nt, Homo Sapiens
uucugaauuucugaauuucuuuuauaauuaga

SEQ ID NO: 43689 - RNA, 32 nt, Homo Sapiens
ccucaugucacggcccgggccuggcuucccag

SEQ ID NO: 43690 - RNA, 32 nt, Homo Sapiens
auuuugauucagaauguguuauuugucacaaa

SEQ ID NO: 43691 - RNA, 32 nt, Homo Sapiens
ccaguuuguuaugaaauaauuaccuugaagac

SEQ ID NO: 43692 - RNA, 32 nt, Homo Sapiens
ccugugccacugggcuuuuggcguucugcaca

SEQ ID NO: 43693 - RNA, 32 nt, Homo Sapiens
gggaaaggaaauggcauugcugcuuucaacca

SEQ ID NO: 43694 - RNA, 32 nt, Homo Sapiens
guugaaauuacauuauuuaauuacagacuucc

SEQ ID NO: 43695 - RNA, 32 nt, Homo Sapiens
gaaguuucaguuguccuuaaauuuguauaacg

SEQ ID NO: 43696 - RNA, 32 nt, Homo Sapiens
ccagcgcagucaggggcggggcugggacccag

SEQ ID NO: 43697 - RNA, 32 nt, Homo Sapiens
ucugugaagaaaugaaauaaaaugguauuuag

SEQ ID NO: 43698 - RNA, 32 nt, Homo Sapiens
uucccccuaaaaaugguaaaucugaucauauc

SEQ ID NO: 43699 - RNA, 32 nt, Homo Sapiens
augggaagggccgggagcgcgcggcgcgggag

SEQ ID NO: 43700 - RNA, 32 nt, Homo Sapiens
guaguucuaccagaaucucccagguuauaauu

SEQ ID NO: 43701 - RNA, 32 nt, Homo Sapiens
gaagaucaaacuccagcuccagccucauuugc

SEQ ID NO: 43702 - RNA, 32 nt, Homo Sapiens
caggguaccugaaagagccuucugggaguuag

SEQ ID NO: 43703 - RNA, 32 nt, Homo Sapiens
auggguuauaaaaaacaaaaccacaaauaucu

SEQ ID NO: 43704 - RNA, 32 nt, Homo Sapiens
cugcugcccccuccccccaggugggucccccu

SEQ ID NO: 43705 - RNA, 32 nt, Homo Sapiens
acugacgcuggagaugcaaggugcuggugggu

SEQ ID NO: 43706 - RNA, 32 nt, Homo Sapiens
cacggggcuguuuccuccuccucccccagaug

SEQ ID NO: 43707 - RNA, 32 nt, Homo Sapiens
gcuuuuaagaaacacggugauaucuuugaggg

SEQ ID NO: 43708 - RNA, 32 nt, Homo Sapiens
caucacgagacccgcccuccccccaccaaucu

SEQ ID NO: 43709 - RNA, 32 nt, Homo Sapiens
acgcaacucugcaacucuguagauuuccaccu

SEQ ID NO: 43710 - RNA, 32 nt, Homo Sapiens
ugcaauuuauugauuagugaguaagauacugu

SEQ ID NO: 43711 - RNA, 32 nt, Homo Sapiens
aguaccugcuuucgccagcaugacucaugcuu

SEQ ID NO: 43712 - RNA, 32 nt, Homo Sapiens
ccgaguggagugggaaaggcauuuugauuugc

SEQ ID NO: 43713 - RNA, 32 nt, Homo Sapiens
aaccggcucccucgccagucccgggggccugc

SEQ ID NO: 43714 - RNA, 32 nt, Homo Sapiens
caucagcaaccuggggcugugcaccuuccugg

SEQ ID NO: 43715 - RNA, 30 nt, Homo Sapiens
caagcaguaggugcugcaggcuuuguugag

SEQ ID NO: 43716 - RNA, 32 nt, Homo Sapiens
uaugggguauaaaaugauguugugauuuuuca

SEQ ID NO: 43717 - RNA, 32 nt, Homo Sapiens
uguggcaggaggacaggaaugcaguggaacca

SEQ ID NO: 43718 - RNA, 32 nt, Homo Sapiens
aaugacuugucugaaauuuguaaagcuuaaua

SEQ ID NO: 43719 - RNA, 32 nt, Homo Sapiens
aauguuacugguuuuaucuacuuguuuauuuu

SEQ ID NO: 43720 - RNA, 32 nt, Homo Sapiens
auccuauuuaagacaaauucuguuaaucaaca

SEQ ID NO: 43721 - RNA, 32 nt, Homo Sapiens
ucuaacacuagucugugugcugugguuccugg

SEQ ID NO: 43722 - RNA, 32 nt, Homo Sapiens
aaguaagguggcuucccugcucucagugaagc

SEQ ID NO: 43723 - RNA, 32 nt, Homo Sapiens
ggugcugccgcucgccacggacccucugcccu

SEQ ID NO: 43724 - RNA, 32 nt, Homo Sapiens
caaggaggcagacagugaucugguguggggag

SEQ ID NO: 43725 - RNA, 32 nt, Homo Sapiens
gcggccgaguccaucuccugggaaauggggcg

SEQ ID NO: 43726 - RNA, 32 nt, Homo Sapiens
ggcaacuuuucaacauggagugccaaacugcu

SEQ ID NO: 43727 - RNA, 32 nt, Homo Sapiens
gagcccgugacaccggccccaggcccuguaga

SEQ ID NO: 43728 - RNA, 32 nt, Homo Sapiens
uuuucccauuguucuaucaucucuaggaccgg

SEQ ID NO: 43729 - RNA, 32 nt, Homo Sapiens
uuuucccaacuuuaaccuuaccagcauguuaa

SEQ ID NO: 43730 - RNA, 32 nt, Homo Sapiens
aacuuccccguaugucccacuuucccacacuu

SEQ ID NO: 43731 - RNA, 32 nt, Homo Sapiens
agcacauugcugaccuaggccaguccuggggc

SEQ ID NO: 43732 - RNA, 32 nt, Homo Sapiens
ugccccgcccccgagacggagucuuacucugu

SEQ ID NO: 43733 - RNA, 32 nt, Homo Sapiens
uaagagggauguacuguaaauaaacaguauuu

SEQ ID NO: 43734 - RNA, 32 nt, Homo Sapiens
uucuagaagggucuauacuuguccuugucuuu

SEQ ID NO: 43735 - RNA, 32 nt, Homo Sapiens
ccacugaccugcuccauucagaacaagacugg

SEQ ID NO: 43736 - RNA, 31 nt, Homo Sapiens
aggacggagcgcauugccucgagccgacccc

SEQ ID NO: 43737 - RNA, 32 nt, Homo Sapiens
uuuaaguagauggggggacacggugaacuggc

SEQ ID NO: 43738 - RNA, 32 nt, Homo Sapiens
gggagagaaaaaaggaugguuugggcauauug

SEQ ID NO: 43739 - RNA, 32 nt, Homo Sapiens
ccgcacggcaagcguggaccgcggggggcgcc

SEQ ID NO: 43740 - RNA, 32 nt, Homo Sapiens
gugucuccaagcagcgacgccuuuuucguuca

SEQ ID NO: 43741 - RNA, 32 nt, Homo Sapiens
auuggcggcgggggcggggggucgaugucuca

SEQ ID NO: 43742 - RNA, 32 nt, Homo Sapiens
uucuacauuuugcugacagauaacuaaccgau

SEQ ID NO: 43743 - RNA, 32 nt, Homo Sapiens
gguguggugggaaggaaacagagagggguuga

SEQ ID NO: 43744 - RNA, 32 nt, Homo Sapiens
gggccugcuucuccccagcagugcuugcaggg

SEQ ID NO: 43745 - RNA, 32 nt, Homo Sapiens
uaucuuaauguuuggguuugucuuuguuuugu

SEQ ID NO: 43746 - RNA, 30 nt, Homo Sapiens
gcauugaauauccauccacacuuugguuuu

SEQ ID NO: 43747 - RNA, 32 nt, Homo Sapiens
gccuuggcggcuuaagccugcugcuuuggcag

SEQ ID NO: 43748 - RNA, 32 nt, Homo Sapiens
auacguagauccuggggucuuucuaggacugu

SEQ ID NO: 43749 - RNA, 31 nt, Homo Sapiens
gggcugcugggcuggcgcggaguccacccug

SEQ ID NO: 43750 - RNA, 32 nt, Homo Sapiens
uccaggauuacaugucaggaaacuacaagagg

SEQ ID NO: 43751 - RNA, 32 nt, Homo Sapiens
gcuccaaucccaccccagccuccucagccccc

SEQ ID NO: 43752 - RNA, 32 nt, Homo Sapiens
agcagaugagggcccugcccccgccccacuga

SEQ ID NO: 43753 - RNA, 32 nt, Homo Sapiens
augacuucaguacagauuauguguacagaaca

SEQ ID NO: 43754 - RNA, 32 nt, Homo Sapiens
gcgcggggacagggcugcugagcagccuccgc

SEQ ID NO: 43755 - RNA, 32 nt, Homo Sapiens
aaaugcucauggaguucagugaagauuaaaug

SEQ ID NO: 43756 - RNA, 32 nt, Homo Sapiens
uuuacccgcccccacucccgccccacacgcgc

SEQ ID NO: 43757 - RNA, 32 nt, Homo Sapiens
caaggccaaagcgagaaaaucuuacugcgcac

SEQ ID NO: 43758 - RNA, 32 nt, Homo Sapiens
uaauuucuuucugcuuagaaucuaaagaugug

SEQ ID NO: 43759 - RNA, 32 nt, Homo Sapiens
uauuguguuucaugcauucagaaaugauuguu

SEQ ID NO: 43760 - RNA, 32 nt, Homo Sapiens
aggacagauacucaggcuaauaugaggauaug

SEQ ID NO: 43761 - RNA, 32 nt, Homo Sapiens
auuaguauuaaacuucacuaaaaaguaaacca

SEQ ID NO: 43762 - RNA, 32 nt, Homo Sapiens
uuucucuagcguaauucuuguuuauaauuugg

SEQ ID NO: 43763 - RNA, 32 nt, Homo Sapiens
uuaugguucuuuugauaaauucuauuuaguag

SEQ ID NO: 43764 - RNA, 32 nt, Homo Sapiens
cuccugccauguuugccacccucccccacuug

SEQ ID NO: 43765 - RNA, 32 nt, Homo Sapiens
auugaaaauaccaaaagauguaucauuuuuau

SEQ ID NO: 43766 - RNA, 32 nt, Homo Sapiens
acggagcgggaggugagcgucuggcgcagguc

SEQ ID NO: 43767 - RNA, 32 nt, Homo Sapiens
ugugcacagacagguacugagcugacagacug

SEQ ID NO: 43768 - RNA, 32 nt, Homo Sapiens
ucauuuaauguuugcuuuaugcauuuccccug

SEQ ID NO: 43769 - RNA, 32 nt, Homo Sapiens
ucuuagaagggagaggcugcgggcuccguggg

SEQ ID NO: 43770 - RNA, 32 nt, Homo Sapiens
gcgcugcugggcgggggcgggagcuggagccg

SEQ ID NO: 43771 - RNA, 32 nt, Homo Sapiens
ccuggcagucucaagcaguucaucuucuuggu

SEQ ID NO: 43772 - RNA, 32 nt, Homo Sapiens
gccgcuucccucgccgccgccccgccagcaug

SEQ ID NO: 43773 - RNA, 32 nt, Homo Sapiens
uuugcauugucuuauuguauugucuuuucaaa

SEQ ID NO: 43774 - RNA, 32 nt, Homo Sapiens
uuggcaaacaaagaaaaucaacugggaaaaug

SEQ ID NO: 43775 - RNA, 32 nt, Homo Sapiens
aaccggcaucgccgccgccggagccgcagcga

SEQ ID NO: 43776 - RNA, 32 nt, Homo Sapiens
uuauagcugaaauaaacuuuggagcuuaucuu

SEQ ID NO: 43777 - RNA, 32 nt, Homo Sapiens
ugucuuugcuaccugaacgcaccacccucugg

SEQ ID NO: 43778 - RNA, 32 nt, Homo Sapiens
uggacagguguuggguugaccccucuucugca

SEQ ID NO: 43779 - RNA, 32 nt, Homo Sapiens
ggucgcaggcgggcgugcguggagcgggggcc

SEQ ID NO: 43780 - RNA, 32 nt, Homo Sapiens
cauauucccuaccuguuuuauuucauagguac

SEQ ID NO: 43781 - RNA, 32 nt, Homo Sapiens
ggguugccccacugugcuuguaucugcacucu

SEQ ID NO: 43782 - RNA, 32 nt, Homo Sapiens
ggcuacagcucuugcugucagauacgcaucca

SEQ ID NO: 43783 - RNA, 32 nt, Homo Sapiens
ugccccucccagaccucuguccuuccaccaau

SEQ ID NO: 43784 - RNA, 32 nt, Homo Sapiens
gaacaaaagggaggaugaacauuggggaauaa

SEQ ID NO: 43785 - RNA, 32 nt, Homo Sapiens
ggccugaggagaggggaccggcggcggcggca

SEQ ID NO: 43786 - RNA, 32 nt, Homo Sapiens
acuuuauaggcagucuucugcagacuuaacau

SEQ ID NO: 43787 - RNA, 32 nt, Homo Sapiens
cucaacccacaccaggacccccagauaacacc

SEQ ID NO: 43788 - RNA, 32 nt, Homo Sapiens
ugccuggccaggggcugcugacccacugguuc

SEQ ID NO: 43789 - RNA, 31 nt, Homo Sapiens
aggccccagggagccaccugaguggagcuca

SEQ ID NO: 43790 - RNA, 32 nt, Homo Sapiens
guucacugcagccuccaccuccccgguucaag

SEQ ID NO: 43791 - RNA, 32 nt, Homo Sapiens
gcgucgcgcgaaggcuaagggaguguggcggg

SEQ ID NO: 43792 - RNA, 31 nt, Homo Sapiens
agugaggagccccucugcccagcagccaccc

SEQ ID NO: 43793 - RNA, 31 nt, Homo Sapiens
aguaaggagccccucugcccagcagccgccc

SEQ ID NO: 43794 - RNA, 32 nt, Homo Sapiens
uaucugcaagguggcaagcaguucuuuucagc

SEQ ID NO: 43795 - RNA, 32 nt, Homo Sapiens
uaugaauacaaauuauuucucaaagauuuaua

SEQ ID NO: 43796 - RNA, 32 nt, Homo Sapiens
cuuuuuaauaagacauagcagaauuccuuagg

SEQ ID NO: 43797 - RNA, 32 nt, Homo Sapiens
aucacuugggagcuuuggagaaaauagcagua

SEQ ID NO: 43798 - RNA, 32 nt, Homo Sapiens
auugacaauauauccaguccaauauaaguaug

SEQ ID NO: 43799 - RNA, 32 nt, Homo Sapiens
ggguggucuccaugccugccacccuggcaucg

SEQ ID NO: 43800 - RNA, 32 nt, Homo Sapiens
auguacacuauaucuacacuuacucauuauuu

SEQ ID NO: 43801 - RNA, 32 nt, Homo Sapiens
gauguuuccuuccuuauccuuguagccaauaa

SEQ ID NO: 43802 - RNA, 32 nt, Homo Sapiens
ccuggcauccggauuuggacucggggccaugg

SEQ ID NO: 43803 - RNA, 32 nt, Homo Sapiens
cuucccgcuuuuuuccucuuccuucaaagucu

SEQ ID NO: 43804 - RNA, 32 nt, Homo Sapiens
ggauaauauccagccucccacaagaagcuggu

SEQ ID NO: 43805 - RNA, 32 nt, Homo Sapiens
uuacaugcaagcuguagccagcccuucagcac

SEQ ID NO: 43806 - RNA, 32 nt, Homo Sapiens
uguugugacucuucucucuccccuuccucugc

SEQ ID NO: 43807 - RNA, 27 nt, Homo Sapiens
agcuuguucuucuucagucaguccggc

SEQ ID NO: 43808 - RNA, 32 nt, Homo Sapiens
guuguuacaaccugcuugucuguggcccaccu

SEQ ID NO: 43809 - RNA, 32 nt, Homo Sapiens
gacaaggaucuggggguggggguggaaaagca

SEQ ID NO: 43810 - RNA, 32 nt, Homo Sapiens
aaugccucauccccaggcaaccccacugcucu

SEQ ID NO: 43811 - RNA, 32 nt, Homo Sapiens
aagaaacugauucaugcugcuaacuuaaaugu

SEQ ID NO: 43812 - RNA, 32 nt, Homo Sapiens
gauuuuucaaggauuguuaacaugccugggau

SEQ ID NO: 43813 - RNA, 32 nt, Homo Sapiens
cagcuuuaguggccggccggccgcucucaucc

SEQ ID NO: 43814 - RNA, 32 nt, Homo Sapiens
aaaggacaaugagaaguauuuuauagugaaca

SEQ ID NO: 43815 - RNA, 32 nt, Homo Sapiens
aaagcuuguuuauuucugauaauuaaccuaag

SEQ ID NO: 43816 - RNA, 32 nt, Homo Sapiens
uuucagaagauguaagcauuuuaaguuuuuua

SEQ ID NO: 43817 - RNA, 32 nt, Homo Sapiens
ggagagggcggcggcguugaauguguggcgga

SEQ ID NO: 43818 - RNA, 32 nt, Homo Sapiens
uguugauuuaugaguucauuuaugaugugaca

SEQ ID NO: 43819 - RNA, 32 nt, Homo Sapiens
uucccugccucggagauaaagauuccagcuac

SEQ ID NO: 43820 - RNA, 32 nt, Homo Sapiens
aguauuuuauauuuuucuuaauuuuucaaaua

SEQ ID NO: 43821 - RNA, 32 nt, Homo Sapiens
cugguauggcaaaagauuggacuaagacacug

SEQ ID NO: 43822 - RNA, 32 nt, Homo Sapiens
uaaacaacuauuuuuugguuugguuguaauau

SEQ ID NO: 43823 - RNA, 32 nt, Homo Sapiens
gaaaauuugggucuggcccauuucaggccauc

SEQ ID NO: 43824 - RNA, 32 nt, Homo Sapiens
gccuacggggccgcaucgccgcccggcucggc

SEQ ID NO: 43825 - RNA, 32 nt, Homo Sapiens
cugugcacagacggaccccccacccccacacg

SEQ ID NO: 43826 - RNA, 32 nt, Homo Sapiens
ugacagcaucuuccugguuguauguggccugu

SEQ ID NO: 43827 - RNA, 32 nt, Homo Sapiens
cgcuuccauccccgccccggcggguccaagcc

SEQ ID NO: 43828 - RNA, 32 nt, Homo Sapiens
ggagaaaaauggugaagaaaacaaagaugaug

SEQ ID NO: 43829 - RNA, 32 nt, Homo Sapiens
uguaauacugaauaauuacuaaaaaugauuuu

SEQ ID NO: 43830 - RNA, 32 nt, Homo Sapiens
agagcccccucccccuuugcauccagcuccca

SEQ ID NO: 43831 - RNA, 32 nt, Homo Sapiens
ccagcacuucugacuuuuuuuuuuuugguaca

SEQ ID NO: 43832 - RNA, 32 nt, Homo Sapiens
gcgcggggcgauggaccugagcaugaagaagu

SEQ ID NO: 43833 - RNA, 32 nt, Homo Sapiens
uugcugauaucuauauuuuuugaagcuuauua

SEQ ID NO: 43834 - RNA, 32 nt, Homo Sapiens
guggcgguggcggcgcggcugcuccuggaagc

SEQ ID NO: 43835 - RNA, 32 nt, Homo Sapiens
gagucaaaugcagaagugggcuugucaugggu

SEQ ID NO: 43836 - RNA, 32 nt, Homo Sapiens
ugugauuuguuuucuucaauagucuuauuuuc

SEQ ID NO: 43837 - RNA, 32 nt, Homo Sapiens
gcacguccugguuuucauuguuccccgccucc

SEQ ID NO: 43838 - RNA, 32 nt, Homo Sapiens
gcugaacaguauauuuuguaaauauaaguacu

SEQ ID NO: 43839 - RNA, 32 nt, Homo Sapiens
ggugaacuuaacaaaauuauuuuuggaaaaau

SEQ ID NO: 43840 - RNA, 32 nt, Homo Sapiens
cucucugcaaccuccgccucccagguucaagu

SEQ ID NO: 43841 - RNA, 32 nt, Homo Sapiens
ucccuacacccugaccggccacugccgcacac

SEQ ID NO: 43842 - RNA, 32 nt, Homo Sapiens
ggugaggaagaaagagaggaauacuaauccau

SEQ ID NO: 43843 - RNA, 32 nt, Homo Sapiens
ggcugcuccagccccaggaaggacccaggaca

SEQ ID NO: 43844 - RNA, 32 nt, Homo Sapiens
cuuauguggcucaaauacucuuauagcuaaag

SEQ ID NO: 43845 - RNA, 32 nt, Homo Sapiens
uggauuuauuuucucucucagucuccauuuua

SEQ ID NO: 43846 - RNA, 30 nt, Homo Sapiens
gggcaacccgcgcgggacccuuccucccua

SEQ ID NO: 43847 - RNA, 32 nt, Homo Sapiens
guccacacagcaaaaaugcaucugagaauugg

SEQ ID NO: 43848 - RNA, 32 nt, Homo Sapiens
gagauucucuggcacucugaggucucuguggc

SEQ ID NO: 43849 - RNA, 32 nt, Homo Sapiens
cucacugucuccauccuccaccucugagaugg

SEQ ID NO: 43850 - RNA, 32 nt, Homo Sapiens
aggagugaaguuuuuacccagggcuuuccuug

SEQ ID NO: 43851 - RNA, 28 nt, Homo Sapiens
gcugaggggcggccccagugcggggaaa

SEQ ID NO: 43852 - RNA, 32 nt, Homo Sapiens
aguguaucuauuacugcagaacaaauuacccc

SEQ ID NO: 43853 - RNA, 32 nt, Homo Sapiens
cugggccucuccccuuucccagcggcugggga

SEQ ID NO: 43854 - RNA, 32 nt, Homo Sapiens
guacccagugacuucagugguauccuuuuuuc

SEQ ID NO: 43855 - RNA, 32 nt, Homo Sapiens
agagaucugaugcugaggaaguggauuuugcg

SEQ ID NO: 43856 - RNA, 32 nt, Homo Sapiens
gaaaaaacaaaaaacagaaaacacgaaugccu

SEQ ID NO: 43857 - RNA, 32 nt, Homo Sapiens
cucuguuguaaauacgucgcaccagaggccac

SEQ ID NO: 43858 - RNA, 32 nt, Homo Sapiens
agcucuggugugauugguuggcucuucuucca

SEQ ID NO: 43859 - RNA, 32 nt, Homo Sapiens
ggccguggcggccgaggcgccggcugcucggg

SEQ ID NO: 43860 - RNA, 32 nt, Homo Sapiens
ccucgggagggcccaccuccccgcccauccag

SEQ ID NO: 43861 - RNA, 32 nt, Homo Sapiens
uuccuuuucuguuggggccccagccguagugg

SEQ ID NO: 43862 - RNA, 32 nt, Homo Sapiens
auccccugcccccagccccccagccucggcac

SEQ ID NO: 43863 - RNA, 32 nt, Homo Sapiens
agcaguuucugcaauucuguugaauaugaaau

SEQ ID NO: 43864 - RNA, 32 nt, Homo Sapiens
guuugcaaaaauuuucucccauucuguagguu

SEQ ID NO: 43865 - RNA, 32 nt, Homo Sapiens
aauuaaauuuuagaucuuucaauacucuuaaa

SEQ ID NO: 43866 - RNA, 32 nt, Homo Sapiens
ccuuggcgccgcggccauggcggccagcgcga

SEQ ID NO: 43867 - RNA, 32 nt, Homo Sapiens
uagggaccagugcaugugaggccggugcugga

SEQ ID NO: 43868 - RNA, 32 nt, Homo Sapiens
agaaggagccuugagccccaaccccgugaaaa

SEQ ID NO: 43869 - RNA, 32 nt, Homo Sapiens
ugaguccauuugaauaauguuuuauuaguacu

SEQ ID NO: 43870 - RNA, 32 nt, Homo Sapiens
cagggcggcggggacuccgagagccccggaga

SEQ ID NO: 43871 - RNA, 32 nt, Homo Sapiens
caaagaggugccugugagggcugggggcccaa

SEQ ID NO: 43872 - RNA, 32 nt, Homo Sapiens
cugucuauaaaccauuagugguguguuagugu

SEQ ID NO: 43873 - RNA, 32 nt, Homo Sapiens
ucuacaaaaaauacaaaaauuagccaggcagg

SEQ ID NO: 43874 - RNA, 32 nt, Homo Sapiens
gagagggaggcaagcccuguugacacaggucu

SEQ ID NO: 43875 - RNA, 32 nt, Homo Sapiens
guuuggcuucccacccauaagcucugggauac

SEQ ID NO: 43876 - RNA, 32 nt, Homo Sapiens
uuuuccuauuuuuugcugucaacuuuuuggca

SEQ ID NO: 43877 - RNA, 32 nt, Homo Sapiens
auggagaggaggagaccccaguccagcccagc

SEQ ID NO: 43878 - RNA, 32 nt, Homo Sapiens
uucagccugugcuuuuuauuuuauuggaacaa

SEQ ID NO: 43879 - RNA, 32 nt, Homo Sapiens
gcaaucuggcaauguacaucccagagcgugca

SEQ ID NO: 43880 - RNA, 32 nt, Homo Sapiens
uugaaccuuuguuauuucucuaauuucaucuu

SEQ ID NO: 43881 - RNA, 32 nt, Homo Sapiens
cuuauaaaccucuguacacacacacacacaca

SEQ ID NO: 43882 - RNA, 32 nt, Homo Sapiens
cacaucggucucugccacacgcaguagaauuu

SEQ ID NO: 43883 - RNA, 32 nt, Homo Sapiens
aagacuauuuaaauuucuuuguuaguugcaag

SEQ ID NO: 43884 - RNA, 32 nt, Homo Sapiens
ggguuuucaauaggguguagaccuccaguacc

SEQ ID NO: 43885 - RNA, 32 nt, Homo Sapiens
cugcaggcucugcagcagcuccugggacagac

SEQ ID NO: 43886 - RNA, 32 nt, Homo Sapiens
uccaugucccuacaaaggauaugaacucauca

SEQ ID NO: 43887 - RNA, 32 nt, Homo Sapiens
guuaacgucggguaggaaugcugaucaugaua

SEQ ID NO: 43888 - RNA, 32 nt, Homo Sapiens
aguagcccuggcccuaguucuauagggcuugg

SEQ ID NO: 43889 - RNA, 32 nt, Homo Sapiens
cgucuacagaacagcugcuggugcuucaggga

SEQ ID NO: 43890 - RNA, 32 nt, Homo Sapiens
agagcugugugagcuggaugcugaugcagagg

SEQ ID NO: 43891 - RNA, 32 nt, Homo Sapiens
ggcagcuggaagaucaggguugugguugaaga

SEQ ID NO: 43892 - RNA, 32 nt, Homo Sapiens
aacagaaaaaaauuauacaauuuugacaauau

SEQ ID NO: 43893 - RNA, 32 nt, Homo Sapiens
gcagccggcuggccccgccgcggccgagcaau

SEQ ID NO: 43894 - RNA, 32 nt, Homo Sapiens
ucaugagcauccauacguggcaggccaggucu

SEQ ID NO: 43895 - RNA, 32 nt, Homo Sapiens
agaugcuuggagaaggcugaggucuccccugu

SEQ ID NO: 43896 - RNA, 32 nt, Homo Sapiens
uguucacuuuuugcaacaaaauguaugggccg

SEQ ID NO: 43897 - RNA, 32 nt, Homo Sapiens
acgcccuggaacgucuguguagccucagucgc

SEQ ID NO: 43898 - RNA, 32 nt, Homo Sapiens
cggcgccggaggaggcggagguggcgcggcag

SEQ ID NO: 43899 - RNA, 32 nt, Homo Sapiens
aguauacugcaugugacacuguucccacauac

SEQ ID NO: 43900 - RNA, 32 nt, Homo Sapiens
guaaccggcacgcuacuggcaacacggcagua

SEQ ID NO: 43901 - RNA, 32 nt, Homo Sapiens
guaugaagggugcugccgcccgugccaucugg

SEQ ID NO: 43902 - RNA, 32 nt, Homo Sapiens
ggaaggcaaaacaaaaaaaagccucucaaaac

SEQ ID NO: 43903 - RNA, 32 nt, Homo Sapiens
gcacaggugucugccuagauccacguguggcc

SEQ ID NO: 43904 - RNA, 32 nt, Homo Sapiens
ugaucaguguaaaaugcuuggauggucagugu

SEQ ID NO: 43905 - RNA, 32 nt, Homo Sapiens
uaguucucauugcaucacuuuggauguuuacu

SEQ ID NO: 43906 - RNA, 32 nt, Homo Sapiens
gccugagcacaccaaggccaggaucaccgacu

SEQ ID NO: 43907 - RNA, 32 nt, Homo Sapiens
uggcuuuuuuaaaaguucagguguugcucagu

SEQ ID NO: 43908 - RNA, 32 nt, Homo Sapiens
ggccaggagagugacaccauggaggguacaau

SEQ ID NO: 43909 - RNA, 32 nt, Homo Sapiens
ccaagcucuuagguuccucuuauuuggggcag

SEQ ID NO: 43910 - RNA, 32 nt, Homo Sapiens
gacagguacagcuucacucuuguagucaguau

SEQ ID NO: 43911 - RNA, 32 nt, Homo Sapiens
cgcacacacacacacacaaacacacgcgcacg

SEQ ID NO: 43912 - RNA, 32 nt, Homo Sapiens
cuggaacagaguuacagauacacaaucaagag

SEQ ID NO: 43913 - RNA, 32 nt, Homo Sapiens
ucaacuggaggauaauaaaauauuguggguuc

SEQ ID NO: 43914 - RNA, 32 nt, Homo Sapiens
agccaguaaucuuuauacuggguuucaagaaa

SEQ ID NO: 43915 - RNA, 32 nt, Homo Sapiens
caguaauaaaaagccaccacacacugaaaaaa

SEQ ID NO: 43916 - RNA, 32 nt, Homo Sapiens
cucgcgcugccgggcgugggcguggacucggg

SEQ ID NO: 43917 - RNA, 32 nt, Homo Sapiens
acguccaucucuuuuccugucuuugagauuga

SEQ ID NO: 43918 - RNA, 32 nt, Homo Sapiens
ccucgcggugagaggaaggcggaggagcggga

SEQ ID NO: 43919 - RNA, 32 nt, Homo Sapiens
ugcacagccggggccugacggucgccggcggu

SEQ ID NO: 43920 - RNA, 32 nt, Homo Sapiens
ugggcuccaagcccugggccaggcugcccaug

SEQ ID NO: 43921 - RNA, 31 nt, Homo Sapiens
cgggcagcugaggauugcagagccugucugc

SEQ ID NO: 43922 - RNA, 32 nt, Homo Sapiens
ccccagccucugcugcaggauaucaccuaccu

SEQ ID NO: 43923 - RNA, 32 nt, Homo Sapiens
ccgucagcccugacucggcccggagcugagcu

SEQ ID NO: 43924 - RNA, 32 nt, Homo Sapiens
accuccccuggcccuccuuucuggcucagccu

SEQ ID NO: 43925 - RNA, 32 nt, Homo Sapiens
uuguauucauuaagcaugagaauagagaaaua

SEQ ID NO: 43926 - RNA, 32 nt, Homo Sapiens
ucuuuuggccccagcccugucccucacugucc

SEQ ID NO: 43927 - RNA, 32 nt, Homo Sapiens
cccacacuacccaaaacaaagaaugggaagca

SEQ ID NO: 43928 - RNA, 32 nt, Homo Sapiens
agaccgacaccucggacggggagucugugacc

SEQ ID NO: 43929 - RNA, 32 nt, Homo Sapiens
gcugggucaggagucccaaaggucagugacag

SEQ ID NO: 43930 - RNA, 32 nt, Homo Sapiens
caugugcugguuaugcacacacgauauucugu

SEQ ID NO: 43931 - RNA, 32 nt, Homo Sapiens
gcagggccagugccuggcaugugucccaggga

SEQ ID NO: 43932 - RNA, 32 nt, Homo Sapiens
agcaagcucaggucuguggguucccuggucau

SEQ ID NO: 43933 - RNA, 32 nt, Homo Sapiens
caagcuguuuaaaauaaagauguuaccuugua

SEQ ID NO: 43934 - RNA, 32 nt, Homo Sapiens
cucccccgcccgccuggccuguccugagugca

SEQ ID NO: 43935 - RNA, 32 nt, Homo Sapiens
gcuguuaccaaaacaaacaucuuaaucugcac

SEQ ID NO: 43936 - RNA, 32 nt, Homo Sapiens
gucugcuuugguuuuugcuggaaauuuauauc

SEQ ID NO: 43937 - RNA, 32 nt, Homo Sapiens
agggagagaagcugagaccaggaccggugggg

SEQ ID NO: 43938 - RNA, 32 nt, Homo Sapiens
gauccugaccagcuccuccagucaugcucuug

SEQ ID NO: 43939 - RNA, 32 nt, Homo Sapiens
agcuggcuuccauucacacgugucucacugag

SEQ ID NO: 43940 - RNA, 32 nt, Homo Sapiens
cagcauuaggggugucugugugugaaucucug

SEQ ID NO: 43941 - RNA, 32 nt, Homo Sapiens
acccaagcaaugcuggcaccccggugcggacc

SEQ ID NO: 43942 - RNA, 32 nt, Homo Sapiens
ggucugcccucccccacucaaaccgggaucau

SEQ ID NO: 43943 - RNA, 32 nt, Homo Sapiens
ggacacucgcggggcgccgaccuggcaggggg

SEQ ID NO: 43944 - RNA, 32 nt, Homo Sapiens
uaugcuugaaaauuaucugagagggaauaaac

SEQ ID NO: 43945 - RNA, 32 nt, Homo Sapiens
cuucccauaggaacgacagaagcuuuuacaag

SEQ ID NO: 43946 - RNA, 32 nt, Homo Sapiens
cgcugucugauccgccaaaccucagcaaccug

SEQ ID NO: 43947 - RNA, 32 nt, Homo Sapiens
cuucgccgccgccgcugcuggagucacuggga

SEQ ID NO: 43948 - RNA, 32 nt, Homo Sapiens
aaaagucaaaacaaaaauauuuucuaacuugu

SEQ ID NO: 43949 - RNA, 29 nt, Homo Sapiens
auacacauauguauauacaggcugacuug

SEQ ID NO: 43950 - RNA, 32 nt, Homo Sapiens
caaaguuugagccuugauuccuggacccagga

SEQ ID NO: 43951 - RNA, 32 nt, Homo Sapiens
cuacugcucggccgcggcugcccgcgccccca

SEQ ID NO: 43952 - RNA, 32 nt, Homo Sapiens
uuaucauguaaacacaucagcagcagggcuua

SEQ ID NO: 43953 - RNA, 32 nt, Homo Sapiens
uaagagacaccguggauauucuucaucagaag

SEQ ID NO: 43954 - RNA, 31 nt, Homo Sapiens
agucuuuguggcugccugccugggccagccu

SEQ ID NO: 43955 - RNA, 32 nt, Homo Sapiens
auaggggucaaugugaugcugcuggagacgag

SEQ ID NO: 43956 - RNA, 32 nt, Homo Sapiens
cugcuagcuggguucccgagcugccggucuga

SEQ ID NO: 43957 - RNA, 32 nt, Homo Sapiens
guuacugugcuuaauuuggaccaaauuuuauu

SEQ ID NO: 43958 - RNA, 32 nt, Homo Sapiens
caggcuuaugcaaugcaguggauagauucugu

SEQ ID NO: 43959 - RNA, 32 nt, Homo Sapiens
aggggcagcucccgagggcacugugaaggcuc

SEQ ID NO: 43960 - RNA, 32 nt, Homo Sapiens
aggaggggcaucuucuuaggaaggcagcugcc

SEQ ID NO: 43961 - RNA, 32 nt, Homo Sapiens
uuccauuguagcucuuuuuuuuuuuuucccuu

SEQ ID NO: 43962 - RNA, 32 nt, Homo Sapiens
auuucgugguaguuguuuguggcuacauaaca

SEQ ID NO: 43963 - RNA, 32 nt, Homo Sapiens
uuugcugacaggucacaucauauuguaauucu

SEQ ID NO: 43964 - RNA, 32 nt, Homo Sapiens
gcaggaagcaguuuggguuuugaaagguuauu

SEQ ID NO: 43965 - RNA, 32 nt, Homo Sapiens
ccuccuccucucccggccccggcugccagcac

SEQ ID NO: 43966 - RNA, 32 nt, Homo Sapiens
caaaacauguacuuacucuccgaaaggcaucu

SEQ ID NO: 43967 - RNA, 32 nt, Homo Sapiens
cgugacuuuuuuuuuuuuuuuaacaaauugag

SEQ ID NO: 43968 - RNA, 32 nt, Homo Sapiens
auacuuuuccuguuggauucucuuuuacaaau

SEQ ID NO: 43969 - RNA, 32 nt, Homo Sapiens
cagucugggccggggcccugugccgcugaaga

SEQ ID NO: 43970 - RNA, 32 nt, Homo Sapiens
cuccccgcagcgccggccgagccggcuucccc

SEQ ID NO: 43971 - RNA, 32 nt, Homo Sapiens
ccuagaggggaaccaggcugcagagccgggcc

SEQ ID NO: 43972 - RNA, 32 nt, Homo Sapiens
uuguucuggauucccgucguuaacucaaaggg

SEQ ID NO: 43973 - RNA, 32 nt, Homo Sapiens
ggaggccuggccuggaggaggaguccacuaac

SEQ ID NO: 43974 - RNA, 32 nt, Homo Sapiens
ccauuuuuaagcaguacuuuaccuguuuuuuc

SEQ ID NO: 43975 - RNA, 32 nt, Homo Sapiens
augauuucauuucccagaaaauguaaagaaug

SEQ ID NO: 43976 - RNA, 32 nt, Homo Sapiens
agcaaugcuccuuccuucucaggguccaaagg

SEQ ID NO: 43977 - RNA, 32 nt, Homo Sapiens
cucccugucauucucaacgcuucuccuuucuc

SEQ ID NO: 43978 - RNA, 32 nt, Homo Sapiens
cagauuuuucccuuuaugccccugcaaccaag

SEQ ID NO: 43979 - RNA, 32 nt, Homo Sapiens
cuauugacaguuuuuuuuuuuaaauaauaaaa

SEQ ID NO: 43980 - RNA, 32 nt, Homo Sapiens
cguuuugccauguuggcuaggcuggucucugu

SEQ ID NO: 43981 - RNA, 32 nt, Homo Sapiens
agauuuuugucaugauuuuaaauacacugaca

SEQ ID NO: 43982 - RNA, 32 nt, Homo Sapiens
ugggaucgcgguuucccucuccucucccuugu

SEQ ID NO: 43983 - RNA, 32 nt, Homo Sapiens
ggggccagggugagaggagagaugaugaguug

SEQ ID NO: 43984 - RNA, 32 nt, Homo Sapiens
cuguuuaugaucuauuuguagauuaggauuaa

SEQ ID NO: 43985 - RNA, 32 nt, Homo Sapiens
ccacccccacccaaaagucagcaguggcacug

SEQ ID NO: 43986 - RNA, 32 nt, Homo Sapiens
gacgaccccuccccaccucagccuggggagga

SEQ ID NO: 43987 - RNA, 32 nt, Homo Sapiens
ugagccccaggucaguccccagcccucugggu

SEQ ID NO: 43988 - RNA, 32 nt, Homo Sapiens
cguaaagaugcacucuugcagcuccccagccu

SEQ ID NO: 43989 - RNA, 32 nt, Homo Sapiens
aaaacucugauagaaaauauuuaaugaguauc

SEQ ID NO: 43990 - RNA, 32 nt, Homo Sapiens
ucccagcuaagcuccagggaaccauaaaucca

SEQ ID NO: 43991 - RNA, 32 nt, Homo Sapiens
acccaacucgacccucccuccccucaccccca

SEQ ID NO: 43992 - RNA, 32 nt, Homo Sapiens
ccuccccucccuagagguuuuguucguacucu

SEQ ID NO: 43993 - RNA, 32 nt, Homo Sapiens
guuucgaacuccuaaccuccagugauccaccu

SEQ ID NO: 43994 - RNA, 32 nt, Homo Sapiens
cucaaaaucaaaaacaaacaaacaaaaacuca

SEQ ID NO: 43995 - RNA, 32 nt, Homo Sapiens
augcacugcaucccaaaccaucaagggccuuu

SEQ ID NO: 43996 - RNA, 32 nt, Homo Sapiens
aaaaaaaaaaaauuagcugagugugguguugu

SEQ ID NO: 43997 - RNA, 32 nt, Homo Sapiens
uuuauagacuauuguguaaauguggaaucaca

SEQ ID NO: 43998 - RNA, 30 nt, Homo Sapiens
ugacgggcgcccggccggcugcgguccgug

SEQ ID NO: 43999 - RNA, 32 nt, Homo Sapiens
uacaacuuuccacauaagauuucaugcggaaa

SEQ ID NO: 44000 - RNA, 32 nt, Homo Sapiens
gguacacgccccaccuaauaugcugggagcug

SEQ ID NO: 44001 - RNA, 32 nt, Homo Sapiens
aagccugaauuuccuggcaagcacaaggguag

SEQ ID NO: 44002 - RNA, 32 nt, Homo Sapiens
ucucugcagagguagugacuugugaugugagc

SEQ ID NO: 44003 - RNA, 32 nt, Homo Sapiens
acccgcuggcagcuccucccacucauccagag

SEQ ID NO: 44004 - RNA, 32 nt, Homo Sapiens
uauaguacuuuuuaaugaacgaaaugacuaug

SEQ ID NO: 44005 - RNA, 32 nt, Homo Sapiens
aacucuauacccaugaaacaaucauucccauu

SEQ ID NO: 44006 - RNA, 32 nt, Homo Sapiens
ggcaccuuccugaguucucaggacucccaccu

SEQ ID NO: 44007 - RNA, 32 nt, Homo Sapiens
uugccgcccugccccagguuguggcuguggau

SEQ ID NO: 44008 - RNA, 32 nt, Homo Sapiens
cuuauuugaagaaaaagacugauguaauagau

SEQ ID NO: 44009 - RNA, 32 nt, Homo Sapiens
uuccucucugcuucccucccaggccucgccag

SEQ ID NO: 44010 - RNA, 32 nt, Homo Sapiens
gugccggcgcacgcacacacgggcggacacac

SEQ ID NO: 44011 - RNA, 32 nt, Homo Sapiens
cuuacuguuuagcuccucccaccucgaggcuc

SEQ ID NO: 44012 - RNA, 32 nt, Homo Sapiens
uuuagcuucuaaaaggaaagaugcagauuucu

SEQ ID NO: 44013 - RNA, 32 nt, Homo Sapiens
acuccuaacugcggcggaaacgugggagccgc

SEQ ID NO: 44014 - RNA, 32 nt, Homo Sapiens
ucgaagcagcagaacccuccccggcacugggg

SEQ ID NO: 44015 - RNA, 27 nt, Homo Sapiens
uuauggcggcgccgggcgcgcugcugg

SEQ ID NO: 44016 - RNA, 32 nt, Homo Sapiens
uauugaacauuugacuuaauuguuaaacccca

SEQ ID NO: 44017 - RNA, 32 nt, Homo Sapiens
cagugugcagcaaauuuguucuuuugguuuca

SEQ ID NO: 44018 - RNA, 32 nt, Homo Sapiens
gggcacagggcuuauuccucggaguagaaggg

SEQ ID NO: 44019 - RNA, 32 nt, Homo Sapiens
ucucuccugucucuuccacugcucucuauguu

SEQ ID NO: 44020 - RNA, 32 nt, Homo Sapiens
cgccuuccgaggcuccucccgcggguggcagc

SEQ ID NO: 44021 - RNA, 32 nt, Homo Sapiens
accagacuggggaugccuauagguugucugug

SEQ ID NO: 44022 - RNA, 32 nt, Homo Sapiens
gcccuccugcagcaucugcacucugggacugc

SEQ ID NO: 44023 - RNA, 32 nt, Homo Sapiens
aaauauuaauguucuucagaacaucauuuuaa

SEQ ID NO: 44024 - RNA, 32 nt, Homo Sapiens
cugcugccccuugagcugggaguguccggcac

SEQ ID NO: 44025 - RNA, 32 nt, Homo Sapiens
cauuuauggagauuaauucauuauggaaauaa

SEQ ID NO: 44026 - RNA, 32 nt, Homo Sapiens
aauuuuuugacaaauaaauguuucuaacacuu

SEQ ID NO: 44027 - RNA, 32 nt, Homo Sapiens
gcccacaucuucuccuuuccugauuacuuuug

SEQ ID NO: 44028 - RNA, 32 nt, Homo Sapiens
gaauaaagaggugccuucagcuggugggccga

SEQ ID NO: 44029 - RNA, 32 nt, Homo Sapiens
cccgguggggcagccucuggcuuggacagggu

SEQ ID NO: 44030 - RNA, 32 nt, Homo Sapiens
ccccaucgugcagcugcauggcuacuuggaga

SEQ ID NO: 44031 - RNA, 32 nt, Homo Sapiens
ucgcccgugccggccgcucgcccgccaugccu

SEQ ID NO: 44032 - RNA, 32 nt, Homo Sapiens
uguggccagcugcugacccagcuccuccugug

SEQ ID NO: 44033 - RNA, 28 nt, Homo Sapiens
gccaugguguccccggucacugugguga

SEQ ID NO: 44034 - RNA, 28 nt, Homo Sapiens
ccaguccaaauggcuauuauaaaaaugu

SEQ ID NO: 44035 - RNA, 32 nt, Homo Sapiens
ccacacuggucuuuuucuuuaaugucucauuc

SEQ ID NO: 44036 - RNA, 32 nt, Homo Sapiens
uacacuguacacaacaucgcuaaugagggcac

SEQ ID NO: 44037 - RNA, 32 nt, Homo Sapiens
ugcuauugcuggggcucugggguggacccugu

SEQ ID NO: 44038 - RNA, 32 nt, Homo Sapiens
cuuccaucuggaacuauauaaaguucagaaaa

SEQ ID NO: 44039 - RNA, 32 nt, Homo Sapiens
acccgagcugcugcuccgcggcugcggccccg

SEQ ID NO: 44040 - RNA, 32 nt, Homo Sapiens
ggaaaauguuggccauugaauuauuaauaggu

SEQ ID NO: 44041 - RNA, 32 nt, Homo Sapiens
gguacaaauaccagaauuauacuugaaaauac

SEQ ID NO: 44042 - RNA, 32 nt, Homo Sapiens
uguuccgggaagcgaaaagaccaagaucaaau

SEQ ID NO: 44043 - RNA, 32 nt, Homo Sapiens
uggagcugcguucauaggcuggcacucucaau

SEQ ID NO: 44044 - RNA, 32 nt, Homo Sapiens
ggcccgagcggggcccggggccccuaagccau

SEQ ID NO: 44045 - RNA, 32 nt, Homo Sapiens
ugggaucuugugcucugucacccaggcuggag

SEQ ID NO: 44046 - RNA, 32 nt, Homo Sapiens
cuacacucacuucuaauguaacaaucuuucaa

SEQ ID NO: 44047 - RNA, 32 nt, Homo Sapiens
accugugagccggcgcgggcccgggcuccggc

SEQ ID NO: 44048 - RNA, 32 nt, Homo Sapiens
ucucagcaagcccagaagcaucugcaauaucu

SEQ ID NO: 44049 - RNA, 32 nt, Homo Sapiens
gcuaagcgcccggccccggggccgcggauccg

SEQ ID NO: 44050 - RNA, 32 nt, Homo Sapiens
auccuugcuguacuucccaacaucucaucuuc

SEQ ID NO: 44051 - RNA, 32 nt, Homo Sapiens
uguuucaugaugcaugggucauuugucuuggg

SEQ ID NO: 44052 - RNA, 32 nt, Homo Sapiens
auaucaagguugaauuuuuuuauuccuguugu

SEQ ID NO: 44053 - RNA, 32 nt, Homo Sapiens
guuagaaaacaguagguccugagaaccauaag

SEQ ID NO: 44054 - RNA, 32 nt, Homo Sapiens
gacagggagucugaagcgugggacauggaccg

SEQ ID NO: 44055 - RNA, 32 nt, Homo Sapiens
ccaccagaucccggagaucgcccgccauggcu

SEQ ID NO: 44056 - RNA, 32 nt, Homo Sapiens
cagaugugguggcucaugccuguaaucccaac

SEQ ID NO: 44057 - RNA, 32 nt, Homo Sapiens
gacgcccccgccccgccccgucuguugaguuc

SEQ ID NO: 44058 - RNA, 32 nt, Homo Sapiens
gagcgcuugcgggcgccgggcggagcugcugc

SEQ ID NO: 44059 - RNA, 32 nt, Homo Sapiens
gguaacuugcuguauuugaauuuuuuauagau

SEQ ID NO: 44060 - RNA, 32 nt, Homo Sapiens
gcgcgcggcagccgccugaagccccggccugg

SEQ ID NO: 44061 - RNA, 32 nt, Homo Sapiens
uuacucaucuuuguaucuccagugucuagcag

SEQ ID NO: 44062 - RNA, 27 nt, Homo Sapiens
uuguaucauuaauuauuagugugcuug

SEQ ID NO: 44063 - RNA, 32 nt, Homo Sapiens
agccugcuccuugcguaccacagggauuaauc

SEQ ID NO: 44064 - RNA, 32 nt, Homo Sapiens
guuucagagcgucagaggcugcggaugagcag

SEQ ID NO: 44065 - RNA, 32 nt, Homo Sapiens
acgagcgcucugcuccucuccugggccccugc

SEQ ID NO: 44066 - RNA, 32 nt, Homo Sapiens
ggccucuuuguccaaagugaccuuggggcccc

SEQ ID NO: 44067 - RNA, 32 nt, Homo Sapiens
cccccagccugcccuccgccccgccccagccg

SEQ ID NO: 44068 - RNA, 32 nt, Homo Sapiens
ccuuuugcuucagauacugauaucucagccug

SEQ ID NO: 44069 - RNA, 32 nt, Homo Sapiens
ugauuaucuauuuuagguaccguuucacauuu

SEQ ID NO: 44070 - RNA, 32 nt, Homo Sapiens
gggacccguucugcuaggaagaaggggagcag

SEQ ID NO: 44071 - RNA, 32 nt, Homo Sapiens
gaagguccacuagcuggggaggucuuggaacc

SEQ ID NO: 44072 - RNA, 32 nt, Homo Sapiens
cucgggguaucugcugucucucauggagaugg

SEQ ID NO: 44073 - RNA, 32 nt, Homo Sapiens
uggcaugcaccuguagucccagcuacucugga

SEQ ID NO: 44074 - RNA, 32 nt, Homo Sapiens
acaggagcugggucagccucugcagcugccuc

SEQ ID NO: 44075 - RNA, 32 nt, Homo Sapiens
uauaauaaauguuuucugauuguuuugcgaaa

SEQ ID NO: 44076 - RNA, 32 nt, Homo Sapiens
auuaaaaacaaauuauuccagguggaccaaga

SEQ ID NO: 44077 - RNA, 32 nt, Homo Sapiens
guggguggccggcgacaagauggcagcagcgu

SEQ ID NO: 44078 - RNA, 32 nt, Homo Sapiens
aguggagugcaccagcagccccaccccagaga

SEQ ID NO: 44079 - RNA, 32 nt, Homo Sapiens
auuuauacuugagaaaaauuguacaaauauag

SEQ ID NO: 44080 - RNA, 32 nt, Homo Sapiens
gcaaaucucugaccuccuugccugcagcuuuu

SEQ ID NO: 44081 - RNA, 32 nt, Homo Sapiens
gagcaucccguggccuggaacagagcucuggg

SEQ ID NO: 44082 - RNA, 31 nt, Homo Sapiens
agacccaugcgcugccugcccaccgugcccc

SEQ ID NO: 44083 - RNA, 32 nt, Homo Sapiens
acugugcuuugguguucuuuuaucuugauguc

SEQ ID NO: 44084 - RNA, 32 nt, Homo Sapiens
gacauuuagcgugaugaaauaaagcaucuacg

SEQ ID NO: 44085 - RNA, 32 nt, Homo Sapiens
aaccccauucuuuccuucucugaaaguggugc

SEQ ID NO: 44086 - RNA, 32 nt, Homo Sapiens
cuuggcucacaggggacgaugucaagcucuuc

SEQ ID NO: 44087 - RNA, 31 nt, Homo Sapiens
uuucuaaaauaaaaacauggcaaauacucag

SEQ ID NO: 44088 - RNA, 32 nt, Homo Sapiens
guggcggcggcggcggacccuuggggucugga

SEQ ID NO: 44089 - RNA, 32 nt, Homo Sapiens
cuuucaagugacuuuuuauaaaacauaaccuu

SEQ ID NO: 44090 - RNA, 32 nt, Homo Sapiens
cuggagcccacgcuugagcaucggagacccug

SEQ ID NO: 44091 - RNA, 32 nt, Homo Sapiens
cauuauuuaguuauuuugauaauauucauagg

SEQ ID NO: 44092 - RNA, 32 nt, Homo Sapiens
ucagauuugucaaccagcgauaggccacauuc

SEQ ID NO: 44093 - RNA, 32 nt, Homo Sapiens
uugggggaggcgccguuucggaggaagaccuc

SEQ ID NO: 44094 - RNA, 32 nt, Homo Sapiens
cucaguaaacaucugaauaaacaugcagguug

SEQ ID NO: 44095 - RNA, 32 nt, Homo Sapiens
gcgcaccugccggcugcggccccagggccaug

SEQ ID NO: 44096 - RNA, 32 nt, Homo Sapiens
cugugaguguaccccaggacguuggccuggau

SEQ ID NO: 44097 - RNA, 32 nt, Homo Sapiens
gcggcgggcggcagcaugucgguggcggggcu

SEQ ID NO: 44098 - RNA, 32 nt, Homo Sapiens
uucaggccuguuuuuccaaguccaucaccaaa

SEQ ID NO: 44099 - RNA, 32 nt, Homo Sapiens
agagcuucuuugacuuuuuccacuggaauuuu

SEQ ID NO: 44100 - RNA, 32 nt, Homo Sapiens
cugcggccugccgagcgccgggaacgccgcga

SEQ ID NO: 44101 - RNA, 32 nt, Homo Sapiens
cuacucucagaauuugguuuaaagcuggacag

SEQ ID NO: 44102 - RNA, 32 nt, Homo Sapiens
ggaugcccacugaagaggccucaacccagugg

SEQ ID NO: 44103 - RNA, 32 nt, Homo Sapiens
ggacacuucuucccuguuuauuacaaugacua

SEQ ID NO: 44104 - RNA, 32 nt, Homo Sapiens
cucaggagcaaugcugccuucucccuguccuc

SEQ ID NO: 44105 - RNA, 32 nt, Homo Sapiens
gggaggauggcuugcgcucaggaggcagaggu

SEQ ID NO: 44106 - RNA, 32 nt, Homo Sapiens
ccuggaggcuccugugugcuucugugacuguu

SEQ ID NO: 44107 - RNA, 32 nt, Homo Sapiens
acuguuagguugucuuuuuuuaaaaaaccuaa

SEQ ID NO: 44108 - RNA, 32 nt, Homo Sapiens
agugguuacccaugcaguacuacuuauuaucc

SEQ ID NO: 44109 - RNA, 32 nt, Homo Sapiens
cacccugcuucucuccaggggaccauaggucc

SEQ ID NO: 44110 - RNA, 32 nt, Homo Sapiens
ggguugcuugguuuuuguuguugguguugagu

SEQ ID NO: 44111 - RNA, 32 nt, Homo Sapiens
auagacucagccuucauguuugucucuggaag

SEQ ID NO: 44112 - RNA, 32 nt, Homo Sapiens
gcccagccaacauacuaaaaccccgucucuac

SEQ ID NO: 44113 - RNA, 32 nt, Homo Sapiens
cuuccaacucuacucuaacaaacaagaaaguc

SEQ ID NO: 44114 - RNA, 32 nt, Homo Sapiens
cgccaggagccacgucccuucucccuuccccg

SEQ ID NO: 44115 - RNA, 32 nt, Homo Sapiens
cgcgcugugacgagcgggaggcgcggcgaggg

SEQ ID NO: 44116 - RNA, 32 nt, Homo Sapiens
cugaggccaugccggggccccggcgccccgcu

SEQ ID NO: 44117 - RNA, 32 nt, Homo Sapiens
gcaauucuaaucuuucauaacuacaucucaau

SEQ ID NO: 44118 - RNA, 32 nt, Homo Sapiens
agaagagguaagaccugaaacuguuuguucuc

SEQ ID NO: 44119 - RNA, 32 nt, Homo Sapiens
ggacuuuccuuccuccaucuccaagaaugcug

SEQ ID NO: 44120 - RNA, 32 nt, Homo Sapiens
ucucccguccccacccuauucucagguggcuc

SEQ ID NO: 44121 - RNA, 32 nt, Homo Sapiens
cccgcuguagccaccucugagcccgccgccac

SEQ ID NO: 44122 - RNA, 32 nt, Homo Sapiens
ggguuguuauuuacaaucuggauggcuucauc

SEQ ID NO: 44123 - RNA, 30 nt, Homo Sapiens
auggggagcaggcgcccggugccggccacg

SEQ ID NO: 44124 - RNA, 32 nt, Homo Sapiens
agugcccaugcucugcaucagcacgcggcccu

SEQ ID NO: 44125 - RNA, 32 nt, Homo Sapiens
guuguuacaaaacaugguccaugugacugcug

SEQ ID NO: 44126 - RNA, 25 nt, Homo Sapiens
auguccugccagcagagccagcagc

SEQ ID NO: 44127 - RNA, 32 nt, Homo Sapiens
ccggggcccgggugcugguggacgccggcucg

SEQ ID NO: 44128 - RNA, 32 nt, Homo Sapiens
ucaguaucaucauauuaauuuauauuuccauc

SEQ ID NO: 44129 - RNA, 32 nt, Homo Sapiens
gggccgcggcggugaucgauggggagcggcug

SEQ ID NO: 44130 - RNA, 32 nt, Homo Sapiens
gcuggacucccucuacucccucuggccauagc

SEQ ID NO: 44131 - RNA, 32 nt, Homo Sapiens
aagccgggccccagcaccccucuccuuuggcc

SEQ ID NO: 44132 - RNA, 32 nt, Homo Sapiens
auggagauaagcccuuugugugcagugaaugu

SEQ ID NO: 44133 - RNA, 32 nt, Homo Sapiens
cgcguuuguaaaagagaugucuucaugucuuc

SEQ ID NO: 44134 - RNA, 32 nt, Homo Sapiens
agaaauaccuucuauacaaaccuuuuuuucua

SEQ ID NO: 44135 - RNA, 32 nt, Homo Sapiens
uuuuuccugggauguaacuaucuuacauguuu

SEQ ID NO: 44136 - RNA, 32 nt, Homo Sapiens
auacuuuugaaaugcaggauaugaugaguggg

SEQ ID NO: 44137 - RNA, 32 nt, Homo Sapiens
cagcacaucugcaugaagauagauaggcacuc

SEQ ID NO: 44138 - RNA, 32 nt, Homo Sapiens
gauuagugcaaucauugagaagaggaagaaga

SEQ ID NO: 44139 - RNA, 32 nt, Homo Sapiens
ggggcggggcccggccaagcggcugccuuuua

SEQ ID NO: 44140 - RNA, 32 nt, Homo Sapiens
ccagccuuuccacaaccucuaccuucccacuc

SEQ ID NO: 44141 - RNA, 32 nt, Homo Sapiens
gaggaagauggcggcguccgcagcugccgcug

SEQ ID NO: 44142 - RNA, 32 nt, Homo Sapiens
cagagcccggccgggccucggcguggagauga

SEQ ID NO: 44143 - RNA, 32 nt, Homo Sapiens
ggaaauucugauuuuguuuuuaauuuuugaua

SEQ ID NO: 44144 - RNA, 31 nt, Homo Sapiens
ugcuucucuggcggucuucagaaucaacauc

SEQ ID NO: 44145 - RNA, 32 nt, Homo Sapiens
guaacuuuaaucuugggaguuauuguuuacug

SEQ ID NO: 44146 - RNA, 32 nt, Homo Sapiens
aaaaugacugacucaccccaagguguccaaaa

SEQ ID NO: 44147 - RNA, 32 nt, Homo Sapiens
ucaccaggugagcagagcugggcucccacaga

SEQ ID NO: 44148 - RNA, 32 nt, Homo Sapiens
cugcaguguagggcuacuuuguccuggcagga

SEQ ID NO: 44149 - RNA, 32 nt, Homo Sapiens
uuauauguuuauucuauucuccauuuuuccac

SEQ ID NO: 44150 - RNA, 32 nt, Homo Sapiens
aggcauauguuggugugggaaugcuaccuguc

SEQ ID NO: 44151 - RNA, 32 nt, Homo Sapiens
gggagccugcgguugcuacauaaccgcguagu

SEQ ID NO: 44152 - RNA, 32 nt, Homo Sapiens
gcaccgcgccuggccaggccggcugcaguuuc

SEQ ID NO: 44153 - RNA, 32 nt, Homo Sapiens
uugaaguuuuugaugccuguauacuggguaug

SEQ ID NO: 44154 - RNA, 32 nt, Homo Sapiens
uggcccccaacucaccagcaucaugaccuugu

SEQ ID NO: 44155 - RNA, 32 nt, Homo Sapiens
ccugacuaaaguuaaucgcagaugaacuagaa

SEQ ID NO: 44156 - RNA, 32 nt, Homo Sapiens
cuuacaaagggagaggcagugccaggcucaua

SEQ ID NO: 44157 - RNA, 32 nt, Homo Sapiens
ccagggccuccggcccguggacccgaggagga

SEQ ID NO: 44158 - RNA, 32 nt, Homo Sapiens
uuuuucuguguuucuuucacucagcaaaauua

SEQ ID NO: 44159 - RNA, 32 nt, Homo Sapiens
ucuaauuucauccugaauuccaaaaaauucuc

SEQ ID NO: 44160 - RNA, 32 nt, Homo Sapiens
agaaugagauaaauuuguacuuuuuagaucaa

SEQ ID NO: 44161 - RNA, 32 nt, Homo Sapiens
ucuucauccaaauuauuuuguuaguggaaaau

SEQ ID NO: 44162 - RNA, 32 nt, Homo Sapiens
uuucccccuuagaugccuggaagugguauuuu

SEQ ID NO: 44163 - RNA, 32 nt, Homo Sapiens
gaugacagagugagacccuguaucaugaaaaa

SEQ ID NO: 44164 - RNA, 31 nt, Homo Sapiens
ggcgccauggcuccccgcgggaggaagcgua

SEQ ID NO: 44165 - RNA, 32 nt, Homo Sapiens
caaggugcuguaaugaggcugcggucggccau

SEQ ID NO: 44166 - RNA, 32 nt, Homo Sapiens
ggaugaggaccccuccaucuccguggauuacu

SEQ ID NO: 44167 - RNA, 32 nt, Homo Sapiens
gcaugggucuuuaaggacuucucucucuuuuu

SEQ ID NO: 44168 - RNA, 32 nt, Homo Sapiens
ccuccugcuucaugggccuggaugcagaucug

SEQ ID NO: 44169 - RNA, 32 nt, Homo Sapiens
gaagcucccccacccccacucccggccccggu

SEQ ID NO: 44170 - RNA, 32 nt, Homo Sapiens
gcuggggcuugggagcagcugcugugucaugg

SEQ ID NO: 44171 - RNA, 32 nt, Homo Sapiens
aggacuguuuccuuuuucuccucuuccauuuc

SEQ ID NO: 44172 - RNA, 32 nt, Homo Sapiens
auagcuuucugcaaacuugucuuuaaugcaca

SEQ ID NO: 44173 - RNA, 32 nt, Homo Sapiens
uugccaaaaugguggaguauguaauugguaaa

SEQ ID NO: 44174 - RNA, 32 nt, Homo Sapiens
gauaugccuccacuucucucccuaaccaaggu

SEQ ID NO: 44175 - RNA, 32 nt, Homo Sapiens
agguccgcggcugcugcugcguccgacccccg

SEQ ID NO: 44176 - RNA, 32 nt, Homo Sapiens
uagcauuaugaguagugugaauucagguagua

SEQ ID NO: 44177 - RNA, 32 nt, Homo Sapiens
gauaaaagaggaggagugagcacuggaaauac

SEQ ID NO: 44178 - RNA, 32 nt, Homo Sapiens
gcuaccuggaagauccuucugugguggacaag

SEQ ID NO: 44179 - RNA, 32 nt, Homo Sapiens
ugcaaaccuugaugauggggcugggcgcggug

SEQ ID NO: 44180 - RNA, 32 nt, Homo Sapiens
acuaugccugcgcccugguaaaggugaccccu

SEQ ID NO: 44181 - RNA, 32 nt, Homo Sapiens
ccccugcuccagcccaguucucacauuccccu

SEQ ID NO: 44182 - RNA, 32 nt, Homo Sapiens
agagcagaugaccccuccccuaaugccugcgg

SEQ ID NO: 44183 - RNA, 32 nt, Homo Sapiens
gcuugagagcccugaggccuagacucugucua

SEQ ID NO: 44184 - RNA, 32 nt, Homo Sapiens
ugggcccuaccuugagcuucuccaguuuuauu

SEQ ID NO: 44185 - RNA, 32 nt, Homo Sapiens
gagacucacacgcuuugguuaauaucuguguu

SEQ ID NO: 44186 - RNA, 32 nt, Homo Sapiens
uccuggggccccacagaguccuugugcucagu

SEQ ID NO: 44187 - RNA, 32 nt, Homo Sapiens
gagcaucugucaacagaaucuacaaaaaagau

SEQ ID NO: 44188 - RNA, 32 nt, Homo Sapiens
uggacgcgcuggccucccgccgcugugcauug

SEQ ID NO: 44189 - RNA, 32 nt, Homo Sapiens
ucugauaagcaaggauuguuucccguaggauu

SEQ ID NO: 44190 - RNA, 32 nt, Homo Sapiens
ugggagaaaugacuuugaaaaccuggcucuaa

SEQ ID NO: 44191 - RNA, 32 nt, Homo Sapiens
gccucgggccgucagcaauaccucugagugcc

SEQ ID NO: 44192 - RNA, 32 nt, Homo Sapiens
gccguauugggcuuaaauuucaggucuguagu

SEQ ID NO: 44193 - RNA, 32 nt, Homo Sapiens
gcacagugccagcggcagcggcaccagcagcc

SEQ ID NO: 44194 - RNA, 31 nt, Homo Sapiens
gggcagccugcaggaguccauuuuacacagg

SEQ ID NO: 44195 - RNA, 32 nt, Homo Sapiens
guuuacauucuuauuucuuuugacauuuugga

SEQ ID NO: 44196 - RNA, 32 nt, Homo Sapiens
aagccuccugaguagcugggacauaccaacac

SEQ ID NO: 44197 - RNA, 27 nt, Homo Sapiens
ggccgcuccuucuuucagcccaucaac

SEQ ID NO: 44198 - RNA, 32 nt, Homo Sapiens
cugccucggccuccugaguggcugggauugca

SEQ ID NO: 44199 - RNA, 32 nt, Homo Sapiens
caggguggcugcgggcgggugguggaaccagc

SEQ ID NO: 44200 - RNA, 30 nt, Homo Sapiens
cuuaaggauaaaagaccauaauauuugcug

SEQ ID NO: 44201 - RNA, 28 nt, Homo Sapiens
gucauggccgcgccggccccggucacgc

SEQ ID NO: 44202 - RNA, 32 nt, Homo Sapiens
cccaggggaagcugcaguguggggagggaaug

SEQ ID NO: 44203 - RNA, 32 nt, Homo Sapiens
uuuugcucucuuccucuuucuccggccaugua

SEQ ID NO: 44204 - RNA, 32 nt, Homo Sapiens
cucacucugaccacuucucugccugcccagca

SEQ ID NO: 44205 - RNA, 32 nt, Homo Sapiens
uccccagccucgggccaguuguugcagcucaa

SEQ ID NO: 44206 - RNA, 32 nt, Homo Sapiens
agucugcuuggaacgggauaagagggauggug

SEQ ID NO: 44207 - RNA, 30 nt, Homo Sapiens
cgcucgcuggggcagcaccaguccuagcug

SEQ ID NO: 44208 - RNA, 32 nt, Homo Sapiens
gggagggcccuggacauggcccggccccacug

SEQ ID NO: 44209 - RNA, 32 nt, Homo Sapiens
uuuuugagucauugacuucauuuuauauuuaa

SEQ ID NO: 44210 - RNA, 32 nt, Homo Sapiens
agagagacauagcuggaaaauuccuauugauu

SEQ ID NO: 44211 - RNA, 27 nt, Homo Sapiens
ugcgugcgcgacuucagcccccgcucg

SEQ ID NO: 44212 - RNA, 32 nt, Homo Sapiens
agauaacgugggacaucgauucgggccagaag

SEQ ID NO: 44213 - RNA, 32 nt, Homo Sapiens
aaucacuggauaauauguagauauauuuuagu

SEQ ID NO: 44214 - RNA, 32 nt, Homo Sapiens
caccuccgccuccaccucccccugccacagag

SEQ ID NO: 44215 - RNA, 32 nt, Homo Sapiens
aauacagugcaaaauguguuaagggauuauag

SEQ ID NO: 44216 - RNA, 32 nt, Homo Sapiens
gacgggaggaugagcggcgggcggcggaagga

SEQ ID NO: 44217 - RNA, 32 nt, Homo Sapiens
auacaguuauaugaaauguuuauuuucuaugu

SEQ ID NO: 44218 - RNA, 32 nt, Homo Sapiens
aucauucacagcaagucacuggccaguggcug

SEQ ID NO: 44219 - RNA, 32 nt, Homo Sapiens
ggauguguggaggagguuuugaucuccucuuc

SEQ ID NO: 44220 - RNA, 32 nt, Homo Sapiens
aaagaggucaggcgcaguggcucacaacugua

SEQ ID NO: 44221 - RNA, 32 nt, Homo Sapiens
ugugggccgcgugcggcgucuucuccaucgug

SEQ ID NO: 44222 - RNA, 32 nt, Homo Sapiens
gaccgcuucccggcugcccagagggcuggaug

SEQ ID NO: 44223 - RNA, 32 nt, Homo Sapiens
uuaagaacuuagacuuuuuuaaaacuuuugua

SEQ ID NO: 44224 - RNA, 32 nt, Homo Sapiens
ucacucaaaaauuucuuuuccaugucauucuu

SEQ ID NO: 44225 - RNA, 32 nt, Homo Sapiens
cagccacagcccuguuuguugaccagagucuu

SEQ ID NO: 44226 - RNA, 32 nt, Homo Sapiens
cuguuccaguugcaaugcucuuuccccagaca

SEQ ID NO: 44227 - RNA, 32 nt, Homo Sapiens
ugccuguucacucaccucucccuuccccaacc

SEQ ID NO: 44228 - RNA, 32 nt, Homo Sapiens
uaaaauuucuuacugagaauuuggaacaacaa

SEQ ID NO: 44229 - RNA, 32 nt, Homo Sapiens
ugugguuauuucugcccuucacggucccacuc

SEQ ID NO: 44230 - RNA, 32 nt, Homo Sapiens
caucagaagauaacuugagcaccgucauggcu

SEQ ID NO: 44231 - RNA, 32 nt, Homo Sapiens
accuguggccgcggccuggcgucugcugcgac

SEQ ID NO: 44232 - RNA, 32 nt, Homo Sapiens
gcuccccgcgcgcccgucccgaguccgcugcu

SEQ ID NO: 44233 - RNA, 32 nt, Homo Sapiens
cagccgauuuuuccuuuuugauuaaagaugcu

SEQ ID NO: 44234 - RNA, 32 nt, Homo Sapiens
gucuagcgcgcgccgcgcagacgcccccggag

SEQ ID NO: 44235 - RNA, 32 nt, Homo Sapiens
augaauuaauauauuuauauauugaggcugug

SEQ ID NO: 44236 - RNA, 32 nt, Homo Sapiens
ggaaacacaguggccuuggagggcuggggagu

SEQ ID NO: 44237 - RNA, 32 nt, Homo Sapiens
uccacaggaaccagcucccuacgcuuccccca

SEQ ID NO: 44238 - RNA, 32 nt, Homo Sapiens
uagcccaggagcuugggugugcugacgagcag

SEQ ID NO: 44239 - RNA, 32 nt, Homo Sapiens
cuggaaagauauaaaaguuugggucugucucc

SEQ ID NO: 44240 - RNA, 32 nt, Homo Sapiens
aucuugcaucuguucaggacaacaucccugcu

SEQ ID NO: 44241 - RNA, 32 nt, Homo Sapiens
uauauuguuugauacucaguaccuguuuuaag

SEQ ID NO: 44242 - RNA, 32 nt, Homo Sapiens
agcacauggccauagaggcccaggcaccacca

SEQ ID NO: 44243 - RNA, 32 nt, Homo Sapiens
cuuucuuggcuggcaacacacacacacacaca

SEQ ID NO: 44244 - RNA, 32 nt, Homo Sapiens
gagguagaugaagaagcagcauaguggucucc

SEQ ID NO: 44245 - RNA, 32 nt, Homo Sapiens
aauucucugaccagcuuggggcacuguuucag

SEQ ID NO: 44246 - RNA, 32 nt, Homo Sapiens
gucacaaaccgcuggguuuuugaaaggauccu

SEQ ID NO: 44247 - RNA, 32 nt, Homo Sapiens
cuccggcgggggcugccaccgaggggaauuuc

SEQ ID NO: 44248 - RNA, 32 nt, Homo Sapiens
caccccucugcagacugccccgcggccucggc

SEQ ID NO: 44249 - RNA, 32 nt, Homo Sapiens
gccgcagguuucgccagugcucgacaacccac

SEQ ID NO: 44250 - RNA, 28 nt, Homo Sapiens
cuaccaaugacuuucuucacagaauugg

SEQ ID NO: 44251 - RNA, 32 nt, Homo Sapiens
gcaacguuuuaaaggucgacauggugauugaa

SEQ ID NO: 44252 - RNA, 32 nt, Homo Sapiens
uugagagaaucaaaugaguuuacuuuuguucc

SEQ ID NO: 44253 - RNA, 32 nt, Homo Sapiens
  misc_feature (6)..(6): n is a, c, g, or u
guaucncagaauuuauacuauaaaaagggcag

SEQ ID NO: 44254 - RNA, 27 nt, Homo Sapiens
agauccucccacuucagccucccgagu

SEQ ID NO: 44255 - RNA, 32 nt, Homo Sapiens
uuuuguugauuuuucuuuuuuaauuuuggaac

SEQ ID NO: 44256 - RNA, 32 nt, Homo Sapiens
gacaccaggacacagggacagguucugucaug

SEQ ID NO: 44257 - RNA, 32 nt, Homo Sapiens
acaauacuguagugcauaaaauauuaaaauuu

SEQ ID NO: 44258 - RNA, 32 nt, Homo Sapiens
uaggauaauuuaaccuaccagcccuucucccc

SEQ ID NO: 44259 - RNA, 32 nt, Homo Sapiens
cagcaccuugcuccccgcugcccugggcucuc

SEQ ID NO: 44260 - RNA, 32 nt, Homo Sapiens
cagguggaggaccugagcaagcagcucaagcg

SEQ ID NO: 44261 - RNA, 32 nt, Homo Sapiens
cucaccagugauugcugcugccaacccccuug

SEQ ID NO: 44262 - RNA, 30 nt, Homo Sapiens
gcgggguuccugcgcgcggcccgccaugga

SEQ ID NO: 44263 - RNA, 31 nt, Homo Sapiens
auuaguuuugguaauucuagcaugguuauau

SEQ ID NO: 44264 - RNA, 32 nt, Homo Sapiens
acaauucaucguugcacccccaccucagagug

SEQ ID NO: 44265 - RNA, 32 nt, Homo Sapiens
accagugcugguccaguggcugugaugggaaa

SEQ ID NO: 44266 - RNA, 32 nt, Homo Sapiens
cccuagcgcucuggguccuuaauggcagcagc

SEQ ID NO: 44267 - RNA, 32 nt, Homo Sapiens
uaaguacuuccacuuguguauauuuuaaugaa

SEQ ID NO: 44268 - RNA, 32 nt, Homo Sapiens
gaggugagcggcgggcggggauggcggagcaa

SEQ ID NO: 44269 - RNA, 32 nt, Homo Sapiens
cuuaaauguaauuaagaucauaaaaacaugca

SEQ ID NO: 44270 - RNA, 32 nt, Homo Sapiens
cccccaccucuccacuaguuggaccaagguuu

SEQ ID NO: 44271 - RNA, 32 nt, Homo Sapiens
auacugugguucuauuugauaauaauagagua

SEQ ID NO: 44272 - RNA, 32 nt, Homo Sapiens
cgaucccaggacacgucgggaagcaagcaucc

SEQ ID NO: 44273 - RNA, 32 nt, Homo Sapiens
ggugggcacccggcugcgggaggagcggccag

SEQ ID NO: 44274 - RNA, 32 nt, Homo Sapiens
accugcaaagccuugagaggucuugagccucc

SEQ ID NO: 44275 - RNA, 32 nt, Homo Sapiens
cccaacaaacuccuugacagacucaggcaggu

SEQ ID NO: 44276 - RNA, 32 nt, Homo Sapiens
cucuuacuccaucuuuccugcucaggucacaa

SEQ ID NO: 44277 - RNA, 32 nt, Homo Sapiens
acccuggccaugggagcuaucucagccuaaug

SEQ ID NO: 44278 - RNA, 32 nt, Homo Sapiens
cugaggagugagggaggcucugugcaggccga

SEQ ID NO: 44279 - RNA, 32 nt, Homo Sapiens
acagaucuguguagaggaauguguguauauuu

SEQ ID NO: 44280 - RNA, 32 nt, Homo Sapiens
caucagcaaggugggaugcagcccccggcauu

SEQ ID NO: 44281 - RNA, 32 nt, Homo Sapiens
auggcgcccggugagggcgggccccacaggcc

SEQ ID NO: 44282 - RNA, 32 nt, Homo Sapiens
ugugcauuuuuuucuuuuuuuuuuuaaacugu

SEQ ID NO: 44283 - RNA, 32 nt, Homo Sapiens
agccuggccaacaugaugaaaccccguuucua

SEQ ID NO: 44284 - RNA, 32 nt, Homo Sapiens
aggauccggcugccgaagguccucgccagcag

SEQ ID NO: 44285 - RNA, 32 nt, Homo Sapiens
gcaaguguagcggaggcaccacgaagcuguga

SEQ ID NO: 44286 - RNA, 32 nt, Homo Sapiens
uugaaaacaggucauauugugcucuucuguuu

SEQ ID NO: 44287 - RNA, 32 nt, Homo Sapiens
uuuaguugggaaugguacauuuuuguaaaucc

SEQ ID NO: 44288 - RNA, 32 nt, Homo Sapiens
cauuagggaaggaauggaugugugcucuaugg

SEQ ID NO: 44289 - RNA, 32 nt, Homo Sapiens
guagaccuaaaauuauuuuugccuauaaacag

SEQ ID NO: 44290 - RNA, 32 nt, Homo Sapiens
auuaagacuaccaagaagcaugcugaacuagc

SEQ ID NO: 44291 - RNA, 32 nt, Homo Sapiens
ugggcgggaacaaauagucaaauuauauuacc

SEQ ID NO: 44292 - RNA, 32 nt, Homo Sapiens
gaugugagaggacacgcgggugaugugucuug

SEQ ID NO: 44293 - RNA, 32 nt, Homo Sapiens
cugacuuaauaaaguuuccugaaacaacaacu

SEQ ID NO: 44294 - RNA, 32 nt, Homo Sapiens
ggacacgagugcauguguccuugugccacaac

SEQ ID NO: 44295 - RNA, 32 nt, Homo Sapiens
caccugacgagaaauacccacagguguggagg

SEQ ID NO: 44296 - RNA, 32 nt, Homo Sapiens
aaguuucuuuaaccccauauggcccaagagua

SEQ ID NO: 44297 - RNA, 32 nt, Homo Sapiens
aucuugcagcuagacccuuugagacuuaagag

SEQ ID NO: 44298 - RNA, 32 nt, Homo Sapiens
aaagaaggugacugcauaagcuuuuguuguug

SEQ ID NO: 44299 - RNA, 32 nt, Homo Sapiens
uaacaaaagaucuggaagucacccuccucugg

SEQ ID NO: 44300 - RNA, 32 nt, Homo Sapiens
gagacuuacugggugaggaaauccauuguuua

SEQ ID NO: 44301 - RNA, 32 nt, Homo Sapiens
guuauuuccaccuguuuggguagggccauuua

SEQ ID NO: 44302 - RNA, 31 nt, Homo Sapiens
gcacuaccgggccccacuguuuagaaucuua

SEQ ID NO: 44303 - RNA, 32 nt, Homo Sapiens
ugagacuucgcaaaucucuggaaaauaauauc

SEQ ID NO: 44304 - RNA, 32 nt, Homo Sapiens
ggccacccaucccuuuucauucuccagcagaa

SEQ ID NO: 44305 - RNA, 32 nt, Homo Sapiens
cguaaguauaauguaacaguuaacucaugaug

SEQ ID NO: 44306 - RNA, 32 nt, Homo Sapiens
agacagaggguggagggccaugcuguggacag

SEQ ID NO: 44307 - RNA, 32 nt, Homo Sapiens
uggcuucgcuggucggaucguccuccuggccc

SEQ ID NO: 44308 - RNA, 32 nt, Homo Sapiens
aaucguggugccuagacuuugcauuccuuguu

SEQ ID NO: 44309 - RNA, 32 nt, Homo Sapiens
gaacgcgcccucucgccgcgcgcgcccucgca

SEQ ID NO: 44310 - RNA, 32 nt, Homo Sapiens
gggaugaggguggggggugugggaaggguacc

SEQ ID NO: 44311 - RNA, 32 nt, Homo Sapiens
gaauuaaacagcuauguaaaucauaaagaaaa

SEQ ID NO: 44312 - RNA, 32 nt, Homo Sapiens
auaagaacuaaaugcaguaagcgcuaauuccu

SEQ ID NO: 44313 - RNA, 32 nt, Homo Sapiens
agcccggagaccgcgcccaccagcgccggugu

SEQ ID NO: 44314 - RNA, 32 nt, Homo Sapiens
agccagccugagcugccuccuccauggcuuuc

SEQ ID NO: 44315 - RNA, 32 nt, Homo Sapiens
auaugauaacauuuuaacuuucguuuuagagc

SEQ ID NO: 44316 - RNA, 32 nt, Homo Sapiens
uuccucuaaacacaacagggcacagcaaauac

SEQ ID NO: 44317 - RNA, 32 nt, Homo Sapiens
cuaaugagggacaguagggucugggauccaaa

SEQ ID NO: 44318 - RNA, 32 nt, Homo Sapiens
gggaaagaguuuguuuuuggggccuacuuuuc

SEQ ID NO: 44319 - RNA, 32 nt, Homo Sapiens
uggguuugacuccagggaaggcacucuuaugg

SEQ ID NO: 44320 - RNA, 32 nt, Homo Sapiens
uacacacagcacacuccagcucugccacuggg

SEQ ID NO: 44321 - RNA, 32 nt, Homo Sapiens
aggcagccugaacacucaguugcagggucggg

SEQ ID NO: 44322 - RNA, 32 nt, Homo Sapiens
agucucaggccggguccuggggcuugcagagg

SEQ ID NO: 44323 - RNA, 32 nt, Homo Sapiens
ccaaggccacuccucgcucucuaggccgagaa

SEQ ID NO: 44324 - RNA, 32 nt, Homo Sapiens
guuacugcugacucacauucauucuccgccau

SEQ ID NO: 44325 - RNA, 32 nt, Homo Sapiens
ucuccagaaaauuuuucugucagugaaaauaa

SEQ ID NO: 44326 - RNA, 32 nt, Homo Sapiens
ucuucucucuucaaucucuggaaaaauaagua

SEQ ID NO: 44327 - RNA, 32 nt, Homo Sapiens
aaggaaaugaacucauccuuuuuuauggcugc

SEQ ID NO: 44328 - RNA, 32 nt, Homo Sapiens
accuuuacagcuuuuuauuguggacuaaugca

SEQ ID NO: 44329 - RNA, 32 nt, Homo Sapiens
acaaguuugugauuaguccuuaaaacuuagcu

SEQ ID NO: 44330 - RNA, 32 nt, Homo Sapiens
augaaaccaacccucaaaaaacagucuccuaa

SEQ ID NO: 44331 - RNA, 32 nt, Homo Sapiens
cggggccggccgccucaggcucgccgccacca

SEQ ID NO: 44332 - RNA, 32 nt, Homo Sapiens
auauucagugcauuuauagagaaggauauuuu

SEQ ID NO: 44333 - RNA, 32 nt, Homo Sapiens
cccaaauccauccucugguuauauacaaagug

SEQ ID NO: 44334 - RNA, 32 nt, Homo Sapiens
ggugagaccucaucucuuaccaaaaaauacga

SEQ ID NO: 44335 - RNA, 32 nt, Homo Sapiens
agaauuuuacuuuuggauagaaauaugaagug

SEQ ID NO: 44336 - RNA, 32 nt, Homo Sapiens
uuguucuguuucugccaaacuucuuuaacucc

SEQ ID NO: 44337 - RNA, 32 nt, Homo Sapiens
agguaacaucuaaaacagagaugugguucuua

SEQ ID NO: 44338 - RNA, 32 nt, Homo Sapiens
ugcauagacauuccauacggcuugguucugcc

SEQ ID NO: 44339 - RNA, 32 nt, Homo Sapiens
gcagcuagccagcacugagcugcguggugccu

SEQ ID NO: 44340 - RNA, 32 nt, Homo Sapiens
ggugggcugccaaggagaaguacuuaccagga

SEQ ID NO: 44341 - RNA, 32 nt, Homo Sapiens
cgugcccccacacugguaagccugcagcccau

SEQ ID NO: 44342 - RNA, 32 nt, Homo Sapiens
ugaaucaaccuggacccuuccacagccuggcu

SEQ ID NO: 44343 - RNA, 32 nt, Homo Sapiens
uucuagaggauucugcuucucuaguaacuaga

SEQ ID NO: 44344 - RNA, 32 nt, Homo Sapiens
uauuugcugucuuuuucuugcuucauuagagu

SEQ ID NO: 44345 - RNA, 32 nt, Homo Sapiens
gugugagggcauugaguuugauuuguuuuccc

SEQ ID NO: 44346 - RNA, 30 nt, Homo Sapiens
ccacgugcuuucggcggcgacauggagcug

SEQ ID NO: 44347 - RNA, 32 nt, Homo Sapiens
ccaagucuguaagcaagcaguauacuuugaaa

SEQ ID NO: 44348 - RNA, 32 nt, Homo Sapiens
cagcacacgcacccacgcguggcucggcaggc

SEQ ID NO: 44349 - RNA, 32 nt, Homo Sapiens
cagaaacucauugaaauggaugaugaaugcaa

SEQ ID NO: 44350 - RNA, 32 nt, Homo Sapiens
aaucugcuaucacucauucagaaaaagaauac

SEQ ID NO: 44351 - RNA, 32 nt, Homo Sapiens
gcgaguaugugcuuugccgggaggagcggcgg

SEQ ID NO: 44352 - RNA, 32 nt, Homo Sapiens
cuugaaugacuuguuuuauuugcaauaaaacu

SEQ ID NO: 44353 - RNA, 32 nt, Homo Sapiens
gguuaaugaauacuuugcuauuacuguuuuac

SEQ ID NO: 44354 - RNA, 32 nt, Homo Sapiens
uuaucugaauaacaaggcaacuuuuguuuacc

SEQ ID NO: 44355 - RNA, 28 nt, Homo Sapiens
cccggggaggggccgccgucuuguggau

SEQ ID NO: 44356 - RNA, 32 nt, Homo Sapiens
caucaguauuauguucuaaauaaacuuauggc

SEQ ID NO: 44357 - RNA, 32 nt, Homo Sapiens
ggagauuggggauuaugacucagggaaacacc

SEQ ID NO: 44358 - RNA, 32 nt, Homo Sapiens
ucccuguaacaaguauuuauccguccauccau

SEQ ID NO: 44359 - RNA, 32 nt, Homo Sapiens
ggcugucacaccugucugccccggcccccgag

SEQ ID NO: 44360 - RNA, 32 nt, Homo Sapiens
uagaucacgcucagacacacuaccuccuccca

SEQ ID NO: 44361 - RNA, 32 nt, Homo Sapiens
uagcauggcuugugcuggccggugugccauau

SEQ ID NO: 44362 - RNA, 32 nt, Homo Sapiens
auauauauacuucuugcauggaagagcaaaac

SEQ ID NO: 44363 - RNA, 32 nt, Homo Sapiens
cagaggcggcggcggcagcggcugcagcauca

SEQ ID NO: 44364 - RNA, 32 nt, Homo Sapiens
agguccuucuugaucaucuagaacugaccgcu

SEQ ID NO: 44365 - RNA, 32 nt, Homo Sapiens
auaauuguacuuugaaaacaccagcuguauau

SEQ ID NO: 44366 - RNA, 32 nt, Homo Sapiens
uacauaaauauguucuuuacugagggagcuua

SEQ ID NO: 44367 - RNA, 32 nt, Homo Sapiens
agucaucccaggggggcgggggcggggcugca

SEQ ID NO: 44368 - RNA, 29 nt, Homo Sapiens
gcaccuucgguccgguugagguugucaag

SEQ ID NO: 44369 - RNA, 32 nt, Homo Sapiens
gcugcuguugcugaaagagacuugggcuacug

SEQ ID NO: 44370 - RNA, 29 nt, Homo Sapiens
caccaugggaugaugucuguaacaucaga

SEQ ID NO: 44371 - RNA, 32 nt, Homo Sapiens
gagccuggugccugggagcggcuggcgcggcg

SEQ ID NO: 44372 - RNA, 32 nt, Homo Sapiens
ugaaaucuauuuccuuuuauaauagauuaaaa

SEQ ID NO: 44373 - RNA, 32 nt, Homo Sapiens
gggagcagggcagugcugugucugcugccucc

SEQ ID NO: 44374 - RNA, 32 nt, Homo Sapiens
ccagacauggugcguggggcccggggccccga

SEQ ID NO: 44375 - RNA, 32 nt, Homo Sapiens
uaaccauagauguagauaaacucagaaauuua

SEQ ID NO: 44376 - RNA, 32 nt, Homo Sapiens
gcagaagcucacugccuauaagaggaaauaag

SEQ ID NO: 44377 - RNA, 32 nt, Homo Sapiens
ccucuguugcuguuaacauaaggucagggacu

SEQ ID NO: 44378 - RNA, 32 nt, Homo Sapiens
gcgggccugauacucgaguccacaugcccccu

SEQ ID NO: 44379 - RNA, 32 nt, Homo Sapiens
uaaauauucuaggaguagaagcacucagacuu

SEQ ID NO: 44380 - RNA, 32 nt, Homo Sapiens
ucuccaagagccuauucauugauucaaacacc

SEQ ID NO: 44381 - RNA, 32 nt, Homo Sapiens
auagacugugcuuuuucuuuuucucucccuuc

SEQ ID NO: 44382 - RNA, 32 nt, Homo Sapiens
uauaaaauauacucacaaaaccauugcagaaa

SEQ ID NO: 44383 - RNA, 32 nt, Homo Sapiens
aacggagcccucggugaugcggacaucucagg

SEQ ID NO: 44384 - RNA, 32 nt, Homo Sapiens
aauaaagcccuugaauacuuugaaaaaaaaaa

SEQ ID NO: 44385 - RNA, 32 nt, Homo Sapiens
cgcacacccgcggugguucccaggcccgcccc

SEQ ID NO: 44386 - RNA, 32 nt, Homo Sapiens
acuguuucauauuuuucuuuugacaaaguagc

SEQ ID NO: 44387 - RNA, 32 nt, Homo Sapiens
ccacuugcaaauaacuggccacaucauuaaug

SEQ ID NO: 44388 - RNA, 32 nt, Homo Sapiens
cagugaauacucagaaccgaggaugcagauga

SEQ ID NO: 44389 - RNA, 32 nt, Homo Sapiens
ccugccccgcggcaagcgcggccgcggagugg

SEQ ID NO: 44390 - RNA, 32 nt, Homo Sapiens
auauuccuuuaaaagaaagcaauuuaaucaau

SEQ ID NO: 44391 - RNA, 32 nt, Homo Sapiens
cccguaggguaaagguuuuguuuuuguuuuuu

SEQ ID NO: 44392 - RNA, 32 nt, Homo Sapiens
gucggugcugaaccugagacgcgagcggacca

SEQ ID NO: 44393 - RNA, 32 nt, Homo Sapiens
auugugaacugacaggcagccuggacauagag

SEQ ID NO: 44394 - RNA, 32 nt, Homo Sapiens
aauagcaauaaauggguuuuguuuuuuuuuug

SEQ ID NO: 44395 - RNA, 32 nt, Homo Sapiens
aaauccuucuccauucagaaaucuaauauuua

SEQ ID NO: 44396 - RNA, 32 nt, Homo Sapiens
ugagagcaaccuggucaucugggggcggucua

SEQ ID NO: 44397 - RNA, 32 nt, Homo Sapiens
uucaaacccugcuuaugauaugaaaauauuaa

SEQ ID NO: 44398 - RNA, 32 nt, Homo Sapiens
ggcuggcucccucccccucagacccucacuuc

SEQ ID NO: 44399 - RNA, 32 nt, Homo Sapiens
auuacagguguuagccacugcgccugccugau

SEQ ID NO: 44400 - RNA, 32 nt, Homo Sapiens
guuuugcccgucugggucagauggucuuggag

SEQ ID NO: 44401 - RNA, 32 nt, Homo Sapiens
ugacccgggaggaggccgcacccgcgccgcgc

SEQ ID NO: 44402 - RNA, 32 nt, Homo Sapiens
ucccccgggaugcaagucccugcgcugacgcc

SEQ ID NO: 44403 - RNA, 32 nt, Homo Sapiens
guuuuuuaaaaauuauguacauuuuaaguauu

SEQ ID NO: 44404 - RNA, 32 nt, Homo Sapiens
ugggggaggugugaagggaaagaaauucuuuu

SEQ ID NO: 44405 - RNA, 32 nt, Homo Sapiens
uagaaaucgagaagcugauccugaaauucaua

SEQ ID NO: 44406 - RNA, 32 nt, Homo Sapiens
uuaaggcugggaggcgggaggggggcuggacc

SEQ ID NO: 44407 - RNA, 32 nt, Homo Sapiens
uccuggugcccaaaggagaugugcuuccauca

SEQ ID NO: 44408 - RNA, 32 nt, Homo Sapiens
cgcuccgggagccagcaggccccucgcucaac

SEQ ID NO: 44409 - RNA, 32 nt, Homo Sapiens
agagcaggggagagagugagcgugagcuuggc

SEQ ID NO: 44410 - RNA, 32 nt, Homo Sapiens
uugaggucaggaguuugagaccagccugauca

SEQ ID NO: 44411 - RNA, 32 nt, Homo Sapiens
uggguaccaggcuucugccacccccggcucag

SEQ ID NO: 44412 - RNA, 32 nt, Homo Sapiens
uauauuuauuaagguuuauagagaccuagaga

SEQ ID NO: 44413 - RNA, 32 nt, Homo Sapiens
uucaugauuguaauaauguuacaugaucaugg

SEQ ID NO: 44414 - RNA, 32 nt, Homo Sapiens
gucggaggggacgggacgcaccggagggcagg

SEQ ID NO: 44415 - RNA, 32 nt, Homo Sapiens
uuccccguuguacagaggcuagagugaggcuc

SEQ ID NO: 44416 - RNA, 29 nt, Homo Sapiens
cagaccuggggacagagucuuucacgagu

SEQ ID NO: 44417 - RNA, 32 nt, Homo Sapiens
acacgugcauauaacauauguagauaucugcc

SEQ ID NO: 44418 - RNA, 32 nt, Homo Sapiens
ccaugggcagaacugcugucuuuacuacuuca

SEQ ID NO: 44419 - RNA, 32 nt, Homo Sapiens
uuuucaaagcaguggaggagcacacggcaccu

SEQ ID NO: 44420 - RNA, 32 nt, Homo Sapiens
aaguccagccauuguugggaaccauggaauca

SEQ ID NO: 44421 - RNA, 32 nt, Homo Sapiens
gagacaucaaucaaauacauauaagaaauaca

SEQ ID NO: 44422 - RNA, 32 nt, Homo Sapiens
uacaguuaauuguggauaacuuacauagaaaa

SEQ ID NO: 44423 - RNA, 32 nt, Homo Sapiens
gugcagccugaaggaucaguguaguaaugcca

SEQ ID NO: 44424 - RNA, 32 nt, Homo Sapiens
uucuucuuugugcuucccgugugccuccccag

SEQ ID NO: 44425 - RNA, 32 nt, Homo Sapiens
gacaagaaacagagugguaggcuggucauuuc

SEQ ID NO: 44426 - RNA, 32 nt, Homo Sapiens
agaagccaccaucaaaacaaaggaugggauac

SEQ ID NO: 44427 - RNA, 32 nt, Homo Sapiens
ucaaggguacgcugcguccagguuuauuucag

SEQ ID NO: 44428 - RNA, 32 nt, Homo Sapiens
acaucuuuauugcuuggcuaagaguagauuua

SEQ ID NO: 44429 - RNA, 32 nt, Homo Sapiens
gaggcugcagugagccgagaucgcaccacugc

SEQ ID NO: 44430 - RNA, 32 nt, Homo Sapiens
gacaugugaaagacauacgagacauagcuaca

SEQ ID NO: 44431 - RNA, 32 nt, Homo Sapiens
ugcgacuucagacaccagcuccccucuuucua

SEQ ID NO: 44432 - RNA, 32 nt, Homo Sapiens
cccugcuccgccccgcgcuccccugcaccccu

SEQ ID NO: 44433 - RNA, 32 nt, Homo Sapiens
agcccuaguaaauguuaaauauuguuauuagu

SEQ ID NO: 44434 - RNA, 32 nt, Homo Sapiens
aaacggagggcuugcggcuagccggaggaagc

SEQ ID NO: 44435 - RNA, 32 nt, Homo Sapiens
cucaaucacacgcucuucaaguccggcuccca

SEQ ID NO: 44436 - RNA, 32 nt, Homo Sapiens
auaacucuguucaucuuauaaaacugaaacua

SEQ ID NO: 44437 - RNA, 32 nt, Homo Sapiens
acuuucuuucuuucuuuuuuuuuuuuuggaga

SEQ ID NO: 44438 - RNA, 32 nt, Homo Sapiens
aacugguugcugugucauaacuucauagaugc

SEQ ID NO: 44439 - RNA, 32 nt, Homo Sapiens
guucaguguuugucaagcuucuggucuaauau

SEQ ID NO: 44440 - RNA, 32 nt, Homo Sapiens
gagggguucaacagggaauagucucauaaugg

SEQ ID NO: 44441 - RNA, 32 nt, Homo Sapiens
aguuuuacagaaaaaagaggacaauauuggga

SEQ ID NO: 44442 - RNA, 32 nt, Homo Sapiens
ugggaguguucgcuuucgagcuuauugcagga

SEQ ID NO: 44443 - RNA, 32 nt, Homo Sapiens
gaggaccagggaagacccccuuuccuugcugu

SEQ ID NO: 44444 - RNA, 32 nt, Homo Sapiens
cuaaagccacaagaaucaaugauguuuuagcu

SEQ ID NO: 44445 - RNA, 32 nt, Homo Sapiens
gaggaagaagaagagggaggacucaggagacu

SEQ ID NO: 44446 - RNA, 32 nt, Homo Sapiens
cuccuggaccacaaccggcggcuaccucagcc

SEQ ID NO: 44447 - RNA, 31 nt, Homo Sapiens
guuugguggcacugcugguuaccccugggcc

SEQ ID NO: 44448 - RNA, 32 nt, Homo Sapiens
cagguggcucugcagcagccucugccacccug

SEQ ID NO: 44449 - RNA, 32 nt, Homo Sapiens
caaccaacccuuuccuucucuaugccugggcc

SEQ ID NO: 44450 - RNA, 32 nt, Homo Sapiens
caaaaaucaguauuauuuuaagagauguguuc

SEQ ID NO: 44451 - RNA, 27 nt, Homo Sapiens
ucuuuccaaauguucugguaucuuuga

SEQ ID NO: 44452 - RNA, 32 nt, Homo Sapiens
caccagugggaagagggugagggcugauccag

SEQ ID NO: 44453 - RNA, 32 nt, Homo Sapiens
guuugaaagagauuuguauuuuaccuaauaag

SEQ ID NO: 44454 - RNA, 32 nt, Homo Sapiens
gaggcucaggcgcggagcgcgcggacgggcgc

SEQ ID NO: 44455 - RNA, 32 nt, Homo Sapiens
uuaagcacugaagucagauuuuuuccuuuuaa

SEQ ID NO: 44456 - RNA, 32 nt, Homo Sapiens
cauccgcaucuuucucucuccuccaaaugaca

SEQ ID NO: 44457 - RNA, 32 nt, Homo Sapiens
ucuauuuauaugccugccuuugguacuuaauu

SEQ ID NO: 44458 - RNA, 32 nt, Homo Sapiens
gaauauguuucauuuguucuggugccaagaau

SEQ ID NO: 44459 - RNA, 32 nt, Homo Sapiens
gcccaugccgacagauaucguggggcugacag

SEQ ID NO: 44460 - RNA, 32 nt, Homo Sapiens
ccacgcguccgcgcugcgccacaucccaccgg

SEQ ID NO: 44461 - RNA, 32 nt, Homo Sapiens
uuccacagggauaccuuaauucuuuguuuccu

SEQ ID NO: 44462 - RNA, 32 nt, Homo Sapiens
acuaguaauuuucaucauuuaagagugauauu

SEQ ID NO: 44463 - RNA, 32 nt, Homo Sapiens
aacuuuaaacauugacgauuccuucucugaac

SEQ ID NO: 44464 - RNA, 32 nt, Homo Sapiens
guccaggcagcucccuccugcagacagaaugc

SEQ ID NO: 44465 - RNA, 29 nt, Homo Sapiens
uugaauauauguaugcauauauuguucag

SEQ ID NO: 44466 - RNA, 32 nt, Homo Sapiens
guggagacucgcguucccuccagccccugggg

SEQ ID NO: 44467 - RNA, 32 nt, Homo Sapiens
guauuuccacgagcgccagcucuguccuuuuu

SEQ ID NO: 44468 - RNA, 32 nt, Homo Sapiens
uccccccaacaucagucugcugcagcugccag

SEQ ID NO: 44469 - RNA, 32 nt, Homo Sapiens
cuggcuucuccauggaacucggucuacagcca

SEQ ID NO: 44470 - RNA, 32 nt, Homo Sapiens
ucuggcacucagccccucugggaaacaucuuu

SEQ ID NO: 44471 - RNA, 32 nt, Homo Sapiens
ucccgugucuuuccucauggcuucccaggagu

SEQ ID NO: 44472 - RNA, 32 nt, Homo Sapiens
cgguuaaguucuuuaauaauaauccuacaguu

SEQ ID NO: 44473 - RNA, 32 nt, Homo Sapiens
gccuccugugacuggcagcauugacucugugg

SEQ ID NO: 44474 - RNA, 32 nt, Homo Sapiens
cacugccgccgccgcugccgcugcuaccgcca

SEQ ID NO: 44475 - RNA, 30 nt, Homo Sapiens
auggugggcaggcgccuccuggcacugaug

SEQ ID NO: 44476 - RNA, 32 nt, Homo Sapiens
acccugggacgccccgccgcacaacuaccuca

SEQ ID NO: 44477 - RNA, 32 nt, Homo Sapiens
ucaagaguggaagaggaauuuaaggggucccc

SEQ ID NO: 44478 - RNA, 32 nt, Homo Sapiens
ugacgccagaaucuaagccuugaccaaauaug

SEQ ID NO: 44479 - RNA, 32 nt, Homo Sapiens
gcaacaagggaagagccggaggaaagaggcgu

SEQ ID NO: 44480 - RNA, 32 nt, Homo Sapiens
ccuaaagggacuaccucugugccuugccacau

SEQ ID NO: 44481 - RNA, 32 nt, Homo Sapiens
uggaccuggagagaggaugaaagggaauagga

SEQ ID NO: 44482 - RNA, 32 nt, Homo Sapiens
aaaaucaugauuaucaguguugaucucugcaa

SEQ ID NO: 44483 - RNA, 32 nt, Homo Sapiens
ggcuuuuucuucauuaccuuuuuuauucagaa

SEQ ID NO: 44484 - RNA, 32 nt, Homo Sapiens
ucccagcggcuuucucuuucugaugggaggug

SEQ ID NO: 44485 - RNA, 32 nt, Homo Sapiens
gcagcagucgccuccgccgccgcagcagcagc

SEQ ID NO: 44486 - RNA, 30 nt, Homo Sapiens
cucccaagcugugcugggaagcccggacug

SEQ ID NO: 44487 - RNA, 32 nt, Homo Sapiens
auaaaggaaaucaaauguuauuuuuaagaaaa

SEQ ID NO: 44488 - RNA, 31 nt, Homo Sapiens
cccugggcagucuccucgccccgcguccgcg

SEQ ID NO: 44489 - RNA, 32 nt, Homo Sapiens
uuuucguguguuuauuucuuuaguauuuacau

SEQ ID NO: 44490 - RNA, 32 nt, Homo Sapiens
ucaggccaaaguucacauucugcacagccuca

SEQ ID NO: 44491 - RNA, 32 nt, Homo Sapiens
ugacaaaaaucugaaaaacuaaugaggauuau

SEQ ID NO: 44492 - RNA, 32 nt, Homo Sapiens
guccaaugagcaggugcugaaguucgucaugg

SEQ ID NO: 44493 - RNA, 32 nt, Homo Sapiens
gaccaagggaggcacgcgcgcugccgggcgga

SEQ ID NO: 44494 - RNA, 32 nt, Homo Sapiens
cgaacucugaggcacuggggagcccagcccgg

SEQ ID NO: 44495 - RNA, 32 nt, Homo Sapiens
cacgggagaggcuauaugguauucuuaauggg

SEQ ID NO: 44496 - RNA, 32 nt, Homo Sapiens
ggaaacagcauuaagaauacugaaucaaaugg

SEQ ID NO: 44497 - RNA, 32 nt, Homo Sapiens
agguuuaugugaagauuuucuuugaaagggga

SEQ ID NO: 44498 - RNA, 32 nt, Homo Sapiens
gugacaaugugauaaugaaauuuuagaagaaa

SEQ ID NO: 44499 - RNA, 32 nt, Homo Sapiens
aauccauuugaaaggaguggcuaagaauucuc

SEQ ID NO: 44500 - RNA, 32 nt, Homo Sapiens
aaaccugcaaauguaauaaauuuggaaaaaag

SEQ ID NO: 44501 - RNA, 32 nt, Homo Sapiens
ccccuaccuuuauguuauguuuacugaugggg

SEQ ID NO: 44502 - RNA, 32 nt, Homo Sapiens
ccaucccucugugcucagcugcauuuccugcu

SEQ ID NO: 44503 - RNA, 32 nt, Homo Sapiens
gacacucugagaaaguuuaucaucaugauagc

SEQ ID NO: 44504 - RNA, 32 nt, Homo Sapiens
gggaacgugaggcucauugaucgccuggggaa

SEQ ID NO: 44505 - RNA, 32 nt, Homo Sapiens
cuuugccuccacucaaugccucaauuuguuuu

SEQ ID NO: 44506 - RNA, 32 nt, Homo Sapiens
gaagcggagcagcuggauugcucuggagcagc

SEQ ID NO: 44507 - RNA, 32 nt, Homo Sapiens
gagaucuggccucagcuugggcuagagaugcc

SEQ ID NO: 44508 - RNA, 32 nt, Homo Sapiens
aauuucagcaaccacuguaugaugcuuaugug

SEQ ID NO: 44509 - RNA, 32 nt, Homo Sapiens
gaggugggcaaaagaacaccugauggagccuc

SEQ ID NO: 44510 - RNA, 32 nt, Homo Sapiens
ugcagcggaggcggugaugucggugcagguug

SEQ ID NO: 44511 - RNA, 32 nt, Homo Sapiens
gagcccgcccgguggcggcuggggucggcugc

SEQ ID NO: 44512 - RNA, 32 nt, Homo Sapiens
uuuuuauuuuucauuuucucgaaggaagcgcc

SEQ ID NO: 44513 - RNA, 32 nt, Homo Sapiens
gggccauaaagaucuguaaaacauaacccaaa

SEQ ID NO: 44514 - RNA, 32 nt, Homo Sapiens
agggcagaucgggucuccgacccaggagaucg

SEQ ID NO: 44515 - RNA, 32 nt, Homo Sapiens
gaagaacagugaacaaauaaaaagagcucuau

SEQ ID NO: 44516 - RNA, 32 nt, Homo Sapiens
uacacagugcuuugggaauuccaaaguacuca

SEQ ID NO: 44517 - RNA, 32 nt, Homo Sapiens
agaucacguuacacgcacacaagcacacacau

SEQ ID NO: 44518 - RNA, 32 nt, Homo Sapiens
aucagagaggaaccaagggcaacaucuuuucu

SEQ ID NO: 44519 - RNA, 32 nt, Homo Sapiens
aggaguacugguuuuucauaaugguuaaaaau

SEQ ID NO: 44520 - RNA, 32 nt, Homo Sapiens
guaguaucuauuuuucuccauuauuuauuucu

SEQ ID NO: 44521 - RNA, 30 nt, Homo Sapiens
gggggccuggacugcacggcccggcagcag

SEQ ID NO: 44522 - RNA, 32 nt, Homo Sapiens
cauaaacaguuuuggagaaaaauuacagauca

SEQ ID NO: 44523 - RNA, 32 nt, Homo Sapiens
uuaacauggaagauauuccuuuuuaacuuugu

SEQ ID NO: 44524 - RNA, 32 nt, Homo Sapiens
cuccagacucugcaugagcuuccggaggguca

SEQ ID NO: 44525 - RNA, 32 nt, Homo Sapiens
cucagauauagcuggagcuacauccugcuucc

SEQ ID NO: 44526 - RNA, 32 nt, Homo Sapiens
ccgcccgcugcucggcggaucccagcugcggu

SEQ ID NO: 44527 - RNA, 32 nt, Homo Sapiens
guuuacaaaaauuucuguaaaacagguuauaa

SEQ ID NO: 44528 - RNA, 32 nt, Homo Sapiens
aucucuggaggcuggcagcuugacuuggcacu

SEQ ID NO: 44529 - RNA, 32 nt, Homo Sapiens
ggggacgcgccggccguagcgagguccuuagc

SEQ ID NO: 44530 - RNA, 32 nt, Homo Sapiens
uuccagagcagcagggcaauuuagacaccaag

SEQ ID NO: 44531 - RNA, 32 nt, Homo Sapiens
gacuccagcgccgccccgggcgcggaccccaa

SEQ ID NO: 44532 - RNA, 32 nt, Homo Sapiens
cuuccuuccucugcuugucucuaggcucugaa

SEQ ID NO: 44533 - RNA, 32 nt, Homo Sapiens
acauaaaaugcaaauaaacauaaaucuauguu

SEQ ID NO: 44534 - RNA, 32 nt, Homo Sapiens
ggcuuuugcugcggccccgugggguaggaggg

SEQ ID NO: 44535 - RNA, 32 nt, Homo Sapiens
auacguguguuugcuccgcgaacccucuugaa

SEQ ID NO: 44536 - RNA, 27 nt, Homo Sapiens
ggucccccuucacucagccccccagug

SEQ ID NO: 44537 - RNA, 32 nt, Homo Sapiens
acugcuguaccacauuaugcagagcacacagg

SEQ ID NO: 44538 - RNA, 32 nt, Homo Sapiens
agggcuuucagcgcccccaggccugcccugcu

SEQ ID NO: 44539 - RNA, 32 nt, Homo Sapiens
agguaccucccggcugcugcgggugcccugga

SEQ ID NO: 44540 - RNA, 32 nt, Homo Sapiens
ggcccuaacgccauggugggcgccacagaccu

SEQ ID NO: 44541 - RNA, 32 nt, Homo Sapiens
gccauuuuaggauaccuuuacuuuaaggacca

SEQ ID NO: 44542 - RNA, 32 nt, Homo Sapiens
gcaauguaacaagccugcuccuccuucgccuu

SEQ ID NO: 44543 - RNA, 32 nt, Homo Sapiens
ggguugcccuguauguuuucucuuuuugcucu

SEQ ID NO: 44544 - RNA, 32 nt, Homo Sapiens
ggagcagaugacugagaacauuaaaaaagaac

SEQ ID NO: 44545 - RNA, 32 nt, Homo Sapiens
uuucaggaacauggcaguauguuuacauguca

SEQ ID NO: 44546 - RNA, 32 nt, Homo Sapiens
aaaacuaaaucauugcucucuauacuaggaua

SEQ ID NO: 44547 - RNA, 32 nt, Homo Sapiens
aaaccuuccuucauguaaauguuugguuccca

SEQ ID NO: 44548 - RNA, 32 nt, Homo Sapiens
ucauuucuugggagggcuuagagcuggauaau

SEQ ID NO: 44549 - RNA, 32 nt, Homo Sapiens
ggaguucaggugccggucggcguagccaggcc

SEQ ID NO: 44550 - RNA, 32 nt, Homo Sapiens
guccuuucagcacacgcagagcaccguuggaa

SEQ ID NO: 44551 - RNA, 32 nt, Homo Sapiens
caagaacuucuugcuuuuaugcuagaaaucau

SEQ ID NO: 44552 - RNA, 32 nt, Homo Sapiens
agguugaugggacuguucgauuagcuccucug

SEQ ID NO: 44553 - RNA, 32 nt, Homo Sapiens
cggcagagggaggaaggcagagcaaguggagc

SEQ ID NO: 44554 - RNA, 32 nt, Homo Sapiens
uuccuugcaugugguuugaaaaacugaguauu

SEQ ID NO: 44555 - RNA, 32 nt, Homo Sapiens
gggaggaguuuggggucuccacacgaugccua

SEQ ID NO: 44556 - RNA, 32 nt, Homo Sapiens
ggugcugugggccagcagcaaggugguggcgc

SEQ ID NO: 44557 - RNA, 32 nt, Homo Sapiens
ucaccauugcuucuuccccccauccucagaca

SEQ ID NO: 44558 - RNA, 32 nt, Homo Sapiens
aaacagaaacaucaaggugucagcaaucauga

SEQ ID NO: 44559 - RNA, 32 nt, Homo Sapiens
uccucgcccgucacccaauuccaaccucgccu

SEQ ID NO: 44560 - RNA, 32 nt, Homo Sapiens
ccagguagaggaacuagaaaagagauuuuguu

SEQ ID NO: 44561 - RNA, 32 nt, Homo Sapiens
ucgugggcuguggaggcgacggagcagggggc

SEQ ID NO: 44562 - RNA, 32 nt, Homo Sapiens
aucugccccauaauuugcuuuaguaaagucac

SEQ ID NO: 44563 - RNA, 32 nt, Homo Sapiens
gucuagcagcggggcccagcauggucauggcg

SEQ ID NO: 44564 - RNA, 32 nt, Homo Sapiens
caaggcgcgggcaggugccgggacgcugggcc

SEQ ID NO: 44565 - RNA, 32 nt, Homo Sapiens
ggcuugaggaggagagccugaaagcaugguca

SEQ ID NO: 44566 - RNA, 32 nt, Homo Sapiens
ccuugcuguaucuccuucccucaccuccucga

SEQ ID NO: 44567 - RNA, 32 nt, Homo Sapiens
aguauacuuaggauuggauuuuaaggguguuc

SEQ ID NO: 44568 - RNA, 32 nt, Homo Sapiens
ugaaaugguaggguggccacuuugugaccaug

SEQ ID NO: 44569 - RNA, 32 nt, Homo Sapiens
ggguccccugacucccgucuccaucugucacg

SEQ ID NO: 44570 - RNA, 32 nt, Homo Sapiens
gaaaggggccggugcuggcgcucgcauucaau

SEQ ID NO: 44571 - RNA, 32 nt, Homo Sapiens
aaaugagccaucucagaaguggagaccaacug

SEQ ID NO: 44572 - RNA, 32 nt, Homo Sapiens
aaugaaugugaggaauaugaaaaaacuuucuu

SEQ ID NO: 44573 - RNA, 32 nt, Homo Sapiens
ugcacuuuuuauauuucauuugugauauaaau

SEQ ID NO: 44574 - RNA, 32 nt, Homo Sapiens
ggaagauagaaaguggaugaagcaugauaaug

SEQ ID NO: 44575 - RNA, 32 nt, Homo Sapiens
aucgguagggguuuggggggcggccggugggg

SEQ ID NO: 44576 - RNA, 31 nt, Homo Sapiens
gggcgggcaagguccgugagucaccgccugu

SEQ ID NO: 44577 - RNA, 32 nt, Homo Sapiens
gggugucccagggacugugugcucaggagcac

SEQ ID NO: 44578 - RNA, 32 nt, Homo Sapiens
cacaauacaauaaaaauacgaaauuuuaaaua

SEQ ID NO: 44579 - RNA, 32 nt, Homo Sapiens
ucccccuccccuccccccggcacaccucuguc

SEQ ID NO: 44580 - RNA, 32 nt, Homo Sapiens
ccugggguguugcugagcggacaggcucucca

SEQ ID NO: 44581 - RNA, 32 nt, Homo Sapiens
uuccaggcucugcggggcaggggccgccgccc

SEQ ID NO: 44582 - RNA, 32 nt, Homo Sapiens
cgccaaggagugccuuccuuuugcucccuccu

SEQ ID NO: 44583 - RNA, 32 nt, Homo Sapiens
ucuuccgcagccccuuuccccacgcccacccc

SEQ ID NO: 44584 - RNA, 32 nt, Homo Sapiens
aacccacugacacgugggcacugguguggcug

SEQ ID NO: 44585 - RNA, 32 nt, Homo Sapiens
uuuugaaagcaguuuuguaaagggcaaggagg

SEQ ID NO: 44586 - RNA, 32 nt, Homo Sapiens
ggagccgcgggccggcgagcgcgucgccacca

SEQ ID NO: 44587 - RNA, 32 nt, Homo Sapiens
gcuuccucagcgagcagggcccagggcucugg

SEQ ID NO: 44588 - RNA, 32 nt, Homo Sapiens
uaagguggauuggagcagauaaaauuaucaaa

SEQ ID NO: 44589 - RNA, 32 nt, Homo Sapiens
augaggucaggaguuugagaccagccuggcca

SEQ ID NO: 44590 - RNA, 32 nt, Homo Sapiens
ucggcggcgggaacaggugccggcgccuccgc

SEQ ID NO: 44591 - RNA, 32 nt, Homo Sapiens
ugcagucggccugguccagcugcagccucaca

SEQ ID NO: 44592 - RNA, 32 nt, Homo Sapiens
guaaucaagaauuuuuugacuugaaggcagua

SEQ ID NO: 44593 - RNA, 30 nt, Homo Sapiens
aaaugucuuguggcgggggaaaaaaaaaag

SEQ ID NO: 44594 - RNA, 32 nt, Homo Sapiens
caacucuucagcccccucccccugcacaccug

SEQ ID NO: 44595 - RNA, 32 nt, Homo Sapiens
gcaauggcucccuucagcacuucugcuuucca

SEQ ID NO: 44596 - RNA, 30 nt, Homo Sapiens
ugggauuguagcggcggcgcggacucggcg

SEQ ID NO: 44597 - RNA, 32 nt, Homo Sapiens
accugagccaucucagccgugagaguaacagu

SEQ ID NO: 44598 - RNA, 32 nt, Homo Sapiens
aaaauuaacucuucuuaugcuguccuucaaga

SEQ ID NO: 44599 - RNA, 32 nt, Homo Sapiens
aauauuuaggauaaacaaaauucuauuuaauc

SEQ ID NO: 44600 - RNA, 32 nt, Homo Sapiens
ugggaagagcuguuuauauaaacagagauucc

SEQ ID NO: 44601 - RNA, 32 nt, Homo Sapiens
gucucuccuucccucccuuccuucaagauaac

SEQ ID NO: 44602 - RNA, 32 nt, Homo Sapiens
augcacacagaaaaauaagccaugugaggaca

SEQ ID NO: 44603 - RNA, 32 nt, Homo Sapiens
gagcacauugaccauggaguuuuguguccaaa

SEQ ID NO: 44604 - RNA, 32 nt, Homo Sapiens
cauuuuaaauguuuucuugugacauguacuga

SEQ ID NO: 44605 - RNA, 32 nt, Homo Sapiens
ugauuccacaaaccucuuucccaugacaagau

SEQ ID NO: 44606 - RNA, 32 nt, Homo Sapiens
uguuaucagaucugcgggaaaacuauuucuau

SEQ ID NO: 44607 - RNA, 32 nt, Homo Sapiens
uguguggcuuugcauuucaaauguguggcgca

SEQ ID NO: 44608 - RNA, 32 nt, Homo Sapiens
uuauuauaaaaauaaugaauucucacuguaaa

SEQ ID NO: 44609 - RNA, 32 nt, Homo Sapiens
auguuuucuuuggccugggugguuuauacccu

SEQ ID NO: 44610 - RNA, 32 nt, Homo Sapiens
aguguauauauuuugccauuuauuuucuaaaa

SEQ ID NO: 44611 - RNA, 32 nt, Homo Sapiens
cucugaggaaacaaagucaacugagacugaga

SEQ ID NO: 44612 - RNA, 32 nt, Homo Sapiens
ucauaucucauuucuuuuuuuaucauguuaaa

SEQ ID NO: 44613 - RNA, 32 nt, Homo Sapiens
aaggugcagaauuucagaaccacagaggucuc

SEQ ID NO: 44614 - RNA, 32 nt, Homo Sapiens
ggccccgucgggcgcuaagaagaccuagcgca

SEQ ID NO: 44615 - RNA, 32 nt, Homo Sapiens
uuuuuaaaaaauuuauguacucacagucuuuc

SEQ ID NO: 44616 - RNA, 32 nt, Homo Sapiens
ggaccggcuugccugugugacgugggugcagu

SEQ ID NO: 44617 - RNA, 29 nt, Homo Sapiens
ggcggugcagggaggaggacgccggggcu

SEQ ID NO: 44618 - RNA, 32 nt, Homo Sapiens
cuaccucaauggaaaugggggguguggccauc

SEQ ID NO: 44619 - RNA, 32 nt, Homo Sapiens
agguuaaggaagcuccugggggcuugaggggg

SEQ ID NO: 44620 - RNA, 32 nt, Homo Sapiens
cuggauccuggucuagcugaaucuucagagug

SEQ ID NO: 44621 - RNA, 32 nt, Homo Sapiens
cgccuguaaucccagcacuuugggaggccgaa

SEQ ID NO: 44622 - RNA, 32 nt, Homo Sapiens
cgccugugaucccagcacuuugggaggccgag

SEQ ID NO: 44623 - RNA, 32 nt, Homo Sapiens
cgccuguaaucccagcacuuuggaaggccgag

SEQ ID NO: 44624 - RNA, 32 nt, Homo Sapiens
gggaggauguacaguugcuguugugugaucaa

SEQ ID NO: 44625 - RNA, 32 nt, Homo Sapiens
uguaucauaugugaacauuguaucauagguaa

SEQ ID NO: 44626 - RNA, 32 nt, Homo Sapiens
aaccccuagcccggcuguggcuccaccuccag

SEQ ID NO: 44627 - RNA, 32 nt, Homo Sapiens
cuaaaccuuaaaccucucugccucuggaggag

SEQ ID NO: 44628 - RNA, 32 nt, Homo Sapiens
uuccuaaaacaucccucaaugagggaggaagg

SEQ ID NO: 44629 - RNA, 32 nt, Homo Sapiens
uauaaaauaacuuacggagauuuuuguaagua

SEQ ID NO: 44630 - RNA, 32 nt, Homo Sapiens
ggaagaaagaauuuaaaggaccggaaugcgag

SEQ ID NO: 44631 - RNA, 32 nt, Homo Sapiens
gucccagaguggcccggcaggggcggggugcg

SEQ ID NO: 44632 - RNA, 32 nt, Homo Sapiens
gugguacuggacagaagaugcuggagaaaaaa

SEQ ID NO: 44633 - RNA, 32 nt, Homo Sapiens
uauagugaaaagacauugacuugagaugauac

SEQ ID NO: 44634 - RNA, 32 nt, Homo Sapiens
gagcuggaacugcugcagcugcugccgccgcc

SEQ ID NO: 44635 - RNA, 32 nt, Homo Sapiens
ccacagaagcacuuaaauuuccugguuaauug

SEQ ID NO: 44636 - RNA, 32 nt, Homo Sapiens
gaguacuguuacagggguucacagauacaagu

SEQ ID NO: 44637 - RNA, 32 nt, Homo Sapiens
cuccagcccugccugcugcuccuugggaaccc

SEQ ID NO: 44638 - RNA, 32 nt, Homo Sapiens
cgauucaccugccugucacccaguucugugga

SEQ ID NO: 44639 - RNA, 32 nt, Homo Sapiens
caccugcagggccgaccagcuccagucccagg

SEQ ID NO: 44640 - RNA, 31 nt, Homo Sapiens
ugcaucucaaauuguaauccccaugugucaa

SEQ ID NO: 44641 - RNA, 32 nt, Homo Sapiens
gaaaauauuucuggcaaacagcuccucuucca

SEQ ID NO: 44642 - RNA, 32 nt, Homo Sapiens
agacuuuccauuuccuuggaguuauggcggca

SEQ ID NO: 44643 - RNA, 32 nt, Homo Sapiens
acacuagcuuuucaggauauuugaaaaauaau

SEQ ID NO: 44644 - RNA, 32 nt, Homo Sapiens
cuaaucucaauccuguucuuuguuuaagagca

SEQ ID NO: 44645 - RNA, 32 nt, Homo Sapiens
ugugcagauuauaaaauuuuccaauuggcagu

SEQ ID NO: 44646 - RNA, 30 nt, Homo Sapiens
uaaaacuuguaccacaacaagagugucuaa

SEQ ID NO: 44647 - RNA, 32 nt, Homo Sapiens
acacuggauuguucuuuuuuaagacucaauca

SEQ ID NO: 44648 - RNA, 32 nt, Homo Sapiens
caauuuuauagcacaaacuuuaaauucaagcu

SEQ ID NO: 44649 - RNA, 32 nt, Homo Sapiens
cgcgagcccagcugcagggagcuucuggccug

SEQ ID NO: 44650 - RNA, 32 nt, Homo Sapiens
cuucccucuccugcuucauuaagggcuugggg

SEQ ID NO: 44651 - RNA, 32 nt, Homo Sapiens
ucaaugauagaguggagguaaauuaagagccu

SEQ ID NO: 44652 - RNA, 32 nt, Homo Sapiens
guaauuacuguuucuguugccuggacaguuac

SEQ ID NO: 44653 - RNA, 32 nt, Homo Sapiens
uaaucagccccaacuauauaaccaggugggcc

SEQ ID NO: 44654 - RNA, 32 nt, Homo Sapiens
guaccuccagcacacccuucucauggagguug

SEQ ID NO: 44655 - RNA, 32 nt, Homo Sapiens
ucauggcuacaccccaccggacccugagagcc

SEQ ID NO: 44656 - RNA, 32 nt, Homo Sapiens
aucauuuuuguacaguuugcuguacuagagau

SEQ ID NO: 44657 - RNA, 32 nt, Homo Sapiens
ugaggcugcccggcuggcccaguacucgggcc

SEQ ID NO: 44658 - RNA, 32 nt, Homo Sapiens
gcccccacgccgcgcuggcgucguccucgccu

SEQ ID NO: 44659 - RNA, 32 nt, Homo Sapiens
gaauggucaugcuuuggagaucaaauauuggu

SEQ ID NO: 44660 - RNA, 32 nt, Homo Sapiens
gaugcuggggagagggggagggggcuguggug

SEQ ID NO: 44661 - RNA, 32 nt, Homo Sapiens
caccagccaugggcccacgggaugccagaccu

SEQ ID NO: 44662 - RNA, 32 nt, Homo Sapiens
cagccgcccccgcugccggcuccucaccucuu

SEQ ID NO: 44663 - RNA, 32 nt, Homo Sapiens
ggcugccuuguaccccuuuucugagcacaagu

SEQ ID NO: 44664 - RNA, 32 nt, Homo Sapiens
ugauuguguaauugauaaugcacuuucucaau

SEQ ID NO: 44665 - RNA, 32 nt, Homo Sapiens
auuuaucaaaaauggauuaucuuuagaaaccu

SEQ ID NO: 44666 - RNA, 32 nt, Homo Sapiens
uaggccuggcccuccgccugccuggagaggcc

SEQ ID NO: 44667 - RNA, 32 nt, Homo Sapiens
ugggccucugcuccccugggaccuccugucuc

SEQ ID NO: 44668 - RNA, 32 nt, Homo Sapiens
gggguggggguggaaaagcagaccgggguucc

SEQ ID NO: 44669 - RNA, 32 nt, Homo Sapiens
cagcugcccugccaugcagagcccuggccgcu

SEQ ID NO: 44670 - RNA, 32 nt, Homo Sapiens
ugugccugggagaacagagcaggagcgucgug

SEQ ID NO: 44671 - RNA, 32 nt, Homo Sapiens
ccaaugccaacccccaccccguuucccuggug

SEQ ID NO: 44672 - RNA, 32 nt, Homo Sapiens
ggaggugauaggaucaugggggugguuccccc

SEQ ID NO: 44673 - RNA, 32 nt, Homo Sapiens
ucuucacgggcagcaagcugguggacuacgcg

SEQ ID NO: 44674 - RNA, 32 nt, Homo Sapiens
gcagcgccagccucgagcuccucgguagcccc

SEQ ID NO: 44675 - RNA, 32 nt, Homo Sapiens
agaauggcggccugacggagccgcggcgccgg

SEQ ID NO: 44676 - RNA, 32 nt, Homo Sapiens
aguuuaggaaaugggacauuucugcuagauuc

SEQ ID NO: 44677 - RNA, 32 nt, Homo Sapiens
caguggccacguucagggaggggccggcuggc

SEQ ID NO: 44678 - RNA, 30 nt, Homo Sapiens
cccggcgcgcagcagcaccaugggcacggu

SEQ ID NO: 44679 - RNA, 32 nt, Homo Sapiens
cuguuguugcuguuacuaucuuggcaccuuua

SEQ ID NO: 44680 - RNA, 32 nt, Homo Sapiens
uggcaacagugagaagcagagcugggaauuug

SEQ ID NO: 44681 - RNA, 32 nt, Homo Sapiens
ugguggaggaaccggugcucagagacaagaac

SEQ ID NO: 44682 - RNA, 32 nt, Homo Sapiens
gaguucagccucuucauuuacuccauuuacau

SEQ ID NO: 44683 - RNA, 32 nt, Homo Sapiens
gauuuuucugccucggccuccugaguagcuaa

SEQ ID NO: 44684 - RNA, 32 nt, Homo Sapiens
ugggugcuuuauucucuucuuuuucuuuauuu

SEQ ID NO: 44685 - RNA, 32 nt, Homo Sapiens
uccaucccaggacacagcccagccccucccca

SEQ ID NO: 44686 - RNA, 32 nt, Homo Sapiens
cugaagccggagcgagcuagccgcccggagcc

SEQ ID NO: 44687 - RNA, 30 nt, Homo Sapiens
guucuugcugguaguggcggcagcaggacc

SEQ ID NO: 44688 - RNA, 32 nt, Homo Sapiens
acccucacagaaacacaaaagggaggggcgcc

SEQ ID NO: 44689 - RNA, 32 nt, Homo Sapiens
cuggacagcgcccgcuccugccugggugcaca

SEQ ID NO: 44690 - RNA, 32 nt, Homo Sapiens
ccggccaccaagaccucuggcuccugguugua

SEQ ID NO: 44691 - RNA, 32 nt, Homo Sapiens
gaggacggacgaagaccacugagcaugaugag

SEQ ID NO: 44692 - RNA, 32 nt, Homo Sapiens
gcaaugcuggaacuugccggugccuggggugc

SEQ ID NO: 44693 - RNA, 32 nt, Homo Sapiens
gugauuuagaaaaguggguucauucaauaaac

SEQ ID NO: 44694 - RNA, 32 nt, Homo Sapiens
ccagguguggaggugugccccaagugauccuc

SEQ ID NO: 44695 - RNA, 32 nt, Homo Sapiens
cccgguuucuucugcccccuccugagucccgg

SEQ ID NO: 44696 - RNA, 32 nt, Homo Sapiens
guccacauuuucugccccaccuuacuucuccu

SEQ ID NO: 44697 - RNA, 32 nt, Homo Sapiens
ggcuggagcaguucuuuuucaguucucauccu

SEQ ID NO: 44698 - RNA, 32 nt, Homo Sapiens
agauugaggcuaaugacaaaauccacauaaau

SEQ ID NO: 44699 - RNA, 32 nt, Homo Sapiens
acagcacuacggcgcgcacgccccgcacccca

SEQ ID NO: 44700 - RNA, 32 nt, Homo Sapiens
aaaaagccaacaaaccaagacuaaggggguga

SEQ ID NO: 44701 - RNA, 32 nt, Homo Sapiens
auuuugucaaaugcuuuugcugcaucugcuga

SEQ ID NO: 44702 - RNA, 32 nt, Homo Sapiens
cuguaauccuagcuacuuggggugcugaggca

SEQ ID NO: 44703 - RNA, 32 nt, Homo Sapiens
cugcuccguggucccaggaugccuaugcugga

SEQ ID NO: 44704 - RNA, 32 nt, Homo Sapiens
ggggcgccgucucagccccgggaagauggugg

SEQ ID NO: 44705 - RNA, 32 nt, Homo Sapiens
acucuucuggguggaggccgccggccagggac

SEQ ID NO: 44706 - RNA, 32 nt, Homo Sapiens
ccacgcgccccgauacccggcgcaggagccac

SEQ ID NO: 44707 - RNA, 32 nt, Homo Sapiens
gugagagaaaugaaguuuauauuaucaagggg

SEQ ID NO: 44708 - RNA, 32 nt, Homo Sapiens
ggugugacugaagaaauaucaaauguuuccua

SEQ ID NO: 44709 - RNA, 32 nt, Homo Sapiens
gccccacgcagcuccgcgcccgggccggagag

SEQ ID NO: 44710 - RNA, 32 nt, Homo Sapiens
uccacuccuacagccaaaaggcacugcucggu

SEQ ID NO: 44711 - RNA, 32 nt, Homo Sapiens
gagcaucugcccuccuccuucucaggaaucac

SEQ ID NO: 44712 - RNA, 32 nt, Homo Sapiens
uccaggaggaguuagcccaacaacaacaaaaa

SEQ ID NO: 44713 - RNA, 32 nt, Homo Sapiens
ggaugucuguuguauguaauacucacaauggc

SEQ ID NO: 44714 - RNA, 32 nt, Homo Sapiens
auccgggccgugaacgaaagcagugacggagg

SEQ ID NO: 44715 - RNA, 28 nt, Homo Sapiens
aaagaaccaggauugcauuugaaguuaa

SEQ ID NO: 44716 - RNA, 32 nt, Homo Sapiens
aucauguucacuguggcuuuuacaauacagcc

SEQ ID NO: 44717 - RNA, 32 nt, Homo Sapiens
gaagaugcuuuaggaagauaaaaaccuuacaa

SEQ ID NO: 44718 - RNA, 32 nt, Homo Sapiens
agaucuugucacgauugagaccaauccaguau

SEQ ID NO: 44719 - RNA, 32 nt, Homo Sapiens
uaccuucaaaaauuauacuaugcauuuaucau

SEQ ID NO: 44720 - RNA, 32 nt, Homo Sapiens
auuucaucaauccuauuuccacagccguacau

SEQ ID NO: 44721 - RNA, 32 nt, Homo Sapiens
auagcaccaaaguggauaaacuaguacgagau

SEQ ID NO: 44722 - RNA, 32 nt, Homo Sapiens
caguuggacaguaagauuuuaucccuuucucu

SEQ ID NO: 44723 - RNA, 32 nt, Homo Sapiens
cccugccugccaggucccuuagcaccuguccc

SEQ ID NO: 44724 - RNA, 32 nt, Homo Sapiens
aggcugcuggggccuccacaccugccucauca

SEQ ID NO: 44725 - RNA, 32 nt, Homo Sapiens
cuuguauuacaaucuuuuuauuauaauagucu

SEQ ID NO: 44726 - RNA, 32 nt, Homo Sapiens
ccaucagcagaaaaaagugaaagcugagaagu

SEQ ID NO: 44727 - RNA, 32 nt, Homo Sapiens
auuguaucucuuaaaguggucauauuauuauu

SEQ ID NO: 44728 - RNA, 32 nt, Homo Sapiens
cagagucuuggggcuccaugugaguuugcugu

SEQ ID NO: 44729 - RNA, 32 nt, Homo Sapiens
cgcagggaccugagccgcggcgcuaggauggg

SEQ ID NO: 44730 - RNA, 32 nt, Homo Sapiens
cgggggccccccgaugccuuggcagugccagc

SEQ ID NO: 44731 - RNA, 32 nt, Homo Sapiens
cugucauuuaaaauucaugcauuccauauuuu

SEQ ID NO: 44732 - RNA, 32 nt, Homo Sapiens
uugcuauuuuuuccuuuuggccagauagcuag

SEQ ID NO: 44733 - RNA, 32 nt, Homo Sapiens
uaaaaugguuugucuuaauuauaggagaaaaa

SEQ ID NO: 44734 - RNA, 32 nt, Homo Sapiens
uggucugggugauuggaugguuugaguuguua

SEQ ID NO: 44735 - RNA, 32 nt, Homo Sapiens
guuuuacuuuuguagcauaagguuuuugcuuu

SEQ ID NO: 44736 - RNA, 32 nt, Homo Sapiens
gcuugcagugucugaggccugugggauccuca

SEQ ID NO: 44737 - RNA, 32 nt, Homo Sapiens
cuuaguucucuccgccucccccucaacuacca

SEQ ID NO: 44738 - RNA, 32 nt, Homo Sapiens
uuggggguuuuaucuccaguaugaauugucuu

SEQ ID NO: 44739 - RNA, 32 nt, Homo Sapiens
uuuucacuagccccaaacuuuuuauuggcagc

SEQ ID NO: 44740 - RNA, 32 nt, Homo Sapiens
gaccccgcgccgggcaccuguggcuugggaca

SEQ ID NO: 44741 - RNA, 32 nt, Homo Sapiens
ucaagaaagcuaccuguggaaaauggaccagg

SEQ ID NO: 44742 - RNA, 32 nt, Homo Sapiens
gcacccuguacggcuucggaggcuagccgccg

SEQ ID NO: 44743 - RNA, 32 nt, Homo Sapiens
uuuuguagcagccagcagcuguuuccugugga

SEQ ID NO: 44744 - RNA, 32 nt, Homo Sapiens
acaccagaaaccggcccugagcacgagaagag

SEQ ID NO: 44745 - RNA, 32 nt, Homo Sapiens
aaccagacagagacuacugcagagaaguugcc

SEQ ID NO: 44746 - RNA, 29 nt, Homo Sapiens
cuaugucuguguauguauguauauagugu

SEQ ID NO: 44747 - RNA, 32 nt, Homo Sapiens
uaagggacauuccaauaagguuuucuaugaac

SEQ ID NO: 44748 - RNA, 32 nt, Homo Sapiens
acagaggcuccggccaccugggcuccaccagc

SEQ ID NO: 44749 - RNA, 32 nt, Homo Sapiens
uuccucucuggccacucugcucugcacauuag

SEQ ID NO: 44750 - RNA, 32 nt, Homo Sapiens
ugcgacccuaggacuuuuuuuaacauguaauc

SEQ ID NO: 44751 - RNA, 32 nt, Homo Sapiens
aauggggaaggggggucgauaugcauuauaug

SEQ ID NO: 44752 - RNA, 32 nt, Homo Sapiens
uauacaucuguccuaaugcuuuccaacagucc

SEQ ID NO: 44753 - RNA, 32 nt, Homo Sapiens
uuccugcauuuuaaaaguaauaaaauauuauu

SEQ ID NO: 44754 - RNA, 32 nt, Homo Sapiens
guucaacgcacggcccggggacccccaggcgg

SEQ ID NO: 44755 - RNA, 32 nt, Homo Sapiens
uggcauauauuuuuccagauuuucucuaugca

SEQ ID NO: 44756 - RNA, 32 nt, Homo Sapiens
agaauggaaaggaaacaaggggagacaacuuu

SEQ ID NO: 44757 - RNA, 32 nt, Homo Sapiens
ucugaauguuuuuauagaaaauuacugaaaau

SEQ ID NO: 44758 - RNA, 32 nt, Homo Sapiens
uccccuugggcccacaccuucuucccucucug

SEQ ID NO: 44759 - RNA, 31 nt, Homo Sapiens
ccuuugcugccggcagcccuuggggaccaca

SEQ ID NO: 44760 - RNA, 32 nt, Homo Sapiens
ucccugggcacagagucacacccacucauccu

SEQ ID NO: 44761 - RNA, 32 nt, Homo Sapiens
acuuuugguucucuauggauacccauuagacc

SEQ ID NO: 44762 - RNA, 32 nt, Homo Sapiens
ucccuccugcagccugcccccuaggcagcucg

SEQ ID NO: 44763 - RNA, 32 nt, Homo Sapiens
ggaaaauccaaauguggcuuuuguauuaaauu

SEQ ID NO: 44764 - RNA, 32 nt, Homo Sapiens
uuugaauuguguuuuucuuucuucccauguuu

SEQ ID NO: 44765 - RNA, 32 nt, Homo Sapiens
ccagaagcuggccuggggucucuucuuugcug

SEQ ID NO: 44766 - RNA, 32 nt, Homo Sapiens
uguugcugcauagaacucucccugcccuaccc

SEQ ID NO: 44767 - RNA, 32 nt, Homo Sapiens
cuuccgccgcaguggggcgcugccgggcuccc

SEQ ID NO: 44768 - RNA, 32 nt, Homo Sapiens
ucugagcagcgggcggcugcugcggcgccugg

SEQ ID NO: 44769 - RNA, 32 nt, Homo Sapiens
cuacaaacccaccaauaaaacugauauaagga

SEQ ID NO: 44770 - RNA, 32 nt, Homo Sapiens
uuuacaguauaucuuuccuugggccuuagauu

SEQ ID NO: 44771 - RNA, 32 nt, Homo Sapiens
ucuccuuguucuaagcuauauucauccaacaa

SEQ ID NO: 44772 - RNA, 32 nt, Homo Sapiens
cgauccgccgcccguccacacccgccgccagc

SEQ ID NO: 44773 - RNA, 31 nt, Homo Sapiens
uaaauucuugguaggauauaacaggucaggc

SEQ ID NO: 44774 - RNA, 32 nt, Homo Sapiens
uuaaacuaguugaccuagauuguauuaauagc

SEQ ID NO: 44775 - RNA, 32 nt, Homo Sapiens
cacuaugggcccgagcucaucgaccugagggg

SEQ ID NO: 44776 - RNA, 32 nt, Homo Sapiens
cccccucauuugcauggcuccucccccacuca

SEQ ID NO: 44777 - RNA, 32 nt, Homo Sapiens
aagagcucuuggcccggcagggcccccaauaa

SEQ ID NO: 44778 - RNA, 32 nt, Homo Sapiens
cgccgggcgugguggcucacgccuguaauccc

SEQ ID NO: 44779 - RNA, 32 nt, Homo Sapiens
cgcccccuaccacuccacgggcagugccagcc

SEQ ID NO: 44780 - RNA, 32 nt, Homo Sapiens
ggacgggcgggcgggcgcgcgugugcccagga

SEQ ID NO: 44781 - RNA, 32 nt, Homo Sapiens
uuuguaaaaugaaaugccauauuugacuuggc

SEQ ID NO: 44782 - RNA, 32 nt, Homo Sapiens
aauaucagacuuuuuuuuuuuauaaucaagcc

SEQ ID NO: 44783 - RNA, 32 nt, Homo Sapiens
caacauagauugcuuauaauucuucuaauuac

SEQ ID NO: 44784 - RNA, 32 nt, Homo Sapiens
ucauuaugucuaauuucuaaccagagacaaaa

SEQ ID NO: 44785 - RNA, 32 nt, Homo Sapiens
aaugauuauguccauccgucuguccguccauu

SEQ ID NO: 44786 - RNA, 32 nt, Homo Sapiens
gggugacuguggcaggaaggggcucacucugg

SEQ ID NO: 44787 - RNA, 32 nt, Homo Sapiens
gaaagggaagcggacgggcaucuggaaucgcu

SEQ ID NO: 44788 - RNA, 32 nt, Homo Sapiens
ucccucggccaucgucguggacucugucgauu

SEQ ID NO: 44789 - RNA, 32 nt, Homo Sapiens
ucacggggaggagcccaaaccacugcccacag

SEQ ID NO: 44790 - RNA, 32 nt, Homo Sapiens
acuuuaaguuucaggauacaugugccgaaugu

SEQ ID NO: 44791 - RNA, 32 nt, Homo Sapiens
cgccacaaauaccacugugucaaaugcuuuca

SEQ ID NO: 44792 - RNA, 32 nt, Homo Sapiens
cuuccccgccacgccaccguccuuucaggccc

SEQ ID NO: 44793 - RNA, 32 nt, Homo Sapiens
gccccgcgcccgccgccuugccugcaguaaac

SEQ ID NO: 44794 - RNA, 32 nt, Homo Sapiens
cacccuaauaauauacguuguacccauuaagu

SEQ ID NO: 44795 - RNA, 32 nt, Homo Sapiens
cuuccggagagggugggguggagcagcggggg

SEQ ID NO: 44796 - RNA, 32 nt, Homo Sapiens
gcugguggguggacuccugggcgcugcgcgga

SEQ ID NO: 44797 - RNA, 32 nt, Homo Sapiens
cccuccccucccuuccccuccggagcggcugg

SEQ ID NO: 44798 - RNA, 32 nt, Homo Sapiens
cgcaguccccgcccccaccucccgccuaccgc

SEQ ID NO: 44799 - RNA, 32 nt, Homo Sapiens
ucaagugauccuccugccucagucuccugagu

SEQ ID NO: 44800 - RNA, 32 nt, Homo Sapiens
auacauauuuuuuuuuuuuuuauucuccagcc

SEQ ID NO: 44801 - RNA, 32 nt, Homo Sapiens
ugccuucaaggguuuuuuguuuuguuuuguuu

SEQ ID NO: 44802 - RNA, 32 nt, Homo Sapiens
accucucugaagaagcagcauuugagcugaga

SEQ ID NO: 44803 - RNA, 32 nt, Homo Sapiens
acuggcccaagccaaggggucuccuugaagac

SEQ ID NO: 44804 - RNA, 32 nt, Homo Sapiens
gaagguggaaaagccaagggaacggauucucc

SEQ ID NO: 44805 - RNA, 32 nt, Homo Sapiens
caaagacaagacaagcacuuauuuuuauuuuc

SEQ ID NO: 44806 - RNA, 32 nt, Homo Sapiens
agauacgaagucgcgggagcaguuggggacuc

SEQ ID NO: 44807 - RNA, 32 nt, Homo Sapiens
ggcaggugaggugguguuugccugcgguccca

SEQ ID NO: 44808 - RNA, 32 nt, Homo Sapiens
guuuccccggcggcggcggcccgggggcgcau

SEQ ID NO: 44809 - RNA, 32 nt, Homo Sapiens
cucuguaagucuuuuaaguuuugguuggacua

SEQ ID NO: 44810 - RNA, 32 nt, Homo Sapiens
gcggagcagagcccggccggugcucccgaagg

SEQ ID NO: 44811 - RNA, 32 nt, Homo Sapiens
uccuuccugcggucuauaccuaccgccuccuc

SEQ ID NO: 44812 - RNA, 32 nt, Homo Sapiens
guguugaguguuuucuuauaucaaaaacuuuc

SEQ ID NO: 44813 - RNA, 32 nt, Homo Sapiens
uuguggaguccaaagaaaagcuggggccuuuu

SEQ ID NO: 44814 - RNA, 32 nt, Homo Sapiens
ucuuucccgcggcacaaacaggcgccccuucc

SEQ ID NO: 44815 - RNA, 32 nt, Homo Sapiens
caggcaggcaaagggggcuuucugaggaucca

SEQ ID NO: 44816 - RNA, 32 nt, Homo Sapiens
ugcuuaaaaaucaccaguuacuuuaaugacca

SEQ ID NO: 44817 - RNA, 32 nt, Homo Sapiens
accuugcugaagcuccugggguguggggugug

SEQ ID NO: 44818 - RNA, 28 nt, Homo Sapiens
cauccggcugcaggaccagguggugauc

SEQ ID NO: 44819 - RNA, 32 nt, Homo Sapiens
cuucauuguauauaugugacuauuuacaugua

SEQ ID NO: 44820 - RNA, 32 nt, Homo Sapiens
uaguaaagcuuuucuuuuuuaauuuccaggaa

SEQ ID NO: 44821 - RNA, 32 nt, Homo Sapiens
aagucaaaacaguuuuguggaacugugauuuu

SEQ ID NO: 44822 - RNA, 32 nt, Homo Sapiens
uuauucuucuacccaucuucacagcaaucauu

SEQ ID NO: 44823 - RNA, 32 nt, Homo Sapiens
cuacagucauacucauugauacgugugauuau

SEQ ID NO: 44824 - RNA, 32 nt, Homo Sapiens
cuuugguguacaaaaugaauucauucuggucu

SEQ ID NO: 44825 - RNA, 32 nt, Homo Sapiens
gccuuuuacagcgcucuccuuuccgcugcauc

SEQ ID NO: 44826 - RNA, 32 nt, Homo Sapiens
gaguauuccagaugaagaguccagcauaggga

SEQ ID NO: 44827 - RNA, 32 nt, Homo Sapiens
ggcagcagccuggccugugccauggugggugu

SEQ ID NO: 44828 - RNA, 32 nt, Homo Sapiens
ggugucuauagcaaaguuuuucuaucaauuuu

SEQ ID NO: 44829 - RNA, 32 nt, Homo Sapiens
guggccucccgcucuccuccccggcacaggca

SEQ ID NO: 44830 - RNA, 32 nt, Homo Sapiens
uaugguaaacagcaacaauauuuuaaaaucaa

SEQ ID NO: 44831 - RNA, 32 nt, Homo Sapiens
gggcgccgccuggcguagggagggcugcgggc

SEQ ID NO: 44832 - RNA, 27 nt, Homo Sapiens
acgacagccuucuucaagccccuccag

SEQ ID NO: 44833 - RNA, 32 nt, Homo Sapiens
auuuugaccccauauaaagaaauguguuaugu

SEQ ID NO: 44834 - RNA, 28 nt, Homo Sapiens
gcuaugcugagaccggguggugcggagg

SEQ ID NO: 44835 - RNA, 32 nt, Homo Sapiens
ggggccaggccaggggggagggggcucagccc

SEQ ID NO: 44836 - RNA, 32 nt, Homo Sapiens
auaaccccggggaagacacagagacucguacc

SEQ ID NO: 44837 - RNA, 32 nt, Homo Sapiens
ugguguucuccaugucugcuagccauuuaggu

SEQ ID NO: 44838 - RNA, 32 nt, Homo Sapiens
gaagccacaauuuuugcacuugcuuagaagcc

SEQ ID NO: 44839 - RNA, 32 nt, Homo Sapiens
gcauucugcacacagcaucugcucccaucccc

SEQ ID NO: 44840 - RNA, 32 nt, Homo Sapiens
cuuucccauggccauacuuuggcccacacuau

SEQ ID NO: 44841 - RNA, 32 nt, Homo Sapiens
auuaauggaggcucaaggauagaugagcucug

SEQ ID NO: 44842 - RNA, 29 nt, Homo Sapiens
uagaaguugcauuuauauuuuuuaugggg

SEQ ID NO: 44843 - RNA, 32 nt, Homo Sapiens
caauugaaaaggagggauuucuccauaacuca

SEQ ID NO: 44844 - RNA, 32 nt, Homo Sapiens
uuucuuuuguugaucuuugccauccucugccu

SEQ ID NO: 44845 - RNA, 32 nt, Homo Sapiens
auaagcaaugaaauauuaaaaaaugaaacauc

SEQ ID NO: 44846 - RNA, 32 nt, Homo Sapiens
ggcacgagggugguguugggccggugcugcug

SEQ ID NO: 44847 - RNA, 32 nt, Homo Sapiens
agguuguggcugaugguguugaagauaaauaa

SEQ ID NO: 44848 - RNA, 32 nt, Homo Sapiens
caccucacuccagccugggugacagcguaaga

SEQ ID NO: 44849 - RNA, 32 nt, Homo Sapiens
auauaucuucagguuauuuucuuacuguugcu

SEQ ID NO: 44850 - RNA, 32 nt, Homo Sapiens
ggggccucugucugcugguggucugcuuacca

SEQ ID NO: 44851 - RNA, 32 nt, Homo Sapiens
uuaaagauauugcauuuucauauucuuuauuu

SEQ ID NO: 44852 - RNA, 32 nt, Homo Sapiens
aggcuuuuacuuuaaugcuaggauagucuaaa

SEQ ID NO: 44853 - RNA, 32 nt, Homo Sapiens
cggucccgauccagcccugucccaggccaugg

SEQ ID NO: 44854 - RNA, 32 nt, Homo Sapiens
gaaaaaugugaaauuucccaauuacaggauua

SEQ ID NO: 44855 - RNA, 32 nt, Homo Sapiens
accucacaagauuauuuaauucuuaagaugug

SEQ ID NO: 44856 - RNA, 32 nt, Homo Sapiens
aaggaagggacagucauauauauuuuagagau

SEQ ID NO: 44857 - RNA, 32 nt, Homo Sapiens
cugggauucacagccacaccccggaugguggc

SEQ ID NO: 44858 - RNA, 32 nt, Homo Sapiens
agccgccgcucgcgccggcagccgcuggcagg

SEQ ID NO: 44859 - RNA, 32 nt, Homo Sapiens
agggcugucugugcugcuccucaccaggugag

SEQ ID NO: 44860 - RNA, 32 nt, Homo Sapiens
uuuucugcacuuauuucuuuuaaauauuuuau

SEQ ID NO: 44861 - RNA, 32 nt, Homo Sapiens
agucccacccucaccauaaacauccaagugug

SEQ ID NO: 44862 - RNA, 32 nt, Homo Sapiens
agaggagaaaaagaagaaaagauucuuucuua

SEQ ID NO: 44863 - RNA, 32 nt, Homo Sapiens
uugaaacauuuuauguauuaguuuugaaauaa

SEQ ID NO: 44864 - RNA, 28 nt, Homo Sapiens
uuucuguugggaaccaggaugcucacaa

SEQ ID NO: 44865 - RNA, 32 nt, Homo Sapiens
gccauuguaaacaucugcuuguccuucuuagg

SEQ ID NO: 44866 - RNA, 32 nt, Homo Sapiens
ccaguuaccauuaacuauaacuauuuagcuuu

SEQ ID NO: 44867 - RNA, 32 nt, Homo Sapiens
uccaauuugacugaucucuaaacuggugaccc

SEQ ID NO: 44868 - RNA, 32 nt, Homo Sapiens
ccugcagaagucugauacaugauuuucauguu

SEQ ID NO: 44869 - RNA, 32 nt, Homo Sapiens
uaggacacaguuccugggaacaucacauuccu

SEQ ID NO: 44870 - RNA, 32 nt, Homo Sapiens
ccccuucccacuuugcacuccucaaauguccu

SEQ ID NO: 44871 - RNA, 32 nt, Homo Sapiens
cauccucccgaccccuacccacuuccauuccc

SEQ ID NO: 44872 - RNA, 32 nt, Homo Sapiens
cgguucaccugcgaggacgccggcgccccugu

SEQ ID NO: 44873 - RNA, 32 nt, Homo Sapiens
agcgcucgcgagcggcugcgggacgcgagguu

SEQ ID NO: 44874 - RNA, 32 nt, Homo Sapiens
uauuuaagcuauuauuuuaauaaagaacuuug

SEQ ID NO: 44875 - RNA, 32 nt, Homo Sapiens
uauaaccuuccucauucugcugcacgucuaga

SEQ ID NO: 44876 - RNA, 32 nt, Homo Sapiens
gcugacauucuagggggagauagaaggagaca

SEQ ID NO: 44877 - RNA, 32 nt, Homo Sapiens
auucgugacaacaugcgaccgugccaggaaca

SEQ ID NO: 44878 - RNA, 32 nt, Homo Sapiens
cucaaggggcuggagacuggcugcuggggccu

SEQ ID NO: 44879 - RNA, 32 nt, Homo Sapiens
uacuaagcacugcucuaaaaucuuauauuaau

SEQ ID NO: 44880 - RNA, 32 nt, Homo Sapiens
uaucugcaguaccaguggccaagccugauggg

SEQ ID NO: 44881 - RNA, 32 nt, Homo Sapiens
ccgugccccugggcugcccccgcgaggcguuu

SEQ ID NO: 44882 - RNA, 32 nt, Homo Sapiens
acuuagcucaggugccuuacaucuuuucuaau

SEQ ID NO: 44883 - RNA, 32 nt, Homo Sapiens
ggacguuccaugccgaggcugcccccucaccc

SEQ ID NO: 44884 - RNA, 32 nt, Homo Sapiens
ugaauguagcgccccaggcccugccccagccc

SEQ ID NO: 44885 - RNA, 32 nt, Homo Sapiens
uggagagugugcucuucuguggcaggaucagg

SEQ ID NO: 44886 - RNA, 32 nt, Homo Sapiens
acagcgugcagguuuucuguuucuguguugug

SEQ ID NO: 44887 - RNA, 32 nt, Homo Sapiens
uggagucaagauuuaggauucaaaucuagaug

SEQ ID NO: 44888 - RNA, 32 nt, Homo Sapiens
cguggacuuccacauacccgacgcccgcacag

SEQ ID NO: 44889 - RNA, 32 nt, Homo Sapiens
aauguuuggccauuaguauuuuuauaaaacuc

SEQ ID NO: 44890 - RNA, 32 nt, Homo Sapiens
uggggacuguucaccaggcacaaaauaggaau

SEQ ID NO: 44891 - RNA, 32 nt, Homo Sapiens
uuaaauugauauuuauaucuugcauccuauau

SEQ ID NO: 44892 - RNA, 28 nt, Homo Sapiens
uuuuauucaaacuaccuauauuccuugu

SEQ ID NO: 44893 - RNA, 32 nt, Homo Sapiens
cuaugaugagaggccagcacauuaucuucaua

SEQ ID NO: 44894 - RNA, 32 nt, Homo Sapiens
aaaacccauaguguuauguacauauuugucug

SEQ ID NO: 44895 - RNA, 32 nt, Homo Sapiens
gauucaauuggcggaauuuuacuagugcgugu

SEQ ID NO: 44896 - RNA, 32 nt, Homo Sapiens
gucuccuccguggcuagugugucuaguucacg

SEQ ID NO: 44897 - RNA, 30 nt, Homo Sapiens
aguuuucccccaaggggggaaauuuuacuu

SEQ ID NO: 44898 - RNA, 32 nt, Homo Sapiens
ccuaugcaaccuccugugaaucuauaauuacu

SEQ ID NO: 44899 - RNA, 32 nt, Homo Sapiens
auuuugagagcuuugggugcugaagggccaaa

SEQ ID NO: 44900 - RNA, 32 nt, Homo Sapiens
ucgucacaaccuggcgugaaugcuuuucuccg

SEQ ID NO: 44901 - RNA, 32 nt, Homo Sapiens
ggaccaacucgcgcccgcggcauggugcccgc

SEQ ID NO: 44902 - RNA, 32 nt, Homo Sapiens
ggaaaauacuuauggucggaagucguuggggc

SEQ ID NO: 44903 - RNA, 32 nt, Homo Sapiens
aaggacucugggcaucuucagcccuucuuacu

SEQ ID NO: 44904 - RNA, 32 nt, Homo Sapiens
auugaauaaugguacuagauaaaauuauagau

SEQ ID NO: 44905 - RNA, 32 nt, Homo Sapiens
cccgcgcgucuaucccucuccuccccgcgaag

SEQ ID NO: 44906 - RNA, 32 nt, Homo Sapiens
uuaauguuuugccuuguuuucuuuucuuccuu

SEQ ID NO: 44907 - RNA, 32 nt, Homo Sapiens
cgggcacccccggacgccccccggccugaugg

SEQ ID NO: 44908 - RNA, 32 nt, Homo Sapiens
uuugucacaagcuguagauaacagcaagagau

SEQ ID NO: 44909 - RNA, 32 nt, Homo Sapiens
ccaggcgcccgguggcuccgaagcggggaagu

SEQ ID NO: 44910 - RNA, 32 nt, Homo Sapiens
ggucggcgcgcccagccugccagccgcgcugc

SEQ ID NO: 44911 - RNA, 32 nt, Homo Sapiens
agcuccaggaccagccagcuguguucccugca

SEQ ID NO: 44912 - RNA, 32 nt, Homo Sapiens
agaaggcagacacaaaacuccuauuagggguc

SEQ ID NO: 44913 - RNA, 32 nt, Homo Sapiens
agccucccccugugccagcagccccacucccu

SEQ ID NO: 44914 - RNA, 32 nt, Homo Sapiens
cccucggccgacgucccgggaccgccgcuccg

SEQ ID NO: 44915 - RNA, 32 nt, Homo Sapiens
agcagugccugccuaugaaauuucaacuuuuc

SEQ ID NO: 44916 - RNA, 32 nt, Homo Sapiens
agugaucaguuauacuguuuucuauagcuacu

SEQ ID NO: 44917 - RNA, 32 nt, Homo Sapiens
cuggcgagcgcgguugcuguuucuucucaggc

SEQ ID NO: 44918 - RNA, 32 nt, Homo Sapiens
agacucagcucuuuucuagcgacugaaaguag

SEQ ID NO: 44919 - RNA, 32 nt, Homo Sapiens
cucucugugguuugacuuacuccagcuaccgu

SEQ ID NO: 44920 - RNA, 32 nt, Homo Sapiens
accucagcuaaggaccgcagugcccuguagag

SEQ ID NO: 44921 - RNA, 32 nt, Homo Sapiens
auaacgauguauuugauguggaccaaauucgu

SEQ ID NO: 44922 - RNA, 32 nt, Homo Sapiens
uacuuuuucuaaaaauggccauuguuuaugaa

SEQ ID NO: 44923 - RNA, 32 nt, Homo Sapiens
uuaacaacagccaggagcuuccugucaguaac

SEQ ID NO: 44924 - RNA, 32 nt, Homo Sapiens
uuguauuguuaaugcaucaucauagaaaaacu

SEQ ID NO: 44925 - RNA, 32 nt, Homo Sapiens
aggaauccuccaacaaccacaaacacaucguu

SEQ ID NO: 44926 - RNA, 32 nt, Homo Sapiens
gccaagugcacgagcugguccuggcugccugg

SEQ ID NO: 44927 - RNA, 32 nt, Homo Sapiens
aaagaacugagggacgugcagaugaggaugaa

SEQ ID NO: 44928 - RNA, 32 nt, Homo Sapiens
aggccggcgcaucaucugaggucaggaguuca

SEQ ID NO: 44929 - RNA, 32 nt, Homo Sapiens
augugcaaaguaaaaugcuucauuugccacau

SEQ ID NO: 44930 - RNA, 32 nt, Homo Sapiens
gucccaggccuccggcugcucccggccgaagg

SEQ ID NO: 44931 - RNA, 32 nt, Homo Sapiens
gcagcggaguccaggagcugguguggcccaca

SEQ ID NO: 44932 - RNA, 32 nt, Homo Sapiens
aacaucuuuuucuacucgaguuacagacaaag

SEQ ID NO: 44933 - RNA, 32 nt, Homo Sapiens
gaggaggugggaacagaagagagaaggaggca

SEQ ID NO: 44934 - RNA, 32 nt, Homo Sapiens
gaaagccuccucuggagaaucuuacagaguga

SEQ ID NO: 44935 - RNA, 30 nt, Homo Sapiens
gucagugagggcgaucauagggcauaagcc

SEQ ID NO: 44936 - RNA, 32 nt, Homo Sapiens
uccagcgaguaccccagccacuccucaaccuu

SEQ ID NO: 44937 - RNA, 32 nt, Homo Sapiens
cacauggccccgggcggcucggcggucagcug

SEQ ID NO: 44938 - RNA, 32 nt, Homo Sapiens
ugucccugcggaggccccagcagacccagcaa

SEQ ID NO: 44939 - RNA, 32 nt, Homo Sapiens
gacuuagugacuaugagaagagagacaagucu

SEQ ID NO: 44940 - RNA, 32 nt, Homo Sapiens
ucauggauuuaguuauacauaccuuaauaguu

SEQ ID NO: 44941 - RNA, 32 nt, Homo Sapiens
uaguguauauauaaacacaaauaauuagugac

SEQ ID NO: 44942 - RNA, 32 nt, Homo Sapiens
ccagugcucccuccccaggaguggggccccaa

SEQ ID NO: 44943 - RNA, 32 nt, Homo Sapiens
uuaaaaacaauauaugccagacauauaucccu

SEQ ID NO: 44944 - RNA, 32 nt, Homo Sapiens
cggccucucaaucccagcucucgccccaaggc

SEQ ID NO: 44945 - RNA, 32 nt, Homo Sapiens
ggaagguguccaguucaagagaacccacccag

SEQ ID NO: 44946 - RNA, 32 nt, Homo Sapiens
ugggcagaggggccuuacagcagcagaggcug

SEQ ID NO: 44947 - RNA, 32 nt, Homo Sapiens
augagccauucggcaccaaacacacagacugc

SEQ ID NO: 44948 - RNA, 32 nt, Homo Sapiens
ccccagauggacuggcuguggucaggaaaggc

SEQ ID NO: 44949 - RNA, 32 nt, Homo Sapiens
uuuggcuguauauuguagacaccuggaugcag

SEQ ID NO: 44950 - RNA, 32 nt, Homo Sapiens
uaguauaacuauagggauaccgaaacaggaaa

SEQ ID NO: 44951 - RNA, 32 nt, Homo Sapiens
ccuggugaucugcccaccugggccucccaaaa

SEQ ID NO: 44952 - RNA, 32 nt, Homo Sapiens
acaauuugcagcagacgaguauggaagacuac

SEQ ID NO: 44953 - RNA, 31 nt, Homo Sapiens
auacagaaauaaaacuuauaugaagaguaac

SEQ ID NO: 44954 - RNA, 32 nt, Homo Sapiens
aagaucuuugcaguucaaucgaccacauagga

SEQ ID NO: 44955 - RNA, 32 nt, Homo Sapiens
gagauaauacucacagagacagaaacacugag

SEQ ID NO: 44956 - RNA, 32 nt, Homo Sapiens
gaaaaccaaaaaccacaacuacagaaauucau

SEQ ID NO: 44957 - RNA, 32 nt, Homo Sapiens
caaaggaauauauuuuuaacuugaaucuuuuc

SEQ ID NO: 44958 - RNA, 32 nt, Homo Sapiens
ccaaccccaagcccugcccuucaccgcccggc

SEQ ID NO: 44959 - RNA, 32 nt, Homo Sapiens
gauuuuucugcuuguucuuaaugcugugguca

SEQ ID NO: 44960 - RNA, 32 nt, Homo Sapiens
uauuuuuguuuuacuagugccacagacuugcc

SEQ ID NO: 44961 - RNA, 32 nt, Homo Sapiens
auagaagcaaaauaaaagcagcuuuaauuuca

SEQ ID NO: 44962 - RNA, 31 nt, Homo Sapiens
uagugggauuuccagaaccacacuugaaacc

SEQ ID NO: 44963 - RNA, 32 nt, Homo Sapiens
ggccucgcggguccgggagcgcggcggagacg

SEQ ID NO: 44964 - RNA, 32 nt, Homo Sapiens
ucccgucccgcaccgccugccgcgucggccuc

SEQ ID NO: 44965 - RNA, 32 nt, Homo Sapiens
aaagguuuuuaaaguccugcaauaaagaaucu

SEQ ID NO: 44966 - RNA, 32 nt, Homo Sapiens
gugccgcaaugagagucaaucucuauugacag

SEQ ID NO: 44967 - RNA, 32 nt, Homo Sapiens
aacgggcaacucuggagaaaaauaaggaaagg

SEQ ID NO: 44968 - RNA, 32 nt, Homo Sapiens
ugcugccggccgcgccaugcggugagcgcccc

SEQ ID NO: 44969 - RNA, 30 nt, Homo Sapiens
ucagaggcucagucuguugagucuguugug

SEQ ID NO: 44970 - RNA, 32 nt, Homo Sapiens
cugagccgugcagcugggauuugaaccaggcc

SEQ ID NO: 44971 - RNA, 32 nt, Homo Sapiens
guuccaaacugggacucggaccaagaaaaguu

SEQ ID NO: 44972 - RNA, 32 nt, Homo Sapiens
gcccccugacuuccaaaaucagugccuuugga

SEQ ID NO: 44973 - RNA, 32 nt, Homo Sapiens
gggccucgccagccaggagagagcgagggccg

SEQ ID NO: 44974 - RNA, 32 nt, Homo Sapiens
gcugguguggagggccgguguccuuggcugcc

SEQ ID NO: 44975 - RNA, 32 nt, Homo Sapiens
ugaauacagcuagggacgugaaagaacgggga

SEQ ID NO: 44976 - RNA, 32 nt, Homo Sapiens
caagaaggcggcgggggaagauggcgguccug

SEQ ID NO: 44977 - RNA, 32 nt, Homo Sapiens
gugcuuggcugguuugucucauucuuuaugaa

SEQ ID NO: 44978 - RNA, 32 nt, Homo Sapiens
uuaacuggguggagaaagaauggaaaaccuuc

SEQ ID NO: 44979 - RNA, 32 nt, Homo Sapiens
agcguuuuguugagcaugacaccugcagcagg

SEQ ID NO: 44980 - RNA, 32 nt, Homo Sapiens
cggaggcuguggcagcagcugcagcggcggcg

SEQ ID NO: 44981 - RNA, 32 nt, Homo Sapiens
aguuaugccugggauaugcagauggaaaugca

SEQ ID NO: 44982 - RNA, 32 nt, Homo Sapiens
cgcuaggcuucggcccggccgccgccacacau

SEQ ID NO: 44983 - RNA, 32 nt, Homo Sapiens
cucauaauuguccuugccuuuccagcuuaauu

SEQ ID NO: 44984 - RNA, 32 nt, Homo Sapiens
gagagcauugcgcgcggcugggcccgcggccg

SEQ ID NO: 44985 - RNA, 32 nt, Homo Sapiens
accauuuucauugcuuuccccagcagcaugau

SEQ ID NO: 44986 - RNA, 32 nt, Homo Sapiens
uacccauguuuaacccaaagagugcaggccag

SEQ ID NO: 44987 - RNA, 32 nt, Homo Sapiens
ccagcccuuucagcugcaggugggagcuggcc

SEQ ID NO: 44988 - RNA, 32 nt, Homo Sapiens
caccagucuauguaucucuggagugagaucua

SEQ ID NO: 44989 - RNA, 32 nt, Homo Sapiens
uuugugaaaaagaacuaagcacuaaucaauaa

SEQ ID NO: 44990 - RNA, 32 nt, Homo Sapiens
cagaucccaaaauauaaugaaggggauggugg

SEQ ID NO: 44991 - RNA, 32 nt, Homo Sapiens
gagcuguugaagaucccgugucauuaccuggg

SEQ ID NO: 44992 - RNA, 32 nt, Homo Sapiens
cacccgccucaucacccaagccaggcaccaug

SEQ ID NO: 44993 - RNA, 32 nt, Homo Sapiens
cgaggcugcccccauccagccacggagggagg

SEQ ID NO: 44994 - RNA, 32 nt, Homo Sapiens
ccccggcggugcagggcggguggagucgcgga

SEQ ID NO: 44995 - RNA, 29 nt, Homo Sapiens
gcuuuuaauguuuaacauuuucuagcaua

SEQ ID NO: 44996 - RNA, 32 nt, Homo Sapiens
uuuggcauuuuuccuugcagucaucaguuaag

SEQ ID NO: 44997 - RNA, 32 nt, Homo Sapiens
cuuugccaacaaagugaacuguuuugguuguu

SEQ ID NO: 44998 - RNA, 32 nt, Homo Sapiens
uucuggaagaauguaguaaucuucuagaccgc

SEQ ID NO: 44999 - RNA, 31 nt, Homo Sapiens
cccuccguucccagccugcccugcccccgcc

SEQ ID NO: 45000 - RNA, 31 nt, Homo Sapiens
uuggagcuggcacugaaccaggcugcaagau

SEQ ID NO: 45001 - RNA, 32 nt, Homo Sapiens
gcucggccacgcggugggaaccccgcgucccc

SEQ ID NO: 45002 - RNA, 32 nt, Homo Sapiens
cuacucaggcugucggggcuugguggggguga

SEQ ID NO: 45003 - RNA, 32 nt, Homo Sapiens
auagggaaaaucuuaaaguguuugaucuuucu

SEQ ID NO: 45004 - RNA, 32 nt, Homo Sapiens
uuugucuugucuucuuuuuaauuuauggacua

SEQ ID NO: 45005 - RNA, 32 nt, Homo Sapiens
cugaagcaggguuuugagccacugcugcugcu

SEQ ID NO: 45006 - RNA, 32 nt, Homo Sapiens
auggacugucacagcccuccccaccccacauc

SEQ ID NO: 45007 - RNA, 32 nt, Homo Sapiens
gucagucggucccccguuucugcucuccuccc

SEQ ID NO: 45008 - RNA, 32 nt, Homo Sapiens
guuuuccaugggaucuggaauaaaaugucagu

SEQ ID NO: 45009 - RNA, 32 nt, Homo Sapiens
cccucuucccacgacuggccccggcccucucc

SEQ ID NO: 45010 - RNA, 32 nt, Homo Sapiens
gucaggggucagagauucuguccugcuccugg

SEQ ID NO: 45011 - RNA, 32 nt, Homo Sapiens
guauauguggugugucugaaguucuuaacaaa

SEQ ID NO: 45012 - RNA, 32 nt, Homo Sapiens
aaccccaccucaccgccccccaucccgguucu

SEQ ID NO: 45013 - RNA, 32 nt, Homo Sapiens
cauuuuauugguuuuuauuuuuaauuuucuac

SEQ ID NO: 45014 - RNA, 32 nt, Homo Sapiens
auuucaccaaaaucagagggcugaaagagaca

SEQ ID NO: 45015 - RNA, 32 nt, Homo Sapiens
cccuggcuaccuuguuaugagguuuuguuauu

SEQ ID NO: 45016 - RNA, 32 nt, Homo Sapiens
caagcuuuuucuuguuauguuuuaaacagcuu

SEQ ID NO: 45017 - RNA, 32 nt, Homo Sapiens
auucaguaauuuccuacaagcagcaccccaaa

SEQ ID NO: 45018 - RNA, 32 nt, Homo Sapiens
gggggagggaggggagugucagagugugagcg

SEQ ID NO: 45019 - RNA, 32 nt, Homo Sapiens
cauuuggaugaccccauugcugaaguugaacc

SEQ ID NO: 45020 - RNA, 32 nt, Homo Sapiens
agcugguugggaacccuuugcugcuggggagg

SEQ ID NO: 45021 - RNA, 32 nt, Homo Sapiens
aauuauuuacacaaccuuggaagauuaggcau

SEQ ID NO: 45022 - RNA, 32 nt, Homo Sapiens
gacuagacugaccccacccuuccuucagugag

SEQ ID NO: 45023 - RNA, 32 nt, Homo Sapiens
acauucucacuagaaacaaaacaaaaaugaaa

SEQ ID NO: 45024 - RNA, 32 nt, Homo Sapiens
ugagcggcuuccugggguccuccccacguccc

SEQ ID NO: 45025 - RNA, 32 nt, Homo Sapiens
cgaggcuucuccccggcccauccagcggcugc

SEQ ID NO: 45026 - RNA, 32 nt, Homo Sapiens
aaguuuuuuguuguuguuguuguuguuuuaac

SEQ ID NO: 45027 - RNA, 32 nt, Homo Sapiens
aguggcagcucccacagccccucccucuccuc

SEQ ID NO: 45028 - RNA, 32 nt, Homo Sapiens
ccauaguggguucccuuggucagcaacagugc

SEQ ID NO: 45029 - RNA, 32 nt, Homo Sapiens
ggucuagagaggaggagggcggggcuggagga

SEQ ID NO: 45030 - RNA, 32 nt, Homo Sapiens
uugguuuuguguggugacguggcacauguuug

SEQ ID NO: 45031 - RNA, 32 nt, Homo Sapiens
uugaagugaauaaaugucuauuguguaacucu

SEQ ID NO: 45032 - RNA, 32 nt, Homo Sapiens
gcuguggguuaccaccuggaaugguucaucag

SEQ ID NO: 45033 - RNA, 32 nt, Homo Sapiens
ccuuuagucauuugguuuuucuuaaaaaguug

SEQ ID NO: 45034 - RNA, 32 nt, Homo Sapiens
ccccggccgccgaccgcuccccggaaccguga

SEQ ID NO: 45035 - RNA, 32 nt, Homo Sapiens
uacaugacauucaggacacacacacacacaca

SEQ ID NO: 45036 - RNA, 32 nt, Homo Sapiens
gaaguuuuuuugaaguuuuucucacuaaaaua

SEQ ID NO: 45037 - RNA, 32 nt, Homo Sapiens
augguuugucggggacauuuaacucauggagg

SEQ ID NO: 45038 - RNA, 32 nt, Homo Sapiens
ggggcaggggagggcgcuguggagcggcuguc

SEQ ID NO: 45039 - RNA, 32 nt, Homo Sapiens
gaccagcccaggcgggacccaggcuugcacgg

SEQ ID NO: 45040 - RNA, 32 nt, Homo Sapiens
auguguauguaaaaauacuuuuuaccagucug

SEQ ID NO: 45041 - RNA, 32 nt, Homo Sapiens
gaagagaagucaacaaauauuuugguacucuu

SEQ ID NO: 45042 - RNA, 32 nt, Homo Sapiens
ugauacagacugcccuccacagacagggaacc

SEQ ID NO: 45043 - RNA, 32 nt, Homo Sapiens
ccaauccagugucccuaugagagacggaagag

SEQ ID NO: 45044 - RNA, 32 nt, Homo Sapiens
aaaaguuuuauaguuucagaguuuacauguaa

SEQ ID NO: 45045 - RNA, 32 nt, Homo Sapiens
ucccugcuccucugagaugccgagggcggggc

SEQ ID NO: 45046 - RNA, 32 nt, Homo Sapiens
acucugucugucugcugcccaucugcugucug

SEQ ID NO: 45047 - RNA, 32 nt, Homo Sapiens
ccuaauaauacuguggaacuagguuuuaauaa

SEQ ID NO: 45048 - RNA, 32 nt, Homo Sapiens
aggcugaggcaggaggaucauuugagcccagg

SEQ ID NO: 45049 - RNA, 32 nt, Homo Sapiens
cccauccacuucuuccacuccuccccgcaggc

SEQ ID NO: 45050 - RNA, 32 nt, Homo Sapiens
ggggcuuauuaacggugguaucugguagagcc

SEQ ID NO: 45051 - RNA, 30 nt, Homo Sapiens
cccugccaugcucuggucuguucugaaacu

SEQ ID NO: 45052 - RNA, 32 nt, Homo Sapiens
uuuaauuugugauaccuuuguauguaugagac

SEQ ID NO: 45053 - RNA, 32 nt, Homo Sapiens
gaacacaaggcacacauauauuggaaagauca

SEQ ID NO: 45054 - RNA, 32 nt, Homo Sapiens
caucgcacccccacccccacccccacuggaau

SEQ ID NO: 45055 - RNA, 32 nt, Homo Sapiens
caggaggaaugggaacaacuggaccccucuca

SEQ ID NO: 45056 - RNA, 32 nt, Homo Sapiens
uccugccguccugacgccaccccgccccauca

SEQ ID NO: 45057 - RNA, 32 nt, Homo Sapiens
uugaaauaauuaugcagacacaucagcuguua

SEQ ID NO: 45058 - RNA, 32 nt, Homo Sapiens
accaaauucagaagcuaucguuaauaauuugu

SEQ ID NO: 45059 - RNA, 32 nt, Homo Sapiens
aacgggcaggacuuggggcagcugaagcucac

SEQ ID NO: 45060 - RNA, 32 nt, Homo Sapiens
uugaauuacauuagcacauucugcuuagcuaa

SEQ ID NO: 45061 - RNA, 32 nt, Homo Sapiens
agccaagacugaugaaguagugucugaucaaa

SEQ ID NO: 45062 - RNA, 32 nt, Homo Sapiens
gcagagggcgcuucgacgggcugggcugugcg

SEQ ID NO: 45063 - RNA, 32 nt, Homo Sapiens
uuguauuuccccucugguuguuccuaacccuc

SEQ ID NO: 45064 - RNA, 32 nt, Homo Sapiens
cacacaggcguccugaccgagggcgccgagaa

SEQ ID NO: 45065 - RNA, 32 nt, Homo Sapiens
agagaggcagagggacuaucagggugaagcug

SEQ ID NO: 45066 - RNA, 32 nt, Homo Sapiens
aaacauuuuuauuucaguaacuuuucccccug

SEQ ID NO: 45067 - RNA, 32 nt, Homo Sapiens
ugugugcgcgccccgcucugccacguucccug

SEQ ID NO: 45068 - RNA, 32 nt, Homo Sapiens
uggagagggcugaagcuguugcugggggccga

SEQ ID NO: 45069 - RNA, 32 nt, Homo Sapiens
cuggcucugccagcugacuggcagagggguug

SEQ ID NO: 45070 - RNA, 32 nt, Homo Sapiens
ggugccggggccuggggcucugagggaaauug

SEQ ID NO: 45071 - RNA, 32 nt, Homo Sapiens
augccuuauaaaaucuucauuaugaaauauua

SEQ ID NO: 45072 - RNA, 32 nt, Homo Sapiens
uguuuuucucccugugccauuuacccuuccac

SEQ ID NO: 45073 - RNA, 32 nt, Homo Sapiens
cuccuggaaugggggaaccuuccuuauccccu

SEQ ID NO: 45074 - RNA, 32 nt, Homo Sapiens
uguggacugucgccauaaguccuuccaugaca

SEQ ID NO: 45075 - RNA, 32 nt, Homo Sapiens
gggcccaagccugguccgcgcgcgcccccugc

SEQ ID NO: 45076 - RNA, 32 nt, Homo Sapiens
uucauuuuuuguuuuucuuguuuuguuuuguu

SEQ ID NO: 45077 - RNA, 32 nt, Homo Sapiens
gugggaaguaaaacaucacuuuuuacauuaaa

SEQ ID NO: 45078 - RNA, 32 nt, Homo Sapiens
uagucuuacuaaaugcagaaauaagaauaaac

SEQ ID NO: 45079 - RNA, 32 nt, Homo Sapiens
uaguggaaagaacaaaaucaaaacacuguaug

SEQ ID NO: 45080 - RNA, 32 nt, Homo Sapiens
acaauggagcaggaaggauaaaaaauaaagaa

SEQ ID NO: 45081 - RNA, 32 nt, Homo Sapiens
uuugcaggcuggaagcaccagggaauuaauuc

SEQ ID NO: 45082 - RNA, 32 nt, Homo Sapiens
uuuuggcaaaucguccgucucgagggccuugg

SEQ ID NO: 45083 - RNA, 32 nt, Homo Sapiens
uccucccaaagucccccuccucagccagccuc

SEQ ID NO: 45084 - RNA, 32 nt, Homo Sapiens
agcgggagcgcggcguccgggaggcggcggag

SEQ ID NO: 45085 - RNA, 32 nt, Homo Sapiens
aguagggcuauuuccaucgguauuuuaaaugu

SEQ ID NO: 45086 - RNA, 32 nt, Homo Sapiens
uccauggagaccuggaggaagagugucucagg

SEQ ID NO: 45087 - RNA, 32 nt, Homo Sapiens
ccgagaucgugucacugcacuccagccugggc

SEQ ID NO: 45088 - RNA, 32 nt, Homo Sapiens
gaccccaucucuacuuaaaauaaagaaguaaa

SEQ ID NO: 45089 - RNA, 32 nt, Homo Sapiens
ggcuguggaaaacagaguugucuuggggguua

SEQ ID NO: 45090 - RNA, 32 nt, Homo Sapiens
ggccaggcccucacuucguauuaaggcucagg

SEQ ID NO: 45091 - RNA, 32 nt, Homo Sapiens
ugcgacaguuuagcgaaaauggcaacacuuug

SEQ ID NO: 45092 - RNA, 32 nt, Homo Sapiens
guguacccaguacuucuguguguccugggcug

SEQ ID NO: 45093 - RNA, 32 nt, Homo Sapiens
ucagcuggacgaaggccgggagcccugcaccc

SEQ ID NO: 45094 - RNA, 32 nt, Homo Sapiens
aaucugaaccuuccuuguagacuugcagccaa

SEQ ID NO: 45095 - RNA, 29 nt, Homo Sapiens
gaguuuauauguauacuguggauacuaga

SEQ ID NO: 45096 - RNA, 32 nt, Homo Sapiens
guuuugguuuauuuuuaacaacgcucuagaaa

SEQ ID NO: 45097 - RNA, 32 nt, Homo Sapiens
gugucguaggcugugugugucuguaaagaaag

SEQ ID NO: 45098 - RNA, 32 nt, Homo Sapiens
ucuugaccugagagccgagaguggaucgcugg

SEQ ID NO: 45099 - RNA, 32 nt, Homo Sapiens
cugagccaggguccagguucaaggcuggggga

SEQ ID NO: 45100 - RNA, 31 nt, Homo Sapiens
ggacagugaaacacccagagacuuguaucag

SEQ ID NO: 45101 - RNA, 32 nt, Homo Sapiens
cacugcacuccagacuuggugacagagcaaga

SEQ ID NO: 45102 - RNA, 32 nt, Homo Sapiens
cacuauuuacacaaauaugcaaaugugaaaua

SEQ ID NO: 45103 - RNA, 32 nt, Homo Sapiens
cuuuuuuguaaacccccaguugugaaaacugc

SEQ ID NO: 45104 - RNA, 32 nt, Homo Sapiens
ugggccguuuucaccuccuccucccacauaca

SEQ ID NO: 45105 - RNA, 32 nt, Homo Sapiens
ggccgggcgcacuaaggugcgcggccccgggg

SEQ ID NO: 45106 - RNA, 32 nt, Homo Sapiens
uuuagaaaacagaggaguuuguagccagcagc

SEQ ID NO: 45107 - RNA, 32 nt, Homo Sapiens
agaacaaaauuuggcagcaacucauaaagaua

SEQ ID NO: 45108 - RNA, 32 nt, Homo Sapiens
agcccacucagugcccucuggugaccacacau

SEQ ID NO: 45109 - RNA, 32 nt, Homo Sapiens
uuuuaaugauuuauacaaugacuccaaaggca

SEQ ID NO: 45110 - RNA, 32 nt, Homo Sapiens
ugggccucaguuuccacaucugcacaaugggg

SEQ ID NO: 45111 - RNA, 32 nt, Homo Sapiens
uuuuugggggaaggaaagccagacacaaugcu

SEQ ID NO: 45112 - RNA, 32 nt, Homo Sapiens
uuccccuuuaccaaauaaagcaaagucaaacc

SEQ ID NO: 45113 - RNA, 32 nt, Homo Sapiens
ggagggaggaggagcagacggcagaggaaauc

SEQ ID NO: 45114 - RNA, 32 nt, Homo Sapiens
gucaucaacuuuuucuuaauuccucugugaca

SEQ ID NO: 45115 - RNA, 32 nt, Homo Sapiens
caggcgugucccagggggagccccgcucugca

SEQ ID NO: 45116 - RNA, 32 nt, Homo Sapiens
agccuugggaugcagagcagcuggcaggguuc

SEQ ID NO: 45117 - RNA, 32 nt, Homo Sapiens
caagcuucucccuuacccacaccuauccuuuu

SEQ ID NO: 45118 - RNA, 32 nt, Homo Sapiens
ugggcgcucagguagacuuugaggcacuccuc

SEQ ID NO: 45119 - RNA, 32 nt, Homo Sapiens
aauuuagcaaauauauuuuuuauuuguuauau

SEQ ID NO: 45120 - RNA, 32 nt, Homo Sapiens
gacacagauuugccagaugacauguagcggac

SEQ ID NO: 45121 - RNA, 32 nt, Homo Sapiens
guaaacgccaugaucagacccuugccugucuc

SEQ ID NO: 45122 - RNA, 32 nt, Homo Sapiens
cuaaauuaccauaaaaugucagcaaauguaaa

SEQ ID NO: 45123 - RNA, 32 nt, Homo Sapiens
auggggccucuaaggggaguguggggucuguc

SEQ ID NO: 45124 - RNA, 32 nt, Homo Sapiens
cagggacccuccccgcuuuccugggccucuca

SEQ ID NO: 45125 - RNA, 32 nt, Homo Sapiens
aagacagaacaaacuggaauguuuuaugaugu

SEQ ID NO: 45126 - RNA, 32 nt, Homo Sapiens
gugguuuugaggcacccacaccccccgcuuuc

SEQ ID NO: 45127 - RNA, 32 nt, Homo Sapiens
ucagccuuuuuggcaaaaagaaaugacuccuu

SEQ ID NO: 45128 - RNA, 32 nt, Homo Sapiens
uuugguuuuccuguuaauuuaccuguuugacu

SEQ ID NO: 45129 - RNA, 32 nt, Homo Sapiens
auccucgauaucuauauagauauagacauaug

SEQ ID NO: 45130 - RNA, 27 nt, Homo Sapiens
ccaugaagaagcugaugguggugcuga

SEQ ID NO: 45131 - RNA, 32 nt, Homo Sapiens
cucaguuucagcgcuggcucuucgugcauggc

SEQ ID NO: 45132 - RNA, 32 nt, Homo Sapiens
aaauauauuugugcuuuuuucuuauguaggaa

SEQ ID NO: 45133 - RNA, 32 nt, Homo Sapiens
aaaguacagugcuguuacguggcacuguacag

SEQ ID NO: 45134 - RNA, 30 nt, Homo Sapiens
caggcggcagagucugagggucccggggcc

SEQ ID NO: 45135 - RNA, 32 nt, Homo Sapiens
aggacuuccuuccaucuucuccugcucauagc

SEQ ID NO: 45136 - RNA, 32 nt, Homo Sapiens
cuacugggaauauuuuuguagagcugcauugu

SEQ ID NO: 45137 - RNA, 32 nt, Homo Sapiens
ucucuuuguaauuauuucuuuaguuuaauuaa

SEQ ID NO: 45138 - RNA, 32 nt, Homo Sapiens
aaaacguagcuaccguacacacacaucaauca

SEQ ID NO: 45139 - RNA, 32 nt, Homo Sapiens
gaugcaaaaugguguuauuuaauugucuccac

SEQ ID NO: 45140 - RNA, 32 nt, Homo Sapiens
ccggcucacugcccagcccccaucuaccucug

SEQ ID NO: 45141 - RNA, 27 nt, Homo Sapiens
acauggcagcgggguucgggcgaugcu

SEQ ID NO: 45142 - RNA, 32 nt, Homo Sapiens
acuggauuugugguuucccuggauugguuuuu

SEQ ID NO: 45143 - RNA, 32 nt, Homo Sapiens
cuugagcaagucuguuccuucuggaaaccaaa

SEQ ID NO: 45144 - RNA, 32 nt, Homo Sapiens
ccacgggcggccccuucucccggcgccgccuc

SEQ ID NO: 45145 - RNA, 32 nt, Homo Sapiens
aacccuuuugaauucuucuacuucuaccugac

SEQ ID NO: 45146 - RNA, 32 nt, Homo Sapiens
uguuuuugagacggagucucgcucuguuuccc

SEQ ID NO: 45147 - RNA, 32 nt, Homo Sapiens
uggaaauuuuugguuuaugacuuugucuaaua

SEQ ID NO: 45148 - RNA, 32 nt, Homo Sapiens
uugaagacuaaaaagaagaagauggcugcuga

SEQ ID NO: 45149 - RNA, 32 nt, Homo Sapiens
aagguagaaaaggggucggaucugaaaagggg

SEQ ID NO: 45150 - RNA, 32 nt, Homo Sapiens
uauugauuuuguaacagcaccugguguuucac

SEQ ID NO: 45151 - RNA, 32 nt, Homo Sapiens
ggcguugcggcugcugcggccggagcaggucc

SEQ ID NO: 45152 - RNA, 32 nt, Homo Sapiens
ggcccaaaacaaagcaaacaaacaaaaaaaag

SEQ ID NO: 45153 - RNA, 32 nt, Homo Sapiens
uguaugagaauuacaagucacauuaguaagaa

SEQ ID NO: 45154 - RNA, 32 nt, Homo Sapiens
guuugagaccaccuugggcaacauaacgagac

SEQ ID NO: 45155 - RNA, 32 nt, Homo Sapiens
guccgcucagcucggucuuaugcuguauaguu

SEQ ID NO: 45156 - RNA, 32 nt, Homo Sapiens
uguuuucuuauagucuuaauuuuauuauauuu

SEQ ID NO: 45157 - RNA, 32 nt, Homo Sapiens
caaaucuaaagaauauggagguccuggagcac

SEQ ID NO: 45158 - RNA, 32 nt, Homo Sapiens
ccagguggggauugcacccuggcgagcuuacc

SEQ ID NO: 45159 - RNA, 32 nt, Homo Sapiens
uucuugcugguggucagcaggcauagggaggc

SEQ ID NO: 45160 - RNA, 32 nt, Homo Sapiens
cagccuuuugauacuaugcuuuuaucaaguuu

SEQ ID NO: 45161 - RNA, 32 nt, Homo Sapiens
cgggagugacaaccaggacaccuucuucacaa

SEQ ID NO: 45162 - RNA, 32 nt, Homo Sapiens
ucacaucgaagaaaauuuaaauuuguauuaau

SEQ ID NO: 45163 - RNA, 32 nt, Homo Sapiens
ccugguccggugcuccggcgccugaucuaggu

SEQ ID NO: 45164 - RNA, 32 nt, Homo Sapiens
cagccuggcggacgagcccggcggcggagaug

SEQ ID NO: 45165 - RNA, 32 nt, Homo Sapiens
gugaauugguuuuuuucuucucauuuguaauu

SEQ ID NO: 45166 - RNA, 30 nt, Homo Sapiens
cacacgcucgcucgcucgccggcgcgcgca

SEQ ID NO: 45167 - RNA, 32 nt, Homo Sapiens
gugugcuugggccagcaccugcccuccuccuu

SEQ ID NO: 45168 - RNA, 32 nt, Homo Sapiens
gggguaggggguagugaggaucuugauuugga

SEQ ID NO: 45169 - RNA, 32 nt, Homo Sapiens
gcuggacaaaaauaacugcaaggaggggcaag

SEQ ID NO: 45170 - RNA, 32 nt, Homo Sapiens
ucaacuuuugaaauacaaaaccaguguuuuuu

SEQ ID NO: 45171 - RNA, 32 nt, Homo Sapiens
uuguacuuuauuaagauugccaaaaacuguua

SEQ ID NO: 45172 - RNA, 32 nt, Homo Sapiens
cgggccgcagcggccaagcccgagggugcgug

SEQ ID NO: 45173 - RNA, 32 nt, Homo Sapiens
ugaguggacacuagacuccagcccuucacagg

SEQ ID NO: 45174 - RNA, 32 nt, Homo Sapiens
aauuccacuguacauguuauucaguguuuggu

SEQ ID NO: 45175 - RNA, 32 nt, Homo Sapiens
cccauugaugcagaagacagcuacacuugcac

SEQ ID NO: 45176 - RNA, 32 nt, Homo Sapiens
agccuuaccaauaacauaaaacaaucgaauaa

SEQ ID NO: 45177 - RNA, 32 nt, Homo Sapiens
aaauaauuuauccugaacuuugaaaguguauu

SEQ ID NO: 45178 - RNA, 32 nt, Homo Sapiens
acuuugaccaggcuuacccagcacuaaauccc

SEQ ID NO: 45179 - RNA, 32 nt, Homo Sapiens
cccacaggcuuccccaccccccgcccccacuc

SEQ ID NO: 45180 - RNA, 32 nt, Homo Sapiens
cagugcaaggaccucggcugagaggacaccug

SEQ ID NO: 45181 - RNA, 29 nt, Homo Sapiens
uaugugaucaauaaaucuuuuacaaaccc

SEQ ID NO: 45182 - RNA, 32 nt, Homo Sapiens
uaggaggagcagugaccggggguguccagaaa

SEQ ID NO: 45183 - RNA, 32 nt, Homo Sapiens
guacacccaucgccaucauagcaagagugcuu

SEQ ID NO: 45184 - RNA, 32 nt, Homo Sapiens
ugcagcgguguggggugagcccugcuguggcc

SEQ ID NO: 45185 - RNA, 32 nt, Homo Sapiens
cagccucccagcguccucuccgggcccagcuc

SEQ ID NO: 45186 - RNA, 32 nt, Homo Sapiens
acucccuaguuuccggcuucucuuccuaagga

SEQ ID NO: 45187 - RNA, 32 nt, Homo Sapiens
ccuacagcaggagagcuuagggaggcugagag

SEQ ID NO: 45188 - RNA, 32 nt, Homo Sapiens
gccggacagccugcacguguucugggaagcgg

SEQ ID NO: 45189 - RNA, 29 nt, Homo Sapiens
gcugaugaaucugguccacaggccagacc

SEQ ID NO: 45190 - RNA, 32 nt, Homo Sapiens
ccugccugcccccuggggaacacaggcagcag

SEQ ID NO: 45191 - RNA, 32 nt, Homo Sapiens
cuccuggggagcuggggggcgagggagagaug

SEQ ID NO: 45192 - RNA, 32 nt, Homo Sapiens
uuucugcuuacuagauucauugagaucagcug

SEQ ID NO: 45193 - RNA, 32 nt, Homo Sapiens
agcgucgcugcggcuccggcccgggagcgagc

SEQ ID NO: 45194 - RNA, 32 nt, Homo Sapiens
uuguuguuguuguuuaccagcaggggaccccu

SEQ ID NO: 45195 - RNA, 32 nt, Homo Sapiens
aacacccgcucgacccucucccggccccuccc

SEQ ID NO: 45196 - RNA, 32 nt, Homo Sapiens
uuaggguccugccccaggcccagccagggcug

SEQ ID NO: 45197 - RNA, 32 nt, Homo Sapiens
auguuuaagaaggaccugauauguaagcgcug

SEQ ID NO: 45198 - RNA, 32 nt, Homo Sapiens
accuuucauuuucucuuuauguuauucuuuca

SEQ ID NO: 45199 - RNA, 32 nt, Homo Sapiens
ggaagaaagcuaaacccugcgaucaauagccc

SEQ ID NO: 45200 - RNA, 32 nt, Homo Sapiens
cgcacgcacacacgggcggacacacacacacg

SEQ ID NO: 45201 - RNA, 32 nt, Homo Sapiens
cagacagacacacacacacacacacacacaca

SEQ ID NO: 45202 - RNA, 32 nt, Homo Sapiens
uccugccagcagcccuacagcuccacacccua

SEQ ID NO: 45203 - RNA, 32 nt, Homo Sapiens
cauuuguucuuguugcuucucuggauccagaa

SEQ ID NO: 45204 - RNA, 32 nt, Homo Sapiens
uccccuaugccuuccuucucuuucuaagcguc

SEQ ID NO: 45205 - RNA, 32 nt, Homo Sapiens
gauuuucuauuauggaaaacuguguugccaca

SEQ ID NO: 45206 - RNA, 32 nt, Homo Sapiens
acacgaggaugggggacuuggaugcuggugca

SEQ ID NO: 45207 - RNA, 32 nt, Homo Sapiens
cugccaggcagacgcugcagcuaagcugcgcg

SEQ ID NO: 45208 - RNA, 32 nt, Homo Sapiens
agcuccccaagccugugcgccucguccucagc

SEQ ID NO: 45209 - RNA, 32 nt, Homo Sapiens
gcccugugaacuuugucuuauauaucaccauc

SEQ ID NO: 45210 - RNA, 32 nt, Homo Sapiens
ccccgcagccaccuccucucccgaccugugau

SEQ ID NO: 45211 - RNA, 32 nt, Homo Sapiens
acugugucucacaucaccauguagaagaaugg

SEQ ID NO: 45212 - RNA, 32 nt, Homo Sapiens
ucaacacucuguaucuagcugcucuggugggg

SEQ ID NO: 45213 - RNA, 32 nt, Homo Sapiens
acuuuccugucucugcccuuaaugggaauguc

SEQ ID NO: 45214 - RNA, 32 nt, Homo Sapiens
agcuguccuuuaacaccgcagaacccccuccc

SEQ ID NO: 45215 - RNA, 32 nt, Homo Sapiens
accucucuguuuuauuucucucauucuuucaa

SEQ ID NO: 45216 - RNA, 32 nt, Homo Sapiens
uggcaugagggaagaaggaggggaaaucacag

SEQ ID NO: 45217 - RNA, 32 nt, Homo Sapiens
uuuuccgucugggaacaguaccucugccccug

SEQ ID NO: 45218 - RNA, 32 nt, Homo Sapiens
agcgggggaagggaagagcggcgugagcggag

SEQ ID NO: 45219 - RNA, 32 nt, Homo Sapiens
guuuaagaaagaaaacaaaaccaacaguuagu

SEQ ID NO: 45220 - RNA, 32 nt, Homo Sapiens
gaaacauuaaauuuaugaugagaccagaugca

SEQ ID NO: 45221 - RNA, 32 nt, Homo Sapiens
uggaaucagaaagcgguggauucuggcaaaug

SEQ ID NO: 45222 - RNA, 32 nt, Homo Sapiens
ggcgccccgagcuugcuccgccugcagcucgg

SEQ ID NO: 45223 - RNA, 32 nt, Homo Sapiens
uaaaauacaucauauuuuguuguucuuuguuu

SEQ ID NO: 45224 - RNA, 32 nt, Homo Sapiens
cucacuaucuacugcuugaccauccucugacu

SEQ ID NO: 45225 - RNA, 32 nt, Homo Sapiens
guuuggaugucuguagcauaaggucugguaac

SEQ ID NO: 45226 - RNA, 32 nt, Homo Sapiens
aauguuaaaaauuuuuagcuugacagguuucu

SEQ ID NO: 45227 - RNA, 32 nt, Homo Sapiens
gaggaccaaauaaagaugauuuuugugcuuag

SEQ ID NO: 45228 - RNA, 32 nt, Homo Sapiens
cccugaagccccacaacuuuuuaucuggauua

SEQ ID NO: 45229 - RNA, 32 nt, Homo Sapiens
gauagccacucuuuuucuuuuauguuuaaaac

SEQ ID NO: 45230 - RNA, 32 nt, Homo Sapiens
gaguucaaauaccagcacugcaggacuugugg

SEQ ID NO: 45231 - RNA, 32 nt, Homo Sapiens
gugcgaccuugggcaugcuaccuaaucucuuu

SEQ ID NO: 45232 - RNA, 32 nt, Homo Sapiens
gccaguccaggccagcauucuguuugaguugc

SEQ ID NO: 45233 - RNA, 32 nt, Homo Sapiens
cagcaauuccugcagcugggaagcauggcgac

SEQ ID NO: 45234 - RNA, 32 nt, Homo Sapiens
gcgugaggcgcuuuugagucugggguccgggg

SEQ ID NO: 45235 - RNA, 32 nt, Homo Sapiens
ucugcacagcccuuacagaaucugcacaaaga

SEQ ID NO: 45236 - RNA, 32 nt, Homo Sapiens
uuaauggcuauauauauguauuuuauaaagcc

SEQ ID NO: 45237 - RNA, 32 nt, Homo Sapiens
gccucuuuccuccuccucccgcagcuccauuc

SEQ ID NO: 45238 - RNA, 32 nt, Homo Sapiens
cagugagagauuaaugggcauuguguacaaau

SEQ ID NO: 45239 - RNA, 32 nt, Homo Sapiens
ggaggcucagugagggucccagagcacacacc

SEQ ID NO: 45240 - RNA, 30 nt, Homo Sapiens
ccgucugggcacugcaucagccugaugagg

SEQ ID NO: 45241 - RNA, 32 nt, Homo Sapiens
gccauuucacuccagccugggcgacagagcaa

SEQ ID NO: 45242 - RNA, 32 nt, Homo Sapiens
gacacacacagagcacugcugcugugcugggg

SEQ ID NO: 45243 - RNA, 32 nt, Homo Sapiens
uggcacauuaacuauuugaagaacguguuggu

SEQ ID NO: 45244 - RNA, 32 nt, Homo Sapiens
guuacgagcagcaccgcccagcccuuccuugc

SEQ ID NO: 45245 - RNA, 32 nt, Homo Sapiens
caagacagaaaacaaaucuuucuucauuuaug

SEQ ID NO: 45246 - RNA, 32 nt, Homo Sapiens
ucugccuucaggcuucugucaauuucauuauc

SEQ ID NO: 45247 - RNA, 32 nt, Homo Sapiens
ugagucagagcccauuuucaggaggcauuggu

SEQ ID NO: 45248 - RNA, 32 nt, Homo Sapiens
uacauggagagcacccugaggaccuuuaaaag

SEQ ID NO: 45249 - RNA, 32 nt, Homo Sapiens
cugcuucccuggaagcuucaggaagcucagcc

SEQ ID NO: 45250 - RNA, 32 nt, Homo Sapiens
cagaucuaacuuuccuaguggaacaguauaua

SEQ ID NO: 45251 - RNA, 32 nt, Homo Sapiens
accugucgccuuguguaaaaugagaugaggga

SEQ ID NO: 45252 - RNA, 32 nt, Homo Sapiens
gcuuuguguguacaaaagaaaacagggaaugc

SEQ ID NO: 45253 - RNA, 32 nt, Homo Sapiens
acauuucauuuauacuuuuguuuaccccucuc

SEQ ID NO: 45254 - RNA, 32 nt, Homo Sapiens
uuacguauuccaaguaaaaaguagacagcugc

SEQ ID NO: 45255 - RNA, 30 nt, Homo Sapiens
ggcggcgcaggcgcacuggguucgccgcgc

SEQ ID NO: 45256 - RNA, 32 nt, Homo Sapiens
ucccccagcaagccccucugccugcaccucag

SEQ ID NO: 45257 - RNA, 32 nt, Homo Sapiens
uugaaaguucccugaaguuucucaguucagga

SEQ ID NO: 45258 - RNA, 32 nt, Homo Sapiens
guggccuuccccaccccccagaucuccugagu

SEQ ID NO: 45259 - RNA, 32 nt, Homo Sapiens
cccccaagguucuccccuccccccgcugccca

SEQ ID NO: 45260 - RNA, 32 nt, Homo Sapiens
ucagcccugccuguuuugcaccugggaagugc

SEQ ID NO: 45261 - RNA, 32 nt, Homo Sapiens
guggacuuccgcugcuggccuggggcuuccca

SEQ ID NO: 45262 - RNA, 32 nt, Homo Sapiens
gaagucuuccugucacauaugcagguucguuu

SEQ ID NO: 45263 - RNA, 32 nt, Homo Sapiens
cuagugcagaacuuuuaccaggcuguaaaagc

SEQ ID NO: 45264 - RNA, 32 nt, Homo Sapiens
aacccugaaaacaaaaucaguuuugcauauua

SEQ ID NO: 45265 - RNA, 32 nt, Homo Sapiens
auucuggccaaggggugggccugugaaucaau

SEQ ID NO: 45266 - RNA, 32 nt, Homo Sapiens
aacaggccaucccaccaccucuaccugcucau

SEQ ID NO: 45267 - RNA, 32 nt, Homo Sapiens
uaggucucauuggcaguugugauucagagacc

SEQ ID NO: 45268 - RNA, 32 nt, Homo Sapiens
uaccgcugaggagcugcagucucugucaagau

SEQ ID NO: 45269 - RNA, 32 nt, Homo Sapiens
agaacucuugguuuuuugaaagguugacugca

SEQ ID NO: 45270 - RNA, 32 nt, Homo Sapiens
uuuaggguuucuaaaacgcucugacagaugca

SEQ ID NO: 45271 - RNA, 32 nt, Homo Sapiens
aaucauaguagcagcauauuaaggguuucuag

SEQ ID NO: 45272 - RNA, 32 nt, Homo Sapiens
cggggcccgccccaggccccagcagucuccgc

SEQ ID NO: 45273 - RNA, 32 nt, Homo Sapiens
caauuuauuucuauugagugguagaacuauau

SEQ ID NO: 45274 - RNA, 32 nt, Homo Sapiens
ggaggaagcugcuggggugcggggggcugagg

SEQ ID NO: 45275 - RNA, 32 nt, Homo Sapiens
gaggccggggacgagcccgccuccagcuccag

SEQ ID NO: 45276 - RNA, 32 nt, Homo Sapiens
uuccucuaucauggaugcugggugacuuuggg

SEQ ID NO: 45277 - RNA, 32 nt, Homo Sapiens
cuggagcccucccuggcagugcgucggcgcug

SEQ ID NO: 45278 - RNA, 32 nt, Homo Sapiens
acuucacgucagcuacauaguuuccacagggu

SEQ ID NO: 45279 - RNA, 32 nt, Homo Sapiens
cucccuguauccaaacgaggcauuccaaguuu

SEQ ID NO: 45280 - RNA, 32 nt, Homo Sapiens
auccagcccuguaccgccaucccacuucccgc

SEQ ID NO: 45281 - RNA, 32 nt, Homo Sapiens
gcgcuccuccccgggcgcuccuccccaggccu

SEQ ID NO: 45282 - RNA, 32 nt, Homo Sapiens
gcucccagugugcgcccggccggcccuggggg

SEQ ID NO: 45283 - RNA, 32 nt, Homo Sapiens
aaagaaauguucgccaugaaaacuaaggcugc

SEQ ID NO: 45284 - RNA, 32 nt, Homo Sapiens
gccugugucccucagcucccagcccagcuucc

SEQ ID NO: 45285 - RNA, 30 nt, Homo Sapiens
ggugugugucugcagcaccgugggcccuca

SEQ ID NO: 45286 - RNA, 32 nt, Homo Sapiens
aguuaugaacacuuaaauuaugauagugguau

SEQ ID NO: 45287 - RNA, 32 nt, Homo Sapiens
gacuggcacuuuaucucaauucuuaacugcug

SEQ ID NO: 45288 - RNA, 32 nt, Homo Sapiens
uuuuguacuugguuguggugccacuaaacaaa

SEQ ID NO: 45289 - RNA, 30 nt, Homo Sapiens
acuucugcagguggcaugagcugugugaag

SEQ ID NO: 45290 - RNA, 32 nt, Homo Sapiens
gagcaucugauccaguaccugcacgaugggag

SEQ ID NO: 45291 - RNA, 32 nt, Homo Sapiens
ggguggcgguggcgggagcgggaccaggugga

SEQ ID NO: 45292 - RNA, 32 nt, Homo Sapiens
cgucucccuccccacacccauaaaccagucgg

SEQ ID NO: 45293 - RNA, 32 nt, Homo Sapiens
ucuuuacaucuggagaucuauagcagggcuau

SEQ ID NO: 45294 - RNA, 32 nt, Homo Sapiens
ccugauugaccucuaaaauucuauucaguugu

SEQ ID NO: 45295 - RNA, 32 nt, Homo Sapiens
uugcucuaaugaucaaaacaugcuugaauaac

SEQ ID NO: 45296 - RNA, 32 nt, Homo Sapiens
cuguccggcagcgcuuccugcccgggucuccc

SEQ ID NO: 45297 - RNA, 32 nt, Homo Sapiens
aauuguccucaagucagccucuccagggccaa

SEQ ID NO: 45298 - RNA, 32 nt, Homo Sapiens
ugugccccaugcuacccuccccgccucccucc

SEQ ID NO: 45299 - RNA, 31 nt, Homo Sapiens
acagagggcuugacuuuaguuugcuagauaa

SEQ ID NO: 45300 - RNA, 32 nt, Homo Sapiens
aagcaggaagcagcaucaaguugccccuuggg

SEQ ID NO: 45301 - RNA, 32 nt, Homo Sapiens
ccccuucucccugcagggcaucgagcgccuca

SEQ ID NO: 45302 - RNA, 32 nt, Homo Sapiens
uagcguggacauuuuucuagcauucacccuug

SEQ ID NO: 45303 - RNA, 32 nt, Homo Sapiens
gcggccaggccacagcugcugcucccguaguc

SEQ ID NO: 45304 - RNA, 32 nt, Homo Sapiens
auuuucauacacacguguucauuuucaugcuc

SEQ ID NO: 45305 - RNA, 30 nt, Homo Sapiens
uuaaagaugccgggauccgcagcgaagggc

SEQ ID NO: 45306 - RNA, 32 nt, Homo Sapiens
cccccuucccugaccuagagcucuacagcugc

SEQ ID NO: 45307 - RNA, 28 nt, Homo Sapiens
uucgaaguuacaggacuaaaagagcaaa

SEQ ID NO: 45308 - RNA, 32 nt, Homo Sapiens
uuacaggugugagccaccaugcccggccuugu

SEQ ID NO: 45309 - RNA, 32 nt, Homo Sapiens
accuccuacccgcuuccccccagccccggcuc

SEQ ID NO: 45310 - RNA, 31 nt, Homo Sapiens
gaauccuauugagaagguagacauugugcuu

SEQ ID NO: 45311 - RNA, 32 nt, Homo Sapiens
agugagucaagaucgugccacugcacuccagc

SEQ ID NO: 45312 - RNA, 32 nt, Homo Sapiens
cugcugcugcugcugcugcugcugcuucucga

SEQ ID NO: 45313 - RNA, 32 nt, Homo Sapiens
agauauuuuuauuuuaguauuuccuguuuugg

SEQ ID NO: 45314 - RNA, 32 nt, Homo Sapiens
uaaaacacaauuuuuuguauguuucuuacauu

SEQ ID NO: 45315 - RNA, 32 nt, Homo Sapiens
agugucaguuguagauuauugggaugaagcua

SEQ ID NO: 45316 - RNA, 32 nt, Homo Sapiens
cucauuggauauuuuuaaaggucuccacagag

SEQ ID NO: 45317 - RNA, 32 nt, Homo Sapiens
uguugagcccgauucuguggcacaugugguuu

SEQ ID NO: 45318 - RNA, 32 nt, Homo Sapiens
uccccugccugccugauuccauggcuguugug

SEQ ID NO: 45319 - RNA, 32 nt, Homo Sapiens
gugguguuuccaugguagaugcuccuguucug

SEQ ID NO: 45320 - RNA, 32 nt, Homo Sapiens
agcggcuggaggaggaagagggcauggcggcc

SEQ ID NO: 45321 - RNA, 32 nt, Homo Sapiens
ccccggcagggccacgaguacccgcugcacug

SEQ ID NO: 45322 - RNA, 30 nt, Homo Sapiens
aguacccauaucccuguagcauccucuuag

SEQ ID NO: 45323 - RNA, 32 nt, Homo Sapiens
acauguucccguuugcagaaaccucacaggac

SEQ ID NO: 45324 - RNA, 32 nt, Homo Sapiens
aucuacauucucuugcagaaacccuucaaagg

SEQ ID NO: 45325 - RNA, 32 nt, Homo Sapiens
gccagggcugcgccugggcauggaagagggga

SEQ ID NO: 45326 - RNA, 32 nt, Homo Sapiens
cauuuaaaauuuguugcagcaagaacuuuccu

SEQ ID NO: 45327 - RNA, 32 nt, Homo Sapiens
aacuauacuauaaggucauagucaccaaagca

SEQ ID NO: 45328 - RNA, 32 nt, Homo Sapiens
gcaugcucccugcaugagacucacccaugcuc

SEQ ID NO: 45329 - RNA, 32 nt, Homo Sapiens
cccuuccuaggucaugccuccuccccuaggga

SEQ ID NO: 45330 - RNA, 32 nt, Homo Sapiens
ucaccagauuccccugaauccaaacucguggu

SEQ ID NO: 45331 - RNA, 31 nt, Homo Sapiens
gaguauaaagccacccacguaaguuaauaag

SEQ ID NO: 45332 - RNA, 32 nt, Homo Sapiens
gggcagucuuugcaggauaacaugcuauaccu

SEQ ID NO: 45333 - RNA, 32 nt, Homo Sapiens
ggccaaccugugggcccggccuuaggguggag

SEQ ID NO: 45334 - RNA, 32 nt, Homo Sapiens
ccucccucuccgccgggacgcgggagagcccg

SEQ ID NO: 45335 - RNA, 32 nt, Homo Sapiens
acggcugccaauggggggcauggggcgguggg

SEQ ID NO: 45336 - RNA, 32 nt, Homo Sapiens
cugcuuuuacuuugaugugaucucauugaugu

SEQ ID NO: 45337 - RNA, 32 nt, Homo Sapiens
agcaaagucugcuucucaucagaugacguggc

SEQ ID NO: 45338 - RNA, 32 nt, Homo Sapiens
agaauaaaaaaauuaaaucaaucuuaaagcuc

SEQ ID NO: 45339 - RNA, 32 nt, Homo Sapiens
auucacacagaaaaguggaggccaaggcguga

SEQ ID NO: 45340 - RNA, 32 nt, Homo Sapiens
aacuccaguaccuauaacugggcuugcaaccu

SEQ ID NO: 45341 - RNA, 32 nt, Homo Sapiens
auggaacauagauuagugguugccaggggaua

SEQ ID NO: 45342 - RNA, 32 nt, Homo Sapiens
aucggagagaauaaauaccgguuuggggauuc

SEQ ID NO: 45343 - RNA, 32 nt, Homo Sapiens
uuuauugugggaaggaaaacaggguggggcgg

SEQ ID NO: 45344 - RNA, 32 nt, Homo Sapiens
gagccaccccuccuccuccccagcugacucaa

SEQ ID NO: 45345 - RNA, 32 nt, Homo Sapiens
agugcuguacauaaguuguucuguguauaaau

SEQ ID NO: 45346 - RNA, 32 nt, Homo Sapiens
cacugcuuugcggucuccgcuagaaauuaggg

SEQ ID NO: 45347 - RNA, 32 nt, Homo Sapiens
ccaaccucugcacagcucuccaggugcugaga

SEQ ID NO: 45348 - RNA, 32 nt, Homo Sapiens
cauaagguuuuuagcauguuccuccuuuucuu

SEQ ID NO: 45349 - RNA, 32 nt, Homo Sapiens
uguaaaaaucaaucaauuaacacauuaagaga

SEQ ID NO: 45350 - RNA, 32 nt, Homo Sapiens
uucucgucaucucugaggacaucaccaucauc

SEQ ID NO: 45351 - RNA, 32 nt, Homo Sapiens
gccaagaccucaaccuggcccgcggaccucag

SEQ ID NO: 45352 - RNA, 32 nt, Homo Sapiens
ccugugcugcaugucugcuccuccccugagcc

SEQ ID NO: 45353 - RNA, 32 nt, Homo Sapiens
gacggccccggaggaugcugcugagccccggc

SEQ ID NO: 45354 - RNA, 32 nt, Homo Sapiens
uuuguauuuuugguagagacaggguuuugcug

SEQ ID NO: 45355 - RNA, 32 nt, Homo Sapiens
auauuuugugcuucuuuuucuagguucuagag

SEQ ID NO: 45356 - RNA, 32 nt, Homo Sapiens
uggaacuugccggugccuggggugccuuuccc

SEQ ID NO: 45357 - RNA, 32 nt, Homo Sapiens
aacccaaccacucagcuggauuccagaagcuc

SEQ ID NO: 45358 - RNA, 32 nt, Homo Sapiens
auuucgcacuguauuaaauguaacuuauuuaa

SEQ ID NO: 45359 - RNA, 32 nt, Homo Sapiens
uccucaacuguaagagcagacuuucaauguua

SEQ ID NO: 45360 - RNA, 32 nt, Homo Sapiens
uacaaaugccagacauaacauguagcagccau

SEQ ID NO: 45361 - RNA, 32 nt, Homo Sapiens
gaguagcuauauauuucuacuuugugucauuu

SEQ ID NO: 45362 - RNA, 32 nt, Homo Sapiens
gccuugcugcgcaugcucgcgcugugaccccg

SEQ ID NO: 45363 - RNA, 32 nt, Homo Sapiens
cuauuuuugacuuggagagacuugcuuuuguu

SEQ ID NO: 45364 - RNA, 32 nt, Homo Sapiens
cuguuaaauaaaaauauucugaaugucacucc

SEQ ID NO: 45365 - RNA, 32 nt, Homo Sapiens
aaguaaguguaaacuauccuagguaauuucag

SEQ ID NO: 45366 - RNA, 32 nt, Homo Sapiens
auaaacuguuguaugccuggugcuuugcgacu

SEQ ID NO: 45367 - RNA, 32 nt, Homo Sapiens
gcagauaaaauauuuuguuaacuuuuguuuuu

SEQ ID NO: 45368 - RNA, 32 nt, Homo Sapiens
auuuaugguuuuuucuguggaagaguaugggc

SEQ ID NO: 45369 - RNA, 32 nt, Homo Sapiens
guccucugcuucucuggauccuccccaccccc

SEQ ID NO: 45370 - RNA, 32 nt, Homo Sapiens
acgcaagucugcugaugcucccggcugaauaa

SEQ ID NO: 45371 - RNA, 32 nt, Homo Sapiens
aaguccacucugggggagcucuggcggggacc

SEQ ID NO: 45372 - RNA, 32 nt, Homo Sapiens
aggauuucuuggcugcucaggaucucaagaca

SEQ ID NO: 45373 - RNA, 32 nt, Homo Sapiens
cuccaccgugccgaaggagcucugccaguggg

SEQ ID NO: 45374 - RNA, 32 nt, Homo Sapiens
auuaaaugaaauuuauaggaagaagguuuuug

SEQ ID NO: 45375 - RNA, 32 nt, Homo Sapiens
gccaguccgcgccaccgccgccgcccaggcca

SEQ ID NO: 45376 - RNA, 32 nt, Homo Sapiens
aaggaaaaauuccaguguuuucugcauugggu

SEQ ID NO: 45377 - RNA, 32 nt, Homo Sapiens
caguaaaugcucacaugaaaguuccuacauga

SEQ ID NO: 45378 - RNA, 32 nt, Homo Sapiens
aagaagcggaggcgccggccggucggccggga

SEQ ID NO: 45379 - RNA, 32 nt, Homo Sapiens
auuaaccaauacuggaacugguaucuagcuac

SEQ ID NO: 45380 - RNA, 32 nt, Homo Sapiens
cccggcuuuuucuaaucaggcaggcgucuguc

SEQ ID NO: 45381 - RNA, 32 nt, Homo Sapiens
ucagugggaggagucuuaaagaauuuauagac

SEQ ID NO: 45382 - RNA, 32 nt, Homo Sapiens
guuucaaaaacucuuugacauuagauuucaca

SEQ ID NO: 45383 - RNA, 32 nt, Homo Sapiens
uaugugguagccagcuuccagauggccccagu

SEQ ID NO: 45384 - RNA, 32 nt, Homo Sapiens
ggggacccuggccaccccccugcugcugucuu

SEQ ID NO: 45385 - RNA, 32 nt, Homo Sapiens
gaggggugaaaauuauuuuggaaauugagucu

SEQ ID NO: 45386 - RNA, 32 nt, Homo Sapiens
ggcagagguggcggcggcggcaugggugcccc

SEQ ID NO: 45387 - RNA, 32 nt, Homo Sapiens
ugagaacgggcccagggugcuguggagaucaa

SEQ ID NO: 45388 - RNA, 32 nt, Homo Sapiens
ggaccaauaugccaggcaugggcuuuuaucuc

SEQ ID NO: 45389 - RNA, 32 nt, Homo Sapiens
auagaagcagaaaaacauuuagggauaacauc

SEQ ID NO: 45390 - RNA, 32 nt, Homo Sapiens
aauuauaaaauauuuuuagcacuuuaguccuu

SEQ ID NO: 45391 - RNA, 32 nt, Homo Sapiens
gcagaacccacccgaucccugggguagggcac

SEQ ID NO: 45392 - RNA, 29 nt, Homo Sapiens
gggauugagggacagaaggauucugaggg

SEQ ID NO: 45393 - RNA, 32 nt, Homo Sapiens
augguccuccugcuggccccagcaaggcccau

SEQ ID NO: 45394 - RNA, 32 nt, Homo Sapiens
ggugggcacacuccucugccccugcccacuuc

SEQ ID NO: 45395 - RNA, 32 nt, Homo Sapiens
uccaaaauauugacauugaauggaucaauaca

SEQ ID NO: 45396 - RNA, 32 nt, Homo Sapiens
caguggguuuuagguaugauccuagccauuau

SEQ ID NO: 45397 - RNA, 32 nt, Homo Sapiens
cggcgccugagccccagggaagcaggcuagga

SEQ ID NO: 45398 - RNA, 32 nt, Homo Sapiens
accgggcccuccggcccuccccugcccaggca

SEQ ID NO: 45399 - RNA, 32 nt, Homo Sapiens
gcaauccauccuguaguauagguaauggaguu

SEQ ID NO: 45400 - RNA, 32 nt, Homo Sapiens
guccuuacucucugcccuucauucuguacucu

SEQ ID NO: 45401 - RNA, 32 nt, Homo Sapiens
uaugcucccaaguagaaauaaauaucaagaau

SEQ ID NO: 45402 - RNA, 32 nt, Homo Sapiens
gguccaaugaauuuaagccccaagauacagcu

SEQ ID NO: 45403 - RNA, 32 nt, Homo Sapiens
ccaccccacagugcuuugcuguaggauuuaga

SEQ ID NO: 45404 - RNA, 32 nt, Homo Sapiens
cgccuguaaucccagcacuuugagaugcugag

SEQ ID NO: 45405 - RNA, 32 nt, Homo Sapiens
aguuuguguguaaacaggcucaucucugaguu

SEQ ID NO: 45406 - RNA, 32 nt, Homo Sapiens
uuuucuuauagcaagcaguuuuuucaaaaaug

SEQ ID NO: 45407 - RNA, 32 nt, Homo Sapiens
uugucuucuaguuaaaauuuucauaugcugau

SEQ ID NO: 45408 - RNA, 32 nt, Homo Sapiens
accaagacccuauccaccuggaccuccauuuu

SEQ ID NO: 45409 - RNA, 32 nt, Homo Sapiens
ugcccaugccucuccuucugaaccuugggaga

SEQ ID NO: 45410 - RNA, 32 nt, Homo Sapiens
acagacuuucucugcccucccuucucuggagg

SEQ ID NO: 45411 - RNA, 32 nt, Homo Sapiens
cuauugucguacucaccuccgacguacuccgg

SEQ ID NO: 45412 - RNA, 32 nt, Homo Sapiens
cgcaccagccucagccagagcagccacgacag

SEQ ID NO: 45413 - RNA, 32 nt, Homo Sapiens
uccugucccuucccugacucgcuccuccucca

SEQ ID NO: 45414 - RNA, 32 nt, Homo Sapiens
uccuucugugcccuggccccagguauuauucu

SEQ ID NO: 45415 - RNA, 32 nt, Homo Sapiens
gggaucgccucccaacagcagauuucgacauu

SEQ ID NO: 45416 - RNA, 32 nt, Homo Sapiens
cuucgaguuggguugcagcuuaugacaugcau

SEQ ID NO: 45417 - RNA, 32 nt, Homo Sapiens
agcuacuaaaauaaggauuaagaauaucccag

SEQ ID NO: 45418 - RNA, 32 nt, Homo Sapiens
cuccgcggcggcggggcagaggcggcccaggg

SEQ ID NO: 45419 - RNA, 32 nt, Homo Sapiens
gcuccggagggagaggugagcucagggcagcc

SEQ ID NO: 45420 - RNA, 32 nt, Homo Sapiens
gcucaugguccaaggcuguguuguguggucau

SEQ ID NO: 45421 - RNA, 32 nt, Homo Sapiens
ccccacaaggccagcagccccuggcccccagu

SEQ ID NO: 45422 - RNA, 32 nt, Homo Sapiens
cagccugggcgacagagcgagaguuugucugg

SEQ ID NO: 45423 - RNA, 32 nt, Homo Sapiens
ggaaggagaaaaacuuuuucucaauucugaac

SEQ ID NO: 45424 - RNA, 32 nt, Homo Sapiens
aauaaucuguguggcaaaaugugugucagcac

SEQ ID NO: 45425 - RNA, 32 nt, Homo Sapiens
uccugugagaugguugugaugauccaggaaau

SEQ ID NO: 45426 - RNA, 32 nt, Homo Sapiens
aaagcuguauauauuuugaauauaauguaaau

SEQ ID NO: 45427 - RNA, 32 nt, Homo Sapiens
cuuuuccuuugaugagccucuccccaggugua

SEQ ID NO: 45428 - RNA, 32 nt, Homo Sapiens
uucaauauaucuuaugauuucuuaauguaaaa

SEQ ID NO: 45429 - RNA, 32 nt, Homo Sapiens
caucucaccucccacaccacacaguuacacau

SEQ ID NO: 45430 - RNA, 32 nt, Homo Sapiens
cgggaucuuaagugugggggcugcuggcuggg

SEQ ID NO: 45431 - RNA, 32 nt, Homo Sapiens
ggaguuugaugaugcaaaguugaucucuguac

SEQ ID NO: 45432 - RNA, 32 nt, Homo Sapiens
aacaauaaaaauuccuaagacugagggaaaua

SEQ ID NO: 45433 - RNA, 32 nt, Homo Sapiens
uugcaguuacaggccaguucuccagcucucca

SEQ ID NO: 45434 - RNA, 32 nt, Homo Sapiens
guuugaauuuacacacugaccaccacaaauuu

SEQ ID NO: 45435 - RNA, 32 nt, Homo Sapiens
aucuauauuuaguuuaaaauagguaguauuau

SEQ ID NO: 45436 - RNA, 32 nt, Homo Sapiens
auugccaggggcgaggcccuuccucuuuggug

SEQ ID NO: 45437 - RNA, 32 nt, Homo Sapiens
ucagacaggacuagagaauaacaucauuucac

SEQ ID NO: 45438 - RNA, 32 nt, Homo Sapiens
cgcucuggccagcccauucuguauuuaaagcu

SEQ ID NO: 45439 - RNA, 32 nt, Homo Sapiens
cuagaguucuuugccucaaguuggacccaaga

SEQ ID NO: 45440 - RNA, 32 nt, Homo Sapiens
ccagaaaaauuugaagucugaucagagauuua

SEQ ID NO: 45441 - RNA, 32 nt, Homo Sapiens
uuucguaguucaguaauugccagcaauauaac

SEQ ID NO: 45442 - RNA, 32 nt, Homo Sapiens
uauauguuaggcuuugugagccagguauuuac

SEQ ID NO: 45443 - RNA, 32 nt, Homo Sapiens
cacagaauccccauuauauaaaaauagaauag

SEQ ID NO: 45444 - RNA, 32 nt, Homo Sapiens
uccggcaggcggggcgagcuccccucugucug

SEQ ID NO: 45445 - RNA, 32 nt, Homo Sapiens
ccugcucggaagcagaugaugugaaauguucc

SEQ ID NO: 45446 - RNA, 32 nt, Homo Sapiens
gguuuucugcccgcgugcccgagaaaccaacg

SEQ ID NO: 45447 - RNA, 32 nt, Homo Sapiens
caguugagucuuauuucaagauauguucucaa

SEQ ID NO: 45448 - RNA, 32 nt, Homo Sapiens
guuaaugaguuugcauuugugcuugagaaaau

SEQ ID NO: 45449 - RNA, 32 nt, Homo Sapiens
uauuuucacaugcugcuuauacaagauuauua

SEQ ID NO: 45450 - RNA, 32 nt, Homo Sapiens
ugauuuuccuucccuuacuuccccugagcccu

SEQ ID NO: 45451 - RNA, 32 nt, Homo Sapiens
caaauuugaguaauagaugccuuuuuaaggca

SEQ ID NO: 45452 - RNA, 32 nt, Homo Sapiens
ggucaguaagaucaaggcauuuccaagcccgu

SEQ ID NO: 45453 - RNA, 32 nt, Homo Sapiens
aagacaguguaauaauaacauaauaauaauaa

SEQ ID NO: 45454 - RNA, 30 nt, Homo Sapiens
uuaaggaagagacccugugagucugacaau

SEQ ID NO: 45455 - RNA, 32 nt, Homo Sapiens
uguggguaacaagucauaccugauuaauauga

SEQ ID NO: 45456 - RNA, 32 nt, Homo Sapiens
agagaaaauauuaauuuucaaggggaaaaaac

SEQ ID NO: 45457 - RNA, 32 nt, Homo Sapiens
cccagcccugcguggugucuguggaggggcug

SEQ ID NO: 45458 - RNA, 32 nt, Homo Sapiens
ggagacauuaacaugaaucucauuuauucucu

SEQ ID NO: 45459 - RNA, 32 nt, Homo Sapiens
caacaaauccugaagucuuucugugaagugac

SEQ ID NO: 45460 - RNA, 32 nt, Homo Sapiens
ccgcggccgggaagaggaaagucgcggcgggg

SEQ ID NO: 45461 - RNA, 32 nt, Homo Sapiens
ccagcuuuccggaaacaaaauccuuuucuuca

SEQ ID NO: 45462 - RNA, 32 nt, Homo Sapiens
aaccuaguuaguagucuucaauauaaccaauu

SEQ ID NO: 45463 - RNA, 32 nt, Homo Sapiens
uuaucccagggccugagguucuccugcccagu

SEQ ID NO: 45464 - RNA, 32 nt, Homo Sapiens
ugcgccccaaccccauccaucccgagcuucau

SEQ ID NO: 45465 - RNA, 32 nt, Homo Sapiens
agaccaugaagauguugaaacugcuaggaaac

SEQ ID NO: 45466 - RNA, 32 nt, Homo Sapiens
gcagcaguggggcggggauggaggcggccgug

SEQ ID NO: 45467 - RNA, 32 nt, Homo Sapiens
caccaggacuugggaggcauguugauccaucu

SEQ ID NO: 45468 - RNA, 32 nt, Homo Sapiens
aaggugaagaugggaacgcagaugauccauga

SEQ ID NO: 45469 - RNA, 32 nt, Homo Sapiens
aauacauagaaaggaguaagggccaacucuca

SEQ ID NO: 45470 - RNA, 32 nt, Homo Sapiens
aaccauugcaaauaaauugaacaucaaagauc

SEQ ID NO: 45471 - RNA, 32 nt, Homo Sapiens
gguuuugccauguuggccaggcuggucuugaa

SEQ ID NO: 45472 - RNA, 29 nt, Homo Sapiens
ugaccaaguaucugggcaccuugugguuc

SEQ ID NO: 45473 - RNA, 32 nt, Homo Sapiens
uuucuagcauauaaaggguagagauaaacucu

SEQ ID NO: 45474 - RNA, 32 nt, Homo Sapiens
agaaguccccacuuaacaguaauuacuuuaaa

SEQ ID NO: 45475 - RNA, 32 nt, Homo Sapiens
ccuguccuuucuccagcaaggacuuucauuuu

SEQ ID NO: 45476 - RNA, 32 nt, Homo Sapiens
ccccuuagcauuaaguagccaaaaaggcagac

SEQ ID NO: 45477 - RNA, 32 nt, Homo Sapiens
auuuuggcgggugaagaggcuagguuguuuaa

SEQ ID NO: 45478 - RNA, 32 nt, Homo Sapiens
ucccggauccugcacuugaacuucugggccag

SEQ ID NO: 45479 - RNA, 32 nt, Homo Sapiens
ugccaggaagaagaacagaacuuuguguguuu

SEQ ID NO: 45480 - RNA, 32 nt, Homo Sapiens
uaacaucugugcaagccccuuuccaggauucu

SEQ ID NO: 45481 - RNA, 32 nt, Homo Sapiens
guaagcaacuuggacaggcauuuuaaaagcug

SEQ ID NO: 45482 - RNA, 32 nt, Homo Sapiens
agguuuccaggcucggccgccgccuccauccc

SEQ ID NO: 45483 - RNA, 32 nt, Homo Sapiens
aagaugacugauuugggggcuacucgcuuuac

SEQ ID NO: 45484 - RNA, 32 nt, Homo Sapiens
ucucauuuucuuuucacuucgggcuguguaaa

SEQ ID NO: 45485 - RNA, 32 nt, Homo Sapiens
cggugccggcgcacgcacacacgggcggacac

SEQ ID NO: 45486 - RNA, 32 nt, Homo Sapiens
guaaugugguuguaauuuuguguauguucccc

SEQ ID NO: 45487 - RNA, 32 nt, Homo Sapiens
guuucuucauuguuuccucaccacuuuucccu

SEQ ID NO: 45488 - RNA, 32 nt, Homo Sapiens
aagacuuaggagaccuacaacaagauuaagaa

SEQ ID NO: 45489 - RNA, 32 nt, Homo Sapiens
ucaggucccagcugucucacguuguuuauucu

SEQ ID NO: 45490 - RNA, 32 nt, Homo Sapiens
cuucaaauaccauagaauucuaaucucuggag

SEQ ID NO: 45491 - RNA, 32 nt, Homo Sapiens
ggacaggaaagauaggaauguugcuaugagga

SEQ ID NO: 45492 - RNA, 32 nt, Homo Sapiens
auuaccucuauucuuuguuuugccauauguaa

SEQ ID NO: 45493 - RNA, 32 nt, Homo Sapiens
caagagauacuuacagauguugagauggcugc

SEQ ID NO: 45494 - RNA, 32 nt, Homo Sapiens
agugacacacuccuuuuuccccuccuaguucc

SEQ ID NO: 45495 - RNA, 32 nt, Homo Sapiens
ccacgagucaacaugaggaguugugcuggugg

SEQ ID NO: 45496 - RNA, 32 nt, Homo Sapiens
ggcacaguaggaauuggaaauaauuuaguuuc

SEQ ID NO: 45497 - RNA, 32 nt, Homo Sapiens
aaguaaagcagguuguaaaauaaaguacuuua

SEQ ID NO: 45498 - RNA, 32 nt, Homo Sapiens
cgucucaugcgcguccuccguccccaaucuaa

SEQ ID NO: 45499 - RNA, 32 nt, Homo Sapiens
ugucuuuguacuuuuuugugauuuuugaaugc

SEQ ID NO: 45500 - RNA, 32 nt, Homo Sapiens
gaagugcuaaccccaaguaccaaaugugacug

SEQ ID NO: 45501 - RNA, 32 nt, Homo Sapiens
ccgccuucccucacugaggcagggcuagcagg

SEQ ID NO: 45502 - RNA, 32 nt, Homo Sapiens
gauuuagcagagagaggaggcagaggcuggga

SEQ ID NO: 45503 - RNA, 32 nt, Homo Sapiens
agaaguucuaacuuuuagcaugcugcacagaa

SEQ ID NO: 45504 - RNA, 32 nt, Homo Sapiens
uauuuuuaaaagacagcauuaagaaauauguu

SEQ ID NO: 45505 - RNA, 32 nt, Homo Sapiens
ggcgggguucggggaccggcugccggccuccc

SEQ ID NO: 45506 - RNA, 32 nt, Homo Sapiens
gcagauggcacagacuccauggauaauaggua

SEQ ID NO: 45507 - RNA, 30 nt, Homo Sapiens
aaugauuugcuaaugugggaaagaggauau

SEQ ID NO: 45508 - RNA, 32 nt, Homo Sapiens
acaccagauauuaaaaugucuggcaagguuag

SEQ ID NO: 45509 - RNA, 32 nt, Homo Sapiens
cccuggguuucuuuuuagucugucuguuauau

SEQ ID NO: 45510 - RNA, 32 nt, Homo Sapiens
gagaccugcccuguagcgugacuccucuagaa

SEQ ID NO: 45511 - RNA, 32 nt, Homo Sapiens
ucuggauccugcuggaaaccacagcaaccugu

SEQ ID NO: 45512 - RNA, 32 nt, Homo Sapiens
gcgaccacuaccccugcgucccggcccccucg

SEQ ID NO: 45513 - RNA, 32 nt, Homo Sapiens
ggcucaagaacaaugcaaggaaaauggagguu

SEQ ID NO: 45514 - RNA, 32 nt, Homo Sapiens
gcguccaggaggaguugggucaccaguacgug

SEQ ID NO: 45515 - RNA, 32 nt, Homo Sapiens
ccauaguugcuuaggaaaccuuuaaaaauucc

SEQ ID NO: 45516 - RNA, 32 nt, Homo Sapiens
cugagggccuucccuucuccucccgcccaccc

SEQ ID NO: 45517 - RNA, 32 nt, Homo Sapiens
cuguccccuguccucuucacagauguuucugu

SEQ ID NO: 45518 - RNA, 32 nt, Homo Sapiens
cguagucuuuugcgcaggcgcugucccuguug

SEQ ID NO: 45519 - RNA, 32 nt, Homo Sapiens
uauugcuagagcaucauccuuagaaaucagug

SEQ ID NO: 45520 - RNA, 32 nt, Homo Sapiens
aaagguggcuccuggugaagagaggguggaaa

SEQ ID NO: 45521 - RNA, 32 nt, Homo Sapiens
cucguggcggugcucccuccucagucugccac

SEQ ID NO: 45522 - RNA, 32 nt, Homo Sapiens
ucuccccuccguugggccccagccuucuuugc

SEQ ID NO: 45523 - RNA, 32 nt, Homo Sapiens
agaaacuagagaaggcaaguggcugccccacc

SEQ ID NO: 45524 - RNA, 32 nt, Homo Sapiens
gcguccgcguccucccggccagcucgaccguc

SEQ ID NO: 45525 - RNA, 32 nt, Homo Sapiens
uuccugagaaggaaaagaguccaaacaccuac

SEQ ID NO: 45526 - RNA, 32 nt, Homo Sapiens
cugucgcggcccggccgccugcggcacugccu

SEQ ID NO: 45527 - RNA, 32 nt, Homo Sapiens
ggcgacuuauuuuuauuuuuauuuuuuggaca

SEQ ID NO: 45528 - RNA, 32 nt, Homo Sapiens
uuuauaugauucaaaaccauuucuucagguua

SEQ ID NO: 45529 - RNA, 32 nt, Homo Sapiens
auucugacuguaugcuuuaccaaugagagaaa

SEQ ID NO: 45530 - RNA, 32 nt, Homo Sapiens
cucccccaccucccucccggacggggcagcug

SEQ ID NO: 45531 - RNA, 32 nt, Homo Sapiens
ccccuucagguggacaauuugaccuuugaugg

SEQ ID NO: 45532 - RNA, 32 nt, Homo Sapiens
ccagcccaaucacaaauagaaacuaggaaccu

SEQ ID NO: 45533 - RNA, 32 nt, Homo Sapiens
auaggaggauaggccucugcccugccccaccc

SEQ ID NO: 45534 - RNA, 32 nt, Homo Sapiens
ucugucuauguaucauauccacagaacucuuu

SEQ ID NO: 45535 - RNA, 32 nt, Homo Sapiens
gcagggcaguugcugccaaggcccucaaacag

SEQ ID NO: 45536 - RNA, 32 nt, Homo Sapiens
uaaccacaacaaaaaaucauaguguaauagaa

SEQ ID NO: 45537 - RNA, 32 nt, Homo Sapiens
acaacuguuucuuuucuuauuccacuauuaau

SEQ ID NO: 45538 - RNA, 32 nt, Homo Sapiens
aaaaacaauguaggagcagcuuuucuucuagu

SEQ ID NO: 45539 - RNA, 32 nt, Homo Sapiens
cagaggaagaagcagcccuugaaauguuaagg

SEQ ID NO: 45540 - RNA, 32 nt, Homo Sapiens
ggucaagaugcaugagagggaagauggaggcc

SEQ ID NO: 45541 - RNA, 32 nt, Homo Sapiens
gcgagugggcgcgggcccggugggccaggcuc

SEQ ID NO: 45542 - RNA, 32 nt, Homo Sapiens
uuguuuguauuuuauaauuuuaucuuuauaca

SEQ ID NO: 45543 - RNA, 32 nt, Homo Sapiens
gaaguugauacaagaaaaggaaaggagauuaa

SEQ ID NO: 45544 - RNA, 32 nt, Homo Sapiens
uaaaacuacaccaauaggcugauucaaucaag

SEQ ID NO: 45545 - RNA, 31 nt, Homo Sapiens
uaauuagcuugauuaauuuagauuagaauca

SEQ ID NO: 45546 - RNA, 32 nt, Homo Sapiens
gugcaguaucucuugcugggaacacagccagu

SEQ ID NO: 45547 - RNA, 32 nt, Homo Sapiens
uguuuucauagacuuuaaaacacauaacauuu

SEQ ID NO: 45548 - RNA, 32 nt, Homo Sapiens
cugccuaucuucugccuuucacuugcauccaa

SEQ ID NO: 45549 - RNA, 32 nt, Homo Sapiens
uauuuuaaaaauaguuugucucacucucaagu

SEQ ID NO: 45550 - RNA, 32 nt, Homo Sapiens
cgcuacuccggccccaggaugcagaaugugau

SEQ ID NO: 45551 - RNA, 32 nt, Homo Sapiens
gagaguuuuuacagcucaucauucaaauaacg

SEQ ID NO: 45552 - RNA, 32 nt, Homo Sapiens
gcacgaggccagcggcugcggcggcggagcuc

SEQ ID NO: 45553 - RNA, 32 nt, Homo Sapiens
gggagccgcaugcccugggcccaggccugacc

SEQ ID NO: 45554 - RNA, 32 nt, Homo Sapiens
cccaaugaacucucuugaauggguagauacag

SEQ ID NO: 45555 - RNA, 32 nt, Homo Sapiens
ccgcgcugcccgcguacggccgcggccugagu

SEQ ID NO: 45556 - RNA, 32 nt, Homo Sapiens
acgaggucaggaguucgagggcagccugacca

SEQ ID NO: 45557 - RNA, 32 nt, Homo Sapiens
ggggauuccaguaauuaaaaucucuagugaau

SEQ ID NO: 45558 - RNA, 32 nt, Homo Sapiens
aucuauccaaaauaccuauuuuaaauuuuuaa

SEQ ID NO: 45559 - RNA, 32 nt, Homo Sapiens
gccaucauggacuuccugugggacaagcgcac

SEQ ID NO: 45560 - RNA, 32 nt, Homo Sapiens
ccugaagagugagcucuggggguuguuggugu

SEQ ID NO: 45561 - RNA, 32 nt, Homo Sapiens
uaaagguagcauuucacccagccaauaaucaa

SEQ ID NO: 45562 - RNA, 32 nt, Homo Sapiens
cagggugaugggguaugaaccugugucuccuu

SEQ ID NO: 45563 - RNA, 32 nt, Homo Sapiens
ccccuugucgcgcgucucccauccugauccca

SEQ ID NO: 45564 - RNA, 32 nt, Homo Sapiens
gcucaggaccagucuucucuccagguucccag

SEQ ID NO: 45565 - RNA, 32 nt, Homo Sapiens
uugccuuccacacuugcaggugucacguuuug

SEQ ID NO: 45566 - RNA, 32 nt, Homo Sapiens
caagaccuuuagucagaagucauaccuugcau

SEQ ID NO: 45567 - RNA, 32 nt, Homo Sapiens
ggagauucacuggguucugcauuuucaggauu

SEQ ID NO: 45568 - RNA, 32 nt, Homo Sapiens
cuauuauucaaggaccauugcuauagaacacg

SEQ ID NO: 45569 - RNA, 32 nt, Homo Sapiens
acgcccagcuaauuuuuuuuuauuuuuaguag

SEQ ID NO: 45570 - RNA, 32 nt, Homo Sapiens
auccagccuuucccaauuagacuuccucuccu

SEQ ID NO: 45571 - RNA, 32 nt, Homo Sapiens
uguuaauggcaaaaaguccuuuccagggcucc

SEQ ID NO: 45572 - RNA, 32 nt, Homo Sapiens
agaauaaggggaggaaaggggacuccaauagc

SEQ ID NO: 45573 - RNA, 32 nt, Homo Sapiens
ggcuggucucaaacuccugaccucaggcaauc

SEQ ID NO: 45574 - RNA, 32 nt, Homo Sapiens
ggccagucucaaacuccugaccucaggugauc

SEQ ID NO: 45575 - RNA, 32 nt, Homo Sapiens
gcaggugcccugugcucaucucugccugggaa

SEQ ID NO: 45576 - RNA, 32 nt, Homo Sapiens
ugcaugguuuccacuuuuuccuccccuacccu

SEQ ID NO: 45577 - RNA, 32 nt, Homo Sapiens
aacaacaauuuugcaggugauuguagaguugu

SEQ ID NO: 45578 - RNA, 32 nt, Homo Sapiens
ccucauugccagcaaagugacucgcaccguga

SEQ ID NO: 45579 - RNA, 32 nt, Homo Sapiens
acccucaguuccaagaggcugacuucaggguu

SEQ ID NO: 45580 - RNA, 32 nt, Homo Sapiens
ugacauaagagcugcuggugaacuccaucuca

SEQ ID NO: 45581 - RNA, 32 nt, Homo Sapiens
gccucucgucugaccuugcagccuuagucguu

SEQ ID NO: 45582 - RNA, 32 nt, Homo Sapiens
cauccugcagcaucuccgucuccggaggaaaa

SEQ ID NO: 45583 - RNA, 32 nt, Homo Sapiens
gggggcaaguuuuuuucuucaccuucaauaug

SEQ ID NO: 45584 - RNA, 32 nt, Homo Sapiens
ggaggcacguggcgcgcgugggcccgcugccg

SEQ ID NO: 45585 - RNA, 32 nt, Homo Sapiens
auaguccucaggcuuugguuacauuugcauau

SEQ ID NO: 45586 - RNA, 32 nt, Homo Sapiens
accacggaccccagccacucucgggggcagac

SEQ ID NO: 45587 - RNA, 32 nt, Homo Sapiens
uuuggccauuuucucuuuacacuucguaugua

SEQ ID NO: 45588 - RNA, 32 nt, Homo Sapiens
ggauccgggaggaggagcgcuacccaccucca

SEQ ID NO: 45589 - RNA, 32 nt, Homo Sapiens
gcccggagcccuuccagcagccugcagcccag

SEQ ID NO: 45590 - RNA, 32 nt, Homo Sapiens
uuauuucuugcucuaucauucuguuucaauaa

SEQ ID NO: 45591 - RNA, 32 nt, Homo Sapiens
uucaagucagugaccagaaaaaucccaccccu

SEQ ID NO: 45592 - RNA, 32 nt, Homo Sapiens
ugguugaauggcuuuucuuagugugguauuug

SEQ ID NO: 45593 - RNA, 32 nt, Homo Sapiens
cugcccacacccccggccaucgcucccugggc

SEQ ID NO: 45594 - RNA, 32 nt, Homo Sapiens
cgaguguuggguccucugcuuccugagcuguc

SEQ ID NO: 45595 - RNA, 32 nt, Homo Sapiens
gaaauuuggcuaauaacaaacuagucagguuu

SEQ ID NO: 45596 - RNA, 32 nt, Homo Sapiens
ggaggccacagugagcuaugacuaugccacug

SEQ ID NO: 45597 - RNA, 32 nt, Homo Sapiens
uggguggggagagcuuccugcacagcucucag

SEQ ID NO: 45598 - RNA, 32 nt, Homo Sapiens
acgcaccuccucugcaugacuaauauguucug

SEQ ID NO: 45599 - RNA, 32 nt, Homo Sapiens
acuauuaagucguccuuuuucuuauuacccau

SEQ ID NO: 45600 - RNA, 32 nt, Homo Sapiens
cacugccguggcggcggcugcccuccucacac

SEQ ID NO: 45601 - RNA, 32 nt, Homo Sapiens
gugggagcagugggguucgacggcgcggccgc

SEQ ID NO: 45602 - RNA, 32 nt, Homo Sapiens
ggcacucuguaaacauuagccaaaaaauaaau

SEQ ID NO: 45603 - RNA, 32 nt, Homo Sapiens
uuuguugaagauuuuuccucuugccuuacaca

SEQ ID NO: 45604 - RNA, 32 nt, Homo Sapiens
cugcaucuucuuugaggguaaucuucagggca

SEQ ID NO: 45605 - RNA, 32 nt, Homo Sapiens
ggaaccuguggcugcgcagacccggcacugau

SEQ ID NO: 45606 - RNA, 32 nt, Homo Sapiens
cagcuuauuucuuucacuuguuuacuguaaua

SEQ ID NO: 45607 - RNA, 32 nt, Homo Sapiens
gguucuccauggcaaacgcucugugaggguga

SEQ ID NO: 45608 - RNA, 32 nt, Homo Sapiens
caccaggagcucagcucuguggaguuuucccu

SEQ ID NO: 45609 - RNA, 32 nt, Homo Sapiens
caucuucucccaagacugcucccuuuuguuuu

SEQ ID NO: 45610 - RNA, 32 nt, Homo Sapiens
uguuuucaaauaaaaugaaauaugaguuucaa

SEQ ID NO: 45611 - RNA, 32 nt, Homo Sapiens
cccuguuggcugaguacccugguuucagucca

SEQ ID NO: 45612 - RNA, 32 nt, Homo Sapiens
ucuuugccaacuuguuaucuguguuuguuuaa

SEQ ID NO: 45613 - RNA, 32 nt, Homo Sapiens
ugcauaauuuuuccuaaucaguggaaauaaga

SEQ ID NO: 45614 - RNA, 32 nt, Homo Sapiens
guuagcuaguagcaaccguguuuucuccagau

SEQ ID NO: 45615 - RNA, 32 nt, Homo Sapiens
augaagaaggaagagggauuacaacaggugca

SEQ ID NO: 45616 - RNA, 32 nt, Homo Sapiens
cucuguugauucaacuuuuaugucuccaguaa

SEQ ID NO: 45617 - RNA, 32 nt, Homo Sapiens
aggccgagggguucggcgacgcggagggaggg

SEQ ID NO: 45618 - RNA, 32 nt, Homo Sapiens
ucgagcaauauuugaaucuucgcuuuggaaaa

SEQ ID NO: 45619 - RNA, 32 nt, Homo Sapiens
gcccccggagaccgaucccgccccgcggccca

SEQ ID NO: 45620 - RNA, 30 nt, Homo Sapiens
uuugugguagcuccgaucgcuucuguauaa

SEQ ID NO: 45621 - RNA, 32 nt, Homo Sapiens
gccugaggaggcuacgcgaccaugguggcacg

SEQ ID NO: 45622 - RNA, 29 nt, Homo Sapiens
ggacaugccauauauuccucucauggagu

SEQ ID NO: 45623 - RNA, 32 nt, Homo Sapiens
agccuucugucuguaacaaaaauguacuuuau

SEQ ID NO: 45624 - RNA, 32 nt, Homo Sapiens
ucuugcucugucuacagccuaggccaacuagu

SEQ ID NO: 45625 - RNA, 32 nt, Homo Sapiens
gccuuccaggggaccuuugcagugccuggaga

SEQ ID NO: 45626 - RNA, 32 nt, Homo Sapiens
cgcgacacugcccggaagggaccgccacccuu

SEQ ID NO: 45627 - RNA, 32 nt, Homo Sapiens
augguugauggagacuccauggaggcucccuc

SEQ ID NO: 45628 - RNA, 32 nt, Homo Sapiens
gccgcuguuuucugucccacuuuuuacucggg

SEQ ID NO: 45629 - RNA, 32 nt, Homo Sapiens
acagaaaaccccugccaaaacuacccuuuccc

SEQ ID NO: 45630 - RNA, 32 nt, Homo Sapiens
aaagaugucacuuaaacuuaugcuuacaaacu

SEQ ID NO: 45631 - RNA, 32 nt, Homo Sapiens
aaccuauauuuuacuuuucugauuauauuaag

SEQ ID NO: 45632 - RNA, 32 nt, Homo Sapiens
agacacuuacuuuaacuccauuuuaaacccuc

SEQ ID NO: 45633 - RNA, 32 nt, Homo Sapiens
auauuuaauguuugucuccugaaguuugucuu

SEQ ID NO: 45634 - RNA, 32 nt, Homo Sapiens
cuugcagaugggucaaggguuguggagagugg

SEQ ID NO: 45635 - RNA, 32 nt, Homo Sapiens
ugaauacuauacauugaugaguucugucuuua

SEQ ID NO: 45636 - RNA, 32 nt, Homo Sapiens
guuucaaaggguuuccucucccucuccacgaa

SEQ ID NO: 45637 - RNA, 32 nt, Homo Sapiens
ggcggcgucggaggaugcugcgggcccggagc

SEQ ID NO: 45638 - RNA, 32 nt, Homo Sapiens
auuccacaaccuucacauguggcacucuugcc

SEQ ID NO: 45639 - RNA, 32 nt, Homo Sapiens
aggcuggggcuuggaggugccaugguggcgcc

SEQ ID NO: 45640 - RNA, 32 nt, Homo Sapiens
ggcggcggcggcgaagggaggcguuuggggcc

SEQ ID NO: 45641 - RNA, 32 nt, Homo Sapiens
uuuugugcuuugucguuuuucuuuuuuaaaca

SEQ ID NO: 45642 - RNA, 32 nt, Homo Sapiens
uccccagaggucggcggccguugcccgcucac

SEQ ID NO: 45643 - RNA, 32 nt, Homo Sapiens
uguuugagggagacuuccccuuucuggauugu

SEQ ID NO: 45644 - RNA, 32 nt, Homo Sapiens
ggccccuguuuugcaucuuuggcgauuuccug

SEQ ID NO: 45645 - RNA, 32 nt, Homo Sapiens
ucgcccuugaagagggcagaggucacaggcca

SEQ ID NO: 45646 - RNA, 32 nt, Homo Sapiens
ccagccccuuccccggcgaugcccaucacacu

SEQ ID NO: 45647 - RNA, 32 nt, Homo Sapiens
aggagagacugugguauauauuuuaaaccugu

SEQ ID NO: 45648 - RNA, 32 nt, Homo Sapiens
uaggggugagagaugaaggccacaaaguaucg

SEQ ID NO: 45649 - RNA, 32 nt, Homo Sapiens
gugucuuuuuaaaaauuguuauuuaaauccug

SEQ ID NO: 45650 - RNA, 32 nt, Homo Sapiens
aguuuauuauuuacaguuacuaguuuauuaca

SEQ ID NO: 45651 - RNA, 30 nt, Homo Sapiens
auaacuggaggugggauccacacagcucag

SEQ ID NO: 45652 - RNA, 32 nt, Homo Sapiens
ggcaccccacccaucacauggcuggcuggcug

SEQ ID NO: 45653 - RNA, 32 nt, Homo Sapiens
aaaaaagauugauguuauugucucuuguagag

SEQ ID NO: 45654 - RNA, 32 nt, Homo Sapiens
ugggagggcagaucauucccccugcuggcuac

SEQ ID NO: 45655 - RNA, 32 nt, Homo Sapiens
accuucauaugugcaguauuuauauuggauca

SEQ ID NO: 45656 - RNA, 32 nt, Homo Sapiens
gauagggucucacuuuguuacccaggcuggag

SEQ ID NO: 45657 - RNA, 32 nt, Homo Sapiens
uuauacaggagguagcuuggugggagugaaac

SEQ ID NO: 45658 - RNA, 32 nt, Homo Sapiens
gacagggucucacuuugucacccaggcuggag

SEQ ID NO: 45659 - RNA, 32 nt, Homo Sapiens
cuacaggacaucuccaccuggauguccuacag

SEQ ID NO: 45660 - RNA, 32 nt, Homo Sapiens
aaaaaauuacuuugauuacaaaaggcauauuc

SEQ ID NO: 45661 - RNA, 32 nt, Homo Sapiens
uggggcucgggacccaccccccugcuugcgga

SEQ ID NO: 45662 - RNA, 32 nt, Homo Sapiens
aucuaaacaaaguuuagguaaaugaauuaucg

SEQ ID NO: 45663 - RNA, 32 nt, Homo Sapiens
agaaaaggccaauaccuaagcauuuuuuccau

SEQ ID NO: 45664 - RNA, 32 nt, Homo Sapiens
gcggcgcucgggcuccuuggucucugugaggg

SEQ ID NO: 45665 - RNA, 32 nt, Homo Sapiens
gggaaucagcauaacagggcaaugcagcaauu

SEQ ID NO: 45666 - RNA, 32 nt, Homo Sapiens
cuccuguaaucccagcacuuugggaggucgag

SEQ ID NO: 45667 - RNA, 32 nt, Homo Sapiens
agcgcgugcgcgcgcucugcuacgucaucagu

SEQ ID NO: 45668 - RNA, 32 nt, Homo Sapiens
ucuguauuuuuguaguggaauuucuauuuaag

SEQ ID NO: 45669 - RNA, 32 nt, Homo Sapiens
uuuguguuggguccugggaaucuaagcuuugu

SEQ ID NO: 45670 - RNA, 32 nt, Homo Sapiens
agcacgugccauuagcuauuaaggacacgcac

SEQ ID NO: 45671 - RNA, 32 nt, Homo Sapiens
gaaucccuuucuguaugucugaaaacccauua

SEQ ID NO: 45672 - RNA, 32 nt, Homo Sapiens
gaggugccggacccggaugcggggccagaugg

SEQ ID NO: 45673 - RNA, 32 nt, Homo Sapiens
cccuccccaagccccucagggcccagaccuuc

SEQ ID NO: 45674 - RNA, 32 nt, Homo Sapiens
gcccccaccgacagacugcagcugcguuacug

SEQ ID NO: 45675 - RNA, 32 nt, Homo Sapiens
acccaaccuggcugcugcaguacuugcucuaa

SEQ ID NO: 45676 - RNA, 32 nt, Homo Sapiens
aauccugcaaugaaagguacuauauuugcuag

SEQ ID NO: 45677 - RNA, 32 nt, Homo Sapiens
aguucucuucuuuucuagagaaagauaguugc

SEQ ID NO: 45678 - RNA, 32 nt, Homo Sapiens
cucugggacaaagcuuccagaggaaggaacag

SEQ ID NO: 45679 - RNA, 31 nt, Homo Sapiens
cgggcgcggcacugcgggucccgauugcugc

SEQ ID NO: 45680 - RNA, 32 nt, Homo Sapiens
uaaguaccuugguagggcuggcaccaguggaa

SEQ ID NO: 45681 - RNA, 32 nt, Homo Sapiens
aaaaguugagcgucauuuuucuuagugugcca

SEQ ID NO: 45682 - RNA, 32 nt, Homo Sapiens
ucauuauauuguuacaauuuaacauuaacauu

SEQ ID NO: 45683 - RNA, 30 nt, Homo Sapiens
caagaaccacuuggaucucacauuccaccc

SEQ ID NO: 45684 - RNA, 32 nt, Homo Sapiens
augaaccagcuuucuuuuuauuauugugagau

SEQ ID NO: 45685 - RNA, 32 nt, Homo Sapiens
gccaggugucccgggcgcgccacgaugcggcc

SEQ ID NO: 45686 - RNA, 32 nt, Homo Sapiens
acgggacugggcgggggcgcugaccucggccu

SEQ ID NO: 45687 - RNA, 32 nt, Homo Sapiens
ucucacaggcccuuagagcaucgccaggugca

SEQ ID NO: 45688 - RNA, 32 nt, Homo Sapiens
accuaauguaauaauagaaaaauacucauaau

SEQ ID NO: 45689 - RNA, 32 nt, Homo Sapiens
agaccgaguugaaaagcgcauaaaaacaaagg

SEQ ID NO: 45690 - RNA, 32 nt, Homo Sapiens
cugugcgccuccggcccggcccagcgaccucc

SEQ ID NO: 45691 - RNA, 32 nt, Homo Sapiens
aucugccacauuucuuuuuuaguauaacuuaa

SEQ ID NO: 45692 - RNA, 32 nt, Homo Sapiens
agcuguuuaccagaguguauauuccaugaaga

SEQ ID NO: 45693 - RNA, 32 nt, Homo Sapiens
uauaaagaaaacaaaaaaagguagugaacuuu

SEQ ID NO: 45694 - RNA, 32 nt, Homo Sapiens
uuuuguagaacccauguuguauacaguuuucc

SEQ ID NO: 45695 - RNA, 32 nt, Homo Sapiens
ccuuggccggcuggcuccugcuuggaaacuug

SEQ ID NO: 45696 - RNA, 32 nt, Homo Sapiens
ugaggagcccaccgccgcucucgggggccgac

SEQ ID NO: 45697 - RNA, 32 nt, Homo Sapiens
ugucugagggaggcccggagggggcggggagg

SEQ ID NO: 45698 - RNA, 32 nt, Homo Sapiens
gcaugccccauguaggggcagcgccacugcug

SEQ ID NO: 45699 - RNA, 32 nt, Homo Sapiens
uuauacagugauugaaaauccauuuaauuccu

SEQ ID NO: 45700 - RNA, 32 nt, Homo Sapiens
ccugccauaccugccagcuucagacauuuagg

SEQ ID NO: 45701 - RNA, 32 nt, Homo Sapiens
gaggagucgggagcacagcugcugcuggaaau

SEQ ID NO: 45702 - RNA, 32 nt, Homo Sapiens
ucccugcugccccuuagccacccagggucuug

SEQ ID NO: 45703 - RNA, 32 nt, Homo Sapiens
uuuuuauggcccaggagaaaauguagacccug

SEQ ID NO: 45704 - RNA, 32 nt, Homo Sapiens
cacuucuuuccuuuuaucuacucaauguuauu

SEQ ID NO: 45705 - RNA, 27 nt, Homo Sapiens
uuuccaagcugacucugguauaacauu

SEQ ID NO: 45706 - RNA, 32 nt, Homo Sapiens
ccguuguguuuauguuugagauacaaccaguc

SEQ ID NO: 45707 - RNA, 32 nt, Homo Sapiens
gguaaacugucauggugcuggcaggaauggcu

SEQ ID NO: 45708 - RNA, 32 nt, Homo Sapiens
gaggacucagaggggaggaaaggcugggcccc

SEQ ID NO: 45709 - RNA, 32 nt, Homo Sapiens
aagggcuuaguuaguaccuugccacucuaccc

SEQ ID NO: 45710 - RNA, 32 nt, Homo Sapiens
gaauuuccucaucaagugacuauacauuuguu

SEQ ID NO: 45711 - RNA, 32 nt, Homo Sapiens
gagguaaacugcagaggucaccacccccacca

SEQ ID NO: 45712 - RNA, 32 nt, Homo Sapiens
uggcaggugguacagccaagcagacaggcaag

SEQ ID NO: 45713 - RNA, 32 nt, Homo Sapiens
gagaaagacagagacacaucaggggaagaugg

SEQ ID NO: 45714 - RNA, 32 nt, Homo Sapiens
aaaaaauuacacaauuucaggcaagcuacguu

SEQ ID NO: 45715 - RNA, 32 nt, Homo Sapiens
ggauggaaguguauauuuuauaugaaauacca

SEQ ID NO: 45716 - RNA, 32 nt, Homo Sapiens
acgcagagacccugaccgcccuguggggcuca

SEQ ID NO: 45717 - RNA, 32 nt, Homo Sapiens
aauuuaaaccuuuuaauuaucaccuuaccuga

SEQ ID NO: 45718 - RNA, 30 nt, Homo Sapiens
uaguuguggggcgaguuuaugacaggccua

SEQ ID NO: 45719 - RNA, 32 nt, Homo Sapiens
uuuguuugcgguuuagauucauuuuguccaca

SEQ ID NO: 45720 - RNA, 32 nt, Homo Sapiens
aggaggcucgggcagcacaggagcccauggag

SEQ ID NO: 45721 - RNA, 32 nt, Homo Sapiens
uucuugaggaagaaacuggugacuugguccau

SEQ ID NO: 45722 - RNA, 32 nt, Homo Sapiens
aaaaaaagcaauucacaaaaccauuucauauu

SEQ ID NO: 45723 - RNA, 32 nt, Homo Sapiens
auauaauagauaacuuuuucuugucuuuaaga

SEQ ID NO: 45724 - RNA, 32 nt, Homo Sapiens
accuauagacuuaaacugugaacuugcucuag

SEQ ID NO: 45725 - RNA, 32 nt, Homo Sapiens
guggugggugguuuuuaaacuauauauguuug

SEQ ID NO: 45726 - RNA, 32 nt, Homo Sapiens
uucaagaaaccuuuuuacacaucuccauuccu

SEQ ID NO: 45727 - RNA, 32 nt, Homo Sapiens
cccugccccccucuucaggagggcccucaaca

SEQ ID NO: 45728 - RNA, 32 nt, Homo Sapiens
cuggaccaguggcagcagcaucaccugggaac

SEQ ID NO: 45729 - RNA, 28 nt, Homo Sapiens
uuaccgaugcaaacuguggauaaaguug

SEQ ID NO: 45730 - RNA, 32 nt, Homo Sapiens
aucccaauauauuauagaaagaucuucaguuc

SEQ ID NO: 45731 - RNA, 32 nt, Homo Sapiens
accccggcucccgcucacuccuccuccugccu

SEQ ID NO: 45732 - RNA, 32 nt, Homo Sapiens
aaaaaguucugaagaagaaaguuacuaucucu

SEQ ID NO: 45733 - RNA, 32 nt, Homo Sapiens
accuuccuuccaugguucccacccuccacguu

SEQ ID NO: 45734 - RNA, 32 nt, Homo Sapiens
uggcugaggggaggcggcgggcgggcgcgaug

SEQ ID NO: 45735 - RNA, 32 nt, Homo Sapiens
aaauauuugugauacgugucaugugugaaaag

SEQ ID NO: 45736 - RNA, 32 nt, Homo Sapiens
caucgauauugaugccauuuaagggauggaug

SEQ ID NO: 45737 - RNA, 32 nt, Homo Sapiens
cucggcagaccucggcgagcccagcuggccgc

SEQ ID NO: 45738 - RNA, 32 nt, Homo Sapiens
gcccccauggcuucagaagaggaugggaucag

SEQ ID NO: 45739 - RNA, 32 nt, Homo Sapiens
aaggagugguuuguacugcuguguuugguaca

SEQ ID NO: 45740 - RNA, 32 nt, Homo Sapiens
uugaaauguacagaauguuuugaaaguguuuu

SEQ ID NO: 45741 - RNA, 32 nt, Homo Sapiens
agaauauaggcuugaugggaaauugaagguag

SEQ ID NO: 45742 - RNA, 32 nt, Homo Sapiens
uuuugagacagaggcacaaagacucagcaauu

SEQ ID NO: 45743 - RNA, 32 nt, Homo Sapiens
cggcauccggcccagggccuggcacaaagcau

SEQ ID NO: 45744 - RNA, 32 nt, Homo Sapiens
ugaggggucccucucucuagggucuccuguag

SEQ ID NO: 45745 - RNA, 32 nt, Homo Sapiens
gaguagucaacaccaacauugauggguggcgg

SEQ ID NO: 45746 - RNA, 32 nt, Homo Sapiens
caucuuccuggugauggguuacugugagcagg

SEQ ID NO: 45747 - RNA, 32 nt, Homo Sapiens
aaauuuacugaauuaaaggauuaaauuaggug

SEQ ID NO: 45748 - RNA, 32 nt, Homo Sapiens
gcguguacacucugcgggcugcaccggguggc

SEQ ID NO: 45749 - RNA, 32 nt, Homo Sapiens
auuugaauuggaaaauucugguguugguugga

SEQ ID NO: 45750 - RNA, 30 nt, Homo Sapiens
gcagccggcaggcgcagucggggucguggg

SEQ ID NO: 45751 - RNA, 32 nt, Homo Sapiens
uagaugauuggaaagauaccaguuuaaguaaa

SEQ ID NO: 45752 - RNA, 32 nt, Homo Sapiens
gaacgaggccgcgaccccgccuucggcgcucg

SEQ ID NO: 45753 - RNA, 32 nt, Homo Sapiens
gaaguuguuucuaaaguaacuauacauguuuu

SEQ ID NO: 45754 - RNA, 32 nt, Homo Sapiens
agccaggcgugguggcgggcgccugugguccc

SEQ ID NO: 45755 - RNA, 32 nt, Homo Sapiens
uaaaaagucaucugcccuucccaggugauucu

SEQ ID NO: 45756 - RNA, 32 nt, Homo Sapiens
guacugauggugcaaccaaaacaaucagacuc

SEQ ID NO: 45757 - RNA, 32 nt, Homo Sapiens
ccuuccuggugccaauaaacuuucucaaagag

SEQ ID NO: 45758 - RNA, 32 nt, Homo Sapiens
acauuaaaaaauauuuugaaaacaugcaguaa

SEQ ID NO: 45759 - RNA, 32 nt, Homo Sapiens
uugucguucauuuucacuuaucuuuaagccag

SEQ ID NO: 45760 - RNA, 32 nt, Homo Sapiens
ucaguugugcacugaggccggcugguccuuga

SEQ ID NO: 45761 - RNA, 32 nt, Homo Sapiens
agucacauccacaacuaaugagggaaaucugu

SEQ ID NO: 45762 - RNA, 32 nt, Homo Sapiens
ccgcgcucaccucgggcucccgcuccgucucc

SEQ ID NO: 45763 - RNA, 32 nt, Homo Sapiens
gucaaaccaaaauaguggguugaaguguauua

SEQ ID NO: 45764 - RNA, 32 nt, Homo Sapiens
ccugugggcugacucugcagcuccucaugcug

SEQ ID NO: 45765 - RNA, 32 nt, Homo Sapiens
gcugccggccccaggaccccucuucaagagcc

SEQ ID NO: 45766 - RNA, 32 nt, Homo Sapiens
aaggagggagggagggcggugacuugggggca

SEQ ID NO: 45767 - RNA, 32 nt, Homo Sapiens
uggaccugcucugcagacccaggcuccucucc

SEQ ID NO: 45768 - RNA, 32 nt, Homo Sapiens
aaaucauguucccccuaaacauggcuguuaac

SEQ ID NO: 45769 - RNA, 32 nt, Homo Sapiens
gccuguuuuacuaugauguaaaaauuagguca

SEQ ID NO: 45770 - RNA, 32 nt, Homo Sapiens
gaauaaacacugguuuccuagcuauccucuga

SEQ ID NO: 45771 - RNA, 32 nt, Homo Sapiens
ugcuggcuuuuguaguuuugauaaagaccauu

SEQ ID NO: 45772 - RNA, 32 nt, Homo Sapiens
ccauuggccccuguggguccacagcagcgugg

SEQ ID NO: 45773 - RNA, 32 nt, Homo Sapiens
uuaucuuuaguagacacuuuuaaaagaaaaga

SEQ ID NO: 45774 - RNA, 32 nt, Homo Sapiens
aaauguuuugaguauuugaauuuagagaaaca

SEQ ID NO: 45775 - RNA, 32 nt, Homo Sapiens
auuauuuagagaguuuuaaaagaaauuaacag

SEQ ID NO: 45776 - RNA, 32 nt, Homo Sapiens
uaccuuagaguuuuccaauuuaucucaauuuu

SEQ ID NO: 45777 - RNA, 32 nt, Homo Sapiens
gacaugcugugaauccagguuggccucuaaga

SEQ ID NO: 45778 - RNA, 32 nt, Homo Sapiens
acacaaccaaccgaaaaagacuagagggauua

SEQ ID NO: 45779 - RNA, 32 nt, Homo Sapiens
augaguaauucauuauuauccaaagcauagga

SEQ ID NO: 45780 - RNA, 32 nt, Homo Sapiens
gauuuuauccugaaauuagugaugagcccuug

SEQ ID NO: 45781 - RNA, 32 nt, Homo Sapiens
gggcauaaaagaacuuuuuuaugcuuaccauc

SEQ ID NO: 45782 - RNA, 32 nt, Homo Sapiens
aggaccugcagcccucacgggggcuggggauc

SEQ ID NO: 45783 - RNA, 32 nt, Homo Sapiens
cgguaauacuuauuauccaguggguagcagug

SEQ ID NO: 45784 - RNA, 32 nt, Homo Sapiens
aguaauugaaagacgucaucacugaaagacag

SEQ ID NO: 45785 - RNA, 32 nt, Homo Sapiens
uugauaguuuuggugaaacucucuaaaauaca

SEQ ID NO: 45786 - RNA, 32 nt, Homo Sapiens
aauuuucccucuaucuucuguguggguguuuc

SEQ ID NO: 45787 - RNA, 32 nt, Homo Sapiens
gaaaggugggagagaggaaaaaaggaaauucu

SEQ ID NO: 45788 - RNA, 32 nt, Homo Sapiens
cauugggagcguuaacaugucuguggacaucg

SEQ ID NO: 45789 - RNA, 32 nt, Homo Sapiens
cggggcggccggcggaggagcagcaggauccc

SEQ ID NO: 45790 - RNA, 32 nt, Homo Sapiens
ucauuacuuaggagccagggcuuuucagauau

SEQ ID NO: 45791 - RNA, 32 nt, Homo Sapiens
uggagauuacaaugauuaaaucaauaaauaac

SEQ ID NO: 45792 - RNA, 32 nt, Homo Sapiens
caaaaauagaacaagagcacuccauccaugug

SEQ ID NO: 45793 - RNA, 32 nt, Homo Sapiens
uagauguaauaaauaagaucauggaaggcuuu

SEQ ID NO: 45794 - RNA, 32 nt, Homo Sapiens
caaguuccacuucaggauggcgcugcugcaca

SEQ ID NO: 45795 - RNA, 32 nt, Homo Sapiens
agcuugcuggauucaacgaugaucuaacucca

SEQ ID NO: 45796 - RNA, 32 nt, Homo Sapiens
cuuuuaaaccauauuauugaugaugaaaauua

SEQ ID NO: 45797 - RNA, 32 nt, Homo Sapiens
cagaggcgcccacugggugcugugggcucagg

SEQ ID NO: 45798 - RNA, 32 nt, Homo Sapiens
cacacagugguauuuguguauaucuaagauag

SEQ ID NO: 45799 - RNA, 32 nt, Homo Sapiens
cuucagaaauaguuuuucaacaucaagacucu

SEQ ID NO: 45800 - RNA, 32 nt, Homo Sapiens
gaagcuuucucagugcacuuugaaccuggaaa

SEQ ID NO: 45801 - RNA, 28 nt, Homo Sapiens
ggccgugggaggcucccgaggugggggc

SEQ ID NO: 45802 - RNA, 32 nt, Homo Sapiens
ccaaggaaacacugauuuugcugcugaagagu

SEQ ID NO: 45803 - RNA, 32 nt, Homo Sapiens
aaguuuuuaaugugcucuuauaaaaacgacag

SEQ ID NO: 45804 - RNA, 32 nt, Homo Sapiens
auucauguuuuaaauuguguacuguucugagu

SEQ ID NO: 45805 - RNA, 32 nt, Homo Sapiens
cuagguaguuuaggugaaaaaugucccuuuua

SEQ ID NO: 45806 - RNA, 32 nt, Homo Sapiens
aaaguccccuccccaccuacccuuccugcaga

SEQ ID NO: 45807 - RNA, 32 nt, Homo Sapiens
uccaaggcauuacagaguaucaccuugagaca

SEQ ID NO: 45808 - RNA, 32 nt, Homo Sapiens
ggacaguccuuuccuuucccauugucguuggg

SEQ ID NO: 45809 - RNA, 32 nt, Homo Sapiens
caagggaagaccccuccccagcccucccgucg

SEQ ID NO: 45810 - RNA, 32 nt, Homo Sapiens
aggugccccccuccuccuugagaagggaccuc

SEQ ID NO: 45811 - RNA, 32 nt, Homo Sapiens
uuccuggucacgagguggccagagcacaaugu

SEQ ID NO: 45812 - RNA, 32 nt, Homo Sapiens
auccagucucccgguuccuuccugcuucacuc

SEQ ID NO: 45813 - RNA, 32 nt, Homo Sapiens
cuggacgcggccacgccggcgcggcgggauau

SEQ ID NO: 45814 - RNA, 32 nt, Homo Sapiens
uuucuuuuuuaguauaacuuaauagcuuaauu

SEQ ID NO: 45815 - RNA, 32 nt, Homo Sapiens
caaaaucacagcacccacuaccauacagacag

SEQ ID NO: 45816 - RNA, 32 nt, Homo Sapiens
aggucuagagcuucuuuuauauucaagcuaaa

SEQ ID NO: 45817 - RNA, 32 nt, Homo Sapiens
ggaccagcuucagccagggacaaaauccccuc

SEQ ID NO: 45818 - RNA, 32 nt, Homo Sapiens
uggaccugaaagucagcucuggacccccuccc

SEQ ID NO: 45819 - RNA, 32 nt, Homo Sapiens
gccccgcacggccagcagcagcgggcugaagc

SEQ ID NO: 45820 - RNA, 32 nt, Homo Sapiens
gcuccucacagcaggauuccugcccacuguuu

SEQ ID NO: 45821 - RNA, 32 nt, Homo Sapiens
acugccuggcuguguccucucagccaggugcc

SEQ ID NO: 45822 - RNA, 32 nt, Homo Sapiens
uuuaagaauuaacaaggagucucaaaaagaaa

SEQ ID NO: 45823 - RNA, 32 nt, Homo Sapiens
ccaugaguccauauguguaauuuuauguuguc

SEQ ID NO: 45824 - RNA, 32 nt, Homo Sapiens
caucuaggagugggguggggagcccucugccc

SEQ ID NO: 45825 - RNA, 32 nt, Homo Sapiens
ugaaacacauuaugccucuguaauugggguug

SEQ ID NO: 45826 - RNA, 32 nt, Homo Sapiens
ccucugucucuccucccuguaucccaccuaug

SEQ ID NO: 45827 - RNA, 32 nt, Homo Sapiens
ugagugaugccugagggucagcuccucuagac

SEQ ID NO: 45828 - RNA, 32 nt, Homo Sapiens
accucuugggauuugaggacagagggggccuc

SEQ ID NO: 45829 - RNA, 32 nt, Homo Sapiens
aaaaaaaaagcauuuuuuuuuaugauuugucu

SEQ ID NO: 45830 - RNA, 32 nt, Homo Sapiens
cucugaugaggaagaaaauggccagggggaag

SEQ ID NO: 45831 - RNA, 32 nt, Homo Sapiens
gguugagaacagaaggugggcggcaggaucag

SEQ ID NO: 45832 - RNA, 32 nt, Homo Sapiens
cucuggcccucccuccucccacccacuggcuc

SEQ ID NO: 45833 - RNA, 23 nt, Homo Sapiens
uucaauuaaaggaaacaaauguc

SEQ ID NO: 45834 - RNA, 32 nt, Homo Sapiens
uaggucagacaaguacgggacuccucucuaaa

SEQ ID NO: 45835 - RNA, 32 nt, Homo Sapiens
aaauggggaggggacaccaugcugaggcagaa

SEQ ID NO: 45836 - RNA, 32 nt, Homo Sapiens
acaucccauuggcaucacacacgaugccuccc

SEQ ID NO: 45837 - RNA, 30 nt, Homo Sapiens
aaugagagcggcgguggcggcagccgggcc

SEQ ID NO: 45838 - RNA, 32 nt, Homo Sapiens
gaacggcaguuucccuuccccaguggacgucu

SEQ ID NO: 45839 - RNA, 32 nt, Homo Sapiens
agcagcaccugcaagcgcccggcagcggcccg

SEQ ID NO: 45840 - RNA, 31 nt, Homo Sapiens
gagaucucacggacagcgccggcuugguggu

SEQ ID NO: 45841 - RNA, 32 nt, Homo Sapiens
uggcuaauuuuuguauuuuuaguggagauggg

SEQ ID NO: 45842 - RNA, 32 nt, Homo Sapiens
ucuucccaucuggguuuuuggguuuuucugug

SEQ ID NO: 45843 - RNA, 32 nt, Homo Sapiens
gccagugcagugaugccuggcgcuuccagcug

SEQ ID NO: 45844 - RNA, 32 nt, Homo Sapiens
ggccagccaucccaccaccacugucgucagug

SEQ ID NO: 45845 - RNA, 32 nt, Homo Sapiens
uucugcuuugcuaggagggaacugggacgcga

SEQ ID NO: 45846 - RNA, 32 nt, Homo Sapiens
aucuguguuuucugguuuuucauuuauuuggc

SEQ ID NO: 45847 - RNA, 32 nt, Homo Sapiens
gcaacuucaggagcuucccagccgagagcuuc

SEQ ID NO: 45848 - RNA, 32 nt, Homo Sapiens
agugccauccaccguggcuccgcugccccugc

SEQ ID NO: 45849 - RNA, 32 nt, Homo Sapiens
cauucuggagagaggugcuuugaaaguaaggu

SEQ ID NO: 45850 - RNA, 32 nt, Homo Sapiens
cuuugucagcaauuuugacagucauuaauguu

SEQ ID NO: 45851 - RNA, 30 nt, Homo Sapiens
cgacggacgcccgugcccagcuugccacgc

SEQ ID NO: 45852 - RNA, 32 nt, Homo Sapiens
augucaauuacccucuagcaguguuggcucaa

SEQ ID NO: 45853 - RNA, 32 nt, Homo Sapiens
gauaauuaauaaaguaguuugaagcauuauau

SEQ ID NO: 45854 - RNA, 32 nt, Homo Sapiens
agucaguuaaaauucagcauucauggauagau

SEQ ID NO: 45855 - RNA, 32 nt, Homo Sapiens
gcccgucuagauacccaccucccccagauaac

SEQ ID NO: 45856 - RNA, 32 nt, Homo Sapiens
ccuggccuuucucgccgaccucaugggucacc

SEQ ID NO: 45857 - RNA, 32 nt, Homo Sapiens
aaaagcgugcaucaccucccgcuucauucucu

SEQ ID NO: 45858 - RNA, 32 nt, Homo Sapiens
uagaaacacgcccuuguacaggaggcaaaugu

SEQ ID NO: 45859 - RNA, 32 nt, Homo Sapiens
cucccccugccaggagcuuuggaccuaaucca

SEQ ID NO: 45860 - RNA, 32 nt, Homo Sapiens
cacagaucaggagagaagguuuggauaucagc

SEQ ID NO: 45861 - RNA, 32 nt, Homo Sapiens
aggguuggggguccgccuccucacugcuccuc

SEQ ID NO: 45862 - RNA, 32 nt, Homo Sapiens
agcgcacaggggugugggcggaggcggccucg

SEQ ID NO: 45863 - RNA, 32 nt, Homo Sapiens
cgucgaucuccuccucccccgccccgcauccg

SEQ ID NO: 45864 - RNA, 32 nt, Homo Sapiens
cucuuugugccaaagaaauaaacccuuaggac

SEQ ID NO: 45865 - RNA, 32 nt, Homo Sapiens
uugacaaugcuguauaauaaauauuuucuauu

SEQ ID NO: 45866 - RNA, 32 nt, Homo Sapiens
guacauaaccaacaggcagauacugagugccu

SEQ ID NO: 45867 - RNA, 32 nt, Homo Sapiens
ggcugaagaaaggcacaaaaugugcuauuuuu

SEQ ID NO: 45868 - RNA, 29 nt, Homo Sapiens
uccuuuguauguauguguacgugugggaa

SEQ ID NO: 45869 - RNA, 32 nt, Homo Sapiens
ggcaggcagaucacuugaggucgggcguuuga

SEQ ID NO: 45870 - RNA, 32 nt, Homo Sapiens
cacagccccgcugugguccagccccgggaccc

SEQ ID NO: 45871 - RNA, 32 nt, Homo Sapiens
aggcucacagaaaaagaaaaagaaaauaaaaa

SEQ ID NO: 45872 - RNA, 32 nt, Homo Sapiens
uuguaaagcaaccugaggaugagauacaccag

SEQ ID NO: 45873 - RNA, 32 nt, Homo Sapiens
ggagagcccugcggcccccacccaccagcuca

SEQ ID NO: 45874 - RNA, 32 nt, Homo Sapiens
agcaucaggaggaggacugcgccaacggcugc

SEQ ID NO: 45875 - RNA, 32 nt, Homo Sapiens
gggugcugccagcagcuugcaggccccagccc

SEQ ID NO: 45876 - RNA, 32 nt, Homo Sapiens
uaauauugcuauuguuauuauugucauuauua

SEQ ID NO: 45877 - RNA, 32 nt, Homo Sapiens
ugguugagauggauucucgcucuguagcccag

SEQ ID NO: 45878 - RNA, 32 nt, Homo Sapiens
agaaucacuguggucagucuccugucccagcu

SEQ ID NO: 45879 - RNA, 32 nt, Homo Sapiens
uguauuaugcuucuuucuccucuuagcacucu

SEQ ID NO: 45880 - RNA, 32 nt, Homo Sapiens
aagaaaagcccauuuucaacugcuuugaaacu

SEQ ID NO: 45881 - RNA, 32 nt, Homo Sapiens
accaccaggacuggcucugugaguaccacaca

SEQ ID NO: 45882 - RNA, 32 nt, Homo Sapiens
cagaagaacuuuaaaaaauaaaaaauaagcuu

SEQ ID NO: 45883 - RNA, 28 nt, Homo Sapiens
aauuagaaauguuaacauuuaagugcuu

SEQ ID NO: 45884 - RNA, 32 nt, Homo Sapiens
aucaggaagaacucccagguguggagaaugga

SEQ ID NO: 45885 - RNA, 32 nt, Homo Sapiens
gccgugcccgucugcgcccgugucauccucac

SEQ ID NO: 45886 - RNA, 32 nt, Homo Sapiens
cugggaugguguggugagcaaaaacugaccag

SEQ ID NO: 45887 - RNA, 32 nt, Homo Sapiens
caaucgauuuuuuuuucuuucuccuuucuuuc

SEQ ID NO: 45888 - RNA, 32 nt, Homo Sapiens
gcugugguuguaaaguuuuuuuguuuuugggu

SEQ ID NO: 45889 - RNA, 32 nt, Homo Sapiens
ccugguccccccacaaggccucagcccaguca

SEQ ID NO: 45890 - RNA, 30 nt, Homo Sapiens
ucacaaugccuuccccaucaccaaaaggac

SEQ ID NO: 45891 - RNA, 32 nt, Homo Sapiens
gggcugccucagucuucagugcugauuguguc

SEQ ID NO: 45892 - RNA, 32 nt, Homo Sapiens
acuuccuaccuggucagcuuuuucagcuucuc

SEQ ID NO: 45893 - RNA, 32 nt, Homo Sapiens
gcaaugaggguauuuuugagugaauuuuaacu

SEQ ID NO: 45894 - RNA, 32 nt, Homo Sapiens
cagggcagggaucugcguuggaggaagggacu

SEQ ID NO: 45895 - RNA, 31 nt, Homo Sapiens
ugcccucuuaggaccacauagauuauuacau

SEQ ID NO: 45896 - RNA, 32 nt, Homo Sapiens
cuccuauaucauggaauaaaugguaaagaggg

SEQ ID NO: 45897 - RNA, 32 nt, Homo Sapiens
ccgcucucugcccccucugucuucccaaguca

SEQ ID NO: 45898 - RNA, 32 nt, Homo Sapiens
acagcugucuccugggguggguugguauuaaa

SEQ ID NO: 45899 - RNA, 32 nt, Homo Sapiens
uuuaacaucuguguuucucaguuuccucaucc

SEQ ID NO: 45900 - RNA, 32 nt, Homo Sapiens
uucugauucaucuauuugaaaacauuacacuu

SEQ ID NO: 45901 - RNA, 32 nt, Homo Sapiens
ucugucccgugcuucugcugcuccauccuuug

SEQ ID NO: 45902 - RNA, 32 nt, Homo Sapiens
aagcaaacugaguuuucuuacaccuuuugagu

SEQ ID NO: 45903 - RNA, 32 nt, Homo Sapiens
gaaagucuuucaucaccagauuucacaggugu

SEQ ID NO: 45904 - RNA, 32 nt, Homo Sapiens
auaggauauaguuuuauguuuuccaaguuaua

SEQ ID NO: 45905 - RNA, 32 nt, Homo Sapiens
cuuucacucuccuccgccaugcccgacccggc

SEQ ID NO: 45906 - RNA, 32 nt, Homo Sapiens
guuggaaaaucaccguccguguccucugagcu

SEQ ID NO: 45907 - RNA, 32 nt, Homo Sapiens
ugggaccaugaacaucuuuagugucugagcuu

SEQ ID NO: 45908 - RNA, 32 nt, Homo Sapiens
cuccgcugcucccgacgcggagcccggagccc

SEQ ID NO: 45909 - RNA, 32 nt, Homo Sapiens
ggaagcaggucuguccugggggaauguguggg

SEQ ID NO: 45910 - RNA, 29 nt, Homo Sapiens
ucugggauuugaaauauccagacuuguag

SEQ ID NO: 45911 - RNA, 32 nt, Homo Sapiens
uaggaaaauggcagcaaacucuucaggacaag

SEQ ID NO: 45912 - RNA, 32 nt, Homo Sapiens
cgcacaguccucuggagaucagguggaaggag

SEQ ID NO: 45913 - RNA, 32 nt, Homo Sapiens
cugggagagauggaugguccacugcuuugagg

SEQ ID NO: 45914 - RNA, 32 nt, Homo Sapiens
uccagagcaggcugcccgcccgcggaaucccg

SEQ ID NO: 45915 - RNA, 32 nt, Homo Sapiens
cagggccugggccuggccuccuugccugugag

SEQ ID NO: 45916 - RNA, 32 nt, Homo Sapiens
gcagagcgcgcggcgucggugcccuugaccau

SEQ ID NO: 45917 - RNA, 32 nt, Homo Sapiens
acgcgaagauaauccugccaucuggcaaaucc

SEQ ID NO: 45918 - RNA, 32 nt, Homo Sapiens
ucagcggugaggugguuuagggauaaauguuu

SEQ ID NO: 45919 - RNA, 31 nt, Homo Sapiens
ucacucuuguacugccugccaccgcggagga

SEQ ID NO: 45920 - RNA, 32 nt, Homo Sapiens
cagaaagaggauguuauaggaaucaaagaaau

SEQ ID NO: 45921 - RNA, 31 nt, Homo Sapiens
auuaugaagaaaaaaccgauauuuaaggaga

SEQ ID NO: 45922 - RNA, 32 nt, Homo Sapiens
cauuuagaauuuagaaucugagcacaucacac

SEQ ID NO: 45923 - RNA, 32 nt, Homo Sapiens
gacggaggaaggggagguccugcccgaggcgc

SEQ ID NO: 45924 - RNA, 32 nt, Homo Sapiens
aggcugucgggguccagguggcacucaugggc

SEQ ID NO: 45925 - RNA, 32 nt, Homo Sapiens
gaguugacucguugaaauuguuuuccauaaag

SEQ ID NO: 45926 - RNA, 32 nt, Homo Sapiens
uguucguugcugaccuucuccuuauuaucacc

SEQ ID NO: 45927 - RNA, 32 nt, Homo Sapiens
agcugaccuauggcugcgccaagcccuucguc

SEQ ID NO: 45928 - RNA, 32 nt, Homo Sapiens
guuuuaaaaaacaaaacaauguaaguaaagga

SEQ ID NO: 45929 - RNA, 32 nt, Homo Sapiens
caccaaggaaaugcccauguucugauuccaag

SEQ ID NO: 45930 - RNA, 32 nt, Homo Sapiens
cuccagacgugcgggcggcacaugccuugggg

SEQ ID NO: 45931 - RNA, 32 nt, Homo Sapiens
ccagaggcgagggaccaguggaggugccaggg

SEQ ID NO: 45932 - RNA, 32 nt, Homo Sapiens
gcggcgcugacgcccgcgggccccagcugcag

SEQ ID NO: 45933 - RNA, 32 nt, Homo Sapiens
cgccggggaacgcgcugccugcaugcgcgcag

SEQ ID NO: 45934 - RNA, 32 nt, Homo Sapiens
ugauaaaacaaaacagaagucagacaauguuu

SEQ ID NO: 45935 - RNA, 32 nt, Homo Sapiens
aaagggccaagugauccaguucuagugucauc

SEQ ID NO: 45936 - RNA, 32 nt, Homo Sapiens
augagagccuacucugaugaccguggccuugg

SEQ ID NO: 45937 - RNA, 32 nt, Homo Sapiens
ugccuauaaucccagcacuuuggcaggcugag

SEQ ID NO: 45938 - RNA, 32 nt, Homo Sapiens
agaugucccccagcaccccaggcccugggccc

SEQ ID NO: 45939 - RNA, 32 nt, Homo Sapiens
ugaugguuaauauuaggugucuggagaagguu

SEQ ID NO: 45940 - RNA, 32 nt, Homo Sapiens
gugggggucugcuuggcggugagggggcucua

SEQ ID NO: 45941 - RNA, 32 nt, Homo Sapiens
gcagguggucgcgccggucuccgcggaaaugu

SEQ ID NO: 45942 - RNA, 32 nt, Homo Sapiens
gccagccggggcggggcagggugccgcaggcu

SEQ ID NO: 45943 - RNA, 32 nt, Homo Sapiens
caucccuguggagcugcagagcaucuucaugu

SEQ ID NO: 45944 - RNA, 32 nt, Homo Sapiens
acauuuauauugcccaucuccugugucuucaa

SEQ ID NO: 45945 - RNA, 32 nt, Homo Sapiens
gcguccaggcgaggacaccucccgcaucaggg

SEQ ID NO: 45946 - RNA, 32 nt, Homo Sapiens
acugaaaugcugcagcugaggcuggucuucag

SEQ ID NO: 45947 - RNA, 32 nt, Homo Sapiens
aucauugauauuucuaucaugcacgauuauuu

SEQ ID NO: 45948 - RNA, 32 nt, Homo Sapiens
ggggcuguggcggaaauugacaauggcccuuc

SEQ ID NO: 45949 - RNA, 32 nt, Homo Sapiens
caucgggccaauggcagaacucucuccagaua

SEQ ID NO: 45950 - RNA, 32 nt, Homo Sapiens
gccaacaagccuaaguugcugaucagccccuc

SEQ ID NO: 45951 - RNA, 32 nt, Homo Sapiens
aucaacuuuuguuacauacuguaauuuaaaua

SEQ ID NO: 45952 - RNA, 32 nt, Homo Sapiens
acuaagcaaaaauaaaacuuaugguaauucuu

SEQ ID NO: 45953 - RNA, 31 nt, Homo Sapiens
uuccagcugccggcccucuuuggguugcacc

SEQ ID NO: 45954 - RNA, 32 nt, Homo Sapiens
aauggguagaaaaugaauuugcuagaacacac

SEQ ID NO: 45955 - RNA, 32 nt, Homo Sapiens
aacuuuuuuuuaaaguuuuuuuuuuucuuuua

SEQ ID NO: 45956 - RNA, 32 nt, Homo Sapiens
uccagaaauucaagcugaaacauuugauauga

SEQ ID NO: 45957 - RNA, 27 nt, Homo Sapiens
ccugagccuuaauucuuguguaacuga

SEQ ID NO: 45958 - RNA, 32 nt, Homo Sapiens
gcugagucaggagagcuuagggggagagcggg

SEQ ID NO: 45959 - RNA, 32 nt, Homo Sapiens
uuuaucugaauaguccuauuuaaacuuguccc

SEQ ID NO: 45960 - RNA, 32 nt, Homo Sapiens
agaauucccaagcuuuuuccaguucuagauau

SEQ ID NO: 45961 - RNA, 32 nt, Homo Sapiens
aaaaaaccuauuuuauuauccaaaugcuagaa

SEQ ID NO: 45962 - RNA, 32 nt, Homo Sapiens
gucuuuguacguucuguccccagccccgccuc

SEQ ID NO: 45963 - RNA, 30 nt, Homo Sapiens
gggccugcgcccgugaaacuggugccaggg

SEQ ID NO: 45964 - RNA, 32 nt, Homo Sapiens
ccaaguagcugagacuacaggcacaugccacu

SEQ ID NO: 45965 - RNA, 32 nt, Homo Sapiens
gcuggaggacgcccugcagaaggccaagcagg

SEQ ID NO: 45966 - RNA, 32 nt, Homo Sapiens
auagcucuaacaugcaauauaaaauucauagg

SEQ ID NO: 45967 - RNA, 32 nt, Homo Sapiens
cuggaggauccgccggccgcccggcuccacua

SEQ ID NO: 45968 - RNA, 32 nt, Homo Sapiens
cauuaugggaugcauuaggacuggccuaugca

SEQ ID NO: 45969 - RNA, 31 nt, Homo Sapiens
uuuccacuguuguaaaaaguauaucaaauua

SEQ ID NO: 45970 - RNA, 32 nt, Homo Sapiens
uaaaagauaauguggauaaauaaacuauugau

SEQ ID NO: 45971 - RNA, 32 nt, Homo Sapiens
ugggcuggccucacccgcacacugggagggca

SEQ ID NO: 45972 - RNA, 32 nt, Homo Sapiens
uaucuaauuuaaaagguuugcuaaccauugug

SEQ ID NO: 45973 - RNA, 32 nt, Homo Sapiens
ccgcucacucucggggaagagauggcggcgga

SEQ ID NO: 45974 - RNA, 32 nt, Homo Sapiens
uaugcaagugucaaauaugcaaaagaaauagu

SEQ ID NO: 45975 - RNA, 32 nt, Homo Sapiens
gccacgcugcuggccugggcuggcgucuccug

SEQ ID NO: 45976 - RNA, 32 nt, Homo Sapiens
guuguugcuucuuauuuuugucuguuaggaau

SEQ ID NO: 45977 - RNA, 32 nt, Homo Sapiens
cccagcugggucuacagucccaucuccugacu

SEQ ID NO: 45978 - RNA, 32 nt, Homo Sapiens
ccauguuguaucagaauaauuuuugugccaau

SEQ ID NO: 45979 - RNA, 32 nt, Homo Sapiens
uaaaugcaccaaucagugcugugucuagcuaa

SEQ ID NO: 45980 - RNA, 30 nt, Homo Sapiens
gaacuccugcuaaugggcaaugauggaggc

SEQ ID NO: 45981 - RNA, 32 nt, Homo Sapiens
cggcgccgccggggccccgcgauuccaacucg

SEQ ID NO: 45982 - RNA, 32 nt, Homo Sapiens
cacucaguucccucaucuguaaaggugaaggg

SEQ ID NO: 45983 - RNA, 32 nt, Homo Sapiens
aauguaaauuaaauaacaucccuaugcuguac

SEQ ID NO: 45984 - RNA, 32 nt, Homo Sapiens
cucccgcggggcccuccuggccggggauccgc

SEQ ID NO: 45985 - RNA, 31 nt, Homo Sapiens
cauauaccaagcaugaccugaguguaaucuc

SEQ ID NO: 45986 - RNA, 32 nt, Homo Sapiens
ccgccucgucccgcuucucggcugaggcgccg

SEQ ID NO: 45987 - RNA, 32 nt, Homo Sapiens
agagauuauuggcaucgggggcuuugggaagg

SEQ ID NO: 45988 - RNA, 32 nt, Homo Sapiens
aaaugaggggaccgcaggggcugggguccagg

SEQ ID NO: 45989 - RNA, 32 nt, Homo Sapiens
uaucuauuccagagacccugugcugcccacca

SEQ ID NO: 45990 - RNA, 32 nt, Homo Sapiens
uucucuugccucagccucccaaguggcuggga

SEQ ID NO: 45991 - RNA, 32 nt, Homo Sapiens
uacuauuccaacaaagagauucuggaaguuuu

SEQ ID NO: 45992 - RNA, 32 nt, Homo Sapiens
uaaauguccccuuauucuuuugaaauaaauuu

SEQ ID NO: 45993 - RNA, 32 nt, Homo Sapiens
aauuccaaaagguuugcacauuagaguuugua

SEQ ID NO: 45994 - RNA, 32 nt, Homo Sapiens
uccuuguuaaaagggagguggauguguuuccu

SEQ ID NO: 45995 - RNA, 32 nt, Homo Sapiens
cgcuggugcauucuguuuccucuugaucucaa

SEQ ID NO: 45996 - RNA, 32 nt, Homo Sapiens
ggugguuggaggcgguggcggcggcggcgagg

SEQ ID NO: 45997 - RNA, 32 nt, Homo Sapiens
ggaccaccuccagguuacagugcucguguagc

SEQ ID NO: 45998 - RNA, 32 nt, Homo Sapiens
caugaaccuggcaggcacuuugccauagcuca

SEQ ID NO: 45999 - RNA, 32 nt, Homo Sapiens
cagccacgaaaucuaugguacucuguauggca

SEQ ID NO: 46000 - RNA, 32 nt, Homo Sapiens
ccagacgcagugccuggcaguccagaggcagu

SEQ ID NO: 46001 - RNA, 32 nt, Homo Sapiens
ggccggagagagagggaaggacggggccuggc

SEQ ID NO: 46002 - RNA, 32 nt, Homo Sapiens
cugcuucggcuagauugagcuuccucacaaca

SEQ ID NO: 46003 - RNA, 32 nt, Homo Sapiens
caggcaguguggguggggaggggcuaccuccc

SEQ ID NO: 46004 - RNA, 32 nt, Homo Sapiens
ccucuuggucuuggucucuucagacacuuucc

SEQ ID NO: 46005 - RNA, 32 nt, Homo Sapiens
ccuucuugacuuuuucugauaauuagcugaua

SEQ ID NO: 46006 - RNA, 32 nt, Homo Sapiens
ugugauggauauagagaaucggaggcaccuug

SEQ ID NO: 46007 - RNA, 32 nt, Homo Sapiens
cgagcggcucgaggcugggggaccgcgggcgc

SEQ ID NO: 46008 - RNA, 32 nt, Homo Sapiens
aggcugagacaggcggaucaucugaagucagg

SEQ ID NO: 46009 - RNA, 32 nt, Homo Sapiens
caggcugguggcauggccccccugccccgugc

SEQ ID NO: 46010 - RNA, 32 nt, Homo Sapiens
acaggaggcagacacugcccagaugcucggug

SEQ ID NO: 46011 - RNA, 32 nt, Homo Sapiens
ggccuggcuuccccggacacaccuggagcagc

SEQ ID NO: 46012 - RNA, 32 nt, Homo Sapiens
gacauucuaguaaugauaguuuuuacacugua

SEQ ID NO: 46013 - RNA, 32 nt, Homo Sapiens
uuuauagauuugccuccaucccaugggcugcu

SEQ ID NO: 46014 - RNA, 32 nt, Homo Sapiens
auggucuccaggcccuucuccguuucucaaga

SEQ ID NO: 46015 - RNA, 32 nt, Homo Sapiens
gcagcccgagacccagaguuuguagaguuuag

SEQ ID NO: 46016 - RNA, 32 nt, Homo Sapiens
uggacuuggggguaggggaggggugugugugc

SEQ ID NO: 46017 - RNA, 32 nt, Homo Sapiens
uccagagaaccugacgcgggcccuaauugaua

SEQ ID NO: 46018 - RNA, 32 nt, Homo Sapiens
uacuguauuuuuccuuuuauguccacagaaug

SEQ ID NO: 46019 - RNA, 32 nt, Homo Sapiens
aauacuguauuuuuccacuagaaacuucuuca

SEQ ID NO: 46020 - RNA, 32 nt, Homo Sapiens
cccacuuccuccucuaccccaacacaugcagg

SEQ ID NO: 46021 - RNA, 32 nt, Homo Sapiens
cugugacuucaaauuguaauucuuauuugcag

SEQ ID NO: 46022 - RNA, 32 nt, Homo Sapiens
ugcauccugacggggugccguccccagcacgg

SEQ ID NO: 46023 - RNA, 32 nt, Homo Sapiens
ugguguuuccucuccagggaugacacccuaaa

SEQ ID NO: 46024 - RNA, 32 nt, Homo Sapiens
gaagacauccagucccugacuccaccugccuc

SEQ ID NO: 46025 - RNA, 32 nt, Homo Sapiens
uagagaaaaagaguaagaagauaaaguccauu

SEQ ID NO: 46026 - RNA, 32 nt, Homo Sapiens
aauguugcuuaccugcuucuuugacaucuuaa

SEQ ID NO: 46027 - RNA, 32 nt, Homo Sapiens
ugccuggagcuaccuuccuguguaugcugagg

SEQ ID NO: 46028 - RNA, 32 nt, Homo Sapiens
cuugaaaccugugacuuauugauccuuucucc

SEQ ID NO: 46029 - RNA, 32 nt, Homo Sapiens
cuccuuucccccuuguguugcaaggagcccuc

SEQ ID NO: 46030 - RNA, 32 nt, Homo Sapiens
auauuuaguuuggcuuuuccuaacauagaaau

SEQ ID NO: 46031 - RNA, 30 nt, Homo Sapiens
ggcucagugugaaugggggaacuuccuggu

SEQ ID NO: 46032 - RNA, 32 nt, Homo Sapiens
cauucaacacccacuuucuccucccucugccc

SEQ ID NO: 46033 - RNA, 32 nt, Homo Sapiens
gguggggcaacgcaccagcuccucgaagccgc

SEQ ID NO: 46034 - RNA, 32 nt, Homo Sapiens
acuguuugucuuccuuugguauauagucucgc

SEQ ID NO: 46035 - RNA, 32 nt, Homo Sapiens
guuuggaggagcaaaggcugagaacacuguga

SEQ ID NO: 46036 - RNA, 32 nt, Homo Sapiens
ugugaaucccgauggagcggcccgaggaaggc

SEQ ID NO: 46037 - RNA, 32 nt, Homo Sapiens
uagcucccauucuguugguuuugcuuacagca

SEQ ID NO: 46038 - RNA, 32 nt, Homo Sapiens
cuaaggucaggaguuugagaccagccuggcca

SEQ ID NO: 46039 - RNA, 32 nt, Homo Sapiens
aaccuuuuggggauuucuguguccugacacca

SEQ ID NO: 46040 - RNA, 32 nt, Homo Sapiens
agucagugggaaaaaaggagguuuuuagacuu

SEQ ID NO: 46041 - RNA, 32 nt, Homo Sapiens
acacauuucuuacuuggcuauaccauucuugg

SEQ ID NO: 46042 - RNA, 32 nt, Homo Sapiens
uuucagaugcaaacauauuaaaguuucauaua

SEQ ID NO: 46043 - RNA, 32 nt, Homo Sapiens
acaggcuuggcacagcaccggcuacguaauca

SEQ ID NO: 46044 - RNA, 32 nt, Homo Sapiens
aagcuuuggguugccacugccuguggguuugc

SEQ ID NO: 46045 - RNA, 32 nt, Homo Sapiens
ccaucauucuguguggaggugaguggaguggg

SEQ ID NO: 46046 - RNA, 32 nt, Homo Sapiens
uggcgggggaggggcgccugggggugcaagag

SEQ ID NO: 46047 - RNA, 32 nt, Homo Sapiens
ucaacuucucccugauuccucauccguuuuuu

SEQ ID NO: 46048 - RNA, 32 nt, Homo Sapiens
ucgccguccgcgccggccccggccaugaacgg

SEQ ID NO: 46049 - RNA, 32 nt, Homo Sapiens
ucuuaaaagcaucagucuguaacuagaacaaa

SEQ ID NO: 46050 - RNA, 32 nt, Homo Sapiens
ugaugccagcugccccugaggaugccaguacu

SEQ ID NO: 46051 - RNA, 32 nt, Homo Sapiens
ccugggcugcaggagguugcggcggccgcggc

SEQ ID NO: 46052 - RNA, 32 nt, Homo Sapiens
ccagagagccuccgaggcgcgcggugccaacc

SEQ ID NO: 46053 - RNA, 32 nt, Homo Sapiens
cugaaucauacacucaaaaauagcuaaaaugg

SEQ ID NO: 46054 - RNA, 32 nt, Homo Sapiens
uaaucaccaacccaucaacaucaagccucccc

SEQ ID NO: 46055 - RNA, 32 nt, Homo Sapiens
cugaauuuugcagcugcagaauguguaguacc

SEQ ID NO: 46056 - RNA, 32 nt, Homo Sapiens
agugaauuucuguggauuuuacuggucccagc

SEQ ID NO: 46057 - RNA, 32 nt, Homo Sapiens
cccuacugcagagauagcacugccgaguuccc

SEQ ID NO: 46058 - RNA, 32 nt, Homo Sapiens
caggaucuucugccuccgccagccugugagcu

SEQ ID NO: 46059 - RNA, 32 nt, Homo Sapiens
caguggugcgaucucagcucacagcaaccucc

SEQ ID NO: 46060 - RNA, 32 nt, Homo Sapiens
cacuugggaauuacaagaaguaaaacaagugc

SEQ ID NO: 46061 - RNA, 32 nt, Homo Sapiens
ucagagcccucccagguugcugcuguuuccag

SEQ ID NO: 46062 - RNA, 32 nt, Homo Sapiens
cggaaguggaggaggaggcgcggcggcggcgg

SEQ ID NO: 46063 - RNA, 32 nt, Homo Sapiens
ugcgcccugggcgcacggggcccuacacgcgc

SEQ ID NO: 46064 - RNA, 32 nt, Homo Sapiens
ccccuccuuccccucgauccagcccucaugac

SEQ ID NO: 46065 - RNA, 32 nt, Homo Sapiens
cuguauugcagggcuccgacugcauguggcag

SEQ ID NO: 46066 - RNA, 32 nt, Homo Sapiens
cgacuuuccccauuuuagucuaaugggaagau

SEQ ID NO: 46067 - RNA, 32 nt, Homo Sapiens
acacagccccucaagacaagaaacugcuccuu

SEQ ID NO: 46068 - RNA, 32 nt, Homo Sapiens
ccgaccagccccagcgcggugggcccaggcuc

SEQ ID NO: 46069 - RNA, 32 nt, Homo Sapiens
acaaagaccgugggcucaagggugcugggggc

SEQ ID NO: 46070 - RNA, 32 nt, Homo Sapiens
aaaaucaguacugugggaacaagccccucccu

SEQ ID NO: 46071 - RNA, 31 nt, Homo Sapiens
ggagcccagcaggcgugccaggcaaugggga

SEQ ID NO: 46072 - RNA, 32 nt, Homo Sapiens
auauggaaaaggaaauuucaaugccagauuug

SEQ ID NO: 46073 - RNA, 32 nt, Homo Sapiens
ggaguccuguugggugaaugaggcagauggga

SEQ ID NO: 46074 - RNA, 32 nt, Homo Sapiens
ccccagcacucaguccuuauucuuauacccuc

SEQ ID NO: 46075 - RNA, 32 nt, Homo Sapiens
ugauuaucauuuaaaacaaauaaauguacuaa

SEQ ID NO: 46076 - RNA, 32 nt, Homo Sapiens
cucuaggaaggggaaauaucugugucuugauu

SEQ ID NO: 46077 - RNA, 32 nt, Homo Sapiens
ggcuuaucaaggggguucgaaggguggccaag

SEQ ID NO: 46078 - RNA, 32 nt, Homo Sapiens
aaaauguagcaacuacaugugauaaaagcaaa

SEQ ID NO: 46079 - RNA, 32 nt, Homo Sapiens
cugggguucagcgccucuccuggggcuggaag

SEQ ID NO: 46080 - RNA, 32 nt, Homo Sapiens
cgggcgugguggcucacgcugaggucaggagu

SEQ ID NO: 46081 - RNA, 32 nt, Homo Sapiens
gggaaaaguaugucuuuuuuuuuccuuuugua

SEQ ID NO: 46082 - RNA, 32 nt, Homo Sapiens
ccuuuuccaaaaaaugcuugggacaagaagua

SEQ ID NO: 46083 - RNA, 32 nt, Homo Sapiens
ggaccacauuuuaaguuggauggugugcucua

SEQ ID NO: 46084 - RNA, 32 nt, Homo Sapiens
guccuguauggagaccuuggaccagcagggga

SEQ ID NO: 46085 - RNA, 32 nt, Homo Sapiens
uuucaaaagcuuaaggcccaaauacuaacuuc

SEQ ID NO: 46086 - RNA, 32 nt, Homo Sapiens
ucacagccccugcuuuuucccuucccugggag

SEQ ID NO: 46087 - RNA, 32 nt, Homo Sapiens
guauauuguaaauuguaauuucaaccagaagu

SEQ ID NO: 46088 - RNA, 32 nt, Homo Sapiens
cugcagguuuccugccuauggugagaucagau

SEQ ID NO: 46089 - RNA, 32 nt, Homo Sapiens
uauuucauacccagguaucugggaucuagaca

SEQ ID NO: 46090 - RNA, 32 nt, Homo Sapiens
uuccuuuggaaaacuauaaagaaggacaguca

SEQ ID NO: 46091 - RNA, 32 nt, Homo Sapiens
acuuugcaauuguagauucccaacaauaaaau

SEQ ID NO: 46092 - RNA, 32 nt, Homo Sapiens
ccagguucaagcgauucuccugucccaaguag

SEQ ID NO: 46093 - RNA, 32 nt, Homo Sapiens
uugcuccuauguuccuuggagcaaaugggaaa

SEQ ID NO: 46094 - RNA, 32 nt, Homo Sapiens
ugagaauacagcaaauauuaacuuaaauuauu

SEQ ID NO: 46095 - RNA, 32 nt, Homo Sapiens
uccggggccuggaagcgcgggggcggcgccga

SEQ ID NO: 46096 - RNA, 32 nt, Homo Sapiens
auccgagggcagcccgcgggcgucaugcccgc

SEQ ID NO: 46097 - RNA, 27 nt, Homo Sapiens
cuccaguccuucuccucaguucuugug

SEQ ID NO: 46098 - RNA, 32 nt, Homo Sapiens
cucugagccccggccucggaccgcccacucca

SEQ ID NO: 46099 - RNA, 32 nt, Homo Sapiens
cggugggggccugaagaggauaagguagagcu

SEQ ID NO: 46100 - RNA, 32 nt, Homo Sapiens
agauccaggugcuugugaaaagaaucaugaau

SEQ ID NO: 46101 - RNA, 32 nt, Homo Sapiens
uggccauuauuuggcuaagaacuucagccauc

SEQ ID NO: 46102 - RNA, 32 nt, Homo Sapiens
gggugugccaccugggucacuggaggaccaac

SEQ ID NO: 46103 - RNA, 32 nt, Homo Sapiens
auuuuaaauauuaguuauucuaaggagaaaaa

SEQ ID NO: 46104 - RNA, 27 nt, Homo Sapiens
cccuacaccuucuucauuuccccgggg

SEQ ID NO: 46105 - RNA, 32 nt, Homo Sapiens
aaaacacuugaguugauucaguaaaucgacuu

SEQ ID NO: 46106 - RNA, 31 nt, Homo Sapiens
gaagggcaggauguuuuuaacugaaugugac

SEQ ID NO: 46107 - RNA, 32 nt, Homo Sapiens
gagaaaccaacccaaugacauuucgucuugga

SEQ ID NO: 46108 - RNA, 32 nt, Homo Sapiens
aggcugccaucgggccggugcagauacggggu

SEQ ID NO: 46109 - RNA, 32 nt, Homo Sapiens
cagaccugugccccggcgggacccccaugucc

SEQ ID NO: 46110 - RNA, 32 nt, Homo Sapiens
ugucucccuguucccccuccccaguuuuccaa

SEQ ID NO: 46111 - RNA, 32 nt, Homo Sapiens
aucacaauucuaugugacuuauggucaaaaga

SEQ ID NO: 46112 - RNA, 32 nt, Homo Sapiens
cuaaguaguuagcauaacucaagaugcugaug

SEQ ID NO: 46113 - RNA, 32 nt, Homo Sapiens
ucacuguucgucugcugucugugucuucuauu

SEQ ID NO: 46114 - RNA, 32 nt, Homo Sapiens
gaucaauacugaggccgcguccgacccccuug

SEQ ID NO: 46115 - RNA, 32 nt, Homo Sapiens
gggauuuuuuaaagagcugcucagguaauucc

SEQ ID NO: 46116 - RNA, 32 nt, Homo Sapiens
uggaggacgcgcaggagcgcgcggcccuggcc

SEQ ID NO: 46117 - RNA, 32 nt, Homo Sapiens
ccauccacauguauuuuuccuucuaucccaua

SEQ ID NO: 46118 - RNA, 32 nt, Homo Sapiens
aaaaucagcuccuggggcuggugguuggaggu

SEQ ID NO: 46119 - RNA, 32 nt, Homo Sapiens
gaguggguguggaauugcuuuccucgggccac

SEQ ID NO: 46120 - RNA, 32 nt, Homo Sapiens
aacacugggcgucucgacagggaccagagccu

SEQ ID NO: 46121 - RNA, 32 nt, Homo Sapiens
aaaucuaaagauguuuuaaaaaacacuuuuca

SEQ ID NO: 46122 - RNA, 32 nt, Homo Sapiens
gcucggcucccucccaccuaggccggccccgg

SEQ ID NO: 46123 - RNA, 32 nt, Homo Sapiens
gggggacacacaggugaccccaggacucuggc

SEQ ID NO: 46124 - RNA, 32 nt, Homo Sapiens
agcaguauguaaaugaaaccagcaaagagagu

SEQ ID NO: 46125 - RNA, 32 nt, Homo Sapiens
ccaggggcggcacgcggcugcuccggugcgcc

SEQ ID NO: 46126 - RNA, 32 nt, Homo Sapiens
caaguucuccccagccccagcccuguccgucu

SEQ ID NO: 46127 - RNA, 32 nt, Homo Sapiens
acgucuauuuuugugucuuuuuaaucggggag

SEQ ID NO: 46128 - RNA, 32 nt, Homo Sapiens
ucagaacaaggugaacgcccagcugcagccau

SEQ ID NO: 46129 - RNA, 32 nt, Homo Sapiens
uaaaauaaucaguaaaguuagauuuuauccau

SEQ ID NO: 46130 - RNA, 32 nt, Homo Sapiens
aacuaggcuggacccuucccacuacauaauag

SEQ ID NO: 46131 - RNA, 31 nt, Homo Sapiens
acgugaaauccugagcucagagcuuacagau

SEQ ID NO: 46132 - RNA, 32 nt, Homo Sapiens
aacccagaaaucaccuauggauuugaccacga

SEQ ID NO: 46133 - RNA, 31 nt, Homo Sapiens
agucuugugaauuuguaauagaucaguacca

SEQ ID NO: 46134 - RNA, 32 nt, Homo Sapiens
gaaaggaagaaucuugggcuuaguaucaggaa

SEQ ID NO: 46135 - RNA, 32 nt, Homo Sapiens
uuugaaauugauuuauuuuagauguuguauac

SEQ ID NO: 46136 - RNA, 32 nt, Homo Sapiens
ugggaaugucauucuaauuauuggauccugac

SEQ ID NO: 46137 - RNA, 32 nt, Homo Sapiens
uuuugauuuuguguuacaguacacuuguagcc

SEQ ID NO: 46138 - RNA, 32 nt, Homo Sapiens
cauuccggccggcgcucuggcucuguaccugg

SEQ ID NO: 46139 - RNA, 32 nt, Homo Sapiens
aacauugucaguuguguauuuucauuuuauuu

SEQ ID NO: 46140 - RNA, 32 nt, Homo Sapiens
gauuuacuuauuccaauaauuccaaguggaga

SEQ ID NO: 46141 - RNA, 32 nt, Homo Sapiens
cuggccacagcuuuugggagauggggugggca

SEQ ID NO: 46142 - RNA, 32 nt, Homo Sapiens
gauguggaaccuguuuaauguuaugaggacgu

SEQ ID NO: 46143 - RNA, 32 nt, Homo Sapiens
aaaaggcgcuggccaacgcuuugugggugcug

SEQ ID NO: 46144 - RNA, 32 nt, Homo Sapiens
gcccggcgucgccccacgccgcgcucgcuccu

SEQ ID NO: 46145 - RNA, 32 nt, Homo Sapiens
caaaucuuuuguugcaagcagugugucgcuuc

SEQ ID NO: 46146 - RNA, 32 nt, Homo Sapiens
gaagccgcuguggggcucggcccgcugcuugu

SEQ ID NO: 46147 - RNA, 32 nt, Homo Sapiens
ugcggggauuaccaggugcugggaggcaacaa

SEQ ID NO: 46148 - RNA, 32 nt, Homo Sapiens
aucugaauccuccaaaagacagaugugcggag

SEQ ID NO: 46149 - RNA, 29 nt, Homo Sapiens
ggacauguaguaaugucuauauuggcuca

SEQ ID NO: 46150 - RNA, 32 nt, Homo Sapiens
aauggggaaggguugugggcaaugcaguaaca

SEQ ID NO: 46151 - RNA, 32 nt, Homo Sapiens
aaauaacugucaacuguuucauugcuuuuuaa

SEQ ID NO: 46152 - RNA, 32 nt, Homo Sapiens
uuccuucucggcagcgcuccgcgcccccaucg

SEQ ID NO: 46153 - RNA, 27 nt, Homo Sapiens
acccauccuccuuucagcccccuuuau

SEQ ID NO: 46154 - RNA, 32 nt, Homo Sapiens
ugggauuucuaaaaguacaaaguuccacaaua

SEQ ID NO: 46155 - RNA, 32 nt, Homo Sapiens
aacaaaaaaaaauaaaaaaguugugccugaaa

SEQ ID NO: 46156 - RNA, 30 nt, Homo Sapiens
guguacucacuugccuccucuuuuguccug

SEQ ID NO: 46157 - RNA, 32 nt, Homo Sapiens
agcucccugaggcaugugguuguaaggcagaa

SEQ ID NO: 46158 - RNA, 32 nt, Homo Sapiens
aaccgagcucuucuuuggggaucaauauuuau

SEQ ID NO: 46159 - RNA, 32 nt, Homo Sapiens
acuuggggucaccacccuccccugucuucucu

SEQ ID NO: 46160 - RNA, 32 nt, Homo Sapiens
ccuuuuuugucaaccucaaguacuuuucuuuu

SEQ ID NO: 46161 - RNA, 32 nt, Homo Sapiens
uucugcagcuggaagccuuucuuuccaaggcc

SEQ ID NO: 46162 - RNA, 32 nt, Homo Sapiens
cuucagaagcccacccgaggccugcugcucug

SEQ ID NO: 46163 - RNA, 32 nt, Homo Sapiens
aauugaaggcauucuaaaauggcuaaccguac

SEQ ID NO: 46164 - RNA, 32 nt, Homo Sapiens
aagacaugucuucaucuacauggcaucuuucc

SEQ ID NO: 46165 - RNA, 30 nt, Homo Sapiens
caugagaacagcaugggggaaacugccucc

SEQ ID NO: 46166 - RNA, 32 nt, Homo Sapiens
cagccauuugaaauauuuaugaagguuuugga

SEQ ID NO: 46167 - RNA, 28 nt, Homo Sapiens
cagcggcgguggcagccgaggugcagga

SEQ ID NO: 46168 - RNA, 32 nt, Homo Sapiens
uucguuuguggccuuaacccccucugcaucag

SEQ ID NO: 46169 - RNA, 32 nt, Homo Sapiens
uuuuuauugggacaaaaggcaagauggcacca

SEQ ID NO: 46170 - RNA, 32 nt, Homo Sapiens
agaggaaauaaucaagaucacucauaucccaa

SEQ ID NO: 46171 - RNA, 32 nt, Homo Sapiens
acuguucaaaauuuauauuaaaaucuacuuag

SEQ ID NO: 46172 - RNA, 32 nt, Homo Sapiens
agaaagggccuaguuacuauccugucaguucu

SEQ ID NO: 46173 - RNA, 32 nt, Homo Sapiens
uuccagaugcuguucucuauuuuaauguuauu

SEQ ID NO: 46174 - RNA, 32 nt, Homo Sapiens
ucucugcccccucccagcucuggugugggcgg

SEQ ID NO: 46175 - RNA, 32 nt, Homo Sapiens
gucugucccuugaaugcuuccacaaaacauag

SEQ ID NO: 46176 - RNA, 32 nt, Homo Sapiens
cuagaagagagaccguugcugcugucaugacc

SEQ ID NO: 46177 - RNA, 32 nt, Homo Sapiens
cacuugcucccauucguguugcuaacacuuua

SEQ ID NO: 46178 - RNA, 32 nt, Homo Sapiens
uuuauaaacaauucagcauguuucucuaaaag

SEQ ID NO: 46179 - RNA, 32 nt, Homo Sapiens
cggucuggaaaacgagcuaauuccgugccgau

SEQ ID NO: 46180 - RNA, 32 nt, Homo Sapiens
cuuguugaaauaaaaugugucaauugucucug

SEQ ID NO: 46181 - RNA, 32 nt, Homo Sapiens
uccccaccccuacagugagauuccacauaaaa

SEQ ID NO: 46182 - RNA, 32 nt, Homo Sapiens
ggcgcucaagcauggcggcggcggcauugggc

SEQ ID NO: 46183 - RNA, 32 nt, Homo Sapiens
ucuuggccaaacuugaauuuucacaugaguau

SEQ ID NO: 46184 - RNA, 32 nt, Homo Sapiens
guagcccggguuuggacucuuccuccuggcau

SEQ ID NO: 46185 - RNA, 32 nt, Homo Sapiens
gcucuguuucccugccagacaccaccuuuccc

SEQ ID NO: 46186 - RNA, 32 nt, Homo Sapiens
aaaaaguuuauuaauguuaaauuuaugaugca

SEQ ID NO: 46187 - RNA, 32 nt, Homo Sapiens
cuccaggcucugcuguggccccgcggagccaa

SEQ ID NO: 46188 - RNA, 32 nt, Homo Sapiens
aaacuaagguuguuguauacaccuggaggcau

SEQ ID NO: 46189 - RNA, 32 nt, Homo Sapiens
cagaaucacagcucgguuuuuaagauggacau

SEQ ID NO: 46190 - RNA, 32 nt, Homo Sapiens
cccgggcugggguaaaggccgcggccgggcca

SEQ ID NO: 46191 - RNA, 32 nt, Homo Sapiens
gggcaggccggggcugugagggggcagcccgc

SEQ ID NO: 46192 - RNA, 32 nt, Homo Sapiens
gaggucggacuacagagggaagagggacuucc

SEQ ID NO: 46193 - RNA, 32 nt, Homo Sapiens
uguguggacgcaaagauaggugaucuucagcu

SEQ ID NO: 46194 - RNA, 32 nt, Homo Sapiens
agaggcuccugggggauuagggugugguguuu

SEQ ID NO: 46195 - RNA, 32 nt, Homo Sapiens
cucaagaacaaaagacaacugaaagaagcugu

SEQ ID NO: 46196 - RNA, 32 nt, Homo Sapiens
uauauauuauaaauauugcucaucaaaauguc

SEQ ID NO: 46197 - RNA, 32 nt, Homo Sapiens
cacuccuccugcuaugaugccuggacagaucc

SEQ ID NO: 46198 - RNA, 32 nt, Homo Sapiens
ccucugaaauuuuguugauaccaucuaaauac

SEQ ID NO: 46199 - RNA, 30 nt, Homo Sapiens
augacggcaguggugccgccuggugucgcc

SEQ ID NO: 46200 - RNA, 32 nt, Homo Sapiens
ucacccccucagcgccacggaccucucugggg

SEQ ID NO: 46201 - RNA, 32 nt, Homo Sapiens
ucagugaggacgggacucuacugccgagacca

SEQ ID NO: 46202 - RNA, 32 nt, Homo Sapiens
ugugcauuuuguaagcacuuuggagccacuau

SEQ ID NO: 46203 - RNA, 32 nt, Homo Sapiens
gaacaagccgacgcuuccagacaaggcggaaa

SEQ ID NO: 46204 - RNA, 32 nt, Homo Sapiens
aagguggcagacauuuauggacacccgccacg

SEQ ID NO: 46205 - RNA, 32 nt, Homo Sapiens
cuuacaaaacauuuaucagaaaacauuaaaga

SEQ ID NO: 46206 - RNA, 32 nt, Homo Sapiens
aaaaauuuaauauuuaaagauggugucuuauc

SEQ ID NO: 46207 - RNA, 32 nt, Homo Sapiens
cggcgguggcgguggcugagcagaggacccgg

SEQ ID NO: 46208 - RNA, 32 nt, Homo Sapiens
augggauugucuugugaaagggaaauaucuug

SEQ ID NO: 46209 - RNA, 32 nt, Homo Sapiens
ggagcggggggagaggcauuccaggcuggagg

SEQ ID NO: 46210 - RNA, 32 nt, Homo Sapiens
cagcaccugcucuggagggcucuccagcaguu

SEQ ID NO: 46211 - RNA, 32 nt, Homo Sapiens
aaauaaaguauaugcuuauaaacaaguugugg

SEQ ID NO: 46212 - RNA, 32 nt, Homo Sapiens
cgagccugcuugcugauauugcaguuuuuguu

SEQ ID NO: 46213 - RNA, 32 nt, Homo Sapiens
acuagaguauacauuuuuucuaauuguaaaua

SEQ ID NO: 46214 - RNA, 32 nt, Homo Sapiens
agaaauugaugaucuuggaauucaucauaaca

SEQ ID NO: 46215 - RNA, 32 nt, Homo Sapiens
cccuggccugcgccagcugcguacacggcgag

SEQ ID NO: 46216 - RNA, 32 nt, Homo Sapiens
cacaccugcucccaagcucagauggaaguccc

SEQ ID NO: 46217 - RNA, 32 nt, Homo Sapiens
cugaguccagugcgugcuccucacugugcacu

SEQ ID NO: 46218 - RNA, 32 nt, Homo Sapiens
aguccucccacuuuaccauccuccuuccuccc

SEQ ID NO: 46219 - RNA, 32 nt, Homo Sapiens
gauugcuugagcccaggaguuugagguuguag

SEQ ID NO: 46220 - RNA, 32 nt, Homo Sapiens
uauaguugcauaauacuccauuuauauaucuc

SEQ ID NO: 46221 - RNA, 32 nt, Homo Sapiens
uguuccccgcggcugcggcagcaccagggccg

SEQ ID NO: 46222 - RNA, 31 nt, Homo Sapiens
gaggcgggggcggugcaugacgcgccucggg

SEQ ID NO: 46223 - RNA, 32 nt, Homo Sapiens
cggaggcagggccgccggaugcugugcgggga

SEQ ID NO: 46224 - RNA, 32 nt, Homo Sapiens
uucauuuuuuaaagccagucuuguucacaucc

SEQ ID NO: 46225 - RNA, 32 nt, Homo Sapiens
ucugaguugggucccuccucccuccaaggagu

SEQ ID NO: 46226 - RNA, 32 nt, Homo Sapiens
caugugggggugggaggcucucuuccuuuuuu

SEQ ID NO: 46227 - RNA, 32 nt, Homo Sapiens
gggcuuugcgaagauggcggcgcugggggugc

SEQ ID NO: 46228 - RNA, 32 nt, Homo Sapiens
uuguuucauacuuuaaauuuauauggcugugg

SEQ ID NO: 46229 - RNA, 32 nt, Homo Sapiens
guuuauaccauggauagcacaaaggagaagug

SEQ ID NO: 46230 - RNA, 32 nt, Homo Sapiens
cgccuugcagaaaauuaaaauagggugauggg

SEQ ID NO: 46231 - RNA, 32 nt, Homo Sapiens
aaaggagggaaaaaccauaaaaggaauacuua

SEQ ID NO: 46232 - RNA, 32 nt, Homo Sapiens
uuuaaaaacaauuuuauaaacaaaucaaggag

SEQ ID NO: 46233 - RNA, 32 nt, Homo Sapiens
uucaggucaggaguucgagaccagccuggcca

SEQ ID NO: 46234 - RNA, 32 nt, Homo Sapiens
guucucucugcuggugaugcgguuguaagauu

SEQ ID NO: 46235 - RNA, 32 nt, Homo Sapiens
ugguuuuuuaucaagaacaacacuuaucguua

SEQ ID NO: 46236 - RNA, 32 nt, Homo Sapiens
agcaucccgcggcucuggagccgcccggcccg

SEQ ID NO: 46237 - RNA, 32 nt, Homo Sapiens
uaccuagagaccagcucccuucucuggggucc

SEQ ID NO: 46238 - RNA, 32 nt, Homo Sapiens
cugaguucuuugauuuuaaguuggguuuaugg

SEQ ID NO: 46239 - RNA, 32 nt, Homo Sapiens
cucgugauauccacaaaugcuauucagauaag

SEQ ID NO: 46240 - RNA, 32 nt, Homo Sapiens
cccaauacaucauugaauucaaauaauuucca

SEQ ID NO: 46241 - RNA, 32 nt, Homo Sapiens
uucugaaaauuccagaaaggauauuuaagaaa

SEQ ID NO: 46242 - RNA, 32 nt, Homo Sapiens
cauggcaauuuaaccacauuuggaaggcacug

SEQ ID NO: 46243 - RNA, 32 nt, Homo Sapiens
ggggagcccaagggcuguuucugccacuugcu

SEQ ID NO: 46244 - RNA, 32 nt, Homo Sapiens
gauucuguuacagauaaauuuauggacuucuc

SEQ ID NO: 46245 - RNA, 32 nt, Homo Sapiens
ugggacugccagggccgcggccgcccgcacgu

SEQ ID NO: 46246 - RNA, 32 nt, Homo Sapiens
uggguucuuugcuguccuaagaacuuuagugu

SEQ ID NO: 46247 - RNA, 32 nt, Homo Sapiens
uccaccaagauuacagggcaugguagcugccg

SEQ ID NO: 46248 - RNA, 32 nt, Homo Sapiens
auuacagauucgucuuuuuuuuuuuucuuaua

SEQ ID NO: 46249 - RNA, 32 nt, Homo Sapiens
ggcugcguggggggcgggagggccuguagaua

SEQ ID NO: 46250 - RNA, 32 nt, Homo Sapiens
cgcccugguguugguguugccucacuccucug

SEQ ID NO: 46251 - RNA, 32 nt, Homo Sapiens
acuuguuucuccugcaccccagccugucacgc

SEQ ID NO: 46252 - RNA, 32 nt, Homo Sapiens
auaauguggugcuugaaguuucugggaagucg

SEQ ID NO: 46253 - RNA, 32 nt, Homo Sapiens
auuugaauuuaaaagcacuuuauuuaaaaaaa

SEQ ID NO: 46254 - RNA, 32 nt, Homo Sapiens
cccaggccgcccccagccucuucugcccuucc

SEQ ID NO: 46255 - RNA, 32 nt, Homo Sapiens
auguacaaaaauuacugaaaggcuucaguuuu

SEQ ID NO: 46256 - RNA, 32 nt, Homo Sapiens
aggaugacagagcugagggucuuuguaggagu

SEQ ID NO: 46257 - RNA, 32 nt, Homo Sapiens
ccacccaccagacaaaggugcgggaaauggga

SEQ ID NO: 46258 - RNA, 32 nt, Homo Sapiens
caggaugcaugcuccuuguccccucccacccg

SEQ ID NO: 46259 - RNA, 32 nt, Homo Sapiens
caaguagaaaaauggauagaaacaaaauucuc

SEQ ID NO: 46260 - RNA, 32 nt, Homo Sapiens
ggcauuacaauuuuuuagguuuagaaagaugg

SEQ ID NO: 46261 - RNA, 32 nt, Homo Sapiens
aaggagccacuucagaaaugugucacagaaaa

SEQ ID NO: 46262 - RNA, 29 nt, Homo Sapiens
agccauggagcuguggcgccaaugcaccc

SEQ ID NO: 46263 - RNA, 32 nt, Homo Sapiens
cgcgcggacccaccgagcccgcgcucagacgc

SEQ ID NO: 46264 - RNA, 32 nt, Homo Sapiens
auugcaguuauuucaaaaauuugcaugcaaaa

SEQ ID NO: 46265 - RNA, 32 nt, Homo Sapiens
cgcgcucggcggccgccauugcagcuuguuuu

SEQ ID NO: 46266 - RNA, 32 nt, Homo Sapiens
ccgugacuccuggcccuucucuguggaucccu

SEQ ID NO: 46267 - RNA, 32 nt, Homo Sapiens
gggucuucauuuccaugaaaaagggacuccaa

SEQ ID NO: 46268 - RNA, 32 nt, Homo Sapiens
auaacccuaugucuccucccccagaauccuuc

SEQ ID NO: 46269 - RNA, 32 nt, Homo Sapiens
gucaguguacacaacucacauccuucauauug

SEQ ID NO: 46270 - RNA, 27 nt, Homo Sapiens
aaagcuguuuucuucagcuucuccugg

SEQ ID NO: 46271 - RNA, 32 nt, Homo Sapiens
aguguuugcugaggaauaauuaaaugagaauu

SEQ ID NO: 46272 - RNA, 32 nt, Homo Sapiens
gcuggagcacugggcucccgggccccacagac

SEQ ID NO: 46273 - RNA, 32 nt, Homo Sapiens
auuugguagaaagagaaaaauugaugaugcaa

SEQ ID NO: 46274 - RNA, 32 nt, Homo Sapiens
aagagguucaacauauuaacuaaauucaaaag

SEQ ID NO: 46275 - RNA, 32 nt, Homo Sapiens
aauaucucaaguguugaugcuauccaagcaug

SEQ ID NO: 46276 - RNA, 32 nt, Homo Sapiens
agcaggcggcggcgguggcggcggcgguuaga

SEQ ID NO: 46277 - RNA, 32 nt, Homo Sapiens
cgcgcgacucccggcagcucagcccucugccu

SEQ ID NO: 46278 - RNA, 32 nt, Homo Sapiens
ggugccggggguaaucauggccagucaauaau

SEQ ID NO: 46279 - RNA, 32 nt, Homo Sapiens
gaacaaucaacauuuuuagaaaauaguaggac

SEQ ID NO: 46280 - RNA, 32 nt, Homo Sapiens
aauccuaacaauaaugccaugugacaaccuau

SEQ ID NO: 46281 - RNA, 32 nt, Homo Sapiens
uuaaauaauaauaguuaaugaaggugugcuac

SEQ ID NO: 46282 - RNA, 32 nt, Homo Sapiens
agacauacugucauguauuuauauucuagcau

SEQ ID NO: 46283 - RNA, 32 nt, Homo Sapiens
ggaagcagaaaagcaagagaggaggucucuaa

SEQ ID NO: 46284 - RNA, 32 nt, Homo Sapiens
ccccgagggcacuggaggaguguugcaggcau

SEQ ID NO: 46285 - RNA, 32 nt, Homo Sapiens
caaggaucuguuuucaacaccauuccaagucu

SEQ ID NO: 46286 - RNA, 32 nt, Homo Sapiens
ggguccgagugcucugcgcccagcgcaccgag

SEQ ID NO: 46287 - RNA, 32 nt, Homo Sapiens
auuucauuuguguuauuucuuaaacuucuauu

SEQ ID NO: 46288 - RNA, 32 nt, Homo Sapiens
cugcagggccucgcgcucggcccucgccaggc

SEQ ID NO: 46289 - RNA, 32 nt, Homo Sapiens
ccucccuccucgccgccccggaggcgaagccg

SEQ ID NO: 46290 - RNA, 32 nt, Homo Sapiens
uaggacuggggguggggccaauccagggcagc

SEQ ID NO: 46291 - RNA, 32 nt, Homo Sapiens
aaaaaggcugggugcaguggcucacaccugua

SEQ ID NO: 46292 - RNA, 32 nt, Homo Sapiens
gcuccacagcacccuccaugggcucagucuug

SEQ ID NO: 46293 - RNA, 32 nt, Homo Sapiens
aaaccuaaugauuauauguauuuuauaugugu

SEQ ID NO: 46294 - RNA, 32 nt, Homo Sapiens
cguagcuauuuaagugauacauaccucuaguu

SEQ ID NO: 46295 - RNA, 32 nt, Homo Sapiens
ucucaaccagauuuauuuuaaacgcuucuuau

SEQ ID NO: 46296 - RNA, 32 nt, Homo Sapiens
aggccgcccuccccuggcucugucuaggaaca

SEQ ID NO: 46297 - RNA, 32 nt, Homo Sapiens
auuaggauauuguagcuucauuuaccaauaaa

SEQ ID NO: 46298 - RNA, 32 nt, Homo Sapiens
ggcauaacauauuuuuauguuaauuaaagaag

SEQ ID NO: 46299 - RNA, 32 nt, Homo Sapiens
uagauauguauauaugguucacauaucuggau

SEQ ID NO: 46300 - RNA, 32 nt, Homo Sapiens
caggauuuuuauucgucgcuuauuuuaugcca

SEQ ID NO: 46301 - RNA, 32 nt, Homo Sapiens
uccuggauguauaguuuaaacaacaaaaaguc

SEQ ID NO: 46302 - RNA, 32 nt, Homo Sapiens
cacauagugggguuuagaaaucuuaucccauu

SEQ ID NO: 46303 - RNA, 30 nt, Homo Sapiens
gcaauugauaaaaggcuuugcaucuguuuu

SEQ ID NO: 46304 - RNA, 32 nt, Homo Sapiens
cuggccugggcaugugauggcuccucacuggg

SEQ ID NO: 46305 - RNA, 32 nt, Homo Sapiens
uucaaaucucuccuuucagggcuuuauuugaa

SEQ ID NO: 46306 - RNA, 32 nt, Homo Sapiens
uuuuaaaugucauauugugauaaugcucugcu

SEQ ID NO: 46307 - RNA, 32 nt, Homo Sapiens
uugcuuugcuguuagccuguuggaccuucgag

SEQ ID NO: 46308 - RNA, 32 nt, Homo Sapiens
gaagugaaaucuaugaugugaaacacuuugcc

SEQ ID NO: 46309 - RNA, 32 nt, Homo Sapiens
uuugcacgaccacuuccagcuugcugcuuccu

SEQ ID NO: 46310 - RNA, 32 nt, Homo Sapiens
cgcacucugcgccucuccucgccuuucucgca

SEQ ID NO: 46311 - RNA, 32 nt, Homo Sapiens
ucagagcucuggagaacaugguccuggcagua

SEQ ID NO: 46312 - RNA, 32 nt, Homo Sapiens
guggggcuuagugaugaaacaaaccuugggga

SEQ ID NO: 46313 - RNA, 32 nt, Homo Sapiens
cagcgccagcccagcucuccccucugcacccu

SEQ ID NO: 46314 - RNA, 32 nt, Homo Sapiens
ucauuugcuuuauaaugaaaaauacauuugca

SEQ ID NO: 46315 - RNA, 32 nt, Homo Sapiens
gugugggguaugcaccugagcuccugcuucgc

SEQ ID NO: 46316 - RNA, 32 nt, Homo Sapiens
uguccuggccccaguccaccucugggagcgcc

SEQ ID NO: 46317 - RNA, 30 nt, Homo Sapiens
ucugaggcugacugcauugccguccagcau

SEQ ID NO: 46318 - RNA, 32 nt, Homo Sapiens
guuuuguuuuuuguuuuugucugugcaagacc

SEQ ID NO: 46319 - RNA, 28 nt, Homo Sapiens
gcaggaguagcaggaccacggggugggg

SEQ ID NO: 46320 - RNA, 32 nt, Homo Sapiens
gccuugggcuccagcccucugccuuuucaucc

SEQ ID NO: 46321 - RNA, 32 nt, Homo Sapiens
cucuccgcaucaggagcgccggcucacggacu

SEQ ID NO: 46322 - RNA, 30 nt, Homo Sapiens
gacgcuggagucgcugcggguccugggauu

SEQ ID NO: 46323 - RNA, 32 nt, Homo Sapiens
agcaacuuugagagccuuguauggaagauggc

SEQ ID NO: 46324 - RNA, 32 nt, Homo Sapiens
gaacgugggcaguguccaaauuccuguacugu

SEQ ID NO: 46325 - RNA, 32 nt, Homo Sapiens
cauuugggcgucugagacaaauauccauaguu

SEQ ID NO: 46326 - RNA, 32 nt, Homo Sapiens
auuugaggaucagagugugaaaaggaguuucu

SEQ ID NO: 46327 - RNA, 32 nt, Homo Sapiens
auccuccacggucagcgccggggcccggagau

SEQ ID NO: 46328 - RNA, 32 nt, Homo Sapiens
aggaauaauguuuuauugcuauaauggaagua

SEQ ID NO: 46329 - RNA, 32 nt, Homo Sapiens
cgcucaagacccgcccuuagaccaggcaggca

SEQ ID NO: 46330 - RNA, 32 nt, Homo Sapiens
cgugcgggauguggaggggcccggggcgccgg

SEQ ID NO: 46331 - RNA, 32 nt, Homo Sapiens
uuccuccucccucucccgcccggccagccucc

SEQ ID NO: 46332 - RNA, 32 nt, Homo Sapiens
ugacuacgacgaugacuucccagacgugcgcc

SEQ ID NO: 46333 - RNA, 32 nt, Homo Sapiens
aaucuuguggagugugaauuaaguauguggag

SEQ ID NO: 46334 - RNA, 32 nt, Homo Sapiens
cacaggggccagggcugccuaggguggcgcag

SEQ ID NO: 46335 - RNA, 31 nt, Homo Sapiens
gcaaacagacauuccagagagccuguccaca

SEQ ID NO: 46336 - RNA, 32 nt, Homo Sapiens
uggcuccucacuuagccauuagacuugaauag

SEQ ID NO: 46337 - RNA, 32 nt, Homo Sapiens
uggccaccuagcugcccccuucugggauagug

SEQ ID NO: 46338 - RNA, 32 nt, Homo Sapiens
gccggagccucgccuuccuuucucccucugca

SEQ ID NO: 46339 - RNA, 32 nt, Homo Sapiens
gcccgagggagcagccaucacaaacucacaga

SEQ ID NO: 46340 - RNA, 32 nt, Homo Sapiens
ccggacugugagcggcuguuagugcgucgcag

SEQ ID NO: 46341 - RNA, 32 nt, Homo Sapiens
ugaaagcacuauaaaaauauuaucaaaagcuu

SEQ ID NO: 46342 - RNA, 31 nt, Homo Sapiens
ucccagcucgucugccugcccccggccccgc

SEQ ID NO: 46343 - RNA, 32 nt, Homo Sapiens
gacugaugaaggcaugccuaaaaguuacuuac

SEQ ID NO: 46344 - RNA, 32 nt, Homo Sapiens
uggccuucuagaagcugaaguugugcccucaa

SEQ ID NO: 46345 - RNA, 32 nt, Homo Sapiens
cgcccuccugcagccaugucccggccccuguc

SEQ ID NO: 46346 - RNA, 32 nt, Homo Sapiens
uaaugaugcaagaguggacguaaugcuaguug

SEQ ID NO: 46347 - RNA, 32 nt, Homo Sapiens
gggagacagcucagucucggcccugcuuccga

SEQ ID NO: 46348 - RNA, 32 nt, Homo Sapiens
cgggacugcacgcucgggagaagugccacgcg

SEQ ID NO: 46349 - RNA, 32 nt, Homo Sapiens
cccugcagcuggugcucugugucuucgcuucc

SEQ ID NO: 46350 - RNA, 32 nt, Homo Sapiens
agaugaaucaggggaggaaaagaauggagaug

SEQ ID NO: 46351 - RNA, 32 nt, Homo Sapiens
cugaggaaucgauguagaaauguuaucacaag

SEQ ID NO: 46352 - RNA, 32 nt, Homo Sapiens
gugcuuugaacaaaggauauugaaagaccuca

SEQ ID NO: 46353 - RNA, 32 nt, Homo Sapiens
ggcauuucuggcuuggcgguccuccuuucgca

SEQ ID NO: 46354 - RNA, 32 nt, Homo Sapiens
uucgggccgucacccugccuccccugcguccc

SEQ ID NO: 46355 - RNA, 32 nt, Homo Sapiens
gaucccuuaugaaugguucagcaccauccccu

SEQ ID NO: 46356 - RNA, 32 nt, Homo Sapiens
gcuccgaggcugaaagggaaacaucagccgcc

SEQ ID NO: 46357 - RNA, 32 nt, Homo Sapiens
uggugguuugggggccggggcaaccaagcugu

SEQ ID NO: 46358 - RNA, 32 nt, Homo Sapiens
uggcauccagagcuaacaaucauucuucagau

SEQ ID NO: 46359 - RNA, 32 nt, Homo Sapiens
gcggcagccgccucugcgcggaccggggcugg

SEQ ID NO: 46360 - RNA, 32 nt, Homo Sapiens
uugaaagugucugcuuuuuuuauccuuaaaau

SEQ ID NO: 46361 - RNA, 32 nt, Homo Sapiens
uguaauuugacuucugacauguuggcaaucaa

SEQ ID NO: 46362 - RNA, 32 nt, Homo Sapiens
aagaaaaagaaaauuucuuuuacuguguuuaa

SEQ ID NO: 46363 - RNA, 32 nt, Homo Sapiens
ugaugaggaggaggaguugcauaauucacggc

SEQ ID NO: 46364 - RNA, 32 nt, Homo Sapiens
guucacuugaaacauaaaugugaaaugucuuc

SEQ ID NO: 46365 - RNA, 32 nt, Homo Sapiens
cagcugggcuccgcugggccugcccggcaccc

SEQ ID NO: 46366 - RNA, 32 nt, Homo Sapiens
cccaguugugccacauucccacucaaggcuca

SEQ ID NO: 46367 - RNA, 32 nt, Homo Sapiens
ucgcaggaccaucccggccggcgcgcucaucc

SEQ ID NO: 46368 - RNA, 32 nt, Homo Sapiens
gacuucaccgacaucgugcugcagcuggacga

SEQ ID NO: 46369 - RNA, 32 nt, Homo Sapiens
ugcuuuuuagacagcuguaggauauuuuauuu

SEQ ID NO: 46370 - RNA, 32 nt, Homo Sapiens
cucuauuuuccagcugguuuuguuaaugauuc

SEQ ID NO: 46371 - RNA, 32 nt, Homo Sapiens
aguggaagccccagagcagcccggcccacuca

SEQ ID NO: 46372 - RNA, 31 nt, Homo Sapiens
agaagcagcugcagccaagcguguccuugga

SEQ ID NO: 46373 - RNA, 32 nt, Homo Sapiens
cuccgagggccgaccgcugccggcgcgggucg

SEQ ID NO: 46374 - RNA, 32 nt, Homo Sapiens
uacauagcaauaacuuaggcaaaaaggcaaca

SEQ ID NO: 46375 - RNA, 32 nt, Homo Sapiens
guuugccucuuuuucucccuggaggaaaaugc

SEQ ID NO: 46376 - RNA, 32 nt, Homo Sapiens
cauucagaggaugcuggacauuaacuggaacu

SEQ ID NO: 46377 - RNA, 32 nt, Homo Sapiens
gugucgugucauugugagugugcuggugugug

SEQ ID NO: 46378 - RNA, 32 nt, Homo Sapiens
aggcuggacuccaugacuauauauacauacau

SEQ ID NO: 46379 - RNA, 32 nt, Homo Sapiens
uccgagccgaggggcugcuucagggaccucgc

SEQ ID NO: 46380 - RNA, 32 nt, Homo Sapiens
uguuaaguuggauagucuuuccaauugacuca

SEQ ID NO: 46381 - RNA, 32 nt, Homo Sapiens
ccauucuccugggauuucccaggccaccucuc

SEQ ID NO: 46382 - RNA, 32 nt, Homo Sapiens
caaauaaauauugaaauggcccacaaagcaaa

SEQ ID NO: 46383 - RNA, 32 nt, Homo Sapiens
aaguacgucaggcgauuccagucaccucagaa

SEQ ID NO: 46384 - RNA, 32 nt, Homo Sapiens
cuggcgggucgcggccgggauccgagccgggg

SEQ ID NO: 46385 - RNA, 32 nt, Homo Sapiens
uuggcaaccgggaucuuaauuuaaaagacaga

SEQ ID NO: 46386 - RNA, 32 nt, Homo Sapiens
aaaauucugcaguuuuaaccuuuagaagucua

SEQ ID NO: 46387 - RNA, 32 nt, Homo Sapiens
ccacuaucccauuugcccuccuccucagcuag

SEQ ID NO: 46388 - RNA, 32 nt, Homo Sapiens
agaaauguguugggcuuuugcuguguugggca

SEQ ID NO: 46389 - RNA, 31 nt, Homo Sapiens
aagugguaauaaaaauuuauauuauaggcuu

SEQ ID NO: 46390 - RNA, 32 nt, Homo Sapiens
ccgucaccaagcuggacggccuggccaaggac

SEQ ID NO: 46391 - RNA, 32 nt, Homo Sapiens
uguauaguuucuaucauuuauuuuuccacugg

SEQ ID NO: 46392 - RNA, 32 nt, Homo Sapiens
gcccugugcccaccccacaucccuuuccgaag

SEQ ID NO: 46393 - RNA, 32 nt, Homo Sapiens
uuauugaggaggagguggcaccuagacuugau

SEQ ID NO: 46394 - RNA, 32 nt, Homo Sapiens
ugaacagcgaucucaguguauuuuauguuuua

SEQ ID NO: 46395 - RNA, 32 nt, Homo Sapiens
ccucuauccugggcuuuuguuuugcuuuuuag

SEQ ID NO: 46396 - RNA, 32 nt, Homo Sapiens
cuaucugcugcaccuucacucuccaggguaca

SEQ ID NO: 46397 - RNA, 29 nt, Homo Sapiens
aaaguuuaaaguuucuagcaauaaauaca

SEQ ID NO: 46398 - RNA, 32 nt, Homo Sapiens
ggggaguucccuccccucccccacaccagaaa

SEQ ID NO: 46399 - RNA, 32 nt, Homo Sapiens
gaaaaucuauuccaaagagacacacuaauaaa

SEQ ID NO: 46400 - RNA, 32 nt, Homo Sapiens
gaccuguuauuaccauuagcauucugguuuug

SEQ ID NO: 46401 - RNA, 32 nt, Homo Sapiens
cucaccuccaccucccaaagugccgggaucac

SEQ ID NO: 46402 - RNA, 32 nt, Homo Sapiens
ggcuguagcagcccuugcugcuccacaccaug

SEQ ID NO: 46403 - RNA, 32 nt, Homo Sapiens
uguaguguugacaaauaaauaguugcucuucu

SEQ ID NO: 46404 - RNA, 32 nt, Homo Sapiens
uggcccaggaggaggauugugcugauguagug

SEQ ID NO: 46405 - RNA, 32 nt, Homo Sapiens
ucuaaucugugcuaccuuauuaacucacagca

SEQ ID NO: 46406 - RNA, 32 nt, Homo Sapiens
aagagggaaaggaaaagagguaucaaguaaau

SEQ ID NO: 46407 - RNA, 32 nt, Homo Sapiens
ccuaucgcggggauccccggcgccaggagggg

SEQ ID NO: 46408 - RNA, 32 nt, Homo Sapiens
gugcugcccuucccucccacagccuggcagcc

SEQ ID NO: 46409 - RNA, 32 nt, Homo Sapiens
cuagaaaguccucccuggcagcuuucuucaag

SEQ ID NO: 46410 - RNA, 32 nt, Homo Sapiens
gaaggcauuuuugagcauuuccaauuauaugg

SEQ ID NO: 46411 - RNA, 29 nt, Homo Sapiens
gaggaugcuccagcuccuggugcugaaga

SEQ ID NO: 46412 - RNA, 32 nt, Homo Sapiens
cuuccagugggcaaagaggacgcccauaauuu

SEQ ID NO: 46413 - RNA, 32 nt, Homo Sapiens
gucagcacccgagcugcaggcggcgagcgcca

SEQ ID NO: 46414 - RNA, 32 nt, Homo Sapiens
uuccagaugggcuaucugaagaggaacgggga

SEQ ID NO: 46415 - RNA, 32 nt, Homo Sapiens
aaauuaauucaaauuaaauguacaauucaguc

SEQ ID NO: 46416 - RNA, 32 nt, Homo Sapiens
gagauugcggugagccgagaucgcgacacugc

SEQ ID NO: 46417 - RNA, 32 nt, Homo Sapiens
ucgagauccucuacccuucucugggccuugcu

SEQ ID NO: 46418 - RNA, 32 nt, Homo Sapiens
auguacugcaggugggggugugcugacauguu

SEQ ID NO: 46419 - RNA, 32 nt, Homo Sapiens
cgggcgaggucccgcccucccguggucacugg

SEQ ID NO: 46420 - RNA, 32 nt, Homo Sapiens
guccuaccgugcagccacacccugcccugccc

SEQ ID NO: 46421 - RNA, 32 nt, Homo Sapiens
cacuucaugaaaccucuugcgguugggcuacu

SEQ ID NO: 46422 - RNA, 32 nt, Homo Sapiens
cgaaguguacggcagugccaucugguggcaag

SEQ ID NO: 46423 - RNA, 32 nt, Homo Sapiens
uaauuauuccacucaauaugugauuuuuguga

SEQ ID NO: 46424 - RNA, 31 nt, Homo Sapiens
guauuucuugguagagaagcaguuaguaaca

SEQ ID NO: 46425 - RNA, 32 nt, Homo Sapiens
uccuggccauggcuguccuggucgccaguacu

SEQ ID NO: 46426 - RNA, 32 nt, Homo Sapiens
gcuucuuccuuuccagucuggaugccuuuuau

SEQ ID NO: 46427 - RNA, 32 nt, Homo Sapiens
gugugcguguggaguccggacucgugggagac

SEQ ID NO: 46428 - RNA, 32 nt, Homo Sapiens
ugauuuuaauccuguauauaaaauaaaaaguc

SEQ ID NO: 46429 - RNA, 32 nt, Homo Sapiens
gucgccgcccgcgggcgcggcugguguucaua

SEQ ID NO: 46430 - RNA, 32 nt, Homo Sapiens
cggacguggagaucaacuacucucucaucgag

SEQ ID NO: 46431 - RNA, 32 nt, Homo Sapiens
gaugacucuguaaagacucuccaggccaucuc

SEQ ID NO: 46432 - RNA, 32 nt, Homo Sapiens
aauaaaaugcaaaugaaucauuguuaacacag

SEQ ID NO: 46433 - RNA, 32 nt, Homo Sapiens
aaauuaacagcaguaauguaaaaaagacugag

SEQ ID NO: 46434 - RNA, 32 nt, Homo Sapiens
caaaagaagaucugacagcuccuauauaccuu

SEQ ID NO: 46435 - RNA, 32 nt, Homo Sapiens
aaucucccaccaaggcuguaccucuggaggag

SEQ ID NO: 46436 - RNA, 31 nt, Homo Sapiens
ggagcgugugcggaggucagagccugaugcc

SEQ ID NO: 46437 - RNA, 32 nt, Homo Sapiens
cucucgccaauauuguggcuccccucagccgc

SEQ ID NO: 46438 - RNA, 32 nt, Homo Sapiens
cuuugccuggcucuggcaaggacucgcaacaa

SEQ ID NO: 46439 - RNA, 32 nt, Homo Sapiens
uccugccagcucugcugccaccucugacaggu

SEQ ID NO: 46440 - RNA, 32 nt, Homo Sapiens
aaacuggacagugcacaagggcccagaacaac

SEQ ID NO: 46441 - RNA, 32 nt, Homo Sapiens
uguuuuuuuuuuucuuuuugguauuaagucca

SEQ ID NO: 46442 - RNA, 32 nt, Homo Sapiens
uugcaucucuucacgugcaggcugggaccagc

SEQ ID NO: 46443 - RNA, 32 nt, Homo Sapiens
ccagaaggagacaacaaugucccugcuacccg

SEQ ID NO: 46444 - RNA, 32 nt, Homo Sapiens
gggccuggugccuggggaccugcugaagagaa

SEQ ID NO: 46445 - RNA, 32 nt, Homo Sapiens
ccuuguuuucacaacuaggauaaaaauaucug

SEQ ID NO: 46446 - RNA, 32 nt, Homo Sapiens
uguugcacucugaaauaagugauuuaaaaaga

SEQ ID NO: 46447 - RNA, 32 nt, Homo Sapiens
gauucacugcugcucagcauggcucagaccaa

SEQ ID NO: 46448 - RNA, 32 nt, Homo Sapiens
caguuguaauuuccucuuggaaaaagcgccaa

SEQ ID NO: 46449 - RNA, 29 nt, Homo Sapiens
gcacugaugaagauguggcaggagaaaga

SEQ ID NO: 46450 - RNA, 32 nt, Homo Sapiens
uccaaucaaaagacagauuggcaaaauuaggg

SEQ ID NO: 46451 - RNA, 32 nt, Homo Sapiens
guuuccuaagugagagagagccuggcugaagc

SEQ ID NO: 46452 - RNA, 32 nt, Homo Sapiens
uuggccuuagaggaaacagaucaugggaauuu

SEQ ID NO: 46453 - RNA, 32 nt, Homo Sapiens
ccaugcccuagccccaggucuagccgggccca

SEQ ID NO: 46454 - RNA, 32 nt, Homo Sapiens
uggaauuaaucauauuuaaaucuuacuuuaag

SEQ ID NO: 46455 - RNA, 32 nt, Homo Sapiens
gauucggcccgacgagcuccgcuuucgcuaca

SEQ ID NO: 46456 - RNA, 32 nt, Homo Sapiens
cucugggggcgguggggugcguggggguggca

SEQ ID NO: 46457 - RNA, 32 nt, Homo Sapiens
agugggagaaacucggcugugcuuuguggggg

SEQ ID NO: 46458 - RNA, 32 nt, Homo Sapiens
aggcgcugggaggggcaaaaccauacggaugc

SEQ ID NO: 46459 - RNA, 32 nt, Homo Sapiens
uggaggcucccucccuuggccgucccaauaga

SEQ ID NO: 46460 - RNA, 28 nt, Homo Sapiens
gcaaugucuucccagcagcagcagcggc

SEQ ID NO: 46461 - RNA, 32 nt, Homo Sapiens
gaagccauagacgagacguagguagccguagu

SEQ ID NO: 46462 - RNA, 32 nt, Homo Sapiens
gguuuuacuguaaauacuaaaauugaguucca

SEQ ID NO: 46463 - RNA, 32 nt, Homo Sapiens
ucugguucggcccaccucugaagguuccagaa

SEQ ID NO: 46464 - RNA, 32 nt, Homo Sapiens
uacuuuggggaaauaaagugccuuacugacug

SEQ ID NO: 46465 - RNA, 32 nt, Homo Sapiens
gugucuuugcuguucuucagacuccauuuaua

SEQ ID NO: 46466 - RNA, 32 nt, Homo Sapiens
ccacuccagagguagcagcauccuugggggaa

SEQ ID NO: 46467 - RNA, 32 nt, Homo Sapiens
acuucaagcuuuucuuuuuuuguccacguauc

SEQ ID NO: 46468 - RNA, 32 nt, Homo Sapiens
agcggccgcccuuuugaguaccucuguccagg

SEQ ID NO: 46469 - RNA, 32 nt, Homo Sapiens
caaauguucauuuauucauaucauugaauaca

SEQ ID NO: 46470 - RNA, 32 nt, Homo Sapiens
caacacgagucaggcccaacccgcccuggaaa

SEQ ID NO: 46471 - RNA, 32 nt, Homo Sapiens
cggccgggaagaggaaagucgcggcgggggcg

SEQ ID NO: 46472 - RNA, 32 nt, Homo Sapiens
ucccagcuacucuggaggcugaggcaggaaga

SEQ ID NO: 46473 - RNA, 32 nt, Homo Sapiens
aaaacaaaacaaagcaaaauauugaugaucag

SEQ ID NO: 46474 - RNA, 32 nt, Homo Sapiens
augucagugcaggcccaggcccgcccccagau

SEQ ID NO: 46475 - RNA, 32 nt, Homo Sapiens
aaccuugcauuaccacuggucuggccacguuu

SEQ ID NO: 46476 - RNA, 32 nt, Homo Sapiens
uauucaguccucgucgggcucccuuugaccuu

SEQ ID NO: 46477 - RNA, 32 nt, Homo Sapiens
aacccagcgggcccuuagcacgcgccccagcg

SEQ ID NO: 46478 - RNA, 30 nt, Homo Sapiens
acgaaggccgcgcagccgggucccagccuu

SEQ ID NO: 46479 - RNA, 32 nt, Homo Sapiens
aauugccugaagaucacacauucagacuguug

SEQ ID NO: 46480 - RNA, 32 nt, Homo Sapiens
cuagaugguguucucuuugauuguagguccuu

SEQ ID NO: 46481 - RNA, 32 nt, Homo Sapiens
uagaauauuucugcagauaauuucuauugaaa

SEQ ID NO: 46482 - RNA, 32 nt, Homo Sapiens
acugcauugaaggaaaucacacugcaaugaga

SEQ ID NO: 46483 - RNA, 32 nt, Homo Sapiens
uggcugcauggccagcacugccgacuugaugg

SEQ ID NO: 46484 - RNA, 32 nt, Homo Sapiens
augaggucaggagaucgagaccguccuggccg

SEQ ID NO: 46485 - RNA, 32 nt, Homo Sapiens
aaaccaauauuuagugguaaauccauuccugg

SEQ ID NO: 46486 - RNA, 32 nt, Homo Sapiens
caagccacauucaauugauaggaugaaaaaau

SEQ ID NO: 46487 - RNA, 32 nt, Homo Sapiens
agcuguuauauuaguuguaaccaguaguauuc

SEQ ID NO: 46488 - RNA, 32 nt, Homo Sapiens
uauccugaugcuuucccucccccugcccccuc

SEQ ID NO: 46489 - RNA, 32 nt, Homo Sapiens
ccgauuccuggcuuuugcaaggcuguggucgg

SEQ ID NO: 46490 - RNA, 32 nt, Homo Sapiens
uuucuuaacuaaaauuacuuuuuacuuuaagc

SEQ ID NO: 46491 - RNA, 32 nt, Homo Sapiens
cuaaucggcugauguuacucucacuugaugug

SEQ ID NO: 46492 - RNA, 32 nt, Homo Sapiens
ccuauguggcagcuggggagcagcugagaugu

SEQ ID NO: 46493 - RNA, 27 nt, Homo Sapiens
caauccaccugcuucagccuuccuagu

SEQ ID NO: 46494 - RNA, 32 nt, Homo Sapiens
cccuccaggaggguccuggggugggccagaug

SEQ ID NO: 46495 - RNA, 32 nt, Homo Sapiens
gagccagagccaccaugcaaccccaggacagu

SEQ ID NO: 46496 - RNA, 32 nt, Homo Sapiens
cugaagucaggaguucgagaucagcauggcca

SEQ ID NO: 46497 - RNA, 32 nt, Homo Sapiens
aguucaugcaccuucuugccaagccucagucu

SEQ ID NO: 46498 - RNA, 32 nt, Homo Sapiens
ggcccgaggaggaaaaggauugccaaggcucc

SEQ ID NO: 46499 - RNA, 32 nt, Homo Sapiens
auggccccugaacggguaucuaggcccacccu

SEQ ID NO: 46500 - RNA, 32 nt, Homo Sapiens
uauugcaucagacagcucuguagccugacaag

SEQ ID NO: 46501 - RNA, 32 nt, Homo Sapiens
ggacagcuuccucacaccccugucccacccac

SEQ ID NO: 46502 - RNA, 32 nt, Homo Sapiens
ggcgaggcgggugcugaggucucagggaagcu

SEQ ID NO: 46503 - RNA, 32 nt, Homo Sapiens
aaagcgcccucccgccucccggcgcuccccau

SEQ ID NO: 46504 - RNA, 32 nt, Homo Sapiens
gagggcaggaggagggccuggguuuggguucu

SEQ ID NO: 46505 - RNA, 32 nt, Homo Sapiens
cauggacguaguagaaggaaauucaaggccac

SEQ ID NO: 46506 - RNA, 32 nt, Homo Sapiens
ugugauauuggaaauagccuaucccuccugac

SEQ ID NO: 46507 - RNA, 32 nt, Homo Sapiens
uaccuggagaaagucuuuuccuuauuuucaau

SEQ ID NO: 46508 - RNA, 31 nt, Homo Sapiens
uuuaaaacacggagaggggcgcccuccugac

SEQ ID NO: 46509 - RNA, 32 nt, Homo Sapiens
uaguuggagucugucccugucuugguguuaau

SEQ ID NO: 46510 - RNA, 32 nt, Homo Sapiens
gaaaagggugcuucggucguuccgauggcagu

SEQ ID NO: 46511 - RNA, 31 nt, Homo Sapiens
cacgucgggguaccucugccccgcgcccacc

SEQ ID NO: 46512 - RNA, 32 nt, Homo Sapiens
guccaggugcagcacagccagcuccuugagga

SEQ ID NO: 46513 - RNA, 32 nt, Homo Sapiens
uguggcacuggccugcagcauacucuguauau

SEQ ID NO: 46514 - RNA, 32 nt, Homo Sapiens
ugugaaaaucucuuuucuacagauuuuccagg

SEQ ID NO: 46515 - RNA, 32 nt, Homo Sapiens
uguucaccacuggucguucagcagccacgaca

SEQ ID NO: 46516 - RNA, 32 nt, Homo Sapiens
gacccacccguccacacccucugagucacucc

SEQ ID NO: 46517 - RNA, 32 nt, Homo Sapiens
ucauagaagcagugugcaggugaggcaaagug

SEQ ID NO: 46518 - RNA, 32 nt, Homo Sapiens
uuccagugcaaugaaauucauaugguguccca

SEQ ID NO: 46519 - RNA, 31 nt, Homo Sapiens
aaagcugguccccagaaagcaggacagaaag

SEQ ID NO: 46520 - RNA, 31 nt, Homo Sapiens
gugauucagagccacagucuaacugagcacc

SEQ ID NO: 46521 - RNA, 32 nt, Homo Sapiens
uacaaaguuagccaggcauaguggugcaugcc

SEQ ID NO: 46522 - RNA, 32 nt, Homo Sapiens
gggugcugggaagggaggguugaaaccaccgu

SEQ ID NO: 46523 - RNA, 32 nt, Homo Sapiens
ccuaagaaggcaccucucuggguugaagggca

SEQ ID NO: 46524 - RNA, 30 nt, Homo Sapiens
cgccgagcccccgugcccgccacgccugcu

SEQ ID NO: 46525 - RNA, 30 nt, Homo Sapiens
cgccacagcaggcgccucgggucccagaug

SEQ ID NO: 46526 - RNA, 32 nt, Homo Sapiens
uugggggcucggcaaggcaagcaagacacacc

SEQ ID NO: 46527 - RNA, 32 nt, Homo Sapiens
ucggggccuuggaggcgugacuuuccccucgg

SEQ ID NO: 46528 - RNA, 32 nt, Homo Sapiens
ggaccccggagaagauuuuggagcaccuuuug

SEQ ID NO: 46529 - RNA, 32 nt, Homo Sapiens
auguccgugccauuguaaauguuguagagaug

SEQ ID NO: 46530 - RNA, 32 nt, Homo Sapiens
ugcuuucugcucuucugggaauuucucacacu

SEQ ID NO: 46531 - RNA, 32 nt, Homo Sapiens
cucucuagacugccaccagcuucucucaguag

SEQ ID NO: 46532 - RNA, 23 nt, Homo Sapiens
gcuucaugaaaagccagaaggcu

SEQ ID NO: 46533 - RNA, 32 nt, Homo Sapiens
aauccaguccucaaaacugaaaguugacaggu

SEQ ID NO: 46534 - RNA, 27 nt, Homo Sapiens
ucagugucugucuucagcccugcugaa

SEQ ID NO: 46535 - RNA, 32 nt, Homo Sapiens
cuuugaugucugggugcauggcauucagggac

SEQ ID NO: 46536 - RNA, 32 nt, Homo Sapiens
agcaggaggaggagaccccacagcaccgggug

SEQ ID NO: 46537 - RNA, 32 nt, Homo Sapiens
agggagaagacuugguggggcuggagcacacc

SEQ ID NO: 46538 - RNA, 32 nt, Homo Sapiens
uagcuacuuaggaguagcuaggacuacaggcc

SEQ ID NO: 46539 - RNA, 32 nt, Homo Sapiens
uucaauauuaaacuuguuauucuuacauugga

SEQ ID NO: 46540 - RNA, 32 nt, Homo Sapiens
aagaugacaacuaggauuuagcaauugaguug

SEQ ID NO: 46541 - RNA, 32 nt, Homo Sapiens
cuaaugcuuguguccuuauacucuauuauaua

SEQ ID NO: 46542 - RNA, 32 nt, Homo Sapiens
agauuauguuuuuucuuaaaguuagggaggcu

SEQ ID NO: 46543 - RNA, 32 nt, Homo Sapiens
cgcugggaaggggugaaguguguggcugggcg

SEQ ID NO: 46544 - RNA, 32 nt, Homo Sapiens
ccaguagcauuuuauguacaaaacagaaguca

SEQ ID NO: 46545 - RNA, 32 nt, Homo Sapiens
ccuagaagaacaaggugcaggaccccgugcug

SEQ ID NO: 46546 - RNA, 32 nt, Homo Sapiens
uuuuaguagagacaggguuuugccauguugcc

SEQ ID NO: 46547 - RNA, 32 nt, Homo Sapiens
uggcaugcaccuguagucccagcuacucaagu

SEQ ID NO: 46548 - RNA, 32 nt, Homo Sapiens
auuccagaucuauuuuucuaccagagagagga

SEQ ID NO: 46549 - RNA, 32 nt, Homo Sapiens
ucucuccuccgucuuccaguggccgcucucuu

SEQ ID NO: 46550 - RNA, 32 nt, Homo Sapiens
cacaaguguuugucuuugucugaaugagaagu

SEQ ID NO: 46551 - RNA, 32 nt, Homo Sapiens
uuucaagugaagugugcugaugaaguccucua

SEQ ID NO: 46552 - RNA, 32 nt, Homo Sapiens
gcuucauuuucuacuagcaccuaucauaaugg

SEQ ID NO: 46553 - RNA, 32 nt, Homo Sapiens
ggacauucaaaguuuaaaauaguguucaaauu

SEQ ID NO: 46554 - RNA, 32 nt, Homo Sapiens
uagaggauugaugggaaagguaugaagcuaga

SEQ ID NO: 46555 - RNA, 32 nt, Homo Sapiens
uguguuggaaaacugcuuucccuuauguucac

SEQ ID NO: 46556 - RNA, 32 nt, Homo Sapiens
gcaaccucgaggccugggccuacgagcugcau

SEQ ID NO: 46557 - RNA, 32 nt, Homo Sapiens
ugcagaagccccacugcaugaaggccugagug

SEQ ID NO: 46558 - RNA, 32 nt, Homo Sapiens
cuucugcucccuccccagcugguuugggcuca

SEQ ID NO: 46559 - RNA, 32 nt, Homo Sapiens
uuugcugguuuaguuucugauguucgguugug

SEQ ID NO: 46560 - RNA, 32 nt, Homo Sapiens
ugcuucuucucaaagcacuguugagaaggaga

SEQ ID NO: 46561 - RNA, 32 nt, Homo Sapiens
gugcaggccugccugcugcaagcuuucuagag

SEQ ID NO: 46562 - RNA, 32 nt, Homo Sapiens
uuugccucaaucuccuauugccugcaggggag

SEQ ID NO: 46563 - RNA, 32 nt, Homo Sapiens
agcaccagccuuggggacccuggaccacuauc

SEQ ID NO: 46564 - RNA, 32 nt, Homo Sapiens
ggugcuuccaaauuggcccuguaggcaaauuc

SEQ ID NO: 46565 - RNA, 28 nt, Homo Sapiens
cauggaguggcuauucagcauuggcagu

SEQ ID NO: 46566 - RNA, 32 nt, Homo Sapiens
cccuccaggagccuuccuuccucccccaauga

SEQ ID NO: 46567 - RNA, 32 nt, Homo Sapiens
augaagcaguugcucaaauguuguucaacacc

SEQ ID NO: 46568 - RNA, 32 nt, Homo Sapiens
auuuauaacaauaauauuuuauggggcgcuua

SEQ ID NO: 46569 - RNA, 32 nt, Homo Sapiens
gggaccuggggcuguccucgcugcugagaaga

SEQ ID NO: 46570 - RNA, 32 nt, Homo Sapiens
caguguuuaacauaauaauguuuuaaagacuu

SEQ ID NO: 46571 - RNA, 32 nt, Homo Sapiens
ugguauucacuggcagguuucagacauuuaga

SEQ ID NO: 46572 - RNA, 32 nt, Homo Sapiens
cuuuuuugcuuccgcauaacacuuccuaucuu

SEQ ID NO: 46573 - RNA, 32 nt, Homo Sapiens
gcugggcaguggcgggcagagccccaugcugu

SEQ ID NO: 46574 - RNA, 32 nt, Homo Sapiens
uuaccacggcaaccccugcagcuccucugccu

SEQ ID NO: 46575 - RNA, 30 nt, Homo Sapiens
gcuccagggacagaugaugagucucaaacg

SEQ ID NO: 46576 - RNA, 32 nt, Homo Sapiens
ugcaaccgccggcgcgcaccggcgcgcggcca

SEQ ID NO: 46577 - RNA, 32 nt, Homo Sapiens
cuuauguuucaauuuuccugugguuagaaaaa

SEQ ID NO: 46578 - RNA, 32 nt, Homo Sapiens
gcucuggaggcccagggcaggggugggcgugu

SEQ ID NO: 46579 - RNA, 32 nt, Homo Sapiens
aaccauguuuuaggaagaacgugcacacauag

SEQ ID NO: 46580 - RNA, 32 nt, Homo Sapiens
ucaucaacucagagacagagccaggggcugcu

SEQ ID NO: 46581 - RNA, 32 nt, Homo Sapiens
aggggacggagggcgagaagggcuuucucagg

SEQ ID NO: 46582 - RNA, 32 nt, Homo Sapiens
cgucuuuggccagucuugcgggcccucgguga

SEQ ID NO: 46583 - RNA, 32 nt, Homo Sapiens
uccagagaaauguggacuuuucauauuaugug

SEQ ID NO: 46584 - RNA, 32 nt, Homo Sapiens
aucuucuuugguuuccuguaucuuuuuaauca

SEQ ID NO: 46585 - RNA, 31 nt, Homo Sapiens
cucucucacuccgagcaguccacuguugcug

SEQ ID NO: 46586 - RNA, 32 nt, Homo Sapiens
uacugagcuggggauuaaaguagagguaacug

SEQ ID NO: 46587 - RNA, 32 nt, Homo Sapiens
cacagacgcggacagcgccgggacucgccgcc

SEQ ID NO: 46588 - RNA, 32 nt, Homo Sapiens
gaacagugaagugcagcagaugaugcuucgag

SEQ ID NO: 46589 - RNA, 32 nt, Homo Sapiens
aaaugcauuauuuagucaauuguuuaauguug

SEQ ID NO: 46590 - RNA, 32 nt, Homo Sapiens
guggugauguuuuugggacaguuucuuggcaa

SEQ ID NO: 46591 - RNA, 32 nt, Homo Sapiens
guucugaauguuagauggaaaagcagaggagc

SEQ ID NO: 46592 - RNA, 32 nt, Homo Sapiens
acuccugcagguggcccggccugagguuccca

SEQ ID NO: 46593 - RNA, 32 nt, Homo Sapiens
uuuguaagggaauuuucccccuuugcuuggca

SEQ ID NO: 46594 - RNA, 32 nt, Homo Sapiens
gcucauuggucucaaucccagccuggaagcag

SEQ ID NO: 46595 - RNA, 32 nt, Homo Sapiens
caguuuuaagguuuuaauucauuugaaucacu

SEQ ID NO: 46596 - RNA, 32 nt, Homo Sapiens
cagcacccacuaggcuccagaucggggccuca

SEQ ID NO: 46597 - RNA, 32 nt, Homo Sapiens
gcacccgcgggccuccgcugcccgacgcuucu

SEQ ID NO: 46598 - RNA, 32 nt, Homo Sapiens
gaggccgagaagggugggcggcggcgggcggg

SEQ ID NO: 46599 - RNA, 32 nt, Homo Sapiens
gcaccugccucccaggccauucugacguguac

SEQ ID NO: 46600 - RNA, 31 nt, Homo Sapiens
cgucggagggcggcggcugccgacggcggga

SEQ ID NO: 46601 - RNA, 32 nt, Homo Sapiens
gucauacagauccugaugugcagcagcaaauu

SEQ ID NO: 46602 - RNA, 32 nt, Homo Sapiens
uuaauaucuagucauuaaacugcacaagugca

SEQ ID NO: 46603 - RNA, 32 nt, Homo Sapiens
ccacguacucauagcaccuggagccucuggag

SEQ ID NO: 46604 - RNA, 32 nt, Homo Sapiens
acucaaacuauagugauauaucaguguuugag

SEQ ID NO: 46605 - RNA, 32 nt, Homo Sapiens
acucuaucagcauuguuucaaaauagucauuu

SEQ ID NO: 46606 - RNA, 32 nt, Homo Sapiens
agacccagggccauccucggagcagccgggag

SEQ ID NO: 46607 - RNA, 32 nt, Homo Sapiens
cagggugugcccagcccggcccuggcucaggg

SEQ ID NO: 46608 - RNA, 32 nt, Homo Sapiens
gaccagugcaugugaggccggugcuggaucac

SEQ ID NO: 46609 - RNA, 32 nt, Homo Sapiens
ggcucccugccaggcucccugccaccccucac

SEQ ID NO: 46610 - RNA, 32 nt, Homo Sapiens
cguagcaaucuggcuauuuuggacaaagggaa

SEQ ID NO: 46611 - RNA, 31 nt, Homo Sapiens
cuucucuugcacugccuucugcgcuaacacc

SEQ ID NO: 46612 - RNA, 32 nt, Homo Sapiens
cggcggaguucgcagcuagcgagggcgggccg

SEQ ID NO: 46613 - RNA, 32 nt, Homo Sapiens
gugcugcccaaggcuuugggagcccaccccuu

SEQ ID NO: 46614 - RNA, 32 nt, Homo Sapiens
agucaaauuaaaucaaccaacaaaaagcaggg

SEQ ID NO: 46615 - RNA, 32 nt, Homo Sapiens
ucaaucccacccagcaagagacacuggcucuc

SEQ ID NO: 46616 - RNA, 32 nt, Homo Sapiens
cccccgucccaccuuuuuccugugcucuaggu

SEQ ID NO: 46617 - RNA, 31 nt, Homo Sapiens
gaauagaacauauuuaacuauuuguuagcuu

SEQ ID NO: 46618 - RNA, 32 nt, Homo Sapiens
ggguccucucagucuuuccccucccccaacga

SEQ ID NO: 46619 - RNA, 32 nt, Homo Sapiens
uuagcccuuucugagcagaaaagaaucaaaca

SEQ ID NO: 46620 - RNA, 32 nt, Homo Sapiens
agacagcccagggaagagcggcagccugagga

SEQ ID NO: 46621 - RNA, 32 nt, Homo Sapiens
cagcauaacucaguggguuuggagcacaggug

SEQ ID NO: 46622 - RNA, 32 nt, Homo Sapiens
uuauuuuucucuucuuuuaagucagucuguua

SEQ ID NO: 46623 - RNA, 32 nt, Homo Sapiens
ggaagcaggaccaggccuaggaucuccccagc

SEQ ID NO: 46624 - RNA, 32 nt, Homo Sapiens
ugcaauaacgagccagcauuuacuauguauuu

SEQ ID NO: 46625 - RNA, 32 nt, Homo Sapiens
ucaggaaaacaguuuacaugagaaaaggcaag

SEQ ID NO: 46626 - RNA, 32 nt, Homo Sapiens
ggaagccgcgguugaaugugccaugcccucuc

SEQ ID NO: 46627 - RNA, 32 nt, Homo Sapiens
cagcaucuacucaagguagaugacugacuggg

SEQ ID NO: 46628 - RNA, 32 nt, Homo Sapiens
gcacugccugggcacaccccaacaucccaggc

SEQ ID NO: 46629 - RNA, 32 nt, Homo Sapiens
guggcaggaaccgaaacccggagcggccgaag

SEQ ID NO: 46630 - RNA, 32 nt, Homo Sapiens
ugaugaagauaaagaugagagcagacaucaga

SEQ ID NO: 46631 - RNA, 32 nt, Homo Sapiens
cuaagcugcuggggggcgccaugggccgcuac

SEQ ID NO: 46632 - RNA, 32 nt, Homo Sapiens
aguugguggacauuuggguucuuucuaccuuu

SEQ ID NO: 46633 - RNA, 29 nt, Homo Sapiens
aaaaauggcuccugggcagcaggcuaugg

SEQ ID NO: 46634 - RNA, 32 nt, Homo Sapiens
uugaauuuaagagugcugccccugcccggcgc

SEQ ID NO: 46635 - RNA, 32 nt, Homo Sapiens
cugagcugcccccagggucccucccccgccgc

SEQ ID NO: 46636 - RNA, 32 nt, Homo Sapiens
gagccucugugcccccaucacccucguuucca

SEQ ID NO: 46637 - RNA, 32 nt, Homo Sapiens
uggagauauggcauuuaaauucaugagauugg

SEQ ID NO: 46638 - RNA, 32 nt, Homo Sapiens
ggagguggcaggcagggguucuccucaggguu

SEQ ID NO: 46639 - RNA, 32 nt, Homo Sapiens
aaaucagcccuccauguacgcagguuucgccc

SEQ ID NO: 46640 - RNA, 32 nt, Homo Sapiens
ccauuuguacaguuggagguguuccuaggugg

SEQ ID NO: 46641 - RNA, 32 nt, Homo Sapiens
cgcuuaaaacaucguguggugcuaaucucugc

SEQ ID NO: 46642 - RNA, 32 nt, Homo Sapiens
uccauacuuagcaaccaacaaacaaauugaac

SEQ ID NO: 46643 - RNA, 32 nt, Homo Sapiens
aguauuaaggauggcagaacuaacacucaaga

SEQ ID NO: 46644 - RNA, 32 nt, Homo Sapiens
cccugggcugggccuucucaccccuuccugug

SEQ ID NO: 46645 - RNA, 32 nt, Homo Sapiens
ugauuuucgguauucacaguuuuuauauggaa

SEQ ID NO: 46646 - RNA, 32 nt, Homo Sapiens
uaaucuugaaaggcccaagggccuguccccau

SEQ ID NO: 46647 - RNA, 32 nt, Homo Sapiens
augaggucaggagaucgagaccauccuggcua

SEQ ID NO: 46648 - RNA, 32 nt, Homo Sapiens
cuacaagaugaccacugaggauuacaagaagc

SEQ ID NO: 46649 - RNA, 31 nt, Homo Sapiens
aaucaacagccccagagccacuuggagggag

SEQ ID NO: 46650 - RNA, 32 nt, Homo Sapiens
uaacuaaagauuaaauucaaaggacuuucaga

SEQ ID NO: 46651 - RNA, 28 nt, Homo Sapiens
acacagaaagauucaguagcugagaacu

SEQ ID NO: 46652 - RNA, 32 nt, Homo Sapiens
cauggccguggcgcugucugcgccggcgaucc

SEQ ID NO: 46653 - RNA, 29 nt, Homo Sapiens
uuccaaauauguaugcaccucaaggucau

SEQ ID NO: 46654 - RNA, 32 nt, Homo Sapiens
cacuccugacugcccggcacagaugcuccagg

SEQ ID NO: 46655 - RNA, 32 nt, Homo Sapiens
ccccaguguucuacgccaucccauagaccuuu

SEQ ID NO: 46656 - RNA, 32 nt, Homo Sapiens
ugcggguguuugcaggagguugcaguacucgc

SEQ ID NO: 46657 - RNA, 32 nt, Homo Sapiens
ucccagcacuuuggcaggccgaggcaggugga

SEQ ID NO: 46658 - RNA, 32 nt, Homo Sapiens
uacagacgaaacaggaguaggugugaguugau

SEQ ID NO: 46659 - RNA, 32 nt, Homo Sapiens
ucuccaggaaaaagagagagccaucgaggcua

SEQ ID NO: 46660 - RNA, 32 nt, Homo Sapiens
guugccaaccacccuccagaaaguuuguacca

SEQ ID NO: 46661 - RNA, 32 nt, Homo Sapiens
uuguuccuuuuuaaauucugaugcuugaauuc

SEQ ID NO: 46662 - RNA, 32 nt, Homo Sapiens
aucuccagcauccaaugaguguccagcuucca

SEQ ID NO: 46663 - RNA, 32 nt, Homo Sapiens
uaguggaaaaggacaaggucuguaccuaacag

SEQ ID NO: 46664 - RNA, 32 nt, Homo Sapiens
auacuaaaaauguagaauaaagacuauuuuga

SEQ ID NO: 46665 - RNA, 32 nt, Homo Sapiens
agccucugccagcaaugagcugucccccuccc

SEQ ID NO: 46666 - RNA, 32 nt, Homo Sapiens
agcgcuccuccugaccacggacaugucgucac

SEQ ID NO: 46667 - RNA, 32 nt, Homo Sapiens
aauauaaagagaauguuacauuuuaucccuuu

SEQ ID NO: 46668 - RNA, 32 nt, Homo Sapiens
ccaguauguccucuccucuagacccagacaua

SEQ ID NO: 46669 - RNA, 32 nt, Homo Sapiens
cugggcaggaggcuacaguucucccuaaggau

SEQ ID NO: 46670 - RNA, 31 nt, Homo Sapiens
aaagcucggcagauuaugaaccaguuuggcc

SEQ ID NO: 46671 - RNA, 32 nt, Homo Sapiens
aaccaugaaguggcugcugcugcugggucugg

SEQ ID NO: 46672 - RNA, 32 nt, Homo Sapiens
cucaaugcuauuucuaguuucucagagucauc

SEQ ID NO: 46673 - RNA, 32 nt, Homo Sapiens
acuuuuaaaaauuuaaacauuggauuaggcag

SEQ ID NO: 46674 - RNA, 32 nt, Homo Sapiens
gcaaguuuucuuaugaaaauaccuuugugcuu

SEQ ID NO: 46675 - RNA, 32 nt, Homo Sapiens
augaaccuggaaaauucuauuacguuuauuua

SEQ ID NO: 46676 - RNA, 32 nt, Homo Sapiens
ugccagcuggcucuuuuuuuuaauauuuuauu

SEQ ID NO: 46677 - RNA, 32 nt, Homo Sapiens
caacuguuuauaucaauuucuaauggauuugc

SEQ ID NO: 46678 - RNA, 32 nt, Homo Sapiens
ggguccuuuuaaaaacugaauuuguacuaaau

SEQ ID NO: 46679 - RNA, 32 nt, Homo Sapiens
gacugccucccucucuuccgggagcuggugac

SEQ ID NO: 46680 - RNA, 32 nt, Homo Sapiens
ggcccucuguguaugccugggauccuuccaag

SEQ ID NO: 46681 - RNA, 32 nt, Homo Sapiens
uggccagaggggcagcucagugcucugcagag

SEQ ID NO: 46682 - RNA, 30 nt, Homo Sapiens
gcugaguggggcgcgcgaagggcggcgaag

SEQ ID NO: 46683 - RNA, 32 nt, Homo Sapiens
auucaggcaaacguccacaaaggucacaggca

SEQ ID NO: 46684 - RNA, 30 nt, Homo Sapiens
cuaguucauguaaugggggaacacaggcag

SEQ ID NO: 46685 - RNA, 32 nt, Homo Sapiens
ucccagcucuccugccuguccgccauguuuuc

SEQ ID NO: 46686 - RNA, 32 nt, Homo Sapiens
uacgcgcguggccagcaaagacugcucgaugg

SEQ ID NO: 46687 - RNA, 32 nt, Homo Sapiens
caagucuuuugacaugcugaggucuggcagga

SEQ ID NO: 46688 - RNA, 32 nt, Homo Sapiens
ggcuucgagccucuccucuccgucuccaaagc

SEQ ID NO: 46689 - RNA, 32 nt, Homo Sapiens
cuauaucuauauauuuuuaaucaucuacaugu

SEQ ID NO: 46690 - RNA, 32 nt, Homo Sapiens
ccggacccgcggccgaccccagacccgcugcc

SEQ ID NO: 46691 - RNA, 32 nt, Homo Sapiens
ucuccgagccgcauccugggcuugugggaauc

SEQ ID NO: 46692 - RNA, 32 nt, Homo Sapiens
ccuugggcggcggcgagcgcgcgggccgccau

SEQ ID NO: 46693 - RNA, 32 nt, Homo Sapiens
cacucuguucuucucaaggccuggccagcccu

SEQ ID NO: 46694 - RNA, 32 nt, Homo Sapiens
ugaaaagguucauuuuaagagauuauauaaua

SEQ ID NO: 46695 - RNA, 32 nt, Homo Sapiens
aaugugaucuaguguaauggaagaccuuugag

SEQ ID NO: 46696 - RNA, 32 nt, Homo Sapiens
gagcagaaaaucaaucacuuucucuuugcuuu

SEQ ID NO: 46697 - RNA, 29 nt, Homo Sapiens
gagcuguaaggaauauauuuuuuaaaauu

SEQ ID NO: 46698 - RNA, 32 nt, Homo Sapiens
ccccuccuccccagcccaaccucgggccugcg

SEQ ID NO: 46699 - RNA, 32 nt, Homo Sapiens
guggcuggaaaagcauuuguaggaaguuagau

SEQ ID NO: 46700 - RNA, 32 nt, Homo Sapiens
gugcaacugugagggcagcugcugccuggccc

SEQ ID NO: 46701 - RNA, 32 nt, Homo Sapiens
cugacuaaagauugucuuaaguagcagcccag

SEQ ID NO: 46702 - RNA, 32 nt, Homo Sapiens
cgucaaggauauacaauguagauucuuuuauu

SEQ ID NO: 46703 - RNA, 32 nt, Homo Sapiens
uaugaagagaucuuggaaauagaggccaugug

SEQ ID NO: 46704 - RNA, 32 nt, Homo Sapiens
acuuagucacuuucuuuaggaaugauucaguu

SEQ ID NO: 46705 - RNA, 32 nt, Homo Sapiens
uuguuuuucuuacccuuuuggacauuucuuug

SEQ ID NO: 46706 - RNA, 32 nt, Homo Sapiens
augugugugucuaugagugaguuugagugugc

SEQ ID NO: 46707 - RNA, 32 nt, Homo Sapiens
ccuggugguagugcagcucaucugaugccugg

SEQ ID NO: 46708 - RNA, 32 nt, Homo Sapiens
agacccugugccccuucuggggugaggaguac

SEQ ID NO: 46709 - RNA, 32 nt, Homo Sapiens
ccucccgccucccgccacccugucucaguacc

SEQ ID NO: 46710 - RNA, 32 nt, Homo Sapiens
gggcucacagaagcucuugggcccuggcaucc

SEQ ID NO: 46711 - RNA, 32 nt, Homo Sapiens
aguggcagaauuaacauauuugccauaccuac

SEQ ID NO: 46712 - RNA, 32 nt, Homo Sapiens
uggcuggccauuuacuuccagcccuuaugagg

SEQ ID NO: 46713 - RNA, 32 nt, Homo Sapiens
ggcccacauaucuaucucuugccuucccccau

SEQ ID NO: 46714 - RNA, 32 nt, Homo Sapiens
guggugcggcucacuccgucccugcccaccug

SEQ ID NO: 46715 - RNA, 30 nt, Homo Sapiens
gaacaaaguaagcuugaugggcuggaacuu

SEQ ID NO: 46716 - RNA, 32 nt, Homo Sapiens
gagaaguuaaggaugccuucaaaauuuuuguu

SEQ ID NO: 46717 - RNA, 32 nt, Homo Sapiens
uggaaaacacuugauauuuuaucccuguugca

SEQ ID NO: 46718 - RNA, 32 nt, Homo Sapiens
auguguaaaacacuuagaaaggggccaggcau

SEQ ID NO: 46719 - RNA, 32 nt, Homo Sapiens
gcguagccgcuugggcgggcggccaguggcga

SEQ ID NO: 46720 - RNA, 32 nt, Homo Sapiens
auacuccuuucuggggagagaaugcucccuac

SEQ ID NO: 46721 - RNA, 32 nt, Homo Sapiens
agucaacaguaaaccacugaaaaaauauaugu

SEQ ID NO: 46722 - RNA, 32 nt, Homo Sapiens
aggacugauaauucuaucaaaaaucauuggaa

SEQ ID NO: 46723 - RNA, 32 nt, Homo Sapiens
cuggagaaaaggacagauuuaugcagcuauuu

SEQ ID NO: 46724 - RNA, 32 nt, Homo Sapiens
uacuuugggagucaaccccggcgugguggcug

SEQ ID NO: 46725 - RNA, 32 nt, Homo Sapiens
ccccggaguuggaagcgcguuacccgggucca

SEQ ID NO: 46726 - RNA, 32 nt, Homo Sapiens
gcagauuucugccuugaaauaccuguuucuuu

SEQ ID NO: 46727 - RNA, 32 nt, Homo Sapiens
ucuuuucuccuuucguacuccucccugagagu

SEQ ID NO: 46728 - RNA, 32 nt, Homo Sapiens
acaugaaggguggaagagcaucugauccagua

SEQ ID NO: 46729 - RNA, 32 nt, Homo Sapiens
uguauauggauaaacaacuugguuuuauuauc

SEQ ID NO: 46730 - RNA, 32 nt, Homo Sapiens
gaggaaucauggggccaaaaccaaagauuucc

SEQ ID NO: 46731 - RNA, 32 nt, Homo Sapiens
uuguaagacaauuuauuaauuugagaaaguca

SEQ ID NO: 46732 - RNA, 32 nt, Homo Sapiens
ucccgcuggugccuccugcucucuggagguac

SEQ ID NO: 46733 - RNA, 31 nt, Homo Sapiens
uuuuagagaaagaaaaauauuacaaauccca

SEQ ID NO: 46734 - RNA, 32 nt, Homo Sapiens
aucucauaauuucaugcacaaguugacugagc

SEQ ID NO: 46735 - RNA, 32 nt, Homo Sapiens
acuucgcugugaagauggcgucgggcagcggg

SEQ ID NO: 46736 - RNA, 32 nt, Homo Sapiens
uuucuaucuguaucuuugcaguuucuucguua

SEQ ID NO: 46737 - RNA, 32 nt, Homo Sapiens
uauaugaggaacaacacuuucaggaaauguuu

SEQ ID NO: 46738 - RNA, 32 nt, Homo Sapiens
guguacaacaauuuuaaugauucccuuguuca

SEQ ID NO: 46739 - RNA, 32 nt, Homo Sapiens
cagaaugacaacauugagcccacacugcaguu

SEQ ID NO: 46740 - RNA, 32 nt, Homo Sapiens
uuucccuggcuguguucaggauguugaagugc

SEQ ID NO: 46741 - RNA, 32 nt, Homo Sapiens
uuugaugggagaaagcuggagaucugaaccca

SEQ ID NO: 46742 - RNA, 32 nt, Homo Sapiens
gccuaggaccagccugugcaggucuaugaaga

SEQ ID NO: 46743 - RNA, 32 nt, Homo Sapiens
ggaggacgcggaagaggagccccggggguagc

SEQ ID NO: 46744 - RNA, 32 nt, Homo Sapiens
gaaguugaagauaguuuuuuaccucacuuuuu

SEQ ID NO: 46745 - RNA, 32 nt, Homo Sapiens
ucgcuguucccagccuuuuccaggcgugugac

SEQ ID NO: 46746 - RNA, 32 nt, Homo Sapiens
uuuuuguguuuuuucuuucuuagggcaucugu

SEQ ID NO: 46747 - RNA, 32 nt, Homo Sapiens
cugggcaguuuuauucuuucucucuacucguu

SEQ ID NO: 46748 - RNA, 32 nt, Homo Sapiens
aaacaaacuuugauauaugcauacaguagggu

SEQ ID NO: 46749 - RNA, 32 nt, Homo Sapiens
cuucccugccagcaagcugucugcggcucauc

SEQ ID NO: 46750 - RNA, 32 nt, Homo Sapiens
auuaucaggaagaucaaggcagcugguggaau

SEQ ID NO: 46751 - RNA, 32 nt, Homo Sapiens
aacugaauauccaucugggauaaaauaaaauu

SEQ ID NO: 46752 - RNA, 32 nt, Homo Sapiens
cuacccggccgcagcgcgcgagucacauggaa

SEQ ID NO: 46753 - RNA, 32 nt, Homo Sapiens
ugacgcccuggccugacgcccugcuucgucgc

SEQ ID NO: 46754 - RNA, 32 nt, Homo Sapiens
agacucggccccgccucugcgccgggcagcuu

SEQ ID NO: 46755 - RNA, 32 nt, Homo Sapiens
uaugacacauucaacucauggcacccaaaaag

SEQ ID NO: 46756 - RNA, 32 nt, Homo Sapiens
uuaagaauacuuaaaaugccugggauaguucu

SEQ ID NO: 46757 - RNA, 32 nt, Homo Sapiens
auaugccaauucuaaaaagagcuuaacauuag

SEQ ID NO: 46758 - RNA, 32 nt, Homo Sapiens
gaaagucaucccucacuguuaguaaggaagca

SEQ ID NO: 46759 - RNA, 32 nt, Homo Sapiens
auugauggacauuuggguugguuccaggucuu

SEQ ID NO: 46760 - RNA, 32 nt, Homo Sapiens
acuuguucuuugcagcuuaucaccuugugaau

SEQ ID NO: 46761 - RNA, 32 nt, Homo Sapiens
aaaaguauauauaaaauaucuaacauuacagg

SEQ ID NO: 46762 - RNA, 32 nt, Homo Sapiens
ucccgcgcuccaugccucccccucgacucccg

SEQ ID NO: 46763 - RNA, 32 nt, Homo Sapiens
gaccacuguaagugccugcacucuguauucua

SEQ ID NO: 46764 - RNA, 29 nt, Homo Sapiens
caugacauauguagaugugcugcagcgcu

SEQ ID NO: 46765 - RNA, 27 nt, Homo Sapiens
gucccaaagaaguucugguaugaacuu

SEQ ID NO: 46766 - RNA, 32 nt, Homo Sapiens
ugaggcugucuccccacagcuuuauccaagcc

SEQ ID NO: 46767 - RNA, 32 nt, Homo Sapiens
gguguccguucuuuagaaaaauguagaguaua

SEQ ID NO: 46768 - RNA, 27 nt, Homo Sapiens
uuucccaucacauucuggucuaaggcu

SEQ ID NO: 46769 - RNA, 32 nt, Homo Sapiens
guuggcguuguaaugaaguuccacuugguuca

SEQ ID NO: 46770 - RNA, 32 nt, Homo Sapiens
aauauugaugucucaaauuccuugcuuuugua

SEQ ID NO: 46771 - RNA, 32 nt, Homo Sapiens
uaccuagcugguagcauaaauaaaacugaauc

SEQ ID NO: 46772 - RNA, 32 nt, Homo Sapiens
ccuugcaaggcucuuaaccgaaagggggaggg

SEQ ID NO: 46773 - RNA, 32 nt, Homo Sapiens
uuuaaaaugugauuuucuauaacugaagaaaa

SEQ ID NO: 46774 - RNA, 32 nt, Homo Sapiens
agccuuguugaccaccagaaaauacacacugg

SEQ ID NO: 46775 - RNA, 32 nt, Homo Sapiens
ugcugagcugggucucuggggcuucccacucc

SEQ ID NO: 46776 - RNA, 32 nt, Homo Sapiens
cuguagguauugggagauccacagccaagaug

SEQ ID NO: 46777 - RNA, 32 nt, Homo Sapiens
cccugcccuccuaucccuuccacacccugggc

SEQ ID NO: 46778 - RNA, 32 nt, Homo Sapiens
ugaauuucuacaaauguaagacauguggaaaa

SEQ ID NO: 46779 - RNA, 32 nt, Homo Sapiens
uguauguuggggagaacugaaagggaaaacaa

SEQ ID NO: 46780 - RNA, 32 nt, Homo Sapiens
ccuguuggcuugcuuugugugucuguuaaaug

SEQ ID NO: 46781 - RNA, 32 nt, Homo Sapiens
ugucucucagaauucuucagguggaaaaacau

SEQ ID NO: 46782 - RNA, 32 nt, Homo Sapiens
gagcugggcagacaggugggagauggagguag

SEQ ID NO: 46783 - RNA, 32 nt, Homo Sapiens
uaaaagcaauauuuaaugucuuugcaacuuua

SEQ ID NO: 46784 - RNA, 32 nt, Homo Sapiens
aaauuuuaaaaauuaauguuaauauggaaaug

SEQ ID NO: 46785 - RNA, 32 nt, Homo Sapiens
agccgucuccugugccucccccgccccauccc

SEQ ID NO: 46786 - RNA, 32 nt, Homo Sapiens
agcgccgcacgcguagcacgccgggacuagcu

SEQ ID NO: 46787 - RNA, 32 nt, Homo Sapiens
aacuuacaggacuuaaauaucagugaaauauu

SEQ ID NO: 46788 - RNA, 32 nt, Homo Sapiens
aaacaauguaaguaaaggauauuucugaaucu

SEQ ID NO: 46789 - RNA, 32 nt, Homo Sapiens
caaaauuauacaauuuuuccuguaaacaauac

SEQ ID NO: 46790 - RNA, 32 nt, Homo Sapiens
acucagauuuggagcucucugaugccagguau

SEQ ID NO: 46791 - RNA, 32 nt, Homo Sapiens
gaugagggccaggaggggaaacaucacaccug

SEQ ID NO: 46792 - RNA, 32 nt, Homo Sapiens
aucccuguucccucucugucuaggugucaugg

SEQ ID NO: 46793 - RNA, 32 nt, Homo Sapiens
agaucuuuugucuauuuggcaauggaagaaga

SEQ ID NO: 46794 - RNA, 32 nt, Homo Sapiens
ccgcagcgcucgccgucgggcuagggcuccgc

SEQ ID NO: 46795 - RNA, 32 nt, Homo Sapiens
cucucucccuugucccuccauccacccagcgc

SEQ ID NO: 46796 - RNA, 32 nt, Homo Sapiens
uucacaauccacaauuauucugccauggcuuc

SEQ ID NO: 46797 - RNA, 32 nt, Homo Sapiens
ccaccaagccccaaaggacuagccccacaaac

SEQ ID NO: 46798 - RNA, 32 nt, Homo Sapiens
uucaagugagcauccugagcugcggggaccca

SEQ ID NO: 46799 - RNA, 32 nt, Homo Sapiens
uaguucugaucugguuggauaagauuuuauca

SEQ ID NO: 46800 - RNA, 32 nt, Homo Sapiens
gcuaucagacagagacccugcccaugauccug

SEQ ID NO: 46801 - RNA, 32 nt, Homo Sapiens
gcaucuccagccgagagaagccaggccagcug

SEQ ID NO: 46802 - RNA, 30 nt, Homo Sapiens
uccuaggcagcugagccgggucccuuaggg

SEQ ID NO: 46803 - RNA, 32 nt, Homo Sapiens
caaugaccagaaugauaugcuuccugcauugu

SEQ ID NO: 46804 - RNA, 32 nt, Homo Sapiens
cugcauuguccccucccauggcuccuugucgu

SEQ ID NO: 46805 - RNA, 32 nt, Homo Sapiens
gccgcccgcugccugcccuggccgguggggac

SEQ ID NO: 46806 - RNA, 32 nt, Homo Sapiens
uccagcucugaacuuggagcuacuucacacuc

SEQ ID NO: 46807 - RNA, 32 nt, Homo Sapiens
uauauauguauuauaguugcugccauagaguu

SEQ ID NO: 46808 - RNA, 32 nt, Homo Sapiens
cugguguuacacaacugauccgugugugaggu

SEQ ID NO: 46809 - RNA, 32 nt, Homo Sapiens
aaauucagcgaguggauuuugauauauuccac

SEQ ID NO: 46810 - RNA, 32 nt, Homo Sapiens
cguuccugucacauuuccccagccccaccuuc

SEQ ID NO: 46811 - RNA, 32 nt, Homo Sapiens
gaccuuugcccggccuggcugggccucucuug

SEQ ID NO: 46812 - RNA, 32 nt, Homo Sapiens
uauuuuauggaacaggcauuggcguguaccug

SEQ ID NO: 46813 - RNA, 32 nt, Homo Sapiens
gcugcgauccucggggaaaccgaggugcagca

SEQ ID NO: 46814 - RNA, 32 nt, Homo Sapiens
aggcgagcgccgcgcgcaccacugguuggagu

SEQ ID NO: 46815 - RNA, 32 nt, Homo Sapiens
ugugucucagaauauuuuugaggcgaaggcgu

SEQ ID NO: 46816 - RNA, 32 nt, Homo Sapiens
ggccaggcaguuacuccugggggcugaacacc

SEQ ID NO: 46817 - RNA, 32 nt, Homo Sapiens
auuauccaguguuucuuuagccuuggugaacu

SEQ ID NO: 46818 - RNA, 32 nt, Homo Sapiens
caggccuggggcggggccugcggugagcucgc

SEQ ID NO: 46819 - RNA, 32 nt, Homo Sapiens
agggcgaggcggaagaaccccgaucgcugagg

SEQ ID NO: 46820 - RNA, 32 nt, Homo Sapiens
gagguuaucaucauuauuuguauuuugugaau

SEQ ID NO: 46821 - RNA, 32 nt, Homo Sapiens
acaagucccucaugaauggcuuggugccauug

SEQ ID NO: 46822 - RNA, 31 nt, Homo Sapiens
uuaugauggcacugcugcacuccagccugcg

SEQ ID NO: 46823 - RNA, 32 nt, Homo Sapiens
ugaugaccuuuguguauguaguucuugcaucc

SEQ ID NO: 46824 - RNA, 32 nt, Homo Sapiens
cugcugcugaauuuauaaaaauuaaguuugug

SEQ ID NO: 46825 - RNA, 32 nt, Homo Sapiens
aaggggcuggacuggcuguccuuuccaguggc

SEQ ID NO: 46826 - RNA, 32 nt, Homo Sapiens
aagaauaggcacccucagagguuuaggcugga

SEQ ID NO: 46827 - RNA, 32 nt, Homo Sapiens
ccccaguguagcgagcuggagagaggacuguc

SEQ ID NO: 46828 - RNA, 32 nt, Homo Sapiens
acauggauguacugaacgaagaauaaagucug

SEQ ID NO: 46829 - RNA, 32 nt, Homo Sapiens
acgucuuaaaggauuauauugagugucaccau

SEQ ID NO: 46830 - RNA, 32 nt, Homo Sapiens
gugccgggagaggacucugccuuuuuucacag

SEQ ID NO: 46831 - RNA, 32 nt, Homo Sapiens
guguuuucagaaaaagacaaaacgauggugcu

SEQ ID NO: 46832 - RNA, 32 nt, Homo Sapiens
gguagacaggaaaaccuuuagggguuucccua

SEQ ID NO: 46833 - RNA, 32 nt, Homo Sapiens
ggauuaaauaaauguaagguuuuuagaacauu

SEQ ID NO: 46834 - RNA, 32 nt, Homo Sapiens
uggccuguccccgcacggcccgcggcucagcc

SEQ ID NO: 46835 - RNA, 32 nt, Homo Sapiens
ggagggcgucacuggguuucggcgucuggcaa

SEQ ID NO: 46836 - RNA, 32 nt, Homo Sapiens
aguugaauauauuaugcacauauccuacccaa

SEQ ID NO: 46837 - RNA, 32 nt, Homo Sapiens
gaguuugggacaagaaagaugaagcuuggagg

SEQ ID NO: 46838 - RNA, 32 nt, Homo Sapiens
gaacuugauugccuauggaucaaagaaauuca

SEQ ID NO: 46839 - RNA, 32 nt, Homo Sapiens
cuaguaaucuaauuuaaaucaccugcagcuaa

SEQ ID NO: 46840 - RNA, 32 nt, Homo Sapiens
ucacagcuacgacguggccugugcugcugcag

SEQ ID NO: 46841 - RNA, 32 nt, Homo Sapiens
cauccccucuaaucuuggaaccucugaauaug

SEQ ID NO: 46842 - RNA, 32 nt, Homo Sapiens
guccuaucucaacacuuccucauguauuucuu

SEQ ID NO: 46843 - RNA, 32 nt, Homo Sapiens
ggcaacaauauuuauuuagggauugggggcga

SEQ ID NO: 46844 - RNA, 32 nt, Homo Sapiens
uauuuuugacauuuacuguggauaaauuguuu

SEQ ID NO: 46845 - RNA, 32 nt, Homo Sapiens
gcccggggcagacacucuucugucuccugcuu

SEQ ID NO: 46846 - RNA, 32 nt, Homo Sapiens
agagugcagucaaccaguaaauugcagauucu

SEQ ID NO: 46847 - RNA, 32 nt, Homo Sapiens
gucugaggugucuacaaaugucuucaugaccu

SEQ ID NO: 46848 - RNA, 32 nt, Homo Sapiens
cauuuuuaagaguuuaaaaaucuuaugaguga

SEQ ID NO: 46849 - RNA, 32 nt, Homo Sapiens
ggucuguauuucuauuugaugucacuuuccuu

SEQ ID NO: 46850 - RNA, 32 nt, Homo Sapiens
cucaugaagugugugaaccauaaaaacuuacu

SEQ ID NO: 46851 - RNA, 32 nt, Homo Sapiens
aagagaagguaaccuuccaagguuuaacuauc

SEQ ID NO: 46852 - RNA, 32 nt, Homo Sapiens
gggagcgagcgcgagccgggcugccgggcgag

SEQ ID NO: 46853 - RNA, 32 nt, Homo Sapiens
caacaauaaaaaguagacaugggcugggugca

SEQ ID NO: 46854 - RNA, 32 nt, Homo Sapiens
ucaaugcuggagaaaaauaucuguaagagugu

SEQ ID NO: 46855 - RNA, 32 nt, Homo Sapiens
cagcuuccggugacccuggagcuccuuggggu

SEQ ID NO: 46856 - RNA, 32 nt, Homo Sapiens
uuuuuuuuuuuuuuuuaacaaucggaucuuuc

SEQ ID NO: 46857 - RNA, 32 nt, Homo Sapiens
uagcaucagauuauaccucauuauuaaaagga

SEQ ID NO: 46858 - RNA, 32 nt, Homo Sapiens
uuggcaucuaauaaaaucauuuuguauaucaa

SEQ ID NO: 46859 - RNA, 32 nt, Homo Sapiens
uaguauauuucccccuucccccaauggaaagc

SEQ ID NO: 46860 - RNA, 32 nt, Homo Sapiens
uccaggcaacugaguuguguuucagcccaaag

SEQ ID NO: 46861 - RNA, 32 nt, Homo Sapiens
gguagauccugugugucuuguuuucuggucau

SEQ ID NO: 46862 - RNA, 32 nt, Homo Sapiens
cacccaagaugacuaccaacuuucacuuuuuu

SEQ ID NO: 46863 - RNA, 32 nt, Homo Sapiens
uauaaggaaauggagacacagaaauuaaaugg

SEQ ID NO: 46864 - RNA, 32 nt, Homo Sapiens
ccgccuucagcugucagcuuucuggggcuaac

SEQ ID NO: 46865 - RNA, 32 nt, Homo Sapiens
agcugucccugugaguuauccuggacauuucg

SEQ ID NO: 46866 - RNA, 32 nt, Homo Sapiens
auagugguguuuuaaagagaauguagaccugu

SEQ ID NO: 46867 - RNA, 32 nt, Homo Sapiens
cccagaccucgggcgcacccccugcacgccgc

SEQ ID NO: 46868 - RNA, 32 nt, Homo Sapiens
caccuugacauuucuuuuuauauauaaacuau

SEQ ID NO: 46869 - RNA, 32 nt, Homo Sapiens
gccuccuugcccgugaccgucgcuagaacuca

SEQ ID NO: 46870 - RNA, 32 nt, Homo Sapiens
cgaaaugccgacggguuggacggguuuccgag

SEQ ID NO: 46871 - RNA, 32 nt, Homo Sapiens
cccaauuuaaacaacucaagucagaaaucagu

SEQ ID NO: 46872 - RNA, 32 nt, Homo Sapiens
uacugcuugucagagggacaagagagaagaga

SEQ ID NO: 46873 - RNA, 32 nt, Homo Sapiens
uacuugcaaaugucuguaaucuguaauuguga

SEQ ID NO: 46874 - RNA, 32 nt, Homo Sapiens
uacaucagccugggcugcagcgcgcugccgcc

SEQ ID NO: 46875 - RNA, 32 nt, Homo Sapiens
gaaggugaggucgggggcggagccggggcgug

SEQ ID NO: 46876 - RNA, 32 nt, Homo Sapiens
uugaugucuucucuuacuuacucuguaucucu

SEQ ID NO: 46877 - RNA, 32 nt, Homo Sapiens
acaucagggggaggacgugguggcugaacucu

SEQ ID NO: 46878 - RNA, 32 nt, Homo Sapiens
cacuauagauuucuguuggauagaaaaaugaa

SEQ ID NO: 46879 - RNA, 32 nt, Homo Sapiens
gggcaggggcacagagcagagaggagggcacu

SEQ ID NO: 46880 - RNA, 32 nt, Homo Sapiens
uccacacuuccacccccagcuccuuucccugg

SEQ ID NO: 46881 - RNA, 32 nt, Homo Sapiens
cccaccaugcguguugugacaccuucaccaau

SEQ ID NO: 46882 - RNA, 32 nt, Homo Sapiens
agguggugcuucugggguguucuguuucuuga

SEQ ID NO: 46883 - RNA, 32 nt, Homo Sapiens
cggcgcgaggccggcgcugugcucgccucgga

SEQ ID NO: 46884 - RNA, 32 nt, Homo Sapiens
uuuguuguugguuuuuuuuuuuuuuuuuuaac

SEQ ID NO: 46885 - RNA, 32 nt, Homo Sapiens
aaggggaugauuauuauauugaggcuaaaacc

SEQ ID NO: 46886 - RNA, 32 nt, Homo Sapiens
aggccccagacuucacccccagcccacugcua

SEQ ID NO: 46887 - RNA, 32 nt, Homo Sapiens
cugcuuuugggggucagcauccagugugagau

SEQ ID NO: 46888 - RNA, 32 nt, Homo Sapiens
gccgguuccuggucugugcugcucuccuggaa

SEQ ID NO: 46889 - RNA, 32 nt, Homo Sapiens
uucugucgggcgccgcucagccgugcccuccg

SEQ ID NO: 46890 - RNA, 32 nt, Homo Sapiens
aacccggugccuccuccuccccaggaagcagc

SEQ ID NO: 46891 - RNA, 32 nt, Homo Sapiens
cugcggcucccucccuccugcaugagggucuc

SEQ ID NO: 46892 - RNA, 32 nt, Homo Sapiens
cgggcccugcggugcgagccucgccggacacc

SEQ ID NO: 46893 - RNA, 32 nt, Homo Sapiens
uuuguuaauuuuccucauuuugaauuaugugc

SEQ ID NO: 46894 - RNA, 32 nt, Homo Sapiens
aaaggccagguggaagccauuggggugaacuc

SEQ ID NO: 46895 - RNA, 32 nt, Homo Sapiens
uuaguauguuugucuuugagguggacuguugg

SEQ ID NO: 46896 - RNA, 32 nt, Homo Sapiens
ugcuuguucuccugagcccugauuauccucau

SEQ ID NO: 46897 - RNA, 32 nt, Homo Sapiens
uucuuuuaaaauuuauauuuuccacuuuuuuu

SEQ ID NO: 46898 - RNA, 32 nt, Homo Sapiens
agcuuuugccagcuaucugggggguaggagga

SEQ ID NO: 46899 - RNA, 32 nt, Homo Sapiens
uugagaaaaucugggggauugggaugggggua

SEQ ID NO: 46900 - RNA, 32 nt, Homo Sapiens
guuuguuuaacccuuguaacuguuuguuuugu

SEQ ID NO: 46901 - RNA, 32 nt, Homo Sapiens
agaauguuagcuucuuuuucuacauuguugga

SEQ ID NO: 46902 - RNA, 32 nt, Homo Sapiens
uaaugcuguauauauggcuuacguucaggcuc

SEQ ID NO: 46903 - RNA, 32 nt, Homo Sapiens
aacgccugcauaaauauuccaugguuucaguu

SEQ ID NO: 46904 - RNA, 32 nt, Homo Sapiens
ccaggacaucucugcccucuucucauccccca

SEQ ID NO: 46905 - RNA, 32 nt, Homo Sapiens
aacugugacuuuuuugaauauugcaggguuca

SEQ ID NO: 46906 - RNA, 32 nt, Homo Sapiens
aaauggagaaacaaaacuuacguucauuaaua

SEQ ID NO: 46907 - RNA, 32 nt, Homo Sapiens
caccaggccgcgccuggccugcuuucauuuua

SEQ ID NO: 46908 - RNA, 32 nt, Homo Sapiens
uaaauugauuuuuuuucuuggccuuuauuuuu

SEQ ID NO: 46909 - RNA, 32 nt, Homo Sapiens
aacaguaccugggaaggacucccaccucacca

SEQ ID NO: 46910 - RNA, 32 nt, Homo Sapiens
uaagaacaaguugagcucugguaacugaucuu

SEQ ID NO: 46911 - RNA, 32 nt, Homo Sapiens
ccggggguugggagggacagggauaaauaaag

SEQ ID NO: 46912 - RNA, 32 nt, Homo Sapiens
uucuugaaauuuaacuaaaaauaugacugcuc

SEQ ID NO: 46913 - RNA, 32 nt, Homo Sapiens
auauuuuaaauaucucauuuaacauuguaaug

SEQ ID NO: 46914 - RNA, 26 nt, Homo Sapiens
gaugcuggggcugguccuggccuugc

SEQ ID NO: 46915 - RNA, 32 nt, Homo Sapiens
auauugaauguuuaaaauauuaauacagaugg

SEQ ID NO: 46916 - RNA, 32 nt, Homo Sapiens
aagcuauuuaugggccccuggcacucuuguuc

SEQ ID NO: 46917 - RNA, 32 nt, Homo Sapiens
accuguugucccagcuacucgggaggcugagg

SEQ ID NO: 46918 - RNA, 27 nt, Homo Sapiens
uuuuuauagauaugaacacuuuaagag

SEQ ID NO: 46919 - RNA, 32 nt, Homo Sapiens
agacccccggcggcggcagccugccuugcucu

SEQ ID NO: 46920 - RNA, 32 nt, Homo Sapiens
ugguauuagaacuucauaaaaugaguugggau

SEQ ID NO: 46921 - RNA, 32 nt, Homo Sapiens
cauugugucugagccaugcccagccgcuggcu

SEQ ID NO: 46922 - RNA, 27 nt, Homo Sapiens
acuugucuguucuucagugcuggaggu

SEQ ID NO: 46923 - RNA, 31 nt, Homo Sapiens
uggguguuggacacgggaagagccugguuga

SEQ ID NO: 46924 - RNA, 32 nt, Homo Sapiens
gaaucaauucaccagcagcgaaugcuccuccg

SEQ ID NO: 46925 - RNA, 29 nt, Homo Sapiens
gaugcuucuauccauuuauucaagcacau

SEQ ID NO: 46926 - RNA, 32 nt, Homo Sapiens
gguaaguguagagaagggaaaauacacagaac

SEQ ID NO: 46927 - RNA, 32 nt, Homo Sapiens
ggaagaaucaacaucgugaaaauggccaugcu

SEQ ID NO: 46928 - RNA, 32 nt, Homo Sapiens
uccagcaccucccagcacuuugugauaugaga

SEQ ID NO: 46929 - RNA, 32 nt, Homo Sapiens
uucugccugugcugugggggagagaggccgca

SEQ ID NO: 46930 - RNA, 32 nt, Homo Sapiens
caaguggagacggggcggaaaaauacugauuc

SEQ ID NO: 46931 - RNA, 32 nt, Homo Sapiens
guuuucccugucaccucccuauuauuaaaugu

SEQ ID NO: 46932 - RNA, 28 nt, Homo Sapiens
uuuuaaagauguuuuauguguuuucacc

SEQ ID NO: 46933 - RNA, 32 nt, Homo Sapiens
gaaagaugaggcagagguccaaguaaccgcua

SEQ ID NO: 46934 - RNA, 32 nt, Homo Sapiens
gggauuggcacacuggcagagccaguguguug

SEQ ID NO: 46935 - RNA, 32 nt, Homo Sapiens
aaaauggcuaugaggggagaguugagaugaca

SEQ ID NO: 46936 - RNA, 32 nt, Homo Sapiens
uaggcuagucgaguaacuauucgggucauggc

SEQ ID NO: 46937 - RNA, 32 nt, Homo Sapiens
gggcaggcagugugacuuauuuccugugguga

SEQ ID NO: 46938 - RNA, 32 nt, Homo Sapiens
ccgcgcgccgagauguugcugcugcuguuacu

SEQ ID NO: 46939 - RNA, 31 nt, Homo Sapiens
gcacggagggcgguggcggcgggcuccugcg

SEQ ID NO: 46940 - RNA, 32 nt, Homo Sapiens
auugguuucuguucucuggcuauuugcaaaac

SEQ ID NO: 46941 - RNA, 31 nt, Homo Sapiens
uuacuccucauaacaagucuaacuggcucug

SEQ ID NO: 46942 - RNA, 32 nt, Homo Sapiens
cucacugcuaccuccgccucccagguucaggc

SEQ ID NO: 46943 - RNA, 32 nt, Homo Sapiens
ccuuaagcauuguuuguaaaucacacuuuuuc

SEQ ID NO: 46944 - RNA, 32 nt, Homo Sapiens
ugccccuggucccagguggggugagcuggcac

SEQ ID NO: 46945 - RNA, 32 nt, Homo Sapiens
cagaugaggagaaacguuugaugguggagcug

SEQ ID NO: 46946 - RNA, 32 nt, Homo Sapiens
ggcuccgugugacuuccguccagggagcaugu

SEQ ID NO: 46947 - RNA, 32 nt, Homo Sapiens
uguucccacccuccccugaacagaacccagcc

SEQ ID NO: 46948 - RNA, 31 nt, Homo Sapiens
ugugcuuauucauaauucucaguguaucagu

SEQ ID NO: 46949 - RNA, 32 nt, Homo Sapiens
gguuacaaaaagacaugagcuggauuggacac

SEQ ID NO: 46950 - RNA, 32 nt, Homo Sapiens
gauugccgagaccugaagaggguaagugacuu

SEQ ID NO: 46951 - RNA, 31 nt, Homo Sapiens
gcagugcagccccaggaugccucgcagacgu

SEQ ID NO: 46952 - RNA, 32 nt, Homo Sapiens
uuguuaauauauuaaaacaguauauacauaug

SEQ ID NO: 46953 - RNA, 32 nt, Homo Sapiens
gagacugaaaauaauauagaaaaucucauugc

SEQ ID NO: 46954 - RNA, 32 nt, Homo Sapiens
agaauguuucauacaguuaugacuccugacaa

SEQ ID NO: 46955 - RNA, 32 nt, Homo Sapiens
aggccucaggcccaggacccaggaggccuccc

SEQ ID NO: 46956 - RNA, 32 nt, Homo Sapiens
aagagagaaaagacaagggaagaaaagaagaa

SEQ ID NO: 46957 - RNA, 32 nt, Homo Sapiens
agcaacccaucccuugccuauuuucaucuugc

SEQ ID NO: 46958 - RNA, 32 nt, Homo Sapiens
gucacgcucugcccugacgugcagcauuugac

SEQ ID NO: 46959 - RNA, 32 nt, Homo Sapiens
uuugccucccccgacgccccagccugugcccc

SEQ ID NO: 46960 - RNA, 32 nt, Homo Sapiens
uccccaacagccucgaguggccugcagucaca

SEQ ID NO: 46961 - RNA, 32 nt, Homo Sapiens
ugggaaagugucugugucgaggcgcugagcuc

SEQ ID NO: 46962 - RNA, 32 nt, Homo Sapiens
ccagcagccuccccggccgaccuagugucucu

SEQ ID NO: 46963 - RNA, 32 nt, Homo Sapiens
ggcaugaggagcugaagagaacugcugaggag

SEQ ID NO: 46964 - RNA, 32 nt, Homo Sapiens
augcaagccgugcucugaaaucucugauucca

SEQ ID NO: 46965 - RNA, 28 nt, Homo Sapiens
uggaaagauuacauacauuugagaauaa

SEQ ID NO: 46966 - RNA, 32 nt, Homo Sapiens
ugugcgugugagguuguguagauggaagguau

SEQ ID NO: 46967 - RNA, 32 nt, Homo Sapiens
aggcucuggccuaugcugggccccaauaguua

SEQ ID NO: 46968 - RNA, 32 nt, Homo Sapiens
cuaaaauguccaaguagaauguuuccuuuuac

SEQ ID NO: 46969 - RNA, 32 nt, Homo Sapiens
uacuugcaggggugcugggcagcguagucauc

SEQ ID NO: 46970 - RNA, 32 nt, Homo Sapiens
agcaagaugcuguuuaaaauuaccauauuguu

SEQ ID NO: 46971 - RNA, 32 nt, Homo Sapiens
uaggcucugaccacuucuguuugggcuauggc

SEQ ID NO: 46972 - RNA, 32 nt, Homo Sapiens
guuucugaaauuucauugcuccagguuugcua

SEQ ID NO: 46973 - RNA, 32 nt, Homo Sapiens
ggcaucgcaucguggugugucaaugccacaaa

SEQ ID NO: 46974 - RNA, 32 nt, Homo Sapiens
agaauaagucaguacuuggguuguguaaucug

SEQ ID NO: 46975 - RNA, 32 nt, Homo Sapiens
ccagacacaggugagggagaagaaauuuccug

SEQ ID NO: 46976 - RNA, 32 nt, Homo Sapiens
ugaagaugaugauauuaaauccagagucaagc

SEQ ID NO: 46977 - RNA, 32 nt, Homo Sapiens
ucuccaaagggagggugacaugcuggcuuuug

SEQ ID NO: 46978 - RNA, 32 nt, Homo Sapiens
ccgggcuuaggugaggccgccgugggccccau

SEQ ID NO: 46979 - RNA, 32 nt, Homo Sapiens
aaacaaugaagaugggccaucucaauuccaga

SEQ ID NO: 46980 - RNA, 32 nt, Homo Sapiens
gcugggccuggucagcacccaugcuauggaga

SEQ ID NO: 46981 - RNA, 32 nt, Homo Sapiens
aggccauacuucccuugaaccuugugugguuc

SEQ ID NO: 46982 - RNA, 32 nt, Homo Sapiens
ccugggaauuuaguugugagugaaugugaagg

SEQ ID NO: 46983 - RNA, 32 nt, Homo Sapiens
aucuccauacauaggauagaaacuguucauca

SEQ ID NO: 46984 - RNA, 32 nt, Homo Sapiens
ggggagaaacuccccgcagccggaggaaagac

SEQ ID NO: 46985 - RNA, 32 nt, Homo Sapiens
ggacgcagaggaggaggcgcccgccaugcccg

SEQ ID NO: 46986 - RNA, 32 nt, Homo Sapiens
gaagggcucagcgccuccccgccgggccgugg

SEQ ID NO: 46987 - RNA, 32 nt, Homo Sapiens
gagcauggcggcgcccucuggguccucguguc

SEQ ID NO: 46988 - RNA, 32 nt, Homo Sapiens
uuuucacucuccauuuguguaugugaguggcu

SEQ ID NO: 46989 - RNA, 32 nt, Homo Sapiens
gcggguucuccuggcuggcccgggcugcccca

SEQ ID NO: 46990 - RNA, 32 nt, Homo Sapiens
caggguccuccgaugcuggccuuugcgccucu

SEQ ID NO: 46991 - RNA, 32 nt, Homo Sapiens
uuaaacacagaaauaacgcagcaauagaauua

SEQ ID NO: 46992 - RNA, 32 nt, Homo Sapiens
acagugcaguuuuguuacauggauagauugcc

SEQ ID NO: 46993 - RNA, 32 nt, Homo Sapiens
agugaugcuuuuuugccgcgggcccuggguuu

SEQ ID NO: 46994 - RNA, 32 nt, Homo Sapiens
gaucgaccacuacucagacugacauggaugag

SEQ ID NO: 46995 - RNA, 32 nt, Homo Sapiens
aauaagcccuuaaguuaagggcugauugcacu

SEQ ID NO: 46996 - RNA, 32 nt, Homo Sapiens
gacuuucguugaccaugcugucccggguggua

SEQ ID NO: 46997 - RNA, 32 nt, Homo Sapiens
uggaaaggcaauuaauaaaucucauuggaccu

SEQ ID NO: 46998 - RNA, 32 nt, Homo Sapiens
uccgggcagaaacaauaaaaccacuugugccc

SEQ ID NO: 46999 - RNA, 32 nt, Homo Sapiens
agcuucaggacacuuaaacguuccugccugcu

SEQ ID NO: 47000 - RNA, 32 nt, Homo Sapiens
ugcccggguucaguaccauggacagcgcccuc

SEQ ID NO: 47001 - RNA, 32 nt, Homo Sapiens
gaaccccagaggcuuccccagcccuggggauc

SEQ ID NO: 47002 - RNA, 32 nt, Homo Sapiens
ugggugagacgaaugucuuuguucuuuaaaaa

SEQ ID NO: 47003 - RNA, 32 nt, Homo Sapiens
gcagaggaaugggcauagcugagccaguugcc

SEQ ID NO: 47004 - RNA, 32 nt, Homo Sapiens
aaucaacaguugugcuugggggcuuuuuguua

SEQ ID NO: 47005 - RNA, 32 nt, Homo Sapiens
agccggccgugguggcgggcgccuguagcccc

SEQ ID NO: 47006 - RNA, 32 nt, Homo Sapiens
aacuugacauaccaccaguacaugcccccaga

SEQ ID NO: 47007 - RNA, 32 nt, Homo Sapiens
aauaaaaggucauuuuaauuuaaaaaaaaaaa

SEQ ID NO: 47008 - RNA, 32 nt, Homo Sapiens
cugggcagggacugccggccccggagucuccc

SEQ ID NO: 47009 - RNA, 32 nt, Homo Sapiens
cuuauuaggccauagugagcuaugcucugcac

SEQ ID NO: 47010 - RNA, 32 nt, Homo Sapiens
gugcugagcucacauccacaccccuugcagcc

SEQ ID NO: 47011 - RNA, 32 nt, Homo Sapiens
aagugacaagcacacauuuuucuugcuucacu

SEQ ID NO: 47012 - RNA, 32 nt, Homo Sapiens
ucuacaaaaaauacaaaaauuaaccaggcaug

SEQ ID NO: 47013 - RNA, 32 nt, Homo Sapiens
ucuaccaaaaauacaaaaauucaccaggcaug

SEQ ID NO: 47014 - RNA, 32 nt, Homo Sapiens
aaagaaaaacaauuauuuuguccuguuucuca

SEQ ID NO: 47015 - RNA, 32 nt, Homo Sapiens
gugcacaggggccccauuaacaugcugauuuu

SEQ ID NO: 47016 - RNA, 32 nt, Homo Sapiens
ugugaccacacccuccucccucugcccccucc

SEQ ID NO: 47017 - RNA, 32 nt, Homo Sapiens
gagucugcaagccagcugggcagcucuacuuc

SEQ ID NO: 47018 - RNA, 32 nt, Homo Sapiens
gagcaucuugacaugacugcugaccuaaagau

SEQ ID NO: 47019 - RNA, 32 nt, Homo Sapiens
cuuuguccuccucgcgcaaucccggcccgggu

SEQ ID NO: 47020 - RNA, 28 nt, Homo Sapiens
aacauuuaacagaaacauuugaaauaga

SEQ ID NO: 47021 - RNA, 32 nt, Homo Sapiens
cacuauauugcacaggcuggucucaaacuccu

SEQ ID NO: 47022 - RNA, 32 nt, Homo Sapiens
aaagagccgaggccgggcgcgcgacccucguc

SEQ ID NO: 47023 - RNA, 32 nt, Homo Sapiens
aaaaaugucauucugaggcuugugcccuucgu

SEQ ID NO: 47024 - RNA, 30 nt, Homo Sapiens
cccaggugcaagcagcaccccucgagggcu

SEQ ID NO: 47025 - RNA, 32 nt, Homo Sapiens
ggaggccuggcgaugcccaagaacgcaguggu

SEQ ID NO: 47026 - RNA, 32 nt, Homo Sapiens
cgugcucugguacccuggccccgggggcagga

SEQ ID NO: 47027 - RNA, 32 nt, Homo Sapiens
uccuggccaagggccugaugcugugguccugu

SEQ ID NO: 47028 - RNA, 32 nt, Homo Sapiens
cuauaauuuuacaaaguuaaauuuauaagcua

SEQ ID NO: 47029 - RNA, 32 nt, Homo Sapiens
agauauuuacuauguuaaaucuuuaaaauaga

SEQ ID NO: 47030 - RNA, 32 nt, Homo Sapiens
ggcuaaguccccagcccccucuccucccagcc

SEQ ID NO: 47031 - RNA, 32 nt, Homo Sapiens
cuaccgagugguuuuuguauauacuaaaguuc

SEQ ID NO: 47032 - RNA, 32 nt, Homo Sapiens
acaugggaaaagauaaauaugaaaaugaagau

SEQ ID NO: 47033 - RNA, 32 nt, Homo Sapiens
ccuuuggaauaauuuuuaaaucuguaaauguc

SEQ ID NO: 47034 - RNA, 32 nt, Homo Sapiens
accggcaccagugcccaagcccgccccugcaa

SEQ ID NO: 47035 - RNA, 32 nt, Homo Sapiens
uaaauaaaaaauuugcacagguaaauucucuc

SEQ ID NO: 47036 - RNA, 32 nt, Homo Sapiens
gcuugccagcucaagagcugcguuugaggcac

SEQ ID NO: 47037 - RNA, 32 nt, Homo Sapiens
ccagaaguuucuaucauuccauggagaaagcu

SEQ ID NO: 47038 - RNA, 32 nt, Homo Sapiens
agccgccccaccccacuccauccaccaaauca

SEQ ID NO: 47039 - RNA, 32 nt, Homo Sapiens
cugaagcagcgaggcgggaguggaggugcgcg

SEQ ID NO: 47040 - RNA, 32 nt, Homo Sapiens
gggguggagcagcauuucgucgccgcgggggu

SEQ ID NO: 47041 - RNA, 32 nt, Homo Sapiens
uuuaagagauuauaucucugguguuaauuacu

SEQ ID NO: 47042 - RNA, 32 nt, Homo Sapiens
aguauaaacaauuuugaaauuuucuugauuua

SEQ ID NO: 47043 - RNA, 32 nt, Homo Sapiens
gaggguggggucuggcagcugcugcuggggca

SEQ ID NO: 47044 - RNA, 32 nt, Homo Sapiens
ucugagcuuaaggccucuguaaugagauguga

SEQ ID NO: 47045 - RNA, 30 nt, Homo Sapiens
gaauuguuggcuguuggggaaacuuuccug

SEQ ID NO: 47046 - RNA, 32 nt, Homo Sapiens
auugucgggugacacauguucuugguaacuaa

SEQ ID NO: 47047 - RNA, 32 nt, Homo Sapiens
uuauuucuguuguuuccuuauuaaaauggugu

SEQ ID NO: 47048 - RNA, 32 nt, Homo Sapiens
uuaagcauaauaaaaugugaaaaauugcccaa

SEQ ID NO: 47049 - RNA, 32 nt, Homo Sapiens
caguuuugaaagauuuuuaccaugucucuaag

SEQ ID NO: 47050 - RNA, 32 nt, Homo Sapiens
cccaaccuuucaaggaggaaaccagacaccug

SEQ ID NO: 47051 - RNA, 32 nt, Homo Sapiens
cugccccaguggcugccgacucacgcgggugc

SEQ ID NO: 47052 - RNA, 32 nt, Homo Sapiens
aaggggaaaaagauaaaauaaccccuauuuuu

SEQ ID NO: 47053 - RNA, 31 nt, Homo Sapiens
gggaacacaaagagaaaaugguuuggaggcu

SEQ ID NO: 47054 - RNA, 32 nt, Homo Sapiens
uuaauuccagcauugaucaauacaaccaaauu

SEQ ID NO: 47055 - RNA, 29 nt, Homo Sapiens
aaaggugaaagguuauauuuuuuacagau

SEQ ID NO: 47056 - RNA, 32 nt, Homo Sapiens
caacauuugucucucagaacucagcgugcucc

SEQ ID NO: 47057 - RNA, 32 nt, Homo Sapiens
aucagccugagcaacauagcaagaugcugucu

SEQ ID NO: 47058 - RNA, 32 nt, Homo Sapiens
auauuaugguguaaugcacaauuuagaaaaca

SEQ ID NO: 47059 - RNA, 32 nt, Homo Sapiens
aaucagguguuuacaggaaagaucucagaggc

SEQ ID NO: 47060 - RNA, 31 nt, Homo Sapiens
caaguugagccccaaaccaaagagagccaag

SEQ ID NO: 47061 - RNA, 32 nt, Homo Sapiens
cuuuaaucagguuggcuuuggaggaaggaaaa

SEQ ID NO: 47062 - RNA, 32 nt, Homo Sapiens
gagagggcgaggggucccagggggcuucgggc

SEQ ID NO: 47063 - RNA, 32 nt, Homo Sapiens
gcagcgggaacaggcugcuugcuaucuggaaa

SEQ ID NO: 47064 - RNA, 32 nt, Homo Sapiens
uuuaauuucuucccuuucagcaucugagaacc

SEQ ID NO: 47065 - RNA, 32 nt, Homo Sapiens
acugggccagcgccuggcgauacugguugggg

SEQ ID NO: 47066 - RNA, 32 nt, Homo Sapiens
agaauuaaaaccccaaaccagcccucuguuag

SEQ ID NO: 47067 - RNA, 32 nt, Homo Sapiens
ggaggcuggacagcugcaugcagccugcaggg

SEQ ID NO: 47068 - RNA, 32 nt, Homo Sapiens
auucccgccuccugaggccuuucugaggaucu

SEQ ID NO: 47069 - RNA, 32 nt, Homo Sapiens
uugccuccaugcagccgcucucaauggccgca

SEQ ID NO: 47070 - RNA, 32 nt, Homo Sapiens
gacccgguccagacgccuggcggccgccggca

SEQ ID NO: 47071 - RNA, 32 nt, Homo Sapiens
uagagcuguaggccuuuacuucaucauuuuuc

SEQ ID NO: 47072 - RNA, 32 nt, Homo Sapiens
uuccagggcccgcggccgcggguucgcgagca

SEQ ID NO: 47073 - RNA, 32 nt, Homo Sapiens
uugcccuuggugccgggcuggggccgggcgca

SEQ ID NO: 47074 - RNA, 32 nt, Homo Sapiens
ccccgccggcggggcggucagccuccugucac

SEQ ID NO: 47075 - RNA, 32 nt, Homo Sapiens
cagacucccacccuuccacaccuccagagcag

SEQ ID NO: 47076 - RNA, 32 nt, Homo Sapiens
cacacacccacccacacacacacacacagaag

SEQ ID NO: 47077 - RNA, 32 nt, Homo Sapiens
uggcucugauguggggggcugcugcucugacc

SEQ ID NO: 47078 - RNA, 32 nt, Homo Sapiens
ugacuggauguugaauuuugugaaaugcuuuu

SEQ ID NO: 47079 - RNA, 32 nt, Homo Sapiens
auuuuuaaauuaaagguuuaauaucagaaugc

SEQ ID NO: 47080 - RNA, 32 nt, Homo Sapiens
guucuagaccucugggaaccagcaccugaguc

SEQ ID NO: 47081 - RNA, 32 nt, Homo Sapiens
uuuaugcccuauacaaagggcauuccagcagc

SEQ ID NO: 47082 - RNA, 32 nt, Homo Sapiens
ggagcccagggaccacucccccugcacagaca

SEQ ID NO: 47083 - RNA, 32 nt, Homo Sapiens
gaagugguucuguugcaaauggacuauaaaca

SEQ ID NO: 47084 - RNA, 32 nt, Homo Sapiens
agcaggcugaugaauagaucuaagaguuaccu

SEQ ID NO: 47085 - RNA, 32 nt, Homo Sapiens
cuuuuauaaaaaguuugcccuggaugucauau

SEQ ID NO: 47086 - RNA, 32 nt, Homo Sapiens
agaauguggggccuuuuuuaugauuuuguaag

SEQ ID NO: 47087 - RNA, 29 nt, Homo Sapiens
cuuccagccuguuucagagaccacuagcc

SEQ ID NO: 47088 - RNA, 32 nt, Homo Sapiens
caacaggagcucuguggugucugugggucccc

SEQ ID NO: 47089 - RNA, 32 nt, Homo Sapiens
auguuuuuguuagauauaaaauuaaaucgaau

SEQ ID NO: 47090 - RNA, 32 nt, Homo Sapiens
uagccuauuaaacuauuuuaauauguuuuuuu

SEQ ID NO: 47091 - RNA, 32 nt, Homo Sapiens
ugcucauguaccauuuagcuuguguuuuaaaa

SEQ ID NO: 47092 - RNA, 32 nt, Homo Sapiens
uugcuccugaauccagcugugcacuuugccca

SEQ ID NO: 47093 - RNA, 32 nt, Homo Sapiens
gacggggucagagagagcgcgcgggcgugcga

SEQ ID NO: 47094 - RNA, 32 nt, Homo Sapiens
ccacccacagaaaccaggagacaggggaacua

SEQ ID NO: 47095 - RNA, 32 nt, Homo Sapiens
cccagcagguugggggcgccugccccccacua

SEQ ID NO: 47096 - RNA, 32 nt, Homo Sapiens
gaguaucugggaacugugccuuugaguuuccu

SEQ ID NO: 47097 - RNA, 32 nt, Homo Sapiens
auuuuucucauguucuuucucccuuuguuuua

SEQ ID NO: 47098 - RNA, 32 nt, Homo Sapiens
gagcggcagcugcugccagagcccugagugcc

SEQ ID NO: 47099 - RNA, 32 nt, Homo Sapiens
ugcuccugccgcgcgcacccccggggcuucgg

SEQ ID NO: 47100 - RNA, 32 nt, Homo Sapiens
auuagaggcagacaucacuggcaacuuagaca

SEQ ID NO: 47101 - RNA, 32 nt, Homo Sapiens
uuuccucucgccaccuuccaccccugcgcugu

SEQ ID NO: 47102 - RNA, 29 nt, Homo Sapiens
gggauuugaggacagagggggccucucuc

SEQ ID NO: 47103 - RNA, 30 nt, Homo Sapiens
cagggacuacuccuuuggcagcguuugcua

SEQ ID NO: 47104 - RNA, 32 nt, Homo Sapiens
uaauaugaauaagaaagcucuuugaaaaugua

SEQ ID NO: 47105 - RNA, 32 nt, Homo Sapiens
ccugcuuggcccggccggccuggcaccguuuu

SEQ ID NO: 47106 - RNA, 32 nt, Homo Sapiens
uuguacagaauuuuuaaugacuuuuuauaaug

SEQ ID NO: 47107 - RNA, 32 nt, Homo Sapiens
agaugggaggaagcuuccugagaggugacgcc

SEQ ID NO: 47108 - RNA, 32 nt, Homo Sapiens
agaugggggugggggggugcugcucugggcug

SEQ ID NO: 47109 - RNA, 32 nt, Homo Sapiens
uucaugucacucacuauaaaauaggucucuua

SEQ ID NO: 47110 - RNA, 32 nt, Homo Sapiens
acaagugacuguaucuguguagacuauuugcu

SEQ ID NO: 47111 - RNA, 32 nt, Homo Sapiens
aagguggaauccaguuauuuccugcgcugcga

SEQ ID NO: 47112 - RNA, 32 nt, Homo Sapiens
cugggacaucuucuguuauuguugauguuuuu

SEQ ID NO: 47113 - RNA, 32 nt, Homo Sapiens
uaucugccucaccucccauguacaaaauuggg

SEQ ID NO: 47114 - RNA, 32 nt, Homo Sapiens
uguuagcccaaguugaagaaagccgggcugug

SEQ ID NO: 47115 - RNA, 32 nt, Homo Sapiens
acacaaggacuccacacugugcucucuaguag

SEQ ID NO: 47116 - RNA, 32 nt, Homo Sapiens
ugcuuuuauuaaaauacaaaauuaaacaaaca

SEQ ID NO: 47117 - RNA, 27 nt, Homo Sapiens
cuggcccccuuguucagccccugccgg

SEQ ID NO: 47118 - RNA, 32 nt, Homo Sapiens
aaaugaaacaauuaaucuagauuuuaacauuu

SEQ ID NO: 47119 - RNA, 32 nt, Homo Sapiens
caggggcucccucccuccuucucuccuuccuu

SEQ ID NO: 47120 - RNA, 32 nt, Homo Sapiens
cauugaugauacuuuaaaaugucaucuuugcu

SEQ ID NO: 47121 - RNA, 32 nt, Homo Sapiens
ucagcauccugguguugcugugccgugggucc

SEQ ID NO: 47122 - RNA, 32 nt, Homo Sapiens
caguuccccgguuaccacacucuguccagccc

SEQ ID NO: 47123 - RNA, 32 nt, Homo Sapiens
cuuauuugacagauaagagaaaaggaaguucu

SEQ ID NO: 47124 - RNA, 32 nt, Homo Sapiens
auuuagguuauuuuaaauccaugauuaacuua

SEQ ID NO: 47125 - RNA, 32 nt, Homo Sapiens
uguucauuucuaguacuugucuaugucuuugg

SEQ ID NO: 47126 - RNA, 32 nt, Homo Sapiens
auggagaccuaaaauauauuaacauuuuaauu

SEQ ID NO: 47127 - RNA, 32 nt, Homo Sapiens
uauucuaaugcuguucuuauuauuguguuuua

SEQ ID NO: 47128 - RNA, 32 nt, Homo Sapiens
agacuugguccuuuucaacgguuuucacagau

SEQ ID NO: 47129 - RNA, 32 nt, Homo Sapiens
uucauccuccuuuuguucugcauugacucauu

SEQ ID NO: 47130 - RNA, 32 nt, Homo Sapiens
cacaaagccaaccaugcccagccccucccaac

SEQ ID NO: 47131 - RNA, 32 nt, Homo Sapiens
ccauggggaaccggggcagcagggaagcccuc

SEQ ID NO: 47132 - RNA, 32 nt, Homo Sapiens
gggacugccauauuuucuuuuaacuggaaauu

SEQ ID NO: 47133 - RNA, 32 nt, Homo Sapiens
aaccuuuccgcugucgccccaggcccucccug

SEQ ID NO: 47134 - RNA, 32 nt, Homo Sapiens
cgcaucugcuccugggccacauccggcuccgu

SEQ ID NO: 47135 - RNA, 32 nt, Homo Sapiens
uuugaaaaaugaauuaagaaggaaauacuuga

SEQ ID NO: 47136 - RNA, 32 nt, Homo Sapiens
uucaugguacacaacuucaacagauuuucugu

SEQ ID NO: 47137 - RNA, 32 nt, Homo Sapiens
aguggcccuggccgucuauccuaccccuuuag

SEQ ID NO: 47138 - RNA, 32 nt, Homo Sapiens
acuacaguauauaaugauaacaauuaaaagga

SEQ ID NO: 47139 - RNA, 32 nt, Homo Sapiens
uagcacgaguggguauagaagauggaagauac

SEQ ID NO: 47140 - RNA, 32 nt, Homo Sapiens
uuuuauauaaauuauaucuuguccuauuaaau

SEQ ID NO: 47141 - RNA, 32 nt, Homo Sapiens
uuggggauggggggcaccuugcagccccuucc

SEQ ID NO: 47142 - RNA, 32 nt, Homo Sapiens
uguggaugugaagaauguggaaaaaccuuugc

SEQ ID NO: 47143 - RNA, 32 nt, Homo Sapiens
ggucucuggggaucgggaccgcggcggcggcc

SEQ ID NO: 47144 - RNA, 32 nt, Homo Sapiens
aaguugggaaauguggcuucuguucauuucgu

SEQ ID NO: 47145 - RNA, 32 nt, Homo Sapiens
accucugucugugucgguccagugucuuuagc

SEQ ID NO: 47146 - RNA, 32 nt, Homo Sapiens
cuuugggaauaauaaaaugaaauaauacuuuu

SEQ ID NO: 47147 - RNA, 32 nt, Homo Sapiens
gccugugcagccugaugcccccucguggcugc

SEQ ID NO: 47148 - RNA, 32 nt, Homo Sapiens
auuggauuugaaaugugaggacaugagauuug

SEQ ID NO: 47149 - RNA, 32 nt, Homo Sapiens
gguggagccaggcgccggcgucuuccaguucu

SEQ ID NO: 47150 - RNA, 32 nt, Homo Sapiens
ggaggcugcagugagcugugauugugccacug

SEQ ID NO: 47151 - RNA, 32 nt, Homo Sapiens
auuuaagugucuaagucacaaaucugaagaaa

SEQ ID NO: 47152 - RNA, 32 nt, Homo Sapiens
acagaagugucugcagauggcacugccugggc

SEQ ID NO: 47153 - RNA, 32 nt, Homo Sapiens
gccugggaauuggagucucaccauggcucccc

SEQ ID NO: 47154 - RNA, 32 nt, Homo Sapiens
uguuaguacuuugaauuuuugcugauguucaa

SEQ ID NO: 47155 - RNA, 32 nt, Homo Sapiens
cgaaguuuauuccuaagcaguuuaucguuuuu

SEQ ID NO: 47156 - RNA, 32 nt, Homo Sapiens
ggccugggcuccucagaggcuucuggagugag

SEQ ID NO: 47157 - RNA, 32 nt, Homo Sapiens
uucacgcgucugcagagcuggugcugcaggcc

SEQ ID NO: 47158 - RNA, 32 nt, Homo Sapiens
uuggguuuucuuuuuuaaaaacauaauacugu

SEQ ID NO: 47159 - RNA, 32 nt, Homo Sapiens
ugaacugcugcuacauccagacacugugcaaa

SEQ ID NO: 47160 - RNA, 32 nt, Homo Sapiens
augggacaaaaaucaauuaucucauuaauguu

SEQ ID NO: 47161 - RNA, 32 nt, Homo Sapiens
cauuuauuuuucccucaaaagagagucaaaua

SEQ ID NO: 47162 - RNA, 32 nt, Homo Sapiens
gucuuuuaaaaaacauaacaaacucauguucc

SEQ ID NO: 47163 - RNA, 32 nt, Homo Sapiens
uucuuuuuaaacaucagaggcucuggcuacac

SEQ ID NO: 47164 - RNA, 32 nt, Homo Sapiens
gaauucgaauuccuuuguuuccacugggacgg

SEQ ID NO: 47165 - RNA, 32 nt, Homo Sapiens
agcuuggcauuugucagggugggaggaaaacu

SEQ ID NO: 47166 - RNA, 32 nt, Homo Sapiens
ucagccucaugccccaggccucgucuuucaug

SEQ ID NO: 47167 - RNA, 32 nt, Homo Sapiens
uaauguuauagcuguauugauguaauaccaga

SEQ ID NO: 47168 - RNA, 32 nt, Homo Sapiens
agaaacaguaagacacugaauaaaauaaauaa

SEQ ID NO: 47169 - RNA, 29 nt, Homo Sapiens
gaaaaauaaaguuuuaaauguaucuaugu

SEQ ID NO: 47170 - RNA, 32 nt, Homo Sapiens
gcccggcccgccccgcucuccuagucccuugc

SEQ ID NO: 47171 - RNA, 32 nt, Homo Sapiens
aagaagauuuguaagaauuaaacuauauuuau

SEQ ID NO: 47172 - RNA, 32 nt, Homo Sapiens
agcagccauggggaagccgggcguggaggcag

SEQ ID NO: 47173 - RNA, 32 nt, Homo Sapiens
auguugaauagaucaaccaauuccuacagccc

SEQ ID NO: 47174 - RNA, 32 nt, Homo Sapiens
cccgccaccucggcaacuccgcgcccgccucc

SEQ ID NO: 47175 - RNA, 32 nt, Homo Sapiens
gggcccacaaaggggagaagggccagcccuac

SEQ ID NO: 47176 - RNA, 32 nt, Homo Sapiens
cuucugcgcgccugggaucccggagccugccu

SEQ ID NO: 47177 - RNA, 32 nt, Homo Sapiens
agaaaccauccuuguuacuugcaugucuaacc

SEQ ID NO: 47178 - RNA, 32 nt, Homo Sapiens
ucauguuugagucucuuaacugauggaugccc

SEQ ID NO: 47179 - RNA, 32 nt, Homo Sapiens
uugugaaaacaauaccccaagguaauaggaaa

SEQ ID NO: 47180 - RNA, 32 nt, Homo Sapiens
gcugcauucgccucggcuauguuucggauugu

SEQ ID NO: 47181 - RNA, 32 nt, Homo Sapiens
uggcauauggaaaagcuuuguauuuugguuag

SEQ ID NO: 47182 - RNA, 32 nt, Homo Sapiens
ugcgccuggccacagccuccccgcaucuaaag

SEQ ID NO: 47183 - RNA, 32 nt, Homo Sapiens
aaaggccuugucaucaccuuccaagaaaguuu

SEQ ID NO: 47184 - RNA, 32 nt, Homo Sapiens
ccuguguuguauuacacauauuagccacgagu

SEQ ID NO: 47185 - RNA, 32 nt, Homo Sapiens
acagccaugaagaucccggacucauaccagcu

SEQ ID NO: 47186 - RNA, 32 nt, Homo Sapiens
aagugguggagagacuccaugcagaaucgcca

SEQ ID NO: 47187 - RNA, 32 nt, Homo Sapiens
agcgugcgugugcgugugaugugugugaugca

SEQ ID NO: 47188 - RNA, 32 nt, Homo Sapiens
ggugacccuguauuucuuucuggugcccauuc

SEQ ID NO: 47189 - RNA, 32 nt, Homo Sapiens
ggacaucggaggugggcuagcacugaaacugc

SEQ ID NO: 47190 - RNA, 32 nt, Homo Sapiens
aaggccccagcucgcuggccucgcgcugggcg

SEQ ID NO: 47191 - RNA, 30 nt, Homo Sapiens
uggagcugcugaugcggcggcagggccugg

SEQ ID NO: 47192 - RNA, 32 nt, Homo Sapiens
ucagggcacugacaggggcagcucugucacug

SEQ ID NO: 47193 - RNA, 32 nt, Homo Sapiens
agggaucgacaggcaccucuucugccuuuacu

SEQ ID NO: 47194 - RNA, 32 nt, Homo Sapiens
cauguacauuugucaccucucuuucuucccua

SEQ ID NO: 47195 - RNA, 32 nt, Homo Sapiens
acccuucacugaguucucuggauuuguucuca

SEQ ID NO: 47196 - RNA, 32 nt, Homo Sapiens
cuuuucuaaaagacuucccuaacacuuacccc

SEQ ID NO: 47197 - RNA, 32 nt, Homo Sapiens
cccucagagcaggccaagagggugggaggugg

SEQ ID NO: 47198 - RNA, 32 nt, Homo Sapiens
uuuucauuaaaacuuuuuuguucgauaugccu

SEQ ID NO: 47199 - RNA, 32 nt, Homo Sapiens
aaucacaaagauuggcuuggcugugguccuga

SEQ ID NO: 47200 - RNA, 32 nt, Homo Sapiens
cgcucugcgagcuggauguccaggcugcgggc

SEQ ID NO: 47201 - RNA, 32 nt, Homo Sapiens
gaagaccuaccuuugauuccuggcuuucccuu

SEQ ID NO: 47202 - RNA, 32 nt, Homo Sapiens
ggaggaagacucuggaacccuggaagcuguau

SEQ ID NO: 47203 - RNA, 32 nt, Homo Sapiens
cuccugcgcucuugugcaccaagcagcuugug

SEQ ID NO: 47204 - RNA, 32 nt, Homo Sapiens
uuucuaauuuuuguuacugaugagaugaaacc

SEQ ID NO: 47205 - RNA, 32 nt, Homo Sapiens
cuuaauuugggaauuuguuguguugaaauggc

SEQ ID NO: 47206 - RNA, 32 nt, Homo Sapiens
caugucccgcguugcaucuccuccugaaagaa

SEQ ID NO: 47207 - RNA, 32 nt, Homo Sapiens
gccugaagugauccuccugccucggccuccua

SEQ ID NO: 47208 - RNA, 32 nt, Homo Sapiens
ucaugcuggucucaaacuccugggcucaagca

SEQ ID NO: 47209 - RNA, 32 nt, Homo Sapiens
gucugcuuuguucuugaggggcacucuuccuu

SEQ ID NO: 47210 - RNA, 32 nt, Homo Sapiens
cgcgcgcgcacacacacacacacacacacaca

SEQ ID NO: 47211 - RNA, 32 nt, Homo Sapiens
cacacacgcgcgcgcacacacacacacacaca

SEQ ID NO: 47212 - RNA, 32 nt, Homo Sapiens
cacacacacgcgcgcgcacacacacacacaca

SEQ ID NO: 47213 - RNA, 32 nt, Homo Sapiens
caagcggcgcgguggcacgaagauggcggggu

SEQ ID NO: 47214 - RNA, 32 nt, Homo Sapiens
uaucagucuacuguggggcuggggacccucac

SEQ ID NO: 47215 - RNA, 32 nt, Homo Sapiens
aaggcuggggguuggagaagggugaggggcuu

SEQ ID NO: 47216 - RNA, 32 nt, Homo Sapiens
ccgucggugcauggccggcguccacgcugugc

SEQ ID NO: 47217 - RNA, 32 nt, Homo Sapiens
ccacccaccguguucccagcucugccacgcug

SEQ ID NO: 47218 - RNA, 32 nt, Homo Sapiens
gagugguauguggaauaggagaauauaaaaac

SEQ ID NO: 47219 - RNA, 32 nt, Homo Sapiens
cucccuccgcgggucucuuggggaccggaacg

SEQ ID NO: 47220 - RNA, 32 nt, Homo Sapiens
aucucuuccuuccccccaguaaggcuggaaga

SEQ ID NO: 47221 - RNA, 32 nt, Homo Sapiens
cggccggcccgguggcuuggcaggcagucugu

SEQ ID NO: 47222 - RNA, 32 nt, Homo Sapiens
ugugagcaggcccaauccuuugcagcaagaau

SEQ ID NO: 47223 - RNA, 32 nt, Homo Sapiens
uuucagggcucccaccuaagacuuugugaaac

SEQ ID NO: 47224 - RNA, 32 nt, Homo Sapiens
gacuugccuuugucuugguuccugcuuuuccc

SEQ ID NO: 47225 - RNA, 32 nt, Homo Sapiens
ccgugugucucaugccagcagcacgucgccau

SEQ ID NO: 47226 - RNA, 32 nt, Homo Sapiens
auggccucuccucuccugcccuggccccggcc

SEQ ID NO: 47227 - RNA, 32 nt, Homo Sapiens
uugcucuccacuuuucaagugggucuugggua

SEQ ID NO: 47228 - RNA, 32 nt, Homo Sapiens
gaucaguagcuuccuuuaccgacguguauauu

SEQ ID NO: 47229 - RNA, 32 nt, Homo Sapiens
gaauuccauuauuuuguccauggcaucucuaa

SEQ ID NO: 47230 - RNA, 32 nt, Homo Sapiens
aaucuuaaugaaaccuuucuguuaaguguuuu

SEQ ID NO: 47231 - RNA, 32 nt, Homo Sapiens
gggcuucagcgaggcgggagggcggcccuguu

SEQ ID NO: 47232 - RNA, 32 nt, Homo Sapiens
auccguaagugacuuaaauagcacucauaaug

SEQ ID NO: 47233 - RNA, 32 nt, Homo Sapiens
cgggggaggagcucuuccugcaggcguggaaa

SEQ ID NO: 47234 - RNA, 32 nt, Homo Sapiens
agccauuccacaggugagaugucuagagucag

SEQ ID NO: 47235 - RNA, 32 nt, Homo Sapiens
uuguuccugugcugcaucacccacucagccuu

SEQ ID NO: 47236 - RNA, 32 nt, Homo Sapiens
ggcgcuguggcggcgagugagggucucuuuuu

SEQ ID NO: 47237 - RNA, 32 nt, Homo Sapiens
gagagcugccccagccccucgaacgccuggcu

SEQ ID NO: 47238 - RNA, 32 nt, Homo Sapiens
ucuaaaaaggauuaauuauucaugcucauugu

SEQ ID NO: 47239 - RNA, 32 nt, Homo Sapiens
acuugggcggccuuggucuguaagcucugcgu

SEQ ID NO: 47240 - RNA, 29 nt, Homo Sapiens
cuucuacauauuuaccaccauaggcguuu

SEQ ID NO: 47241 - RNA, 32 nt, Homo Sapiens
cauguuaaaaauuggaccuaauaaaaguauuu

SEQ ID NO: 47242 - RNA, 32 nt, Homo Sapiens
cgcacccccgcuccccgccugacgcacggagg

SEQ ID NO: 47243 - RNA, 32 nt, Homo Sapiens
gagaaaugcacuuuucagcuccuguuucagau

SEQ ID NO: 47244 - RNA, 32 nt, Homo Sapiens
gggacggcccucgcccgcggugauggugguua

SEQ ID NO: 47245 - RNA, 32 nt, Homo Sapiens
acuucagacacagguucccuccuuccaauucc

SEQ ID NO: 47246 - RNA, 32 nt, Homo Sapiens
aaacaguuaguuauguaguugaagcaauuugu

SEQ ID NO: 47247 - RNA, 32 nt, Homo Sapiens
ccccccugguaguaacagucagggccuggucu

SEQ ID NO: 47248 - RNA, 32 nt, Homo Sapiens
gaagcaugaucaaagcuuguuuuauuucacca

SEQ ID NO: 47249 - RNA, 32 nt, Homo Sapiens
ggggcacaagaaaaaauaguauagcugaaaug

SEQ ID NO: 47250 - RNA, 32 nt, Homo Sapiens
ugcugcaucagguccuaagaaaacccaccuuc

SEQ ID NO: 47251 - RNA, 32 nt, Homo Sapiens
uacaaguucagaauauuuuaaaccugauuuac

SEQ ID NO: 47252 - RNA, 32 nt, Homo Sapiens
agaccucgcgaagcgcagcagccccggcccuu

SEQ ID NO: 47253 - RNA, 29 nt, Homo Sapiens
uggggauaaggaguauauuuucaagccaa

SEQ ID NO: 47254 - RNA, 32 nt, Homo Sapiens
ggcccgaggcggacgugagaagggucgggcca

SEQ ID NO: 47255 - RNA, 32 nt, Homo Sapiens
ucccuccugucccagcuccccagccuggcgua

SEQ ID NO: 47256 - RNA, 32 nt, Homo Sapiens
cuuucacuggcagugauucagguggagauucc

SEQ ID NO: 47257 - RNA, 32 nt, Homo Sapiens
uggaucuggaucugcggcggccucgggcgguu

SEQ ID NO: 47258 - RNA, 32 nt, Homo Sapiens
guccccucuggggcguccccagccuccccguc

SEQ ID NO: 47259 - RNA, 32 nt, Homo Sapiens
agggacaggagccacccuccccaggcccaacu

SEQ ID NO: 47260 - RNA, 32 nt, Homo Sapiens
uggaaacuuggcuguagacaucugaagagggu

SEQ ID NO: 47261 - RNA, 32 nt, Homo Sapiens
aggaggcggcccggggacccggacacccugaa

SEQ ID NO: 47262 - RNA, 32 nt, Homo Sapiens
uuucacccauauugcugguccuguuuuucaau

SEQ ID NO: 47263 - RNA, 32 nt, Homo Sapiens
aaugguacagcuuuggacaucgguuuggcaaa

SEQ ID NO: 47264 - RNA, 32 nt, Homo Sapiens
auacagucccccgggccccucccggccgcucg

SEQ ID NO: 47265 - RNA, 32 nt, Homo Sapiens
gcacaugugugcacgcacacauacaaucuggg

SEQ ID NO: 47266 - RNA, 32 nt, Homo Sapiens
gcagccuacagacuuggugcccugcaucccag

SEQ ID NO: 47267 - RNA, 32 nt, Homo Sapiens
caacuagcuggcgggggcggaagauggcgacg

SEQ ID NO: 47268 - RNA, 32 nt, Homo Sapiens
ugaagagucaaaggaaucugugucuaauaucc

SEQ ID NO: 47269 - RNA, 32 nt, Homo Sapiens
aguuauacauaguggaauaaagaagguaaacc

SEQ ID NO: 47270 - RNA, 32 nt, Homo Sapiens
uuuuugguauuuauuuaugaaauauuugaaca

SEQ ID NO: 47271 - RNA, 32 nt, Homo Sapiens
uguacaaccacaucuucaaaauguccaguagc

SEQ ID NO: 47272 - RNA, 32 nt, Homo Sapiens
ccgccgccgcuggcccagacugagagcggggu

SEQ ID NO: 47273 - RNA, 32 nt, Homo Sapiens
ucucccgcccagccaaaugcaggccgccgccc

SEQ ID NO: 47274 - RNA, 32 nt, Homo Sapiens
cgccugcucccuccugcuugccugagucaccg

SEQ ID NO: 47275 - RNA, 32 nt, Homo Sapiens
gcccggcuaggcgcagagaggcggccucccuc

SEQ ID NO: 47276 - RNA, 32 nt, Homo Sapiens
ugccacgcugccgucuguguuacagugguguu

SEQ ID NO: 47277 - RNA, 32 nt, Homo Sapiens
agcgggcggaggaggaagugucauggcgucgg

SEQ ID NO: 47278 - RNA, 28 nt, Homo Sapiens
gguugcugggcgguuccgaggugacgga

SEQ ID NO: 47279 - RNA, 32 nt, Homo Sapiens
gcagcccagcaacucgcaaacgcaaccugaag

SEQ ID NO: 47280 - RNA, 32 nt, Homo Sapiens
uguguguagaaagccagcuggauguuuguggu

SEQ ID NO: 47281 - RNA, 30 nt, Homo Sapiens
gaggcaugagugaggcgggcgaggccacca

SEQ ID NO: 47282 - RNA, 32 nt, Homo Sapiens
uugcagcugagcaagacuagaagcuggucauu

SEQ ID NO: 47283 - RNA, 32 nt, Homo Sapiens
caugaagaaaucaaccaguccagaaacgaaac

SEQ ID NO: 47284 - RNA, 32 nt, Homo Sapiens
ccccgggaccccaccucuggccccaccucccu

SEQ ID NO: 47285 - RNA, 32 nt, Homo Sapiens
gcuacgaaaggaugagcagagcccggagcucc

SEQ ID NO: 47286 - RNA, 32 nt, Homo Sapiens
aauuaaauguauauuucuuuagccuucccuac

SEQ ID NO: 47287 - RNA, 32 nt, Homo Sapiens
cggccgccgcucuugucgucgcaguauuuccu

SEQ ID NO: 47288 - RNA, 32 nt, Homo Sapiens
cccucuuuaaccucaucuacaagcauuugccc

SEQ ID NO: 47289 - RNA, 31 nt, Homo Sapiens
cacucagcauggucgccaccauagauuccca

SEQ ID NO: 47290 - RNA, 32 nt, Homo Sapiens
caccagcuagaaaucuccauggaccaguaccc

SEQ ID NO: 47291 - RNA, 32 nt, Homo Sapiens
agaaauacaaauuuugucauguuucucaagca

SEQ ID NO: 47292 - RNA, 32 nt, Homo Sapiens
cacacacacacacacacacacacacaccacua

SEQ ID NO: 47293 - RNA, 29 nt, Homo Sapiens
ggagcuucuauccugcucuguggaagaaa

SEQ ID NO: 47294 - RNA, 32 nt, Homo Sapiens
cuuuggguuuuucauaggguauucccauaacc

SEQ ID NO: 47295 - RNA, 32 nt, Homo Sapiens
uuuaauacgaagaggacacucccgugugcagg

SEQ ID NO: 47296 - RNA, 32 nt, Homo Sapiens
ugcccaagccccagccugccccaguccuuccc

SEQ ID NO: 47297 - RNA, 32 nt, Homo Sapiens
ggugggcuccuggaacugcagcagccaccccc

SEQ ID NO: 47298 - RNA, 32 nt, Homo Sapiens
aggcgggaaagagcuucggcugggccacgggc

SEQ ID NO: 47299 - RNA, 32 nt, Homo Sapiens
uucccugcacuagcagaagagaauucuguauc

SEQ ID NO: 47300 - RNA, 32 nt, Homo Sapiens
gucacuguccgcugcuggcuggaggggaugca

SEQ ID NO: 47301 - RNA, 32 nt, Homo Sapiens
cggccgcucccuccgccuccuccccgccccga

SEQ ID NO: 47302 - RNA, 32 nt, Homo Sapiens
acugcuggaccucagcauucccuugauaucag

SEQ ID NO: 47303 - RNA, 32 nt, Homo Sapiens
cucagcugaugaaaauuugggucuggcccauu

SEQ ID NO: 47304 - RNA, 32 nt, Homo Sapiens
cuccucuucuagcauuucuuccaauuauuaca

SEQ ID NO: 47305 - RNA, 32 nt, Homo Sapiens
aucaguuugagauacuagguuuuaucaccugc

SEQ ID NO: 47306 - RNA, 30 nt, Homo Sapiens
gcugguggagguggcggagagcaagguggc

SEQ ID NO: 47307 - RNA, 32 nt, Homo Sapiens
ccaguagccuugggcuggcccacgccaacugu

SEQ ID NO: 47308 - RNA, 32 nt, Homo Sapiens
cuaguuuaugauaguuuguccugucuccuuag

SEQ ID NO: 47309 - RNA, 32 nt, Homo Sapiens
acaaauagaaauuuaaugauguguucaacucc

SEQ ID NO: 47310 - RNA, 32 nt, Homo Sapiens
ccggaggcgcggugcucggcccgggagcgcga

SEQ ID NO: 47311 - RNA, 32 nt, Homo Sapiens
ccggacccagugggggcugucgcagccaacac

SEQ ID NO: 47312 - RNA, 31 nt, Homo Sapiens
ccgacuugauaaacgguuucgccucuuuugg

SEQ ID NO: 47313 - RNA, 32 nt, Homo Sapiens
caggacagauuuuaggugacaccugguuauga

SEQ ID NO: 47314 - RNA, 32 nt, Homo Sapiens
guguuggcaaggaaacagcaacacaggcugcg

SEQ ID NO: 47315 - RNA, 32 nt, Homo Sapiens
gcauaaauauaaaaagcaauauaguacuuagc

SEQ ID NO: 47316 - RNA, 32 nt, Homo Sapiens
aaacccccauucuguuuccagcccagaagaaa

SEQ ID NO: 47317 - RNA, 32 nt, Homo Sapiens
acagggucuuacucuugucacccaggcuggag

SEQ ID NO: 47318 - RNA, 32 nt, Homo Sapiens
uuuugucugccaugggcauuauauuauguaaa

SEQ ID NO: 47319 - RNA, 32 nt, Homo Sapiens
cucgauucaguuuuagcuaaauuuauaguuua

SEQ ID NO: 47320 - RNA, 32 nt, Homo Sapiens
ucugcuuuccaggcugaagugauucauucauu

SEQ ID NO: 47321 - RNA, 32 nt, Homo Sapiens
auguggaagaacuuggggucggggaguguguu

SEQ ID NO: 47322 - RNA, 32 nt, Homo Sapiens
uccgagcgggacacugaacggcccguaugcgc

SEQ ID NO: 47323 - RNA, 32 nt, Homo Sapiens
uaguagccaggcauaguggugcaugccuguau

SEQ ID NO: 47324 - RNA, 32 nt, Homo Sapiens
aaaauuuucugcaauuuugucuaaguuaauuu

SEQ ID NO: 47325 - RNA, 32 nt, Homo Sapiens
acaccacaauucccagcauccuccuccuccuc

SEQ ID NO: 47326 - RNA, 32 nt, Homo Sapiens
ccuugcucccgucccuggcccggaccuuggcu

SEQ ID NO: 47327 - RNA, 32 nt, Homo Sapiens
cugcagggacaccagcagccuaccuccuaccc

SEQ ID NO: 47328 - RNA, 32 nt, Homo Sapiens
auggaggugguacuuacccaccccuuuuagcu

SEQ ID NO: 47329 - RNA, 32 nt, Homo Sapiens
guguucucgcuuuggaaaaagacggccauccc

SEQ ID NO: 47330 - RNA, 32 nt, Homo Sapiens
agacucgggcuuugagcuccagcucagcugcu

SEQ ID NO: 47331 - RNA, 32 nt, Homo Sapiens
ugugcuuauuauauuucuuuuuagauugucua

SEQ ID NO: 47332 - RNA, 32 nt, Homo Sapiens
ggcuacgcuccagccccggguguggacauuga

SEQ ID NO: 47333 - RNA, 32 nt, Homo Sapiens
gugcgggggagaagauggcggcggcgggggag

SEQ ID NO: 47334 - RNA, 32 nt, Homo Sapiens
gcaugcauccagggaacaggcaucaagaagcc

SEQ ID NO: 47335 - RNA, 32 nt, Homo Sapiens
cgccggccuccacaacuccauccgcucgcugg

SEQ ID NO: 47336 - RNA, 32 nt, Homo Sapiens
aaucacuguggucagucuccugucccagcuuc

SEQ ID NO: 47337 - RNA, 32 nt, Homo Sapiens
cugcugucaagcggcacgggccccagacccau

SEQ ID NO: 47338 - RNA, 32 nt, Homo Sapiens
auuuucucuguaagguugcaaacaagguccug

SEQ ID NO: 47339 - RNA, 32 nt, Homo Sapiens
ccuguaacucaaaccagaauuuuuaaggaaua

SEQ ID NO: 47340 - RNA, 32 nt, Homo Sapiens
cuggacacagaaauggaaaacaggagucgauu

SEQ ID NO: 47341 - RNA, 32 nt, Homo Sapiens
gccucaccaaaacagcagcagcucguuggcuc

SEQ ID NO: 47342 - RNA, 32 nt, Homo Sapiens
aaagacaguaauuauucugcauucacaauuag

SEQ ID NO: 47343 - RNA, 32 nt, Homo Sapiens
agauucugaaaagauuugaucaccaggagauu

SEQ ID NO: 47344 - RNA, 32 nt, Homo Sapiens
ugggggccaggggccuuggagagacagaaaca

SEQ ID NO: 47345 - RNA, 32 nt, Homo Sapiens
uucuagaguguuuguguguaccccgcuucuga

SEQ ID NO: 47346 - RNA, 32 nt, Homo Sapiens
ucuagaagcuccccggcggcgcccagucccgg

SEQ ID NO: 47347 - RNA, 32 nt, Homo Sapiens
agggugggaaaggggaggagggagcccugaaa

SEQ ID NO: 47348 - RNA, 32 nt, Homo Sapiens
ccagcugcucacccccuuucccgggaagggcc

SEQ ID NO: 47349 - RNA, 32 nt, Homo Sapiens
accuaauugcugucucccagcagacugguggc

SEQ ID NO: 47350 - RNA, 32 nt, Homo Sapiens
cucccgcuucuccuccuccuccuccacaguug

SEQ ID NO: 47351 - RNA, 32 nt, Homo Sapiens
uaaaaugcaguaacauucuacuugcuuauuac

SEQ ID NO: 47352 - RNA, 32 nt, Homo Sapiens
ugagccacuccaguguucccagccccaaggcc

SEQ ID NO: 47353 - RNA, 32 nt, Homo Sapiens
ucaauuauuaaaccuucucuucuagugaaaaa

SEQ ID NO: 47354 - RNA, 28 nt, Homo Sapiens
gccuuccugucuacuaggaugacaagga

SEQ ID NO: 47355 - RNA, 32 nt, Homo Sapiens
auuugggggacaggaguguggauaccuuccuu

SEQ ID NO: 47356 - RNA, 32 nt, Homo Sapiens
cgcuguccggcagcugcucuuuguccacccaa

SEQ ID NO: 47357 - RNA, 29 nt, Homo Sapiens
augaggacaaaugagugaaaccagcuguu

SEQ ID NO: 47358 - RNA, 32 nt, Homo Sapiens
ccgcaaagggaagaaaagcaaaagacgaaaau

SEQ ID NO: 47359 - RNA, 32 nt, Homo Sapiens
agcaauuuauuugaaacuucuaauggauuuuu

SEQ ID NO: 47360 - RNA, 32 nt, Homo Sapiens
gcgaagaauccggcugccccugggccaguccc

SEQ ID NO: 47361 - RNA, 32 nt, Homo Sapiens
aguguauaaaauuggacugcauuucuuagagu

SEQ ID NO: 47362 - RNA, 32 nt, Homo Sapiens
acuaaugaggacacuguauauggcaucgcuaa

SEQ ID NO: 47363 - RNA, 32 nt, Homo Sapiens
uuuccaaagaaauaaaagaacaauuauuuuua

SEQ ID NO: 47364 - RNA, 32 nt, Homo Sapiens
gagaggagaaaguuggaagaggcuauggaaca

SEQ ID NO: 47365 - RNA, 32 nt, Homo Sapiens
gcuauugcacuccagccugggcgacagagcaa

SEQ ID NO: 47366 - RNA, 32 nt, Homo Sapiens
gaguauggaaaaccuaauggugcuucucccuu

SEQ ID NO: 47367 - RNA, 32 nt, Homo Sapiens
aggccuauaauuacauuuauuugcaauguuuc

SEQ ID NO: 47368 - RNA, 32 nt, Homo Sapiens
uaauuuuuaauugucaaaaccaaaaggaauca

SEQ ID NO: 47369 - RNA, 32 nt, Homo Sapiens
ugagggcaagcacugugucuccuuucaaccau

SEQ ID NO: 47370 - RNA, 32 nt, Homo Sapiens
ugccuuggcuccagcccuguaccccuugguac

SEQ ID NO: 47371 - RNA, 32 nt, Homo Sapiens
caccagguuaucaaguaugggcacauacuuga

SEQ ID NO: 47372 - RNA, 32 nt, Homo Sapiens
aggacuuuaaucuggaggaaaaauauccuaca

SEQ ID NO: 47373 - RNA, 32 nt, Homo Sapiens
uugacacucuguaucuagcuacucuagugggg

SEQ ID NO: 47374 - RNA, 30 nt, Homo Sapiens
cuggaccgggcggugagggaaaccgaggcc

SEQ ID NO: 47375 - RNA, 32 nt, Homo Sapiens
agcgcagccccucuccucuucaggcuacaggg

SEQ ID NO: 47376 - RNA, 32 nt, Homo Sapiens
cuuugugugucugcguguaugcuuguguuccc

SEQ ID NO: 47377 - RNA, 32 nt, Homo Sapiens
uaauguauuguuuauuuuuuuaaguuauuuaa

SEQ ID NO: 47378 - RNA, 25 nt, Homo Sapiens
aacaaagaauaaauaagcaaauauu

SEQ ID NO: 47379 - RNA, 32 nt, Homo Sapiens
guguugguguuuccuuuagacuggccuagccu

SEQ ID NO: 47380 - RNA, 32 nt, Homo Sapiens
uugcuccggccgcggccagcggagcccugggc

SEQ ID NO: 47381 - RNA, 32 nt, Homo Sapiens
ccccaggcucugccagcuacccgcgcucugag

SEQ ID NO: 47382 - RNA, 32 nt, Homo Sapiens
uuaauuguauuuuaaauugaagccuuacauuu

SEQ ID NO: 47383 - RNA, 32 nt, Homo Sapiens
uaauuagguugagcuuuuuuuaugugcuuauu

SEQ ID NO: 47384 - RNA, 32 nt, Homo Sapiens
gccugggccugcuccccagcccggggcagggg

SEQ ID NO: 47385 - RNA, 32 nt, Homo Sapiens
cauagauuccugaucuuaauuuaaauaggugc

SEQ ID NO: 47386 - RNA, 32 nt, Homo Sapiens
ugacucuagacacuaacuuaguuccagguucg

SEQ ID NO: 47387 - RNA, 32 nt, Homo Sapiens
gcugccaaggccagcuccgucaggcagaggcu

SEQ ID NO: 47388 - RNA, 32 nt, Homo Sapiens
gcaucaagcacacaguaagauuucauaagaga

SEQ ID NO: 47389 - RNA, 32 nt, Homo Sapiens
cgucauaaaaacaguuggugacagcaacagaa

SEQ ID NO: 47390 - RNA, 32 nt, Homo Sapiens
aacugaagguaacuacuuuuuucauauuugga

SEQ ID NO: 47391 - RNA, 32 nt, Homo Sapiens
uguuccucucugccggccgccccaaccugccc

SEQ ID NO: 47392 - RNA, 32 nt, Homo Sapiens
ugggcaauaaaauaaaaugauucaguguuucu

SEQ ID NO: 47393 - RNA, 32 nt, Homo Sapiens
aguuuucacaguguuacauuauucauuauaug

SEQ ID NO: 47394 - RNA, 32 nt, Homo Sapiens
ccuggcuuaccugggaucauuuucauguuaug

SEQ ID NO: 47395 - RNA, 32 nt, Homo Sapiens
caauaccucacgauauaaaauaaaaaugaaag

SEQ ID NO: 47396 - RNA, 32 nt, Homo Sapiens
gccaguuccuggauggcugucuguggguggag

SEQ ID NO: 47397 - RNA, 32 nt, Homo Sapiens
ugggaacugugauggcaucgggaccaguccug

SEQ ID NO: 47398 - RNA, 32 nt, Homo Sapiens
ccaccuccugagggcucagcucugcccccgcc

SEQ ID NO: 47399 - RNA, 32 nt, Homo Sapiens
aagggccacuuaaauuuuccuucgaguaaaca

SEQ ID NO: 47400 - RNA, 32 nt, Homo Sapiens
ugccaucucauacauuuucauaucuucuucuc

SEQ ID NO: 47401 - RNA, 32 nt, Homo Sapiens
uauuuauuuuuucaggaaauucaucuccaucg

SEQ ID NO: 47402 - RNA, 32 nt, Homo Sapiens
auuuguuuuccuuuuuuccccagccucuugca

SEQ ID NO: 47403 - RNA, 32 nt, Homo Sapiens
caucuggguccucccuccucugugccccaaca

SEQ ID NO: 47404 - RNA, 32 nt, Homo Sapiens
ugaggcucuauuucugucucugaugcucuucu

SEQ ID NO: 47405 - RNA, 32 nt, Homo Sapiens
aagccgcccucccccgccgccagcaagaaggu

SEQ ID NO: 47406 - RNA, 32 nt, Homo Sapiens
acuuguauuuuuuuuucuuguauuuuuccaau

SEQ ID NO: 47407 - RNA, 32 nt, Homo Sapiens
uucaauauucauaacugaguuauuuuccucua

SEQ ID NO: 47408 - RNA, 32 nt, Homo Sapiens
gaaccaaaugcuuuuguaaaacuuuuuggauu

SEQ ID NO: 47409 - RNA, 32 nt, Homo Sapiens
cgccucuuaugcucacagggcauggugacaca

SEQ ID NO: 47410 - RNA, 32 nt, Homo Sapiens
aguuauuugaacaaacaaaaguacuguacuca

SEQ ID NO: 47411 - RNA, 32 nt, Homo Sapiens
ugcucugugguugcugcuccccggcuuucaca

SEQ ID NO: 47412 - RNA, 32 nt, Homo Sapiens
ugagugagcggcgggcgggcgcgaguguggcc

SEQ ID NO: 47413 - RNA, 31 nt, Homo Sapiens
ccagaaucuccagucgcuccagcuggcaggc

SEQ ID NO: 47414 - RNA, 32 nt, Homo Sapiens
cauguguuagacagugugcacuaugcuauacu

SEQ ID NO: 47415 - RNA, 32 nt, Homo Sapiens
gccgacuccgcagcagcaucuccagcuuuguc

SEQ ID NO: 47416 - RNA, 32 nt, Homo Sapiens
uugcccaccgcgggcugucugcucucccuccu

SEQ ID NO: 47417 - RNA, 32 nt, Homo Sapiens
gaguguuaguuccauggguguggcuggucaug

SEQ ID NO: 47418 - RNA, 32 nt, Homo Sapiens
cuuuucuguuuuucuucuucccgggaagugaa

SEQ ID NO: 47419 - RNA, 32 nt, Homo Sapiens
ucuacuuuucuuuucuuccagaugcaugaaca

SEQ ID NO: 47420 - RNA, 32 nt, Homo Sapiens
uguggaaaaguaaggaguuagguggcuugaua

SEQ ID NO: 47421 - RNA, 32 nt, Homo Sapiens
guccacuaacaagcuucacacgcaacacaggg

SEQ ID NO: 47422 - RNA, 32 nt, Homo Sapiens
ucuuucuauccugcucuucuguugaaacacac

SEQ ID NO: 47423 - RNA, 32 nt, Homo Sapiens
ugucguaacagcaggagcauggccgcaacuuc

SEQ ID NO: 47424 - RNA, 32 nt, Homo Sapiens
cagguagucagagugagcuacauccugccccg

SEQ ID NO: 47425 - RNA, 32 nt, Homo Sapiens
gauuuccaaggugcaauuggcagacgcuggca

SEQ ID NO: 47426 - RNA, 32 nt, Homo Sapiens
ucaccaccgcucauggugcgcgcgucucgggc

SEQ ID NO: 47427 - RNA, 32 nt, Homo Sapiens
uggcugauucagauaccauuuuuuagagauaa

SEQ ID NO: 47428 - RNA, 32 nt, Homo Sapiens
aacuuguaaauaucuuuuuucuuuuuuuuaau

SEQ ID NO: 47429 - RNA, 32 nt, Homo Sapiens
agggauuguggggugacaguuuuacauuuacu

SEQ ID NO: 47430 - RNA, 32 nt, Homo Sapiens
accucaggcugaccguagggagggaucuugag

SEQ ID NO: 47431 - RNA, 32 nt, Homo Sapiens
guaauggaccagcaaugcugaagacgccuuua

SEQ ID NO: 47432 - RNA, 32 nt, Homo Sapiens
cuacuuuuucuuucuucauauuaaacaaauaa

SEQ ID NO: 47433 - RNA, 32 nt, Homo Sapiens
gaccacugugauggggacccugggccagcgcc

SEQ ID NO: 47434 - RNA, 32 nt, Homo Sapiens
cuagcgccacuacucgagacccugcccagagg

SEQ ID NO: 47435 - RNA, 32 nt, Homo Sapiens
agucagucgguaugcucuggcaucccauuucu

SEQ ID NO: 47436 - RNA, 32 nt, Homo Sapiens
agacauaauuuucucccuucugaaaugaguga

SEQ ID NO: 47437 - RNA, 31 nt, Homo Sapiens
acaagcaggggcccgucaggagucuagagua

SEQ ID NO: 47438 - RNA, 32 nt, Homo Sapiens
uuugguggcggcguccggagggugcugguuug

SEQ ID NO: 47439 - RNA, 32 nt, Homo Sapiens
cuccuguggguuuuguuaauucuuauuagacu

SEQ ID NO: 47440 - RNA, 32 nt, Homo Sapiens
gaggagucguaugcacuguuuuucuguugcug

SEQ ID NO: 47441 - RNA, 32 nt, Homo Sapiens
cguaacagcgucugggucagugacggacacuu

SEQ ID NO: 47442 - RNA, 32 nt, Homo Sapiens
gcguaucugggcgccugagcgcggcgugggag

SEQ ID NO: 47443 - RNA, 32 nt, Homo Sapiens
auagagaacauccguguaaaucaucuaacugg

SEQ ID NO: 47444 - RNA, 32 nt, Homo Sapiens
uaaugaucaaguguuacuuaucuaauaauccu

SEQ ID NO: 47445 - RNA, 32 nt, Homo Sapiens
cgacggcgguggugacgggcaccgggcucgcg

SEQ ID NO: 47446 - RNA, 32 nt, Homo Sapiens
agaaauaaaaauugggcaauaaaauaaaauga

SEQ ID NO: 47447 - RNA, 32 nt, Homo Sapiens
uguaaguucaaguguuuguaauuuuauuuauu

SEQ ID NO: 47448 - RNA, 32 nt, Homo Sapiens
aaaaauugggguugauuuuauguaucucuugg

SEQ ID NO: 47449 - RNA, 32 nt, Homo Sapiens
ccauuaaccccuguccucuccugcccuuaggg

SEQ ID NO: 47450 - RNA, 32 nt, Homo Sapiens
cugaugccccuucuccccuuccuggacacacu

SEQ ID NO: 47451 - RNA, 32 nt, Homo Sapiens
gagcugucucuucaucucuccucucucuccug

SEQ ID NO: 47452 - RNA, 32 nt, Homo Sapiens
ucccuccgcccggcggcugggcagguggcuga

SEQ ID NO: 47453 - RNA, 32 nt, Homo Sapiens
gauggugugggaggacagucucaucaaauaua

SEQ ID NO: 47454 - RNA, 32 nt, Homo Sapiens
acuucaugaaauauaguuuguaccccaguagu

SEQ ID NO: 47455 - RNA, 32 nt, Homo Sapiens
gccagggacaagaggaagcugggggcguccgu

SEQ ID NO: 47456 - RNA, 32 nt, Homo Sapiens
auuggagaggacuguggggaaagcagaguccu

SEQ ID NO: 47457 - RNA, 32 nt, Homo Sapiens
caguuaucacuauuuuguuuuaucuccaugcu

SEQ ID NO: 47458 - RNA, 32 nt, Homo Sapiens
cugacuaagcauguauauuuuaccaaacuuau

SEQ ID NO: 47459 - RNA, 28 nt, Homo Sapiens
ggaaugggguccccgggcauggugcugg

SEQ ID NO: 47460 - RNA, 32 nt, Homo Sapiens
ccccaguguuuccaucuugggaucacuugcag

SEQ ID NO: 47461 - RNA, 32 nt, Homo Sapiens
guaauggcugaauaaacugagcaaaguaacuc

SEQ ID NO: 47462 - RNA, 32 nt, Homo Sapiens
caaugcacauauaauuuaaaucuuguguucua

SEQ ID NO: 47463 - RNA, 32 nt, Homo Sapiens
agugcuuugccccuccuccccuucccuucugg

SEQ ID NO: 47464 - RNA, 32 nt, Homo Sapiens
ucgguacuuaggacuugauccugugguuggcc

SEQ ID NO: 47465 - RNA, 32 nt, Homo Sapiens
caaaaagccacuuuuccaaauggcgacaguug

SEQ ID NO: 47466 - RNA, 32 nt, Homo Sapiens
ucaagaccguugucucuucgaucgcuucuuug

SEQ ID NO: 47467 - RNA, 32 nt, Homo Sapiens
uggaguguuaggagggcggccugagcgguagg

SEQ ID NO: 47468 - RNA, 32 nt, Homo Sapiens
ggaugcagggaagagaggggcacaagauggag

SEQ ID NO: 47469 - RNA, 32 nt, Homo Sapiens
uggaaaaugcuugagcacuuugucugcuguua

SEQ ID NO: 47470 - RNA, 32 nt, Homo Sapiens
cucacugcaaccuccgccucccggguuaaagc

SEQ ID NO: 47471 - RNA, 32 nt, Homo Sapiens
aaaaaaaaagaauuauuucucugaagucuaca

SEQ ID NO: 47472 - RNA, 32 nt, Homo Sapiens
uucacucuggggauucgccauggacacgucuc

SEQ ID NO: 47473 - RNA, 27 nt, Homo Sapiens
ucugguuuuauuuucagcccugaaucu

SEQ ID NO: 47474 - RNA, 32 nt, Homo Sapiens
ccaguauggggagaggaggacauuugggcuca

SEQ ID NO: 47475 - RNA, 32 nt, Homo Sapiens
aguuuagaugaccaaaauggauauccgaggug

SEQ ID NO: 47476 - RNA, 32 nt, Homo Sapiens
agcuuccccgucuguccgcagccuccaggagc

SEQ ID NO: 47477 - RNA, 32 nt, Homo Sapiens
ugccccggacugcauugaagccaggcugccuu

SEQ ID NO: 47478 - RNA, 32 nt, Homo Sapiens
cugggguggguggaaggggcaggaggguggca

SEQ ID NO: 47479 - RNA, 32 nt, Homo Sapiens
cggaaagcacgcuccagacaagcucggcagac

SEQ ID NO: 47480 - RNA, 32 nt, Homo Sapiens
cagaccuuaaaauaucaacugauaaagaauuu

SEQ ID NO: 47481 - RNA, 32 nt, Homo Sapiens
cgucuguaaucccagcacuuugggaggcugag

SEQ ID NO: 47482 - RNA, 32 nt, Homo Sapiens
cgccuguaauuccagcacuuugggaggcugag

SEQ ID NO: 47483 - RNA, 29 nt, Homo Sapiens
uuauuugugacuuuucacccuacccugcu

SEQ ID NO: 47484 - RNA, 32 nt, Homo Sapiens
gaugaccaaagaugguucaauuagagucccag

SEQ ID NO: 47485 - RNA, 32 nt, Homo Sapiens
gcgucccggaauugugggggacaaaaaggcuc

SEQ ID NO: 47486 - RNA, 32 nt, Homo Sapiens
caugacaaaaauaacacuguuggcacuuauag

SEQ ID NO: 47487 - RNA, 32 nt, Homo Sapiens
uggagggcuccaggacugaugcucucccuaag

SEQ ID NO: 47488 - RNA, 32 nt, Homo Sapiens
uuuauaauuuauuuuuacucuguugauaggca

SEQ ID NO: 47489 - RNA, 32 nt, Homo Sapiens
caaaaaauaaacucucaggcaagcauuucuuu

SEQ ID NO: 47490 - RNA, 32 nt, Homo Sapiens
agaagugucaauaaaccacaaguucugaacuc

SEQ ID NO: 47491 - RNA, 32 nt, Homo Sapiens
cagcauuccagaacaauuucugagaccaugcc

SEQ ID NO: 47492 - RNA, 32 nt, Homo Sapiens
cacagaaggggagggagcaccaggccagcuga

SEQ ID NO: 47493 - RNA, 32 nt, Homo Sapiens
uaccaggaagcagcuccagagcugcgcccacg

SEQ ID NO: 47494 - RNA, 32 nt, Homo Sapiens
acacacacacacaaaaucacugcuguguguuu

SEQ ID NO: 47495 - RNA, 32 nt, Homo Sapiens
ccaggccccaggcagugcugcaggcgccugcg

SEQ ID NO: 47496 - RNA, 32 nt, Homo Sapiens
cgaguggaggucgugagcuugcaccccgccug

SEQ ID NO: 47497 - RNA, 32 nt, Homo Sapiens
aagaaaccaaucuggaaagucuacacaccgua

SEQ ID NO: 47498 - RNA, 32 nt, Homo Sapiens
ggugacggagcgcgccggggcugugggugcca

SEQ ID NO: 47499 - RNA, 32 nt, Homo Sapiens
ggaaggcugagccucuccccagccuucaugcc

SEQ ID NO: 47500 - RNA, 32 nt, Homo Sapiens
caauauuggauuuggauuuaaucuggguaaaa

SEQ ID NO: 47501 - RNA, 32 nt, Homo Sapiens
gucuggcuucgcagcucuggccuccuaaucag

SEQ ID NO: 47502 - RNA, 32 nt, Homo Sapiens
augaauaaaugaaauuacaugccaagggcccu

SEQ ID NO: 47503 - RNA, 32 nt, Homo Sapiens
agcccccugaccccuuguuccaaauauacucu

SEQ ID NO: 47504 - RNA, 32 nt, Homo Sapiens
ugggaucugaagacguugcauucgaggucucg

SEQ ID NO: 47505 - RNA, 32 nt, Homo Sapiens
ccacugccgcccugccggggccauguucgcuc

SEQ ID NO: 47506 - RNA, 32 nt, Homo Sapiens
caggcaaugaggaaagcagagacaggagagga

SEQ ID NO: 47507 - RNA, 32 nt, Homo Sapiens
cugagcacccacacccaccuccucuccuguug

SEQ ID NO: 47508 - RNA, 32 nt, Homo Sapiens
ccagccggguuccccaucgucugccccugcca

SEQ ID NO: 47509 - RNA, 32 nt, Homo Sapiens
uaauguccuucaaaauuauaaaagcacuaacu

SEQ ID NO: 47510 - RNA, 32 nt, Homo Sapiens
uuuugaaaugcucuugguugcaaaacaaaaug

SEQ ID NO: 47511 - RNA, 32 nt, Homo Sapiens
cagaagcccaaccugacgcggcaccggcgcaa

SEQ ID NO: 47512 - RNA, 32 nt, Homo Sapiens
cagggucugaccaagugccaggaagaccugug

SEQ ID NO: 47513 - RNA, 32 nt, Homo Sapiens
cccuucuugaguuuuucagaagccuuuaauuu

SEQ ID NO: 47514 - RNA, 32 nt, Homo Sapiens
aagcaaucuauuaaugagacaccuuugggaag

SEQ ID NO: 47515 - RNA, 32 nt, Homo Sapiens
ccggggcccucccgggucagcaugcccggggu

SEQ ID NO: 47516 - RNA, 32 nt, Homo Sapiens
uacacuguggcuuuagcuuucaaaccagaggu

SEQ ID NO: 47517 - RNA, 32 nt, Homo Sapiens
guagaaacuguuuuuuguuuuccuuuuuguuu

SEQ ID NO: 47518 - RNA, 32 nt, Homo Sapiens
ugcucucagggcaaaaucauguuccccacccc

SEQ ID NO: 47519 - RNA, 32 nt, Homo Sapiens
cuuaccugggccccuccucuagagaagagcuc

SEQ ID NO: 47520 - RNA, 32 nt, Homo Sapiens
uaggaagcaaaucuauacuuuuuuauaugggc

SEQ ID NO: 47521 - RNA, 32 nt, Homo Sapiens
aucauaaauuuaugugugaucuuugacuuuca

SEQ ID NO: 47522 - RNA, 32 nt, Homo Sapiens
acaacaaagacaauuacuuaguagggccuaaa

SEQ ID NO: 47523 - RNA, 32 nt, Homo Sapiens
aacgaggccggcccgcgagggcccgcgcuccc

SEQ ID NO: 47524 - RNA, 32 nt, Homo Sapiens
gcaucgagccccagcgcccggcccgcagccug

SEQ ID NO: 47525 - RNA, 32 nt, Homo Sapiens
cacaaugcugcuagcaacaguuuuguccaugu

SEQ ID NO: 47526 - RNA, 32 nt, Homo Sapiens
auuguacauuuuuucuuaauguuguggauugc

SEQ ID NO: 47527 - RNA, 32 nt, Homo Sapiens
ggagugaagaugguuguugaaaauauugaggc

SEQ ID NO: 47528 - RNA, 32 nt, Homo Sapiens
uccugggggagcugaggcucugugcugcaccc

SEQ ID NO: 47529 - RNA, 32 nt, Homo Sapiens
auaaauaccuccccgguuuuguuuuuguaaaa

SEQ ID NO: 47530 - RNA, 32 nt, Homo Sapiens
gacacuggaaauucgggaaaccaagagagagg

SEQ ID NO: 47531 - RNA, 32 nt, Homo Sapiens
gauccagaccucuacaagcaaauggagaaguu

SEQ ID NO: 47532 - RNA, 32 nt, Homo Sapiens
cauucacggguaaaauguguuuccuuuagcca

SEQ ID NO: 47533 - RNA, 32 nt, Homo Sapiens
uugcaagcuccuccccucugugugugccaugu

SEQ ID NO: 47534 - RNA, 32 nt, Homo Sapiens
cucggccgggcucuaggcgccauggcuccccg

SEQ ID NO: 47535 - RNA, 32 nt, Homo Sapiens
aguuggcccaggcagacacaccccauggaaug

SEQ ID NO: 47536 - RNA, 32 nt, Homo Sapiens
accuuaucaaaacuacucacuccaccugggcc

SEQ ID NO: 47537 - RNA, 32 nt, Homo Sapiens
aguccaucagaucauguguucuggagaguguu

SEQ ID NO: 47538 - RNA, 32 nt, Homo Sapiens
auuuacacaauguauucugcauuuucaaaugu

SEQ ID NO: 47539 - RNA, 32 nt, Homo Sapiens
cugauagugucugcccucucuacccugauuuc

SEQ ID NO: 47540 - RNA, 32 nt, Homo Sapiens
aagccuucaaacaguaguuuuacaaucaugcu

SEQ ID NO: 47541 - RNA, 32 nt, Homo Sapiens
auauaugugugugacuauugaacucuauucgu

SEQ ID NO: 47542 - RNA, 32 nt, Homo Sapiens
agagggagggcacgggcgcgggccgggccuca

SEQ ID NO: 47543 - RNA, 32 nt, Homo Sapiens
gagauagacaaaaugugguccaauuaaaaggu

SEQ ID NO: 47544 - RNA, 32 nt, Homo Sapiens
ccaaaggagacauaucacugcugcugggacuu

SEQ ID NO: 47545 - RNA, 32 nt, Homo Sapiens
agagcagugcuuuuggcggggaggaggaaauc

SEQ ID NO: 47546 - RNA, 32 nt, Homo Sapiens
guccacuguucuccacacacgcaacaaauaga

SEQ ID NO: 47547 - RNA, 32 nt, Homo Sapiens
acgcgccguuugccgggacugagccgcuguug

SEQ ID NO: 47548 - RNA, 32 nt, Homo Sapiens
cauggcuuuuucugccaaaaggcucucucagc

SEQ ID NO: 47549 - RNA, 32 nt, Homo Sapiens
ucaguauccugggaacccugggccaggagguu

SEQ ID NO: 47550 - RNA, 32 nt, Homo Sapiens
cggaaggcagaggacagaggcuggacgugggc

SEQ ID NO: 47551 - RNA, 32 nt, Homo Sapiens
ggcaaaaaugacuuucaacuaaccuugugaau

SEQ ID NO: 47552 - RNA, 32 nt, Homo Sapiens
cucccuuggcugcccagaagcaauaugccugc

SEQ ID NO: 47553 - RNA, 32 nt, Homo Sapiens
accaacuccauuaucacccccauuucacagau

SEQ ID NO: 47554 - RNA, 32 nt, Homo Sapiens
auuaugugcagguaugauauuuucuucacuac

SEQ ID NO: 47555 - RNA, 32 nt, Homo Sapiens
aaagcgggccaagaagcagagguccagguucc

SEQ ID NO: 47556 - RNA, 32 nt, Homo Sapiens
aaacagcaauggauuaggauauggaaauaaaa

SEQ ID NO: 47557 - RNA, 32 nt, Homo Sapiens
aauucgauuggauugugucauuuuaaaguauu

SEQ ID NO: 47558 - RNA, 32 nt, Homo Sapiens
ucgaccgucugcccccugcuccccucaucagg

SEQ ID NO: 47559 - RNA, 32 nt, Homo Sapiens
ugcucuacaauaacugcuuguuuacuugucuu

SEQ ID NO: 47560 - RNA, 32 nt, Homo Sapiens
acuaaucuacuggaagcagaaagcagaaaugg

SEQ ID NO: 47561 - RNA, 32 nt, Homo Sapiens
acacugcacucuuaagcuuccgccgucucaac

SEQ ID NO: 47562 - RNA, 32 nt, Homo Sapiens
cagcaggggcuuugugccuuucaucuuuaacu

SEQ ID NO: 47563 - RNA, 32 nt, Homo Sapiens
gaauuacaagugugucccaugccugaccuuca

SEQ ID NO: 47564 - RNA, 32 nt, Homo Sapiens
acaccucuguggcugcagagggcccaacccug

SEQ ID NO: 47565 - RNA, 32 nt, Homo Sapiens
ccauauugucaccucagcacuguggacaccuc

SEQ ID NO: 47566 - RNA, 32 nt, Homo Sapiens
uaauaaaaaaaauuaaacagaagagcacccug

SEQ ID NO: 47567 - RNA, 32 nt, Homo Sapiens
aguuuagguugucagaguuuaucugauauaca

SEQ ID NO: 47568 - RNA, 32 nt, Homo Sapiens
uagccgcaggcauggcggcggcuaugccgcuu

SEQ ID NO: 47569 - RNA, 32 nt, Homo Sapiens
ugaagauuugaaaauauauccaugaacauuuc

SEQ ID NO: 47570 - RNA, 27 nt, Homo Sapiens
gugaaagucuucuucagauccccaccu

SEQ ID NO: 47571 - RNA, 32 nt, Homo Sapiens
aacacuuuguugauguaggagcugguaucaca

SEQ ID NO: 47572 - RNA, 32 nt, Homo Sapiens
ggauccugagaccgaaggguguuugguuuaaa

SEQ ID NO: 47573 - RNA, 32 nt, Homo Sapiens
uuuuggagacgaauucuugcucuguugcccag

SEQ ID NO: 47574 - RNA, 30 nt, Homo Sapiens
ugcuagcgcaggcgcaggggcucgagaggc

SEQ ID NO: 47575 - RNA, 32 nt, Homo Sapiens
cuauucaaaaucaaaucgagauuuaauguuug

SEQ ID NO: 47576 - RNA, 32 nt, Homo Sapiens
uaauauaaaguuguauuuucacugaaaugauu

SEQ ID NO: 47577 - RNA, 32 nt, Homo Sapiens
aacgagcaacaaucggaaaccaaauacuggag

SEQ ID NO: 47578 - RNA, 32 nt, Homo Sapiens
agaauguugcuacuucacaauggcgauguggu

SEQ ID NO: 47579 - RNA, 32 nt, Homo Sapiens
ccuuugcuagggcggagcugccuucuccucgg

SEQ ID NO: 47580 - RNA, 32 nt, Homo Sapiens
uauguguguaaaacagaaaaauuaaguaccaa

SEQ ID NO: 47581 - RNA, 32 nt, Homo Sapiens
ucagcuuuccugguccucuccuuacuucugug

SEQ ID NO: 47582 - RNA, 31 nt, Homo Sapiens
ccaggcuugcacugccguuccugggggugug

SEQ ID NO: 47583 - RNA, 32 nt, Homo Sapiens
cuuugcuuuuaaaauuaaguaucaucugaauu

SEQ ID NO: 47584 - RNA, 32 nt, Homo Sapiens
caacugggcgcccguccccagccccacgcacg

SEQ ID NO: 47585 - RNA, 32 nt, Homo Sapiens
aagcaguggcagacgcaaggcuuucugugggc

SEQ ID NO: 47586 - RNA, 32 nt, Homo Sapiens
uccccaaaucccccugggcaggaggcagugga

SEQ ID NO: 47587 - RNA, 32 nt, Homo Sapiens
cccucagcagggcagggccaguccuggcgacc

SEQ ID NO: 47588 - RNA, 32 nt, Homo Sapiens
ccagcucaccaccuucaacuuucauggaaaug

SEQ ID NO: 47589 - RNA, 32 nt, Homo Sapiens
agcagggucagggucuucuugcgacccggccc

SEQ ID NO: 47590 - RNA, 32 nt, Homo Sapiens
cucgcccgcuugaguuuugauucaucauggau

SEQ ID NO: 47591 - RNA, 32 nt, Homo Sapiens
cugagccucgguuuccgcaccucaaguaauua

SEQ ID NO: 47592 - RNA, 32 nt, Homo Sapiens
cauugcuuuugguggaaauuuaccuagagguu

SEQ ID NO: 47593 - RNA, 32 nt, Homo Sapiens
caugcaaauucugacuccauagugcugguucu

SEQ ID NO: 47594 - RNA, 32 nt, Homo Sapiens
gccgaccuguuagcugcagcaauuagaggggu

SEQ ID NO: 47595 - RNA, 32 nt, Homo Sapiens
ugggcccagaggcugggccccuggacauguac

SEQ ID NO: 47596 - RNA, 32 nt, Homo Sapiens
ccacgcguccgggcguaagccaggcguguuaa

SEQ ID NO: 47597 - RNA, 32 nt, Homo Sapiens
aagaauucauucuccugguccugugcaucuuc

SEQ ID NO: 47598 - RNA, 32 nt, Homo Sapiens
guuucugugggaaggaaauagggaauccaaug

SEQ ID NO: 47599 - RNA, 32 nt, Homo Sapiens
uugagaagauaaaugauguaguugaucaguaa

SEQ ID NO: 47600 - RNA, 32 nt, Homo Sapiens
ccaauauucaaaugcguaauuaaaagaauuuu

SEQ ID NO: 47601 - RNA, 32 nt, Homo Sapiens
cuugcgucacuuccgcccacggggcggucucu

SEQ ID NO: 47602 - RNA, 31 nt, Homo Sapiens
gaagugaaauaaaauuaaagcuaugacacug

SEQ ID NO: 47603 - RNA, 32 nt, Homo Sapiens
cugauuggugucucagcauuuauuuuccuguc

SEQ ID NO: 47604 - RNA, 32 nt, Homo Sapiens
cuuuggcaugcacguacuggcaucauguccaa

SEQ ID NO: 47605 - RNA, 32 nt, Homo Sapiens
agggaggggauggagcagauacccugagaaac

SEQ ID NO: 47606 - RNA, 32 nt, Homo Sapiens
aaggacggugugcgggccggccagcccuggac

SEQ ID NO: 47607 - RNA, 32 nt, Homo Sapiens
auccaaaaggauuuaaaauauugcauaaaguu

SEQ ID NO: 47608 - RNA, 32 nt, Homo Sapiens
gaccuccgugcccucaccccagcccuaggugu

SEQ ID NO: 47609 - RNA, 32 nt, Homo Sapiens
gcuaacaauaacagucuguguuuucucuaaaa

SEQ ID NO: 47610 - RNA, 32 nt, Homo Sapiens
ucuccacgaggcgcauggggagcccgcgggcc

SEQ ID NO: 47611 - RNA, 32 nt, Homo Sapiens
guucugauaccuuguuuacauguuuguuuuua

SEQ ID NO: 47612 - RNA, 32 nt, Homo Sapiens
acugaaguuccucauagugucauugguaugag

SEQ ID NO: 47613 - RNA, 32 nt, Homo Sapiens
ucagagcuugcagacggcaaggugauaaggaa

SEQ ID NO: 47614 - RNA, 32 nt, Homo Sapiens
uacacacgucuucaguuuuucagcacagacca

SEQ ID NO: 47615 - RNA, 32 nt, Homo Sapiens
aguguuuggccauguguauauuuauaucaugu

SEQ ID NO: 47616 - RNA, 32 nt, Homo Sapiens
uucccauaaaagacucaguuuuauugagguag

SEQ ID NO: 47617 - RNA, 32 nt, Homo Sapiens
cuggggacagagcuguuaccugccacuaggau

SEQ ID NO: 47618 - RNA, 31 nt, Homo Sapiens
ccuaaaaagccccagguucagccauugugcu

SEQ ID NO: 47619 - RNA, 32 nt, Homo Sapiens
auuccauucgaaaagcacuuugaaaaauuguu

SEQ ID NO: 47620 - RNA, 30 nt, Homo Sapiens
gugugugucuguguaugcaaguguugguaa

SEQ ID NO: 47621 - RNA, 32 nt, Homo Sapiens
aguguuuuuuaaaaaauuguaaagucaagguu

SEQ ID NO: 47622 - RNA, 32 nt, Homo Sapiens
agcccagacaccccugcccagcccacagcugc

SEQ ID NO: 47623 - RNA, 32 nt, Homo Sapiens
cucugaaaacuuaaaaguuugagcaaaaguuu

SEQ ID NO: 47624 - RNA, 32 nt, Homo Sapiens
gaaacugccccauuuugaaggugaggaaauug

SEQ ID NO: 47625 - RNA, 32 nt, Homo Sapiens
guccacgugucggaagaccuguuuaagacagu

SEQ ID NO: 47626 - RNA, 32 nt, Homo Sapiens
ggguuaggaaccggggcagagucagcucugug

SEQ ID NO: 47627 - RNA, 31 nt, Homo Sapiens
ugccccucacggagaacguuaguugacccug

SEQ ID NO: 47628 - RNA, 32 nt, Homo Sapiens
gaugaugaugaugaugaagaugaugcuaagua

SEQ ID NO: 47629 - RNA, 32 nt, Homo Sapiens
gggcagaggaggaggugcggcggcggcggcgg

SEQ ID NO: 47630 - RNA, 30 nt, Homo Sapiens
cugggaggugacgucgcgggucucggucgc

SEQ ID NO: 47631 - RNA, 32 nt, Homo Sapiens
uggccuuuaucugguuuugauuaguggcgaau

SEQ ID NO: 47632 - RNA, 32 nt, Homo Sapiens
agucacugacuuccucaccuacaacugccuca

SEQ ID NO: 47633 - RNA, 32 nt, Homo Sapiens
aacaggaauaccauguuaagauagaggaaaaa

SEQ ID NO: 47634 - RNA, 32 nt, Homo Sapiens
uccugauccaauggugccaaacccuucaucuc

SEQ ID NO: 47635 - RNA, 32 nt, Homo Sapiens
aagaaaaacuuaaaacagaagguauuaaaaaa

SEQ ID NO: 47636 - RNA, 32 nt, Homo Sapiens
cagugaaggacacgagccauugaaaucagggu

SEQ ID NO: 47637 - RNA, 32 nt, Homo Sapiens
acggccucggggagggagccugcuguaaagcu

SEQ ID NO: 47638 - RNA, 32 nt, Homo Sapiens
aggggcugucugcagcagcugcacucagcacc

SEQ ID NO: 47639 - RNA, 32 nt, Homo Sapiens
ggcuuucaaaagacaaggagccaaaaaacuua

SEQ ID NO: 47640 - RNA, 32 nt, Homo Sapiens
uauuucuccuaaugcucucccucccccagccc

SEQ ID NO: 47641 - RNA, 32 nt, Homo Sapiens
gcccagucccucccggccgcgcgcccugaccg

SEQ ID NO: 47642 - RNA, 32 nt, Homo Sapiens
gucugcggggaagagaugauaaagagcacggg

SEQ ID NO: 47643 - RNA, 32 nt, Homo Sapiens
ccuuucaugagauuacgauaaucuuucagaac

SEQ ID NO: 47644 - RNA, 32 nt, Homo Sapiens
auaugccuuuuggagcuguguaaguuaauauu

SEQ ID NO: 47645 - RNA, 32 nt, Homo Sapiens
uuguguuccaugaauaaaaggacaaagucaga

SEQ ID NO: 47646 - RNA, 32 nt, Homo Sapiens
gcagagaggcggaggaggaagcuggcgcuggg

SEQ ID NO: 47647 - RNA, 32 nt, Homo Sapiens
acucgccccgguugcccucgcccccugggccg

SEQ ID NO: 47648 - RNA, 32 nt, Homo Sapiens
uacuacuguaaaaauaugggaugaauuuuaua

SEQ ID NO: 47649 - RNA, 32 nt, Homo Sapiens
uuugggucaaggaagaaaaaucaugggacuug

SEQ ID NO: 47650 - RNA, 27 nt, Homo Sapiens
cgagucuccugcuucagccucaugagu

SEQ ID NO: 47651 - RNA, 32 nt, Homo Sapiens
accucgccgcccagcucacgccgcgcccgcgc

SEQ ID NO: 47652 - RNA, 32 nt, Homo Sapiens
gggucucugcuguacugccaggggcgggggcu

SEQ ID NO: 47653 - RNA, 32 nt, Homo Sapiens
cagcucauuucccgcaccccauuucuugcuug

SEQ ID NO: 47654 - RNA, 32 nt, Homo Sapiens
gggagggcucgcaggggugcuggcacuguggg

SEQ ID NO: 47655 - RNA, 28 nt, Homo Sapiens
aucaugggagaccaccuggaccuucucc

SEQ ID NO: 47656 - RNA, 32 nt, Homo Sapiens
cauauuucucuacuuuuuguaucaggcuucaa

SEQ ID NO: 47657 - RNA, 32 nt, Homo Sapiens
aggacagcugagaaagcuggauuuaaaggaug

SEQ ID NO: 47658 - RNA, 32 nt, Homo Sapiens
uuuuacuggagaaaaaggaugccugacacgca

SEQ ID NO: 47659 - RNA, 32 nt, Homo Sapiens
ggacgaccauacugccucugagcugaaaacau

SEQ ID NO: 47660 - RNA, 32 nt, Homo Sapiens
gacaaguugcauugugaugcagcuugucccac

SEQ ID NO: 47661 - RNA, 29 nt, Homo Sapiens
uuuaauuucuaaauauaccacauaaguuu

SEQ ID NO: 47662 - RNA, 32 nt, Homo Sapiens
agacuuaggccuuucgcuuccuccucagguuu

SEQ ID NO: 47663 - RNA, 32 nt, Homo Sapiens
guuaggguggguggagcaagccccaccugcgu

SEQ ID NO: 47664 - RNA, 32 nt, Homo Sapiens
acggggggacuuccuaguuuucugggccuuuc

SEQ ID NO: 47665 - RNA, 32 nt, Homo Sapiens
agauacgucugugacuuaucuaccauugaagg

SEQ ID NO: 47666 - RNA, 32 nt, Homo Sapiens
ggccggcacgacggagcccccguacggccggc

SEQ ID NO: 47667 - RNA, 32 nt, Homo Sapiens
cugugacagaugaacuuuugcauguguauaua

SEQ ID NO: 47668 - RNA, 32 nt, Homo Sapiens
acauugaaggaucuaaauuuguagcaaaauug

SEQ ID NO: 47669 - RNA, 32 nt, Homo Sapiens
ccccucucauccaccccaacccuauccacccu

SEQ ID NO: 47670 - RNA, 32 nt, Homo Sapiens
ggaguauuuguaacuucuaaauuuugaaauga

SEQ ID NO: 47671 - RNA, 32 nt, Homo Sapiens
uuuucuguuucaugauguauuuucaaauagag

SEQ ID NO: 47672 - RNA, 30 nt, Homo Sapiens
aagccucccaggcgcgcgaggcuucccggg

SEQ ID NO: 47673 - RNA, 32 nt, Homo Sapiens
ccugauuucuucaacuaacagguagcaugaaa

SEQ ID NO: 47674 - RNA, 32 nt, Homo Sapiens
gaauauacagcuuuggaguuuucuuaagacac

SEQ ID NO: 47675 - RNA, 32 nt, Homo Sapiens
cucucugcaagguuuuccucauuuuuauauuc

SEQ ID NO: 47676 - RNA, 32 nt, Homo Sapiens
ugcugaagaaugugucugugguuaggauagca

SEQ ID NO: 47677 - RNA, 32 nt, Homo Sapiens
caccggaccccaccccgaggcaucaccacaaa

SEQ ID NO: 47678 - RNA, 30 nt, Homo Sapiens
aaaaucaaugaaauaaauuugcaguuaaga

SEQ ID NO: 47679 - RNA, 32 nt, Homo Sapiens
gacagcuugagccccaucguggauuccaagac

SEQ ID NO: 47680 - RNA, 32 nt, Homo Sapiens
cgggagccgggcggauccgcguccccgaugcg

SEQ ID NO: 47681 - RNA, 32 nt, Homo Sapiens
cccacugagagaaggcugcucuuuuguacugc

SEQ ID NO: 47682 - RNA, 32 nt, Homo Sapiens
uucauauagaaaauuuagacaauauaaaaaag

SEQ ID NO: 47683 - RNA, 32 nt, Homo Sapiens
ugaguuuggggaagucaagggcugggaucaag

SEQ ID NO: 47684 - RNA, 32 nt, Homo Sapiens
cagcguggucaugucuugggagcccgucaccc

SEQ ID NO: 47685 - RNA, 32 nt, Homo Sapiens
cuguuucacucucagcuucuccccucgaaggg

SEQ ID NO: 47686 - RNA, 32 nt, Homo Sapiens
auucacacauucagaaaagaggguccucacag

SEQ ID NO: 47687 - RNA, 32 nt, Homo Sapiens
cccgggugaaagggcggugacggcacugggug

SEQ ID NO: 47688 - RNA, 32 nt, Homo Sapiens
uggucuauaaguugccuguugaggaugugcga

SEQ ID NO: 47689 - RNA, 32 nt, Homo Sapiens
cuguuugaaauauuugguucaugguaugaucg

SEQ ID NO: 47690 - RNA, 32 nt, Homo Sapiens
gaucugaugcagauuggaguaagaaguagauc

SEQ ID NO: 47691 - RNA, 32 nt, Homo Sapiens
auuaggcagacacccacgccugacuuucagga

SEQ ID NO: 47692 - RNA, 32 nt, Homo Sapiens
cagauucugacuagaaugacgcagcccagcaa

SEQ ID NO: 47693 - RNA, 32 nt, Homo Sapiens
uuggacgguggccugggugcgcugcuccugcc

SEQ ID NO: 47694 - RNA, 32 nt, Homo Sapiens
cccaccaaugauccccaaccccgguggguacu

SEQ ID NO: 47695 - RNA, 32 nt, Homo Sapiens
ugagagaugaacuuauuuuaauauaauccuuu

SEQ ID NO: 47696 - RNA, 32 nt, Homo Sapiens
cagcacgggggcccaggauggaggcgucuaca

SEQ ID NO: 47697 - RNA, 32 nt, Homo Sapiens
cuucaugaaacacuagaauguacccucagagc

SEQ ID NO: 47698 - RNA, 32 nt, Homo Sapiens
ggaccagugucugucagccagguucccagccc

SEQ ID NO: 47699 - RNA, 32 nt, Homo Sapiens
gauguucgcucccgggauaggcugccccggag

SEQ ID NO: 47700 - RNA, 32 nt, Homo Sapiens
guauguuauuuucuguugaaguuuacaaucaa

SEQ ID NO: 47701 - RNA, 32 nt, Homo Sapiens
auagucucaauguggccaaccaaaaggacaaa

SEQ ID NO: 47702 - RNA, 32 nt, Homo Sapiens
ucucuaauuuaucggcagcuucuguggaugac

SEQ ID NO: 47703 - RNA, 32 nt, Homo Sapiens
gccgguuaccugcccagcacuccacagagcuu

SEQ ID NO: 47704 - RNA, 32 nt, Homo Sapiens
gaagcuggaaauauuucuuucaauuccaucuc

SEQ ID NO: 47705 - RNA, 32 nt, Homo Sapiens
ggcugagggagaggucuugggguucaaggcug

SEQ ID NO: 47706 - RNA, 32 nt, Homo Sapiens
ucucuauugaauuauuagguccagaauagaag

SEQ ID NO: 47707 - RNA, 32 nt, Homo Sapiens
aucagccuggccaacauagugaaacccuaucu

SEQ ID NO: 47708 - RNA, 29 nt, Homo Sapiens
aaaucuguuauccaauagcuaccauagau

SEQ ID NO: 47709 - RNA, 32 nt, Homo Sapiens
uucuugggggugggggaguuucccuuuucuaa

SEQ ID NO: 47710 - RNA, 32 nt, Homo Sapiens
aaucuuuuuuaaaaguguuguuuuucuaauuu

SEQ ID NO: 47711 - RNA, 32 nt, Homo Sapiens
aagggaaggcuuucaggagcuuacuggaaaaa

SEQ ID NO: 47712 - RNA, 32 nt, Homo Sapiens
augccguaggauguuuagcaacaucccugguc

SEQ ID NO: 47713 - RNA, 32 nt, Homo Sapiens
auguuuaucucacacacauuaugagcuugaau

SEQ ID NO: 47714 - RNA, 32 nt, Homo Sapiens
ccuaucccauucucccucucaaggcagggguc

SEQ ID NO: 47715 - RNA, 32 nt, Homo Sapiens
agcccggcgaggguggggagggcaggcgcagg

SEQ ID NO: 47716 - RNA, 30 nt, Homo Sapiens
uccgagggccgaccgcugccggcgcggguc

SEQ ID NO: 47717 - RNA, 32 nt, Homo Sapiens
aaacaccccucauguuuaacuacauuugugaa

SEQ ID NO: 47718 - RNA, 32 nt, Homo Sapiens
ccggcgucgcugggcuuuccucacggcguccc

SEQ ID NO: 47719 - RNA, 32 nt, Homo Sapiens
gcucguuccccuccagccuggugcugggcucc

SEQ ID NO: 47720 - RNA, 30 nt, Homo Sapiens
gaaguaccacuugaaacauuuuauguauua

SEQ ID NO: 47721 - RNA, 32 nt, Homo Sapiens
cuugcaaauauuggaguuauaaaccauuuacu

SEQ ID NO: 47722 - RNA, 32 nt, Homo Sapiens
gagaucagagaccuaaagugccagaccaaaga

SEQ ID NO: 47723 - RNA, 32 nt, Homo Sapiens
ugcaugaaggcacccugccucugcagagcaga

SEQ ID NO: 47724 - RNA, 32 nt, Homo Sapiens
cuaggaaugaacuuuccccaguaccaacaagg

SEQ ID NO: 47725 - RNA, 29 nt, Homo Sapiens
aaguauucuaaaugugucccaucaugcuu

SEQ ID NO: 47726 - RNA, 32 nt, Homo Sapiens
ucuuuaagguaaucugaugguuuuccaggugg

SEQ ID NO: 47727 - RNA, 32 nt, Homo Sapiens
uaggaggucuuccuggccuccuugacuguggg

SEQ ID NO: 47728 - RNA, 32 nt, Homo Sapiens
acguuccuggggcauucgagacuugacuuucc

SEQ ID NO: 47729 - RNA, 32 nt, Homo Sapiens
guuaaggcuucagguaucuuucaaccaaguau

SEQ ID NO: 47730 - RNA, 32 nt, Homo Sapiens
accagcguagagcuccaccuccccuuucccca

SEQ ID NO: 47731 - RNA, 32 nt, Homo Sapiens
cccaaugcaggccacuucuccucccuccuucu

SEQ ID NO: 47732 - RNA, 32 nt, Homo Sapiens
gguacuuaaauguaaaguaacaaccugaauug

SEQ ID NO: 47733 - RNA, 32 nt, Homo Sapiens
cauuuaucuucagguuggggaaaucaauuuuu

SEQ ID NO: 47734 - RNA, 32 nt, Homo Sapiens
gguccaguguagccuggcucugagagaaggug

SEQ ID NO: 47735 - RNA, 32 nt, Homo Sapiens
uccaucugggauucagaauacaguguucucaa

SEQ ID NO: 47736 - RNA, 32 nt, Homo Sapiens
aauucugucuuugaauucaagaaauacuuugu

SEQ ID NO: 47737 - RNA, 32 nt, Homo Sapiens
gccagcauuccaccccaccuuuuuccuucucc

SEQ ID NO: 47738 - RNA, 32 nt, Homo Sapiens
cccucaucuggccaccugcugcuuuuugacca

SEQ ID NO: 47739 - RNA, 32 nt, Homo Sapiens
caggugaggggcuuccugaggaccuggggcug

SEQ ID NO: 47740 - RNA, 32 nt, Homo Sapiens
aaugacuuuucucgcauuguagaauuguauau

SEQ ID NO: 47741 - RNA, 32 nt, Homo Sapiens
uuugauccucagagacaguaucaugagacugc

SEQ ID NO: 47742 - RNA, 32 nt, Homo Sapiens
cuguauucgcuguucaauaaacauugagugag

SEQ ID NO: 47743 - RNA, 32 nt, Homo Sapiens
aggacugaaaauacuccugaguacuccccugg

SEQ ID NO: 47744 - RNA, 32 nt, Homo Sapiens
ucuguuuuggcugaaagguguacuggaaacac

SEQ ID NO: 47745 - RNA, 29 nt, Homo Sapiens
ucugaugacccggccgccgccgccgcccu

SEQ ID NO: 47746 - RNA, 32 nt, Homo Sapiens
caaaagaccaacaaauggauguugacaacaac

SEQ ID NO: 47747 - RNA, 32 nt, Homo Sapiens
ugugcagccaucucauucugugaaugugccaa

SEQ ID NO: 47748 - RNA, 32 nt, Homo Sapiens
cccucugaaacacuggaagagcuaguaaauug

SEQ ID NO: 47749 - RNA, 32 nt, Homo Sapiens
ugaagaggaaagggggccauuugaccugacau

SEQ ID NO: 47750 - RNA, 32 nt, Homo Sapiens
uuugcuguauugcuguucucuuugaggcucuc

SEQ ID NO: 47751 - RNA, 32 nt, Homo Sapiens
uguuuaucuaacaguucacuuccauuuuucua

SEQ ID NO: 47752 - RNA, 32 nt, Homo Sapiens
cuucuuucucuucacaaauaccucauggacgu

SEQ ID NO: 47753 - RNA, 32 nt, Homo Sapiens
gcacgcacacucggggacuuugugcaugcccc

SEQ ID NO: 47754 - RNA, 32 nt, Homo Sapiens
gaagugaaagucuuaaagggagcauuagagau

SEQ ID NO: 47755 - RNA, 32 nt, Homo Sapiens
cccagagcggagcgcagcucccugccccgccc

SEQ ID NO: 47756 - RNA, 32 nt, Homo Sapiens
cacauccacccauacacacacacacacacaca

SEQ ID NO: 47757 - RNA, 32 nt, Homo Sapiens
ucccuuuaaaggaaacaaaagugaauaccaua

SEQ ID NO: 47758 - RNA, 30 nt, Homo Sapiens
cauggcgcucugaagacgccggcgcccgcc

SEQ ID NO: 47759 - RNA, 32 nt, Homo Sapiens
gcguguccgcuaggggccgccggcgcccuucc

SEQ ID NO: 47760 - RNA, 32 nt, Homo Sapiens
gcacuccccacuuuuaagaagccauugaccca

SEQ ID NO: 47761 - RNA, 32 nt, Homo Sapiens
cuucugucuccagggccugaucuuuaccacug

SEQ ID NO: 47762 - RNA, 32 nt, Homo Sapiens
gggacggggggccccagucagccucucuccca

SEQ ID NO: 47763 - RNA, 32 nt, Homo Sapiens
gaggcggccaggcccuggggccccuugagugc

SEQ ID NO: 47764 - RNA, 32 nt, Homo Sapiens
caacggcacugcccgcgccgggcccaggaagc

SEQ ID NO: 47765 - RNA, 32 nt, Homo Sapiens
ggcuggcuguccuggagcugcugcuggagccu

SEQ ID NO: 47766 - RNA, 32 nt, Homo Sapiens
gcucaaugacuuucccaagguggucguagugg

SEQ ID NO: 47767 - RNA, 32 nt, Homo Sapiens
uugggagggggugaugcugugccaaguucugg

SEQ ID NO: 47768 - RNA, 31 nt, Homo Sapiens
ugcacgugacacugccuacggcgcugaaagg

SEQ ID NO: 47769 - RNA, 32 nt, Homo Sapiens
uauaaggguauagaacugcuuuucucauaggu

SEQ ID NO: 47770 - RNA, 32 nt, Homo Sapiens
uacauaaaagagaaaaauaucuuaguuugcua

SEQ ID NO: 47771 - RNA, 32 nt, Homo Sapiens
gggaaaugggagcacaguacugggaaauauga

SEQ ID NO: 47772 - RNA, 32 nt, Homo Sapiens
uccauguaagaaaaaauaauuguugaagaaag

SEQ ID NO: 47773 - RNA, 32 nt, Homo Sapiens
auggagucaaggauuauuaggucugccauuuu

SEQ ID NO: 47774 - RNA, 32 nt, Homo Sapiens
cuuuaugcugaaacagaauacuguuaaaggaa

SEQ ID NO: 47775 - RNA, 32 nt, Homo Sapiens
uagccucugugccccguccuugugccagguca

SEQ ID NO: 47776 - RNA, 30 nt, Homo Sapiens
auucguggcgacggcggcggcaagggacag

SEQ ID NO: 47777 - RNA, 32 nt, Homo Sapiens
guuuacaaucaguggggaaaagggcagaacca

SEQ ID NO: 47778 - RNA, 32 nt, Homo Sapiens
agagcuucggcugggccacgggcucgcgggca

SEQ ID NO: 47779 - RNA, 30 nt, Homo Sapiens
aagccaggcaggccauggggcucugggcgc

SEQ ID NO: 47780 - RNA, 32 nt, Homo Sapiens
ugaugguagacacccccuccuuucucuuuccu

SEQ ID NO: 47781 - RNA, 32 nt, Homo Sapiens
auuuaaaagcaucucagccuaccaugagaaua

SEQ ID NO: 47782 - RNA, 32 nt, Homo Sapiens
cauccuaucucaaaacccauggagggaggcug

SEQ ID NO: 47783 - RNA, 32 nt, Homo Sapiens
gccucagcucugcggccugaccacugcggcaa

SEQ ID NO: 47784 - RNA, 32 nt, Homo Sapiens
caacucuagaaaaggcuauaugggaccuaaua

SEQ ID NO: 47785 - RNA, 32 nt, Homo Sapiens
cggcgauuagcacagcgacccgggccagcgca

SEQ ID NO: 47786 - RNA, 32 nt, Homo Sapiens
agcugugugcuccuuuccugucauggcaucug

SEQ ID NO: 47787 - RNA, 31 nt, Homo Sapiens
aguuuuggugccaucaaccaggccaguacuu

SEQ ID NO: 47788 - RNA, 32 nt, Homo Sapiens
aagaagaagugucaaagcuguuguaaauguuu

SEQ ID NO: 47789 - RNA, 32 nt, Homo Sapiens
ugcagggccgcaccgggcuggcgcucuacgug

SEQ ID NO: 47790 - RNA, 32 nt, Homo Sapiens
gcaggcaggaaugcagcagagaggacucgcca

SEQ ID NO: 47791 - RNA, 32 nt, Homo Sapiens
gcaaaauaaccauuuuaacauuugauaaagca

SEQ ID NO: 47792 - RNA, 32 nt, Homo Sapiens
cugaaacccagagcucagaacuaacugugaga

SEQ ID NO: 47793 - RNA, 32 nt, Homo Sapiens
ccccuugcugccucuacccagcccugggcagu

SEQ ID NO: 47794 - RNA, 31 nt, Homo Sapiens
auuuauguuucucagaaccagcagaaucagu

SEQ ID NO: 47795 - RNA, 32 nt, Homo Sapiens
cuguacauuucccccagguuucugaugccauc

SEQ ID NO: 47796 - RNA, 32 nt, Homo Sapiens
aauaaacgaaacauuuagacaauggcuauauu

SEQ ID NO: 47797 - RNA, 32 nt, Homo Sapiens
cuuuaaguacuuguuucuuuuucagguuguga

SEQ ID NO: 47798 - RNA, 32 nt, Homo Sapiens
cguagaguucccucagaagagccaugguguuu

SEQ ID NO: 47799 - RNA, 32 nt, Homo Sapiens
gagcuggagcccucccuggcagugcgucggcg

SEQ ID NO: 47800 - RNA, 32 nt, Homo Sapiens
agacaaaggugucucugaaacuauggauggua

SEQ ID NO: 47801 - RNA, 32 nt, Homo Sapiens
ccacaugucccagaucgucuccaauucgaaaa

SEQ ID NO: 47802 - RNA, 32 nt, Homo Sapiens
gauuuucuaagugaagauuaauuuaccgagga

SEQ ID NO: 47803 - RNA, 32 nt, Homo Sapiens
ugaggcccauucuucucucuuugaagagagca

SEQ ID NO: 47804 - RNA, 32 nt, Homo Sapiens
gaacuucauuugaguagcacaaaguuuacaua

SEQ ID NO: 47805 - RNA, 32 nt, Homo Sapiens
aaaguggucaauucuugguuuacuucauuuaa

SEQ ID NO: 47806 - RNA, 32 nt, Homo Sapiens
aagaucccuucaguuuggggugucaccaagac

SEQ ID NO: 47807 - RNA, 32 nt, Homo Sapiens
ccugaaauaaacaaaauaugggcaugcaugcu

SEQ ID NO: 47808 - RNA, 32 nt, Homo Sapiens
gagcaaacccacccuguccucugacgucccuu

SEQ ID NO: 47809 - RNA, 32 nt, Homo Sapiens
ucuccguuggguccggccgcucugcgggacuc

SEQ ID NO: 47810 - RNA, 32 nt, Homo Sapiens
aaacugcagagccguucugugcuuuuccggca

SEQ ID NO: 47811 - RNA, 32 nt, Homo Sapiens
uuugagaggcucuguucccacccaggcugcac

SEQ ID NO: 47812 - RNA, 32 nt, Homo Sapiens
cugaccaaagacaauuaauuccuggucuaguu

SEQ ID NO: 47813 - RNA, 32 nt, Homo Sapiens
accugugcuccuuuuucuuacuguguuuucag

SEQ ID NO: 47814 - RNA, 32 nt, Homo Sapiens
ccacccagcuuucucccagccacagccaagau

SEQ ID NO: 47815 - RNA, 32 nt, Homo Sapiens
aacuuuaacagaaauugucucuuaauacauuu

SEQ ID NO: 47816 - RNA, 32 nt, Homo Sapiens
cuggccucgacggagcuucucagccucuugga

SEQ ID NO: 47817 - RNA, 32 nt, Homo Sapiens
gauccucacuuuggcagugcuuccucuccugu

SEQ ID NO: 47818 - RNA, 32 nt, Homo Sapiens
aagggcagugaagacuugauuguacaaaauac

SEQ ID NO: 47819 - RNA, 32 nt, Homo Sapiens
cuguuuuuucuuuagcaaaccagguuaugugg

SEQ ID NO: 47820 - RNA, 32 nt, Homo Sapiens
uccuuuagcuuuuguuugucugggaaaacaca

SEQ ID NO: 47821 - RNA, 32 nt, Homo Sapiens
gggaagcugcuggccuggcccuccuggucucu

SEQ ID NO: 47822 - RNA, 32 nt, Homo Sapiens
uuuuuuuuuuauguuucuuuuggaauuuuguu

SEQ ID NO: 47823 - RNA, 32 nt, Homo Sapiens
gugaccgagacgccucgccgcggccagcucgc

SEQ ID NO: 47824 - RNA, 32 nt, Homo Sapiens
guacagcagaagguaauggaaaauauuugcaa

SEQ ID NO: 47825 - RNA, 32 nt, Homo Sapiens
uucaauuaaauauuaguaugucugcugaaggc

SEQ ID NO: 47826 - RNA, 32 nt, Homo Sapiens
cugaaaugucauuuuaguuauuuuucuuauga

SEQ ID NO: 47827 - RNA, 32 nt, Homo Sapiens
gcaaugaucuuccaauaaaagauuucagaugc

SEQ ID NO: 47828 - RNA, 32 nt, Homo Sapiens
cagcugaccccagacccucuccccucacuccc

SEQ ID NO: 47829 - RNA, 32 nt, Homo Sapiens
ggacaguugcugugcgacuuggacaguagagg

SEQ ID NO: 47830 - RNA, 32 nt, Homo Sapiens
auucacaacuuaaaagccucucugccagcacc

SEQ ID NO: 47831 - RNA, 32 nt, Homo Sapiens
cagggucucccucucuuguccaaggcuggagu

SEQ ID NO: 47832 - RNA, 32 nt, Homo Sapiens
aagucuugaauuguuccacucaauguuccucu

SEQ ID NO: 47833 - RNA, 32 nt, Homo Sapiens
agaaaaauucaaccuuuuuuuuuuuuuuuuuu

SEQ ID NO: 47834 - RNA, 32 nt, Homo Sapiens
gugagcccagcaccccacuuccccugaaaugu

SEQ ID NO: 47835 - RNA, 32 nt, Homo Sapiens
uugaagaagacacaacggaugaugauaacuug

SEQ ID NO: 47836 - RNA, 32 nt, Homo Sapiens
guaucuguuguaauaaacauguuaaaacaaac

SEQ ID NO: 47837 - RNA, 32 nt, Homo Sapiens
agaucacaaggugguaucguuuuagauuucua

SEQ ID NO: 47838 - RNA, 32 nt, Homo Sapiens
cguaaaauaucauuacauagugauagcuggac

SEQ ID NO: 47839 - RNA, 32 nt, Homo Sapiens
gguugguguauuuuuaauagcucgacaccuuu

SEQ ID NO: 47840 - RNA, 32 nt, Homo Sapiens
cagccugugggaagaggguaugcaaggccacc

SEQ ID NO: 47841 - RNA, 32 nt, Homo Sapiens
guccccuccagucccuaacugccuuguauuuu

SEQ ID NO: 47842 - RNA, 32 nt, Homo Sapiens
cccucucuguccugccucuuuucaccugcuca

SEQ ID NO: 47843 - RNA, 32 nt, Homo Sapiens
uuuucacggaguaugccugcccugccccggga

SEQ ID NO: 47844 - RNA, 32 nt, Homo Sapiens
ccucggcccaucuguccauccuccucuccaug

SEQ ID NO: 47845 - RNA, 32 nt, Homo Sapiens
gacgauacuuggagccugguccacgugcaucc

SEQ ID NO: 47846 - RNA, 32 nt, Homo Sapiens
caauuuuccuaugaaaaucaaagccgguauau

SEQ ID NO: 47847 - RNA, 32 nt, Homo Sapiens
uacucauuuaaaaauuuuaacuucuauauggg

SEQ ID NO: 47848 - RNA, 32 nt, Homo Sapiens
uuuugcuuuuucuagagauacuuuucauuuaa

SEQ ID NO: 47849 - RNA, 32 nt, Homo Sapiens
aucuuugugugaagccaguuauagaauguuug

SEQ ID NO: 47850 - RNA, 32 nt, Homo Sapiens
gcaacauuuuuagagggggauggccccggugg

SEQ ID NO: 47851 - RNA, 32 nt, Homo Sapiens
ugcacagcccuuacagaaucugcacaaagaaa

SEQ ID NO: 47852 - RNA, 32 nt, Homo Sapiens
cucucagcugaauaaagaaaaauuuaguucaa

SEQ ID NO: 47853 - RNA, 32 nt, Homo Sapiens
gccgcugccgggugcuggaggcgccauuggag

SEQ ID NO: 47854 - RNA, 32 nt, Homo Sapiens
aggcccaagaggaaaaggauguggcucaggcu

SEQ ID NO: 47855 - RNA, 32 nt, Homo Sapiens
acuaaggcacuagccucuguagcugguggugg

SEQ ID NO: 47856 - RNA, 32 nt, Homo Sapiens
ucuguccugugugcgcugcagcguugcggggu

SEQ ID NO: 47857 - RNA, 32 nt, Homo Sapiens
ugcacccuuguacagugucugugccauggauu

SEQ ID NO: 47858 - RNA, 32 nt, Homo Sapiens
uuuguaaaggauuaugaguuguauaaaauaca

SEQ ID NO: 47859 - RNA, 32 nt, Homo Sapiens
aaauaaaauguuucuaacuagauuuuugauuu

SEQ ID NO: 47860 - RNA, 32 nt, Homo Sapiens
ccugagagccccagccccacucugaccucuaa

SEQ ID NO: 47861 - RNA, 32 nt, Homo Sapiens
gccacugcauuccagccugggcgacagaguga

SEQ ID NO: 47862 - RNA, 32 nt, Homo Sapiens
gucacugcacuccagccugggcgacagaguga

SEQ ID NO: 47863 - RNA, 32 nt, Homo Sapiens
cccggagccccggccucauccuccucagcggc

SEQ ID NO: 47864 - RNA, 31 nt, Homo Sapiens
ccagacaugcaggggcccugggugcugcucc

SEQ ID NO: 47865 - RNA, 32 nt, Homo Sapiens
uauuugggagagacuggcugcagauccccgcc

SEQ ID NO: 47866 - RNA, 32 nt, Homo Sapiens
uugcuacauuuuaaaagcaauuguauuaguaa

SEQ ID NO: 47867 - RNA, 32 nt, Homo Sapiens
cggccgaauccggcccgggaaccaccuccagg

SEQ ID NO: 47868 - RNA, 32 nt, Homo Sapiens
caggggccuauuaaaauaaaugucugagaucu

SEQ ID NO: 47869 - RNA, 32 nt, Homo Sapiens
aagaacaucaaaacuaaccaucugaagaaacu

SEQ ID NO: 47870 - RNA, 32 nt, Homo Sapiens
auuuuuuaagcaaugaaaauucaacugaguac

SEQ ID NO: 47871 - RNA, 32 nt, Homo Sapiens
gugguggcgggugccuguagucccagcuauuu

SEQ ID NO: 47872 - RNA, 32 nt, Homo Sapiens
gacuccggcgagccuguguuucugggagagcg

SEQ ID NO: 47873 - RNA, 32 nt, Homo Sapiens
guguauguuucaucauugcucugaaggucaaa

SEQ ID NO: 47874 - RNA, 32 nt, Homo Sapiens
ggggugcgcgccgaucuucucgcaaaaggcga

SEQ ID NO: 47875 - RNA, 32 nt, Homo Sapiens
uucauauauuuuacuguguuauucccuaguua

SEQ ID NO: 47876 - RNA, 32 nt, Homo Sapiens
cucgaaauaauuuuuuaguuaaaaucuauuuu

SEQ ID NO: 47877 - RNA, 30 nt, Homo Sapiens
ccucuugccgucgccgcggguccuggagaa

SEQ ID NO: 47878 - RNA, 32 nt, Homo Sapiens
acccuccuugagacagcccuccaguccaggcc

SEQ ID NO: 47879 - RNA, 32 nt, Homo Sapiens
uaaugacccgcguuuguccgccgcccgugccc

SEQ ID NO: 47880 - RNA, 32 nt, Homo Sapiens
agcugcggcgcugggcuggcggcggcgagucc

SEQ ID NO: 47881 - RNA, 32 nt, Homo Sapiens
aagcaguguugggauuguagcugcugggagcc

SEQ ID NO: 47882 - RNA, 32 nt, Homo Sapiens
gcgccucucuggaguucacgugcugcaccccc

SEQ ID NO: 47883 - RNA, 32 nt, Homo Sapiens
uuuagaccaaaauguacuguuaauggguuuuu

SEQ ID NO: 47884 - RNA, 27 nt, Homo Sapiens
ugauucucgugcuucagccucccaagu

SEQ ID NO: 47885 - RNA, 32 nt, Homo Sapiens
gaggccgcccugcuccuccuuuucccuccccu

SEQ ID NO: 47886 - RNA, 32 nt, Homo Sapiens
ucuggauagcuauuuaaauauuugcauauuua

SEQ ID NO: 47887 - RNA, 32 nt, Homo Sapiens
auaaagcgcccggccgcugccgcggagcccag

SEQ ID NO: 47888 - RNA, 30 nt, Homo Sapiens
ccagcaggagguggccuuagaaaggcggag

SEQ ID NO: 47889 - RNA, 32 nt, Homo Sapiens
cugggucuauggucgcuccgcggccgcuccgc

SEQ ID NO: 47890 - RNA, 32 nt, Homo Sapiens
gaccgacagcggguggaagggcccgugugcug

SEQ ID NO: 47891 - RNA, 32 nt, Homo Sapiens
ugagauuggggaugaggguggugagccccugg

SEQ ID NO: 47892 - RNA, 32 nt, Homo Sapiens
gcccaggcagaaguuugcugcagggguggggc

SEQ ID NO: 47893 - RNA, 32 nt, Homo Sapiens
cugucaucucaaagaauccagugcuuguguca

SEQ ID NO: 47894 - RNA, 32 nt, Homo Sapiens
gacucugucacugcagacccagggaccacuga

SEQ ID NO: 47895 - RNA, 32 nt, Homo Sapiens
uaaaacaaacagguuuuugaaaauauuacugu

SEQ ID NO: 47896 - RNA, 32 nt, Homo Sapiens
auacuggauguuuagcuucuuacugcaaaaac

SEQ ID NO: 47897 - RNA, 32 nt, Homo Sapiens
auuuugagacaccauagcagucuaaguguuuu

SEQ ID NO: 47898 - RNA, 32 nt, Homo Sapiens
gaggccagggaacaggcagggugggcaguugg

SEQ ID NO: 47899 - RNA, 32 nt, Homo Sapiens
uaagagaggcuuuggaguuccuugacuucucu

SEQ ID NO: 47900 - RNA, 32 nt, Homo Sapiens
aaucgggagccgccuuccugcuccucuaggua

SEQ ID NO: 47901 - RNA, 32 nt, Homo Sapiens
ccaccuaaggccauugacguggccugcgaucu

SEQ ID NO: 47902 - RNA, 32 nt, Homo Sapiens
aggggccucaucugucuuguuccuccuguggc

SEQ ID NO: 47903 - RNA, 32 nt, Homo Sapiens
auucucaccaaaaauaguuugauacuuaaaaa

SEQ ID NO: 47904 - RNA, 32 nt, Homo Sapiens
auuggucacuggcccuuucucaugaaugaagg

SEQ ID NO: 47905 - RNA, 31 nt, Homo Sapiens
ucaugaucacggagaaaagucagagugcuca

SEQ ID NO: 47906 - RNA, 32 nt, Homo Sapiens
aaccuuaaugaaauuaaaagaauugagaagac

SEQ ID NO: 47907 - RNA, 32 nt, Homo Sapiens
uuggaaaaaaucaaaaccccauuccuuuaagc

SEQ ID NO: 47908 - RNA, 32 nt, Homo Sapiens
aucccuuccucccuuacccagcuaugauucag

SEQ ID NO: 47909 - RNA, 32 nt, Homo Sapiens
cagccugggcgauauagugaggccccaucuca

SEQ ID NO: 47910 - RNA, 31 nt, Homo Sapiens
cccgcgcgggucucgucgacggcccgacgcg

SEQ ID NO: 47911 - RNA, 32 nt, Homo Sapiens
auaugcuaucaaacugugauacacuuauaauu

SEQ ID NO: 47912 - RNA, 32 nt, Homo Sapiens
cccuggccgcgaagguggcacccgcagcggga

SEQ ID NO: 47913 - RNA, 32 nt, Homo Sapiens
gcccaccgugucugcugaccuaccucuucaca

SEQ ID NO: 47914 - RNA, 32 nt, Homo Sapiens
guggaggacauggacgagggccccacagagcu

SEQ ID NO: 47915 - RNA, 32 nt, Homo Sapiens
ggcagugaagagagcugaagaucugcaccagg

SEQ ID NO: 47916 - RNA, 32 nt, Homo Sapiens
accaaguccugcgccucuuuggcggggugugu

SEQ ID NO: 47917 - RNA, 32 nt, Homo Sapiens
auuuuacagcuauacuuuguuguguaauguua

SEQ ID NO: 47918 - RNA, 32 nt, Homo Sapiens
gcuuucugaggcccugagcauucuugguuuuc

SEQ ID NO: 47919 - RNA, 32 nt, Homo Sapiens
gugcuucucuacauucccagguuugccacucc

SEQ ID NO: 47920 - RNA, 32 nt, Homo Sapiens
cagccuugacuucagagaggcuuuuccgagga

SEQ ID NO: 47921 - RNA, 32 nt, Homo Sapiens
cucugcugcuucagcaucuccgccuggagcca

SEQ ID NO: 47922 - RNA, 32 nt, Homo Sapiens
cucaaagagaaccugaagucagaacacaugag

SEQ ID NO: 47923 - RNA, 32 nt, Homo Sapiens
gauguggaaaauuggcaguguaacauuucuag

SEQ ID NO: 47924 - RNA, 32 nt, Homo Sapiens
aguucgccggcgacguccaugaccgcuacgag

SEQ ID NO: 47925 - RNA, 32 nt, Homo Sapiens
uguucucccuggaucuucugacauuacugcug

SEQ ID NO: 47926 - RNA, 28 nt, Homo Sapiens
aauauguggaugggccucauccaauuag

SEQ ID NO: 47927 - RNA, 32 nt, Homo Sapiens
cagaggggcaggggagcccacccuggauccug

SEQ ID NO: 47928 - RNA, 32 nt, Homo Sapiens
acuacaggugcaugccaccaugccaggcuaau

SEQ ID NO: 47929 - RNA, 32 nt, Homo Sapiens
auauaguaaugauugaaguaaaugucuagcuc

SEQ ID NO: 47930 - RNA, 32 nt, Homo Sapiens
gagauuggccauugcacuccagccugggugac

SEQ ID NO: 47931 - RNA, 32 nt, Homo Sapiens
caauaacuaauaauaaaauguaacgguuauac

SEQ ID NO: 47932 - RNA, 32 nt, Homo Sapiens
aggagcaggaggaggaacagaucugcacagaa

SEQ ID NO: 47933 - RNA, 32 nt, Homo Sapiens
gguuggccucucugcugcuuucugggagagcc

SEQ ID NO: 47934 - RNA, 32 nt, Homo Sapiens
aguggugcuagacagagcugaggucauuguau

SEQ ID NO: 47935 - RNA, 32 nt, Homo Sapiens
ggccgugagagccgcaguggauggcuggaggu

SEQ ID NO: 47936 - RNA, 32 nt, Homo Sapiens
gugcauuuucauguauguuguaccucaauuaa

SEQ ID NO: 47937 - RNA, 32 nt, Homo Sapiens
gggcaucauggaugcuggguggucuguguacu

SEQ ID NO: 47938 - RNA, 32 nt, Homo Sapiens
uuccuccugccaccugcugcugcugcugcugc

SEQ ID NO: 47939 - RNA, 32 nt, Homo Sapiens
auaaaguuagaauugagcuaauagagugguau

SEQ ID NO: 47940 - RNA, 32 nt, Homo Sapiens
aaaaaaugcaugucuuugaaucaauaaacuug

SEQ ID NO: 47941 - RNA, 32 nt, Homo Sapiens
cccugcaugcuugugccuggggugcucagcgc

SEQ ID NO: 47942 - RNA, 32 nt, Homo Sapiens
accugcauuucccccuugucuccaguucucuc

SEQ ID NO: 47943 - RNA, 31 nt, Homo Sapiens
cccuuugugagggugucgaguagccucaccg

SEQ ID NO: 47944 - RNA, 32 nt, Homo Sapiens
acaaguaaauuaauaucugcucugaaauguca

SEQ ID NO: 47945 - RNA, 32 nt, Homo Sapiens
acagcuggguggcaaggauggcccuccucauc

SEQ ID NO: 47946 - RNA, 32 nt, Homo Sapiens
uaaauuuaaaauuugguauaugcugaagucug

SEQ ID NO: 47947 - RNA, 30 nt, Homo Sapiens
acuguucuggacugugccuguuaaguugcu

SEQ ID NO: 47948 - RNA, 32 nt, Homo Sapiens
cacccuucggagccccgcuuucaugcgugaaa

SEQ ID NO: 47949 - RNA, 32 nt, Homo Sapiens
ggaaaguuaaacguuuuaaacaugguaguacu

SEQ ID NO: 47950 - RNA, 32 nt, Homo Sapiens
uauuuuugaggguaccuuuguauuuugcuuuu

SEQ ID NO: 47951 - RNA, 32 nt, Homo Sapiens
ucggcugcccuucuuggcucccugcauuccag

SEQ ID NO: 47952 - RNA, 32 nt, Homo Sapiens
gccggccugccauggggcugcccgaggggugc

SEQ ID NO: 47953 - RNA, 32 nt, Homo Sapiens
cuggggcuggaacagagcagccggccucuguc

SEQ ID NO: 47954 - RNA, 32 nt, Homo Sapiens
cccugcccaucccagcccacgcgacccucucg

SEQ ID NO: 47955 - RNA, 32 nt, Homo Sapiens
uuccuauaucuaauguuucuuaaaagacaaau

SEQ ID NO: 47956 - RNA, 32 nt, Homo Sapiens
ggucagaaucgccaccugaggccugaauauca

SEQ ID NO: 47957 - RNA, 32 nt, Homo Sapiens
cacuuucauuacuuuuaaaaauguagaaauuc

SEQ ID NO: 47958 - RNA, 32 nt, Homo Sapiens
uguccugcucucgguccuuccacaaccucucg

SEQ ID NO: 47959 - RNA, 31 nt, Homo Sapiens
ucacaagccucccagaaccagcccuguccca

SEQ ID NO: 47960 - RNA, 32 nt, Homo Sapiens
accaggugacuagucggaaacuacacagacgu

SEQ ID NO: 47961 - RNA, 31 nt, Homo Sapiens
ucuagguuuccuaguagcccaagggcagcgu

SEQ ID NO: 47962 - RNA, 32 nt, Homo Sapiens
aggucgaggcugcagugagcugugauugugcc

SEQ ID NO: 47963 - RNA, 30 nt, Homo Sapiens
gucgaguaggcgaugggggagcccggcuuc

SEQ ID NO: 47964 - RNA, 32 nt, Homo Sapiens
uguuuggagggagaggcacacgguaaauggca

SEQ ID NO: 47965 - RNA, 32 nt, Homo Sapiens
caagaaacacugggcuucuagaaccaggcaac

SEQ ID NO: 47966 - RNA, 32 nt, Homo Sapiens
uauauaacagagcauaaauuuucuauaaucag

SEQ ID NO: 47967 - RNA, 32 nt, Homo Sapiens
agccaagaccuuugggucccagcuccuccccu

SEQ ID NO: 47968 - RNA, 32 nt, Homo Sapiens
uuauauaaaucuguaauagauuuuagaauuga

SEQ ID NO: 47969 - RNA, 32 nt, Homo Sapiens
aggcgggcagaucaccugaggucaagaguucg

SEQ ID NO: 47970 - RNA, 32 nt, Homo Sapiens
uguuuaaugccugaguacuuugaaccucagau

SEQ ID NO: 47971 - RNA, 32 nt, Homo Sapiens
uaaaaauauauaauaaacagcaucauauuaga

SEQ ID NO: 47972 - RNA, 32 nt, Homo Sapiens
cccuuuuuucuuuaaaccuuuaaaugacaaau

SEQ ID NO: 47973 - RNA, 32 nt, Homo Sapiens
uugaaauugcccacaagaucuagccucaucug

SEQ ID NO: 47974 - RNA, 32 nt, Homo Sapiens
agagacugagcuuugaaacuagugguuuuuaa

SEQ ID NO: 47975 - RNA, 32 nt, Homo Sapiens
ccggcagcgcacggguuaaggcuggcaccgcg

SEQ ID NO: 47976 - RNA, 32 nt, Homo Sapiens
gaaguacuaaauuaaacuuauuuugaaaccaa

SEQ ID NO: 47977 - RNA, 32 nt, Homo Sapiens
caaaccuguuucugcuggauugcgcaggucug

SEQ ID NO: 47978 - RNA, 31 nt, Homo Sapiens
cugggcgcaaggucccagcagccagcuuaag

SEQ ID NO: 47979 - RNA, 32 nt, Homo Sapiens
cugagagaccuuuauuauuauuuucaaauuaa

SEQ ID NO: 47980 - RNA, 32 nt, Homo Sapiens
agugggcccuauuugcauaaugcugcuggagg

SEQ ID NO: 47981 - RNA, 32 nt, Homo Sapiens
agguacugagauguuuaaaaaacaaguuuacu

SEQ ID NO: 47982 - RNA, 32 nt, Homo Sapiens
ccuccauuuccacuugguguuugguuccuguu

SEQ ID NO: 47983 - RNA, 32 nt, Homo Sapiens
ggagaauggcgagaacccgggagguggagcuu

SEQ ID NO: 47984 - RNA, 32 nt, Homo Sapiens
aaauuaggaaauaauuaucaccaagaggaucu

SEQ ID NO: 47985 - RNA, 32 nt, Homo Sapiens
agauuuuaaguucacaaugcuucauguauugu

SEQ ID NO: 47986 - RNA, 32 nt, Homo Sapiens
aguguucggagggcagcagagaggaccaagcc

SEQ ID NO: 47987 - RNA, 32 nt, Homo Sapiens
ucucauucuuucguuguauuuuccuagguguc

SEQ ID NO: 47988 - RNA, 32 nt, Homo Sapiens
cuccucgccucccccaggucuuucaccgucug

SEQ ID NO: 47989 - RNA, 32 nt, Homo Sapiens
ggcggguaggcaggaaggacugucccagacga

SEQ ID NO: 47990 - RNA, 32 nt, Homo Sapiens
gagacaauauaaauauucaaacugugccaugc

SEQ ID NO: 47991 - RNA, 32 nt, Homo Sapiens
acaaaaggguauuucuuuucucucuucagccc

SEQ ID NO: 47992 - RNA, 31 nt, Homo Sapiens
cuagcgcuucccgcgcugccccgcccgcugg

SEQ ID NO: 47993 - RNA, 32 nt, Homo Sapiens
gaauauaauuuggagacuacuuugaaaaguau

SEQ ID NO: 47994 - RNA, 32 nt, Homo Sapiens
uuucuguuuuauauacuaauaaucagggccua

SEQ ID NO: 47995 - RNA, 32 nt, Homo Sapiens
gucuucugucauuuaaccugguaaaggcaggg

SEQ ID NO: 47996 - RNA, 32 nt, Homo Sapiens
ugugaccugcccacccaacuccuggagcugua

SEQ ID NO: 47997 - RNA, 32 nt, Homo Sapiens
gacuuuggaagcagcugcugcugcugccacca

SEQ ID NO: 47998 - RNA, 32 nt, Homo Sapiens
agaggauucccagcucccaaccccgcagcuag

SEQ ID NO: 47999 - RNA, 32 nt, Homo Sapiens
cugugcuugcugucaguaugcauuacauuuaa

SEQ ID NO: 48000 - RNA, 32 nt, Homo Sapiens
gucugaagaacauaacaggucugugaucagaa

SEQ ID NO: 48001 - RNA, 32 nt, Homo Sapiens
ugaucucuggccuggggugcuccagcgauccc

SEQ ID NO: 48002 - RNA, 32 nt, Homo Sapiens
uuuccagaauacugaucacuuuuuuuuuuuga

SEQ ID NO: 48003 - RNA, 32 nt, Homo Sapiens
gaagggggcaagggcugagaugugguccccaa

SEQ ID NO: 48004 - RNA, 32 nt, Homo Sapiens
agaagacuuaggaagcuuugccaguaguuccu

SEQ ID NO: 48005 - RNA, 32 nt, Homo Sapiens
cgugcccucgggccgcgccaacaugccccgcg

SEQ ID NO: 48006 - RNA, 31 nt, Homo Sapiens
uaaugugacuaugccauucagcauuucaaug

SEQ ID NO: 48007 - RNA, 32 nt, Homo Sapiens
ugccccagcaggcgucaccauccaccuucccu

SEQ ID NO: 48008 - RNA, 32 nt, Homo Sapiens
cgaggaucccggggucgcgcgagagccgcaag

SEQ ID NO: 48009 - RNA, 32 nt, Homo Sapiens
uucugagcugcucuggccccaguccuggggcu

SEQ ID NO: 48010 - RNA, 32 nt, Homo Sapiens
aaagaagucaaucccuccugccuccuucagcu

SEQ ID NO: 48011 - RNA, 32 nt, Homo Sapiens
uugcauggacauuugugauucucauuuucuca

SEQ ID NO: 48012 - RNA, 32 nt, Homo Sapiens
gaaacacaccugucuaggggcggcaaucaaca

SEQ ID NO: 48013 - RNA, 32 nt, Homo Sapiens
ccccaauggacaaagccucuggcacgccagaa

SEQ ID NO: 48014 - RNA, 32 nt, Homo Sapiens
acagauuuuccagacagaaaaaucaacaaaga

SEQ ID NO: 48015 - RNA, 32 nt, Homo Sapiens
gguggggggugacagugccuucucuauuggca

SEQ ID NO: 48016 - RNA, 32 nt, Homo Sapiens
aauagcugcaaagcaccuaacacauaguaagg

SEQ ID NO: 48017 - RNA, 32 nt, Homo Sapiens
gccuaaccucuaccaucaaugagcucuuggcc

SEQ ID NO: 48018 - RNA, 32 nt, Homo Sapiens
ccugucucaaacaacaacaacaacaaaaauca

SEQ ID NO: 48019 - RNA, 32 nt, Homo Sapiens
cuaugugcuuuuuaaaauauuccuucuuugau

SEQ ID NO: 48020 - RNA, 32 nt, Homo Sapiens
caaggccccucaagcaccgcagaugggggcuc

SEQ ID NO: 48021 - RNA, 32 nt, Homo Sapiens
cuuuauugagauaaguuuuccugucaagaaag

SEQ ID NO: 48022 - RNA, 32 nt, Homo Sapiens
uucuuacacucccaugaguccuccuggacagg

SEQ ID NO: 48023 - RNA, 32 nt, Homo Sapiens
gaugcagcagcaaugcaaauuaugacauagug

SEQ ID NO: 48024 - RNA, 32 nt, Homo Sapiens
augcugcagaacugcaaccuuuuguaccuuuc

SEQ ID NO: 48025 - RNA, 32 nt, Homo Sapiens
acaggauaacagugagauccacugcuaaaggg

SEQ ID NO: 48026 - RNA, 32 nt, Homo Sapiens
guggacagaaaaguggcuggacaugacucggu

SEQ ID NO: 48027 - RNA, 32 nt, Homo Sapiens
agaacgcacuguacgguuuugauauuccccuc

SEQ ID NO: 48028 - RNA, 32 nt, Homo Sapiens
cagaugugccccagcccugccaugcgcuugug

SEQ ID NO: 48029 - RNA, 32 nt, Homo Sapiens
uaguggggaggggccuggccuggguggggcag

SEQ ID NO: 48030 - RNA, 32 nt, Homo Sapiens
auugcaaguacaaguuauaauuagugugauac

SEQ ID NO: 48031 - RNA, 32 nt, Homo Sapiens
gugucucuggcgggcuguccuccuugguggga

SEQ ID NO: 48032 - RNA, 32 nt, Homo Sapiens
auuagccgggcaugggggcgcgcaccuguagu

SEQ ID NO: 48033 - RNA, 32 nt, Homo Sapiens
acagacugcccccaacacuaaacgucccuuuc

SEQ ID NO: 48034 - RNA, 32 nt, Homo Sapiens
ugagccaaucccaccauaaugugaauaugcca

SEQ ID NO: 48035 - RNA, 32 nt, Homo Sapiens
aaagcgugaagauaggguguggggaaaaacuc

SEQ ID NO: 48036 - RNA, 32 nt, Homo Sapiens
ccugcugucaggagcaggcagaccuggacuca

SEQ ID NO: 48037 - RNA, 32 nt, Homo Sapiens
gagguuggggacuuaaauuagaauauggaucu

SEQ ID NO: 48038 - RNA, 32 nt, Homo Sapiens
acgggaagaaagggcaggcggcucggcgggcg

SEQ ID NO: 48039 - RNA, 32 nt, Homo Sapiens
agcuggggugcgugaucuggugcucguccacg

SEQ ID NO: 48040 - RNA, 32 nt, Homo Sapiens
uuaggccccgcccuccucccaauggcuccgcc

SEQ ID NO: 48041 - RNA, 32 nt, Homo Sapiens
cgacggcgggccugggucucgcgcgcguauug

SEQ ID NO: 48042 - RNA, 32 nt, Homo Sapiens
caauagccugccuucguccgggccccuccugg

SEQ ID NO: 48043 - RNA, 32 nt, Homo Sapiens
ggagagcaagguggcagccgggagcccaucag

SEQ ID NO: 48044 - RNA, 32 nt, Homo Sapiens
ccauaccugcugucagcaaggguguaauauac

SEQ ID NO: 48045 - RNA, 32 nt, Homo Sapiens
guuuauaaugaaacuaucuacaauucuuguuu

SEQ ID NO: 48046 - RNA, 32 nt, Homo Sapiens
gcaagacacuggcuuugaaauuaggcucauga

SEQ ID NO: 48047 - RNA, 32 nt, Homo Sapiens
aaaaaaugcauuaaagauuaauacucaauuug

SEQ ID NO: 48048 - RNA, 32 nt, Homo Sapiens
cauggcagagccgccuccuaggucuuggcaaa

SEQ ID NO: 48049 - RNA, 32 nt, Homo Sapiens
gagcagcauaugcugugauuggcugcccugca

SEQ ID NO: 48050 - RNA, 32 nt, Homo Sapiens
gcaugcccagguuccuugcugacucagcacuu

SEQ ID NO: 48051 - RNA, 32 nt, Homo Sapiens
uuucuuuuuuuuuuuuuuuuuacuaaauuaga

SEQ ID NO: 48052 - RNA, 32 nt, Homo Sapiens
ugcuggcucgcucccacaccgccccgguguug

SEQ ID NO: 48053 - RNA, 32 nt, Homo Sapiens
auuuugacaaagugccucaugcaaccgggccc

SEQ ID NO: 48054 - RNA, 32 nt, Homo Sapiens
uagcacuaagggcaaaaaccaauauuuauaau

SEQ ID NO: 48055 - RNA, 32 nt, Homo Sapiens
ucaugauugcaguucagcuguuuaauacugau

SEQ ID NO: 48056 - RNA, 32 nt, Homo Sapiens
agacaccugugcuuuggaaauccaccaccaau

SEQ ID NO: 48057 - RNA, 32 nt, Homo Sapiens
ccccaccgagugccggcucccgcgcucugcgg

SEQ ID NO: 48058 - RNA, 32 nt, Homo Sapiens
augauagggaccagcacuguacauuuguuccc

SEQ ID NO: 48059 - RNA, 32 nt, Homo Sapiens
ugcagguggaagcugggagccauguggggggu

SEQ ID NO: 48060 - RNA, 32 nt, Homo Sapiens
cagaagcugaagaagguacggcuggggguucu

SEQ ID NO: 48061 - RNA, 32 nt, Homo Sapiens
cccaucuccuucccuccucaagaagcagaggc

SEQ ID NO: 48062 - RNA, 32 nt, Homo Sapiens
cacugugugacccugggucugcucuuagccuc

SEQ ID NO: 48063 - RNA, 32 nt, Homo Sapiens
uguauacauugugcuccuuucugggggaagaa

SEQ ID NO: 48064 - RNA, 32 nt, Homo Sapiens
auacuguaaaauuuagguauacucaagacuag

SEQ ID NO: 48065 - RNA, 32 nt, Homo Sapiens
ccggggccggggagcgggcgccaguguagccc

SEQ ID NO: 48066 - RNA, 32 nt, Homo Sapiens
acccggguggcgggacaagacuugcuucccgg

SEQ ID NO: 48067 - RNA, 32 nt, Homo Sapiens
acauggguaaccucacuucaccccauuauuag

SEQ ID NO: 48068 - RNA, 32 nt, Homo Sapiens
uggccucccuggcuccuccgucugacccucug

SEQ ID NO: 48069 - RNA, 32 nt, Homo Sapiens
guuuacauguaaccacagaaaucccuuucucu

SEQ ID NO: 48070 - RNA, 29 nt, Homo Sapiens
ugaaugucauauguccaguagcugcauaa

SEQ ID NO: 48071 - RNA, 32 nt, Homo Sapiens
acuugggagccucaggcccacgcccacccuuc

SEQ ID NO: 48072 - RNA, 32 nt, Homo Sapiens
uuaagaaugaauucucaagccauaacacagua

SEQ ID NO: 48073 - RNA, 32 nt, Homo Sapiens
ggucagcagggccacugaguagucauuuugcc

SEQ ID NO: 48074 - RNA, 32 nt, Homo Sapiens
gagccccccugcucccaguaccucugcuccag

SEQ ID NO: 48075 - RNA, 32 nt, Homo Sapiens
ucucugccugcccugcccuuggggccaccucu

SEQ ID NO: 48076 - RNA, 32 nt, Homo Sapiens
agccgaguguguauacugcucuggccauccac

SEQ ID NO: 48077 - RNA, 32 nt, Homo Sapiens
gccccacagaaaguugugcauaaaaaugacug

SEQ ID NO: 48078 - RNA, 32 nt, Homo Sapiens
ugaggcucauugaucgccuggggaacuugugc

SEQ ID NO: 48079 - RNA, 32 nt, Homo Sapiens
auagauaaaaauuagucaaaaaacacuguaau

SEQ ID NO: 48080 - RNA, 32 nt, Homo Sapiens
gauuuaaaccuggcuuuggcaagagccugcag

SEQ ID NO: 48081 - RNA, 32 nt, Homo Sapiens
acaagucuugacaacagcaucuggucuacuag

SEQ ID NO: 48082 - RNA, 32 nt, Homo Sapiens
gagguagaguaaauaugguccaauuaaaaggu

SEQ ID NO: 48083 - RNA, 27 nt, Homo Sapiens
uauagccauuaauucuuuaguggaaaa

SEQ ID NO: 48084 - RNA, 32 nt, Homo Sapiens
auguuguaacuaauuuaaugugaauacuguua

SEQ ID NO: 48085 - RNA, 32 nt, Homo Sapiens
acaaggaggacaaauuucuacugcaacaaugc

SEQ ID NO: 48086 - RNA, 32 nt, Homo Sapiens
cauauguccucugcagauccacagcagagaaa

SEQ ID NO: 48087 - RNA, 28 nt, Homo Sapiens
uuuccaguuacaggaucauauuaacugu

SEQ ID NO: 48088 - RNA, 32 nt, Homo Sapiens
ggcgagugccgcgcgggccaccauggccacgg

SEQ ID NO: 48089 - RNA, 32 nt, Homo Sapiens
gcuaaacuguuuucuuuuucccuuuuuuugcu

SEQ ID NO: 48090 - RNA, 32 nt, Homo Sapiens
cuucucauuuuuggagcuuuccuuccagaguc

SEQ ID NO: 48091 - RNA, 32 nt, Homo Sapiens
uauauccugauaauuauuuaaauuguuacuuu

SEQ ID NO: 48092 - RNA, 31 nt, Homo Sapiens
uuggcucuugguaccuguggguuagcaucaa

SEQ ID NO: 48093 - RNA, 32 nt, Homo Sapiens
auuacugagacagggaagagaagugcaagaau

SEQ ID NO: 48094 - RNA, 32 nt, Homo Sapiens
uaagaacaauuuuuauugcuuuauuuauugga

SEQ ID NO: 48095 - RNA, 32 nt, Homo Sapiens
cgcgagggcgcgcgucucgggugccgccgugg

SEQ ID NO: 48096 - RNA, 32 nt, Homo Sapiens
aggaaaugcuuuaaguuguccuaagauaacau

SEQ ID NO: 48097 - RNA, 32 nt, Homo Sapiens
aaauguuuuggagagcgggagguuucccccaa

SEQ ID NO: 48098 - RNA, 32 nt, Homo Sapiens
gugugcggggguggagcgggggcuggagggag

SEQ ID NO: 48099 - RNA, 32 nt, Homo Sapiens
gacauacuuuuuuuuucuucaauuuuguaaac

SEQ ID NO: 48100 - RNA, 30 nt, Homo Sapiens
ggaaguugcgcgcaggccggcgggcgggag

SEQ ID NO: 48101 - RNA, 28 nt, Homo Sapiens
gcgauggcggcacagggagcugcugcgg

SEQ ID NO: 48102 - RNA, 32 nt, Homo Sapiens
ggaugugggucuuuuucucuucuguucugauu

SEQ ID NO: 48103 - RNA, 32 nt, Homo Sapiens
uugagccuuuuaaaguauugaaugcuugcaaa

SEQ ID NO: 48104 - RNA, 32 nt, Homo Sapiens
cugccuucggggaguucaggggauugugggag

SEQ ID NO: 48105 - RNA, 32 nt, Homo Sapiens
uggggcgcaccgaagcgccgggacccaagagg

SEQ ID NO: 48106 - RNA, 32 nt, Homo Sapiens
aaguugaauugauaguauuuuuucauuaaauc

SEQ ID NO: 48107 - RNA, 32 nt, Homo Sapiens
uguggugugcuaaaauacuguaauuaucugug

SEQ ID NO: 48108 - RNA, 32 nt, Homo Sapiens
ucauucauguuuucuacuuucauuucuuaagc

SEQ ID NO: 48109 - RNA, 32 nt, Homo Sapiens
cagggccuuugcugggaccccugguggaggcc

SEQ ID NO: 48110 - RNA, 32 nt, Homo Sapiens
uuggaggcucccagagacgugccuaguccugu

SEQ ID NO: 48111 - RNA, 32 nt, Homo Sapiens
gagcgcccaagccccuucagucagcuguucua

SEQ ID NO: 48112 - RNA, 32 nt, Homo Sapiens
cggagaggaggaagcuccugccggcugagcgg

SEQ ID NO: 48113 - RNA, 32 nt, Homo Sapiens
caauugagauaaaaguguuuuaaaauucuguu

SEQ ID NO: 48114 - RNA, 32 nt, Homo Sapiens
gaaaacaauauuugauguauaacuuccccuua

SEQ ID NO: 48115 - RNA, 27 nt, Homo Sapiens
accgucuccagcuucagccuuuccaga

SEQ ID NO: 48116 - RNA, 32 nt, Homo Sapiens
gucauucugaggucacauaacacauaaaauua

SEQ ID NO: 48117 - RNA, 32 nt, Homo Sapiens
auagacgccccggcggccccggguccuggagu

SEQ ID NO: 48118 - RNA, 32 nt, Homo Sapiens
uucuguagugcuauuauagugaaaaacucagu

SEQ ID NO: 48119 - RNA, 32 nt, Homo Sapiens
agaguuacuauuuuuguauauauuugcauagu

SEQ ID NO: 48120 - RNA, 32 nt, Homo Sapiens
cucucugacacaagcgcacacacacacacaca

SEQ ID NO: 48121 - RNA, 32 nt, Homo Sapiens
gugacagaucauaggaaguggcuggucuggag

SEQ ID NO: 48122 - RNA, 32 nt, Homo Sapiens
acaauauuguauaacagaccacuuccugagua

SEQ ID NO: 48123 - RNA, 32 nt, Homo Sapiens
ugaggaaugggaaagucuuguuuuuugcugau

SEQ ID NO: 48124 - RNA, 32 nt, Homo Sapiens
acuuauuuuaaauaugccuaguaacacauaug

SEQ ID NO: 48125 - RNA, 32 nt, Homo Sapiens
cccugguguguguggugcacuccagggcauca

SEQ ID NO: 48126 - RNA, 32 nt, Homo Sapiens
cuuucaguuuguucuguaaauauuuagaaaag

SEQ ID NO: 48127 - RNA, 32 nt, Homo Sapiens
uugagccacuacucccucauccccucaggagu

SEQ ID NO: 48128 - RNA, 32 nt, Homo Sapiens
ggccgauggggaaggagaaggagugccauacc

SEQ ID NO: 48129 - RNA, 32 nt, Homo Sapiens
ggguuccuuuucugccagcuuggaagggcaac

SEQ ID NO: 48130 - RNA, 32 nt, Homo Sapiens
aacaaagaaagcuuuuaaaauauuuuugcuuu

SEQ ID NO: 48131 - RNA, 32 nt, Homo Sapiens
aaagaucuuuuuuuuuuuuuuuucuuuuuuuu

SEQ ID NO: 48132 - RNA, 32 nt, Homo Sapiens
ucuguaauuugauuuuuuuuuaguuauugauu

SEQ ID NO: 48133 - RNA, 32 nt, Homo Sapiens
caaugauaaaaauaaccaauuaaaaauggguu

SEQ ID NO: 48134 - RNA, 32 nt, Homo Sapiens
gugucuuuuuauuuauaacacuuuuuuggcaa

SEQ ID NO: 48135 - RNA, 32 nt, Homo Sapiens
uggaaguaugaaauguuagccaauuaauacca

SEQ ID NO: 48136 - RNA, 32 nt, Homo Sapiens
ggcaauguucccucccaggcccuccuggguga

SEQ ID NO: 48137 - RNA, 32 nt, Homo Sapiens
uuacaaaaagagaaagagaaaaucugguauuu

SEQ ID NO: 48138 - RNA, 32 nt, Homo Sapiens
agccgaggaaagggcggagcggcucuccgggc

SEQ ID NO: 48139 - RNA, 32 nt, Homo Sapiens
gcuggcuucuauuguugauuuauuuuuggauu

SEQ ID NO: 48140 - RNA, 32 nt, Homo Sapiens
aauaacauuucuggaugagacuuguuuccaaa

SEQ ID NO: 48141 - RNA, 32 nt, Homo Sapiens
aacccucgcuccggcccggcccggcccccacc

SEQ ID NO: 48142 - RNA, 30 nt, Homo Sapiens
gcuggggccacccccuccugccuaaugccu

SEQ ID NO: 48143 - RNA, 32 nt, Homo Sapiens
aaaucauccuuccuauggauucuuuucucagu

SEQ ID NO: 48144 - RNA, 32 nt, Homo Sapiens
caccaagugucuacuguuccaaaucucuauaa

SEQ ID NO: 48145 - RNA, 32 nt, Homo Sapiens
aggcauguaauaaacuauucuuugaaacuugu

SEQ ID NO: 48146 - RNA, 32 nt, Homo Sapiens
ccugggccagaacucagcgucccggccugcgg

SEQ ID NO: 48147 - RNA, 30 nt, Homo Sapiens
guuaacccuccucggauuucucgaauuuca

SEQ ID NO: 48148 - RNA, 32 nt, Homo Sapiens
cccauucaacccuucagacucccuccuggcag

SEQ ID NO: 48149 - RNA, 32 nt, Homo Sapiens
auugucuguauaucucuauauuuuauccaugu

SEQ ID NO: 48150 - RNA, 32 nt, Homo Sapiens
uuugcuguagauugccuaguaaaauuacuaag

SEQ ID NO: 48151 - RNA, 28 nt, Homo Sapiens
agcaugacgacggagaccuuugugaagg

SEQ ID NO: 48152 - RNA, 32 nt, Homo Sapiens
aucaccggugcacagcugguguccuagcagga

SEQ ID NO: 48153 - RNA, 32 nt, Homo Sapiens
ucaccagggcggggccccacuccacggcaccc

SEQ ID NO: 48154 - RNA, 32 nt, Homo Sapiens
ggucgggccaagauggcggugcagguggugca

SEQ ID NO: 48155 - RNA, 32 nt, Homo Sapiens
cggacggggcagccgugcucacagcucagcag

SEQ ID NO: 48156 - RNA, 32 nt, Homo Sapiens
uagugguaacuuuucaaacagcccuuagcacu

SEQ ID NO: 48157 - RNA, 32 nt, Homo Sapiens
ugugaauaaacuauagauuuuaguuaaugauu

SEQ ID NO: 48158 - RNA, 32 nt, Homo Sapiens
uaauuaauauaaauaauucaguaggucugggg

SEQ ID NO: 48159 - RNA, 32 nt, Homo Sapiens
agaugauggcaaugcaccuugcaggugcaguu

SEQ ID NO: 48160 - RNA, 32 nt, Homo Sapiens
uuguuucuuuugcuuccugaccuucuccccua

SEQ ID NO: 48161 - RNA, 32 nt, Homo Sapiens
gguuuuagcaaacacaggucuaaucucuuuug

SEQ ID NO: 48162 - RNA, 32 nt, Homo Sapiens
ugagaaagaaaaagggaaaauauuuuacuuug

SEQ ID NO: 48163 - RNA, 32 nt, Homo Sapiens
ccaguagcagucugcuggccagccaagaugag

SEQ ID NO: 48164 - RNA, 32 nt, Homo Sapiens
aaaauaguacauucugucucaugucacguauc

SEQ ID NO: 48165 - RNA, 32 nt, Homo Sapiens
ggcuccaccguccagcugucuguccguccaga

SEQ ID NO: 48166 - RNA, 32 nt, Homo Sapiens
cccccagggccuccagugugcagacgcguguc

SEQ ID NO: 48167 - RNA, 32 nt, Homo Sapiens
ugggaaaaugucaggcucuuugcugcugguuu

SEQ ID NO: 48168 - RNA, 32 nt, Homo Sapiens
aaagguuucuucccuuccaguucgaauuugga

SEQ ID NO: 48169 - RNA, 32 nt, Homo Sapiens
ggccgggcgggccacgcgggaccgacuuucca

SEQ ID NO: 48170 - RNA, 32 nt, Homo Sapiens
ggggaaagguuugcagcaaaaaucauaaguag

SEQ ID NO: 48171 - RNA, 32 nt, Homo Sapiens
gcuugucauuuucucuguuuuguuuuuguaug

SEQ ID NO: 48172 - RNA, 32 nt, Homo Sapiens
uuaaauaggugcuuuaauuuuacagcuuucaa

SEQ ID NO: 48173 - RNA, 32 nt, Homo Sapiens
aagcgcccaaaggauuccccuucacguuggug

SEQ ID NO: 48174 - RNA, 32 nt, Homo Sapiens
cauuaaauauaaaaauaacaguucuucauaaa

SEQ ID NO: 48175 - RNA, 30 nt, Homo Sapiens
auuccuucuucuggcucagaagcuccccca

SEQ ID NO: 48176 - RNA, 32 nt, Homo Sapiens
cccagacccccuccacgguccgcggccugcac

SEQ ID NO: 48177 - RNA, 32 nt, Homo Sapiens
caagauucuuuuucuuuuuuuuuuuuuuuuuu

SEQ ID NO: 48178 - RNA, 32 nt, Homo Sapiens
ggcacagccucucaucugucagaugggagcgg

SEQ ID NO: 48179 - RNA, 32 nt, Homo Sapiens
accggcccaagcaggugggagcuaaggggaaa

SEQ ID NO: 48180 - RNA, 32 nt, Homo Sapiens
ggaggggcuguaaaauggaggccauuguguga

SEQ ID NO: 48181 - RNA, 32 nt, Homo Sapiens
cuagaaacagugaaaauagauaauagcuauaa

SEQ ID NO: 48182 - RNA, 32 nt, Homo Sapiens
ggguggggaggcccuccuccccggcccucccu

SEQ ID NO: 48183 - RNA, 32 nt, Homo Sapiens
uugcacauccuucaaggggaucuuuaaccucu

SEQ ID NO: 48184 - RNA, 32 nt, Homo Sapiens
agcaagaaucuaaguaaaucugccauggguuc

SEQ ID NO: 48185 - RNA, 32 nt, Homo Sapiens
uuagagaugauaaucccauacucucaauugag

SEQ ID NO: 48186 - RNA, 32 nt, Homo Sapiens
gggagggagagccagguccguagcgugggucc

SEQ ID NO: 48187 - RNA, 30 nt, Homo Sapiens
ugccgagggcaagcggcggguccugcagga

SEQ ID NO: 48188 - RNA, 32 nt, Homo Sapiens
uaucacuacuaaaaucgaaucuaucuuagaac

SEQ ID NO: 48189 - RNA, 32 nt, Homo Sapiens
acacccaucucuacuaaaaauacgaaacauua

SEQ ID NO: 48190 - RNA, 32 nt, Homo Sapiens
ccggagagugugcgugagagccaggggcuggc

SEQ ID NO: 48191 - RNA, 32 nt, Homo Sapiens
ccuaggagcugccugccccagcuggggugacg

SEQ ID NO: 48192 - RNA, 32 nt, Homo Sapiens
uucauguuauuuaaccagaaaugucuuaucuc

SEQ ID NO: 48193 - RNA, 32 nt, Homo Sapiens
uuuaacauaaaauuaugauaguuuguuuuaau

SEQ ID NO: 48194 - RNA, 32 nt, Homo Sapiens
gcucagcguugguaauaccauguuugaugcaa

SEQ ID NO: 48195 - RNA, 32 nt, Homo Sapiens
aagauaauggcaguuuaggcugcacaacuggu

SEQ ID NO: 48196 - RNA, 32 nt, Homo Sapiens
agguucugccgacggaugcuggcgaugguugc

SEQ ID NO: 48197 - RNA, 32 nt, Homo Sapiens
gggccggaagccucgggcgcucaccuggcacc

SEQ ID NO: 48198 - RNA, 32 nt, Homo Sapiens
agaagauuagacagguaagauucuaauacaau

SEQ ID NO: 48199 - RNA, 32 nt, Homo Sapiens
gcuucucuacaauuagauauuuuuagaaguuu

SEQ ID NO: 48200 - RNA, 32 nt, Homo Sapiens
cugaggucaggaguuugagaccggccuggcca

SEQ ID NO: 48201 - RNA, 32 nt, Homo Sapiens
ccccaccccacccaaacugaguggcaaaccag

SEQ ID NO: 48202 - RNA, 32 nt, Homo Sapiens
auacccaauagguuuuuuucugaucuucuccc

SEQ ID NO: 48203 - RNA, 32 nt, Homo Sapiens
aagauaccuguaccccgcccccgccccccaaa

SEQ ID NO: 48204 - RNA, 32 nt, Homo Sapiens
gagucgagugaagccuggcccgugagugccuc

SEQ ID NO: 48205 - RNA, 32 nt, Homo Sapiens
uuuugugcguggcaagugggaccuuaggaagg

SEQ ID NO: 48206 - RNA, 32 nt, Homo Sapiens
caggcaaaugcuucagcucacaugucccccaa

SEQ ID NO: 48207 - RNA, 32 nt, Homo Sapiens
cauauucuccuuuauugugaagaguaguuuua

SEQ ID NO: 48208 - RNA, 32 nt, Homo Sapiens
aggaacccacccaaaguagcgagagugaggaa

SEQ ID NO: 48209 - RNA, 32 nt, Homo Sapiens
uuguaccugaaggccacagucuccucgacaga

SEQ ID NO: 48210 - RNA, 32 nt, Homo Sapiens
uguguguuaauggugugugcucccucucccuc

SEQ ID NO: 48211 - RNA, 32 nt, Homo Sapiens
gacugggacuggcagagcugccggcgccggac

SEQ ID NO: 48212 - RNA, 32 nt, Homo Sapiens
guuuaagucucuggagaguuaaguauuuugua

SEQ ID NO: 48213 - RNA, 32 nt, Homo Sapiens
aaugaaaggaggaggaaggcuggucuccgauu

SEQ ID NO: 48214 - RNA, 32 nt, Homo Sapiens
cagaaaaauacuuaaauucccuuaaugguguu

SEQ ID NO: 48215 - RNA, 32 nt, Homo Sapiens
auguucgcaguggugggcagcgugccugugcc

SEQ ID NO: 48216 - RNA, 32 nt, Homo Sapiens
ccugacccugugugcuggccgggaccugccac

SEQ ID NO: 48217 - RNA, 32 nt, Homo Sapiens
gccggagcugacuccaacuaaaacagaacccu

SEQ ID NO: 48218 - RNA, 32 nt, Homo Sapiens
ccaaccccuugcugccagacaggcuuaaauug

SEQ ID NO: 48219 - RNA, 32 nt, Homo Sapiens
auucacgguuccugggucuuccuggaggaaug

SEQ ID NO: 48220 - RNA, 32 nt, Homo Sapiens
cguggcagcaaccaugcagagugacugaaaca

SEQ ID NO: 48221 - RNA, 32 nt, Homo Sapiens
ggacuccgaacgccgaagaccaggggccggaa

SEQ ID NO: 48222 - RNA, 32 nt, Homo Sapiens
acgccuagcuaauuucuguauuuuuaguagag

SEQ ID NO: 48223 - RNA, 32 nt, Homo Sapiens
ggcgcccgcgguccauggaccggaaccucggg

SEQ ID NO: 48224 - RNA, 32 nt, Homo Sapiens
gguauaauccguaauccauacacugccagaua

SEQ ID NO: 48225 - RNA, 32 nt, Homo Sapiens
caaagaaaacaaauuaaugugauguaacuugc

SEQ ID NO: 48226 - RNA, 32 nt, Homo Sapiens
uuuggggaagaacucuacaaaagggaaauguc

SEQ ID NO: 48227 - RNA, 32 nt, Homo Sapiens
uucacccgcugcuaggcucguuuaaugagucu

SEQ ID NO: 48228 - RNA, 32 nt, Homo Sapiens
cacggcgucggaagaggccuuuugagcaagcg

SEQ ID NO: 48229 - RNA, 32 nt, Homo Sapiens
ugacuuuuuuauuuuauguuaauguuuucagu

SEQ ID NO: 48230 - RNA, 32 nt, Homo Sapiens
gggcaccagaucccuuccauggagcaggucau

SEQ ID NO: 48231 - RNA, 32 nt, Homo Sapiens
auccaaggggagagacgaugggcuggguuugu

SEQ ID NO: 48232 - RNA, 32 nt, Homo Sapiens
ggcaaaauauuuuuguaauuauuuucuaaucc

SEQ ID NO: 48233 - RNA, 32 nt, Homo Sapiens
ccaucagugaauggaauggaccaaugaggugg

SEQ ID NO: 48234 - RNA, 32 nt, Homo Sapiens
ccacgagcucgcgucucggcuggggcugcggc

SEQ ID NO: 48235 - RNA, 32 nt, Homo Sapiens
cucuuuggguugaauuugauuggaaaccucug

SEQ ID NO: 48236 - RNA, 32 nt, Homo Sapiens
cacacagaugaccucaccauccacacucagac

SEQ ID NO: 48237 - RNA, 32 nt, Homo Sapiens
cacacaucacauuccgcccauccagagccugc

SEQ ID NO: 48238 - RNA, 32 nt, Homo Sapiens
uaugcggcuuaaacuuugaucuguaaggagcg

SEQ ID NO: 48239 - RNA, 32 nt, Homo Sapiens
ucuccuaccccuccccagcuuggugggcgccu

SEQ ID NO: 48240 - RNA, 32 nt, Homo Sapiens
acgaaagcaaagugguaagcacagggugagac

SEQ ID NO: 48241 - RNA, 32 nt, Homo Sapiens
ucgccgugagccgcucgcugcugcugacgugc

SEQ ID NO: 48242 - RNA, 32 nt, Homo Sapiens
caaaacaaagaaggcauagaauauaaaugaau

SEQ ID NO: 48243 - RNA, 32 nt, Homo Sapiens
gaggggaggggagggugcaggcaucuccuguc

SEQ ID NO: 48244 - RNA, 30 nt, Homo Sapiens
augcaggcgaagcuugggaucuggccaagu

SEQ ID NO: 48245 - RNA, 32 nt, Homo Sapiens
ucuuuucuuuucuucugguuuaauuuuaauuu

SEQ ID NO: 48246 - RNA, 32 nt, Homo Sapiens
augcaaauuuaaaugaaugcuauaaaauuuua

SEQ ID NO: 48247 - RNA, 32 nt, Homo Sapiens
uccaaaggaaaacaacaaaacaaaugggaaaa

SEQ ID NO: 48248 - RNA, 32 nt, Homo Sapiens
aacuuuaauaauauucaaaaguugacucuccu

SEQ ID NO: 48249 - RNA, 32 nt, Homo Sapiens
cagaacacagguaucgugaaaacuaccccuac

SEQ ID NO: 48250 - RNA, 32 nt, Homo Sapiens
uuuguugauggaauacuguaucauaugcucaa

SEQ ID NO: 48251 - RNA, 32 nt, Homo Sapiens
cgcagcccauggcccaucggcccggcagugga

SEQ ID NO: 48252 - RNA, 32 nt, Homo Sapiens
gugcggcgagauggacacucccccgcucucgg

SEQ ID NO: 48253 - RNA, 32 nt, Homo Sapiens
ccccuuccggugcucacacgcccacgccgugc

SEQ ID NO: 48254 - RNA, 32 nt, Homo Sapiens
auaaaccacagaagagcagcacucgaucacag

SEQ ID NO: 48255 - RNA, 32 nt, Homo Sapiens
ggugcagugccgccaggccuccccuguaggag

SEQ ID NO: 48256 - RNA, 32 nt, Homo Sapiens
ucaaacacauaaacccaucagaucucaugaga

SEQ ID NO: 48257 - RNA, 32 nt, Homo Sapiens
gcgcagugccgcagcgcacgccggaguggcug

SEQ ID NO: 48258 - RNA, 32 nt, Homo Sapiens
cguccagcaugucuguaccaucgucuccuucc

SEQ ID NO: 48259 - RNA, 32 nt, Homo Sapiens
ccuuccucauucuccaagcucaucaacagguc

SEQ ID NO: 48260 - RNA, 32 nt, Homo Sapiens
ugcagacauacccaccaucaccaugcaagugc

SEQ ID NO: 48261 - RNA, 32 nt, Homo Sapiens
gagagaaaugacuuaagaagcuaucuguggcu

SEQ ID NO: 48262 - RNA, 32 nt, Homo Sapiens
auguucagugauucauuuaacauacaccaaug

SEQ ID NO: 48263 - RNA, 32 nt, Homo Sapiens
guauaaccauacauuuuugguggaaguguuuc

SEQ ID NO: 48264 - RNA, 32 nt, Homo Sapiens
aauuaugagggagaggucugagggaagggagg

SEQ ID NO: 48265 - RNA, 32 nt, Homo Sapiens
auucaaucgugucuguacuuacaggaugucuu

SEQ ID NO: 48266 - RNA, 32 nt, Homo Sapiens
aucauguuaugauaaaaaauuuuguaauuuuc

SEQ ID NO: 48267 - RNA, 32 nt, Homo Sapiens
gcggcagcggcucuuauagugcaaccauggca

SEQ ID NO: 48268 - RNA, 32 nt, Homo Sapiens
gaaaauucuaaaugucuuucugugcauauuuu

SEQ ID NO: 48269 - RNA, 31 nt, Homo Sapiens
ccuggcugggagugcgcuccaagcaggcaag

SEQ ID NO: 48270 - RNA, 32 nt, Homo Sapiens
aagaugagccagagccagaacuagagacgggc

SEQ ID NO: 48271 - RNA, 32 nt, Homo Sapiens
uccucugcccccacccagcugcccucagccuu

SEQ ID NO: 48272 - RNA, 32 nt, Homo Sapiens
ccgaugcggagcuagggcuggagcucugccca

SEQ ID NO: 48273 - RNA, 32 nt, Homo Sapiens
aaaucccucaaacaauaaaccacaucauggac

SEQ ID NO: 48274 - RNA, 32 nt, Homo Sapiens
ccugccucaucccacagccguccauaauuugg

SEQ ID NO: 48275 - RNA, 32 nt, Homo Sapiens
aucccauucauuuucugcaccucccccauagg

SEQ ID NO: 48276 - RNA, 32 nt, Homo Sapiens
gagaggcggcgcgggcggccgagggcacugaa

SEQ ID NO: 48277 - RNA, 32 nt, Homo Sapiens
guuugaaauauucuuuaucaaguuuuauaaaa

SEQ ID NO: 48278 - RNA, 32 nt, Homo Sapiens
ugagcuauaccaguggagacacugccacugau

SEQ ID NO: 48279 - RNA, 32 nt, Homo Sapiens
cugcuuuggccauggcugaaaaaaugcuggug

SEQ ID NO: 48280 - RNA, 32 nt, Homo Sapiens
agcacaaagcaucugugugccgaagaaccugg

SEQ ID NO: 48281 - RNA, 32 nt, Homo Sapiens
auacaaaagaaaucguucuuuuccuuuucuua

SEQ ID NO: 48282 - RNA, 32 nt, Homo Sapiens
aaaccuaggcaaguuccuggaacugcugaggu

SEQ ID NO: 48283 - RNA, 32 nt, Homo Sapiens
guagcagucucagagccuccccgacccacuac

SEQ ID NO: 48284 - RNA, 32 nt, Homo Sapiens
cuaccgaggcgcgggcgcugcagaggcuccca

SEQ ID NO: 48285 - RNA, 32 nt, Homo Sapiens
agucgugauuagaauuuaucugaugguuuugu

SEQ ID NO: 48286 - RNA, 32 nt, Homo Sapiens
cccuuuaaggcacauuuuuuacucagcauuaa

SEQ ID NO: 48287 - RNA, 29 nt, Homo Sapiens
aagcuggagcagcccaccuagagcuggcc

SEQ ID NO: 48288 - RNA, 32 nt, Homo Sapiens
cgcaggggcagacaccaagagaagggcgcguc

SEQ ID NO: 48289 - RNA, 32 nt, Homo Sapiens
uucucacccuguauuucuuuagcccuaaauug

SEQ ID NO: 48290 - RNA, 32 nt, Homo Sapiens
agguaguacgacccucuggauuuggaaggcaa

SEQ ID NO: 48291 - RNA, 32 nt, Homo Sapiens
aguacuuaaacacaauacauugccucagcaua

SEQ ID NO: 48292 - RNA, 32 nt, Homo Sapiens
uuugccaaaaauugggauauguuaucugacag

SEQ ID NO: 48293 - RNA, 32 nt, Homo Sapiens
cuccuuguaauauuuguguuuauuuuuaauau

SEQ ID NO: 48294 - RNA, 32 nt, Homo Sapiens
ccuuuuuucuaaaauuaccaaagauauuacac

SEQ ID NO: 48295 - RNA, 32 nt, Homo Sapiens
auggggauuuguaggacuuuaaaaagcacuca

SEQ ID NO: 48296 - RNA, 32 nt, Homo Sapiens
uccacugagaccugaaaaauggcuucggggca

SEQ ID NO: 48297 - RNA, 32 nt, Homo Sapiens
cccugccgcugcucucacggguucgggauguu

SEQ ID NO: 48298 - RNA, 32 nt, Homo Sapiens
agaagggguccaggaagaaaaugucacacuug

SEQ ID NO: 48299 - RNA, 32 nt, Homo Sapiens
ccuagugagcugaaggaugaggcugcugaaga

SEQ ID NO: 48300 - RNA, 32 nt, Homo Sapiens
auuuucauuauaauacuuuucuuaaaguuucu

SEQ ID NO: 48301 - RNA, 32 nt, Homo Sapiens
uggcccuuaucugcacccagcagagcgccggc

SEQ ID NO: 48302 - RNA, 32 nt, Homo Sapiens
uuuuaauugucuagucuuaaauuuguacaucu

SEQ ID NO: 48303 - RNA, 32 nt, Homo Sapiens
ccaaaucuggccugggggcccgagaagcuucc

SEQ ID NO: 48304 - RNA, 32 nt, Homo Sapiens
ucucuaugaugauguaugacugauaaauuaug

SEQ ID NO: 48305 - RNA, 32 nt, Homo Sapiens
aaacccaaaagcuuaugggagcuggcacguca

SEQ ID NO: 48306 - RNA, 32 nt, Homo Sapiens
aacggugccauggggaacugucugcacagggu

SEQ ID NO: 48307 - RNA, 32 nt, Homo Sapiens
aacugcacuaaacugccucugcucucuugucu

SEQ ID NO: 48308 - RNA, 32 nt, Homo Sapiens
ucuagagacccuccagcuaaaaacagagccug

SEQ ID NO: 48309 - RNA, 32 nt, Homo Sapiens
ugccagccgcgagcugcugcugcaggacagca

SEQ ID NO: 48310 - RNA, 32 nt, Homo Sapiens
ggguuuguugaacaauagaaaccuguaaagca

SEQ ID NO: 48311 - RNA, 32 nt, Homo Sapiens
cgccugccugccccaaucccagccccgacaau

SEQ ID NO: 48312 - RNA, 31 nt, Homo Sapiens
cuggcaacaaauugugaaacaugaaauuucu

SEQ ID NO: 48313 - RNA, 32 nt, Homo Sapiens
ggcgggcuccaagcgcuuugcuuccggaacuc

SEQ ID NO: 48314 - RNA, 32 nt, Homo Sapiens
auucauuauagcagaacuuuaaauuucccagc

SEQ ID NO: 48315 - RNA, 32 nt, Homo Sapiens
ggaaaagucaccguagcccacuguggcaucag

SEQ ID NO: 48316 - RNA, 32 nt, Homo Sapiens
acucucaggaauuacuaagugacauuuuaaau

SEQ ID NO: 48317 - RNA, 32 nt, Homo Sapiens
ggccugccgugccugccccacugugacccaca

SEQ ID NO: 48318 - RNA, 32 nt, Homo Sapiens
ugugucacucacucaccuugacgaguccgcgu

SEQ ID NO: 48319 - RNA, 32 nt, Homo Sapiens
uucagaagaaacaaaaucaccagcaccuugau

SEQ ID NO: 48320 - RNA, 32 nt, Homo Sapiens
aguaguuccuucccuucuauauaguuugcaug

SEQ ID NO: 48321 - RNA, 32 nt, Homo Sapiens
gcccaacaccaguaaagggucugugcugaggu

SEQ ID NO: 48322 - RNA, 32 nt, Homo Sapiens
acccugcggcagagacgacggaggcggaagca

SEQ ID NO: 48323 - RNA, 32 nt, Homo Sapiens
uuuggugcccauuauuaauuaaggguacagaa

SEQ ID NO: 48324 - RNA, 32 nt, Homo Sapiens
uggggcaacgcaccagcuccucgaagccgcug

SEQ ID NO: 48325 - RNA, 32 nt, Homo Sapiens
ccaacuauuauuuucccuuguuuaucuacuua

SEQ ID NO: 48326 - RNA, 32 nt, Homo Sapiens
cgauggcaggagaguucagagaagcgcccugg

SEQ ID NO: 48327 - RNA, 32 nt, Homo Sapiens
uuuguugcguuuugugcuuugaugccaggaau

SEQ ID NO: 48328 - RNA, 32 nt, Homo Sapiens
cccggcgccccgaccgcggaggacuccccgag

SEQ ID NO: 48329 - RNA, 32 nt, Homo Sapiens
cuggcgacuggggaccccggcacaugaggugg

SEQ ID NO: 48330 - RNA, 32 nt, Homo Sapiens
cgccgaggcccccgagugucagggacaaaagc

SEQ ID NO: 48331 - RNA, 32 nt, Homo Sapiens
aacugcacggggucccgauggaccucaaggaa

SEQ ID NO: 48332 - RNA, 32 nt, Homo Sapiens
uacgugucuuauuuuucuuccuccuuuuucua

SEQ ID NO: 48333 - RNA, 32 nt, Homo Sapiens
uauaaggcgauauuggugaugaaagucuuagg

SEQ ID NO: 48334 - RNA, 32 nt, Homo Sapiens
cggaugguaccaaggggcucuccgcugagucc

SEQ ID NO: 48335 - RNA, 32 nt, Homo Sapiens
uguacagaagggaaacaaacgccaggcacggu

SEQ ID NO: 48336 - RNA, 32 nt, Homo Sapiens
cuccggcccuggaacccucuccagggacggga

SEQ ID NO: 48337 - RNA, 32 nt, Homo Sapiens
auuuacuuaacagauuacagguaauuguugau

SEQ ID NO: 48338 - RNA, 32 nt, Homo Sapiens
uguagcuagcugcagcguccccuuucccugcc

SEQ ID NO: 48339 - RNA, 32 nt, Homo Sapiens
gggggcggcagggcugggccuugugacaaucu

SEQ ID NO: 48340 - RNA, 32 nt, Homo Sapiens
cgaccacuucucaguuuucucaucuuuaugaa

SEQ ID NO: 48341 - RNA, 32 nt, Homo Sapiens
gugguggcauuugauaaaguaaguuguaauau

SEQ ID NO: 48342 - RNA, 32 nt, Homo Sapiens
auaaaauacacaauauaaaauaugaaacucaa

SEQ ID NO: 48343 - RNA, 32 nt, Homo Sapiens
acgccccucgcuggcgccccagagccguggug

SEQ ID NO: 48344 - RNA, 32 nt, Homo Sapiens
cuugaaaaaugaagacauuagcaggacuuguu

SEQ ID NO: 48345 - RNA, 32 nt, Homo Sapiens
aaaacacauggacuuacuauaaaagccuuuuu

SEQ ID NO: 48346 - RNA, 32 nt, Homo Sapiens
aaccaaucuucagaugcucuguaaaccacaua

SEQ ID NO: 48347 - RNA, 32 nt, Homo Sapiens
ugcaccccauucugcccacuccugccacgaga

SEQ ID NO: 48348 - RNA, 32 nt, Homo Sapiens
cuccacccugccagcagcuuccagccaguccc

SEQ ID NO: 48349 - RNA, 32 nt, Homo Sapiens
cacuuuugauaugauauuguaacuuuaguaaa

SEQ ID NO: 48350 - RNA, 32 nt, Homo Sapiens
gagucucacucuguuacccaggcuagagugua

SEQ ID NO: 48351 - RNA, 32 nt, Homo Sapiens
aaacugucaccaaaacaaaauuugaguuuguc

SEQ ID NO: 48352 - RNA, 32 nt, Homo Sapiens
cuuuuaaauagaucaauuauaaaccauagauc

SEQ ID NO: 48353 - RNA, 28 nt, Homo Sapiens
uauauauguauuuauauguguuucguau

SEQ ID NO: 48354 - RNA, 32 nt, Homo Sapiens
aaguguccguggugcuuggagagacagaugca

SEQ ID NO: 48355 - RNA, 32 nt, Homo Sapiens
uucucaauguuaugaaaaucuuauuuaaaaga

SEQ ID NO: 48356 - RNA, 32 nt, Homo Sapiens
uuaaaagauuuuaacuuuuuuauuuuauuaaa

SEQ ID NO: 48357 - RNA, 32 nt, Homo Sapiens
gagggaggcgcugccgggccugucgcgcaagg

SEQ ID NO: 48358 - RNA, 32 nt, Homo Sapiens
cccgccccgcgugggaagcgccaggaucgcga

SEQ ID NO: 48359 - RNA, 32 nt, Homo Sapiens
caccaccucacagcugugugaccgggaguagu

SEQ ID NO: 48360 - RNA, 32 nt, Homo Sapiens
uccuuucuuucugcccuaggaaagcuuugaaa

SEQ ID NO: 48361 - RNA, 27 nt, Homo Sapiens
ggauggccgcggcucauggaccugugg

SEQ ID NO: 48362 - RNA, 32 nt, Homo Sapiens
cuggugggacugaggagaacgccgugcugccg

SEQ ID NO: 48363 - RNA, 32 nt, Homo Sapiens
ugauuuucaaguucaagacuuaacucaggguu

SEQ ID NO: 48364 - RNA, 32 nt, Homo Sapiens
ggagcgggaacaagagcugaaaaacuaccuac

SEQ ID NO: 48365 - RNA, 32 nt, Homo Sapiens
uuauauacaacuuuauacuuugaagcuuguau

SEQ ID NO: 48366 - RNA, 32 nt, Homo Sapiens
aaagguugcauugguugaaaccacugaggagc

SEQ ID NO: 48367 - RNA, 32 nt, Homo Sapiens
cuuuuuaccgauauuucuguuucuuuuaaccg

SEQ ID NO: 48368 - RNA, 32 nt, Homo Sapiens
ugacuuuguaaauuuuguucuauaugaauaaa

SEQ ID NO: 48369 - RNA, 32 nt, Homo Sapiens
aauuagcuaggcgugguggugagagcugguaa

SEQ ID NO: 48370 - RNA, 32 nt, Homo Sapiens
aggagggcccucagcuggcccuccccacacac

SEQ ID NO: 48371 - RNA, 32 nt, Homo Sapiens
gaaucugauggacuuucauaauacuugcuuuu

SEQ ID NO: 48372 - RNA, 32 nt, Homo Sapiens
ugggcccugccagcugccacagcugcaugacc

SEQ ID NO: 48373 - RNA, 32 nt, Homo Sapiens
gaaaaaauaucuacuucuuuuaaaguuagaag

SEQ ID NO: 48374 - RNA, 32 nt, Homo Sapiens
auucuguuaaaaugcagaggugcuauaacauu

SEQ ID NO: 48375 - RNA, 32 nt, Homo Sapiens
uagaauguaauaacccaguggcuuacuguuuu

SEQ ID NO: 48376 - RNA, 32 nt, Homo Sapiens
acuugccauuggacuggcucuuucucagaagc

SEQ ID NO: 48377 - RNA, 32 nt, Homo Sapiens
guuugaaguuucaguuucuguuuucuagguaa

SEQ ID NO: 48378 - RNA, 32 nt, Homo Sapiens
ugugccuucgcgguggaaggcccgaggggcgc

SEQ ID NO: 48379 - RNA, 32 nt, Homo Sapiens
gcauucuuagacuaguugaacaucucacuuug

SEQ ID NO: 48380 - RNA, 32 nt, Homo Sapiens
uacagaaaccaguguguccaugugcucugcac

SEQ ID NO: 48381 - RNA, 30 nt, Homo Sapiens
uuggaaagagagcuugaugaaacagaauau

SEQ ID NO: 48382 - RNA, 32 nt, Homo Sapiens
gcuuugggccaccuggggcugcacccccugcc

SEQ ID NO: 48383 - RNA, 32 nt, Homo Sapiens
uacccugggcuguguccuccccuggggaugag

SEQ ID NO: 48384 - RNA, 32 nt, Homo Sapiens
cuggcugaggucugggaaggaauagaaagggg

SEQ ID NO: 48385 - RNA, 32 nt, Homo Sapiens
uguccuccacccuggaccccagccggcugcug

SEQ ID NO: 48386 - RNA, 31 nt, Homo Sapiens
cugccuggcacaugccugccagcguuguguc

SEQ ID NO: 48387 - RNA, 32 nt, Homo Sapiens
acaaacuugagucugccuuggagcacgcauug

SEQ ID NO: 48388 - RNA, 32 nt, Homo Sapiens
gugaaggaaggggccacacuggucugcggcgg

SEQ ID NO: 48389 - RNA, 32 nt, Homo Sapiens
cauccacaaccugcucaugggugacaccaagg

SEQ ID NO: 48390 - RNA, 32 nt, Homo Sapiens
auauuaagaaugcaucuuuauaaaugggugcu

SEQ ID NO: 48391 - RNA, 32 nt, Homo Sapiens
gagccuaaaauuauuuuuuagagcauuuugca

SEQ ID NO: 48392 - RNA, 32 nt, Homo Sapiens
agaaaaggaaaugacacuugagauccuuggaa

SEQ ID NO: 48393 - RNA, 32 nt, Homo Sapiens
aaagccaguggacauacgguaguaauaacuaa

SEQ ID NO: 48394 - RNA, 32 nt, Homo Sapiens
aagacaaaaacgcuaacauggaaaaaguaugu

SEQ ID NO: 48395 - RNA, 32 nt, Homo Sapiens
ggugaaacaccguagggcaugugguucaaaga

SEQ ID NO: 48396 - RNA, 32 nt, Homo Sapiens
aaguuucaucuguugugugcuauacauguaaa

SEQ ID NO: 48397 - RNA, 32 nt, Homo Sapiens
auaagggucaggaaaacugaauugagaaaauu

SEQ ID NO: 48398 - RNA, 32 nt, Homo Sapiens
ccggggcacuccugggcagcuuuugcucagug

SEQ ID NO: 48399 - RNA, 30 nt, Homo Sapiens
gacucauauaugucugucuaggcaucaaau

SEQ ID NO: 48400 - RNA, 32 nt, Homo Sapiens
cuggguauuuuuccucuuggaaauaguacgua

SEQ ID NO: 48401 - RNA, 32 nt, Homo Sapiens
gcuucuaaugaaaacuuggucaucuucacugu

SEQ ID NO: 48402 - RNA, 32 nt, Homo Sapiens
ggggcugggaggauccuggagaaguggguggg

SEQ ID NO: 48403 - RNA, 32 nt, Homo Sapiens
gagugaaugggagggcgggccuggagcugcgu

SEQ ID NO: 48404 - RNA, 32 nt, Homo Sapiens
ugagaccgcaugccugggagaucucacggaca

SEQ ID NO: 48405 - RNA, 32 nt, Homo Sapiens
cccuuugaguccagugugggacacgguuuaac

SEQ ID NO: 48406 - RNA, 32 nt, Homo Sapiens
ccugaagccccggccuggcccggccgcacccg

SEQ ID NO: 48407 - RNA, 32 nt, Homo Sapiens
aagaaggagaagaaaacugaacugggaaaaug

SEQ ID NO: 48408 - RNA, 26 nt, Homo Sapiens
caugacggggaaaaaguccucccggg

SEQ ID NO: 48409 - RNA, 32 nt, Homo Sapiens
uggcuuucagaauuugcaagaacagcgauuug

SEQ ID NO: 48410 - RNA, 32 nt, Homo Sapiens
uuuaaaauuuuuucuuauugugaggaaucugu

SEQ ID NO: 48411 - RNA, 32 nt, Homo Sapiens
ccuauaaauauuaagaaugugggaaauucuuc

SEQ ID NO: 48412 - RNA, 32 nt, Homo Sapiens
aaaacagacacagccaagauaagauccacaca

SEQ ID NO: 48413 - RNA, 32 nt, Homo Sapiens
gguuaauguaaaacuuaccagaugaaccuugu

SEQ ID NO: 48414 - RNA, 32 nt, Homo Sapiens
aucccagcucucugccagacugagagggcaag

SEQ ID NO: 48415 - RNA, 32 nt, Homo Sapiens
cgacuugguuggauucagcuucugccuuaccc

SEQ ID NO: 48416 - RNA, 31 nt, Homo Sapiens
agccucugcuggagaaagccacgcccucccu

SEQ ID NO: 48417 - RNA, 32 nt, Homo Sapiens
uggaauuacauuuuuauugauuguuuggauca

SEQ ID NO: 48418 - RNA, 32 nt, Homo Sapiens
agcuaaaacuugauguaaauuccuccuuuuuu

SEQ ID NO: 48419 - RNA, 32 nt, Homo Sapiens
uuuuaagccaucuaauacagaguugcuuggaa

SEQ ID NO: 48420 - RNA, 32 nt, Homo Sapiens
aagcuguggguucucugaagcaggaagcacau

SEQ ID NO: 48421 - RNA, 32 nt, Homo Sapiens
aaauugagauggauucuugcucugucgccuac

SEQ ID NO: 48422 - RNA, 32 nt, Homo Sapiens
cccuuacaagugcuuuaagauuuuaaaaaugu

SEQ ID NO: 48423 - RNA, 32 nt, Homo Sapiens
uuugcuauauauauguuacuugaaauguuaaa

SEQ ID NO: 48424 - RNA, 32 nt, Homo Sapiens
guagguaaaauuuuuauuuauuuuuucccauu

SEQ ID NO: 48425 - RNA, 32 nt, Homo Sapiens
acaaucccaguggcccagacaagccauacgac

SEQ ID NO: 48426 - RNA, 32 nt, Homo Sapiens
gugggcgauuguuguucuuaauucuucuuauu

SEQ ID NO: 48427 - RNA, 32 nt, Homo Sapiens
cagagggaauggggagaaaacccucccgcugc

SEQ ID NO: 48428 - RNA, 32 nt, Homo Sapiens
acagugccgcuguugagacaagacccaggacu

SEQ ID NO: 48429 - RNA, 32 nt, Homo Sapiens
gacguuuauguuugaggaaggcacaugaauca

SEQ ID NO: 48430 - RNA, 32 nt, Homo Sapiens
guaaugcguuguuguuguuuucuuucucucuu

SEQ ID NO: 48431 - RNA, 32 nt, Homo Sapiens
cacacggccccggcgcgccugguagagccucg

SEQ ID NO: 48432 - RNA, 32 nt, Homo Sapiens
agcucugugcuaagaacuuuguauacaucauc

SEQ ID NO: 48433 - RNA, 32 nt, Homo Sapiens
ucaaguuccaauggggucucuuaggcuuuagg

SEQ ID NO: 48434 - RNA, 32 nt, Homo Sapiens
uccuggcuggggggcgggaagggcagacugca

SEQ ID NO: 48435 - RNA, 32 nt, Homo Sapiens
aggcccagcuccugcuggccaguggccucuuu

SEQ ID NO: 48436 - RNA, 32 nt, Homo Sapiens
gauuccuagacccagggcucugcacucucaag

SEQ ID NO: 48437 - RNA, 32 nt, Homo Sapiens
cauuuuacugauucauacauuaucucacuugu

SEQ ID NO: 48438 - RNA, 32 nt, Homo Sapiens
auguguugacagucgugaguguguauccuagg

SEQ ID NO: 48439 - RNA, 32 nt, Homo Sapiens
uacuuuuguaugcugccuccucugugcccucc

SEQ ID NO: 48440 - RNA, 32 nt, Homo Sapiens
ggacggccggcgggggcucuccuagugcccag

SEQ ID NO: 48441 - RNA, 32 nt, Homo Sapiens
cguggagucggcugagggaaaagcgaggcaag

SEQ ID NO: 48442 - RNA, 32 nt, Homo Sapiens
ccgcaggccccgggcccugucauucccagcgc

SEQ ID NO: 48443 - RNA, 32 nt, Homo Sapiens
uuuagguauacacacacacacacacacacaua

SEQ ID NO: 48444 - RNA, 32 nt, Homo Sapiens
caagccccgccuccccgcugccagugcccugc

SEQ ID NO: 48445 - RNA, 32 nt, Homo Sapiens
gauugggagagccagcaccuaacauauguggg

SEQ ID NO: 48446 - RNA, 32 nt, Homo Sapiens
aguuggagaucccagacaggaugugaccgagu

SEQ ID NO: 48447 - RNA, 32 nt, Homo Sapiens
cagcccuggucaagaaucugugaggcauguga

SEQ ID NO: 48448 - RNA, 32 nt, Homo Sapiens
ccaaucugggucugaugagaugaugcaaaaug

SEQ ID NO: 48449 - RNA, 32 nt, Homo Sapiens
cucuucccaucccuucccccacccaaagcagg

SEQ ID NO: 48450 - RNA, 32 nt, Homo Sapiens
cuuacacauaauuucuuaauuuucaccgagca

SEQ ID NO: 48451 - RNA, 32 nt, Homo Sapiens
uuucugguucccuccuucacugugugaucugc

SEQ ID NO: 48452 - RNA, 32 nt, Homo Sapiens
uggaccggaacaaggagaccccugcccagagu

SEQ ID NO: 48453 - RNA, 32 nt, Homo Sapiens
uucccuggccugcgccagcugcguacacggcg

SEQ ID NO: 48454 - RNA, 32 nt, Homo Sapiens
uccuucuggcauuuaggucuuguccgugugau

SEQ ID NO: 48455 - RNA, 32 nt, Homo Sapiens
cauuguauagaaaagcacuuugaaaaucccug

SEQ ID NO: 48456 - RNA, 32 nt, Homo Sapiens
uugccuuuugcugcaauagaagaugagcaaag

SEQ ID NO: 48457 - RNA, 32 nt, Homo Sapiens
uuggacuugcugcaagcagagccuauggcucu

SEQ ID NO: 48458 - RNA, 32 nt, Homo Sapiens
ccucgagucagcauugacgauauuggaggagc

SEQ ID NO: 48459 - RNA, 32 nt, Homo Sapiens
uaagaacagcuauaaugacauugcauauuaaa

SEQ ID NO: 48460 - RNA, 32 nt, Homo Sapiens
cugugaccccucgggacugccuggugcaggug

SEQ ID NO: 48461 - RNA, 31 nt, Homo Sapiens
auaacuacaaagaaaugauaucaugaggaaa

SEQ ID NO: 48462 - RNA, 32 nt, Homo Sapiens
cauucuggguacagggggacauccucuguuac

SEQ ID NO: 48463 - RNA, 32 nt, Homo Sapiens
ccuggguaccugcaagugaucaccuuggccug

SEQ ID NO: 48464 - RNA, 32 nt, Homo Sapiens
ggcuggucuugaacuccugaccucaagugauc

SEQ ID NO: 48465 - RNA, 32 nt, Homo Sapiens
acuguaaaacaaaaacaaaaaacuaugugaug

SEQ ID NO: 48466 - RNA, 32 nt, Homo Sapiens
agaugcccgagaagugggcccgggcccaggcg

SEQ ID NO: 48467 - RNA, 32 nt, Homo Sapiens
ccacuguaucuaggaaguaacuaauuugcuuu

SEQ ID NO: 48468 - RNA, 32 nt, Homo Sapiens
gccauccccuucccuggcaccagcuucucuag

SEQ ID NO: 48469 - RNA, 29 nt, Homo Sapiens
auuucuucaguucauuaccacaauuuaug

SEQ ID NO: 48470 - RNA, 32 nt, Homo Sapiens
augugaccaccaucggugguuccgcuccgugg

SEQ ID NO: 48471 - RNA, 32 nt, Homo Sapiens
cugagaaauugaauguaccuuauuuaaaagau

SEQ ID NO: 48472 - RNA, 32 nt, Homo Sapiens
cacccuuagcauggagcccaccccaaggccuc

SEQ ID NO: 48473 - RNA, 32 nt, Homo Sapiens
aucaguacacugcuuugaaaacaaaacuuuuc

SEQ ID NO: 48474 - RNA, 32 nt, Homo Sapiens
guauaugaacaaauuuucuagucgaguuuuca

SEQ ID NO: 48475 - RNA, 32 nt, Homo Sapiens
auaaaguccuuggaaaaacuggccccauauuu

SEQ ID NO: 48476 - RNA, 32 nt, Homo Sapiens
augcugggaacaggcccuaagccugucauaaa

SEQ ID NO: 48477 - RNA, 32 nt, Homo Sapiens
agcucuucagaaaacuaacaacagaaguauag

SEQ ID NO: 48478 - RNA, 32 nt, Homo Sapiens
uaaaaggaaaaauuauuguagaaccacgugua

SEQ ID NO: 48479 - RNA, 32 nt, Homo Sapiens
acaaaacccacccacccuaacgaauaugaggc

SEQ ID NO: 48480 - RNA, 32 nt, Homo Sapiens
ugugaguuuguacagucuugcagcaggaucua

SEQ ID NO: 48481 - RNA, 29 nt, Homo Sapiens
ucagcuccgguccugggucgggaggggug

SEQ ID NO: 48482 - RNA, 31 nt, Homo Sapiens
gucucggcgcgagcucugccccguccaagag

SEQ ID NO: 48483 - RNA, 32 nt, Homo Sapiens
aauagaaaauccugaaauaauuuuugugauac

SEQ ID NO: 48484 - RNA, 30 nt, Homo Sapiens
caggacugcgccagccggccggcgccucaa

SEQ ID NO: 48485 - RNA, 32 nt, Homo Sapiens
uaagagaaugacaaaaauauucauguauagcc

SEQ ID NO: 48486 - RNA, 32 nt, Homo Sapiens
ccugcuuuuguaaacuaucugagauuaucuuu

SEQ ID NO: 48487 - RNA, 32 nt, Homo Sapiens
ugcucaggugaaguggguguucugccuccacu

SEQ ID NO: 48488 - RNA, 31 nt, Homo Sapiens
acacugaccgggcuuuucagagccugggugc

SEQ ID NO: 48489 - RNA, 32 nt, Homo Sapiens
cgcgcccucgcucuguugcgcgcgcgguguca

SEQ ID NO: 48490 - RNA, 32 nt, Homo Sapiens
cucucucucccucuguaccuuucucauaguug

SEQ ID NO: 48491 - RNA, 32 nt, Homo Sapiens
ccagccuccaccagggaccccuccucaugaac

SEQ ID NO: 48492 - RNA, 32 nt, Homo Sapiens
cgcgcugggcaggcgcccaagagagcaucgag

SEQ ID NO: 48493 - RNA, 31 nt, Homo Sapiens
uuucagaacauauuucuuuagggcuauuuaa

SEQ ID NO: 48494 - RNA, 32 nt, Homo Sapiens
gcgagaaggaggagcuggaggagcgcgcgucu

SEQ ID NO: 48495 - RNA, 32 nt, Homo Sapiens
gggaagcccuccccucuucauaguccccaucu

SEQ ID NO: 48496 - RNA, 32 nt, Homo Sapiens
auuacuuuaaacauacauaaagagacaguagg

SEQ ID NO: 48497 - RNA, 32 nt, Homo Sapiens
aaguuucuguuguuugaagccacccaguucag

SEQ ID NO: 48498 - RNA, 32 nt, Homo Sapiens
gggaagaugguacuuagaggcuuuuccccuau

SEQ ID NO: 48499 - RNA, 32 nt, Homo Sapiens
aaacaaaagaauuuaauuuuuaauucaguuga

SEQ ID NO: 48500 - RNA, 32 nt, Homo Sapiens
ggucccagcccgggagcccgcggggaaaagcc

SEQ ID NO: 48501 - RNA, 32 nt, Homo Sapiens
cuauucuaaaagacuucauauuaaauagcagu

SEQ ID NO: 48502 - RNA, 30 nt, Homo Sapiens
cgcgcagccucccggaccgcccugagcugc

SEQ ID NO: 48503 - RNA, 32 nt, Homo Sapiens
guguguguacgugaggcagaagaauaugacag

SEQ ID NO: 48504 - RNA, 32 nt, Homo Sapiens
aguguuuguaaauucuaugaaaaaugcauuuu

SEQ ID NO: 48505 - RNA, 32 nt, Homo Sapiens
gccaagaaugguuuuuacauuuuuaaaguauu

SEQ ID NO: 48506 - RNA, 32 nt, Homo Sapiens
ggccccggcgcugcggccacgcccaucgccuc

SEQ ID NO: 48507 - RNA, 32 nt, Homo Sapiens
ugccucccauucugaccacccuucucauucca

SEQ ID NO: 48508 - RNA, 32 nt, Homo Sapiens
cucaggcccguccaugcuccucucccguguga

SEQ ID NO: 48509 - RNA, 32 nt, Homo Sapiens
cuggcaccugcuucacacggaccauucucugg

SEQ ID NO: 48510 - RNA, 32 nt, Homo Sapiens
accccugucccaggcucugguuccccaccugu

SEQ ID NO: 48511 - RNA, 32 nt, Homo Sapiens
gguggggaaggggccaagcugcagacacacac

SEQ ID NO: 48512 - RNA, 32 nt, Homo Sapiens
agaggccgacagagaccccggggcccgccgcu

SEQ ID NO: 48513 - RNA, 32 nt, Homo Sapiens
agaacagucugaucucuuuguauguuacuaac

SEQ ID NO: 48514 - RNA, 32 nt, Homo Sapiens
guuugaacucaccccacccccaugccguuuuu

SEQ ID NO: 48515 - RNA, 32 nt, Homo Sapiens
caaccuuacauuuguugaaauaacuugaaaag

SEQ ID NO: 48516 - RNA, 32 nt, Homo Sapiens
uccauuuacaagcaagcaggccaggcaacugu

SEQ ID NO: 48517 - RNA, 32 nt, Homo Sapiens
gcuuucuuuuuuuuuuuuuuuaagaaaaaguu

SEQ ID NO: 48518 - RNA, 32 nt, Homo Sapiens
uucaguauuuaguagugaaagauauuaauaca

SEQ ID NO: 48519 - RNA, 32 nt, Homo Sapiens
cgaggcccgggcgggcgggagcaacggcuaca

SEQ ID NO: 48520 - RNA, 32 nt, Homo Sapiens
agccagaggcagcauagugaaaaguuaggagc

SEQ ID NO: 48521 - RNA, 32 nt, Homo Sapiens
uccuaguuauauuuuuguuauuguuguuacaa

SEQ ID NO: 48522 - RNA, 32 nt, Homo Sapiens
ggacaggaguuagaugcagagaagagauuuca

SEQ ID NO: 48523 - RNA, 32 nt, Homo Sapiens
acugggcucuugacgggcaucaucucuuaauc

SEQ ID NO: 48524 - RNA, 32 nt, Homo Sapiens
ccgagccguggcgcccagagcugcgagccgcu

SEQ ID NO: 48525 - RNA, 32 nt, Homo Sapiens
ggauaucucuuccaaaugcaugaugaaggagu

SEQ ID NO: 48526 - RNA, 32 nt, Homo Sapiens
ccacagguacuauuugaaggaggguauuaagu

SEQ ID NO: 48527 - RNA, 32 nt, Homo Sapiens
uugaaggggcuuuggugguguucacagcugcc

SEQ ID NO: 48528 - RNA, 32 nt, Homo Sapiens
cagauucccagggaagccauggagccauccuc

SEQ ID NO: 48529 - RNA, 32 nt, Homo Sapiens
aaucugcuggggccucgguccuggacguccca

SEQ ID NO: 48530 - RNA, 32 nt, Homo Sapiens
uuuaaagggaagaaccacaaaggcuugcaaag

SEQ ID NO: 48531 - RNA, 32 nt, Homo Sapiens
cugcaauauuugguuuguuauuauuaagaaaa

SEQ ID NO: 48532 - RNA, 32 nt, Homo Sapiens
caagugguaugcuuuagaucugcacaugugaa

SEQ ID NO: 48533 - RNA, 32 nt, Homo Sapiens
agaaaggcucacgcaaggcuagagaaggacuu

SEQ ID NO: 48534 - RNA, 32 nt, Homo Sapiens
cgcgccgccuccccgcgccgcucggaagccau

SEQ ID NO: 48535 - RNA, 32 nt, Homo Sapiens
ggauccucaaggaacaaguagaccuggccgcg

SEQ ID NO: 48536 - RNA, 32 nt, Homo Sapiens
caaaaaucaagagcuucauucuuugcuucuaa

SEQ ID NO: 48537 - RNA, 32 nt, Homo Sapiens
cuuuaaaaacaaaaacaaacccugaaauguau

SEQ ID NO: 48538 - RNA, 32 nt, Homo Sapiens
aggcacagugacucacuccuguaguccuagcu

SEQ ID NO: 48539 - RNA, 32 nt, Homo Sapiens
caccccacuccagcuccggagcacccgugcug

SEQ ID NO: 48540 - RNA, 30 nt, Homo Sapiens
gguggaucuagcggcggcgaggaggcgggu

SEQ ID NO: 48541 - RNA, 32 nt, Homo Sapiens
acuuguguaaauuucaguuacuggucauagaa

SEQ ID NO: 48542 - RNA, 32 nt, Homo Sapiens
aucugccaguggcaauuuuagaaagcaggugg

SEQ ID NO: 48543 - RNA, 30 nt, Homo Sapiens
ggugguggcugggcugcagauaacuucguu

SEQ ID NO: 48544 - RNA, 32 nt, Homo Sapiens
ccugccccaccagauugcugcaggggcgcggu

SEQ ID NO: 48545 - RNA, 32 nt, Homo Sapiens
acuagcuagggaugguggugcgugccucuagu

SEQ ID NO: 48546 - RNA, 32 nt, Homo Sapiens
agagauuuuuauugccucuauuuuacaggcug

SEQ ID NO: 48547 - RNA, 32 nt, Homo Sapiens
ugcaaucguuuggagcugcugcccccuuucuu

SEQ ID NO: 48548 - RNA, 32 nt, Homo Sapiens
cggagcgagcgcgcuccgggagggccgagagc

SEQ ID NO: 48549 - RNA, 32 nt, Homo Sapiens
cagaauuucuucaucuacuucugcagucuuaa

SEQ ID NO: 48550 - RNA, 32 nt, Homo Sapiens
cuuuugacuuacaguugccgccggagaccugg

SEQ ID NO: 48551 - RNA, 30 nt, Homo Sapiens
uuugugugagguggcaucuaagggaagaau

SEQ ID NO: 48552 - RNA, 32 nt, Homo Sapiens
cugcccacgcucaccagggccuugcuuggcca

SEQ ID NO: 48553 - RNA, 32 nt, Homo Sapiens
ugaacagugucugcuggggucugugacacacu

SEQ ID NO: 48554 - RNA, 32 nt, Homo Sapiens
uagugcaaaagucauggcaacuucuggaugug

SEQ ID NO: 48555 - RNA, 32 nt, Homo Sapiens
cccggcagccgccgccgcccucacgcagccca

SEQ ID NO: 48556 - RNA, 32 nt, Homo Sapiens
agcuuguuaagacaacucuuguguacgcuaug

SEQ ID NO: 48557 - RNA, 32 nt, Homo Sapiens
auuccaaugacaaaggaaguggugaucagucu

SEQ ID NO: 48558 - RNA, 32 nt, Homo Sapiens
ggcggcgcugcgcgcgggagggcagggcagga

SEQ ID NO: 48559 - RNA, 32 nt, Homo Sapiens
auuuuuuagccagaggguuuuaccaaguguuc

SEQ ID NO: 48560 - RNA, 32 nt, Homo Sapiens
cguucaccaggaaucuuaauuauaaguggaac

SEQ ID NO: 48561 - RNA, 32 nt, Homo Sapiens
cacaugcaggcaugcaugcacauacgcagaug

SEQ ID NO: 48562 - RNA, 32 nt, Homo Sapiens
uaggcuuauacagcgggggauuugagcuuaca

SEQ ID NO: 48563 - RNA, 31 nt, Homo Sapiens
aucugggcagucaugugcugaguuaaaacuc

SEQ ID NO: 48564 - RNA, 32 nt, Homo Sapiens
uggugguucuguccgggcuaauccccaugcua

SEQ ID NO: 48565 - RNA, 32 nt, Homo Sapiens
gcccaccucccagcccucuccucauucucuga

SEQ ID NO: 48566 - RNA, 32 nt, Homo Sapiens
ggaaggaggcugggccggagggaccagccacc

SEQ ID NO: 48567 - RNA, 32 nt, Homo Sapiens
cugaaaagggaagagggguagauccuccaaug

SEQ ID NO: 48568 - RNA, 32 nt, Homo Sapiens
auaccuguacuauuuaugguuuaaguuuugau

SEQ ID NO: 48569 - RNA, 32 nt, Homo Sapiens
auuaaagcgaggaggaggcgagagcggccgcc

SEQ ID NO: 48570 - RNA, 32 nt, Homo Sapiens
ucggcgccgucccaggcccgacgcucugggcg

SEQ ID NO: 48571 - RNA, 32 nt, Homo Sapiens
ccgccacucccgagcugccgugucucugcugu

SEQ ID NO: 48572 - RNA, 32 nt, Homo Sapiens
gaacauuccaugaaaaaaugucaucaaaagag

SEQ ID NO: 48573 - RNA, 32 nt, Homo Sapiens
ggcucugaaaaguuuuuggugauauuccccua

SEQ ID NO: 48574 - RNA, 32 nt, Homo Sapiens
ugugguucaagugcuguuuuguguguugggac

SEQ ID NO: 48575 - RNA, 32 nt, Homo Sapiens
cugggacacacacacacacacacacacacaca

SEQ ID NO: 48576 - RNA, 32 nt, Homo Sapiens
uaugaagaacaguaguuugcuuugaaauacua

SEQ ID NO: 48577 - RNA, 32 nt, Homo Sapiens
auauguuaccuauuucuuucugaaaaguugga

SEQ ID NO: 48578 - RNA, 32 nt, Homo Sapiens
ugucccagccccagcccuuccccaggccucau

SEQ ID NO: 48579 - RNA, 32 nt, Homo Sapiens
agacuguggguuccucuucuccugugcuugag

SEQ ID NO: 48580 - RNA, 32 nt, Homo Sapiens
cuggcccagccgccuuccugggagagggcugg

SEQ ID NO: 48581 - RNA, 32 nt, Homo Sapiens
auaacuuagauauaguuucuugauaggauaga

SEQ ID NO: 48582 - RNA, 32 nt, Homo Sapiens
uugggacccagcugguguucuuugguuugcuu

SEQ ID NO: 48583 - RNA, 32 nt, Homo Sapiens
aaugccuuucuuuucuuguuuauaauggucac

SEQ ID NO: 48584 - RNA, 32 nt, Homo Sapiens
aaggaaaagggaguagcagauugaucugaggg

SEQ ID NO: 48585 - RNA, 32 nt, Homo Sapiens
ccggauggugccuuguuaaagggcaagaaaaa

SEQ ID NO: 48586 - RNA, 31 nt, Homo Sapiens
cuaagcugaugcaccaccucuguuguuccaa

SEQ ID NO: 48587 - RNA, 32 nt, Homo Sapiens
ggcuggagacauggaccgcggcgagcaagguc

SEQ ID NO: 48588 - RNA, 32 nt, Homo Sapiens
guugagggccacuuuuuuuuuauacugcacag

SEQ ID NO: 48589 - RNA, 32 nt, Homo Sapiens
agcaucugcccggcccccuccacgauguccaa

SEQ ID NO: 48590 - RNA, 32 nt, Homo Sapiens
ccuggcuuuccacagcccccucccacacaguu

SEQ ID NO: 48591 - RNA, 32 nt, Homo Sapiens
ucccugaaggcugagugucuucugccucaugu

SEQ ID NO: 48592 - RNA, 32 nt, Homo Sapiens
acccuauaauuaugaagcgauugcuugagaaa

SEQ ID NO: 48593 - RNA, 32 nt, Homo Sapiens
cagguucugguccuucuuggcuccucaugugg

SEQ ID NO: 48594 - RNA, 32 nt, Homo Sapiens
aacauuuuggggcucaaugucuccuacuaucc

SEQ ID NO: 48595 - RNA, 32 nt, Homo Sapiens
uuucagagaaaguuaccuaaucccuccuaaag

SEQ ID NO: 48596 - RNA, 32 nt, Homo Sapiens
aaaacguacugaauaucaacugugagaacaaa

SEQ ID NO: 48597 - RNA, 32 nt, Homo Sapiens
ucaccucuauaaguaagugguaauaauaaagc

SEQ ID NO: 48598 - RNA, 32 nt, Homo Sapiens
aucuucagcaccaaauacaugauaaauguauc

SEQ ID NO: 48599 - RNA, 32 nt, Homo Sapiens
uuguuccacugcaaauaaagccuuuuaaauca

SEQ ID NO: 48600 - RNA, 32 nt, Homo Sapiens
cucugaaggcccagcucuugcuguccaccccg

SEQ ID NO: 48601 - RNA, 32 nt, Homo Sapiens
aaagccuggugccccgagcccugcggagcucg

SEQ ID NO: 48602 - RNA, 32 nt, Homo Sapiens
ugccauccuuuagaaacccugucuaguuguuc

SEQ ID NO: 48603 - RNA, 32 nt, Homo Sapiens
agcccaaguccuccgagacggggagggagcgc

SEQ ID NO: 48604 - RNA, 32 nt, Homo Sapiens
gucggccuucuccaaacccucuaggccucugu

SEQ ID NO: 48605 - RNA, 32 nt, Homo Sapiens
gagagucugugccgacaagauggcggacgggg

SEQ ID NO: 48606 - RNA, 32 nt, Homo Sapiens
cccccugcccucaauuguaaagugagcaacca

SEQ ID NO: 48607 - RNA, 32 nt, Homo Sapiens
accuuggccccggcucgcccugaacuacuccu

SEQ ID NO: 48608 - RNA, 32 nt, Homo Sapiens
uuagcuguuaucccuacucuugaaauuguagu

SEQ ID NO: 48609 - RNA, 32 nt, Homo Sapiens
cccccuuccagggccucugcuccaaaggaggc

SEQ ID NO: 48610 - RNA, 32 nt, Homo Sapiens
gagagagaguacgugcacacgcgcacaaaaga

SEQ ID NO: 48611 - RNA, 32 nt, Homo Sapiens
uagcugcaggaggugauggcacaaugcugcug

SEQ ID NO: 48612 - RNA, 32 nt, Homo Sapiens
cugcgagcccucaggagcugcguggugggguu

SEQ ID NO: 48613 - RNA, 32 nt, Homo Sapiens
cggggccuuaagagccugaugcuugagcucug

SEQ ID NO: 48614 - RNA, 32 nt, Homo Sapiens
gauugcaguaaacgaucacugaagauuccuug

SEQ ID NO: 48615 - RNA, 32 nt, Homo Sapiens
uuaucgggccagucucucggagggguccguga

SEQ ID NO: 48616 - RNA, 28 nt, Homo Sapiens
augccggggcggccggcggaggcccaug

SEQ ID NO: 48617 - RNA, 32 nt, Homo Sapiens
cugauaaaaucaauauuuugcugaaaugaguu

SEQ ID NO: 48618 - RNA, 32 nt, Homo Sapiens
aacaauuacaaaagaugacugaagaacaaacu

SEQ ID NO: 48619 - RNA, 32 nt, Homo Sapiens
agacauaaaaguacaggcaacuucugcuagaa

SEQ ID NO: 48620 - RNA, 32 nt, Homo Sapiens
guguuguauauaacaaauuaguauuuauagaa

SEQ ID NO: 48621 - RNA, 32 nt, Homo Sapiens
uaaaguggggacgggggcugcuucuccaccuc

SEQ ID NO: 48622 - RNA, 32 nt, Homo Sapiens
uucuugagauauaccgugugaagcuauuguca

SEQ ID NO: 48623 - RNA, 32 nt, Homo Sapiens
ucuuauuuauuuuuucuuucugagguauuaaa

SEQ ID NO: 48624 - RNA, 32 nt, Homo Sapiens
cggggaucgugagcuccggcccgggcgagcgg

SEQ ID NO: 48625 - RNA, 32 nt, Homo Sapiens
aggaggggucuggacaugugguuacuaguaca

SEQ ID NO: 48626 - RNA, 32 nt, Homo Sapiens
cugaauuuccguuuccuccucugcaaaaugag

SEQ ID NO: 48627 - RNA, 32 nt, Homo Sapiens
gggcugagggacuggggccagcacggaccacc

SEQ ID NO: 48628 - RNA, 32 nt, Homo Sapiens
uuuacaaguaauaucagaaaguugaaggaacc

SEQ ID NO: 48629 - RNA, 32 nt, Homo Sapiens
gauccuugcuucccuuuccagucacccuuggu

SEQ ID NO: 48630 - RNA, 32 nt, Homo Sapiens
ccucaaccuacaaucacuguauggaaucgguc

SEQ ID NO: 48631 - RNA, 32 nt, Homo Sapiens
aaggcgcaugcgccgccuguccuggaggggcc

SEQ ID NO: 48632 - RNA, 30 nt, Homo Sapiens
agcgcuggccgcgugccgccuccggagccg

SEQ ID NO: 48633 - RNA, 32 nt, Homo Sapiens
cuuccgcucccuccuaguucugccccaggcuc

SEQ ID NO: 48634 - RNA, 32 nt, Homo Sapiens
aucaguuaauaaacaugaguagcuugaauuuu

SEQ ID NO: 48635 - RNA, 32 nt, Homo Sapiens
ccuuuaaagggagcaggggucgacugggcugc

SEQ ID NO: 48636 - RNA, 32 nt, Homo Sapiens
uuuagauuucgagcuuauucucuucuagcagu

SEQ ID NO: 48637 - RNA, 32 nt, Homo Sapiens
cagacucauuguugugcuuugguuucaaucca

SEQ ID NO: 48638 - RNA, 32 nt, Homo Sapiens
ugauuauaugcauguguuuguauuuuaugacu

SEQ ID NO: 48639 - RNA, 32 nt, Homo Sapiens
ccagauccuccgcuccucccccuaguccuggu

SEQ ID NO: 48640 - RNA, 32 nt, Homo Sapiens
acuuggcaauggggguucuggcggggguugga

SEQ ID NO: 48641 - RNA, 32 nt, Homo Sapiens
ccaauuucuccuuuguagcaggaaauuacacc

SEQ ID NO: 48642 - RNA, 32 nt, Homo Sapiens
ucugcgccaacgggaaccaacuuguggcucca

SEQ ID NO: 48643 - RNA, 32 nt, Homo Sapiens
acuuaaaguggaggucuucaguaucucuggca

SEQ ID NO: 48644 - RNA, 32 nt, Homo Sapiens
aagggugaaaugacugcauuuaaaagaaguua

SEQ ID NO: 48645 - RNA, 32 nt, Homo Sapiens
uggaaaucauagcuuuuuauuuccaaggcccc

SEQ ID NO: 48646 - RNA, 32 nt, Homo Sapiens
ucuccugcuaggacagccugugcggugccugg

SEQ ID NO: 48647 - RNA, 32 nt, Homo Sapiens
cagcuccugucucaugguggucucucuuacac

SEQ ID NO: 48648 - RNA, 32 nt, Homo Sapiens
ccuugacaacuggcaggcaggcucccagggac

SEQ ID NO: 48649 - RNA, 32 nt, Homo Sapiens
ggagacaaaaauuugugacaaaggauugugaa

SEQ ID NO: 48650 - RNA, 32 nt, Homo Sapiens
cagcagucucaguagcagcaucgaaaacuugg

SEQ ID NO: 48651 - RNA, 31 nt, Homo Sapiens
cuggccggccccagccugcccgccgcugcca

SEQ ID NO: 48652 - RNA, 32 nt, Homo Sapiens
ggauggcgcgcgcggggcccgcacguggaggc

SEQ ID NO: 48653 - RNA, 32 nt, Homo Sapiens
cuuuugcucaaguuuauuuaugucacuggcug

SEQ ID NO: 48654 - RNA, 32 nt, Homo Sapiens
agcagaaaacaaaaacaacaguccuacuccga

SEQ ID NO: 48655 - RNA, 32 nt, Homo Sapiens
agccuuguuagaggaaggaacucuggcauuca

SEQ ID NO: 48656 - RNA, 32 nt, Homo Sapiens
uguuauauuagacuuccuggaacacaccgcug

SEQ ID NO: 48657 - RNA, 32 nt, Homo Sapiens
cggcgccgcccauauccccggcugcgcuaguc

SEQ ID NO: 48658 - RNA, 32 nt, Homo Sapiens
uggaagcugggggcuccuccccgggaggagau

SEQ ID NO: 48659 - RNA, 32 nt, Homo Sapiens
cauuuugaaaauagacaucauauccuguuuua

SEQ ID NO: 48660 - RNA, 32 nt, Homo Sapiens
ccccaacucggaggacccccugcccgggcagc

SEQ ID NO: 48661 - RNA, 32 nt, Homo Sapiens
cgagaagaaagcauauuagccgaggagguagu

SEQ ID NO: 48662 - RNA, 32 nt, Homo Sapiens
augacugccuccgcaaccaaccagcaacaccc

SEQ ID NO: 48663 - RNA, 32 nt, Homo Sapiens
caauagcacuuaaauuccucaacaguguuuuc

SEQ ID NO: 48664 - RNA, 32 nt, Homo Sapiens
gaaaccugucucccucaggcucaccuuccuaa

SEQ ID NO: 48665 - RNA, 32 nt, Homo Sapiens
ugggaaaggaccagcaucucugguuccccugg

SEQ ID NO: 48666 - RNA, 32 nt, Homo Sapiens
uaggauugacauucuacaguugugauaauagc

SEQ ID NO: 48667 - RNA, 32 nt, Homo Sapiens
guugagggaaauuuguuuuguuuuccacauug

SEQ ID NO: 48668 - RNA, 32 nt, Homo Sapiens
aacuuuucucuuccuuuuuuuuucacuaaggc

SEQ ID NO: 48669 - RNA, 32 nt, Homo Sapiens
cuaggccagcccugcaggggcccccaggcaag

SEQ ID NO: 48670 - RNA, 29 nt, Homo Sapiens
cugcagauaugauucagaggcagccucuc

SEQ ID NO: 48671 - RNA, 32 nt, Homo Sapiens
gggaaaggcuuuaucagguaucaucaacaggu

SEQ ID NO: 48672 - RNA, 32 nt, Homo Sapiens
uuuauuguauaaagcagcgucuuauguauuuu

SEQ ID NO: 48673 - RNA, 32 nt, Homo Sapiens
ucaugucauuccaggagacaaaaagaaacaaa

SEQ ID NO: 48674 - RNA, 32 nt, Homo Sapiens
gauucaaaauguuucagugaaaacuuuggaga

SEQ ID NO: 48675 - RNA, 32 nt, Homo Sapiens
gcaaaauuuuuucucuaggaaauauuuauuuu

SEQ ID NO: 48676 - RNA, 32 nt, Homo Sapiens
auugucagauauuuuuucagaaauaugugguu

SEQ ID NO: 48677 - RNA, 32 nt, Homo Sapiens
ccuuucgccuucugccgugauugugaggccuc

SEQ ID NO: 48678 - RNA, 32 nt, Homo Sapiens
gaccaaucaaaauuauuuuucaaaaagcaaaa

SEQ ID NO: 48679 - RNA, 32 nt, Homo Sapiens
agauuagguccucagcagcaucaaggucuggg

SEQ ID NO: 48680 - RNA, 32 nt, Homo Sapiens
aggagaaggaggaggguggcggccgggcuugg

SEQ ID NO: 48681 - RNA, 32 nt, Homo Sapiens
agacaucuauagaacuuuccacccaacaucag

SEQ ID NO: 48682 - RNA, 32 nt, Homo Sapiens
ugcuguaucuauuacucuuuuacuuugguucc

SEQ ID NO: 48683 - RNA, 32 nt, Homo Sapiens
gcuccuuccuuccuucccccaggaacacggag

SEQ ID NO: 48684 - RNA, 32 nt, Homo Sapiens
ucuacaauauuuugucaccuagcuggaaguug

SEQ ID NO: 48685 - RNA, 32 nt, Homo Sapiens
caucuugucccuacaucuucucuucugacuuu

SEQ ID NO: 48686 - RNA, 32 nt, Homo Sapiens
aauguaccaucccaacccacccaccucaaucc

SEQ ID NO: 48687 - RNA, 32 nt, Homo Sapiens
ucacuccccacccacaccgcacacuggcccca

SEQ ID NO: 48688 - RNA, 28 nt, Homo Sapiens
accuccuggcucucaaggaugaccacau

SEQ ID NO: 48689 - RNA, 32 nt, Homo Sapiens
gaauggauugguuaaagccagauagcacuaaa

SEQ ID NO: 48690 - RNA, 32 nt, Homo Sapiens
gucugucgccuggugcagccuggccuguccug

SEQ ID NO: 48691 - RNA, 32 nt, Homo Sapiens
aauguguguacuuaauauagaaagaucaaggu

SEQ ID NO: 48692 - RNA, 32 nt, Homo Sapiens
agugguucacagaaaacagcaaauauccccag

SEQ ID NO: 48693 - RNA, 32 nt, Homo Sapiens
uugcaaaagggagaggaaggggccuuauggga

SEQ ID NO: 48694 - RNA, 32 nt, Homo Sapiens
agaagauacucuaugaauaugauucuauauau

SEQ ID NO: 48695 - RNA, 32 nt, Homo Sapiens
gcuccgggccgcggggccuagugcugcgccgc

SEQ ID NO: 48696 - RNA, 32 nt, Homo Sapiens
auaacaucuuaccaggagacaggguuugagag

SEQ ID NO: 48697 - RNA, 32 nt, Homo Sapiens
auucugugaaucuccaccuugccuaucuuugg

SEQ ID NO: 48698 - RNA, 32 nt, Homo Sapiens
guguagcuucggguaucagaggaggcugaccu

SEQ ID NO: 48699 - RNA, 32 nt, Homo Sapiens
cgccccuuucccuccgcugccaggcgagcaug

SEQ ID NO: 48700 - RNA, 32 nt, Homo Sapiens
uuacaauggagagccagaguuaaaacuucaag

SEQ ID NO: 48701 - RNA, 32 nt, Homo Sapiens
aagcaaaaaacaaaaaguacacagaaauauuu

SEQ ID NO: 48702 - RNA, 32 nt, Homo Sapiens
agcugguguaacauuuuucagauaucaccuca

SEQ ID NO: 48703 - RNA, 32 nt, Homo Sapiens
cuucugcuuccgcgaccccggcggugcagggc

SEQ ID NO: 48704 - RNA, 32 nt, Homo Sapiens
auacaugaaauuauaugguauguagcauuuug

SEQ ID NO: 48705 - RNA, 32 nt, Homo Sapiens
aauauauggacuaaacaaaauaaaauaacagu

SEQ ID NO: 48706 - RNA, 32 nt, Homo Sapiens
cuguaggaguuugaccacagguauccucuuca

SEQ ID NO: 48707 - RNA, 32 nt, Homo Sapiens
ggauuugugcaauauguaaaaauguaucaaau

SEQ ID NO: 48708 - RNA, 32 nt, Homo Sapiens
agcaauaaaaauuuaaaccaaagaaaucuuaa

SEQ ID NO: 48709 - RNA, 32 nt, Homo Sapiens
gcgggggugugacuggcgcuccgcggacucgu

SEQ ID NO: 48710 - RNA, 31 nt, Homo Sapiens
cuacucauagggacuuugccuauuaagucua

SEQ ID NO: 48711 - RNA, 32 nt, Homo Sapiens
ggaugccgcugcugccgccgccgugggacugu

SEQ ID NO: 48712 - RNA, 32 nt, Homo Sapiens
uucaagaaaaggaaauuggugggugacagaga

SEQ ID NO: 48713 - RNA, 32 nt, Homo Sapiens
uuaauguauacucacuuguuauagaagccagg

SEQ ID NO: 48714 - RNA, 32 nt, Homo Sapiens
gcucuucuggacugagccauccucaucaccga

SEQ ID NO: 48715 - RNA, 32 nt, Homo Sapiens
guggauuuuuauccaaaggcucaacaaccaga

SEQ ID NO: 48716 - RNA, 32 nt, Homo Sapiens
gagagcuuggagccgcgcgccggagggaauag

SEQ ID NO: 48717 - RNA, 32 nt, Homo Sapiens
ucgucgugcccugccaguggggcccccgcagc

SEQ ID NO: 48718 - RNA, 32 nt, Homo Sapiens
uuccaguggcuaaaccacuuaaccucucuggg

SEQ ID NO: 48719 - RNA, 29 nt, Homo Sapiens
gaucgcucuuccucacaccacaaaucuga

SEQ ID NO: 48720 - RNA, 32 nt, Homo Sapiens
acauugugcaccauccugcuguauccugucca

SEQ ID NO: 48721 - RNA, 32 nt, Homo Sapiens
caggcguccgggcucccagcccgccccuccuc

SEQ ID NO: 48722 - RNA, 32 nt, Homo Sapiens
agagcaggaaaggggauucauaaagacguucu

SEQ ID NO: 48723 - RNA, 32 nt, Homo Sapiens
gagcagauauugucaaguucauggccuuaggu

SEQ ID NO: 48724 - RNA, 32 nt, Homo Sapiens
ggaauugcuugggugcagcggcuggggggugg

SEQ ID NO: 48725 - RNA, 32 nt, Homo Sapiens
gucugcuggcccggcgcggccccagccuuucc

SEQ ID NO: 48726 - RNA, 32 nt, Homo Sapiens
uuauaggauaaaacauaugcuugucugaaaau

SEQ ID NO: 48727 - RNA, 32 nt, Homo Sapiens
ggagauuauuuuuauuggaggaggaagcauca

SEQ ID NO: 48728 - RNA, 32 nt, Homo Sapiens
acccccuuccccauugccccagcuuagccucu

SEQ ID NO: 48729 - RNA, 32 nt, Homo Sapiens
accuccaucuaagggaguuccagccacugguu

SEQ ID NO: 48730 - RNA, 32 nt, Homo Sapiens
ugauauuccuucuauccaugugccaaaugggu

SEQ ID NO: 48731 - RNA, 32 nt, Homo Sapiens
ugggauggcucacagccugcucccagugcugu

SEQ ID NO: 48732 - RNA, 32 nt, Homo Sapiens
gauucugguggagauuccuucuuccagggccu

SEQ ID NO: 48733 - RNA, 32 nt, Homo Sapiens
gucaagauuugauuauaaauaaagugacccag

SEQ ID NO: 48734 - RNA, 32 nt, Homo Sapiens
cuguccuuguccaucacccaauaccaccccaa

SEQ ID NO: 48735 - RNA, 32 nt, Homo Sapiens
cugcacucccuggccuugcccgucgugugcug

SEQ ID NO: 48736 - RNA, 32 nt, Homo Sapiens
caauggcucaaaucuucauuuaucucuggccu

SEQ ID NO: 48737 - RNA, 32 nt, Homo Sapiens
uggacccggccgcgcagcugguggacuguagg

SEQ ID NO: 48738 - RNA, 32 nt, Homo Sapiens
aggcaagggcggagcaugugucuugggcccac

SEQ ID NO: 48739 - RNA, 32 nt, Homo Sapiens
aggugggaaauacaguuuagcugcugaauuuc

SEQ ID NO: 48740 - RNA, 32 nt, Homo Sapiens
ccagccagggcuuuugacggagacagcaaaua

SEQ ID NO: 48741 - RNA, 32 nt, Homo Sapiens
agguuuucuuagaacaauuuuacccugauuac

SEQ ID NO: 48742 - RNA, 32 nt, Homo Sapiens
ugcuggagcugccgcccgagcugcugguggag

SEQ ID NO: 48743 - RNA, 32 nt, Homo Sapiens
ggagggccagaauuccaagugauuucugucac

SEQ ID NO: 48744 - RNA, 32 nt, Homo Sapiens
ggauggcagcugccuccuccucucuuggaagc

SEQ ID NO: 48745 - RNA, 31 nt, Homo Sapiens
gauaugcggcuaugccugccucaaagggacu

SEQ ID NO: 48746 - RNA, 32 nt, Homo Sapiens
ccuaccuccccagagcaagggccuggggcuuc

SEQ ID NO: 48747 - RNA, 32 nt, Homo Sapiens
aaacccuaugaguguaagcagugugguaaagc

SEQ ID NO: 48748 - RNA, 32 nt, Homo Sapiens
auugcauuauucauaauuuaauuguuugaaau

SEQ ID NO: 48749 - RNA, 32 nt, Homo Sapiens
gagaaacggaggaggaggaggguuugcuugag

SEQ ID NO: 48750 - RNA, 32 nt, Homo Sapiens
aaguaaucuugucaaggcaucuggagagucca

SEQ ID NO: 48751 - RNA, 32 nt, Homo Sapiens
uuucaauuuccaauuccauuaagggacccucu

SEQ ID NO: 48752 - RNA, 32 nt, Homo Sapiens
uagccccugaucccaaaucuguuuacacauca

SEQ ID NO: 48753 - RNA, 32 nt, Homo Sapiens
ugugaauuugaaaaaugauggccaguuuucag

SEQ ID NO: 48754 - RNA, 32 nt, Homo Sapiens
augagaauuuggaaaaguuaguuacaaagaaa

SEQ ID NO: 48755 - RNA, 32 nt, Homo Sapiens
cuuccaggacggccucugugcugcugggguca

SEQ ID NO: 48756 - RNA, 32 nt, Homo Sapiens
cuuuagggcacaauaaaggcuaaacucgugga

SEQ ID NO: 48757 - RNA, 32 nt, Homo Sapiens
gcugggugcagguggggacuguccaaugcaga

SEQ ID NO: 48758 - RNA, 32 nt, Homo Sapiens
ggcuggccccacuugguaccaauccaccaggc

SEQ ID NO: 48759 - RNA, 32 nt, Homo Sapiens
gugaggcgccgcgaccccggcccggccgugcg

SEQ ID NO: 48760 - RNA, 31 nt, Homo Sapiens
cuguuuauugguaauaguaaaaaauuagaaa

SEQ ID NO: 48761 - RNA, 32 nt, Homo Sapiens
cucugguccuucccuuggaucccgucaguggu

SEQ ID NO: 48762 - RNA, 32 nt, Homo Sapiens
cugggguaaagauuuuacaauagcaaguauua

SEQ ID NO: 48763 - RNA, 32 nt, Homo Sapiens
uucucagccugagcccugucccugcccuucuc

SEQ ID NO: 48764 - RNA, 32 nt, Homo Sapiens
caggaucugaagaucucaguucucaaaaauca

SEQ ID NO: 48765 - RNA, 32 nt, Homo Sapiens
ccuuuuuaaggcaauucuaaucuuucauaacu

SEQ ID NO: 48766 - RNA, 32 nt, Homo Sapiens
ugacaaccuuggcuuuuccgauauggaacacu

SEQ ID NO: 48767 - RNA, 32 nt, Homo Sapiens
gcauuccaggagagaaagugucugcacaucac

SEQ ID NO: 48768 - RNA, 32 nt, Homo Sapiens
ccaccuccgggcagggcgggugaggacgggga

SEQ ID NO: 48769 - RNA, 32 nt, Homo Sapiens
uggaagacaaaugcaaccgaaaacacucagau

SEQ ID NO: 48770 - RNA, 30 nt, Homo Sapiens
uagccguccugcgggacgccggcgcugaug

SEQ ID NO: 48771 - RNA, 32 nt, Homo Sapiens
cuucugcgcgucgauuaacaccgcauucuuuc

SEQ ID NO: 48772 - RNA, 32 nt, Homo Sapiens
gagagaaggggcaggauggggcugggaagucc

SEQ ID NO: 48773 - RNA, 32 nt, Homo Sapiens
cuuuauaucugcuaccuggccgagggcuaauu

SEQ ID NO: 48774 - RNA, 32 nt, Homo Sapiens
ccucccaaccaucauuacaggaaagacuguga

SEQ ID NO: 48775 - RNA, 32 nt, Homo Sapiens
uggugccguccggcugcucagcugcuggcugg

SEQ ID NO: 48776 - RNA, 32 nt, Homo Sapiens
cucugccuggucucagaaugggacugccaacu

SEQ ID NO: 48777 - RNA, 32 nt, Homo Sapiens
gagccgggguugcugcugcugcuuccgguggc

SEQ ID NO: 48778 - RNA, 32 nt, Homo Sapiens
uacaaaaaagaaaaaagaaagcagaagagcca

SEQ ID NO: 48779 - RNA, 32 nt, Homo Sapiens
acgggcacagccagaagcugcaccuggccgag

SEQ ID NO: 48780 - RNA, 32 nt, Homo Sapiens
uuaagugggcuuugcuauucacaagggccucu

SEQ ID NO: 48781 - RNA, 32 nt, Homo Sapiens
gccgggcacuguagcucaaaccuauaauccca

SEQ ID NO: 48782 - RNA, 32 nt, Homo Sapiens
aaaguaaacacuuaauaaauuuuuggaagaac

SEQ ID NO: 48783 - RNA, 32 nt, Homo Sapiens
agagggagcagggcggcggcccggggugcucu

SEQ ID NO: 48784 - RNA, 32 nt, Homo Sapiens
agaugcuucuacuguuauguuuuaucugccca

SEQ ID NO: 48785 - RNA, 32 nt, Homo Sapiens
gucacuggccccagagugacuccgacucuccg

SEQ ID NO: 48786 - RNA, 32 nt, Homo Sapiens
uuucaucuguuaaccgucacucagcacaacac

SEQ ID NO: 48787 - RNA, 32 nt, Homo Sapiens
acagcaaaaugccagcagcgugccggaccccu

SEQ ID NO: 48788 - RNA, 32 nt, Homo Sapiens
cuuucugaacucuucuugauuuuaauaauggc

SEQ ID NO: 48789 - RNA, 32 nt, Homo Sapiens
aagccaaucugugaucaaaaugugaaaaccuc

SEQ ID NO: 48790 - RNA, 32 nt, Homo Sapiens
agcccuggaaaacaagcggaccgucaucgagc

SEQ ID NO: 48791 - RNA, 32 nt, Homo Sapiens
uccaucccuucacuuucagucugugugugucu

SEQ ID NO: 48792 - RNA, 32 nt, Homo Sapiens
gcaaucuccacauaggcugccuugaagggacg

SEQ ID NO: 48793 - RNA, 32 nt, Homo Sapiens
auguuacacauuuaaguuuuugaaauugcucc

SEQ ID NO: 48794 - RNA, 32 nt, Homo Sapiens
gaugccguuuuuccugaagaacaagaagaaug

SEQ ID NO: 48795 - RNA, 32 nt, Homo Sapiens
gaucucuucagaugaaggugggacuuggagau

SEQ ID NO: 48796 - RNA, 32 nt, Homo Sapiens
caacugaccuguuuccuccaccuccaccccca

SEQ ID NO: 48797 - RNA, 32 nt, Homo Sapiens
cgggugaggagcugcuccugccggaacaggag

SEQ ID NO: 48798 - RNA, 32 nt, Homo Sapiens
ggaaaaugugugcaggucuacugcauuaaauc

SEQ ID NO: 48799 - RNA, 30 nt, Homo Sapiens
agggcugucugugcugcuccucaccaggug

SEQ ID NO: 48800 - RNA, 32 nt, Homo Sapiens
uccuguguucaguuaugagacucuuugcauag

SEQ ID NO: 48801 - RNA, 32 nt, Homo Sapiens
cagcccucaccccugguucucaucuuucuuga

SEQ ID NO: 48802 - RNA, 32 nt, Homo Sapiens
gaguggagauaaaagaauauuaagaguccaga

SEQ ID NO: 48803 - RNA, 32 nt, Homo Sapiens
uuacaggugugagccacuacacccagcccugc

SEQ ID NO: 48804 - RNA, 32 nt, Homo Sapiens
uacugguaaaaauuauuugaaaacaaacuuau

SEQ ID NO: 48805 - RNA, 32 nt, Homo Sapiens
guggcaaugcccuucccacccauggcacccgc

SEQ ID NO: 48806 - RNA, 32 nt, Homo Sapiens
ccaggaguagggcacccgcgggccuccgcugc

SEQ ID NO: 48807 - RNA, 30 nt, Homo Sapiens
uaaaggagauggcgcgcgggccuggcucag

SEQ ID NO: 48808 - RNA, 32 nt, Homo Sapiens
ccugcuugcgcucaccaucaauaaaaguaauu

SEQ ID NO: 48809 - RNA, 32 nt, Homo Sapiens
uggaggccaagagcauugccgggaccaagucc

SEQ ID NO: 48810 - RNA, 32 nt, Homo Sapiens
uaauuaaaacaaaaaacuuauagauguuagga

SEQ ID NO: 48811 - RNA, 32 nt, Homo Sapiens
cagucaugcgcagggacgauccuuguucucug

SEQ ID NO: 48812 - RNA, 32 nt, Homo Sapiens
aggcuacccgcggaagagcgagggcagauuag

SEQ ID NO: 48813 - RNA, 32 nt, Homo Sapiens
cuuucuaaauuaauuuguauagucauuuaaaa

SEQ ID NO: 48814 - RNA, 32 nt, Homo Sapiens
cucccccgugucucguguccccggggccucac

SEQ ID NO: 48815 - RNA, 32 nt, Homo Sapiens
aaggaaaaaugaaauuacuuuccugugcacac

SEQ ID NO: 48816 - RNA, 30 nt, Homo Sapiens
accccgggagguggaggcugcagugaguug

SEQ ID NO: 48817 - RNA, 32 nt, Homo Sapiens
gacugcaaccaccuacaugaauauucauagcu

SEQ ID NO: 48818 - RNA, 32 nt, Homo Sapiens
uaugcuaugucucuaaacuuuauuuucaaaag

SEQ ID NO: 48819 - RNA, 32 nt, Homo Sapiens
uuuauaguuacauuuuauaauuuucuucucac

SEQ ID NO: 48820 - RNA, 32 nt, Homo Sapiens
auuuccccaagccccauuuuuucuugucuuua

SEQ ID NO: 48821 - RNA, 32 nt, Homo Sapiens
gagggugugugagcgacaugggcccagcauca

SEQ ID NO: 48822 - RNA, 32 nt, Homo Sapiens
ugccguucauguugcuuucuccuuuguccucu

SEQ ID NO: 48823 - RNA, 32 nt, Homo Sapiens
gccuuugugaccccaggcugcggccgcaaggu

SEQ ID NO: 48824 - RNA, 32 nt, Homo Sapiens
cacucauucucaucuuuuuuuuuccuuuaacu

SEQ ID NO: 48825 - RNA, 31 nt, Homo Sapiens
accauggggcucugccugcccccgccccugc

SEQ ID NO: 48826 - RNA, 32 nt, Homo Sapiens
agguaagguaauuuauauuggagaaaaauccu

SEQ ID NO: 48827 - RNA, 32 nt, Homo Sapiens
aucuuuuuuauaauucuuuguacuaacucagc

SEQ ID NO: 48828 - RNA, 32 nt, Homo Sapiens
uaauaaagaaacaaaacuaucugcccuuuccc

SEQ ID NO: 48829 - RNA, 32 nt, Homo Sapiens
agaucuagaaacacugaugagaugguugaauu

SEQ ID NO: 48830 - RNA, 32 nt, Homo Sapiens
gauugcguugacgagacucuuauuuauuguca

SEQ ID NO: 48831 - RNA, 32 nt, Homo Sapiens
auagauaauggugccacguguuuucugauuug

SEQ ID NO: 48832 - RNA, 32 nt, Homo Sapiens
uguuucuuuuugaugucuuuuauuuuacaacu

SEQ ID NO: 48833 - RNA, 32 nt, Homo Sapiens
uucccauuccaccccgcgcuccccucaauuag

SEQ ID NO: 48834 - RNA, 32 nt, Homo Sapiens
gcguaggacccagcggacucggcagccugggg

SEQ ID NO: 48835 - RNA, 32 nt, Homo Sapiens
uuagaugcaaauguauuacuguauaaagcaaa

SEQ ID NO: 48836 - RNA, 32 nt, Homo Sapiens
agagaccggcgccucccuccccgccgcccgug

SEQ ID NO: 48837 - RNA, 32 nt, Homo Sapiens
acauggaccccaugacgaguacaacgcgcuga

SEQ ID NO: 48838 - RNA, 32 nt, Homo Sapiens
guugcuuugauaauucuuacuaacacagauua

SEQ ID NO: 48839 - RNA, 32 nt, Homo Sapiens
accaccaaaaaacgaucugaaaaaaugaaauu

SEQ ID NO: 48840 - RNA, 32 nt, Homo Sapiens
cccgccucuucuucuucagaagacacugcaaa

SEQ ID NO: 48841 - RNA, 32 nt, Homo Sapiens
ccaguuuacccauuuucccuuuuauggcucau

SEQ ID NO: 48842 - RNA, 32 nt, Homo Sapiens
cgcgcccgcggcccgcgcgauuucccgccgag

SEQ ID NO: 48843 - RNA, 32 nt, Homo Sapiens
acugaaauauuacacuauaacauggaacaaua

SEQ ID NO: 48844 - RNA, 32 nt, Homo Sapiens
gcuagugagcuggccaacgagcuccgcgggcu

SEQ ID NO: 48845 - RNA, 32 nt, Homo Sapiens
auguaaaggggguggggucaggcucaguggcu

SEQ ID NO: 48846 - RNA, 32 nt, Homo Sapiens
uucagccccacuuagccaagaccucaaguaua

SEQ ID NO: 48847 - RNA, 32 nt, Homo Sapiens
caacuaucucaaccuccauuguuacccacuag

SEQ ID NO: 48848 - RNA, 32 nt, Homo Sapiens
uauuaaaaaaagacaugaaaacuugcuguaca

SEQ ID NO: 48849 - RNA, 32 nt, Homo Sapiens
guauuugcaccaaguuaucauuuugggguccu

SEQ ID NO: 48850 - RNA, 32 nt, Homo Sapiens
acuucucuuccuccucaaugaaauacauuaua

SEQ ID NO: 48851 - RNA, 32 nt, Homo Sapiens
aacaggcuuaugaauauauuuaagcaacaucu

SEQ ID NO: 48852 - RNA, 32 nt, Homo Sapiens
acauaccaggcccagcugggaccauaauuugu

SEQ ID NO: 48853 - RNA, 32 nt, Homo Sapiens
gccacaucgccagccgcaccccuccaccccca

SEQ ID NO: 48854 - RNA, 32 nt, Homo Sapiens
aaaccuugaaagacauaggaaaauucauacug

SEQ ID NO: 48855 - RNA, 32 nt, Homo Sapiens
agguagaagcuuuucaauaaagaaauugcauu

SEQ ID NO: 48856 - RNA, 32 nt, Homo Sapiens
cuagccaggaaacagagugaccaagggacaag

SEQ ID NO: 48857 - RNA, 32 nt, Homo Sapiens
caagggaaggaagggacacacacacacacaca

SEQ ID NO: 48858 - RNA, 32 nt, Homo Sapiens
cgacuggagagccgagccggaggcagcuggga

SEQ ID NO: 48859 - RNA, 32 nt, Homo Sapiens
aucucuaagagccgccagauuuccaugugugc

SEQ ID NO: 48860 - RNA, 32 nt, Homo Sapiens
ggguggcuucucuccuuccuccucccauagcc

SEQ ID NO: 48861 - RNA, 32 nt, Homo Sapiens
gcugaaugggcgcgagagcggcgcugggggcg

SEQ ID NO: 48862 - RNA, 32 nt, Homo Sapiens
guggcuuuguaucgcccagagaggugcuuguc

SEQ ID NO: 48863 - RNA, 32 nt, Homo Sapiens
ccagcgaaccccgagugaacccucggggcuuu

SEQ ID NO: 48864 - RNA, 32 nt, Homo Sapiens
gccccagccccagagugguuugcaauaaucaa

SEQ ID NO: 48865 - RNA, 32 nt, Homo Sapiens
uccuccuccucgccccggcgccggcggugauc

SEQ ID NO: 48866 - RNA, 32 nt, Homo Sapiens
uuaguuugaaagauucuaauauagauucuaac

SEQ ID NO: 48867 - RNA, 32 nt, Homo Sapiens
auuaaaauuuaaaaauaagagaacugaaucau

SEQ ID NO: 48868 - RNA, 32 nt, Homo Sapiens
gcuagcacagaacugacuacuuugaaaaacau

SEQ ID NO: 48869 - RNA, 32 nt, Homo Sapiens
cagaccacccucaaauugaguccuugaaacaa

SEQ ID NO: 48870 - RNA, 32 nt, Homo Sapiens
guucuaggagugagcuggggccugcugaggug

SEQ ID NO: 48871 - RNA, 32 nt, Homo Sapiens
acacacacauaaaaaacccaacaggucaaaau

SEQ ID NO: 48872 - RNA, 32 nt, Homo Sapiens
uucgucagguuuauaccacuuuauuuggugug

SEQ ID NO: 48873 - RNA, 32 nt, Homo Sapiens
aaauauguagcuuuugcuaggcuuuuugugug

SEQ ID NO: 48874 - RNA, 32 nt, Homo Sapiens
ugggagguggagguuguggugagccaauauca

SEQ ID NO: 48875 - RNA, 32 nt, Homo Sapiens
caacuggacuaugcucagaggacccuguacag

SEQ ID NO: 48876 - RNA, 32 nt, Homo Sapiens
uugccucuucuuuuccuacaaguuaaauguuc

SEQ ID NO: 48877 - RNA, 32 nt, Homo Sapiens
ggacuccaccuccuggcugguuuaccugcugc

SEQ ID NO: 48878 - RNA, 32 nt, Homo Sapiens
uccagcuuugguuuuguuauuuucauaacugu

SEQ ID NO: 48879 - RNA, 32 nt, Homo Sapiens
cccacauccacagauauugggacaaacagugg

SEQ ID NO: 48880 - RNA, 32 nt, Homo Sapiens
cuucugaacugggaggaguuugacgaacagag

SEQ ID NO: 48881 - RNA, 31 nt, Homo Sapiens
cagcccgggaggcagaaccaggcagccuccc

SEQ ID NO: 48882 - RNA, 32 nt, Homo Sapiens
cuccccgcggacgcacucuccucgcucccccg

SEQ ID NO: 48883 - RNA, 32 nt, Homo Sapiens
ugaggcaggugaugugcugggagugugggcgg

SEQ ID NO: 48884 - RNA, 32 nt, Homo Sapiens
gcugcccucccccuccucuccaccaucgucuu

SEQ ID NO: 48885 - RNA, 32 nt, Homo Sapiens
cauacgcagcugcaggaucccuugcucgcucu

SEQ ID NO: 48886 - RNA, 32 nt, Homo Sapiens
uacacaaagcaguaaaguuuuugagaacuagu

SEQ ID NO: 48887 - RNA, 32 nt, Homo Sapiens
uccccaguccccagcccugggcuuggcucuug

SEQ ID NO: 48888 - RNA, 32 nt, Homo Sapiens
cuggggcucggucagcagccccgggaaggugg

SEQ ID NO: 48889 - RNA, 32 nt, Homo Sapiens
guauuuaagaaaaggcugggccaggcacgaug

SEQ ID NO: 48890 - RNA, 32 nt, Homo Sapiens
uauggucuccagugaacagccauaaaagcaca

SEQ ID NO: 48891 - RNA, 31 nt, Homo Sapiens
accugggauuugacuuugucaaacagcucuu

SEQ ID NO: 48892 - RNA, 32 nt, Homo Sapiens
guccauaaaugguguuuguuauuuuagacacu

SEQ ID NO: 48893 - RNA, 32 nt, Homo Sapiens
auuuaggacuucugagaugcuugugaaguaua

SEQ ID NO: 48894 - RNA, 32 nt, Homo Sapiens
caguuuauagacaauggagaugugcuaacucu

SEQ ID NO: 48895 - RNA, 32 nt, Homo Sapiens
uggccuuccgaggcccacgaggaggcgcggcc

SEQ ID NO: 48896 - RNA, 32 nt, Homo Sapiens
caggaaaaguccaguaauaccauccaugugcc

SEQ ID NO: 48897 - RNA, 32 nt, Homo Sapiens
cauggggaugggggcgggcaggggcgugggga

SEQ ID NO: 48898 - RNA, 32 nt, Homo Sapiens
uuccaagagccgcccccuccccuccccgccuc

SEQ ID NO: 48899 - RNA, 32 nt, Homo Sapiens
uuuuuagcacccaucaguguacaggaugcugg

SEQ ID NO: 48900 - RNA, 32 nt, Homo Sapiens
ccaggagaugcugagaagaucacccagcucaa

SEQ ID NO: 48901 - RNA, 32 nt, Homo Sapiens
aaucccccaccagagaggaugugugugaggag

SEQ ID NO: 48902 - RNA, 32 nt, Homo Sapiens
cagggcacccucgcgggcgggcggacccaagc

SEQ ID NO: 48903 - RNA, 32 nt, Homo Sapiens
uacaaccauuacccaaaccacucugacagucu

SEQ ID NO: 48904 - RNA, 32 nt, Homo Sapiens
auuaaaaccucucuuacuuuuaaacuugauuu

SEQ ID NO: 48905 - RNA, 32 nt, Homo Sapiens
aaacauuguccuuugaggaagggagaggaggu

SEQ ID NO: 48906 - RNA, 32 nt, Homo Sapiens
cuuggagccugccucuugaagaggggguuuug

SEQ ID NO: 48907 - RNA, 29 nt, Homo Sapiens
uaaugccaguugaugucuguaagaacuaa

SEQ ID NO: 48908 - RNA, 32 nt, Homo Sapiens
gcuguggugugugauggacauggaugcagugg

SEQ ID NO: 48909 - RNA, 32 nt, Homo Sapiens
caauagcuaaguuaugcuaauaucacauuauu

SEQ ID NO: 48910 - RNA, 32 nt, Homo Sapiens
gugcaguuaaguacaaaaagauacuuaauuug

SEQ ID NO: 48911 - RNA, 32 nt, Homo Sapiens
gccaccaaccccacccacacugcugccuggug

SEQ ID NO: 48912 - RNA, 32 nt, Homo Sapiens
aagagauuuuccauuuuuuuuacagacuguuc

SEQ ID NO: 48913 - RNA, 32 nt, Homo Sapiens
cugcaugggggaagaguguggcaaauagugac

SEQ ID NO: 48914 - RNA, 32 nt, Homo Sapiens
gaagcuuagugucagugccuugagagucauca

SEQ ID NO: 48915 - RNA, 32 nt, Homo Sapiens
gacgcacaggccccagucauggcccugcccug

SEQ ID NO: 48916 - RNA, 32 nt, Homo Sapiens
uacaagggcauguggcagcugcaguaugugga

SEQ ID NO: 48917 - RNA, 32 nt, Homo Sapiens
caaagcaucauuguaaauuauuucauacaaaa

SEQ ID NO: 48918 - RNA, 32 nt, Homo Sapiens
ccuaaauguauuagagccacaguggggccugg

SEQ ID NO: 48919 - RNA, 32 nt, Homo Sapiens
cacaguguccacucaagggcagcuugguccuc

SEQ ID NO: 48920 - RNA, 32 nt, Homo Sapiens
ggcagccugccagcuuauggaaucucccacaa

SEQ ID NO: 48921 - RNA, 32 nt, Homo Sapiens
gaagaagcugaaucccugaauagaucaauaac

SEQ ID NO: 48922 - RNA, 32 nt, Homo Sapiens
guugggcccucagggcgggcaggguggcugug

SEQ ID NO: 48923 - RNA, 32 nt, Homo Sapiens
gggccugagcggggagggcgccaggcaggacc

SEQ ID NO: 48924 - RNA, 32 nt, Homo Sapiens
cagugggcguguggggcggggcggggcagggc

SEQ ID NO: 48925 - RNA, 32 nt, Homo Sapiens
ucuaagaaaaaguuaagacaccuagucuaaug

SEQ ID NO: 48926 - RNA, 32 nt, Homo Sapiens
uucauggacugagucagucccaacgucccugg

SEQ ID NO: 48927 - RNA, 32 nt, Homo Sapiens
cggagccgagagcgggcggcggagccugagcu

SEQ ID NO: 48928 - RNA, 32 nt, Homo Sapiens
gccccauaagauuauauaacaccuaaaacauu

SEQ ID NO: 48929 - RNA, 32 nt, Homo Sapiens
aguuaaaaaaagacauaucaaacaugcaaaua

SEQ ID NO: 48930 - RNA, 32 nt, Homo Sapiens
ccacucaccccucccuccccaaaagacaagag

SEQ ID NO: 48931 - RNA, 32 nt, Homo Sapiens
cuuccaguuguaauaagcaaagccagaaaucc

SEQ ID NO: 48932 - RNA, 32 nt, Homo Sapiens
cuuccaccucacacccaggaccucugaggugc

SEQ ID NO: 48933 - RNA, 32 nt, Homo Sapiens
gcagcacgaugagacuggaaagcgacgggucu

SEQ ID NO: 48934 - RNA, 32 nt, Homo Sapiens
ggcagccccacuucacccccaacuucaccacc

SEQ ID NO: 48935 - RNA, 32 nt, Homo Sapiens
ggggugcuaaggccaacuugcugcuggcacgc

SEQ ID NO: 48936 - RNA, 30 nt, Homo Sapiens
ggcugcggcggcggcggcgggagcagcaug

SEQ ID NO: 48937 - RNA, 32 nt, Homo Sapiens
ccccaucaguagccaugugugcauguguaaau

SEQ ID NO: 48938 - RNA, 32 nt, Homo Sapiens
cugucagcuggguguacuggccuguucaccug

SEQ ID NO: 48939 - RNA, 32 nt, Homo Sapiens
accgacaucacuguugccugcaaggacaccac

SEQ ID NO: 48940 - RNA, 32 nt, Homo Sapiens
ugaacuccugauguuuuuucuacaaaagucca

SEQ ID NO: 48941 - RNA, 32 nt, Homo Sapiens
agggccugcagcggccggggcgccccgagguc

SEQ ID NO: 48942 - RNA, 32 nt, Homo Sapiens
gcacauauugucaucacuuauucuagcaucac

SEQ ID NO: 48943 - RNA, 32 nt, Homo Sapiens
uucuauuuucuucuauuucaguuuuucauucu

SEQ ID NO: 48944 - RNA, 32 nt, Homo Sapiens
ccaccucuccaaaugcaauauuucauguaagc

SEQ ID NO: 48945 - RNA, 27 nt, Homo Sapiens
ccaugggccuccccgagccgggcccuc

SEQ ID NO: 48946 - RNA, 32 nt, Homo Sapiens
aguucuugcacccucauucccucgggacccuc

SEQ ID NO: 48947 - RNA, 32 nt, Homo Sapiens
uccucuguuucauuggauugugccaguuauca

SEQ ID NO: 48948 - RNA, 32 nt, Homo Sapiens
uagccagagcggcgcaguggcggccgcguucu

SEQ ID NO: 48949 - RNA, 32 nt, Homo Sapiens
cgccuccugccagcugcccuggugcuuucucc

SEQ ID NO: 48950 - RNA, 32 nt, Homo Sapiens
acucgccccacuuuguaguagcuucacugaau

SEQ ID NO: 48951 - RNA, 32 nt, Homo Sapiens
uuaaaagguacuuuucucaucacauuguagag

SEQ ID NO: 48952 - RNA, 32 nt, Homo Sapiens
gcucuuucaaccacaugagguuacagcaagaa

SEQ ID NO: 48953 - RNA, 32 nt, Homo Sapiens
cagcgagcgcgccuucggcauuggccgccgcg

SEQ ID NO: 48954 - RNA, 32 nt, Homo Sapiens
uuaaggggaaaauuauuuaaaucggaaaggaa

SEQ ID NO: 48955 - RNA, 32 nt, Homo Sapiens
gaaugagaauuaaagagaaaacaaaagaaucu

SEQ ID NO: 48956 - RNA, 32 nt, Homo Sapiens
ugaggcaggucuggugagcacggagaggcugg

SEQ ID NO: 48957 - RNA, 32 nt, Homo Sapiens
aggagcugacguguguaaacugcuagcacagu

SEQ ID NO: 48958 - RNA, 32 nt, Homo Sapiens
caaaaaagaacaaaaucugagcagagaugauu

SEQ ID NO: 48959 - RNA, 32 nt, Homo Sapiens
uacaacuaauaggugaaauauuuuauagcgag

SEQ ID NO: 48960 - RNA, 32 nt, Homo Sapiens
cucucucuuucugcccugacugugagagaagc

SEQ ID NO: 48961 - RNA, 32 nt, Homo Sapiens
cgagcccggugggaggcucccggagcgcagcc

SEQ ID NO: 48962 - RNA, 32 nt, Homo Sapiens
ucugcgcggggcggccauuggcggcggagugu

SEQ ID NO: 48963 - RNA, 32 nt, Homo Sapiens
ccgacugcacugagccgagcuguggcgguccc

SEQ ID NO: 48964 - RNA, 32 nt, Homo Sapiens
cacuuuagggugaugaaugucaauugcuacuu

SEQ ID NO: 48965 - RNA, 32 nt, Homo Sapiens
aaggguuguaaauuccacacccagcucugcca

SEQ ID NO: 48966 - RNA, 31 nt, Homo Sapiens
uccugagcacggagacagucuccagcugccg

SEQ ID NO: 48967 - RNA, 32 nt, Homo Sapiens
ugaaagacugaauacaguguuuggccaaaaau

SEQ ID NO: 48968 - RNA, 32 nt, Homo Sapiens
agcuuguaaaauguauccaaguaaagugcagg

SEQ ID NO: 48969 - RNA, 32 nt, Homo Sapiens
caccccagggccagcuccugguggcugaugcc

SEQ ID NO: 48970 - RNA, 32 nt, Homo Sapiens
gggccugcugucagcuugcagcccggggacag

SEQ ID NO: 48971 - RNA, 32 nt, Homo Sapiens
ggucccaacacuuugggcugggguuggccacc

SEQ ID NO: 48972 - RNA, 32 nt, Homo Sapiens
ggcacguauuuuucuuuuuuuaacagccuguu

SEQ ID NO: 48973 - RNA, 32 nt, Homo Sapiens
guugcuuugagcccacaggagcucccuuuuug

SEQ ID NO: 48974 - RNA, 32 nt, Homo Sapiens
gaaaaaagaggguuuuuguaaagccuguuuau

SEQ ID NO: 48975 - RNA, 32 nt, Homo Sapiens
accucucucgcaccccaguaugacugccgagc

SEQ ID NO: 48976 - RNA, 32 nt, Homo Sapiens
uguauugugcaguuacacaauaagguaauuag

SEQ ID NO: 48977 - RNA, 32 nt, Homo Sapiens
gcauuaucuucagaucuuuacauguauaaucu

SEQ ID NO: 48978 - RNA, 32 nt, Homo Sapiens
cagcagcgcaaccagcaggacaggcuccugca

SEQ ID NO: 48979 - RNA, 32 nt, Homo Sapiens
ugcugggaccccagggcccauagacagcuggg

SEQ ID NO: 48980 - RNA, 32 nt, Homo Sapiens
uaugaaauacugcgugugauaagcaaacggga

SEQ ID NO: 48981 - RNA, 32 nt, Homo Sapiens
uacaucaaacuuuugggauccaaauccaucuc

SEQ ID NO: 48982 - RNA, 32 nt, Homo Sapiens
uguaagaaauacuacuaauggucucuuaacau

SEQ ID NO: 48983 - RNA, 32 nt, Homo Sapiens
cuggucgggggcgggggcggcaggagcagaag

SEQ ID NO: 48984 - RNA, 29 nt, Homo Sapiens
guguguguauguauguguauguguuccau

SEQ ID NO: 48985 - RNA, 32 nt, Homo Sapiens
uauuuguacuaaaaugcucauuuacaugugcc

SEQ ID NO: 48986 - RNA, 32 nt, Homo Sapiens
uuugcccccacuuuuagacauaccccagagcc

SEQ ID NO: 48987 - RNA, 32 nt, Homo Sapiens
ugcugcagcugcugccgccgccggaggaaccu

SEQ ID NO: 48988 - RNA, 32 nt, Homo Sapiens
uauuagccaaaauaaagaauuuaugagucauu

SEQ ID NO: 48989 - RNA, 32 nt, Homo Sapiens
ggcagugagggcuuaggacaccccaagugguu

SEQ ID NO: 48990 - RNA, 32 nt, Homo Sapiens
ggggcgggaagcugccucacagcauggaacca

SEQ ID NO: 48991 - RNA, 32 nt, Homo Sapiens
ucuugcuuucuucagcacaucuuauaguauga

SEQ ID NO: 48992 - RNA, 32 nt, Homo Sapiens
guggcaacaauuuuauguacagguguauauac

SEQ ID NO: 48993 - RNA, 32 nt, Homo Sapiens
uauguuaccaauucuuuuuaaaucaccuuuua

SEQ ID NO: 48994 - RNA, 32 nt, Homo Sapiens
ggccugagcuccccagaguccugaggaggagc

SEQ ID NO: 48995 - RNA, 32 nt, Homo Sapiens
gagccagaaaugugaagugcuagcugaaggau

SEQ ID NO: 48996 - RNA, 32 nt, Homo Sapiens
agagaaaaagaaagaaaacauuugagcuccau

SEQ ID NO: 48997 - RNA, 32 nt, Homo Sapiens
caggaagcaaagguugucacaucuucccaagc

SEQ ID NO: 48998 - RNA, 32 nt, Homo Sapiens
acacugugaauucuuuuguuuggaagaaguga

SEQ ID NO: 48999 - RNA, 32 nt, Homo Sapiens
caaaccugaggccgugucuaggaggcuggcac

SEQ ID NO: 49000 - RNA, 32 nt, Homo Sapiens
ccuacagcucuuucucagcguuggaguggaga

SEQ ID NO: 49001 - RNA, 32 nt, Homo Sapiens
cgcaggaccggcgggcgcgcgcgggcucugga

SEQ ID NO: 49002 - RNA, 32 nt, Homo Sapiens
aauguaugcaaugucuuuauuucauccucauu

SEQ ID NO: 49003 - RNA, 32 nt, Homo Sapiens
uuuaauaaaaauuuaauauaagaacuugcuac

SEQ ID NO: 49004 - RNA, 32 nt, Homo Sapiens
cuuguugguuuccuucucagacuugccaccuu

SEQ ID NO: 49005 - RNA, 28 nt, Homo Sapiens
acgauggaggcgcuaauggcccggggcg

SEQ ID NO: 49006 - RNA, 32 nt, Homo Sapiens
cuuuagagguuaacauucaaauccucaaaagg

SEQ ID NO: 49007 - RNA, 32 nt, Homo Sapiens
cuugcaccgccagcugccgccgacugcagccc

SEQ ID NO: 49008 - RNA, 32 nt, Homo Sapiens
aaguucagauaugggacaaaauuuaaaaauuc

SEQ ID NO: 49009 - RNA, 32 nt, Homo Sapiens
cguuggccgcgugguccgaguaggagcuggac

SEQ ID NO: 49010 - RNA, 32 nt, Homo Sapiens
aaacgcugcgcgcgcgaggugggccccugucu

SEQ ID NO: 49011 - RNA, 32 nt, Homo Sapiens
ggcagccuggaaaguugugucuucugggaaag

SEQ ID NO: 49012 - RNA, 32 nt, Homo Sapiens
cgugcucuuggaauucucaaccacugacagcc

SEQ ID NO: 49013 - RNA, 32 nt, Homo Sapiens
uguuaaugcucuauguuuguauuuggaauauu

SEQ ID NO: 49014 - RNA, 32 nt, Homo Sapiens
gucacauaaaaugugcuaugaauguugaguuu

SEQ ID NO: 49015 - RNA, 32 nt, Homo Sapiens
gucccaggucaggcccacccccugcaccucca

SEQ ID NO: 49016 - RNA, 32 nt, Homo Sapiens
ggccacagugaacacccacguuuauuccugcc

SEQ ID NO: 49017 - RNA, 32 nt, Homo Sapiens
ugcuuucaguuagggagaaaaauuagauugua

SEQ ID NO: 49018 - RNA, 32 nt, Homo Sapiens
ggcgacgccgacgcgagucuggcggcugcugc

SEQ ID NO: 49019 - RNA, 32 nt, Homo Sapiens
agcaugagcuggaugcccuuuugaggaucugu

SEQ ID NO: 49020 - RNA, 32 nt, Homo Sapiens
gauggggaaugaggacagucccugcccccaug

SEQ ID NO: 49021 - RNA, 32 nt, Homo Sapiens
cugcgugucaucugccuggucaucucagaccc

SEQ ID NO: 49022 - RNA, 32 nt, Homo Sapiens
caaggagcuuguagcucugagcuaugaugcuu

SEQ ID NO: 49023 - RNA, 32 nt, Homo Sapiens
aaagcuucaaugucuuuuuuuuuuuuuuucau

SEQ ID NO: 49024 - RNA, 30 nt, Homo Sapiens
ugugcauaagguggcaggaagaagaaucga

SEQ ID NO: 49025 - RNA, 32 nt, Homo Sapiens
ccagcgcacagucaggaagggcguggaccagg

SEQ ID NO: 49026 - RNA, 32 nt, Homo Sapiens
gucuaggaccaccugcccuaaccaggaauaaa

SEQ ID NO: 49027 - RNA, 32 nt, Homo Sapiens
caccuguccaggcuuccuuagguacaucuucu

SEQ ID NO: 49028 - RNA, 32 nt, Homo Sapiens
aacuaagucugcucagugaaaugcuguagaac

SEQ ID NO: 49029 - RNA, 32 nt, Homo Sapiens
uauggggacaaaggccuucaccagcaagggcc

SEQ ID NO: 49030 - RNA, 32 nt, Homo Sapiens
ugucugcucagcggacucugcccgcccccacc

SEQ ID NO: 49031 - RNA, 32 nt, Homo Sapiens
gacuaaaaauuugaaaaagauaaaaauuucua

SEQ ID NO: 49032 - RNA, 32 nt, Homo Sapiens
aacagagaaaaaauguaugugcuugaaaguaa

SEQ ID NO: 49033 - RNA, 32 nt, Homo Sapiens
gccaccaguccucuccucugcccucccucgca

SEQ ID NO: 49034 - RNA, 32 nt, Homo Sapiens
uguggccucacagaaacauugaaacuguuuau

SEQ ID NO: 49035 - RNA, 32 nt, Homo Sapiens
aagcagagggagggagggagggggucuucagc

SEQ ID NO: 49036 - RNA, 32 nt, Homo Sapiens
aauauguauuuuucacuuuucuuaauauguuu

SEQ ID NO: 49037 - RNA, 32 nt, Homo Sapiens
ccugugagccggcgcgggcccgggcuccggcu

SEQ ID NO: 49038 - RNA, 32 nt, Homo Sapiens
ccugcccgccccacgucuagcccccugcacac

SEQ ID NO: 49039 - RNA, 32 nt, Homo Sapiens
gaaaaagaagaugccuaauguggugaauugug

SEQ ID NO: 49040 - RNA, 32 nt, Homo Sapiens
uauauuuguguacuuucacaaacaaaggcuua

SEQ ID NO: 49041 - RNA, 32 nt, Homo Sapiens
ggagggcagcuaggacauggggggaagcgcgu

SEQ ID NO: 49042 - RNA, 32 nt, Homo Sapiens
gauucguugugaaauggaacugucccauuuac

SEQ ID NO: 49043 - RNA, 32 nt, Homo Sapiens
cagacuuggaagguuugcuacuguauauacug

SEQ ID NO: 49044 - RNA, 32 nt, Homo Sapiens
augccucacagcacacuuuugaggcugagcgu

SEQ ID NO: 49045 - RNA, 32 nt, Homo Sapiens
ucaacguuuuacuuucuuuuuaucaggagggu

SEQ ID NO: 49046 - RNA, 32 nt, Homo Sapiens
uguagucaaacacagacaugguuguugcacca

SEQ ID NO: 49047 - RNA, 32 nt, Homo Sapiens
gccaacacugguuuucuuagguuucuccauuu

SEQ ID NO: 49048 - RNA, 32 nt, Homo Sapiens
uuccugguaaaucucucucccucccccaaguu

SEQ ID NO: 49049 - RNA, 32 nt, Homo Sapiens
ucaggaauguguuuuuaccaccacagggaaac

SEQ ID NO: 49050 - RNA, 32 nt, Homo Sapiens
aguuuguaacaagaaaacagucucucccauuc

SEQ ID NO: 49051 - RNA, 32 nt, Homo Sapiens
ccccugaagaacccugcaacauguuagacauu

SEQ ID NO: 49052 - RNA, 32 nt, Homo Sapiens
acaagaucuccauggcagacaagcuaaagcau

SEQ ID NO: 49053 - RNA, 32 nt, Homo Sapiens
cugugcuagcuaaaagacaaauuuaaggggag

SEQ ID NO: 49054 - RNA, 32 nt, Homo Sapiens
uuccugguuugugagacauguccuuggucuau

SEQ ID NO: 49055 - RNA, 32 nt, Homo Sapiens
aauaaugaagugaaugcaaugcacauuaacac

SEQ ID NO: 49056 - RNA, 32 nt, Homo Sapiens
uuucuaagaaggugauucccccugcccuugcc

SEQ ID NO: 49057 - RNA, 32 nt, Homo Sapiens
cugcccaggccaccucccacagcccuccacug

SEQ ID NO: 49058 - RNA, 32 nt, Homo Sapiens
ggaacagggcucugaauugucuucccacagug

SEQ ID NO: 49059 - RNA, 32 nt, Homo Sapiens
auggcauaaaugaaaggaauuuuauagucucc

SEQ ID NO: 49060 - RNA, 32 nt, Homo Sapiens
cauucuaaugaaauccuuuccauugcucuuuu

SEQ ID NO: 49061 - RNA, 32 nt, Homo Sapiens
ggucucaaacucccaaccucaggugaucugcc

SEQ ID NO: 49062 - RNA, 32 nt, Homo Sapiens
gcgacggauccuccuccucccuuauucccuug

SEQ ID NO: 49063 - RNA, 32 nt, Homo Sapiens
aagaccacuucugaaucagggaugacuugucu

SEQ ID NO: 49064 - RNA, 32 nt, Homo Sapiens
caagcuggugcccgugggcuacgguaucugga

SEQ ID NO: 49065 - RNA, 32 nt, Homo Sapiens
caugagguggagguugcggugagccaagaugg

SEQ ID NO: 49066 - RNA, 32 nt, Homo Sapiens
gguguccagaaucugcgucugagaucucucug

SEQ ID NO: 49067 - RNA, 32 nt, Homo Sapiens
auaaagggauaaaacaguauacugacaacugu

SEQ ID NO: 49068 - RNA, 32 nt, Homo Sapiens
aauauaacaagacaaacuuaugauaaaguauu

SEQ ID NO: 49069 - RNA, 32 nt, Homo Sapiens
uuuugaggaaagggcuuugaauuccccagaua

SEQ ID NO: 49070 - RNA, 32 nt, Homo Sapiens
aucugccggcaagggcgcccgaaacgcgggag

SEQ ID NO: 49071 - RNA, 32 nt, Homo Sapiens
uuagcuccaucccauaguucucuacuucauau

SEQ ID NO: 49072 - RNA, 32 nt, Homo Sapiens
ggggggcuuuggggacagauaaugucuccagg

SEQ ID NO: 49073 - RNA, 32 nt, Homo Sapiens
cguccccgcggccgcuuggccucgaugaccgg

SEQ ID NO: 49074 - RNA, 32 nt, Homo Sapiens
ucccaucucucagccggcucccgggcggugcu

SEQ ID NO: 49075 - RNA, 32 nt, Homo Sapiens
ucuccggcgagggcaaggagcggugcccggcu

SEQ ID NO: 49076 - RNA, 32 nt, Homo Sapiens
ugccagugcgugaggaagagagcuagagacug

SEQ ID NO: 49077 - RNA, 32 nt, Homo Sapiens
gcgggccuggggucaccgaggggugcggggcu

SEQ ID NO: 49078 - RNA, 32 nt, Homo Sapiens
gggcagugguggcuggggggauggaauugaga

SEQ ID NO: 49079 - RNA, 32 nt, Homo Sapiens
uucagacagagugcuuagaauuagauuuguga

SEQ ID NO: 49080 - RNA, 32 nt, Homo Sapiens
uuacgauuuuuggaaucccucuuugagugcug

SEQ ID NO: 49081 - RNA, 32 nt, Homo Sapiens
aacccugacuuuggaggcuucagacauccuga

SEQ ID NO: 49082 - RNA, 30 nt, Homo Sapiens
cagacgcucggcggcggcguguggcaggag

SEQ ID NO: 49083 - RNA, 32 nt, Homo Sapiens
gggcagugccuggacggacccggagcccccgc

SEQ ID NO: 49084 - RNA, 32 nt, Homo Sapiens
guuauuuccccucccaggcagcgggauuccga

SEQ ID NO: 49085 - RNA, 32 nt, Homo Sapiens
cuauuuuguaaauauaagaugaguauuauuua

SEQ ID NO: 49086 - RNA, 32 nt, Homo Sapiens
auuuuccagaaagacauuuguguuuguguuuu

SEQ ID NO: 49087 - RNA, 32 nt, Homo Sapiens
agguugcccagccccaguuucuuccggcgcag

SEQ ID NO: 49088 - RNA, 32 nt, Homo Sapiens
caccccugcccccacuuccuguuugggcccuc

SEQ ID NO: 49089 - RNA, 32 nt, Homo Sapiens
gaacugacaaugaagggaaauuguuuaugugu

SEQ ID NO: 49090 - RNA, 32 nt, Homo Sapiens
uauguaaaacaauauuauuuguaaugcaguua

SEQ ID NO: 49091 - RNA, 32 nt, Homo Sapiens
ccggggccgaaugcgcgccgcguagggucccc

SEQ ID NO: 49092 - RNA, 32 nt, Homo Sapiens
aguccggggucgucgccguuuggggcgggagc

SEQ ID NO: 49093 - RNA, 32 nt, Homo Sapiens
aacaaacauuguaucugacaucagcucuguuc

SEQ ID NO: 49094 - RNA, 32 nt, Homo Sapiens
cugccucuggcgggcuuucggcuugaggggca

SEQ ID NO: 49095 - RNA, 32 nt, Homo Sapiens
ucuucacaggugguaaacauuuaggggaagaa

SEQ ID NO: 49096 - RNA, 32 nt, Homo Sapiens
cagccuccaagcaucagcagagcccagaugag

SEQ ID NO: 49097 - RNA, 32 nt, Homo Sapiens
acuacaagacugagaagaaaaucguauguugu

SEQ ID NO: 49098 - RNA, 32 nt, Homo Sapiens
cagaagggccauuuuucccucugccaaaaaga

SEQ ID NO: 49099 - RNA, 32 nt, Homo Sapiens
auagcuuaugaaaucuuuucagcuuauuaagu

SEQ ID NO: 49100 - RNA, 32 nt, Homo Sapiens
uaagguucuuauuggaacccaggcuccagggu

SEQ ID NO: 49101 - RNA, 32 nt, Homo Sapiens
acaucaccagugccacgucaugagcgucaaag

SEQ ID NO: 49102 - RNA, 32 nt, Homo Sapiens
cuccuagagucaaaagaaaaccacugcaacag

SEQ ID NO: 49103 - RNA, 32 nt, Homo Sapiens
gcugcggcuggcuggccacuccgcggaggccc

SEQ ID NO: 49104 - RNA, 32 nt, Homo Sapiens
agcaggugucuggacgaaaacaucaaugugaa

SEQ ID NO: 49105 - RNA, 32 nt, Homo Sapiens
ggcgagcguggauugucacagcugcgggcaug

SEQ ID NO: 49106 - RNA, 32 nt, Homo Sapiens
ggcgcuuuagggugcuggacuguauggcugag

SEQ ID NO: 49107 - RNA, 31 nt, Homo Sapiens
agagcaucuggaggaagcccaagggccaccu

SEQ ID NO: 49108 - RNA, 32 nt, Homo Sapiens
guuuuuuaaaaaaagcaaaaccauuguuaugu

SEQ ID NO: 49109 - RNA, 32 nt, Homo Sapiens
auggaggcuggcucuguuggugcggugccaug

SEQ ID NO: 49110 - RNA, 32 nt, Homo Sapiens
ggggaacgcucgcugguuggguucgggccgcc

SEQ ID NO: 49111 - RNA, 32 nt, Homo Sapiens
ggaacauggauggaucaagugaagugacagaa

SEQ ID NO: 49112 - RNA, 32 nt, Homo Sapiens
cuugggcgcgacuggcuuuauuguaggucccc

SEQ ID NO: 49113 - RNA, 32 nt, Homo Sapiens
cgagagccuggucaaugauuuccuccuccggg

SEQ ID NO: 49114 - RNA, 29 nt, Homo Sapiens
gagaagucccaugagugaaagagauguug

SEQ ID NO: 49115 - RNA, 32 nt, Homo Sapiens
ucuagggaagcagugcgugugaaacagcguaa

SEQ ID NO: 49116 - RNA, 32 nt, Homo Sapiens
ucuguguacauuugcaagauguguguaauguc

SEQ ID NO: 49117 - RNA, 32 nt, Homo Sapiens
uuuuauuauccuguccccagagggugguuuau

SEQ ID NO: 49118 - RNA, 32 nt, Homo Sapiens
ggauaucuuuugcuguggcauauauagcuuau

SEQ ID NO: 49119 - RNA, 32 nt, Homo Sapiens
aguguugguaggugucuguuucccaccucacc

SEQ ID NO: 49120 - RNA, 32 nt, Homo Sapiens
cggcggcuccuggccgcgggaccgugagacgg

SEQ ID NO: 49121 - RNA, 32 nt, Homo Sapiens
uucagcacccgcggccgccaucgccgucgcuu

SEQ ID NO: 49122 - RNA, 32 nt, Homo Sapiens
auuccuggaaguuucuggggccccacagagcu

SEQ ID NO: 49123 - RNA, 32 nt, Homo Sapiens
agaagccagcggggcuuugucccuguugcucu

SEQ ID NO: 49124 - RNA, 32 nt, Homo Sapiens
uaaguaggagcaugcauguguagggggcacau

SEQ ID NO: 49125 - RNA, 32 nt, Homo Sapiens
ccggagagggcuuuguucgcgcucucgccaca

SEQ ID NO: 49126 - RNA, 32 nt, Homo Sapiens
ggccuccggaagcuuauagucaugacagaagg

SEQ ID NO: 49127 - RNA, 32 nt, Homo Sapiens
ugccccauguccacuggcaucccggccuggcc

SEQ ID NO: 49128 - RNA, 32 nt, Homo Sapiens
cugugaauccccccggccagccuccaccugca

SEQ ID NO: 49129 - RNA, 32 nt, Homo Sapiens
uauugugcuaaguauuaggguacaauaauaac

SEQ ID NO: 49130 - RNA, 32 nt, Homo Sapiens
accuugagaacaaccuaaauuauggggagaau

SEQ ID NO: 49131 - RNA, 32 nt, Homo Sapiens
cugaggaguuuucaggcuuccgucucgaagga

SEQ ID NO: 49132 - RNA, 32 nt, Homo Sapiens
ugaccagcguggcgcgcgcccuggcgcccgag

SEQ ID NO: 49133 - RNA, 32 nt, Homo Sapiens
cucacucugggaacuguguucccagcaucucu

SEQ ID NO: 49134 - RNA, 32 nt, Homo Sapiens
cuuuagaaaacaauucuuagagaggguacuag

SEQ ID NO: 49135 - RNA, 32 nt, Homo Sapiens
cccgccaccguggcggccgccccgcgcugucu

SEQ ID NO: 49136 - RNA, 32 nt, Homo Sapiens
uguccucuaaauauuuugauaauuucuggauu

SEQ ID NO: 49137 - RNA, 30 nt, Homo Sapiens
ucugugaaguugaauaaacauaaaagcuaa

SEQ ID NO: 49138 - RNA, 32 nt, Homo Sapiens
uuuucucuuuauuuuuuuuuuauaauucagac

SEQ ID NO: 49139 - RNA, 32 nt, Homo Sapiens
ucaugaaagauggcaaaugcugucccacagga

SEQ ID NO: 49140 - RNA, 32 nt, Homo Sapiens
cugacuugauuuuuuucuuaucaauauuuucu

SEQ ID NO: 49141 - RNA, 32 nt, Homo Sapiens
auggcggccugcgcgccgcgccucgagcugua

SEQ ID NO: 49142 - RNA, 32 nt, Homo Sapiens
ucaggugaaauccaugcccuucugcuuauaga

SEQ ID NO: 49143 - RNA, 32 nt, Homo Sapiens
aaggccagcccuccuccuccucggaauccugg

SEQ ID NO: 49144 - RNA, 32 nt, Homo Sapiens
cgggccagccuccuccccccagcccuggaagc

SEQ ID NO: 49145 - RNA, 31 nt, Homo Sapiens
uacugaaguaccaccaccgauuuaaaugggc

SEQ ID NO: 49146 - RNA, 30 nt, Homo Sapiens
guuuuggccaccccuugcucucuguucucu

SEQ ID NO: 49147 - RNA, 32 nt, Homo Sapiens
aagaccgagggcaggggagggaggcgggggug

SEQ ID NO: 49148 - RNA, 32 nt, Homo Sapiens
cuccuagauuuucucauguuaugccaugcauu

SEQ ID NO: 49149 - RNA, 32 nt, Homo Sapiens
acugcgugagucaaggcaaaugcaaaaagcca

SEQ ID NO: 49150 - RNA, 32 nt, Homo Sapiens
cggccccgccccagcccuccugaucccucgca

SEQ ID NO: 49151 - RNA, 32 nt, Homo Sapiens
cgacggcgaaacaaagggugguguccaggcau

SEQ ID NO: 49152 - RNA, 32 nt, Homo Sapiens
guuuauuuuuacagaauauauuuaguaccuuu

SEQ ID NO: 49153 - RNA, 32 nt, Homo Sapiens
ccuccccuacccagggucucugcacagugacc

SEQ ID NO: 49154 - RNA, 29 nt, Homo Sapiens
caugaauaaauauuauauuucuccacuug

SEQ ID NO: 49155 - RNA, 32 nt, Homo Sapiens
uuaagugcaugugaaauuuguaaaauagagau

SEQ ID NO: 49156 - RNA, 32 nt, Homo Sapiens
ggcuauuugugagugagcugccugcccauugc

SEQ ID NO: 49157 - RNA, 32 nt, Homo Sapiens
ccccuauaaccaacacucaacuacaaauaggc

SEQ ID NO: 49158 - RNA, 32 nt, Homo Sapiens
cauugcuuucugaaggaaucauuguccuuucu

SEQ ID NO: 49159 - RNA, 32 nt, Homo Sapiens
gauuuuguaacacuuaauuugagcagcuuuuu

SEQ ID NO: 49160 - RNA, 32 nt, Homo Sapiens
uuuuaauguguuugauagcuuugacgaggguu

SEQ ID NO: 49161 - RNA, 32 nt, Homo Sapiens
gcaaacaugcaccagcaccagaaggaacacaa

SEQ ID NO: 49162 - RNA, 32 nt, Homo Sapiens
cccuggaccugccuccuucccucggggccaua

SEQ ID NO: 49163 - RNA, 32 nt, Homo Sapiens
ccacugcaaacacuacugccgccucugccagc

SEQ ID NO: 49164 - RNA, 32 nt, Homo Sapiens
aggacuagccuggcugcccuggagcagaucca

SEQ ID NO: 49165 - RNA, 32 nt, Homo Sapiens
uuaauagcaggauuuggaaaauacuaauuucu

SEQ ID NO: 49166 - RNA, 32 nt, Homo Sapiens
agagaccgcggcuucgagacaccuggggacac

SEQ ID NO: 49167 - RNA, 32 nt, Homo Sapiens
cgauuuccaaaauauguaacuuauuuuuuaaa

SEQ ID NO: 49168 - RNA, 32 nt, Homo Sapiens
uagacgauucagagauagauaauguuccaaac

SEQ ID NO: 49169 - RNA, 32 nt, Homo Sapiens
caauaagggaugcauugagcagucugacagug

SEQ ID NO: 49170 - RNA, 32 nt, Homo Sapiens
agauaagaauaaaaucacauaaccaaguugaa

SEQ ID NO: 49171 - RNA, 32 nt, Homo Sapiens
agacaccugcagccuuuggucuccuggauggg

SEQ ID NO: 49172 - RNA, 32 nt, Homo Sapiens
aauccgauucagaacccagaucguccacacca

SEQ ID NO: 49173 - RNA, 32 nt, Homo Sapiens
cauaacggaaagggcuaagacgacucuuccac

SEQ ID NO: 49174 - RNA, 32 nt, Homo Sapiens
ucaucgcugcugucaugguuaguuugcuaaac

SEQ ID NO: 49175 - RNA, 32 nt, Homo Sapiens
gaaaugguuauugaggaacauggcguugcugg

SEQ ID NO: 49176 - RNA, 32 nt, Homo Sapiens
aagauccaggaguccauagaaaagcuucgugc

SEQ ID NO: 49177 - RNA, 32 nt, Homo Sapiens
uguaauaacgacguagaucugugcagcgaggu

SEQ ID NO: 49178 - RNA, 30 nt, Homo Sapiens
uugggaggagguggcauuggaaauagcaga

SEQ ID NO: 49179 - RNA, 32 nt, Homo Sapiens
ucauugucccuuucuugaaaguuucuuuuuua

SEQ ID NO: 49180 - RNA, 32 nt, Homo Sapiens
cucuuucccuucagugugccacugaagauccu

SEQ ID NO: 49181 - RNA, 32 nt, Homo Sapiens
ggagauaagacuacacacaggaucucaaagaa

SEQ ID NO: 49182 - RNA, 32 nt, Homo Sapiens
aagguucugaagauaucuucauaggacugcag

SEQ ID NO: 49183 - RNA, 32 nt, Homo Sapiens
agaaucuccacaucauugucuuucuugugccu

SEQ ID NO: 49184 - RNA, 32 nt, Homo Sapiens
cacacaguguuccugcuggagagaggagacag

SEQ ID NO: 49185 - RNA, 32 nt, Homo Sapiens
cuuagggacagagggaccaucgucuuuaagug

SEQ ID NO: 49186 - RNA, 32 nt, Homo Sapiens
gacgcccccaagggggacccagguucugccag

SEQ ID NO: 49187 - RNA, 32 nt, Homo Sapiens
ugggacagacacgcgaggcgcccgggaggugc

SEQ ID NO: 49188 - RNA, 32 nt, Homo Sapiens
gaugagaauuuauguuuaacuucucuuuuuac

SEQ ID NO: 49189 - RNA, 32 nt, Homo Sapiens
uuaaguagcugcuuaugagaauagggaaggca

SEQ ID NO: 49190 - RNA, 32 nt, Homo Sapiens
uaucauuuaccuguagugcuauugcuguugau

SEQ ID NO: 49191 - RNA, 32 nt, Homo Sapiens
uuaacaaauaaauguuuuacuaugacaaaaaa

SEQ ID NO: 49192 - RNA, 32 nt, Homo Sapiens
agagaaagacagaaacaaaaagucugaccauu

SEQ ID NO: 49193 - RNA, 32 nt, Homo Sapiens
auugacugcuccaggauguggauggagggugu

SEQ ID NO: 49194 - RNA, 32 nt, Homo Sapiens
agauguuuaaauaguucuguuguaacuuuuaa

SEQ ID NO: 49195 - RNA, 32 nt, Homo Sapiens
auucccuauuccaaaaauagugccggguggcc

SEQ ID NO: 49196 - RNA, 32 nt, Homo Sapiens
uuggaaguagccaggcaagcccugguugcaaa

SEQ ID NO: 49197 - RNA, 32 nt, Homo Sapiens
gaucagggucucacagacucgcaacuucucuu

SEQ ID NO: 49198 - RNA, 32 nt, Homo Sapiens
auaggaguuugcagauggagaauaggaagggc

SEQ ID NO: 49199 - RNA, 32 nt, Homo Sapiens
gcauugggugaagacuaaaaauccacuugcgg

SEQ ID NO: 49200 - RNA, 32 nt, Homo Sapiens
cuuuggaggagaauauauuagaguugugggua

SEQ ID NO: 49201 - RNA, 32 nt, Homo Sapiens
cugcggacaccguggccugggcuuggcccgcg

SEQ ID NO: 49202 - RNA, 32 nt, Homo Sapiens
aaguggucuccaucaugggggcucgaauccag

SEQ ID NO: 49203 - RNA, 32 nt, Homo Sapiens
gcugaugggauuugcgggagggagggaaaagg

SEQ ID NO: 49204 - RNA, 32 nt, Homo Sapiens
ccgccgcgcuggcgucaaguucagcuccacgu

SEQ ID NO: 49205 - RNA, 32 nt, Homo Sapiens
cauuugcuguauuuugguuuugaaauacuugu

SEQ ID NO: 49206 - RNA, 32 nt, Homo Sapiens
uaggacaccaucggggaccgaggaccagcuuu

SEQ ID NO: 49207 - RNA, 32 nt, Homo Sapiens
acuuauacauggccuaaaauguuucuacaaau

SEQ ID NO: 49208 - RNA, 32 nt, Homo Sapiens
cccuuuucaaccacaacauuggcaucauccua

SEQ ID NO: 49209 - RNA, 32 nt, Homo Sapiens
cuucuaaggaguauugacaagcccuuagcuag

SEQ ID NO: 49210 - RNA, 32 nt, Homo Sapiens
uuucucucuccuuagugccuagcugugcaaug

SEQ ID NO: 49211 - RNA, 32 nt, Homo Sapiens
uccccgcgagccccggagggcgggucugcggc

SEQ ID NO: 49212 - RNA, 32 nt, Homo Sapiens
uucccaggaaaggggugcaaagacuccgaggc

SEQ ID NO: 49213 - RNA, 32 nt, Homo Sapiens
cgcggguggagaccgaggacggcgccggcgcg

SEQ ID NO: 49214 - RNA, 32 nt, Homo Sapiens
ucaaugaaauacuugauucuguuaaaaugcag

SEQ ID NO: 49215 - RNA, 32 nt, Homo Sapiens
caucccugcccccguuuucccaccggggaguc

SEQ ID NO: 49216 - RNA, 32 nt, Homo Sapiens
cuugauccaaaaaaugucaagaauuaaucuag

SEQ ID NO: 49217 - RNA, 32 nt, Homo Sapiens
uucugaucucgucauugucgucgugugucuug

SEQ ID NO: 49218 - RNA, 32 nt, Homo Sapiens
uguguacuaaacaaaauaaagccccucuuugc

SEQ ID NO: 49219 - RNA, 32 nt, Homo Sapiens
acgugcugaccagucacauagaugaaccacca

SEQ ID NO: 49220 - RNA, 27 nt, Homo Sapiens
ccucccucugucuucagcacccagagg

SEQ ID NO: 49221 - RNA, 32 nt, Homo Sapiens
cuuucuuaauaaacuugcuuucacuuuaaaaa

SEQ ID NO: 49222 - RNA, 32 nt, Homo Sapiens
uugcagaaagagauugaagauauuuacauuua

SEQ ID NO: 49223 - RNA, 32 nt, Homo Sapiens
agcucuucuaguucucaccuggcuugaucacu

SEQ ID NO: 49224 - RNA, 32 nt, Homo Sapiens
cuaguguguaucuguuaauuuauuugucauca

SEQ ID NO: 49225 - RNA, 32 nt, Homo Sapiens
uggauaacagcaagagcccaucuuuuaaaaaa

SEQ ID NO: 49226 - RNA, 32 nt, Homo Sapiens
aaagauaaaaauuuuggcuggaugcaauggcu

SEQ ID NO: 49227 - RNA, 29 nt, Homo Sapiens
guauagaugaagaugaagaggcagaauug

SEQ ID NO: 49228 - RNA, 32 nt, Homo Sapiens
gccacggccugcccuccccgucccgggggaca

SEQ ID NO: 49229 - RNA, 32 nt, Homo Sapiens
auggggcccagcugcagcugugcuuguucuca

SEQ ID NO: 49230 - RNA, 32 nt, Homo Sapiens
acaaacaaacaaacaaagcagaacuaaaauau

SEQ ID NO: 49231 - RNA, 32 nt, Homo Sapiens
guuaugguuauuuaauguaauuauuacuucaa

SEQ ID NO: 49232 - RNA, 32 nt, Homo Sapiens
ugcuguucaaggaaguagaggaggaggugaug

SEQ ID NO: 49233 - RNA, 32 nt, Homo Sapiens
gagaaaagaaagcacacugccuaaauguguaa

SEQ ID NO: 49234 - RNA, 32 nt, Homo Sapiens
uauaagcaccuacugacaaaauguagaggcca

SEQ ID NO: 49235 - RNA, 32 nt, Homo Sapiens
cauguaccuugugccucccauucaagugaagu

SEQ ID NO: 49236 - RNA, 32 nt, Homo Sapiens
caggagaguaucaugaaguaaacuacaaacuu

SEQ ID NO: 49237 - RNA, 32 nt, Homo Sapiens
cugaugaguagcaugugacuuuccaagaguuu

SEQ ID NO: 49238 - RNA, 32 nt, Homo Sapiens
ggaggccaagcagugccugccuaugaaauuuc

SEQ ID NO: 49239 - RNA, 32 nt, Homo Sapiens
ugcuccugcccccgagucgacacuguggacug

SEQ ID NO: 49240 - RNA, 32 nt, Homo Sapiens
uugccuuacauaucagcccucccacuucugaa

SEQ ID NO: 49241 - RNA, 32 nt, Homo Sapiens
agccggcuuggcuagcgcgcggcggccguggc

SEQ ID NO: 49242 - RNA, 32 nt, Homo Sapiens
auagaugggcauuuggguugauuccauguuuu

SEQ ID NO: 49243 - RNA, 31 nt, Homo Sapiens
uauguaaaaguauguaacgugcuguuuauua

SEQ ID NO: 49244 - RNA, 32 nt, Homo Sapiens
cuugaauaagauacacucuaauggcauuugaa

SEQ ID NO: 49245 - RNA, 32 nt, Homo Sapiens
caacguuuuccuuuccuucucccauaaacaua

SEQ ID NO: 49246 - RNA, 32 nt, Homo Sapiens
aaaaaguuucaucgucccgucauuguuucuga

SEQ ID NO: 49247 - RNA, 32 nt, Homo Sapiens
ucucaagguuaaaauucugaguaaaauggucu

SEQ ID NO: 49248 - RNA, 32 nt, Homo Sapiens
agauauuugucugacaaaguguaauuacucaa

SEQ ID NO: 49249 - RNA, 32 nt, Homo Sapiens
auucugcagaaauaaugguuauuugugaacuu

SEQ ID NO: 49250 - RNA, 32 nt, Homo Sapiens
gggaaggacaaagggaugaggcuccagagaga

SEQ ID NO: 49251 - RNA, 32 nt, Homo Sapiens
uuuggugguugcucuaaacaaaacagaaauuu

SEQ ID NO: 49252 - RNA, 32 nt, Homo Sapiens
cuuuuuuuguuuauuucuucucugagcuuuau

SEQ ID NO: 49253 - RNA, 32 nt, Homo Sapiens
cuguaacugaacaggagcuggugugacuguua

SEQ ID NO: 49254 - RNA, 32 nt, Homo Sapiens
guagaggaccaggacuugugcagacgccacag

SEQ ID NO: 49255 - RNA, 32 nt, Homo Sapiens
cgugcguguuuguguuugcaagauccucugac

SEQ ID NO: 49256 - RNA, 32 nt, Homo Sapiens
gggucccuuugcaaaaaucacggguguagaga

SEQ ID NO: 49257 - RNA, 32 nt, Homo Sapiens
ggcagcggcuguaucucggcaugaauuaagaa

SEQ ID NO: 49258 - RNA, 32 nt, Homo Sapiens
uggaggcaggagccuuccuuacacuucgccau

SEQ ID NO: 49259 - RNA, 32 nt, Homo Sapiens
auuaaaauaaagcuaccauuuuacauuucuau

SEQ ID NO: 49260 - RNA, 32 nt, Homo Sapiens
ccuuccugcgccagccaugccuuuaaaccgca

SEQ ID NO: 49261 - RNA, 32 nt, Homo Sapiens
aaggcaaaacagaagaaacaaacaaacaaaca

SEQ ID NO: 49262 - RNA, 32 nt, Homo Sapiens
guaccccccagccuggcuggcaucaugcagag

SEQ ID NO: 49263 - RNA, 32 nt, Homo Sapiens
auguaucauuuuuauuuuuuuauuuucaaccu

SEQ ID NO: 49264 - RNA, 31 nt, Homo Sapiens
acaaugcgccacccgcugccccgacgagucg

SEQ ID NO: 49265 - RNA, 32 nt, Homo Sapiens
gagagccauggcgggggccgcagcgggcggca

SEQ ID NO: 49266 - RNA, 32 nt, Homo Sapiens
acacauuuaaacauauagaaaauucacuucuu

SEQ ID NO: 49267 - RNA, 32 nt, Homo Sapiens
auagauuacauaggaagaacaaucacaucagu

SEQ ID NO: 49268 - RNA, 32 nt, Homo Sapiens
gaguauugccauugacgucaaacucuauggca

SEQ ID NO: 49269 - RNA, 30 nt, Homo Sapiens
cgcucuggcuucuguggcggcagugguggg

SEQ ID NO: 49270 - RNA, 32 nt, Homo Sapiens
uagcgacuuuagcaaaauguuuucauauaauc

SEQ ID NO: 49271 - RNA, 32 nt, Homo Sapiens
gagccccgguucccugaacagcacccagaucg

SEQ ID NO: 49272 - RNA, 32 nt, Homo Sapiens
uucuuucuuugcugcgucuacugcgagaauga

SEQ ID NO: 49273 - RNA, 32 nt, Homo Sapiens
gaagaaacuaaauuuuauauagguaaaacaug

SEQ ID NO: 49274 - RNA, 32 nt, Homo Sapiens
cccuguauuagaguaaauacgcacaaaaacac

SEQ ID NO: 49275 - RNA, 32 nt, Homo Sapiens
ucuugcagcucuuguucagguagucgcccuuc

SEQ ID NO: 49276 - RNA, 32 nt, Homo Sapiens
uguaucuuauaugaauguuuuauuuuuuauac

SEQ ID NO: 49277 - RNA, 32 nt, Homo Sapiens
gaugcuuccgaagauuugaaaauaggauccaa

SEQ ID NO: 49278 - RNA, 32 nt, Homo Sapiens
gccgcucccgacacccuuugccuggcucuguc

SEQ ID NO: 49279 - RNA, 32 nt, Homo Sapiens
uggaugaaagagaauaagaauucagcugacag

SEQ ID NO: 49280 - RNA, 32 nt, Homo Sapiens
gaaaaaucuauuuccuuuucuaguuuuuuaag

SEQ ID NO: 49281 - RNA, 32 nt, Homo Sapiens
cagccaaccccgcucaacgcccaccccucacu

SEQ ID NO: 49282 - RNA, 32 nt, Homo Sapiens
uucuuuguguauauuguuguuuuuaaaauuuu

SEQ ID NO: 49283 - RNA, 32 nt, Homo Sapiens
gcucuguucuucaucgcauucucauuucugug

SEQ ID NO: 49284 - RNA, 32 nt, Homo Sapiens
aaaguuggguugauaggauauuuuagauucau

SEQ ID NO: 49285 - RNA, 32 nt, Homo Sapiens
gggccaguucccuucuccccucccggccaaac

SEQ ID NO: 49286 - RNA, 32 nt, Homo Sapiens
ccucuuguguauuugcagaauacacaagguca

SEQ ID NO: 49287 - RNA, 32 nt, Homo Sapiens
cugcucuuggcuucaccaaaucuccugcccuu

SEQ ID NO: 49288 - RNA, 32 nt, Homo Sapiens
cagccagccaaggugguuccugcuucacccac

SEQ ID NO: 49289 - RNA, 32 nt, Homo Sapiens
acaacugaacagcauuaauguuaaaauagaga

SEQ ID NO: 49290 - RNA, 32 nt, Homo Sapiens
ggcaaucagacacccucuccuuaaaaacuggc

SEQ ID NO: 49291 - RNA, 32 nt, Homo Sapiens
cccaggugacagagcaagacuccaucucaaaa

SEQ ID NO: 49292 - RNA, 32 nt, Homo Sapiens
ccugcccucugcagcccucugccagccucuug

SEQ ID NO: 49293 - RNA, 32 nt, Homo Sapiens
ugucucuguagguggugccggcgugggccaac

SEQ ID NO: 49294 - RNA, 32 nt, Homo Sapiens
uuuuuuauccuggggccacaguucuugauuau

SEQ ID NO: 49295 - RNA, 32 nt, Homo Sapiens
ugcuucuguccuucuuuuuauuuaccucuuug

SEQ ID NO: 49296 - RNA, 32 nt, Homo Sapiens
augugcaauauuuguuaugaauguuaucacaa

SEQ ID NO: 49297 - RNA, 32 nt, Homo Sapiens
uauaauaagagaaguauaaacacagccacagg

SEQ ID NO: 49298 - RNA, 32 nt, Homo Sapiens
caagauaacgacccucaaaagcggcggaaagg

SEQ ID NO: 49299 - RNA, 32 nt, Homo Sapiens
aaaauucuuuuuucuuuuuuaauaaaaaauua

SEQ ID NO: 49300 - RNA, 32 nt, Homo Sapiens
guguuacgaugauuucuguuuuccucugcugc

SEQ ID NO: 49301 - RNA, 32 nt, Homo Sapiens
aaguuuacagaaaaggaagugcaggaacauuu

SEQ ID NO: 49302 - RNA, 32 nt, Homo Sapiens
caauccaacuguacuggccaauuuuugaaaua

SEQ ID NO: 49303 - RNA, 32 nt, Homo Sapiens
gcuccguuuuuggagcagacuguuuuaaguug

SEQ ID NO: 49304 - RNA, 32 nt, Homo Sapiens
cuuacaccuugauuccauacacacguguucgc

SEQ ID NO: 49305 - RNA, 32 nt, Homo Sapiens
aauugcguuaguauuguuguuguuguuuuuga

SEQ ID NO: 49306 - RNA, 32 nt, Homo Sapiens
aaaccucccucuccaccuccccgcccccgaga

SEQ ID NO: 49307 - RNA, 32 nt, Homo Sapiens
gcucugagccgugggucuggcuccuguagggg

SEQ ID NO: 49308 - RNA, 32 nt, Homo Sapiens
cugacaaauggcacuucggaacugugcuuucu

SEQ ID NO: 49309 - RNA, 32 nt, Homo Sapiens
gggacaaaccccgaugguuccaucaacuugga

SEQ ID NO: 49310 - RNA, 28 nt, Homo Sapiens
ucucaaauguagaaaauuauaaauguua

SEQ ID NO: 49311 - RNA, 32 nt, Homo Sapiens
gccaggaccguuuccggggccuggccggggcg

SEQ ID NO: 49312 - RNA, 32 nt, Homo Sapiens
gucaacgugacuaggcuguaguacccagauau

SEQ ID NO: 49313 - RNA, 32 nt, Homo Sapiens
uuagcguagguggucaugaccccggcuuccuc

SEQ ID NO: 49314 - RNA, 32 nt, Homo Sapiens
ugcacucccuugaggauggagagcagccagca

SEQ ID NO: 49315 - RNA, 32 nt, Homo Sapiens
auggagcucaucuucuaucucuagggucuguu

SEQ ID NO: 49316 - RNA, 32 nt, Homo Sapiens
ugugcccguguguggugggaccucuucaaccu

SEQ ID NO: 49317 - RNA, 32 nt, Homo Sapiens
cccaccugccuggccggccagccagccacucu

SEQ ID NO: 49318 - RNA, 32 nt, Homo Sapiens
gaggguuccagccccagccaggccccuccgcu

SEQ ID NO: 49319 - RNA, 32 nt, Homo Sapiens
cagagagcucugcgacgcugcagccgcaggga

SEQ ID NO: 49320 - RNA, 32 nt, Homo Sapiens
ccaauuauauugagauauuauuauuauuggca

SEQ ID NO: 49321 - RNA, 32 nt, Homo Sapiens
gcuaugcccucccuuccuccugagccagccca

SEQ ID NO: 49322 - RNA, 32 nt, Homo Sapiens
augugguaccggcugcuggcggcggccggcag

SEQ ID NO: 49323 - RNA, 32 nt, Homo Sapiens
ugugacuuuaaucgugcugcuuggauagaaau

SEQ ID NO: 49324 - RNA, 32 nt, Homo Sapiens
aauccugagcgcgacccgggcacugggacggc

SEQ ID NO: 49325 - RNA, 32 nt, Homo Sapiens
cuuuuauaaaagacagagccuguuuacucauu

SEQ ID NO: 49326 - RNA, 32 nt, Homo Sapiens
gcugagcucccucugcccugccaguugucagu

SEQ ID NO: 49327 - RNA, 32 nt, Homo Sapiens
caaagagugggaagaggugaucuguaauguua

SEQ ID NO: 49328 - RNA, 32 nt, Homo Sapiens
cucaaaacagagcccaagucucuccgaugguc

SEQ ID NO: 49329 - RNA, 32 nt, Homo Sapiens
uugggaagugggagcgggagggccgggcaauu

SEQ ID NO: 49330 - RNA, 30 nt, Homo Sapiens
gaauauauccauccugccuaacccugaguu

SEQ ID NO: 49331 - RNA, 32 nt, Homo Sapiens
gcccgcgcucccaggcucuccucccccagccu

SEQ ID NO: 49332 - RNA, 32 nt, Homo Sapiens
guucaucuagauggaagcuggggcuuccuucc

SEQ ID NO: 49333 - RNA, 32 nt, Homo Sapiens
ugcccauuuaaacuagaugugcauguaaccac

SEQ ID NO: 49334 - RNA, 32 nt, Homo Sapiens
ccucgcgggcugcuggaggcgaggggagggag

SEQ ID NO: 49335 - RNA, 32 nt, Homo Sapiens
acaaacuuaugauaaaguauuugucuuguaga

SEQ ID NO: 49336 - RNA, 32 nt, Homo Sapiens
ugacacagcaaggaugauucagcacugccccu

SEQ ID NO: 49337 - RNA, 32 nt, Homo Sapiens
cugcccaggccacuggccccaguucucagugu

SEQ ID NO: 49338 - RNA, 32 nt, Homo Sapiens
aggaggccgagggccccaggaugucugccugg

SEQ ID NO: 49339 - RNA, 32 nt, Homo Sapiens
gcuuauuuugggaaacucuuuaucuuuuuuaa

SEQ ID NO: 49340 - RNA, 32 nt, Homo Sapiens
uaacaguuucagcuuucuuguuaugccuucca

SEQ ID NO: 49341 - RNA, 32 nt, Homo Sapiens
gcgggcaguggacgcgguucugccgagagccg

SEQ ID NO: 49342 - RNA, 32 nt, Homo Sapiens
uuucuccuuggauggcaccauccacccugcag

SEQ ID NO: 49343 - RNA, 32 nt, Homo Sapiens
auauauaugaagacuguaaauguuagacgacu

SEQ ID NO: 49344 - RNA, 32 nt, Homo Sapiens
caguggcuugcaccaccacacacauaccuggu

SEQ ID NO: 49345 - RNA, 32 nt, Homo Sapiens
gcacggagguaacguggaccuggacggugccu

SEQ ID NO: 49346 - RNA, 32 nt, Homo Sapiens
auuccugaugucucaggcaacccuggcagacc

SEQ ID NO: 49347 - RNA, 32 nt, Homo Sapiens
cucucugucagcuccccugauuguagggaggc

SEQ ID NO: 49348 - RNA, 32 nt, Homo Sapiens
auugcuguguuauaugaggaauuaaaaccuuc

SEQ ID NO: 49349 - RNA, 32 nt, Homo Sapiens
guuucagcguggcggcgcuggugcuggcguug

SEQ ID NO: 49350 - RNA, 32 nt, Homo Sapiens
auaaagcuggggauuggagauguuccccugcc

SEQ ID NO: 49351 - RNA, 32 nt, Homo Sapiens
uaaauguagguuuguuacaugaguuucccaau

SEQ ID NO: 49352 - RNA, 32 nt, Homo Sapiens
acaccuuccgcggcgacuggagggagccgggc

SEQ ID NO: 49353 - RNA, 32 nt, Homo Sapiens
agcucuuuaauucuuuuuccccggggaggggg

SEQ ID NO: 49354 - RNA, 32 nt, Homo Sapiens
uuugcuauauguuuugcuauuuccuuguggcu

SEQ ID NO: 49355 - RNA, 32 nt, Homo Sapiens
uaucuccauggcccugucccaggccggcccag

SEQ ID NO: 49356 - RNA, 32 nt, Homo Sapiens
uuauuuuaucuaaaccauugcuuaaugagugu

SEQ ID NO: 49357 - RNA, 32 nt, Homo Sapiens
gguguuuaaaagacaagcaagaacuaaaccau

SEQ ID NO: 49358 - RNA, 32 nt, Homo Sapiens
cgcaucccuugugaaguguagagcagcagaga

SEQ ID NO: 49359 - RNA, 32 nt, Homo Sapiens
ugcuaguguuuaaauggcaguucguugugaua

SEQ ID NO: 49360 - RNA, 32 nt, Homo Sapiens
aggggcccgggcggaggcgguggcgggauggg

SEQ ID NO: 49361 - RNA, 32 nt, Homo Sapiens
guccuuuuuuaaauguuuuguguuucucuaca

SEQ ID NO: 49362 - RNA, 32 nt, Homo Sapiens
auacaguuucauagcuuuuccucccccauuua

SEQ ID NO: 49363 - RNA, 32 nt, Homo Sapiens
cuccuuugauaaaaaguguguauaauguaaag

SEQ ID NO: 49364 - RNA, 32 nt, Homo Sapiens
cuggagcuggaugccugggaaccacucaccuc

SEQ ID NO: 49365 - RNA, 32 nt, Homo Sapiens
gaaauguacuguucuuuuuuuuuuuuuuaaac

SEQ ID NO: 49366 - RNA, 32 nt, Homo Sapiens
ccccauaaauaccaccuugccaccacaagagg

SEQ ID NO: 49367 - RNA, 32 nt, Homo Sapiens
uacacuuauuuaugaaacugucuugaguucuu

SEQ ID NO: 49368 - RNA, 32 nt, Homo Sapiens
uguuuuauauauaagucagguaacauuggugu

SEQ ID NO: 49369 - RNA, 32 nt, Homo Sapiens
gggguggagcccugugcccacccugcacuggg

SEQ ID NO: 49370 - RNA, 32 nt, Homo Sapiens
uacagaauguuacaggugagacccucauggcc

SEQ ID NO: 49371 - RNA, 32 nt, Homo Sapiens
aaaacauuuacauauugaucuacuccucgccc

SEQ ID NO: 49372 - RNA, 32 nt, Homo Sapiens
ggcacccuaggcucugggaucccgugucuuuc

SEQ ID NO: 49373 - RNA, 32 nt, Homo Sapiens
cagcagacccagcagcagcagcagcagcacaa

SEQ ID NO: 49374 - RNA, 32 nt, Homo Sapiens
ccaaagugguauauacuguagucacauucagc

SEQ ID NO: 49375 - RNA, 32 nt, Homo Sapiens
ggagaaagccccagcccuggcagccccacugg

SEQ ID NO: 49376 - RNA, 32 nt, Homo Sapiens
agcccgggcccgguugucgccaucgcauccac

SEQ ID NO: 49377 - RNA, 32 nt, Homo Sapiens
ugcagauguaaaaauagauaaacuauacacuu

SEQ ID NO: 49378 - RNA, 32 nt, Homo Sapiens
agagcacaauuucaaaagucucugugcagugg

SEQ ID NO: 49379 - RNA, 32 nt, Homo Sapiens
aggcacccagcagauagcgaaugcacgacucc

SEQ ID NO: 49380 - RNA, 32 nt, Homo Sapiens
cgcuguuucagaguuaaacaaacaaaaaaaua

SEQ ID NO: 49381 - RNA, 32 nt, Homo Sapiens
agagagaucauacaaguguaauaaucggcaaa

SEQ ID NO: 49382 - RNA, 32 nt, Homo Sapiens
gagcaguggggagcgggggcuaacuggcccca

SEQ ID NO: 49383 - RNA, 32 nt, Homo Sapiens
auagacgcaaccuuaacuuacuauuuagauga

SEQ ID NO: 49384 - RNA, 32 nt, Homo Sapiens
aagguccugcccagcccugcgguccccucagu

SEQ ID NO: 49385 - RNA, 32 nt, Homo Sapiens
uuuuguaaaaaauaaaauaaaauuaguuaaua

SEQ ID NO: 49386 - RNA, 32 nt, Homo Sapiens
uuucuguaugaauaaaauccaugaugaaagag

SEQ ID NO: 49387 - RNA, 32 nt, Homo Sapiens
gaagaacuguuggggcuuccacagcccuccuc

SEQ ID NO: 49388 - RNA, 32 nt, Homo Sapiens
guaccucugggccccaggagcaucagccccuu

SEQ ID NO: 49389 - RNA, 32 nt, Homo Sapiens
gaugacaacagauuguggucuaaucucacgau

SEQ ID NO: 49390 - RNA, 32 nt, Homo Sapiens
gagaaccugcucgggggacgcguccgucaacc

SEQ ID NO: 49391 - RNA, 32 nt, Homo Sapiens
cuuaugguucccucauccugggugggcuucag

SEQ ID NO: 49392 - RNA, 32 nt, Homo Sapiens
gagcccagaaaaggcagcagauggaccaugcc

SEQ ID NO: 49393 - RNA, 32 nt, Homo Sapiens
gaauuucugaagacuuguguacuuagaagaaa

SEQ ID NO: 49394 - RNA, 32 nt, Homo Sapiens
aagauaucaaaauaaauuguuuuguugaaaau

SEQ ID NO: 49395 - RNA, 32 nt, Homo Sapiens
acuggaagaauacaauauauggccauuaugga

SEQ ID NO: 49396 - RNA, 32 nt, Homo Sapiens
ugaaacccgaggcuggccagggugcugucacc

SEQ ID NO: 49397 - RNA, 32 nt, Homo Sapiens
ucaucucuuuagaugcagaaagguuuuuaaua

SEQ ID NO: 49398 - RNA, 32 nt, Homo Sapiens
acugugcuuuguuuccucuguuucuuccaauu

SEQ ID NO: 49399 - RNA, 32 nt, Homo Sapiens
ggcccugcgcgagcugccccgcccuacccccu

SEQ ID NO: 49400 - RNA, 32 nt, Homo Sapiens
gcagguaguuaagaauagauuguacucauucc

SEQ ID NO: 49401 - RNA, 32 nt, Homo Sapiens
cagguugcacucagcucuggcccuccggaggg

SEQ ID NO: 49402 - RNA, 32 nt, Homo Sapiens
gcuuucucaauccuaggcugguuacuguguaa

SEQ ID NO: 49403 - RNA, 32 nt, Homo Sapiens
aaauuuuaugaauucagguaauuaaaaagucc

SEQ ID NO: 49404 - RNA, 32 nt, Homo Sapiens
ugucuagugaugcucucugugcucaccuccua

SEQ ID NO: 49405 - RNA, 32 nt, Homo Sapiens
acacaaaccugccuggguuuaaggggagagga

SEQ ID NO: 49406 - RNA, 32 nt, Homo Sapiens
acugaagggaaauggauuuauauuugaauuug

SEQ ID NO: 49407 - RNA, 32 nt, Homo Sapiens
aaaaaagguggggguguuccccggggcggggg

SEQ ID NO: 49408 - RNA, 32 nt, Homo Sapiens
uggaaagaauucugaggcucaguuggaagaug

SEQ ID NO: 49409 - RNA, 32 nt, Homo Sapiens
gguacuuggaauugauauauaccuuauuaaag

SEQ ID NO: 49410 - RNA, 32 nt, Homo Sapiens
gcaugaaauaaaauauaucuuauaaaguggaa

SEQ ID NO: 49411 - RNA, 32 nt, Homo Sapiens
gccaaccucccucccccuucucccaccaggcc

SEQ ID NO: 49412 - RNA, 32 nt, Homo Sapiens
uugcuuuucuucccuuuuuuuucuuuuugcaa

SEQ ID NO: 49413 - RNA, 32 nt, Homo Sapiens
aaccaaagcaauuaaaugauauugggguaggg

SEQ ID NO: 49414 - RNA, 32 nt, Homo Sapiens
auguuguauuaaaaucuuaucuaaucuugauu

SEQ ID NO: 49415 - RNA, 32 nt, Homo Sapiens
ucucuaccugcuggcaguacuugaaaaugcac

SEQ ID NO: 49416 - RNA, 32 nt, Homo Sapiens
gagagcaacaauaaaaaguagacaugggcugg

SEQ ID NO: 49417 - RNA, 32 nt, Homo Sapiens
gccgcaggagaauggaggagcugaggaugcug

SEQ ID NO: 49418 - RNA, 32 nt, Homo Sapiens
acaacauuuuaaauguauuuuguuauguuugu

SEQ ID NO: 49419 - RNA, 32 nt, Homo Sapiens
gcaucucccucauccuggacucugggcuuagu

SEQ ID NO: 49420 - RNA, 32 nt, Homo Sapiens
auuuuauccaagauuuucuccucuucuggagu

SEQ ID NO: 49421 - RNA, 31 nt, Homo Sapiens
uucacagaacuggagaaccaggccaaguccc

SEQ ID NO: 49422 - RNA, 32 nt, Homo Sapiens
cgccuuccgaaagcccucuggauugaggcagc

SEQ ID NO: 49423 - RNA, 32 nt, Homo Sapiens
cuaugggccuggugucuccccucccccaccac

SEQ ID NO: 49424 - RNA, 32 nt, Homo Sapiens
auuauaggauaacuuugaaacuuucugaauua

SEQ ID NO: 49425 - RNA, 32 nt, Homo Sapiens
aagcaaugcuaaucaggguucuccauggagcu

SEQ ID NO: 49426 - RNA, 32 nt, Homo Sapiens
gggguggaauggggcuaaccagcuccugaugg

SEQ ID NO: 49427 - RNA, 32 nt, Homo Sapiens
caaagguguggcuggcuguggucagggugcua

SEQ ID NO: 49428 - RNA, 32 nt, Homo Sapiens
uuaccuggcugaucuggagcugcggggcaaca

SEQ ID NO: 49429 - RNA, 32 nt, Homo Sapiens
uuuuccuugguagaguagguauguaaagagug

SEQ ID NO: 49430 - RNA, 32 nt, Homo Sapiens
acaguaaggggaggggagcggaggcggaggcg

SEQ ID NO: 49431 - RNA, 32 nt, Homo Sapiens
ugaggagggcccggccugcgagagccucagug

SEQ ID NO: 49432 - RNA, 32 nt, Homo Sapiens
aggcaggcacugggcugugcccacucgagcuc

SEQ ID NO: 49433 - RNA, 32 nt, Homo Sapiens
uucugaggggagagggaaaaggacuuguuuuc

SEQ ID NO: 49434 - RNA, 32 nt, Homo Sapiens
uugggggagcaggagggcaggggucaggagaa

SEQ ID NO: 49435 - RNA, 32 nt, Homo Sapiens
ccugaaaaacaucaaguaaaaguacagaaaaa

SEQ ID NO: 49436 - RNA, 32 nt, Homo Sapiens
cuccagaaacaguaaauaggugaguaggggug

SEQ ID NO: 49437 - RNA, 32 nt, Homo Sapiens
uguauugcuguuuuucugguuuaagaguaaca

SEQ ID NO: 49438 - RNA, 32 nt, Homo Sapiens
uccuccugcccagcuuccuaugcaaggcuuug

SEQ ID NO: 49439 - RNA, 32 nt, Homo Sapiens
aagcgacuggaaagauucuucgacucagaaga

SEQ ID NO: 49440 - RNA, 32 nt, Homo Sapiens
aacaaaaaaaacaaaaucuagggcuguauuuu

SEQ ID NO: 49441 - RNA, 32 nt, Homo Sapiens
agugcuaggcccuggggauucagacacaaagc

SEQ ID NO: 49442 - RNA, 32 nt, Homo Sapiens
cccacuugcugugccucccaccagaaacacuc

SEQ ID NO: 49443 - RNA, 32 nt, Homo Sapiens
gacuguacgaauugggggauugguuuuuaccc

SEQ ID NO: 49444 - RNA, 32 nt, Homo Sapiens
gcuggagauggagcuuccugugucccagaacu

SEQ ID NO: 49445 - RNA, 32 nt, Homo Sapiens
aaagauguacuuugacauuucugauguaaaac

SEQ ID NO: 49446 - RNA, 32 nt, Homo Sapiens
acuuuguucaacaucagggaauuuauauugga

SEQ ID NO: 49447 - RNA, 32 nt, Homo Sapiens
auguuuacauaauuuuaaccuauaugauuuua

SEQ ID NO: 49448 - RNA, 32 nt, Homo Sapiens
agguauuuuuccaaucacaguguuauguagua

SEQ ID NO: 49449 - RNA, 32 nt, Homo Sapiens
ugcucauuuuaaaaucuauuuguuucuuuauu

SEQ ID NO: 49450 - RNA, 32 nt, Homo Sapiens
gcugucccuggcccacuuuuaauucuuuggag

SEQ ID NO: 49451 - RNA, 32 nt, Homo Sapiens
uaaaaacuuagcacguguaauuuauuauuuuu

SEQ ID NO: 49452 - RNA, 32 nt, Homo Sapiens
cugaggauggaguggggucccauggugcaggu

SEQ ID NO: 49453 - RNA, 32 nt, Homo Sapiens
uuugggcccggggccaugcccgggcugugcaa

SEQ ID NO: 49454 - RNA, 32 nt, Homo Sapiens
gcagaucugaccacuguucuccagcaggccuc

SEQ ID NO: 49455 - RNA, 32 nt, Homo Sapiens
aauuuagcaaaauuauguaaacuugauccuga

SEQ ID NO: 49456 - RNA, 32 nt, Homo Sapiens
ggucuaauauccagaauuuaaaggaacuuaaa

SEQ ID NO: 49457 - RNA, 32 nt, Homo Sapiens
ccgagacgcucgcgugccugggaucgggaaag

SEQ ID NO: 49458 - RNA, 32 nt, Homo Sapiens
ucucuuaauuuaaucuuuuuuaugugccgugu

SEQ ID NO: 49459 - RNA, 32 nt, Homo Sapiens
agcccgggccgcgcccgggaccucauuucgga

SEQ ID NO: 49460 - RNA, 32 nt, Homo Sapiens
acccaccgagugcgcgcgacaggagcaggaga

SEQ ID NO: 49461 - RNA, 32 nt, Homo Sapiens
cccucccggacggggcggcuggccgggcugag

SEQ ID NO: 49462 - RNA, 32 nt, Homo Sapiens
caggaagcggccccucccggcuucggagccgc

SEQ ID NO: 49463 - RNA, 32 nt, Homo Sapiens
cgggugaggacccugcacacacacgguguguu

SEQ ID NO: 49464 - RNA, 32 nt, Homo Sapiens
aggguauucagaacagaagaaauuauauaagc

SEQ ID NO: 49465 - RNA, 32 nt, Homo Sapiens
guuaggaaccgggcuacacagcaagaagugaa

SEQ ID NO: 49466 - RNA, 32 nt, Homo Sapiens
ugaggaaucacagauaucgaagagaugccaga

SEQ ID NO: 49467 - RNA, 32 nt, Homo Sapiens
uuuauauuaaaauaaauuccagauggauuaaa

SEQ ID NO: 49468 - RNA, 32 nt, Homo Sapiens
ggcugacuaccuguuuuucucacuguggugug

SEQ ID NO: 49469 - RNA, 32 nt, Homo Sapiens
cacaaccugucccuggcuggcuccagcguccu

SEQ ID NO: 49470 - RNA, 32 nt, Homo Sapiens
gaauauuauuuuuuauuuccuguuagauuaua

SEQ ID NO: 49471 - RNA, 32 nt, Homo Sapiens
acgaggcagggagaggcgggacuucgcgggcg

SEQ ID NO: 49472 - RNA, 32 nt, Homo Sapiens
uaaaaaauauauauguguauaaauucuacacc

SEQ ID NO: 49473 - RNA, 32 nt, Homo Sapiens
gaucuuggggcuuagaggaaaauagaauaaac

SEQ ID NO: 49474 - RNA, 32 nt, Homo Sapiens
cgccgugucucagccucugccagcgccagcgc

SEQ ID NO: 49475 - RNA, 32 nt, Homo Sapiens
cuauaaaguaaaccucuucccguggaagcaca

SEQ ID NO: 49476 - RNA, 32 nt, Homo Sapiens
uguccacgccccacaagccucgauuauuggug

SEQ ID NO: 49477 - RNA, 32 nt, Homo Sapiens
gacgugcucagccccaggaccucugcggaaca

SEQ ID NO: 49478 - RNA, 32 nt, Homo Sapiens
acaauggacaggcccagaggcugaagcaaaca

SEQ ID NO: 49479 - RNA, 32 nt, Homo Sapiens
ggccuggccugccugccgguugucgguggccc

SEQ ID NO: 49480 - RNA, 32 nt, Homo Sapiens
cuuuuuucaauucuguuccauuuugggaggua

SEQ ID NO: 49481 - RNA, 32 nt, Homo Sapiens
uugaggcauuugaggucuuauucugauuugaa

SEQ ID NO: 49482 - RNA, 32 nt, Homo Sapiens
uuguuuugauuuuuuuuuuuuauuuuuuuuaa

SEQ ID NO: 49483 - RNA, 32 nt, Homo Sapiens
agaggagauaggcagauguggguauggggccc

SEQ ID NO: 49484 - RNA, 32 nt, Homo Sapiens
gcagaaggguaugcggaagcgagcaccccagu

SEQ ID NO: 49485 - RNA, 32 nt, Homo Sapiens
uuuugagagucuuuaaagaggaaggggagugg

SEQ ID NO: 49486 - RNA, 32 nt, Homo Sapiens
ccccagugaaguucaccaaaucagcgcagcuu

SEQ ID NO: 49487 - RNA, 32 nt, Homo Sapiens
cagguggccgcggcguggaggcagggagaaug

SEQ ID NO: 49488 - RNA, 32 nt, Homo Sapiens
cgugguugcccccacaagcguccggcguuucc

SEQ ID NO: 49489 - RNA, 32 nt, Homo Sapiens
uuaugagauuccuaagauacugacaugcugag

SEQ ID NO: 49490 - RNA, 32 nt, Homo Sapiens
uuucucuauuuuuuccuucccugauggauuug

SEQ ID NO: 49491 - RNA, 32 nt, Homo Sapiens
augagucaacucaggaaaacugcgagugcauu

SEQ ID NO: 49492 - RNA, 32 nt, Homo Sapiens
guagcccuuuuguaauccccaggccccggaca

SEQ ID NO: 49493 - RNA, 32 nt, Homo Sapiens
ucugcagaggggaggaacaggcacaggcuaga

SEQ ID NO: 49494 - RNA, 32 nt, Homo Sapiens
acaaaguccauccaggacccaggccgcagagg

SEQ ID NO: 49495 - RNA, 32 nt, Homo Sapiens
acgccacccucaccaucaguacucccuuccaa

SEQ ID NO: 49496 - RNA, 32 nt, Homo Sapiens
ucuucucgcgcgcgcacucucucuucaacacu

SEQ ID NO: 49497 - RNA, 32 nt, Homo Sapiens
cugccucagggugucuggcuccccuccagagc

SEQ ID NO: 49498 - RNA, 32 nt, Homo Sapiens
auuaccagaacuuguaacuaagaucuauguuu

SEQ ID NO: 49499 - RNA, 32 nt, Homo Sapiens
caccuguaaucccagcacuuugguaggccaag

SEQ ID NO: 49500 - RNA, 32 nt, Homo Sapiens
caccuguaaucccagcacuuugggaggccaau

SEQ ID NO: 49501 - RNA, 32 nt, Homo Sapiens
ugcccaagcugaucuugaacuccuggccucag

SEQ ID NO: 49502 - RNA, 32 nt, Homo Sapiens
acaauguaaaaauaaaaguaugcauauacaaa

SEQ ID NO: 49503 - RNA, 32 nt, Homo Sapiens
gacaccuuuugcugucucauggggcagcuaca

SEQ ID NO: 49504 - RNA, 32 nt, Homo Sapiens
caguuguuggccuccggccuccccucaaaaaa

SEQ ID NO: 49505 - RNA, 32 nt, Homo Sapiens
gaacagguucccucccugccaccugugaggag

SEQ ID NO: 49506 - RNA, 32 nt, Homo Sapiens
ucccuuuucucuucucucuccuccugggaaaa

SEQ ID NO: 49507 - RNA, 32 nt, Homo Sapiens
gccagggccucacucugucacccaggcuggga

SEQ ID NO: 49508 - RNA, 32 nt, Homo Sapiens
gccugggcuggacgugguuuugucugcugcgc

SEQ ID NO: 49509 - RNA, 32 nt, Homo Sapiens
cucuugugguugguuguagcuaauguucuccu

SEQ ID NO: 49510 - RNA, 32 nt, Homo Sapiens
cccugccuggaaaggccuccugugccaggcac

SEQ ID NO: 49511 - RNA, 32 nt, Homo Sapiens
uuguuguguucuuuuuaccuuuuauuuuucua

SEQ ID NO: 49512 - RNA, 32 nt, Homo Sapiens
caaaaguucaucuccuucugcauccuuaacug

SEQ ID NO: 49513 - RNA, 32 nt, Homo Sapiens
augcucgcccuggcugcccugaccuagcagcu

SEQ ID NO: 49514 - RNA, 32 nt, Homo Sapiens
cuagagacaugagggacauaaaugggccuggc

SEQ ID NO: 49515 - RNA, 32 nt, Homo Sapiens
ucacccaaacuuauggcuacauauuuuucuaa

SEQ ID NO: 49516 - RNA, 32 nt, Homo Sapiens
cgccccggccgcggccggguccucaguagucg

SEQ ID NO: 49517 - RNA, 32 nt, Homo Sapiens
cggaccccuuaccgaucugugcucuccuagcc

SEQ ID NO: 49518 - RNA, 32 nt, Homo Sapiens
gagacagugcugccuccuccugagggagggaa

SEQ ID NO: 49519 - RNA, 32 nt, Homo Sapiens
gcgcauguuuccucuuuuccugguuucucaag

SEQ ID NO: 49520 - RNA, 32 nt, Homo Sapiens
guccccaggaagcucgccagugcaugggacug

SEQ ID NO: 49521 - RNA, 32 nt, Homo Sapiens
gccgggucaagcgauucuccuaccucagccuc

SEQ ID NO: 49522 - RNA, 32 nt, Homo Sapiens
ucuugagcaugcuguuacaugcuugacacuuu

SEQ ID NO: 49523 - RNA, 32 nt, Homo Sapiens
cugcccugagucugcuggggagugggcauucu

SEQ ID NO: 49524 - RNA, 32 nt, Homo Sapiens
agagaggaggauguggcuuucacuuugaauuu

SEQ ID NO: 49525 - RNA, 32 nt, Homo Sapiens
caagaccgcgugggccgcggggugcugguagg

SEQ ID NO: 49526 - RNA, 32 nt, Homo Sapiens
uugcaauuccaagagggagugugcccaaauga

SEQ ID NO: 49527 - RNA, 32 nt, Homo Sapiens
gggacaggcccucccccauguucuucugucuc

SEQ ID NO: 49528 - RNA, 32 nt, Homo Sapiens
cucucuccugacuggggcuugcgacucacagg

SEQ ID NO: 49529 - RNA, 32 nt, Homo Sapiens
uucguguuugacuccuaggagcgcccaguuca

SEQ ID NO: 49530 - RNA, 32 nt, Homo Sapiens
agaugggaaaauuuuaaguuuuugucuaacuc

SEQ ID NO: 49531 - RNA, 32 nt, Homo Sapiens
uacagagaugaaauccauuuaggucaauugcu

SEQ ID NO: 49532 - RNA, 32 nt, Homo Sapiens
augcuuuauuaaauuucugaaauauuugguaa

SEQ ID NO: 49533 - RNA, 32 nt, Homo Sapiens
ucuuggcugcaucuccucccugcccccacccc

SEQ ID NO: 49534 - RNA, 32 nt, Homo Sapiens
aggccucgcgagcgucgccgcgcggagaagcc

SEQ ID NO: 49535 - RNA, 32 nt, Homo Sapiens
augcugacaccaagcggccuggagucguggga

SEQ ID NO: 49536 - RNA, 32 nt, Homo Sapiens
gcacugaaggccagucaguuuaacucucagug

SEQ ID NO: 49537 - RNA, 30 nt, Homo Sapiens
ggccccucucuggcugcagagcccucuccu

SEQ ID NO: 49538 - RNA, 32 nt, Homo Sapiens
acagguacuuggagggacaaugguuuuggaag

SEQ ID NO: 49539 - RNA, 32 nt, Homo Sapiens
ccugcucuucugucggagcccgcggcggggga

SEQ ID NO: 49540 - RNA, 32 nt, Homo Sapiens
accaagggauaaaacuguucauggaugcaacu

SEQ ID NO: 49541 - RNA, 32 nt, Homo Sapiens
guccgcauccgucguccggcccgcugcugccg

SEQ ID NO: 49542 - RNA, 32 nt, Homo Sapiens
ccucugccggucgggcagccagcagaggggga

SEQ ID NO: 49543 - RNA, 32 nt, Homo Sapiens
augccaaucuacaggcacucauugcuacugaa

SEQ ID NO: 49544 - RNA, 31 nt, Homo Sapiens
acccgugagccccagggcuugggaagccuga

SEQ ID NO: 49545 - RNA, 32 nt, Homo Sapiens
caggagcauugcuauaaagaguaggcaaaugg

SEQ ID NO: 49546 - RNA, 32 nt, Homo Sapiens
uauggacccaagucuaugcucaguuccacaga

SEQ ID NO: 49547 - RNA, 32 nt, Homo Sapiens
auucuugcggaaauuauagcuauauuaaaagu

SEQ ID NO: 49548 - RNA, 32 nt, Homo Sapiens
uauguauuuuuaaaauucaaaauagagcauuc

SEQ ID NO: 49549 - RNA, 32 nt, Homo Sapiens
cuuuggaauaaaugacuguaauguacauccug

SEQ ID NO: 49550 - RNA, 32 nt, Homo Sapiens
aaacuauuuguggcugugcugcuugagugacg

SEQ ID NO: 49551 - RNA, 32 nt, Homo Sapiens
uagauuuaguaaagcaggaagaucuguuguua

SEQ ID NO: 49552 - RNA, 32 nt, Homo Sapiens
auuaccagggaagacuggaaaaaagacugcug

SEQ ID NO: 49553 - RNA, 32 nt, Homo Sapiens
uucaugccuuggagagaacugugacguuuagg

SEQ ID NO: 49554 - RNA, 32 nt, Homo Sapiens
ugacaggcaguguucuuggggguggggcugca

SEQ ID NO: 49555 - RNA, 30 nt, Homo Sapiens
uuauauaucacugccacccucugaacuuug

SEQ ID NO: 49556 - RNA, 32 nt, Homo Sapiens
aacuacauuucccauaauccuuuguuccaggg

SEQ ID NO: 49557 - RNA, 32 nt, Homo Sapiens
uaagaagcaccaucaaagcucuauguaaaugc

SEQ ID NO: 49558 - RNA, 32 nt, Homo Sapiens
ucaaccaggaccagacccugugacuuacucgg

SEQ ID NO: 49559 - RNA, 32 nt, Homo Sapiens
gugcagauaugguauccggacacacacgugca

SEQ ID NO: 49560 - RNA, 32 nt, Homo Sapiens
ccgggcugcauccgagcugccacgcggcgugu

SEQ ID NO: 49561 - RNA, 32 nt, Homo Sapiens
ucuauauagcuauuagagauuaugacauagua

SEQ ID NO: 49562 - RNA, 32 nt, Homo Sapiens
cacuaguguuugucauuuauguaagucagguc

SEQ ID NO: 49563 - RNA, 32 nt, Homo Sapiens
gccaccuacugcggcggccgcugcugagacgc

SEQ ID NO: 49564 - RNA, 32 nt, Homo Sapiens
guucgcuggacgggaagaagggcugggccguc

SEQ ID NO: 49565 - RNA, 32 nt, Homo Sapiens
aaaaaacuaaacaaaaaaucccucuagguagu

SEQ ID NO: 49566 - RNA, 32 nt, Homo Sapiens
uuggucccgcacgcaaccuuuguggagccauc

SEQ ID NO: 49567 - RNA, 32 nt, Homo Sapiens
aaccaaucaaauaguuucuuugucuugcuccc

SEQ ID NO: 49568 - RNA, 32 nt, Homo Sapiens
aaugauuuauuuacaagauauuuacucaaaua

SEQ ID NO: 49569 - RNA, 32 nt, Homo Sapiens
ugcagggggcccggccuccgcugccgcgacac

SEQ ID NO: 49570 - RNA, 32 nt, Homo Sapiens
ccuuucccagccuguuugcgaaaugcuuuguc

SEQ ID NO: 49571 - RNA, 32 nt, Homo Sapiens
gguuuggcggggggccacagggaggggacccu

SEQ ID NO: 49572 - RNA, 32 nt, Homo Sapiens
ucgcggccaccaccuguaggaccuccucccac

SEQ ID NO: 49573 - RNA, 32 nt, Homo Sapiens
cagugccugacaucaccaacccuagucagcaa

SEQ ID NO: 49574 - RNA, 32 nt, Homo Sapiens
aagaggggcgggggcgggguccugggggccga

SEQ ID NO: 49575 - RNA, 32 nt, Homo Sapiens
uggcaaggggggcuacuuguguggcauaagcu

SEQ ID NO: 49576 - RNA, 32 nt, Homo Sapiens
gcuguagggggaggagacacuggcaggagaug

SEQ ID NO: 49577 - RNA, 32 nt, Homo Sapiens
aagcauguuuuccuccuucucuccuuugacac

SEQ ID NO: 49578 - RNA, 32 nt, Homo Sapiens
ugagcuccgcgggaacccggcgcggcugccug

SEQ ID NO: 49579 - RNA, 32 nt, Homo Sapiens
cgcagccucucuccccgccccggaucggagcc

SEQ ID NO: 49580 - RNA, 32 nt, Homo Sapiens
ccccacguccucuccuucucgccacuuauuau

SEQ ID NO: 49581 - RNA, 32 nt, Homo Sapiens
uucugucccuccccaccuuucucucccaauga

SEQ ID NO: 49582 - RNA, 32 nt, Homo Sapiens
gugaauugcuaagggccaaugcuggccuugga

SEQ ID NO: 49583 - RNA, 32 nt, Homo Sapiens
cuucugugucuagggagggguguggcucccuc

SEQ ID NO: 49584 - RNA, 32 nt, Homo Sapiens
uucuguuauuuuuacauuuucuugucagagaa

SEQ ID NO: 49585 - RNA, 32 nt, Homo Sapiens
ggagcggccccggcgccgcccauauccccggc

SEQ ID NO: 49586 - RNA, 32 nt, Homo Sapiens
uaauuaauauuuuuaucaccuugaauuugugu

SEQ ID NO: 49587 - RNA, 32 nt, Homo Sapiens
ggaggaggaguggccggaugccccacacaccg

SEQ ID NO: 49588 - RNA, 32 nt, Homo Sapiens
acuuguuugaaaauaaaucuuuauuuugaacu

SEQ ID NO: 49589 - RNA, 32 nt, Homo Sapiens
ggggccgccugccccuccuucuccagccucuu

SEQ ID NO: 49590 - RNA, 32 nt, Homo Sapiens
guguuuuaauuuccuuuuaagguuuggaagac

SEQ ID NO: 49591 - RNA, 32 nt, Homo Sapiens
ggacuugguccguggugacuuuuguagcacug

SEQ ID NO: 49592 - RNA, 32 nt, Homo Sapiens
cugggcggcgguggagauagcggcggugcugg

SEQ ID NO: 49593 - RNA, 32 nt, Homo Sapiens
agaugaugaugaugaauaguugguucuagcgc

SEQ ID NO: 49594 - RNA, 32 nt, Homo Sapiens
agccuggccccggagccccgggugcgcccugg

SEQ ID NO: 49595 - RNA, 32 nt, Homo Sapiens
acacugcagacaccccuuuccagccacaaucc

SEQ ID NO: 49596 - RNA, 32 nt, Homo Sapiens
cagccauacguguaagcuuuuucuugaguguu

SEQ ID NO: 49597 - RNA, 30 nt, Homo Sapiens
ucaccauggcgaccgccgccggcagccgcg

SEQ ID NO: 49598 - RNA, 32 nt, Homo Sapiens
ggcucccccugucuccucuccugauuuccucc

SEQ ID NO: 49599 - RNA, 32 nt, Homo Sapiens
gacaugugaaaccuuuuuuaagauuuuucuca

SEQ ID NO: 49600 - RNA, 32 nt, Homo Sapiens
agcucucuuccauuuuacuuacugcuggcuuu

SEQ ID NO: 49601 - RNA, 32 nt, Homo Sapiens
agaggcucccucugccaagaaagcagagaucu

SEQ ID NO: 49602 - RNA, 32 nt, Homo Sapiens
uugccccagaagggagggugucugcacuaagg

SEQ ID NO: 49603 - RNA, 32 nt, Homo Sapiens
aaccucuuguuuuuuuaccaccuggugaauca

SEQ ID NO: 49604 - RNA, 32 nt, Homo Sapiens
uagagucugggcaaaauguuugguuuuuucuc

SEQ ID NO: 49605 - RNA, 32 nt, Homo Sapiens
uuuaaacaauguaugaaagauguauuuuaaau

SEQ ID NO: 49606 - RNA, 32 nt, Homo Sapiens
uaaaaauggguggaguggcaaguuuuacguua

SEQ ID NO: 49607 - RNA, 32 nt, Homo Sapiens
cuuucagcugucucugguaggccugaugaagc

SEQ ID NO: 49608 - RNA, 32 nt, Homo Sapiens
aaacucggacugcucucgucugccgugugguu

SEQ ID NO: 49609 - RNA, 32 nt, Homo Sapiens
gagcuugcugagcuccggggcccgcggagcuc

SEQ ID NO: 49610 - RNA, 32 nt, Homo Sapiens
ucauuuucaaaauuauuccauaaaguuaaaaa

SEQ ID NO: 49611 - RNA, 32 nt, Homo Sapiens
ugccuguugcgugcaagggaagugcuuguaaa

SEQ ID NO: 49612 - RNA, 31 nt, Homo Sapiens
uccaugugcagccucaucagagccucacccu

SEQ ID NO: 49613 - RNA, 32 nt, Homo Sapiens
aacagaggagugggagugcugcuguagaugac

SEQ ID NO: 49614 - RNA, 32 nt, Homo Sapiens
ucuguguauguguguauacacacacacagaca

SEQ ID NO: 49615 - RNA, 32 nt, Homo Sapiens
uagccacuaucaguguuaaguuucacauuuaa

SEQ ID NO: 49616 - RNA, 32 nt, Homo Sapiens
cugucagugccuccuuuauuaagggguucuuu

SEQ ID NO: 49617 - RNA, 32 nt, Homo Sapiens
agcagcagcagcagcacaauucuguguuuuau

SEQ ID NO: 49618 - RNA, 32 nt, Homo Sapiens
gagcuugaggugggagcggggcugggaggaag

SEQ ID NO: 49619 - RNA, 32 nt, Homo Sapiens
cucuaagacgcacugcaccaugugcuaguggc

SEQ ID NO: 49620 - RNA, 32 nt, Homo Sapiens
cacucuugacccccaccuccuacugucuuguc

SEQ ID NO: 49621 - RNA, 32 nt, Homo Sapiens
cuaggaggcucgccgcccgcgcccgcucguuc

SEQ ID NO: 49622 - RNA, 32 nt, Homo Sapiens
gaucguucucaggcccuccccccggaguacuu

SEQ ID NO: 49623 - RNA, 32 nt, Homo Sapiens
gcugcucggccgcggacacacgagggacgcgc

SEQ ID NO: 49624 - RNA, 32 nt, Homo Sapiens
cagcccugucccucacuguccucuguccuugg

SEQ ID NO: 49625 - RNA, 32 nt, Homo Sapiens
auucaaauauccagcaauuaaagacucaugag

SEQ ID NO: 49626 - RNA, 32 nt, Homo Sapiens
uauuuaugaagauaaugucagauguagacaaa

SEQ ID NO: 49627 - RNA, 32 nt, Homo Sapiens
aagugugagagaaggguuaagacuggcuuaca

SEQ ID NO: 49628 - RNA, 32 nt, Homo Sapiens
aucaagguaaagaaaugcgcuggggcuguuug

SEQ ID NO: 49629 - RNA, 32 nt, Homo Sapiens
accgaggcccacagggaagcagcugggagcuu

SEQ ID NO: 49630 - RNA, 32 nt, Homo Sapiens
cugugguuuuaauuuaauauuaauuuaagguu

SEQ ID NO: 49631 - RNA, 32 nt, Homo Sapiens
ugguuugcauauaaauaacaugaucauaggca

SEQ ID NO: 49632 - RNA, 32 nt, Homo Sapiens
uucaaucuuaauaucauuguaaaauuaagcug

SEQ ID NO: 49633 - RNA, 32 nt, Homo Sapiens
cgggaggggaggaggcccgagagaggcugcug

SEQ ID NO: 49634 - RNA, 27 nt, Homo Sapiens
caaucugccugcuucagccucccaaag

SEQ ID NO: 49635 - RNA, 32 nt, Homo Sapiens
uaacauaugagucuuauuuuuauuuauagaaa

SEQ ID NO: 49636 - RNA, 32 nt, Homo Sapiens
caugaacgcgaaguagcccauaaacagcagcu

SEQ ID NO: 49637 - RNA, 32 nt, Homo Sapiens
ccggccagcugccugcccucuugucugugcuu

SEQ ID NO: 49638 - RNA, 32 nt, Homo Sapiens
cuggaucgcggcggggggcggagguggggcgg

SEQ ID NO: 49639 - RNA, 32 nt, Homo Sapiens
aaccuguggaccgcaccuuggggggccuuccu

SEQ ID NO: 49640 - RNA, 32 nt, Homo Sapiens
auggcuuagcugugaccgcagcugcaaacucu

SEQ ID NO: 49641 - RNA, 32 nt, Homo Sapiens
guacuuugauuauuuuuauuucuuauacucug

SEQ ID NO: 49642 - RNA, 32 nt, Homo Sapiens
cagagaccuuuucucucccauaccaucacuga

SEQ ID NO: 49643 - RNA, 32 nt, Homo Sapiens
ccagaggcgcccagcaccuggagcucacugga

SEQ ID NO: 49644 - RNA, 32 nt, Homo Sapiens
ucuuucuuuucucuggaaauggguaacuucuu

SEQ ID NO: 49645 - RNA, 30 nt, Homo Sapiens
ccuucugccaccaugggggagcuuuuccgg

SEQ ID NO: 49646 - RNA, 32 nt, Homo Sapiens
ucccacaggacacgcacuggcacuaaauccac

SEQ ID NO: 49647 - RNA, 32 nt, Homo Sapiens
cgcgcucucagucuccuucgcagccuggcccc

SEQ ID NO: 49648 - RNA, 32 nt, Homo Sapiens
uucuggauagaguccugggagguccuuggcag

SEQ ID NO: 49649 - RNA, 32 nt, Homo Sapiens
uucccucuuggcagcuaaugggcucuuaccaa

SEQ ID NO: 49650 - RNA, 29 nt, Homo Sapiens
guagucguuuaaaaguaccacaaaaacug

SEQ ID NO: 49651 - RNA, 32 nt, Homo Sapiens
uucaucucauuucaaauguuuauggaagaagc

SEQ ID NO: 49652 - RNA, 32 nt, Homo Sapiens
cccacuccugcagcugcuggugcugcuucuua

SEQ ID NO: 49653 - RNA, 32 nt, Homo Sapiens
gccuaggcaagacagucgacgcgcucaccggc

SEQ ID NO: 49654 - RNA, 32 nt, Homo Sapiens
aacacuuucucuucuuguuucuccugcccacu

SEQ ID NO: 49655 - RNA, 32 nt, Homo Sapiens
gcacugcaacuuuggucaaugauaucuguuag

SEQ ID NO: 49656 - RNA, 32 nt, Homo Sapiens
uggugaccuggccucggccccucccccaaguc

SEQ ID NO: 49657 - RNA, 32 nt, Homo Sapiens
aaugagcaacucaagaugagaaaacugcucuu

SEQ ID NO: 49658 - RNA, 32 nt, Homo Sapiens
uccugcaugucccacaccauuuuuucaugacc

SEQ ID NO: 49659 - RNA, 32 nt, Homo Sapiens
augccaguggguuuuuuguuuuuguuuuugag

SEQ ID NO: 49660 - RNA, 32 nt, Homo Sapiens
ccuuucuaaaaguuugaggaauauuucaagcu

SEQ ID NO: 49661 - RNA, 32 nt, Homo Sapiens
aaacuaaaaaaaaaaaucauuuacuuggaaau

SEQ ID NO: 49662 - RNA, 32 nt, Homo Sapiens
gugccuuuaacgagagggugccugcuucgugc

SEQ ID NO: 49663 - RNA, 31 nt, Homo Sapiens
agcagagaaacuacucagguauauuaaagcg

SEQ ID NO: 49664 - RNA, 32 nt, Homo Sapiens
uuuacagagauaaauguaugugaauguuuaug

SEQ ID NO: 49665 - RNA, 32 nt, Homo Sapiens
gcaacucuaucccuaauauccacacaagguaa

SEQ ID NO: 49666 - RNA, 32 nt, Homo Sapiens
uauauuuaaccuguugccuuucugguccuuca

SEQ ID NO: 49667 - RNA, 32 nt, Homo Sapiens
ggcgccgcaugugucuccgcggcggcugcagc

SEQ ID NO: 49668 - RNA, 32 nt, Homo Sapiens
ccgcggacuuaaagcaauaaauguagaucuuc

SEQ ID NO: 49669 - RNA, 31 nt, Homo Sapiens
ugacaugaaaauaaagcucacuguuacucgc

SEQ ID NO: 49670 - RNA, 32 nt, Homo Sapiens
gauccacucccggcuguucccccggagggucc

SEQ ID NO: 49671 - RNA, 32 nt, Homo Sapiens
acgguugucguccucagcggcaggagccaguu

SEQ ID NO: 49672 - RNA, 32 nt, Homo Sapiens
uacuauccuguucuucucuccucuaauccccg

SEQ ID NO: 49673 - RNA, 32 nt, Homo Sapiens
cugugcuaagacugccuaugaaggaaaauauu

SEQ ID NO: 49674 - RNA, 32 nt, Homo Sapiens
gaacuguagaagacccugaggacuccugggcu

SEQ ID NO: 49675 - RNA, 32 nt, Homo Sapiens
aggcgcaucugacucggcacccccugcaggca

SEQ ID NO: 49676 - RNA, 32 nt, Homo Sapiens
guguaucacuguggauuaauucuagauaucuu

SEQ ID NO: 49677 - RNA, 32 nt, Homo Sapiens
caugcaugaaggaaacugaacuugagguggcc

SEQ ID NO: 49678 - RNA, 32 nt, Homo Sapiens
guaugcagccguugccagacacugccccauac

SEQ ID NO: 49679 - RNA, 32 nt, Homo Sapiens
agccaaggcaacaugcagagggagccaaacca

SEQ ID NO: 49680 - RNA, 32 nt, Homo Sapiens
auugacgcccccggucuuugccucugagcggg

SEQ ID NO: 49681 - RNA, 32 nt, Homo Sapiens
uaagaucuuaauauugauaguuucacauccag

SEQ ID NO: 49682 - RNA, 32 nt, Homo Sapiens
cuggaggaagggggcuguccgucaugcucacc

SEQ ID NO: 49683 - RNA, 32 nt, Homo Sapiens
uuuucuucacuacuuuuucuaucuuaauauag

SEQ ID NO: 49684 - RNA, 32 nt, Homo Sapiens
acaggcgcacaccaccacacacagcuaauuuu

SEQ ID NO: 49685 - RNA, 32 nt, Homo Sapiens
acuauauaaaaagugaaagcgacaaauuccac

SEQ ID NO: 49686 - RNA, 32 nt, Homo Sapiens
ggcacuguagcaccgcuacuccgugccgcgcc

SEQ ID NO: 49687 - RNA, 32 nt, Homo Sapiens
agcguuucuucauggggugcuccagggggugc

SEQ ID NO: 49688 - RNA, 32 nt, Homo Sapiens
cgagcggacggcgggggcggccggagccucuc

SEQ ID NO: 49689 - RNA, 32 nt, Homo Sapiens
uuaucggaagcagugccuuccauaauuaugac

SEQ ID NO: 49690 - RNA, 32 nt, Homo Sapiens
accucccggacggggcggcuggccgggugggg

SEQ ID NO: 49691 - RNA, 32 nt, Homo Sapiens
cagcuuaacuguaucuggagccaggaccugaa

SEQ ID NO: 49692 - RNA, 32 nt, Homo Sapiens
ccucgcgccccgccgcagccccggccaaccga

SEQ ID NO: 49693 - RNA, 32 nt, Homo Sapiens
guuuagaccuugguuugguaguucuuguuuuu

SEQ ID NO: 49694 - RNA, 32 nt, Homo Sapiens
cacuuaagauugauuggagauuuuaaaacugg

SEQ ID NO: 49695 - RNA, 32 nt, Homo Sapiens
cccucucugagagaagccgcgaggggaggccg

SEQ ID NO: 49696 - RNA, 27 nt, Homo Sapiens
agucacuauugauucugguuauaaaga

SEQ ID NO: 49697 - RNA, 32 nt, Homo Sapiens
cucucauggauuccacagcaaauaaaacugua

SEQ ID NO: 49698 - RNA, 32 nt, Homo Sapiens
uacuaccgcgcgcguggccagggccggguugg

SEQ ID NO: 49699 - RNA, 32 nt, Homo Sapiens
cuucggcuggacggaggcugccuccucacgcg

SEQ ID NO: 49700 - RNA, 32 nt, Homo Sapiens
cauucaucccuuugguuugggaucucaggaau

SEQ ID NO: 49701 - RNA, 31 nt, Homo Sapiens
aaaacucuugguaauuuuugaagauagacug

SEQ ID NO: 49702 - RNA, 32 nt, Homo Sapiens
cgggugcugagcuauggcaaagggcagcgaag

SEQ ID NO: 49703 - RNA, 32 nt, Homo Sapiens
cccauuugcuuugguuuuguccugccuucucc

SEQ ID NO: 49704 - RNA, 32 nt, Homo Sapiens
gcaaccggccccagcagcagguccuggugcug

SEQ ID NO: 49705 - RNA, 32 nt, Homo Sapiens
ggguuuauuccguugcccacuccgcgauauuu

SEQ ID NO: 49706 - RNA, 32 nt, Homo Sapiens
aguuaugaccaagggaauuaugcuguucauuu

SEQ ID NO: 49707 - RNA, 32 nt, Homo Sapiens
agcugugaugauguggaaaugagguuggggga

SEQ ID NO: 49708 - RNA, 32 nt, Homo Sapiens
uucaacacuuacuuuugguuucaaugguggua

SEQ ID NO: 49709 - RNA, 32 nt, Homo Sapiens
uucacauaacaaauaaaauagcagaguucccu

SEQ ID NO: 49710 - RNA, 32 nt, Homo Sapiens
accacaggucuggguuggcgcuuggguggagc

SEQ ID NO: 49711 - RNA, 32 nt, Homo Sapiens
gcaaaugccugccaaauuuuagauuuaccuug

SEQ ID NO: 49712 - RNA, 32 nt, Homo Sapiens
uagauuuuggucuuggccccaacggguucccc

SEQ ID NO: 49713 - RNA, 32 nt, Homo Sapiens
gugggcugguguaucuggaaagagggaagacu

SEQ ID NO: 49714 - RNA, 32 nt, Homo Sapiens
gguagguacuuugaaucauuacgaucuaucua

SEQ ID NO: 49715 - RNA, 32 nt, Homo Sapiens
gcuccugggccccuccucccuucaaggauugc

SEQ ID NO: 49716 - RNA, 32 nt, Homo Sapiens
uuguuaugacucuugugucuuuugucacaaaa

SEQ ID NO: 49717 - RNA, 32 nt, Homo Sapiens
uacaccuggcacuggccuuggccacccacuuc

SEQ ID NO: 49718 - RNA, 32 nt, Homo Sapiens
gcccggacggccugggguugcugcccgucagu

SEQ ID NO: 49719 - RNA, 32 nt, Homo Sapiens
ggucggagauggagccgggugcggcuguacca

SEQ ID NO: 49720 - RNA, 32 nt, Homo Sapiens
agcagagaucacauuucagagaggugagagug

SEQ ID NO: 49721 - RNA, 32 nt, Homo Sapiens
augaaggugaacuggcauggcccgaucacugu

SEQ ID NO: 49722 - RNA, 32 nt, Homo Sapiens
augccuagaacaaagggcaaagggauauggaa

SEQ ID NO: 49723 - RNA, 32 nt, Homo Sapiens
agugauugugguucuuggaaaagcagaaggaa

SEQ ID NO: 49724 - RNA, 32 nt, Homo Sapiens
gauaaagcuggguuacugcugcuuuuggugcu

SEQ ID NO: 49725 - RNA, 32 nt, Homo Sapiens
gaggccgcgggugggcccgaggcgcaagagga

SEQ ID NO: 49726 - RNA, 32 nt, Homo Sapiens
ucaccccugccacauuucucucuucucccuca

SEQ ID NO: 49727 - RNA, 32 nt, Homo Sapiens
uuaacauuaauuuuaaugggaauacucaauga

SEQ ID NO: 49728 - RNA, 32 nt, Homo Sapiens
gcaacauaaucccagcacuuuggaacgcuggg

SEQ ID NO: 49729 - RNA, 32 nt, Homo Sapiens
ucugagaauaccaugaaagacauuaugccugc

SEQ ID NO: 49730 - RNA, 32 nt, Homo Sapiens
gaaagaagacucucuaaaaacaucuccuuccu

SEQ ID NO: 49731 - RNA, 32 nt, Homo Sapiens
gaaauugcugaauaaggaguagcuuguuacau

SEQ ID NO: 49732 - RNA, 32 nt, Homo Sapiens
ccuacccugacauccagaaacaauggccucca

SEQ ID NO: 49733 - RNA, 32 nt, Homo Sapiens
cacucuauuucuguuuuaauguuuuauccaau

SEQ ID NO: 49734 - RNA, 32 nt, Homo Sapiens
uaaacuguucccucugggccaaggcggagggc

SEQ ID NO: 49735 - RNA, 32 nt, Homo Sapiens
uaauuauccaacagaaaccccuaggucauagu

SEQ ID NO: 49736 - RNA, 32 nt, Homo Sapiens
gaugacacaggcugacucauggccgggcugac

SEQ ID NO: 49737 - RNA, 32 nt, Homo Sapiens
auccagaggggguggggcagaggcggagucug

SEQ ID NO: 49738 - RNA, 30 nt, Homo Sapiens
cagggguggcccugagcgccggcgacaccu

SEQ ID NO: 49739 - RNA, 32 nt, Homo Sapiens
uggcccccugcccuccucucccucccagaugg

SEQ ID NO: 49740 - RNA, 32 nt, Homo Sapiens
aauuaguguuugucuagcauguuuguuuaauc

SEQ ID NO: 49741 - RNA, 32 nt, Homo Sapiens
cugggggugcgcgccugcgaccugcccgccug

SEQ ID NO: 49742 - RNA, 32 nt, Homo Sapiens
gaggucaaggccgagagagggcccgugucccc

SEQ ID NO: 49743 - RNA, 32 nt, Homo Sapiens
uagggcugcccgccgcgcugccugcgccggac

SEQ ID NO: 49744 - RNA, 32 nt, Homo Sapiens
gacuccgagugccuuacaucccugcagccccu

SEQ ID NO: 49745 - RNA, 32 nt, Homo Sapiens
gaggccccagacuucacccccagcccacugcu

SEQ ID NO: 49746 - RNA, 32 nt, Homo Sapiens
augaauuacguguguguuuauacguugugugu

SEQ ID NO: 49747 - RNA, 32 nt, Homo Sapiens
ccaggagcucacggaggcggcaccgcucccga

SEQ ID NO: 49748 - RNA, 32 nt, Homo Sapiens
uauuuaguuuuuguaauuuauuuucgauuuca

SEQ ID NO: 49749 - RNA, 32 nt, Homo Sapiens
caccuggaacuaaaagggauacuauuuucuaa

SEQ ID NO: 49750 - RNA, 32 nt, Homo Sapiens
ggaugcugaggugggagaaucaccugagccug

SEQ ID NO: 49751 - RNA, 32 nt, Homo Sapiens
ugaaucuggaaagcuaagagaauuagagguca

SEQ ID NO: 49752 - RNA, 32 nt, Homo Sapiens
uacuuucucuacagcuuuucauguaaauuagu

SEQ ID NO: 49753 - RNA, 32 nt, Homo Sapiens
ucugucugucugucuggcuggcaggcuggcuu

SEQ ID NO: 49754 - RNA, 32 nt, Homo Sapiens
gaaacagccaaggugacuuaagggcagagcgc

SEQ ID NO: 49755 - RNA, 32 nt, Homo Sapiens
uguuguguguaaucuuuuuuuuuucuuuuucu

SEQ ID NO: 49756 - RNA, 32 nt, Homo Sapiens
auuuuggugucuguuaauaaaguuuuauugga

SEQ ID NO: 49757 - RNA, 32 nt, Homo Sapiens
aaauguacaaaauaaaguuacauugcuggucu

SEQ ID NO: 49758 - RNA, 32 nt, Homo Sapiens
cggccgccugcgcgcggcgggguuuggaaaua

SEQ ID NO: 49759 - RNA, 32 nt, Homo Sapiens
cuaauucucaacaugcuaaacauuaacuacaa

SEQ ID NO: 49760 - RNA, 32 nt, Homo Sapiens
gagcucuggugauaaggacaugaugcuuuuac

SEQ ID NO: 49761 - RNA, 32 nt, Homo Sapiens
gagaggaguguggaaggguugggggaagagcu

SEQ ID NO: 49762 - RNA, 32 nt, Homo Sapiens
acgcgccucggggaacagccuggcccaaagcc

SEQ ID NO: 49763 - RNA, 32 nt, Homo Sapiens
cuauaggggcuguaaaggaauuaaacuauuca

SEQ ID NO: 49764 - RNA, 32 nt, Homo Sapiens
ggcugcuccuucccugccaccgcugcugcuuc

SEQ ID NO: 49765 - RNA, 32 nt, Homo Sapiens
uguaauuuaaagauuacugcaaauaucuuuac

SEQ ID NO: 49766 - RNA, 32 nt, Homo Sapiens
uauuccagguccuggggugugucuguccucau

SEQ ID NO: 49767 - RNA, 31 nt, Homo Sapiens
ccucaagugaucugccugccucguccuccca

SEQ ID NO: 49768 - RNA, 32 nt, Homo Sapiens
ugcagcaaggcacagcugccugaucaaaccag

SEQ ID NO: 49769 - RNA, 32 nt, Homo Sapiens
agagcugggugucaagagggucugaggaaucc

SEQ ID NO: 49770 - RNA, 32 nt, Homo Sapiens
ccuacugcccaugaacggggcccucaagcguc

SEQ ID NO: 49771 - RNA, 32 nt, Homo Sapiens
gcagcaucuucagaacuuguccugaugguguc

SEQ ID NO: 49772 - RNA, 32 nt, Homo Sapiens
ccagacgcacaccagcaggaugacaaacguag

SEQ ID NO: 49773 - RNA, 32 nt, Homo Sapiens
agcagaaggggcgggcccgggccugggauugg

SEQ ID NO: 49774 - RNA, 32 nt, Homo Sapiens
aggaacacuguaaaaugccagaagcaggugaa

SEQ ID NO: 49775 - RNA, 32 nt, Homo Sapiens
acuagagcggcccuuccagcuaccuccgggua

SEQ ID NO: 49776 - RNA, 32 nt, Homo Sapiens
augaagaggaguacacagaacacauaauucag

SEQ ID NO: 49777 - RNA, 32 nt, Homo Sapiens
gcugcccuaaaauguauaauuagugaaaaauu

SEQ ID NO: 49778 - RNA, 32 nt, Homo Sapiens
uagccaggcauggaggugggcgccuguagucc

SEQ ID NO: 49779 - RNA, 32 nt, Homo Sapiens
cugcugggcucugccuuaaacacacauugcag

SEQ ID NO: 49780 - RNA, 32 nt, Homo Sapiens
gucgcgacccugguccggaccugaccugaauu

SEQ ID NO: 49781 - RNA, 32 nt, Homo Sapiens
agauuagguuugcgggggucugagucuauguu

SEQ ID NO: 49782 - RNA, 32 nt, Homo Sapiens
uccacuauaucuguuuuccucuuaguucgcca

SEQ ID NO: 49783 - RNA, 32 nt, Homo Sapiens
uggugcuuaaaauggaagucgauauuaaugga

SEQ ID NO: 49784 - RNA, 32 nt, Homo Sapiens
agcuggcaagcaggauucugugucucuggguu

SEQ ID NO: 49785 - RNA, 32 nt, Homo Sapiens
gaugggcagaaucuguuuuggaucuccggguu

SEQ ID NO: 49786 - RNA, 32 nt, Homo Sapiens
ucgaguccgcccgugcgggcgcagggacccga

SEQ ID NO: 49787 - RNA, 32 nt, Homo Sapiens
acagaguaacgaugaagucaugagaggagguu

SEQ ID NO: 49788 - RNA, 32 nt, Homo Sapiens
guaucaauguuauauaacuauguaauaauugu

SEQ ID NO: 49789 - RNA, 32 nt, Homo Sapiens
caucccuccuucccuacccccacuggaauauu

SEQ ID NO: 49790 - RNA, 30 nt, Homo Sapiens
gcagauggagaccugccgccggcucaucac

SEQ ID NO: 49791 - RNA, 32 nt, Homo Sapiens
ugugaagcaaggaaaacaaauaauuuagcucu

SEQ ID NO: 49792 - RNA, 32 nt, Homo Sapiens
gggugcagccaggccuggcucgagaugccgaa

SEQ ID NO: 49793 - RNA, 32 nt, Homo Sapiens
cgcgcacgugggaaccgccgcagcuccacacu

SEQ ID NO: 49794 - RNA, 32 nt, Homo Sapiens
gaucuuuguucuauaacuguaaguggagaaga

SEQ ID NO: 49795 - RNA, 32 nt, Homo Sapiens
cacugcagcugaggacgcaguggacagaagug

SEQ ID NO: 49796 - RNA, 32 nt, Homo Sapiens
cauuuuugauaaagcacuggaggucuuauugc

SEQ ID NO: 49797 - RNA, 32 nt, Homo Sapiens
ggaaacuacaugaagucaccguuacaguaacu

SEQ ID NO: 49798 - RNA, 32 nt, Homo Sapiens
agugugaggaagaggcugucugugucauuaug

SEQ ID NO: 49799 - RNA, 32 nt, Homo Sapiens
aaacuaccccucccugggaucccgcuccucuu

SEQ ID NO: 49800 - RNA, 32 nt, Homo Sapiens
ucacauuuuaucaggguucauguuauaauuga

SEQ ID NO: 49801 - RNA, 32 nt, Homo Sapiens
ccguggagccgcggcuuugcccgucuccucug

SEQ ID NO: 49802 - RNA, 32 nt, Homo Sapiens
auggagggugacugaggugcugaccucaaugc

SEQ ID NO: 49803 - RNA, 32 nt, Homo Sapiens
ugugagagugcacagugccacuucgccccaug

SEQ ID NO: 49804 - RNA, 32 nt, Homo Sapiens
ugugagccacugcgccgggccuaauauaguuu

SEQ ID NO: 49805 - RNA, 32 nt, Homo Sapiens
aguggccaggccugugucaugugcuaauuccu

SEQ ID NO: 49806 - RNA, 32 nt, Homo Sapiens
uggggacccagcuguacauauguggauaagcu

SEQ ID NO: 49807 - RNA, 32 nt, Homo Sapiens
ccgcaaaacaauguguguugugagccaggacg

SEQ ID NO: 49808 - RNA, 32 nt, Homo Sapiens
aaggagaggagcugcuaaaugggucguguguu

SEQ ID NO: 49809 - RNA, 32 nt, Homo Sapiens
cuccuugccucccuuccacccgugcugccauc

SEQ ID NO: 49810 - RNA, 32 nt, Homo Sapiens
agcugugaucaucccuagaaagagggaaggag

SEQ ID NO: 49811 - RNA, 32 nt, Homo Sapiens
aaguguauuuuuaaguucccauuugaaauugc

SEQ ID NO: 49812 - RNA, 32 nt, Homo Sapiens
ucaccaaauaugaauuuuuagggccagcugug

SEQ ID NO: 49813 - RNA, 32 nt, Homo Sapiens
agucauaaugaugugacugcuuagccccuaaa

SEQ ID NO: 49814 - RNA, 32 nt, Homo Sapiens
cucaaaaggcaaagucuacuauauuauaauca

SEQ ID NO: 49815 - RNA, 32 nt, Homo Sapiens
gacaaucuaggaaaaguggaacaaagaaugau

SEQ ID NO: 49816 - RNA, 32 nt, Homo Sapiens
cagcggccgcgguggguucuucagguuaucuu

SEQ ID NO: 49817 - RNA, 32 nt, Homo Sapiens
ccaccugccgcaagaagcacuccacccgcaug

SEQ ID NO: 49818 - RNA, 32 nt, Homo Sapiens
ggcacguggaggaggagcccagaguugggcac

SEQ ID NO: 49819 - RNA, 32 nt, Homo Sapiens
gcagggaucccuccuccuccaggggaucuugg

SEQ ID NO: 49820 - RNA, 32 nt, Homo Sapiens
gucuucacaacacaggcacacaauuucagucc

SEQ ID NO: 49821 - RNA, 32 nt, Homo Sapiens
ucguuguuuuuaaguuuuuaaguuuuaaaaac

SEQ ID NO: 49822 - RNA, 32 nt, Homo Sapiens
cgcccgcagcccgguaccggcuccuccugggc

SEQ ID NO: 49823 - RNA, 32 nt, Homo Sapiens
gauaaauccaucacuauaauaaaaccgaaggu

SEQ ID NO: 49824 - RNA, 32 nt, Homo Sapiens
cuaauucauuuucucuuuaguguuaguagacu

SEQ ID NO: 49825 - RNA, 32 nt, Homo Sapiens
ugcuccaucagcugccgcacccgccgccuccc

SEQ ID NO: 49826 - RNA, 32 nt, Homo Sapiens
gaacacugcugggcacacucuccagcucaaua

SEQ ID NO: 49827 - RNA, 32 nt, Homo Sapiens
gcagcaacagcaaaucacgaccacugauagau

SEQ ID NO: 49828 - RNA, 32 nt, Homo Sapiens
uccugcguuuccuuugccauuuauuuauucuu

SEQ ID NO: 49829 - RNA, 32 nt, Homo Sapiens
agaaaaaagccagacgagaaacgugaauuuuu

SEQ ID NO: 49830 - RNA, 32 nt, Homo Sapiens
agauaauugaggggcgugucugggggcggggg

SEQ ID NO: 49831 - RNA, 32 nt, Homo Sapiens
uuuucuuuucuuuaaauugguguuuccuugua

SEQ ID NO: 49832 - RNA, 32 nt, Homo Sapiens
gagaagaauccgagauuucaccaccugacucc

SEQ ID NO: 49833 - RNA, 32 nt, Homo Sapiens
acagagaucagagggagacacagaaagugaga

SEQ ID NO: 49834 - RNA, 32 nt, Homo Sapiens
ugcgugacaaaguggacguagaacucccccau

SEQ ID NO: 49835 - RNA, 32 nt, Homo Sapiens
cuguucuucuuuucuucuuucauuucaguggc

SEQ ID NO: 49836 - RNA, 32 nt, Homo Sapiens
auccaaugaacuguauaagccuuuaaaagcag

SEQ ID NO: 49837 - RNA, 32 nt, Homo Sapiens
ccagucagcuccccuuuaaaaaucuaagguau

SEQ ID NO: 49838 - RNA, 32 nt, Homo Sapiens
cccagcgucggggcucugugccagcuuacucu

SEQ ID NO: 49839 - RNA, 32 nt, Homo Sapiens
cagcuuaauguuuuugauaauuuuauauuaug

SEQ ID NO: 49840 - RNA, 32 nt, Homo Sapiens
aacaaaggcuccguuuccuuucugugagagaa

SEQ ID NO: 49841 - RNA, 32 nt, Homo Sapiens
ccccgaaaagcacuucgccuuguccugggauc

SEQ ID NO: 49842 - RNA, 32 nt, Homo Sapiens
acaggucugcuguuaagggauuuuaaauugug

SEQ ID NO: 49843 - RNA, 32 nt, Homo Sapiens
cucaaaauuggaacucuuguucuaauucaguu

SEQ ID NO: 49844 - RNA, 32 nt, Homo Sapiens
gcaaaggaauuuccucucaggacgugccgggu

SEQ ID NO: 49845 - RNA, 32 nt, Homo Sapiens
cugcuucacggccuucaccagcccugauggag

SEQ ID NO: 49846 - RNA, 32 nt, Homo Sapiens
gucccuucgucuccccgcggaauggggccggc

SEQ ID NO: 49847 - RNA, 32 nt, Homo Sapiens
aauacuuuuuaaaguuuaccaucaagucuuuu

SEQ ID NO: 49848 - RNA, 32 nt, Homo Sapiens
acaauuaauuuuagaacauuuucaucaccccu

SEQ ID NO: 49849 - RNA, 32 nt, Homo Sapiens
ugccugggccgcgccagcgccgcuccaccgag

SEQ ID NO: 49850 - RNA, 32 nt, Homo Sapiens
uuauaaucauuaaagcacuuucuuggcaggaa

SEQ ID NO: 49851 - RNA, 32 nt, Homo Sapiens
gugaggccugguuuuuguuuucaguuucuauu

SEQ ID NO: 49852 - RNA, 32 nt, Homo Sapiens
aggcaaauuggaaauacacagaugauuaaaca

SEQ ID NO: 49853 - RNA, 32 nt, Homo Sapiens
agcuuuugcauuuaagcaggaguaaggaagaa

SEQ ID NO: 49854 - RNA, 32 nt, Homo Sapiens
aggauaugacacgcgauaucgcagggaguaga

SEQ ID NO: 49855 - RNA, 32 nt, Homo Sapiens
cagggggcgggggaucccgagcaaaagccuuc

SEQ ID NO: 49856 - RNA, 32 nt, Homo Sapiens
uguuucgagcugugagaugucaauuucuacaa

SEQ ID NO: 49857 - RNA, 32 nt, Homo Sapiens
auucccguaaacaaaacaaccaucaugucuuc

SEQ ID NO: 49858 - RNA, 32 nt, Homo Sapiens
cugcuucugugcugugggccccgggguugcca

SEQ ID NO: 49859 - RNA, 32 nt, Homo Sapiens
ugccugauccccugcuggcugggggcagcucc

SEQ ID NO: 49860 - RNA, 32 nt, Homo Sapiens
agcuccgccucccggguucacgccauucuccu

SEQ ID NO: 49861 - RNA, 32 nt, Homo Sapiens
auggcggcuccagaggucauuccucccccgga

SEQ ID NO: 49862 - RNA, 32 nt, Homo Sapiens
cuuaucaaggcgguuauaugcauauuacucca

SEQ ID NO: 49863 - RNA, 32 nt, Homo Sapiens
guuuccugauugugucaaugugaaaguuaaau

SEQ ID NO: 49864 - RNA, 32 nt, Homo Sapiens
guaaucggauggcuaccuucuacauuuuguau

SEQ ID NO: 49865 - RNA, 32 nt, Homo Sapiens
uggggugaacugauuuugaucuucuugucuag

SEQ ID NO: 49866 - RNA, 32 nt, Homo Sapiens
ggagcgguucugcggccuccucgggcuucuug

SEQ ID NO: 49867 - RNA, 32 nt, Homo Sapiens
cgcagggaaaagggcuggcuucuagguccccg

SEQ ID NO: 49868 - RNA, 32 nt, Homo Sapiens
ucuuuguaugucgaauccagugcacucaaguu

SEQ ID NO: 49869 - RNA, 32 nt, Homo Sapiens
aacuuuaaaggauucuguaugccaagugaaaa

SEQ ID NO: 49870 - RNA, 32 nt, Homo Sapiens
uuguuaaauaaugauauguaacuuuuuaacuu

SEQ ID NO: 49871 - RNA, 32 nt, Homo Sapiens
cgggcaucugcaggguggagggggccaccauc

SEQ ID NO: 49872 - RNA, 31 nt, Homo Sapiens
cuuuuuccuuugacuucuaaccaacuaaaag

SEQ ID NO: 49873 - RNA, 32 nt, Homo Sapiens
ucacugcagccucauacuccugggcucaagca

SEQ ID NO: 49874 - RNA, 32 nt, Homo Sapiens
gucacuguuuuaagaucuugacucuucauuug

SEQ ID NO: 49875 - RNA, 32 nt, Homo Sapiens
gguaugaaugaaggugugagugccugucuuga

SEQ ID NO: 49876 - RNA, 32 nt, Homo Sapiens
cggugucccuggaugugaagcucacacugaug

SEQ ID NO: 49877 - RNA, 31 nt, Homo Sapiens
gagccccggcacugccuggcugcgagcacau

SEQ ID NO: 49878 - RNA, 32 nt, Homo Sapiens
cccacucugcugccccaccccauccuccaauu

SEQ ID NO: 49879 - RNA, 32 nt, Homo Sapiens
ugcuggcucgggcugcaguucucucauggcuc

SEQ ID NO: 49880 - RNA, 32 nt, Homo Sapiens
uaccuguuauaccagcacuuugggaggcugaa

SEQ ID NO: 49881 - RNA, 32 nt, Homo Sapiens
uggaaaaaauuucaagggcuuagaaggggaca

SEQ ID NO: 49882 - RNA, 32 nt, Homo Sapiens
gcccggcagucuggcgaccaccuugcgggaaa

SEQ ID NO: 49883 - RNA, 31 nt, Homo Sapiens
aauagaacagcucauagcucgagccagucca

SEQ ID NO: 49884 - RNA, 32 nt, Homo Sapiens
aaaaugcaggcauagugcuuggaccaaucagc

SEQ ID NO: 49885 - RNA, 31 nt, Homo Sapiens
ccuuucuuacuggaaaaguccauggaaccau

SEQ ID NO: 49886 - RNA, 32 nt, Homo Sapiens
gaaacaacccucaacuugaggaaguugagagc

SEQ ID NO: 49887 - RNA, 32 nt, Homo Sapiens
guguggaaagucuuuuaauaugcaaaggaagu

SEQ ID NO: 49888 - RNA, 32 nt, Homo Sapiens
gcgagugggcacgucucugaaugugaggucuc

SEQ ID NO: 49889 - RNA, 32 nt, Homo Sapiens
ucauaagcaggugucaguggacaguuuaagca

SEQ ID NO: 49890 - RNA, 32 nt, Homo Sapiens
aucguagaaaauuugcuuuaauuaauuaagua

SEQ ID NO: 49891 - RNA, 32 nt, Homo Sapiens
agaaaaucuaauguuuuaagaagguuuaugaa

SEQ ID NO: 49892 - RNA, 32 nt, Homo Sapiens
agaaaaauauguuuauuuuaauuuuaauuuuu

SEQ ID NO: 49893 - RNA, 32 nt, Homo Sapiens
uacugaaucuauauuuccauuuguaagugauu

SEQ ID NO: 49894 - RNA, 32 nt, Homo Sapiens
gggagaaccaguccuuccuuuugacccacccc

SEQ ID NO: 49895 - RNA, 32 nt, Homo Sapiens
cagccugagaggagucaagacacaauacugga

SEQ ID NO: 49896 - RNA, 32 nt, Homo Sapiens
aggcagcagacacgcccucuuaguagggacuu

SEQ ID NO: 49897 - RNA, 32 nt, Homo Sapiens
agcaagcccugguggcagcgccaggguccagu

SEQ ID NO: 49898 - RNA, 32 nt, Homo Sapiens
aaagcaaucugagagauuugaauagaaaaagu

SEQ ID NO: 49899 - RNA, 32 nt, Homo Sapiens
uugaauguugacccucacagggagggauaauu

SEQ ID NO: 49900 - RNA, 32 nt, Homo Sapiens
ccuagaagauagguuaaggaaauauauuauua

SEQ ID NO: 49901 - RNA, 32 nt, Homo Sapiens
cagcugcugugaccccagcaccuuccucagga

SEQ ID NO: 49902 - RNA, 32 nt, Homo Sapiens
gcacgggagccguccugacuguccuuggccgc

SEQ ID NO: 49903 - RNA, 32 nt, Homo Sapiens
ugcuucucugucuccgagaccggaguacuugg

SEQ ID NO: 49904 - RNA, 32 nt, Homo Sapiens
auucugcugucugcucuucucuaaugcugcau

SEQ ID NO: 49905 - RNA, 32 nt, Homo Sapiens
accuaugaguuuuguuuuguuuuguuuuguuu

SEQ ID NO: 49906 - RNA, 32 nt, Homo Sapiens
aguaggcccucccauuggcuuuggccaggcca

SEQ ID NO: 49907 - RNA, 32 nt, Homo Sapiens
gaggcccugugcauuucuuuuguuuguuuguu

SEQ ID NO: 49908 - RNA, 32 nt, Homo Sapiens
uaaauuacuauguaaacaaaaaguagauaguu

SEQ ID NO: 49909 - RNA, 32 nt, Homo Sapiens
guagauaaucacauuuucugggcccuguaaaa

SEQ ID NO: 49910 - RNA, 31 nt, Homo Sapiens
caccaggggcacugccgucauggcaggggac

SEQ ID NO: 49911 - RNA, 32 nt, Homo Sapiens
guccugccucuggccuguguccugggugugua

SEQ ID NO: 49912 - RNA, 32 nt, Homo Sapiens
aguaccuucuuauauuuuuuuauagaacugua

SEQ ID NO: 49913 - RNA, 32 nt, Homo Sapiens
gcuacccgccagcguguccgcggcgccgccgc

SEQ ID NO: 49914 - RNA, 32 nt, Homo Sapiens
caucaagaagcuugccuugaccaacgacucaa

SEQ ID NO: 49915 - RNA, 32 nt, Homo Sapiens
agggccccuguuccaaugaaaaacagaacaca

SEQ ID NO: 49916 - RNA, 32 nt, Homo Sapiens
uccauuauuacuugggucuuuacuucugggaa

SEQ ID NO: 49917 - RNA, 32 nt, Homo Sapiens
aagguuggcagaaggaggcuguucaaggcugu

SEQ ID NO: 49918 - RNA, 32 nt, Homo Sapiens
uagcuccagccaggccagaccgagggcugcug

SEQ ID NO: 49919 - RNA, 32 nt, Homo Sapiens
guucacuggaucccuccucuaggggccugggg

SEQ ID NO: 49920 - RNA, 32 nt, Homo Sapiens
cccgccaggagcuucuucguuccugcgcauau

SEQ ID NO: 49921 - RNA, 32 nt, Homo Sapiens
cuacagaucuguuauaacuauauuguguuggu

SEQ ID NO: 49922 - RNA, 32 nt, Homo Sapiens
uuaaacgguccacaacucuuacuaaacauaag

SEQ ID NO: 49923 - RNA, 32 nt, Homo Sapiens
agaauugcuuggaccuaggagguggagguugc

SEQ ID NO: 49924 - RNA, 32 nt, Homo Sapiens
ugaacugggacagaagcagaggaggcugccug

SEQ ID NO: 49925 - RNA, 32 nt, Homo Sapiens
acauucacggagccggccggccucccgcccug

SEQ ID NO: 49926 - RNA, 32 nt, Homo Sapiens
gacucuugugucuuuugucacaaaacaaugau

SEQ ID NO: 49927 - RNA, 32 nt, Homo Sapiens
uggcagccaagagccaucugaagccaccucuc

SEQ ID NO: 49928 - RNA, 32 nt, Homo Sapiens
uuucgacagucaacucacuuaaaaauccacca

SEQ ID NO: 49929 - RNA, 32 nt, Homo Sapiens
gcaggcgcuggcggcccccucgcggugcccgu

SEQ ID NO: 49930 - RNA, 32 nt, Homo Sapiens
ugucaugaagauaauggaauuuggagucucaa

SEQ ID NO: 49931 - RNA, 32 nt, Homo Sapiens
ccacccccaaaauaaaaaaauguauauauuca

SEQ ID NO: 49932 - RNA, 32 nt, Homo Sapiens
ccuucuagcaucuggaaaaggaaccugguauu

SEQ ID NO: 49933 - RNA, 31 nt, Homo Sapiens
gagcauauucuaauaaagugcauugccaguu

SEQ ID NO: 49934 - RNA, 32 nt, Homo Sapiens
auaucuuuucucacauucagacuuacacuuaa

SEQ ID NO: 49935 - RNA, 32 nt, Homo Sapiens
cuuuagaacaaaugcaugagugguauuucagu

SEQ ID NO: 49936 - RNA, 32 nt, Homo Sapiens
aagguaaggaguuuaggaaaauacuagaaucu

SEQ ID NO: 49937 - RNA, 32 nt, Homo Sapiens
ggcuuccugugcugcuugugucaaauggaacc

SEQ ID NO: 49938 - RNA, 32 nt, Homo Sapiens
uucgaguaccucagggacauuuaagaguugga

SEQ ID NO: 49939 - RNA, 31 nt, Homo Sapiens
gucgugagggaggcgucgacggcgugcggaa

SEQ ID NO: 49940 - RNA, 32 nt, Homo Sapiens
uggccuuggugcccuaccccugcccugcgcag

SEQ ID NO: 49941 - RNA, 32 nt, Homo Sapiens
ggaggcguugugaggugagcuuuuucagaagc

SEQ ID NO: 49942 - RNA, 32 nt, Homo Sapiens
gagcaggugaccucagagggaccaguuucacu

SEQ ID NO: 49943 - RNA, 32 nt, Homo Sapiens
acgagugcggcugccgcuacccggggcgggca

SEQ ID NO: 49944 - RNA, 32 nt, Homo Sapiens
aggggcuguggggagggaaaaugaggaguuac

SEQ ID NO: 49945 - RNA, 32 nt, Homo Sapiens
augaaaaugaggacacuuucugauggucagua

SEQ ID NO: 49946 - RNA, 32 nt, Homo Sapiens
ccgugguagcagccucagccguuucuggaguc

SEQ ID NO: 49947 - RNA, 32 nt, Homo Sapiens
uuggggcuuggugauuauuuugaaagauacau

SEQ ID NO: 49948 - RNA, 32 nt, Homo Sapiens
uaagcucucccucucuuugccugcugccaucc

SEQ ID NO: 49949 - RNA, 32 nt, Homo Sapiens
ucgcgagguagagcgggcgcgcggcagcgcgg

SEQ ID NO: 49950 - RNA, 32 nt, Homo Sapiens
aaauucccucggguaagaaaucuccuguauaa

SEQ ID NO: 49951 - RNA, 32 nt, Homo Sapiens
guccggacguuacuccacagacggccacguaa

SEQ ID NO: 49952 - RNA, 32 nt, Homo Sapiens
cucccggaagugccgaagcuggcuacuaaggg

SEQ ID NO: 49953 - RNA, 32 nt, Homo Sapiens
aaagaccaacaaccagcaccacuuccuugcuu

SEQ ID NO: 49954 - RNA, 32 nt, Homo Sapiens
uccacaggagguauuucuuuuuuauguugguc

SEQ ID NO: 49955 - RNA, 32 nt, Homo Sapiens
caucuaguagcucgaaauaaaauaauguugca

SEQ ID NO: 49956 - RNA, 32 nt, Homo Sapiens
uaauuacugcuaaaaauagagugcuguuacac

SEQ ID NO: 49957 - RNA, 32 nt, Homo Sapiens
aaggaggcagcgccuggcaccagggcuuugac

SEQ ID NO: 49958 - RNA, 32 nt, Homo Sapiens
gcuucauguuguauuuuuuuuacugaaauugu

SEQ ID NO: 49959 - RNA, 32 nt, Homo Sapiens
accaugcccagcaaauuuuuaaauuuuuugua

SEQ ID NO: 49960 - RNA, 32 nt, Homo Sapiens
gaucugauucugaguuccuacugucaucuugg

SEQ ID NO: 49961 - RNA, 32 nt, Homo Sapiens
uguccugucuccugucgccgccgccgccgcca

SEQ ID NO: 49962 - RNA, 32 nt, Homo Sapiens
uuuuuaaagcuauauuaaaaauguauuguuga

SEQ ID NO: 49963 - RNA, 32 nt, Homo Sapiens
ugaauguguugcacucugcuggaugaaauggc

SEQ ID NO: 49964 - RNA, 32 nt, Homo Sapiens
aaugcagaugauguuauauaagguauaucaga

SEQ ID NO: 49965 - RNA, 32 nt, Homo Sapiens
gcaacugaggucuuaacuuucagacgcugaau

SEQ ID NO: 49966 - RNA, 32 nt, Homo Sapiens
uuccugcuaggauaaaacauuaagcggcuguu

SEQ ID NO: 49967 - RNA, 32 nt, Homo Sapiens
acaaaacaaaaauaaauauuucacagugguug

SEQ ID NO: 49968 - RNA, 32 nt, Homo Sapiens
uuugaaaggcuuuaugguuuuaguuuuuacgu

SEQ ID NO: 49969 - RNA, 32 nt, Homo Sapiens
uugugagcagcaauaccucacuuuuuaucagc

SEQ ID NO: 49970 - RNA, 32 nt, Homo Sapiens
gccugggaagacuguguggcuggcugagggug

SEQ ID NO: 49971 - RNA, 32 nt, Homo Sapiens
gaccuccugcuagaagacguggccuugaagcc

SEQ ID NO: 49972 - RNA, 32 nt, Homo Sapiens
gagaccccugucuccaaaaaauaaaaauaaau

SEQ ID NO: 49973 - RNA, 32 nt, Homo Sapiens
cuuugggagaaacuuaguuuguaguuauaguu

SEQ ID NO: 49974 - RNA, 32 nt, Homo Sapiens
ggaauggagaggaaacaggcuauuguuggcca

SEQ ID NO: 49975 - RNA, 32 nt, Homo Sapiens
gaaacucaaucuguuuuuaccuuuaaacagug

SEQ ID NO: 49976 - RNA, 32 nt, Homo Sapiens
ugcucucugauccuaaagccugagcuagaaac

SEQ ID NO: 49977 - RNA, 32 nt, Homo Sapiens
aaauuaaauugucuuaagguuuuuccacuuca

SEQ ID NO: 49978 - RNA, 32 nt, Homo Sapiens
cucccgugggcccagagcugcacgccggucca

SEQ ID NO: 49979 - RNA, 32 nt, Homo Sapiens
gcggaaaauggcagacaauuuuucgcuccaug

SEQ ID NO: 49980 - RNA, 32 nt, Homo Sapiens
aauguuuuagcaauaaaauuacaggauuauuc

SEQ ID NO: 49981 - RNA, 32 nt, Homo Sapiens
caaguggggcacugggaaacccugcccauguc

SEQ ID NO: 49982 - RNA, 32 nt, Homo Sapiens
caauguauuugucaucucaugauaacacugag

SEQ ID NO: 49983 - RNA, 32 nt, Homo Sapiens
cuguucccaagccucagaacucuugagcugug

SEQ ID NO: 49984 - RNA, 32 nt, Homo Sapiens
agaugaguuuauuguggaaucuuugaaaggac

SEQ ID NO: 49985 - RNA, 32 nt, Homo Sapiens
ugggucuguccuguuuccuuugaggguugccc

SEQ ID NO: 49986 - RNA, 32 nt, Homo Sapiens
uuguaguucagguucaaaugugaaugagccug

SEQ ID NO: 49987 - RNA, 32 nt, Homo Sapiens
ucucagugauguuuuauugacauggaaauacu

SEQ ID NO: 49988 - RNA, 32 nt, Homo Sapiens
aguaugucugccgguuucaacacacacagaca

SEQ ID NO: 49989 - RNA, 32 nt, Homo Sapiens
acugauauuaaaccuaaauguucugccuaccc

SEQ ID NO: 49990 - RNA, 28 nt, Homo Sapiens
uuuuaucaggcaggaccagguggacuuc

SEQ ID NO: 49991 - RNA, 32 nt, Homo Sapiens
uguagaauaaaacuuaugagugacaucuggaa

SEQ ID NO: 49992 - RNA, 32 nt, Homo Sapiens
auuugucaggauuauuucaacuuuucacauuu

SEQ ID NO: 49993 - RNA, 32 nt, Homo Sapiens
acugcccuggggacuuggugggcuccuggguc

SEQ ID NO: 49994 - RNA, 32 nt, Homo Sapiens
uaacugucuucauacgcuucugcacucugggg

SEQ ID NO: 49995 - RNA, 32 nt, Homo Sapiens
ugauuuuuugcugauaaucacucucaauggaa

SEQ ID NO: 49996 - RNA, 32 nt, Homo Sapiens
uuuaggguuugugcugugggauaaacggaagc

SEQ ID NO: 49997 - RNA, 32 nt, Homo Sapiens
uuguuucuaacaguuuuucuaucuguuucuua

SEQ ID NO: 49998 - RNA, 32 nt, Homo Sapiens
ggcauaagccaccgugccuggccaaugcacac

SEQ ID NO: 49999 - RNA, 32 nt, Homo Sapiens
gcgccgucggggccaccgcgacgcucgcaugg

SEQ ID NO: 50000 - RNA, 32 nt, Homo Sapiens
ggcccauaccccagcccuccugucugagcuug

SEQ ID NO: 50001 - RNA, 32 nt, Homo Sapiens
gggcccggacuccacaucuacugcgugcccuu

SEQ ID NO: 50002 - RNA, 32 nt, Homo Sapiens
accccccuccucagcccucccccacccacagg

SEQ ID NO: 50003 - RNA, 32 nt, Homo Sapiens
uugaaugugggaagaacuaaucagugaaacau

SEQ ID NO: 50004 - RNA, 32 nt, Homo Sapiens
cuucccugaaucacagccccagcuccuugacc

SEQ ID NO: 50005 - RNA, 32 nt, Homo Sapiens
cauggaaggugaugggggcauggguggagggu

SEQ ID NO: 50006 - RNA, 32 nt, Homo Sapiens
auucacaugcuggcuccugaagggugcucagu

SEQ ID NO: 50007 - RNA, 32 nt, Homo Sapiens
cgagcagguacugaccccuuguccuuccccac

SEQ ID NO: 50008 - RNA, 32 nt, Homo Sapiens
aagggugcucagcagagcgugagccaccaggg

SEQ ID NO: 50009 - RNA, 32 nt, Homo Sapiens
cggcgcccccucaucaccgucgccaugcccgg

SEQ ID NO: 50010 - RNA, 32 nt, Homo Sapiens
auaaaugggauaaagaaaaauagacaaccagu

SEQ ID NO: 50011 - RNA, 32 nt, Homo Sapiens
cucagcuuuuucuugagucuuuaagaaugagu

SEQ ID NO: 50012 - RNA, 32 nt, Homo Sapiens
cucaggaaggcucugugagcugcuggucucuu

SEQ ID NO: 50013 - RNA, 32 nt, Homo Sapiens
gugggaagaggaaauagaugucugcacuccug

SEQ ID NO: 50014 - RNA, 32 nt, Homo Sapiens
cucaaaccguuucaagaagagauuuaaaccuc

SEQ ID NO: 50015 - RNA, 32 nt, Homo Sapiens
ccuucagaacagaggccucaucucacugcauc

SEQ ID NO: 50016 - RNA, 32 nt, Homo Sapiens
guucaucacaguguugccuuuugucuccuaaa

SEQ ID NO: 50017 - RNA, 32 nt, Homo Sapiens
ggcguggaugccagaggugcugcccacccggu

SEQ ID NO: 50018 - RNA, 32 nt, Homo Sapiens
agaugauaaagcuaaauuauagucuuuugcca

SEQ ID NO: 50019 - RNA, 32 nt, Homo Sapiens
uagucaggcuggaagcgucaggauaucuuuuc

SEQ ID NO: 50020 - RNA, 32 nt, Homo Sapiens
gcuucucugcagaaugucaaacaaagaucgac

SEQ ID NO: 50021 - RNA, 32 nt, Homo Sapiens
auguuuaauaaauaaaaaugucuugauaucag

SEQ ID NO: 50022 - RNA, 32 nt, Homo Sapiens
ccgucagccgugccgagccgcgcacccagagg

SEQ ID NO: 50023 - RNA, 32 nt, Homo Sapiens
uugcuaaaaauaugucuaaaacuuguuuaaau

SEQ ID NO: 50024 - RNA, 32 nt, Homo Sapiens
aaaaacacaaagugauauagccacuuuaugaa

SEQ ID NO: 50025 - RNA, 32 nt, Homo Sapiens
agcacauaaaaaugcaccuugucgggcgcagu

SEQ ID NO: 50026 - RNA, 32 nt, Homo Sapiens
caaaaaaaguaacacccucccuuuuuccugac

SEQ ID NO: 50027 - RNA, 32 nt, Homo Sapiens
aauagggaggaggugagaggcuggggugcccc

SEQ ID NO: 50028 - RNA, 32 nt, Homo Sapiens
aaauggucuagaggcagaagggcugcaugcuu

SEQ ID NO: 50029 - RNA, 32 nt, Homo Sapiens
ccgguuggccugggggcggggacagagacgga

SEQ ID NO: 50030 - RNA, 32 nt, Homo Sapiens
aaucugccuuggagcacugcugguuuuauaua

SEQ ID NO: 50031 - RNA, 32 nt, Homo Sapiens
gcaagaaaccaccaccugugggccccagugag

SEQ ID NO: 50032 - RNA, 32 nt, Homo Sapiens
aucugcagagagccccaccucacucccuuugg

SEQ ID NO: 50033 - RNA, 32 nt, Homo Sapiens
uuccugcaccucagcagccagggaagcagggc

SEQ ID NO: 50034 - RNA, 32 nt, Homo Sapiens
auaguauuaaaauaaaauaccuggaugaggaa

SEQ ID NO: 50035 - RNA, 27 nt, Homo Sapiens
ccaggguccuucugcuggugcccuccg

SEQ ID NO: 50036 - RNA, 32 nt, Homo Sapiens
caccugucaucccagcacuuugggaggccaag

SEQ ID NO: 50037 - RNA, 32 nt, Homo Sapiens
gacaugccagacagcuguggcaugucauaaac

SEQ ID NO: 50038 - RNA, 32 nt, Homo Sapiens
gggcagcugucccuugcuugccugcagggcca

SEQ ID NO: 50039 - RNA, 32 nt, Homo Sapiens
cccucagcgcaggcugcagagcccggccccac

SEQ ID NO: 50040 - RNA, 32 nt, Homo Sapiens
cgccggggcuaaguggccgccggcguccgggu

SEQ ID NO: 50041 - RNA, 32 nt, Homo Sapiens
cuggguugaaacccgggcgccgccaagaugcc

SEQ ID NO: 50042 - RNA, 32 nt, Homo Sapiens
ggccaggugcgguggcucaagccuguaauccc

SEQ ID NO: 50043 - RNA, 32 nt, Homo Sapiens
gaacaagccccucccuccacugccucagaggc

SEQ ID NO: 50044 - RNA, 32 nt, Homo Sapiens
agaaaagagguuuauacugcaaaagaagugaa

SEQ ID NO: 50045 - RNA, 32 nt, Homo Sapiens
guaagaagaguuucuucaagauuuaugaacau

SEQ ID NO: 50046 - RNA, 32 nt, Homo Sapiens
uuucaucaucacaccacuccgcugccuggggu

SEQ ID NO: 50047 - RNA, 32 nt, Homo Sapiens
ggccuggcgaggccggcccagcacagcaagca

SEQ ID NO: 50048 - RNA, 32 nt, Homo Sapiens
augcuuuguaaauugugaagcguuauuaaaga

SEQ ID NO: 50049 - RNA, 32 nt, Homo Sapiens
agguggagaaagagaaaggaaaugaaguccca

SEQ ID NO: 50050 - RNA, 32 nt, Homo Sapiens
gauugccacccagccaggccagcccuucagag

SEQ ID NO: 50051 - RNA, 32 nt, Homo Sapiens
gcagugugcuggcgccucacagccagccgggc

SEQ ID NO: 50052 - RNA, 32 nt, Homo Sapiens
uggaggaucugugccaucuuggauugagaauu

SEQ ID NO: 50053 - RNA, 32 nt, Homo Sapiens
caaacuuuuaagaucaggaaauguagacaucu

SEQ ID NO: 50054 - RNA, 32 nt, Homo Sapiens
gggagagacagcaagugccuuuccaagccuug

SEQ ID NO: 50055 - RNA, 32 nt, Homo Sapiens
ccugugcaaggcccgggcggccauccacgaag

SEQ ID NO: 50056 - RNA, 32 nt, Homo Sapiens
agccauuuucuuuuaauuucacaaacaucagg

SEQ ID NO: 50057 - RNA, 32 nt, Homo Sapiens
cugccuaggaggcaguaaauccagucacagug

SEQ ID NO: 50058 - RNA, 32 nt, Homo Sapiens
uacagauacuauuuacaggcggaaacuccucg

SEQ ID NO: 50059 - RNA, 32 nt, Homo Sapiens
aaaugcuuuuaaaaaucuaccuucuguaguuu

SEQ ID NO: 50060 - RNA, 32 nt, Homo Sapiens
ccuccauuuguccucuucuccuacaaauaccu

SEQ ID NO: 50061 - RNA, 32 nt, Homo Sapiens
cccacucuggccucucucuccuccuauuuuac

SEQ ID NO: 50062 - RNA, 32 nt, Homo Sapiens
uuaauuauguucuuaaauuugugugccaauaa

SEQ ID NO: 50063 - RNA, 32 nt, Homo Sapiens
gcuuggcuuugagauucuguaacugcagacuu

SEQ ID NO: 50064 - RNA, 32 nt, Homo Sapiens
ccuugggcugaauggcagcacccacgcccgcc

SEQ ID NO: 50065 - RNA, 32 nt, Homo Sapiens
cccaagacaaugaaaguuugcacuguaugcug

SEQ ID NO: 50066 - RNA, 32 nt, Homo Sapiens
caggcuggucucgaacucuggaccucagaucu

SEQ ID NO: 50067 - RNA, 32 nt, Homo Sapiens
aaugucacauucauacucagguaauagagaag

SEQ ID NO: 50068 - RNA, 30 nt, Homo Sapiens
gaccucaaaugauccgcccaucuuggcuuc

SEQ ID NO: 50069 - RNA, 32 nt, Homo Sapiens
cucgauuuaaaaaacugucaagagauuuauuu

SEQ ID NO: 50070 - RNA, 32 nt, Homo Sapiens
ccugccgcagcuugcgccccgcagccccgcag

SEQ ID NO: 50071 - RNA, 32 nt, Homo Sapiens
gaagacuuaaucgaaauacuuaccucuaauuu

SEQ ID NO: 50072 - RNA, 32 nt, Homo Sapiens
cagccgcggucagcugcccccgagacugugcc

SEQ ID NO: 50073 - RNA, 32 nt, Homo Sapiens
caggcaggggagagggagcgggccagccuuac

SEQ ID NO: 50074 - RNA, 32 nt, Homo Sapiens
cgcggggccggauccuccgcgcggccgagucc

SEQ ID NO: 50075 - RNA, 32 nt, Homo Sapiens
agccuuaaaggacacacagcaaugcacagcca

SEQ ID NO: 50076 - RNA, 32 nt, Homo Sapiens
ugauuggcuuuguuugggucucucuucuuucu

SEQ ID NO: 50077 - RNA, 32 nt, Homo Sapiens
gugcugucucuucuacucuccuccuuacuugu

SEQ ID NO: 50078 - RNA, 32 nt, Homo Sapiens
agucugcacuggagcugccuggugaccagaag

SEQ ID NO: 50079 - RNA, 32 nt, Homo Sapiens
accagagauuguguauuuucagugucccaugu

SEQ ID NO: 50080 - RNA, 32 nt, Homo Sapiens
agagaggagaaacacaucuucccuagaggguu

SEQ ID NO: 50081 - RNA, 32 nt, Homo Sapiens
uaauaucuuuuaaagauagugaaauucuucag

SEQ ID NO: 50082 - RNA, 32 nt, Homo Sapiens
gcuguauacaugguuuaaaaaauaguacuguu

SEQ ID NO: 50083 - RNA, 32 nt, Homo Sapiens
ggguguuacccauguacugaaaaugaacuuuu

SEQ ID NO: 50084 - RNA, 32 nt, Homo Sapiens
cauccaaaaaauaagugagaauaugcaacguu

SEQ ID NO: 50085 - RNA, 32 nt, Homo Sapiens
cucaugcauccacguuugcgucuggggaggaa

SEQ ID NO: 50086 - RNA, 32 nt, Homo Sapiens
cccugggaccaagggcagacccugcccaagga

SEQ ID NO: 50087 - RNA, 32 nt, Homo Sapiens
cugcccacaaaacaaggcugugaacuuuucgg

SEQ ID NO: 50088 - RNA, 32 nt, Homo Sapiens
ggggauuuggaugcuuuuuauacguucuccau

SEQ ID NO: 50089 - RNA, 32 nt, Homo Sapiens
cuuaaaccuggccaucuuauuaacuccuucuc

SEQ ID NO: 50090 - RNA, 32 nt, Homo Sapiens
ucauguaagaaugacugauguuguguuaguua

SEQ ID NO: 50091 - RNA, 32 nt, Homo Sapiens
agcucagcagagcuaagccagaucuuauuaca

SEQ ID NO: 50092 - RNA, 32 nt, Homo Sapiens
ugaaagauguuuuguucauuucuaaucaacua

SEQ ID NO: 50093 - RNA, 32 nt, Homo Sapiens
gcgcucccgggcccggccgcgguuccccacuc

SEQ ID NO: 50094 - RNA, 32 nt, Homo Sapiens
gguuucaucauguuggccaggcuggucucaaa

SEQ ID NO: 50095 - RNA, 32 nt, Homo Sapiens
auaauuucaauaauaucaguuacuucuuuugg

SEQ ID NO: 50096 - RNA, 32 nt, Homo Sapiens
guccaaccacacuuacgucauuguauauuguu

SEQ ID NO: 50097 - RNA, 32 nt, Homo Sapiens
agggcucaucaugguagcugggagcuguggac

SEQ ID NO: 50098 - RNA, 32 nt, Homo Sapiens
gcuuuccucuacugguuagagcaacaucagca

SEQ ID NO: 50099 - RNA, 32 nt, Homo Sapiens
ccuccuuguaaauguuuaauagcuaaaugacu

SEQ ID NO: 50100 - RNA, 32 nt, Homo Sapiens
uguuuguuuguuuguuuuuuuaauggccauuu

SEQ ID NO: 50101 - RNA, 32 nt, Homo Sapiens
cgagaggaggggaugggcggggcgcgcggccg

SEQ ID NO: 50102 - RNA, 32 nt, Homo Sapiens
cucuuucaccucucauugccugucccugcuuc

SEQ ID NO: 50103 - RNA, 30 nt, Homo Sapiens
aggggaggcaggcuggguguuccuuuuuuc

SEQ ID NO: 50104 - RNA, 32 nt, Homo Sapiens
ggaagcucugugauuuacauaaucacuuacaa

SEQ ID NO: 50105 - RNA, 25 nt, Homo Sapiens
augucgcagaacggagcgcccggga

SEQ ID NO: 50106 - RNA, 32 nt, Homo Sapiens
uccuugaauccccauaggccugacauuuugcu

SEQ ID NO: 50107 - RNA, 32 nt, Homo Sapiens
auuuaauuuccucuuaaacauguuaugaguuc

SEQ ID NO: 50108 - RNA, 32 nt, Homo Sapiens
acacccagugccugucuuugggugcugcaguu

SEQ ID NO: 50109 - RNA, 31 nt, Homo Sapiens
cgugcacagccaugccugccccaugccuagc

SEQ ID NO: 50110 - RNA, 32 nt, Homo Sapiens
acgaggucaggagauugagacgguccuggcua

SEQ ID NO: 50111 - RNA, 32 nt, Homo Sapiens
caaauaaaaugaagacugagaauggccuguuu

SEQ ID NO: 50112 - RNA, 32 nt, Homo Sapiens
gugacccucccuccccaccaagaguccacaga

SEQ ID NO: 50113 - RNA, 32 nt, Homo Sapiens
cugggggacaggagcgagacuccaucucaaaa

SEQ ID NO: 50114 - RNA, 32 nt, Homo Sapiens
gcacuguguuuguucagagaaaacgaagggug

SEQ ID NO: 50115 - RNA, 32 nt, Homo Sapiens
uccccaugugcuuuuccaguucuucuggaauu

SEQ ID NO: 50116 - RNA, 32 nt, Homo Sapiens
caagccagccccacccuuaagcuuccucugac

SEQ ID NO: 50117 - RNA, 32 nt, Homo Sapiens
gagccugagacgccgcugcugcuccggcugag

SEQ ID NO: 50118 - RNA, 32 nt, Homo Sapiens
gggaagaagcaucuuaagaagaggaaacagca

SEQ ID NO: 50119 - RNA, 32 nt, Homo Sapiens
uuuuguugcccucuccuauccucuugccauau

SEQ ID NO: 50120 - RNA, 32 nt, Homo Sapiens
cuccagacaggaggagugggacagacagcagc

SEQ ID NO: 50121 - RNA, 32 nt, Homo Sapiens
acuuugaaaaauuuugcaaaugucuuagguga

SEQ ID NO: 50122 - RNA, 32 nt, Homo Sapiens
uggaugcuuccaucuguauccauugccggcac

SEQ ID NO: 50123 - RNA, 32 nt, Homo Sapiens
aauaagcaaaugccgccucuguuugaacguuu

SEQ ID NO: 50124 - RNA, 32 nt, Homo Sapiens
uaugcucugaggauaaagcaaguucuaauuug

SEQ ID NO: 50125 - RNA, 32 nt, Homo Sapiens
ugcugccuugguuccuggaccccugggcccau

SEQ ID NO: 50126 - RNA, 32 nt, Homo Sapiens
gauacuccuuugcaugcagcacuccacaucuu

SEQ ID NO: 50127 - RNA, 32 nt, Homo Sapiens
uuuauauauuguauuucuuaauauuaugacca

SEQ ID NO: 50128 - RNA, 32 nt, Homo Sapiens
ccugucccugccgcggccccagccuugaccug

SEQ ID NO: 50129 - RNA, 32 nt, Homo Sapiens
aucgcguuucguccggggccgcggcggccgug

SEQ ID NO: 50130 - RNA, 32 nt, Homo Sapiens
uauggauaaaaaguuaugaacuauuaaaaaug

SEQ ID NO: 50131 - RNA, 32 nt, Homo Sapiens
gaggggcaaccuggcgccaugccccaggccca

SEQ ID NO: 50132 - RNA, 32 nt, Homo Sapiens
aguaauaaauuaauggaguuauuguuaaaaca

SEQ ID NO: 50133 - RNA, 32 nt, Homo Sapiens
uggggcacagaaaaaauagauaggggcagcuc

SEQ ID NO: 50134 - RNA, 32 nt, Homo Sapiens
gaaauacuuucuucuccaacccgccccaacca

SEQ ID NO: 50135 - RNA, 32 nt, Homo Sapiens
gggcggagcggacugcguguccgcggacgggc

SEQ ID NO: 50136 - RNA, 32 nt, Homo Sapiens
uuacguggugggaguucaaacacacaaagacc

SEQ ID NO: 50137 - RNA, 32 nt, Homo Sapiens
agcuucgagcauggcuuuuggcugucagggca

SEQ ID NO: 50138 - RNA, 32 nt, Homo Sapiens
uaaaauauauaaugccaaauguguuuuuguca

SEQ ID NO: 50139 - RNA, 32 nt, Homo Sapiens
gggcuucugcuguccuuuggagggugucuucu

SEQ ID NO: 50140 - RNA, 32 nt, Homo Sapiens
aggaagugacgugcuuaucaccauagauuugc

SEQ ID NO: 50141 - RNA, 32 nt, Homo Sapiens
ucaugggagacuggagugcagauucuuugaau

SEQ ID NO: 50142 - RNA, 32 nt, Homo Sapiens
uugggaaugaaauauaauggccugaacgaacu

SEQ ID NO: 50143 - RNA, 32 nt, Homo Sapiens
uccagguguuuguuucuaacuucuguaauaca

SEQ ID NO: 50144 - RNA, 32 nt, Homo Sapiens
gaggcugccaggcgagucaggucucucuggac

SEQ ID NO: 50145 - RNA, 32 nt, Homo Sapiens
accacucugaaauuaugguaauaauuagaucc

SEQ ID NO: 50146 - RNA, 32 nt, Homo Sapiens
cuugcauuacggucccugcucuuccaaggugg

SEQ ID NO: 50147 - RNA, 30 nt, Homo Sapiens
uauuguuuacggaagggggaaacagaaaac

SEQ ID NO: 50148 - RNA, 32 nt, Homo Sapiens
gaccuaauguuuuguccaugacuugcaggucc

SEQ ID NO: 50149 - RNA, 32 nt, Homo Sapiens
uccaggauugugagaaauacauguuuguuguu

SEQ ID NO: 50150 - RNA, 32 nt, Homo Sapiens
accucugccucccagguucaaguaauucuccu

SEQ ID NO: 50151 - RNA, 32 nt, Homo Sapiens
cacagguuagcuccccauuagauggaaaagug

SEQ ID NO: 50152 - RNA, 32 nt, Homo Sapiens
gucauccaaggauaauacagaccaacuaggcu

SEQ ID NO: 50153 - RNA, 32 nt, Homo Sapiens
ugcucgggguggcacugguguugcuggcucag

SEQ ID NO: 50154 - RNA, 32 nt, Homo Sapiens
ccauugcucccaagaggaggagagggaggcug

SEQ ID NO: 50155 - RNA, 32 nt, Homo Sapiens
gacugggauuaccagauaccaggugauuuaug

SEQ ID NO: 50156 - RNA, 32 nt, Homo Sapiens
auacagccgacuccagccccagcucauccccc

SEQ ID NO: 50157 - RNA, 32 nt, Homo Sapiens
acccaagagcuuuuggaguaugaugaaccuca

SEQ ID NO: 50158 - RNA, 32 nt, Homo Sapiens
gccgagcgccgcgcgccgccgccacugcagcu

SEQ ID NO: 50159 - RNA, 32 nt, Homo Sapiens
cucgcguugcugccggccuccgcccgcgccua

SEQ ID NO: 50160 - RNA, 32 nt, Homo Sapiens
agagcaacaacaaaaaauguuuaagccgggcg

SEQ ID NO: 50161 - RNA, 32 nt, Homo Sapiens
gcuucaucuguaagcgcugcuuguguaauuua

SEQ ID NO: 50162 - RNA, 32 nt, Homo Sapiens
aaacucccuccuuuuccaaguuagccuuauag

SEQ ID NO: 50163 - RNA, 32 nt, Homo Sapiens
agucuugucugagcuggcaccaccacacggcc

SEQ ID NO: 50164 - RNA, 32 nt, Homo Sapiens
agguaacaaggagcaaauggcuuuuggguagc

SEQ ID NO: 50165 - RNA, 32 nt, Homo Sapiens
cuugucucagaugagacuuuggacuuggacuu

SEQ ID NO: 50166 - RNA, 32 nt, Homo Sapiens
aacucagaggccggugccggugcagguccuug

SEQ ID NO: 50167 - RNA, 32 nt, Homo Sapiens
cccgagugcucaccugccccagccuggcucua

SEQ ID NO: 50168 - RNA, 32 nt, Homo Sapiens
caaagcggccucauccccgccaaaaaauaaag

SEQ ID NO: 50169 - RNA, 32 nt, Homo Sapiens
agggacuacguggaagaccuggggccagccug

SEQ ID NO: 50170 - RNA, 32 nt, Homo Sapiens
caaauaaacauuuuuuaagaaaacauuucuuc

SEQ ID NO: 50171 - RNA, 32 nt, Homo Sapiens
agugaagaucacauuuuauaugcgaucuugac

SEQ ID NO: 50172 - RNA, 32 nt, Homo Sapiens
aacaagaaaaagaaaaugaaaaguauuauuaa

SEQ ID NO: 50173 - RNA, 32 nt, Homo Sapiens
uugagaauauuuuuauuuucugaaggcagaga

SEQ ID NO: 50174 - RNA, 32 nt, Homo Sapiens
acacauuuaaacacuuuuuuuuuuaaggaaag

SEQ ID NO: 50175 - RNA, 30 nt, Homo Sapiens
gccuaagagaagcuaaagaagucuugaaag

SEQ ID NO: 50176 - RNA, 31 nt, Homo Sapiens
uauaaccugccucagaaccauggccugcuag

SEQ ID NO: 50177 - RNA, 32 nt, Homo Sapiens
ugccgcgauaguccuugccaucgccuugcggu

SEQ ID NO: 50178 - RNA, 32 nt, Homo Sapiens
cugaaaacauagaaacacaauuagaugaugag

SEQ ID NO: 50179 - RNA, 32 nt, Homo Sapiens
uguaacuggugcccccuccccgaugugacuga

SEQ ID NO: 50180 - RNA, 32 nt, Homo Sapiens
aaacgaauccccuaaacaaaaagaacaauaga

SEQ ID NO: 50181 - RNA, 32 nt, Homo Sapiens
guccccauuucccuucucuuucccauagauuc

SEQ ID NO: 50182 - RNA, 32 nt, Homo Sapiens
uccgggggcuggaagccuggguggccggggcc

SEQ ID NO: 50183 - RNA, 32 nt, Homo Sapiens
cacagaucguuguuagaucuuuauuuuuagcc

SEQ ID NO: 50184 - RNA, 32 nt, Homo Sapiens
aggacugugagcaauaaauguuugauguuuau

SEQ ID NO: 50185 - RNA, 32 nt, Homo Sapiens
ggggaaaugaacuggugaagggguuuuguaaa

SEQ ID NO: 50186 - RNA, 32 nt, Homo Sapiens
caagaaacacauugcaccugccaauagcuugu

SEQ ID NO: 50187 - RNA, 32 nt, Homo Sapiens
cuccuagccagcgccagugcgucuccgcagcc

SEQ ID NO: 50188 - RNA, 32 nt, Homo Sapiens
aucuugagagcccccauuuguuguguagagau

SEQ ID NO: 50189 - RNA, 32 nt, Homo Sapiens
aauauuggucugagaauggaauucucuguaag

SEQ ID NO: 50190 - RNA, 30 nt, Homo Sapiens
uaauagugcugugcugcggaagaguggagu

SEQ ID NO: 50191 - RNA, 32 nt, Homo Sapiens
acauggacugucagacaaaauggcaguauccu

SEQ ID NO: 50192 - RNA, 32 nt, Homo Sapiens
uaagccuuuaaauggagucaacuuuuuaauua

SEQ ID NO: 50193 - RNA, 32 nt, Homo Sapiens
guaaguagcauuaagaaagguaacaaucuuca

SEQ ID NO: 50194 - RNA, 32 nt, Homo Sapiens
aagaagauguaguggauuuggcagcuaauuca

SEQ ID NO: 50195 - RNA, 32 nt, Homo Sapiens
gcccuagaggggacgacgggcuggggacgccc

SEQ ID NO: 50196 - RNA, 32 nt, Homo Sapiens
gcuggauggcacccucaggcugagggccccaa

SEQ ID NO: 50197 - RNA, 32 nt, Homo Sapiens
gauuccuaggagucccugccccuagaguagga

SEQ ID NO: 50198 - RNA, 32 nt, Homo Sapiens
uacagacgggagucagagaucuggccaaccuu

SEQ ID NO: 50199 - RNA, 27 nt, Homo Sapiens
uaauccaccugcuucagccuaccaaag

SEQ ID NO: 50200 - RNA, 32 nt, Homo Sapiens
ucacugucagaguggaauuuccauugguguuu

SEQ ID NO: 50201 - RNA, 32 nt, Homo Sapiens
auugcuuugugauuuauacagggauuaaucaa

SEQ ID NO: 50202 - RNA, 32 nt, Homo Sapiens
ccggggccguggaugcugcgugcggaggcgcu

SEQ ID NO: 50203 - RNA, 31 nt, Homo Sapiens
gagcggcugccgggggaagcagaggcgccgg

SEQ ID NO: 50204 - RNA, 32 nt, Homo Sapiens
ugacuaaaacaaaacaaaacaaaaaccaugcu

SEQ ID NO: 50205 - RNA, 32 nt, Homo Sapiens
uucuuuuuuccuucuuuuuuuuuuugacacgg

SEQ ID NO: 50206 - RNA, 28 nt, Homo Sapiens
uaccuaaaaagccaacauuugaauuggu

SEQ ID NO: 50207 - RNA, 32 nt, Homo Sapiens
ggggguccaggaaaggcugugccauggggaau

SEQ ID NO: 50208 - RNA, 32 nt, Homo Sapiens
gcuuacuaagggguuuucuaauaaaaacaaau

SEQ ID NO: 50209 - RNA, 32 nt, Homo Sapiens
gagggacccagcugggcgcagcgcccuguggc

SEQ ID NO: 50210 - RNA, 32 nt, Homo Sapiens
aaugugcaggaaauuugaaacugucaucugga

SEQ ID NO: 50211 - RNA, 32 nt, Homo Sapiens
acuuauugcauaaaacuuuucuagucagcaag

SEQ ID NO: 50212 - RNA, 32 nt, Homo Sapiens
gaacagucuccccaccuccccccaacacucga

SEQ ID NO: 50213 - RNA, 32 nt, Homo Sapiens
aaaauacaaaaauuaguugggugcggugacau

SEQ ID NO: 50214 - RNA, 32 nt, Homo Sapiens
uccggcugcuccaucgugguggaaaaucuucc

SEQ ID NO: 50215 - RNA, 32 nt, Homo Sapiens
aaaacaagcccuuuauugaauuuucaacacag

SEQ ID NO: 50216 - RNA, 32 nt, Homo Sapiens
agcggcgguggcggcguccuggggccaggagg

SEQ ID NO: 50217 - RNA, 32 nt, Homo Sapiens
gcgaauacagaccacaauauuaucauaccacu

SEQ ID NO: 50218 - RNA, 32 nt, Homo Sapiens
uggggagcuggguguguguucuggccaguugu

SEQ ID NO: 50219 - RNA, 32 nt, Homo Sapiens
ggugcugcgaggggaaggaaaagggaggcagc

SEQ ID NO: 50220 - RNA, 32 nt, Homo Sapiens
cucaguguccccagcccagccuuucagugccc

SEQ ID NO: 50221 - RNA, 32 nt, Homo Sapiens
caguguaugcaguaauuagaacaaagaagaaa

SEQ ID NO: 50222 - RNA, 32 nt, Homo Sapiens
guaacauguuuuucauuuucugcauugacugc

SEQ ID NO: 50223 - RNA, 32 nt, Homo Sapiens
ugcugcccuaaaaagagacccuggggcugggu

SEQ ID NO: 50224 - RNA, 32 nt, Homo Sapiens
uuguuuugauucaaagaccaaacuagaacuuu

SEQ ID NO: 50225 - RNA, 27 nt, Homo Sapiens
ccucccuccuucuuuaguuuaaccauc

SEQ ID NO: 50226 - RNA, 32 nt, Homo Sapiens
aaacauuuggugaagagcauuaaugacugucu

SEQ ID NO: 50227 - RNA, 32 nt, Homo Sapiens
gucccggacgcggacggccgccccacaccuac

SEQ ID NO: 50228 - RNA, 32 nt, Homo Sapiens
auaugagaugcauuguuacaggaagucccuug

SEQ ID NO: 50229 - RNA, 32 nt, Homo Sapiens
acaauauauggauggauagccuuucuuuuguu

SEQ ID NO: 50230 - RNA, 32 nt, Homo Sapiens
uugugucaucaugggguaucagggcuggcaaa

SEQ ID NO: 50231 - RNA, 32 nt, Homo Sapiens
cauuagaaaggugucauuugugguuuuguccu

SEQ ID NO: 50232 - RNA, 32 nt, Homo Sapiens
gugauucagggugccaaugaccuccccgcgaa

SEQ ID NO: 50233 - RNA, 32 nt, Homo Sapiens
gaaacaacacugaguuccagauuucggaaggu

SEQ ID NO: 50234 - RNA, 32 nt, Homo Sapiens
aaaaccauccuuaaccccaugauccuucccag

SEQ ID NO: 50235 - RNA, 32 nt, Homo Sapiens
ggccuccgucuucccagcgguuccugugcaga

SEQ ID NO: 50236 - RNA, 32 nt, Homo Sapiens
accaacaucccaaggggaccaauccccuugcc

SEQ ID NO: 50237 - RNA, 32 nt, Homo Sapiens
ccagaggcaggagaguguguucuggucccggg

SEQ ID NO: 50238 - RNA, 32 nt, Homo Sapiens
aaacuuuuggggaaacaaauuuucuguuacuu

SEQ ID NO: 50239 - RNA, 32 nt, Homo Sapiens
uuuuaguacuaaaauuuuaaccuguguucuaa

SEQ ID NO: 50240 - RNA, 32 nt, Homo Sapiens
gagaggaagggaagccgcaucccgcggggcgc

SEQ ID NO: 50241 - RNA, 32 nt, Homo Sapiens
cagcagcucugguggcagcuguccuugaggaa

SEQ ID NO: 50242 - RNA, 32 nt, Homo Sapiens
gugcuacagaugauagaggauuuuauacccca

SEQ ID NO: 50243 - RNA, 32 nt, Homo Sapiens
gaacuuauaugugucuggcuuaaaaggccaug

SEQ ID NO: 50244 - RNA, 32 nt, Homo Sapiens
ccugccauccugaguucugccauccuuagggg

SEQ ID NO: 50245 - RNA, 32 nt, Homo Sapiens
agggaggcgucccggcggagcgugguacuacg

SEQ ID NO: 50246 - RNA, 32 nt, Homo Sapiens
cucaaugguucccgcccuggaccuccagcugc

SEQ ID NO: 50247 - RNA, 32 nt, Homo Sapiens
aucucuuuuauguguggcaggcacgcagcuuu

SEQ ID NO: 50248 - RNA, 30 nt, Homo Sapiens
gagaagaaauguaucugcuaacucuacaua

SEQ ID NO: 50249 - RNA, 32 nt, Homo Sapiens
ggaccagaugaccuacagcucccuggauccuc

SEQ ID NO: 50250 - RNA, 32 nt, Homo Sapiens
cccaggggcacgcaggccguccuguccucgag

SEQ ID NO: 50251 - RNA, 32 nt, Homo Sapiens
ccgcugcuggaacaccaauagcagcguuggag

SEQ ID NO: 50252 - RNA, 32 nt, Homo Sapiens
uuaauauccaaauauguacuugucugauuucu

SEQ ID NO: 50253 - RNA, 32 nt, Homo Sapiens
cucucugacccggccccccggcggggacgccc

SEQ ID NO: 50254 - RNA, 32 nt, Homo Sapiens
caaggagucugcuucugcuacuuggagaagag

SEQ ID NO: 50255 - RNA, 32 nt, Homo Sapiens
acuugaagcaguuguccuugugagaaccgguc

SEQ ID NO: 50256 - RNA, 32 nt, Homo Sapiens
ggaucugaaaagugggguuugcacacgaaucu

SEQ ID NO: 50257 - RNA, 32 nt, Homo Sapiens
auccugauugucauuuaaaauugugacauacc

SEQ ID NO: 50258 - RNA, 32 nt, Homo Sapiens
gugcagagcugucgcggagccggagcagcagc

SEQ ID NO: 50259 - RNA, 32 nt, Homo Sapiens
cauuuccuaccuugugcuuagcuuucagauua

SEQ ID NO: 50260 - RNA, 32 nt, Homo Sapiens
gugcuuguucuuccucuuaccuguaauagccu

SEQ ID NO: 50261 - RNA, 32 nt, Homo Sapiens
aaaacaaguauuugaaaauauauaguaucaac

SEQ ID NO: 50262 - RNA, 32 nt, Homo Sapiens
acaggcuguaauuccaucaucaucguuguuau

SEQ ID NO: 50263 - RNA, 32 nt, Homo Sapiens
uaaaggauauuuuuacauauauuuucucauuu

SEQ ID NO: 50264 - RNA, 32 nt, Homo Sapiens
gugaaaacgcacccuguggucaaggcgucagg

SEQ ID NO: 50265 - RNA, 32 nt, Homo Sapiens
gggcgguuuugagcuuucuauaagcuauagcu

SEQ ID NO: 50266 - RNA, 32 nt, Homo Sapiens
uuggauggccacagcuagcauggcauucuagc

SEQ ID NO: 50267 - RNA, 32 nt, Homo Sapiens
gucugugucuacagcccuuccucugcaugugg

SEQ ID NO: 50268 - RNA, 32 nt, Homo Sapiens
gucagggcacuagccuugaaaagggggacagg

SEQ ID NO: 50269 - RNA, 32 nt, Homo Sapiens
ucgcagccuuccucacucuguuccucggccag

SEQ ID NO: 50270 - RNA, 32 nt, Homo Sapiens
ccauccccaagccucagagucugaaugccucc

SEQ ID NO: 50271 - RNA, 32 nt, Homo Sapiens
gcuugauucuacuucaggaggcacauggggcg

SEQ ID NO: 50272 - RNA, 32 nt, Homo Sapiens
ccauacauaauauacacaguuuguauaaaugc

SEQ ID NO: 50273 - RNA, 32 nt, Homo Sapiens
cucacgugacccagcccucggcuguuccaggc

SEQ ID NO: 50274 - RNA, 32 nt, Homo Sapiens
cucucaggucuggacaucaucauccuagcuag

SEQ ID NO: 50275 - RNA, 32 nt, Homo Sapiens
uuucuugucuccauaauccucccuuucaagga

SEQ ID NO: 50276 - RNA, 32 nt, Homo Sapiens
uaguuuacagaaaaagacuuuaaaagugaucu

SEQ ID NO: 50277 - RNA, 32 nt, Homo Sapiens
guucacgccauucucccgccucgggagcuggg

SEQ ID NO: 50278 - RNA, 30 nt, Homo Sapiens
cucacugagaagcuugaggcccuggaaucc

SEQ ID NO: 50279 - RNA, 32 nt, Homo Sapiens
cuaucuggccuggccucugggcuggggcuggg

SEQ ID NO: 50280 - RNA, 32 nt, Homo Sapiens
uagccauuugucacacaaccacagcaaaaaaa

SEQ ID NO: 50281 - RNA, 32 nt, Homo Sapiens
aauuuugcaacuucuuuuuuuacaaggaacuu

SEQ ID NO: 50282 - RNA, 32 nt, Homo Sapiens
uuaaauuguaaauguguuuucuuaauauuacc

SEQ ID NO: 50283 - RNA, 32 nt, Homo Sapiens
cccgccuccgccccagaggggcgaggaucccg

SEQ ID NO: 50284 - RNA, 32 nt, Homo Sapiens
agacccaccggcaguaccuugcccgcccgcuu

SEQ ID NO: 50285 - RNA, 32 nt, Homo Sapiens
auaaucgcuaguguuaugucaaaguuaagccc

SEQ ID NO: 50286 - RNA, 32 nt, Homo Sapiens
uuguaauuuuuugcuuuauuuucaucugccag

SEQ ID NO: 50287 - RNA, 30 nt, Homo Sapiens
gagaggagagggaaccagauaugcagauca

SEQ ID NO: 50288 - RNA, 32 nt, Homo Sapiens
cugacgggcgugcgcgcuugugcggagccgga

SEQ ID NO: 50289 - RNA, 32 nt, Homo Sapiens
ccaggacgugacucccucuccucuccaaaacc

SEQ ID NO: 50290 - RNA, 32 nt, Homo Sapiens
ggacauugccugcaauuuugagagcaaguacc

SEQ ID NO: 50291 - RNA, 32 nt, Homo Sapiens
cugggggagagccuggccuggccgcgucauac

SEQ ID NO: 50292 - RNA, 32 nt, Homo Sapiens
ucagccaaauuugaacccaaucaaauauaacg

SEQ ID NO: 50293 - RNA, 32 nt, Homo Sapiens
guucauuuucuuuccaguuagaguaaguacuu

SEQ ID NO: 50294 - RNA, 32 nt, Homo Sapiens
cuuguuauuguauagaaauaucauggauuugu

SEQ ID NO: 50295 - RNA, 32 nt, Homo Sapiens
augaacauacccacaaaugccuaugauuuagg

SEQ ID NO: 50296 - RNA, 32 nt, Homo Sapiens
ugaugauuuacaaaaauugagcuuacaggaua

SEQ ID NO: 50297 - RNA, 32 nt, Homo Sapiens
gauauuuuuuauuuaauuuccuauuuucacau

SEQ ID NO: 50298 - RNA, 32 nt, Homo Sapiens
cugagcgcuccugccgcagagcuugccgcgcc

SEQ ID NO: 50299 - RNA, 32 nt, Homo Sapiens
acaccuagcuaauauuuuguauuuuaauagag

SEQ ID NO: 50300 - RNA, 29 nt, Homo Sapiens
uccacaaguuaaauaaaucauaaaacuug

SEQ ID NO: 50301 - RNA, 32 nt, Homo Sapiens
gaaagaguacuucuucuguuggcagcuaugau

SEQ ID NO: 50302 - RNA, 32 nt, Homo Sapiens
ugugcgugcaaagaauaaucgcuggaguuuug

SEQ ID NO: 50303 - RNA, 32 nt, Homo Sapiens
uguuugcugccacgucagcgucuugcugggug

SEQ ID NO: 50304 - RNA, 32 nt, Homo Sapiens
gggccccgcccccagacauagugaaucagaaa

SEQ ID NO: 50305 - RNA, 32 nt, Homo Sapiens
aaggucgcugccuuccuucucugccagagaug

SEQ ID NO: 50306 - RNA, 32 nt, Homo Sapiens
guaaaaugagaggugugguucagccuucaguu

SEQ ID NO: 50307 - RNA, 32 nt, Homo Sapiens
cagaggcauggauucuuugcagagcacuuccu

SEQ ID NO: 50308 - RNA, 32 nt, Homo Sapiens
agguggaacuggggcagaaucuagucaugccc

SEQ ID NO: 50309 - RNA, 32 nt, Homo Sapiens
aaggugacaccggugagaagugggaaccgcag

SEQ ID NO: 50310 - RNA, 32 nt, Homo Sapiens
cuaacccucagauaaugaccauuaauaaucug

SEQ ID NO: 50311 - RNA, 32 nt, Homo Sapiens
cacguggugaagccuagcacucaugcagcucu

SEQ ID NO: 50312 - RNA, 32 nt, Homo Sapiens
gggccugcggggcuccacggugccccaguccu

SEQ ID NO: 50313 - RNA, 32 nt, Homo Sapiens
ccagagggccccagaguuccuuguaucuaauu

SEQ ID NO: 50314 - RNA, 32 nt, Homo Sapiens
auuagguuuuguuuuucuuuuuguuuuuuagc

SEQ ID NO: 50315 - RNA, 32 nt, Homo Sapiens
aaccauuagaugguaaaauuaagaugcuacuu

SEQ ID NO: 50316 - RNA, 32 nt, Homo Sapiens
caggaagcgcccucaccccagccccacucacc

SEQ ID NO: 50317 - RNA, 32 nt, Homo Sapiens
gaaaagaagaacacauaucaaaaaagacauau

SEQ ID NO: 50318 - RNA, 32 nt, Homo Sapiens
gacagagaccucuggucagcaaacuggaacuc

SEQ ID NO: 50319 - RNA, 32 nt, Homo Sapiens
acaugacuaggauaggcaggaguaaggguggg

SEQ ID NO: 50320 - RNA, 32 nt, Homo Sapiens
cuaaauggacauuugggggaauucccucccaa

SEQ ID NO: 50321 - RNA, 32 nt, Homo Sapiens
uuuguuuuguuuagccagacacccucaacaga

SEQ ID NO: 50322 - RNA, 32 nt, Homo Sapiens
aauguuuuccacucaaagaaaacuuguauaaa

SEQ ID NO: 50323 - RNA, 32 nt, Homo Sapiens
aacuagaaaaauuuauagucuuuaaucucuca

SEQ ID NO: 50324 - RNA, 32 nt, Homo Sapiens
ucuaaggggaacagaaaaccccugccaaaacu

SEQ ID NO: 50325 - RNA, 32 nt, Homo Sapiens
aaaucagacuaaaaggugguaucucuucuuag

SEQ ID NO: 50326 - RNA, 32 nt, Homo Sapiens
augggcagagcuaggcuguggugcuggaagcc

SEQ ID NO: 50327 - RNA, 32 nt, Homo Sapiens
auuuuggcugcuagagugcagcauuugugaca

SEQ ID NO: 50328 - RNA, 32 nt, Homo Sapiens
gaaagcuuauauauuuauuccccaaaguagau

SEQ ID NO: 50329 - RNA, 32 nt, Homo Sapiens
aggcugaggcaggaggaucauuugagcucaug

SEQ ID NO: 50330 - RNA, 32 nt, Homo Sapiens
aaaaaugaacaaagucauguucuuuguggcaa

SEQ ID NO: 50331 - RNA, 32 nt, Homo Sapiens
aauccaguaucaagaagaaaaucagaaauacu

SEQ ID NO: 50332 - RNA, 32 nt, Homo Sapiens
caagugauauuguguggacugcuacagcgcaa

SEQ ID NO: 50333 - RNA, 32 nt, Homo Sapiens
cgcuuugucuguccagccgugugugcaugugc

SEQ ID NO: 50334 - RNA, 32 nt, Homo Sapiens
aaacuagacuucuaugugagaagugcuggaaa

SEQ ID NO: 50335 - RNA, 32 nt, Homo Sapiens
uucaggcaaaaauaaacuguaagugacucauc

SEQ ID NO: 50336 - RNA, 32 nt, Homo Sapiens
gacugcaaccucaguccacagacggcccgaga

SEQ ID NO: 50337 - RNA, 32 nt, Homo Sapiens
aacuuuuaagacauuuaauaauuuaagaagua

SEQ ID NO: 50338 - RNA, 32 nt, Homo Sapiens
uuacaugaauacgucuugaucagacauucaga

SEQ ID NO: 50339 - RNA, 32 nt, Homo Sapiens
uccuuggugaaauaaacuuuucaaaaaugaau

SEQ ID NO: 50340 - RNA, 32 nt, Homo Sapiens
auuagguuuuugacaaaacaaacaggccaaaa

SEQ ID NO: 50341 - RNA, 32 nt, Homo Sapiens
ccuggggaacagagcaagaucuugucucaaaa

SEQ ID NO: 50342 - RNA, 32 nt, Homo Sapiens
cgggaggacgcggaagaggagccccgggggua

SEQ ID NO: 50343 - RNA, 32 nt, Homo Sapiens
uggggcagccccaacccccacccccaggcucc

SEQ ID NO: 50344 - RNA, 32 nt, Homo Sapiens
guuucugccugccucauggcaggauccgauag

SEQ ID NO: 50345 - RNA, 32 nt, Homo Sapiens
uaggaggagaaacucuguuaccaagaggagaa

SEQ ID NO: 50346 - RNA, 32 nt, Homo Sapiens
ugcguccgacccccggccggcgcggguaugga

SEQ ID NO: 50347 - RNA, 32 nt, Homo Sapiens
agacaggcuucagauggcuuugauuucggcaa

SEQ ID NO: 50348 - RNA, 32 nt, Homo Sapiens
uuuccuuccuucccuggcuuguaacuccacca

SEQ ID NO: 50349 - RNA, 32 nt, Homo Sapiens
ucuuccccuuacccggcccuuagauuucaugg

SEQ ID NO: 50350 - RNA, 32 nt, Homo Sapiens
cgacugucagugccggccuuccucgugugagg

SEQ ID NO: 50351 - RNA, 32 nt, Homo Sapiens
aaucuguaucuuaaauuuaugugaauacauuu

SEQ ID NO: 50352 - RNA, 32 nt, Homo Sapiens
uaggaaaaccagagaccuuuguucacuuguuu

SEQ ID NO: 50353 - RNA, 32 nt, Homo Sapiens
ccgcuguggaggagcuggcugcggcgaagggg

SEQ ID NO: 50354 - RNA, 32 nt, Homo Sapiens
cgguggcauuugcugaauaacaacaauuuagg

SEQ ID NO: 50355 - RNA, 32 nt, Homo Sapiens
cacacccagaaagccucacauugugcagugga

SEQ ID NO: 50356 - RNA, 32 nt, Homo Sapiens
cauccagaaaucagaauccaggauuccugacu

SEQ ID NO: 50357 - RNA, 32 nt, Homo Sapiens
acagggcugaaacacaucccuugcucgccaua

SEQ ID NO: 50358 - RNA, 32 nt, Homo Sapiens
uaaguauuaugaugcuaaaaauuuagauuuau

SEQ ID NO: 50359 - RNA, 32 nt, Homo Sapiens
auagucuuucucuuuucagucuuuguauuucu

SEQ ID NO: 50360 - RNA, 32 nt, Homo Sapiens
augaacauucuauccuugaugagcaugccagc

SEQ ID NO: 50361 - RNA, 32 nt, Homo Sapiens
ccuccuuuuuucugcucacaaggacuuuugau

SEQ ID NO: 50362 - RNA, 32 nt, Homo Sapiens
ggagugagugugugucgcgcguguccgcacug

SEQ ID NO: 50363 - RNA, 32 nt, Homo Sapiens
ggcucucaguuccaaggcaauucccagcacga

SEQ ID NO: 50364 - RNA, 32 nt, Homo Sapiens
auguuuugucacacaauuuauagugcaucuuu

SEQ ID NO: 50365 - RNA, 32 nt, Homo Sapiens
cccuggcccccuccccguaacagugacuuuuc

SEQ ID NO: 50366 - RNA, 32 nt, Homo Sapiens
cuguauuuuuaaagaaggauguuaauuuuuga

SEQ ID NO: 50367 - RNA, 32 nt, Homo Sapiens
auaaaaggaaauguaaguuuccagauuuaaag

SEQ ID NO: 50368 - RNA, 30 nt, Homo Sapiens
uuucuaaagucuuuccucgcccugaauguu

SEQ ID NO: 50369 - RNA, 30 nt, Homo Sapiens
cauuaucuggacuguaugcuggucauuucu

SEQ ID NO: 50370 - RNA, 32 nt, Homo Sapiens
acucggaacaguaccagugucuggcaggcucc

SEQ ID NO: 50371 - RNA, 32 nt, Homo Sapiens
ucuagcacugguggagaauuauagaauaaaga

SEQ ID NO: 50372 - RNA, 32 nt, Homo Sapiens
cgaagcacauuccucguaaaucuccugcauac

SEQ ID NO: 50373 - RNA, 32 nt, Homo Sapiens
ucucugcuuggauuauuuuaaaucauuaggaa

SEQ ID NO: 50374 - RNA, 32 nt, Homo Sapiens
gggcuuugaacuuagacaucuaccucagagcu

SEQ ID NO: 50375 - RNA, 32 nt, Homo Sapiens
uugguggucgaugguagauuuuauugaccugc

SEQ ID NO: 50376 - RNA, 32 nt, Homo Sapiens
ugagguucaaggugcugcuuugcaugccugcc

SEQ ID NO: 50377 - RNA, 32 nt, Homo Sapiens
cauuuuuaaaagacaagacauucuuguacaua

SEQ ID NO: 50378 - RNA, 32 nt, Homo Sapiens
auaauuccucuuucccaaggugugucacagaa

SEQ ID NO: 50379 - RNA, 32 nt, Homo Sapiens
gcgccccgggagggcccggcaugcugcgccag

SEQ ID NO: 50380 - RNA, 32 nt, Homo Sapiens
cccacccccguccccugccaugcccaaauaca

SEQ ID NO: 50381 - RNA, 32 nt, Homo Sapiens
auacagaauguuuuuucuuacuuuuauaagga

SEQ ID NO: 50382 - RNA, 32 nt, Homo Sapiens
cauagauuuucaaauguuugcugaauugaaaa

SEQ ID NO: 50383 - RNA, 32 nt, Homo Sapiens
ggaagcagcauuggaagaaaucacuccugacc

SEQ ID NO: 50384 - RNA, 32 nt, Homo Sapiens
auaacggauauuuuuuaacuuggcgagaugug

SEQ ID NO: 50385 - RNA, 32 nt, Homo Sapiens
guugccauuuuggagauggaaauugacgagga

SEQ ID NO: 50386 - RNA, 32 nt, Homo Sapiens
gauguauucuauuuuuaugaaguguauauaua

SEQ ID NO: 50387 - RNA, 32 nt, Homo Sapiens
aauccugccuguccuacaaaucucagauuaug

SEQ ID NO: 50388 - RNA, 32 nt, Homo Sapiens
ccaacucuccaaaacuaaauuugaacuuaaaa

SEQ ID NO: 50389 - RNA, 32 nt, Homo Sapiens
uaccuuguaacaguacaaaaguacauucacau

SEQ ID NO: 50390 - RNA, 32 nt, Homo Sapiens
ccuuacugccgccuaccccgcccgccacgccg

SEQ ID NO: 50391 - RNA, 32 nt, Homo Sapiens
agagccuggcgucuggacgccgagggcagccc

SEQ ID NO: 50392 - RNA, 32 nt, Homo Sapiens
guucuguuuucagcugacuuggacaaccugac

SEQ ID NO: 50393 - RNA, 32 nt, Homo Sapiens
guagagcaguacaacuuuuuucccucuaugac

SEQ ID NO: 50394 - RNA, 32 nt, Homo Sapiens
cucccgacaccgugagugcggccacaccgaag

SEQ ID NO: 50395 - RNA, 32 nt, Homo Sapiens
ggacuccaugaagaaagaccauagguuagaaa

SEQ ID NO: 50396 - RNA, 32 nt, Homo Sapiens
uaagacauacuuuaacuauugucauuugccuc

SEQ ID NO: 50397 - RNA, 27 nt, Homo Sapiens
ggaugagcggcgggcggcggaaggagg

SEQ ID NO: 50398 - RNA, 32 nt, Homo Sapiens
gcuauuaaaaacacuaaguugauucuggaaaa

SEQ ID NO: 50399 - RNA, 32 nt, Homo Sapiens
cacccgccugguuccagccccauccccucucc

SEQ ID NO: 50400 - RNA, 32 nt, Homo Sapiens
uaacacaauuauuuuuaaacacuggcauuuuc

SEQ ID NO: 50401 - RNA, 32 nt, Homo Sapiens
gcccucaaggaccguguugcccuccugaauca

SEQ ID NO: 50402 - RNA, 32 nt, Homo Sapiens
uuuucucucacucuuuaauuauuuucagcuug

SEQ ID NO: 50403 - RNA, 32 nt, Homo Sapiens
caggagaaccagcgggcugugcaugugacccg

SEQ ID NO: 50404 - RNA, 32 nt, Homo Sapiens
ucaaagcaaaacaaaaacaauaaccaugauua

SEQ ID NO: 50405 - RNA, 32 nt, Homo Sapiens
cuucauuauuuucagcucaucuauuauugaau

SEQ ID NO: 50406 - RNA, 32 nt, Homo Sapiens
caccuggugaggggaggcucugccccaggccg

SEQ ID NO: 50407 - RNA, 32 nt, Homo Sapiens
aagagaccgagccccagggccgccgugcccuc

SEQ ID NO: 50408 - RNA, 32 nt, Homo Sapiens
gaaaugguccacauaguggggaaguagccagg

SEQ ID NO: 50409 - RNA, 32 nt, Homo Sapiens
gaaaaaugucauugaguaauauagugacuaug

SEQ ID NO: 50410 - RNA, 32 nt, Homo Sapiens
gccaggucccgccgccucucgccccgcuauua

SEQ ID NO: 50411 - RNA, 32 nt, Homo Sapiens
caguggacauagaagagaagggugugaggcug

SEQ ID NO: 50412 - RNA, 32 nt, Homo Sapiens
guauauagaauaauauuuauguuuacaaugua

SEQ ID NO: 50413 - RNA, 32 nt, Homo Sapiens
aggccaaaaauaucucacuugcaauuuuaaua

SEQ ID NO: 50414 - RNA, 32 nt, Homo Sapiens
gcuucaaggcagaaggaaaaacaggaaaagcu

SEQ ID NO: 50415 - RNA, 32 nt, Homo Sapiens
ggccuggcacgaaaugcaguuuuuacauaagu

SEQ ID NO: 50416 - RNA, 32 nt, Homo Sapiens
gagacggcggugugccaggcggugcuggcgcc

SEQ ID NO: 50417 - RNA, 29 nt, Homo Sapiens
ggcccucggggacagcgagcgucgcgcca

SEQ ID NO: 50418 - RNA, 32 nt, Homo Sapiens
gaaagggaggauuuugcacuccucugcuuucu

SEQ ID NO: 50419 - RNA, 32 nt, Homo Sapiens
auagcaugaagauuaggaaacaguuuuaagga

SEQ ID NO: 50420 - RNA, 32 nt, Homo Sapiens
gagcugcggccccguccggcccgggcuggcau

SEQ ID NO: 50421 - RNA, 32 nt, Homo Sapiens
acccgccccacuucgcuugccaucacagcacg

SEQ ID NO: 50422 - RNA, 32 nt, Homo Sapiens
uagaguaauauuugagcuguguucaaaaauac

SEQ ID NO: 50423 - RNA, 32 nt, Homo Sapiens
ccuugaucuccucuccuuccucuggccagucc

SEQ ID NO: 50424 - RNA, 32 nt, Homo Sapiens
cuaacaucuuagagguccauggagaaggcaua

SEQ ID NO: 50425 - RNA, 32 nt, Homo Sapiens
uaacccugacuucugagcuuucauaaccccag

SEQ ID NO: 50426 - RNA, 32 nt, Homo Sapiens
uuucugagguugguuucuuaauaaugaguaaa

SEQ ID NO: 50427 - RNA, 32 nt, Homo Sapiens
aagggaaaauaccaccaccccauccuggaaug

SEQ ID NO: 50428 - RNA, 32 nt, Homo Sapiens
cagcuucucagaucuucaguguucacugguaa

SEQ ID NO: 50429 - RNA, 32 nt, Homo Sapiens
caaauacauuuuaagcaaguuaaguguccucc

SEQ ID NO: 50430 - RNA, 32 nt, Homo Sapiens
cccugcguggaaaguugcugggcccccgcccc

SEQ ID NO: 50431 - RNA, 32 nt, Homo Sapiens
uuccuacuuguaaagaugaguaaaaguaugca

SEQ ID NO: 50432 - RNA, 32 nt, Homo Sapiens
gaacugcccgcacugacccaugacggccgcua

SEQ ID NO: 50433 - RNA, 32 nt, Homo Sapiens
auguaagcguucaaagaugugauucagauaaa

SEQ ID NO: 50434 - RNA, 32 nt, Homo Sapiens
uuaggacauguguaaaguuagauggaaagacu

SEQ ID NO: 50435 - RNA, 32 nt, Homo Sapiens
ccggcuggaggcugcacagacaggaguucaag

SEQ ID NO: 50436 - RNA, 32 nt, Homo Sapiens
cggggacucgguaagcacuuaaugaaugaaug

SEQ ID NO: 50437 - RNA, 32 nt, Homo Sapiens
aguucagcacuugaaggaaggaucucgaaaca

SEQ ID NO: 50438 - RNA, 32 nt, Homo Sapiens
ucagaacaaaauuuaaaugcagacgaagcaug

SEQ ID NO: 50439 - RNA, 32 nt, Homo Sapiens
gggaccccgcggccaccauguaugugggcuau

SEQ ID NO: 50440 - RNA, 32 nt, Homo Sapiens
auuuuaagccccagcuauagcuacuacaaaga

SEQ ID NO: 50441 - RNA, 32 nt, Homo Sapiens
caggagagggucacuuuuguagcugagaccuc

SEQ ID NO: 50442 - RNA, 32 nt, Homo Sapiens
cgucugccccacucgcuguguuuguccguggg

SEQ ID NO: 50443 - RNA, 32 nt, Homo Sapiens
cucgucuuucuccauauuguccugcuccccug

SEQ ID NO: 50444 - RNA, 32 nt, Homo Sapiens
guuauaugauuuauauuaaaacauuuauugac

SEQ ID NO: 50445 - RNA, 32 nt, Homo Sapiens
aucuccccaucccgugucccuuggcccagccc

SEQ ID NO: 50446 - RNA, 32 nt, Homo Sapiens
ggccggcuauggucccggggcucccgccgccc

SEQ ID NO: 50447 - RNA, 32 nt, Homo Sapiens
cuguugacacucaugauucugaauguugccug

SEQ ID NO: 50448 - RNA, 32 nt, Homo Sapiens
ugagugugaagggcuccuguggggcauugcaa

SEQ ID NO: 50449 - RNA, 32 nt, Homo Sapiens
acaggcuccgcggccuccggccuccucggccc

SEQ ID NO: 50450 - RNA, 32 nt, Homo Sapiens
aguggguuucaaaaauacauccuuuucugugu

SEQ ID NO: 50451 - RNA, 32 nt, Homo Sapiens
gugggaggguaccagcagaaagguuaguauca

SEQ ID NO: 50452 - RNA, 30 nt, Homo Sapiens
guugcugucugugggcagaguucuguguuc

SEQ ID NO: 50453 - RNA, 32 nt, Homo Sapiens
acaagagucaccuuuacuccaguucccaacaa

SEQ ID NO: 50454 - RNA, 32 nt, Homo Sapiens
uauuuguacauuguuaaaauaguuuuuaagau

SEQ ID NO: 50455 - RNA, 32 nt, Homo Sapiens
ggagugcccuggcugcugcucugcauguguag

SEQ ID NO: 50456 - RNA, 32 nt, Homo Sapiens
aaauaauaaaaauaagaagaaucugaaggaca

SEQ ID NO: 50457 - RNA, 32 nt, Homo Sapiens
uccguugucuucuugggucuuugggguugaag

SEQ ID NO: 50458 - RNA, 32 nt, Homo Sapiens
aguggggaggagggggcaucuucugacagccu

SEQ ID NO: 50459 - RNA, 32 nt, Homo Sapiens
gagaacaaaaauaugaaaucuugcuagugaag

SEQ ID NO: 50460 - RNA, 32 nt, Homo Sapiens
uguuaacucaggaugccaaguggcccucagau

SEQ ID NO: 50461 - RNA, 32 nt, Homo Sapiens
accgggcguggacuucgggcgcuggacccacg

SEQ ID NO: 50462 - RNA, 32 nt, Homo Sapiens
ggagggagagaagagggggcuaaauuugaugc

SEQ ID NO: 50463 - RNA, 32 nt, Homo Sapiens
cggauccugaaaacaccaugcaaccaauucca

SEQ ID NO: 50464 - RNA, 32 nt, Homo Sapiens
caagagaaagacuagaaggacuaaaagcaguu

SEQ ID NO: 50465 - RNA, 32 nt, Homo Sapiens
ggcuccgcaguguuggguuuuguccugaaucu

SEQ ID NO: 50466 - RNA, 32 nt, Homo Sapiens
uguuaaacagguuuaaugacagucauggcaac

SEQ ID NO: 50467 - RNA, 32 nt, Homo Sapiens
auuuuaucugugaauucagauuuuaaaaaguc

SEQ ID NO: 50468 - RNA, 32 nt, Homo Sapiens
uggcuuuaucaugguggaugagaaugacauca

SEQ ID NO: 50469 - RNA, 32 nt, Homo Sapiens
gcaaagaaucccuagacuuuaggcuuucagcu

SEQ ID NO: 50470 - RNA, 32 nt, Homo Sapiens
uuuuccuugcagaaagcacucagaccugaauc

SEQ ID NO: 50471 - RNA, 32 nt, Homo Sapiens
agcuuuaauauuugaaucucaggacucuucug

SEQ ID NO: 50472 - RNA, 32 nt, Homo Sapiens
acccuccaaucuaucauucccuacucucuaag

SEQ ID NO: 50473 - RNA, 32 nt, Homo Sapiens
ugugauggugauguggaauauacuaaagccua

SEQ ID NO: 50474 - RNA, 32 nt, Homo Sapiens
uggcugaauuucuguagcauguucccaaggaa

SEQ ID NO: 50475 - RNA, 32 nt, Homo Sapiens
gacaaguucucacucugucacccaggcuggag

SEQ ID NO: 50476 - RNA, 32 nt, Homo Sapiens
caccgaggaucuguguggguagccucaagcug

SEQ ID NO: 50477 - RNA, 32 nt, Homo Sapiens
aaaguguuaucuuuuccuuaaauaucccucua

SEQ ID NO: 50478 - RNA, 32 nt, Homo Sapiens
cucuguuuauuccuccucucccucccauugca

SEQ ID NO: 50479 - RNA, 32 nt, Homo Sapiens
gguucuaguaccuggugacugacccuuucugg

SEQ ID NO: 50480 - RNA, 32 nt, Homo Sapiens
aaggguggcugaggaaaacauccuguuuugcu

SEQ ID NO: 50481 - RNA, 29 nt, Homo Sapiens
gauauaugaaugcuguucuuguaaaaauc

SEQ ID NO: 50482 - RNA, 32 nt, Homo Sapiens
auucaggggauacaugugcauguucgucacag

SEQ ID NO: 50483 - RNA, 32 nt, Homo Sapiens
ucucgggccucaggucucgggccucagagcca

SEQ ID NO: 50484 - RNA, 32 nt, Homo Sapiens
ccagacccaucccacucuccugugauccaggu

SEQ ID NO: 50485 - RNA, 32 nt, Homo Sapiens
cccugcggacugccugcgggcuugcuugcuga

SEQ ID NO: 50486 - RNA, 32 nt, Homo Sapiens
ucccuuucaaggauggccagucagcuaacuca

SEQ ID NO: 50487 - RNA, 32 nt, Homo Sapiens
ggcccuucuaacuuccagauuguaugcuugag

SEQ ID NO: 50488 - RNA, 32 nt, Homo Sapiens
aaaacuaaaguauuacagacuccauuacguua

SEQ ID NO: 50489 - RNA, 32 nt, Homo Sapiens
ggccaggcgcgcucugcccagcccagccuaca

SEQ ID NO: 50490 - RNA, 32 nt, Homo Sapiens
uuagaggcugguuuuuucucuuuuccuuuggu

SEQ ID NO: 50491 - RNA, 26 nt, Homo Sapiens
ucaugacuuguaauuaaaugugaauu

SEQ ID NO: 50492 - RNA, 32 nt, Homo Sapiens
uuuugggaacucuccucgaaugugugggccca

SEQ ID NO: 50493 - RNA, 32 nt, Homo Sapiens
ucuaccagaagauuauuuuaugucugcaauuu

SEQ ID NO: 50494 - RNA, 32 nt, Homo Sapiens
uccugcagguauugggagauccacagcuaaga

SEQ ID NO: 50495 - RNA, 32 nt, Homo Sapiens
agaugaaguaacugaggcuuagaaagguuaau

SEQ ID NO: 50496 - RNA, 32 nt, Homo Sapiens
uggaagacugauucuuuguuugcaauaauuuu

SEQ ID NO: 50497 - RNA, 32 nt, Homo Sapiens
uacaguuguguuagccucuugcguauuggcuu

SEQ ID NO: 50498 - RNA, 32 nt, Homo Sapiens
aaauuuacggacuuaaaucuucaagguuaaag

SEQ ID NO: 50499 - RNA, 32 nt, Homo Sapiens
ggggaagcugaaaccucugaauguggaggcgc

SEQ ID NO: 50500 - RNA, 32 nt, Homo Sapiens
ccaccccugccuguguucugugcccugugucc

SEQ ID NO: 50501 - RNA, 32 nt, Homo Sapiens
ggacagccaguacccauggagccagagaguga

SEQ ID NO: 50502 - RNA, 32 nt, Homo Sapiens
gauuuugcugauuuuucuuucuuuuuccgcga

SEQ ID NO: 50503 - RNA, 32 nt, Homo Sapiens
ccacuuucgcuuacgauggggcgacucuuguc

SEQ ID NO: 50504 - RNA, 32 nt, Homo Sapiens
auggagaggggaggggagggugcaggcaucuc

SEQ ID NO: 50505 - RNA, 32 nt, Homo Sapiens
uccuuguugcuuaggaugaggagacucuguaa

SEQ ID NO: 50506 - RNA, 32 nt, Homo Sapiens
agaggucugugccaggugcgcuucugcaggug

SEQ ID NO: 50507 - RNA, 32 nt, Homo Sapiens
uggggaaggggaggagcggcccggacgcugcc

SEQ ID NO: 50508 - RNA, 32 nt, Homo Sapiens
caaaagguaccccgauggccaagcaauuccuc

SEQ ID NO: 50509 - RNA, 32 nt, Homo Sapiens
cccaccagagacacuaaaucuguacaaugaaa

SEQ ID NO: 50510 - RNA, 32 nt, Homo Sapiens
cucuaguucaacauauacucaacuugcacugu

SEQ ID NO: 50511 - RNA, 32 nt, Homo Sapiens
uuauguuucugcacuaauugaccaauuuuguc

SEQ ID NO: 50512 - RNA, 32 nt, Homo Sapiens
gcuguuuaaaggauuauaugauguacaucagu

SEQ ID NO: 50513 - RNA, 32 nt, Homo Sapiens
ggcuggggcuccgugccguccagggccggguc

SEQ ID NO: 50514 - RNA, 32 nt, Homo Sapiens
ucuucauuuaggaugcuuucauugucuuuaag

SEQ ID NO: 50515 - RNA, 32 nt, Homo Sapiens
ccaaaggaauucauugacaaucuccuaauaaa

SEQ ID NO: 50516 - RNA, 32 nt, Homo Sapiens
uggaugcaugcaaugccacauggaaauuggcc

SEQ ID NO: 50517 - RNA, 32 nt, Homo Sapiens
auuuuagugugauuuuauauacuuaugcuuuc

SEQ ID NO: 50518 - RNA, 32 nt, Homo Sapiens
agcgcaugucccagcccugguggccaggcucc

SEQ ID NO: 50519 - RNA, 32 nt, Homo Sapiens
aaacugucagaauuguuaacugaaacaaauau

SEQ ID NO: 50520 - RNA, 28 nt, Homo Sapiens
gcugggguuacaggcaugagccaccaca

SEQ ID NO: 50521 - RNA, 32 nt, Homo Sapiens
ucacugccacugcugcugcugcugcugggagc

SEQ ID NO: 50522 - RNA, 32 nt, Homo Sapiens
uugcaaaaguuuugauuuuaaaauaucagauu

SEQ ID NO: 50523 - RNA, 32 nt, Homo Sapiens
uaaagagaaaauaaguauccaucagagacagu

SEQ ID NO: 50524 - RNA, 32 nt, Homo Sapiens
gaaaacauaaaccauaguuuuugccuacuuug

SEQ ID NO: 50525 - RNA, 32 nt, Homo Sapiens
caucauuucaacaugaaaauuaugucaguuua

SEQ ID NO: 50526 - RNA, 32 nt, Homo Sapiens
cuuuuccuguugcccagcccagcccuaguguc

SEQ ID NO: 50527 - RNA, 32 nt, Homo Sapiens
cucuggcuuccucuccuucugguccuacauca

SEQ ID NO: 50528 - RNA, 32 nt, Homo Sapiens
uguguaggucuaugcaauuuuaccacaugugu

SEQ ID NO: 50529 - RNA, 32 nt, Homo Sapiens
cuaagugccucuucuuuuucuucuuguuucuc

SEQ ID NO: 50530 - RNA, 32 nt, Homo Sapiens
aagcagggcaagugcugugcugcccauuuggg

SEQ ID NO: 50531 - RNA, 31 nt, Homo Sapiens
ccuccuucguuagaauagguauaucagcugu

SEQ ID NO: 50532 - RNA, 32 nt, Homo Sapiens
auaaaucugcaauauuuucacgcccaugaaac

SEQ ID NO: 50533 - RNA, 32 nt, Homo Sapiens
cugcaagugauaccccacccccaucugggagg

SEQ ID NO: 50534 - RNA, 32 nt, Homo Sapiens
cgggccccgcacgcuuauccugcccgggagga

SEQ ID NO: 50535 - RNA, 32 nt, Homo Sapiens
uaaagagucaauaaauagaaacaccagaugac

SEQ ID NO: 50536 - RNA, 32 nt, Homo Sapiens
ccccagagcccagagaugcugcugcugccccu

SEQ ID NO: 50537 - RNA, 32 nt, Homo Sapiens
uagggcuuauagcagcacauggagugccugag

SEQ ID NO: 50538 - RNA, 32 nt, Homo Sapiens
cgggauggaagaaaauauuugcgacccauaua

SEQ ID NO: 50539 - RNA, 32 nt, Homo Sapiens
gcacccgauuaauugaauauuaaucaccccaa

SEQ ID NO: 50540 - RNA, 32 nt, Homo Sapiens
acugcuuggccaugcugacuuggacacaauac

SEQ ID NO: 50541 - RNA, 32 nt, Homo Sapiens
aagcacuuuccaggcaggccuggccauagggc

SEQ ID NO: 50542 - RNA, 32 nt, Homo Sapiens
aucuuaugugcuuucuaaaaaauguugugaaa

SEQ ID NO: 50543 - RNA, 32 nt, Homo Sapiens
uucuccccuugccggagcugcccuucaccuuu

SEQ ID NO: 50544 - RNA, 32 nt, Homo Sapiens
uuucggaagaacugguucuguggaauuugugc

SEQ ID NO: 50545 - RNA, 32 nt, Homo Sapiens
ucagcaaaaugaauauacuuccuggcuuccuu

SEQ ID NO: 50546 - RNA, 32 nt, Homo Sapiens
ugagucccagccagccgcucccaggggccugc

SEQ ID NO: 50547 - RNA, 32 nt, Homo Sapiens
cuuuggagggccccggggugcgcacggcgugu

SEQ ID NO: 50548 - RNA, 32 nt, Homo Sapiens
guuaaauauuucugcacaguguucccauggcc

SEQ ID NO: 50549 - RNA, 32 nt, Homo Sapiens
ucaucauuccuaauauuuuucuuguaguuguu

SEQ ID NO: 50550 - RNA, 32 nt, Homo Sapiens
cacacgccuacuuuuccagaauuuucuucaca

SEQ ID NO: 50551 - RNA, 32 nt, Homo Sapiens
ugaguggugucgcugucaggcuggccagguca

SEQ ID NO: 50552 - RNA, 32 nt, Homo Sapiens
gcaggaaaacgaaagcuuaucauguaaacaca

SEQ ID NO: 50553 - RNA, 32 nt, Homo Sapiens
cgauaaccaagagccacugagagagggaaacu

SEQ ID NO: 50554 - RNA, 32 nt, Homo Sapiens
ucuccucccuggauucuggauuaggagcuucu

SEQ ID NO: 50555 - RNA, 32 nt, Homo Sapiens
acacgcugcgcgcgcgucccugcgcgacgaga

SEQ ID NO: 50556 - RNA, 30 nt, Homo Sapiens
ccccugggaggugccagucauugaauagau

SEQ ID NO: 50557 - RNA, 32 nt, Homo Sapiens
ugccagcgcagcguucugggcuccucagucgc

SEQ ID NO: 50558 - RNA, 32 nt, Homo Sapiens
uuccaguggguuccucuggugcugcagccaga

SEQ ID NO: 50559 - RNA, 32 nt, Homo Sapiens
guuuuuuaaauaaaguacuuugaaaugcauga

SEQ ID NO: 50560 - RNA, 32 nt, Homo Sapiens
caggaacacacacauccuccaucccagcauag

SEQ ID NO: 50561 - RNA, 32 nt, Homo Sapiens
uguuuuacaaacuaugaaucagcaaauuuuua

SEQ ID NO: 50562 - RNA, 32 nt, Homo Sapiens
auauaucucgggugugccauauaauaccagcu

SEQ ID NO: 50563 - RNA, 32 nt, Homo Sapiens
aaaauaaaacaaagggcacagcaucuguaguc

SEQ ID NO: 50564 - RNA, 32 nt, Homo Sapiens
agagcauucuuuguacacuuuuucuaaucagc

SEQ ID NO: 50565 - RNA, 32 nt, Homo Sapiens
caugaaauuaauaaaacuuaucugagucacuu

SEQ ID NO: 50566 - RNA, 32 nt, Homo Sapiens
uagcaauacuugguuuaaaauuuuggaccuga

SEQ ID NO: 50567 - RNA, 32 nt, Homo Sapiens
gucuuugcuuaaaaacaauaccuuugaacauu

SEQ ID NO: 50568 - RNA, 32 nt, Homo Sapiens
aucggcuuaggaccgcuuucuagguggugagg

SEQ ID NO: 50569 - RNA, 30 nt, Homo Sapiens
ccagccugaaaagggggaaacagugccccg

SEQ ID NO: 50570 - RNA, 32 nt, Homo Sapiens
uuuuaagaaaucauacuucucuccacauugau

SEQ ID NO: 50571 - RNA, 27 nt, Homo Sapiens
gcagcacauuucuucagccucuccacc

SEQ ID NO: 50572 - RNA, 32 nt, Homo Sapiens
ucccuuacccugggaaggccucuuggagaccu

SEQ ID NO: 50573 - RNA, 32 nt, Homo Sapiens
auauuuguacuucuucucuguggacauguuuu

SEQ ID NO: 50574 - RNA, 32 nt, Homo Sapiens
cagacuacaauuuuagaugguaagguucacaa

SEQ ID NO: 50575 - RNA, 32 nt, Homo Sapiens
cacccuaggagacagcagcagcucuguucugg

SEQ ID NO: 50576 - RNA, 32 nt, Homo Sapiens
cucauuugcaauggcuaagaagugagauggug

SEQ ID NO: 50577 - RNA, 32 nt, Homo Sapiens
cauucagacaccuaaauauauacuuuguauca

SEQ ID NO: 50578 - RNA, 32 nt, Homo Sapiens
ggagccccgcagcuccuccgggagcccgcugg

SEQ ID NO: 50579 - RNA, 32 nt, Homo Sapiens
uaugaagaucacaguuaauggagauaguucug

SEQ ID NO: 50580 - RNA, 32 nt, Homo Sapiens
cagguggguuuaagucagagcuaguuccccaa

SEQ ID NO: 50581 - RNA, 32 nt, Homo Sapiens
ugcgcucggacggcgcucggaggguccucgcc

SEQ ID NO: 50582 - RNA, 32 nt, Homo Sapiens
agaugggaucccacuauauugcacaggcuggu

SEQ ID NO: 50583 - RNA, 32 nt, Homo Sapiens
gcaccaccagcugcuguugcugagagagcuuc

SEQ ID NO: 50584 - RNA, 32 nt, Homo Sapiens
cucaaaugcaaugucaaagagcuugcaguuua

SEQ ID NO: 50585 - RNA, 32 nt, Homo Sapiens
ggcgugugccucuggaggaccugagugaagac

SEQ ID NO: 50586 - RNA, 32 nt, Homo Sapiens
ccuuuccggggcugcuggccuggcccuugagu

SEQ ID NO: 50587 - RNA, 32 nt, Homo Sapiens
caacugcaugcacuucucuccccaucgcucca

SEQ ID NO: 50588 - RNA, 32 nt, Homo Sapiens
guuauuuucagcaaaaauaauuaaaggguuuu

SEQ ID NO: 50589 - RNA, 32 nt, Homo Sapiens
guucaugccgugcaauuuucuuggaacuccuu

SEQ ID NO: 50590 - RNA, 32 nt, Homo Sapiens
guggugucucaaagcaaaggaaaccuccacaa

SEQ ID NO: 50591 - RNA, 32 nt, Homo Sapiens
uugcggcggugcgugcuggcgccggagaguuc

SEQ ID NO: 50592 - RNA, 32 nt, Homo Sapiens
uacaaccgcccggggcuguggcuggcagcuug

SEQ ID NO: 50593 - RNA, 32 nt, Homo Sapiens
cugugucauuggcagggcuucacaugcaggag

SEQ ID NO: 50594 - RNA, 32 nt, Homo Sapiens
uuucucgcugcuucgggacgcgcucucugcgg

SEQ ID NO: 50595 - RNA, 32 nt, Homo Sapiens
uagccaagcuccccggcgagagccacaaugcc

SEQ ID NO: 50596 - RNA, 32 nt, Homo Sapiens
ccacccugccagcccuucuucuggcuuccccu

SEQ ID NO: 50597 - RNA, 31 nt, Homo Sapiens
uagagcuggcccugccugcccccagacggcc

SEQ ID NO: 50598 - RNA, 32 nt, Homo Sapiens
aagagacagggcuuugcugaaaaccaaacaug

SEQ ID NO: 50599 - RNA, 32 nt, Homo Sapiens
ugcuugagugccuggugaagaaugugauggga

SEQ ID NO: 50600 - RNA, 32 nt, Homo Sapiens
ucaccguugaugaacucauugguuucacaagu

SEQ ID NO: 50601 - RNA, 32 nt, Homo Sapiens
ucaagaccucucugcuuuucaagcauuuccuu

SEQ ID NO: 50602 - RNA, 32 nt, Homo Sapiens
ccccuccccucccccgacuaaacucgggcgcc

SEQ ID NO: 50603 - RNA, 32 nt, Homo Sapiens
gacagggugggcuggggugcgcuccggaggaa

SEQ ID NO: 50604 - RNA, 32 nt, Homo Sapiens
auucugacaugggagaaaaaccacccuauggu

SEQ ID NO: 50605 - RNA, 32 nt, Homo Sapiens
gcccccucuccaggggcugugcaggcagccca

SEQ ID NO: 50606 - RNA, 32 nt, Homo Sapiens
gacgcggccccggggggcucggagaagcuuua

SEQ ID NO: 50607 - RNA, 32 nt, Homo Sapiens
gcagacucauacauuugucugucagagagcaa

SEQ ID NO: 50608 - RNA, 32 nt, Homo Sapiens
gguccccaucaaucaauuauuuauuaacccau

SEQ ID NO: 50609 - RNA, 32 nt, Homo Sapiens
guucgccugcgguugguccgacuguuagcaac

SEQ ID NO: 50610 - RNA, 32 nt, Homo Sapiens
uuuuccccggcguggucucacucgcgauuuaa

SEQ ID NO: 50611 - RNA, 32 nt, Homo Sapiens
acuauuuuauguuguguuuucuacuuuucuca

SEQ ID NO: 50612 - RNA, 32 nt, Homo Sapiens
aguagggccagguguugggagcucccacgugg

SEQ ID NO: 50613 - RNA, 32 nt, Homo Sapiens
aucuguaaagacaaaauaguuuagugguugua

SEQ ID NO: 50614 - RNA, 32 nt, Homo Sapiens
gcauuuugucuacuuguaagugaauguaacau

SEQ ID NO: 50615 - RNA, 32 nt, Homo Sapiens
ucccacuccccgcucccuuccagccaagcugc

SEQ ID NO: 50616 - RNA, 32 nt, Homo Sapiens
aagccccccuggaggauaugauucacuuuaug

SEQ ID NO: 50617 - RNA, 32 nt, Homo Sapiens
auuaauuaaaggaaacauaaaccaaugcauuc

SEQ ID NO: 50618 - RNA, 32 nt, Homo Sapiens
gacuguaaauauuuguaaaauaaaauaacacu

SEQ ID NO: 50619 - RNA, 32 nt, Homo Sapiens
gaagaaagccuauucaggauauuaacuugaaa

SEQ ID NO: 50620 - RNA, 32 nt, Homo Sapiens
uuucagguggguuuaagucagagcuaguuccc

SEQ ID NO: 50621 - RNA, 32 nt, Homo Sapiens
ucaaaaagcucucagucugugucauguaagga

SEQ ID NO: 50622 - RNA, 32 nt, Homo Sapiens
guggcugugcgagguacugccggggcugagcu

SEQ ID NO: 50623 - RNA, 30 nt, Homo Sapiens
cgggcguggggcgggcagggaguggagucg

SEQ ID NO: 50624 - RNA, 32 nt, Homo Sapiens
guugagaaaaauuuauaagccaaagguucaga

SEQ ID NO: 50625 - RNA, 32 nt, Homo Sapiens
guucugcggcccggcagcggcgagcgggcgcg

SEQ ID NO: 50626 - RNA, 32 nt, Homo Sapiens
ucucugccaccccaagcucugcucuccuccuc

SEQ ID NO: 50627 - RNA, 32 nt, Homo Sapiens
gcggguuaagcucagcaguuuucacaguagag

SEQ ID NO: 50628 - RNA, 32 nt, Homo Sapiens
gcgcgcgguacagcucggcaggguguaguccu

SEQ ID NO: 50629 - RNA, 32 nt, Homo Sapiens
uggcuguggagcucgagggucugugaauaaag

SEQ ID NO: 50630 - RNA, 32 nt, Homo Sapiens
gugaagaaaaauguauuuuuccuaaauagaaa

SEQ ID NO: 50631 - RNA, 32 nt, Homo Sapiens
gucuaucugaaauguuugcuguaacagccacc

SEQ ID NO: 50632 - RNA, 32 nt, Homo Sapiens
cagaggggccauuuuuccuuuuggcuuucgag

SEQ ID NO: 50633 - RNA, 32 nt, Homo Sapiens
aggucugggagccccaggcuggccucagacug

SEQ ID NO: 50634 - RNA, 32 nt, Homo Sapiens
uuguaacaaaaaugacuaaauaaaaaguauau

SEQ ID NO: 50635 - RNA, 32 nt, Homo Sapiens
aggaaaaaaaaauuacaugaaaauagaaugca

SEQ ID NO: 50636 - RNA, 32 nt, Homo Sapiens
gagcaagacccugucucaaacaacaacaacaa

SEQ ID NO: 50637 - RNA, 32 nt, Homo Sapiens
aacuuauuggggcugggcaagcacuggggggc

SEQ ID NO: 50638 - RNA, 32 nt, Homo Sapiens
uccauuuugaaagggaaaaaggcucuccccac

SEQ ID NO: 50639 - RNA, 30 nt, Homo Sapiens
gacucggcgcccggagccagcgccccgcac

SEQ ID NO: 50640 - RNA, 32 nt, Homo Sapiens
ugcaccuacguuuccaccuccucccccuccuu

SEQ ID NO: 50641 - RNA, 32 nt, Homo Sapiens
cccgguuuccuguccuucuccccucccagcuc

SEQ ID NO: 50642 - RNA, 30 nt, Homo Sapiens
aaacaagcuaauccaauccaucuuacuugu

SEQ ID NO: 50643 - RNA, 32 nt, Homo Sapiens
cgugugcagaggugggggugcugagcgaggag

SEQ ID NO: 50644 - RNA, 32 nt, Homo Sapiens
uuagauuagagaggacagcaaagacgcggcug

SEQ ID NO: 50645 - RNA, 32 nt, Homo Sapiens
uacaguuauucuuaaagauaauuaaaaaugaa

SEQ ID NO: 50646 - RNA, 32 nt, Homo Sapiens
ccugagcucaggugauccacccgucuuggccu

SEQ ID NO: 50647 - RNA, 32 nt, Homo Sapiens
cacauuuuugaaaaauaaauuuaagaguuuuu

SEQ ID NO: 50648 - RNA, 31 nt, Homo Sapiens
gccuuccuuucuccugccccaagggcccaga

SEQ ID NO: 50649 - RNA, 32 nt, Homo Sapiens
acaccaccucucacaauuuagcagaagcugau

SEQ ID NO: 50650 - RNA, 32 nt, Homo Sapiens
caagauaguuuagguauaauuguccaaaauaa

SEQ ID NO: 50651 - RNA, 32 nt, Homo Sapiens
uuuugggaaaggaaacaaaaaagugaaggaaa

SEQ ID NO: 50652 - RNA, 32 nt, Homo Sapiens
ggaucagcugcgaugugucaagcaggaugcug

SEQ ID NO: 50653 - RNA, 32 nt, Homo Sapiens
ugucuccccagugccuucuccuccgcugcagc

SEQ ID NO: 50654 - RNA, 32 nt, Homo Sapiens
ugcaacucuucguaacggcagacgcuggcccu

SEQ ID NO: 50655 - RNA, 32 nt, Homo Sapiens
gggccuugcaaauaaacuucugaauuaaaaaa

SEQ ID NO: 50656 - RNA, 32 nt, Homo Sapiens
uucaccaauacaacagccacccugcccagucu

SEQ ID NO: 50657 - RNA, 32 nt, Homo Sapiens
aggaugugaggguggggguggagcggaugcac

SEQ ID NO: 50658 - RNA, 32 nt, Homo Sapiens
cuugugauccuccuuauugauuuuuucccuca

SEQ ID NO: 50659 - RNA, 32 nt, Homo Sapiens
gacccccgcccccugcccuccccucucugcac

SEQ ID NO: 50660 - RNA, 31 nt, Homo Sapiens
aacuuuuguaacauuacuguuuuuuagacug

SEQ ID NO: 50661 - RNA, 32 nt, Homo Sapiens
gaggucagacuggagugaauguuguaaaaguu

SEQ ID NO: 50662 - RNA, 32 nt, Homo Sapiens
augaguaaaaucuauuugaagguaucuuguuu

SEQ ID NO: 50663 - RNA, 32 nt, Homo Sapiens
gggcccauuucccuccugucucccgggggcuc

SEQ ID NO: 50664 - RNA, 32 nt, Homo Sapiens
cagguucuguuuuuaaauguaccuguuaagua

SEQ ID NO: 50665 - RNA, 32 nt, Homo Sapiens
gcacugccuaucccuuucccacacucgcuucu

SEQ ID NO: 50666 - RNA, 32 nt, Homo Sapiens
uguuaguauaucuauucuaaucauuuuaucuu

SEQ ID NO: 50667 - RNA, 32 nt, Homo Sapiens
auccccaccccggcugcugcccaggauccgcc

SEQ ID NO: 50668 - RNA, 32 nt, Homo Sapiens
agccccggggcccucacuggcuccaggaaacc

SEQ ID NO: 50669 - RNA, 32 nt, Homo Sapiens
ugaauucucuacauguuuaaaaucuugggaau

SEQ ID NO: 50670 - RNA, 32 nt, Homo Sapiens
uggagcaugaggcuggaugcagugguggugag

SEQ ID NO: 50671 - RNA, 32 nt, Homo Sapiens
uuuccagagaaggcgcuugagaaggagaaacg

SEQ ID NO: 50672 - RNA, 32 nt, Homo Sapiens
uuaguaaaaugaaggucaaguaugacaucuua

SEQ ID NO: 50673 - RNA, 32 nt, Homo Sapiens
guacaguugagauaguuaagauauaaccacaa

SEQ ID NO: 50674 - RNA, 32 nt, Homo Sapiens
uaaaaacaagauacagauuuuggugugaaaua

SEQ ID NO: 50675 - RNA, 32 nt, Homo Sapiens
ucggccccgcggcucggggaccccgacucccg

SEQ ID NO: 50676 - RNA, 32 nt, Homo Sapiens
ugcaaggauuggccgggcgugguggugcgugc

SEQ ID NO: 50677 - RNA, 32 nt, Homo Sapiens
gaagacaggugcacagaugcuucccacgaccu

SEQ ID NO: 50678 - RNA, 32 nt, Homo Sapiens
gcucauuuauauuaauacuaagguccuguggg

SEQ ID NO: 50679 - RNA, 32 nt, Homo Sapiens
cccggcggcgcagcugcccagcgcaaccucgg

SEQ ID NO: 50680 - RNA, 27 nt, Homo Sapiens
uguauacauugauucuggugguagacu

SEQ ID NO: 50681 - RNA, 32 nt, Homo Sapiens
aacagguuuuauaauuuuuuuauuacugauuu

SEQ ID NO: 50682 - RNA, 32 nt, Homo Sapiens
caucacucuaaaagcacugaccucaaaaaacc

SEQ ID NO: 50683 - RNA, 32 nt, Homo Sapiens
gaaagcgucaucaaugucuugaaggaaauuac

SEQ ID NO: 50684 - RNA, 32 nt, Homo Sapiens
cuucucuccagaugaagggaagacauucauag

SEQ ID NO: 50685 - RNA, 32 nt, Homo Sapiens
cuggcagccccagccgccccagccucacgcug

SEQ ID NO: 50686 - RNA, 32 nt, Homo Sapiens
uuuuaguggucuuuuuaauguuuucugcugug

SEQ ID NO: 50687 - RNA, 32 nt, Homo Sapiens
auuugaagaaauguauaaauaaaaucuacuuu

SEQ ID NO: 50688 - RNA, 32 nt, Homo Sapiens
ggcguuccucucuggagggagggacgcagagg

SEQ ID NO: 50689 - RNA, 32 nt, Homo Sapiens
ccaguggaauggggucugggcugcuggaaccu

SEQ ID NO: 50690 - RNA, 32 nt, Homo Sapiens
gccgggcggcggugacugugcaccgacgucgg

SEQ ID NO: 50691 - RNA, 32 nt, Homo Sapiens
uuuauuuguuuguuuacucaucacucagugag

SEQ ID NO: 50692 - RNA, 32 nt, Homo Sapiens
aggugcuuguccugccuacacccagguaucuu

SEQ ID NO: 50693 - RNA, 32 nt, Homo Sapiens
agauagaauuuccaauauuggagcauaucaaa

SEQ ID NO: 50694 - RNA, 32 nt, Homo Sapiens
gucuguaaagaaauaaauauuuuuuggauuau

SEQ ID NO: 50695 - RNA, 32 nt, Homo Sapiens
augagcaggaagcucauguauguuugcauuuc

SEQ ID NO: 50696 - RNA, 32 nt, Homo Sapiens
ugguccucccucugcacccccaccaccuccug

SEQ ID NO: 50697 - RNA, 32 nt, Homo Sapiens
auugcggagagcggcugaucgcaguccggagg

SEQ ID NO: 50698 - RNA, 32 nt, Homo Sapiens
acgugcgcguccucgcggcucacauuucggcg

SEQ ID NO: 50699 - RNA, 32 nt, Homo Sapiens
ucucaaugcaagaauccaguaccuugcacaua

SEQ ID NO: 50700 - RNA, 32 nt, Homo Sapiens
cagcugaaccagcugggcgcgcagcaguucuc

SEQ ID NO: 50701 - RNA, 32 nt, Homo Sapiens
agacuuaagaucaugaaagauauuugaagucg

SEQ ID NO: 50702 - RNA, 32 nt, Homo Sapiens
gccccaugcgggucaccucccuagucccaccu

SEQ ID NO: 50703 - RNA, 32 nt, Homo Sapiens
gccgucgcccgcaccauguccgcggccgccua

SEQ ID NO: 50704 - RNA, 32 nt, Homo Sapiens
caguguggucaccgagugaggacccuccucac

SEQ ID NO: 50705 - RNA, 32 nt, Homo Sapiens
ugauuuuaguaaauuuaaagacuugugcagcc

SEQ ID NO: 50706 - RNA, 32 nt, Homo Sapiens
caugagccaagagcccucuucacgcugcuaac

SEQ ID NO: 50707 - RNA, 32 nt, Homo Sapiens
ccugcccuauuccuccucccaagucuguucuc

SEQ ID NO: 50708 - RNA, 32 nt, Homo Sapiens
caugaggauggacuucuucaugaauuucaaau

SEQ ID NO: 50709 - RNA, 32 nt, Homo Sapiens
gagcagugguggcccagcccaggcgguaggcc

SEQ ID NO: 50710 - RNA, 32 nt, Homo Sapiens
acuaaaaagcauccugcugcugcagugcaauu

SEQ ID NO: 50711 - RNA, 32 nt, Homo Sapiens
gaaggaucuucagauauucaugcacugaaaaa

SEQ ID NO: 50712 - RNA, 32 nt, Homo Sapiens
gagggucuccgcccaccccggccggacuuuga

SEQ ID NO: 50713 - RNA, 32 nt, Homo Sapiens
caggagcugaguuuucugacuugaguuaacaa

SEQ ID NO: 50714 - RNA, 32 nt, Homo Sapiens
ggaacaguagguccaggcuggaugcugguaug

SEQ ID NO: 50715 - RNA, 32 nt, Homo Sapiens
gcguggcgaaagucagcguccacugcagcaca

SEQ ID NO: 50716 - RNA, 32 nt, Homo Sapiens
ggucgcuaaugauggcuguaucucccuucacu

SEQ ID NO: 50717 - RNA, 32 nt, Homo Sapiens
agaauagaguugaugagcccucuucuccucaa

SEQ ID NO: 50718 - RNA, 32 nt, Homo Sapiens
uccucuacugcuggccaagacccgucacuuua

SEQ ID NO: 50719 - RNA, 32 nt, Homo Sapiens
cccccgugucaccucccuucuguuaucgcuga

SEQ ID NO: 50720 - RNA, 32 nt, Homo Sapiens
ucucgccaucuggcagaucguggacccucugc

SEQ ID NO: 50721 - RNA, 32 nt, Homo Sapiens
uaaaaaucaguuucauuuucauauuucauaga

SEQ ID NO: 50722 - RNA, 32 nt, Homo Sapiens
uccaacucauugauuucagagauagggaagcu

SEQ ID NO: 50723 - RNA, 32 nt, Homo Sapiens
aaagcccugugcugguggauggggagaaggaa

SEQ ID NO: 50724 - RNA, 32 nt, Homo Sapiens
agcaagacuccgccucaaaaauaaaaaauaaa

SEQ ID NO: 50725 - RNA, 32 nt, Homo Sapiens
gauccccaucgagcggcuggccucagagcgcg

SEQ ID NO: 50726 - RNA, 32 nt, Homo Sapiens
caaagcaguguuuuucagcagacggcugaugg

SEQ ID NO: 50727 - RNA, 32 nt, Homo Sapiens
gagagauuuuuccaacagucagcuauuuuaug

SEQ ID NO: 50728 - RNA, 32 nt, Homo Sapiens
agagugcgggccgggcgggagugcggcgagcc

SEQ ID NO: 50729 - RNA, 32 nt, Homo Sapiens
gaaucugggagugugagugugcaugugaacug

SEQ ID NO: 50730 - RNA, 32 nt, Homo Sapiens
ugcacaaagaaaaagaaaauuucuuuuacugu

SEQ ID NO: 50731 - RNA, 32 nt, Homo Sapiens
guuuugugauaaaacugcuuagauuuuguuga

SEQ ID NO: 50732 - RNA, 32 nt, Homo Sapiens
cugggaggugggggugauagauauauucuacu

SEQ ID NO: 50733 - RNA, 32 nt, Homo Sapiens
aggaccugcugcuuuagagugcggcugaaccc

SEQ ID NO: 50734 - RNA, 32 nt, Homo Sapiens
uggauuccagguggacuggaccaagagcaggc

SEQ ID NO: 50735 - RNA, 32 nt, Homo Sapiens
guuaguuucuuugguguucaucuagauggaag

SEQ ID NO: 50736 - RNA, 32 nt, Homo Sapiens
cuuccgaauauguuuuaugacgguugauuuua

SEQ ID NO: 50737 - RNA, 32 nt, Homo Sapiens
cuuaccgguuggcugggccagcugcgccgcgg

SEQ ID NO: 50738 - RNA, 32 nt, Homo Sapiens
gcugcggccaaggggcaucagccugggcccgc

SEQ ID NO: 50739 - RNA, 32 nt, Homo Sapiens
cugauuucaaacggaucauaacaaagaggaga

SEQ ID NO: 50740 - RNA, 32 nt, Homo Sapiens
gcugccaggcccaggaggagcugggccugcaa

SEQ ID NO: 50741 - RNA, 32 nt, Homo Sapiens
ccuugaggacuuucgagcaaacagacacguug

SEQ ID NO: 50742 - RNA, 32 nt, Homo Sapiens
ccuaaucuuauuuuuauuuacuugaguaaugu

SEQ ID NO: 50743 - RNA, 32 nt, Homo Sapiens
gaagggacccggggcgggaggaggaagugagg

SEQ ID NO: 50744 - RNA, 32 nt, Homo Sapiens
auuagaggaagacagcccaccugccuaacugg

SEQ ID NO: 50745 - RNA, 32 nt, Homo Sapiens
gugugugggccuaugcacucacacacugaaga

SEQ ID NO: 50746 - RNA, 32 nt, Homo Sapiens
cgcucgcccccuccccaggguggcuccgcuuu

SEQ ID NO: 50747 - RNA, 32 nt, Homo Sapiens
ugccuucaugucacugcagagguaugaaaagg

SEQ ID NO: 50748 - RNA, 32 nt, Homo Sapiens
gggagggugcaccaggcccaccccacccugug

SEQ ID NO: 50749 - RNA, 32 nt, Homo Sapiens
cggcgcagcgcgggugggaggcggggaggagc

SEQ ID NO: 50750 - RNA, 32 nt, Homo Sapiens
ucauccacccacuccccucggaccucagcaug

SEQ ID NO: 50751 - RNA, 32 nt, Homo Sapiens
aauacacagauugaaaucauggcagguccaga

SEQ ID NO: 50752 - RNA, 32 nt, Homo Sapiens
uaagauuagaguguuucuuaauucauuucaaa

SEQ ID NO: 50753 - RNA, 32 nt, Homo Sapiens
gcaggccaccgccccucccaagacuccucaag

SEQ ID NO: 50754 - RNA, 32 nt, Homo Sapiens
ucuccuuucuccgcucuuagguaaaugaacaa

SEQ ID NO: 50755 - RNA, 32 nt, Homo Sapiens
gaggcccgccugagccagcccggcgcccuagc

SEQ ID NO: 50756 - RNA, 31 nt, Homo Sapiens
ugagugcugggcacugcuccaagggacaggu

SEQ ID NO: 50757 - RNA, 32 nt, Homo Sapiens
uggacucuacucuccuucucugguucucagcu

SEQ ID NO: 50758 - RNA, 32 nt, Homo Sapiens
cggugucccuccccgcgccccgagcccgcgcu

SEQ ID NO: 50759 - RNA, 32 nt, Homo Sapiens
uguuuugugauuuuuuuuuucuuccgaagaac

SEQ ID NO: 50760 - RNA, 32 nt, Homo Sapiens
acuuuuucguuuuuguuuuucugggcaaguuu

SEQ ID NO: 50761 - RNA, 32 nt, Homo Sapiens
cuguuaguuaaaugagcuauagauaaggcagc

SEQ ID NO: 50762 - RNA, 32 nt, Homo Sapiens
uauucaccggggaaacaagguauuugaauuuc

SEQ ID NO: 50763 - RNA, 32 nt, Homo Sapiens
uuaaaggaugacugaugguccuuggaagagaa

SEQ ID NO: 50764 - RNA, 32 nt, Homo Sapiens
acguugguugucacugucaucauugucacucu

SEQ ID NO: 50765 - RNA, 32 nt, Homo Sapiens
uaguauaaacacauuuuugcuauuaaaaaugc

SEQ ID NO: 50766 - RNA, 32 nt, Homo Sapiens
acacacauguucuguuccuccuccucaugcau

SEQ ID NO: 50767 - RNA, 32 nt, Homo Sapiens
aagaaguuaguaguauugaguggauacaauga

SEQ ID NO: 50768 - RNA, 32 nt, Homo Sapiens
gcuauugugaauauugcugcaaugcacuuaca

SEQ ID NO: 50769 - RNA, 32 nt, Homo Sapiens
ccaaauccggccgggcgggcggcucccgccug

SEQ ID NO: 50770 - RNA, 32 nt, Homo Sapiens
cgcuugggucucgggauaccccguuucuuccu

SEQ ID NO: 50771 - RNA, 32 nt, Homo Sapiens
gaagccccuauagaggccccagucccaacucc

SEQ ID NO: 50772 - RNA, 30 nt, Homo Sapiens
gccaguucuccagcucuccaucuuagagag

SEQ ID NO: 50773 - RNA, 32 nt, Homo Sapiens
caggagcugagguuucugauagacuuggggau

SEQ ID NO: 50774 - RNA, 32 nt, Homo Sapiens
uguccgccguagcuuuaccauuuuagugaggg

SEQ ID NO: 50775 - RNA, 32 nt, Homo Sapiens
cauuauuugaauguguuagaaugugcauaagu

SEQ ID NO: 50776 - RNA, 32 nt, Homo Sapiens
ucaagauauaugauuucucuauggaaauaaaa

SEQ ID NO: 50777 - RNA, 32 nt, Homo Sapiens
cccaggccccccagcccaggcccagcauaaag

SEQ ID NO: 50778 - RNA, 32 nt, Homo Sapiens
aguaacuaauuugcuuuugauuuuauaggcuc

SEQ ID NO: 50779 - RNA, 32 nt, Homo Sapiens
uaugacacagaaagaaauuaugaaaaguauaa

SEQ ID NO: 50780 - RNA, 31 nt, Homo Sapiens
ccacggcugccggacgccugagucuguuggc

SEQ ID NO: 50781 - RNA, 32 nt, Homo Sapiens
aauaacuucuaaauucugacuuuugaaaauau

SEQ ID NO: 50782 - RNA, 32 nt, Homo Sapiens
cccucuggagcaugcagcaacaacauaccauc

SEQ ID NO: 50783 - RNA, 32 nt, Homo Sapiens
guccuuucauuuccauuuauaagacgcacaga

SEQ ID NO: 50784 - RNA, 32 nt, Homo Sapiens
auuuuguagagggacagggagugggcaagggg

SEQ ID NO: 50785 - RNA, 32 nt, Homo Sapiens
cugaaaaguggaaucggagcuguuguauuacc

SEQ ID NO: 50786 - RNA, 32 nt, Homo Sapiens
guacaguaggcauuaugugcacagcaaauugc

SEQ ID NO: 50787 - RNA, 32 nt, Homo Sapiens
ucuaaaauguuuuuauuuugguaauuuuguca

SEQ ID NO: 50788 - RNA, 32 nt, Homo Sapiens
cagccugccccaucugccccagccccauggga

SEQ ID NO: 50789 - RNA, 32 nt, Homo Sapiens
agagugccacugcaugagacaccugugaccau

SEQ ID NO: 50790 - RNA, 32 nt, Homo Sapiens
uuuuguauggcaucuuuuuuuaucaaaauuca

SEQ ID NO: 50791 - RNA, 32 nt, Homo Sapiens
guacuugagucuuuuuuaguuuacuuagaaag

SEQ ID NO: 50792 - RNA, 32 nt, Homo Sapiens
gucuaauuagugccuggggaugaccuaugcaa

SEQ ID NO: 50793 - RNA, 32 nt, Homo Sapiens
uucguguugucagagagugucuggaagcugcu

SEQ ID NO: 50794 - RNA, 32 nt, Homo Sapiens
ccgccgccuccucauucauccucgugcaccau

SEQ ID NO: 50795 - RNA, 32 nt, Homo Sapiens
cuccuuuuccccugcuggcuggugacugucag

SEQ ID NO: 50796 - RNA, 30 nt, Homo Sapiens
uuuugugucuguggagaaagaagcuucugu

SEQ ID NO: 50797 - RNA, 32 nt, Homo Sapiens
aaagacccuccuauucuauaaaacucugcaug

SEQ ID NO: 50798 - RNA, 32 nt, Homo Sapiens
cagccuccaucccuggccuccuccccucacac

SEQ ID NO: 50799 - RNA, 32 nt, Homo Sapiens
aaaggcgugcagggaggccuagcucugucucc

SEQ ID NO: 50800 - RNA, 32 nt, Homo Sapiens
ggacuggggccuuuggcacagcagccgguguc

SEQ ID NO: 50801 - RNA, 32 nt, Homo Sapiens
ggcuuggggucuuuaaaaccagcagggggaaa

SEQ ID NO: 50802 - RNA, 32 nt, Homo Sapiens
gccuauauaaccucgccagguuguuggugugg

SEQ ID NO: 50803 - RNA, 32 nt, Homo Sapiens
agggaguggcucggaaggggcccccacucucc

SEQ ID NO: 50804 - RNA, 32 nt, Homo Sapiens
aggaucuugaguuuuuuacaggauguuggguu

SEQ ID NO: 50805 - RNA, 32 nt, Homo Sapiens
auaauuuaucaguauuuucucauccagucaaa

SEQ ID NO: 50806 - RNA, 30 nt, Homo Sapiens
agcaugguauucaaguacaagaguggauua

SEQ ID NO: 50807 - RNA, 32 nt, Homo Sapiens
acuguuucacuggaaagugucaauagaguugc

SEQ ID NO: 50808 - RNA, 32 nt, Homo Sapiens
ggaagcaugcguggccugaagccucaccgugu

SEQ ID NO: 50809 - RNA, 32 nt, Homo Sapiens
gacagagcgagaugggccggaggugcagagag

SEQ ID NO: 50810 - RNA, 32 nt, Homo Sapiens
cuucguuccuucccuggcugccggaggagacc

SEQ ID NO: 50811 - RNA, 32 nt, Homo Sapiens
uccuagacuagaugaaugucagccacaggagc

SEQ ID NO: 50812 - RNA, 32 nt, Homo Sapiens
uguaaggauugguacuaucuaucauuccuuau

SEQ ID NO: 50813 - RNA, 32 nt, Homo Sapiens
aguguggcuuccucaucuccaaucagcugcuu

SEQ ID NO: 50814 - RNA, 32 nt, Homo Sapiens
ugccuugauucacuuagaagugucucagaaaa

SEQ ID NO: 50815 - RNA, 32 nt, Homo Sapiens
ugaaaaaagggcauguuuuaagaaauugccuc

SEQ ID NO: 50816 - RNA, 32 nt, Homo Sapiens
gaugcaaaauuccacaacaaaacauuagcaga

SEQ ID NO: 50817 - RNA, 32 nt, Homo Sapiens
aaccacucauuucccuucgcaaaagaggcgcc

SEQ ID NO: 50818 - RNA, 32 nt, Homo Sapiens
uuuuggguaucuguuacuuuggcacuauucuu

SEQ ID NO: 50819 - RNA, 30 nt, Homo Sapiens
uuugugaggcugcuuugcuaacucucugag

SEQ ID NO: 50820 - RNA, 32 nt, Homo Sapiens
guccaggaggccgggaucaggcuguugccaug

SEQ ID NO: 50821 - RNA, 32 nt, Homo Sapiens
ccagcacccacuuuucuaaucaugaaugaaca

SEQ ID NO: 50822 - RNA, 32 nt, Homo Sapiens
gaacaugauaccuggaggaagggaagaaacca

SEQ ID NO: 50823 - RNA, 32 nt, Homo Sapiens
agagcuccaaguguauuaaacaugacagccau

SEQ ID NO: 50824 - RNA, 32 nt, Homo Sapiens
uuuauuaaauguuguugguucuguaagagcaa

SEQ ID NO: 50825 - RNA, 32 nt, Homo Sapiens
uguaucuauugacaugcccacaaaacagguuu

SEQ ID NO: 50826 - RNA, 32 nt, Homo Sapiens
gagugguaucccuaccuggccucccccuggcc

SEQ ID NO: 50827 - RNA, 32 nt, Homo Sapiens
uagaucucugcaagggagguguuacagcuggu

SEQ ID NO: 50828 - RNA, 32 nt, Homo Sapiens
uuacaucuuuccauaucuuuuacacuuaccac

SEQ ID NO: 50829 - RNA, 32 nt, Homo Sapiens
ugaaagcauugccagcagccagguauguuccu

SEQ ID NO: 50830 - RNA, 32 nt, Homo Sapiens
aaacaaagcuauucuuuuuucuccuuuaagau

SEQ ID NO: 50831 - RNA, 32 nt, Homo Sapiens
uuuauaacuuuuugcaacaaaauaauguguaa

SEQ ID NO: 50832 - RNA, 32 nt, Homo Sapiens
cacuagagaagcugcgcugguaucuuuccugg

SEQ ID NO: 50833 - RNA, 32 nt, Homo Sapiens
cggaggggaccggcugugcagacgccauggag

SEQ ID NO: 50834 - RNA, 32 nt, Homo Sapiens
uugaaaaacacuuuucaguuggaauugauuuu

SEQ ID NO: 50835 - RNA, 32 nt, Homo Sapiens
ugccgcuugacaaagcccuaggguuccagccu

SEQ ID NO: 50836 - RNA, 32 nt, Homo Sapiens
uggccgccccacuuuccggcauaacuuuuuag

SEQ ID NO: 50837 - RNA, 29 nt, Homo Sapiens
uguguucaguguuucaaauacaauuugua

SEQ ID NO: 50838 - RNA, 32 nt, Homo Sapiens
agcagcgcucgacgaggcggagccgcgagagc

SEQ ID NO: 50839 - RNA, 32 nt, Homo Sapiens
uuuuugcuaguguuuauguauacuguuagaau

SEQ ID NO: 50840 - RNA, 32 nt, Homo Sapiens
aacauuaaucaugaucuaaaagaaucaauaaa

SEQ ID NO: 50841 - RNA, 32 nt, Homo Sapiens
caguguugauucaucucauuacuuccuacaga

SEQ ID NO: 50842 - RNA, 32 nt, Homo Sapiens
auccagcgcuguaucugaguguaguucauuuu

SEQ ID NO: 50843 - RNA, 32 nt, Homo Sapiens
gcagguggagggccaggauuggugggugagcu

SEQ ID NO: 50844 - RNA, 32 nt, Homo Sapiens
aacggcuggcagcuggcguggaguacaccuuc

SEQ ID NO: 50845 - RNA, 32 nt, Homo Sapiens
uaaaacaucuguauagcaggcaucagcgagcu

SEQ ID NO: 50846 - RNA, 32 nt, Homo Sapiens
cuccggccucagggcagaaaaagggaauggca

SEQ ID NO: 50847 - RNA, 32 nt, Homo Sapiens
gauccuugguuuuacauuaagaugaaccuggg

SEQ ID NO: 50848 - RNA, 32 nt, Homo Sapiens
agcaucuggugacaucagaacucugugucagc

SEQ ID NO: 50849 - RNA, 32 nt, Homo Sapiens
gaucaaggugccgacaugguagguuuauggug

SEQ ID NO: 50850 - RNA, 32 nt, Homo Sapiens
cagccgggcaguggccggcguuccccggagcu

SEQ ID NO: 50851 - RNA, 32 nt, Homo Sapiens
ucuccccuggugucuguacuguguacacacau

SEQ ID NO: 50852 - RNA, 32 nt, Homo Sapiens
uaacuauuuguaugucauuuugaaaguguacu

SEQ ID NO: 50853 - RNA, 32 nt, Homo Sapiens
gugugcaucuucugcuucugcauccuugguca

SEQ ID NO: 50854 - RNA, 32 nt, Homo Sapiens
ccuacucucguauuuuaaccacaguugcucua

SEQ ID NO: 50855 - RNA, 32 nt, Homo Sapiens
uauucugaauguuuacaucuguuugacauuag

SEQ ID NO: 50856 - RNA, 32 nt, Homo Sapiens
uggagcucuagcugccuauuuuguguuuaggg

SEQ ID NO: 50857 - RNA, 32 nt, Homo Sapiens
gagcggcggcggggcggucguggccacauccg

SEQ ID NO: 50858 - RNA, 32 nt, Homo Sapiens
uccuggugcagaugaagggugcucagcagagc

SEQ ID NO: 50859 - RNA, 32 nt, Homo Sapiens
cugucuuaaugcagccuauuaagaguuggguu

SEQ ID NO: 50860 - RNA, 32 nt, Homo Sapiens
ugaauuggcucuucuuuguucuggcagugagu

SEQ ID NO: 50861 - RNA, 32 nt, Homo Sapiens
augcaauuccccuguuuugucguuuaggagau

SEQ ID NO: 50862 - RNA, 32 nt, Homo Sapiens
guggugggaggguggagggcucccucuggcca

SEQ ID NO: 50863 - RNA, 32 nt, Homo Sapiens
cccacaggaagccugcaguccuggaagcgcga

SEQ ID NO: 50864 - RNA, 32 nt, Homo Sapiens
cacagauucuucugcugucuucccauucccgu

SEQ ID NO: 50865 - RNA, 32 nt, Homo Sapiens
uugugaucuuccgucuuacuuuaugaaacugc

SEQ ID NO: 50866 - RNA, 32 nt, Homo Sapiens
ccaguggcagcagaagacaagcacucugagac

SEQ ID NO: 50867 - RNA, 32 nt, Homo Sapiens
agugugaggacaaaaacccggaaaaggaagcu

SEQ ID NO: 50868 - RNA, 32 nt, Homo Sapiens
uugauuuguucuauuccauccauugucccuuu

SEQ ID NO: 50869 - RNA, 32 nt, Homo Sapiens
uaaaguguguggauaggcugaugcuauagguu

SEQ ID NO: 50870 - RNA, 32 nt, Homo Sapiens
gugaaaacuccagcggacucugcuggaaagga

SEQ ID NO: 50871 - RNA, 32 nt, Homo Sapiens
gauuaugugccauuuuagcauuugccuagcaa

SEQ ID NO: 50872 - RNA, 32 nt, Homo Sapiens
cgcgauugcgauuuagguuuccgcgcauuuaa

SEQ ID NO: 50873 - RNA, 32 nt, Homo Sapiens
ccccuggguucacagaucuuucugccuuuggc

SEQ ID NO: 50874 - RNA, 32 nt, Homo Sapiens
ggcaaauacuaaaaaucucgucaauguaauuu

SEQ ID NO: 50875 - RNA, 32 nt, Homo Sapiens
aacuggaggaccugaagaagcuagaaccaauc

SEQ ID NO: 50876 - RNA, 32 nt, Homo Sapiens
acugguaccaaaacagagauauagaccaaugg

SEQ ID NO: 50877 - RNA, 32 nt, Homo Sapiens
uuuugauggugcuagugacuaguuucuuugcu

SEQ ID NO: 50878 - RNA, 31 nt, Homo Sapiens
cccgagccaugcugacugugaguuaauaaaa

SEQ ID NO: 50879 - RNA, 32 nt, Homo Sapiens
gcaaccuccgccuccuggguuccaacgauucu

SEQ ID NO: 50880 - RNA, 32 nt, Homo Sapiens
cuucucaguaaggcccucuggacacccaaucu

SEQ ID NO: 50881 - RNA, 30 nt, Homo Sapiens
cagcucuguucauggcguucucgaagcucu

SEQ ID NO: 50882 - RNA, 32 nt, Homo Sapiens
gagaagcaaugugaaaagcaucaggaaagcug

SEQ ID NO: 50883 - RNA, 32 nt, Homo Sapiens
cuuccugcagugaauuugaauaaaugagaaaa

SEQ ID NO: 50884 - RNA, 30 nt, Homo Sapiens
ucccaccagaagcuugccugagcuguuugg

SEQ ID NO: 50885 - RNA, 32 nt, Homo Sapiens
cugugaucacauuuguguuuuauuuuauuuua

SEQ ID NO: 50886 - RNA, 32 nt, Homo Sapiens
caccugagcggccaccgcgucccggccaggcg

SEQ ID NO: 50887 - RNA, 32 nt, Homo Sapiens
cagcagaagccgcgcuguuuccuccuuccccc

SEQ ID NO: 50888 - RNA, 32 nt, Homo Sapiens
ggaagagauaugucgugagcuggaggaacauu

SEQ ID NO: 50889 - RNA, 30 nt, Homo Sapiens
agugugucaggugcugcagagcguucuugg

SEQ ID NO: 50890 - RNA, 32 nt, Homo Sapiens
gcgcuguggacuguccugaggagcccugagga

SEQ ID NO: 50891 - RNA, 32 nt, Homo Sapiens
caggacaggcucuggagggaaaagccagagag

SEQ ID NO: 50892 - RNA, 32 nt, Homo Sapiens
gaugagacuagcaugggcccaccuggagggcu

SEQ ID NO: 50893 - RNA, 32 nt, Homo Sapiens
ccuugaagcugcuugucucauguguaugaugu

SEQ ID NO: 50894 - RNA, 32 nt, Homo Sapiens
ggagcuuucguuagccuuguuugggauacaaa

SEQ ID NO: 50895 - RNA, 32 nt, Homo Sapiens
ugccagggagugccgcauugcuuagcgacccc

SEQ ID NO: 50896 - RNA, 32 nt, Homo Sapiens
guauugagaucaaugaacacuaaccugaggag

SEQ ID NO: 50897 - RNA, 32 nt, Homo Sapiens
gccagcccuccuccccgacccagcgccuaagc

SEQ ID NO: 50898 - RNA, 32 nt, Homo Sapiens
ucauggagaaaaccaaacaaaugcuuuuugga

SEQ ID NO: 50899 - RNA, 32 nt, Homo Sapiens
uccacggccguacaauccccagcccuuccagc

SEQ ID NO: 50900 - RNA, 31 nt, Homo Sapiens
gggucuauggucgcuccgcggccgcuccgcc

SEQ ID NO: 50901 - RNA, 32 nt, Homo Sapiens
ucucucucucuuucuuuuuucagggucuuauu

SEQ ID NO: 50902 - RNA, 32 nt, Homo Sapiens
augucaaccauucaaaaacucaggguguucgg

SEQ ID NO: 50903 - RNA, 32 nt, Homo Sapiens
uuaaagaauuaaaagaagaacuagaccaauau

SEQ ID NO: 50904 - RNA, 32 nt, Homo Sapiens
uuaacuggaaaacauauguuccuuauguguga

SEQ ID NO: 50905 - RNA, 30 nt, Homo Sapiens
gagaugucuaaagaauacaagaguaggaga

SEQ ID NO: 50906 - RNA, 31 nt, Homo Sapiens
ccacugccuguguucgcaggagccacgggac

SEQ ID NO: 50907 - RNA, 32 nt, Homo Sapiens
guggagucggagggaggaagugaggaaggguc

SEQ ID NO: 50908 - RNA, 32 nt, Homo Sapiens
ucuaauugaagaacaugugagguugaaagagc

SEQ ID NO: 50909 - RNA, 32 nt, Homo Sapiens
agccucagaacucgccgugaggaggcagagau

SEQ ID NO: 50910 - RNA, 32 nt, Homo Sapiens
gauugaucuauuuuggaguuaguucuuuagau

SEQ ID NO: 50911 - RNA, 32 nt, Homo Sapiens
uuuacgucuccaugguaacugugcccugcacc

SEQ ID NO: 50912 - RNA, 32 nt, Homo Sapiens
cuuuuuaaaaauuuuaaagcaguauuuaagua

SEQ ID NO: 50913 - RNA, 32 nt, Homo Sapiens
ucuccaccuuguuuuucuucuauucuugguuc

SEQ ID NO: 50914 - RNA, 32 nt, Homo Sapiens
gggagaggaaaacauggauuauucacuccccc

SEQ ID NO: 50915 - RNA, 32 nt, Homo Sapiens
ccgcgccagagggccgguggcuccuccgggcu

SEQ ID NO: 50916 - RNA, 32 nt, Homo Sapiens
agccacaccaaaaccagacucaauuuaaaucu

SEQ ID NO: 50917 - RNA, 32 nt, Homo Sapiens
aauuuagaauaaaaguggcacauuacauaucg

SEQ ID NO: 50918 - RNA, 32 nt, Homo Sapiens
aggcucuaccagcuccucccugucugaucacu

SEQ ID NO: 50919 - RNA, 32 nt, Homo Sapiens
ugaggagaaaucaacuuucaaaggggcagggg

SEQ ID NO: 50920 - RNA, 32 nt, Homo Sapiens
gguaacacagcccuggauucucccagauauuu

SEQ ID NO: 50921 - RNA, 32 nt, Homo Sapiens
aaaucaggugauuguggaaccauggggacuug

SEQ ID NO: 50922 - RNA, 32 nt, Homo Sapiens
gggguggggacaggggcgggggcaggagcgug

SEQ ID NO: 50923 - RNA, 32 nt, Homo Sapiens
cauaaaaguugaaguaggaaaacuacuccaag

SEQ ID NO: 50924 - RNA, 32 nt, Homo Sapiens
gggaaggccugacuucugcuggcaucaagagg

SEQ ID NO: 50925 - RNA, 32 nt, Homo Sapiens
cgcucccgcucccgaucucugauugcuccuaa

SEQ ID NO: 50926 - RNA, 32 nt, Homo Sapiens
ucucgcucucuggccugggcuggguuucauca

SEQ ID NO: 50927 - RNA, 32 nt, Homo Sapiens
accccaggcagacacaacugccuauguucccc

SEQ ID NO: 50928 - RNA, 32 nt, Homo Sapiens
agugguugauaaaguuuccauauuuuucugga

SEQ ID NO: 50929 - RNA, 32 nt, Homo Sapiens
agagggaauuuuucccugcugcuucuuaugaa

SEQ ID NO: 50930 - RNA, 32 nt, Homo Sapiens
gcuuucucccaccgugagggauaugcaaaccu

SEQ ID NO: 50931 - RNA, 32 nt, Homo Sapiens
auguucugaaauuuguauuuaaguauaaaaug

SEQ ID NO: 50932 - RNA, 32 nt, Homo Sapiens
gaugaggaugucuggugacagccgugcggaca

SEQ ID NO: 50933 - RNA, 31 nt, Homo Sapiens
gguaaauguguuugcuucagaaacuuguuaa

SEQ ID NO: 50934 - RNA, 32 nt, Homo Sapiens
gcccccguggacccggccccaccccgaauacc

SEQ ID NO: 50935 - RNA, 32 nt, Homo Sapiens
ugggcaggcuccuggagcugauggcuugggaa

SEQ ID NO: 50936 - RNA, 32 nt, Homo Sapiens
uaugaggcauuuguuugaacugauaaagauga

SEQ ID NO: 50937 - RNA, 32 nt, Homo Sapiens
uccaggcuggaccagcaguuccaggcggcaug

SEQ ID NO: 50938 - RNA, 32 nt, Homo Sapiens
ggaucuuuguuacagcucuaggaaacuguaga

SEQ ID NO: 50939 - RNA, 32 nt, Homo Sapiens
aguugccaagucugcccucccuccucagucau

SEQ ID NO: 50940 - RNA, 32 nt, Homo Sapiens
aauaauuuucauuuugcacugaggauauucag

SEQ ID NO: 50941 - RNA, 32 nt, Homo Sapiens
ucaggucagggaggaggcaggggagugggguc

SEQ ID NO: 50942 - RNA, 32 nt, Homo Sapiens
cauuuuaucuucagcugaccaauaugccuuuu

SEQ ID NO: 50943 - RNA, 32 nt, Homo Sapiens
uaaaagaaaaagaaacaaagauaaggauaaaa

SEQ ID NO: 50944 - RNA, 32 nt, Homo Sapiens
ccuguaaaaaucaaaauacuacucuuuauaag

SEQ ID NO: 50945 - RNA, 32 nt, Homo Sapiens
auauaucuuguaugauuuuuuauuuuuuaaua

SEQ ID NO: 50946 - RNA, 32 nt, Homo Sapiens
ggggacuggugcggcggugcuggagguugcgg

SEQ ID NO: 50947 - RNA, 32 nt, Homo Sapiens
ccaccguucauuuauucauucauuaaacacug

SEQ ID NO: 50948 - RNA, 32 nt, Homo Sapiens
cucugaguuaauuaagauaacaaaauuccuag

SEQ ID NO: 50949 - RNA, 32 nt, Homo Sapiens
ugcacccucccuucgccaccggacuggggcca

SEQ ID NO: 50950 - RNA, 32 nt, Homo Sapiens
gccaugccuauccaaugacgucuccauaaaag

SEQ ID NO: 50951 - RNA, 32 nt, Homo Sapiens
auuaauggaccaaugaaaaaugaguucaugug

SEQ ID NO: 50952 - RNA, 32 nt, Homo Sapiens
gagggcugaugcgcguugugauugcaccgaac

SEQ ID NO: 50953 - RNA, 32 nt, Homo Sapiens
auccaggucccaaggucuucccuugagccacu

SEQ ID NO: 50954 - RNA, 32 nt, Homo Sapiens
accuccagccagucccugggucgggcggaucc

SEQ ID NO: 50955 - RNA, 32 nt, Homo Sapiens
uaggacagugacugcacaguugugaaaaagga

SEQ ID NO: 50956 - RNA, 32 nt, Homo Sapiens
ggauuggagggagagaacagaguugggaaaaa

SEQ ID NO: 50957 - RNA, 32 nt, Homo Sapiens
uuucaugggggagaggaagccgcggggagccc

SEQ ID NO: 50958 - RNA, 32 nt, Homo Sapiens
ggaggggggaugggggcggggacugggggcga

SEQ ID NO: 50959 - RNA, 32 nt, Homo Sapiens
aacaucuauuuugaaucuguaaauauuuuaaa

SEQ ID NO: 50960 - RNA, 32 nt, Homo Sapiens
gcgaccggacuggcugccccggaacugcggcg

SEQ ID NO: 50961 - RNA, 32 nt, Homo Sapiens
cggguggagcugaguucugcugccuugcaguc

SEQ ID NO: 50962 - RNA, 32 nt, Homo Sapiens
caaguuaaaaauacuuauauauuucuauuaca

SEQ ID NO: 50963 - RNA, 31 nt, Homo Sapiens
ucgaagccaggagggggcuuccaggucacag

SEQ ID NO: 50964 - RNA, 32 nt, Homo Sapiens
ccaagcgcaguuccucaucauacuuuauuuuu

SEQ ID NO: 50965 - RNA, 32 nt, Homo Sapiens
uggauaaccuggaaaacacccaaacacaaacu

SEQ ID NO: 50966 - RNA, 32 nt, Homo Sapiens
gggcucugugcggaagagucagggcgacccuu

SEQ ID NO: 50967 - RNA, 32 nt, Homo Sapiens
ccccugaagauaaucuuagcugccaaguaaau

SEQ ID NO: 50968 - RNA, 32 nt, Homo Sapiens
gaaaaggaaguuuccagaaaagaaguuaacau

SEQ ID NO: 50969 - RNA, 32 nt, Homo Sapiens
agccggcuggagccccaccauggcugcaaucc

SEQ ID NO: 50970 - RNA, 32 nt, Homo Sapiens
gacccuguguuuguuugguucccacaauaguu

SEQ ID NO: 50971 - RNA, 32 nt, Homo Sapiens
gaggcacgcaacacuauggacaaaagggaguu

SEQ ID NO: 50972 - RNA, 32 nt, Homo Sapiens
ugaagcgccaaggggaacccaaugucauuucu

SEQ ID NO: 50973 - RNA, 32 nt, Homo Sapiens
ggggggaugcaguguugggguccugcugugag

SEQ ID NO: 50974 - RNA, 31 nt, Homo Sapiens
uggcgcccgcgcagcccucuuuggacacaca

SEQ ID NO: 50975 - RNA, 32 nt, Homo Sapiens
aauauacagauggcuaguugcauaaaauuaaa

SEQ ID NO: 50976 - RNA, 32 nt, Homo Sapiens
auugggggcugcgggcggguuggcuaccugaa

SEQ ID NO: 50977 - RNA, 32 nt, Homo Sapiens
gagggcgaagcagucgcggcacuggcgcucac

SEQ ID NO: 50978 - RNA, 32 nt, Homo Sapiens
caaaggagcccuuguggucagaggggccucug

SEQ ID NO: 50979 - RNA, 32 nt, Homo Sapiens
acugaggacaggugugggcgccagugugggug

SEQ ID NO: 50980 - RNA, 32 nt, Homo Sapiens
guuuguuuuuauuuuuauuuaauuuuugcagc

SEQ ID NO: 50981 - RNA, 32 nt, Homo Sapiens
cuguuuguccccaccuccccagccuuccaccu

SEQ ID NO: 50982 - RNA, 32 nt, Homo Sapiens
uucucccgaauaaacuggccuuugaaagcucu

SEQ ID NO: 50983 - RNA, 32 nt, Homo Sapiens
gucuugcuccuguugugcaggcuggagugcag

SEQ ID NO: 50984 - RNA, 32 nt, Homo Sapiens
aaaaugagaaugaaaaguuugcuuaagacuaa

SEQ ID NO: 50985 - RNA, 32 nt, Homo Sapiens
gaauucugcaguuaagcugagguuuaaacuaa

SEQ ID NO: 50986 - RNA, 32 nt, Homo Sapiens
caauuaaaugaaauauucuauagaaucgaucu

SEQ ID NO: 50987 - RNA, 32 nt, Homo Sapiens
agaaggccaucccagccaucacucuuccaccu

SEQ ID NO: 50988 - RNA, 32 nt, Homo Sapiens
agaggggcuuccuugggaccaguguaaggaag

SEQ ID NO: 50989 - RNA, 32 nt, Homo Sapiens
ugcauccugggguuggcuuuagaaacuaaacu

SEQ ID NO: 50990 - RNA, 32 nt, Homo Sapiens
aggaggcgacugacugagcagcgcacccgggg

SEQ ID NO: 50991 - RNA, 32 nt, Homo Sapiens
acuugugccugccuucaggauauguuccuucc

SEQ ID NO: 50992 - RNA, 32 nt, Homo Sapiens
cuucuagaaaucagugccuauuuuuccuggaa

SEQ ID NO: 50993 - RNA, 32 nt, Homo Sapiens
uaagauggcgguggagaagagaacuugaugga

SEQ ID NO: 50994 - RNA, 32 nt, Homo Sapiens
uggaagcccccgcugcgcccaguccgugcgga

SEQ ID NO: 50995 - RNA, 32 nt, Homo Sapiens
gucaagagaggcccaggacaccaagagccagc

SEQ ID NO: 50996 - RNA, 32 nt, Homo Sapiens
cucuggagauaaaggcaguugagaaucgacaa

SEQ ID NO: 50997 - RNA, 32 nt, Homo Sapiens
aaaggcaggcauucucuuuccuuuuccuucuc

SEQ ID NO: 50998 - RNA, 32 nt, Homo Sapiens
ugccuaggcuagagggcaguggcaccguuuug

SEQ ID NO: 50999 - RNA, 32 nt, Homo Sapiens
uucuacaugcaccagccaaaacuuaggacagg

SEQ ID NO: 51000 - RNA, 32 nt, Homo Sapiens
agccuucugccuggcuggcccuggucaacacc

SEQ ID NO: 51001 - RNA, 32 nt, Homo Sapiens
guccgauuuccuuuccucucucggucgguccu

SEQ ID NO: 51002 - RNA, 32 nt, Homo Sapiens
gauguaauuccucuguuugacaaaagaacugu

SEQ ID NO: 51003 - RNA, 32 nt, Homo Sapiens
uucaccacccucaaccuucuguggggacagug

SEQ ID NO: 51004 - RNA, 32 nt, Homo Sapiens
aaacaaaucaaaucauuuuuacuguguaaauu

SEQ ID NO: 51005 - RNA, 32 nt, Homo Sapiens
cagacaccuaauucuucaguucacuacucaug

SEQ ID NO: 51006 - RNA, 32 nt, Homo Sapiens
aguuuugugucugagaugauggugcucacaau

SEQ ID NO: 51007 - RNA, 32 nt, Homo Sapiens
gugcaggguggcagcagaauguucuggaaaug

SEQ ID NO: 51008 - RNA, 32 nt, Homo Sapiens
aacccugcaccaaggcgaccgcugcucacggc

SEQ ID NO: 51009 - RNA, 32 nt, Homo Sapiens
accacuuccuucccuggccccuuaagccuagc

SEQ ID NO: 51010 - RNA, 32 nt, Homo Sapiens
ccuuucaaauacaugaaagaacucaucaugga

SEQ ID NO: 51011 - RNA, 30 nt, Homo Sapiens
gugugcuguggcggcggcggcagcggcagc

SEQ ID NO: 51012 - RNA, 32 nt, Homo Sapiens
ucuauaaaacacaucaucaauaaaauagugac

SEQ ID NO: 51013 - RNA, 32 nt, Homo Sapiens
uacacacggaaacagaguugugagucccaugc

SEQ ID NO: 51014 - RNA, 31 nt, Homo Sapiens
cccgaucgggcuaggccgacggccucccucc

SEQ ID NO: 51015 - RNA, 32 nt, Homo Sapiens
gugccuggcagccccucaggccccacaggugg

SEQ ID NO: 51016 - RNA, 32 nt, Homo Sapiens
gacagugugggaagagggugagcccugagugg

SEQ ID NO: 51017 - RNA, 32 nt, Homo Sapiens
uucaacacauauuuuuauauuauguuaaagua

SEQ ID NO: 51018 - RNA, 32 nt, Homo Sapiens
gggagauugagcggggugccacugagugagcu

SEQ ID NO: 51019 - RNA, 32 nt, Homo Sapiens
aacagugaacucuaccuguucuggaguucucc

SEQ ID NO: 51020 - RNA, 32 nt, Homo Sapiens
uuacaggugugagccaccgcgcccggcccuuu

SEQ ID NO: 51021 - RNA, 32 nt, Homo Sapiens
uguaagaagaggacaauagccuaugaucuaca

SEQ ID NO: 51022 - RNA, 32 nt, Homo Sapiens
auuugcauugucuuauuguauugucuuuucaa

SEQ ID NO: 51023 - RNA, 32 nt, Homo Sapiens
acuuauaaauggauauuuauaauuacuaauug

SEQ ID NO: 51024 - RNA, 32 nt, Homo Sapiens
guugcaggaaaagaagcucagggcucccacug

SEQ ID NO: 51025 - RNA, 30 nt, Homo Sapiens
ugccaggugcagaagggggaaagggcccuc

SEQ ID NO: 51026 - RNA, 32 nt, Homo Sapiens
ugggacgcacaaaugucugcaugauuuugaga

SEQ ID NO: 51027 - RNA, 32 nt, Homo Sapiens
caccccuccaagacccauucugcacagucccu

SEQ ID NO: 51028 - RNA, 32 nt, Homo Sapiens
acuguacauaagugggcauauuguuugagucu

SEQ ID NO: 51029 - RNA, 32 nt, Homo Sapiens
uguggagauuaaacuuuuuuuuuucaguuuau

SEQ ID NO: 51030 - RNA, 32 nt, Homo Sapiens
aacuauguuguaaaaauaggaaauguggcuua

SEQ ID NO: 51031 - RNA, 32 nt, Homo Sapiens
uggcuaucgggacaaaauuugcuugagccaau

SEQ ID NO: 51032 - RNA, 32 nt, Homo Sapiens
aguccuggccuccgcagaugcuucauuuugac

SEQ ID NO: 51033 - RNA, 32 nt, Homo Sapiens
uugaaagcuguuucuguuuucauuuuacauua

SEQ ID NO: 51034 - RNA, 32 nt, Homo Sapiens
cuagcagggaaaaauacacaaaaacugcagau

SEQ ID NO: 51035 - RNA, 32 nt, Homo Sapiens
ccucccugccuugggacccguccucucacccc

SEQ ID NO: 51036 - RNA, 32 nt, Homo Sapiens
ugucuaaaucauauauuuuugucuaauaaacu

SEQ ID NO: 51037 - RNA, 32 nt, Homo Sapiens
ggcgaugcggcacgggugcugcgggacacaca

SEQ ID NO: 51038 - RNA, 32 nt, Homo Sapiens
cuucuggcccugugguacccaggccacacguu

SEQ ID NO: 51039 - RNA, 32 nt, Homo Sapiens
aauacauaaaaauaaacagugcuuuauaaaaa

SEQ ID NO: 51040 - RNA, 32 nt, Homo Sapiens
gcggcggcggcugagguggaggcggagggagg

SEQ ID NO: 51041 - RNA, 32 nt, Homo Sapiens
gcagcucccacaaagcacucuaagggagaugg

SEQ ID NO: 51042 - RNA, 32 nt, Homo Sapiens
aaaggauaaaauauuucuguaaugauuaugau

SEQ ID NO: 51043 - RNA, 32 nt, Homo Sapiens
uauuuaguauaucaguaauauagaagacaucu

SEQ ID NO: 51044 - RNA, 32 nt, Homo Sapiens
gucuguuaugcaaugcuggagacguggugaaa

SEQ ID NO: 51045 - RNA, 32 nt, Homo Sapiens
cucucuuucccucuccuuuccuggcgagggug

SEQ ID NO: 51046 - RNA, 32 nt, Homo Sapiens
cugggcgccggcugugugcccgaggccucacc

SEQ ID NO: 51047 - RNA, 32 nt, Homo Sapiens
gcucaucugugacaccaaguucgacaucagac

SEQ ID NO: 51048 - RNA, 32 nt, Homo Sapiens
ccucacuuuuccuuccucucacgguuuuuugc

SEQ ID NO: 51049 - RNA, 32 nt, Homo Sapiens
acauggacauucugaagugcucuuggaggaug

SEQ ID NO: 51050 - RNA, 32 nt, Homo Sapiens
aacguuuggucuucuagagugcacuaaagcag

SEQ ID NO: 51051 - RNA, 32 nt, Homo Sapiens
ucggccugccccagccucugcuucaccccacu

SEQ ID NO: 51052 - RNA, 32 nt, Homo Sapiens
ucacuguuuuaaauaaagaaucuuacauaaga

SEQ ID NO: 51053 - RNA, 32 nt, Homo Sapiens
cacugggagaggcagcuugguggaggccuuau

SEQ ID NO: 51054 - RNA, 32 nt, Homo Sapiens
uccaccuccccauccgccccaggcccccugcc

SEQ ID NO: 51055 - RNA, 32 nt, Homo Sapiens
ccaucagcucacggaacagggcuggcauacga

SEQ ID NO: 51056 - RNA, 32 nt, Homo Sapiens
cccagugggugaugcuuuugcugcugcuuaau

SEQ ID NO: 51057 - RNA, 32 nt, Homo Sapiens
uagaacaagauaagauuugaaauacuuccuug

SEQ ID NO: 51058 - RNA, 32 nt, Homo Sapiens
ccaucucaaacaaacaaacaaacaaaaaaaaa

SEQ ID NO: 51059 - RNA, 32 nt, Homo Sapiens
gggugaggcagacauagcuguguuugggucag

SEQ ID NO: 51060 - RNA, 32 nt, Homo Sapiens
cucaggacaguggugaguuucagacuccucua

SEQ ID NO: 51061 - RNA, 32 nt, Homo Sapiens
caguggcggcggcagcggcggcuggagccucc

SEQ ID NO: 51062 - RNA, 32 nt, Homo Sapiens
uggcuaauuuuuguacuuuuaguagagauggg

SEQ ID NO: 51063 - RNA, 32 nt, Homo Sapiens
cucuuggacuuuauauaaaucuguaauagauu

SEQ ID NO: 51064 - RNA, 32 nt, Homo Sapiens
caggccuagucaccccaccucgccaccucacc

SEQ ID NO: 51065 - RNA, 32 nt, Homo Sapiens
uauuuuuugagaccgagcagggauuagcugug

SEQ ID NO: 51066 - RNA, 32 nt, Homo Sapiens
agaaagaaagucuuuuuguacaacuuuacaau

SEQ ID NO: 51067 - RNA, 32 nt, Homo Sapiens
aauauuucuaagggaaacuauguacugugaug

SEQ ID NO: 51068 - RNA, 32 nt, Homo Sapiens
gcauguuugcuaaaaaagcuggagcacauucc

SEQ ID NO: 51069 - RNA, 32 nt, Homo Sapiens
gcaggaggccgggcucugaggaccccuggggc

SEQ ID NO: 51070 - RNA, 32 nt, Homo Sapiens
gcguccguccuccguccucccgggccagccag

SEQ ID NO: 51071 - RNA, 32 nt, Homo Sapiens
guacaugaaauuuuuguaaaucacauccuuau

SEQ ID NO: 51072 - RNA, 32 nt, Homo Sapiens
ccuuuuuucuucagaucugcuccuggguuuua

SEQ ID NO: 51073 - RNA, 32 nt, Homo Sapiens
augucugcuucuuuucucugauuaggcaagug

SEQ ID NO: 51074 - RNA, 32 nt, Homo Sapiens
auuuuuuuuauuuacauagacugaaauaaaac

SEQ ID NO: 51075 - RNA, 32 nt, Homo Sapiens
cagaacgggaaccaccugcagagguccccaga

SEQ ID NO: 51076 - RNA, 32 nt, Homo Sapiens
agccaggugugguggcucacgcuuauguaguc

SEQ ID NO: 51077 - RNA, 32 nt, Homo Sapiens
ugugcuggggcuauuuggggccugcugucagg

SEQ ID NO: 51078 - RNA, 32 nt, Homo Sapiens
gaggaaaagcuacuuauuauuacaccuuggag

SEQ ID NO: 51079 - RNA, 32 nt, Homo Sapiens
gacgaagggguggggagggagugcccacgugg

SEQ ID NO: 51080 - RNA, 32 nt, Homo Sapiens
ugcguggcucugcuggucgugggcaucgucug

SEQ ID NO: 51081 - RNA, 32 nt, Homo Sapiens
acaguauaauuuuaguauguuaaacuugguua

SEQ ID NO: 51082 - RNA, 32 nt, Homo Sapiens
cacaagcucccucaugcuuccugucccccgcu

SEQ ID NO: 51083 - RNA, 32 nt, Homo Sapiens
uaauuuaaaucuuguguucuaugugagaguuu

SEQ ID NO: 51084 - RNA, 32 nt, Homo Sapiens
aucauuuauaccuucuaggagcuccuauuggg

SEQ ID NO: 51085 - RNA, 26 nt, Homo Sapiens
cauggagccuggugacgcggcgcgcc

SEQ ID NO: 51086 - RNA, 32 nt, Homo Sapiens
caagagcuuccacuugguuugguccccccacc

SEQ ID NO: 51087 - RNA, 32 nt, Homo Sapiens
uaaugggggaugaagauaaaagaauuacauau

SEQ ID NO: 51088 - RNA, 32 nt, Homo Sapiens
cagcucguguaacccgcuguccccgcagauga

SEQ ID NO: 51089 - RNA, 32 nt, Homo Sapiens
agagcaggcaaccuucuguuuuuggcucuaau

SEQ ID NO: 51090 - RNA, 32 nt, Homo Sapiens
agaggcguuugaaucagagugacuccauuuug

SEQ ID NO: 51091 - RNA, 32 nt, Homo Sapiens
uuugaaucucuuaaggauggauguuuguaaga

SEQ ID NO: 51092 - RNA, 32 nt, Homo Sapiens
auuuuuaaaaaagccuacaacuuacauaugua

SEQ ID NO: 51093 - RNA, 32 nt, Homo Sapiens
ugguuuccaaagcgccuggcuuucucacuuca

SEQ ID NO: 51094 - RNA, 32 nt, Homo Sapiens
aguuccaugggcgagaugcugcugcuggcgag

SEQ ID NO: 51095 - RNA, 32 nt, Homo Sapiens
cacaucggaaacaaaacagcggcuggucugga

SEQ ID NO: 51096 - RNA, 31 nt, Homo Sapiens
gaagguugaggaggagccagagccugguccu

SEQ ID NO: 51097 - RNA, 32 nt, Homo Sapiens
auaaaguauaaaauuaagauauaagcagauca

SEQ ID NO: 51098 - RNA, 32 nt, Homo Sapiens
cccugagagauggaaacacuugugaaaagaaa

SEQ ID NO: 51099 - RNA, 32 nt, Homo Sapiens
cagcugugcccagaggacagccaggcaggccc

SEQ ID NO: 51100 - RNA, 32 nt, Homo Sapiens
cugguccaggccuuggaggaaagcagaggaug

SEQ ID NO: 51101 - RNA, 32 nt, Homo Sapiens
gaacuuauuuuugucaaaaauaagauguacac

SEQ ID NO: 51102 - RNA, 32 nt, Homo Sapiens
cguaggcucuuuagacagcaccuaccacuugg

SEQ ID NO: 51103 - RNA, 32 nt, Homo Sapiens
uaaagaaaauuuaauauguuauagcugaaucu

SEQ ID NO: 51104 - RNA, 32 nt, Homo Sapiens
cuaaauugaaagggaacauagauggaauucca

SEQ ID NO: 51105 - RNA, 32 nt, Homo Sapiens
aauacauaaaacaaaagcauuuugcuaaggag

SEQ ID NO: 51106 - RNA, 32 nt, Homo Sapiens
aggggcuaggccgggcggaucccguccucccc

SEQ ID NO: 51107 - RNA, 32 nt, Homo Sapiens
cucucucucccucucucuguuaagauccuguu

SEQ ID NO: 51108 - RNA, 32 nt, Homo Sapiens
ccugcggaaccucggcgcucggccccaccccg

SEQ ID NO: 51109 - RNA, 32 nt, Homo Sapiens
aaaaucuuaaaauggccaucagacauagagag

SEQ ID NO: 51110 - RNA, 32 nt, Homo Sapiens
agucacugcccccgcacucccacagggcucag

SEQ ID NO: 51111 - RNA, 28 nt, Homo Sapiens
aaccauuggcuaaaaauguguuuuguug

SEQ ID NO: 51112 - RNA, 32 nt, Homo Sapiens
aucuuggaucauaagcagcaucuacaguuuca

SEQ ID NO: 51113 - RNA, 32 nt, Homo Sapiens
aaaucagaugacugaaucugccuaaaacguug

SEQ ID NO: 51114 - RNA, 32 nt, Homo Sapiens
guuuccacgcucuggagggaagauagucagag

SEQ ID NO: 51115 - RNA, 32 nt, Homo Sapiens
uugaaugcugcauguaaagccuuuaaagcaaa

SEQ ID NO: 51116 - RNA, 32 nt, Homo Sapiens
cucccccuccccaccccgcgcaggccacugag

SEQ ID NO: 51117 - RNA, 32 nt, Homo Sapiens
gcuggcuuaaucuuguuuaauguuaucaguac

SEQ ID NO: 51118 - RNA, 32 nt, Homo Sapiens
cuaugccaggggugugauggggccugaggaga

SEQ ID NO: 51119 - RNA, 32 nt, Homo Sapiens
uuauguauucuuucugccuuuaauuuucuugu

SEQ ID NO: 51120 - RNA, 32 nt, Homo Sapiens
gagcggagggagccugguggcuggggcuggag

SEQ ID NO: 51121 - RNA, 32 nt, Homo Sapiens
uccauuauaaucuuaugggaccacaaucauau

SEQ ID NO: 51122 - RNA, 32 nt, Homo Sapiens
agcacgggcugcccgcgcggugcggaccaugg

SEQ ID NO: 51123 - RNA, 32 nt, Homo Sapiens
cucuuuccuggcccucaaccacuuccuuccuu

SEQ ID NO: 51124 - RNA, 32 nt, Homo Sapiens
gugaacccacuauuuuguguccuugagacauu

SEQ ID NO: 51125 - RNA, 32 nt, Homo Sapiens
ucccguggccccagcgaggcuuccucugggga

SEQ ID NO: 51126 - RNA, 32 nt, Homo Sapiens
uguguaucuguuuauuucuaaguucacgauac

SEQ ID NO: 51127 - RNA, 32 nt, Homo Sapiens
cugucccucauuggcucugugcuuuccacuau

SEQ ID NO: 51128 - RNA, 32 nt, Homo Sapiens
gggugccgcuggcggccguugccaggguaggg

SEQ ID NO: 51129 - RNA, 32 nt, Homo Sapiens
uaucuuugauccaagaucuauuuaugucuaua

SEQ ID NO: 51130 - RNA, 32 nt, Homo Sapiens
cuguccauucccagaggcuggcacucucaugg

SEQ ID NO: 51131 - RNA, 32 nt, Homo Sapiens
gcuccaccuuggacucugauuuaaggaugauc

SEQ ID NO: 51132 - RNA, 32 nt, Homo Sapiens
gcgcccggaggccguuaggcuguggagggcga

SEQ ID NO: 51133 - RNA, 32 nt, Homo Sapiens
cuuuuaucugacacauuauuacuaguguuaac

SEQ ID NO: 51134 - RNA, 32 nt, Homo Sapiens
gucuuucugcuaaagaggcaugugagguccuu

SEQ ID NO: 51135 - RNA, 32 nt, Homo Sapiens
acaugaaaaaauaauaugaguggaggcucugg

SEQ ID NO: 51136 - RNA, 32 nt, Homo Sapiens
cccauucccagagcagacccucuccccagaag

SEQ ID NO: 51137 - RNA, 32 nt, Homo Sapiens
uuuucuaaaaauuaugcuggggucucgacuaa

SEQ ID NO: 51138 - RNA, 32 nt, Homo Sapiens
aguacagaauuugaauuaucagcaaagaaaaa

SEQ ID NO: 51139 - RNA, 32 nt, Homo Sapiens
uugagccacccuucccaccccagcccuugcug

SEQ ID NO: 51140 - RNA, 32 nt, Homo Sapiens
uuugacuaaaagacuuuguaguguaaagggug

SEQ ID NO: 51141 - RNA, 32 nt, Homo Sapiens
aacuuuucagauuguguuugcauagaaaaggu

SEQ ID NO: 51142 - RNA, 32 nt, Homo Sapiens
gcgcagccuuggcugcugggaaaugcccaacu

SEQ ID NO: 51143 - RNA, 32 nt, Homo Sapiens
gcgcacguuguaaucagcugaggccaugucag

SEQ ID NO: 51144 - RNA, 32 nt, Homo Sapiens
auaauuuccuuuaugacagacaucucagaauu

SEQ ID NO: 51145 - RNA, 32 nt, Homo Sapiens
uaaugugaugaguauggaugaacucaacucuc

SEQ ID NO: 51146 - RNA, 32 nt, Homo Sapiens
ucauaaccugaagagauugacagaugagauag

SEQ ID NO: 51147 - RNA, 32 nt, Homo Sapiens
ccacugacccacaucuggucuuagucauuggu

SEQ ID NO: 51148 - RNA, 32 nt, Homo Sapiens
acauucagaaaaguaguauagauucaggagag

SEQ ID NO: 51149 - RNA, 32 nt, Homo Sapiens
gaguccgacaaccauugggguggggcugcauc

SEQ ID NO: 51150 - RNA, 32 nt, Homo Sapiens
caaauuaaaaauuucauuuacuggggauaauu

SEQ ID NO: 51151 - RNA, 32 nt, Homo Sapiens
ucuuuucucagcacguguuccucacuagaaga

SEQ ID NO: 51152 - RNA, 32 nt, Homo Sapiens
cuccgguagggcgggggccggaugaggcggga

SEQ ID NO: 51153 - RNA, 32 nt, Homo Sapiens
aggaauaccgggcuugccuauauucauuacaa

SEQ ID NO: 51154 - RNA, 32 nt, Homo Sapiens
cugaccggguggcacccuggcuccggcuucac

SEQ ID NO: 51155 - RNA, 32 nt, Homo Sapiens
caaaagauguacucuuuguucucuaaaaccac

SEQ ID NO: 51156 - RNA, 30 nt, Homo Sapiens
gauggggauaaaaggucugcaucuaaguca

SEQ ID NO: 51157 - RNA, 32 nt, Homo Sapiens
cccagcccgggcccgaccgucauggagcggug

SEQ ID NO: 51158 - RNA, 32 nt, Homo Sapiens
acacucuagaugguacagaagauggauacugu

SEQ ID NO: 51159 - RNA, 32 nt, Homo Sapiens
uccuucaagaaaaacuacagugggauucauuu

SEQ ID NO: 51160 - RNA, 32 nt, Homo Sapiens
ccacaaccuuccagcauggguguuagggccau

SEQ ID NO: 51161 - RNA, 32 nt, Homo Sapiens
uucuuugaccucaagauugacaaugaaagugg

SEQ ID NO: 51162 - RNA, 32 nt, Homo Sapiens
ccgguuauuuuuguauuuuuuaguagagaugg

SEQ ID NO: 51163 - RNA, 32 nt, Homo Sapiens
cuuuuaguaggcuaaucaacaaugaaaggguu

SEQ ID NO: 51164 - RNA, 32 nt, Homo Sapiens
gugagcucgggcugcccggccgggcgugcggg

SEQ ID NO: 51165 - RNA, 32 nt, Homo Sapiens
cuaaacuacuauucuugcguuaucauaaagaa

SEQ ID NO: 51166 - RNA, 32 nt, Homo Sapiens
gccccugcuccgcuccucuccguaagaaacuc

SEQ ID NO: 51167 - RNA, 32 nt, Homo Sapiens
uaaagagauaaguuuaaaagaacugcauaggu

SEQ ID NO: 51168 - RNA, 32 nt, Homo Sapiens
cuaagagugucuuuaagaagaaaacuauagca

SEQ ID NO: 51169 - RNA, 32 nt, Homo Sapiens
ggcggcgguggcggcagcugcuugggcgcggu

SEQ ID NO: 51170 - RNA, 32 nt, Homo Sapiens
aaaauauuccuggucauccacccauuaaaaua

SEQ ID NO: 51171 - RNA, 32 nt, Homo Sapiens
ugcauuuuucuuuugguacccaugugagacau

SEQ ID NO: 51172 - RNA, 32 nt, Homo Sapiens
augguaaaggcacagguuuauucaaugaaaau

SEQ ID NO: 51173 - RNA, 32 nt, Homo Sapiens
cugagacagggaagacagcauaaagagcuagu

SEQ ID NO: 51174 - RNA, 32 nt, Homo Sapiens
cuggggcagaacaaaaugguaucucuguuaca

SEQ ID NO: 51175 - RNA, 32 nt, Homo Sapiens
ucuggaugcauuucucugggguauuuggggcu

SEQ ID NO: 51176 - RNA, 32 nt, Homo Sapiens
uuugacauccauaaggacaaauguagauauuu

SEQ ID NO: 51177 - RNA, 32 nt, Homo Sapiens
gaaacaugguguauauuguucuuacaggacua

SEQ ID NO: 51178 - RNA, 32 nt, Homo Sapiens
uacaggugugagccaccacaccugcccccgcc

SEQ ID NO: 51179 - RNA, 32 nt, Homo Sapiens
gagucaguggcucuugcgaaugccccauagca

SEQ ID NO: 51180 - RNA, 32 nt, Homo Sapiens
cugaguugcagguccacauucguucuagaggc

SEQ ID NO: 51181 - RNA, 32 nt, Homo Sapiens
cccugggacaccuuuguuccagccugguuucc

SEQ ID NO: 51182 - RNA, 32 nt, Homo Sapiens
gcucugguguucaaagaguccuggucaauuca

SEQ ID NO: 51183 - RNA, 32 nt, Homo Sapiens
uggccucagggacuauuggugaaggaccagga

SEQ ID NO: 51184 - RNA, 32 nt, Homo Sapiens
ugaaugugguggcaaagugggcagaggacccc

SEQ ID NO: 51185 - RNA, 32 nt, Homo Sapiens
gucugagacccuuuccaccuccccuacaagug

SEQ ID NO: 51186 - RNA, 32 nt, Homo Sapiens
gagccacugugcccggccaucauuccuuuuua

SEQ ID NO: 51187 - RNA, 30 nt, Homo Sapiens
cagggaggagguggauuauguaauaucuaa

SEQ ID NO: 51188 - RNA, 32 nt, Homo Sapiens
aguuauguggacugcguuuugugcagugugug

SEQ ID NO: 51189 - RNA, 32 nt, Homo Sapiens
uaugauagaauuaugacuguuagcuuuucucc

SEQ ID NO: 51190 - RNA, 32 nt, Homo Sapiens
aagccuggccccaccagugcuguuuggccuag

SEQ ID NO: 51191 - RNA, 32 nt, Homo Sapiens
aaaucugaagaccucgagcagaugaugccaac

SEQ ID NO: 51192 - RNA, 32 nt, Homo Sapiens
cgcaggaaccgccgccgccgccgcccgcgucu

SEQ ID NO: 51193 - RNA, 28 nt, Homo Sapiens
auuggccuggcuaccacuguggucgcgu

SEQ ID NO: 51194 - RNA, 32 nt, Homo Sapiens
gugggaaagggagcaaggggcagauagcucag

SEQ ID NO: 51195 - RNA, 32 nt, Homo Sapiens
agcccacccugacccacccccacugcaccccc

SEQ ID NO: 51196 - RNA, 32 nt, Homo Sapiens
acauuucacaaaaaggcauaugcaauauuuac

SEQ ID NO: 51197 - RNA, 32 nt, Homo Sapiens
agcccaagaacaaaggcuuucugaaucuucuc

SEQ ID NO: 51198 - RNA, 32 nt, Homo Sapiens
aguacugcaaccugacacgaugcucagacaca

SEQ ID NO: 51199 - RNA, 32 nt, Homo Sapiens
uguggugggccugggagacaauaggcaaacaa

SEQ ID NO: 51200 - RNA, 32 nt, Homo Sapiens
ggagggccuucagaggacuccuggacagugcc

SEQ ID NO: 51201 - RNA, 32 nt, Homo Sapiens
cggccgcggugggaauggaaacaucugcccca

SEQ ID NO: 51202 - RNA, 32 nt, Homo Sapiens
ucucuaagucauuacuaacaaagagcaaaaau

SEQ ID NO: 51203 - RNA, 32 nt, Homo Sapiens
aaaggaaccgacggagcuaggggccagcgaga

SEQ ID NO: 51204 - RNA, 32 nt, Homo Sapiens
cagagguugcagugacccaagaucgugccacu

SEQ ID NO: 51205 - RNA, 32 nt, Homo Sapiens
ucagaauaugaucacauguuuuucucauuaaa

SEQ ID NO: 51206 - RNA, 29 nt, Homo Sapiens
aaacugcaauguauguauguuucaagguu

SEQ ID NO: 51207 - RNA, 32 nt, Homo Sapiens
gccaaguugcuguacacaacuuugagacaccc

SEQ ID NO: 51208 - RNA, 32 nt, Homo Sapiens
caucugcccugcaccaguggccuccaggaagu

SEQ ID NO: 51209 - RNA, 32 nt, Homo Sapiens
aggaggaggaggaggcagcuccggcagccaca

SEQ ID NO: 51210 - RNA, 32 nt, Homo Sapiens
cacugcacuccagccugggugacagagcagac

SEQ ID NO: 51211 - RNA, 32 nt, Homo Sapiens
agacuccccccgccccccaccaaccuccccag

SEQ ID NO: 51212 - RNA, 32 nt, Homo Sapiens
acagaaauauauauacauauguagacuauaua

SEQ ID NO: 51213 - RNA, 32 nt, Homo Sapiens
cccagcccccagccccagcagucagcgcggug

SEQ ID NO: 51214 - RNA, 32 nt, Homo Sapiens
gagaucugaaauugaucuacauuuucuuuagu

SEQ ID NO: 51215 - RNA, 32 nt, Homo Sapiens
uuuuguaugauuuauauaaucuuuuuacuuug

SEQ ID NO: 51216 - RNA, 32 nt, Homo Sapiens
gaucuuuguaaaugcauauuaaauaauaaagu

SEQ ID NO: 51217 - RNA, 32 nt, Homo Sapiens
uguguuggugccuccgagcugcaaggagggug

SEQ ID NO: 51218 - RNA, 32 nt, Homo Sapiens
cauuuuauaggggacauguucuguguauagcg

SEQ ID NO: 51219 - RNA, 32 nt, Homo Sapiens
cuuuauuuuuugcauguuaaaugugaaccuua

SEQ ID NO: 51220 - RNA, 32 nt, Homo Sapiens
caaaaauuuuuguugcaacuuuucauauauau

SEQ ID NO: 51221 - RNA, 32 nt, Homo Sapiens
ccugaguuaaccucccaaauacaggaucaccu

SEQ ID NO: 51222 - RNA, 32 nt, Homo Sapiens
uuauugaguuguaggauuucuuuauauaugcu

SEQ ID NO: 51223 - RNA, 32 nt, Homo Sapiens
acccagggccagugaacagagcccuggcugga

SEQ ID NO: 51224 - RNA, 32 nt, Homo Sapiens
ggggguggagggcggggcccugauguggagua

SEQ ID NO: 51225 - RNA, 32 nt, Homo Sapiens
acugauuuauucuguuacuagaucagguuuua

SEQ ID NO: 51226 - RNA, 32 nt, Homo Sapiens
gaggagggcagggcugcggggaggccaggccg

SEQ ID NO: 51227 - RNA, 32 nt, Homo Sapiens
ugcaccugcugcguccccacucccuugguggu

SEQ ID NO: 51228 - RNA, 32 nt, Homo Sapiens
uccagugaagaugcugaugacugagccccagc

SEQ ID NO: 51229 - RNA, 32 nt, Homo Sapiens
gcccuuuaucucuccuuccaagucuuuagagg

SEQ ID NO: 51230 - RNA, 32 nt, Homo Sapiens
aaacaaaggguuuaaggaugacauuucugacc

SEQ ID NO: 51231 - RNA, 32 nt, Homo Sapiens
gggguuggggugacagucaucaucagggccug

SEQ ID NO: 51232 - RNA, 32 nt, Homo Sapiens
gugucagucccaaaagcuccagcccuucucug

SEQ ID NO: 51233 - RNA, 32 nt, Homo Sapiens
acgaaagaacagaugucuggcccauuguuucc

SEQ ID NO: 51234 - RNA, 32 nt, Homo Sapiens
uacgguaccaaagauauaaucaccuagguuua

SEQ ID NO: 51235 - RNA, 32 nt, Homo Sapiens
gggcgugugcuaaggccagagcuaccagaugg

SEQ ID NO: 51236 - RNA, 32 nt, Homo Sapiens
uuguauguuuggauugcagaagaauuuguaag

SEQ ID NO: 51237 - RNA, 31 nt, Homo Sapiens
ggcacgagggcggggaggcggcggcuccagg

SEQ ID NO: 51238 - RNA, 32 nt, Homo Sapiens
auuaaccagaacaggaucgacacguguucucu

SEQ ID NO: 51239 - RNA, 32 nt, Homo Sapiens
cugguucccuccucuccucccacccccacaac

SEQ ID NO: 51240 - RNA, 32 nt, Homo Sapiens
gggaaaaugaauugucuucacucuucauucuu

SEQ ID NO: 51241 - RNA, 32 nt, Homo Sapiens
accgaccccuccccagugccucuccuggcccu

SEQ ID NO: 51242 - RNA, 32 nt, Homo Sapiens
aacuugcuugccgccugccugcuugagcagag

SEQ ID NO: 51243 - RNA, 32 nt, Homo Sapiens
cgcccgaccaggggcccggggccacgggcuca

SEQ ID NO: 51244 - RNA, 32 nt, Homo Sapiens
uucugagauaaaaauuaugugucaucuaaacu

SEQ ID NO: 51245 - RNA, 32 nt, Homo Sapiens
ggcccaccaagcccuuaaauucccauugucaa

SEQ ID NO: 51246 - RNA, 32 nt, Homo Sapiens
gcuuuauuuuuucucuuacaugaguaaagcgc

SEQ ID NO: 51247 - RNA, 32 nt, Homo Sapiens
gcaggcuuuucuuuuccaaccuuuauacguug

SEQ ID NO: 51248 - RNA, 32 nt, Homo Sapiens
aacugaccuugaucuccacguguauaguuuuc

SEQ ID NO: 51249 - RNA, 32 nt, Homo Sapiens
cugugggcuucagaagccaugacuccccaacu

SEQ ID NO: 51250 - RNA, 32 nt, Homo Sapiens
uaauauuuaacgaaucaugauucagguuguac

SEQ ID NO: 51251 - RNA, 28 nt, Homo Sapiens
cuucuuaaacaaaacaaauauuauaaug

SEQ ID NO: 51252 - RNA, 32 nt, Homo Sapiens
gguccuggaggcugcgcggggcugaggcggcc

SEQ ID NO: 51253 - RNA, 32 nt, Homo Sapiens
cugcuaugcuauagcugggggugucuauguga

SEQ ID NO: 51254 - RNA, 32 nt, Homo Sapiens
aaaggggagaaagaagcauccaagagacagug

SEQ ID NO: 51255 - RNA, 32 nt, Homo Sapiens
ccgcccgcuggcgggggagcagcgcggucgag

SEQ ID NO: 51256 - RNA, 32 nt, Homo Sapiens
aaauguuggaaugggagucugaaauggggcua

SEQ ID NO: 51257 - RNA, 32 nt, Homo Sapiens
cuuuauccugauauaauauuuaaaagacagaa

SEQ ID NO: 51258 - RNA, 32 nt, Homo Sapiens
gaugucaaccucaaugaaucagauagguccca

SEQ ID NO: 51259 - RNA, 32 nt, Homo Sapiens
ggcgggcaggcucaggggaggggcgcgcaugg

SEQ ID NO: 51260 - RNA, 32 nt, Homo Sapiens
aaagagaagaucuggucagcagagccgcccca

SEQ ID NO: 51261 - RNA, 32 nt, Homo Sapiens
cgccuucccucaucgucuggcgcagggcagcc

SEQ ID NO: 51262 - RNA, 32 nt, Homo Sapiens
uuuucgagauaaagaagauuuggcguugacug

SEQ ID NO: 51263 - RNA, 32 nt, Homo Sapiens
uggcuagacccugcagaucuccagggcaggcu

SEQ ID NO: 51264 - RNA, 32 nt, Homo Sapiens
aucgauggggagcggcuggagcggacccagcg

SEQ ID NO: 51265 - RNA, 32 nt, Homo Sapiens
gugaguuaagagcacuggcugagucagacaga

SEQ ID NO: 51266 - RNA, 32 nt, Homo Sapiens
guuuggauuacagauauucauuauugaauuga

SEQ ID NO: 51267 - RNA, 32 nt, Homo Sapiens
ugagcgcuuugaaugccuggcacaaaaauauu

SEQ ID NO: 51268 - RNA, 28 nt, Homo Sapiens
auuuuaguggcuagcaugacgaaguuuu

SEQ ID NO: 51269 - RNA, 32 nt, Homo Sapiens
aauauauuaugaaaauuaagauuauugucuga

SEQ ID NO: 51270 - RNA, 32 nt, Homo Sapiens
aagccaggaaauggacuugguggcuuucgagg

SEQ ID NO: 51271 - RNA, 30 nt, Homo Sapiens
uggugcugcaggcgcggugggcuccgggcc

SEQ ID NO: 51272 - RNA, 32 nt, Homo Sapiens
aggcuggccucccagcccagauagcucagcca

SEQ ID NO: 51273 - RNA, 32 nt, Homo Sapiens
auuuguuaacugugauucagccacaggcuaag

SEQ ID NO: 51274 - RNA, 32 nt, Homo Sapiens
ucucugugccaaauacauuauaucaggauuac

SEQ ID NO: 51275 - RNA, 32 nt, Homo Sapiens
uuaccauucuaccugcauugauuuccuuuucc

SEQ ID NO: 51276 - RNA, 32 nt, Homo Sapiens
aagucucacuaagguuugaaguuuacaggugc

SEQ ID NO: 51277 - RNA, 32 nt, Homo Sapiens
uguaauccagcauguuucacagaguaagccug

SEQ ID NO: 51278 - RNA, 29 nt, Homo Sapiens
ggaaauggggcugggggccguccccggga

SEQ ID NO: 51279 - RNA, 32 nt, Homo Sapiens
uggcauuuccccagccucccaccgccccauuu

SEQ ID NO: 51280 - RNA, 32 nt, Homo Sapiens
cagcgugggcuggggcucaaggcgcaggaagg

SEQ ID NO: 51281 - RNA, 32 nt, Homo Sapiens
aagauagagaggcauaacaucaaugcagaguu

SEQ ID NO: 51282 - RNA, 32 nt, Homo Sapiens
gccgcuacgaggccuuccugaguccggaguac

SEQ ID NO: 51283 - RNA, 30 nt, Homo Sapiens
cuccauagcccugccacccacuguaaaaag

SEQ ID NO: 51284 - RNA, 32 nt, Homo Sapiens
ccguccagccaggggugccgggcccgcccagc

SEQ ID NO: 51285 - RNA, 32 nt, Homo Sapiens
cgccagccucaucgucguguccuuuucuaaag

SEQ ID NO: 51286 - RNA, 32 nt, Homo Sapiens
gaaacaggaaugaaccggcagcuagugaacau

SEQ ID NO: 51287 - RNA, 32 nt, Homo Sapiens
augacagcccaggcuccugaaccaucaggaac

SEQ ID NO: 51288 - RNA, 32 nt, Homo Sapiens
accacuccugucagcaagugcucagagcaggu

SEQ ID NO: 51289 - RNA, 32 nt, Homo Sapiens
ggagcgugggaugggugaggacuuccugagcu

SEQ ID NO: 51290 - RNA, 32 nt, Homo Sapiens
gaacuugucaaugagaaaccacuuguuaagaa

SEQ ID NO: 51291 - RNA, 32 nt, Homo Sapiens
cuugaucuggggauagucuuggggcaaagaaa

SEQ ID NO: 51292 - RNA, 32 nt, Homo Sapiens
aacauaauacccuuugucuuggaguagaauac

SEQ ID NO: 51293 - RNA, 31 nt, Homo Sapiens
aaaauauauugagccuguaaauugcaaaaaa

SEQ ID NO: 51294 - RNA, 32 nt, Homo Sapiens
ugaucuuguauuacccacaggaaugagggcag

SEQ ID NO: 51295 - RNA, 32 nt, Homo Sapiens
uaggccuuuccacaaucuucuaccaguuaacu

SEQ ID NO: 51296 - RNA, 32 nt, Homo Sapiens
gggaucugaagagcuauggugaaacaccacug

SEQ ID NO: 51297 - RNA, 32 nt, Homo Sapiens
aaaugccuuuuuuggaaggacuaacagaaagc

SEQ ID NO: 51298 - RNA, 32 nt, Homo Sapiens
gccacccugcuuccauuugguucaacaacugg

SEQ ID NO: 51299 - RNA, 32 nt, Homo Sapiens
acccagggaagcagggcugcugcugcacaccg

SEQ ID NO: 51300 - RNA, 32 nt, Homo Sapiens
ugccaagucccugucucuuucagacacagaca

SEQ ID NO: 51301 - RNA, 32 nt, Homo Sapiens
aaaauccaacaacuaacagacauucacaggca

SEQ ID NO: 51302 - RNA, 32 nt, Homo Sapiens
gcguuuacaaccuugugagcaaggugguguua

SEQ ID NO: 51303 - RNA, 32 nt, Homo Sapiens
caugccaggaggagggccagagauggaugacu

SEQ ID NO: 51304 - RNA, 32 nt, Homo Sapiens
uuucagagcacuuuaaagucugauauuucucg

SEQ ID NO: 51305 - RNA, 32 nt, Homo Sapiens
aauaaugcauauauuuguauuuuuaaauuucc

SEQ ID NO: 51306 - RNA, 32 nt, Homo Sapiens
gaugagaaaaugaaagaaaaacaaagacacca

SEQ ID NO: 51307 - RNA, 32 nt, Homo Sapiens
ccgagcccagcuccccgcggcggccgcuagcc

SEQ ID NO: 51308 - RNA, 32 nt, Homo Sapiens
ccaaaagagaaugcaucaauuuuugugcauuc

SEQ ID NO: 51309 - RNA, 32 nt, Homo Sapiens
ugaagaaaagcaagcuaagaaaaaauucuguu

SEQ ID NO: 51310 - RNA, 32 nt, Homo Sapiens
cucaccuacuggaugucggucuccaggagguu

SEQ ID NO: 51311 - RNA, 32 nt, Homo Sapiens
aucccuuuaaacaauuacuguauuuguuuuug

SEQ ID NO: 51312 - RNA, 32 nt, Homo Sapiens
ggccagcacaugccaaacagaaguagacaaag

SEQ ID NO: 51313 - RNA, 32 nt, Homo Sapiens
ucucaagguauaaaugucuuaauggaucugau

SEQ ID NO: 51314 - RNA, 32 nt, Homo Sapiens
uugcuguuuuuagaauucagagcccuugcugg

SEQ ID NO: 51315 - RNA, 32 nt, Homo Sapiens
aagaaaaagggagauucuuaagagaugggaaa

SEQ ID NO: 51316 - RNA, 32 nt, Homo Sapiens
gccagagagcuggcaccugagaaggacagaac

SEQ ID NO: 51317 - RNA, 32 nt, Homo Sapiens
ccugcuguacacccucaacaaacaccagcgcu

SEQ ID NO: 51318 - RNA, 32 nt, Homo Sapiens
acugacggcaggggcugcugcccccgccuccu

SEQ ID NO: 51319 - RNA, 32 nt, Homo Sapiens
cauuagacaaauaacuaaugcauacggggcuu

SEQ ID NO: 51320 - RNA, 32 nt, Homo Sapiens
uggcucuccuggaugcuagcucacuguccaag

SEQ ID NO: 51321 - RNA, 32 nt, Homo Sapiens
ugggggcugacagggauucaccuacgcucuua

SEQ ID NO: 51322 - RNA, 32 nt, Homo Sapiens
cagagaaggguggagguggggucuguccugag

SEQ ID NO: 51323 - RNA, 32 nt, Homo Sapiens
agacaaagcggucgccgcccccgcccggcccc

SEQ ID NO: 51324 - RNA, 32 nt, Homo Sapiens
uucuuuuguuuuuucuugugguguccggauca

SEQ ID NO: 51325 - RNA, 32 nt, Homo Sapiens
aaauaaauugguuagguuccuuauaccaguca

SEQ ID NO: 51326 - RNA, 32 nt, Homo Sapiens
ugaugucagcuucauguggauuuuaagcacuc

SEQ ID NO: 51327 - RNA, 32 nt, Homo Sapiens
gugaaggccacuuuaggugacuggccagagaa

SEQ ID NO: 51328 - RNA, 32 nt, Homo Sapiens
acuuaugugauaggaggguauggccaguuauu

SEQ ID NO: 51329 - RNA, 32 nt, Homo Sapiens
aaaagcacaaagauuauauaugacaaucagua

SEQ ID NO: 51330 - RNA, 32 nt, Homo Sapiens
ucuucaagggcuuacacguggaggaaugcucc

SEQ ID NO: 51331 - RNA, 32 nt, Homo Sapiens
auuguugcauugaaauggcagacgaagcaaga

SEQ ID NO: 51332 - RNA, 32 nt, Homo Sapiens
caugcugaccugauaacugggguguugagacc

SEQ ID NO: 51333 - RNA, 32 nt, Homo Sapiens
gucuuccccaguuuucucagccaggcggcggc

SEQ ID NO: 51334 - RNA, 32 nt, Homo Sapiens
gggaggaggacuuggagggucugggggcagcu

SEQ ID NO: 51335 - RNA, 32 nt, Homo Sapiens
aguagcagcccagcccgcccagccccaggugg

SEQ ID NO: 51336 - RNA, 32 nt, Homo Sapiens
agaucuuucaauacucuuaaauuuuauaugua

SEQ ID NO: 51337 - RNA, 32 nt, Homo Sapiens
aaccucggccccagcccugccuccccagccag

SEQ ID NO: 51338 - RNA, 32 nt, Homo Sapiens
gggugugagccgcggugcccaaggcugcgccg

SEQ ID NO: 51339 - RNA, 28 nt, Homo Sapiens
aaacaaguggcuaccugauggaaacuuu

SEQ ID NO: 51340 - RNA, 32 nt, Homo Sapiens
acauucucccuucacccagacaucucaaagag

SEQ ID NO: 51341 - RNA, 32 nt, Homo Sapiens
ugcuauuguguuggguugguuuccucucuuuu

SEQ ID NO: 51342 - RNA, 32 nt, Homo Sapiens
gggaagaaaaggaccuguggguggcucaggcc

SEQ ID NO: 51343 - RNA, 32 nt, Homo Sapiens
ucccgccagacaccucgagcuccuuaaguagc

SEQ ID NO: 51344 - RNA, 32 nt, Homo Sapiens
uuuguauauuuucgcuuucuccucaaguaaca

SEQ ID NO: 51345 - RNA, 32 nt, Homo Sapiens
ucgcccgccccagcccggggccgcucaggucu

SEQ ID NO: 51346 - RNA, 32 nt, Homo Sapiens
uaacuuacaugacuuucuuuuuucacauuggg

SEQ ID NO: 51347 - RNA, 32 nt, Homo Sapiens
uggaggguuuucuggagggcagcaggaaggcu

SEQ ID NO: 51348 - RNA, 32 nt, Homo Sapiens
cccuccgcguggccucucaccucccccaggau

SEQ ID NO: 51349 - RNA, 32 nt, Homo Sapiens
uaauaaagggaaggcuuucaggagcuuacugg

SEQ ID NO: 51350 - RNA, 32 nt, Homo Sapiens
uuuacagauuugguauaacauuuuggggagcc

SEQ ID NO: 51351 - RNA, 32 nt, Homo Sapiens
gccagaggccccaggucaccucggguccccuu

SEQ ID NO: 51352 - RNA, 32 nt, Homo Sapiens
aggcaauacuuauuaucuaccggguaacagug

SEQ ID NO: 51353 - RNA, 32 nt, Homo Sapiens
gggaggcccgcggcggggacggagagagcucg

SEQ ID NO: 51354 - RNA, 32 nt, Homo Sapiens
cuccuuuuuccuuuuucuuuuuucaccccugc

SEQ ID NO: 51355 - RNA, 32 nt, Homo Sapiens
cugggguugcugcccgucagucucgaaaggug

SEQ ID NO: 51356 - RNA, 32 nt, Homo Sapiens
cgagcagaguguggcggcggcggcgagaucug

SEQ ID NO: 51357 - RNA, 32 nt, Homo Sapiens
gccucucacagcagcacccuuuccucucauug

SEQ ID NO: 51358 - RNA, 32 nt, Homo Sapiens
cggucuugguuucuaacaucucgggguguguu

SEQ ID NO: 51359 - RNA, 32 nt, Homo Sapiens
ucuuuugauauuaaaaagaaguacauguucau

SEQ ID NO: 51360 - RNA, 32 nt, Homo Sapiens
auaagucugaauaaaauauaauuuaaaagugg

SEQ ID NO: 51361 - RNA, 32 nt, Homo Sapiens
aguccuuuaucugcaccuagaaccucccuccu

SEQ ID NO: 51362 - RNA, 32 nt, Homo Sapiens
aagagacaagacuauuugaggacaauagacac

SEQ ID NO: 51363 - RNA, 32 nt, Homo Sapiens
uggagaggcagacggugggacccaccagcucu

SEQ ID NO: 51364 - RNA, 32 nt, Homo Sapiens
aggaaauuuagcaaagaaauauguagaugaau

SEQ ID NO: 51365 - RNA, 32 nt, Homo Sapiens
caucaugaauuagagcagucucuggugaaagg

SEQ ID NO: 51366 - RNA, 32 nt, Homo Sapiens
agcuggccgacguggcagcaccccccggaggu

SEQ ID NO: 51367 - RNA, 32 nt, Homo Sapiens
ggccagcccaaaggacucucuauccaggaugu

SEQ ID NO: 51368 - RNA, 32 nt, Homo Sapiens
aauugcugcauggaaauugauguacauucagg

SEQ ID NO: 51369 - RNA, 32 nt, Homo Sapiens
auagauucugguguuaaaauagacuggaucug

SEQ ID NO: 51370 - RNA, 32 nt, Homo Sapiens
gaaggcggaaggcuucggcagagcugcgccgc

SEQ ID NO: 51371 - RNA, 32 nt, Homo Sapiens
gcgcgcgcgggagcgagcuuugaaaguugagc

SEQ ID NO: 51372 - RNA, 32 nt, Homo Sapiens
uuguguagguaguccuugcaccucaugcagga

SEQ ID NO: 51373 - RNA, 32 nt, Homo Sapiens
cggacguacucugugagcggcgcccgggcgcc

SEQ ID NO: 51374 - RNA, 32 nt, Homo Sapiens
cugcagaccugaaggucaaugauuguuuaauc

SEQ ID NO: 51375 - RNA, 32 nt, Homo Sapiens
cucugugugggaaaauggcagaaagauggaga

SEQ ID NO: 51376 - RNA, 32 nt, Homo Sapiens
gaguggacacugggugaaccacggauggccuc

SEQ ID NO: 51377 - RNA, 32 nt, Homo Sapiens
aagguagccaagggauuugguauuuuagucau

SEQ ID NO: 51378 - RNA, 32 nt, Homo Sapiens
gaaacuuuauacauuaguaaaugucuuuguaa

SEQ ID NO: 51379 - RNA, 32 nt, Homo Sapiens
guuaucaccaaaacaaccuccaguauauacca

SEQ ID NO: 51380 - RNA, 32 nt, Homo Sapiens
ccuccgggcugugccgcagagcugccggcugu

SEQ ID NO: 51381 - RNA, 32 nt, Homo Sapiens
cuuuuaaaaaauaucuggaacuaucuuuaaaa

SEQ ID NO: 51382 - RNA, 32 nt, Homo Sapiens
ggaaaaaugcccuuaaaucauaggaaaguauu

SEQ ID NO: 51383 - RNA, 32 nt, Homo Sapiens
cugugaguugacugaggggcucagacuugggg

SEQ ID NO: 51384 - RNA, 32 nt, Homo Sapiens
uggcgggggcagcagaggggcugggugaacuc

SEQ ID NO: 51385 - RNA, 32 nt, Homo Sapiens
ucacuugguuugucaucaggaacugagcaggu

SEQ ID NO: 51386 - RNA, 32 nt, Homo Sapiens
accuuucauucuuuuuguuuucuguuuuugcc

SEQ ID NO: 51387 - RNA, 32 nt, Homo Sapiens
aacuuuggaaaacauaaaaaucacucauauaa

SEQ ID NO: 51388 - RNA, 32 nt, Homo Sapiens
acuuuuaacucuucccucccccgugcuuuagu

SEQ ID NO: 51389 - RNA, 32 nt, Homo Sapiens
ucuagucuugucagggcggaugcagggacuga

SEQ ID NO: 51390 - RNA, 32 nt, Homo Sapiens
uuuguauagugauuucaggccuuuuauuuucu

SEQ ID NO: 51391 - RNA, 32 nt, Homo Sapiens
uaaggcuuuuuagagcagacuuuguuggcaua

SEQ ID NO: 51392 - RNA, 32 nt, Homo Sapiens
cuccuucugagucaggacauguguacaggaga

SEQ ID NO: 51393 - RNA, 32 nt, Homo Sapiens
ugaucuccggucccuucccccaucauccuucc

SEQ ID NO: 51394 - RNA, 32 nt, Homo Sapiens
cuccccuggugccugugucugcagaaaaacaa

SEQ ID NO: 51395 - RNA, 31 nt, Homo Sapiens
ccccacccagcaugccugccccagcaccugc

SEQ ID NO: 51396 - RNA, 32 nt, Homo Sapiens
ucacagaccgugucacuuugccuguggguggg

SEQ ID NO: 51397 - RNA, 32 nt, Homo Sapiens
ucuuaauaccugucacauauuauagucuugaa

SEQ ID NO: 51398 - RNA, 32 nt, Homo Sapiens
agcacaugggccgagacucuccccacggggcu

SEQ ID NO: 51399 - RNA, 32 nt, Homo Sapiens
gcauuuuacucaagucuucucuagucaaugag

SEQ ID NO: 51400 - RNA, 32 nt, Homo Sapiens
caggucccacguuuccucccccuuuuuucuug

SEQ ID NO: 51401 - RNA, 32 nt, Homo Sapiens
accacacagggugcagcuccuccggcgguggg

SEQ ID NO: 51402 - RNA, 32 nt, Homo Sapiens
gagacucugaaauggaccagggaggaaacuga

SEQ ID NO: 51403 - RNA, 32 nt, Homo Sapiens
auggcagaccgaaguggagaucuuguagccua

SEQ ID NO: 51404 - RNA, 32 nt, Homo Sapiens
acaaagucucucuaccaacaaacaaaaacaua

SEQ ID NO: 51405 - RNA, 32 nt, Homo Sapiens
ccaugugaaaucuuucauucugaugugaguuu

SEQ ID NO: 51406 - RNA, 32 nt, Homo Sapiens
cuggugcuggacagcuggcgccggcagcagcg

SEQ ID NO: 51407 - RNA, 32 nt, Homo Sapiens
aggcugccgaguccgcuggguccuacgcgacc

SEQ ID NO: 51408 - RNA, 32 nt, Homo Sapiens
ugagacaugaauugugucucaacagaaacuaa

SEQ ID NO: 51409 - RNA, 32 nt, Homo Sapiens
uaaccaaggggagaggccagcgggcaggcggc

SEQ ID NO: 51410 - RNA, 32 nt, Homo Sapiens
agacaucuggaaaguuuucuccacuggaaaac

SEQ ID NO: 51411 - RNA, 32 nt, Homo Sapiens
gccggcucgccagccaugaugcugcagccggg

SEQ ID NO: 51412 - RNA, 32 nt, Homo Sapiens
aaggaggcuccgugagaugggguccagcccau

SEQ ID NO: 51413 - RNA, 32 nt, Homo Sapiens
uuggcuggaucggcugccgcugguauggaugg

SEQ ID NO: 51414 - RNA, 32 nt, Homo Sapiens
acccucacagaaagagagcucugagcagguga

SEQ ID NO: 51415 - RNA, 32 nt, Homo Sapiens
ccgcgcccgcggcgcccgguagccaggaugcg

SEQ ID NO: 51416 - RNA, 32 nt, Homo Sapiens
gguuuauauuucaucuuaauucuuuugauguu

SEQ ID NO: 51417 - RNA, 32 nt, Homo Sapiens
gacggagcuggagcggcggggcggcggcggag

SEQ ID NO: 51418 - RNA, 32 nt, Homo Sapiens
uagcaugaaaauaaaccugguggcuggagucu

SEQ ID NO: 51419 - RNA, 32 nt, Homo Sapiens
acagacaguaugucuacuccucacagcaucuc

SEQ ID NO: 51420 - RNA, 32 nt, Homo Sapiens
uggucaucuccgccgcgcucgggggccccggg

SEQ ID NO: 51421 - RNA, 32 nt, Homo Sapiens
ccaucggcacuaccaccccgcuccaucaucac

SEQ ID NO: 51422 - RNA, 32 nt, Homo Sapiens
gcugcaguuggggcuccuccuggguugaucua

SEQ ID NO: 51423 - RNA, 32 nt, Homo Sapiens
uccccacaccacccaagccuagcuggguggga

SEQ ID NO: 51424 - RNA, 32 nt, Homo Sapiens
aggauaauuacauugacccaugauagauacaa

SEQ ID NO: 51425 - RNA, 32 nt, Homo Sapiens
ccggggcggagcaggagcgggcgggccugcag

SEQ ID NO: 51426 - RNA, 32 nt, Homo Sapiens
caaguuaaagaagauuccccuuuauuguggau

SEQ ID NO: 51427 - RNA, 31 nt, Homo Sapiens
uccauccaagccacaagggguuuguugggga

SEQ ID NO: 51428 - RNA, 32 nt, Homo Sapiens
cuacacagcagcccacaguccacagucuuuuu

SEQ ID NO: 51429 - RNA, 32 nt, Homo Sapiens
ucuacucuagaauauauccagguugggccagu

SEQ ID NO: 51430 - RNA, 32 nt, Homo Sapiens
cugaaagcugaccagcauucucuucuugguaa

SEQ ID NO: 51431 - RNA, 32 nt, Homo Sapiens
ccuacuugauuaaagauugaguggaauucuag

SEQ ID NO: 51432 - RNA, 32 nt, Homo Sapiens
cugagcccagcacugcggccaagucgaagacu

SEQ ID NO: 51433 - RNA, 32 nt, Homo Sapiens
cugacagcauucuccguaccccuucaaauccu

SEQ ID NO: 51434 - RNA, 32 nt, Homo Sapiens
ggguaugaggcuggggcggggcuggagguggc

SEQ ID NO: 51435 - RNA, 32 nt, Homo Sapiens
cuugaucauuuucucuggguuugggaguggag

SEQ ID NO: 51436 - RNA, 32 nt, Homo Sapiens
ugugcccccacuuccugccuccugaagccuuc

SEQ ID NO: 51437 - RNA, 32 nt, Homo Sapiens
uaauuuauaaguaacauaggccucauauuuac

SEQ ID NO: 51438 - RNA, 32 nt, Homo Sapiens
guuauuauuauuaaauuuauguuuugcaacuu

SEQ ID NO: 51439 - RNA, 32 nt, Homo Sapiens
agccacagaacacauacagaaaacagacauga

SEQ ID NO: 51440 - RNA, 32 nt, Homo Sapiens
ggaaaggaaugggcaccucugaacccaggcac

SEQ ID NO: 51441 - RNA, 32 nt, Homo Sapiens
caaggggcgccaggagcagagccagggccugg

SEQ ID NO: 51442 - RNA, 32 nt, Homo Sapiens
aaguuuauucaaugcuaauuugaaagaaaauu

SEQ ID NO: 51443 - RNA, 32 nt, Homo Sapiens
acauugucaauacaguauauuaguucugcaaa

SEQ ID NO: 51444 - RNA, 32 nt, Homo Sapiens
ucccuuuuuucuuuaaaccuuuaaaugacaaa

SEQ ID NO: 51445 - RNA, 32 nt, Homo Sapiens
accccagcggcagaugggccugugugcaccca

SEQ ID NO: 51446 - RNA, 32 nt, Homo Sapiens
cuuauuaaugaaauccauuuaaacuauacuua

SEQ ID NO: 51447 - RNA, 32 nt, Homo Sapiens
cacuaaggcgcaaggcagcugcacauccacgg

SEQ ID NO: 51448 - RNA, 32 nt, Homo Sapiens
cuccucaugcugucaugccagaaguggaauuc

SEQ ID NO: 51449 - RNA, 32 nt, Homo Sapiens
uggcggcuggggucccagcagcugccaggagc

SEQ ID NO: 51450 - RNA, 32 nt, Homo Sapiens
ccccgggccgcuggcuggugggcccccaauug

SEQ ID NO: 51451 - RNA, 32 nt, Homo Sapiens
agagacccacaauaaacucgugacuugucccc

SEQ ID NO: 51452 - RNA, 32 nt, Homo Sapiens
caacuacauuccagggcgcccaggggcgggcg

SEQ ID NO: 51453 - RNA, 32 nt, Homo Sapiens
cuucaacugaggucuguaagacuuaaagcaca

SEQ ID NO: 51454 - RNA, 32 nt, Homo Sapiens
ucggcuuuguagcaagauccacaggugauuug

SEQ ID NO: 51455 - RNA, 32 nt, Homo Sapiens
gccguggggaaaugcaggacugagaggcaacg

SEQ ID NO: 51456 - RNA, 32 nt, Homo Sapiens
guaaaccugacccaccaauaaggauucagcug

SEQ ID NO: 51457 - RNA, 32 nt, Homo Sapiens
uaaaucuagacaccaucaaagcauaaaauaaa

SEQ ID NO: 51458 - RNA, 32 nt, Homo Sapiens
gcggugcaauggcggaaagaaaaggaacagcc

SEQ ID NO: 51459 - RNA, 31 nt, Homo Sapiens
aaggcagccuccugccugcccuggccuugcu

SEQ ID NO: 51460 - RNA, 32 nt, Homo Sapiens
cacccgaccgacggagucgugcguccgccgcc

SEQ ID NO: 51461 - RNA, 32 nt, Homo Sapiens
ccucacaaggaccagggccuucuggaggagug

SEQ ID NO: 51462 - RNA, 31 nt, Homo Sapiens
uucuugauuucucagaaccagcaaaagucac

SEQ ID NO: 51463 - RNA, 32 nt, Homo Sapiens
gcgcaugggccuguuccuggcccgcagccgcc

SEQ ID NO: 51464 - RNA, 32 nt, Homo Sapiens
ggaccgcaugggcuucccgcccggggccgcgc

SEQ ID NO: 51465 - RNA, 32 nt, Homo Sapiens
uccuuuagagagacaugaaacuaucacaggug

SEQ ID NO: 51466 - RNA, 32 nt, Homo Sapiens
guuggcaccuuugaauucuacauccuguuucu

SEQ ID NO: 51467 - RNA, 32 nt, Homo Sapiens
aggccuggcuucaucaccccgcccaccacacc

SEQ ID NO: 51468 - RNA, 32 nt, Homo Sapiens
aggugcugacaucguccccagcccuguggcug

SEQ ID NO: 51469 - RNA, 32 nt, Homo Sapiens
acggcgauucucgacgcgggcccccaggauuc

SEQ ID NO: 51470 - RNA, 32 nt, Homo Sapiens
gccagcccagcccugccuccccggucucccac

SEQ ID NO: 51471 - RNA, 32 nt, Homo Sapiens
guuuaaugacggucauggcaacuuuuuggcac

SEQ ID NO: 51472 - RNA, 32 nt, Homo Sapiens
cacacaaagguuucuuuuuucuuagcuucauu

SEQ ID NO: 51473 - RNA, 32 nt, Homo Sapiens
augucuaaaaauuaaaguuauuuugggaauac

SEQ ID NO: 51474 - RNA, 32 nt, Homo Sapiens
uuucacuugucaacuuaccccaucaccacgag

SEQ ID NO: 51475 - RNA, 32 nt, Homo Sapiens
uaugacauuuaaaauuuuuguuugguuuaacu

SEQ ID NO: 51476 - RNA, 32 nt, Homo Sapiens
gaaggaaacacuuuauagauuucuauagcagu

SEQ ID NO: 51477 - RNA, 32 nt, Homo Sapiens
guaguucuguguacuuuuuuuggauggggcug

SEQ ID NO: 51478 - RNA, 28 nt, Homo Sapiens
agcagagggcggccuagcuggggcucag

SEQ ID NO: 51479 - RNA, 32 nt, Homo Sapiens
guaaaugaauguucuauaaaucuuuuguauag

SEQ ID NO: 51480 - RNA, 32 nt, Homo Sapiens
ugggcugggcccugugucuccuccuucccacg

SEQ ID NO: 51481 - RNA, 32 nt, Homo Sapiens
cagcugauccgcacgcagccacuucggcuacc

SEQ ID NO: 51482 - RNA, 32 nt, Homo Sapiens
guccggcaucggaggaggucuccggagcagag

SEQ ID NO: 51483 - RNA, 32 nt, Homo Sapiens
ggagcagggaagaucuuugauuaucauuuuaa

SEQ ID NO: 51484 - RNA, 32 nt, Homo Sapiens
cgccccacccacccucagccagcccucuccag

SEQ ID NO: 51485 - RNA, 32 nt, Homo Sapiens
ccuugacuucuguuccucucccuccugcagau

SEQ ID NO: 51486 - RNA, 32 nt, Homo Sapiens
uggaaagcgaggaaacacuaaacauguuuuua

SEQ ID NO: 51487 - RNA, 32 nt, Homo Sapiens
aaaaauucugcugugaagaugaaaauaaaaau

SEQ ID NO: 51488 - RNA, 32 nt, Homo Sapiens
uuaauuguguggaaugaaaaaauacauauauu

SEQ ID NO: 51489 - RNA, 32 nt, Homo Sapiens
cucucggagcagcuucaggccucugccagugu

SEQ ID NO: 51490 - RNA, 32 nt, Homo Sapiens
agaagucaauauucaauaaaucuuguacauaa

SEQ ID NO: 51491 - RNA, 32 nt, Homo Sapiens
gcgggccgaaagcggcuugggcucgacggagg

SEQ ID NO: 51492 - RNA, 32 nt, Homo Sapiens
ggguaccauccacagcgauucucggagucaug

SEQ ID NO: 51493 - RNA, 27 nt, Homo Sapiens
gcuuucaucuaauucuggcaggaccuc

SEQ ID NO: 51494 - RNA, 32 nt, Homo Sapiens
cgagagaacaccugguaaccaggucaugguug

SEQ ID NO: 51495 - RNA, 32 nt, Homo Sapiens
ccaaguuuacaucauuguaauuauuacuggua

SEQ ID NO: 51496 - RNA, 32 nt, Homo Sapiens
cuggccagcacuguccaguagcugaggccacu

SEQ ID NO: 51497 - RNA, 32 nt, Homo Sapiens
agaguaauuccuauccugugugccucagaagc

SEQ ID NO: 51498 - RNA, 29 nt, Homo Sapiens
ccccaggggcgucucagggagcgggcuga

SEQ ID NO: 51499 - RNA, 32 nt, Homo Sapiens
uacaacaauauuuuaguuugccucaucuguag

SEQ ID NO: 51500 - RNA, 32 nt, Homo Sapiens
auacagcagcuguccuguucccuuucaaggac

SEQ ID NO: 51501 - RNA, 32 nt, Homo Sapiens
agcuaauuuuuggugcugauauuguacugugc

SEQ ID NO: 51502 - RNA, 32 nt, Homo Sapiens
aaauuauauguugauuuuucuuucucucugau

SEQ ID NO: 51503 - RNA, 32 nt, Homo Sapiens
cacuuuuaucccauuuauuucuuuaaaaaaug

SEQ ID NO: 51504 - RNA, 32 nt, Homo Sapiens
ccggcccggcgcccgauuuccgccuuccgacc

SEQ ID NO: 51505 - RNA, 32 nt, Homo Sapiens
uuuaaugaauaucaguuuuaauuuauagacug

SEQ ID NO: 51506 - RNA, 32 nt, Homo Sapiens
ucugaaggggccugggggcaucucgggcacag

SEQ ID NO: 51507 - RNA, 32 nt, Homo Sapiens
aaaaauacaaauauuagcuggauaugguggug

SEQ ID NO: 51508 - RNA, 32 nt, Homo Sapiens
gggugccccccgcccucuccaggcccggaucu

SEQ ID NO: 51509 - RNA, 32 nt, Homo Sapiens
cacugcacuccagccugggcaaccaggugaga

SEQ ID NO: 51510 - RNA, 32 nt, Homo Sapiens
uuucugccaugguguuggauugagauugugcu

SEQ ID NO: 51511 - RNA, 32 nt, Homo Sapiens
ugguuucacccuuuuccagucuggaguuggag

SEQ ID NO: 51512 - RNA, 32 nt, Homo Sapiens
ugcugaaaacguuugagggagguaaugacaug

SEQ ID NO: 51513 - RNA, 32 nt, Homo Sapiens
caucucacagcgcgcagagacugcagccuccc

SEQ ID NO: 51514 - RNA, 32 nt, Homo Sapiens
cgcagcgcgggugggaggcggggaggagcagc

SEQ ID NO: 51515 - RNA, 32 nt, Homo Sapiens
agcuaaaaaggaaggaggagccgccgcgggac

SEQ ID NO: 51516 - RNA, 32 nt, Homo Sapiens
aauuccacauaaaaucaggaaaaaagaaauaa

SEQ ID NO: 51517 - RNA, 32 nt, Homo Sapiens
uacuaaauucgcggccgcgucgaccuggacuu

SEQ ID NO: 51518 - RNA, 32 nt, Homo Sapiens
gaaugauuaaaaauaagcuuuuacuuuuuaaa

SEQ ID NO: 51519 - RNA, 32 nt, Homo Sapiens
aauaucagaaaagggaaaggggaugauaaagc

SEQ ID NO: 51520 - RNA, 32 nt, Homo Sapiens
agauccugugcaggcugccgggccccuucugc

SEQ ID NO: 51521 - RNA, 32 nt, Homo Sapiens
guggcgcuaccugguccagggaggucacagag

SEQ ID NO: 51522 - RNA, 32 nt, Homo Sapiens
gcccauuucauggccuugcacacacacccacc

SEQ ID NO: 51523 - RNA, 32 nt, Homo Sapiens
ccaggugcacgguuagcuucacagcaacaggg

SEQ ID NO: 51524 - RNA, 32 nt, Homo Sapiens
gcagguagguagugauggguauguucuaaucu

SEQ ID NO: 51525 - RNA, 32 nt, Homo Sapiens
caagucuguuuccucccaucaacugugaguac

SEQ ID NO: 51526 - RNA, 32 nt, Homo Sapiens
aguguaaucaguacuugcucauuuauuugucu

SEQ ID NO: 51527 - RNA, 32 nt, Homo Sapiens
caaauaaacucuacuauauagcaguaauauca

SEQ ID NO: 51528 - RNA, 32 nt, Homo Sapiens
ugccauuuugcauuuucaucuacucauuuaaa

SEQ ID NO: 51529 - RNA, 32 nt, Homo Sapiens
cccgguccacucucacaggcuccguuaaguga

SEQ ID NO: 51530 - RNA, 32 nt, Homo Sapiens
ccuucaugggccgcgaugauggcggcccugua

SEQ ID NO: 51531 - RNA, 32 nt, Homo Sapiens
caaccuuugggacaucuucagcccuuuuauua

SEQ ID NO: 51532 - RNA, 32 nt, Homo Sapiens
caugugauauaaaacauaccacaggcugggca

SEQ ID NO: 51533 - RNA, 32 nt, Homo Sapiens
gacacgcugggccgcggcugcccggcagcaac

SEQ ID NO: 51534 - RNA, 32 nt, Homo Sapiens
cuggggcagcugccucccaggggugggacucu

SEQ ID NO: 51535 - RNA, 32 nt, Homo Sapiens
cuaggcaauuuaauaaucguuugcaaaaacca

SEQ ID NO: 51536 - RNA, 32 nt, Homo Sapiens
uuuuccuuuaauccaguguuacuguguuuauc

SEQ ID NO: 51537 - RNA, 32 nt, Homo Sapiens
acgaauugccuggcugaguagcaagaaagaca

SEQ ID NO: 51538 - RNA, 32 nt, Homo Sapiens
acaucucugccauuuuaucaggaaaaauucua

SEQ ID NO: 51539 - RNA, 32 nt, Homo Sapiens
aauuccacaaugaaagaauguauuuugucuuu

SEQ ID NO: 51540 - RNA, 32 nt, Homo Sapiens
cucccgcugcugucaugguugguucgcuaaac

SEQ ID NO: 51541 - RNA, 32 nt, Homo Sapiens
gcagcccgcgcgcuucacuccgcccaaauaag

SEQ ID NO: 51542 - RNA, 32 nt, Homo Sapiens
cuggugaugccuuguuugggguucuguggguu

SEQ ID NO: 51543 - RNA, 32 nt, Homo Sapiens
aagugguugggguucccgaggucacugaggac

SEQ ID NO: 51544 - RNA, 32 nt, Homo Sapiens
auagagaagaaccaguaaaaacgguugaaaag

SEQ ID NO: 51545 - RNA, 32 nt, Homo Sapiens
uccuggcaaacaaaauacuaagaucucagggg

SEQ ID NO: 51546 - RNA, 32 nt, Homo Sapiens
uauaugccucauacacauaauuuugugcauga

SEQ ID NO: 51547 - RNA, 32 nt, Homo Sapiens
aagggagauggauuccguccucgggggcucug

SEQ ID NO: 51548 - RNA, 32 nt, Homo Sapiens
gggacagggcagggaggcucuggccaguccca

SEQ ID NO: 51549 - RNA, 32 nt, Homo Sapiens
acaauuagcuaugcuucuuccuccucagaccu

SEQ ID NO: 51550 - RNA, 32 nt, Homo Sapiens
aaacaggcccagugcugaguucuuuguccacu

SEQ ID NO: 51551 - RNA, 32 nt, Homo Sapiens
guauuaaagcugacuuuuuuuuuuuuaagaua

SEQ ID NO: 51552 - RNA, 32 nt, Homo Sapiens
ccgcguuccuuggcggccgccgguucccggga

SEQ ID NO: 51553 - RNA, 32 nt, Homo Sapiens
aaaauugggucuguaugcacauuugugguucu

SEQ ID NO: 51554 - RNA, 32 nt, Homo Sapiens
agagcccuguuugagguuguggcugaucccuc

SEQ ID NO: 51555 - RNA, 32 nt, Homo Sapiens
guaccgauaaaacuuaaaaauauccccacaca

SEQ ID NO: 51556 - RNA, 32 nt, Homo Sapiens
auugguucuccagaucuuuguggucauuucuu

SEQ ID NO: 51557 - RNA, 32 nt, Homo Sapiens
ggcuggcggaggaggagagacggaggaggccg

SEQ ID NO: 51558 - RNA, 32 nt, Homo Sapiens
uuaagcuucuaaaaugucaucuaucaagcacc

SEQ ID NO: 51559 - RNA, 32 nt, Homo Sapiens
auggggaaguucuagagugcugccagguugcc

SEQ ID NO: 51560 - RNA, 32 nt, Homo Sapiens
aauuugugaggaagaaaaccaaagugaaucca

SEQ ID NO: 51561 - RNA, 32 nt, Homo Sapiens
agccaguguuugcugcccuugcugggggcggg

SEQ ID NO: 51562 - RNA, 32 nt, Homo Sapiens
guccucggaagcuccgagccuguuuucuguag

SEQ ID NO: 51563 - RNA, 32 nt, Homo Sapiens
ugauccugcaucggggggcccuggaccauccu

SEQ ID NO: 51564 - RNA, 32 nt, Homo Sapiens
caccuacugugccucucaucaggugucacgau

SEQ ID NO: 51565 - RNA, 32 nt, Homo Sapiens
cuuucccagaucgggaggaaaaauauggaaug

SEQ ID NO: 51566 - RNA, 32 nt, Homo Sapiens
cauagacugaggcacacuggcuccucagcucc

SEQ ID NO: 51567 - RNA, 32 nt, Homo Sapiens
agguuagacguggcagcucugugcaguguuug

SEQ ID NO: 51568 - RNA, 32 nt, Homo Sapiens
ugccuguaaucucagcugcuccggaggcugag

SEQ ID NO: 51569 - RNA, 32 nt, Homo Sapiens
gcugggccuugcggcgugaggaccccggcggc

SEQ ID NO: 51570 - RNA, 32 nt, Homo Sapiens
uauuauuuggcuucuucaguugugcuuuuaau

SEQ ID NO: 51571 - RNA, 32 nt, Homo Sapiens
cuacagagaggugucaugguaagauuucauuc

SEQ ID NO: 51572 - RNA, 32 nt, Homo Sapiens
accugaaccuggugcuguaugugugugaaacu

SEQ ID NO: 51573 - RNA, 32 nt, Homo Sapiens
uaugguaaguacaaagggagaggaagacauuu

SEQ ID NO: 51574 - RNA, 32 nt, Homo Sapiens
cuuguuaagacuuuauacuugggucaaucucu

SEQ ID NO: 51575 - RNA, 32 nt, Homo Sapiens
ucauauuuuauacauauuuagcauuauaauac

SEQ ID NO: 51576 - RNA, 32 nt, Homo Sapiens
caugagaaggauagaaaacuaaaauuauaggg

SEQ ID NO: 51577 - RNA, 32 nt, Homo Sapiens
caggcagcccccagcccccugaggcccugucc

SEQ ID NO: 51578 - RNA, 32 nt, Homo Sapiens
acaccauuuuuuuuuucuuuuuggggaggagu

SEQ ID NO: 51579 - RNA, 32 nt, Homo Sapiens
aucaauagauaucauauguuuaugacaguuuc

SEQ ID NO: 51580 - RNA, 32 nt, Homo Sapiens
gggcgcugccgggucucgguucggguucguug

SEQ ID NO: 51581 - RNA, 32 nt, Homo Sapiens
agauuuucuguguuaugaaauguuucaguaaa

SEQ ID NO: 51582 - RNA, 32 nt, Homo Sapiens
agcgugcggccgcggcgcccaggucggaaagg

SEQ ID NO: 51583 - RNA, 32 nt, Homo Sapiens
gucugugugucugcagacugcuaaccuaugac

SEQ ID NO: 51584 - RNA, 32 nt, Homo Sapiens
agaccccgcccccgccagcagcucagccccuc

SEQ ID NO: 51585 - RNA, 32 nt, Homo Sapiens
aggugcuccuccuggggaguuuccugucugac

SEQ ID NO: 51586 - RNA, 32 nt, Homo Sapiens
acuugcuguugcucaaucuaaucuucgaugga

SEQ ID NO: 51587 - RNA, 32 nt, Homo Sapiens
ugaacccuauguuauuuccaugugucaagugg

SEQ ID NO: 51588 - RNA, 32 nt, Homo Sapiens
gaggagcggggagcccgggaggcggcccgcgu

SEQ ID NO: 51589 - RNA, 32 nt, Homo Sapiens
agagcuuuuaaugaguuuuucuguuaucauaa

SEQ ID NO: 51590 - RNA, 26 nt, Homo Sapiens
aauggcggccgcgggcuuggucgcug

SEQ ID NO: 51591 - RNA, 32 nt, Homo Sapiens
auguguagcuugguggcgcccuugaaggccac

SEQ ID NO: 51592 - RNA, 32 nt, Homo Sapiens
aggggcuucugggaagacccuggucaagaagc

SEQ ID NO: 51593 - RNA, 32 nt, Homo Sapiens
ggucugaggaggagggacucuggaguagcaga

SEQ ID NO: 51594 - RNA, 30 nt, Homo Sapiens
uucaaauggugaauaaauacaugcagacau

SEQ ID NO: 51595 - RNA, 32 nt, Homo Sapiens
acaggauucacuuuucacuggccuuugcaguc

SEQ ID NO: 51596 - RNA, 32 nt, Homo Sapiens
agcagcgcguacagguccaucuguaagagcuc

SEQ ID NO: 51597 - RNA, 32 nt, Homo Sapiens
gcagacccugagccagcagagagggacugagg

SEQ ID NO: 51598 - RNA, 32 nt, Homo Sapiens
uccuuuguuuuaaaacugugguuuuuuaaaaa

SEQ ID NO: 51599 - RNA, 32 nt, Homo Sapiens
cgcgcagcgcgugcacagcgcgggcggaggcg

SEQ ID NO: 51600 - RNA, 32 nt, Homo Sapiens
gacauucccccuccccuccccaggugaccugc

SEQ ID NO: 51601 - RNA, 32 nt, Homo Sapiens
cacccugguuuuggggggaggcggggugcauu

SEQ ID NO: 51602 - RNA, 32 nt, Homo Sapiens
cauucaguauaaauaaaauuuuaaaauccuuu

SEQ ID NO: 51603 - RNA, 32 nt, Homo Sapiens
ugauaaugccaaaauauaacuuuauauauaau

SEQ ID NO: 51604 - RNA, 32 nt, Homo Sapiens
uuuuauauugauaacagcacugacuagggaaa

SEQ ID NO: 51605 - RNA, 32 nt, Homo Sapiens
cgggcuccugcacggcgcggcucggcucaugc

SEQ ID NO: 51606 - RNA, 32 nt, Homo Sapiens
aaguggacaucuuggaugucaagugccuaguu

SEQ ID NO: 51607 - RNA, 32 nt, Homo Sapiens
aaaaucaaggccacauugcagcccgucaagcg

SEQ ID NO: 51608 - RNA, 32 nt, Homo Sapiens
auggcagcggcgucgugggcgcggcggagaug

SEQ ID NO: 51609 - RNA, 32 nt, Homo Sapiens
ggugcuuuggggauugaaauucagaccaggaa

SEQ ID NO: 51610 - RNA, 32 nt, Homo Sapiens
agcacuucgggaggccgagaugggcagagcac

SEQ ID NO: 51611 - RNA, 32 nt, Homo Sapiens
gaaauuuuuuauuaucuauguucuucuagauu

SEQ ID NO: 51612 - RNA, 32 nt, Homo Sapiens
guucaaacugguuucacaggcuuuucagauaa

SEQ ID NO: 51613 - RNA, 32 nt, Homo Sapiens
uaacucccuugaggccgcacagagggcggagc

SEQ ID NO: 51614 - RNA, 32 nt, Homo Sapiens
uguuuuaaaucuuugagguaucaucaugaggu

SEQ ID NO: 51615 - RNA, 32 nt, Homo Sapiens
cccagacuguccccagcaguggcaccaacggg

SEQ ID NO: 51616 - RNA, 31 nt, Homo Sapiens
gcggagagggcggccgugguggaggccucca

SEQ ID NO: 51617 - RNA, 32 nt, Homo Sapiens
ugagacagcaaguuuauaaaacauccauauag

SEQ ID NO: 51618 - RNA, 27 nt, Homo Sapiens
gacuccacauccuccagcccccacaau

SEQ ID NO: 51619 - RNA, 32 nt, Homo Sapiens
uccaaaauuaaauuauugcaagcugauucaca

SEQ ID NO: 51620 - RNA, 32 nt, Homo Sapiens
auucacaaauuugaaauaauuucugaaguuga

SEQ ID NO: 51621 - RNA, 32 nt, Homo Sapiens
ugccccagcagcuccaccuuuaccagauguau

SEQ ID NO: 51622 - RNA, 32 nt, Homo Sapiens
uccuccaccucuuguggagggccugacaucag

SEQ ID NO: 51623 - RNA, 32 nt, Homo Sapiens
gccucuguucucggaauccgggugcugcggau

SEQ ID NO: 51624 - RNA, 32 nt, Homo Sapiens
ucccauucccccaucgcccccauccccauucc

SEQ ID NO: 51625 - RNA, 31 nt, Homo Sapiens
caccgccgucacugccuguucccggcggccu

SEQ ID NO: 51626 - RNA, 32 nt, Homo Sapiens
uaauauccagcaucuauaggacgcuuacacaa

SEQ ID NO: 51627 - RNA, 32 nt, Homo Sapiens
gcagcagagaccaacacugagcccucgaugau

SEQ ID NO: 51628 - RNA, 32 nt, Homo Sapiens
agcuggcugucuccagugccuguuagcugagg

SEQ ID NO: 51629 - RNA, 32 nt, Homo Sapiens
gccguagguuccaggaaagcucguggaagcuu

SEQ ID NO: 51630 - RNA, 32 nt, Homo Sapiens
ccagccugcucaauuuugguccugcuguuuuu

SEQ ID NO: 51631 - RNA, 32 nt, Homo Sapiens
aagaggcgguugcaggacucugagcuggaaau

SEQ ID NO: 51632 - RNA, 32 nt, Homo Sapiens
agagccaggaguuugggggcccaccuuccugg

SEQ ID NO: 51633 - RNA, 32 nt, Homo Sapiens
agacagagggauguggacaagaaugauguggc

SEQ ID NO: 51634 - RNA, 32 nt, Homo Sapiens
cugcucuucccucuccuggcugugguuauuua

SEQ ID NO: 51635 - RNA, 32 nt, Homo Sapiens
auguugcucaucgucuuuaccuaauaaauaag

SEQ ID NO: 51636 - RNA, 32 nt, Homo Sapiens
ggagccgccccagcacagcccacuggaagagc

SEQ ID NO: 51637 - RNA, 32 nt, Homo Sapiens
gcugccuuucuuucccauugcaacguaugccu

SEQ ID NO: 51638 - RNA, 32 nt, Homo Sapiens
uacagucaaacauaaacuuacuggaggaaaca

SEQ ID NO: 51639 - RNA, 32 nt, Homo Sapiens
cagauuugcacaacuguuuaagaguauuguuu

SEQ ID NO: 51640 - RNA, 32 nt, Homo Sapiens
gcuauagucauagauuucuuccagaaacuauu

SEQ ID NO: 51641 - RNA, 32 nt, Homo Sapiens
ccacauuuaugauuuguugauguuguuguuga

SEQ ID NO: 51642 - RNA, 32 nt, Homo Sapiens
uucauuuuaccauuuuaauuauuugaacauuc

SEQ ID NO: 51643 - RNA, 32 nt, Homo Sapiens
caauuugacagaauguagugaaagcgucaaaa

SEQ ID NO: 51644 - RNA, 32 nt, Homo Sapiens
aaauuaaagaaugaaagaaguacuucuuuuua

SEQ ID NO: 51645 - RNA, 32 nt, Homo Sapiens
uccccaaagccuauuucuucuguaguauuuca

SEQ ID NO: 51646 - RNA, 32 nt, Homo Sapiens
gaauaaaucuucuguauccucgcuccguuccg

SEQ ID NO: 51647 - RNA, 32 nt, Homo Sapiens
aguuuuuuuaucucuuuuuuuuaaaacaacau

SEQ ID NO: 51648 - RNA, 32 nt, Homo Sapiens
auucacuggaucucugaauacccaggcccccu

SEQ ID NO: 51649 - RNA, 32 nt, Homo Sapiens
auauuuuguaaauauaaguacuaguccuaauu

SEQ ID NO: 51650 - RNA, 32 nt, Homo Sapiens
gaagacaaaaauaugccugugaaauaaaacuc

SEQ ID NO: 51651 - RNA, 32 nt, Homo Sapiens
aaagccacccugcugcagcagugcgcuuuggc

SEQ ID NO: 51652 - RNA, 32 nt, Homo Sapiens
ucugcuggccuggccggcaaccccaguucugc

SEQ ID NO: 51653 - RNA, 31 nt, Homo Sapiens
ucuccaaagaugcugcucccaagggcugcca

SEQ ID NO: 51654 - RNA, 32 nt, Homo Sapiens
acuaugagaaaguuaaaaguuuauguuaauuu

SEQ ID NO: 51655 - RNA, 32 nt, Homo Sapiens
uuccucgcuccuucugguauaugcaugucacu

SEQ ID NO: 51656 - RNA, 32 nt, Homo Sapiens
acuugcagaaaauuauugaaaauuauauucag

SEQ ID NO: 51657 - RNA, 32 nt, Homo Sapiens
gguaggugguggcaagggggcggcggcggaug

SEQ ID NO: 51658 - RNA, 32 nt, Homo Sapiens
cgcagggcaugcccaccuggacaggacugaag

SEQ ID NO: 51659 - RNA, 32 nt, Homo Sapiens
cuuuguaaagcacaaauuaucugccuuaaagg

SEQ ID NO: 51660 - RNA, 32 nt, Homo Sapiens
ugauuuuuguuuucuuuuuaucauuguaucaa

SEQ ID NO: 51661 - RNA, 28 nt, Homo Sapiens
gccaugggcgaccgcggcagcucccggc

SEQ ID NO: 51662 - RNA, 32 nt, Homo Sapiens
uuucauuugaaaaauaagcuaauguguaaggu

SEQ ID NO: 51663 - RNA, 32 nt, Homo Sapiens
gccuggaaucaguuguuuguugugaaaucaau

SEQ ID NO: 51664 - RNA, 32 nt, Homo Sapiens
auugggcagggagagggcggaagggcuggcga

SEQ ID NO: 51665 - RNA, 32 nt, Homo Sapiens
accuucagccagauggaauccaauuauacaua

SEQ ID NO: 51666 - RNA, 32 nt, Homo Sapiens
ccuuuucacccaccaccccgaucccuagguga

SEQ ID NO: 51667 - RNA, 32 nt, Homo Sapiens
gccaggccccgaggguucugugcgcaccgacu

SEQ ID NO: 51668 - RNA, 32 nt, Homo Sapiens
ugccucagucagcugucccagcccgggcccga

SEQ ID NO: 51669 - RNA, 32 nt, Homo Sapiens
ucagguugugugauauuuuugcuugauagaga

SEQ ID NO: 51670 - RNA, 32 nt, Homo Sapiens
ugcaucaaugagcugcagaaauucagcccagg

SEQ ID NO: 51671 - RNA, 32 nt, Homo Sapiens
agagggauggggggcgcccacccagucugagc

SEQ ID NO: 51672 - RNA, 32 nt, Homo Sapiens
caugaagucagauagccagaagaaauuccauu

SEQ ID NO: 51673 - RNA, 32 nt, Homo Sapiens
ucugugaaaucgaggccccuugauuguuucug

SEQ ID NO: 51674 - RNA, 32 nt, Homo Sapiens
ugauucccccacuuccuggagagacugagcgg

SEQ ID NO: 51675 - RNA, 32 nt, Homo Sapiens
agguugagggauuuuucuuugcacgggguuga

SEQ ID NO: 51676 - RNA, 32 nt, Homo Sapiens
ccuagcggccuggccccagugcgguuccucau

SEQ ID NO: 51677 - RNA, 32 nt, Homo Sapiens
gagagcuucaugguguuuggccaugaagagag

SEQ ID NO: 51678 - RNA, 32 nt, Homo Sapiens
ugucagucaaggaagagaggucacuuugggac

SEQ ID NO: 51679 - RNA, 32 nt, Homo Sapiens
gugcguaacuccgcacggccaagccguuugga

SEQ ID NO: 51680 - RNA, 32 nt, Homo Sapiens
ggucgggggcgguggcuccugucuauaaucgc

SEQ ID NO: 51681 - RNA, 32 nt, Homo Sapiens
auguagucaaggaagaaaaaguuuucuggaau

SEQ ID NO: 51682 - RNA, 32 nt, Homo Sapiens
auagacacaaaacccacauacuuugaaaaucu

SEQ ID NO: 51683 - RNA, 32 nt, Homo Sapiens
accugucucggggcuccagaagguggugcugg

SEQ ID NO: 51684 - RNA, 32 nt, Homo Sapiens
uagccugcgggcccauccuuugugcccacccg

SEQ ID NO: 51685 - RNA, 32 nt, Homo Sapiens
acugucugauuccuuuaaauaaagguuaagau

SEQ ID NO: 51686 - RNA, 32 nt, Homo Sapiens
uccagaaugcaguuagugaaacaaagaugaag

SEQ ID NO: 51687 - RNA, 32 nt, Homo Sapiens
aagcaacaaagagcgaguccccugcccggugg

SEQ ID NO: 51688 - RNA, 32 nt, Homo Sapiens
uuauuuuuuguauuauuuuuuauuuuucuggc

SEQ ID NO: 51689 - RNA, 32 nt, Homo Sapiens
uuccuuagauggucuguccuuuuugugauuuc

SEQ ID NO: 51690 - RNA, 32 nt, Homo Sapiens
uuuauguccuguacaucauucucugcuuggau

SEQ ID NO: 51691 - RNA, 32 nt, Homo Sapiens
gcaagcccagacauggccuucugccuggggag

SEQ ID NO: 51692 - RNA, 32 nt, Homo Sapiens
cgccgacuuccgaaggccgccguccgggcgag

SEQ ID NO: 51693 - RNA, 32 nt, Homo Sapiens
cuguuuucugcaaggagcugccagccaucuaa

SEQ ID NO: 51694 - RNA, 32 nt, Homo Sapiens
cuggagccgcuccggcagcucuuccugccacu

SEQ ID NO: 51695 - RNA, 32 nt, Homo Sapiens
guuugauucagaugggcacuuuucuuccccuu

SEQ ID NO: 51696 - RNA, 32 nt, Homo Sapiens
ggauuuggcaucucuuccccaagcuguuuaac

SEQ ID NO: 51697 - RNA, 32 nt, Homo Sapiens
cuuuucaugugccuuccauacaggccauucac

SEQ ID NO: 51698 - RNA, 32 nt, Homo Sapiens
ugaggauuuucacauuucaucaucucuaaaau

SEQ ID NO: 51699 - RNA, 30 nt, Homo Sapiens
gaacugcgugugcagcaccaguaaacuuga

SEQ ID NO: 51700 - RNA, 32 nt, Homo Sapiens
aucagucugcuggggagggacugggggugcuu

SEQ ID NO: 51701 - RNA, 32 nt, Homo Sapiens
aagccauggguuuucaugcggaggaaggagag

SEQ ID NO: 51702 - RNA, 32 nt, Homo Sapiens
gacuuggaacguggcuucggcagcgcccccuc

SEQ ID NO: 51703 - RNA, 32 nt, Homo Sapiens
ccaccugagcccgagccgcgggacaccgucgc

SEQ ID NO: 51704 - RNA, 32 nt, Homo Sapiens
augagguugcuuacuaagcuuugccagcugcu

SEQ ID NO: 51705 - RNA, 32 nt, Homo Sapiens
ggcgcccgcccggcgugccggagaggagaaag

SEQ ID NO: 51706 - RNA, 32 nt, Homo Sapiens
uguccugccuuuucuuuuuuuuuuuagaugga

SEQ ID NO: 51707 - RNA, 32 nt, Homo Sapiens
gagaauggugugaaccugggagguggagcuug

SEQ ID NO: 51708 - RNA, 32 nt, Homo Sapiens
uccuccuccugcgggagcguuguccguguugg

SEQ ID NO: 51709 - RNA, 31 nt, Homo Sapiens
ccuccuauagcguggauuguagaccaaagga

SEQ ID NO: 51710 - RNA, 32 nt, Homo Sapiens
ucucugcuuggcaaagagaugggagggggcca

SEQ ID NO: 51711 - RNA, 32 nt, Homo Sapiens
cucugccguuucugucccacuuaacugaccuc

SEQ ID NO: 51712 - RNA, 32 nt, Homo Sapiens
ccaagacccuauccaccuggaccuccauuuuu

SEQ ID NO: 51713 - RNA, 32 nt, Homo Sapiens
ucauuccaugugcccaguuaaucuugcuuucu

SEQ ID NO: 51714 - RNA, 32 nt, Homo Sapiens
cuuguaaguggaaauguaauuguguaccaguu

SEQ ID NO: 51715 - RNA, 32 nt, Homo Sapiens
aguugagagucuuuuaaguaccugagcucucg

SEQ ID NO: 51716 - RNA, 32 nt, Homo Sapiens
augcuuaaucugaagauuaaaguaaaaaguau

SEQ ID NO: 51717 - RNA, 32 nt, Homo Sapiens
gauuuuuaaaguuuuccuuuuaucuuuuauuu

SEQ ID NO: 51718 - RNA, 30 nt, Homo Sapiens
caguggucucuggguccgccggcguccguu

SEQ ID NO: 51719 - RNA, 32 nt, Homo Sapiens
uuuuuuuuucuuuuuucuuuuuuuuuaaagau

SEQ ID NO: 51720 - RNA, 32 nt, Homo Sapiens
ugaagcagaguucagggaacccugcccaaggu

SEQ ID NO: 51721 - RNA, 32 nt, Homo Sapiens
augaacucgcucuucaaauaccauaguucaag

SEQ ID NO: 51722 - RNA, 31 nt, Homo Sapiens
guuuuuuaaaaauuguaagaaauacugugua

SEQ ID NO: 51723 - RNA, 32 nt, Homo Sapiens
uggccguggcgcacgcggcugcugccgacccc

SEQ ID NO: 51724 - RNA, 32 nt, Homo Sapiens
cuguacuuuauacaauucuggaugcuaaaacu

SEQ ID NO: 51725 - RNA, 32 nt, Homo Sapiens
gcuucuugcuucccgucccccagccccaugcu

SEQ ID NO: 51726 - RNA, 32 nt, Homo Sapiens
agugaggcgcaucaccccacugugacucaccu

SEQ ID NO: 51727 - RNA, 32 nt, Homo Sapiens
gaucaaaagggcccucaaagcucauuuuaucu

SEQ ID NO: 51728 - RNA, 32 nt, Homo Sapiens
acugucagcccacagcagcaauaugcuuauuc

SEQ ID NO: 51729 - RNA, 32 nt, Homo Sapiens
ccuccuugucuuccaccaugauugugaggcuc

SEQ ID NO: 51730 - RNA, 32 nt, Homo Sapiens
acuugaaaacaaugauuuuaauauaucucuuu

SEQ ID NO: 51731 - RNA, 32 nt, Homo Sapiens
aacucuacagaaaauuagacagguaugguggc

SEQ ID NO: 51732 - RNA, 32 nt, Homo Sapiens
uauauacuacuuugagaaguaaacaugucaaa

SEQ ID NO: 51733 - RNA, 32 nt, Homo Sapiens
cucuggguggaagagggaagagauccuaaugg

SEQ ID NO: 51734 - RNA, 32 nt, Homo Sapiens
uaagagaaucuuccucauccugcuguuguugg

SEQ ID NO: 51735 - RNA, 32 nt, Homo Sapiens
cccauccuguggaacacaugcuguccagggga

SEQ ID NO: 51736 - RNA, 32 nt, Homo Sapiens
aucaaaauuugccugccucuuuaugagggagg

SEQ ID NO: 51737 - RNA, 32 nt, Homo Sapiens
agcagacaggugugcagauuuuggccaugaaa

SEQ ID NO: 51738 - RNA, 32 nt, Homo Sapiens
aaaaauuaaauguuaauacuaucaccauuaaa

SEQ ID NO: 51739 - RNA, 32 nt, Homo Sapiens
ugauggugcagggagaauuguugagaaaggaa

SEQ ID NO: 51740 - RNA, 32 nt, Homo Sapiens
uauuuuuagacuauuucuuuuuauaggggcuu

SEQ ID NO: 51741 - RNA, 32 nt, Homo Sapiens
aaauaauuuccauaguuucuucuacaccuuua

SEQ ID NO: 51742 - RNA, 32 nt, Homo Sapiens
gcgcacccaucccaccuucccgcacccuggga

SEQ ID NO: 51743 - RNA, 32 nt, Homo Sapiens
ggaugcagacuccagcagccuggucucccagu

SEQ ID NO: 51744 - RNA, 32 nt, Homo Sapiens
ggagcucuguuuuuauucauauuuuuucuaca

SEQ ID NO: 51745 - RNA, 32 nt, Homo Sapiens
ugacgccgacggcuucaagaucagcacauugc

SEQ ID NO: 51746 - RNA, 32 nt, Homo Sapiens
gcuugugauucauuuucuuaauccaaauauau

SEQ ID NO: 51747 - RNA, 30 nt, Homo Sapiens
aacuuuguguuaauggggggcacuuuaaau

SEQ ID NO: 51748 - RNA, 32 nt, Homo Sapiens
uggaagauggaaagccacaggaaggaagcggc

SEQ ID NO: 51749 - RNA, 32 nt, Homo Sapiens
auguguuaucacccagaagaaaauaguggugu

SEQ ID NO: 51750 - RNA, 31 nt, Homo Sapiens
cuguucuucaaugauccagccugacucuacc

SEQ ID NO: 51751 - RNA, 32 nt, Homo Sapiens
gguucucuauuauguuuugauacauuauuuua

SEQ ID NO: 51752 - RNA, 32 nt, Homo Sapiens
ggauggucuggaucucuugaccucaggugauc

SEQ ID NO: 51753 - RNA, 32 nt, Homo Sapiens
ccaguuuuguggaacacaguuuuuccauggac

SEQ ID NO: 51754 - RNA, 32 nt, Homo Sapiens
uuuuacauauuagugguuaugauccaaugugu

SEQ ID NO: 51755 - RNA, 32 nt, Homo Sapiens
aaggcggaagcaguggcguccgcagcuggggc

SEQ ID NO: 51756 - RNA, 32 nt, Homo Sapiens
cagagagguuguggagauggaucuggcaauuu

SEQ ID NO: 51757 - RNA, 32 nt, Homo Sapiens
cacagcaccucuugaggcaucccuuggcuauu

SEQ ID NO: 51758 - RNA, 32 nt, Homo Sapiens
accacacacacacacacacacacacacacaga

SEQ ID NO: 51759 - RNA, 32 nt, Homo Sapiens
gaggacgcgggccugguggccaaggccgaggc

SEQ ID NO: 51760 - RNA, 32 nt, Homo Sapiens
accuuugugucuagcucagggauuguaaacgc

SEQ ID NO: 51761 - RNA, 32 nt, Homo Sapiens
gcucucuaagcacuuuaccuggauggcgcgug

SEQ ID NO: 51762 - RNA, 32 nt, Homo Sapiens
gagaaacugguguucugcccggcucugcuugg

SEQ ID NO: 51763 - RNA, 32 nt, Homo Sapiens
gaggcgcggaggcuccccgggcggcugcaucc

SEQ ID NO: 51764 - RNA, 32 nt, Homo Sapiens
guggcugaagcagucaguguagcagcguagca

SEQ ID NO: 51765 - RNA, 32 nt, Homo Sapiens
guucucagagcgggucuccggcggcggcgacg

SEQ ID NO: 51766 - RNA, 32 nt, Homo Sapiens
acugaaacgcgagguggcuaccaacagcgaac

SEQ ID NO: 51767 - RNA, 32 nt, Homo Sapiens
cagggggccaggccagcagcucgggggccaca

SEQ ID NO: 51768 - RNA, 32 nt, Homo Sapiens
cacaucaacgggaaagagaaagagacauucac

SEQ ID NO: 51769 - RNA, 31 nt, Homo Sapiens
uaccuguguaacaaaccugcauguucugcac

SEQ ID NO: 51770 - RNA, 32 nt, Homo Sapiens
uucuauucaucauuuuaaccgcauuucaucga

SEQ ID NO: 51771 - RNA, 32 nt, Homo Sapiens
aaaaauaguuuauuguaucugacaagaaacuu

SEQ ID NO: 51772 - RNA, 32 nt, Homo Sapiens
guucgacacuguauaacagauauaucugacag

SEQ ID NO: 51773 - RNA, 30 nt, Homo Sapiens
ucagcucuggacugccucugcaaggucaga

SEQ ID NO: 51774 - RNA, 32 nt, Homo Sapiens
ggguggcggcagggcgucccagggugcggcac

SEQ ID NO: 51775 - RNA, 32 nt, Homo Sapiens
gguggaggggagagaagaagaugcugaugaua

SEQ ID NO: 51776 - RNA, 30 nt, Homo Sapiens
gggguugcagagaugggggagacucaaguc

SEQ ID NO: 51777 - RNA, 32 nt, Homo Sapiens
ccgccggaccgcguagagagccgggccccgga

SEQ ID NO: 51778 - RNA, 32 nt, Homo Sapiens
gcuacgugcagggcuucugccguggcuuccag

SEQ ID NO: 51779 - RNA, 32 nt, Homo Sapiens
ugugauuccgaaucuccuuucaguccucgaga

SEQ ID NO: 51780 - RNA, 32 nt, Homo Sapiens
caguccuggccaaggagcugguggaggugagg

SEQ ID NO: 51781 - RNA, 32 nt, Homo Sapiens
ccugcgcucccucacuucccucaguucccaaa

SEQ ID NO: 51782 - RNA, 32 nt, Homo Sapiens
ucauggucacagauuguauuuauuuuuucaga

SEQ ID NO: 51783 - RNA, 31 nt, Homo Sapiens
cccgggcacgggguccccuccacucccaucu

SEQ ID NO: 51784 - RNA, 32 nt, Homo Sapiens
gcaggucauuuugggggagggaggaagaucug

SEQ ID NO: 51785 - RNA, 32 nt, Homo Sapiens
aaguggaggcuccagccuccccgcgagggucc

SEQ ID NO: 51786 - RNA, 32 nt, Homo Sapiens
gccauccccccuccugguuggucacagaauga

SEQ ID NO: 51787 - RNA, 32 nt, Homo Sapiens
ccgucuauccacccgcccacccgcccccaccc

SEQ ID NO: 51788 - RNA, 28 nt, Homo Sapiens
uugaugauaaccucaauaauagcaaagu

SEQ ID NO: 51789 - RNA, 32 nt, Homo Sapiens
acacagcacggccuuggucuccaggcuggccc

SEQ ID NO: 51790 - RNA, 32 nt, Homo Sapiens
agauuccggcauugccuccaccccgcuguggc

SEQ ID NO: 51791 - RNA, 32 nt, Homo Sapiens
auaaugcaugaauauaaaucuauauuauuugc

SEQ ID NO: 51792 - RNA, 32 nt, Homo Sapiens
uccaaauggcugcugucuuccucuaguacuua

SEQ ID NO: 51793 - RNA, 32 nt, Homo Sapiens
cugcuguuucucagcaaagccuugcucucugg

SEQ ID NO: 51794 - RNA, 32 nt, Homo Sapiens
uauacaauacuagugaugucuaccaguccugc

SEQ ID NO: 51795 - RNA, 32 nt, Homo Sapiens
aagcucggcggcgucccggggccggagggccg

SEQ ID NO: 51796 - RNA, 32 nt, Homo Sapiens
gccagggcucuaucucggggggcugaggagca

SEQ ID NO: 51797 - RNA, 32 nt, Homo Sapiens
ggaacugcagagccagaagagcacggagcagc

SEQ ID NO: 51798 - RNA, 32 nt, Homo Sapiens
uuagacuguuagucaucugugcuuucuuuacc

SEQ ID NO: 51799 - RNA, 32 nt, Homo Sapiens
uacugggaagaaagcagcuguucuguaucagu

SEQ ID NO: 51800 - RNA, 32 nt, Homo Sapiens
ucuccaggccccagaagcccuucuugcccaaa

SEQ ID NO: 51801 - RNA, 30 nt, Homo Sapiens
gaauuggcuaaaagacaugcauuuuuaaaa

SEQ ID NO: 51802 - RNA, 32 nt, Homo Sapiens
cacgagcugaauugcgcgugguggccauggcg

SEQ ID NO: 51803 - RNA, 32 nt, Homo Sapiens
uguggucuguuugucuuuucuaccucuuucuc

SEQ ID NO: 51804 - RNA, 32 nt, Homo Sapiens
augaagagaaagugaaguuugaaaacuuuuca

SEQ ID NO: 51805 - RNA, 32 nt, Homo Sapiens
gugcccggccccacacugccucuguggccugg

SEQ ID NO: 51806 - RNA, 32 nt, Homo Sapiens
gcuagacauagugccaccuggauucacuguug

SEQ ID NO: 51807 - RNA, 32 nt, Homo Sapiens
acaagcagccuggcccggggcuggauccugcu

SEQ ID NO: 51808 - RNA, 32 nt, Homo Sapiens
uugucauagauggcucuuauuauuuucaggua

SEQ ID NO: 51809 - RNA, 32 nt, Homo Sapiens
agcgcuagcccugguugcgggcgaagggucac

SEQ ID NO: 51810 - RNA, 32 nt, Homo Sapiens
agcgaugacuggaugucucuguacuguaugua

SEQ ID NO: 51811 - RNA, 32 nt, Homo Sapiens
gccaucuuuaguuuucuuauggagguuuauac

SEQ ID NO: 51812 - RNA, 32 nt, Homo Sapiens
aggcggggaagagggguuggcucugguccccg

SEQ ID NO: 51813 - RNA, 32 nt, Homo Sapiens
agggugagggcggccccagaaccccagguagg

SEQ ID NO: 51814 - RNA, 27 nt, Homo Sapiens
ucauggagaaaguccaauaccucacuc

SEQ ID NO: 51815 - RNA, 32 nt, Homo Sapiens
uggggggccggggccuggggguugccauggcc

SEQ ID NO: 51816 - RNA, 32 nt, Homo Sapiens
uuugaaauagggggaaauacaugugaauauuu

SEQ ID NO: 51817 - RNA, 32 nt, Homo Sapiens
auauuuguuucaucuaguuuaugaguccaaau

SEQ ID NO: 51818 - RNA, 32 nt, Homo Sapiens
cugccccagagggagggcaggggcaucggaac

SEQ ID NO: 51819 - RNA, 32 nt, Homo Sapiens
agcccagaccucuaagaagaagcagggcucca

SEQ ID NO: 51820 - RNA, 32 nt, Homo Sapiens
cuucccugugggucucugcggcacucuucugc

SEQ ID NO: 51821 - RNA, 32 nt, Homo Sapiens
ugcuuuauguugcuuaugauaauuauuuugca

SEQ ID NO: 51822 - RNA, 32 nt, Homo Sapiens
gggagggaccuggugggaaauaauugagucau

SEQ ID NO: 51823 - RNA, 32 nt, Homo Sapiens
uuuacauuaauuagcauuuagcagaugaccau

SEQ ID NO: 51824 - RNA, 32 nt, Homo Sapiens
aaauauguuauauacuuccauuuuauaacuuu

SEQ ID NO: 51825 - RNA, 32 nt, Homo Sapiens
uguggaaaaaauauuuuaaacuacugauugaa

SEQ ID NO: 51826 - RNA, 32 nt, Homo Sapiens
guuuaguguuauuuuuaccaguguuaauuuau

SEQ ID NO: 51827 - RNA, 32 nt, Homo Sapiens
uguucuuucccggguuuucccagccgaguuga

SEQ ID NO: 51828 - RNA, 32 nt, Homo Sapiens
aggaaaugcaagaguaggauacuccaauucca

SEQ ID NO: 51829 - RNA, 32 nt, Homo Sapiens
ggcaccaucuucucaagggcuuccaugucagc

SEQ ID NO: 51830 - RNA, 32 nt, Homo Sapiens
cugagugaggaagcagagugccaggcagcaca

SEQ ID NO: 51831 - RNA, 32 nt, Homo Sapiens
aaagggaacaaaugucuaguuuuauuuguaua

SEQ ID NO: 51832 - RNA, 32 nt, Homo Sapiens
ccccauucgaacuuaacagaugccuccucucc

SEQ ID NO: 51833 - RNA, 32 nt, Homo Sapiens
ccagagccagugcgcuggacggugcucaccgc

SEQ ID NO: 51834 - RNA, 28 nt, Homo Sapiens
gggcccuuggcuaccaggaggcuaagaa

SEQ ID NO: 51835 - RNA, 32 nt, Homo Sapiens
gagugccuugguuuuuguuaauuuugccucua

SEQ ID NO: 51836 - RNA, 32 nt, Homo Sapiens
ggagaugagcaaagcugcuugcacuucaguca

SEQ ID NO: 51837 - RNA, 32 nt, Homo Sapiens
cagaggcugaggguuggggggaggaagccauc

SEQ ID NO: 51838 - RNA, 32 nt, Homo Sapiens
gugacugugggaagauggaggaguaugagaag

SEQ ID NO: 51839 - RNA, 32 nt, Homo Sapiens
accucuucaaccaggagccgagauuucuguug

SEQ ID NO: 51840 - RNA, 32 nt, Homo Sapiens
acugagcaaacacucuuuuggcaacuuaguag

SEQ ID NO: 51841 - RNA, 32 nt, Homo Sapiens
augaucaagucuuuuuagucaacugucauuug

SEQ ID NO: 51842 - RNA, 32 nt, Homo Sapiens
gaccccugccuggccguggcuagcauggcccc

SEQ ID NO: 51843 - RNA, 32 nt, Homo Sapiens
ucccuuagacauuuuaugucuugcuuguaggg

SEQ ID NO: 51844 - RNA, 32 nt, Homo Sapiens
cccccgcccagccccaggucuccccaggcccu

SEQ ID NO: 51845 - RNA, 32 nt, Homo Sapiens
uagcuucccgcacuggucccagaccugccucc

SEQ ID NO: 51846 - RNA, 32 nt, Homo Sapiens
aggccuugcugacucucugagcuggggaggug

SEQ ID NO: 51847 - RNA, 32 nt, Homo Sapiens
uuagccccgcggcggccgugugggccggaggc

SEQ ID NO: 51848 - RNA, 31 nt, Homo Sapiens
ugaggggagccccaggaaggcagcauucaua

SEQ ID NO: 51849 - RNA, 32 nt, Homo Sapiens
ggguuuugggucuuugaacccuugcuugcaau

SEQ ID NO: 51850 - RNA, 32 nt, Homo Sapiens
ggcuggccgcggugacucaugccuauaauccc

SEQ ID NO: 51851 - RNA, 32 nt, Homo Sapiens
cggccccgacucugacccgcgccggggguggg

SEQ ID NO: 51852 - RNA, 32 nt, Homo Sapiens
acacgaugggaagaggugggagcagauucugc

SEQ ID NO: 51853 - RNA, 32 nt, Homo Sapiens
uugcagaauggaaucuaauuuuaaucaagagg

SEQ ID NO: 51854 - RNA, 32 nt, Homo Sapiens
ccaggaucaccucggcggucacacuccagcca

SEQ ID NO: 51855 - RNA, 32 nt, Homo Sapiens
ucuagaagacugucagcuuccaaacauuaaug

SEQ ID NO: 51856 - RNA, 32 nt, Homo Sapiens
cgucccuggccacgaggcgccccggaccugac

SEQ ID NO: 51857 - RNA, 32 nt, Homo Sapiens
auuguacacaaacaaacaaaaagguggaagcu

SEQ ID NO: 51858 - RNA, 32 nt, Homo Sapiens
acagagucaaggaagcaguggcaauucuagau

SEQ ID NO: 51859 - RNA, 32 nt, Homo Sapiens
uuggcagcacaccgggaggggaugcuuggaca

SEQ ID NO: 51860 - RNA, 32 nt, Homo Sapiens
cgcccgacgcgcgccacccgcggccccagcuu

SEQ ID NO: 51861 - RNA, 32 nt, Homo Sapiens
guaagagaaaaaauauaaagagaauauaaacu

SEQ ID NO: 51862 - RNA, 32 nt, Homo Sapiens
ucagcccgccuggcucuggggccugucauugg

SEQ ID NO: 51863 - RNA, 32 nt, Homo Sapiens
cugcgucuccccagccccccucggcguccucu

SEQ ID NO: 51864 - RNA, 32 nt, Homo Sapiens
agagcacugagaggcgcagcucugucucacug

SEQ ID NO: 51865 - RNA, 32 nt, Homo Sapiens
uucaauacagauacuucuuuuagaaguaaauu

SEQ ID NO: 51866 - RNA, 32 nt, Homo Sapiens
agcccggcugccugauaagauaggcugagcuc

SEQ ID NO: 51867 - RNA, 32 nt, Homo Sapiens
cuuuugcagaagaucugaaaucauuagaccug

SEQ ID NO: 51868 - RNA, 32 nt, Homo Sapiens
cauaucaaagauugccuuggaaauggcaaaua

SEQ ID NO: 51869 - RNA, 32 nt, Homo Sapiens
acucgacauuuuaaugccugagaguuggugaa

SEQ ID NO: 51870 - RNA, 32 nt, Homo Sapiens
guucccaauguguuuucgucuacauuuucuua

SEQ ID NO: 51871 - RNA, 32 nt, Homo Sapiens
acaguucucccuuaaccuuguccuuucucucc

SEQ ID NO: 51872 - RNA, 32 nt, Homo Sapiens
uguauuuucuuacacugugucauucuguuaga

SEQ ID NO: 51873 - RNA, 32 nt, Homo Sapiens
ccgucacuuggguuaaaaccaccggaaauucc

SEQ ID NO: 51874 - RNA, 32 nt, Homo Sapiens
cugccugacgccagcccugccucugggcccug

SEQ ID NO: 51875 - RNA, 32 nt, Homo Sapiens
uuccugcccuucccucugggcacgccugcugg

SEQ ID NO: 51876 - RNA, 32 nt, Homo Sapiens
guucccagugcagcuguaggucgucaucaccu

SEQ ID NO: 51877 - RNA, 32 nt, Homo Sapiens
aaucuucauuaaugcagauaaaacaaguuuac

SEQ ID NO: 51878 - RNA, 32 nt, Homo Sapiens
uuauugcuguugcuugaauagcaauagcaugg

SEQ ID NO: 51879 - RNA, 32 nt, Homo Sapiens
cuugaggcauuuggaugguaagaaaauguuau

SEQ ID NO: 51880 - RNA, 32 nt, Homo Sapiens
uaauuaucuucagauuucucuguauuuauuau

SEQ ID NO: 51881 - RNA, 32 nt, Homo Sapiens
ccucuucuuugccgcggacucccuuuccugcc

SEQ ID NO: 51882 - RNA, 32 nt, Homo Sapiens
ugcaggccgggcgcccaggcguguggacccga

SEQ ID NO: 51883 - RNA, 32 nt, Homo Sapiens
ggcaugaauacauguuuauauacuaaaguaug

SEQ ID NO: 51884 - RNA, 32 nt, Homo Sapiens
ggacucguucugaacugaaagcuucuaguugg

SEQ ID NO: 51885 - RNA, 32 nt, Homo Sapiens
guguggggccccuggagugugcucuccuccag

SEQ ID NO: 51886 - RNA, 32 nt, Homo Sapiens
agaagccagcccccaaccccagcccuuccgua

SEQ ID NO: 51887 - RNA, 32 nt, Homo Sapiens
gacacuugagaaauguuucuguuugaagaaaa

SEQ ID NO: 51888 - RNA, 32 nt, Homo Sapiens
agcaucuuggcuucaacaaacaggccccuucu

SEQ ID NO: 51889 - RNA, 32 nt, Homo Sapiens
agacuagacugaccccacccuuccuucaguga

SEQ ID NO: 51890 - RNA, 32 nt, Homo Sapiens
agugaucccacuuuuuuucaauaacuuuuuag

SEQ ID NO: 51891 - RNA, 32 nt, Homo Sapiens
ggagcccugggucuuucccaccugccuguuuu

SEQ ID NO: 51892 - RNA, 32 nt, Homo Sapiens
uggaugcccgucucugucccaggcgggauggg

SEQ ID NO: 51893 - RNA, 28 nt, Homo Sapiens
cacaugcaggccaaaaaacgcuauuuca

SEQ ID NO: 51894 - RNA, 32 nt, Homo Sapiens
agagagacagacagagacaugaagauagacaa

SEQ ID NO: 51895 - RNA, 32 nt, Homo Sapiens
gacucaguccuuagauguaguuucacccaaga

SEQ ID NO: 51896 - RNA, 32 nt, Homo Sapiens
uuuaggaauauaagguuaagauaucauauggg

SEQ ID NO: 51897 - RNA, 32 nt, Homo Sapiens
accuuucucccucucuggagccaucuggaagg

SEQ ID NO: 51898 - RNA, 32 nt, Homo Sapiens
guuuggugccugaggagcugccaccaucccgc

SEQ ID NO: 51899 - RNA, 32 nt, Homo Sapiens
aggagauuuaccacuuuuuuuuuuuguuuuuc

SEQ ID NO: 51900 - RNA, 32 nt, Homo Sapiens
gucaggcagcagcuggaguaguuacauuguca

SEQ ID NO: 51901 - RNA, 32 nt, Homo Sapiens
uagcaauuucuccuucccaccaucauggggaa

SEQ ID NO: 51902 - RNA, 32 nt, Homo Sapiens
uuugaguucugaaauauuuucaccuuaaaaaa

SEQ ID NO: 51903 - RNA, 32 nt, Homo Sapiens
aagcagaggauagcuuccuguaggggcuggcc

SEQ ID NO: 51904 - RNA, 32 nt, Homo Sapiens
accgcgccgcucccgccuccucguccugugcu

SEQ ID NO: 51905 - RNA, 32 nt, Homo Sapiens
ccauuaaaacgaauauugggaggucaugaaag

SEQ ID NO: 51906 - RNA, 32 nt, Homo Sapiens
aaccuauuuauuauuuucuuuugcauauccau

SEQ ID NO: 51907 - RNA, 32 nt, Homo Sapiens
uccuucccacccaagcuuccggcagccuggcu

SEQ ID NO: 51908 - RNA, 32 nt, Homo Sapiens
ggucauagucguugagucccacagucauauau

SEQ ID NO: 51909 - RNA, 32 nt, Homo Sapiens
gcugggucuccauggugggggucucucaccuu

SEQ ID NO: 51910 - RNA, 31 nt, Homo Sapiens
agccuggaagcauucaggagagccugccauu

SEQ ID NO: 51911 - RNA, 32 nt, Homo Sapiens
ucucacguugcuuuguuuuuuacaauaauaaa

SEQ ID NO: 51912 - RNA, 32 nt, Homo Sapiens
aauucauagaccuaagaaaauaaaauacaaaa

SEQ ID NO: 51913 - RNA, 32 nt, Homo Sapiens
cccuucuuccuuuuccagaauuuuccaaauag

SEQ ID NO: 51914 - RNA, 32 nt, Homo Sapiens
aagguucaguuugcggcggaaacuaccugcua

SEQ ID NO: 51915 - RNA, 32 nt, Homo Sapiens
uuauauuuauuacagauauuaaguaugcaauu

SEQ ID NO: 51916 - RNA, 32 nt, Homo Sapiens
guuuguuugccagcuuggaguccuauuaaaug

SEQ ID NO: 51917 - RNA, 32 nt, Homo Sapiens
gacucacauacaguagaucacuuuuuacucug

SEQ ID NO: 51918 - RNA, 32 nt, Homo Sapiens
uuuuucauauauuuuuaccaucugcugaaggc

SEQ ID NO: 51919 - RNA, 32 nt, Homo Sapiens
aacccggcucugccgcuuccuagccgcgugau

SEQ ID NO: 51920 - RNA, 32 nt, Homo Sapiens
aaccuugcggcccaguggcccgggccaguuca

SEQ ID NO: 51921 - RNA, 32 nt, Homo Sapiens
ucuguaaagauaaguggugauguuguuucaaa

SEQ ID NO: 51922 - RNA, 32 nt, Homo Sapiens
ugucagcaggacuuaugguucugggucucaga

SEQ ID NO: 51923 - RNA, 32 nt, Homo Sapiens
accucgacugguuuuucuaaguuauuuuguac

SEQ ID NO: 51924 - RNA, 32 nt, Homo Sapiens
agcuccaacuuauauaaaauagacuuacugca

SEQ ID NO: 51925 - RNA, 32 nt, Homo Sapiens
gcuggcucugaagccaagccucuucuuacuuc

SEQ ID NO: 51926 - RNA, 32 nt, Homo Sapiens
cccagcaacuccaacuaacaagaaacucaccc

SEQ ID NO: 51927 - RNA, 32 nt, Homo Sapiens
ugagagaggacucgaaaagaaaaggagaaaua

SEQ ID NO: 51928 - RNA, 32 nt, Homo Sapiens
agccauccucgucugcucuccucucucuucca

SEQ ID NO: 51929 - RNA, 32 nt, Homo Sapiens
gaaaggcaggucugggguguggucguguuuuc

SEQ ID NO: 51930 - RNA, 32 nt, Homo Sapiens
uaaauuuucuucaguugguguguuuuugggau

SEQ ID NO: 51931 - RNA, 32 nt, Homo Sapiens
ucaggagagaaaacugccugaccuuugggacu

SEQ ID NO: 51932 - RNA, 32 nt, Homo Sapiens
cucacuacuacuuuuucuucccuuuuauucac

SEQ ID NO: 51933 - RNA, 32 nt, Homo Sapiens
ugcuucaucccugucugagaaugcuagcccau

SEQ ID NO: 51934 - RNA, 31 nt, Homo Sapiens
ugagugcaaggccccaugcaggguaggaaac

SEQ ID NO: 51935 - RNA, 32 nt, Homo Sapiens
acugugcugccugagcccguggcaccgugggg

SEQ ID NO: 51936 - RNA, 32 nt, Homo Sapiens
uucucuccacccaaaauaucacagcugcuuuc

SEQ ID NO: 51937 - RNA, 32 nt, Homo Sapiens
gggagaacagaaaaauacccagggguuaagac

SEQ ID NO: 51938 - RNA, 32 nt, Homo Sapiens
ccaucuccuccagcgaggcucuggccagcacu

SEQ ID NO: 51939 - RNA, 32 nt, Homo Sapiens
ccagucccuguuuacauuccaaaccugagucc

SEQ ID NO: 51940 - RNA, 32 nt, Homo Sapiens
ucccguugccuuauucccccagcccacaaagg

SEQ ID NO: 51941 - RNA, 32 nt, Homo Sapiens
uaagagcccuacagcagugaaaagcauugaag

SEQ ID NO: 51942 - RNA, 32 nt, Homo Sapiens
uacuuuuacuucugcccuuucuauccaucguc

SEQ ID NO: 51943 - RNA, 32 nt, Homo Sapiens
ugggucccagacauugaagaaaagcauuuuua

SEQ ID NO: 51944 - RNA, 32 nt, Homo Sapiens
agaggcggcgggugccgcgccgugccgccugg

SEQ ID NO: 51945 - RNA, 32 nt, Homo Sapiens
auuauguauuauaauguaaucuguaaauagug

SEQ ID NO: 51946 - RNA, 32 nt, Homo Sapiens
aaaauaaaaaucagcuguuguaaucgccuagc

SEQ ID NO: 51947 - RNA, 32 nt, Homo Sapiens
cuaggcgagccgaggcgggcgaagggcucugg

SEQ ID NO: 51948 - RNA, 32 nt, Homo Sapiens
agcacuuugggaggcugagggaggcggaucac

SEQ ID NO: 51949 - RNA, 32 nt, Homo Sapiens
ccacuuugccccagccgcuuugacccaacuug

SEQ ID NO: 51950 - RNA, 32 nt, Homo Sapiens
auauagcaauucauaagcuaauuuagguuuuu

SEQ ID NO: 51951 - RNA, 32 nt, Homo Sapiens
cuguugcuucuaccauaugaucuuuagggaac

SEQ ID NO: 51952 - RNA, 32 nt, Homo Sapiens
uucuacuggugccaccccgccuccgacccgcc

SEQ ID NO: 51953 - RNA, 32 nt, Homo Sapiens
uaaaguauuauaacuuuuuuuacuucugaaaa

SEQ ID NO: 51954 - RNA, 32 nt, Homo Sapiens
cuaguuuacaauuugcaggcugaucuuaagau

SEQ ID NO: 51955 - RNA, 32 nt, Homo Sapiens
aaaaagaagaagaaaaguuccaagaaacacaa

SEQ ID NO: 51956 - RNA, 32 nt, Homo Sapiens
caguccaguuuaaugucaguuuaauaaguggu

SEQ ID NO: 51957 - RNA, 32 nt, Homo Sapiens
gcacagucucaggcacauguucccuccugcuc

SEQ ID NO: 51958 - RNA, 32 nt, Homo Sapiens
gaauagguguugcguaucaaauacagaugaag

SEQ ID NO: 51959 - RNA, 32 nt, Homo Sapiens
agucgccaacuggcagcaggcgacguguagca

SEQ ID NO: 51960 - RNA, 32 nt, Homo Sapiens
ucgagacucccgggcgccgaggcgcugccgcc

SEQ ID NO: 51961 - RNA, 32 nt, Homo Sapiens
uggggccugcucaccuugcccacacaucucca

SEQ ID NO: 51962 - RNA, 32 nt, Homo Sapiens
ugcacaaccugccucuucgcugagauggagac

SEQ ID NO: 51963 - RNA, 32 nt, Homo Sapiens
caaaguuuaccagaaagcaguugagacaagaa

SEQ ID NO: 51964 - RNA, 32 nt, Homo Sapiens
guuuugguaauuauuucauauauuguuguuua

SEQ ID NO: 51965 - RNA, 32 nt, Homo Sapiens
agguggcgugacugcuccgggucucacgcuua

SEQ ID NO: 51966 - RNA, 32 nt, Homo Sapiens
gaacuccgggugccgguugagguugcuggugg

SEQ ID NO: 51967 - RNA, 32 nt, Homo Sapiens
aaccuuucaagcggccagaaccccugcgaauc

SEQ ID NO: 51968 - RNA, 32 nt, Homo Sapiens
uucaagauucuacuuucaauucuuauagggua

SEQ ID NO: 51969 - RNA, 32 nt, Homo Sapiens
cccagggaugugucagcccccagccacgggga

SEQ ID NO: 51970 - RNA, 32 nt, Homo Sapiens
ugcugccauucagauagcacagacaagacaga

SEQ ID NO: 51971 - RNA, 32 nt, Homo Sapiens
cggucacggggaccggguuugcgcggcuccga

SEQ ID NO: 51972 - RNA, 32 nt, Homo Sapiens
ugcacggccgggcuugugguucucuagcgcgg

SEQ ID NO: 51973 - RNA, 32 nt, Homo Sapiens
gaucuccuccuccuucaugcagccaggauugc

SEQ ID NO: 51974 - RNA, 32 nt, Homo Sapiens
aaccuaaagaaugaguuacugaagaugauuac

SEQ ID NO: 51975 - RNA, 32 nt, Homo Sapiens
gaguguccugcgcgccagcucugcguuuaaga

SEQ ID NO: 51976 - RNA, 32 nt, Homo Sapiens
uaugcuguacuauuuaauuauccuuccagcgu

SEQ ID NO: 51977 - RNA, 32 nt, Homo Sapiens
ugcaccugcgccgggcggccauggacuuguac

SEQ ID NO: 51978 - RNA, 32 nt, Homo Sapiens
ccuucuccuccagcacugugccaggcacccug

SEQ ID NO: 51979 - RNA, 32 nt, Homo Sapiens
uguuugcuuauaaauuuuuuaccacucccaca

SEQ ID NO: 51980 - RNA, 32 nt, Homo Sapiens
uagaagcaaaaauuauccuuaagaaaaacaac

SEQ ID NO: 51981 - RNA, 32 nt, Homo Sapiens
gcuggcggaggagggagggcgagggcgggcgc

SEQ ID NO: 51982 - RNA, 32 nt, Homo Sapiens
gacauuaaauaguuuuacaacauauuuuuaau

SEQ ID NO: 51983 - RNA, 32 nt, Homo Sapiens
gagaagccgcgugagauccgcgcgggugcuag

SEQ ID NO: 51984 - RNA, 32 nt, Homo Sapiens
cauguauguccuucuuuuuaucuacuuuucuc

SEQ ID NO: 51985 - RNA, 32 nt, Homo Sapiens
aacuauuucccuccucccccaauccauauguu

SEQ ID NO: 51986 - RNA, 32 nt, Homo Sapiens
gaaacacuaugaauguaagcagugugggaaag

SEQ ID NO: 51987 - RNA, 32 nt, Homo Sapiens
gugcgugugccgcgggcgcccggggcaggcag

SEQ ID NO: 51988 - RNA, 29 nt, Homo Sapiens
aaacauggaaaacauguuccuucagucgu

SEQ ID NO: 51989 - RNA, 29 nt, Homo Sapiens
uccgguccgguccggccacggaggcagcg

SEQ ID NO: 51990 - RNA, 32 nt, Homo Sapiens
auaaaggaauucgggccccuacgugagaagcu

SEQ ID NO: 51991 - RNA, 32 nt, Homo Sapiens
uccaggauaucauuugggugaaacuugggaac

SEQ ID NO: 51992 - RNA, 32 nt, Homo Sapiens
cagguguccaagcagcgagagcuccagcaucc

SEQ ID NO: 51993 - RNA, 32 nt, Homo Sapiens
gaacucugugccgggaggggcccccaccccuc

SEQ ID NO: 51994 - RNA, 28 nt, Homo Sapiens
uaacaugaaaauaaacauuuaaacauuc

SEQ ID NO: 51995 - RNA, 32 nt, Homo Sapiens
cagcuccaucucaggacacuuccuagaauacg

SEQ ID NO: 51996 - RNA, 32 nt, Homo Sapiens
uguuuuuacauuuacugaauaagauuugagua

SEQ ID NO: 51997 - RNA, 32 nt, Homo Sapiens
cuuaaaacccucauuucauauaaauggccuua

SEQ ID NO: 51998 - RNA, 32 nt, Homo Sapiens
cgcucacuccgcccggccccagcccuagcgcu

SEQ ID NO: 51999 - RNA, 32 nt, Homo Sapiens
acuaagugguugggagcggggaggucgcggcg

SEQ ID NO: 52000 - RNA, 32 nt, Homo Sapiens
gccaguuacauaagauuuuaaaaaauguauug

SEQ ID NO: 52001 - RNA, 32 nt, Homo Sapiens
aaagagaagagaagacaagucuguggcccaga

SEQ ID NO: 52002 - RNA, 32 nt, Homo Sapiens
cugugaucugcggcggcacagccugcucacac

SEQ ID NO: 52003 - RNA, 32 nt, Homo Sapiens
auuaguuuugauuuaauguuuucagcccaucu

SEQ ID NO: 52004 - RNA, 32 nt, Homo Sapiens
cauugcacuccagccugggugacaagggaaga

SEQ ID NO: 52005 - RNA, 27 nt, Homo Sapiens
gcuguacuuuucuucaguccuccucuc

SEQ ID NO: 52006 - RNA, 32 nt, Homo Sapiens
cuaaaaaugaaagucauggauacuguuacaca

SEQ ID NO: 52007 - RNA, 32 nt, Homo Sapiens
cugugccccacuucugaaagucuccauaaacc

SEQ ID NO: 52008 - RNA, 32 nt, Homo Sapiens
ucuuauuuuuaaagguguucugcuuaucuguc

SEQ ID NO: 52009 - RNA, 32 nt, Homo Sapiens
ugaaacuuuuuuccuaaguaacuguaauagga

SEQ ID NO: 52010 - RNA, 32 nt, Homo Sapiens
agcaugucuuggaaccugucuugaguggggac

SEQ ID NO: 52011 - RNA, 32 nt, Homo Sapiens
auccuuacuguaagaauuucuaaggcuaccag

SEQ ID NO: 52012 - RNA, 32 nt, Homo Sapiens
uuuugaagaacaaagacaaaaauaggaaguug

SEQ ID NO: 52013 - RNA, 32 nt, Homo Sapiens
ccaacacuuugggaugcugaggucggcggauc

SEQ ID NO: 52014 - RNA, 28 nt, Homo Sapiens
ggcguggggcggccgagaccugcacggc

SEQ ID NO: 52015 - RNA, 32 nt, Homo Sapiens
uuuccccagaaaguaaacaaacaaauuaaaga

SEQ ID NO: 52016 - RNA, 32 nt, Homo Sapiens
gagaauggcaccuggugagagccugcugugug

SEQ ID NO: 52017 - RNA, 32 nt, Homo Sapiens
ugaucacccagucuucggagaagccuaaaauu

SEQ ID NO: 52018 - RNA, 32 nt, Homo Sapiens
augguucugaccaaaaaguccaggcugaaggu

SEQ ID NO: 52019 - RNA, 32 nt, Homo Sapiens
aggagcuguggacuuaaccguugcaaagcaca

SEQ ID NO: 52020 - RNA, 32 nt, Homo Sapiens
gaaaaaccgucucggcggcugcccccgccucc

SEQ ID NO: 52021 - RNA, 32 nt, Homo Sapiens
ugaaaaagcguucagaguagauaauguucauu

SEQ ID NO: 52022 - RNA, 32 nt, Homo Sapiens
ggcccagcacaggcagcgucagugcaaacuuc

SEQ ID NO: 52023 - RNA, 32 nt, Homo Sapiens
gcagggcccccagccccuccccuggcugagca

SEQ ID NO: 52024 - RNA, 32 nt, Homo Sapiens
cgcugggagcugcuggugcugcugcugcugcu

SEQ ID NO: 52025 - RNA, 32 nt, Homo Sapiens
uuuaucuuuuucuuuaaagauuuauuucaaua

SEQ ID NO: 52026 - RNA, 32 nt, Homo Sapiens
gcuccccuuucugccaggaagccaccccuuag

SEQ ID NO: 52027 - RNA, 32 nt, Homo Sapiens
agugcgaggguggcggugguggugguggcggg

SEQ ID NO: 52028 - RNA, 32 nt, Homo Sapiens
ccuccagcaucuuuuccauccugaggugccuc

SEQ ID NO: 52029 - RNA, 32 nt, Homo Sapiens
ggagcacuaaugcccaugagauugaaggcaca

SEQ ID NO: 52030 - RNA, 32 nt, Homo Sapiens
ccuuguguggaggccccaauagugguuuggcg

SEQ ID NO: 52031 - RNA, 30 nt, Homo Sapiens
aaggggcgcgcgcugcccaaccgcgcucuc

SEQ ID NO: 52032 - RNA, 32 nt, Homo Sapiens
cacaaguaaaacugugguacugauggacuuaa

SEQ ID NO: 52033 - RNA, 29 nt, Homo Sapiens
ggggcuccgguccagguacugcacuggac

SEQ ID NO: 52034 - RNA, 32 nt, Homo Sapiens
ggaagcgggaugcgccugugcgucucuuggcc

SEQ ID NO: 52035 - RNA, 32 nt, Homo Sapiens
acuauguauguuuaaauuaacuuuuuauugaa

SEQ ID NO: 52036 - RNA, 32 nt, Homo Sapiens
cccacaccgucagcaauccaauaaagaauuua

SEQ ID NO: 52037 - RNA, 32 nt, Homo Sapiens
guguggcugucgcuuucgaugaugccaguggc

SEQ ID NO: 52038 - RNA, 32 nt, Homo Sapiens
gggaauaugccuuuuuuguguguuuguguguu

SEQ ID NO: 52039 - RNA, 32 nt, Homo Sapiens
aauagcaagagacagagggggcugggaguguc

SEQ ID NO: 52040 - RNA, 32 nt, Homo Sapiens
gagguagucgggucgagggaaccuggcucugc

SEQ ID NO: 52041 - RNA, 32 nt, Homo Sapiens
cagcagugccagccuccgacagcccucccacc

SEQ ID NO: 52042 - RNA, 32 nt, Homo Sapiens
agggguccagcuugcgggggacccuccccagc

SEQ ID NO: 52043 - RNA, 32 nt, Homo Sapiens
ugcacagggagaagagaagcagacgggagcag

SEQ ID NO: 52044 - RNA, 32 nt, Homo Sapiens
ccccugcggaagcuggugcugcagagucucgu

SEQ ID NO: 52045 - RNA, 32 nt, Homo Sapiens
gcguccccagcuaacacccauccacgcaccac

SEQ ID NO: 52046 - RNA, 32 nt, Homo Sapiens
acaguaacgccacuuccacacucuguccccau

SEQ ID NO: 52047 - RNA, 32 nt, Homo Sapiens
aaaaauguuguaauaauuuaauguuuuuaccc

SEQ ID NO: 52048 - RNA, 32 nt, Homo Sapiens
ccaucaggccuaaucucauaccucugaccaac

SEQ ID NO: 52049 - RNA, 32 nt, Homo Sapiens
ccugagccucagagaccucugcacuguccuua

SEQ ID NO: 52050 - RNA, 32 nt, Homo Sapiens
cuuaaucauguaacaaaauauuuuguagauua

SEQ ID NO: 52051 - RNA, 32 nt, Homo Sapiens
caccagccccccugccucuccucugccuuucu

SEQ ID NO: 52052 - RNA, 32 nt, Homo Sapiens
agauggaguugugggggcagggggugguucuu

SEQ ID NO: 52053 - RNA, 32 nt, Homo Sapiens
ccgucggugcgguggcucugugcuguaacugg

SEQ ID NO: 52054 - RNA, 32 nt, Homo Sapiens
gucacaugcccccacuuccccacaggugaaag

SEQ ID NO: 52055 - RNA, 32 nt, Homo Sapiens
uaaagcuagcauaaaauugauauuuuaguuug

SEQ ID NO: 52056 - RNA, 27 nt, Homo Sapiens
caauggagacugcgcuagcaaaaacgc

SEQ ID NO: 52057 - RNA, 32 nt, Homo Sapiens
aggcugccagugucuugcaucauucuagcuga

SEQ ID NO: 52058 - RNA, 32 nt, Homo Sapiens
guacaguaugaguggaauauaaacuguacaca

SEQ ID NO: 52059 - RNA, 32 nt, Homo Sapiens
ccugcauggauacuacagcaauacuacaaccu

SEQ ID NO: 52060 - RNA, 32 nt, Homo Sapiens
auagggaauuuggcagggaagacaccuggguu

SEQ ID NO: 52061 - RNA, 32 nt, Homo Sapiens
cuuuggaauucuucuuuuuuuuuuuuuuuuuu

SEQ ID NO: 52062 - RNA, 32 nt, Homo Sapiens
gcguguacacguacaugugcacacacugucua

SEQ ID NO: 52063 - RNA, 32 nt, Homo Sapiens
aggcuggccuccuguuugguggugagaaaucu

SEQ ID NO: 52064 - RNA, 29 nt, Homo Sapiens
aguuucuuggaauauaucaagacuagcug

SEQ ID NO: 52065 - RNA, 32 nt, Homo Sapiens
gagggugacaagauagagagcuauuuaauggc

SEQ ID NO: 52066 - RNA, 32 nt, Homo Sapiens
ccaugcgcccccagugcaccccggcccaccgc

SEQ ID NO: 52067 - RNA, 32 nt, Homo Sapiens
acagcccacgcgggcuuggggggccucgcucu

SEQ ID NO: 52068 - RNA, 31 nt, Homo Sapiens
auaaugaaauaaaagcaucuuagguuauacc

SEQ ID NO: 52069 - RNA, 32 nt, Homo Sapiens
gcaaaggggggccagauucuguguguuucucu

SEQ ID NO: 52070 - RNA, 32 nt, Homo Sapiens
aaaugguguuuguuauuuuagacacugagaaa

SEQ ID NO: 52071 - RNA, 32 nt, Homo Sapiens
caucaugcacaaguagaacugcucuuggacuu

SEQ ID NO: 52072 - RNA, 32 nt, Homo Sapiens
cucccaccagccuccccucccccagggcccca

SEQ ID NO: 52073 - RNA, 32 nt, Homo Sapiens
ugacauuaaguaguggggggacaguccaugcc

SEQ ID NO: 52074 - RNA, 32 nt, Homo Sapiens
caaaggccccacaguccuccacuuccugggga

SEQ ID NO: 52075 - RNA, 32 nt, Homo Sapiens
auaauauacuaaaauauguacgaauauauacu

SEQ ID NO: 52076 - RNA, 32 nt, Homo Sapiens
gucauauauuuacuguuauauagauugccaca

SEQ ID NO: 52077 - RNA, 32 nt, Homo Sapiens
ugcuguugucgugauagugaguucuuagcgag

SEQ ID NO: 52078 - RNA, 32 nt, Homo Sapiens
cuuagaacugguuuuaaccuuuagcugcagcg

SEQ ID NO: 52079 - RNA, 32 nt, Homo Sapiens
uuguuuuucaccauuuagcaaaaauguauacu

SEQ ID NO: 52080 - RNA, 32 nt, Homo Sapiens
cacuaacaaaagacaucuucuguuaaccaaca

SEQ ID NO: 52081 - RNA, 32 nt, Homo Sapiens
uucccuggcuccuggccugugaguggugccac

SEQ ID NO: 52082 - RNA, 32 nt, Homo Sapiens
agcuauggcccauuuucaguggagaagauaau

SEQ ID NO: 52083 - RNA, 32 nt, Homo Sapiens
uuaauuauuuuuguuuuuauuuuuguacgaug

SEQ ID NO: 52084 - RNA, 32 nt, Homo Sapiens
uauucuuccuaaaaaauauauugccucacugg

SEQ ID NO: 52085 - RNA, 30 nt, Homo Sapiens
cauuccaugcuaauggguaggaagaaucaa

SEQ ID NO: 52086 - RNA, 32 nt, Homo Sapiens
aggaaggaagcacaaaagacaagcauuggguc

SEQ ID NO: 52087 - RNA, 32 nt, Homo Sapiens
agccugcccaggugcugagauuacauguauga

SEQ ID NO: 52088 - RNA, 32 nt, Homo Sapiens
ggaacuguggaggaaaucauguauuuacgaca

SEQ ID NO: 52089 - RNA, 32 nt, Homo Sapiens
ccuagggcucccagcccuugacuguccuccug

SEQ ID NO: 52090 - RNA, 32 nt, Homo Sapiens
uuccuauaaaucuaaugacauucaauaaaguu

SEQ ID NO: 52091 - RNA, 32 nt, Homo Sapiens
gugaaggaaauauuuucaggaaguuuuucuca

SEQ ID NO: 52092 - RNA, 32 nt, Homo Sapiens
agcccauccuuuccuuccguccuucugaaacc

SEQ ID NO: 52093 - RNA, 32 nt, Homo Sapiens
cagaaucucauuccucauauuucauugguauu

SEQ ID NO: 52094 - RNA, 32 nt, Homo Sapiens
ugcaggaggucuugagccacagagcuggcucc

SEQ ID NO: 52095 - RNA, 32 nt, Homo Sapiens
acagguaaauacaugagcuguuugucaccucu

SEQ ID NO: 52096 - RNA, 32 nt, Homo Sapiens
cuuguucugucccuuccacuucuaacuccacu

SEQ ID NO: 52097 - RNA, 30 nt, Homo Sapiens
uucccucuggacuucuguuuugagauggag

SEQ ID NO: 52098 - RNA, 32 nt, Homo Sapiens
guacaucugccguggguucaagcgauucuccu

SEQ ID NO: 52099 - RNA, 32 nt, Homo Sapiens
uauuuaaacugggauuucagauaaacaaguaa

SEQ ID NO: 52100 - RNA, 32 nt, Homo Sapiens
agagauugugccacugcacuccagccagagug

SEQ ID NO: 52101 - RNA, 32 nt, Homo Sapiens
auagaaauguacaaucaagagaauucaguaua

SEQ ID NO: 52102 - RNA, 30 nt, Homo Sapiens
aaacauguuuuaccugcagaaauucucuca

SEQ ID NO: 52103 - RNA, 32 nt, Homo Sapiens
augaauauggacaaauacaucguuaauugcuc

SEQ ID NO: 52104 - RNA, 32 nt, Homo Sapiens
guuaucuuucccucuucgguguucuucuucuc

SEQ ID NO: 52105 - RNA, 31 nt, Homo Sapiens
gcaauguguaacagucggugcugguggaaag

SEQ ID NO: 52106 - RNA, 32 nt, Homo Sapiens
aggugguggccauuuuacugcuuugaagccug

SEQ ID NO: 52107 - RNA, 32 nt, Homo Sapiens
uccccauccccaccagcucguuuuucagcacc

SEQ ID NO: 52108 - RNA, 32 nt, Homo Sapiens
aaaacuaccauuagccagucuuucuuacugac

SEQ ID NO: 52109 - RNA, 32 nt, Homo Sapiens
augcaggugaauuguggaaaaugucauguagc

SEQ ID NO: 52110 - RNA, 32 nt, Homo Sapiens
guggccgaggucggcggguccucggcgagacc

SEQ ID NO: 52111 - RNA, 32 nt, Homo Sapiens
aucaugguccagcaguacuguuuaauggggua

SEQ ID NO: 52112 - RNA, 32 nt, Homo Sapiens
aggagcaggcggcggcgguggcggcggcgguu

SEQ ID NO: 52113 - RNA, 32 nt, Homo Sapiens
cgggcuguucuuccuccuccgcguggcucacu

SEQ ID NO: 52114 - RNA, 32 nt, Homo Sapiens
agggagaaacaaaaauacaagucccguucugu

SEQ ID NO: 52115 - RNA, 32 nt, Homo Sapiens
ccauuuuuguauccugcaagcuaagaaugguu

SEQ ID NO: 52116 - RNA, 32 nt, Homo Sapiens
cugccgccgagggaccagcgcgggucuagcug

SEQ ID NO: 52117 - RNA, 32 nt, Homo Sapiens
cucugggagguggaagcauggggugggaucgg

SEQ ID NO: 52118 - RNA, 32 nt, Homo Sapiens
aauccaaggaagcagccaaggcugcucgcagc

SEQ ID NO: 52119 - RNA, 32 nt, Homo Sapiens
ccaguagcgccuggcgcccccggcgcgcaagg

SEQ ID NO: 52120 - RNA, 32 nt, Homo Sapiens
uuuuuucacuguacuuucuguaucauguaaaa

SEQ ID NO: 52121 - RNA, 32 nt, Homo Sapiens
ucggaucugaccaggugugguggcucacaccu

SEQ ID NO: 52122 - RNA, 32 nt, Homo Sapiens
agguucucuggggcccgcacaggcugggacau

SEQ ID NO: 52123 - RNA, 32 nt, Homo Sapiens
agcagucccacuggggcuccacaguuagugcc

SEQ ID NO: 52124 - RNA, 32 nt, Homo Sapiens
cccguuuuaaacauguuucaauagauccagau

SEQ ID NO: 52125 - RNA, 32 nt, Homo Sapiens
aucuuugccuacggccagacaggcagcgggaa

SEQ ID NO: 52126 - RNA, 32 nt, Homo Sapiens
aguuuagauuuucaguuaauuuuugagacuga

SEQ ID NO: 52127 - RNA, 32 nt, Homo Sapiens
caagaagcugcaaugcgccaaauacacaauag

SEQ ID NO: 52128 - RNA, 32 nt, Homo Sapiens
aaaauacaaaaauuagcuagguaugguagcac

SEQ ID NO: 52129 - RNA, 32 nt, Homo Sapiens
ccaccaucaaggaggaggaaagugacaaaaau

SEQ ID NO: 52130 - RNA, 32 nt, Homo Sapiens
ggcucgaccucgcugcugccugucgcgggaga

SEQ ID NO: 52131 - RNA, 32 nt, Homo Sapiens
aguucccgagcgcgggucccccgccuugcagu

SEQ ID NO: 52132 - RNA, 32 nt, Homo Sapiens
uuguuuagcauuagaaagucuuguuaaaggaa

SEQ ID NO: 52133 - RNA, 32 nt, Homo Sapiens
ggcuugcgcgcccuuguagacagccggggccu

SEQ ID NO: 52134 - RNA, 32 nt, Homo Sapiens
cgggccgcuugaucccgcugcagacguaggag

SEQ ID NO: 52135 - RNA, 32 nt, Homo Sapiens
gcagucguucccucuacccuaauaaggcuuug

SEQ ID NO: 52136 - RNA, 32 nt, Homo Sapiens
gugggcggacggcggcuugcagcguggaggag

SEQ ID NO: 52137 - RNA, 32 nt, Homo Sapiens
aaagucacauggcaucacuuccugcacauucu

SEQ ID NO: 52138 - RNA, 32 nt, Homo Sapiens
cuuaauuuucuuuaauuuaguccaaguuccag

SEQ ID NO: 52139 - RNA, 32 nt, Homo Sapiens
ccuuccaauuugaaaucagaagcaaaaaaggc

SEQ ID NO: 52140 - RNA, 32 nt, Homo Sapiens
aaaauuuaugcaguaaagaaaaaauuggggaa

SEQ ID NO: 52141 - RNA, 32 nt, Homo Sapiens
uuaauauuucuaaaaguuucuacauucagauu

SEQ ID NO: 52142 - RNA, 32 nt, Homo Sapiens
guaguugaaacacagaaaaugccacuuuucug

SEQ ID NO: 52143 - RNA, 32 nt, Homo Sapiens
ccucgcucucagcggcggccagguccaggccc

SEQ ID NO: 52144 - RNA, 32 nt, Homo Sapiens
gcuuauucugauacaagaaugcuugggugcau

SEQ ID NO: 52145 - RNA, 32 nt, Homo Sapiens
aguugauuuccaggcgaugcucgugugccccu

SEQ ID NO: 52146 - RNA, 32 nt, Homo Sapiens
ggaaggagagcuugcuuuuguugcuucagcag

SEQ ID NO: 52147 - RNA, 32 nt, Homo Sapiens
cagcaaacguucguuguugaaggcuguucuau

SEQ ID NO: 52148 - RNA, 32 nt, Homo Sapiens
gagggguuguugcgcaauggccgcuucagaug

SEQ ID NO: 52149 - RNA, 32 nt, Homo Sapiens
ccaugagacaaagcccaagcugucccaccagg

SEQ ID NO: 52150 - RNA, 32 nt, Homo Sapiens
cugcaagcgcccggcagcggcccgcgagguua

SEQ ID NO: 52151 - RNA, 32 nt, Homo Sapiens
uggccagcggugccggcugugggaccuuccug

SEQ ID NO: 52152 - RNA, 32 nt, Homo Sapiens
cccuuucugccagcaguucugguucuuacgaa

SEQ ID NO: 52153 - RNA, 32 nt, Homo Sapiens
cuguguaauguguuauguuucuuaaauaauac

SEQ ID NO: 52154 - RNA, 32 nt, Homo Sapiens
cugacauucucuaggaaggcaggccgcaccca

SEQ ID NO: 52155 - RNA, 32 nt, Homo Sapiens
uaaguugaccucuggguccggaaucgcgggca

SEQ ID NO: 52156 - RNA, 32 nt, Homo Sapiens
gcuucuagcuggaagccagcccagcguuucuc

SEQ ID NO: 52157 - RNA, 30 nt, Homo Sapiens
uuguaugucugugucugcacugcuccccag

SEQ ID NO: 52158 - RNA, 32 nt, Homo Sapiens
acucauccucuugaagaugcugaaacaggaga

SEQ ID NO: 52159 - RNA, 32 nt, Homo Sapiens
aggauagcuugggaugagaugugugugaaagu

SEQ ID NO: 52160 - RNA, 32 nt, Homo Sapiens
ggauaaggaugauaggaugggugcuggagaug

SEQ ID NO: 52161 - RNA, 32 nt, Homo Sapiens
auaugugugucuauacacacacauacauaaau

SEQ ID NO: 52162 - RNA, 31 nt, Homo Sapiens
aauggggcaaggucugagggcccaccgauga

SEQ ID NO: 52163 - RNA, 31 nt, Homo Sapiens
guaugguguaacacuaaaguaggugguucgu

SEQ ID NO: 52164 - RNA, 32 nt, Homo Sapiens
gcuuuuucucgcgugccuggaaccugacgcac

SEQ ID NO: 52165 - RNA, 32 nt, Homo Sapiens
aacauucuguuguuuuccucugccaucuagug

SEQ ID NO: 52166 - RNA, 32 nt, Homo Sapiens
ggguuucugaaucaagcuuaauguuuacaguu

SEQ ID NO: 52167 - RNA, 32 nt, Homo Sapiens
ucugguuugagccaugucugcgucuugaagga

SEQ ID NO: 52168 - RNA, 32 nt, Homo Sapiens
uuggagauuguauucauaucuauuugcauuug

SEQ ID NO: 52169 - RNA, 32 nt, Homo Sapiens
caggugccaggggucaugucaauuugcucugg

SEQ ID NO: 52170 - RNA, 32 nt, Homo Sapiens
guaacagaauccauccuguugacagucaagau

SEQ ID NO: 52171 - RNA, 32 nt, Homo Sapiens
cggguuggggguggugguggggugcuggcagc

SEQ ID NO: 52172 - RNA, 32 nt, Homo Sapiens
cggaucccgggguggggccuaguuacacacag

SEQ ID NO: 52173 - RNA, 32 nt, Homo Sapiens
uaugguuucuuacuguguguugcauuuuugug

SEQ ID NO: 52174 - RNA, 32 nt, Homo Sapiens
aggcuaauuuuuguauuuuuaguggagaugcg

SEQ ID NO: 52175 - RNA, 32 nt, Homo Sapiens
cuaaaggaaaggaaauauaccaagcucuccau

SEQ ID NO: 52176 - RNA, 32 nt, Homo Sapiens
uaaauuuucauucuguuuugcaugucaguuag

SEQ ID NO: 52177 - RNA, 32 nt, Homo Sapiens
ggcaguuuggggguaaagcauuuuggaggaau

SEQ ID NO: 52178 - RNA, 32 nt, Homo Sapiens
uuaauguaguuuuuuuguaaauccauauacuu

SEQ ID NO: 52179 - RNA, 32 nt, Homo Sapiens
agagacacuauaaacaaguacacaaauuuuuc

SEQ ID NO: 52180 - RNA, 32 nt, Homo Sapiens
aguuuauuucacuagaaaaaauuuaauaucaa

SEQ ID NO: 52181 - RNA, 27 nt, Homo Sapiens
auaccucauuaauuuuaauguaaccau

SEQ ID NO: 52182 - RNA, 32 nt, Homo Sapiens
cucugaccacuauuacuuucccuuaagcaaaa

SEQ ID NO: 52183 - RNA, 32 nt, Homo Sapiens
aggagugagccacugcgcccugccuggaacuc

SEQ ID NO: 52184 - RNA, 32 nt, Homo Sapiens
ucgggacagggcugaggccugcgggggaagac

SEQ ID NO: 52185 - RNA, 32 nt, Homo Sapiens
gcacgcgcgcacgcgcacacacucacgcacac

SEQ ID NO: 52186 - RNA, 32 nt, Homo Sapiens
ucccuaauauccacacaagguaaaugaaaaca

SEQ ID NO: 52187 - RNA, 30 nt, Homo Sapiens
uggcccuugaguggcaugcacaaaaauaaa

SEQ ID NO: 52188 - RNA, 32 nt, Homo Sapiens
agcagcuugaguuucuacugaaaaugagcccg

SEQ ID NO: 52189 - RNA, 32 nt, Homo Sapiens
caaagguaaguuacagcuuguuuuuugagaga

SEQ ID NO: 52190 - RNA, 27 nt, Homo Sapiens
auaaaugaauguuuacugaguacugca

SEQ ID NO: 52191 - RNA, 32 nt, Homo Sapiens
agguuuucucaaaacaaacaaacaaaaaagga

SEQ ID NO: 52192 - RNA, 32 nt, Homo Sapiens
uacuuuaaaaauuauuaauaaaaccauaaaug

SEQ ID NO: 52193 - RNA, 32 nt, Homo Sapiens
acucagguuggcagauaaacuguccccagacc

SEQ ID NO: 52194 - RNA, 32 nt, Homo Sapiens
uggccuguccccuuucccuuucucggcuaugg

SEQ ID NO: 52195 - RNA, 32 nt, Homo Sapiens
uuugagccucauauuucuuugauacuugaaau

SEQ ID NO: 52196 - RNA, 32 nt, Homo Sapiens
ucucccugcuccacagcuuucaggguguguuu

SEQ ID NO: 52197 - RNA, 32 nt, Homo Sapiens
cagggagcucagaagacggcucugccacaccu

SEQ ID NO: 52198 - RNA, 32 nt, Homo Sapiens
uaauggcuugaaguuucagaggugauaaaaau

SEQ ID NO: 52199 - RNA, 32 nt, Homo Sapiens
ugcugcuucaucucucccccagccugccaugu

SEQ ID NO: 52200 - RNA, 32 nt, Homo Sapiens
auaguuauccgucuucuacuucauggaagauu

SEQ ID NO: 52201 - RNA, 32 nt, Homo Sapiens
cguguccgccgcggcccugcgagguccgaggg

SEQ ID NO: 52202 - RNA, 32 nt, Homo Sapiens
cagccccggggagaggagugccaggcacacag

SEQ ID NO: 52203 - RNA, 32 nt, Homo Sapiens
guggccaagaagaucuccgagcagcagugacg

SEQ ID NO: 52204 - RNA, 32 nt, Homo Sapiens
uggguaaaguuccuuuuuaauguucuaaagug

SEQ ID NO: 52205 - RNA, 32 nt, Homo Sapiens
ugggucuuucaggcugguuuugguuuguauua

SEQ ID NO: 52206 - RNA, 32 nt, Homo Sapiens
auccuucuucccugccaggugccugucaccug

SEQ ID NO: 52207 - RNA, 32 nt, Homo Sapiens
acaagguuuauagcccuggaucuuuggcuuaa

SEQ ID NO: 52208 - RNA, 32 nt, Homo Sapiens
gccgggagaggccacaggagcggaccuggcac

SEQ ID NO: 52209 - RNA, 32 nt, Homo Sapiens
cucaugaaaagcaaucacugaucucauuuggg

SEQ ID NO: 52210 - RNA, 32 nt, Homo Sapiens
cauccuuuuuaaaaauaauguucuuaaagaaa

SEQ ID NO: 52211 - RNA, 32 nt, Homo Sapiens
uguaugguugguuaacagucugcuccccucuu

SEQ ID NO: 52212 - RNA, 32 nt, Homo Sapiens
gaucgcacuccagccugggugacagagugaga

SEQ ID NO: 52213 - RNA, 32 nt, Homo Sapiens
cgcaagccucgcgccuguccgccgcgccccga

SEQ ID NO: 52214 - RNA, 32 nt, Homo Sapiens
uggcuggggagugggaacagggaggggcagaa

SEQ ID NO: 52215 - RNA, 32 nt, Homo Sapiens
gcugcaggcucuuuuuaugaaggcuuucauga

SEQ ID NO: 52216 - RNA, 32 nt, Homo Sapiens
gucugguuugugucuguguucauguuuguuua

SEQ ID NO: 52217 - RNA, 32 nt, Homo Sapiens
ucaccuuucuccaagcucccuaccugcuuguc

SEQ ID NO: 52218 - RNA, 32 nt, Homo Sapiens
ccugacuuucacauuuggauugagaaucauug

SEQ ID NO: 52219 - RNA, 32 nt, Homo Sapiens
uucucuugccucagccucccaaguagcuggga

SEQ ID NO: 52220 - RNA, 32 nt, Homo Sapiens
ggaagcaguacuuuuuacugccucauugucuu

SEQ ID NO: 52221 - RNA, 32 nt, Homo Sapiens
ggcugagggaacugaggccagcauuuuuccuc

SEQ ID NO: 52222 - RNA, 32 nt, Homo Sapiens
gaaaucauguuguucgaucguuucacaucugu

SEQ ID NO: 52223 - RNA, 32 nt, Homo Sapiens
ggggcuccggcccgggacccaggaccagcaac

SEQ ID NO: 52224 - RNA, 32 nt, Homo Sapiens
gguggccuacucaaaaaucauuugguagcauu

SEQ ID NO: 52225 - RNA, 32 nt, Homo Sapiens
aacaccucuguccugcagcagaaccccuccuu

SEQ ID NO: 52226 - RNA, 32 nt, Homo Sapiens
cagauaaaucaucaugaaguuauauguauuuc

SEQ ID NO: 52227 - RNA, 30 nt, Homo Sapiens
aggggauggcaaacagaaauaaacaggaac

SEQ ID NO: 52228 - RNA, 32 nt, Homo Sapiens
cugaucugcugggguacagggcugggagaacc

SEQ ID NO: 52229 - RNA, 32 nt, Homo Sapiens
uucuuuuugucaaucggcacagaccacuguaa

SEQ ID NO: 52230 - RNA, 32 nt, Homo Sapiens
agcacaauaugugaaugugcugauuguguucc

SEQ ID NO: 52231 - RNA, 32 nt, Homo Sapiens
gcggcaucuggcccggccgcuccucgcugcgc

SEQ ID NO: 52232 - RNA, 32 nt, Homo Sapiens
auugucagaaauaaauaaaaccacaagucuca

SEQ ID NO: 52233 - RNA, 32 nt, Homo Sapiens
guugccuagagcaacagaugcugacuagaugu

SEQ ID NO: 52234 - RNA, 32 nt, Homo Sapiens
ugggaugccuuaguuacccagcagcagguuac

SEQ ID NO: 52235 - RNA, 32 nt, Homo Sapiens
ggggccaggcgggucggcaggugcuggcuugc

SEQ ID NO: 52236 - RNA, 32 nt, Homo Sapiens
ugucaaccuuuucugcacaucuaguuuccuac

SEQ ID NO: 52237 - RNA, 32 nt, Homo Sapiens
cauguuuccuucccauaugcuggguucgcaug

SEQ ID NO: 52238 - RNA, 32 nt, Homo Sapiens
uuaaagagaaagucauagguacucugcauuua

SEQ ID NO: 52239 - RNA, 32 nt, Homo Sapiens
ugggcagugaagcuggaauggcacauaucuau

SEQ ID NO: 52240 - RNA, 32 nt, Homo Sapiens
gauggaaagggagggaaagacaagaugcaacu

SEQ ID NO: 52241 - RNA, 32 nt, Homo Sapiens
gcuauggaggauuuuggcaugcguggccuguc

SEQ ID NO: 52242 - RNA, 32 nt, Homo Sapiens
auauguauuuaaaacaugaagaacugaagcgu

SEQ ID NO: 52243 - RNA, 32 nt, Homo Sapiens
acucacacccacccucaguggcuucuuggagu

SEQ ID NO: 52244 - RNA, 32 nt, Homo Sapiens
ucaguaaaaugaaccccacugggugggcagag

SEQ ID NO: 52245 - RNA, 32 nt, Homo Sapiens
uggcuggagauacagccuccucuucgugggcc

SEQ ID NO: 52246 - RNA, 32 nt, Homo Sapiens
uguaagauauacuauuugagagggacagauua

SEQ ID NO: 52247 - RNA, 32 nt, Homo Sapiens
uuucucauagaguaauuauaugaacaguuuuu

SEQ ID NO: 52248 - RNA, 32 nt, Homo Sapiens
ccaggccgcccacgucccacucugcccagccu

SEQ ID NO: 52249 - RNA, 32 nt, Homo Sapiens
cuuggaugcuucugagaaaucuaugugagaaa

SEQ ID NO: 52250 - RNA, 32 nt, Homo Sapiens
aauuauuugucaagcaaauguuuaaaauccaa

SEQ ID NO: 52251 - RNA, 32 nt, Homo Sapiens
aucuacuugaccaagcaaaggggcugaaaaac

SEQ ID NO: 52252 - RNA, 32 nt, Homo Sapiens
gagacagcuggcaucagguggcugggacaagc

SEQ ID NO: 52253 - RNA, 32 nt, Homo Sapiens
ucuugacucuucagaguucguaccucaaaaga

SEQ ID NO: 52254 - RNA, 32 nt, Homo Sapiens
ccauucugcagccuauggaucaaggagugauu

SEQ ID NO: 52255 - RNA, 32 nt, Homo Sapiens
ugacagugguggccucugaggaaggggcccuu

SEQ ID NO: 52256 - RNA, 32 nt, Homo Sapiens
cugaauuuuuaaaagagcuguaacuaguugua

SEQ ID NO: 52257 - RNA, 32 nt, Homo Sapiens
ggcucccgcgcgccuccccucgcgcccgagcu

SEQ ID NO: 52258 - RNA, 32 nt, Homo Sapiens
gugcagcaacagcaggagcggcugcggaagca

SEQ ID NO: 52259 - RNA, 32 nt, Homo Sapiens
uuguucuguauauuuuguuaccuuuuacagaa

SEQ ID NO: 52260 - RNA, 32 nt, Homo Sapiens
cuuuccuggucccucacccccauggccccagg

SEQ ID NO: 52261 - RNA, 32 nt, Homo Sapiens
cauuauugccccaccaccggaucauaugaaau

SEQ ID NO: 52262 - RNA, 32 nt, Homo Sapiens
aaguaaacgauaaaauguggauuaaagugccc

SEQ ID NO: 52263 - RNA, 32 nt, Homo Sapiens
gggccacagcggcagccuuguuugccuuccca

SEQ ID NO: 52264 - RNA, 32 nt, Homo Sapiens
gggagcccaagauggugaucugcccgagacuc

SEQ ID NO: 52265 - RNA, 32 nt, Homo Sapiens
ucucccagccgccugcuucucagcucugacuc

SEQ ID NO: 52266 - RNA, 32 nt, Homo Sapiens
aaagacaugacuucagccuguaaugcugugag

SEQ ID NO: 52267 - RNA, 32 nt, Homo Sapiens
guucuacucauauauaucuaucuuauauacuu

SEQ ID NO: 52268 - RNA, 32 nt, Homo Sapiens
cugguuccugcuccccgccuaggacaggagcu

SEQ ID NO: 52269 - RNA, 32 nt, Homo Sapiens
aggugggagggacacgggagcggcccgcacac

SEQ ID NO: 52270 - RNA, 32 nt, Homo Sapiens
aaccuccaccucccagguucaagcauucuucu

SEQ ID NO: 52271 - RNA, 32 nt, Homo Sapiens
uauuugagguuuuuuagagugccaagagcuaa

SEQ ID NO: 52272 - RNA, 32 nt, Homo Sapiens
uccccggacggacuccuucaccgacugcaccc

SEQ ID NO: 52273 - RNA, 32 nt, Homo Sapiens
gagcuggugggaaggagggagggagggcggug

SEQ ID NO: 52274 - RNA, 32 nt, Homo Sapiens
guacuugacuccaucacgcagaugggagcagg

SEQ ID NO: 52275 - RNA, 32 nt, Homo Sapiens
cuccaaagauugaaagcuuaauaaucuccuac

SEQ ID NO: 52276 - RNA, 32 nt, Homo Sapiens
uccaaggccccggcgacuccccggacucgggg

SEQ ID NO: 52277 - RNA, 32 nt, Homo Sapiens
gucuauugaaagacauacauuugaaccacuac

SEQ ID NO: 52278 - RNA, 32 nt, Homo Sapiens
agugaauuaaacaaucuuucagaggaguauga

SEQ ID NO: 52279 - RNA, 29 nt, Homo Sapiens
uugagaauagugaugacucuauagaaaga

SEQ ID NO: 52280 - RNA, 32 nt, Homo Sapiens
gcuugggugagaccaccucuccccucucagca

SEQ ID NO: 52281 - RNA, 32 nt, Homo Sapiens
uacacuggggacggcgacaucacacucaucac

SEQ ID NO: 52282 - RNA, 32 nt, Homo Sapiens
gguuugcccaacccugcgcgauggugacucug

SEQ ID NO: 52283 - RNA, 32 nt, Homo Sapiens
auguauacaaaauaaauaaaguaggagaguuu

SEQ ID NO: 52284 - RNA, 32 nt, Homo Sapiens
acaucgaugagagaaauugaaguggacuccaa

SEQ ID NO: 52285 - RNA, 32 nt, Homo Sapiens
cagaaggcaccgccagcuccaacgucuucucc

SEQ ID NO: 52286 - RNA, 32 nt, Homo Sapiens
gcugcuuuuugaggaaaacaggugauauuugg

SEQ ID NO: 52287 - RNA, 32 nt, Homo Sapiens
uuuugcuugcagagccgcucccgaggccccgg

SEQ ID NO: 52288 - RNA, 32 nt, Homo Sapiens
cuguguaauuuaaugguaucuuccuugcugga

SEQ ID NO: 52289 - RNA, 32 nt, Homo Sapiens
aguggucgucccugcccuccccggccccgggg

SEQ ID NO: 52290 - RNA, 32 nt, Homo Sapiens
gucaaguuccgucuccucuccagcccuaugga

SEQ ID NO: 52291 - RNA, 32 nt, Homo Sapiens
guaggguaugaguaggauucugcuggugccug

SEQ ID NO: 52292 - RNA, 32 nt, Homo Sapiens
ucacaaucaguucuucauuucaugauuuuugu

SEQ ID NO: 52293 - RNA, 32 nt, Homo Sapiens
gcaaugcccaccccucuccccccgccugccac

SEQ ID NO: 52294 - RNA, 32 nt, Homo Sapiens
acugcucaggcggagagaucccugcccccacg

SEQ ID NO: 52295 - RNA, 32 nt, Homo Sapiens
ccaagggcagguggagaguccagggaggcagg

SEQ ID NO: 52296 - RNA, 32 nt, Homo Sapiens
aaaacgaguucuuucguucugugcgcaguaaa

SEQ ID NO: 52297 - RNA, 32 nt, Homo Sapiens
aagcgagaaaaaagaauauacacauaauuucu

SEQ ID NO: 52298 - RNA, 32 nt, Homo Sapiens
uuaaauuuaaacaaaauuauuucaugacaaaa

SEQ ID NO: 52299 - RNA, 29 nt, Homo Sapiens
uuccugggacugcucaguuuaaguaacuu

SEQ ID NO: 52300 - RNA, 32 nt, Homo Sapiens
uccgcccccucccccuucucggcgucgucgaa

SEQ ID NO: 52301 - RNA, 32 nt, Homo Sapiens
acugagauccagagagaugaugacuuugccca

SEQ ID NO: 52302 - RNA, 32 nt, Homo Sapiens
cggcagucgcggggguccgcggcggccugagc

SEQ ID NO: 52303 - RNA, 32 nt, Homo Sapiens
ccaggaccaagauuggccugaggcugcacuaa

SEQ ID NO: 52304 - RNA, 31 nt, Homo Sapiens
gccggcucacggaggggccaccacacugggc

SEQ ID NO: 52305 - RNA, 32 nt, Homo Sapiens
cggcccggcgguaggcgguggcgacucugccc

SEQ ID NO: 52306 - RNA, 32 nt, Homo Sapiens
uuauuuaaaaauucaaagucuuagaaccaaga

SEQ ID NO: 52307 - RNA, 31 nt, Homo Sapiens
ucagugugcaaaaacuauagagccugucagc

SEQ ID NO: 52308 - RNA, 32 nt, Homo Sapiens
gcaucaguuguuuucuaugaaaacaguggauu

SEQ ID NO: 52309 - RNA, 32 nt, Homo Sapiens
aucacuuuagaaaggccuucugauguaaaucu

SEQ ID NO: 52310 - RNA, 32 nt, Homo Sapiens
gugauaucaaggaacauccccuguuggcauca

SEQ ID NO: 52311 - RNA, 32 nt, Homo Sapiens
agaagugucuauguggagacgcaacugaaaca

SEQ ID NO: 52312 - RNA, 32 nt, Homo Sapiens
cuggggacucaccgacacauuccuccugccaa

SEQ ID NO: 52313 - RNA, 32 nt, Homo Sapiens
cuucuaugaagauggauacugaugggugacau

SEQ ID NO: 52314 - RNA, 32 nt, Homo Sapiens
ccuuuccuuucugcaucugggggaaggaaaaa

SEQ ID NO: 52315 - RNA, 32 nt, Homo Sapiens
gaaaggcuuguacagugcuuggauagcagcau

SEQ ID NO: 52316 - RNA, 32 nt, Homo Sapiens
uuuggaguguuuuuguuuucucuuccaagggc

SEQ ID NO: 52317 - RNA, 32 nt, Homo Sapiens
ccagccgcucggccccgccgcgcucgcagagg

SEQ ID NO: 52318 - RNA, 32 nt, Homo Sapiens
caucagagagcccagcagcaucugcccauuuc

SEQ ID NO: 52319 - RNA, 32 nt, Homo Sapiens
uuaaacugugguccaucuccagacucuaccac

SEQ ID NO: 52320 - RNA, 32 nt, Homo Sapiens
aagguuuggccauagaauucucuuguaugauc

SEQ ID NO: 52321 - RNA, 32 nt, Homo Sapiens
guuaauaguagucuuugacagaucaucuugga

SEQ ID NO: 52322 - RNA, 32 nt, Homo Sapiens
ccuucaaaaguuaauagaagugagaucauacu

SEQ ID NO: 52323 - RNA, 32 nt, Homo Sapiens
aguaauaaacgugccaucucuaucucuuaaac

SEQ ID NO: 52324 - RNA, 32 nt, Homo Sapiens
aauacgcgacagagcugggcgagaacgcagcg

SEQ ID NO: 52325 - RNA, 32 nt, Homo Sapiens
ccucccucccagcagggaaaccccgcccgcug

SEQ ID NO: 52326 - RNA, 32 nt, Homo Sapiens
ucuuagaaaaggaaaggcugauguuuccauau

SEQ ID NO: 52327 - RNA, 32 nt, Homo Sapiens
acauugcugaagcucacggagaccaaguccca

SEQ ID NO: 52328 - RNA, 32 nt, Homo Sapiens
aaaucugcuucuguaaauuaugcugaaaguuu

SEQ ID NO: 52329 - RNA, 32 nt, Homo Sapiens
uguagcauaugguuuccagcuguuucuccagu

SEQ ID NO: 52330 - RNA, 32 nt, Homo Sapiens
accuccgccucccagguucaagcgauucuccu

SEQ ID NO: 52331 - RNA, 32 nt, Homo Sapiens
uccaggguugaagcgauucuucugccucagcc

SEQ ID NO: 52332 - RNA, 32 nt, Homo Sapiens
accuccgccucccagguucaagagauucucau

SEQ ID NO: 52333 - RNA, 32 nt, Homo Sapiens
agaggcgccucccucuguuccucccaaggcua

SEQ ID NO: 52334 - RNA, 32 nt, Homo Sapiens
uaacuaguaaucuuggcccuauucauuacauc

SEQ ID NO: 52335 - RNA, 32 nt, Homo Sapiens
gguccuguuccagccggcaucgccggguggcu

SEQ ID NO: 52336 - RNA, 29 nt, Homo Sapiens
uucccauuaagucugagaggcaagagcua

SEQ ID NO: 52337 - RNA, 32 nt, Homo Sapiens
aaagcaguuaucuggcugggaauaccuuagac

SEQ ID NO: 52338 - RNA, 32 nt, Homo Sapiens
cguuugucucgugguuggaagccuccccuugg

SEQ ID NO: 52339 - RNA, 32 nt, Homo Sapiens
caaggugaugugaucuuucauguguuaguaua

SEQ ID NO: 52340 - RNA, 32 nt, Homo Sapiens
aggugagcccgggauggcuaucugaaaugucu

SEQ ID NO: 52341 - RNA, 32 nt, Homo Sapiens
gacauggccccggugcggcugcagcucaccag

SEQ ID NO: 52342 - RNA, 32 nt, Homo Sapiens
ugccacauggagccacugucaugcaggucaua

SEQ ID NO: 52343 - RNA, 32 nt, Homo Sapiens
ggcucuuacuugcugcagcaucggcgcgugca

SEQ ID NO: 52344 - RNA, 32 nt, Homo Sapiens
cuguguagacgaagggggcaucuggccuuaca

SEQ ID NO: 52345 - RNA, 32 nt, Homo Sapiens
guuuaauuuugucacacuguuuucauaguguu

SEQ ID NO: 52346 - RNA, 32 nt, Homo Sapiens
cgagccugccgcgcgccgcccuccccgcucuc

SEQ ID NO: 52347 - RNA, 32 nt, Homo Sapiens
caggaugccauuaagaaugccaaaucaaauaa

SEQ ID NO: 52348 - RNA, 32 nt, Homo Sapiens
accuuaaaggauuugaauauuucaaauugcac

SEQ ID NO: 52349 - RNA, 32 nt, Homo Sapiens
uugccucccccuccugcgauggggguccuaag

SEQ ID NO: 52350 - RNA, 32 nt, Homo Sapiens
gcuguuggucauaaguuaacuguauuaagaac

SEQ ID NO: 52351 - RNA, 32 nt, Homo Sapiens
aacuucucagaggcucuggagaacgggacagu

SEQ ID NO: 52352 - RNA, 32 nt, Homo Sapiens
ggcgugguugccggggacgcgcggcccccggu

SEQ ID NO: 52353 - RNA, 31 nt, Homo Sapiens
gguucagagccccaggaauggaccccccaau

SEQ ID NO: 52354 - RNA, 32 nt, Homo Sapiens
aguaaaagauuuagauuacacuucuacaacug

SEQ ID NO: 52355 - RNA, 32 nt, Homo Sapiens
aggggaaauuuauggaaguagauggcuuaaua

SEQ ID NO: 52356 - RNA, 32 nt, Homo Sapiens
uuaaagaagagcuugaugugguagaagaaucu

SEQ ID NO: 52357 - RNA, 32 nt, Homo Sapiens
cccaggcucuugcacaccccucccuguaacca

SEQ ID NO: 52358 - RNA, 32 nt, Homo Sapiens
cuuuuuccaaaaauuccugaguaucaagacgu

SEQ ID NO: 52359 - RNA, 32 nt, Homo Sapiens
gagcgcggaggcagccauggugcgguucaagc

SEQ ID NO: 52360 - RNA, 32 nt, Homo Sapiens
ucaaaugaggggcuacugggagugcucuuggu

SEQ ID NO: 52361 - RNA, 32 nt, Homo Sapiens
uuauuuauuuaguugaagauucacugauccca

SEQ ID NO: 52362 - RNA, 32 nt, Homo Sapiens
uccagcggccccagcuccagcccagccagcac

SEQ ID NO: 52363 - RNA, 32 nt, Homo Sapiens
uggcagugaauacacgaggauuucagugauac

SEQ ID NO: 52364 - RNA, 32 nt, Homo Sapiens
gagaccgcuggcugccgagggaggaagagcag

SEQ ID NO: 52365 - RNA, 32 nt, Homo Sapiens
ucacagaauauuaacucuguuauggaacaaau

SEQ ID NO: 52366 - RNA, 32 nt, Homo Sapiens
agggccguccacugugggugggagacgcagcc

SEQ ID NO: 52367 - RNA, 32 nt, Homo Sapiens
acacagugcuuuccagccuuuggugcuuacag

SEQ ID NO: 52368 - RNA, 32 nt, Homo Sapiens
ugaguuggaaaagguuuuagaaaaagugaaga

SEQ ID NO: 52369 - RNA, 32 nt, Homo Sapiens
auacucuuuccacaauacugagcugccucaga

SEQ ID NO: 52370 - RNA, 32 nt, Homo Sapiens
ccaggaggcaaaggggacccagacgggaguag

SEQ ID NO: 52371 - RNA, 32 nt, Homo Sapiens
uuuuugcaucccauugccagccuugcugucag

SEQ ID NO: 52372 - RNA, 32 nt, Homo Sapiens
uucuagggucuccuuucuccuuauuuauucuu

SEQ ID NO: 52373 - RNA, 32 nt, Homo Sapiens
gacuacaggacuaggcuucuccccucaggggc

SEQ ID NO: 52374 - RNA, 32 nt, Homo Sapiens
gaagagaacaacauguauuaaagcaggugauu

SEQ ID NO: 52375 - RNA, 32 nt, Homo Sapiens
uccuaggcucgaggacaucucuggagaaucau

SEQ ID NO: 52376 - RNA, 32 nt, Homo Sapiens
cgccuguaaucucagcacuuugggaggccagg

SEQ ID NO: 52377 - RNA, 32 nt, Homo Sapiens
uauguaaucuauuuuuuuuuuaaacuggaaag

SEQ ID NO: 52378 - RNA, 32 nt, Homo Sapiens
caugucucucugaccuucuccugucucuccuu

SEQ ID NO: 52379 - RNA, 32 nt, Homo Sapiens
ucaauuuuuaaaccuuugcuguuaaaugcaau

SEQ ID NO: 52380 - RNA, 32 nt, Homo Sapiens
uauccauccacccaccaagacccuguucccug

SEQ ID NO: 52381 - RNA, 32 nt, Homo Sapiens
uagaaagaaaauggaaaaauggucauuuuuaa

SEQ ID NO: 52382 - RNA, 32 nt, Homo Sapiens
uuaaagagaaaguaacaccacuccuuuucugu

SEQ ID NO: 52383 - RNA, 32 nt, Homo Sapiens
gcuggcaggggcauggugaggaggaagguagc

SEQ ID NO: 52384 - RNA, 27 nt, Homo Sapiens
cacauauuucuaugcagcccccgaccc

SEQ ID NO: 52385 - RNA, 32 nt, Homo Sapiens
uucagagacauuaccaguuugccuccuucucu

SEQ ID NO: 52386 - RNA, 32 nt, Homo Sapiens
ccugagggcuccugggaggccugugggagccu

SEQ ID NO: 52387 - RNA, 31 nt, Homo Sapiens
aacaucaaagagguuuuuaacugaagacucu

SEQ ID NO: 52388 - RNA, 32 nt, Homo Sapiens
agagugcccaaccccggccugugggcagccgc

SEQ ID NO: 52389 - RNA, 31 nt, Homo Sapiens
accaaaugaaacacuuucaggaccuuccuuc

SEQ ID NO: 52390 - RNA, 32 nt, Homo Sapiens
uggcggcggcggggccauggcgcggagacccc

SEQ ID NO: 52391 - RNA, 32 nt, Homo Sapiens
gcuucagagagaauagacugugaauguuaaug

SEQ ID NO: 52392 - RNA, 32 nt, Homo Sapiens
aaagcaagggaggcuuccuggaggaagcggca

SEQ ID NO: 52393 - RNA, 31 nt, Homo Sapiens
gccucagugggccccagcuguccagagaagg

SEQ ID NO: 52394 - RNA, 32 nt, Homo Sapiens
gaaugcccaaaucacaucccucuucuugucca

SEQ ID NO: 52395 - RNA, 32 nt, Homo Sapiens
cugcacuguggucagugccauuuugcagacuc

SEQ ID NO: 52396 - RNA, 32 nt, Homo Sapiens
uguacugaagggaaaaguuugaucauaccaaa

SEQ ID NO: 52397 - RNA, 31 nt, Homo Sapiens
ugacaaucaaagaaaagacuuuuguugaaau

SEQ ID NO: 52398 - RNA, 32 nt, Homo Sapiens
uuaagacugccuugcuuuuguaaaacaaguuc

SEQ ID NO: 52399 - RNA, 32 nt, Homo Sapiens
aacauauucauauuauacuaacauaaacacau

SEQ ID NO: 52400 - RNA, 32 nt, Homo Sapiens
agaaaugcaaauuuauuuaacauucuuauccc

SEQ ID NO: 52401 - RNA, 32 nt, Homo Sapiens
acugaggccccggccagcccuucuccuccacc

SEQ ID NO: 52402 - RNA, 32 nt, Homo Sapiens
ucucuacuggcccagggcuucagcucuugguu

SEQ ID NO: 52403 - RNA, 32 nt, Homo Sapiens
acgggaauaaguuguggaaagccacaaaaggc

SEQ ID NO: 52404 - RNA, 32 nt, Homo Sapiens
auuugugugggguuuuguuuguuuacaaauaa

SEQ ID NO: 52405 - RNA, 32 nt, Homo Sapiens
ucacacucggcaugcauugugaugccggcagg

SEQ ID NO: 52406 - RNA, 32 nt, Homo Sapiens
aucucauaaauuaucagaauuuuuauguucuc

SEQ ID NO: 52407 - RNA, 32 nt, Homo Sapiens
caaccgucuuucaaucaacaguucuugacugc

SEQ ID NO: 52408 - RNA, 32 nt, Homo Sapiens
gccacagacaacauguaaacuggugagccugg

SEQ ID NO: 52409 - RNA, 32 nt, Homo Sapiens
ggcuuaaauuuugacuguacuaacuauaaaug

SEQ ID NO: 52410 - RNA, 32 nt, Homo Sapiens
cagcuaaaccagccucuuucugaaugcagcuc

SEQ ID NO: 52411 - RNA, 32 nt, Homo Sapiens
aaccacaccaaaacucagugguuuaaaacaag

SEQ ID NO: 52412 - RNA, 31 nt, Homo Sapiens
uuuaugauaucccugauccuaacugaagaga

SEQ ID NO: 52413 - RNA, 32 nt, Homo Sapiens
gggauuuugucaauuauaaccaaaaacaaugu

SEQ ID NO: 52414 - RNA, 32 nt, Homo Sapiens
gauugauagaaaggaagacuaacguuaccuug

SEQ ID NO: 52415 - RNA, 32 nt, Homo Sapiens
ggggcggggggcggggguguguaugggaaucc

SEQ ID NO: 52416 - RNA, 32 nt, Homo Sapiens
ccucugugagccucucccacucagcccuacag

SEQ ID NO: 52417 - RNA, 32 nt, Homo Sapiens
ucuucgugcuaguacagcguauucccaagaga

SEQ ID NO: 52418 - RNA, 32 nt, Homo Sapiens
caccauggcccccucaucauagcaauaacauu

SEQ ID NO: 52419 - RNA, 32 nt, Homo Sapiens
ucucauguacuaggaaguuuguagccauuuuu

SEQ ID NO: 52420 - RNA, 32 nt, Homo Sapiens
aacucuguuucugaagucuucaguuaaguuug

SEQ ID NO: 52421 - RNA, 32 nt, Homo Sapiens
ugggauugcagaagguuaacauauuucccuua

SEQ ID NO: 52422 - RNA, 32 nt, Homo Sapiens
cugcuuuggcccggcacaguggcucaucccug

SEQ ID NO: 52423 - RNA, 32 nt, Homo Sapiens
cauugccaugcguccuggucaagccccccuca

SEQ ID NO: 52424 - RNA, 32 nt, Homo Sapiens
uacagggcuucaguaaccaaaacagcauggua

SEQ ID NO: 52425 - RNA, 32 nt, Homo Sapiens
ucuguaguucccuaaccccaaacucggagacu

SEQ ID NO: 52426 - RNA, 32 nt, Homo Sapiens
cccugagguccgcuggcccaccaccccugggu

SEQ ID NO: 52427 - RNA, 32 nt, Homo Sapiens
gaauuguggucuacaaauacauuguggagaaa

SEQ ID NO: 52428 - RNA, 32 nt, Homo Sapiens
aucuccacgcgcgcccgugggagguggguccg

SEQ ID NO: 52429 - RNA, 32 nt, Homo Sapiens
acccuuggggacgccucuccuccggcugcccc

SEQ ID NO: 52430 - RNA, 32 nt, Homo Sapiens
acccacccuaaaauuuccuaaagguaucccgu

SEQ ID NO: 52431 - RNA, 32 nt, Homo Sapiens
ccuggggagcugggacggggccccgcugccgg

SEQ ID NO: 52432 - RNA, 32 nt, Homo Sapiens
aagaggcagggaaggagccuccccuacagguu

SEQ ID NO: 52433 - RNA, 32 nt, Homo Sapiens
cagcaauuauggacccuacuuauuuucuuuuu

SEQ ID NO: 52434 - RNA, 32 nt, Homo Sapiens
cuguggaaggcaccaucguuuuuauaaagggg

SEQ ID NO: 52435 - RNA, 32 nt, Homo Sapiens
cauaaucaaaacaaaagcaugccuuuauuuuu

SEQ ID NO: 52436 - RNA, 32 nt, Homo Sapiens
auacuggucauuucagaaaauucuucauagug

SEQ ID NO: 52437 - RNA, 32 nt, Homo Sapiens
uucuugcugcugucaagucccaagagaaccac

SEQ ID NO: 52438 - RNA, 32 nt, Homo Sapiens
gccguaggguggcacugggaggggguggggga

SEQ ID NO: 52439 - RNA, 32 nt, Homo Sapiens
gggcgggcucgcgucauccugcccccgcugcg

SEQ ID NO: 52440 - RNA, 32 nt, Homo Sapiens
acuuguggagcgccagcucugcccaagacgcc

SEQ ID NO: 52441 - RNA, 32 nt, Homo Sapiens
uuucuggucgcuauuguuuuuauccccuuugc

SEQ ID NO: 52442 - RNA, 32 nt, Homo Sapiens
gcuguuaucgauaaauguaccaauuauuaaau

SEQ ID NO: 52443 - RNA, 32 nt, Homo Sapiens
auguucaguuucugaagcaguucuuccugcuu

SEQ ID NO: 52444 - RNA, 32 nt, Homo Sapiens
acgugaacaugcgcuugcgguuugagguagcc

SEQ ID NO: 52445 - RNA, 32 nt, Homo Sapiens
agccagcaguuucuucuguugccgggcaacgc

SEQ ID NO: 52446 - RNA, 32 nt, Homo Sapiens
uuaagcaaaaauuuuaaagauaaauccauuuu

SEQ ID NO: 52447 - RNA, 32 nt, Homo Sapiens
ucgcgcggccgaggggcggggugugggcggag

SEQ ID NO: 52448 - RNA, 32 nt, Homo Sapiens
cacggugucugagacugaaugaaaggugagcu

SEQ ID NO: 52449 - RNA, 32 nt, Homo Sapiens
cuccagcuccagccucauuugcuugagacuuu

SEQ ID NO: 52450 - RNA, 32 nt, Homo Sapiens
gcaaccuccgccuccuggguucaggagauucu

SEQ ID NO: 52451 - RNA, 32 nt, Homo Sapiens
gccuuuuuauuaugaucuugaaugcggacaau

SEQ ID NO: 52452 - RNA, 32 nt, Homo Sapiens
cucucucucccacgagcccuuccacuaagaau

SEQ ID NO: 52453 - RNA, 32 nt, Homo Sapiens
ugacuagaacagagauaacacccugcaccagg

SEQ ID NO: 52454 - RNA, 32 nt, Homo Sapiens
aggcaggaaaggaaagacauuaaaccauuaau

SEQ ID NO: 52455 - RNA, 32 nt, Homo Sapiens
uugaugacugucagcaucacugccgcaggcca

SEQ ID NO: 52456 - RNA, 32 nt, Homo Sapiens
ucccuaacuucauuuguuuucuaggccuguuu

SEQ ID NO: 52457 - RNA, 32 nt, Homo Sapiens
ccgguguggugggucccggauaucgcguggcu

SEQ ID NO: 52458 - RNA, 32 nt, Homo Sapiens
ccccgccgcccgccucacgcugaaguuccugg

SEQ ID NO: 52459 - RNA, 32 nt, Homo Sapiens
acaucucagaaaaaauacaacacagguuuaac

SEQ ID NO: 52460 - RNA, 32 nt, Homo Sapiens
auguauaucuaauaguacaaaauggaauaaac

SEQ ID NO: 52461 - RNA, 32 nt, Homo Sapiens
uuguucccacugaucccuuguuuaucucacug

SEQ ID NO: 52462 - RNA, 32 nt, Homo Sapiens
ccugaccugcugggagcccaccccaccccagu

SEQ ID NO: 52463 - RNA, 32 nt, Homo Sapiens
ugauauuaguagagaucauagauacaaugauc

SEQ ID NO: 52464 - RNA, 32 nt, Homo Sapiens
uccacagagcagccaucuuagcuggagguguc

SEQ ID NO: 52465 - RNA, 30 nt, Homo Sapiens
ggcccugucugugugcugagccaguuuccc

SEQ ID NO: 52466 - RNA, 32 nt, Homo Sapiens
cuggccgagcgcgguggcuaacgccuguaauc

SEQ ID NO: 52467 - RNA, 27 nt, Homo Sapiens
ugauccuccugcuucagccucccuagu

SEQ ID NO: 52468 - RNA, 31 nt, Homo Sapiens
ggccagagggcggguacaaggcugucugguu

SEQ ID NO: 52469 - RNA, 32 nt, Homo Sapiens
ggugaccgaggguggcacagccuggcuugagu

SEQ ID NO: 52470 - RNA, 32 nt, Homo Sapiens
uauaauccauauuuaaauuuuauagagaagaa

SEQ ID NO: 52471 - RNA, 32 nt, Homo Sapiens
caaggggaagcaguguggaacagcagagaaag

SEQ ID NO: 52472 - RNA, 32 nt, Homo Sapiens
guuccccggaagcuuucccugauugcaaaagu

SEQ ID NO: 52473 - RNA, 32 nt, Homo Sapiens
agugugaauuugugacagcugcaguugcuccc

SEQ ID NO: 52474 - RNA, 32 nt, Homo Sapiens
ucauuaauuugaaagcacacaggaaagcuugc

SEQ ID NO: 52475 - RNA, 32 nt, Homo Sapiens
aauacuugaaaccucucugaccaagagccucu

SEQ ID NO: 52476 - RNA, 32 nt, Homo Sapiens
cuccccaccucuucucucccagauggggcccu

SEQ ID NO: 52477 - RNA, 32 nt, Homo Sapiens
cuaaugaaggauucugccaugauugccaccuc

SEQ ID NO: 52478 - RNA, 30 nt, Homo Sapiens
caacauggcaguggcauguuaggcauguua

SEQ ID NO: 52479 - RNA, 32 nt, Homo Sapiens
gaacugcgcuggcgggggcucguccuugggcg

SEQ ID NO: 52480 - RNA, 32 nt, Homo Sapiens
acuuucuugcuuguauucuguguggcuuuuuu

SEQ ID NO: 52481 - RNA, 32 nt, Homo Sapiens
uguaaacgucucuggucaggcugcgcauuucg

SEQ ID NO: 52482 - RNA, 32 nt, Homo Sapiens
agcggaaacucaaguugaaugaaaaugccauc

SEQ ID NO: 52483 - RNA, 32 nt, Homo Sapiens
ugacugguggcugccugaggaauaccaguggg

SEQ ID NO: 52484 - RNA, 28 nt, Homo Sapiens
gugggaggguggcaagggaugugcuuaa

SEQ ID NO: 52485 - RNA, 32 nt, Homo Sapiens
uuaguucuuagagcuucuuguggcaaaaauaa

SEQ ID NO: 52486 - RNA, 32 nt, Homo Sapiens
gcuuccauggcagcuccuggcuccuaucuggg

SEQ ID NO: 52487 - RNA, 32 nt, Homo Sapiens
cccucauucccuccuugcacagaugcauacac

SEQ ID NO: 52488 - RNA, 32 nt, Homo Sapiens
auuuguacuuuugauaccaugcacuuuuggaa

SEQ ID NO: 52489 - RNA, 32 nt, Homo Sapiens
uucugaacuuggucugcagaccauccagagga

SEQ ID NO: 52490 - RNA, 32 nt, Homo Sapiens
gugaucauuuaaaauuugauaaugacuuuagu

SEQ ID NO: 52491 - RNA, 32 nt, Homo Sapiens
aucugcuccugcucucucuccuccagcgaccc

SEQ ID NO: 52492 - RNA, 32 nt, Homo Sapiens
cugcugggguggccagccaagaggacgugggg

SEQ ID NO: 52493 - RNA, 32 nt, Homo Sapiens
agacccggagagcaucgcgagggcggagcuga

SEQ ID NO: 52494 - RNA, 32 nt, Homo Sapiens
ggaaugauucuaugggguggggggucggggga

SEQ ID NO: 52495 - RNA, 32 nt, Homo Sapiens
aaccuuacauuaugcuaugaagaguaguaaua

SEQ ID NO: 52496 - RNA, 32 nt, Homo Sapiens
uauugcuacaguguuuuguacacgguuaaaac

SEQ ID NO: 52497 - RNA, 31 nt, Homo Sapiens
uguauuuguggaggaaaguccucucuuuugc

SEQ ID NO: 52498 - RNA, 29 nt, Homo Sapiens
cccauuuuucagaugagaaagcuaagaca

SEQ ID NO: 52499 - RNA, 32 nt, Homo Sapiens
uccuccuuucccugagcaccuucaucaccaga

SEQ ID NO: 52500 - RNA, 32 nt, Homo Sapiens
gccagugagcgaaucaagacuccacgaccugc

SEQ ID NO: 52501 - RNA, 32 nt, Homo Sapiens
uuucugccuaaaauuggcacauguaaguauug

SEQ ID NO: 52502 - RNA, 32 nt, Homo Sapiens
gguggaugaaucagaauuuucuuaauauggua

SEQ ID NO: 52503 - RNA, 32 nt, Homo Sapiens
caucugggucugauguucuguuccauuguaca

SEQ ID NO: 52504 - RNA, 32 nt, Homo Sapiens
uaagccgggggugccuggggcuggggggcgcu

SEQ ID NO: 52505 - RNA, 32 nt, Homo Sapiens
cacacacacacacgcagacacacacacacaca

SEQ ID NO: 52506 - RNA, 32 nt, Homo Sapiens
uguauuugcuaguucagccugauuucuagaag

SEQ ID NO: 52507 - RNA, 32 nt, Homo Sapiens
cucagaagaacaaagugaggaggcagaaggag

SEQ ID NO: 52508 - RNA, 32 nt, Homo Sapiens
aucccaguguccacacucuccuccagcucuga

SEQ ID NO: 52509 - RNA, 32 nt, Homo Sapiens
ugaacaucucaaaguuauauauacuggguauu

SEQ ID NO: 52510 - RNA, 32 nt, Homo Sapiens
accccccgccccugcuggccuuggugcuaagg

SEQ ID NO: 52511 - RNA, 32 nt, Homo Sapiens
ggcccuuaucauggugaugguccuaagugaaa

SEQ ID NO: 52512 - RNA, 32 nt, Homo Sapiens
aggagacaaaaaugguagugaagcuugugguu

SEQ ID NO: 52513 - RNA, 32 nt, Homo Sapiens
acacgggcaccugcagcugcugcuguggcugc

SEQ ID NO: 52514 - RNA, 32 nt, Homo Sapiens
cuccugaacuacaugauucuaauuggaauguu

SEQ ID NO: 52515 - RNA, 32 nt, Homo Sapiens
ugaauggauuguucuuguuucucagaugggua

SEQ ID NO: 52516 - RNA, 32 nt, Homo Sapiens
gcgccacccuccccauccucucaggccccagu

SEQ ID NO: 52517 - RNA, 32 nt, Homo Sapiens
agaaugcagagcugucaaaaaaugugucuuac

SEQ ID NO: 52518 - RNA, 32 nt, Homo Sapiens
uaacgugucucuucuugguagucucaguuuaa

SEQ ID NO: 52519 - RNA, 32 nt, Homo Sapiens
cccucucugcugucggaaccuucuggcccuuc

SEQ ID NO: 52520 - RNA, 32 nt, Homo Sapiens
uccugucauuucggauccugcuauagggaagg

SEQ ID NO: 52521 - RNA, 32 nt, Homo Sapiens
uauuuuaaugcaaucuaauacaaucagauuac

SEQ ID NO: 52522 - RNA, 32 nt, Homo Sapiens
uuugugaacuaugucuuacaugucuagaguuc

SEQ ID NO: 52523 - RNA, 32 nt, Homo Sapiens
gaacucgcggugacuuuuuuuuuuuuuuaaaa

SEQ ID NO: 52524 - RNA, 32 nt, Homo Sapiens
uagguucucuucaaauaauuaauugagcagac

SEQ ID NO: 52525 - RNA, 32 nt, Homo Sapiens
ugaucuuaagggucuauauauuugcaccuccu

SEQ ID NO: 52526 - RNA, 32 nt, Homo Sapiens
aauaguuuuucaggcagugcguuucucaggac

SEQ ID NO: 52527 - RNA, 32 nt, Homo Sapiens
cacuguccucucccuuucuggggucaucagcc

SEQ ID NO: 52528 - RNA, 32 nt, Homo Sapiens
aaaacguucagcagauuuuacacuuaauagug

SEQ ID NO: 52529 - RNA, 32 nt, Homo Sapiens
caaguuaaaaauuaagaguuguuucagugcua

SEQ ID NO: 52530 - RNA, 32 nt, Homo Sapiens
cuguuucucuacauccucuucagcaucuguug

SEQ ID NO: 52531 - RNA, 32 nt, Homo Sapiens
uucccucucucuuucccuuuggcagcugcaau

SEQ ID NO: 52532 - RNA, 32 nt, Homo Sapiens
cuugcaaauuaaaauauuguuuuauuuuagaa

SEQ ID NO: 52533 - RNA, 32 nt, Homo Sapiens
gcccuugccguggguccggcguuccucccagc

SEQ ID NO: 52534 - RNA, 32 nt, Homo Sapiens
cgucugagccccacguggcaggagccucuggg

SEQ ID NO: 52535 - RNA, 31 nt, Homo Sapiens
cccuggcuguggccucucagaauugggguga

SEQ ID NO: 52536 - RNA, 32 nt, Homo Sapiens
ggagucaggaucugaccgcgggcucugcccag

SEQ ID NO: 52537 - RNA, 32 nt, Homo Sapiens
uuuagggauucgagaagaaaauacauguggga

SEQ ID NO: 52538 - RNA, 32 nt, Homo Sapiens
uuuaaaaaaaggaaacaaaaaccaccccaaaa

SEQ ID NO: 52539 - RNA, 32 nt, Homo Sapiens
auauggggaaaacaccuuucccuucuaguuuu

SEQ ID NO: 52540 - RNA, 28 nt, Homo Sapiens
cccaugccgcccuccgggcugcggcugc

SEQ ID NO: 52541 - RNA, 32 nt, Homo Sapiens
cucccggucaggcaaacgcacacaucaaguuc

SEQ ID NO: 52542 - RNA, 32 nt, Homo Sapiens
uuugagguguagcacauggccuuagacuuuac

SEQ ID NO: 52543 - RNA, 32 nt, Homo Sapiens
ccccaaacucccagguucucacuuccuucuuc

SEQ ID NO: 52544 - RNA, 32 nt, Homo Sapiens
uaugacauuggacacuuuuuuauuauuccaaa

SEQ ID NO: 52545 - RNA, 32 nt, Homo Sapiens
acgccugagcuccgcgggaacccggcgcggcu

SEQ ID NO: 52546 - RNA, 32 nt, Homo Sapiens
aagaggggcacgccugggcugucccacaguuu

SEQ ID NO: 52547 - RNA, 32 nt, Homo Sapiens
cgcgcuuugcccgccuggcccugggacucuga

SEQ ID NO: 52548 - RNA, 32 nt, Homo Sapiens
guuggggaggggcgcgggagggcgcaugcgca

SEQ ID NO: 52549 - RNA, 32 nt, Homo Sapiens
aguacccuuucugauuguagagaaccuuguuu

SEQ ID NO: 52550 - RNA, 32 nt, Homo Sapiens
guguguguagcggaaaaggacaagacggugca

SEQ ID NO: 52551 - RNA, 32 nt, Homo Sapiens
acaagugugaccugggauuuuauuuaacacaa

SEQ ID NO: 52552 - RNA, 32 nt, Homo Sapiens
ucaucaaauguagcuuuaaaagaaauuaacaa

SEQ ID NO: 52553 - RNA, 32 nt, Homo Sapiens
uuuuauucuuuggguccuuccaucccacuggg

SEQ ID NO: 52554 - RNA, 32 nt, Homo Sapiens
guugguggaagucgcguugugcagguucgugc

SEQ ID NO: 52555 - RNA, 32 nt, Homo Sapiens
ucauguacuuuugcuguuuuacacagagaaac

SEQ ID NO: 52556 - RNA, 32 nt, Homo Sapiens
aagcauguuuugcauguaaaagccuaggucua

SEQ ID NO: 52557 - RNA, 32 nt, Homo Sapiens
gaucacuugagcucaguaguucaagaccagcc

SEQ ID NO: 52558 - RNA, 32 nt, Homo Sapiens
aauaaaaaaaaauuauguaaaucauuguaaga

SEQ ID NO: 52559 - RNA, 32 nt, Homo Sapiens
uggcggcccucgacuggagucgguugaguucc

SEQ ID NO: 52560 - RNA, 32 nt, Homo Sapiens
aucauggaauugaaauaaaauaauguauuuug

SEQ ID NO: 52561 - RNA, 32 nt, Homo Sapiens
acuuggugccugaguucucuccuaggcaagug

SEQ ID NO: 52562 - RNA, 32 nt, Homo Sapiens
agaggagaggaagaggguggagugggcucugc

SEQ ID NO: 52563 - RNA, 32 nt, Homo Sapiens
gacacacugcagacuccaccggcacccugcaa

SEQ ID NO: 52564 - RNA, 30 nt, Homo Sapiens
agaggcccuccugccacccaugcucaugug

SEQ ID NO: 52565 - RNA, 32 nt, Homo Sapiens
auacauuuuaauuaaacaaucuauauggaaca

SEQ ID NO: 52566 - RNA, 29 nt, Homo Sapiens
uauggguacuguauuugaaagcuguuagc

SEQ ID NO: 52567 - RNA, 32 nt, Homo Sapiens
uguacuucuaacuggacaguuuucccuuaguu

SEQ ID NO: 52568 - RNA, 32 nt, Homo Sapiens
uuaggccagccagcugaaggagacacugcagg

SEQ ID NO: 52569 - RNA, 32 nt, Homo Sapiens
uggacaaaggauuuuauucauuuuguugcauu

SEQ ID NO: 52570 - RNA, 32 nt, Homo Sapiens
auaguaauauaaaaagucuuuucaguguguga

SEQ ID NO: 52571 - RNA, 25 nt, Homo Sapiens
augaccacauucaaggagggacuga

SEQ ID NO: 52572 - RNA, 32 nt, Homo Sapiens
uuucacugacuucuagcacgguugaacaucuu

SEQ ID NO: 52573 - RNA, 32 nt, Homo Sapiens
gcuucggagaaccugauucugagacuccagca

SEQ ID NO: 52574 - RNA, 32 nt, Homo Sapiens
ccccaguccuagacauaacuauggaaaaauua

SEQ ID NO: 52575 - RNA, 32 nt, Homo Sapiens
gggaaacagcaaucuuccuuaauagcauuuca

SEQ ID NO: 52576 - RNA, 32 nt, Homo Sapiens
cuugauacgauuugcaccuuucuguuuuccug

SEQ ID NO: 52577 - RNA, 30 nt, Homo Sapiens
agcuuugauaaaaugggggagauuuaauca

SEQ ID NO: 52578 - RNA, 32 nt, Homo Sapiens
aaguagaaucauauaguauuuguccuuuugug

SEQ ID NO: 52579 - RNA, 31 nt, Homo Sapiens
uagauggaggggguggggacggccuguaagc

SEQ ID NO: 52580 - RNA, 32 nt, Homo Sapiens
ucagccgugcccuccgccccucagguucuuuu

SEQ ID NO: 52581 - RNA, 32 nt, Homo Sapiens
agccccagccccacccucugcccuucagccua

SEQ ID NO: 52582 - RNA, 32 nt, Homo Sapiens
aguucugccucgcuucccggcgcggucgcagc

SEQ ID NO: 52583 - RNA, 32 nt, Homo Sapiens
agccugaccaacauggugaaaccccguuucua

SEQ ID NO: 52584 - RNA, 32 nt, Homo Sapiens
ugacauucaaaaaaaaucaugggacugaauau

SEQ ID NO: 52585 - RNA, 32 nt, Homo Sapiens
cguucagaaaucagcuggccaagugacuccau

SEQ ID NO: 52586 - RNA, 32 nt, Homo Sapiens
accauuacacuccagccugggcgacaagaaca

SEQ ID NO: 52587 - RNA, 31 nt, Homo Sapiens
ucacugaaauaaaagcuauauaagauucaua

SEQ ID NO: 52588 - RNA, 32 nt, Homo Sapiens
accuacuuuucucugggacaaggauaaaggaa

SEQ ID NO: 52589 - RNA, 32 nt, Homo Sapiens
aaucaaggccccagaguguguaugcuuccagg

SEQ ID NO: 52590 - RNA, 32 nt, Homo Sapiens
cauuucuccuaccauagcacaaauccuagcgg

SEQ ID NO: 52591 - RNA, 32 nt, Homo Sapiens
ggaauuaaaacagguucagagaagaggagaag

SEQ ID NO: 52592 - RNA, 32 nt, Homo Sapiens
ccuuaaucaaccccagcccauguccccuguuc

SEQ ID NO: 52593 - RNA, 32 nt, Homo Sapiens
gcacucacugaugagccuggaauuucucacag

SEQ ID NO: 52594 - RNA, 32 nt, Homo Sapiens
acagucuuuguacaguguaaauagaucaugga

SEQ ID NO: 52595 - RNA, 32 nt, Homo Sapiens
aggauuuacgguuugugaaaaauguguacugu

SEQ ID NO: 52596 - RNA, 32 nt, Homo Sapiens
gccacaaucaaguuucuuauuauuuuccaggc

SEQ ID NO: 52597 - RNA, 32 nt, Homo Sapiens
augaaaugaugaagggucuuugaaauucucua

SEQ ID NO: 52598 - RNA, 32 nt, Homo Sapiens
aggauccugggugcugucugggcccgcucccc

SEQ ID NO: 52599 - RNA, 32 nt, Homo Sapiens
ccacgugcagaagaagugcggcugggggcaca

SEQ ID NO: 52600 - RNA, 32 nt, Homo Sapiens
gagccaucucuuugcccuuccagaugucugac

SEQ ID NO: 52601 - RNA, 32 nt, Homo Sapiens
cucagcccauccccaccaccccugacaucgag

SEQ ID NO: 52602 - RNA, 32 nt, Homo Sapiens
gcccacgccucccagaccccagaacggagcuu

SEQ ID NO: 52603 - RNA, 32 nt, Homo Sapiens
ccugccccgcccaggcugggacaggcugcagg

SEQ ID NO: 52604 - RNA, 32 nt, Homo Sapiens
cugucucagggugaggugcuugagucuccaac

SEQ ID NO: 52605 - RNA, 32 nt, Homo Sapiens
acacucaccauauaaacuugcauuugagcuug

SEQ ID NO: 52606 - RNA, 32 nt, Homo Sapiens
agauggucaggagaugagcaaaggauugguau

SEQ ID NO: 52607 - RNA, 32 nt, Homo Sapiens
agcagacuccugggccugaugugcuagcugcc

SEQ ID NO: 52608 - RNA, 32 nt, Homo Sapiens
cccuuauuuacucuaaacaguguuaugccuuu

SEQ ID NO: 52609 - RNA, 32 nt, Homo Sapiens
agaaauguaaauuauuucaaguacuucagggu

SEQ ID NO: 52610 - RNA, 32 nt, Homo Sapiens
agaaauaaaguacacgauaaacguaaugugcu

SEQ ID NO: 52611 - RNA, 32 nt, Homo Sapiens
guaugcaaaaccugaaaucagaugccuaugua

SEQ ID NO: 52612 - RNA, 32 nt, Homo Sapiens
cacuguucuuuuccccuccacccaggccuccc

SEQ ID NO: 52613 - RNA, 32 nt, Homo Sapiens
uauauuguuuaaaagauauuucagucuaggaa

SEQ ID NO: 52614 - RNA, 32 nt, Homo Sapiens
aagaggaauaguauuuuuuuuaauaguuguau

SEQ ID NO: 52615 - RNA, 32 nt, Homo Sapiens
augagccaggagaacaaacuaauuccaaaaaa

SEQ ID NO: 52616 - RNA, 32 nt, Homo Sapiens
gcuuugucagugcgcguagaugucaauaaaug

SEQ ID NO: 52617 - RNA, 32 nt, Homo Sapiens
ggccgcgcccuucggucagcuucucucccuuu

SEQ ID NO: 52618 - RNA, 32 nt, Homo Sapiens
acuuguuugguaguuagccaucuaaugcuugu

SEQ ID NO: 52619 - RNA, 32 nt, Homo Sapiens
accgcaccgcgcgggcggccauggagcgagcc

SEQ ID NO: 52620 - RNA, 32 nt, Homo Sapiens
uuauuucugauuuccuuuuucauuuuaagugg

SEQ ID NO: 52621 - RNA, 32 nt, Homo Sapiens
cuccuucaggugggagcagcucuuugaggcca

SEQ ID NO: 52622 - RNA, 32 nt, Homo Sapiens
uugcaguuaacagugauauuuugaaggcacau

SEQ ID NO: 52623 - RNA, 32 nt, Homo Sapiens
cgcggguucuguaaagacacguggagaagauu

SEQ ID NO: 52624 - RNA, 32 nt, Homo Sapiens
acuauaaaaugguagcuuccagcauuuugucc

SEQ ID NO: 52625 - RNA, 32 nt, Homo Sapiens
acacacacauacaagcgggcacgacgcguucg

SEQ ID NO: 52626 - RNA, 32 nt, Homo Sapiens
ggacuaaaaauauuuaauugcugaguaaacug

SEQ ID NO: 52627 - RNA, 32 nt, Homo Sapiens
ggagacgccgggaggccacgggugcugcugac

SEQ ID NO: 52628 - RNA, 32 nt, Homo Sapiens
gaugaaaucacagaucuuauggaucugagaca

SEQ ID NO: 52629 - RNA, 32 nt, Homo Sapiens
guuucuuuugcuuaggaaauugcucauaaucu

SEQ ID NO: 52630 - RNA, 32 nt, Homo Sapiens
auauguugcauaguauuuugcauucuguaaau

SEQ ID NO: 52631 - RNA, 32 nt, Homo Sapiens
gaaugucagcugaugguucuuauuuaagguuu

SEQ ID NO: 52632 - RNA, 32 nt, Homo Sapiens
gagagaaggagagccugcagacagaggccucc

SEQ ID NO: 52633 - RNA, 32 nt, Homo Sapiens
gucgagaacaucuuguaagccuucauuaaggg

SEQ ID NO: 52634 - RNA, 32 nt, Homo Sapiens
cggccagaggaaccccgagucccggcccaggc

SEQ ID NO: 52635 - RNA, 32 nt, Homo Sapiens
aaaauugcugcuagucaaaucuuuuggaaaga

SEQ ID NO: 52636 - RNA, 32 nt, Homo Sapiens
ucuaaacucacccaccaagauggcaggugugg

SEQ ID NO: 52637 - RNA, 32 nt, Homo Sapiens
ggacgaauucagauccaaccccugccccgcgg

SEQ ID NO: 52638 - RNA, 32 nt, Homo Sapiens
aggaugaggaagaggacuuugggggacgggcu

SEQ ID NO: 52639 - RNA, 32 nt, Homo Sapiens
gccggacccggcucugcccccgcgcccaagcc

SEQ ID NO: 52640 - RNA, 32 nt, Homo Sapiens
ucagucauuccuucuccuuuccagggugcugg

SEQ ID NO: 52641 - RNA, 32 nt, Homo Sapiens
accuggugcagggccaguggggaggcagcggc

SEQ ID NO: 52642 - RNA, 30 nt, Homo Sapiens
gcuggcaucuugcucaccgcccugauucug

SEQ ID NO: 52643 - RNA, 32 nt, Homo Sapiens
cuguuccuuuuggaguugacaugcauguggau

SEQ ID NO: 52644 - RNA, 32 nt, Homo Sapiens
guguuugaugugucccaagaccuccugaagga

SEQ ID NO: 52645 - RNA, 32 nt, Homo Sapiens
accggcugaggguggggaagcgcagggccaag

SEQ ID NO: 52646 - RNA, 32 nt, Homo Sapiens
agcugcccaucccauaaccaaagagcucaaug

SEQ ID NO: 52647 - RNA, 30 nt, Homo Sapiens
gcccaacauguguagcaccaguggguguga

SEQ ID NO: 52648 - RNA, 32 nt, Homo Sapiens
uuacaagcugucucucugacaccagugguaaa

SEQ ID NO: 52649 - RNA, 32 nt, Homo Sapiens
cagucuuuuaucaaguuuugacgguuuaugcu

SEQ ID NO: 52650 - RNA, 32 nt, Homo Sapiens
agaaauuucuaauguaaagaugaugauuuuga

SEQ ID NO: 52651 - RNA, 32 nt, Homo Sapiens
acaaguaccauuuuugugcaugauuacacucc

SEQ ID NO: 52652 - RNA, 32 nt, Homo Sapiens
uaggauuuuguacaguuuagagaagcgauuau

SEQ ID NO: 52653 - RNA, 32 nt, Homo Sapiens
aaugugcauguuguagcaaacauuucuguaaa

SEQ ID NO: 52654 - RNA, 32 nt, Homo Sapiens
aggagcugcagguggggggcucagccugcacc

SEQ ID NO: 52655 - RNA, 32 nt, Homo Sapiens
gaaagccucuccuggggccacuguugggggug

SEQ ID NO: 52656 - RNA, 32 nt, Homo Sapiens
aauauaaaucauccaagggugaacacgcugca

SEQ ID NO: 52657 - RNA, 32 nt, Homo Sapiens
uccaucuguggauagaaccccuggcaguguug

SEQ ID NO: 52658 - RNA, 32 nt, Homo Sapiens
caccuuccaaacaaaaaccugccauuuucacc

SEQ ID NO: 52659 - RNA, 32 nt, Homo Sapiens
aauccucuggaacauauucugucuggguuuuu

SEQ ID NO: 52660 - RNA, 32 nt, Homo Sapiens
acaggacugcgccagccggccggcgccucaac

SEQ ID NO: 52661 - RNA, 32 nt, Homo Sapiens
ucccaaauuauaagagcagccucaccaggcag

SEQ ID NO: 52662 - RNA, 32 nt, Homo Sapiens
auuuucccugaacauuuucgcugaacuagggc

SEQ ID NO: 52663 - RNA, 32 nt, Homo Sapiens
aaguaauccucccgccucgguuuuccaaagag

SEQ ID NO: 52664 - RNA, 32 nt, Homo Sapiens
auuuguuugugauuucuauauagcuauuagag

SEQ ID NO: 52665 - RNA, 32 nt, Homo Sapiens
uuuuggauggccauauaaugaaauagaaaacg

SEQ ID NO: 52666 - RNA, 28 nt, Homo Sapiens
cuggcaguggcuagagggaugagacguu

SEQ ID NO: 52667 - RNA, 32 nt, Homo Sapiens
agucuggcccacauuuucaaccuaguagaaca

SEQ ID NO: 52668 - RNA, 32 nt, Homo Sapiens
uuacguggaaaaccaaaagaucuucccuuacu

SEQ ID NO: 52669 - RNA, 32 nt, Homo Sapiens
guuuccugcgcccuuucauuuuuuccuacucu

SEQ ID NO: 52670 - RNA, 32 nt, Homo Sapiens
aagcuuuugucaaauaaacugcuacaucaacc

SEQ ID NO: 52671 - RNA, 32 nt, Homo Sapiens
cggucagcagugcugcagacacaggacagaac

SEQ ID NO: 52672 - RNA, 32 nt, Homo Sapiens
aaguacuaauuuucuuuuuaucaaguagaaaa

SEQ ID NO: 52673 - RNA, 32 nt, Homo Sapiens
agaacaaagcuaaggcaauuccuauugcuucc

SEQ ID NO: 52674 - RNA, 32 nt, Homo Sapiens
uuugaagcaauuucccaaguguguguuuguuu

SEQ ID NO: 52675 - RNA, 32 nt, Homo Sapiens
ccugaaagaaggcaacucuacugucgacugcc

SEQ ID NO: 52676 - RNA, 32 nt, Homo Sapiens
ugaccugaggcacaauuauugcuaauuggaca

SEQ ID NO: 52677 - RNA, 32 nt, Homo Sapiens
ugauguccuuguacugucuuaaguuaguguug

SEQ ID NO: 52678 - RNA, 32 nt, Homo Sapiens
ggcccugagucugggcagcugucccuugcuug

SEQ ID NO: 52679 - RNA, 32 nt, Homo Sapiens
cucaaucucuagccccucuccugcucucagag

SEQ ID NO: 52680 - RNA, 32 nt, Homo Sapiens
gaaacuuguuaaaugagauuucaacugacuua

SEQ ID NO: 52681 - RNA, 32 nt, Homo Sapiens
acagccaaaaauucucaagaugcagguucuug

SEQ ID NO: 52682 - RNA, 32 nt, Homo Sapiens
cccccaucaccugccgcccccaucaaacaugu

SEQ ID NO: 52683 - RNA, 32 nt, Homo Sapiens
uuucaaacuauuugagaggagaauuaaagaca

SEQ ID NO: 52684 - RNA, 31 nt, Homo Sapiens
gacccauguggcuuugcagugcuguucgucc

SEQ ID NO: 52685 - RNA, 32 nt, Homo Sapiens
acuuccaaaagcaaugcuggccaggcacagug

SEQ ID NO: 52686 - RNA, 32 nt, Homo Sapiens
ugccuccaucgugggaaucauugucuuccugu

SEQ ID NO: 52687 - RNA, 32 nt, Homo Sapiens
aagaucagccuuucccaagguauacuuuuaaa

SEQ ID NO: 52688 - RNA, 32 nt, Homo Sapiens
aacaucugucuggccaggcugcggcacgagga

SEQ ID NO: 52689 - RNA, 32 nt, Homo Sapiens
ccaacccagggaugcaggacagacacacagac

SEQ ID NO: 52690 - RNA, 32 nt, Homo Sapiens
gucacugccuacugccugggggcucuagucau

SEQ ID NO: 52691 - RNA, 32 nt, Homo Sapiens
cacgagugggccgcggaugcagcggccggggg

SEQ ID NO: 52692 - RNA, 32 nt, Homo Sapiens
ucgcuggaagcagcuggaggcuccaguucuca

SEQ ID NO: 52693 - RNA, 32 nt, Homo Sapiens
gacuguccugguuggccacgggcccugaggau

SEQ ID NO: 52694 - RNA, 32 nt, Homo Sapiens
aagauaaagggauugugaaaagagcauuuaua

SEQ ID NO: 52695 - RNA, 32 nt, Homo Sapiens
uaaaaaggcuuuuaaaauuuuguuuguuuuaa

SEQ ID NO: 52696 - RNA, 32 nt, Homo Sapiens
gcccucccaaagaggcccgcccugcccgggcu

SEQ ID NO: 52697 - RNA, 32 nt, Homo Sapiens
aucacagcccucacuaauaacauugcugucaa

SEQ ID NO: 52698 - RNA, 32 nt, Homo Sapiens
aaagcaauuuucugcugaaauucagaaagaac

SEQ ID NO: 52699 - RNA, 32 nt, Homo Sapiens
cagguggggagucagggaccccugcccuuguc

SEQ ID NO: 52700 - RNA, 32 nt, Homo Sapiens
aggcauagacaucccugguccauccuuucugu

SEQ ID NO: 52701 - RNA, 32 nt, Homo Sapiens
uguuuauaaaugacuguacugaauuuaaaacc

SEQ ID NO: 52702 - RNA, 32 nt, Homo Sapiens
uggaagccccaggaaccucucaaggcccagcu

SEQ ID NO: 52703 - RNA, 32 nt, Homo Sapiens
uuguauacaucauaaaauagucuuuugcaggg

SEQ ID NO: 52704 - RNA, 32 nt, Homo Sapiens
uagauugacuauuuauacaaaugggggcggcu

SEQ ID NO: 52705 - RNA, 32 nt, Homo Sapiens
accuggaccuggccaaggguccugucaucccu

SEQ ID NO: 52706 - RNA, 32 nt, Homo Sapiens
augggauuccuccaugagugcagauuggcucc

SEQ ID NO: 52707 - RNA, 32 nt, Homo Sapiens
guccuaucucccccaaaccauaccucagcaca

SEQ ID NO: 52708 - RNA, 32 nt, Homo Sapiens
ggaaaggacaacaacagacaugucuuaguacu

SEQ ID NO: 52709 - RNA, 32 nt, Homo Sapiens
aaugcuucaguaaaauguuauaaaacaugagg

SEQ ID NO: 52710 - RNA, 32 nt, Homo Sapiens
ugauuucuguuguuauuccuauuggagcuaag

SEQ ID NO: 52711 - RNA, 32 nt, Homo Sapiens
gagaaacuuaggagccugguagaugaagcaga

SEQ ID NO: 52712 - RNA, 32 nt, Homo Sapiens
aagcugggccccagcccacccuccugucuucc

SEQ ID NO: 52713 - RNA, 32 nt, Homo Sapiens
ccaccuuucacucaccugaggacuccacagaa

SEQ ID NO: 52714 - RNA, 32 nt, Homo Sapiens
gggggcagcugugucaucuuucuggggcccag

SEQ ID NO: 52715 - RNA, 32 nt, Homo Sapiens
gcucuuauuucaucauucacuucacugugcug

SEQ ID NO: 52716 - RNA, 28 nt, Homo Sapiens
gagaugugguuuuguuauggggccuacc

SEQ ID NO: 52717 - RNA, 32 nt, Homo Sapiens
ccccucucagcuguagcugcaccacccccgcu

SEQ ID NO: 52718 - RNA, 29 nt, Homo Sapiens
uaaaguuuuaaauauauacucagacauuc

SEQ ID NO: 52719 - RNA, 32 nt, Homo Sapiens
cgacagagggaagaaaagagcuuucuucccga

SEQ ID NO: 52720 - RNA, 32 nt, Homo Sapiens
augagugcaccuauuacuacugugcgagaauu

SEQ ID NO: 52721 - RNA, 30 nt, Homo Sapiens
ggcagcagcgggcgcgcgggucagcgcuca

SEQ ID NO: 52722 - RNA, 32 nt, Homo Sapiens
uaucacuuuauuuuugaauauuacucuugcuc

SEQ ID NO: 52723 - RNA, 32 nt, Homo Sapiens
uguauagaaaggaaacauuguguuacuuaaug

SEQ ID NO: 52724 - RNA, 32 nt, Homo Sapiens
uguguaauuuuaaagucaguguugaauuuuau

SEQ ID NO: 52725 - RNA, 32 nt, Homo Sapiens
ugccuccauuuuccucugcugcauggccccag

SEQ ID NO: 52726 - RNA, 32 nt, Homo Sapiens
uugcccuguuuuuguuuuuuuaguuuguuauc

SEQ ID NO: 52727 - RNA, 32 nt, Homo Sapiens
agcucugcuaccugguaugaaggaauacacau

SEQ ID NO: 52728 - RNA, 32 nt, Homo Sapiens
aguuacuacacaugcuaggcuuucucaguggg

SEQ ID NO: 52729 - RNA, 32 nt, Homo Sapiens
acuucagagugauguuaucuaaguuuaaguag

SEQ ID NO: 52730 - RNA, 32 nt, Homo Sapiens
acuuuguagaggcuugaagaaaaacuagaaua

SEQ ID NO: 52731 - RNA, 32 nt, Homo Sapiens
augcaaauauagucucaccauuccuaggagcu

SEQ ID NO: 52732 - RNA, 32 nt, Homo Sapiens
cugguuccuuuggagagggcuggguuaccugg

SEQ ID NO: 52733 - RNA, 32 nt, Homo Sapiens
gcugcugccagccuucuugcugcuaucaacuc

SEQ ID NO: 52734 - RNA, 32 nt, Homo Sapiens
guaucuguugaaugccucuuugugccaggcau

SEQ ID NO: 52735 - RNA, 32 nt, Homo Sapiens
aggcaucauauuauuuuaaauguuacuauuac

SEQ ID NO: 52736 - RNA, 32 nt, Homo Sapiens
gauacugacaacagaguugaccuggcccagga

SEQ ID NO: 52737 - RNA, 32 nt, Homo Sapiens
ucuuccuuuuaaaaauaaaauuuuauggccgg

SEQ ID NO: 52738 - RNA, 32 nt, Homo Sapiens
auuuugaugcagcauuugauaaugauaaaaca

SEQ ID NO: 52739 - RNA, 32 nt, Homo Sapiens
aaaaccccgcucugucuuuguuuaaugcucag

SEQ ID NO: 52740 - RNA, 32 nt, Homo Sapiens
ucgcggccccugggagcugaucuggacacccu

SEQ ID NO: 52741 - RNA, 32 nt, Homo Sapiens
uuuacugauuccuggugaguauauuaaaaagu

SEQ ID NO: 52742 - RNA, 32 nt, Homo Sapiens
cauuauuuuuuacuuuuggguucaccuagauc

SEQ ID NO: 52743 - RNA, 32 nt, Homo Sapiens
uuugcagaaaaauuauuuuugcucucugggaa

SEQ ID NO: 52744 - RNA, 32 nt, Homo Sapiens
auucaaaguauuuuaucuuuuaucuagaaucc

SEQ ID NO: 52745 - RNA, 31 nt, Homo Sapiens
gaaauguguccagucccaggaguccuucagc

SEQ ID NO: 52746 - RNA, 32 nt, Homo Sapiens
gcuccuucuguguaagccugcccgcagccuua

SEQ ID NO: 52747 - RNA, 32 nt, Homo Sapiens
cagaacacaggugucgugaaaacuaccccuaa

SEQ ID NO: 52748 - RNA, 32 nt, Homo Sapiens
agcucuguguauugguggauagaugcagaaac

SEQ ID NO: 52749 - RNA, 32 nt, Homo Sapiens
uucuuuguuucuuuuuacagcauugucuuugc

SEQ ID NO: 52750 - RNA, 32 nt, Homo Sapiens
agucuacucuugcuagugagugccaagaacca

SEQ ID NO: 52751 - RNA, 32 nt, Homo Sapiens
ggaucauggcauuggaguucccgggcuugcag

SEQ ID NO: 52752 - RNA, 32 nt, Homo Sapiens
ugcccuggugcguccuggaggcguccccagga

SEQ ID NO: 52753 - RNA, 32 nt, Homo Sapiens
agggagcaugucaggaccaagccuggagcccu

SEQ ID NO: 52754 - RNA, 32 nt, Homo Sapiens
ucccacuuagcaccuacugugugcuaggaacu

SEQ ID NO: 52755 - RNA, 32 nt, Homo Sapiens
uaagaagaagaaaacuaagaagaucaaagaga

SEQ ID NO: 52756 - RNA, 32 nt, Homo Sapiens
aggaauggcuggaaugggagggggcauaccug

SEQ ID NO: 52757 - RNA, 32 nt, Homo Sapiens
cggcuggccgggcugaggggcuccucacuucc

SEQ ID NO: 52758 - RNA, 32 nt, Homo Sapiens
aaauuuuucucauuuuaaaaauugugguaaaa

SEQ ID NO: 52759 - RNA, 32 nt, Homo Sapiens
guaaucgcuggcgugccccgcgcacaggaucc

SEQ ID NO: 52760 - RNA, 32 nt, Homo Sapiens
gggcgaguuacggggacgaccugcgggagcac

SEQ ID NO: 52761 - RNA, 32 nt, Homo Sapiens
ccagcuuauuuuuuguuucucuucuaugucaa

SEQ ID NO: 52762 - RNA, 32 nt, Homo Sapiens
aaacacaaauacucucacggggcauggagguu

SEQ ID NO: 52763 - RNA, 32 nt, Homo Sapiens
uaugccuucuauauaucuccuggcgaccugcc

SEQ ID NO: 52764 - RNA, 32 nt, Homo Sapiens
ugaucccacccccuccucccccaguguccccu

SEQ ID NO: 52765 - RNA, 32 nt, Homo Sapiens
uaaguauguacaaauaaguuaauaguguaaau

SEQ ID NO: 52766 - RNA, 32 nt, Homo Sapiens
uuaucuuuuaauuaugugcucuuaauauuuga

SEQ ID NO: 52767 - RNA, 32 nt, Homo Sapiens
caaccucagcuuaaaaaguugaaguaucggcu

SEQ ID NO: 52768 - RNA, 32 nt, Homo Sapiens
guggaaacuuuagaaauugaaggaauuuuucc

SEQ ID NO: 52769 - RNA, 32 nt, Homo Sapiens
ucuuaaggggaugcuuccaggggggugaguuc

SEQ ID NO: 52770 - RNA, 32 nt, Homo Sapiens
ggcugggaugagaagaguguugcuggcuugag

SEQ ID NO: 52771 - RNA, 32 nt, Homo Sapiens
cccagcugccagcccagcuccgcugcuaucuu

SEQ ID NO: 52772 - RNA, 32 nt, Homo Sapiens
accgcggcgaggggaucgagggcggccuagcg

SEQ ID NO: 52773 - RNA, 32 nt, Homo Sapiens
cuauagaaaccucagcuagugugccgaggaau

SEQ ID NO: 52774 - RNA, 32 nt, Homo Sapiens
aggauccaggaugccaaaaauaugugugaaca

SEQ ID NO: 52775 - RNA, 32 nt, Homo Sapiens
uuagcuuaagccccaagaagugagguggguug

SEQ ID NO: 52776 - RNA, 32 nt, Homo Sapiens
ccuucuacucuggcaccacucuccaggcugcc

SEQ ID NO: 52777 - RNA, 32 nt, Homo Sapiens
cugaggucaggaguuugagaccaaccuaguca

SEQ ID NO: 52778 - RNA, 32 nt, Homo Sapiens
aaaauacauguuuguauaucuacauuuacgaa

SEQ ID NO: 52779 - RNA, 32 nt, Homo Sapiens
cauccccaucuucauggaaccagggcuaaagg

SEQ ID NO: 52780 - RNA, 32 nt, Homo Sapiens
uauuaacaagaaucugugaaaaccacauuuaa

SEQ ID NO: 52781 - RNA, 32 nt, Homo Sapiens
ugguugcugugaugauacccagugucccucug

SEQ ID NO: 52782 - RNA, 32 nt, Homo Sapiens
gauggagagauaagguuaaguguuuucuuugg

SEQ ID NO: 52783 - RNA, 32 nt, Homo Sapiens
ggaguggccuugauggccggccucgaaggcca

SEQ ID NO: 52784 - RNA, 32 nt, Homo Sapiens
ggcaccaugggcccgggcggugcccuccaugc

SEQ ID NO: 52785 - RNA, 32 nt, Homo Sapiens
auggacuccagaugaaaaugccaaauugucau

SEQ ID NO: 52786 - RNA, 32 nt, Homo Sapiens
agccagcccugcagcccuccccacccggcauc

SEQ ID NO: 52787 - RNA, 32 nt, Homo Sapiens
ggagauagcugcaaccaaaaaagaaauaaaua

SEQ ID NO: 52788 - RNA, 31 nt, Homo Sapiens
ucaucuugacagagccugccccagcgcugac

SEQ ID NO: 52789 - RNA, 32 nt, Homo Sapiens
ccgugccccccgcgccccguucggcacccacc

SEQ ID NO: 52790 - RNA, 32 nt, Homo Sapiens
gaagcgccgggcgagcccacugugcggccguc

SEQ ID NO: 52791 - RNA, 32 nt, Homo Sapiens
gcgaagccucaaauacaauacuuauuuuauuu

SEQ ID NO: 52792 - RNA, 32 nt, Homo Sapiens
agauguccaaaguaaacugucuguggagucga

SEQ ID NO: 52793 - RNA, 32 nt, Homo Sapiens
ccauccauguguuuuuaccauuugguuuaaua

SEQ ID NO: 52794 - RNA, 32 nt, Homo Sapiens
guaacuagaucuguauuauaaaacaugauaaa

SEQ ID NO: 52795 - RNA, 30 nt, Homo Sapiens
ugucuugucugugggacaguugccuccccc

SEQ ID NO: 52796 - RNA, 32 nt, Homo Sapiens
gccuuugggagguggugagaucaugagggugg

SEQ ID NO: 52797 - RNA, 32 nt, Homo Sapiens
cuuuacugaggguggcagugagcuggcacuuu

SEQ ID NO: 52798 - RNA, 32 nt, Homo Sapiens
cuuguucacccuaggaaggggauuguauauau

SEQ ID NO: 52799 - RNA, 32 nt, Homo Sapiens
caugagauauauuuuuaaugauguuagguuug

SEQ ID NO: 52800 - RNA, 32 nt, Homo Sapiens
cuggaggggcaggcugcguggaggagccagca

SEQ ID NO: 52801 - RNA, 32 nt, Homo Sapiens
auaaccacgacacaacucuauuacugauacua

SEQ ID NO: 52802 - RNA, 32 nt, Homo Sapiens
ggaguggggcucuggugaccgaagguugucca

SEQ ID NO: 52803 - RNA, 32 nt, Homo Sapiens
ugguauaaaaacauagacuggaggagguaauc

SEQ ID NO: 52804 - RNA, 29 nt, Homo Sapiens
acugccguggacucgaggacgcuggucgc

SEQ ID NO: 52805 - RNA, 32 nt, Homo Sapiens
caaguaagaucccuguugcaagaaauucauuu

SEQ ID NO: 52806 - RNA, 32 nt, Homo Sapiens
auuuguugaauauugguaauuaaaagacucca

SEQ ID NO: 52807 - RNA, 30 nt, Homo Sapiens
aggcucccuggcacggccuaacucugcgga

SEQ ID NO: 52808 - RNA, 32 nt, Homo Sapiens
agggagcggugcggaggcucugcucggaucga

SEQ ID NO: 52809 - RNA, 32 nt, Homo Sapiens
ggugccugcagccuuccacuccugccccgccu

SEQ ID NO: 52810 - RNA, 32 nt, Homo Sapiens
ucaggagaucgacaccauccuggcuaacacgg

SEQ ID NO: 52811 - RNA, 32 nt, Homo Sapiens
gucagagguuccauauuuguaauagcaaaugg

SEQ ID NO: 52812 - RNA, 32 nt, Homo Sapiens
uucuccuagcuguggcuucucuagguucuagg

SEQ ID NO: 52813 - RNA, 32 nt, Homo Sapiens
gaguugaggguggguggagggguuugcagugu

SEQ ID NO: 52814 - RNA, 32 nt, Homo Sapiens
gcagcgcggcccccuccucccaggggagagua

SEQ ID NO: 52815 - RNA, 32 nt, Homo Sapiens
acacacgugcgugcgagcacacacacacauac

SEQ ID NO: 52816 - RNA, 32 nt, Homo Sapiens
cugcccagauggucggggccccgggcaacaga

SEQ ID NO: 52817 - RNA, 32 nt, Homo Sapiens
ugaagcuuucccuuuuuugcuuuuaacaauuu

SEQ ID NO: 52818 - RNA, 32 nt, Homo Sapiens
auucacgccugggcgccuccgccgggcuccgg

SEQ ID NO: 52819 - RNA, 32 nt, Homo Sapiens
uggaaagcugucuuccagcagccuccguggcc

SEQ ID NO: 52820 - RNA, 32 nt, Homo Sapiens
gagguacgagaugcccaaguuugucaguugag

SEQ ID NO: 52821 - RNA, 32 nt, Homo Sapiens
gagcaucugugggcugacguuucuggcauggu

SEQ ID NO: 52822 - RNA, 31 nt, Homo Sapiens
gcccgggacugcgcagcgccccgcgugccga

SEQ ID NO: 52823 - RNA, 32 nt, Homo Sapiens
uuugcucguccuucuccacacccagcaccccg

SEQ ID NO: 52824 - RNA, 32 nt, Homo Sapiens
agagccccgcucucuaccgcccggccccagca

SEQ ID NO: 52825 - RNA, 31 nt, Homo Sapiens
cugauacaagaggucaaugacuuugaaaaua

SEQ ID NO: 52826 - RNA, 32 nt, Homo Sapiens
gugucccccguggcgcuuugcuugccaccgag

SEQ ID NO: 52827 - RNA, 32 nt, Homo Sapiens
cuucaggguuuuuucuuccuucaaauuuugga

SEQ ID NO: 52828 - RNA, 32 nt, Homo Sapiens
gaugucgcuccccauucgcccagcuguguagg

SEQ ID NO: 52829 - RNA, 32 nt, Homo Sapiens
gcggguuagcccaggggcccaagcccuggauu

SEQ ID NO: 52830 - RNA, 32 nt, Homo Sapiens
guaauucuaugcaaaaucauagccaaaacuag

SEQ ID NO: 52831 - RNA, 32 nt, Homo Sapiens
cauugaacuacagaaaaauguucugugguuuc

SEQ ID NO: 52832 - RNA, 30 nt, Homo Sapiens
ucugauugccucuuuggagaagcucaucag

SEQ ID NO: 52833 - RNA, 32 nt, Homo Sapiens
aguggugcuccugcaggcugcccguuaagaug

SEQ ID NO: 52834 - RNA, 32 nt, Homo Sapiens
gacgaauuaaaaauaacauuuuuuaagcgaca

SEQ ID NO: 52835 - RNA, 32 nt, Homo Sapiens
gaggaaggggccccauggcagcuccugaccuu

SEQ ID NO: 52836 - RNA, 32 nt, Homo Sapiens
uaguuguagaauaaaacuuaugagugacaucu

SEQ ID NO: 52837 - RNA, 32 nt, Homo Sapiens
ugacugguguaugucugcgcaaaccuguuuca

SEQ ID NO: 52838 - RNA, 32 nt, Homo Sapiens
gauugugagaacaguaaguguggcccaaagaa

SEQ ID NO: 52839 - RNA, 32 nt, Homo Sapiens
gucauucuugucacaaaagugccacuaaaaca

SEQ ID NO: 52840 - RNA, 32 nt, Homo Sapiens
gagcagagggucauacacagggcuggaccuca

SEQ ID NO: 52841 - RNA, 32 nt, Homo Sapiens
ccgccaucuccagccggccaccucaggccccu

SEQ ID NO: 52842 - RNA, 32 nt, Homo Sapiens
ccucaacuuaggaugggcaacugugucaagua

SEQ ID NO: 52843 - RNA, 32 nt, Homo Sapiens
cuucccugccgcauccucuccccucaggaagg

SEQ ID NO: 52844 - RNA, 32 nt, Homo Sapiens
agcaaagaugcuuuuuacuuugcugggauguu

SEQ ID NO: 52845 - RNA, 32 nt, Homo Sapiens
ugacguagaaagauccuucgggugcuggaagu

SEQ ID NO: 52846 - RNA, 32 nt, Homo Sapiens
aucugcaguuauccaggagaaaguauaauggc

SEQ ID NO: 52847 - RNA, 32 nt, Homo Sapiens
agacugcaccucuggaggugcagggcacccuu

SEQ ID NO: 52848 - RNA, 32 nt, Homo Sapiens
uuguucaaaaggagcaaaaauggccugcgguu

SEQ ID NO: 52849 - RNA, 32 nt, Homo Sapiens
gagaaaguugcuccgagaagaggcugggucga

SEQ ID NO: 52850 - RNA, 32 nt, Homo Sapiens
gguacccuaaaauugaagucaggauaaggagg

SEQ ID NO: 52851 - RNA, 32 nt, Homo Sapiens
gucucugucuccugggcccugcucugggaccu

SEQ ID NO: 52852 - RNA, 32 nt, Homo Sapiens
cuauauuaacuuuccuguguauauuuaguacu

SEQ ID NO: 52853 - RNA, 32 nt, Homo Sapiens
ccucuggaggaagaggagggacaaaugagguc

SEQ ID NO: 52854 - RNA, 32 nt, Homo Sapiens
gaggacuagaaaaggcuuccccugccuauccu

SEQ ID NO: 52855 - RNA, 32 nt, Homo Sapiens
uaaucuguguguauauugagaaucccuuaaaa

SEQ ID NO: 52856 - RNA, 32 nt, Homo Sapiens
uguuuggaggauguugucacagcuaguagcgg

SEQ ID NO: 52857 - RNA, 32 nt, Homo Sapiens
uugggggacaaaguuuucaacacaugaacuuu

SEQ ID NO: 52858 - RNA, 32 nt, Homo Sapiens
ugccugggggccggccaccuggaccgccgaca

SEQ ID NO: 52859 - RNA, 32 nt, Homo Sapiens
cuaaucugcugaagaaagaagaauagaagaaa

SEQ ID NO: 52860 - RNA, 32 nt, Homo Sapiens
gcuuucacauaaaugaagcuacagcuaucaug

SEQ ID NO: 52861 - RNA, 32 nt, Homo Sapiens
ugaugaagaugaugaugaggaugaagauaagg

SEQ ID NO: 52862 - RNA, 32 nt, Homo Sapiens
agggcaggcaggagcaggcacugaugcuagag

SEQ ID NO: 52863 - RNA, 32 nt, Homo Sapiens
cacgcaggacucuggagccagaguagaggcug

SEQ ID NO: 52864 - RNA, 32 nt, Homo Sapiens
cgcgagcugggggcauguccgcggcgggcgcc

SEQ ID NO: 52865 - RNA, 32 nt, Homo Sapiens
cuggcuaguucauucccuccccagccaggugc

SEQ ID NO: 52866 - RNA, 32 nt, Homo Sapiens
gccacaaagggaggaggggcucaugggacugc

SEQ ID NO: 52867 - RNA, 32 nt, Homo Sapiens
uucccaagucaagccaggaucuguacccaugc

SEQ ID NO: 52868 - RNA, 32 nt, Homo Sapiens
uuuuuagaaguguccacugcaauggcaaaaau

SEQ ID NO: 52869 - RNA, 32 nt, Homo Sapiens
ccgggugcgaggaggagcaugcacggaccaag

SEQ ID NO: 52870 - RNA, 32 nt, Homo Sapiens
uccugccugggugcacacacggcgggccugag

SEQ ID NO: 52871 - RNA, 32 nt, Homo Sapiens
cagugcgucuggagggccugugcgagcucagc

SEQ ID NO: 52872 - RNA, 32 nt, Homo Sapiens
acagcucucguucuccuuccccauuuccacug

SEQ ID NO: 52873 - RNA, 32 nt, Homo Sapiens
guguuacuuaucuaauaauccucuagaaagaa

SEQ ID NO: 52874 - RNA, 32 nt, Homo Sapiens
aaguuaaauauuaaaagcugaaagggccagug

SEQ ID NO: 52875 - RNA, 32 nt, Homo Sapiens
gugagaaaaauauguuucguaaauauuugcau

SEQ ID NO: 52876 - RNA, 32 nt, Homo Sapiens
cuuuagaauuguauguucucuuuagaccccau

SEQ ID NO: 52877 - RNA, 30 nt, Homo Sapiens
uaggagcgcgcgccacgcuaggcgagcgag

SEQ ID NO: 52878 - RNA, 32 nt, Homo Sapiens
gcucgggggagaaggcgcccgaggggaggcgc

SEQ ID NO: 52879 - RNA, 32 nt, Homo Sapiens
accugcagaaugggagaaaauauuugcgaguc

SEQ ID NO: 52880 - RNA, 32 nt, Homo Sapiens
uucugaugggguugggggugggacagaguaaa

SEQ ID NO: 52881 - RNA, 29 nt, Homo Sapiens
aacaguuuguguuucacaaacauggcuua

SEQ ID NO: 52882 - RNA, 32 nt, Homo Sapiens
uggcuggacagcuggaggaugaacggagaagc

SEQ ID NO: 52883 - RNA, 32 nt, Homo Sapiens
guugggauucauggccuauuaaggagguccaa

SEQ ID NO: 52884 - RNA, 32 nt, Homo Sapiens
augcuuugaacuuuaguuugccugcaguuucu

SEQ ID NO: 52885 - RNA, 32 nt, Homo Sapiens
ccaaaaaucaggaaacauggcuccuuauaaau

SEQ ID NO: 52886 - RNA, 32 nt, Homo Sapiens
caugcauuaaaaaaaaucaucucacaugcauu

SEQ ID NO: 52887 - RNA, 32 nt, Homo Sapiens
gcuuucuguuucacccgagggaccacgaacgc

SEQ ID NO: 52888 - RNA, 32 nt, Homo Sapiens
ggcccugaucugaugacgcuaagauuuaaaaa

SEQ ID NO: 52889 - RNA, 32 nt, Homo Sapiens
caacaaaaacaaaaaaugugcuguucaaguuu

SEQ ID NO: 52890 - RNA, 32 nt, Homo Sapiens
ugugcaggagaugcaguuuuuguguagagaau

SEQ ID NO: 52891 - RNA, 32 nt, Homo Sapiens
uguauucauauaucuauauacauauucaguug

SEQ ID NO: 52892 - RNA, 32 nt, Homo Sapiens
ccacuugaacucugaugucagucgacuguggg

SEQ ID NO: 52893 - RNA, 32 nt, Homo Sapiens
agaaaauaccugaguucacgugcuaaagucau

SEQ ID NO: 52894 - RNA, 32 nt, Homo Sapiens
aaguaucugcggcagaggaauaaguaccgauu

SEQ ID NO: 52895 - RNA, 32 nt, Homo Sapiens
cacgaggugggaaggagagaaaauggcggcgg

SEQ ID NO: 52896 - RNA, 32 nt, Homo Sapiens
cgcaagcacgcacgugcgcacacacacacacg

SEQ ID NO: 52897 - RNA, 28 nt, Homo Sapiens
cugggaguggcuauagggguagcucuuu

SEQ ID NO: 52898 - RNA, 27 nt, Homo Sapiens
gcauggcggcugcccccuccgcgcugc

SEQ ID NO: 52899 - RNA, 32 nt, Homo Sapiens
aagcgccucgcccgccggggccucggagguga

SEQ ID NO: 52900 - RNA, 32 nt, Homo Sapiens
acaaaaauucagcugaacuuguaaccaacagc

SEQ ID NO: 52901 - RNA, 32 nt, Homo Sapiens
cgucgguggccuagagaugcugcugccgcggu

SEQ ID NO: 52902 - RNA, 32 nt, Homo Sapiens
cccccugggcagccucaaaaccccgcuuacag

SEQ ID NO: 52903 - RNA, 32 nt, Homo Sapiens
aaagcggucgccgcccccgcccggcccccugg

SEQ ID NO: 52904 - RNA, 32 nt, Homo Sapiens
gauucuucccccuuuuuugagaaauaaaguuu

SEQ ID NO: 52905 - RNA, 32 nt, Homo Sapiens
aggcccccgagcuggcuguucuaacuuagaag

SEQ ID NO: 52906 - RNA, 32 nt, Homo Sapiens
ggaggcugggccaccauggcagaccuuccaaa

SEQ ID NO: 52907 - RNA, 32 nt, Homo Sapiens
ucauuuucuccacuaacacccaagggcggugu

SEQ ID NO: 52908 - RNA, 32 nt, Homo Sapiens
acagugagaagguccgccugugcgcguggaac

SEQ ID NO: 52909 - RNA, 32 nt, Homo Sapiens
acauuuuguaaaauaaagauuucuguguucua

SEQ ID NO: 52910 - RNA, 32 nt, Homo Sapiens
gugggcggacggccgcgguucuccggcaagcg

SEQ ID NO: 52911 - RNA, 32 nt, Homo Sapiens
ccccaugguguuggggauuaacauuaggcucc

SEQ ID NO: 52912 - RNA, 32 nt, Homo Sapiens
gagcggcaggcagggcccguggacgaggagca

SEQ ID NO: 52913 - RNA, 32 nt, Homo Sapiens
agugauaaaccugguuuauacaacaucugccu

SEQ ID NO: 52914 - RNA, 32 nt, Homo Sapiens
uuauguguauaaaacuauaucugccugugugg

SEQ ID NO: 52915 - RNA, 32 nt, Homo Sapiens
ucucucccucccucacgucucucucucucucu

SEQ ID NO: 52916 - RNA, 32 nt, Homo Sapiens
aguuggccaaaauacugccuguacuguuaauu

SEQ ID NO: 52917 - RNA, 32 nt, Homo Sapiens
cugccaugugagcucagggaaugcaaaugcau

SEQ ID NO: 52918 - RNA, 32 nt, Homo Sapiens
cucaaagucuuugaguuuuagagucuguuagu

SEQ ID NO: 52919 - RNA, 32 nt, Homo Sapiens
guauauuauuuuacuaauuguacuuuuaugaa

SEQ ID NO: 52920 - RNA, 32 nt, Homo Sapiens
agagcuuccagauggaggugaugaugaugaca

SEQ ID NO: 52921 - RNA, 32 nt, Homo Sapiens
cuaauuaucauaguuuuguucaauugcguugu

SEQ ID NO: 52922 - RNA, 32 nt, Homo Sapiens
ggggccgggaugcggcgcugaggcccagcaug

SEQ ID NO: 52923 - RNA, 32 nt, Homo Sapiens
acugguucucucuaucucuggaguaaugcagu

SEQ ID NO: 52924 - RNA, 32 nt, Homo Sapiens
accgcaaugcccuagaacagcuaugaagcaga

SEQ ID NO: 52925 - RNA, 32 nt, Homo Sapiens
ugcugggcucccguguaucuggacacuguaac

SEQ ID NO: 52926 - RNA, 32 nt, Homo Sapiens
guuaagucuaaagagauuauuauuccuugaug

SEQ ID NO: 52927 - RNA, 32 nt, Homo Sapiens
caacuaugguuucuuugcuuuuuguuuuaaca

SEQ ID NO: 52928 - RNA, 32 nt, Homo Sapiens
uucggugagucuuuuccuguggagguuugguc

SEQ ID NO: 52929 - RNA, 32 nt, Homo Sapiens
uaaacucuccucaagcucccaaggacagagga

SEQ ID NO: 52930 - RNA, 32 nt, Homo Sapiens
gccuagaaagcaguguggguccuccauggggc

SEQ ID NO: 52931 - RNA, 32 nt, Homo Sapiens
ucuguaaaucaucacuaaguaguuauucuguc

SEQ ID NO: 52932 - RNA, 32 nt, Homo Sapiens
cugcaggagcuggagaggcugcgggagcugga

SEQ ID NO: 52933 - RNA, 32 nt, Homo Sapiens
aggacaaagguugugucuugcuuuugucucuc

SEQ ID NO: 52934 - RNA, 32 nt, Homo Sapiens
caggguaaaaauuuaaaaacaaacauacaaau

SEQ ID NO: 52935 - RNA, 32 nt, Homo Sapiens
acuuguuacgggaaauaugaaaagcauggcca

SEQ ID NO: 52936 - RNA, 32 nt, Homo Sapiens
cuuagcggccggggcuaccgcggcccgccgug

SEQ ID NO: 52937 - RNA, 32 nt, Homo Sapiens
ugauaagucauucagauuuguucuagauaauc

SEQ ID NO: 52938 - RNA, 32 nt, Homo Sapiens
ccaauccagaaagcuuugcucugcagacgaau

SEQ ID NO: 52939 - RNA, 32 nt, Homo Sapiens
uauauaugacagucaaaaccuguguacauauu

SEQ ID NO: 52940 - RNA, 32 nt, Homo Sapiens
cccaccuuuccccgcuuucuauuccacaaaac

SEQ ID NO: 52941 - RNA, 32 nt, Homo Sapiens
cggagcugcgcgcggggcaugcggcugcggcc

SEQ ID NO: 52942 - RNA, 32 nt, Homo Sapiens
cgaagcucccuggugggcuaugcugaaggggc

SEQ ID NO: 52943 - RNA, 32 nt, Homo Sapiens
acaacugaaaauauugggcaucaaauagauua

SEQ ID NO: 52944 - RNA, 32 nt, Homo Sapiens
uuugccucucuuucaccuccaagcccccaaau

SEQ ID NO: 52945 - RNA, 32 nt, Homo Sapiens
gaugaaaaugcaaauggaaaaauacacauacc

SEQ ID NO: 52946 - RNA, 32 nt, Homo Sapiens
ucacggagcuccugggggcgcaggacggggcg

SEQ ID NO: 52947 - RNA, 32 nt, Homo Sapiens
uccuugucuuugaaauaagagaauuagacccc

SEQ ID NO: 52948 - RNA, 32 nt, Homo Sapiens
ggggugcccucccacacugcccucccugcccc

SEQ ID NO: 52949 - RNA, 32 nt, Homo Sapiens
gaacagguuuaugacuccaugggagaaaaaga

SEQ ID NO: 52950 - RNA, 32 nt, Homo Sapiens
ugucuuaaaacugaacaugaggauauuaaaaa

SEQ ID NO: 52951 - RNA, 32 nt, Homo Sapiens
agaaugaaggauggcaacgaaagguggggccu

SEQ ID NO: 52952 - RNA, 32 nt, Homo Sapiens
ucagagccugugcccuucccacuacaccacca

SEQ ID NO: 52953 - RNA, 32 nt, Homo Sapiens
ugagggaguuggacuucagaucugcaaucugg

SEQ ID NO: 52954 - RNA, 29 nt, Homo Sapiens
cagccugggggacagagugagacccuguc

SEQ ID NO: 52955 - RNA, 32 nt, Homo Sapiens
agagccugcagagcccggcggcaccgagugca

SEQ ID NO: 52956 - RNA, 32 nt, Homo Sapiens
aagcccagcacagaccaucucaucucacucca

SEQ ID NO: 52957 - RNA, 32 nt, Homo Sapiens
cugccuggagguucucccuggggguggcggga

SEQ ID NO: 52958 - RNA, 32 nt, Homo Sapiens
ccggcggguccugaggguguggacaucccacg

SEQ ID NO: 52959 - RNA, 32 nt, Homo Sapiens
ugugccagcacggucuccugugcccaccagcc

SEQ ID NO: 52960 - RNA, 32 nt, Homo Sapiens
uacaggcgaccacugcucugcgggcggguggu

SEQ ID NO: 52961 - RNA, 32 nt, Homo Sapiens
ugagaaaagagauacuauuuuggauguguauc

SEQ ID NO: 52962 - RNA, 32 nt, Homo Sapiens
caccuggaaacacuaggugccugcccagggag

SEQ ID NO: 52963 - RNA, 32 nt, Homo Sapiens
ggagcccccgcgcugccauucccggccgucgc

SEQ ID NO: 52964 - RNA, 32 nt, Homo Sapiens
ugugccaaagaguuuagaaaaauaaauauaca

SEQ ID NO: 52965 - RNA, 32 nt, Homo Sapiens
uuaaaacaaccugagauggagaggccaggaga

SEQ ID NO: 52966 - RNA, 32 nt, Homo Sapiens
uggcccgugucugcuacucuguaccuugcugg

SEQ ID NO: 52967 - RNA, 32 nt, Homo Sapiens
ccuccagcagguaccagcuccucccccucaac

SEQ ID NO: 52968 - RNA, 32 nt, Homo Sapiens
guagaugccucccaggcuaugguugaaaauac

SEQ ID NO: 52969 - RNA, 32 nt, Homo Sapiens
uuccaugcaaaggcuuccugaaauaggggaga

SEQ ID NO: 52970 - RNA, 32 nt, Homo Sapiens
acuggcaauuccaggaaugauggaauaaagca

SEQ ID NO: 52971 - RNA, 32 nt, Homo Sapiens
ucuuucuggucucggccgcagaagcgagauga

SEQ ID NO: 52972 - RNA, 32 nt, Homo Sapiens
gcaacuugcccgugccuuugggugcugugagc

SEQ ID NO: 52973 - RNA, 32 nt, Homo Sapiens
aauuagugaaaguauugaaaauacuaaauuau

SEQ ID NO: 52974 - RNA, 32 nt, Homo Sapiens
uucuggccccucacuuuguugcuggggcuguu

SEQ ID NO: 52975 - RNA, 32 nt, Homo Sapiens
ugccuauaaucccagcacuuuggaaggcugag

SEQ ID NO: 52976 - RNA, 32 nt, Homo Sapiens
ugccuauaaucccagcacuuugggaggcugaa

SEQ ID NO: 52977 - RNA, 32 nt, Homo Sapiens
cugcccccaucccaacccagcccuuauuauuu

SEQ ID NO: 52978 - RNA, 32 nt, Homo Sapiens
uggaacagcugcgccugcagccagcugggccg

SEQ ID NO: 52979 - RNA, 32 nt, Homo Sapiens
gagcuugaguccugaggcccuccuggcuauuu

SEQ ID NO: 52980 - RNA, 32 nt, Homo Sapiens
cagggcaagugggacagggcgagugcugacgu

SEQ ID NO: 52981 - RNA, 30 nt, Homo Sapiens
uuguuuuuugugugcaugcaaaauauuguu

SEQ ID NO: 52982 - RNA, 32 nt, Homo Sapiens
uucagagggucuccugcccugcagggccuuuc

SEQ ID NO: 52983 - RNA, 32 nt, Homo Sapiens
gagccuuuccuggccugugccuggaggguagc

SEQ ID NO: 52984 - RNA, 32 nt, Homo Sapiens
aucuagcagugggacuagauuuggguagaagu

SEQ ID NO: 52985 - RNA, 32 nt, Homo Sapiens
ucccccagcugccccaggguucugguuucccg

SEQ ID NO: 52986 - RNA, 32 nt, Homo Sapiens
ccuccacccccaagcacuaccacacauggucu

SEQ ID NO: 52987 - RNA, 32 nt, Homo Sapiens
uguugaccaguaguaugcuauuaguaguuacu

SEQ ID NO: 52988 - RNA, 32 nt, Homo Sapiens
cauacuuuuacauuucuacuuuauugagaccu

SEQ ID NO: 52989 - RNA, 32 nt, Homo Sapiens
uuaacugucuguuuuaguaguuuaaugauuau

SEQ ID NO: 52990 - RNA, 32 nt, Homo Sapiens
ucaggggugaagggcguccgcuggccacucug

SEQ ID NO: 52991 - RNA, 32 nt, Homo Sapiens
caguaggacuucccaaacauguuacuaguuca

SEQ ID NO: 52992 - RNA, 32 nt, Homo Sapiens
guggccuucaucccccucuggccguguucccu

SEQ ID NO: 52993 - RNA, 32 nt, Homo Sapiens
gccagcccacuacccacccccacuacagcauu

SEQ ID NO: 52994 - RNA, 32 nt, Homo Sapiens
ugugauaccaaaaccagauuaagacacaucag

SEQ ID NO: 52995 - RNA, 32 nt, Homo Sapiens
cugagccauuuuggggagcaguucuucaucug

SEQ ID NO: 52996 - RNA, 31 nt, Homo Sapiens
aaggauaaaauuucuuagggaguccagguuu

SEQ ID NO: 52997 - RNA, 32 nt, Homo Sapiens
cgcgcccccugagcugcagggcuguguguggu

SEQ ID NO: 52998 - RNA, 32 nt, Homo Sapiens
caguuacaauaaauaacuuuaugcagauuaau

SEQ ID NO: 52999 - RNA, 32 nt, Homo Sapiens
uguaggugaagaaaacagcaccacugagauga

SEQ ID NO: 53000 - RNA, 32 nt, Homo Sapiens
cgucugccuggacuguugcgggccccgggacc

SEQ ID NO: 53001 - RNA, 32 nt, Homo Sapiens
auccugugguacuucacagccuuguaugaaua

SEQ ID NO: 53002 - RNA, 32 nt, Homo Sapiens
agacccuguaaauacaugauaauugcacacag

SEQ ID NO: 53003 - RNA, 32 nt, Homo Sapiens
uuuuugaaagacuggacuggaaucuuagcaaa

SEQ ID NO: 53004 - RNA, 32 nt, Homo Sapiens
ucucaccuuucugccuuuggaacacaugaaga

SEQ ID NO: 53005 - RNA, 32 nt, Homo Sapiens
cagcgcagccgcgggcgcucuccgggccgcuc

SEQ ID NO: 53006 - RNA, 32 nt, Homo Sapiens
guccgagcuagggauccugaaaaggagggaac

SEQ ID NO: 53007 - RNA, 32 nt, Homo Sapiens
uggagccagccagccagccaccucugaccccc

SEQ ID NO: 53008 - RNA, 32 nt, Homo Sapiens
aggccucauuguggagcugcaaacacgaacgu

SEQ ID NO: 53009 - RNA, 32 nt, Homo Sapiens
ccaaaauauggacacaaauauagacuaauaug

SEQ ID NO: 53010 - RNA, 32 nt, Homo Sapiens
uggaccuggaggcccugcccagcccugcucug

SEQ ID NO: 53011 - RNA, 32 nt, Homo Sapiens
aggcucuuuccacagcuguugcuucugguugg

SEQ ID NO: 53012 - RNA, 32 nt, Homo Sapiens
ggggcgauuggcggcgggagcgaugaguggca

SEQ ID NO: 53013 - RNA, 32 nt, Homo Sapiens
uauauauaggaauuuuuuuuuauuuugcuuug

SEQ ID NO: 53014 - RNA, 32 nt, Homo Sapiens
ucgucuaucucccuguuguucuucccaucggc

SEQ ID NO: 53015 - RNA, 32 nt, Homo Sapiens
ucccucaucuucuagugccauucuccucucug

SEQ ID NO: 53016 - RNA, 32 nt, Homo Sapiens
ccuggggcguccccgcgaagccugggccuguc

SEQ ID NO: 53017 - RNA, 32 nt, Homo Sapiens
acacaccugaauaaaauugaugugcauguuuu

SEQ ID NO: 53018 - RNA, 29 nt, Homo Sapiens
cgacggcggacggugguacgguccuggag

SEQ ID NO: 53019 - RNA, 32 nt, Homo Sapiens
auuacuccucaggccuggcccucgggccuccg

SEQ ID NO: 53020 - RNA, 32 nt, Homo Sapiens
uagaggaggagaagauugugguccagacuucc

SEQ ID NO: 53021 - RNA, 32 nt, Homo Sapiens
cuccugcagacagauagugggguuaccuggca

SEQ ID NO: 53022 - RNA, 32 nt, Homo Sapiens
ggaugggagagagaucaaaggcugggagauuc

SEQ ID NO: 53023 - RNA, 32 nt, Homo Sapiens
uuugggcccuccccgccaugagcuccuacgua

SEQ ID NO: 53024 - RNA, 32 nt, Homo Sapiens
gaggaaggaaauguucucaaggucucaggcua

SEQ ID NO: 53025 - RNA, 32 nt, Homo Sapiens
ugugguguagcaccacccacccagcaguaccg

SEQ ID NO: 53026 - RNA, 30 nt, Homo Sapiens
gugagggcgcccggcuuccaggcaguaaug

SEQ ID NO: 53027 - RNA, 32 nt, Homo Sapiens
gucaccauuuacaucauagaaauuggcaaaua

SEQ ID NO: 53028 - RNA, 32 nt, Homo Sapiens
ggccauuggugacccaaagaugaugaaaaaua

SEQ ID NO: 53029 - RNA, 31 nt, Homo Sapiens
gaggcagcaugguccgcagggcaccaugggg

SEQ ID NO: 53030 - RNA, 32 nt, Homo Sapiens
cgcacugccugcgucccgcgccccagccgccg

SEQ ID NO: 53031 - RNA, 32 nt, Homo Sapiens
agaacaagaugaugaacuguauaauccagaga

SEQ ID NO: 53032 - RNA, 27 nt, Homo Sapiens
gaagauuccuucuuuccccuuuugucu

SEQ ID NO: 53033 - RNA, 32 nt, Homo Sapiens
gcccggccccagccccauggaccuccgagcag

SEQ ID NO: 53034 - RNA, 32 nt, Homo Sapiens
gcaaaguauaaccauaugauacuaucauacua

SEQ ID NO: 53035 - RNA, 32 nt, Homo Sapiens
ugcuguccagcauagcagccacaagccacaug

SEQ ID NO: 53036 - RNA, 32 nt, Homo Sapiens
aacuacuuuucugcaacacaaaccuuguaaaa

SEQ ID NO: 53037 - RNA, 32 nt, Homo Sapiens
uauuuauuuugagucugugaggucuucuuguc

SEQ ID NO: 53038 - RNA, 32 nt, Homo Sapiens
cgaugugcaccuguagucccagcuacucgggg

SEQ ID NO: 53039 - RNA, 29 nt, Homo Sapiens
uucacuguaaguuuauuuuuucuacacag

SEQ ID NO: 53040 - RNA, 32 nt, Homo Sapiens
ggugagccccugcagccuccucagccugugca

SEQ ID NO: 53041 - RNA, 32 nt, Homo Sapiens
acuacagcucuuuuguuuaacgaaagagagaa

SEQ ID NO: 53042 - RNA, 32 nt, Homo Sapiens
ugaaaugacauuagcgcauguuugggacuggc

SEQ ID NO: 53043 - RNA, 32 nt, Homo Sapiens
ucucuguauaucacuucuuacauauuaaauua

SEQ ID NO: 53044 - RNA, 32 nt, Homo Sapiens
cccuccugcaagcgagccccagccuucucuau

SEQ ID NO: 53045 - RNA, 32 nt, Homo Sapiens
gaucuagugucugcccuccugcccugcaacuc

SEQ ID NO: 53046 - RNA, 32 nt, Homo Sapiens
gacccccggugcugguccugugccagcacgua

SEQ ID NO: 53047 - RNA, 32 nt, Homo Sapiens
ggauuacagacgugagccacugcagccaccgu

SEQ ID NO: 53048 - RNA, 32 nt, Homo Sapiens
ugucccaguuucuccuuccuuuagugauccug

SEQ ID NO: 53049 - RNA, 32 nt, Homo Sapiens
aagauuuuuaucagcuuucucugucugaaucc

SEQ ID NO: 53050 - RNA, 32 nt, Homo Sapiens
caaucauuuuaaaaguaauuuucguaauuuaa

SEQ ID NO: 53051 - RNA, 32 nt, Homo Sapiens
uuggagaguuugggagcauuugggggcaggag

SEQ ID NO: 53052 - RNA, 32 nt, Homo Sapiens
gacuuccuagggaucugaaauccauaaacuaa

SEQ ID NO: 53053 - RNA, 32 nt, Homo Sapiens
gcagggcccacuucacagggcugugaggauua

SEQ ID NO: 53054 - RNA, 32 nt, Homo Sapiens
caggaagucggcgcgggcggcgcggacaguau

SEQ ID NO: 53055 - RNA, 32 nt, Homo Sapiens
agucaaauggagaaguaaagugaggcaacaga

SEQ ID NO: 53056 - RNA, 32 nt, Homo Sapiens
cuccacacgcccggcggcgguggcuaugggga

SEQ ID NO: 53057 - RNA, 32 nt, Homo Sapiens
ucgcccucgcccuccgcccacccgguagagga

SEQ ID NO: 53058 - RNA, 31 nt, Homo Sapiens
auuuagaaauaaaaaugugguuucuuaaacg

SEQ ID NO: 53059 - RNA, 32 nt, Homo Sapiens
ccuccuuuuccacagccacucacuggggccac

SEQ ID NO: 53060 - RNA, 32 nt, Homo Sapiens
ggccgagcccagcuccccgcggcggccgcuag

SEQ ID NO: 53061 - RNA, 29 nt, Homo Sapiens
ggaccugggcugaugucugaugaaauuuu

SEQ ID NO: 53062 - RNA, 32 nt, Homo Sapiens
uaaacuauuauuauugaucacauuuugauuuu

SEQ ID NO: 53063 - RNA, 32 nt, Homo Sapiens
aaagcuuauaaacuauuacuuauaaguucuca

SEQ ID NO: 53064 - RNA, 32 nt, Homo Sapiens
gagcaucugggcagcucugugcuugggaucca

SEQ ID NO: 53065 - RNA, 32 nt, Homo Sapiens
gcgggucgggcucugugucagcagccgggcgg

SEQ ID NO: 53066 - RNA, 32 nt, Homo Sapiens
gaugcuuccaauuuauaaaggaucaucagguu

SEQ ID NO: 53067 - RNA, 32 nt, Homo Sapiens
gaaaguaugcuuccauuauaaucuucauaaag

SEQ ID NO: 53068 - RNA, 32 nt, Homo Sapiens
uccuccgggacuuggaacgccccggcugggug

SEQ ID NO: 53069 - RNA, 32 nt, Homo Sapiens
aacccuuguaagucacaaagccauucauacug

SEQ ID NO: 53070 - RNA, 32 nt, Homo Sapiens
guuggguuuuuauguauuauacuuagucaaau

SEQ ID NO: 53071 - RNA, 32 nt, Homo Sapiens
caggagggaggguuuugguugcuggcgcuugu

SEQ ID NO: 53072 - RNA, 32 nt, Homo Sapiens
cuccaccacacacaacgccaagacgggcccca

SEQ ID NO: 53073 - RNA, 32 nt, Homo Sapiens
uuccaguuauguugcucuccuccccgcagccc

SEQ ID NO: 53074 - RNA, 32 nt, Homo Sapiens
gagggccugcucccggccccccugcacucugc

SEQ ID NO: 53075 - RNA, 32 nt, Homo Sapiens
cuacucaccugccucugguggcugggauucag

SEQ ID NO: 53076 - RNA, 32 nt, Homo Sapiens
ucaagggcuuuaucaaaaaguacaauaauaaa

SEQ ID NO: 53077 - RNA, 32 nt, Homo Sapiens
ugaacccugagcaggcacccacuucccugcag

SEQ ID NO: 53078 - RNA, 32 nt, Homo Sapiens
ccccaguccugccucucccccauccuaucagg

SEQ ID NO: 53079 - RNA, 32 nt, Homo Sapiens
cugagugaaagaaaaaauacuguaagacaucc

SEQ ID NO: 53080 - RNA, 32 nt, Homo Sapiens
acaggugagcgcggcgcaggcccgggcccggc

SEQ ID NO: 53081 - RNA, 32 nt, Homo Sapiens
ugggaugggaaggucuuccuguuuucaccauc

SEQ ID NO: 53082 - RNA, 32 nt, Homo Sapiens
agaaauuguuuuucaugguucuauaaugcauc

SEQ ID NO: 53083 - RNA, 32 nt, Homo Sapiens
caagcaacaguaccaacuuaugugaccccuga

SEQ ID NO: 53084 - RNA, 32 nt, Homo Sapiens
ugcuucaaccuuucucagucccggcccucacu

SEQ ID NO: 53085 - RNA, 32 nt, Homo Sapiens
guggugggguugcgcaugaucaguagcugcac

SEQ ID NO: 53086 - RNA, 32 nt, Homo Sapiens
ggugcucucgcacccugcccgaacaccccuuc

SEQ ID NO: 53087 - RNA, 32 nt, Homo Sapiens
cgagcgagggaagaaggacagggacucgugug

SEQ ID NO: 53088 - RNA, 32 nt, Homo Sapiens
cugaaaccauuuauuucuuucuauuuugcuau

SEQ ID NO: 53089 - RNA, 32 nt, Homo Sapiens
cucugucucuaaaaaauuuuuaaaagagaccc

SEQ ID NO: 53090 - RNA, 32 nt, Homo Sapiens
gccauacuaugaagaucaaagucuuaagugug

SEQ ID NO: 53091 - RNA, 32 nt, Homo Sapiens
uuguuagaggggcagcucuaggcuggggcuug

SEQ ID NO: 53092 - RNA, 32 nt, Homo Sapiens
aggaggagaagcugcagcaggacgcgcugcag

SEQ ID NO: 53093 - RNA, 32 nt, Homo Sapiens
agagauugccuggcccugcuugaaugucauga

SEQ ID NO: 53094 - RNA, 32 nt, Homo Sapiens
ugaggucuuugaggccaauauuaaacacucuu

SEQ ID NO: 53095 - RNA, 32 nt, Homo Sapiens
agccgcaaccgccgccccggcgccagcaggaa

SEQ ID NO: 53096 - RNA, 32 nt, Homo Sapiens
aaaaaaaaaaaaacagaaagaaagaaaaagaa

SEQ ID NO: 53097 - RNA, 32 nt, Homo Sapiens
uuccuccccucgcccaucagugccagccccug

SEQ ID NO: 53098 - RNA, 32 nt, Homo Sapiens
uuuauuuacauaagugauuccaaauacauuuu

SEQ ID NO: 53099 - RNA, 32 nt, Homo Sapiens
cccuccugguaauccugcccguguguaguccc

SEQ ID NO: 53100 - RNA, 31 nt, Homo Sapiens
uagagccagguguauucaggaguccaugcag

SEQ ID NO: 53101 - RNA, 32 nt, Homo Sapiens
auaugagaagugcuuuggucuuuauuuagaaa

SEQ ID NO: 53102 - RNA, 32 nt, Homo Sapiens
gagacgggaccgagagcaucaugggcagcacu

SEQ ID NO: 53103 - RNA, 32 nt, Homo Sapiens
aggcgccugcgcgauguccgggccccugagcc

SEQ ID NO: 53104 - RNA, 32 nt, Homo Sapiens
ggugucuggggacaacuauccuccccccaacc

SEQ ID NO: 53105 - RNA, 32 nt, Homo Sapiens
ccguaguacuugcugucuucauuuucauguug

SEQ ID NO: 53106 - RNA, 32 nt, Homo Sapiens
aggagcagggguggggggaggggggugggguc

SEQ ID NO: 53107 - RNA, 32 nt, Homo Sapiens
ccccauuuccucuuccuucucuacucaugcca

SEQ ID NO: 53108 - RNA, 32 nt, Homo Sapiens
uauucaacacugaggcaacaauguagaagaug

SEQ ID NO: 53109 - RNA, 32 nt, Homo Sapiens
ugggccccgcggggguucgugccccggagcag

SEQ ID NO: 53110 - RNA, 32 nt, Homo Sapiens
uucugcuucucaucuaaauauuuccauauucu

SEQ ID NO: 53111 - RNA, 32 nt, Homo Sapiens
cccagugccugccccugugaugugagcucgaa

SEQ ID NO: 53112 - RNA, 32 nt, Homo Sapiens
aggggcaggauaugaaguggauugaagagaag

SEQ ID NO: 53113 - RNA, 32 nt, Homo Sapiens
caucuccugaagaucuuucuuaccuuuuuuua

SEQ ID NO: 53114 - RNA, 32 nt, Homo Sapiens
caguggccaagagcuuugugugggagacggca

SEQ ID NO: 53115 - RNA, 30 nt, Homo Sapiens
gggggugagggucugucugagucuguuuuu

SEQ ID NO: 53116 - RNA, 32 nt, Homo Sapiens
uauugaaggagaaauuucuuguaguggacacu

SEQ ID NO: 53117 - RNA, 32 nt, Homo Sapiens
aucaucuuugaaaaauaauucacucuugaagu

SEQ ID NO: 53118 - RNA, 32 nt, Homo Sapiens
uuuugugaacaaguacuuuccuuuuuuacaug

SEQ ID NO: 53119 - RNA, 32 nt, Homo Sapiens
uuuggcaaggugcacagagaguccucagagca

SEQ ID NO: 53120 - RNA, 32 nt, Homo Sapiens
gggagagucugcuggaggaagucacauggcag

SEQ ID NO: 53121 - RNA, 32 nt, Homo Sapiens
gagguucccucccaaagcucagcccucugggc

SEQ ID NO: 53122 - RNA, 32 nt, Homo Sapiens
aaacuccuuguacauucacugugaguuucaaa

SEQ ID NO: 53123 - RNA, 32 nt, Homo Sapiens
acgcggggauaaguauugacauuacacagugu

SEQ ID NO: 53124 - RNA, 32 nt, Homo Sapiens
gagcucuagagcacagcucuccucucuaagga

SEQ ID NO: 53125 - RNA, 32 nt, Homo Sapiens
aggaccggugccagcccugacuccgccgcccc

SEQ ID NO: 53126 - RNA, 32 nt, Homo Sapiens
auauuucugguuuuuagcccuuucucugcacu

SEQ ID NO: 53127 - RNA, 32 nt, Homo Sapiens
uugcuuaugacauugaaauuguuuagagccug

SEQ ID NO: 53128 - RNA, 32 nt, Homo Sapiens
gcaugugcugugggcccugccggcgccugagu

SEQ ID NO: 53129 - RNA, 32 nt, Homo Sapiens
cgggugaggggaggagaggacuuggcgcguuc

SEQ ID NO: 53130 - RNA, 32 nt, Homo Sapiens
cgugcucgccucgaccccgcgccgggcaccug

SEQ ID NO: 53131 - RNA, 32 nt, Homo Sapiens
cugaaacauugugccaagaaacucugugggau

SEQ ID NO: 53132 - RNA, 32 nt, Homo Sapiens
uguuucaagauggaguuggugaagcauccaag

SEQ ID NO: 53133 - RNA, 32 nt, Homo Sapiens
uguuaauuugaaagggccacuauugcugagug

SEQ ID NO: 53134 - RNA, 32 nt, Homo Sapiens
ucaaagaccaagugaguuugugagauucuaac

SEQ ID NO: 53135 - RNA, 32 nt, Homo Sapiens
gcuaaaaugaacugguuaucuuaggaucaugg

SEQ ID NO: 53136 - RNA, 32 nt, Homo Sapiens
gcucagagcucugaaauuaaaaagcacugaaa

SEQ ID NO: 53137 - RNA, 32 nt, Homo Sapiens
auguuuuaaauauuuaggaagcuuuuaaaaga

SEQ ID NO: 53138 - RNA, 32 nt, Homo Sapiens
uggauuucaaguuggcggcugccgugcugagg

SEQ ID NO: 53139 - RNA, 32 nt, Homo Sapiens
cuuuauuggagguggggccuggugggagauga

SEQ ID NO: 53140 - RNA, 32 nt, Homo Sapiens
gaauguuuacuuuucuauuuggcauagcuaac

SEQ ID NO: 53141 - RNA, 32 nt, Homo Sapiens
uagaaaucauauauuuauuucauaaaauaaau

SEQ ID NO: 53142 - RNA, 32 nt, Homo Sapiens
ggccgcuccucccccgcagagcuuuggcgucu

SEQ ID NO: 53143 - RNA, 32 nt, Homo Sapiens
cauuaguacuuauguugcacaaugagaaaaga

SEQ ID NO: 53144 - RNA, 32 nt, Homo Sapiens
acagucccugaguguuggugcugcugguuuuu

SEQ ID NO: 53145 - RNA, 32 nt, Homo Sapiens
cugcugcaucacagaagcuggaaguucugaug

SEQ ID NO: 53146 - RNA, 32 nt, Homo Sapiens
aggcaaggacuggagcuaccuugcuuguuggg

SEQ ID NO: 53147 - RNA, 32 nt, Homo Sapiens
uggcuauaucccccguccccagccccucuucu

SEQ ID NO: 53148 - RNA, 32 nt, Homo Sapiens
ggccgucccagccacacccagcgcgccuucuc

SEQ ID NO: 53149 - RNA, 32 nt, Homo Sapiens
gccucccgcucccucacccgccgcggggagga

SEQ ID NO: 53150 - RNA, 32 nt, Homo Sapiens
gcucugacucaaaaguuuuuccauuuaccauc

SEQ ID NO: 53151 - RNA, 32 nt, Homo Sapiens
ggaugcuggggagagggggagggggcuguggu

SEQ ID NO: 53152 - RNA, 32 nt, Homo Sapiens
gccugugaagaaugggagugggcuuguguucu

SEQ ID NO: 53153 - RNA, 29 nt, Homo Sapiens
uugccggaggucugggcaccaggccaauu

SEQ ID NO: 53154 - RNA, 32 nt, Homo Sapiens
acguaaaaagauauuucuaauuuacuguugcc

SEQ ID NO: 53155 - RNA, 32 nt, Homo Sapiens
uaaaggacaaaguggaguaccuccuaaagugg

SEQ ID NO: 53156 - RNA, 32 nt, Homo Sapiens
gccccgcgcucgccaugucgggcgagcucagc

SEQ ID NO: 53157 - RNA, 32 nt, Homo Sapiens
agauggcauuuucugugacucuaggccucaca

SEQ ID NO: 53158 - RNA, 31 nt, Homo Sapiens
gcggugagggcgguggcgcccgcgggaccug

SEQ ID NO: 53159 - RNA, 32 nt, Homo Sapiens
auagcauuuuaaauuuaguguaucaugcgagu

SEQ ID NO: 53160 - RNA, 32 nt, Homo Sapiens
guccauucccucucuggccccagccccgcggg

SEQ ID NO: 53161 - RNA, 32 nt, Homo Sapiens
gguggagagagcaucaggaaaaauagcuaaug

SEQ ID NO: 53162 - RNA, 32 nt, Homo Sapiens
guaacgcgccgcgcccggggcugcgcgguuug

SEQ ID NO: 53163 - RNA, 32 nt, Homo Sapiens
ccuuccucaccuggcucugccucccccgugcu

SEQ ID NO: 53164 - RNA, 32 nt, Homo Sapiens
uugccagacggcgcagacaugucagaacaaag

SEQ ID NO: 53165 - RNA, 32 nt, Homo Sapiens
ugaugaagcuucuauuugacuaauauacugug

SEQ ID NO: 53166 - RNA, 32 nt, Homo Sapiens
agagacgcgggaaagugcgggucgcagaggca

SEQ ID NO: 53167 - RNA, 32 nt, Homo Sapiens
uguuuagcauuugacuuuuuuauauguuuuaa

SEQ ID NO: 53168 - RNA, 32 nt, Homo Sapiens
cccugguccucuccuacccacccauguccucu

SEQ ID NO: 53169 - RNA, 32 nt, Homo Sapiens
ugccuauaauccuagcacuuugggaggccaag

SEQ ID NO: 53170 - RNA, 32 nt, Homo Sapiens
ugccuauaaucccggcacuuugggaggcugag

SEQ ID NO: 53171 - RNA, 32 nt, Homo Sapiens
ugccuguaaucccagcacuuugggaggcugag

SEQ ID NO: 53172 - RNA, 32 nt, Homo Sapiens
ugccuguaauccuagcacuuugggaggccgag

SEQ ID NO: 53173 - RNA, 32 nt, Homo Sapiens
ugccuauaaucccagcacuuugggaggcuaag

SEQ ID NO: 53174 - RNA, 32 nt, Homo Sapiens
gucaauuugauguaguucuuuucaugcaagua

SEQ ID NO: 53175 - RNA, 32 nt, Homo Sapiens
cacccccucccuccccggcccgugcagcagug

SEQ ID NO: 53176 - RNA, 32 nt, Homo Sapiens
aucuccuucuauuuugcugagauaauuucacu

SEQ ID NO: 53177 - RNA, 32 nt, Homo Sapiens
agacucauuuuuuuuuuuuuuaguuuuuaaca

SEQ ID NO: 53178 - RNA, 32 nt, Homo Sapiens
aacgcuguagaagaggugacaugaugaggcgg

SEQ ID NO: 53179 - RNA, 32 nt, Homo Sapiens
ugccccggaaaccccacccccacccccaccuu

SEQ ID NO: 53180 - RNA, 32 nt, Homo Sapiens
gcgcgcgccgcaugcuggccggcucuguggug

SEQ ID NO: 53181 - RNA, 32 nt, Homo Sapiens
ggcugaggcggcugucguccccggccgacagg

SEQ ID NO: 53182 - RNA, 32 nt, Homo Sapiens
uacggccuggugcaguuuggccugggcgacag

SEQ ID NO: 53183 - RNA, 32 nt, Homo Sapiens
uuaccuugagccaaauacaaguuucuagaauc

SEQ ID NO: 53184 - RNA, 32 nt, Homo Sapiens
cucccuugucccuccauccacccagcgccggc

SEQ ID NO: 53185 - RNA, 32 nt, Homo Sapiens
auaaacuagagacaaauaaaauuaaagccuac

SEQ ID NO: 53186 - RNA, 30 nt, Homo Sapiens
cacuuugugguugcugcagcucgggggccu

SEQ ID NO: 53187 - RNA, 32 nt, Homo Sapiens
aucccucccuccccuccccaguccugccggcu

SEQ ID NO: 53188 - RNA, 32 nt, Homo Sapiens
agccgggcgcggcuggggcccgaggcuagcau

SEQ ID NO: 53189 - RNA, 32 nt, Homo Sapiens
uugccuuuucagcugggagcuguccguucagc

SEQ ID NO: 53190 - RNA, 28 nt, Homo Sapiens
aggcuggggcggcccugaggacgcgugc

SEQ ID NO: 53191 - RNA, 32 nt, Homo Sapiens
cacggggaccugcggcauccagcaccuggagc

SEQ ID NO: 53192 - RNA, 32 nt, Homo Sapiens
gcagacagguggagcccugcucccauugccac

SEQ ID NO: 53193 - RNA, 32 nt, Homo Sapiens
gaugauggcaaugacggugacaauggcauuac

SEQ ID NO: 53194 - RNA, 32 nt, Homo Sapiens
gaggcggugggggauugcagggggcggcugag

SEQ ID NO: 53195 - RNA, 32 nt, Homo Sapiens
caauaaaaggauuuuuucuugcuguuuugauu

SEQ ID NO: 53196 - RNA, 32 nt, Homo Sapiens
cucaguggucccgaggcccuagacccccaccc

SEQ ID NO: 53197 - RNA, 32 nt, Homo Sapiens
agcagacggccccgaucccgccagaacggccu

SEQ ID NO: 53198 - RNA, 32 nt, Homo Sapiens
auaacaugcaugggucccucucacuaauguuu

SEQ ID NO: 53199 - RNA, 32 nt, Homo Sapiens
gguguccaaauacauaguaaucuuuuccaguu

SEQ ID NO: 53200 - RNA, 32 nt, Homo Sapiens
aaagagugugcguucaagaggcagaugaggcu

SEQ ID NO: 53201 - RNA, 32 nt, Homo Sapiens
auuggcugcuugcaggcugcugauuggcugcc

SEQ ID NO: 53202 - RNA, 32 nt, Homo Sapiens
auaauucuagaauucuagucuucguguuagau

SEQ ID NO: 53203 - RNA, 32 nt, Homo Sapiens
aaccaaggcccaggcugcagcuccagcuucag

SEQ ID NO: 53204 - RNA, 32 nt, Homo Sapiens
aagaggagcugagagccauguacucuaaugcc

SEQ ID NO: 53205 - RNA, 32 nt, Homo Sapiens
uccucaucagucacauggcccagccgcuaguc

SEQ ID NO: 53206 - RNA, 32 nt, Homo Sapiens
gaaagggaucaaaacuuuuucaauugcgauaa

SEQ ID NO: 53207 - RNA, 32 nt, Homo Sapiens
gccgcgugcaggggucgcggccggcuggagcu

SEQ ID NO: 53208 - RNA, 32 nt, Homo Sapiens
gccuugaggggaggaggugguggccguggguu

SEQ ID NO: 53209 - RNA, 32 nt, Homo Sapiens
cgcgcgccacccgcggccccagcuuuccgccu

SEQ ID NO: 53210 - RNA, 28 nt, Homo Sapiens
gcaguguggcaaagaauuauaaaacaua

SEQ ID NO: 53211 - RNA, 32 nt, Homo Sapiens
gcuuccccaggacgagugacucuuccacggug

SEQ ID NO: 53212 - RNA, 32 nt, Homo Sapiens
ggacagguggccugggcagaucugcccagguc

SEQ ID NO: 53213 - RNA, 32 nt, Homo Sapiens
uaagcuguucuucuuaaucagaacuauccuau

SEQ ID NO: 53214 - RNA, 32 nt, Homo Sapiens
gcgcuacgaagcuuugcccagaugaagccagg

SEQ ID NO: 53215 - RNA, 32 nt, Homo Sapiens
guuuccucugcucaaggcaauuuccagagccc

SEQ ID NO: 53216 - RNA, 32 nt, Homo Sapiens
ggccaacgcgccguaauuagacgccgcucccc

SEQ ID NO: 53217 - RNA, 32 nt, Homo Sapiens
ucucuucagaaaagaagaaaaauucagaaauc

SEQ ID NO: 53218 - RNA, 32 nt, Homo Sapiens
gaaccuggucuugcggagccgcagcagcagca

SEQ ID NO: 53219 - RNA, 32 nt, Homo Sapiens
gaaccuuaucaaaggcaaaaccacagcagcuu

SEQ ID NO: 53220 - RNA, 32 nt, Homo Sapiens
uggcgguccgagcuguggcuugaaagaccgac

SEQ ID NO: 53221 - RNA, 32 nt, Homo Sapiens
ugacauuugugcuuuucucccugggccucauu

SEQ ID NO: 53222 - RNA, 32 nt, Homo Sapiens
uccuaggaagcaggaaagcacgaaggagcagc

SEQ ID NO: 53223 - RNA, 32 nt, Homo Sapiens
cagcaaccuugggcuuccugcggggugacuac

SEQ ID NO: 53224 - RNA, 32 nt, Homo Sapiens
uuuuguaaauuaaucuuuuauauugauaacag

SEQ ID NO: 53225 - RNA, 32 nt, Homo Sapiens
acccgugugggggacacgcagaugagugaauu

SEQ ID NO: 53226 - RNA, 32 nt, Homo Sapiens
gagauucuuuuuucuuuuuguucuacuuuucg

SEQ ID NO: 53227 - RNA, 32 nt, Homo Sapiens
aauauuuaaaagacagcaaaaagaagagagac

SEQ ID NO: 53228 - RNA, 32 nt, Homo Sapiens
caggacgaggugccgcccucgcccgggcccuc

SEQ ID NO: 53229 - RNA, 32 nt, Homo Sapiens
augggccggcgauugggaccagcugggcccca

SEQ ID NO: 53230 - RNA, 32 nt, Homo Sapiens
acagcucucccucugugcugggcuggucgugc

SEQ ID NO: 53231 - RNA, 32 nt, Homo Sapiens
ggcagacaagugccauuuuaauaaaaaaugua

SEQ ID NO: 53232 - RNA, 32 nt, Homo Sapiens
ggcccugcucaagaagggggccaggcagcugg

SEQ ID NO: 53233 - RNA, 32 nt, Homo Sapiens
gucgcccgcgccccgcaaccacuccucaccau

SEQ ID NO: 53234 - RNA, 32 nt, Homo Sapiens
accgucccgcggccugcgggagccgcucgccc

SEQ ID NO: 53235 - RNA, 32 nt, Homo Sapiens
aaugucacgauggacgagggcggcacgccccu

SEQ ID NO: 53236 - RNA, 32 nt, Homo Sapiens
cggcaugcccuucucccccaucuccguguccu

SEQ ID NO: 53237 - RNA, 32 nt, Homo Sapiens
ucauaaggaaauuuauguuuggauuuccagaa

SEQ ID NO: 53238 - RNA, 32 nt, Homo Sapiens
agagcuaauuuucugguuuguggguugaaaca

SEQ ID NO: 53239 - RNA, 32 nt, Homo Sapiens
agucaacaaucauuagauauuaacuuauuuuu

SEQ ID NO: 53240 - RNA, 32 nt, Homo Sapiens
uuguuuuuaacacacgcuccagcccuucauca

SEQ ID NO: 53241 - RNA, 31 nt, Homo Sapiens
gcggggauggagccccugcgggugcuggagc

SEQ ID NO: 53242 - RNA, 32 nt, Homo Sapiens
cagcccaggaaccaggcuuugcugggugcugc

SEQ ID NO: 53243 - RNA, 32 nt, Homo Sapiens
ggggauggaggaagaaggcauuaguaaaaggu

SEQ ID NO: 53244 - RNA, 32 nt, Homo Sapiens
guucccgcgcgugccgagacucugaggccuug

SEQ ID NO: 53245 - RNA, 32 nt, Homo Sapiens
uccaaggcugcuaacaaauaaucuucacuuuc

SEQ ID NO: 53246 - RNA, 32 nt, Homo Sapiens
cucgggguaguuugggucaaggacugucccuc

SEQ ID NO: 53247 - RNA, 31 nt, Homo Sapiens
ugagugaccaguguuuccagagccuggcaau

SEQ ID NO: 53248 - RNA, 32 nt, Homo Sapiens
ggggcugcagagaggguagagaagggacuuug

SEQ ID NO: 53249 - RNA, 32 nt, Homo Sapiens
augggcacccucgguugccggggggcaggugg

SEQ ID NO: 53250 - RNA, 32 nt, Homo Sapiens
cgggauggcaacugcggucacccugcuaaagu

SEQ ID NO: 53251 - RNA, 32 nt, Homo Sapiens
uuuuguaauauaucagguccaugaaauuagcu

SEQ ID NO: 53252 - RNA, 32 nt, Homo Sapiens
cuagaggaggcuuggguccugaauccacucuc

SEQ ID NO: 53253 - RNA, 32 nt, Homo Sapiens
guggcggcucuggugggaccaagcugcgccgg

SEQ ID NO: 53254 - RNA, 32 nt, Homo Sapiens
cucguggagucuuuuuccuccucagcuauaaa

SEQ ID NO: 53255 - RNA, 32 nt, Homo Sapiens
ggaggagguggccuagcugcucccaucgcuuc

SEQ ID NO: 53256 - RNA, 32 nt, Homo Sapiens
uagugcccagccugcgggccgaccgcgaccac

SEQ ID NO: 53257 - RNA, 32 nt, Homo Sapiens
cuugaagcuucacuuccgacaccugcacuggc

SEQ ID NO: 53258 - RNA, 32 nt, Homo Sapiens
uacagauaaagcacugaaaacaccacagugac

SEQ ID NO: 53259 - RNA, 32 nt, Homo Sapiens
ugccccgugggcauagguggacaggcucuggc

SEQ ID NO: 53260 - RNA, 32 nt, Homo Sapiens
caggauucagcaaacauuuucuguaaagggcc

SEQ ID NO: 53261 - RNA, 32 nt, Homo Sapiens
uaacgcugacgcccgcgccgccggcccgccgc

SEQ ID NO: 53262 - RNA, 32 nt, Homo Sapiens
cggacggagccggcgagcgggaugcugcggac

SEQ ID NO: 53263 - RNA, 32 nt, Homo Sapiens
cuccugucgguuccaggcaagcacagaugguu

SEQ ID NO: 53264 - RNA, 32 nt, Homo Sapiens
ugaucuucuugaaugauguuucagugugcaaa

SEQ ID NO: 53265 - RNA, 32 nt, Homo Sapiens
cuggggccgaggggccagggugugagguuuca

SEQ ID NO: 53266 - RNA, 32 nt, Homo Sapiens
caccaggcaaaacacaucaucuaaggaaaaga

SEQ ID NO: 53267 - RNA, 32 nt, Homo Sapiens
uggaaggauuaccacuguacacaaaucuaauc

SEQ ID NO: 53268 - RNA, 32 nt, Homo Sapiens
cgagcagcgggaggugcgggcucugucuagca

SEQ ID NO: 53269 - RNA, 32 nt, Homo Sapiens
gauuucuuguaaaaauauuuuguaugugugaa

SEQ ID NO: 53270 - RNA, 32 nt, Homo Sapiens
aguggugcuuaugggggagaugggacuagaac

SEQ ID NO: 53271 - RNA, 32 nt, Homo Sapiens
guaugacgcacuuuuccagcucgagcccucac

SEQ ID NO: 53272 - RNA, 32 nt, Homo Sapiens
uagcaaagaauggccuaauguuugucauaacu

SEQ ID NO: 53273 - RNA, 30 nt, Homo Sapiens
ggaggagaauuccaggacaagagugucaag

SEQ ID NO: 53274 - RNA, 32 nt, Homo Sapiens
ggaagguaaaagacuacugaaaagcuuucagc

SEQ ID NO: 53275 - RNA, 32 nt, Homo Sapiens
caucaucaguuauauuagguuaauauauggua

SEQ ID NO: 53276 - RNA, 32 nt, Homo Sapiens
uaaggccgagagaggggagugauggagagaga

SEQ ID NO: 53277 - RNA, 32 nt, Homo Sapiens
gauuguuacagaagcugaaauugcguucuaag

SEQ ID NO: 53278 - RNA, 32 nt, Homo Sapiens
gacuauggcaaggcccugaauguacuacguau

SEQ ID NO: 53279 - RNA, 32 nt, Homo Sapiens
cugggcugagcggccggcggcgcgggcccggc

SEQ ID NO: 53280 - RNA, 32 nt, Homo Sapiens
ccagagagccugaggaggaaaaucagcagacu

SEQ ID NO: 53281 - RNA, 32 nt, Homo Sapiens
uuugaaauuugacucaugaacuauuuacauuu

SEQ ID NO: 53282 - RNA, 32 nt, Homo Sapiens
gcagcgagcuccagcccucggcgguggcggcg

SEQ ID NO: 53283 - RNA, 32 nt, Homo Sapiens
gguacuggcugccugcccugggccagggaaug

SEQ ID NO: 53284 - RNA, 31 nt, Homo Sapiens
uuguccguguuuggcaaugugcuguuaaagu

SEQ ID NO: 53285 - RNA, 32 nt, Homo Sapiens
gacuggagaaaacugagccaugucuuggaugc

SEQ ID NO: 53286 - RNA, 32 nt, Homo Sapiens
accagacauguuggcaucaucucuuaguuggg

SEQ ID NO: 53287 - RNA, 32 nt, Homo Sapiens
caggcaacaugcauuuaucaccaccgggaaag

SEQ ID NO: 53288 - RNA, 32 nt, Homo Sapiens
aagggucugugcuaagguggauuaguaaaaga

SEQ ID NO: 53289 - RNA, 32 nt, Homo Sapiens
ggccagcucugccccaggggcugagcugccac

SEQ ID NO: 53290 - RNA, 32 nt, Homo Sapiens
ucagcuuacuccuucauucauuuuuucaggaa

SEQ ID NO: 53291 - RNA, 32 nt, Homo Sapiens
cuauuuucagagcaugauacaaauuccacagg

SEQ ID NO: 53292 - RNA, 32 nt, Homo Sapiens
uacucugucuuacucugucacccaggcuagag

SEQ ID NO: 53293 - RNA, 32 nt, Homo Sapiens
aauuuaaugagcccucuuucuuguggccguuu

SEQ ID NO: 53294 - RNA, 32 nt, Homo Sapiens
uccccugccugccugggaagaggaaagggagg

SEQ ID NO: 53295 - RNA, 32 nt, Homo Sapiens
ugguuccugagcuguggaccgggauagaauaa

SEQ ID NO: 53296 - RNA, 32 nt, Homo Sapiens
cacauuuuacacacacacacacacacacacac

SEQ ID NO: 53297 - RNA, 32 nt, Homo Sapiens
uccgccgggcgccccaggcugccgaguccgcu

SEQ ID NO: 53298 - RNA, 32 nt, Homo Sapiens
uuuuaguagagacggaguuuugccauguuggc

SEQ ID NO: 53299 - RNA, 30 nt, Homo Sapiens
cggacuggagggcccucgccggcgucgugc

SEQ ID NO: 53300 - RNA, 32 nt, Homo Sapiens
uucugcuagcuaaaugaaauguaguuugcuuu

SEQ ID NO: 53301 - RNA, 32 nt, Homo Sapiens
uccgcugcggcucggguuugccugccccgacc

SEQ ID NO: 53302 - RNA, 32 nt, Homo Sapiens
ggccgggcaggagccucuggggccuccacucc

SEQ ID NO: 53303 - RNA, 31 nt, Homo Sapiens
uuugauaagaggguuuuuagacuaacuucca

SEQ ID NO: 53304 - RNA, 32 nt, Homo Sapiens
ugcggagcugucuuuugagcaugaugcaugga

SEQ ID NO: 53305 - RNA, 27 nt, Homo Sapiens
aaguuauuauaacagugauucuuucaa

SEQ ID NO: 53306 - RNA, 32 nt, Homo Sapiens
ccagugccaagcccccagaggcuuguaagagu

SEQ ID NO: 53307 - RNA, 32 nt, Homo Sapiens
caugcacauaacccagcucaaccgggagugcc

SEQ ID NO: 53308 - RNA, 32 nt, Homo Sapiens
aacauuuaaaaauuacuguuuaauauuguuug

SEQ ID NO: 53309 - RNA, 32 nt, Homo Sapiens
gcucuucggcagcugcaccuucugccucaaca

SEQ ID NO: 53310 - RNA, 32 nt, Homo Sapiens
uuagaaaacugggaaugaauaagacauccaua

SEQ ID NO: 53311 - RNA, 32 nt, Homo Sapiens
agaacaaaaaagacacaaacaaaccaaccaga

SEQ ID NO: 53312 - RNA, 32 nt, Homo Sapiens
uugucaacugccuucccauggaaguuguaucu

SEQ ID NO: 53313 - RNA, 32 nt, Homo Sapiens
cagugagacccugggaaggaccagcaugcuaa

SEQ ID NO: 53314 - RNA, 26 nt, Homo Sapiens
uggacuaaauaaaaacuuuauuaugu

SEQ ID NO: 53315 - RNA, 32 nt, Homo Sapiens
aaauugaaaaagauccccaaggaucuguuacu

SEQ ID NO: 53316 - RNA, 32 nt, Homo Sapiens
cgcauccucccgccagccugcccgccugcucg

SEQ ID NO: 53317 - RNA, 32 nt, Homo Sapiens
ugcccacuccccuuuuuccuuccaccaugauu

SEQ ID NO: 53318 - RNA, 32 nt, Homo Sapiens
ugcucaccuuuggccaggugcuugucagaucc

SEQ ID NO: 53319 - RNA, 32 nt, Homo Sapiens
ugcacuugucaaaauacagcuaucaagaauga

SEQ ID NO: 53320 - RNA, 32 nt, Homo Sapiens
cccuucaggacaccccuuaccuaucugccuca

SEQ ID NO: 53321 - RNA, 32 nt, Homo Sapiens
gccaaggcuccuuacacgcauccucauuuuug

SEQ ID NO: 53322 - RNA, 32 nt, Homo Sapiens
cucugccuaaucuugugcauguuuucauugau

SEQ ID NO: 53323 - RNA, 32 nt, Homo Sapiens
uacugcaaaugggaagccagaacccacuucua

SEQ ID NO: 53324 - RNA, 32 nt, Homo Sapiens
ccgccugcccucgcccgagcccgggggcccaa

SEQ ID NO: 53325 - RNA, 32 nt, Homo Sapiens
aucucuuaauuucaaacuauguacuuguaaaa

SEQ ID NO: 53326 - RNA, 32 nt, Homo Sapiens
gcgggcacagguccaugcugcaggccacuacg

SEQ ID NO: 53327 - RNA, 32 nt, Homo Sapiens
uguuuuuccuugaguucuccuacaggaagcag

SEQ ID NO: 53328 - RNA, 32 nt, Homo Sapiens
ccccuugccccucccccagagggacuugacuu

SEQ ID NO: 53329 - RNA, 32 nt, Homo Sapiens
uuaaacccagggcaucaggaugugcuugggcu

SEQ ID NO: 53330 - RNA, 32 nt, Homo Sapiens
aagcgucacuacauuugauaauaauuagaucu

SEQ ID NO: 53331 - RNA, 32 nt, Homo Sapiens
aagugucacuauauuugauaauaauuagaucu

SEQ ID NO: 53332 - RNA, 32 nt, Homo Sapiens
aaagguuuccccuuucacuuggcacucauuuc

SEQ ID NO: 53333 - RNA, 32 nt, Homo Sapiens
ucggccauucccuccaccuccaagacaggugg

SEQ ID NO: 53334 - RNA, 32 nt, Homo Sapiens
cagccuugcggcggcccgggccuuaaagcguc

SEQ ID NO: 53335 - RNA, 32 nt, Homo Sapiens
gaacucagcccuuccaugccagcccuuccugc

SEQ ID NO: 53336 - RNA, 32 nt, Homo Sapiens
ugaugggcugccugccgaggaggccgcagcag

SEQ ID NO: 53337 - RNA, 32 nt, Homo Sapiens
guguugauccugaaagcagacugagauaacau

SEQ ID NO: 53338 - RNA, 32 nt, Homo Sapiens
cauagugagauucuguuaaaaaaauaaaauaa

SEQ ID NO: 53339 - RNA, 32 nt, Homo Sapiens
caggguaacacacaccaagaguggagugcggc

SEQ ID NO: 53340 - RNA, 32 nt, Homo Sapiens
cgcccgggccugcgggaagcgauggagcccgg

SEQ ID NO: 53341 - RNA, 32 nt, Homo Sapiens
ggggcuauaacccugcuauuuuucauugacuc

SEQ ID NO: 53342 - RNA, 32 nt, Homo Sapiens
ugaaaucuuuucaaaaaucaagagacugggua

SEQ ID NO: 53343 - RNA, 32 nt, Homo Sapiens
uccuugcugucuuuuuauuuuccuuuuuguuu

SEQ ID NO: 53344 - RNA, 32 nt, Homo Sapiens
uuccagcaggcgcuccucccucacgcaggaga

SEQ ID NO: 53345 - RNA, 32 nt, Homo Sapiens
auauccaacuaccuacaagauaccuucuugag

SEQ ID NO: 53346 - RNA, 32 nt, Homo Sapiens
auggcugcuuugacaaggcagacgucguaccc

SEQ ID NO: 53347 - RNA, 32 nt, Homo Sapiens
uaaauuauaugauaucaaauuuguuccuguaa

SEQ ID NO: 53348 - RNA, 32 nt, Homo Sapiens
aaguauuccacuccucccuuuuugccagugca

SEQ ID NO: 53349 - RNA, 32 nt, Homo Sapiens
uacaaaugagagauuugcuauaccgugagaag

SEQ ID NO: 53350 - RNA, 32 nt, Homo Sapiens
guaguccacagugucuauucuggucugggaaa

SEQ ID NO: 53351 - RNA, 32 nt, Homo Sapiens
ggcgcuguagcagcggcaggcugcugggcagc

SEQ ID NO: 53352 - RNA, 32 nt, Homo Sapiens
ugcugcgguuucucuuggccuguccucacugg

SEQ ID NO: 53353 - RNA, 32 nt, Homo Sapiens
uucugcagcuuagcuuguguccugcccuccgc

SEQ ID NO: 53354 - RNA, 32 nt, Homo Sapiens
uguggagcuaggauugugagugaccugcaggc

SEQ ID NO: 53355 - RNA, 32 nt, Homo Sapiens
cgggcagugagaaucaccaaaaaggaaguaaa

SEQ ID NO: 53356 - RNA, 32 nt, Homo Sapiens
cacuguggccccagcuuuccaccgugccaagg

SEQ ID NO: 53357 - RNA, 32 nt, Homo Sapiens
aacuuuuuauugccuucucaccagcugcaaag

SEQ ID NO: 53358 - RNA, 32 nt, Homo Sapiens
gccuucuuuuucugagacagcuugucugguaa

SEQ ID NO: 53359 - RNA, 32 nt, Homo Sapiens
uucuuguaaaguaagaaaaucuuauuuaugau

SEQ ID NO: 53360 - RNA, 32 nt, Homo Sapiens
acuuucacugucagucuuucuaggagucuggc

SEQ ID NO: 53361 - RNA, 32 nt, Homo Sapiens
gucugcgcuccagccuucgccuggcagagcgc

SEQ ID NO: 53362 - RNA, 32 nt, Homo Sapiens
gcaagucuccucaggaccugggaggggacagc

SEQ ID NO: 53363 - RNA, 32 nt, Homo Sapiens
cuugcgaucugaaagcacaucacacagagcaa

SEQ ID NO: 53364 - RNA, 32 nt, Homo Sapiens
uugguucugaugcacugcaagcaaguaaccag

SEQ ID NO: 53365 - RNA, 32 nt, Homo Sapiens
uguaacuuaugaacacacgugaaguguugagu

SEQ ID NO: 53366 - RNA, 32 nt, Homo Sapiens
ccucaggaggucgggacuagggugggagaggc

SEQ ID NO: 53367 - RNA, 32 nt, Homo Sapiens
agccgcacaggagcugccccggagcugagggg

SEQ ID NO: 53368 - RNA, 32 nt, Homo Sapiens
ucuagccccucucucauucucuagguucacuu

SEQ ID NO: 53369 - RNA, 32 nt, Homo Sapiens
cauuuagaauacuuauggcagauaaguaaggc

SEQ ID NO: 53370 - RNA, 32 nt, Homo Sapiens
gcagcucggccgacugggcccggagcggcgcg

SEQ ID NO: 53371 - RNA, 32 nt, Homo Sapiens
uuugccuuuguccucauccaaagcauuuugug

SEQ ID NO: 53372 - RNA, 30 nt, Homo Sapiens
auauaauauuguaauugggaaaccugaaua

SEQ ID NO: 53373 - RNA, 32 nt, Homo Sapiens
uacauuucuaaaauaaaaauacacauuuuuug

SEQ ID NO: 53374 - RNA, 27 nt, Homo Sapiens
uacacuaaaaaauaaacuagaguugcu

SEQ ID NO: 53375 - RNA, 32 nt, Homo Sapiens
ugcaccccaacugaagggacuccaugagguug

SEQ ID NO: 53376 - RNA, 32 nt, Homo Sapiens
gauccccgucucugcccugggcuccucuuagc

SEQ ID NO: 53377 - RNA, 32 nt, Homo Sapiens
auaugcauuuuaccuuugggaauauguuaauu

SEQ ID NO: 53378 - RNA, 32 nt, Homo Sapiens
agauuuuucuucauugcuuaguugagcaguuu

SEQ ID NO: 53379 - RNA, 32 nt, Homo Sapiens
uuuguauugugcuuuuuacuugagucgucuuc

SEQ ID NO: 53380 - RNA, 32 nt, Homo Sapiens
agcugcggguccgggauucccagccauggcag

SEQ ID NO: 53381 - RNA, 32 nt, Homo Sapiens
cgguuccuuucugcuuuucugaaugcaucaag

SEQ ID NO: 53382 - RNA, 32 nt, Homo Sapiens
aguuaagacaccuagucuaauggccuuuuggg

SEQ ID NO: 53383 - RNA, 32 nt, Homo Sapiens
auccgccagcaccaccugaggauccagaaacc

SEQ ID NO: 53384 - RNA, 32 nt, Homo Sapiens
uuuauguugcuuaugauaauuauuuugcauua

SEQ ID NO: 53385 - RNA, 32 nt, Homo Sapiens
aagccaccgcggcuccaggaguccugugacuc

SEQ ID NO: 53386 - RNA, 32 nt, Homo Sapiens
caguccggccuagggcucccagcccuugacug

SEQ ID NO: 53387 - RNA, 32 nt, Homo Sapiens
uaucaucuacuuaucaucuaccuaucaucugu

SEQ ID NO: 53388 - RNA, 32 nt, Homo Sapiens
ugaucauagaaaggguauuuuaggcugcaggg

SEQ ID NO: 53389 - RNA, 32 nt, Homo Sapiens
ccugaagaugcaccgaagacagcugggaggug

SEQ ID NO: 53390 - RNA, 32 nt, Homo Sapiens
acggccucgcuuccucgccgcgggcuccgcug

SEQ ID NO: 53391 - RNA, 32 nt, Homo Sapiens
ccugccccgccauccugacgccgcccucuucu

SEQ ID NO: 53392 - RNA, 32 nt, Homo Sapiens
cgccuguaauucuagcacuuugggagacugaa

SEQ ID NO: 53393 - RNA, 32 nt, Homo Sapiens
cacuggugaagcugccguggggucaggaggaa

SEQ ID NO: 53394 - RNA, 32 nt, Homo Sapiens
cugagagggugguggagagggugguggucucu

SEQ ID NO: 53395 - RNA, 31 nt, Homo Sapiens
ggccugcggcacuugcgggccucccugcugg

SEQ ID NO: 53396 - RNA, 32 nt, Homo Sapiens
cacucaucugccaagcuccucaaucauagcca

SEQ ID NO: 53397 - RNA, 32 nt, Homo Sapiens
agauguuuccuugaauggcacaaagugugcgc

SEQ ID NO: 53398 - RNA, 32 nt, Homo Sapiens
gcaggcuguuugucuuggaagcuuuuguuuga

SEQ ID NO: 53399 - RNA, 32 nt, Homo Sapiens
caccaggauccuuuggauuaauccucugccac

SEQ ID NO: 53400 - RNA, 32 nt, Homo Sapiens
agaggcaggaggaucaggagcccaggaguuug

SEQ ID NO: 53401 - RNA, 32 nt, Homo Sapiens
acuccuuuguugggccuuccaaggcugguccu

SEQ ID NO: 53402 - RNA, 32 nt, Homo Sapiens
ccauaugaugaccccaugugugccugugucca

SEQ ID NO: 53403 - RNA, 32 nt, Homo Sapiens
gauuguggcagccuuugugaccaagagcagaa

SEQ ID NO: 53404 - RNA, 32 nt, Homo Sapiens
ccaguuugauuucaauaaaucuguccacuccc

SEQ ID NO: 53405 - RNA, 32 nt, Homo Sapiens
aauguuuggaauuuaagaaauaacuuguguua

SEQ ID NO: 53406 - RNA, 32 nt, Homo Sapiens
uauagccuauuauaaaucccuguaucguggac

SEQ ID NO: 53407 - RNA, 32 nt, Homo Sapiens
agaccaagcagggaggguguugaggaggcuuc

SEQ ID NO: 53408 - RNA, 32 nt, Homo Sapiens
uuauagcacaucucaauuuacacuagccacau

SEQ ID NO: 53409 - RNA, 32 nt, Homo Sapiens
ccgacgugucuccuguuuuucuggguggccuc

SEQ ID NO: 53410 - RNA, 32 nt, Homo Sapiens
uucuucaacuaucuuugauggggucuuucaag

SEQ ID NO: 53411 - RNA, 32 nt, Homo Sapiens
cauagcuucccuucccucccccuucacccacu

SEQ ID NO: 53412 - RNA, 32 nt, Homo Sapiens
uguuacuucugagguaaguuaaguaaguugau

SEQ ID NO: 53413 - RNA, 32 nt, Homo Sapiens
cauucugggaugcagcagcuacugcccacaga

SEQ ID NO: 53414 - RNA, 32 nt, Homo Sapiens
ugacuggauuuugaacgcuugaaaucaggcuc

SEQ ID NO: 53415 - RNA, 32 nt, Homo Sapiens
ggugcugguucacucugcccagcccugaaugu

SEQ ID NO: 53416 - RNA, 32 nt, Homo Sapiens
ugcgggucaucucuugggggauuuucuuaaag

SEQ ID NO: 53417 - RNA, 32 nt, Homo Sapiens
cagcccgacccuccccacacccuaggguaccc

SEQ ID NO: 53418 - RNA, 32 nt, Homo Sapiens
aaaaguguucuucuuccaguuuguuuuacuaa

SEQ ID NO: 53419 - RNA, 32 nt, Homo Sapiens
ccuggggacagaggugaaaugcacaagcugcu

SEQ ID NO: 53420 - RNA, 32 nt, Homo Sapiens
cgcaggggauguccaagaaaccccaaaagccu

SEQ ID NO: 53421 - RNA, 32 nt, Homo Sapiens
caguuuaaacacaucaauaaauacuuuaacuu

SEQ ID NO: 53422 - RNA, 32 nt, Homo Sapiens
ggaagagccgggaccuucccccugcacccccg

SEQ ID NO: 53423 - RNA, 32 nt, Homo Sapiens
ggaaaaaaugaccuucaagagaauuaggacuu

SEQ ID NO: 53424 - RNA, 32 nt, Homo Sapiens
cucugggcuugccugcccuucaacagggucua

SEQ ID NO: 53425 - RNA, 32 nt, Homo Sapiens
gcucaacucugcugccagacaagugcgggcgu

SEQ ID NO: 53426 - RNA, 32 nt, Homo Sapiens
aagggcacuacauaaccucucugguaacuccu

SEQ ID NO: 53427 - RNA, 32 nt, Homo Sapiens
guccuacauuugcauggauggaugcaugcauu

SEQ ID NO: 53428 - RNA, 32 nt, Homo Sapiens
agccguagccgcgccugucccaauaugaauag

SEQ ID NO: 53429 - RNA, 32 nt, Homo Sapiens
ggagcaggugagggcgggcccgcggccucccu

SEQ ID NO: 53430 - RNA, 32 nt, Homo Sapiens
ccggcucugcgggaccccggccgggccggacc

SEQ ID NO: 53431 - RNA, 32 nt, Homo Sapiens
ucuucacccgcggagauuccggcugaaggagc

SEQ ID NO: 53432 - RNA, 32 nt, Homo Sapiens
ugaccggcuugucauccuuacgccacuaaccu

SEQ ID NO: 53433 - RNA, 32 nt, Homo Sapiens
gcggccagacgcugcgggagcacugcugggcu

SEQ ID NO: 53434 - RNA, 32 nt, Homo Sapiens
ugcaagaaauaaaaauuuaagaauuaaauugc

SEQ ID NO: 53435 - RNA, 32 nt, Homo Sapiens
acauuuuucuucauccagcuuuuguucaaaaa

SEQ ID NO: 53436 - RNA, 32 nt, Homo Sapiens
uagauaugucaaauuauuuucuuaguguacgc

SEQ ID NO: 53437 - RNA, 32 nt, Homo Sapiens
uccuuuauauugcaugucuauuucuguuacac

SEQ ID NO: 53438 - RNA, 32 nt, Homo Sapiens
gcguuucucggagcucccggcuccucagcggg

SEQ ID NO: 53439 - RNA, 32 nt, Homo Sapiens
ccccgccgucaggggcucuuccugucagugcc

SEQ ID NO: 53440 - RNA, 32 nt, Homo Sapiens
ugugcuucaaggagaugauaccugucauccau

SEQ ID NO: 53441 - RNA, 32 nt, Homo Sapiens
cucugaugagaacagauugucuauaaauccca

SEQ ID NO: 53442 - RNA, 32 nt, Homo Sapiens
auuuuuauauauauuuuuauaugaagauaaac

SEQ ID NO: 53443 - RNA, 32 nt, Homo Sapiens
cuauacugucuccuguucaucaucccaggcuu

SEQ ID NO: 53444 - RNA, 32 nt, Homo Sapiens
acgggcaccaaugugagcuggugcugggcugu

SEQ ID NO: 53445 - RNA, 32 nt, Homo Sapiens
agaucaaggcauguauuagacacaagcauauu

SEQ ID NO: 53446 - RNA, 32 nt, Homo Sapiens
ugcuugaaccuggaaggcagggguugcaguga

SEQ ID NO: 53447 - RNA, 32 nt, Homo Sapiens
ucaguaaaaaucaaaacuuaaaauucuaacca

SEQ ID NO: 53448 - RNA, 29 nt, Homo Sapiens
aagaguugaugucagucuauaaaaggaag

SEQ ID NO: 53449 - RNA, 32 nt, Homo Sapiens
caggaucggcccgagacccaggccaugcccac

SEQ ID NO: 53450 - RNA, 32 nt, Homo Sapiens
cuagggguuugcucacauauaagggacuuucu

SEQ ID NO: 53451 - RNA, 32 nt, Homo Sapiens
cugcuccagucccaggggcaggccauucugca

SEQ ID NO: 53452 - RNA, 32 nt, Homo Sapiens
aaaugaggccccaggacaccuggguucacacc

SEQ ID NO: 53453 - RNA, 32 nt, Homo Sapiens
ccuggagcgcggucgggaguaaaaucgcagga

SEQ ID NO: 53454 - RNA, 32 nt, Homo Sapiens
agguggccaacagcuuccuggcugccaucuuu

SEQ ID NO: 53455 - RNA, 32 nt, Homo Sapiens
uaccuugcuuggauuuaaaacuuuuuuggaag

SEQ ID NO: 53456 - RNA, 32 nt, Homo Sapiens
ccacucugcgcuuggguuccggcagcgcggag

SEQ ID NO: 53457 - RNA, 32 nt, Homo Sapiens
ugccugcggggcagugaugucuggccaccggc

SEQ ID NO: 53458 - RNA, 32 nt, Homo Sapiens
ggagagagggaagaggggcguuuucgaggaag

SEQ ID NO: 53459 - RNA, 32 nt, Homo Sapiens
uacaguacugaauaauauuuaguauuacaaua

SEQ ID NO: 53460 - RNA, 32 nt, Homo Sapiens
gcugcauguucccucccccacucuaagaccaa

SEQ ID NO: 53461 - RNA, 32 nt, Homo Sapiens
cguauguaaucccagcacuuugggaagccaag

SEQ ID NO: 53462 - RNA, 28 nt, Homo Sapiens
gcaaauguuacagggccuggugguguuc

SEQ ID NO: 53463 - RNA, 32 nt, Homo Sapiens
acauuuuuguuuaauucaauuauucuuacuaa

SEQ ID NO: 53464 - RNA, 32 nt, Homo Sapiens
uaagcaucauugcuucuguuugcggcuaguuu

SEQ ID NO: 53465 - RNA, 32 nt, Homo Sapiens
ccgccuccacucgcagcccccgggaugggucc

SEQ ID NO: 53466 - RNA, 32 nt, Homo Sapiens
uccgcccccuccccggucccgcccccucggag

SEQ ID NO: 53467 - RNA, 32 nt, Homo Sapiens
accuaggggacugccucugugccucuccccag

SEQ ID NO: 53468 - RNA, 32 nt, Homo Sapiens
uuacaacccuaauaucccaggcacauacaaaa

SEQ ID NO: 53469 - RNA, 32 nt, Homo Sapiens
gacggcugccccaccccguuccauggcucccc

SEQ ID NO: 53470 - RNA, 32 nt, Homo Sapiens
uuuuuaaaaacgaaacaaaguuaugggguuaa

SEQ ID NO: 53471 - RNA, 32 nt, Homo Sapiens
acauuguauagaagaacauuugugaaacuccc

SEQ ID NO: 53472 - RNA, 32 nt, Homo Sapiens
ugcaugccugucauccaagcuacucaagagac

SEQ ID NO: 53473 - RNA, 32 nt, Homo Sapiens
ccuggcaaccccagccccagccucagcccugc

SEQ ID NO: 53474 - RNA, 32 nt, Homo Sapiens
gguuauuuucuuuuguaggugaaagguguagc

SEQ ID NO: 53475 - RNA, 32 nt, Homo Sapiens
aggccaagcgaggggcugccagugucccggga

SEQ ID NO: 53476 - RNA, 32 nt, Homo Sapiens
ggaccacggcggcgcccgcagcuccucaccgc

SEQ ID NO: 53477 - RNA, 32 nt, Homo Sapiens
gcuggggaacagagcgggccucuucccucagu

SEQ ID NO: 53478 - RNA, 32 nt, Homo Sapiens
gcuccacuucccagcccuuccuugccccugac

SEQ ID NO: 53479 - RNA, 32 nt, Homo Sapiens
aauuucuaggucugaaauauagcagaggaaag

SEQ ID NO: 53480 - RNA, 32 nt, Homo Sapiens
aaccuacaaaaauaaacugaacuugcaauauu

SEQ ID NO: 53481 - RNA, 32 nt, Homo Sapiens
auauauauguacuguuuuguuuccugucuuga

SEQ ID NO: 53482 - RNA, 32 nt, Homo Sapiens
aguaggugaccaaagcacuauggaagugaaua

SEQ ID NO: 53483 - RNA, 32 nt, Homo Sapiens
agauuggcuggguauaagguaacuuaauauug

SEQ ID NO: 53484 - RNA, 32 nt, Homo Sapiens
uacugcucuaaaaguuggagaagucuugcagu

SEQ ID NO: 53485 - RNA, 32 nt, Homo Sapiens
gcgaguccgcgugcggagccaggaggcagcgu

SEQ ID NO: 53486 - RNA, 32 nt, Homo Sapiens
ugguccuuuccacagccuuucugucccuuaaa

SEQ ID NO: 53487 - RNA, 32 nt, Homo Sapiens
uuagcuuugugggugguauuuucaugcaaaua

SEQ ID NO: 53488 - RNA, 32 nt, Homo Sapiens
ugaacucagaggugcugguggacgggcuagga

SEQ ID NO: 53489 - RNA, 32 nt, Homo Sapiens
cucgcccgggguugaucugugcaugccacucc

SEQ ID NO: 53490 - RNA, 32 nt, Homo Sapiens
agucugccuuuuuugcacugaacauaagcacu

SEQ ID NO: 53491 - RNA, 32 nt, Homo Sapiens
ggcucucccuccccagccacgaguaugccaca

SEQ ID NO: 53492 - RNA, 32 nt, Homo Sapiens
gacugcugggcaugcaugaaguuaagggcaag

SEQ ID NO: 53493 - RNA, 32 nt, Homo Sapiens
cugugcugggggcccggucgccaggcaaaaag

SEQ ID NO: 53494 - RNA, 32 nt, Homo Sapiens
uaucacaauuugaaaagauaagcaaaaguuug

SEQ ID NO: 53495 - RNA, 32 nt, Homo Sapiens
aaagaguaaaaugaaguacauucugguuacug

SEQ ID NO: 53496 - RNA, 32 nt, Homo Sapiens
gcacccuggauggcccggccccggggcccgua

SEQ ID NO: 53497 - RNA, 32 nt, Homo Sapiens
auaaaaccgagaauaaggaacuuuacauuguc

SEQ ID NO: 53498 - RNA, 32 nt, Homo Sapiens
cgcagaaggagcccucccgggacccaggaccc

SEQ ID NO: 53499 - RNA, 32 nt, Homo Sapiens
ccuaguuuccaaggaagaacucacugauuccg

SEQ ID NO: 53500 - RNA, 29 nt, Homo Sapiens
acauauauauguauauauacacauauaug

SEQ ID NO: 53501 - RNA, 32 nt, Homo Sapiens
auuaagcauuggagacuagaaaauuacuuucc

SEQ ID NO: 53502 - RNA, 32 nt, Homo Sapiens
caaggcuuggaggaagcgucagugcccuggag

SEQ ID NO: 53503 - RNA, 32 nt, Homo Sapiens
gccuaugugucugaguccggccuccucggguc

SEQ ID NO: 53504 - RNA, 32 nt, Homo Sapiens
ggcauccugccaggugucauggccacgcacag

SEQ ID NO: 53505 - RNA, 32 nt, Homo Sapiens
aguaaacuucccuccaucccaggccugccagc

SEQ ID NO: 53506 - RNA, 32 nt, Homo Sapiens
uggucugucagccugucuucuaacaccucaaa

SEQ ID NO: 53507 - RNA, 32 nt, Homo Sapiens
cauggaaaauuaaccagaaaguaucaguucuu

SEQ ID NO: 53508 - RNA, 32 nt, Homo Sapiens
uaaauauauacugauaaugccuauggacauuu

SEQ ID NO: 53509 - RNA, 32 nt, Homo Sapiens
aaccgccgccggguggcguggagcgucccgag

SEQ ID NO: 53510 - RNA, 32 nt, Homo Sapiens
agauuuacaaauaaucuuugaauaucugcuuc

SEQ ID NO: 53511 - RNA, 32 nt, Homo Sapiens
gcacggacugucaguucucugggaagugguca

SEQ ID NO: 53512 - RNA, 32 nt, Homo Sapiens
agaaucucagaauugaaagagaccugagguuc

SEQ ID NO: 53513 - RNA, 32 nt, Homo Sapiens
ccgaccccggacgaccccggccacggacagac

SEQ ID NO: 53514 - RNA, 32 nt, Homo Sapiens
cgcguaccggcgggcuucgaaaccgcaguccu

SEQ ID NO: 53515 - RNA, 32 nt, Homo Sapiens
ccacacccgcccgaccuucgcccgcgcugccc

SEQ ID NO: 53516 - RNA, 32 nt, Homo Sapiens
gaagccuugaggugggggcccaagacccagau

SEQ ID NO: 53517 - RNA, 32 nt, Homo Sapiens
ucuuucuggguuguaaacaugugguaguacca

SEQ ID NO: 53518 - RNA, 27 nt, Homo Sapiens
guaucccaaguagucugguaugaucug

SEQ ID NO: 53519 - RNA, 32 nt, Homo Sapiens
uguuauaaacacaccccaaggaagcaauauuu

SEQ ID NO: 53520 - RNA, 32 nt, Homo Sapiens
gguucgggcagcuccuccugcucucagaggug

SEQ ID NO: 53521 - RNA, 32 nt, Homo Sapiens
caugaaauagugauuauaucuguggaaaagca

SEQ ID NO: 53522 - RNA, 32 nt, Homo Sapiens
uaacaacgucuucgccaacuauaguuaguaac

SEQ ID NO: 53523 - RNA, 32 nt, Homo Sapiens
ggcaccccauccccagcacauucccaugacag

SEQ ID NO: 53524 - RNA, 32 nt, Homo Sapiens
ggauucacuagaagcucaauccugucacccaa

SEQ ID NO: 53525 - RNA, 31 nt, Homo Sapiens
caaguguuauggguuuuuaauguugaaauca

SEQ ID NO: 53526 - RNA, 32 nt, Homo Sapiens
cagggaccaaaauuccuugucagcugaggaag

SEQ ID NO: 53527 - RNA, 32 nt, Homo Sapiens
ggcuguagacauggggaucggaugcuggagaa

SEQ ID NO: 53528 - RNA, 29 nt, Homo Sapiens
gacguaacagugaugucuuuuaaaaaauc

SEQ ID NO: 53529 - RNA, 32 nt, Homo Sapiens
ucuagcauuuacaaaacucagaucucaaagcu

SEQ ID NO: 53530 - RNA, 32 nt, Homo Sapiens
acugggaaauaugacuaaauuugacguaacua

SEQ ID NO: 53531 - RNA, 27 nt, Homo Sapiens
cuuuguagcaauaaaauguuuuuuacg

SEQ ID NO: 53532 - RNA, 32 nt, Homo Sapiens
cccaagguggcagauguggaaccaucagagag

SEQ ID NO: 53533 - RNA, 32 nt, Homo Sapiens
uuguucuugguaggguuuuucuuuuucuuuuu

SEQ ID NO: 53534 - RNA, 30 nt, Homo Sapiens
cgggaagauggcggcggcgcaggaggcgga

SEQ ID NO: 53535 - RNA, 32 nt, Homo Sapiens
uuuccuccuugaccccagaggaucuggcucua

SEQ ID NO: 53536 - RNA, 32 nt, Homo Sapiens
cacacacagcagcugccugcccugcccuggcu

SEQ ID NO: 53537 - RNA, 32 nt, Homo Sapiens
auaacaaauauuaaagauuuccuuggagucag

SEQ ID NO: 53538 - RNA, 32 nt, Homo Sapiens
uagaauuucaacauguucuguagcuuagagug

SEQ ID NO: 53539 - RNA, 32 nt, Homo Sapiens
cuuaauauuuuuugcugggaccaucuaccugc

SEQ ID NO: 53540 - RNA, 32 nt, Homo Sapiens
gaaggaaucuucucaucuuuuaucuaacuaua

SEQ ID NO: 53541 - RNA, 32 nt, Homo Sapiens
uacaggcgcgcgccgccacaccugacugguuu

SEQ ID NO: 53542 - RNA, 32 nt, Homo Sapiens
uaguuaguggagggcaggauucucaggucccc

SEQ ID NO: 53543 - RNA, 32 nt, Homo Sapiens
ccaccuguggccugggugcccucuggaggccg

SEQ ID NO: 53544 - RNA, 32 nt, Homo Sapiens
gguggccuuauggaacugacaaacacuaauca

SEQ ID NO: 53545 - RNA, 32 nt, Homo Sapiens
ugcaccuccacuuggugacugacgccguggcc

SEQ ID NO: 53546 - RNA, 32 nt, Homo Sapiens
caaaagugccaagcagaacauaaaacauccuu

SEQ ID NO: 53547 - RNA, 32 nt, Homo Sapiens
aggaacaaacuccaaacacgccgccuuuaaga

SEQ ID NO: 53548 - RNA, 32 nt, Homo Sapiens
uacaugaaaauaaaauucauuuuuguauauug

SEQ ID NO: 53549 - RNA, 32 nt, Homo Sapiens
cccucuccacacucacggggacagggcgugag

SEQ ID NO: 53550 - RNA, 32 nt, Homo Sapiens
ugucuguugaucuguguuuucauuuacaucuc

SEQ ID NO: 53551 - RNA, 30 nt, Homo Sapiens
ggggugggaggugaggaaaaucugagguac

SEQ ID NO: 53552 - RNA, 31 nt, Homo Sapiens
uagguugcggcacaacgccaggcaaaagaag

SEQ ID NO: 53553 - RNA, 32 nt, Homo Sapiens
augcucccugaacuguugguauuaaggcagau

SEQ ID NO: 53554 - RNA, 31 nt, Homo Sapiens
ggcgggaugggcggggaggcugggugcgcgg

SEQ ID NO: 53555 - RNA, 32 nt, Homo Sapiens
uaaaacuaugaucacugaauccauuuuauuuu

SEQ ID NO: 53556 - RNA, 30 nt, Homo Sapiens
aauaaaauuuucaaacuuuguacuguuaaa

SEQ ID NO: 53557 - RNA, 32 nt, Homo Sapiens
uaaagugauuuuuuuuuuuuuaacccaaaaaa

SEQ ID NO: 53558 - RNA, 32 nt, Homo Sapiens
cugccagaccuccuuccugaccucugaggcag

SEQ ID NO: 53559 - RNA, 32 nt, Homo Sapiens
uaaaaacagaaggaaauugagauuagagggag

SEQ ID NO: 53560 - RNA, 32 nt, Homo Sapiens
ccuugaucuuggcgaaagcccucgguguggca

SEQ ID NO: 53561 - RNA, 32 nt, Homo Sapiens
uggacauggcaaugaugaguuuuuaaaaaaca

SEQ ID NO: 53562 - RNA, 32 nt, Homo Sapiens
agacuggauguaccaccaacuacuaccuguaa

SEQ ID NO: 53563 - RNA, 32 nt, Homo Sapiens
gcacgcgcccuccgcccucccggccucgcucc

SEQ ID NO: 53564 - RNA, 32 nt, Homo Sapiens
agucggcgucucaacagucuccaguguccacg

SEQ ID NO: 53565 - RNA, 32 nt, Homo Sapiens
cccugaaucaagccucuuucuaaaaguuaagg

SEQ ID NO: 53566 - RNA, 32 nt, Homo Sapiens
cauaaaugcuaucucagcauguucuagaacac

SEQ ID NO: 53567 - RNA, 32 nt, Homo Sapiens
gcucccagggcggcccgcugccccacacccuc

SEQ ID NO: 53568 - RNA, 32 nt, Homo Sapiens
cucuacuaaaaguacaaaaauuagucagguau

SEQ ID NO: 53569 - RNA, 32 nt, Homo Sapiens
cuaguccuguucagagcagcacugucacugca

SEQ ID NO: 53570 - RNA, 32 nt, Homo Sapiens
gcgcagcgggggcuaccaggggacccgcggcc

SEQ ID NO: 53571 - RNA, 32 nt, Homo Sapiens
aucuuaaauuuauuagauaugaguuguuuuca

SEQ ID NO: 53572 - RNA, 32 nt, Homo Sapiens
ucugacagcacauaugaaauaguucaucuaua

SEQ ID NO: 53573 - RNA, 32 nt, Homo Sapiens
aggucgcccagacgucggaggagccgggucac

SEQ ID NO: 53574 - RNA, 32 nt, Homo Sapiens
gaauuuuauacuguuuucuacuuuuccauuaa

SEQ ID NO: 53575 - RNA, 32 nt, Homo Sapiens
cauuuggcccccuuuccguccuccucuguuug

SEQ ID NO: 53576 - RNA, 32 nt, Homo Sapiens
uucccuucucagccacccacagcccucauagg

SEQ ID NO: 53577 - RNA, 32 nt, Homo Sapiens
cucuuuucauucuccuuccaugugaggcccug

SEQ ID NO: 53578 - RNA, 32 nt, Homo Sapiens
acuaacacagaaaaacagaaacugagugugag

SEQ ID NO: 53579 - RNA, 32 nt, Homo Sapiens
uuuuuccuugcagccgcugaggaggcgauaaa

SEQ ID NO: 53580 - RNA, 32 nt, Homo Sapiens
cgagaagucaccaaggccaucuggagacuccu

SEQ ID NO: 53581 - RNA, 32 nt, Homo Sapiens
aagauugaaaaauaaauuuacugaaauacaaa

SEQ ID NO: 53582 - RNA, 32 nt, Homo Sapiens
cagaccaaauucaaauugaauuugaauaaauu

SEQ ID NO: 53583 - RNA, 32 nt, Homo Sapiens
ggucacccaagcaacaaagucccgagcaauga

SEQ ID NO: 53584 - RNA, 32 nt, Homo Sapiens
gcgucccucccagcggcgcgugagcggcacug

SEQ ID NO: 53585 - RNA, 32 nt, Homo Sapiens
cguauucacugugcgccaguacuccuggcugu

SEQ ID NO: 53586 - RNA, 32 nt, Homo Sapiens
aagacagaaacaaacguguaucaagcucccug

SEQ ID NO: 53587 - RNA, 30 nt, Homo Sapiens
agagcuggcaggcggcagggcuggcacaga

SEQ ID NO: 53588 - RNA, 32 nt, Homo Sapiens
acccccugugaacucacaucccauugguuuac

SEQ ID NO: 53589 - RNA, 32 nt, Homo Sapiens
aguaugcccuuaaaauguauuggaaagguucc

SEQ ID NO: 53590 - RNA, 32 nt, Homo Sapiens
uaugcuuucucuguguguguaccuguuguaug

SEQ ID NO: 53591 - RNA, 32 nt, Homo Sapiens
gauuuuaggggauauggggagggaacaaguag

SEQ ID NO: 53592 - RNA, 32 nt, Homo Sapiens
uuucccccuuggugguuuuucagacaccugca

SEQ ID NO: 53593 - RNA, 32 nt, Homo Sapiens
gaaagucuugucaucauuagauaugaguucuu

SEQ ID NO: 53594 - RNA, 31 nt, Homo Sapiens
gccagucagggccugccaggagucuacacag

SEQ ID NO: 53595 - RNA, 32 nt, Homo Sapiens
aggcgcucucagcucucuccccgguacgugac

SEQ ID NO: 53596 - RNA, 32 nt, Homo Sapiens
gccauuuagcuacuggggacaugcugagggcc

SEQ ID NO: 53597 - RNA, 32 nt, Homo Sapiens
auuuguuucucaagccucuuuguggaugacuc

SEQ ID NO: 53598 - RNA, 32 nt, Homo Sapiens
cgagccuuuucccugguguugcagcuguuguu

SEQ ID NO: 53599 - RNA, 32 nt, Homo Sapiens
cccugggggaggagggcgaagcgacgcggcga

SEQ ID NO: 53600 - RNA, 32 nt, Homo Sapiens
ugaagaaccauauuuucuuaagcaucaaagag

SEQ ID NO: 53601 - RNA, 32 nt, Homo Sapiens
uucucucccacuuuuauacuguucagcaaacu

SEQ ID NO: 53602 - RNA, 32 nt, Homo Sapiens
cucggugcgcgaccccggcucagaggacucuu

SEQ ID NO: 53603 - RNA, 32 nt, Homo Sapiens
cuggaacuacucugucccacucuugcucuauu

SEQ ID NO: 53604 - RNA, 32 nt, Homo Sapiens
ggcugcuacccccaagccuucccagugcugac

SEQ ID NO: 53605 - RNA, 32 nt, Homo Sapiens
cgaagaacggggggaaaggccuguagcggggc

SEQ ID NO: 53606 - RNA, 32 nt, Homo Sapiens
ugcccagucuugaacuucccagcccucaaaac

SEQ ID NO: 53607 - RNA, 32 nt, Homo Sapiens
guuccauccuucccacugcuccacgggcugcu

SEQ ID NO: 53608 - RNA, 32 nt, Homo Sapiens
aagccccugcgcgcucagggacgcggcccccc

SEQ ID NO: 53609 - RNA, 32 nt, Homo Sapiens
uacgcuuuucaccccacccccaaguccuggga

SEQ ID NO: 53610 - RNA, 32 nt, Homo Sapiens
acaaacuguucggcuacuggacagguuguaua

SEQ ID NO: 53611 - RNA, 32 nt, Homo Sapiens
gugauuugcauucucuucuucacgcuuuccua

SEQ ID NO: 53612 - RNA, 32 nt, Homo Sapiens
uguuauguuguaauauuuugcugcugaauuug

SEQ ID NO: 53613 - RNA, 32 nt, Homo Sapiens
gggccccagggcuacccucccccaggaggucg

SEQ ID NO: 53614 - RNA, 32 nt, Homo Sapiens
aaauuaauuacauucacgguguugcacauaaa

SEQ ID NO: 53615 - RNA, 32 nt, Homo Sapiens
uucauaagaauuugccuauugauaggcaaauu

SEQ ID NO: 53616 - RNA, 32 nt, Homo Sapiens
gcucacccaucccagaccucacagucccucag

SEQ ID NO: 53617 - RNA, 32 nt, Homo Sapiens
ucucguuuccucucaguccauccacccuucau

SEQ ID NO: 53618 - RNA, 32 nt, Homo Sapiens
uugauugaagggggacuacauguuagaggcac

SEQ ID NO: 53619 - RNA, 32 nt, Homo Sapiens
gggugugggaaaguugcccaaaaacuaaaccc

SEQ ID NO: 53620 - RNA, 32 nt, Homo Sapiens
cccaaggcugcccggcggccgggaucgccacc

SEQ ID NO: 53621 - RNA, 32 nt, Homo Sapiens
acuuaguagacucucacgcagaacugagaaau

SEQ ID NO: 53622 - RNA, 32 nt, Homo Sapiens
caguuuaaaaaauaccuuccauguggagaaaa

SEQ ID NO: 53623 - RNA, 32 nt, Homo Sapiens
ccagcugcccucacuucugggguggaugaugu

SEQ ID NO: 53624 - RNA, 32 nt, Homo Sapiens
accugcugagccagccuguucuccgggccuga

SEQ ID NO: 53625 - RNA, 32 nt, Homo Sapiens
ugcuugugugcaaggccgugcccgccacgcag

SEQ ID NO: 53626 - RNA, 32 nt, Homo Sapiens
gggugcagacugcaccuccggaugcaguuuug

SEQ ID NO: 53627 - RNA, 32 nt, Homo Sapiens
uguggaucagccgcgacacggcgggacccgcc

SEQ ID NO: 53628 - RNA, 32 nt, Homo Sapiens
uggccugaggggcauccagaccacaagagugg

SEQ ID NO: 53629 - RNA, 32 nt, Homo Sapiens
aggaggggaagcugcagcuugggagagccccu

SEQ ID NO: 53630 - RNA, 32 nt, Homo Sapiens
cccugggaagcccuggagcuugccagagcaga

SEQ ID NO: 53631 - RNA, 32 nt, Homo Sapiens
ugggcugggcgccguggcguugccucggagcu

SEQ ID NO: 53632 - RNA, 32 nt, Homo Sapiens
aaauacaguaaaguuuaaaaaauacaccacga

SEQ ID NO: 53633 - RNA, 32 nt, Homo Sapiens
ccacccggccgcgguggcggcucuccugccgg

SEQ ID NO: 53634 - RNA, 32 nt, Homo Sapiens
agaauucagcuagugcccauggagggagcauu

SEQ ID NO: 53635 - RNA, 32 nt, Homo Sapiens
aacacugcguuccagucaccccggucuugcca

SEQ ID NO: 53636 - RNA, 29 nt, Homo Sapiens
uaucuaucuaaauauauugauagaccugu

SEQ ID NO: 53637 - RNA, 32 nt, Homo Sapiens
augaugccccacucaccuccugacugucccag

SEQ ID NO: 53638 - RNA, 32 nt, Homo Sapiens
uccucccucaucuuucugcuuaccuuuuaaac

SEQ ID NO: 53639 - RNA, 32 nt, Homo Sapiens
uggccugcaccaaguccuccaucacacacacu

SEQ ID NO: 53640 - RNA, 32 nt, Homo Sapiens
cagcccuccgagucgagccucugcccccgagu

SEQ ID NO: 53641 - RNA, 32 nt, Homo Sapiens
uugauauuuuucccuacucuggaauuugaacu

SEQ ID NO: 53642 - RNA, 32 nt, Homo Sapiens
ugaggauagaaagcacaguuccuauuauuugu

SEQ ID NO: 53643 - RNA, 32 nt, Homo Sapiens
acggaucggccgcggccgccaccgggcggagg

SEQ ID NO: 53644 - RNA, 32 nt, Homo Sapiens
guguggcagcggggggcuggggacaacaaagg

SEQ ID NO: 53645 - RNA, 32 nt, Homo Sapiens
caucccaggacacuugaggcccaaggaggugg

SEQ ID NO: 53646 - RNA, 32 nt, Homo Sapiens
ugaacacaaaaauaaagcauuaugaggcugga

SEQ ID NO: 53647 - RNA, 32 nt, Homo Sapiens
agggagcgcgcccuccccacgcuccgccccug

SEQ ID NO: 53648 - RNA, 32 nt, Homo Sapiens
ccagggccagccagcccugcgggccuccgugc

SEQ ID NO: 53649 - RNA, 32 nt, Homo Sapiens
cuuuugcauauaauucauaccuggcaaaacau

SEQ ID NO: 53650 - RNA, 32 nt, Homo Sapiens
uguuuuuagucuuugauacucuguaguacuag

SEQ ID NO: 53651 - RNA, 32 nt, Homo Sapiens
aggaaaucaaaauaauguuuugaaguucuuau

SEQ ID NO: 53652 - RNA, 32 nt, Homo Sapiens
cccggccgccgccgccaugcagcccuccagcc

SEQ ID NO: 53653 - RNA, 32 nt, Homo Sapiens
gaccuggccaaggggauacagacccugcaguc

SEQ ID NO: 53654 - RNA, 32 nt, Homo Sapiens
cuucccaucuggccuguccccggagccccggc

SEQ ID NO: 53655 - RNA, 32 nt, Homo Sapiens
auugacuguaaauuaccuuaaucuuugugcag

SEQ ID NO: 53656 - RNA, 32 nt, Homo Sapiens
caagauugugaugauggucaaacaagucuaaa

SEQ ID NO: 53657 - RNA, 32 nt, Homo Sapiens
agacaggagcagcuccucaauuuguggugucc

SEQ ID NO: 53658 - RNA, 32 nt, Homo Sapiens
ggcaggcucaggugcagccgcugcucaaagaa

SEQ ID NO: 53659 - RNA, 32 nt, Homo Sapiens
ccccagcccccucuccucccagccucugccug

SEQ ID NO: 53660 - RNA, 32 nt, Homo Sapiens
gccuccuggcagguggugggaccgcuaguuuu

SEQ ID NO: 53661 - RNA, 32 nt, Homo Sapiens
ccuaugacagcaucccugaucccggcgcuccc

SEQ ID NO: 53662 - RNA, 32 nt, Homo Sapiens
cuuuacuguauguuuuauacuaaccagauggg

SEQ ID NO: 53663 - RNA, 32 nt, Homo Sapiens
ggcaaacccaaguaacaaaucagcacgguucc

SEQ ID NO: 53664 - RNA, 32 nt, Homo Sapiens
cuacgggcagcgggcgcggggcuggucccggg

SEQ ID NO: 53665 - RNA, 32 nt, Homo Sapiens
ucauuuuucuaaaauaaagugaauguauuuuu

SEQ ID NO: 53666 - RNA, 32 nt, Homo Sapiens
uucauugcuuugcgaaagguaaggaaagaggc

SEQ ID NO: 53667 - RNA, 32 nt, Homo Sapiens
caacaauuuucccccgaggguuuuccauggug

SEQ ID NO: 53668 - RNA, 32 nt, Homo Sapiens
cagcgcccugccuggcucggccggcgaagcuc

SEQ ID NO: 53669 - RNA, 32 nt, Homo Sapiens
cagcuucugccagcgggucgcaccgggcuagc

SEQ ID NO: 53670 - RNA, 32 nt, Homo Sapiens
uuuaaacuuacaguucagggccaggcauggug

SEQ ID NO: 53671 - RNA, 32 nt, Homo Sapiens
ucucugagggggugggggugccgcugucucug

SEQ ID NO: 53672 - RNA, 32 nt, Homo Sapiens
uuuaccuuaccccacacccccucaacauguag

SEQ ID NO: 53673 - RNA, 32 nt, Homo Sapiens
gcuucuguggucaggcugggacagugaaaggc

SEQ ID NO: 53674 - RNA, 32 nt, Homo Sapiens
uucacccauuuaacguaagugauucagcguuu

SEQ ID NO: 53675 - RNA, 32 nt, Homo Sapiens
auuguacagaaucuugguuucuacgaugcgcu

SEQ ID NO: 53676 - RNA, 32 nt, Homo Sapiens
uaaauugacaaugucaauaaauugaaauaugg

SEQ ID NO: 53677 - RNA, 32 nt, Homo Sapiens
gcugaaggggagaaagugacucuguucucuua

SEQ ID NO: 53678 - RNA, 32 nt, Homo Sapiens
auccucuaaaauguauguguaugaagauccug

SEQ ID NO: 53679 - RNA, 32 nt, Homo Sapiens
ggagugcaguugcaggaucauaguuugcugcg

SEQ ID NO: 53680 - RNA, 32 nt, Homo Sapiens
cugaggucaggaguucgagaccagccugaucg

SEQ ID NO: 53681 - RNA, 32 nt, Homo Sapiens
ggaccaucaguuuuauacugugauaauugaaa

SEQ ID NO: 53682 - RNA, 31 nt, Homo Sapiens
uaacuucuugguagcuagaaauuuagaguag

SEQ ID NO: 53683 - RNA, 32 nt, Homo Sapiens
cugggcaugcaucgccacgucuggcuaauuau

SEQ ID NO: 53684 - RNA, 31 nt, Homo Sapiens
gucauucaagccacaguuccugauuuacucg

SEQ ID NO: 53685 - RNA, 32 nt, Homo Sapiens
gaagggccagaguggcuggagagauggucaca

SEQ ID NO: 53686 - RNA, 32 nt, Homo Sapiens
uuucaucgcucuugcauuuuaauggucuugac

SEQ ID NO: 53687 - RNA, 32 nt, Homo Sapiens
uugaaggaaaaguuuuuaguguguauuguaca

SEQ ID NO: 53688 - RNA, 32 nt, Homo Sapiens
ggcacagcgcgugcagccucgugcagcucuuc

SEQ ID NO: 53689 - RNA, 32 nt, Homo Sapiens
ggugcaaacuaaaaaugauuuuuacauuuuua

SEQ ID NO: 53690 - RNA, 32 nt, Homo Sapiens
ggguuuauggguguuccuggaacuugucuuug

SEQ ID NO: 53691 - RNA, 31 nt, Homo Sapiens
uggcggagggcggcaugacagccguggugca

SEQ ID NO: 53692 - RNA, 32 nt, Homo Sapiens
cauauccguggccuucaccucuccagcuaccc

SEQ ID NO: 53693 - RNA, 32 nt, Homo Sapiens
ucucagauacccuccaucuacuggcccauccc

SEQ ID NO: 53694 - RNA, 32 nt, Homo Sapiens
cuagaaguccagaauuuuggaccuccauguga

SEQ ID NO: 53695 - RNA, 32 nt, Homo Sapiens
aaguugcccucccuggcauggugaguuggcuu

SEQ ID NO: 53696 - RNA, 32 nt, Homo Sapiens
cuaaucugugcagcuguaguuagggccugcca

SEQ ID NO: 53697 - RNA, 32 nt, Homo Sapiens
ggagcaaccccucccucgccccuggguccuac

SEQ ID NO: 53698 - RNA, 32 nt, Homo Sapiens
ugcagcggugggcugaagggcuccucaagugc

SEQ ID NO: 53699 - RNA, 32 nt, Homo Sapiens
uuuuggaggacaaguagcacaaacuguauaac

SEQ ID NO: 53700 - RNA, 32 nt, Homo Sapiens
cacuuuggcaggaugucuggggccucaccagc

SEQ ID NO: 53701 - RNA, 32 nt, Homo Sapiens
ugacaggcauuuccucuuugcuaauugcacca

SEQ ID NO: 53702 - RNA, 32 nt, Homo Sapiens
cuuggaggccguggagcacaaagcagauucug

SEQ ID NO: 53703 - RNA, 31 nt, Homo Sapiens
ggccauuuagccaccaucuuugcagguugcu

SEQ ID NO: 53704 - RNA, 32 nt, Homo Sapiens
ccgcauccgugagcugcaggcaccugccacug

SEQ ID NO: 53705 - RNA, 32 nt, Homo Sapiens
ccaguccugggcaucgacuacacacacgugcg

SEQ ID NO: 53706 - RNA, 32 nt, Homo Sapiens
ugaagcuguacaaaagcugcaguaaccugucu

SEQ ID NO: 53707 - RNA, 32 nt, Homo Sapiens
aaguaauuuuucugaacuucugcaauucugag

SEQ ID NO: 53708 - RNA, 32 nt, Homo Sapiens
ucaacaacugucagcacucacucccucccggc

SEQ ID NO: 53709 - RNA, 32 nt, Homo Sapiens
gggggugggccagggaggaaaaguaacaauag

SEQ ID NO: 53710 - RNA, 32 nt, Homo Sapiens
guuuugggagacgguggagguauccucauuag

SEQ ID NO: 53711 - RNA, 32 nt, Homo Sapiens
gagggaacaagccccaaccggauccuggacag

SEQ ID NO: 53712 - RNA, 32 nt, Homo Sapiens
guuggcugaaguucuucauucugacuguugag

SEQ ID NO: 53713 - RNA, 32 nt, Homo Sapiens
acuuuagggcuuuguuacagaugugugaccaa

SEQ ID NO: 53714 - RNA, 32 nt, Homo Sapiens
acccuggaaugguggcguguccugcuguaccc

SEQ ID NO: 53715 - RNA, 32 nt, Homo Sapiens
ccccaccccaucuauuaauauuauucuuuuga

SEQ ID NO: 53716 - RNA, 32 nt, Homo Sapiens
aguuuguuuucauagacuucaauucauaaacu

SEQ ID NO: 53717 - RNA, 32 nt, Homo Sapiens
uauguccucuucucccuuuccauccuucagca

SEQ ID NO: 53718 - RNA, 32 nt, Homo Sapiens
auaucacccaaguuuaaaauuguucaacauuc

SEQ ID NO: 53719 - RNA, 32 nt, Homo Sapiens
aggaauucuggugauauuaaggugaaauaaca

SEQ ID NO: 53720 - RNA, 32 nt, Homo Sapiens
augacugugaggaggaugaggagccaccuagg

SEQ ID NO: 53721 - RNA, 32 nt, Homo Sapiens
agcacacugacugagcaagaacaaagaccgua

SEQ ID NO: 53722 - RNA, 32 nt, Homo Sapiens
caguagggccgcguugcugcucacucucugca

SEQ ID NO: 53723 - RNA, 32 nt, Homo Sapiens
gugugugucguggcuggccccgcggcgccuac

SEQ ID NO: 53724 - RNA, 30 nt, Homo Sapiens
acgccccuuugugcugcuggcuuuucuggu

SEQ ID NO: 53725 - RNA, 32 nt, Homo Sapiens
aaaauugggauuuccccccaccccgccccacc

SEQ ID NO: 53726 - RNA, 32 nt, Homo Sapiens
auuugagauauacuaaagaaagaaauucaaaa

SEQ ID NO: 53727 - RNA, 32 nt, Homo Sapiens
gcaacacguucggcugcccaaacccaaggcga

SEQ ID NO: 53728 - RNA, 32 nt, Homo Sapiens
auguuaggaaagggcugcgugaaaaacccagc

SEQ ID NO: 53729 - RNA, 32 nt, Homo Sapiens
uccuggcuggcuguguccucuccagcuuuccc

SEQ ID NO: 53730 - RNA, 32 nt, Homo Sapiens
ccagagaggaugucaccagucuugcccuccca

SEQ ID NO: 53731 - RNA, 32 nt, Homo Sapiens
uuuaccuuuaaaaguuguaaaaauauugcuuu

SEQ ID NO: 53732 - RNA, 32 nt, Homo Sapiens
ugauuacccaauaauauauaaaaagaguuuga

SEQ ID NO: 53733 - RNA, 32 nt, Homo Sapiens
ccaauugauuuuauaauaaaugucuauauuuu

SEQ ID NO: 53734 - RNA, 32 nt, Homo Sapiens
uugugcacaaaauuucacaaaggucagagcuc

SEQ ID NO: 53735 - RNA, 32 nt, Homo Sapiens
gggcucaucugccgccgccgccgcgcugagga

SEQ ID NO: 53736 - RNA, 32 nt, Homo Sapiens
ggguugaauguuuuacuacaaacaagccacaa

SEQ ID NO: 53737 - RNA, 32 nt, Homo Sapiens
aaucaaagaaaguuuuuuauagagauaugaag

SEQ ID NO: 53738 - RNA, 32 nt, Homo Sapiens
cuugagcaucccuugugagcugugaacauuga

SEQ ID NO: 53739 - RNA, 32 nt, Homo Sapiens
guguucauugcuagugagguguuguugcuucu

SEQ ID NO: 53740 - RNA, 32 nt, Homo Sapiens
gugccucccacagacccuggggugauggccuu

SEQ ID NO: 53741 - RNA, 32 nt, Homo Sapiens
cgucuucccagcgguuccugugcagaugcugc

SEQ ID NO: 53742 - RNA, 32 nt, Homo Sapiens
aacaugguacaauggaauauuacucagcaaug

SEQ ID NO: 53743 - RNA, 32 nt, Homo Sapiens
gcaguugcugacagugagacaccaggaggguu

SEQ ID NO: 53744 - RNA, 32 nt, Homo Sapiens
cagucaugugcaaugcuuaagauggucugaca

SEQ ID NO: 53745 - RNA, 32 nt, Homo Sapiens
agucgcccuugucgucgucguccugcucgucg

SEQ ID NO: 53746 - RNA, 32 nt, Homo Sapiens
ccggggcgccgcgcggagagcaagcggagaua

SEQ ID NO: 53747 - RNA, 32 nt, Homo Sapiens
cagggcuguggcucagaggacgcggcucccag

SEQ ID NO: 53748 - RNA, 32 nt, Homo Sapiens
agcgcugcggacacucggggcggcagucgguc

SEQ ID NO: 53749 - RNA, 32 nt, Homo Sapiens
cgaggcuucccgucgccggcacuuccucuugc

SEQ ID NO: 53750 - RNA, 30 nt, Homo Sapiens
cuaagaugccaggaaccccuggaagccuag

SEQ ID NO: 53751 - RNA, 32 nt, Homo Sapiens
caggagcauccaggaggcucucgcccgcaacg

SEQ ID NO: 53752 - RNA, 32 nt, Homo Sapiens
agggacagcuggaagagccgaacggauaagag

SEQ ID NO: 53753 - RNA, 32 nt, Homo Sapiens
auucuaaguuaguugucuaaccacugaaaacu

SEQ ID NO: 53754 - RNA, 30 nt, Homo Sapiens
ucucucuagcuaaugggaaaaugauuuuac

SEQ ID NO: 53755 - RNA, 30 nt, Homo Sapiens
gagcgcggcagcggcggcgggaugcuggcg

SEQ ID NO: 53756 - RNA, 32 nt, Homo Sapiens
gguuugcuuuccauaucugaucuuuaauccac

SEQ ID NO: 53757 - RNA, 32 nt, Homo Sapiens
guuuuuaacaccuuuuacucuucuuacuggug

SEQ ID NO: 53758 - RNA, 32 nt, Homo Sapiens
guaauuuuuuaaaauaugguaauguauuaaac

SEQ ID NO: 53759 - RNA, 32 nt, Homo Sapiens
uucuucacagagcgagcagucuguggagaaga

SEQ ID NO: 53760 - RNA, 32 nt, Homo Sapiens
accacugcacucaagccugggcgacagagcaa

SEQ ID NO: 53761 - RNA, 32 nt, Homo Sapiens
caugccuuugggaagaaaaucugccuuguaca

SEQ ID NO: 53762 - RNA, 32 nt, Homo Sapiens
ggaggggaccccauccuggggaugcugggagu

SEQ ID NO: 53763 - RNA, 32 nt, Homo Sapiens
cugaaacaaaaauugucuuuaugagcuaaaaa

SEQ ID NO: 53764 - RNA, 32 nt, Homo Sapiens
ucacaauacaauuaggaaugggcuuugcuaac

SEQ ID NO: 53765 - RNA, 32 nt, Homo Sapiens
aucacuguaaaauaaacuucagguguaacaga

SEQ ID NO: 53766 - RNA, 28 nt, Homo Sapiens
uagcacaguguccccaggauggccagcu

SEQ ID NO: 53767 - RNA, 32 nt, Homo Sapiens
gaccagggaaagggguuacagagagccuccuc

SEQ ID NO: 53768 - RNA, 32 nt, Homo Sapiens
ucucaucgcccauuuuucaaacuuguuacauu

SEQ ID NO: 53769 - RNA, 28 nt, Homo Sapiens
cguggggggcggccacuggucagaggca

SEQ ID NO: 53770 - RNA, 32 nt, Homo Sapiens
aagcuauuguacaaauaucacucuucagguuu

SEQ ID NO: 53771 - RNA, 32 nt, Homo Sapiens
aucgggcgcugcggccggggacccgcugcuga

SEQ ID NO: 53772 - RNA, 32 nt, Homo Sapiens
cagcauuaacgcuucccgccccggugaccucu

SEQ ID NO: 53773 - RNA, 32 nt, Homo Sapiens
gcaccugugggaaagguugcugucugucucag

SEQ ID NO: 53774 - RNA, 32 nt, Homo Sapiens
uacuuuaaagagaucaauguauuuuauuuuau

SEQ ID NO: 53775 - RNA, 32 nt, Homo Sapiens
gcaggacuccagccuggccgccggcgcccgca

SEQ ID NO: 53776 - RNA, 32 nt, Homo Sapiens
ccauuccauuccagacuuuguaccuuaaaguu

SEQ ID NO: 53777 - RNA, 32 nt, Homo Sapiens
ccaaguuuuauaaugcaucauuuuacaucuuu

SEQ ID NO: 53778 - RNA, 32 nt, Homo Sapiens
aaaauuauaugauauucaaauuucagugucca

SEQ ID NO: 53779 - RNA, 27 nt, Homo Sapiens
uuggauuuccaugucagcccccacucc

SEQ ID NO: 53780 - RNA, 32 nt, Homo Sapiens
ucggggcgucuaccgcuuugccacugauagga

SEQ ID NO: 53781 - RNA, 32 nt, Homo Sapiens
cagcaaagagaguaggguuuauuuuauaaaca

SEQ ID NO: 53782 - RNA, 32 nt, Homo Sapiens
aagaggacccagaagauucuuauuuagagcuu

SEQ ID NO: 53783 - RNA, 32 nt, Homo Sapiens
aaaauagcucuuucucauuuuuagagaaguca

SEQ ID NO: 53784 - RNA, 32 nt, Homo Sapiens
cccuccagccaaggagcagcccugcccagggg

SEQ ID NO: 53785 - RNA, 32 nt, Homo Sapiens
ugagucccggauucugguggguucuuccgcuc

SEQ ID NO: 53786 - RNA, 32 nt, Homo Sapiens
acuccaaguccucuccccagcuaccaccaguc

SEQ ID NO: 53787 - RNA, 32 nt, Homo Sapiens
uguauucaaauuauguaacucggccggguaca

SEQ ID NO: 53788 - RNA, 32 nt, Homo Sapiens
agucagauagauuuuucucccagcauguucua

SEQ ID NO: 53789 - RNA, 32 nt, Homo Sapiens
acugguugaggguggaaccuccaggcaggaac

SEQ ID NO: 53790 - RNA, 32 nt, Homo Sapiens
acuagcuugacgaauuggggaugucagagacu

SEQ ID NO: 53791 - RNA, 32 nt, Homo Sapiens
uuuccugagacugauaaugaugggaccuaucu

SEQ ID NO: 53792 - RNA, 32 nt, Homo Sapiens
cacuguugccuugcuaggauccacccuccuau

SEQ ID NO: 53793 - RNA, 32 nt, Homo Sapiens
ugccagacagagcugguucuaagauuuaauac

SEQ ID NO: 53794 - RNA, 32 nt, Homo Sapiens
uucguaucuaaugguuuguaaauucaaggugc

SEQ ID NO: 53795 - RNA, 32 nt, Homo Sapiens
cucagaauuuccccccaguuccccaagugucu

SEQ ID NO: 53796 - RNA, 32 nt, Homo Sapiens
gaccccuugaaaaauaaauuugcagaguguga

SEQ ID NO: 53797 - RNA, 32 nt, Homo Sapiens
aguagaggccagagggcggcgaguucgggguc

SEQ ID NO: 53798 - RNA, 32 nt, Homo Sapiens
uaggcugugaauguaccuugaaggggagaguu

SEQ ID NO: 53799 - RNA, 32 nt, Homo Sapiens
ggccugaugaaagcuuccugaguggugucggg

SEQ ID NO: 53800 - RNA, 32 nt, Homo Sapiens
cugccaggcuguccgcgccgccgcugcggggc

SEQ ID NO: 53801 - RNA, 32 nt, Homo Sapiens
caaucguagauguuuuugcuguuccauucugu

SEQ ID NO: 53802 - RNA, 32 nt, Homo Sapiens
gucuuaaggauuuuuccacuuuugucaguaac

SEQ ID NO: 53803 - RNA, 32 nt, Homo Sapiens
cgcgucgcuggacuccagcccgggcgacagag

SEQ ID NO: 53804 - RNA, 32 nt, Homo Sapiens
ugaguccccuggauuuugcauucacuccugcg

SEQ ID NO: 53805 - RNA, 32 nt, Homo Sapiens
auuauuuguuguaucuaauacacgccuguauu

SEQ ID NO: 53806 - RNA, 32 nt, Homo Sapiens
gcaccagccgucugcagcuccggccgccacuu

SEQ ID NO: 53807 - RNA, 29 nt, Homo Sapiens
cugcaugaacaaaagaacaaguguggaug

SEQ ID NO: 53808 - RNA, 32 nt, Homo Sapiens
ccaggaccaucgcccuuucucagagcagaggg

SEQ ID NO: 53809 - RNA, 32 nt, Homo Sapiens
cccuauucaaggauauuacucacugcacauca

SEQ ID NO: 53810 - RNA, 32 nt, Homo Sapiens
uuuacaauuugauuuuaacuuuuaaaauaaau

SEQ ID NO: 53811 - RNA, 32 nt, Homo Sapiens
caaggcaaauaccacucugugcauuuucuuaa

SEQ ID NO: 53812 - RNA, 32 nt, Homo Sapiens
ucuagcaaagaggaaaguugugggguuaaacu

SEQ ID NO: 53813 - RNA, 32 nt, Homo Sapiens
ccugugagucaucaaagaauuuauaucagaga

SEQ ID NO: 53814 - RNA, 32 nt, Homo Sapiens
ggagggggagguaggcggggcggcgcgugacc

SEQ ID NO: 53815 - RNA, 32 nt, Homo Sapiens
uugagggcgggggucuccgccguggcucccca

SEQ ID NO: 53816 - RNA, 32 nt, Homo Sapiens
ccccgccggccgcgcaccgccaugcaugaugg

SEQ ID NO: 53817 - RNA, 32 nt, Homo Sapiens
gaguuaguucucugggaacuugaaagacauuu

SEQ ID NO: 53818 - RNA, 32 nt, Homo Sapiens
cacuuguaaucccagcacuuugggaugcugag

SEQ ID NO: 53819 - RNA, 32 nt, Homo Sapiens
aaguguuggggauugucaguguuacuuuacca

SEQ ID NO: 53820 - RNA, 32 nt, Homo Sapiens
uggaccacagaaacagaggcaaauccugcuga

SEQ ID NO: 53821 - RNA, 32 nt, Homo Sapiens
ccugggacacaaugcgugacuccgucucaaaa

SEQ ID NO: 53822 - RNA, 32 nt, Homo Sapiens
aaggugaauaaaauuugacauuagauuauaaa

SEQ ID NO: 53823 - RNA, 32 nt, Homo Sapiens
cugugaguaccuggucauacgggucaguaggg

SEQ ID NO: 53824 - RNA, 32 nt, Homo Sapiens
cagcugaaacucggaaggcuggucaggccucg

SEQ ID NO: 53825 - RNA, 32 nt, Homo Sapiens
agccuggauuccugggguguccccggcagcca

SEQ ID NO: 53826 - RNA, 32 nt, Homo Sapiens
augaaaccaaaauauaaaugucagcugguuuu

SEQ ID NO: 53827 - RNA, 32 nt, Homo Sapiens
gauugaaaauuugauacauuuuacagaaacua

SEQ ID NO: 53828 - RNA, 32 nt, Homo Sapiens
gggcuggggcuggggcugggggugggauugaa

SEQ ID NO: 53829 - RNA, 30 nt, Homo Sapiens
caugugucuguguuggcuguggccuccagg

SEQ ID NO: 53830 - RNA, 32 nt, Homo Sapiens
acauaugaaauucaguuaaaagaauguguguu

SEQ ID NO: 53831 - RNA, 32 nt, Homo Sapiens
cugccccucccccggccccccaucccucacuu

SEQ ID NO: 53832 - RNA, 32 nt, Homo Sapiens
uccagccccauuaagaacuuuucuuuaccaag

SEQ ID NO: 53833 - RNA, 32 nt, Homo Sapiens
uuuuagagguucuuccccccccgccccugcag

SEQ ID NO: 53834 - RNA, 32 nt, Homo Sapiens
cuuuaugaaaauauauuuaugacagucauacu

SEQ ID NO: 53835 - RNA, 32 nt, Homo Sapiens
guuuugaaccccgauuaaugucuguacgucac

SEQ ID NO: 53836 - RNA, 32 nt, Homo Sapiens
ccaagucuauaauauaauuaugaucaugaaua

SEQ ID NO: 53837 - RNA, 32 nt, Homo Sapiens
accaccuccaggggcuaagugauggaucuugu

SEQ ID NO: 53838 - RNA, 32 nt, Homo Sapiens
aaaaucuucaucuauuucauaucuauaaugaa

SEQ ID NO: 53839 - RNA, 32 nt, Homo Sapiens
uuaagcuuuucauuuuaauauauaauuuaaug

SEQ ID NO: 53840 - RNA, 32 nt, Homo Sapiens
ccugcgaaucugcacgcgggcgcucggccucu

SEQ ID NO: 53841 - RNA, 32 nt, Homo Sapiens
acaaaggagaacuaguccuaagauccuagucc

SEQ ID NO: 53842 - RNA, 32 nt, Homo Sapiens
ccaagaggccccagccugcggcccuggagcgc

SEQ ID NO: 53843 - RNA, 32 nt, Homo Sapiens
cgcaugauccuaguucuuuaauuuacuggaag

SEQ ID NO: 53844 - RNA, 32 nt, Homo Sapiens
uggcaaagguuccaaauuuuuacuuuauauuu

SEQ ID NO: 53845 - RNA, 32 nt, Homo Sapiens
ccgcuucuauagaauuagcugaauaaaggcau

SEQ ID NO: 53846 - RNA, 32 nt, Homo Sapiens
ggcauuuuuuaaauccuuaaauguaauuaaga

SEQ ID NO: 53847 - RNA, 32 nt, Homo Sapiens
auacaaguauaaaauuuacacauuucugaguc

SEQ ID NO: 53848 - RNA, 32 nt, Homo Sapiens
aacuucugaaagaucucagaggacuggcauug

SEQ ID NO: 53849 - RNA, 32 nt, Homo Sapiens
ucucuuuccuuuugccuauucuggcaaauuuu

SEQ ID NO: 53850 - RNA, 28 nt, Homo Sapiens
caaauguugucuacacauguguuagcau

SEQ ID NO: 53851 - RNA, 32 nt, Homo Sapiens
agugguggccuccacuaggagcuucugugcuu

SEQ ID NO: 53852 - RNA, 32 nt, Homo Sapiens
caguuagggcuaaugggaaaugucuaguaaga

SEQ ID NO: 53853 - RNA, 32 nt, Homo Sapiens
acuagaaucggggcugcuggaacugggacagc

SEQ ID NO: 53854 - RNA, 32 nt, Homo Sapiens
uuuguagagugcuuuguuuauccaguuuaaua

SEQ ID NO: 53855 - RNA, 32 nt, Homo Sapiens
uuuccacaccaagcagcaacagcaaaucacga

SEQ ID NO: 53856 - RNA, 27 nt, Homo Sapiens
gccuucuccaucuucagccuccugcag

SEQ ID NO: 53857 - RNA, 32 nt, Homo Sapiens
gcccauaaaguuggagauagggaccagaguuu

SEQ ID NO: 53858 - RNA, 32 nt, Homo Sapiens
aagcgccgucgugggguauccgacuguccggg

SEQ ID NO: 53859 - RNA, 32 nt, Homo Sapiens
gagaauacuucccacauuuuaagauuuuucaa

SEQ ID NO: 53860 - RNA, 32 nt, Homo Sapiens
uuugugguuaaucucucaguacuaguuaauaa

SEQ ID NO: 53861 - RNA, 32 nt, Homo Sapiens
gacccgggauggaguggggcugucugaguuuc

SEQ ID NO: 53862 - RNA, 32 nt, Homo Sapiens
cgcgggccacgcagccggggccuucucaacgc

SEQ ID NO: 53863 - RNA, 30 nt, Homo Sapiens
ggcaccuguugugagggcuauaggaaugug

SEQ ID NO: 53864 - RNA, 32 nt, Homo Sapiens
aagggguggggaagaaguuaauguguaauugc

SEQ ID NO: 53865 - RNA, 32 nt, Homo Sapiens
auuaccaaggauuagauacuauauuacaaaau

SEQ ID NO: 53866 - RNA, 32 nt, Homo Sapiens
gguagcuggcgucucugggaaccuggccccgg

SEQ ID NO: 53867 - RNA, 32 nt, Homo Sapiens
aaagaacaacaaagucaagguugcugcuuuga

SEQ ID NO: 53868 - RNA, 32 nt, Homo Sapiens
gugcguggcaggggcggcugggaggguaucug

SEQ ID NO: 53869 - RNA, 32 nt, Homo Sapiens
auucuagcugaagcucacaccacuuacacaac

SEQ ID NO: 53870 - RNA, 32 nt, Homo Sapiens
acaugaagaauauuuugcugagaacuucggcg

SEQ ID NO: 53871 - RNA, 32 nt, Homo Sapiens
cuuggcagccuggcagagguuugcagacaggc

SEQ ID NO: 53872 - RNA, 32 nt, Homo Sapiens
ccucucccacuuucuuuguucuggguccuuuc

SEQ ID NO: 53873 - RNA, 32 nt, Homo Sapiens
cuacucucuauuguuauaaaauguaguacuaa

SEQ ID NO: 53874 - RNA, 32 nt, Homo Sapiens
gcugacuuuuguuuuuuuuuuauuuuaaaauu

SEQ ID NO: 53875 - RNA, 32 nt, Homo Sapiens
aagaacucuuucauuacuugcaucguguaaau

SEQ ID NO: 53876 - RNA, 32 nt, Homo Sapiens
agucuuugacuaaaauuuaucaucucuuauaa

SEQ ID NO: 53877 - RNA, 32 nt, Homo Sapiens
agaguuugauaaauuuuuaccagcuuugaaga

SEQ ID NO: 53878 - RNA, 31 nt, Homo Sapiens
uaucuauggagcgccauucaaagaugaauuu

SEQ ID NO: 53879 - RNA, 32 nt, Homo Sapiens
ucuguguuagucaugcacacacauaccuauga

SEQ ID NO: 53880 - RNA, 31 nt, Homo Sapiens
agaagcugucuagccauucccaggaggguaa

SEQ ID NO: 53881 - RNA, 32 nt, Homo Sapiens
uaaucaagcauguaacaccacaugacaauuug

SEQ ID NO: 53882 - RNA, 32 nt, Homo Sapiens
ccuauuuccgcucaugugaacucuccaguucu

SEQ ID NO: 53883 - RNA, 30 nt, Homo Sapiens
gauuccggcgaggccgcgggucccaccucc

SEQ ID NO: 53884 - RNA, 31 nt, Homo Sapiens
gccugggcgggcccuugaugggaauguggag

SEQ ID NO: 53885 - RNA, 29 nt, Homo Sapiens
gagguaugaaguuuauccuguuuuccaga

SEQ ID NO: 53886 - RNA, 32 nt, Homo Sapiens
ccucagcuguaccggccuuucagagcuucucu

SEQ ID NO: 53887 - RNA, 32 nt, Homo Sapiens
caaaaugauacugugaaaaauggggcauuuua

SEQ ID NO: 53888 - RNA, 32 nt, Homo Sapiens
guccuggguggaggaagaagugguggagccuc

SEQ ID NO: 53889 - RNA, 32 nt, Homo Sapiens
aauuuauuugaaacuucuaauggauuuuugag

SEQ ID NO: 53890 - RNA, 32 nt, Homo Sapiens
gcgaggcggcggucagcaggugccgaacccac

SEQ ID NO: 53891 - RNA, 32 nt, Homo Sapiens
ucggggggcaaagggaucgccggggaggggga

SEQ ID NO: 53892 - RNA, 32 nt, Homo Sapiens
aaguacauuccacagaaugccuaaauugugua

SEQ ID NO: 53893 - RNA, 32 nt, Homo Sapiens
ugagcccggcgccgggaggaguggucuaaacu

SEQ ID NO: 53894 - RNA, 32 nt, Homo Sapiens
aagcccggccccccaccgccaggccauagggc

SEQ ID NO: 53895 - RNA, 32 nt, Homo Sapiens
cagcgaggcuaugacuuacuuaucucaauggc

SEQ ID NO: 53896 - RNA, 32 nt, Homo Sapiens
cugcccgccucagccucccaaaguacugggau

SEQ ID NO: 53897 - RNA, 32 nt, Homo Sapiens
gcacagguagagagagccaacaagguggaaug

SEQ ID NO: 53898 - RNA, 32 nt, Homo Sapiens
cuguuauggaaaucucuuuuaaagucuugagu

SEQ ID NO: 53899 - RNA, 32 nt, Homo Sapiens
gcuauuggcaauguagccuggugcuucaugag

SEQ ID NO: 53900 - RNA, 31 nt, Homo Sapiens
cccccugcaaggucugugccucuccugcagc

SEQ ID NO: 53901 - RNA, 32 nt, Homo Sapiens
uggcgcuggcgcuacgcccccgggccccugcc

SEQ ID NO: 53902 - RNA, 32 nt, Homo Sapiens
uccccucccaccuggugcccagggcuucugcu

SEQ ID NO: 53903 - RNA, 32 nt, Homo Sapiens
aauugaacacuuuuuaggauuuucaugaggca

SEQ ID NO: 53904 - RNA, 32 nt, Homo Sapiens
gagauccgcgcgcugcgacggccggugcagag

SEQ ID NO: 53905 - RNA, 32 nt, Homo Sapiens
aggccgggagugugucccucaccaacuaugca

SEQ ID NO: 53906 - RNA, 32 nt, Homo Sapiens
ugugauuacauucuacaugaaaacaguugagg

SEQ ID NO: 53907 - RNA, 32 nt, Homo Sapiens
ccagaagcacugggccuuggccacagcaacac

SEQ ID NO: 53908 - RNA, 32 nt, Homo Sapiens
guuguggucacucccccacaccugccugccuc

SEQ ID NO: 53909 - RNA, 32 nt, Homo Sapiens
cauuauacuccagccugggugacagaaugaga

SEQ ID NO: 53910 - RNA, 32 nt, Homo Sapiens
uguaaauagucuuuuugaugacugcuuaauau

SEQ ID NO: 53911 - RNA, 32 nt, Homo Sapiens
agggcauucucaggcccgggggucuccuuccc

SEQ ID NO: 53912 - RNA, 32 nt, Homo Sapiens
acagugagcggagcgccugggcggcggcggcg

SEQ ID NO: 53913 - RNA, 29 nt, Homo Sapiens
uuugacuagucugagugaaaagugaggau

SEQ ID NO: 53914 - RNA, 32 nt, Homo Sapiens
agggaagaggggccggccucagcugucaccag

SEQ ID NO: 53915 - RNA, 32 nt, Homo Sapiens
ugacuuaaguuacuuggcgcugcgagggcugg

SEQ ID NO: 53916 - RNA, 32 nt, Homo Sapiens
acauuccuauagauuccaccccugcccaccuu

SEQ ID NO: 53917 - RNA, 32 nt, Homo Sapiens
gacucaaccuugcaaagccauccaccucauug

SEQ ID NO: 53918 - RNA, 32 nt, Homo Sapiens
uauagcguaacaugauacaucuaguacaucug

SEQ ID NO: 53919 - RNA, 30 nt, Homo Sapiens
gucgagccacuugcuuugcucaguucugug

SEQ ID NO: 53920 - RNA, 32 nt, Homo Sapiens
aaaaaaaaaaaauuauuugaagggguggguga

SEQ ID NO: 53921 - RNA, 32 nt, Homo Sapiens
aaaggcaauuuaaaaaucaugucaagcucagu

SEQ ID NO: 53922 - RNA, 32 nt, Homo Sapiens
augugccugcauuuuuuuuuuaaucuagacau

SEQ ID NO: 53923 - RNA, 32 nt, Homo Sapiens
uaaaauaaaaugcuaaaucuuaaaagaaacug

SEQ ID NO: 53924 - RNA, 32 nt, Homo Sapiens
uuaaugcucuaacgugauaaaccugcuccaag

SEQ ID NO: 53925 - RNA, 32 nt, Homo Sapiens
cccgcagccccuagcccuccgcccagaaaccc

SEQ ID NO: 53926 - RNA, 32 nt, Homo Sapiens
gccuguauauccucagaacuuuguguaaugcc

SEQ ID NO: 53927 - RNA, 32 nt, Homo Sapiens
ccuuacccauucucucuuccucccgacggaga

SEQ ID NO: 53928 - RNA, 32 nt, Homo Sapiens
ggaggcgcgucuccggcacgaugaaggauuug

SEQ ID NO: 53929 - RNA, 32 nt, Homo Sapiens
cacugccgccgcuuccucgccggagcacagga

SEQ ID NO: 53930 - RNA, 32 nt, Homo Sapiens
uucggaaauggcaacuugcgcgguggaggugu

SEQ ID NO: 53931 - RNA, 32 nt, Homo Sapiens
cgguguccguugcaggacuagggcgccgacau

SEQ ID NO: 53932 - RNA, 32 nt, Homo Sapiens
caauaaauggcucuaaguggacagguuugcuu

SEQ ID NO: 53933 - RNA, 32 nt, Homo Sapiens
cuagcaaagggauaaaacuuagauggcagcuu

SEQ ID NO: 53934 - RNA, 32 nt, Homo Sapiens
gaaacauaaaauggagcaugagcaaauagaga

SEQ ID NO: 53935 - RNA, 32 nt, Homo Sapiens
aaagaugugaaugaguguuacaguugaaagcc

SEQ ID NO: 53936 - RNA, 32 nt, Homo Sapiens
gugcucaagcaucuuagggccucuaugaagaa

SEQ ID NO: 53937 - RNA, 32 nt, Homo Sapiens
uggaggggcuggggugggcagagagcaagagg

SEQ ID NO: 53938 - RNA, 32 nt, Homo Sapiens
agcugacugggaacaauggaaaaaauuacauu

SEQ ID NO: 53939 - RNA, 32 nt, Homo Sapiens
auucuuuaucuaaaugucuaacauauuaugca

SEQ ID NO: 53940 - RNA, 32 nt, Homo Sapiens
cagaggcuccgucugacugugggcugggagga

SEQ ID NO: 53941 - RNA, 32 nt, Homo Sapiens
ggcagugaccccccaaaccagccugccugguc

SEQ ID NO: 53942 - RNA, 32 nt, Homo Sapiens
acacgagaccaucccggcagucaugguuuugc

SEQ ID NO: 53943 - RNA, 32 nt, Homo Sapiens
uacauuguuauguccaguuaugucaauaaacc

SEQ ID NO: 53944 - RNA, 32 nt, Homo Sapiens
ggcccagaccuacgccacggacuaugcuguug

SEQ ID NO: 53945 - RNA, 32 nt, Homo Sapiens
ggcugcgucgggggcgggagcggaggugagcg

SEQ ID NO: 53946 - RNA, 32 nt, Homo Sapiens
ccggcccgguggagaucagcgccuggccgccu

SEQ ID NO: 53947 - RNA, 32 nt, Homo Sapiens
guaggaaaaaauuucaaauaauaaccaaagcu

SEQ ID NO: 53948 - RNA, 32 nt, Homo Sapiens
ccauccccauuuggcuucuccuuaaaacacaa

SEQ ID NO: 53949 - RNA, 32 nt, Homo Sapiens
ucuggucccgguuuccuuuguggucuaugugg

SEQ ID NO: 53950 - RNA, 32 nt, Homo Sapiens
accucucgaccugggacugugcuugagagugg

SEQ ID NO: 53951 - RNA, 32 nt, Homo Sapiens
acacaggggacaaggaggagcuauuggcagag

SEQ ID NO: 53952 - RNA, 32 nt, Homo Sapiens
ggcauggcucugcugggaguuguguuuugcuu

SEQ ID NO: 53953 - RNA, 32 nt, Homo Sapiens
cggugaacgaggcggccugcgcggcggagugc

SEQ ID NO: 53954 - RNA, 30 nt, Homo Sapiens
acacgaaucuucgguggucaccaggggacu

SEQ ID NO: 53955 - RNA, 30 nt, Homo Sapiens
uagcaacaucauaaaaucaagaguaucaag

SEQ ID NO: 53956 - RNA, 32 nt, Homo Sapiens
gacuagcuuggguuggugaucaugucuccucu

SEQ ID NO: 53957 - RNA, 32 nt, Homo Sapiens
uguccgcauguccaggccuguuugggguugcc

SEQ ID NO: 53958 - RNA, 32 nt, Homo Sapiens
cggggccuggaguuccucccccugccugaccu

SEQ ID NO: 53959 - RNA, 32 nt, Homo Sapiens
aggugauguccccucccagguugacgcaggac

SEQ ID NO: 53960 - RNA, 32 nt, Homo Sapiens
ggacagaagggagaggacuuggggguuggggg

SEQ ID NO: 53961 - RNA, 32 nt, Homo Sapiens
uaaagaaggaaaauuggccaucuuucccaccu

SEQ ID NO: 53962 - RNA, 32 nt, Homo Sapiens
gugacguccggggcugugcagugucgcuuccu

SEQ ID NO: 53963 - RNA, 32 nt, Homo Sapiens
ccccaacgacaccuccuccccuuuccaacugg

SEQ ID NO: 53964 - RNA, 32 nt, Homo Sapiens
uguaacucaguccacauuuucauuuaggagcu

SEQ ID NO: 53965 - RNA, 32 nt, Homo Sapiens
ucucucccugugcuuugcuugucucaaauggc

SEQ ID NO: 53966 - RNA, 32 nt, Homo Sapiens
gaaggagagggggcacaugaaaaggaaauggc

SEQ ID NO: 53967 - RNA, 32 nt, Homo Sapiens
aagaaaaagaaguuucugaaaaauggaaugau

SEQ ID NO: 53968 - RNA, 32 nt, Homo Sapiens
agcacuuguuggccuacagagguguggcaagc

SEQ ID NO: 53969 - RNA, 32 nt, Homo Sapiens
ucaaaauaaaaauaaucguuagaucaaugagu

SEQ ID NO: 53970 - RNA, 32 nt, Homo Sapiens
gggagcagauauuaacuuauuuuuguguugga

SEQ ID NO: 53971 - RNA, 32 nt, Homo Sapiens
guugagaagauaaauguguaacccccauugau

SEQ ID NO: 53972 - RNA, 32 nt, Homo Sapiens
agcgaggggggccccucuucugugugcgucug

SEQ ID NO: 53973 - RNA, 32 nt, Homo Sapiens
uuuuguuagaaucuugcauguugauuacuaaa

SEQ ID NO: 53974 - RNA, 32 nt, Homo Sapiens
ggcugugauuuucagaggggaauacuaagaaa

SEQ ID NO: 53975 - RNA, 32 nt, Homo Sapiens
ucacuccugcgcugacaagggcccuucucuac

SEQ ID NO: 53976 - RNA, 32 nt, Homo Sapiens
ugggucuuguccuguugcaggcacacugcagu

SEQ ID NO: 53977 - RNA, 32 nt, Homo Sapiens
cggccccuggaaaggguuccaaguccuuuagu

SEQ ID NO: 53978 - RNA, 32 nt, Homo Sapiens
ucucccgccacccacaccagcugucccacuca

SEQ ID NO: 53979 - RNA, 32 nt, Homo Sapiens
uaagugggcagacacuguuugcccaguguuug

SEQ ID NO: 53980 - RNA, 32 nt, Homo Sapiens
ggggaggagcugcuacugcugcuaccgaggcu

SEQ ID NO: 53981 - RNA, 32 nt, Homo Sapiens
aggaacuucuccuccuccuccuccccuacaau

SEQ ID NO: 53982 - RNA, 32 nt, Homo Sapiens
uguuugagugacucauugcuccguguccccaa

SEQ ID NO: 53983 - RNA, 32 nt, Homo Sapiens
ugugaagucuuaaagcacuucugcuuaaacuc

SEQ ID NO: 53984 - RNA, 32 nt, Homo Sapiens
cuugcuccugucuguuuccccauccugccaga

SEQ ID NO: 53985 - RNA, 32 nt, Homo Sapiens
cgggaacugugcgcgccggcugcaauggggcc

SEQ ID NO: 53986 - RNA, 32 nt, Homo Sapiens
uuaaaggguuauauuucucuuugguguaaacu

SEQ ID NO: 53987 - RNA, 32 nt, Homo Sapiens
ggcucccacgcccuccucccuccgcuaaggcu

SEQ ID NO: 53988 - RNA, 32 nt, Homo Sapiens
ggcgugagaagcucgacgcggaccacaucucc

SEQ ID NO: 53989 - RNA, 32 nt, Homo Sapiens
aacauguucacauugacagaaaaacaagcugc

SEQ ID NO: 53990 - RNA, 32 nt, Homo Sapiens
cgggaggucugggaucucugguuauaucucac

SEQ ID NO: 53991 - RNA, 32 nt, Homo Sapiens
ugcauuuucuuacucuagguuuauagagugau

SEQ ID NO: 53992 - RNA, 31 nt, Homo Sapiens
gucauuuacgaaagaaagucaaucuguaucc

SEQ ID NO: 53993 - RNA, 32 nt, Homo Sapiens
gaaaauccuccguggcucccagccccagcuua

SEQ ID NO: 53994 - RNA, 32 nt, Homo Sapiens
aucacuuucaguuaaauuucuguuguuauugu

SEQ ID NO: 53995 - RNA, 32 nt, Homo Sapiens
guacacggaggucucuguaaaagcagacccac

SEQ ID NO: 53996 - RNA, 32 nt, Homo Sapiens
cccggccaccgccguucucucuucccuccccu

SEQ ID NO: 53997 - RNA, 29 nt, Homo Sapiens
agugacuagaggaagaggacgaggccuug

SEQ ID NO: 53998 - RNA, 32 nt, Homo Sapiens
ccuuucuccaugaaauguguuugaaacaaauc

SEQ ID NO: 53999 - RNA, 32 nt, Homo Sapiens
cugcaucaagucugcguggccauccucccccc

SEQ ID NO: 54000 - RNA, 32 nt, Homo Sapiens
cccuuucccacucugaggcucuggccagaggg

SEQ ID NO: 54001 - RNA, 32 nt, Homo Sapiens
gcuggacugcccaguucaggaugugacaguga

SEQ ID NO: 54002 - RNA, 32 nt, Homo Sapiens
gggccgggcccggcccuggagaugguccccgg

SEQ ID NO: 54003 - RNA, 32 nt, Homo Sapiens
auguggaggggggaggggcugcugcggcagcu

SEQ ID NO: 54004 - RNA, 32 nt, Homo Sapiens
cgaaccggggagagcgggagacgugugcacgg

SEQ ID NO: 54005 - RNA, 32 nt, Homo Sapiens
ccucucugaauccagccugccauuccaucaaa

SEQ ID NO: 54006 - RNA, 32 nt, Homo Sapiens
aacucgaaccaccuaauauuucauaaccuucu

SEQ ID NO: 54007 - RNA, 32 nt, Homo Sapiens
gcgcaggaagggggcggcgagucgugcgaggc

SEQ ID NO: 54008 - RNA, 32 nt, Homo Sapiens
uaauuuaaaaauucauuuuaaggaagacagau

SEQ ID NO: 54009 - RNA, 32 nt, Homo Sapiens
ccuaaagcccaacacgagguauuauuuuaaag

SEQ ID NO: 54010 - RNA, 32 nt, Homo Sapiens
uccccucccuccccacccaagccucaccuccc

SEQ ID NO: 54011 - RNA, 32 nt, Homo Sapiens
gcauuacaaaaauguugcucagguaaucagua

SEQ ID NO: 54012 - RNA, 32 nt, Homo Sapiens
cuccuugggguuuggccuugggacgccugugg

SEQ ID NO: 54013 - RNA, 31 nt, Homo Sapiens
cagaagcggcacugugcuggcgggcuccggg

SEQ ID NO: 54014 - RNA, 32 nt, Homo Sapiens
uguaauauuucacuuuguuuuacuacaaauuc

SEQ ID NO: 54015 - RNA, 32 nt, Homo Sapiens
gcuuagugucauugucagcucacuucuaauag

SEQ ID NO: 54016 - RNA, 32 nt, Homo Sapiens
ggaugggaggaagaggggggugggugagcuga

SEQ ID NO: 54017 - RNA, 32 nt, Homo Sapiens
cgccagagggcuugugaacagaccggagagga

SEQ ID NO: 54018 - RNA, 32 nt, Homo Sapiens
cugggagccuggcgcgucaucauuggccugac

SEQ ID NO: 54019 - RNA, 32 nt, Homo Sapiens
aacuuguugucuuuuucuuuuucuuuucuuuu

SEQ ID NO: 54020 - RNA, 32 nt, Homo Sapiens
agccuugucuccuuccacuccccuccucccca

SEQ ID NO: 54021 - RNA, 32 nt, Homo Sapiens
uaacgcgugaauaacuuuuucuugcagcgguc

SEQ ID NO: 54022 - RNA, 32 nt, Homo Sapiens
acaccuccaaagcuaacgucaggguaaaacua

SEQ ID NO: 54023 - RNA, 32 nt, Homo Sapiens
acacccagccuggucuuagcguuauucccagg

SEQ ID NO: 54024 - RNA, 32 nt, Homo Sapiens
ucagaguuacucuggucugagucaacuuucgc

SEQ ID NO: 54025 - RNA, 32 nt, Homo Sapiens
gaguagcggaggcgugggggccucgaggggcu

SEQ ID NO: 54026 - RNA, 32 nt, Homo Sapiens
guuccucacuucucaaauaagaacgugaauag

SEQ ID NO: 54027 - RNA, 32 nt, Homo Sapiens
gaggcugggaaagcaagcaucuggcuucugug

SEQ ID NO: 54028 - RNA, 32 nt, Homo Sapiens
gauuuuguaaaaguauuuuucuugaaauaauc

SEQ ID NO: 54029 - RNA, 31 nt, Homo Sapiens
gauuccuuagucgaccuccagaauuagaaau

SEQ ID NO: 54030 - RNA, 32 nt, Homo Sapiens
aaaagaagaggaaggaauuuaauccuaaucgg

SEQ ID NO: 54031 - RNA, 32 nt, Homo Sapiens
agaucaucucccauccuccccagcgccaucug

SEQ ID NO: 54032 - RNA, 32 nt, Homo Sapiens
cagggugggcuggagaucuaacuggacucucg

SEQ ID NO: 54033 - RNA, 32 nt, Homo Sapiens
cagaugaaaauguucaguuuguacccauuuuu

SEQ ID NO: 54034 - RNA, 32 nt, Homo Sapiens
auaagaggagacugaggcauagagcagauaag

SEQ ID NO: 54035 - RNA, 32 nt, Homo Sapiens
uuaaaagucuaagauagcagaaaauacaguaa

SEQ ID NO: 54036 - RNA, 32 nt, Homo Sapiens
gccccuccaaccguccuaacgccgggccggca

SEQ ID NO: 54037 - RNA, 32 nt, Homo Sapiens
accagcacaccucagcaagaugccaggauugg

SEQ ID NO: 54038 - RNA, 32 nt, Homo Sapiens
gauggagccccggccgcggcggcggcgcagga

SEQ ID NO: 54039 - RNA, 32 nt, Homo Sapiens
ggucccggcgggcgcgaacccaccaugcagcu

SEQ ID NO: 54040 - RNA, 32 nt, Homo Sapiens
aaaggguuuuauuuuuuaauucuuguugguuu

SEQ ID NO: 54041 - RNA, 32 nt, Homo Sapiens
cucaagcgauccucccaccucagcucccugag

SEQ ID NO: 54042 - RNA, 32 nt, Homo Sapiens
uuauaaucucuuccccuccccccaaacuggag

SEQ ID NO: 54043 - RNA, 32 nt, Homo Sapiens
auaugcuucuaagagguagauaccagaauguu

SEQ ID NO: 54044 - RNA, 32 nt, Homo Sapiens
ggaaauuucugcaccacugguuuuguagcugu

SEQ ID NO: 54045 - RNA, 32 nt, Homo Sapiens
ccaggaaaacuuucuucuguuaucucaaauga

SEQ ID NO: 54046 - RNA, 32 nt, Homo Sapiens
ccuaccggcaagcaaaggagcgggaggagcgg

SEQ ID NO: 54047 - RNA, 32 nt, Homo Sapiens
cgguuguaggacccggagcagccggacaugga

SEQ ID NO: 54048 - RNA, 32 nt, Homo Sapiens
ggccgggugcgguggcucacgccuguaaucac

SEQ ID NO: 54049 - RNA, 32 nt, Homo Sapiens
ccucaccgccccuccagcccagcccaauccua

SEQ ID NO: 54050 - RNA, 32 nt, Homo Sapiens
ggcaugggggcggccaugccccuugguggaga

SEQ ID NO: 54051 - RNA, 32 nt, Homo Sapiens
uuuuguaaugaaaacaucugagaucugcugac

SEQ ID NO: 54052 - RNA, 32 nt, Homo Sapiens
uucuucugggaggcccuggacaugcugcagag

SEQ ID NO: 54053 - RNA, 32 nt, Homo Sapiens
auacaugcagagacaagauacacaaugauuau

SEQ ID NO: 54054 - RNA, 32 nt, Homo Sapiens
gucguccccguggaccucccccuuccucugca

SEQ ID NO: 54055 - RNA, 32 nt, Homo Sapiens
auggugaaaccuugucucuacugaaaauacaa

SEQ ID NO: 54056 - RNA, 32 nt, Homo Sapiens
ugaguuuuaucaacuaguagugugugggcacu

SEQ ID NO: 54057 - RNA, 32 nt, Homo Sapiens
aguccgaggaggaggagaagcuggcggagcuu

SEQ ID NO: 54058 - RNA, 32 nt, Homo Sapiens
ccguguggacgaaguuuggcccaaccuuuuca

SEQ ID NO: 54059 - RNA, 32 nt, Homo Sapiens
uuaggaagaggaagaagagguagaaaacauau

SEQ ID NO: 54060 - RNA, 32 nt, Homo Sapiens
ccugggcagggccugccuccucuggcucagug

SEQ ID NO: 54061 - RNA, 32 nt, Homo Sapiens
gcgaggcgcuggccggcagggggcgcugcggu

SEQ ID NO: 54062 - RNA, 32 nt, Homo Sapiens
uucuuccccacuuuucccuggaggucuagcuc

SEQ ID NO: 54063 - RNA, 32 nt, Homo Sapiens
ccccucagucauuuugaaauaaaauuaauuuu

SEQ ID NO: 54064 - RNA, 32 nt, Homo Sapiens
ggggcagccaaggcaggggcauucugagcugu

SEQ ID NO: 54065 - RNA, 32 nt, Homo Sapiens
aggcugagaccggugcgccgcgcgcuaguggc

SEQ ID NO: 54066 - RNA, 32 nt, Homo Sapiens
ccugauuaugaugcuuucgauguuguaacaaa

SEQ ID NO: 54067 - RNA, 32 nt, Homo Sapiens
gugccccaggucugcuggccaacauugguuca

SEQ ID NO: 54068 - RNA, 32 nt, Homo Sapiens
cgcccccacacacacucgggacgucuucauug

SEQ ID NO: 54069 - RNA, 32 nt, Homo Sapiens
cccuccacccucagcuagagguaggauauccc

SEQ ID NO: 54070 - RNA, 32 nt, Homo Sapiens
cuagccauuauguuagccuuuguuaggugggc

SEQ ID NO: 54071 - RNA, 32 nt, Homo Sapiens
ggugggcaggggggcugcuagcaaggguccca

SEQ ID NO: 54072 - RNA, 32 nt, Homo Sapiens
aucucguuauuuaaacaaaaaguuuugggucu

SEQ ID NO: 54073 - RNA, 32 nt, Homo Sapiens
cgaccugaggccugggggcaccguggaccccu

SEQ ID NO: 54074 - RNA, 31 nt, Homo Sapiens
gugguggcgugagccugucgucccagcuacu

SEQ ID NO: 54075 - RNA, 32 nt, Homo Sapiens
ggguaagaaauaaaaacuguaauaaaacauua

SEQ ID NO: 54076 - RNA, 32 nt, Homo Sapiens
uacacuagaaaauuauuucagucuucaaacaa

SEQ ID NO: 54077 - RNA, 32 nt, Homo Sapiens
ugaugccgcugcaggccccugucgagcugggg

SEQ ID NO: 54078 - RNA, 32 nt, Homo Sapiens
ccucugauacuucucucuuggggccaucagag

SEQ ID NO: 54079 - RNA, 32 nt, Homo Sapiens
auucuuggccccaggugaucugcccgccuggg

SEQ ID NO: 54080 - RNA, 32 nt, Homo Sapiens
uuagcccgcuggcgccggacacgcugcgccuc

SEQ ID NO: 54081 - RNA, 32 nt, Homo Sapiens
gaacacgggagcuucugaagagcugaacaugu

SEQ ID NO: 54082 - RNA, 32 nt, Homo Sapiens
gccacacgcaguagaauuuccgcagggcugug

SEQ ID NO: 54083 - RNA, 32 nt, Homo Sapiens
ugcccuggaaaacagacuauccccccuccuag

SEQ ID NO: 54084 - RNA, 32 nt, Homo Sapiens
cccugucacuaacaaaauuaaaaaauaaaaua

SEQ ID NO: 54085 - RNA, 32 nt, Homo Sapiens
aucaaauugaggugggggugucagaggaggca

SEQ ID NO: 54086 - RNA, 32 nt, Homo Sapiens
gugugcuucugcccgccaccgccccucccgcu

SEQ ID NO: 54087 - RNA, 32 nt, Homo Sapiens
cucccagcuggaagaggcgguggcggcggguc

SEQ ID NO: 54088 - RNA, 30 nt, Homo Sapiens
cuaagugucuguguucuuguaagccugagg

SEQ ID NO: 54089 - RNA, 32 nt, Homo Sapiens
cagaauacuuggaggaacuuccuacaaugaug

SEQ ID NO: 54090 - RNA, 32 nt, Homo Sapiens
uguggccuauuucucccugucagguugcacag

SEQ ID NO: 54091 - RNA, 32 nt, Homo Sapiens
gcccucuccuguccugccccaaggcuggcaca

SEQ ID NO: 54092 - RNA, 32 nt, Homo Sapiens
gggagccggcgcugcgcgaagggcucucccgg

SEQ ID NO: 54093 - RNA, 32 nt, Homo Sapiens
gcuuugagaaaacaccugaggcagugugggag

SEQ ID NO: 54094 - RNA, 32 nt, Homo Sapiens
agccauauuauuuucugauuuauuuucuuaag

SEQ ID NO: 54095 - RNA, 32 nt, Homo Sapiens
ccagucaccgaccgugcugaggagucauggaa

SEQ ID NO: 54096 - RNA, 32 nt, Homo Sapiens
ucuuagccauuaauguaauuccucuggauaaa

SEQ ID NO: 54097 - RNA, 32 nt, Homo Sapiens
cagagcugcucuucuucuucuacguuacugug

SEQ ID NO: 54098 - RNA, 32 nt, Homo Sapiens
ccgucccgcgcgcuccuccgacccgcuccgcu

SEQ ID NO: 54099 - RNA, 32 nt, Homo Sapiens
cacagcucacugcagccuggaccuccuggccu

SEQ ID NO: 54100 - RNA, 32 nt, Homo Sapiens
auuccuuguucccugguggggucugugguaag

SEQ ID NO: 54101 - RNA, 32 nt, Homo Sapiens
caauuuuucuucaaugcuugaugcacuaauga

SEQ ID NO: 54102 - RNA, 32 nt, Homo Sapiens
ucccacugcuucuggucuccagggacagugcu

SEQ ID NO: 54103 - RNA, 32 nt, Homo Sapiens
cauguuacuuuuuauguuaaugaaacucaguu

SEQ ID NO: 54104 - RNA, 32 nt, Homo Sapiens
gcuaauacagaaaaagaugaacaaacguccag

SEQ ID NO: 54105 - RNA, 32 nt, Homo Sapiens
guggaagaacggucucagaacuguuuguuuca

SEQ ID NO: 54106 - RNA, 32 nt, Homo Sapiens
cucccuggcuggagcagggagcuccaggagac

SEQ ID NO: 54107 - RNA, 32 nt, Homo Sapiens
cgcucgggccgggaauggcggcggcggccgag

SEQ ID NO: 54108 - RNA, 32 nt, Homo Sapiens
gccuucuagccccuccuccccgcgagacucuc

SEQ ID NO: 54109 - RNA, 32 nt, Homo Sapiens
cccgcggcggcggcugccggguguuugcugca

SEQ ID NO: 54110 - RNA, 32 nt, Homo Sapiens
uuaagauaauuucuuuauucguuugcccgaca

SEQ ID NO: 54111 - RNA, 29 nt, Homo Sapiens
ugggcaacaccgugagaccccaucucuac

SEQ ID NO: 54112 - RNA, 32 nt, Homo Sapiens
auggagauuuccaacuaacaucccaaguguau

SEQ ID NO: 54113 - RNA, 32 nt, Homo Sapiens
uuuuuagauauacauugaaaucuuuaaucaga

SEQ ID NO: 54114 - RNA, 32 nt, Homo Sapiens
cacccaucacuugucauguugguuuccaacag

SEQ ID NO: 54115 - RNA, 32 nt, Homo Sapiens
gagagccgagccgggggcgcugugcgcagcgc

SEQ ID NO: 54116 - RNA, 32 nt, Homo Sapiens
uucugaacccucagucucuucccuuuaaaccu

SEQ ID NO: 54117 - RNA, 32 nt, Homo Sapiens
ugcuaacaucagaaucaaacuuaaagcuucca

SEQ ID NO: 54118 - RNA, 32 nt, Homo Sapiens
uucuuucuuuuuucuuuuuuuguuuuguuuuu

SEQ ID NO: 54119 - RNA, 32 nt, Homo Sapiens
cuguuuuucuuacccuccuuacauccuuuuug

SEQ ID NO: 54120 - RNA, 32 nt, Homo Sapiens
cggccgggccagugugagccagugcgugaggg

SEQ ID NO: 54121 - RNA, 32 nt, Homo Sapiens
uucucuuuguuguuuuccuacuuucucaaggu

SEQ ID NO: 54122 - RNA, 32 nt, Homo Sapiens
cgggcugagcgcgggcugagcgcugccaguca

SEQ ID NO: 54123 - RNA, 32 nt, Homo Sapiens
cugcccccuccauggcccagcccuggugggga

SEQ ID NO: 54124 - RNA, 32 nt, Homo Sapiens
auuuuaaaaaauuuguuuaaaguauacucuua

SEQ ID NO: 54125 - RNA, 32 nt, Homo Sapiens
aaauuacuugcaaaaugaaaugugaauuguaa

SEQ ID NO: 54126 - RNA, 32 nt, Homo Sapiens
gcaccuuauccucccccuuuguuuaucaggga

SEQ ID NO: 54127 - RNA, 32 nt, Homo Sapiens
uuugauaauuguaggucauuaguaugcauauc

SEQ ID NO: 54128 - RNA, 32 nt, Homo Sapiens
cugggccaggaccagcaggucgaccugaccgu

SEQ ID NO: 54129 - RNA, 32 nt, Homo Sapiens
ugccucucaucuccacccacugacugcagacu

SEQ ID NO: 54130 - RNA, 32 nt, Homo Sapiens
uuaacgaaauggugacuaauguucuggaacuu

SEQ ID NO: 54131 - RNA, 32 nt, Homo Sapiens
gccgccgccgccgccgccgccggagcucugua

SEQ ID NO: 54132 - RNA, 32 nt, Homo Sapiens
uuaccaaaaaauacaguaaaaucauaauacag

SEQ ID NO: 54133 - RNA, 32 nt, Homo Sapiens
uucugucuccuccccaccuugcaaaacaaacu

SEQ ID NO: 54134 - RNA, 32 nt, Homo Sapiens
guggguuucuucccuuccuccugcacaaucgc

SEQ ID NO: 54135 - RNA, 32 nt, Homo Sapiens
ugugaccuugauuauuuuggcuuacucuuugg

SEQ ID NO: 54136 - RNA, 32 nt, Homo Sapiens
aagcggagggggaccaccguggagagcgcggu

SEQ ID NO: 54137 - RNA, 32 nt, Homo Sapiens
auggagccuuuuuuccucccccauccccugca

SEQ ID NO: 54138 - RNA, 32 nt, Homo Sapiens
cacagggcucugcggaccugcagccaucugug

SEQ ID NO: 54139 - RNA, 32 nt, Homo Sapiens
ccgagaccgggccuuacuucuguaacgauacu

SEQ ID NO: 54140 - RNA, 32 nt, Homo Sapiens
ugguuuuucacauuuaagauaauuauggcucu

SEQ ID NO: 54141 - RNA, 32 nt, Homo Sapiens
gaaggaaguugguugcagaaaccauucuuuga

SEQ ID NO: 54142 - RNA, 32 nt, Homo Sapiens
cgauggcgaugaugccucuaguccugcaucau

SEQ ID NO: 54143 - RNA, 32 nt, Homo Sapiens
aaggaguuagagaugugauuugccauugcugu

SEQ ID NO: 54144 - RNA, 32 nt, Homo Sapiens
ccugaagauccuccccauguucuucaucguca

SEQ ID NO: 54145 - RNA, 32 nt, Homo Sapiens
acugcaugaaguuguucauuuggggcuccagu

SEQ ID NO: 54146 - RNA, 32 nt, Homo Sapiens
cgaggcagccuggcccuuaucugcacugggcc

SEQ ID NO: 54147 - RNA, 32 nt, Homo Sapiens
cuuugaugcgagucugcauuugaaagcccaag

SEQ ID NO: 54148 - RNA, 32 nt, Homo Sapiens
cauuccagaggucgcccagcuccggcgcugac

SEQ ID NO: 54149 - RNA, 31 nt, Homo Sapiens
ccuugacaaaagaaaaagugguuuugaugau

SEQ ID NO: 54150 - RNA, 32 nt, Homo Sapiens
guggagcccugcucagggaguaccucaagggc

SEQ ID NO: 54151 - RNA, 32 nt, Homo Sapiens
aaucccagcuucuggaggcugaggccagagaa

SEQ ID NO: 54152 - RNA, 32 nt, Homo Sapiens
guucuguauuccagacaugggaagauguacag

SEQ ID NO: 54153 - RNA, 32 nt, Homo Sapiens
cuuucuccacccuggcucccaaggcuuggcug

SEQ ID NO: 54154 - RNA, 32 nt, Homo Sapiens
cucauuuuucuaaaauacaauuuuguuucucc

SEQ ID NO: 54155 - RNA, 32 nt, Homo Sapiens
uuaccuauuuuuguuauuaaaucaaaugugua

SEQ ID NO: 54156 - RNA, 32 nt, Homo Sapiens
accuuuauaugauauacuaugacuaggcugug

SEQ ID NO: 54157 - RNA, 32 nt, Homo Sapiens
uuccgcucgccggcugcggcgccugggacggu

SEQ ID NO: 54158 - RNA, 32 nt, Homo Sapiens
cauuuuaaggcauguggugacaaugcuauuug

SEQ ID NO: 54159 - RNA, 32 nt, Homo Sapiens
ugugcgcuugcuuccccaacccugcaccggcc

SEQ ID NO: 54160 - RNA, 32 nt, Homo Sapiens
uaugaaaauauugcuaugagauaauaagccac

SEQ ID NO: 54161 - RNA, 32 nt, Homo Sapiens
aucgauugggcugggagggcuggccaugaggu

SEQ ID NO: 54162 - RNA, 32 nt, Homo Sapiens
uguacggucuauaaaggggaggcaugaauaau

SEQ ID NO: 54163 - RNA, 32 nt, Homo Sapiens
uucuucaccacugaucucuccucaccaugccc

SEQ ID NO: 54164 - RNA, 32 nt, Homo Sapiens
ccugcccgccugcgucaccgcggccgccaugg

SEQ ID NO: 54165 - RNA, 32 nt, Homo Sapiens
ugagccagugccucgcaugauaccagaggagg

SEQ ID NO: 54166 - RNA, 32 nt, Homo Sapiens
cccaggcccagcugccuuuggcuuugaucuca

SEQ ID NO: 54167 - RNA, 32 nt, Homo Sapiens
ccuccagagcagccagcccagcccgggaacaa

SEQ ID NO: 54168 - RNA, 32 nt, Homo Sapiens
ccaccacagcucuaucaaggcuugucaagcag

SEQ ID NO: 54169 - RNA, 32 nt, Homo Sapiens
guauguuuauuuacauuaguuuugauuacauu

SEQ ID NO: 54170 - RNA, 32 nt, Homo Sapiens
agccuuuggcuuuggucacacaggauauucug

SEQ ID NO: 54171 - RNA, 32 nt, Homo Sapiens
aaaggcugucccgcccugaaaugcaaucagag

SEQ ID NO: 54172 - RNA, 28 nt, Homo Sapiens
cacgaggggcggcggcagcuguggaagc

SEQ ID NO: 54173 - RNA, 32 nt, Homo Sapiens
gggccgccauggccagcguccacgagagccuc

SEQ ID NO: 54174 - RNA, 32 nt, Homo Sapiens
caggggagaaggaaaagaggucaacaugaagc

SEQ ID NO: 54175 - RNA, 32 nt, Homo Sapiens
uuuugugcauuaaucuuaauucauauuuauua

SEQ ID NO: 54176 - RNA, 32 nt, Homo Sapiens
caacagucaugguuuucuuaagccucuuauga

SEQ ID NO: 54177 - RNA, 32 nt, Homo Sapiens
cuaucaugagucugguagaaaaguaaaaguaa

SEQ ID NO: 54178 - RNA, 32 nt, Homo Sapiens
aggcuccagaaagcggcauguccccuuugcuc

SEQ ID NO: 54179 - RNA, 32 nt, Homo Sapiens
cugacggucuucugcgccuggaucuugauguu

SEQ ID NO: 54180 - RNA, 32 nt, Homo Sapiens
ugggagguggagguugcagugagccgagauca

SEQ ID NO: 54181 - RNA, 32 nt, Homo Sapiens
aaauguugggauuccaccuggcaccucgagga

SEQ ID NO: 54182 - RNA, 32 nt, Homo Sapiens
agcuccgcuuucauuucuuucacauacaacuu

SEQ ID NO: 54183 - RNA, 32 nt, Homo Sapiens
ggucagacacaggcccugccccugcccucagu

SEQ ID NO: 54184 - RNA, 32 nt, Homo Sapiens
ccauguaccuggaugugacgggccccugggga

SEQ ID NO: 54185 - RNA, 32 nt, Homo Sapiens
uaguuguuuuuuuuuuuuuuuacuaguucagc

SEQ ID NO: 54186 - RNA, 32 nt, Homo Sapiens
uugcauuuuuaaaaauacguauuucuaauuug

SEQ ID NO: 54187 - RNA, 32 nt, Homo Sapiens
guaagaguguuguuuuuuauucagauugggaa

SEQ ID NO: 54188 - RNA, 32 nt, Homo Sapiens
accccgugaccucccucucuccuuccagucac

SEQ ID NO: 54189 - RNA, 32 nt, Homo Sapiens
ccugugaggagguggcauccccugcccaugcc

SEQ ID NO: 54190 - RNA, 32 nt, Homo Sapiens
caucggcagcgccaggggacagagcacaggaa

SEQ ID NO: 54191 - RNA, 32 nt, Homo Sapiens
gacaaaugcuuaugaaacuaagauuuguaaua

SEQ ID NO: 54192 - RNA, 32 nt, Homo Sapiens
aaccagcuuuuguggcccauggagcaacgacu

SEQ ID NO: 54193 - RNA, 32 nt, Homo Sapiens
ucagagcccacaccccacagcgccccccacgc

SEQ ID NO: 54194 - RNA, 32 nt, Homo Sapiens
cgccagauuuuugaaucucaaguaacuuucug

SEQ ID NO: 54195 - RNA, 32 nt, Homo Sapiens
uuuaccaucagcucagccccugggaagggcgu

SEQ ID NO: 54196 - RNA, 32 nt, Homo Sapiens
cacuucucagggccucuguucuccucuccacu

SEQ ID NO: 54197 - RNA, 32 nt, Homo Sapiens
gcaugugccucuuccccacccagcggcagccg

SEQ ID NO: 54198 - RNA, 32 nt, Homo Sapiens
gccacgcucccucgccguccgagcacagccgu

SEQ ID NO: 54199 - RNA, 30 nt, Homo Sapiens
ucaaaaggcaggcagugcugguuccucugc

SEQ ID NO: 54200 - RNA, 32 nt, Homo Sapiens
ggauuguaucccauuuuacugucuuuuagguu

SEQ ID NO: 54201 - RNA, 32 nt, Homo Sapiens
guacccaggagguggagguugcggugaacuga

SEQ ID NO: 54202 - RNA, 32 nt, Homo Sapiens
ggaggccgcgcgcggcccgccgagcgccuuca

SEQ ID NO: 54203 - RNA, 32 nt, Homo Sapiens
cuccccaguauuuggaaauuacuuucuugaug

SEQ ID NO: 54204 - RNA, 32 nt, Homo Sapiens
gagcugggugacgaggccacccagagccaggc

SEQ ID NO: 54205 - RNA, 32 nt, Homo Sapiens
cagccacgcgcgcgccuucccugucuugugug

SEQ ID NO: 54206 - RNA, 32 nt, Homo Sapiens
uucugggggaccgcgggggccgugagcacuca

SEQ ID NO: 54207 - RNA, 32 nt, Homo Sapiens
ggguggccgggcgggccacgcgggaccgacuu

SEQ ID NO: 54208 - RNA, 32 nt, Homo Sapiens
cacauggcauuugggaaagcagaugggucaug

SEQ ID NO: 54209 - RNA, 32 nt, Homo Sapiens
aaaagauuucuguuauuuuuuauauuuuuuua

SEQ ID NO: 54210 - RNA, 32 nt, Homo Sapiens
aauuacuucuguacaagaaauaaacuuuauuu

SEQ ID NO: 54211 - RNA, 32 nt, Homo Sapiens
gggguggggcuuugggacccaccggggccagu

SEQ ID NO: 54212 - RNA, 32 nt, Homo Sapiens
cgcugaggagcaagggggcgcuaggaaaggga

SEQ ID NO: 54213 - RNA, 32 nt, Homo Sapiens
ugcccugcgcggagagcggcgagcgcagccau

SEQ ID NO: 54214 - RNA, 32 nt, Homo Sapiens
ucugcagcucgcaaccggccucgugcuuugcg

SEQ ID NO: 54215 - RNA, 32 nt, Homo Sapiens
guugccaauauuugcaccaucuucacaugcac

SEQ ID NO: 54216 - RNA, 32 nt, Homo Sapiens
gggacgcacugaccgaggugcggacggcggua

SEQ ID NO: 54217 - RNA, 32 nt, Homo Sapiens
cuuagcuggugccacuucccuccuguggcaau

SEQ ID NO: 54218 - RNA, 32 nt, Homo Sapiens
ccuggcucugcugucccccaagagggugcuuc

SEQ ID NO: 54219 - RNA, 32 nt, Homo Sapiens
ucuaugcauguuuuugaguugacugauuccaa

SEQ ID NO: 54220 - RNA, 32 nt, Homo Sapiens
uuccacccaucccagccccugggcagccgggc

SEQ ID NO: 54221 - RNA, 32 nt, Homo Sapiens
cuuucuggucaucuccccucccgccccgcccc

SEQ ID NO: 54222 - RNA, 32 nt, Homo Sapiens
cacuguguguaucucuagauaagaagauaugc

SEQ ID NO: 54223 - RNA, 32 nt, Homo Sapiens
uuugguuuagcuugcuugcacggguuguagga

SEQ ID NO: 54224 - RNA, 32 nt, Homo Sapiens
cgcauuucuucugcacuuccugucucauccuu

SEQ ID NO: 54225 - RNA, 32 nt, Homo Sapiens
gugccaaggcggcugggggcggcgagcggggc

SEQ ID NO: 54226 - RNA, 32 nt, Homo Sapiens
gggccaggccccagcaugauccugaaaucugc

SEQ ID NO: 54227 - RNA, 30 nt, Homo Sapiens
ugaccagauaaauaauagauaugcacauga

SEQ ID NO: 54228 - RNA, 32 nt, Homo Sapiens
guuuuguucuuuguuaugcugucuaucucugu

SEQ ID NO: 54229 - RNA, 32 nt, Homo Sapiens
cauccugcugguuuuacuuuagucccuccaug

SEQ ID NO: 54230 - RNA, 32 nt, Homo Sapiens
gugaaagaaugggauuggcaaguaacuucuga

SEQ ID NO: 54231 - RNA, 32 nt, Homo Sapiens
auuguuuuugucaugccacgugccaaaggcca

SEQ ID NO: 54232 - RNA, 32 nt, Homo Sapiens
cuguguggguuuuugaggaaaaccugaggucc

SEQ ID NO: 54233 - RNA, 32 nt, Homo Sapiens
cgacccugcuccgagaucccagccgccgcucu

SEQ ID NO: 54234 - RNA, 32 nt, Homo Sapiens
auuuugaagguauaaaacugcacuguaugucu

SEQ ID NO: 54235 - RNA, 32 nt, Homo Sapiens
auauguauacguuaguaaaauaaccagauaua

SEQ ID NO: 54236 - RNA, 31 nt, Homo Sapiens
cggcugcaggaggugucgagcggcguuauuu

SEQ ID NO: 54237 - RNA, 32 nt, Homo Sapiens
gggaagugucugcccaccugcccgccgggcac

SEQ ID NO: 54238 - RNA, 32 nt, Homo Sapiens
aagaaauaauaaucccucgaguuuacaaaaca

SEQ ID NO: 54239 - RNA, 29 nt, Homo Sapiens
gacgugggggcucagaggaccucggacca

SEQ ID NO: 54240 - RNA, 32 nt, Homo Sapiens
augaccagcccaaugcaggaaaacacuacuuc

SEQ ID NO: 54241 - RNA, 32 nt, Homo Sapiens
uagaauugggccaagauaaaucaauguuguuu

SEQ ID NO: 54242 - RNA, 32 nt, Homo Sapiens
cuguaccuuucugagaagaacagagaccgaga

SEQ ID NO: 54243 - RNA, 32 nt, Homo Sapiens
ggguggguauaaaacuucuuauucuuaaauuu

SEQ ID NO: 54244 - RNA, 32 nt, Homo Sapiens
cugaugaccucaaagcacuuucauggcugccc

SEQ ID NO: 54245 - RNA, 32 nt, Homo Sapiens
ucaaucagcucaacucaagauuucauaaucau

SEQ ID NO: 54246 - RNA, 31 nt, Homo Sapiens
ugggugcagggcgcgccaggagucccagcca

SEQ ID NO: 54247 - RNA, 32 nt, Homo Sapiens
gauuccagggauauuucuugucuuacaugguc

SEQ ID NO: 54248 - RNA, 32 nt, Homo Sapiens
uggaaaaaugacuuuucaguuaugucuuuggu

SEQ ID NO: 54249 - RNA, 32 nt, Homo Sapiens
gcuuaagggaguccggccgugcccggugcauu

SEQ ID NO: 54250 - RNA, 32 nt, Homo Sapiens
cuugcgcgcugagauuuccggcgugggagcag

SEQ ID NO: 54251 - RNA, 32 nt, Homo Sapiens
uguacacuucguaaucucaagguuauuauucu

SEQ ID NO: 54252 - RNA, 32 nt, Homo Sapiens
uuacuggggaagacagacauguaaauauauca

SEQ ID NO: 54253 - RNA, 32 nt, Homo Sapiens
acaggaucaccuguacccaagcccuuagcuca

SEQ ID NO: 54254 - RNA, 32 nt, Homo Sapiens
gauauugcuauguuggccaggcuggucucaaa

SEQ ID NO: 54255 - RNA, 32 nt, Homo Sapiens
ggacagccuccuuaaagcagacuuccauauac

SEQ ID NO: 54256 - RNA, 32 nt, Homo Sapiens
ggagggggagggggagugggcgggcaguggau

SEQ ID NO: 54257 - RNA, 32 nt, Homo Sapiens
uuuugauuuccucuucucucccuucaagcccc

SEQ ID NO: 54258 - RNA, 32 nt, Homo Sapiens
ggcacgagggagagucgaacccggagcagggu

SEQ ID NO: 54259 - RNA, 32 nt, Homo Sapiens
cuccgagggcugcagggagaucagcguccagc

SEQ ID NO: 54260 - RNA, 32 nt, Homo Sapiens
accuaguuaguagucuucaauauaaccaauug

SEQ ID NO: 54261 - RNA, 32 nt, Homo Sapiens
uuuaaauacauuuuguuuugguaaaugaacug

SEQ ID NO: 54262 - RNA, 32 nt, Homo Sapiens
cgguccagagcccacaggauccuacaggaggg

SEQ ID NO: 54263 - RNA, 32 nt, Homo Sapiens
uucccacuuuugaugccugugaugcaauuuuu

SEQ ID NO: 54264 - RNA, 32 nt, Homo Sapiens
aaaagugucuguacagcagccauccaaguugc

SEQ ID NO: 54265 - RNA, 32 nt, Homo Sapiens
ugcugauuuggaagauaacaguggauucuuuc

SEQ ID NO: 54266 - RNA, 32 nt, Homo Sapiens
ggcccagggccuccuuccacauuaguagcccc

SEQ ID NO: 54267 - RNA, 32 nt, Homo Sapiens
gcgcugguggagcuggaguugcaccgcggcag

SEQ ID NO: 54268 - RNA, 32 nt, Homo Sapiens
uucucuucccucaggguggcugugauacaggu

SEQ ID NO: 54269 - RNA, 32 nt, Homo Sapiens
auuagcugggcauggcggcgugugucuguaau

SEQ ID NO: 54270 - RNA, 32 nt, Homo Sapiens
cuucggguggagagggcggcggcguugaaugu

SEQ ID NO: 54271 - RNA, 32 nt, Homo Sapiens
gccucaaaaacuaaaaauaaaaaaugaacagu

SEQ ID NO: 54272 - RNA, 32 nt, Homo Sapiens
auccuuaaugccacugauacaaaaggcugcac

SEQ ID NO: 54273 - RNA, 32 nt, Homo Sapiens
agcugugaagggaacgugagggggcggcguag

SEQ ID NO: 54274 - RNA, 32 nt, Homo Sapiens
ucucacugucuccugugcuuuuugccagccca

SEQ ID NO: 54275 - RNA, 32 nt, Homo Sapiens
ugaaacacucaaaaauaccacuucucaguaug

SEQ ID NO: 54276 - RNA, 32 nt, Homo Sapiens
gguucaggugagaacaccagcacauguuaacu

SEQ ID NO: 54277 - RNA, 32 nt, Homo Sapiens
uaaaaugaauuuucuuuuuuuuuaagacagag

SEQ ID NO: 54278 - RNA, 32 nt, Homo Sapiens
uccagagaggaugaggcggggacccggcccaa

SEQ ID NO: 54279 - RNA, 32 nt, Homo Sapiens
acaaaagcaaauuuauauacuaaaaucauuug

SEQ ID NO: 54280 - RNA, 32 nt, Homo Sapiens
acagagaaaugauaaauguuuuuuguuuuauu

SEQ ID NO: 54281 - RNA, 32 nt, Homo Sapiens
uucccauaaucaugcaauuaaguuuuacucuu

SEQ ID NO: 54282 - RNA, 32 nt, Homo Sapiens
cucagaggccgcucugggggguugccucgagu

SEQ ID NO: 54283 - RNA, 32 nt, Homo Sapiens
ggaagcauggcuggggggaggggguacacaga

SEQ ID NO: 54284 - RNA, 32 nt, Homo Sapiens
uuuugcucaaaucuaugggaacaaaagucaag

SEQ ID NO: 54285 - RNA, 32 nt, Homo Sapiens
uuugcguagaaaguuuuaggaacuuuaacuuu

SEQ ID NO: 54286 - RNA, 32 nt, Homo Sapiens
guuucguggccugaccaaggaccuccaaggag

SEQ ID NO: 54287 - RNA, 32 nt, Homo Sapiens
agccaccacauccagccagugauccuuaaaag

SEQ ID NO: 54288 - RNA, 32 nt, Homo Sapiens
gggucccuaggccccgccuggcacucagccuu

SEQ ID NO: 54289 - RNA, 32 nt, Homo Sapiens
agggauagcauuaggagauauaccuaauguaa

SEQ ID NO: 54290 - RNA, 32 nt, Homo Sapiens
cuuguguuguucccugcuguccuccguauuac

SEQ ID NO: 54291 - RNA, 32 nt, Homo Sapiens
ugucuauuuguaaagcaaccaccuuccuuauu

SEQ ID NO: 54292 - RNA, 32 nt, Homo Sapiens
uugccuaccacccugucuguccccucacuucg

SEQ ID NO: 54293 - RNA, 32 nt, Homo Sapiens
ugagcgagggugcguggugcgcggcggcggcg

SEQ ID NO: 54294 - RNA, 32 nt, Homo Sapiens
ucaauacauuauaacauaauacaccaaaugcu

SEQ ID NO: 54295 - RNA, 32 nt, Homo Sapiens
agaagagcgagcugcgccugggucccggccag

SEQ ID NO: 54296 - RNA, 32 nt, Homo Sapiens
gcuugguuaaacuaaauggaaccaugugcuaa

SEQ ID NO: 54297 - RNA, 32 nt, Homo Sapiens
ccugaaaauuguaggguuauuaguccaaaugu

SEQ ID NO: 54298 - RNA, 32 nt, Homo Sapiens
aaaugagcauuucccaaacuagguuccccgag

SEQ ID NO: 54299 - RNA, 32 nt, Homo Sapiens
acaaguccacuggccuggcuuggccccaggca

SEQ ID NO: 54300 - RNA, 32 nt, Homo Sapiens
gacuuagaucccauuucuguccugcucccagg

SEQ ID NO: 54301 - RNA, 32 nt, Homo Sapiens
acccugcucccggcugcauucccacugcagcc

SEQ ID NO: 54302 - RNA, 32 nt, Homo Sapiens
uuaguuuccuaaugugugccaaugaaauauuu

SEQ ID NO: 54303 - RNA, 32 nt, Homo Sapiens
guauaugaccccagggccuggaccugcaggau

SEQ ID NO: 54304 - RNA, 32 nt, Homo Sapiens
uauccuauggauauuggcuuccccucauacaa

SEQ ID NO: 54305 - RNA, 32 nt, Homo Sapiens
accccugccaggugggggcauggcgggcagga

SEQ ID NO: 54306 - RNA, 32 nt, Homo Sapiens
augucaggucugaccauugggagcaaagccau

SEQ ID NO: 54307 - RNA, 32 nt, Homo Sapiens
ggaguaguguuuuuuuaaccauuguuaaucag

SEQ ID NO: 54308 - RNA, 32 nt, Homo Sapiens
ggaagccucaggaaagagaaacaaagacaaca

SEQ ID NO: 54309 - RNA, 32 nt, Homo Sapiens
uaauuagaauaaagucauuuucuuacaaaaaa

SEQ ID NO: 54310 - RNA, 32 nt, Homo Sapiens
aauaaugaaacccaauuguaaaacagucacca

SEQ ID NO: 54311 - RNA, 32 nt, Homo Sapiens
cagcuccgccccauacccgucacuacagccuc

SEQ ID NO: 54312 - RNA, 28 nt, Homo Sapiens
acaauguccaggaaacagaaccagaagg

SEQ ID NO: 54313 - RNA, 32 nt, Homo Sapiens
ccgccggucccgguccugagcuggaccagagc

SEQ ID NO: 54314 - RNA, 32 nt, Homo Sapiens
cugcagcugcgcgggcgggcgugguugccggg

SEQ ID NO: 54315 - RNA, 32 nt, Homo Sapiens
ccccccaacaaauucuuacugagcaccugcug

SEQ ID NO: 54316 - RNA, 32 nt, Homo Sapiens
caggaucccgggaaaggcaggggagggggugg

SEQ ID NO: 54317 - RNA, 32 nt, Homo Sapiens
cuggagucagagacccucucccugcccccagc

SEQ ID NO: 54318 - RNA, 32 nt, Homo Sapiens
gaagguuguaaggccccaaacaugcugccugg

SEQ ID NO: 54319 - RNA, 32 nt, Homo Sapiens
ucauuccccaccucuucccagccccacugccc

SEQ ID NO: 54320 - RNA, 32 nt, Homo Sapiens
gcuguaccuuggcuucauuuaaaucauccugg

SEQ ID NO: 54321 - RNA, 27 nt, Homo Sapiens
uuuuuuaguugaaacugguauauauaa

SEQ ID NO: 54322 - RNA, 32 nt, Homo Sapiens
ggggucugccagcuggggcccucccugucgcc

SEQ ID NO: 54323 - RNA, 31 nt, Homo Sapiens
gagaagauggcggucgccgugagaacuuugc

SEQ ID NO: 54324 - RNA, 32 nt, Homo Sapiens
auccuacaguaaauaaaccagcauccugccgc

SEQ ID NO: 54325 - RNA, 32 nt, Homo Sapiens
uucuaccugauuccagaguucauuccaacaug

SEQ ID NO: 54326 - RNA, 32 nt, Homo Sapiens
aucagggagagcuuccugggggaaguggcauu

SEQ ID NO: 54327 - RNA, 32 nt, Homo Sapiens
aaggggauaaagggcuguguggcugcuugauu

SEQ ID NO: 54328 - RNA, 32 nt, Homo Sapiens
uacauccuugggaaugcaugcuuuuguagcaa

SEQ ID NO: 54329 - RNA, 32 nt, Homo Sapiens
ucugcuggaaacuccugaagagcauuauguau

SEQ ID NO: 54330 - RNA, 32 nt, Homo Sapiens
aaaguaaacguguaucucuuguucauuuuuau

SEQ ID NO: 54331 - RNA, 32 nt, Homo Sapiens
gauauuaaaaauacauugugaagaaaacuucu

SEQ ID NO: 54332 - RNA, 32 nt, Homo Sapiens
ugccuguugcuguccaucagcacuuggucucu

SEQ ID NO: 54333 - RNA, 32 nt, Homo Sapiens
aggcaaucacagucauuuccacagccucaacc

SEQ ID NO: 54334 - RNA, 32 nt, Homo Sapiens
augguccauguuuuuccaauuaccugcugaca

SEQ ID NO: 54335 - RNA, 32 nt, Homo Sapiens
cucacugcaacgccugccucucaggcucaagc

SEQ ID NO: 54336 - RNA, 32 nt, Homo Sapiens
aggcacaaaagaacaccugaaaaaugauauuu

SEQ ID NO: 54337 - RNA, 32 nt, Homo Sapiens
cucuggccagcacgccuguccucccccggggc

SEQ ID NO: 54338 - RNA, 32 nt, Homo Sapiens
ccuugcacagcaugaauuuaauucuaguugga

SEQ ID NO: 54339 - RNA, 32 nt, Homo Sapiens
cacauuuuuaauggagauuggcugcuuucagg

SEQ ID NO: 54340 - RNA, 32 nt, Homo Sapiens
augacuuaaagccacacccccacccgaccgag

SEQ ID NO: 54341 - RNA, 32 nt, Homo Sapiens
acauugauaacuuucuggaacaauuaagagau

SEQ ID NO: 54342 - RNA, 32 nt, Homo Sapiens
cccggucagcgucggcggcugcaccggcggcg

SEQ ID NO: 54343 - RNA, 32 nt, Homo Sapiens
gcucucagaauccucgcuguguuuccucaggc

SEQ ID NO: 54344 - RNA, 32 nt, Homo Sapiens
acacccgcucccucacucgcacacacagacac

SEQ ID NO: 54345 - RNA, 32 nt, Homo Sapiens
uugccagcuaccugggggagggcuugccacug

SEQ ID NO: 54346 - RNA, 32 nt, Homo Sapiens
cugacgccggcgcggggcgcgcaccaugaacu

SEQ ID NO: 54347 - RNA, 32 nt, Homo Sapiens
ugguuccguugacuagggucaucuugaucucu

SEQ ID NO: 54348 - RNA, 32 nt, Homo Sapiens
uauguauccaacacaagaacacccagauuaua

SEQ ID NO: 54349 - RNA, 32 nt, Homo Sapiens
aaaaacaacguaacuugguuuucauguguuuu

SEQ ID NO: 54350 - RNA, 32 nt, Homo Sapiens
ucuuuccccucuauaauacaacuuacuugaaa

SEQ ID NO: 54351 - RNA, 32 nt, Homo Sapiens
acugcuuucuccaacuguucacagcaaaugcu

SEQ ID NO: 54352 - RNA, 32 nt, Homo Sapiens
ggcagccucccuccccacacccgccccugugc

SEQ ID NO: 54353 - RNA, 32 nt, Homo Sapiens
guccuggguuugagcccugccuccccccacug

SEQ ID NO: 54354 - RNA, 32 nt, Homo Sapiens
cugauaagugguggaggcagaauagaaucuaa

SEQ ID NO: 54355 - RNA, 32 nt, Homo Sapiens
uuaaguuaagggugagagacuuaaguuauagg

SEQ ID NO: 54356 - RNA, 30 nt, Homo Sapiens
cauugugucugugugguaaagggccaaagu

SEQ ID NO: 54357 - RNA, 32 nt, Homo Sapiens
ccugaccccagccccugccccuggacaccugc

SEQ ID NO: 54358 - RNA, 32 nt, Homo Sapiens
uacagggugggcgggggcgggaggggcuagcg

SEQ ID NO: 54359 - RNA, 32 nt, Homo Sapiens
ccuaagucauuaaugagcuauuuuauaaacac

SEQ ID NO: 54360 - RNA, 32 nt, Homo Sapiens
ggggacgaggcgucuacauucgcuggaggcag

SEQ ID NO: 54361 - RNA, 32 nt, Homo Sapiens
agcccgcgggcgucaugcccgcgcuccuccgc

SEQ ID NO: 54362 - RNA, 32 nt, Homo Sapiens
gugagccaggauggucucaaucuccugaccuc

SEQ ID NO: 54363 - RNA, 32 nt, Homo Sapiens
ccggccggcugcccauagccagcccuccgccg

SEQ ID NO: 54364 - RNA, 32 nt, Homo Sapiens
agugccaucagaaagcuguaucaugagcugcc

SEQ ID NO: 54365 - RNA, 32 nt, Homo Sapiens
uugcgucucgcccuccggccaagcauggggcu

SEQ ID NO: 54366 - RNA, 32 nt, Homo Sapiens
gagacucagagugccuucuccaucccaguguc

SEQ ID NO: 54367 - RNA, 32 nt, Homo Sapiens
auucaucacuacaauuaauuauagaacuucuu

SEQ ID NO: 54368 - RNA, 32 nt, Homo Sapiens
aagcauuuuuauuuguuuauuuccucaucuga

SEQ ID NO: 54369 - RNA, 32 nt, Homo Sapiens
cuauggaauccuucuuuuuauaacuaaguuua

SEQ ID NO: 54370 - RNA, 32 nt, Homo Sapiens
ggcccagaggggcuucuguccuguguguugug

SEQ ID NO: 54371 - RNA, 32 nt, Homo Sapiens
ggccauguucaucuuucccuuuucucaaagac

SEQ ID NO: 54372 - RNA, 32 nt, Homo Sapiens
ugaaaguucuuuguuguuuuagauuguagaau

SEQ ID NO: 54373 - RNA, 32 nt, Homo Sapiens
cuguggaaguuuaguaaaugucuuuuucccuc

SEQ ID NO: 54374 - RNA, 32 nt, Homo Sapiens
cucucugggcaggugcagucaccaccacuccc

SEQ ID NO: 54375 - RNA, 32 nt, Homo Sapiens
ccgcacccagcaugcuucgccgaggcuauaag

SEQ ID NO: 54376 - RNA, 32 nt, Homo Sapiens
uucaaaagggugucggugccgcgcuccccucc

SEQ ID NO: 54377 - RNA, 32 nt, Homo Sapiens
uaggaauccacaucagaaugauacagaguuag

SEQ ID NO: 54378 - RNA, 32 nt, Homo Sapiens
gacagcugccuaaauuaggagcucuagaccug

SEQ ID NO: 54379 - RNA, 31 nt, Homo Sapiens
aacccagugggccccacuccagaccaagagc

SEQ ID NO: 54380 - RNA, 32 nt, Homo Sapiens
cuccccacaauaaaaugugauuggaucgugug

SEQ ID NO: 54381 - RNA, 32 nt, Homo Sapiens
aaacauggcgcgggcuggcccucggcuggugc

SEQ ID NO: 54382 - RNA, 32 nt, Homo Sapiens
aguuugauuacuauguacauuuaaaagguagc

SEQ ID NO: 54383 - RNA, 32 nt, Homo Sapiens
ggcugauggauuccaaaccaggacacuacccu

SEQ ID NO: 54384 - RNA, 32 nt, Homo Sapiens
ccagaacuuggaaaaguuguagggauuucuaa

SEQ ID NO: 54385 - RNA, 32 nt, Homo Sapiens
cugacagaacagagaccuccucaccagggcuu

SEQ ID NO: 54386 - RNA, 32 nt, Homo Sapiens
agcuuugggaggaaaugcucaguuccaaagga

SEQ ID NO: 54387 - RNA, 32 nt, Homo Sapiens
ugcuuuauaauauuuuuuccuuaccuauauau

SEQ ID NO: 54388 - RNA, 32 nt, Homo Sapiens
auguaaaauaacaaugacuauuuuaaacucga

SEQ ID NO: 54389 - RNA, 32 nt, Homo Sapiens
cugccccccuccccgcaagaggucuuuucagg

SEQ ID NO: 54390 - RNA, 32 nt, Homo Sapiens
agggacacacaagcacuuucacaucgaggcua

SEQ ID NO: 54391 - RNA, 32 nt, Homo Sapiens
ggaaaaggcaaggcuuccaggccaguuggccc

SEQ ID NO: 54392 - RNA, 32 nt, Homo Sapiens
gcauggcuuccuggcggcccaggccuugccuc

SEQ ID NO: 54393 - RNA, 32 nt, Homo Sapiens
gguacccugguggcauguggcuccuguggugc

SEQ ID NO: 54394 - RNA, 32 nt, Homo Sapiens
cuucaugaggaugugcaguaucccaguaucac

SEQ ID NO: 54395 - RNA, 32 nt, Homo Sapiens
caccugcccuccccuuuuucgggacucuguau

SEQ ID NO: 54396 - RNA, 32 nt, Homo Sapiens
uccugcugcagccccagggccccucgccgccg

SEQ ID NO: 54397 - RNA, 32 nt, Homo Sapiens
cccggaggccagggcguccggggcugcgccac

SEQ ID NO: 54398 - RNA, 32 nt, Homo Sapiens
ugggagaguuggaggagguggcggcgggcaga

SEQ ID NO: 54399 - RNA, 32 nt, Homo Sapiens
aucucauucuaccugcaguuuaauuggaaaga

SEQ ID NO: 54400 - RNA, 32 nt, Homo Sapiens
uuuuuaaagguuuuuuagaauacuguuccaag

SEQ ID NO: 54401 - RNA, 32 nt, Homo Sapiens
ggugggucuccucagguggagucugcagagug

SEQ ID NO: 54402 - RNA, 32 nt, Homo Sapiens
aauccucuuaaagauuuaaacugauccuuuua

SEQ ID NO: 54403 - RNA, 31 nt, Homo Sapiens
cuguucucacggacgguccccguccagccug

SEQ ID NO: 54404 - RNA, 32 nt, Homo Sapiens
auugucuuaauaggcugcacgugguggcucac

SEQ ID NO: 54405 - RNA, 32 nt, Homo Sapiens
agacauggaaagucaauacugauggggaagcu

SEQ ID NO: 54406 - RNA, 32 nt, Homo Sapiens
guuuaagagcauaaauaauacucucaauguaa

SEQ ID NO: 54407 - RNA, 32 nt, Homo Sapiens
cuaucacaauuugaaaagauaagcaaaaguuu

SEQ ID NO: 54408 - RNA, 32 nt, Homo Sapiens
ucagcaaauggcagcccaggagcuguuugucc

SEQ ID NO: 54409 - RNA, 32 nt, Homo Sapiens
uuuugcuaaaaacauguuugugaauguaugca

SEQ ID NO: 54410 - RNA, 32 nt, Homo Sapiens
aggcaauaaauguuugucaacauauucucuua

SEQ ID NO: 54411 - RNA, 32 nt, Homo Sapiens
ugccugcacucuaagcgcucuccccacguccg

SEQ ID NO: 54412 - RNA, 32 nt, Homo Sapiens
aaauaauagauaugcacaugaaagaugcaaac

SEQ ID NO: 54413 - RNA, 32 nt, Homo Sapiens
cuucugggacugaguuuccucaaccggaacac

SEQ ID NO: 54414 - RNA, 32 nt, Homo Sapiens
guugucaccaagcuaggugcuauuggucaucu

SEQ ID NO: 54415 - RNA, 32 nt, Homo Sapiens
uuugcuaguauguuuuuuuuuacguucguaga

SEQ ID NO: 54416 - RNA, 32 nt, Homo Sapiens
agcuaauguguuuuauuugugaauagucuuuu

SEQ ID NO: 54417 - RNA, 32 nt, Homo Sapiens
cagcggcugggauccucagcggcggccgguuu

SEQ ID NO: 54418 - RNA, 32 nt, Homo Sapiens
acacacagccccacccguccucuguccucucc

SEQ ID NO: 54419 - RNA, 32 nt, Homo Sapiens
gcguggaggaggagaaggagcgcgcgcugggc

SEQ ID NO: 54420 - RNA, 32 nt, Homo Sapiens
cccaaguucagccuagggacuccacguacccc

SEQ ID NO: 54421 - RNA, 32 nt, Homo Sapiens
agaacuuuuucuucuuacaacuuuuuugaaau

SEQ ID NO: 54422 - RNA, 32 nt, Homo Sapiens
gccacguaaaaagcugguaggcaugagugugc

SEQ ID NO: 54423 - RNA, 32 nt, Homo Sapiens
ugaaauacaguauaccgcaguggcucuaggug

SEQ ID NO: 54424 - RNA, 32 nt, Homo Sapiens
ccagcgcaaccucggccccgccucgauagccc

SEQ ID NO: 54425 - RNA, 32 nt, Homo Sapiens
caggcccugccccuccuccccgcugcagccag

SEQ ID NO: 54426 - RNA, 32 nt, Homo Sapiens
gagacaggacccuugaggaaaaacucuagagc

SEQ ID NO: 54427 - RNA, 30 nt, Homo Sapiens
uguggagaggaaggaggcagauucauuucu

SEQ ID NO: 54428 - RNA, 32 nt, Homo Sapiens
ucccucccccucagacccucacuuccuguacc

SEQ ID NO: 54429 - RNA, 32 nt, Homo Sapiens
gagacaugaaacuauuugaaauggcuuuaugu

SEQ ID NO: 54430 - RNA, 32 nt, Homo Sapiens
uuccuucauccccacagcaacuccauggggcg

SEQ ID NO: 54431 - RNA, 32 nt, Homo Sapiens
aaauugucauuuuuuucuuaauguucaucaua

SEQ ID NO: 54432 - RNA, 32 nt, Homo Sapiens
aucuuucagaagcagaauaaaauuaagauguu

SEQ ID NO: 54433 - RNA, 32 nt, Homo Sapiens
gugcgaggagagugaugccgguaaagaaaagu

SEQ ID NO: 54434 - RNA, 32 nt, Homo Sapiens
gcagcgccaugagacuccucccccgcuugcug

SEQ ID NO: 54435 - RNA, 32 nt, Homo Sapiens
uugaaugauucuaauuuuuaagcaaaauauua

SEQ ID NO: 54436 - RNA, 32 nt, Homo Sapiens
uuuuauauuggcugucuggauuuuaaagacuu

SEQ ID NO: 54437 - RNA, 32 nt, Homo Sapiens
cagcgcugcuccccgggcgcuccuccccgggc

SEQ ID NO: 54438 - RNA, 32 nt, Homo Sapiens
auuugggagagcccauggugacugcgugagug

SEQ ID NO: 54439 - RNA, 32 nt, Homo Sapiens
uuuuauuuaaacaaaauuuagaauuuggccgc

SEQ ID NO: 54440 - RNA, 32 nt, Homo Sapiens
gagaggaggcggaggagagagccugcgagguc

SEQ ID NO: 54441 - RNA, 32 nt, Homo Sapiens
accagaguacagaccuuggagacgcgauagau

SEQ ID NO: 54442 - RNA, 32 nt, Homo Sapiens
uguugccccgguugcucucaaacuccugaccu

SEQ ID NO: 54443 - RNA, 32 nt, Homo Sapiens
guaauacccagcuccuaucuaaagccccauuc

SEQ ID NO: 54444 - RNA, 32 nt, Homo Sapiens
acauuauagcagacauaaguaacaggaaaaug

SEQ ID NO: 54445 - RNA, 32 nt, Homo Sapiens
cugaggaugaaacaaagaagauguucucuuuu

SEQ ID NO: 54446 - RNA, 32 nt, Homo Sapiens
gggcgcaccccuuuuauccccggagcgcuagg

SEQ ID NO: 54447 - RNA, 32 nt, Homo Sapiens
auaagggacugauguucuguuucuuguaauua

SEQ ID NO: 54448 - RNA, 32 nt, Homo Sapiens
guuuugggggguauuuugcauguucggauuuu

SEQ ID NO: 54449 - RNA, 32 nt, Homo Sapiens
gucccagcgcgguguguggcugcggugggugc

SEQ ID NO: 54450 - RNA, 32 nt, Homo Sapiens
cuuuuauuuauuauuuguaguauauugucuga

SEQ ID NO: 54451 - RNA, 32 nt, Homo Sapiens
gagaaaagaaagcaggaaaaugugcuauugag

SEQ ID NO: 54452 - RNA, 31 nt, Homo Sapiens
ccaggggcgucugcugugccccgccaaucac

SEQ ID NO: 54453 - RNA, 32 nt, Homo Sapiens
uaguaaagcugauuuaauacugacauacuagu

SEQ ID NO: 54454 - RNA, 32 nt, Homo Sapiens
ggcgggggccccacagggccaccuucuugccc

SEQ ID NO: 54455 - RNA, 32 nt, Homo Sapiens
uacccuaauuuuaaaacaaaagaacaagaaaa

SEQ ID NO: 54456 - RNA, 32 nt, Homo Sapiens
acaacaacaacaaaaaauaaaucaagaaggca

SEQ ID NO: 54457 - RNA, 32 nt, Homo Sapiens
gaggggaagaucugggcaauuuuggccuugac

SEQ ID NO: 54458 - RNA, 32 nt, Homo Sapiens
gagcgcucagacggagcccccgggcaacuuga

SEQ ID NO: 54459 - RNA, 32 nt, Homo Sapiens
aggaugcaaaaauaaaugcuuaaccaacacua

SEQ ID NO: 54460 - RNA, 32 nt, Homo Sapiens
uguagaagaugggcagccagauauaucaaggc

SEQ ID NO: 54461 - RNA, 32 nt, Homo Sapiens
agauacgugaauucaauuuuaagcaagauucu

SEQ ID NO: 54462 - RNA, 32 nt, Homo Sapiens
gcucgagagcaucuuggccccggccaccuucc

SEQ ID NO: 54463 - RNA, 30 nt, Homo Sapiens
cuggaaaauaaaagacgaugcauuauaacu

SEQ ID NO: 54464 - RNA, 32 nt, Homo Sapiens
cucucggccgcggaaggacaagggguuaucgc

SEQ ID NO: 54465 - RNA, 32 nt, Homo Sapiens
gugggcguggauuuagggagggggcugugaug

SEQ ID NO: 54466 - RNA, 32 nt, Homo Sapiens
ggaacaaugcaacuuuaaaccaauuaauaaaa

SEQ ID NO: 54467 - RNA, 32 nt, Homo Sapiens
agcagaaacuaaauccaaguauuugggaguga

SEQ ID NO: 54468 - RNA, 32 nt, Homo Sapiens
aacaucuuuuuaauuuagauccaaauaaccau

SEQ ID NO: 54469 - RNA, 32 nt, Homo Sapiens
ggucaccuggaaacagccuucuggcccaacuc

SEQ ID NO: 54470 - RNA, 32 nt, Homo Sapiens
cagccagggguggauucuuuaucaccaguggc

SEQ ID NO: 54471 - RNA, 32 nt, Homo Sapiens
aggggccucuggagcccucccugcuguaccca

SEQ ID NO: 54472 - RNA, 32 nt, Homo Sapiens
gaugugaugcuggagaucuauagccaccuggu

SEQ ID NO: 54473 - RNA, 32 nt, Homo Sapiens
uucggaggccccagugcacccguggacuccuu

SEQ ID NO: 54474 - RNA, 32 nt, Homo Sapiens
cccaugucccgcccagccccgcccccaaccca

SEQ ID NO: 54475 - RNA, 32 nt, Homo Sapiens
ucagagauauuguaggugcuaauacuggauuu

SEQ ID NO: 54476 - RNA, 32 nt, Homo Sapiens
ucaucccaggacuuauuuugguuuuccuauuc

SEQ ID NO: 54477 - RNA, 32 nt, Homo Sapiens
uauguuuccucagcauaggagcuaugauucau

SEQ ID NO: 54478 - RNA, 32 nt, Homo Sapiens
auaguuaaauguugaguauuguacauauguau

SEQ ID NO: 54479 - RNA, 32 nt, Homo Sapiens
uuuagaguucacugguucagucuuaaaugccu

SEQ ID NO: 54480 - RNA, 32 nt, Homo Sapiens
aagacaauggcaguuuuuaucgugauuugccu

SEQ ID NO: 54481 - RNA, 32 nt, Homo Sapiens
caguugcagauaacccaaugaaugaaagugca

SEQ ID NO: 54482 - RNA, 32 nt, Homo Sapiens
aaaugaaggggagcugggugugaguguuuaca

SEQ ID NO: 54483 - RNA, 32 nt, Homo Sapiens
guaauaauaaugguagguaacaauuaaauggc

SEQ ID NO: 54484 - RNA, 25 nt, Homo Sapiens
auggcggcggcuccgcugcugcugc

SEQ ID NO: 54485 - RNA, 32 nt, Homo Sapiens
gccccagccuccaacuuggagagacagauuug

SEQ ID NO: 54486 - RNA, 32 nt, Homo Sapiens
cauaguaugaugcugugaaaagagaugaguuu

SEQ ID NO: 54487 - RNA, 32 nt, Homo Sapiens
cucuccauccgccccgacuuccagaagggccu

SEQ ID NO: 54488 - RNA, 32 nt, Homo Sapiens
uugcauguccuaaagcacuggcugaaggaagc

SEQ ID NO: 54489 - RNA, 32 nt, Homo Sapiens
uuaguguuaaugacucuuucugaaggaagaga

SEQ ID NO: 54490 - RNA, 32 nt, Homo Sapiens
cuggagccgggcgugagucgcagcaggagccg

SEQ ID NO: 54491 - RNA, 32 nt, Homo Sapiens
gugugcagaucccuagaagagaaaacgcugac

SEQ ID NO: 54492 - RNA, 32 nt, Homo Sapiens
uaucccacucccucucuuuccugcuccauugg

SEQ ID NO: 54493 - RNA, 28 nt, Homo Sapiens
ccuuaguuaaugguuauuauaaaccuau

SEQ ID NO: 54494 - RNA, 32 nt, Homo Sapiens
gcccuuccccuucuccccuguccucaccauau

SEQ ID NO: 54495 - RNA, 32 nt, Homo Sapiens
aagacucgcccauuuuggaaugugaccgucug

SEQ ID NO: 54496 - RNA, 32 nt, Homo Sapiens
gaggcagagucuugcucuguugcccaggcugg

SEQ ID NO: 54497 - RNA, 32 nt, Homo Sapiens
ccagcugccuccaggcagccagcccucaagca

SEQ ID NO: 54498 - RNA, 32 nt, Homo Sapiens
aagaaccuggaaaggggacucuguuggccauu

SEQ ID NO: 54499 - RNA, 32 nt, Homo Sapiens
ucuucuauuuuugucccauuucugaaaauuau

SEQ ID NO: 54500 - RNA, 32 nt, Homo Sapiens
acugcaugucauugugucuaggcuuauucacu

SEQ ID NO: 54501 - RNA, 32 nt, Homo Sapiens
aauagaugcuggcuccacggacuaaaauaaua

SEQ ID NO: 54502 - RNA, 32 nt, Homo Sapiens
aaauccuuuuaagcaucuuacacaccucucac

SEQ ID NO: 54503 - RNA, 32 nt, Homo Sapiens
uagugaggaggagcccagaggaccccagggga

SEQ ID NO: 54504 - RNA, 30 nt, Homo Sapiens
cuauuuauacaaaugggggcggcuggaaag

SEQ ID NO: 54505 - RNA, 32 nt, Homo Sapiens
uaaauacaaauauaugcauuguguaauccacu

SEQ ID NO: 54506 - RNA, 32 nt, Homo Sapiens
aagcuggaaagauaguguuuauggaagauuug

SEQ ID NO: 54507 - RNA, 32 nt, Homo Sapiens
cucccagguucaagcaagucuugugccucagu

SEQ ID NO: 54508 - RNA, 32 nt, Homo Sapiens
ggggcccccucaccuugucccuccucagccag

SEQ ID NO: 54509 - RNA, 32 nt, Homo Sapiens
uuuaaagaaagauaaauagaaauuuuaaggcc

SEQ ID NO: 54510 - RNA, 32 nt, Homo Sapiens
uccugccagggccagccuuuuggauggauugu

SEQ ID NO: 54511 - RNA, 32 nt, Homo Sapiens
ugaauuauguacaugguaaaauguucucucuc

SEQ ID NO: 54512 - RNA, 32 nt, Homo Sapiens
gagccggaugcgccuuccuuuccucuccagag

SEQ ID NO: 54513 - RNA, 32 nt, Homo Sapiens
cccucugggcgacgcgaggcccgggggcgcug

SEQ ID NO: 54514 - RNA, 32 nt, Homo Sapiens
cucuacucaugagccuggacagcuggaccucc

SEQ ID NO: 54515 - RNA, 32 nt, Homo Sapiens
gugguuaaaaaauuauuuuuaaaaaucuagau

SEQ ID NO: 54516 - RNA, 32 nt, Homo Sapiens
acucuggguucaguauuuccuggcacagcacu

SEQ ID NO: 54517 - RNA, 32 nt, Homo Sapiens
cuaccuucuucucacuaaaaaacaagucagug

SEQ ID NO: 54518 - RNA, 32 nt, Homo Sapiens
aagacuuguuguuuuucuuguuggguuuugga

SEQ ID NO: 54519 - RNA, 32 nt, Homo Sapiens
uggaagcugccuccaguagacaucacugaacc

SEQ ID NO: 54520 - RNA, 32 nt, Homo Sapiens
agggugauaaccuuccccagaaacaacaguga

SEQ ID NO: 54521 - RNA, 32 nt, Homo Sapiens
acgcccagggccucgggcguacgcuuaccagc

SEQ ID NO: 54522 - RNA, 32 nt, Homo Sapiens
uguuucuuggauauauuccauggcauuuugug

SEQ ID NO: 54523 - RNA, 32 nt, Homo Sapiens
ucuccugauacaaaccaaauggcuaccuggaa

SEQ ID NO: 54524 - RNA, 32 nt, Homo Sapiens
cagccucggcccggacucgccgccaacgagga

SEQ ID NO: 54525 - RNA, 25 nt, Homo Sapiens
augccggcccggcggcugcugcugc

SEQ ID NO: 54526 - RNA, 32 nt, Homo Sapiens
caaagcugcuaagugccaaacuguuauuuuac

SEQ ID NO: 54527 - RNA, 32 nt, Homo Sapiens
gcuuucucauuucuggaagugauucaggagcc

SEQ ID NO: 54528 - RNA, 32 nt, Homo Sapiens
cacuccugccuccucagcuuugcuucauguuc

SEQ ID NO: 54529 - RNA, 32 nt, Homo Sapiens
augcauuuucuuuuucuucauuuggaugaaua

SEQ ID NO: 54530 - RNA, 32 nt, Homo Sapiens
auacacacucucucacucugucucucuuaccu

SEQ ID NO: 54531 - RNA, 32 nt, Homo Sapiens
cccuaggccuugccuggcaugggugccacucu

SEQ ID NO: 54532 - RNA, 32 nt, Homo Sapiens
gcugcaccugacagaagcuccaggaugcuugu

SEQ ID NO: 54533 - RNA, 32 nt, Homo Sapiens
uugccauucugccccuggacccuucucuccgg

SEQ ID NO: 54534 - RNA, 32 nt, Homo Sapiens
cggccgccgccgggccuggauggggccuuacc

SEQ ID NO: 54535 - RNA, 32 nt, Homo Sapiens
cucggucgcgcgggucgcccccgccccgaccu

SEQ ID NO: 54536 - RNA, 32 nt, Homo Sapiens
auggaggaugggcuuuuaaaccacaucaucuu

SEQ ID NO: 54537 - RNA, 32 nt, Homo Sapiens
guagccauauguaacgggauuuuaaaaauaua

SEQ ID NO: 54538 - RNA, 32 nt, Homo Sapiens
ggguggucggggggagccgggcggcagagaag

SEQ ID NO: 54539 - RNA, 29 nt, Homo Sapiens
uaauuucaaagcuaucauuuucuauuuuu

SEQ ID NO: 54540 - RNA, 32 nt, Homo Sapiens
acguuaacagugaccuuugguuauccacagua

SEQ ID NO: 54541 - RNA, 32 nt, Homo Sapiens
cugaggcaacugguccugggggugcucaggcc

SEQ ID NO: 54542 - RNA, 32 nt, Homo Sapiens
acccuauauuauauuucccuaacucugaagau

SEQ ID NO: 54543 - RNA, 32 nt, Homo Sapiens
ccucaugguuuucccuuuuucuuagaauauuu

SEQ ID NO: 54544 - RNA, 32 nt, Homo Sapiens
gauccugacuaagauagcaaacauauauugga

SEQ ID NO: 54545 - RNA, 32 nt, Homo Sapiens
gcucagaagacaccccaaacccuucaggaaau

SEQ ID NO: 54546 - RNA, 32 nt, Homo Sapiens
aauuaaaugaauugaaagggaaacucagagua

SEQ ID NO: 54547 - RNA, 32 nt, Homo Sapiens
agaugccccggccccagggcuucccccaggaa

SEQ ID NO: 54548 - RNA, 32 nt, Homo Sapiens
auggccagugaccgcuuucucccuucaagaaa

SEQ ID NO: 54549 - RNA, 32 nt, Homo Sapiens
gucuauauucauuaaaaguccuguucacuaaa

SEQ ID NO: 54550 - RNA, 32 nt, Homo Sapiens
ccgccuggccuggcccuccccaggcggcucag

SEQ ID NO: 54551 - RNA, 32 nt, Homo Sapiens
cacaggcugucaugguggcucuugccacacuu

SEQ ID NO: 54552 - RNA, 32 nt, Homo Sapiens
cagaaggcaauaugguagcaaaaauugugucu

SEQ ID NO: 54553 - RNA, 32 nt, Homo Sapiens
ggcgggcacacacaggaccgugccucacaggg

SEQ ID NO: 54554 - RNA, 32 nt, Homo Sapiens
gcugugagguggcagcggcugcagcggcggag

SEQ ID NO: 54555 - RNA, 32 nt, Homo Sapiens
aaggauguguuugcuuccccuucugccaugau

SEQ ID NO: 54556 - RNA, 32 nt, Homo Sapiens
gcgggugcgggcccgaagcggcgcgcgcuagc

SEQ ID NO: 54557 - RNA, 32 nt, Homo Sapiens
acgcgggugcaggggggcgcggcugggcggug

SEQ ID NO: 54558 - RNA, 32 nt, Homo Sapiens
gaaugcucugguuugagcaauuuucgaacauu

SEQ ID NO: 54559 - RNA, 32 nt, Homo Sapiens
gcagguaugcacauauacaugcucuuaauuac

SEQ ID NO: 54560 - RNA, 32 nt, Homo Sapiens
auguuagcuguuaaaaaauguauaauaacuca

SEQ ID NO: 54561 - RNA, 32 nt, Homo Sapiens
uuauaaauaauauauauaguuggaucacauuu

SEQ ID NO: 54562 - RNA, 32 nt, Homo Sapiens
cucccugggccgcggccuggcgcggaagccgc

SEQ ID NO: 54563 - RNA, 32 nt, Homo Sapiens
ccggaaguggaggaggaggcgcggcggcggcg

SEQ ID NO: 54564 - RNA, 30 nt, Homo Sapiens
ccggccuggcccgugccccgcugccgcacu

SEQ ID NO: 54565 - RNA, 32 nt, Homo Sapiens
cuugaaacauuagcuucuuuuaccaaccugag

SEQ ID NO: 54566 - RNA, 30 nt, Homo Sapiens
gugcuucggauggcggcgggagguugaugg

SEQ ID NO: 54567 - RNA, 32 nt, Homo Sapiens
aagcuaaaaaagacaugcagaacugcuauuuu

SEQ ID NO: 54568 - RNA, 32 nt, Homo Sapiens
uugaaaccaaaaucauguucuucuaaaguguc

SEQ ID NO: 54569 - RNA, 32 nt, Homo Sapiens
uaguagagcugggcuucagacccaggcagccc

SEQ ID NO: 54570 - RNA, 32 nt, Homo Sapiens
auucucuccauuuuggugucuuucucuuuuag

SEQ ID NO: 54571 - RNA, 31 nt, Homo Sapiens
guuuuuaaauaaaaacggauaaagugucaaa

SEQ ID NO: 54572 - RNA, 32 nt, Homo Sapiens
aggaacauaaaauuauuuccuaauaagauaau

SEQ ID NO: 54573 - RNA, 30 nt, Homo Sapiens
ugggcugucugugucagugguuuccggucu

SEQ ID NO: 54574 - RNA, 28 nt, Homo Sapiens
ucaacguggguguggccgaggugaagaa

SEQ ID NO: 54575 - RNA, 32 nt, Homo Sapiens
gaggccacagaaaagacaguuaaagcaaagaa

SEQ ID NO: 54576 - RNA, 32 nt, Homo Sapiens
gugcccaaggaucugcuuucugaaggggugag

SEQ ID NO: 54577 - RNA, 32 nt, Homo Sapiens
caugcuuugaauaucugacuucuucugcagcc

SEQ ID NO: 54578 - RNA, 32 nt, Homo Sapiens
ucuuucuuuugucauugggcacgguuugcaaa

SEQ ID NO: 54579 - RNA, 32 nt, Homo Sapiens
aucuggguccugccuucgacaccaccccaagg

SEQ ID NO: 54580 - RNA, 32 nt, Homo Sapiens
aaccccgagggaggcccggcccuugcucccga

SEQ ID NO: 54581 - RNA, 32 nt, Homo Sapiens
uugucugucuugggcugguagcuccucucacu

SEQ ID NO: 54582 - RNA, 32 nt, Homo Sapiens
cagaucauuauuauauauagguauugauugcu

SEQ ID NO: 54583 - RNA, 32 nt, Homo Sapiens
aacuuagcuggguguaacggcggaugccugua

SEQ ID NO: 54584 - RNA, 32 nt, Homo Sapiens
guccgggagcccacggcgguuaauucuuuuua

SEQ ID NO: 54585 - RNA, 32 nt, Homo Sapiens
agacuccggucacuguccucgccccgccuccc

SEQ ID NO: 54586 - RNA, 32 nt, Homo Sapiens
acuuggccuaucugcuggaccugcuggggcag

SEQ ID NO: 54587 - RNA, 32 nt, Homo Sapiens
gcagcugccugauuagaugacucucagucccc

SEQ ID NO: 54588 - RNA, 32 nt, Homo Sapiens
cccacccccgccgacuucuccccuuuccccag

SEQ ID NO: 54589 - RNA, 32 nt, Homo Sapiens
uggcggcacaccuggucaccagauggccagaa

SEQ ID NO: 54590 - RNA, 23 nt, Homo Sapiens
gccaccccauccccucccgcugg

SEQ ID NO: 54591 - RNA, 32 nt, Homo Sapiens
aguaauaaaaagauugaaguauuuugcuggaa

SEQ ID NO: 54592 - RNA, 32 nt, Homo Sapiens
auuuuuugaacauguuauugcagugauucuca

SEQ ID NO: 54593 - RNA, 27 nt, Homo Sapiens
aagccucccuucuucuccagguccccu

SEQ ID NO: 54594 - RNA, 32 nt, Homo Sapiens
ugagcucuguugucagaggcucacgggacaga

SEQ ID NO: 54595 - RNA, 32 nt, Homo Sapiens
uggguucuccccagccccuuggccucugaggc

SEQ ID NO: 54596 - RNA, 32 nt, Homo Sapiens
uuguggcagcgggaaucuggugcugggggcag

SEQ ID NO: 54597 - RNA, 32 nt, Homo Sapiens
agugcagauauacacacagagaagggacuuaa

SEQ ID NO: 54598 - RNA, 32 nt, Homo Sapiens
uugcugagggucacauugagcugcagguugaa

SEQ ID NO: 54599 - RNA, 32 nt, Homo Sapiens
acccuaugauguaggcagguauucccauuuug

SEQ ID NO: 54600 - RNA, 32 nt, Homo Sapiens
gacuucugaauacagcacagcugagcccccug

SEQ ID NO: 54601 - RNA, 32 nt, Homo Sapiens
aucacagacauuagcaaugaugugugaaguga

SEQ ID NO: 54602 - RNA, 32 nt, Homo Sapiens
gacaaagcacuccuggccgccgccgccgccgc

SEQ ID NO: 54603 - RNA, 32 nt, Homo Sapiens
cacuugcuucugcggcgagucccacccacgac

SEQ ID NO: 54604 - RNA, 32 nt, Homo Sapiens
caccugugcucccagcacuuugggaggcugag

SEQ ID NO: 54605 - RNA, 32 nt, Homo Sapiens
acagugcugcacacacaaugauuacgggaaag

SEQ ID NO: 54606 - RNA, 32 nt, Homo Sapiens
aguccagagggucagaugcugcugugagaggc

SEQ ID NO: 54607 - RNA, 32 nt, Homo Sapiens
gcgcggagaagucggggcgggcggcagagagg

SEQ ID NO: 54608 - RNA, 32 nt, Homo Sapiens
uauauacaugaguuuauuucugauauaaauaa

SEQ ID NO: 54609 - RNA, 32 nt, Homo Sapiens
guucauguauaauacucauuuacaauucaaua

SEQ ID NO: 54610 - RNA, 32 nt, Homo Sapiens
gccuggcgacagcuccgccgcgcacgcacaug

SEQ ID NO: 54611 - RNA, 32 nt, Homo Sapiens
ggugcucuguggugaauggguggccuaugaug

SEQ ID NO: 54612 - RNA, 32 nt, Homo Sapiens
cuugggcaauccaggaaggguuuaaagagacc

SEQ ID NO: 54613 - RNA, 32 nt, Homo Sapiens
guguggucaggagaaaggggauggagcagugg

SEQ ID NO: 54614 - RNA, 32 nt, Homo Sapiens
gguucucccagguggauuuugcuggaauucuc

SEQ ID NO: 54615 - RNA, 32 nt, Homo Sapiens
aauauauuuauguuuucuuuuaaucauuucau

SEQ ID NO: 54616 - RNA, 32 nt, Homo Sapiens
aaucuugaguuuuagauaaguaguuauuuuuu

SEQ ID NO: 54617 - RNA, 30 nt, Homo Sapiens
ggcacaggcaggcugggguccucgcuggcc

SEQ ID NO: 54618 - RNA, 32 nt, Homo Sapiens
gcaauacaacugucacaucagaaacaagaaaa

SEQ ID NO: 54619 - RNA, 32 nt, Homo Sapiens
aaaagcaguuuuaauagcacacacacacacac

SEQ ID NO: 54620 - RNA, 32 nt, Homo Sapiens
gcuucccgcgccggacccaguaccucggcucc

SEQ ID NO: 54621 - RNA, 32 nt, Homo Sapiens
aaaaccaucaaggggacgacugccugccaggc

SEQ ID NO: 54622 - RNA, 32 nt, Homo Sapiens
cuggaugcuauccacacccaccuaucccugca

SEQ ID NO: 54623 - RNA, 32 nt, Homo Sapiens
uuuccauccaacaauuaaagaucuuugacacu

SEQ ID NO: 54624 - RNA, 28 nt, Homo Sapiens
cugaguaacaggccaccaagcggcuacu

SEQ ID NO: 54625 - RNA, 32 nt, Homo Sapiens
ugcauuuguucccuucuaggugggagccgugg

SEQ ID NO: 54626 - RNA, 32 nt, Homo Sapiens
ucuauuuuauuuuauagauacuaauuccauua

SEQ ID NO: 54627 - RNA, 32 nt, Homo Sapiens
agcggaggugagcggcgggcggggauggcgga

SEQ ID NO: 54628 - RNA, 32 nt, Homo Sapiens
cagccaaggacgugaagagauguacgggggaa

SEQ ID NO: 54629 - RNA, 32 nt, Homo Sapiens
aaguccaagcuagagaaagauaaacaggucau

SEQ ID NO: 54630 - RNA, 32 nt, Homo Sapiens
augacauugcuaagaugcucuaucuugcucug

SEQ ID NO: 54631 - RNA, 32 nt, Homo Sapiens
uuuuuuuucaauuuuucuuuuuugggauggag

SEQ ID NO: 54632 - RNA, 32 nt, Homo Sapiens
cauuuaucaacuguugauacaaauguuagucc

SEQ ID NO: 54633 - RNA, 32 nt, Homo Sapiens
ccuagauucacugaucuuuuugaaagguuuuu

SEQ ID NO: 54634 - RNA, 32 nt, Homo Sapiens
ggcugccuuugcaguccuuuuacuacagcuau

SEQ ID NO: 54635 - RNA, 32 nt, Homo Sapiens
cuugagaguaaaaaaugaaauaaaauaaaucc

SEQ ID NO: 54636 - RNA, 32 nt, Homo Sapiens
cugccccaaucccacacaccacuuggaaauga

SEQ ID NO: 54637 - RNA, 32 nt, Homo Sapiens
cuucaguccaggagcaagaacaguguugcucc

SEQ ID NO: 54638 - RNA, 32 nt, Homo Sapiens
gcagugccuuggcggugguauucaaggcaguu

SEQ ID NO: 54639 - RNA, 32 nt, Homo Sapiens
gaggaacccagcuggaaaaugccgucugaacg

SEQ ID NO: 54640 - RNA, 32 nt, Homo Sapiens
uuuuaugccacuuuucucuccccauaccuucc

SEQ ID NO: 54641 - RNA, 32 nt, Homo Sapiens
gcaggacuggcugcauccccucauggacaagg

SEQ ID NO: 54642 - RNA, 32 nt, Homo Sapiens
agaaacccccgcagcagacugcguccgcaggg

SEQ ID NO: 54643 - RNA, 32 nt, Homo Sapiens
ucugacuucugcaucuccuuccaggucagcuc

SEQ ID NO: 54644 - RNA, 32 nt, Homo Sapiens
cuguccucuucugcagguccagcccuggcgag

SEQ ID NO: 54645 - RNA, 32 nt, Homo Sapiens
uccaucuaacuguauuuuugugcccauuaacc

SEQ ID NO: 54646 - RNA, 32 nt, Homo Sapiens
ugugaagucaaauaaauuaauuuuaucuuuaa

SEQ ID NO: 54647 - RNA, 32 nt, Homo Sapiens
cacgaugggaggccuggggcccugcccgcugg

SEQ ID NO: 54648 - RNA, 32 nt, Homo Sapiens
augcgaggguagaggagagacguggguugaga

SEQ ID NO: 54649 - RNA, 32 nt, Homo Sapiens
ccauuucugagcucagucacugaagugagagu

SEQ ID NO: 54650 - RNA, 32 nt, Homo Sapiens
cacugacuaauaggacucaguacauauagucu

SEQ ID NO: 54651 - RNA, 32 nt, Homo Sapiens
caaaauaaaaacagaaauuaugagauugccuc

SEQ ID NO: 54652 - RNA, 32 nt, Homo Sapiens
ccaugucugaccagaaauucugugcuggaaag

SEQ ID NO: 54653 - RNA, 32 nt, Homo Sapiens
uuauggucauuaccaaaaacuaaauuaaaggc

SEQ ID NO: 54654 - RNA, 30 nt, Homo Sapiens
aaagugggagguggacauuaagcaucuucu

SEQ ID NO: 54655 - RNA, 32 nt, Homo Sapiens
auuaaugaauguuuacuagauuuuauguugca

SEQ ID NO: 54656 - RNA, 32 nt, Homo Sapiens
auaagcaaggauuguuucccguaugauuaaga

SEQ ID NO: 54657 - RNA, 32 nt, Homo Sapiens
ccaagcugguggccaugcuucagacacgagac

SEQ ID NO: 54658 - RNA, 32 nt, Homo Sapiens
cccaggaggggaccagaggggaugcugugucg

SEQ ID NO: 54659 - RNA, 32 nt, Homo Sapiens
cauuaaaaggaaacagaaaaagagaaaaaaaa

SEQ ID NO: 54660 - RNA, 32 nt, Homo Sapiens
cucacucccacccccacccccacccccaggag

SEQ ID NO: 54661 - RNA, 32 nt, Homo Sapiens
ccggcagcacccgcacccucggcggccgcagc

SEQ ID NO: 54662 - RNA, 32 nt, Homo Sapiens
agauuugucucagcaucagaucuuggcuaaua

SEQ ID NO: 54663 - RNA, 32 nt, Homo Sapiens
gaagcagccgggggcgcugacucccgcuagug

SEQ ID NO: 54664 - RNA, 32 nt, Homo Sapiens
agaauggaguuaacauuuaagcauuuucagaa

SEQ ID NO: 54665 - RNA, 32 nt, Homo Sapiens
guaacaaccaagcaaacuuauaauagcauuuu

SEQ ID NO: 54666 - RNA, 32 nt, Homo Sapiens
uaggauuuucuuuucuaucuccaucuccucau

SEQ ID NO: 54667 - RNA, 32 nt, Homo Sapiens
uuguuaugagagauaacauguugaaagguaag

SEQ ID NO: 54668 - RNA, 32 nt, Homo Sapiens
ugaaacugagaaauguucagaauguacggaaa

SEQ ID NO: 54669 - RNA, 32 nt, Homo Sapiens
agaaccaggggccugaggaucuguggacaaga

SEQ ID NO: 54670 - RNA, 32 nt, Homo Sapiens
gcagcggaugcgggaagccggacucugggcgu

SEQ ID NO: 54671 - RNA, 32 nt, Homo Sapiens
ugucagcauuuucuuucguucucaggcuaaau

SEQ ID NO: 54672 - RNA, 32 nt, Homo Sapiens
uccguugcaagaaaucaacaaacaagcuacuu

SEQ ID NO: 54673 - RNA, 32 nt, Homo Sapiens
ccagaaaccccucccuuccccacauggaggcc

SEQ ID NO: 54674 - RNA, 32 nt, Homo Sapiens
gguucgggcuggcgugcagcucucccagccag

SEQ ID NO: 54675 - RNA, 32 nt, Homo Sapiens
gaacaggaccguaggaugauguuuccuccacc

SEQ ID NO: 54676 - RNA, 32 nt, Homo Sapiens
acccaggaguccaggcccccagccccuccucc

SEQ ID NO: 54677 - RNA, 32 nt, Homo Sapiens
gauaggggcauaacaagaagaaagcuucgguu

SEQ ID NO: 54678 - RNA, 32 nt, Homo Sapiens
ucaaaccaaggaucuuuccacaaaaucccuga

SEQ ID NO: 54679 - RNA, 32 nt, Homo Sapiens
uucagcaaggaccagguguaccuggacggcau

SEQ ID NO: 54680 - RNA, 32 nt, Homo Sapiens
gguggcugacuucuuuaagcaccuuucuaaau

SEQ ID NO: 54681 - RNA, 32 nt, Homo Sapiens
accccgccuagcauagauuugcaguuacggcc

SEQ ID NO: 54682 - RNA, 32 nt, Homo Sapiens
ggcuccuugacaagugguugcugcucauaaau

SEQ ID NO: 54683 - RNA, 32 nt, Homo Sapiens
acuucauuguaccccaugaccugagguaaaga

SEQ ID NO: 54684 - RNA, 32 nt, Homo Sapiens
gccuucaugcccccugaccccagcccgacccu

SEQ ID NO: 54685 - RNA, 32 nt, Homo Sapiens
uccguauguuuuaggcccaugaccuucgugag

SEQ ID NO: 54686 - RNA, 32 nt, Homo Sapiens
uuggagugugaggaagaggcugucugugucau

SEQ ID NO: 54687 - RNA, 32 nt, Homo Sapiens
cucucuuccagaacuguggauuccugggagcu

SEQ ID NO: 54688 - RNA, 32 nt, Homo Sapiens
cuaccucagggaggauucuguuuugggaaaag

SEQ ID NO: 54689 - RNA, 32 nt, Homo Sapiens
uugggaauuuuucaggccuuuggauguauaca

SEQ ID NO: 54690 - RNA, 32 nt, Homo Sapiens
aguguccuuagugaaauuguauugguuuggaa

SEQ ID NO: 54691 - RNA, 32 nt, Homo Sapiens
gaggucugugucacgggccauggccacucaua

SEQ ID NO: 54692 - RNA, 32 nt, Homo Sapiens
cucuaugucuaagucaccaacucauuguguuu

SEQ ID NO: 54693 - RNA, 32 nt, Homo Sapiens
uggccucccgcucccuguggccccacagcccc

SEQ ID NO: 54694 - RNA, 32 nt, Homo Sapiens
gcgcaggcggguggggggcgccgcccuugucg

SEQ ID NO: 54695 - RNA, 32 nt, Homo Sapiens
ggggagaaccagccccucccccugccccaccu

SEQ ID NO: 54696 - RNA, 32 nt, Homo Sapiens
ugugaauuuuuagccagccuuuggaaaagaug

SEQ ID NO: 54697 - RNA, 32 nt, Homo Sapiens
acucugccuuggagagguagaugauaagaaau

SEQ ID NO: 54698 - RNA, 32 nt, Homo Sapiens
gccugacuaaaccuggagacucggguggccga

SEQ ID NO: 54699 - RNA, 32 nt, Homo Sapiens
ccugcauguacaauaacugcugccuggcaaac

SEQ ID NO: 54700 - RNA, 32 nt, Homo Sapiens
cuaauuuuuaguagcuuauuguuccauccagu

SEQ ID NO: 54701 - RNA, 32 nt, Homo Sapiens
gccaaucagagaucucuauauuaaauucuaaa

SEQ ID NO: 54702 - RNA, 32 nt, Homo Sapiens
cugcugugcgucgagcugaguccucgccaacg

SEQ ID NO: 54703 - RNA, 32 nt, Homo Sapiens
ccugaaaugcugucauaaguacugggggggug

SEQ ID NO: 54704 - RNA, 32 nt, Homo Sapiens
caugugaaggauaaauaaaaauuugauaguua

SEQ ID NO: 54705 - RNA, 32 nt, Homo Sapiens
cucuaacaagaggcccuuugaacugccuugug

SEQ ID NO: 54706 - RNA, 32 nt, Homo Sapiens
uguccuccacuuugaggcucuggucaggcguu

SEQ ID NO: 54707 - RNA, 28 nt, Homo Sapiens
cggacggggcggcugaccgggcagaggg

SEQ ID NO: 54708 - RNA, 25 nt, Homo Sapiens
auggcggcggggguggcagcguggc

SEQ ID NO: 54709 - RNA, 32 nt, Homo Sapiens
ugagguggaggcguuacaacuaccugcucugu

SEQ ID NO: 54710 - RNA, 32 nt, Homo Sapiens
uguaaauagagagaugaugaaaaaagagucua

SEQ ID NO: 54711 - RNA, 32 nt, Homo Sapiens
aaauuuauuuuuaauuuacccuguggaagauu

SEQ ID NO: 54712 - RNA, 31 nt, Homo Sapiens
ugcugcuucgcgagaaagucacauucggacc

SEQ ID NO: 54713 - RNA, 32 nt, Homo Sapiens
agggcuauaugauccagcauuagcuuccuggu

SEQ ID NO: 54714 - RNA, 32 nt, Homo Sapiens
aggcgcgaggagccgggcgccaccgccgccgc

SEQ ID NO: 54715 - RNA, 32 nt, Homo Sapiens
uaccuacauacaauuccaaacacauacaggaa

SEQ ID NO: 54716 - RNA, 32 nt, Homo Sapiens
ucaaucccaucccagaucugcugaaucagaaa

SEQ ID NO: 54717 - RNA, 32 nt, Homo Sapiens
acuucaggccucaggagucaggagagggccac

SEQ ID NO: 54718 - RNA, 32 nt, Homo Sapiens
cuuugaaugcaaaagaaauuuagagucaauuu

SEQ ID NO: 54719 - RNA, 32 nt, Homo Sapiens
caggcaucucaccucccuacaagccccccaau

SEQ ID NO: 54720 - RNA, 32 nt, Homo Sapiens
ggaaauaaaugaauggcucagaagaccacacu

SEQ ID NO: 54721 - RNA, 32 nt, Homo Sapiens
gacauccaggagacagagccccugccccaugg

SEQ ID NO: 54722 - RNA, 32 nt, Homo Sapiens
guuuagacagaggcuaaaucugcacacuagaa

SEQ ID NO: 54723 - RNA, 32 nt, Homo Sapiens
gcaggcacccucauuuauagaugucaggaaac

SEQ ID NO: 54724 - RNA, 32 nt, Homo Sapiens
uuuccauugcugcuuauaugcaguguuagccg

SEQ ID NO: 54725 - RNA, 32 nt, Homo Sapiens
aucuugaaagacaaaacuuaaaagagguggcg

SEQ ID NO: 54726 - RNA, 32 nt, Homo Sapiens
ggcaccgagaaguuaaggaacuugcucaaggu

SEQ ID NO: 54727 - RNA, 31 nt, Homo Sapiens
ccgcugcagcgcagaggagcuggacuauuac

SEQ ID NO: 54728 - RNA, 32 nt, Homo Sapiens
ggcuguuucauagcccucuguaccacaucccc

SEQ ID NO: 54729 - RNA, 32 nt, Homo Sapiens
aaggaauguacuuuuguggccuugguguccga

SEQ ID NO: 54730 - RNA, 32 nt, Homo Sapiens
cccugcacaaaguggauaucagacuuaauacu

SEQ ID NO: 54731 - RNA, 32 nt, Homo Sapiens
aguacaugaccugcauuccacaucucagucua

SEQ ID NO: 54732 - RNA, 32 nt, Homo Sapiens
aaauuccauaugcuccaggaucuuugacugaa

SEQ ID NO: 54733 - RNA, 32 nt, Homo Sapiens
gggcgcugggcagucgggaggcgaaggcagga

SEQ ID NO: 54734 - RNA, 32 nt, Homo Sapiens
gggaagagcggcagccugaggaccuagggcca

SEQ ID NO: 54735 - RNA, 32 nt, Homo Sapiens
auacuguuuuaaaaagcagacaucucacugug

SEQ ID NO: 54736 - RNA, 32 nt, Homo Sapiens
ugacauccuggccaccucacgcauuugaucac

SEQ ID NO: 54737 - RNA, 32 nt, Homo Sapiens
gcaaaggaccuggcguggccacuuccuccugc

SEQ ID NO: 54738 - RNA, 32 nt, Homo Sapiens
aggguucccucuggggucucuggcacaacccc

SEQ ID NO: 54739 - RNA, 32 nt, Homo Sapiens
ucuucauuuguaugaaugguuuguauuguaca

SEQ ID NO: 54740 - RNA, 32 nt, Homo Sapiens
guccugaaaggucugggucugguucuguugga

SEQ ID NO: 54741 - RNA, 32 nt, Homo Sapiens
agcccccgacgcgcccuguggggacccggacc

SEQ ID NO: 54742 - RNA, 32 nt, Homo Sapiens
auuugaaaguguuuuucuuuaaucaaaagucc

SEQ ID NO: 54743 - RNA, 32 nt, Homo Sapiens
cagcuccggccgccaggcugcggcgacaccua

SEQ ID NO: 54744 - RNA, 32 nt, Homo Sapiens
ugggaucaauuuccaaaugcuuuacuuuuuua

SEQ ID NO: 54745 - RNA, 32 nt, Homo Sapiens
agaauggugcugaugguaaaguuugagacuuu

SEQ ID NO: 54746 - RNA, 27 nt, Homo Sapiens
ccauaucuguucuucagcucuguggua

SEQ ID NO: 54747 - RNA, 32 nt, Homo Sapiens
gggucaauuacagauagcuauaauaaagauuu

SEQ ID NO: 54748 - RNA, 32 nt, Homo Sapiens
uucaucuucccucucugggucuccagaaaagg

SEQ ID NO: 54749 - RNA, 32 nt, Homo Sapiens
augaguguaucaagaguuauaauuacauuuca

SEQ ID NO: 54750 - RNA, 32 nt, Homo Sapiens
gaccagugaacauuuuggauguuuccguguuc

SEQ ID NO: 54751 - RNA, 28 nt, Homo Sapiens
uguuguauuauauauauguguauacuga

SEQ ID NO: 54752 - RNA, 32 nt, Homo Sapiens
ggcacauguucccuccugcuccccgccacaca

SEQ ID NO: 54753 - RNA, 32 nt, Homo Sapiens
ccuccccuccccggcccucccacagcugcugc

SEQ ID NO: 54754 - RNA, 32 nt, Homo Sapiens
gacgcuggaggcccggcccgccucagccgcau

SEQ ID NO: 54755 - RNA, 32 nt, Homo Sapiens
gggacuacauaacaggcaccuuugagagagca

SEQ ID NO: 54756 - RNA, 32 nt, Homo Sapiens
auguuuuccacuuuugcauuccuaggcugccc

SEQ ID NO: 54757 - RNA, 32 nt, Homo Sapiens
gaccuacucacagauaggaauugaagccacca

SEQ ID NO: 54758 - RNA, 32 nt, Homo Sapiens
gguuggguguaccccauggcugccucugaagg

SEQ ID NO: 54759 - RNA, 32 nt, Homo Sapiens
aucauggugauuaugaugguuaaagccuuuac

SEQ ID NO: 54760 - RNA, 32 nt, Homo Sapiens
agggacaaggccagcacacggugccucaacca

SEQ ID NO: 54761 - RNA, 32 nt, Homo Sapiens
uggaccccagcucuccucccccuuucucucua

SEQ ID NO: 54762 - RNA, 32 nt, Homo Sapiens
cauuauguacuuuauucagaauguagaagcug

SEQ ID NO: 54763 - RNA, 32 nt, Homo Sapiens
uguucauuugacaugagaccccugaggcaacu

SEQ ID NO: 54764 - RNA, 32 nt, Homo Sapiens
acaauuuaugcacagguacuaguuuuauugua

SEQ ID NO: 54765 - RNA, 32 nt, Homo Sapiens
ucccacuagacaaguccagccuggcaaggguu

SEQ ID NO: 54766 - RNA, 32 nt, Homo Sapiens
acuuuucccuuccagacuuugagugucuuccc

SEQ ID NO: 54767 - RNA, 32 nt, Homo Sapiens
uuauuccuuucugcuuagugaaugaauacugg

SEQ ID NO: 54768 - RNA, 32 nt, Homo Sapiens
acaauaaaggauugcugaaagcugaaauuuga

SEQ ID NO: 54769 - RNA, 32 nt, Homo Sapiens
gcagggagcaggcagagcugcagucagagaca

SEQ ID NO: 54770 - RNA, 32 nt, Homo Sapiens
ucaucccaaggccgacaagccagcuguacagg

SEQ ID NO: 54771 - RNA, 32 nt, Homo Sapiens
gggcagguggcaguuucuuuuucagccucaga

SEQ ID NO: 54772 - RNA, 32 nt, Homo Sapiens
aaacgggaguuugcccaguuguccuugcggag

SEQ ID NO: 54773 - RNA, 32 nt, Homo Sapiens
cccaugacuauguuuucuuaacuuugcauuga

SEQ ID NO: 54774 - RNA, 32 nt, Homo Sapiens
uugaaacuugcauuuuaaguguuuaaaagcaa

SEQ ID NO: 54775 - RNA, 32 nt, Homo Sapiens
aggggagaggggggcgggcgacggagcuggaa

SEQ ID NO: 54776 - RNA, 32 nt, Homo Sapiens
agugauuguucuacuauuacaguguaaauaua

SEQ ID NO: 54777 - RNA, 32 nt, Homo Sapiens
guugaaagguccaguucucaguaccaugugag

SEQ ID NO: 54778 - RNA, 32 nt, Homo Sapiens
gucuacccacagaggcugaacuuuguaaacaa

SEQ ID NO: 54779 - RNA, 32 nt, Homo Sapiens
auuuuuauuucuuuuucuuuuguuuucuggau

SEQ ID NO: 54780 - RNA, 32 nt, Homo Sapiens
ccucugucuccaucagugccagccugaucgcg

SEQ ID NO: 54781 - RNA, 32 nt, Homo Sapiens
uggccgcagugaggcauguaucuguaguuccu

SEQ ID NO: 54782 - RNA, 32 nt, Homo Sapiens
uacaccgcaaaguaaacuuugcuggcucugcg

SEQ ID NO: 54783 - RNA, 32 nt, Homo Sapiens
acagaaugaaggcggggagcgcggccggcggc

SEQ ID NO: 54784 - RNA, 32 nt, Homo Sapiens
ccugccacccagggucggggccccgcaccauc

SEQ ID NO: 54785 - RNA, 32 nt, Homo Sapiens
ggagugugagcgugccgucaucgacuuugugg

SEQ ID NO: 54786 - RNA, 32 nt, Homo Sapiens
ccuggggccccggucaguccccagcagccuug

SEQ ID NO: 54787 - RNA, 32 nt, Homo Sapiens
uugggccagacgcgucaccucccaagcucugc

SEQ ID NO: 54788 - RNA, 32 nt, Homo Sapiens
cggagucugauacguggacuuuaagaucagac

SEQ ID NO: 54789 - RNA, 32 nt, Homo Sapiens
ccauuaaagcaucuggcucguuuuuggaaaaa

SEQ ID NO: 54790 - RNA, 32 nt, Homo Sapiens
uggcuauuaucuauuucaucaguuauugaauu

SEQ ID NO: 54791 - RNA, 32 nt, Homo Sapiens
gggcgcccggcggcccgcccggcucccacaaa

SEQ ID NO: 54792 - RNA, 32 nt, Homo Sapiens
caaauguguauguaaaaauacuuuuuaccagu

SEQ ID NO: 54793 - RNA, 32 nt, Homo Sapiens
ccacugugcugccuuagauuccgugggucaug

SEQ ID NO: 54794 - RNA, 32 nt, Homo Sapiens
ggucauuuuucugcagggguggagccaaccaa

SEQ ID NO: 54795 - RNA, 32 nt, Homo Sapiens
ugcagcuuauuguagaccauuacuacuaagga

SEQ ID NO: 54796 - RNA, 32 nt, Homo Sapiens
ugccuuggccccagccucugcuucccuccucu

SEQ ID NO: 54797 - RNA, 32 nt, Homo Sapiens
auacaagaaaaguuuuugggauauaauuugaa

SEQ ID NO: 54798 - RNA, 32 nt, Homo Sapiens
cccacuaggcggggcggggguugggacccagc

SEQ ID NO: 54799 - RNA, 32 nt, Homo Sapiens
ccugggcagggagagggccaaggacaauuggg

SEQ ID NO: 54800 - RNA, 32 nt, Homo Sapiens
caagccccauucuagucaugugccccuuuccu

SEQ ID NO: 54801 - RNA, 32 nt, Homo Sapiens
caaauccuuuugcucagauucucuuugcccac

SEQ ID NO: 54802 - RNA, 32 nt, Homo Sapiens
ugggccccuucccagacaccggauccaugggc

SEQ ID NO: 54803 - RNA, 32 nt, Homo Sapiens
cgccgccggccacagcccgggagcccgcucug

SEQ ID NO: 54804 - RNA, 32 nt, Homo Sapiens
ccagccucagauauuucuaugcaguaacacaa

SEQ ID NO: 54805 - RNA, 32 nt, Homo Sapiens
accucguaucccgcguccccgccgcgcuggau

SEQ ID NO: 54806 - RNA, 32 nt, Homo Sapiens
auucaacagcagcagucacuucccuccacucc

SEQ ID NO: 54807 - RNA, 32 nt, Homo Sapiens
ggcaggcccugguggcagcugggcugguuagc

SEQ ID NO: 54808 - RNA, 32 nt, Homo Sapiens
cucccagccgcagcaccaagggcuugcugccu

SEQ ID NO: 54809 - RNA, 32 nt, Homo Sapiens
uugcccugguuacauuccauuauugcuuauua

SEQ ID NO: 54810 - RNA, 32 nt, Homo Sapiens
cccugcuccucgccggcccccauccccaaggg

SEQ ID NO: 54811 - RNA, 32 nt, Homo Sapiens
aaaaaaaaaaggaaacaaaaacacaauagaag

SEQ ID NO: 54812 - RNA, 32 nt, Homo Sapiens
cuauguagcaacacauuuacaaaacuacugca

SEQ ID NO: 54813 - RNA, 32 nt, Homo Sapiens
cccgaacgcucugcaccuucugacgcagccug

SEQ ID NO: 54814 - RNA, 32 nt, Homo Sapiens
aguaacauguuucauggggacccacuguacag

SEQ ID NO: 54815 - RNA, 32 nt, Homo Sapiens
caugaagacagaggagaaaugaaugcauaaaa

SEQ ID NO: 54816 - RNA, 32 nt, Homo Sapiens
ucuucaaauuuuggacccaugagggaggaaau

SEQ ID NO: 54817 - RNA, 32 nt, Homo Sapiens
ccuucaguggguagaaugggcccagggcccag

SEQ ID NO: 54818 - RNA, 32 nt, Homo Sapiens
gaugcuaccucuccucccgucccucuccaggg

SEQ ID NO: 54819 - RNA, 32 nt, Homo Sapiens
uggaauuagaauucuuguucugaugcugaacu

SEQ ID NO: 54820 - RNA, 32 nt, Homo Sapiens
ggccugccacccagccccuccagugcccucuc

SEQ ID NO: 54821 - RNA, 32 nt, Homo Sapiens
uagcucgcauugcgcucccgccggcgaguucu

SEQ ID NO: 54822 - RNA, 32 nt, Homo Sapiens
cacaaaauauaaagagcaguaaacuugucuga

SEQ ID NO: 54823 - RNA, 32 nt, Homo Sapiens
gccccaggaaaugcacggaauccugggggcau

SEQ ID NO: 54824 - RNA, 32 nt, Homo Sapiens
uaccugagugcacuuuuucaguuaguccuaac

SEQ ID NO: 54825 - RNA, 32 nt, Homo Sapiens
augcagauaaccuggaguggacuucacugugg

SEQ ID NO: 54826 - RNA, 32 nt, Homo Sapiens
aaaaucaaaaggagaauaauauuuuauagcau

SEQ ID NO: 54827 - RNA, 32 nt, Homo Sapiens
uuguguuccccgcuccucccugaccuuccucc

SEQ ID NO: 54828 - RNA, 32 nt, Homo Sapiens
gccuccgucuuuguaucccagccccuagccca

SEQ ID NO: 54829 - RNA, 32 nt, Homo Sapiens
cccugugcggccagcgucagagccauggcgau

SEQ ID NO: 54830 - RNA, 32 nt, Homo Sapiens
guguuagccaggauggucucuaucuccugacc

SEQ ID NO: 54831 - RNA, 32 nt, Homo Sapiens
uaaauaaacaaaucguaucaguguuugugaau

SEQ ID NO: 54832 - RNA, 32 nt, Homo Sapiens
agaaguggcuuacuguagaagcagcuugcuga

SEQ ID NO: 54833 - RNA, 32 nt, Homo Sapiens
cgucuauucugcccacaccccagcccaaccug

SEQ ID NO: 54834 - RNA, 32 nt, Homo Sapiens
cccaccugcccggugcccgaggaggcagccaa

SEQ ID NO: 54835 - RNA, 32 nt, Homo Sapiens
cauuuugcauguuuuacuuuuaucuaaaguuu

SEQ ID NO: 54836 - RNA, 32 nt, Homo Sapiens
cacuagcugucccaagcuuacauacagaggcc

SEQ ID NO: 54837 - RNA, 32 nt, Homo Sapiens
cgccuuugucccauucugccccuggacauguu

SEQ ID NO: 54838 - RNA, 31 nt, Homo Sapiens
ugaguaaauccccagaaacaggaaggucucc

SEQ ID NO: 54839 - RNA, 32 nt, Homo Sapiens
caaaacugacuucaggcaucauauuauuuuaa

SEQ ID NO: 54840 - RNA, 30 nt, Homo Sapiens
uccaugucagccuuggcagaagccucuuuc

SEQ ID NO: 54841 - RNA, 32 nt, Homo Sapiens
ucuugcuuccggaagcuugcgaaacugcaagu

SEQ ID NO: 54842 - RNA, 32 nt, Homo Sapiens
cuggcaagcagcgcagacgugcugagcaccgu

SEQ ID NO: 54843 - RNA, 32 nt, Homo Sapiens
aaugccuccaugggaagaacuacugucgacag

SEQ ID NO: 54844 - RNA, 32 nt, Homo Sapiens
gguccaucuaaugauguaacuucuuucaguua

SEQ ID NO: 54845 - RNA, 32 nt, Homo Sapiens
uugcuuugcugucugugugcugaagcucgucc

SEQ ID NO: 54846 - RNA, 32 nt, Homo Sapiens
ccuccugucauuuuuaucuacucucguagcuu

SEQ ID NO: 54847 - RNA, 32 nt, Homo Sapiens
uagcauaaacacaucacagaugaauauaaaac

SEQ ID NO: 54848 - RNA, 32 nt, Homo Sapiens
ccuguguuuuuuccuuuuaacaaucaguuuga

SEQ ID NO: 54849 - RNA, 30 nt, Homo Sapiens
cugucugucuguguuaguagaaaaauaaaa

SEQ ID NO: 54850 - RNA, 32 nt, Homo Sapiens
cccaaaagccauguccauccagcccuuccccc

SEQ ID NO: 54851 - RNA, 32 nt, Homo Sapiens
uagcuguagauaucaggugcuucugaugaagu

SEQ ID NO: 54852 - RNA, 32 nt, Homo Sapiens
ugaagcaacucccagcaauguuuuccacgaga

SEQ ID NO: 54853 - RNA, 32 nt, Homo Sapiens
ucacagucuuucucagaacucugcgaucccca

SEQ ID NO: 54854 - RNA, 32 nt, Homo Sapiens
gaugguuuuuucugccuuaaaccgugugugug

SEQ ID NO: 54855 - RNA, 32 nt, Homo Sapiens
acaguccggaagagaugauagaugcauagaca

SEQ ID NO: 54856 - RNA, 32 nt, Homo Sapiens
caggcugccguggugucauuucugucauccgu

SEQ ID NO: 54857 - RNA, 32 nt, Homo Sapiens
uuuuuuccaaaauacacacagguugauuugcu

SEQ ID NO: 54858 - RNA, 32 nt, Homo Sapiens
caggggggccccaggccgaagccugguccucu

SEQ ID NO: 54859 - RNA, 32 nt, Homo Sapiens
gucagauacuacaaauaauuuucuuaaaaguc

SEQ ID NO: 54860 - RNA, 32 nt, Homo Sapiens
cauggcgccugcuggaggaggagagagcucug

SEQ ID NO: 54861 - RNA, 32 nt, Homo Sapiens
agccccagucauccugcccagcccugccuccu

SEQ ID NO: 54862 - RNA, 32 nt, Homo Sapiens
aagacaaaaugaauuucugaccuuaccauaua

SEQ ID NO: 54863 - RNA, 32 nt, Homo Sapiens
gccugggugccggcuccugcaggcugggaucu

SEQ ID NO: 54864 - RNA, 32 nt, Homo Sapiens
cuguguaaugugucuagaguaagcaaauacug

SEQ ID NO: 54865 - RNA, 32 nt, Homo Sapiens
acucggucggcgacgguagaacgggcgacggc

SEQ ID NO: 54866 - RNA, 32 nt, Homo Sapiens
ccgggugguuuggggguguugguguuuccucc

SEQ ID NO: 54867 - RNA, 32 nt, Homo Sapiens
uucuguuguugugauaaauaugagcaaaugaa

SEQ ID NO: 54868 - RNA, 32 nt, Homo Sapiens
ggaagaaagcuacaugaauuaauuguacucua

SEQ ID NO: 54869 - RNA, 32 nt, Homo Sapiens
cccuccgcgcgcgcccucccccgagugcggag

SEQ ID NO: 54870 - RNA, 32 nt, Homo Sapiens
gaguagauaggccucuggaauaagguagcaga

SEQ ID NO: 54871 - RNA, 32 nt, Homo Sapiens
aggagaaggcaugcccugaggauucagccucu

SEQ ID NO: 54872 - RNA, 32 nt, Homo Sapiens
ucuugugcuuggauuuuccagauuaauuugaa

SEQ ID NO: 54873 - RNA, 32 nt, Homo Sapiens
cucagaaagguuuuacaauccaaacauuauau

SEQ ID NO: 54874 - RNA, 30 nt, Homo Sapiens
agcgugccaaccccuuuugccucuggguuu

SEQ ID NO: 54875 - RNA, 32 nt, Homo Sapiens
uacacauacaugcacauagacacacacaugaa

SEQ ID NO: 54876 - RNA, 32 nt, Homo Sapiens
gccccugaggucaucaccaccaucacccagca

SEQ ID NO: 54877 - RNA, 32 nt, Homo Sapiens
ucaggugaugcagaacucugguaaaggauguu

SEQ ID NO: 54878 - RNA, 32 nt, Homo Sapiens
gcugccuuuucuguguaccucuuuuaauaagu

SEQ ID NO: 54879 - RNA, 32 nt, Homo Sapiens
uucucaguucuuucuuuuuguuguuguuaauu

SEQ ID NO: 54880 - RNA, 32 nt, Homo Sapiens
gaggcagugcacgcucagacgccccgcuccuc

SEQ ID NO: 54881 - RNA, 32 nt, Homo Sapiens
gacaggugagcgacgaacuucugagacaggug

SEQ ID NO: 54882 - RNA, 32 nt, Homo Sapiens
aacaauggacaaagucagauuaugucagggac

SEQ ID NO: 54883 - RNA, 32 nt, Homo Sapiens
aguugcuccuuugcaguuuccacaccauggcu

SEQ ID NO: 54884 - RNA, 32 nt, Homo Sapiens
cucguauuuauaaucuuaauuuauauagugac

SEQ ID NO: 54885 - RNA, 32 nt, Homo Sapiens
augguauuugaaauaaauuaaagggauaacgu

SEQ ID NO: 54886 - RNA, 32 nt, Homo Sapiens
cccagccccuaggcagaacccaggcgccgcgc

SEQ ID NO: 54887 - RNA, 32 nt, Homo Sapiens
cgcagauaauuaauggacaacuguagugcagu

SEQ ID NO: 54888 - RNA, 32 nt, Homo Sapiens
ccugcccuggccccggccccuccugccagcug

SEQ ID NO: 54889 - RNA, 32 nt, Homo Sapiens
aaguucugcaacccacccacucccccagcaaa

SEQ ID NO: 54890 - RNA, 32 nt, Homo Sapiens
cacaaaagcugauagaguacaaucccacuuuu

SEQ ID NO: 54891 - RNA, 32 nt, Homo Sapiens
uauuuuaaaggcgagaagacgaggggaacaaa

SEQ ID NO: 54892 - RNA, 32 nt, Homo Sapiens
gagggugauccaggcgcuggagggauggccua

SEQ ID NO: 54893 - RNA, 32 nt, Homo Sapiens
gcaccacuugaacacgagaccuggaaagucau

SEQ ID NO: 54894 - RNA, 32 nt, Homo Sapiens
ccauguugaaaauggaggauggcugcugacuu

SEQ ID NO: 54895 - RNA, 32 nt, Homo Sapiens
gcuuauuuuuauuguguaaugaucuuuaaacg

SEQ ID NO: 54896 - RNA, 32 nt, Homo Sapiens
uaguuuauauugcuuuaccugugcuggcuucc

SEQ ID NO: 54897 - RNA, 32 nt, Homo Sapiens
cuccguccagguuccaggccccgccccccagc

SEQ ID NO: 54898 - RNA, 32 nt, Homo Sapiens
auuuugccagaggcugccucccggaguugggg

SEQ ID NO: 54899 - RNA, 32 nt, Homo Sapiens
gcucguuuaagugaccugacgcuagaggggga

SEQ ID NO: 54900 - RNA, 32 nt, Homo Sapiens
cucuuuuguggcugguuauuccaguucccugg

SEQ ID NO: 54901 - RNA, 32 nt, Homo Sapiens
uguuugcuuuggaguuugggauggguuugagc

SEQ ID NO: 54902 - RNA, 32 nt, Homo Sapiens
ccaaaaauuucuaccacuuuuuacuagauuuu

SEQ ID NO: 54903 - RNA, 32 nt, Homo Sapiens
agccugccccgcucagccgccagagaagaugc

SEQ ID NO: 54904 - RNA, 32 nt, Homo Sapiens
uggcauugguaaugaaagguugguuuuugaaa

SEQ ID NO: 54905 - RNA, 32 nt, Homo Sapiens
uggaaauguaaauuaaauuaguucagccauug

SEQ ID NO: 54906 - RNA, 32 nt, Homo Sapiens
gaguuucgcucuuguugcccaggcuggagugc

SEQ ID NO: 54907 - RNA, 32 nt, Homo Sapiens
ugaagggcuuucacuauaucuacuugaugaug

SEQ ID NO: 54908 - RNA, 30 nt, Homo Sapiens
uggauugucuguggcaaugcagaagcugau

SEQ ID NO: 54909 - RNA, 32 nt, Homo Sapiens
agaugaauccuccuauauaaauguagauuuau

SEQ ID NO: 54910 - RNA, 32 nt, Homo Sapiens
augccaugucauuuaaaguauuucauagauaa

SEQ ID NO: 54911 - RNA, 32 nt, Homo Sapiens
uacuuuuuacuuucauguacauugaaggcaau

SEQ ID NO: 54912 - RNA, 32 nt, Homo Sapiens
aguucucuuccucuuguccccccguugcugcu

SEQ ID NO: 54913 - RNA, 32 nt, Homo Sapiens
uaguaaugaugaugacauuaugaauuugggug

SEQ ID NO: 54914 - RNA, 32 nt, Homo Sapiens
auaaagcagacgccgcgccgcgcugcgacgcu

SEQ ID NO: 54915 - RNA, 32 nt, Homo Sapiens
auuuuaucagaaaauagaaauuuuaccugccc

SEQ ID NO: 54916 - RNA, 32 nt, Homo Sapiens
aggccaagacugugucagcugcugcagcugag

SEQ ID NO: 54917 - RNA, 32 nt, Homo Sapiens
auucgcuggaacggaggcugcccucugcugcc

SEQ ID NO: 54918 - RNA, 31 nt, Homo Sapiens
uugucucuugguaugaguggaauggaauaaa

SEQ ID NO: 54919 - RNA, 32 nt, Homo Sapiens
acaaaauuauagugggauaauuuuacaucuua

SEQ ID NO: 54920 - RNA, 29 nt, Homo Sapiens
agccuucuugagguuuauuuucuagguug

SEQ ID NO: 54921 - RNA, 32 nt, Homo Sapiens
aggagaugaucaagcggugcugauucacgaga

SEQ ID NO: 54922 - RNA, 32 nt, Homo Sapiens
ggcaccaccucugcgcacaaccccgcgggccu

SEQ ID NO: 54923 - RNA, 26 nt, Homo Sapiens
uuguagaauuaaauaacccaaucuug

SEQ ID NO: 54924 - RNA, 32 nt, Homo Sapiens
uaaguuuucuauagacucuuuggggcuuucua

SEQ ID NO: 54925 - RNA, 32 nt, Homo Sapiens
aacccccucuucccuuuucucaguccaugagg

SEQ ID NO: 54926 - RNA, 32 nt, Homo Sapiens
gugaagacguauuuuuucuucuucccagcagc

SEQ ID NO: 54927 - RNA, 32 nt, Homo Sapiens
ccagccccgcgcugcgcugcccgguccucucc

SEQ ID NO: 54928 - RNA, 32 nt, Homo Sapiens
gggaaaugaaggucuuuuuuuaaaagcuucuc

SEQ ID NO: 54929 - RNA, 32 nt, Homo Sapiens
cacagcgccuucccuucaggaguugcgucucc

SEQ ID NO: 54930 - RNA, 32 nt, Homo Sapiens
gguuuugccguguuggccgggcuggucucgaa

SEQ ID NO: 54931 - RNA, 32 nt, Homo Sapiens
uuaaauacagcuuuuggauuggacaaaaugac

SEQ ID NO: 54932 - RNA, 31 nt, Homo Sapiens
gaaagaaaguggaagcuacagaauuauuuuc

SEQ ID NO: 54933 - RNA, 32 nt, Homo Sapiens
gcgcauacccacccgccgccacggccacaagc

SEQ ID NO: 54934 - RNA, 32 nt, Homo Sapiens
uccugggaaaggaaaggaccacagcaaacacc

SEQ ID NO: 54935 - RNA, 32 nt, Homo Sapiens
cagggaggcuggaagaccuggcuugcaagaug

SEQ ID NO: 54936 - RNA, 32 nt, Homo Sapiens
guccucuugcugucuacaguagcugcuaccua

SEQ ID NO: 54937 - RNA, 32 nt, Homo Sapiens
cuccugcccuccccaggccucuggggcccacu

SEQ ID NO: 54938 - RNA, 32 nt, Homo Sapiens
gcugccagucuaccccaccgggacgucugccc

SEQ ID NO: 54939 - RNA, 32 nt, Homo Sapiens
uuauuguaauauauuuuuuguuuuguaaauau

SEQ ID NO: 54940 - RNA, 32 nt, Homo Sapiens
aucugguacuuuugggugggacaggagacaga

SEQ ID NO: 54941 - RNA, 32 nt, Homo Sapiens
ggcuuggaaaaguuaagaagccccucaggaag

SEQ ID NO: 54942 - RNA, 32 nt, Homo Sapiens
auccccucccggcuuauaggccccacaggugc

SEQ ID NO: 54943 - RNA, 32 nt, Homo Sapiens
agcccuucucccugcaucaguuucuccuucag

SEQ ID NO: 54944 - RNA, 32 nt, Homo Sapiens
cgauuugucugucaagguccuaaaguacugga

SEQ ID NO: 54945 - RNA, 32 nt, Homo Sapiens
uccaugcgcagccuggggcuggcgauuaaagc

SEQ ID NO: 54946 - RNA, 32 nt, Homo Sapiens
gaacccccacuuuuacguugugucccuccgcc

SEQ ID NO: 54947 - RNA, 32 nt, Homo Sapiens
ucagugagaacaauuuauaugucuuacacuga

SEQ ID NO: 54948 - RNA, 32 nt, Homo Sapiens
agggccgagcgcggaacgcgaggggcugcugg

SEQ ID NO: 54949 - RNA, 32 nt, Homo Sapiens
acaaaucucaaaguguacaaauuuauugaugu

SEQ ID NO: 54950 - RNA, 32 nt, Homo Sapiens
ccccuuugcauccagcucccagcucuucuucc

SEQ ID NO: 54951 - RNA, 32 nt, Homo Sapiens
ggguggaagaucugggggagcuaaauucuggg

SEQ ID NO: 54952 - RNA, 32 nt, Homo Sapiens
ucuuuuuucauauaaauauuuuacagauuaug

SEQ ID NO: 54953 - RNA, 32 nt, Homo Sapiens
cgggcucaggagaggacagggagucguggugg

SEQ ID NO: 54954 - RNA, 32 nt, Homo Sapiens
ucugugaaggagauugguuaguccaaacuugc

SEQ ID NO: 54955 - RNA, 32 nt, Homo Sapiens
cugaggucaggaguuagagaccagccugggcc

SEQ ID NO: 54956 - RNA, 32 nt, Homo Sapiens
auuguggaagaagaaacuuuggcauuauagag

SEQ ID NO: 54957 - RNA, 32 nt, Homo Sapiens
guugaaauguuuugcaucugucaauuaaggaa

SEQ ID NO: 54958 - RNA, 32 nt, Homo Sapiens
aaaaagaugcuguugugccuauaucaugaagu

SEQ ID NO: 54959 - RNA, 32 nt, Homo Sapiens
cuauggcugaaggcggaggugcagggcagcgg

SEQ ID NO: 54960 - RNA, 32 nt, Homo Sapiens
aagaacaagaaccaccuggacuucugugaggg

SEQ ID NO: 54961 - RNA, 32 nt, Homo Sapiens
acaagaccgagacccuggacgaguccgagauc

SEQ ID NO: 54962 - RNA, 32 nt, Homo Sapiens
gccccaccaugcccaacaucgugcuguucagc

SEQ ID NO: 54963 - RNA, 32 nt, Homo Sapiens
gggggugguucccccaugcuguccucaugaua

SEQ ID NO: 54964 - RNA, 32 nt, Homo Sapiens
ggcuuacacccugguccugcaccuuacucagc

SEQ ID NO: 54965 - RNA, 32 nt, Homo Sapiens
acaaauaagucagcugaugacaauggcugaaa

SEQ ID NO: 54966 - RNA, 32 nt, Homo Sapiens
uccgagccucaguuuccucguuugcaaaaugg

SEQ ID NO: 54967 - RNA, 32 nt, Homo Sapiens
uacuuuuugcuuugugauacaucucugcacuu

SEQ ID NO: 54968 - RNA, 32 nt, Homo Sapiens
uuugaagcuuugcaucagguggcaaaauucau

SEQ ID NO: 54969 - RNA, 32 nt, Homo Sapiens
uuauugcagagcugugcugaguguugaagaag

SEQ ID NO: 54970 - RNA, 32 nt, Homo Sapiens
gcaacuuagauauaauauuguaaaugcuuuuc

SEQ ID NO: 54971 - RNA, 32 nt, Homo Sapiens
gcugcuugcccccaugcuggcgccaacaacuu

SEQ ID NO: 54972 - RNA, 32 nt, Homo Sapiens
uauaaaaauuaaaaaacuuauauucuaaugug

SEQ ID NO: 54973 - RNA, 32 nt, Homo Sapiens
ggccgggcgggggagauggcggcgcgauggag

SEQ ID NO: 54974 - RNA, 32 nt, Homo Sapiens
ucucuacuacaacugcaucuccucguuggcga

SEQ ID NO: 54975 - RNA, 32 nt, Homo Sapiens
gccacugcaaucaagcucccaguuguggagca

SEQ ID NO: 54976 - RNA, 32 nt, Homo Sapiens
gggcguagcaucauaguaguuuuuacagcugu

SEQ ID NO: 54977 - RNA, 32 nt, Homo Sapiens
auuuugcugugacaguacacuaaaucaauacu

SEQ ID NO: 54978 - RNA, 32 nt, Homo Sapiens
gcaaaugaauuucuucuaacgccccuuuucag

SEQ ID NO: 54979 - RNA, 30 nt, Homo Sapiens
aaugaggauaaaagggagggacuguagguu

SEQ ID NO: 54980 - RNA, 32 nt, Homo Sapiens
uuaaaauuuaaauuauuuuuuaugugauauca

SEQ ID NO: 54981 - RNA, 32 nt, Homo Sapiens
uaauuaugauucaacuaguuuaauuuucaaua

SEQ ID NO: 54982 - RNA, 32 nt, Homo Sapiens
gcauugccacagccagcgugggcagggccaca

SEQ ID NO: 54983 - RNA, 32 nt, Homo Sapiens
caggagguauuucuuuuuuauguugguccuga

SEQ ID NO: 54984 - RNA, 32 nt, Homo Sapiens
gccagacugcauccgccgcggcgucuccaugg

SEQ ID NO: 54985 - RNA, 32 nt, Homo Sapiens
agaagggggagcucuuuuuuuacguugauuuu

SEQ ID NO: 54986 - RNA, 32 nt, Homo Sapiens
cgccuguaaucccagcacuuugggaagcugag

SEQ ID NO: 54987 - RNA, 32 nt, Homo Sapiens
caccuguaaucccagcacuuugggaggcugag

SEQ ID NO: 54988 - RNA, 32 nt, Homo Sapiens
caccuguaauccuagcacuuugggaggccgag

SEQ ID NO: 54989 - RNA, 32 nt, Homo Sapiens
ugguaagcacaccuaugguuuugguaaaaaca

SEQ ID NO: 54990 - RNA, 32 nt, Homo Sapiens
aaagccguccgcgcuccgcucugaggacuccu

SEQ ID NO: 54991 - RNA, 32 nt, Homo Sapiens
auuauguuuccucuguuuuuuauuuuaucuau

SEQ ID NO: 54992 - RNA, 32 nt, Homo Sapiens
gugaaauaaaacaaaaauauaauggcuagaau

SEQ ID NO: 54993 - RNA, 32 nt, Homo Sapiens
uuuauaacuuuuugaaacaaaauaauguguaa

SEQ ID NO: 54994 - RNA, 32 nt, Homo Sapiens
ccucccucaggcacuccccagcccacaccugc

SEQ ID NO: 54995 - RNA, 32 nt, Homo Sapiens
gcacugugcuggggcgucccaccacuagaaau

SEQ ID NO: 54996 - RNA, 32 nt, Homo Sapiens
aucagcuggguugacuauguggguuagauaga

SEQ ID NO: 54997 - RNA, 32 nt, Homo Sapiens
ccugguggcucugaagggcaucuggagguggc

SEQ ID NO: 54998 - RNA, 32 nt, Homo Sapiens
cuuuauuccuuccuguuucaaucccuguugca

SEQ ID NO: 54999 - RNA, 32 nt, Homo Sapiens
aggagauaaauuuauuuuuaaauuuugaaaca

SEQ ID NO: 55000 - RNA, 32 nt, Homo Sapiens
cccugucccagccuggacgccacgcacugccg

SEQ ID NO: 55001 - RNA, 32 nt, Homo Sapiens
uuggagugagaaaucaaggagacagagcugac

SEQ ID NO: 55002 - RNA, 32 nt, Homo Sapiens
auguuuaaaguguauuauaacagugugauagu

SEQ ID NO: 55003 - RNA, 32 nt, Homo Sapiens
gaggcccaggacaccaagagccagcuguggcc

SEQ ID NO: 55004 - RNA, 32 nt, Homo Sapiens
aguugaaggaaaugcaguguucugagggcccc

SEQ ID NO: 55005 - RNA, 31 nt, Homo Sapiens
gacaaagcaaauugucugguaucaugaauuu

SEQ ID NO: 55006 - RNA, 32 nt, Homo Sapiens
cccuccauuaaucugcuucauuguagggauuu

SEQ ID NO: 55007 - RNA, 32 nt, Homo Sapiens
gacuucauugauuuuuucagagaguagaaaac

SEQ ID NO: 55008 - RNA, 32 nt, Homo Sapiens
auacuuaucuuccgugaauaaacaagugucac

SEQ ID NO: 55009 - RNA, 29 nt, Homo Sapiens
cgcuucauguaaauaaaaacuaaaaauaa

SEQ ID NO: 55010 - RNA, 32 nt, Homo Sapiens
gcaggcgccgggggcucugguucccggaucuc

SEQ ID NO: 55011 - RNA, 32 nt, Homo Sapiens
ggggggcgggguggagaggaggacccccauug

SEQ ID NO: 55012 - RNA, 32 nt, Homo Sapiens
cuaauguauaaugugcagaaaauauuuaauau

SEQ ID NO: 55013 - RNA, 32 nt, Homo Sapiens
agcacaguauagagcacuuaacuauuaaaaaa

SEQ ID NO: 55014 - RNA, 32 nt, Homo Sapiens
uuuuuuaagcuaaugaaacuacagguuugaaa

SEQ ID NO: 55015 - RNA, 32 nt, Homo Sapiens
acacuuuuuuauuucuguauuuuuccacuuca

SEQ ID NO: 55016 - RNA, 28 nt, Homo Sapiens
cuuuuggggcggcccugcccaguccccg

SEQ ID NO: 55017 - RNA, 32 nt, Homo Sapiens
cccaggacgacguguaccuggacaucaccgau

SEQ ID NO: 55018 - RNA, 32 nt, Homo Sapiens
cagcaggugguaaugauaaaauacuaaacuac

SEQ ID NO: 55019 - RNA, 32 nt, Homo Sapiens
aaaagggaauugacaugucacauaucaaauga

SEQ ID NO: 55020 - RNA, 32 nt, Homo Sapiens
cugcguccgggccccgaggcgcagcagggcac

SEQ ID NO: 55021 - RNA, 32 nt, Homo Sapiens
caaaaccuguuuggugacuuguccuuucaaug

SEQ ID NO: 55022 - RNA, 32 nt, Homo Sapiens
aggaaaaucuuauuuuuauaugugucuuuggc

SEQ ID NO: 55023 - RNA, 32 nt, Homo Sapiens
gcagacuggcuuuccugagacuugagguugug

SEQ ID NO: 55024 - RNA, 28 nt, Homo Sapiens
cgcgggaggcggccgcagcaaugccggg

SEQ ID NO: 55025 - RNA, 32 nt, Homo Sapiens
agagaauucaaaagguacaaaggguagccaca

SEQ ID NO: 55026 - RNA, 32 nt, Homo Sapiens
auuauuaguuuaaugugaaacauuaaagcaug

SEQ ID NO: 55027 - RNA, 32 nt, Homo Sapiens
uaacacagaaacgcaauaaacacacacaaaau

SEQ ID NO: 55028 - RNA, 32 nt, Homo Sapiens
auggaggacagaggugacaaacuucaguuuaa

SEQ ID NO: 55029 - RNA, 32 nt, Homo Sapiens
gaagugugaaaauauuguuauguaucauauca

SEQ ID NO: 55030 - RNA, 32 nt, Homo Sapiens
caucugcuuauucuaaugcuagucaccaagag

SEQ ID NO: 55031 - RNA, 32 nt, Homo Sapiens
ugcauguuccgagguagccagucaacagaagg

SEQ ID NO: 55032 - RNA, 32 nt, Homo Sapiens
acacugguguauaugagaaggaaggcgaaagc

SEQ ID NO: 55033 - RNA, 32 nt, Homo Sapiens
agucucaggaggaggcugcccugaggggcugg

SEQ ID NO: 55034 - RNA, 32 nt, Homo Sapiens
ugaggcugauaccccugaccuaucugcagucc

SEQ ID NO: 55035 - RNA, 32 nt, Homo Sapiens
ugaaucagauucaaauaaaccacuuguaaaaa

SEQ ID NO: 55036 - RNA, 30 nt, Homo Sapiens
ccugaagagaagcccuacgaguguaagcaa

SEQ ID NO: 55037 - RNA, 32 nt, Homo Sapiens
agcccaagugacccaaggucuucuugagcuuu

SEQ ID NO: 55038 - RNA, 32 nt, Homo Sapiens
uggaagaggauauauauagcauaguaccauac

SEQ ID NO: 55039 - RNA, 32 nt, Homo Sapiens
uacacuguugcuaguguaaacauuguuacacu

SEQ ID NO: 55040 - RNA, 32 nt, Homo Sapiens
ugcaccauuuuuccauuuggaauauaaaguua

SEQ ID NO: 55041 - RNA, 32 nt, Homo Sapiens
guggggugcaccggcgcguggaugcagggguc

SEQ ID NO: 55042 - RNA, 32 nt, Homo Sapiens
uucgcucuaaacaaaacagugguagguuaaug

SEQ ID NO: 55043 - RNA, 32 nt, Homo Sapiens
agucaccacaggaugccugccauucaugaaca

SEQ ID NO: 55044 - RNA, 32 nt, Homo Sapiens
acacucaaacucccaaagcgcaugauugcugg

SEQ ID NO: 55045 - RNA, 32 nt, Homo Sapiens
guuuucagccugcugcugcugcugcuguugcg

SEQ ID NO: 55046 - RNA, 32 nt, Homo Sapiens
gcgcauuuaggaccaagccccuuaacaacuca

SEQ ID NO: 55047 - RNA, 30 nt, Homo Sapiens
cggagaggcaggcagccagguuacgaagac

SEQ ID NO: 55048 - RNA, 32 nt, Homo Sapiens
aguucuuuguuccugcuuucucuuucaguauu

SEQ ID NO: 55049 - RNA, 32 nt, Homo Sapiens
accggagcgcgauggcgggggcggcgggacuc

SEQ ID NO: 55050 - RNA, 32 nt, Homo Sapiens
aguacaagcucugcccuaggcuuguuacuuua

SEQ ID NO: 55051 - RNA, 32 nt, Homo Sapiens
uguuuuuauuaagauuauuuuauuaugcggaa

SEQ ID NO: 55052 - RNA, 32 nt, Homo Sapiens
gggaagcgccucggugcguugcaccgccggag

SEQ ID NO: 55053 - RNA, 32 nt, Homo Sapiens
cugugaaucuccaggcgacgcgguuuuuucac

SEQ ID NO: 55054 - RNA, 32 nt, Homo Sapiens
gaguagacauagugugugggguuggagcucug

SEQ ID NO: 55055 - RNA, 32 nt, Homo Sapiens
uaaagcuguguaaaggcaaggcucguuucuac

SEQ ID NO: 55056 - RNA, 32 nt, Homo Sapiens
ccccaaagacaucuuuucucccugccccaccu

SEQ ID NO: 55057 - RNA, 32 nt, Homo Sapiens
uccacauugcugucauggcgucaguucaccag

SEQ ID NO: 55058 - RNA, 32 nt, Homo Sapiens
acccaagggacccuggacuuugccagacguca

SEQ ID NO: 55059 - RNA, 32 nt, Homo Sapiens
auagcuaaaauuguauguaaucaauaaaacca

SEQ ID NO: 55060 - RNA, 32 nt, Homo Sapiens
uccaaaguggguuguggaaagagcguccauag

SEQ ID NO: 55061 - RNA, 32 nt, Homo Sapiens
cagggccagagaaagucagaacaaagaaaaug

SEQ ID NO: 55062 - RNA, 32 nt, Homo Sapiens
ggagccauggccagcccuucccgcagcuccga

SEQ ID NO: 55063 - RNA, 32 nt, Homo Sapiens
aggguuuuugagcaaauggacaaauuggaugc

SEQ ID NO: 55064 - RNA, 32 nt, Homo Sapiens
acacugugaacauugcuguuucuagugggcca

SEQ ID NO: 55065 - RNA, 31 nt, Homo Sapiens
uagcagaaauaaaagggaaaaguaugucugc

SEQ ID NO: 55066 - RNA, 32 nt, Homo Sapiens
gcucccaccucccugcugggaaaccacagcau

SEQ ID NO: 55067 - RNA, 32 nt, Homo Sapiens
agggucagugucauucccuucaccuuagccuc

SEQ ID NO: 55068 - RNA, 32 nt, Homo Sapiens
gguaccggguccgagggacucgcgcuuuucuc

SEQ ID NO: 55069 - RNA, 32 nt, Homo Sapiens
aaucucuucuaaacgauggcauucuauguaau

SEQ ID NO: 55070 - RNA, 32 nt, Homo Sapiens
cggcugcuccgagugcggggcccaccaagccc

SEQ ID NO: 55071 - RNA, 30 nt, Homo Sapiens
ggcugcacccccuucaucgcccuggccuac

SEQ ID NO: 55072 - RNA, 32 nt, Homo Sapiens
cccagccccacuucugcuccacuccucccccg

SEQ ID NO: 55073 - RNA, 32 nt, Homo Sapiens
gcucccggcugccgaggcggaaacacagguga

SEQ ID NO: 55074 - RNA, 32 nt, Homo Sapiens
gccgcgaggagcaucagauccaugcugcugcu

SEQ ID NO: 55075 - RNA, 32 nt, Homo Sapiens
uuguaugcuguuaaguuuuucuaucuguguac

SEQ ID NO: 55076 - RNA, 32 nt, Homo Sapiens
gagaccucccuuuccaagccugccugggcggg

SEQ ID NO: 55077 - RNA, 32 nt, Homo Sapiens
ugguuccuucccuuuccucccccucccaugcg

SEQ ID NO: 55078 - RNA, 32 nt, Homo Sapiens
agggauacacucuccagugcauuuucauguuu

SEQ ID NO: 55079 - RNA, 32 nt, Homo Sapiens
ggguggaauaguggaggccuucaacugauuag

SEQ ID NO: 55080 - RNA, 32 nt, Homo Sapiens
auuccaagugaacuuuucuccuccuuuguuaa

SEQ ID NO: 55081 - RNA, 32 nt, Homo Sapiens
aagggaagaaguaucacuucuuucucaagugg

SEQ ID NO: 55082 - RNA, 32 nt, Homo Sapiens
gcugaggccacaggagcuggagggauugcaaa

SEQ ID NO: 55083 - RNA, 32 nt, Homo Sapiens
ggggagucggccgggcugcugcugcugcugcu

SEQ ID NO: 55084 - RNA, 32 nt, Homo Sapiens
ccagagcaaaaauaaaaugucaacuaugguaa

SEQ ID NO: 55085 - RNA, 32 nt, Homo Sapiens
gggccgagcggagggcucucgggugggagagc

SEQ ID NO: 55086 - RNA, 32 nt, Homo Sapiens
ccuuaauuuuauuugcagaggauucuuuucuc

SEQ ID NO: 55087 - RNA, 32 nt, Homo Sapiens
aaacuuccugcccucucuguaccuuccuacug

SEQ ID NO: 55088 - RNA, 32 nt, Homo Sapiens
uauagauauauucuaugagaaauaaucuugcu

SEQ ID NO: 55089 - RNA, 31 nt, Homo Sapiens
accauuaaguauguaaauguauaucacaggu

SEQ ID NO: 55090 - RNA, 32 nt, Homo Sapiens
gaaauaacccacagauggucuagacagcccuc

SEQ ID NO: 55091 - RNA, 32 nt, Homo Sapiens
gucgcccuuguacucgccgaaguggaagacuc

SEQ ID NO: 55092 - RNA, 32 nt, Homo Sapiens
ccagaagacagaggguacaacaguggcaucac

SEQ ID NO: 55093 - RNA, 32 nt, Homo Sapiens
cagggcuggggaggagcggggagggcggaucu

SEQ ID NO: 55094 - RNA, 32 nt, Homo Sapiens
aaauuagagccuucuccaccgccggggaauau

SEQ ID NO: 55095 - RNA, 32 nt, Homo Sapiens
ggagggacuggguuccucucuccccuggcaug

SEQ ID NO: 55096 - RNA, 32 nt, Homo Sapiens
ccccgcccucugcgucccccagcccucaggcc

SEQ ID NO: 55097 - RNA, 27 nt, Homo Sapiens
aaaugucggcccggacgccauugccga

SEQ ID NO: 55098 - RNA, 32 nt, Homo Sapiens
auguccagcuguccacuuuccauccuggagaa

SEQ ID NO: 55099 - RNA, 32 nt, Homo Sapiens
gacaacauggagccuggcuuguugacaggaca

SEQ ID NO: 55100 - RNA, 32 nt, Homo Sapiens
uucuccugaugugcaauaaaucaauaauucac

SEQ ID NO: 55101 - RNA, 32 nt, Homo Sapiens
gagguaggccuccagaggcauccgccuuccca

SEQ ID NO: 55102 - RNA, 32 nt, Homo Sapiens
aaaauauuaaaauaaacagugcugguaaguau

SEQ ID NO: 55103 - RNA, 32 nt, Homo Sapiens
gccaguggaagcugcggcggcggugucucgcg

SEQ ID NO: 55104 - RNA, 32 nt, Homo Sapiens
ugugugacgcagauaacugguuacucagcucc

SEQ ID NO: 55105 - RNA, 32 nt, Homo Sapiens
auuuuuaugauuuggaucuauacaaccuugug

SEQ ID NO: 55106 - RNA, 32 nt, Homo Sapiens
caccuucaccugugcugcacuccagcugaccc

SEQ ID NO: 55107 - RNA, 32 nt, Homo Sapiens
ugggcacccagcugcaggccccugcccuacgu

SEQ ID NO: 55108 - RNA, 32 nt, Homo Sapiens
auuuuacucaaguuuaaauuguauaaaacugc

SEQ ID NO: 55109 - RNA, 32 nt, Homo Sapiens
uuaauagaaagauacaaccuuuuuauuuucac

SEQ ID NO: 55110 - RNA, 32 nt, Homo Sapiens
agugcaagcacuuuuccauuuuacaguauuug

SEQ ID NO: 55111 - RNA, 32 nt, Homo Sapiens
aucugagacaaaauguauacaaauauauuccu

SEQ ID NO: 55112 - RNA, 32 nt, Homo Sapiens
accucgccuuccccggccgcgagcgcgccgcu

SEQ ID NO: 55113 - RNA, 32 nt, Homo Sapiens
aagugaacuuaaaaauucaaucaaaugaacaa

SEQ ID NO: 55114 - RNA, 32 nt, Homo Sapiens
uugaccaaaaugugaacccagaauuaaaagau

SEQ ID NO: 55115 - RNA, 32 nt, Homo Sapiens
ugcagugcagcuuggacaaaacacauuucaag

SEQ ID NO: 55116 - RNA, 32 nt, Homo Sapiens
uguccccugugcugguguggcagugccugugu

SEQ ID NO: 55117 - RNA, 32 nt, Homo Sapiens
aaguuauggaguuaugggucuagacguguuaa

SEQ ID NO: 55118 - RNA, 32 nt, Homo Sapiens
gccaccucugucugguaugaccuggagagggg

SEQ ID NO: 55119 - RNA, 32 nt, Homo Sapiens
guuaccuucuccugggagguccugcugcaacu

SEQ ID NO: 55120 - RNA, 32 nt, Homo Sapiens
cuugucaccugccugcguccugccaggggaga

SEQ ID NO: 55121 - RNA, 32 nt, Homo Sapiens
ucagaauauucuuuuuauauucuguggaaaaa

SEQ ID NO: 55122 - RNA, 32 nt, Homo Sapiens
gacacccugccuuuuuuguuuccgugccccgg

SEQ ID NO: 55123 - RNA, 32 nt, Homo Sapiens
uuccugguccuccauguaggagcaauaacauu

SEQ ID NO: 55124 - RNA, 32 nt, Homo Sapiens
aagacagaccacaaacuaguucuuauagugua

SEQ ID NO: 55125 - RNA, 32 nt, Homo Sapiens
ccaaaagcaaaauuauuuuauguuaaaaugug

SEQ ID NO: 55126 - RNA, 31 nt, Homo Sapiens
uggccaggcccccagaaccuggcuccagcca

SEQ ID NO: 55127 - RNA, 32 nt, Homo Sapiens
uggcuucugugcauccacccaggcccccgacc

SEQ ID NO: 55128 - RNA, 32 nt, Homo Sapiens
acggcugcugcacacuucucggucuagguggg

SEQ ID NO: 55129 - RNA, 32 nt, Homo Sapiens
auuguggagugugauucuuaauucuucauuga

SEQ ID NO: 55130 - RNA, 28 nt, Homo Sapiens
uucaaaguugcuaccaguguaugcagua

SEQ ID NO: 55131 - RNA, 32 nt, Homo Sapiens
auaccccagcagagccacugggcuugaggaca

SEQ ID NO: 55132 - RNA, 32 nt, Homo Sapiens
ucccaaaacugauuacuagaaauauuuaacua

SEQ ID NO: 55133 - RNA, 32 nt, Homo Sapiens
cuagucuaaccauggugcuauuauuaggcuug

SEQ ID NO: 55134 - RNA, 32 nt, Homo Sapiens
uaccuguguauauaguuuuuaccuuuuaugua

SEQ ID NO: 55135 - RNA, 32 nt, Homo Sapiens
ccuucagcgaggaggaggggggcggagcccga

SEQ ID NO: 55136 - RNA, 32 nt, Homo Sapiens
gucggggaguggggcgggggagcgagguggcg

SEQ ID NO: 55137 - RNA, 32 nt, Homo Sapiens
gaccacaggcaugcgccaccacuccuggccaa

SEQ ID NO: 55138 - RNA, 32 nt, Homo Sapiens
ugugcuggguuguccaggguguccucagucuc

SEQ ID NO: 55139 - RNA, 32 nt, Homo Sapiens
uaguauuccagaugagcugcagaugcuuaccu

SEQ ID NO: 55140 - RNA, 32 nt, Homo Sapiens
gauggcugcuccaugaggucaagacugggucu

SEQ ID NO: 55141 - RNA, 32 nt, Homo Sapiens
ggcaaaaggaggacguagaaaaggggacaccg

SEQ ID NO: 55142 - RNA, 32 nt, Homo Sapiens
uguaauugugacucaugugucaguucaugaug

SEQ ID NO: 55143 - RNA, 32 nt, Homo Sapiens
gcuugugugcacccucgugggguuaaggcgag

SEQ ID NO: 55144 - RNA, 32 nt, Homo Sapiens
aaucugguuauuucaucuuaaucucaagauug

SEQ ID NO: 55145 - RNA, 32 nt, Homo Sapiens
cucucagucaacauguggaaauccaaggagga

SEQ ID NO: 55146 - RNA, 32 nt, Homo Sapiens
acacagccauugccuccaccuccaccacagcc

SEQ ID NO: 55147 - RNA, 32 nt, Homo Sapiens
auuguggaugacuucuuuucugauggagagag

SEQ ID NO: 55148 - RNA, 32 nt, Homo Sapiens
ccuccaaguccucugaccuaauuuucugcugc

SEQ ID NO: 55149 - RNA, 32 nt, Homo Sapiens
ggaaugacuaaggauguuuguagugcuauaau

SEQ ID NO: 55150 - RNA, 32 nt, Homo Sapiens
cuuugaggccccaggcccucuuuuaacuaccu

SEQ ID NO: 55151 - RNA, 32 nt, Homo Sapiens
gggaccauggccagcuucagucugccuggcgu

SEQ ID NO: 55152 - RNA, 31 nt, Homo Sapiens
ggcaggagggcggagcaggcggcggugcagg

SEQ ID NO: 55153 - RNA, 32 nt, Homo Sapiens
uaaucccuucccccgccgccgccccgcgcggg

SEQ ID NO: 55154 - RNA, 31 nt, Homo Sapiens
auuuuagggaucagacacagagccugcuuau

SEQ ID NO: 55155 - RNA, 32 nt, Homo Sapiens
ugcuccccaucccacuuucucaucugccuccu

SEQ ID NO: 55156 - RNA, 32 nt, Homo Sapiens
acagccacaggaauuauguagaacagugauuc

SEQ ID NO: 55157 - RNA, 32 nt, Homo Sapiens
ccaagguuccaagagugaggagagaaugcaug

SEQ ID NO: 55158 - RNA, 32 nt, Homo Sapiens
cucacccgccgugggaauggcuccuuuucacu

SEQ ID NO: 55159 - RNA, 32 nt, Homo Sapiens
caccacuacggugaccccaaccccaacaccca

SEQ ID NO: 55160 - RNA, 32 nt, Homo Sapiens
cgcuuuaaacgcaagcuuuugggacuucuggu

SEQ ID NO: 55161 - RNA, 32 nt, Homo Sapiens
cagguuggaaguaugacaggcaggugaacuuu

SEQ ID NO: 55162 - RNA, 32 nt, Homo Sapiens
aaggucucaaggaagagucaacuggaacaagc

SEQ ID NO: 55163 - RNA, 28 nt, Homo Sapiens
aguaucuuuacaggagcagggaagagca

SEQ ID NO: 55164 - RNA, 32 nt, Homo Sapiens
ccuaggguugaaagccuuccccggcuccgggc

SEQ ID NO: 55165 - RNA, 32 nt, Homo Sapiens
ccugguguggugcgcgcacugcggguccugau

SEQ ID NO: 55166 - RNA, 32 nt, Homo Sapiens
ggcucaagaguuguccaaguguguguucgugu

SEQ ID NO: 55167 - RNA, 32 nt, Homo Sapiens
aguuguaauacauuccuccccucccccuagcc

SEQ ID NO: 55168 - RNA, 32 nt, Homo Sapiens
ugugcuaaggcaucuauuauauauuaugaauu

SEQ ID NO: 55169 - RNA, 32 nt, Homo Sapiens
ccauugaaauaccaucggaagacgaugggacg

SEQ ID NO: 55170 - RNA, 32 nt, Homo Sapiens
gcacggaagaguuugucuugcuuuaagauuag

SEQ ID NO: 55171 - RNA, 32 nt, Homo Sapiens
cuuaaaaauuaccauaugaccauuuuaaagug

SEQ ID NO: 55172 - RNA, 32 nt, Homo Sapiens
uccuauauaggacugcuuugcuagugugcccu

SEQ ID NO: 55173 - RNA, 32 nt, Homo Sapiens
gaagagcccucccuccugacuccuauaagacu

SEQ ID NO: 55174 - RNA, 32 nt, Homo Sapiens
gucauucuggcguagaaguuaguuuuuacguu

SEQ ID NO: 55175 - RNA, 32 nt, Homo Sapiens
aggccucuggggauuguaguuuuggagcuaga

SEQ ID NO: 55176 - RNA, 32 nt, Homo Sapiens
cggccuggcccggccuggccaguccccgcggu

SEQ ID NO: 55177 - RNA, 32 nt, Homo Sapiens
gagcaucuuguuucugucauucuuauucuucu

SEQ ID NO: 55178 - RNA, 32 nt, Homo Sapiens
uuucugugcuucucuguucauucuucauggca

SEQ ID NO: 55179 - RNA, 32 nt, Homo Sapiens
cagagacccagcuacaguucccuggcuguuuc

SEQ ID NO: 55180 - RNA, 32 nt, Homo Sapiens
cuuggcuauugugaaaaaugaugcuauaaaug

SEQ ID NO: 55181 - RNA, 32 nt, Homo Sapiens
uaaccgcccaggugcuggcucugcgugaauau

SEQ ID NO: 55182 - RNA, 30 nt, Homo Sapiens
cauggaaacugagaugaugagucuguguug

SEQ ID NO: 55183 - RNA, 32 nt, Homo Sapiens
caguguuccucaccaauaacuucagagaaguc

SEQ ID NO: 55184 - RNA, 32 nt, Homo Sapiens
agccagccugaacaucugcagugucgucucgc

SEQ ID NO: 55185 - RNA, 32 nt, Homo Sapiens
cuccuggugguaccauuauuauagaagcccuc

SEQ ID NO: 55186 - RNA, 32 nt, Homo Sapiens
cucgaccccauggcgcugcagacgcugcagag

SEQ ID NO: 55187 - RNA, 32 nt, Homo Sapiens
uggucauacauauaugauacaaauccagaguu

SEQ ID NO: 55188 - RNA, 32 nt, Homo Sapiens
ugcugguacgauuugauuccuguuggaauguu

SEQ ID NO: 55189 - RNA, 32 nt, Homo Sapiens
aauguagauauugugaaguacauauuaggaaa

SEQ ID NO: 55190 - RNA, 32 nt, Homo Sapiens
aguaguguuuuccuuggugaaugaagucauug

SEQ ID NO: 55191 - RNA, 32 nt, Homo Sapiens
gccgcaguccugcgccucucccgccccugucu

SEQ ID NO: 55192 - RNA, 32 nt, Homo Sapiens
ucuauaaacguggagugcauguugacaguuac

SEQ ID NO: 55193 - RNA, 32 nt, Homo Sapiens
cuaacucuaccuugauucuguucugcccucgg

SEQ ID NO: 55194 - RNA, 32 nt, Homo Sapiens
augucaagaugagugguuuucuuuuuccuuuu

SEQ ID NO: 55195 - RNA, 32 nt, Homo Sapiens
gaaaaacuguacagagcagcuuuacaaguugu

SEQ ID NO: 55196 - RNA, 32 nt, Homo Sapiens
aaagugaacaauuugauagguuuucgacacca

SEQ ID NO: 55197 - RNA, 32 nt, Homo Sapiens
guuaagauggcaauacuauccuaacugacaug

SEQ ID NO: 55198 - RNA, 32 nt, Homo Sapiens
ucauuuuaacugaguuccagaaaaaucaacua

SEQ ID NO: 55199 - RNA, 32 nt, Homo Sapiens
aaugcaaauaagcuccaccucccugcacuugu

SEQ ID NO: 55200 - RNA, 32 nt, Homo Sapiens
aaaaacacauaaacaaauaguuucaguagguc

SEQ ID NO: 55201 - RNA, 32 nt, Homo Sapiens
agaugagagauuauucguuauagaauugagua

SEQ ID NO: 55202 - RNA, 32 nt, Homo Sapiens
uucgcaccaggaccgcggagaagugcaaaguc

SEQ ID NO: 55203 - RNA, 32 nt, Homo Sapiens
aaaaaugagaacgcagggagugagauucaaau

SEQ ID NO: 55204 - RNA, 32 nt, Homo Sapiens
aagggguauacccagcugggagaucuuggugc

SEQ ID NO: 55205 - RNA, 28 nt, Homo Sapiens
acacgggcaaauuggcauuugaauaaag

SEQ ID NO: 55206 - RNA, 32 nt, Homo Sapiens
cagucgggccugccuggcaugcagaaccuaaa

SEQ ID NO: 55207 - RNA, 32 nt, Homo Sapiens
uucuaugugaccagaagugcugaugaccucag

SEQ ID NO: 55208 - RNA, 32 nt, Homo Sapiens
guuugcugucucuauggcaacccaguagcugg

SEQ ID NO: 55209 - RNA, 32 nt, Homo Sapiens
gaccagcaucuccagaccccagccuuucuccu

SEQ ID NO: 55210 - RNA, 32 nt, Homo Sapiens
ccaacaagcccuagcccucccaccagacccac

SEQ ID NO: 55211 - RNA, 32 nt, Homo Sapiens
cagaaaagcuauuaaaguuuguguguuguguc

SEQ ID NO: 55212 - RNA, 29 nt, Homo Sapiens
ggcaagagcaccugggcaccaguguuuag

SEQ ID NO: 55213 - RNA, 32 nt, Homo Sapiens
uguaacaucugacaccauguagaagcuaaaag

SEQ ID NO: 55214 - RNA, 32 nt, Homo Sapiens
uaugagaaagauaauauuguacagaaguauuu

SEQ ID NO: 55215 - RNA, 28 nt, Homo Sapiens
aauuugugaucuaccagguuggcuugau

SEQ ID NO: 55216 - RNA, 30 nt, Homo Sapiens
uucccagccaccccucccccugaaauuucu

SEQ ID NO: 55217 - RNA, 32 nt, Homo Sapiens
ugccagucuuacauuuucaggauggaguggcc

SEQ ID NO: 55218 - RNA, 32 nt, Homo Sapiens
ggaugucugaugacagucgugcauuucuauau

SEQ ID NO: 55219 - RNA, 32 nt, Homo Sapiens
gucccccgcccgccgcgccaugccuguggccg

SEQ ID NO: 55220 - RNA, 32 nt, Homo Sapiens
uaauuugugggaagacuggaauagggcugaau

SEQ ID NO: 55221 - RNA, 32 nt, Homo Sapiens
agcgugaggaggaggcugagggcggagaggcg

SEQ ID NO: 55222 - RNA, 32 nt, Homo Sapiens
uaugcagaggaugaaagauuaagauuaugcuc

SEQ ID NO: 55223 - RNA, 32 nt, Homo Sapiens
gcucucccuagccugccucucuagguuuuuca

SEQ ID NO: 55224 - RNA, 32 nt, Homo Sapiens
ugcugguauuagagagggaacuuuggcccuuu

SEQ ID NO: 55225 - RNA, 32 nt, Homo Sapiens
ucugcuaugacuuuggacuucucugagucugu

SEQ ID NO: 55226 - RNA, 32 nt, Homo Sapiens
cuacugggagcucagucuguagugccagggac

SEQ ID NO: 55227 - RNA, 32 nt, Homo Sapiens
uucugcuucuuaggugaauggguacuuucuau

SEQ ID NO: 55228 - RNA, 32 nt, Homo Sapiens
ccaagaucaguugcuuauagauaauguucaau

SEQ ID NO: 55229 - RNA, 32 nt, Homo Sapiens
gaauguggacuuuuuuccuguuuggaguauuu

SEQ ID NO: 55230 - RNA, 32 nt, Homo Sapiens
uagacgccuauggccacuggcuugaccaccuu

SEQ ID NO: 55231 - RNA, 32 nt, Homo Sapiens
cugaaguacugcacccagcaucaccagcuaga

SEQ ID NO: 55232 - RNA, 32 nt, Homo Sapiens
agagagagcuguaggccagcugccgggcucag

SEQ ID NO: 55233 - RNA, 32 nt, Homo Sapiens
uauaaauuaagcuaauuaaaaauauuuuuccc

SEQ ID NO: 55234 - RNA, 32 nt, Homo Sapiens
cacacgggggagagacgcaguccgcccagguc

SEQ ID NO: 55235 - RNA, 32 nt, Homo Sapiens
gggaggcuuugguggcucugagguggacaaag

SEQ ID NO: 55236 - RNA, 32 nt, Homo Sapiens
aaacagcauugcuuuguaaauuagggcccaau

SEQ ID NO: 55237 - RNA, 29 nt, Homo Sapiens
caggucauuuguauguaggaccaggagua

SEQ ID NO: 55238 - RNA, 32 nt, Homo Sapiens
auguggaggaacucaaggaauguuuagaagac

SEQ ID NO: 55239 - RNA, 32 nt, Homo Sapiens
gauuguuugagcccuggagguugaggcugcag

SEQ ID NO: 55240 - RNA, 32 nt, Homo Sapiens
gaaaaucacuguauuaaauauuuuggaaagau

SEQ ID NO: 55241 - RNA, 32 nt, Homo Sapiens
cacggaguaugccugcccugccccgggaggac

SEQ ID NO: 55242 - RNA, 32 nt, Homo Sapiens
ucccuaugagagauggaagaggagacacagac

SEQ ID NO: 55243 - RNA, 32 nt, Homo Sapiens
uauuuuuuggggcaaaguuaaguaaaauguug

SEQ ID NO: 55244 - RNA, 32 nt, Homo Sapiens
caccagcaaauuauauguggacagguucuaaa

SEQ ID NO: 55245 - RNA, 32 nt, Homo Sapiens
aagucauucuacuguucuuaauuuuuauauug

SEQ ID NO: 55246 - RNA, 32 nt, Homo Sapiens
uagacuagguuuucucucaucaucuaauuuac

SEQ ID NO: 55247 - RNA, 32 nt, Homo Sapiens
uugcauguguuuuaccucgacuugcuaaaauc

SEQ ID NO: 55248 - RNA, 32 nt, Homo Sapiens
caugggccgcucgucccggcgcugagggcccu

SEQ ID NO: 55249 - RNA, 32 nt, Homo Sapiens
ggcuggcacuggacugauuggccacccugcca

SEQ ID NO: 55250 - RNA, 32 nt, Homo Sapiens
ccugcccgccgccggacccuggcaugucaaga

SEQ ID NO: 55251 - RNA, 32 nt, Homo Sapiens
ccaucagaucaucaagcauaagaauaauacaa

SEQ ID NO: 55252 - RNA, 32 nt, Homo Sapiens
gccaggcguggcagugggcgccuguaauccca

SEQ ID NO: 55253 - RNA, 32 nt, Homo Sapiens
uuugaacuaucaagcauauacuguauacaguu

SEQ ID NO: 55254 - RNA, 32 nt, Homo Sapiens
ucaggaguucgagaccagccuggccauuaugg

SEQ ID NO: 55255 - RNA, 32 nt, Homo Sapiens
ugccuuuccuucccuuucucuggggauuccac

SEQ ID NO: 55256 - RNA, 32 nt, Homo Sapiens
aggguggugggagggauagaaaucacauccgc

SEQ ID NO: 55257 - RNA, 32 nt, Homo Sapiens
ggccuggcaccucgucuacccaaccucaccgg

SEQ ID NO: 55258 - RNA, 32 nt, Homo Sapiens
ccugcaugcagagcuuccagccugagaacccc

SEQ ID NO: 55259 - RNA, 32 nt, Homo Sapiens
ugaauuucaaaggauucagagaaggcaaaccc

SEQ ID NO: 55260 - RNA, 32 nt, Homo Sapiens
auuuguuaauaaacuuuauucuggcuuagcaa

SEQ ID NO: 55261 - RNA, 32 nt, Homo Sapiens
gcaagacagacguacaccuggaaccaaaaugc

SEQ ID NO: 55262 - RNA, 32 nt, Homo Sapiens
gcugccuguagcugcgccuggggaugcacgug

SEQ ID NO: 55263 - RNA, 32 nt, Homo Sapiens
ucuuucuuucuuucuuuuuuuuuuuaaauagc

SEQ ID NO: 55264 - RNA, 32 nt, Homo Sapiens
aauccaugaagaugaggaaaaaccagugcaaa

SEQ ID NO: 55265 - RNA, 32 nt, Homo Sapiens
gcuaacagcaugaucucuccucacccuuuucc

SEQ ID NO: 55266 - RNA, 32 nt, Homo Sapiens
cuuuugcaggggaucugggcaccugugccuug

SEQ ID NO: 55267 - RNA, 32 nt, Homo Sapiens
aacucuuugaaacgugauacaucuucagcacc

SEQ ID NO: 55268 - RNA, 32 nt, Homo Sapiens
uccugcuguggcggcacucgccccggugcugg

SEQ ID NO: 55269 - RNA, 32 nt, Homo Sapiens
cuugaggucucuuuucucuacuccaugguucu

SEQ ID NO: 55270 - RNA, 30 nt, Homo Sapiens
gagauaggcaggcagcgcugcuccaucagc

SEQ ID NO: 55271 - RNA, 32 nt, Homo Sapiens
ugggccuguauauaggguccaugugcaauagg

SEQ ID NO: 55272 - RNA, 32 nt, Homo Sapiens
gcauauggauuuucuucauuauuuacuuuuuc

SEQ ID NO: 55273 - RNA, 32 nt, Homo Sapiens
agaagaaaagauugauauuuuguguauugaac

SEQ ID NO: 55274 - RNA, 32 nt, Homo Sapiens
agagcugcauuacuauucaucagauaauuuac

SEQ ID NO: 55275 - RNA, 30 nt, Homo Sapiens
uggagugcggcagggcacgcagcguuugca

SEQ ID NO: 55276 - RNA, 32 nt, Homo Sapiens
gaugugagggcggcucgcaccccagcgcgcac

SEQ ID NO: 55277 - RNA, 32 nt, Homo Sapiens
uaacauuuucauauuuuuuucuuucagucauu

SEQ ID NO: 55278 - RNA, 32 nt, Homo Sapiens
uacauuucaggauugaauaguuuucagaauca

SEQ ID NO: 55279 - RNA, 32 nt, Homo Sapiens
gucaauaaauggcuuaucuuucaacugcaaaa

SEQ ID NO: 55280 - RNA, 32 nt, Homo Sapiens
cuugaaugagauguauuuguaucuagaaauuu

SEQ ID NO: 55281 - RNA, 32 nt, Homo Sapiens
acucagaagaucuaggucugguucuauaaaag

SEQ ID NO: 55282 - RNA, 30 nt, Homo Sapiens
cggcauucuggcgguggggaaacggccucc

SEQ ID NO: 55283 - RNA, 32 nt, Homo Sapiens
ccuguggccuuuuggaaauccaaauugccuga

SEQ ID NO: 55284 - RNA, 32 nt, Homo Sapiens
cuugcuuuuuugcugaguucccuauuuccaua

SEQ ID NO: 55285 - RNA, 32 nt, Homo Sapiens
cuuggguguuuucagggcuuguuuugaguuuu

SEQ ID NO: 55286 - RNA, 32 nt, Homo Sapiens
ccuugaucuuugacguccgaccucaagaacua

SEQ ID NO: 55287 - RNA, 32 nt, Homo Sapiens
aguggaaagcaucuaccaugcugaggcuaaaa

SEQ ID NO: 55288 - RNA, 32 nt, Homo Sapiens
acuucacuuccacuuuaaaauucuuuagugcu

SEQ ID NO: 55289 - RNA, 32 nt, Homo Sapiens
gccgugucucucgggggcggcucgcggggcag

SEQ ID NO: 55290 - RNA, 32 nt, Homo Sapiens
gggagaaccuacugcuuuggggaauugggugg

SEQ ID NO: 55291 - RNA, 32 nt, Homo Sapiens
ucucuaguuggcuauagcgcugaaacugaaca

SEQ ID NO: 55292 - RNA, 28 nt, Homo Sapiens
augaaggaccauuaacaugugauaccuu

SEQ ID NO: 55293 - RNA, 32 nt, Homo Sapiens
uaaccccaggacucagaagugaaggaaaaaug

SEQ ID NO: 55294 - RNA, 32 nt, Homo Sapiens
aaaccccaaguaaauuaacccuuuuuccguau

SEQ ID NO: 55295 - RNA, 32 nt, Homo Sapiens
uuaaaaaaugacuccuuauuuuuuaaauguuu

SEQ ID NO: 55296 - RNA, 32 nt, Homo Sapiens
uuaaaucugaugcacaaacuuuaauuuggcca

SEQ ID NO: 55297 - RNA, 32 nt, Homo Sapiens
ucagccagggccugcuugguggaccggccaag

SEQ ID NO: 55298 - RNA, 32 nt, Homo Sapiens
gcgacugacaacaggcugguugcuuggcgugg

SEQ ID NO: 55299 - RNA, 32 nt, Homo Sapiens
acuuacugugaaccuggggcaagccccuuccc

SEQ ID NO: 55300 - RNA, 32 nt, Homo Sapiens
uuuuuuguuucauauugaugugugucuaggca

SEQ ID NO: 55301 - RNA, 30 nt, Homo Sapiens
gggacugucugugugcccuguggggguccg

SEQ ID NO: 55302 - RNA, 32 nt, Homo Sapiens
gcgaggacaacguuggcccagaugggggcuga

SEQ ID NO: 55303 - RNA, 32 nt, Homo Sapiens
gauauuuaaaugagacggcagcuuuggaggga

SEQ ID NO: 55304 - RNA, 32 nt, Homo Sapiens
cgcgggccuggcggccguuguccgggcgacug

SEQ ID NO: 55305 - RNA, 32 nt, Homo Sapiens
ugcccugagcccugaggccagcuggucggcuu

SEQ ID NO: 55306 - RNA, 32 nt, Homo Sapiens
guuucuuuacuuuucaaugcacacaugcuuug

SEQ ID NO: 55307 - RNA, 32 nt, Homo Sapiens
ggcugagauggcugcuggccuggccuccaaga

SEQ ID NO: 55308 - RNA, 32 nt, Homo Sapiens
cacauguggacacguacaugaugugugcucac

SEQ ID NO: 55309 - RNA, 32 nt, Homo Sapiens
aacaggucauauugugcucuucuguuuacaag

SEQ ID NO: 55310 - RNA, 32 nt, Homo Sapiens
uucuccuaugaaauaaaacugaugauguuugg

SEQ ID NO: 55311 - RNA, 32 nt, Homo Sapiens
uagacagcaucaaugcagcaucaauuauguga

SEQ ID NO: 55312 - RNA, 32 nt, Homo Sapiens
aaucccgggcauuugggugggggaaucuugcc

SEQ ID NO: 55313 - RNA, 32 nt, Homo Sapiens
cgucaucagagguaaaggcaugagaaaaucgc

SEQ ID NO: 55314 - RNA, 32 nt, Homo Sapiens
ggcuugagaagcuccuuucuagcaccaucuuc

SEQ ID NO: 55315 - RNA, 32 nt, Homo Sapiens
ggccaggcacagugacucacaccuguaauucc

SEQ ID NO: 55316 - RNA, 32 nt, Homo Sapiens
cuuuuuauaacuauguuuuacuguauauuuaa

SEQ ID NO: 55317 - RNA, 32 nt, Homo Sapiens
auugccugugccccuggagucuguaaaagaga

SEQ ID NO: 55318 - RNA, 32 nt, Homo Sapiens
agagcuuuguccccggccuccuggacacauag

SEQ ID NO: 55319 - RNA, 32 nt, Homo Sapiens
uguacaugaugaugaaagacaucuuucccaaa

SEQ ID NO: 55320 - RNA, 32 nt, Homo Sapiens
uuauguguguguguuacuuuuacaaucaggaa

SEQ ID NO: 55321 - RNA, 32 nt, Homo Sapiens
cgcccugccccagccucguacacgccgccagc

SEQ ID NO: 55322 - RNA, 23 nt, Homo Sapiens
uuccuuuuuuuuuuuuuuuuuaa

SEQ ID NO: 55323 - RNA, 32 nt, Homo Sapiens
agauaggaggucggcacaagauacaggucaug

SEQ ID NO: 55324 - RNA, 32 nt, Homo Sapiens
gcuguguguuuaaagaucuacaucauuccuaa

SEQ ID NO: 55325 - RNA, 30 nt, Homo Sapiens
ggcucggccacaccgaucgcccgccgccau

SEQ ID NO: 55326 - RNA, 32 nt, Homo Sapiens
gucuucauuaagucaucaguacuugcuggaaa

SEQ ID NO: 55327 - RNA, 32 nt, Homo Sapiens
caaccccgccucccuccacaccccaugauguc

SEQ ID NO: 55328 - RNA, 32 nt, Homo Sapiens
gccccugacaccuccuccccagcuggucccua

SEQ ID NO: 55329 - RNA, 32 nt, Homo Sapiens
uuauuucccaauauuucugaucuacaaauuua

SEQ ID NO: 55330 - RNA, 32 nt, Homo Sapiens
uaggacaaaacggguuacuaagaugaaauugc

SEQ ID NO: 55331 - RNA, 32 nt, Homo Sapiens
guuuccgccuggacggggcgcgcgcggccuua

SEQ ID NO: 55332 - RNA, 32 nt, Homo Sapiens
uucgaggcugcuugcuuuuguuguuguuuugu

SEQ ID NO: 55333 - RNA, 32 nt, Homo Sapiens
gguggggucuuccccaccugucucuuaugccu

SEQ ID NO: 55334 - RNA, 32 nt, Homo Sapiens
uggcuuucagaauuaacauacaagguugccac

SEQ ID NO: 55335 - RNA, 32 nt, Homo Sapiens
ggugucugcugugaaccuccagugaccccaga

SEQ ID NO: 55336 - RNA, 32 nt, Homo Sapiens
gcaugaagacuuuuuucccugcuuggggagug

SEQ ID NO: 55337 - RNA, 32 nt, Homo Sapiens
ucuuuuuaacauguuucuuuucuuuuccggaa

SEQ ID NO: 55338 - RNA, 32 nt, Homo Sapiens
aaaaucaugcuuuuugagauuaacucgacaau

SEQ ID NO: 55339 - RNA, 32 nt, Homo Sapiens
ugccccaggagccccaggagcccccugccgga

SEQ ID NO: 55340 - RNA, 32 nt, Homo Sapiens
aauuucuaaaacauauacuaaaauguuguaga

SEQ ID NO: 55341 - RNA, 32 nt, Homo Sapiens
acuugaagaaggcccacgggcggcacggaguu

SEQ ID NO: 55342 - RNA, 32 nt, Homo Sapiens
ugucaacugcugaugguaaagcuuuugcagau

SEQ ID NO: 55343 - RNA, 32 nt, Homo Sapiens
ggcggagcggagcgaggcgcggccugcgaguc

SEQ ID NO: 55344 - RNA, 32 nt, Homo Sapiens
gcaaguucgcugcuccuucuauuugggcacuu

SEQ ID NO: 55345 - RNA, 32 nt, Homo Sapiens
caugcccgagggccacgacgucacuaugcagg

SEQ ID NO: 55346 - RNA, 29 nt, Homo Sapiens
ccugggcaacaugagugaaagucugacuc

SEQ ID NO: 55347 - RNA, 32 nt, Homo Sapiens
auauauuuuuauugacuuuccaaaguuucagg

SEQ ID NO: 55348 - RNA, 32 nt, Homo Sapiens
cgagauaugacaugugauaagauggaaagcca

SEQ ID NO: 55349 - RNA, 32 nt, Homo Sapiens
ucauaauguauuaaccuaacagaugaaauaug

SEQ ID NO: 55350 - RNA, 32 nt, Homo Sapiens
augguccuggcugugcugcugcaccagggccg

SEQ ID NO: 55351 - RNA, 32 nt, Homo Sapiens
aguuguguaacuuuauuuuuuagguaauaauu

SEQ ID NO: 55352 - RNA, 32 nt, Homo Sapiens
cgcaagcgcuggaggcgggcugccggcugugc

SEQ ID NO: 55353 - RNA, 32 nt, Homo Sapiens
gagcccugggaccacucaucccugcccagcca

SEQ ID NO: 55354 - RNA, 32 nt, Homo Sapiens
uuggccccgagugaaggcgcggcggcccaacc

SEQ ID NO: 55355 - RNA, 32 nt, Homo Sapiens
gcuuucuguggcggcguaguguuuggaauuag

SEQ ID NO: 55356 - RNA, 32 nt, Homo Sapiens
gucuuucuaaugugugaaucagagcacagcag

SEQ ID NO: 55357 - RNA, 32 nt, Homo Sapiens
gggccuuuaacccuaaaguugccguuuauuuu

SEQ ID NO: 55358 - RNA, 32 nt, Homo Sapiens
ugacgagggugaggagugacggccagacuggg

SEQ ID NO: 55359 - RNA, 32 nt, Homo Sapiens
aauucuuuuuucaucagguguuuuugugcaua

SEQ ID NO: 55360 - RNA, 32 nt, Homo Sapiens
cugugugcuucccagacucucccuccagccgu

SEQ ID NO: 55361 - RNA, 32 nt, Homo Sapiens
guguauuuuucaagaaagaaaaggagaaggaa

SEQ ID NO: 55362 - RNA, 32 nt, Homo Sapiens
gagguggcacuggcucccacucccaccccugc

SEQ ID NO: 55363 - RNA, 31 nt, Homo Sapiens
ucugaagugaucugccugccucggccuccca

SEQ ID NO: 55364 - RNA, 32 nt, Homo Sapiens
aacgguugugaucuaaagaaucaauaagccuc

SEQ ID NO: 55365 - RNA, 32 nt, Homo Sapiens
agagcugggaucccaugggcgcagcagcacac

SEQ ID NO: 55366 - RNA, 32 nt, Homo Sapiens
aggacucauuguuccacccccaaccaauuuga

SEQ ID NO: 55367 - RNA, 32 nt, Homo Sapiens
aauuuuaaaaaauuauuucuaauucuauaaau

SEQ ID NO: 55368 - RNA, 32 nt, Homo Sapiens
ccccccucuuucgccucacauuucuucagaga

SEQ ID NO: 55369 - RNA, 32 nt, Homo Sapiens
cucugcaccaaagcagaccucccccucucuaa

SEQ ID NO: 55370 - RNA, 32 nt, Homo Sapiens
cucagccugggcagcuucccccugccuuuugc

SEQ ID NO: 55371 - RNA, 32 nt, Homo Sapiens
gcugaugucugcacugaccagacgccccuagg

SEQ ID NO: 55372 - RNA, 32 nt, Homo Sapiens
aaaaaauuaagaaaaugaaauaaguuuugcag

SEQ ID NO: 55373 - RNA, 32 nt, Homo Sapiens
gccacucagaugccacugugugaaagggccau

SEQ ID NO: 55374 - RNA, 27 nt, Homo Sapiens
caccagagguccuucagccuccaucug

SEQ ID NO: 55375 - RNA, 32 nt, Homo Sapiens
aacagacuggucuguugccuucugaaacccuu

SEQ ID NO: 55376 - RNA, 32 nt, Homo Sapiens
uuauuuaaguuugaacgauguaaaauauggug

SEQ ID NO: 55377 - RNA, 32 nt, Homo Sapiens
agaagaugcgcagcuccacgcugcaggacccg

SEQ ID NO: 55378 - RNA, 32 nt, Homo Sapiens
ccacaggccccugaccgcacagggaggcuggg

SEQ ID NO: 55379 - RNA, 32 nt, Homo Sapiens
cauuuccaaccucaauaucuaaaugccacagu

SEQ ID NO: 55380 - RNA, 32 nt, Homo Sapiens
guguucacuucgccuugcucuugaaagugcag

SEQ ID NO: 55381 - RNA, 32 nt, Homo Sapiens
auucaagaacuuuggaucuauuucauuguuau

SEQ ID NO: 55382 - RNA, 32 nt, Homo Sapiens
ucccacaaaucuuguuucuggcacuuuagaaa

SEQ ID NO: 55383 - RNA, 32 nt, Homo Sapiens
aacugauauauuauaaacuaacacaugagcuc

SEQ ID NO: 55384 - RNA, 32 nt, Homo Sapiens
cccaguguagcacccuuggagagucucacccu

SEQ ID NO: 55385 - RNA, 32 nt, Homo Sapiens
ccaagcuuucucuuaaucauguagaagaagau

SEQ ID NO: 55386 - RNA, 32 nt, Homo Sapiens
gacuccgccucccaucuugguuucgagugaag

SEQ ID NO: 55387 - RNA, 32 nt, Homo Sapiens
uugcccccagagaauuuuuaagguaucugccu

SEQ ID NO: 55388 - RNA, 32 nt, Homo Sapiens
aucccggaggcgugggggcggagggacgaccc

SEQ ID NO: 55389 - RNA, 32 nt, Homo Sapiens
cacccaccaacccucagggcaaagccaggucc

SEQ ID NO: 55390 - RNA, 27 nt, Homo Sapiens
agcccagccuucuucaucccaggacac

SEQ ID NO: 55391 - RNA, 32 nt, Homo Sapiens
agcugcgaaggggaacuguuugcaguagcagc

SEQ ID NO: 55392 - RNA, 32 nt, Homo Sapiens
gccagcagagggggcgcccggucgcugccugu

SEQ ID NO: 55393 - RNA, 32 nt, Homo Sapiens
ucaccuccugucauuuuauuuuuuauucauuc

SEQ ID NO: 55394 - RNA, 32 nt, Homo Sapiens
cauuuuguaauauauuaguacacgacauaaaa

SEQ ID NO: 55395 - RNA, 32 nt, Homo Sapiens
cagaacuccugugccaggcgggagggaagggc

SEQ ID NO: 55396 - RNA, 32 nt, Homo Sapiens
aaagggaucauuucugugccaagcugcacacc

SEQ ID NO: 55397 - RNA, 32 nt, Homo Sapiens
cuaucaugguauucucauaguuuacagccaug

SEQ ID NO: 55398 - RNA, 32 nt, Homo Sapiens
gaaguugacaacaucugaguggacagcuaauu

SEQ ID NO: 55399 - RNA, 32 nt, Homo Sapiens
gguagugcaccuguagucccagcuacucagga

SEQ ID NO: 55400 - RNA, 32 nt, Homo Sapiens
acgguaguuaggaugcucaguugcuaaacacu

SEQ ID NO: 55401 - RNA, 32 nt, Homo Sapiens
aaacccuggcuuauucuugggaucuacugauu

SEQ ID NO: 55402 - RNA, 32 nt, Homo Sapiens
cagacccucacacagaaaaguaccucgaagga

SEQ ID NO: 55403 - RNA, 32 nt, Homo Sapiens
gcaaacaguguccaguggggucgggggcccac

SEQ ID NO: 55404 - RNA, 32 nt, Homo Sapiens
ggccaggugugguggcuccgaccuguaauccc

SEQ ID NO: 55405 - RNA, 32 nt, Homo Sapiens
uucuuggucuuuccuuaaaaagacuugguaaa

SEQ ID NO: 55406 - RNA, 32 nt, Homo Sapiens
ucucauuccuuccccaccccugcccuaugcuc

SEQ ID NO: 55407 - RNA, 27 nt, Homo Sapiens
uguauguccuucuguucugccuuccgc

SEQ ID NO: 55408 - RNA, 32 nt, Homo Sapiens
guucucuuaugauugcucuccucccgcuucag

SEQ ID NO: 55409 - RNA, 32 nt, Homo Sapiens
gccuucccgggcgggcgugggaggagggaggc

SEQ ID NO: 55410 - RNA, 32 nt, Homo Sapiens
ucucagaagaauuaaguuuuuacuucuaauua

SEQ ID NO: 55411 - RNA, 32 nt, Homo Sapiens
aaauacauauuaugaagcaggugcuggaacag

SEQ ID NO: 55412 - RNA, 32 nt, Homo Sapiens
uggugccauugcccuccagccugggcaagaac

SEQ ID NO: 55413 - RNA, 32 nt, Homo Sapiens
uuccuuucuucuguuuaaaauaaaaauaaaau

SEQ ID NO: 55414 - RNA, 32 nt, Homo Sapiens
uuuuacccauugaccacucccuccucaccccc

SEQ ID NO: 55415 - RNA, 32 nt, Homo Sapiens
uggagagaaaccguaugaauguagagaaucug

SEQ ID NO: 55416 - RNA, 32 nt, Homo Sapiens
cgcuaggcacguggaggaggagcccagaguug

SEQ ID NO: 55417 - RNA, 32 nt, Homo Sapiens
uaccugguuucugcauaugagaaugcagaggg

SEQ ID NO: 55418 - RNA, 32 nt, Homo Sapiens
cccgauggauuaaaggugcuuauguuuuugug

SEQ ID NO: 55419 - RNA, 32 nt, Homo Sapiens
uggugagccagagggacugaucaggccccauu

SEQ ID NO: 55420 - RNA, 32 nt, Homo Sapiens
accuuccccuccccuuccccacgcuccugggg

SEQ ID NO: 55421 - RNA, 32 nt, Homo Sapiens
ccaaauaaauuaacguucuagaucucugacau

SEQ ID NO: 55422 - RNA, 32 nt, Homo Sapiens
auuucaauuucuggaaaauaaucaccaacaug

SEQ ID NO: 55423 - RNA, 32 nt, Homo Sapiens
gacgagugggggcagagcugcucaggaccaug

SEQ ID NO: 55424 - RNA, 32 nt, Homo Sapiens
agaaaaaacacuuucagauaagagguguuugc

SEQ ID NO: 55425 - RNA, 32 nt, Homo Sapiens
uaaacacucuuguugucucuauuugacaggug

SEQ ID NO: 55426 - RNA, 32 nt, Homo Sapiens
ugugacucuuggauuuaagugcacuauuauuc

SEQ ID NO: 55427 - RNA, 32 nt, Homo Sapiens
uagaaugauugggucuccagugcggacagaag

SEQ ID NO: 55428 - RNA, 32 nt, Homo Sapiens
gccugaaguuuuaguauuuguuuucuaggugg

SEQ ID NO: 55429 - RNA, 32 nt, Homo Sapiens
cuuggccccuaggccuggggccccuugggagc

SEQ ID NO: 55430 - RNA, 32 nt, Homo Sapiens
acaagaaccccucccugcccuccuugggcacc

SEQ ID NO: 55431 - RNA, 32 nt, Homo Sapiens
uuccauuuucuuuucuggcuaaauaaaugaua

SEQ ID NO: 55432 - RNA, 32 nt, Homo Sapiens
uccgcgcaggcgggcggccccggagcgcuggu

SEQ ID NO: 55433 - RNA, 32 nt, Homo Sapiens
guguucgggagggccugggagaaggagggcac

SEQ ID NO: 55434 - RNA, 31 nt, Homo Sapiens
aaaauguguaacagaguugagguuguuaaaa

SEQ ID NO: 55435 - RNA, 32 nt, Homo Sapiens
ccaggcuccagacacuuucauuucauacagaa

SEQ ID NO: 55436 - RNA, 28 nt, Homo Sapiens
uccaagaaagauucugaauggaagagug

SEQ ID NO: 55437 - RNA, 32 nt, Homo Sapiens
gccaggccuaccuggaggagaccuaccggcaa

SEQ ID NO: 55438 - RNA, 32 nt, Homo Sapiens
aaaucuaacuucaucauggugaacuaauuuag

SEQ ID NO: 55439 - RNA, 32 nt, Homo Sapiens
caagccgggaugcaguuccagggcaggcagua

SEQ ID NO: 55440 - RNA, 32 nt, Homo Sapiens
cugcuggggcuacagagcuggugaaggcugag

SEQ ID NO: 55441 - RNA, 31 nt, Homo Sapiens
aaguuauuaaagacugauaacuguagcucuu

SEQ ID NO: 55442 - RNA, 32 nt, Homo Sapiens
uugcagcucagguuuccuggcuucuccaugca

SEQ ID NO: 55443 - RNA, 32 nt, Homo Sapiens
gcuucgacgaggagggccgcaacauuagcaag

SEQ ID NO: 55444 - RNA, 32 nt, Homo Sapiens
cagaggucaauccuugaugcuccagcacaggu

SEQ ID NO: 55445 - RNA, 32 nt, Homo Sapiens
gcuuucuaccucgacucucaccacagccagca

SEQ ID NO: 55446 - RNA, 32 nt, Homo Sapiens
aagauacaggguuauguacugaaggacucuac

SEQ ID NO: 55447 - RNA, 32 nt, Homo Sapiens
uugccagccauguugcccaggcuggucgugaa

SEQ ID NO: 55448 - RNA, 32 nt, Homo Sapiens
auggcaagucucugaggugaccucagggugga

SEQ ID NO: 55449 - RNA, 31 nt, Homo Sapiens
caagcggcggguccugcaggaguacgaggug

SEQ ID NO: 55450 - RNA, 32 nt, Homo Sapiens
ggucucaaacuccugaccucagaugauccauc

SEQ ID NO: 55451 - RNA, 27 nt, Homo Sapiens
gcuccuucccacuucagccuccucugu

SEQ ID NO: 55452 - RNA, 32 nt, Homo Sapiens
acacagaaaaagaaaaccaaauacugcauguu

SEQ ID NO: 55453 - RNA, 32 nt, Homo Sapiens
uuuccgccucuccagacacugcgcccuccacc

SEQ ID NO: 55454 - RNA, 32 nt, Homo Sapiens
gcgcguggggagggaugcggcugggggcugag

SEQ ID NO: 55455 - RNA, 32 nt, Homo Sapiens
gaacaaucuuaccacacaaggacaaauuauaa

SEQ ID NO: 55456 - RNA, 28 nt, Homo Sapiens
ugaagaaaggguuaacauugauaaugau

SEQ ID NO: 55457 - RNA, 32 nt, Homo Sapiens
cggccaacccgcccgccccggcgcaggcaguu

SEQ ID NO: 55458 - RNA, 32 nt, Homo Sapiens
ugcgcacacacaccgauguacacacacagaug

SEQ ID NO: 55459 - RNA, 32 nt, Homo Sapiens
acucccuuuguacaguauucugaggaacgcaa

SEQ ID NO: 55460 - RNA, 32 nt, Homo Sapiens
acugagccagcaggaaggaucucacaggucau

SEQ ID NO: 55461 - RNA, 32 nt, Homo Sapiens
gacuaaagcucuuuuuguaugcguguguguca

SEQ ID NO: 55462 - RNA, 32 nt, Homo Sapiens
ccucgggggaagcucagacuccuaaacucgca

SEQ ID NO: 55463 - RNA, 32 nt, Homo Sapiens
acagacacagaaaaugucagacaacaaagaaa

SEQ ID NO: 55464 - RNA, 32 nt, Homo Sapiens
ugaauauuuucauuuuaauaguuuaauguaug

SEQ ID NO: 55465 - RNA, 31 nt, Homo Sapiens
ugugugaccuugacaagucuaacuggucugu

SEQ ID NO: 55466 - RNA, 32 nt, Homo Sapiens
uaaaaagucaggaaacaauagaugcuggugag

SEQ ID NO: 55467 - RNA, 32 nt, Homo Sapiens
gcuugagacuuagguacuuuucucacguggac

SEQ ID NO: 55468 - RNA, 32 nt, Homo Sapiens
uuuuagaggaguuuguaaucaccuuauaacau

SEQ ID NO: 55469 - RNA, 32 nt, Homo Sapiens
gaggguuuaggaggucugaacacacacagugg

SEQ ID NO: 55470 - RNA, 32 nt, Homo Sapiens
ggaagguagggugugagcugcugcugaaggcu

SEQ ID NO: 55471 - RNA, 32 nt, Homo Sapiens
agcugcuccgcgccccgccgcgccgcgcugag

SEQ ID NO: 55472 - RNA, 32 nt, Homo Sapiens
gauugggugagaaggaacuuuuuucgacaacu

SEQ ID NO: 55473 - RNA, 32 nt, Homo Sapiens
guccuguuagggaccuauccccugccccaugg

SEQ ID NO: 55474 - RNA, 32 nt, Homo Sapiens
acaccauucgucaucacuccucugucauaugc

SEQ ID NO: 55475 - RNA, 32 nt, Homo Sapiens
cccaggcaaccacugaucugcuuucugucacu

SEQ ID NO: 55476 - RNA, 32 nt, Homo Sapiens
uguuuacuguaaaauauaaucuguuuaucuca

SEQ ID NO: 55477 - RNA, 32 nt, Homo Sapiens
aaggaaaaaaucaguauacugauuugguauuu

SEQ ID NO: 55478 - RNA, 32 nt, Homo Sapiens
ggaagauacugguuuauuucaaaugagcagag

SEQ ID NO: 55479 - RNA, 32 nt, Homo Sapiens
gaagggcugggaagagacagccuccaagguca

SEQ ID NO: 55480 - RNA, 32 nt, Homo Sapiens
aucugguuuuuuuuuucuuuuuucuuucuuuu

SEQ ID NO: 55481 - RNA, 32 nt, Homo Sapiens
cucaucguguaagacgggaaaugccacuggaa

SEQ ID NO: 55482 - RNA, 32 nt, Homo Sapiens
aauugcaaugacuuuuuaauuuauuuuuucuu

SEQ ID NO: 55483 - RNA, 32 nt, Homo Sapiens
acucgcagauaccacccggaggcagugggaug

SEQ ID NO: 55484 - RNA, 32 nt, Homo Sapiens
uugaccagacugcaucugcaugggcugcgcgg

SEQ ID NO: 55485 - RNA, 32 nt, Homo Sapiens
cuaccccaaaauuguuuucucauucacagcau

SEQ ID NO: 55486 - RNA, 32 nt, Homo Sapiens
gccugcccacccaaggacagggacauaagaau

SEQ ID NO: 55487 - RNA, 32 nt, Homo Sapiens
agguucucgaucuccuucuggaaccucuucuu

SEQ ID NO: 55488 - RNA, 32 nt, Homo Sapiens
auucccccagcucuuucuuuucugcuguuucc

SEQ ID NO: 55489 - RNA, 32 nt, Homo Sapiens
gggucccagccccgcgcuccgcguccccggga

SEQ ID NO: 55490 - RNA, 32 nt, Homo Sapiens
auuucaagagcucaaaauauuuuugcucuuug

SEQ ID NO: 55491 - RNA, 32 nt, Homo Sapiens
cacggcucucaccaguggcuagugguggguac

SEQ ID NO: 55492 - RNA, 32 nt, Homo Sapiens
aaaaaagaaucuuugauagaaaacagacauuu

SEQ ID NO: 55493 - RNA, 32 nt, Homo Sapiens
ccggggagcggcugcgcgaggaugcgcggugc

SEQ ID NO: 55494 - RNA, 31 nt, Homo Sapiens
gagaugcagcgcaugcucaaccagcugaggg

SEQ ID NO: 55495 - RNA, 32 nt, Homo Sapiens
uugcugccauauauauuguaucaaaauaucau

SEQ ID NO: 55496 - RNA, 32 nt, Homo Sapiens
gaggauggaccucaaaaguuugauccccucgu

SEQ ID NO: 55497 - RNA, 32 nt, Homo Sapiens
gguauuccagaaguguuugaggaucccuucca

SEQ ID NO: 55498 - RNA, 32 nt, Homo Sapiens
cacggggaugacuguggcuuggaacugacagu

SEQ ID NO: 55499 - RNA, 32 nt, Homo Sapiens
acugcagauguuuuuucuuuuaacaaacugga

SEQ ID NO: 55500 - RNA, 32 nt, Homo Sapiens
cuuuaagcccugcauccucgguugagaguaaa

SEQ ID NO: 55501 - RNA, 32 nt, Homo Sapiens
uauuuugacaguuuuaaaauaucuuuuggaau

SEQ ID NO: 55502 - RNA, 32 nt, Homo Sapiens
aaaauacaauagagaagauacaugagggcuua

SEQ ID NO: 55503 - RNA, 32 nt, Homo Sapiens
ggguaccaagggaguucuccuagcuguggcuu

SEQ ID NO: 55504 - RNA, 32 nt, Homo Sapiens
ucuguguauaguauuucaugacaucguuguac

SEQ ID NO: 55505 - RNA, 32 nt, Homo Sapiens
accucgcgcuccgacucgccccccgccuguag

SEQ ID NO: 55506 - RNA, 32 nt, Homo Sapiens
ccugagggguguggggacuggaggcgggauca

SEQ ID NO: 55507 - RNA, 32 nt, Homo Sapiens
ggucucaaacuccugaccucaggugcccaccu

SEQ ID NO: 55508 - RNA, 32 nt, Homo Sapiens
uuuguuaauuuaauguguuggcuucccaacuc

SEQ ID NO: 55509 - RNA, 32 nt, Homo Sapiens
cugaguucaaagcagguggagacuggcugguu

SEQ ID NO: 55510 - RNA, 32 nt, Homo Sapiens
acacgcggaaggccggguggagcccauccaug

SEQ ID NO: 55511 - RNA, 30 nt, Homo Sapiens
aaacacauuaaaagacaaauauguagaaug

SEQ ID NO: 55512 - RNA, 32 nt, Homo Sapiens
ccggauuuuccacaccacccagaggcucauau

SEQ ID NO: 55513 - RNA, 32 nt, Homo Sapiens
gacuuuaaagaauaauaugcugccaaauuuug

SEQ ID NO: 55514 - RNA, 32 nt, Homo Sapiens
cugucgcggggcgcgccgccaccucaccguga

SEQ ID NO: 55515 - RNA, 32 nt, Homo Sapiens
ugccuggacuaucagcagcacauguuuugcug

SEQ ID NO: 55516 - RNA, 32 nt, Homo Sapiens
gggcgcccccgccgcccgccucacgcugaagu

SEQ ID NO: 55517 - RNA, 32 nt, Homo Sapiens
cagagcagcgcucgccaccuccccccggccug

SEQ ID NO: 55518 - RNA, 32 nt, Homo Sapiens
gucgagcugcaagcugagccccggugaaggag

SEQ ID NO: 55519 - RNA, 32 nt, Homo Sapiens
agccaugggcacuagcucaucuuucaggugga

SEQ ID NO: 55520 - RNA, 32 nt, Homo Sapiens
uggaccauauccuucaccagguauccuauuuc

SEQ ID NO: 55521 - RNA, 32 nt, Homo Sapiens
gucaucuuugucuuccuucucauccucuuugu

SEQ ID NO: 55522 - RNA, 32 nt, Homo Sapiens
accccaacucacuggcacucaagcccccuacc

SEQ ID NO: 55523 - RNA, 32 nt, Homo Sapiens
agguuucauuguauuaaucuauccuuugaggu

SEQ ID NO: 55524 - RNA, 32 nt, Homo Sapiens
ccgcgcgccacccgcaaguucuccucgccgcc

SEQ ID NO: 55525 - RNA, 32 nt, Homo Sapiens
gccgcggggcggugccaagauggcgaggccca

SEQ ID NO: 55526 - RNA, 32 nt, Homo Sapiens
ccuugugagaccucaccuccccuucuccucac

SEQ ID NO: 55527 - RNA, 30 nt, Homo Sapiens
agaagcugcccuuucacccaucuugacaag

SEQ ID NO: 55528 - RNA, 32 nt, Homo Sapiens
ccaccacgucuggcuaaucuuuuuauuauuug

SEQ ID NO: 55529 - RNA, 32 nt, Homo Sapiens
uucaggguucuacauuuuaucuguaaaaugug

SEQ ID NO: 55530 - RNA, 32 nt, Homo Sapiens
auggcuuuugaucaguuuuucaguggcagcau

SEQ ID NO: 55531 - RNA, 32 nt, Homo Sapiens
gguagagagggcuggcggagcggcgcagacgg

SEQ ID NO: 55532 - RNA, 32 nt, Homo Sapiens
gauguggccuuggagaaggaccacugaugaga

SEQ ID NO: 55533 - RNA, 32 nt, Homo Sapiens
uauauuuuacaucuuuuuuucuuuuuauuuuc

SEQ ID NO: 55534 - RNA, 32 nt, Homo Sapiens
auuaaugugcuaaaggaaccuguauaucuauu

SEQ ID NO: 55535 - RNA, 32 nt, Homo Sapiens
agaaagaguauuuuaccacgcuucacauggaa

SEQ ID NO: 55536 - RNA, 32 nt, Homo Sapiens
cuggggccucgcagccccggcgcggccgccug

SEQ ID NO: 55537 - RNA, 32 nt, Homo Sapiens
cccgggcuagcgcggcagcggggccacgauga

SEQ ID NO: 55538 - RNA, 32 nt, Homo Sapiens
cacguuguccuccagagcugcucugggcccag

SEQ ID NO: 55539 - RNA, 32 nt, Homo Sapiens
guucagaaauuggcacaucccuuuaaaaauaa

SEQ ID NO: 55540 - RNA, 32 nt, Homo Sapiens
uuuaacacuuuaaguacagaucuuagugauac

SEQ ID NO: 55541 - RNA, 32 nt, Homo Sapiens
cagacauuacgaacuccacuauggaaucaaga

SEQ ID NO: 55542 - RNA, 32 nt, Homo Sapiens
uuuugugcuuuuccuuguguuuucauguuuug

SEQ ID NO: 55543 - RNA, 32 nt, Homo Sapiens
agagaauggagagagccugugcaugaugggac

SEQ ID NO: 55544 - RNA, 32 nt, Homo Sapiens
aguucggaaaauuugcagccugacaaugugau

SEQ ID NO: 55545 - RNA, 32 nt, Homo Sapiens
ccuacagcccucacuaacaaagaaccccucug

SEQ ID NO: 55546 - RNA, 32 nt, Homo Sapiens
agaacuuggggauucaggugggcuaccuacca

SEQ ID NO: 55547 - RNA, 32 nt, Homo Sapiens
uccuguaucuuuuucacuccagcccuccuuca

SEQ ID NO: 55548 - RNA, 32 nt, Homo Sapiens
uuaagacgaaaacaucugaaguucuccauggc

SEQ ID NO: 55549 - RNA, 32 nt, Homo Sapiens
ccacgccccuccccgcugaccgcuccuccagc

SEQ ID NO: 55550 - RNA, 32 nt, Homo Sapiens
cuccuaccuaucauaaggucuuauucuugugc

SEQ ID NO: 55551 - RNA, 32 nt, Homo Sapiens
gguggauccuccagggugucccggugagcagc

SEQ ID NO: 55552 - RNA, 32 nt, Homo Sapiens
uuaauccagaguuuuucaagcuuauuuaacua

SEQ ID NO: 55553 - RNA, 32 nt, Homo Sapiens
cgcacagcggguggagagggugcgccaaggag

SEQ ID NO: 55554 - RNA, 32 nt, Homo Sapiens
aggccgcagugaggugagaucgcgccauugca

SEQ ID NO: 55555 - RNA, 32 nt, Homo Sapiens
ucucugagacuccauuuucuccagggaaacga

SEQ ID NO: 55556 - RNA, 31 nt, Homo Sapiens
gucccccuucguggagcucuaacugauucag

SEQ ID NO: 55557 - RNA, 32 nt, Homo Sapiens
cccuagguagcaagagagaggcugggaaaagu

SEQ ID NO: 55558 - RNA, 32 nt, Homo Sapiens
gggguccgugugagcaggcccaccuggcucca

SEQ ID NO: 55559 - RNA, 32 nt, Homo Sapiens
caaaugucuaaccagaugaguuucuggacaga

SEQ ID NO: 55560 - RNA, 32 nt, Homo Sapiens
auguccacagagagggaagggccgaggggaga

SEQ ID NO: 55561 - RNA, 32 nt, Homo Sapiens
aagccaguuacaguuugccuuaacucauagac

SEQ ID NO: 55562 - RNA, 31 nt, Homo Sapiens
ucgggagcugggaguaaccaggcaaagucaa

SEQ ID NO: 55563 - RNA, 32 nt, Homo Sapiens
uaggcuuguuucugcaagacaccagacccuaa

SEQ ID NO: 55564 - RNA, 32 nt, Homo Sapiens
augagaauguagaaguggcaucugaaaacaau

SEQ ID NO: 55565 - RNA, 32 nt, Homo Sapiens
gucggucuccaggagguugugcaugcugguuu

SEQ ID NO: 55566 - RNA, 32 nt, Homo Sapiens
aaaggauacggauagauagccugucugacuga

SEQ ID NO: 55567 - RNA, 32 nt, Homo Sapiens
ggaaaccuuuuaauaccuaagaauauauuuga

SEQ ID NO: 55568 - RNA, 32 nt, Homo Sapiens
aaucaugaacacacuaagcaugagcaucgacu

SEQ ID NO: 55569 - RNA, 32 nt, Homo Sapiens
gacaaauacuacacuuuacaaacaauguuaac

SEQ ID NO: 55570 - RNA, 31 nt, Homo Sapiens
auaaaaggaaauaaauaaauaauguuauccu

SEQ ID NO: 55571 - RNA, 32 nt, Homo Sapiens
gaagaauccagauuuccuuaugcuugggccuc

SEQ ID NO: 55572 - RNA, 30 nt, Homo Sapiens
ccaacagauaaaagaaggaacauugcagag

SEQ ID NO: 55573 - RNA, 30 nt, Homo Sapiens
gacgaggaaauuccugccuaauaaauuuug

SEQ ID NO: 55574 - RNA, 32 nt, Homo Sapiens
gcucauggacgggugaggcggcggugugcgca

SEQ ID NO: 55575 - RNA, 32 nt, Homo Sapiens
cacugggcugggugcaguggcucacgccugua

SEQ ID NO: 55576 - RNA, 32 nt, Homo Sapiens
cagcagguucccucuccccggccccagcucug

SEQ ID NO: 55577 - RNA, 32 nt, Homo Sapiens
uauuccaguuaccuagauauucccuugagauu

SEQ ID NO: 55578 - RNA, 32 nt, Homo Sapiens
cucugcgucccgagccucccccggcucuccgc

SEQ ID NO: 55579 - RNA, 32 nt, Homo Sapiens
cuuucuucacacucacauuuaccaaugacucu

SEQ ID NO: 55580 - RNA, 32 nt, Homo Sapiens
ugcugguugaaggagcucaucuugcaggcugg

SEQ ID NO: 55581 - RNA, 32 nt, Homo Sapiens
gccuguaucuuaagaauggaaauauuuuguuc

SEQ ID NO: 55582 - RNA, 31 nt, Homo Sapiens
auaaucauguugacuuugugaauguagaaaa

SEQ ID NO: 55583 - RNA, 32 nt, Homo Sapiens
uuccuaaguauuuuauuuuuacagcuauuaua

SEQ ID NO: 55584 - RNA, 32 nt, Homo Sapiens
gugugaauauauuuaacacuguguuaaauuaa

SEQ ID NO: 55585 - RNA, 32 nt, Homo Sapiens
gccugucugagccccaggucugucuacacccc

SEQ ID NO: 55586 - RNA, 32 nt, Homo Sapiens
ccugguugagggugggguguggggcgaggggg

SEQ ID NO: 55587 - RNA, 32 nt, Homo Sapiens
ucuggucugcuguguggguuggggaguagggg

SEQ ID NO: 55588 - RNA, 32 nt, Homo Sapiens
aacuuccauuaccuccuguguuucuaaauaaa

SEQ ID NO: 55589 - RNA, 32 nt, Homo Sapiens
uuaggauuaauggugucuuacaauugcuguug

SEQ ID NO: 55590 - RNA, 30 nt, Homo Sapiens
cccaguaggccacugggggaagccccacga

SEQ ID NO: 55591 - RNA, 30 nt, Homo Sapiens
aaaggcccacuugccauaaccucuuuuggu

SEQ ID NO: 55592 - RNA, 32 nt, Homo Sapiens
caugcauggaccugauaauccccggggaacag

SEQ ID NO: 55593 - RNA, 32 nt, Homo Sapiens
cccgggcccggccagaugguggcaccgguaac

SEQ ID NO: 55594 - RNA, 30 nt, Homo Sapiens
uaagcgggagguggacaacucaauguaaau

SEQ ID NO: 55595 - RNA, 29 nt, Homo Sapiens
ugauugcuuuuauggugaaagcuguuguc

SEQ ID NO: 55596 - RNA, 32 nt, Homo Sapiens
ggccaaguaaaagaagugaaggacuaagacag

SEQ ID NO: 55597 - RNA, 32 nt, Homo Sapiens
aaccugggagacggagguugcagugagccaag

SEQ ID NO: 55598 - RNA, 32 nt, Homo Sapiens
uacuaaaacuaaaucagaaagucugaauguag

SEQ ID NO: 55599 - RNA, 32 nt, Homo Sapiens
ugagcuucuaacucagagcugaugaacaaaag

SEQ ID NO: 55600 - RNA, 32 nt, Homo Sapiens
ccugccccagcucucagaggcccgccaucacu

SEQ ID NO: 55601 - RNA, 32 nt, Homo Sapiens
ugaugagaagcgcugcuguggccacggcacac

SEQ ID NO: 55602 - RNA, 32 nt, Homo Sapiens
gagauccuggggaugccuggagccuggcugca

SEQ ID NO: 55603 - RNA, 32 nt, Homo Sapiens
cuucaacaagcacaucggcacccggggcuggc

SEQ ID NO: 55604 - RNA, 32 nt, Homo Sapiens
auacauuuuugccaagacaugaaguuuuauaa

SEQ ID NO: 55605 - RNA, 32 nt, Homo Sapiens
gaccuggcacagcaguaucccuugaagaaauc

SEQ ID NO: 55606 - RNA, 32 nt, Homo Sapiens
cgacggcucagguggcggacgcuggcggaugu

SEQ ID NO: 55607 - RNA, 30 nt, Homo Sapiens
ucucaugugacagauggggaaacugaggcc

SEQ ID NO: 55608 - RNA, 32 nt, Homo Sapiens
cccucccaagggugcuggcugagcugcuggag

SEQ ID NO: 55609 - RNA, 32 nt, Homo Sapiens
aguugcuguggcaaauguuuaacaaaaacucg

SEQ ID NO: 55610 - RNA, 32 nt, Homo Sapiens
uucaggaagauaaaaaucaguaaccuacccca

SEQ ID NO: 55611 - RNA, 32 nt, Homo Sapiens
guacagucugcuccgucauucccuuccccacc

SEQ ID NO: 55612 - RNA, 32 nt, Homo Sapiens
cagguuaaagcuguauuuuucuuaaaggcuua

SEQ ID NO: 55613 - RNA, 32 nt, Homo Sapiens
gggaguauuuuaaagaauguaucuugccuugu

SEQ ID NO: 55614 - RNA, 32 nt, Homo Sapiens
uuauggaaaugaaauaugaaauuuuauuaaaa

SEQ ID NO: 55615 - RNA, 32 nt, Homo Sapiens
uggcuuaaagcucuggccccagcugggcccuc

SEQ ID NO: 55616 - RNA, 30 nt, Homo Sapiens
ggaacuugugaaaugggggagccggcuggg

SEQ ID NO: 55617 - RNA, 32 nt, Homo Sapiens
uucgguuuccuucaucauucucuucucccguu

SEQ ID NO: 55618 - RNA, 32 nt, Homo Sapiens
uggcguauuugcuugucccaauacaagaaugc

SEQ ID NO: 55619 - RNA, 32 nt, Homo Sapiens
uacagccccuccccgcccagaacugugaaugg

SEQ ID NO: 55620 - RNA, 32 nt, Homo Sapiens
guacagggauuuaauauauuuugaauauaaug

SEQ ID NO: 55621 - RNA, 32 nt, Homo Sapiens
uuuguaagcuacuuaucuccaaaaaacuucag

SEQ ID NO: 55622 - RNA, 32 nt, Homo Sapiens
ccugcagagaauggaaacgugggaaaggaaug

SEQ ID NO: 55623 - RNA, 32 nt, Homo Sapiens
ggggggugagccagacagacugacaaacaaac

SEQ ID NO: 55624 - RNA, 32 nt, Homo Sapiens
gcuguccucccguuccgcugcccgcccugcca

SEQ ID NO: 55625 - RNA, 32 nt, Homo Sapiens
gacuaaaauguuucauuuaccucuaaauuucc

SEQ ID NO: 55626 - RNA, 32 nt, Homo Sapiens
cggucgcccccaccggccccauggcagccccc

SEQ ID NO: 55627 - RNA, 32 nt, Homo Sapiens
augcccagccuccugcuucccgagggcaugua

SEQ ID NO: 55628 - RNA, 32 nt, Homo Sapiens
uccuggcgggaagagagcgucuggguccauuc

SEQ ID NO: 55629 - RNA, 32 nt, Homo Sapiens
aagcucuccaaguucagacuccauucuugugc

SEQ ID NO: 55630 - RNA, 32 nt, Homo Sapiens
uccugccccugccugcccaucuggccuauacc

SEQ ID NO: 55631 - RNA, 32 nt, Homo Sapiens
cuugcacuuguuccuuguuuccucuggguuuu

SEQ ID NO: 55632 - RNA, 32 nt, Homo Sapiens
ucucgcagucucagcccgggccgugcaacggg

SEQ ID NO: 55633 - RNA, 32 nt, Homo Sapiens
ccaucaucuugaacacaaaauguguauuuaga

SEQ ID NO: 55634 - RNA, 32 nt, Homo Sapiens
uugucccucccgcgccagaucggcugcuucuc

SEQ ID NO: 55635 - RNA, 32 nt, Homo Sapiens
uacauaaaucccaaauucuaccucugaaggua

SEQ ID NO: 55636 - RNA, 32 nt, Homo Sapiens
acacgcagauuacauuugauaaauguuacaca

SEQ ID NO: 55637 - RNA, 32 nt, Homo Sapiens
uuuuaucacaacaaaggccuaguuuguuccau

SEQ ID NO: 55638 - RNA, 32 nt, Homo Sapiens
agugccagcucucagagcuguugucuucaccc

SEQ ID NO: 55639 - RNA, 32 nt, Homo Sapiens
ccaaaugcaaaagccagagaaaggcagauggg

SEQ ID NO: 55640 - RNA, 32 nt, Homo Sapiens
ucuuggagggugggcagaagaugggcagucgg

SEQ ID NO: 55641 - RNA, 32 nt, Homo Sapiens
cuaaccuaaagucccaggauuggcuccaggca

SEQ ID NO: 55642 - RNA, 32 nt, Homo Sapiens
ggacagcccggcccugcccccucccccgcugg

SEQ ID NO: 55643 - RNA, 32 nt, Homo Sapiens
gaugaagauggaagaacauaccuuugacaaau

SEQ ID NO: 55644 - RNA, 32 nt, Homo Sapiens
cucuugccagcucugugagucuggccagggcg

SEQ ID NO: 55645 - RNA, 32 nt, Homo Sapiens
uugggguccagcugccuucagccccccucccc

SEQ ID NO: 55646 - RNA, 32 nt, Homo Sapiens
acauccaccaagugggcauauuuccgagcagu

SEQ ID NO: 55647 - RNA, 29 nt, Homo Sapiens
uccucuaaauacauguuugauuguacccc

SEQ ID NO: 55648 - RNA, 32 nt, Homo Sapiens
uccguccgcucgccgcaccggcuucguucccc

SEQ ID NO: 55649 - RNA, 32 nt, Homo Sapiens
ucggcaguuuccggggagacucggggacuccg

SEQ ID NO: 55650 - RNA, 32 nt, Homo Sapiens
ggaagagagugagggacagaggaaacguuuau

SEQ ID NO: 55651 - RNA, 32 nt, Homo Sapiens
gcauuagcgaagauggucucgaucuccugacc

SEQ ID NO: 55652 - RNA, 32 nt, Homo Sapiens
caauggcagcgguggcaguggcagcaguggcc

SEQ ID NO: 55653 - RNA, 32 nt, Homo Sapiens
guggacugcacgcuuggugcaucgugcaucgu

SEQ ID NO: 55654 - RNA, 32 nt, Homo Sapiens
uaucaaaaacaguaaggcuuuuguucagaaau

SEQ ID NO: 55655 - RNA, 32 nt, Homo Sapiens
gcagccugcgucugcuugucuaugucuuucau

SEQ ID NO: 55656 - RNA, 32 nt, Homo Sapiens
ggaaggggccucaggagcaggaagggccagga

SEQ ID NO: 55657 - RNA, 32 nt, Homo Sapiens
augaaagugcaagauguggaacaucaacuacc

SEQ ID NO: 55658 - RNA, 32 nt, Homo Sapiens
uugagcaaccaccaccuuuaacuauuuccaaa

SEQ ID NO: 55659 - RNA, 32 nt, Homo Sapiens
ugcuucaaacuuaaggacugaccaucaccugc

SEQ ID NO: 55660 - RNA, 32 nt, Homo Sapiens
agaauugccugagcccaggaguucaagaccag

SEQ ID NO: 55661 - RNA, 32 nt, Homo Sapiens
ugugcccucccucucccccucauaaccccacc

SEQ ID NO: 55662 - RNA, 32 nt, Homo Sapiens
agcagcaaaggcaucugccuauaggguccccc

SEQ ID NO: 55663 - RNA, 32 nt, Homo Sapiens
agguggcagcaucaaaggcuccccucgccugc

SEQ ID NO: 55664 - RNA, 32 nt, Homo Sapiens
cacaaaugggcauucuaugaaaugguacuggc

SEQ ID NO: 55665 - RNA, 32 nt, Homo Sapiens
gagaggugcgugggaagcaagccauugaggaa

SEQ ID NO: 55666 - RNA, 32 nt, Homo Sapiens
uauuuuacaaaacagcagaaauguuccugcac

SEQ ID NO: 55667 - RNA, 32 nt, Homo Sapiens
agcugacaucagagaagagaaaacuuccugga

SEQ ID NO: 55668 - RNA, 32 nt, Homo Sapiens
ccauaacauacuaaaacaggcaguuucaggua

SEQ ID NO: 55669 - RNA, 32 nt, Homo Sapiens
caugguccuccgcgacaccuggggcucucccu

SEQ ID NO: 55670 - RNA, 30 nt, Homo Sapiens
ccgcgaugcccggcccuugguugcugcucg

SEQ ID NO: 55671 - RNA, 32 nt, Homo Sapiens
gguucagaccugcagaggaaaacaucagcugg

SEQ ID NO: 55672 - RNA, 32 nt, Homo Sapiens
gccagugcgcaugcgcgaggcccgagccgccg

SEQ ID NO: 55673 - RNA, 32 nt, Homo Sapiens
uggacucucucaaaccccuuaucccucuggac

SEQ ID NO: 55674 - RNA, 32 nt, Homo Sapiens
gcacuauuccaaggcuauggaguagcucuaca

SEQ ID NO: 55675 - RNA, 32 nt, Homo Sapiens
uaguugcaucaugucaguuguaucauguuagg

SEQ ID NO: 55676 - RNA, 32 nt, Homo Sapiens
acccucagguuugccucuaaccaggugucccu

SEQ ID NO: 55677 - RNA, 32 nt, Homo Sapiens
acugucauugaagugaggaagagugaguuggg

SEQ ID NO: 55678 - RNA, 32 nt, Homo Sapiens
aaguaguuuuaacaacuuuacacuggaaugau

SEQ ID NO: 55679 - RNA, 32 nt, Homo Sapiens
gagagcggacgcgggggcgagggugcgcggcg

SEQ ID NO: 55680 - RNA, 32 nt, Homo Sapiens
auuuauaaacuuuuuucuuacugucuuuuuuc

SEQ ID NO: 55681 - RNA, 32 nt, Homo Sapiens
aaggccuggucagcagagccgccccguguccc

SEQ ID NO: 55682 - RNA, 32 nt, Homo Sapiens
cggggcaagaauucaggaggagcccacucaaa

SEQ ID NO: 55683 - RNA, 32 nt, Homo Sapiens
uuuagccauuucauuauguuggggaugaguuu

SEQ ID NO: 55684 - RNA, 32 nt, Homo Sapiens
ggaccccuggaguucugcuucugucuggaauc

SEQ ID NO: 55685 - RNA, 32 nt, Homo Sapiens
uaccccauccucccucccccagccaccacccu

SEQ ID NO: 55686 - RNA, 32 nt, Homo Sapiens
gguguucagcaagggagguugaaugucacucc

SEQ ID NO: 55687 - RNA, 32 nt, Homo Sapiens
cggcggcuggcugggggcgcguuccgaggcgc

SEQ ID NO: 55688 - RNA, 32 nt, Homo Sapiens
cagacuugcccaaaggagagccaggauuuuca

SEQ ID NO: 55689 - RNA, 32 nt, Homo Sapiens
auuuaucauauucauucacacauauuauaugu

SEQ ID NO: 55690 - RNA, 32 nt, Homo Sapiens
uggccugauuuguaucucuggaaugcauuuau

SEQ ID NO: 55691 - RNA, 32 nt, Homo Sapiens
gaggcugucaucuggagggagagcggggggcc

SEQ ID NO: 55692 - RNA, 32 nt, Homo Sapiens
guaauguugaaaaauaaguugaaaagucuuug

SEQ ID NO: 55693 - RNA, 32 nt, Homo Sapiens
agaacaauuuuuucuccucuuuugggaagguu

SEQ ID NO: 55694 - RNA, 32 nt, Homo Sapiens
uacagacaagcugugugaaugcauagauguaa

SEQ ID NO: 55695 - RNA, 32 nt, Homo Sapiens
auugucauuuuucacagaaauagaaaagcaau

SEQ ID NO: 55696 - RNA, 32 nt, Homo Sapiens
guugcacuugaaaaagaguuagugagccuguc

SEQ ID NO: 55697 - RNA, 32 nt, Homo Sapiens
gugcggagcggcucugggggccccaguccccg

SEQ ID NO: 55698 - RNA, 32 nt, Homo Sapiens
ggaccccgaagagacgcccgcgugcgaccuga

SEQ ID NO: 55699 - RNA, 32 nt, Homo Sapiens
ucugucgcaguacuguuuaauaugaguccagc

SEQ ID NO: 55700 - RNA, 32 nt, Homo Sapiens
cuccugcggcgguggcagugguagcggccuuu

SEQ ID NO: 55701 - RNA, 32 nt, Homo Sapiens
gggcucucugagacucuuuagagcagcuuugg

SEQ ID NO: 55702 - RNA, 32 nt, Homo Sapiens
ucucaccugugcuuccagggggaggaggaagc

SEQ ID NO: 55703 - RNA, 32 nt, Homo Sapiens
uuauugcaacucagagguaucaaugaaggguu

SEQ ID NO: 55704 - RNA, 32 nt, Homo Sapiens
uucuuuuuaaaguaucuacuguguaacaggca

SEQ ID NO: 55705 - RNA, 32 nt, Homo Sapiens
accugcagacagagcuggugcugggugccaga

SEQ ID NO: 55706 - RNA, 32 nt, Homo Sapiens
ugcugaccgugcacuccccgccgcccgaggac

SEQ ID NO: 55707 - RNA, 32 nt, Homo Sapiens
cacaaacugcgcccuggcauuggagagaagcc

SEQ ID NO: 55708 - RNA, 32 nt, Homo Sapiens
cuuggggaucacauuuugugacugaugcagag

SEQ ID NO: 55709 - RNA, 32 nt, Homo Sapiens
gacgcaugccugcgcgcacagcugggccgggc

SEQ ID NO: 55710 - RNA, 32 nt, Homo Sapiens
ccccauguggcugcggggccgcggcggcgcug

SEQ ID NO: 55711 - RNA, 32 nt, Homo Sapiens
gcgucgcugccaagccggccuccgcgcgccuc

SEQ ID NO: 55712 - RNA, 32 nt, Homo Sapiens
ucauguuaugauaaaaauuuuguaauuuucuu

SEQ ID NO: 55713 - RNA, 32 nt, Homo Sapiens
ggcauauguacaacuaauuuuuguaacuauua

SEQ ID NO: 55714 - RNA, 32 nt, Homo Sapiens
cccuccugcucgccgcucccgccucacccgca

SEQ ID NO: 55715 - RNA, 32 nt, Homo Sapiens
cagccggguggcacagcggugucguggccgug

SEQ ID NO: 55716 - RNA, 32 nt, Homo Sapiens
agaacucugcgccccaggauggaggcuccagc

SEQ ID NO: 55717 - RNA, 32 nt, Homo Sapiens
gaagagggucagggaggcucucuaaagucauu

SEQ ID NO: 55718 - RNA, 32 nt, Homo Sapiens
uaggaacacaggaguuccagaucacaucgagu

SEQ ID NO: 55719 - RNA, 32 nt, Homo Sapiens
cucccaauguuucuccucuccuucccauggcc

SEQ ID NO: 55720 - RNA, 32 nt, Homo Sapiens
gaaaggguggucuugggagggcuggucccaag

SEQ ID NO: 55721 - RNA, 32 nt, Homo Sapiens
ucccccugcccccucaacaguccacguguucu

SEQ ID NO: 55722 - RNA, 32 nt, Homo Sapiens
ccccccaccguccaaaucgccccgccucaggg

SEQ ID NO: 55723 - RNA, 32 nt, Homo Sapiens
uguggcugguaugagccgugcugcugggcaca

SEQ ID NO: 55724 - RNA, 32 nt, Homo Sapiens
uuauacacuggggccacugcucugccgcggag

SEQ ID NO: 55725 - RNA, 29 nt, Homo Sapiens
uacaaaaaggaucucaguuuggggccugu

SEQ ID NO: 55726 - RNA, 32 nt, Homo Sapiens
uauguaagugguuuuuauauuuucacauuuga

SEQ ID NO: 55727 - RNA, 32 nt, Homo Sapiens
cugauagaggucagaaugagguccuggggaga

SEQ ID NO: 55728 - RNA, 32 nt, Homo Sapiens
ccuggagugggggaaacgcagcaccccacugg

SEQ ID NO: 55729 - RNA, 32 nt, Homo Sapiens
ucagaguuugcaaaccagauuguacaagucau

SEQ ID NO: 55730 - RNA, 32 nt, Homo Sapiens
cauccugacuaguaucucuguucacugcaggu

SEQ ID NO: 55731 - RNA, 32 nt, Homo Sapiens
ugaauggugccgaccgcggccaucgcaguugg

SEQ ID NO: 55732 - RNA, 29 nt, Homo Sapiens
ucaugugugacuucucucugcugugaaaa

SEQ ID NO: 55733 - RNA, 32 nt, Homo Sapiens
gacccgucuucagacuauuacugcagugggaa

SEQ ID NO: 55734 - RNA, 32 nt, Homo Sapiens
guccuucagaggaaacaauaacagaucuggug

SEQ ID NO: 55735 - RNA, 32 nt, Homo Sapiens
ugucugucugguuuuuuaucuucuccaucugu

SEQ ID NO: 55736 - RNA, 32 nt, Homo Sapiens
guaccgagcgcagcgagcuacagacgggggcg

SEQ ID NO: 55737 - RNA, 32 nt, Homo Sapiens
ucauauucccuuuugauauguuuaccuuguuu

SEQ ID NO: 55738 - RNA, 32 nt, Homo Sapiens
cucugcaaucuucucagaaggcaaaugacuuu

SEQ ID NO: 55739 - RNA, 32 nt, Homo Sapiens
uugcauguuuuuuauuugauaguuugaauaga

SEQ ID NO: 55740 - RNA, 31 nt, Homo Sapiens
gaagcauggcccugacuucagaauuccagac

SEQ ID NO: 55741 - RNA, 32 nt, Homo Sapiens
uagucuccugcaccaccgugacucccuggcug

SEQ ID NO: 55742 - RNA, 31 nt, Homo Sapiens
gucuugcucccuggccugcccuccggcaccc

SEQ ID NO: 55743 - RNA, 30 nt, Homo Sapiens
ccuagauggcggcgcgcacccugggccgcg

SEQ ID NO: 55744 - RNA, 32 nt, Homo Sapiens
ggccgggcgcgguggcucacacgccuguaauc

SEQ ID NO: 55745 - RNA, 32 nt, Homo Sapiens
ugcacggcucugccaucugacagcucccagag

SEQ ID NO: 55746 - RNA, 32 nt, Homo Sapiens
ccccaggcaggagcuucccagcgagcggccuc

SEQ ID NO: 55747 - RNA, 31 nt, Homo Sapiens
cuucccucuccgcugcguccccgcgcgaaga

SEQ ID NO: 55748 - RNA, 30 nt, Homo Sapiens
ccugaugccacguccacccaucuaccugaa

SEQ ID NO: 55749 - RNA, 32 nt, Homo Sapiens
cacgaggucgggccuggguccgacgguagugg

SEQ ID NO: 55750 - RNA, 32 nt, Homo Sapiens
uuagaaaaaaucaacuggcucuuuuaugaaag

SEQ ID NO: 55751 - RNA, 32 nt, Homo Sapiens
ccccucggaggacaaugcgcccggcgcucggc

SEQ ID NO: 55752 - RNA, 32 nt, Homo Sapiens
gacgaucucgggcuccaaguauuucagaauga

SEQ ID NO: 55753 - RNA, 32 nt, Homo Sapiens
agccaggagaaggucagcgagaaggaguguau

SEQ ID NO: 55754 - RNA, 32 nt, Homo Sapiens
guuguuacauuuugagagguuuucauaccaga

SEQ ID NO: 55755 - RNA, 32 nt, Homo Sapiens
ccccgaccuccagccgagcauccuucaugagc

SEQ ID NO: 55756 - RNA, 32 nt, Homo Sapiens
ugcucagaacccacaaagccugccccucaucc

SEQ ID NO: 55757 - RNA, 32 nt, Homo Sapiens
cuuccacgucccuggccuuccuccccuuccag

SEQ ID NO: 55758 - RNA, 32 nt, Homo Sapiens
gacagggguggggggcuaagggaccagggcug

SEQ ID NO: 55759 - RNA, 32 nt, Homo Sapiens
gaagggcgcgggagacagcggcugaggaagcc

SEQ ID NO: 55760 - RNA, 32 nt, Homo Sapiens
ggagagaggagaaaugcuggaaaggucgacag

SEQ ID NO: 55761 - RNA, 32 nt, Homo Sapiens
gcucacugcagccuccaccuccccgguuccag

SEQ ID NO: 55762 - RNA, 32 nt, Homo Sapiens
auucugaaugucaucaacuuuaccaaaccuuc

SEQ ID NO: 55763 - RNA, 32 nt, Homo Sapiens
agagcgagcugcgccugggucccggccaggcu

SEQ ID NO: 55764 - RNA, 32 nt, Homo Sapiens
gccccuacuaggcgcccccagcccgcccucac

SEQ ID NO: 55765 - RNA, 32 nt, Homo Sapiens
ugacuaccgccuuuuuguugugcaccugcucc

SEQ ID NO: 55766 - RNA, 32 nt, Homo Sapiens
cgcuccggccucgcuccgccgcuccacgccuc

SEQ ID NO: 55767 - RNA, 32 nt, Homo Sapiens
uuggagcuaaauuauaauauuuuuguugguaa

SEQ ID NO: 55768 - RNA, 32 nt, Homo Sapiens
acuuaggcagugcgaagugcucauccgcgagc

SEQ ID NO: 55769 - RNA, 32 nt, Homo Sapiens
ggaguucgcuggaaggucaugcagccuuccug

SEQ ID NO: 55770 - RNA, 31 nt, Homo Sapiens
gaaguggcugugacccguccaagggcaccug

SEQ ID NO: 55771 - RNA, 32 nt, Homo Sapiens
uguuucugaauucugaacaacuauuuacaaaa

SEQ ID NO: 55772 - RNA, 32 nt, Homo Sapiens
auauuuggaagauaaauuuauguguagacuuu

SEQ ID NO: 55773 - RNA, 29 nt, Homo Sapiens
ugaaugugauguuuauauucugaccaaag

SEQ ID NO: 55774 - RNA, 32 nt, Homo Sapiens
agggugaugcccucucuuaugugguacaauac

SEQ ID NO: 55775 - RNA, 31 nt, Homo Sapiens
accugccuugggugcccaggaguccccuacu

SEQ ID NO: 55776 - RNA, 32 nt, Homo Sapiens
uguucaugaggggugaaaaauauuuuaaaacu

SEQ ID NO: 55777 - RNA, 32 nt, Homo Sapiens
cggugccaucugugggggcuuugggccagggg

SEQ ID NO: 55778 - RNA, 32 nt, Homo Sapiens
cgccgguguccccggaggggccccgcuaguuc

SEQ ID NO: 55779 - RNA, 32 nt, Homo Sapiens
gauaauaaaaauugaauuauguauaucacugu

SEQ ID NO: 55780 - RNA, 32 nt, Homo Sapiens
augcacuuggaguccaugagccaaugggauau

SEQ ID NO: 55781 - RNA, 32 nt, Homo Sapiens
gugaagcucuuggggccagcgugcguccugac

SEQ ID NO: 55782 - RNA, 32 nt, Homo Sapiens
cccgcucggucccgaccgagagcuggcgucag

SEQ ID NO: 55783 - RNA, 32 nt, Homo Sapiens
gaaaaggaaaauuauucagggcagcuaauuuu

SEQ ID NO: 55784 - RNA, 32 nt, Homo Sapiens
uuugucaucagcucgcucuccauuggcgggga

SEQ ID NO: 55785 - RNA, 32 nt, Homo Sapiens
ggccaccgcgcgcuggccugugcccgagcccu

SEQ ID NO: 55786 - RNA, 32 nt, Homo Sapiens
aaguccucagccuucuggcccgcggaaguuaa

SEQ ID NO: 55787 - RNA, 30 nt, Homo Sapiens
gcgcuauggaagaggagaaauauuugccug

SEQ ID NO: 55788 - RNA, 32 nt, Homo Sapiens
agcacgaaagacucuaacagguguugcugugg

SEQ ID NO: 55789 - RNA, 32 nt, Homo Sapiens
uuauagacauugccaaauugcucuucaaagua

SEQ ID NO: 55790 - RNA, 32 nt, Homo Sapiens
agccaguccuuggccgugaguucguuuuucug

SEQ ID NO: 55791 - RNA, 32 nt, Homo Sapiens
ugccacugcccccagcagcuguuucugcugca

SEQ ID NO: 55792 - RNA, 30 nt, Homo Sapiens
gcgcuccagcacuggccgccggcguggggc

SEQ ID NO: 55793 - RNA, 32 nt, Homo Sapiens
aauucaguuauguggauccauuuuggagauga

SEQ ID NO: 55794 - RNA, 32 nt, Homo Sapiens
cacuguuauuacuguuaccugcacaaaugaaa

SEQ ID NO: 55795 - RNA, 32 nt, Homo Sapiens
gaagaaaacauagacguaaaucuuugugacuu

SEQ ID NO: 55796 - RNA, 32 nt, Homo Sapiens
agaaaccguucucauccaauuuagucacuuuu

SEQ ID NO: 55797 - RNA, 29 nt, Homo Sapiens
aaaaauucuaagaacaaacaaacaaacaa

SEQ ID NO: 55798 - RNA, 32 nt, Homo Sapiens
cagccuggguggcagagcgagacccugucuca

SEQ ID NO: 55799 - RNA, 30 nt, Homo Sapiens
cuggcaaaacuugccagaucuuagaauauu

SEQ ID NO: 55800 - RNA, 32 nt, Homo Sapiens
cggcuccucgucugcugaagcucgggaccucu

SEQ ID NO: 55801 - RNA, 32 nt, Homo Sapiens
cccuaggaugacccaacuacccccauaacuuu

SEQ ID NO: 55802 - RNA, 32 nt, Homo Sapiens
agaauggacagucugccuccucaagugggucc

SEQ ID NO: 55803 - RNA, 32 nt, Homo Sapiens
aguggcgcccgcggccgcagcgucggggcugg

SEQ ID NO: 55804 - RNA, 32 nt, Homo Sapiens
caccaucuguuuuuuuuuuuuaaagcauuuuu

SEQ ID NO: 55805 - RNA, 32 nt, Homo Sapiens
uuugcccaaagucucacaguaauuuguagagc

SEQ ID NO: 55806 - RNA, 32 nt, Homo Sapiens
acucgugcucgcucagacacuuuggcaggaug

SEQ ID NO: 55807 - RNA, 32 nt, Homo Sapiens
ugguagcaggggccaguccuccccucuugauu

SEQ ID NO: 55808 - RNA, 32 nt, Homo Sapiens
uugagcagcaaggugacugaaaaaauuuuuga

SEQ ID NO: 55809 - RNA, 32 nt, Homo Sapiens
acuggacccagcucuaccccgauuccagcaug

SEQ ID NO: 55810 - RNA, 32 nt, Homo Sapiens
cucccgaggccucagucagggcccggccggac

SEQ ID NO: 55811 - RNA, 31 nt, Homo Sapiens
auugaacccuaaaaacauguauuauaugacu

SEQ ID NO: 55812 - RNA, 32 nt, Homo Sapiens
ggaggaugugcagcugcggcggcggcgccggc

SEQ ID NO: 55813 - RNA, 32 nt, Homo Sapiens
gccaccuucccaggcacagccauaacauccac

SEQ ID NO: 55814 - RNA, 32 nt, Homo Sapiens
auacaucugugggguguuuugucauuucuuaa

SEQ ID NO: 55815 - RNA, 32 nt, Homo Sapiens
uccuggcuaugucgucuuggcuccaccucugu

SEQ ID NO: 55816 - RNA, 32 nt, Homo Sapiens
gugauuuucuuuccuuucccuugaaggggaaa

SEQ ID NO: 55817 - RNA, 32 nt, Homo Sapiens
acguuuugcaguuuugcuuuccucccaauaaa

SEQ ID NO: 55818 - RNA, 32 nt, Homo Sapiens
auuuagauccuaaucaagcacgucuuauguac

SEQ ID NO: 55819 - RNA, 30 nt, Homo Sapiens
ugucuugucuguggcugcuuaagucugaug

SEQ ID NO: 55820 - RNA, 32 nt, Homo Sapiens
accuacccuuguaaaaacuauaaucuuaaaug

SEQ ID NO: 55821 - RNA, 32 nt, Homo Sapiens
ggggauggggaccuaccuggcuccucagccag

SEQ ID NO: 55822 - RNA, 32 nt, Homo Sapiens
ucgccacuccaccagccuggaccuccaccucc

SEQ ID NO: 55823 - RNA, 32 nt, Homo Sapiens
gucagugcugaccccuggggcucuugggcaga

SEQ ID NO: 55824 - RNA, 32 nt, Homo Sapiens
cagcaaagcugauagucuaugucaauuaaaua

SEQ ID NO: 55825 - RNA, 32 nt, Homo Sapiens
cgaccccaccgcugcuuucuccucccccagau

SEQ ID NO: 55826 - RNA, 32 nt, Homo Sapiens
guauucagagccccccaggagagacggaugga

SEQ ID NO: 55827 - RNA, 32 nt, Homo Sapiens
ccuaccacucaggaauguuugcuggggccgaa

SEQ ID NO: 55828 - RNA, 32 nt, Homo Sapiens
gaugggcuucugccuggcacuggggguggagg

SEQ ID NO: 55829 - RNA, 32 nt, Homo Sapiens
uauacaugugaaauaaaacucaguauuuuaau

SEQ ID NO: 55830 - RNA, 32 nt, Homo Sapiens
gggacaggccccacagucggugugcuuggccc

SEQ ID NO: 55831 - RNA, 32 nt, Homo Sapiens
acccggaggcggugggggugcggcugagccau

SEQ ID NO: 55832 - RNA, 32 nt, Homo Sapiens
acuccaggcccugacaaagcaguuggauuugg

SEQ ID NO: 55833 - RNA, 32 nt, Homo Sapiens
uaagcacagggcuguacacagauccuuuauug

SEQ ID NO: 55834 - RNA, 32 nt, Homo Sapiens
ucauguaauuuuaagaugaauuuuacuugagu

SEQ ID NO: 55835 - RNA, 32 nt, Homo Sapiens
auuuuauguguuuaauauuuuucaugucaaga

SEQ ID NO: 55836 - RNA, 32 nt, Homo Sapiens
gggcaguggccaguggccuuaagggagccugc

SEQ ID NO: 55837 - RNA, 32 nt, Homo Sapiens
agcuggcucaggugcacaugcccgcuccauca

SEQ ID NO: 55838 - RNA, 32 nt, Homo Sapiens
gucgccaucuuggcagggaucauugacccuga

SEQ ID NO: 55839 - RNA, 32 nt, Homo Sapiens
agcaguuacugauuugcuuucugucacuaugg

SEQ ID NO: 55840 - RNA, 32 nt, Homo Sapiens
ggcccggggccaccaguccccaucccagcagg

SEQ ID NO: 55841 - RNA, 32 nt, Homo Sapiens
uguuuuaaacuuuucacaaauguaauguuuuu

SEQ ID NO: 55842 - RNA, 32 nt, Homo Sapiens
acaauuucacuccucugcauucaccaaauguc

SEQ ID NO: 55843 - RNA, 32 nt, Homo Sapiens
aguggcccugggcagaugccccggccccaggg

SEQ ID NO: 55844 - RNA, 32 nt, Homo Sapiens
auuuuugagauaagguuuuuauuuauguuuau

SEQ ID NO: 55845 - RNA, 32 nt, Homo Sapiens
gcuggacgcgcgcccccuggcugcgagggcug

SEQ ID NO: 55846 - RNA, 32 nt, Homo Sapiens
cgggggcgagggagcaggagcggccagugccc

SEQ ID NO: 55847 - RNA, 32 nt, Homo Sapiens
ccacaagagaucgaucaguuugcaagugccau

SEQ ID NO: 55848 - RNA, 32 nt, Homo Sapiens
uagcugacauuugcugaugacaugccuuacac

SEQ ID NO: 55849 - RNA, 32 nt, Homo Sapiens
cuccuauugccuuccuggcccgggauagaaga

SEQ ID NO: 55850 - RNA, 32 nt, Homo Sapiens
agcagaaggugagcacagguguccuugacuga

SEQ ID NO: 55851 - RNA, 32 nt, Homo Sapiens
cacuaaauauauuccaguuuuguauuuugugu

SEQ ID NO: 55852 - RNA, 32 nt, Homo Sapiens
ccagaugcagcuuuuacccauucuuuguccuu

SEQ ID NO: 55853 - RNA, 30 nt, Homo Sapiens
ucaguucuguuuuagggggaaaugggggcg

SEQ ID NO: 55854 - RNA, 32 nt, Homo Sapiens
cucgcccuccccacccgggccucggacuuuca

SEQ ID NO: 55855 - RNA, 32 nt, Homo Sapiens
ggccuccgguuuucuucagcacucccugucca

SEQ ID NO: 55856 - RNA, 32 nt, Homo Sapiens
ucucaagagcucucguaguggccugucaacca

SEQ ID NO: 55857 - RNA, 32 nt, Homo Sapiens
auucacucacuuuucuuugccuuuccugagag

SEQ ID NO: 55858 - RNA, 32 nt, Homo Sapiens
agccccaguggcuggcagccagugucucuggu

SEQ ID NO: 55859 - RNA, 32 nt, Homo Sapiens
acacuagugugagccuucagcacugcgagaau

SEQ ID NO: 55860 - RNA, 32 nt, Homo Sapiens
uuaauuacacuauaaugacgauaauguauuca

SEQ ID NO: 55861 - RNA, 30 nt, Homo Sapiens
ccucuaggcaggcagggugcuccugguguc

SEQ ID NO: 55862 - RNA, 32 nt, Homo Sapiens
ggcccucagguggccucucuucgcuagguccu

SEQ ID NO: 55863 - RNA, 32 nt, Homo Sapiens
uuugcauacaauuuaauguaauuucauuccau

SEQ ID NO: 55864 - RNA, 32 nt, Homo Sapiens
aggcaugcgccagcacgcccggcuaaguuuug

SEQ ID NO: 55865 - RNA, 32 nt, Homo Sapiens
ugcaggcugccccuccacugcccgccgucguc

SEQ ID NO: 55866 - RNA, 32 nt, Homo Sapiens
cgagcuggccccagacaagcgccgcugugagg

SEQ ID NO: 55867 - RNA, 32 nt, Homo Sapiens
ggggaucagggucagugugagcagcuaacauc

SEQ ID NO: 55868 - RNA, 32 nt, Homo Sapiens
aaagacagagugaugcugucaaugaaagcucu

SEQ ID NO: 55869 - RNA, 32 nt, Homo Sapiens
aacacuaucuuaucucauaguuuuuucagggg

SEQ ID NO: 55870 - RNA, 32 nt, Homo Sapiens
cggagcccacauuagcuuuugaagggaauaug

SEQ ID NO: 55871 - RNA, 32 nt, Homo Sapiens
ccccccuccuccccgcgccccagucaauuccu

SEQ ID NO: 55872 - RNA, 32 nt, Homo Sapiens
gccacugccugagggcaggccgcggccggcgg

SEQ ID NO: 55873 - RNA, 28 nt, Homo Sapiens
cucugguugucuagucauugucauaagu

SEQ ID NO: 55874 - RNA, 32 nt, Homo Sapiens
aggagacccgagagugcauccaggcgcggcuc

SEQ ID NO: 55875 - RNA, 32 nt, Homo Sapiens
gcugguacugaauuaccuucuauuaccagcaa

SEQ ID NO: 55876 - RNA, 32 nt, Homo Sapiens
cccaggcugccaacaaaccacccaggcagugu

SEQ ID NO: 55877 - RNA, 32 nt, Homo Sapiens
uaaaauuucucucuuuuguacucugugccuuu

SEQ ID NO: 55878 - RNA, 31 nt, Homo Sapiens
cagaagaaauaaaagguguucauugggcuuc

SEQ ID NO: 55879 - RNA, 32 nt, Homo Sapiens
uaaaguccagaaggccugggccccacagggcu

SEQ ID NO: 55880 - RNA, 32 nt, Homo Sapiens
ggugucaguagccuggccccagcuccugauca

SEQ ID NO: 55881 - RNA, 32 nt, Homo Sapiens
gaccggucaaagaggguggcacagaucgcagc

SEQ ID NO: 55882 - RNA, 32 nt, Homo Sapiens
aaagacuuuuguuuuucuugacuuaauucaug

SEQ ID NO: 55883 - RNA, 32 nt, Homo Sapiens
agccggggagccggagccccggguccccacga

SEQ ID NO: 55884 - RNA, 32 nt, Homo Sapiens
ccccaacccacgcuccaacacacacacacaca

SEQ ID NO: 55885 - RNA, 32 nt, Homo Sapiens
ugucuuuucuuugacuccauggaggaauuugu

SEQ ID NO: 55886 - RNA, 32 nt, Homo Sapiens
ugaugccacacagaguggucuuucuggagagg

SEQ ID NO: 55887 - RNA, 32 nt, Homo Sapiens
ugaugugaaacuggccucccaagcccugauaa

SEQ ID NO: 55888 - RNA, 32 nt, Homo Sapiens
ugugagcuaugugugaacguguguguaugagu

SEQ ID NO: 55889 - RNA, 31 nt, Homo Sapiens
agggcgcagcgcacacggccagcuccgcgca

SEQ ID NO: 55890 - RNA, 32 nt, Homo Sapiens
auuccuccagggugggaagcacggggagcaau

SEQ ID NO: 55891 - RNA, 32 nt, Homo Sapiens
augggguuccauuuuugaaugaacuaguuuaa

SEQ ID NO: 55892 - RNA, 32 nt, Homo Sapiens
cacuuugcuucuuuacugaaucuucuacacuc

SEQ ID NO: 55893 - RNA, 32 nt, Homo Sapiens
ggaagaagaaaauaaacaucuccuuuccaaca

SEQ ID NO: 55894 - RNA, 32 nt, Homo Sapiens
aauuuaauuuaaaaauacuaaaggcaaggaag

SEQ ID NO: 55895 - RNA, 32 nt, Homo Sapiens
gucagggccccgggugcugugucccaacagac

SEQ ID NO: 55896 - RNA, 32 nt, Homo Sapiens
aaaucuguaaaaauaacuuuuauuggaaaaug

SEQ ID NO: 55897 - RNA, 28 nt, Homo Sapiens
agaaaugcuugugguauguguuuuccaa

SEQ ID NO: 55898 - RNA, 32 nt, Homo Sapiens
uggugguugcuuugggucuacagcuacgucuu

SEQ ID NO: 55899 - RNA, 32 nt, Homo Sapiens
gguaucucugccuaggaacauucuucagaaau

SEQ ID NO: 55900 - RNA, 32 nt, Homo Sapiens
ccuucagggcuuugggacaucuuguccucaac

SEQ ID NO: 55901 - RNA, 28 nt, Homo Sapiens
agcauggcccugagaggcgucuccgugc

SEQ ID NO: 55902 - RNA, 29 nt, Homo Sapiens
gaggauggacaaagauucucaggggcugc

SEQ ID NO: 55903 - RNA, 32 nt, Homo Sapiens
ucagugugaaaauagcacuuuaccaaaagauu

SEQ ID NO: 55904 - RNA, 32 nt, Homo Sapiens
uuuagauccugauacaucacugagugucauac

SEQ ID NO: 55905 - RNA, 32 nt, Homo Sapiens
uuccuuuuuguuuaagcacucggucccuuauu

SEQ ID NO: 55906 - RNA, 32 nt, Homo Sapiens
gcaagaccuuuagucagacgucaucccuuaca

SEQ ID NO: 55907 - RNA, 32 nt, Homo Sapiens
gcaagaccuucagucagacgucauccuuuaca

SEQ ID NO: 55908 - RNA, 32 nt, Homo Sapiens
ucugggaggaggaggucacacgcugaugggca

SEQ ID NO: 55909 - RNA, 32 nt, Homo Sapiens
agugaagccuaaaaaugcaguuugcuggaaac

SEQ ID NO: 55910 - RNA, 32 nt, Homo Sapiens
gccaaauccugggcauccccagcccccuggcc

SEQ ID NO: 55911 - RNA, 32 nt, Homo Sapiens
accagguguacagaagcagcagacaagaucuu

SEQ ID NO: 55912 - RNA, 32 nt, Homo Sapiens
guuuaauuuuuccuccuagaucagaggacugc

SEQ ID NO: 55913 - RNA, 29 nt, Homo Sapiens
aucuaugcauguauguaggcaauacaugu

SEQ ID NO: 55914 - RNA, 32 nt, Homo Sapiens
auuuguuuuuaaaauugacuguaguggucacu

SEQ ID NO: 55915 - RNA, 32 nt, Homo Sapiens
uuuccccagggaccccaccccccuuugggggu

SEQ ID NO: 55916 - RNA, 32 nt, Homo Sapiens
gaccccaagucccccacccccauccugcucca

SEQ ID NO: 55917 - RNA, 32 nt, Homo Sapiens
cuagucaucgcccucgcagcggcggccaacau

SEQ ID NO: 55918 - RNA, 32 nt, Homo Sapiens
gguacaagguuuuuaacauggauuguaaacaa

SEQ ID NO: 55919 - RNA, 32 nt, Homo Sapiens
gagagauuauuuacaagaagaacucaccaggg

SEQ ID NO: 55920 - RNA, 32 nt, Homo Sapiens
uuuuguuugagaaaugucuucaaguuuugugu

SEQ ID NO: 55921 - RNA, 32 nt, Homo Sapiens
gggacugagacgggggcagagccgaagagacc

SEQ ID NO: 55922 - RNA, 32 nt, Homo Sapiens
aggagagaacagagaagcuugcaauacaggaa

SEQ ID NO: 55923 - RNA, 32 nt, Homo Sapiens
ggcuggaggaagauccggagggcagggguguu

SEQ ID NO: 55924 - RNA, 32 nt, Homo Sapiens
cugcugagcugcuggcagccucuguaggccac

SEQ ID NO: 55925 - RNA, 29 nt, Homo Sapiens
uaaaaugugacuugacgguugagacaaaa

SEQ ID NO: 55926 - RNA, 32 nt, Homo Sapiens
guaauugccguuaaaauauauuucauaagaag

SEQ ID NO: 55927 - RNA, 32 nt, Homo Sapiens
gucaagggcagcugcugaaggcucuuggucuc

SEQ ID NO: 55928 - RNA, 32 nt, Homo Sapiens
gugggauaagauuauauuguauuuuagauuac

SEQ ID NO: 55929 - RNA, 32 nt, Homo Sapiens
ccguucuccccgcccggucgccgcccgccagc

SEQ ID NO: 55930 - RNA, 32 nt, Homo Sapiens
cggggcagauugccgccucuacugugaggauu

SEQ ID NO: 55931 - RNA, 32 nt, Homo Sapiens
acccaucagagagacucccugguaaggauuag

SEQ ID NO: 55932 - RNA, 32 nt, Homo Sapiens
uuuagauuuagcugcauagaauuaaaacccua

SEQ ID NO: 55933 - RNA, 32 nt, Homo Sapiens
auauauguauauauuuugaacuuucuaaaaaa

SEQ ID NO: 55934 - RNA, 32 nt, Homo Sapiens
gcguggagagggugggugcaggaggcagaccc

SEQ ID NO: 55935 - RNA, 32 nt, Homo Sapiens
gggcaccgccggggacauggcgucuuggcucc

SEQ ID NO: 55936 - RNA, 32 nt, Homo Sapiens
cuuaaguuuauuuucuuuuuucguuuuauaaa

SEQ ID NO: 55937 - RNA, 32 nt, Homo Sapiens
cgccucgguccagccggcgcgcuccgggcucg

SEQ ID NO: 55938 - RNA, 32 nt, Homo Sapiens
gagaggaggcaggggcugggcugggggcgcau

SEQ ID NO: 55939 - RNA, 32 nt, Homo Sapiens
cccuggccuguucuguuuugccugaaguugga

SEQ ID NO: 55940 - RNA, 32 nt, Homo Sapiens
ggcuagaaaugaauugagugugacuucucccu

SEQ ID NO: 55941 - RNA, 32 nt, Homo Sapiens
ucuuccggaagacacgccugugugucccgggc

SEQ ID NO: 55942 - RNA, 32 nt, Homo Sapiens
cauuuaucuauuaaaauugccauuuuauuaaa

SEQ ID NO: 55943 - RNA, 31 nt, Homo Sapiens
cuuuagacaaauuguuaagaguaucauguac

SEQ ID NO: 55944 - RNA, 27 nt, Homo Sapiens
gacgagugcuucuucaucuuccuggac

SEQ ID NO: 55945 - RNA, 32 nt, Homo Sapiens
cuuuugugcauucuuugucaucucuucugagu

SEQ ID NO: 55946 - RNA, 32 nt, Homo Sapiens
cauaacuuuaacaaagaaaacccucaguccua

SEQ ID NO: 55947 - RNA, 32 nt, Homo Sapiens
aguuuugagagaucguuaaugcccuugaagug

SEQ ID NO: 55948 - RNA, 32 nt, Homo Sapiens
uuuuugaaucaucaagucuuucacauuuaaau

SEQ ID NO: 55949 - RNA, 32 nt, Homo Sapiens
guccuaagagggaaggcaaggaggcgggacgc

SEQ ID NO: 55950 - RNA, 32 nt, Homo Sapiens
cugagagcugaagagacaacgggaugaccugc

SEQ ID NO: 55951 - RNA, 30 nt, Homo Sapiens
cagggggagaguggcauggggagugacuuc

SEQ ID NO: 55952 - RNA, 32 nt, Homo Sapiens
gguagcggccccagcugacugucgccgugugc

SEQ ID NO: 55953 - RNA, 32 nt, Homo Sapiens
gaauauaaaaugcaucuaaacaugacauuuaa

SEQ ID NO: 55954 - RNA, 32 nt, Homo Sapiens
uaaccccgacucagauuucaccacccacacuc

SEQ ID NO: 55955 - RNA, 32 nt, Homo Sapiens
aaaaugggaccuccgaaccaacccugccccuc

SEQ ID NO: 55956 - RNA, 32 nt, Homo Sapiens
ucaagccagcccugggucccccgcggggcccu

SEQ ID NO: 55957 - RNA, 32 nt, Homo Sapiens
gaccagacacagaaacaaacagaaugagcuag

SEQ ID NO: 55958 - RNA, 32 nt, Homo Sapiens
uccaggggggagagaagagagaaagaggcuga

SEQ ID NO: 55959 - RNA, 32 nt, Homo Sapiens
uuacucuagagcucuuuuuuccuuucugcuga

SEQ ID NO: 55960 - RNA, 32 nt, Homo Sapiens
ccuguggccaggugcugucacacagcaaaggg

SEQ ID NO: 55961 - RNA, 32 nt, Homo Sapiens
gaaaaagugaccaaaaucauguacuaaaugca

SEQ ID NO: 55962 - RNA, 32 nt, Homo Sapiens
gugccuuuuugugugcaaccacuuacccuuuc

SEQ ID NO: 55963 - RNA, 32 nt, Homo Sapiens
cagugcuguauuuacuccaaguauucagaagu

SEQ ID NO: 55964 - RNA, 32 nt, Homo Sapiens
acugggugagagucuuggcagagccuuugcaa

SEQ ID NO: 55965 - RNA, 32 nt, Homo Sapiens
ggaaaacauaauaaaaaguagacuucacugag

SEQ ID NO: 55966 - RNA, 32 nt, Homo Sapiens
uuuaauguuguguuucuuuucuuuaaaugcau

SEQ ID NO: 55967 - RNA, 32 nt, Homo Sapiens
uuuuuccuccuaauguuuuuggcacuuaaaac

SEQ ID NO: 55968 - RNA, 32 nt, Homo Sapiens
ggugauggugacggucacagcugcugguuacu

SEQ ID NO: 55969 - RNA, 32 nt, Homo Sapiens
agcucccccgacagggcccccggggccuccuc

SEQ ID NO: 55970 - RNA, 32 nt, Homo Sapiens
agcagaaggaaaguacuggacuacccgugggu

SEQ ID NO: 55971 - RNA, 32 nt, Homo Sapiens
cacgggcagggccugccuccgugugccccuca

SEQ ID NO: 55972 - RNA, 32 nt, Homo Sapiens
caucuguaaaaugagagcauuggauuagaggc

SEQ ID NO: 55973 - RNA, 32 nt, Homo Sapiens
cuaugccugcaggcaacugaaaagcagugauu

SEQ ID NO: 55974 - RNA, 32 nt, Homo Sapiens
caagcacuuaggaugcuuuuuggaauaaauau

SEQ ID NO: 55975 - RNA, 32 nt, Homo Sapiens
agcccuuuugaagagcagcuucuguguuccuc

SEQ ID NO: 55976 - RNA, 32 nt, Homo Sapiens
ggggccuggccgccgguccggcgugcgccaag

SEQ ID NO: 55977 - RNA, 32 nt, Homo Sapiens
aacuaugggaauaauuuuuuccauucaucauu

SEQ ID NO: 55978 - RNA, 32 nt, Homo Sapiens
gcuggcucucaguccccgccucgcggagggug

SEQ ID NO: 55979 - RNA, 32 nt, Homo Sapiens
gggcugcgcgcccaggucugcaccgcgcuccg

SEQ ID NO: 55980 - RNA, 32 nt, Homo Sapiens
aagcggccgagccagcagcagguaaugacuuu

SEQ ID NO: 55981 - RNA, 32 nt, Homo Sapiens
aaacaccuuguacaucagagaguucacacagg

SEQ ID NO: 55982 - RNA, 32 nt, Homo Sapiens
gcuauaggaaggccucuggcucugccuuggac

SEQ ID NO: 55983 - RNA, 32 nt, Homo Sapiens
caaacuggaaaaccuucuucuauuucucuauu

SEQ ID NO: 55984 - RNA, 32 nt, Homo Sapiens
gaauguaagauggaauuuuaucaaauaaaacu

SEQ ID NO: 55985 - RNA, 32 nt, Homo Sapiens
gguuucuuuuuucauuauucugcaucuugauu

SEQ ID NO: 55986 - RNA, 32 nt, Homo Sapiens
gaauauuaaaauuuaaaagcaucacaggaaaa

SEQ ID NO: 55987 - RNA, 32 nt, Homo Sapiens
cugauccacaguuaccaauuaugagagauaga

SEQ ID NO: 55988 - RNA, 32 nt, Homo Sapiens
aaggaaggaaacaaaaaaguagggccuggacu

SEQ ID NO: 55989 - RNA, 32 nt, Homo Sapiens
aucaauagguauaucuugauuaugauauugca

SEQ ID NO: 55990 - RNA, 32 nt, Homo Sapiens
uucccugccugccugcugacccguggccccag

SEQ ID NO: 55991 - RNA, 32 nt, Homo Sapiens
uaagagaaagaaaaacaaaaucagagggcauu

SEQ ID NO: 55992 - RNA, 32 nt, Homo Sapiens
gggaagggggagagugcaggccugcucaggga

SEQ ID NO: 55993 - RNA, 32 nt, Homo Sapiens
uaaccauaauuuccacauggaugccaccugug

SEQ ID NO: 55994 - RNA, 32 nt, Homo Sapiens
ggcugaaguagaguaagaaaaaucacacugga

SEQ ID NO: 55995 - RNA, 31 nt, Homo Sapiens
uggcgccagcgggagaaccaggaagcgcagc

SEQ ID NO: 55996 - RNA, 32 nt, Homo Sapiens
ugccugcaaccucagaagagugcagcucccag

SEQ ID NO: 55997 - RNA, 32 nt, Homo Sapiens
cuuuagccuuggagauggggaggauccuugga

SEQ ID NO: 55998 - RNA, 32 nt, Homo Sapiens
cccugaaagcagccucccccucauggagaguc

SEQ ID NO: 55999 - RNA, 32 nt, Homo Sapiens
guauuguguuauauuucuuguaugaucuuuuu

SEQ ID NO: 56000 - RNA, 31 nt, Homo Sapiens
gcucuagugggacagcccagagccuggcugc

SEQ ID NO: 56001 - RNA, 32 nt, Homo Sapiens
cugugcugguauaauuaaaauaaaauauauuu

SEQ ID NO: 56002 - RNA, 32 nt, Homo Sapiens
ggaaaauuugucacagcagccagagggguuua

SEQ ID NO: 56003 - RNA, 32 nt, Homo Sapiens
gucgcggaggcacguguggagccccggcagca

SEQ ID NO: 56004 - RNA, 32 nt, Homo Sapiens
caccgcuugcgggcgccgggcauggggagugu

SEQ ID NO: 56005 - RNA, 32 nt, Homo Sapiens
cuucacugacaguggccugagagacggcagga

SEQ ID NO: 56006 - RNA, 32 nt, Homo Sapiens
gucccugucagcuacauaaagaugggagguuu

SEQ ID NO: 56007 - RNA, 32 nt, Homo Sapiens
uauacuaacaauacacaugagaauagauauua

SEQ ID NO: 56008 - RNA, 32 nt, Homo Sapiens
uggaucacacaccaaaccuuaauaacagcauc

SEQ ID NO: 56009 - RNA, 27 nt, Homo Sapiens
cgcagguccuucuugaucaucuagaac

SEQ ID NO: 56010 - RNA, 32 nt, Homo Sapiens
uccagcgaggcccugucagcggucuuaggcuc

SEQ ID NO: 56011 - RNA, 32 nt, Homo Sapiens
augacuauagaguaagaguggcagcaaucuuu

SEQ ID NO: 56012 - RNA, 32 nt, Homo Sapiens
aaggcauaggcuugcaaagagcagaaggugug

SEQ ID NO: 56013 - RNA, 32 nt, Homo Sapiens
cucucguggugaagcaaaugucuuggaaaaac

SEQ ID NO: 56014 - RNA, 32 nt, Homo Sapiens
gucuguuuugcugugaauauuggaaaugcuua

SEQ ID NO: 56015 - RNA, 32 nt, Homo Sapiens
cuagaacaaaaguggaauaaauaaaaacuaac

SEQ ID NO: 56016 - RNA, 32 nt, Homo Sapiens
ggccgaggcgaugaggguguuggugcggcgcu

SEQ ID NO: 56017 - RNA, 32 nt, Homo Sapiens
uuucuuuucuuuucuuuuuuuuuuauuuuuaa

SEQ ID NO: 56018 - RNA, 32 nt, Homo Sapiens
accaagguccagugaccccccuagacccagcc

SEQ ID NO: 56019 - RNA, 32 nt, Homo Sapiens
ggggaauuuugaaugucuuuuguuuuuguuuu

SEQ ID NO: 56020 - RNA, 32 nt, Homo Sapiens
caaugccccuggauaauuuucugucuuucugu

SEQ ID NO: 56021 - RNA, 32 nt, Homo Sapiens
uacaguugguauauuaguuggauggcauagag

SEQ ID NO: 56022 - RNA, 32 nt, Homo Sapiens
gcucugccaucgggcuccuugcggcugggauc

SEQ ID NO: 56023 - RNA, 32 nt, Homo Sapiens
cggccagaacagagaacccuguuauaaugggu

SEQ ID NO: 56024 - RNA, 32 nt, Homo Sapiens
ccucuuguguucuugagaaggaucuaauuuuu

SEQ ID NO: 56025 - RNA, 32 nt, Homo Sapiens
aggcauacaacacuaaaaaggcucuagcuuug

SEQ ID NO: 56026 - RNA, 32 nt, Homo Sapiens
ccgccgcggcccggcccuccgggacaccugcu

SEQ ID NO: 56027 - RNA, 32 nt, Homo Sapiens
uguauauauuguuugcagacauuauuguucau

SEQ ID NO: 56028 - RNA, 32 nt, Homo Sapiens
agcgguagcaucugagcuccugucccagcucc

SEQ ID NO: 56029 - RNA, 32 nt, Homo Sapiens
aguuuucuauuuagaggaauuuacaaaugggu

SEQ ID NO: 56030 - RNA, 32 nt, Homo Sapiens
cuguguauaaaauggggaaauggaggcaggag

SEQ ID NO: 56031 - RNA, 32 nt, Homo Sapiens
ggauuuucuuuguugaaauuucaguguggguu

SEQ ID NO: 56032 - RNA, 32 nt, Homo Sapiens
caggaaagggcugaggcaggugguagggcugg

SEQ ID NO: 56033 - RNA, 32 nt, Homo Sapiens
ccuaaagaugucaaaggugugcagcuuccaaa

SEQ ID NO: 56034 - RNA, 32 nt, Homo Sapiens
aacagcacaaaaaucuugaaaacuaugaaguc

SEQ ID NO: 56035 - RNA, 32 nt, Homo Sapiens
uauccuaaauauauuucuccuuuggcagugac

SEQ ID NO: 56036 - RNA, 32 nt, Homo Sapiens
gguguaaaaccugcaugaaggaccccucuuuu

SEQ ID NO: 56037 - RNA, 32 nt, Homo Sapiens
cgccaggcucucuggaggccaggagaugacuc

SEQ ID NO: 56038 - RNA, 32 nt, Homo Sapiens
ggcccucggaccccucugccugccccaacccc

SEQ ID NO: 56039 - RNA, 32 nt, Homo Sapiens
uuuuaaaaaauauuuuuaguagagacaggguu

SEQ ID NO: 56040 - RNA, 32 nt, Homo Sapiens
guugaacuuggauuugaaaauaccuucagcac

SEQ ID NO: 56041 - RNA, 32 nt, Homo Sapiens
gcgugccugcgguuggggaccagugcagggac

SEQ ID NO: 56042 - RNA, 32 nt, Homo Sapiens
uugaaggagucucccccuuccugcaucaccac

SEQ ID NO: 56043 - RNA, 32 nt, Homo Sapiens
aaggccagccccagcggcuuccccagccuccg

SEQ ID NO: 56044 - RNA, 32 nt, Homo Sapiens
gcucaccuggcuagauuguuguguguuuuguu

SEQ ID NO: 56045 - RNA, 32 nt, Homo Sapiens
acacagccccauggcccucccucuccccugac

SEQ ID NO: 56046 - RNA, 32 nt, Homo Sapiens
acaccugccgcggcgccuagggcggaggagug

SEQ ID NO: 56047 - RNA, 30 nt, Homo Sapiens
cuuugugcauuugugggggaaaacuauuaa

SEQ ID NO: 56048 - RNA, 32 nt, Homo Sapiens
gacccuguaaaauggagguggaaagacaagcu

SEQ ID NO: 56049 - RNA, 32 nt, Homo Sapiens
uccauuuaaaaauuauuuuuagaagcuaaaga

SEQ ID NO: 56050 - RNA, 32 nt, Homo Sapiens
uaggagaacggguauugauugauaaaagggac

SEQ ID NO: 56051 - RNA, 32 nt, Homo Sapiens
guguuuauuguuccuuuuccuacaaaggaagc

SEQ ID NO: 56052 - RNA, 32 nt, Homo Sapiens
gaggagguagagagagggcagccggagcaccc

SEQ ID NO: 56053 - RNA, 32 nt, Homo Sapiens
accggcugugcagacgccauggaguuggugcu

SEQ ID NO: 56054 - RNA, 32 nt, Homo Sapiens
ccugucuuucauaggccaaggauccacauacc

SEQ ID NO: 56055 - RNA, 32 nt, Homo Sapiens
uuaaugauucugaagcuuauguuucuuauucu

SEQ ID NO: 56056 - RNA, 32 nt, Homo Sapiens
uuuaucauuucuuuuucuuagcuuucuuccuu

SEQ ID NO: 56057 - RNA, 32 nt, Homo Sapiens
uugaacugcauaacugagaacucugcaaauuc

SEQ ID NO: 56058 - RNA, 32 nt, Homo Sapiens
cuuggugcuuauaccucugaggaaaggcaugg

SEQ ID NO: 56059 - RNA, 32 nt, Homo Sapiens
ucugucucaaaaaaacaaaacaaaacaaaaca

SEQ ID NO: 56060 - RNA, 32 nt, Homo Sapiens
cgaucucccgcccuugcccccgccccgccgag

SEQ ID NO: 56061 - RNA, 32 nt, Homo Sapiens
uuagagguagcucuagcuuugauuccauuuag

SEQ ID NO: 56062 - RNA, 32 nt, Homo Sapiens
gaaacuacuuuuucuuggaugauuaacugacu

SEQ ID NO: 56063 - RNA, 32 nt, Homo Sapiens
gagucggacgguaucauuguguccaaugauaa

SEQ ID NO: 56064 - RNA, 32 nt, Homo Sapiens
agacucuucucagaucucuuguacccaccacc

SEQ ID NO: 56065 - RNA, 32 nt, Homo Sapiens
ccgggcuagugggagggggcggcggccaugga

SEQ ID NO: 56066 - RNA, 27 nt, Homo Sapiens
ugaucccccugcuucagccucucaaac

SEQ ID NO: 56067 - RNA, 32 nt, Homo Sapiens
uccuuaaccuuuaagucuuacaggaagccucu

SEQ ID NO: 56068 - RNA, 32 nt, Homo Sapiens
caggaacuucaggaaccaguccuuccuuggag

SEQ ID NO: 56069 - RNA, 32 nt, Homo Sapiens
uugagggagggcugggucuuagggaaaggaau

SEQ ID NO: 56070 - RNA, 32 nt, Homo Sapiens
cuguagagaagcuccccccgcaaccugggcau

SEQ ID NO: 56071 - RNA, 31 nt, Homo Sapiens
caagagagggcggggauggcgggcagcucac

SEQ ID NO: 56072 - RNA, 32 nt, Homo Sapiens
ccuuccccaagcauagaauacagaggugccau

SEQ ID NO: 56073 - RNA, 32 nt, Homo Sapiens
acuuaaaauggcaauccaguguugacuguucc

SEQ ID NO: 56074 - RNA, 32 nt, Homo Sapiens
aaggggaggucuuuuuaguuagcuggcaauua

SEQ ID NO: 56075 - RNA, 32 nt, Homo Sapiens
guggaagugcagaggagaagggcugcuauaag

SEQ ID NO: 56076 - RNA, 32 nt, Homo Sapiens
ccagaagccuuuuuauggagccaggcaugguu

SEQ ID NO: 56077 - RNA, 32 nt, Homo Sapiens
ucaguuauuuccucuaacuugauauuaauuug

SEQ ID NO: 56078 - RNA, 32 nt, Homo Sapiens
ugcagcccacugauaaauaucucacuucuccc

SEQ ID NO: 56079 - RNA, 32 nt, Homo Sapiens
aaguuccuuccucuuuuuuuuaugucuuaaga

SEQ ID NO: 56080 - RNA, 32 nt, Homo Sapiens
uggaauuugaaccccaagauaguucucuaagg

SEQ ID NO: 56081 - RNA, 32 nt, Homo Sapiens
cugaccuuaguuucaaagcuuauucuuaauua

SEQ ID NO: 56082 - RNA, 32 nt, Homo Sapiens
ugugugguacccaguuggugcagacgcgaaau

SEQ ID NO: 56083 - RNA, 32 nt, Homo Sapiens
cuugucugucuccacucucaucccaggcaauc

SEQ ID NO: 56084 - RNA, 32 nt, Homo Sapiens
acauaacuaugaaaucauagcucuguuuucac

SEQ ID NO: 56085 - RNA, 32 nt, Homo Sapiens
uaccguccggggcacagcgacagguucuggag

SEQ ID NO: 56086 - RNA, 32 nt, Homo Sapiens
ccucccccagacagcagagaaacuuugauguc

SEQ ID NO: 56087 - RNA, 32 nt, Homo Sapiens
ggaugcuccagauggugggacacccuucccug

SEQ ID NO: 56088 - RNA, 32 nt, Homo Sapiens
aagugggguggaagaaguggggugggacgaca

SEQ ID NO: 56089 - RNA, 32 nt, Homo Sapiens
acuucuuuuuugcuguagucaagcauuaauag

SEQ ID NO: 56090 - RNA, 32 nt, Homo Sapiens
uccccuucaaccgccuggcccccugagggcug

SEQ ID NO: 56091 - RNA, 32 nt, Homo Sapiens
ugcgcaccucucugagccuccgcggccuucuc

SEQ ID NO: 56092 - RNA, 32 nt, Homo Sapiens
ucucuguuucuccaaaguaaguguuugugauu

SEQ ID NO: 56093 - RNA, 30 nt, Homo Sapiens
uggcgcgcugcccguccccaucuuaauaaa

SEQ ID NO: 56094 - RNA, 32 nt, Homo Sapiens
ucaaugugagcccuggcaaggcuggcauauua

SEQ ID NO: 56095 - RNA, 32 nt, Homo Sapiens
cugcgucccugcgcuccaacguccgcgcggcc

SEQ ID NO: 56096 - RNA, 32 nt, Homo Sapiens
ccgagcaggcucucuccccuccccuccccucc

SEQ ID NO: 56097 - RNA, 28 nt, Homo Sapiens
gaaauaguuacaggcacuaaaguuagua

SEQ ID NO: 56098 - RNA, 32 nt, Homo Sapiens
gucaaagaggacuuaaaaccagcugucguuuc

SEQ ID NO: 56099 - RNA, 32 nt, Homo Sapiens
auucauagagguauauaaaaauuauaacaaaa

SEQ ID NO: 56100 - RNA, 32 nt, Homo Sapiens
ccaaaaacaacccaacaaaaaugccaggugau

SEQ ID NO: 56101 - RNA, 32 nt, Homo Sapiens
uuauaccacaguggagagcgggucacaggaca

SEQ ID NO: 56102 - RNA, 32 nt, Homo Sapiens
ccacuuaugugccucugcuccgagggccagug

SEQ ID NO: 56103 - RNA, 32 nt, Homo Sapiens
guugcccaccccagcccucugguccaucccuc

SEQ ID NO: 56104 - RNA, 32 nt, Homo Sapiens
ugcuuccuggaaagcuucauguugaaagaacc

SEQ ID NO: 56105 - RNA, 32 nt, Homo Sapiens
uugcuuucugaaggaaugguccagugagguga

SEQ ID NO: 56106 - RNA, 32 nt, Homo Sapiens
aauuuugguucccaggguugcacuggacuugg

SEQ ID NO: 56107 - RNA, 32 nt, Homo Sapiens
ucaugauaaaaugugaaguagaaaagaaucaa

SEQ ID NO: 56108 - RNA, 32 nt, Homo Sapiens
agggaacauuuuaauuuaauguagugaagaaa

SEQ ID NO: 56109 - RNA, 29 nt, Homo Sapiens
aaguguuuaaagcaauauuuucuggaaua

SEQ ID NO: 56110 - RNA, 32 nt, Homo Sapiens
uuuuaguuuguguucuaauacuaacaagcuau

SEQ ID NO: 56111 - RNA, 32 nt, Homo Sapiens
cugcucuuuuuccuaauggcuauauuaucuau

SEQ ID NO: 56112 - RNA, 32 nt, Homo Sapiens
cccccuuauagcaucucccuccaggaagcugc

SEQ ID NO: 56113 - RNA, 32 nt, Homo Sapiens
ccgagcggcaauggggugggcgccguuccuga

SEQ ID NO: 56114 - RNA, 32 nt, Homo Sapiens
uaaagagcuugaguuaaaucuagguacaguua

SEQ ID NO: 56115 - RNA, 32 nt, Homo Sapiens
cugcugcugcucgggcagcugcaccaccugca

SEQ ID NO: 56116 - RNA, 32 nt, Homo Sapiens
uuaaauuuucauucuuaccaaaacaguuaacu

SEQ ID NO: 56117 - RNA, 32 nt, Homo Sapiens
auagcagaggauguaagcaauauuauuguuug

SEQ ID NO: 56118 - RNA, 32 nt, Homo Sapiens
acuaggcguaagaaacaaacucacccauccaa

SEQ ID NO: 56119 - RNA, 32 nt, Homo Sapiens
acgggcuacaaauuaugcuguuuucuaaagaa

SEQ ID NO: 56120 - RNA, 32 nt, Homo Sapiens
cagcccuugcccccggcccucucauucccacu

SEQ ID NO: 56121 - RNA, 32 nt, Homo Sapiens
agaagaaugccacacacaaauaugacucauuu

SEQ ID NO: 56122 - RNA, 32 nt, Homo Sapiens
guuuuguugaguuuccaaauggaugaauuuuc

SEQ ID NO: 56123 - RNA, 32 nt, Homo Sapiens
uauuucuguuucuuuuaaccguucucaggagc

SEQ ID NO: 56124 - RNA, 32 nt, Homo Sapiens
gaacucagccucacuagaucaacggaccaaau

SEQ ID NO: 56125 - RNA, 32 nt, Homo Sapiens
ugcaacugagguuuacaacaugaugcuaugga

SEQ ID NO: 56126 - RNA, 32 nt, Homo Sapiens
cuggugucggugccgcgcuuuuacccccaagu

SEQ ID NO: 56127 - RNA, 32 nt, Homo Sapiens
uuucuugguguuuguugucuccagguguaagc

SEQ ID NO: 56128 - RNA, 32 nt, Homo Sapiens
uuuacagaacuaagagaucuuguuucuauuag

SEQ ID NO: 56129 - RNA, 32 nt, Homo Sapiens
ccuugcugccucaggaccuucaagauuccauc

SEQ ID NO: 56130 - RNA, 32 nt, Homo Sapiens
gcccgugacccaggcguccggcugcugucccc

SEQ ID NO: 56131 - RNA, 30 nt, Homo Sapiens
cugccugucuguggaaugggagguuggauu

SEQ ID NO: 56132 - RNA, 32 nt, Homo Sapiens
gaucaguccagagcuucuucgaaugguccaca

SEQ ID NO: 56133 - RNA, 32 nt, Homo Sapiens
cuugguccaaauacaucugugggguguuuugu

SEQ ID NO: 56134 - RNA, 32 nt, Homo Sapiens
guccggcacgcgagauggagcgccguggauuu

SEQ ID NO: 56135 - RNA, 32 nt, Homo Sapiens
gugccuuuugaagauacacaaaacacugagga

SEQ ID NO: 56136 - RNA, 32 nt, Homo Sapiens
cuuguccuggaggugauguuagguaaugguga

SEQ ID NO: 56137 - RNA, 32 nt, Homo Sapiens
gguaagaaacaaaaaagaaagaaugagucuuc

SEQ ID NO: 56138 - RNA, 32 nt, Homo Sapiens
ucaaaaaucaucuucuaguugguuuguuagaa

SEQ ID NO: 56139 - RNA, 32 nt, Homo Sapiens
uuuuucagagcguuguaccggcacuuuauaua

SEQ ID NO: 56140 - RNA, 32 nt, Homo Sapiens
cugagcucgcggcucacgcugagagggacacg

SEQ ID NO: 56141 - RNA, 32 nt, Homo Sapiens
auaaagagcugcuggugaacuccaucucauuc

SEQ ID NO: 56142 - RNA, 32 nt, Homo Sapiens
ucacuuucagcacuauugacauuuggggcugg

SEQ ID NO: 56143 - RNA, 32 nt, Homo Sapiens
aagaaaagagguuuauacugcaaaagaaguga

SEQ ID NO: 56144 - RNA, 32 nt, Homo Sapiens
ggcccugugccccuccuccccauccauggucc

SEQ ID NO: 56145 - RNA, 32 nt, Homo Sapiens
ggcauucuccagauucuuuuuaaaagauuugu

SEQ ID NO: 56146 - RNA, 32 nt, Homo Sapiens
ccgaacuccgcggcggcggcugcccucucgcc

SEQ ID NO: 56147 - RNA, 32 nt, Homo Sapiens
cuggaggauuaaaacaaacaaacaaaaaaaac

SEQ ID NO: 56148 - RNA, 32 nt, Homo Sapiens
agcugucucuuaacugguuucuuugucuccaa

SEQ ID NO: 56149 - RNA, 32 nt, Homo Sapiens
ugccugcuccgucuucgcucaccagacacuca

SEQ ID NO: 56150 - RNA, 32 nt, Homo Sapiens
gggaagcugggguuggccguccuucuagcuug

SEQ ID NO: 56151 - RNA, 32 nt, Homo Sapiens
uuuuuuauucagaauuuuucucagauauauag

SEQ ID NO: 56152 - RNA, 32 nt, Homo Sapiens
gagguggugguggacaggaaggacuugggaag

SEQ ID NO: 56153 - RNA, 32 nt, Homo Sapiens
ccugaguuguaggaacugcuuuccaacuccaa

SEQ ID NO: 56154 - RNA, 32 nt, Homo Sapiens
gguuuuuaucuaaucagauauucauugauuac

SEQ ID NO: 56155 - RNA, 32 nt, Homo Sapiens
uguucaucucuuaggcuuccauuuggaugggc

SEQ ID NO: 56156 - RNA, 32 nt, Homo Sapiens
ggaccgcgcugcgcuccgcggccacugcgcgc

SEQ ID NO: 56157 - RNA, 32 nt, Homo Sapiens
ccgccccaccggaccucguccucccccugcac

SEQ ID NO: 56158 - RNA, 32 nt, Homo Sapiens
cucuuucccgauaaaggcuggugcugaccucu

SEQ ID NO: 56159 - RNA, 32 nt, Homo Sapiens
uugguugacaacaucuaagacaauauuagugg

SEQ ID NO: 56160 - RNA, 32 nt, Homo Sapiens
cgggcucuguucauucaugauugguacucggc

SEQ ID NO: 56161 - RNA, 32 nt, Homo Sapiens
auccagucacucccaacagcguccagcacaca

SEQ ID NO: 56162 - RNA, 32 nt, Homo Sapiens
cgagcaggcucucuccccuccccuccccuccc

SEQ ID NO: 56163 - RNA, 32 nt, Homo Sapiens
gaaguuuucugcaccugugauaacaagcccac

SEQ ID NO: 56164 - RNA, 32 nt, Homo Sapiens
uugcucacuacccuccuucucccuguccaccc

SEQ ID NO: 56165 - RNA, 32 nt, Homo Sapiens
aaaagcaauucuaguguaaaucaugcaagcgc

SEQ ID NO: 56166 - RNA, 32 nt, Homo Sapiens
gggaugugaugaugauuguugggauugaaaaa

SEQ ID NO: 56167 - RNA, 32 nt, Homo Sapiens
gggcgggggcacccgggcaggggugccagaua

SEQ ID NO: 56168 - RNA, 32 nt, Homo Sapiens
ccccuuaauguuuuugcuucuaaauuguaccu

SEQ ID NO: 56169 - RNA, 32 nt, Homo Sapiens
uccccucggcaaaccugucuaauuggggcggg

SEQ ID NO: 56170 - RNA, 32 nt, Homo Sapiens
uucaucccagcugcuucagaacguaugcucaa

SEQ ID NO: 56171 - RNA, 30 nt, Homo Sapiens
agggcugccugugcuggacugaggcuugug

SEQ ID NO: 56172 - RNA, 32 nt, Homo Sapiens
agcaagaagaacugggccugucuggaguacgu

SEQ ID NO: 56173 - RNA, 32 nt, Homo Sapiens
ugauauuuuuaaaauacauuuuguugcuaaaa

SEQ ID NO: 56174 - RNA, 32 nt, Homo Sapiens
ggaugucagggcagcucugugcaucugaggcc

SEQ ID NO: 56175 - RNA, 32 nt, Homo Sapiens
acaaaaagguaacacgugauguggugcaagaa

SEQ ID NO: 56176 - RNA, 32 nt, Homo Sapiens
cugcucccagcuccacgacguguuugaggacc

SEQ ID NO: 56177 - RNA, 32 nt, Homo Sapiens
uuaucagaagccauuccaucauuauagacccu

SEQ ID NO: 56178 - RNA, 32 nt, Homo Sapiens
uaaucuguuccauuguuucagaaucuuuuuau

SEQ ID NO: 56179 - RNA, 32 nt, Homo Sapiens
ggcgcuuugucaugggaccugugcgguuggga

SEQ ID NO: 56180 - RNA, 32 nt, Homo Sapiens
uagguugugcggcggcagcggcucuucccugg

SEQ ID NO: 56181 - RNA, 32 nt, Homo Sapiens
caggaauccccucacagugggcgacagaucug

SEQ ID NO: 56182 - RNA, 32 nt, Homo Sapiens
cccgucuguauauagacauauauccucuuuuu

SEQ ID NO: 56183 - RNA, 32 nt, Homo Sapiens
caaaguuuuaucauugcuauuuauuuuuaccu

SEQ ID NO: 56184 - RNA, 32 nt, Homo Sapiens
aacuuuuuuaugucucauucuuuaaacauuaa

SEQ ID NO: 56185 - RNA, 32 nt, Homo Sapiens
ugagguccaggagcggagcccgcggccaccgc

SEQ ID NO: 56186 - RNA, 32 nt, Homo Sapiens
gucccuuccuucccugaaacccugcucuauug

SEQ ID NO: 56187 - RNA, 32 nt, Homo Sapiens
aguaggauucagagucucuucuccuagccauu

SEQ ID NO: 56188 - RNA, 32 nt, Homo Sapiens
ucaagcuuaccguaaguuuucuuaggauuuau

SEQ ID NO: 56189 - RNA, 32 nt, Homo Sapiens
aagggaaaggaauggauuccccugccuggagc

SEQ ID NO: 56190 - RNA, 32 nt, Homo Sapiens
agacaaagaauuuuauacuuuuacuaauguuu

SEQ ID NO: 56191 - RNA, 32 nt, Homo Sapiens
ucaugugucaaaccucucuuccugacgggaau

SEQ ID NO: 56192 - RNA, 32 nt, Homo Sapiens
guguccuggguuuucgugaugaucuuugcucu

SEQ ID NO: 56193 - RNA, 32 nt, Homo Sapiens
ccgagcgaggugauagaggcggcggcccaggc

SEQ ID NO: 56194 - RNA, 32 nt, Homo Sapiens
gugcagauaugucuccuucuuuaggaagaaua

SEQ ID NO: 56195 - RNA, 32 nt, Homo Sapiens
gucccccaaacacaagcacaucacaccuccca

SEQ ID NO: 56196 - RNA, 32 nt, Homo Sapiens
auuuacuccugaauuaauauauuacuuguuau

SEQ ID NO: 56197 - RNA, 32 nt, Homo Sapiens
cggccgaguucgcgggcagggggcgccgggac

SEQ ID NO: 56198 - RNA, 32 nt, Homo Sapiens
guagcgccuggcgcccccggcgcgcaaggccg

SEQ ID NO: 56199 - RNA, 32 nt, Homo Sapiens
cgcgcggagggagaggaaaugagugcggcggc

SEQ ID NO: 56200 - RNA, 32 nt, Homo Sapiens
uggacauccugcagaccgugucguccggcugu

SEQ ID NO: 56201 - RNA, 32 nt, Homo Sapiens
ucauucuggggauaaaggggaacuaggcuagc

SEQ ID NO: 56202 - RNA, 32 nt, Homo Sapiens
uucagguagagagagaaagugcaugcgguaug

SEQ ID NO: 56203 - RNA, 32 nt, Homo Sapiens
gaauauaucucuauuugagaauagacccuuac

SEQ ID NO: 56204 - RNA, 32 nt, Homo Sapiens
uggggggccgcgggcgggaggcggauaaaaag

SEQ ID NO: 56205 - RNA, 32 nt, Homo Sapiens
ucuguguuuucccuuuucuuucuggggccagg

SEQ ID NO: 56206 - RNA, 32 nt, Homo Sapiens
uguguauacuuauguguguguaugugugagug

SEQ ID NO: 56207 - RNA, 32 nt, Homo Sapiens
gaauaguuugaagcuaauaccaucaggcucag

SEQ ID NO: 56208 - RNA, 32 nt, Homo Sapiens
auggauaaauuccaucucugggaauugugugg

SEQ ID NO: 56209 - RNA, 32 nt, Homo Sapiens
gagacgaacuccugggguuuugccuaagagga

SEQ ID NO: 56210 - RNA, 32 nt, Homo Sapiens
ccuggacccuggugagcgaaccccaagccacc

SEQ ID NO: 56211 - RNA, 32 nt, Homo Sapiens
uacuuuauuuuugugccuucugaacggaucua

SEQ ID NO: 56212 - RNA, 32 nt, Homo Sapiens
ugcagguucuucauacagcugccucugccaau

SEQ ID NO: 56213 - RNA, 32 nt, Homo Sapiens
gaaaaguugcuguucuauuuucugaacucuuu

SEQ ID NO: 56214 - RNA, 32 nt, Homo Sapiens
cggggaggcugcagcgcagagcagcggggcug

SEQ ID NO: 56215 - RNA, 32 nt, Homo Sapiens
uauucagagcauuuuuaccucucucuuaaaug

SEQ ID NO: 56216 - RNA, 32 nt, Homo Sapiens
uacuuggauaucaagacuaagugcugauauga

SEQ ID NO: 56217 - RNA, 32 nt, Homo Sapiens
augaaauguacaaaaaccguuacuaacuggac

SEQ ID NO: 56218 - RNA, 32 nt, Homo Sapiens
accugagcacgcuguggcccagcgggccugcg

SEQ ID NO: 56219 - RNA, 32 nt, Homo Sapiens
agaaaggggcuuugggcucugccccucuggcu

SEQ ID NO: 56220 - RNA, 32 nt, Homo Sapiens
cauccucccgcacccacgagcaucuuucaaaa

SEQ ID NO: 56221 - RNA, 32 nt, Homo Sapiens
ugagaggcggcugaagaguugcuguauucugg

SEQ ID NO: 56222 - RNA, 29 nt, Homo Sapiens
uuuuuucuuguccgggugcgcucagucac

SEQ ID NO: 56223 - RNA, 32 nt, Homo Sapiens
cucgguguugcuccucccggcgcugacuucga

SEQ ID NO: 56224 - RNA, 32 nt, Homo Sapiens
agaggcuccagaaauguuugcugaguuagaag

SEQ ID NO: 56225 - RNA, 32 nt, Homo Sapiens
uaaaauugccccaccugcucuagauggaucuu

SEQ ID NO: 56226 - RNA, 32 nt, Homo Sapiens
ccuauaucauaucuguucucaacuuuguuuga

SEQ ID NO: 56227 - RNA, 28 nt, Homo Sapiens
aggcuggggcggcuguggagccuguggu

SEQ ID NO: 56228 - RNA, 32 nt, Homo Sapiens
uuagaaaggccgcauccuccccgagcccuuau

SEQ ID NO: 56229 - RNA, 32 nt, Homo Sapiens
agguuauaucuaggacaacucuuugaguuggu

SEQ ID NO: 56230 - RNA, 32 nt, Homo Sapiens
uuuuaucacauuaagaggcucuccaugcacaa

SEQ ID NO: 56231 - RNA, 32 nt, Homo Sapiens
aggaaagcauuuuaucuccacagcaauccuau

SEQ ID NO: 56232 - RNA, 32 nt, Homo Sapiens
caugaacauggccugggaauguguuagacaug

SEQ ID NO: 56233 - RNA, 32 nt, Homo Sapiens
ggggauaaugggagauuuagauaauguaucca

SEQ ID NO: 56234 - RNA, 32 nt, Homo Sapiens
gggccucuuggggcaccuaagacagcaccccc

SEQ ID NO: 56235 - RNA, 32 nt, Homo Sapiens
cuucuaaggggggagggaaaggggggagauuu

SEQ ID NO: 56236 - RNA, 32 nt, Homo Sapiens
ucccucgcaugucucccuccaguccucuguac

SEQ ID NO: 56237 - RNA, 32 nt, Homo Sapiens
augagauagaaaguguuaggaguuauccucuu

SEQ ID NO: 56238 - RNA, 32 nt, Homo Sapiens
uuacuccaucagcuccucccaggaucacacgc

SEQ ID NO: 56239 - RNA, 32 nt, Homo Sapiens
gacauggcagguaaugagccggacgaggggag

SEQ ID NO: 56240 - RNA, 32 nt, Homo Sapiens
uaguuuaaaaaauuauaaaugaaucuaaucaa

SEQ ID NO: 56241 - RNA, 32 nt, Homo Sapiens
cugcucuuuccacuugcccuguguucuuuccc

SEQ ID NO: 56242 - RNA, 32 nt, Homo Sapiens
uguuuuguuucugaaaauuccagaaaggauau

SEQ ID NO: 56243 - RNA, 32 nt, Homo Sapiens
ugcuaggccacccuccucccuucccaugcuug

SEQ ID NO: 56244 - RNA, 32 nt, Homo Sapiens
gcccaggugagcauggagcaucuccuaggcuc

SEQ ID NO: 56245 - RNA, 32 nt, Homo Sapiens
cugauuuucuaaaauuauuggauuuguauuuu

SEQ ID NO: 56246 - RNA, 31 nt, Homo Sapiens
uauugaggauuugaugcgacggccucacggg

SEQ ID NO: 56247 - RNA, 32 nt, Homo Sapiens
gaccagguggacuuccaccuccagccucuggu

SEQ ID NO: 56248 - RNA, 29 nt, Homo Sapiens
ugcucugugacuuuaguuugccuuuaaag

SEQ ID NO: 56249 - RNA, 30 nt, Homo Sapiens
gugucccaaccggugccgccgccggagcuu

SEQ ID NO: 56250 - RNA, 32 nt, Homo Sapiens
cccaccuccccggcugcucccggagggcucac

SEQ ID NO: 56251 - RNA, 32 nt, Homo Sapiens
uguggugcuguccauggacagcagccacuccu

SEQ ID NO: 56252 - RNA, 32 nt, Homo Sapiens
acuuaccauccacaaugcaccacggaagaggc

SEQ ID NO: 56253 - RNA, 32 nt, Homo Sapiens
cggugcuggacgugucgcugcugcugcugcug

SEQ ID NO: 56254 - RNA, 32 nt, Homo Sapiens
ugagaagcagugccuuggucuuguuucugugg

SEQ ID NO: 56255 - RNA, 32 nt, Homo Sapiens
uggcguauugcccuugcggaggaggcggugca

SEQ ID NO: 56256 - RNA, 32 nt, Homo Sapiens
uguuggaaaaauuuauuucaauaccuuuuaga

SEQ ID NO: 56257 - RNA, 32 nt, Homo Sapiens
ugccuuuggccaugauucucaacacugauugu

SEQ ID NO: 56258 - RNA, 32 nt, Homo Sapiens
aguccccgcgcgccacccgcaaguucuccucg

SEQ ID NO: 56259 - RNA, 32 nt, Homo Sapiens
ggaguuggaagacaaggaugugguccuggcuc

SEQ ID NO: 56260 - RNA, 32 nt, Homo Sapiens
agauucccagcauggcauugagaagguccaau

SEQ ID NO: 56261 - RNA, 32 nt, Homo Sapiens
guuaaccuccugacugucguguuuccuuuuua

SEQ ID NO: 56262 - RNA, 32 nt, Homo Sapiens
aggagucugaggaggagaaucacuugaaccug

SEQ ID NO: 56263 - RNA, 32 nt, Homo Sapiens
agauauuuuuaaagccacugcuuauucuuugu

SEQ ID NO: 56264 - RNA, 32 nt, Homo Sapiens
uggcauccacacuggacagcagggaggagggg

SEQ ID NO: 56265 - RNA, 32 nt, Homo Sapiens
gauaggagggggcggcagggcugggccuugug

SEQ ID NO: 56266 - RNA, 32 nt, Homo Sapiens
acaucuucgacacagaaaaagagaaauaugag

SEQ ID NO: 56267 - RNA, 32 nt, Homo Sapiens
uuucaugcaggaaucagaugccucgaauuucc

SEQ ID NO: 56268 - RNA, 32 nt, Homo Sapiens
uccacagugucugccagaguuuaguucuuuau

SEQ ID NO: 56269 - RNA, 32 nt, Homo Sapiens
ucaaucuguauauauuguaccuuaauaugaaa

SEQ ID NO: 56270 - RNA, 32 nt, Homo Sapiens
ggcgcuagucccauucuugugggcuuuauucu

SEQ ID NO: 56271 - RNA, 32 nt, Homo Sapiens
uugauuccauucucagcuccaagcauuaggua

SEQ ID NO: 56272 - RNA, 32 nt, Homo Sapiens
gaaaggcuauuuagccacucugcauauuuaau

SEQ ID NO: 56273 - RNA, 32 nt, Homo Sapiens
uggaugcuggguaacccagagguaaugugggu

SEQ ID NO: 56274 - RNA, 32 nt, Homo Sapiens
caggacauguugcggcagcugcgugaguacca

SEQ ID NO: 56275 - RNA, 32 nt, Homo Sapiens
agugcgaaucaugggaggcggcuggugguggg

SEQ ID NO: 56276 - RNA, 32 nt, Homo Sapiens
uuugacccuggccacuuucuagauaagaaugg

SEQ ID NO: 56277 - RNA, 30 nt, Homo Sapiens
gaacagacugaccuugaugagcugugcaca

SEQ ID NO: 56278 - RNA, 32 nt, Homo Sapiens
guauuuauuuuugucaaauugcaggaaacauc

SEQ ID NO: 56279 - RNA, 31 nt, Homo Sapiens
uuccugcuggccugccugcacgggggugcgg

SEQ ID NO: 56280 - RNA, 32 nt, Homo Sapiens
ugaguacuaacagguuguccugucccauaccu

SEQ ID NO: 56281 - RNA, 32 nt, Homo Sapiens
cccgaggggcugaaagugacuuaucacuccca

SEQ ID NO: 56282 - RNA, 32 nt, Homo Sapiens
ggccucacaaguuuuucuuuuuuaagcaauuu

SEQ ID NO: 56283 - RNA, 32 nt, Homo Sapiens
uuggagauaauuaucuuucuguaaguucguua

SEQ ID NO: 56284 - RNA, 32 nt, Homo Sapiens
ucugguucuaggccuuugacaccugauaauau

SEQ ID NO: 56285 - RNA, 32 nt, Homo Sapiens
ccggucagcaaccuuggcauugauacauaggc

SEQ ID NO: 56286 - RNA, 32 nt, Homo Sapiens
agagguggcaggggcggggcggcuggcgguag

SEQ ID NO: 56287 - RNA, 32 nt, Homo Sapiens
ccuauaaaauuccagcacuuugggaggccaag

SEQ ID NO: 56288 - RNA, 32 nt, Homo Sapiens
aguguccugggccccugacaggcgcuggcugu

SEQ ID NO: 56289 - RNA, 32 nt, Homo Sapiens
ggugucuuuucuuuuucuuucuuuaguuccug

SEQ ID NO: 56290 - RNA, 32 nt, Homo Sapiens
caacauucaagucugcauucugcacaagauag

SEQ ID NO: 56291 - RNA, 32 nt, Homo Sapiens
uuugugacuguccuuauuaacuuucuuuuaug

SEQ ID NO: 56292 - RNA, 32 nt, Homo Sapiens
ucuaauuaucugauuuuuuuuauuggucuugu

SEQ ID NO: 56293 - RNA, 32 nt, Homo Sapiens
auaagacugaacuuaaauguguuaauuuuagu

SEQ ID NO: 56294 - RNA, 32 nt, Homo Sapiens
uguggauccuuguuccucuccugaccccaucu

SEQ ID NO: 56295 - RNA, 32 nt, Homo Sapiens
agugcccccaggacuccugggcccugcuuccc

SEQ ID NO: 56296 - RNA, 32 nt, Homo Sapiens
ugagccaggaggaagcagcggcgaggucugcg

SEQ ID NO: 56297 - RNA, 32 nt, Homo Sapiens
cacuggggacugccacugaggacuccccgagc

SEQ ID NO: 56298 - RNA, 32 nt, Homo Sapiens
gccaggugaggugggagguuggagagccaggu

SEQ ID NO: 56299 - RNA, 32 nt, Homo Sapiens
gauuccugucaaccaggccaccucuccuucag

SEQ ID NO: 56300 - RNA, 32 nt, Homo Sapiens
gugcgucccccuccucuuccagcaggucuaua

SEQ ID NO: 56301 - RNA, 32 nt, Homo Sapiens
agguccugcccgcuccgguuccggcuccuucg

SEQ ID NO: 56302 - RNA, 32 nt, Homo Sapiens
ugccuucagacagcucuugguuaugguuacaa

SEQ ID NO: 56303 - RNA, 32 nt, Homo Sapiens
agacucuaaaaauuauaaagguuuagacuugg

SEQ ID NO: 56304 - RNA, 32 nt, Homo Sapiens
ggaaggcagaucuggccucagcuaugagggug

SEQ ID NO: 56305 - RNA, 32 nt, Homo Sapiens
uuucacagaaacccucccucaugacagauuug

SEQ ID NO: 56306 - RNA, 32 nt, Homo Sapiens
auccuguguauugacaagcaucaggauuccag

SEQ ID NO: 56307 - RNA, 32 nt, Homo Sapiens
auauacccaaaauuaacuuaugcucauauauu

SEQ ID NO: 56308 - RNA, 32 nt, Homo Sapiens
uccgauucaaccaguacuucaaggugaagccu

SEQ ID NO: 56309 - RNA, 32 nt, Homo Sapiens
cugccacgcuuccuguacagccugcagaacug

SEQ ID NO: 56310 - RNA, 32 nt, Homo Sapiens
uucccuucccugcuguucuauuuccuuugagu

SEQ ID NO: 56311 - RNA, 29 nt, Homo Sapiens
ucuuguucuauccaggcccucaacaaauu

SEQ ID NO: 56312 - RNA, 32 nt, Homo Sapiens
aguaguguuuuaagguucugauaucgaauuaa

SEQ ID NO: 56313 - RNA, 32 nt, Homo Sapiens
ccagaauuugaaaaugugauaaagagguuauu

SEQ ID NO: 56314 - RNA, 32 nt, Homo Sapiens
guggcuuccagggccaacucaaggaugugcag

SEQ ID NO: 56315 - RNA, 32 nt, Homo Sapiens
uucuugaaaggaagucagauuucauagaugga

SEQ ID NO: 56316 - RNA, 32 nt, Homo Sapiens
ugcucaaugcgugcuaugugcaacuccucagg

SEQ ID NO: 56317 - RNA, 32 nt, Homo Sapiens
acucagaggagcugcaaauugccugcaaaaau

SEQ ID NO: 56318 - RNA, 30 nt, Homo Sapiens
ccagggugcaggcgcgcaccgcccaacccc

SEQ ID NO: 56319 - RNA, 32 nt, Homo Sapiens
agaaaaauauaaaggguccaagcuguauagua

SEQ ID NO: 56320 - RNA, 32 nt, Homo Sapiens
agggguuccuuccccaacccuuuucagcagcg

SEQ ID NO: 56321 - RNA, 32 nt, Homo Sapiens
ccaguuuccuucccuggaacccugcagagcuc

SEQ ID NO: 56322 - RNA, 32 nt, Homo Sapiens
ccgccucuguugcucucggagccccggcuucc

SEQ ID NO: 56323 - RNA, 32 nt, Homo Sapiens
uuaagauaacagaagugaccaauguaauuuca

SEQ ID NO: 56324 - RNA, 32 nt, Homo Sapiens
cugaggcugcggccagcagagcccaggccagg

SEQ ID NO: 56325 - RNA, 32 nt, Homo Sapiens
cucuagccuccgcuucucuaucuccuacaggc

SEQ ID NO: 56326 - RNA, 32 nt, Homo Sapiens
uccccucuucucagcuucccaaggagcuggga

SEQ ID NO: 56327 - RNA, 32 nt, Homo Sapiens
gccucugguggagguagcuccuaaaaugaaca

SEQ ID NO: 56328 - RNA, 32 nt, Homo Sapiens
ggaguuugcuguuucagccugagacaccgggg

SEQ ID NO: 56329 - RNA, 32 nt, Homo Sapiens
ucccuccaucccauccccuccccucccccccg

SEQ ID NO: 56330 - RNA, 32 nt, Homo Sapiens
agggcuucgcgaucuugggggacccauuccga

SEQ ID NO: 56331 - RNA, 29 nt, Homo Sapiens
cagccugggggacagagcaaggcuccguc

SEQ ID NO: 56332 - RNA, 32 nt, Homo Sapiens
gggagauuuggcucugaggugugucauuuaaa

SEQ ID NO: 56333 - RNA, 32 nt, Homo Sapiens
aucuguacuuuuuaaagauucuuaagugauuc

SEQ ID NO: 56334 - RNA, 32 nt, Homo Sapiens
cuauugaguuggaugggaaaagggacaagcag

SEQ ID NO: 56335 - RNA, 32 nt, Homo Sapiens
ucgcguccguccgcccguccgcccgcccagcc

SEQ ID NO: 56336 - RNA, 32 nt, Homo Sapiens
ggcagcagguacugccugaggaauuugcaagu

SEQ ID NO: 56337 - RNA, 32 nt, Homo Sapiens
accaguuguaauagagucaaauuuaugugagc

SEQ ID NO: 56338 - RNA, 32 nt, Homo Sapiens
uaucuagccuucagaauauaaaauucaacaaa

SEQ ID NO: 56339 - RNA, 32 nt, Homo Sapiens
caguuauacacagaaacaaacacacacgcacg

SEQ ID NO: 56340 - RNA, 32 nt, Homo Sapiens
gaucccaccagccccagaacccucuggggaag

SEQ ID NO: 56341 - RNA, 32 nt, Homo Sapiens
uguauaauguucaguuuguaacuuuuuaaaag

SEQ ID NO: 56342 - RNA, 32 nt, Homo Sapiens
gaggccccuggaagccagcagggccuugccag

SEQ ID NO: 56343 - RNA, 32 nt, Homo Sapiens
caaagacuccacuggaggaaacaagccccugu

SEQ ID NO: 56344 - RNA, 32 nt, Homo Sapiens
aguuauuuuuauugucuuuuacuuuucuacau

SEQ ID NO: 56345 - RNA, 32 nt, Homo Sapiens
uugucaugaaguuaggagaccacaaagccauu

SEQ ID NO: 56346 - RNA, 32 nt, Homo Sapiens
gucugaaaaccaguuucaucaauacuguugau

SEQ ID NO: 56347 - RNA, 32 nt, Homo Sapiens
uuuuccggucucuucggguccuuuuuccucuc

SEQ ID NO: 56348 - RNA, 32 nt, Homo Sapiens
ugcauauagaaagacagaaaucuagcucuacc

SEQ ID NO: 56349 - RNA, 32 nt, Homo Sapiens
ucucugaacugugaucuuuguccucaugaacu

SEQ ID NO: 56350 - RNA, 32 nt, Homo Sapiens
ugggcagggaagacauaacagauggaagcaaa

SEQ ID NO: 56351 - RNA, 32 nt, Homo Sapiens
aauuauauuaucuauuuaggcauuaauauaaa

SEQ ID NO: 56352 - RNA, 32 nt, Homo Sapiens
uggggcagcucuugucuuggagccgucaggca

SEQ ID NO: 56353 - RNA, 32 nt, Homo Sapiens
ugccagcccagcuggccuggcccccagcuuca

SEQ ID NO: 56354 - RNA, 32 nt, Homo Sapiens
ugagguuuuucuuuaagaaugagcuucguccu

SEQ ID NO: 56355 - RNA, 32 nt, Homo Sapiens
ccagcccuggggagugggcagggccuguuuuc

SEQ ID NO: 56356 - RNA, 32 nt, Homo Sapiens
cauggugguuugcugcaccuaucaacccauca

SEQ ID NO: 56357 - RNA, 32 nt, Homo Sapiens
cagaguccgucccaggucugucugacaucugu

SEQ ID NO: 56358 - RNA, 32 nt, Homo Sapiens
ccacugucaugcccggccuguggacagccaga

SEQ ID NO: 56359 - RNA, 32 nt, Homo Sapiens
ugcuugacugguuucaagcuucaucaugaaaa

SEQ ID NO: 56360 - RNA, 32 nt, Homo Sapiens
ccuugccccuggauaucagcaauauauuauaa

SEQ ID NO: 56361 - RNA, 32 nt, Homo Sapiens
cucaggagaguggcuggugccuugucccaggg

SEQ ID NO: 56362 - RNA, 32 nt, Homo Sapiens
ugccucccuggcuggggcgucccggccaaggu

SEQ ID NO: 56363 - RNA, 32 nt, Homo Sapiens
gugaaacuggaaagauugguguggcugagaau

SEQ ID NO: 56364 - RNA, 32 nt, Homo Sapiens
auuauccuuguagaggcccccuggauggcacc

SEQ ID NO: 56365 - RNA, 32 nt, Homo Sapiens
gagacuggcagccagggagcccggggcagagc

SEQ ID NO: 56366 - RNA, 32 nt, Homo Sapiens
auacacaaaaugaaacaaaagaaacaauuuaa

SEQ ID NO: 56367 - RNA, 29 nt, Homo Sapiens
ugcaugcucacuuuccugcuuggaugugu

SEQ ID NO: 56368 - RNA, 32 nt, Homo Sapiens
gccgcgagcacgagcgggccgggcugcacgag

SEQ ID NO: 56369 - RNA, 32 nt, Homo Sapiens
ugggcagaugccccggccccagggcuuccccc

SEQ ID NO: 56370 - RNA, 32 nt, Homo Sapiens
uugaacuucuauuuagcaccagugcacuaauu

SEQ ID NO: 56371 - RNA, 32 nt, Homo Sapiens
uaagaguccuauuugccccaguuaauucaacu

SEQ ID NO: 56372 - RNA, 32 nt, Homo Sapiens
caguucauauccuauggaacuaguuuuccaca

SEQ ID NO: 56373 - RNA, 32 nt, Homo Sapiens
uuagucucuuggagaagcuggugcugugagcc

SEQ ID NO: 56374 - RNA, 32 nt, Homo Sapiens
ggacaguaaauauuugaaauuuuccuaggauc

SEQ ID NO: 56375 - RNA, 32 nt, Homo Sapiens
uggaacccaagccuugagguuucagccugggc

SEQ ID NO: 56376 - RNA, 32 nt, Homo Sapiens
gacagagagaaaaccaacuuuuuucauaugau

SEQ ID NO: 56377 - RNA, 32 nt, Homo Sapiens
auaguuguauuaugugaauuguaauuaugacc

SEQ ID NO: 56378 - RNA, 32 nt, Homo Sapiens
aaaacuacagcagccaaagaaacuauauauau

SEQ ID NO: 56379 - RNA, 32 nt, Homo Sapiens
cagacagccgccucuaggggcuggguucugcu

SEQ ID NO: 56380 - RNA, 32 nt, Homo Sapiens
uguugucggguauguuaaauuugagcugacag

SEQ ID NO: 56381 - RNA, 32 nt, Homo Sapiens
cugguuucaaccaguucaggaaugagguuauu

SEQ ID NO: 56382 - RNA, 32 nt, Homo Sapiens
cuugcccaucagagacccggacacggccuggu

SEQ ID NO: 56383 - RNA, 32 nt, Homo Sapiens
ccagcccuuuuggagguuacauuguuauucuc

SEQ ID NO: 56384 - RNA, 32 nt, Homo Sapiens
guuacaauuauacuuucagcuaacauaugcca

SEQ ID NO: 56385 - RNA, 32 nt, Homo Sapiens
ccauucccuuugcauguuaagcgucugcucag

SEQ ID NO: 56386 - RNA, 32 nt, Homo Sapiens
agcacuucgaggaggaggaggaggccggggug

SEQ ID NO: 56387 - RNA, 32 nt, Homo Sapiens
ugccaaggcugcaagaccugcugcuggagggu

SEQ ID NO: 56388 - RNA, 31 nt, Homo Sapiens
cuucggagugagcgcgaagugcuggugagca

SEQ ID NO: 56389 - RNA, 32 nt, Homo Sapiens
uccacagaagcucugcugaacucuagaaaucu

SEQ ID NO: 56390 - RNA, 32 nt, Homo Sapiens
gcggcggaggaggagugaaggcggcggcggcg

SEQ ID NO: 56391 - RNA, 32 nt, Homo Sapiens
gcacggagcgggcgugcugagccccggccgcc

SEQ ID NO: 56392 - RNA, 32 nt, Homo Sapiens
agaaauuguaaauaucuuguagcauauucuga

SEQ ID NO: 56393 - RNA, 32 nt, Homo Sapiens
aggcacagucuggcagagguccugccauuucg

SEQ ID NO: 56394 - RNA, 27 nt, Homo Sapiens
cgauucuucugcuucagccucccgagu

SEQ ID NO: 56395 - RNA, 32 nt, Homo Sapiens
uccacacuuucuccucaccagaugccaguugc

SEQ ID NO: 56396 - RNA, 32 nt, Homo Sapiens
gaggucucuuuucucugcuccaugguucucaa

SEQ ID NO: 56397 - RNA, 32 nt, Homo Sapiens
gcauaaaccuaaaacuauucugguuuuguuau

SEQ ID NO: 56398 - RNA, 32 nt, Homo Sapiens
gcccaucgugaaacgacagcugucagccuggg

SEQ ID NO: 56399 - RNA, 32 nt, Homo Sapiens
auuuauuguaaacggugugccuaugaugcugg

SEQ ID NO: 56400 - RNA, 32 nt, Homo Sapiens
cgguaccugcucccggccgcugcccguccucc

SEQ ID NO: 56401 - RNA, 32 nt, Homo Sapiens
auaccugugauacuccucccccucucaacaau

SEQ ID NO: 56402 - RNA, 32 nt, Homo Sapiens
ugccugcucccucucucugcagaacgggcuca

SEQ ID NO: 56403 - RNA, 32 nt, Homo Sapiens
uuugaaaaacacacucuagagaugcacuguuc

SEQ ID NO: 56404 - RNA, 32 nt, Homo Sapiens
cugcgcaccauggccggguugcuggcguugcu

SEQ ID NO: 56405 - RNA, 32 nt, Homo Sapiens
ucucagguggguggagcaguggugggagaaga

SEQ ID NO: 56406 - RNA, 32 nt, Homo Sapiens
gccagucugaaagcccaccuuaauuuuuauau

SEQ ID NO: 56407 - RNA, 29 nt, Homo Sapiens
gaagauggcugcgcccuguggcucggagc

SEQ ID NO: 56408 - RNA, 32 nt, Homo Sapiens
cauuugaaaauauugucuuaugugauuuuuuc

SEQ ID NO: 56409 - RNA, 32 nt, Homo Sapiens
gcuuucaaucuguccaugcuuacccuuuuagu

SEQ ID NO: 56410 - RNA, 32 nt, Homo Sapiens
aauaggaaguugucuuuuuuugccuuccauuc

SEQ ID NO: 56411 - RNA, 32 nt, Homo Sapiens
ggacaggauuuauguagcuaaacuaauuuugc

SEQ ID NO: 56412 - RNA, 32 nt, Homo Sapiens
ccccuucgcuguccccucccccuggagggcau

SEQ ID NO: 56413 - RNA, 32 nt, Homo Sapiens
uuccccagugucugaggcccagguugacccgu

SEQ ID NO: 56414 - RNA, 32 nt, Homo Sapiens
uucuguauuucugaaaguugucuauauugaac

SEQ ID NO: 56415 - RNA, 32 nt, Homo Sapiens
uucaagagaagcuaagcggaaauggagggugg

SEQ ID NO: 56416 - RNA, 32 nt, Homo Sapiens
uaaccuuuggccuggggcagcugcaggagcgc

SEQ ID NO: 56417 - RNA, 32 nt, Homo Sapiens
ucaccucugaaauuauucuggguuuagguguc

SEQ ID NO: 56418 - RNA, 32 nt, Homo Sapiens
ucuaugaaccucugcugggcccagccccuguc

SEQ ID NO: 56419 - RNA, 32 nt, Homo Sapiens
cugagcagcuccgaccacaccauccucacacu

SEQ ID NO: 56420 - RNA, 32 nt, Homo Sapiens
aagcagucuaaauauaaucaacguacagugag

SEQ ID NO: 56421 - RNA, 32 nt, Homo Sapiens
guccccucgcggcagcagaugugugugggguc

SEQ ID NO: 56422 - RNA, 32 nt, Homo Sapiens
ggccgccucccucuucucuccaggcagguggg

SEQ ID NO: 56423 - RNA, 32 nt, Homo Sapiens
ugcaccugccccagccccuccagcuuuggagc

SEQ ID NO: 56424 - RNA, 32 nt, Homo Sapiens
cgggcgcgcgggggcgggacgcgcacgcggcg

SEQ ID NO: 56425 - RNA, 32 nt, Homo Sapiens
uugagaaacaauuuuauuuccaaaccccuuuc

SEQ ID NO: 56426 - RNA, 32 nt, Homo Sapiens
acguggcaccaaucaguucuggcacaucccaa

SEQ ID NO: 56427 - RNA, 32 nt, Homo Sapiens
uugaggagugcagggauucccugaaggaagca

SEQ ID NO: 56428 - RNA, 32 nt, Homo Sapiens
gaaaaagagugaugagaagagaauggagagaa

SEQ ID NO: 56429 - RNA, 32 nt, Homo Sapiens
cgagugaccucugggcuccgcuccucacuccu

SEQ ID NO: 56430 - RNA, 32 nt, Homo Sapiens
cuucacaagucugccuaaaguccucaaucagc

SEQ ID NO: 56431 - RNA, 32 nt, Homo Sapiens
aagucuucaaggagaagauucucccgggaaau

SEQ ID NO: 56432 - RNA, 32 nt, Homo Sapiens
augaugccaggaugaugucugccucgcgccug

SEQ ID NO: 56433 - RNA, 32 nt, Homo Sapiens
aacucuugaacgaugaugauauucagacgaag

SEQ ID NO: 56434 - RNA, 32 nt, Homo Sapiens
uggggcaguguugacaggagugaggcauuuug

SEQ ID NO: 56435 - RNA, 32 nt, Homo Sapiens
uccauagaggagaggaaaagguauaggccugc

SEQ ID NO: 56436 - RNA, 32 nt, Homo Sapiens
cagggaggccuggccuggaggaggaguccacu

SEQ ID NO: 56437 - RNA, 32 nt, Homo Sapiens
uaggagucagcucuccuuuccuugcugaggug

SEQ ID NO: 56438 - RNA, 32 nt, Homo Sapiens
gacgucauucauaacuuguauucaucagugaa

SEQ ID NO: 56439 - RNA, 32 nt, Homo Sapiens
ugaacucauccuuuuuuauggcugcguaguaa

SEQ ID NO: 56440 - RNA, 32 nt, Homo Sapiens
auugaagcugacaauaccuguguuaugagcag

SEQ ID NO: 56441 - RNA, 32 nt, Homo Sapiens
gaaaagucacccaaagucaaaggggacagcgu

SEQ ID NO: 56442 - RNA, 32 nt, Homo Sapiens
cuaauuaccaucugaggugcugauugcacccc

SEQ ID NO: 56443 - RNA, 32 nt, Homo Sapiens
gugaaaaugcuguggauggugugacauucuug

SEQ ID NO: 56444 - RNA, 32 nt, Homo Sapiens
aucgaaggguagauccugggcaucggaguuuu

SEQ ID NO: 56445 - RNA, 32 nt, Homo Sapiens
ccgccgguaccccggcgccaaccccgggaguc

SEQ ID NO: 56446 - RNA, 32 nt, Homo Sapiens
uuuucuggagaucauuuaaaucuuacagaucc

SEQ ID NO: 56447 - RNA, 32 nt, Homo Sapiens
uuaaguguaauauggauuacuuugaaacuuag

SEQ ID NO: 56448 - RNA, 32 nt, Homo Sapiens
gggguaaugauuuaucaaacuuguauuaucaa

SEQ ID NO: 56449 - RNA, 32 nt, Homo Sapiens
cucuucagccccugcucccauccaguggccag

SEQ ID NO: 56450 - RNA, 32 nt, Homo Sapiens
gugaccguggccucgggcugggcuuccaaagc

SEQ ID NO: 56451 - RNA, 32 nt, Homo Sapiens
cgucucugguuccuccccuccuccuggacucc

SEQ ID NO: 56452 - RNA, 32 nt, Homo Sapiens
gggccgguguggggcuggagccaggcagcuag

SEQ ID NO: 56453 - RNA, 32 nt, Homo Sapiens
uguuuaccaaagggcuuuuuauuugauaucuc

SEQ ID NO: 56454 - RNA, 32 nt, Homo Sapiens
ucgagaaggggaggcuugggucagguucaggg

SEQ ID NO: 56455 - RNA, 32 nt, Homo Sapiens
aucuuugauggagggacugggguguggagacu

SEQ ID NO: 56456 - RNA, 32 nt, Homo Sapiens
ugaacugaauuccuggcugauuuccuuacugc

SEQ ID NO: 56457 - RNA, 32 nt, Homo Sapiens
cccugcuggaacucaacaaccuguggggccag

SEQ ID NO: 56458 - RNA, 32 nt, Homo Sapiens
gcuugccuugaacaucaugguuccuuugguga

SEQ ID NO: 56459 - RNA, 32 nt, Homo Sapiens
auucacacauuuuguuguuuucuaugucucug

SEQ ID NO: 56460 - RNA, 32 nt, Homo Sapiens
gcaacggccccggcccacggaggcggcuggac

SEQ ID NO: 56461 - RNA, 32 nt, Homo Sapiens
cagguggacaaagaauucggggacugauggga

SEQ ID NO: 56462 - RNA, 32 nt, Homo Sapiens
aagucagccaccaugaagaugaguauuuuaua

SEQ ID NO: 56463 - RNA, 32 nt, Homo Sapiens
agugcuuugagaucuuugaccaacaggugcua

SEQ ID NO: 56464 - RNA, 32 nt, Homo Sapiens
aggccuggacgaagagggcgaggaggagagcu

SEQ ID NO: 56465 - RNA, 30 nt, Homo Sapiens
cucucugcccucggcggcgagcagggcgcc

SEQ ID NO: 56466 - RNA, 32 nt, Homo Sapiens
uugccugguccgcuuccuccccgcgaauaaga

SEQ ID NO: 56467 - RNA, 32 nt, Homo Sapiens
caaguuuacugcgaaguccacccagcguuccg

SEQ ID NO: 56468 - RNA, 32 nt, Homo Sapiens
ccuacuccuguuucccaaagcuuauguaagag

SEQ ID NO: 56469 - RNA, 32 nt, Homo Sapiens
guauuggagaucuggcaguauccugcauaacu

SEQ ID NO: 56470 - RNA, 32 nt, Homo Sapiens
agguacugccuucuaacuccugcauccucaga

SEQ ID NO: 56471 - RNA, 32 nt, Homo Sapiens
cuacaauugggcuccagaaacuaccugagcuc

SEQ ID NO: 56472 - RNA, 32 nt, Homo Sapiens
gugcucagcuccgucaacaucugcugcuccaa

SEQ ID NO: 56473 - RNA, 32 nt, Homo Sapiens
uuucagcucgucuugcuacucuaggcauuaug

SEQ ID NO: 56474 - RNA, 32 nt, Homo Sapiens
gcccuuguuaauuuauuuuauagugauuuggu

SEQ ID NO: 56475 - RNA, 28 nt, Homo Sapiens
gccaugcccaagcggagcugccccuucg

SEQ ID NO: 56476 - RNA, 32 nt, Homo Sapiens
gauuaccugugcugggaccuagugucaaguac

SEQ ID NO: 56477 - RNA, 32 nt, Homo Sapiens
ggaauugaagaaaauauaacaccuuacacccu

SEQ ID NO: 56478 - RNA, 32 nt, Homo Sapiens
aacacugauaaggaagaaaaaagaacuaaugu

SEQ ID NO: 56479 - RNA, 32 nt, Homo Sapiens
caugaauacuauacugaaaucugugcucucaa

SEQ ID NO: 56480 - RNA, 32 nt, Homo Sapiens
aaaguagaaguggagauuaccugguauguauc

SEQ ID NO: 56481 - RNA, 32 nt, Homo Sapiens
ggguggcauaugcuggggguagggguagcauu

SEQ ID NO: 56482 - RNA, 32 nt, Homo Sapiens
uccccagccugaaagggagaagagggaaaagg

SEQ ID NO: 56483 - RNA, 32 nt, Homo Sapiens
ucaaauucugaugugaaagauacaaggccaaa

SEQ ID NO: 56484 - RNA, 32 nt, Homo Sapiens
aagcuggcaaagugggaaaaauaaaguguuga

SEQ ID NO: 56485 - RNA, 32 nt, Homo Sapiens
uggauaguaaauuuauacuuauguuucccuaa

SEQ ID NO: 56486 - RNA, 32 nt, Homo Sapiens
uaagagcuuccacugcacccccucccaaggga

SEQ ID NO: 56487 - RNA, 32 nt, Homo Sapiens
gauugcucuuucuccuucuucccugagucucu

SEQ ID NO: 56488 - RNA, 32 nt, Homo Sapiens
cuuacccgcuggccgccuccugacaagcggga

SEQ ID NO: 56489 - RNA, 32 nt, Homo Sapiens
gcuuagggcuggaagcacagaguggcuuggcc

SEQ ID NO: 56490 - RNA, 32 nt, Homo Sapiens
gccaucccucaccaaacuuuggcaaaagaugg

SEQ ID NO: 56491 - RNA, 32 nt, Homo Sapiens
uguggaggacaaagcuucuuccugcguggcuc

SEQ ID NO: 56492 - RNA, 32 nt, Homo Sapiens
cucuaggacccgggggcgcccggcggcccgcc

SEQ ID NO: 56493 - RNA, 32 nt, Homo Sapiens
ucuacuaaaaauaccaaaauuagccaggcgug

SEQ ID NO: 56494 - RNA, 32 nt, Homo Sapiens
ugcagggcuggggcaaaguucuccagaaggcc

SEQ ID NO: 56495 - RNA, 32 nt, Homo Sapiens
ucuccugcuuccccccgcaccuuguggggaag

SEQ ID NO: 56496 - RNA, 32 nt, Homo Sapiens
ugaacaucagccugcaagaacuaguuguuuga

SEQ ID NO: 56497 - RNA, 32 nt, Homo Sapiens
uuucagagccgcuguaggucucuucuugcaug

SEQ ID NO: 56498 - RNA, 31 nt, Homo Sapiens
agacggucucacugccucucacuugccagag

SEQ ID NO: 56499 - RNA, 32 nt, Homo Sapiens
auaaaucuuuauugcagauuuauuuucauugc

SEQ ID NO: 56500 - RNA, 31 nt, Homo Sapiens
gaaguggcccuugcaggcaagagugcuggag

SEQ ID NO: 56501 - RNA, 32 nt, Homo Sapiens
ccagucuggggagaggccuggggaggcguggu

SEQ ID NO: 56502 - RNA, 32 nt, Homo Sapiens
uucaaauaaaugauuaaaguauuuucauacau

SEQ ID NO: 56503 - RNA, 32 nt, Homo Sapiens
gaauaauaaaguauauuuuucaugaaauacua

SEQ ID NO: 56504 - RNA, 32 nt, Homo Sapiens
gagccaccccccacccaccugagauuucccaa

SEQ ID NO: 56505 - RNA, 32 nt, Homo Sapiens
gcucacccugaagaggugggauaggaccgggg

SEQ ID NO: 56506 - RNA, 32 nt, Homo Sapiens
cuucuuaauaauaggauuuauauuaguacuca

SEQ ID NO: 56507 - RNA, 32 nt, Homo Sapiens
cagaagagcaagauaaacuugaaaauaagcuc

SEQ ID NO: 56508 - RNA, 32 nt, Homo Sapiens
uaucugaguguucaaaauauuuccaagccuga

SEQ ID NO: 56509 - RNA, 32 nt, Homo Sapiens
uuuugcuaaaaauuauuggcuuaaaucugugu

SEQ ID NO: 56510 - RNA, 32 nt, Homo Sapiens
ccagacagacugcguuuugaucggucgcacag

SEQ ID NO: 56511 - RNA, 32 nt, Homo Sapiens
aggcggcagcggcgauucuaggcggcccaggc

SEQ ID NO: 56512 - RNA, 32 nt, Homo Sapiens
agaggcaggagacaccugaggucucuuaccuu

SEQ ID NO: 56513 - RNA, 32 nt, Homo Sapiens
agaccagccugggcaacauagcaagaccccca

SEQ ID NO: 56514 - RNA, 32 nt, Homo Sapiens
caagaagggaugcaugggcuuuuuggccagug

SEQ ID NO: 56515 - RNA, 29 nt, Homo Sapiens
guuugaacguguuucagaugucauguguu

SEQ ID NO: 56516 - RNA, 32 nt, Homo Sapiens
caucagcauuguacuuuuaaccuuaggucuag

SEQ ID NO: 56517 - RNA, 32 nt, Homo Sapiens
accaagaggcuccagaauaaaguaugauuugu

SEQ ID NO: 56518 - RNA, 32 nt, Homo Sapiens
ugugcucccuccccaggcccuaggcaggcggg

SEQ ID NO: 56519 - RNA, 32 nt, Homo Sapiens
ugaauuuguuuuguguuuuucuguaauaauuu

SEQ ID NO: 56520 - RNA, 31 nt, Homo Sapiens
uccccuagggcggugcgaugauucccgcacc

SEQ ID NO: 56521 - RNA, 32 nt, Homo Sapiens
uaugaucaaggugaaauaaacagucuaaagaa

SEQ ID NO: 56522 - RNA, 32 nt, Homo Sapiens
aggcacaugacagaaauuguauguauugugga

SEQ ID NO: 56523 - RNA, 32 nt, Homo Sapiens
aaaacaaaauguuauuuuuauaccauaacuug

SEQ ID NO: 56524 - RNA, 32 nt, Homo Sapiens
cugaaguucuuugcauagauuuggcuuaagcu

SEQ ID NO: 56525 - RNA, 32 nt, Homo Sapiens
ggcggcaccugcgaucagcggcuggggcaggu

SEQ ID NO: 56526 - RNA, 32 nt, Homo Sapiens
ccagaccgccuccaccucccccgcccgccugg

SEQ ID NO: 56527 - RNA, 32 nt, Homo Sapiens
uucaaaauuuacaaaucaggauuauauacaua

SEQ ID NO: 56528 - RNA, 32 nt, Homo Sapiens
ucuagaugauuugguaaaaccacaaacaggca

SEQ ID NO: 56529 - RNA, 32 nt, Homo Sapiens
ugggccugggucuggaaguuggcaggaacaga

SEQ ID NO: 56530 - RNA, 32 nt, Homo Sapiens
gccgggccgggcgcgcagugggcuacaaacuu

SEQ ID NO: 56531 - RNA, 32 nt, Homo Sapiens
cugagaaaaugaaagcucacucuggauuccac

SEQ ID NO: 56532 - RNA, 32 nt, Homo Sapiens
ggauacaguuuuucuuuuucuuuccuugaugg

SEQ ID NO: 56533 - RNA, 32 nt, Homo Sapiens
guacaccuguuguuugaaagcucucagcggga

SEQ ID NO: 56534 - RNA, 32 nt, Homo Sapiens
ccuguagcuguuuauucuacugcgaguaacaa

SEQ ID NO: 56535 - RNA, 32 nt, Homo Sapiens
uaagcauuuuuauggaaauauuuuuaaugcag

SEQ ID NO: 56536 - RNA, 32 nt, Homo Sapiens
ggggacauacacuugcaucuuuguugaaagca

SEQ ID NO: 56537 - RNA, 32 nt, Homo Sapiens
aaugguaauauuugcuucuugcuuuuauguua

SEQ ID NO: 56538 - RNA, 32 nt, Homo Sapiens
agacugguacuggccuguggccugggggaugg

SEQ ID NO: 56539 - RNA, 29 nt, Homo Sapiens
uccugauuuuaccaauaccucauucagug

SEQ ID NO: 56540 - RNA, 32 nt, Homo Sapiens
gaaaaguauaaaauguuuguugaaguaucuua

SEQ ID NO: 56541 - RNA, 32 nt, Homo Sapiens
agaggggcugccuggucuggggccugacaggc

SEQ ID NO: 56542 - RNA, 32 nt, Homo Sapiens
uuugagguuccuuaguucagagccugcaaaug

SEQ ID NO: 56543 - RNA, 32 nt, Homo Sapiens
cuaccaaaaaauauauaaaaauuagccgggcg

SEQ ID NO: 56544 - RNA, 32 nt, Homo Sapiens
ggccugugccagcaccacagccggucagagga

SEQ ID NO: 56545 - RNA, 32 nt, Homo Sapiens
ugcaaaguguuuguuuuuacaaaagagaaaag

SEQ ID NO: 56546 - RNA, 32 nt, Homo Sapiens
gggcucuggggcggcccgcuaggccagugcgc

SEQ ID NO: 56547 - RNA, 32 nt, Homo Sapiens
cacaccuucagcuccaugucgccccgcaugcg

SEQ ID NO: 56548 - RNA, 32 nt, Homo Sapiens
gacuagaagaacuggggugugugaaaguauuc

SEQ ID NO: 56549 - RNA, 32 nt, Homo Sapiens
uuccgcucugucaucugucacccaggcuggag

SEQ ID NO: 56550 - RNA, 32 nt, Homo Sapiens
auuauuggagacgggguuucacuguguuagcc

SEQ ID NO: 56551 - RNA, 32 nt, Homo Sapiens
auaugaaaaauauucaauccaaaauuaacucu

SEQ ID NO: 56552 - RNA, 32 nt, Homo Sapiens
agguuaggugacugaggacuggagcuguuugg

SEQ ID NO: 56553 - RNA, 32 nt, Homo Sapiens
gugcacccuucccacacccuuuacauucccca

SEQ ID NO: 56554 - RNA, 32 nt, Homo Sapiens
accaucacccaccacacccugcccacuccugc

SEQ ID NO: 56555 - RNA, 32 nt, Homo Sapiens
cgggcgauggcugugguccuucugcuaaugca

SEQ ID NO: 56556 - RNA, 32 nt, Homo Sapiens
ucuuaauggaaauauuuaauuugcuuauauaa

SEQ ID NO: 56557 - RNA, 30 nt, Homo Sapiens
agaggaggcaggcgagugagcgaguccgag

SEQ ID NO: 56558 - RNA, 32 nt, Homo Sapiens
cucuugacauucaaaacaguuacuuaagauuc

SEQ ID NO: 56559 - RNA, 32 nt, Homo Sapiens
aaauuaaagcccucuuuuuuucucuuuccuuu

SEQ ID NO: 56560 - RNA, 32 nt, Homo Sapiens
guaaaauccaagucuuuuuuuuuuuuuccagg

SEQ ID NO: 56561 - RNA, 32 nt, Homo Sapiens
ucucaaagagaagagggcagccaagaugaccc

SEQ ID NO: 56562 - RNA, 32 nt, Homo Sapiens
gguuucuugggguuauuaaccaguagugugga

SEQ ID NO: 56563 - RNA, 32 nt, Homo Sapiens
cccggcugaggccgcugcgacccggcccugca

SEQ ID NO: 56564 - RNA, 32 nt, Homo Sapiens
cagugcugaauaagucacuacggaugccagag

SEQ ID NO: 56565 - RNA, 32 nt, Homo Sapiens
ugggcagucucuggagagcagcagccuggagg

SEQ ID NO: 56566 - RNA, 32 nt, Homo Sapiens
gaugugggcagguagugcagcugcugggcguc

SEQ ID NO: 56567 - RNA, 32 nt, Homo Sapiens
ugucacaaacccaccucuguugggagcuauug

SEQ ID NO: 56568 - RNA, 32 nt, Homo Sapiens
aauucagcccucaaaauacaucagagaauuca

SEQ ID NO: 56569 - RNA, 32 nt, Homo Sapiens
gaaguugcgagcggaugcugcccgcgccggac

SEQ ID NO: 56570 - RNA, 32 nt, Homo Sapiens
uucccugggccugcaucuccuggcgccggcug

SEQ ID NO: 56571 - RNA, 32 nt, Homo Sapiens
agucauuaaauguuggcauauuuuggccaugu

SEQ ID NO: 56572 - RNA, 29 nt, Homo Sapiens
acaaaauaaaguuuugaagugcuacuaua

SEQ ID NO: 56573 - RNA, 32 nt, Homo Sapiens
ccccgucucugguuccuccccuccuccuggac

SEQ ID NO: 56574 - RNA, 32 nt, Homo Sapiens
ucccagacccagucgaaaucugcaagagaggc

SEQ ID NO: 56575 - RNA, 32 nt, Homo Sapiens
uaugcagacuucuggucuacugaggagcaugu

SEQ ID NO: 56576 - RNA, 32 nt, Homo Sapiens
uuaaaacuaaacuuauuuuaaaaagaaaaguu

SEQ ID NO: 56577 - RNA, 32 nt, Homo Sapiens
agagcagcuuggcaucucuggaguaugcccag

SEQ ID NO: 56578 - RNA, 32 nt, Homo Sapiens
uaugugcaguucccggccccugccacccagcc

SEQ ID NO: 56579 - RNA, 32 nt, Homo Sapiens
gagccgggccaagggauuagcggcgggcggcg

SEQ ID NO: 56580 - RNA, 32 nt, Homo Sapiens
ccuaccguuuccuuuuuccguccgaacagaag

SEQ ID NO: 56581 - RNA, 32 nt, Homo Sapiens
cgucugccuccuguguccuuccgcggggagua

SEQ ID NO: 56582 - RNA, 32 nt, Homo Sapiens
cuccggccauucuccccucacccuccucaccu

SEQ ID NO: 56583 - RNA, 30 nt, Homo Sapiens
ccgugagcggcagcgccgccggccucccuc

SEQ ID NO: 56584 - RNA, 32 nt, Homo Sapiens
agugucuaugaccaagacuagaaaugaaguuu

SEQ ID NO: 56585 - RNA, 32 nt, Homo Sapiens
cugacuccagcuucugguggaccuggauauuu

SEQ ID NO: 56586 - RNA, 32 nt, Homo Sapiens
acgggaacaccgugcugccuguaacagggaaa

SEQ ID NO: 56587 - RNA, 32 nt, Homo Sapiens
uguacaccaaaauaaaacaugugaagcaguaa

SEQ ID NO: 56588 - RNA, 32 nt, Homo Sapiens
uaauuuaaaaauuuccacuacacuuauuaucu

SEQ ID NO: 56589 - RNA, 32 nt, Homo Sapiens
cauguucuacuuugauuguauguaaacauauu

SEQ ID NO: 56590 - RNA, 31 nt, Homo Sapiens
uuguccaaauaaaaugcaauaguaucaauau

SEQ ID NO: 56591 - RNA, 32 nt, Homo Sapiens
acaugaguuucuucuuuuuuauuuaguaauac

SEQ ID NO: 56592 - RNA, 32 nt, Homo Sapiens
cgccucaccucacaggagggccaggcauguau

SEQ ID NO: 56593 - RNA, 32 nt, Homo Sapiens
ccacaccuccagcagagggccuggaagaggac

SEQ ID NO: 56594 - RNA, 32 nt, Homo Sapiens
gccccugcccacuuccucucccaggugaaucu

SEQ ID NO: 56595 - RNA, 32 nt, Homo Sapiens
uuuccauuucccuccaacccccuaaugguuuc

SEQ ID NO: 56596 - RNA, 32 nt, Homo Sapiens
agaccgugauguugcagaugcuguggcauuuc

SEQ ID NO: 56597 - RNA, 32 nt, Homo Sapiens
cuucaaaagaaaaauaaacauaaaaaauaagu

SEQ ID NO: 56598 - RNA, 32 nt, Homo Sapiens
gcuggcccuucagaucuggggguguggugagu

SEQ ID NO: 56599 - RNA, 32 nt, Homo Sapiens
ucuuggagauggcuacugccugcuuuuuaucu

SEQ ID NO: 56600 - RNA, 32 nt, Homo Sapiens
cugucuucaaggacuagaaccuaucuuuaaag

SEQ ID NO: 56601 - RNA, 32 nt, Homo Sapiens
ggggccuggccacgcccucccucucccaggcc

SEQ ID NO: 56602 - RNA, 32 nt, Homo Sapiens
guagccugcucccacacugucacuggauguca

SEQ ID NO: 56603 - RNA, 32 nt, Homo Sapiens
uuguggaaaaauuuaaauaaaguaugaaauga

SEQ ID NO: 56604 - RNA, 32 nt, Homo Sapiens
ggccuccugccaggugacugcuaucccgucca

SEQ ID NO: 56605 - RNA, 32 nt, Homo Sapiens
cuuccuuccuuccccaacuccccaaacacugu

SEQ ID NO: 56606 - RNA, 32 nt, Homo Sapiens
uucuucugaaaauuauguucugaguuaggcag

SEQ ID NO: 56607 - RNA, 32 nt, Homo Sapiens
uccugacaugaugaaccuggaacuucugugaa

SEQ ID NO: 56608 - RNA, 32 nt, Homo Sapiens
ccccaucaccucucugcccugcuugagucugg

SEQ ID NO: 56609 - RNA, 32 nt, Homo Sapiens
auaaauuuauauauuuauuuauuugaaaaaaa

SEQ ID NO: 56610 - RNA, 32 nt, Homo Sapiens
ggcuuuucacaagcaauacaauguuagggaag

SEQ ID NO: 56611 - RNA, 32 nt, Homo Sapiens
auggucaauauuugguuuccuaaaugcuuuua

SEQ ID NO: 56612 - RNA, 32 nt, Homo Sapiens
acauugagucgugccgauggcucucaaauggc

SEQ ID NO: 56613 - RNA, 32 nt, Homo Sapiens
guaaaguucaaaagagugaauauuuugccaug

SEQ ID NO: 56614 - RNA, 32 nt, Homo Sapiens
ugaaaguuucccuuuuaggugccaaaaugcug

SEQ ID NO: 56615 - RNA, 32 nt, Homo Sapiens
uuuuuuguaaaaagauaauuuuugagacuuga

SEQ ID NO: 56616 - RNA, 32 nt, Homo Sapiens
gggcagggagaaguaacauucugcaaaucgcc

SEQ ID NO: 56617 - RNA, 32 nt, Homo Sapiens
agguccccagacuguuuguccacaacgcaggg

SEQ ID NO: 56618 - RNA, 32 nt, Homo Sapiens
aucuuagugucuaugugugggggcagacauuu

SEQ ID NO: 56619 - RNA, 32 nt, Homo Sapiens
gcccaaacugccaaaagcuggugauucuggga

SEQ ID NO: 56620 - RNA, 32 nt, Homo Sapiens
gaacuguaaacuaauaaauguguguuguuucu

SEQ ID NO: 56621 - RNA, 32 nt, Homo Sapiens
cagcugaguaauucugaggaaaacgaauucuc

SEQ ID NO: 56622 - RNA, 32 nt, Homo Sapiens
gacccgugucuucauuuuuggcacucuuauuu

SEQ ID NO: 56623 - RNA, 32 nt, Homo Sapiens
uguccuggggacaugugugaggcgcugcagug

SEQ ID NO: 56624 - RNA, 32 nt, Homo Sapiens
cugggcuccuucccuugacuuccagggagcac

SEQ ID NO: 56625 - RNA, 31 nt, Homo Sapiens
ggccuccaagccaccucuggaaauacuuggc

SEQ ID NO: 56626 - RNA, 32 nt, Homo Sapiens
gagggaggccucguggacugcugcugagaaac

SEQ ID NO: 56627 - RNA, 32 nt, Homo Sapiens
agaaaagucuaccugggagacuaguuagcagu

SEQ ID NO: 56628 - RNA, 32 nt, Homo Sapiens
ggcuuuucaacuaacuccucaacagcaacauc

SEQ ID NO: 56629 - RNA, 32 nt, Homo Sapiens
uucuccuuuacuccaaacucagcccuccaguu

SEQ ID NO: 56630 - RNA, 32 nt, Homo Sapiens
uguuguccaaggaaauguagaaucacuuugua

SEQ ID NO: 56631 - RNA, 32 nt, Homo Sapiens
gugggugccaugaacaaugccaggaggcaaac

SEQ ID NO: 56632 - RNA, 32 nt, Homo Sapiens
ggaggcaggacugggcuguuuccucagccuuu

SEQ ID NO: 56633 - RNA, 32 nt, Homo Sapiens
aauugaaaacaauacauuaauauaccauaaca

SEQ ID NO: 56634 - RNA, 32 nt, Homo Sapiens
ggauuuuugaccaaaaguaaggugauaacuga

SEQ ID NO: 56635 - RNA, 32 nt, Homo Sapiens
gcagcguucagcauggcacugucuuggcuuac

SEQ ID NO: 56636 - RNA, 32 nt, Homo Sapiens
gcagguccccagggaccugcugccgaggggca

SEQ ID NO: 56637 - RNA, 32 nt, Homo Sapiens
caagcccuguccccucccccgccccggccugg

SEQ ID NO: 56638 - RNA, 32 nt, Homo Sapiens
cucccccuuguacaguucuucaucggcuuaca

SEQ ID NO: 56639 - RNA, 32 nt, Homo Sapiens
ccugcuccacuugucugggaaccugggcagga

SEQ ID NO: 56640 - RNA, 32 nt, Homo Sapiens
uugccuuagugugccucccaauacucccuucu

SEQ ID NO: 56641 - RNA, 31 nt, Homo Sapiens
aagcagcuguuggccauucaagagcuaagga

SEQ ID NO: 56642 - RNA, 32 nt, Homo Sapiens
uggggccgcccgggggccaccagcagugcccc

SEQ ID NO: 56643 - RNA, 32 nt, Homo Sapiens
accgaggcaccgccgcuucacccaggccagua

SEQ ID NO: 56644 - RNA, 32 nt, Homo Sapiens
guagugugacuuuuagaaagugucucaguagu

SEQ ID NO: 56645 - RNA, 32 nt, Homo Sapiens
ggucuccgcccgggcgcggcuccuuggcaaag

SEQ ID NO: 56646 - RNA, 32 nt, Homo Sapiens
aagauuccaaaggagaauauauaucuugugaa

SEQ ID NO: 56647 - RNA, 32 nt, Homo Sapiens
ccuuaccaacauugccugggaaugcuaauguc

SEQ ID NO: 56648 - RNA, 32 nt, Homo Sapiens
uuuuauaaauaccauuuguucacaucucaccu

SEQ ID NO: 56649 - RNA, 32 nt, Homo Sapiens
caucucagcucuuuuguaacaugcuucccuug

SEQ ID NO: 56650 - RNA, 32 nt, Homo Sapiens
acaagccaggugcccaugagaucgagguuggu

SEQ ID NO: 56651 - RNA, 32 nt, Homo Sapiens
cuuccccucccaccugcccccugcguaggcac

SEQ ID NO: 56652 - RNA, 32 nt, Homo Sapiens
uucagagaggcuuuuccgaggaaaacugcaag

SEQ ID NO: 56653 - RNA, 32 nt, Homo Sapiens
caucuuuuaggggaagugacaagaugcucugg

SEQ ID NO: 56654 - RNA, 32 nt, Homo Sapiens
agaaucuggugcccuccccuccacccucacaa

SEQ ID NO: 56655 - RNA, 32 nt, Homo Sapiens
aauaauuuaaacaguacgggaaaugcagagca

SEQ ID NO: 56656 - RNA, 32 nt, Homo Sapiens
ugaagagaaggggauaggaauguauauuuggc

SEQ ID NO: 56657 - RNA, 32 nt, Homo Sapiens
guuggggugggucagagccgaguuaagagauu

SEQ ID NO: 56658 - RNA, 32 nt, Homo Sapiens
agcucugccuucuugacuguggaggcgcccag

SEQ ID NO: 56659 - RNA, 32 nt, Homo Sapiens
auuuagagauuacauuuaagauaaagucauca

SEQ ID NO: 56660 - RNA, 32 nt, Homo Sapiens
ucaaaagguugguuuauuuguauuuuauuuuc

SEQ ID NO: 56661 - RNA, 32 nt, Homo Sapiens
cuaggguuguuucuuaaauuuagcucauguua

SEQ ID NO: 56662 - RNA, 32 nt, Homo Sapiens
cacugcucaauggacacccccagcccagaccc

SEQ ID NO: 56663 - RNA, 31 nt, Homo Sapiens
aucccauccaguugguuuccaagggugaucc

SEQ ID NO: 56664 - RNA, 32 nt, Homo Sapiens
ucucugggaaagguuggaugcugccuuacauc

SEQ ID NO: 56665 - RNA, 32 nt, Homo Sapiens
aaaauaucaguuccugucacucuuccaccccu

SEQ ID NO: 56666 - RNA, 32 nt, Homo Sapiens
cguagagaugccuucuucggugacggcgcugg

SEQ ID NO: 56667 - RNA, 32 nt, Homo Sapiens
ggcguccguuugcugcgguaggaacauggcgg

SEQ ID NO: 56668 - RNA, 32 nt, Homo Sapiens
gggucauuccccacaagagccacauccucaca

SEQ ID NO: 56669 - RNA, 32 nt, Homo Sapiens
uucaugaccauccugccauccuugacuuugaa

SEQ ID NO: 56670 - RNA, 32 nt, Homo Sapiens
aaacaagucuagucuucugguuuucuagcccc

SEQ ID NO: 56671 - RNA, 32 nt, Homo Sapiens
gaguccucacuugucuuccuuaauuuugcccu

SEQ ID NO: 56672 - RNA, 32 nt, Homo Sapiens
aucaaaagcaacggaaaaaauaaaauacuuaa

SEQ ID NO: 56673 - RNA, 32 nt, Homo Sapiens
cgcaccgccccgcuccccagcucgguuuuucc

SEQ ID NO: 56674 - RNA, 32 nt, Homo Sapiens
cuaaccccacccaccgagcaacugagcuuccc

SEQ ID NO: 56675 - RNA, 32 nt, Homo Sapiens
gcuuucagcuggaucaacugauggcccaacca

SEQ ID NO: 56676 - RNA, 32 nt, Homo Sapiens
augauguaguggcuccuaaacuaccuauugaa

SEQ ID NO: 56677 - RNA, 32 nt, Homo Sapiens
cacugugcccagcuaauuuuucuuuauuagua

SEQ ID NO: 56678 - RNA, 32 nt, Homo Sapiens
auaacugcuuugcaaguuuccugugaaaacau

SEQ ID NO: 56679 - RNA, 32 nt, Homo Sapiens
uugguggccucuuuaaggcaaagcagagaaag

SEQ ID NO: 56680 - RNA, 32 nt, Homo Sapiens
acagaucaguuuagcaaaucuacugucaauuu

SEQ ID NO: 56681 - RNA, 32 nt, Homo Sapiens
gaaaccacgggaaagcugugauugcagcgcca

SEQ ID NO: 56682 - RNA, 32 nt, Homo Sapiens
ugagugaggguggagggauggugccucugcca

SEQ ID NO: 56683 - RNA, 32 nt, Homo Sapiens
gugaagaagauuuugaggaaaauacagacaaa

SEQ ID NO: 56684 - RNA, 32 nt, Homo Sapiens
agaaggcaguggagccccggcggcggcggcgg

SEQ ID NO: 56685 - RNA, 31 nt, Homo Sapiens
ugggccggaggcugccugcaccgcgucaggg

SEQ ID NO: 56686 - RNA, 32 nt, Homo Sapiens
uccuagucccauccaggcuucccacaagaaag

SEQ ID NO: 56687 - RNA, 32 nt, Homo Sapiens
caggagggcguugaugccucugagagauacag

SEQ ID NO: 56688 - RNA, 32 nt, Homo Sapiens
agugggaaauaccaccaaggagccucaucgug

SEQ ID NO: 56689 - RNA, 32 nt, Homo Sapiens
cuguguucauucuccuuccugccaccuuguga

SEQ ID NO: 56690 - RNA, 32 nt, Homo Sapiens
caccgcugcuggggcacacacacacacaugca

SEQ ID NO: 56691 - RNA, 32 nt, Homo Sapiens
agcccuccagcaucuaauagacuugaaucuac

SEQ ID NO: 56692 - RNA, 32 nt, Homo Sapiens
gggggaaagggagauaagaaggauccuggaac

SEQ ID NO: 56693 - RNA, 32 nt, Homo Sapiens
ugggagguggagguugcugugagcugacacca

SEQ ID NO: 56694 - RNA, 32 nt, Homo Sapiens
uggaguaggacaguaacauggcaggaaucgga

SEQ ID NO: 56695 - RNA, 32 nt, Homo Sapiens
ucggaucucagggccguggacacacacccccu

SEQ ID NO: 56696 - RNA, 32 nt, Homo Sapiens
agagccgcgggcccggcggcugaggccacccc

SEQ ID NO: 56697 - RNA, 32 nt, Homo Sapiens
ggaccgacggacucgcgccgcguccaccuguc

SEQ ID NO: 56698 - RNA, 32 nt, Homo Sapiens
ugauaagaauggcucaccuugccuaaaguaua

SEQ ID NO: 56699 - RNA, 32 nt, Homo Sapiens
acgugggcgcaucccucuuuuccuucccuggg

SEQ ID NO: 56700 - RNA, 32 nt, Homo Sapiens
ugcgcgcggcggggcgauggggggcucgggca

SEQ ID NO: 56701 - RNA, 32 nt, Homo Sapiens
cgcagcugccaccagagcugcccccauuuuuu

SEQ ID NO: 56702 - RNA, 32 nt, Homo Sapiens
agccgcgccucccucccuccccgccucccggg

SEQ ID NO: 56703 - RNA, 32 nt, Homo Sapiens
accacaagaaacuauaaaauggcuaaagcuug

SEQ ID NO: 56704 - RNA, 32 nt, Homo Sapiens
ggcgggccccgcggccuucucucagcuuccuu

SEQ ID NO: 56705 - RNA, 32 nt, Homo Sapiens
gucaaaauauugcauuuucuggggccaaaaaa

SEQ ID NO: 56706 - RNA, 30 nt, Homo Sapiens
cuugucugggcagagacagaagcugauuua

SEQ ID NO: 56707 - RNA, 32 nt, Homo Sapiens
auggaggccccggcccacgugaccagcaaggu

SEQ ID NO: 56708 - RNA, 32 nt, Homo Sapiens
gugcuuagugauugcgguuucggucgcucucc

SEQ ID NO: 56709 - RNA, 32 nt, Homo Sapiens
uuuuuguuugguuuuuuguuuuuaaucugugg

SEQ ID NO: 56710 - RNA, 32 nt, Homo Sapiens
guuuuugucugacuuaaauaugcaaaauaguu

SEQ ID NO: 56711 - RNA, 32 nt, Homo Sapiens
cgggggugugagaggagaggcccauagggcug

SEQ ID NO: 56712 - RNA, 32 nt, Homo Sapiens
ucaaagcccucccugucugucugucucucuuu

SEQ ID NO: 56713 - RNA, 32 nt, Homo Sapiens
ucccucgggaugcccaggagaggccauacuuu

SEQ ID NO: 56714 - RNA, 32 nt, Homo Sapiens
gaaagauuuuuugcaugacuuuucucucauuu

SEQ ID NO: 56715 - RNA, 32 nt, Homo Sapiens
cuauuauauuugcuuuuaaauaggcaugaugu

SEQ ID NO: 56716 - RNA, 32 nt, Homo Sapiens
uccucgaggcggagcgagcugugguugggguu

SEQ ID NO: 56717 - RNA, 32 nt, Homo Sapiens
gcagugacuaguuuuucuagaucuugacuccc

SEQ ID NO: 56718 - RNA, 32 nt, Homo Sapiens
gcucuuacaaagauguaacugaagacuuuucg

SEQ ID NO: 56719 - RNA, 32 nt, Homo Sapiens
ggcacauaaaaauuaggauggaguguguggac

SEQ ID NO: 56720 - RNA, 32 nt, Homo Sapiens
aaucauucuacaaaauguagaaaugauaauag

SEQ ID NO: 56721 - RNA, 32 nt, Homo Sapiens
ccucauugauucacuuccagaagugcugcacu

SEQ ID NO: 56722 - RNA, 32 nt, Homo Sapiens
uucagaagacauuucugaaaucuuauaagcua

SEQ ID NO: 56723 - RNA, 32 nt, Homo Sapiens
agaggaaguggcugaggccuagagucacguuu

SEQ ID NO: 56724 - RNA, 32 nt, Homo Sapiens
uacuaaaaauacaaaaauuugcugggcauggu

SEQ ID NO: 56725 - RNA, 32 nt, Homo Sapiens
ggggacagucacccucccggaauggggcuucc

SEQ ID NO: 56726 - RNA, 32 nt, Homo Sapiens
agcugaaccaacaaggaggcuuugaaaaggug

SEQ ID NO: 56727 - RNA, 32 nt, Homo Sapiens
acacuucccuccccuguccccaacaugcccug

SEQ ID NO: 56728 - RNA, 32 nt, Homo Sapiens
aggccccgccuggcccaggcccgcagccuguu

SEQ ID NO: 56729 - RNA, 32 nt, Homo Sapiens
aaagcaccugaaacguauauguacuuuugguu

SEQ ID NO: 56730 - RNA, 32 nt, Homo Sapiens
gagcugcagaaacgccuugaagggcagcaugg

SEQ ID NO: 56731 - RNA, 32 nt, Homo Sapiens
guuuucuuucgcccagccaaaaucacagaaug

SEQ ID NO: 56732 - RNA, 32 nt, Homo Sapiens
uugggcacgaucucaggccccaccuccugcuu

SEQ ID NO: 56733 - RNA, 32 nt, Homo Sapiens
gccucucucuuaccuguucaguuucuuuucug

SEQ ID NO: 56734 - RNA, 32 nt, Homo Sapiens
guggaacgaccccaccucgaggagcuuccuga

SEQ ID NO: 56735 - RNA, 32 nt, Homo Sapiens
uuuuguuuauugaguucuuucuguugcuucuc

SEQ ID NO: 56736 - RNA, 32 nt, Homo Sapiens
aguaacugagccugugugaaguaucucaucau

SEQ ID NO: 56737 - RNA, 32 nt, Homo Sapiens
gcucccuggcccccggcccccaugcagccccu

SEQ ID NO: 56738 - RNA, 32 nt, Homo Sapiens
auccauguugaaugguacaaaauauuucugug

SEQ ID NO: 56739 - RNA, 32 nt, Homo Sapiens
uauauguaccauugguugauaauuauaaugau

SEQ ID NO: 56740 - RNA, 32 nt, Homo Sapiens
ccucgucaccaugauagcaccaucagccuuug

SEQ ID NO: 56741 - RNA, 32 nt, Homo Sapiens
uucccaccccaguucaucaucaucucuuuuac

SEQ ID NO: 56742 - RNA, 32 nt, Homo Sapiens
ucucccugaggugcuuucagcguaagcuuuug

SEQ ID NO: 56743 - RNA, 32 nt, Homo Sapiens
uuuucgcguuuuauuucuuucacauguaguca

SEQ ID NO: 56744 - RNA, 32 nt, Homo Sapiens
auaaggaauuguauaggaggaaacuucauagu

SEQ ID NO: 56745 - RNA, 32 nt, Homo Sapiens
agcuguauaugucugguuuucuuaccccuacu

SEQ ID NO: 56746 - RNA, 32 nt, Homo Sapiens
gguccugugcagcuccgccagccccggucagg

SEQ ID NO: 56747 - RNA, 32 nt, Homo Sapiens
gagaaaggacacacucuaauguucuuacugcc

SEQ ID NO: 56748 - RNA, 32 nt, Homo Sapiens
uugccgcaguucaucuuccucccuguguacuu

SEQ ID NO: 56749 - RNA, 32 nt, Homo Sapiens
gcacaacuuucugcccagaaaaaugugcagcu

SEQ ID NO: 56750 - RNA, 32 nt, Homo Sapiens
ggguagcugggcggggcucgaggcuggugcca

SEQ ID NO: 56751 - RNA, 32 nt, Homo Sapiens
gggaggaggaggaggaggaguucguggaugac

SEQ ID NO: 56752 - RNA, 32 nt, Homo Sapiens
gcuaauuuuuuguaagaugggaucucauuuug

SEQ ID NO: 56753 - RNA, 32 nt, Homo Sapiens
ugagcaccaaaucggagucauuuugggagagg

SEQ ID NO: 56754 - RNA, 32 nt, Homo Sapiens
uaucauuaguuacuaucucaaugcauaaugua

SEQ ID NO: 56755 - RNA, 32 nt, Homo Sapiens
cgucgagcugcggcgccggcgcguuccaggcc

SEQ ID NO: 56756 - RNA, 32 nt, Homo Sapiens
aggucuugacgagcccugcccgggccgacgca

SEQ ID NO: 56757 - RNA, 32 nt, Homo Sapiens
aguauucuuuuaaaauucgaaaguauugaaag

SEQ ID NO: 56758 - RNA, 32 nt, Homo Sapiens
cuuacauagaaagagagcccaagaauauuaga

SEQ ID NO: 56759 - RNA, 32 nt, Homo Sapiens
auucauaagauaguuagguauuaaacacuuca

SEQ ID NO: 56760 - RNA, 32 nt, Homo Sapiens
ccuggggcgaggggcagagugaccaagcgccc

SEQ ID NO: 56761 - RNA, 32 nt, Homo Sapiens
aauuaccagaaaggugauaagccugcaugugu

SEQ ID NO: 56762 - RNA, 32 nt, Homo Sapiens
uccaugggucagaguugaauucuuaugucuau

SEQ ID NO: 56763 - RNA, 32 nt, Homo Sapiens
ggcacggcgggcgagcgggcgguauggcggcg

SEQ ID NO: 56764 - RNA, 32 nt, Homo Sapiens
cucucaccccuacugguaacaggucauugcug

SEQ ID NO: 56765 - RNA, 32 nt, Homo Sapiens
uuuuauguuauuaauuaguagcuuuuuguuuc

SEQ ID NO: 56766 - RNA, 32 nt, Homo Sapiens
cugccuuuuucaugagcuuccaugcuugcuuu

SEQ ID NO: 56767 - RNA, 29 nt, Homo Sapiens
aaaaagcuguuuucuucagcuucuccugg

SEQ ID NO: 56768 - RNA, 32 nt, Homo Sapiens
gaggcgcagcuggccugagcuggggagaggug

SEQ ID NO: 56769 - RNA, 32 nt, Homo Sapiens
agaaugcuugaauuagagaauuuucugcauua

SEQ ID NO: 56770 - RNA, 32 nt, Homo Sapiens
ucuagcuauaugaauuuuuaauuuaggacacu

SEQ ID NO: 56771 - RNA, 32 nt, Homo Sapiens
ccaaacgcgcgccccuccgccccucccuuggc

SEQ ID NO: 56772 - RNA, 32 nt, Homo Sapiens
ucaaauaaaauuucuguaaagaauuuccaaaa

SEQ ID NO: 56773 - RNA, 32 nt, Homo Sapiens
uuaaacagcauguuugacuugauuccaucaug

SEQ ID NO: 56774 - RNA, 32 nt, Homo Sapiens
ggcugggccucccaggcgaucugcauacuuua

SEQ ID NO: 56775 - RNA, 32 nt, Homo Sapiens
guuuucaauaugggcagcacaaaggugagaga

SEQ ID NO: 56776 - RNA, 32 nt, Homo Sapiens
acccgggaccccagcccggccgcucgcccgca

SEQ ID NO: 56777 - RNA, 32 nt, Homo Sapiens
aaacgaugcuauaaaugugggagugcagauau

SEQ ID NO: 56778 - RNA, 32 nt, Homo Sapiens
cagggaaaaggccuuccaaaagagcagcaccg

SEQ ID NO: 56779 - RNA, 32 nt, Homo Sapiens
ggcugucacguacacuccugcugccuuacaca

SEQ ID NO: 56780 - RNA, 32 nt, Homo Sapiens
ccgugaggcgcgcgcggagucggaggaagagg

SEQ ID NO: 56781 - RNA, 32 nt, Homo Sapiens
gggcugggugggcacagugggugugccugagc

SEQ ID NO: 56782 - RNA, 32 nt, Homo Sapiens
uguugucuucggguuuugggaaaagaaucagu

SEQ ID NO: 56783 - RNA, 32 nt, Homo Sapiens
acuaugaaggcacagucagaauguuccagggu

SEQ ID NO: 56784 - RNA, 32 nt, Homo Sapiens
auccagcgacagagacggaaggggucgcggcg

SEQ ID NO: 56785 - RNA, 32 nt, Homo Sapiens
uaccccuggcccuuggccuccuccaagagggc

SEQ ID NO: 56786 - RNA, 32 nt, Homo Sapiens
ucgcccgcuguccgccagcccgcgggagggag

SEQ ID NO: 56787 - RNA, 32 nt, Homo Sapiens
acaugauuccaaguugauugaauguuguagga

SEQ ID NO: 56788 - RNA, 32 nt, Homo Sapiens
gugaagugcccccaaggcuggcacuuuaagaa

SEQ ID NO: 56789 - RNA, 32 nt, Homo Sapiens
gaugaugaggacuuaagguugcaagaaugaag

SEQ ID NO: 56790 - RNA, 32 nt, Homo Sapiens
ucuccgcgcgccccaccuccuccgccucgcgc

SEQ ID NO: 56791 - RNA, 32 nt, Homo Sapiens
agcuccuucccuuacucuaccuugcuccuacu

SEQ ID NO: 56792 - RNA, 32 nt, Homo Sapiens
cagccuccagcaugcagcgccuccccgcugcc

SEQ ID NO: 56793 - RNA, 32 nt, Homo Sapiens
gaagcagccgggccgggcgcgcagugggcuac

SEQ ID NO: 56794 - RNA, 32 nt, Homo Sapiens
accaaucccaacaugaaauuauauuacucaga

SEQ ID NO: 56795 - RNA, 32 nt, Homo Sapiens
cugagcacagcugcauuaaaacaaaggaaguu

SEQ ID NO: 56796 - RNA, 32 nt, Homo Sapiens
ggaggauagcgcgggcgcggcaccugcgggcc

SEQ ID NO: 56797 - RNA, 32 nt, Homo Sapiens
cagccacucggccccaggggguuauggccaca

SEQ ID NO: 56798 - RNA, 32 nt, Homo Sapiens
auaguggccgggggcgggaggcuggcgccucc

SEQ ID NO: 56799 - RNA, 32 nt, Homo Sapiens
uccauuuguaaaugcacaaaugguacuggagg

SEQ ID NO: 56800 - RNA, 31 nt, Homo Sapiens
uagcuacaagaggguuaaggugauugugugu

SEQ ID NO: 56801 - RNA, 27 nt, Homo Sapiens
accaauaucuucuucaggcucugacag

SEQ ID NO: 56802 - RNA, 32 nt, Homo Sapiens
cugagucacccaagaagcugcccuggccuccc

SEQ ID NO: 56803 - RNA, 30 nt, Homo Sapiens
gagcgagggguggcagcgccggcgccccag

SEQ ID NO: 56804 - RNA, 32 nt, Homo Sapiens
agaugcguccgaagggaaauaaaguguguugg

SEQ ID NO: 56805 - RNA, 32 nt, Homo Sapiens
uauuauagagcagaccaugaaaugguuacuaa

SEQ ID NO: 56806 - RNA, 32 nt, Homo Sapiens
guuccuaccucgcgucccuaggcggcggcggc

SEQ ID NO: 56807 - RNA, 32 nt, Homo Sapiens
cuucagacauuuucccacagacuuccuggccu

SEQ ID NO: 56808 - RNA, 32 nt, Homo Sapiens
ugccuggcuuuuucuaauuauauccuagagaa

SEQ ID NO: 56809 - RNA, 32 nt, Homo Sapiens
uuguauguuuugggugugucuauguauguauu

SEQ ID NO: 56810 - RNA, 32 nt, Homo Sapiens
gccaugcugugggggaccugcuccucacagag

SEQ ID NO: 56811 - RNA, 32 nt, Homo Sapiens
uuuuguuuugguuuuuuuuuuuuuuuuggcuu

SEQ ID NO: 56812 - RNA, 32 nt, Homo Sapiens
uaaaguacauuuaauguagaugaccuaaagaa

SEQ ID NO: 56813 - RNA, 32 nt, Homo Sapiens
ggacuaaaggaagaggggaaggaagggacucc

SEQ ID NO: 56814 - RNA, 32 nt, Homo Sapiens
gcuuagcuuugagauacuaagcaagcgaggga

SEQ ID NO: 56815 - RNA, 32 nt, Homo Sapiens
cagucugccuuuguguugauaauuauguacau

SEQ ID NO: 56816 - RNA, 32 nt, Homo Sapiens
uaaaaacaccaauuuauuuggcgcaaaagacu

SEQ ID NO: 56817 - RNA, 32 nt, Homo Sapiens
gguggugggagagcgucaggcuugaacaacau

SEQ ID NO: 56818 - RNA, 32 nt, Homo Sapiens
uuuuaaguucuaugagaauguggauuuauggc

SEQ ID NO: 56819 - RNA, 32 nt, Homo Sapiens
uuucaaucugauuauuugauaaggauauagua

SEQ ID NO: 56820 - RNA, 32 nt, Homo Sapiens
uauuuuguuguccuggucuuaaacuacucuug

SEQ ID NO: 56821 - RNA, 32 nt, Homo Sapiens
guucuuaagaaaccuguucuuaauguuggcau

SEQ ID NO: 56822 - RNA, 32 nt, Homo Sapiens
ccuccccuguucugcugucgccgcccggacag

SEQ ID NO: 56823 - RNA, 32 nt, Homo Sapiens
auaaauugcucuuccuaccccaucccccaucc

SEQ ID NO: 56824 - RNA, 32 nt, Homo Sapiens
uucauuagaaauuuauaucuucaguacucaag

SEQ ID NO: 56825 - RNA, 32 nt, Homo Sapiens
uucccggcaccucccccgccccugcccaccgc

SEQ ID NO: 56826 - RNA, 32 nt, Homo Sapiens
acccagcccuguauucuuauucuucagauauu

SEQ ID NO: 56827 - RNA, 32 nt, Homo Sapiens
acccugccgcgugcaggggucgcggccggcug

SEQ ID NO: 56828 - RNA, 32 nt, Homo Sapiens
cuauuguuguacacagaaauacaguuaaguuu

SEQ ID NO: 56829 - RNA, 32 nt, Homo Sapiens
acccccauaaaggacacccccuucucucuaga

SEQ ID NO: 56830 - RNA, 32 nt, Homo Sapiens
auuccugcuucccucccaucacacuguacccc

SEQ ID NO: 56831 - RNA, 32 nt, Homo Sapiens
cuuaaauauguuuccuaguuuauaauucauuu

SEQ ID NO: 56832 - RNA, 32 nt, Homo Sapiens
gcacccacuuccagcugcucuggccaaaaucu

SEQ ID NO: 56833 - RNA, 32 nt, Homo Sapiens
gcaaacaguaacuaccaaaaccaaugaauauu

SEQ ID NO: 56834 - RNA, 32 nt, Homo Sapiens
aaucucuggguaugucucugguaaagacccuc

SEQ ID NO: 56835 - RNA, 32 nt, Homo Sapiens
uuggagaaggggcauccuaggauuaagaaacc

SEQ ID NO: 56836 - RNA, 32 nt, Homo Sapiens
cuuggcuguuccugaggccuggccuggcuccc

SEQ ID NO: 56837 - RNA, 32 nt, Homo Sapiens
uagguguaugaguauauaugauuucugaaauu

SEQ ID NO: 56838 - RNA, 32 nt, Homo Sapiens
gugcgguggcucaugccuguauucccaguacu

SEQ ID NO: 56839 - RNA, 32 nt, Homo Sapiens
gguaauaucacuaugcauuucuacacauuuua

SEQ ID NO: 56840 - RNA, 32 nt, Homo Sapiens
aaaauuuuagcuuaaggacauuuuaaaauugc

SEQ ID NO: 56841 - RNA, 32 nt, Homo Sapiens
cucucauucuucuccuuccugccaccauguga

SEQ ID NO: 56842 - RNA, 29 nt, Homo Sapiens
agcugugugacuuugcugaagucauuucu

SEQ ID NO: 56843 - RNA, 32 nt, Homo Sapiens
cuuagaauaaagaaacaaagacuaucauggca

SEQ ID NO: 56844 - RNA, 32 nt, Homo Sapiens
ggcguuguuaacaaaaucauauccauccuacu

SEQ ID NO: 56845 - RNA, 32 nt, Homo Sapiens
ccuucucugaggcucugaaaggucuugggccu

SEQ ID NO: 56846 - RNA, 32 nt, Homo Sapiens
aaagccauggauuaauaggaacugaagcgccg

SEQ ID NO: 56847 - RNA, 32 nt, Homo Sapiens
cucaguuuuuauuaaccaccucuucuguguuu

SEQ ID NO: 56848 - RNA, 32 nt, Homo Sapiens
agguacauuuucaaaucaauguauaguaguuc

SEQ ID NO: 56849 - RNA, 30 nt, Homo Sapiens
gccuaugucugugcuucauuggcgucaucu

SEQ ID NO: 56850 - RNA, 32 nt, Homo Sapiens
gccgcgagcgccccugccgcggugccuggccu

SEQ ID NO: 56851 - RNA, 32 nt, Homo Sapiens
cgucccacaccagccgcaggugaaaaccggca

SEQ ID NO: 56852 - RNA, 32 nt, Homo Sapiens
auauauuagccuagccauuauguuagccuuug

SEQ ID NO: 56853 - RNA, 32 nt, Homo Sapiens
gauucaaauuuauccugugaaacuggcuuuau

SEQ ID NO: 56854 - RNA, 32 nt, Homo Sapiens
acaggugguuccugggguccugagauccagcc

SEQ ID NO: 56855 - RNA, 32 nt, Homo Sapiens
uaccggacacucgucaccccagcccucggguc

SEQ ID NO: 56856 - RNA, 32 nt, Homo Sapiens
agugucaccauguggugcgucuccugggugug

SEQ ID NO: 56857 - RNA, 30 nt, Homo Sapiens
aggcccccacuugccucuuccuugaagaac

SEQ ID NO: 56858 - RNA, 32 nt, Homo Sapiens
ccucacaggaggauggaggcccacaacgcguc

SEQ ID NO: 56859 - RNA, 32 nt, Homo Sapiens
ccgagggccgucguggccgccgucgccacggg

SEQ ID NO: 56860 - RNA, 32 nt, Homo Sapiens
agcugcagaaccagucccucugagugaagucc

SEQ ID NO: 56861 - RNA, 32 nt, Homo Sapiens
agcauggaaaaccaauuuguauuuucauauua

SEQ ID NO: 56862 - RNA, 32 nt, Homo Sapiens
guguuccuucacucccuagaaacugcacuuuc

SEQ ID NO: 56863 - RNA, 32 nt, Homo Sapiens
ucacuggagaaaggggcugugcuggggccaga

SEQ ID NO: 56864 - RNA, 32 nt, Homo Sapiens
aggggccggccucagcugucaccagcacuuuu

SEQ ID NO: 56865 - RNA, 32 nt, Homo Sapiens
cuaacgcggaggggcgccuggaggcggcgugg

SEQ ID NO: 56866 - RNA, 32 nt, Homo Sapiens
uuauuuuuaaacauggcuaguugucaguaugu

SEQ ID NO: 56867 - RNA, 32 nt, Homo Sapiens
aaggggccuauccauuccauuguggaagcugg

SEQ ID NO: 56868 - RNA, 32 nt, Homo Sapiens
ggggaucuguuucagaucuaggcauaaccugu

SEQ ID NO: 56869 - RNA, 32 nt, Homo Sapiens
aaaauaagcauuggguguuuugcaauggcuac

SEQ ID NO: 56870 - RNA, 32 nt, Homo Sapiens
ggugaaagcuguggucuaacuccaccggcucu

SEQ ID NO: 56871 - RNA, 32 nt, Homo Sapiens
ccacauugcuucaccuggccccaccauggcug

SEQ ID NO: 56872 - RNA, 32 nt, Homo Sapiens
ggucugcucugugccugggaucaguggggccc

SEQ ID NO: 56873 - RNA, 32 nt, Homo Sapiens
uucuugucuuucauaggugaaaagcaccagag

SEQ ID NO: 56874 - RNA, 30 nt, Homo Sapiens
caaagcgcugccgccgccgucgccgccacc

SEQ ID NO: 56875 - RNA, 32 nt, Homo Sapiens
gaaucuuugauuauggcugaauguucucauuc

SEQ ID NO: 56876 - RNA, 32 nt, Homo Sapiens
ggcggcggucggugcugcgagagcggcggcgg

SEQ ID NO: 56877 - RNA, 32 nt, Homo Sapiens
ucccuguaacgguaaugcugcagaacugcaac

SEQ ID NO: 56878 - RNA, 32 nt, Homo Sapiens
cguuggggacgccccucccagagcccagguca

SEQ ID NO: 56879 - RNA, 32 nt, Homo Sapiens
caaguaguuugacucaguauagguagggagau

SEQ ID NO: 56880 - RNA, 32 nt, Homo Sapiens
acugggcugauccugaaggccauuccagccag

SEQ ID NO: 56881 - RNA, 32 nt, Homo Sapiens
cccucuccuaguuuuccaacaagacacuccaa

SEQ ID NO: 56882 - RNA, 30 nt, Homo Sapiens
ggagaugucugugcuuggagguaccucaga

SEQ ID NO: 56883 - RNA, 32 nt, Homo Sapiens
aagcuugcugggcuugcauuuaaucaaugcau

SEQ ID NO: 56884 - RNA, 32 nt, Homo Sapiens
ugucagauguaauuguaaaugucaguaaucac

SEQ ID NO: 56885 - RNA, 32 nt, Homo Sapiens
agaagaaaugagaaagggacuccaucuucauu

SEQ ID NO: 56886 - RNA, 32 nt, Homo Sapiens
cucugguucagcucauacaacagcuucuuagg

SEQ ID NO: 56887 - RNA, 32 nt, Homo Sapiens
auacuauacugugguuuguuuuccugucccca

SEQ ID NO: 56888 - RNA, 32 nt, Homo Sapiens
ucuuaauauuaugauuuugauaaaaacagaag

SEQ ID NO: 56889 - RNA, 32 nt, Homo Sapiens
ccucugcuccugcugaucugugccacugaacu

SEQ ID NO: 56890 - RNA, 32 nt, Homo Sapiens
uuggaguugaucucagaaaggcuaagagagua

SEQ ID NO: 56891 - RNA, 32 nt, Homo Sapiens
agauaaagaaacaaaaucuuagggaagauaag

SEQ ID NO: 56892 - RNA, 32 nt, Homo Sapiens
ccugggguugucaugcagcgggggguggagga

SEQ ID NO: 56893 - RNA, 32 nt, Homo Sapiens
aagcaacccuccugccucagucuugcaaagug

SEQ ID NO: 56894 - RNA, 32 nt, Homo Sapiens
aaaguucaggcucccccucccuuuuaucacuc

SEQ ID NO: 56895 - RNA, 32 nt, Homo Sapiens
agaacccaguguuucuccagcauggauagagu

SEQ ID NO: 56896 - RNA, 32 nt, Homo Sapiens
gcggcgggcuccuggggucucgccugagacgg

SEQ ID NO: 56897 - RNA, 32 nt, Homo Sapiens
uauuagccaaccccaaaggagcagugguuuuc

SEQ ID NO: 56898 - RNA, 32 nt, Homo Sapiens
uagccuggcagccuacaucuccccucagccuc

SEQ ID NO: 56899 - RNA, 32 nt, Homo Sapiens
ccacugccuaccucacagggcuguugugagga

SEQ ID NO: 56900 - RNA, 32 nt, Homo Sapiens
caugcgcggccccccuggccaagccggcgggc

SEQ ID NO: 56901 - RNA, 32 nt, Homo Sapiens
cuggaagaggucuggguggggaggccaguucc

SEQ ID NO: 56902 - RNA, 32 nt, Homo Sapiens
auguagggcuaucgggaagugccagggccugu

SEQ ID NO: 56903 - RNA, 32 nt, Homo Sapiens
ugguaaacggguaaugcaugggaaauaaugag

SEQ ID NO: 56904 - RNA, 32 nt, Homo Sapiens
gauuuuugugauuuagaacuguaugucagaca

SEQ ID NO: 56905 - RNA, 32 nt, Homo Sapiens
gcucuuuucauugaagaguugaggauguggca

SEQ ID NO: 56906 - RNA, 31 nt, Homo Sapiens
ugcaggauguacagcucuggguggccugcag

SEQ ID NO: 56907 - RNA, 32 nt, Homo Sapiens
cauggcguggcagcugcgugaauaccaggagc

SEQ ID NO: 56908 - RNA, 32 nt, Homo Sapiens
uaccauggaaugucagaaaugacuuuaucauc

SEQ ID NO: 56909 - RNA, 32 nt, Homo Sapiens
cucucagaugcuuuuucuuuggauacaacaca

SEQ ID NO: 56910 - RNA, 32 nt, Homo Sapiens
uaaguuuccuuuugugucauucaguguaaaac

SEQ ID NO: 56911 - RNA, 32 nt, Homo Sapiens
uucugcuucagagcaggagaaccaucacaagc

SEQ ID NO: 56912 - RNA, 32 nt, Homo Sapiens
cccccagcccgcccagugagaaaugucccucu

SEQ ID NO: 56913 - RNA, 32 nt, Homo Sapiens
cagguagaugagccuuuuuuuuuuuuuuuuua

SEQ ID NO: 56914 - RNA, 32 nt, Homo Sapiens
gguuauugauauccucuucuuaaaaaugagua

SEQ ID NO: 56915 - RNA, 32 nt, Homo Sapiens
ggcuguuuuuuggcaaaucuugauugugauaa

SEQ ID NO: 56916 - RNA, 32 nt, Homo Sapiens
caauggaaaaauacauguuuguuacuuuuuau

SEQ ID NO: 56917 - RNA, 32 nt, Homo Sapiens
agcugaccccuacauuagcaucaauaaaguaa

SEQ ID NO: 56918 - RNA, 32 nt, Homo Sapiens
caagagacauuuugaggccuaaagaucauagg

SEQ ID NO: 56919 - RNA, 29 nt, Homo Sapiens
cuaccuauauguauuccauggcuaacaaa

SEQ ID NO: 56920 - RNA, 32 nt, Homo Sapiens
aaagugcugggaagagggguggggagucacgg

SEQ ID NO: 56921 - RNA, 32 nt, Homo Sapiens
accgagcagcgggcaucaaguucccuucgccg

SEQ ID NO: 56922 - RNA, 32 nt, Homo Sapiens
aagauuguuuuaaacuucaggaguucuuuugg

SEQ ID NO: 56923 - RNA, 32 nt, Homo Sapiens
uaugccuggcucucuagcaucauuuccuauau

SEQ ID NO: 56924 - RNA, 32 nt, Homo Sapiens
caucauuuguauuauguuccaaggcuacuaca

SEQ ID NO: 56925 - RNA, 32 nt, Homo Sapiens
ggccugggggcagcccuuccccugccuagucc

SEQ ID NO: 56926 - RNA, 32 nt, Homo Sapiens
aaagagaagcaucagucuaacaagccagaacu

SEQ ID NO: 56927 - RNA, 32 nt, Homo Sapiens
uccccagggcccggcaccuccugcugcgagac

SEQ ID NO: 56928 - RNA, 32 nt, Homo Sapiens
aacagagaagcacguaacgaaaugcuuucuuu

SEQ ID NO: 56929 - RNA, 32 nt, Homo Sapiens
ugggccugccuugaguggccuugucccguccu

SEQ ID NO: 56930 - RNA, 32 nt, Homo Sapiens
ggcuuuagugcagcugccaacgcuguuaggcc

SEQ ID NO: 56931 - RNA, 32 nt, Homo Sapiens
ccaagucgugccccgcacggccgcccggggcc

SEQ ID NO: 56932 - RNA, 32 nt, Homo Sapiens
gguggaguucccucccaaacaccagaccacac

SEQ ID NO: 56933 - RNA, 29 nt, Homo Sapiens
acaaacauauguaucuuuggggaaacuaa

SEQ ID NO: 56934 - RNA, 32 nt, Homo Sapiens
uugcaauaacuaaaacuuguucauuauuauca

SEQ ID NO: 56935 - RNA, 32 nt, Homo Sapiens
uucucaugucauucugcacacagucucugcau

SEQ ID NO: 56936 - RNA, 32 nt, Homo Sapiens
guuauuucacuuagagaugcuuccucaaagag

SEQ ID NO: 56937 - RNA, 32 nt, Homo Sapiens
aagguagcuaaaccaauuuuuaaaagauucaa

SEQ ID NO: 56938 - RNA, 32 nt, Homo Sapiens
ccgucggugcuguggucacccuggacagcagc

SEQ ID NO: 56939 - RNA, 32 nt, Homo Sapiens
accaacccugaacgucucaggacaaauaauuc

SEQ ID NO: 56940 - RNA, 32 nt, Homo Sapiens
aauccguugagaaagcacugugugaugcauuu

SEQ ID NO: 56941 - RNA, 32 nt, Homo Sapiens
cagcagaacugggaggugcaaaggaccgugga

SEQ ID NO: 56942 - RNA, 32 nt, Homo Sapiens
uguguuggagugcccuggcugcugcucugcau

SEQ ID NO: 56943 - RNA, 32 nt, Homo Sapiens
uuccaucucuucugcgguaauucaucacauag

SEQ ID NO: 56944 - RNA, 30 nt, Homo Sapiens
aggagcuccggguugccgccgccgccgccg

SEQ ID NO: 56945 - RNA, 32 nt, Homo Sapiens
aggugggcucugcagcgggaccaugcugcucc

SEQ ID NO: 56946 - RNA, 32 nt, Homo Sapiens
cagcuguuuaggcuauagaauauugaugugug

SEQ ID NO: 56947 - RNA, 32 nt, Homo Sapiens
uuuuuucccucuauuguuuaaauuuuauuuaa

SEQ ID NO: 56948 - RNA, 32 nt, Homo Sapiens
gaucacuugagcucaggaguuugagaccagcc

SEQ ID NO: 56949 - RNA, 32 nt, Homo Sapiens
acuauuuuaaauagaaauuauuucaacaauua

SEQ ID NO: 56950 - RNA, 32 nt, Homo Sapiens
acuagaauuagcaaacaaaaccacccugacau

SEQ ID NO: 56951 - RNA, 32 nt, Homo Sapiens
gcaugggccgaggugccuccuccucacugucc

SEQ ID NO: 56952 - RNA, 32 nt, Homo Sapiens
uuuuucucagaccucucagggaugguauuggc

SEQ ID NO: 56953 - RNA, 32 nt, Homo Sapiens
ccagcucccagccccagugccggguccucccu

SEQ ID NO: 56954 - RNA, 32 nt, Homo Sapiens
aggcuucggcccggccgccgccgcacauaaac

SEQ ID NO: 56955 - RNA, 32 nt, Homo Sapiens
aggcuucggcccggccgccgccacacauaagc

SEQ ID NO: 56956 - RNA, 32 nt, Homo Sapiens
uguucccuuuauuuuaacauuguacagacaau

SEQ ID NO: 56957 - RNA, 32 nt, Homo Sapiens
uuaaugauuucaaagaaaauaaugguucuuug

SEQ ID NO: 56958 - RNA, 32 nt, Homo Sapiens
gagaauaucuuacuguaagaaacaaggaaaau

SEQ ID NO: 56959 - RNA, 32 nt, Homo Sapiens
gucccacaauuugcuuucuccuccucaagggu

SEQ ID NO: 56960 - RNA, 32 nt, Homo Sapiens
ucgagagcauccuggccaacguggugaaaccc

SEQ ID NO: 56961 - RNA, 32 nt, Homo Sapiens
uaugcuguccucacugggccuguccacagugc

SEQ ID NO: 56962 - RNA, 32 nt, Homo Sapiens
ugaugcaugcuucugcugauucccgagcacca

SEQ ID NO: 56963 - RNA, 32 nt, Homo Sapiens
cgcgagcgggcggcggcugugcggugcggugc

SEQ ID NO: 56964 - RNA, 32 nt, Homo Sapiens
ucuagcccuaaauuauuucuuguugauugcug

SEQ ID NO: 56965 - RNA, 32 nt, Homo Sapiens
gggguucucaggccaggauacaugcuggcgcu

SEQ ID NO: 56966 - RNA, 32 nt, Homo Sapiens
ggggccugugcccuuccagggccagugagaca

SEQ ID NO: 56967 - RNA, 32 nt, Homo Sapiens
uuuguguaaguuuguuugauaaaacugcuuau

SEQ ID NO: 56968 - RNA, 32 nt, Homo Sapiens
gcagcagccuccguaggcacccgcacccugcc

SEQ ID NO: 56969 - RNA, 32 nt, Homo Sapiens
ccucugcccucauccggcccagcccccaucca

SEQ ID NO: 56970 - RNA, 32 nt, Homo Sapiens
auuucacggaaacacaucuuuguuuguaaugc

SEQ ID NO: 56971 - RNA, 32 nt, Homo Sapiens
ugcccugcuuugugucccaccucucccccucc

SEQ ID NO: 56972 - RNA, 32 nt, Homo Sapiens
acagcaaacccaaauguugucuacacaugugu

SEQ ID NO: 56973 - RNA, 32 nt, Homo Sapiens
uccuucccacugcuccacgggcugcucgggaa

SEQ ID NO: 56974 - RNA, 32 nt, Homo Sapiens
gcagcgcaggcaugugacuggugcugcggcgg

SEQ ID NO: 56975 - RNA, 32 nt, Homo Sapiens
augcaaucucaaaauaucuauuuauuuuauuu

SEQ ID NO: 56976 - RNA, 32 nt, Homo Sapiens
ugcccugcuuggcuugagccugcccaacugaa

SEQ ID NO: 56977 - RNA, 32 nt, Homo Sapiens
acgcacagaacgauaacgcagaugggagcaug

SEQ ID NO: 56978 - RNA, 32 nt, Homo Sapiens
gcccccagccccaacucuccgcgcuuacuccu

SEQ ID NO: 56979 - RNA, 32 nt, Homo Sapiens
gacccccggcggcggcagccugccuugcucug

SEQ ID NO: 56980 - RNA, 32 nt, Homo Sapiens
cgucuuuaguaaaauuggcagaucucagucuu

SEQ ID NO: 56981 - RNA, 32 nt, Homo Sapiens
gccagauucguuaggucccuggaggaaggacu

SEQ ID NO: 56982 - RNA, 32 nt, Homo Sapiens
cucggaagaacaggugugaaugcccuugaauc

SEQ ID NO: 56983 - RNA, 32 nt, Homo Sapiens
gaggaugcggggggcugcggacgguggcgagg

SEQ ID NO: 56984 - RNA, 32 nt, Homo Sapiens
gagaugaggaggcgucgcgcgcgccuguagcu

SEQ ID NO: 56985 - RNA, 32 nt, Homo Sapiens
ugaaagaaugucaagccaugauggaaaaugcc

SEQ ID NO: 56986 - RNA, 32 nt, Homo Sapiens
uaagacuuuuggagccauuuaauuguacuuaa

SEQ ID NO: 56987 - RNA, 32 nt, Homo Sapiens
ugaauuaaaaauuuuggaacaauuagaauuca

SEQ ID NO: 56988 - RNA, 32 nt, Homo Sapiens
ucuaguaagggagacuuguuggagaggcggga

SEQ ID NO: 56989 - RNA, 32 nt, Homo Sapiens
aacagcugcaauuauuuaucuucacucauuuc

SEQ ID NO: 56990 - RNA, 32 nt, Homo Sapiens
augauaauggagcaaguggccaaacaucagaa

SEQ ID NO: 56991 - RNA, 32 nt, Homo Sapiens
gguaucuucuucugcacuuccaagcucuuuca

SEQ ID NO: 56992 - RNA, 32 nt, Homo Sapiens
caguucugcuucagccuccagaauaguuggga

SEQ ID NO: 56993 - RNA, 32 nt, Homo Sapiens
aauugguggcucaggauaggucuuaaauuuua

SEQ ID NO: 56994 - RNA, 32 nt, Homo Sapiens
augagagcgaugacaucaacuccaucaugucu

SEQ ID NO: 56995 - RNA, 32 nt, Homo Sapiens
cagcaagauccugucuaaaaauaaaaagaaaa

SEQ ID NO: 56996 - RNA, 32 nt, Homo Sapiens
augccuguaauccagcacuuugggaggccgag

SEQ ID NO: 56997 - RNA, 32 nt, Homo Sapiens
ccccacuuauucuccuauuuggaaucuucaac

SEQ ID NO: 56998 - RNA, 32 nt, Homo Sapiens
ucacaggggcaagagggacucuaaagagggcg

SEQ ID NO: 56999 - RNA, 32 nt, Homo Sapiens
uggacuguaugccaguuagucuccauuuauuc

SEQ ID NO: 57000 - RNA, 26 nt, Homo Sapiens
uagggccuuuuggagguaaagguaua

SEQ ID NO: 57001 - RNA, 32 nt, Homo Sapiens
uucuuuuccccucuucuuuuucacaaauguuc

SEQ ID NO: 57002 - RNA, 32 nt, Homo Sapiens
aauuacugauucaauuugaaauguagaauaaa

SEQ ID NO: 57003 - RNA, 32 nt, Homo Sapiens
gcuacagucaacaaaaauugggcuaagucacu

SEQ ID NO: 57004 - RNA, 32 nt, Homo Sapiens
cgucuaauccucccaaccaaccagcaggguag

SEQ ID NO: 57005 - RNA, 32 nt, Homo Sapiens
gcggcggaccccuccuucuccuccccgcgugc

SEQ ID NO: 57006 - RNA, 32 nt, Homo Sapiens
auuuuuuguacaaaguuuuuucuuaaacugua

SEQ ID NO: 57007 - RNA, 29 nt, Homo Sapiens
ccaccucggggaccaaggacgccuccgug

SEQ ID NO: 57008 - RNA, 32 nt, Homo Sapiens
uacaaggcagcagaaaccuacugcagggugaa

SEQ ID NO: 57009 - RNA, 32 nt, Homo Sapiens
cccagaaugaacuuguguccaucccagagauc

SEQ ID NO: 57010 - RNA, 32 nt, Homo Sapiens
auaccuauaaagaggaucguaguguguuuaaa

SEQ ID NO: 57011 - RNA, 32 nt, Homo Sapiens
gggaacagcaagauggcaaaagcuugcugagu

SEQ ID NO: 57012 - RNA, 32 nt, Homo Sapiens
ugggaaguaagcacccauacuugguagaaaca

SEQ ID NO: 57013 - RNA, 32 nt, Homo Sapiens
uuccggagcagcucgagccuucggguccacaa

SEQ ID NO: 57014 - RNA, 32 nt, Homo Sapiens
gcgucgcaggccggcccggcggccgugacaau

SEQ ID NO: 57015 - RNA, 32 nt, Homo Sapiens
cugcccugccagcaucucagcauccugacuag

SEQ ID NO: 57016 - RNA, 32 nt, Homo Sapiens
accaaugugagccugcccccaagcccccucuc

SEQ ID NO: 57017 - RNA, 32 nt, Homo Sapiens
gcuacuucuuccccaaaaggcaucauggcugc

SEQ ID NO: 57018 - RNA, 32 nt, Homo Sapiens
gcgaggggugccugcagccgggaccccuuccu

SEQ ID NO: 57019 - RNA, 32 nt, Homo Sapiens
uuaaguaacuccuuguuucccaaauaccaagc

SEQ ID NO: 57020 - RNA, 32 nt, Homo Sapiens
gaacuucuucauucuuuuuauaagugaauaga

SEQ ID NO: 57021 - RNA, 32 nt, Homo Sapiens
ucacuuuuaaauuuaugauuugauuugaauac

SEQ ID NO: 57022 - RNA, 32 nt, Homo Sapiens
ucuguguacuauagacccuuuggacuuuaguu

SEQ ID NO: 57023 - RNA, 32 nt, Homo Sapiens
cuucagaaagguccuaguugaggucaucagca

SEQ ID NO: 57024 - RNA, 32 nt, Homo Sapiens
uagcuguguuuugcucuucucuaacuuaccaa

SEQ ID NO: 57025 - RNA, 32 nt, Homo Sapiens
aggcugccaucccaccugguuccaccucgcca

SEQ ID NO: 57026 - RNA, 32 nt, Homo Sapiens
gagauuauuuuuccuuaugaaaaaugaucugu

SEQ ID NO: 57027 - RNA, 32 nt, Homo Sapiens
gacagaggcagacuggagugaugcggccacaa

SEQ ID NO: 57028 - RNA, 32 nt, Homo Sapiens
ucguucucuccucuccucucuucuuguuugaa

SEQ ID NO: 57029 - RNA, 32 nt, Homo Sapiens
cugagugcgcugggcuuggggaagucggaagg

SEQ ID NO: 57030 - RNA, 32 nt, Homo Sapiens
accguuuauugcccaacacguuauucuugcug

SEQ ID NO: 57031 - RNA, 32 nt, Homo Sapiens
uggcgucggaagccugaagcaugggcgcugag

SEQ ID NO: 57032 - RNA, 32 nt, Homo Sapiens
caacuuggucccuaucuuccagcagguuagag

SEQ ID NO: 57033 - RNA, 32 nt, Homo Sapiens
agacuuguuucaugaugaugcucuggaaugcu

SEQ ID NO: 57034 - RNA, 32 nt, Homo Sapiens
uuucgauuuuucgcuuuuuuuuuuugggacgg

SEQ ID NO: 57035 - RNA, 32 nt, Homo Sapiens
uucugaguggccuggguuaccgcgcgaucuac

SEQ ID NO: 57036 - RNA, 32 nt, Homo Sapiens
uaaaacuucuauuugcuguuuuguuuuguuuu

SEQ ID NO: 57037 - RNA, 32 nt, Homo Sapiens
aagcgugcucauuuucuguuuuccuguguuag

SEQ ID NO: 57038 - RNA, 32 nt, Homo Sapiens
gagcagcacucuccccaccuucagcagaacuu

SEQ ID NO: 57039 - RNA, 32 nt, Homo Sapiens
ugaaggagauaaacacuucuacaacuuaaauu

SEQ ID NO: 57040 - RNA, 32 nt, Homo Sapiens
cucccauccugucucaccuggaccucaguaaa

SEQ ID NO: 57041 - RNA, 32 nt, Homo Sapiens
aguucccagccccgaccccacccaaaggggcc

SEQ ID NO: 57042 - RNA, 32 nt, Homo Sapiens
gaauaauuauuacaugguacuacaucacccug

SEQ ID NO: 57043 - RNA, 32 nt, Homo Sapiens
gagucauagauauggacuguuggaauggggac

SEQ ID NO: 57044 - RNA, 32 nt, Homo Sapiens
ccccggagcccggccccggggaacuagggagc

SEQ ID NO: 57045 - RNA, 32 nt, Homo Sapiens
aacacuaaaaauacaauucaaauuuauuagcu

SEQ ID NO: 57046 - RNA, 32 nt, Homo Sapiens
uggcaccaacuggucaaugggugcuuggugcc

SEQ ID NO: 57047 - RNA, 32 nt, Homo Sapiens
ucuucuccuugauggugagcuccuucgggaug

SEQ ID NO: 57048 - RNA, 32 nt, Homo Sapiens
cuggccacuccagugcaccaggaugcaagcac

SEQ ID NO: 57049 - RNA, 32 nt, Homo Sapiens
agcaguuuccaguccuaacaaaugcucccacc

SEQ ID NO: 57050 - RNA, 32 nt, Homo Sapiens
caaaaaaguuaaagauuuuauguaucacuaac

SEQ ID NO: 57051 - RNA, 32 nt, Homo Sapiens
guuuucaccauguuggucaggcuggucucaaa

SEQ ID NO: 57052 - RNA, 32 nt, Homo Sapiens
uaaaaggacuugagggaagcaucugggccccu

SEQ ID NO: 57053 - RNA, 32 nt, Homo Sapiens
ucagugaggaggaggaauaguaauugucaaug

SEQ ID NO: 57054 - RNA, 32 nt, Homo Sapiens
cucagaaagcacccucagggaaaaaggugaaa

SEQ ID NO: 57055 - RNA, 32 nt, Homo Sapiens
uuccagaggugauuaaggugaagugaggucac

SEQ ID NO: 57056 - RNA, 32 nt, Homo Sapiens
ccucccuucccuucauaccccuccucaacguu

SEQ ID NO: 57057 - RNA, 32 nt, Homo Sapiens
ucaucugcggcaucugucaucaucugucagca

SEQ ID NO: 57058 - RNA, 32 nt, Homo Sapiens
uuguccgcgggcccagcccccgcgcugaacgc

SEQ ID NO: 57059 - RNA, 32 nt, Homo Sapiens
gggaaguuguguggcuggaaacccaggcaggg

SEQ ID NO: 57060 - RNA, 32 nt, Homo Sapiens
cuggcagcugaaugauagacaaauagugcaaa

SEQ ID NO: 57061 - RNA, 32 nt, Homo Sapiens
ugauguaauuuucuguacucaccauuugaagu

SEQ ID NO: 57062 - RNA, 32 nt, Homo Sapiens
ccccggcccugcugccacagcaguaaugaaau

SEQ ID NO: 57063 - RNA, 29 nt, Homo Sapiens
aagcaugucaggaaucucugggugccccu

SEQ ID NO: 57064 - RNA, 32 nt, Homo Sapiens
aacggaggcguacuugccauugauucacauga

SEQ ID NO: 57065 - RNA, 31 nt, Homo Sapiens
gaacaaaaauaaaaauguauaacauuuguac

SEQ ID NO: 57066 - RNA, 32 nt, Homo Sapiens
acacgcgaccggcagcuccuggagcgggcgga

SEQ ID NO: 57067 - RNA, 32 nt, Homo Sapiens
cggcgccgcgcggccgcgcuagaauggaggcg

SEQ ID NO: 57068 - RNA, 27 nt, Homo Sapiens
ugucgucuuugcuucagccgcagucgc

SEQ ID NO: 57069 - RNA, 32 nt, Homo Sapiens
auuaugaaaaacuuuaaacauaaaguaguaga

SEQ ID NO: 57070 - RNA, 28 nt, Homo Sapiens
cucgacuuccagggcccaagcgauccuc

SEQ ID NO: 57071 - RNA, 30 nt, Homo Sapiens
gcaauauuuugugcugaagaccucuuuuac

SEQ ID NO: 57072 - RNA, 32 nt, Homo Sapiens
gugcccagcugacgagcuuuugaagauggcac

SEQ ID NO: 57073 - RNA, 32 nt, Homo Sapiens
ccuucuuugucaagccaggacccgcccacggu

SEQ ID NO: 57074 - RNA, 32 nt, Homo Sapiens
ucaaggugaagauaauaccuaagaggaacacu

SEQ ID NO: 57075 - RNA, 32 nt, Homo Sapiens
ugaaaggugacaaagaagcugaagaugggugg

SEQ ID NO: 57076 - RNA, 32 nt, Homo Sapiens
cucaacccucaccuccaucccccgucacccag

SEQ ID NO: 57077 - RNA, 32 nt, Homo Sapiens
auauuuuuuccuuguuuuuucuuuguuaaaac

SEQ ID NO: 57078 - RNA, 32 nt, Homo Sapiens
aaaccuaaauuaaugaaccauauuuuuaaaau

SEQ ID NO: 57079 - RNA, 32 nt, Homo Sapiens
ggacucuucugcuugucacuugucaggaaugu

SEQ ID NO: 57080 - RNA, 32 nt, Homo Sapiens
aaaauguuguauaugucuuuuacccggcacau

SEQ ID NO: 57081 - RNA, 32 nt, Homo Sapiens
agaugaguccuuaugacucuugauaagccuga

SEQ ID NO: 57082 - RNA, 32 nt, Homo Sapiens
cuuucccugauguuuaggaaaaucacaggagg

SEQ ID NO: 57083 - RNA, 32 nt, Homo Sapiens
cccagccaaggugcugguguugccagcagugc

SEQ ID NO: 57084 - RNA, 32 nt, Homo Sapiens
aagcucugaugucaaggccagagcaguugaga

SEQ ID NO: 57085 - RNA, 32 nt, Homo Sapiens
uuggacucuaggguccuuguccugcucaggca

SEQ ID NO: 57086 - RNA, 32 nt, Homo Sapiens
ggucuggucaccccucucuccuccuggggcug

SEQ ID NO: 57087 - RNA, 32 nt, Homo Sapiens
agcaagucucucuccuucccugguccucaguu

SEQ ID NO: 57088 - RNA, 32 nt, Homo Sapiens
cccagucgccagggggcgcccgcgggagcccg

SEQ ID NO: 57089 - RNA, 32 nt, Homo Sapiens
aggaauaugaacauaacaggaagguaucauug

SEQ ID NO: 57090 - RNA, 32 nt, Homo Sapiens
auuuugucaaauauuaaaaauuuugccauuau

SEQ ID NO: 57091 - RNA, 32 nt, Homo Sapiens
cgggagagagggaacggaggaugugugagugu

SEQ ID NO: 57092 - RNA, 32 nt, Homo Sapiens
guagguuuugguuuuuugaucuuuauaaagau

SEQ ID NO: 57093 - RNA, 32 nt, Homo Sapiens
guguugcguggcaucacguggacguggcuuaa

SEQ ID NO: 57094 - RNA, 32 nt, Homo Sapiens
guauauuuauuucuucuuuuccaaauacaaau

SEQ ID NO: 57095 - RNA, 32 nt, Homo Sapiens
uguuccucaucaacaccaaggaucugcagguc

SEQ ID NO: 57096 - RNA, 32 nt, Homo Sapiens
cugcuccgcgcgcgcccgcgggaggaggaacc

SEQ ID NO: 57097 - RNA, 32 nt, Homo Sapiens
agaggggauuggcuuuggggaacuugcuuuga

SEQ ID NO: 57098 - RNA, 32 nt, Homo Sapiens
gcaguugcccaauuccuuuaauaaaaagaaac

SEQ ID NO: 57099 - RNA, 32 nt, Homo Sapiens
aaauaccaccgccaucauucugcucauccucc

SEQ ID NO: 57100 - RNA, 32 nt, Homo Sapiens
cacaacccauuugugagcaaaagcagaagugg

SEQ ID NO: 57101 - RNA, 32 nt, Homo Sapiens
gagccaccgugcccggcccagauagguugauc

SEQ ID NO: 57102 - RNA, 32 nt, Homo Sapiens
auggugaggaaugccuaagucuuagugaccaa

SEQ ID NO: 57103 - RNA, 32 nt, Homo Sapiens
uggagccaagggugggguuucaccugcgaaca

SEQ ID NO: 57104 - RNA, 32 nt, Homo Sapiens
cuagaagccauguacagagaaguaaaaguaag

SEQ ID NO: 57105 - RNA, 32 nt, Homo Sapiens
acccuaggguggacagaagaggccuccugaua

SEQ ID NO: 57106 - RNA, 28 nt, Homo Sapiens
ucagaaguggagaacauuaucuuuuauu

SEQ ID NO: 57107 - RNA, 32 nt, Homo Sapiens
cucggcucccgacgcaagccugccccggggaa

SEQ ID NO: 57108 - RNA, 32 nt, Homo Sapiens
caacaccguccucaucuauccaggcagaagga

SEQ ID NO: 57109 - RNA, 32 nt, Homo Sapiens
agaaguucaaaaugaaguguuggcagaaacau

SEQ ID NO: 57110 - RNA, 32 nt, Homo Sapiens
agccgcgggaccagcgccugaggugccccgga

SEQ ID NO: 57111 - RNA, 32 nt, Homo Sapiens
cucaggccagcagcacccugcccgccucugcc

SEQ ID NO: 57112 - RNA, 32 nt, Homo Sapiens
auccccaccuugcuaaauuugcuuguguugcu

SEQ ID NO: 57113 - RNA, 32 nt, Homo Sapiens
cagugcaggccccuucuuggccccacccucua

SEQ ID NO: 57114 - RNA, 32 nt, Homo Sapiens
uuaacagacacugauacccagcuaaagcggcu

SEQ ID NO: 57115 - RNA, 32 nt, Homo Sapiens
ugcucucucccucuccucccaccccacucaca

SEQ ID NO: 57116 - RNA, 32 nt, Homo Sapiens
uaagaaugugguaugauacuaguaaugaaggc

SEQ ID NO: 57117 - RNA, 32 nt, Homo Sapiens
ccaccugucaggcugcgcugggucagcgcagc

SEQ ID NO: 57118 - RNA, 32 nt, Homo Sapiens
ucugaauuaaugagccuuguguuuacaaauau

SEQ ID NO: 57119 - RNA, 32 nt, Homo Sapiens
uaaaauaucccaacaguucuuaaaugaaaacu

SEQ ID NO: 57120 - RNA, 32 nt, Homo Sapiens
uaaguauagaaagucauuagaagcagaacuga

SEQ ID NO: 57121 - RNA, 32 nt, Homo Sapiens
ucccgagacuauauaucauugucuuuuucagc

SEQ ID NO: 57122 - RNA, 32 nt, Homo Sapiens
caaaauauuuaaaacuuuuucaugauuucugu

SEQ ID NO: 57123 - RNA, 32 nt, Homo Sapiens
gauuuuaagcaguccgaaauaauagcaauuca

SEQ ID NO: 57124 - RNA, 32 nt, Homo Sapiens
aucacaacaggcuucgcaaaaucuucaguugc

SEQ ID NO: 57125 - RNA, 32 nt, Homo Sapiens
ccccgcgugucugcuaggagagggcgggcagc

SEQ ID NO: 57126 - RNA, 32 nt, Homo Sapiens
uauguuaggauuacccucugguaauugauaca

SEQ ID NO: 57127 - RNA, 32 nt, Homo Sapiens
ccauuacaauacugcuuucucagguucuuaac

SEQ ID NO: 57128 - RNA, 32 nt, Homo Sapiens
aacaccguccaaaacuaucuaccuaucucuuc

SEQ ID NO: 57129 - RNA, 32 nt, Homo Sapiens
uacuuucuguguuucuagagaccaagaagcgg

SEQ ID NO: 57130 - RNA, 32 nt, Homo Sapiens
accauguuccuggcacacuggaccucaccaug

SEQ ID NO: 57131 - RNA, 32 nt, Homo Sapiens
uccaggcauugagcgcacacagaaucacgacu

SEQ ID NO: 57132 - RNA, 32 nt, Homo Sapiens
ucagagcccuuaauaguucagugaggucacuu

SEQ ID NO: 57133 - RNA, 32 nt, Homo Sapiens
ggagucugcgucugcccuuucccuucucccaa

SEQ ID NO: 57134 - RNA, 32 nt, Homo Sapiens
gguggcgacugccccccacaccuucccugccc

SEQ ID NO: 57135 - RNA, 32 nt, Homo Sapiens
gaggucaggaggaggacguuccaggcucggcc

SEQ ID NO: 57136 - RNA, 32 nt, Homo Sapiens
ucuucugguaguguuuggauaauaugauuuua

SEQ ID NO: 57137 - RNA, 32 nt, Homo Sapiens
gacccacgcggccucuccuccuccuugccgcu

SEQ ID NO: 57138 - RNA, 32 nt, Homo Sapiens
aucccuugcccccuuggagaucccuugccccc

SEQ ID NO: 57139 - RNA, 32 nt, Homo Sapiens
ggccgggugcgguggcucccgccuguaauccu

SEQ ID NO: 57140 - RNA, 32 nt, Homo Sapiens
uuacuccacuuccccacccccaccaggccucc

SEQ ID NO: 57141 - RNA, 32 nt, Homo Sapiens
gccuucuaauaagagggaagagacugcuugga

SEQ ID NO: 57142 - RNA, 31 nt, Homo Sapiens
guggugagggcggugaugcugagcuuucugc

SEQ ID NO: 57143 - RNA, 32 nt, Homo Sapiens
cuugagguggggaagccggggagggcaguuga

SEQ ID NO: 57144 - RNA, 32 nt, Homo Sapiens
acggagggugcgccugccgccagcggcccagc

SEQ ID NO: 57145 - RNA, 28 nt, Homo Sapiens
cagccagucucaggaccacaguggaauc

SEQ ID NO: 57146 - RNA, 32 nt, Homo Sapiens
cuucuuccucacgagaauaaacacacauuuua

SEQ ID NO: 57147 - RNA, 32 nt, Homo Sapiens
aguugcgagugcaggcuccuugccagaggccu

SEQ ID NO: 57148 - RNA, 32 nt, Homo Sapiens
gugugaaagcugagaaaaugggagcugugcuu

SEQ ID NO: 57149 - RNA, 32 nt, Homo Sapiens
gguggcaggggcggggcggcuggcgguagagg

SEQ ID NO: 57150 - RNA, 32 nt, Homo Sapiens
gagauuuggugacuuuugauacggguuuggug

SEQ ID NO: 57151 - RNA, 32 nt, Homo Sapiens
uuuuuuguuuuaccuuuuuuccaaauaacagu

SEQ ID NO: 57152 - RNA, 32 nt, Homo Sapiens
ugaugugaccgggaucccacucugauugcauc

SEQ ID NO: 57153 - RNA, 32 nt, Homo Sapiens
ugugugaggaagaaagaggggggcuggaugcg

SEQ ID NO: 57154 - RNA, 32 nt, Homo Sapiens
accacugcccuccugguaccagcccucagugu

SEQ ID NO: 57155 - RNA, 32 nt, Homo Sapiens
agaaauuauguuuucauguguuucacaugaaa

SEQ ID NO: 57156 - RNA, 32 nt, Homo Sapiens
cauuuauucguccagcagcaucuuguacuagu

SEQ ID NO: 57157 - RNA, 32 nt, Homo Sapiens
aauaaugauauaaaaacugaauaagguauauu

SEQ ID NO: 57158 - RNA, 32 nt, Homo Sapiens
cgugagucccgcuccuucuccccgaaaugcag

SEQ ID NO: 57159 - RNA, 32 nt, Homo Sapiens
uuccaagcugcucgcgcacgcugcugccaagc

SEQ ID NO: 57160 - RNA, 32 nt, Homo Sapiens
caaagcuuuucucccuggagggugggcacugc

SEQ ID NO: 57161 - RNA, 32 nt, Homo Sapiens
gcucucaggcuggaggagccucugccaggucc

SEQ ID NO: 57162 - RNA, 32 nt, Homo Sapiens
cuccuaggccccaucuuccauuucuuagguaa

SEQ ID NO: 57163 - RNA, 32 nt, Homo Sapiens
gucucugccuugccuuuagccccucccaagcu

SEQ ID NO: 57164 - RNA, 27 nt, Homo Sapiens
ugauccuccugcuucagccuccgaaag

SEQ ID NO: 57165 - RNA, 32 nt, Homo Sapiens
guggauggucucugccuaucuccaccuuucug

SEQ ID NO: 57166 - RNA, 32 nt, Homo Sapiens
auuuuggauagcaguuaaaaaauauacacuga

SEQ ID NO: 57167 - RNA, 32 nt, Homo Sapiens
acguccgugcgcggcuggcuagaaugcuggac

SEQ ID NO: 57168 - RNA, 32 nt, Homo Sapiens
ugcugcggggaggaaggcaagaggugccaaag

SEQ ID NO: 57169 - RNA, 31 nt, Homo Sapiens
cugaucgccgccugcgugccccgccacugcc

SEQ ID NO: 57170 - RNA, 32 nt, Homo Sapiens
agcccaggcuccugcuguucuugggcaagaug

SEQ ID NO: 57171 - RNA, 32 nt, Homo Sapiens
cuuccccacuccuuggauccagcccugugggc

SEQ ID NO: 57172 - RNA, 32 nt, Homo Sapiens
agcagaucuguuucuauuguuuauuauagcgu

SEQ ID NO: 57173 - RNA, 32 nt, Homo Sapiens
ugugucagcuugcauuuuuuuauuccugacug

SEQ ID NO: 57174 - RNA, 32 nt, Homo Sapiens
aacucuuucaguuauuugauauuugggaaccc

SEQ ID NO: 57175 - RNA, 32 nt, Homo Sapiens
ccuagucuccuccacggcccagcccccacugu

SEQ ID NO: 57176 - RNA, 32 nt, Homo Sapiens
auauauauuaauuuauagucagaauacgugaa

SEQ ID NO: 57177 - RNA, 32 nt, Homo Sapiens
augaacaccagaacagaagagauuuuuuacua

SEQ ID NO: 57178 - RNA, 32 nt, Homo Sapiens
aaaaucugcaucuguccucaccaccuggcaca

SEQ ID NO: 57179 - RNA, 32 nt, Homo Sapiens
cccgugcccccuccuuaccccgcaggacgggc

SEQ ID NO: 57180 - RNA, 32 nt, Homo Sapiens
augacucccagcagcccucucucaccccagug

SEQ ID NO: 57181 - RNA, 32 nt, Homo Sapiens
aucuucagccccacaguaaaacccaaugacac

SEQ ID NO: 57182 - RNA, 32 nt, Homo Sapiens
accaaagucugcuguagaacaaauaugggagg

SEQ ID NO: 57183 - RNA, 32 nt, Homo Sapiens
agguucucagaauugaaacauucaguuuuguc

SEQ ID NO: 57184 - RNA, 32 nt, Homo Sapiens
acacaaaagggaggguacaguggugggggcac

SEQ ID NO: 57185 - RNA, 32 nt, Homo Sapiens
aaaacuaagaaauaacugaaugcugaaaaaua

SEQ ID NO: 57186 - RNA, 32 nt, Homo Sapiens
ugucacccugcauccuucucccauuccccaaa

SEQ ID NO: 57187 - RNA, 32 nt, Homo Sapiens
gucagagaaaugcaauucaaaacuaccgugag

SEQ ID NO: 57188 - RNA, 32 nt, Homo Sapiens
cagcggcgcggucuucggcagucuagucaucc

SEQ ID NO: 57189 - RNA, 32 nt, Homo Sapiens
uuugggcauggacuucuguagguggccaguau

SEQ ID NO: 57190 - RNA, 32 nt, Homo Sapiens
caccugcacucccacacgcccacccagcugug

SEQ ID NO: 57191 - RNA, 32 nt, Homo Sapiens
cccucagcuuugcagaaugaagccuugagguc

SEQ ID NO: 57192 - RNA, 32 nt, Homo Sapiens
acaaccacagccugaugagaaaagcaucauuc

SEQ ID NO: 57193 - RNA, 32 nt, Homo Sapiens
aauauauagaauguauuacauaacugucacug

SEQ ID NO: 57194 - RNA, 32 nt, Homo Sapiens
gguccuuccacuuuuuggagaguagcaaaucu

SEQ ID NO: 57195 - RNA, 32 nt, Homo Sapiens
aauauacaacugaguuacagacuguccccugg

SEQ ID NO: 57196 - RNA, 32 nt, Homo Sapiens
ucuaggcggagcgggggcucaggcggcggcgg

SEQ ID NO: 57197 - RNA, 32 nt, Homo Sapiens
aacugacuugcuccccucuccuuuucuucucu

SEQ ID NO: 57198 - RNA, 32 nt, Homo Sapiens
ccucauuuucccuuuagcaagauuuuuauauc

SEQ ID NO: 57199 - RNA, 32 nt, Homo Sapiens
ccuuauaaaaauuguuuuuguguucuuaaaga

SEQ ID NO: 57200 - RNA, 32 nt, Homo Sapiens
cauuacaauaauauguguaguaguugaauugu

SEQ ID NO: 57201 - RNA, 32 nt, Homo Sapiens
gcaagcuccgccuccuggguucacgccauucu

SEQ ID NO: 57202 - RNA, 32 nt, Homo Sapiens
uuuuaaagaacaauaaaacauauuuuacacgc

SEQ ID NO: 57203 - RNA, 29 nt, Homo Sapiens
gagaaagagauuaaaucaauguagaaaua

SEQ ID NO: 57204 - RNA, 32 nt, Homo Sapiens
ugccuucugcagcuucaaguccguugagaaga

SEQ ID NO: 57205 - RNA, 32 nt, Homo Sapiens
cuuucucgcacccccuugccugucccaccucg

SEQ ID NO: 57206 - RNA, 32 nt, Homo Sapiens
accaugaucuuugugauuuacauauaauuucc

SEQ ID NO: 57207 - RNA, 32 nt, Homo Sapiens
ugcccagggagguggugucacugcacaggaag

SEQ ID NO: 57208 - RNA, 32 nt, Homo Sapiens
uauguucuguguuuaguuuacauauuguaauu

SEQ ID NO: 57209 - RNA, 32 nt, Homo Sapiens
uccccaaggugaugaagaagcacuuuggggcu

SEQ ID NO: 57210 - RNA, 32 nt, Homo Sapiens
aggccugccuucugguugaagauguggcgagu

SEQ ID NO: 57211 - RNA, 32 nt, Homo Sapiens
ccauaaucugcaacuucauuuucccccauaga

SEQ ID NO: 57212 - RNA, 32 nt, Homo Sapiens
ugaggauggagguggaaggcuggagggcaggg

SEQ ID NO: 57213 - RNA, 32 nt, Homo Sapiens
cugagcugacuucuaccuagccccuuuucagu

SEQ ID NO: 57214 - RNA, 32 nt, Homo Sapiens
cucaucuaaaaauggauuuggggauggggaaa

SEQ ID NO: 57215 - RNA, 32 nt, Homo Sapiens
cuucuuccggagccguacguggcaccgccccg

SEQ ID NO: 57216 - RNA, 32 nt, Homo Sapiens
ugccaccaccgccaucgccucaccugcagcuc

SEQ ID NO: 57217 - RNA, 32 nt, Homo Sapiens
ccccgagcccgccgcuuccuaucucagcgccc

SEQ ID NO: 57218 - RNA, 32 nt, Homo Sapiens
acaaagaccuaaaaagccuuuuuuaagaaaua

SEQ ID NO: 57219 - RNA, 32 nt, Homo Sapiens
aacaguacgcagugaauguucauccagagcug

SEQ ID NO: 57220 - RNA, 32 nt, Homo Sapiens
cagcaaacuuaaugaauguuuucauguagauu

SEQ ID NO: 57221 - RNA, 32 nt, Homo Sapiens
aaaagcauccaagaacugugggaaaauaucaa

SEQ ID NO: 57222 - RNA, 31 nt, Homo Sapiens
gugaaagggugagacuucagagccuguuccc

SEQ ID NO: 57223 - RNA, 32 nt, Homo Sapiens
ccucuuucauauguuuuaaauaaagugaaauu

SEQ ID NO: 57224 - RNA, 28 nt, Homo Sapiens
accaugucucuccaauuuucuaauggau

SEQ ID NO: 57225 - RNA, 32 nt, Homo Sapiens
aaggggacgcggcggcugcccgggggggauga

SEQ ID NO: 57226 - RNA, 32 nt, Homo Sapiens
cuuucaaucuuggugaugcccuggacagcagc

SEQ ID NO: 57227 - RNA, 32 nt, Homo Sapiens
caaggcccauauauugcauuuauuugaaaugu

SEQ ID NO: 57228 - RNA, 32 nt, Homo Sapiens
ucaacaaaaaugugaugaccaaaugaacaaaa

SEQ ID NO: 57229 - RNA, 32 nt, Homo Sapiens
gacccgggccgcgugugagcgcccuuugcacc

SEQ ID NO: 57230 - RNA, 32 nt, Homo Sapiens
cagagccccucgcccagaggcugccgagcaag

SEQ ID NO: 57231 - RNA, 32 nt, Homo Sapiens
aaugugucuuaaucuaucccuccagcuggcag

SEQ ID NO: 57232 - RNA, 32 nt, Homo Sapiens
uagccauuuauuagacuuuaagagcaggagua

SEQ ID NO: 57233 - RNA, 32 nt, Homo Sapiens
uucuucccacugaaggaaacucuuucucauuc

SEQ ID NO: 57234 - RNA, 32 nt, Homo Sapiens
agacugagaaauuuauaaacaacagaaauuug

SEQ ID NO: 57235 - RNA, 32 nt, Homo Sapiens
ugagagcagaagcaaacuuauauaugaaucau

SEQ ID NO: 57236 - RNA, 32 nt, Homo Sapiens
guauguauguauauauuaucaguacuggccuu

SEQ ID NO: 57237 - RNA, 32 nt, Homo Sapiens
accguuuucagcgcucugcccuguuggcuuua

SEQ ID NO: 57238 - RNA, 32 nt, Homo Sapiens
agggucggcugcggcgggugugggagguggcg

SEQ ID NO: 57239 - RNA, 32 nt, Homo Sapiens
cuuaagcccagacgucuguugggaccugaccc

SEQ ID NO: 57240 - RNA, 32 nt, Homo Sapiens
cuaacauuuuuggugaggaaagcacugcagga

SEQ ID NO: 57241 - RNA, 32 nt, Homo Sapiens
cggggagggggagagggaaggggggcucagcu

SEQ ID NO: 57242 - RNA, 32 nt, Homo Sapiens
auguccugcucucuaaacuacauccugaacuc

SEQ ID NO: 57243 - RNA, 32 nt, Homo Sapiens
cucaggguccaaaggcagcaucacucccuccu

SEQ ID NO: 57244 - RNA, 32 nt, Homo Sapiens
cauuuacauauuuuugucuuguugaucauuac

SEQ ID NO: 57245 - RNA, 32 nt, Homo Sapiens
uuacugguuuacuaguuuauuaucugucuccu

SEQ ID NO: 57246 - RNA, 32 nt, Homo Sapiens
cgaaauucuuuauuccaaauaaagauacuccc

SEQ ID NO: 57247 - RNA, 32 nt, Homo Sapiens
gcucuguauagagaauaucaucugauaguguc

SEQ ID NO: 57248 - RNA, 32 nt, Homo Sapiens
uccauuuuagugugacacucuuccucaugaua

SEQ ID NO: 57249 - RNA, 32 nt, Homo Sapiens
ccggagcgagggggcgggcgugggcggacguc

SEQ ID NO: 57250 - RNA, 30 nt, Homo Sapiens
acugcagucugugccuccugggcucaagca

SEQ ID NO: 57251 - RNA, 32 nt, Homo Sapiens
accaauagucuaauauccaaauccaacauuca

SEQ ID NO: 57252 - RNA, 32 nt, Homo Sapiens
accagccugggcaacauagugagacccccauc

SEQ ID NO: 57253 - RNA, 32 nt, Homo Sapiens
uaaugaagugaggggagggagggaugucaccc

SEQ ID NO: 57254 - RNA, 32 nt, Homo Sapiens
ccccaguucccuccucccucgguuauaaagau

SEQ ID NO: 57255 - RNA, 32 nt, Homo Sapiens
aagagcagaguuaagaucuaccaaacugaagg

SEQ ID NO: 57256 - RNA, 32 nt, Homo Sapiens
ccgauuccaaaugaccuuccaguguccccaag

SEQ ID NO: 57257 - RNA, 32 nt, Homo Sapiens
gcuguaggaauggaagcuucagggccuugcug

SEQ ID NO: 57258 - RNA, 32 nt, Homo Sapiens
gccgaucacaugaagguggugccaagucuccu

SEQ ID NO: 57259 - RNA, 32 nt, Homo Sapiens
aauggaaaaaauuucaagggcuuagaagggga

SEQ ID NO: 57260 - RNA, 32 nt, Homo Sapiens
uuuugguuuguguugcuguucuuccaauaaac

SEQ ID NO: 57261 - RNA, 32 nt, Homo Sapiens
cuuauaagcugcaaaaccuguuuucuaucuua

SEQ ID NO: 57262 - RNA, 32 nt, Homo Sapiens
ugucgcuccgcggcgggccauggccaacgucu

SEQ ID NO: 57263 - RNA, 32 nt, Homo Sapiens
cggaaaaugccuguaaagucugaguaagaaac

SEQ ID NO: 57264 - RNA, 32 nt, Homo Sapiens
ugcuugggucaccugcuccaggaggcagaguu

SEQ ID NO: 57265 - RNA, 32 nt, Homo Sapiens
uuuaaauuucuuuuuccaagucuuggcugauu

SEQ ID NO: 57266 - RNA, 32 nt, Homo Sapiens
gacggagucucgaucugucacccaggcuggag

SEQ ID NO: 57267 - RNA, 32 nt, Homo Sapiens
gacagagucucaaucugucacccaggcuggag

SEQ ID NO: 57268 - RNA, 32 nt, Homo Sapiens
aguggcagagguggaagaaaauccacagauac

SEQ ID NO: 57269 - RNA, 32 nt, Homo Sapiens
ugccucuguauauaggugguuuucuuuaagug

SEQ ID NO: 57270 - RNA, 32 nt, Homo Sapiens
aggugcaucuucuggcucacuuucuucuuguu

SEQ ID NO: 57271 - RNA, 32 nt, Homo Sapiens
auauuuuaauuucaagcuuauuuuggagagau

SEQ ID NO: 57272 - RNA, 32 nt, Homo Sapiens
cuggaagaguugggauuauggaugcauggaac

SEQ ID NO: 57273 - RNA, 32 nt, Homo Sapiens
ccucuguguuuaaagcacugugugacauagcu

SEQ ID NO: 57274 - RNA, 32 nt, Homo Sapiens
cugaucccuggccacugaaaagcuuuccugac

SEQ ID NO: 57275 - RNA, 32 nt, Homo Sapiens
aucaaaaacuaaagggauguggagagugcgga

SEQ ID NO: 57276 - RNA, 32 nt, Homo Sapiens
uuguaguccagggacaggacuuugaagggagu

SEQ ID NO: 57277 - RNA, 32 nt, Homo Sapiens
aggggacggagaccgaagaacggagguccuua

SEQ ID NO: 57278 - RNA, 32 nt, Homo Sapiens
gaaccccuccaccuccucccuucugcagcgcc

SEQ ID NO: 57279 - RNA, 32 nt, Homo Sapiens
aauaucuuuuugccgauuuuuaucuauguuaa

SEQ ID NO: 57280 - RNA, 32 nt, Homo Sapiens
cuuagugcuuccagcccuucuuggagccuuca

SEQ ID NO: 57281 - RNA, 32 nt, Homo Sapiens
ccaucuauuucugaaagguucuuuguggauuu

SEQ ID NO: 57282 - RNA, 32 nt, Homo Sapiens
ucauuaugugagauauuaaagaccuguguauu

SEQ ID NO: 57283 - RNA, 32 nt, Homo Sapiens
aggcggaggggaggggcuguccggcugccucu

SEQ ID NO: 57284 - RNA, 32 nt, Homo Sapiens
auacuacuuuugugucacaauuuauuuuuauc

SEQ ID NO: 57285 - RNA, 32 nt, Homo Sapiens
agcauacagugagcacaucuagcugaugauaa

SEQ ID NO: 57286 - RNA, 32 nt, Homo Sapiens
auccaagcaaaauaaaacugcaguugucaaca

SEQ ID NO: 57287 - RNA, 32 nt, Homo Sapiens
uguaauugugugccuacaaaaauacauguaua

SEQ ID NO: 57288 - RNA, 32 nt, Homo Sapiens
gagguaaaguggaauuccaauaaagaaauucc

SEQ ID NO: 57289 - RNA, 32 nt, Homo Sapiens
uccuuucugugcaaccaauuaaagaacaauga

SEQ ID NO: 57290 - RNA, 32 nt, Homo Sapiens
acuagcuaguguuuucuggggaguuuggcugu

SEQ ID NO: 57291 - RNA, 32 nt, Homo Sapiens
acugugaaauguuuaggaacaaacuguugaaa

SEQ ID NO: 57292 - RNA, 32 nt, Homo Sapiens
cguccgccaaccccccgugucaccucccuucu

SEQ ID NO: 57293 - RNA, 32 nt, Homo Sapiens
caccaaccagccacucccgguggggacacagc

SEQ ID NO: 57294 - RNA, 32 nt, Homo Sapiens
aggaaagcugucugucuguacccugcucugga

SEQ ID NO: 57295 - RNA, 32 nt, Homo Sapiens
agguuuggggcaucucuccagcccucccagcu

SEQ ID NO: 57296 - RNA, 32 nt, Homo Sapiens
cuuacguacuuugauagaacuaaggaaauagu

SEQ ID NO: 57297 - RNA, 32 nt, Homo Sapiens
ucuuuuacaaaacacauguauuuugcaaaaaa

SEQ ID NO: 57298 - RNA, 29 nt, Homo Sapiens
gugggggaaaauaaaaagcuuuuuugccc

SEQ ID NO: 57299 - RNA, 32 nt, Homo Sapiens
uuccuucuuaugugguccccuccagcuucaaa

SEQ ID NO: 57300 - RNA, 32 nt, Homo Sapiens
cacagauuaccuuuuuaccuuuucuuucuuuu

SEQ ID NO: 57301 - RNA, 32 nt, Homo Sapiens
ucucaaaagguuagguggacuaaagcauucug

SEQ ID NO: 57302 - RNA, 32 nt, Homo Sapiens
ggagagagcccgcucuugucucccaguuccug

SEQ ID NO: 57303 - RNA, 32 nt, Homo Sapiens
gauaaauuacacaagggaggagaaagaucccu

SEQ ID NO: 57304 - RNA, 32 nt, Homo Sapiens
augacaauugauauguuuuucugauauaauua

SEQ ID NO: 57305 - RNA, 32 nt, Homo Sapiens
acaaugauuuucucccuucuuuuacaguagca

SEQ ID NO: 57306 - RNA, 30 nt, Homo Sapiens
cccucuccuaggagacggaugucacgcaca

SEQ ID NO: 57307 - RNA, 32 nt, Homo Sapiens
ucuguaggugucucugggccugugugugggug

SEQ ID NO: 57308 - RNA, 32 nt, Homo Sapiens
uuauauucagaauugacacccaugagaguguu

SEQ ID NO: 57309 - RNA, 32 nt, Homo Sapiens
guacauggucugcucucauuuauucauucuuc

SEQ ID NO: 57310 - RNA, 32 nt, Homo Sapiens
cugagccacagccccagugacggucuggucuu

SEQ ID NO: 57311 - RNA, 32 nt, Homo Sapiens
cagucacugggcccaacauauccauuuuuaaa

SEQ ID NO: 57312 - RNA, 32 nt, Homo Sapiens
gcugcggggacuggugcggcggugcuggaggu

SEQ ID NO: 57313 - RNA, 32 nt, Homo Sapiens
gggggcugaggcuccggcggaccucuggugga

SEQ ID NO: 57314 - RNA, 32 nt, Homo Sapiens
agaggugaaauuaauuguaacaauauauuuac

SEQ ID NO: 57315 - RNA, 32 nt, Homo Sapiens
guggcuuccuuccauccuauuccccagucacg

SEQ ID NO: 57316 - RNA, 32 nt, Homo Sapiens
ccauuuaauggcaaugguagucuuugguuagc

SEQ ID NO: 57317 - RNA, 32 nt, Homo Sapiens
gccucagcccggacuuccccagccccgacagc

SEQ ID NO: 57318 - RNA, 32 nt, Homo Sapiens
uggaguaggcgcccagcccuggcucuuccaug

SEQ ID NO: 57319 - RNA, 32 nt, Homo Sapiens
gaaugaaggcugcagauggaaguaaaauagau

SEQ ID NO: 57320 - RNA, 32 nt, Homo Sapiens
cuaccaagcucgagcuggcccuugacccccac

SEQ ID NO: 57321 - RNA, 32 nt, Homo Sapiens
ccaugcaaagauucucugguuuuauggcuuuu

SEQ ID NO: 57322 - RNA, 32 nt, Homo Sapiens
acgaggucaggagaucgagaccauccuggcca

SEQ ID NO: 57323 - RNA, 32 nt, Homo Sapiens
uaauacaaugaaagaaaacucaauugcauuaa

SEQ ID NO: 57324 - RNA, 32 nt, Homo Sapiens
aacugggaaacaacacuugguuagucucuuuu

SEQ ID NO: 57325 - RNA, 27 nt, Homo Sapiens
ugauucuccugcuucagccucccaagu

SEQ ID NO: 57326 - RNA, 32 nt, Homo Sapiens
ugauuuggggagcagcgguucuccuuauuuuu

SEQ ID NO: 57327 - RNA, 32 nt, Homo Sapiens
cccauuacacccagagcagcuccucugcauag

SEQ ID NO: 57328 - RNA, 32 nt, Homo Sapiens
cgcccuggaagaccuggcuuccucccugacac

SEQ ID NO: 57329 - RNA, 32 nt, Homo Sapiens
gacucugugaggaaacaagaagagaggcccaa

SEQ ID NO: 57330 - RNA, 32 nt, Homo Sapiens
gaaccauagauauugccugacaaagcagaaau

SEQ ID NO: 57331 - RNA, 32 nt, Homo Sapiens
uaaggaagggcugaacaaaagcagccaagggg

SEQ ID NO: 57332 - RNA, 32 nt, Homo Sapiens
uaauuaguucuaaauucaaccaaaaaauguuu

SEQ ID NO: 57333 - RNA, 32 nt, Homo Sapiens
ccacacgccccucuccucuaccccuauucucu

SEQ ID NO: 57334 - RNA, 32 nt, Homo Sapiens
uucgcuccggagccgcgccgccgccggcccag

SEQ ID NO: 57335 - RNA, 32 nt, Homo Sapiens
acuguggacuggcaauggaagcucuuccugga

SEQ ID NO: 57336 - RNA, 32 nt, Homo Sapiens
ucccggagacaaucuugcuaccugugcgaccu

SEQ ID NO: 57337 - RNA, 32 nt, Homo Sapiens
aaucaugugaaugggugcauccaaggaguuca

SEQ ID NO: 57338 - RNA, 32 nt, Homo Sapiens
aaucaaagcugaugccucaguuuccuguuuuc

SEQ ID NO: 57339 - RNA, 32 nt, Homo Sapiens
ucaaaaggaaaugaaaccguugucuugaagac

SEQ ID NO: 57340 - RNA, 32 nt, Homo Sapiens
gugugccccccuccccacgcuauggacccaga

SEQ ID NO: 57341 - RNA, 32 nt, Homo Sapiens
agggaggaggaggagcuagcagacacauccag

SEQ ID NO: 57342 - RNA, 32 nt, Homo Sapiens
cugcagcucguuucuuuccaauaaaaguuucu

SEQ ID NO: 57343 - RNA, 32 nt, Homo Sapiens
cggcaccaccucugcgcacaaccccgcgggcc

SEQ ID NO: 57344 - RNA, 32 nt, Homo Sapiens
gggcuggcccgggcugccccaggaccacggac

SEQ ID NO: 57345 - RNA, 32 nt, Homo Sapiens
uguacagauguggaaagacuuuuuacguacac

SEQ ID NO: 57346 - RNA, 32 nt, Homo Sapiens
gauauuuauagcugaucaaucuauauguguca

SEQ ID NO: 57347 - RNA, 32 nt, Homo Sapiens
cuucucaaggaguccacagucuggaggacuag

SEQ ID NO: 57348 - RNA, 32 nt, Homo Sapiens
aaaucucagccucuggaaaugcagcuucuucu

SEQ ID NO: 57349 - RNA, 32 nt, Homo Sapiens
gugaccuccuaccugugcugggacgccagcga

SEQ ID NO: 57350 - RNA, 32 nt, Homo Sapiens
cgacagaaacgcagcagaugcagacgcuccug

SEQ ID NO: 57351 - RNA, 30 nt, Homo Sapiens
cuaacgcugcgaguuggggaaaccguagua

SEQ ID NO: 57352 - RNA, 32 nt, Homo Sapiens
auaucacccuucuuguaacuaaucaaaucaag

SEQ ID NO: 57353 - RNA, 32 nt, Homo Sapiens
ccuggcgcgcagcgcccgcuuccgucagggag

SEQ ID NO: 57354 - RNA, 32 nt, Homo Sapiens
ggugaagggaaugaugcugaguuuuagacauc

SEQ ID NO: 57355 - RNA, 32 nt, Homo Sapiens
auuugaaguaaugagagauaucaucagaaaaa

SEQ ID NO: 57356 - RNA, 32 nt, Homo Sapiens
gcaggucucgguccaaggggccccuuuucucg

SEQ ID NO: 57357 - RNA, 32 nt, Homo Sapiens
cguggugcgcguuccgcacgcccugcagcuca

SEQ ID NO: 57358 - RNA, 32 nt, Homo Sapiens
uguuuuuuguaguaaaaucacugguuuauaca

SEQ ID NO: 57359 - RNA, 32 nt, Homo Sapiens
caaaccuguguuuauauauuuaaaagauacuc

SEQ ID NO: 57360 - RNA, 32 nt, Homo Sapiens
aaauccucugcaccccaggagcgccgcuugga

SEQ ID NO: 57361 - RNA, 30 nt, Homo Sapiens
gaccacugugugcagcaccucccagacggc

SEQ ID NO: 57362 - RNA, 32 nt, Homo Sapiens
cuugugaugccuccaugccccgagggccucuc

SEQ ID NO: 57363 - RNA, 32 nt, Homo Sapiens
augcaggcaugcaugcacauacgcagauguac

SEQ ID NO: 57364 - RNA, 32 nt, Homo Sapiens
cuuguggcugcgcagcggaaaccuugccuugu

SEQ ID NO: 57365 - RNA, 32 nt, Homo Sapiens
ugaucucagcuuaaugcaaccucuaccuccca

SEQ ID NO: 57366 - RNA, 32 nt, Homo Sapiens
uagauauguacaaacucacacuguagagaaac

SEQ ID NO: 57367 - RNA, 32 nt, Homo Sapiens
aaucauuuuggauuuuuuuucuuugaauuauu

SEQ ID NO: 57368 - RNA, 30 nt, Homo Sapiens
gagcggggaggugguuuggaguauauaugu

SEQ ID NO: 57369 - RNA, 32 nt, Homo Sapiens
caggaaaaauuuggagugcaaauuguggccaa

SEQ ID NO: 57370 - RNA, 32 nt, Homo Sapiens
cagcgccucggcuccagcgccauggcgcccuc

SEQ ID NO: 57371 - RNA, 32 nt, Homo Sapiens
gggcccagcucuucuuccugguugcguuucca

SEQ ID NO: 57372 - RNA, 32 nt, Homo Sapiens
accaaccaagcacuuguaccucccuggcauac

SEQ ID NO: 57373 - RNA, 32 nt, Homo Sapiens
cacugcauuuccccacucugcccaccucucuc

SEQ ID NO: 57374 - RNA, 32 nt, Homo Sapiens
uauagaacuuuaaaauguuuaucaguuguuuc

SEQ ID NO: 57375 - RNA, 32 nt, Homo Sapiens
ggggacauaauggagcucuggugcugguggac

SEQ ID NO: 57376 - RNA, 32 nt, Homo Sapiens
gagcgcgaccgacacgcacgggccccucgccc

SEQ ID NO: 57377 - RNA, 32 nt, Homo Sapiens
gagccagaccucugcgaggaggcacugagacc

SEQ ID NO: 57378 - RNA, 32 nt, Homo Sapiens
guaacguaauugcagugcauuuagacaggcau

SEQ ID NO: 57379 - RNA, 32 nt, Homo Sapiens
ggauuggcgccccugguugccggagcaauccc

SEQ ID NO: 57380 - RNA, 32 nt, Homo Sapiens
aaagcacaguuguuaaaaccagcagauuuuuu

SEQ ID NO: 57381 - RNA, 32 nt, Homo Sapiens
cuauuugacagaagcuugaaacucuggcaucu

SEQ ID NO: 57382 - RNA, 32 nt, Homo Sapiens
aacagcaaaaaucccagauaaaacagaauguc

SEQ ID NO: 57383 - RNA, 32 nt, Homo Sapiens
cugcacuuuuuauagagcugcauugucgguga

SEQ ID NO: 57384 - RNA, 32 nt, Homo Sapiens
uggacaagcccagccccgccucagggaaaaca

SEQ ID NO: 57385 - RNA, 32 nt, Homo Sapiens
uuuccaucucccagcccccaggggccccuucc

SEQ ID NO: 57386 - RNA, 32 nt, Homo Sapiens
ccacugguguaaaaaacaaacauuugaagacc

SEQ ID NO: 57387 - RNA, 32 nt, Homo Sapiens
cacacauacacacacacacacacacacagagu

SEQ ID NO: 57388 - RNA, 32 nt, Homo Sapiens
uguucacagcacccucagggucuuaggucuuc

SEQ ID NO: 57389 - RNA, 32 nt, Homo Sapiens
cauauucaucuuuaccaucacugucacuguaa

SEQ ID NO: 57390 - RNA, 29 nt, Homo Sapiens
acaugcauauguauauguauauguggaga

SEQ ID NO: 57391 - RNA, 32 nt, Homo Sapiens
agccccgaaacaguggagguccugcugcaggg

SEQ ID NO: 57392 - RNA, 32 nt, Homo Sapiens
ugugucugcuguucuccucuauguguucuugu

SEQ ID NO: 57393 - RNA, 32 nt, Homo Sapiens
aagcauuuucaauuuaagaaauguagaacuuu

SEQ ID NO: 57394 - RNA, 32 nt, Homo Sapiens
cugguaauuguuuugaacauuaaugaaagccc

SEQ ID NO: 57395 - RNA, 32 nt, Homo Sapiens
gccugauaagaguguuuuuguuuaccuguggg

SEQ ID NO: 57396 - RNA, 32 nt, Homo Sapiens
uaccagccaaaguuauacuaaauaagagacuu

SEQ ID NO: 57397 - RNA, 32 nt, Homo Sapiens
cucggcuccuccaacagccccaucccuuagca

SEQ ID NO: 57398 - RNA, 32 nt, Homo Sapiens
gaaaaucugugccucugcaucaggcagccgac

SEQ ID NO: 57399 - RNA, 32 nt, Homo Sapiens
accaggugacuagucggaaacuacacagaggu

SEQ ID NO: 57400 - RNA, 32 nt, Homo Sapiens
gcccaccaggacuuuugagcuggggcugacuc

SEQ ID NO: 57401 - RNA, 32 nt, Homo Sapiens
ucauuuucuguuucuauuacauaguuuuuaaa

SEQ ID NO: 57402 - RNA, 32 nt, Homo Sapiens
acgcuacccgcggcgccgcgacgucugcacgg

SEQ ID NO: 57403 - RNA, 32 nt, Homo Sapiens
guuuauuagacaaaacagaguauagaugccaa

SEQ ID NO: 57404 - RNA, 32 nt, Homo Sapiens
ggugcuguauaaagggaauauuaaacuagaug

SEQ ID NO: 57405 - RNA, 32 nt, Homo Sapiens
aagaauaaaauaaacguguaagcaaaauuuuc

SEQ ID NO: 57406 - RNA, 32 nt, Homo Sapiens
aaguauuguaaauacagaacucacuccuucag

SEQ ID NO: 57407 - RNA, 32 nt, Homo Sapiens
gugcccggcuggcgcggcgugguuucacuguu

SEQ ID NO: 57408 - RNA, 32 nt, Homo Sapiens
cgccugacucggccugccccagccucugcuuc

SEQ ID NO: 57409 - RNA, 32 nt, Homo Sapiens
cugggcgacuccgcggagcugcacggccaugg

SEQ ID NO: 57410 - RNA, 32 nt, Homo Sapiens
agaauuucaaggaaaagaauucucagcagagc

SEQ ID NO: 57411 - RNA, 32 nt, Homo Sapiens
uugaaauuuccacuuucaguuccauucaugaa

SEQ ID NO: 57412 - RNA, 32 nt, Homo Sapiens
uuuuacagcaaccagcuuugugauagugucac

SEQ ID NO: 57413 - RNA, 32 nt, Homo Sapiens
cgaccccggccgccgcgggaccccgaugagcu

SEQ ID NO: 57414 - RNA, 32 nt, Homo Sapiens
aaaagccaagaaaguauaagggucacaagucu

SEQ ID NO: 57415 - RNA, 32 nt, Homo Sapiens
uccuaccaucuggcagaaucauacugcguuua

SEQ ID NO: 57416 - RNA, 32 nt, Homo Sapiens
uggggaauaauaggggaaauggcuguuuuugc

SEQ ID NO: 57417 - RNA, 32 nt, Homo Sapiens
accaugaccccgucggcaucacagggguaacc

SEQ ID NO: 57418 - RNA, 32 nt, Homo Sapiens
cuuucauagccauaccugguaagcaaaaacua

SEQ ID NO: 57419 - RNA, 32 nt, Homo Sapiens
cugauuuuguggccagaugcaaugaucuuuaa

SEQ ID NO: 57420 - RNA, 32 nt, Homo Sapiens
cucuaaaauggcagagcagcuuucuccaggaa

SEQ ID NO: 57421 - RNA, 32 nt, Homo Sapiens
cgccgccgcugccauggcccagccccugugcc

SEQ ID NO: 57422 - RNA, 32 nt, Homo Sapiens
uuucuaauaaaacagagacgauaauauucaua

SEQ ID NO: 57423 - RNA, 32 nt, Homo Sapiens
aaggaacuuauccauguaaccaaacaccaccu

SEQ ID NO: 57424 - RNA, 32 nt, Homo Sapiens
guggaaccgagacugccccgcggagccgccgg

SEQ ID NO: 57425 - RNA, 32 nt, Homo Sapiens
gauggauauuucagcccucuccauccuaguca

SEQ ID NO: 57426 - RNA, 32 nt, Homo Sapiens
uuucuuuugugacuuucuucuaccucaugcca

SEQ ID NO: 57427 - RNA, 32 nt, Homo Sapiens
gucugucggcugaaggccccaccacccagccu

SEQ ID NO: 57428 - RNA, 32 nt, Homo Sapiens
guuggcuagaaaaggggcagguaaguaugggg

SEQ ID NO: 57429 - RNA, 32 nt, Homo Sapiens
cugcucucagagccagaaaaugcugacagccu

SEQ ID NO: 57430 - RNA, 32 nt, Homo Sapiens
uggcgcugucggccggccggggaggucggcgc

SEQ ID NO: 57431 - RNA, 32 nt, Homo Sapiens
acugcauugugugcggccgccgcgcuccgagg

SEQ ID NO: 57432 - RNA, 32 nt, Homo Sapiens
caauucccagcauccuccuccuccuccucccc

SEQ ID NO: 57433 - RNA, 32 nt, Homo Sapiens
uaacuaaaugacucugauuuuguuuuaucaau

SEQ ID NO: 57434 - RNA, 32 nt, Homo Sapiens
ccuggcaguauuuuagugcucaucaacauugu

SEQ ID NO: 57435 - RNA, 32 nt, Homo Sapiens
ugguuugauuucucguucauuguacacugccu

SEQ ID NO: 57436 - RNA, 32 nt, Homo Sapiens
accacaucaaacucaacaucugcaccuaacuc

SEQ ID NO: 57437 - RNA, 32 nt, Homo Sapiens
ccucuccuacccacccauguccucucagaacc

SEQ ID NO: 57438 - RNA, 32 nt, Homo Sapiens
cuggggauggguggaggcagugacaggcucca

SEQ ID NO: 57439 - RNA, 32 nt, Homo Sapiens
cccaccccacccuugcccccagcccucucucc

SEQ ID NO: 57440 - RNA, 32 nt, Homo Sapiens
guguuucucuucugcucccugaaccucuuaac

SEQ ID NO: 57441 - RNA, 32 nt, Homo Sapiens
uccaguucgucaacuucuacuccucacccguc

SEQ ID NO: 57442 - RNA, 32 nt, Homo Sapiens
uucuguuaaaauugucaaauauauuuuaugaa

SEQ ID NO: 57443 - RNA, 32 nt, Homo Sapiens
gcgauucggcccgacgagcuccgcuuucgcua

SEQ ID NO: 57444 - RNA, 32 nt, Homo Sapiens
gucugggagcacaccacgguccugcugaccug

SEQ ID NO: 57445 - RNA, 32 nt, Homo Sapiens
ugaagacggauuacuaaauaauaauuauuaua

SEQ ID NO: 57446 - RNA, 32 nt, Homo Sapiens
ccuuucccucccuccgccaaggacucacggcc

SEQ ID NO: 57447 - RNA, 32 nt, Homo Sapiens
uuauuucaguagucuuuuuuuauuuuauuaaa

SEQ ID NO: 57448 - RNA, 32 nt, Homo Sapiens
gauaaugguaguguagucagugacuaaaauau

SEQ ID NO: 57449 - RNA, 32 nt, Homo Sapiens
aaagcuaauuguaguuuucauuaugaaguuuu

SEQ ID NO: 57450 - RNA, 32 nt, Homo Sapiens
cagguggauggagugauucugugcggccucac

SEQ ID NO: 57451 - RNA, 32 nt, Homo Sapiens
ucggcuucugcaggaggccauuagcucugcac

SEQ ID NO: 57452 - RNA, 32 nt, Homo Sapiens
gccuggaguuuguauuugauuugcugcuuauu

SEQ ID NO: 57453 - RNA, 32 nt, Homo Sapiens
acaaaggaggcgacaucccagcccgguccuca

SEQ ID NO: 57454 - RNA, 32 nt, Homo Sapiens
ccuaaagagauccuuugauauuuucaacgcag

SEQ ID NO: 57455 - RNA, 32 nt, Homo Sapiens
cgcuccuuccgcuccgcccgccuggaguccuu

SEQ ID NO: 57456 - RNA, 32 nt, Homo Sapiens
ucacaguggauaagcuuuuagaggaacugaau

SEQ ID NO: 57457 - RNA, 31 nt, Homo Sapiens
ugagucauaaguaccucuugaguuaauuuuc

SEQ ID NO: 57458 - RNA, 32 nt, Homo Sapiens
aagcaggaagcagacaguaagugacagccgcu

SEQ ID NO: 57459 - RNA, 32 nt, Homo Sapiens
augaggacacugaaauuuguggagagcagcau

SEQ ID NO: 57460 - RNA, 32 nt, Homo Sapiens
ccggauccagcaugucuguguuugcuccucug

SEQ ID NO: 57461 - RNA, 32 nt, Homo Sapiens
ucuagucauagcauaccauuuaucgggcucgg

SEQ ID NO: 57462 - RNA, 32 nt, Homo Sapiens
ugucacuucggaacagugcucuggagaggaag

SEQ ID NO: 57463 - RNA, 32 nt, Homo Sapiens
uucuuaauuuuuccuucuaaaauggggaguuc

SEQ ID NO: 57464 - RNA, 32 nt, Homo Sapiens
cacaucuugggccaacuuccacagcagccaug

SEQ ID NO: 57465 - RNA, 32 nt, Homo Sapiens
accaaggaaaauucuaaaauagaacuaccaua

SEQ ID NO: 57466 - RNA, 32 nt, Homo Sapiens
ggagcacgaggucacacggcccggggcugcuu

SEQ ID NO: 57467 - RNA, 32 nt, Homo Sapiens
caauguucugucaugaauacucacaaauuauu

SEQ ID NO: 57468 - RNA, 32 nt, Homo Sapiens
cccgcagcagccccggccccauccccgcccag

SEQ ID NO: 57469 - RNA, 32 nt, Homo Sapiens
agcaaauauggcgguggcgcgcguggacgcgg

SEQ ID NO: 57470 - RNA, 29 nt, Homo Sapiens
ucauauuaaugggagugaaaugucuaaua

SEQ ID NO: 57471 - RNA, 27 nt, Homo Sapiens
uucuuguccuagaucagccccaaucug

SEQ ID NO: 57472 - RNA, 32 nt, Homo Sapiens
cacagcaaagaauauuugauaaugguugcacu

SEQ ID NO: 57473 - RNA, 32 nt, Homo Sapiens
ccuuggggccccagccuggcccgggucacccu

SEQ ID NO: 57474 - RNA, 32 nt, Homo Sapiens
aacaguggagcuguuuuuugcuuuuguuuuua

SEQ ID NO: 57475 - RNA, 32 nt, Homo Sapiens
gcucccccucccggaggcgccguucgcuggga

SEQ ID NO: 57476 - RNA, 32 nt, Homo Sapiens
cugggacucagcuaccccggccggccacccag

SEQ ID NO: 57477 - RNA, 32 nt, Homo Sapiens
gcuccccgugcaggcccuugucagagcagaga

SEQ ID NO: 57478 - RNA, 32 nt, Homo Sapiens
uuugaagacuucacuguggaagaaauuccuuc

SEQ ID NO: 57479 - RNA, 32 nt, Homo Sapiens
acaaugagaaaaaaagaagagaauuuguauuu

SEQ ID NO: 57480 - RNA, 32 nt, Homo Sapiens
ccugcccacaugccaccgagcaaacgcaucuu

SEQ ID NO: 57481 - RNA, 32 nt, Homo Sapiens
gagggaggagugagagagaacacacagagggg

SEQ ID NO: 57482 - RNA, 32 nt, Homo Sapiens
guuaacaccagggccagaaaccacgugggcag

SEQ ID NO: 57483 - RNA, 32 nt, Homo Sapiens
aacugaauagauaacauaguacucuaacuaaa

SEQ ID NO: 57484 - RNA, 32 nt, Homo Sapiens
agcgggcguuacccguuuccgccuggacgggg

SEQ ID NO: 57485 - RNA, 32 nt, Homo Sapiens
ccaucuccuuguucccccucucucuuuugccu

SEQ ID NO: 57486 - RNA, 32 nt, Homo Sapiens
agacucgcggccccaggcccaggccccacccc

SEQ ID NO: 57487 - RNA, 32 nt, Homo Sapiens
gagccugguuugcggaggggagaggcagacgu

SEQ ID NO: 57488 - RNA, 32 nt, Homo Sapiens
gcccucaggaggaggagauaccaggaggcagg

SEQ ID NO: 57489 - RNA, 32 nt, Homo Sapiens
aaggaugaguacguccuacggcugcaacacug

SEQ ID NO: 57490 - RNA, 31 nt, Homo Sapiens
ucuugcacaaauuguaaugugauacugugaa

SEQ ID NO: 57491 - RNA, 32 nt, Homo Sapiens
cccucccuccucuccgcccgcuggccgggcca

SEQ ID NO: 57492 - RNA, 32 nt, Homo Sapiens
aucuuggcucugcaaccuccacuucccagguu

SEQ ID NO: 57493 - RNA, 32 nt, Homo Sapiens
guggggcagguuuugcaaagcuuaucagguaa

SEQ ID NO: 57494 - RNA, 32 nt, Homo Sapiens
aguuucugguuuuuucuccuuauuuuucuuau

SEQ ID NO: 57495 - RNA, 32 nt, Homo Sapiens
acccaggucaauccugccuccaaaacuugagg

SEQ ID NO: 57496 - RNA, 32 nt, Homo Sapiens
ccucuguuccccacccaguucuucauuuggag

SEQ ID NO: 57497 - RNA, 32 nt, Homo Sapiens
ccggagcagcgccgcgcagagcccgggacaau

SEQ ID NO: 57498 - RNA, 31 nt, Homo Sapiens
uuauacugguggaccauucagaaaaaguggg

SEQ ID NO: 57499 - RNA, 32 nt, Homo Sapiens
gggcgcugaccucggccuaggaggcccaggau

SEQ ID NO: 57500 - RNA, 32 nt, Homo Sapiens
cugagacacgagcccccucccccagcccguca

SEQ ID NO: 57501 - RNA, 32 nt, Homo Sapiens
uuaccccagagacagacucuuuuuguaagauu

SEQ ID NO: 57502 - RNA, 32 nt, Homo Sapiens
ggaggggcggcgcgaaccauggccggggacag

SEQ ID NO: 57503 - RNA, 32 nt, Homo Sapiens
auggguuuguggucgcaucccagucaucagcu

SEQ ID NO: 57504 - RNA, 32 nt, Homo Sapiens
caccuggagggagagcagaccugcggcugagg

SEQ ID NO: 57505 - RNA, 32 nt, Homo Sapiens
aauuagucgggcgugguggcggacgccuguau

SEQ ID NO: 57506 - RNA, 32 nt, Homo Sapiens
ucuacgcgcuggcgcggauggggcacggggac

SEQ ID NO: 57507 - RNA, 32 nt, Homo Sapiens
auaguuggggaaacugaggccuugucucacag

SEQ ID NO: 57508 - RNA, 32 nt, Homo Sapiens
aacagugcagugacucacccccugcccccgca

SEQ ID NO: 57509 - RNA, 32 nt, Homo Sapiens
agggugacaggguggauagguacaggauuggg

SEQ ID NO: 57510 - RNA, 32 nt, Homo Sapiens
cgauuuucucuuucgucuucaugguggcuucg

SEQ ID NO: 57511 - RNA, 32 nt, Homo Sapiens
aguacuguggggguggugggggugcugggggc

SEQ ID NO: 57512 - RNA, 32 nt, Homo Sapiens
aggccacaccagucuguuguucugggaccaga

SEQ ID NO: 57513 - RNA, 32 nt, Homo Sapiens
gucccccagaaucuuggcuguuuacaaaucac

SEQ ID NO: 57514 - RNA, 32 nt, Homo Sapiens
uucccuguuaugaucugaaacuacccauaugg

SEQ ID NO: 57515 - RNA, 32 nt, Homo Sapiens
gugaaaaagaacaacacugacacgugagaaau

SEQ ID NO: 57516 - RNA, 32 nt, Homo Sapiens
aacugugucuuuguucuuccucucuucccucu

SEQ ID NO: 57517 - RNA, 32 nt, Homo Sapiens
ggcauaaaaauuaaaguccuagcugaguucuc

SEQ ID NO: 57518 - RNA, 32 nt, Homo Sapiens
gucuggcagagacuccacgguaugcuguccuc

SEQ ID NO: 57519 - RNA, 32 nt, Homo Sapiens
uauggagcaauuuaaagcccacagggguuguu

SEQ ID NO: 57520 - RNA, 32 nt, Homo Sapiens
ucaagauagaaaguuggucaagaaguuauagu

SEQ ID NO: 57521 - RNA, 32 nt, Homo Sapiens
ggcagcugccccaucccucccccaaccccugu

SEQ ID NO: 57522 - RNA, 32 nt, Homo Sapiens
gcuuguaauguuuauccguuuaaacauuucgu

SEQ ID NO: 57523 - RNA, 32 nt, Homo Sapiens
uuacauagguauauaugugccauggugguuug

SEQ ID NO: 57524 - RNA, 32 nt, Homo Sapiens
agcagucaggaaggauuaaaucuauggaagcu

SEQ ID NO: 57525 - RNA, 32 nt, Homo Sapiens
aagacuaaacaaaacaaacccagagagccaaa

SEQ ID NO: 57526 - RNA, 30 nt, Homo Sapiens
gcacaaugaaacaaaguaugcccucucuuc

SEQ ID NO: 57527 - RNA, 32 nt, Homo Sapiens
aaacuuaauggaucagacuuugccagauuugg

SEQ ID NO: 57528 - RNA, 32 nt, Homo Sapiens
gagauggacaggcaaacucaugaagaggauca

SEQ ID NO: 57529 - RNA, 32 nt, Homo Sapiens
aagcaaaauauguuuuuggaauaagugguggg

SEQ ID NO: 57530 - RNA, 32 nt, Homo Sapiens
cuuagacccaugucucuguccaaauaggccuu

SEQ ID NO: 57531 - RNA, 32 nt, Homo Sapiens
cugccagggauccgcagcguugccgguuguau

SEQ ID NO: 57532 - RNA, 32 nt, Homo Sapiens
gauggacacaggccguuucucauccaguuuag

SEQ ID NO: 57533 - RNA, 32 nt, Homo Sapiens
ucccucgcgcagcgguggcucugcggccgcug

SEQ ID NO: 57534 - RNA, 32 nt, Homo Sapiens
auggcaccuuagaaaauugagaaggacuagga

SEQ ID NO: 57535 - RNA, 32 nt, Homo Sapiens
ucauauugaucuuuuuaucaugauccuaccua

SEQ ID NO: 57536 - RNA, 32 nt, Homo Sapiens
acuguaauuggaaauaagaccuuuaaagaagu

SEQ ID NO: 57537 - RNA, 32 nt, Homo Sapiens
gaagaaccaauauauacaauggacaaacaauc

SEQ ID NO: 57538 - RNA, 32 nt, Homo Sapiens
ggcucucucugccccaggaugaucuucugugc

SEQ ID NO: 57539 - RNA, 32 nt, Homo Sapiens
aauuuucccaaugucagguauagaaguuaucc

SEQ ID NO: 57540 - RNA, 32 nt, Homo Sapiens
agcccccaaaagacacaagcgcggacagaaaa

SEQ ID NO: 57541 - RNA, 32 nt, Homo Sapiens
uauaucuuguaguucuuucugucuaaugcugg

SEQ ID NO: 57542 - RNA, 31 nt, Homo Sapiens
cuagccccacccucacuccagccaucucgga

SEQ ID NO: 57543 - RNA, 31 nt, Homo Sapiens
aaauucugcgcuuaaggagaaugugcaccaa

SEQ ID NO: 57544 - RNA, 32 nt, Homo Sapiens
augccggcacaaaacugccuuaaaauauucau

SEQ ID NO: 57545 - RNA, 32 nt, Homo Sapiens
ucaagggacuuuugucaucaugugugaugaau

SEQ ID NO: 57546 - RNA, 32 nt, Homo Sapiens
gucauauguguuguuuucucuuuucuguuuuu

SEQ ID NO: 57547 - RNA, 31 nt, Homo Sapiens
auaggaagccacugccuccccuggcugugcc

SEQ ID NO: 57548 - RNA, 32 nt, Homo Sapiens
cugcaucuagauuggagugcugcacaaacaaa

SEQ ID NO: 57549 - RNA, 32 nt, Homo Sapiens
cugacauuuugcuguuuuuaucaaaaaggaac

SEQ ID NO: 57550 - RNA, 32 nt, Homo Sapiens
caguuuuguggacuuuugaccaccuugggcug

SEQ ID NO: 57551 - RNA, 32 nt, Homo Sapiens
ggccgucugguggcccgagguggcggcgggcu

SEQ ID NO: 57552 - RNA, 32 nt, Homo Sapiens
augauggaauaauagacauaauuaauucaaua

SEQ ID NO: 57553 - RNA, 32 nt, Homo Sapiens
gacacuuagauuaagauuuuacuuuaacaguc

SEQ ID NO: 57554 - RNA, 32 nt, Homo Sapiens
caacucugucuccaggucuauucccuccagcu

SEQ ID NO: 57555 - RNA, 32 nt, Homo Sapiens
aaaauggccgacagagucucugcugguuucug

SEQ ID NO: 57556 - RNA, 32 nt, Homo Sapiens
ggucucuccuucccuacugcuggcugccacau

SEQ ID NO: 57557 - RNA, 32 nt, Homo Sapiens
auggagucaaaggagaucauuuuggaacuuua

SEQ ID NO: 57558 - RNA, 32 nt, Homo Sapiens
uuuuagcagaggagccauguccugcugcuucu

SEQ ID NO: 57559 - RNA, 32 nt, Homo Sapiens
auggauauucauuuauacugauuuaugaaagu

SEQ ID NO: 57560 - RNA, 32 nt, Homo Sapiens
aggguccugguuccuccucccaccaaccccac

SEQ ID NO: 57561 - RNA, 32 nt, Homo Sapiens
uucagaaaguuccgaggaccugcuaaaaucag

SEQ ID NO: 57562 - RNA, 32 nt, Homo Sapiens
uuuuuagagguccuaucuccaguuccuugcac

SEQ ID NO: 57563 - RNA, 32 nt, Homo Sapiens
ugggugcgggaagagggcucggagcugccuuc

SEQ ID NO: 57564 - RNA, 32 nt, Homo Sapiens
cugaaggcaggucagggaaaagaagaacugga

SEQ ID NO: 57565 - RNA, 32 nt, Homo Sapiens
cuucuuugaaaauaaacucuuggaagcuuuug

SEQ ID NO: 57566 - RNA, 32 nt, Homo Sapiens
ccaacuccggcuuuugguuuuguguguccacc

SEQ ID NO: 57567 - RNA, 32 nt, Homo Sapiens
aggacgaggagaacacuucuucuuagugugca

SEQ ID NO: 57568 - RNA, 32 nt, Homo Sapiens
cagccugccuccuggguuuuccugggggccgc

SEQ ID NO: 57569 - RNA, 32 nt, Homo Sapiens
auacccuguggcccuccucaucuggagcgagc

SEQ ID NO: 57570 - RNA, 32 nt, Homo Sapiens
cggagcagcugcugccagcccgcgggcacuga

SEQ ID NO: 57571 - RNA, 29 nt, Homo Sapiens
aguuguucucuuaaacugauaugaguucu

SEQ ID NO: 57572 - RNA, 32 nt, Homo Sapiens
uuuugacccaccccaggaagauggagugcucu

SEQ ID NO: 57573 - RNA, 32 nt, Homo Sapiens
gcacaaauacacuacauagagaaaggcuuggu

SEQ ID NO: 57574 - RNA, 32 nt, Homo Sapiens
uguugggguccucaaagaaguaaggccacagu

SEQ ID NO: 57575 - RNA, 32 nt, Homo Sapiens
cugauugaaacacaaauuuacaugcauguuug

SEQ ID NO: 57576 - RNA, 32 nt, Homo Sapiens
cccccuucagagcuagggacgaacagcagugu

SEQ ID NO: 57577 - RNA, 30 nt, Homo Sapiens
gcugagugugggcgcgcgguucccggcggc

SEQ ID NO: 57578 - RNA, 27 nt, Homo Sapiens
gauucaggcuucuucaggcccucccaa

SEQ ID NO: 57579 - RNA, 32 nt, Homo Sapiens
gaggaaccagaaaaguggccucuucccccaau

SEQ ID NO: 57580 - RNA, 32 nt, Homo Sapiens
acgcugagagacuaguugugauuugcuauuuu

SEQ ID NO: 57581 - RNA, 32 nt, Homo Sapiens
aaggggacccagcccaggauccugcggggugg

SEQ ID NO: 57582 - RNA, 32 nt, Homo Sapiens
ucuacuaaugcuuugaaauuucaaaugcugcg

SEQ ID NO: 57583 - RNA, 32 nt, Homo Sapiens
ggcagagagaauaauaaauaaaacuuuuucuu

SEQ ID NO: 57584 - RNA, 32 nt, Homo Sapiens
cuccacucccccuucacccccaacccuguauu

SEQ ID NO: 57585 - RNA, 32 nt, Homo Sapiens
ugcuccgcaccuccucgcccggcggcgccuuc

SEQ ID NO: 57586 - RNA, 32 nt, Homo Sapiens
cucaguggcgcaggccaaaugguuucccuuga

SEQ ID NO: 57587 - RNA, 32 nt, Homo Sapiens
uuguugggaaaggaguacgugauucccucccu

SEQ ID NO: 57588 - RNA, 32 nt, Homo Sapiens
gaaggguugaguuuucaugaauagaaaacaag

SEQ ID NO: 57589 - RNA, 32 nt, Homo Sapiens
agcaauuguaaauaauugguaucuuuuccucc

SEQ ID NO: 57590 - RNA, 32 nt, Homo Sapiens
agcuggagcuguucuugccgcugcugggaggu

SEQ ID NO: 57591 - RNA, 32 nt, Homo Sapiens
ugcuucauuuucugccaagugauacagaaccu

SEQ ID NO: 57592 - RNA, 32 nt, Homo Sapiens
uccucuagcuagugacucagggacuuggguug

SEQ ID NO: 57593 - RNA, 32 nt, Homo Sapiens
ggcacgaggcacgugaccaagagccgccuaga

SEQ ID NO: 57594 - RNA, 32 nt, Homo Sapiens
cgguccagccgcggccggcgccuggcugugag

SEQ ID NO: 57595 - RNA, 32 nt, Homo Sapiens
uguuuuccugcagcuguugacuuguugcccug

SEQ ID NO: 57596 - RNA, 32 nt, Homo Sapiens
ggguagguuugugagcuagaggaggcuugggu

SEQ ID NO: 57597 - RNA, 32 nt, Homo Sapiens
accugaaggguuagcucugugcuuuagucccu

SEQ ID NO: 57598 - RNA, 32 nt, Homo Sapiens
ccucccacagaaaggagauaagggccuuaucc

SEQ ID NO: 57599 - RNA, 32 nt, Homo Sapiens
cagacggcugugcgucugcugcugccugggga

SEQ ID NO: 57600 - RNA, 28 nt, Homo Sapiens
agaagagacaacugacauuugaauuguc

SEQ ID NO: 57601 - RNA, 32 nt, Homo Sapiens
gagacagccagcagaggccuaucagaguuaga

SEQ ID NO: 57602 - RNA, 32 nt, Homo Sapiens
ucuuucuuucuuucuuuuuuuuuuuugagaca

SEQ ID NO: 57603 - RNA, 32 nt, Homo Sapiens
cagugaccgugugugggcuggcggcucuucuc

SEQ ID NO: 57604 - RNA, 32 nt, Homo Sapiens
gaguaggcuggcgggcgcagggggcggggugc

SEQ ID NO: 57605 - RNA, 32 nt, Homo Sapiens
cgacgcugagaugggggcggcggcggcggaag

SEQ ID NO: 57606 - RNA, 32 nt, Homo Sapiens
agcagugcaauuucuucaguaauuuagauuuu

SEQ ID NO: 57607 - RNA, 32 nt, Homo Sapiens
auucuauaauuuuguugaaauauugaaaaaag

SEQ ID NO: 57608 - RNA, 32 nt, Homo Sapiens
gucuuaauguagguuguagucacuuuagaugg

SEQ ID NO: 57609 - RNA, 32 nt, Homo Sapiens
cuaaaguuauuuacuauuuggcuucaaguaua

SEQ ID NO: 57610 - RNA, 32 nt, Homo Sapiens
acuuuacuagcagagaaauacaauauaucuug

SEQ ID NO: 57611 - RNA, 32 nt, Homo Sapiens
ccagacaguauuuuaauuggaucauauauagu

SEQ ID NO: 57612 - RNA, 32 nt, Homo Sapiens
gguugccaguguugcugcccaugaugaguuau

SEQ ID NO: 57613 - RNA, 32 nt, Homo Sapiens
cgccugccuuggccuggcaaaaugcugggauu

SEQ ID NO: 57614 - RNA, 32 nt, Homo Sapiens
ggggcauggaugacgacaguuuuggcuacuuc

SEQ ID NO: 57615 - RNA, 32 nt, Homo Sapiens
ccgggacucagcgccuucggguggcggcggua

SEQ ID NO: 57616 - RNA, 32 nt, Homo Sapiens
uaucuagaauacacaaucuugcuccuuacucc

SEQ ID NO: 57617 - RNA, 32 nt, Homo Sapiens
acauugcauuugggggggcucccguggccugu

SEQ ID NO: 57618 - RNA, 32 nt, Homo Sapiens
aguaguugugguauauuuuugaguaaaauuac

SEQ ID NO: 57619 - RNA, 28 nt, Homo Sapiens
gguuucuugucuaaugucaguguucagu

SEQ ID NO: 57620 - RNA, 29 nt, Homo Sapiens
gccuguuggggacaggagaugcauggaca

SEQ ID NO: 57621 - RNA, 32 nt, Homo Sapiens
aggaaggugggauuucuggggaggcuggugaa

SEQ ID NO: 57622 - RNA, 32 nt, Homo Sapiens
ucugagugcaggugggggugccgggauggguu

SEQ ID NO: 57623 - RNA, 32 nt, Homo Sapiens
cccaagcaaccucagccaaugaguccaauguc

SEQ ID NO: 57624 - RNA, 32 nt, Homo Sapiens
uucuuuaauuuucagucauuacugguauugaa

SEQ ID NO: 57625 - RNA, 32 nt, Homo Sapiens
ccaaccacuccagcagccaccggggcgccagg

SEQ ID NO: 57626 - RNA, 32 nt, Homo Sapiens
ucaaaacaaacaaaacaaaaaagcuaaaacaa

SEQ ID NO: 57627 - RNA, 32 nt, Homo Sapiens
cuucagacugguuugccugaaucuuuuccuuu

SEQ ID NO: 57628 - RNA, 32 nt, Homo Sapiens
gguuuagccauguugaucaggcuggucuugaa

SEQ ID NO: 57629 - RNA, 32 nt, Homo Sapiens
gggugacuugaacuucagucauccucuuggca

SEQ ID NO: 57630 - RNA, 32 nt, Homo Sapiens
aaaaguuauauaaauuacauugacaacuaaaa

SEQ ID NO: 57631 - RNA, 32 nt, Homo Sapiens
aauuuuguuuuaagucuucaaauaucuugaga

SEQ ID NO: 57632 - RNA, 32 nt, Homo Sapiens
ugaauuuaaugagaaacuugggguugugagug

SEQ ID NO: 57633 - RNA, 32 nt, Homo Sapiens
cuaagagauaaggagcacuuugcuagugacag

SEQ ID NO: 57634 - RNA, 32 nt, Homo Sapiens
uugguuccuuugcaugauucagggcacacagg

SEQ ID NO: 57635 - RNA, 32 nt, Homo Sapiens
ucuggccugaggcuugccgaggucuuagguga

SEQ ID NO: 57636 - RNA, 32 nt, Homo Sapiens
agcaggagcgagagaugagaaagggaauccag

SEQ ID NO: 57637 - RNA, 32 nt, Homo Sapiens
uugcugauuuuauggaacagguguuggagggu

SEQ ID NO: 57638 - RNA, 32 nt, Homo Sapiens
ggaggaguguggaggaagcgggguccucagcu

SEQ ID NO: 57639 - RNA, 29 nt, Homo Sapiens
ccuaggcaugagguauauuuuauucuggg

SEQ ID NO: 57640 - RNA, 32 nt, Homo Sapiens
ccgcagcgugucacagguguuggugaggacac

SEQ ID NO: 57641 - RNA, 32 nt, Homo Sapiens
ucugagcaggacuuguccuuacuguggauugu

SEQ ID NO: 57642 - RNA, 32 nt, Homo Sapiens
guguucauauccuugauuuugagaauuucccc

SEQ ID NO: 57643 - RNA, 32 nt, Homo Sapiens
uuguuguuauauuuuuaauggaaaucuguuac

SEQ ID NO: 57644 - RNA, 32 nt, Homo Sapiens
agucagaaauuugaauuugaaacaggagauga

SEQ ID NO: 57645 - RNA, 32 nt, Homo Sapiens
acaaaaaaaaauucuuuuuuuuuuuuuuuuuu

SEQ ID NO: 57646 - RNA, 32 nt, Homo Sapiens
ugguggcugccagcuugugagcuaucuaucua

SEQ ID NO: 57647 - RNA, 32 nt, Homo Sapiens
cugcuguuccuguuggccccagcugcacucgc

SEQ ID NO: 57648 - RNA, 32 nt, Homo Sapiens
caccgcacccucggacugccccagggcccccg

SEQ ID NO: 57649 - RNA, 31 nt, Homo Sapiens
gcuuucauucuuugcuaacaaacacaacuga

SEQ ID NO: 57650 - RNA, 32 nt, Homo Sapiens
cagauagcagcaugcauacuuggggcugcauu

SEQ ID NO: 57651 - RNA, 32 nt, Homo Sapiens
gccauccagcugccagagugcuccacagggac

SEQ ID NO: 57652 - RNA, 32 nt, Homo Sapiens
ugcacacaugguucccuccacccagaaaacug

SEQ ID NO: 57653 - RNA, 32 nt, Homo Sapiens
uggagcagauggagaccccuuggggagcaggc

SEQ ID NO: 57654 - RNA, 32 nt, Homo Sapiens
ucucagacccgccccggauucccaggcaucgg

SEQ ID NO: 57655 - RNA, 32 nt, Homo Sapiens
cgaugcaggaccagccuggcucgaggaagccg

SEQ ID NO: 57656 - RNA, 32 nt, Homo Sapiens
aaaucuugaggcuaugggauaaucacauuuaa

SEQ ID NO: 57657 - RNA, 32 nt, Homo Sapiens
gugugguccguccagacaccuuguuucaaggg

SEQ ID NO: 57658 - RNA, 32 nt, Homo Sapiens
cccuucacuucccccauucccuuccacagcuc

SEQ ID NO: 57659 - RNA, 32 nt, Homo Sapiens
uuuuagacacgccucuguuaaaacagaccagg

SEQ ID NO: 57660 - RNA, 32 nt, Homo Sapiens
gcaauuguuaaaacaaagaacuagaugugcag

SEQ ID NO: 57661 - RNA, 32 nt, Homo Sapiens
gucaguaccccuucuuuuuucuaagcagcuaa

SEQ ID NO: 57662 - RNA, 32 nt, Homo Sapiens
cugacucucuuacuuuuuucuuaguaacugau

SEQ ID NO: 57663 - RNA, 32 nt, Homo Sapiens
aucuauuucagccccaccuguugauuucauca

SEQ ID NO: 57664 - RNA, 32 nt, Homo Sapiens
ucccauuuuuaaaccuaucagaucucaugaga

SEQ ID NO: 57665 - RNA, 32 nt, Homo Sapiens
cucagucggagaccacauugccucgaaggcga

SEQ ID NO: 57666 - RNA, 32 nt, Homo Sapiens
ugaaccuccucaacauggccacuuccuucauc

SEQ ID NO: 57667 - RNA, 32 nt, Homo Sapiens
aagccagaggauacccagggacaguagggcuc

SEQ ID NO: 57668 - RNA, 32 nt, Homo Sapiens
cauuuuuuaaucuugaaauuucuucauuuuuc

SEQ ID NO: 57669 - RNA, 32 nt, Homo Sapiens
ucccaugcuagaguugccauuaagcagugcaa

SEQ ID NO: 57670 - RNA, 32 nt, Homo Sapiens
ucuuugaaucaauaaacuugggugaauauuug

SEQ ID NO: 57671 - RNA, 32 nt, Homo Sapiens
cuucucaggaccaggaugaacucuuggugcug

SEQ ID NO: 57672 - RNA, 32 nt, Homo Sapiens
cuguuaauguuaauuaaaguaaaauuauuccc

SEQ ID NO: 57673 - RNA, 32 nt, Homo Sapiens
guaggcuggggguggggggucgagugagcggu

SEQ ID NO: 57674 - RNA, 32 nt, Homo Sapiens
ucuaggccugacccuccaggugucaauggacu

SEQ ID NO: 57675 - RNA, 32 nt, Homo Sapiens
ccucuugccacguucccacgggcuugggggaa

SEQ ID NO: 57676 - RNA, 31 nt, Homo Sapiens
uugugcuguaacaugggaaaguguaaauguu

SEQ ID NO: 57677 - RNA, 32 nt, Homo Sapiens
auaaaaagaaaugugaaguuuucuuuuacuau

SEQ ID NO: 57678 - RNA, 32 nt, Homo Sapiens
auuaaacuaaaucaggcucauuugaagaugau

SEQ ID NO: 57679 - RNA, 32 nt, Homo Sapiens
gggcccuggaggagacccccacccugcaaucc

SEQ ID NO: 57680 - RNA, 32 nt, Homo Sapiens
ggugcuggagaugccaagggaagugugugcau

SEQ ID NO: 57681 - RNA, 32 nt, Homo Sapiens
uaaacaaaaacauuuuucaagucucuaacuag

SEQ ID NO: 57682 - RNA, 32 nt, Homo Sapiens
ucagcucccaaggccccugaccucagcucagc

SEQ ID NO: 57683 - RNA, 32 nt, Homo Sapiens
uuacagagcauccaugagucaagcccccuccc

SEQ ID NO: 57684 - RNA, 32 nt, Homo Sapiens
cagggccaagagagcagugaccacugaggauu

SEQ ID NO: 57685 - RNA, 32 nt, Homo Sapiens
ccugugguguugccaggcaagagacacgaagu

SEQ ID NO: 57686 - RNA, 32 nt, Homo Sapiens
aagagccacaccuggugaauacucaguaaaca

SEQ ID NO: 57687 - RNA, 32 nt, Homo Sapiens
acaacaacaacaacuuauuuaguuuggggagg

SEQ ID NO: 57688 - RNA, 32 nt, Homo Sapiens
uguaggucaaagcugagacacuugucaugugg

SEQ ID NO: 57689 - RNA, 32 nt, Homo Sapiens
ggucagggugccacccugcugcuggccccacu

SEQ ID NO: 57690 - RNA, 32 nt, Homo Sapiens
caauuuuuacuuucuucagccaauuuguuacc

SEQ ID NO: 57691 - RNA, 32 nt, Homo Sapiens
cuuucuuccuuccccagcuccacuaaauuccc

SEQ ID NO: 57692 - RNA, 32 nt, Homo Sapiens
aggucaacagagccugccaucccaggcuucag

SEQ ID NO: 57693 - RNA, 32 nt, Homo Sapiens
uuagcuacugaaugauggcaaguuaaacuaaa

SEQ ID NO: 57694 - RNA, 32 nt, Homo Sapiens
uguuggcuccaguuacuaauguuuaagcagaa

SEQ ID NO: 57695 - RNA, 32 nt, Homo Sapiens
aauuauugucauguccgaauagauaggaggag

SEQ ID NO: 57696 - RNA, 32 nt, Homo Sapiens
ggccugcagcggaaagagcgggagcugcgcga

SEQ ID NO: 57697 - RNA, 32 nt, Homo Sapiens
aguggaacagauguuucagauacuguuggacc

SEQ ID NO: 57698 - RNA, 32 nt, Homo Sapiens
cugcgggaugaaccugcagucuggccuuuccc

SEQ ID NO: 57699 - RNA, 32 nt, Homo Sapiens
uuuauauucuuuuguuuacaugaugaaacuuu

SEQ ID NO: 57700 - RNA, 32 nt, Homo Sapiens
cccuuuucuucaucuuuuuuuuuuuuuuuucu

SEQ ID NO: 57701 - RNA, 32 nt, Homo Sapiens
gauucaaacugcugccuuugccuccagugcau

SEQ ID NO: 57702 - RNA, 32 nt, Homo Sapiens
acagaaauggguuuccagaagaauaaugaaaa

SEQ ID NO: 57703 - RNA, 32 nt, Homo Sapiens
cucucugccgcgcgcgcagguacggggcagaa

SEQ ID NO: 57704 - RNA, 32 nt, Homo Sapiens
guagaguauuugacaaucaggauacuugggcu

SEQ ID NO: 57705 - RNA, 32 nt, Homo Sapiens
agugguagaaacaaaaugagauugucccugaa

SEQ ID NO: 57706 - RNA, 32 nt, Homo Sapiens
uugccucuacgauguuuuuucuugguccaccu

SEQ ID NO: 57707 - RNA, 32 nt, Homo Sapiens
gaaauguagaacuuuagauacuuuuuaucaua

SEQ ID NO: 57708 - RNA, 32 nt, Homo Sapiens
ucuuguuguucaauuaucuccucccccucuuc

SEQ ID NO: 57709 - RNA, 32 nt, Homo Sapiens
gacccgccucuuuucccuccccgccagcccgc

SEQ ID NO: 57710 - RNA, 32 nt, Homo Sapiens
aauacauacuaaaauagugguuauuggucuga

SEQ ID NO: 57711 - RNA, 32 nt, Homo Sapiens
ugaagaugaucaaugcuaggaaagcuuaucaa

SEQ ID NO: 57712 - RNA, 32 nt, Homo Sapiens
ucuagaaacuaaauuagagacauuguguuugg

SEQ ID NO: 57713 - RNA, 32 nt, Homo Sapiens
ggaccagaaaucaggugcccaacagcccccuu

SEQ ID NO: 57714 - RNA, 32 nt, Homo Sapiens
uaggccgcgcgaggucccuccucuccgggcgu

SEQ ID NO: 57715 - RNA, 32 nt, Homo Sapiens
uuuuuauuaagauguuggaaaagcaggaggua

SEQ ID NO: 57716 - RNA, 32 nt, Homo Sapiens
ucgcaacccugccugucaccugggaggguggg

SEQ ID NO: 57717 - RNA, 32 nt, Homo Sapiens
gcauuuggucugauuuuuuugcuuuguggaca

SEQ ID NO: 57718 - RNA, 32 nt, Homo Sapiens
cugaagcaucuccagggcuggaugccauggua

SEQ ID NO: 57719 - RNA, 32 nt, Homo Sapiens
auggcuguuuccagaccugaauauugggugcu

SEQ ID NO: 57720 - RNA, 32 nt, Homo Sapiens
aggcccagcucuuccucucagcgccucugcag

SEQ ID NO: 57721 - RNA, 32 nt, Homo Sapiens
caggaagagggcaggucagggauugggcggug

SEQ ID NO: 57722 - RNA, 32 nt, Homo Sapiens
aucugcguccacuuaggaggcccaacugccca

SEQ ID NO: 57723 - RNA, 32 nt, Homo Sapiens
cacacgagcacacacacacacacacacacgaa

SEQ ID NO: 57724 - RNA, 32 nt, Homo Sapiens
cacacacacacacacacacacacacacacacg

SEQ ID NO: 57725 - RNA, 32 nt, Homo Sapiens
uauacacacacauacguauacacacacauaca

SEQ ID NO: 57726 - RNA, 32 nt, Homo Sapiens
ccccugccggcccggccgggucgggcggccca

SEQ ID NO: 57727 - RNA, 32 nt, Homo Sapiens
guggacacugccccgccgcgggcggcccugca

SEQ ID NO: 57728 - RNA, 32 nt, Homo Sapiens
cugcgcaaccccugccucccccggccccagcc

SEQ ID NO: 57729 - RNA, 32 nt, Homo Sapiens
gagcgucuccccacaacagaaggccucaccuc

SEQ ID NO: 57730 - RNA, 32 nt, Homo Sapiens
agauagucaucucaguccaaggaucccaaaac

SEQ ID NO: 57731 - RNA, 32 nt, Homo Sapiens
augaguucaaagcugugaaggauugggagauc

SEQ ID NO: 57732 - RNA, 32 nt, Homo Sapiens
aagugccgcgucuuggugggucuggagcuggc

SEQ ID NO: 57733 - RNA, 32 nt, Homo Sapiens
uuacaguguuuguuuugauaacauuuggcugg

SEQ ID NO: 57734 - RNA, 32 nt, Homo Sapiens
gugcucuugaacuuauuuuaauucuuauaauu

SEQ ID NO: 57735 - RNA, 32 nt, Homo Sapiens
ggggcgguccgcacgcaccucgguaacaucac

SEQ ID NO: 57736 - RNA, 32 nt, Homo Sapiens
ucaccucuggacaagucaucugcacaacugac

SEQ ID NO: 57737 - RNA, 32 nt, Homo Sapiens
guggagauugugcuaugaagauaccugcaccc

SEQ ID NO: 57738 - RNA, 32 nt, Homo Sapiens
aucuuucucgcacaggcuuggagugcaguggu

SEQ ID NO: 57739 - RNA, 32 nt, Homo Sapiens
cuccucugugugccccagcugcaucagccagc

SEQ ID NO: 57740 - RNA, 32 nt, Homo Sapiens
ccccuccguccauccucugccccucccccugg

SEQ ID NO: 57741 - RNA, 32 nt, Homo Sapiens
uacuccccaaaauggaaucaugggauagggaa

SEQ ID NO: 57742 - RNA, 32 nt, Homo Sapiens
cucugaaugaugcuucuuucuguguuggagcc

SEQ ID NO: 57743 - RNA, 32 nt, Homo Sapiens
auuaaucuccagguguaagauuuuaaagugca

SEQ ID NO: 57744 - RNA, 32 nt, Homo Sapiens
uugguggcuuucugaaaauagcaaugauugaa

SEQ ID NO: 57745 - RNA, 32 nt, Homo Sapiens
aaaguauuguuucuggguguugccagaagaga

SEQ ID NO: 57746 - RNA, 32 nt, Homo Sapiens
ccuucacccucuuccuuccccagccagggcag

SEQ ID NO: 57747 - RNA, 32 nt, Homo Sapiens
uuuauacaaaagacaugauagagaaaagauga

SEQ ID NO: 57748 - RNA, 32 nt, Homo Sapiens
ggacuggcggggggagggggccggccagccug

SEQ ID NO: 57749 - RNA, 32 nt, Homo Sapiens
cuuacaucucauucacugucuuucuccaagaa

SEQ ID NO: 57750 - RNA, 32 nt, Homo Sapiens
agccaccaccgccgccgccgccgcuccgccag

SEQ ID NO: 57751 - RNA, 32 nt, Homo Sapiens
auucacuacagggacuuagagaacagucucuu

SEQ ID NO: 57752 - RNA, 32 nt, Homo Sapiens
ucacaccccuguggccugggcaucauaaucag

SEQ ID NO: 57753 - RNA, 32 nt, Homo Sapiens
aggccgacgcugcuccuccucccgauuccauc

SEQ ID NO: 57754 - RNA, 32 nt, Homo Sapiens
uguuuuuaaugaaucuaauuauucacaaugca

SEQ ID NO: 57755 - RNA, 32 nt, Homo Sapiens
agaaugcuuaauuuucuuucucugaacuucaa

SEQ ID NO: 57756 - RNA, 32 nt, Homo Sapiens
uuuccagaggcugggaacacggcccaccuagc

SEQ ID NO: 57757 - RNA, 32 nt, Homo Sapiens
ggauccggguggcugcaggcugcuggcuucug

SEQ ID NO: 57758 - RNA, 32 nt, Homo Sapiens
caccuguaauccccgcacuuuggaaggccgag

SEQ ID NO: 57759 - RNA, 32 nt, Homo Sapiens
gaaggguggggacgaggcgucgggaggguaua

SEQ ID NO: 57760 - RNA, 32 nt, Homo Sapiens
ccuuagccccacugguauaaauacaucucucu

SEQ ID NO: 57761 - RNA, 32 nt, Homo Sapiens
cgccugugugcgagcccuccugggcucugggg

SEQ ID NO: 57762 - RNA, 32 nt, Homo Sapiens
gccugccuugcgccuggugcugccaggaagau

SEQ ID NO: 57763 - RNA, 32 nt, Homo Sapiens
gggcaucuuagaacucuuucugaagagaccuu

SEQ ID NO: 57764 - RNA, 32 nt, Homo Sapiens
ggcugcccaccagcugacaggcaccaucaacu

SEQ ID NO: 57765 - RNA, 32 nt, Homo Sapiens
accugcacuccagccugggugacagagcgaga

SEQ ID NO: 57766 - RNA, 32 nt, Homo Sapiens
acuuuugauccugggggaccaaugaggugagg

SEQ ID NO: 57767 - RNA, 32 nt, Homo Sapiens
uggggagggcuuuuguuuuuacguuuucaagu

SEQ ID NO: 57768 - RNA, 32 nt, Homo Sapiens
uaggcagagagaggaagggauuccuagcagag

SEQ ID NO: 57769 - RNA, 32 nt, Homo Sapiens
ggcagcgggagcuucuucugccgggcuggagg

SEQ ID NO: 57770 - RNA, 32 nt, Homo Sapiens
cucuuaucugucuacagaccucuccugcucca

SEQ ID NO: 57771 - RNA, 32 nt, Homo Sapiens
ccuccuccgcgcuaacuccgccgcccgcuccc

SEQ ID NO: 57772 - RNA, 32 nt, Homo Sapiens
uaauuuuugugauuuuaauuugauacaaaaug

SEQ ID NO: 57773 - RNA, 32 nt, Homo Sapiens
gguagcccagcauuuuccuguggacgagacau

SEQ ID NO: 57774 - RNA, 32 nt, Homo Sapiens
gccgagggaccgaggggggcuaagaaaggggg

SEQ ID NO: 57775 - RNA, 32 nt, Homo Sapiens
accuguuaguuucaaaaaugacauugcuugcu

SEQ ID NO: 57776 - RNA, 29 nt, Homo Sapiens
ugggggcggggacagagacggagaccucu

SEQ ID NO: 57777 - RNA, 32 nt, Homo Sapiens
ucuggaagugggccaguuuuguagcucagcgu

SEQ ID NO: 57778 - RNA, 32 nt, Homo Sapiens
uuucuauaacaucuaucuguccuaacagagua

SEQ ID NO: 57779 - RNA, 32 nt, Homo Sapiens
ccuagucaagccaaccggcucgcucuuguuuc

SEQ ID NO: 57780 - RNA, 32 nt, Homo Sapiens
gcugcugccugccuuggccugauggccaggcc

SEQ ID NO: 57781 - RNA, 32 nt, Homo Sapiens
cugguuuuaaucuguagaacuguuuuagagua

SEQ ID NO: 57782 - RNA, 32 nt, Homo Sapiens
guuacagcuuccauucuggggcgacggggacc

SEQ ID NO: 57783 - RNA, 32 nt, Homo Sapiens
guagaugcaauaagcccacguauuuuuacacu

SEQ ID NO: 57784 - RNA, 32 nt, Homo Sapiens
agggccggcgcucgugggggucggugaucugg

SEQ ID NO: 57785 - RNA, 32 nt, Homo Sapiens
aagcucuuggacgagguucacugguccgcagg

SEQ ID NO: 57786 - RNA, 32 nt, Homo Sapiens
aaggcccaagcagcucaucugcucuugggacc

SEQ ID NO: 57787 - RNA, 31 nt, Homo Sapiens
aaaauccaagccagucaaccauagcaggugg

SEQ ID NO: 57788 - RNA, 32 nt, Homo Sapiens
aggauuaacuggaaaaaaugugucucagugcu

SEQ ID NO: 57789 - RNA, 32 nt, Homo Sapiens
cggacucagguggaaggaauuucuucucuucg

SEQ ID NO: 57790 - RNA, 32 nt, Homo Sapiens
aaaugcuugggaccagaaguguuucagauuuu

SEQ ID NO: 57791 - RNA, 32 nt, Homo Sapiens
ccguccucugagcagggcccaaggcagccagg

SEQ ID NO: 57792 - RNA, 32 nt, Homo Sapiens
gggggagaggggcaaaugccuccgggacugac

SEQ ID NO: 57793 - RNA, 32 nt, Homo Sapiens
aaaggugccgccccggucucuccgucccgccc

SEQ ID NO: 57794 - RNA, 32 nt, Homo Sapiens
ggaccacagucucuggugauguguguaguggc

SEQ ID NO: 57795 - RNA, 32 nt, Homo Sapiens
gaacuccugaccucaggugauccaccagccuc

SEQ ID NO: 57796 - RNA, 32 nt, Homo Sapiens
aggggagaggggccaucugaugcuuccccugg

SEQ ID NO: 57797 - RNA, 32 nt, Homo Sapiens
uuguuuuuguuucauuuuuuuaaaguuguggu

SEQ ID NO: 57798 - RNA, 32 nt, Homo Sapiens
uugccucguggggauguuguguguguauacau

SEQ ID NO: 57799 - RNA, 32 nt, Homo Sapiens
guaaaaaugaauugaaccauuucaacuauuuu

SEQ ID NO: 57800 - RNA, 32 nt, Homo Sapiens
guggcccacgcagagcuggugcaggucugagu

SEQ ID NO: 57801 - RNA, 32 nt, Homo Sapiens
uuguuuuaaaauuuauccacuauuggcuuaug

SEQ ID NO: 57802 - RNA, 32 nt, Homo Sapiens
ccaggggcgcuuggcaucucccauggacugau

SEQ ID NO: 57803 - RNA, 32 nt, Homo Sapiens
cucaggccuguaggcauucuccccucuguggc

SEQ ID NO: 57804 - RNA, 32 nt, Homo Sapiens
cgguggcggagaccaaggcggcggcggcggac

SEQ ID NO: 57805 - RNA, 32 nt, Homo Sapiens
aaagccagcuggaggugaagugcaggaaagga

SEQ ID NO: 57806 - RNA, 32 nt, Homo Sapiens
uugcaucgcugaucuucaguaccuucaccugu

SEQ ID NO: 57807 - RNA, 32 nt, Homo Sapiens
caacacaugccuucccuccccagccacaccgu

SEQ ID NO: 57808 - RNA, 32 nt, Homo Sapiens
auuugaaucuucugcuguacaucuuauuuauu

SEQ ID NO: 57809 - RNA, 32 nt, Homo Sapiens
gauuuuaacuuauguuugauauauaguaguaa

SEQ ID NO: 57810 - RNA, 32 nt, Homo Sapiens
agauggaaugugucugguaaccccaaauggag

SEQ ID NO: 57811 - RNA, 32 nt, Homo Sapiens
guugucuacugaccauuuccacuacaugccuu

SEQ ID NO: 57812 - RNA, 32 nt, Homo Sapiens
uggguucugaagaggcgaauuuguugaaaagu

SEQ ID NO: 57813 - RNA, 32 nt, Homo Sapiens
cugggcguggagcugugucaggcgcugggcac

SEQ ID NO: 57814 - RNA, 32 nt, Homo Sapiens
cugggccgccuggcccggcucaucaaggaggc

SEQ ID NO: 57815 - RNA, 32 nt, Homo Sapiens
caaacgaaugaaugaacagacacacacaaugu

SEQ ID NO: 57816 - RNA, 32 nt, Homo Sapiens
acccaggggaaacgagcuguguagccacugac

SEQ ID NO: 57817 - RNA, 32 nt, Homo Sapiens
gacgguagaacaaaaggaagaauauugaugga

SEQ ID NO: 57818 - RNA, 32 nt, Homo Sapiens
auagaagugucaaguauaaacgaauccaaccu

SEQ ID NO: 57819 - RNA, 32 nt, Homo Sapiens
gcugcucugccgcggggacugcaccgcccgcc

SEQ ID NO: 57820 - RNA, 32 nt, Homo Sapiens
gcaggcgugugaagaaagaaggaaacuagcuc

SEQ ID NO: 57821 - RNA, 32 nt, Homo Sapiens
acaaagagaaaugugcaaauauuuuuuaaggc

SEQ ID NO: 57822 - RNA, 32 nt, Homo Sapiens
cugcgucugcaccugcaccucugaccguuuca

SEQ ID NO: 57823 - RNA, 32 nt, Homo Sapiens
ccugagggcggagcgccuccuuaggagugggg

SEQ ID NO: 57824 - RNA, 32 nt, Homo Sapiens
uaucaggacuuccaauaaauaaagacucugua

SEQ ID NO: 57825 - RNA, 32 nt, Homo Sapiens
guuucaaacacaaaugcagggauugcugccac

SEQ ID NO: 57826 - RNA, 32 nt, Homo Sapiens
guccacagaacagaagcugaaaaagcauauug

SEQ ID NO: 57827 - RNA, 32 nt, Homo Sapiens
gaagguuucuggccacugaacuuuggcuaaag

SEQ ID NO: 57828 - RNA, 32 nt, Homo Sapiens
cucugauaaagcgucugaucuaaucccagcac

SEQ ID NO: 57829 - RNA, 32 nt, Homo Sapiens
ugcggggugaggguggcuuucuuccagcccca

SEQ ID NO: 57830 - RNA, 32 nt, Homo Sapiens
cuucuuucccgucgccaccccggagacgccca

SEQ ID NO: 57831 - RNA, 32 nt, Homo Sapiens
cuaaauucuggugguuaaauaacuuaccugug

SEQ ID NO: 57832 - RNA, 32 nt, Homo Sapiens
acccaugaugugagcaaacacacacacgugcg

SEQ ID NO: 57833 - RNA, 32 nt, Homo Sapiens
uauuucuuucuuucuuuuuuuuuuuuuuuaau

SEQ ID NO: 57834 - RNA, 32 nt, Homo Sapiens
caucccagacaggaagcagagucccacagacc

SEQ ID NO: 57835 - RNA, 32 nt, Homo Sapiens
uaauggcagaacuggcacuagguccaaaucuu

SEQ ID NO: 57836 - RNA, 32 nt, Homo Sapiens
ugccugcagggccacaggcuccuaggggaaag

SEQ ID NO: 57837 - RNA, 32 nt, Homo Sapiens
ugcaaagggcaaagguuaugaaguaucacuua

SEQ ID NO: 57838 - RNA, 32 nt, Homo Sapiens
ccaugcguauagccuccugcauucuccccucu

SEQ ID NO: 57839 - RNA, 32 nt, Homo Sapiens
gccuuccaguuucucuccugccucucaucuuu

SEQ ID NO: 57840 - RNA, 32 nt, Homo Sapiens
cggcugcggccgagaggacgcgggacccggcg

SEQ ID NO: 57841 - RNA, 32 nt, Homo Sapiens
gcggggcccggccagggcuggagacuuugcgc

SEQ ID NO: 57842 - RNA, 32 nt, Homo Sapiens
guuuucaauauuuacugugacuuuuguuuucu

SEQ ID NO: 57843 - RNA, 32 nt, Homo Sapiens
aucuacaaugacccuccucauuuccccuggcu

SEQ ID NO: 57844 - RNA, 32 nt, Homo Sapiens
gacguuccucaucacccgccucacggggccag

SEQ ID NO: 57845 - RNA, 32 nt, Homo Sapiens
cacccaggccacccugccuccucccguccgcc

SEQ ID NO: 57846 - RNA, 32 nt, Homo Sapiens
cucaaugggucucauuugagucucgcgggcug

SEQ ID NO: 57847 - RNA, 32 nt, Homo Sapiens
uacauuugauaaauguuacacagaugcauuug

SEQ ID NO: 57848 - RNA, 32 nt, Homo Sapiens
agaauacuucauccugauucucuuuuuccuua

SEQ ID NO: 57849 - RNA, 32 nt, Homo Sapiens
cacuguugccauggugaccaaacucuggaguc

SEQ ID NO: 57850 - RNA, 32 nt, Homo Sapiens
ucuaccaccccucccccaggcugggagaaggg

SEQ ID NO: 57851 - RNA, 32 nt, Homo Sapiens
gacugucauucagaucucugguucacuucuuc

SEQ ID NO: 57852 - RNA, 32 nt, Homo Sapiens
cucuuugagaggagcugcuugugaaccaggcu

SEQ ID NO: 57853 - RNA, 32 nt, Homo Sapiens
ugcuuuaugaagaagcacuuucuaauggguaa

SEQ ID NO: 57854 - RNA, 32 nt, Homo Sapiens
uuggugauccugaucaccuuugguggcuuguu

SEQ ID NO: 57855 - RNA, 32 nt, Homo Sapiens
uacuaacugguuauagugggauaggaggcaga

SEQ ID NO: 57856 - RNA, 32 nt, Homo Sapiens
aggagccggcgccuggccacgccaaccuuaga

SEQ ID NO: 57857 - RNA, 32 nt, Homo Sapiens
gccuagcuuaggauggagcuggugcucagaua

SEQ ID NO: 57858 - RNA, 32 nt, Homo Sapiens
gccuuccccagcugccucaacucugucucugg

SEQ ID NO: 57859 - RNA, 32 nt, Homo Sapiens
cucacccugcuggcuccugguggguuucaucc

SEQ ID NO: 57860 - RNA, 32 nt, Homo Sapiens
agaagguuaguagcuggaccuaugaacaaaag

SEQ ID NO: 57861 - RNA, 32 nt, Homo Sapiens
ugaucuggacagcgccuuggugccggugaucc

SEQ ID NO: 57862 - RNA, 27 nt, Homo Sapiens
cgauucuccugcuucagccuuccugag

SEQ ID NO: 57863 - RNA, 32 nt, Homo Sapiens
uugaaagucaugauaauuucugucccacugug

SEQ ID NO: 57864 - RNA, 32 nt, Homo Sapiens
acaucagcugagauauggggagccugcacucc

SEQ ID NO: 57865 - RNA, 32 nt, Homo Sapiens
guggcagggggcccugguuuugugcggcgcuc

SEQ ID NO: 57866 - RNA, 32 nt, Homo Sapiens
gggcugucgcagccaacaccccggccucgggg

SEQ ID NO: 57867 - RNA, 32 nt, Homo Sapiens
cuuacccuccaagccucaguuuaccuuuaggg

SEQ ID NO: 57868 - RNA, 32 nt, Homo Sapiens
gaaacagauuucuggaggguaaguaacccaaa

SEQ ID NO: 57869 - RNA, 32 nt, Homo Sapiens
guucuggagagccuggugccacgagacaagga

SEQ ID NO: 57870 - RNA, 32 nt, Homo Sapiens
guagagcaaucugggcacuuuggccaauuuua

SEQ ID NO: 57871 - RNA, 32 nt, Homo Sapiens
cccugcggagcccgcccaacuccggcgagccg

SEQ ID NO: 57872 - RNA, 32 nt, Homo Sapiens
agccucggggucugcccggccccucgccccug

SEQ ID NO: 57873 - RNA, 32 nt, Homo Sapiens
gauucugucgcgaacccucucacggcagcuau

SEQ ID NO: 57874 - RNA, 32 nt, Homo Sapiens
aggaggggguggcaggggccuugcagggcgcu

SEQ ID NO: 57875 - RNA, 32 nt, Homo Sapiens
acgugaaggaccgagcgccgcgcgcccaggcg

SEQ ID NO: 57876 - RNA, 32 nt, Homo Sapiens
uucccuucccugaauccaaacucuguuaccag

SEQ ID NO: 57877 - RNA, 32 nt, Homo Sapiens
caaaccaggccucuucuucauccaccaccacc

SEQ ID NO: 57878 - RNA, 32 nt, Homo Sapiens
gccacgcaguuccuccucucccucccggugag

SEQ ID NO: 57879 - RNA, 32 nt, Homo Sapiens
acagagaggaagagccugcaugucgcuggccc

SEQ ID NO: 57880 - RNA, 32 nt, Homo Sapiens
acucugguggggaaaaccguuuuuuaaaggac

SEQ ID NO: 57881 - RNA, 32 nt, Homo Sapiens
cagccagagugcaaagcugugcagugugguaa

SEQ ID NO: 57882 - RNA, 32 nt, Homo Sapiens
cucgcgcgcuggccaucaggugcugcugacgc

SEQ ID NO: 57883 - RNA, 32 nt, Homo Sapiens
uguauugacugcugacuauauuuuaaaaacaa

SEQ ID NO: 57884 - RNA, 30 nt, Homo Sapiens
uuuucuuuccccaugggggagauugucuuc

SEQ ID NO: 57885 - RNA, 32 nt, Homo Sapiens
caaggcaggcccagccccaugggccgucacaa

SEQ ID NO: 57886 - RNA, 32 nt, Homo Sapiens
augucgaaagggaagacauaagagacucuauu

SEQ ID NO: 57887 - RNA, 31 nt, Homo Sapiens
gaggcacugcgcccccagccccgcgccggug

SEQ ID NO: 57888 - RNA, 32 nt, Homo Sapiens
cugugggauggaaaccggagcggcgcguccug

SEQ ID NO: 57889 - RNA, 32 nt, Homo Sapiens
cauagugccuggcucacaggaagugcucagau

SEQ ID NO: 57890 - RNA, 32 nt, Homo Sapiens
aggcaaaagcugaaagggucaugggaggaggc

SEQ ID NO: 57891 - RNA, 32 nt, Homo Sapiens
cacugagaaggccccagggcagcggucuucuc

SEQ ID NO: 57892 - RNA, 32 nt, Homo Sapiens
ccgaggaccgggcugggguuuauuuaaacugu

SEQ ID NO: 57893 - RNA, 32 nt, Homo Sapiens
aaaaugccagauguuguucgggccccaacuug

SEQ ID NO: 57894 - RNA, 32 nt, Homo Sapiens
cuccacguuguaaauaaacauguguuuaauac

SEQ ID NO: 57895 - RNA, 32 nt, Homo Sapiens
gauuucaaaauuauauuucuugaugguaucuu

SEQ ID NO: 57896 - RNA, 32 nt, Homo Sapiens
agcacacuuugaugagguuccuggacgugaga

SEQ ID NO: 57897 - RNA, 32 nt, Homo Sapiens
agguaaaggcagggcuuuccagacacauuuag

SEQ ID NO: 57898 - RNA, 32 nt, Homo Sapiens
guuuggaugaauugucaaaacaagaugcuucc

SEQ ID NO: 57899 - RNA, 32 nt, Homo Sapiens
auaaguuucuuguucucugcguggugaugggg

SEQ ID NO: 57900 - RNA, 32 nt, Homo Sapiens
cgggccuccgcggcagcuccagcggcuccggg

SEQ ID NO: 57901 - RNA, 32 nt, Homo Sapiens
agggaaacacugggauucuuucuuagcugugg

SEQ ID NO: 57902 - RNA, 30 nt, Homo Sapiens
gagggaauugucccugccugcuucuggaga

SEQ ID NO: 57903 - RNA, 31 nt, Homo Sapiens
acaggcuggggccuuuugacggccuucuugg

SEQ ID NO: 57904 - RNA, 32 nt, Homo Sapiens
ccgagcacgcguugcugcuggacgcugcuggc

SEQ ID NO: 57905 - RNA, 32 nt, Homo Sapiens
uauugcuugacaaggcaaauugauugucuuga

SEQ ID NO: 57906 - RNA, 32 nt, Homo Sapiens
agcgcgcccgggcugagcugcagacucgcgcc

SEQ ID NO: 57907 - RNA, 32 nt, Homo Sapiens
agaaugucacagggaaccaaaaagcacagaaa

SEQ ID NO: 57908 - RNA, 32 nt, Homo Sapiens
agcagauggagcuggaggaggaaaaggcaggc

SEQ ID NO: 57909 - RNA, 32 nt, Homo Sapiens
ucgucgcugugcgagcaucauagugugaacuu

SEQ ID NO: 57910 - RNA, 32 nt, Homo Sapiens
cuccuuuccuaugggcauuggugccucccaga

SEQ ID NO: 57911 - RNA, 32 nt, Homo Sapiens
gaaaaugcucuugcuguagagagcagcugcuu

SEQ ID NO: 57912 - RNA, 32 nt, Homo Sapiens
ucaggccgagccugggucucuggccgaggggg

SEQ ID NO: 57913 - RNA, 32 nt, Homo Sapiens
gcaugcuccccucccccacagccucuuccucc

SEQ ID NO: 57914 - RNA, 32 nt, Homo Sapiens
cuuggucgcuucuguagcuccgagggcagguu

SEQ ID NO: 57915 - RNA, 32 nt, Homo Sapiens
acagaaauuaauugccacuuucaucaguguag

SEQ ID NO: 57916 - RNA, 32 nt, Homo Sapiens
ugaugaccaggagugugcucugggaaugcugg

SEQ ID NO: 57917 - RNA, 32 nt, Homo Sapiens
acgaggucaacagauugagaccauccuggcaa

SEQ ID NO: 57918 - RNA, 32 nt, Homo Sapiens
aaugcuggaaaaccaccacccaucaccaauuu

SEQ ID NO: 57919 - RNA, 32 nt, Homo Sapiens
cucccuucuucugagugaauguuaacaugcgc

SEQ ID NO: 57920 - RNA, 32 nt, Homo Sapiens
agugggaaucaucaggcgucucaugaaguggg

SEQ ID NO: 57921 - RNA, 32 nt, Homo Sapiens
aggauaggaacuggaguuauuguuaauguuac

SEQ ID NO: 57922 - RNA, 32 nt, Homo Sapiens
aucucucuuuauuuuucuuucuuuuucuuugu

SEQ ID NO: 57923 - RNA, 32 nt, Homo Sapiens
cugaccugagccauggagacgcaaggacagga

SEQ ID NO: 57924 - RNA, 32 nt, Homo Sapiens
ccuggucgcccggcggccauggcggccguucu

SEQ ID NO: 57925 - RNA, 27 nt, Homo Sapiens
cgaguugacuuaugcagcccccagaac

SEQ ID NO: 57926 - RNA, 32 nt, Homo Sapiens
guuuccagcaacaguaaagguggaaagaacag

SEQ ID NO: 57927 - RNA, 32 nt, Homo Sapiens
ucagggucucccuuuucuuuuccagaugaugu

SEQ ID NO: 57928 - RNA, 32 nt, Homo Sapiens
gacccagugcaggccuaggagcccgccuagcc

SEQ ID NO: 57929 - RNA, 32 nt, Homo Sapiens
gacccuaagggagggaugagccaggcagugug

SEQ ID NO: 57930 - RNA, 32 nt, Homo Sapiens
gccacccuggacgugaccguaucccucugcca

SEQ ID NO: 57931 - RNA, 32 nt, Homo Sapiens
gcgacuuauuuuuucucuccuaugccacccca

SEQ ID NO: 57932 - RNA, 32 nt, Homo Sapiens
auuucauguuccucaugaaaucucugcuguau

SEQ ID NO: 57933 - RNA, 32 nt, Homo Sapiens
gugauccuccugccucagccuccuaagugcug

SEQ ID NO: 57934 - RNA, 32 nt, Homo Sapiens
cucccaggggcuuuuccaagcccagcucuugc

SEQ ID NO: 57935 - RNA, 32 nt, Homo Sapiens
uucacuaaaagcuaccgugguggagugaaguc

SEQ ID NO: 57936 - RNA, 32 nt, Homo Sapiens
uaaagcccgcggccaagucccggggccgagac

SEQ ID NO: 57937 - RNA, 32 nt, Homo Sapiens
aggugagggugcacgucuucccuccuguccca

SEQ ID NO: 57938 - RNA, 32 nt, Homo Sapiens
aaauuggccaaaacaaauucugauggaucuuc

SEQ ID NO: 57939 - RNA, 32 nt, Homo Sapiens
gcaaguuacauaauaaaacuuuagauauuugu

SEQ ID NO: 57940 - RNA, 32 nt, Homo Sapiens
agaauuaaaaacaugguuguuuuggaauuuuu

SEQ ID NO: 57941 - RNA, 32 nt, Homo Sapiens
gcaauuuaaauuauaaugugucaggcuguguu

SEQ ID NO: 57942 - RNA, 32 nt, Homo Sapiens
agacagcagcucucucccgguagccgauaacg

SEQ ID NO: 57943 - RNA, 32 nt, Homo Sapiens
caucauuucugcugccacaugcuugggcugcc

SEQ ID NO: 57944 - RNA, 32 nt, Homo Sapiens
cuuccuugguuugaaagagauuuguauuuuac

SEQ ID NO: 57945 - RNA, 32 nt, Homo Sapiens
auccccacgggcucccccggcuccucuggccu

SEQ ID NO: 57946 - RNA, 32 nt, Homo Sapiens
cgauaauaaaaagcgguugguguaaauuuaaa

SEQ ID NO: 57947 - RNA, 32 nt, Homo Sapiens
gacguaacgauauggugucuuuuacauacuuu

SEQ ID NO: 57948 - RNA, 32 nt, Homo Sapiens
acaaagaauuauaguuccuucucuggagaugu

SEQ ID NO: 57949 - RNA, 32 nt, Homo Sapiens
ucuuugucagccucaggcaguuccuccaugga

SEQ ID NO: 57950 - RNA, 32 nt, Homo Sapiens
guagccaauguuuccuuaaauucauuuuuaaa

SEQ ID NO: 57951 - RNA, 32 nt, Homo Sapiens
acaucauuuccacagaccccucugcccugacc

SEQ ID NO: 57952 - RNA, 32 nt, Homo Sapiens
ucucuggcguccccggcugcuuguacucuugg

SEQ ID NO: 57953 - RNA, 32 nt, Homo Sapiens
guaaauaacuugucuguaaaaaaaaaaaaaaa

SEQ ID NO: 57954 - RNA, 32 nt, Homo Sapiens
agaguggcagaaguggcucuaauuggggugag

SEQ ID NO: 57955 - RNA, 32 nt, Homo Sapiens
gaaagaaucacagggaaucaccacugaugauc

SEQ ID NO: 57956 - RNA, 32 nt, Homo Sapiens
cagggaaaggcuuuuccaauucugaaauucuu

SEQ ID NO: 57957 - RNA, 32 nt, Homo Sapiens
cuagaauucccaugcauagagaauauguguag

SEQ ID NO: 57958 - RNA, 32 nt, Homo Sapiens
aauuguacagcaaucuaaaaacaaaugagguc

SEQ ID NO: 57959 - RNA, 32 nt, Homo Sapiens
auccuggcuaacuuggugaaaccccgucucua

SEQ ID NO: 57960 - RNA, 32 nt, Homo Sapiens
aaaugucccuccccucuucagcacucagcgcg

SEQ ID NO: 57961 - RNA, 32 nt, Homo Sapiens
cguauauguacaauuuggugccauuauuucuc

SEQ ID NO: 57962 - RNA, 32 nt, Homo Sapiens
agcugcccuagccccagagggaucccugcacc

SEQ ID NO: 57963 - RNA, 32 nt, Homo Sapiens
cuccuggucaguggccaaugccccacaggccu

SEQ ID NO: 57964 - RNA, 32 nt, Homo Sapiens
cacccccauaacaauucccccauccuucagug

SEQ ID NO: 57965 - RNA, 32 nt, Homo Sapiens
ccuuugccaaaauaagggauggucaaauauau

SEQ ID NO: 57966 - RNA, 32 nt, Homo Sapiens
uuucagggaaaaaugucuuuaaugcuuuuuca

SEQ ID NO: 57967 - RNA, 32 nt, Homo Sapiens
cccgaugagagaaagggaaaguuaaggaugcu

SEQ ID NO: 57968 - RNA, 32 nt, Homo Sapiens
ccaccauuucaagccaaaaaauauauuccauu

SEQ ID NO: 57969 - RNA, 32 nt, Homo Sapiens
cugcuagagccccccagggucugggaccccgc

SEQ ID NO: 57970 - RNA, 32 nt, Homo Sapiens
cuaauccucccucuccuuaccacgggucagac

SEQ ID NO: 57971 - RNA, 32 nt, Homo Sapiens
caugccccgcaugcgugcaaugccuccagccc

SEQ ID NO: 57972 - RNA, 32 nt, Homo Sapiens
ccaccugcggcgggccguggcgggucccacgc

SEQ ID NO: 57973 - RNA, 32 nt, Homo Sapiens
agggaggggaccccccuccaccccccuuccgu

SEQ ID NO: 57974 - RNA, 32 nt, Homo Sapiens
ccugcugucccuuuuuaacacccaggccccca

SEQ ID NO: 57975 - RNA, 32 nt, Homo Sapiens
gacaccuggugcccuauaccagccccgggcau

SEQ ID NO: 57976 - RNA, 32 nt, Homo Sapiens
cccuagcaguugcgggggaguuuccugccggc

SEQ ID NO: 57977 - RNA, 32 nt, Homo Sapiens
uauuagcugcuauauuguuugacauaaaaggc

SEQ ID NO: 57978 - RNA, 32 nt, Homo Sapiens
cacaacaguaagucccugacuccaccucuucu

SEQ ID NO: 57979 - RNA, 32 nt, Homo Sapiens
aaggcgcauccagguaccacaggacagccugg

SEQ ID NO: 57980 - RNA, 32 nt, Homo Sapiens
augauagcuguuucauuguuuguuuuugucaa

SEQ ID NO: 57981 - RNA, 32 nt, Homo Sapiens
uugguaugaguggaauggaauaaaauacaugg

SEQ ID NO: 57982 - RNA, 32 nt, Homo Sapiens
ggggagaaccaucaauacgaauacgagguccg

SEQ ID NO: 57983 - RNA, 32 nt, Homo Sapiens
gcauggccccgugaggguuuugaaagagaaaa

SEQ ID NO: 57984 - RNA, 32 nt, Homo Sapiens
uaacaaaauacuuuuuugcaugauaaaaaauu

SEQ ID NO: 57985 - RNA, 32 nt, Homo Sapiens
ucaucaauauaaaauaugacuucuucacauac

SEQ ID NO: 57986 - RNA, 32 nt, Homo Sapiens
uugccuuucuaagggagggaccgcgcaggcuc

SEQ ID NO: 57987 - RNA, 32 nt, Homo Sapiens
cuguggacuccacugcgccugggaucucgcca

SEQ ID NO: 57988 - RNA, 32 nt, Homo Sapiens
guccucaaauggaaacaagccacuuagccagu

SEQ ID NO: 57989 - RNA, 32 nt, Homo Sapiens
gggccgcgucgcagcccuccgugcuccccccu

SEQ ID NO: 57990 - RNA, 32 nt, Homo Sapiens
aauuaauuuugcuggcuucucucucagcgguu

SEQ ID NO: 57991 - RNA, 32 nt, Homo Sapiens
cggaagcuccagcuaacuguaggaucuuccac

SEQ ID NO: 57992 - RNA, 32 nt, Homo Sapiens
cguuuuaaauguggaucuuuucaacuuacgau

SEQ ID NO: 57993 - RNA, 32 nt, Homo Sapiens
ccgacaaugcccugcuggccugucucccuagg

SEQ ID NO: 57994 - RNA, 32 nt, Homo Sapiens
aggagccaaccuggucuucccgagggucagug

SEQ ID NO: 57995 - RNA, 32 nt, Homo Sapiens
ugagcugccaaugccagcccugucccaucugc

SEQ ID NO: 57996 - RNA, 32 nt, Homo Sapiens
ggcauaggagucaugccaagcauagcccucau

SEQ ID NO: 57997 - RNA, 32 nt, Homo Sapiens
aggccuucagacuuggacugugucacacugcc

SEQ ID NO: 57998 - RNA, 32 nt, Homo Sapiens
ucugaagacauuaaacaggcaguuuguaggaa

SEQ ID NO: 57999 - RNA, 32 nt, Homo Sapiens
ccagcagucccuccaggcuacauccaggagua

SEQ ID NO: 58000 - RNA, 32 nt, Homo Sapiens
uuagccaaugaauuuaaauauucaguauaacu

SEQ ID NO: 58001 - RNA, 32 nt, Homo Sapiens
aaauauuuauuucuuucuuuuacggggaugug

SEQ ID NO: 58002 - RNA, 32 nt, Homo Sapiens
uccaaucaucgucauugggaucauugcauuga

SEQ ID NO: 58003 - RNA, 32 nt, Homo Sapiens
cggcgggcacagcagcucaggcggcggcccgg

SEQ ID NO: 58004 - RNA, 32 nt, Homo Sapiens
gugugugauuucugaggccauaucuuuuacuc

SEQ ID NO: 58005 - RNA, 32 nt, Homo Sapiens
cuccacagccgccgcgcgacaguggagccaag

SEQ ID NO: 58006 - RNA, 32 nt, Homo Sapiens
uuuaucuaugaguaaauguuaaguaguuguuu

SEQ ID NO: 58007 - RNA, 32 nt, Homo Sapiens
ugggcuuccucuaucagcuuuuaacgccugga

SEQ ID NO: 58008 - RNA, 32 nt, Homo Sapiens
ccuccucccuccccaccugccgucgccgcugc

SEQ ID NO: 58009 - RNA, 32 nt, Homo Sapiens
uugagaaauccuaggaagcaaaacagaccaca

SEQ ID NO: 58010 - RNA, 32 nt, Homo Sapiens
agcgaauuuauugcaggaauccacaaugacuu

SEQ ID NO: 58011 - RNA, 32 nt, Homo Sapiens
aacagggacauucccgccacucggggacagau

SEQ ID NO: 58012 - RNA, 32 nt, Homo Sapiens
uggggcccauucugcaugcccuccccacuucc

SEQ ID NO: 58013 - RNA, 32 nt, Homo Sapiens
aggauuuucuucauucuguguauuuuccgguu

SEQ ID NO: 58014 - RNA, 32 nt, Homo Sapiens
gagaauguuguaauaaguaaaugccuuaagag

SEQ ID NO: 58015 - RNA, 32 nt, Homo Sapiens
uccggagauuuucaggacuuggugcauuucag

SEQ ID NO: 58016 - RNA, 28 nt, Homo Sapiens
gaaauggagaaccugaagucuggagugu

SEQ ID NO: 58017 - RNA, 32 nt, Homo Sapiens
uuuuccagcgagggaagaaaagaguaauuuuu

SEQ ID NO: 58018 - RNA, 32 nt, Homo Sapiens
aucucuggucuuaucagccaugcuaaaucacu

SEQ ID NO: 58019 - RNA, 32 nt, Homo Sapiens
cauaggagcggauuucccccuugcuguucuca

SEQ ID NO: 58020 - RNA, 32 nt, Homo Sapiens
cugacuguggcccuuccuugccuuccaggucc

SEQ ID NO: 58021 - RNA, 32 nt, Homo Sapiens
gaagccuccacacagccagcuccggagucugu

SEQ ID NO: 58022 - RNA, 32 nt, Homo Sapiens
uucgcuccucuggcagaaccucggcucucagg

SEQ ID NO: 58023 - RNA, 32 nt, Homo Sapiens
gggaagcaguugcugugguaccugcgcugccc

SEQ ID NO: 58024 - RNA, 32 nt, Homo Sapiens
aggagcugggugagcaauuaugcuguuacuau

SEQ ID NO: 58025 - RNA, 32 nt, Homo Sapiens
gauuaauaaaauguuuccauggaauauuccuu

SEQ ID NO: 58026 - RNA, 32 nt, Homo Sapiens
gcuguugauaaggaugaugucgaugacuacua

SEQ ID NO: 58027 - RNA, 32 nt, Homo Sapiens
cgcgugccggcgggaggagccacgcgugagca

SEQ ID NO: 58028 - RNA, 32 nt, Homo Sapiens
uuaccuguacaccacaccccugugacacacaa

SEQ ID NO: 58029 - RNA, 32 nt, Homo Sapiens
ucuuagacuaaguaacccaguacaauaguugu

SEQ ID NO: 58030 - RNA, 32 nt, Homo Sapiens
uagugcuaugugugagauauguguguguuugg

SEQ ID NO: 58031 - RNA, 32 nt, Homo Sapiens
ccuuauacugaauaacuacugaaucccuuuac

SEQ ID NO: 58032 - RNA, 32 nt, Homo Sapiens
gcaugcacugcacuucuucguuuucuugcucc

SEQ ID NO: 58033 - RNA, 32 nt, Homo Sapiens
caaaauguaaagguaaugagugagauuacaaa

SEQ ID NO: 58034 - RNA, 32 nt, Homo Sapiens
ccuuuccgcuccuuugccagcaccgagcucuu

SEQ ID NO: 58035 - RNA, 32 nt, Homo Sapiens
cuuccugauuugcccuaggagcaggacaaaua

SEQ ID NO: 58036 - RNA, 32 nt, Homo Sapiens
gggaagaagaagcaccagccacaggggcaggu

SEQ ID NO: 58037 - RNA, 32 nt, Homo Sapiens
gggagcaggaggagagggaaguaguggcagca

SEQ ID NO: 58038 - RNA, 32 nt, Homo Sapiens
gcuccacccagcugccucugugcccuggccuc

SEQ ID NO: 58039 - RNA, 32 nt, Homo Sapiens
ggggcagaggcugaaccgccccugccugccgc

SEQ ID NO: 58040 - RNA, 32 nt, Homo Sapiens
ugcuggagaaacaaaauaaugauggaacacua

SEQ ID NO: 58041 - RNA, 32 nt, Homo Sapiens
cccaccacccucgaguuccuggagaaccaugg

SEQ ID NO: 58042 - RNA, 32 nt, Homo Sapiens
ccuccuccccugguccuccccccacgaccuuc

SEQ ID NO: 58043 - RNA, 30 nt, Homo Sapiens
ggccaugucuguguacgcagggggccgggg

SEQ ID NO: 58044 - RNA, 32 nt, Homo Sapiens
cauuauugcuaaggaaauguguuccucaaaug

SEQ ID NO: 58045 - RNA, 32 nt, Homo Sapiens
aacuuggaaaggaaacaaagagugcuuuuggg

SEQ ID NO: 58046 - RNA, 32 nt, Homo Sapiens
gcauuagacgggucccuggcugaccugauaaa

SEQ ID NO: 58047 - RNA, 32 nt, Homo Sapiens
auaaauacauauauaccuuuguaaccuuuaua

SEQ ID NO: 58048 - RNA, 30 nt, Homo Sapiens
agagcgagcgcgcagcacgaagcucgagcc

SEQ ID NO: 58049 - RNA, 32 nt, Homo Sapiens
cggagcgaugaaaggcauauuuucuuuguuuc

SEQ ID NO: 58050 - RNA, 32 nt, Homo Sapiens
ugccuacucauguguuacuaaauaucagagag

SEQ ID NO: 58051 - RNA, 32 nt, Homo Sapiens
uguuucccgcaguggggauugcagcuguugga

SEQ ID NO: 58052 - RNA, 32 nt, Homo Sapiens
aagaggcaggauggcuuggggcugccugggcc

SEQ ID NO: 58053 - RNA, 32 nt, Homo Sapiens
aucugaggcucaugggcugcaagccccugcuc

SEQ ID NO: 58054 - RNA, 32 nt, Homo Sapiens
acaauucagaaucuucugaaccaucuauguaa

SEQ ID NO: 58055 - RNA, 32 nt, Homo Sapiens
cagaaccugucaugggcuggggcucagauuuu

SEQ ID NO: 58056 - RNA, 32 nt, Homo Sapiens
cuguacauauuuuuuucuuucuucagaguacu

SEQ ID NO: 58057 - RNA, 29 nt, Homo Sapiens
auguguguauguaugggacagggucucac

SEQ ID NO: 58058 - RNA, 32 nt, Homo Sapiens
aaauacuugagccuguccgugauaaagcuaua

SEQ ID NO: 58059 - RNA, 32 nt, Homo Sapiens
caaguagacccagcacagcaaaaauuugucug

SEQ ID NO: 58060 - RNA, 30 nt, Homo Sapiens
ggaaaccuggacugcgugggcucgggcgcc

SEQ ID NO: 58061 - RNA, 32 nt, Homo Sapiens
cggcucggccguagcggagcugcgaguuacag

SEQ ID NO: 58062 - RNA, 32 nt, Homo Sapiens
uguguaguucaaggccaccaccacugaagagg

SEQ ID NO: 58063 - RNA, 32 nt, Homo Sapiens
aagcucagcccuugggacaagagcagccacuc

SEQ ID NO: 58064 - RNA, 32 nt, Homo Sapiens
ccugcgccauggagcccggccgcggcggcaca

SEQ ID NO: 58065 - RNA, 32 nt, Homo Sapiens
agaagagagaaccugaagaucugaggcaagcu

SEQ ID NO: 58066 - RNA, 32 nt, Homo Sapiens
accccguaacaagggcacacauccagcacugu

SEQ ID NO: 58067 - RNA, 32 nt, Homo Sapiens
cccagcccucugaaccagcagucuuugccugu

SEQ ID NO: 58068 - RNA, 32 nt, Homo Sapiens
aaugcggguguuggccuuguuccuucacccuc

SEQ ID NO: 58069 - RNA, 30 nt, Homo Sapiens
ccaaccacucggggcccccaucuugggggu

SEQ ID NO: 58070 - RNA, 32 nt, Homo Sapiens
uccgccuggcuuacgaacacacacauguguua

SEQ ID NO: 58071 - RNA, 32 nt, Homo Sapiens
uaagucuccgccucugggcucguuaagguuug

SEQ ID NO: 58072 - RNA, 32 nt, Homo Sapiens
cagugucugaccaaggucaaggggcaggugca

SEQ ID NO: 58073 - RNA, 32 nt, Homo Sapiens
cgcacaggggugugggcggaggcggccucgcc

SEQ ID NO: 58074 - RNA, 32 nt, Homo Sapiens
ggcacuucccgucuccucccuugcuccccuuc

SEQ ID NO: 58075 - RNA, 32 nt, Homo Sapiens
cccugagcccccugugucugaggagaccucag

SEQ ID NO: 58076 - RNA, 32 nt, Homo Sapiens
ucucccccgcuggccaggggcuccacacagac

SEQ ID NO: 58077 - RNA, 32 nt, Homo Sapiens
uuacaaggaaaacauauugauuuuaucccuuu

SEQ ID NO: 58078 - RNA, 32 nt, Homo Sapiens
ugcgacccucucggcccggcucggcgccucgg

SEQ ID NO: 58079 - RNA, 32 nt, Homo Sapiens
gggcagaccuguccauccuucucugugggucc

SEQ ID NO: 58080 - RNA, 32 nt, Homo Sapiens
acacauagaaguuauguuuauacuguugucua

SEQ ID NO: 58081 - RNA, 32 nt, Homo Sapiens
ucuuucauaacuguaauuuucuuagggaucau

SEQ ID NO: 58082 - RNA, 32 nt, Homo Sapiens
gaggaccaggagacggcuguguacgggccgcc

SEQ ID NO: 58083 - RNA, 32 nt, Homo Sapiens
cuagagaagguuucccuuuuucugggacauug

SEQ ID NO: 58084 - RNA, 32 nt, Homo Sapiens
cgcgcugccggccgcagagccgggccagagcc

SEQ ID NO: 58085 - RNA, 32 nt, Homo Sapiens
uuaaaauaaucacacccauuuauuuuguguuu

SEQ ID NO: 58086 - RNA, 32 nt, Homo Sapiens
gaaauuugcauacagcuuccacuuccugcuuc

SEQ ID NO: 58087 - RNA, 32 nt, Homo Sapiens
auccugaaaaggacaagaggagugucagaagu

SEQ ID NO: 58088 - RNA, 32 nt, Homo Sapiens
guaugcauugagacaugcuaccuaggacuuaa

SEQ ID NO: 58089 - RNA, 32 nt, Homo Sapiens
aaaacuuggggaggaagaggccugcugugggg

SEQ ID NO: 58090 - RNA, 32 nt, Homo Sapiens
aaaccugaaagcagcccaguuaugacaaugaa

SEQ ID NO: 58091 - RNA, 32 nt, Homo Sapiens
aaaauccgggucuauuugauuguauaugguug

SEQ ID NO: 58092 - RNA, 32 nt, Homo Sapiens
gaguacagggaagugaggaagaggggguggcc

SEQ ID NO: 58093 - RNA, 32 nt, Homo Sapiens
ugcagaaacaguacuuagguaauuguagggcg

SEQ ID NO: 58094 - RNA, 32 nt, Homo Sapiens
gcccugcgggcucagaacgauguggcugcccg

SEQ ID NO: 58095 - RNA, 32 nt, Homo Sapiens
ggugggugggacaggaguguguucaagugggu

SEQ ID NO: 58096 - RNA, 32 nt, Homo Sapiens
cggagugcagaaagccaggaccaagagacagg

SEQ ID NO: 58097 - RNA, 32 nt, Homo Sapiens
uugccugccagccuucagcaucaggaaaggcc

SEQ ID NO: 58098 - RNA, 32 nt, Homo Sapiens
cuuuauuaaaacaguguauuuggaaaauguua

SEQ ID NO: 58099 - RNA, 32 nt, Homo Sapiens
agggacccggcccugcccugccgcccgcugac

SEQ ID NO: 58100 - RNA, 32 nt, Homo Sapiens
cugggggucagggguuccuguccccaaacuuc

SEQ ID NO: 58101 - RNA, 32 nt, Homo Sapiens
gaccccacagaaauagaaacagccaucagaaa

SEQ ID NO: 58102 - RNA, 32 nt, Homo Sapiens
gacuaaaaaucaggaugaauccagaaaauuaa

SEQ ID NO: 58103 - RNA, 32 nt, Homo Sapiens
gccuggacacacacuuccagacacacgugcac

SEQ ID NO: 58104 - RNA, 32 nt, Homo Sapiens
uguccgcccgugucgcgccggggcaccaagga

SEQ ID NO: 58105 - RNA, 32 nt, Homo Sapiens
uucaccuuucauaaguuguuaucuagucaaug

SEQ ID NO: 58106 - RNA, 32 nt, Homo Sapiens
gcggaggaggucgggcgcucggggcccgggag

SEQ ID NO: 58107 - RNA, 32 nt, Homo Sapiens
cggcccagaggccccagggcgucgcagcgccg

SEQ ID NO: 58108 - RNA, 30 nt, Homo Sapiens
uggguggggagaagaggcagauucaauuuu

SEQ ID NO: 58109 - RNA, 32 nt, Homo Sapiens
agacagggacacugccaucgauaaugucagcc

SEQ ID NO: 58110 - RNA, 32 nt, Homo Sapiens
ucaggagaaaacuggaggaaaaugggcacaaa

SEQ ID NO: 58111 - RNA, 32 nt, Homo Sapiens
uguauuguauauauuucucuacuuugguucua

SEQ ID NO: 58112 - RNA, 32 nt, Homo Sapiens
agggcugcugcggccauucccggagcccggcg

SEQ ID NO: 58113 - RNA, 32 nt, Homo Sapiens
ucuuuugugggaaugggaaaggaaggagacag

SEQ ID NO: 58114 - RNA, 32 nt, Homo Sapiens
gggauucagggccagcagguuucacucagcuc

SEQ ID NO: 58115 - RNA, 32 nt, Homo Sapiens
agccugacuaggaauauaaaacacgaaagaca

SEQ ID NO: 58116 - RNA, 32 nt, Homo Sapiens
gccucccaccgccgcacuuucacucuccguca

SEQ ID NO: 58117 - RNA, 32 nt, Homo Sapiens
caggagaugcuucagaggauucggacgcaggg

SEQ ID NO: 58118 - RNA, 32 nt, Homo Sapiens
aauaaaaaguaaaaacaaaaaaacagacccac

SEQ ID NO: 58119 - RNA, 32 nt, Homo Sapiens
uccucccaggaagacugcccaggccuuuguua

SEQ ID NO: 58120 - RNA, 32 nt, Homo Sapiens
auccucagcaagaaacaaaaccaaacuggacu

SEQ ID NO: 58121 - RNA, 32 nt, Homo Sapiens
uugcccugcaucacgcgcccugucgugcugaa

SEQ ID NO: 58122 - RNA, 32 nt, Homo Sapiens
cccauuuuccacggucuuuucugcaagugggc

SEQ ID NO: 58123 - RNA, 32 nt, Homo Sapiens
gaauggcugagcuaacaauacacauucuggaa

SEQ ID NO: 58124 - RNA, 32 nt, Homo Sapiens
ucagaaacucacccuaaaucugaacgggugcc

SEQ ID NO: 58125 - RNA, 32 nt, Homo Sapiens
caaaaugaaaauauaaaauuaaucauuucuca

SEQ ID NO: 58126 - RNA, 32 nt, Homo Sapiens
ccgcccggccuggcccggacgcugccaucucu

SEQ ID NO: 58127 - RNA, 32 nt, Homo Sapiens
cuggcugcccaccugcccugggagucuugcug

SEQ ID NO: 58128 - RNA, 32 nt, Homo Sapiens
uccugcuagcagaugcuccuccccuggaccau

SEQ ID NO: 58129 - RNA, 32 nt, Homo Sapiens
cauggggcaggggcccaguucucagcagcaga

SEQ ID NO: 58130 - RNA, 32 nt, Homo Sapiens
agcaucucgucacgccagcacucgccucccua

SEQ ID NO: 58131 - RNA, 32 nt, Homo Sapiens
gcuggcuuucuuguuaaaguuauuuaaguuuu

SEQ ID NO: 58132 - RNA, 32 nt, Homo Sapiens
cuugacucucuuaagaauaacagugaaauaua

SEQ ID NO: 58133 - RNA, 32 nt, Homo Sapiens
uucucaaaauaacugcacaaagacuugcccac

SEQ ID NO: 58134 - RNA, 32 nt, Homo Sapiens
gcccauguucuucacucuuucauccagcaagu

SEQ ID NO: 58135 - RNA, 32 nt, Homo Sapiens
aaagggcuugacgcgccggaaaguccccucgc

SEQ ID NO: 58136 - RNA, 32 nt, Homo Sapiens
cuuucuucuccucccuauuucgcagauauccc

SEQ ID NO: 58137 - RNA, 32 nt, Homo Sapiens
agaaaccauaaauaauggauauaaaacuuaaa

SEQ ID NO: 58138 - RNA, 31 nt, Homo Sapiens
cugcccuaauaaaaaggaguauacaaacauu

SEQ ID NO: 58139 - RNA, 32 nt, Homo Sapiens
gcugugugguauauaaaccaggauuaguccca

SEQ ID NO: 58140 - RNA, 32 nt, Homo Sapiens
ugaggucagaagaucuagaacagccuggucaa

SEQ ID NO: 58141 - RNA, 32 nt, Homo Sapiens
cguuggccgggcccgggggaggaggggaaucu

SEQ ID NO: 58142 - RNA, 32 nt, Homo Sapiens
agacccccacuuugaguuuuauuuauuuaaau

SEQ ID NO: 58143 - RNA, 32 nt, Homo Sapiens
uguaacaaacuccuaccaacccugaccaauaa

SEQ ID NO: 58144 - RNA, 32 nt, Homo Sapiens
acugugggucugacccaggagaacggaaagca

SEQ ID NO: 58145 - RNA, 32 nt, Homo Sapiens
guaagagaauacuauggacaaguuccugacaa

SEQ ID NO: 58146 - RNA, 32 nt, Homo Sapiens
gaagcuccuaaaacagagacugaaaggccacc

SEQ ID NO: 58147 - RNA, 32 nt, Homo Sapiens
gcacagcccccaccugcuggugacggggccag

SEQ ID NO: 58148 - RNA, 32 nt, Homo Sapiens
ucugugacucauggaaaugauaugagauucga

SEQ ID NO: 58149 - RNA, 32 nt, Homo Sapiens
ugccuggccagaagcuuuuuuaaaaauaauga

SEQ ID NO: 58150 - RNA, 32 nt, Homo Sapiens
cuggauucacauuaaaacaaugggcucucguu

SEQ ID NO: 58151 - RNA, 32 nt, Homo Sapiens
aaaugaagguggggcggggcagugaggggugg

SEQ ID NO: 58152 - RNA, 25 nt, Homo Sapiens
auggcgcuggugcgcgcacucgucu

SEQ ID NO: 58153 - RNA, 32 nt, Homo Sapiens
ucuguuuucuacaggguuuaagucucaggagg

SEQ ID NO: 58154 - RNA, 32 nt, Homo Sapiens
ucuccccagugccugccacucucugggacucu

SEQ ID NO: 58155 - RNA, 32 nt, Homo Sapiens
agugacuggugccagugucauccgggccuaca

SEQ ID NO: 58156 - RNA, 32 nt, Homo Sapiens
gcgggcugggaaggucuccuccccucaccaca

SEQ ID NO: 58157 - RNA, 32 nt, Homo Sapiens
aaccacaccacacacacacacacacacacaca

SEQ ID NO: 58158 - RNA, 32 nt, Homo Sapiens
ugaaugugcuucucuuguuuuuuguuuauuag

SEQ ID NO: 58159 - RNA, 32 nt, Homo Sapiens
ccggucugagagaggggaggccgagcaggcug

SEQ ID NO: 58160 - RNA, 32 nt, Homo Sapiens
uaauguccuuugagggaucauugucuuacaca

SEQ ID NO: 58161 - RNA, 32 nt, Homo Sapiens
auacaauguacaggaaucucuaucaaguaaac

SEQ ID NO: 58162 - RNA, 32 nt, Homo Sapiens
aauguuuuuuucuguccuggcgcgguggcuca

SEQ ID NO: 58163 - RNA, 32 nt, Homo Sapiens
uucuuacuuugaugaagugcauuuacuuugac

SEQ ID NO: 58164 - RNA, 32 nt, Homo Sapiens
gacuaugauggccacaucaguuuaaguguuaa

SEQ ID NO: 58165 - RNA, 32 nt, Homo Sapiens
uggcaauagaaagaagaaaacauugacuuugc

SEQ ID NO: 58166 - RNA, 32 nt, Homo Sapiens
cgggccgcagggccagccuguuucucuaacaa

SEQ ID NO: 58167 - RNA, 32 nt, Homo Sapiens
gguugcuuuccugagucagcuacuucacacuu

SEQ ID NO: 58168 - RNA, 32 nt, Homo Sapiens
aggagggagagcggcgggaggggccgcggugc

SEQ ID NO: 58169 - RNA, 32 nt, Homo Sapiens
gaugaauauggacuuugacgucagauggagcu

SEQ ID NO: 58170 - RNA, 32 nt, Homo Sapiens
uccuuccccccgccgccccuccccggacuccc

SEQ ID NO: 58171 - RNA, 32 nt, Homo Sapiens
aagggccggggagagggugcgggugcaggcgg

SEQ ID NO: 58172 - RNA, 32 nt, Homo Sapiens
aguguuugauucaugccauuugauaaacuucu

SEQ ID NO: 58173 - RNA, 32 nt, Homo Sapiens
gggguuugaggacaauguuagaugcauugugu

SEQ ID NO: 58174 - RNA, 32 nt, Homo Sapiens
uaaauuuucuugacauuuccaagcuuauuaug

SEQ ID NO: 58175 - RNA, 32 nt, Homo Sapiens
gggacgugcccauuuuuacuguaaauuaugau

SEQ ID NO: 58176 - RNA, 32 nt, Homo Sapiens
ccagaacuguguggggccuugcuugagggccu

SEQ ID NO: 58177 - RNA, 32 nt, Homo Sapiens
ggugcucgguauuuuuaauuauggacagccug

SEQ ID NO: 58178 - RNA, 32 nt, Homo Sapiens
uucuagauuuaaaaugagaucuuugaaccagg

SEQ ID NO: 58179 - RNA, 32 nt, Homo Sapiens
auauauaaaaauaccaaaaagaggcugggcgu

SEQ ID NO: 58180 - RNA, 31 nt, Homo Sapiens
gacgccaugagcgcgcugcugcggcugcugc

SEQ ID NO: 58181 - RNA, 32 nt, Homo Sapiens
ucucuaaaaguacaaaacauucauaagagaaa

SEQ ID NO: 58182 - RNA, 32 nt, Homo Sapiens
cgguggccgucucauggggcagaaaaagaucu

SEQ ID NO: 58183 - RNA, 32 nt, Homo Sapiens
gaaguuccuggggcuccguguugcaguucagg

SEQ ID NO: 58184 - RNA, 32 nt, Homo Sapiens
gacucaccaagagaaacaaaaggaagccugca

SEQ ID NO: 58185 - RNA, 32 nt, Homo Sapiens
ccugaguuugggugggguggcaguuggcacag

SEQ ID NO: 58186 - RNA, 32 nt, Homo Sapiens
cggggcauccucauccuguaccuauagaguuc

SEQ ID NO: 58187 - RNA, 32 nt, Homo Sapiens
agccauaccugggcucaaaaaccuccaagaga

SEQ ID NO: 58188 - RNA, 32 nt, Homo Sapiens
ggaaggacccccacccucaauuuuuggauagg

SEQ ID NO: 58189 - RNA, 29 nt, Homo Sapiens
aauauucauuaaggauauuuucuaaaacc

SEQ ID NO: 58190 - RNA, 32 nt, Homo Sapiens
ggagaugcuuuucauuuuuguuuggacugggu

SEQ ID NO: 58191 - RNA, 32 nt, Homo Sapiens
ucaucgacuucucggcggcccacgcagcccgu

SEQ ID NO: 58192 - RNA, 32 nt, Homo Sapiens
ucccugcggcccugcccucccgcccagcccgg

SEQ ID NO: 58193 - RNA, 32 nt, Homo Sapiens
aacgcaaagcuaaaugcauauuuuuaaguauu

SEQ ID NO: 58194 - RNA, 32 nt, Homo Sapiens
uccuuucagagguuggacagugccaugacacu

SEQ ID NO: 58195 - RNA, 32 nt, Homo Sapiens
aaggguuagauuuuuaugcugcugcugauggg

SEQ ID NO: 58196 - RNA, 32 nt, Homo Sapiens
aucuauuguuccauuccaaucauauccuucuc

SEQ ID NO: 58197 - RNA, 32 nt, Homo Sapiens
augauuuuaauaauucauuucuuaaaacacug

SEQ ID NO: 58198 - RNA, 32 nt, Homo Sapiens
augggggaagcaaauguguguauuuuaaguga

SEQ ID NO: 58199 - RNA, 32 nt, Homo Sapiens
cucugggagagccccaugagggcaggagagug

SEQ ID NO: 58200 - RNA, 32 nt, Homo Sapiens
caucucucagaauuguuggcugagaauuaacc

SEQ ID NO: 58201 - RNA, 32 nt, Homo Sapiens
ugacauacagaaaaaggagcaguuuuaguuuu

SEQ ID NO: 58202 - RNA, 31 nt, Homo Sapiens
cuguggagauaagcccugccccucguuccca

SEQ ID NO: 58203 - RNA, 32 nt, Homo Sapiens
ccgagcgggcccuguggaaaugagauguacau

SEQ ID NO: 58204 - RNA, 32 nt, Homo Sapiens
cuacauauuuuuccuuccaaugcagaggaagg

SEQ ID NO: 58205 - RNA, 32 nt, Homo Sapiens
cacuuaugggccgcguugugaaucacuugcca

SEQ ID NO: 58206 - RNA, 32 nt, Homo Sapiens
guauauugcaauauuuugauaauuauguauug

SEQ ID NO: 58207 - RNA, 30 nt, Homo Sapiens
cacccaggaggugggaggugaauuuuaugu

SEQ ID NO: 58208 - RNA, 32 nt, Homo Sapiens
uuaaugagcugugcaucccccacaaaaacaug

SEQ ID NO: 58209 - RNA, 32 nt, Homo Sapiens
ccugggguugcuuccuggacccugaacaaguu

SEQ ID NO: 58210 - RNA, 32 nt, Homo Sapiens
ggccagggccgcgguuagucccugcuggccac

SEQ ID NO: 58211 - RNA, 32 nt, Homo Sapiens
aaaaauuuuuacuagauuuugcacuaacucau

SEQ ID NO: 58212 - RNA, 32 nt, Homo Sapiens
uacccgggccaacggcggagggggcggggaag

SEQ ID NO: 58213 - RNA, 32 nt, Homo Sapiens
cggucugggggcgcgccgccucccggucccca

SEQ ID NO: 58214 - RNA, 32 nt, Homo Sapiens
gagccccgccccaccccguccugauuagaggu

SEQ ID NO: 58215 - RNA, 32 nt, Homo Sapiens
uggcuuaauauuuuaauucuuagaaugugucu

SEQ ID NO: 58216 - RNA, 32 nt, Homo Sapiens
aaccuagcgcgccguugggacugcgguggcca

SEQ ID NO: 58217 - RNA, 32 nt, Homo Sapiens
cuagccccaucccacaccuguuucaaauccuu

SEQ ID NO: 58218 - RNA, 32 nt, Homo Sapiens
uuuccuuaucauaaguuauguaugauaaaauu

SEQ ID NO: 58219 - RNA, 32 nt, Homo Sapiens
cccccagucggccgcuucagggcccccuagac

SEQ ID NO: 58220 - RNA, 32 nt, Homo Sapiens
cccagcugucuccucuuuucuauuccuacugu

SEQ ID NO: 58221 - RNA, 32 nt, Homo Sapiens
cacuuaaaaaacuugaauaaaauauugaaacc

SEQ ID NO: 58222 - RNA, 32 nt, Homo Sapiens
ugcucccuaaaauaugcauaaaguagaaauuc

SEQ ID NO: 58223 - RNA, 32 nt, Homo Sapiens
uacagggcgagggauguggcaggugagggggc

SEQ ID NO: 58224 - RNA, 32 nt, Homo Sapiens
ugucugcggcgcgggcggcccugcgggucuac

SEQ ID NO: 58225 - RNA, 32 nt, Homo Sapiens
agucacagcgaauccccgccccgccccgggaa

SEQ ID NO: 58226 - RNA, 32 nt, Homo Sapiens
agccuggccaacacgaugaaaccccgucucua

SEQ ID NO: 58227 - RNA, 32 nt, Homo Sapiens
gguauaauuuuguaggucauaugauugaagaa

SEQ ID NO: 58228 - RNA, 32 nt, Homo Sapiens
ggaggucucugcccccuuccccggcccugggc

SEQ ID NO: 58229 - RNA, 32 nt, Homo Sapiens
gcucaacaguuuucucgggggaguucagugac

SEQ ID NO: 58230 - RNA, 32 nt, Homo Sapiens
agucacacgaugucaugguucacuaggcagca

SEQ ID NO: 58231 - RNA, 32 nt, Homo Sapiens
agaggcugagguuguggaacacacugaauaaa

SEQ ID NO: 58232 - RNA, 32 nt, Homo Sapiens
auugucaucccagcguacaccuuuaauguuuu

SEQ ID NO: 58233 - RNA, 32 nt, Homo Sapiens
acuguaggcuccugugcauacugucgucuucu

SEQ ID NO: 58234 - RNA, 32 nt, Homo Sapiens
guuuccaguucauuuacauuaagggccugggg

SEQ ID NO: 58235 - RNA, 32 nt, Homo Sapiens
aggguugugaaaaucaaaugugauaauuugug

SEQ ID NO: 58236 - RNA, 32 nt, Homo Sapiens
uuucuucaauaaaguuaaauaaaccaaugagu

SEQ ID NO: 58237 - RNA, 32 nt, Homo Sapiens
uccucuugauuagaaauaauuaaaugaauuau

SEQ ID NO: 58238 - RNA, 32 nt, Homo Sapiens
caggccgcgaaacaagcccgcgugacuggcgg

SEQ ID NO: 58239 - RNA, 32 nt, Homo Sapiens
gaagauaugaauuguuuccugaagauaauacu

SEQ ID NO: 58240 - RNA, 32 nt, Homo Sapiens
ugcccucccuuuuauuuuuuuaacuaaaagac

SEQ ID NO: 58241 - RNA, 32 nt, Homo Sapiens
gaaaaaucuuaguacauucaguuuucuugucc

SEQ ID NO: 58242 - RNA, 32 nt, Homo Sapiens
gcugggggcaugggaacugaaaaagacaggag

SEQ ID NO: 58243 - RNA, 32 nt, Homo Sapiens
ccuaugugggggcuggggagggggcuguuggc

SEQ ID NO: 58244 - RNA, 32 nt, Homo Sapiens
ucuuuuaaauguuauaaaugcaguauguuugu

SEQ ID NO: 58245 - RNA, 32 nt, Homo Sapiens
cgcauccauccggcugccagggguaagguguu

SEQ ID NO: 58246 - RNA, 32 nt, Homo Sapiens
uucuuccucacagcccucagaaggauccagcc

SEQ ID NO: 58247 - RNA, 32 nt, Homo Sapiens
gagaggccccgagaugccgagcaagaagaaga

SEQ ID NO: 58248 - RNA, 32 nt, Homo Sapiens
caagccugcacgguccucuucuccucuccgca

SEQ ID NO: 58249 - RNA, 32 nt, Homo Sapiens
guuugaauaacugaagaaauguugacaauguu

SEQ ID NO: 58250 - RNA, 31 nt, Homo Sapiens
uuucugccccaacgccugcccugaguuaguu

SEQ ID NO: 58251 - RNA, 32 nt, Homo Sapiens
uccuuuugucuccuggugauuaggccaaaguc

SEQ ID NO: 58252 - RNA, 32 nt, Homo Sapiens
ucccaguguacaaaaccugcuucucuucucaa

SEQ ID NO: 58253 - RNA, 32 nt, Homo Sapiens
aagaaagugcuaaagaacuaaacuuacuaaac

SEQ ID NO: 58254 - RNA, 32 nt, Homo Sapiens
cuccccuugccagcugcugagccgcagagaag

SEQ ID NO: 58255 - RNA, 32 nt, Homo Sapiens
uagacauuugguuaacuuggaucuuuuucaua

SEQ ID NO: 58256 - RNA, 32 nt, Homo Sapiens
ucagguguuuacaggaaagaucucagaggcua

SEQ ID NO: 58257 - RNA, 32 nt, Homo Sapiens
ugcgcucgagaagcgauggcggcggccugaac

SEQ ID NO: 58258 - RNA, 32 nt, Homo Sapiens
caacucccuggcaucugugaugaccuaugguu

SEQ ID NO: 58259 - RNA, 32 nt, Homo Sapiens
uuucuacucugcagacagaguuccuuggagac

SEQ ID NO: 58260 - RNA, 32 nt, Homo Sapiens
agguacuugcaacagcgguauaaggaagcggc

SEQ ID NO: 58261 - RNA, 32 nt, Homo Sapiens
uuuuuuggacuagcuuuuuuuauuaaaauggc

SEQ ID NO: 58262 - RNA, 32 nt, Homo Sapiens
auacaaccaaaauacugaaucugauguacaua

SEQ ID NO: 58263 - RNA, 32 nt, Homo Sapiens
cuuccugugaauuuauaauaauuucaaaauaa

SEQ ID NO: 58264 - RNA, 32 nt, Homo Sapiens
cugcuguguaaugguuacacuaaccaaaagac

SEQ ID NO: 58265 - RNA, 32 nt, Homo Sapiens
ugugugcuggaaucgggggguggcucuccugc

SEQ ID NO: 58266 - RNA, 32 nt, Homo Sapiens
augcugagauuccacauaacacaugguuguca

SEQ ID NO: 58267 - RNA, 32 nt, Homo Sapiens
aacaggugauccacucuguaaaacagcaggua

SEQ ID NO: 58268 - RNA, 32 nt, Homo Sapiens
aacauguuuuugcugcagauaaucggccagag

SEQ ID NO: 58269 - RNA, 32 nt, Homo Sapiens
uuuggaugaccucagcuugaguuucuccauau

SEQ ID NO: 58270 - RNA, 32 nt, Homo Sapiens
aaaucaguuuguuuugguaccuuuaaauggug

SEQ ID NO: 58271 - RNA, 32 nt, Homo Sapiens
ccaaccucuguggucacccaugcaucuuccac

SEQ ID NO: 58272 - RNA, 32 nt, Homo Sapiens
gugacccaggccuugucagaucugagauucuu

SEQ ID NO: 58273 - RNA, 32 nt, Homo Sapiens
accccgggacggcuguggggccccacacugca

SEQ ID NO: 58274 - RNA, 32 nt, Homo Sapiens
caguggcgcaaucccggcucacugcaaccucc

SEQ ID NO: 58275 - RNA, 32 nt, Homo Sapiens
agcuucccucuccucuuuuuuauuuuugaaag

SEQ ID NO: 58276 - RNA, 32 nt, Homo Sapiens
cuccccugggaggacgucugugccuguguaug

SEQ ID NO: 58277 - RNA, 32 nt, Homo Sapiens
uguuaaacauauauucuguaaagugccauagu

SEQ ID NO: 58278 - RNA, 32 nt, Homo Sapiens
aggaagaauuaaaagagugggaauggaugaca

SEQ ID NO: 58279 - RNA, 32 nt, Homo Sapiens
aauggcaacaauuugagauguauuucaacuug

SEQ ID NO: 58280 - RNA, 32 nt, Homo Sapiens
agcacgaaucacugcacccagccuauggaaca

SEQ ID NO: 58281 - RNA, 32 nt, Homo Sapiens
uggcggcgcuggugcuggcguuggcccuggag

SEQ ID NO: 58282 - RNA, 32 nt, Homo Sapiens
cauuccggccccaccacucagagccuuccgaa

SEQ ID NO: 58283 - RNA, 32 nt, Homo Sapiens
gauaccuauaaguucacccccaccccacagcu

SEQ ID NO: 58284 - RNA, 32 nt, Homo Sapiens
acacacaccacacacgcacacacacacaccaa

SEQ ID NO: 58285 - RNA, 32 nt, Homo Sapiens
agauggguucucacuauauuguccaggcuaga

SEQ ID NO: 58286 - RNA, 30 nt, Homo Sapiens
ggaauauuggcuggcaugcaaccugcaaaa

SEQ ID NO: 58287 - RNA, 32 nt, Homo Sapiens
gcuugucacacucuauugcucuucugucccga

SEQ ID NO: 58288 - RNA, 32 nt, Homo Sapiens
aagcauuuagaagugcagugaacuugcuguca

SEQ ID NO: 58289 - RNA, 32 nt, Homo Sapiens
aaugaauccacagcucuacuccagguucuagc

SEQ ID NO: 58290 - RNA, 32 nt, Homo Sapiens
uaacuucauuggcuuggaugccuaaguguaug

SEQ ID NO: 58291 - RNA, 32 nt, Homo Sapiens
uucagccagaaagcagaguggcaucacaucuu

SEQ ID NO: 58292 - RNA, 32 nt, Homo Sapiens
gugcaagggcuuuguuucugccugccugaaag

SEQ ID NO: 58293 - RNA, 32 nt, Homo Sapiens
auucuucaaaagagccacaacuuccccagcuu

SEQ ID NO: 58294 - RNA, 32 nt, Homo Sapiens
caggagcucccucuaguggucaagguagcaaa

SEQ ID NO: 58295 - RNA, 32 nt, Homo Sapiens
gguccuggcugccuggaaggcugcuggccaug

SEQ ID NO: 58296 - RNA, 32 nt, Homo Sapiens
aggcugcggagccccaggagggggccaguguc

SEQ ID NO: 58297 - RNA, 32 nt, Homo Sapiens
agaucucuuccacagcauagccacucagaaga

SEQ ID NO: 58298 - RNA, 32 nt, Homo Sapiens
gacugugaccgagggagggagggcugccugau

SEQ ID NO: 58299 - RNA, 32 nt, Homo Sapiens
ccucccuguccaagaagugcuguugagaggcg

SEQ ID NO: 58300 - RNA, 32 nt, Homo Sapiens
ucaagaccggacuccuugggguuuggccuugg

SEQ ID NO: 58301 - RNA, 32 nt, Homo Sapiens
acguguaaaaucuuggguaccuuuagauucuu

SEQ ID NO: 58302 - RNA, 29 nt, Homo Sapiens
auagggguauagcuauauuuuuuguaauu

SEQ ID NO: 58303 - RNA, 32 nt, Homo Sapiens
auagacaaaaggaaacauuugccaaaagcggc

SEQ ID NO: 58304 - RNA, 28 nt, Homo Sapiens
caucagggacucgccaggauggcuguua

SEQ ID NO: 58305 - RNA, 32 nt, Homo Sapiens
aaaugguaauuguugcuaaucuucuuaugcaa

SEQ ID NO: 58306 - RNA, 32 nt, Homo Sapiens
guggccgcccgaggcccucccugccuggguuc

SEQ ID NO: 58307 - RNA, 32 nt, Homo Sapiens
agcacagcugcaggaagaagucaggguggaau

SEQ ID NO: 58308 - RNA, 32 nt, Homo Sapiens
ucauggcccgcggcgaacgcggggccagagcu

SEQ ID NO: 58309 - RNA, 32 nt, Homo Sapiens
uaccuuuaaaagauuauuuaagacaggaacca

SEQ ID NO: 58310 - RNA, 32 nt, Homo Sapiens
agcaaguaucaggccggagaaaacaggauaaa

SEQ ID NO: 58311 - RNA, 32 nt, Homo Sapiens
uaccgccucgauugccccacuccccccacccc

SEQ ID NO: 58312 - RNA, 32 nt, Homo Sapiens
guuuccccacuuaaaauaguccugcuuaaauu

SEQ ID NO: 58313 - RNA, 32 nt, Homo Sapiens
agcuccuggggguggggguggcgccugccugc

SEQ ID NO: 58314 - RNA, 32 nt, Homo Sapiens
aaggaaccuccgaagaggaagcaagaaagccg

SEQ ID NO: 58315 - RNA, 32 nt, Homo Sapiens
cucccuccaguacuucuguuugugcccuucac

SEQ ID NO: 58316 - RNA, 32 nt, Homo Sapiens
ccauaaugacggugacuugugucgugggggaa

SEQ ID NO: 58317 - RNA, 32 nt, Homo Sapiens
uacguucgaaacaaaguaauauggaaaauauu

SEQ ID NO: 58318 - RNA, 32 nt, Homo Sapiens
agcaggaggagcugcuggcccggcggaaggcu

SEQ ID NO: 58319 - RNA, 32 nt, Homo Sapiens
ccucgggugggaagacuaggaaucggaagcuu

SEQ ID NO: 58320 - RNA, 31 nt, Homo Sapiens
ucuggacuccuaccgaacucgggcaaguuau

SEQ ID NO: 58321 - RNA, 32 nt, Homo Sapiens
uccgcggcggccugguccgauggcuccucagc

SEQ ID NO: 58322 - RNA, 32 nt, Homo Sapiens
gauuauuaugagugggggacuggugacuuuau

SEQ ID NO: 58323 - RNA, 32 nt, Homo Sapiens
auaaauauauuucuuuccggggaucaaaagaa

SEQ ID NO: 58324 - RNA, 32 nt, Homo Sapiens
auacgugccggggccaggugugguggcucacg

SEQ ID NO: 58325 - RNA, 32 nt, Homo Sapiens
uugccgacucgcgcucucggcuucugcuccgg

SEQ ID NO: 58326 - RNA, 32 nt, Homo Sapiens
aagagucagaucugggauucaaacccagguca

SEQ ID NO: 58327 - RNA, 32 nt, Homo Sapiens
cagccauugacauuucuuucugcuuccacuau

SEQ ID NO: 58328 - RNA, 32 nt, Homo Sapiens
caggcugaauuguguccccccaaauucauaug

SEQ ID NO: 58329 - RNA, 27 nt, Homo Sapiens
cuucauucuucugacagcccccaucug

SEQ ID NO: 58330 - RNA, 32 nt, Homo Sapiens
cccccggagcccagcuguaaauuccucucuuu

SEQ ID NO: 58331 - RNA, 32 nt, Homo Sapiens
gggauggcccugcggcaaugccagcagcuccc

SEQ ID NO: 58332 - RNA, 32 nt, Homo Sapiens
cuacugcuuuacugccuguagcagguaucaca

SEQ ID NO: 58333 - RNA, 32 nt, Homo Sapiens
gcuaauuuuuaaaauuuuauguagagauaggg

SEQ ID NO: 58334 - RNA, 32 nt, Homo Sapiens
agccucuuagcugaaagcacaaauggugaaau

SEQ ID NO: 58335 - RNA, 32 nt, Homo Sapiens
ggccgucgggugugagcugcgccgaccgcucu

SEQ ID NO: 58336 - RNA, 32 nt, Homo Sapiens
guuugggggaccagcuagacacucuucuuagu

SEQ ID NO: 58337 - RNA, 32 nt, Homo Sapiens
uggggagagaauaaaugaauuuugcucaagaa

SEQ ID NO: 58338 - RNA, 32 nt, Homo Sapiens
cccaaccuugccucaccacucccggcccuagu

SEQ ID NO: 58339 - RNA, 32 nt, Homo Sapiens
aagaauuuacugaguucucacuucccuuacag

SEQ ID NO: 58340 - RNA, 32 nt, Homo Sapiens
aguccucucacagaagaaccacacgauugggu

SEQ ID NO: 58341 - RNA, 32 nt, Homo Sapiens
uauaauaaauauuccauaauuuuuuaguggaa

SEQ ID NO: 58342 - RNA, 32 nt, Homo Sapiens
gggcaagcggugggcuuuucggcggggucuuu

SEQ ID NO: 58343 - RNA, 32 nt, Homo Sapiens
agaggaagggaaggcagaaccagggaugccuu

SEQ ID NO: 58344 - RNA, 29 nt, Homo Sapiens
ccaaaguggggacagagggcaggacgccc

SEQ ID NO: 58345 - RNA, 32 nt, Homo Sapiens
cagcugcaccaucccggcguucgcgugugccg

SEQ ID NO: 58346 - RNA, 31 nt, Homo Sapiens
cuccagcacccacuuuaccucccccagauaa

SEQ ID NO: 58347 - RNA, 32 nt, Homo Sapiens
aaguauucuuuuucuuuuuuaaauuaauaucu

SEQ ID NO: 58348 - RNA, 32 nt, Homo Sapiens
agacagcccucccccaaccccaggccagucag

SEQ ID NO: 58349 - RNA, 32 nt, Homo Sapiens
ccuaacucauuucaguuacaugaaagauuuca

SEQ ID NO: 58350 - RNA, 32 nt, Homo Sapiens
gauaugaauuguuuuucuuguguuauauucug

SEQ ID NO: 58351 - RNA, 32 nt, Homo Sapiens
augucacaugguuuuuuuaaucaagaugcagu

SEQ ID NO: 58352 - RNA, 32 nt, Homo Sapiens
uaaggaaguucgcuggcgccagcagcgggaaa

SEQ ID NO: 58353 - RNA, 32 nt, Homo Sapiens
gccucggagccacugcacugcuggcugcagac

SEQ ID NO: 58354 - RNA, 32 nt, Homo Sapiens
cagagcaccaaccagcagaagccuguggacac

SEQ ID NO: 58355 - RNA, 32 nt, Homo Sapiens
ccugcauuuuauaguuaagaaauguacauaaa

SEQ ID NO: 58356 - RNA, 32 nt, Homo Sapiens
gggcucugggacgcccagacccugcccgccgc

SEQ ID NO: 58357 - RNA, 31 nt, Homo Sapiens
cagcuagugaaagaccucagagcaguuguaa

SEQ ID NO: 58358 - RNA, 32 nt, Homo Sapiens
caggcgcgggugcggcagcugcaggcugggag

SEQ ID NO: 58359 - RNA, 32 nt, Homo Sapiens
aauugcauuucugcucuuccaaagcuccugcg

SEQ ID NO: 58360 - RNA, 32 nt, Homo Sapiens
aacaucugaaguucuccauggcaaauugaauu

SEQ ID NO: 58361 - RNA, 32 nt, Homo Sapiens
aaauaccucacagauuagaugaaaagaugguu

SEQ ID NO: 58362 - RNA, 32 nt, Homo Sapiens
cagggaaucgccauauuugaccagcauguuuu

SEQ ID NO: 58363 - RNA, 32 nt, Homo Sapiens
guugacacaaaacagguucugguucagguaaa

SEQ ID NO: 58364 - RNA, 32 nt, Homo Sapiens
accuaggguagucccuggucgccuccgcucuu

SEQ ID NO: 58365 - RNA, 32 nt, Homo Sapiens
ugggagcugagagaaggcacugagagggacag

SEQ ID NO: 58366 - RNA, 32 nt, Homo Sapiens
cauauauaauuucaauucuaucaauugggccu

SEQ ID NO: 58367 - RNA, 32 nt, Homo Sapiens
aaaccuccgagccuuccaagguuugcuucuuu

SEQ ID NO: 58368 - RNA, 32 nt, Homo Sapiens
ggagacacgcaccuuggagaaaugaggggaga

SEQ ID NO: 58369 - RNA, 31 nt, Homo Sapiens
gggucugagcauuagaaccaggagaggggug

SEQ ID NO: 58370 - RNA, 32 nt, Homo Sapiens
aggauaaauauguuuccugugaauugugauga

SEQ ID NO: 58371 - RNA, 32 nt, Homo Sapiens
cauugcuguauauucaaagauuuguuuuauua

SEQ ID NO: 58372 - RNA, 32 nt, Homo Sapiens
gccuucagauauuaagcauuccacaacaucgu

SEQ ID NO: 58373 - RNA, 32 nt, Homo Sapiens
uaaggugggcccggcccgcgccacaggacccu

SEQ ID NO: 58374 - RNA, 32 nt, Homo Sapiens
ucaggaaagaacucauuccaggguguggagac

SEQ ID NO: 58375 - RNA, 32 nt, Homo Sapiens
uacaacuuuguucuuauaaaucugcaguuaua

SEQ ID NO: 58376 - RNA, 31 nt, Homo Sapiens
guuaucauaaagaaaaagagguuguugcugu

SEQ ID NO: 58377 - RNA, 32 nt, Homo Sapiens
acuagggccaaggcaggcugcagaacuuuccc

SEQ ID NO: 58378 - RNA, 32 nt, Homo Sapiens
acaaugcccaagaaggaagggauuguagaaau

SEQ ID NO: 58379 - RNA, 32 nt, Homo Sapiens
uguaacggugccuuuucuuaggguccaggcag

SEQ ID NO: 58380 - RNA, 32 nt, Homo Sapiens
ccuucaaaucaaucuguaaaacuaagaaacuu

SEQ ID NO: 58381 - RNA, 32 nt, Homo Sapiens
ugaggagcuggguggucccagccuggagcugu

SEQ ID NO: 58382 - RNA, 32 nt, Homo Sapiens
aauccacagcgauggagugggugcugggguca

SEQ ID NO: 58383 - RNA, 32 nt, Homo Sapiens
gcaaaggaagagcagagaaaucuuagacggug

SEQ ID NO: 58384 - RNA, 32 nt, Homo Sapiens
uggccagcacaccaaguggcugggugcccucu

SEQ ID NO: 58385 - RNA, 32 nt, Homo Sapiens
guauugaaaaagaucgcgaauaaaaaucaaca

SEQ ID NO: 58386 - RNA, 32 nt, Homo Sapiens
cagagcgagggauauagcucaaggggcaacca

SEQ ID NO: 58387 - RNA, 30 nt, Homo Sapiens
caucccggagcugagucgccggcggcggug

SEQ ID NO: 58388 - RNA, 32 nt, Homo Sapiens
uaagaggugagaacugggcaaaaguugugaag

SEQ ID NO: 58389 - RNA, 32 nt, Homo Sapiens
gggagcaggggaggggucaguagcagaagcag

SEQ ID NO: 58390 - RNA, 32 nt, Homo Sapiens
ucagaaacacugggguaggcccuggagagcag

SEQ ID NO: 58391 - RNA, 32 nt, Homo Sapiens
aagaaaauuuauuugcauaggucacauaauau

SEQ ID NO: 58392 - RNA, 31 nt, Homo Sapiens
gcgcggcacuuccgcuggccgcuggcucgcu

SEQ ID NO: 58393 - RNA, 32 nt, Homo Sapiens
acuacugcugccacaugggaacugugaagagg

SEQ ID NO: 58394 - RNA, 32 nt, Homo Sapiens
ugaauugcuuugcauggucucauuugagauaa

SEQ ID NO: 58395 - RNA, 32 nt, Homo Sapiens
acccagggcccuguccugugucugccaccacc

SEQ ID NO: 58396 - RNA, 32 nt, Homo Sapiens
cagaccucuuucuugugccuuguucacuucug

SEQ ID NO: 58397 - RNA, 32 nt, Homo Sapiens
ucuggguccgcucuggcuccgcgggcaggacg

SEQ ID NO: 58398 - RNA, 32 nt, Homo Sapiens
uuaacauacuuauuugcagaagugguguaguu

SEQ ID NO: 58399 - RNA, 32 nt, Homo Sapiens
gugagcaguuguauugccuguuuggugcccaa

SEQ ID NO: 58400 - RNA, 32 nt, Homo Sapiens
aacugcaucuccugggcuggugcucugugcug

SEQ ID NO: 58401 - RNA, 32 nt, Homo Sapiens
auggauuccuuugaaugaguucaaauguuccc

SEQ ID NO: 58402 - RNA, 32 nt, Homo Sapiens
cugaacguuuucuucuuucccuggacaggcag

SEQ ID NO: 58403 - RNA, 32 nt, Homo Sapiens
uuucgggguuggcgucggcuucugccugaggg

SEQ ID NO: 58404 - RNA, 32 nt, Homo Sapiens
gaaauacaaaaauuauguuuaagggucauagu

SEQ ID NO: 58405 - RNA, 32 nt, Homo Sapiens
ggucagggaguggaagagaagacggcuggaag

SEQ ID NO: 58406 - RNA, 32 nt, Homo Sapiens
cauauaacuugcuuuucuuacuuaauguacac

SEQ ID NO: 58407 - RNA, 32 nt, Homo Sapiens
ucugcugauuguagggaugugcagggcuggga

SEQ ID NO: 58408 - RNA, 32 nt, Homo Sapiens
aaccuagcaggaccagcuccgggcccgcucag

SEQ ID NO: 58409 - RNA, 32 nt, Homo Sapiens
gccagacccacucgcugccgggacccuuucac

SEQ ID NO: 58410 - RNA, 32 nt, Homo Sapiens
gaacuauguauuuuaaaauaugaucauggaca

SEQ ID NO: 58411 - RNA, 32 nt, Homo Sapiens
ugaaguugaagaagggcacuaugaauuaagcc

SEQ ID NO: 58412 - RNA, 32 nt, Homo Sapiens
cugcuccccaccccccaccuccaugccucagc

SEQ ID NO: 58413 - RNA, 32 nt, Homo Sapiens
aaacuuccuuugacugauguucaguguccauc

SEQ ID NO: 58414 - RNA, 32 nt, Homo Sapiens
gcccucgcugagaccuccaugggaaaucaccc

SEQ ID NO: 58415 - RNA, 32 nt, Homo Sapiens
cgcagaggcacugugcucacgguuggacuugg

SEQ ID NO: 58416 - RNA, 32 nt, Homo Sapiens
uuugggguuacauccuguuuguuucagaauuu

SEQ ID NO: 58417 - RNA, 32 nt, Homo Sapiens
agugaccagaaagugugaaugcggaguaggaa

SEQ ID NO: 58418 - RNA, 32 nt, Homo Sapiens
uuuuaaauaaauaaauuggcucaucuggcuuu

SEQ ID NO: 58419 - RNA, 32 nt, Homo Sapiens
cggaccaugcguccggguucgcggcggugagg

SEQ ID NO: 58420 - RNA, 32 nt, Homo Sapiens
cuuuccuaugaauguaggacgcugcucuucaa

SEQ ID NO: 58421 - RNA, 32 nt, Homo Sapiens
gggacccagacaccuguccccacagucaaagc

SEQ ID NO: 58422 - RNA, 32 nt, Homo Sapiens
ugugucacuuggcaugagauguuuauuuugga

SEQ ID NO: 58423 - RNA, 32 nt, Homo Sapiens
acuggagccuacuuuggggaggggaugaaaua

SEQ ID NO: 58424 - RNA, 32 nt, Homo Sapiens
gugggcggccgcggggcugagggcguccggca

SEQ ID NO: 58425 - RNA, 32 nt, Homo Sapiens
aaaggaguguucuguuucaauucauaguauga

SEQ ID NO: 58426 - RNA, 32 nt, Homo Sapiens
aggggucagaacuucugaaaccagagaucugu

SEQ ID NO: 58427 - RNA, 32 nt, Homo Sapiens
gcacaaccagcucgcccucccccuacccgggg

SEQ ID NO: 58428 - RNA, 32 nt, Homo Sapiens
cugacagcacuuuaaaaaucuuugccugggcc

SEQ ID NO: 58429 - RNA, 32 nt, Homo Sapiens
gaggaagaguuacugacacaagcaaaaagaac

SEQ ID NO: 58430 - RNA, 32 nt, Homo Sapiens
gccugauaauauuacuacugcauuccaaaauu

SEQ ID NO: 58431 - RNA, 32 nt, Homo Sapiens
cuuuagcuugguaacagcggugaauagagugu

SEQ ID NO: 58432 - RNA, 32 nt, Homo Sapiens
agcagaagggcugagcugaaaacuucacuccu

SEQ ID NO: 58433 - RNA, 32 nt, Homo Sapiens
cagacacgucugccgaggcucuguggccugau

SEQ ID NO: 58434 - RNA, 32 nt, Homo Sapiens
caucauuaucaugguuuauaggugaggaaauu

SEQ ID NO: 58435 - RNA, 32 nt, Homo Sapiens
ggaauaaugaacuagaaaccagcaagugaaag

SEQ ID NO: 58436 - RNA, 32 nt, Homo Sapiens
uuuugcuuuuaagccauuucugaugauauagc

SEQ ID NO: 58437 - RNA, 32 nt, Homo Sapiens
uggccguggaggggcgcaaggcagacggucuc

SEQ ID NO: 58438 - RNA, 32 nt, Homo Sapiens
gagccaccacacuccaaccuaggugacagagc

SEQ ID NO: 58439 - RNA, 32 nt, Homo Sapiens
cagaaaguauaaaacggcuuacaaagggagac

SEQ ID NO: 58440 - RNA, 32 nt, Homo Sapiens
ccuuccccucucucagcccauccaccugauuc

SEQ ID NO: 58441 - RNA, 32 nt, Homo Sapiens
ucucugccaaucugcugggcuggucccucuca

SEQ ID NO: 58442 - RNA, 32 nt, Homo Sapiens
ggcugggaggccgcucggggcccagcgugcca

SEQ ID NO: 58443 - RNA, 32 nt, Homo Sapiens
cugaccaaugaaauaauaaaaaacaaauugaa

SEQ ID NO: 58444 - RNA, 32 nt, Homo Sapiens
cacccuucucaucuggaucgggccccucagaa

SEQ ID NO: 58445 - RNA, 32 nt, Homo Sapiens
cuacaagccaaggacagagaccuggaacagau

SEQ ID NO: 58446 - RNA, 29 nt, Homo Sapiens
uccccuuccuguuucagacccccccauuu

SEQ ID NO: 58447 - RNA, 32 nt, Homo Sapiens
acccucuucugccuaugagcggggaacaaaaa

SEQ ID NO: 58448 - RNA, 32 nt, Homo Sapiens
accuccgccucccagguucaacugauucuccu

SEQ ID NO: 58449 - RNA, 32 nt, Homo Sapiens
auggcgaaaccccaucucuacugaaaauacaa

SEQ ID NO: 58450 - RNA, 32 nt, Homo Sapiens
cugcaaugucuaaaucgccuuaaaagagccca

SEQ ID NO: 58451 - RNA, 26 nt, Homo Sapiens
gauggagacuguuucagaagcaggaa

SEQ ID NO: 58452 - RNA, 29 nt, Homo Sapiens
cguccgucgguccgggggugagccgcccg

SEQ ID NO: 58453 - RNA, 32 nt, Homo Sapiens
ucguugcaaccacugcaauaucuucguuagua

SEQ ID NO: 58454 - RNA, 32 nt, Homo Sapiens
ccccacucccgccccucccccaucgugcugca

SEQ ID NO: 58455 - RNA, 32 nt, Homo Sapiens
cuuugggaaguuauuucuuuauuuuaaugaug

SEQ ID NO: 58456 - RNA, 32 nt, Homo Sapiens
aacauauguguguacagacacacagcagagcc

SEQ ID NO: 58457 - RNA, 32 nt, Homo Sapiens
accgcaccgccagcugccagcggccggggugc

SEQ ID NO: 58458 - RNA, 32 nt, Homo Sapiens
uuucucuuuccuuuuuugugagcgguauuuaa

SEQ ID NO: 58459 - RNA, 32 nt, Homo Sapiens
uaaauguuaagaauuuuuuuuauaucuguuaa

SEQ ID NO: 58460 - RNA, 32 nt, Homo Sapiens
cugugguucugacucuucccaguguccugcau

SEQ ID NO: 58461 - RNA, 32 nt, Homo Sapiens
aggugagaaaucagauauaaccagacauccca

SEQ ID NO: 58462 - RNA, 32 nt, Homo Sapiens
gcccccuuacgcguugucucauuccaccaaau

SEQ ID NO: 58463 - RNA, 32 nt, Homo Sapiens
gcuaaauauuguuugugggaaccacagauggu

SEQ ID NO: 58464 - RNA, 32 nt, Homo Sapiens
aaggucacacuaagauauaauuuuuuauguuu

SEQ ID NO: 58465 - RNA, 32 nt, Homo Sapiens
auaaaagaaaaguagagauaauaaucaguucu

SEQ ID NO: 58466 - RNA, 32 nt, Homo Sapiens
ucuuuccuggguugggaaggccaggcagggac

SEQ ID NO: 58467 - RNA, 32 nt, Homo Sapiens
uacaaugaagaugccuguuuugucucuacugu

SEQ ID NO: 58468 - RNA, 32 nt, Homo Sapiens
aguggucggggcccgcggccgcucgcgccucu

SEQ ID NO: 58469 - RNA, 32 nt, Homo Sapiens
accugccgcgguccucccgccggcgcugggcu

SEQ ID NO: 58470 - RNA, 32 nt, Homo Sapiens
acagaggcguguugugggggagccucagaggg

SEQ ID NO: 58471 - RNA, 32 nt, Homo Sapiens
uuuguuuucuuuucuccucaacccagcauuuu

SEQ ID NO: 58472 - RNA, 32 nt, Homo Sapiens
ggugcagugguaugugcccaccccucucccau

SEQ ID NO: 58473 - RNA, 32 nt, Homo Sapiens
gaggagcugaaaacgccgcggagcccucggcc

SEQ ID NO: 58474 - RNA, 32 nt, Homo Sapiens
acccaaaggucaaugucugcauuuuauguuug

SEQ ID NO: 58475 - RNA, 32 nt, Homo Sapiens
gccaccacacuccagccugggcgacagaauga

SEQ ID NO: 58476 - RNA, 32 nt, Homo Sapiens
accccaggcccggcccgugguacccagcaggu

SEQ ID NO: 58477 - RNA, 32 nt, Homo Sapiens
agcugcuggcccugagccccagcaugcccuug

SEQ ID NO: 58478 - RNA, 32 nt, Homo Sapiens
caacacccaguuuccuugggaguugucauuaa

SEQ ID NO: 58479 - RNA, 32 nt, Homo Sapiens
uaugacauguuuacuacuuaaacaugaauuca

SEQ ID NO: 58480 - RNA, 32 nt, Homo Sapiens
gcaugcccuuggaaaagacucccuuuaguccc

SEQ ID NO: 58481 - RNA, 32 nt, Homo Sapiens
aaucuuaaagacaaauuuugcauauucucuau

SEQ ID NO: 58482 - RNA, 32 nt, Homo Sapiens
uugacaggaaacaauuuuauagcauuuauaaa

SEQ ID NO: 58483 - RNA, 32 nt, Homo Sapiens
aggccacucaugccuguaaacccagggcuuua

SEQ ID NO: 58484 - RNA, 32 nt, Homo Sapiens
aaugucccugagaaugagauagauagcuaaga

SEQ ID NO: 58485 - RNA, 32 nt, Homo Sapiens
uccgccagggcccacacccccuuccuacuccc

SEQ ID NO: 58486 - RNA, 32 nt, Homo Sapiens
ugugccuagacaagugucuuucuguaagagcu

SEQ ID NO: 58487 - RNA, 32 nt, Homo Sapiens
agcccucaaaggccucuuucuggucugucugg

SEQ ID NO: 58488 - RNA, 32 nt, Homo Sapiens
uccuccaggaggugggggaaugugguaacauu

SEQ ID NO: 58489 - RNA, 32 nt, Homo Sapiens
uugggggaaggggauggcuggaugugcuccag

SEQ ID NO: 58490 - RNA, 32 nt, Homo Sapiens
ugaccccgugucaccacugccggcgccugcgg

SEQ ID NO: 58491 - RNA, 32 nt, Homo Sapiens
caggccagcagcgcccacugggcuacagcaag

SEQ ID NO: 58492 - RNA, 32 nt, Homo Sapiens
gaacacaggagccgcaaccaccuggcacugau

SEQ ID NO: 58493 - RNA, 32 nt, Homo Sapiens
cuggggaggcagggguuggugcccugacuccu

SEQ ID NO: 58494 - RNA, 32 nt, Homo Sapiens
ugauccagcuccauauauuguuuaccuucaaa

SEQ ID NO: 58495 - RNA, 32 nt, Homo Sapiens
uuaugcugccauccuuuuugcaugucaaauaa

SEQ ID NO: 58496 - RNA, 32 nt, Homo Sapiens
acaccauggcugccagcuuccaggcuggacaa

SEQ ID NO: 58497 - RNA, 32 nt, Homo Sapiens
agaaggcaggagaggagauaggcuuauuauga

SEQ ID NO: 58498 - RNA, 31 nt, Homo Sapiens
ugccggcuggagucuccaccauagacucagu

SEQ ID NO: 58499 - RNA, 32 nt, Homo Sapiens
ccguucgucuuaccaucuaaccaaacaaaaga

SEQ ID NO: 58500 - RNA, 32 nt, Homo Sapiens
auugaaccuuuuuugccuggcuuauaaggugg

SEQ ID NO: 58501 - RNA, 32 nt, Homo Sapiens
acagacaagcaaaacaaagugaaaaccgaaug

SEQ ID NO: 58502 - RNA, 32 nt, Homo Sapiens
gcagguaauggcaaugagacuucuccgugcug

SEQ ID NO: 58503 - RNA, 32 nt, Homo Sapiens
aagggccucccucuuccuuuaucugaaguggu

SEQ ID NO: 58504 - RNA, 32 nt, Homo Sapiens
uccuuaacaacuguagcaagaacugcacggua

SEQ ID NO: 58505 - RNA, 32 nt, Homo Sapiens
cuggagggcaggggcgggcccugggcgugggc

SEQ ID NO: 58506 - RNA, 32 nt, Homo Sapiens
cuguuaauugcugcuaauucuaauucugauga

SEQ ID NO: 58507 - RNA, 32 nt, Homo Sapiens
accucuuggggauggaguucuaagaggcuaag

SEQ ID NO: 58508 - RNA, 32 nt, Homo Sapiens
agcuggugucccgcccuguucugggcggacgc

SEQ ID NO: 58509 - RNA, 32 nt, Homo Sapiens
cuggcgcgggagagggaggagaaggagcagcc

SEQ ID NO: 58510 - RNA, 32 nt, Homo Sapiens
gcgcguuucgggugcuggcggcugcagccgga

SEQ ID NO: 58511 - RNA, 29 nt, Homo Sapiens
ccuugauuuauguguggaaagcuagugcc

SEQ ID NO: 58512 - RNA, 32 nt, Homo Sapiens
guauguguuacacuuucuaacaugccauuuag

SEQ ID NO: 58513 - RNA, 32 nt, Homo Sapiens
uucauucccguccaugccgagcccccgacugc

SEQ ID NO: 58514 - RNA, 32 nt, Homo Sapiens
cguguggguggaguacgcggacaggcugcugc

SEQ ID NO: 58515 - RNA, 32 nt, Homo Sapiens
gcucuugauccuggggccccagcucugggucc

SEQ ID NO: 58516 - RNA, 32 nt, Homo Sapiens
accgcccucccucuccccggggcccauggcgg

SEQ ID NO: 58517 - RNA, 32 nt, Homo Sapiens
ugccugagugcaugagacagaauagagaccag

SEQ ID NO: 58518 - RNA, 32 nt, Homo Sapiens
cgagcgcgccuggccugaugcccuggccugug

SEQ ID NO: 58519 - RNA, 32 nt, Homo Sapiens
gugccuggguggccauccuacccagcgugccc

SEQ ID NO: 58520 - RNA, 32 nt, Homo Sapiens
guccuguguacuuuugcacaacugagaauccu

SEQ ID NO: 58521 - RNA, 32 nt, Homo Sapiens
guggugagccugacguuaaucguuuacauguu

SEQ ID NO: 58522 - RNA, 32 nt, Homo Sapiens
guucacaccccagccaccccagccaucccagc

SEQ ID NO: 58523 - RNA, 32 nt, Homo Sapiens
caacaaaggcaauggugaaaagagauuaggaa

SEQ ID NO: 58524 - RNA, 32 nt, Homo Sapiens
aacuguaauuuuccuguaacuauuuuggaaug

SEQ ID NO: 58525 - RNA, 32 nt, Homo Sapiens
gaguguggaggcgcggacgcgcggcggagcug

SEQ ID NO: 58526 - RNA, 32 nt, Homo Sapiens
guuacuaauaaucacugaugucgcuuuuuaau

SEQ ID NO: 58527 - RNA, 32 nt, Homo Sapiens
ccagugagacacauuuuggauuucugaccuaa

SEQ ID NO: 58528 - RNA, 32 nt, Homo Sapiens
ccaagaauauccacagcucagagaagaaacga

SEQ ID NO: 58529 - RNA, 32 nt, Homo Sapiens
cuagccucagaguaaccccuguuaacaaacua

SEQ ID NO: 58530 - RNA, 32 nt, Homo Sapiens
cucugcgaugggcauccugacugucuggaugc

SEQ ID NO: 58531 - RNA, 32 nt, Homo Sapiens
cuggaagugucuaugaacuuccauaaauaacu

SEQ ID NO: 58532 - RNA, 32 nt, Homo Sapiens
auggugaacuuuucuuuuuuucuccauuuaaa

SEQ ID NO: 58533 - RNA, 32 nt, Homo Sapiens
uuucuuauaacucuccuuugcucucuggccac

SEQ ID NO: 58534 - RNA, 32 nt, Homo Sapiens
uguuuuucaauuugccuaauaauagcaguuac

SEQ ID NO: 58535 - RNA, 32 nt, Homo Sapiens
uuuaguuaagcaugacuuuagaugggaagccu

SEQ ID NO: 58536 - RNA, 32 nt, Homo Sapiens
guguaaaauaacucauuuaauaaaauaguacu

SEQ ID NO: 58537 - RNA, 32 nt, Homo Sapiens
uuccauuucacuuauaugugcauguccauaua

SEQ ID NO: 58538 - RNA, 32 nt, Homo Sapiens
aagcuuacaauuuucuucucucucuuuugugc

SEQ ID NO: 58539 - RNA, 32 nt, Homo Sapiens
ggcgggcggacgaggcgggcgauggcccugcg

SEQ ID NO: 58540 - RNA, 32 nt, Homo Sapiens
cucauugcaaccuccgccuuccggguucacac

SEQ ID NO: 58541 - RNA, 32 nt, Homo Sapiens
agcugauaaaagacauuuuuuuaacuuccuua

SEQ ID NO: 58542 - RNA, 32 nt, Homo Sapiens
aucuuuacugaaacuuaugccaccacaaagga

SEQ ID NO: 58543 - RNA, 32 nt, Homo Sapiens
uuucccuuucccuucaaaucuuuuaaugguaa

SEQ ID NO: 58544 - RNA, 32 nt, Homo Sapiens
ggcaccccgcggccaccggaguggcuucccgg

SEQ ID NO: 58545 - RNA, 32 nt, Homo Sapiens
gcaacugaguacaaaggaaacaggaauaauaa

SEQ ID NO: 58546 - RNA, 32 nt, Homo Sapiens
agucaccauuuucucacuguuaacauuaggaa

SEQ ID NO: 58547 - RNA, 28 nt, Homo Sapiens
gcgaugccgcgcgcuccccgcugccgag

SEQ ID NO: 58548 - RNA, 32 nt, Homo Sapiens
ggaggaggcgcagugucuuuuuaaccacuuug

SEQ ID NO: 58549 - RNA, 32 nt, Homo Sapiens
cgggacuagguccgggcccaccgcgccccugg

SEQ ID NO: 58550 - RNA, 32 nt, Homo Sapiens
cggcugggauggcgcguccgcggccccgcgag

SEQ ID NO: 58551 - RNA, 32 nt, Homo Sapiens
gaaaugagaagaaggaacaaaaauauuauuuc

SEQ ID NO: 58552 - RNA, 32 nt, Homo Sapiens
uguccucccucccccacugucugggacacagg

SEQ ID NO: 58553 - RNA, 32 nt, Homo Sapiens
gccaggaacagguugggaagaaaauuguggcu

SEQ ID NO: 58554 - RNA, 32 nt, Homo Sapiens
uuaauuaaugaaaugccuuaaucagcuuucca

SEQ ID NO: 58555 - RNA, 32 nt, Homo Sapiens
ugagugauagacggagccgcccugcccugcuc

SEQ ID NO: 58556 - RNA, 32 nt, Homo Sapiens
gucgagccuggcgcgccgcagccauggccauc

SEQ ID NO: 58557 - RNA, 32 nt, Homo Sapiens
gacgugguuuuagagucuaccuaauauguuaa

SEQ ID NO: 58558 - RNA, 32 nt, Homo Sapiens
agaugggaaaacugaggccugaugcuggagau

SEQ ID NO: 58559 - RNA, 32 nt, Homo Sapiens
gcccccacuccagcagugcuucccaaagugug

SEQ ID NO: 58560 - RNA, 32 nt, Homo Sapiens
uguuaaagggaagcuggacgagauaauaaaga

SEQ ID NO: 58561 - RNA, 32 nt, Homo Sapiens
ucuuuuuuuuucuguccuaaagucgccucauc

SEQ ID NO: 58562 - RNA, 32 nt, Homo Sapiens
gacguguccugcagcccucucuucuucagagg

SEQ ID NO: 58563 - RNA, 32 nt, Homo Sapiens
uguggaucgcccgccccagcccggggccgcuc

SEQ ID NO: 58564 - RNA, 32 nt, Homo Sapiens
aauccuguacaaugauucuguguaaauagcug

SEQ ID NO: 58565 - RNA, 32 nt, Homo Sapiens
cuuucggacaccugucgaauaguaaaucccaa

SEQ ID NO: 58566 - RNA, 32 nt, Homo Sapiens
uagguuuagcugaguucauacagaggagauau

SEQ ID NO: 58567 - RNA, 32 nt, Homo Sapiens
ccucugggggaucggcggcggggggcggcaca

SEQ ID NO: 58568 - RNA, 32 nt, Homo Sapiens
cgcgcgugcucgcugugcgcacgcacacaucu

SEQ ID NO: 58569 - RNA, 29 nt, Homo Sapiens
aaccuccuggggcaggggacgccgagacu

SEQ ID NO: 58570 - RNA, 29 nt, Homo Sapiens
aagugauuuguccgugaccacaaagaguu

SEQ ID NO: 58571 - RNA, 32 nt, Homo Sapiens
cggcaagucugugccaaacccagugguccggg

SEQ ID NO: 58572 - RNA, 32 nt, Homo Sapiens
cguucuuuauuaugaaacuuuaucacauucga

SEQ ID NO: 58573 - RNA, 32 nt, Homo Sapiens
aacaauguaucuuuucuguguucaaaauaaau

SEQ ID NO: 58574 - RNA, 32 nt, Homo Sapiens
gauacuuuuccacaggcaucucugcaugaauu

SEQ ID NO: 58575 - RNA, 32 nt, Homo Sapiens
gaagacuagaaggaaguuccuggccauucagc

SEQ ID NO: 58576 - RNA, 32 nt, Homo Sapiens
cucucccaggcaagaggaccggcggaggcacc

SEQ ID NO: 58577 - RNA, 32 nt, Homo Sapiens
gccugaggcucuggugggguccccagggggcc

SEQ ID NO: 58578 - RNA, 32 nt, Homo Sapiens
guuggcccaagcaugacaaggacguaugaaaa

SEQ ID NO: 58579 - RNA, 32 nt, Homo Sapiens
uguguguaaccauaaacuauauucauaucugu

SEQ ID NO: 58580 - RNA, 32 nt, Homo Sapiens
uguuuuauccuuauauuuuagagcuuucagca

SEQ ID NO: 58581 - RNA, 32 nt, Homo Sapiens
cggggaagccggcuccagcccggagcgaacuu

SEQ ID NO: 58582 - RNA, 32 nt, Homo Sapiens
augcuugaacucuuuuucugugaaacucauua

SEQ ID NO: 58583 - RNA, 32 nt, Homo Sapiens
acccauguuucucauuagugucucccgggccu

SEQ ID NO: 58584 - RNA, 32 nt, Homo Sapiens
caaauguuucucgacaaaaguuuuccacuggg

SEQ ID NO: 58585 - RNA, 32 nt, Homo Sapiens
gaggccgagggccccaggaugucugccugguc

SEQ ID NO: 58586 - RNA, 32 nt, Homo Sapiens
uauucuugaaaauauccuuguuguguauuagg

SEQ ID NO: 58587 - RNA, 32 nt, Homo Sapiens
uaccaccccccgccuucccccugcccugcgcc

SEQ ID NO: 58588 - RNA, 32 nt, Homo Sapiens
uaggcuggcugucgcuugggguugcugcauaa

SEQ ID NO: 58589 - RNA, 32 nt, Homo Sapiens
guuauguucacagauaguugucaauuggucug

SEQ ID NO: 58590 - RNA, 30 nt, Homo Sapiens
cuacaggcgcccgccgccacgcccgucaaa

SEQ ID NO: 58591 - RNA, 32 nt, Homo Sapiens
cuacagccagggauagagcagaugagcaguga

SEQ ID NO: 58592 - RNA, 32 nt, Homo Sapiens
cauguuuggucuuuuuuuguuuugguuuguca

SEQ ID NO: 58593 - RNA, 32 nt, Homo Sapiens
cccacugccaugguaacaugggugcuggcuga

SEQ ID NO: 58594 - RNA, 32 nt, Homo Sapiens
gaugggagcugaugcugugauuuugagcugug

SEQ ID NO: 58595 - RNA, 32 nt, Homo Sapiens
ucuucagcuccgucucccuugcucuccgcucu

SEQ ID NO: 58596 - RNA, 32 nt, Homo Sapiens
uccuguauauaccaccuaggaggagaugccac

SEQ ID NO: 58597 - RNA, 27 nt, Homo Sapiens
auuguuugucacuucagccuccaagcu

SEQ ID NO: 58598 - RNA, 32 nt, Homo Sapiens
auguugaaaaauuuuaagaagggauuuaaugg

SEQ ID NO: 58599 - RNA, 32 nt, Homo Sapiens
uuaucgggguaucuaugguacaguuaauuuca

SEQ ID NO: 58600 - RNA, 32 nt, Homo Sapiens
aacaaauuugguuuuuuuuuaaaccauuaaaa

SEQ ID NO: 58601 - RNA, 32 nt, Homo Sapiens
caguuggcaagcaguggaauaagauuuuugua

SEQ ID NO: 58602 - RNA, 32 nt, Homo Sapiens
cggcagggcuugggggcgccuuagagccgaac

SEQ ID NO: 58603 - RNA, 32 nt, Homo Sapiens
cuauaaacuaaauuaaugauguaaauacauag

SEQ ID NO: 58604 - RNA, 32 nt, Homo Sapiens
ugaggaugcaugugucugacggauaguaguau

SEQ ID NO: 58605 - RNA, 32 nt, Homo Sapiens
ccagagcagggacugagaaaccccaaggaugg

SEQ ID NO: 58606 - RNA, 32 nt, Homo Sapiens
auuucgcccauuauucaggcugcacaacacag

SEQ ID NO: 58607 - RNA, 32 nt, Homo Sapiens
uccugcugggguucuccuuucugcuguuccga

SEQ ID NO: 58608 - RNA, 32 nt, Homo Sapiens
gaagcggcacuaaaccagguggucaaucaggg

SEQ ID NO: 58609 - RNA, 32 nt, Homo Sapiens
cggccauccuuccacacccagaucucuugucc

SEQ ID NO: 58610 - RNA, 32 nt, Homo Sapiens
ucucuuggccucuuccucucucaagauaaaga

SEQ ID NO: 58611 - RNA, 32 nt, Homo Sapiens
uucaaugcagucaucacccucccgccauucaa

SEQ ID NO: 58612 - RNA, 32 nt, Homo Sapiens
agugagcgcaagauggaagcugcuugcagaga

SEQ ID NO: 58613 - RNA, 32 nt, Homo Sapiens
aucauggagugggucuuaguugaugucuuguu

SEQ ID NO: 58614 - RNA, 32 nt, Homo Sapiens
gaaauuuuaagugccuuuguggacagauuauc

SEQ ID NO: 58615 - RNA, 32 nt, Homo Sapiens
uuccuauaauguauuucuuuaauuacauaacc

SEQ ID NO: 58616 - RNA, 32 nt, Homo Sapiens
auucccagcucuucuuccuggcugugucuaca

SEQ ID NO: 58617 - RNA, 31 nt, Homo Sapiens
ugagccccgcuagggccgccccgcgcugaga

SEQ ID NO: 58618 - RNA, 32 nt, Homo Sapiens
uuguaggaggacgaggcucagcucuugccagg

SEQ ID NO: 58619 - RNA, 32 nt, Homo Sapiens
caucuccccgaccacugcccagcccucugcuc

SEQ ID NO: 58620 - RNA, 32 nt, Homo Sapiens
guaugggagauuacugggaacauaaucaauau

SEQ ID NO: 58621 - RNA, 32 nt, Homo Sapiens
augccuuuauaagcucaguuuccccuguucuu

SEQ ID NO: 58622 - RNA, 32 nt, Homo Sapiens
caaaaaaacaaaaaacaaaacugcacacguuu

SEQ ID NO: 58623 - RNA, 32 nt, Homo Sapiens
cucuccccaacccccauucucaucugcacccu

SEQ ID NO: 58624 - RNA, 32 nt, Homo Sapiens
gccaaaacccacccagcuaauaagugcagggc

SEQ ID NO: 58625 - RNA, 32 nt, Homo Sapiens
aguuuaauaaacaaaacccuaguucugaaaaa

SEQ ID NO: 58626 - RNA, 32 nt, Homo Sapiens
acacugcagcugcccuaucaccacccugcacg

SEQ ID NO: 58627 - RNA, 32 nt, Homo Sapiens
acccgcucccucugcucauccauccuugauua

SEQ ID NO: 58628 - RNA, 32 nt, Homo Sapiens
aucacugugcuaauggacaggacuguaaucua

SEQ ID NO: 58629 - RNA, 32 nt, Homo Sapiens
ccgaagcggcggucgguggcaggggugguagc

SEQ ID NO: 58630 - RNA, 32 nt, Homo Sapiens
acccucccucagcuccuucuuggccccauccc

SEQ ID NO: 58631 - RNA, 32 nt, Homo Sapiens
gucagaagcuggaaacguguguccgggcucug

SEQ ID NO: 58632 - RNA, 32 nt, Homo Sapiens
ugggcuucuggcaccuguuucuaggccuaacc

SEQ ID NO: 58633 - RNA, 32 nt, Homo Sapiens
ggguuauguauaaaagcauaugugcuacucau

SEQ ID NO: 58634 - RNA, 32 nt, Homo Sapiens
ucugugaaacauaaauauaaaggugauuguau

SEQ ID NO: 58635 - RNA, 32 nt, Homo Sapiens
cgggaggugcagggcagcagggggcacaguga

SEQ ID NO: 58636 - RNA, 32 nt, Homo Sapiens
cagagggcugccccugauggggccuggcaaug

SEQ ID NO: 58637 - RNA, 32 nt, Homo Sapiens
ccaaaaugacucucuuauuuaauuguggagug

SEQ ID NO: 58638 - RNA, 32 nt, Homo Sapiens
agaagucaauuucaagaaauacaggaucaacu

SEQ ID NO: 58639 - RNA, 32 nt, Homo Sapiens
gaaaggggcugauuugcuuauucaucaauaac

SEQ ID NO: 58640 - RNA, 32 nt, Homo Sapiens
uguagcuccauuauuuuuuuuauuaaaaaaua

SEQ ID NO: 58641 - RNA, 32 nt, Homo Sapiens
uauacuaggauagacuuuaucuacuucaucug

SEQ ID NO: 58642 - RNA, 32 nt, Homo Sapiens
gcacuguucucccugcuuugcccagaugccag

SEQ ID NO: 58643 - RNA, 32 nt, Homo Sapiens
uucauaccacuagcuacuuguuuucuaaucug

SEQ ID NO: 58644 - RNA, 32 nt, Homo Sapiens
aauuuaguguuucuuuguguguuuuguagacu

SEQ ID NO: 58645 - RNA, 32 nt, Homo Sapiens
cugaggucaggaguucgagaccagccuggcca

SEQ ID NO: 58646 - RNA, 32 nt, Homo Sapiens
uugaggucaggaguucgagaccagucuggcca

SEQ ID NO: 58647 - RNA, 32 nt, Homo Sapiens
cugagguuaggaguuugagaccagccuggcca

SEQ ID NO: 58648 - RNA, 31 nt, Homo Sapiens
cugcggcggcacuuccggguuggccuucucc

SEQ ID NO: 58649 - RNA, 32 nt, Homo Sapiens
accuuugucccucaguuccaggaggcagcauu

SEQ ID NO: 58650 - RNA, 32 nt, Homo Sapiens
agcugcuacccccaagacuugccacguuguuc

SEQ ID NO: 58651 - RNA, 32 nt, Homo Sapiens
uccaaguuugccuggggccuagcccugcuaga

SEQ ID NO: 58652 - RNA, 32 nt, Homo Sapiens
aggccuagccccaucccuccccaugaggggcc

SEQ ID NO: 58653 - RNA, 32 nt, Homo Sapiens
gccaggcaggugaugucuuuguucucggcucc

SEQ ID NO: 58654 - RNA, 32 nt, Homo Sapiens
gcguuggcggcaggaggcggcggccgcgucga

SEQ ID NO: 58655 - RNA, 32 nt, Homo Sapiens
uucaacuugaguuuucuuuuaauguuaauaag

SEQ ID NO: 58656 - RNA, 32 nt, Homo Sapiens
cuacaauuuucugaagcaccaguuagcccaga

SEQ ID NO: 58657 - RNA, 32 nt, Homo Sapiens
aggucccgagggcucucuggggccugaggcuc

SEQ ID NO: 58658 - RNA, 32 nt, Homo Sapiens
ccacccccauccccccuggcugccccgcaccc

SEQ ID NO: 58659 - RNA, 32 nt, Homo Sapiens
guccuggugucaagcaggggacacggcaggau

SEQ ID NO: 58660 - RNA, 32 nt, Homo Sapiens
uuuucugcaaccccuccacuccccucacacac

SEQ ID NO: 58661 - RNA, 32 nt, Homo Sapiens
cacugugaggauuaaugacauauuggcucuaa

SEQ ID NO: 58662 - RNA, 32 nt, Homo Sapiens
ggccagagccuaauggagaccuugacuuggag

SEQ ID NO: 58663 - RNA, 32 nt, Homo Sapiens
auguuccaaguacacaauaguaagauuaugcu

SEQ ID NO: 58664 - RNA, 32 nt, Homo Sapiens
ugcgccaagggcgacauccccccgccgcugcg

SEQ ID NO: 58665 - RNA, 32 nt, Homo Sapiens
gcaggagccuggaggggcgcgcaccagggugg

SEQ ID NO: 58666 - RNA, 32 nt, Homo Sapiens
ugggugaggagcuacuuagcgccgcggcuccu

SEQ ID NO: 58667 - RNA, 32 nt, Homo Sapiens
guaaguugguccuccgccuccgggccacccca

SEQ ID NO: 58668 - RNA, 31 nt, Homo Sapiens
ccuccuuuguuagaauagguauaucagcugu

SEQ ID NO: 58669 - RNA, 32 nt, Homo Sapiens
cuaauccuggaaaacccuguaccccuccuccu

SEQ ID NO: 58670 - RNA, 32 nt, Homo Sapiens
acuggggcucagagccggggugggguggcugc

SEQ ID NO: 58671 - RNA, 32 nt, Homo Sapiens
uuuguguuauuaacagaagagggagaaauguc

SEQ ID NO: 58672 - RNA, 32 nt, Homo Sapiens
uuuuauauuacuauaauaucugcaucuuguaa

SEQ ID NO: 58673 - RNA, 29 nt, Homo Sapiens
ccauuauggaguuuauaacucuaggacca

SEQ ID NO: 58674 - RNA, 32 nt, Homo Sapiens
agcagacuagagaaaacucuacaggagcaaga

SEQ ID NO: 58675 - RNA, 32 nt, Homo Sapiens
aaccgagaaugggagcccucccugccccaccg

SEQ ID NO: 58676 - RNA, 32 nt, Homo Sapiens
ugaaauucagacaaaaucacuggcaccaaaaa

SEQ ID NO: 58677 - RNA, 32 nt, Homo Sapiens
uuguuucuggguaagggagauguuaggagaaa

SEQ ID NO: 58678 - RNA, 32 nt, Homo Sapiens
cuccuccucugaucuccuuuccugcuucaaaa

SEQ ID NO: 58679 - RNA, 32 nt, Homo Sapiens
auggagaggugagguggggugcccugggcagg

SEQ ID NO: 58680 - RNA, 32 nt, Homo Sapiens
ucgccagcggcuucuggcaggccacagcuauu

SEQ ID NO: 58681 - RNA, 32 nt, Homo Sapiens
ggaugucccuggauaguccacugugugcagag

SEQ ID NO: 58682 - RNA, 32 nt, Homo Sapiens
aguucuccaagccccugccuuggucagcaucc

SEQ ID NO: 58683 - RNA, 32 nt, Homo Sapiens
gguuucuugggucugauguacagugugaauaa

SEQ ID NO: 58684 - RNA, 32 nt, Homo Sapiens
guaugucaaauacagguuaaaauaucagggca

SEQ ID NO: 58685 - RNA, 30 nt, Homo Sapiens
gguggaagaagaggcggcggcggcgggggu

SEQ ID NO: 58686 - RNA, 32 nt, Homo Sapiens
gcaagccagauccugaugugaaaaaagagauc

SEQ ID NO: 58687 - RNA, 32 nt, Homo Sapiens
cuccgagcugucuccgcggccucgcgcccggc

SEQ ID NO: 58688 - RNA, 32 nt, Homo Sapiens
gaaucuggguaauggaagggagaaugggcucg

SEQ ID NO: 58689 - RNA, 32 nt, Homo Sapiens
aagaauuguuuucucuguuuuaaugugucaug

SEQ ID NO: 58690 - RNA, 32 nt, Homo Sapiens
aaccauuuuucuuucugcuuuuauugaaacug

SEQ ID NO: 58691 - RNA, 32 nt, Homo Sapiens
gugaagaaauugcauuugauaacugcuauuca

SEQ ID NO: 58692 - RNA, 32 nt, Homo Sapiens
uuacgaagaucugcauuguauuuuggaauuug

SEQ ID NO: 58693 - RNA, 32 nt, Homo Sapiens
aauaaauguuccugcagccugagauuucaggu

SEQ ID NO: 58694 - RNA, 32 nt, Homo Sapiens
uguuagcauaaugugaggagguggagagacag

SEQ ID NO: 58695 - RNA, 32 nt, Homo Sapiens
ggcucccaacugugcccuuccccucuccccug

SEQ ID NO: 58696 - RNA, 32 nt, Homo Sapiens
gcaaccaucaaucccgucuccuccugccuccu

SEQ ID NO: 58697 - RNA, 32 nt, Homo Sapiens
cauacugucuacacaucagaccauaguugcuu

SEQ ID NO: 58698 - RNA, 32 nt, Homo Sapiens
ugggaacuagggggcugcuggugggaaauggg

SEQ ID NO: 58699 - RNA, 32 nt, Homo Sapiens
auuuaaaugaauuuggaagaguagauucccau

SEQ ID NO: 58700 - RNA, 32 nt, Homo Sapiens
ucugcuguagucuauuugcuguauaugcugaa

SEQ ID NO: 58701 - RNA, 32 nt, Homo Sapiens
uuuaacagugcuuuugaaguuuauacagaaag

SEQ ID NO: 58702 - RNA, 32 nt, Homo Sapiens
ucccggaggaacccauuugugcucugcuugga

SEQ ID NO: 58703 - RNA, 32 nt, Homo Sapiens
uuuauaggaucuuuaaaacauuuuuaaugaac

SEQ ID NO: 58704 - RNA, 32 nt, Homo Sapiens
cgagccuucggguccacaaacggauccacacu

SEQ ID NO: 58705 - RNA, 32 nt, Homo Sapiens
guuuagagacagugggcuacagcggaaagggu

SEQ ID NO: 58706 - RNA, 32 nt, Homo Sapiens
ucccgggacugggacauguuugcaauaaagga

SEQ ID NO: 58707 - RNA, 32 nt, Homo Sapiens
gccuuuucuaacugcuuuucuuguuacugaaa

SEQ ID NO: 58708 - RNA, 32 nt, Homo Sapiens
guuacuguccagucucuacacaugcuguccuu

SEQ ID NO: 58709 - RNA, 32 nt, Homo Sapiens
gccucuucacugccacccacaccccaggguga

SEQ ID NO: 58710 - RNA, 32 nt, Homo Sapiens
gcugcccucugcccccaacacacacacauauc

SEQ ID NO: 58711 - RNA, 32 nt, Homo Sapiens
cucggucaccucagagagcguggcggggagcg

SEQ ID NO: 58712 - RNA, 32 nt, Homo Sapiens
gaagcaagaauggaggaauccuugacucuuac

SEQ ID NO: 58713 - RNA, 32 nt, Homo Sapiens
cuauaguaguucuagcacuuugagaggcugag

SEQ ID NO: 58714 - RNA, 32 nt, Homo Sapiens
aacugauaaaagacagcaauaaaagaccagug

SEQ ID NO: 58715 - RNA, 32 nt, Homo Sapiens
uucguaggcuagguguuauuaaggguugacac

SEQ ID NO: 58716 - RNA, 32 nt, Homo Sapiens
cccagcccgccccugcaguucccggccucguc

SEQ ID NO: 58717 - RNA, 32 nt, Homo Sapiens
aucaaaacagaaaacaucagggagauguacaa

SEQ ID NO: 58718 - RNA, 32 nt, Homo Sapiens
aaggugagggugagcagagauguguguggaca

SEQ ID NO: 58719 - RNA, 32 nt, Homo Sapiens
augcuuuauucucuucuuuaauaaaaaaugca

SEQ ID NO: 58720 - RNA, 32 nt, Homo Sapiens
gauucuggaaaaccuuggaugggccuucgucc

SEQ ID NO: 58721 - RNA, 32 nt, Homo Sapiens
cugcccaaacaaaacaggacaucugugaccgc

SEQ ID NO: 58722 - RNA, 32 nt, Homo Sapiens
ggauggccagcugccagagcugcgggaagacg

SEQ ID NO: 58723 - RNA, 28 nt, Homo Sapiens
guaagauuuugucauauguguucauaga

SEQ ID NO: 58724 - RNA, 32 nt, Homo Sapiens
ucuguuagaaucacaucugugcuuuucuugag

SEQ ID NO: 58725 - RNA, 32 nt, Homo Sapiens
ugcgcaugcgugguuccggggcgaagggaacg

SEQ ID NO: 58726 - RNA, 32 nt, Homo Sapiens
ucucugggggauuugaggguagaggcagggga

SEQ ID NO: 58727 - RNA, 32 nt, Homo Sapiens
cugcaacccaggcccugccauucuucugucua

SEQ ID NO: 58728 - RNA, 32 nt, Homo Sapiens
cugcccccugcgccuggccuccgagggcuuuc

SEQ ID NO: 58729 - RNA, 32 nt, Homo Sapiens
uucuuucuuuccucuuuccccaggccgccacu

SEQ ID NO: 58730 - RNA, 32 nt, Homo Sapiens
agauaaugaaguucuaaugaacuauuucuccc

SEQ ID NO: 58731 - RNA, 32 nt, Homo Sapiens
caucauggcaacaguggguuccuccuucugca

SEQ ID NO: 58732 - RNA, 32 nt, Homo Sapiens
uuguuccuaaggaaacaaaaacagaaaacgaa

SEQ ID NO: 58733 - RNA, 32 nt, Homo Sapiens
aaauacagccucagccggggccaccagcacug

SEQ ID NO: 58734 - RNA, 32 nt, Homo Sapiens
caagguugggcugcuucccaccccugccuguu

SEQ ID NO: 58735 - RNA, 32 nt, Homo Sapiens
uuuuuucuauaaggauguauacaaauaaaaga

SEQ ID NO: 58736 - RNA, 32 nt, Homo Sapiens
uuacaagugugagccaccacgccaagccugac

SEQ ID NO: 58737 - RNA, 32 nt, Homo Sapiens
ugauguugauaaaaugugguuucaaauguugu

SEQ ID NO: 58738 - RNA, 32 nt, Homo Sapiens
agggggcgaaggcggcgguggugaggaagaua

SEQ ID NO: 58739 - RNA, 32 nt, Homo Sapiens
ggucuaugaagucuuauuuuauaaugaaacug

SEQ ID NO: 58740 - RNA, 32 nt, Homo Sapiens
acacccuucacucuccuuuuucugggucccuu

SEQ ID NO: 58741 - RNA, 32 nt, Homo Sapiens
ucuuuuucuuuuucuuuuucuuuuuuuuuuuu

SEQ ID NO: 58742 - RNA, 32 nt, Homo Sapiens
aagagugagaugggauaacauagccccugcuu

SEQ ID NO: 58743 - RNA, 32 nt, Homo Sapiens
guaguagaacuaauagcuuuaacaggagaaua

SEQ ID NO: 58744 - RNA, 32 nt, Homo Sapiens
gacaccaagaguagaaagauuaagugacaagc

SEQ ID NO: 58745 - RNA, 32 nt, Homo Sapiens
aaacauuguacccagcuuuuuaaaagagagaa

SEQ ID NO: 58746 - RNA, 32 nt, Homo Sapiens
auagccuuuuauuauuuuucucuucuuuuaag

SEQ ID NO: 58747 - RNA, 32 nt, Homo Sapiens
gagcagaaaaggaauugaggugggcaggcaga

SEQ ID NO: 58748 - RNA, 32 nt, Homo Sapiens
ggggccaacaaggcuuccagcuggaugugugu

SEQ ID NO: 58749 - RNA, 32 nt, Homo Sapiens
aaggggcuggugacccuggugcuguggaacaa

SEQ ID NO: 58750 - RNA, 32 nt, Homo Sapiens
agagggauggcaucugcccaccccaccccuug

SEQ ID NO: 58751 - RNA, 29 nt, Homo Sapiens
cuggguaggaggguggccagauucacaga

SEQ ID NO: 58752 - RNA, 32 nt, Homo Sapiens
cuuagggaggcugggggaaaagguuagauuuu

SEQ ID NO: 58753 - RNA, 32 nt, Homo Sapiens
agcagacagacucuguuuggccuagaggugug

SEQ ID NO: 58754 - RNA, 32 nt, Homo Sapiens
uccauuucucaguggcuucuccauccucauuu

SEQ ID NO: 58755 - RNA, 32 nt, Homo Sapiens
ccccuaaugaauuaaacacaaacagcgacaga

SEQ ID NO: 58756 - RNA, 32 nt, Homo Sapiens
ucuuccuuccccugcauagagaauaagcuggu

SEQ ID NO: 58757 - RNA, 32 nt, Homo Sapiens
aaauuacgagguggcgaagagugcuggagcgc

SEQ ID NO: 58758 - RNA, 32 nt, Homo Sapiens
accguguaucuggagaccauguguguaacggg

SEQ ID NO: 58759 - RNA, 32 nt, Homo Sapiens
agacacagacuacaauuuuagauggaagcuga

SEQ ID NO: 58760 - RNA, 32 nt, Homo Sapiens
gaagaaauugguuaaguccuaacuuucaaugu

SEQ ID NO: 58761 - RNA, 32 nt, Homo Sapiens
aguccgagcggcgggcggagucugcaggaugg

SEQ ID NO: 58762 - RNA, 32 nt, Homo Sapiens
gugcugaugaugccgucaugcugcuggccuga

SEQ ID NO: 58763 - RNA, 32 nt, Homo Sapiens
ccaucuuuuuucuggaguuuuaauaguuguuu

SEQ ID NO: 58764 - RNA, 32 nt, Homo Sapiens
cugaccaacaaauaaacacauguugccaagau

SEQ ID NO: 58765 - RNA, 32 nt, Homo Sapiens
gugcuaacuuuuucuguaaaucugaaauaaaa

SEQ ID NO: 58766 - RNA, 32 nt, Homo Sapiens
aucagaacacuggaguggugguguuggugaaa

SEQ ID NO: 58767 - RNA, 30 nt, Homo Sapiens
auuuuuaguaucccugugaauuacugucac

SEQ ID NO: 58768 - RNA, 32 nt, Homo Sapiens
uacauaaaaaggaaaagaaaguagacauuuua

SEQ ID NO: 58769 - RNA, 32 nt, Homo Sapiens
ccucacugucgcugccgagauccacagucggu

SEQ ID NO: 58770 - RNA, 32 nt, Homo Sapiens
caagagaaucauauaaauuaagcuuuauaaug

SEQ ID NO: 58771 - RNA, 32 nt, Homo Sapiens
agccgccgccucugcguccgcgcgucgcugcu

SEQ ID NO: 58772 - RNA, 32 nt, Homo Sapiens
auaaaagaggauguuagaaauggcaaagggca

SEQ ID NO: 58773 - RNA, 32 nt, Homo Sapiens
guccccggguggcgagggggguucugaguucc

SEQ ID NO: 58774 - RNA, 32 nt, Homo Sapiens
ggcggggcccggggcugucaaggagaaaaaca

SEQ ID NO: 58775 - RNA, 32 nt, Homo Sapiens
uggaacgccccggcugggugguguccgggcgu

SEQ ID NO: 58776 - RNA, 32 nt, Homo Sapiens
ucuggugaugaaauaucuacuaauguaucugu

SEQ ID NO: 58777 - RNA, 32 nt, Homo Sapiens
uuugagggcuccuguggcaaauucccggauua

SEQ ID NO: 58778 - RNA, 32 nt, Homo Sapiens
uguuuaaaacaguaaaugaauaaauuugcuga

SEQ ID NO: 58779 - RNA, 32 nt, Homo Sapiens
uuuuuuaaaaauuaaaacuuuaauaaaacagu

SEQ ID NO: 58780 - RNA, 32 nt, Homo Sapiens
acaacgacugcuucccaauagauggaagcaaa

SEQ ID NO: 58781 - RNA, 32 nt, Homo Sapiens
auuauuaucacuguuuucuugggacaacauca

SEQ ID NO: 58782 - RNA, 32 nt, Homo Sapiens
uccaccuugacaaaaugguugacugagaaaac

SEQ ID NO: 58783 - RNA, 32 nt, Homo Sapiens
aguucugcaauaacaguuuuaagaugggcaua

SEQ ID NO: 58784 - RNA, 32 nt, Homo Sapiens
gaagugagcagcugugguaauguacuuccaaa

SEQ ID NO: 58785 - RNA, 32 nt, Homo Sapiens
cagccaagaagaaaaggaaaaaauaaugaaau

SEQ ID NO: 58786 - RNA, 32 nt, Homo Sapiens
agcggugaccgcccggcccgccguucuucugc

SEQ ID NO: 58787 - RNA, 32 nt, Homo Sapiens
cuguaaucucaacacuuugggaggccaaggug

SEQ ID NO: 58788 - RNA, 32 nt, Homo Sapiens
gccuccccgccuuuucugcagagcuccgcccu

SEQ ID NO: 58789 - RNA, 32 nt, Homo Sapiens
gacaugcucuacagugcucagucuuugagguc

SEQ ID NO: 58790 - RNA, 32 nt, Homo Sapiens
uauuccucuggcaaacuuuucuuucuuuucuu

SEQ ID NO: 58791 - RNA, 32 nt, Homo Sapiens
uuugaugagggauuggaauguggaggaauucu

SEQ ID NO: 58792 - RNA, 32 nt, Homo Sapiens
auuuucaucaccccaaaacgaaacccauaccc

SEQ ID NO: 58793 - RNA, 32 nt, Homo Sapiens
cuacgaugagggauggagguagcugcaggcuc

SEQ ID NO: 58794 - RNA, 32 nt, Homo Sapiens
auucaaauaaaccauuuuguauguuuggauuu

SEQ ID NO: 58795 - RNA, 32 nt, Homo Sapiens
acacagguucccuccuuccaauuccaaagcug

SEQ ID NO: 58796 - RNA, 32 nt, Homo Sapiens
uaacuugguguuugucuaucaauugcaagcaa

SEQ ID NO: 58797 - RNA, 32 nt, Homo Sapiens
aguuuggcauuugacauuaaugugagcagugg

SEQ ID NO: 58798 - RNA, 32 nt, Homo Sapiens
guguaucaucccuuuuaaccgugccuaacaac

SEQ ID NO: 58799 - RNA, 32 nt, Homo Sapiens
ccgaugcuguuguuuccuacuuuggagacaaa

SEQ ID NO: 58800 - RNA, 31 nt, Homo Sapiens
uauagugucacgguuaggauaugggcuaugg

SEQ ID NO: 58801 - RNA, 32 nt, Homo Sapiens
gcgaggagggacgcugggccugcccggugcgc

SEQ ID NO: 58802 - RNA, 32 nt, Homo Sapiens
uuuuaucguuuucuguuguugcugugguggag

SEQ ID NO: 58803 - RNA, 32 nt, Homo Sapiens
cuaaaauagaaaguuugcuggagaaagcgucu

SEQ ID NO: 58804 - RNA, 32 nt, Homo Sapiens
acucgccccccgcccuccgccccccuccacgu

SEQ ID NO: 58805 - RNA, 32 nt, Homo Sapiens
uuucaugugcugucauuucugaagauaagaga

SEQ ID NO: 58806 - RNA, 32 nt, Homo Sapiens
uuauacccuaaaaaauguuuuuaagguagugu

SEQ ID NO: 58807 - RNA, 32 nt, Homo Sapiens
acuaagcgggcucuaucgcucagggcgacagg

SEQ ID NO: 58808 - RNA, 32 nt, Homo Sapiens
gacgguaucgauaaguuuuuuuuuuuuuuuuu

SEQ ID NO: 58809 - RNA, 32 nt, Homo Sapiens
aagauucuguuucgaauauagccacagaaaua

SEQ ID NO: 58810 - RNA, 32 nt, Homo Sapiens
cuuauucuggcauaaauauuaauagcaccacu

SEQ ID NO: 58811 - RNA, 32 nt, Homo Sapiens
caguuuuaccaaagaaccaauuccuugaaugu

SEQ ID NO: 58812 - RNA, 32 nt, Homo Sapiens
uuaaguagcugagacuacaggugcgcaccacc

SEQ ID NO: 58813 - RNA, 32 nt, Homo Sapiens
aaguuuauaucauguugguguauaucauuaua

SEQ ID NO: 58814 - RNA, 32 nt, Homo Sapiens
uggaaaauuuucuccaaauacaauagaggaga

SEQ ID NO: 58815 - RNA, 32 nt, Homo Sapiens
gcucccugagcgccccgcaccgacauggcggc

SEQ ID NO: 58816 - RNA, 32 nt, Homo Sapiens
aggauggugaucggggugggauggccagagga

SEQ ID NO: 58817 - RNA, 32 nt, Homo Sapiens
ccguuguguacagaauuuuucuucauuaauuu

SEQ ID NO: 58818 - RNA, 32 nt, Homo Sapiens
caagaaugcacauguauaaaguuuacauaaag

SEQ ID NO: 58819 - RNA, 32 nt, Homo Sapiens
cugaaaccauugcuacugggaaggguggcucc

SEQ ID NO: 58820 - RNA, 32 nt, Homo Sapiens
gcuccagcugacaggcaccucuccaggccccg

SEQ ID NO: 58821 - RNA, 32 nt, Homo Sapiens
gaccccggguggcggacgggagcccucccccc

SEQ ID NO: 58822 - RNA, 32 nt, Homo Sapiens
cucuuccauuccucgagcuacuccagggcuua

SEQ ID NO: 58823 - RNA, 32 nt, Homo Sapiens
ccaccuuccgccugauggaggcuggagaacgg

SEQ ID NO: 58824 - RNA, 32 nt, Homo Sapiens
ucauuucugaccaagcuucuauuaauguuauu

SEQ ID NO: 58825 - RNA, 32 nt, Homo Sapiens
gccuucucuguuucuggggccucccccaccau

SEQ ID NO: 58826 - RNA, 32 nt, Homo Sapiens
uaggucagagcagagguggaaaaacagcaugu

SEQ ID NO: 58827 - RNA, 32 nt, Homo Sapiens
uucuaaauuccuuuuauuaauuccuggcuuga

SEQ ID NO: 58828 - RNA, 32 nt, Homo Sapiens
auaagaggggcgggggcgggguccugggggcc

SEQ ID NO: 58829 - RNA, 32 nt, Homo Sapiens
aucggcgucgccucggccuccguaacccccgc

SEQ ID NO: 58830 - RNA, 32 nt, Homo Sapiens
aauuagccgggcgcgguggcgggugccuguaa

SEQ ID NO: 58831 - RNA, 32 nt, Homo Sapiens
cgccgggaggccacgggugcugcugacgggcg

SEQ ID NO: 58832 - RNA, 32 nt, Homo Sapiens
uuuccgcauguuaugggagagccccuggggcg

SEQ ID NO: 58833 - RNA, 32 nt, Homo Sapiens
cgcacacaucagugcacacggaugcacagaga

SEQ ID NO: 58834 - RNA, 32 nt, Homo Sapiens
gcagccuaguuggucuuggagagauggggaag

SEQ ID NO: 58835 - RNA, 32 nt, Homo Sapiens
gcauacuugacaacacagggaauaccguggau

SEQ ID NO: 58836 - RNA, 32 nt, Homo Sapiens
aaaaaccuauuauggacugaauuguguuccuc

SEQ ID NO: 58837 - RNA, 32 nt, Homo Sapiens
uauccgguucauggaucugaaguaagaucagc

SEQ ID NO: 58838 - RNA, 32 nt, Homo Sapiens
auaccugggacuucaggcacgcgccacuacac

SEQ ID NO: 58839 - RNA, 32 nt, Homo Sapiens
cauaauuuuuaaaaauacauucauugucuuca

SEQ ID NO: 58840 - RNA, 32 nt, Homo Sapiens
ugcccccugccaggcugagggacagugacaca

SEQ ID NO: 58841 - RNA, 32 nt, Homo Sapiens
ugccagcugucauggcaaucguguuucccauc

SEQ ID NO: 58842 - RNA, 32 nt, Homo Sapiens
ccaagggaaccucagcaugccugccagcgucu

SEQ ID NO: 58843 - RNA, 32 nt, Homo Sapiens
cugugggggccaccccuccacccccaccccca

SEQ ID NO: 58844 - RNA, 32 nt, Homo Sapiens
gaucuguguuuguuauacugguuguaauuaau

SEQ ID NO: 58845 - RNA, 32 nt, Homo Sapiens
cucauuuauagcacgucuccuugauuuuuggu

SEQ ID NO: 58846 - RNA, 32 nt, Homo Sapiens
cuggggcugggcgggggccauggcgcugccau

SEQ ID NO: 58847 - RNA, 32 nt, Homo Sapiens
caaaguguucuuccuccugucaguucaguugu

SEQ ID NO: 58848 - RNA, 32 nt, Homo Sapiens
caaaaauaaucccaacuguuugaaaguucgaa

SEQ ID NO: 58849 - RNA, 32 nt, Homo Sapiens
cugcaauaaacucaaaucacaugucugcaaaa

SEQ ID NO: 58850 - RNA, 32 nt, Homo Sapiens
cucugacugugucaccaaggggcucacaucuu

SEQ ID NO: 58851 - RNA, 32 nt, Homo Sapiens
uaaagauuuuuccucacaauuuaaauccauag

SEQ ID NO: 58852 - RNA, 30 nt, Homo Sapiens
ccaugccucuauguuacccaucugugucuc

SEQ ID NO: 58853 - RNA, 27 nt, Homo Sapiens
uaauggcgggcgcugcagaagaugcgc

SEQ ID NO: 58854 - RNA, 32 nt, Homo Sapiens
ucgcggcccaggggaguggcgaggggcgcccc

SEQ ID NO: 58855 - RNA, 32 nt, Homo Sapiens
cuaauaaggcuuuaguguauuuauuuauuuau

SEQ ID NO: 58856 - RNA, 32 nt, Homo Sapiens
cuaauacuggaauuugugcuauuaucuuccuc

SEQ ID NO: 58857 - RNA, 32 nt, Homo Sapiens
uuucuguugcuuacuguuugcucugagaagaa

SEQ ID NO: 58858 - RNA, 30 nt, Homo Sapiens
ccuggugcuccccagccgccggcccgcucc

SEQ ID NO: 58859 - RNA, 32 nt, Homo Sapiens
cgggcugagccgcgcggagggcccgggacgug

SEQ ID NO: 58860 - RNA, 32 nt, Homo Sapiens
aucaagaaugcaauuuuauuuacaauagucac

SEQ ID NO: 58861 - RNA, 32 nt, Homo Sapiens
aguuucccuuuacuuucagggauuggucaggg

SEQ ID NO: 58862 - RNA, 32 nt, Homo Sapiens
uggaagugugacucaaucuugccugccuucug

SEQ ID NO: 58863 - RNA, 32 nt, Homo Sapiens
uggccuuccagaugggagucauauucccacac

SEQ ID NO: 58864 - RNA, 32 nt, Homo Sapiens
accaccgccuccccgcgacgccccaguccagu

SEQ ID NO: 58865 - RNA, 32 nt, Homo Sapiens
uucuuucaaggguaaaaaccuuguuucauuca

SEQ ID NO: 58866 - RNA, 32 nt, Homo Sapiens
gagggcacaggccuggccuucaucgucuucac

SEQ ID NO: 58867 - RNA, 32 nt, Homo Sapiens
cuucccuuucugcuuguguuaaguauguguaa

SEQ ID NO: 58868 - RNA, 27 nt, Homo Sapiens
aauaugccagacuucagcccccaagga

SEQ ID NO: 58869 - RNA, 32 nt, Homo Sapiens
cgggccccuggugaugggguuacguggggugc

SEQ ID NO: 58870 - RNA, 32 nt, Homo Sapiens
auuugcccauucuuuuucucugcagugcauuu

SEQ ID NO: 58871 - RNA, 32 nt, Homo Sapiens
agacugucugagggcagccauguucuguacca

SEQ ID NO: 58872 - RNA, 32 nt, Homo Sapiens
aacuuaacaauauauauaggauauauacccuu

SEQ ID NO: 58873 - RNA, 32 nt, Homo Sapiens
gaggggcgacagaacaugauguugacacgggc

SEQ ID NO: 58874 - RNA, 32 nt, Homo Sapiens
cuccugccucccagccuucucucuaggcccug

SEQ ID NO: 58875 - RNA, 32 nt, Homo Sapiens
ccagauaccaaguuuuguuugccacgauagga

SEQ ID NO: 58876 - RNA, 32 nt, Homo Sapiens
aagguugaagugauaagaagaucuuugucaca

SEQ ID NO: 58877 - RNA, 32 nt, Homo Sapiens
aaauacuauuccugcuaauauuucauauuuaa

SEQ ID NO: 58878 - RNA, 32 nt, Homo Sapiens
ucaccuuccgccuuuacuguaagcuuccugag

SEQ ID NO: 58879 - RNA, 32 nt, Homo Sapiens
ucaugauguaaauuaaauaguaaucaugauuc

SEQ ID NO: 58880 - RNA, 32 nt, Homo Sapiens
ggucguggucugugcuuuuguaaacgaacaga

SEQ ID NO: 58881 - RNA, 32 nt, Homo Sapiens
ggcggcuccgcggcgcacgcacgcgcugagcg

SEQ ID NO: 58882 - RNA, 32 nt, Homo Sapiens
uucuuugagcugggccgauagauccagcugaa

SEQ ID NO: 58883 - RNA, 32 nt, Homo Sapiens
uuaccugacuuccaauuauucaacagagcuac

SEQ ID NO: 58884 - RNA, 29 nt, Homo Sapiens
guuuuguuuuguuaagaccacaaacugua

SEQ ID NO: 58885 - RNA, 32 nt, Homo Sapiens
ggcacgggugucacggccaggcagaugaccuc

SEQ ID NO: 58886 - RNA, 32 nt, Homo Sapiens
uaaugucaugauuuacucauuaaacuuugauu

SEQ ID NO: 58887 - RNA, 32 nt, Homo Sapiens
guuuccuaacugugauuuguagauuuacuuuu

SEQ ID NO: 58888 - RNA, 32 nt, Homo Sapiens
uucuuuuuguguuaugcacuuaauuuuaugac

SEQ ID NO: 58889 - RNA, 32 nt, Homo Sapiens
gguggagauaaaaguugauuugcucuaaaaaa

SEQ ID NO: 58890 - RNA, 32 nt, Homo Sapiens
ggaagugcaguaauuguuauaaaauuaaucag

SEQ ID NO: 58891 - RNA, 32 nt, Homo Sapiens
ggcuggagaagcugggcagccuggggucgugg

SEQ ID NO: 58892 - RNA, 32 nt, Homo Sapiens
aagaugaaggagggauuuggggauaaacaaua

SEQ ID NO: 58893 - RNA, 32 nt, Homo Sapiens
gcugauggaaaauuauuuuaaacacaaaaucc

SEQ ID NO: 58894 - RNA, 32 nt, Homo Sapiens
acuuugggagacggagguggauggaucacuug

SEQ ID NO: 58895 - RNA, 32 nt, Homo Sapiens
uucuaugcaagauaagagauuaccaacauuac

SEQ ID NO: 58896 - RNA, 32 nt, Homo Sapiens
cacgcuggcgcgagccccguccuccuucgccg

SEQ ID NO: 58897 - RNA, 32 nt, Homo Sapiens
aauguguuaccuauuaaauuguaacucagcaa

SEQ ID NO: 58898 - RNA, 32 nt, Homo Sapiens
cccccaggacggguguugucuagggcuugcug

SEQ ID NO: 58899 - RNA, 32 nt, Homo Sapiens
uaaaauuuucuuuuuggaaauuaauaaaucca

SEQ ID NO: 58900 - RNA, 32 nt, Homo Sapiens
gaucuguguaaaaucugacauaaaaacagugc

SEQ ID NO: 58901 - RNA, 32 nt, Homo Sapiens
ggcugacggagguggcggggcuagagguguag

SEQ ID NO: 58902 - RNA, 32 nt, Homo Sapiens
ccccgacccgcggauggcagucuggaauaaag

SEQ ID NO: 58903 - RNA, 32 nt, Homo Sapiens
ucuggagcgcacggagcgcagaggcccggcag

SEQ ID NO: 58904 - RNA, 32 nt, Homo Sapiens
cuggggacgggggccgaguagcgccuuccccg

SEQ ID NO: 58905 - RNA, 32 nt, Homo Sapiens
ccagugucuuccuucucuucugauggaaucau

SEQ ID NO: 58906 - RNA, 32 nt, Homo Sapiens
auuucuagaccauaaagcaguuuuucacaaau

SEQ ID NO: 58907 - RNA, 32 nt, Homo Sapiens
uggccuucccuaaaaucagggaauuguuuuaa

SEQ ID NO: 58908 - RNA, 32 nt, Homo Sapiens
cucaucacuaggaauauagacaaaugacuguc

SEQ ID NO: 58909 - RNA, 32 nt, Homo Sapiens
cagcuguacuucugcgcaggcuccaggaguug

SEQ ID NO: 58910 - RNA, 32 nt, Homo Sapiens
uguuuaccacacgccaggucccagggaagucu

SEQ ID NO: 58911 - RNA, 32 nt, Homo Sapiens
aagucuuucuggauagagagcagugcccaggc

SEQ ID NO: 58912 - RNA, 32 nt, Homo Sapiens
aaggucggcugcggcggcggcccgagggcgcc

SEQ ID NO: 58913 - RNA, 32 nt, Homo Sapiens
gauuaaaagcuacucuggaccuacaguguccg

SEQ ID NO: 58914 - RNA, 32 nt, Homo Sapiens
cuggggccggcgcuugccacuagggcucuugu

SEQ ID NO: 58915 - RNA, 32 nt, Homo Sapiens
cacguucccgcgguugucauuccauugucaua

SEQ ID NO: 58916 - RNA, 32 nt, Homo Sapiens
aacuggcuuagacuagaguauaagggagcauu

SEQ ID NO: 58917 - RNA, 32 nt, Homo Sapiens
ucaauugcagguuuuguuuuccuccuuuaccu

SEQ ID NO: 58918 - RNA, 32 nt, Homo Sapiens
ucgcagcucgcagccggggccgggccaggcgu

SEQ ID NO: 58919 - RNA, 32 nt, Homo Sapiens
cgucccuguguccacuucuccugaccccucgg

SEQ ID NO: 58920 - RNA, 32 nt, Homo Sapiens
ugcauuuccuucccucgccauccgucguguag

SEQ ID NO: 58921 - RNA, 32 nt, Homo Sapiens
aaguuuuauuuuuccuugccagggucagucag

SEQ ID NO: 58922 - RNA, 32 nt, Homo Sapiens
uggcaccuucugggccagcagcuguggccggu

SEQ ID NO: 58923 - RNA, 29 nt, Homo Sapiens
accgaaugucaggauugaaagcugccucc

SEQ ID NO: 58924 - RNA, 32 nt, Homo Sapiens
cuucgcuucuuugccucuccccggggggacca

SEQ ID NO: 58925 - RNA, 31 nt, Homo Sapiens
ccaaaaccucccaucgcuccagggcugcuga

SEQ ID NO: 58926 - RNA, 31 nt, Homo Sapiens
uucgugugaaacaucuucagggugggaaagg

SEQ ID NO: 58927 - RNA, 32 nt, Homo Sapiens
uucucuccccagcagagacugacagccacugu

SEQ ID NO: 58928 - RNA, 32 nt, Homo Sapiens
gcuaauucuguggucaguauucaauguuuuuu

SEQ ID NO: 58929 - RNA, 32 nt, Homo Sapiens
gggugauauagauaaacuuacuagauauaaau

SEQ ID NO: 58930 - RNA, 32 nt, Homo Sapiens
aaaauagcugggcauugucauggcaugcgccu

SEQ ID NO: 58931 - RNA, 32 nt, Homo Sapiens
gacugaucuuccauuucuuuuucuuuguuccc

SEQ ID NO: 58932 - RNA, 32 nt, Homo Sapiens
aaauacaaaaguguagcaacaacugaguuugc

SEQ ID NO: 58933 - RNA, 32 nt, Homo Sapiens
uggcacgugggaaggaagaaaaaaggcuacug

SEQ ID NO: 58934 - RNA, 32 nt, Homo Sapiens
aguggaggcggcuccgcgcgcgucgcugcuag

SEQ ID NO: 58935 - RNA, 32 nt, Homo Sapiens
aucucugggauuugaauggggauuguauccca

SEQ ID NO: 58936 - RNA, 32 nt, Homo Sapiens
cgauauuuuuaaagaucuguaaguaacuucac

SEQ ID NO: 58937 - RNA, 32 nt, Homo Sapiens
cgggagucucaguuguaaaaccuucccucauu

SEQ ID NO: 58938 - RNA, 32 nt, Homo Sapiens
uucuuuuguaaauaaaaagcaccagguuccaa

SEQ ID NO: 58939 - RNA, 32 nt, Homo Sapiens
cauuuuggauuuuuuucuuugaauuauuggca

SEQ ID NO: 58940 - RNA, 32 nt, Homo Sapiens
cuuggagguaccucagagagguaacccagggg

SEQ ID NO: 58941 - RNA, 32 nt, Homo Sapiens
uacugccuuguacuuuucucauacaccaaaaa

SEQ ID NO: 58942 - RNA, 32 nt, Homo Sapiens
aggagcgucuggaagcugcgagccagcagaaa

SEQ ID NO: 58943 - RNA, 32 nt, Homo Sapiens
ugguuuuaaauuucuuuuuacauuguuucgaa

SEQ ID NO: 58944 - RNA, 32 nt, Homo Sapiens
ugggcaccccccaacacgguguccugccaccc

SEQ ID NO: 58945 - RNA, 30 nt, Homo Sapiens
gcaggaggagguggguggggugaaggagga

SEQ ID NO: 58946 - RNA, 32 nt, Homo Sapiens
gcuuaaucaucuuuaaacacuuuuuaaauuuc

SEQ ID NO: 58947 - RNA, 32 nt, Homo Sapiens
gcaccugcgccucggcgggccgccuggggcac

SEQ ID NO: 58948 - RNA, 32 nt, Homo Sapiens
ucagccccuggcccagccccagcaggcccuca

SEQ ID NO: 58949 - RNA, 32 nt, Homo Sapiens
acagcauuuuaucuauuuuuuauuuuaauagg

SEQ ID NO: 58950 - RNA, 32 nt, Homo Sapiens
cacuccuguagucagcaaaaccacaaacccac

SEQ ID NO: 58951 - RNA, 32 nt, Homo Sapiens
gcaaaaacgaucucaaaagugucagccuuaga

SEQ ID NO: 58952 - RNA, 32 nt, Homo Sapiens
auugggaaacgacugucccgcugcugcugggg

SEQ ID NO: 58953 - RNA, 32 nt, Homo Sapiens
ccaaccugccccacugggucccggcaggggcc

SEQ ID NO: 58954 - RNA, 31 nt, Homo Sapiens
gaaaugucacacuaaaagguauaucaaaagc

SEQ ID NO: 58955 - RNA, 32 nt, Homo Sapiens
aggcggcaccccggugcuccccgcggcucucg

SEQ ID NO: 58956 - RNA, 32 nt, Homo Sapiens
uagcauguuccucauuccccaaugacaccuca

SEQ ID NO: 58957 - RNA, 32 nt, Homo Sapiens
gaaggcggccggcgccaucuccgcggagcugg

SEQ ID NO: 58958 - RNA, 32 nt, Homo Sapiens
gccuuguccacugggggaccagcccugcagac

SEQ ID NO: 58959 - RNA, 32 nt, Homo Sapiens
ccuccgcccuguagaaggccguuucgguucuu

SEQ ID NO: 58960 - RNA, 32 nt, Homo Sapiens
auuaacauauuuuuguggcugcuuuuucuaca

SEQ ID NO: 58961 - RNA, 32 nt, Homo Sapiens
cagguggucuccugggaaaguguagaggagca

SEQ ID NO: 58962 - RNA, 32 nt, Homo Sapiens
auugugaauugccugccauggcugugacacag

SEQ ID NO: 58963 - RNA, 32 nt, Homo Sapiens
cggugaccgaccccaaaccagacuguuggugg

SEQ ID NO: 58964 - RNA, 32 nt, Homo Sapiens
cuuugcugggcuacgcagaagccccggacaug

SEQ ID NO: 58965 - RNA, 32 nt, Homo Sapiens
aaaauuguauaaaaauaugaauguuggcugca

SEQ ID NO: 58966 - RNA, 32 nt, Homo Sapiens
uucuucucuucucuccucucaaaaagcccauu

SEQ ID NO: 58967 - RNA, 32 nt, Homo Sapiens
augcuaauuuaaaaaugcagauguuuuacauu

SEQ ID NO: 58968 - RNA, 32 nt, Homo Sapiens
cggcggcggcggcggcucucggguugcgguga

SEQ ID NO: 58969 - RNA, 32 nt, Homo Sapiens
uuuauauuugaaauuuuauuuaguucuugaag

SEQ ID NO: 58970 - RNA, 32 nt, Homo Sapiens
cccuggugggacugccaagacccucaaugccc

SEQ ID NO: 58971 - RNA, 32 nt, Homo Sapiens
acaccccucccgcuccccaguccggggacuuc

SEQ ID NO: 58972 - RNA, 32 nt, Homo Sapiens
uacauugccguggcaucuuaaaagcuaucuuc

SEQ ID NO: 58973 - RNA, 32 nt, Homo Sapiens
uucuucuuuaaaaauauuuauuaaugugaaug

SEQ ID NO: 58974 - RNA, 32 nt, Homo Sapiens
cuuagggcuucccaucuguguacaucccacuu

SEQ ID NO: 58975 - RNA, 32 nt, Homo Sapiens
cccuuuaguuauuuuucuuuucacuuuuuaua

SEQ ID NO: 58976 - RNA, 32 nt, Homo Sapiens
uugccugcaauaacugaauagacacaaaugac

SEQ ID NO: 58977 - RNA, 32 nt, Homo Sapiens
gauccugcucugcaacauccacuuccugcucc

SEQ ID NO: 58978 - RNA, 32 nt, Homo Sapiens
ucucccauggucauggcuucccggccccaugg

SEQ ID NO: 58979 - RNA, 32 nt, Homo Sapiens
caagaaaaacaaaagugccagaagauguccag

SEQ ID NO: 58980 - RNA, 32 nt, Homo Sapiens
aguuccggccccaggcugcuggggugaccgcg

SEQ ID NO: 58981 - RNA, 32 nt, Homo Sapiens
cuuucucuggacuauaacuucucuacaucccc

SEQ ID NO: 58982 - RNA, 32 nt, Homo Sapiens
ccagguccugggcuggccgccgggauguugcc

SEQ ID NO: 58983 - RNA, 32 nt, Homo Sapiens
uuacuggaacagagaccucagcccaagcucag

SEQ ID NO: 58984 - RNA, 32 nt, Homo Sapiens
cgcccgcacccgucccucuccucugcaccccu

SEQ ID NO: 58985 - RNA, 31 nt, Homo Sapiens
caugggccuaugagcggucuaacuguggcca

SEQ ID NO: 58986 - RNA, 32 nt, Homo Sapiens
caaacccauaagccuacaauagaugaguauuu

SEQ ID NO: 58987 - RNA, 32 nt, Homo Sapiens
auuucggauuuuucuuuuuuggauuuuggaau

SEQ ID NO: 58988 - RNA, 32 nt, Homo Sapiens
aaggcugagguugaagaagagcagaagaggau

SEQ ID NO: 58989 - RNA, 31 nt, Homo Sapiens
cuuacuuguaacaugaaaguaguagaugcug

SEQ ID NO: 58990 - RNA, 32 nt, Homo Sapiens
ccuagaugucuccuccuccccagccuaugagu

SEQ ID NO: 58991 - RNA, 32 nt, Homo Sapiens
cuuaggagagcaggucacaaagggcaaauugu

SEQ ID NO: 58992 - RNA, 32 nt, Homo Sapiens
uccucugaugcugguuucaaccaucuauauau

SEQ ID NO: 58993 - RNA, 32 nt, Homo Sapiens
uggugggcgggggcuggaggagaggguggggg

SEQ ID NO: 58994 - RNA, 28 nt, Homo Sapiens
uuccuccaggggccgccguccggaggcg

SEQ ID NO: 58995 - RNA, 32 nt, Homo Sapiens
gcagggugggggguaucaaagaaggacgaaua

SEQ ID NO: 58996 - RNA, 29 nt, Homo Sapiens
uaagcacggggacagagacguacgugagc

SEQ ID NO: 58997 - RNA, 32 nt, Homo Sapiens
acagccuuaguaugacauccugcacaauuugu

SEQ ID NO: 58998 - RNA, 32 nt, Homo Sapiens
uuuaaaaaauaacuucauuguuuggaccugca

SEQ ID NO: 58999 - RNA, 32 nt, Homo Sapiens
cuaaggaguuguuuuucucacuuguuauuauc

SEQ ID NO: 59000 - RNA, 32 nt, Homo Sapiens
ucgaggcugcgcacccccuuucccgucagcug

SEQ ID NO: 59001 - RNA, 32 nt, Homo Sapiens
cagcuccgcgcagggagggaggcugucaccau

SEQ ID NO: 59002 - RNA, 32 nt, Homo Sapiens
aagauucuggggauuucuacaggcccuucaac

SEQ ID NO: 59003 - RNA, 32 nt, Homo Sapiens
uuggcccccuccccucccccagaccuccaccu

SEQ ID NO: 59004 - RNA, 32 nt, Homo Sapiens
cuccaagauauuuuucacaaaauagaaacuca

SEQ ID NO: 59005 - RNA, 32 nt, Homo Sapiens
accgauccgaccgcgucgcugccgcucugcuc

SEQ ID NO: 59006 - RNA, 32 nt, Homo Sapiens
uucauccguucccagacgcggagcaucacggg

SEQ ID NO: 59007 - RNA, 32 nt, Homo Sapiens
ccaaaucuccaaguucugguuccuuuuuccuu

SEQ ID NO: 59008 - RNA, 32 nt, Homo Sapiens
auauucaccagcagccucccccguugccccuc

SEQ ID NO: 59009 - RNA, 32 nt, Homo Sapiens
cuaucccgcgguuuccagcaucccaucuggcg

SEQ ID NO: 59010 - RNA, 32 nt, Homo Sapiens
uaaauugucacuacuuuuccugaucuguauaa

SEQ ID NO: 59011 - RNA, 32 nt, Homo Sapiens
ggggaugguuggaaaagauggggggugggccc

SEQ ID NO: 59012 - RNA, 32 nt, Homo Sapiens
aacagcagaaagauuaaaucuugaauuaaguc

SEQ ID NO: 59013 - RNA, 32 nt, Homo Sapiens
cagagcaggguggagagggcggugggaggcgu

SEQ ID NO: 59014 - RNA, 32 nt, Homo Sapiens
gguugaggcaaguguagaaguuacaucucuau

SEQ ID NO: 59015 - RNA, 32 nt, Homo Sapiens
agggaggagcugggcugcugagagccuagucc

SEQ ID NO: 59016 - RNA, 32 nt, Homo Sapiens
agaaggcaaccuggugcccagcgugcccagcu

SEQ ID NO: 59017 - RNA, 32 nt, Homo Sapiens
aaguuuguaaaacuucgaaaaauacuggguaa

SEQ ID NO: 59018 - RNA, 32 nt, Homo Sapiens
acauggccuuggagggcaugaagacagauacu

SEQ ID NO: 59019 - RNA, 32 nt, Homo Sapiens
uuuuaugguguaaauuuccuuugcucgauguc

SEQ ID NO: 59020 - RNA, 32 nt, Homo Sapiens
aggcuggguguuugcuccacucaguucugggg

SEQ ID NO: 59021 - RNA, 32 nt, Homo Sapiens
gagcugcaacgguggcuccggcgguggggaug

SEQ ID NO: 59022 - RNA, 32 nt, Homo Sapiens
cgcgcgggacgaagaauaaucaugggccagac

SEQ ID NO: 59023 - RNA, 32 nt, Homo Sapiens
aguugccguuugcgaggcccugggacuuuggu

SEQ ID NO: 59024 - RNA, 32 nt, Homo Sapiens
agaugaaaaaaguuccuguagauguuuugugu

SEQ ID NO: 59025 - RNA, 32 nt, Homo Sapiens
uugucuucagcccagugacaccucugaugucc

SEQ ID NO: 59026 - RNA, 32 nt, Homo Sapiens
auugcaaauugauaguuguucuagcagugaag

SEQ ID NO: 59027 - RNA, 32 nt, Homo Sapiens
gccuugucccugggggaguccugggcacagca

SEQ ID NO: 59028 - RNA, 32 nt, Homo Sapiens
acugucagaaaagaguagccugggcugucugg

SEQ ID NO: 59029 - RNA, 32 nt, Homo Sapiens
ucucgguagcagccuucgccacgccggggucu

SEQ ID NO: 59030 - RNA, 32 nt, Homo Sapiens
uuuauuuccagaagaaaggaauaucucuacuu

SEQ ID NO: 59031 - RNA, 32 nt, Homo Sapiens
aaagaaaaacaucagcgaagcagcaggccaug

SEQ ID NO: 59032 - RNA, 32 nt, Homo Sapiens
aaucccaucucuacuaaaaauacagaaauuca

SEQ ID NO: 59033 - RNA, 32 nt, Homo Sapiens
ccuuggccugcagaagcuuucagagucuucac

SEQ ID NO: 59034 - RNA, 32 nt, Homo Sapiens
cgccaccauggaucuccguguacacuaucaau

SEQ ID NO: 59035 - RNA, 32 nt, Homo Sapiens
aauguauaauuaugauaaauguuucacuugaa

SEQ ID NO: 59036 - RNA, 32 nt, Homo Sapiens
auggccuccagcugcauccauguugugcaaug

SEQ ID NO: 59037 - RNA, 32 nt, Homo Sapiens
gaaagcaguuuagcauugggaggaagcacaga

SEQ ID NO: 59038 - RNA, 32 nt, Homo Sapiens
ucaacucuagaugagcuaagggcccccaaaug

SEQ ID NO: 59039 - RNA, 32 nt, Homo Sapiens
cucagcuuggcugggaagugcuccucaccugu

SEQ ID NO: 59040 - RNA, 32 nt, Homo Sapiens
gugaccaagacacuaacaaaggcuccugcugu

SEQ ID NO: 59041 - RNA, 32 nt, Homo Sapiens
uugcuuucuuucccuuuauuuucucaucacua

SEQ ID NO: 59042 - RNA, 32 nt, Homo Sapiens
uucugacucaucuccuucucuccgucuugccu

SEQ ID NO: 59043 - RNA, 32 nt, Homo Sapiens
uggccaagaugaugaagccccgucuguacuaa

SEQ ID NO: 59044 - RNA, 32 nt, Homo Sapiens
cccgcacccuccccuaaauccccccucuucgg

SEQ ID NO: 59045 - RNA, 32 nt, Homo Sapiens
uauauaccuugcugggguggggugccaccucc

SEQ ID NO: 59046 - RNA, 32 nt, Homo Sapiens
ccuaccccaucccacagccauuuuucucucgg

SEQ ID NO: 59047 - RNA, 32 nt, Homo Sapiens
auucuucaaagccccagcccuuuuggagguua

SEQ ID NO: 59048 - RNA, 32 nt, Homo Sapiens
gcuaggugugggcgcgcuagugcucguuguag

SEQ ID NO: 59049 - RNA, 32 nt, Homo Sapiens
uaaauuuaucuacuuuguuuuauguagauuuc

SEQ ID NO: 59050 - RNA, 32 nt, Homo Sapiens
aaaccugacauuccaggcccaugaggggaaag

SEQ ID NO: 59051 - RNA, 32 nt, Homo Sapiens
ggggacauggagaggaaggggccgccuacucc

SEQ ID NO: 59052 - RNA, 32 nt, Homo Sapiens
ucugauauaucaaaccauuuguaucuaaugug

SEQ ID NO: 59053 - RNA, 32 nt, Homo Sapiens
ugagacacauucagagaaggaucagagagaaa

SEQ ID NO: 59054 - RNA, 32 nt, Homo Sapiens
ccccaugggcccagccccugcccaucuaguug

SEQ ID NO: 59055 - RNA, 32 nt, Homo Sapiens
gaacccaugacaaagaaagucauuucaacucu

SEQ ID NO: 59056 - RNA, 32 nt, Homo Sapiens
uuguaguuuuauauagaaaugauccugaacac

SEQ ID NO: 59057 - RNA, 32 nt, Homo Sapiens
gugccgaggaggaggaagaaaaacaggccgag

SEQ ID NO: 59058 - RNA, 32 nt, Homo Sapiens
gucgaggaaucuguauuauuaauagcaaccag

SEQ ID NO: 59059 - RNA, 32 nt, Homo Sapiens
cuuacguauaucaggaaaguggucugaggugg

SEQ ID NO: 59060 - RNA, 32 nt, Homo Sapiens
caggagcccuccccaagccuucagggcugcuc

SEQ ID NO: 59061 - RNA, 32 nt, Homo Sapiens
cgcgucaggccgcgacgagggcgcugagacaa

SEQ ID NO: 59062 - RNA, 32 nt, Homo Sapiens
ggcacuggacugccucuaaggacugcuaaaaa

SEQ ID NO: 59063 - RNA, 32 nt, Homo Sapiens
cuuggguacaucuuguaagacacauaaugagg

SEQ ID NO: 59064 - RNA, 32 nt, Homo Sapiens
aaaagggagacggaaauguaccaggauaaggg

SEQ ID NO: 59065 - RNA, 32 nt, Homo Sapiens
guacagaggagcucuagagggcugcguggcau

SEQ ID NO: 59066 - RNA, 32 nt, Homo Sapiens
aaaugagaaaucacuaaugcuuuuuagacuua

SEQ ID NO: 59067 - RNA, 27 nt, Homo Sapiens
augcugccuuccuucagcccagccucc

SEQ ID NO: 59068 - RNA, 32 nt, Homo Sapiens
cuuuugagacuaaaaauaaugaagaguaaaag

SEQ ID NO: 59069 - RNA, 32 nt, Homo Sapiens
ccucccugccagcucagaggcaccugcagacc

SEQ ID NO: 59070 - RNA, 32 nt, Homo Sapiens
ucuuacuuuuuggagaaaugaagucuugcuau

SEQ ID NO: 59071 - RNA, 32 nt, Homo Sapiens
gaacauacagagcugccauguucuuauuaaua

SEQ ID NO: 59072 - RNA, 32 nt, Homo Sapiens
ggguaaauguugacagaggcccugccccguuc

SEQ ID NO: 59073 - RNA, 32 nt, Homo Sapiens
cagccuccauucucacuuuccuucucaaggag

SEQ ID NO: 59074 - RNA, 32 nt, Homo Sapiens
agguuugauugguugagauuaacugguguggu

SEQ ID NO: 59075 - RNA, 32 nt, Homo Sapiens
cuauuaagguuuaaaugcuagaguagcuuaaa

SEQ ID NO: 59076 - RNA, 32 nt, Homo Sapiens
gaagggccaacaggccgaccuugcccgcuacu

SEQ ID NO: 59077 - RNA, 32 nt, Homo Sapiens
uaggcaaaaaccucagaagagccacaucacaa

SEQ ID NO: 59078 - RNA, 32 nt, Homo Sapiens
aaauagguuuaccaugugccagucuccacaaa

SEQ ID NO: 59079 - RNA, 32 nt, Homo Sapiens
ugcuuguaaaaguuucaaaauauguuuuucuc

SEQ ID NO: 59080 - RNA, 32 nt, Homo Sapiens
uggguccuggguuuucugcaaacauggaggac

SEQ ID NO: 59081 - RNA, 32 nt, Homo Sapiens
caucuaaaucaucagguuaugucugaaauaaa

SEQ ID NO: 59082 - RNA, 32 nt, Homo Sapiens
guucuuccuccagcugcaccagagcaaccucu

SEQ ID NO: 59083 - RNA, 32 nt, Homo Sapiens
gcggagggucuugccaaaggcuuuucauccua

SEQ ID NO: 59084 - RNA, 32 nt, Homo Sapiens
gauacuugaggaucuuuaguguacugcugacu

SEQ ID NO: 59085 - RNA, 32 nt, Homo Sapiens
gugggguuggcaaggggagaagcuuggaagcc

SEQ ID NO: 59086 - RNA, 32 nt, Homo Sapiens
uguaucugccuaagagcaguguuuccuuuaca

SEQ ID NO: 59087 - RNA, 32 nt, Homo Sapiens
aucucuggcagagccucugcacauaguaaggg

SEQ ID NO: 59088 - RNA, 32 nt, Homo Sapiens
aaccucaaccugacagcuuucagacagcauuc

SEQ ID NO: 59089 - RNA, 32 nt, Homo Sapiens
guuugggaguguagcuggacaccgagcaccau

SEQ ID NO: 59090 - RNA, 32 nt, Homo Sapiens
augauagugucuauggaagcaugaugagaaga

SEQ ID NO: 59091 - RNA, 32 nt, Homo Sapiens
agaccgauuacaucauucucuuguggcgggac

SEQ ID NO: 59092 - RNA, 32 nt, Homo Sapiens
gccucccaguucuggaggagccagguuccccu

SEQ ID NO: 59093 - RNA, 32 nt, Homo Sapiens
cccuggcuggacucguccacggcggcagcgau

SEQ ID NO: 59094 - RNA, 32 nt, Homo Sapiens
uaaacaggauaaacuuuugacuccccuuuugu

SEQ ID NO: 59095 - RNA, 32 nt, Homo Sapiens
ccaagcaaccucagccaaugaguccaacguca

SEQ ID NO: 59096 - RNA, 32 nt, Homo Sapiens
gaggggagcuggaagaucagcggguccccgau

SEQ ID NO: 59097 - RNA, 32 nt, Homo Sapiens
uugaccugaaguuccaagagccagguuaaaua

SEQ ID NO: 59098 - RNA, 32 nt, Homo Sapiens
aagaaguggaagaagacuuagccuaaagucag

SEQ ID NO: 59099 - RNA, 32 nt, Homo Sapiens
gaccacagccacccccggagaaggccuggucc

SEQ ID NO: 59100 - RNA, 32 nt, Homo Sapiens
cgccgcccggcggcgagaguagaggcgagguu

SEQ ID NO: 59101 - RNA, 31 nt, Homo Sapiens
uguuugaaauaaacuuagcagagucacuuuc

SEQ ID NO: 59102 - RNA, 32 nt, Homo Sapiens
ccggggcuccacgcgccgccaggggcuccgug

SEQ ID NO: 59103 - RNA, 32 nt, Homo Sapiens
aggaaaauuacauuccugguucuguauugagg

SEQ ID NO: 59104 - RNA, 32 nt, Homo Sapiens
aacucauuacuuuuuuccugugaacaguauug

SEQ ID NO: 59105 - RNA, 32 nt, Homo Sapiens
agcucucuuguuuaugcaaacgccgagcgccu

SEQ ID NO: 59106 - RNA, 32 nt, Homo Sapiens
ccggcgggcccaguguuggagagcugaagguc

SEQ ID NO: 59107 - RNA, 28 nt, Homo Sapiens
aaagggguuacagggcccaugcaagucc

SEQ ID NO: 59108 - RNA, 32 nt, Homo Sapiens
gcaauaaaccucagcccucuggccuccacuuu

SEQ ID NO: 59109 - RNA, 32 nt, Homo Sapiens
ucccuuuucuaaaaaugcaaugcacuaaaacu

SEQ ID NO: 59110 - RNA, 29 nt, Homo Sapiens
ggccauguaccgcuaccugggcgaagcgc

SEQ ID NO: 59111 - RNA, 32 nt, Homo Sapiens
acuguacacgggacuaugcuuuucucaaagcc

SEQ ID NO: 59112 - RNA, 32 nt, Homo Sapiens
ggacauccuaaaacauguguaaacuuuucaga

SEQ ID NO: 59113 - RNA, 32 nt, Homo Sapiens
accacuuggccauuuauuucuauguucacuaa

SEQ ID NO: 59114 - RNA, 32 nt, Homo Sapiens
aaccaguggagcuauucagcgugcuucaagug

SEQ ID NO: 59115 - RNA, 32 nt, Homo Sapiens
ccgguugccauggagaucugaaggggcggggu

SEQ ID NO: 59116 - RNA, 27 nt, Homo Sapiens
gccaugccaugauucuggugugcucca

SEQ ID NO: 59117 - RNA, 32 nt, Homo Sapiens
ucgagccuucggguccacaaacggauccacac

SEQ ID NO: 59118 - RNA, 32 nt, Homo Sapiens
ccugaagauaaucaaggccaguuacucaucau

SEQ ID NO: 59119 - RNA, 32 nt, Homo Sapiens
uugucuucuuugauaucucucaauagaauguu

SEQ ID NO: 59120 - RNA, 30 nt, Homo Sapiens
cgcgccugaggcggcggcggcaggagcuga

SEQ ID NO: 59121 - RNA, 32 nt, Homo Sapiens
cguggugagcuguggcgcuuccgcgucagcgc

SEQ ID NO: 59122 - RNA, 32 nt, Homo Sapiens
uagaucugcaaauaaugaggacugauguaaaa

SEQ ID NO: 59123 - RNA, 32 nt, Homo Sapiens
cucuaaugagagggcauggccugagucagaag

SEQ ID NO: 59124 - RNA, 32 nt, Homo Sapiens
caaacauauaaccuaugccaauaaaaaugucu

SEQ ID NO: 59125 - RNA, 26 nt, Homo Sapiens
cgaaagauaaagcaacauuuggacac

SEQ ID NO: 59126 - RNA, 32 nt, Homo Sapiens
ggcucaacagggcaguucugcugcucacaccu

SEQ ID NO: 59127 - RNA, 32 nt, Homo Sapiens
uuuacuugaaugcuuugccauauucaggacag

SEQ ID NO: 59128 - RNA, 32 nt, Homo Sapiens
uaacgauaaaagacagugaaagaaaauaacga

SEQ ID NO: 59129 - RNA, 32 nt, Homo Sapiens
ucugucuugcugguguggauagaaaccaggca

SEQ ID NO: 59130 - RNA, 32 nt, Homo Sapiens
uuuauuuuguuugucuuuuuaaagaagauaag

SEQ ID NO: 59131 - RNA, 32 nt, Homo Sapiens
auuuugugaacaucaguuggauuauauugcau

SEQ ID NO: 59132 - RNA, 32 nt, Homo Sapiens
aaccagaugaucucaugggacuuacccagugu

SEQ ID NO: 59133 - RNA, 32 nt, Homo Sapiens
aauaacuguuuuccaggagguauaaaccagug

SEQ ID NO: 59134 - RNA, 32 nt, Homo Sapiens
cacacuuaauaaauuaaacauuuguggaaaaa

SEQ ID NO: 59135 - RNA, 32 nt, Homo Sapiens
aguagccgccucugccgccgcggacuucccga

SEQ ID NO: 59136 - RNA, 32 nt, Homo Sapiens
gccagcggcuauaaagaagcauaggcuagacu

SEQ ID NO: 59137 - RNA, 32 nt, Homo Sapiens
ggcgcugcggccugggagccucggggagaugc

SEQ ID NO: 59138 - RNA, 32 nt, Homo Sapiens
cugaggacaaagugugauaaaaccucuggcuc

SEQ ID NO: 59139 - RNA, 32 nt, Homo Sapiens
uaugugccauuaaaaaaugacuugauuuggcu

SEQ ID NO: 59140 - RNA, 32 nt, Homo Sapiens
cgggaccgcuugcgguaccagaaagcgaacaa

SEQ ID NO: 59141 - RNA, 32 nt, Homo Sapiens
ggugagugcccccagugguuacauaugggcca

SEQ ID NO: 59142 - RNA, 32 nt, Homo Sapiens
ugcuucuaggauauacacuuuaaaagaacuca

SEQ ID NO: 59143 - RNA, 32 nt, Homo Sapiens
uuacuuuuaaacaguuggucuuuucugucuaa

SEQ ID NO: 59144 - RNA, 32 nt, Homo Sapiens
gcucgaccaagaaauugcaagauggaagcaga

SEQ ID NO: 59145 - RNA, 32 nt, Homo Sapiens
gcccgacucacagauggcgggagacagccauc

SEQ ID NO: 59146 - RNA, 30 nt, Homo Sapiens
agauucugccacugcauccuucagacaguu

SEQ ID NO: 59147 - RNA, 32 nt, Homo Sapiens
uagguggcagcugcugacuacagacaacaugg

SEQ ID NO: 59148 - RNA, 32 nt, Homo Sapiens
gaagcugcuccauuuuucaucaucuacccauc

SEQ ID NO: 59149 - RNA, 32 nt, Homo Sapiens
uaacuuaaacacagagcuauaaaaugcuggau

SEQ ID NO: 59150 - RNA, 32 nt, Homo Sapiens
uauugcacagaaaaggauuuuuaaaauuagau

SEQ ID NO: 59151 - RNA, 32 nt, Homo Sapiens
gggcagcccccucccuagagcgggauggggau

SEQ ID NO: 59152 - RNA, 32 nt, Homo Sapiens
agacaguauaagcaaaugcacaauauauuuau

SEQ ID NO: 59153 - RNA, 32 nt, Homo Sapiens
gggagcacaguuugagaucaugcugaaggcca

SEQ ID NO: 59154 - RNA, 32 nt, Homo Sapiens
auagucacuguagaauauaucuccaggaucug

SEQ ID NO: 59155 - RNA, 32 nt, Homo Sapiens
auaaaucccagagggaauaaaaacacauugcc

SEQ ID NO: 59156 - RNA, 32 nt, Homo Sapiens
cugcugguaugagacucccugggaccuagagg

SEQ ID NO: 59157 - RNA, 32 nt, Homo Sapiens
uaaguugacaccugucccuggggcuauccaca

SEQ ID NO: 59158 - RNA, 32 nt, Homo Sapiens
acggggcggcgaggaggcgccgcugcugccgg

SEQ ID NO: 59159 - RNA, 32 nt, Homo Sapiens
gugacuuccuuguugugagccccggcccggca

SEQ ID NO: 59160 - RNA, 32 nt, Homo Sapiens
agccucacccaccccaccugggcccagccagg

SEQ ID NO: 59161 - RNA, 32 nt, Homo Sapiens
gcgcucggggaaggcuggcggcggcggccgag

SEQ ID NO: 59162 - RNA, 32 nt, Homo Sapiens
gaaauuuccaugaagaaccaagucagggcagc

SEQ ID NO: 59163 - RNA, 32 nt, Homo Sapiens
aaaauggcucugcaccagccggcccccaggag

SEQ ID NO: 59164 - RNA, 32 nt, Homo Sapiens
ucaugcaggaggaggaggaggucauguccuga

SEQ ID NO: 59165 - RNA, 32 nt, Homo Sapiens
caagcuccgcaggacuuccccggagggcugcg

SEQ ID NO: 59166 - RNA, 32 nt, Homo Sapiens
ccucaggaaggugccuuaggccuguuggauuc

SEQ ID NO: 59167 - RNA, 32 nt, Homo Sapiens
caaguuccaaggaaaaggaacaucucagccgg

SEQ ID NO: 59168 - RNA, 32 nt, Homo Sapiens
gcuggggaaggagagggaauuagagauuggcu

SEQ ID NO: 59169 - RNA, 32 nt, Homo Sapiens
gccugaguugugccucuugugugcuagauuaa

SEQ ID NO: 59170 - RNA, 32 nt, Homo Sapiens
cgccacccagaccccaccggccucacguucug

SEQ ID NO: 59171 - RNA, 32 nt, Homo Sapiens
gaugggaauuguaggcauagauuucauaucaa

SEQ ID NO: 59172 - RNA, 32 nt, Homo Sapiens
gcagccucggccggcguccacgcauugccaug

SEQ ID NO: 59173 - RNA, 32 nt, Homo Sapiens
agauaaacaucaucaucuucuaagagcugauc

SEQ ID NO: 59174 - RNA, 29 nt, Homo Sapiens
cgccaugucugugagcgagaucuucgugg

SEQ ID NO: 59175 - RNA, 32 nt, Homo Sapiens
uagacagguucaaugacuugcacaaggucaca

SEQ ID NO: 59176 - RNA, 32 nt, Homo Sapiens
ccugcgcgggcucuccugguuacgacugaguc

SEQ ID NO: 59177 - RNA, 32 nt, Homo Sapiens
gggccaugccagcaggccccaccauggaaauc

SEQ ID NO: 59178 - RNA, 32 nt, Homo Sapiens
uuccucaggugcccuaucccgcgcagaagacc

SEQ ID NO: 59179 - RNA, 32 nt, Homo Sapiens
cuccgccgccggggacccgugagguuugugug

SEQ ID NO: 59180 - RNA, 30 nt, Homo Sapiens
gaggauggagguggaaggcuggagggcagg

SEQ ID NO: 59181 - RNA, 32 nt, Homo Sapiens
auucugaaagacuauugagccauugauagaaa

SEQ ID NO: 59182 - RNA, 32 nt, Homo Sapiens
ugacccagcaguuuccucugcucacucuuuuc

SEQ ID NO: 59183 - RNA, 32 nt, Homo Sapiens
gggugugacaccugcuugacagaggcagggcu

SEQ ID NO: 59184 - RNA, 32 nt, Homo Sapiens
aaacaggcgcaucggaaacucgcuuccuaugg

SEQ ID NO: 59185 - RNA, 32 nt, Homo Sapiens
cucaaggaaauacaaccuagggugccuuaaaa

SEQ ID NO: 59186 - RNA, 32 nt, Homo Sapiens
gaagcugucggaaugcagccuaaccaaagguc

SEQ ID NO: 59187 - RNA, 32 nt, Homo Sapiens
gaaagugaacaaagagaacucagaaauaauau

SEQ ID NO: 59188 - RNA, 32 nt, Homo Sapiens
guuucccucggcggcugucaagugcagccccc

SEQ ID NO: 59189 - RNA, 32 nt, Homo Sapiens
ggcagggugggcccgcacccagcguggccaug

SEQ ID NO: 59190 - RNA, 32 nt, Homo Sapiens
cugggagguccccaagaguccuggccuggcag

SEQ ID NO: 59191 - RNA, 32 nt, Homo Sapiens
gccggcggccaaaccagucacucggggaggaa

SEQ ID NO: 59192 - RNA, 32 nt, Homo Sapiens
cggccucccucccccugcagccaucccaaggc

SEQ ID NO: 59193 - RNA, 32 nt, Homo Sapiens
ucagcuaucuucugucuaucaauauuucaauc

SEQ ID NO: 59194 - RNA, 32 nt, Homo Sapiens
gcagacaggucuuuuugccauuccuccaggac

SEQ ID NO: 59195 - RNA, 32 nt, Homo Sapiens
caccuggcucacacacagccucauggguaggg

SEQ ID NO: 59196 - RNA, 32 nt, Homo Sapiens
cggagggcgggggccuucggggugggcgccca

SEQ ID NO: 59197 - RNA, 32 nt, Homo Sapiens
gcgacgguagcagcagcauggccgcgaucuau

SEQ ID NO: 59198 - RNA, 31 nt, Homo Sapiens
cucuuucuugguaauuagggacugauuuuua

SEQ ID NO: 59199 - RNA, 32 nt, Homo Sapiens
cugugcagcugacuucugugagacuggggcca

SEQ ID NO: 59200 - RNA, 32 nt, Homo Sapiens
aaggcacaaaacaaaaacuuugcucuuuuaac

SEQ ID NO: 59201 - RNA, 32 nt, Homo Sapiens
uuaguuacaaauaauuuuauuggaugcacuug

SEQ ID NO: 59202 - RNA, 32 nt, Homo Sapiens
ugaugagaccucuguagaggucaguguuuugc

SEQ ID NO: 59203 - RNA, 29 nt, Homo Sapiens
agguggcggggacaggacccugcaggacu

SEQ ID NO: 59204 - RNA, 32 nt, Homo Sapiens
ccuuucgcggccgcucuccccccuccccgaca

SEQ ID NO: 59205 - RNA, 32 nt, Homo Sapiens
aaguacccaagcccugggggcagacuuccagc

SEQ ID NO: 59206 - RNA, 30 nt, Homo Sapiens
aacagcugcuuuccugccgcccugaagggg

SEQ ID NO: 59207 - RNA, 32 nt, Homo Sapiens
cacggugccuggggcuccugugccggugggcg

SEQ ID NO: 59208 - RNA, 28 nt, Homo Sapiens
cgugcauauguguguauguguuugugcc

SEQ ID NO: 59209 - RNA, 32 nt, Homo Sapiens
ccugugggaccccaggcccacucaggggucac

SEQ ID NO: 59210 - RNA, 32 nt, Homo Sapiens
ggugaacaggaauugcugcugcugcuggagcc

SEQ ID NO: 59211 - RNA, 32 nt, Homo Sapiens
auggcaccucaggcugagggccccaauguaug

SEQ ID NO: 59212 - RNA, 32 nt, Homo Sapiens
gaaucagaguaaacaggauauugaggaaaacu

SEQ ID NO: 59213 - RNA, 32 nt, Homo Sapiens
cucggccugccaguguaccugccggcgccucg

SEQ ID NO: 59214 - RNA, 32 nt, Homo Sapiens
uccuagaggguggggauccguggugcuucuuc

SEQ ID NO: 59215 - RNA, 27 nt, Homo Sapiens
gaauuuuccuucuucagcucauuuugu

SEQ ID NO: 59216 - RNA, 32 nt, Homo Sapiens
ucauauuuuggccuugguuuugcaaugguuuu

SEQ ID NO: 59217 - RNA, 32 nt, Homo Sapiens
gauaaaagaauguuaucgaaaacuacauggaa

SEQ ID NO: 59218 - RNA, 32 nt, Homo Sapiens
uuuuuauugaacaaaaucugugcagggacuca

SEQ ID NO: 59219 - RNA, 32 nt, Homo Sapiens
gugggaccugcacugcccuuuccagccugaca

SEQ ID NO: 59220 - RNA, 32 nt, Homo Sapiens
acagcuuuuggauuuaaauuuaggucuaaaaa

SEQ ID NO: 59221 - RNA, 32 nt, Homo Sapiens
gcguccgcucgcccggacccugaggcugcugg

SEQ ID NO: 59222 - RNA, 32 nt, Homo Sapiens
cuuuuaccucaucagaagcaguggcucagcua

SEQ ID NO: 59223 - RNA, 32 nt, Homo Sapiens
acugauggugccugacauguguuuguaugggg

SEQ ID NO: 59224 - RNA, 29 nt, Homo Sapiens
gagauguaaaguuuauuguugcuucgcag

SEQ ID NO: 59225 - RNA, 32 nt, Homo Sapiens
cuccucgcuuugcaugcaugaacgugccaagc

SEQ ID NO: 59226 - RNA, 32 nt, Homo Sapiens
ccacuuaucuugaguucacuuugauguuaaau

SEQ ID NO: 59227 - RNA, 27 nt, Homo Sapiens
uuucuugcucccuucagcccccagccc

SEQ ID NO: 59228 - RNA, 32 nt, Homo Sapiens
accccgcagcggggagcgcgccagguccgcgc

SEQ ID NO: 59229 - RNA, 32 nt, Homo Sapiens
aaauaacuguguugcaucauccuccaguuugc

SEQ ID NO: 59230 - RNA, 32 nt, Homo Sapiens
ccucagagccuugggaugcagagcagcuggca

SEQ ID NO: 59231 - RNA, 32 nt, Homo Sapiens
cucauugugggaagaaaguacgagcugaaaaa

SEQ ID NO: 59232 - RNA, 32 nt, Homo Sapiens
aaauacuuuuguguauagaaaauauguauagu

SEQ ID NO: 59233 - RNA, 32 nt, Homo Sapiens
cucccugccccggcccaugccccccagggcug

SEQ ID NO: 59234 - RNA, 32 nt, Homo Sapiens
gauauauuuccugaccuuuucuuaaauggcuu

SEQ ID NO: 59235 - RNA, 32 nt, Homo Sapiens
cagcagcgcccggcuuaggacugggaguguga

SEQ ID NO: 59236 - RNA, 32 nt, Homo Sapiens
uggagcgccguucucuccugcugggacaccgc

SEQ ID NO: 59237 - RNA, 32 nt, Homo Sapiens
auuuugaaaaggaaacaugacccagcugguca

SEQ ID NO: 59238 - RNA, 32 nt, Homo Sapiens
uggugauaggcacauuuuuuaccagucuauca

SEQ ID NO: 59239 - RNA, 32 nt, Homo Sapiens
uacucagugcaauggacugaauguuagugucc

SEQ ID NO: 59240 - RNA, 32 nt, Homo Sapiens
aaagggcgaccuccuccugcuccugcuccugg

SEQ ID NO: 59241 - RNA, 32 nt, Homo Sapiens
cggugccgggcgaacauggcggcggccaccgg

SEQ ID NO: 59242 - RNA, 32 nt, Homo Sapiens
aguagguauccggagucgauugagggccagag

SEQ ID NO: 59243 - RNA, 32 nt, Homo Sapiens
ccucacucaauccuucccugcucuccacaucc

SEQ ID NO: 59244 - RNA, 32 nt, Homo Sapiens
uggugagcucagauagucucuuucucugacac

SEQ ID NO: 59245 - RNA, 32 nt, Homo Sapiens
gcuuccuggacccacccuccccguaugcacuc

SEQ ID NO: 59246 - RNA, 32 nt, Homo Sapiens
aagguuuugcuucaggauaguguuugacucca

SEQ ID NO: 59247 - RNA, 32 nt, Homo Sapiens
uuugaauaucuuccuguuaucuuuguuauuga

SEQ ID NO: 59248 - RNA, 32 nt, Homo Sapiens
caaagcccaggauggcuuggugggaguguccc

SEQ ID NO: 59249 - RNA, 32 nt, Homo Sapiens
ccaggagcuagaugaauaccugcgcaugauau

SEQ ID NO: 59250 - RNA, 32 nt, Homo Sapiens
ggugggcccagggccuuggaggggccuggaug

SEQ ID NO: 59251 - RNA, 32 nt, Homo Sapiens
ccccucgcgggcccagccgagcaacguggggc

SEQ ID NO: 59252 - RNA, 32 nt, Homo Sapiens
agaauucacacguagacgacacugccgguucc

SEQ ID NO: 59253 - RNA, 32 nt, Homo Sapiens
gccgagcgggcggcuuccuggccugggcgcuc

SEQ ID NO: 59254 - RNA, 32 nt, Homo Sapiens
guagaaaaggauugcuuaagguacucuggacu

SEQ ID NO: 59255 - RNA, 32 nt, Homo Sapiens
ccaucuucccugggguucuccuccucucccag

SEQ ID NO: 59256 - RNA, 32 nt, Homo Sapiens
gcggcgcggaauccgcauccgccgcgagugug

SEQ ID NO: 59257 - RNA, 32 nt, Homo Sapiens
ugcucuggucugggugcuggcuccaaucugcg

SEQ ID NO: 59258 - RNA, 32 nt, Homo Sapiens
uauuagaggaaaaacuuuggauucagaccuuc

SEQ ID NO: 59259 - RNA, 32 nt, Homo Sapiens
agauuuugacaagucacccauuccaggugcca

SEQ ID NO: 59260 - RNA, 32 nt, Homo Sapiens
agaugauagaaccuggaauguuaggauuuuga

SEQ ID NO: 59261 - RNA, 32 nt, Homo Sapiens
cgccgcccuccgagcucgccccggugggugug

SEQ ID NO: 59262 - RNA, 32 nt, Homo Sapiens
ucaaaugacaaguucauauauagaauuuacgg

SEQ ID NO: 59263 - RNA, 32 nt, Homo Sapiens
caugucgccuucugcuggguccuggaggucuu

SEQ ID NO: 59264 - RNA, 32 nt, Homo Sapiens
aaccuaguuuuaucuuuugauguggcaagaac

SEQ ID NO: 59265 - RNA, 32 nt, Homo Sapiens
gcggggaggguggccuggcggccuggagccgg

SEQ ID NO: 59266 - RNA, 32 nt, Homo Sapiens
caacagcacaagccccaccuuuuauuucagug

SEQ ID NO: 59267 - RNA, 32 nt, Homo Sapiens
uuucugucugagaacaaauggcacagcauccc

SEQ ID NO: 59268 - RNA, 32 nt, Homo Sapiens
cagcgcaguuccaggagacggugggaaggagg

SEQ ID NO: 59269 - RNA, 32 nt, Homo Sapiens
gaagcagaacagagcccggggcuccugagccu

SEQ ID NO: 59270 - RNA, 32 nt, Homo Sapiens
aguuuuuguaaagguauuugcauaaaauuuaa

SEQ ID NO: 59271 - RNA, 32 nt, Homo Sapiens
uguagcauagcuaagaucugguccaaaaagau

SEQ ID NO: 59272 - RNA, 32 nt, Homo Sapiens
caggaaaauuuccauaguaccuuaaugaaaaa

SEQ ID NO: 59273 - RNA, 32 nt, Homo Sapiens
uuaauguucuuuaaaaguuuaaguauucuaca

SEQ ID NO: 59274 - RNA, 32 nt, Homo Sapiens
cuuucucugaaauagcacaucuccaucucaga

SEQ ID NO: 59275 - RNA, 32 nt, Homo Sapiens
uaauucucacgcugcggcccuggaaagcgaug

SEQ ID NO: 59276 - RNA, 32 nt, Homo Sapiens
acuuuaccugucaucaguuauaguaaaaacca

SEQ ID NO: 59277 - RNA, 32 nt, Homo Sapiens
gaaauuuuuuguuuguuuuuuaugauuuguau

SEQ ID NO: 59278 - RNA, 32 nt, Homo Sapiens
gacuccgucucaaggaaaaaauaaaaauaaaa

SEQ ID NO: 59279 - RNA, 32 nt, Homo Sapiens
aaacuauuuauauuuucuuuuuuaaggauauu

SEQ ID NO: 59280 - RNA, 32 nt, Homo Sapiens
agcauacagaauauugucaaguugcauauucc

SEQ ID NO: 59281 - RNA, 32 nt, Homo Sapiens
aaaauaaaaauauuuauuguguacucuguucu

SEQ ID NO: 59282 - RNA, 32 nt, Homo Sapiens
ucaugcaguagauaugaaggcuuuuuccaagu

SEQ ID NO: 59283 - RNA, 32 nt, Homo Sapiens
ugggccccaagcaugacucauccagguuccag

SEQ ID NO: 59284 - RNA, 32 nt, Homo Sapiens
gggcagcauccacacgguuagccgugcaugca

SEQ ID NO: 59285 - RNA, 32 nt, Homo Sapiens
gaggaauauauuuggcuucucucuuaagacuc

SEQ ID NO: 59286 - RNA, 32 nt, Homo Sapiens
ucuuucauggguuuuuuuuucuucuuuuuagc

SEQ ID NO: 59287 - RNA, 32 nt, Homo Sapiens
gcugcagaauaaaaccagcagagacuccuuuu

SEQ ID NO: 59288 - RNA, 32 nt, Homo Sapiens
gaacggaguaauuauucuacucuucuuuuuac

SEQ ID NO: 59289 - RNA, 32 nt, Homo Sapiens
gggucagcagcgagauugcucugcagccagug

SEQ ID NO: 59290 - RNA, 32 nt, Homo Sapiens
aacugugacuuuuuacagacucgggcgggugu

SEQ ID NO: 59291 - RNA, 32 nt, Homo Sapiens
gcaguggggggccccagcuuucaggccagcau

SEQ ID NO: 59292 - RNA, 32 nt, Homo Sapiens
cauaauaaauguucaugaugcugacucuugug

SEQ ID NO: 59293 - RNA, 32 nt, Homo Sapiens
uucacaguaaggagugacaaguuuauaauaag

SEQ ID NO: 59294 - RNA, 32 nt, Homo Sapiens
agaaauauaaucagaaaacauaaaaaaaaaaa

SEQ ID NO: 59295 - RNA, 32 nt, Homo Sapiens
gcagccguguggacgaaguuuggcccaaccuu

SEQ ID NO: 59296 - RNA, 32 nt, Homo Sapiens
uuucugcgcucaaauuuuucgagugugccuuu

SEQ ID NO: 59297 - RNA, 32 nt, Homo Sapiens
uggagggagacguggguccaccaggcuucugg

SEQ ID NO: 59298 - RNA, 32 nt, Homo Sapiens
ugccgcugccagcaaccucccacugcugccua

SEQ ID NO: 59299 - RNA, 31 nt, Homo Sapiens
cagccggagccccaggagcccaaggggugug

SEQ ID NO: 59300 - RNA, 32 nt, Homo Sapiens
gcuccuucaaguaugccugggucuuggauaaa

SEQ ID NO: 59301 - RNA, 32 nt, Homo Sapiens
gcgaggcagggccugcagcggucucugagagg

SEQ ID NO: 59302 - RNA, 32 nt, Homo Sapiens
cgcagguggagccagcgagaggcucugaggcu

SEQ ID NO: 59303 - RNA, 32 nt, Homo Sapiens
cagacaggaagauaaaacucaacaacagcuaa

SEQ ID NO: 59304 - RNA, 32 nt, Homo Sapiens
agaaggugggccgcuuccuguggaagagggaa

SEQ ID NO: 59305 - RNA, 32 nt, Homo Sapiens
guccagccugucugcagggacauccugagagg

SEQ ID NO: 59306 - RNA, 32 nt, Homo Sapiens
ccuauuucaaggauuuggauuuauucagguaa

SEQ ID NO: 59307 - RNA, 32 nt, Homo Sapiens
ucagguucuguguguccuugugugcauuucug

SEQ ID NO: 59308 - RNA, 32 nt, Homo Sapiens
gacuaacugggcucaaggggugcuggaaggcg

SEQ ID NO: 59309 - RNA, 32 nt, Homo Sapiens
agcaacugguauauaguaacuagguggccuga

SEQ ID NO: 59310 - RNA, 32 nt, Homo Sapiens
ggcugcugcuccggcgcggagcccagagccgg

SEQ ID NO: 59311 - RNA, 32 nt, Homo Sapiens
cgggccuggcagugagagguguggccccacac

SEQ ID NO: 59312 - RNA, 32 nt, Homo Sapiens
gaaguguagccggcggacgcgcggcggcggcg

SEQ ID NO: 59313 - RNA, 32 nt, Homo Sapiens
acucccugccagccccugcccgcuggacucca

SEQ ID NO: 59314 - RNA, 32 nt, Homo Sapiens
acagcuugccagagccacuuggaacaagggca

SEQ ID NO: 59315 - RNA, 32 nt, Homo Sapiens
gcacugaccccacucgccccugugucggcccc

SEQ ID NO: 59316 - RNA, 32 nt, Homo Sapiens
ggccagcacuuaagagcagaacuguacccuua

SEQ ID NO: 59317 - RNA, 32 nt, Homo Sapiens
auacaggaaacgagaacuuauguggaaugcga

SEQ ID NO: 59318 - RNA, 32 nt, Homo Sapiens
ccucaggaguugaaggggauccugucccuccc

SEQ ID NO: 59319 - RNA, 32 nt, Homo Sapiens
accaguggggacgcccagggccucgggcguac

SEQ ID NO: 59320 - RNA, 32 nt, Homo Sapiens
aacuuccccucuaccagccuccaagccccacg

SEQ ID NO: 59321 - RNA, 32 nt, Homo Sapiens
ucagcuccugaacacccgcaccaagauguccu

SEQ ID NO: 59322 - RNA, 32 nt, Homo Sapiens
ucaccauggucuaugaacugucaguuccugca

SEQ ID NO: 59323 - RNA, 32 nt, Homo Sapiens
aggaacaggcagcaaucugugcuguucuguag

SEQ ID NO: 59324 - RNA, 32 nt, Homo Sapiens
ccgggccagaguccggccggagcggagcgcgc

SEQ ID NO: 59325 - RNA, 32 nt, Homo Sapiens
uguacccacacccacccacucacuuguaagcu

SEQ ID NO: 59326 - RNA, 30 nt, Homo Sapiens
cuucuggagaagcuugugguguuccugaag

SEQ ID NO: 59327 - RNA, 32 nt, Homo Sapiens
gcccccaugcaggcagccugcagaccaacacu

SEQ ID NO: 59328 - RNA, 32 nt, Homo Sapiens
uuuaugugccgccacuuuuguaaggccuggga

SEQ ID NO: 59329 - RNA, 32 nt, Homo Sapiens
aagaaugcuauuuuaucauauuaaggcucuag

SEQ ID NO: 59330 - RNA, 32 nt, Homo Sapiens
aguguuuccgucugcucaccugccacagagcc

SEQ ID NO: 59331 - RNA, 32 nt, Homo Sapiens
gaauaacuaguuaaaugaaauuuuagcuacac

SEQ ID NO: 59332 - RNA, 32 nt, Homo Sapiens
gaaccuggaccaagccuuccucggagauggga

SEQ ID NO: 59333 - RNA, 28 nt, Homo Sapiens
aaaauuuggcugaccauuauaaauuuga

SEQ ID NO: 59334 - RNA, 32 nt, Homo Sapiens
uauuucuguaugaagaugcaaauaucaugaau

SEQ ID NO: 59335 - RNA, 32 nt, Homo Sapiens
cugcccuccccggccccggggugcaccccgca

SEQ ID NO: 59336 - RNA, 32 nt, Homo Sapiens
agucagcagucaacuuuccuggaagaaugucc

SEQ ID NO: 59337 - RNA, 32 nt, Homo Sapiens
ugagcccucgcucguccacggucuucugcauc

SEQ ID NO: 59338 - RNA, 32 nt, Homo Sapiens
accagcagcugauguugccuccucuccugucc

SEQ ID NO: 59339 - RNA, 32 nt, Homo Sapiens
ugugauuuaucuuucaagagucucucuucacu

SEQ ID NO: 59340 - RNA, 32 nt, Homo Sapiens
gagucaguuaguagacgucuucauucauugga

SEQ ID NO: 59341 - RNA, 32 nt, Homo Sapiens
accaaccugugagccccacucccggccccacu

SEQ ID NO: 59342 - RNA, 32 nt, Homo Sapiens
aaaauaccaaacuucagcaacuguuaauacuc

SEQ ID NO: 59343 - RNA, 32 nt, Homo Sapiens
ggaaaagagcugagaguuuaugcugaaaugga

SEQ ID NO: 59344 - RNA, 32 nt, Homo Sapiens
uggaggucuucacuucagaaauccaagacuca

SEQ ID NO: 59345 - RNA, 32 nt, Homo Sapiens
ucuaggaggaggaggagguagggugugaaaca

SEQ ID NO: 59346 - RNA, 32 nt, Homo Sapiens
gccuugcuugcccucuggccccgccccaacuu

SEQ ID NO: 59347 - RNA, 32 nt, Homo Sapiens
auauggauauauuauaauggacuauauuauaa

SEQ ID NO: 59348 - RNA, 32 nt, Homo Sapiens
uuacagauuuaaaauaaacagguuugaggaau

SEQ ID NO: 59349 - RNA, 32 nt, Homo Sapiens
ugucauacacaaguaucaauagccaaauugau

SEQ ID NO: 59350 - RNA, 32 nt, Homo Sapiens
aagcaggagucuuuugugcuugagccaaggaa

SEQ ID NO: 59351 - RNA, 32 nt, Homo Sapiens
gccuccuguucgcgacaagcccgccgggaucc

SEQ ID NO: 59352 - RNA, 32 nt, Homo Sapiens
guccagcccucccgcugcagccugcagggagc

SEQ ID NO: 59353 - RNA, 32 nt, Homo Sapiens
cguuggaaagacugaagaggcuggagugcagu

SEQ ID NO: 59354 - RNA, 32 nt, Homo Sapiens
ucagaguguucuguuauucucaaucuuuauag

SEQ ID NO: 59355 - RNA, 32 nt, Homo Sapiens
ugguugcugugaugauauccagugucccucug

SEQ ID NO: 59356 - RNA, 32 nt, Homo Sapiens
uugaaaaauuccauccaauacguugagucuuc

SEQ ID NO: 59357 - RNA, 32 nt, Homo Sapiens
auugauaagaaacccaguauagauaacuuuuc

SEQ ID NO: 59358 - RNA, 28 nt, Homo Sapiens
uuggggguggcuacuuggcuaugggaua

SEQ ID NO: 59359 - RNA, 32 nt, Homo Sapiens
ggcccucagguuguguucaggaggaagagaca

SEQ ID NO: 59360 - RNA, 32 nt, Homo Sapiens
ugguccagcucuuggccccugugugaguugag

SEQ ID NO: 59361 - RNA, 32 nt, Homo Sapiens
aacccgcgccgcgcuggcccucgagcguagga

SEQ ID NO: 59362 - RNA, 32 nt, Homo Sapiens
ggucagggcccuugcccuccccggcacaggcc

SEQ ID NO: 59363 - RNA, 32 nt, Homo Sapiens
aggcggguggaucacccgaggucaggaguuca

SEQ ID NO: 59364 - RNA, 32 nt, Homo Sapiens
aaacaauaugcaaugugaagcggucguguugu

SEQ ID NO: 59365 - RNA, 31 nt, Homo Sapiens
uucccaauugagugcuaauagauuaggauaa

SEQ ID NO: 59366 - RNA, 32 nt, Homo Sapiens
cccccaaaaugaacgaaggaaugaccucuguc

SEQ ID NO: 59367 - RNA, 32 nt, Homo Sapiens
cuuuauacaaaagacaugauagagaaaagaug

SEQ ID NO: 59368 - RNA, 32 nt, Homo Sapiens
uuauauucaaccaaagcaauauacucuuacau

SEQ ID NO: 59369 - RNA, 32 nt, Homo Sapiens
ccguaaagcgaauugcacuuugauguucagaa

SEQ ID NO: 59370 - RNA, 32 nt, Homo Sapiens
ugggagguuuaacugacgcugcugcacuggau

SEQ ID NO: 59371 - RNA, 32 nt, Homo Sapiens
aaagccacuggacacacagcucugcuugacga

SEQ ID NO: 59372 - RNA, 32 nt, Homo Sapiens
uaaccgcgccgcccgcgcccgcuccuccucgg

SEQ ID NO: 59373 - RNA, 32 nt, Homo Sapiens
ggcggaggucggcggucggguccgucucugcc

SEQ ID NO: 59374 - RNA, 29 nt, Homo Sapiens
uugaauaggugccuguucuuguagggaga

SEQ ID NO: 59375 - RNA, 32 nt, Homo Sapiens
gguugggugggagagggaagcaaugaggagga

SEQ ID NO: 59376 - RNA, 32 nt, Homo Sapiens
uaaagaagggaagaagccuaaaggacagucaa

SEQ ID NO: 59377 - RNA, 32 nt, Homo Sapiens
caaauuucaguuuguuuguaacauuguucauc

SEQ ID NO: 59378 - RNA, 32 nt, Homo Sapiens
caucaccuuuggggaagaaaucagcauucuaa

SEQ ID NO: 59379 - RNA, 32 nt, Homo Sapiens
ccucuucugcacccugcugugccucguuuuca

SEQ ID NO: 59380 - RNA, 32 nt, Homo Sapiens
uguggcuuggggcugggaaugucccccugacu

SEQ ID NO: 59381 - RNA, 32 nt, Homo Sapiens
gcaagcaaacaaaaaaccaaaaggaauguuuu

SEQ ID NO: 59382 - RNA, 32 nt, Homo Sapiens
ggccaagcaaggaaagagcucagcuggaaggg

SEQ ID NO: 59383 - RNA, 32 nt, Homo Sapiens
agaaguuaauguuaaagccuaauccuaaauuu

SEQ ID NO: 59384 - RNA, 32 nt, Homo Sapiens
ccauggauauccuggggugugagucggauggg

SEQ ID NO: 59385 - RNA, 32 nt, Homo Sapiens
cccauccgugaggccucuuuccggagggagcc

SEQ ID NO: 59386 - RNA, 32 nt, Homo Sapiens
ucaguguuauuuacugggauuggcauacgugu

SEQ ID NO: 59387 - RNA, 32 nt, Homo Sapiens
ggcaagggcguccuggcccagcccugagcgcg

SEQ ID NO: 59388 - RNA, 32 nt, Homo Sapiens
cgcggcgggaggaggugccggccgagcaccgc

SEQ ID NO: 59389 - RNA, 32 nt, Homo Sapiens
aggguuauuuuauuuauuuuucguuuuuuaac

SEQ ID NO: 59390 - RNA, 29 nt, Homo Sapiens
cagccuuggggacagaccagacacccugg

SEQ ID NO: 59391 - RNA, 28 nt, Homo Sapiens
uucuguugccuaaauauguguguaaaau

SEQ ID NO: 59392 - RNA, 32 nt, Homo Sapiens
cugggauccucagagauggagaucuggaugug

SEQ ID NO: 59393 - RNA, 32 nt, Homo Sapiens
aaccagugaacuuuuuuuuuuaauguuuuuaa

SEQ ID NO: 59394 - RNA, 32 nt, Homo Sapiens
aucuaaaauaucuauauauuaaaaaguaggaa

SEQ ID NO: 59395 - RNA, 32 nt, Homo Sapiens
ucauaucucaaauacauaaccugguaauauaa

SEQ ID NO: 59396 - RNA, 32 nt, Homo Sapiens
agcagagaaaaaaccuguaggaugcagccuaa

SEQ ID NO: 59397 - RNA, 32 nt, Homo Sapiens
gugcggugacuugcccggggcuccagguagcc

SEQ ID NO: 59398 - RNA, 32 nt, Homo Sapiens
accccgggccgcgggcucggccugccccuuac

SEQ ID NO: 59399 - RNA, 32 nt, Homo Sapiens
cuaagucacagaccucagucuuucucgaagcu

SEQ ID NO: 59400 - RNA, 32 nt, Homo Sapiens
uuugcucccuccccgcugcccuuuggccacca

SEQ ID NO: 59401 - RNA, 32 nt, Homo Sapiens
cugggcgucagcguggucauggccgucguggc

SEQ ID NO: 59402 - RNA, 32 nt, Homo Sapiens
gguauggccaccuggugaauucaguuguuaag

SEQ ID NO: 59403 - RNA, 32 nt, Homo Sapiens
cuaggaaugaacuucuuuggaacuugcauagg

SEQ ID NO: 59404 - RNA, 32 nt, Homo Sapiens
gaugggcccaggugcuggacgggccuuguccu

SEQ ID NO: 59405 - RNA, 32 nt, Homo Sapiens
cgugcccgcucgcccuuccggccagaccucua

SEQ ID NO: 59406 - RNA, 32 nt, Homo Sapiens
cacacccgccccagcuucugccacggcuucag

SEQ ID NO: 59407 - RNA, 32 nt, Homo Sapiens
gcaucacaguuggagucagaugugagcccgga

SEQ ID NO: 59408 - RNA, 32 nt, Homo Sapiens
ugcgggaaggccuucagcuucuccuccgcgcu

SEQ ID NO: 59409 - RNA, 32 nt, Homo Sapiens
gcauguugcacucuguucucauuuggagauug

SEQ ID NO: 59410 - RNA, 32 nt, Homo Sapiens
uguugaccagcuacccugagccaggcaccacc

SEQ ID NO: 59411 - RNA, 32 nt, Homo Sapiens
gcccuccccggugcuccuggggcuaaggcugg

SEQ ID NO: 59412 - RNA, 32 nt, Homo Sapiens
uuauuuucuacaugaacugauuauuaccccau

SEQ ID NO: 59413 - RNA, 32 nt, Homo Sapiens
acagagauggaaugggacaaccgcaguuuuac

SEQ ID NO: 59414 - RNA, 32 nt, Homo Sapiens
agagaggaaagaaaaaauauauaugcuccaca

SEQ ID NO: 59415 - RNA, 32 nt, Homo Sapiens
gaagcagcacgcgacccaggugugugugaauu

SEQ ID NO: 59416 - RNA, 32 nt, Homo Sapiens
gcccggacggcgggcucugcgcuccgccccuc

SEQ ID NO: 59417 - RNA, 32 nt, Homo Sapiens
agaauaaauaaaauauacccaugugaaauaau

SEQ ID NO: 59418 - RNA, 32 nt, Homo Sapiens
gcccccugccccccagccucuggcauuagaau

SEQ ID NO: 59419 - RNA, 32 nt, Homo Sapiens
accccgaggagcucuguaagucccugcuccuc

SEQ ID NO: 59420 - RNA, 32 nt, Homo Sapiens
cacuguacuccagcccggcacuccagccuggc

SEQ ID NO: 59421 - RNA, 32 nt, Homo Sapiens
uuuugaaucuguucuuuuuuucacuaucauaa

SEQ ID NO: 59422 - RNA, 32 nt, Homo Sapiens
aaaugcauuuuucuuuuuucguuaauguucug

SEQ ID NO: 59423 - RNA, 32 nt, Homo Sapiens
guagauuaaaaauuauaggaauaucaauauaa

SEQ ID NO: 59424 - RNA, 32 nt, Homo Sapiens
auuggugugcccuuuagcacuccgcagacucu

SEQ ID NO: 59425 - RNA, 32 nt, Homo Sapiens
uuacuaacauguuguaaauauuacaauucaug

SEQ ID NO: 59426 - RNA, 32 nt, Homo Sapiens
gcuguacuuuuguauguguauauuuuuauagc

SEQ ID NO: 59427 - RNA, 32 nt, Homo Sapiens
cugccaucaaggcauuuauugcaguguacuau

SEQ ID NO: 59428 - RNA, 32 nt, Homo Sapiens
cuuacauuuuuccuggaacaagggagggaaua

SEQ ID NO: 59429 - RNA, 32 nt, Homo Sapiens
uaugauuuggccucuggagcaucccgggugug

SEQ ID NO: 59430 - RNA, 32 nt, Homo Sapiens
gaccaagcgugagcuccacgcgggucgacaga

SEQ ID NO: 59431 - RNA, 32 nt, Homo Sapiens
ugcauauugugacuguuugcauauacuucugu

SEQ ID NO: 59432 - RNA, 32 nt, Homo Sapiens
caauggaugauccagugcugcagagccagaag

SEQ ID NO: 59433 - RNA, 31 nt, Homo Sapiens
gaagugagccgcacucucaacgcggagaccc

SEQ ID NO: 59434 - RNA, 32 nt, Homo Sapiens
cccaggauucgggucugagacuugugugucug

SEQ ID NO: 59435 - RNA, 32 nt, Homo Sapiens
gaggcccugaggacuuggccaccaccagccgu

SEQ ID NO: 59436 - RNA, 32 nt, Homo Sapiens
uccugaccggggugggggcagagcuggcaccg

SEQ ID NO: 59437 - RNA, 32 nt, Homo Sapiens
cggugggagaagggcgggagggugggcccgag

SEQ ID NO: 59438 - RNA, 32 nt, Homo Sapiens
uacuuuuuagagaaacaaaacaacuuuguagc

SEQ ID NO: 59439 - RNA, 32 nt, Homo Sapiens
cauguguuacagaaacaaaagaccuaaaucuu

SEQ ID NO: 59440 - RNA, 32 nt, Homo Sapiens
gcugagcaggaagcccuggagaaggaccagga

SEQ ID NO: 59441 - RNA, 32 nt, Homo Sapiens
cauugacucuaaagggagagaauagccccugu

SEQ ID NO: 59442 - RNA, 32 nt, Homo Sapiens
agacaugggcaggaucaaaaauacugggacau

SEQ ID NO: 59443 - RNA, 32 nt, Homo Sapiens
uuuuauuggcuacuuuauuguuuaggacaagu

SEQ ID NO: 59444 - RNA, 32 nt, Homo Sapiens
uggggagggcuuucugcuucaccaucauuagg

SEQ ID NO: 59445 - RNA, 32 nt, Homo Sapiens
cacauagagggcgccagugacgcccacacacg

SEQ ID NO: 59446 - RNA, 32 nt, Homo Sapiens
aaugccgcggggcggguggcgaaggcaggguc

SEQ ID NO: 59447 - RNA, 32 nt, Homo Sapiens
ggacuuaaauguuaaugagaaacuggcuuuaa

SEQ ID NO: 59448 - RNA, 29 nt, Homo Sapiens
cucuauauuaaacuuucccuguucaaguu

SEQ ID NO: 59449 - RNA, 32 nt, Homo Sapiens
uugggacucuguugcuggucuucucaguucau

SEQ ID NO: 59450 - RNA, 32 nt, Homo Sapiens
cuauuuauaacccuaggauccuccuuauggag

SEQ ID NO: 59451 - RNA, 32 nt, Homo Sapiens
cacuguuauagcagagccuuucaaagaaaacc

SEQ ID NO: 59452 - RNA, 32 nt, Homo Sapiens
gccuccccagucucccucccccucgcgccugg

SEQ ID NO: 59453 - RNA, 31 nt, Homo Sapiens
acuaaggaauaaaaacuuuaauauacgauau

SEQ ID NO: 59454 - RNA, 32 nt, Homo Sapiens
ccauucguuaacucagacacuuaaccuuuacc

SEQ ID NO: 59455 - RNA, 32 nt, Homo Sapiens
ugcagccuccaccgugcugaggucaggaggcc

SEQ ID NO: 59456 - RNA, 32 nt, Homo Sapiens
cugccuuggccagccccgcgggccccugaggc

SEQ ID NO: 59457 - RNA, 27 nt, Homo Sapiens
aggacuccuugcuccagcccccugagc

SEQ ID NO: 59458 - RNA, 32 nt, Homo Sapiens
caccucccuuagucccacucuugcuuguguca

SEQ ID NO: 59459 - RNA, 32 nt, Homo Sapiens
aaaggaguauugaggaagguuuucauauauga

SEQ ID NO: 59460 - RNA, 32 nt, Homo Sapiens
gacauuagaaagggaauuaauauuuuccucau

SEQ ID NO: 59461 - RNA, 32 nt, Homo Sapiens
gugggcaagggagagaggggaaaauggguguu

SEQ ID NO: 59462 - RNA, 32 nt, Homo Sapiens
cucaacucagagugaaaguguuguguguaacc

SEQ ID NO: 59463 - RNA, 32 nt, Homo Sapiens
ugagagauaaucuauuuucauaaucaauaugu

SEQ ID NO: 59464 - RNA, 32 nt, Homo Sapiens
cuuaaagauaauguuuugcaugugaguacaug

SEQ ID NO: 59465 - RNA, 32 nt, Homo Sapiens
guaauuuuacuuuaaauuauuuaaauaggcua

SEQ ID NO: 59466 - RNA, 32 nt, Homo Sapiens
gauaugaacucaucauuuuuuauggcugcaua

SEQ ID NO: 59467 - RNA, 32 nt, Homo Sapiens
ccgcugguuguugggggcuggaggcgggaggu

SEQ ID NO: 59468 - RNA, 32 nt, Homo Sapiens
cuuccaacugcccuuucuucugauggcuauuc

SEQ ID NO: 59469 - RNA, 32 nt, Homo Sapiens
ccuucucccuccaccacccccagucgucagcu

SEQ ID NO: 59470 - RNA, 32 nt, Homo Sapiens
cugucauugggaaugaaauaaauuauuacgag

SEQ ID NO: 59471 - RNA, 32 nt, Homo Sapiens
gacagggucucacucugucacccaggcugcag

SEQ ID NO: 59472 - RNA, 32 nt, Homo Sapiens
cugugggguaccggcccggaaagcacgcagcc

SEQ ID NO: 59473 - RNA, 32 nt, Homo Sapiens
gaggaacgauauuuccggugggcucaccgggu

SEQ ID NO: 59474 - RNA, 32 nt, Homo Sapiens
agcugugaggagccccgagcacggcugucgcg

SEQ ID NO: 59475 - RNA, 32 nt, Homo Sapiens
ucgcccgccgcuagguccaucccggcccagcc

SEQ ID NO: 59476 - RNA, 32 nt, Homo Sapiens
ucauauauaugauauaauuugauccuucuugu

SEQ ID NO: 59477 - RNA, 32 nt, Homo Sapiens
gucugucauuuauuuuauuuuauuuucaauau

SEQ ID NO: 59478 - RNA, 32 nt, Homo Sapiens
uauggcagcccggcugcugcuuggaugcgagc

SEQ ID NO: 59479 - RNA, 32 nt, Homo Sapiens
uaucaagaaugaauucaaagaaguugaaagug

SEQ ID NO: 59480 - RNA, 32 nt, Homo Sapiens
cuguguuguguggucauucucgcccucccuuu

SEQ ID NO: 59481 - RNA, 32 nt, Homo Sapiens
acagcccuggggagccagacaggcuuugguau

SEQ ID NO: 59482 - RNA, 32 nt, Homo Sapiens
gcgaggaaggcgaggcgggcggucugucggac

SEQ ID NO: 59483 - RNA, 32 nt, Homo Sapiens
ucuuuucugaagaaccguguaucaguguuaga

SEQ ID NO: 59484 - RNA, 32 nt, Homo Sapiens
gccugucuuucccccuuccuucucaccugaca

SEQ ID NO: 59485 - RNA, 32 nt, Homo Sapiens
caaguucccuucccuuuucauccuaucccagc

SEQ ID NO: 59486 - RNA, 32 nt, Homo Sapiens
aaaagggcuauuaaaauauuuuuacaccuuug

SEQ ID NO: 59487 - RNA, 32 nt, Homo Sapiens
gccguuuugacuguucugaccaaauacuaaug

SEQ ID NO: 59488 - RNA, 32 nt, Homo Sapiens
uguuuccuugguacuuuuuucuuuuuaaauua

SEQ ID NO: 59489 - RNA, 32 nt, Homo Sapiens
ucucgcugacuucaggagugaagcugcagacc

SEQ ID NO: 59490 - RNA, 32 nt, Homo Sapiens
caaaggcaagguggaugcaguuaccauaaaag

SEQ ID NO: 59491 - RNA, 32 nt, Homo Sapiens
gugucgccccucugucuacucccuuucuuaua

SEQ ID NO: 59492 - RNA, 32 nt, Homo Sapiens
cgucagaggagguguggucagaggugacuugu

SEQ ID NO: 59493 - RNA, 32 nt, Homo Sapiens
uauauaauuguaauaaauaccaguugccacua

SEQ ID NO: 59494 - RNA, 32 nt, Homo Sapiens
uauuauauuauuagguauuaauaagaacagac

SEQ ID NO: 59495 - RNA, 32 nt, Homo Sapiens
acucugcugcagaccauccucccugggccagg

SEQ ID NO: 59496 - RNA, 32 nt, Homo Sapiens
agauauuuuaaacacccaaaauguugggucug

SEQ ID NO: 59497 - RNA, 32 nt, Homo Sapiens
cccuaccccucccaucggggcugugcuggggc

SEQ ID NO: 59498 - RNA, 32 nt, Homo Sapiens
uugaaggcaaugaaagcauuacagcauaaaau

SEQ ID NO: 59499 - RNA, 32 nt, Homo Sapiens
gcccggccaagccccagccucagccugcgccu

SEQ ID NO: 59500 - RNA, 32 nt, Homo Sapiens
uuuacucccacuuuuuacguuugcagaugcca

SEQ ID NO: 59501 - RNA, 32 nt, Homo Sapiens
uuauuacaguucccuuuuuuuauuauuauacu

SEQ ID NO: 59502 - RNA, 32 nt, Homo Sapiens
guuauaguucccucccaggcggcccccucccu

SEQ ID NO: 59503 - RNA, 32 nt, Homo Sapiens
uuugcaucuaaagcaaacuaauguauauuuca

SEQ ID NO: 59504 - RNA, 32 nt, Homo Sapiens
uuuaaacaaaaauaggaaacuuagauguaacu

SEQ ID NO: 59505 - RNA, 32 nt, Homo Sapiens
uaaguugagaacuuauguguuuuaauuguaua

SEQ ID NO: 59506 - RNA, 32 nt, Homo Sapiens
ggucccagcuauguagacccccgcccccaccu

SEQ ID NO: 59507 - RNA, 32 nt, Homo Sapiens
gccucucgaaggccugcacgggcccggccucg

SEQ ID NO: 59508 - RNA, 32 nt, Homo Sapiens
caaaaaucaaggaaauaaacacgauaauuuca

SEQ ID NO: 59509 - RNA, 32 nt, Homo Sapiens
gggaacugguggagggggcgcuaggcugccgg

SEQ ID NO: 59510 - RNA, 32 nt, Homo Sapiens
acccaagcaaggaaaccaacugccaaagcaag

SEQ ID NO: 59511 - RNA, 32 nt, Homo Sapiens
agcagcgccuucuccaccggggcccccucugc

SEQ ID NO: 59512 - RNA, 32 nt, Homo Sapiens
cagaggcaagguggagaagggcauuucuggag

SEQ ID NO: 59513 - RNA, 32 nt, Homo Sapiens
uaacacauacaaaauauauauguuaaguauau

SEQ ID NO: 59514 - RNA, 32 nt, Homo Sapiens
aacggggugagugcuguggccuugcugguggg

SEQ ID NO: 59515 - RNA, 32 nt, Homo Sapiens
gccgaggcggguggaucacgaggucaggauau

SEQ ID NO: 59516 - RNA, 32 nt, Homo Sapiens
agcaguuacuguaacaagaaguuuaaaguuaa

SEQ ID NO: 59517 - RNA, 32 nt, Homo Sapiens
agcccgggggcauucgaacauggcucuagacc

SEQ ID NO: 59518 - RNA, 32 nt, Homo Sapiens
auuuucagauuaguccaguguuaccaagguaa

SEQ ID NO: 59519 - RNA, 32 nt, Homo Sapiens
cacaucugugacucccuuaaauaaaaagggcc

SEQ ID NO: 59520 - RNA, 32 nt, Homo Sapiens
aggcccuaggacuuaaaucgaaguugaacuuu

SEQ ID NO: 59521 - RNA, 32 nt, Homo Sapiens
ggcccugaggugugggggcugcagcauguugc

SEQ ID NO: 59522 - RNA, 32 nt, Homo Sapiens
caagcccgguauggcgccaucuccauguugcc

SEQ ID NO: 59523 - RNA, 32 nt, Homo Sapiens
cgagacgcccauucugcccccggccccgcgcg

SEQ ID NO: 59524 - RNA, 32 nt, Homo Sapiens
cccccaaaacaaguugacgaaaggguuuuaug

SEQ ID NO: 59525 - RNA, 32 nt, Homo Sapiens
aagcuguggacccuggccccccggccacugca

SEQ ID NO: 59526 - RNA, 32 nt, Homo Sapiens
acgggcuuuccacagcgcgggggaacgggagg

SEQ ID NO: 59527 - RNA, 32 nt, Homo Sapiens
cuggagacauaguuggggguggagaacugccc

SEQ ID NO: 59528 - RNA, 32 nt, Homo Sapiens
gugagccaccgcgcccggccaacgucauuuuc

SEQ ID NO: 59529 - RNA, 32 nt, Homo Sapiens
caccugagccucaguuuucucaucugccaaau

SEQ ID NO: 59530 - RNA, 32 nt, Homo Sapiens
aaggugaggagcugucucggcucggcccgcgg

SEQ ID NO: 59531 - RNA, 31 nt, Homo Sapiens
ggcccaacaaauucacguggccaugucuggu

SEQ ID NO: 59532 - RNA, 31 nt, Homo Sapiens
ucagcuggaacauggggcucgagccagaccu

SEQ ID NO: 59533 - RNA, 32 nt, Homo Sapiens
gaaguccuacuacgcccuccccuccccagccu

SEQ ID NO: 59534 - RNA, 32 nt, Homo Sapiens
uucggcaggaggcgcgagccguccaggucuca

SEQ ID NO: 59535 - RNA, 32 nt, Homo Sapiens
auuauguuccugcuguauuuccugcuucccug

SEQ ID NO: 59536 - RNA, 30 nt, Homo Sapiens
guccaguguuuauuucucaagaguaauauu

SEQ ID NO: 59537 - RNA, 32 nt, Homo Sapiens
aaaauaauggaaacagaaauaggcguacuuua

SEQ ID NO: 59538 - RNA, 32 nt, Homo Sapiens
gcuccucuuuuccauagcaguucguugauucu

SEQ ID NO: 59539 - RNA, 32 nt, Homo Sapiens
gacucaaaaguucgaguugugcucuucacguu

SEQ ID NO: 59540 - RNA, 32 nt, Homo Sapiens
aguaagccgagaccaugcuuauugcccuccag

SEQ ID NO: 59541 - RNA, 32 nt, Homo Sapiens
gaagggaggaaugucauuaauguuuuguuaau

SEQ ID NO: 59542 - RNA, 32 nt, Homo Sapiens
ggcacacccagaguagaacagcagccagcaag

SEQ ID NO: 59543 - RNA, 32 nt, Homo Sapiens
aaaaaaaaacccaaaaaacaaacaaaauuuaa

SEQ ID NO: 59544 - RNA, 32 nt, Homo Sapiens
cucagcugcauaguuacgcagauguaaugcac

SEQ ID NO: 59545 - RNA, 32 nt, Homo Sapiens
cagaggaggcggaagaggagcccgagccuggc

SEQ ID NO: 59546 - RNA, 32 nt, Homo Sapiens
gccuugcgggaccccaccuggaacccgaccuc

SEQ ID NO: 59547 - RNA, 32 nt, Homo Sapiens
cagcaccccugccugcuuuugcugguggcagu

SEQ ID NO: 59548 - RNA, 32 nt, Homo Sapiens
gcccccuccuggguccucuccgcugcucacug

SEQ ID NO: 59549 - RNA, 32 nt, Homo Sapiens
uagcagucuuccuggcuucucacucugccuua

SEQ ID NO: 59550 - RNA, 32 nt, Homo Sapiens
agugccccagaccccaccugaucugcaucuuu

SEQ ID NO: 59551 - RNA, 32 nt, Homo Sapiens
uccaaacaguuaccauuaagccccaccuccaa

SEQ ID NO: 59552 - RNA, 32 nt, Homo Sapiens
ucuuggauacaccugagacauuaaacucaauu

SEQ ID NO: 59553 - RNA, 32 nt, Homo Sapiens
gucuagccucaugaccaucgcuccaucaccgg

SEQ ID NO: 59554 - RNA, 32 nt, Homo Sapiens
gaauuugcuuuucuuugucauuuugggaaagg

SEQ ID NO: 59555 - RNA, 32 nt, Homo Sapiens
acgggugccccuagcuggcccagagccggcag

SEQ ID NO: 59556 - RNA, 32 nt, Homo Sapiens
uuucauauuauuaguaguaucaugguuccauu

SEQ ID NO: 59557 - RNA, 32 nt, Homo Sapiens
accucccaaucuuuuuuguuaguccggccguc

SEQ ID NO: 59558 - RNA, 32 nt, Homo Sapiens
ggcggggagcgcggcgggcgccacguggaaaa

SEQ ID NO: 59559 - RNA, 32 nt, Homo Sapiens
ugucuguaguucuugugaaaccaaaacguuga

SEQ ID NO: 59560 - RNA, 32 nt, Homo Sapiens
cugauuacaucaucugcauuuauagcuuaauc

SEQ ID NO: 59561 - RNA, 32 nt, Homo Sapiens
aggugaggaagcaaaagcaucuaugugagacc

SEQ ID NO: 59562 - RNA, 32 nt, Homo Sapiens
cuugaggaaugggaaaaugaaccucagcccau

SEQ ID NO: 59563 - RNA, 32 nt, Homo Sapiens
uugaagauguauugcugucaucaguguggcac

SEQ ID NO: 59564 - RNA, 29 nt, Homo Sapiens
ccagaugcugcugcugccgccgcggccac

SEQ ID NO: 59565 - RNA, 32 nt, Homo Sapiens
uauacuggauuauguuuaauuaugguucuauu

SEQ ID NO: 59566 - RNA, 32 nt, Homo Sapiens
uuuuuaaaaaggaaaccugugcuauuuaaauu

SEQ ID NO: 59567 - RNA, 32 nt, Homo Sapiens
uuagauauacacaacaccaagugguacaucug

SEQ ID NO: 59568 - RNA, 32 nt, Homo Sapiens
uuucauucagucuacacuuuggcauucucucu

SEQ ID NO: 59569 - RNA, 32 nt, Homo Sapiens
agccgagauugugccacuguacaccagccugg

SEQ ID NO: 59570 - RNA, 32 nt, Homo Sapiens
agcugagauugugccacugcacaccagccugg

SEQ ID NO: 59571 - RNA, 32 nt, Homo Sapiens
ugauggaagacagagaagaaaagcagauggca

SEQ ID NO: 59572 - RNA, 32 nt, Homo Sapiens
gaggaaauuuuguaggaaauuugcauacccgu

SEQ ID NO: 59573 - RNA, 32 nt, Homo Sapiens
cagcagcauccaugguaggugcugggucuggg

SEQ ID NO: 59574 - RNA, 32 nt, Homo Sapiens
gggacaggguggcaguggagguggugaccacg

SEQ ID NO: 59575 - RNA, 29 nt, Homo Sapiens
uuuuguauauguauggacacuaggauuuu

SEQ ID NO: 59576 - RNA, 32 nt, Homo Sapiens
gcuugucccccuccaagaucacagagccgcug

SEQ ID NO: 59577 - RNA, 32 nt, Homo Sapiens
aauuagccgggcgugguggcaugcgccuauaa

SEQ ID NO: 59578 - RNA, 32 nt, Homo Sapiens
ggcugagccaucuuguggugcugggcuuccug

SEQ ID NO: 59579 - RNA, 32 nt, Homo Sapiens
gucuuccccagcucugacguggcagugaggug

SEQ ID NO: 59580 - RNA, 32 nt, Homo Sapiens
gacccagaugaccacauuuaauaccaaauggg

SEQ ID NO: 59581 - RNA, 32 nt, Homo Sapiens
uucugggaggaugacaugcagaggaacugaga

SEQ ID NO: 59582 - RNA, 32 nt, Homo Sapiens
aggccagccucgccuuucuacccaggcccccu

SEQ ID NO: 59583 - RNA, 32 nt, Homo Sapiens
ccccugcuccuggccugaaaucuuuaaagccg

SEQ ID NO: 59584 - RNA, 32 nt, Homo Sapiens
agaugagaaaucaauuauucccacaggauuuu

SEQ ID NO: 59585 - RNA, 32 nt, Homo Sapiens
uaaagaagaggaaaaaucauuuuucuauaauu

SEQ ID NO: 59586 - RNA, 32 nt, Homo Sapiens
caauauauaggaaaggauauuuccuguugaaa

SEQ ID NO: 59587 - RNA, 32 nt, Homo Sapiens
ccucccugcagccccaggagccuggaggagcc

SEQ ID NO: 59588 - RNA, 32 nt, Homo Sapiens
uacaaagaauuccacagaguuaaauaucuuaa

SEQ ID NO: 59589 - RNA, 32 nt, Homo Sapiens
acgccuccgcggcucaggagccguccugggug

SEQ ID NO: 59590 - RNA, 32 nt, Homo Sapiens
agaacuuggugaagaacaagauagagacucau

SEQ ID NO: 59591 - RNA, 32 nt, Homo Sapiens
gcggggggcuccggcccggggugggcaccauu

SEQ ID NO: 59592 - RNA, 32 nt, Homo Sapiens
gcucccccaggcuccucugugcuuuacuaaga

SEQ ID NO: 59593 - RNA, 32 nt, Homo Sapiens
ccugagcgggguucccuggugaaucccugcug

SEQ ID NO: 59594 - RNA, 32 nt, Homo Sapiens
cucaccccauucuccugccucagccuccugag

SEQ ID NO: 59595 - RNA, 32 nt, Homo Sapiens
agccuggaagcagcagggagcagccugggucu

SEQ ID NO: 59596 - RNA, 32 nt, Homo Sapiens
gacccccaccccgaccggggcuccucggccuu

SEQ ID NO: 59597 - RNA, 32 nt, Homo Sapiens
cugaguagcuaauggguuuggggccugggaca

SEQ ID NO: 59598 - RNA, 32 nt, Homo Sapiens
acuggguucuuccucccuccccgaagcccaga

SEQ ID NO: 59599 - RNA, 32 nt, Homo Sapiens
gagcugaaguauucuuuuugaguuucaguaua

SEQ ID NO: 59600 - RNA, 32 nt, Homo Sapiens
uuucuauguggaaauaaaugugaaaaauaacu

SEQ ID NO: 59601 - RNA, 32 nt, Homo Sapiens
ccgcgcgccccuuggcggcugagccuguggac

SEQ ID NO: 59602 - RNA, 32 nt, Homo Sapiens
cagugcugggagaggaaggccuugcucgcgag

SEQ ID NO: 59603 - RNA, 32 nt, Homo Sapiens
aauuuacagggcugaaauagcuuauuauucug

SEQ ID NO: 59604 - RNA, 29 nt, Homo Sapiens
cugaguccggucccagguauggagcagag

SEQ ID NO: 59605 - RNA, 32 nt, Homo Sapiens
uguauugcugaaagaauuuucuuaacagugaa

SEQ ID NO: 59606 - RNA, 32 nt, Homo Sapiens
cagggaucuccauggcauggguccagagucac

SEQ ID NO: 59607 - RNA, 32 nt, Homo Sapiens
gguuauguauaaaagcauaugugcuacucauc

SEQ ID NO: 59608 - RNA, 32 nt, Homo Sapiens
uuggggggagagacacagauuuuuacacuaau

SEQ ID NO: 59609 - RNA, 32 nt, Homo Sapiens
ugggaggugacaacacaggauauuauaccagg

SEQ ID NO: 59610 - RNA, 32 nt, Homo Sapiens
uagaaaaaaugaagauugaccccgauucuuua

SEQ ID NO: 59611 - RNA, 32 nt, Homo Sapiens
uaaaaucuugagcacuuaguccugcugguuuu

SEQ ID NO: 59612 - RNA, 32 nt, Homo Sapiens
caggaguccugggaguuccccagccacacaag

SEQ ID NO: 59613 - RNA, 32 nt, Homo Sapiens
auaaaagaaagaugguccccuuuuaucugauu

SEQ ID NO: 59614 - RNA, 32 nt, Homo Sapiens
ggauacaagcagccacuguuuccuccguuaac

SEQ ID NO: 59615 - RNA, 32 nt, Homo Sapiens
gguagaaggugcacauuuuaagcaaaaauaaa

SEQ ID NO: 59616 - RNA, 32 nt, Homo Sapiens
cccaaucccacuuuggcacgauguuagccaac

SEQ ID NO: 59617 - RNA, 32 nt, Homo Sapiens
cccaaaaacccccuuuuccccaagcugcccau

SEQ ID NO: 59618 - RNA, 32 nt, Homo Sapiens
uccccaccuagacaacgauuauacuggcagga

SEQ ID NO: 59619 - RNA, 32 nt, Homo Sapiens
ugcagcaaaacacugccugaaaacagaccggc

SEQ ID NO: 59620 - RNA, 32 nt, Homo Sapiens
uucgaguuggcuuuccuucucuugaccaaggg

SEQ ID NO: 59621 - RNA, 32 nt, Homo Sapiens
ugccuguaaucccagcacuuuggggagccaag

SEQ ID NO: 59622 - RNA, 32 nt, Homo Sapiens
ugaaguuuaaggaaacagucaccagaguuucu

SEQ ID NO: 59623 - RNA, 32 nt, Homo Sapiens
auugagaagaguggccuggucugugcuggcau

SEQ ID NO: 59624 - RNA, 32 nt, Homo Sapiens
ggcuggcugagggcuccucgggaauggaaagg

SEQ ID NO: 59625 - RNA, 32 nt, Homo Sapiens
caucagccaggcagcccucccagugcccaagg

SEQ ID NO: 59626 - RNA, 32 nt, Homo Sapiens
ucgaccauucugaccugguggcugaccuucug

SEQ ID NO: 59627 - RNA, 32 nt, Homo Sapiens
ucuuuucaucuuacaaauuccagauaucuaca

SEQ ID NO: 59628 - RNA, 32 nt, Homo Sapiens
uuuuuaaauagagauuuguaacaucaccucuu

SEQ ID NO: 59629 - RNA, 32 nt, Homo Sapiens
cuucugaagucuuuuugucauguagcuauuaa

SEQ ID NO: 59630 - RNA, 32 nt, Homo Sapiens
uguacugcccucugcugggaagggguuuuaau

SEQ ID NO: 59631 - RNA, 32 nt, Homo Sapiens
cauuuuuucugcaugcaguuugcaacaaaugu

SEQ ID NO: 59632 - RNA, 32 nt, Homo Sapiens
acugaccagacuuguugggguccugggaugag

SEQ ID NO: 59633 - RNA, 30 nt, Homo Sapiens
auccacuucccguggcugccggcgcucgug

SEQ ID NO: 59634 - RNA, 32 nt, Homo Sapiens
agggaaagauuaaaaucuguggaauaaaggag

SEQ ID NO: 59635 - RNA, 32 nt, Homo Sapiens
acgaggugcuguuggcaauugcagcugcgugg

SEQ ID NO: 59636 - RNA, 32 nt, Homo Sapiens
cuggccugggcgcuccgguggcggcggaggug

SEQ ID NO: 59637 - RNA, 27 nt, Homo Sapiens
agagucccucacuucagccccaggagc

SEQ ID NO: 59638 - RNA, 32 nt, Homo Sapiens
aggaaaguguuugugccugucagacacuuaaa

SEQ ID NO: 59639 - RNA, 32 nt, Homo Sapiens
aauuauaguuuaucuucuguauaacugauuua

SEQ ID NO: 59640 - RNA, 32 nt, Homo Sapiens
cccacccugccccacaccugccccuaaucacu

SEQ ID NO: 59641 - RNA, 32 nt, Homo Sapiens
ggggugcagcuggucuggauagauagcuuaca

SEQ ID NO: 59642 - RNA, 32 nt, Homo Sapiens
agcuggaguauuuuaggagauucugggucaag

SEQ ID NO: 59643 - RNA, 32 nt, Homo Sapiens
uucaaagccucuuuuuaaaaacaucucugagc

SEQ ID NO: 59644 - RNA, 32 nt, Homo Sapiens
gagcgcgggggcggcuccugcucuuccuggac

SEQ ID NO: 59645 - RNA, 32 nt, Homo Sapiens
accugcugcccggcuggaacugggggugcucg

SEQ ID NO: 59646 - RNA, 32 nt, Homo Sapiens
cggugguagcugugcagcugcugcugaucaac

SEQ ID NO: 59647 - RNA, 32 nt, Homo Sapiens
aguugccaacuuuuuaagaaugagcaguugac

SEQ ID NO: 59648 - RNA, 32 nt, Homo Sapiens
agccgcugaaaacgacugaagagagcaaggga

SEQ ID NO: 59649 - RNA, 32 nt, Homo Sapiens
ggagaagucuuaguagcuuguaucuggagucu

SEQ ID NO: 59650 - RNA, 32 nt, Homo Sapiens
uguauguauuuaguuacuuguuuucaagcugg

SEQ ID NO: 59651 - RNA, 32 nt, Homo Sapiens
uaaggccuauucuccuucugcugcagacuuua

SEQ ID NO: 59652 - RNA, 28 nt, Homo Sapiens
augugaagcagcuacaggaugaguugga

SEQ ID NO: 59653 - RNA, 32 nt, Homo Sapiens
caauaguaaaagacauaauaacuugagaaucu

SEQ ID NO: 59654 - RNA, 32 nt, Homo Sapiens
cucacuccuuucucggcuguccuuccaauuau

SEQ ID NO: 59655 - RNA, 32 nt, Homo Sapiens
ggagaaacaacccugauaagaacuugaauuuu

SEQ ID NO: 59656 - RNA, 32 nt, Homo Sapiens
aaacaagcuauauauauguacaaaggcaaaca

SEQ ID NO: 59657 - RNA, 32 nt, Homo Sapiens
ggucagagaagcugcagguuugcagccagcgg

SEQ ID NO: 59658 - RNA, 32 nt, Homo Sapiens
cuguguuacaaaaauaaauuuauguuguccug

SEQ ID NO: 59659 - RNA, 32 nt, Homo Sapiens
aucuucugcaacugucgucuccaugcgcccug

SEQ ID NO: 59660 - RNA, 32 nt, Homo Sapiens
cagcagcgcgcaggccugcgugcgcugguucc

SEQ ID NO: 59661 - RNA, 32 nt, Homo Sapiens
aacacuugggauuuuucuccucugucccgagg

SEQ ID NO: 59662 - RNA, 32 nt, Homo Sapiens
cgggcagugggugccaccuggacuccacucuc

SEQ ID NO: 59663 - RNA, 32 nt, Homo Sapiens
ucugugagccgcaggcacucagagcaaaggcc

SEQ ID NO: 59664 - RNA, 32 nt, Homo Sapiens
aagacauaccuuugcuucuccuucuccuucug

SEQ ID NO: 59665 - RNA, 32 nt, Homo Sapiens
ugcuaagcucuuuaacuucucuaugcgucaca

SEQ ID NO: 59666 - RNA, 32 nt, Homo Sapiens
cccgccccgccccuccucccugcucucuuaga

SEQ ID NO: 59667 - RNA, 32 nt, Homo Sapiens
ccaugagcuggguguucagggcuuggcggagg

SEQ ID NO: 59668 - RNA, 32 nt, Homo Sapiens
agggugccgagaccacaaagcgcccggcugug

SEQ ID NO: 59669 - RNA, 32 nt, Homo Sapiens
gaugcgauuuaaaauaaaugcagauguuuacu

SEQ ID NO: 59670 - RNA, 32 nt, Homo Sapiens
uacgguuuccuagaaucagggauguuagugua

SEQ ID NO: 59671 - RNA, 31 nt, Homo Sapiens
uuacuggauuugacuucagccaggugaacug

SEQ ID NO: 59672 - RNA, 32 nt, Homo Sapiens
ccacccaggacacuggugugaaugacacaaca

SEQ ID NO: 59673 - RNA, 32 nt, Homo Sapiens
agccugggaggucaaggcugcaguaagcugau

SEQ ID NO: 59674 - RNA, 32 nt, Homo Sapiens
aacugagcaaaacagacaaaaauugaguugug

SEQ ID NO: 59675 - RNA, 32 nt, Homo Sapiens
auuuauugccuuguuucuuuuucaaauuccau

SEQ ID NO: 59676 - RNA, 32 nt, Homo Sapiens
ggccaaggccuggccggggcucggggggaggg

SEQ ID NO: 59677 - RNA, 32 nt, Homo Sapiens
accucgcgcgcccauuuucgccgcugcgaauu

SEQ ID NO: 59678 - RNA, 32 nt, Homo Sapiens
auccucgucccguccuccgccggccccugccc

SEQ ID NO: 59679 - RNA, 32 nt, Homo Sapiens
cugggccuaccuugguccuccuguccucuucu

SEQ ID NO: 59680 - RNA, 32 nt, Homo Sapiens
aagaggauggcagacugugcagugcggugcac

SEQ ID NO: 59681 - RNA, 32 nt, Homo Sapiens
acaggcaagagaauacucaaaaauauuuaaaa

SEQ ID NO: 59682 - RNA, 32 nt, Homo Sapiens
guuuucuucuaaagaucaaaguuuugauuugu

SEQ ID NO: 59683 - RNA, 32 nt, Homo Sapiens
gugugauaauccuaacucuacuacgcauuaua

SEQ ID NO: 59684 - RNA, 32 nt, Homo Sapiens
uacaugguuuaaaaaauaguacuguuuaaugc

SEQ ID NO: 59685 - RNA, 32 nt, Homo Sapiens
ccggggguuccggcgcuccgcggccccaagcg

SEQ ID NO: 59686 - RNA, 32 nt, Homo Sapiens
auauguauauauaaaugcauuauuacacauac

SEQ ID NO: 59687 - RNA, 32 nt, Homo Sapiens
auugaugguuguauaagaacuagcucauguaa

SEQ ID NO: 59688 - RNA, 32 nt, Homo Sapiens
gcaacuuugucaaaaaucaauugaccauauac

SEQ ID NO: 59689 - RNA, 32 nt, Homo Sapiens
ggagggggcccggcugggcccgagggucccaa

SEQ ID NO: 59690 - RNA, 32 nt, Homo Sapiens
acucccugggacacagacccaggacccccgag

SEQ ID NO: 59691 - RNA, 32 nt, Homo Sapiens
uuucucugggguauuuggggcuuauuuuuaaa

SEQ ID NO: 59692 - RNA, 32 nt, Homo Sapiens
gucaccugacaggucacaaacaugucagacaa

SEQ ID NO: 59693 - RNA, 32 nt, Homo Sapiens
acuucaucuauuuuuuauuuguuuuuauuagc

SEQ ID NO: 59694 - RNA, 32 nt, Homo Sapiens
gguagcuucagcggcagcagcuucuuacggua

SEQ ID NO: 59695 - RNA, 31 nt, Homo Sapiens
aacuccgggcacaccaccuuuaagagcuaua

SEQ ID NO: 59696 - RNA, 32 nt, Homo Sapiens
guauaauuugaaaaauacuaaaaguggaaaau

SEQ ID NO: 59697 - RNA, 32 nt, Homo Sapiens
ccgggccucaggcugaggaaaaacagaguuuc

SEQ ID NO: 59698 - RNA, 32 nt, Homo Sapiens
cuggcuagcuaauuuuuguauuuuuaguagag

SEQ ID NO: 59699 - RNA, 32 nt, Homo Sapiens
cgcagucccggggcucccaagggccugugacc

SEQ ID NO: 59700 - RNA, 32 nt, Homo Sapiens
guucuuauauguaaguuuuauuauuaaauaaa

SEQ ID NO: 59701 - RNA, 32 nt, Homo Sapiens
guuucuauuugcauuucccccuccucagaugg

SEQ ID NO: 59702 - RNA, 32 nt, Homo Sapiens
uucaugcccuuaaauagcuagauuuuaaagca

SEQ ID NO: 59703 - RNA, 32 nt, Homo Sapiens
cacacugccaugagaaauccacagcaacccca

SEQ ID NO: 59704 - RNA, 32 nt, Homo Sapiens
acaaacaauauuuuugugauguuuauuuaaac

SEQ ID NO: 59705 - RNA, 32 nt, Homo Sapiens
uggacuuuggugguacccuccucccccagccc

SEQ ID NO: 59706 - RNA, 32 nt, Homo Sapiens
acaauccuuuuacagaaaucacuuccuugugu

SEQ ID NO: 59707 - RNA, 32 nt, Homo Sapiens
gauucagaucccagcucugcugcuugcuaccc

SEQ ID NO: 59708 - RNA, 32 nt, Homo Sapiens
cacuuaccugcuugagcuuucugugcaugugc

SEQ ID NO: 59709 - RNA, 32 nt, Homo Sapiens
cccggcccggcggcucuggccggccguccagu

SEQ ID NO: 59710 - RNA, 32 nt, Homo Sapiens
ugcugcagaacagcagaacuucuuccucuuau

SEQ ID NO: 59711 - RNA, 32 nt, Homo Sapiens
aaagaacaacuuaggggucaguucuugcaacc

SEQ ID NO: 59712 - RNA, 32 nt, Homo Sapiens
gacuuguugcuguccacaagccuuaguggcug

SEQ ID NO: 59713 - RNA, 32 nt, Homo Sapiens
acuuggccugggccugccaccaccacguccug

SEQ ID NO: 59714 - RNA, 32 nt, Homo Sapiens
ugucagugaagagcuuccagccagaagaaaau

SEQ ID NO: 59715 - RNA, 32 nt, Homo Sapiens
uggcaugcuucccuccuggugggcccuaggau

SEQ ID NO: 59716 - RNA, 32 nt, Homo Sapiens
aaccacaucaccugcccuucugccuacacucc

SEQ ID NO: 59717 - RNA, 32 nt, Homo Sapiens
auggagugauguugugggcacaaggcaucugu

SEQ ID NO: 59718 - RNA, 32 nt, Homo Sapiens
guguccccuaucuuaugggaccaugccgucag

SEQ ID NO: 59719 - RNA, 32 nt, Homo Sapiens
gucuugucuuggagucacaugagguccaagug

SEQ ID NO: 59720 - RNA, 32 nt, Homo Sapiens
agaguccggccgcacgcgcgggacacgagcgu

SEQ ID NO: 59721 - RNA, 32 nt, Homo Sapiens
cugcuccaccaugcugggucccaggcagcuuu

SEQ ID NO: 59722 - RNA, 32 nt, Homo Sapiens
aauaacagaaacaggaggagcccauuuaggca

SEQ ID NO: 59723 - RNA, 32 nt, Homo Sapiens
uacucccucccccucaucuaccugucaaaguc

SEQ ID NO: 59724 - RNA, 31 nt, Homo Sapiens
ugccgcgcagccgaguggcgggcuacauacc

SEQ ID NO: 59725 - RNA, 32 nt, Homo Sapiens
ucggagguagaagaggggaaggaagaugguuu

SEQ ID NO: 59726 - RNA, 32 nt, Homo Sapiens
uucugagguaaguuaaguaaguugauucggua

SEQ ID NO: 59727 - RNA, 32 nt, Homo Sapiens
cuucuuuaugaggguguaugacugcucaguga

SEQ ID NO: 59728 - RNA, 32 nt, Homo Sapiens
aaaggaccauccucugaggaaagcagaggaga

SEQ ID NO: 59729 - RNA, 32 nt, Homo Sapiens
uuauuuguuguuaaaaaugcuucaaaagguuu

SEQ ID NO: 59730 - RNA, 32 nt, Homo Sapiens
ggcuaccuaagaggaugagcggugcuccgacg

SEQ ID NO: 59731 - RNA, 32 nt, Homo Sapiens
guuuccauuguauuuucuuacacugugccauu

SEQ ID NO: 59732 - RNA, 32 nt, Homo Sapiens
uaaaccuguguuguauuuuuucugagauguuu

SEQ ID NO: 59733 - RNA, 32 nt, Homo Sapiens
auccaacauaucugucuuguuccuagauauau

SEQ ID NO: 59734 - RNA, 32 nt, Homo Sapiens
agacaaagcugauggcacuauguuuuguauca

SEQ ID NO: 59735 - RNA, 32 nt, Homo Sapiens
ccaggagucacaucucucugguuuuucaggca

SEQ ID NO: 59736 - RNA, 32 nt, Homo Sapiens
ucuuuaguguugagccucuggauucugggguc

SEQ ID NO: 59737 - RNA, 32 nt, Homo Sapiens
gaugccaaggugaagaagugggcuugggaaga

SEQ ID NO: 59738 - RNA, 32 nt, Homo Sapiens
agaaaaugacaguguuauaaaaaagggaagga

SEQ ID NO: 59739 - RNA, 31 nt, Homo Sapiens
ccggcaauggcggccucgacggccucgcacc

SEQ ID NO: 59740 - RNA, 32 nt, Homo Sapiens
ccauacaccugcgcauggggcuucucguggug

SEQ ID NO: 59741 - RNA, 32 nt, Homo Sapiens
agaugaggguguccgcugcugcuuuccuucgg

SEQ ID NO: 59742 - RNA, 32 nt, Homo Sapiens
agauauauaaaauagcauaauaugagaaauua

SEQ ID NO: 59743 - RNA, 32 nt, Homo Sapiens
aagcauuccacuuuuguuauuuauuagugcua

SEQ ID NO: 59744 - RNA, 32 nt, Homo Sapiens
ugaaccugacuucuaaggucuuguucggcucu

SEQ ID NO: 59745 - RNA, 32 nt, Homo Sapiens
ugugcacaagauaauucauucuggggaaaaaa

SEQ ID NO: 59746 - RNA, 32 nt, Homo Sapiens
aguccuugcagcuggucuuuggcauugacgug

SEQ ID NO: 59747 - RNA, 30 nt, Homo Sapiens
uguggugucugugcucagcgucaccuccuc

SEQ ID NO: 59748 - RNA, 32 nt, Homo Sapiens
acacacccacccacacaccauucagaacaugu

SEQ ID NO: 59749 - RNA, 32 nt, Homo Sapiens
uaacauaugcaaacauaacaaaaucacuucca

SEQ ID NO: 59750 - RNA, 28 nt, Homo Sapiens
uaaccacugcuuuccaggauggccugcc

SEQ ID NO: 59751 - RNA, 32 nt, Homo Sapiens
ccgacggaccgaccgccuggcgcacggacgcg

SEQ ID NO: 59752 - RNA, 32 nt, Homo Sapiens
uugaagcucaggugucucacgucugggcugca

SEQ ID NO: 59753 - RNA, 32 nt, Homo Sapiens
ugagagaauuuccaauauaauauuagacauaa

SEQ ID NO: 59754 - RNA, 32 nt, Homo Sapiens
agcccggagcagccauccccugccaggucuac

SEQ ID NO: 59755 - RNA, 32 nt, Homo Sapiens
ccccaacuuucccaaugaccucugcaggcaca

SEQ ID NO: 59756 - RNA, 32 nt, Homo Sapiens
gcagcccccagcccuccccacccagguuuucg

SEQ ID NO: 59757 - RNA, 32 nt, Homo Sapiens
accccacgucgcagacagacauccucuagaug

SEQ ID NO: 59758 - RNA, 32 nt, Homo Sapiens
cugaagggacaugggagcuacugcaggcugca

SEQ ID NO: 59759 - RNA, 32 nt, Homo Sapiens
ugaaaauuuuccaguuugauaauugaugguca

SEQ ID NO: 59760 - RNA, 29 nt, Homo Sapiens
acaucccggggacaggggcggccauggcg

SEQ ID NO: 59761 - RNA, 32 nt, Homo Sapiens
ccugcccccucccacacccgccccggguccgc

SEQ ID NO: 59762 - RNA, 32 nt, Homo Sapiens
uuuuucccucuuuguuuuuuuaacaagauuuu

SEQ ID NO: 59763 - RNA, 32 nt, Homo Sapiens
cccggcccuggagaugguccccggcgccgcgg

SEQ ID NO: 59764 - RNA, 32 nt, Homo Sapiens
acaauagagcauuuuacaaauuccuacaaaga

SEQ ID NO: 59765 - RNA, 32 nt, Homo Sapiens
guaagcucuauuaugaaauacaacuuuaaaaa

SEQ ID NO: 59766 - RNA, 32 nt, Homo Sapiens
caccuccccgguucaagugauucuccugccuc

SEQ ID NO: 59767 - RNA, 32 nt, Homo Sapiens
uuaaaagaauguaaaauauaucaucaaguucu

SEQ ID NO: 59768 - RNA, 32 nt, Homo Sapiens
uuauagugagucauaaauacuuuaaauacaaa

SEQ ID NO: 59769 - RNA, 32 nt, Homo Sapiens
gcuggggugagcucagggaggggaagaggaga

SEQ ID NO: 59770 - RNA, 32 nt, Homo Sapiens
aagaacucagaaaugucuuguuuauuuguguu

SEQ ID NO: 59771 - RNA, 32 nt, Homo Sapiens
caaguauuuaauguccuuugagggaucauugu

SEQ ID NO: 59772 - RNA, 32 nt, Homo Sapiens
gauuccgucguucuuacugagucugcagcggg

SEQ ID NO: 59773 - RNA, 32 nt, Homo Sapiens
agaaacaaaggguuuucuuuuuuaaauguuuc

SEQ ID NO: 59774 - RNA, 32 nt, Homo Sapiens
ggauucuguguagggaagcaccacugauugca

SEQ ID NO: 59775 - RNA, 32 nt, Homo Sapiens
aaccucccugaaccuuaauuucauccuaggua

SEQ ID NO: 59776 - RNA, 32 nt, Homo Sapiens
cucccccagcaucacuaacaaauaugcuuggc

SEQ ID NO: 59777 - RNA, 32 nt, Homo Sapiens
ugccgcuugccagccgccccaaggcugacaga

SEQ ID NO: 59778 - RNA, 32 nt, Homo Sapiens
ugaagauuguggggcuacuuuuucucauagca

SEQ ID NO: 59779 - RNA, 32 nt, Homo Sapiens
caauuuuuaaauuuauuuauacuuaaucugug

SEQ ID NO: 59780 - RNA, 32 nt, Homo Sapiens
gagacagacaaaucagagaucaguacccuuga

SEQ ID NO: 59781 - RNA, 32 nt, Homo Sapiens
uaaccuuugcugacaagguuuugucuguuuca

SEQ ID NO: 59782 - RNA, 32 nt, Homo Sapiens
ucgccagcacgcagggggagccgcccgucucg

SEQ ID NO: 59783 - RNA, 32 nt, Homo Sapiens
gaagagggagacggcucuuagcugcguucaag

SEQ ID NO: 59784 - RNA, 32 nt, Homo Sapiens
uagugaaaaacgcagcuuuguauugggagaag

SEQ ID NO: 59785 - RNA, 32 nt, Homo Sapiens
uucuaaguuuuggguaauguuaacucagaaca

SEQ ID NO: 59786 - RNA, 32 nt, Homo Sapiens
agacauuugacaaguuauaucaacgacugugc

SEQ ID NO: 59787 - RNA, 30 nt, Homo Sapiens
uagugggguucccuggagccauggccugcu

SEQ ID NO: 59788 - RNA, 32 nt, Homo Sapiens
aggagaaagggcccucacgggugagcggggcg

SEQ ID NO: 59789 - RNA, 32 nt, Homo Sapiens
gucuuuuucuuacccuacuucucuuaucuuug

SEQ ID NO: 59790 - RNA, 32 nt, Homo Sapiens
ggccugaagguggucccugcuuucucuuucuc

SEQ ID NO: 59791 - RNA, 32 nt, Homo Sapiens
ggcaaccagcagcucuaggcgcugcucuuguc

SEQ ID NO: 59792 - RNA, 32 nt, Homo Sapiens
uuaagggcauuuggaugagguugaggugagau

SEQ ID NO: 59793 - RNA, 32 nt, Homo Sapiens
gcugggcaaaccccaaacgcuuuguuugggug

SEQ ID NO: 59794 - RNA, 32 nt, Homo Sapiens
cagaugaaaggagacaaugguuguguagggag

SEQ ID NO: 59795 - RNA, 32 nt, Homo Sapiens
ggcuuuugagaaaaauacuuccucugcuugua

SEQ ID NO: 59796 - RNA, 32 nt, Homo Sapiens
agaaugauuaugaauuacauuuguauaaaaua

SEQ ID NO: 59797 - RNA, 30 nt, Homo Sapiens
aacgcugugaggcagcaccauuugacaggu

SEQ ID NO: 59798 - RNA, 32 nt, Homo Sapiens
ucuacuuguaagucagcuaaaggaaugugaga

SEQ ID NO: 59799 - RNA, 32 nt, Homo Sapiens
cugagauugaaaauauuguaacuuucaguuag

SEQ ID NO: 59800 - RNA, 32 nt, Homo Sapiens
ggccaggccucauccuccuggacccagcaggg

SEQ ID NO: 59801 - RNA, 32 nt, Homo Sapiens
aguaaucugguuggagacauguuguaauucug

SEQ ID NO: 59802 - RNA, 32 nt, Homo Sapiens
aagaggaaauggugcuauauguuuauuguuau

SEQ ID NO: 59803 - RNA, 32 nt, Homo Sapiens
ucguugaauccaucugugaccuggacaccuuc

SEQ ID NO: 59804 - RNA, 32 nt, Homo Sapiens
cuaacccggggugccaggaacacacacauccu

SEQ ID NO: 59805 - RNA, 32 nt, Homo Sapiens
gucaucaggcaaaagugaauguuuguuuaugg

SEQ ID NO: 59806 - RNA, 32 nt, Homo Sapiens
acuuuguauugaguucuuuuugaaagaauaac

SEQ ID NO: 59807 - RNA, 32 nt, Homo Sapiens
caaaaugucacccagcuuccugucacauaucc

SEQ ID NO: 59808 - RNA, 32 nt, Homo Sapiens
ugccaaugcugugacucaaggccacggcucua

SEQ ID NO: 59809 - RNA, 31 nt, Homo Sapiens
cccagagcagcauggaugccccgcgaaggga

SEQ ID NO: 59810 - RNA, 32 nt, Homo Sapiens
cccgggaggaggagcuugcagugagccgagau

SEQ ID NO: 59811 - RNA, 32 nt, Homo Sapiens
uaggaagaggaauggaacaaguagcaaagaag

SEQ ID NO: 59812 - RNA, 32 nt, Homo Sapiens
ugucucuuuuuccucccucuauacgaaggaug

SEQ ID NO: 59813 - RNA, 32 nt, Homo Sapiens
ugagcuuggccgcgagacuggcacccgguacc

SEQ ID NO: 59814 - RNA, 32 nt, Homo Sapiens
uguaugguuugcuaccuauuguaacuauuauu

SEQ ID NO: 59815 - RNA, 28 nt, Homo Sapiens
gagcaggggcggccucucugcugagagu

SEQ ID NO: 59816 - RNA, 32 nt, Homo Sapiens
cugugcuguguuuaaucaggggauacaggccc

SEQ ID NO: 59817 - RNA, 32 nt, Homo Sapiens
uaaaacaauguuucuaaauugucuuauuuugu

SEQ ID NO: 59818 - RNA, 32 nt, Homo Sapiens
caggggugcccccuccucucccaucccccugc

SEQ ID NO: 59819 - RNA, 32 nt, Homo Sapiens
aaaaaauucauuuugcagaaagccugaaagaa

SEQ ID NO: 59820 - RNA, 32 nt, Homo Sapiens
cuaauuuuauggguuuuuuucuuuuuugcgaa

SEQ ID NO: 59821 - RNA, 32 nt, Homo Sapiens
cucccccugcuguucauuagaguauuugcaaa

SEQ ID NO: 59822 - RNA, 32 nt, Homo Sapiens
aagaauugguguuuguuuuucuuuauaaauug

SEQ ID NO: 59823 - RNA, 32 nt, Homo Sapiens
gccugaccgaggccgcgccagggcgcuguugc

SEQ ID NO: 59824 - RNA, 32 nt, Homo Sapiens
gcuaagugaccagcuuucuuguccucuccuuu

SEQ ID NO: 59825 - RNA, 32 nt, Homo Sapiens
ucuggggcggcgagacuggcugggaggagggc

SEQ ID NO: 59826 - RNA, 31 nt, Homo Sapiens
gggcauuuccacaaauuuaaguuccugucca

SEQ ID NO: 59827 - RNA, 32 nt, Homo Sapiens
ccucuccagcuccugcacccccggcccccgug

SEQ ID NO: 59828 - RNA, 32 nt, Homo Sapiens
gcggcggggcaguggcugcugcguuuucgugu

SEQ ID NO: 59829 - RNA, 32 nt, Homo Sapiens
ccucuggcagaaaaauuaugucaaagaugaac

SEQ ID NO: 59830 - RNA, 32 nt, Homo Sapiens
cggcuccccuccccggcacugcgcuuccuucc

SEQ ID NO: 59831 - RNA, 32 nt, Homo Sapiens
ucauccacauagugccagcagcagugccacgc

SEQ ID NO: 59832 - RNA, 32 nt, Homo Sapiens
uaccuuagaaaacaaguauugucgguuaccuc

SEQ ID NO: 59833 - RNA, 32 nt, Homo Sapiens
ggguggaucuuggauuuggggguggaucgcgg

SEQ ID NO: 59834 - RNA, 32 nt, Homo Sapiens
cacggauccccgcuccuggcccucgccucgcc

SEQ ID NO: 59835 - RNA, 32 nt, Homo Sapiens
uucacucucuuucuaaugcuucccaccuuacc

SEQ ID NO: 59836 - RNA, 32 nt, Homo Sapiens
aaggggucccuggccuacgggcugaggcuggu

SEQ ID NO: 59837 - RNA, 32 nt, Homo Sapiens
caucgguguucgcugauguccagucuauggag

SEQ ID NO: 59838 - RNA, 32 nt, Homo Sapiens
aggagccuuucuggauuuggauguggcuaugg

SEQ ID NO: 59839 - RNA, 31 nt, Homo Sapiens
acgcaggcucugggccugccccuugcccagg

SEQ ID NO: 59840 - RNA, 32 nt, Homo Sapiens
ggagggcaagcagccaggaucacuggcucaag

SEQ ID NO: 59841 - RNA, 32 nt, Homo Sapiens
aaugugacugagaccacuacaauggccaugcc

SEQ ID NO: 59842 - RNA, 32 nt, Homo Sapiens
ucuguagacuguaccaaugucaauuucugcgu

SEQ ID NO: 59843 - RNA, 32 nt, Homo Sapiens
acugucuuguuuaguguagaagggaagagaau

SEQ ID NO: 59844 - RNA, 32 nt, Homo Sapiens
ggcaccucagcaaccucugaguguggacaaua

SEQ ID NO: 59845 - RNA, 32 nt, Homo Sapiens
accauuccaucccacagcugcuggacauagag

SEQ ID NO: 59846 - RNA, 32 nt, Homo Sapiens
gcugccacgcaccaguauggggugacucagug

SEQ ID NO: 59847 - RNA, 32 nt, Homo Sapiens
aucaucaugggcagcucugugggggcucugcu

SEQ ID NO: 59848 - RNA, 32 nt, Homo Sapiens
acauuucagaagaucaaacaaaucuauauuua

SEQ ID NO: 59849 - RNA, 32 nt, Homo Sapiens
auguuucaguugcaggugcuguauuuauguau

SEQ ID NO: 59850 - RNA, 32 nt, Homo Sapiens
uuucacagucaaacucggcauucuucagucag

SEQ ID NO: 59851 - RNA, 32 nt, Homo Sapiens
ugcauuuauucuaaugugauuguaugaacaag

SEQ ID NO: 59852 - RNA, 32 nt, Homo Sapiens
guaaguaggucucauucauuuugacaguuauc

SEQ ID NO: 59853 - RNA, 32 nt, Homo Sapiens
uuucccaugaggaaauauauauuauccaccgg

SEQ ID NO: 59854 - RNA, 32 nt, Homo Sapiens
acaaagacugaauaauuauugcccaguuauuc

SEQ ID NO: 59855 - RNA, 32 nt, Homo Sapiens
gugugugugaugucugugucugaugguguguu

SEQ ID NO: 59856 - RNA, 32 nt, Homo Sapiens
gccgccuggugaagggggcgcccagggcgcau

SEQ ID NO: 59857 - RNA, 32 nt, Homo Sapiens
cugcuuucuaggggucucuuuggauugaggac

SEQ ID NO: 59858 - RNA, 32 nt, Homo Sapiens
aacauauguaauuauuuuucagucuuuuucaa

SEQ ID NO: 59859 - RNA, 32 nt, Homo Sapiens
ggacacaggcacuuuuccaaugggcaagccca

SEQ ID NO: 59860 - RNA, 32 nt, Homo Sapiens
cuuagcucucccugagacccagcuggcuuuua

SEQ ID NO: 59861 - RNA, 32 nt, Homo Sapiens
gccagcggugauugcuacuugagguaguuuuu

SEQ ID NO: 59862 - RNA, 32 nt, Homo Sapiens
gacuguugaccuugguuuucucuucuaaguuu

SEQ ID NO: 59863 - RNA, 31 nt, Homo Sapiens
aaauccuguucguggucgacggcuuugauga

SEQ ID NO: 59864 - RNA, 32 nt, Homo Sapiens
aagguuggagguggggaaggcuuuguauaauc

SEQ ID NO: 59865 - RNA, 32 nt, Homo Sapiens
aaagaaugcaagauuuaaaaaugauuguuuug

SEQ ID NO: 59866 - RNA, 32 nt, Homo Sapiens
cacacuaaaucuuuaauuuuuugggggguggu

SEQ ID NO: 59867 - RNA, 32 nt, Homo Sapiens
cccucucccccaccacccagcccacugcacug

SEQ ID NO: 59868 - RNA, 32 nt, Homo Sapiens
cgggaaagggaaggggaagcaguagcacuaau

SEQ ID NO: 59869 - RNA, 32 nt, Homo Sapiens
cccucuuggggauaccaugcauuggaaggaca

SEQ ID NO: 59870 - RNA, 32 nt, Homo Sapiens
gauaggugucauauauaggacggaguaaucug

SEQ ID NO: 59871 - RNA, 32 nt, Homo Sapiens
ugugagacagaguuucacucuuguugcccagg

SEQ ID NO: 59872 - RNA, 32 nt, Homo Sapiens
gaaagaauuuaaagagaagcugaacaauggaa

SEQ ID NO: 59873 - RNA, 32 nt, Homo Sapiens
ccaccacuaaaaaacuaacaaugugauuuaua

SEQ ID NO: 59874 - RNA, 32 nt, Homo Sapiens
ggcuucuucccucuccugcgcgcagccaccgc

SEQ ID NO: 59875 - RNA, 32 nt, Homo Sapiens
auuaugacugugacagugacuaaucccccuau

SEQ ID NO: 59876 - RNA, 32 nt, Homo Sapiens
gcuuugugcauaauuuggauguccaaauuuga

SEQ ID NO: 59877 - RNA, 32 nt, Homo Sapiens
ggauggggacugccaggggcaguuggcaaaag

SEQ ID NO: 59878 - RNA, 32 nt, Homo Sapiens
auauuuugcccccaacuuggcucggcauguga

SEQ ID NO: 59879 - RNA, 32 nt, Homo Sapiens
uuuauggaagcauuuuuaaauagcacuuuuug

SEQ ID NO: 59880 - RNA, 32 nt, Homo Sapiens
ccgcagccacugcuccaccucccccaaaucgu

SEQ ID NO: 59881 - RNA, 32 nt, Homo Sapiens
auuuuuauguuccuguuagaaaugguguggcu

SEQ ID NO: 59882 - RNA, 32 nt, Homo Sapiens
cauacaauuggaaauccauuuuuguuguaaag

SEQ ID NO: 59883 - RNA, 32 nt, Homo Sapiens
aaccgaagaaacaaaaucuuaaaggcuauggu

SEQ ID NO: 59884 - RNA, 32 nt, Homo Sapiens
gaccaugaugcccaggacuggcacuuuuucuu

SEQ ID NO: 59885 - RNA, 32 nt, Homo Sapiens
aaagaauuuccuucuuuuguuucuccaaaucu

SEQ ID NO: 59886 - RNA, 32 nt, Homo Sapiens
ggucucaaacucccaaccucaggugauaugcc

SEQ ID NO: 59887 - RNA, 32 nt, Homo Sapiens
ucugcaggaaaugugcccagcagcucuugguc

SEQ ID NO: 59888 - RNA, 32 nt, Homo Sapiens
uagaggauggugguaguaaugaaaaugaugca

SEQ ID NO: 59889 - RNA, 32 nt, Homo Sapiens
cagcucugacauucugauucgaaugacacugu

SEQ ID NO: 59890 - RNA, 32 nt, Homo Sapiens
uuucuccaacuggaaaagcggggacccagcga

SEQ ID NO: 59891 - RNA, 32 nt, Homo Sapiens
aaccccagacacagggguuggccacaauccca

SEQ ID NO: 59892 - RNA, 32 nt, Homo Sapiens
ggaagaggagaagagggaccuggaaggcauuc

SEQ ID NO: 59893 - RNA, 32 nt, Homo Sapiens
ccgcagagcagccgcuggcccgggccggggga

SEQ ID NO: 59894 - RNA, 32 nt, Homo Sapiens
aguucuucauucaaacaccggauuaaagagca

SEQ ID NO: 59895 - RNA, 32 nt, Homo Sapiens
gcacgaggauguucucagcucuggccaauacu

SEQ ID NO: 59896 - RNA, 32 nt, Homo Sapiens
gaccggcccagaaaucaguccaaauaccagug

SEQ ID NO: 59897 - RNA, 32 nt, Homo Sapiens
ugucucggccucacccgccgggagaccacaga

SEQ ID NO: 59898 - RNA, 32 nt, Homo Sapiens
aaaaucuaaaccaaggaucccuggacaagaag

SEQ ID NO: 59899 - RNA, 32 nt, Homo Sapiens
caacgcuguuaggccuggccucucgaggccuc

SEQ ID NO: 59900 - RNA, 32 nt, Homo Sapiens
caauuacucugcaccaggcuaaaaugaguaaa

SEQ ID NO: 59901 - RNA, 32 nt, Homo Sapiens
agauguuuuucugaagaucaauuagacauuuu

SEQ ID NO: 59902 - RNA, 32 nt, Homo Sapiens
uagucuaaauguucgguauucuauucaggacu

SEQ ID NO: 59903 - RNA, 32 nt, Homo Sapiens
gcccagacuuacacccugacugucccaccuuc

SEQ ID NO: 59904 - RNA, 32 nt, Homo Sapiens
acugcuuuucuuuaacguuuucaugguaaugc

SEQ ID NO: 59905 - RNA, 31 nt, Homo Sapiens
gauaauugaaacaaguccugaguugaaauaa

SEQ ID NO: 59906 - RNA, 32 nt, Homo Sapiens
cgggacgcgccgggcuggagugggcgguuaua

SEQ ID NO: 59907 - RNA, 32 nt, Homo Sapiens
gaucucuugagcccaggaguuugagacuagcc

SEQ ID NO: 59908 - RNA, 32 nt, Homo Sapiens
aagaacaaauuuauuuugcuuaccacaguguu

SEQ ID NO: 59909 - RNA, 32 nt, Homo Sapiens
uuccuuuuuaaggcuaaauaauaauccaguga

SEQ ID NO: 59910 - RNA, 32 nt, Homo Sapiens
acaagucuacaccccaggauacuccagccucc

SEQ ID NO: 59911 - RNA, 32 nt, Homo Sapiens
aaacugagaaaacguaggaaaccauucuuuau

SEQ ID NO: 59912 - RNA, 32 nt, Homo Sapiens
cacuccuaaauugcuggaugacugaacuuugg

SEQ ID NO: 59913 - RNA, 32 nt, Homo Sapiens
ucuacaaaaaauacaaaaauuagccuagcaug

SEQ ID NO: 59914 - RNA, 32 nt, Homo Sapiens
cauacuuccuggucaguagaccucaaaagguu

SEQ ID NO: 59915 - RNA, 32 nt, Homo Sapiens
uguaaaaagaaaucuguaaauggugaccguac

SEQ ID NO: 59916 - RNA, 32 nt, Homo Sapiens
gucauugcacuccagccugggcgacaagagcg

SEQ ID NO: 59917 - RNA, 32 nt, Homo Sapiens
acauagaacuuuuaauucugcugguguaggcu

SEQ ID NO: 59918 - RNA, 32 nt, Homo Sapiens
uuuuguuugaagcucagagggagaugggcaau

SEQ ID NO: 59919 - RNA, 32 nt, Homo Sapiens
auaguugcaucacauguaucuaauccgagagu

SEQ ID NO: 59920 - RNA, 32 nt, Homo Sapiens
augccccuuccauuuuaagucugucuccuuac

SEQ ID NO: 59921 - RNA, 32 nt, Homo Sapiens
ugcccccggcggcuacccgcuggaccggccac

SEQ ID NO: 59922 - RNA, 32 nt, Homo Sapiens
gaaucaccucagcauccuccuguccccagcug

SEQ ID NO: 59923 - RNA, 32 nt, Homo Sapiens
ucuuuauuuuugguaagauauugugcuuuacc

SEQ ID NO: 59924 - RNA, 32 nt, Homo Sapiens
ugccuucauuacugcccuucucuugcugccuc

SEQ ID NO: 59925 - RNA, 32 nt, Homo Sapiens
cgagugacccuacugcauaccuguaaucgaag

SEQ ID NO: 59926 - RNA, 31 nt, Homo Sapiens
ccucuuccuggcccccagcaggcaaggaggg

SEQ ID NO: 59927 - RNA, 29 nt, Homo Sapiens
uauuuaauaaaauuauuuuauguucauug

SEQ ID NO: 59928 - RNA, 32 nt, Homo Sapiens
aaggcaacugugaugauaaaauuuaagcuccc

SEQ ID NO: 59929 - RNA, 32 nt, Homo Sapiens
uaauaugaaacaaggggggaggguaauagcaa

SEQ ID NO: 59930 - RNA, 32 nt, Homo Sapiens
acagggagucuguggccguccaggugaaucac

SEQ ID NO: 59931 - RNA, 32 nt, Homo Sapiens
uuucugaugccucuguggguguguguaaguua

SEQ ID NO: 59932 - RNA, 32 nt, Homo Sapiens
uguaggagguacucaaggguuugggggcaaaa

SEQ ID NO: 59933 - RNA, 32 nt, Homo Sapiens
ugcauuuuaaacaauuguucugguaacugcau

SEQ ID NO: 59934 - RNA, 32 nt, Homo Sapiens
uccauucauguagaugcuauaaacaucauggu

SEQ ID NO: 59935 - RNA, 32 nt, Homo Sapiens
guuacuucaucuuuccucuacuccccauucuu

SEQ ID NO: 59936 - RNA, 32 nt, Homo Sapiens
uagcagggccgcgcccuuggugaccucaggca

SEQ ID NO: 59937 - RNA, 32 nt, Homo Sapiens
agaguuucuuugucacaacaaacaaggggaaa

SEQ ID NO: 59938 - RNA, 32 nt, Homo Sapiens
accccagucuguggccuauuaggagcccagcc

SEQ ID NO: 59939 - RNA, 32 nt, Homo Sapiens
cagacuggagugagaacuuauggugcuuuuuu

SEQ ID NO: 59940 - RNA, 32 nt, Homo Sapiens
aucaaaaggaaugauguauuuuuuacguguug

SEQ ID NO: 59941 - RNA, 32 nt, Homo Sapiens
cuauaugagauggcugaaaaaauaccacaucg

SEQ ID NO: 59942 - RNA, 32 nt, Homo Sapiens
acaggugauaauuaccaucuucgaccaggagc

SEQ ID NO: 59943 - RNA, 29 nt, Homo Sapiens
auacauuggugucagaggaccuugacugg

SEQ ID NO: 59944 - RNA, 32 nt, Homo Sapiens
ugucggaggagcuccucuguuuccugugcagu

SEQ ID NO: 59945 - RNA, 32 nt, Homo Sapiens
guuaggccucguuagcucuaugguucauaugc

SEQ ID NO: 59946 - RNA, 32 nt, Homo Sapiens
cuagagugaugaugugaaagaaauggugauuc

SEQ ID NO: 59947 - RNA, 32 nt, Homo Sapiens
ggcugcucucaaacuccugaccucaggugauc

SEQ ID NO: 59948 - RNA, 32 nt, Homo Sapiens
cgguacguuuggagacgccgggaacccgcguu

SEQ ID NO: 59949 - RNA, 32 nt, Homo Sapiens
aauaacaguuuagcacgauuauuucacacagu

SEQ ID NO: 59950 - RNA, 32 nt, Homo Sapiens
gggaggagcucgccgcgcccgcucgccgccuc

SEQ ID NO: 59951 - RNA, 32 nt, Homo Sapiens
aguuugaggcuacagugagcugugauugcacc

SEQ ID NO: 59952 - RNA, 32 nt, Homo Sapiens
cccugaugcagccucaggaucuuccaagcccc

SEQ ID NO: 59953 - RNA, 32 nt, Homo Sapiens
cguccggccgcuggagacccagggagccgggg

SEQ ID NO: 59954 - RNA, 32 nt, Homo Sapiens
gugucugccaucucuguggccucuggagagug

SEQ ID NO: 59955 - RNA, 32 nt, Homo Sapiens
augaugugguuuucaucuuucauucuguucaa

SEQ ID NO: 59956 - RNA, 32 nt, Homo Sapiens
gugcaaaaauuguagaauaaauguauaagggu

SEQ ID NO: 59957 - RNA, 32 nt, Homo Sapiens
accaagcuugggagccagccugccaagagccg

SEQ ID NO: 59958 - RNA, 32 nt, Homo Sapiens
ccguccguccugccuccauggacccgcccggg

SEQ ID NO: 59959 - RNA, 32 nt, Homo Sapiens
uccaacucuccuuuccucccccacccuugagu

SEQ ID NO: 59960 - RNA, 32 nt, Homo Sapiens
ugcucuggcaggcgcgcgcgggccccggcgag

SEQ ID NO: 59961 - RNA, 32 nt, Homo Sapiens
cugcuucugauuuccccucccccagggcucau

SEQ ID NO: 59962 - RNA, 32 nt, Homo Sapiens
ccggugccugacguggugggcuggggcccuuc

SEQ ID NO: 59963 - RNA, 32 nt, Homo Sapiens
cagaugcuguucuacuggagaaguucuagauu

SEQ ID NO: 59964 - RNA, 32 nt, Homo Sapiens
ccgacccagaaagcauggggaaugugaagggu

SEQ ID NO: 59965 - RNA, 32 nt, Homo Sapiens
uggagaacugguuucugucuaauccuucucua

SEQ ID NO: 59966 - RNA, 31 nt, Homo Sapiens
gugugugcagcauacgcaggagccuauccug

SEQ ID NO: 59967 - RNA, 32 nt, Homo Sapiens
gaaaaucgugacaacacuuguguuaugaagca

SEQ ID NO: 59968 - RNA, 32 nt, Homo Sapiens
gguuucaucauguuggccaggcuggucuggaa

SEQ ID NO: 59969 - RNA, 32 nt, Homo Sapiens
cuuauuuuauugaaucaguuaugcucuauuau

SEQ ID NO: 59970 - RNA, 32 nt, Homo Sapiens
aagggcgcguccccgaguccccugggugaccu

SEQ ID NO: 59971 - RNA, 32 nt, Homo Sapiens
aaaucucagauuuuggagcauuuuggauauug

SEQ ID NO: 59972 - RNA, 32 nt, Homo Sapiens
gugaugggccgcucccggggcucccgcgggga

SEQ ID NO: 59973 - RNA, 32 nt, Homo Sapiens
ccacucagugaaaauaauaacauuauuaugag

SEQ ID NO: 59974 - RNA, 32 nt, Homo Sapiens
gagccaugaagcauuaaaaugcaugguguuga

SEQ ID NO: 59975 - RNA, 32 nt, Homo Sapiens
ucugguuuucacgcccucuagccccuaccccc

SEQ ID NO: 59976 - RNA, 32 nt, Homo Sapiens
uuaaucuagcuaaacacugguccugcuccuga

SEQ ID NO: 59977 - RNA, 32 nt, Homo Sapiens
agugaggccuaccccacaccugggcucuccac

SEQ ID NO: 59978 - RNA, 32 nt, Homo Sapiens
ggcaggguacuauuuaaggugcaauauugaaa

SEQ ID NO: 59979 - RNA, 32 nt, Homo Sapiens
gcuguaacccaugcacaggaccucaagguggg

SEQ ID NO: 59980 - RNA, 32 nt, Homo Sapiens
aaagccgguggaagauucuggaaugccgugcg

SEQ ID NO: 59981 - RNA, 32 nt, Homo Sapiens
ucccacagcuggaagguaggggaugggggugc

SEQ ID NO: 59982 - RNA, 32 nt, Homo Sapiens
aucaugcagccggagagcuggcugggagcccu

SEQ ID NO: 59983 - RNA, 32 nt, Homo Sapiens
ucccggaacaaaagcggaagaggggccagccu

SEQ ID NO: 59984 - RNA, 32 nt, Homo Sapiens
ccaaagagggcaggaggaagccaggcaugucu

SEQ ID NO: 59985 - RNA, 32 nt, Homo Sapiens
gagcuugccugccugccuguggagacagcccu

SEQ ID NO: 59986 - RNA, 32 nt, Homo Sapiens
ucccucugccucuguucagcuccaccuugaug

SEQ ID NO: 59987 - RNA, 32 nt, Homo Sapiens
ucuugcgacccggcccgcuccagauccccaca

SEQ ID NO: 59988 - RNA, 32 nt, Homo Sapiens
ugcagcccgcggcccauggugcugcccaccug

SEQ ID NO: 59989 - RNA, 32 nt, Homo Sapiens
auggacaaaaugaaacaaaauugcuccacaug

SEQ ID NO: 59990 - RNA, 32 nt, Homo Sapiens
uauaaaacuuuaauuucuuuuuuuuaaaaaug

SEQ ID NO: 59991 - RNA, 32 nt, Homo Sapiens
gguuacugcagaugaagcugggauggaggcuc

SEQ ID NO: 59992 - RNA, 32 nt, Homo Sapiens
ucccuauuucagagauagucaauauaauaugu

SEQ ID NO: 59993 - RNA, 32 nt, Homo Sapiens
agacuaggaaguagcccucguucuccagggca

SEQ ID NO: 59994 - RNA, 32 nt, Homo Sapiens
auccuuauaaucaaccuugaagaggagauacu

SEQ ID NO: 59995 - RNA, 32 nt, Homo Sapiens
uccaaucaccagagaugcaaucuccugcuaga

SEQ ID NO: 59996 - RNA, 32 nt, Homo Sapiens
cuuaucuuuaacauuuauuuuacaaacaaccu

SEQ ID NO: 59997 - RNA, 32 nt, Homo Sapiens
auggaagaugaccccguaaaggcccaaggcug

SEQ ID NO: 59998 - RNA, 32 nt, Homo Sapiens
ccuucuauuaacauuucuuuucaguuauacac

SEQ ID NO: 59999 - RNA, 32 nt, Homo Sapiens
aaugagggaggaaggcagggacacccuggaac

SEQ ID NO: 60000 - RNA, 32 nt, Homo Sapiens
auucaaacuaauaaaaucaugaauauuuuuau

SEQ ID NO: 60001 - RNA, 32 nt, Homo Sapiens
guauaaaauguauguagauguauauacaaaaa

SEQ ID NO: 60002 - RNA, 32 nt, Homo Sapiens
ggcuccaccguccagcugucuguccguccagg

SEQ ID NO: 60003 - RNA, 32 nt, Homo Sapiens
gauaaaacucaucagugcuuugaaacaagcag

SEQ ID NO: 60004 - RNA, 32 nt, Homo Sapiens
aaacccagaauaguugguaugucagcuaguca

SEQ ID NO: 60005 - RNA, 32 nt, Homo Sapiens
cgagaugauuggcgaguucccagaccugcacc

SEQ ID NO: 60006 - RNA, 32 nt, Homo Sapiens
cugcuagguauuaaccauuucgacucgagcag

SEQ ID NO: 60007 - RNA, 32 nt, Homo Sapiens
gcucccagaacaggcaccccuucccaaaccag

SEQ ID NO: 60008 - RNA, 32 nt, Homo Sapiens
ggcguggcugcccuuccacauguggccugcgg

SEQ ID NO: 60009 - RNA, 32 nt, Homo Sapiens
cacaucggagaauucacacaggggagaaaccc

SEQ ID NO: 60010 - RNA, 32 nt, Homo Sapiens
uguugaaauggcaagauuuuguuauuuuucag

SEQ ID NO: 60011 - RNA, 32 nt, Homo Sapiens
cuaagcuuuuacaaaagaaguaucuguuuuau

SEQ ID NO: 60012 - RNA, 32 nt, Homo Sapiens
agaauguggcaaagcuuuuuaccgauucucau

SEQ ID NO: 60013 - RNA, 32 nt, Homo Sapiens
aauacuauuuuugagucuaaaugauagaagcc

SEQ ID NO: 60014 - RNA, 32 nt, Homo Sapiens
aaugagaagagauacugugucuuuauugugug

SEQ ID NO: 60015 - RNA, 32 nt, Homo Sapiens
ggccagacagauaugcacaaggcaagagcaga

SEQ ID NO: 60016 - RNA, 32 nt, Homo Sapiens
uucccucucgcacauucuacacccaagugccu

SEQ ID NO: 60017 - RNA, 32 nt, Homo Sapiens
accccggcguucgaccucagccaggauccgga

SEQ ID NO: 60018 - RNA, 32 nt, Homo Sapiens
cguggcagagaaaaauaguagucuaucauuca

SEQ ID NO: 60019 - RNA, 32 nt, Homo Sapiens
aacaaguaaccuuugcagaauuccacccaucu

SEQ ID NO: 60020 - RNA, 32 nt, Homo Sapiens
cuuccggagagcgggaaggcuaaaacgcggua

SEQ ID NO: 60021 - RNA, 32 nt, Homo Sapiens
acuguguugcuuaaauaucaaguauuguuuau

SEQ ID NO: 60022 - RNA, 32 nt, Homo Sapiens
uguuucauuuuuguuuaacaagguauuuauac

SEQ ID NO: 60023 - RNA, 32 nt, Homo Sapiens
ggcucuugccuggccuaggccugguuccuggu

SEQ ID NO: 60024 - RNA, 32 nt, Homo Sapiens
gaacaauuaguacucagacauguggcugcuac

SEQ ID NO: 60025 - RNA, 32 nt, Homo Sapiens
acuccugacccccaagugauccacccaccucg

SEQ ID NO: 60026 - RNA, 32 nt, Homo Sapiens
auauacuuucaaggagcagcuccuccaggauu

SEQ ID NO: 60027 - RNA, 32 nt, Homo Sapiens
ucucccagacucugucuucaauaaaaacugag

SEQ ID NO: 60028 - RNA, 32 nt, Homo Sapiens
uacagugcuuuauucaaaucuaaucuuauaug

SEQ ID NO: 60029 - RNA, 32 nt, Homo Sapiens
ccucuaggacuccacaguuuugccuuaaagga

SEQ ID NO: 60030 - RNA, 32 nt, Homo Sapiens
uggggcagagccuggggucugggugggagaag

SEQ ID NO: 60031 - RNA, 32 nt, Homo Sapiens
gcacugggcggugagccaccuccuggcaacuc

SEQ ID NO: 60032 - RNA, 32 nt, Homo Sapiens
uuaauugaauacuguuucuucagucaugguua

SEQ ID NO: 60033 - RNA, 32 nt, Homo Sapiens
cagguuacauaaauaauagagcagaugguugc

SEQ ID NO: 60034 - RNA, 32 nt, Homo Sapiens
aggauucuguucugcaacuccauccuccugug

SEQ ID NO: 60035 - RNA, 32 nt, Homo Sapiens
ucauaggaacuuugcaguaugaaaauggcuag

SEQ ID NO: 60036 - RNA, 32 nt, Homo Sapiens
cacacacacacaccccaacacacacacacaca

SEQ ID NO: 60037 - RNA, 32 nt, Homo Sapiens
aaguucuguuaggagagcugccugaaacaaca

SEQ ID NO: 60038 - RNA, 32 nt, Homo Sapiens
cacucaacaaacauuaaaguuguaggaaaaag

SEQ ID NO: 60039 - RNA, 32 nt, Homo Sapiens
aaauuauucauuucuguucuuaaaagggcuag

SEQ ID NO: 60040 - RNA, 32 nt, Homo Sapiens
cacacacacacacacacacacacacacaccuu

SEQ ID NO: 60041 - RNA, 32 nt, Homo Sapiens
gacaagagaacuucuuuuuuuaacaagaggac

SEQ ID NO: 60042 - RNA, 32 nt, Homo Sapiens
cucugcugaagucuccccgcagcccucuccac

SEQ ID NO: 60043 - RNA, 32 nt, Homo Sapiens
uuuaaggcggguggggggaggaggggguagag

SEQ ID NO: 60044 - RNA, 32 nt, Homo Sapiens
uggcuuuuacugugucugaauugagucagacc

SEQ ID NO: 60045 - RNA, 32 nt, Homo Sapiens
gaguuucccgugccgacgccccggggccacuu

SEQ ID NO: 60046 - RNA, 32 nt, Homo Sapiens
cagauaaaagcauagaaguaaaucauucggau

SEQ ID NO: 60047 - RNA, 32 nt, Homo Sapiens
uugaaaaguguuucuuuauucacaucaaaguu

SEQ ID NO: 60048 - RNA, 30 nt, Homo Sapiens
ccaucucuggacugucgucaggaaacgccu

SEQ ID NO: 60049 - RNA, 32 nt, Homo Sapiens
gcucgcgcugccgggcgugggcguggacucgg

SEQ ID NO: 60050 - RNA, 32 nt, Homo Sapiens
aacaagauaaagacaaauccacuucuuuggcc

SEQ ID NO: 60051 - RNA, 32 nt, Homo Sapiens
aagccagcccacaggguccugcagcuuguccu

SEQ ID NO: 60052 - RNA, 32 nt, Homo Sapiens
uggacaccagcccugcguggacguggccugug

SEQ ID NO: 60053 - RNA, 32 nt, Homo Sapiens
agcccaguggcuugucagauugguaaauaaug

SEQ ID NO: 60054 - RNA, 32 nt, Homo Sapiens
auuaagaugucauauuauuuugaaaguacaaa

SEQ ID NO: 60055 - RNA, 32 nt, Homo Sapiens
uggagcugggaacacaaaggcagcugauaagc

SEQ ID NO: 60056 - RNA, 32 nt, Homo Sapiens
gguuuccuggguaugccuggacuguugcccag

SEQ ID NO: 60057 - RNA, 32 nt, Homo Sapiens
cugaacauccuuccuucccacccaucgcugug

SEQ ID NO: 60058 - RNA, 32 nt, Homo Sapiens
cccuaaaauguggacuggguuuccugucuuag

SEQ ID NO: 60059 - RNA, 32 nt, Homo Sapiens
cugggacuaaguguaccagagaagggcuugga

SEQ ID NO: 60060 - RNA, 32 nt, Homo Sapiens
caaaggauuuauauauuuuuuguacaaaguuu

SEQ ID NO: 60061 - RNA, 32 nt, Homo Sapiens
ggagagacuaaacuuuuguuuuccuuacccag

SEQ ID NO: 60062 - RNA, 32 nt, Homo Sapiens
cugcugagugggccccucuccucugccccugg

SEQ ID NO: 60063 - RNA, 32 nt, Homo Sapiens
cccaccccauccucccaauccaaaacguaacu

SEQ ID NO: 60064 - RNA, 32 nt, Homo Sapiens
uuaccaaaaaauacgaaaauuagccaggugug

SEQ ID NO: 60065 - RNA, 32 nt, Homo Sapiens
cuggacuggguugccggaugguuccuuuuucu

SEQ ID NO: 60066 - RNA, 32 nt, Homo Sapiens
gcuccggcucugcuggccggucuaaagcggca

SEQ ID NO: 60067 - RNA, 32 nt, Homo Sapiens
ugauugaugucaucuaucaagaauuucaagag

SEQ ID NO: 60068 - RNA, 32 nt, Homo Sapiens
cacccgaggcccauaccaagacucuguuccug

SEQ ID NO: 60069 - RNA, 32 nt, Homo Sapiens
gaacuuacgcugcgggaccccgggcacuguug

SEQ ID NO: 60070 - RNA, 32 nt, Homo Sapiens
cggcuuucuggcugcugugcugccuccugggc

SEQ ID NO: 60071 - RNA, 32 nt, Homo Sapiens
uucauuucuuccgguagccuucgauaucauga

SEQ ID NO: 60072 - RNA, 32 nt, Homo Sapiens
auguguuccagaaacugcucuuuguguucccu

SEQ ID NO: 60073 - RNA, 32 nt, Homo Sapiens
aaaaaugaaacacuuuggauguauuacuuagg

SEQ ID NO: 60074 - RNA, 32 nt, Homo Sapiens
guggaggucugccagcugccccggccaggcuu

SEQ ID NO: 60075 - RNA, 32 nt, Homo Sapiens
caggggcagccuuccugguuuaucuccaccgg

SEQ ID NO: 60076 - RNA, 32 nt, Homo Sapiens
gggcccuggccacaaugaccucuuugcccugc

SEQ ID NO: 60077 - RNA, 32 nt, Homo Sapiens
cgaccccaccucugccgccgccgccugcgccg

SEQ ID NO: 60078 - RNA, 32 nt, Homo Sapiens
acagguugaagaaauauggagaucaacacaaa

SEQ ID NO: 60079 - RNA, 32 nt, Homo Sapiens
gugacugccucuuccagggcgggcgguguggu

SEQ ID NO: 60080 - RNA, 32 nt, Homo Sapiens
ccucugacccucaagaacgggacagagcagcu

SEQ ID NO: 60081 - RNA, 32 nt, Homo Sapiens
uucuguccuaucuucuuaacuccaccuccguc

SEQ ID NO: 60082 - RNA, 32 nt, Homo Sapiens
ggagccacaaaaagcguagcggugugauuucu

SEQ ID NO: 60083 - RNA, 32 nt, Homo Sapiens
ucaccucagaucugagaccagcgucuuccauc

SEQ ID NO: 60084 - RNA, 32 nt, Homo Sapiens
auguuucuaaaacuuucacuggauuucuuuag

SEQ ID NO: 60085 - RNA, 32 nt, Homo Sapiens
cuguguacaaauagaauuauuacuucuaguug

SEQ ID NO: 60086 - RNA, 32 nt, Homo Sapiens
gaccuguauuuacuguauuuaaaugaguaaag

SEQ ID NO: 60087 - RNA, 32 nt, Homo Sapiens
agacagucugaagaggaaggaagcagcaguau

SEQ ID NO: 60088 - RNA, 32 nt, Homo Sapiens
cacuccugaagccagcgacacccacgagccca

SEQ ID NO: 60089 - RNA, 32 nt, Homo Sapiens
auccuuuuucuuuuucccugguaaggacauca

SEQ ID NO: 60090 - RNA, 32 nt, Homo Sapiens
uuagauuaaaaauaaaaugucgcauguaaagg

SEQ ID NO: 60091 - RNA, 32 nt, Homo Sapiens
gucuauacuuuagauuuucaguuuuuugcagg

SEQ ID NO: 60092 - RNA, 32 nt, Homo Sapiens
ucagccggguugauuguguggguuagacagag

SEQ ID NO: 60093 - RNA, 32 nt, Homo Sapiens
cuuuuuucuuuuucuuuuuuuuuuuuuuuuuu

SEQ ID NO: 60094 - RNA, 32 nt, Homo Sapiens
uuuuuucgcggcucucggcuuccacugcagcc

SEQ ID NO: 60095 - RNA, 32 nt, Homo Sapiens
auauuuauauauauuucgugacuuauaucuug

SEQ ID NO: 60096 - RNA, 32 nt, Homo Sapiens
cugcggggcggagagcugcggcuggcccagcg

SEQ ID NO: 60097 - RNA, 32 nt, Homo Sapiens
gggaccaggaccaggcuaauauuuucaguccu

SEQ ID NO: 60098 - RNA, 31 nt, Homo Sapiens
caguguggaacaauggaaagagccugggugu

SEQ ID NO: 60099 - RNA, 32 nt, Homo Sapiens
gccaguuggugcccgcccuggggccgccagug

SEQ ID NO: 60100 - RNA, 32 nt, Homo Sapiens
gcaguuguguggaaaacuguuuuguaaugaaa

SEQ ID NO: 60101 - RNA, 32 nt, Homo Sapiens
gucacauauacaccagacugagagauaaaauu

SEQ ID NO: 60102 - RNA, 32 nt, Homo Sapiens
gaccuaagcugcucccagucucccagaaccaa

SEQ ID NO: 60103 - RNA, 32 nt, Homo Sapiens
cuccccaggccugggaucugacaccaucacca

SEQ ID NO: 60104 - RNA, 32 nt, Homo Sapiens
uacccaaugcuguaugcuaguaauuguuuuua

SEQ ID NO: 60105 - RNA, 32 nt, Homo Sapiens
acaucaguuggugaagcagaggacgcaaaugc

SEQ ID NO: 60106 - RNA, 32 nt, Homo Sapiens
gaggaaggucauuuggguuuuugugagauuug

SEQ ID NO: 60107 - RNA, 32 nt, Homo Sapiens
ucuccugccuaucucuuuugcauuccaaaguu

SEQ ID NO: 60108 - RNA, 32 nt, Homo Sapiens
uuuuaauuuuuucauucccuggacuauggguu

SEQ ID NO: 60109 - RNA, 32 nt, Homo Sapiens
cucguccugugcugcgggcucaggcggaaccc

SEQ ID NO: 60110 - RNA, 32 nt, Homo Sapiens
uuaggauugcuguugaaggcuuccucaggcaa

SEQ ID NO: 60111 - RNA, 32 nt, Homo Sapiens
ugccgcgguugcaguugucgcgcacgccucug

SEQ ID NO: 60112 - RNA, 32 nt, Homo Sapiens
gaacauuugaacaugaaugcuguuugugguac

SEQ ID NO: 60113 - RNA, 32 nt, Homo Sapiens
caccccgccuucccuuuuaacacaccguuaua

SEQ ID NO: 60114 - RNA, 32 nt, Homo Sapiens
aggaauuuacuacuuuauguccugcucucuaa

SEQ ID NO: 60115 - RNA, 32 nt, Homo Sapiens
guugcagugagccgagaucaugcugaaggaag

SEQ ID NO: 60116 - RNA, 32 nt, Homo Sapiens
gugaggcagccaggugggaggggguccccgga

SEQ ID NO: 60117 - RNA, 32 nt, Homo Sapiens
gucuuaucugaagaccccggcaccaaagugac

SEQ ID NO: 60118 - RNA, 32 nt, Homo Sapiens
agauccgggccccaggcugcugccgcuuuuua

SEQ ID NO: 60119 - RNA, 32 nt, Homo Sapiens
cgcagggccggcucccaaaaaccccaugugug

SEQ ID NO: 60120 - RNA, 32 nt, Homo Sapiens
gagggcgagggcacggccggguccuggcuggc

SEQ ID NO: 60121 - RNA, 32 nt, Homo Sapiens
uccucgacaacagccacuugcccgccacauuc

SEQ ID NO: 60122 - RNA, 32 nt, Homo Sapiens
auuuuuucugaauuuuuuuuuauauuuccucc

SEQ ID NO: 60123 - RNA, 32 nt, Homo Sapiens
uuucuguuaguuucuuuuuuguauauucuaug

SEQ ID NO: 60124 - RNA, 32 nt, Homo Sapiens
acgauuugaacuauuucuucuacuucacccac

SEQ ID NO: 60125 - RNA, 32 nt, Homo Sapiens
ggaugcguuggucuuucucccuugguuuguaa

SEQ ID NO: 60126 - RNA, 32 nt, Homo Sapiens
uuaacauuggcuauauuugcuuucucuuucuc

SEQ ID NO: 60127 - RNA, 31 nt, Homo Sapiens
aagucaagcagguaaugucagaauugaaucu

SEQ ID NO: 60128 - RNA, 32 nt, Homo Sapiens
uuucaagcuuuuacucuuaauuccuaaaugag

SEQ ID NO: 60129 - RNA, 32 nt, Homo Sapiens
uggauucacagcucguggcuguaaggaaaucu

SEQ ID NO: 60130 - RNA, 32 nt, Homo Sapiens
gaagagugaucagugacaaacaugccucauug

SEQ ID NO: 60131 - RNA, 32 nt, Homo Sapiens
ucggaggcagcgguugggcucgcggcgagcgg

SEQ ID NO: 60132 - RNA, 32 nt, Homo Sapiens
acuguaugaugcuuaugugaaugaaagugucc

SEQ ID NO: 60133 - RNA, 32 nt, Homo Sapiens
ccaagugggcccagcccggcccgcgucucgaa

SEQ ID NO: 60134 - RNA, 32 nt, Homo Sapiens
gagaaacugaggauguucucugauggacauuu

SEQ ID NO: 60135 - RNA, 32 nt, Homo Sapiens
acagccaucaugcgagucggugccaggggacc

SEQ ID NO: 60136 - RNA, 32 nt, Homo Sapiens
uggguguuuuauuugcagagaacaagaugugu

SEQ ID NO: 60137 - RNA, 32 nt, Homo Sapiens
uccccgcgacccccgcgcgcuccggagagaac

SEQ ID NO: 60138 - RNA, 32 nt, Homo Sapiens
gucggggucgguaaggggugcggcaaugcugc

SEQ ID NO: 60139 - RNA, 32 nt, Homo Sapiens
uuuugcuccuuggauacuuugcagcuuccuau

SEQ ID NO: 60140 - RNA, 32 nt, Homo Sapiens
aagcugcccaccagcccucuccacuggccuuu

SEQ ID NO: 60141 - RNA, 32 nt, Homo Sapiens
gacuucuaccuggcagaggcccuggccggccc

SEQ ID NO: 60142 - RNA, 32 nt, Homo Sapiens
agaaucuugccuuuuuucuuggcuccccccaa

SEQ ID NO: 60143 - RNA, 32 nt, Homo Sapiens
gggggucugccauucccucccccaggccuucc

SEQ ID NO: 60144 - RNA, 32 nt, Homo Sapiens
ccauugggugcuucccuggugccagugcuguu

SEQ ID NO: 60145 - RNA, 32 nt, Homo Sapiens
guagauaucaguaugaucuggguguggccaaa

SEQ ID NO: 60146 - RNA, 32 nt, Homo Sapiens
acuugcugugcauuuuaaccaauaaucugaug

SEQ ID NO: 60147 - RNA, 32 nt, Homo Sapiens
acgcguccgcccacgcguccggcagcguguuc

SEQ ID NO: 60148 - RNA, 32 nt, Homo Sapiens
ucauggcaauaauagaagauuaugaaggauuu

SEQ ID NO: 60149 - RNA, 32 nt, Homo Sapiens
ggguugucuccauaaaggaugcgggccuucag

SEQ ID NO: 60150 - RNA, 32 nt, Homo Sapiens
ggucauuuauauauuucuauuuuacuaagauu

SEQ ID NO: 60151 - RNA, 32 nt, Homo Sapiens
gccuggccaacauggugaaaccccguuucuac

SEQ ID NO: 60152 - RNA, 32 nt, Homo Sapiens
uccagccgucgccaccaggggcgucagagcgc

SEQ ID NO: 60153 - RNA, 30 nt, Homo Sapiens
uauucagauaaaagacucgcaggcacagau

SEQ ID NO: 60154 - RNA, 31 nt, Homo Sapiens
guauaacaagaggauugccugauccagccaa

SEQ ID NO: 60155 - RNA, 32 nt, Homo Sapiens
uagcauuuuuuuaauuugauaauuauaggacg

SEQ ID NO: 60156 - RNA, 32 nt, Homo Sapiens
gcaccacaugugucuucucacucgcgaggucu

SEQ ID NO: 60157 - RNA, 32 nt, Homo Sapiens
gggaaggaagaagagggaagaauccgaccacu

SEQ ID NO: 60158 - RNA, 32 nt, Homo Sapiens
aaccagcaaaacaaaaaaaugauuauuaccga

SEQ ID NO: 60159 - RNA, 32 nt, Homo Sapiens
guccuaccgacaacccugagaaguggcuggua

SEQ ID NO: 60160 - RNA, 28 nt, Homo Sapiens
aggaggucagcuaccaggaagauccaug

SEQ ID NO: 60161 - RNA, 32 nt, Homo Sapiens
acagggcggcggcagcugggaugcuggagagg

SEQ ID NO: 60162 - RNA, 32 nt, Homo Sapiens
agcuuuuccagaaauagaaaauucugccgucu

SEQ ID NO: 60163 - RNA, 32 nt, Homo Sapiens
aaaaaguaguuuuuaauacauugguuaggacu

SEQ ID NO: 60164 - RNA, 32 nt, Homo Sapiens
uuucugcauaauguauaaaaugggaaaguaau

SEQ ID NO: 60165 - RNA, 32 nt, Homo Sapiens
ugcauggcuggaguugcccgcguaaggcagcc

SEQ ID NO: 60166 - RNA, 32 nt, Homo Sapiens
aagggguuggggccucuugggggugauuucuu

SEQ ID NO: 60167 - RNA, 32 nt, Homo Sapiens
uguguggcugcugggcagcugugcuugucuuu

SEQ ID NO: 60168 - RNA, 32 nt, Homo Sapiens
uggcacgcagggaagucugcccucgugccugg

SEQ ID NO: 60169 - RNA, 32 nt, Homo Sapiens
caggcuugcucuucuuuuacaaugaaaggggu

SEQ ID NO: 60170 - RNA, 32 nt, Homo Sapiens
guuuuaacagguucucccggugaugcuggugc

SEQ ID NO: 60171 - RNA, 32 nt, Homo Sapiens
uggagcuauggcgccuccaaugaaggaucuac

SEQ ID NO: 60172 - RNA, 32 nt, Homo Sapiens
uagcuauuccgauuggauauuccguucgucgu

SEQ ID NO: 60173 - RNA, 32 nt, Homo Sapiens
gggguggauguagcugcagaaagcaugcacaa

SEQ ID NO: 60174 - RNA, 32 nt, Homo Sapiens
ucuacaaaaaucagcugaaaucaugaagacaa

SEQ ID NO: 60175 - RNA, 32 nt, Homo Sapiens
cgguggcgcgcccgcugaaccucccgcugcug

SEQ ID NO: 60176 - RNA, 32 nt, Homo Sapiens
cucgggcccuccuggggagcccccgcuccagg

SEQ ID NO: 60177 - RNA, 32 nt, Homo Sapiens
cccugcaggagagcuucaugcgccugguggag

SEQ ID NO: 60178 - RNA, 32 nt, Homo Sapiens
gaaaucaagauggaagcagagaaucuggcaug

SEQ ID NO: 60179 - RNA, 32 nt, Homo Sapiens
gauaaagacuaaaaacagcguguaagauggca

SEQ ID NO: 60180 - RNA, 32 nt, Homo Sapiens
cugaggcagacacucccagucagcccgcucga

SEQ ID NO: 60181 - RNA, 32 nt, Homo Sapiens
ggauggcagacacugcuucuucucagggaggc

SEQ ID NO: 60182 - RNA, 30 nt, Homo Sapiens
aggagaucgugaggcugcggcaggagaggg

SEQ ID NO: 60183 - RNA, 32 nt, Homo Sapiens
gagacuggguuucgcuguguuagccuggaugg

SEQ ID NO: 60184 - RNA, 32 nt, Homo Sapiens
gccgggcagcgggagcggcggccgcgccaugu

SEQ ID NO: 60185 - RNA, 32 nt, Homo Sapiens
cuagcauucuuuguggagauggucuggugccu

SEQ ID NO: 60186 - RNA, 32 nt, Homo Sapiens
gaauaugcucucacaggagauaauguagccac

SEQ ID NO: 60187 - RNA, 32 nt, Homo Sapiens
aaggugcccagcugccagcccagcuccgcugc

SEQ ID NO: 60188 - RNA, 32 nt, Homo Sapiens
uauacauucuaccccuuugaauaaaaaaguuc

SEQ ID NO: 60189 - RNA, 32 nt, Homo Sapiens
acaugauggcugcugcuuuggcugccaccacc

SEQ ID NO: 60190 - RNA, 32 nt, Homo Sapiens
acaacagauccuucccucgcagcccucagauc

SEQ ID NO: 60191 - RNA, 32 nt, Homo Sapiens
ccucucggcuccugggguccuucuaacuccgc

SEQ ID NO: 60192 - RNA, 32 nt, Homo Sapiens
gcgggccccgucugaggucuggcagucagaga

SEQ ID NO: 60193 - RNA, 32 nt, Homo Sapiens
cucuuccccccucacccuagggugucccgaga

SEQ ID NO: 60194 - RNA, 30 nt, Homo Sapiens
aaccagcccugcucacgccaugcccgcccc

SEQ ID NO: 60195 - RNA, 32 nt, Homo Sapiens
cgagcacauuuuacuuaccuguuaccagugug

SEQ ID NO: 60196 - RNA, 32 nt, Homo Sapiens
uuccagaauuaaauucaauuuauuuucuagag

SEQ ID NO: 60197 - RNA, 32 nt, Homo Sapiens
ccaccaucuaggaacaggggccaggcagaggg

SEQ ID NO: 60198 - RNA, 32 nt, Homo Sapiens
uucauuaacuguagaccgccagcaaauccaga

SEQ ID NO: 60199 - RNA, 32 nt, Homo Sapiens
uuugucuuuguucuuucagucagagguauuua

SEQ ID NO: 60200 - RNA, 29 nt, Homo Sapiens
caagaugccuagcagaacugcccgcuaug

SEQ ID NO: 60201 - RNA, 32 nt, Homo Sapiens
auauccaucauuuaaagugcugcuuuggauuc

SEQ ID NO: 60202 - RNA, 32 nt, Homo Sapiens
gguggcagguggggcgucugcagggccacucu

SEQ ID NO: 60203 - RNA, 32 nt, Homo Sapiens
auucucccucugcuguuauacuuguaauaaaa

SEQ ID NO: 60204 - RNA, 32 nt, Homo Sapiens
agggccaggaggaggcgaggcagggccugcag

SEQ ID NO: 60205 - RNA, 32 nt, Homo Sapiens
uacuuaauacuucugaaaaauggaguaaggga

SEQ ID NO: 60206 - RNA, 32 nt, Homo Sapiens
gccuccucucguaccuuggacaaaggauacac

SEQ ID NO: 60207 - RNA, 32 nt, Homo Sapiens
uggcucacaccuguaaugccagcacuuugggc

SEQ ID NO: 60208 - RNA, 32 nt, Homo Sapiens
ugccacgggcuucccccuccccugggcaccac

SEQ ID NO: 60209 - RNA, 32 nt, Homo Sapiens
uccuggagggccugggucgcguggcccaggag

SEQ ID NO: 60210 - RNA, 32 nt, Homo Sapiens
gacaucaggaauguuugugugcauggucugcc

SEQ ID NO: 60211 - RNA, 31 nt, Homo Sapiens
uuuuagcauucuguguuuccaaauaaugaau

SEQ ID NO: 60212 - RNA, 32 nt, Homo Sapiens
ucuuuuuauauaagguuucauauuuaauuugg

SEQ ID NO: 60213 - RNA, 32 nt, Homo Sapiens
acuugccucucgcuacagcguccuccucaccg

SEQ ID NO: 60214 - RNA, 32 nt, Homo Sapiens
acccucaaguaaccaaccaauacgagcaccug

SEQ ID NO: 60215 - RNA, 32 nt, Homo Sapiens
gggcuguauugauaaggagaugauguugaacg

SEQ ID NO: 60216 - RNA, 32 nt, Homo Sapiens
gcccgggagagccugcuggacggcggcaacaa

SEQ ID NO: 60217 - RNA, 32 nt, Homo Sapiens
ccuucccugaagaucuagugaacauucgaccu

SEQ ID NO: 60218 - RNA, 32 nt, Homo Sapiens
gagagugggcaaacagggaagaagguugggac

SEQ ID NO: 60219 - RNA, 32 nt, Homo Sapiens
agaauacaaauaaaaugagauacaugcaaaau

SEQ ID NO: 60220 - RNA, 32 nt, Homo Sapiens
uagguauuuuugguaggcuguuucacugaacu

SEQ ID NO: 60221 - RNA, 32 nt, Homo Sapiens
ggcaguccugcagcagcaaacacaucaucagc

SEQ ID NO: 60222 - RNA, 32 nt, Homo Sapiens
gcaagauggagucccaugagagcugaugguuu

SEQ ID NO: 60223 - RNA, 32 nt, Homo Sapiens
ugacgccgccuggcuugagcuaagugcugggc

SEQ ID NO: 60224 - RNA, 32 nt, Homo Sapiens
ggaaaacaugcgcccaagcucguucgcaggaa

SEQ ID NO: 60225 - RNA, 32 nt, Homo Sapiens
gcagaguuagcaccccacucucccaagccacc

SEQ ID NO: 60226 - RNA, 32 nt, Homo Sapiens
ggaggaagggccaacacugcaaggugauggga

SEQ ID NO: 60227 - RNA, 32 nt, Homo Sapiens
aauucacugaacccuccuuucccacaguucug

SEQ ID NO: 60228 - RNA, 32 nt, Homo Sapiens
aaagcucacgauuggauuggaacuucuagcga

SEQ ID NO: 60229 - RNA, 32 nt, Homo Sapiens
ucacgcccagcuccgcccccucacgcgcucuc

SEQ ID NO: 60230 - RNA, 32 nt, Homo Sapiens
aguuuaagcaaauaaacucaggcuguugaaca

SEQ ID NO: 60231 - RNA, 32 nt, Homo Sapiens
gcugggagcagacaucauucccugcccuggca

SEQ ID NO: 60232 - RNA, 32 nt, Homo Sapiens
uaauagaugggcaacaauauggucauuucugu

SEQ ID NO: 60233 - RNA, 30 nt, Homo Sapiens
ggagccuugucugcugcaguggcgcugagg

SEQ ID NO: 60234 - RNA, 32 nt, Homo Sapiens
aauuguauguacucaugguuguaaaccaaaac

SEQ ID NO: 60235 - RNA, 32 nt, Homo Sapiens
aaaggcuaguaugagugagaaaaggagagagc

SEQ ID NO: 60236 - RNA, 32 nt, Homo Sapiens
guccaaggcagggagaggauucuccagugagu

SEQ ID NO: 60237 - RNA, 32 nt, Homo Sapiens
cccuuguuugugucaaaaaugacuuucccugc

SEQ ID NO: 60238 - RNA, 32 nt, Homo Sapiens
agaggugaacucuccugugggcauuuuauuug

SEQ ID NO: 60239 - RNA, 32 nt, Homo Sapiens
cagcggcggcgguggugaaggccgaugcugug

SEQ ID NO: 60240 - RNA, 32 nt, Homo Sapiens
agauaaucuaaauauaaaccagcuacuugaug

SEQ ID NO: 60241 - RNA, 32 nt, Homo Sapiens
cggacacggcccggcccggccauggccucguu

SEQ ID NO: 60242 - RNA, 32 nt, Homo Sapiens
uuauacucagaauacuuuuuaugagcucucuu

SEQ ID NO: 60243 - RNA, 32 nt, Homo Sapiens
gccaucuuuuccgcaggguuagagugggcucc

SEQ ID NO: 60244 - RNA, 32 nt, Homo Sapiens
gcagcaccagcagaugaugcgcuggcugaagg

SEQ ID NO: 60245 - RNA, 32 nt, Homo Sapiens
ggggccaggaggaagauggcggcguccgcagc

SEQ ID NO: 60246 - RNA, 32 nt, Homo Sapiens
aacucuugccccaugucuccuuggcagcagga

SEQ ID NO: 60247 - RNA, 32 nt, Homo Sapiens
guuggggcgccgggcccggccagcgcccucua

SEQ ID NO: 60248 - RNA, 32 nt, Homo Sapiens
guggucagaggcgggcgggaccaccagccugu

SEQ ID NO: 60249 - RNA, 30 nt, Homo Sapiens
uucuuuuuucuuuuuucuuuauuuuuuuuu

SEQ ID NO: 60250 - RNA, 32 nt, Homo Sapiens
uucaauccgacaaguuuuuaaauuuacucuug

SEQ ID NO: 60251 - RNA, 32 nt, Homo Sapiens
aauucuguucucccagagcugcaccugccucg

SEQ ID NO: 60252 - RNA, 32 nt, Homo Sapiens
caacugcaaacaccccagguucaaauuaaaaa

SEQ ID NO: 60253 - RNA, 32 nt, Homo Sapiens
gugucucaugucuuaaugcuucucugcccaau

SEQ ID NO: 60254 - RNA, 32 nt, Homo Sapiens
ugcaggacucccuggugcauuaccacaugucg

SEQ ID NO: 60255 - RNA, 32 nt, Homo Sapiens
agcauaaaaaguaugaaagaugaauuuuccuu

SEQ ID NO: 60256 - RNA, 32 nt, Homo Sapiens
ucaaguggcugcguuuuuuuuaguuuggcagg

SEQ ID NO: 60257 - RNA, 32 nt, Homo Sapiens
auugaaacaacaaaaagucaguauugaaacau

SEQ ID NO: 60258 - RNA, 32 nt, Homo Sapiens
ccuaccuccuucccuguccccaccccugcaua

SEQ ID NO: 60259 - RNA, 32 nt, Homo Sapiens
ucugggggguuuuuauuuuuauuuucucuuug

SEQ ID NO: 60260 - RNA, 32 nt, Homo Sapiens
ucgguggagcagcucugcuuucucaggucucu

SEQ ID NO: 60261 - RNA, 32 nt, Homo Sapiens
agaauuauccaaaugcucagucuaccugagau

SEQ ID NO: 60262 - RNA, 32 nt, Homo Sapiens
cuucauucugugaguuaccaccucaaguucua

SEQ ID NO: 60263 - RNA, 32 nt, Homo Sapiens
aacaaaagggaagaggugaugugauuaccaga

SEQ ID NO: 60264 - RNA, 32 nt, Homo Sapiens
ugccgggcgcgguggcucaugccuguaauucc

SEQ ID NO: 60265 - RNA, 32 nt, Homo Sapiens
gcgaggccggcguggcugagcuccacauccag

SEQ ID NO: 60266 - RNA, 32 nt, Homo Sapiens
ugcugucccgcgcgccagcucaccagcccuac

SEQ ID NO: 60267 - RNA, 32 nt, Homo Sapiens
ggaggcccggagggggcggggagguggcccac

SEQ ID NO: 60268 - RNA, 32 nt, Homo Sapiens
accgggccugugcggggcgcgggucugcgcgg

SEQ ID NO: 60269 - RNA, 32 nt, Homo Sapiens
gagucccaggcgggcgggagugugcgauacuc

SEQ ID NO: 60270 - RNA, 32 nt, Homo Sapiens
ccuaccugcagggcauacacccaggacacauu

SEQ ID NO: 60271 - RNA, 32 nt, Homo Sapiens
uauauacaguugccuuauaaaacaacauaaau

SEQ ID NO: 60272 - RNA, 32 nt, Homo Sapiens
aaaaaugaguuccuauuuuuucugggagaggg

SEQ ID NO: 60273 - RNA, 32 nt, Homo Sapiens
uaacagcaaucagcuaacaggcaaauuaagau

SEQ ID NO: 60274 - RNA, 32 nt, Homo Sapiens
ugaaaacugcagggaaauaaaaaauacauauc

SEQ ID NO: 60275 - RNA, 32 nt, Homo Sapiens
aaauucauaucaaaacauaaucccaacugggu

SEQ ID NO: 60276 - RNA, 32 nt, Homo Sapiens
ugguuuugauuugcauuucucuaaugaucagu

SEQ ID NO: 60277 - RNA, 32 nt, Homo Sapiens
cuuauuucaguuagauggggaacauuuugcua

SEQ ID NO: 60278 - RNA, 32 nt, Homo Sapiens
guauuacagagacuuuaaccguuuuaaaacuu

SEQ ID NO: 60279 - RNA, 32 nt, Homo Sapiens
cauugcacuccagccugggugacgagugaaac

SEQ ID NO: 60280 - RNA, 32 nt, Homo Sapiens
uauugugaacugaguauuuuugucaaaaguca

SEQ ID NO: 60281 - RNA, 32 nt, Homo Sapiens
cauacaaugcaaaaaaaaaaaaaaaaaaaugg

SEQ ID NO: 60282 - RNA, 32 nt, Homo Sapiens
gcaguuccaacacaacaugaaggcaacaacaa

SEQ ID NO: 60283 - RNA, 32 nt, Homo Sapiens
cacucccgcccgguuccccggccguccgccua

SEQ ID NO: 60284 - RNA, 32 nt, Homo Sapiens
uucauuuuuuaaaaaaguauuaaucaauugca

SEQ ID NO: 60285 - RNA, 32 nt, Homo Sapiens
ugagcuuuuuaaagucuaacaaaucuuuuuag

SEQ ID NO: 60286 - RNA, 32 nt, Homo Sapiens
ucuggacacgcacacacacacacacacacaca

SEQ ID NO: 60287 - RNA, 31 nt, Homo Sapiens
guccccagagccaccaucuccugagccuccc

SEQ ID NO: 60288 - RNA, 32 nt, Homo Sapiens
agccggagccgcgcgccgcggcgcuguaaucg

SEQ ID NO: 60289 - RNA, 32 nt, Homo Sapiens
ccugacagcuuuccugcacugcagcuuccugc

SEQ ID NO: 60290 - RNA, 32 nt, Homo Sapiens
aauuucugcacggucaacaaacaucaagucag

SEQ ID NO: 60291 - RNA, 32 nt, Homo Sapiens
caaaaguaaaaagcagagcaaaugcauggaca

SEQ ID NO: 60292 - RNA, 32 nt, Homo Sapiens
guucggcccagccuuucgcccaggcgcccagg

SEQ ID NO: 60293 - RNA, 32 nt, Homo Sapiens
ggaagccacaaaauguuuccugugcaccuaca

SEQ ID NO: 60294 - RNA, 32 nt, Homo Sapiens
accuguguuucauuaguauuaucuaauguacu

SEQ ID NO: 60295 - RNA, 32 nt, Homo Sapiens
acccacagaaaaggagcccauggaacacaagu

SEQ ID NO: 60296 - RNA, 32 nt, Homo Sapiens
ucaccacagucugagcagccucccgcguccug

SEQ ID NO: 60297 - RNA, 32 nt, Homo Sapiens
gaucuggagggacacgcgggggcggcccgcag

SEQ ID NO: 60298 - RNA, 32 nt, Homo Sapiens
gccugucccuccccauccuguguccucuccag

SEQ ID NO: 60299 - RNA, 32 nt, Homo Sapiens
ccugaggagggaggagggagaccaacacaggg

SEQ ID NO: 60300 - RNA, 32 nt, Homo Sapiens
ggcaauugccuugccugcccaggcuuccauca

SEQ ID NO: 60301 - RNA, 32 nt, Homo Sapiens
ccaaagaucauguuuagaacaaugaaaaauua

SEQ ID NO: 60302 - RNA, 32 nt, Homo Sapiens
cuaguaauaaucuuguaguucacauuacucau

SEQ ID NO: 60303 - RNA, 32 nt, Homo Sapiens
cagaagacacugaguuccucacucgccuccua

SEQ ID NO: 60304 - RNA, 32 nt, Homo Sapiens
uuaccuuacaaaaacaacuauauuuugccaau

SEQ ID NO: 60305 - RNA, 32 nt, Homo Sapiens
ugccacacacaguauuuagaaaaccuuuaggc

SEQ ID NO: 60306 - RNA, 32 nt, Homo Sapiens
uuaaguaacauaacuaguggcucucaguuaaa

SEQ ID NO: 60307 - RNA, 32 nt, Homo Sapiens
ggccuuuuguaucucacaauucuggucuagau

SEQ ID NO: 60308 - RNA, 32 nt, Homo Sapiens
cacauuguucuuuucaaagcaaauggaaaaua

SEQ ID NO: 60309 - RNA, 32 nt, Homo Sapiens
ucacaaaggcauacacauagaggaaggugaau

SEQ ID NO: 60310 - RNA, 32 nt, Homo Sapiens
agcuccuuggauccuggcuccuggacaccauc

SEQ ID NO: 60311 - RNA, 32 nt, Homo Sapiens
agaauagcauauauaucgcuuaaucuuaaauu

SEQ ID NO: 60312 - RNA, 32 nt, Homo Sapiens
auauuuguacuaacccaaugauucacagugac

SEQ ID NO: 60313 - RNA, 32 nt, Homo Sapiens
uuggauuuuuuaugaaauauauuuuacaaaga

SEQ ID NO: 60314 - RNA, 32 nt, Homo Sapiens
ccugggaggaucuggagguuguucucugcaga

SEQ ID NO: 60315 - RNA, 32 nt, Homo Sapiens
gcaggugucuguccccggcccagcgcaucuug

SEQ ID NO: 60316 - RNA, 32 nt, Homo Sapiens
aagggcuuuccacaguaaugagcucgaccuug

SEQ ID NO: 60317 - RNA, 32 nt, Homo Sapiens
cccgcccgccuggccuguccugagugcauuuc

SEQ ID NO: 60318 - RNA, 32 nt, Homo Sapiens
gucuucccuggccugucuucacucuucucccc

SEQ ID NO: 60319 - RNA, 32 nt, Homo Sapiens
gcaacaccaacauauuuuuucuuaaaauguca

SEQ ID NO: 60320 - RNA, 32 nt, Homo Sapiens
uggaaagcagguuucaaggaaguagaaacaaa

SEQ ID NO: 60321 - RNA, 32 nt, Homo Sapiens
guuaugcaaugagaaugaauagauuuugcuaa

SEQ ID NO: 60322 - RNA, 32 nt, Homo Sapiens
uaauuauuaagcugugugauaauuucugcuuu

SEQ ID NO: 60323 - RNA, 32 nt, Homo Sapiens
guugcucauuugguuagaggaacucucauuaa

SEQ ID NO: 60324 - RNA, 32 nt, Homo Sapiens
cugacuacuauaaaaauauuugcauauauaag

SEQ ID NO: 60325 - RNA, 32 nt, Homo Sapiens
cucacccaggacuuugaugugagaaugagcac

SEQ ID NO: 60326 - RNA, 32 nt, Homo Sapiens
uggucgccgucuccaggaacaugcagaaagag

SEQ ID NO: 60327 - RNA, 32 nt, Homo Sapiens
ugugcccucccuggggcugaggaggcaggcgg

SEQ ID NO: 60328 - RNA, 32 nt, Homo Sapiens
aacaaugcaaaauaaauguccgggauagugaa

SEQ ID NO: 60329 - RNA, 32 nt, Homo Sapiens
ugcuuuugcagggccuucugugcaggacacuu

SEQ ID NO: 60330 - RNA, 32 nt, Homo Sapiens
gggagucugcccuucucaggccugcuccccac

SEQ ID NO: 60331 - RNA, 32 nt, Homo Sapiens
ugaagugauccuccugccucggccuccuaaag

SEQ ID NO: 60332 - RNA, 32 nt, Homo Sapiens
gcagaggaaugauggagaaucuaguguagcag

SEQ ID NO: 60333 - RNA, 32 nt, Homo Sapiens
uuuaaugaaauuaaauuuuuuauuucaaaaga

SEQ ID NO: 60334 - RNA, 32 nt, Homo Sapiens
ccaguguugugggcuuccugcugggacugaga

SEQ ID NO: 60335 - RNA, 32 nt, Homo Sapiens
cccacuccacccugccagcagcuuccagccag

SEQ ID NO: 60336 - RNA, 32 nt, Homo Sapiens
gcuguggauuugucaucgauggcucuuaauau

SEQ ID NO: 60337 - RNA, 32 nt, Homo Sapiens
ucacugacagaaaagaaaccagggaguuugua

SEQ ID NO: 60338 - RNA, 32 nt, Homo Sapiens
aggcccucuauuucucucuuucuuggugucug

SEQ ID NO: 60339 - RNA, 32 nt, Homo Sapiens
uggcugaaggcacuuccguugagcaucuagac

SEQ ID NO: 60340 - RNA, 32 nt, Homo Sapiens
caggaccucaccuccccgaaagcaucggccag

SEQ ID NO: 60341 - RNA, 30 nt, Homo Sapiens
ggcggcggcagcgagccgggucccaccaug

SEQ ID NO: 60342 - RNA, 32 nt, Homo Sapiens
uacagacaggggcgcugcugcagaugcuccag

SEQ ID NO: 60343 - RNA, 30 nt, Homo Sapiens
uuuuaugauaucccugauccuaacugaaga

SEQ ID NO: 60344 - RNA, 32 nt, Homo Sapiens
cgccguuuagagaacaccguccugcugggcau

SEQ ID NO: 60345 - RNA, 32 nt, Homo Sapiens
aagagggcugggggcgggagaugacggugguc

SEQ ID NO: 60346 - RNA, 32 nt, Homo Sapiens
gaaugaacagagcacuuuuuacuaaguaguag

SEQ ID NO: 60347 - RNA, 32 nt, Homo Sapiens
aggagaggacugaugagaagggcuuguuggga

SEQ ID NO: 60348 - RNA, 32 nt, Homo Sapiens
caccgccccgacccccucuccucucagcaagg

SEQ ID NO: 60349 - RNA, 32 nt, Homo Sapiens
ccagcccgcgcgcccgcccguccucccgucca

SEQ ID NO: 60350 - RNA, 32 nt, Homo Sapiens
gguugccuggcuggccccgcucccagaggcgg

SEQ ID NO: 60351 - RNA, 32 nt, Homo Sapiens
ugauuaaaaaccagcccaaaacaucagccuaa

SEQ ID NO: 60352 - RNA, 32 nt, Homo Sapiens
ggaauggaaggggacaguuugcuuuuagugcu

SEQ ID NO: 60353 - RNA, 32 nt, Homo Sapiens
guggugaaaugaucuggaagcuagaugcuagu

SEQ ID NO: 60354 - RNA, 32 nt, Homo Sapiens
cgagacccaagcccccugucccggcccagcgc

SEQ ID NO: 60355 - RNA, 32 nt, Homo Sapiens
gucccccagucccgccauuacggguugucaga

SEQ ID NO: 60356 - RNA, 32 nt, Homo Sapiens
guccagaucuagucuguaaacccagcuuagaa

SEQ ID NO: 60357 - RNA, 32 nt, Homo Sapiens
ucccaccaacauccauccguccuucucagaca

SEQ ID NO: 60358 - RNA, 32 nt, Homo Sapiens
uuuaagucaaggaaacaucaucuguccuugau

SEQ ID NO: 60359 - RNA, 32 nt, Homo Sapiens
gauugauuugcauuuccuggaacucugccacc

SEQ ID NO: 60360 - RNA, 32 nt, Homo Sapiens
aaagggaccccucuccaguccuggcuccuucc

SEQ ID NO: 60361 - RNA, 32 nt, Homo Sapiens
ucaaggcccucccagcaccccauucuuguaua

SEQ ID NO: 60362 - RNA, 32 nt, Homo Sapiens
cauuggagguaaaacuuaaaacacaagaaaga

SEQ ID NO: 60363 - RNA, 32 nt, Homo Sapiens
acaccagcagcccauguggccggagcagaguc

SEQ ID NO: 60364 - RNA, 32 nt, Homo Sapiens
gcccccaaccucauuuuaguugcguaagcaua

SEQ ID NO: 60365 - RNA, 32 nt, Homo Sapiens
uuccauauaccugauagucuguguacagcauu

SEQ ID NO: 60366 - RNA, 32 nt, Homo Sapiens
gcugcuuuacacaaucuguucuauaagguuca

SEQ ID NO: 60367 - RNA, 32 nt, Homo Sapiens
auguaaguuuacuuuuuauggaggaaggauuc

SEQ ID NO: 60368 - RNA, 32 nt, Homo Sapiens
uuagaaucacaccuggacaaucucgugcuacc

SEQ ID NO: 60369 - RNA, 32 nt, Homo Sapiens
gccggggcuuugcauggggcccaggggaggcc

SEQ ID NO: 60370 - RNA, 32 nt, Homo Sapiens
ggacaccaggacuuucauuuucccucaguaug

SEQ ID NO: 60371 - RNA, 32 nt, Homo Sapiens
guguagagcucaucugcauguugugugcagau

SEQ ID NO: 60372 - RNA, 32 nt, Homo Sapiens
ccaagggguagagauuuauguauuuuauuuca

SEQ ID NO: 60373 - RNA, 32 nt, Homo Sapiens
uguuuauucucucuccaggaaagcagaucaaa

SEQ ID NO: 60374 - RNA, 32 nt, Homo Sapiens
cucuccuguagcucuccugggguucugggagu

SEQ ID NO: 60375 - RNA, 32 nt, Homo Sapiens
auuuguuuauauuuuucucuaacaucaugcua

SEQ ID NO: 60376 - RNA, 32 nt, Homo Sapiens
aauccuugcuacuucucuuccuccucaaugaa

SEQ ID NO: 60377 - RNA, 32 nt, Homo Sapiens
uguccccuccccagcccagccgcccagccaca

SEQ ID NO: 60378 - RNA, 32 nt, Homo Sapiens
ggugugggagcagaggaauggaaacaaucgug

SEQ ID NO: 60379 - RNA, 32 nt, Homo Sapiens
uacaaaaaauuuuaaaauacaaaccaaauguu

SEQ ID NO: 60380 - RNA, 32 nt, Homo Sapiens
ccaacauuucccuucuuccaguugcacuauuc

SEQ ID NO: 60381 - RNA, 32 nt, Homo Sapiens
gguaucccaucccgaucugccucccagaacug

SEQ ID NO: 60382 - RNA, 32 nt, Homo Sapiens
aucagcuggguguggugccgcgugccuguaau

SEQ ID NO: 60383 - RNA, 32 nt, Homo Sapiens
cccuccagcccuccccugcccagauagcuggu

SEQ ID NO: 60384 - RNA, 32 nt, Homo Sapiens
cuuuacuaaaguaucaaugaugacuugguugu

SEQ ID NO: 60385 - RNA, 32 nt, Homo Sapiens
cauuaccuaaaaucauuuuucauagaacuguu

SEQ ID NO: 60386 - RNA, 32 nt, Homo Sapiens
ggccuccgcgccaugccgcgggccgugugaaa

SEQ ID NO: 60387 - RNA, 32 nt, Homo Sapiens
augaagcccucuucgagcuagagaaaaauaga

SEQ ID NO: 60388 - RNA, 32 nt, Homo Sapiens
gcucuggugguaccucugggccccaggagcau

SEQ ID NO: 60389 - RNA, 32 nt, Homo Sapiens
agugacuuggaauuaaccauguuguagccuaa

SEQ ID NO: 60390 - RNA, 30 nt, Homo Sapiens
aacguucuggaaguuugggaaacccugagc

SEQ ID NO: 60391 - RNA, 32 nt, Homo Sapiens
caaaacaaaaauuuucuucaauguuuaauaca

SEQ ID NO: 60392 - RNA, 32 nt, Homo Sapiens
ucugugucuucacaauaaacaugaguaaaauu

SEQ ID NO: 60393 - RNA, 32 nt, Homo Sapiens
ccagaggagcugguccugcugcuuagagucau

SEQ ID NO: 60394 - RNA, 32 nt, Homo Sapiens
agaagcaaaaauaagaaaauuaaaauaaucuc

SEQ ID NO: 60395 - RNA, 32 nt, Homo Sapiens
cucuguuggcacuuuccacuguuccaucugug

SEQ ID NO: 60396 - RNA, 27 nt, Homo Sapiens
uauaaguugguuuccagcccccagugu

SEQ ID NO: 60397 - RNA, 32 nt, Homo Sapiens
agaaaauagauauacuauugaacacugagucu

SEQ ID NO: 60398 - RNA, 32 nt, Homo Sapiens
augaggucaggagaucaagaccacccuggcua

SEQ ID NO: 60399 - RNA, 32 nt, Homo Sapiens
uuuuuuauauauauuuuuaaauguucaauauu

SEQ ID NO: 60400 - RNA, 32 nt, Homo Sapiens
ccugaaaauaaauguaucugacuuaguuuaug

SEQ ID NO: 60401 - RNA, 32 nt, Homo Sapiens
cacuuuccugcagcugaucacacagcaaacau

SEQ ID NO: 60402 - RNA, 32 nt, Homo Sapiens
aagcuggagcagcccaccuagagcuggccgcg

SEQ ID NO: 60403 - RNA, 32 nt, Homo Sapiens
agcgggacuccgggccccggcggcggcccaug

SEQ ID NO: 60404 - RNA, 32 nt, Homo Sapiens
uccucuguccguaccgcccccggagccagggc

SEQ ID NO: 60405 - RNA, 32 nt, Homo Sapiens
agaggucgcuccagcccuaccacaggucugac

SEQ ID NO: 60406 - RNA, 32 nt, Homo Sapiens
ugaaugaauguauauaauaauuacuguauaua

SEQ ID NO: 60407 - RNA, 32 nt, Homo Sapiens
uauguuggccccagcccccagccuguggcucc

SEQ ID NO: 60408 - RNA, 32 nt, Homo Sapiens
cgccucgcugccccgcuuccugcccucaaccu

SEQ ID NO: 60409 - RNA, 32 nt, Homo Sapiens
uugcgcugugcuccugugcuacggccuguggc

SEQ ID NO: 60410 - RNA, 32 nt, Homo Sapiens
gagcccaaauggccaacuccacagggcugaac

SEQ ID NO: 60411 - RNA, 32 nt, Homo Sapiens
uagaucugacucuagauucugaaacagcaagu

SEQ ID NO: 60412 - RNA, 32 nt, Homo Sapiens
gcugcugcccucgcugccccugacccgcgccc

SEQ ID NO: 60413 - RNA, 29 nt, Homo Sapiens
auaauucugaaguuauauuuccuauacca

SEQ ID NO: 60414 - RNA, 32 nt, Homo Sapiens
ugccguacccuggggaaucaaccaaggaguuc

SEQ ID NO: 60415 - RNA, 32 nt, Homo Sapiens
ccuguuugcuacuucacugccauggaaugauc

SEQ ID NO: 60416 - RNA, 32 nt, Homo Sapiens
ggggguuauaauuuauauucauaacaagugca

SEQ ID NO: 60417 - RNA, 32 nt, Homo Sapiens
aggcuccccucgcgguccggggcugcgcgacc

SEQ ID NO: 60418 - RNA, 30 nt, Homo Sapiens
ccgcgaugcuggcgcugcgcugcggcuccc

SEQ ID NO: 60419 - RNA, 32 nt, Homo Sapiens
ugcggccucgauguccuucucccgugcccuau

SEQ ID NO: 60420 - RNA, 32 nt, Homo Sapiens
uucuuccuaccuugugcuugucugacuaguau

SEQ ID NO: 60421 - RNA, 32 nt, Homo Sapiens
auaccauaacaguuacuugguuagacaucaaa

SEQ ID NO: 60422 - RNA, 32 nt, Homo Sapiens
gcgggcuccgcggcagaaaugaccgcccuucc

SEQ ID NO: 60423 - RNA, 32 nt, Homo Sapiens
cuucucugagaucgaacggacugugaauccgc

SEQ ID NO: 60424 - RNA, 32 nt, Homo Sapiens
ugcgcgggucuccugguccuucugccaucaug

SEQ ID NO: 60425 - RNA, 32 nt, Homo Sapiens
augcacaauuauucagaauuacauuuuaucgu

SEQ ID NO: 60426 - RNA, 32 nt, Homo Sapiens
uaaaauaaaaauucagcuuaugagaaauggca

SEQ ID NO: 60427 - RNA, 32 nt, Homo Sapiens
ugcuggaagaucugagcuuucuucuuggacac

SEQ ID NO: 60428 - RNA, 32 nt, Homo Sapiens
ggaagaggcacgugcuccucagagcagccgga

SEQ ID NO: 60429 - RNA, 32 nt, Homo Sapiens
cuucgagaaaauuuuuugaaaaaucagcaguu

SEQ ID NO: 60430 - RNA, 32 nt, Homo Sapiens
gguggcgaaggcagggucugcccgccagugga

SEQ ID NO: 60431 - RNA, 32 nt, Homo Sapiens
ugucuauuuuucugccuaugugugcuacuuuc

SEQ ID NO: 60432 - RNA, 32 nt, Homo Sapiens
ucuggggacgcggcccgggcuacgucggggcc

SEQ ID NO: 60433 - RNA, 32 nt, Homo Sapiens
gauguaguuuugcucuuguugcccaggcugga

SEQ ID NO: 60434 - RNA, 32 nt, Homo Sapiens
gauuacugcgguguuaagguagcccugccacg

SEQ ID NO: 60435 - RNA, 32 nt, Homo Sapiens
cucagccacugugaugcagagccccagggguc

SEQ ID NO: 60436 - RNA, 31 nt, Homo Sapiens
caauaacucgagguuuuugggauacgguuug

SEQ ID NO: 60437 - RNA, 32 nt, Homo Sapiens
ccacagccaagcccagagucccccagcggcuc

SEQ ID NO: 60438 - RNA, 32 nt, Homo Sapiens
auucucuuccacagcccugaggucuuacgaau

SEQ ID NO: 60439 - RNA, 32 nt, Homo Sapiens
gaggaagaaaucuugcaucaccauggugcacu

SEQ ID NO: 60440 - RNA, 32 nt, Homo Sapiens
cuucuuuuucccuuugacuucuacagaaaucu

SEQ ID NO: 60441 - RNA, 32 nt, Homo Sapiens
ucugcuuccagaugagccagugccucgcauga

SEQ ID NO: 60442 - RNA, 32 nt, Homo Sapiens
augguugaaacacccaugcuaucuguuccuau

SEQ ID NO: 60443 - RNA, 32 nt, Homo Sapiens
ucauacaaauaaucuaagauuauacagucuag

SEQ ID NO: 60444 - RNA, 32 nt, Homo Sapiens
gagaccggaccgaagacggaccgugccgggaa

SEQ ID NO: 60445 - RNA, 32 nt, Homo Sapiens
aacuucuugauaauaauuuacaaugaauggac

SEQ ID NO: 60446 - RNA, 32 nt, Homo Sapiens
cccaacaucuucuggcgccacccuugcaacaa

SEQ ID NO: 60447 - RNA, 32 nt, Homo Sapiens
cccuccugccccagcccacccgcuugccuugg

SEQ ID NO: 60448 - RNA, 32 nt, Homo Sapiens
gugaccagugcugcugcagaggaggucacgcg

SEQ ID NO: 60449 - RNA, 32 nt, Homo Sapiens
uuugugcaggggcgcagcgcuccagccauggc

SEQ ID NO: 60450 - RNA, 32 nt, Homo Sapiens
cggccagcuaauuauuuuuauuauuuuuauuu

SEQ ID NO: 60451 - RNA, 32 nt, Homo Sapiens
auuguaaaaggcugccauuauggacauuaggu

SEQ ID NO: 60452 - RNA, 32 nt, Homo Sapiens
ucuuuucuuuugcaucauaacaaccacugaaa

SEQ ID NO: 60453 - RNA, 32 nt, Homo Sapiens
uauuugaaauauguggugauaauuacugaguu

SEQ ID NO: 60454 - RNA, 32 nt, Homo Sapiens
cguuucauguauuuuuuaauucuuuuauuccu

SEQ ID NO: 60455 - RNA, 32 nt, Homo Sapiens
ggcaccuggcggggcgggggucugccggccuc

SEQ ID NO: 60456 - RNA, 32 nt, Homo Sapiens
cuuccagcagugccuucccuuuaugaaagaca

SEQ ID NO: 60457 - RNA, 32 nt, Homo Sapiens
ugacguaccuccugcgcagccucggacagaca

SEQ ID NO: 60458 - RNA, 32 nt, Homo Sapiens
ccgccucucccgcgcgcagauacacgcccccg

SEQ ID NO: 60459 - RNA, 32 nt, Homo Sapiens
gagaggagcugccgaguagaaagcagacuggc

SEQ ID NO: 60460 - RNA, 32 nt, Homo Sapiens
uugcagccucuggcgacguccagcgucacauu

SEQ ID NO: 60461 - RNA, 32 nt, Homo Sapiens
uccugguagcagcuguugaguaacuuucauug

SEQ ID NO: 60462 - RNA, 32 nt, Homo Sapiens
cagggccuuccgacgccuugucucaggaacau

SEQ ID NO: 60463 - RNA, 32 nt, Homo Sapiens
auuuauuaaacuugcugugaaaacacuuugau

SEQ ID NO: 60464 - RNA, 32 nt, Homo Sapiens
ccccaaggcccgugugugcaugugucugucuu

SEQ ID NO: 60465 - RNA, 32 nt, Homo Sapiens
caagccccacacccaccucagcccuugcuugg

SEQ ID NO: 60466 - RNA, 30 nt, Homo Sapiens
ucagagcuccggaggccgccggugccgaug

SEQ ID NO: 60467 - RNA, 32 nt, Homo Sapiens
cccaccccgcccauagagacagggucucacua

SEQ ID NO: 60468 - RNA, 32 nt, Homo Sapiens
ucauauacagaaaaaauaagguguuacaaaaa

SEQ ID NO: 60469 - RNA, 32 nt, Homo Sapiens
gcggggaggagaagucagauuauguacauagu

SEQ ID NO: 60470 - RNA, 32 nt, Homo Sapiens
caacaauuauuuuuauuuucucccugcucugu

SEQ ID NO: 60471 - RNA, 32 nt, Homo Sapiens
cuuggcagugggcucuguggacccagcauuuc

SEQ ID NO: 60472 - RNA, 32 nt, Homo Sapiens
ggugaaaaaugguaauauaacaauauaugaua

SEQ ID NO: 60473 - RNA, 32 nt, Homo Sapiens
acaauuacuuuuuauauuaaaaagaccaugga

SEQ ID NO: 60474 - RNA, 32 nt, Homo Sapiens
auuaaagauaaaaauucuucuaaucucucaua

SEQ ID NO: 60475 - RNA, 32 nt, Homo Sapiens
gggcucagugaacacuggcgcugccucugagu

SEQ ID NO: 60476 - RNA, 32 nt, Homo Sapiens
cugggcuucgcggaaagaagagauuacucaca

SEQ ID NO: 60477 - RNA, 27 nt, Homo Sapiens
ugagugcucuucuucaggauccaauga

SEQ ID NO: 60478 - RNA, 32 nt, Homo Sapiens
gaaagccaagggugcccagggguguggugucu

SEQ ID NO: 60479 - RNA, 32 nt, Homo Sapiens
uuuuuuguugaguuauuugaguuucuuauaua

SEQ ID NO: 60480 - RNA, 32 nt, Homo Sapiens
gccgccaucuugaaaaaccaacccugaccucc

SEQ ID NO: 60481 - RNA, 32 nt, Homo Sapiens
uauugagugcccacuacgugccaggcacuguu

SEQ ID NO: 60482 - RNA, 32 nt, Homo Sapiens
gacgcccuucccucuggucgguuguggggcuc

SEQ ID NO: 60483 - RNA, 32 nt, Homo Sapiens
auguucuuuugagguuagaaauccuugcugcu

SEQ ID NO: 60484 - RNA, 32 nt, Homo Sapiens
uaaaauugaauucaggacugauuuguuagccu

SEQ ID NO: 60485 - RNA, 32 nt, Homo Sapiens
cuguguuucuuagugcaaaucuguagaguaaa

SEQ ID NO: 60486 - RNA, 32 nt, Homo Sapiens
gaaggaucuauuucuacagaaucauuucacca

SEQ ID NO: 60487 - RNA, 32 nt, Homo Sapiens
gaauuaaugaaaugauaaagacuuuuauguga

SEQ ID NO: 60488 - RNA, 32 nt, Homo Sapiens
cuggagugcaggccugucaacuuuacaggaga

SEQ ID NO: 60489 - RNA, 32 nt, Homo Sapiens
cuccgcguggggcaaggcuccgagggcagcau

SEQ ID NO: 60490 - RNA, 32 nt, Homo Sapiens
uugguuauacuauauucuguuuccaaguaacc

SEQ ID NO: 60491 - RNA, 32 nt, Homo Sapiens
aaaucaaaacaucauguagggugaccuaguuu

SEQ ID NO: 60492 - RNA, 32 nt, Homo Sapiens
ucaugggcucugcccuucugcucggugcccuc

SEQ ID NO: 60493 - RNA, 32 nt, Homo Sapiens
cgaagcgugcgcgcuuugguaaccggcuagaa

SEQ ID NO: 60494 - RNA, 32 nt, Homo Sapiens
uucuuaucaaggaauugaaccaaaguuaaaca

SEQ ID NO: 60495 - RNA, 32 nt, Homo Sapiens
uuuguacaccaaucaaagguguaugaagucga

SEQ ID NO: 60496 - RNA, 32 nt, Homo Sapiens
ucuaacccuaguccaggcggaccucacccuuc

SEQ ID NO: 60497 - RNA, 32 nt, Homo Sapiens
cagccucuccccagccuccccgugccaaaaau

SEQ ID NO: 60498 - RNA, 32 nt, Homo Sapiens
cgggggcagcagcggcagccucaccccgggac

SEQ ID NO: 60499 - RNA, 32 nt, Homo Sapiens
ucccagguucaagcgacucuucugccucagcc

SEQ ID NO: 60500 - RNA, 32 nt, Homo Sapiens
aacaguacuuggaacugaggaagcuggacaca

SEQ ID NO: 60501 - RNA, 32 nt, Homo Sapiens
ucguggcccccucggggcugcacuaauggaca

SEQ ID NO: 60502 - RNA, 32 nt, Homo Sapiens
auaacaaaaaaguaagauauucgguauuuaac

SEQ ID NO: 60503 - RNA, 32 nt, Homo Sapiens
uucacucggccaugcucccgcggccccugcgg

SEQ ID NO: 60504 - RNA, 32 nt, Homo Sapiens
gcuaggaacaucagccuggugcccuguuaacc

SEQ ID NO: 60505 - RNA, 32 nt, Homo Sapiens
auuaggcaaaauaagcaauucugcuuuucugu

SEQ ID NO: 60506 - RNA, 32 nt, Homo Sapiens
uccaucccacgccugccacgggcuucccccuc

SEQ ID NO: 60507 - RNA, 32 nt, Homo Sapiens
augaccugaggcacucugcgaugugugcccca

SEQ ID NO: 60508 - RNA, 29 nt, Homo Sapiens
cguggaaugaagauuuugagggucaccuu

SEQ ID NO: 60509 - RNA, 32 nt, Homo Sapiens
aagguaaauauuuggacuaacuuuuagaaaag

SEQ ID NO: 60510 - RNA, 32 nt, Homo Sapiens
agguucccacuuuggggucgcggccgcagcag

SEQ ID NO: 60511 - RNA, 32 nt, Homo Sapiens
agguacaguagagagaacauggagccugcuga

SEQ ID NO: 60512 - RNA, 32 nt, Homo Sapiens
aaacagacucagguuucuuuggaccaaaucca

SEQ ID NO: 60513 - RNA, 32 nt, Homo Sapiens
auccccggacagcucugugagcccccacccca

SEQ ID NO: 60514 - RNA, 32 nt, Homo Sapiens
cugucucagugcugguuuuucuugacuacacu

SEQ ID NO: 60515 - RNA, 32 nt, Homo Sapiens
uuaaaauaaaaauaaucacucccuaugaucua

SEQ ID NO: 60516 - RNA, 32 nt, Homo Sapiens
acgaggcugggggaggggcgcccgccauugcc

SEQ ID NO: 60517 - RNA, 32 nt, Homo Sapiens
uuuaaaaaacagcugcacaaaccagaacaccg

SEQ ID NO: 60518 - RNA, 32 nt, Homo Sapiens
ggggacacuccagaggcugucgugggaggauc

SEQ ID NO: 60519 - RNA, 32 nt, Homo Sapiens
ccucccccaaaauacggugaucucaagcugcc

SEQ ID NO: 60520 - RNA, 32 nt, Homo Sapiens
ccuuuugaguucccgccucacccaggggcucc

SEQ ID NO: 60521 - RNA, 32 nt, Homo Sapiens
acgugcugcacuucuucaacgccccgcuggag

SEQ ID NO: 60522 - RNA, 32 nt, Homo Sapiens
auucauaguuuauaaacauucuauacaacaga

SEQ ID NO: 60523 - RNA, 32 nt, Homo Sapiens
gacagagcauuugcagggccaccuggaggcug

SEQ ID NO: 60524 - RNA, 32 nt, Homo Sapiens
accaccaccaaaaccaguuuaugcaguuggac

SEQ ID NO: 60525 - RNA, 32 nt, Homo Sapiens
gugauguguguucugaaauugugaaccaugag

SEQ ID NO: 60526 - RNA, 32 nt, Homo Sapiens
ugaccaaaugccgccaaccccgagggccaguu

SEQ ID NO: 60527 - RNA, 32 nt, Homo Sapiens
cuggugaaaauauuuuuuaaagccagugcucu

SEQ ID NO: 60528 - RNA, 32 nt, Homo Sapiens
uuaaucgaaacaacacaugguuaugucuuuuu

SEQ ID NO: 60529 - RNA, 32 nt, Homo Sapiens
ucagcggcgggaagcuggcggcagcggcggug

SEQ ID NO: 60530 - RNA, 32 nt, Homo Sapiens
gcuggggcuguauuaucagcacagcaaauuaa

SEQ ID NO: 60531 - RNA, 32 nt, Homo Sapiens
uucaggcauuggauauuuuuuacuuuagaagc

SEQ ID NO: 60532 - RNA, 32 nt, Homo Sapiens
acaaagugucuuuggaaauuaagggauauuaa

SEQ ID NO: 60533 - RNA, 32 nt, Homo Sapiens
uuuuuguuguuguuaacccuccucggauuucu

SEQ ID NO: 60534 - RNA, 32 nt, Homo Sapiens
aacuaaugucauuggaaacaaaagcuugaaag

SEQ ID NO: 60535 - RNA, 32 nt, Homo Sapiens
gcccccaaacugggcaggccgaggccaggaug

SEQ ID NO: 60536 - RNA, 32 nt, Homo Sapiens
ggggugagccgaaaccugggggucgagcgggg

SEQ ID NO: 60537 - RNA, 32 nt, Homo Sapiens
gucuguuuuuauuugcaguaggauuuuaaagg

SEQ ID NO: 60538 - RNA, 32 nt, Homo Sapiens
ucaagggucuagcacaaugcuugaugcauauu

SEQ ID NO: 60539 - RNA, 32 nt, Homo Sapiens
ggucuguguuuccuuugccacccagcccccau

SEQ ID NO: 60540 - RNA, 32 nt, Homo Sapiens
ggagcucugcgguugcuaggggcccugaccug

SEQ ID NO: 60541 - RNA, 32 nt, Homo Sapiens
uuuggccagauguacaggucacaggggacuga

SEQ ID NO: 60542 - RNA, 32 nt, Homo Sapiens
ggucgaggggaagagaggaagugcacggcugu

SEQ ID NO: 60543 - RNA, 32 nt, Homo Sapiens
uugguaugcuuacaaaugacuaaccaaucaaa

SEQ ID NO: 60544 - RNA, 32 nt, Homo Sapiens
uggguaggccccacaaggccuggucugggagu

SEQ ID NO: 60545 - RNA, 32 nt, Homo Sapiens
gaaggcagcugagacugggcccagugagggca

SEQ ID NO: 60546 - RNA, 32 nt, Homo Sapiens
uaggcugguggcaccaggauucuggcccaggg

SEQ ID NO: 60547 - RNA, 32 nt, Homo Sapiens
ccagcuuuugaaaagaaaaaucugaaaaaauu

SEQ ID NO: 60548 - RNA, 32 nt, Homo Sapiens
accugcuaauggugugaugucauuuuuccccc

SEQ ID NO: 60549 - RNA, 32 nt, Homo Sapiens
ucugcucgucuuucagagcauugucuccucca

SEQ ID NO: 60550 - RNA, 32 nt, Homo Sapiens
gcucuggggccgccgcgcgcuccuaggcgcag

SEQ ID NO: 60551 - RNA, 32 nt, Homo Sapiens
ccuuuuauuuuuggcuugagauuuaaaauuau

SEQ ID NO: 60552 - RNA, 32 nt, Homo Sapiens
gcuauggucacugagggguuagcuuuaucugc

SEQ ID NO: 60553 - RNA, 32 nt, Homo Sapiens
ucagaaugcagaacucauuuaacaucaugaau

SEQ ID NO: 60554 - RNA, 32 nt, Homo Sapiens
agcauugauguuggguggcuuuuguucuuuca

SEQ ID NO: 60555 - RNA, 32 nt, Homo Sapiens
gacauugcagcgagcaggcaggauggagagca

SEQ ID NO: 60556 - RNA, 32 nt, Homo Sapiens
ccuggggacaggucggcuguggggcagcucag

SEQ ID NO: 60557 - RNA, 30 nt, Homo Sapiens
gugccugucugugccugggagaacagagca

SEQ ID NO: 60558 - RNA, 32 nt, Homo Sapiens
uugaccacgguuccuggaguagaaguccaucc

SEQ ID NO: 60559 - RNA, 32 nt, Homo Sapiens
guauagggaaacuuuacuaauguaaugauuau

SEQ ID NO: 60560 - RNA, 32 nt, Homo Sapiens
aaaguuacuuuuugguuuugauguacacauau

SEQ ID NO: 60561 - RNA, 32 nt, Homo Sapiens
cgcaggucccggagggggcggcuggcgcgcac

SEQ ID NO: 60562 - RNA, 32 nt, Homo Sapiens
cugcccagaugugcuuccuguggaaggagacc

SEQ ID NO: 60563 - RNA, 32 nt, Homo Sapiens
cuggaagagagguuccggggcugggcuggccu

SEQ ID NO: 60564 - RNA, 32 nt, Homo Sapiens
guguauuggaacagaaaguaacaaagaggaau

SEQ ID NO: 60565 - RNA, 29 nt, Homo Sapiens
ggccauguccgacucgugggucccgaacu

SEQ ID NO: 60566 - RNA, 32 nt, Homo Sapiens
auaguuugaguaaaacaaaacuaguuaccuuu

SEQ ID NO: 60567 - RNA, 32 nt, Homo Sapiens
uuuuuucagguggucuuuuuugugucuggcuu

SEQ ID NO: 60568 - RNA, 32 nt, Homo Sapiens
uuuggccauugccauggaugaaaccgagaucu

SEQ ID NO: 60569 - RNA, 32 nt, Homo Sapiens
acuuguguuguccgaacaccaagaagaaagca

SEQ ID NO: 60570 - RNA, 32 nt, Homo Sapiens
uccagcugaguggcuugcaggcguggcgcagg

SEQ ID NO: 60571 - RNA, 32 nt, Homo Sapiens
cagauguggaccugucggagaaccagcuggga

SEQ ID NO: 60572 - RNA, 32 nt, Homo Sapiens
cccucugccuggcggcagucacggccaagaac

SEQ ID NO: 60573 - RNA, 30 nt, Homo Sapiens
auaucauuccuauggggggaaagccuuuuu

SEQ ID NO: 60574 - RNA, 32 nt, Homo Sapiens
ccucaggaaugggcuguuuuuggccuaacccu

SEQ ID NO: 60575 - RNA, 30 nt, Homo Sapiens
agcaggagcaucaggcggccggcgcauggc

SEQ ID NO: 60576 - RNA, 32 nt, Homo Sapiens
uucgugguguugcuggagacccguaugguguc

SEQ ID NO: 60577 - RNA, 32 nt, Homo Sapiens
cguuaccuguauacuacuaacucaguuggaag

SEQ ID NO: 60578 - RNA, 32 nt, Homo Sapiens
acagcagaugucagggucaucuuucuuuuuaa

SEQ ID NO: 60579 - RNA, 32 nt, Homo Sapiens
gcaagucacuguacaacugggcuauuugcaug

SEQ ID NO: 60580 - RNA, 32 nt, Homo Sapiens
caagccuugagccuugcucaguuugggaacug

SEQ ID NO: 60581 - RNA, 32 nt, Homo Sapiens
ugggccucugugucacccacuccugggugcgu

SEQ ID NO: 60582 - RNA, 32 nt, Homo Sapiens
ccacagucuccauuucagcgucuugcauggcc

SEQ ID NO: 60583 - RNA, 32 nt, Homo Sapiens
cacaucugcuggaaguccucugggauucaagg

SEQ ID NO: 60584 - RNA, 32 nt, Homo Sapiens
gcguccggcuccugcagugcacccacaccagg

SEQ ID NO: 60585 - RNA, 32 nt, Homo Sapiens
gcuuucuuucccuuuauuuucucaucacuaaa

SEQ ID NO: 60586 - RNA, 32 nt, Homo Sapiens
gacuucuuuacuaacacuggcuagcuauauua

SEQ ID NO: 60587 - RNA, 32 nt, Homo Sapiens
ucagucuugcugucuguuguuguuugaaaucu

SEQ ID NO: 60588 - RNA, 32 nt, Homo Sapiens
guauuauugucauuuuaacugaaagaauuacc

SEQ ID NO: 60589 - RNA, 32 nt, Homo Sapiens
ucucuucagacucuucucguuucugagaaucu

SEQ ID NO: 60590 - RNA, 32 nt, Homo Sapiens
guaauuuuaaacuuuaaaaacuucuacugaaa

SEQ ID NO: 60591 - RNA, 32 nt, Homo Sapiens
ugguccaggcuucaggaacccccggucuuggg

SEQ ID NO: 60592 - RNA, 32 nt, Homo Sapiens
cucagagccagggcucuuucugguugaggcug

SEQ ID NO: 60593 - RNA, 32 nt, Homo Sapiens
ccagggaagcagggcugcugcugcacaccggg

SEQ ID NO: 60594 - RNA, 32 nt, Homo Sapiens
gugauggaagcagcuagugaacgauucccuuu

SEQ ID NO: 60595 - RNA, 32 nt, Homo Sapiens
cccgagggcgccuggguccucccagcugacgg

SEQ ID NO: 60596 - RNA, 32 nt, Homo Sapiens
cugccucccucgcuccuccaacagcugccuuc

SEQ ID NO: 60597 - RNA, 32 nt, Homo Sapiens
ucuucuauuuggagaauaagauggaugcuuau

SEQ ID NO: 60598 - RNA, 32 nt, Homo Sapiens
gcagggcugcuguggcccagucguccgcucag

SEQ ID NO: 60599 - RNA, 32 nt, Homo Sapiens
accugcccugggggcuggcagcuccuucaggc

SEQ ID NO: 60600 - RNA, 32 nt, Homo Sapiens
gggacagaugguuuaaagaaaccuggccuucu

SEQ ID NO: 60601 - RNA, 32 nt, Homo Sapiens
ccacugugagggugggugcuggcugagccccu

SEQ ID NO: 60602 - RNA, 32 nt, Homo Sapiens
cuugcucccuucccuucuagagcugccuuaag

SEQ ID NO: 60603 - RNA, 30 nt, Homo Sapiens
aacaaucgcagcggcggcggcagcggcggg

SEQ ID NO: 60604 - RNA, 32 nt, Homo Sapiens
ucauuuacuguuugauuuguaacagcuagcca

SEQ ID NO: 60605 - RNA, 32 nt, Homo Sapiens
ggcgcccggguccgccaugcgcuccgccgcug

SEQ ID NO: 60606 - RNA, 32 nt, Homo Sapiens
aguauuagcuaauuuucuuguuuugguuuacu

SEQ ID NO: 60607 - RNA, 32 nt, Homo Sapiens
aucaagcaaaacaaaauuaauuacguaaaauu

SEQ ID NO: 60608 - RNA, 32 nt, Homo Sapiens
gagugggucccggguucacacccauugugcag

SEQ ID NO: 60609 - RNA, 32 nt, Homo Sapiens
uucuguuuuguuuuuuacuuuaauuuuguuuu

SEQ ID NO: 60610 - RNA, 32 nt, Homo Sapiens
uuuuacuuuugaugaaguccaguuuaucuauu

SEQ ID NO: 60611 - RNA, 32 nt, Homo Sapiens
ccaugaccuuggaacucgaugugagaucccug

SEQ ID NO: 60612 - RNA, 32 nt, Homo Sapiens
cuaugggagcagcauguuugucuuuggggguu

SEQ ID NO: 60613 - RNA, 32 nt, Homo Sapiens
gcagguagaauauacauugauaggaaauguga

SEQ ID NO: 60614 - RNA, 32 nt, Homo Sapiens
cagaugaucuucaucccugaaguuuucagcua

SEQ ID NO: 60615 - RNA, 32 nt, Homo Sapiens
uugacauacugauccucuacucugaguggggc

SEQ ID NO: 60616 - RNA, 32 nt, Homo Sapiens
auaaggaaaaaguucuaacuccaguauuaaau

SEQ ID NO: 60617 - RNA, 32 nt, Homo Sapiens
cacaguggucccuacccaucuggcagcugcug

SEQ ID NO: 60618 - RNA, 32 nt, Homo Sapiens
ucuuuuuauuuuuccucuuuucauaaaugcuc

SEQ ID NO: 60619 - RNA, 32 nt, Homo Sapiens
uuuacuacugaauuuuauugcuaaguaaauuu

SEQ ID NO: 60620 - RNA, 32 nt, Homo Sapiens
aucguuaacauggguaacccagcaaauauuuc

SEQ ID NO: 60621 - RNA, 32 nt, Homo Sapiens
auuuuaugggaagcucauaguauuuuaauauu

SEQ ID NO: 60622 - RNA, 32 nt, Homo Sapiens
cuuuuuguccuuagugguauguucaaggagcc

SEQ ID NO: 60623 - RNA, 32 nt, Homo Sapiens
gucuuaguguucugccggaggacccagccgcc

SEQ ID NO: 60624 - RNA, 32 nt, Homo Sapiens
cccaccggccccacucccugggcacagaguca

SEQ ID NO: 60625 - RNA, 32 nt, Homo Sapiens
ucuugugaauuuguuuacgugaugccaagcau

SEQ ID NO: 60626 - RNA, 32 nt, Homo Sapiens
uaguagaucuccaacaguuuuucuugaaugug

SEQ ID NO: 60627 - RNA, 32 nt, Homo Sapiens
ccgccaacaagcucaucgagcacgugcgcguc

SEQ ID NO: 60628 - RNA, 32 nt, Homo Sapiens
aauccaaguguguuuuaaccaugcugaccagc

SEQ ID NO: 60629 - RNA, 32 nt, Homo Sapiens
gauguguccagaagcuuuaccauccacacccc

SEQ ID NO: 60630 - RNA, 32 nt, Homo Sapiens
ucaggcuucacagauguggcauaggggcuggc

SEQ ID NO: 60631 - RNA, 32 nt, Homo Sapiens
uagcaauggauaaauagauaccacugaaugaa

SEQ ID NO: 60632 - RNA, 32 nt, Homo Sapiens
cuuuuucuuaggauguucugguuuguuagaag

SEQ ID NO: 60633 - RNA, 32 nt, Homo Sapiens
guggaggugggguuuauugggaugcuggagaa

SEQ ID NO: 60634 - RNA, 32 nt, Homo Sapiens
ggagccgcuccuggccugccuccagcuggcug

SEQ ID NO: 60635 - RNA, 32 nt, Homo Sapiens
ccggcggcuggcccgggggaggcggccgaggc

SEQ ID NO: 60636 - RNA, 32 nt, Homo Sapiens
cuguuccgaaguauccucuccucuucucgagc

SEQ ID NO: 60637 - RNA, 32 nt, Homo Sapiens
ucccccgguggccgaggcccaggcccaacgcc

SEQ ID NO: 60638 - RNA, 32 nt, Homo Sapiens
cgccuguggucccagcacuuuggggggcugag

SEQ ID NO: 60639 - RNA, 32 nt, Homo Sapiens
uugccaaaaugguggccuggcuugucuucuga

SEQ ID NO: 60640 - RNA, 32 nt, Homo Sapiens
cgccugugauccuagcacuuugggaggccgag

SEQ ID NO: 60641 - RNA, 32 nt, Homo Sapiens
cgccuguaauccuagcacuuugggaggccgaa

SEQ ID NO: 60642 - RNA, 32 nt, Homo Sapiens
ccucugacagaaggggaaugggcuccugcagc

SEQ ID NO: 60643 - RNA, 32 nt, Homo Sapiens
ccgaaagucucaaugucauauuuucaccccca

SEQ ID NO: 60644 - RNA, 32 nt, Homo Sapiens
ugaggguuaauuaagcuaauagacuugaaauc

SEQ ID NO: 60645 - RNA, 32 nt, Homo Sapiens
cugccagucuugguauagaacaaccuaggcuu

SEQ ID NO: 60646 - RNA, 32 nt, Homo Sapiens
cccccugcaaccuccgccucccggguucgagc

SEQ ID NO: 60647 - RNA, 32 nt, Homo Sapiens
uuuagaaaacgaaugcauuuaaaaauauuuuc

SEQ ID NO: 60648 - RNA, 30 nt, Homo Sapiens
gaagagugggcgcagcagcccagcggaggc

SEQ ID NO: 60649 - RNA, 32 nt, Homo Sapiens
aacauuaaaaacaguugcuaugucugaguuuu

SEQ ID NO: 60650 - RNA, 32 nt, Homo Sapiens
ccgccgccgagagguccccggcgccuagcauc

SEQ ID NO: 60651 - RNA, 32 nt, Homo Sapiens
ccauuguugggccaucacugagcgcucaguau

SEQ ID NO: 60652 - RNA, 32 nt, Homo Sapiens
ugggcugcagcaaccuuggggucgccucccag

SEQ ID NO: 60653 - RNA, 32 nt, Homo Sapiens
guggaguggaggagaaagaacccugggaaaaa

SEQ ID NO: 60654 - RNA, 32 nt, Homo Sapiens
guguuugaugucaucagcaccauccaucagga

SEQ ID NO: 60655 - RNA, 32 nt, Homo Sapiens
uuacauuuuuaaacacugguucuauuauugga

SEQ ID NO: 60656 - RNA, 32 nt, Homo Sapiens
cuguguccaggcgguccauguugaaaauggag

SEQ ID NO: 60657 - RNA, 32 nt, Homo Sapiens
ugucccaucaagggagggagggggugggagaa

SEQ ID NO: 60658 - RNA, 32 nt, Homo Sapiens
auuacauggaauuuucauaggcaaauuaauua

SEQ ID NO: 60659 - RNA, 32 nt, Homo Sapiens
gcacuugcaccgccagcugccgccgacugcag

SEQ ID NO: 60660 - RNA, 32 nt, Homo Sapiens
aggcgggcagaucaccugaggucaggaguuuu

SEQ ID NO: 60661 - RNA, 32 nt, Homo Sapiens
cuccuccuccaagcucccccagcccugggcug

SEQ ID NO: 60662 - RNA, 32 nt, Homo Sapiens
aaagugauggucugggccgggcgagguggcuc

SEQ ID NO: 60663 - RNA, 32 nt, Homo Sapiens
aguucaguuaagcuuagcacaaugaugaaaac

SEQ ID NO: 60664 - RNA, 32 nt, Homo Sapiens
ucugauuccuuccuuucccuccauuucacaaa

SEQ ID NO: 60665 - RNA, 32 nt, Homo Sapiens
gagaggggccugugggaggggcugggaaaaua

SEQ ID NO: 60666 - RNA, 32 nt, Homo Sapiens
gucauuuguaaauucuaaauggucaccauaaa

SEQ ID NO: 60667 - RNA, 32 nt, Homo Sapiens
ccuuccugucuaggaaaaugcuauaaagcuca

SEQ ID NO: 60668 - RNA, 32 nt, Homo Sapiens
gcggaguugcgggcgcguggcugcugagguug

SEQ ID NO: 60669 - RNA, 32 nt, Homo Sapiens
cugcagcaggagaagacagagaaggcugcagg

SEQ ID NO: 60670 - RNA, 32 nt, Homo Sapiens
aaucaaaaaugaaauuaagacagugauuccau

SEQ ID NO: 60671 - RNA, 32 nt, Homo Sapiens
gaaacaaaacaucauucuauaagucaguauac

SEQ ID NO: 60672 - RNA, 32 nt, Homo Sapiens
aucucagggaaugacuguguucuguaauccac

SEQ ID NO: 60673 - RNA, 32 nt, Homo Sapiens
cagcaccgcgucuguaagggccugccugcugc

SEQ ID NO: 60674 - RNA, 32 nt, Homo Sapiens
ucagaaaacaacaugagauuggcguggcuuua

SEQ ID NO: 60675 - RNA, 32 nt, Homo Sapiens
uuuuguauuuuuaauaaagaugggguuucacc

SEQ ID NO: 60676 - RNA, 32 nt, Homo Sapiens
gaucacccaagccccaggcugucuuagccccu

SEQ ID NO: 60677 - RNA, 32 nt, Homo Sapiens
gagaaggucuugcucugucacccaggcuggaa

SEQ ID NO: 60678 - RNA, 32 nt, Homo Sapiens
ccugccaaacuccaggcucagaugucacaggu

SEQ ID NO: 60679 - RNA, 32 nt, Homo Sapiens
ggccuccucaccaacggcagugccaaaaucag

SEQ ID NO: 60680 - RNA, 32 nt, Homo Sapiens
cugguggaugcuggaccuugcugcugcugcua

SEQ ID NO: 60681 - RNA, 32 nt, Homo Sapiens
gcaggcaauaaucaaugcagcagccucgcaac

SEQ ID NO: 60682 - RNA, 32 nt, Homo Sapiens
guucaauuuucugaaauuucaauuaaacuauu

SEQ ID NO: 60683 - RNA, 32 nt, Homo Sapiens
gccuccgcuacuuccagggcuacgcgcgcucc

SEQ ID NO: 60684 - RNA, 30 nt, Homo Sapiens
uucauucucugugcucagaccaucucuuuc

SEQ ID NO: 60685 - RNA, 32 nt, Homo Sapiens
aacuuaauuuaaaagucuuaaauauucugaua

SEQ ID NO: 60686 - RNA, 32 nt, Homo Sapiens
uucuacaauuuuuggacucaagcaaaaagcca

SEQ ID NO: 60687 - RNA, 30 nt, Homo Sapiens
ucggaggcgcccggccgccccggagccaag

SEQ ID NO: 60688 - RNA, 32 nt, Homo Sapiens
gcagcgagggccgggggcggcgggcgggauga

SEQ ID NO: 60689 - RNA, 32 nt, Homo Sapiens
gcccugaaggcaccugucaacuggagugcucu

SEQ ID NO: 60690 - RNA, 32 nt, Homo Sapiens
aauagaaaucauaacuguuuuauuucuaagga

SEQ ID NO: 60691 - RNA, 32 nt, Homo Sapiens
acaagaucaaagucguauaccugaggugcacc

SEQ ID NO: 60692 - RNA, 32 nt, Homo Sapiens
uccuaaugaauaaguaaaaugccagaucucuu

SEQ ID NO: 60693 - RNA, 32 nt, Homo Sapiens
cugcucaagugcagcugcaguggccgggguuu

SEQ ID NO: 60694 - RNA, 30 nt, Homo Sapiens
gcccuuucuguagugggggaaagguggcug

SEQ ID NO: 60695 - RNA, 32 nt, Homo Sapiens
ugccucauuuugcugacuuguaaaaugguaau

SEQ ID NO: 60696 - RNA, 32 nt, Homo Sapiens
cugucugcggagccagcgccugcccgagagag

SEQ ID NO: 60697 - RNA, 32 nt, Homo Sapiens
caauuuuccagauggagucucgcuuuguugcc

SEQ ID NO: 60698 - RNA, 32 nt, Homo Sapiens
cuccugccugcucugagacaagaagggugggg

SEQ ID NO: 60699 - RNA, 32 nt, Homo Sapiens
cagugaggaagccgcacacaugccuguucugc

SEQ ID NO: 60700 - RNA, 32 nt, Homo Sapiens
acuggcggggaccugaugggguagcuggggug

SEQ ID NO: 60701 - RNA, 32 nt, Homo Sapiens
gcugaaggcggaccgcggagcggcgggcggcg

SEQ ID NO: 60702 - RNA, 32 nt, Homo Sapiens
uccuccaccaaaacggaccugacauugauuga

SEQ ID NO: 60703 - RNA, 32 nt, Homo Sapiens
ccaggagccaguggcaggagcggaacagccca

SEQ ID NO: 60704 - RNA, 32 nt, Homo Sapiens
gacaucugcaucauuucauaggauuagaacuu

SEQ ID NO: 60705 - RNA, 32 nt, Homo Sapiens
accagcgcgggccggggcagcugguaccuggg

SEQ ID NO: 60706 - RNA, 32 nt, Homo Sapiens
caaacaugggaguuaagugcugcuugucuucc

SEQ ID NO: 60707 - RNA, 31 nt, Homo Sapiens
ggagugguggggccauggcaagagacaccgu

SEQ ID NO: 60708 - RNA, 32 nt, Homo Sapiens
uguuuuuguuuuucaucugucaaugugaugau

SEQ ID NO: 60709 - RNA, 32 nt, Homo Sapiens
uuucucuauuuucuccugggugccugggucug

SEQ ID NO: 60710 - RNA, 32 nt, Homo Sapiens
gggcagggagagcggcagcggggcugcgcagg

SEQ ID NO: 60711 - RNA, 32 nt, Homo Sapiens
augcucugucuccugucgguuccaggcaagca

SEQ ID NO: 60712 - RNA, 32 nt, Homo Sapiens
acuuuugcgggacagaaucagaggacauacau

SEQ ID NO: 60713 - RNA, 32 nt, Homo Sapiens
cuggggccggcgagaaaucuccugugaugccc

SEQ ID NO: 60714 - RNA, 32 nt, Homo Sapiens
uguuuugauccuucaugguuaccgagcggucu

SEQ ID NO: 60715 - RNA, 32 nt, Homo Sapiens
gugcuauguauaucuuucaucuguaaauguca

SEQ ID NO: 60716 - RNA, 32 nt, Homo Sapiens
cgaucucuaugccugggauucccuuuauucca

SEQ ID NO: 60717 - RNA, 32 nt, Homo Sapiens
uguaagguuugugacaaggcuuuccggaggga

SEQ ID NO: 60718 - RNA, 32 nt, Homo Sapiens
aagcgaacaucaacuggccuguagauuugugg

SEQ ID NO: 60719 - RNA, 32 nt, Homo Sapiens
accugaaggaauaaaaugauuuguggaaaugc

SEQ ID NO: 60720 - RNA, 32 nt, Homo Sapiens
uuuccacuacuguguagacuccugcuucuuca

SEQ ID NO: 60721 - RNA, 32 nt, Homo Sapiens
aguaagccaucccacaaguucuauaccauauu

SEQ ID NO: 60722 - RNA, 32 nt, Homo Sapiens
ugccuuucagcauuagacuuugaguuuaauaa

SEQ ID NO: 60723 - RNA, 32 nt, Homo Sapiens
uagugagaucccaucucaaaaaacauuauuuu

SEQ ID NO: 60724 - RNA, 32 nt, Homo Sapiens
cuguaaugccagcacuuugggaggcuaaggca

SEQ ID NO: 60725 - RNA, 30 nt, Homo Sapiens
cucuuaggcaggcgugcacgucuuccucuu

SEQ ID NO: 60726 - RNA, 32 nt, Homo Sapiens
cuuugccugguuuugucuuuuaugcagauaga

SEQ ID NO: 60727 - RNA, 32 nt, Homo Sapiens
cugcgggcgggugguggaaccagccccuccag

SEQ ID NO: 60728 - RNA, 32 nt, Homo Sapiens
caauguauuuguguaauuuauagaaguaaaau

SEQ ID NO: 60729 - RNA, 32 nt, Homo Sapiens
uggacaugagagaauucacacaggggaaaaac

SEQ ID NO: 60730 - RNA, 32 nt, Homo Sapiens
cggguaccaggaagugcagagccgcacaggag

SEQ ID NO: 60731 - RNA, 32 nt, Homo Sapiens
aacagcuuaaagauuugcaugugcagugugca

SEQ ID NO: 60732 - RNA, 32 nt, Homo Sapiens
cacauauacauaaguguuuacacacacacacg

SEQ ID NO: 60733 - RNA, 32 nt, Homo Sapiens
ucccacugcccccgccucucagcacagggcag

SEQ ID NO: 60734 - RNA, 32 nt, Homo Sapiens
uccguacccagccccagcaucuuccaccugcu

SEQ ID NO: 60735 - RNA, 32 nt, Homo Sapiens
cgccgccgcgucugcugaagccuccgagaugc

SEQ ID NO: 60736 - RNA, 32 nt, Homo Sapiens
gauguagaaccagugcauaacuuuuuaugggg

SEQ ID NO: 60737 - RNA, 32 nt, Homo Sapiens
gcugcgccggcgaccccggacccggcacccgu

SEQ ID NO: 60738 - RNA, 32 nt, Homo Sapiens
ccgcagcugcaggaguccugcccgcccagacu

SEQ ID NO: 60739 - RNA, 32 nt, Homo Sapiens
aaaaacaaaaauucaaaucacaguaccucgau

SEQ ID NO: 60740 - RNA, 32 nt, Homo Sapiens
cugggacugggucuuuccagagagggcugcag

SEQ ID NO: 60741 - RNA, 32 nt, Homo Sapiens
auagugacaaugaagaugaugcuauuaauacu

SEQ ID NO: 60742 - RNA, 32 nt, Homo Sapiens
agccuccucgcccgcucccgccggcgagcaag

SEQ ID NO: 60743 - RNA, 32 nt, Homo Sapiens
cuugggcacauguucucaggaccuccugagga

SEQ ID NO: 60744 - RNA, 31 nt, Homo Sapiens
auuuguaagaaacauggccaggcaagauggc

SEQ ID NO: 60745 - RNA, 32 nt, Homo Sapiens
ucuccuccgcccgccuucuccucacucgccca

SEQ ID NO: 60746 - RNA, 32 nt, Homo Sapiens
uucaugucacauuuacuaauagaauuaaggga

SEQ ID NO: 60747 - RNA, 32 nt, Homo Sapiens
gaggugaggcugggcccucccuggucuccagc

SEQ ID NO: 60748 - RNA, 32 nt, Homo Sapiens
aacaaaauguaaaagcacugaaauauacauug

SEQ ID NO: 60749 - RNA, 32 nt, Homo Sapiens
uccuggcuaacacgggugaaaccccgucucua

SEQ ID NO: 60750 - RNA, 32 nt, Homo Sapiens
agcgcuccggugcccgcagccaugccggccgg

SEQ ID NO: 60751 - RNA, 32 nt, Homo Sapiens
uccuccuccucugccgccgccuccucagucgc

SEQ ID NO: 60752 - RNA, 32 nt, Homo Sapiens
uucuuucuuuuuuuuucuuuuuuucaauauca

SEQ ID NO: 60753 - RNA, 30 nt, Homo Sapiens
agaaguguaauaacaaacaagaguacacuu

SEQ ID NO: 60754 - RNA, 32 nt, Homo Sapiens
gggaaguagaugggcgacugcuuuguucacac

SEQ ID NO: 60755 - RNA, 32 nt, Homo Sapiens
auucagacagauggacccccagcaaaucagga

SEQ ID NO: 60756 - RNA, 32 nt, Homo Sapiens
gggaaauaaauuuauaagagacuuuauuuaaa

SEQ ID NO: 60757 - RNA, 32 nt, Homo Sapiens
acugagggugguggagcagguagauggaaaga

SEQ ID NO: 60758 - RNA, 32 nt, Homo Sapiens
acuacuauuacauccuggagcugucguuuuau

SEQ ID NO: 60759 - RNA, 32 nt, Homo Sapiens
agaucccagcacagcucugagcuuguuccuuu

SEQ ID NO: 60760 - RNA, 32 nt, Homo Sapiens
aacugccaugaagcugacgugcagcaugugcu

SEQ ID NO: 60761 - RNA, 32 nt, Homo Sapiens
uccacucccggcuguucccccggaggguccag

SEQ ID NO: 60762 - RNA, 32 nt, Homo Sapiens
uguggguuaucauggaagaaaaggauuuugga

SEQ ID NO: 60763 - RNA, 32 nt, Homo Sapiens
accgugcaugcacccagcuuuccccggagacu

SEQ ID NO: 60764 - RNA, 32 nt, Homo Sapiens
cagggaaccuggaaugggcuguguguucugca

SEQ ID NO: 60765 - RNA, 32 nt, Homo Sapiens
aacagugccuggaagccugaggcugcauuucc

SEQ ID NO: 60766 - RNA, 32 nt, Homo Sapiens
cacaguggagagcgacaggugaggacagacgu

SEQ ID NO: 60767 - RNA, 32 nt, Homo Sapiens
ggcugcacugccugggugccgugggagaggcc

SEQ ID NO: 60768 - RNA, 31 nt, Homo Sapiens
cucugugagccccacagcccugcucauuccu

SEQ ID NO: 60769 - RNA, 32 nt, Homo Sapiens
cuccacucuccucugggcuccuccuugccuaa

SEQ ID NO: 60770 - RNA, 32 nt, Homo Sapiens
gugggaggcagggcuaugcgauagucauaaag

SEQ ID NO: 60771 - RNA, 32 nt, Homo Sapiens
aaaccgagccuggccugaggcaggcugcgcgg

SEQ ID NO: 60772 - RNA, 32 nt, Homo Sapiens
aaaaugagaaacaaguaagaaaaaauccuuuc

SEQ ID NO: 60773 - RNA, 32 nt, Homo Sapiens
acgaggucuggaguuugagaccauccuggcua

SEQ ID NO: 60774 - RNA, 32 nt, Homo Sapiens
gcucuguaugaaacagaagagcagggacauaa

SEQ ID NO: 60775 - RNA, 30 nt, Homo Sapiens
ccagacgccuggcggccgccggcacacaag

SEQ ID NO: 60776 - RNA, 32 nt, Homo Sapiens
cucugugcugcuggcggccguccccgcccacc

SEQ ID NO: 60777 - RNA, 32 nt, Homo Sapiens
cguguguacaugucugucugucugguuuuuua

SEQ ID NO: 60778 - RNA, 32 nt, Homo Sapiens
uugaggcacuguauguaaaguaaggaaugcuu

SEQ ID NO: 60779 - RNA, 32 nt, Homo Sapiens
ugcaccggccccaugagcccgcggcuccccgu

SEQ ID NO: 60780 - RNA, 32 nt, Homo Sapiens
cuuaggucucaagggcacuuuggcgcguagua

SEQ ID NO: 60781 - RNA, 32 nt, Homo Sapiens
agcgcccaggccugcuggcaucaggucugggc

SEQ ID NO: 60782 - RNA, 26 nt, Homo Sapiens
cuguaaauauauauuuuucaaaguga

SEQ ID NO: 60783 - RNA, 32 nt, Homo Sapiens
cauuucacaaaacagccuuugggaaaugcuga

SEQ ID NO: 60784 - RNA, 32 nt, Homo Sapiens
gacuguguggccugggcauucccagagaggaa

SEQ ID NO: 60785 - RNA, 32 nt, Homo Sapiens
aacagacacaauuuauacugcgacagaacuuc

SEQ ID NO: 60786 - RNA, 32 nt, Homo Sapiens
acccugaguauuuucaaauauaugauugcuga

SEQ ID NO: 60787 - RNA, 32 nt, Homo Sapiens
ugaugggaccauaaaauauuuuuacacgcagc

SEQ ID NO: 60788 - RNA, 32 nt, Homo Sapiens
ccaguuuguaaauuccaacuucauuuaaugcu

SEQ ID NO: 60789 - RNA, 32 nt, Homo Sapiens
ugccuggagccugccuucccaacaucaugccc

SEQ ID NO: 60790 - RNA, 32 nt, Homo Sapiens
ucucaugcggacccucacaugggcagaaaaau

SEQ ID NO: 60791 - RNA, 32 nt, Homo Sapiens
agcggcuggugcccgggcuaccagggacaugc

SEQ ID NO: 60792 - RNA, 32 nt, Homo Sapiens
gauccauuugccccuacccagcauuuaguuuu

SEQ ID NO: 60793 - RNA, 32 nt, Homo Sapiens
aucuuuucuaacuuaguuuuggaauuacguua

SEQ ID NO: 60794 - RNA, 32 nt, Homo Sapiens
augauagagagugaagcagaaacaggagcaca

SEQ ID NO: 60795 - RNA, 32 nt, Homo Sapiens
ugcgagcccuucccggcccuccccagggcccc

SEQ ID NO: 60796 - RNA, 32 nt, Homo Sapiens
uuaccagguucaaggguacaaacuucucaaau

SEQ ID NO: 60797 - RNA, 32 nt, Homo Sapiens
aucaugaguauuacagaggcaagcccccuugc

SEQ ID NO: 60798 - RNA, 32 nt, Homo Sapiens
aucuuggugcugcuauuccugcuggaggaaug

SEQ ID NO: 60799 - RNA, 32 nt, Homo Sapiens
agcaccccggggcccgggaggggugggcuacu

SEQ ID NO: 60800 - RNA, 32 nt, Homo Sapiens
gcuuuagugagucgcucugugcucacuauuuc

SEQ ID NO: 60801 - RNA, 32 nt, Homo Sapiens
cucaaauuuaacaaagaaucuuuagccccuuu

SEQ ID NO: 60802 - RNA, 32 nt, Homo Sapiens
gaugggcucccuccccuaaccuuggugccuga

SEQ ID NO: 60803 - RNA, 32 nt, Homo Sapiens
agccucgcucugucacccaugcuugagugcaa

SEQ ID NO: 60804 - RNA, 32 nt, Homo Sapiens
guguugucacuucucuuuccugucucuggguu

SEQ ID NO: 60805 - RNA, 32 nt, Homo Sapiens
acuuaacaagucucuuuuuuuguuuguuuaaa

SEQ ID NO: 60806 - RNA, 32 nt, Homo Sapiens
ggccacaccacaucuuccaugggacuuccccc

SEQ ID NO: 60807 - RNA, 32 nt, Homo Sapiens
gccaccagauucagaauucagaauuuuagacc

SEQ ID NO: 60808 - RNA, 32 nt, Homo Sapiens
cuuccaaggagcuucugcugcugcuccuccuc

SEQ ID NO: 60809 - RNA, 32 nt, Homo Sapiens
ccauuuaggugaugguguuugauucagagaug

SEQ ID NO: 60810 - RNA, 32 nt, Homo Sapiens
ggaacuccacucuccuucgugucucucccacc

SEQ ID NO: 60811 - RNA, 32 nt, Homo Sapiens
cucaugccugucaguaucagugcuuccaucgu

SEQ ID NO: 60812 - RNA, 32 nt, Homo Sapiens
caucaucccucauacacuaacuacuguuucuu

SEQ ID NO: 60813 - RNA, 32 nt, Homo Sapiens
agcagauugcccgggccccacccaggccacuc

SEQ ID NO: 60814 - RNA, 32 nt, Homo Sapiens
guugcuucccauuuccucuuucuagccguccu

SEQ ID NO: 60815 - RNA, 32 nt, Homo Sapiens
caaaggugcagggacuugcucacaucgagaau

SEQ ID NO: 60816 - RNA, 32 nt, Homo Sapiens
uacagaaaccuggucucccuaggugucuggaa

SEQ ID NO: 60817 - RNA, 32 nt, Homo Sapiens
ucucaccauaucuaaugauacuuuuuucauua

SEQ ID NO: 60818 - RNA, 32 nt, Homo Sapiens
uuaguuaaccucagucaugaagaaugcaaacc

SEQ ID NO: 60819 - RNA, 32 nt, Homo Sapiens
agcgauccauucucaccuuggccucccaaagu

SEQ ID NO: 60820 - RNA, 32 nt, Homo Sapiens
ccccggcuggucccuccauggcacucuggguc

SEQ ID NO: 60821 - RNA, 32 nt, Homo Sapiens
gccuguggccccagcgugcuguggccucgggg

SEQ ID NO: 60822 - RNA, 32 nt, Homo Sapiens
cgucgucgcccggcacagcgcgagcgggcgag

SEQ ID NO: 60823 - RNA, 32 nt, Homo Sapiens
gaacaaugcugcuugggaaugugugugaugcc

SEQ ID NO: 60824 - RNA, 32 nt, Homo Sapiens
gugagcagugauugcaccacugcacuccagcc

SEQ ID NO: 60825 - RNA, 32 nt, Homo Sapiens
uccuugcucuauuuccuuucucuuucucucuc

SEQ ID NO: 60826 - RNA, 32 nt, Homo Sapiens
agcuuuuuuuuuucuuuuuuuuuuuuucaauc

SEQ ID NO: 60827 - RNA, 32 nt, Homo Sapiens
ucagcugcuccuuaccuggaagaugcagggaa

SEQ ID NO: 60828 - RNA, 25 nt, Homo Sapiens
augaguggcggcggcggcggagggg

SEQ ID NO: 60829 - RNA, 32 nt, Homo Sapiens
gcaguggaguuguuaaguucuagaaacagucu

SEQ ID NO: 60830 - RNA, 32 nt, Homo Sapiens
uaccaggcagggugcugggcauugugcugcuc

SEQ ID NO: 60831 - RNA, 32 nt, Homo Sapiens
cuucuguuugcugcagccuguuugaguggcag

SEQ ID NO: 60832 - RNA, 32 nt, Homo Sapiens
aaaagaguguuuaagaauaaaaauauaucaau

SEQ ID NO: 60833 - RNA, 32 nt, Homo Sapiens
uguacaugguauauuuugaaguagaaauaaaa

SEQ ID NO: 60834 - RNA, 32 nt, Homo Sapiens
cucugaaauggcauccagguccaucuugcccu

SEQ ID NO: 60835 - RNA, 32 nt, Homo Sapiens
cccaucuucuggcauugaguccugcuuccuac

SEQ ID NO: 60836 - RNA, 32 nt, Homo Sapiens
uguaccgggucaugguaauuuuugguuguuuu

SEQ ID NO: 60837 - RNA, 31 nt, Homo Sapiens
caacuucauuugaugcuaaauaggagauacc

SEQ ID NO: 60838 - RNA, 32 nt, Homo Sapiens
auuucauccagcugcuaucagcgcaguggugg

SEQ ID NO: 60839 - RNA, 32 nt, Homo Sapiens
ucuccagagcaucuugaacaggaauauuaaga

SEQ ID NO: 60840 - RNA, 32 nt, Homo Sapiens
gcacaagaggggccagcucggcugaggccuga

SEQ ID NO: 60841 - RNA, 32 nt, Homo Sapiens
gauaggaggaggaggggacccauaggacgcgu

SEQ ID NO: 60842 - RNA, 32 nt, Homo Sapiens
accaaaguuguacuuuuuucuaguaguuauuu

SEQ ID NO: 60843 - RNA, 32 nt, Homo Sapiens
gaucuuucuuugaaaucccucugggaagaaga

SEQ ID NO: 60844 - RNA, 32 nt, Homo Sapiens
ucuguuuagaagcaccaguuccugcuaugauc

SEQ ID NO: 60845 - RNA, 32 nt, Homo Sapiens
gucuggagucaucaaaggcauuaaaaacucca

SEQ ID NO: 60846 - RNA, 32 nt, Homo Sapiens
uuucuucugucuuuuugacauguguguccagu

SEQ ID NO: 60847 - RNA, 32 nt, Homo Sapiens
auagagagaucccauggaaaagaggcuggaac

SEQ ID NO: 60848 - RNA, 32 nt, Homo Sapiens
aguguagacaccucugucugccccacuguccu

SEQ ID NO: 60849 - RNA, 32 nt, Homo Sapiens
ugacuugccuguuuuggccauuagcugccuua

SEQ ID NO: 60850 - RNA, 32 nt, Homo Sapiens
gcauuccugggucuuccuacacuugcuccgua

SEQ ID NO: 60851 - RNA, 32 nt, Homo Sapiens
aacugauaaaagacuuuaagaacuuuauauau

SEQ ID NO: 60852 - RNA, 32 nt, Homo Sapiens
cgcgcccugugcuugucuucgccuugaucgug

SEQ ID NO: 60853 - RNA, 31 nt, Homo Sapiens
gucugccauuugacuaugcaaauggccuuug

SEQ ID NO: 60854 - RNA, 32 nt, Homo Sapiens
uuuuugcugaaauacauuauggucaaucaagc

SEQ ID NO: 60855 - RNA, 32 nt, Homo Sapiens
uacuuuugauaaaaaguuuauuuugugcuuac

SEQ ID NO: 60856 - RNA, 32 nt, Homo Sapiens
ccucuggaagcagcaucaggacagcagagcag

SEQ ID NO: 60857 - RNA, 32 nt, Homo Sapiens
ggaggugacaacacaggauauuauaccaggag

SEQ ID NO: 60858 - RNA, 27 nt, Homo Sapiens
ccauuaacuuucuucagcuuuuuuaag

SEQ ID NO: 60859 - RNA, 32 nt, Homo Sapiens
cagagccuggaauugcacugaggcuugagucu

SEQ ID NO: 60860 - RNA, 32 nt, Homo Sapiens
uaaccucaggauuuaaauaaaguaaacacuau

SEQ ID NO: 60861 - RNA, 32 nt, Homo Sapiens
ccagcgucccagggcucugguucuggagggcc

SEQ ID NO: 60862 - RNA, 32 nt, Homo Sapiens
cagccacucacuuauaaagauacuuaucuuuu

SEQ ID NO: 60863 - RNA, 32 nt, Homo Sapiens
aguucuugucuaguuuucauuaaaagaacaaa

SEQ ID NO: 60864 - RNA, 32 nt, Homo Sapiens
ccggcuucccuccuccuccccugcagccuggu

SEQ ID NO: 60865 - RNA, 32 nt, Homo Sapiens
ucccagcuccucaggaggcugaggcaggagaa

SEQ ID NO: 60866 - RNA, 32 nt, Homo Sapiens
gaugcccucuucuccuugccuugcuucuccca

SEQ ID NO: 60867 - RNA, 32 nt, Homo Sapiens
aaauccaauauauaguauuaaaacagaaaaag

SEQ ID NO: 60868 - RNA, 29 nt, Homo Sapiens
ggcuaauaaaguuuuucuuucuuuaauuu

SEQ ID NO: 60869 - RNA, 32 nt, Homo Sapiens
cucuggccugcagcugaccuggcaaccauuca

SEQ ID NO: 60870 - RNA, 32 nt, Homo Sapiens
ggccggcagcggggagccgaguggaggcuaau

SEQ ID NO: 60871 - RNA, 32 nt, Homo Sapiens
ucuauaucccuacaaccuaauuguauauugag

SEQ ID NO: 60872 - RNA, 32 nt, Homo Sapiens
gugcagugcagguucuggccuuuuccuugaag

SEQ ID NO: 60873 - RNA, 32 nt, Homo Sapiens
gaggacagccugguuuucacauacacucaaac

SEQ ID NO: 60874 - RNA, 32 nt, Homo Sapiens
accugcugcagggcuguggcuggagaaaagcu

SEQ ID NO: 60875 - RNA, 32 nt, Homo Sapiens
uuuuguauuuuuuauaaagacaggguuuuucc

SEQ ID NO: 60876 - RNA, 32 nt, Homo Sapiens
agggccgggaguggaggcucaagccugaaucc

SEQ ID NO: 60877 - RNA, 32 nt, Homo Sapiens
ccuggcuuccagcccaggacucugcacuccuc

SEQ ID NO: 60878 - RNA, 32 nt, Homo Sapiens
ggcagaacccagcaaucugugcuuucuuucac

SEQ ID NO: 60879 - RNA, 32 nt, Homo Sapiens
aucaccugcagaaauguagauacaugaucccu

SEQ ID NO: 60880 - RNA, 32 nt, Homo Sapiens
cuagagugucuaggaaccaaucugaaagagaa

SEQ ID NO: 60881 - RNA, 32 nt, Homo Sapiens
ccaaacucucccuuuccccauccaaucggucc

SEQ ID NO: 60882 - RNA, 32 nt, Homo Sapiens
gaauucuuccaucuccuucuaaagccccucac

SEQ ID NO: 60883 - RNA, 32 nt, Homo Sapiens
ucagucgccucgcgccagcaguuuuuggcuuu

SEQ ID NO: 60884 - RNA, 32 nt, Homo Sapiens
aacaaucugaaucagaagauacucuuccaucc

SEQ ID NO: 60885 - RNA, 32 nt, Homo Sapiens
uugcuuggaagacucaagccugccacugcugu

SEQ ID NO: 60886 - RNA, 32 nt, Homo Sapiens
gcgggacagagcugggucccccugcuccuccu

SEQ ID NO: 60887 - RNA, 32 nt, Homo Sapiens
gcgcacggcgggagcggcgcgcgaguggucgg

SEQ ID NO: 60888 - RNA, 31 nt, Homo Sapiens
cgggaaacagucuuucuucagaauugucagg

SEQ ID NO: 60889 - RNA, 32 nt, Homo Sapiens
aaaaucgcuaucaucuuuaggcaaauuaaaau

SEQ ID NO: 60890 - RNA, 31 nt, Homo Sapiens
cccgccgcuccgguccugccccgaacugccc

SEQ ID NO: 60891 - RNA, 27 nt, Homo Sapiens
guaauuucuuucuccagcccccauucc

SEQ ID NO: 60892 - RNA, 32 nt, Homo Sapiens
acaccggccccggcuccaccgaggcccggguc

SEQ ID NO: 60893 - RNA, 32 nt, Homo Sapiens
gaaguuguguuuuuaaugauccaauuauuaau

SEQ ID NO: 60894 - RNA, 32 nt, Homo Sapiens
uggcauacaccuguagucccagcuacucagga

SEQ ID NO: 60895 - RNA, 32 nt, Homo Sapiens
gaugaaaaauacagauacaaacaaagacaaau

SEQ ID NO: 60896 - RNA, 32 nt, Homo Sapiens
ugggcgcccgccucuagcgcgguucugggaag

SEQ ID NO: 60897 - RNA, 32 nt, Homo Sapiens
acucuaaaauauauuuuucucauaccuguuuu

SEQ ID NO: 60898 - RNA, 32 nt, Homo Sapiens
cuucggcccccggccgggcggcuccgggggaa

SEQ ID NO: 60899 - RNA, 32 nt, Homo Sapiens
augaggucaggaguucgagacuagccugacca

SEQ ID NO: 60900 - RNA, 32 nt, Homo Sapiens
ugagugccccgggcgaggccggcggccgccaa

SEQ ID NO: 60901 - RNA, 32 nt, Homo Sapiens
cacagagaacagaaauauuccuacugucuuug

SEQ ID NO: 60902 - RNA, 32 nt, Homo Sapiens
cgccagcccucccucccacacugccccagcag

SEQ ID NO: 60903 - RNA, 32 nt, Homo Sapiens
ugaagccauguucucucgacccugccagcuuc

SEQ ID NO: 60904 - RNA, 32 nt, Homo Sapiens
aguaucuauuuuccucuggucauuucagacuc

SEQ ID NO: 60905 - RNA, 32 nt, Homo Sapiens
gaaggcugcggugauucaauuagauuguccca

SEQ ID NO: 60906 - RNA, 32 nt, Homo Sapiens
uccaaggcggggggacaccggcugcacccagg

SEQ ID NO: 60907 - RNA, 30 nt, Homo Sapiens
guacggcagagcccggggccggcgcuggcg

SEQ ID NO: 60908 - RNA, 32 nt, Homo Sapiens
aauaauuaaaggaaacuuacgcugaccaaaaa

SEQ ID NO: 60909 - RNA, 32 nt, Homo Sapiens
acaguguaguucauauucaugauaaaaaugaa

SEQ ID NO: 60910 - RNA, 32 nt, Homo Sapiens
agcgaggcggccucuguccggcccggacccgc

SEQ ID NO: 60911 - RNA, 32 nt, Homo Sapiens
auugccuuuauguuguuuuuuaaaagaaaaac

SEQ ID NO: 60912 - RNA, 30 nt, Homo Sapiens
gccucgggaaggcgcgcgucccgcccugac

SEQ ID NO: 60913 - RNA, 32 nt, Homo Sapiens
caggagcaagcacuaccuguucugcaggcggg

SEQ ID NO: 60914 - RNA, 32 nt, Homo Sapiens
cugggugaaaauaagucaugaaggucauuccc

SEQ ID NO: 60915 - RNA, 32 nt, Homo Sapiens
aaaauauuuaaaguuaaugaugguguagcaau

SEQ ID NO: 60916 - RNA, 32 nt, Homo Sapiens
ucaucacucugcaagagggaccagaugcuucc

SEQ ID NO: 60917 - RNA, 32 nt, Homo Sapiens
ccgacugacgguagggacgggaggcgagcaag

SEQ ID NO: 60918 - RNA, 32 nt, Homo Sapiens
gguguuuucguuucuuuuucaucuccccccca

SEQ ID NO: 60919 - RNA, 32 nt, Homo Sapiens
ucuaaccuaccuaagcacuuuaaaauacagcc

SEQ ID NO: 60920 - RNA, 32 nt, Homo Sapiens
ugcucaacugaaagagaggccuucucaucccc

SEQ ID NO: 60921 - RNA, 32 nt, Homo Sapiens
uccuugaaggacuaauagaaaaguauguucua

SEQ ID NO: 60922 - RNA, 32 nt, Homo Sapiens
auguuauacuuuuauucuuaauucugaauuuu

SEQ ID NO: 60923 - RNA, 27 nt, Homo Sapiens
guguuaauccccuucagccccuagcuc

SEQ ID NO: 60924 - RNA, 32 nt, Homo Sapiens
gggcaccaacugugugcugggcacgaagcccc

SEQ ID NO: 60925 - RNA, 32 nt, Homo Sapiens
cuggcacuuaggaagccuucaggaaaugcuau

SEQ ID NO: 60926 - RNA, 32 nt, Homo Sapiens
guuucaauauuuuccuucucucucaauuuucg

SEQ ID NO: 60927 - RNA, 32 nt, Homo Sapiens
acaaaaaucagcaauaugaagauuaaggugaa

SEQ ID NO: 60928 - RNA, 32 nt, Homo Sapiens
ggauugcugaccucgcaucuucggaccgaagu

SEQ ID NO: 60929 - RNA, 32 nt, Homo Sapiens
cuuuaaggcacgcuccuguccuccucauugcc

SEQ ID NO: 60930 - RNA, 32 nt, Homo Sapiens
cuuuucucagaagucagaccuuguuguacauc

SEQ ID NO: 60931 - RNA, 32 nt, Homo Sapiens
gugcacacuuuauccaccugguuacucacaaa

SEQ ID NO: 60932 - RNA, 32 nt, Homo Sapiens
agggccauggagguccugcugcuggucuggga

SEQ ID NO: 60933 - RNA, 32 nt, Homo Sapiens
ucuaauaaauccauucuagaaaaauauaucua

SEQ ID NO: 60934 - RNA, 32 nt, Homo Sapiens
uugccagcagugcccgcccccacccucaaagc

SEQ ID NO: 60935 - RNA, 32 nt, Homo Sapiens
gcccgaggagagagggccacggucggcggagg

SEQ ID NO: 60936 - RNA, 32 nt, Homo Sapiens
uguuuuacugaauuguagaaggacauaaccgu

SEQ ID NO: 60937 - RNA, 32 nt, Homo Sapiens
uccccgcuugcccuuauuguccugcuuuccca

SEQ ID NO: 60938 - RNA, 32 nt, Homo Sapiens
gcagggaggagcugcagggagcugguggcggg

SEQ ID NO: 60939 - RNA, 32 nt, Homo Sapiens
ucccucccgcccuucuggccaagcauggcggu

SEQ ID NO: 60940 - RNA, 30 nt, Homo Sapiens
acggagcgucguucugucgcccuggcugga

SEQ ID NO: 60941 - RNA, 32 nt, Homo Sapiens
caguguaucucuucucccccagccccuauugg

SEQ ID NO: 60942 - RNA, 32 nt, Homo Sapiens
ucaauauguauauauguauuucuauauagacu

SEQ ID NO: 60943 - RNA, 32 nt, Homo Sapiens
cuccugccucaagugaucugcccgccacagca

SEQ ID NO: 60944 - RNA, 32 nt, Homo Sapiens
uguacuuguucuuuucugguagguucugucug

SEQ ID NO: 60945 - RNA, 32 nt, Homo Sapiens
cauuuuuggcuucaggaggagaaggcgcaugg

SEQ ID NO: 60946 - RNA, 32 nt, Homo Sapiens
gaguaaacuauaucacuugaauaaacaaaaug

SEQ ID NO: 60947 - RNA, 32 nt, Homo Sapiens
guccuccaggacucugaaucaccugggaggag

SEQ ID NO: 60948 - RNA, 32 nt, Homo Sapiens
cuacggccauucuccucuugggcgcuccucag

SEQ ID NO: 60949 - RNA, 32 nt, Homo Sapiens
acucaagugucuauucuuugcagucuuucugg

SEQ ID NO: 60950 - RNA, 32 nt, Homo Sapiens
ccagggugccaugccugacagcacgcaucucc

SEQ ID NO: 60951 - RNA, 32 nt, Homo Sapiens
ugaaacucccaccgagaccccugggcaauagc

SEQ ID NO: 60952 - RNA, 32 nt, Homo Sapiens
ccaccagccugccugguugauggacagcaggc

SEQ ID NO: 60953 - RNA, 32 nt, Homo Sapiens
ucaaguauuucugaauauauuccccuauccac

SEQ ID NO: 60954 - RNA, 32 nt, Homo Sapiens
gggaucuucugcauuuaaaauagaagaggcau

SEQ ID NO: 60955 - RNA, 32 nt, Homo Sapiens
guaauagucaaagacagauguucugaucaaau

SEQ ID NO: 60956 - RNA, 32 nt, Homo Sapiens
uuacauguuacaauuagaauaauuacaauuaa

SEQ ID NO: 60957 - RNA, 32 nt, Homo Sapiens
cuaaugaaguuccagagaugggccuuagaaau

SEQ ID NO: 60958 - RNA, 32 nt, Homo Sapiens
guuguuggacaugaaauugugguggguuauau

SEQ ID NO: 60959 - RNA, 32 nt, Homo Sapiens
cauugcacaucuuacauccacaguaugaguca

SEQ ID NO: 60960 - RNA, 32 nt, Homo Sapiens
uuuaauacuguacaauuucugaagaugguuau

SEQ ID NO: 60961 - RNA, 32 nt, Homo Sapiens
guggaggaugaaagcacacagaugaauugugu

SEQ ID NO: 60962 - RNA, 32 nt, Homo Sapiens
uagccccggccgcacccccagcccgcgccagc

SEQ ID NO: 60963 - RNA, 32 nt, Homo Sapiens
gguccagguguuggcugugaguuuuccuuucc

SEQ ID NO: 60964 - RNA, 32 nt, Homo Sapiens
aaaugcaaugacuggcugggugcaguggcuca

SEQ ID NO: 60965 - RNA, 32 nt, Homo Sapiens
aaggaaaaauuugaagaggagaggcugaggga

SEQ ID NO: 60966 - RNA, 32 nt, Homo Sapiens
uucucugagcccacccagcccucugaaccagc

SEQ ID NO: 60967 - RNA, 32 nt, Homo Sapiens
ccagccccugccucgcagacagauggugagga

SEQ ID NO: 60968 - RNA, 32 nt, Homo Sapiens
aaaaagacuaaaccucuaauuucaugcaaauc

SEQ ID NO: 60969 - RNA, 31 nt, Homo Sapiens
cguuccagccgcggccgaccauagagaugcg

SEQ ID NO: 60970 - RNA, 32 nt, Homo Sapiens
uuuccuuguggcuucuugucugucugagucaa

SEQ ID NO: 60971 - RNA, 32 nt, Homo Sapiens
ugccaguuaacuucuuuuuuuuuuuuuuuuuc

SEQ ID NO: 60972 - RNA, 32 nt, Homo Sapiens
ggccugugccccagcucuccccgagggcucug

SEQ ID NO: 60973 - RNA, 32 nt, Homo Sapiens
uucaaacccaagugagugugugcacuucugcu

SEQ ID NO: 60974 - RNA, 32 nt, Homo Sapiens
gcagcaaaggcaguuccuaaugagauggagaa

SEQ ID NO: 60975 - RNA, 32 nt, Homo Sapiens
uuuaugaagaggaaaagagcugaacaaaaggu

SEQ ID NO: 60976 - RNA, 32 nt, Homo Sapiens
cacuggacccucggcucuuccuuggacuucuu

SEQ ID NO: 60977 - RNA, 32 nt, Homo Sapiens
uuaagaauauauaaaauccuacuuuggccaag

SEQ ID NO: 60978 - RNA, 32 nt, Homo Sapiens
ugauagcgauacugaggcagcgcccaggacaa

SEQ ID NO: 60979 - RNA, 32 nt, Homo Sapiens
cacuucuuguuggagagcuagcggaguuacgg

SEQ ID NO: 60980 - RNA, 32 nt, Homo Sapiens
ggaggcaggcuggguguuccuuuuuucuuuuc

SEQ ID NO: 60981 - RNA, 32 nt, Homo Sapiens
agagcccccuccccagcccucaggcccucccu

SEQ ID NO: 60982 - RNA, 32 nt, Homo Sapiens
gauuucagcugagcuuaaaggaugugagaaua

SEQ ID NO: 60983 - RNA, 32 nt, Homo Sapiens
uggggcaggcuugggugagcucucccagaugu

SEQ ID NO: 60984 - RNA, 32 nt, Homo Sapiens
ggaccuggggagaggguggguggagcuuggcc

SEQ ID NO: 60985 - RNA, 32 nt, Homo Sapiens
cauuauucacuaguaugacuaguugugucugg

SEQ ID NO: 60986 - RNA, 32 nt, Homo Sapiens
cauuuucguacauuuuaagcaaacuagguuaa

SEQ ID NO: 60987 - RNA, 32 nt, Homo Sapiens
gcagcacaagaaaccaguuucuucaucugaaa

SEQ ID NO: 60988 - RNA, 32 nt, Homo Sapiens
ggggacccaagccccagccugguccaccucgg

SEQ ID NO: 60989 - RNA, 32 nt, Homo Sapiens
ggugauuggaucacgagaucuguccgugugaa

SEQ ID NO: 60990 - RNA, 32 nt, Homo Sapiens
uuguaauugcuuugggauaccacaaauucugc

SEQ ID NO: 60991 - RNA, 32 nt, Homo Sapiens
ugaaggcuauggguccugucuucagugaaaca

SEQ ID NO: 60992 - RNA, 32 nt, Homo Sapiens
gcucugugacagagccuggagacuuggaggug

SEQ ID NO: 60993 - RNA, 32 nt, Homo Sapiens
ccagacugcaccuuuauuagagucuuugcccu

SEQ ID NO: 60994 - RNA, 32 nt, Homo Sapiens
ggccgauuccucccuuuagucauucauucauu

SEQ ID NO: 60995 - RNA, 32 nt, Homo Sapiens
uagcacacagcacuugagccagcaaauccugg

SEQ ID NO: 60996 - RNA, 32 nt, Homo Sapiens
cugcgcgcgcgaggugggccccugucuuccag

SEQ ID NO: 60997 - RNA, 32 nt, Homo Sapiens
ugaggccaugugccauucucccgggcccagcg

SEQ ID NO: 60998 - RNA, 32 nt, Homo Sapiens
gccacccgcgccgcgcccagcauuccagcguc

SEQ ID NO: 60999 - RNA, 32 nt, Homo Sapiens
cagauaaaacaauucacguuuaauauguaaau

SEQ ID NO: 61000 - RNA, 32 nt, Homo Sapiens
caggacccagagucugcccuucugcccagaau

SEQ ID NO: 61001 - RNA, 32 nt, Homo Sapiens
guucugacuuucuuuuuccagcccuuagcuug

SEQ ID NO: 61002 - RNA, 32 nt, Homo Sapiens
ggguuaaggugauuguguguuuuacacauugc

SEQ ID NO: 61003 - RNA, 32 nt, Homo Sapiens
gugccgucucuccuucccguuuccuuucaauu

SEQ ID NO: 61004 - RNA, 31 nt, Homo Sapiens
acaccgcagcgcagccuccgggacuccgaug

SEQ ID NO: 61005 - RNA, 29 nt, Homo Sapiens
aguuaauaaaguuguuauuuuuauaacca

SEQ ID NO: 61006 - RNA, 32 nt, Homo Sapiens
aaugaauguuccuggggcgcccucucguggau

SEQ ID NO: 61007 - RNA, 32 nt, Homo Sapiens
uguguauuucauacacacacaaggaccuggau

SEQ ID NO: 61008 - RNA, 32 nt, Homo Sapiens
ggccgcagugguccacgucauccagccccacc

SEQ ID NO: 61009 - RNA, 32 nt, Homo Sapiens
cuauuaggccucuggucugaggcagauuuuuu

SEQ ID NO: 61010 - RNA, 32 nt, Homo Sapiens
aggcaccucacagaaaugagaucaggcucugc

SEQ ID NO: 61011 - RNA, 32 nt, Homo Sapiens
aaauauauauauauuuaccuuuuuuaaagaca

SEQ ID NO: 61012 - RNA, 25 nt, Homo Sapiens
aucaacucaauacagcauucauuug

SEQ ID NO: 61013 - RNA, 32 nt, Homo Sapiens
caacuuuaggaggagggaaagggguggcucug

SEQ ID NO: 61014 - RNA, 32 nt, Homo Sapiens
aguauuaauguuuuugcauacuuugcaucuuu

SEQ ID NO: 61015 - RNA, 32 nt, Homo Sapiens
uuggggagaagcugcaggugccuucuuaccag

SEQ ID NO: 61016 - RNA, 32 nt, Homo Sapiens
gucuugagaaagugacugaacaucucgcugug

SEQ ID NO: 61017 - RNA, 32 nt, Homo Sapiens
uaugaaagcucuuaaauagggauuguuucuaa

SEQ ID NO: 61018 - RNA, 32 nt, Homo Sapiens
ccuucccucugucucaucuccuccacuuggau

SEQ ID NO: 61019 - RNA, 32 nt, Homo Sapiens
uccaccccucuccacaccccuuccagcccagg

SEQ ID NO: 61020 - RNA, 32 nt, Homo Sapiens
uucugcguaugggacaggacccuuucuggaau

SEQ ID NO: 61021 - RNA, 32 nt, Homo Sapiens
gcaaacaugagcaaaccacuuugacugaaagc

SEQ ID NO: 61022 - RNA, 32 nt, Homo Sapiens
ucuggaaauaaaugucuguuuauuuuuguacu

SEQ ID NO: 61023 - RNA, 32 nt, Homo Sapiens
caccccccaagccaggaccccacuccuucccc

SEQ ID NO: 61024 - RNA, 32 nt, Homo Sapiens
uucucccagagccccaggugcugccccuucuc

SEQ ID NO: 61025 - RNA, 32 nt, Homo Sapiens
aggauuugaaggcacaaugcaggggcucagau

SEQ ID NO: 61026 - RNA, 32 nt, Homo Sapiens
ccuggaaaaugguaaugcugcacaaaguuacc

SEQ ID NO: 61027 - RNA, 31 nt, Homo Sapiens
gcaaauauggcgccggagcggcugcggagcc

SEQ ID NO: 61028 - RNA, 32 nt, Homo Sapiens
gggcagaggguggcagcgagggcagggcagcc

SEQ ID NO: 61029 - RNA, 32 nt, Homo Sapiens
gcugacacagaaaaaggauguuuugauaggaa

SEQ ID NO: 61030 - RNA, 32 nt, Homo Sapiens
acucuggccugcagucgccgccgccgccgcca

SEQ ID NO: 61031 - RNA, 32 nt, Homo Sapiens
aagcuuuucugugaagacaagucuucacaucu

SEQ ID NO: 61032 - RNA, 32 nt, Homo Sapiens
aaaaaauuugaaaggaagauaugacuaaugag

SEQ ID NO: 61033 - RNA, 32 nt, Homo Sapiens
gugaggaggggaggggcuguggacuucggacu

SEQ ID NO: 61034 - RNA, 32 nt, Homo Sapiens
caguuugguaugaaacaaauauacucauuugg

SEQ ID NO: 61035 - RNA, 32 nt, Homo Sapiens
caggugagggagggcuggggcuggcaccacgc

SEQ ID NO: 61036 - RNA, 32 nt, Homo Sapiens
ccguugacauaggaauuuuacgauucccaaac

SEQ ID NO: 61037 - RNA, 32 nt, Homo Sapiens
uuuuaccuuacugauuucauggagcuuuugaa

SEQ ID NO: 61038 - RNA, 32 nt, Homo Sapiens
cgccgucgguccccgagccggauuccgcgagc

SEQ ID NO: 61039 - RNA, 32 nt, Homo Sapiens
ugaccauggaauuauacuuguuuaucuuguug

SEQ ID NO: 61040 - RNA, 32 nt, Homo Sapiens
gggucccgcgcgcccucucccuacccgcugua

SEQ ID NO: 61041 - RNA, 32 nt, Homo Sapiens
agguggugggguucugagacacuugggggaau

SEQ ID NO: 61042 - RNA, 32 nt, Homo Sapiens
guuugucucuggugggcuuucagcuccacucc

SEQ ID NO: 61043 - RNA, 32 nt, Homo Sapiens
cagcaagaaaccgagagcugagcuggccaagg

SEQ ID NO: 61044 - RNA, 32 nt, Homo Sapiens
ucuaauuccagguguuuguaauuucugcacuu

SEQ ID NO: 61045 - RNA, 32 nt, Homo Sapiens
ggucucaaacuccugaccucaggcgauccauc

SEQ ID NO: 61046 - RNA, 32 nt, Homo Sapiens
uuuggaaguaaaggcaaacauaaauauuacca

SEQ ID NO: 61047 - RNA, 32 nt, Homo Sapiens
gaaucugucccccaccuccccccgccuccuuc

SEQ ID NO: 61048 - RNA, 32 nt, Homo Sapiens
ccaacccugugcucucugaaacaugugcugua

SEQ ID NO: 61049 - RNA, 32 nt, Homo Sapiens
augaauuuaaacuuaagcaagcaagcguguau

SEQ ID NO: 61050 - RNA, 32 nt, Homo Sapiens
gggcuccuggguuggagggaaccaccagcguu

SEQ ID NO: 61051 - RNA, 32 nt, Homo Sapiens
aauaacaguuuuauaugcacauugaaauggaa

SEQ ID NO: 61052 - RNA, 32 nt, Homo Sapiens
ugccaguuaucccagcacuuugggaggccgag

SEQ ID NO: 61053 - RNA, 32 nt, Homo Sapiens
aaucuugcuuagagacacguccagucauagua

SEQ ID NO: 61054 - RNA, 32 nt, Homo Sapiens
uccagagcagagccuacagaagggcagugacu

SEQ ID NO: 61055 - RNA, 32 nt, Homo Sapiens
aaauaauguauuaugguugggaagucaguaga

SEQ ID NO: 61056 - RNA, 32 nt, Homo Sapiens
agccucccccugugccagcagcaccacucccu

SEQ ID NO: 61057 - RNA, 32 nt, Homo Sapiens
uuccacucugguuuccuuugggguucccauua

SEQ ID NO: 61058 - RNA, 32 nt, Homo Sapiens
gccucagucugcucauccguaaaguggggaua

SEQ ID NO: 61059 - RNA, 31 nt, Homo Sapiens
cccacagggcuccccaaccaggccccucacg

SEQ ID NO: 61060 - RNA, 32 nt, Homo Sapiens
gccgcccggccgagcgcggagcgcagccacuc

SEQ ID NO: 61061 - RNA, 32 nt, Homo Sapiens
gauacuucaugcccauuaugucuuagaggugc

SEQ ID NO: 61062 - RNA, 32 nt, Homo Sapiens
auccuccccguggcugcccucuguguccugga

SEQ ID NO: 61063 - RNA, 32 nt, Homo Sapiens
gcccuuggggacggcccggugccuggcugcaa

SEQ ID NO: 61064 - RNA, 32 nt, Homo Sapiens
ugcagguccccucccucuccgccgggacgcgg

SEQ ID NO: 61065 - RNA, 32 nt, Homo Sapiens
gggaggcaaccucgaggccugggccuacgagc

SEQ ID NO: 61066 - RNA, 32 nt, Homo Sapiens
gcuuccucguugcccccgccgcgggcgcgaga

SEQ ID NO: 61067 - RNA, 32 nt, Homo Sapiens
ucacgaaugaggaaacagguccacagaggugu

SEQ ID NO: 61068 - RNA, 32 nt, Homo Sapiens
cucuaguacugugaauccagugaaaauaagcc

SEQ ID NO: 61069 - RNA, 32 nt, Homo Sapiens
acuuagaagaugucccauauguuuaugucuuu

SEQ ID NO: 61070 - RNA, 32 nt, Homo Sapiens
cccgacgcucugggcgcgcccggaaccccagg

SEQ ID NO: 61071 - RNA, 32 nt, Homo Sapiens
aaguuuuuucauuguguagaaauacuuagaug

SEQ ID NO: 61072 - RNA, 32 nt, Homo Sapiens
cauucucaguaucucauuaacucauugaaaga

SEQ ID NO: 61073 - RNA, 32 nt, Homo Sapiens
auuggagaaaaauuauaauuuucuugaugccc

SEQ ID NO: 61074 - RNA, 32 nt, Homo Sapiens
gggaggccaaggcgagcggaucaugaggucag

SEQ ID NO: 61075 - RNA, 32 nt, Homo Sapiens
cauaucugaaagauuauaaauauacuuuauau

SEQ ID NO: 61076 - RNA, 32 nt, Homo Sapiens
cagccacaccaauuccuaaauuguagguaugc

SEQ ID NO: 61077 - RNA, 32 nt, Homo Sapiens
gagcccugcucuucucuccccagcccccuccc

SEQ ID NO: 61078 - RNA, 32 nt, Homo Sapiens
uuaaauggagggcauuuuguauuguuuuucau

SEQ ID NO: 61079 - RNA, 32 nt, Homo Sapiens
uacggcuuugguggcuggccucaccccggcuu

SEQ ID NO: 61080 - RNA, 32 nt, Homo Sapiens
acaguugucucagggguacaaacuuugaaaac

SEQ ID NO: 61081 - RNA, 32 nt, Homo Sapiens
gagcgggagggaggaguacagacauggaauuu

SEQ ID NO: 61082 - RNA, 32 nt, Homo Sapiens
gagggcccugcgccugcgcggagcuggagucc

SEQ ID NO: 61083 - RNA, 32 nt, Homo Sapiens
uuuaagacaaaacaugacugaaagagcaccug

SEQ ID NO: 61084 - RNA, 32 nt, Homo Sapiens
agaucgcgccacugcacagccagggcgacggu

SEQ ID NO: 61085 - RNA, 32 nt, Homo Sapiens
uuacaggugugagccaccacgcccagccuuuu

SEQ ID NO: 61086 - RNA, 32 nt, Homo Sapiens
gaccguugcugaugucuuuuucugccuccccu

SEQ ID NO: 61087 - RNA, 32 nt, Homo Sapiens
acaggcugccccaccccuccaugauuccaagg

SEQ ID NO: 61088 - RNA, 32 nt, Homo Sapiens
aauuggaauauuaagccauggaaucuuagagu

SEQ ID NO: 61089 - RNA, 32 nt, Homo Sapiens
ugauuccaagaaugccaucugauaaaaaagaa

SEQ ID NO: 61090 - RNA, 32 nt, Homo Sapiens
aagaagccagcuuuuggggaaggcagguccug

SEQ ID NO: 61091 - RNA, 32 nt, Homo Sapiens
gcgauggacaaaggcaggcugcccggcuggcc

SEQ ID NO: 61092 - RNA, 30 nt, Homo Sapiens
uugggagccaccccuucauuuuuuaaaaaa

SEQ ID NO: 61093 - RNA, 32 nt, Homo Sapiens
cuuuccuuuuuuucuuuuuuuuucuuuuuuuu

SEQ ID NO: 61094 - RNA, 32 nt, Homo Sapiens
ggacugaagguaauucacuccuagaucgcagu

SEQ ID NO: 61095 - RNA, 32 nt, Homo Sapiens
uaaacacaagcugaauaaauuuauaaauauca

SEQ ID NO: 61096 - RNA, 32 nt, Homo Sapiens
ccgccaaaaguaugggcugugcgucaucuucc

SEQ ID NO: 61097 - RNA, 32 nt, Homo Sapiens
aauauuucuuuuugugaaauuuccuguacagc

SEQ ID NO: 61098 - RNA, 32 nt, Homo Sapiens
cuaaccguaacagagagccuacaggauacacg

SEQ ID NO: 61099 - RNA, 32 nt, Homo Sapiens
aauuccccugcucuccuuccuacccuuugguc

SEQ ID NO: 61100 - RNA, 31 nt, Homo Sapiens
cuuuguggaccccagaaaccccuaggcaacu

SEQ ID NO: 61101 - RNA, 32 nt, Homo Sapiens
cuguggcggugacugcuucuggaccagaacag

SEQ ID NO: 61102 - RNA, 32 nt, Homo Sapiens
cuaagcuucuauuuucacaggacugaucgaug

SEQ ID NO: 61103 - RNA, 32 nt, Homo Sapiens
caccuguaaucccagcacuuugggaggcccag

SEQ ID NO: 61104 - RNA, 32 nt, Homo Sapiens
uggcugcucccucuguuucccaugucaguccu

SEQ ID NO: 61105 - RNA, 32 nt, Homo Sapiens
guuuuauacuuuuuuaugaguuaugauagcag

SEQ ID NO: 61106 - RNA, 32 nt, Homo Sapiens
acaaaggagggagaggucaggugcuagaaagu

SEQ ID NO: 61107 - RNA, 32 nt, Homo Sapiens
auggguucauguuuaaacugacucugagcaag

SEQ ID NO: 61108 - RNA, 32 nt, Homo Sapiens
guaaaaugaagauucgggacuggcucauaucu

SEQ ID NO: 61109 - RNA, 32 nt, Homo Sapiens
ccaggcuagggcgggggcgagcgcccaguuga

SEQ ID NO: 61110 - RNA, 32 nt, Homo Sapiens
uuggagggcagacacuagcaggagaaaggcca

SEQ ID NO: 61111 - RNA, 32 nt, Homo Sapiens
aguaacaagaaauaccgugcccugagguugga

SEQ ID NO: 61112 - RNA, 32 nt, Homo Sapiens
cugcuguaccacggaaauugugccgcuucaga

SEQ ID NO: 61113 - RNA, 32 nt, Homo Sapiens
gccaauacugacucaaaccaaccuuuggauag

SEQ ID NO: 61114 - RNA, 32 nt, Homo Sapiens
auuuacucaguuagcagccccuccucaccauu

SEQ ID NO: 61115 - RNA, 32 nt, Homo Sapiens
gaaagcuuagcuggugguacaaaccagcccaa

SEQ ID NO: 61116 - RNA, 32 nt, Homo Sapiens
caccccagugucaucagucaggcaggagccaa

SEQ ID NO: 61117 - RNA, 32 nt, Homo Sapiens
acaaugaucugcuuaugcugaaugaauaucuu

SEQ ID NO: 61118 - RNA, 32 nt, Homo Sapiens
gguuuuuguaacaauaaauguaggauauuucc

SEQ ID NO: 61119 - RNA, 32 nt, Homo Sapiens
aaaacacagugaaaggccugcuuuuguguccc

SEQ ID NO: 61120 - RNA, 32 nt, Homo Sapiens
gagcgaguggaugcacuucccagcucaucucu

SEQ ID NO: 61121 - RNA, 32 nt, Homo Sapiens
auagggcaggcccugcccucugggaagguccc

SEQ ID NO: 61122 - RNA, 32 nt, Homo Sapiens
acauagccgaccuuuaaugacuucugagagga

SEQ ID NO: 61123 - RNA, 32 nt, Homo Sapiens
cucucagagucucccccucugcagcccauccu

SEQ ID NO: 61124 - RNA, 32 nt, Homo Sapiens
uacuagcaucccaauuuagaaaacagaggagu

SEQ ID NO: 61125 - RNA, 32 nt, Homo Sapiens
aaugagacaaguagccuugguuagucuuagag

SEQ ID NO: 61126 - RNA, 32 nt, Homo Sapiens
uucuaaaagaaaaagcuaaaaaauaugguuaa

SEQ ID NO: 61127 - RNA, 32 nt, Homo Sapiens
aaaugauuugcuugaaugauggccguuucuga

SEQ ID NO: 61128 - RNA, 32 nt, Homo Sapiens
ccuccucuuccuucuuuuucuugcuuuuuuca

SEQ ID NO: 61129 - RNA, 32 nt, Homo Sapiens
uuauuuuugugaguuggcuacuauuuacgaug

SEQ ID NO: 61130 - RNA, 32 nt, Homo Sapiens
uuucuguauuucaucacccucugugaauaagc

SEQ ID NO: 61131 - RNA, 32 nt, Homo Sapiens
uggacaguucccucuggacuauacuagauaug

SEQ ID NO: 61132 - RNA, 32 nt, Homo Sapiens
acaggacaccccccaccccaccccaccauguc

SEQ ID NO: 61133 - RNA, 32 nt, Homo Sapiens
ccugcuucuuccuacagccguuccgggcaugg

SEQ ID NO: 61134 - RNA, 32 nt, Homo Sapiens
ucuccucccuccccauagcugcuugaguuaac

SEQ ID NO: 61135 - RNA, 32 nt, Homo Sapiens
gagaaaguuaagucuguguucugcuuaggaga

SEQ ID NO: 61136 - RNA, 32 nt, Homo Sapiens
caggugccuuggcgaagauccuggacugcguc

SEQ ID NO: 61137 - RNA, 32 nt, Homo Sapiens
augaaugugggaagggcuuugguggauguucc

SEQ ID NO: 61138 - RNA, 32 nt, Homo Sapiens
ccauggggugacucaugaccccuccagccagg

SEQ ID NO: 61139 - RNA, 32 nt, Homo Sapiens
aacauguaguguacgugcuauugaguugugaa

SEQ ID NO: 61140 - RNA, 32 nt, Homo Sapiens
gaucacuugagcccaggaguuuuagacuagcc

SEQ ID NO: 61141 - RNA, 32 nt, Homo Sapiens
gcugaacuuucccuuuuccccaguucuuacga

SEQ ID NO: 61142 - RNA, 32 nt, Homo Sapiens
gugucuguggcgagcaggauggucgcuguuac

SEQ ID NO: 61143 - RNA, 32 nt, Homo Sapiens
acuggaauccuucauggacgagggcauauaca

SEQ ID NO: 61144 - RNA, 32 nt, Homo Sapiens
cauugccugcaccccaagggccccauauuugc

SEQ ID NO: 61145 - RNA, 32 nt, Homo Sapiens
auuuucuguucuggguuauugggauaagaaaa

SEQ ID NO: 61146 - RNA, 32 nt, Homo Sapiens
aggagagggaggauccuggaggacugggaaga

SEQ ID NO: 61147 - RNA, 32 nt, Homo Sapiens
ucccgccagguggacgugagcguagagcugcu

SEQ ID NO: 61148 - RNA, 32 nt, Homo Sapiens
ccccucugccagguggagguguguccaggggc

SEQ ID NO: 61149 - RNA, 32 nt, Homo Sapiens
caucccgguucccccagacaagagagggcaag

SEQ ID NO: 61150 - RNA, 32 nt, Homo Sapiens
auaaagagcauucuuaaaaugguuggcuucuu

SEQ ID NO: 61151 - RNA, 30 nt, Homo Sapiens
ccauuugucuguguggcaggcuggcuggcu

SEQ ID NO: 61152 - RNA, 29 nt, Homo Sapiens
uugccuggaggauggcggacgccggcauu

SEQ ID NO: 61153 - RNA, 32 nt, Homo Sapiens
uuguuuaaauauaaacagaaguguaccuuuua

SEQ ID NO: 61154 - RNA, 32 nt, Homo Sapiens
gcaggaauacucauaaagagacugagccugug

SEQ ID NO: 61155 - RNA, 32 nt, Homo Sapiens
caugcccagcgcgcccggagucaggaggccgc

SEQ ID NO: 61156 - RNA, 32 nt, Homo Sapiens
cuuuucauuuccccagcgcagcuuucuguaga

SEQ ID NO: 61157 - RNA, 32 nt, Homo Sapiens
uguguagaugauguugcuuguuugucaaaaua

SEQ ID NO: 61158 - RNA, 32 nt, Homo Sapiens
auauaaaauauguacauaauauuggaugacua

SEQ ID NO: 61159 - RNA, 32 nt, Homo Sapiens
agggcuaguuuggcuuccucucuucuuauuug

SEQ ID NO: 61160 - RNA, 32 nt, Homo Sapiens
cuuuagacuuucugccgggagagcggcccaga

SEQ ID NO: 61161 - RNA, 32 nt, Homo Sapiens
cucagcgaacccuugcugggaaccgcugagcu

SEQ ID NO: 61162 - RNA, 32 nt, Homo Sapiens
ugccuuacccugcuuauuccugucucuugcac

SEQ ID NO: 61163 - RNA, 32 nt, Homo Sapiens
cugagggcacgcugacgccucuccccaggggg

SEQ ID NO: 61164 - RNA, 32 nt, Homo Sapiens
agcuccagcccggcccggcagcgacauggaag

SEQ ID NO: 61165 - RNA, 32 nt, Homo Sapiens
ucagucauuuaguuauguauuaauuuuaaaag

SEQ ID NO: 61166 - RNA, 32 nt, Homo Sapiens
ugugugucuguguccucaucucuucuuaugag

SEQ ID NO: 61167 - RNA, 32 nt, Homo Sapiens
gaagcggccuccgggggacgccgcuaggcgag

SEQ ID NO: 61168 - RNA, 32 nt, Homo Sapiens
uuccaagauggcggcggggcggggccggggca

SEQ ID NO: 61169 - RNA, 32 nt, Homo Sapiens
caguacuuuuggcaacacuuugaaagcagccc

SEQ ID NO: 61170 - RNA, 32 nt, Homo Sapiens
cuucaggaaaauuuaguugggaggagucaggc

SEQ ID NO: 61171 - RNA, 31 nt, Homo Sapiens
gaagguucaauacauauucuucuaauucagg

SEQ ID NO: 61172 - RNA, 32 nt, Homo Sapiens
uggccagccccaagggcuucccggugacuucu

SEQ ID NO: 61173 - RNA, 32 nt, Homo Sapiens
gcucuggacugcagccucccaaggcuccaugc

SEQ ID NO: 61174 - RNA, 32 nt, Homo Sapiens
cagcccaugccagcuccuggguccugggccac

SEQ ID NO: 61175 - RNA, 32 nt, Homo Sapiens
cgcuggccucgcgcugggcggcugggaauucc

SEQ ID NO: 61176 - RNA, 32 nt, Homo Sapiens
ggagcgcgcgugauagaagaaaagcacuggga

SEQ ID NO: 61177 - RNA, 32 nt, Homo Sapiens
auugggaauggcugcuuucucuaaccauuuuc

SEQ ID NO: 61178 - RNA, 32 nt, Homo Sapiens
aaaacaaaaccaaaaugaacugagggguuugu

SEQ ID NO: 61179 - RNA, 32 nt, Homo Sapiens
uuacagucaaguuuguagauuuucauaagcca

SEQ ID NO: 61180 - RNA, 32 nt, Homo Sapiens
gcccccagcccuccccacccagguuuucggcc

SEQ ID NO: 61181 - RNA, 32 nt, Homo Sapiens
gucuccaucgagauccuccccgucgcuguggc

SEQ ID NO: 61182 - RNA, 32 nt, Homo Sapiens
ucuuggcagagguccgcggggaggagacggcu

SEQ ID NO: 61183 - RNA, 32 nt, Homo Sapiens
aaccugaauauuuggcucacacucacggacaa

SEQ ID NO: 61184 - RNA, 32 nt, Homo Sapiens
gcagauucaaccaugggagccaacacuucaag

SEQ ID NO: 61185 - RNA, 32 nt, Homo Sapiens
ggcgggggugggggcgggggguugguacagaa

SEQ ID NO: 61186 - RNA, 32 nt, Homo Sapiens
ccuguccaaacucagcucagccgugggccaau

SEQ ID NO: 61187 - RNA, 32 nt, Homo Sapiens
ccugugacgaccagcucagaucuccuuugcuu

SEQ ID NO: 61188 - RNA, 32 nt, Homo Sapiens
uuggggccaaccccaggaccuuuggcucuguc

SEQ ID NO: 61189 - RNA, 32 nt, Homo Sapiens
uguuuuuuauauguagagaggggcagaaacau

SEQ ID NO: 61190 - RNA, 32 nt, Homo Sapiens
aaacuuugauaaaaccacuuuauuuaaccaca

SEQ ID NO: 61191 - RNA, 32 nt, Homo Sapiens
cagguccaggacucagcuuucugcuucagccu

SEQ ID NO: 61192 - RNA, 32 nt, Homo Sapiens
augaucacuucauacuucuaaaucagaaauag

SEQ ID NO: 61193 - RNA, 32 nt, Homo Sapiens
aaaccagcugauauauucaguacucuggggga

SEQ ID NO: 61194 - RNA, 32 nt, Homo Sapiens
ccgguacaagguggguugacacaguggucuua

SEQ ID NO: 61195 - RNA, 32 nt, Homo Sapiens
uugcucugccccugggguggaggccagaggag

SEQ ID NO: 61196 - RNA, 32 nt, Homo Sapiens
uauuuugcucuggaugagucugggacacgcug

SEQ ID NO: 61197 - RNA, 32 nt, Homo Sapiens
ccuggcagggugggugccugcugcugauaaca

SEQ ID NO: 61198 - RNA, 32 nt, Homo Sapiens
cgagcgaugugacaccaaauccauguguccac

SEQ ID NO: 61199 - RNA, 32 nt, Homo Sapiens
guuuucuuucucaucacccacuccaaacaccu

SEQ ID NO: 61200 - RNA, 32 nt, Homo Sapiens
gaacccgggagucgagaucgcgccacugcacu

SEQ ID NO: 61201 - RNA, 32 nt, Homo Sapiens
uucagaauuggguuuauugcgagcaggaggag

SEQ ID NO: 61202 - RNA, 32 nt, Homo Sapiens
ccaggcccugugcaaguguccucccccuuagg

SEQ ID NO: 61203 - RNA, 32 nt, Homo Sapiens
uaugcacagauaucuacuuuauacaaauacuu

SEQ ID NO: 61204 - RNA, 32 nt, Homo Sapiens
gcuucacauuauuuugcagcucugauguuuaa

SEQ ID NO: 61205 - RNA, 32 nt, Homo Sapiens
acuacugcacuccagccugggcgacaagagug

SEQ ID NO: 61206 - RNA, 32 nt, Homo Sapiens
ccugggucucuccgccagcagugccaggagcc

SEQ ID NO: 61207 - RNA, 32 nt, Homo Sapiens
gugagacuagaagacgcccaaacaagucagau

SEQ ID NO: 61208 - RNA, 31 nt, Homo Sapiens
aacaccuguugagccaggagacagaagcugu

SEQ ID NO: 61209 - RNA, 32 nt, Homo Sapiens
agagccgcgcgcccgcgcagcaguuccaggaa

SEQ ID NO: 61210 - RNA, 32 nt, Homo Sapiens
cuccuggaucugaguucucuacuccaauucuc

SEQ ID NO: 61211 - RNA, 32 nt, Homo Sapiens
gaaagagacauucacuuggagggcucuugcug

SEQ ID NO: 61212 - RNA, 32 nt, Homo Sapiens
ccaucuuucuaaaaaguaaucauuuuuuguca

SEQ ID NO: 61213 - RNA, 32 nt, Homo Sapiens
cucggcaguguaugaaagaaaaaacugggaaa

SEQ ID NO: 61214 - RNA, 32 nt, Homo Sapiens
aauuugaauuguaaaccuguuaucucugugaa

SEQ ID NO: 61215 - RNA, 28 nt, Homo Sapiens
uuuuggggucuuaggguacagcccaggc

SEQ ID NO: 61216 - RNA, 32 nt, Homo Sapiens
cucaacauuuuucuagaccaaaauuaccuuug

SEQ ID NO: 61217 - RNA, 32 nt, Homo Sapiens
aaccucccaucccacccccgacccugcccugg

SEQ ID NO: 61218 - RNA, 32 nt, Homo Sapiens
gcucucuaccgcccggccccagcacucgcuag

SEQ ID NO: 61219 - RNA, 32 nt, Homo Sapiens
uguguucuuauguuucuccuuaugcauuuaug

SEQ ID NO: 61220 - RNA, 32 nt, Homo Sapiens
ugagaauaaagauacuuuuuacuggguuuguu

SEQ ID NO: 61221 - RNA, 32 nt, Homo Sapiens
uuccucccuccccacgaggcuuuguucuccug

SEQ ID NO: 61222 - RNA, 32 nt, Homo Sapiens
acuagccuaguuuuccuuuucuuuauucuggc

SEQ ID NO: 61223 - RNA, 32 nt, Homo Sapiens
cuccaagccagagguagcuuucucagagcccc

SEQ ID NO: 61224 - RNA, 32 nt, Homo Sapiens
uuucccaauauuucugaucuacaaauuuacaa

SEQ ID NO: 61225 - RNA, 32 nt, Homo Sapiens
aaucaccauuuucuagaccuuaauggaauaau

SEQ ID NO: 61226 - RNA, 32 nt, Homo Sapiens
ggacaagaccccaagauucuucaaggauagga

SEQ ID NO: 61227 - RNA, 32 nt, Homo Sapiens
cugcaagaaugggacagguggcgugccauccu

SEQ ID NO: 61228 - RNA, 32 nt, Homo Sapiens
uccagccacuggugcacagccauugccacuug

SEQ ID NO: 61229 - RNA, 32 nt, Homo Sapiens
gcuaggcgcgcaggaagggcugcacagaguuu

SEQ ID NO: 61230 - RNA, 32 nt, Homo Sapiens
gccuucuaggaauggaggagccaggccccacc

SEQ ID NO: 61231 - RNA, 32 nt, Homo Sapiens
gaaaaaaucuucacaguaauuuuuugucugua

SEQ ID NO: 61232 - RNA, 32 nt, Homo Sapiens
aggagcaaagauucuuuaccuacgcauuuuac

SEQ ID NO: 61233 - RNA, 32 nt, Homo Sapiens
ccuaucccccgcagaugccgguggccgugggu

SEQ ID NO: 61234 - RNA, 32 nt, Homo Sapiens
gcuucuauuugacuaauauacugugaugaugg

SEQ ID NO: 61235 - RNA, 32 nt, Homo Sapiens
ucgucgcccacccaccuguggaccggcgaggu

SEQ ID NO: 61236 - RNA, 32 nt, Homo Sapiens
cucuguggaagacgccugcugcuaagagaauc

SEQ ID NO: 61237 - RNA, 32 nt, Homo Sapiens
gaaaguagaucgaacagaauguugucaaccgc

SEQ ID NO: 61238 - RNA, 32 nt, Homo Sapiens
ggcucuaauagaaaugccucauuguuuaacua

SEQ ID NO: 61239 - RNA, 32 nt, Homo Sapiens
acagcgccgcggcuggggccucgcgccuccug

SEQ ID NO: 61240 - RNA, 32 nt, Homo Sapiens
auuaguuaauauauuuauuuauuuuuugcuau

SEQ ID NO: 61241 - RNA, 32 nt, Homo Sapiens
ccugugacauucuggacuauuucuguguuuau

SEQ ID NO: 61242 - RNA, 32 nt, Homo Sapiens
aaaugaagugcacagccaaagucauguauacc

SEQ ID NO: 61243 - RNA, 32 nt, Homo Sapiens
gagaucuaucugcuagauaagaacgagcgauc

SEQ ID NO: 61244 - RNA, 32 nt, Homo Sapiens
gaauuuaaauguguuucuuuucagugaguuga

SEQ ID NO: 61245 - RNA, 32 nt, Homo Sapiens
cgacgggucaccucgcccacacggccagcacc

SEQ ID NO: 61246 - RNA, 32 nt, Homo Sapiens
ugccacuuugucaucaguggcuccuuuauuaa

SEQ ID NO: 61247 - RNA, 32 nt, Homo Sapiens
ucaccauaccuuuacuucagacuucuagcauc

SEQ ID NO: 61248 - RNA, 32 nt, Homo Sapiens
caaggagaucaucaagggaaaacauuuugcau

SEQ ID NO: 61249 - RNA, 32 nt, Homo Sapiens
auacuuuucuugucuucugguuucacaggcuu

SEQ ID NO: 61250 - RNA, 32 nt, Homo Sapiens
uucauauaauuguuauaccagacggucgcagg

SEQ ID NO: 61251 - RNA, 32 nt, Homo Sapiens
gcacgguuuccuggggacccaggcuugcaaag

SEQ ID NO: 61252 - RNA, 32 nt, Homo Sapiens
uucucucauaucuauggaauuaaauugugggu

SEQ ID NO: 61253 - RNA, 30 nt, Homo Sapiens
gcggggaggagaggcggcggcggcaguguc

SEQ ID NO: 61254 - RNA, 32 nt, Homo Sapiens
cuggacguacaacucaggaacugagcgaggcu

SEQ ID NO: 61255 - RNA, 32 nt, Homo Sapiens
uaaugugaacuagcuggaauuuuuuauucuug

SEQ ID NO: 61256 - RNA, 32 nt, Homo Sapiens
gcuggggugccugggcggggcugggaguggga

SEQ ID NO: 61257 - RNA, 32 nt, Homo Sapiens
ugauuucccuggaguaaauacuccaugguuau

SEQ ID NO: 61258 - RNA, 32 nt, Homo Sapiens
cuugggcaacaaagugagacuccaucacagaa

SEQ ID NO: 61259 - RNA, 32 nt, Homo Sapiens
caacuguguuuguuucuaaaggaucuucuccu

SEQ ID NO: 61260 - RNA, 32 nt, Homo Sapiens
gcgcuccgcgcgcccucacugcagccccugcg

SEQ ID NO: 61261 - RNA, 32 nt, Homo Sapiens
agccguuacccgcgggccgccacagccgccgg

SEQ ID NO: 61262 - RNA, 32 nt, Homo Sapiens
gcacccaugcucuauuugauauucagggcucu

SEQ ID NO: 61263 - RNA, 32 nt, Homo Sapiens
auaugcggggguauguccugcuuaauuggaua

SEQ ID NO: 61264 - RNA, 32 nt, Homo Sapiens
gaaggagggaggaggggagggucgcggccggc

SEQ ID NO: 61265 - RNA, 32 nt, Homo Sapiens
gaaccugccggggcagcggacguuggaagggc

SEQ ID NO: 61266 - RNA, 32 nt, Homo Sapiens
cuguggcacuagcagagcuaguagccauuauc

SEQ ID NO: 61267 - RNA, 32 nt, Homo Sapiens
ggagacaaaaauauaccugugaaauaaaacuc

SEQ ID NO: 61268 - RNA, 32 nt, Homo Sapiens
acagggacucugccucuuggaguuugguagcu

SEQ ID NO: 61269 - RNA, 32 nt, Homo Sapiens
ugugaaugcaccaguugacacucuguaucuag

SEQ ID NO: 61270 - RNA, 32 nt, Homo Sapiens
cgugucccgccccgugucccgccccguauuug

SEQ ID NO: 61271 - RNA, 32 nt, Homo Sapiens
uuucagauaaaacaguuuaugaguucauagag

SEQ ID NO: 61272 - RNA, 32 nt, Homo Sapiens
ugaaaaacagaagagagaaaaauauacauuau

SEQ ID NO: 61273 - RNA, 32 nt, Homo Sapiens
gagcguguauagggaggggaaugcuaucgaua

SEQ ID NO: 61274 - RNA, 32 nt, Homo Sapiens
gcuuuucuccucugagucuuagcaauggacaa

SEQ ID NO: 61275 - RNA, 32 nt, Homo Sapiens
auuuaucugaaucaaagcugccuucugcucaa

SEQ ID NO: 61276 - RNA, 32 nt, Homo Sapiens
gaaaucacuggagaucaaauauguaaaaucau

SEQ ID NO: 61277 - RNA, 29 nt, Homo Sapiens
uaggaugccguggcaagcauuucgcagau

SEQ ID NO: 61278 - RNA, 32 nt, Homo Sapiens
gauugccccgccucaaggucuuuccacccucu

SEQ ID NO: 61279 - RNA, 32 nt, Homo Sapiens
agcuauuaacugugcuguguauuuaucaaguu

SEQ ID NO: 61280 - RNA, 32 nt, Homo Sapiens
uguaugccauuuagugaaagugcuaagucuua

SEQ ID NO: 61281 - RNA, 31 nt, Homo Sapiens
ugggaagucgggguuucaggaguccguguac

SEQ ID NO: 61282 - RNA, 32 nt, Homo Sapiens
auccacagucguacugauucuaauggggacac

SEQ ID NO: 61283 - RNA, 32 nt, Homo Sapiens
uaaauacaauacugauaguuagaagaaaacua

SEQ ID NO: 61284 - RNA, 32 nt, Homo Sapiens
uggaggcagccaccucucccagcccacugggu

SEQ ID NO: 61285 - RNA, 32 nt, Homo Sapiens
ggccauggggacccgggccgggccagcggugg

SEQ ID NO: 61286 - RNA, 32 nt, Homo Sapiens
cgggaggcguccccacgccgcccggggaggau

SEQ ID NO: 61287 - RNA, 32 nt, Homo Sapiens
agcaggcccagcauagaggggugagaguaagg

SEQ ID NO: 61288 - RNA, 32 nt, Homo Sapiens
cccccucuaccaagccacuccaagagccagcc

SEQ ID NO: 61289 - RNA, 30 nt, Homo Sapiens
uccuggagcgucccugccuagagcucagcc

SEQ ID NO: 61290 - RNA, 32 nt, Homo Sapiens
gggggcgacgcggcugagggcuucucgucggg

SEQ ID NO: 61291 - RNA, 32 nt, Homo Sapiens
aauuaggaaauacuacaggacaccccuguaau

SEQ ID NO: 61292 - RNA, 30 nt, Homo Sapiens
auagcagcuaugugugugcaaaauaaaaga

SEQ ID NO: 61293 - RNA, 32 nt, Homo Sapiens
gcaggcugugcagcuuucgcgaggcaccgcuu

SEQ ID NO: 61294 - RNA, 32 nt, Homo Sapiens
uggcugagcuuccagcgccuucuguccugccu

SEQ ID NO: 61295 - RNA, 32 nt, Homo Sapiens
uauauauuuuuccaucccuucacuuucagucu

SEQ ID NO: 61296 - RNA, 28 nt, Homo Sapiens
ggaaugguggcucacauaaacaacagcc

SEQ ID NO: 61297 - RNA, 32 nt, Homo Sapiens
gucucugaaaauagcugccugguuucacuccc

SEQ ID NO: 61298 - RNA, 32 nt, Homo Sapiens
cgcuaccaaucugaauucgaggcccauaugag

SEQ ID NO: 61299 - RNA, 32 nt, Homo Sapiens
ucugucucaaaugaggcccaacccauccccca

SEQ ID NO: 61300 - RNA, 32 nt, Homo Sapiens
uuguacucauauccuuauacuuacuguuuucu

SEQ ID NO: 61301 - RNA, 31 nt, Homo Sapiens
cggggcuggaggcacuucagagccucugagg

SEQ ID NO: 61302 - RNA, 32 nt, Homo Sapiens
caucaaacagagcuucuuccuaauaacggcgg

SEQ ID NO: 61303 - RNA, 32 nt, Homo Sapiens
uccucaucuguccaaugacagcccuuuucuca

SEQ ID NO: 61304 - RNA, 32 nt, Homo Sapiens
cgcauccccauccccauccccaucccuaacca

SEQ ID NO: 61305 - RNA, 32 nt, Homo Sapiens
aagugcucucucacucauucuuucucucuguu

SEQ ID NO: 61306 - RNA, 32 nt, Homo Sapiens
cugggggguuguaaauaacagcagucagguug

SEQ ID NO: 61307 - RNA, 32 nt, Homo Sapiens
gaagccacugccaaaacaacugugggagacca

SEQ ID NO: 61308 - RNA, 32 nt, Homo Sapiens
accgccccuugaccacagacaugucucgggau

SEQ ID NO: 61309 - RNA, 32 nt, Homo Sapiens
gaucuggagcaacagcugggaaauaucauuaa

SEQ ID NO: 61310 - RNA, 32 nt, Homo Sapiens
uuuuuaaucauaaaaaucaugacaguuacuca

SEQ ID NO: 61311 - RNA, 32 nt, Homo Sapiens
ucuacaaaaaauacaaaaauuagccuggcaua

SEQ ID NO: 61312 - RNA, 32 nt, Homo Sapiens
aaguugugauugggcaaaguuuauuuucuaug

SEQ ID NO: 61313 - RNA, 32 nt, Homo Sapiens
cugcgggacccgggcaccgggaggcgguggcg

SEQ ID NO: 61314 - RNA, 32 nt, Homo Sapiens
cuugcacaaaaauuauuagcuuauaagacacc

SEQ ID NO: 61315 - RNA, 32 nt, Homo Sapiens
cuggggucaggaguuugagaccagccuggcca

SEQ ID NO: 61316 - RNA, 32 nt, Homo Sapiens
gggcagcgcucgcccggggaguccagcggugu

SEQ ID NO: 61317 - RNA, 32 nt, Homo Sapiens
cuucaguuuuuccgucaauaagaugagggauu

SEQ ID NO: 61318 - RNA, 32 nt, Homo Sapiens
uacacagagaccagcccgcuucauauucaaga

SEQ ID NO: 61319 - RNA, 32 nt, Homo Sapiens
cuggagucaccauggcggccggaguugcggcc

SEQ ID NO: 61320 - RNA, 32 nt, Homo Sapiens
aagacaagagcggcuccgaggaccccccuccc

SEQ ID NO: 61321 - RNA, 32 nt, Homo Sapiens
cgucgucccccuccccccaaccagggagcccg

SEQ ID NO: 61322 - RNA, 32 nt, Homo Sapiens
gggacagggcgacguguguccaggcguuugcc

SEQ ID NO: 61323 - RNA, 32 nt, Homo Sapiens
cucuacaagcagccuugugacuccggggucuc

SEQ ID NO: 61324 - RNA, 32 nt, Homo Sapiens
uacgggucccuggggcagcuguccccaucagg

SEQ ID NO: 61325 - RNA, 32 nt, Homo Sapiens
gacaguaaucucccccuucucuggacagccag

SEQ ID NO: 61326 - RNA, 32 nt, Homo Sapiens
aucucuuuuugacucuugcaauccacaaucug

SEQ ID NO: 61327 - RNA, 29 nt, Homo Sapiens
uuugucuuauaugagucaguuacuacuua

SEQ ID NO: 61328 - RNA, 32 nt, Homo Sapiens
ccugggccccaccucaaaccuacuauucugaa

SEQ ID NO: 61329 - RNA, 32 nt, Homo Sapiens
auuacaaagaauguggcaacuugcuugugccu

SEQ ID NO: 61330 - RNA, 32 nt, Homo Sapiens
cuuacuauucuagggcgauggcacucuuaaug

SEQ ID NO: 61331 - RNA, 32 nt, Homo Sapiens
agcaugcuuuucuuuauuaaaauuacugaugc

SEQ ID NO: 61332 - RNA, 32 nt, Homo Sapiens
uuuucuaacagggucuuagugguuaaugauca

SEQ ID NO: 61333 - RNA, 32 nt, Homo Sapiens
agccugcauccucuccucaggccuccuuccca

SEQ ID NO: 61334 - RNA, 32 nt, Homo Sapiens
uaaguuccaaguuuccucucccaacucuccua

SEQ ID NO: 61335 - RNA, 32 nt, Homo Sapiens
cccguggcucugcuggguccaggugcaagcag

SEQ ID NO: 61336 - RNA, 31 nt, Homo Sapiens
auaaauaaaaacuacaguaaauguauacauu

SEQ ID NO: 61337 - RNA, 30 nt, Homo Sapiens
gaacauggcugugcuguagccaagcaggca

SEQ ID NO: 61338 - RNA, 32 nt, Homo Sapiens
aaagccaucuagccuuuuuuuuuuuuuuaauc

SEQ ID NO: 61339 - RNA, 32 nt, Homo Sapiens
aaguuacccuggauagggaagggggaggaggg

SEQ ID NO: 61340 - RNA, 32 nt, Homo Sapiens
cugacccccuccccgcaaucccucaaaccuug

SEQ ID NO: 61341 - RNA, 32 nt, Homo Sapiens
gggguuaguuaugaaauguucuuaauaugacg

SEQ ID NO: 61342 - RNA, 32 nt, Homo Sapiens
uguagaaaggauuuuuaucuucuguagagcua

SEQ ID NO: 61343 - RNA, 32 nt, Homo Sapiens
cccagccucaccaucacccccagcacugccag

SEQ ID NO: 61344 - RNA, 32 nt, Homo Sapiens
uucagaagaaaagagagacaagugcucuucuc

SEQ ID NO: 61345 - RNA, 32 nt, Homo Sapiens
acacgggagagcaucgguuuuguuguacuugg

SEQ ID NO: 61346 - RNA, 32 nt, Homo Sapiens
uaaucugucccauuuuucagguuauaauauuu

SEQ ID NO: 61347 - RNA, 32 nt, Homo Sapiens
cggguggcgggggcgggucugagugguacccc

SEQ ID NO: 61348 - RNA, 32 nt, Homo Sapiens
cccagggagaaaaccugucagaacuuuccaua

SEQ ID NO: 61349 - RNA, 32 nt, Homo Sapiens
cuggaauagcuaguauuggguuuucuaguuuu

SEQ ID NO: 61350 - RNA, 32 nt, Homo Sapiens
ugcauucagguggauguccauccuugaaacag

SEQ ID NO: 61351 - RNA, 32 nt, Homo Sapiens
uuuagaucagaccuguguaucacguaagugug

SEQ ID NO: 61352 - RNA, 32 nt, Homo Sapiens
ucagaggaguggcgaucagagaagggcaucgc

SEQ ID NO: 61353 - RNA, 32 nt, Homo Sapiens
ucacucagaaaagaggcgauggcagcuuggac

SEQ ID NO: 61354 - RNA, 32 nt, Homo Sapiens
auuagaaguagccaacucuauuuuacagaaga

SEQ ID NO: 61355 - RNA, 32 nt, Homo Sapiens
ugaguccccuccccggccaccauccugcguga

SEQ ID NO: 61356 - RNA, 32 nt, Homo Sapiens
ggaacugugccucggcgccaccuccggccccg

SEQ ID NO: 61357 - RNA, 32 nt, Homo Sapiens
cgccggcuccccgaggacccaggcuugacgau

SEQ ID NO: 61358 - RNA, 32 nt, Homo Sapiens
gggagcggcccggccccggcccccugcucguu

SEQ ID NO: 61359 - RNA, 32 nt, Homo Sapiens
accgugaccugccuggccuccccugucucagg

SEQ ID NO: 61360 - RNA, 27 nt, Homo Sapiens
accaguucugucuucagcuguacauac

SEQ ID NO: 61361 - RNA, 32 nt, Homo Sapiens
uuuucguccaaauaaaaugcaugguguaccag

SEQ ID NO: 61362 - RNA, 32 nt, Homo Sapiens
aucauuaaaugaauucaccgcaacuacaguga

SEQ ID NO: 61363 - RNA, 32 nt, Homo Sapiens
gggcagaaggcacccuggccaugcacaggcau

SEQ ID NO: 61364 - RNA, 32 nt, Homo Sapiens
ggaggcacagcuucagcuccgugcaggaugga

SEQ ID NO: 61365 - RNA, 32 nt, Homo Sapiens
ggaacagcacguggugggguccugcuugugug

SEQ ID NO: 61366 - RNA, 32 nt, Homo Sapiens
ggcccggcugcgccagaguccgcgcgauggag

SEQ ID NO: 61367 - RNA, 32 nt, Homo Sapiens
cauagggcauuguuaaaguuccauauuggaag

SEQ ID NO: 61368 - RNA, 32 nt, Homo Sapiens
ugggagcaggugccggagccccggccugccug

SEQ ID NO: 61369 - RNA, 32 nt, Homo Sapiens
ccugaagcagugcccacucuggcuccuccugc

SEQ ID NO: 61370 - RNA, 32 nt, Homo Sapiens
uuugggagccagcaagaguccugacagcagca

SEQ ID NO: 61371 - RNA, 32 nt, Homo Sapiens
ggcaagaggggaguccgggcggcggccggcgu

SEQ ID NO: 61372 - RNA, 32 nt, Homo Sapiens
aaccucgggagacaccccggccccucaugccu

SEQ ID NO: 61373 - RNA, 32 nt, Homo Sapiens
aggcccaggggaggugcagcacgcucaugggg

SEQ ID NO: 61374 - RNA, 32 nt, Homo Sapiens
agugggaaggagaggagugagugaaguagccu

SEQ ID NO: 61375 - RNA, 32 nt, Homo Sapiens
caccuacuucccagcacccccagcccgugguu

SEQ ID NO: 61376 - RNA, 32 nt, Homo Sapiens
gacgcgggcgcggaaggagcgcggccggaggu

SEQ ID NO: 61377 - RNA, 32 nt, Homo Sapiens
aucacccauggcugccucuccuauuaucuauu

SEQ ID NO: 61378 - RNA, 32 nt, Homo Sapiens
ccgccgggagcuguaguucucccgcggcucag

SEQ ID NO: 61379 - RNA, 32 nt, Homo Sapiens
auagagcgucuuuuccuucucuuuucugcugu

SEQ ID NO: 61380 - RNA, 32 nt, Homo Sapiens
gaauguguauaugaauaugaaugugcauauga

SEQ ID NO: 61381 - RNA, 32 nt, Homo Sapiens
uaagaaaacauuugucagauaucccucuuaaa

SEQ ID NO: 61382 - RNA, 32 nt, Homo Sapiens
aaccccaucucuacuaaaaauagaaaaaucag

SEQ ID NO: 61383 - RNA, 32 nt, Homo Sapiens
ggccuggagagccgcccagcagcacaacacag

SEQ ID NO: 61384 - RNA, 32 nt, Homo Sapiens
acucaggcuggggcucccugaggauggggcug

SEQ ID NO: 61385 - RNA, 32 nt, Homo Sapiens
gccgcgcaguccgggcccggcgcgaugggggc

SEQ ID NO: 61386 - RNA, 32 nt, Homo Sapiens
gagcccccaucccuucacaccgccaccaacua

SEQ ID NO: 61387 - RNA, 32 nt, Homo Sapiens
cucaauaaauguucguggaugaugaugaugau

SEQ ID NO: 61388 - RNA, 32 nt, Homo Sapiens
ccuccuuuaaacagcuucuccgggucucagca

SEQ ID NO: 61389 - RNA, 32 nt, Homo Sapiens
cgguggauaagccccagguccaccccaccugc

SEQ ID NO: 61390 - RNA, 32 nt, Homo Sapiens
auggacuuuaggguuugugcugugggauaaac

SEQ ID NO: 61391 - RNA, 32 nt, Homo Sapiens
agccggcgggucgggccuugagguggaaggcg

SEQ ID NO: 61392 - RNA, 32 nt, Homo Sapiens
gcaccugagcuaagguuaaggcuggucuaaac

SEQ ID NO: 61393 - RNA, 32 nt, Homo Sapiens
ccccuuggggcacaaccugccacugccacagu

SEQ ID NO: 61394 - RNA, 32 nt, Homo Sapiens
ugcugagugagccccagcccgccccugcaguu

SEQ ID NO: 61395 - RNA, 32 nt, Homo Sapiens
aaaauuugaaggcauuuuugagcauuuccaau

SEQ ID NO: 61396 - RNA, 32 nt, Homo Sapiens
uaacaaaaggauuaauggguugcuuaaauuag

SEQ ID NO: 61397 - RNA, 32 nt, Homo Sapiens
acaauauacggauuggcuuuuugugacccaga

SEQ ID NO: 61398 - RNA, 32 nt, Homo Sapiens
auugacuguauuggacugucucuucuuguaga

SEQ ID NO: 61399 - RNA, 32 nt, Homo Sapiens
gcuauguauuuacucuuuuuuaaaagacaaaa

SEQ ID NO: 61400 - RNA, 32 nt, Homo Sapiens
auauugccaagagauuguuauguguuugguuc

SEQ ID NO: 61401 - RNA, 32 nt, Homo Sapiens
cuggugaggaccagaucucccccucuccccac

SEQ ID NO: 61402 - RNA, 32 nt, Homo Sapiens
ucguuacuaaaaguacauuaaaacacucuugu

SEQ ID NO: 61403 - RNA, 32 nt, Homo Sapiens
ugcacucgccgcgccgcgcagcccgcgcacgc

SEQ ID NO: 61404 - RNA, 32 nt, Homo Sapiens
aaagaucugaccaaggugucauucuuggaagg

SEQ ID NO: 61405 - RNA, 32 nt, Homo Sapiens
aguaaugaaaauauaaugguuuuagaaauccu

SEQ ID NO: 61406 - RNA, 32 nt, Homo Sapiens
auugugaucacuucuucagaccucccuugcau

SEQ ID NO: 61407 - RNA, 32 nt, Homo Sapiens
cucuggaggggagggggauccgacugcuuugg

SEQ ID NO: 61408 - RNA, 32 nt, Homo Sapiens
ccauuuccgugguuucucaugagcuguguuca

SEQ ID NO: 61409 - RNA, 32 nt, Homo Sapiens
cgaggcgggaggccggcugugcugcaggaacc

SEQ ID NO: 61410 - RNA, 32 nt, Homo Sapiens
ggcgcucuggguggaggagaccagcucuaggc

SEQ ID NO: 61411 - RNA, 32 nt, Homo Sapiens
gacgcggcggcuggcgggagagacagcugggg

SEQ ID NO: 61412 - RNA, 32 nt, Homo Sapiens
cuacuuuacgauuuauuauucauggauugaag

SEQ ID NO: 61413 - RNA, 30 nt, Homo Sapiens
auuugcaaauuauggggggaaauaaagcuu

SEQ ID NO: 61414 - RNA, 32 nt, Homo Sapiens
uuuaaagugugacucuuaugcauaaaguuuua

SEQ ID NO: 61415 - RNA, 32 nt, Homo Sapiens
ugaacagaaugggcggcugugcugggaguugg

SEQ ID NO: 61416 - RNA, 32 nt, Homo Sapiens
cucauccauguaaccaaaaaccacuuguaggg

SEQ ID NO: 61417 - RNA, 32 nt, Homo Sapiens
ugcaguugcuccauauugggcagagauugcuu

SEQ ID NO: 61418 - RNA, 32 nt, Homo Sapiens
aaagucuuucccucuuuccuuugcauuugaau

SEQ ID NO: 61419 - RNA, 30 nt, Homo Sapiens
aauguaugcuagagcuacaagagaccuuaa

SEQ ID NO: 61420 - RNA, 32 nt, Homo Sapiens
gcuggagguccucccccaguggccuuccuccc

SEQ ID NO: 61421 - RNA, 32 nt, Homo Sapiens
agacgugauagagggaauauaagagcauuuau

SEQ ID NO: 61422 - RNA, 32 nt, Homo Sapiens
ccauccuuagcuuuggcgcccuggacccacuu

SEQ ID NO: 61423 - RNA, 32 nt, Homo Sapiens
guuauuuuaaccucaaaaauuagcuaacuuuu

SEQ ID NO: 61424 - RNA, 30 nt, Homo Sapiens
ugccgggccaggcgcggucgucacgccugu

SEQ ID NO: 61425 - RNA, 32 nt, Homo Sapiens
cagccauagaaaggacagaaugagcucauauc

SEQ ID NO: 61426 - RNA, 32 nt, Homo Sapiens
gauacagauggcugccugcugcucggcuuugc

SEQ ID NO: 61427 - RNA, 32 nt, Homo Sapiens
caguuaagcaauggggagacauuuggcuuugc

SEQ ID NO: 61428 - RNA, 32 nt, Homo Sapiens
uguuuggguuuggaauggaaauauggauagca

SEQ ID NO: 61429 - RNA, 32 nt, Homo Sapiens
cgagaagagcucggaaaagagcagaaggcacc

SEQ ID NO: 61430 - RNA, 32 nt, Homo Sapiens
caagcaaagcaaaacaauaaacuagcagaaga

SEQ ID NO: 61431 - RNA, 32 nt, Homo Sapiens
agaaaggaguagaauauaaacacauaauugcu

SEQ ID NO: 61432 - RNA, 32 nt, Homo Sapiens
aucccugggaccugcccucccucggucccagg

SEQ ID NO: 61433 - RNA, 32 nt, Homo Sapiens
aauuuuucgaauggcaaucaacuguuuauuau

SEQ ID NO: 61434 - RNA, 32 nt, Homo Sapiens
aggaggggagguggcuugagggggcugacggg

SEQ ID NO: 61435 - RNA, 32 nt, Homo Sapiens
cagagaugccagcagccucugucgcccuuagu

SEQ ID NO: 61436 - RNA, 32 nt, Homo Sapiens
gcccugggacaccuaugagauggcaucaccua

SEQ ID NO: 61437 - RNA, 32 nt, Homo Sapiens
gcaguuuaaugaaagaaaagugucugaagauu

SEQ ID NO: 61438 - RNA, 32 nt, Homo Sapiens
ccgcgccgcccgggcccuccccgcacacugac

SEQ ID NO: 61439 - RNA, 32 nt, Homo Sapiens
gccucugccugccuuggcuaagcaugaguuaa

SEQ ID NO: 61440 - RNA, 32 nt, Homo Sapiens
auggaguaaggcauucaggacaaaaggaccaa

SEQ ID NO: 61441 - RNA, 32 nt, Homo Sapiens
ccucacugaagaagcagauugccaagugccag

SEQ ID NO: 61442 - RNA, 32 nt, Homo Sapiens
ugaugaugaugaugauggcagcuuuauaucga

SEQ ID NO: 61443 - RNA, 32 nt, Homo Sapiens
uucugagcauuuauaaugauacucauuaucaa

SEQ ID NO: 61444 - RNA, 32 nt, Homo Sapiens
uguuaauacuaaaguguuuaugcugaguugcu

SEQ ID NO: 61445 - RNA, 32 nt, Homo Sapiens
ucugucuacaaauauaagauuuucugggccua

SEQ ID NO: 61446 - RNA, 32 nt, Homo Sapiens
uuuacugacaugacaaccuagaacgaagauag

SEQ ID NO: 61447 - RNA, 32 nt, Homo Sapiens
ccaaguagcugagacuacagguguguguccau

SEQ ID NO: 61448 - RNA, 32 nt, Homo Sapiens
acaaccuugacaaagaguaguuuuaucaggua

SEQ ID NO: 61449 - RNA, 32 nt, Homo Sapiens
ggcagucuuguuuauuugauuuauagcauucu

SEQ ID NO: 61450 - RNA, 32 nt, Homo Sapiens
uugagcucggucccgagagacccggcagggcu

SEQ ID NO: 61451 - RNA, 32 nt, Homo Sapiens
ggcuguggggcagcuccagcccugcccacagg

SEQ ID NO: 61452 - RNA, 32 nt, Homo Sapiens
ggguguguaucuucuuaucucauuucacaaga

SEQ ID NO: 61453 - RNA, 32 nt, Homo Sapiens
cauuuuagagcucuguacauaauguugugggu

SEQ ID NO: 61454 - RNA, 32 nt, Homo Sapiens
caccuacuuuucuuuccucagaucauccagaa

SEQ ID NO: 61455 - RNA, 32 nt, Homo Sapiens
gcugccauugccccggccccuuuucuuccuuu

SEQ ID NO: 61456 - RNA, 32 nt, Homo Sapiens
cacugccuucuucuccucccccaacacugcag

SEQ ID NO: 61457 - RNA, 32 nt, Homo Sapiens
caccauuugaugcaccuuagagaacaguagga

SEQ ID NO: 61458 - RNA, 32 nt, Homo Sapiens
gaaacaccuaggucaacuaggcacauguuuca

SEQ ID NO: 61459 - RNA, 32 nt, Homo Sapiens
gaagggaggcccacuuccuucuuugggcacag

SEQ ID NO: 61460 - RNA, 32 nt, Homo Sapiens
guggggaggaagcgaggaugcgugccugccac

SEQ ID NO: 61461 - RNA, 32 nt, Homo Sapiens
ugucaaguagaggcgaauauauaaacagugug

SEQ ID NO: 61462 - RNA, 32 nt, Homo Sapiens
augaaaagaagcggggaaaacaacaacaagga

SEQ ID NO: 61463 - RNA, 32 nt, Homo Sapiens
uuaagcccucgcccggcccggacacagggagg

SEQ ID NO: 61464 - RNA, 32 nt, Homo Sapiens
cccacagcggcagugucccuccccucccccca

SEQ ID NO: 61465 - RNA, 32 nt, Homo Sapiens
cugccauccuuuccucucuccucagggcgccu

SEQ ID NO: 61466 - RNA, 32 nt, Homo Sapiens
acugaggacgacagccuacaaacaacuacaug

SEQ ID NO: 61467 - RNA, 32 nt, Homo Sapiens
ggucucgagguccucacaguugccagcccugc

SEQ ID NO: 61468 - RNA, 32 nt, Homo Sapiens
ggcuacuuucggccaaaggagaacggggacuu

SEQ ID NO: 61469 - RNA, 32 nt, Homo Sapiens
acuauuuugaugaauauauuuaaaaaaccuuu

SEQ ID NO: 61470 - RNA, 32 nt, Homo Sapiens
cacaaacgcuccuggggccucaugggggcaga

SEQ ID NO: 61471 - RNA, 32 nt, Homo Sapiens
cacaggcagcuucuucggcagccucacggcag

SEQ ID NO: 61472 - RNA, 32 nt, Homo Sapiens
ggacaaaauaaucagcauugcucccucuuuua

SEQ ID NO: 61473 - RNA, 32 nt, Homo Sapiens
gcuacgggaaaggaagggcuuggcuugccaga

SEQ ID NO: 61474 - RNA, 32 nt, Homo Sapiens
ggacgcugggaagcgugcugugcgaagcgcuc

SEQ ID NO: 61475 - RNA, 32 nt, Homo Sapiens
uaauuuguuuuaaugauuuugcuacauuugga

SEQ ID NO: 61476 - RNA, 32 nt, Homo Sapiens
cacggaccccauguuggaucuuucucccuuuc

SEQ ID NO: 61477 - RNA, 32 nt, Homo Sapiens
gaggcaguguguggcucgaagauucuugaacc

SEQ ID NO: 61478 - RNA, 30 nt, Homo Sapiens
auuccaaugcuaauggcagacaccaggaag

SEQ ID NO: 61479 - RNA, 32 nt, Homo Sapiens
agccucgagcccggcgcugcugcccggggguc

SEQ ID NO: 61480 - RNA, 32 nt, Homo Sapiens
uauauauauauguguauacacacacacauaga

SEQ ID NO: 61481 - RNA, 32 nt, Homo Sapiens
guauaguacuugucuuguuuuuccuggagcca

SEQ ID NO: 61482 - RNA, 32 nt, Homo Sapiens
gggaaaggaccuuagaacuuuuuaagguaaaa

SEQ ID NO: 61483 - RNA, 32 nt, Homo Sapiens
ggcacgguuaugggggcggggugggcggggag

SEQ ID NO: 61484 - RNA, 32 nt, Homo Sapiens
uuuggcugccagcuugcuuguccaacagccuu

SEQ ID NO: 61485 - RNA, 32 nt, Homo Sapiens
auagcaaggaggccauaacauaauuuggucua

SEQ ID NO: 61486 - RNA, 32 nt, Homo Sapiens
agagaggguagaggugcacugauaaaccaaaa

SEQ ID NO: 61487 - RNA, 32 nt, Homo Sapiens
cccugcaacuaacccuggucuuucccauggca

SEQ ID NO: 61488 - RNA, 32 nt, Homo Sapiens
uucaccauugguuuuuuuccuaucauuucugc

SEQ ID NO: 61489 - RNA, 32 nt, Homo Sapiens
gggauagccaugggcaagcugcaccuugcaug

SEQ ID NO: 61490 - RNA, 32 nt, Homo Sapiens
cucgcguccccgcccggcgccacgccgccucc

SEQ ID NO: 61491 - RNA, 32 nt, Homo Sapiens
gcuccacuucugacaccuucuuucucucccgu

SEQ ID NO: 61492 - RNA, 32 nt, Homo Sapiens
agcauccaccccaccccaucuuugcugccagc

SEQ ID NO: 61493 - RNA, 32 nt, Homo Sapiens
gagggagugguggagcugggccaggcaggaag

SEQ ID NO: 61494 - RNA, 32 nt, Homo Sapiens
gcgagucauguagugugguagaauuaaaggag

SEQ ID NO: 61495 - RNA, 32 nt, Homo Sapiens
uggguugcuuugugucucaaguauugucuuua

SEQ ID NO: 61496 - RNA, 32 nt, Homo Sapiens
caauugguuaugguuccuuguuuuaauuauau

SEQ ID NO: 61497 - RNA, 32 nt, Homo Sapiens
ggcugccacuuucuccuccccuuccugagccg

SEQ ID NO: 61498 - RNA, 32 nt, Homo Sapiens
aguagcagccuucgccagcagcgccgcggcgg

SEQ ID NO: 61499 - RNA, 32 nt, Homo Sapiens
acauuuguguggaaauugucuuguuuuaugcu

SEQ ID NO: 61500 - RNA, 32 nt, Homo Sapiens
aguggaggaaaugggcauagaguagagaauag

SEQ ID NO: 61501 - RNA, 32 nt, Homo Sapiens
uuauaaugaaaguuuauaucaacaggguuucg

SEQ ID NO: 61502 - RNA, 32 nt, Homo Sapiens
ggugcaggaagacaaagacgcgugcucacuuu

SEQ ID NO: 61503 - RNA, 32 nt, Homo Sapiens
gcagauacagagcuaauggccagguuucuugg

SEQ ID NO: 61504 - RNA, 32 nt, Homo Sapiens
agagauaaugaaaucaaaugguuuccuggauu

SEQ ID NO: 61505 - RNA, 32 nt, Homo Sapiens
ucaacucaguggucuucaguccccaggagcag

SEQ ID NO: 61506 - RNA, 32 nt, Homo Sapiens
agcugaucugcaggcaucuggauguuagccug

SEQ ID NO: 61507 - RNA, 32 nt, Homo Sapiens
gauuaggaacuuuggguuccagucuugguugu

SEQ ID NO: 61508 - RNA, 29 nt, Homo Sapiens
ggggcuaagaagguuguccuugccuaaug

SEQ ID NO: 61509 - RNA, 32 nt, Homo Sapiens
ggccuucugcuggagacagcgugcacugcugc

SEQ ID NO: 61510 - RNA, 32 nt, Homo Sapiens
acccugggauggggcuaguagagccuucaggc

SEQ ID NO: 61511 - RNA, 32 nt, Homo Sapiens
caaguuccuugacccugggaaaugucuacaaa

SEQ ID NO: 61512 - RNA, 32 nt, Homo Sapiens
uuuugguguuuuauuguauaaaaccuuagaca

SEQ ID NO: 61513 - RNA, 30 nt, Homo Sapiens
gaaagagacaggagacaugagucuuugccg

SEQ ID NO: 61514 - RNA, 32 nt, Homo Sapiens
cccacugcuccuggaguucucaucggauuccc

SEQ ID NO: 61515 - RNA, 32 nt, Homo Sapiens
ggcugcgcgcgggcgagcugccgcggagcacc

SEQ ID NO: 61516 - RNA, 32 nt, Homo Sapiens
cagggcccauucuugcuucucaggcaccuucc

SEQ ID NO: 61517 - RNA, 32 nt, Homo Sapiens
uugccccagccacuuugccccagccgcuuuga

SEQ ID NO: 61518 - RNA, 30 nt, Homo Sapiens
aacagaugaucucuugaugagugcuucuuc

SEQ ID NO: 61519 - RNA, 32 nt, Homo Sapiens
caugaggccaucucaggagauggagggcuugg

SEQ ID NO: 61520 - RNA, 32 nt, Homo Sapiens
gcucgccggagaagaggagccccagcgccccg

SEQ ID NO: 61521 - RNA, 32 nt, Homo Sapiens
gcucccuccacugcccgaggggagcgcgucgc

SEQ ID NO: 61522 - RNA, 32 nt, Homo Sapiens
cgcaggcuugcgcgcgcacucgcugcgggaca

SEQ ID NO: 61523 - RNA, 32 nt, Homo Sapiens
ggcaggagccccagcuuagcccugagcgccag

SEQ ID NO: 61524 - RNA, 32 nt, Homo Sapiens
auuuuccagaacauagcccaacaaagaacuuc

SEQ ID NO: 61525 - RNA, 32 nt, Homo Sapiens
aguaaugacuccccagaaaacgucauauaaga

SEQ ID NO: 61526 - RNA, 32 nt, Homo Sapiens
acaacccauauuggggacccccugugacuagu

SEQ ID NO: 61527 - RNA, 28 nt, Homo Sapiens
uaagcacuuguuuguauguguuugucaa

SEQ ID NO: 61528 - RNA, 32 nt, Homo Sapiens
ucugagagaaacugaggcccagcagagggagg

SEQ ID NO: 61529 - RNA, 32 nt, Homo Sapiens
ucaaaaauaaugccucugucuagcaugccaac

SEQ ID NO: 61530 - RNA, 32 nt, Homo Sapiens
gcggacgaaucggcguuugccgaggcuggcau

SEQ ID NO: 61531 - RNA, 32 nt, Homo Sapiens
cuucuuacagaaguauuacugaagguauuauu

SEQ ID NO: 61532 - RNA, 32 nt, Homo Sapiens
cgguggagaagcugagccgggcugaagcgggg

SEQ ID NO: 61533 - RNA, 32 nt, Homo Sapiens
uaaguugucuguacacagcugcauugcaaugc

SEQ ID NO: 61534 - RNA, 32 nt, Homo Sapiens
ccaacuuauuggcaugauggagugacaggaaa

SEQ ID NO: 61535 - RNA, 32 nt, Homo Sapiens
gccagaugacuucagcauugggaaggcaauau

SEQ ID NO: 61536 - RNA, 32 nt, Homo Sapiens
gguuugguuugguuuguuuuuaacucaacaag

SEQ ID NO: 61537 - RNA, 32 nt, Homo Sapiens
gcuuugcagacacaucacccagucucugcccu

SEQ ID NO: 61538 - RNA, 32 nt, Homo Sapiens
ucaaccuaugcuguuuccuguuggaugcacau

SEQ ID NO: 61539 - RNA, 32 nt, Homo Sapiens
ggagggaguugucggcgccgcggccgcugcgg

SEQ ID NO: 61540 - RNA, 32 nt, Homo Sapiens
gacaugacgcuucuccacggaagcaacaagug

SEQ ID NO: 61541 - RNA, 32 nt, Homo Sapiens
caggugguggcugugacggggaggauggucac

SEQ ID NO: 61542 - RNA, 32 nt, Homo Sapiens
acaucaauaaaguacaaucauugugagcccuu

SEQ ID NO: 61543 - RNA, 32 nt, Homo Sapiens
aucuggccaccccuagaggcagaugggcugag

SEQ ID NO: 61544 - RNA, 32 nt, Homo Sapiens
aaaguggagcuauaggaaaugccaggccuuug

SEQ ID NO: 61545 - RNA, 26 nt, Homo Sapiens
aucccuuaauaaaauauucgaaauuc

SEQ ID NO: 61546 - RNA, 32 nt, Homo Sapiens
gaauuuauacuucaguaugguuucaacgcagu

SEQ ID NO: 61547 - RNA, 30 nt, Homo Sapiens
gagaggugcaggcgccugguucugagcacc

SEQ ID NO: 61548 - RNA, 32 nt, Homo Sapiens
aauucuauuucugacuuuauugaaauuuguag

SEQ ID NO: 61549 - RNA, 32 nt, Homo Sapiens
ucacuuuugggguuuuugcuaccaauuuuaag

SEQ ID NO: 61550 - RNA, 32 nt, Homo Sapiens
uucagaacauguaacauuuaaaaaauaacauu

SEQ ID NO: 61551 - RNA, 32 nt, Homo Sapiens
uuuauuuucuucagcauuuaaucacuguauac

SEQ ID NO: 61552 - RNA, 32 nt, Homo Sapiens
aguuacagcggcuucuccggccugcuggagau

SEQ ID NO: 61553 - RNA, 32 nt, Homo Sapiens
uuuuauuuuccacagcaaaauuacucuacugu

SEQ ID NO: 61554 - RNA, 28 nt, Homo Sapiens
accacgggaaagccgccgaccugugacu

SEQ ID NO: 61555 - RNA, 32 nt, Homo Sapiens
caggucgcugagggaccccggccaggcgcgga

SEQ ID NO: 61556 - RNA, 32 nt, Homo Sapiens
cuugaccucugcauccauggugacggaggugg

SEQ ID NO: 61557 - RNA, 32 nt, Homo Sapiens
ccuacgagguucaaaaucaaauggcauuuggc

SEQ ID NO: 61558 - RNA, 32 nt, Homo Sapiens
caagcauuacuccccaucgccagcugaugacu

SEQ ID NO: 61559 - RNA, 28 nt, Homo Sapiens
cccacgccggcuaccaccauggcggaga

SEQ ID NO: 61560 - RNA, 32 nt, Homo Sapiens
gccucgcgcgggcaggagcggcucggcugaca

SEQ ID NO: 61561 - RNA, 32 nt, Homo Sapiens
ucaaucuucuuaucuuuucuuaaaagaaaaac

SEQ ID NO: 61562 - RNA, 32 nt, Homo Sapiens
ccagcucucacugaacuaauagaguaaguugu

SEQ ID NO: 61563 - RNA, 29 nt, Homo Sapiens
cugcugcuugacaauccacacaaagaacc

SEQ ID NO: 61564 - RNA, 32 nt, Homo Sapiens
ccuauuuuaugaugauggggauuuugaccauu

SEQ ID NO: 61565 - RNA, 32 nt, Homo Sapiens
agccguuugugccucgucucgcuguuagauug

SEQ ID NO: 61566 - RNA, 32 nt, Homo Sapiens
uugaauugucuuuauuaacaaacaggauaucc

SEQ ID NO: 61567 - RNA, 32 nt, Homo Sapiens
aaagugaaaugucagguuguuuagucacugaa

SEQ ID NO: 61568 - RNA, 32 nt, Homo Sapiens
ggacgcgcacugccgaagccuggucccucgac

SEQ ID NO: 61569 - RNA, 32 nt, Homo Sapiens
ugcugugggaaccccuuuaucccagaaagccc

SEQ ID NO: 61570 - RNA, 32 nt, Homo Sapiens
aaauaaaggaauguccuucauuuuacuaaaag

SEQ ID NO: 61571 - RNA, 32 nt, Homo Sapiens
uauuguauuuugaugagauauuaaauucucaa

SEQ ID NO: 61572 - RNA, 28 nt, Homo Sapiens
uaucaggaaagcuaacauuucauacaag

SEQ ID NO: 61573 - RNA, 32 nt, Homo Sapiens
cagcguuuucuuuuuaaaauuuaauugaucag

SEQ ID NO: 61574 - RNA, 32 nt, Homo Sapiens
agcccuuuuuaaaaacuagacuucguacugug

SEQ ID NO: 61575 - RNA, 32 nt, Homo Sapiens
uuccuccguccuccugcccaaggacgacgagg

SEQ ID NO: 61576 - RNA, 32 nt, Homo Sapiens
cucaagggugcaucgugaaaacugaaaccaaa

SEQ ID NO: 61577 - RNA, 32 nt, Homo Sapiens
ggcucccgcgcgcggcugagugcggacuggag

SEQ ID NO: 61578 - RNA, 32 nt, Homo Sapiens
guagauugccagcacagugaguuucccagccu

SEQ ID NO: 61579 - RNA, 32 nt, Homo Sapiens
acuuuggucugcuucuacaguggcacaucaac

SEQ ID NO: 61580 - RNA, 32 nt, Homo Sapiens
aacucuaggaaugcuuccuguucuccuucucu

SEQ ID NO: 61581 - RNA, 32 nt, Homo Sapiens
ugguuucucauucuuguuuucuuucuuuaaau

SEQ ID NO: 61582 - RNA, 32 nt, Homo Sapiens
agcauagcauacugccuucugacagacugggu

SEQ ID NO: 61583 - RNA, 32 nt, Homo Sapiens
uggacagccacccaccgagcugcaagguggcu

SEQ ID NO: 61584 - RNA, 32 nt, Homo Sapiens
gaagggagagaaacugaaaaacgcagaaaaua

SEQ ID NO: 61585 - RNA, 32 nt, Homo Sapiens
cugacacaauguuuagauugcuguaucuuuac

SEQ ID NO: 61586 - RNA, 32 nt, Homo Sapiens
uucugacacucccuccuucuuuguaauugcca

SEQ ID NO: 61587 - RNA, 32 nt, Homo Sapiens
gaggagagcgagccagaggaccuugagaaugg

SEQ ID NO: 61588 - RNA, 32 nt, Homo Sapiens
uguucuucgggaacuugcuuccuuucccuggc

SEQ ID NO: 61589 - RNA, 32 nt, Homo Sapiens
gaagucacugcucuuuggucaauauucugauu

SEQ ID NO: 61590 - RNA, 32 nt, Homo Sapiens
cauggaguugauaacaagaagaauaaagggca

SEQ ID NO: 61591 - RNA, 32 nt, Homo Sapiens
gaaggagaagaagcaugauaaauaucggguag

SEQ ID NO: 61592 - RNA, 32 nt, Homo Sapiens
uguagcaugccaguaauuuuuaccaacauccc

SEQ ID NO: 61593 - RNA, 32 nt, Homo Sapiens
aguggagugauguccagagucugugggaaaau

SEQ ID NO: 61594 - RNA, 32 nt, Homo Sapiens
gcgggaggccgcggggcucuccaggacucagu

SEQ ID NO: 61595 - RNA, 32 nt, Homo Sapiens
cgccuguaaucucagcacuuuggguggccaag

SEQ ID NO: 61596 - RNA, 32 nt, Homo Sapiens
caaacucccgcacuagcccggccaccgccucu

SEQ ID NO: 61597 - RNA, 32 nt, Homo Sapiens
guuucuugaagaaugcuugggaucugugagga

SEQ ID NO: 61598 - RNA, 32 nt, Homo Sapiens
guacccucccuccccacccccagcgucaucuc

SEQ ID NO: 61599 - RNA, 32 nt, Homo Sapiens
acaugguaaacucucagcuucuggccaaagac

SEQ ID NO: 61600 - RNA, 32 nt, Homo Sapiens
cggcgcgcgaggggcuggaggugcgggagccg

SEQ ID NO: 61601 - RNA, 32 nt, Homo Sapiens
gagggcagaggaagacccccucuccugugacu

SEQ ID NO: 61602 - RNA, 32 nt, Homo Sapiens
cccuugcugcgugacggggucuccaugcgcuu

SEQ ID NO: 61603 - RNA, 32 nt, Homo Sapiens
gaaugccuuaguaguacuuuggcuucuugaag

SEQ ID NO: 61604 - RNA, 32 nt, Homo Sapiens
ucguggccgccucccgcacgccaggcccgggc

SEQ ID NO: 61605 - RNA, 32 nt, Homo Sapiens
cauccccaccccaagaauuuugaaagcuuuua

SEQ ID NO: 61606 - RNA, 32 nt, Homo Sapiens
augcgugacuccgucucaaaauaaaaauaauc

SEQ ID NO: 61607 - RNA, 32 nt, Homo Sapiens
acuggaaucaagcauuaaaccuagauuaaauc

SEQ ID NO: 61608 - RNA, 32 nt, Homo Sapiens
auggggggccccagccccaggccgggaaggag

SEQ ID NO: 61609 - RNA, 32 nt, Homo Sapiens
ucaaaguuugcaaaggagucagccaugauugc

SEQ ID NO: 61610 - RNA, 32 nt, Homo Sapiens
accagccugggcaacauagugaaaccgucucc

SEQ ID NO: 61611 - RNA, 32 nt, Homo Sapiens
uuccauuuacuuuggauuauacgucauuauga

SEQ ID NO: 61612 - RNA, 32 nt, Homo Sapiens
acaccagcuuccguaauuuccuuuaaaaagcu

SEQ ID NO: 61613 - RNA, 32 nt, Homo Sapiens
caaggacuaaaaugguuuugcauuaaguaaaa

SEQ ID NO: 61614 - RNA, 32 nt, Homo Sapiens
ugguguugugugccuguagucccagcuacuua

SEQ ID NO: 61615 - RNA, 32 nt, Homo Sapiens
aaauauucugaacauuuuucuauucauucauu

SEQ ID NO: 61616 - RNA, 32 nt, Homo Sapiens
uugagguugccuggcuggccccgcucccagag

SEQ ID NO: 61617 - RNA, 32 nt, Homo Sapiens
ccuccacauguucaccuauuaauggaucauca

SEQ ID NO: 61618 - RNA, 31 nt, Homo Sapiens
aucgaacugcacugccugcccagaacgccug

SEQ ID NO: 61619 - RNA, 27 nt, Homo Sapiens
auguugugguccaucagccccucacau

SEQ ID NO: 61620 - RNA, 32 nt, Homo Sapiens
uuuugagucauaggucuguaauuuauagagau

SEQ ID NO: 61621 - RNA, 32 nt, Homo Sapiens
ucccauccacugccaccuuccauuuuguccau

SEQ ID NO: 61622 - RNA, 32 nt, Homo Sapiens
ucuaaggcugagaaccugaggaacccagcugg

SEQ ID NO: 61623 - RNA, 32 nt, Homo Sapiens
gacacaaaacccacauacuuugaaaaucuucu

SEQ ID NO: 61624 - RNA, 32 nt, Homo Sapiens
caaacaauaccugguagcauucucuaaagagu

SEQ ID NO: 61625 - RNA, 32 nt, Homo Sapiens
cccccaacuccauggcuggguuugagccacag

SEQ ID NO: 61626 - RNA, 32 nt, Homo Sapiens
uuuuuguguacuuuuuucaauaaaauaucaaa

SEQ ID NO: 61627 - RNA, 32 nt, Homo Sapiens
ggcguuugaaccugggcaacuccaccuggaau

SEQ ID NO: 61628 - RNA, 32 nt, Homo Sapiens
cucacaguacugguuuccaggaggaagagccu

SEQ ID NO: 61629 - RNA, 32 nt, Homo Sapiens
cccugcucuuucuccuucauuccgcagccucc

SEQ ID NO: 61630 - RNA, 32 nt, Homo Sapiens
agcgugugcggggcggccggcggaggagcagc

SEQ ID NO: 61631 - RNA, 32 nt, Homo Sapiens
auuacagcauggagacuaugucagcagcaaua

SEQ ID NO: 61632 - RNA, 32 nt, Homo Sapiens
ggcugcuaggagagaagugcugaauguuccgu

SEQ ID NO: 61633 - RNA, 32 nt, Homo Sapiens
cuuuauuuggauggccuggcaacaucacauuu

SEQ ID NO: 61634 - RNA, 32 nt, Homo Sapiens
uaaggagaacaaaaauucaguauuauacagau

SEQ ID NO: 61635 - RNA, 32 nt, Homo Sapiens
ucuuuaccuuuuauuucuuuuguaaaugaagc

SEQ ID NO: 61636 - RNA, 32 nt, Homo Sapiens
uuagguuugcggaguuauuuuaaacauaauug

SEQ ID NO: 61637 - RNA, 32 nt, Homo Sapiens
ggaggcuggugggacacggguuggcaagugau

SEQ ID NO: 61638 - RNA, 32 nt, Homo Sapiens
agccucugccagcuccucuggcauccgcccuc

SEQ ID NO: 61639 - RNA, 32 nt, Homo Sapiens
ggcagacccuggugucccuggaccucaccggg

SEQ ID NO: 61640 - RNA, 32 nt, Homo Sapiens
gagcuaugagaauuggugcuaucaccauuagc

SEQ ID NO: 61641 - RNA, 32 nt, Homo Sapiens
ccccaguccugcccggccccucccacccuugc

SEQ ID NO: 61642 - RNA, 32 nt, Homo Sapiens
uuccucuguuuuucuuuuugauuuuuguuuuu

SEQ ID NO: 61643 - RNA, 32 nt, Homo Sapiens
gugauaagaggacuucuuggggccagaacugu

SEQ ID NO: 61644 - RNA, 32 nt, Homo Sapiens
cuugguccagcgagcguugccgggccaggguc

SEQ ID NO: 61645 - RNA, 32 nt, Homo Sapiens
cgcgcgcacagacacacacacacacacacaca

SEQ ID NO: 61646 - RNA, 32 nt, Homo Sapiens
ccggcgcccgcagcccgcggcgcggcauggcu

SEQ ID NO: 61647 - RNA, 32 nt, Homo Sapiens
caaauaagcuuaugaaacuguccguccuaccc

SEQ ID NO: 61648 - RNA, 32 nt, Homo Sapiens
ucuauucugaaucauaucuaguugaaugcaug

SEQ ID NO: 61649 - RNA, 32 nt, Homo Sapiens
uuuauuauuguuaaucuuuucuacagaaugau

SEQ ID NO: 61650 - RNA, 32 nt, Homo Sapiens
cuccccgcccucuucccggcccagggcgccgg

SEQ ID NO: 61651 - RNA, 32 nt, Homo Sapiens
gcaaaauagaaagaauacuaagauacucauuc

SEQ ID NO: 61652 - RNA, 32 nt, Homo Sapiens
gcugugaacgugccacugaauaaagucgggga

SEQ ID NO: 61653 - RNA, 32 nt, Homo Sapiens
caauguuagagguggggccggcugggaggcga

SEQ ID NO: 61654 - RNA, 32 nt, Homo Sapiens
ucuccugcaggcgcugcagauuuugguguauc

SEQ ID NO: 61655 - RNA, 32 nt, Homo Sapiens
ccaggugaccagcgccauguccagccaggugg

SEQ ID NO: 61656 - RNA, 32 nt, Homo Sapiens
ucagaaucauuaaaaaauauuuuuguuuagua

SEQ ID NO: 61657 - RNA, 32 nt, Homo Sapiens
uguuuuuuuguuugaaccuuugaaagaguuua

SEQ ID NO: 61658 - RNA, 32 nt, Homo Sapiens
ucacucacucugggugccuccuccccaggugg

SEQ ID NO: 61659 - RNA, 32 nt, Homo Sapiens
uuuggcccuuucacguuuuucuuaauguuugu

SEQ ID NO: 61660 - RNA, 32 nt, Homo Sapiens
uuuaaguaacuuuuuauagcaagaugauacaa

SEQ ID NO: 61661 - RNA, 32 nt, Homo Sapiens
gaacugaccagcgacugagcggcggccggcgc

SEQ ID NO: 61662 - RNA, 32 nt, Homo Sapiens
cugcucgugggccugcucugcacugugcugca

SEQ ID NO: 61663 - RNA, 32 nt, Homo Sapiens
acugcuggaagggccagggucugggggugccc

SEQ ID NO: 61664 - RNA, 32 nt, Homo Sapiens
gaggcggccucgccgcgcccgcgccuucggga

SEQ ID NO: 61665 - RNA, 32 nt, Homo Sapiens
uucuggaacgucugagguuaucaauaagcucc

SEQ ID NO: 61666 - RNA, 32 nt, Homo Sapiens
aacuguauuuugcauuuugucuacuuguaagu

SEQ ID NO: 61667 - RNA, 32 nt, Homo Sapiens
cguuccaagcuggaucucgaggagguggugaa

SEQ ID NO: 61668 - RNA, 32 nt, Homo Sapiens
auccagaacuaccaccugacauuccuugcuga

SEQ ID NO: 61669 - RNA, 32 nt, Homo Sapiens
cugaugacgucuggucuuuucuuuucauugua

SEQ ID NO: 61670 - RNA, 32 nt, Homo Sapiens
caucucuuguacacauuuuaauaaaauaaggg

SEQ ID NO: 61671 - RNA, 32 nt, Homo Sapiens
uuaguucugucacccauuucgucaagugaccu

SEQ ID NO: 61672 - RNA, 32 nt, Homo Sapiens
uuuguacugauguagcccugagguaguucaug

SEQ ID NO: 61673 - RNA, 32 nt, Homo Sapiens
ggauaauaugaaacaauauaaguaaaacacuc

SEQ ID NO: 61674 - RNA, 32 nt, Homo Sapiens
cgcuucaauauggcugcccccagggagagacg

SEQ ID NO: 61675 - RNA, 32 nt, Homo Sapiens
acaguuauuuaacaggcauacacaagcaggga

SEQ ID NO: 61676 - RNA, 32 nt, Homo Sapiens
ggggaacagccuggaacagaccacccacugag

SEQ ID NO: 61677 - RNA, 32 nt, Homo Sapiens
acgugggaaauaugaaccuuugaaaguuaauc

SEQ ID NO: 61678 - RNA, 31 nt, Homo Sapiens
aaugauaacaauaaaugcuuacuuagugaaa

SEQ ID NO: 61679 - RNA, 30 nt, Homo Sapiens
ucgcaacugcuugccacucgucccgugccu

SEQ ID NO: 61680 - RNA, 32 nt, Homo Sapiens
gaguaaggauauguauuucuuaaaaguuaguu

SEQ ID NO: 61681 - RNA, 32 nt, Homo Sapiens
cacaaucaaaaauagaggucuggaaaauuuug

SEQ ID NO: 61682 - RNA, 32 nt, Homo Sapiens
ccauacagugauuaugcuugucaucgcuggug

SEQ ID NO: 61683 - RNA, 32 nt, Homo Sapiens
gauuauuuacuuuguuuauugucuauaugccu

SEQ ID NO: 61684 - RNA, 32 nt, Homo Sapiens
ugcucuugaggacgcgagcgacuucccuagga

SEQ ID NO: 61685 - RNA, 32 nt, Homo Sapiens
guguuuuuuguuuuuaaauaauuaaaacgggu

SEQ ID NO: 61686 - RNA, 32 nt, Homo Sapiens
uauaggacuggggcuuggagaaaaugagcaga

SEQ ID NO: 61687 - RNA, 32 nt, Homo Sapiens
aggagaaauaaucauauucguaauuucaaaag

SEQ ID NO: 61688 - RNA, 32 nt, Homo Sapiens
gaagaacuauuuuuagccuucuuuuucugcac

SEQ ID NO: 61689 - RNA, 32 nt, Homo Sapiens
gaauuccuuaagauugagaauaugucacugag

SEQ ID NO: 61690 - RNA, 32 nt, Homo Sapiens
ggggcugcaccucggaccagggcuucugcugc

SEQ ID NO: 61691 - RNA, 32 nt, Homo Sapiens
aguaacaaaaauaaaaacucuuauaaauuucu

SEQ ID NO: 61692 - RNA, 32 nt, Homo Sapiens
uugggagugcagccuucauucugaacccauuu

SEQ ID NO: 61693 - RNA, 32 nt, Homo Sapiens
gccugggaucuccuugccccagccugacaggc

SEQ ID NO: 61694 - RNA, 32 nt, Homo Sapiens
aauucuaguuggaaacaaaguuaguguugacu

SEQ ID NO: 61695 - RNA, 32 nt, Homo Sapiens
gcuuuagagucuucuaaaauagcuuagauguu

SEQ ID NO: 61696 - RNA, 32 nt, Homo Sapiens
aaaaagauacgacacuaauuuaccacauucuu

SEQ ID NO: 61697 - RNA, 31 nt, Homo Sapiens
caagacagucaucagaaccaguaaauauccg

SEQ ID NO: 61698 - RNA, 32 nt, Homo Sapiens
uggaugagucagcugggaauauuguucuugug

SEQ ID NO: 61699 - RNA, 32 nt, Homo Sapiens
ccaguauguucuucuuuuuuauguaagggaca

SEQ ID NO: 61700 - RNA, 32 nt, Homo Sapiens
cugcugggagugggagugacucccccaccucg

SEQ ID NO: 61701 - RNA, 32 nt, Homo Sapiens
uuuagaaacugggaucaugaguggaaaaacaa

SEQ ID NO: 61702 - RNA, 32 nt, Homo Sapiens
ucuuucaauauuugaacugcuaagcaaugaca

SEQ ID NO: 61703 - RNA, 32 nt, Homo Sapiens
aggcuagugucugcgcgucacugugguuuuag

SEQ ID NO: 61704 - RNA, 32 nt, Homo Sapiens
cgucggacuauuccgaagaaguggccaccucc

SEQ ID NO: 61705 - RNA, 32 nt, Homo Sapiens
uccccagaguaggggagaagguugggguguag

SEQ ID NO: 61706 - RNA, 32 nt, Homo Sapiens
uguaaaauauaacgaucucuuaaaaauaccac

SEQ ID NO: 61707 - RNA, 32 nt, Homo Sapiens
ccacuugcauuacauguauuucagaguagguc

SEQ ID NO: 61708 - RNA, 32 nt, Homo Sapiens
aauagacacuucaccaaagagcauacacgcgu

SEQ ID NO: 61709 - RNA, 32 nt, Homo Sapiens
augcaguuauauauuuuguuuuuaaaaggggg

SEQ ID NO: 61710 - RNA, 32 nt, Homo Sapiens
cuggcgcgcaggucccggagggggcggcuggc

SEQ ID NO: 61711 - RNA, 32 nt, Homo Sapiens
gaguagauucagauugaaguuuuuggucagaa

SEQ ID NO: 61712 - RNA, 32 nt, Homo Sapiens
cuuguauguuccaggauauguuugggacuuuu

SEQ ID NO: 61713 - RNA, 32 nt, Homo Sapiens
acccugcugcugcuccucccucugacccagac

SEQ ID NO: 61714 - RNA, 32 nt, Homo Sapiens
cgagcggcucugcgguggcgguuugggguggg

SEQ ID NO: 61715 - RNA, 32 nt, Homo Sapiens
ggcacaggacagcccuaugaaaaaauacccaa

SEQ ID NO: 61716 - RNA, 31 nt, Homo Sapiens
agcugguguggguuccaaccauaggaacaca

SEQ ID NO: 61717 - RNA, 32 nt, Homo Sapiens
agagagaggagcuuggguugcuucccuguccc

SEQ ID NO: 61718 - RNA, 32 nt, Homo Sapiens
gcucgcugcuccccggcccgcgccaugcccuc

SEQ ID NO: 61719 - RNA, 32 nt, Homo Sapiens
uauaugacccccgauguguugcccuugcaaaa

SEQ ID NO: 61720 - RNA, 32 nt, Homo Sapiens
ccauucaucuuuccuuugcucuggauacaccg

SEQ ID NO: 61721 - RNA, 32 nt, Homo Sapiens
agccugauccgugccgcccgccgcccggaugg

SEQ ID NO: 61722 - RNA, 32 nt, Homo Sapiens
cuacuggacauaucacaccagcccugauugca

SEQ ID NO: 61723 - RNA, 32 nt, Homo Sapiens
uggaucccccauuuucccccugcacaaucucc

SEQ ID NO: 61724 - RNA, 32 nt, Homo Sapiens
gcugcugcggggauuaccaggugcugggaggc

SEQ ID NO: 61725 - RNA, 32 nt, Homo Sapiens
gcucagaccugugaccccggcgggacccccau

SEQ ID NO: 61726 - RNA, 32 nt, Homo Sapiens
cccuucugucucccugcccucugccauccuga

SEQ ID NO: 61727 - RNA, 27 nt, Homo Sapiens
ggguaguguuuuuucagccccugugac

SEQ ID NO: 61728 - RNA, 32 nt, Homo Sapiens
ggccacagcaccagcucugacaaguccuauca

SEQ ID NO: 61729 - RNA, 32 nt, Homo Sapiens
gacuagucauuaacuuaugauuagcucuaaag

SEQ ID NO: 61730 - RNA, 32 nt, Homo Sapiens
uugaccaagaaaaaagugauucucccagaagc

SEQ ID NO: 61731 - RNA, 32 nt, Homo Sapiens
ccgguuccugagcgauccggcgcgggucuucc

SEQ ID NO: 61732 - RNA, 32 nt, Homo Sapiens
gcugcccagcacgagccugugcucgcccugcc

SEQ ID NO: 61733 - RNA, 32 nt, Homo Sapiens
ggaccccaccugacaggcucugguccaagauc

SEQ ID NO: 61734 - RNA, 32 nt, Homo Sapiens
gcuaaugguagagcguccuugaggcuccauua

SEQ ID NO: 61735 - RNA, 32 nt, Homo Sapiens
ggaacgguucucccuggagacauccgggacac

SEQ ID NO: 61736 - RNA, 32 nt, Homo Sapiens
ggggcgcguggcugcagcggggcccgcguggu

SEQ ID NO: 61737 - RNA, 28 nt, Homo Sapiens
ugagguggguggaugccgaggugagugg

SEQ ID NO: 61738 - RNA, 32 nt, Homo Sapiens
caagagugccccacaggagugccccacagacc

SEQ ID NO: 61739 - RNA, 32 nt, Homo Sapiens
gcggugugacugcacagcgaggugccggaucu

SEQ ID NO: 61740 - RNA, 32 nt, Homo Sapiens
agcuuguccugcccauuccuccagguguugau

SEQ ID NO: 61741 - RNA, 32 nt, Homo Sapiens
uaauguugauaaaaucuuuuguacccaugugu

SEQ ID NO: 61742 - RNA, 32 nt, Homo Sapiens
uaaaagugaacauaaauuauagaguggaaggu

SEQ ID NO: 61743 - RNA, 32 nt, Homo Sapiens
gacucgggcugugcaggggcgaggggagcagg

SEQ ID NO: 61744 - RNA, 32 nt, Homo Sapiens
cccaggcacucuccauuuauuuggggaguucc

SEQ ID NO: 61745 - RNA, 32 nt, Homo Sapiens
cacgccuagcuaauuuuuguauuuuuagcaga

SEQ ID NO: 61746 - RNA, 32 nt, Homo Sapiens
cuugacucccuacuucccgucauuccucacag

SEQ ID NO: 61747 - RNA, 32 nt, Homo Sapiens
guccuccucucuccuccaccgggacugcuggu

SEQ ID NO: 61748 - RNA, 32 nt, Homo Sapiens
cugcugcauguacauauuuucuguaaauauac

SEQ ID NO: 61749 - RNA, 32 nt, Homo Sapiens
ugagcccucccccuugggaucccgcagcugac

SEQ ID NO: 61750 - RNA, 32 nt, Homo Sapiens
gacgaccaugacgagcucuacuggaugggcgc

SEQ ID NO: 61751 - RNA, 32 nt, Homo Sapiens
uugacuggauaugacauuuuaacauuacuaua

SEQ ID NO: 61752 - RNA, 32 nt, Homo Sapiens
cucccacuucuguggucaacucccugcagaac

SEQ ID NO: 61753 - RNA, 29 nt, Homo Sapiens
caaaauaaaaauuuuaaugaaugaaauaa

SEQ ID NO: 61754 - RNA, 32 nt, Homo Sapiens
ggacgagcagcgcgcuacugcagcuuucuucc

SEQ ID NO: 61755 - RNA, 32 nt, Homo Sapiens
cuaauguuaucccuccccuagcccuccauccc

SEQ ID NO: 61756 - RNA, 32 nt, Homo Sapiens
cacccugcacccgcuauauccaaagaucuagu

SEQ ID NO: 61757 - RNA, 32 nt, Homo Sapiens
gucgcugccugcucuccuggggcugaaggacu

SEQ ID NO: 61758 - RNA, 32 nt, Homo Sapiens
cgauuauccccaacuucucuccuuaggcacua

SEQ ID NO: 61759 - RNA, 32 nt, Homo Sapiens
gucuugggguccagcccuaccccuaccccacg

SEQ ID NO: 61760 - RNA, 32 nt, Homo Sapiens
ugcuugcaggagauggcauauuauugagccaa

SEQ ID NO: 61761 - RNA, 32 nt, Homo Sapiens
gugcuaggaaaugagagcacaguuuugggaaa

SEQ ID NO: 61762 - RNA, 32 nt, Homo Sapiens
ccucccuaccccaccucccaaguaggggcaug

SEQ ID NO: 61763 - RNA, 32 nt, Homo Sapiens
cugugagagaauaauuucuguuguuuuaagcc

SEQ ID NO: 61764 - RNA, 32 nt, Homo Sapiens
agagguugcagugagucgagauugcaccacua

SEQ ID NO: 61765 - RNA, 32 nt, Homo Sapiens
caguuugacuguggccuguuaacugguauaua

SEQ ID NO: 61766 - RNA, 32 nt, Homo Sapiens
acccaugaacucuucacuccuuggggaagcca

SEQ ID NO: 61767 - RNA, 32 nt, Homo Sapiens
ccacuucaggguuguuuguaaugaccguuaua

SEQ ID NO: 61768 - RNA, 32 nt, Homo Sapiens
cuggcuccgcgggcaggacgccgccucggcgg

SEQ ID NO: 61769 - RNA, 30 nt, Homo Sapiens
ucgccguggggcggugccugcgccugagcc

SEQ ID NO: 61770 - RNA, 32 nt, Homo Sapiens
aauguuaugugcucugauuugauauagauaac

SEQ ID NO: 61771 - RNA, 32 nt, Homo Sapiens
ucaugaugcacuuagauaaaagaaugauuagg

SEQ ID NO: 61772 - RNA, 32 nt, Homo Sapiens
auuuuauuguuguagaaguauuuuacauuuuc

SEQ ID NO: 61773 - RNA, 32 nt, Homo Sapiens
ugcucgaggaggccuggggucugugaggcagc

SEQ ID NO: 61774 - RNA, 32 nt, Homo Sapiens
gugacucacauaaaaucaggaacuugacacag

SEQ ID NO: 61775 - RNA, 32 nt, Homo Sapiens
cagauaaaggauaacuuuuuacgguuuuaaaa

SEQ ID NO: 61776 - RNA, 32 nt, Homo Sapiens
uucucuuuccuacuccuauuaaagaaccucgu

SEQ ID NO: 61777 - RNA, 32 nt, Homo Sapiens
acagcaauucuaugagugcucacugagauacu

SEQ ID NO: 61778 - RNA, 32 nt, Homo Sapiens
cugcgugccaguccgccuccgcgugguccggc

SEQ ID NO: 61779 - RNA, 32 nt, Homo Sapiens
uaaaccagugauuacaccuggccaucccucua

SEQ ID NO: 61780 - RNA, 32 nt, Homo Sapiens
agaagcgugucugggucuggagaagggugcuu

SEQ ID NO: 61781 - RNA, 32 nt, Homo Sapiens
ugcccucggcccggacuucagacugcaggggg

SEQ ID NO: 61782 - RNA, 32 nt, Homo Sapiens
gggcaguucgggcuuuggccuucagucuucca

SEQ ID NO: 61783 - RNA, 30 nt, Homo Sapiens
ggggauguuugugcugcagacaaaaagaac

SEQ ID NO: 61784 - RNA, 32 nt, Homo Sapiens
aggcucucaaaacagcagaacaaugaaacaua

SEQ ID NO: 61785 - RNA, 32 nt, Homo Sapiens
agcagaaagaauuuauucuccuccccuucuug

SEQ ID NO: 61786 - RNA, 32 nt, Homo Sapiens
cgcacuucagaauuccauaucuugcgaaucca

SEQ ID NO: 61787 - RNA, 32 nt, Homo Sapiens
uaaaauguuuccauggaauauuccuuggauua

SEQ ID NO: 61788 - RNA, 32 nt, Homo Sapiens
caaaaaaaguuuaaaucacauaaaaagccaau

SEQ ID NO: 61789 - RNA, 32 nt, Homo Sapiens
ccuccgguucccucucaccccauggcugugaa

SEQ ID NO: 61790 - RNA, 32 nt, Homo Sapiens
acggcuuuuuaaaauuuguaugauuauaauau

SEQ ID NO: 61791 - RNA, 32 nt, Homo Sapiens
uguuugguaaauguuucuuuuguuugguaaau

SEQ ID NO: 61792 - RNA, 32 nt, Homo Sapiens
uuccccucuaaagccuuuuuuggugauuauuc

SEQ ID NO: 61793 - RNA, 32 nt, Homo Sapiens
gcgcccgcuccucggcgcagcauguuccagcc

SEQ ID NO: 61794 - RNA, 32 nt, Homo Sapiens
caugccugccuggccugguagagaagauggca

SEQ ID NO: 61795 - RNA, 32 nt, Homo Sapiens
uagaaguggugucuuuacauaauuuuuugugu

SEQ ID NO: 61796 - RNA, 32 nt, Homo Sapiens
ggaaaaaugaccauguucaaggaggcagugac

SEQ ID NO: 61797 - RNA, 32 nt, Homo Sapiens
agucagcggaagcucccguuaugcccuuugcu

SEQ ID NO: 61798 - RNA, 32 nt, Homo Sapiens
gagagucagguggcagcuguaucguuucgaug

SEQ ID NO: 61799 - RNA, 32 nt, Homo Sapiens
cuuuuuguucagcaacauuuaguguuucagug

SEQ ID NO: 61800 - RNA, 32 nt, Homo Sapiens
cugcucccaccucuccuucucuuucccugaaa

SEQ ID NO: 61801 - RNA, 32 nt, Homo Sapiens
gucuacuuguuacuauccaucuccaggcucug

SEQ ID NO: 61802 - RNA, 32 nt, Homo Sapiens
aauggaggaauuggggaggagauucuuccuac

SEQ ID NO: 61803 - RNA, 32 nt, Homo Sapiens
uaaaaccugugcugcgaaugaugacuucugcu

SEQ ID NO: 61804 - RNA, 32 nt, Homo Sapiens
agccagcucaucagcucagagcccagggucag

SEQ ID NO: 61805 - RNA, 32 nt, Homo Sapiens
guaaaauggugauuguagauaagauuaguucc

SEQ ID NO: 61806 - RNA, 32 nt, Homo Sapiens
uuuuuuaaaugauuccaaauaaaacuugagcc

SEQ ID NO: 61807 - RNA, 32 nt, Homo Sapiens
auuuucauucacaacuaugaaaucgcugcuca

SEQ ID NO: 61808 - RNA, 32 nt, Homo Sapiens
gcagcagcauggccugggggcugcuggacuga

SEQ ID NO: 61809 - RNA, 32 nt, Homo Sapiens
caucgagaggcuuuaaaacaacuguuuagugg

SEQ ID NO: 61810 - RNA, 32 nt, Homo Sapiens
ccuucuguuguccugugcauuauaauauacaa

SEQ ID NO: 61811 - RNA, 32 nt, Homo Sapiens
ucuugucuucccuacuuuauuaggacuugccc

SEQ ID NO: 61812 - RNA, 32 nt, Homo Sapiens
ucacauuaauaaaaaucacaagcuuuaauaac

SEQ ID NO: 61813 - RNA, 32 nt, Homo Sapiens
cacugucuucucauguucuuccguggggcauu

SEQ ID NO: 61814 - RNA, 32 nt, Homo Sapiens
cccggguucacgcccuucuccugccucagccu

SEQ ID NO: 61815 - RNA, 32 nt, Homo Sapiens
uuuguaaaacagugcauuuuucagauuuguuu

SEQ ID NO: 61816 - RNA, 32 nt, Homo Sapiens
gugaagcuuuacgcgcacacggacaaaaugcc

SEQ ID NO: 61817 - RNA, 32 nt, Homo Sapiens
aaaacaguuauuuggugacuagaaaggcaagg

SEQ ID NO: 61818 - RNA, 32 nt, Homo Sapiens
caguuucuguuguuucuuuuauguggugguuu

SEQ ID NO: 61819 - RNA, 32 nt, Homo Sapiens
guauguuauuuuuaaccaaaauguaaaguucu

SEQ ID NO: 61820 - RNA, 32 nt, Homo Sapiens
uuucaggaaaauuuaaaauucaagugagaagu

SEQ ID NO: 61821 - RNA, 32 nt, Homo Sapiens
gauacaaguuugggguuaacauggagauggug

SEQ ID NO: 61822 - RNA, 32 nt, Homo Sapiens
cccuccuugagccccaguucaaggcccaggaa

SEQ ID NO: 61823 - RNA, 30 nt, Homo Sapiens
cagggggcgcccguggaacuggcucccugc

SEQ ID NO: 61824 - RNA, 32 nt, Homo Sapiens
gaccguguguuacugcuuugccgacggggccu

SEQ ID NO: 61825 - RNA, 32 nt, Homo Sapiens
agacuguggaagagauuacaaacaaggcccga

SEQ ID NO: 61826 - RNA, 32 nt, Homo Sapiens
ggggaucuguuguguacguggagagggaugag

SEQ ID NO: 61827 - RNA, 32 nt, Homo Sapiens
ccuuuuagucuaauaucuuuccaggucauacu

SEQ ID NO: 61828 - RNA, 31 nt, Homo Sapiens
aguuaucuacagauguuaggauauguccaca

SEQ ID NO: 61829 - RNA, 32 nt, Homo Sapiens
ccucccuccgccaaggacucacggccaagcca

SEQ ID NO: 61830 - RNA, 32 nt, Homo Sapiens
cccgacucuccccaggcccccggugggcaugg

SEQ ID NO: 61831 - RNA, 32 nt, Homo Sapiens
ugaccuuauuuuaccuguucucucuucuccuc

SEQ ID NO: 61832 - RNA, 32 nt, Homo Sapiens
uuguuaagcugauauuuuaaagauuucugagc

SEQ ID NO: 61833 - RNA, 32 nt, Homo Sapiens
guugcuguguggaaacucaacucucuggaacu

SEQ ID NO: 61834 - RNA, 32 nt, Homo Sapiens
cgagaagcucuugugaauaaaagcaggguugg

SEQ ID NO: 61835 - RNA, 32 nt, Homo Sapiens
ugauuuuuucuuuguuaaaucuaauuugcagu

SEQ ID NO: 61836 - RNA, 30 nt, Homo Sapiens
cuggggccaggcugggucgcccuggacugu

SEQ ID NO: 61837 - RNA, 32 nt, Homo Sapiens
ccauuuagaucuuuaaugcuuuggaaaugcgu

SEQ ID NO: 61838 - RNA, 32 nt, Homo Sapiens
uggaccuugacucuuccacaccugccuauacu

SEQ ID NO: 61839 - RNA, 32 nt, Homo Sapiens
ccucugguacacgucucacgucucucugucca

SEQ ID NO: 61840 - RNA, 32 nt, Homo Sapiens
aggauuucuaguuucugugggcuaauuaaaua

SEQ ID NO: 61841 - RNA, 32 nt, Homo Sapiens
uuuuucuuuacauuauuuuaaaaugacaauau

SEQ ID NO: 61842 - RNA, 32 nt, Homo Sapiens
ccggcggcgcuaaacguuuucuuuuuuccgag

SEQ ID NO: 61843 - RNA, 32 nt, Homo Sapiens
uccuuccucaagccccucugugccccuagagc

SEQ ID NO: 61844 - RNA, 32 nt, Homo Sapiens
gaagacugagccagauuggccaauuaaaaacg

SEQ ID NO: 61845 - RNA, 31 nt, Homo Sapiens
gcugcaagucacugccuuccaagugcagcaa

SEQ ID NO: 61846 - RNA, 32 nt, Homo Sapiens
auaguggaaaauuuucaguagcuaauuuaaaa

SEQ ID NO: 61847 - RNA, 32 nt, Homo Sapiens
agagggaggaggaggccuccaggggcgcggag

SEQ ID NO: 61848 - RNA, 32 nt, Homo Sapiens
gcaggccaaggggacaugccugccaccaccua

SEQ ID NO: 61849 - RNA, 32 nt, Homo Sapiens
ugccugcaaaaauaaaaugcagaacguacucu

SEQ ID NO: 61850 - RNA, 32 nt, Homo Sapiens
ucacauuguucuauuuuuauguuuucauuuuu

SEQ ID NO: 61851 - RNA, 32 nt, Homo Sapiens
acgauggguuuguuucuguuuucuuggguggg

SEQ ID NO: 61852 - RNA, 26 nt, Homo Sapiens
ucauaauaaaauuauuugauacuuuu

SEQ ID NO: 61853 - RNA, 32 nt, Homo Sapiens
agucagaguucaggcagaacuguuugauaguu

SEQ ID NO: 61854 - RNA, 32 nt, Homo Sapiens
agugcccuauuaccucuuucacaucauggcac

SEQ ID NO: 61855 - RNA, 32 nt, Homo Sapiens
cauggugguuugcugcacccaucaaccuguca

SEQ ID NO: 61856 - RNA, 32 nt, Homo Sapiens
ccacagaaacaucaucuugaaauaaagaagag

SEQ ID NO: 61857 - RNA, 32 nt, Homo Sapiens
aaaaaagaaaagacaugaaaaacauacuauuc

SEQ ID NO: 61858 - RNA, 32 nt, Homo Sapiens
ccagagccaguacccaggggcuaaggauuaag

SEQ ID NO: 61859 - RNA, 32 nt, Homo Sapiens
aagccucccccggaagacccucccgcugcccg

SEQ ID NO: 61860 - RNA, 32 nt, Homo Sapiens
acuauagacauuacuugcauuaucuccuauca

SEQ ID NO: 61861 - RNA, 32 nt, Homo Sapiens
uguugaaaagauuguugucuuaagcauuaaua

SEQ ID NO: 61862 - RNA, 32 nt, Homo Sapiens
gaaauuaagaggaugauggcuucuuucuguca

SEQ ID NO: 61863 - RNA, 32 nt, Homo Sapiens
uuuggcuuuguuuuucugaauggauggagacu

SEQ ID NO: 61864 - RNA, 32 nt, Homo Sapiens
acucagauugaucuuggagugugcaguggccc

SEQ ID NO: 61865 - RNA, 32 nt, Homo Sapiens
acaaggucaggaguuugagaccagccuagcca

SEQ ID NO: 61866 - RNA, 32 nt, Homo Sapiens
uuuccaugucuguauguccgugcuuagcuuau

SEQ ID NO: 61867 - RNA, 32 nt, Homo Sapiens
cgguccucccugugggcaccagcccucuuggu

SEQ ID NO: 61868 - RNA, 32 nt, Homo Sapiens
gaaaauggacuuuuauuuucucucuguuuggu

SEQ ID NO: 61869 - RNA, 32 nt, Homo Sapiens
caggugagcuuccagggcugcucugccccagu

SEQ ID NO: 61870 - RNA, 32 nt, Homo Sapiens
cuaccacugcugaugcaaaaccacaaagggac

SEQ ID NO: 61871 - RNA, 32 nt, Homo Sapiens
ugagccaucgaggccgccgccgggccaguugc

SEQ ID NO: 61872 - RNA, 32 nt, Homo Sapiens
acugcgguuccuguuacucagcagccucaaaa

SEQ ID NO: 61873 - RNA, 32 nt, Homo Sapiens
uaauuugcuucuuuuucaauguagugcuugaa

SEQ ID NO: 61874 - RNA, 32 nt, Homo Sapiens
aaucuacaccaaugaaaacauguacuacagcu

SEQ ID NO: 61875 - RNA, 32 nt, Homo Sapiens
guagcgcgaggccgggcuaggcccguacggcg

SEQ ID NO: 61876 - RNA, 32 nt, Homo Sapiens
gaaaccuugugcuucuugccucuugaggacau

SEQ ID NO: 61877 - RNA, 32 nt, Homo Sapiens
ccagguuuggcuuacaacccagugucccggaa

SEQ ID NO: 61878 - RNA, 32 nt, Homo Sapiens
ugacagacaugcaugcaugcaaugcaggcuga

SEQ ID NO: 61879 - RNA, 28 nt, Homo Sapiens
acaauguccaugaacaauuccaaacagc

SEQ ID NO: 61880 - RNA, 32 nt, Homo Sapiens
ccgaccuucgcaggauucuguucgcauagccc

SEQ ID NO: 61881 - RNA, 32 nt, Homo Sapiens
uagagaagaaaagagagaagaaccagauagac

SEQ ID NO: 61882 - RNA, 32 nt, Homo Sapiens
accuucccaagacccaggaucauguacccgag

SEQ ID NO: 61883 - RNA, 32 nt, Homo Sapiens
gacccugcacaccaggaucaccgcagcaucug

SEQ ID NO: 61884 - RNA, 32 nt, Homo Sapiens
uugagaagaauguugacaugauguauaagaau

SEQ ID NO: 61885 - RNA, 32 nt, Homo Sapiens
ccagagccagucgggacaccccccgcagcccg

SEQ ID NO: 61886 - RNA, 32 nt, Homo Sapiens
agaaaaaacugggaccuaaguauaaauaucuc

SEQ ID NO: 61887 - RNA, 32 nt, Homo Sapiens
ugacccucaugcuucaaucacuauuuaucuuu

SEQ ID NO: 61888 - RNA, 32 nt, Homo Sapiens
guugucuuuccacaguaguaaagcuuuggcac

SEQ ID NO: 61889 - RNA, 32 nt, Homo Sapiens
cauuuuagaaauguggaaauggaggcaucagg

SEQ ID NO: 61890 - RNA, 32 nt, Homo Sapiens
uuuaugaucccggcuuaaaaccacugaccauc

SEQ ID NO: 61891 - RNA, 32 nt, Homo Sapiens
guuggaccuaaaacugcuuucaagaacucagu

SEQ ID NO: 61892 - RNA, 32 nt, Homo Sapiens
uaaucuuuuuaaaaacugcugugguuuugcug

SEQ ID NO: 61893 - RNA, 32 nt, Homo Sapiens
acaagauguuucuauuugaagugaaguuauaa

SEQ ID NO: 61894 - RNA, 32 nt, Homo Sapiens
gcagggagaaaguggauauagagaaucaugca

SEQ ID NO: 61895 - RNA, 32 nt, Homo Sapiens
aauggugacuaauguucuggaacuuucccauu

SEQ ID NO: 61896 - RNA, 32 nt, Homo Sapiens
uuagggacuguaguggauuauggccaagcagc

SEQ ID NO: 61897 - RNA, 32 nt, Homo Sapiens
caccugaccaaaugccgccaaccccgagggcc

SEQ ID NO: 61898 - RNA, 32 nt, Homo Sapiens
acucaccuuuuuucuuuuucuuuuuuuuuuuu

SEQ ID NO: 61899 - RNA, 32 nt, Homo Sapiens
uugccugagccugggaguucaggacaagccug

SEQ ID NO: 61900 - RNA, 32 nt, Homo Sapiens
guagugaugucucucucccagcccuuauaugu

SEQ ID NO: 61901 - RNA, 32 nt, Homo Sapiens
gccgcgacgcaggagcugcugcugcaguugca

SEQ ID NO: 61902 - RNA, 32 nt, Homo Sapiens
gcguaguggcagcugggguuagugcuaucugu

SEQ ID NO: 61903 - RNA, 32 nt, Homo Sapiens
aggugccugagaugaaacuuccugagaugaaa

SEQ ID NO: 61904 - RNA, 32 nt, Homo Sapiens
uuucccuugauuauguguauugaucacccugc

SEQ ID NO: 61905 - RNA, 32 nt, Homo Sapiens
uccagccuauuccaaugacugaaacccuucuu

SEQ ID NO: 61906 - RNA, 31 nt, Homo Sapiens
aauccagugaaaacucucaguucuuguuuca

SEQ ID NO: 61907 - RNA, 30 nt, Homo Sapiens
cuccagugccugcugaaccaucuuaggguc

SEQ ID NO: 61908 - RNA, 32 nt, Homo Sapiens
uccaggagcauccacacugcaaugauauagga

SEQ ID NO: 61909 - RNA, 32 nt, Homo Sapiens
acauucucuuugcaugauaccaugauagacac

SEQ ID NO: 61910 - RNA, 32 nt, Homo Sapiens
ccucaccaggcacaaguuugcuguacuuauca

SEQ ID NO: 61911 - RNA, 32 nt, Homo Sapiens
aagcuguguccucaugcuaacaugauaaaaaa

SEQ ID NO: 61912 - RNA, 32 nt, Homo Sapiens
uuuggucugaugcugaugaagaguucacaggu

SEQ ID NO: 61913 - RNA, 32 nt, Homo Sapiens
uuucauaauauuuggaauaaaaucucaacuuc

SEQ ID NO: 61914 - RNA, 32 nt, Homo Sapiens
ccugagagcucguuuaaaaugcccuuuuaaga

SEQ ID NO: 61915 - RNA, 32 nt, Homo Sapiens
aggcugcacgaaugaugaguuuuguguauaua

SEQ ID NO: 61916 - RNA, 32 nt, Homo Sapiens
cacugggggagcuuccaggauccugagcagac

SEQ ID NO: 61917 - RNA, 32 nt, Homo Sapiens
ccccagcgugaagccagggcccgggaagcaaa

SEQ ID NO: 61918 - RNA, 28 nt, Homo Sapiens
acuaugaacaaaaaggagcaucugaacu

SEQ ID NO: 61919 - RNA, 32 nt, Homo Sapiens
auuaacuaauuuccucacuccaagcucuuuuc

SEQ ID NO: 61920 - RNA, 32 nt, Homo Sapiens
cuucugcucccucccuagcuuuuccaccagac

SEQ ID NO: 61921 - RNA, 32 nt, Homo Sapiens
gcggcccccugcggaagcuggugcugcagagu

SEQ ID NO: 61922 - RNA, 32 nt, Homo Sapiens
guggggugcaguguuacccccaucugaucaag

SEQ ID NO: 61923 - RNA, 32 nt, Homo Sapiens
gcggcuggccgggcagaggagcuccucacuuc

SEQ ID NO: 61924 - RNA, 32 nt, Homo Sapiens
ucuuugcuugguuuuuuaaguauguauggaau

SEQ ID NO: 61925 - RNA, 32 nt, Homo Sapiens
aucgcagccaguugcgcagagucugggguucc

SEQ ID NO: 61926 - RNA, 32 nt, Homo Sapiens
uuacucuggugacacaaccugugguuacuaag

SEQ ID NO: 61927 - RNA, 32 nt, Homo Sapiens
auuauuaagacuaguauaaaugagaaaaucca

SEQ ID NO: 61928 - RNA, 28 nt, Homo Sapiens
uaacauuuuuuacauauguguuuguguu

SEQ ID NO: 61929 - RNA, 32 nt, Homo Sapiens
aguuaacuagcccaacauauuccuuuaauuca

SEQ ID NO: 61930 - RNA, 32 nt, Homo Sapiens
aacuagauggauuuaaauggucugagccuaug

SEQ ID NO: 61931 - RNA, 32 nt, Homo Sapiens
uagugaugguuuguagccaucuggccagucgc

SEQ ID NO: 61932 - RNA, 32 nt, Homo Sapiens
auuuuggagguaguugguccauaugcaaugag

SEQ ID NO: 61933 - RNA, 32 nt, Homo Sapiens
ccucuuugagugaagcugggagaaccaaaaag

SEQ ID NO: 61934 - RNA, 32 nt, Homo Sapiens
ccuuuucuagguaaaggggggaggcagugugg

SEQ ID NO: 61935 - RNA, 32 nt, Homo Sapiens
caccucuuacguaaagauaagaaugauaaugu

SEQ ID NO: 61936 - RNA, 32 nt, Homo Sapiens
cucuuacugauguaagcuuuggcacucuuuug

SEQ ID NO: 61937 - RNA, 32 nt, Homo Sapiens
auaggagguguugggugguguuauuccgcagu

SEQ ID NO: 61938 - RNA, 32 nt, Homo Sapiens
gcuggaaugccacuucccuuuucuucucaagc

SEQ ID NO: 61939 - RNA, 32 nt, Homo Sapiens
ggcgcaucaauaaaguacuuggaccaguaaaa

SEQ ID NO: 61940 - RNA, 32 nt, Homo Sapiens
gauaagcuuguacaguuaacuuauagaggggg

SEQ ID NO: 61941 - RNA, 32 nt, Homo Sapiens
uggcacuuaggacagcgucuggcuccuucccu

SEQ ID NO: 61942 - RNA, 32 nt, Homo Sapiens
uaaauucauggugacaaguccugggcaguucu

SEQ ID NO: 61943 - RNA, 32 nt, Homo Sapiens
gcgacccccgucccucggccuccccuucccau

SEQ ID NO: 61944 - RNA, 32 nt, Homo Sapiens
uccccaccucuacuccacguaccccaaaaaga

SEQ ID NO: 61945 - RNA, 32 nt, Homo Sapiens
gcuucuuggugcccuccugccccuucugcauc

SEQ ID NO: 61946 - RNA, 31 nt, Homo Sapiens
cuucagauacucucuuugccagaugaaguua

SEQ ID NO: 61947 - RNA, 32 nt, Homo Sapiens
uccuuuuucuucccuuacaaucauccagggcu

SEQ ID NO: 61948 - RNA, 32 nt, Homo Sapiens
cucccucuuuugccacugucugggccccaucu

SEQ ID NO: 61949 - RNA, 32 nt, Homo Sapiens
caggaauguuuuugucccacugacuuaagaca

SEQ ID NO: 61950 - RNA, 32 nt, Homo Sapiens
aaauagaguguucuuuuuuuuaggacuuagaa

SEQ ID NO: 61951 - RNA, 32 nt, Homo Sapiens
cccuacuguaauuguguguuuacuuuuaugau

SEQ ID NO: 61952 - RNA, 32 nt, Homo Sapiens
ugaaauggcugaguugccccaacagcaaagac

SEQ ID NO: 61953 - RNA, 32 nt, Homo Sapiens
uuucuguaguuccuuuuuguuucauuuucuuc

SEQ ID NO: 61954 - RNA, 32 nt, Homo Sapiens
auauacuuguaauucuaaugcaaaauuauaca

SEQ ID NO: 61955 - RNA, 32 nt, Homo Sapiens
gcagcauccugccugcguggacuggcugcuaa

SEQ ID NO: 61956 - RNA, 32 nt, Homo Sapiens
gagacaguggacuucaagaaaaaggaagaacu

SEQ ID NO: 61957 - RNA, 32 nt, Homo Sapiens
agaggaagcaacgggggaagugaggugccaag

SEQ ID NO: 61958 - RNA, 32 nt, Homo Sapiens
uggggcaggcagccuagaucugaugggggaag

SEQ ID NO: 61959 - RNA, 32 nt, Homo Sapiens
cgcgcgggacuccggggcgccacgggggccau

SEQ ID NO: 61960 - RNA, 32 nt, Homo Sapiens
ccagacaccaugaacgcaagugaauuccgaag

SEQ ID NO: 61961 - RNA, 32 nt, Homo Sapiens
guaaggcugagaugaaguggacugaguagaac

SEQ ID NO: 61962 - RNA, 32 nt, Homo Sapiens
ucuuuuggcucaagcaacauguauaucagugu

SEQ ID NO: 61963 - RNA, 32 nt, Homo Sapiens
uaagugcuggcuuuuuccccgauuuacccauu

SEQ ID NO: 61964 - RNA, 32 nt, Homo Sapiens
ugcgcccagucuccggccccggccccucggcg

SEQ ID NO: 61965 - RNA, 32 nt, Homo Sapiens
uuagaaaugaauuuuuuagaccuuaguaaaac

SEQ ID NO: 61966 - RNA, 32 nt, Homo Sapiens
ugccaaguggguagucagacugcugcaaauau

SEQ ID NO: 61967 - RNA, 32 nt, Homo Sapiens
cuggccuucucugcaccucagagugcagaacc

SEQ ID NO: 61968 - RNA, 32 nt, Homo Sapiens
uguagcaaagaggcacaccacacacacacaca

SEQ ID NO: 61969 - RNA, 32 nt, Homo Sapiens
gugcauuaaccucuuccucaccacuaggcuuc

SEQ ID NO: 61970 - RNA, 32 nt, Homo Sapiens
cuccggaguggcccgccaccuccugaagcagg

SEQ ID NO: 61971 - RNA, 32 nt, Homo Sapiens
uuugaagccaaggggcugagcaaucuguguug

SEQ ID NO: 61972 - RNA, 32 nt, Homo Sapiens
gucuucacuagggguacugacaguguuuaagc

SEQ ID NO: 61973 - RNA, 32 nt, Homo Sapiens
agcuguuucuucacuuauugcuuuuuucuaau

SEQ ID NO: 61974 - RNA, 32 nt, Homo Sapiens
aaucggugcgaccgcgcgcgugcgcaguaccg

SEQ ID NO: 61975 - RNA, 32 nt, Homo Sapiens
uauaccuacuuuuaaaaucaacuguuuugaau

SEQ ID NO: 61976 - RNA, 32 nt, Homo Sapiens
cagauacgcucugaccuucggcaaguuacuua

SEQ ID NO: 61977 - RNA, 32 nt, Homo Sapiens
uuguguggcugccccaccugccgcaugcuccc

SEQ ID NO: 61978 - RNA, 32 nt, Homo Sapiens
aguaaaagaaauaccgagugaaaaaacaggaa

SEQ ID NO: 61979 - RNA, 32 nt, Homo Sapiens
ugucuugaggaucuuccuccccggcucaucac

SEQ ID NO: 61980 - RNA, 32 nt, Homo Sapiens
cagagcuuucccuugacuucugagucuagugu

SEQ ID NO: 61981 - RNA, 32 nt, Homo Sapiens
gagguuccaccaugggaccccaggguaccuag

SEQ ID NO: 61982 - RNA, 32 nt, Homo Sapiens
ggggaagcugacucagggcugcggccgggguc

SEQ ID NO: 61983 - RNA, 32 nt, Homo Sapiens
uagggcccgagcuucagcuuccaggaugcuuc

SEQ ID NO: 61984 - RNA, 32 nt, Homo Sapiens
ucucccaucagcccaaacccagagccuuuauc

SEQ ID NO: 61985 - RNA, 32 nt, Homo Sapiens
aagcuauuacagacgaggcaucaggagugaca

SEQ ID NO: 61986 - RNA, 32 nt, Homo Sapiens
ucccuccugccgacuccuggguugagcuguug

SEQ ID NO: 61987 - RNA, 32 nt, Homo Sapiens
acacagagggugggggugagcaggcagugugg

SEQ ID NO: 61988 - RNA, 32 nt, Homo Sapiens
cugagaacauuuacauuauagauaaguaguac

SEQ ID NO: 61989 - RNA, 32 nt, Homo Sapiens
cagagacccccgcuuugcugcucaucccaggg

SEQ ID NO: 61990 - RNA, 32 nt, Homo Sapiens
ugaucccauaugcuaugaguuacugugggguc

SEQ ID NO: 61991 - RNA, 32 nt, Homo Sapiens
caugcuugccccagccugcuucuugcuucccg

SEQ ID NO: 61992 - RNA, 32 nt, Homo Sapiens
uagagaaaaaauauuagugaagaagcccugga

SEQ ID NO: 61993 - RNA, 32 nt, Homo Sapiens
ugaauguaagcaguaugggaaagcguucagac

SEQ ID NO: 61994 - RNA, 32 nt, Homo Sapiens
aaauagauuuauaaaugcaaugucuauauuuu

SEQ ID NO: 61995 - RNA, 31 nt, Homo Sapiens
cgugguuccuaacgugaagugcugugauguu

SEQ ID NO: 61996 - RNA, 32 nt, Homo Sapiens
guucccaguugcuuuucacuuccacuguuccu

SEQ ID NO: 61997 - RNA, 32 nt, Homo Sapiens
cacgagugccacgggcggggcugugcgggcgc

SEQ ID NO: 61998 - RNA, 32 nt, Homo Sapiens
auauacuuuguggaccaauuauugauauauau

SEQ ID NO: 61999 - RNA, 32 nt, Homo Sapiens
ccccgcccaccccaccaaguguacuguacuca

SEQ ID NO: 62000 - RNA, 30 nt, Homo Sapiens
gaaaacauauuuugcuauucugagacaaca

SEQ ID NO: 62001 - RNA, 32 nt, Homo Sapiens
cauucuccccucuccuaggagcucuuuugucu

SEQ ID NO: 62002 - RNA, 30 nt, Homo Sapiens
accacuccuuuuggagacggcaggaggccu

SEQ ID NO: 62003 - RNA, 32 nt, Homo Sapiens
ggacaggucugugccagguaccaggaaggaca

SEQ ID NO: 62004 - RNA, 32 nt, Homo Sapiens
aaacaagauggaggauucggccucggccucgc

SEQ ID NO: 62005 - RNA, 32 nt, Homo Sapiens
uacuggccugaagggugaggagguggaaggag

SEQ ID NO: 62006 - RNA, 32 nt, Homo Sapiens
gccccagcccucggaugcauaagcaaggucag

SEQ ID NO: 62007 - RNA, 32 nt, Homo Sapiens
ccgccggcccagcagagggcgcccaccaaucu

SEQ ID NO: 62008 - RNA, 32 nt, Homo Sapiens
ucgcugggaugggccuggccuaaggcauccua

SEQ ID NO: 62009 - RNA, 32 nt, Homo Sapiens
aaugcaaaaugcuuuucauuggauguucugac

SEQ ID NO: 62010 - RNA, 32 nt, Homo Sapiens
ggcggugggaggaggacucuucucacgaccuc

SEQ ID NO: 62011 - RNA, 32 nt, Homo Sapiens
uuggggcccugacgcaccugcugcucucuggg

SEQ ID NO: 62012 - RNA, 32 nt, Homo Sapiens
aaggucacccccaucgccuacuccauggugaa

SEQ ID NO: 62013 - RNA, 32 nt, Homo Sapiens
aaucuuuucuuucauguagaaaucuacaugua

SEQ ID NO: 62014 - RNA, 32 nt, Homo Sapiens
ccucagggacagagacaccugcaccucccccc

SEQ ID NO: 62015 - RNA, 32 nt, Homo Sapiens
cuacaggugugagccaccaugcccggccuucu

SEQ ID NO: 62016 - RNA, 32 nt, Homo Sapiens
gaggccugaggguggcgggggcggagcgcgcc

SEQ ID NO: 62017 - RNA, 32 nt, Homo Sapiens
ugcuggcagaaucaauuucuucuauccccuca

SEQ ID NO: 62018 - RNA, 32 nt, Homo Sapiens
uuuuuacaccggguagauugagacuuggagug

SEQ ID NO: 62019 - RNA, 32 nt, Homo Sapiens
uacucugugucuagcucagggauuguaaaugc

SEQ ID NO: 62020 - RNA, 29 nt, Homo Sapiens
gcggauuauguggagugaaaguuacaccg

SEQ ID NO: 62021 - RNA, 32 nt, Homo Sapiens
uucaggacacagggugaacuuuucucugaccc

SEQ ID NO: 62022 - RNA, 32 nt, Homo Sapiens
uacugggaauaaaaucagucaauucagaaaag

SEQ ID NO: 62023 - RNA, 32 nt, Homo Sapiens
aguccuacaaauaaugugaaaguuguuaccac

SEQ ID NO: 62024 - RNA, 32 nt, Homo Sapiens
aaacuaccagaccugaauuugcucauguguaa

SEQ ID NO: 62025 - RNA, 32 nt, Homo Sapiens
agcgggccuccuccccgccagccuggggggau

SEQ ID NO: 62026 - RNA, 32 nt, Homo Sapiens
gugauacauguuuuuauuaaagaguaaagccc

SEQ ID NO: 62027 - RNA, 32 nt, Homo Sapiens
cacccuuaaucuggugggcaccaucuaaucag

SEQ ID NO: 62028 - RNA, 32 nt, Homo Sapiens
cacugcacucacucuggucaugauaaauguuc

SEQ ID NO: 62029 - RNA, 32 nt, Homo Sapiens
acguauaaauuaauauaaaaugauuaccucug

SEQ ID NO: 62030 - RNA, 32 nt, Homo Sapiens
ccccucucccucuccgcccucgcccaggcugc

SEQ ID NO: 62031 - RNA, 32 nt, Homo Sapiens
ugcagguuucagaagaagcauggcucugccaa

SEQ ID NO: 62032 - RNA, 32 nt, Homo Sapiens
ugggcuuugaagugggcguggagacggcgggg

SEQ ID NO: 62033 - RNA, 32 nt, Homo Sapiens
cccgcgcguggcagcucggcggcuucucccuu

SEQ ID NO: 62034 - RNA, 32 nt, Homo Sapiens
cucaggaagcugagacacgagaaucacuugaa

SEQ ID NO: 62035 - RNA, 32 nt, Homo Sapiens
aaggaagagucuuuucagcgcugaggacuggc

SEQ ID NO: 62036 - RNA, 32 nt, Homo Sapiens
uaggggguucugcggccuugcacugugggucc

SEQ ID NO: 62037 - RNA, 32 nt, Homo Sapiens
cagaaaaaguuaaaaguauguuuucuaauuaa

SEQ ID NO: 62038 - RNA, 32 nt, Homo Sapiens
cgcgccauggaggcgccgggucgcgccaguau

SEQ ID NO: 62039 - RNA, 32 nt, Homo Sapiens
ucucccacaccccagccauccacacaucuggc

SEQ ID NO: 62040 - RNA, 32 nt, Homo Sapiens
gaaucccagaaagggucugccauggaguuggc

SEQ ID NO: 62041 - RNA, 32 nt, Homo Sapiens
uuuuuacggguaacagugaggcugggaagggg

SEQ ID NO: 62042 - RNA, 32 nt, Homo Sapiens
cccuccucccccgcccgccgccgccgcuguga

SEQ ID NO: 62043 - RNA, 32 nt, Homo Sapiens
cuggaaucagucaugagaagucaagcauggaa

SEQ ID NO: 62044 - RNA, 32 nt, Homo Sapiens
acuucggcaggcccagcuccugcuggccagug

SEQ ID NO: 62045 - RNA, 32 nt, Homo Sapiens
gccuugggaauauuuuuauauauuuuauacag

SEQ ID NO: 62046 - RNA, 32 nt, Homo Sapiens
gucccuggcccuucuggugggcauuugguaug

SEQ ID NO: 62047 - RNA, 32 nt, Homo Sapiens
aaauauuuaaaauaaugaauguaacaccuuuu

SEQ ID NO: 62048 - RNA, 32 nt, Homo Sapiens
gauaucgaagagcaggggguugugaauuucca

SEQ ID NO: 62049 - RNA, 32 nt, Homo Sapiens
acauauuuauucuuauuuucucuccuuucaga

SEQ ID NO: 62050 - RNA, 32 nt, Homo Sapiens
ccuucaauuuaucuuuuucccuguuacaccau

SEQ ID NO: 62051 - RNA, 32 nt, Homo Sapiens
cugcauaugugcucauuuggggaaggacggag

SEQ ID NO: 62052 - RNA, 32 nt, Homo Sapiens
uagaggaauuuauguaaccaugacuuuguaau

SEQ ID NO: 62053 - RNA, 32 nt, Homo Sapiens
agucagccacagagacccuccuccuuucacga

SEQ ID NO: 62054 - RNA, 32 nt, Homo Sapiens
aaggagcccuccccaagccugacccgaguggg

SEQ ID NO: 62055 - RNA, 32 nt, Homo Sapiens
agaaggaggggucugggcaucuguggauuuuu

SEQ ID NO: 62056 - RNA, 32 nt, Homo Sapiens
auaauaaauuuaaugucuuuauguugucacau

SEQ ID NO: 62057 - RNA, 32 nt, Homo Sapiens
gcauacacagaaauggggacugcgagcagaag

SEQ ID NO: 62058 - RNA, 32 nt, Homo Sapiens
ccacacgccaccuucaucuccuccgccgcccc

SEQ ID NO: 62059 - RNA, 31 nt, Homo Sapiens
cgucaguaucacugccugucucugccaccaa

SEQ ID NO: 62060 - RNA, 32 nt, Homo Sapiens
cuccagugggucucauguuguacagaauaaag

SEQ ID NO: 62061 - RNA, 32 nt, Homo Sapiens
ggccaccgguccugccgcucuccuggggcagc

SEQ ID NO: 62062 - RNA, 32 nt, Homo Sapiens
aagcguccgcuuuccuggccaagcagccccca

SEQ ID NO: 62063 - RNA, 32 nt, Homo Sapiens
ugcaggaaccuuuucuugggggugggggaguu

SEQ ID NO: 62064 - RNA, 31 nt, Homo Sapiens
cccggcaugucgcaagggcucccggccgccg

SEQ ID NO: 62065 - RNA, 32 nt, Homo Sapiens
gcggcguggagcggcagccggucuggacgcgc

SEQ ID NO: 62066 - RNA, 32 nt, Homo Sapiens
ccgaggagggucaggcgcggagcuugucgcac

SEQ ID NO: 62067 - RNA, 30 nt, Homo Sapiens
cuuccgggcgcgcaggcgaucaguggguga

SEQ ID NO: 62068 - RNA, 32 nt, Homo Sapiens
aaaacuaaaaaauaaauuuaaaaugugaaccu

SEQ ID NO: 62069 - RNA, 32 nt, Homo Sapiens
uaacggggagcuguuuaucuucugccugucag

SEQ ID NO: 62070 - RNA, 32 nt, Homo Sapiens
ccugcagcggccccuccccuccccuccccccu

SEQ ID NO: 62071 - RNA, 32 nt, Homo Sapiens
auuuuauguauuugaauaucagcaaauugaaa

SEQ ID NO: 62072 - RNA, 32 nt, Homo Sapiens
cagacccugguagggaggggugccgcagccac

SEQ ID NO: 62073 - RNA, 32 nt, Homo Sapiens
agaagagaaaaaugaaguuuauuuuaucuugu

SEQ ID NO: 62074 - RNA, 32 nt, Homo Sapiens
augucuuucauaggugauacaacuuuuuaaaa

SEQ ID NO: 62075 - RNA, 32 nt, Homo Sapiens
gcauuggugacguccagguuguccuugaguaa

SEQ ID NO: 62076 - RNA, 32 nt, Homo Sapiens
gauaagcuauugucuguaauaguuuuauauug

SEQ ID NO: 62077 - RNA, 32 nt, Homo Sapiens
agucuuuguaguucuaucauuagcaucuaaug

SEQ ID NO: 62078 - RNA, 32 nt, Homo Sapiens
ucaggagggcgccccaagggccccaucgcuuc

SEQ ID NO: 62079 - RNA, 32 nt, Homo Sapiens
ggaaaggcgggagagcguuaacuucugagccu

SEQ ID NO: 62080 - RNA, 32 nt, Homo Sapiens
cugauacuuccaauuccuggaaccccagccca

SEQ ID NO: 62081 - RNA, 32 nt, Homo Sapiens
uuaucuccaaacaaaauuuuuguauuugaauc

SEQ ID NO: 62082 - RNA, 32 nt, Homo Sapiens
cccacaggagccaaggagguccugcugcuggc

SEQ ID NO: 62083 - RNA, 32 nt, Homo Sapiens
uguguggagggccggcggggaccgccgggagc

SEQ ID NO: 62084 - RNA, 32 nt, Homo Sapiens
gcucgggucccuucaccuccccgcccuuucuu

SEQ ID NO: 62085 - RNA, 32 nt, Homo Sapiens
ggacuucuuucuuuuucacuuaauuuuaacuu

SEQ ID NO: 62086 - RNA, 32 nt, Homo Sapiens
aagaaaauaagugauauuuaaaguccaaagag

SEQ ID NO: 62087 - RNA, 32 nt, Homo Sapiens
gaaaacugaagaaggaggaauggcuguggggc

SEQ ID NO: 62088 - RNA, 32 nt, Homo Sapiens
uccccagccccggccccgcauccaggccgcca

SEQ ID NO: 62089 - RNA, 32 nt, Homo Sapiens
aagcaguaugagcucuugugggacuuggccgc

SEQ ID NO: 62090 - RNA, 32 nt, Homo Sapiens
ucaaaagcagcccuguuuuccaaauaccuaaa

SEQ ID NO: 62091 - RNA, 32 nt, Homo Sapiens
auagaaaauagcagacaacauaaacaucuuug

SEQ ID NO: 62092 - RNA, 32 nt, Homo Sapiens
ucgacacacgggggccagagagaagccgguug

SEQ ID NO: 62093 - RNA, 32 nt, Homo Sapiens
cccucaggccccagggcaggcaggcugcaggg

SEQ ID NO: 62094 - RNA, 32 nt, Homo Sapiens
caugacuguggcuuuuaaaauaaagaaaugug

SEQ ID NO: 62095 - RNA, 32 nt, Homo Sapiens
ugcaaagacguuuauuaaaugaaaauauuuuu

SEQ ID NO: 62096 - RNA, 32 nt, Homo Sapiens
uucuggcuaaaucuugguaugugguuuuuaaa

SEQ ID NO: 62097 - RNA, 32 nt, Homo Sapiens
aaaguguuuagcaaauacaguagugcucaaua

SEQ ID NO: 62098 - RNA, 32 nt, Homo Sapiens
caugaggauuucuuuaugaggcaaauuuauau

SEQ ID NO: 62099 - RNA, 32 nt, Homo Sapiens
ugaguaaaagcagagagaaguacuuuugauua

SEQ ID NO: 62100 - RNA, 32 nt, Homo Sapiens
cugacaggggaaacaaaacacacaauaaaccc

SEQ ID NO: 62101 - RNA, 32 nt, Homo Sapiens
ccacgcacgcgcuccccuccccggcaggcggg

SEQ ID NO: 62102 - RNA, 32 nt, Homo Sapiens
ggucuguccuucaaggccuccuccgauagugc

SEQ ID NO: 62103 - RNA, 27 nt, Homo Sapiens
cuggaaaauaaauccucuauguuuugc

SEQ ID NO: 62104 - RNA, 32 nt, Homo Sapiens
gggacacaaggugggcugcccucaagccccag

SEQ ID NO: 62105 - RNA, 32 nt, Homo Sapiens
gcauucgaguuuuugucuuucuucucaggugu

SEQ ID NO: 62106 - RNA, 32 nt, Homo Sapiens
cuaauuuaaaauguguuuguuggaggucauua

SEQ ID NO: 62107 - RNA, 32 nt, Homo Sapiens
ucuguauggcagcugggccucgucuguccugg

SEQ ID NO: 62108 - RNA, 32 nt, Homo Sapiens
accugcuggaaugucaccagaauagaaccucu

SEQ ID NO: 62109 - RNA, 32 nt, Homo Sapiens
ucgccuccuucagccuccuccucccucaucug

SEQ ID NO: 62110 - RNA, 32 nt, Homo Sapiens
uagagggaaaaauuauguggaaaauaaaaacu

SEQ ID NO: 62111 - RNA, 32 nt, Homo Sapiens
gggaagaggaaaacgaggcaagaugcugagaa

SEQ ID NO: 62112 - RNA, 32 nt, Homo Sapiens
gauacauggauucuuuucaaaucaggaaagau

SEQ ID NO: 62113 - RNA, 32 nt, Homo Sapiens
gccgaacuccuaaggggccacccaggcagauc

SEQ ID NO: 62114 - RNA, 32 nt, Homo Sapiens
cccuggagaagcugaagccggggacccggggg

SEQ ID NO: 62115 - RNA, 32 nt, Homo Sapiens
aagccaaaguuugggaaucuuaaugaaaccaa

SEQ ID NO: 62116 - RNA, 32 nt, Homo Sapiens
aggcgaaauggcagaagcaaauccccggagag

SEQ ID NO: 62117 - RNA, 32 nt, Homo Sapiens
cugggggcggccuggggcugagcauggagcag

SEQ ID NO: 62118 - RNA, 32 nt, Homo Sapiens
uccucggcggguggcggugguggccguagcgg

SEQ ID NO: 62119 - RNA, 32 nt, Homo Sapiens
acaucaaucaaauauauagagauguacauuug

SEQ ID NO: 62120 - RNA, 32 nt, Homo Sapiens
agaugugacuacugagggcaguccugaguguu

SEQ ID NO: 62121 - RNA, 32 nt, Homo Sapiens
gcagaggaaagucuuucugccuuuuuauaauu

SEQ ID NO: 62122 - RNA, 32 nt, Homo Sapiens
ugcccaucuggccuauaccccagccguggggc

SEQ ID NO: 62123 - RNA, 29 nt, Homo Sapiens
uuguaagguauuuacuauuuucuguggag

SEQ ID NO: 62124 - RNA, 32 nt, Homo Sapiens
ucagcuuuucagcagcagacacuccaccccaa

SEQ ID NO: 62125 - RNA, 32 nt, Homo Sapiens
uagcaucaguuugaagcuuuuguuaugacuua

SEQ ID NO: 62126 - RNA, 32 nt, Homo Sapiens
uuacuaacugugguuugcacccuaacacucug

SEQ ID NO: 62127 - RNA, 32 nt, Homo Sapiens
uucugucacaaaccacauuaaauuguaaauaa

SEQ ID NO: 62128 - RNA, 32 nt, Homo Sapiens
aaagaaauuucugagcagcaaagcauucaaga

SEQ ID NO: 62129 - RNA, 32 nt, Homo Sapiens
acugggaggaucuggauugguugaugaauuaa

SEQ ID NO: 62130 - RNA, 32 nt, Homo Sapiens
gcgggggcgcucugccagccccgggaacagca

SEQ ID NO: 62131 - RNA, 32 nt, Homo Sapiens
cgggggaggagcggagcgggcugggggccagg

SEQ ID NO: 62132 - RNA, 27 nt, Homo Sapiens
uguccuucccacuucagcccuccggag

SEQ ID NO: 62133 - RNA, 32 nt, Homo Sapiens
gaagauaggaagcucaucagauagaacaucag

SEQ ID NO: 62134 - RNA, 32 nt, Homo Sapiens
cgcgccccacccaccggccgcuccuccccucu

SEQ ID NO: 62135 - RNA, 32 nt, Homo Sapiens
uggccugaggagcagcccugccugcugcucuu

SEQ ID NO: 62136 - RNA, 32 nt, Homo Sapiens
agaagggcagacucacgaauuuuuuagaaaac

SEQ ID NO: 62137 - RNA, 31 nt, Homo Sapiens
gaccaagcgaugcgccugcccgccucccacc

SEQ ID NO: 62138 - RNA, 32 nt, Homo Sapiens
gcaaauggaaaaccaguuaaugcuuuaauuuu

SEQ ID NO: 62139 - RNA, 32 nt, Homo Sapiens
cuuuaagguaagcucacacagagguggccaug

SEQ ID NO: 62140 - RNA, 32 nt, Homo Sapiens
auacugguugccugagaucugguuucaaguuu

SEQ ID NO: 62141 - RNA, 32 nt, Homo Sapiens
cauuuucuaaauguggagacaggaggagguga

SEQ ID NO: 62142 - RNA, 32 nt, Homo Sapiens
ugcuaacccacccugcaugcagggagucagag

SEQ ID NO: 62143 - RNA, 32 nt, Homo Sapiens
uccucuccacuuuaucccacgauaucuaaaug

SEQ ID NO: 62144 - RNA, 32 nt, Homo Sapiens
ggcggcccugggcggggugcugggugcgcugc

SEQ ID NO: 62145 - RNA, 32 nt, Homo Sapiens
uucucgccgccgagccgagggccggcgggggc

SEQ ID NO: 62146 - RNA, 32 nt, Homo Sapiens
uaaggagcaccaacucuagaaaaggcuauaug

SEQ ID NO: 62147 - RNA, 32 nt, Homo Sapiens
uuaucaagaaagaaauauuaaaacuucacugu

SEQ ID NO: 62148 - RNA, 32 nt, Homo Sapiens
gaaaacacuaaugauggacaacuuuuuggugu

SEQ ID NO: 62149 - RNA, 32 nt, Homo Sapiens
aggauggguggagcagggaagagccaggaugg

SEQ ID NO: 62150 - RNA, 32 nt, Homo Sapiens
ccuuuggccgaagguuugauaagauuuuguag

SEQ ID NO: 62151 - RNA, 32 nt, Homo Sapiens
aauuuauggucucauuauuugaggguagucuu

SEQ ID NO: 62152 - RNA, 32 nt, Homo Sapiens
guccacuggaagucccauuauggauguugaaa

SEQ ID NO: 62153 - RNA, 32 nt, Homo Sapiens
aucugucacaggaaacagaagcccaggcacaa

SEQ ID NO: 62154 - RNA, 32 nt, Homo Sapiens
auguucaacgauuuaaauuuuuuuuuauuuuu

SEQ ID NO: 62155 - RNA, 32 nt, Homo Sapiens
ugcucgggcggcagcgacugcugcugcggaug

SEQ ID NO: 62156 - RNA, 32 nt, Homo Sapiens
ggcaguggaaagggguucgggcucggggggcg

SEQ ID NO: 62157 - RNA, 32 nt, Homo Sapiens
cagaauuuuuaaaguaccauuugaaugaucuu

SEQ ID NO: 62158 - RNA, 32 nt, Homo Sapiens
agcuacagcuggaaaggcugcuugcggaagug

SEQ ID NO: 62159 - RNA, 32 nt, Homo Sapiens
uccuugcacuaacgcgaguuugccccaccuac

SEQ ID NO: 62160 - RNA, 32 nt, Homo Sapiens
uuuaagcuuuugcgguaacuuguauauauucu

SEQ ID NO: 62161 - RNA, 32 nt, Homo Sapiens
uucaucauuuauccuuuuuuaagggacuuccu

SEQ ID NO: 62162 - RNA, 32 nt, Homo Sapiens
acaggauauaaagggaucaaccuagagguggg

SEQ ID NO: 62163 - RNA, 32 nt, Homo Sapiens
cguucucaaaauccuuugcaccucaaguuagg

SEQ ID NO: 62164 - RNA, 32 nt, Homo Sapiens
gcuuauugauucaaugagguuucucuaaagac

SEQ ID NO: 62165 - RNA, 32 nt, Homo Sapiens
guuaaugcuuauauauaaucuaaccaaagagu

SEQ ID NO: 62166 - RNA, 32 nt, Homo Sapiens
accuccaccucccagguucaagugauucucau

SEQ ID NO: 62167 - RNA, 32 nt, Homo Sapiens
accuccgccucccggguucaaaugauucucgu

SEQ ID NO: 62168 - RNA, 32 nt, Homo Sapiens
agcugucuuuuggaggacguacguaauaaggu

SEQ ID NO: 62169 - RNA, 32 nt, Homo Sapiens
gagaccaucuucuaucuucuuuccaccuuucu

SEQ ID NO: 62170 - RNA, 32 nt, Homo Sapiens
auuucuuuuuuggcacaugugaaucuuguuuu

SEQ ID NO: 62171 - RNA, 32 nt, Homo Sapiens
guguacccauucuguuucaggagcucuucuag

SEQ ID NO: 62172 - RNA, 32 nt, Homo Sapiens
uauacagauaaaacaugacuccuacaaggccc

SEQ ID NO: 62173 - RNA, 32 nt, Homo Sapiens
aaaauuuccagaaguucaggaauuuuuggaca

SEQ ID NO: 62174 - RNA, 32 nt, Homo Sapiens
aauuuggaaaauuuagcaagaaaucaaacuuu

SEQ ID NO: 62175 - RNA, 32 nt, Homo Sapiens
ccaaguagcuggaacuacaggcgugugccacc

SEQ ID NO: 62176 - RNA, 32 nt, Homo Sapiens
cuguguccgggcgggggagcccgcguuguggc

SEQ ID NO: 62177 - RNA, 32 nt, Homo Sapiens
aacugcuguccucauuagguaaugauaaauau

SEQ ID NO: 62178 - RNA, 32 nt, Homo Sapiens
gggguauaggcugugagcugggacaugccugu

SEQ ID NO: 62179 - RNA, 32 nt, Homo Sapiens
cccugcacuccagccugagcgacagugagacu

SEQ ID NO: 62180 - RNA, 32 nt, Homo Sapiens
uuuguugggaagcucauuuuaguuuaaccaug

SEQ ID NO: 62181 - RNA, 32 nt, Homo Sapiens
gcaggcgggguggagcggagcugcugggaggc

SEQ ID NO: 62182 - RNA, 32 nt, Homo Sapiens
cccucucacccauuuguguacucugugaguuu

SEQ ID NO: 62183 - RNA, 30 nt, Homo Sapiens
ggaauacauuuuaacuuaauguaaugcaua

SEQ ID NO: 62184 - RNA, 32 nt, Homo Sapiens
agcgcgggcaccgggcgagcaggccgcgucgc

SEQ ID NO: 62185 - RNA, 32 nt, Homo Sapiens
guguguguuacgcccagaacugcucggugucg

SEQ ID NO: 62186 - RNA, 32 nt, Homo Sapiens
aauaucaucuccugcccuucugcaagcucucc

SEQ ID NO: 62187 - RNA, 32 nt, Homo Sapiens
ugaaagugaugcagcucacuuccacccacauu

SEQ ID NO: 62188 - RNA, 32 nt, Homo Sapiens
cauuuauuugccccuuucuccauccuguugcu

SEQ ID NO: 62189 - RNA, 32 nt, Homo Sapiens
uacaggcugaauugugucccauaaaauucaua

SEQ ID NO: 62190 - RNA, 32 nt, Homo Sapiens
ccuggaccaucccaugggccuccgcccgcgcc

SEQ ID NO: 62191 - RNA, 32 nt, Homo Sapiens
cacucucuuuggacucagccugccugcaccua

SEQ ID NO: 62192 - RNA, 32 nt, Homo Sapiens
auugaaauauccaaagguuuaaacaagaugga

SEQ ID NO: 62193 - RNA, 32 nt, Homo Sapiens
auccacccacccaugaggggaaacguggagaa

SEQ ID NO: 62194 - RNA, 32 nt, Homo Sapiens
gucucuagagcccugaaaaauaaaaacaaacu

SEQ ID NO: 62195 - RNA, 32 nt, Homo Sapiens
uuugugcugcuguuucuggggcucugaaaauc

SEQ ID NO: 62196 - RNA, 30 nt, Homo Sapiens
agccucagcaucagcggcggcggcggcggc

SEQ ID NO: 62197 - RNA, 32 nt, Homo Sapiens
ccggaucacgacgcucuggcccgggccacgca

SEQ ID NO: 62198 - RNA, 32 nt, Homo Sapiens
agacguggagccgggcuggggguggggaaggg

SEQ ID NO: 62199 - RNA, 32 nt, Homo Sapiens
auuugcuuugucccggggcuccacugaacaag

SEQ ID NO: 62200 - RNA, 32 nt, Homo Sapiens
cgagauguucugcuuuuaucccgggcagcccu

SEQ ID NO: 62201 - RNA, 32 nt, Homo Sapiens
ggggacagcggcggggacagcggcgggcggcu

SEQ ID NO: 62202 - RNA, 32 nt, Homo Sapiens
acguauuccccucuuaguccuauucuaauuuu

SEQ ID NO: 62203 - RNA, 32 nt, Homo Sapiens
uccccaucccccuccccucccccgacuaaacu

SEQ ID NO: 62204 - RNA, 32 nt, Homo Sapiens
uccugucucuauuugagaacaacuggggccac

SEQ ID NO: 62205 - RNA, 32 nt, Homo Sapiens
gcuuuggugucugacggugaugcugcgguggc

SEQ ID NO: 62206 - RNA, 32 nt, Homo Sapiens
cuucccacuccagcugacagccacaccguggc

SEQ ID NO: 62207 - RNA, 32 nt, Homo Sapiens
cccggcuacucaggaaacugaggugggagaau

SEQ ID NO: 62208 - RNA, 32 nt, Homo Sapiens
aggcccgggaccgcgggaugggugucggcgug

SEQ ID NO: 62209 - RNA, 32 nt, Homo Sapiens
ucuuuuauacaauauucuuuuacaacuaauag

SEQ ID NO: 62210 - RNA, 32 nt, Homo Sapiens
aguggucacggaacucggcugcggcuccaugg

SEQ ID NO: 62211 - RNA, 32 nt, Homo Sapiens
cuuugaggaagacaaagaagaugaucuuuuug

SEQ ID NO: 62212 - RNA, 32 nt, Homo Sapiens
cuaauuuggccauguccaguuuauauaguuua

SEQ ID NO: 62213 - RNA, 32 nt, Homo Sapiens
ggagcaguguaaauauuugagguggugauuug

SEQ ID NO: 62214 - RNA, 32 nt, Homo Sapiens
uaacuuauuucuguuccauaauuucaguaggg

SEQ ID NO: 62215 - RNA, 32 nt, Homo Sapiens
gagaugauauuguagcuguuuguacauaaugu

SEQ ID NO: 62216 - RNA, 32 nt, Homo Sapiens
cuugguacuuuuuucuuuuuaaauuaggacua

SEQ ID NO: 62217 - RNA, 32 nt, Homo Sapiens
gcggcgacaugccggagcugguggugaccgcg

SEQ ID NO: 62218 - RNA, 32 nt, Homo Sapiens
uggagcauuuucccuggcaugauggaggggac

SEQ ID NO: 62219 - RNA, 32 nt, Homo Sapiens
aggaaauaacauugcacuuuauaaacacugua

SEQ ID NO: 62220 - RNA, 32 nt, Homo Sapiens
caaguuccugcagcuccguuucuggggcuggu

SEQ ID NO: 62221 - RNA, 32 nt, Homo Sapiens
gcuuaaaacacuucuaauucugugauuaaaau

SEQ ID NO: 62222 - RNA, 32 nt, Homo Sapiens
aggacaccggagaggggcgccacgccgccgug

SEQ ID NO: 62223 - RNA, 32 nt, Homo Sapiens
caguagcgaugaguaacagagguggcugugga

SEQ ID NO: 62224 - RNA, 32 nt, Homo Sapiens
augcaauuuuugguuuaaauuuuugucuuaaa

SEQ ID NO: 62225 - RNA, 32 nt, Homo Sapiens
ccuuugacugguuuucuucuucauccugagaa

SEQ ID NO: 62226 - RNA, 32 nt, Homo Sapiens
uuaaauggggacgcagaugaguccucgguaaa

SEQ ID NO: 62227 - RNA, 32 nt, Homo Sapiens
uucuuuuuccaccagcacauccuucaacacac

SEQ ID NO: 62228 - RNA, 32 nt, Homo Sapiens
augaacuucucagagaggcaucugggguccug

SEQ ID NO: 62229 - RNA, 32 nt, Homo Sapiens
agauaagugucugaucaagcuacaguguacuu

SEQ ID NO: 62230 - RNA, 32 nt, Homo Sapiens
ugucuguagagggcccugguguuucuagcacu

SEQ ID NO: 62231 - RNA, 32 nt, Homo Sapiens
agggccaggaccucaggcccagccccaacccc

SEQ ID NO: 62232 - RNA, 32 nt, Homo Sapiens
aaacagugaucacuuuuuguacuacuggggug

SEQ ID NO: 62233 - RNA, 32 nt, Homo Sapiens
gaggcagcucgagcccaguccgcggccccagc

SEQ ID NO: 62234 - RNA, 32 nt, Homo Sapiens
aguaauagaauuaagaucauccaagaccaugg

SEQ ID NO: 62235 - RNA, 32 nt, Homo Sapiens
gcccuuggagggcauguagcagugucuguccu

SEQ ID NO: 62236 - RNA, 32 nt, Homo Sapiens
uccuggcgaccacugcuucugucucugugaau

SEQ ID NO: 62237 - RNA, 32 nt, Homo Sapiens
gcccucccacuuugcuguucuuuacuuuacug

SEQ ID NO: 62238 - RNA, 32 nt, Homo Sapiens
gcuaaauuuuuggugcaauuauagcaaaugau

SEQ ID NO: 62239 - RNA, 32 nt, Homo Sapiens
guuggccagaugcacaggucacaggggacuga

SEQ ID NO: 62240 - RNA, 32 nt, Homo Sapiens
uguaaaaccuaauaaaucaugguuguggccau

SEQ ID NO: 62241 - RNA, 32 nt, Homo Sapiens
gcaaaugccccgccggguggcuccagaaaugg

SEQ ID NO: 62242 - RNA, 32 nt, Homo Sapiens
ccauauuaaguacagugauaaagcaucuauau

SEQ ID NO: 62243 - RNA, 32 nt, Homo Sapiens
ccaggcaucgcugcuuuggccuugaagcucag

SEQ ID NO: 62244 - RNA, 32 nt, Homo Sapiens
gcccgacccucgcuccuccuccgccggucccu

SEQ ID NO: 62245 - RNA, 32 nt, Homo Sapiens
uucacccagucaugcaauuaagggcagaucug

SEQ ID NO: 62246 - RNA, 32 nt, Homo Sapiens
cacauuacuauaagggcuauuauuuccugaac

SEQ ID NO: 62247 - RNA, 32 nt, Homo Sapiens
auuucaguuuuuggucacauacgugucccaua

SEQ ID NO: 62248 - RNA, 32 nt, Homo Sapiens
acacuugugaauaguuguuuuacaauucuuaa

SEQ ID NO: 62249 - RNA, 32 nt, Homo Sapiens
caaugucuugacuccuucucuccgcaccgugg

SEQ ID NO: 62250 - RNA, 32 nt, Homo Sapiens
aaaacugucauggucaucaaaaacagagucag

SEQ ID NO: 62251 - RNA, 32 nt, Homo Sapiens
acacucaagacagaaauaaaauguaauaaaau

SEQ ID NO: 62252 - RNA, 32 nt, Homo Sapiens
auugcagucuguagaaaaaauaaaauaaaaug

SEQ ID NO: 62253 - RNA, 32 nt, Homo Sapiens
ccaccgugggagaggagaggcugcugucacug

SEQ ID NO: 62254 - RNA, 32 nt, Homo Sapiens
cagacuuuuccuccccccaauccaaggucaaa

SEQ ID NO: 62255 - RNA, 32 nt, Homo Sapiens
cauggccuccagcagaucccccucaaagaaac

SEQ ID NO: 62256 - RNA, 32 nt, Homo Sapiens
gcgccggggagggagagcucaggccgccaugc

SEQ ID NO: 62257 - RNA, 32 nt, Homo Sapiens
ggcuuuccaucccacccuggcuuccuuccucc

SEQ ID NO: 62258 - RNA, 32 nt, Homo Sapiens
cagugaugucauuguggaaugauccaaguguu

SEQ ID NO: 62259 - RNA, 32 nt, Homo Sapiens
cuugaaucuccuccucacacagauggagacca

SEQ ID NO: 62260 - RNA, 32 nt, Homo Sapiens
ucccggcaugcaccuuguuuccauguugucau

SEQ ID NO: 62261 - RNA, 32 nt, Homo Sapiens
aguauaguccgaacugcaaaucuuauuuucuu

SEQ ID NO: 62262 - RNA, 32 nt, Homo Sapiens
gcaguaaaauacaugagauaaagaccucaaga

SEQ ID NO: 62263 - RNA, 32 nt, Homo Sapiens
cccagcccggaccgcagcacuccaguuccgcc

SEQ ID NO: 62264 - RNA, 31 nt, Homo Sapiens
uccggcucccacugccucccccgccgcaccc

SEQ ID NO: 62265 - RNA, 32 nt, Homo Sapiens
aacuccagauucuccuuggcuccucucuggaa

SEQ ID NO: 62266 - RNA, 32 nt, Homo Sapiens
agucagggucgcgccuccguuggaaacuuggg

SEQ ID NO: 62267 - RNA, 32 nt, Homo Sapiens
ccugcgaugggagucuugucucccagccuguc

SEQ ID NO: 62268 - RNA, 32 nt, Homo Sapiens
gggcgcggccgccgugcuggacauggugcggc

SEQ ID NO: 62269 - RNA, 32 nt, Homo Sapiens
uucugugacuuccacaugccaaaauuaaaaga

SEQ ID NO: 62270 - RNA, 32 nt, Homo Sapiens
uauucucuguuguuguuguuuuagaugggcuc

SEQ ID NO: 62271 - RNA, 32 nt, Homo Sapiens
gcuguucuuuugcucaauaaaauucuuuucua

SEQ ID NO: 62272 - RNA, 32 nt, Homo Sapiens
uggggaaggggccaagcugcagacacacacag

SEQ ID NO: 62273 - RNA, 32 nt, Homo Sapiens
auggcuuuuugguuccagcagugagggcauug

SEQ ID NO: 62274 - RNA, 32 nt, Homo Sapiens
cgaucgcgcugauggcggcgcuggcagcagcg

SEQ ID NO: 62275 - RNA, 32 nt, Homo Sapiens
gccuccccaagccccgugcgccaaccugugug

SEQ ID NO: 62276 - RNA, 32 nt, Homo Sapiens
caggaauuuuuaguuuuuagcuuuugcaggag

SEQ ID NO: 62277 - RNA, 32 nt, Homo Sapiens
cgagggcagagaggcguccgcgcccggacgca

SEQ ID NO: 62278 - RNA, 32 nt, Homo Sapiens
cuccaggcccucgcgccccacccccgaccagc

SEQ ID NO: 62279 - RNA, 32 nt, Homo Sapiens
ucuucuguguuaaaacaugaaacuauaaauuu

SEQ ID NO: 62280 - RNA, 32 nt, Homo Sapiens
gacaaguccaguaaggcaggcaucaugccaca

SEQ ID NO: 62281 - RNA, 32 nt, Homo Sapiens
ggaacccaauguuuacauucucuucugucucu

SEQ ID NO: 62282 - RNA, 32 nt, Homo Sapiens
aggggcaagugauguguaacugcucaagagau

SEQ ID NO: 62283 - RNA, 32 nt, Homo Sapiens
gcggcguggaauccggcgugggcugggggguc

SEQ ID NO: 62284 - RNA, 32 nt, Homo Sapiens
gcgaugcugggggcuuuccggucggggccgca

SEQ ID NO: 62285 - RNA, 32 nt, Homo Sapiens
uguuggcugccgagccucagcugcuggcauuu

SEQ ID NO: 62286 - RNA, 32 nt, Homo Sapiens
ucugggaaaugacuuuucugggaaaugacagu

SEQ ID NO: 62287 - RNA, 32 nt, Homo Sapiens
cuacgcggcaaugaaauuccaaaacuggcaca

SEQ ID NO: 62288 - RNA, 32 nt, Homo Sapiens
cucuccuccgccucugggaacuuccugggaga

SEQ ID NO: 62289 - RNA, 32 nt, Homo Sapiens
uguuagaggaggaagagggagucuggcaugag

SEQ ID NO: 62290 - RNA, 32 nt, Homo Sapiens
agcuaacccacaaauagcacaugugugcaaac

SEQ ID NO: 62291 - RNA, 32 nt, Homo Sapiens
aggagagagguggagggcugguauuuuggagg

SEQ ID NO: 62292 - RNA, 32 nt, Homo Sapiens
uuauuucacacgcuguucuaauggcacuuauc

SEQ ID NO: 62293 - RNA, 32 nt, Homo Sapiens
uccgagagaaaguugaagaugacugaagaacu

SEQ ID NO: 62294 - RNA, 32 nt, Homo Sapiens
gcugugguggacccggccgggucgcggauucu

SEQ ID NO: 62295 - RNA, 32 nt, Homo Sapiens
aucguaauauuaauuguuaauaaaauagucac

SEQ ID NO: 62296 - RNA, 32 nt, Homo Sapiens
gggaaagauuugcucuuaauucucagucugga

SEQ ID NO: 62297 - RNA, 32 nt, Homo Sapiens
cagggucagagguggaguuagaaaggccccau

SEQ ID NO: 62298 - RNA, 32 nt, Homo Sapiens
agccugaccaauaugaugaaaccccgucucua

SEQ ID NO: 62299 - RNA, 32 nt, Homo Sapiens
aggaagacuucaucccucuggggcuguucacg

SEQ ID NO: 62300 - RNA, 32 nt, Homo Sapiens
ccaggccucgcacuugcagaggagcccagugg

SEQ ID NO: 62301 - RNA, 32 nt, Homo Sapiens
gugcgcgggcgaggacagcggcagcgaugcgg

SEQ ID NO: 62302 - RNA, 32 nt, Homo Sapiens
gagacagucuccuggugucacccaggcuggag

SEQ ID NO: 62303 - RNA, 32 nt, Homo Sapiens
acgaagugugcucauugaaauaaaauacagag

SEQ ID NO: 62304 - RNA, 32 nt, Homo Sapiens
uguuucuuuucuuuucuucugguuuaauuuua

SEQ ID NO: 62305 - RNA, 32 nt, Homo Sapiens
auuaaguggcacaaaaucagagcaagaaagcg

SEQ ID NO: 62306 - RNA, 32 nt, Homo Sapiens
ggaaggaccuucagugcagaucaggugcagua

SEQ ID NO: 62307 - RNA, 32 nt, Homo Sapiens
ccagcaucuccucuccuuaucaggaacauucc

SEQ ID NO: 62308 - RNA, 31 nt, Homo Sapiens
cuccaguggcacugcuggaccugcccacguu

SEQ ID NO: 62309 - RNA, 32 nt, Homo Sapiens
ccccagccccacucacacagcagccuaggaag

SEQ ID NO: 62310 - RNA, 30 nt, Homo Sapiens
uccauggcccuauaccgccaucuuacacga

SEQ ID NO: 62311 - RNA, 32 nt, Homo Sapiens
gugggcgagcgcgccagccgccccuuccagaa

SEQ ID NO: 62312 - RNA, 32 nt, Homo Sapiens
guaguaggauauauuucuccuagaacaucccu

SEQ ID NO: 62313 - RNA, 32 nt, Homo Sapiens
caucuguaauccaagcacuuugggaggucgag

SEQ ID NO: 62314 - RNA, 32 nt, Homo Sapiens
gcguccucgccagccucccagcagcaggcgcg

SEQ ID NO: 62315 - RNA, 32 nt, Homo Sapiens
cuuugacaaaaaugguuuugaauagaucuuua

SEQ ID NO: 62316 - RNA, 32 nt, Homo Sapiens
gugucucccucauuagacugggaugccuucaa

SEQ ID NO: 62317 - RNA, 32 nt, Homo Sapiens
cccaaccaacuggaguaguggccuguauccuu

SEQ ID NO: 62318 - RNA, 32 nt, Homo Sapiens
gucuaucccggcugaggacccgcggccagugc

SEQ ID NO: 62319 - RNA, 32 nt, Homo Sapiens
agucaacugaacuauuuuacaaaccugaaaua

SEQ ID NO: 62320 - RNA, 32 nt, Homo Sapiens
ugggucggauggucuuuggaugugucagcuua

SEQ ID NO: 62321 - RNA, 32 nt, Homo Sapiens
aagacucaauuuccuggucauaagcuguaaac

SEQ ID NO: 62322 - RNA, 32 nt, Homo Sapiens
uacuucuuuccuuuuucuuaaguucggaucca

SEQ ID NO: 62323 - RNA, 32 nt, Homo Sapiens
cucaucauccuccagagagaaaauaggccgug

SEQ ID NO: 62324 - RNA, 32 nt, Homo Sapiens
cccgcccaggacccggugccacacucacccag

SEQ ID NO: 62325 - RNA, 32 nt, Homo Sapiens
aguucugucugcaugagaaaggauggcaaguc

SEQ ID NO: 62326 - RNA, 32 nt, Homo Sapiens
auuaaccaaggaucuuaacuguguucgcauuu

SEQ ID NO: 62327 - RNA, 32 nt, Homo Sapiens
cccugcuggcugaggagccgcugcugggagac

SEQ ID NO: 62328 - RNA, 32 nt, Homo Sapiens
ggagagaagggagcaggaauccuccuuccgaa

SEQ ID NO: 62329 - RNA, 32 nt, Homo Sapiens
ugcacauauauuccgcuuucagaauaguuuug

SEQ ID NO: 62330 - RNA, 32 nt, Homo Sapiens
uuaauaaucuuuuguaguuuucaguguacagg

SEQ ID NO: 62331 - RNA, 32 nt, Homo Sapiens
cgagcaggccccagcagucaccggcucugguc

SEQ ID NO: 62332 - RNA, 32 nt, Homo Sapiens
uuagaguuuaucuuguaguauucaucuuugua

SEQ ID NO: 62333 - RNA, 32 nt, Homo Sapiens
ugugaaaacacuuugagcgcuuuaagagauua

SEQ ID NO: 62334 - RNA, 32 nt, Homo Sapiens
cccgccuggugccuuccauggagggaaauggg

SEQ ID NO: 62335 - RNA, 32 nt, Homo Sapiens
gggauucugggggaaggagagaagggcagcuc

SEQ ID NO: 62336 - RNA, 32 nt, Homo Sapiens
cuuggccuuuaagaauaaucacaaaauauuua

SEQ ID NO: 62337 - RNA, 32 nt, Homo Sapiens
ucugcuccucuaggcuggccccuuguccaccc

SEQ ID NO: 62338 - RNA, 32 nt, Homo Sapiens
ugagauggggguuaucuacugauaaagaaaga

SEQ ID NO: 62339 - RNA, 30 nt, Homo Sapiens
ucacacuauuuucuaaugcuuuguacaaac

SEQ ID NO: 62340 - RNA, 32 nt, Homo Sapiens
gcuggccgugcaggcgcucaggcgugcagggu

SEQ ID NO: 62341 - RNA, 32 nt, Homo Sapiens
ggcccucagggugcugagguuuuccuuugugg

SEQ ID NO: 62342 - RNA, 32 nt, Homo Sapiens
auaaugaugaugaugaugaugaaaacuaagga

SEQ ID NO: 62343 - RNA, 31 nt, Homo Sapiens
ugcccggagccccagccccaggggaccaugc

SEQ ID NO: 62344 - RNA, 32 nt, Homo Sapiens
aaggaaagaacaaaugcuggggucauauaaaa

SEQ ID NO: 62345 - RNA, 32 nt, Homo Sapiens
ugagcaugucgcaggcagcgggcccagccuga

SEQ ID NO: 62346 - RNA, 32 nt, Homo Sapiens
acuucuucuucccguuuguuugcaaugcucag

SEQ ID NO: 62347 - RNA, 32 nt, Homo Sapiens
ucauguacuccagccucccuugagacaacauu

SEQ ID NO: 62348 - RNA, 32 nt, Homo Sapiens
ccacgggugugagccaccgcgcccagcuagcu

SEQ ID NO: 62349 - RNA, 32 nt, Homo Sapiens
ugagagggagggguguuggugcccugacaggg

SEQ ID NO: 62350 - RNA, 32 nt, Homo Sapiens
gccggcccaagcccagggucccugcuugggcc

SEQ ID NO: 62351 - RNA, 29 nt, Homo Sapiens
cccucuccggucccuuuauggaccccaca

SEQ ID NO: 62352 - RNA, 32 nt, Homo Sapiens
gaaauugcuuugugucccacuguuauuaaagc

SEQ ID NO: 62353 - RNA, 32 nt, Homo Sapiens
uggcagggcuggcaggaugccgugggccgcca

SEQ ID NO: 62354 - RNA, 32 nt, Homo Sapiens
aagcaugaauaccuuucuuuucccauuauauc

SEQ ID NO: 62355 - RNA, 32 nt, Homo Sapiens
cugcccuugagccccucagccguuugcccugc

SEQ ID NO: 62356 - RNA, 32 nt, Homo Sapiens
ggaacccggaacggucguccucuucccccgcc

SEQ ID NO: 62357 - RNA, 31 nt, Homo Sapiens
cauccguguaacauuugacaagguuggccuc

SEQ ID NO: 62358 - RNA, 32 nt, Homo Sapiens
cgggugggugcugugugcacggcagccuagcc

SEQ ID NO: 62359 - RNA, 32 nt, Homo Sapiens
gaaaggaaaauuuaauaaauauugguuuuucg

SEQ ID NO: 62360 - RNA, 29 nt, Homo Sapiens
auauuugugacuuuaaucgugcugcuugg

SEQ ID NO: 62361 - RNA, 32 nt, Homo Sapiens
ccucucgagguggccuccuccucccaugugag

SEQ ID NO: 62362 - RNA, 32 nt, Homo Sapiens
ggcuggcugucccacagccugcguuuuggggg

SEQ ID NO: 62363 - RNA, 32 nt, Homo Sapiens
caucaguguuuguauucaugguguggcacaug

SEQ ID NO: 62364 - RNA, 32 nt, Homo Sapiens
aaucagauugugcaaguuugaacgcuuguuuc

SEQ ID NO: 62365 - RNA, 32 nt, Homo Sapiens
ugagaccuucccacuuuuccugucccuaccca

SEQ ID NO: 62366 - RNA, 32 nt, Homo Sapiens
aauggccuuaaaccuguuucagcuuuaacagu

SEQ ID NO: 62367 - RNA, 32 nt, Homo Sapiens
aucccauuuuuccagauuaauuuuaaaauuaa

SEQ ID NO: 62368 - RNA, 32 nt, Homo Sapiens
ggagaauguacaacagugucacuuguuaacga

SEQ ID NO: 62369 - RNA, 32 nt, Homo Sapiens
ggauugacugggcuaccucagcauacauuucu

SEQ ID NO: 62370 - RNA, 32 nt, Homo Sapiens
gcccagccuauuuauuucugauucuuuaaggg

SEQ ID NO: 62371 - RNA, 32 nt, Homo Sapiens
aacucuuugugcuugugaucuacuggacuuuu

SEQ ID NO: 62372 - RNA, 32 nt, Homo Sapiens
ugucuucuugucagucccaagugcccuuuuac

SEQ ID NO: 62373 - RNA, 32 nt, Homo Sapiens
ucccagcagcauaaaauggguuggccccaaag

SEQ ID NO: 62374 - RNA, 32 nt, Homo Sapiens
cggcgccaucucggaccuggaggaggaccugg

SEQ ID NO: 62375 - RNA, 32 nt, Homo Sapiens
aggucccguuucuuccucucuuggaggacaug

SEQ ID NO: 62376 - RNA, 32 nt, Homo Sapiens
gcuuugaccacuuuucauccuacagcuucaau

SEQ ID NO: 62377 - RNA, 32 nt, Homo Sapiens
gaccuuggcuugcccggggccauuucauaauu

SEQ ID NO: 62378 - RNA, 32 nt, Homo Sapiens
uacuauguuuuacuuuuacuucauauucuugc

SEQ ID NO: 62379 - RNA, 32 nt, Homo Sapiens
aaaggugccuggaagcgggaugcgccugugcg

SEQ ID NO: 62380 - RNA, 32 nt, Homo Sapiens
gagauuaugucuuuuucuuaaacaccauggcu

SEQ ID NO: 62381 - RNA, 32 nt, Homo Sapiens
cagccuggaagaccgugccugcccagcccucg

SEQ ID NO: 62382 - RNA, 32 nt, Homo Sapiens
gagagaaauuuauauuacuggcaauuucauuu

SEQ ID NO: 62383 - RNA, 32 nt, Homo Sapiens
cccuccucggugccgccucugcccagcguuug

SEQ ID NO: 62384 - RNA, 32 nt, Homo Sapiens
ucugcauccuggaugugugcaccgugcgcuga

SEQ ID NO: 62385 - RNA, 32 nt, Homo Sapiens
cucuggacuggccacacccaccccauuccugg

SEQ ID NO: 62386 - RNA, 32 nt, Homo Sapiens
ccaucgccccccacccaucucuggagagcccu

SEQ ID NO: 62387 - RNA, 32 nt, Homo Sapiens
aacugggauccuaguagcuguugcucucugua

SEQ ID NO: 62388 - RNA, 32 nt, Homo Sapiens
uucauaaguauuuuauauuuuugcuguuguua

SEQ ID NO: 62389 - RNA, 32 nt, Homo Sapiens
gauuucuuucugccgaagacaccaaggcacug

SEQ ID NO: 62390 - RNA, 32 nt, Homo Sapiens
cugaguccugaacacguaggccccaggggagg

SEQ ID NO: 62391 - RNA, 32 nt, Homo Sapiens
agagaacaugaaaugcuucuuucucaguuuau

SEQ ID NO: 62392 - RNA, 32 nt, Homo Sapiens
ucugggaggcuuuggaaugaugaaagcaugua

SEQ ID NO: 62393 - RNA, 32 nt, Homo Sapiens
auuuccaucccauggauuaccuagagggaaau

SEQ ID NO: 62394 - RNA, 32 nt, Homo Sapiens
ccaucuucuuauacauauacuaucaaauuaug

SEQ ID NO: 62395 - RNA, 32 nt, Homo Sapiens
uuugccucauucugaaaucaacacaugggacc

SEQ ID NO: 62396 - RNA, 32 nt, Homo Sapiens
auagcuacguaaauaaaauuagcaggauuauc

SEQ ID NO: 62397 - RNA, 32 nt, Homo Sapiens
augaaugcaaggauucauuaacucuuugaauu

SEQ ID NO: 62398 - RNA, 32 nt, Homo Sapiens
uugguagggaaaagcuaacaagagacuuuuga

SEQ ID NO: 62399 - RNA, 32 nt, Homo Sapiens
aaaugcagucuauuaucauacauaacuaaaaa

SEQ ID NO: 62400 - RNA, 32 nt, Homo Sapiens
gugggccuaccccacaccugggcucuccacag

SEQ ID NO: 62401 - RNA, 32 nt, Homo Sapiens
cuacuggaccucccgagcugcccuucaggucu

SEQ ID NO: 62402 - RNA, 32 nt, Homo Sapiens
uuaacgguggugaaaaggggacaguuuuuacc

SEQ ID NO: 62403 - RNA, 32 nt, Homo Sapiens
acuauccagagauaauuauuuuuuacggacug

SEQ ID NO: 62404 - RNA, 32 nt, Homo Sapiens
ugacaaccuuggcugucauuuuuaguugccau

SEQ ID NO: 62405 - RNA, 32 nt, Homo Sapiens
gaagauugccccagcuaaaaguggacaagucc

SEQ ID NO: 62406 - RNA, 32 nt, Homo Sapiens
gcgccccucgcggaagcccacacuccgcgcga

SEQ ID NO: 62407 - RNA, 32 nt, Homo Sapiens
uuugagaggagagugcuuggggcuugaacccc

SEQ ID NO: 62408 - RNA, 32 nt, Homo Sapiens
acuaugaaaauauuaagacuuuuuuguuaauu

SEQ ID NO: 62409 - RNA, 32 nt, Homo Sapiens
aaugaaugaaauauaaacugugagauaaauau

SEQ ID NO: 62410 - RNA, 32 nt, Homo Sapiens
aaucauuaaagguaccguguccgccucuuaaa

SEQ ID NO: 62411 - RNA, 32 nt, Homo Sapiens
gagggccggugacaucuagcggggaggugggc

SEQ ID NO: 62412 - RNA, 31 nt, Homo Sapiens
uacaaggaaauaaaauacaaaucuuguuuuu

SEQ ID NO: 62413 - RNA, 32 nt, Homo Sapiens
uuagcaguuggcuggaauguguucacuagguu

SEQ ID NO: 62414 - RNA, 32 nt, Homo Sapiens
gucucgucuugggcugcccgugggugaguggg

SEQ ID NO: 62415 - RNA, 32 nt, Homo Sapiens
ggcagaaagggagagugcugggcgggcuuagu

SEQ ID NO: 62416 - RNA, 32 nt, Homo Sapiens
ugcguggauuaaaaagaaaaacaucauuuuau

SEQ ID NO: 62417 - RNA, 32 nt, Homo Sapiens
auacuauguucugaccucuggcacucuuucuc

SEQ ID NO: 62418 - RNA, 32 nt, Homo Sapiens
gcuggaaauguuucgcuguuguauauuuuaaa

SEQ ID NO: 62419 - RNA, 32 nt, Homo Sapiens
gugaggcugggcccuuccugcugggaaaagca

SEQ ID NO: 62420 - RNA, 32 nt, Homo Sapiens
gggucuccaccuauggccccaggccuuugcga

SEQ ID NO: 62421 - RNA, 32 nt, Homo Sapiens
guguuuuucuucaccauauuucucccaacugu

SEQ ID NO: 62422 - RNA, 32 nt, Homo Sapiens
gccaagaccccggccugggccagccacucccg

SEQ ID NO: 62423 - RNA, 32 nt, Homo Sapiens
cugaggucaggagaucgagaccagccuggcca

SEQ ID NO: 62424 - RNA, 32 nt, Homo Sapiens
ccaguacaguuauuugucaagcuuagcuuuga

SEQ ID NO: 62425 - RNA, 32 nt, Homo Sapiens
agaagcuauuucuauuuuuaagagucauuuuu

SEQ ID NO: 62426 - RNA, 32 nt, Homo Sapiens
gucccucuuugagggaggggagcuaugcuagg

SEQ ID NO: 62427 - RNA, 32 nt, Homo Sapiens
caagagggauaaaacaccaugaaaauaaacuu

SEQ ID NO: 62428 - RNA, 32 nt, Homo Sapiens
uuuuaauuuucuaccuuuagguuccggcucau

SEQ ID NO: 62429 - RNA, 32 nt, Homo Sapiens
gcauaaagaauaguaauuuagaaguauccgug

SEQ ID NO: 62430 - RNA, 32 nt, Homo Sapiens
auagccgggccugagggcgggcggcggggcgc

SEQ ID NO: 62431 - RNA, 32 nt, Homo Sapiens
uccacaaugacaguuucugcaagucuuuccua

SEQ ID NO: 62432 - RNA, 32 nt, Homo Sapiens
agucucuggcuuaugacuccugguucccauua

SEQ ID NO: 62433 - RNA, 32 nt, Homo Sapiens
cuuuguuuuguacaguucuguuagauguuguu

SEQ ID NO: 62434 - RNA, 32 nt, Homo Sapiens
cgguagcgcgcgcccgcgcgcguucuuaguac

SEQ ID NO: 62435 - RNA, 32 nt, Homo Sapiens
gaguccugacuucaagcagaauccucaguugg

SEQ ID NO: 62436 - RNA, 32 nt, Homo Sapiens
gagcuggggccgcguuccuucugaaagcggga

SEQ ID NO: 62437 - RNA, 32 nt, Homo Sapiens
uaggugaaagcagcccuguguuguguaucuca

SEQ ID NO: 62438 - RNA, 32 nt, Homo Sapiens
auggaugaggucgggguggaagaaacggguga

SEQ ID NO: 62439 - RNA, 32 nt, Homo Sapiens
gagugggcggggggucuccgcggaggaggugg

SEQ ID NO: 62440 - RNA, 32 nt, Homo Sapiens
ucaauuauuucccccauuuuucccaggcaaau

SEQ ID NO: 62441 - RNA, 32 nt, Homo Sapiens
aaagagaaaaagaaugaaguacuuccuggcaa

SEQ ID NO: 62442 - RNA, 32 nt, Homo Sapiens
gcgggcgcgcgucccguccagguccggaguaa

SEQ ID NO: 62443 - RNA, 32 nt, Homo Sapiens
uguccgucuaacugguacauugauaauuuagu

SEQ ID NO: 62444 - RNA, 32 nt, Homo Sapiens
ggcuggccacacgcagccaaauggaggccacu

SEQ ID NO: 62445 - RNA, 32 nt, Homo Sapiens
accuacucugaaaugcaaaacuucuauucugu

SEQ ID NO: 62446 - RNA, 32 nt, Homo Sapiens
ccaguccccgucccaucccccggcggccuagg

SEQ ID NO: 62447 - RNA, 32 nt, Homo Sapiens
gacagaagaagucagagaagugaagagagaug

SEQ ID NO: 62448 - RNA, 32 nt, Homo Sapiens
uuuugggaaagauaacauuuacugcgugcuug

SEQ ID NO: 62449 - RNA, 32 nt, Homo Sapiens
uagcagcauggacuuuggaaccagauagaccu

SEQ ID NO: 62450 - RNA, 32 nt, Homo Sapiens
ccuguuuuccuaaagcuucaccucaagagaga

SEQ ID NO: 62451 - RNA, 32 nt, Homo Sapiens
ucaaagaagaaccugagagaucucauuuaguu

SEQ ID NO: 62452 - RNA, 32 nt, Homo Sapiens
aggaguucaaggaucacacaaacgguaguaac

SEQ ID NO: 62453 - RNA, 32 nt, Homo Sapiens
aaaaagaggaggaggaagaggagcucagggcc

SEQ ID NO: 62454 - RNA, 32 nt, Homo Sapiens
acuggccgaggugaugcccacccuucccugga

SEQ ID NO: 62455 - RNA, 32 nt, Homo Sapiens
ucucucaccuauagccaauugccguuaacugu

SEQ ID NO: 62456 - RNA, 32 nt, Homo Sapiens
gaacagcaaggacaucggagaaggcuggggcu

SEQ ID NO: 62457 - RNA, 32 nt, Homo Sapiens
ucaccgugccugaguggcaugcccaggaggcc

SEQ ID NO: 62458 - RNA, 32 nt, Homo Sapiens
ugaccagaguucucuugagccuccucaugcuc

SEQ ID NO: 62459 - RNA, 32 nt, Homo Sapiens
auauggaauaucaaaacugaagaaauucacau

SEQ ID NO: 62460 - RNA, 32 nt, Homo Sapiens
ugguuugcuguuaauaaauacguggguaaauc

SEQ ID NO: 62461 - RNA, 32 nt, Homo Sapiens
cgaaagccaugucuauaccaaccccgaaaagc

SEQ ID NO: 62462 - RNA, 32 nt, Homo Sapiens
uaugucugaaaauagaagcuauuuauuaugag

SEQ ID NO: 62463 - RNA, 32 nt, Homo Sapiens
gcugcugcgggcgcccaccucgcccagccaug

SEQ ID NO: 62464 - RNA, 32 nt, Homo Sapiens
ccuagaggcuaugguucuuaaucuauggagcu

SEQ ID NO: 62465 - RNA, 32 nt, Homo Sapiens
ggcccagggcagcuggggagggggucagagug

SEQ ID NO: 62466 - RNA, 32 nt, Homo Sapiens
acugcuacuauaagacauucuggaaugguugu

SEQ ID NO: 62467 - RNA, 32 nt, Homo Sapiens
ggacgcggggcuucaccacgggcuucgccccu

SEQ ID NO: 62468 - RNA, 32 nt, Homo Sapiens
auacuugccuucuuccuguacagggcugggaa

SEQ ID NO: 62469 - RNA, 32 nt, Homo Sapiens
gaugccagguucuauuuggaauuuauauacaa

SEQ ID NO: 62470 - RNA, 32 nt, Homo Sapiens
ucagggccaagcccucagcaucugcuccuguc

SEQ ID NO: 62471 - RNA, 32 nt, Homo Sapiens
uggucuucuaugucagggagaauggagaaggg

SEQ ID NO: 62472 - RNA, 32 nt, Homo Sapiens
cagugaggugguagcaagacuucuuuuuagaa

SEQ ID NO: 62473 - RNA, 32 nt, Homo Sapiens
uuccaaggcaccgccauguacugcacugcccu

SEQ ID NO: 62474 - RNA, 32 nt, Homo Sapiens
ucuauccuuuuaaaaacaaaauggaguguaag

SEQ ID NO: 62475 - RNA, 32 nt, Homo Sapiens
ggaccagccuccuguuugcaggcccagaggag

SEQ ID NO: 62476 - RNA, 32 nt, Homo Sapiens
cggagcccucggccgcccgagcaggggcugga

SEQ ID NO: 62477 - RNA, 32 nt, Homo Sapiens
gaaguggauucugcacucaagaaauguaccau

SEQ ID NO: 62478 - RNA, 32 nt, Homo Sapiens
aaaagcaaggauuucccuggccccgcccugca

SEQ ID NO: 62479 - RNA, 32 nt, Homo Sapiens
uuauucccaaaauaaaccugucucuguuggaa

SEQ ID NO: 62480 - RNA, 32 nt, Homo Sapiens
uccccuucccaauugaaggagcggaaagagaa

SEQ ID NO: 62481 - RNA, 32 nt, Homo Sapiens
uucuccugcagccccagacacucgggccacgg

SEQ ID NO: 62482 - RNA, 32 nt, Homo Sapiens
cggggaggggccuggaggagagauagcugggc

SEQ ID NO: 62483 - RNA, 32 nt, Homo Sapiens
uuggagggccugggccuggcucccucacucuc

SEQ ID NO: 62484 - RNA, 32 nt, Homo Sapiens
uaucuagcuaauuuuuuaaaucuuaaguagag

SEQ ID NO: 62485 - RNA, 32 nt, Homo Sapiens
aggcuucuguaggcuuccugucccagagccaa

SEQ ID NO: 62486 - RNA, 32 nt, Homo Sapiens
uuugaagaaaucaccaaaguuucugggaaacu

SEQ ID NO: 62487 - RNA, 32 nt, Homo Sapiens
cggcgcuucuggucccggagacuuggggcucc

SEQ ID NO: 62488 - RNA, 32 nt, Homo Sapiens
guaaugaagcccuaauaaaaacucugaacacu

SEQ ID NO: 62489 - RNA, 32 nt, Homo Sapiens
uucugaccagaagcaucugugcaucuggaggg

SEQ ID NO: 62490 - RNA, 32 nt, Homo Sapiens
cccgcgcccaaggggggaauccuaugcgucag

SEQ ID NO: 62491 - RNA, 32 nt, Homo Sapiens
aauaauaaaaaauuaucuggauuuaguggugu

SEQ ID NO: 62492 - RNA, 32 nt, Homo Sapiens
aaacuaauauauauguacauggauuucuauag

SEQ ID NO: 62493 - RNA, 30 nt, Homo Sapiens
gccggcuguggcggcggcgggagcugcucg

SEQ ID NO: 62494 - RNA, 32 nt, Homo Sapiens
gacaagagaaauaaauaaaaugucaucuguua

SEQ ID NO: 62495 - RNA, 32 nt, Homo Sapiens
ucagcauucuauuuuuaauaauuuguaugcca

SEQ ID NO: 62496 - RNA, 32 nt, Homo Sapiens
ugggacuccaugaaccaguguugauauguuug

SEQ ID NO: 62497 - RNA, 32 nt, Homo Sapiens
uuuuuaugucauugagcaauauuuuuucaaug

SEQ ID NO: 62498 - RNA, 32 nt, Homo Sapiens
agguagugguuucaguguuucuuaaguuggua

SEQ ID NO: 62499 - RNA, 32 nt, Homo Sapiens
cuugggccagcuucucagguggcuuuagaccu

SEQ ID NO: 62500 - RNA, 32 nt, Homo Sapiens
gucuagauuuugauuucauauauauguguaug

SEQ ID NO: 62501 - RNA, 27 nt, Homo Sapiens
aaacaauccuucuuccucugccuccca

SEQ ID NO: 62502 - RNA, 32 nt, Homo Sapiens
auugcugacgccuggugauccaugucagaagu

SEQ ID NO: 62503 - RNA, 31 nt, Homo Sapiens
uuucagaaauaaaaugaaaugucuuauuuug

SEQ ID NO: 62504 - RNA, 32 nt, Homo Sapiens
ggcucucaggugaggggcgcgcgagcggcucc

SEQ ID NO: 62505 - RNA, 32 nt, Homo Sapiens
gguguccuucuaaaauacagcacaagcuacag

SEQ ID NO: 62506 - RNA, 32 nt, Homo Sapiens
aggaguuuuggauuaaguaugccaaguacaug

SEQ ID NO: 62507 - RNA, 32 nt, Homo Sapiens
agcugugcagugccggccccagauccucacac

SEQ ID NO: 62508 - RNA, 32 nt, Homo Sapiens
auucuugcaauaaaugaagaaggaauaaaaga

SEQ ID NO: 62509 - RNA, 32 nt, Homo Sapiens
caaaaugcugaaaccaaaaaucugaaaguaaa

SEQ ID NO: 62510 - RNA, 32 nt, Homo Sapiens
uggaggacacgcugcugcagaggaucaugacg

SEQ ID NO: 62511 - RNA, 32 nt, Homo Sapiens
ugacucccuaaaaugaauacaaccaagcugug

SEQ ID NO: 62512 - RNA, 32 nt, Homo Sapiens
cuucacuccagucucugccucuguguucacac

SEQ ID NO: 62513 - RNA, 32 nt, Homo Sapiens
aguaagugaauuuuaauguuuugcauuaacua

SEQ ID NO: 62514 - RNA, 32 nt, Homo Sapiens
uuugcaggggagaaagggaugaggauguugga

SEQ ID NO: 62515 - RNA, 32 nt, Homo Sapiens
cacauugcuccaccccagggcucggccuugcc

SEQ ID NO: 62516 - RNA, 32 nt, Homo Sapiens
gguguuguucuucccuauacuucacacugaac

SEQ ID NO: 62517 - RNA, 32 nt, Homo Sapiens
agcuaaaugcuguggauauuucaugucuguuu

SEQ ID NO: 62518 - RNA, 32 nt, Homo Sapiens
acacccagaugccccagggaccccgggaaggg

SEQ ID NO: 62519 - RNA, 32 nt, Homo Sapiens
aagugcauagguccauaauauuucauaaaaug

SEQ ID NO: 62520 - RNA, 32 nt, Homo Sapiens
aaauguucuuuaacuauauacuauguaacagg

SEQ ID NO: 62521 - RNA, 32 nt, Homo Sapiens
aaacucauggggagacagcagauucuugccuu

SEQ ID NO: 62522 - RNA, 32 nt, Homo Sapiens
ggcagggagagccuagagcucaccugaugcgc

SEQ ID NO: 62523 - RNA, 32 nt, Homo Sapiens
ccacaccuaagaacagcagcuccaccaaauga

SEQ ID NO: 62524 - RNA, 32 nt, Homo Sapiens
ugguguugccagcagugcuggcaggaggaggg

SEQ ID NO: 62525 - RNA, 32 nt, Homo Sapiens
caagucagaacacaauugacagcacaaggcag

SEQ ID NO: 62526 - RNA, 32 nt, Homo Sapiens
ggagucaaacuuauaaaaagccuuaaguggaa

SEQ ID NO: 62527 - RNA, 32 nt, Homo Sapiens
cccaguaaaugauaaacucgggccuguaggug

SEQ ID NO: 62528 - RNA, 32 nt, Homo Sapiens
aguaaaaacaaauuauuuucgucaaaguuuuu

SEQ ID NO: 62529 - RNA, 32 nt, Homo Sapiens
aauucagccugccugccuugccuuggggcagg

SEQ ID NO: 62530 - RNA, 32 nt, Homo Sapiens
ccccagcgcuccggaaaguaccucugcuuccu

SEQ ID NO: 62531 - RNA, 32 nt, Homo Sapiens
gagaacacgagcccagccugccugcaggagug

SEQ ID NO: 62532 - RNA, 32 nt, Homo Sapiens
gagugugaugucacugaugacaucacggccac

SEQ ID NO: 62533 - RNA, 32 nt, Homo Sapiens
uaccauuuuuauuuuuaguuuuuagcagacag

SEQ ID NO: 62534 - RNA, 32 nt, Homo Sapiens
uccagcugcuucugcccugugcacacuccuuu

SEQ ID NO: 62535 - RNA, 32 nt, Homo Sapiens
ucugucucauagcacaugugacaaucaucugg

SEQ ID NO: 62536 - RNA, 30 nt, Homo Sapiens
gcuggcgguggcccauugccggcgcguguc

SEQ ID NO: 62537 - RNA, 32 nt, Homo Sapiens
ugcagggaagcccccugcuuugccagagaagg

SEQ ID NO: 62538 - RNA, 32 nt, Homo Sapiens
cugaaucuacucugcaucuacucuguguuugg

SEQ ID NO: 62539 - RNA, 32 nt, Homo Sapiens
ccccuuauagagcugcaaaacacacacaugcg

SEQ ID NO: 62540 - RNA, 32 nt, Homo Sapiens
caccccuucuuucccuccgcgccccgcccccg

SEQ ID NO: 62541 - RNA, 32 nt, Homo Sapiens
uuuccaucuguaaaaugagaguauugguucua

SEQ ID NO: 62542 - RNA, 32 nt, Homo Sapiens
cccacugccugcggcauggcccggggcucggc

SEQ ID NO: 62543 - RNA, 31 nt, Homo Sapiens
auuaaucauuugauuuaaacaaugccaaguc

SEQ ID NO: 62544 - RNA, 32 nt, Homo Sapiens
caagucacacacccucaaagggaagcuacacg

SEQ ID NO: 62545 - RNA, 32 nt, Homo Sapiens
uggacuggggagcacaggugucugccuagauc

SEQ ID NO: 62546 - RNA, 32 nt, Homo Sapiens
acacucugggaacugauuugaccucgaaugcu

SEQ ID NO: 62547 - RNA, 32 nt, Homo Sapiens
gucugcguucacaacuaaacacuaagugcccu

SEQ ID NO: 62548 - RNA, 32 nt, Homo Sapiens
ggaaaaaguauuucugaagcugaaucaaauua

SEQ ID NO: 62549 - RNA, 32 nt, Homo Sapiens
acagcucacacgcccucuccauucaucgaacu

SEQ ID NO: 62550 - RNA, 32 nt, Homo Sapiens
agugccagaagcugcuggggcggcagacagac

SEQ ID NO: 62551 - RNA, 32 nt, Homo Sapiens
cuggccugucuccacucuugcauuauccuuca

SEQ ID NO: 62552 - RNA, 28 nt, Homo Sapiens
uaagggugagcacucaggaugacugugg

SEQ ID NO: 62553 - RNA, 32 nt, Homo Sapiens
ucagcuuucccugggcacaucugccucauucc

SEQ ID NO: 62554 - RNA, 32 nt, Homo Sapiens
uccucagacaccuuuagacaauagagaagaag

SEQ ID NO: 62555 - RNA, 32 nt, Homo Sapiens
gcuguucagucgucuguauuuauauuccuuca

SEQ ID NO: 62556 - RNA, 32 nt, Homo Sapiens
uauggagaacaaaacuaacaagcaccaaggca

SEQ ID NO: 62557 - RNA, 32 nt, Homo Sapiens
aaugcauuuuucccucaucaagcauauaucug

SEQ ID NO: 62558 - RNA, 32 nt, Homo Sapiens
ccugaccagcagacucaccucccaagaacgcc

SEQ ID NO: 62559 - RNA, 32 nt, Homo Sapiens
caacaacuaggauguguugggugagauguuuc

SEQ ID NO: 62560 - RNA, 32 nt, Homo Sapiens
gccagcggccggcggcaggccgggccaugagc

SEQ ID NO: 62561 - RNA, 32 nt, Homo Sapiens
gcgacaugucauugaguuuuuauuugguaaag

SEQ ID NO: 62562 - RNA, 32 nt, Homo Sapiens
ucagucccagggcuuagccggaggaagcacau

SEQ ID NO: 62563 - RNA, 32 nt, Homo Sapiens
agaaggucaacacuauaacaaguacuuuacag

SEQ ID NO: 62564 - RNA, 30 nt, Homo Sapiens
cacacguacauucacuacaaacgugcagcc

SEQ ID NO: 62565 - RNA, 32 nt, Homo Sapiens
uaggauaauuauuucauucaguuuuuggagcu

SEQ ID NO: 62566 - RNA, 32 nt, Homo Sapiens
uccgugucggcugaagauguaagggacugucc

SEQ ID NO: 62567 - RNA, 32 nt, Homo Sapiens
uagcuccuggagcgcgggacuuggacacggac

SEQ ID NO: 62568 - RNA, 32 nt, Homo Sapiens
uaccacgcaaugugcaagcaagggcaggaggu

SEQ ID NO: 62569 - RNA, 32 nt, Homo Sapiens
ucgcgcuucgguuuccccagaccugcucgcag

SEQ ID NO: 62570 - RNA, 32 nt, Homo Sapiens
gaauacccaagguguucuuucagcuuccagac

SEQ ID NO: 62571 - RNA, 32 nt, Homo Sapiens
uuuauuuagaaccugguucuguguuuaauaua

SEQ ID NO: 62572 - RNA, 32 nt, Homo Sapiens
uaaacccuauaaauccugcuguuaaggaaauc

SEQ ID NO: 62573 - RNA, 32 nt, Homo Sapiens
uagaaccauuuuccaggucucuucuggguugg

SEQ ID NO: 62574 - RNA, 32 nt, Homo Sapiens
uaauaccuuacauguauaaacuucuuauaagg

SEQ ID NO: 62575 - RNA, 32 nt, Homo Sapiens
cauuguccagaccuggucggggcccacuggaa

SEQ ID NO: 62576 - RNA, 32 nt, Homo Sapiens
uguuuuagaaucaucacugccuuaauauucaa

SEQ ID NO: 62577 - RNA, 32 nt, Homo Sapiens
ugcccaucuaguccccucuccugcaucugucu

SEQ ID NO: 62578 - RNA, 32 nt, Homo Sapiens
ugucucagauaauccucccaucaguguucugu

SEQ ID NO: 62579 - RNA, 32 nt, Homo Sapiens
cuggaggcugcgagagcagcuggcacugucag

SEQ ID NO: 62580 - RNA, 32 nt, Homo Sapiens
ggggcgcagaaccgcuacugcugcuucggucu

SEQ ID NO: 62581 - RNA, 32 nt, Homo Sapiens
gagacgauacucaaauuauaauaaaacucuuc

SEQ ID NO: 62582 - RNA, 32 nt, Homo Sapiens
uguuccucugcuggaccugggguaggcugcag

SEQ ID NO: 62583 - RNA, 32 nt, Homo Sapiens
aagaggugaacauguaugagugugugcacgcg

SEQ ID NO: 62584 - RNA, 32 nt, Homo Sapiens
ugcugcgggcgagcagcaggugcggaucugug

SEQ ID NO: 62585 - RNA, 32 nt, Homo Sapiens
ugucuaugcaauaaagggaggccucaccgcgg

SEQ ID NO: 62586 - RNA, 32 nt, Homo Sapiens
gugacacuuuugcuaacagguaccacuucuga

SEQ ID NO: 62587 - RNA, 32 nt, Homo Sapiens
ugaaaucuuuuuuauauguguuuugcugacuu

SEQ ID NO: 62588 - RNA, 32 nt, Homo Sapiens
ugacaagaucccaaaaugaggagcucugauuu

SEQ ID NO: 62589 - RNA, 32 nt, Homo Sapiens
gggacaugauucuauuuguuauaaaauaaaau

SEQ ID NO: 62590 - RNA, 32 nt, Homo Sapiens
gaaaagaucuuguagauguggccaguggagua

SEQ ID NO: 62591 - RNA, 32 nt, Homo Sapiens
ucaccguuagaaacagaaguggcuggaaacuc

SEQ ID NO: 62592 - RNA, 32 nt, Homo Sapiens
gagggggcuauuaauuauuuuuuagcaaaaug

SEQ ID NO: 62593 - RNA, 32 nt, Homo Sapiens
gucaccucagggcaucacugaacaaacauuuc

SEQ ID NO: 62594 - RNA, 32 nt, Homo Sapiens
aaaaagaaaaagaaacacaaauauuaauagaa

SEQ ID NO: 62595 - RNA, 32 nt, Homo Sapiens
uguaaaagacuaauauaaaaugguuuauaaga

SEQ ID NO: 62596 - RNA, 32 nt, Homo Sapiens
cuggaaugggguugguuuggacacccccaggg

SEQ ID NO: 62597 - RNA, 32 nt, Homo Sapiens
ggucucaaacucccagacucaagucauucucc

SEQ ID NO: 62598 - RNA, 32 nt, Homo Sapiens
cuauguccaccuucccaucucaucuuaccuua

SEQ ID NO: 62599 - RNA, 32 nt, Homo Sapiens
acuuguauauaaugcaccuucaggaggacuau

SEQ ID NO: 62600 - RNA, 32 nt, Homo Sapiens
aacccgggaggcggaggcugcagugggccggg

SEQ ID NO: 62601 - RNA, 32 nt, Homo Sapiens
cgaaaauggggcuguuaauauacucuaaaagc

SEQ ID NO: 62602 - RNA, 32 nt, Homo Sapiens
augcauucuuauaacauaaccucagaguaucu

SEQ ID NO: 62603 - RNA, 32 nt, Homo Sapiens
aacaaguccacaaugccagagaauuaaagaga

SEQ ID NO: 62604 - RNA, 32 nt, Homo Sapiens
agccaggacauuaggaccacuuguuguacauc

SEQ ID NO: 62605 - RNA, 29 nt, Homo Sapiens
ucguagaagcuaguauauuuuuuauauuu

SEQ ID NO: 62606 - RNA, 32 nt, Homo Sapiens
gggucgggugagcacucagagaucuggggagg

SEQ ID NO: 62607 - RNA, 31 nt, Homo Sapiens
gcuccccagcccucagcagcaucacaggauc

SEQ ID NO: 62608 - RNA, 32 nt, Homo Sapiens
cuuccccuguuuugcccuuccaccuucugcca

SEQ ID NO: 62609 - RNA, 32 nt, Homo Sapiens
ccugcugccugcgauuccccccggguaugugg

SEQ ID NO: 62610 - RNA, 32 nt, Homo Sapiens
gggagcagccccacuggaccuagugccccauc

SEQ ID NO: 62611 - RNA, 32 nt, Homo Sapiens
aagcggccguucucggauuccggagcguucug

SEQ ID NO: 62612 - RNA, 32 nt, Homo Sapiens
guggaggaaugggcaagaaccaccucaugauu

SEQ ID NO: 62613 - RNA, 32 nt, Homo Sapiens
aaaucaauugguuaucuuauagagucuccuag

SEQ ID NO: 62614 - RNA, 32 nt, Homo Sapiens
guccaacuuccacuuuuccacuucucacucuu

SEQ ID NO: 62615 - RNA, 32 nt, Homo Sapiens
gcaagagcuagcugcgcagaaggucuccgcug

SEQ ID NO: 62616 - RNA, 32 nt, Homo Sapiens
gggacacugagacacugagacucauugagaug

SEQ ID NO: 62617 - RNA, 32 nt, Homo Sapiens
cugacugggaaggacauaaaagguuuaauguc

SEQ ID NO: 62618 - RNA, 32 nt, Homo Sapiens
guccagcccggugccuggggcgccuuucagcu

SEQ ID NO: 62619 - RNA, 31 nt, Homo Sapiens
ggagagagcacaggacugggaguccagagac

SEQ ID NO: 62620 - RNA, 32 nt, Homo Sapiens
agaacugcagucagcaugaauccaguccagau

SEQ ID NO: 62621 - RNA, 32 nt, Homo Sapiens
uuucccaccgcccucccuccccagcuccgccu

SEQ ID NO: 62622 - RNA, 32 nt, Homo Sapiens
ccucucccgcccccuuacccgccccggagcgg

SEQ ID NO: 62623 - RNA, 32 nt, Homo Sapiens
uuuuuuuguguuucuuuuuucuuucucuguuu

SEQ ID NO: 62624 - RNA, 32 nt, Homo Sapiens
cccaccccaguacuccacagcaccuuguacag

SEQ ID NO: 62625 - RNA, 32 nt, Homo Sapiens
agccuguaaucccagcacuuugggaggcugug

SEQ ID NO: 62626 - RNA, 32 nt, Homo Sapiens
ccggcggcacggcgcuggggaggcgauggcgc

SEQ ID NO: 62627 - RNA, 32 nt, Homo Sapiens
gccagcccccuucuccacgguaaccaugugcg

SEQ ID NO: 62628 - RNA, 32 nt, Homo Sapiens
agggccggccacaagcgaguguccuugggcgu

SEQ ID NO: 62629 - RNA, 32 nt, Homo Sapiens
agaugcauuucaaaaggaaaguugguuuugag

SEQ ID NO: 62630 - RNA, 32 nt, Homo Sapiens
uuaaaaguauguguuuuaaaaauguaaccaga

SEQ ID NO: 62631 - RNA, 32 nt, Homo Sapiens
ggcaacuuucccugucgggcuugaguugggag

SEQ ID NO: 62632 - RNA, 32 nt, Homo Sapiens
cagugucgugucugcuguugugggaccguugu

SEQ ID NO: 62633 - RNA, 32 nt, Homo Sapiens
ccauggauauccacgcagcagccccucuuuaa

SEQ ID NO: 62634 - RNA, 29 nt, Homo Sapiens
uuucaguaugaagguuauuuucuuaacuu

SEQ ID NO: 62635 - RNA, 32 nt, Homo Sapiens
uucauucagaaucuguuuguugaucaagugac

SEQ ID NO: 62636 - RNA, 32 nt, Homo Sapiens
auacaaaugaauuuucuacaaaauuuaaagcu

SEQ ID NO: 62637 - RNA, 32 nt, Homo Sapiens
gcucccuagagcucuggugaccacuugccugu

SEQ ID NO: 62638 - RNA, 32 nt, Homo Sapiens
cccagcaacaaaccucccggcuaggagcuuua

SEQ ID NO: 62639 - RNA, 31 nt, Homo Sapiens
ggcccgaaauaaaagaauauauaguacucac

SEQ ID NO: 62640 - RNA, 32 nt, Homo Sapiens
uggaggggcuccuggagucacugcagagggag

SEQ ID NO: 62641 - RNA, 32 nt, Homo Sapiens
acagcgcguggguggccgaggaugcugcgggg

SEQ ID NO: 62642 - RNA, 32 nt, Homo Sapiens
uggcugcucaggggcuuaauucugccuuuuga

SEQ ID NO: 62643 - RNA, 32 nt, Homo Sapiens
acuggccuugagauaagcaaugcugaagcacu

SEQ ID NO: 62644 - RNA, 31 nt, Homo Sapiens
cugguucauuugauugcuugauaaggccuca

SEQ ID NO: 62645 - RNA, 32 nt, Homo Sapiens
caccacaggauuuccugaaaguuuacaaugca

SEQ ID NO: 62646 - RNA, 32 nt, Homo Sapiens
uaagaauauaaauaauagcaaacuacuauuaa

SEQ ID NO: 62647 - RNA, 32 nt, Homo Sapiens
gcuguuaaggacccucggagcccagaugcagc

SEQ ID NO: 62648 - RNA, 32 nt, Homo Sapiens
gagccgcguaucugggcccagcgcacccgcca

SEQ ID NO: 62649 - RNA, 32 nt, Homo Sapiens
gugcuucuacuaauucccgacucauugaauuu

SEQ ID NO: 62650 - RNA, 32 nt, Homo Sapiens
gguaccaggucuccuccaccgccauggcuucc

SEQ ID NO: 62651 - RNA, 32 nt, Homo Sapiens
cccuuuggggacgggcacaggaccccugaucc

SEQ ID NO: 62652 - RNA, 32 nt, Homo Sapiens
cugagcacuuccuggggagcuacaggggcacu

SEQ ID NO: 62653 - RNA, 32 nt, Homo Sapiens
ugagcugggcucacaagccugauucaaacagg

SEQ ID NO: 62654 - RNA, 29 nt, Homo Sapiens
gugggaccagauuucaguuuagaaauauc

SEQ ID NO: 62655 - RNA, 32 nt, Homo Sapiens
gaugcacaugggccgcaaaacacacagucagg

SEQ ID NO: 62656 - RNA, 32 nt, Homo Sapiens
ggcucuuucaaacaaaaacaaacaaacagccc

SEQ ID NO: 62657 - RNA, 32 nt, Homo Sapiens
gggaugauaugaauucauucuugacauauugu

SEQ ID NO: 62658 - RNA, 32 nt, Homo Sapiens
cgcggaggagcugcccaccugauucccggaca

SEQ ID NO: 62659 - RNA, 32 nt, Homo Sapiens
aucugccucuccccggggcccacacauuugaa

SEQ ID NO: 62660 - RNA, 32 nt, Homo Sapiens
aauuaauuuaucucuuuuuuuauuuuuauuua

SEQ ID NO: 62661 - RNA, 31 nt, Homo Sapiens
gguucugacaacuguaacgguuuugucgagc

SEQ ID NO: 62662 - RNA, 32 nt, Homo Sapiens
guuguuggcaagguagcaauaccaguuucaaa

SEQ ID NO: 62663 - RNA, 32 nt, Homo Sapiens
ucccaguaaaauguacauguuuuggagacuuc

SEQ ID NO: 62664 - RNA, 32 nt, Homo Sapiens
cacuagggcuacuguggcaucuauguagacag

SEQ ID NO: 62665 - RNA, 32 nt, Homo Sapiens
cuccuuaggaggagugagacaggugauaaugg

SEQ ID NO: 62666 - RNA, 31 nt, Homo Sapiens
cagcagaaacgcagccagcuuuucugggacc

SEQ ID NO: 62667 - RNA, 32 nt, Homo Sapiens
ccuucuggguugucucgaucuguguuucaaua

SEQ ID NO: 62668 - RNA, 32 nt, Homo Sapiens
uucccaaggccuggacccaguacucugggccu

SEQ ID NO: 62669 - RNA, 32 nt, Homo Sapiens
aagaaguuucuuuuucuuuaauaaauggaauc

SEQ ID NO: 62670 - RNA, 32 nt, Homo Sapiens
agcaggccagugggccaauuaagggcaaaggc

SEQ ID NO: 62671 - RNA, 32 nt, Homo Sapiens
cgcccaaaccggcgcuucgccggcgccaagau

SEQ ID NO: 62672 - RNA, 32 nt, Homo Sapiens
uuuacagaaaaguuucaaaaauaguacaaaga

SEQ ID NO: 62673 - RNA, 32 nt, Homo Sapiens
auggcugucuguauauuuuuacuuggggugcu

SEQ ID NO: 62674 - RNA, 32 nt, Homo Sapiens
uucuagagauuggaagucuaagaucacacagc

SEQ ID NO: 62675 - RNA, 32 nt, Homo Sapiens
aaacaggcccuccuuucaggaacuggucucga

SEQ ID NO: 62676 - RNA, 32 nt, Homo Sapiens
agacuuaaaaacaacacauuauuuggaaagac

SEQ ID NO: 62677 - RNA, 32 nt, Homo Sapiens
guucccugcacuuuucucugugccguucccca

SEQ ID NO: 62678 - RNA, 32 nt, Homo Sapiens
uuuccucaaggguaacaucuuacaaaacuaua

SEQ ID NO: 62679 - RNA, 32 nt, Homo Sapiens
ucaaguugcauucucaguucuaacuguacuaa

SEQ ID NO: 62680 - RNA, 32 nt, Homo Sapiens
ccggcugccccgagcugagcggagcauccuuu

SEQ ID NO: 62681 - RNA, 32 nt, Homo Sapiens
gugucauagaaucucaauaaauuuaugugaag

SEQ ID NO: 62682 - RNA, 32 nt, Homo Sapiens
cuuuugggucaagucuuaaucccugcaccuga

SEQ ID NO: 62683 - RNA, 32 nt, Homo Sapiens
aagcauaaaauggaauaacauaucaaaugaaa

SEQ ID NO: 62684 - RNA, 32 nt, Homo Sapiens
ugaaauuguuuggcuuuugccacuuucuuccu

SEQ ID NO: 62685 - RNA, 32 nt, Homo Sapiens
cgugccuucaggugcugguuaugcuuuaugac

SEQ ID NO: 62686 - RNA, 32 nt, Homo Sapiens
caccggcgcgucgaguuuccggcguccggaag

SEQ ID NO: 62687 - RNA, 32 nt, Homo Sapiens
cggcgucauggcggccuccgcgcacggcucug

SEQ ID NO: 62688 - RNA, 32 nt, Homo Sapiens
gagcucgccgcugccgcucccggagccgccga

SEQ ID NO: 62689 - RNA, 32 nt, Homo Sapiens
uacuuauugggaaagugugaguuaauauugga

SEQ ID NO: 62690 - RNA, 32 nt, Homo Sapiens
acagcccucacagcucaaacgcccacccccac

SEQ ID NO: 62691 - RNA, 32 nt, Homo Sapiens
aaaacuuacugaugcuaaaucacaguacaugc

SEQ ID NO: 62692 - RNA, 32 nt, Homo Sapiens
cuccccaucuucuccuuacugcaucucagccc

SEQ ID NO: 62693 - RNA, 32 nt, Homo Sapiens
ucuuuaacaagggcuagaaaagaauguaaucu

SEQ ID NO: 62694 - RNA, 32 nt, Homo Sapiens
uaaauugggcccaagagcuuuaacucggucuu

SEQ ID NO: 62695 - RNA, 32 nt, Homo Sapiens
uuauuuuggaaguuucuaucugguuuuguucu

SEQ ID NO: 62696 - RNA, 32 nt, Homo Sapiens
uuugucuucugauguuuuuucuuaaaauagua

SEQ ID NO: 62697 - RNA, 32 nt, Homo Sapiens
aacuguggugucuaaugacuaguugcuuguaa

SEQ ID NO: 62698 - RNA, 32 nt, Homo Sapiens
gagcagaucccagaccuucucuaccuucagga

SEQ ID NO: 62699 - RNA, 32 nt, Homo Sapiens
acaggucugcuacaaugcugcugcugcacaga

SEQ ID NO: 62700 - RNA, 32 nt, Homo Sapiens
ggagagagucggacggcgcccggagcgcggau

SEQ ID NO: 62701 - RNA, 32 nt, Homo Sapiens
cuucaaaggaaauaaacagaauguugaaguag

SEQ ID NO: 62702 - RNA, 32 nt, Homo Sapiens
agccccgccccggccacggccccgugucuugc

SEQ ID NO: 62703 - RNA, 32 nt, Homo Sapiens
uacgcgcgcgggggugcgcgcgggaacgaccg

SEQ ID NO: 62704 - RNA, 32 nt, Homo Sapiens
aucaaccagugauauaacuugauaaaaucaua

SEQ ID NO: 62705 - RNA, 32 nt, Homo Sapiens
auacauacauauauauauaucauauagcuuaa

SEQ ID NO: 62706 - RNA, 32 nt, Homo Sapiens
ggugcccagcucagccagacaaacccaccacg

SEQ ID NO: 62707 - RNA, 29 nt, Homo Sapiens
uugaauauauguaugcaggauaucaucaa

SEQ ID NO: 62708 - RNA, 28 nt, Homo Sapiens
cuccagccuggguuacagauccugucuc

SEQ ID NO: 62709 - RNA, 32 nt, Homo Sapiens
ccaugaggaagcugccuaaggagcccgaaaaa

SEQ ID NO: 62710 - RNA, 32 nt, Homo Sapiens
aaagaaaaggaaugaaauaaccgacccaucau

SEQ ID NO: 62711 - RNA, 32 nt, Homo Sapiens
ucgacuuugugugauaguaacuuuuuaagcag

SEQ ID NO: 62712 - RNA, 32 nt, Homo Sapiens
auuaguguguaaagaaugcauucuucauugua

SEQ ID NO: 62713 - RNA, 32 nt, Homo Sapiens
uuuaggggcacggaggagcccgggcuauccuu

SEQ ID NO: 62714 - RNA, 32 nt, Homo Sapiens
caccucagaugggaagcagaagggcaagaccu

SEQ ID NO: 62715 - RNA, 32 nt, Homo Sapiens
ccgaagaaggcucccuggggccccgcaacgcc

SEQ ID NO: 62716 - RNA, 32 nt, Homo Sapiens
cacccaaugacuucugcuuccaucucacuaac

SEQ ID NO: 62717 - RNA, 32 nt, Homo Sapiens
uucagaauuacauuuuaucguuuucacauuga

SEQ ID NO: 62718 - RNA, 32 nt, Homo Sapiens
ccugcggcuccuccuccuuauucuguccccuu

SEQ ID NO: 62719 - RNA, 32 nt, Homo Sapiens
gcaccuagagcccuccucccagccucccguca

SEQ ID NO: 62720 - RNA, 32 nt, Homo Sapiens
aauccccauuuuccuguuucagcauguuauau

SEQ ID NO: 62721 - RNA, 32 nt, Homo Sapiens
gggaggcggaggaggagccgagaucgugccac

SEQ ID NO: 62722 - RNA, 32 nt, Homo Sapiens
ccaguccgcccggagcccgcccagucgccgcg

SEQ ID NO: 62723 - RNA, 32 nt, Homo Sapiens
augccgccgcggcugcugccgccgccgccacc

SEQ ID NO: 62724 - RNA, 31 nt, Homo Sapiens
ucagcggccgugggccugccccuuguccuag

SEQ ID NO: 62725 - RNA, 32 nt, Homo Sapiens
gagcuuccgcgaggugggcuggcaccgcuggg

SEQ ID NO: 62726 - RNA, 32 nt, Homo Sapiens
uaaaccagcaccccaaauuuaucaacauagug

SEQ ID NO: 62727 - RNA, 32 nt, Homo Sapiens
augcuaaaagcaaggaauaaaaguugaaaauu

SEQ ID NO: 62728 - RNA, 32 nt, Homo Sapiens
cauguugcacaaaacagguguucaauaaauaa

SEQ ID NO: 62729 - RNA, 32 nt, Homo Sapiens
gguccagauuuugagcuggagaaggacuaugg

SEQ ID NO: 62730 - RNA, 32 nt, Homo Sapiens
ugcuaagaagcagucuaaauauaaucaacgua

SEQ ID NO: 62731 - RNA, 32 nt, Homo Sapiens
caagugcugggaucuggcgugugugcuccagg

SEQ ID NO: 62732 - RNA, 32 nt, Homo Sapiens
ugcagauguuuuuucuuuuaacaaacuggaau

SEQ ID NO: 62733 - RNA, 32 nt, Homo Sapiens
cuccuuucgguucccauggacccggcacccca

SEQ ID NO: 62734 - RNA, 32 nt, Homo Sapiens
cgucgugcugcugugccugcucugccaacucc

SEQ ID NO: 62735 - RNA, 32 nt, Homo Sapiens
acuuuguucaacaucagagaauuuauaucaaa

SEQ ID NO: 62736 - RNA, 32 nt, Homo Sapiens
agccgagcguccucgggcaccgcccucacacc

SEQ ID NO: 62737 - RNA, 32 nt, Homo Sapiens
uucaguuggagggaauauaugauacagucuuu

SEQ ID NO: 62738 - RNA, 32 nt, Homo Sapiens
accuccuggguucaagcaaaucuccugccuca

SEQ ID NO: 62739 - RNA, 32 nt, Homo Sapiens
uucacacgcuauaaagaacugccugagacugg

SEQ ID NO: 62740 - RNA, 32 nt, Homo Sapiens
aaacaaaacaaaacagaacaaaacguauuuaa

SEQ ID NO: 62741 - RNA, 32 nt, Homo Sapiens
ggagccauacauguaauuuaagagaacaguua

SEQ ID NO: 62742 - RNA, 32 nt, Homo Sapiens
agcgcaggggucaguucccacccccacccguc

SEQ ID NO: 62743 - RNA, 32 nt, Homo Sapiens
uaucauacugaauggggaaaaacugaaagacu

SEQ ID NO: 62744 - RNA, 32 nt, Homo Sapiens
acaaaguagagcucaugaacucugugcugucu

SEQ ID NO: 62745 - RNA, 32 nt, Homo Sapiens
gugcuuggguucggacagacagggaagaaggg

SEQ ID NO: 62746 - RNA, 32 nt, Homo Sapiens
guggagcgcauuuagaggcauucgacgaaaac

SEQ ID NO: 62747 - RNA, 32 nt, Homo Sapiens
gaaaauuaaguauuuaaaauguuccaauaaag

SEQ ID NO: 62748 - RNA, 30 nt, Homo Sapiens
gugaugggcaggcgaguggaaccacaggug

SEQ ID NO: 62749 - RNA, 32 nt, Homo Sapiens
cuaacaguucccuccucacagggucgcuauaa

SEQ ID NO: 62750 - RNA, 32 nt, Homo Sapiens
agaacucccgcacgagucuugccagugcuucc

SEQ ID NO: 62751 - RNA, 32 nt, Homo Sapiens
gcccgccuucaggcugcccgccgccccuccac

SEQ ID NO: 62752 - RNA, 32 nt, Homo Sapiens
cccuuguucccauuggccccaguuugcauucu

SEQ ID NO: 62753 - RNA, 32 nt, Homo Sapiens
cggggagccagaccugggagggagacuccucu

SEQ ID NO: 62754 - RNA, 32 nt, Homo Sapiens
uuaaaaaacuacuauuugaaaauuggaggggg

SEQ ID NO: 62755 - RNA, 32 nt, Homo Sapiens
ggcacugucauuaagaauacuaaggaaguaau

SEQ ID NO: 62756 - RNA, 32 nt, Homo Sapiens
ccagccagugagcccagugugcuugagugucu

SEQ ID NO: 62757 - RNA, 32 nt, Homo Sapiens
ggcagggcccccagccccuccccuggcugagc

SEQ ID NO: 62758 - RNA, 32 nt, Homo Sapiens
aauaauuugaagcgaggcaugagcggccccug

SEQ ID NO: 62759 - RNA, 32 nt, Homo Sapiens
auguuauauugcuuccuguguaacaucugcca

SEQ ID NO: 62760 - RNA, 32 nt, Homo Sapiens
ccauucaucauucguuuuuuaauuaggaaaag

SEQ ID NO: 62761 - RNA, 32 nt, Homo Sapiens
aaaaaguaacugugauucuuguaacuugagga

SEQ ID NO: 62762 - RNA, 32 nt, Homo Sapiens
cucauuuuauuaugaccuauaugcuccugauu

SEQ ID NO: 62763 - RNA, 32 nt, Homo Sapiens
caaagggagcagauggcaaggcuuucuccagg

SEQ ID NO: 62764 - RNA, 32 nt, Homo Sapiens
ccacugcuuugggggaaauggcugggaugagg

SEQ ID NO: 62765 - RNA, 32 nt, Homo Sapiens
uucucucuacucuuuucuuaauuuuuccuucu

SEQ ID NO: 62766 - RNA, 32 nt, Homo Sapiens
ccuccaccuucagauguaccuccagccuuuca

SEQ ID NO: 62767 - RNA, 32 nt, Homo Sapiens
ugguccgcgccggccgcaggggaaggggcggg

SEQ ID NO: 62768 - RNA, 32 nt, Homo Sapiens
ucuguccgcaugccuggggccuucgcccccac

SEQ ID NO: 62769 - RNA, 32 nt, Homo Sapiens
ggauaauagaaaguuggacuaaacugguuugu

SEQ ID NO: 62770 - RNA, 32 nt, Homo Sapiens
ucgggcuucggguuggugaaggcggggugggg

SEQ ID NO: 62771 - RNA, 32 nt, Homo Sapiens
auuccuuucugcaacugcgguggcaccacaaa

SEQ ID NO: 62772 - RNA, 32 nt, Homo Sapiens
aggauggcaugggaaagagugccugaggaucc

SEQ ID NO: 62773 - RNA, 32 nt, Homo Sapiens
uugcuggagaugaggaacaggugcuggggcua

SEQ ID NO: 62774 - RNA, 32 nt, Homo Sapiens
aacaacuggggauagggauggggucaggggga

SEQ ID NO: 62775 - RNA, 32 nt, Homo Sapiens
acauaugcuaaauaaacauaauuuaaaaaaca

SEQ ID NO: 62776 - RNA, 32 nt, Homo Sapiens
augauguuccuguucaucuccuccuuucuccc

SEQ ID NO: 62777 - RNA, 32 nt, Homo Sapiens
aacuuuagaaaauuauuuaaaacauaacaaua

SEQ ID NO: 62778 - RNA, 32 nt, Homo Sapiens
aggauauuucucaguuauucuaagggccaaau

SEQ ID NO: 62779 - RNA, 32 nt, Homo Sapiens
uucccaucaacaaugcacaaggguuccaguuu

SEQ ID NO: 62780 - RNA, 32 nt, Homo Sapiens
auguugcauaaacuaacacagauucuguaguc

SEQ ID NO: 62781 - RNA, 32 nt, Homo Sapiens
gcugcccuccccgucagccgcccucgccgccg

SEQ ID NO: 62782 - RNA, 32 nt, Homo Sapiens
agaggaccaggacuugugcagacgccacaguc

SEQ ID NO: 62783 - RNA, 32 nt, Homo Sapiens
uccugagccccggcccccguaaccaagcagug

SEQ ID NO: 62784 - RNA, 32 nt, Homo Sapiens
cuuaggcuucucccaacuuaacaaaaaucaac

SEQ ID NO: 62785 - RNA, 32 nt, Homo Sapiens
gggcaauguauuuuacgcuguguuaaauguua

SEQ ID NO: 62786 - RNA, 32 nt, Homo Sapiens
cgcaugcauaauguaugauggaggcuuggaug

SEQ ID NO: 62787 - RNA, 32 nt, Homo Sapiens
uccgcgcccuccccgccgccaccagccgucaa

SEQ ID NO: 62788 - RNA, 32 nt, Homo Sapiens
auaaugaaaaauuuaaauggagaaugauuuaa

SEQ ID NO: 62789 - RNA, 32 nt, Homo Sapiens
aaacgcugcccggcuacagucugucgcuggau

SEQ ID NO: 62790 - RNA, 32 nt, Homo Sapiens
gccuuaagugguuuuuuuuuuuguuuuuguuu

SEQ ID NO: 62791 - RNA, 32 nt, Homo Sapiens
cugacguggguccgcuggucuccggcgggaca

SEQ ID NO: 62792 - RNA, 32 nt, Homo Sapiens
guggacaagagcugcgcccuggagcaugugac

SEQ ID NO: 62793 - RNA, 32 nt, Homo Sapiens
auagauaaauauauuuuuuucaggaaauagug

SEQ ID NO: 62794 - RNA, 32 nt, Homo Sapiens
aauuccagauggagcugaaauuagcaguuauc

SEQ ID NO: 62795 - RNA, 32 nt, Homo Sapiens
cugcgugagaagcucaaguccaugacgucccg

SEQ ID NO: 62796 - RNA, 32 nt, Homo Sapiens
uggagaaaaauaauuacacuuucaaagagaau

SEQ ID NO: 62797 - RNA, 32 nt, Homo Sapiens
gcuggcucugcugcugccgccggcgaaggagg

SEQ ID NO: 62798 - RNA, 32 nt, Homo Sapiens
ggggugaggaagaugugcgggccagggaaugu

SEQ ID NO: 62799 - RNA, 32 nt, Homo Sapiens
auggcaggucccuccgccacccccggcccggu

SEQ ID NO: 62800 - RNA, 31 nt, Homo Sapiens
gggcgggagccccggcaguccggggucgccg

SEQ ID NO: 62801 - RNA, 32 nt, Homo Sapiens
gagcucauggagcuugagaucuucuuagccca

SEQ ID NO: 62802 - RNA, 30 nt, Homo Sapiens
gaaaacugguauggcuauucuugaaggcca

SEQ ID NO: 62803 - RNA, 32 nt, Homo Sapiens
auuacugagacaggucacaaacaucaaaauag

SEQ ID NO: 62804 - RNA, 32 nt, Homo Sapiens
uuuucuggagacggaguuucgcucuuguugcc

SEQ ID NO: 62805 - RNA, 32 nt, Homo Sapiens
gaugagcauggugaauauggggaccaggaaaa

SEQ ID NO: 62806 - RNA, 32 nt, Homo Sapiens
gggacgcuuuguggggacuuugaaccuuuccu

SEQ ID NO: 62807 - RNA, 32 nt, Homo Sapiens
uccuucucacuccccuuucucaggccaggagg

SEQ ID NO: 62808 - RNA, 32 nt, Homo Sapiens
auugcaucuauuuacuugcuuuguuucccuaa

SEQ ID NO: 62809 - RNA, 32 nt, Homo Sapiens
gggugggaaugggggauguggagacugagcug

SEQ ID NO: 62810 - RNA, 32 nt, Homo Sapiens
caugggguggguggaggccagggacgcugcuc

SEQ ID NO: 62811 - RNA, 32 nt, Homo Sapiens
ucaaauuucaacauagagaaaucagucauuug

SEQ ID NO: 62812 - RNA, 32 nt, Homo Sapiens
cugcggguguuuccucaccacgcugggcgcuu

SEQ ID NO: 62813 - RNA, 32 nt, Homo Sapiens
ccucaaacucuaagcagacucccucucucccu

SEQ ID NO: 62814 - RNA, 32 nt, Homo Sapiens
aagcuaaaacaaaaauaaaugucaguuuauau

SEQ ID NO: 62815 - RNA, 32 nt, Homo Sapiens
ggacagugacgacgaggcgggccagagcugag

SEQ ID NO: 62816 - RNA, 32 nt, Homo Sapiens
cccaugcacauauuucuccuaauuguggaaau

SEQ ID NO: 62817 - RNA, 32 nt, Homo Sapiens
aacaucuagugggauuagcaaggugaagggaa

SEQ ID NO: 62818 - RNA, 32 nt, Homo Sapiens
ucgagcuagaaaaagacaggcauggcuuuggg

SEQ ID NO: 62819 - RNA, 32 nt, Homo Sapiens
cccagcuuccccuugggugaaaauagucucuu

SEQ ID NO: 62820 - RNA, 32 nt, Homo Sapiens
ggggcuccaagccccagcguggggaagggccc

SEQ ID NO: 62821 - RNA, 32 nt, Homo Sapiens
auuuaauaagaagcauuuugcacucuagaaag

SEQ ID NO: 62822 - RNA, 32 nt, Homo Sapiens
ugucagagaacaaaagaaacagaaucaauaua

SEQ ID NO: 62823 - RNA, 32 nt, Homo Sapiens
uuagacauaggcaaaugcugcaaacuuccaau

SEQ ID NO: 62824 - RNA, 32 nt, Homo Sapiens
cuccauccugcgccccaauaccucagcuagcc

SEQ ID NO: 62825 - RNA, 32 nt, Homo Sapiens
acaucuaacgcgcgggcacccgggccgccgcg

SEQ ID NO: 62826 - RNA, 32 nt, Homo Sapiens
agguccggaggcgggggcccccggggcgacuc

SEQ ID NO: 62827 - RNA, 32 nt, Homo Sapiens
cacgauggugccuguguucugugaaugugucc

SEQ ID NO: 62828 - RNA, 32 nt, Homo Sapiens
ccuugaugcucauauuguucccuaauuugcca

SEQ ID NO: 62829 - RNA, 32 nt, Homo Sapiens
gugggaggccgcggccaccgccaccugccggc

SEQ ID NO: 62830 - RNA, 32 nt, Homo Sapiens
gcccauuccugccugguccaguggggaacagg

SEQ ID NO: 62831 - RNA, 32 nt, Homo Sapiens
cagcauccugcaccccagguuuacaagcuuuu

SEQ ID NO: 62832 - RNA, 29 nt, Homo Sapiens
ugaccaaaauaaauaugaaaucuuauauu

SEQ ID NO: 62833 - RNA, 32 nt, Homo Sapiens
ccugcucuugccagcuggccccugcuuccccu

SEQ ID NO: 62834 - RNA, 32 nt, Homo Sapiens
guggaggccgagaagggugggcggcggcgggc

SEQ ID NO: 62835 - RNA, 32 nt, Homo Sapiens
uguuuaaauucugacuuuuggcuauuaaaugg

SEQ ID NO: 62836 - RNA, 32 nt, Homo Sapiens
cucccucccucuguuguccccuccucaggcuu

SEQ ID NO: 62837 - RNA, 32 nt, Homo Sapiens
uagagauaauaagaaauuguucugguagauac

SEQ ID NO: 62838 - RNA, 32 nt, Homo Sapiens
uaccccuucuauuuccugacauaaauaaaugg

SEQ ID NO: 62839 - RNA, 32 nt, Homo Sapiens
ccuauuuccccucaucuaguccauuuacgauu

SEQ ID NO: 62840 - RNA, 32 nt, Homo Sapiens
gggaagagcugcccgcauacugagagacagcu

SEQ ID NO: 62841 - RNA, 32 nt, Homo Sapiens
cauugacgucuugauuucagacuuccaggauc

SEQ ID NO: 62842 - RNA, 32 nt, Homo Sapiens
gauuuuuggugguucagaaauaggugugugug

SEQ ID NO: 62843 - RNA, 32 nt, Homo Sapiens
ucaauuugaaacacaagaauuacacuaauagu

SEQ ID NO: 62844 - RNA, 32 nt, Homo Sapiens
gaaggugccacccgccuuggcugcugaaaggg

SEQ ID NO: 62845 - RNA, 32 nt, Homo Sapiens
uuuaguuuuuaaaauaucuuuugaccuguggu

SEQ ID NO: 62846 - RNA, 32 nt, Homo Sapiens
caaggggcuguauugcaaaggccgcuuauggu

SEQ ID NO: 62847 - RNA, 32 nt, Homo Sapiens
cccccuacgcacccuguagaggcguggaguaa

SEQ ID NO: 62848 - RNA, 32 nt, Homo Sapiens
auaguccuuucaguauaaugucuuagauuaaa

SEQ ID NO: 62849 - RNA, 32 nt, Homo Sapiens
ccccggcggcgucucuccgcggaccgguccua

SEQ ID NO: 62850 - RNA, 32 nt, Homo Sapiens
gggccucggcgcccagcaggcgcggggcgaag

SEQ ID NO: 62851 - RNA, 32 nt, Homo Sapiens
uuucucgguucucagaggaaaaguaugaauga

SEQ ID NO: 62852 - RNA, 32 nt, Homo Sapiens
gaaagcccgggaagacaguaaauauuaggcug

SEQ ID NO: 62853 - RNA, 32 nt, Homo Sapiens
gugcuagcuccgcgcucccugccucgcucgcu

SEQ ID NO: 62854 - RNA, 32 nt, Homo Sapiens
cauggugcccugccugcccccgggcgccaccu

SEQ ID NO: 62855 - RNA, 32 nt, Homo Sapiens
caacaaagaccacuucccaguccuccggggcg

SEQ ID NO: 62856 - RNA, 32 nt, Homo Sapiens
acggggggccccagucagccucucucccaguc

SEQ ID NO: 62857 - RNA, 32 nt, Homo Sapiens
cuccagcaccagccggcugugcgcucccugcu

SEQ ID NO: 62858 - RNA, 32 nt, Homo Sapiens
aaguuuaauaauagguuuauuaacugaauuuc

SEQ ID NO: 62859 - RNA, 32 nt, Homo Sapiens
ugggccucugguggaccagagauuaccccucu

SEQ ID NO: 62860 - RNA, 32 nt, Homo Sapiens
auaccuguuuuucuccuucucuuauuccauuu

SEQ ID NO: 62861 - RNA, 32 nt, Homo Sapiens
uuggaucccagcucagcuuuguggcuuggauu

SEQ ID NO: 62862 - RNA, 32 nt, Homo Sapiens
guuggaaaaaauuuuuaggaaacucaccuucc

SEQ ID NO: 62863 - RNA, 27 nt, Homo Sapiens
cagauguccuucugaauccacuaaacc

SEQ ID NO: 62864 - RNA, 32 nt, Homo Sapiens
agguggaagauaaguaagcagguacuuaaagc

SEQ ID NO: 62865 - RNA, 32 nt, Homo Sapiens
ucccuggccccacucugaggggcucagagcug

SEQ ID NO: 62866 - RNA, 32 nt, Homo Sapiens
ugagugcgcgcccugagucgcaggccgaggag

SEQ ID NO: 62867 - RNA, 32 nt, Homo Sapiens
acccuuucgcgacugcugcugcugcugcccgg

SEQ ID NO: 62868 - RNA, 32 nt, Homo Sapiens
aaggccacauucaagauuuuggacuucaguga

SEQ ID NO: 62869 - RNA, 32 nt, Homo Sapiens
gaucugguccgggagaucugggaucucugguu

SEQ ID NO: 62870 - RNA, 32 nt, Homo Sapiens
gccaacaaaaccaagucucuagguuccucuua

SEQ ID NO: 62871 - RNA, 32 nt, Homo Sapiens
uaauuccuuacuaccgcuaacuccagucauaa

SEQ ID NO: 62872 - RNA, 32 nt, Homo Sapiens
uuuuuauuuggcaagauugugguuucagaaug

SEQ ID NO: 62873 - RNA, 32 nt, Homo Sapiens
aaauguggacgaaggcagcccuuccuggagac

SEQ ID NO: 62874 - RNA, 32 nt, Homo Sapiens
gcgcggaccccggcgagcagcccagugcaccc

SEQ ID NO: 62875 - RNA, 32 nt, Homo Sapiens
uguuuguuuuuuucuuuuuuuauaaauaaacu

SEQ ID NO: 62876 - RNA, 32 nt, Homo Sapiens
ccugaauugaaugaugaaauguuguaugugug

SEQ ID NO: 62877 - RNA, 32 nt, Homo Sapiens
aagacauccuuaaaguuuuuauuuguuugggu

SEQ ID NO: 62878 - RNA, 32 nt, Homo Sapiens
guucuauuuaguguacugcuucaccaagugcc

SEQ ID NO: 62879 - RNA, 32 nt, Homo Sapiens
ggaaacauucuuauuucuuucagaagacauuu

SEQ ID NO: 62880 - RNA, 32 nt, Homo Sapiens
ccagagucgaggcuccuagcauccccuacgua

SEQ ID NO: 62881 - RNA, 32 nt, Homo Sapiens
gauaaaagauauauauuuuaaauauuucccca

SEQ ID NO: 62882 - RNA, 32 nt, Homo Sapiens
gccgcagccccggccugggcgagagcgcgaau

SEQ ID NO: 62883 - RNA, 32 nt, Homo Sapiens
aucaggggcugggacauggggguguggguaaa

SEQ ID NO: 62884 - RNA, 32 nt, Homo Sapiens
aauccgaaccccggagugcugacgcgguuccc

SEQ ID NO: 62885 - RNA, 32 nt, Homo Sapiens
ucauauaaaagcuauggugagaugcagcugga

SEQ ID NO: 62886 - RNA, 32 nt, Homo Sapiens
caggguuuucuuuuaguggaaacaaaugguug

SEQ ID NO: 62887 - RNA, 32 nt, Homo Sapiens
cgcggcgaugaacgcgaccuuccugaaccaca

SEQ ID NO: 62888 - RNA, 32 nt, Homo Sapiens
gcagacgccgcgccgcgcugcgacgcuguagu

SEQ ID NO: 62889 - RNA, 32 nt, Homo Sapiens
acauuauuccaagaguaucccaguauuagcaa

SEQ ID NO: 62890 - RNA, 32 nt, Homo Sapiens
cggaagguggccugggacuaugggcggcuggc

SEQ ID NO: 62891 - RNA, 32 nt, Homo Sapiens
cggaacccgccuucaggggcgcacgcgcgcug

SEQ ID NO: 62892 - RNA, 32 nt, Homo Sapiens
cauggaagauaaauuugcagaauauacucaaa

SEQ ID NO: 62893 - RNA, 32 nt, Homo Sapiens
cuuugcgcuccgcagcggcgcgccucgcccgg

SEQ ID NO: 62894 - RNA, 32 nt, Homo Sapiens
uggcaagcgacgccccaccugccccgagcuca

SEQ ID NO: 62895 - RNA, 32 nt, Homo Sapiens
uggcugcugggagggggcgcugcuacacggcc

SEQ ID NO: 62896 - RNA, 32 nt, Homo Sapiens
aagaucgaaacacggcacguggcugccaugga

SEQ ID NO: 62897 - RNA, 32 nt, Homo Sapiens
ugguuuugggggauauuuuuuauuuguuucau

SEQ ID NO: 62898 - RNA, 32 nt, Homo Sapiens
ccagcacuugguuuuccaacaugauauuuaug

SEQ ID NO: 62899 - RNA, 32 nt, Homo Sapiens
cuaaaucaggaagcuguuuuaucgaugguuuc

SEQ ID NO: 62900 - RNA, 32 nt, Homo Sapiens
gagggcacguggagccgcgucugggcucgcgg

SEQ ID NO: 62901 - RNA, 32 nt, Homo Sapiens
gcccuagcggcuuggcggagcuggagcccucc

SEQ ID NO: 62902 - RNA, 30 nt, Homo Sapiens
uuaagaaguaucccugauuuauucuggugu

SEQ ID NO: 62903 - RNA, 32 nt, Homo Sapiens
uuauauauuaaacauucuugcugcugcgcugc

SEQ ID NO: 62904 - RNA, 32 nt, Homo Sapiens
aguugaacuuuucuucaacuggcucuuaagcu

SEQ ID NO: 62905 - RNA, 32 nt, Homo Sapiens
ucagaagcccguggcacggcuuucucggcguc

SEQ ID NO: 62906 - RNA, 32 nt, Homo Sapiens
ugcacauuucugaccacgauuccuccgcacac

SEQ ID NO: 62907 - RNA, 31 nt, Homo Sapiens
uuucuugaacauuugaaugugcuguugucug

SEQ ID NO: 62908 - RNA, 32 nt, Homo Sapiens
cggcucggaggagcggcugcugcugcugcugc

SEQ ID NO: 62909 - RNA, 32 nt, Homo Sapiens
acacugcagggagagggcaggcggcugcugcu

SEQ ID NO: 62910 - RNA, 32 nt, Homo Sapiens
auccauucaaggaagcagaaauggucaggcuc

SEQ ID NO: 62911 - RNA, 27 nt, Homo Sapiens
aaaugacauuaauucugcauaugaaga

SEQ ID NO: 62912 - RNA, 32 nt, Homo Sapiens
uuacggagaggagaaaguugugcagugauucc

SEQ ID NO: 62913 - RNA, 31 nt, Homo Sapiens
auugggugaaacacauuuuacagcucucaau

SEQ ID NO: 62914 - RNA, 32 nt, Homo Sapiens
ccagcccgcccggccuggcccggacgcugcca

SEQ ID NO: 62915 - RNA, 32 nt, Homo Sapiens
ggcagcagaucuucuuuauaacuauuuauugu

SEQ ID NO: 62916 - RNA, 32 nt, Homo Sapiens
uauauuuuaaagaucucucucacuccauaaag

SEQ ID NO: 62917 - RNA, 32 nt, Homo Sapiens
uggaaacugauuuauaucuuuuuuaugaccuu

SEQ ID NO: 62918 - RNA, 32 nt, Homo Sapiens
ccacguucccaucacccaccucauugauccac

SEQ ID NO: 62919 - RNA, 32 nt, Homo Sapiens
cuuccaaguuucccuuuuuccagaugggauua

SEQ ID NO: 62920 - RNA, 32 nt, Homo Sapiens
guggauugauuugauuuuaauguucgaguuuu

SEQ ID NO: 62921 - RNA, 32 nt, Homo Sapiens
gcugcuuagauauaauauuagauaaauauaac

SEQ ID NO: 62922 - RNA, 32 nt, Homo Sapiens
aacugaggcagacaguggucaggcaggaccau

SEQ ID NO: 62923 - RNA, 32 nt, Homo Sapiens
aaaggccccuccccccagccuuccaaguccau

SEQ ID NO: 62924 - RNA, 32 nt, Homo Sapiens
uucuauucuuggugcguguugaggagagaacg

SEQ ID NO: 62925 - RNA, 32 nt, Homo Sapiens
ucugcggggcagaggagaaggcuuucgcagcu

SEQ ID NO: 62926 - RNA, 32 nt, Homo Sapiens
ucccuucuguucuguucauguagcacagauaa

SEQ ID NO: 62927 - RNA, 32 nt, Homo Sapiens
ucgcgggcagugggaagcagugggguaacgug

SEQ ID NO: 62928 - RNA, 32 nt, Homo Sapiens
auggcaggcgccgggggcguggcuuccggcgg

SEQ ID NO: 62929 - RNA, 32 nt, Homo Sapiens
cucgcauccguauagcacuuuaaaguuucugc

SEQ ID NO: 62930 - RNA, 32 nt, Homo Sapiens
ugaugucauuuucucccugagcuguagggugg

SEQ ID NO: 62931 - RNA, 32 nt, Homo Sapiens
gccuguagauauuuuuaaugccauuuaaugcc

SEQ ID NO: 62932 - RNA, 32 nt, Homo Sapiens
aagcaugguccccaaauccuaucccucacccu

SEQ ID NO: 62933 - RNA, 32 nt, Homo Sapiens
gcugcagccucccuuccaugccccaggaucac

SEQ ID NO: 62934 - RNA, 32 nt, Homo Sapiens
agucauggaaauucacugguaaaauuguugca

SEQ ID NO: 62935 - RNA, 32 nt, Homo Sapiens
ucucagucaccauuguguuagaagcuggcuug

SEQ ID NO: 62936 - RNA, 32 nt, Homo Sapiens
cagagagagauuacauagagguguccaaaaug

SEQ ID NO: 62937 - RNA, 32 nt, Homo Sapiens
acccaggguuacugaggacuuaugcugccuga

SEQ ID NO: 62938 - RNA, 32 nt, Homo Sapiens
cuggguuccagaaggggaaauucucuucaagg

SEQ ID NO: 62939 - RNA, 32 nt, Homo Sapiens
uggccgcguguauauuguuuucuuuuggugac

SEQ ID NO: 62940 - RNA, 32 nt, Homo Sapiens
ccauuauuacaauuggcugcagcaccuucaag

SEQ ID NO: 62941 - RNA, 32 nt, Homo Sapiens
auuaggccccaacaaauacacaauauagcuaa

SEQ ID NO: 62942 - RNA, 32 nt, Homo Sapiens
gccugucacuguauguaugacucuguauggga

SEQ ID NO: 62943 - RNA, 32 nt, Homo Sapiens
gcagggagggcuuccucccgggguccuaggcg

SEQ ID NO: 62944 - RNA, 32 nt, Homo Sapiens
uugcgcucucuacggggccgcggccacuagcg

SEQ ID NO: 62945 - RNA, 32 nt, Homo Sapiens
gaccccuuacuuuggugcugaucauaaucuca

SEQ ID NO: 62946 - RNA, 32 nt, Homo Sapiens
augaacugcugagacuugauugacguauuuua

SEQ ID NO: 62947 - RNA, 32 nt, Homo Sapiens
ugggcccaucccagcccuggccuguggccuuu

SEQ ID NO: 62948 - RNA, 32 nt, Homo Sapiens
uauagcucuuguuuuucucacaguuucuuuaa

SEQ ID NO: 62949 - RNA, 32 nt, Homo Sapiens
ggauguaaagauugugugucuauccaacaggg

SEQ ID NO: 62950 - RNA, 27 nt, Homo Sapiens
gucauaauaaaaauaacuuuuuacauc

SEQ ID NO: 62951 - RNA, 31 nt, Homo Sapiens
cccgcggagccccgaugcuggcccggaggaa

SEQ ID NO: 62952 - RNA, 32 nt, Homo Sapiens
uguauaauuugguccuaucugcuucuaccauc

SEQ ID NO: 62953 - RNA, 32 nt, Homo Sapiens
gugcccucacccacuccauggaccucaagcag

SEQ ID NO: 62954 - RNA, 32 nt, Homo Sapiens
gaaggacaagaagaaagaugggauagaauuua

SEQ ID NO: 62955 - RNA, 32 nt, Homo Sapiens
acauuauauaauguauagugugauuaauauag

SEQ ID NO: 62956 - RNA, 32 nt, Homo Sapiens
cgggggcugcgagcacaggcccggggcugauc

SEQ ID NO: 62957 - RNA, 32 nt, Homo Sapiens
uucauccugcuucaagucagcuucagaaaugu

SEQ ID NO: 62958 - RNA, 32 nt, Homo Sapiens
gcagaauaucaaagucauuucuaauuuaguug

SEQ ID NO: 62959 - RNA, 27 nt, Homo Sapiens
aaacccuuucaccucagcccccggagu

SEQ ID NO: 62960 - RNA, 32 nt, Homo Sapiens
gagggcaccaggaaacaaagaugccuccccag

SEQ ID NO: 62961 - RNA, 32 nt, Homo Sapiens
auguggaaacucaaaccguuaggcuccaguca

SEQ ID NO: 62962 - RNA, 32 nt, Homo Sapiens
uccauccuuguuugaugaucgaccacagaaua

SEQ ID NO: 62963 - RNA, 32 nt, Homo Sapiens
gaaugacucugcaagccuugcugguccaagug

SEQ ID NO: 62964 - RNA, 32 nt, Homo Sapiens
caccaaucagcacccugucaaaacagaccacu

SEQ ID NO: 62965 - RNA, 32 nt, Homo Sapiens
agugaccagagcaauuucugcuuuucacaggg

SEQ ID NO: 62966 - RNA, 32 nt, Homo Sapiens
gcggcgcaguugcgagugcaggcuccuugcca

SEQ ID NO: 62967 - RNA, 32 nt, Homo Sapiens
cguccgugccggugcgggcgccggcauguggc

SEQ ID NO: 62968 - RNA, 32 nt, Homo Sapiens
ucguccgccccgaggcugaggaccaguaggca

SEQ ID NO: 62969 - RNA, 31 nt, Homo Sapiens
ccgcgacggcgcugccugcccgaggcgguuc

SEQ ID NO: 62970 - RNA, 32 nt, Homo Sapiens
cagcgccggcuugguggucaagcggugggagg

SEQ ID NO: 62971 - RNA, 32 nt, Homo Sapiens
ucaguguucgcagucgcauauuacaaccaugu

SEQ ID NO: 62972 - RNA, 32 nt, Homo Sapiens
gagaugcucacagauacaaagacguuaaaaaa

SEQ ID NO: 62973 - RNA, 31 nt, Homo Sapiens
ugcaggcgcaguccucugccccgagcaccca

SEQ ID NO: 62974 - RNA, 32 nt, Homo Sapiens
aacuaggcauaaccuuacauaauacuaggaaa

SEQ ID NO: 62975 - RNA, 31 nt, Homo Sapiens
aucuuuuggucaauaaaauagauugacucag

SEQ ID NO: 62976 - RNA, 32 nt, Homo Sapiens
uacacugucuauuggaugugggacuucccuca

SEQ ID NO: 62977 - RNA, 32 nt, Homo Sapiens
auagaauaaaauguucauacgcauagacuguu

SEQ ID NO: 62978 - RNA, 32 nt, Homo Sapiens
ccacugcacccagccuaucuuuugcauuguuu

SEQ ID NO: 62979 - RNA, 32 nt, Homo Sapiens
cccacccaggacaaggccuagaugaggaaacu

SEQ ID NO: 62980 - RNA, 32 nt, Homo Sapiens
uuagugcucgggccggccgccuucacuucccu

SEQ ID NO: 62981 - RNA, 32 nt, Homo Sapiens
aagcccgccagccccagccgcuccuccacgcc

SEQ ID NO: 62982 - RNA, 32 nt, Homo Sapiens
aauaaguguagcaaaaucuccuuagauaucug

SEQ ID NO: 62983 - RNA, 32 nt, Homo Sapiens
acccggcacgcagucccggcccgagccgacgc

SEQ ID NO: 62984 - RNA, 32 nt, Homo Sapiens
ggcgagacugagauccuggugucgugggcacc

SEQ ID NO: 62985 - RNA, 32 nt, Homo Sapiens
ugagcgagggguggcagcgccggcgccccaga

SEQ ID NO: 62986 - RNA, 32 nt, Homo Sapiens
uagggggagaggaggaguuaagggcuccguuu

SEQ ID NO: 62987 - RNA, 32 nt, Homo Sapiens
cauugccgugcauccuggucaagccccccuca

SEQ ID NO: 62988 - RNA, 32 nt, Homo Sapiens
ugcuccccgcggcucucggcggagccccgccg

SEQ ID NO: 62989 - RNA, 32 nt, Homo Sapiens
agaagccuaggaucacagggugauaaugucaa

SEQ ID NO: 62990 - RNA, 32 nt, Homo Sapiens
uacuuauaucuaagaaaaggcaucauagguuu

SEQ ID NO: 62991 - RNA, 31 nt, Homo Sapiens
agacguccauagccuuagguauaucauuuau

SEQ ID NO: 62992 - RNA, 32 nt, Homo Sapiens
gaagauggugccugugucagugcggcagucuu

SEQ ID NO: 62993 - RNA, 32 nt, Homo Sapiens
gaauguguuuuaaaggcuaauuaucagcucag

SEQ ID NO: 62994 - RNA, 32 nt, Homo Sapiens
uggagaauaaauuuauaaguaaaaauaauaug

SEQ ID NO: 62995 - RNA, 32 nt, Homo Sapiens
caacagagcuagaauggggcaaugcacucuua

SEQ ID NO: 62996 - RNA, 32 nt, Homo Sapiens
gcaacauggcuaaaccccgucucuacaaaaaa

SEQ ID NO: 62997 - RNA, 32 nt, Homo Sapiens
cuccgagggugggccucccaugccccaccgua

SEQ ID NO: 62998 - RNA, 32 nt, Homo Sapiens
cagcugcccagugucauagaaaagcaauucac

SEQ ID NO: 62999 - RNA, 31 nt, Homo Sapiens
uggagaaguacaaggaaggugcuguuucaug

SEQ ID NO: 63000 - RNA, 32 nt, Homo Sapiens
agcagaagccugacuggugccucuuacauguc

SEQ ID NO: 63001 - RNA, 32 nt, Homo Sapiens
gaucuggaaguaccaccuggacucacagagga

SEQ ID NO: 63002 - RNA, 32 nt, Homo Sapiens
cucccagggagcagcugcuugaccuagcucuu

SEQ ID NO: 63003 - RNA, 32 nt, Homo Sapiens
cacagcccugucaccacgccaccaugcagugc

SEQ ID NO: 63004 - RNA, 32 nt, Homo Sapiens
gagguguccacauuuaugguguguauagguaa

SEQ ID NO: 63005 - RNA, 32 nt, Homo Sapiens
ugcuugggaaagggcugugugacccuauuuag

SEQ ID NO: 63006 - RNA, 32 nt, Homo Sapiens
uugugauuuuuagaauagacuccuggguuguu

SEQ ID NO: 63007 - RNA, 32 nt, Homo Sapiens
gugauuuaggagguggagcagauucuaguacu

SEQ ID NO: 63008 - RNA, 32 nt, Homo Sapiens
agggagggaagaaaggagagaagaucugcgac

SEQ ID NO: 63009 - RNA, 32 nt, Homo Sapiens
auuuuugucacugcauaauauuacaaauauuu

SEQ ID NO: 63010 - RNA, 32 nt, Homo Sapiens
gaugugguuaggugcugguuccuagacaugug

SEQ ID NO: 63011 - RNA, 32 nt, Homo Sapiens
agaugguuucuguuuaaauuuauggucaaguu

SEQ ID NO: 63012 - RNA, 30 nt, Homo Sapiens
ccuguagagaagcgggaguggaucugaaau

SEQ ID NO: 63013 - RNA, 32 nt, Homo Sapiens
ccaccccugcuguucagccuucaguuuaucug

SEQ ID NO: 63014 - RNA, 32 nt, Homo Sapiens
cgcauggaauccacgcgcuccagggacucugc

SEQ ID NO: 63015 - RNA, 30 nt, Homo Sapiens
cggucugugugcaagcaccagugaccuuca

SEQ ID NO: 63016 - RNA, 32 nt, Homo Sapiens
guuaauugaugaugaagcuuauucccaaaaug

SEQ ID NO: 63017 - RNA, 32 nt, Homo Sapiens
caggcugcccuagcucagcaccucugaacuuu

SEQ ID NO: 63018 - RNA, 32 nt, Homo Sapiens
guugaacugugcgucagcacuccagucccauc

SEQ ID NO: 63019 - RNA, 32 nt, Homo Sapiens
cucccaggggaagaggggaagcacugucaucu

SEQ ID NO: 63020 - RNA, 32 nt, Homo Sapiens
auuugaauguuuuuuuuuuuuauuuuauuaag

SEQ ID NO: 63021 - RNA, 32 nt, Homo Sapiens
auuauuauuauuauuauuuuuaaaucccccgc

SEQ ID NO: 63022 - RNA, 32 nt, Homo Sapiens
aaucuaugaaaagccaaaauuuaagcuaauug

SEQ ID NO: 63023 - RNA, 32 nt, Homo Sapiens
cuccaggaguccggagcaugguccugggucac

SEQ ID NO: 63024 - RNA, 32 nt, Homo Sapiens
uuucuuaaggcacacuuccuacacacagcuau

SEQ ID NO: 63025 - RNA, 32 nt, Homo Sapiens
agagaggcagaagacuaggaaaaaaugggccc

SEQ ID NO: 63026 - RNA, 32 nt, Homo Sapiens
gcaguugugauaaauaaaaacaucucaccuaa

SEQ ID NO: 63027 - RNA, 32 nt, Homo Sapiens
uuguuaauuucuguuacuggcuuugcuagaau

SEQ ID NO: 63028 - RNA, 32 nt, Homo Sapiens
uccugccuuucuguaucuuggggaaauaagac

SEQ ID NO: 63029 - RNA, 32 nt, Homo Sapiens
cgcccacauccucaccaagagauuguguggga

SEQ ID NO: 63030 - RNA, 32 nt, Homo Sapiens
uauuaaaaaaacaaaauuauaguuaugcagcc

SEQ ID NO: 63031 - RNA, 32 nt, Homo Sapiens
uguaacgcaccaagucuuagaucuuucuagag

SEQ ID NO: 63032 - RNA, 32 nt, Homo Sapiens
gggccgagggggcuugcccacccaccccgacc

SEQ ID NO: 63033 - RNA, 32 nt, Homo Sapiens
guaugagcaacaaaaaaucagaaaagagccuu

SEQ ID NO: 63034 - RNA, 32 nt, Homo Sapiens
aguuuaaacaauuuguuaaaaauuuuccgucu

SEQ ID NO: 63035 - RNA, 32 nt, Homo Sapiens
ccaggaugggguauaaaagggcugggaggaga

SEQ ID NO: 63036 - RNA, 32 nt, Homo Sapiens
aaaucuuuuaaacuaaugcuugccugaacuuu

SEQ ID NO: 63037 - RNA, 32 nt, Homo Sapiens
ccucguccuccuccccgcuccggacgagccga

SEQ ID NO: 63038 - RNA, 32 nt, Homo Sapiens
ccaaaggaacgacacaauaaaaacuggaauuu

SEQ ID NO: 63039 - RNA, 32 nt, Homo Sapiens
gcucgccggcgugggcgggccggaccuucgcc

SEQ ID NO: 63040 - RNA, 32 nt, Homo Sapiens
aauggcuggguggaaccccagcauggagccuc

SEQ ID NO: 63041 - RNA, 32 nt, Homo Sapiens
gccuuuucucucuccccuuccacuuuuaagga

SEQ ID NO: 63042 - RNA, 32 nt, Homo Sapiens
cuccgacccgcacuaaguuggccaacugcacu

SEQ ID NO: 63043 - RNA, 32 nt, Homo Sapiens
ugguuucacagccuauuuuuuauuuucuaugg

SEQ ID NO: 63044 - RNA, 32 nt, Homo Sapiens
cuugaacucuuaaauuggaccagcaaacugcu

SEQ ID NO: 63045 - RNA, 32 nt, Homo Sapiens
uaaaauaagaccuaggaauacuauuuauuugc

SEQ ID NO: 63046 - RNA, 32 nt, Homo Sapiens
aguaaugaaacacauaagaugcuucccacucu

SEQ ID NO: 63047 - RNA, 32 nt, Homo Sapiens
uguuucaccauguuggucaggcuggucucgaa

SEQ ID NO: 63048 - RNA, 32 nt, Homo Sapiens
ugucuucaaagucugauuugugaugaggcaga

SEQ ID NO: 63049 - RNA, 32 nt, Homo Sapiens
accaaagcugucucuuaacugguuucuuuguc

SEQ ID NO: 63050 - RNA, 32 nt, Homo Sapiens
uaucauucaaaacaaccauccugcucauaaca

SEQ ID NO: 63051 - RNA, 32 nt, Homo Sapiens
ugggcugcuucucacauccugggcuggaugug

SEQ ID NO: 63052 - RNA, 32 nt, Homo Sapiens
uucagcuuucuguggauucuuuauuggaaaaa

SEQ ID NO: 63053 - RNA, 32 nt, Homo Sapiens
uguuuacuguuauauuuaggugacagguacau

SEQ ID NO: 63054 - RNA, 32 nt, Homo Sapiens
acauaugucauauuuuaauuauagaaaucagu

SEQ ID NO: 63055 - RNA, 32 nt, Homo Sapiens
auguuggagagccccaggacucacuccucaac

SEQ ID NO: 63056 - RNA, 32 nt, Homo Sapiens
ggacaacuguugcaugccaaguuuuuugugug

SEQ ID NO: 63057 - RNA, 31 nt, Homo Sapiens
cagaaaccggcggugucgacagguggcucuc

SEQ ID NO: 63058 - RNA, 32 nt, Homo Sapiens
cauucuggcucuucuguauuuacagaguccau

SEQ ID NO: 63059 - RNA, 32 nt, Homo Sapiens
gggcgcgggccgcgauggcagcggcggagcag

SEQ ID NO: 63060 - RNA, 32 nt, Homo Sapiens
acacucaccauauaaacuugccuuugagcuug

SEQ ID NO: 63061 - RNA, 32 nt, Homo Sapiens
uggagcucaggggagggaaaaggccaagcuau

SEQ ID NO: 63062 - RNA, 32 nt, Homo Sapiens
ccgucgcgucgcccgcgccccgcaaccacucc

SEQ ID NO: 63063 - RNA, 32 nt, Homo Sapiens
cgcggcccggcgggugccagauuagcggacgg

SEQ ID NO: 63064 - RNA, 32 nt, Homo Sapiens
ucucccugccagcaugccugccugcccaccuc

SEQ ID NO: 63065 - RNA, 32 nt, Homo Sapiens
ugauacucagauuccucacccuugcuuaggag

SEQ ID NO: 63066 - RNA, 31 nt, Homo Sapiens
uuacaaaugaauacucacggauauguauagu

SEQ ID NO: 63067 - RNA, 32 nt, Homo Sapiens
guaauuucccauggguagcagugucucaagag

SEQ ID NO: 63068 - RNA, 31 nt, Homo Sapiens
ccggcggcggguggccugcccaacgugugcu

SEQ ID NO: 63069 - RNA, 32 nt, Homo Sapiens
guuuuaaaacugucuguaguacacucaacugu

SEQ ID NO: 63070 - RNA, 32 nt, Homo Sapiens
gguuucacuuuccgugguuucauuucacugug

SEQ ID NO: 63071 - RNA, 32 nt, Homo Sapiens
uaccucaguuucuccuuuauugcuccuguacg

SEQ ID NO: 63072 - RNA, 32 nt, Homo Sapiens
cuugaaacaaaaaucaucauggucauuuauau

SEQ ID NO: 63073 - RNA, 32 nt, Homo Sapiens
agugugcuuguguugucaaaaauaucagauag

SEQ ID NO: 63074 - RNA, 27 nt, Homo Sapiens
gcccuccccuucuucaggccuugaauc

SEQ ID NO: 63075 - RNA, 32 nt, Homo Sapiens
cucucggggaccggggcgcugcucggauggcc

SEQ ID NO: 63076 - RNA, 32 nt, Homo Sapiens
auuaacuaaaaugagguaagccauuauuuugg

SEQ ID NO: 63077 - RNA, 32 nt, Homo Sapiens
uuucuguaguucucuguguucauauuuuacuc

SEQ ID NO: 63078 - RNA, 32 nt, Homo Sapiens
ccuaccagcccggcuauauugggugggauuuc

SEQ ID NO: 63079 - RNA, 32 nt, Homo Sapiens
ccugaggaagcagaaguaggccuugcucccgc

SEQ ID NO: 63080 - RNA, 32 nt, Homo Sapiens
gagggugccuguucccucucccucucccuguu

SEQ ID NO: 63081 - RNA, 32 nt, Homo Sapiens
uaucuguuguaucugugauaggaaaccauuuu

SEQ ID NO: 63082 - RNA, 32 nt, Homo Sapiens
caagcaaaacaaaaacaaaacaggggcugggu

SEQ ID NO: 63083 - RNA, 32 nt, Homo Sapiens
uacauuaucucacuuaguccuuuaucauccuu

SEQ ID NO: 63084 - RNA, 32 nt, Homo Sapiens
accacgggguggggucggcgccagccacucug

SEQ ID NO: 63085 - RNA, 32 nt, Homo Sapiens
gguuguaaauacuuuuuaaaaaacacuaaguu

SEQ ID NO: 63086 - RNA, 32 nt, Homo Sapiens
caauuaaaaggguuacaccuguagccacuuga

SEQ ID NO: 63087 - RNA, 32 nt, Homo Sapiens
cuaauuguuagaauaucugucaauuaagcauc

SEQ ID NO: 63088 - RNA, 32 nt, Homo Sapiens
agugaggcccggauccacuccgcggccagcuc

SEQ ID NO: 63089 - RNA, 32 nt, Homo Sapiens
cguucuccagcccacaccccuccaaagcccca

SEQ ID NO: 63090 - RNA, 32 nt, Homo Sapiens
ucgcagcugcugguggucaucaugaucugcgu

SEQ ID NO: 63091 - RNA, 32 nt, Homo Sapiens
ccuaggaaaauacuauucugaccuccaugacu

SEQ ID NO: 63092 - RNA, 32 nt, Homo Sapiens
gacacccugccccacccuggcuccacaggagc

SEQ ID NO: 63093 - RNA, 32 nt, Homo Sapiens
gccacugcacuccacccugggcgacagaguga

SEQ ID NO: 63094 - RNA, 32 nt, Homo Sapiens
uacacagagauuagguugugauacaugaagag

SEQ ID NO: 63095 - RNA, 31 nt, Homo Sapiens
aaaauucauuugauuuuugaccaauuuaacu

SEQ ID NO: 63096 - RNA, 30 nt, Homo Sapiens
agaagaggcggcggcggcggggguagggag

SEQ ID NO: 63097 - RNA, 32 nt, Homo Sapiens
uagaggcagaaucagaaggcuugguugaacau

SEQ ID NO: 63098 - RNA, 32 nt, Homo Sapiens
aaagacccgcggcuccgaccucugaccucuaa

SEQ ID NO: 63099 - RNA, 32 nt, Homo Sapiens
cgccaccaugacgcuccuccccggccuccugu

SEQ ID NO: 63100 - RNA, 32 nt, Homo Sapiens
gaagggucacuuucuuaguggccaaagagcag

SEQ ID NO: 63101 - RNA, 32 nt, Homo Sapiens
ucaguucugagccccagccggcccaccauggc

SEQ ID NO: 63102 - RNA, 32 nt, Homo Sapiens
cgauaagcuucacgcacuggcuugccaguucu

SEQ ID NO: 63103 - RNA, 32 nt, Homo Sapiens
guaggagcuaucacuauauuuugcagaaugga

SEQ ID NO: 63104 - RNA, 32 nt, Homo Sapiens
ggguggggagaugcugaaagggguauuguaua

SEQ ID NO: 63105 - RNA, 32 nt, Homo Sapiens
ccagccuuuaaccccaggaaccucucagucua

SEQ ID NO: 63106 - RNA, 32 nt, Homo Sapiens
ccaccccaaaggggccucuccuuuucuccacu

SEQ ID NO: 63107 - RNA, 32 nt, Homo Sapiens
uaagaaccaauauggauuugcacccacugcau

SEQ ID NO: 63108 - RNA, 32 nt, Homo Sapiens
gaagcuuaagaagaaggauaaagggaagcugg

SEQ ID NO: 63109 - RNA, 32 nt, Homo Sapiens
gauacccauuuuacuuauuguagugguuugaa

SEQ ID NO: 63110 - RNA, 32 nt, Homo Sapiens
cucucccucagucuccucuccaugcccaaguc

SEQ ID NO: 63111 - RNA, 32 nt, Homo Sapiens
gggagauuuucagaucuuuucuguuaaacuuu

SEQ ID NO: 63112 - RNA, 32 nt, Homo Sapiens
uggcuuaggaaaacaugaacacaggggcaaca

SEQ ID NO: 63113 - RNA, 32 nt, Homo Sapiens
gcaggagggccugucauggucugugcacgaag

SEQ ID NO: 63114 - RNA, 32 nt, Homo Sapiens
acuggccucuccuccccuccccucccucaguc

SEQ ID NO: 63115 - RNA, 32 nt, Homo Sapiens
auauuaacauucaaauuuggugauaugauuuc

SEQ ID NO: 63116 - RNA, 32 nt, Homo Sapiens
uauuuauuauuccuagagaaaaagaaugagaa

SEQ ID NO: 63117 - RNA, 32 nt, Homo Sapiens
cucagccccguccucuuguccuccucagccuc

SEQ ID NO: 63118 - RNA, 32 nt, Homo Sapiens
aaugaaauauauuaugaucuuagguuacauaa

SEQ ID NO: 63119 - RNA, 32 nt, Homo Sapiens
gccuuccagcagacuucaguagcucauuuuac

SEQ ID NO: 63120 - RNA, 32 nt, Homo Sapiens
gcuuuuuuugguuuuuguuuuguuuuguuuuu

SEQ ID NO: 63121 - RNA, 28 nt, Homo Sapiens
gggauggccaccuccaugggccugcugc

SEQ ID NO: 63122 - RNA, 32 nt, Homo Sapiens
agccugggucugugucucuggugugugugugu

SEQ ID NO: 63123 - RNA, 32 nt, Homo Sapiens
uauuaggcauauuuuugaauuaucucacuguc

SEQ ID NO: 63124 - RNA, 32 nt, Homo Sapiens
gcacagccgguggcucgcggcgcggcagcccc

SEQ ID NO: 63125 - RNA, 32 nt, Homo Sapiens
gccuuuauuuuuggcuagaagaauaauuauuu

SEQ ID NO: 63126 - RNA, 32 nt, Homo Sapiens
ccauauuagugucacauucugaggggcagccc

SEQ ID NO: 63127 - RNA, 32 nt, Homo Sapiens
ccugaacuggcuuuucugagagaugaaucaau

SEQ ID NO: 63128 - RNA, 32 nt, Homo Sapiens
aucuacauauuuucccucuuucugggauauuu

SEQ ID NO: 63129 - RNA, 32 nt, Homo Sapiens
ggauuuucuaaaaauaauguaaaugucuucua

SEQ ID NO: 63130 - RNA, 31 nt, Homo Sapiens
ugacgcagcugaugccugccuugguuccuac

SEQ ID NO: 63131 - RNA, 32 nt, Homo Sapiens
agccgggggacaccccucccugccugccucag

SEQ ID NO: 63132 - RNA, 32 nt, Homo Sapiens
acacacacccugggggcagcucucugccagcc

SEQ ID NO: 63133 - RNA, 32 nt, Homo Sapiens
aacuguggaacgagaaaccauggauaagggag

SEQ ID NO: 63134 - RNA, 32 nt, Homo Sapiens
ccugucuuuaggaucaucuacacugcaugagg

SEQ ID NO: 63135 - RNA, 32 nt, Homo Sapiens
cguuuuuucuucacugcaacaugaugagguag

SEQ ID NO: 63136 - RNA, 32 nt, Homo Sapiens
gcaggcgggcggcgucggaggaugcugcgggc

SEQ ID NO: 63137 - RNA, 32 nt, Homo Sapiens
ccuccgcugggcucacaggguacacugcggcc

SEQ ID NO: 63138 - RNA, 32 nt, Homo Sapiens
acagugaaccaaccaaaccaaccccgaaucau

SEQ ID NO: 63139 - RNA, 32 nt, Homo Sapiens
cuuuaguuuuucuauuugaaaaaaaaaaauca

SEQ ID NO: 63140 - RNA, 32 nt, Homo Sapiens
uacaccccuuugucugucuuccucauuuuguu

SEQ ID NO: 63141 - RNA, 32 nt, Homo Sapiens
acaauuuuuuaaaagcacuuugcuuucaugac

SEQ ID NO: 63142 - RNA, 32 nt, Homo Sapiens
cugucauggaugacaaggcaagggcagcaaua

SEQ ID NO: 63143 - RNA, 32 nt, Homo Sapiens
cuuuugaaaaacaaacagaaacccguguaucu

SEQ ID NO: 63144 - RNA, 32 nt, Homo Sapiens
cgggggcugcuucuccaccucccccaaacccu

SEQ ID NO: 63145 - RNA, 32 nt, Homo Sapiens
gucagugccgccacugcccccgccagagccca

SEQ ID NO: 63146 - RNA, 32 nt, Homo Sapiens
ugcucugccucccaggcgggaucgcugguuuc

SEQ ID NO: 63147 - RNA, 32 nt, Homo Sapiens
ugauggggucugaggcuuggugggagcugucc

SEQ ID NO: 63148 - RNA, 32 nt, Homo Sapiens
uagcaauaaauugaauuauacugcuauauuug

SEQ ID NO: 63149 - RNA, 32 nt, Homo Sapiens
ccccgagggacagucggccuggaccggaccuc

SEQ ID NO: 63150 - RNA, 32 nt, Homo Sapiens
uggcuagguagaagugagcaaaaaagaguugg

SEQ ID NO: 63151 - RNA, 32 nt, Homo Sapiens
gcugccgcugcgccgcgccugaagccgcgccg

SEQ ID NO: 63152 - RNA, 32 nt, Homo Sapiens
ggaaaugcuuggauucauguggacauucagga

SEQ ID NO: 63153 - RNA, 32 nt, Homo Sapiens
cgguggguguccgcuucucucugcucuucgac

SEQ ID NO: 63154 - RNA, 32 nt, Homo Sapiens
gugugugcgagaccagauagcucuaggacguu

SEQ ID NO: 63155 - RNA, 32 nt, Homo Sapiens
auuuuucugacaguauaguguauaaauguggu

SEQ ID NO: 63156 - RNA, 32 nt, Homo Sapiens
gcggcgccggagcccgaggcggcuguagccca

SEQ ID NO: 63157 - RNA, 32 nt, Homo Sapiens
gaauguucuauuauuuuauacauacacauuaa

SEQ ID NO: 63158 - RNA, 32 nt, Homo Sapiens
cugccugcaugcggccugcgggcccgugcgcg

SEQ ID NO: 63159 - RNA, 32 nt, Homo Sapiens
agaagguuuuuggcagcaucacuuuccaaaau

SEQ ID NO: 63160 - RNA, 32 nt, Homo Sapiens
gugccuauacuucucuaccuaagagggcagga

SEQ ID NO: 63161 - RNA, 32 nt, Homo Sapiens
cugguuucuccucuuggcccugcccuacagac

SEQ ID NO: 63162 - RNA, 32 nt, Homo Sapiens
aaacugucagugaaaauauguacaauuccuuc

SEQ ID NO: 63163 - RNA, 32 nt, Homo Sapiens
ugugugcuuuuggagagaauguugauuggcaa

SEQ ID NO: 63164 - RNA, 32 nt, Homo Sapiens
gccccacaccugggccucccccugccacuccc

SEQ ID NO: 63165 - RNA, 32 nt, Homo Sapiens
aaaauguucuuuguucucaaucagggcagucu

SEQ ID NO: 63166 - RNA, 32 nt, Homo Sapiens
gcacaagagcagcggcuugggggagccggcag

SEQ ID NO: 63167 - RNA, 32 nt, Homo Sapiens
ccucggcggcccggcccggcucgacgccaaug

SEQ ID NO: 63168 - RNA, 32 nt, Homo Sapiens
ucugucaacccucuccacuucugggcugaagc

SEQ ID NO: 63169 - RNA, 32 nt, Homo Sapiens
ugcuguggagaucucugagacugucgguuuuu

SEQ ID NO: 63170 - RNA, 32 nt, Homo Sapiens
ugcauaugccauuugaagccuccagcuuuuac

SEQ ID NO: 63171 - RNA, 32 nt, Homo Sapiens
gcacaugcccuucuuuccccacucccugccac

SEQ ID NO: 63172 - RNA, 32 nt, Homo Sapiens
ccgaggcccgcggcuggcugcaugaaggacug

SEQ ID NO: 63173 - RNA, 32 nt, Homo Sapiens
auuuauuuaauaugauggucuuugcaaaaagg

SEQ ID NO: 63174 - RNA, 32 nt, Homo Sapiens
acccucucugcugcuggcauguugguagaguc

SEQ ID NO: 63175 - RNA, 32 nt, Homo Sapiens
aggugguaagcagucaaguagaugauuuaacc

SEQ ID NO: 63176 - RNA, 32 nt, Homo Sapiens
ggcuguguugugagcccucccgguucucaccu

SEQ ID NO: 63177 - RNA, 32 nt, Homo Sapiens
auuuuggccacucucagagguaccucaagaga

SEQ ID NO: 63178 - RNA, 32 nt, Homo Sapiens
gggccaggccagcagugcuguggccaggggag

SEQ ID NO: 63179 - RNA, 32 nt, Homo Sapiens
guacugcaucaccaguuuuucuuaccuucugu

SEQ ID NO: 63180 - RNA, 32 nt, Homo Sapiens
gcuuuuauuucuuauuuugucuagccuggaga

SEQ ID NO: 63181 - RNA, 32 nt, Homo Sapiens
cuagaacuuuagaggauccaucuuuaagggcc

SEQ ID NO: 63182 - RNA, 32 nt, Homo Sapiens
ggguggguggguggagggcacggaagggguuu

SEQ ID NO: 63183 - RNA, 32 nt, Homo Sapiens
ggcuguugugucgggagccugaucgcgauggg

SEQ ID NO: 63184 - RNA, 32 nt, Homo Sapiens
ugggggacaugggcauuuuucuuacuuuugua

SEQ ID NO: 63185 - RNA, 32 nt, Homo Sapiens
accccacuugcaccccaccccagccauggaag

SEQ ID NO: 63186 - RNA, 32 nt, Homo Sapiens
caggagauccugaagcuggagaauucgggugg

SEQ ID NO: 63187 - RNA, 31 nt, Homo Sapiens
ugagcuaaacucggccaaccaaggcacgcag

SEQ ID NO: 63188 - RNA, 32 nt, Homo Sapiens
gagauucuauccccccuuccccgcccccagca

SEQ ID NO: 63189 - RNA, 32 nt, Homo Sapiens
cuaugguuuugugacuuucaacuuuuguacag

SEQ ID NO: 63190 - RNA, 32 nt, Homo Sapiens
cacucacaggggagaggcuacugcagaaccug

SEQ ID NO: 63191 - RNA, 32 nt, Homo Sapiens
acgccgcgcgcccuuccccgcccucccugacc

SEQ ID NO: 63192 - RNA, 32 nt, Homo Sapiens
ggaauauacuuauuuauggaagauuacugcuc

SEQ ID NO: 63193 - RNA, 30 nt, Homo Sapiens
cuaugaucacuugcccucugaagcuuauuu

SEQ ID NO: 63194 - RNA, 30 nt, Homo Sapiens
ugcgaguggggcggacgcgcgcagcccgcc

SEQ ID NO: 63195 - RNA, 32 nt, Homo Sapiens
gccugccccggggaagacccaggagcugggag

SEQ ID NO: 63196 - RNA, 32 nt, Homo Sapiens
ggcugggcgcgguggcuuacgccuguaauccc

SEQ ID NO: 63197 - RNA, 32 nt, Homo Sapiens
agccgggcgugguggcucaugccuauaauccc

SEQ ID NO: 63198 - RNA, 32 nt, Homo Sapiens
ggcugggcgugguggcucacgccuguaauccc

SEQ ID NO: 63199 - RNA, 32 nt, Homo Sapiens
ggcugggugugguggcucacgccuguaauccu

SEQ ID NO: 63200 - RNA, 32 nt, Homo Sapiens
ggccgggcgcgguggcuuaugccuguaauccc

SEQ ID NO: 63201 - RNA, 32 nt, Homo Sapiens
ucgugccccccgccuuggccccugcccagccg

SEQ ID NO: 63202 - RNA, 32 nt, Homo Sapiens
ggccgggcgugguggcucaugccuguaauccc

SEQ ID NO: 63203 - RNA, 32 nt, Homo Sapiens
aaaaacuaagcaguugcuuaugcugucaguac

SEQ ID NO: 63204 - RNA, 32 nt, Homo Sapiens
gcacugguuccagguaucugaaugcuuugguu

SEQ ID NO: 63205 - RNA, 32 nt, Homo Sapiens
uaaaaggcauauuaaauaaaauacuguaauuu

SEQ ID NO: 63206 - RNA, 32 nt, Homo Sapiens
gccgguagguccaggugcagcggccgcagugc

SEQ ID NO: 63207 - RNA, 32 nt, Homo Sapiens
agcauggagguaggggccuguguucacauccu

SEQ ID NO: 63208 - RNA, 31 nt, Homo Sapiens
ggccugccgagcugccugccccuuccagcug

SEQ ID NO: 63209 - RNA, 32 nt, Homo Sapiens
ucaugccauuuucucucuugucuaguauuuca

SEQ ID NO: 63210 - RNA, 32 nt, Homo Sapiens
ucucgagccgccggccggccgugccggugucc

SEQ ID NO: 63211 - RNA, 32 nt, Homo Sapiens
acugggaggaagaugugugaguuaaggccuga

SEQ ID NO: 63212 - RNA, 32 nt, Homo Sapiens
auuuuuaaaaagccucuuuccaggaauggaac

SEQ ID NO: 63213 - RNA, 32 nt, Homo Sapiens
gguugacuuagcuuugcagaguaucuccagau

SEQ ID NO: 63214 - RNA, 32 nt, Homo Sapiens
uccuguggccaggcacagagccaggugcuuua

SEQ ID NO: 63215 - RNA, 32 nt, Homo Sapiens
aaguuagcugggugugguggugugcacccaua

SEQ ID NO: 63216 - RNA, 32 nt, Homo Sapiens
caacaugagagaaauaaccaacaaagaagaug

SEQ ID NO: 63217 - RNA, 32 nt, Homo Sapiens
uuggccaaaacuuauuucaaagcagaaucuuu

SEQ ID NO: 63218 - RNA, 32 nt, Homo Sapiens
accagagauuauuguuuccuaugcgaaauaaa

SEQ ID NO: 63219 - RNA, 32 nt, Homo Sapiens
aaggagcagucagcauucuuccaauuugcccc

SEQ ID NO: 63220 - RNA, 32 nt, Homo Sapiens
uauugcaucuccuuucuuauuauaagcuguuc

SEQ ID NO: 63221 - RNA, 32 nt, Homo Sapiens
uccagcucuugagggucaguucucaccuuaug

SEQ ID NO: 63222 - RNA, 32 nt, Homo Sapiens
agaaauauaucacuugcauauagaauguuuua

SEQ ID NO: 63223 - RNA, 32 nt, Homo Sapiens
ccuuauuugcuguucuaagaguugucuguagg

SEQ ID NO: 63224 - RNA, 32 nt, Homo Sapiens
uucccccaacucuugaacgaugaugauauuca

SEQ ID NO: 63225 - RNA, 32 nt, Homo Sapiens
ucaacuuaauaaauucuguguuuaccuugcuc

SEQ ID NO: 63226 - RNA, 32 nt, Homo Sapiens
gcaaagcugcuucucuuccccagacccaugcu

SEQ ID NO: 63227 - RNA, 32 nt, Homo Sapiens
ggggggagcgcgcgcggcgcgauggacggucg

SEQ ID NO: 63228 - RNA, 32 nt, Homo Sapiens
acauaguuuauuuauuaauauaucacauauag

SEQ ID NO: 63229 - RNA, 32 nt, Homo Sapiens
accuggaaaaggaaucuauuuaguucaggaaa

SEQ ID NO: 63230 - RNA, 32 nt, Homo Sapiens
acuuuugaauguuuaauaauuuuguaaaucau

SEQ ID NO: 63231 - RNA, 32 nt, Homo Sapiens
gaaagccggccagcugaucgucguguguugcc

SEQ ID NO: 63232 - RNA, 32 nt, Homo Sapiens
uauucuuagggacaagucccaagaugccagaa

SEQ ID NO: 63233 - RNA, 32 nt, Homo Sapiens
ucugcgggaagcugcggucucuggccagcacg

SEQ ID NO: 63234 - RNA, 29 nt, Homo Sapiens
ggggcucggggacgcugcucacagccuua

SEQ ID NO: 63235 - RNA, 32 nt, Homo Sapiens
gacugugguaaaauauacauaaaauaauacuu

SEQ ID NO: 63236 - RNA, 32 nt, Homo Sapiens
ggguggcuauuuugauuuggcaugacuacuua

SEQ ID NO: 63237 - RNA, 32 nt, Homo Sapiens
uccugggcgcccuggaagccggcggcccaagc

SEQ ID NO: 63238 - RNA, 32 nt, Homo Sapiens
ccccacugugcccagacaugugugcucagggu

SEQ ID NO: 63239 - RNA, 32 nt, Homo Sapiens
uucaccucuugaaagucaaaggugaugauuaa

SEQ ID NO: 63240 - RNA, 32 nt, Homo Sapiens
ugccuguguuuaaccuccaaaggcugcucccg

SEQ ID NO: 63241 - RNA, 32 nt, Homo Sapiens
ucuucugcccccuccugagucccggccugaag

SEQ ID NO: 63242 - RNA, 32 nt, Homo Sapiens
aagaggcggcggcggaggggcuggcggagagu

SEQ ID NO: 63243 - RNA, 32 nt, Homo Sapiens
uucuauggaguguaauuuuguguaugaauuau

SEQ ID NO: 63244 - RNA, 32 nt, Homo Sapiens
cugggucugcgauuaugcacagagacuuugga

SEQ ID NO: 63245 - RNA, 32 nt, Homo Sapiens
acuguuuccucugccuggaccccacuugcucc

SEQ ID NO: 63246 - RNA, 32 nt, Homo Sapiens
agaagggaacgcccggcccagccccguagcac

SEQ ID NO: 63247 - RNA, 32 nt, Homo Sapiens
caggaaugagucccuaggggggugucaggaac

SEQ ID NO: 63248 - RNA, 32 nt, Homo Sapiens
aggggggugugagcgccgcagcaccaguggcu

SEQ ID NO: 63249 - RNA, 32 nt, Homo Sapiens
cuugauacauucaaauuugucugguuaaaaaa

SEQ ID NO: 63250 - RNA, 32 nt, Homo Sapiens
ccacaauuuguuugugaauauucacuuguuuu

SEQ ID NO: 63251 - RNA, 32 nt, Homo Sapiens
uggaaaaauuaaaaugucuuuuuuaccuuuug

SEQ ID NO: 63252 - RNA, 32 nt, Homo Sapiens
ggccuggaaugggccaggcugguccuggcugc

SEQ ID NO: 63253 - RNA, 32 nt, Homo Sapiens
cccuccuggccaggccagcagugaagcaguau

SEQ ID NO: 63254 - RNA, 32 nt, Homo Sapiens
ccagcccccugcugccuucucuaugcagccug

SEQ ID NO: 63255 - RNA, 32 nt, Homo Sapiens
uuaugucuuucacuuucccugggaaggaguaa

SEQ ID NO: 63256 - RNA, 32 nt, Homo Sapiens
gugaacugaucugcccuuuucucaacaaugcc

SEQ ID NO: 63257 - RNA, 32 nt, Homo Sapiens
ccacagcagccuccgccuccugcugcuccgga

SEQ ID NO: 63258 - RNA, 32 nt, Homo Sapiens
ggaaaaauuuaaauaaaguaugaaaugacuag

SEQ ID NO: 63259 - RNA, 32 nt, Homo Sapiens
uaucaaaaucuaaauuuggaaugaaugcauuu

SEQ ID NO: 63260 - RNA, 32 nt, Homo Sapiens
uuuccccugaacaaaccugcuaaucccacuaa

SEQ ID NO: 63261 - RNA, 32 nt, Homo Sapiens
aauuggagauggggaccgcccuggacaucaag

SEQ ID NO: 63262 - RNA, 32 nt, Homo Sapiens
aaagaauaugaaggcuugauaauuauuuauug

SEQ ID NO: 63263 - RNA, 32 nt, Homo Sapiens
ucaaccacagucugaaaauauuaagguauuuu

SEQ ID NO: 63264 - RNA, 32 nt, Homo Sapiens
aucuggcagggccgugcggcuccugcggguga

SEQ ID NO: 63265 - RNA, 32 nt, Homo Sapiens
uuaguauuuuuccggugaacagaagauuuguu

SEQ ID NO: 63266 - RNA, 32 nt, Homo Sapiens
guuaaacccagcucuaauuccaacucugcaag

SEQ ID NO: 63267 - RNA, 32 nt, Homo Sapiens
guuaggggcaaauuagauuagagcuggauccu

SEQ ID NO: 63268 - RNA, 32 nt, Homo Sapiens
caauuucacauuuugcagaaacuuguucacau

SEQ ID NO: 63269 - RNA, 31 nt, Homo Sapiens
ugugucccugggcucgcuccaagugcaggaa

SEQ ID NO: 63270 - RNA, 32 nt, Homo Sapiens
ucuugcccaagcacccuggagacuuugcuccc

SEQ ID NO: 63271 - RNA, 32 nt, Homo Sapiens
cuugaaggaaauuuacaguuuacucuaaauug

SEQ ID NO: 63272 - RNA, 32 nt, Homo Sapiens
gagaguggaguaccuuccuuucucaagucucg

SEQ ID NO: 63273 - RNA, 32 nt, Homo Sapiens
gcccacugccucuggaguguuagagcagaaag

SEQ ID NO: 63274 - RNA, 32 nt, Homo Sapiens
aggagucaaaaauaugaguggagaagcgucca

SEQ ID NO: 63275 - RNA, 32 nt, Homo Sapiens
ccggagccgggcgggcgccauggaggggcugc

SEQ ID NO: 63276 - RNA, 32 nt, Homo Sapiens
uauuucaauuuaaggaaucuuuuugccaugug

SEQ ID NO: 63277 - RNA, 32 nt, Homo Sapiens
acugcccggccugguuuuggacuugcauuggg

SEQ ID NO: 63278 - RNA, 32 nt, Homo Sapiens
aguagcaaucccaauacuaaacugcuauaugu

SEQ ID NO: 63279 - RNA, 32 nt, Homo Sapiens
accuggagcugcuggcgccgcgcagguugcug

SEQ ID NO: 63280 - RNA, 32 nt, Homo Sapiens
gcuuacucugaauauucaguacuuuuugaaua

SEQ ID NO: 63281 - RNA, 32 nt, Homo Sapiens
ugccgagcuggguaaaggcccugcuggacaag

SEQ ID NO: 63282 - RNA, 32 nt, Homo Sapiens
uggaauccauuaugaagugcaauuagauagau

SEQ ID NO: 63283 - RNA, 32 nt, Homo Sapiens
gucaucugucagccuucuauguuucagagauc

SEQ ID NO: 63284 - RNA, 32 nt, Homo Sapiens
cuuauuccuuggcuuuugggcuuauuuucuug

SEQ ID NO: 63285 - RNA, 32 nt, Homo Sapiens
uugaagauagucagugauaaccacugaccaga

SEQ ID NO: 63286 - RNA, 32 nt, Homo Sapiens
aauguuaagaaauaacaaaacaauaauuauua

SEQ ID NO: 63287 - RNA, 32 nt, Homo Sapiens
gaacuauuuuuccuuauuacaaaaauauucga

SEQ ID NO: 63288 - RNA, 32 nt, Homo Sapiens
cacuggagccaccgggaccccuugaggacauc

SEQ ID NO: 63289 - RNA, 32 nt, Homo Sapiens
ccugccaggggaggguggguggagacaaaggc

SEQ ID NO: 63290 - RNA, 32 nt, Homo Sapiens
gcuuugggacagggcuggggcccccauauccc

SEQ ID NO: 63291 - RNA, 32 nt, Homo Sapiens
gaagucggugucugcugcguucacggcaggau

SEQ ID NO: 63292 - RNA, 32 nt, Homo Sapiens
auuaucuagcuaagcggaacaugugcuucauc

SEQ ID NO: 63293 - RNA, 32 nt, Homo Sapiens
cggacacacguuguggaagaucuuguagggaa

SEQ ID NO: 63294 - RNA, 32 nt, Homo Sapiens
ccgugagagagggcucugacagacacaaguca

SEQ ID NO: 63295 - RNA, 32 nt, Homo Sapiens
uuuccugacccaagcaaagacacacaucauca

SEQ ID NO: 63296 - RNA, 32 nt, Homo Sapiens
ugucuccagggccagugucugcugcgaucgag

SEQ ID NO: 63297 - RNA, 32 nt, Homo Sapiens
ugaugggauugcaaagcgucagggcagcuuug

SEQ ID NO: 63298 - RNA, 32 nt, Homo Sapiens
aauuuacuuguacaauucauuguuacuguucu

SEQ ID NO: 63299 - RNA, 32 nt, Homo Sapiens
cacaucgagugaaugaaauugugauuagcaaa

SEQ ID NO: 63300 - RNA, 32 nt, Homo Sapiens
aacuggauuugggaacccaauuuuggaaaacc

SEQ ID NO: 63301 - RNA, 32 nt, Homo Sapiens
gguuucccucccaaggccccagcaccaaccuc

SEQ ID NO: 63302 - RNA, 32 nt, Homo Sapiens
cagcugagcuuccacuggugcugcugggccgc

SEQ ID NO: 63303 - RNA, 32 nt, Homo Sapiens
ucaccagccucgguugacguggaugcgcggag

SEQ ID NO: 63304 - RNA, 32 nt, Homo Sapiens
caagcucuggccugcgagccuguccccauugc

SEQ ID NO: 63305 - RNA, 32 nt, Homo Sapiens
aagggacuuuguugacuuuaugcugaagauuc

SEQ ID NO: 63306 - RNA, 30 nt, Homo Sapiens
uugccuggcugugcugcagguuagcccaca

SEQ ID NO: 63307 - RNA, 32 nt, Homo Sapiens
agagcccauaggcaucacucuucagcaccugg

SEQ ID NO: 63308 - RNA, 32 nt, Homo Sapiens
uucugacaguugccuuuuuuuucaucucaaau

SEQ ID NO: 63309 - RNA, 31 nt, Homo Sapiens
agcugagauuuugguuaauagaguaagcuua

SEQ ID NO: 63310 - RNA, 32 nt, Homo Sapiens
gguuuuauaaugauguuuuacaauguuuauuu

SEQ ID NO: 63311 - RNA, 26 nt, Homo Sapiens
ugguuggaauaaaaacaguuccuguc

SEQ ID NO: 63312 - RNA, 32 nt, Homo Sapiens
cgcgagagcuucgcggcgggagagcggcuggu

SEQ ID NO: 63313 - RNA, 32 nt, Homo Sapiens
cugguuagguuaggacuugcccucguggugga

SEQ ID NO: 63314 - RNA, 32 nt, Homo Sapiens
cuuuucucuuguugagugcaaauggagaacag

SEQ ID NO: 63315 - RNA, 32 nt, Homo Sapiens
accuuugcugucuauggaucugcucuaaaccu

SEQ ID NO: 63316 - RNA, 32 nt, Homo Sapiens
acaucccccuucccugucugugucucaauaaa

SEQ ID NO: 63317 - RNA, 32 nt, Homo Sapiens
ggcacgaggggcacccgggaccgagcuggggu

SEQ ID NO: 63318 - RNA, 32 nt, Homo Sapiens
ucuacgcucccuccucuucuucaauaacccca

SEQ ID NO: 63319 - RNA, 32 nt, Homo Sapiens
uuaaaaccaaggaaaccccaauuuugauguau

SEQ ID NO: 63320 - RNA, 32 nt, Homo Sapiens
uggugggacauccggcugggguaaggacaggc

SEQ ID NO: 63321 - RNA, 32 nt, Homo Sapiens
agccuuucgugagggcuugcaggccgcugcug

SEQ ID NO: 63322 - RNA, 32 nt, Homo Sapiens
ggagguggaggggggagaaggguccccucucu

SEQ ID NO: 63323 - RNA, 32 nt, Homo Sapiens
uuccccuuggcugccaggccaacgacugcuuc

SEQ ID NO: 63324 - RNA, 32 nt, Homo Sapiens
uucaaaucaauuaugauaaacauaucaaggug

SEQ ID NO: 63325 - RNA, 30 nt, Homo Sapiens
agcccaggagguggaggcugcaaugagcug

SEQ ID NO: 63326 - RNA, 32 nt, Homo Sapiens
guuacauuuaguucuuuuuuucuauugaacaa

SEQ ID NO: 63327 - RNA, 32 nt, Homo Sapiens
acagaagagagaaaaauauacauuauaaaagc

SEQ ID NO: 63328 - RNA, 32 nt, Homo Sapiens
uacaagccgggcgugguggcgcaugccuguaa

SEQ ID NO: 63329 - RNA, 32 nt, Homo Sapiens
agcagcggccucggccucggcgcgggcuugcc

SEQ ID NO: 63330 - RNA, 32 nt, Homo Sapiens
ggcacauagaaaguaaauaaaaggacugugau

SEQ ID NO: 63331 - RNA, 32 nt, Homo Sapiens
ucguuuaugguacauauugauugucuugaaau

SEQ ID NO: 63332 - RNA, 32 nt, Homo Sapiens
acauccauuuuucuuauguauuguggagagag

SEQ ID NO: 63333 - RNA, 32 nt, Homo Sapiens
ggguugagcugcgccuguaggcugugggcagc

SEQ ID NO: 63334 - RNA, 32 nt, Homo Sapiens
aaauguugcauaaacuaacacagauucuguag

SEQ ID NO: 63335 - RNA, 31 nt, Homo Sapiens
cccacaugggaaccuaguacucucugcucua

SEQ ID NO: 63336 - RNA, 32 nt, Homo Sapiens
cggcguuucuguuaccccggccgcggcucuug

SEQ ID NO: 63337 - RNA, 32 nt, Homo Sapiens
aggcucuguucuaagcacuuugugagaauuau

SEQ ID NO: 63338 - RNA, 32 nt, Homo Sapiens
gcucagcuggaaccaugggaggccgcgucuuu

SEQ ID NO: 63339 - RNA, 32 nt, Homo Sapiens
ggaggaaaacauguuuuuaagauucuuaccaa

SEQ ID NO: 63340 - RNA, 32 nt, Homo Sapiens
guaucagaguaccaggaugccaccgcagaaga

SEQ ID NO: 63341 - RNA, 32 nt, Homo Sapiens
aucucugggcuugcccuuugccuccugcagaa

SEQ ID NO: 63342 - RNA, 32 nt, Homo Sapiens
ugagccacugcgccuggcaaauguuuuaguuu

SEQ ID NO: 63343 - RNA, 32 nt, Homo Sapiens
ggguuagaauaaaaaccauuugccaaagcaac

SEQ ID NO: 63344 - RNA, 32 nt, Homo Sapiens
aagccccaguguucaagcucagagaggaugaa

SEQ ID NO: 63345 - RNA, 32 nt, Homo Sapiens
aacagagguucagagugguuaagcaacuuguc

SEQ ID NO: 63346 - RNA, 32 nt, Homo Sapiens
guagagacuuugguaugugauaccauagaaua

SEQ ID NO: 63347 - RNA, 32 nt, Homo Sapiens
aaaggcccaaggcccccuccccagucuggccu

SEQ ID NO: 63348 - RNA, 32 nt, Homo Sapiens
uuccacugcuccccggagccaccuggagagca

SEQ ID NO: 63349 - RNA, 32 nt, Homo Sapiens
ugugccaggcucugcgccugccccacacccuc

SEQ ID NO: 63350 - RNA, 32 nt, Homo Sapiens
aauuauucuggucauucuuaauuuuacucuga

SEQ ID NO: 63351 - RNA, 32 nt, Homo Sapiens
aaauuucaacuuuccauaauauuaagaaugua

SEQ ID NO: 63352 - RNA, 32 nt, Homo Sapiens
caaaaaugaaaauaaacuguuaccgaaggaau

SEQ ID NO: 63353 - RNA, 32 nt, Homo Sapiens
ccagggcugcgccagcagcauuucacuuuuaa

SEQ ID NO: 63354 - RNA, 32 nt, Homo Sapiens
ggaagagaacagagacaaacucuuuggacugu

SEQ ID NO: 63355 - RNA, 32 nt, Homo Sapiens
auugcucagucugagguaguucuuuauagcag

SEQ ID NO: 63356 - RNA, 32 nt, Homo Sapiens
agccagacagacagcaccugcagacgcagggg

SEQ ID NO: 63357 - RNA, 32 nt, Homo Sapiens
aguccaggccccagccccuccucccucagacc

SEQ ID NO: 63358 - RNA, 28 nt, Homo Sapiens
uucuuuuucuuuucuuuuuuuuuuuuuu

SEQ ID NO: 63359 - RNA, 29 nt, Homo Sapiens
aacugaacauguauguauguugcuuagau

SEQ ID NO: 63360 - RNA, 32 nt, Homo Sapiens
gaagaaaauggcaauguuccuccuauugauac

SEQ ID NO: 63361 - RNA, 32 nt, Homo Sapiens
cucggggaaguccuggcgcagaugggccacgg

SEQ ID NO: 63362 - RNA, 32 nt, Homo Sapiens
guuuuuucauuaugaaaacuuauuuuagcuuu

SEQ ID NO: 63363 - RNA, 32 nt, Homo Sapiens
ccaguuacggguggaggggaaucgguucauca

SEQ ID NO: 63364 - RNA, 32 nt, Homo Sapiens
ugcggugcugguuuuucuccacaaacaccccc

SEQ ID NO: 63365 - RNA, 32 nt, Homo Sapiens
cacuuuguugcccaugcuggucucgaacuccu

SEQ ID NO: 63366 - RNA, 32 nt, Homo Sapiens
cacgcacccggcgcgagcuagaagccuccggu

SEQ ID NO: 63367 - RNA, 32 nt, Homo Sapiens
ggcaggugacgccuauuggaccccagagguca

SEQ ID NO: 63368 - RNA, 32 nt, Homo Sapiens
cgcguccugcugugccccggcgccuacgcagc

SEQ ID NO: 63369 - RNA, 32 nt, Homo Sapiens
acgaggcgaggcucgcgcgcccgcccccgccc

SEQ ID NO: 63370 - RNA, 32 nt, Homo Sapiens
gcagcgucccuggucucuccagcccucacucg

SEQ ID NO: 63371 - RNA, 32 nt, Homo Sapiens
agcuacacuggccuucaggcucuucuugagca

SEQ ID NO: 63372 - RNA, 32 nt, Homo Sapiens
augauuuucuaaaguuuguauuuucuagcuug

SEQ ID NO: 63373 - RNA, 31 nt, Homo Sapiens
cgcggcuggcacugcugcugcuucugcuccu

SEQ ID NO: 63374 - RNA, 32 nt, Homo Sapiens
cuuauacaaauuauacauguauuuuuguguau

SEQ ID NO: 63375 - RNA, 32 nt, Homo Sapiens
cucccauccuuguccuucucucccucagaagc

SEQ ID NO: 63376 - RNA, 32 nt, Homo Sapiens
ggggcucugaaauuauuuccugaaugaauggg

SEQ ID NO: 63377 - RNA, 32 nt, Homo Sapiens
accccgaacuccaaaaauuacaccuggaguca

SEQ ID NO: 63378 - RNA, 32 nt, Homo Sapiens
aauagcagcagccguggcgccacggggcgagg

SEQ ID NO: 63379 - RNA, 32 nt, Homo Sapiens
gggcuggcgcuuggaucuggggugggaguaac

SEQ ID NO: 63380 - RNA, 32 nt, Homo Sapiens
uuauguguuucauuacagcuccaaaaagccuu

SEQ ID NO: 63381 - RNA, 32 nt, Homo Sapiens
aaauauaaugaaauaaauauuuauuugugcac

SEQ ID NO: 63382 - RNA, 32 nt, Homo Sapiens
guauaucccuucccaacccccauugugacagu

SEQ ID NO: 63383 - RNA, 32 nt, Homo Sapiens
guccuuuguuuuacagguacaaguuuucuagc

SEQ ID NO: 63384 - RNA, 32 nt, Homo Sapiens
uucuagagguacauauuaggccuuuuaugaac

SEQ ID NO: 63385 - RNA, 32 nt, Homo Sapiens
cucucuccaggccccaggucaucccccacugu

SEQ ID NO: 63386 - RNA, 32 nt, Homo Sapiens
uucauauaggaaaaugcacaucuuucauuugu

SEQ ID NO: 63387 - RNA, 32 nt, Homo Sapiens
ucgcgucgcgcgcgcacgcugcgccagggccc

SEQ ID NO: 63388 - RNA, 32 nt, Homo Sapiens
uuguacucacuuuaauuugaaucuuaucaacu

SEQ ID NO: 63389 - RNA, 32 nt, Homo Sapiens
ugagucucggcgggccaggguccuggcgacag

SEQ ID NO: 63390 - RNA, 32 nt, Homo Sapiens
uguuuucacagccuuuguccagccuguguuac

SEQ ID NO: 63391 - RNA, 32 nt, Homo Sapiens
uuggcugagggagaggcugagaacugggcaga

SEQ ID NO: 63392 - RNA, 32 nt, Homo Sapiens
caugggcgggggcuuuuaaaaaccuuucagga

SEQ ID NO: 63393 - RNA, 31 nt, Homo Sapiens
aagacagggggccccaaccugggauugcuga

SEQ ID NO: 63394 - RNA, 32 nt, Homo Sapiens
cgagucccgcggccccaguggcgccucagcuc

SEQ ID NO: 63395 - RNA, 32 nt, Homo Sapiens
caugguuggcauucuugucaugucaaaauaau

SEQ ID NO: 63396 - RNA, 32 nt, Homo Sapiens
ugauauuuaacccuuauuaaaucuuucuuuaa

SEQ ID NO: 63397 - RNA, 32 nt, Homo Sapiens
uucuggcauugaaagcacuugacaaaggguau

SEQ ID NO: 63398 - RNA, 32 nt, Homo Sapiens
caauauuuuuuacuuuucuaauaaacauguuu

SEQ ID NO: 63399 - RNA, 32 nt, Homo Sapiens
auauaguguuuuucauugauaauuuuuauuua

SEQ ID NO: 63400 - RNA, 32 nt, Homo Sapiens
gggaacucauaguggaaagcaagacuuguaag

SEQ ID NO: 63401 - RNA, 32 nt, Homo Sapiens
gcauuuaaaaauuuuuaaguaaagccauucuu

SEQ ID NO: 63402 - RNA, 32 nt, Homo Sapiens
gugccggugggcggggggcaugcuggccucug

SEQ ID NO: 63403 - RNA, 32 nt, Homo Sapiens
gcugggauugcagccugcaccaccacaccugg

SEQ ID NO: 63404 - RNA, 32 nt, Homo Sapiens
guuuuuuuuuuuucuuuuugucccccccaucc

SEQ ID NO: 63405 - RNA, 32 nt, Homo Sapiens
cagguacuuugaccucuuucuaaagccgcaga

SEQ ID NO: 63406 - RNA, 32 nt, Homo Sapiens
ugucccagaggagaguccugugcgaccugagc

SEQ ID NO: 63407 - RNA, 32 nt, Homo Sapiens
ugucaggaaaauugugaacguagaugagguac

SEQ ID NO: 63408 - RNA, 32 nt, Homo Sapiens
ucacugggguggcacuggagagccauggcagu

SEQ ID NO: 63409 - RNA, 32 nt, Homo Sapiens
uggaugaaacagugagaagaaaacauuuucug

SEQ ID NO: 63410 - RNA, 32 nt, Homo Sapiens
caagaguaaaauuuaagauuaaaaauauaucc

SEQ ID NO: 63411 - RNA, 32 nt, Homo Sapiens
ccuucauuuuauagaauauuggcacuauuauu

SEQ ID NO: 63412 - RNA, 32 nt, Homo Sapiens
ucaauuuuucccuucuuuccuaccuucaucag

SEQ ID NO: 63413 - RNA, 32 nt, Homo Sapiens
ugccagcuguccgacgaugucgucccaccuag

SEQ ID NO: 63414 - RNA, 32 nt, Homo Sapiens
aucucacauuucugcccuccaccuuggcgguc

SEQ ID NO: 63415 - RNA, 32 nt, Homo Sapiens
gcggggugcuccugggguggaggccuccacca

SEQ ID NO: 63416 - RNA, 32 nt, Homo Sapiens
uuuuuaucuuuacaggucuuuaucuuuaauau

SEQ ID NO: 63417 - RNA, 32 nt, Homo Sapiens
cacuuucucagggaauuggacagaggaaagga

SEQ ID NO: 63418 - RNA, 32 nt, Homo Sapiens
cccagcguguggcguucuggcucuucccugga

SEQ ID NO: 63419 - RNA, 32 nt, Homo Sapiens
agcuuacugccuccccucccccucacgccugg

SEQ ID NO: 63420 - RNA, 32 nt, Homo Sapiens
gaacgugcgaacgcgugacgccgcccgacugg

SEQ ID NO: 63421 - RNA, 32 nt, Homo Sapiens
uuauccagcucuuuugcucacaucgcguaacc

SEQ ID NO: 63422 - RNA, 32 nt, Homo Sapiens
gguuuuuucuucauucuauaaucucuuuucca

SEQ ID NO: 63423 - RNA, 32 nt, Homo Sapiens
agccgggaggcugggagucgccaggcgugcgg

SEQ ID NO: 63424 - RNA, 32 nt, Homo Sapiens
aaauauaucaguguuuccuguguuugggcaga

SEQ ID NO: 63425 - RNA, 32 nt, Homo Sapiens
aagcuccgagaccugggggacugagagcccag

SEQ ID NO: 63426 - RNA, 32 nt, Homo Sapiens
uggccagaggaaaaccugggggaugcuugucc

SEQ ID NO: 63427 - RNA, 32 nt, Homo Sapiens
cacacagagaucuggcacccccuggguggagu

SEQ ID NO: 63428 - RNA, 32 nt, Homo Sapiens
cugcuugcggcuuucaguggagggcagggguc

SEQ ID NO: 63429 - RNA, 32 nt, Homo Sapiens
gaggaccccugagaguuucucagacacccggg

SEQ ID NO: 63430 - RNA, 32 nt, Homo Sapiens
uuccacaggaggagucacagagccaccaaggg

SEQ ID NO: 63431 - RNA, 32 nt, Homo Sapiens
aaggagucgcgccgccgccgccgcccccuccc

SEQ ID NO: 63432 - RNA, 32 nt, Homo Sapiens
acacacaucuucuguugauucuguuucucugg

SEQ ID NO: 63433 - RNA, 32 nt, Homo Sapiens
ugcuggaaauuugacauguguguggcauuauc

SEQ ID NO: 63434 - RNA, 32 nt, Homo Sapiens
uccaagacaaaacagucuucaugggccaaaaa

SEQ ID NO: 63435 - RNA, 32 nt, Homo Sapiens
gcuagccuguucuuuuaccacugacagcuaga

SEQ ID NO: 63436 - RNA, 32 nt, Homo Sapiens
ggguuuggggaggggggaaaagaggggcuuuu

SEQ ID NO: 63437 - RNA, 32 nt, Homo Sapiens
uacuccauauucauuuugaaaaacaguaccgg

SEQ ID NO: 63438 - RNA, 32 nt, Homo Sapiens
agugcugcgccgacagcggucaggaucucggc

SEQ ID NO: 63439 - RNA, 32 nt, Homo Sapiens
ccacuccaucuacgcuacgcuauacauggaca

SEQ ID NO: 63440 - RNA, 32 nt, Homo Sapiens
cuagagcucccucaccucuuuggcuuaccagc

SEQ ID NO: 63441 - RNA, 32 nt, Homo Sapiens
cagcagcucccucccgucccccaaccucuccu

SEQ ID NO: 63442 - RNA, 32 nt, Homo Sapiens
ugguuugcagcuuuucuacgagccagggggga

SEQ ID NO: 63443 - RNA, 32 nt, Homo Sapiens
ggguuaacuaaauuacuuuaauaugcuguuga

SEQ ID NO: 63444 - RNA, 32 nt, Homo Sapiens
ugugugcgcgcgcacgcacgccuugagcaguc

SEQ ID NO: 63445 - RNA, 32 nt, Homo Sapiens
gcucaacaucacccucacgcugcggaugcuga

SEQ ID NO: 63446 - RNA, 32 nt, Homo Sapiens
caugcgugccugcuggggagggggugaguggu

SEQ ID NO: 63447 - RNA, 32 nt, Homo Sapiens
agcucucaaagauaagaucauuuuauggcaca

SEQ ID NO: 63448 - RNA, 31 nt, Homo Sapiens
cucaggaugcuguugcugggagcuguucuac

SEQ ID NO: 63449 - RNA, 32 nt, Homo Sapiens
caauaaaaaucugcucuuuguauaacagaaaa

SEQ ID NO: 63450 - RNA, 32 nt, Homo Sapiens
cacgaguaaaauuuaguguucaaaacauugaa

SEQ ID NO: 63451 - RNA, 32 nt, Homo Sapiens
cggcccaggccgcgaaacaagcccgcgugacu

SEQ ID NO: 63452 - RNA, 32 nt, Homo Sapiens
gaauuggauacuagcacaguggcugccuccau

SEQ ID NO: 63453 - RNA, 32 nt, Homo Sapiens
aaaggaggauaaaggucuacaacuagaaauca

SEQ ID NO: 63454 - RNA, 32 nt, Homo Sapiens
ggacuagggaggggguuccggguggaggcuug

SEQ ID NO: 63455 - RNA, 32 nt, Homo Sapiens
uauuuugaaaauaugauuauaugcauguguuu

SEQ ID NO: 63456 - RNA, 32 nt, Homo Sapiens
cuuuugggggcacaacuguuuucuguuugcug

SEQ ID NO: 63457 - RNA, 32 nt, Homo Sapiens
ucucagcucugagcaugugcaaggcuguguag

SEQ ID NO: 63458 - RNA, 32 nt, Homo Sapiens
uuuacccaucagguagcuguuuagucaauaau

SEQ ID NO: 63459 - RNA, 32 nt, Homo Sapiens
ccagaccagaccccaaaccagcccuugagucu

SEQ ID NO: 63460 - RNA, 29 nt, Homo Sapiens
uuuuuuguucuuuuuagaggcaaggucuc

SEQ ID NO: 63461 - RNA, 32 nt, Homo Sapiens
cacugccuccuggccagcugcccaccccagug

SEQ ID NO: 63462 - RNA, 32 nt, Homo Sapiens
guaugggagaaaagguuauguacuuauuauuu

SEQ ID NO: 63463 - RNA, 32 nt, Homo Sapiens
cuuccacaguaaaaauacguuuuuuguaaagg

SEQ ID NO: 63464 - RNA, 30 nt, Homo Sapiens
gcggugcugcccgugccgccugaagagcug

SEQ ID NO: 63465 - RNA, 32 nt, Homo Sapiens
aaaguuauucauuguaauccacuguuuuggcu

SEQ ID NO: 63466 - RNA, 32 nt, Homo Sapiens
ucuccuuccuucccugcuuggugagucgcgca

SEQ ID NO: 63467 - RNA, 32 nt, Homo Sapiens
aacugucagggugauaaaauguuucucuugau

SEQ ID NO: 63468 - RNA, 30 nt, Homo Sapiens
ugccgugucuaccacuacaaggacugugca

SEQ ID NO: 63469 - RNA, 32 nt, Homo Sapiens
gcccauuucuauacagaggaaucaucuugcag

SEQ ID NO: 63470 - RNA, 32 nt, Homo Sapiens
cagaggagcuggaaccauggugggggcugccu

SEQ ID NO: 63471 - RNA, 32 nt, Homo Sapiens
ucuucugcuuuucucagcauggauaaaccauu

SEQ ID NO: 63472 - RNA, 29 nt, Homo Sapiens
uuguuagaaagacuauauuuucuguuuag

SEQ ID NO: 63473 - RNA, 32 nt, Homo Sapiens
cagacuacgcagaccagagcacauaagggcag

SEQ ID NO: 63474 - RNA, 31 nt, Homo Sapiens
uuagucccugggauggcuccaaggccugcuc

SEQ ID NO: 63475 - RNA, 32 nt, Homo Sapiens
cccgcaaccuucccuucgcucccucccguccc

SEQ ID NO: 63476 - RNA, 32 nt, Homo Sapiens
uuucaagcaauuguuguauuuucaugacugac

SEQ ID NO: 63477 - RNA, 32 nt, Homo Sapiens
caaccccugccagcagcccugggacccugcca

SEQ ID NO: 63478 - RNA, 32 nt, Homo Sapiens
ucaacucguuuuuauauuaauguacuuguuuc

SEQ ID NO: 63479 - RNA, 32 nt, Homo Sapiens
agugggcccugugaccagcugcacugguuucg

SEQ ID NO: 63480 - RNA, 32 nt, Homo Sapiens
ccguuuuauaguuuuaaaaaguuuacuuuggc

SEQ ID NO: 63481 - RNA, 32 nt, Homo Sapiens
cuuaauguaacaacccaaaaauaaaugucaua

SEQ ID NO: 63482 - RNA, 32 nt, Homo Sapiens
ccuccugaaacacagguuggcaggccagucuc

SEQ ID NO: 63483 - RNA, 32 nt, Homo Sapiens
agccccucauaccacagccaagaggggccuuu

SEQ ID NO: 63484 - RNA, 32 nt, Homo Sapiens
cugcugcauucaucagcaaugaacaguuucca

SEQ ID NO: 63485 - RNA, 32 nt, Homo Sapiens
cagcgcgaccccgaccccgcccgcccgccugc

SEQ ID NO: 63486 - RNA, 32 nt, Homo Sapiens
cagcccuguccgucugucugucugucuguggu

SEQ ID NO: 63487 - RNA, 32 nt, Homo Sapiens
uucccugcugaccaaugaccgcggccuccagg

SEQ ID NO: 63488 - RNA, 32 nt, Homo Sapiens
cugugcacggcuucucaagugauucaguugca

SEQ ID NO: 63489 - RNA, 32 nt, Homo Sapiens
guuugaggagcagagggaagagcugcugaggg

SEQ ID NO: 63490 - RNA, 32 nt, Homo Sapiens
ucucugggucucaguuuucucaucuguauugg

SEQ ID NO: 63491 - RNA, 32 nt, Homo Sapiens
gagccaaaugacacuaacuuauagaaggggag

SEQ ID NO: 63492 - RNA, 32 nt, Homo Sapiens
cggacacacgcgguuugguuugcagcgacugg

SEQ ID NO: 63493 - RNA, 32 nt, Homo Sapiens
uuuuuaaaggauuaauaaaauucugaaauguu

SEQ ID NO: 63494 - RNA, 32 nt, Homo Sapiens
aucuccgccucccggguucaagugauucuccu

SEQ ID NO: 63495 - RNA, 30 nt, Homo Sapiens
gccgcggccccucaggucgcccuggccaca

SEQ ID NO: 63496 - RNA, 32 nt, Homo Sapiens
ucgucguccucgggcuccagggugcugcugcg

SEQ ID NO: 63497 - RNA, 32 nt, Homo Sapiens
aacuccuaggcucaaggcaucuccaggagcgc

SEQ ID NO: 63498 - RNA, 32 nt, Homo Sapiens
aauacacacacacacacacacacacacacacg

SEQ ID NO: 63499 - RNA, 32 nt, Homo Sapiens
aaugcugcauugcugcaguuuccaccacucuu

SEQ ID NO: 63500 - RNA, 32 nt, Homo Sapiens
ucccacguguguguguccgcaucuuucugguc

SEQ ID NO: 63501 - RNA, 32 nt, Homo Sapiens
cccagcggaucgucgcccgaucaguguuuuga

SEQ ID NO: 63502 - RNA, 32 nt, Homo Sapiens
cccugaagaaagggcugcuucucccucagacu

SEQ ID NO: 63503 - RNA, 32 nt, Homo Sapiens
cugagugaacaaagugcuaaauaaauagaucu

SEQ ID NO: 63504 - RNA, 32 nt, Homo Sapiens
aaggagucguggcugcuuggacaggcucaaac

SEQ ID NO: 63505 - RNA, 32 nt, Homo Sapiens
auaggguguuuccaccauggucuucacucagg

SEQ ID NO: 63506 - RNA, 32 nt, Homo Sapiens
uccuguuggcugcaggacucagagcauggaca

SEQ ID NO: 63507 - RNA, 32 nt, Homo Sapiens
gccauguuuauuguggauggguaagaaucacc

SEQ ID NO: 63508 - RNA, 32 nt, Homo Sapiens
accacuaagcguguggcacgccgggggucccg

SEQ ID NO: 63509 - RNA, 32 nt, Homo Sapiens
cauucuggccuggccugguuuugccaucugaa

SEQ ID NO: 63510 - RNA, 32 nt, Homo Sapiens
ggagcaagggcaggguggaggggguugaagga

SEQ ID NO: 63511 - RNA, 32 nt, Homo Sapiens
guuagcuaauacaaaaaguagaugauccaaaa

SEQ ID NO: 63512 - RNA, 32 nt, Homo Sapiens
guguggcccuccccggugcugucacgucugaa

SEQ ID NO: 63513 - RNA, 32 nt, Homo Sapiens
ucugugacuguuacugcaaaagguuugauucc

SEQ ID NO: 63514 - RNA, 32 nt, Homo Sapiens
aaaggccccacuuccccauaccaucaccuugg

SEQ ID NO: 63515 - RNA, 32 nt, Homo Sapiens
uguaaauacucuagguaucuguaaacacucug

SEQ ID NO: 63516 - RNA, 32 nt, Homo Sapiens
uuuccgcggaggagcgcccgccggcaucugca

SEQ ID NO: 63517 - RNA, 32 nt, Homo Sapiens
cccggugaccuuggggacccuucucugaucau

SEQ ID NO: 63518 - RNA, 32 nt, Homo Sapiens
uaauauacuggucuauuuucuccuaaugcuug

SEQ ID NO: 63519 - RNA, 32 nt, Homo Sapiens
uggauuccccauuuuaaauauuucauaauaau

SEQ ID NO: 63520 - RNA, 32 nt, Homo Sapiens
auuaaaacuaaauaucuaaaccuuguauacag

SEQ ID NO: 63521 - RNA, 32 nt, Homo Sapiens
acaggagauauguuuccucugacaaaacccca

SEQ ID NO: 63522 - RNA, 32 nt, Homo Sapiens
caugcaaaggaauggaacagugccuggcaccu

SEQ ID NO: 63523 - RNA, 32 nt, Homo Sapiens
ggcagucuuccucccccuccccgaccaaaccu

SEQ ID NO: 63524 - RNA, 32 nt, Homo Sapiens
ccucucccgccccacacccacccuccuggcuc

SEQ ID NO: 63525 - RNA, 32 nt, Homo Sapiens
agccaccucaagaugaauaucuuaauuuauua

SEQ ID NO: 63526 - RNA, 32 nt, Homo Sapiens
accguuuucugccacacccccacccccagcug

SEQ ID NO: 63527 - RNA, 32 nt, Homo Sapiens
gcaaggggccccaggagcucucacuguuggcc

SEQ ID NO: 63528 - RNA, 32 nt, Homo Sapiens
gcucccccagcuccccccaccucccccacucc

SEQ ID NO: 63529 - RNA, 32 nt, Homo Sapiens
ccccgcuuuggcggcccggccggagggcagga

SEQ ID NO: 63530 - RNA, 32 nt, Homo Sapiens
gaccgcccaguaggaagaaaaaugagacauuu

SEQ ID NO: 63531 - RNA, 32 nt, Homo Sapiens
uccuaucuagaaugggcccauucuugucacau

SEQ ID NO: 63532 - RNA, 32 nt, Homo Sapiens
agcccaccccuccgcagccccaucccugcggg

SEQ ID NO: 63533 - RNA, 32 nt, Homo Sapiens
aaacgcuccuuacgucgagauguuggaccuug

SEQ ID NO: 63534 - RNA, 32 nt, Homo Sapiens
uaguggaaaaagaagacaaugcuuuccauauu

SEQ ID NO: 63535 - RNA, 32 nt, Homo Sapiens
ucuggccaaaaauucuugauuuaaaaagaaaa

SEQ ID NO: 63536 - RNA, 32 nt, Homo Sapiens
ugcuccggguuagcuucaccccgggacucggg

SEQ ID NO: 63537 - RNA, 32 nt, Homo Sapiens
cagcaacagcaacagcagcagcagcagcagca

SEQ ID NO: 63538 - RNA, 32 nt, Homo Sapiens
ccacgcuggugcccaccgccuuggccagccaa

SEQ ID NO: 63539 - RNA, 32 nt, Homo Sapiens
agaugcaucugugcagaaaugcggguguuggc

SEQ ID NO: 63540 - RNA, 32 nt, Homo Sapiens
uuaaaauauaauaaacccuuguccuucuugau

SEQ ID NO: 63541 - RNA, 32 nt, Homo Sapiens
ccgcagccgcauccacccaccauggccucagg

SEQ ID NO: 63542 - RNA, 32 nt, Homo Sapiens
ccacauugagggugggucugccacucacaguc

SEQ ID NO: 63543 - RNA, 32 nt, Homo Sapiens
uggacgccgccggucccggcgcggaggugcgg

SEQ ID NO: 63544 - RNA, 32 nt, Homo Sapiens
cagcugcccucccugacccuauagccccaggc

SEQ ID NO: 63545 - RNA, 31 nt, Homo Sapiens
uagucgggcgggguugugagacgccgcgcuc

SEQ ID NO: 63546 - RNA, 32 nt, Homo Sapiens
ucauucagaagcugugugcccugccgcaaaug

SEQ ID NO: 63547 - RNA, 32 nt, Homo Sapiens
uuagagauuaaagcuccuucuaucuugugaug

SEQ ID NO: 63548 - RNA, 32 nt, Homo Sapiens
ccuagaucgcaguggcuggcugcuuggccagg

SEQ ID NO: 63549 - RNA, 32 nt, Homo Sapiens
acagggguucgaaaauacagcuguaccccgcg

SEQ ID NO: 63550 - RNA, 32 nt, Homo Sapiens
ccaagagaagcuggagcagagagcuggcauga

SEQ ID NO: 63551 - RNA, 32 nt, Homo Sapiens
uuaaaugucauuuaaguguagauuaugccauc

SEQ ID NO: 63552 - RNA, 32 nt, Homo Sapiens
ugaggaggacccacgagugcugccgaggugug

SEQ ID NO: 63553 - RNA, 32 nt, Homo Sapiens
aauaaagauuccagaaauaaacauggagcuca

SEQ ID NO: 63554 - RNA, 32 nt, Homo Sapiens
uaugaauugugcucuuuuuuuauucauaugau

SEQ ID NO: 63555 - RNA, 32 nt, Homo Sapiens
uuaugaggguguaugacugcucagugaaugga

SEQ ID NO: 63556 - RNA, 32 nt, Homo Sapiens
uuuuaccugcucauuaugauuccuccuuuuag

SEQ ID NO: 63557 - RNA, 32 nt, Homo Sapiens
aacauuuuuuauuugagaauuuuguuucaaag

SEQ ID NO: 63558 - RNA, 32 nt, Homo Sapiens
aagaguggguuugaagggcggaucucaguccc

SEQ ID NO: 63559 - RNA, 32 nt, Homo Sapiens
auucccauguucuugugugucacaguucagcc

SEQ ID NO: 63560 - RNA, 32 nt, Homo Sapiens
aauuauacauaucucuuuuuuauucuguuaau

SEQ ID NO: 63561 - RNA, 32 nt, Homo Sapiens
ucuauuucuuucuccuugcccucugaaacuuc

SEQ ID NO: 63562 - RNA, 32 nt, Homo Sapiens
guguaauaguauuaaauuuaauggcagaccuu

SEQ ID NO: 63563 - RNA, 32 nt, Homo Sapiens
cuccauuuucuuuuuccucacuaaagugccuc

SEQ ID NO: 63564 - RNA, 32 nt, Homo Sapiens
uaaagcaaaaauuuauccaaagaagggcuuuc

SEQ ID NO: 63565 - RNA, 32 nt, Homo Sapiens
ugggguccacuucccccucuucagcauccccc

SEQ ID NO: 63566 - RNA, 32 nt, Homo Sapiens
ucuuuucccucuauuuuuuaaauugaaauaua

SEQ ID NO: 63567 - RNA, 32 nt, Homo Sapiens
aaaagacaaaaauaguauucaggugagcaauu

SEQ ID NO: 63568 - RNA, 32 nt, Homo Sapiens
aacagggaccagcagcaguuuucucaggauaa

SEQ ID NO: 63569 - RNA, 32 nt, Homo Sapiens
agcugagauugugccauugcacuccagccugg

SEQ ID NO: 63570 - RNA, 32 nt, Homo Sapiens
ugggauuuucccuccccccagugcacugagca

SEQ ID NO: 63571 - RNA, 32 nt, Homo Sapiens
caagccuaaugucuccauaauuuuauaaaaug

SEQ ID NO: 63572 - RNA, 32 nt, Homo Sapiens
aaggugguuugggucauguuuuuaaccaccug

SEQ ID NO: 63573 - RNA, 32 nt, Homo Sapiens
ccuggacugacagauaggccaagggcuacucu

SEQ ID NO: 63574 - RNA, 32 nt, Homo Sapiens
aaauagugcuccugggugcauugucaccgugg

SEQ ID NO: 63575 - RNA, 32 nt, Homo Sapiens
aaaaaguaaaauguggcuuucugaaaugaugg

SEQ ID NO: 63576 - RNA, 32 nt, Homo Sapiens
aggaagugucugaccugggccugagagcugga

SEQ ID NO: 63577 - RNA, 30 nt, Homo Sapiens
gcacaggcacaagcagcggguccagcacau

SEQ ID NO: 63578 - RNA, 32 nt, Homo Sapiens
aauauaaauauuagaaaauuacuuuggagacc

SEQ ID NO: 63579 - RNA, 32 nt, Homo Sapiens
guggugggcagacagauugccugggaccgagc

SEQ ID NO: 63580 - RNA, 32 nt, Homo Sapiens
gacccuaaucauauguauauuuuauugauuuc

SEQ ID NO: 63581 - RNA, 32 nt, Homo Sapiens
uauguaguucuauguuuauagauguguuuuca

SEQ ID NO: 63582 - RNA, 32 nt, Homo Sapiens
augugggaaauaccaccaaggagccucaucgu

SEQ ID NO: 63583 - RNA, 32 nt, Homo Sapiens
uaucaucauauacaacagcaccacugagagcu

SEQ ID NO: 63584 - RNA, 32 nt, Homo Sapiens
uuuuccggaggggccgguaaaccugguggcug

SEQ ID NO: 63585 - RNA, 32 nt, Homo Sapiens
auccuccguuugcgcuucgcaacuguccuggg

SEQ ID NO: 63586 - RNA, 32 nt, Homo Sapiens
aaagaaagaacaaauaacaaaugaaaauaaau

SEQ ID NO: 63587 - RNA, 32 nt, Homo Sapiens
ucuuuuuucuuuucuuuuuuuuuuuuuuugag

SEQ ID NO: 63588 - RNA, 32 nt, Homo Sapiens
aagcacaaagauuauauaugacaaucaguauu

SEQ ID NO: 63589 - RNA, 32 nt, Homo Sapiens
uucagaacugcugccuaggaaacuauaaaccc

SEQ ID NO: 63590 - RNA, 31 nt, Homo Sapiens
aaugcacccggaugccugccccgcacggcca

SEQ ID NO: 63591 - RNA, 32 nt, Homo Sapiens
aguucuuucugcaccagugauggaaaacgcaa

SEQ ID NO: 63592 - RNA, 32 nt, Homo Sapiens
aauuuaauauucaaaucuggaauuaagaaaac

SEQ ID NO: 63593 - RNA, 32 nt, Homo Sapiens
guccuccuccagcgccagccuggcccugagug

SEQ ID NO: 63594 - RNA, 30 nt, Homo Sapiens
cuuuucuccugugcuguacagguucaccaa

SEQ ID NO: 63595 - RNA, 32 nt, Homo Sapiens
aguguuaggaagugcaucaugauccagagguu

SEQ ID NO: 63596 - RNA, 32 nt, Homo Sapiens
ugaggugcgcgagggaggccgcuagccgagac

SEQ ID NO: 63597 - RNA, 32 nt, Homo Sapiens
gcgcguucucuuucuuuccacccaguugcccu

SEQ ID NO: 63598 - RNA, 32 nt, Homo Sapiens
ugaaguacucaguaauacaauacaguacucag

SEQ ID NO: 63599 - RNA, 32 nt, Homo Sapiens
ccagggacgcuacccucacgugucugguuccg

SEQ ID NO: 63600 - RNA, 32 nt, Homo Sapiens
caaccaccccgacgaggcucgaggucccugcc

SEQ ID NO: 63601 - RNA, 31 nt, Homo Sapiens
cugaugcuccuggcccugccccuggcggccc

SEQ ID NO: 63602 - RNA, 32 nt, Homo Sapiens
ugcacaggucagaacacagguuuccaaacccu

SEQ ID NO: 63603 - RNA, 32 nt, Homo Sapiens
uuuuccaagugucauuacgauguaucacuauu

SEQ ID NO: 63604 - RNA, 31 nt, Homo Sapiens
uacaagcauagcugccugcacucugucucuc

SEQ ID NO: 63605 - RNA, 32 nt, Homo Sapiens
uccugcucacuucaagcuucuuccauggacuu

SEQ ID NO: 63606 - RNA, 32 nt, Homo Sapiens
guccacguuuagguugggaggaucuaccauga

SEQ ID NO: 63607 - RNA, 32 nt, Homo Sapiens
uaaauuauuaaaccccugagaaggacuauuua

SEQ ID NO: 63608 - RNA, 32 nt, Homo Sapiens
ggcuguccccauagcuggaacucuguuuugga

SEQ ID NO: 63609 - RNA, 32 nt, Homo Sapiens
uuccguuacaaacaggcagcuggggcaugguu

SEQ ID NO: 63610 - RNA, 30 nt, Homo Sapiens
uggcgggcgcccguaaucccagcuacucgg

SEQ ID NO: 63611 - RNA, 32 nt, Homo Sapiens
gcuugguaauaaauuucuuuucugcaaaaaaa

SEQ ID NO: 63612 - RNA, 32 nt, Homo Sapiens
aguuuauacugacuuugaaauauuuuugucac

SEQ ID NO: 63613 - RNA, 32 nt, Homo Sapiens
uugcucauauccucaauacagcaggacaucca

SEQ ID NO: 63614 - RNA, 32 nt, Homo Sapiens
ugccucuugcaguugagacaagaggaaggcau

SEQ ID NO: 63615 - RNA, 32 nt, Homo Sapiens
ugcuuuuucuucccuuuuuauguugacugaaa

SEQ ID NO: 63616 - RNA, 32 nt, Homo Sapiens
ucugucaccucugcuccacaccugaccagugg

SEQ ID NO: 63617 - RNA, 32 nt, Homo Sapiens
ugcgucugaggccugcccccugggcuggggcc

SEQ ID NO: 63618 - RNA, 32 nt, Homo Sapiens
acggaaaaugaguagugagaugaugcuggugg

SEQ ID NO: 63619 - RNA, 31 nt, Homo Sapiens
accacggagccccagggccccugggcuuguc

SEQ ID NO: 63620 - RNA, 32 nt, Homo Sapiens
ucuuaugagaaccuuuuuauuuuuguacagag

SEQ ID NO: 63621 - RNA, 32 nt, Homo Sapiens
uucucuccuggccacucuuccugcugccucug

SEQ ID NO: 63622 - RNA, 32 nt, Homo Sapiens
agagcaagcaaaucuuuuuaaaaaauaguaug

SEQ ID NO: 63623 - RNA, 32 nt, Homo Sapiens
gggacuuacugauaauuuacuuuugaucacau

SEQ ID NO: 63624 - RNA, 32 nt, Homo Sapiens
ccaacacuuucucuucuuagucucucucuuua

SEQ ID NO: 63625 - RNA, 32 nt, Homo Sapiens
agagaagauaaagaacagaacagccaaugacu

SEQ ID NO: 63626 - RNA, 30 nt, Homo Sapiens
aauaucccacagaugggggaaggugagagg

SEQ ID NO: 63627 - RNA, 32 nt, Homo Sapiens
ucuuuauguaucuauuauguaccucuuaucua

SEQ ID NO: 63628 - RNA, 32 nt, Homo Sapiens
cugccccggggccacgaguggaugcuggggcu

SEQ ID NO: 63629 - RNA, 32 nt, Homo Sapiens
gacaguuauagauaaggaauuuccuguacacc

SEQ ID NO: 63630 - RNA, 32 nt, Homo Sapiens
ggauuacuugcauaauuguucuuuuaaaauua

SEQ ID NO: 63631 - RNA, 32 nt, Homo Sapiens
ccagguuaucccauuucuguuguuaccuuuau

SEQ ID NO: 63632 - RNA, 32 nt, Homo Sapiens
gugauggggcacguggagcuucuugaaaugac

SEQ ID NO: 63633 - RNA, 32 nt, Homo Sapiens
aagugucagauuacaggaguaccagugggaga

SEQ ID NO: 63634 - RNA, 32 nt, Homo Sapiens
uccacccuuucuggugucuauaggaaugcaug

SEQ ID NO: 63635 - RNA, 32 nt, Homo Sapiens
cucuugccucagccuccuggguagcugggauu

SEQ ID NO: 63636 - RNA, 32 nt, Homo Sapiens
uagaaaagagguccuugucauucucaccucuu

SEQ ID NO: 63637 - RNA, 32 nt, Homo Sapiens
aacaggcgcuggagcuggcccgccaccgccgc

SEQ ID NO: 63638 - RNA, 32 nt, Homo Sapiens
cuucauauucuaugagaugccuuuaaaauuuc

SEQ ID NO: 63639 - RNA, 32 nt, Homo Sapiens
acuagguuucuaauuucuauguggaauuuccu

SEQ ID NO: 63640 - RNA, 32 nt, Homo Sapiens
cgcuuacugaauaaggugggauccaacaagag

SEQ ID NO: 63641 - RNA, 32 nt, Homo Sapiens
agugggaugagcuggcugugcaggagaagaug

SEQ ID NO: 63642 - RNA, 32 nt, Homo Sapiens
cauuuaaaggauuaaaacugagauuugaacaa

SEQ ID NO: 63643 - RNA, 32 nt, Homo Sapiens
ccgcagaggaggggcgauggggguggcggcug

SEQ ID NO: 63644 - RNA, 32 nt, Homo Sapiens
gcacacgccccugccggacccuggacggcaac

SEQ ID NO: 63645 - RNA, 32 nt, Homo Sapiens
uuuucuuucaccauuacuuucugauaucuagu

SEQ ID NO: 63646 - RNA, 32 nt, Homo Sapiens
uuucucugucucucuuuuuuaauguccuuuuu

SEQ ID NO: 63647 - RNA, 32 nt, Homo Sapiens
guuuauuuucuauuuuaguuaacuaugauucc

SEQ ID NO: 63648 - RNA, 32 nt, Homo Sapiens
uagugaccuugccuccuucuccuugccaacuu

SEQ ID NO: 63649 - RNA, 32 nt, Homo Sapiens
uugagcagaucugauuauucuuggauaguauu

SEQ ID NO: 63650 - RNA, 32 nt, Homo Sapiens
aguccccucgcugguacggaaugccgcugggu

SEQ ID NO: 63651 - RNA, 32 nt, Homo Sapiens
ccacucuucccucucaucaucauggccccacc

SEQ ID NO: 63652 - RNA, 30 nt, Homo Sapiens
acuuuugucugugugugaaccuuuguuuua

SEQ ID NO: 63653 - RNA, 32 nt, Homo Sapiens
gggucaccaggucacugcugcagcccccgccc

SEQ ID NO: 63654 - RNA, 32 nt, Homo Sapiens
acccccuuccuggcagccagugccaaacagcc

SEQ ID NO: 63655 - RNA, 32 nt, Homo Sapiens
cuucaguuugaaaaaucaucgauauuugaaac

SEQ ID NO: 63656 - RNA, 32 nt, Homo Sapiens
gcuucccugccgcauccucuccccucaggaag

SEQ ID NO: 63657 - RNA, 27 nt, Homo Sapiens
cggagucuuagcuucagccucgccugc

SEQ ID NO: 63658 - RNA, 32 nt, Homo Sapiens
gcgcugugagucccgcgggcggugcgccuggg

SEQ ID NO: 63659 - RNA, 32 nt, Homo Sapiens
uggguuugucaaaauaucaaguaaauuuuugu

SEQ ID NO: 63660 - RNA, 32 nt, Homo Sapiens
gugcuauugggguggggaguucccuccccucc

SEQ ID NO: 63661 - RNA, 31 nt, Homo Sapiens
auugaaggagcgugaauaugauggauuuuuu

SEQ ID NO: 63662 - RNA, 32 nt, Homo Sapiens
aaaacguuauuuauaaugaaaucaacuaaaac

SEQ ID NO: 63663 - RNA, 32 nt, Homo Sapiens
uuauccccacuuugaagacguguguuucugua

SEQ ID NO: 63664 - RNA, 32 nt, Homo Sapiens
uguagguuucaagagauugugaugauucuuaa

SEQ ID NO: 63665 - RNA, 32 nt, Homo Sapiens
cuuuguugaaagaggggguuagagagagcaag

SEQ ID NO: 63666 - RNA, 32 nt, Homo Sapiens
ucggggcagcggggaccccgcgcggcugcaag

SEQ ID NO: 63667 - RNA, 32 nt, Homo Sapiens
cauaaguugaagcccuccccagauccccuugg

SEQ ID NO: 63668 - RNA, 32 nt, Homo Sapiens
cggcggcggcggugguuacuauggcggagucg

SEQ ID NO: 63669 - RNA, 32 nt, Homo Sapiens
cacuguuuugcuucuuuuuuuauuuauucuuu

SEQ ID NO: 63670 - RNA, 32 nt, Homo Sapiens
uggucaguccccagcccugugggcccccaccu

SEQ ID NO: 63671 - RNA, 32 nt, Homo Sapiens
cuuggugucucuccgagaauaagacggggagg

SEQ ID NO: 63672 - RNA, 32 nt, Homo Sapiens
uuauggauuuuuuuuucuuuuuuuuuuuucgc

SEQ ID NO: 63673 - RNA, 27 nt, Homo Sapiens
agcuuuuccuucuucuccagugucuac

SEQ ID NO: 63674 - RNA, 32 nt, Homo Sapiens
gaccaaucaguggcccaaauuuuccagccccu

SEQ ID NO: 63675 - RNA, 32 nt, Homo Sapiens
ccagccugcuugugucccgugagguugucaau

SEQ ID NO: 63676 - RNA, 32 nt, Homo Sapiens
aggacuuuuuauuuacagcuuuucuuuuccug

SEQ ID NO: 63677 - RNA, 32 nt, Homo Sapiens
ccugcuguuuggagaugugacucauucauuca

SEQ ID NO: 63678 - RNA, 32 nt, Homo Sapiens
uaaaccuugaagcugaugaaaguuaacauuuu

SEQ ID NO: 63679 - RNA, 32 nt, Homo Sapiens
ugccuaaagaaaagcagagacacacauaauuc

SEQ ID NO: 63680 - RNA, 32 nt, Homo Sapiens
gcugcaggauggggaauugaccacggaucuuu

SEQ ID NO: 63681 - RNA, 32 nt, Homo Sapiens
cucaugcucccucucuuggcuacaccacucuc

SEQ ID NO: 63682 - RNA, 32 nt, Homo Sapiens
gauuuugaaccugaugaaaauaaagaauggaa

SEQ ID NO: 63683 - RNA, 32 nt, Homo Sapiens
cauguaaguggaauaaaaguuuuaugaaugga

SEQ ID NO: 63684 - RNA, 32 nt, Homo Sapiens
cccagagagagcccccacaagcuccucaggaa

SEQ ID NO: 63685 - RNA, 32 nt, Homo Sapiens
auggaauggagagugaugugggcaaggguguc

SEQ ID NO: 63686 - RNA, 32 nt, Homo Sapiens
ggagcucagcaguguuuaaugauccucuucca

SEQ ID NO: 63687 - RNA, 32 nt, Homo Sapiens
cagcagcagcagcagcagcagcagcaacaaca

SEQ ID NO: 63688 - RNA, 32 nt, Homo Sapiens
ggagacugacuuccagcaacauuuuuagaggg

SEQ ID NO: 63689 - RNA, 32 nt, Homo Sapiens
ccaguguuguuguuuaaucguagccggaucag

SEQ ID NO: 63690 - RNA, 32 nt, Homo Sapiens
gaccucgacccggaacguggcugcccacugcc

SEQ ID NO: 63691 - RNA, 32 nt, Homo Sapiens
uaucgucaggugggauaauccuuaccuguucc

SEQ ID NO: 63692 - RNA, 32 nt, Homo Sapiens
ggguguaugcugccaggcuggguacuuucaua

SEQ ID NO: 63693 - RNA, 32 nt, Homo Sapiens
gcccggcgcgagaggaggcagagggggcguca

SEQ ID NO: 63694 - RNA, 32 nt, Homo Sapiens
uaacuuaaagcccagauccuacaggaaaccuu

SEQ ID NO: 63695 - RNA, 30 nt, Homo Sapiens
auugaaguguuugcugcagaguugagggaa

SEQ ID NO: 63696 - RNA, 32 nt, Homo Sapiens
cagccucuuagguuggagaguauugauuucaa

SEQ ID NO: 63697 - RNA, 32 nt, Homo Sapiens
ugucguaugugcuuuucuuucuuucauaugau

SEQ ID NO: 63698 - RNA, 32 nt, Homo Sapiens
guuuuugcuuugcauuuggagaaaauauugaa

SEQ ID NO: 63699 - RNA, 32 nt, Homo Sapiens
aauaugcauucauuuuaaucuacugaacaaau

SEQ ID NO: 63700 - RNA, 32 nt, Homo Sapiens
gcauguguguucccggggcgcgugugugggug

SEQ ID NO: 63701 - RNA, 32 nt, Homo Sapiens
aggcugagaaaagaaggaaaaaggucacagcc

SEQ ID NO: 63702 - RNA, 31 nt, Homo Sapiens
cugguccgcgccugccugcccagcccgcgga

SEQ ID NO: 63703 - RNA, 32 nt, Homo Sapiens
uacggaaacuaaaaguuucggggccucuggcu

SEQ ID NO: 63704 - RNA, 32 nt, Homo Sapiens
cccuagaagauaaaauuaagucauuagauggc

SEQ ID NO: 63705 - RNA, 32 nt, Homo Sapiens
gcgcucagcuccgcggucguccuccaggucug

SEQ ID NO: 63706 - RNA, 32 nt, Homo Sapiens
gacgucugucagaucucgucacauuggcuggu

SEQ ID NO: 63707 - RNA, 32 nt, Homo Sapiens
ggucauuauuuuuucuuucuguacagaaauag

SEQ ID NO: 63708 - RNA, 32 nt, Homo Sapiens
ccuccacccugugcccgaggggguguccgguc

SEQ ID NO: 63709 - RNA, 32 nt, Homo Sapiens
ggggcggccgagcgcuccugcggcugcgacuc

SEQ ID NO: 63710 - RNA, 32 nt, Homo Sapiens
aaagacucuuugguucacauuccgauauuaaa

SEQ ID NO: 63711 - RNA, 32 nt, Homo Sapiens
uuaaaagaaaucagacaaaugcccugaguggu

SEQ ID NO: 63712 - RNA, 32 nt, Homo Sapiens
ggcucuggugucugguuuggccccacagcagu

SEQ ID NO: 63713 - RNA, 32 nt, Homo Sapiens
ggagguuugugagagcgaggcugagccuacag

SEQ ID NO: 63714 - RNA, 32 nt, Homo Sapiens
gcgcuuggccucuccuucucuuccuucacuuu

SEQ ID NO: 63715 - RNA, 32 nt, Homo Sapiens
agggcgcuaggggccgggacgcggccgccgag

SEQ ID NO: 63716 - RNA, 32 nt, Homo Sapiens
uccggcagauuccuaggaaccaaauaccucug

SEQ ID NO: 63717 - RNA, 32 nt, Homo Sapiens
aguggcuguuggaaagauuuaagguuucacac

SEQ ID NO: 63718 - RNA, 32 nt, Homo Sapiens
auuaccuaccccuacccucagcccuuggaaac

SEQ ID NO: 63719 - RNA, 32 nt, Homo Sapiens
caccgcccgcaccugccgcggggaccucgccu

SEQ ID NO: 63720 - RNA, 32 nt, Homo Sapiens
guucccaccuccuggcaccucccuccccuggg

SEQ ID NO: 63721 - RNA, 28 nt, Homo Sapiens
uaaaagacaagucaucauuugaaaauau

SEQ ID NO: 63722 - RNA, 32 nt, Homo Sapiens
aacucuggccccaggcccuguucuguuaucca

SEQ ID NO: 63723 - RNA, 32 nt, Homo Sapiens
guuucucagcacacugcagaagggcagcucag

SEQ ID NO: 63724 - RNA, 32 nt, Homo Sapiens
cauuccaucuucugaaauucugagauucuaac

SEQ ID NO: 63725 - RNA, 32 nt, Homo Sapiens
gagccauggugaaaccgcaucucuacuaaaaa

SEQ ID NO: 63726 - RNA, 32 nt, Homo Sapiens
uucccaaaaugaauaguggaaggcugggaaac

SEQ ID NO: 63727 - RNA, 32 nt, Homo Sapiens
gggaaauaugaugguagcuggcaggggaagug

SEQ ID NO: 63728 - RNA, 32 nt, Homo Sapiens
gauuuucuuuuuucuuuuuuuuuuuaacucga

SEQ ID NO: 63729 - RNA, 32 nt, Homo Sapiens
uaaguaucauccauuucuauguucucuagcaa

SEQ ID NO: 63730 - RNA, 32 nt, Homo Sapiens
aggcuggugccuggucucuccucauuucccug

SEQ ID NO: 63731 - RNA, 32 nt, Homo Sapiens
uucugucccccggccccagacccagagccgag

SEQ ID NO: 63732 - RNA, 32 nt, Homo Sapiens
ugccccaggcucagccaggagcugccagaggu

SEQ ID NO: 63733 - RNA, 32 nt, Homo Sapiens
cacuugcaaaauuuauaacacacuuaagguag

SEQ ID NO: 63734 - RNA, 32 nt, Homo Sapiens
guccccaaacuuauggacacugccuuagccuc

SEQ ID NO: 63735 - RNA, 32 nt, Homo Sapiens
gaggaagaggaggcggaggcggcggccgggug

SEQ ID NO: 63736 - RNA, 32 nt, Homo Sapiens
uccugacccgugguccucucccgcucccucug

SEQ ID NO: 63737 - RNA, 32 nt, Homo Sapiens
agugccgcccccggcucgggcacgugguggcg

SEQ ID NO: 63738 - RNA, 32 nt, Homo Sapiens
uuuuucuucauuuaaauauuuucuuugccuaa

SEQ ID NO: 63739 - RNA, 32 nt, Homo Sapiens
gugccggcugcugcccgugcugccagaacuau

SEQ ID NO: 63740 - RNA, 32 nt, Homo Sapiens
ggaagcugagccucgauguggagcaggccccg

SEQ ID NO: 63741 - RNA, 32 nt, Homo Sapiens
cagacacacauguucuguuccuccuccucaug

SEQ ID NO: 63742 - RNA, 32 nt, Homo Sapiens
acggccggccgggucuugucacuugugcaugc

SEQ ID NO: 63743 - RNA, 32 nt, Homo Sapiens
cuccagacucugccuccuacgaggcugggcug

SEQ ID NO: 63744 - RNA, 32 nt, Homo Sapiens
uuuuaaauugugcacuaacaaaaugcuauaua

SEQ ID NO: 63745 - RNA, 32 nt, Homo Sapiens
cucccaaguggcccaggcugccugcagccauu

SEQ ID NO: 63746 - RNA, 32 nt, Homo Sapiens
cccuuucauuuuuuuucuuuuccaguguuuag

SEQ ID NO: 63747 - RNA, 32 nt, Homo Sapiens
guucuauccaacagaaacuguaucuuucuguu

SEQ ID NO: 63748 - RNA, 32 nt, Homo Sapiens
gcgcugggcucggggugacuacaggagacgac

SEQ ID NO: 63749 - RNA, 32 nt, Homo Sapiens
ucuugaccugguuuuaaaucuggcaguuugag

SEQ ID NO: 63750 - RNA, 32 nt, Homo Sapiens
aggagacguggucugugccuucuggcccaucg

SEQ ID NO: 63751 - RNA, 32 nt, Homo Sapiens
cuucccgcugcgggcucgguuuccacaggcga

SEQ ID NO: 63752 - RNA, 32 nt, Homo Sapiens
cuggauggaagcugcgugugugaacgugugua

SEQ ID NO: 63753 - RNA, 32 nt, Homo Sapiens
accucugaagguacaucccagcuucaggcucc

SEQ ID NO: 63754 - RNA, 32 nt, Homo Sapiens
guuauuacagcugcucuagaaacuaacauauc

SEQ ID NO: 63755 - RNA, 32 nt, Homo Sapiens
agugaaauuuucuuauacucccuucauuaaau

SEQ ID NO: 63756 - RNA, 32 nt, Homo Sapiens
uucaggcaggccaaggccuucuccuccccacc

SEQ ID NO: 63757 - RNA, 32 nt, Homo Sapiens
uuaugugcucucaaaacauggaaaauaaguuu

SEQ ID NO: 63758 - RNA, 32 nt, Homo Sapiens
gacauacucaccucuaccucgaccacaucaac

SEQ ID NO: 63759 - RNA, 32 nt, Homo Sapiens
gccacacuggacuuaaauucagcugcuuccag

SEQ ID NO: 63760 - RNA, 32 nt, Homo Sapiens
ucuucuuacauauauugauuaaugucuuaugu

SEQ ID NO: 63761 - RNA, 32 nt, Homo Sapiens
gcggcggccgcggaaggccaggccggugcccu

SEQ ID NO: 63762 - RNA, 32 nt, Homo Sapiens
ccaccccaaguucuaaggucuuuucagagcgu

SEQ ID NO: 63763 - RNA, 32 nt, Homo Sapiens
uuggcaggaauuacaaggcaaugaagaauucu

SEQ ID NO: 63764 - RNA, 32 nt, Homo Sapiens
gugcugucacgcacaagggcacgugagucauu

SEQ ID NO: 63765 - RNA, 32 nt, Homo Sapiens
uaacacccacuuuucuuucuuuuuucuuggga

SEQ ID NO: 63766 - RNA, 32 nt, Homo Sapiens
auggcccugaagaagcggauccagucacauag

SEQ ID NO: 63767 - RNA, 32 nt, Homo Sapiens
acaccccuuuccagccacaauccaccaucauc

SEQ ID NO: 63768 - RNA, 32 nt, Homo Sapiens
auugcuugacuucuaccucagaaucuucuuug

SEQ ID NO: 63769 - RNA, 32 nt, Homo Sapiens
aguuuaugucauuugauggacuugguucaaca

SEQ ID NO: 63770 - RNA, 32 nt, Homo Sapiens
cuccaacacacacacacacacacacacacaca

SEQ ID NO: 63771 - RNA, 32 nt, Homo Sapiens
agaccaagaacccaccaauuccggacgcagua

SEQ ID NO: 63772 - RNA, 32 nt, Homo Sapiens
aaugaguaaauaaaugauuccuuuuucucuac

SEQ ID NO: 63773 - RNA, 32 nt, Homo Sapiens
auggaaacagagcgaaauacaaccuggucagc

SEQ ID NO: 63774 - RNA, 32 nt, Homo Sapiens
cuuaaggaugagaaaugagauguguuauguga

SEQ ID NO: 63775 - RNA, 32 nt, Homo Sapiens
gcagggucucugucgcccaggcuggggugcag

SEQ ID NO: 63776 - RNA, 32 nt, Homo Sapiens
uuauucaauuuaauaugaucaaguauguucgu

SEQ ID NO: 63777 - RNA, 32 nt, Homo Sapiens
gagucauaauacuuuauaaucaauuaaauaaa

SEQ ID NO: 63778 - RNA, 32 nt, Homo Sapiens
aaguaacuuuuguauuuuuaguagagaugggg

SEQ ID NO: 63779 - RNA, 32 nt, Homo Sapiens
gaggcagauaaaacucccuuaaaaucaucaca

SEQ ID NO: 63780 - RNA, 32 nt, Homo Sapiens
uugaagccaccacaagggcccgggccaccagg

SEQ ID NO: 63781 - RNA, 32 nt, Homo Sapiens
agcuuuuccagaagcugauucccauuuuaaga

SEQ ID NO: 63782 - RNA, 32 nt, Homo Sapiens
cagggcuugagggccagugaggcgcuggucag

SEQ ID NO: 63783 - RNA, 32 nt, Homo Sapiens
cgggggccagggcagcggcgucgcuccucugc

SEQ ID NO: 63784 - RNA, 32 nt, Homo Sapiens
ccacccugccagcagcccuaggucuuccuguu

SEQ ID NO: 63785 - RNA, 32 nt, Homo Sapiens
aacggagagcguagugaccaucaugagccucc

SEQ ID NO: 63786 - RNA, 32 nt, Homo Sapiens
cucagacccucgcagcagcagcaacucauacu

SEQ ID NO: 63787 - RNA, 30 nt, Homo Sapiens
ucgacguggggcggccagcgaugaagccgc

SEQ ID NO: 63788 - RNA, 32 nt, Homo Sapiens
cggcugugcacccgcccucccucccucccacg

SEQ ID NO: 63789 - RNA, 30 nt, Homo Sapiens
cacgaguaucaccaugggagugggcaggac

SEQ ID NO: 63790 - RNA, 32 nt, Homo Sapiens
ccccgcuggccccuuuguuccccucccggggc

SEQ ID NO: 63791 - RNA, 26 nt, Homo Sapiens
uaccauuaaauuauaugguguggugu

SEQ ID NO: 63792 - RNA, 32 nt, Homo Sapiens
uccuggaaucucucuugauuuuugaggaaaua

SEQ ID NO: 63793 - RNA, 32 nt, Homo Sapiens
ugggcuuuugucgaaguucugccauuuaggua

SEQ ID NO: 63794 - RNA, 30 nt, Homo Sapiens
ccaaggcuggugggacggggucccgguggc

SEQ ID NO: 63795 - RNA, 32 nt, Homo Sapiens
gaucaacuguuauaaauuaaggucuuaauacc

SEQ ID NO: 63796 - RNA, 27 nt, Homo Sapiens
acauggcggcgguguugcagcaagucc

SEQ ID NO: 63797 - RNA, 32 nt, Homo Sapiens
cacaacauuuggcuuuguuuucuuuuuccuuu

SEQ ID NO: 63798 - RNA, 32 nt, Homo Sapiens
cacugcacuccagccugggugacagagagaga

SEQ ID NO: 63799 - RNA, 32 nt, Homo Sapiens
cacugcacuccagccuaggugacaaagagaga

SEQ ID NO: 63800 - RNA, 32 nt, Homo Sapiens
ugcagcugaccucuguuguccuccccuugggc

SEQ ID NO: 63801 - RNA, 32 nt, Homo Sapiens
agguuuggagagcggcuggguucgcgggaccc

SEQ ID NO: 63802 - RNA, 32 nt, Homo Sapiens
gcuuuugaaaccaaaaucauguucuucuaaag

SEQ ID NO: 63803 - RNA, 32 nt, Homo Sapiens
ugcuguuguguuuuggggaugcuugaucaucu

SEQ ID NO: 63804 - RNA, 31 nt, Homo Sapiens
ggggagcacugacagaaccagaagcagguuc

SEQ ID NO: 63805 - RNA, 32 nt, Homo Sapiens
cuccagggcaggaccuuggagggaggaacaac

SEQ ID NO: 63806 - RNA, 32 nt, Homo Sapiens
agugccauacucgucuggguaagauuugggaa

SEQ ID NO: 63807 - RNA, 32 nt, Homo Sapiens
ggucucuaggcaaaaggaaauggauuugguua

SEQ ID NO: 63808 - RNA, 32 nt, Homo Sapiens
uggcuggcccgggcugccccaggaccacggac

SEQ ID NO: 63809 - RNA, 32 nt, Homo Sapiens
aaaaaucauacacauuaaaauuugauaauuuc

SEQ ID NO: 63810 - RNA, 32 nt, Homo Sapiens
gucacaucuggccagagggcugucuggaccug

SEQ ID NO: 63811 - RNA, 32 nt, Homo Sapiens
gguguagguggcagcugaaacuacauccaugu

SEQ ID NO: 63812 - RNA, 32 nt, Homo Sapiens
gcaguuaccgaggagcuaaacaugcugccaac

SEQ ID NO: 63813 - RNA, 32 nt, Homo Sapiens
aaagauccgagaaaaagaagaugcaauaugca

SEQ ID NO: 63814 - RNA, 32 nt, Homo Sapiens
gcaaugagucagcggguggacacaggugagca

SEQ ID NO: 63815 - RNA, 32 nt, Homo Sapiens
cugccaacuuucuggagaggugccaaacuugg

SEQ ID NO: 63816 - RNA, 32 nt, Homo Sapiens
agagccccagccccagaauucccaggaauuuc

SEQ ID NO: 63817 - RNA, 32 nt, Homo Sapiens
aaucccggccccacuccugaccucagacucac

SEQ ID NO: 63818 - RNA, 32 nt, Homo Sapiens
gcuacagccucagcugcgaugcccacgagaaa

SEQ ID NO: 63819 - RNA, 32 nt, Homo Sapiens
cccacccggcauccaccugcauccccucuggg

SEQ ID NO: 63820 - RNA, 27 nt, Homo Sapiens
cugcugucugcugucagccccuccugg

SEQ ID NO: 63821 - RNA, 32 nt, Homo Sapiens
aucacuuagaguucuucaguuuauuagaggag

SEQ ID NO: 63822 - RNA, 32 nt, Homo Sapiens
cauugcacuccagccugggcaacgagugaaac

SEQ ID NO: 63823 - RNA, 32 nt, Homo Sapiens
gcaucugugggaauauacaguuggguggaaug

SEQ ID NO: 63824 - RNA, 32 nt, Homo Sapiens
cucugaguugaccagcagcaggucugccgacc

SEQ ID NO: 63825 - RNA, 32 nt, Homo Sapiens
auuuaauauuccuggcauaccuuuaagguaaa

SEQ ID NO: 63826 - RNA, 32 nt, Homo Sapiens
aguucccagacuuguuauacccuccugacuug

SEQ ID NO: 63827 - RNA, 32 nt, Homo Sapiens
uuugguucggcgcagagagacccgggggucua

SEQ ID NO: 63828 - RNA, 32 nt, Homo Sapiens
agcacuuucuucacaugccgcagaaucuccuc

SEQ ID NO: 63829 - RNA, 32 nt, Homo Sapiens
uuuuguuuuuaaaauguacaaaccuauaaguu

SEQ ID NO: 63830 - RNA, 32 nt, Homo Sapiens
ggaacgggagccugggugugcguguggagucc

SEQ ID NO: 63831 - RNA, 32 nt, Homo Sapiens
cacauccagcuaacuuuuuuuguauuuuuacu

SEQ ID NO: 63832 - RNA, 32 nt, Homo Sapiens
ucaaguggagcagagauugaaugaaaaccuga

SEQ ID NO: 63833 - RNA, 32 nt, Homo Sapiens
ugccuccugccaggagcugcugugaccuguga

SEQ ID NO: 63834 - RNA, 32 nt, Homo Sapiens
uagcuggguuucuggaggauagaacaucagau

SEQ ID NO: 63835 - RNA, 32 nt, Homo Sapiens
cuuuagugucauugccgauuuuggcuauaaca

SEQ ID NO: 63836 - RNA, 32 nt, Homo Sapiens
cuacuugucaauuucuucuuuauuuuucugua

SEQ ID NO: 63837 - RNA, 32 nt, Homo Sapiens
gugagcuggaaucgugccacuccacuccagcc

SEQ ID NO: 63838 - RNA, 32 nt, Homo Sapiens
cuccuacuaccacugcaucugugucagcaaca

SEQ ID NO: 63839 - RNA, 32 nt, Homo Sapiens
uuaaccauuguuaaucagcuuuuguguaugaa

SEQ ID NO: 63840 - RNA, 30 nt, Homo Sapiens
ggugugggaggugguggcggggguuauucu

SEQ ID NO: 63841 - RNA, 32 nt, Homo Sapiens
uguacaauguguauuucuucaaccauauauuu

SEQ ID NO: 63842 - RNA, 32 nt, Homo Sapiens
cucuagcgcgcccggcuuuccggcgcacucca

SEQ ID NO: 63843 - RNA, 32 nt, Homo Sapiens
cggaaacaagauacagauuucagaauggcacc

SEQ ID NO: 63844 - RNA, 25 nt, Homo Sapiens
ccuuuuugguuugaccgccacgauu

SEQ ID NO: 63845 - RNA, 32 nt, Homo Sapiens
acccccggcuaagauuccauggauggagcaau

SEQ ID NO: 63846 - RNA, 32 nt, Homo Sapiens
gagggacuucuguucauucaucccgagaacau

SEQ ID NO: 63847 - RNA, 32 nt, Homo Sapiens
agaguaacagaggggggacagaaggacaaugg

SEQ ID NO: 63848 - RNA, 32 nt, Homo Sapiens
ggcugcauuauguccuggggugugcauguggg

SEQ ID NO: 63849 - RNA, 32 nt, Homo Sapiens
caaaauacacgacccgcacucuucuaaggugu

SEQ ID NO: 63850 - RNA, 32 nt, Homo Sapiens
aaagcggcccuggagggcuggucuuuauuuug

SEQ ID NO: 63851 - RNA, 32 nt, Homo Sapiens
acuaugaucaucuugaugucuaugauagauaa

SEQ ID NO: 63852 - RNA, 32 nt, Homo Sapiens
uaauaauuaacuauugugaacaguacacuaua

SEQ ID NO: 63853 - RNA, 32 nt, Homo Sapiens
agcggagauggaauggggcccgggcucagacu

SEQ ID NO: 63854 - RNA, 32 nt, Homo Sapiens
accuuggacccuggugaccuccugucacucac

SEQ ID NO: 63855 - RNA, 32 nt, Homo Sapiens
uaaaauucucaauucaaacauuuuaaaggacu

SEQ ID NO: 63856 - RNA, 32 nt, Homo Sapiens
uggaaugcuguuacuuugauaauuacuuucca

SEQ ID NO: 63857 - RNA, 32 nt, Homo Sapiens
gccacuaauuacuacugugucuucugugucac

SEQ ID NO: 63858 - RNA, 32 nt, Homo Sapiens
cuugcuggggacguggcugugcccucaguugc

SEQ ID NO: 63859 - RNA, 32 nt, Homo Sapiens
aggacuguucuucccacugcaaucugacaguu

SEQ ID NO: 63860 - RNA, 32 nt, Homo Sapiens
gaucauguuggcuacauaaggaaacagaagga

SEQ ID NO: 63861 - RNA, 32 nt, Homo Sapiens
aaguagccgggcgugguggugggcgccuguag

SEQ ID NO: 63862 - RNA, 32 nt, Homo Sapiens
aguguuuauuuuuuauuaaccucauggauauu

SEQ ID NO: 63863 - RNA, 32 nt, Homo Sapiens
cggagcccgcccgcgccucccgcggcauuccc

SEQ ID NO: 63864 - RNA, 32 nt, Homo Sapiens
cagagaggcguccgcgcccggacgcacugcgg

SEQ ID NO: 63865 - RNA, 32 nt, Homo Sapiens
ggguggagcuggcguccgcgggugcuggucug

SEQ ID NO: 63866 - RNA, 32 nt, Homo Sapiens
cggggaagggguggagugaacggccggagacc

SEQ ID NO: 63867 - RNA, 32 nt, Homo Sapiens
ucucucuuucccuuaucaaaaaggcuuuugcu

SEQ ID NO: 63868 - RNA, 32 nt, Homo Sapiens
caguucugacagagcagacaguuugagaucug

SEQ ID NO: 63869 - RNA, 32 nt, Homo Sapiens
augugacuuuuuuuuuuuuuuaucacaacaga

SEQ ID NO: 63870 - RNA, 32 nt, Homo Sapiens
guaaauucagaauugaaacaauuucuccuugu

SEQ ID NO: 63871 - RNA, 32 nt, Homo Sapiens
gccgugaaguggggcggggcgggggccgaaaa

SEQ ID NO: 63872 - RNA, 32 nt, Homo Sapiens
guacuccucagagacugguuucccucuaaacc

SEQ ID NO: 63873 - RNA, 32 nt, Homo Sapiens
uaagaucaaggcauuucccagcccguggucug

SEQ ID NO: 63874 - RNA, 32 nt, Homo Sapiens
cgcugcauggcgcucccuucaacagcaagccu

SEQ ID NO: 63875 - RNA, 32 nt, Homo Sapiens
ggccuugccccccauggugucccggccagagc

SEQ ID NO: 63876 - RNA, 32 nt, Homo Sapiens
gagaggacggagacgaagccgagccgcggcuc

SEQ ID NO: 63877 - RNA, 32 nt, Homo Sapiens
cgccaaggaggcggggaccggcuggggggcgg

SEQ ID NO: 63878 - RNA, 32 nt, Homo Sapiens
uggcuccucagccccagcaccaccagcugugg

SEQ ID NO: 63879 - RNA, 29 nt, Homo Sapiens
caggaaaugaaucugcugccgaauauuga

SEQ ID NO: 63880 - RNA, 28 nt, Homo Sapiens
gguggcguggcuacagccugacccaugg

SEQ ID NO: 63881 - RNA, 32 nt, Homo Sapiens
caggacgcugcgccagcggagccggcggccca

SEQ ID NO: 63882 - RNA, 32 nt, Homo Sapiens
agucuucucucucgccucuccuccgccucugg

SEQ ID NO: 63883 - RNA, 32 nt, Homo Sapiens
cucauccaaagaacaacugcugauugaaacac

SEQ ID NO: 63884 - RNA, 32 nt, Homo Sapiens
augccucaaguuauguauaccugucccagaug

SEQ ID NO: 63885 - RNA, 32 nt, Homo Sapiens
ccacagcacgcaugcguucagcgcaccuccgc

SEQ ID NO: 63886 - RNA, 32 nt, Homo Sapiens
ccacguggcaacacugugcuaaaagacagugg

SEQ ID NO: 63887 - RNA, 32 nt, Homo Sapiens
cuaguuguaaccaaauacaaauauguaaaauu

SEQ ID NO: 63888 - RNA, 32 nt, Homo Sapiens
uuuguaaaguauauguaaaauaaaugugacau

SEQ ID NO: 63889 - RNA, 32 nt, Homo Sapiens
gguguagggggagaggggaaaggggucuggcc

SEQ ID NO: 63890 - RNA, 32 nt, Homo Sapiens
uuacaguggauuuagaauauauuuauguugau

SEQ ID NO: 63891 - RNA, 32 nt, Homo Sapiens
agaacuaagacuuuuuucaaacuaaauuagaa

SEQ ID NO: 63892 - RNA, 32 nt, Homo Sapiens
aguggaggccccaggacaggcuggcuggcugg

SEQ ID NO: 63893 - RNA, 32 nt, Homo Sapiens
ccggucggugcccggcgcgccgggccaugcag

SEQ ID NO: 63894 - RNA, 32 nt, Homo Sapiens
caaaaucucugugucuuaauuugucuaucugu

SEQ ID NO: 63895 - RNA, 32 nt, Homo Sapiens
uuaucuccagcauguggagcacacuugguaca

SEQ ID NO: 63896 - RNA, 32 nt, Homo Sapiens
cagugcagauuuuuuuuuuuuaauucaagauu

SEQ ID NO: 63897 - RNA, 32 nt, Homo Sapiens
cgcgcaguacccagcccggccccgccgacccg

SEQ ID NO: 63898 - RNA, 32 nt, Homo Sapiens
gagaagcaccaaaagaggcaaacugagaugca

SEQ ID NO: 63899 - RNA, 32 nt, Homo Sapiens
cauagagugaaauauuuguaaaacuccuaauu

SEQ ID NO: 63900 - RNA, 32 nt, Homo Sapiens
cuccugcccucccacuccugccccagcuguuc

SEQ ID NO: 63901 - RNA, 32 nt, Homo Sapiens
agaacugaucaaguccgagaucaggcgugagc

SEQ ID NO: 63902 - RNA, 32 nt, Homo Sapiens
ccucgacuuuggagcgcgcucugcgauuggag

SEQ ID NO: 63903 - RNA, 32 nt, Homo Sapiens
gcuucaggccccaggacugugggggccccuca

SEQ ID NO: 63904 - RNA, 32 nt, Homo Sapiens
guuccccuccuggccugugcagaauguaaaca

SEQ ID NO: 63905 - RNA, 32 nt, Homo Sapiens
uggaauuuuauaagcugaauaaaguuuuugac

SEQ ID NO: 63906 - RNA, 32 nt, Homo Sapiens
agcugacauuugcugcuaucauuccaacacua

SEQ ID NO: 63907 - RNA, 32 nt, Homo Sapiens
uagggccagguguugggagcucccacguggga

SEQ ID NO: 63908 - RNA, 32 nt, Homo Sapiens
ucaucucagagguagucuucaaguauuugcag

SEQ ID NO: 63909 - RNA, 32 nt, Homo Sapiens
uuggaugacaaggccgcuguguguggcuucga

SEQ ID NO: 63910 - RNA, 32 nt, Homo Sapiens
gagcuucugaagagcugaacauguggagggag

SEQ ID NO: 63911 - RNA, 32 nt, Homo Sapiens
uuucaugccucccaaaaguuccccucaguucu

SEQ ID NO: 63912 - RNA, 32 nt, Homo Sapiens
ucccaacuagaugcuuguuggccacgggaagg

SEQ ID NO: 63913 - RNA, 32 nt, Homo Sapiens
ggaggcccggcgggaccccggcccgcgucuca

SEQ ID NO: 63914 - RNA, 32 nt, Homo Sapiens
ugccuagggccugguccaugauggagucaggu

SEQ ID NO: 63915 - RNA, 32 nt, Homo Sapiens
cuuuccccggugccagucguggaagcugcuug

SEQ ID NO: 63916 - RNA, 32 nt, Homo Sapiens
cuugggaaaggauccgccggccuugaacuccc

SEQ ID NO: 63917 - RNA, 32 nt, Homo Sapiens
guaccuauuuuagguauuuugagguauuuacc

SEQ ID NO: 63918 - RNA, 32 nt, Homo Sapiens
uaugccaaaauaacuucucuucauauuugccu

SEQ ID NO: 63919 - RNA, 32 nt, Homo Sapiens
agagccaguagacccgcugacccaggcugagc

SEQ ID NO: 63920 - RNA, 27 nt, Homo Sapiens
uuggauaucuucuucaacauccuugcc

SEQ ID NO: 63921 - RNA, 32 nt, Homo Sapiens
acacuggaagggggaccugcgcccccacaucu

SEQ ID NO: 63922 - RNA, 32 nt, Homo Sapiens
ucugcucuggaaaguucuugucaauaccaagc

SEQ ID NO: 63923 - RNA, 32 nt, Homo Sapiens
uuuguaaauucuuaagcaaauagaagccgagu

SEQ ID NO: 63924 - RNA, 32 nt, Homo Sapiens
ccagagguguuuaacuuuuuagccguucacuu

SEQ ID NO: 63925 - RNA, 28 nt, Homo Sapiens
ccaagagcguaaacgaugacuaccccag

SEQ ID NO: 63926 - RNA, 32 nt, Homo Sapiens
ccucuccagcauuuccucucaccuccguguuc

SEQ ID NO: 63927 - RNA, 30 nt, Homo Sapiens
caucugaacuaacuuggggaaacaauuucu

SEQ ID NO: 63928 - RNA, 32 nt, Homo Sapiens
cauggcugcaggcuuccacuuggucugaucag

SEQ ID NO: 63929 - RNA, 32 nt, Homo Sapiens
uccaggaggaggagguugcagugagccgagau

SEQ ID NO: 63930 - RNA, 32 nt, Homo Sapiens
acuuggaguauuggggucugaccccaaacacc

SEQ ID NO: 63931 - RNA, 32 nt, Homo Sapiens
cguccacuucgggcgccaugaacgaccaguac

SEQ ID NO: 63932 - RNA, 32 nt, Homo Sapiens
uuuuaaaauaccaaacuguaaaugaguacagu

SEQ ID NO: 63933 - RNA, 32 nt, Homo Sapiens
gcugcuccuaggacccgucuccagcugcugag

SEQ ID NO: 63934 - RNA, 32 nt, Homo Sapiens
cuuaaaaaaaauuucaugugagggaaaaaaaa

SEQ ID NO: 63935 - RNA, 32 nt, Homo Sapiens
cacaugaugcucuuauaguuggcacuuuacuu

SEQ ID NO: 63936 - RNA, 32 nt, Homo Sapiens
acuuagaaccucuggaggaggaggggggugcc

SEQ ID NO: 63937 - RNA, 28 nt, Homo Sapiens
aaagaagcauaggcuagacuucugaggg

SEQ ID NO: 63938 - RNA, 32 nt, Homo Sapiens
aguagcaacuuuuaaaaacauaaaaagaagca

SEQ ID NO: 63939 - RNA, 32 nt, Homo Sapiens
aaaggacaaggugccauucaaguccuagggug

SEQ ID NO: 63940 - RNA, 32 nt, Homo Sapiens
uuacauuaucugaaauaacauaaagcuacuaa

SEQ ID NO: 63941 - RNA, 32 nt, Homo Sapiens
ugacaaagggaaguuaauauaaauuaugacua

SEQ ID NO: 63942 - RNA, 32 nt, Homo Sapiens
uucuagcuaugguauuacuauaucacacuugu

SEQ ID NO: 63943 - RNA, 32 nt, Homo Sapiens
ggaccucggaagccaugagcuggguguucagg

SEQ ID NO: 63944 - RNA, 32 nt, Homo Sapiens
cuuagcccggcgggcgcggagcagccccgagc

SEQ ID NO: 63945 - RNA, 32 nt, Homo Sapiens
uucaggaaugaaguagaagguaguuauuuaaa

SEQ ID NO: 63946 - RNA, 32 nt, Homo Sapiens
ggagaaccuuugugucaacacucuguaucuaa

SEQ ID NO: 63947 - RNA, 32 nt, Homo Sapiens
cggcagaggagcucuggcccgcagggugucgg

SEQ ID NO: 63948 - RNA, 32 nt, Homo Sapiens
cuaaguacagguguguauaauguaucagggac

SEQ ID NO: 63949 - RNA, 32 nt, Homo Sapiens
ccuccgugcauuaauauuuggaugcaugcaau

SEQ ID NO: 63950 - RNA, 32 nt, Homo Sapiens
uuuguucauucaguuaccuccuccuaaaaugu

SEQ ID NO: 63951 - RNA, 32 nt, Homo Sapiens
gcuucucauccccuccucccgcaaagcgguuu

SEQ ID NO: 63952 - RNA, 32 nt, Homo Sapiens
aagauugccugccagaggacugaccacagccu

SEQ ID NO: 63953 - RNA, 32 nt, Homo Sapiens
guucauucuaccaagcugucacagguuuucag

SEQ ID NO: 63954 - RNA, 32 nt, Homo Sapiens
ggaagucaggacuugggugcugacuaugaagg

SEQ ID NO: 63955 - RNA, 32 nt, Homo Sapiens
auguguauuuucauuuuucaggguuucaaaug

SEQ ID NO: 63956 - RNA, 32 nt, Homo Sapiens
auucagaggugcauccacggaucuucuugagc

SEQ ID NO: 63957 - RNA, 32 nt, Homo Sapiens
gccaggcccugugacaggaggaccccgagccc

SEQ ID NO: 63958 - RNA, 32 nt, Homo Sapiens
guugaagugcuagugaaaaauuaauguuauua

SEQ ID NO: 63959 - RNA, 32 nt, Homo Sapiens
ucccccauaccucggccaugcggccccugcug

SEQ ID NO: 63960 - RNA, 32 nt, Homo Sapiens
auugcuuguuauuguauagaaauaucauggau

SEQ ID NO: 63961 - RNA, 32 nt, Homo Sapiens
guuuauauugcaguaguauuuauuuuuuagug

SEQ ID NO: 63962 - RNA, 32 nt, Homo Sapiens
ccgccgcgcgccccaccgucuguugcagugga

SEQ ID NO: 63963 - RNA, 32 nt, Homo Sapiens
ucccgccgcccggccggugcucccuggcgcag

SEQ ID NO: 63964 - RNA, 32 nt, Homo Sapiens
aggagcccggcgugcuggcguccccgagugcu

SEQ ID NO: 63965 - RNA, 32 nt, Homo Sapiens
guggaccugacagggcucuacugcccccuacu

SEQ ID NO: 63966 - RNA, 32 nt, Homo Sapiens
uuugucaucgacgugcaaucuuucuaacauuc

SEQ ID NO: 63967 - RNA, 32 nt, Homo Sapiens
uuagucaaaaaacacuguaauuagauaugaac

SEQ ID NO: 63968 - RNA, 32 nt, Homo Sapiens
ccgccgcccccgagaggacgcgccgugcagcg

SEQ ID NO: 63969 - RNA, 32 nt, Homo Sapiens
ucgugggcucauugugaccacuggccucucua

SEQ ID NO: 63970 - RNA, 32 nt, Homo Sapiens
uaccaaagcacauuuuaaaagugccauuaaca

SEQ ID NO: 63971 - RNA, 32 nt, Homo Sapiens
ucccgggaaaggcaggggaggggguggcgucu

SEQ ID NO: 63972 - RNA, 32 nt, Homo Sapiens
guuugcuucuuucccagucaagaggggaucuc

SEQ ID NO: 63973 - RNA, 32 nt, Homo Sapiens
ucuuaccucacagugauguugugaggacaugu

SEQ ID NO: 63974 - RNA, 32 nt, Homo Sapiens
auucgugauaucucuauaucuaaucuuuaaaa

SEQ ID NO: 63975 - RNA, 32 nt, Homo Sapiens
ucucuaauagaaucuuuuuuuuuuuuuuuuuu

SEQ ID NO: 63976 - RNA, 32 nt, Homo Sapiens
agccuuuuugguuuuuuuaauugaacacauuu

SEQ ID NO: 63977 - RNA, 32 nt, Homo Sapiens
ugugucagugcuccggccgccgcugucccuuu

SEQ ID NO: 63978 - RNA, 27 nt, Homo Sapiens
ugggauuccuucuucccacuccuccaa

SEQ ID NO: 63979 - RNA, 32 nt, Homo Sapiens
gauuauucuccucuauccacagcauucacaaa

SEQ ID NO: 63980 - RNA, 32 nt, Homo Sapiens
auuaaucuugucagaaaacugucaccaaaaca

SEQ ID NO: 63981 - RNA, 32 nt, Homo Sapiens
ccggcaacagccccaggggccuugagggucug

SEQ ID NO: 63982 - RNA, 32 nt, Homo Sapiens
agcuggaguagaugaaguucuugauggagcug

SEQ ID NO: 63983 - RNA, 32 nt, Homo Sapiens
ggcucaccgggggccagugccgggccaggggg

SEQ ID NO: 63984 - RNA, 32 nt, Homo Sapiens
uuuaauuucuccccgguccuguguuccuguga

SEQ ID NO: 63985 - RNA, 32 nt, Homo Sapiens
uggucagugucuguccgucuugucuccauauc

SEQ ID NO: 63986 - RNA, 32 nt, Homo Sapiens
cgccgcuccccgcuccuccuccccagccaugg

SEQ ID NO: 63987 - RNA, 32 nt, Homo Sapiens
ggccuuaaacaaaacaaacacaaaaacuuuua

SEQ ID NO: 63988 - RNA, 32 nt, Homo Sapiens
uuuucuuuuccacuuucuccuucaggauuaaa

SEQ ID NO: 63989 - RNA, 32 nt, Homo Sapiens
gcucagcaccucaggaagggauugaggguugu

SEQ ID NO: 63990 - RNA, 32 nt, Homo Sapiens
aggacagggcaagggaggaaagauagguacag

SEQ ID NO: 63991 - RNA, 32 nt, Homo Sapiens
ggcucauugcuugauuugagugggagaacaau

SEQ ID NO: 63992 - RNA, 32 nt, Homo Sapiens
cuguccccaacuuuuccauccagugcuuaacc

SEQ ID NO: 63993 - RNA, 32 nt, Homo Sapiens
aagaucuuuaacuuaccuggcuuauguaauuu

SEQ ID NO: 63994 - RNA, 32 nt, Homo Sapiens
ccuaccuuugcuggucccacuucagaggaggc

SEQ ID NO: 63995 - RNA, 32 nt, Homo Sapiens
aggacccaguguucuuagcugaacaaugaaug

SEQ ID NO: 63996 - RNA, 32 nt, Homo Sapiens
cuggcucugggaagagagugagggacagagga

SEQ ID NO: 63997 - RNA, 32 nt, Homo Sapiens
cuauacccugacacauaauuuaaauuauauaa

SEQ ID NO: 63998 - RNA, 32 nt, Homo Sapiens
aagugugcagguucuucuauguuuuugaaaag

SEQ ID NO: 63999 - RNA, 32 nt, Homo Sapiens
cuacauaacagagaccuugguuuccacaaccc

SEQ ID NO: 64000 - RNA, 28 nt, Homo Sapiens
cuccugauaaagugacauuugagcagac

SEQ ID NO: 64001 - RNA, 32 nt, Homo Sapiens
gacuucggccccaugcggcucacccgcugcca

SEQ ID NO: 64002 - RNA, 32 nt, Homo Sapiens
gccgggagguggaagaggagggggagcgucuc

SEQ ID NO: 64003 - RNA, 32 nt, Homo Sapiens
uuuuguucgguugcuuuggauuuuacaaaaaa

SEQ ID NO: 64004 - RNA, 32 nt, Homo Sapiens
cacccuugccccaguccugcccggccccuccc

SEQ ID NO: 64005 - RNA, 32 nt, Homo Sapiens
aaccccagugcagcugcaucucccaggcggga

SEQ ID NO: 64006 - RNA, 27 nt, Homo Sapiens
auaguugaaaauaaaguucagaacauc

SEQ ID NO: 64007 - RNA, 29 nt, Homo Sapiens
cgccggcugagccagcggacgccgcguuc

SEQ ID NO: 64008 - RNA, 32 nt, Homo Sapiens
cucugaaggugauuuuagguagaagaguuuug

SEQ ID NO: 64009 - RNA, 32 nt, Homo Sapiens
ccuccuucuccucuuccuucuuauauaaugcu

SEQ ID NO: 64010 - RNA, 32 nt, Homo Sapiens
ccuguucugcuccucuccaugcaccccagccc

SEQ ID NO: 64011 - RNA, 32 nt, Homo Sapiens
guuccauggaagaauaccaacaguccccggug

SEQ ID NO: 64012 - RNA, 32 nt, Homo Sapiens
ccuuuccagcagcugcagcugccguuucucuc

SEQ ID NO: 64013 - RNA, 32 nt, Homo Sapiens
aagagucuauuaugagcugguuacuacugugg

SEQ ID NO: 64014 - RNA, 32 nt, Homo Sapiens
aagucccugugcuaaugggauuacaaauacaa

SEQ ID NO: 64015 - RNA, 32 nt, Homo Sapiens
gauuucuucuaaauaggauguaaacuucuuuc

SEQ ID NO: 64016 - RNA, 32 nt, Homo Sapiens
agucccugcccacccgggcccgcccaucucag

SEQ ID NO: 64017 - RNA, 32 nt, Homo Sapiens
gcugacaaggugguuucuuucuuucacacagu

SEQ ID NO: 64018 - RNA, 32 nt, Homo Sapiens
ugggcacagccucagccuccccggugggaggc

SEQ ID NO: 64019 - RNA, 32 nt, Homo Sapiens
gguuuuauuuuuggcuuauuccaagggguaag

SEQ ID NO: 64020 - RNA, 32 nt, Homo Sapiens
guggcucccucucaccaccacccaggcccaca

SEQ ID NO: 64021 - RNA, 32 nt, Homo Sapiens
aaaauacaaaaauuaacugggugugguggcgg

SEQ ID NO: 64022 - RNA, 32 nt, Homo Sapiens
ggcaacauuuuaaaguuuuuuuaaaauccuau

SEQ ID NO: 64023 - RNA, 32 nt, Homo Sapiens
aacaauguaaauguauuugcugaaagagagca

SEQ ID NO: 64024 - RNA, 32 nt, Homo Sapiens
cuagauccuucgaacagcacugauacauuuca

SEQ ID NO: 64025 - RNA, 32 nt, Homo Sapiens
gcagagccugacgcucagccccaggccagcug

SEQ ID NO: 64026 - RNA, 32 nt, Homo Sapiens
uaagagcuaaugucauuauauauguaacuuaa

SEQ ID NO: 64027 - RNA, 32 nt, Homo Sapiens
caagauagaaucuguaccacucagugcuacca

SEQ ID NO: 64028 - RNA, 32 nt, Homo Sapiens
cccagggccuccugggggaccuuuguauuaag

SEQ ID NO: 64029 - RNA, 32 nt, Homo Sapiens
acacuuuguaaaagccgcggggcccccauaca

SEQ ID NO: 64030 - RNA, 32 nt, Homo Sapiens
cucucugaguacguugcccucugugcuaucaa

SEQ ID NO: 64031 - RNA, 32 nt, Homo Sapiens
agccuguaauccuagcacuuugggaggcagag

SEQ ID NO: 64032 - RNA, 32 nt, Homo Sapiens
acaccuugacuucagacugguagcccccaaac

SEQ ID NO: 64033 - RNA, 27 nt, Homo Sapiens
aacguguccuucucacucucccuggag

SEQ ID NO: 64034 - RNA, 32 nt, Homo Sapiens
aacgcuaagcucugagaacucccuuuggcuac

SEQ ID NO: 64035 - RNA, 30 nt, Homo Sapiens
cucaccacaaugccacccgccucuagcugu

SEQ ID NO: 64036 - RNA, 32 nt, Homo Sapiens
cagcggggacuucggcggcggcgccucaggca

SEQ ID NO: 64037 - RNA, 32 nt, Homo Sapiens
cauucuggcccacccugcacccgcuauaucca

SEQ ID NO: 64038 - RNA, 32 nt, Homo Sapiens
auaguugauuccugggguguuuugaaauuaag

SEQ ID NO: 64039 - RNA, 32 nt, Homo Sapiens
gaaaugguacagagacacuaaaaaagaaggcg

SEQ ID NO: 64040 - RNA, 32 nt, Homo Sapiens
ggguggggcugaggagagaaaagggugauuag

SEQ ID NO: 64041 - RNA, 32 nt, Homo Sapiens
aagcagaaaacuggcccugcccugccccugcc

SEQ ID NO: 64042 - RNA, 32 nt, Homo Sapiens
aaauaaaaaauaaaauaaaauaagugagucca

SEQ ID NO: 64043 - RNA, 32 nt, Homo Sapiens
auagucauuuaguucuaaagauuucauaguuu

SEQ ID NO: 64044 - RNA, 32 nt, Homo Sapiens
caacaugauugcauuugaagugagcaauugau

SEQ ID NO: 64045 - RNA, 32 nt, Homo Sapiens
aauaaaaauaauuuuucuuggauuugggguga

SEQ ID NO: 64046 - RNA, 32 nt, Homo Sapiens
auauacugcuaaggccacugaugcucaacucu

SEQ ID NO: 64047 - RNA, 32 nt, Homo Sapiens
uccuuucagggguuccucccccaacucuuuuc

SEQ ID NO: 64048 - RNA, 32 nt, Homo Sapiens
uuuauuuguuguauuuaaaaaauacauuguug

SEQ ID NO: 64049 - RNA, 32 nt, Homo Sapiens
cagcagauucuuuuccuucucacaaggggcuc

SEQ ID NO: 64050 - RNA, 32 nt, Homo Sapiens
aauauauagauauauuuuaguaaaaaaggaac

SEQ ID NO: 64051 - RNA, 32 nt, Homo Sapiens
aauggaacaaaauuauuauaauaaauauccaa

SEQ ID NO: 64052 - RNA, 32 nt, Homo Sapiens
uguuacaauagucauguuuuuauuuuggguua

SEQ ID NO: 64053 - RNA, 32 nt, Homo Sapiens
agggcugcaucaacagaagggaagugucccac

SEQ ID NO: 64054 - RNA, 32 nt, Homo Sapiens
gucagucguguggccugggagaaccaggagcc

SEQ ID NO: 64055 - RNA, 32 nt, Homo Sapiens
ggguuuagucagggcuucuggauccucgguuu

SEQ ID NO: 64056 - RNA, 32 nt, Homo Sapiens
ucaaggcucuggggcuggccucacaagaggcu

SEQ ID NO: 64057 - RNA, 32 nt, Homo Sapiens
uuugcaugcaguugggcugaccugacaaagcc

SEQ ID NO: 64058 - RNA, 32 nt, Homo Sapiens
agauguuaucuuccagaggaagaggaggaggc

SEQ ID NO: 64059 - RNA, 32 nt, Homo Sapiens
accccuguccuuccucaguucccagcugggau

SEQ ID NO: 64060 - RNA, 32 nt, Homo Sapiens
ugaacucuggcggaccaucagcaagaacggag

SEQ ID NO: 64061 - RNA, 30 nt, Homo Sapiens
gagagaaaaaaauaaacuguauuuggcugc

SEQ ID NO: 64062 - RNA, 32 nt, Homo Sapiens
ccauucuuucccuuuuugcuuccaaacuccuc

SEQ ID NO: 64063 - RNA, 32 nt, Homo Sapiens
uugaaccucauucuuccuuguuucucugguag

SEQ ID NO: 64064 - RNA, 32 nt, Homo Sapiens
gcauggccaacacgccaagacaucaguaacac

SEQ ID NO: 64065 - RNA, 32 nt, Homo Sapiens
gguggcggccccagcaccucagccugcacagu

SEQ ID NO: 64066 - RNA, 32 nt, Homo Sapiens
uucccaacuggaaagcacuugauuguacccgu

SEQ ID NO: 64067 - RNA, 32 nt, Homo Sapiens
agucugcugagagcuuccccugcacaauaaaa

SEQ ID NO: 64068 - RNA, 32 nt, Homo Sapiens
aggaagcagaaagagggacuccucucucccuc

SEQ ID NO: 64069 - RNA, 32 nt, Homo Sapiens
ucaggcuagugucagggacuccuccugccagc

SEQ ID NO: 64070 - RNA, 30 nt, Homo Sapiens
gcauuuuagcuaaugggugaauaguggucu

SEQ ID NO: 64071 - RNA, 32 nt, Homo Sapiens
gcugugcgcgcccucccggacccuccacuuug

SEQ ID NO: 64072 - RNA, 32 nt, Homo Sapiens
ggaauuuggccauuuuaagugauuuuguuugc

SEQ ID NO: 64073 - RNA, 32 nt, Homo Sapiens
guauagcauuggcaaaaauauguacaaauuga

SEQ ID NO: 64074 - RNA, 32 nt, Homo Sapiens
acaaguaaaacgaaaguacacuucuacccaga

SEQ ID NO: 64075 - RNA, 32 nt, Homo Sapiens
auuuauaacuucuguuuuuuuauugagaaaau

SEQ ID NO: 64076 - RNA, 32 nt, Homo Sapiens
aacgaagcugucuuagagugggaccaacuucc

SEQ ID NO: 64077 - RNA, 32 nt, Homo Sapiens
cucucuggagccccuccucccccggcugggcc

SEQ ID NO: 64078 - RNA, 32 nt, Homo Sapiens
cagagacccauuaggcugcugcugcugcuucc

SEQ ID NO: 64079 - RNA, 32 nt, Homo Sapiens
ccagacgccuccuggggcugcuggcggagggu

SEQ ID NO: 64080 - RNA, 32 nt, Homo Sapiens
acacacacgacaugcuccuuucuguggcacau

SEQ ID NO: 64081 - RNA, 32 nt, Homo Sapiens
augauugaugggcaaaaauguacaacacaguu

SEQ ID NO: 64082 - RNA, 32 nt, Homo Sapiens
uuguucaauggcaacucuuggauuuugaauua

SEQ ID NO: 64083 - RNA, 32 nt, Homo Sapiens
cguggccugugcugcugcagcugcugauaagc

SEQ ID NO: 64084 - RNA, 32 nt, Homo Sapiens
cugaccuccugauccgcccaccucagccuccc

SEQ ID NO: 64085 - RNA, 32 nt, Homo Sapiens
cgcccugcccgucauccgagacaaguacaaag

SEQ ID NO: 64086 - RNA, 32 nt, Homo Sapiens
uaucuauuccauguuggaccaauaccacacug

SEQ ID NO: 64087 - RNA, 32 nt, Homo Sapiens
uacuguuugaugucaccuuucauuuuauuuuu

SEQ ID NO: 64088 - RNA, 32 nt, Homo Sapiens
acuuaagguguauaagaaaaagaaaguauuca

SEQ ID NO: 64089 - RNA, 32 nt, Homo Sapiens
aauaaagaauaaaaguaguaacucaaauuagu

SEQ ID NO: 64090 - RNA, 32 nt, Homo Sapiens
gucaugccugcugcacccccguuuccacugac

SEQ ID NO: 64091 - RNA, 32 nt, Homo Sapiens
uucccgccaccguggcggccgccccgcgcugu

SEQ ID NO: 64092 - RNA, 32 nt, Homo Sapiens
gcaagucugggaaauccuggggugaguggagu

SEQ ID NO: 64093 - RNA, 32 nt, Homo Sapiens
cguuuugcacuacucuuuccauuuauaugcug

SEQ ID NO: 64094 - RNA, 32 nt, Homo Sapiens
ccggccugcggaacccggggcuccagggucug

SEQ ID NO: 64095 - RNA, 32 nt, Homo Sapiens
ccccgggccccgagaccgacugagggagcgac

SEQ ID NO: 64096 - RNA, 32 nt, Homo Sapiens
aguuuaccaaaauuaacaaagggggggaaagg

SEQ ID NO: 64097 - RNA, 32 nt, Homo Sapiens
ggauggagguggcggucgcggcggcgggccga

SEQ ID NO: 64098 - RNA, 32 nt, Homo Sapiens
acugaggccuggaauuugauuaacucauucaa

SEQ ID NO: 64099 - RNA, 32 nt, Homo Sapiens
gcuuuaaacaauuuuuaaauuuuaaaaaugca

SEQ ID NO: 64100 - RNA, 32 nt, Homo Sapiens
ccacccccaucccaguaucucaucuguccccu

SEQ ID NO: 64101 - RNA, 32 nt, Homo Sapiens
uuuuuaagauggaguuucccucuguugccagg

SEQ ID NO: 64102 - RNA, 32 nt, Homo Sapiens
uauugcucacacaaagccuguuugguggucuc

SEQ ID NO: 64103 - RNA, 32 nt, Homo Sapiens
cugucuucuuugaauuuggauauuccuucccu

SEQ ID NO: 64104 - RNA, 32 nt, Homo Sapiens
gaagggacauaguggccucugggcugccaugu

SEQ ID NO: 64105 - RNA, 32 nt, Homo Sapiens
accugcacugucuguaccuuucugagaagaac

SEQ ID NO: 64106 - RNA, 32 nt, Homo Sapiens
uccuaguccaccgcucccggcgccggcucccc

SEQ ID NO: 64107 - RNA, 32 nt, Homo Sapiens
auauauugauaaaauaaugccaaauuuguguu

SEQ ID NO: 64108 - RNA, 32 nt, Homo Sapiens
ucuccgaaaaauaaaaauuaaaaaauaaaggg

SEQ ID NO: 64109 - RNA, 32 nt, Homo Sapiens
aguuaaagauaaacacauagggugugauuucu

SEQ ID NO: 64110 - RNA, 32 nt, Homo Sapiens
gaagucaccaacucaacaaggcgcguggccag

SEQ ID NO: 64111 - RNA, 32 nt, Homo Sapiens
cccuuaaauauuuaccuaaauuagauaggagc

SEQ ID NO: 64112 - RNA, 32 nt, Homo Sapiens
acaguccacagugugugugguguauagagcaa

SEQ ID NO: 64113 - RNA, 32 nt, Homo Sapiens
gcacagccaccagcaucucuccccucagcccu

SEQ ID NO: 64114 - RNA, 32 nt, Homo Sapiens
uggaugaagaucuggagcccaccugcuuugaa

SEQ ID NO: 64115 - RNA, 32 nt, Homo Sapiens
cuauggcccacuuugaccacuaacaacaucag

SEQ ID NO: 64116 - RNA, 32 nt, Homo Sapiens
gauuaacuuccauugggcuaaugaaugcucaa

SEQ ID NO: 64117 - RNA, 32 nt, Homo Sapiens
ucgauauauaauuguauagauuuuaaaaguuu

SEQ ID NO: 64118 - RNA, 32 nt, Homo Sapiens
gaaagcaagcaccuacaugacaauggccccgu

SEQ ID NO: 64119 - RNA, 32 nt, Homo Sapiens
augacauucuuauacugcugucucaaauccaa

SEQ ID NO: 64120 - RNA, 32 nt, Homo Sapiens
uaaucauuucauuugcaucauuaggguauccu

SEQ ID NO: 64121 - RNA, 32 nt, Homo Sapiens
uaaaaugggcaucaccuaccucagagggcuuu

SEQ ID NO: 64122 - RNA, 32 nt, Homo Sapiens
agcagcaggaccagcccccugaccucacccac

SEQ ID NO: 64123 - RNA, 32 nt, Homo Sapiens
cuugauuugccuaggugacuucugggauuacu

SEQ ID NO: 64124 - RNA, 32 nt, Homo Sapiens
gacaggacagggcuggggagcggccucaggac

SEQ ID NO: 64125 - RNA, 32 nt, Homo Sapiens
aacuugcuguguauauucaguuucugaaagau

SEQ ID NO: 64126 - RNA, 32 nt, Homo Sapiens
agaugagccgcggcgaugagcccggaaaagca

SEQ ID NO: 64127 - RNA, 32 nt, Homo Sapiens
ugcugaugaugaugaagauaaagaugagagca

SEQ ID NO: 64128 - RNA, 32 nt, Homo Sapiens
agcugaaauaaucaaguauauaguuuguucag

SEQ ID NO: 64129 - RNA, 32 nt, Homo Sapiens
cugaguuuuuauuuaaaaauuauuuuuucuuc

SEQ ID NO: 64130 - RNA, 32 nt, Homo Sapiens
gaggcgcacgcgguccgcgccggcgucagucu

SEQ ID NO: 64131 - RNA, 32 nt, Homo Sapiens
ccuggcaggcccaacccccaccccaccccucc

SEQ ID NO: 64132 - RNA, 32 nt, Homo Sapiens
cuaacauguauuaucaacuuuguggauuacau

SEQ ID NO: 64133 - RNA, 32 nt, Homo Sapiens
uuuaguuagaaaauaaggcaaguuuugaagcc

SEQ ID NO: 64134 - RNA, 32 nt, Homo Sapiens
agggauuggguuuucugagaugcaaaacaucu

SEQ ID NO: 64135 - RNA, 32 nt, Homo Sapiens
cacccucucugugcugucuccuccugaacagu

SEQ ID NO: 64136 - RNA, 32 nt, Homo Sapiens
gggcccggguggcggcggcgacuggagaaauc

SEQ ID NO: 64137 - RNA, 32 nt, Homo Sapiens
uccgucacuccgauagccucacggccacccug

SEQ ID NO: 64138 - RNA, 32 nt, Homo Sapiens
aagaucaggcauauguauauauuuucacacuu

SEQ ID NO: 64139 - RNA, 32 nt, Homo Sapiens
ggccggugcgugaggacuggggcccgggcccg

SEQ ID NO: 64140 - RNA, 32 nt, Homo Sapiens
guaucuuauuugaugauauuuauuuucucugc

SEQ ID NO: 64141 - RNA, 32 nt, Homo Sapiens
agaggaacgcuguagaauaaauaagagcuuug

SEQ ID NO: 64142 - RNA, 32 nt, Homo Sapiens
ggccccaaacgauaugaucaaaaagaacagaa

SEQ ID NO: 64143 - RNA, 32 nt, Homo Sapiens
ggccuguguucccuccccaggaagugcgcccc

SEQ ID NO: 64144 - RNA, 32 nt, Homo Sapiens
ggguaggcagugccugcuucugcuccaucagg

SEQ ID NO: 64145 - RNA, 32 nt, Homo Sapiens
uuucuuagacauuuaaugaucaucacugagcc

SEQ ID NO: 64146 - RNA, 32 nt, Homo Sapiens
gccuaaauagguuuuucuugcuauguuauuuu

SEQ ID NO: 64147 - RNA, 32 nt, Homo Sapiens
auacuggguucccuuccuggagcauuacagug

SEQ ID NO: 64148 - RNA, 32 nt, Homo Sapiens
ccuaacauacugaguuuuuuuuaacuuucuaa

SEQ ID NO: 64149 - RNA, 32 nt, Homo Sapiens
ugauaccucagggcaaggcccuuuuucccucc

SEQ ID NO: 64150 - RNA, 32 nt, Homo Sapiens
uguauuaucaggaaacaugucuauacgaucgc

SEQ ID NO: 64151 - RNA, 29 nt, Homo Sapiens
auuaagaugaagauacagucaugaaauua

SEQ ID NO: 64152 - RNA, 32 nt, Homo Sapiens
cucucuggccgccgcccgggcgggaaacgucg

SEQ ID NO: 64153 - RNA, 32 nt, Homo Sapiens
aaaaucagaaaagaaaggaaggccuuuacaug

SEQ ID NO: 64154 - RNA, 32 nt, Homo Sapiens
acaguuuuuaauuuuagaaaucuuauacuuga

SEQ ID NO: 64155 - RNA, 32 nt, Homo Sapiens
cgacugagggccgguggccaugcagaggcguc

SEQ ID NO: 64156 - RNA, 32 nt, Homo Sapiens
caauuccaaacacauacaggaagguagaaaua

SEQ ID NO: 64157 - RNA, 32 nt, Homo Sapiens
ccucuucaucacauugcuuacgccguugcuuu

SEQ ID NO: 64158 - RNA, 32 nt, Homo Sapiens
cuuccccaccauccuacaaguaccucagucuc

SEQ ID NO: 64159 - RNA, 32 nt, Homo Sapiens
uuccucugcauuuacacaaacacacacacaug

SEQ ID NO: 64160 - RNA, 32 nt, Homo Sapiens
acccacuggggucuuucccagcaggcacaggg

SEQ ID NO: 64161 - RNA, 32 nt, Homo Sapiens
ccuguacucgagcggcuccgggcggagaacaa

SEQ ID NO: 64162 - RNA, 32 nt, Homo Sapiens
uguccgcggucuguuuggcccgaacggcggcg

SEQ ID NO: 64163 - RNA, 32 nt, Homo Sapiens
gaauacuaucaugggaggagcugugagugcug

SEQ ID NO: 64164 - RNA, 32 nt, Homo Sapiens
ccgaggucaggaguucgagaccagccuggcca

SEQ ID NO: 64165 - RNA, 32 nt, Homo Sapiens
cuucagugaugugaacuccauguaucugucuu

SEQ ID NO: 64166 - RNA, 32 nt, Homo Sapiens
aacuacuucuuacuucuuugcccugcccucuc

SEQ ID NO: 64167 - RNA, 32 nt, Homo Sapiens
guaggaggagccaacaguuacuuuuuaccugc

SEQ ID NO: 64168 - RNA, 32 nt, Homo Sapiens
aucucacuugcaauuuuaauauuuucauuugg

SEQ ID NO: 64169 - RNA, 31 nt, Homo Sapiens
gggcuucuacccucagugcaagaccagugcc

SEQ ID NO: 64170 - RNA, 32 nt, Homo Sapiens
cugacuugauaaagcuuuaauaauguacagug

SEQ ID NO: 64171 - RNA, 32 nt, Homo Sapiens
agugagccgagaccgcgccacugcacuccagc

SEQ ID NO: 64172 - RNA, 32 nt, Homo Sapiens
agacauuuggaaguccugggggaugcuggcaa

SEQ ID NO: 64173 - RNA, 32 nt, Homo Sapiens
ggagugggggccagccugaggacccccgccua

SEQ ID NO: 64174 - RNA, 32 nt, Homo Sapiens
ggcucgggauccuggggcguccuuuggcaguu

SEQ ID NO: 64175 - RNA, 32 nt, Homo Sapiens
ucuugucaaaaggcacauuggugcgugugugu

SEQ ID NO: 64176 - RNA, 32 nt, Homo Sapiens
acuagcaagaccuggcccuuccccucaggggu

SEQ ID NO: 64177 - RNA, 32 nt, Homo Sapiens
acgaggucaggaguuugagaccagccugauca

SEQ ID NO: 64178 - RNA, 32 nt, Homo Sapiens
cggccagccggggcugacuuguuauguugggc

SEQ ID NO: 64179 - RNA, 32 nt, Homo Sapiens
uuuuuuguuuuaauaagugugacaacuuaaaa

SEQ ID NO: 64180 - RNA, 32 nt, Homo Sapiens
gguguagccaaggcagagggucguuucaguaa

SEQ ID NO: 64181 - RNA, 32 nt, Homo Sapiens
ugcccagggcuccgggaccccaucccauggug

SEQ ID NO: 64182 - RNA, 32 nt, Homo Sapiens
ggccaagcacgcugugucugagggcaccaagg

SEQ ID NO: 64183 - RNA, 32 nt, Homo Sapiens
uauuuguuuaugguaaaaaauuuauaacgugu

SEQ ID NO: 64184 - RNA, 32 nt, Homo Sapiens
caugccuacaggccagcucugugccaagggca

SEQ ID NO: 64185 - RNA, 32 nt, Homo Sapiens
cuaggucgaaacagcccuccaccucccagcca

SEQ ID NO: 64186 - RNA, 32 nt, Homo Sapiens
gaaguucucuggugccuuaaggugguguagaa

SEQ ID NO: 64187 - RNA, 32 nt, Homo Sapiens
ucucagagggaaugcuuucaacuuuuccccau

SEQ ID NO: 64188 - RNA, 32 nt, Homo Sapiens
uaggaaggaaugguuuccccuaacaagcccaa

SEQ ID NO: 64189 - RNA, 28 nt, Homo Sapiens
uuggggaaaggccaacauuugcaucauu

SEQ ID NO: 64190 - RNA, 32 nt, Homo Sapiens
caccacagacagggcugccugugaccugcugu

SEQ ID NO: 64191 - RNA, 32 nt, Homo Sapiens
cucaucuuacuggccuggucuguggcagcaag

SEQ ID NO: 64192 - RNA, 32 nt, Homo Sapiens
ccggcgccccugugcgagugaccgccaacagc

SEQ ID NO: 64193 - RNA, 32 nt, Homo Sapiens
uuccauucugaacauguuuugucauucacaag

SEQ ID NO: 64194 - RNA, 32 nt, Homo Sapiens
cacucuuucaggccucuuucugccuuuuguug

SEQ ID NO: 64195 - RNA, 31 nt, Homo Sapiens
acuacagcucccggccugccccgcgugcggu

SEQ ID NO: 64196 - RNA, 32 nt, Homo Sapiens
auuuucaaaaaucauuaacacuuuuuaauuag

SEQ ID NO: 64197 - RNA, 32 nt, Homo Sapiens
caaggaucuaguggauuaguaaguuaaacacu

SEQ ID NO: 64198 - RNA, 32 nt, Homo Sapiens
ucucuuuucuaaaaagcuuuaacuguagugcc

SEQ ID NO: 64199 - RNA, 32 nt, Homo Sapiens
cuuuuaucuuuucuuuuuuuuaagguacggag

SEQ ID NO: 64200 - RNA, 32 nt, Homo Sapiens
cuaugaaaauuuguauuuaaaggcaaagauac

SEQ ID NO: 64201 - RNA, 32 nt, Homo Sapiens
uggcaggacucgcugcugcugcugcugcuugu

SEQ ID NO: 64202 - RNA, 32 nt, Homo Sapiens
gggaugugggucugaagagcuugguugcagaa

SEQ ID NO: 64203 - RNA, 32 nt, Homo Sapiens
gccacagcugugggcccggcgcaugggcaagu

SEQ ID NO: 64204 - RNA, 32 nt, Homo Sapiens
guaguucaaaagucagaaaugauucuaauuua

SEQ ID NO: 64205 - RNA, 32 nt, Homo Sapiens
uucuuuuguauuuuuaugauaauuaauguuau

SEQ ID NO: 64206 - RNA, 28 nt, Homo Sapiens
auugcaguggcuacuguguuggcccagu

SEQ ID NO: 64207 - RNA, 32 nt, Homo Sapiens
gauuguagaaaagagacuaagauauaugcaag

SEQ ID NO: 64208 - RNA, 32 nt, Homo Sapiens
aagucacccuugccacugaggaccgaggacua

SEQ ID NO: 64209 - RNA, 32 nt, Homo Sapiens
uagccagguucagacaguguuggcaagaacgg

SEQ ID NO: 64210 - RNA, 32 nt, Homo Sapiens
ugccaagggcccuaccauggccccacagcccc

SEQ ID NO: 64211 - RNA, 32 nt, Homo Sapiens
aacccaggccccaugcaaaggcacgugguuuc

SEQ ID NO: 64212 - RNA, 32 nt, Homo Sapiens
ucaggccuauagaauuauuugcacaaguacaa

SEQ ID NO: 64213 - RNA, 32 nt, Homo Sapiens
cauccgucaauggucagaaaaccaaaagacaa

SEQ ID NO: 64214 - RNA, 32 nt, Homo Sapiens
auuaagaaggcacuuaauaguacaucauguaa

SEQ ID NO: 64215 - RNA, 32 nt, Homo Sapiens
gcccaaggauggguccggggccucggggccaa

SEQ ID NO: 64216 - RNA, 32 nt, Homo Sapiens
guugcacucagcucuggcccuccggagggugc

SEQ ID NO: 64217 - RNA, 32 nt, Homo Sapiens
aacucugccucccagguucaagagauucuccu

SEQ ID NO: 64218 - RNA, 32 nt, Homo Sapiens
aucccauccuucuccuuccaacuuggcugaaa

SEQ ID NO: 64219 - RNA, 32 nt, Homo Sapiens
gcuuauacauauauuuucaaucacauacaagu

SEQ ID NO: 64220 - RNA, 32 nt, Homo Sapiens
gcugcagcagugaggcgccggagaaggccaag

SEQ ID NO: 64221 - RNA, 32 nt, Homo Sapiens
ccagaaaagagaaauguauaggugguugugag

SEQ ID NO: 64222 - RNA, 32 nt, Homo Sapiens
uguucagaaaaacauauggagacguuuauacc

SEQ ID NO: 64223 - RNA, 32 nt, Homo Sapiens
auugccaaucauuugcaaagugaggaaggauc

SEQ ID NO: 64224 - RNA, 32 nt, Homo Sapiens
uccccgcccccaccugcccccaaugcacacac

SEQ ID NO: 64225 - RNA, 32 nt, Homo Sapiens
caguuucucaaguuuaaagucaugucagaggu

SEQ ID NO: 64226 - RNA, 32 nt, Homo Sapiens
ucauugaauggcaagcaggaauucagauacag

SEQ ID NO: 64227 - RNA, 32 nt, Homo Sapiens
cuauucuacauauagugccuauaugacaaaau

SEQ ID NO: 64228 - RNA, 32 nt, Homo Sapiens
ggaguucgagucucucccugcggcgcuuucuc

SEQ ID NO: 64229 - RNA, 32 nt, Homo Sapiens
auuugucauacacaaguaucaauagccaaauu

SEQ ID NO: 64230 - RNA, 32 nt, Homo Sapiens
aguucuuacugaucauuccacuuguuacuggu

SEQ ID NO: 64231 - RNA, 32 nt, Homo Sapiens
ucgcaccggaggaggagaggaggcagcgcccg

SEQ ID NO: 64232 - RNA, 30 nt, Homo Sapiens
uagaaaugaaaagaaaagaaagaauugcca

SEQ ID NO: 64233 - RNA, 31 nt, Homo Sapiens
gaucugaaauaaaaagaugcaucuuuauguc

SEQ ID NO: 64234 - RNA, 32 nt, Homo Sapiens
cccccgugguggcucugggugucugcggagga

SEQ ID NO: 64235 - RNA, 32 nt, Homo Sapiens
uauuugaaaugaauuccucauuuggaggaaaa

SEQ ID NO: 64236 - RNA, 32 nt, Homo Sapiens
gaggugagggcagauaagggcucucuugacca

SEQ ID NO: 64237 - RNA, 32 nt, Homo Sapiens
gaaaccgaugcagcuggaggccgcgcgcgaug

SEQ ID NO: 64238 - RNA, 27 nt, Homo Sapiens
caggcuuuccccuccagcccccaauca

SEQ ID NO: 64239 - RNA, 32 nt, Homo Sapiens
caaacagaacagauauucuugcguguguaagg

SEQ ID NO: 64240 - RNA, 32 nt, Homo Sapiens
guggcgauaggucuggguguucugggaggacc

SEQ ID NO: 64241 - RNA, 32 nt, Homo Sapiens
ccccacccuaaaaagguuaucccugagaacuc

SEQ ID NO: 64242 - RNA, 32 nt, Homo Sapiens
uucuggugauccuauuccauucccuccugcug

SEQ ID NO: 64243 - RNA, 32 nt, Homo Sapiens
gugcguggggguggcaaugcaaggcacugagg

SEQ ID NO: 64244 - RNA, 32 nt, Homo Sapiens
agcucacugcagccuucaacuucugggcucaa

SEQ ID NO: 64245 - RNA, 32 nt, Homo Sapiens
uaagugugaacagguguuuguagcuuaucuga

SEQ ID NO: 64246 - RNA, 32 nt, Homo Sapiens
cuuugcauaugccaaggguuauacuccugcuc

SEQ ID NO: 64247 - RNA, 32 nt, Homo Sapiens
caaucccuacaauccagauaaaacagagaaga

SEQ ID NO: 64248 - RNA, 32 nt, Homo Sapiens
aguagauggucaaccagucacuaguugguugg

SEQ ID NO: 64249 - RNA, 32 nt, Homo Sapiens
uaaaaggccaauuuuuguccaguuuucucucu

SEQ ID NO: 64250 - RNA, 32 nt, Homo Sapiens
gcacuccgagggugugcagggcggccagcgcu

SEQ ID NO: 64251 - RNA, 32 nt, Homo Sapiens
gucucugcagagccuuucuccccuucccggau

SEQ ID NO: 64252 - RNA, 32 nt, Homo Sapiens
ccugggcagcgggcauugcggggacuaaagag

SEQ ID NO: 64253 - RNA, 32 nt, Homo Sapiens
caucuaggucuugcugcucaucucacagaaag

SEQ ID NO: 64254 - RNA, 32 nt, Homo Sapiens
cuugaggggaaugucuguuuguacuuuuggaa

SEQ ID NO: 64255 - RNA, 32 nt, Homo Sapiens
gagcgggguguuugggggcgcgcgugcgagug

SEQ ID NO: 64256 - RNA, 32 nt, Homo Sapiens
auugccuuuccacuacucuacuaucuguguga

SEQ ID NO: 64257 - RNA, 32 nt, Homo Sapiens
uuagcccaacaaaaucacaaaggguuauuuua

SEQ ID NO: 64258 - RNA, 32 nt, Homo Sapiens
uuauuguauguacaaauagagaauggaagaac

SEQ ID NO: 64259 - RNA, 32 nt, Homo Sapiens
gacuagcgggccggcguacuggccugguccag

SEQ ID NO: 64260 - RNA, 32 nt, Homo Sapiens
uccucaccucaauaaugagaggacauuguggc

SEQ ID NO: 64261 - RNA, 32 nt, Homo Sapiens
acugaagaucauaaaccaguuuuaucagaccu

SEQ ID NO: 64262 - RNA, 32 nt, Homo Sapiens
auauauuacguugucuuccuuacuacauaaau

SEQ ID NO: 64263 - RNA, 32 nt, Homo Sapiens
cacaauaucacccauugacucaccuuauccaa

SEQ ID NO: 64264 - RNA, 32 nt, Homo Sapiens
acaaaugaagggauauaaaaauaaugucauag

SEQ ID NO: 64265 - RNA, 32 nt, Homo Sapiens
cagucuuccuuccucuucaagcguuucauguu

SEQ ID NO: 64266 - RNA, 32 nt, Homo Sapiens
gcucgcgggaggccggggagcggcaggggcau

SEQ ID NO: 64267 - RNA, 32 nt, Homo Sapiens
acuaggugucauugugcccgaugucuggcucc

SEQ ID NO: 64268 - RNA, 32 nt, Homo Sapiens
uaaaguuuguuuuaucuuuucuuaauaugaca

SEQ ID NO: 64269 - RNA, 32 nt, Homo Sapiens
ccccuuccagcaugcacacccaguccacaaga

SEQ ID NO: 64270 - RNA, 30 nt, Homo Sapiens
ugaugguguuugcagcaccacuguucaugg

SEQ ID NO: 64271 - RNA, 32 nt, Homo Sapiens
gaucggaaaaagaagcuaaaauacuauagaaa

SEQ ID NO: 64272 - RNA, 32 nt, Homo Sapiens
caugggcuggcugccaugugucuacaccucuc

SEQ ID NO: 64273 - RNA, 32 nt, Homo Sapiens
agaccuguagaaccucuuuuugugggugauuu

SEQ ID NO: 64274 - RNA, 32 nt, Homo Sapiens
ucuuuaaaaguuaauaauuauauuagcaaagu

SEQ ID NO: 64275 - RNA, 32 nt, Homo Sapiens
uuccuuagaagaaacgugucagcaguuggccc

SEQ ID NO: 64276 - RNA, 32 nt, Homo Sapiens
uauauaaacugcuuuuuccaaacucuguauaa

SEQ ID NO: 64277 - RNA, 32 nt, Homo Sapiens
cacuccaacauugcauccuuucuggggugaag

SEQ ID NO: 64278 - RNA, 32 nt, Homo Sapiens
ugacagaugagcagcucacuuuuccaaaguac

SEQ ID NO: 64279 - RNA, 32 nt, Homo Sapiens
cccucaaguauguggcaguaaauacaacaaga

SEQ ID NO: 64280 - RNA, 32 nt, Homo Sapiens
gcacauuuuccauugaacuggaugcauuucau

SEQ ID NO: 64281 - RNA, 32 nt, Homo Sapiens
ccugggacaggcagcugccuucuggucugcau

SEQ ID NO: 64282 - RNA, 32 nt, Homo Sapiens
agaauuucuucucuaauauaugaugaaaaauu

SEQ ID NO: 64283 - RNA, 32 nt, Homo Sapiens
auccuuugcacagagcacuuugaguuaguuau

SEQ ID NO: 64284 - RNA, 32 nt, Homo Sapiens
gguucuaaaaauugcauucaaacauaauuuac

SEQ ID NO: 64285 - RNA, 32 nt, Homo Sapiens
guccuagguccaggauccaagaaccacagcuc

SEQ ID NO: 64286 - RNA, 32 nt, Homo Sapiens
cuucuacccagcccagugugcggccgccgcgc

SEQ ID NO: 64287 - RNA, 32 nt, Homo Sapiens
uucccuuaggggagcugaaauaaauucacauu

SEQ ID NO: 64288 - RNA, 32 nt, Homo Sapiens
ccgcggcgcuuccgaucgcgacgcggcuucug

SEQ ID NO: 64289 - RNA, 32 nt, Homo Sapiens
aauacuugaacauuuuaaucuuuuggaauauu

SEQ ID NO: 64290 - RNA, 32 nt, Homo Sapiens
gccucaccacccugcgaguccacaggccccuc

SEQ ID NO: 64291 - RNA, 32 nt, Homo Sapiens
ucugagggccuuguuuccuccuccccuuuccc

SEQ ID NO: 64292 - RNA, 32 nt, Homo Sapiens
cagaucucuuaaaauauaaaauuaccuugcaa

SEQ ID NO: 64293 - RNA, 32 nt, Homo Sapiens
ugcuuagaguacuucuuugaccaaggaauacc

SEQ ID NO: 64294 - RNA, 32 nt, Homo Sapiens
uguacacauauauauuuauaaauguguugucc

SEQ ID NO: 64295 - RNA, 32 nt, Homo Sapiens
gucucauuguaaacgacacuucuaaagagugu

SEQ ID NO: 64296 - RNA, 32 nt, Homo Sapiens
cucccugugugccggccguccagggucaccaa

SEQ ID NO: 64297 - RNA, 32 nt, Homo Sapiens
cccugagagucuuucuggcugguuugagucuc

SEQ ID NO: 64298 - RNA, 28 nt, Homo Sapiens
gaaggcguuacagggaaguggucucucc

SEQ ID NO: 64299 - RNA, 32 nt, Homo Sapiens
ccggcuucugccucugggaugggcucucauca

SEQ ID NO: 64300 - RNA, 32 nt, Homo Sapiens
gaugaguaauucagggaagagaagggaagaga

SEQ ID NO: 64301 - RNA, 32 nt, Homo Sapiens
cgccucgcucagagccggggccgggccagagc

SEQ ID NO: 64302 - RNA, 32 nt, Homo Sapiens
ucuuuauuuuaaauauuuuucuuaacuaaaug

SEQ ID NO: 64303 - RNA, 32 nt, Homo Sapiens
aggcagccugcugagcaagguaccucagccag

SEQ ID NO: 64304 - RNA, 32 nt, Homo Sapiens
ucguccgccggcguguuucucauccagccacg

SEQ ID NO: 64305 - RNA, 32 nt, Homo Sapiens
auccaaaacgccuuggcuuucaggccuggccu

SEQ ID NO: 64306 - RNA, 32 nt, Homo Sapiens
uaugaacagggugacuguuuccccaucggcca

SEQ ID NO: 64307 - RNA, 32 nt, Homo Sapiens
augguaaaauaaauucuuaauaaaguacccac

SEQ ID NO: 64308 - RNA, 32 nt, Homo Sapiens
ugaagggcgagggucucgccggggcgguggcg

SEQ ID NO: 64309 - RNA, 32 nt, Homo Sapiens
aacuuuaucauggaauuuaaugcugaauauau

SEQ ID NO: 64310 - RNA, 32 nt, Homo Sapiens
ggcgagcgagaguggaggaggaggcggcggcu

SEQ ID NO: 64311 - RNA, 32 nt, Homo Sapiens
uuuccuucccccucggccacccgccucccucu

SEQ ID NO: 64312 - RNA, 32 nt, Homo Sapiens
aagagaagaggcgaaaauacuccaucagcagu

SEQ ID NO: 64313 - RNA, 32 nt, Homo Sapiens
gggcaggaaaguggucuccagcccuugcucca

SEQ ID NO: 64314 - RNA, 32 nt, Homo Sapiens
aacaaaaugagaacaccaaauuuugggggaau

SEQ ID NO: 64315 - RNA, 32 nt, Homo Sapiens
cuuucccggagugcaccccgcggccgccagcc

SEQ ID NO: 64316 - RNA, 32 nt, Homo Sapiens
ugcaguaauuaaacucuuucucugcugcaaca

SEQ ID NO: 64317 - RNA, 32 nt, Homo Sapiens
aguacuggugucacccuuugccuauaugguag

SEQ ID NO: 64318 - RNA, 32 nt, Homo Sapiens
gcugugcaggcaaaaggaaaacaaaggcauuc

SEQ ID NO: 64319 - RNA, 32 nt, Homo Sapiens
uauacccaaaucaguuauucaaauuguuagga

SEQ ID NO: 64320 - RNA, 32 nt, Homo Sapiens
uaauacagccugugaggaagugagccagcagu

SEQ ID NO: 64321 - RNA, 31 nt, Homo Sapiens
cauaugugaaacauucuggccauagcagcaa

SEQ ID NO: 64322 - RNA, 32 nt, Homo Sapiens
guuuuagcaacaagaagacugcucuugacuga

SEQ ID NO: 64323 - RNA, 32 nt, Homo Sapiens
agagugaaagaucaagaaaugucucugcuccu

SEQ ID NO: 64324 - RNA, 32 nt, Homo Sapiens
cagcacagaguaggaagaacagugacaucauu

SEQ ID NO: 64325 - RNA, 32 nt, Homo Sapiens
caugagcaggcacaagacagcuccaggcacuc

SEQ ID NO: 64326 - RNA, 32 nt, Homo Sapiens
uaaguggagguagucaggagguucucgugguc

SEQ ID NO: 64327 - RNA, 32 nt, Homo Sapiens
cacuucuccauggcagcaccccguggcaaugu

SEQ ID NO: 64328 - RNA, 32 nt, Homo Sapiens
ugccacuggaacuggagaaugcacuuuauucu

SEQ ID NO: 64329 - RNA, 32 nt, Homo Sapiens
cuauaauguagaauuaccagugaaugugacua

SEQ ID NO: 64330 - RNA, 28 nt, Homo Sapiens
aagaaacgguuaauucauuugaagaaac

SEQ ID NO: 64331 - RNA, 32 nt, Homo Sapiens
ggccuggcggugcggcugucgcgcucagcugc

SEQ ID NO: 64332 - RNA, 32 nt, Homo Sapiens
uggggcucuuuggccuauucucuacccccuuc

SEQ ID NO: 64333 - RNA, 32 nt, Homo Sapiens
cucgauuccuucccucuccagaacucuguacu

SEQ ID NO: 64334 - RNA, 32 nt, Homo Sapiens
guuguagcagauuguuuccucuuccaaaguaa

SEQ ID NO: 64335 - RNA, 32 nt, Homo Sapiens
aagaggucaggaggccugcugaucuuucaaag

SEQ ID NO: 64336 - RNA, 32 nt, Homo Sapiens
gaacccucaauccaguauucuuuuuauaauau

SEQ ID NO: 64337 - RNA, 32 nt, Homo Sapiens
uuucuugaucuuuauugcugcuuaccauugaa

SEQ ID NO: 64338 - RNA, 32 nt, Homo Sapiens
uaaggaaagggagaagugcacggugugacagg

SEQ ID NO: 64339 - RNA, 32 nt, Homo Sapiens
gaugacugacugcacaaagugaggggaacagg

SEQ ID NO: 64340 - RNA, 32 nt, Homo Sapiens
cgccuggcgggcgggaggggagguggcaggcg

SEQ ID NO: 64341 - RNA, 32 nt, Homo Sapiens
agacugugaaaauuaugugaaaccuaaaguag

SEQ ID NO: 64342 - RNA, 32 nt, Homo Sapiens
cauaagccuuggagggucagggcugauaccag

SEQ ID NO: 64343 - RNA, 32 nt, Homo Sapiens
cuugcuggggacgugaacccucuccccgcgcc

SEQ ID NO: 64344 - RNA, 32 nt, Homo Sapiens
gugucuaaauuugaauguuaagcagauggaau

SEQ ID NO: 64345 - RNA, 32 nt, Homo Sapiens
auuguuacuuuuauuucuuucaguuguguguu

SEQ ID NO: 64346 - RNA, 31 nt, Homo Sapiens
gagcagcggcacugccugaaccagacagcag

SEQ ID NO: 64347 - RNA, 32 nt, Homo Sapiens
uuuaacccuagacuauauauguguguuuauau

SEQ ID NO: 64348 - RNA, 32 nt, Homo Sapiens
uggaggucagagaggaagaaacaaaggcagcu

SEQ ID NO: 64349 - RNA, 32 nt, Homo Sapiens
cgcgccuccccucccccgacucucuggccucc

SEQ ID NO: 64350 - RNA, 32 nt, Homo Sapiens
acccaguaagggcugggaauuucuuacuuucc

SEQ ID NO: 64351 - RNA, 32 nt, Homo Sapiens
aaccuaagccccacaaacuugacaccugauca

SEQ ID NO: 64352 - RNA, 32 nt, Homo Sapiens
agcaauguucuucacacccugcaagggcuggg

SEQ ID NO: 64353 - RNA, 32 nt, Homo Sapiens
acauaucaaacugaaacaaaauuagaaaugua

SEQ ID NO: 64354 - RNA, 32 nt, Homo Sapiens
ugauugaagcugacaucuccaagagguacagc

SEQ ID NO: 64355 - RNA, 32 nt, Homo Sapiens
aagaggaaaaacaggaauaccugugagaggaa

SEQ ID NO: 64356 - RNA, 32 nt, Homo Sapiens
accuuccuuccccacacccuguccuuauuaga

SEQ ID NO: 64357 - RNA, 32 nt, Homo Sapiens
ggaagcuaucagaacaagaaauguaggcauuu

SEQ ID NO: 64358 - RNA, 32 nt, Homo Sapiens
ccaggccgccuggacgcccagcccuucagagc

SEQ ID NO: 64359 - RNA, 32 nt, Homo Sapiens
uugcccuucuauacuuucucacauguggcucc

SEQ ID NO: 64360 - RNA, 32 nt, Homo Sapiens
uaaaauauaauguaccuagauuguaggagaug

SEQ ID NO: 64361 - RNA, 32 nt, Homo Sapiens
uguuuacagcuuugaggccuugguggauggga

SEQ ID NO: 64362 - RNA, 32 nt, Homo Sapiens
aauauaucuucagaaauuaaucuuaaaagagg

SEQ ID NO: 64363 - RNA, 32 nt, Homo Sapiens
aaaccagucaucugccuguuaagcuguauuua

SEQ ID NO: 64364 - RNA, 32 nt, Homo Sapiens
gccuugggucccugcccucccacccagguuug

SEQ ID NO: 64365 - RNA, 32 nt, Homo Sapiens
cuuagauuuaccucagauccaugccaccaaac

SEQ ID NO: 64366 - RNA, 32 nt, Homo Sapiens
cuggcccucuggcuggccccaggagccuuugg

SEQ ID NO: 64367 - RNA, 32 nt, Homo Sapiens
ggccggguagcuuccuccccagcccucagggg

SEQ ID NO: 64368 - RNA, 32 nt, Homo Sapiens
uuuugauuuccucaggaccuuagagggaaaac

SEQ ID NO: 64369 - RNA, 32 nt, Homo Sapiens
uucaaaagauguuuaaaaugcuuuuguauuua

SEQ ID NO: 64370 - RNA, 32 nt, Homo Sapiens
auuuaaguugcacugacaaaaauaccaaaaua

SEQ ID NO: 64371 - RNA, 32 nt, Homo Sapiens
uagcaaaggccaaugucuucuagcugcuuccu

SEQ ID NO: 64372 - RNA, 32 nt, Homo Sapiens
uugaaaguauuuugugacauuguuauguacau

SEQ ID NO: 64373 - RNA, 27 nt, Homo Sapiens
ucaugccugcuaauuacacguguacca

SEQ ID NO: 64374 - RNA, 32 nt, Homo Sapiens
aggccgugagcgcccaggccgacagggccuac

SEQ ID NO: 64375 - RNA, 32 nt, Homo Sapiens
gggcgcccgggcggggacgcggcgagacuguc

SEQ ID NO: 64376 - RNA, 32 nt, Homo Sapiens
gccucggcgucccccagucuccaggagccucu

SEQ ID NO: 64377 - RNA, 32 nt, Homo Sapiens
ugccacaccaaaacguccccuccacauuuggu

SEQ ID NO: 64378 - RNA, 32 nt, Homo Sapiens
caucaaacuccacccaccuggcuucauacaga

SEQ ID NO: 64379 - RNA, 32 nt, Homo Sapiens
cccauuuccucuuccuucucuacucaugccag

SEQ ID NO: 64380 - RNA, 32 nt, Homo Sapiens
ucuuauauaugagaaagcacaaaugcgaaaga

SEQ ID NO: 64381 - RNA, 32 nt, Homo Sapiens
agaccugaaaauaugucugcagguuucuccuu

SEQ ID NO: 64382 - RNA, 32 nt, Homo Sapiens
gguauauuacuuagauccuucuagucagaagc

SEQ ID NO: 64383 - RNA, 32 nt, Homo Sapiens
uaaaggguugauuugcugcaagaguagcugag

SEQ ID NO: 64384 - RNA, 32 nt, Homo Sapiens
acugggacccugaagaggcauuucagaguguu

SEQ ID NO: 64385 - RNA, 32 nt, Homo Sapiens
cacaaagcuaaauggauuuaccuaguggauuc

SEQ ID NO: 64386 - RNA, 32 nt, Homo Sapiens
cugagagggcuaccugcccagccccuccccca

SEQ ID NO: 64387 - RNA, 32 nt, Homo Sapiens
agcagggaaggggacagcccuguggcaauggg

SEQ ID NO: 64388 - RNA, 32 nt, Homo Sapiens
gagaccauuuuucaaaacaaugggggaaagag

SEQ ID NO: 64389 - RNA, 32 nt, Homo Sapiens
ugccuggccaaggacaacucuaucuaugucgu

SEQ ID NO: 64390 - RNA, 32 nt, Homo Sapiens
augauccgcccaucuuggcuucccaaagugcu

SEQ ID NO: 64391 - RNA, 32 nt, Homo Sapiens
guggccgccucugccccuccccagcgcaggug

SEQ ID NO: 64392 - RNA, 32 nt, Homo Sapiens
augagauaaggaugcauaggagaccccaggcc

SEQ ID NO: 64393 - RNA, 32 nt, Homo Sapiens
aaaauucaauuaaaaugcuguuguuuuguaaa

SEQ ID NO: 64394 - RNA, 32 nt, Homo Sapiens
ucucuuuuuaucagaacuucaugcaaucuaca

SEQ ID NO: 64395 - RNA, 32 nt, Homo Sapiens
uaagauuccccgcuccagcuccgagaugucag

SEQ ID NO: 64396 - RNA, 32 nt, Homo Sapiens
gaugaaagauaaaauuuuaauauagcuucagu

SEQ ID NO: 64397 - RNA, 32 nt, Homo Sapiens
acgggcgcucgcgucucgcaguccucuuccgu

SEQ ID NO: 64398 - RNA, 32 nt, Homo Sapiens
gggugcagcggcggcgggaggacgcggaagag

SEQ ID NO: 64399 - RNA, 32 nt, Homo Sapiens
gugcccaugcgugaccuggacuguggacccuc

SEQ ID NO: 64400 - RNA, 32 nt, Homo Sapiens
ccaaaacagaacagacccccaucccugggcug

SEQ ID NO: 64401 - RNA, 31 nt, Homo Sapiens
uuaauucccucccucccccaaacacaugauu

SEQ ID NO: 64402 - RNA, 32 nt, Homo Sapiens
aaguagggaaaguuagaaaucuuccacauuuc

SEQ ID NO: 64403 - RNA, 32 nt, Homo Sapiens
uuguggccaaaauuauguuuacuagaggaaau

SEQ ID NO: 64404 - RNA, 30 nt, Homo Sapiens
gaaucauggaucacgucagucauaacugga

SEQ ID NO: 64405 - RNA, 32 nt, Homo Sapiens
uaauuacaaaucacugucaauuuuaugggaag

SEQ ID NO: 64406 - RNA, 32 nt, Homo Sapiens
aggccagccggacgagcuuugggcaccgcccu

SEQ ID NO: 64407 - RNA, 32 nt, Homo Sapiens
ggugcuggccuguuugugaugaucagcucagc

SEQ ID NO: 64408 - RNA, 32 nt, Homo Sapiens
aucugcuuuacagauuugauugcuuggaagac

SEQ ID NO: 64409 - RNA, 32 nt, Homo Sapiens
uuuuuccuuuuuucuuuuuuuuuuuuuuuaau

SEQ ID NO: 64410 - RNA, 32 nt, Homo Sapiens
ggcgcugcggggcgcgcagggagcugccaagg

SEQ ID NO: 64411 - RNA, 32 nt, Homo Sapiens
aggagcauugaaauuaauuagcacuaauuuuu

SEQ ID NO: 64412 - RNA, 32 nt, Homo Sapiens
acauuuaaguaucacagcauuaaaagaaaaag

SEQ ID NO: 64413 - RNA, 32 nt, Homo Sapiens
cugcgggagcuggagaggcugcgggagcugga

SEQ ID NO: 64414 - RNA, 32 nt, Homo Sapiens
agacaauaaagggaccaaaaccacccaacccc

SEQ ID NO: 64415 - RNA, 32 nt, Homo Sapiens
gccgauggcgccugugcugaggauuugugcug

SEQ ID NO: 64416 - RNA, 32 nt, Homo Sapiens
aaguacagcgaguucuucacgggcagcaagcu

SEQ ID NO: 64417 - RNA, 32 nt, Homo Sapiens
ccacaaccaggggcacggcaacaucauugaug

SEQ ID NO: 64418 - RNA, 32 nt, Homo Sapiens
aucgcagccugcuuuucuuagauguuuucuug

SEQ ID NO: 64419 - RNA, 32 nt, Homo Sapiens
uguagaaguauuuuacauuuucaucccuucuc

SEQ ID NO: 64420 - RNA, 32 nt, Homo Sapiens
auuguaaauguguuuucuuaauauuaccaaaa

SEQ ID NO: 64421 - RNA, 32 nt, Homo Sapiens
aagacagcagauuuugcagauaccuuguggcg

SEQ ID NO: 64422 - RNA, 28 nt, Homo Sapiens
ucccggaggcggccgcgcguggaugcgg

SEQ ID NO: 64423 - RNA, 32 nt, Homo Sapiens
ugcgugcagugcucuuaucaccaucucuggug

SEQ ID NO: 64424 - RNA, 32 nt, Homo Sapiens
aguucaggccccagaggggauuuucuggguga

SEQ ID NO: 64425 - RNA, 32 nt, Homo Sapiens
uuauuaaaacaucagcuguggaguguggcggu

SEQ ID NO: 64426 - RNA, 32 nt, Homo Sapiens
cugcggagacagcagaggucugaccgccccgc

SEQ ID NO: 64427 - RNA, 32 nt, Homo Sapiens
gacucugcacaccacuggaugguggguccaag

SEQ ID NO: 64428 - RNA, 32 nt, Homo Sapiens
cucccucgcgcccuugccgcccaccugcucac

SEQ ID NO: 64429 - RNA, 32 nt, Homo Sapiens
gauaccacagacugugcugaggucuugccacc

SEQ ID NO: 64430 - RNA, 32 nt, Homo Sapiens
ugagaauaugcggcguuugguuuuuuguucuu

SEQ ID NO: 64431 - RNA, 32 nt, Homo Sapiens
caccccccagcaccuuccagauugagagcaag

SEQ ID NO: 64432 - RNA, 32 nt, Homo Sapiens
ccacccuuccucugggaaacugacagcugucu

SEQ ID NO: 64433 - RNA, 32 nt, Homo Sapiens
cuaagcaggaagcucaggcagcuccuccagac

SEQ ID NO: 64434 - RNA, 32 nt, Homo Sapiens
ggggcccugagccccagcccccagccuccucc

SEQ ID NO: 64435 - RNA, 32 nt, Homo Sapiens
augucuucacgcugagccccagcccccaggac

SEQ ID NO: 64436 - RNA, 32 nt, Homo Sapiens
gccuagaguauauucugaaaauuuaggaauga

SEQ ID NO: 64437 - RNA, 32 nt, Homo Sapiens
ucccuauuaggaaccuuguuucccaccgaaua

SEQ ID NO: 64438 - RNA, 32 nt, Homo Sapiens
uagugggagagcaccaguugggccuaauccug

SEQ ID NO: 64439 - RNA, 32 nt, Homo Sapiens
ugcagcacuacuuuaaauauuagauuaugucu

SEQ ID NO: 64440 - RNA, 32 nt, Homo Sapiens
guauauuuucuuuuucgucuauauauacauau

SEQ ID NO: 64441 - RNA, 32 nt, Homo Sapiens
aacagcuagagcaucagagcccuuuugcuaua

SEQ ID NO: 64442 - RNA, 25 nt, Homo Sapiens
augaagucugacgcggcaggucccu

SEQ ID NO: 64443 - RNA, 32 nt, Homo Sapiens
aucuguauauaaagguuucuguauauuguaua

SEQ ID NO: 64444 - RNA, 32 nt, Homo Sapiens
ugcaagagcuggaagcuccaguugggguaagg

SEQ ID NO: 64445 - RNA, 32 nt, Homo Sapiens
ccugaggaagccccuagguccacacagugaug

SEQ ID NO: 64446 - RNA, 31 nt, Homo Sapiens
aguacaaaauaaaacagaugucaguuguuga

SEQ ID NO: 64447 - RNA, 28 nt, Homo Sapiens
gugauggggguggagaggaugacaagua

SEQ ID NO: 64448 - RNA, 32 nt, Homo Sapiens
cagcagcauuuuaauaauaaaauaucacacua

SEQ ID NO: 64449 - RNA, 32 nt, Homo Sapiens
gugauccuccuaccucagccuccuggaagcuc

SEQ ID NO: 64450 - RNA, 32 nt, Homo Sapiens
aauucuaucuucugggggccuuccgucugaga

SEQ ID NO: 64451 - RNA, 32 nt, Homo Sapiens
cacugcacuccagccugggugagagagcaaga

SEQ ID NO: 64452 - RNA, 32 nt, Homo Sapiens
gggagugccugggccuggugacccagggcugg

SEQ ID NO: 64453 - RNA, 32 nt, Homo Sapiens
agugcccuuugcaucguccccucccccacccc

SEQ ID NO: 64454 - RNA, 32 nt, Homo Sapiens
ggaggaaggaacuguagaugggcugaaaauag

SEQ ID NO: 64455 - RNA, 32 nt, Homo Sapiens
gaccacaaccucagcgaagaccacgaugaagc

SEQ ID NO: 64456 - RNA, 32 nt, Homo Sapiens
cugcuuuaaaaagcugcaacaggcuaggcgca

SEQ ID NO: 64457 - RNA, 32 nt, Homo Sapiens
uaggaggggcugcauugcagggggagagugaa

SEQ ID NO: 64458 - RNA, 32 nt, Homo Sapiens
agggcgccuagcgacacccccaaccucccacu

SEQ ID NO: 64459 - RNA, 32 nt, Homo Sapiens
uauugcaguuauagaauuggucagagagcauu

SEQ ID NO: 64460 - RNA, 32 nt, Homo Sapiens
gccggguagcagcuguuugugccucuugcccg

SEQ ID NO: 64461 - RNA, 32 nt, Homo Sapiens
caucgcccgaggcguccgcccugcaaaucugc

SEQ ID NO: 64462 - RNA, 32 nt, Homo Sapiens
cccugcaguggccuuggcaaugucugugccac

SEQ ID NO: 64463 - RNA, 32 nt, Homo Sapiens
uuuggaaauguguaaggucaaauacuauaguu

SEQ ID NO: 64464 - RNA, 32 nt, Homo Sapiens
ucugagccugguguuuaucaccaccaagaauu

SEQ ID NO: 64465 - RNA, 32 nt, Homo Sapiens
uucccuaaucgauaaugacuccauuuccaauu

SEQ ID NO: 64466 - RNA, 32 nt, Homo Sapiens
gcuaggccaaggaggaugggggugguugugga

SEQ ID NO: 64467 - RNA, 32 nt, Homo Sapiens
cuaacuuuuguuacuauucuaaaaguuugaau

SEQ ID NO: 64468 - RNA, 32 nt, Homo Sapiens
gcauauuuucuuuucuuacagucauugccaga

SEQ ID NO: 64469 - RNA, 32 nt, Homo Sapiens
augaaucaugcccacacccccagagcccagca

SEQ ID NO: 64470 - RNA, 32 nt, Homo Sapiens
ggcaccaauggcagcccuccccgccccucucc

SEQ ID NO: 64471 - RNA, 32 nt, Homo Sapiens
uuuuuuauuguggguuuugauuuuuuccccca

SEQ ID NO: 64472 - RNA, 32 nt, Homo Sapiens
uacuacuuucccucucgcccugccaccuaguu

SEQ ID NO: 64473 - RNA, 32 nt, Homo Sapiens
cugucaccuugauggacaaguuucaauaaaac

SEQ ID NO: 64474 - RNA, 32 nt, Homo Sapiens
acugcaggagugggcaggccggaguggggcgc

SEQ ID NO: 64475 - RNA, 31 nt, Homo Sapiens
gugucggacuggggagggauaugauggagag

SEQ ID NO: 64476 - RNA, 32 nt, Homo Sapiens
cccuccugccagcugcaugcugccaguuccug

SEQ ID NO: 64477 - RNA, 32 nt, Homo Sapiens
gggaauuuauugccucuuucacauugaaaccc

SEQ ID NO: 64478 - RNA, 32 nt, Homo Sapiens
ccauuccauuuucuuuucuggcuaaauaaaug

SEQ ID NO: 64479 - RNA, 31 nt, Homo Sapiens
uuagagaacauauuggaaggucacuguuugu

SEQ ID NO: 64480 - RNA, 32 nt, Homo Sapiens
auuuucaucuucuuuaucuuuauauucuguaa

SEQ ID NO: 64481 - RNA, 32 nt, Homo Sapiens
cuuggcccaucccgccuucuccaggcuucccc

SEQ ID NO: 64482 - RNA, 32 nt, Homo Sapiens
augcaaagaugaugacuauuuaauaaaaugaa

SEQ ID NO: 64483 - RNA, 32 nt, Homo Sapiens
uuuauuuaaaauguucauuaauaaaguuguug

SEQ ID NO: 64484 - RNA, 32 nt, Homo Sapiens
aaucacauuuuauauuuuuucuucacaauucu

SEQ ID NO: 64485 - RNA, 32 nt, Homo Sapiens
cucggugcccuuucuuuuuacucucacguggu

SEQ ID NO: 64486 - RNA, 32 nt, Homo Sapiens
ccucccuagacaauauguugggcacuagggac

SEQ ID NO: 64487 - RNA, 32 nt, Homo Sapiens
aaacuuuaauuuuauguuuacuccaugaaugu

SEQ ID NO: 64488 - RNA, 27 nt, Homo Sapiens
gcagucggcuucuucagucgcucccug

SEQ ID NO: 64489 - RNA, 32 nt, Homo Sapiens
gggccuccacccaauaagcaaacuggagauuc

SEQ ID NO: 64490 - RNA, 32 nt, Homo Sapiens
acaagagcagaaucuccgugggacaucucucu

SEQ ID NO: 64491 - RNA, 32 nt, Homo Sapiens
guguaaaaaugaaucgcguuuuaagugauucg

SEQ ID NO: 64492 - RNA, 32 nt, Homo Sapiens
acagaacaacuuucauuacacuguauauuaau

SEQ ID NO: 64493 - RNA, 32 nt, Homo Sapiens
ucuaaaauucaaccuuuuuuuugucgauuuaa

SEQ ID NO: 64494 - RNA, 32 nt, Homo Sapiens
caaaauugauauacuuuuuucuuauuuaacuu

SEQ ID NO: 64495 - RNA, 32 nt, Homo Sapiens
aacccacgcuccaacacacacacacacacaca

SEQ ID NO: 64496 - RNA, 32 nt, Homo Sapiens
ccgcgccgcgcgccggcggcaccaugaaguca

SEQ ID NO: 64497 - RNA, 28 nt, Homo Sapiens
gccauggcgggcggggaagaccgcgggg

SEQ ID NO: 64498 - RNA, 32 nt, Homo Sapiens
caugagcaaggugagcaucacaguccaucucg

SEQ ID NO: 64499 - RNA, 32 nt, Homo Sapiens
cugucccuccccagcccgcucccccucucugu

SEQ ID NO: 64500 - RNA, 32 nt, Homo Sapiens
auaauuucagaauucauaguaacauggggauc

SEQ ID NO: 64501 - RNA, 32 nt, Homo Sapiens
ggucaaauauuuuuguuaauuaagcucacaaa

SEQ ID NO: 64502 - RNA, 32 nt, Homo Sapiens
ggaccuaccuguagcagcuagcaaaggccucu

SEQ ID NO: 64503 - RNA, 32 nt, Homo Sapiens
cgacuaggacccacaagugagcagcaggugcc

SEQ ID NO: 64504 - RNA, 32 nt, Homo Sapiens
auaaacagcuucuguuuguaaaaugagacuga

SEQ ID NO: 64505 - RNA, 32 nt, Homo Sapiens
cucauugcagugcggcggcccuaccucggccc

SEQ ID NO: 64506 - RNA, 32 nt, Homo Sapiens
uucccacaagauacagaagaagauaaagauuu

SEQ ID NO: 64507 - RNA, 32 nt, Homo Sapiens
acccugaggaccaguucuugggguuccaggcc

SEQ ID NO: 64508 - RNA, 32 nt, Homo Sapiens
guucugcccucccagagccuccacucugggau

SEQ ID NO: 64509 - RNA, 32 nt, Homo Sapiens
auuuaauauuaugcccuuggaucuguuacugc

SEQ ID NO: 64510 - RNA, 32 nt, Homo Sapiens
ggcugcaggcaccauggaccgagcccccacgg

SEQ ID NO: 64511 - RNA, 32 nt, Homo Sapiens
cugugacuggcggggaagauggcaccgucccu

SEQ ID NO: 64512 - RNA, 31 nt, Homo Sapiens
cggaggccaggaugccugcccuggcaugccu

SEQ ID NO: 64513 - RNA, 32 nt, Homo Sapiens
uucaaauccaacaaagagaauguugcuaacuc

SEQ ID NO: 64514 - RNA, 32 nt, Homo Sapiens
gucaguuugaccaaguauuccaagaggcccca

SEQ ID NO: 64515 - RNA, 32 nt, Homo Sapiens
cuccuuggagacacccucuuuggcccucacua

SEQ ID NO: 64516 - RNA, 32 nt, Homo Sapiens
agccugggcccggcuggggaggggguggcagg

SEQ ID NO: 64517 - RNA, 32 nt, Homo Sapiens
uggggccccagcagcucugguccuccugacau

SEQ ID NO: 64518 - RNA, 32 nt, Homo Sapiens
uuuggaggagcguggcucuggugaggggugga

SEQ ID NO: 64519 - RNA, 32 nt, Homo Sapiens
caccugaggaagcaguguggacaggcugacac

SEQ ID NO: 64520 - RNA, 32 nt, Homo Sapiens
cuucucgacaagcuaccagcaccuggggcccu

SEQ ID NO: 64521 - RNA, 32 nt, Homo Sapiens
aggguacauuuuaauuuaauguguuaaaaaca

SEQ ID NO: 64522 - RNA, 32 nt, Homo Sapiens
caacagaaaaggaaaauuucacucgucuaaac

SEQ ID NO: 64523 - RNA, 32 nt, Homo Sapiens
ucgacguucuccuggggugugugccaagcgaa

SEQ ID NO: 64524 - RNA, 32 nt, Homo Sapiens
aucugaacagaaaauccaagaacagggauaug

SEQ ID NO: 64525 - RNA, 32 nt, Homo Sapiens
ucauuaaaaaacaaaauuagccagaaaaaaaa

SEQ ID NO: 64526 - RNA, 32 nt, Homo Sapiens
uaagauaagaaccuggaaaggggacucuguug

SEQ ID NO: 64527 - RNA, 32 nt, Homo Sapiens
uccacccugucaugguaugugaggugugggug

SEQ ID NO: 64528 - RNA, 32 nt, Homo Sapiens
ucuuccauaaaccuuuguuuguagauuuaaug

SEQ ID NO: 64529 - RNA, 32 nt, Homo Sapiens
gccuuucccugugcugccccugccgcgcgaug

SEQ ID NO: 64530 - RNA, 32 nt, Homo Sapiens
gggagacagagcaaccccuggaccccagccuc

SEQ ID NO: 64531 - RNA, 32 nt, Homo Sapiens
acccagcccucaguugucauuugguucagaau

SEQ ID NO: 64532 - RNA, 32 nt, Homo Sapiens
gagaacaaggaccugcuucuucucagauucuu

SEQ ID NO: 64533 - RNA, 32 nt, Homo Sapiens
gauaacauuuuucuucugcuuuuaaaaacuga

SEQ ID NO: 64534 - RNA, 32 nt, Homo Sapiens
gucuugucaauacuuuaccugauguucucaua

SEQ ID NO: 64535 - RNA, 32 nt, Homo Sapiens
gggaaaggcccagagcccugugcgggggaaug

SEQ ID NO: 64536 - RNA, 32 nt, Homo Sapiens
gggucugggggcccuuuccugccccaugugaa

SEQ ID NO: 64537 - RNA, 32 nt, Homo Sapiens
aauguucuguuuucucuuuuuaaauauuuuau

SEQ ID NO: 64538 - RNA, 32 nt, Homo Sapiens
ucuccaccuaaccauccuucugcacauuguga

SEQ ID NO: 64539 - RNA, 32 nt, Homo Sapiens
cggacaagugcagcugcugcgccugugcuggg

SEQ ID NO: 64540 - RNA, 32 nt, Homo Sapiens
cgaaucccauccccacgucugggccgagaaag

SEQ ID NO: 64541 - RNA, 32 nt, Homo Sapiens
ugcagacugaagacucuggacucauugcugau

SEQ ID NO: 64542 - RNA, 32 nt, Homo Sapiens
ccuccaggccugccucccacuucacugcgaag

SEQ ID NO: 64543 - RNA, 32 nt, Homo Sapiens
agagaucaauuucagcagggccaggcaggacc

SEQ ID NO: 64544 - RNA, 32 nt, Homo Sapiens
gcacccgcaugaagccccaaauguagaaacuc

SEQ ID NO: 64545 - RNA, 32 nt, Homo Sapiens
cggcauaccccgguccucuccaucucucuccu

SEQ ID NO: 64546 - RNA, 32 nt, Homo Sapiens
gccagacacagccaaguuuacaaaaucuucaa

SEQ ID NO: 64547 - RNA, 32 nt, Homo Sapiens
ccauggaucaagaugggccaucugaaaugcag

SEQ ID NO: 64548 - RNA, 32 nt, Homo Sapiens
ggagauguuuuaaagaugaauccgaauuugga

SEQ ID NO: 64549 - RNA, 32 nt, Homo Sapiens
ccggggagguugagaacugggcguggaaaaga

SEQ ID NO: 64550 - RNA, 32 nt, Homo Sapiens
ucuuaaaucaaggcugucugcuuauuuauacu

SEQ ID NO: 64551 - RNA, 32 nt, Homo Sapiens
gcgagaacgacccggcggccaguucucuuccu

SEQ ID NO: 64552 - RNA, 32 nt, Homo Sapiens
ccaggggcgggcgcgccgcugcauccccaucc

SEQ ID NO: 64553 - RNA, 32 nt, Homo Sapiens
gcccugcccgucucggccccaugcccccacca

SEQ ID NO: 64554 - RNA, 32 nt, Homo Sapiens
uggugucugaccacuggcuccuggaagggaug

SEQ ID NO: 64555 - RNA, 32 nt, Homo Sapiens
uggccugacaaugcaguucuuaaaccaaaggu

SEQ ID NO: 64556 - RNA, 32 nt, Homo Sapiens
cacugaugcuacagaacagcucugccagcagc

SEQ ID NO: 64557 - RNA, 32 nt, Homo Sapiens
ucaaaauucccuuuguggccauauacauacua

SEQ ID NO: 64558 - RNA, 32 nt, Homo Sapiens
ugggcccaguguucaucugagcauaacuguac

SEQ ID NO: 64559 - RNA, 32 nt, Homo Sapiens
aaggcaaugucuauuucagggauuguaaagua

SEQ ID NO: 64560 - RNA, 32 nt, Homo Sapiens
gccucgggggaugccuaguucguggcuuccug

SEQ ID NO: 64561 - RNA, 32 nt, Homo Sapiens
cacuuggcuuagacugaggagcucugugggca

SEQ ID NO: 64562 - RNA, 32 nt, Homo Sapiens
agggcuugggccaauggcuggcacugcccuga

SEQ ID NO: 64563 - RNA, 32 nt, Homo Sapiens
cuuuuauuuuuuuuuuaccuuggggugauggu

SEQ ID NO: 64564 - RNA, 32 nt, Homo Sapiens
uuaacuguguauauuucuacugaucugaucuc

SEQ ID NO: 64565 - RNA, 32 nt, Homo Sapiens
caugagcgaugaugagaccaucuggauggccc

SEQ ID NO: 64566 - RNA, 32 nt, Homo Sapiens
cauccucucaugcccacccccaccuuucucgc

SEQ ID NO: 64567 - RNA, 32 nt, Homo Sapiens
uuccaugagacaccccaaguccuuacaacaaa

SEQ ID NO: 64568 - RNA, 31 nt, Homo Sapiens
gcuggaaucauuccuguaccaaauaauucac

SEQ ID NO: 64569 - RNA, 32 nt, Homo Sapiens
ggggcuuuuccacagcguggcagaagcccagg

SEQ ID NO: 64570 - RNA, 32 nt, Homo Sapiens
uuuggaagggcucccuuacaaaaguagaauuu

SEQ ID NO: 64571 - RNA, 32 nt, Homo Sapiens
ugaauucucccuuuuuuuuuuaaacagcagaa

SEQ ID NO: 64572 - RNA, 32 nt, Homo Sapiens
cggaggcugcccccggcccccuggucucuggu

SEQ ID NO: 64573 - RNA, 32 nt, Homo Sapiens
cagggccggccggggcggcgcuucucggccug

SEQ ID NO: 64574 - RNA, 32 nt, Homo Sapiens
gccucuauugaggauuugaugcgacggccuca

SEQ ID NO: 64575 - RNA, 32 nt, Homo Sapiens
uguuccuagagcaaugucuucccagcagcagc

SEQ ID NO: 64576 - RNA, 32 nt, Homo Sapiens
cucugacacacacacacacacacacacacaca

SEQ ID NO: 64577 - RNA, 32 nt, Homo Sapiens
aacuguugcuuaaauuuguguuauuuuucacu

SEQ ID NO: 64578 - RNA, 32 nt, Homo Sapiens
uuucaggauuuaauuaauacaaaccuuauuuu

SEQ ID NO: 64579 - RNA, 32 nt, Homo Sapiens
cugaaauuccaaggccagagugcacaucagcu

SEQ ID NO: 64580 - RNA, 32 nt, Homo Sapiens
gcgugugcgcguugcggagggugcgcucagag

SEQ ID NO: 64581 - RNA, 32 nt, Homo Sapiens
gucagcuugggguggggguaccccagaggccc

SEQ ID NO: 64582 - RNA, 32 nt, Homo Sapiens
ggacagccuuaugaggguuugcuugagaggca

SEQ ID NO: 64583 - RNA, 32 nt, Homo Sapiens
ugaggggguccucccccuccuggugcucccuc

SEQ ID NO: 64584 - RNA, 32 nt, Homo Sapiens
gcgguagugguggguggcaggggccugugacc

SEQ ID NO: 64585 - RNA, 25 nt, Homo Sapiens
agugaauaaaaaugucagaacugug

SEQ ID NO: 64586 - RNA, 32 nt, Homo Sapiens
ugugaucucggcucgcugcagccacugccucc

SEQ ID NO: 64587 - RNA, 32 nt, Homo Sapiens
cugggggcuagggaagagccugccagauuuuc

SEQ ID NO: 64588 - RNA, 32 nt, Homo Sapiens
guuacugcaucugauuaaaugucuccagaaau

SEQ ID NO: 64589 - RNA, 32 nt, Homo Sapiens
ggccaaaacaacauuuuaaguagaagauccag

SEQ ID NO: 64590 - RNA, 32 nt, Homo Sapiens
gagugagucaacaaaccuaucauccuucccau

SEQ ID NO: 64591 - RNA, 32 nt, Homo Sapiens
uggccugacaacagucuucugcccaugucugg

SEQ ID NO: 64592 - RNA, 32 nt, Homo Sapiens
aucauggaauuuaaugcugaauauauagaauu

SEQ ID NO: 64593 - RNA, 32 nt, Homo Sapiens
uugaccccagcuugcuaguugcauaauaauaa

SEQ ID NO: 64594 - RNA, 32 nt, Homo Sapiens
uuuacauuggguuuuucuuucguaguuuuggu

SEQ ID NO: 64595 - RNA, 32 nt, Homo Sapiens
aaccuccccucuccccgggaccgcgcuagggc

SEQ ID NO: 64596 - RNA, 32 nt, Homo Sapiens
guacugaggggagggguacucagcuccaucuc

SEQ ID NO: 64597 - RNA, 32 nt, Homo Sapiens
gagagaauauaaaauaaucaugacaauuacua

SEQ ID NO: 64598 - RNA, 32 nt, Homo Sapiens
ugagaucaaugaggaaggcccaagugucccca

SEQ ID NO: 64599 - RNA, 32 nt, Homo Sapiens
auauggaagauaauguuuacauccuuuuaaac

SEQ ID NO: 64600 - RNA, 32 nt, Homo Sapiens
aaaggguggcugcgacucaagaauaauauggg

SEQ ID NO: 64601 - RNA, 30 nt, Homo Sapiens
guccucggugcucgcccgccggccagacaa

SEQ ID NO: 64602 - RNA, 32 nt, Homo Sapiens
aaauguuuauugauuuauauuguuaagcaaac

SEQ ID NO: 64603 - RNA, 32 nt, Homo Sapiens
ucuuugaacuuuaaacauaaugucuaauucca

SEQ ID NO: 64604 - RNA, 32 nt, Homo Sapiens
gccggaagugacuuguugguguuaucuccuga

SEQ ID NO: 64605 - RNA, 32 nt, Homo Sapiens
auaguuuuagaaauaaaugaccaagaaauugg

SEQ ID NO: 64606 - RNA, 32 nt, Homo Sapiens
cgccuugccggacggccgcgggggucccagcu

SEQ ID NO: 64607 - RNA, 32 nt, Homo Sapiens
uaauuuuccagauggugauguuacuuuucagu

SEQ ID NO: 64608 - RNA, 32 nt, Homo Sapiens
cuuuguugucaugauagugaguucuugugaga

SEQ ID NO: 64609 - RNA, 32 nt, Homo Sapiens
gcacuuuagaacuauuugacaauucagacuuu

SEQ ID NO: 64610 - RNA, 32 nt, Homo Sapiens
ccuacuucugguuuccuuuggaaccccuuugu

SEQ ID NO: 64611 - RNA, 32 nt, Homo Sapiens
ccucuccuccuccuccccuccagccgcuggga

SEQ ID NO: 64612 - RNA, 32 nt, Homo Sapiens
gccugcucacgcaugcagcccgggcugcagag

SEQ ID NO: 64613 - RNA, 32 nt, Homo Sapiens
caucaggacauuggacacaccauuccggaaga

SEQ ID NO: 64614 - RNA, 32 nt, Homo Sapiens
ucuggcugccagccugggcagccugggaagcc

SEQ ID NO: 64615 - RNA, 32 nt, Homo Sapiens
ugaauguguucccuccgcuggugucguggugg

SEQ ID NO: 64616 - RNA, 32 nt, Homo Sapiens
cauauuuacauuugauuuaacagugaaccuua

SEQ ID NO: 64617 - RNA, 32 nt, Homo Sapiens
gacggggucugacuguguuacccaggcugguc

SEQ ID NO: 64618 - RNA, 32 nt, Homo Sapiens
ggugaugcggcccuggagaaguccucucgcug

SEQ ID NO: 64619 - RNA, 32 nt, Homo Sapiens
auccuggccaacaugaugaaaccccgucucua

SEQ ID NO: 64620 - RNA, 28 nt, Homo Sapiens
guauggaaagauuguauauuucugugua

SEQ ID NO: 64621 - RNA, 32 nt, Homo Sapiens
uccagccgcugagcgccgcggcccuaccugag

SEQ ID NO: 64622 - RNA, 32 nt, Homo Sapiens
uauguuaaauguggaucuuuuacaccacauca

SEQ ID NO: 64623 - RNA, 32 nt, Homo Sapiens
aggcaaugcuaacacuaauuauagaaauuaag

SEQ ID NO: 64624 - RNA, 32 nt, Homo Sapiens
gccugcagcucgcgccgccauggacgcugccg

SEQ ID NO: 64625 - RNA, 32 nt, Homo Sapiens
gaagggaaauuaacauggagucauuuauacag

SEQ ID NO: 64626 - RNA, 32 nt, Homo Sapiens
aaugacguuuauuauuuuuuuaaugucaguag

SEQ ID NO: 64627 - RNA, 32 nt, Homo Sapiens
gggaaguaguuucguuuccuucugccuccggg

SEQ ID NO: 64628 - RNA, 32 nt, Homo Sapiens
aaaagauaauuucuaucugauuugcuuuaaaa

SEQ ID NO: 64629 - RNA, 32 nt, Homo Sapiens
ucgcccccacuuuucuaguuaacuuuuuccau

SEQ ID NO: 64630 - RNA, 29 nt, Homo Sapiens
uauucuagauguauguaucugaggaaaga

SEQ ID NO: 64631 - RNA, 32 nt, Homo Sapiens
caccccaaaugaaaaauaauuauuaaaaauga

SEQ ID NO: 64632 - RNA, 32 nt, Homo Sapiens
ccacacacacaccaguacccugacaucuccuc

SEQ ID NO: 64633 - RNA, 32 nt, Homo Sapiens
uggcccagguccugggggcugcugaacccagc

SEQ ID NO: 64634 - RNA, 32 nt, Homo Sapiens
ggaaagggacgaccuugcugcagugcaucagc

SEQ ID NO: 64635 - RNA, 32 nt, Homo Sapiens
cuucuauaucuaggcuuugucaguaauuucca

SEQ ID NO: 64636 - RNA, 32 nt, Homo Sapiens
cucacguccccacagaccccaggcccugugca

SEQ ID NO: 64637 - RNA, 32 nt, Homo Sapiens
ugguuuuuugaaaggaucaacaaaauugauag

SEQ ID NO: 64638 - RNA, 32 nt, Homo Sapiens
ugucacuuuuuuccugucaauauauagagacu

SEQ ID NO: 64639 - RNA, 32 nt, Homo Sapiens
uuaaaauggcuuuuuccagugugcuccuucuu

SEQ ID NO: 64640 - RNA, 32 nt, Homo Sapiens
uuuggugauggaguguucccacugaccgaugg

SEQ ID NO: 64641 - RNA, 32 nt, Homo Sapiens
aaggauggguggcaggaacuuguauaguucag

SEQ ID NO: 64642 - RNA, 32 nt, Homo Sapiens
uucguaaccgcaccacacccgagcuacaaucu

SEQ ID NO: 64643 - RNA, 32 nt, Homo Sapiens
aucgugugcagggcuuccggcggcgugggggc

SEQ ID NO: 64644 - RNA, 32 nt, Homo Sapiens
guaucugcaccuucucaacugagagaagaacc

SEQ ID NO: 64645 - RNA, 32 nt, Homo Sapiens
gaucucgaaggcgccuucuccuccugggagau

SEQ ID NO: 64646 - RNA, 32 nt, Homo Sapiens
uccuucagugacuucaggaacuuucaggagaa

SEQ ID NO: 64647 - RNA, 32 nt, Homo Sapiens
caaaaguuauaaugaggaagauaauauugccu

SEQ ID NO: 64648 - RNA, 32 nt, Homo Sapiens
ugccccgcccccacccguacaccuuugacuug

SEQ ID NO: 64649 - RNA, 32 nt, Homo Sapiens
gcggccugagaagauauuauggcugcugccac

SEQ ID NO: 64650 - RNA, 32 nt, Homo Sapiens
gccggaggaaggucccauggccugcugggcuu

SEQ ID NO: 64651 - RNA, 32 nt, Homo Sapiens
ccuuuuuacuagaccucugcaagcauugcaaa

SEQ ID NO: 64652 - RNA, 32 nt, Homo Sapiens
cacaggcccucccuguuccccagagaaagggg

SEQ ID NO: 64653 - RNA, 32 nt, Homo Sapiens
agacgccggcugcuccuccccuccccgccgca

SEQ ID NO: 64654 - RNA, 32 nt, Homo Sapiens
uccaucuucuauuaccagcacuuacaagcacu

SEQ ID NO: 64655 - RNA, 32 nt, Homo Sapiens
aacaccggcccgccgucgcggcagcugcuuca

SEQ ID NO: 64656 - RNA, 32 nt, Homo Sapiens
aaagcgggcguuuuggaagauaccggaaguag

SEQ ID NO: 64657 - RNA, 32 nt, Homo Sapiens
gacucggaggagcaggaggcgagguccgccgg

SEQ ID NO: 64658 - RNA, 32 nt, Homo Sapiens
ucuacugugauucagacagaucauggugguca

SEQ ID NO: 64659 - RNA, 32 nt, Homo Sapiens
gcaaaggugucaggaaauaaaauguacugaca

SEQ ID NO: 64660 - RNA, 32 nt, Homo Sapiens
acucgcccuuucugcuggagcccaggcccagu

SEQ ID NO: 64661 - RNA, 32 nt, Homo Sapiens
cucuuccgguaaaccgcuccccggccugacag

SEQ ID NO: 64662 - RNA, 32 nt, Homo Sapiens
ugugcgccagagugacucacacccugggaaaa

SEQ ID NO: 64663 - RNA, 32 nt, Homo Sapiens
cuccgcucgccugcccgcacgccgcccgccac

SEQ ID NO: 64664 - RNA, 32 nt, Homo Sapiens
gauuuaaaggagccccagauaaacaugauggg

SEQ ID NO: 64665 - RNA, 32 nt, Homo Sapiens
ugggggcggagcggggcggggcugagugggug

SEQ ID NO: 64666 - RNA, 32 nt, Homo Sapiens
ccauacagaacaaaugagaaauuagaagcgau

SEQ ID NO: 64667 - RNA, 32 nt, Homo Sapiens
acugccaagggcaagaucauggcuuuuggagg

SEQ ID NO: 64668 - RNA, 32 nt, Homo Sapiens
augaaugccugcaacagugccugguacacagu

SEQ ID NO: 64669 - RNA, 32 nt, Homo Sapiens
uggcugggucauuuuaauaguuagagaugagg

SEQ ID NO: 64670 - RNA, 32 nt, Homo Sapiens
caaagagcacauucuuguaauuuucaaauuuu

SEQ ID NO: 64671 - RNA, 32 nt, Homo Sapiens
uuucuuuuucuuuuuuuuuuuacauuuccaaa

SEQ ID NO: 64672 - RNA, 32 nt, Homo Sapiens
uugccuuguaaugaguaauaauuuagaaagua

SEQ ID NO: 64673 - RNA, 32 nt, Homo Sapiens
ucccuuugaagaagggaaaccuugugcuucuu

SEQ ID NO: 64674 - RNA, 32 nt, Homo Sapiens
cacgcuguaccgccagccccagcccugccugc

SEQ ID NO: 64675 - RNA, 32 nt, Homo Sapiens
cauggagaggccgccugaaggugagcgggcau

SEQ ID NO: 64676 - RNA, 32 nt, Homo Sapiens
uggauuuggugcucagccuccccaaggacaag

SEQ ID NO: 64677 - RNA, 32 nt, Homo Sapiens
gguguauuuuucuggugucacuucugugccuu

SEQ ID NO: 64678 - RNA, 32 nt, Homo Sapiens
gaaagaacacuaguccuaccucugccacuaau

SEQ ID NO: 64679 - RNA, 32 nt, Homo Sapiens
agagaguagcuuuaggaagagaauaaacacau

SEQ ID NO: 64680 - RNA, 32 nt, Homo Sapiens
uugccagaaaauacaagguuauaauaaaacua

SEQ ID NO: 64681 - RNA, 32 nt, Homo Sapiens
gcccaacucuacaucaucuacccauuuuagcu

SEQ ID NO: 64682 - RNA, 30 nt, Homo Sapiens
ugcccugucugugccaugagugucccuggc

SEQ ID NO: 64683 - RNA, 32 nt, Homo Sapiens
guaggcccggcgcggggcgcggacuccgggca

SEQ ID NO: 64684 - RNA, 30 nt, Homo Sapiens
acuauugucugugcuaguaagaaaaagaaa

SEQ ID NO: 64685 - RNA, 32 nt, Homo Sapiens
gcaucccuagcgucuuuaaaagaguaggcagg

SEQ ID NO: 64686 - RNA, 32 nt, Homo Sapiens
agaauauguuaaugaacauauagaagccuuuc

SEQ ID NO: 64687 - RNA, 32 nt, Homo Sapiens
gaagaugcuacaaaaccucaugccuacugucu

SEQ ID NO: 64688 - RNA, 30 nt, Homo Sapiens
uuucgguuucguuucccgccggcgucucca

SEQ ID NO: 64689 - RNA, 32 nt, Homo Sapiens
aguguaaguuaccaugguggcagcuuaguuuu

SEQ ID NO: 64690 - RNA, 32 nt, Homo Sapiens
acuggcagcucagcugcagaugcuuuucucaa

SEQ ID NO: 64691 - RNA, 32 nt, Homo Sapiens
acagugcagcugcauuuaucagagcacuauug

SEQ ID NO: 64692 - RNA, 32 nt, Homo Sapiens
ucuaccaggagauccaggagcggggccugaac

SEQ ID NO: 64693 - RNA, 32 nt, Homo Sapiens
ucccuggauggcuggaggaacuccagaaaaua

SEQ ID NO: 64694 - RNA, 32 nt, Homo Sapiens
ggacggaagugacaggguguggugguggagug

SEQ ID NO: 64695 - RNA, 32 nt, Homo Sapiens
gugucaaauuaacaggaaagucagcuuaaagg

SEQ ID NO: 64696 - RNA, 32 nt, Homo Sapiens
guaauacuucuuguguguaugcacaugaaacu

SEQ ID NO: 64697 - RNA, 32 nt, Homo Sapiens
agauaauuccaagaaugcauauuugggcuggg

SEQ ID NO: 64698 - RNA, 32 nt, Homo Sapiens
gaggagaaauaugauggaugaagagcucugua

SEQ ID NO: 64699 - RNA, 32 nt, Homo Sapiens
cauagcuuuuauucauuagcugugauuuuugu

SEQ ID NO: 64700 - RNA, 32 nt, Homo Sapiens
ugaagguacgccccgcgcucugcucuggagag

SEQ ID NO: 64701 - RNA, 32 nt, Homo Sapiens
gaggccgcuuuuuuaggccuaguugaaaguca

SEQ ID NO: 64702 - RNA, 32 nt, Homo Sapiens
ggcugcggggcaauugaaaaagagccggcgag

SEQ ID NO: 64703 - RNA, 32 nt, Homo Sapiens
cccucuggccccaggcaaccuuagccccucag

SEQ ID NO: 64704 - RNA, 32 nt, Homo Sapiens
cgccgccgccaugaaccccggauaugacugcc

SEQ ID NO: 64705 - RNA, 32 nt, Homo Sapiens
acauguggcaccauccuugguugcccuccugg

SEQ ID NO: 64706 - RNA, 29 nt, Homo Sapiens
cuaaauguauuaccaucugacccacuucc

SEQ ID NO: 64707 - RNA, 32 nt, Homo Sapiens
uccagccuccaugucaccacguggugaauggc

SEQ ID NO: 64708 - RNA, 32 nt, Homo Sapiens
cgucccccagggccucggcggccgcucugccu

SEQ ID NO: 64709 - RNA, 32 nt, Homo Sapiens
agauuguucauuuacugugugccacauauuag

SEQ ID NO: 64710 - RNA, 32 nt, Homo Sapiens
ucugggcaggugguuugucccuucuuccccuu

SEQ ID NO: 64711 - RNA, 32 nt, Homo Sapiens
uugucacugaagggaggccccuggaagccagc

SEQ ID NO: 64712 - RNA, 32 nt, Homo Sapiens
uauucaaaaaggaaauaaaaaauacucaauau

SEQ ID NO: 64713 - RNA, 32 nt, Homo Sapiens
aaaacaaaacaaaacagaacagaacacugaau

SEQ ID NO: 64714 - RNA, 32 nt, Homo Sapiens
cuccugucccaggacaucaucuccgggcccaa

SEQ ID NO: 64715 - RNA, 32 nt, Homo Sapiens
cugccugagcaggccuaguucuccugugaagc

SEQ ID NO: 64716 - RNA, 32 nt, Homo Sapiens
aguugcucugggagucuucagaauagaaacua

SEQ ID NO: 64717 - RNA, 32 nt, Homo Sapiens
agucuugguacugaaugcugcagauaacagca

SEQ ID NO: 64718 - RNA, 32 nt, Homo Sapiens
gggccuugucuuuuccucucucugccucaguu

SEQ ID NO: 64719 - RNA, 32 nt, Homo Sapiens
ggcaggagaaaguaugagagccucaggaaacc

SEQ ID NO: 64720 - RNA, 32 nt, Homo Sapiens
ccucucccgcgccccaggaaaccgccggcguu

SEQ ID NO: 64721 - RNA, 32 nt, Homo Sapiens
ccucuguccagaaggagcugcccugaggacca

SEQ ID NO: 64722 - RNA, 32 nt, Homo Sapiens
cacugccuucucugccgaugacauccuggcuc

SEQ ID NO: 64723 - RNA, 32 nt, Homo Sapiens
gggagcugccgccaggagcugucaccaugacg

SEQ ID NO: 64724 - RNA, 32 nt, Homo Sapiens
cgguacaucuggaaaugaagugccaggaauag

SEQ ID NO: 64725 - RNA, 32 nt, Homo Sapiens
aagucugaaugagaagauggcaggacgucuga

SEQ ID NO: 64726 - RNA, 32 nt, Homo Sapiens
acgaacaggauuuuaaugauaauuaaauuugc

SEQ ID NO: 64727 - RNA, 32 nt, Homo Sapiens
guucauagaagggaguggggcuggggaaaggg

SEQ ID NO: 64728 - RNA, 32 nt, Homo Sapiens
uggccaguccuggucagcuuucccucugauga

SEQ ID NO: 64729 - RNA, 32 nt, Homo Sapiens
gcccuggagauugagggucccuggacacuccc

SEQ ID NO: 64730 - RNA, 32 nt, Homo Sapiens
ggucuuugggagguaagcaagucauaagugua

SEQ ID NO: 64731 - RNA, 32 nt, Homo Sapiens
gugccugucacccacauggucugccauccuaa

SEQ ID NO: 64732 - RNA, 32 nt, Homo Sapiens
auuaggagggucacagcuaggacgccgggacc

SEQ ID NO: 64733 - RNA, 32 nt, Homo Sapiens
acucccucuguagugaggccucugccaugucc

SEQ ID NO: 64734 - RNA, 32 nt, Homo Sapiens
ccuaaaguuaaaccucauacuucuagaccucc

SEQ ID NO: 64735 - RNA, 32 nt, Homo Sapiens
ucaaaaugaaacaaaaauguauuagacauuac

SEQ ID NO: 64736 - RNA, 32 nt, Homo Sapiens
agaacgagauggcagaaaaaagaaauauccua

SEQ ID NO: 64737 - RNA, 29 nt, Homo Sapiens
uccgggcggggacacucagggcgcgacgc

SEQ ID NO: 64738 - RNA, 32 nt, Homo Sapiens
cuugucgcuuguuuuucuuugaaguuuuauac

SEQ ID NO: 64739 - RNA, 32 nt, Homo Sapiens
cuccaggcccggcggcuucucauuucucgcgg

SEQ ID NO: 64740 - RNA, 32 nt, Homo Sapiens
uuuccagauguggggaucugguaaauuucagu

SEQ ID NO: 64741 - RNA, 32 nt, Homo Sapiens
uaaccuaacuccagccagacuaauaggggcau

SEQ ID NO: 64742 - RNA, 32 nt, Homo Sapiens
uuuuucccaugaguugggggucggguggggga

SEQ ID NO: 64743 - RNA, 32 nt, Homo Sapiens
ccaucuuugugauuauuuccuuaauauuuuuu

SEQ ID NO: 64744 - RNA, 32 nt, Homo Sapiens
accgggacuggagccagggucuggggagagca

SEQ ID NO: 64745 - RNA, 32 nt, Homo Sapiens
uggaccagcuccuggggaugagccaggcuggg

SEQ ID NO: 64746 - RNA, 32 nt, Homo Sapiens
ucccuuuuugaguaauuuucugaugggaggaa

SEQ ID NO: 64747 - RNA, 32 nt, Homo Sapiens
uccuucucuuucuccuucuuggaugucugaua

SEQ ID NO: 64748 - RNA, 32 nt, Homo Sapiens
ugaagggaauuaacagauaguaucaagcgcag

SEQ ID NO: 64749 - RNA, 32 nt, Homo Sapiens
ggagccgcacgcggcccagggcagcggucuag

SEQ ID NO: 64750 - RNA, 32 nt, Homo Sapiens
uccacaacaauaucucuuucugagaaauuguu

SEQ ID NO: 64751 - RNA, 32 nt, Homo Sapiens
uuuuaauugucaugguuacaaacuacagaccu

SEQ ID NO: 64752 - RNA, 32 nt, Homo Sapiens
ugggcaacagagcgaggucccguuucuuaaaa

SEQ ID NO: 64753 - RNA, 32 nt, Homo Sapiens
cugugucuccacccaaaucucaucuugaauug

SEQ ID NO: 64754 - RNA, 32 nt, Homo Sapiens
gaccacguggacuccgcccacacagagcuggc

SEQ ID NO: 64755 - RNA, 32 nt, Homo Sapiens
aacacacauaagaaugcacucuggagaaagac

SEQ ID NO: 64756 - RNA, 27 nt, Homo Sapiens
agaauauucuucuucacuucuuccuug

SEQ ID NO: 64757 - RNA, 32 nt, Homo Sapiens
gaagcagcucguugagaaacauuuguuuucaa

SEQ ID NO: 64758 - RNA, 32 nt, Homo Sapiens
cgcuagccgccugggaauuuaagggacccaca

SEQ ID NO: 64759 - RNA, 28 nt, Homo Sapiens
ggugggagacuuuuacauuugagaggua

SEQ ID NO: 64760 - RNA, 32 nt, Homo Sapiens
aaguggagaaucuaaguguaaaaaagaaauaa

SEQ ID NO: 64761 - RNA, 32 nt, Homo Sapiens
uauggggcuucccccaucugaugcccaagagg

SEQ ID NO: 64762 - RNA, 32 nt, Homo Sapiens
ucugggcuccagccaucuuuguggaaaggggg

SEQ ID NO: 64763 - RNA, 32 nt, Homo Sapiens
ccuaccagcuccuccagcccugccgggcacau

SEQ ID NO: 64764 - RNA, 32 nt, Homo Sapiens
uaggcauuuuuuuuuuuuuuuacaaugugcaa

SEQ ID NO: 64765 - RNA, 31 nt, Homo Sapiens
gagauugggaacugccugcccuuggccucuu

SEQ ID NO: 64766 - RNA, 32 nt, Homo Sapiens
gcugagcccgagauucgcuccucccccucaug

SEQ ID NO: 64767 - RNA, 32 nt, Homo Sapiens
ugucaagcccuucccagcuccuccuccgauga

SEQ ID NO: 64768 - RNA, 31 nt, Homo Sapiens
cgcugcugugaguuggggauaugauagucag

SEQ ID NO: 64769 - RNA, 32 nt, Homo Sapiens
ugccgguggggugcaggcgccauuugucuugg

SEQ ID NO: 64770 - RNA, 32 nt, Homo Sapiens
uuuggugaaaaacaacuuccuuuuuauuugug

SEQ ID NO: 64771 - RNA, 32 nt, Homo Sapiens
gagagagacagccucggacugcaguugccuaa

SEQ ID NO: 64772 - RNA, 32 nt, Homo Sapiens
aaaaucugcuccagccuaaagaguuaagggaa

SEQ ID NO: 64773 - RNA, 32 nt, Homo Sapiens
ucaauuaaugcaaaaacaaaaggggagauguu

SEQ ID NO: 64774 - RNA, 32 nt, Homo Sapiens
ugcccccagcucugccgacacuugacccagac

SEQ ID NO: 64775 - RNA, 32 nt, Homo Sapiens
ggcuuccauaugccacucuguaccccaaagag

SEQ ID NO: 64776 - RNA, 32 nt, Homo Sapiens
aucuggaaggauuuugucgucugccucccagu

SEQ ID NO: 64777 - RNA, 32 nt, Homo Sapiens
ccccaaagaacuuuacggagacuugcaaccua

SEQ ID NO: 64778 - RNA, 32 nt, Homo Sapiens
ccggaagaagauaaagaaaacaacacgcuugu

SEQ ID NO: 64779 - RNA, 32 nt, Homo Sapiens
acucucagggacaagcagcccccuuugcugcc

SEQ ID NO: 64780 - RNA, 32 nt, Homo Sapiens
ccgagcacauagagcuuuuuaauagcacuaac

SEQ ID NO: 64781 - RNA, 32 nt, Homo Sapiens
uucacugucagaagcugaacugacuugggggc

SEQ ID NO: 64782 - RNA, 32 nt, Homo Sapiens
ccugucgaggcaagaggcugcagaggcgggga

SEQ ID NO: 64783 - RNA, 32 nt, Homo Sapiens
ugcagccgccgucgggggaagggcgccacagg

SEQ ID NO: 64784 - RNA, 31 nt, Homo Sapiens
auucucugaaacacuugagauguuugagcua

SEQ ID NO: 64785 - RNA, 32 nt, Homo Sapiens
ugauuaagacuuuucacaaaauaaucauauaa

SEQ ID NO: 64786 - RNA, 32 nt, Homo Sapiens
cucaacucccaauaaacugcuugcuggagccu

SEQ ID NO: 64787 - RNA, 32 nt, Homo Sapiens
ugugggauggggacggugggcaggacaggcgg

SEQ ID NO: 64788 - RNA, 32 nt, Homo Sapiens
aggucaaaggccuugagaaucuaugugugccu

SEQ ID NO: 64789 - RNA, 32 nt, Homo Sapiens
caaaagacgauuacaaugcucucagugucugc

SEQ ID NO: 64790 - RNA, 32 nt, Homo Sapiens
agcagaacagaaaagaaacagugggauuaggg

SEQ ID NO: 64791 - RNA, 32 nt, Homo Sapiens
cccgcggcccguuuucgggaggaggcggaggg

SEQ ID NO: 64792 - RNA, 32 nt, Homo Sapiens
uguucaaaaaagucccuaaagguaguauuaag

SEQ ID NO: 64793 - RNA, 32 nt, Homo Sapiens
augugaaaacaguuguguaugauugcauuaaa

SEQ ID NO: 64794 - RNA, 32 nt, Homo Sapiens
caauuuuuuauguuaacuauuucugugagaaa

SEQ ID NO: 64795 - RNA, 32 nt, Homo Sapiens
cacugagacacccugguccucccggaagggca

SEQ ID NO: 64796 - RNA, 32 nt, Homo Sapiens
cggagggguuucggaccgaagggaagaagcug

SEQ ID NO: 64797 - RNA, 32 nt, Homo Sapiens
aaacuuuuguccgugcgcggguggagcucagu

SEQ ID NO: 64798 - RNA, 32 nt, Homo Sapiens
aaaaaugguaagaauguacaccucaagggugg

SEQ ID NO: 64799 - RNA, 32 nt, Homo Sapiens
aggagcugccucuggaagcagauggggcucug

SEQ ID NO: 64800 - RNA, 32 nt, Homo Sapiens
gaauuuugcagaucugaggaagagggaugcau

SEQ ID NO: 64801 - RNA, 32 nt, Homo Sapiens
cuuccuuugggguuggcgcaggugggccaggc

SEQ ID NO: 64802 - RNA, 32 nt, Homo Sapiens
uucgaagaaccaugaugaaggcugguucgaau

SEQ ID NO: 64803 - RNA, 32 nt, Homo Sapiens
agacaaauaaauaacaaacaaacagccacaaa

SEQ ID NO: 64804 - RNA, 32 nt, Homo Sapiens
gugcccuugcuggcugccccagcaggcaccca

SEQ ID NO: 64805 - RNA, 32 nt, Homo Sapiens
uaaaauaauaauagcuuucauuuacauagugc

SEQ ID NO: 64806 - RNA, 32 nt, Homo Sapiens
cccccucccuuccuuuaucgugucucaaggua

SEQ ID NO: 64807 - RNA, 32 nt, Homo Sapiens
gggugggggaggagggcgcacgggcugagcgg

SEQ ID NO: 64808 - RNA, 32 nt, Homo Sapiens
auuaucaaaguaaaauugggcauuccaugcua

SEQ ID NO: 64809 - RNA, 32 nt, Homo Sapiens
cccgggaggcugccgcgccagcugcgccgagc

SEQ ID NO: 64810 - RNA, 32 nt, Homo Sapiens
uugucuuaugugaaaaauuaacuuuuugugug

SEQ ID NO: 64811 - RNA, 32 nt, Homo Sapiens
ccugcuuccagaauuuggaaauccuaguuucc

SEQ ID NO: 64812 - RNA, 29 nt, Homo Sapiens
uauaugaugaagauuguaggacugucuuc

SEQ ID NO: 64813 - RNA, 32 nt, Homo Sapiens
gcagagacacacgcggagaggaggagaggcug

SEQ ID NO: 64814 - RNA, 32 nt, Homo Sapiens
caggaaagugcuuuuuaccuaagacuuccuuc

SEQ ID NO: 64815 - RNA, 32 nt, Homo Sapiens
cucuaaauauuuugauaauuucuggauugaug

SEQ ID NO: 64816 - RNA, 32 nt, Homo Sapiens
ugugaaggucacuucccuucucauggagucag

SEQ ID NO: 64817 - RNA, 32 nt, Homo Sapiens
cuggcuaggacuuccaguauuuauugaauaga

SEQ ID NO: 64818 - RNA, 30 nt, Homo Sapiens
aagcucgccuuccugccgccggaggccacc

SEQ ID NO: 64819 - RNA, 32 nt, Homo Sapiens
acuggcggguggccguaaacguccugcguugc

SEQ ID NO: 64820 - RNA, 32 nt, Homo Sapiens
gacagagcuggagaguuuuuugaaauggcagu

SEQ ID NO: 64821 - RNA, 32 nt, Homo Sapiens
augauauagucucaacuaauaggugcaauuug

SEQ ID NO: 64822 - RNA, 27 nt, Homo Sapiens
aaaauauuaaacuguugugaugucaag

SEQ ID NO: 64823 - RNA, 32 nt, Homo Sapiens
acaaauuggcuaaaaguacugauccauuaucc

SEQ ID NO: 64824 - RNA, 32 nt, Homo Sapiens
cacugauaguuagcaggguccugcuguggccu

SEQ ID NO: 64825 - RNA, 32 nt, Homo Sapiens
ucugcuccagcauagguucacaaaguacaguc

SEQ ID NO: 64826 - RNA, 32 nt, Homo Sapiens
cggcggccgcggaucccggcggcgauccgacc

SEQ ID NO: 64827 - RNA, 32 nt, Homo Sapiens
uccuucucugucagggcuggggugcucugucu

SEQ ID NO: 64828 - RNA, 28 nt, Homo Sapiens
ccccuuaaagauuauauuugaaauguuu

SEQ ID NO: 64829 - RNA, 32 nt, Homo Sapiens
cuggucaggaggaggagcaccauuggggcggg

SEQ ID NO: 64830 - RNA, 28 nt, Homo Sapiens
gccaugggcaagucagcuuccaaacagu

SEQ ID NO: 64831 - RNA, 32 nt, Homo Sapiens
cacuuuauuuuuguuuggugaugaggggaaga

SEQ ID NO: 64832 - RNA, 32 nt, Homo Sapiens
agcaaaagcagaacacacucuuguuugaugua

SEQ ID NO: 64833 - RNA, 32 nt, Homo Sapiens
uuucucaacuaguucagccuagcugaauuuuc

SEQ ID NO: 64834 - RNA, 32 nt, Homo Sapiens
aguccuucauuuccgaggaaaaagaagcaacu

SEQ ID NO: 64835 - RNA, 32 nt, Homo Sapiens
guaauucugaaguuuuuuaaauuuauggcuau

SEQ ID NO: 64836 - RNA, 32 nt, Homo Sapiens
caggcgcgggcacgaggcgaaacccagcgcug

SEQ ID NO: 64837 - RNA, 32 nt, Homo Sapiens
ggcugaaagaucuggagaagucccuggagagg

SEQ ID NO: 64838 - RNA, 32 nt, Homo Sapiens
ugggccucagggugggcaacguuagggguuug

SEQ ID NO: 64839 - RNA, 32 nt, Homo Sapiens
agccuggggcuccagcagcagccaggcggauc

SEQ ID NO: 64840 - RNA, 32 nt, Homo Sapiens
gaccaacccagcugccuuaccuuauucugggg

SEQ ID NO: 64841 - RNA, 32 nt, Homo Sapiens
agaaauuugaguaaaauaaucaucugauuuuu

SEQ ID NO: 64842 - RNA, 32 nt, Homo Sapiens
ucaacugugugugagcugcacuggccucacag

SEQ ID NO: 64843 - RNA, 32 nt, Homo Sapiens
gcucauuguuuuuauucagauuucccuaauua

SEQ ID NO: 64844 - RNA, 32 nt, Homo Sapiens
cuuaucugccugcuccucucccuccuaaggaa

SEQ ID NO: 64845 - RNA, 32 nt, Homo Sapiens
ugugaaaugucagagaaaaauaaaagucacuu

SEQ ID NO: 64846 - RNA, 32 nt, Homo Sapiens
gcagcuuucaguauuaucuccaaacaucacug

SEQ ID NO: 64847 - RNA, 32 nt, Homo Sapiens
cuggauucuuugaggggauccuggaugugugu

SEQ ID NO: 64848 - RNA, 32 nt, Homo Sapiens
agcgagcauggccuuacugggcagccagcacu

SEQ ID NO: 64849 - RNA, 32 nt, Homo Sapiens
cccagccccauuggugucuccuccagcccccu

SEQ ID NO: 64850 - RNA, 27 nt, Homo Sapiens
uuguaguccuucuucccacccccuugc

SEQ ID NO: 64851 - RNA, 32 nt, Homo Sapiens
uacuacuauuuauguuucuucaaguaaacuuu

SEQ ID NO: 64852 - RNA, 32 nt, Homo Sapiens
guagucgccugggccgcccccggcccagcccu

SEQ ID NO: 64853 - RNA, 32 nt, Homo Sapiens
gcuugcacuccagccugggugacagagugaga

SEQ ID NO: 64854 - RNA, 32 nt, Homo Sapiens
cucguuugagggauugggguggaccugggguu

SEQ ID NO: 64855 - RNA, 32 nt, Homo Sapiens
uuuuuaaagguuucuuuuuuaacuuugaaauu

SEQ ID NO: 64856 - RNA, 32 nt, Homo Sapiens
gcagagcuggcuucugauagaagugcucggga

SEQ ID NO: 64857 - RNA, 32 nt, Homo Sapiens
ccacaggauacagaaacugaaagcuggggaau

SEQ ID NO: 64858 - RNA, 32 nt, Homo Sapiens
caccugacucagcggcagcuucugccgcuggg

SEQ ID NO: 64859 - RNA, 32 nt, Homo Sapiens
uuggcuccagcaguggcaccaauaccaguagc

SEQ ID NO: 64860 - RNA, 32 nt, Homo Sapiens
gaauuaaaauaccaucugccguaugcagcaag

SEQ ID NO: 64861 - RNA, 32 nt, Homo Sapiens
caaagagagacucuaccucaaaaaauaaaaau

SEQ ID NO: 64862 - RNA, 32 nt, Homo Sapiens
gagauuagcaugaaagguaaucugaaacacag

SEQ ID NO: 64863 - RNA, 32 nt, Homo Sapiens
cgggcuggguggcaggcugagcgugcagcaac

SEQ ID NO: 64864 - RNA, 32 nt, Homo Sapiens
caguccagcaaauugcuagucagggugaauug

SEQ ID NO: 64865 - RNA, 32 nt, Homo Sapiens
cauuucuacuaaaaauacaaaaaauuagccag

SEQ ID NO: 64866 - RNA, 32 nt, Homo Sapiens
ccgugcgcagaauggaaacagugggccuggau

SEQ ID NO: 64867 - RNA, 32 nt, Homo Sapiens
guuguauugucuuauuguauugucuuuucaaa

SEQ ID NO: 64868 - RNA, 32 nt, Homo Sapiens
uaucccuacugauaguuccucuuucucauuuu

SEQ ID NO: 64869 - RNA, 32 nt, Homo Sapiens
cuauuuaugugggccuucaguggaugggcagu

SEQ ID NO: 64870 - RNA, 32 nt, Homo Sapiens
agcuggacguaccucaguuguccccaucauca

SEQ ID NO: 64871 - RNA, 32 nt, Homo Sapiens
uguccuuuccuguggaggcuccacucaaagcu

SEQ ID NO: 64872 - RNA, 32 nt, Homo Sapiens
cagaggaggaagaugagggcacggacagaccu

SEQ ID NO: 64873 - RNA, 32 nt, Homo Sapiens
auguaugguuugaaaauauuuucauuauacau

SEQ ID NO: 64874 - RNA, 32 nt, Homo Sapiens
gaacuccgucguccuccgcgcgcgccugcccg

SEQ ID NO: 64875 - RNA, 32 nt, Homo Sapiens
uggcgcggguggccuggaagagccugcagagc

SEQ ID NO: 64876 - RNA, 32 nt, Homo Sapiens
uuuauuaaauuucagucagaaggucagcauuu

SEQ ID NO: 64877 - RNA, 32 nt, Homo Sapiens
cuugagugugcuuuguauaaaggucuguacaa

SEQ ID NO: 64878 - RNA, 32 nt, Homo Sapiens
gugcuggcugccgcuguucaggcggccgggaa

SEQ ID NO: 64879 - RNA, 32 nt, Homo Sapiens
ccugacccaagcauggcgggcugaguccagga

SEQ ID NO: 64880 - RNA, 32 nt, Homo Sapiens
guagauccugcauucacccauucaauaaauau

SEQ ID NO: 64881 - RNA, 32 nt, Homo Sapiens
ucuaggcuaugaaacugacuucuaggcuauga

SEQ ID NO: 64882 - RNA, 32 nt, Homo Sapiens
agcaugacagaugaucaaaaccacuuuuuccc

SEQ ID NO: 64883 - RNA, 32 nt, Homo Sapiens
uccuucuccuccucuuuuuuuucuuuuccacu

SEQ ID NO: 64884 - RNA, 32 nt, Homo Sapiens
cuccacugcugcucccggguccugcugcccga

SEQ ID NO: 64885 - RNA, 27 nt, Homo Sapiens
cuguccuccuucuuccucugcagauug

SEQ ID NO: 64886 - RNA, 32 nt, Homo Sapiens
uagaaauguaaauucuuuggccccaucccaga

SEQ ID NO: 64887 - RNA, 32 nt, Homo Sapiens
uccugucucccacuucccacucguuccccucc

SEQ ID NO: 64888 - RNA, 32 nt, Homo Sapiens
agggauagcauuaggagauauacuaacguaaa

SEQ ID NO: 64889 - RNA, 32 nt, Homo Sapiens
cacccuccacacucucaggccaucacagaaca

SEQ ID NO: 64890 - RNA, 32 nt, Homo Sapiens
auucuugcaacuaccucugugacuaguggaga

SEQ ID NO: 64891 - RNA, 32 nt, Homo Sapiens
cccaggcccgggaggauccccccacguuggcu

SEQ ID NO: 64892 - RNA, 30 nt, Homo Sapiens
gagcgcagcgcgcagcccggugcagcccug

SEQ ID NO: 64893 - RNA, 32 nt, Homo Sapiens
ccaaagcauaggaagcugggaauaagcaaaca

SEQ ID NO: 64894 - RNA, 32 nt, Homo Sapiens
agauaauguuuuacuacuaggaauuacaaacu

SEQ ID NO: 64895 - RNA, 32 nt, Homo Sapiens
gaugaggcuggggauagucaggggcuggauca

SEQ ID NO: 64896 - RNA, 32 nt, Homo Sapiens
aaaguauauugcaaauacauguuuccucauga

SEQ ID NO: 64897 - RNA, 32 nt, Homo Sapiens
uugaauugggcuuucugcccuuguugaguuuu

SEQ ID NO: 64898 - RNA, 32 nt, Homo Sapiens
agcgcccccgcacuccccgcgucucgcacacu

SEQ ID NO: 64899 - RNA, 32 nt, Homo Sapiens
agugcugagauuacaagcgugaaccaccaugc

SEQ ID NO: 64900 - RNA, 32 nt, Homo Sapiens
uaacuugugugauuucaaauuaaacuugcauu

SEQ ID NO: 64901 - RNA, 32 nt, Homo Sapiens
ccuugaugugacauuuuuuucuuaaccuuguu

SEQ ID NO: 64902 - RNA, 32 nt, Homo Sapiens
ucauugguuaaccauggacuacucuguccacg

SEQ ID NO: 64903 - RNA, 32 nt, Homo Sapiens
gacccggagcagccucucggaagccggagugg

SEQ ID NO: 64904 - RNA, 32 nt, Homo Sapiens
cgccgcuccgcggagaguccguggaucucaca

SEQ ID NO: 64905 - RNA, 32 nt, Homo Sapiens
agcucacguggcggccaugcaugguuuguggc

SEQ ID NO: 64906 - RNA, 32 nt, Homo Sapiens
cggagcugguaggggagcugccccccagagca

SEQ ID NO: 64907 - RNA, 32 nt, Homo Sapiens
ggaccugaugggguagcuggggugugggguug

SEQ ID NO: 64908 - RNA, 32 nt, Homo Sapiens
cuuccauuucuucacaaggaugaugauggaaa

SEQ ID NO: 64909 - RNA, 32 nt, Homo Sapiens
auggaauuagcagcuaugacuccaacagacag

SEQ ID NO: 64910 - RNA, 32 nt, Homo Sapiens
agccaaguuggcaacuuggaagcuucucccgg

SEQ ID NO: 64911 - RNA, 32 nt, Homo Sapiens
caauucgacuucuuuccaugggcguguucuaa

SEQ ID NO: 64912 - RNA, 32 nt, Homo Sapiens
auuuuguuaugaacacaguaaggcacaguagu

SEQ ID NO: 64913 - RNA, 32 nt, Homo Sapiens
uacagguuuguagccuaggagcaauaggccau

SEQ ID NO: 64914 - RNA, 32 nt, Homo Sapiens
uuuugccagaggaacaucaaagggcagagcaa

SEQ ID NO: 64915 - RNA, 32 nt, Homo Sapiens
ggcauuuauaugcugugcuggaauauuguuac

SEQ ID NO: 64916 - RNA, 32 nt, Homo Sapiens
ugagaaggcaagauggggacgugugggugcuc

SEQ ID NO: 64917 - RNA, 32 nt, Homo Sapiens
acuaguuuaucucugcuucucacuuuacuggu

SEQ ID NO: 64918 - RNA, 32 nt, Homo Sapiens
agggagaacucagauaaaaauauuuucauacg

SEQ ID NO: 64919 - RNA, 32 nt, Homo Sapiens
aauucuugcauucuuuacccuuccaucacuau

SEQ ID NO: 64920 - RNA, 29 nt, Homo Sapiens
gaccauggggacgggaaggcguggggguc

SEQ ID NO: 64921 - RNA, 32 nt, Homo Sapiens
ccagaaauucagaaacguaauucuuacauugu

SEQ ID NO: 64922 - RNA, 32 nt, Homo Sapiens
cagggaugcuaccagagcucaaggcugucacc

SEQ ID NO: 64923 - RNA, 32 nt, Homo Sapiens
ugcagggagaaggauuccauuuuucuucucag

SEQ ID NO: 64924 - RNA, 32 nt, Homo Sapiens
auaucauguucauauacauuuauuaggaaucu

SEQ ID NO: 64925 - RNA, 32 nt, Homo Sapiens
acaccucaucaaacagaacaaauaaguuauau

SEQ ID NO: 64926 - RNA, 29 nt, Homo Sapiens
uuuuaaugguguuucagaagcugaacuuc

SEQ ID NO: 64927 - RNA, 32 nt, Homo Sapiens
auaguacuuuuccucuugucuacuccagacag

SEQ ID NO: 64928 - RNA, 32 nt, Homo Sapiens
cuaguccgccgcccggcgccauggcgggcugc

SEQ ID NO: 64929 - RNA, 32 nt, Homo Sapiens
gcggcccccggguugguggugacgccuggaau

SEQ ID NO: 64930 - RNA, 32 nt, Homo Sapiens
uccggugccgacggagccgggccggaaggugu

SEQ ID NO: 64931 - RNA, 32 nt, Homo Sapiens
ggccaggcaucauauuaaguauuucauauaua

SEQ ID NO: 64932 - RNA, 32 nt, Homo Sapiens
cuguucuggaacacauugcugcacuuuggaaa

SEQ ID NO: 64933 - RNA, 32 nt, Homo Sapiens
aucaguuuuuaaaagauauacuuucucuuugu

SEQ ID NO: 64934 - RNA, 32 nt, Homo Sapiens
agugagccgagauugcacuacugcacuccaga

SEQ ID NO: 64935 - RNA, 32 nt, Homo Sapiens
gcagccuggccuccccgcacaggcuguggcuu

SEQ ID NO: 64936 - RNA, 32 nt, Homo Sapiens
uggguaccccucuucucaucacuuccuguucc

SEQ ID NO: 64937 - RNA, 32 nt, Homo Sapiens
agcugggcgugguggcacgugccuguaauccc

SEQ ID NO: 64938 - RNA, 32 nt, Homo Sapiens
agugccucagagaugccuggauguggccccuc

SEQ ID NO: 64939 - RNA, 32 nt, Homo Sapiens
cuucuuuuccucuggggagaagcaaauucaug

SEQ ID NO: 64940 - RNA, 32 nt, Homo Sapiens
gccccaguccccccggcccaggcggccgacga

SEQ ID NO: 64941 - RNA, 30 nt, Homo Sapiens
cauggauggggcgacacggggagaacauac

SEQ ID NO: 64942 - RNA, 32 nt, Homo Sapiens
cggcugugucaaccaggaccugcuggacuccc

SEQ ID NO: 64943 - RNA, 32 nt, Homo Sapiens
ucaaugcacugacauuguuggccaaagccaaa

SEQ ID NO: 64944 - RNA, 32 nt, Homo Sapiens
uaggaagauauuaaaaguagaugagaggacac

SEQ ID NO: 64945 - RNA, 32 nt, Homo Sapiens
ccugacaaauauuuuagaagcuaauguaggac

SEQ ID NO: 64946 - RNA, 32 nt, Homo Sapiens
ugcuuucccuccccaaacccaucagacaggua

SEQ ID NO: 64947 - RNA, 32 nt, Homo Sapiens
ggaaguacagaaaacaugcagaaagcacagaa

SEQ ID NO: 64948 - RNA, 32 nt, Homo Sapiens
gcuguaacugucaaacuugccuuguauuagaa

SEQ ID NO: 64949 - RNA, 32 nt, Homo Sapiens
uguuggcuuuuuuuuuuuuuuagaaaguuaga

SEQ ID NO: 64950 - RNA, 32 nt, Homo Sapiens
gaguacaguggcacaaucauggcucacugcag

SEQ ID NO: 64951 - RNA, 32 nt, Homo Sapiens
aaaugacugcugaaucaacaguuuuuauguua

SEQ ID NO: 64952 - RNA, 32 nt, Homo Sapiens
gaauuugccugccugggcaggaaagggacuau

SEQ ID NO: 64953 - RNA, 32 nt, Homo Sapiens
uuucagaauuuaaucuuugaggaaaagguuug

SEQ ID NO: 64954 - RNA, 32 nt, Homo Sapiens
aauaggaaugaaauuaauuuuguaucuacuga

SEQ ID NO: 64955 - RNA, 32 nt, Homo Sapiens
aucuagcuaauuuuuuaaaucuuaaguagaga

SEQ ID NO: 64956 - RNA, 30 nt, Homo Sapiens
aaaaaagguaaaagacguaauauguggccu

SEQ ID NO: 64957 - RNA, 32 nt, Homo Sapiens
ugcaggaaauggucuuugggucggguauucag

SEQ ID NO: 64958 - RNA, 32 nt, Homo Sapiens
cugggaguucccuuugggaugccuaggugggg

SEQ ID NO: 64959 - RNA, 32 nt, Homo Sapiens
gagaggaggaagaggggucuggaaagaaaccc

SEQ ID NO: 64960 - RNA, 32 nt, Homo Sapiens
cuucccagacaguugggcggccaggcaagcgc

SEQ ID NO: 64961 - RNA, 32 nt, Homo Sapiens
gagaaucgccccagccucuuuggaaugccauu

SEQ ID NO: 64962 - RNA, 32 nt, Homo Sapiens
aaaguuauguagaaguauaauaaaaucccuac

SEQ ID NO: 64963 - RNA, 32 nt, Homo Sapiens
ccuuugagaauuuggccuuguuuuaacuaagg

SEQ ID NO: 64964 - RNA, 32 nt, Homo Sapiens
ccacugcccgucugccggagcgguucuggccc

SEQ ID NO: 64965 - RNA, 32 nt, Homo Sapiens
guugggaugcuuugccaggucaugugcuuauu

SEQ ID NO: 64966 - RNA, 32 nt, Homo Sapiens
caaucuggcuugggagaugcuuuccaguugca

SEQ ID NO: 64967 - RNA, 32 nt, Homo Sapiens
aauaauuuuuaaaaagcuguaaaaguucccag

SEQ ID NO: 64968 - RNA, 32 nt, Homo Sapiens
acccuacauacacagacacacacacacacaca

SEQ ID NO: 64969 - RNA, 32 nt, Homo Sapiens
gcguugcuggcaccgcuggcgccgcggucucg

SEQ ID NO: 64970 - RNA, 32 nt, Homo Sapiens
ccaucccucccucuccccuuuuggagucuccu

SEQ ID NO: 64971 - RNA, 32 nt, Homo Sapiens
agugaaccucgucuucauccucauccucucca

SEQ ID NO: 64972 - RNA, 32 nt, Homo Sapiens
cguuuugcaguguggacacguguuugaagcag

SEQ ID NO: 64973 - RNA, 32 nt, Homo Sapiens
ggauggaggcgucuacaccugcaccgcccaga

SEQ ID NO: 64974 - RNA, 32 nt, Homo Sapiens
uugacacaaagauuacauuuuucagaccccca

SEQ ID NO: 64975 - RNA, 32 nt, Homo Sapiens
ucccugguuuaaaaggcagucuguucuauuga

SEQ ID NO: 64976 - RNA, 32 nt, Homo Sapiens
aaaugggaaugggagagggcagcucuacaaag

SEQ ID NO: 64977 - RNA, 32 nt, Homo Sapiens
gaggggaacguggagcuccuucugccuccuuu

SEQ ID NO: 64978 - RNA, 31 nt, Homo Sapiens
ggaagcguaccaggaguccuuccagccugaa

SEQ ID NO: 64979 - RNA, 32 nt, Homo Sapiens
uuaaagucagcccuaaagaacaugguauauua

SEQ ID NO: 64980 - RNA, 32 nt, Homo Sapiens
aucgagaggaagauccauuaguucuuugggga

SEQ ID NO: 64981 - RNA, 32 nt, Homo Sapiens
gcugcugagacaagaggcgaagggcagcggag

SEQ ID NO: 64982 - RNA, 32 nt, Homo Sapiens
uuuuccugcucuuuggcccuggaucgagaaaa

SEQ ID NO: 64983 - RNA, 31 nt, Homo Sapiens
cgccugcugccggucgccacuggagaucucg

SEQ ID NO: 64984 - RNA, 32 nt, Homo Sapiens
ucagcuccucccucacgguggccucuuucggc

SEQ ID NO: 64985 - RNA, 32 nt, Homo Sapiens
cugcagagccacguggccgccacgcagugugc

SEQ ID NO: 64986 - RNA, 32 nt, Homo Sapiens
cgaggggagcgcgcuccggugaccucuagcgc

SEQ ID NO: 64987 - RNA, 32 nt, Homo Sapiens
cuaauaggagguacaaucugcuuuuguuuguc

SEQ ID NO: 64988 - RNA, 32 nt, Homo Sapiens
gauuccaaccuuccuuuuuuuaaauuuucucc

SEQ ID NO: 64989 - RNA, 27 nt, Homo Sapiens
caaugggacaggagcuugacggccuca

SEQ ID NO: 64990 - RNA, 32 nt, Homo Sapiens
gccuccgacucgggcccggcccggaggggaca

SEQ ID NO: 64991 - RNA, 32 nt, Homo Sapiens
cucuaucgaugacacuguuuauagaaacacag

SEQ ID NO: 64992 - RNA, 32 nt, Homo Sapiens
ucccacucuguccaccaagugggggguagcac

SEQ ID NO: 64993 - RNA, 32 nt, Homo Sapiens
uacauuugacuucuagaaaacauuuuuguggc

SEQ ID NO: 64994 - RNA, 32 nt, Homo Sapiens
ccgguccagccgcggccggcgccuggcuguga

SEQ ID NO: 64995 - RNA, 32 nt, Homo Sapiens
uauugguugggucccuucgagguaagcgggug

SEQ ID NO: 64996 - RNA, 32 nt, Homo Sapiens
gcuccccgggcggcugcaucccggggcugccc

SEQ ID NO: 64997 - RNA, 32 nt, Homo Sapiens
gucacugucucucuccuuccccuuccaggucu

SEQ ID NO: 64998 - RNA, 32 nt, Homo Sapiens
cagagcccaggcgugcggugcuucucgggaac

SEQ ID NO: 64999 - RNA, 32 nt, Homo Sapiens
aguugaauauaaaaaucaguagauaaaaagug

SEQ ID NO: 65000 - RNA, 32 nt, Homo Sapiens
caccuguaaucccagcacuuuuggaggccaag

SEQ ID NO: 65001 - RNA, 32 nt, Homo Sapiens
gcaaaaaggcuuuaacuuccauuauucagauu

SEQ ID NO: 65002 - RNA, 32 nt, Homo Sapiens
cgagcugcgcgccgaggacgccggugaagucc

SEQ ID NO: 65003 - RNA, 32 nt, Homo Sapiens
uuuguccucagccccagcagccgcccggcugg

SEQ ID NO: 65004 - RNA, 32 nt, Homo Sapiens
auuggcaucuuugguaauggagggagccuguu

SEQ ID NO: 65005 - RNA, 32 nt, Homo Sapiens
ucccucuguaauuauuguguauucuacccugu

SEQ ID NO: 65006 - RNA, 32 nt, Homo Sapiens
aucuaaaugggcaaggacgcccugcccucacu

SEQ ID NO: 65007 - RNA, 32 nt, Homo Sapiens
ggcguuggcaggacucgcugcugcugcugcug

SEQ ID NO: 65008 - RNA, 32 nt, Homo Sapiens
ggauugaaucacagaaaaacagcaaauggcuc

SEQ ID NO: 65009 - RNA, 32 nt, Homo Sapiens
uggcuacaucuucaaaauauuucuuuugugcc

SEQ ID NO: 65010 - RNA, 32 nt, Homo Sapiens
ugcagccccucuucuuuuaguucuagacugaa

SEQ ID NO: 65011 - RNA, 32 nt, Homo Sapiens
cuauaaaugcaaacuuaagaggaaaauaauga

SEQ ID NO: 65012 - RNA, 32 nt, Homo Sapiens
ugacaaaggugaggagggaccacaaaggagag

SEQ ID NO: 65013 - RNA, 32 nt, Homo Sapiens
ggugugggagcaguccuggggcuuccuggugg

SEQ ID NO: 65014 - RNA, 32 nt, Homo Sapiens
aagcagagcacauaugggguccauuuuugcac

SEQ ID NO: 65015 - RNA, 32 nt, Homo Sapiens
cccugggccccaugaauaaccaggcgcggacc

SEQ ID NO: 65016 - RNA, 32 nt, Homo Sapiens
agggggcagggagaggagggcggcgggagcug

SEQ ID NO: 65017 - RNA, 32 nt, Homo Sapiens
gggccggcauugcuccuuuccgccauguggag

SEQ ID NO: 65018 - RNA, 30 nt, Homo Sapiens
cccggguagcgcguagagccggcgcgaugc

SEQ ID NO: 65019 - RNA, 32 nt, Homo Sapiens
ggcaggaugaaaaaccacagucugagagcuug

SEQ ID NO: 65020 - RNA, 32 nt, Homo Sapiens
aguuuaacucggggcgcaaagcgagccggugg

SEQ ID NO: 65021 - RNA, 32 nt, Homo Sapiens
gggcugcauucccccagaggaguguaacugcu

SEQ ID NO: 65022 - RNA, 32 nt, Homo Sapiens
uugaggcgauuuaauuaaauggcugugaugca

SEQ ID NO: 65023 - RNA, 31 nt, Homo Sapiens
cuagcacugccgagacugugcucuggccucc

SEQ ID NO: 65024 - RNA, 32 nt, Homo Sapiens
guaauaaaaugaauucugauucgagcucuguc

SEQ ID NO: 65025 - RNA, 32 nt, Homo Sapiens
ugugagguggcuuuuccucggggcaacccagg

SEQ ID NO: 65026 - RNA, 32 nt, Homo Sapiens
cacaacauaccagaaucucugggacacauuua

SEQ ID NO: 65027 - RNA, 32 nt, Homo Sapiens
uguccccugcccuccccuccccaacuaccccc

SEQ ID NO: 65028 - RNA, 32 nt, Homo Sapiens
cuguguuuugaagauuugagggaagggcugac

SEQ ID NO: 65029 - RNA, 32 nt, Homo Sapiens
auuguaggaggaaauuucuuuuuuauuaaaag

SEQ ID NO: 65030 - RNA, 32 nt, Homo Sapiens
cuaauaaaauuugagagggaagaucugaucuc

SEQ ID NO: 65031 - RNA, 32 nt, Homo Sapiens
uauagggcccucacuagggccaguguauucac

SEQ ID NO: 65032 - RNA, 32 nt, Homo Sapiens
caccugcugcugcugcugcugcuaaucuucag

SEQ ID NO: 65033 - RNA, 32 nt, Homo Sapiens
uuugucaagcuuuuaaugauuuucccugccac

SEQ ID NO: 65034 - RNA, 30 nt, Homo Sapiens
agccucaagcaauccacccaucuuggccuc

SEQ ID NO: 65035 - RNA, 32 nt, Homo Sapiens
gugccuccugcuuuacaacaguucuggccuca

SEQ ID NO: 65036 - RNA, 32 nt, Homo Sapiens
cuggucacuuccgacuuccaccagcuaaucuu

SEQ ID NO: 65037 - RNA, 32 nt, Homo Sapiens
cuccuugcucggccgggccgcggccaugggag

SEQ ID NO: 65038 - RNA, 31 nt, Homo Sapiens
acaaaucuagguaauuaagguugugaauuuu

SEQ ID NO: 65039 - RNA, 32 nt, Homo Sapiens
gcgccugagcgcggcgugggagccuugggagc

SEQ ID NO: 65040 - RNA, 32 nt, Homo Sapiens
agaucaugagagaugaagagaggaauauagua

SEQ ID NO: 65041 - RNA, 29 nt, Homo Sapiens
ugccugcuggcuuuccuguugacuggccc

SEQ ID NO: 65042 - RNA, 32 nt, Homo Sapiens
uacauuuguuauuugcagaggaguguuguaua

SEQ ID NO: 65043 - RNA, 30 nt, Homo Sapiens
ccaccaugccagcugggggccgggccggga

SEQ ID NO: 65044 - RNA, 32 nt, Homo Sapiens
uuguuaauugguuagguuuugacauuccugac

SEQ ID NO: 65045 - RNA, 32 nt, Homo Sapiens
uaguuaaaaaagacaaaagaagggagagccau

SEQ ID NO: 65046 - RNA, 32 nt, Homo Sapiens
cccugcgguuggcggccuccucguggagcgga

SEQ ID NO: 65047 - RNA, 32 nt, Homo Sapiens
cuaaaauacuaaaaaggcagaaacuuuuaaaa

SEQ ID NO: 65048 - RNA, 32 nt, Homo Sapiens
gccguggggcgcgggcggccgagccuauacau

SEQ ID NO: 65049 - RNA, 32 nt, Homo Sapiens
ggauuuuugucaacuaacucugugaacauagc

SEQ ID NO: 65050 - RNA, 32 nt, Homo Sapiens
ucuccccgcgggugggggcggggaaauucaua

SEQ ID NO: 65051 - RNA, 32 nt, Homo Sapiens
cuauuugaacaagugggccauuagccagauuu

SEQ ID NO: 65052 - RNA, 32 nt, Homo Sapiens
cagaugaauccuccuauauaaauguagauuua

SEQ ID NO: 65053 - RNA, 32 nt, Homo Sapiens
aucagaaggcgcggaccuggaggaggcgcccc

SEQ ID NO: 65054 - RNA, 32 nt, Homo Sapiens
gccaaggccugggccuggccaagggucaggga

SEQ ID NO: 65055 - RNA, 32 nt, Homo Sapiens
uguuugagauagggucuugcucuaucaccuag

SEQ ID NO: 65056 - RNA, 32 nt, Homo Sapiens
accgacgcggagaggaagggaagccgcauccc

SEQ ID NO: 65057 - RNA, 32 nt, Homo Sapiens
ugguacuugcuucuuguuguuuuauuguuucc

SEQ ID NO: 65058 - RNA, 32 nt, Homo Sapiens
acugugaauaugagaaauacagaagaaaauaa

SEQ ID NO: 65059 - RNA, 32 nt, Homo Sapiens
uucauuuuuacuuuuucuuauuuuuaaaauua

SEQ ID NO: 65060 - RNA, 32 nt, Homo Sapiens
gccccgagucgagcgcacacggcgggcgcccc

SEQ ID NO: 65061 - RNA, 32 nt, Homo Sapiens
accuggcugagcucaguccucuggaggaagcc

SEQ ID NO: 65062 - RNA, 32 nt, Homo Sapiens
cccuuuggguugugggcagcucccugaacaag

SEQ ID NO: 65063 - RNA, 32 nt, Homo Sapiens
uaagcaucugguuuuaaaauuuuuaugcuaau

SEQ ID NO: 65064 - RNA, 32 nt, Homo Sapiens
gccccccggcggagaggcggccucgacggugc

SEQ ID NO: 65065 - RNA, 32 nt, Homo Sapiens
guuuuauauucaauaaugauaauuuugaagau

SEQ ID NO: 65066 - RNA, 32 nt, Homo Sapiens
gccucgggggaagagaaggggccacuucgcgg

SEQ ID NO: 65067 - RNA, 32 nt, Homo Sapiens
cauccugccucccauccacaugguccaaucag

SEQ ID NO: 65068 - RNA, 32 nt, Homo Sapiens
uuucaucacuaaaauaugcuauuuuaaaaucu

SEQ ID NO: 65069 - RNA, 32 nt, Homo Sapiens
ucuauaugucuggguucuugucuuuugugguc

SEQ ID NO: 65070 - RNA, 32 nt, Homo Sapiens
aaucaugaaauucuaaccuaaaaggaaaacau

SEQ ID NO: 65071 - RNA, 32 nt, Homo Sapiens
caaggugggcccagaagcugccgcuggcugag

SEQ ID NO: 65072 - RNA, 32 nt, Homo Sapiens
ccuaagcccucccccaccccuggaaagguccc

SEQ ID NO: 65073 - RNA, 32 nt, Homo Sapiens
cuuauuugaaccaugaauauuauacuacucag

SEQ ID NO: 65074 - RNA, 32 nt, Homo Sapiens
uuauuuuauuuuuguugugggauucuuaagca

SEQ ID NO: 65075 - RNA, 32 nt, Homo Sapiens
uguuuguuguuguuaauaucaacuagaggcac

SEQ ID NO: 65076 - RNA, 32 nt, Homo Sapiens
uagugcaggagcuugugucugcugaggauggc

SEQ ID NO: 65077 - RNA, 32 nt, Homo Sapiens
ucagcucagaggucagaacugaggagggaagu

SEQ ID NO: 65078 - RNA, 32 nt, Homo Sapiens
ccagcauggucccgccaccucccccaccccac

SEQ ID NO: 65079 - RNA, 32 nt, Homo Sapiens
auaaauacugaauuaucgaacacuugccaggc

SEQ ID NO: 65080 - RNA, 32 nt, Homo Sapiens
uuacgcgcucaucguuggacgggcugccaugc

SEQ ID NO: 65081 - RNA, 32 nt, Homo Sapiens
gcccagaccuauggauugaaagcgugugcuuu

SEQ ID NO: 65082 - RNA, 28 nt, Homo Sapiens
ugagaauaagauccacauuugaacucau

SEQ ID NO: 65083 - RNA, 32 nt, Homo Sapiens
caaccuuggugacaccuuagaauagcagugau

SEQ ID NO: 65084 - RNA, 32 nt, Homo Sapiens
uuaauugcaauaauuucuaaaaauguguuuga

SEQ ID NO: 65085 - RNA, 32 nt, Homo Sapiens
gaaucccgcgcgcugcccacgauucgcuucug

SEQ ID NO: 65086 - RNA, 32 nt, Homo Sapiens
acaggggucugugugaacagaagacccaagga

SEQ ID NO: 65087 - RNA, 32 nt, Homo Sapiens
acccaccucggcugccucccccacuccacugu

SEQ ID NO: 65088 - RNA, 32 nt, Homo Sapiens
gaggacgcgggccugguggccgaggccgaggc

SEQ ID NO: 65089 - RNA, 32 nt, Homo Sapiens
uccuagugcgggaccccgccucagggaagugg

SEQ ID NO: 65090 - RNA, 32 nt, Homo Sapiens
acugacagugagaaucaagaaccucaacauga

SEQ ID NO: 65091 - RNA, 32 nt, Homo Sapiens
cgcaggauccccgcguccucggucgccgcguc

SEQ ID NO: 65092 - RNA, 32 nt, Homo Sapiens
auuugaagauuaaguauaauuuuaccacuuuu

SEQ ID NO: 65093 - RNA, 32 nt, Homo Sapiens
cuggagaccuagcuccauguuccuccuccucu

SEQ ID NO: 65094 - RNA, 32 nt, Homo Sapiens
ccgccgcccaccggcccucccgccagcuccuc

SEQ ID NO: 65095 - RNA, 32 nt, Homo Sapiens
gugucugccagucaagcuucacaggcauugug

SEQ ID NO: 65096 - RNA, 32 nt, Homo Sapiens
cucggcugcucuccuccuccggcugggagggg

SEQ ID NO: 65097 - RNA, 32 nt, Homo Sapiens
cuguuguggagauuuccuuuuauucuugacac

SEQ ID NO: 65098 - RNA, 32 nt, Homo Sapiens
cccagccacugaggcccgcucuggccagggga

SEQ ID NO: 65099 - RNA, 32 nt, Homo Sapiens
gucuaagaaaucaagagguuucacauuaaaau

SEQ ID NO: 65100 - RNA, 32 nt, Homo Sapiens
uuucuuuuucuuuaauaaauggaaucauauaa

SEQ ID NO: 65101 - RNA, 32 nt, Homo Sapiens
acugccuuuggacaagaugcuuaacgucucug

SEQ ID NO: 65102 - RNA, 32 nt, Homo Sapiens
acuggaggaaaacacaccccggucucacauua

SEQ ID NO: 65103 - RNA, 32 nt, Homo Sapiens
uguauaauguuguuaaaguacauacuacugua

SEQ ID NO: 65104 - RNA, 32 nt, Homo Sapiens
uaucaugugcuuaguuuguuuauuuuucucca

SEQ ID NO: 65105 - RNA, 32 nt, Homo Sapiens
cauucagguuccagcccugcguuuccuauauu

SEQ ID NO: 65106 - RNA, 32 nt, Homo Sapiens
gcuggcuugguagaagacagaauucgaucugc

SEQ ID NO: 65107 - RNA, 32 nt, Homo Sapiens
ggccagcugacaaagauguucuuccucuuccc

SEQ ID NO: 65108 - RNA, 32 nt, Homo Sapiens
auaaugggagaugcccugguagggcuggcaag

SEQ ID NO: 65109 - RNA, 32 nt, Homo Sapiens
aggaggcugcgcggccccggcuccucagcucc

SEQ ID NO: 65110 - RNA, 32 nt, Homo Sapiens
cagaaaguuccgaggaccugcuaaaaucagcu

SEQ ID NO: 65111 - RNA, 32 nt, Homo Sapiens
aguugaugccuggcuucaaaucuuuaaagaau

SEQ ID NO: 65112 - RNA, 32 nt, Homo Sapiens
gcacugaugcuguuuucucuugucugauuuga

SEQ ID NO: 65113 - RNA, 32 nt, Homo Sapiens
gaccccagcgcucuccacggaccagccagagg

SEQ ID NO: 65114 - RNA, 32 nt, Homo Sapiens
uguggauagucuuucccucuccccuccuguuu

SEQ ID NO: 65115 - RNA, 32 nt, Homo Sapiens
cacagaacccucaagacaaggaugacagagcu

SEQ ID NO: 65116 - RNA, 32 nt, Homo Sapiens
uuuguaugcucuuagagcccaacagccaaggc

SEQ ID NO: 65117 - RNA, 32 nt, Homo Sapiens
uuaggaauuuaaaccagaagacuuugaaguug

SEQ ID NO: 65118 - RNA, 32 nt, Homo Sapiens
cuuugcccacugacccggcaguucugagccug

SEQ ID NO: 65119 - RNA, 32 nt, Homo Sapiens
ccugcauuccccagccaccaccaggccuggag

SEQ ID NO: 65120 - RNA, 32 nt, Homo Sapiens
cuucaagacgacagcucuguaucugccaugug

SEQ ID NO: 65121 - RNA, 27 nt, Homo Sapiens
cauuguuccuucuucauacugcugcuc

SEQ ID NO: 65122 - RNA, 32 nt, Homo Sapiens
aagcccgugccucgucgccgcuuaccggcuug

SEQ ID NO: 65123 - RNA, 32 nt, Homo Sapiens
cuugcuugcccggcucgcucacgggucguuga

SEQ ID NO: 65124 - RNA, 32 nt, Homo Sapiens
aucucaucuggggagucugagguccugaaaga

SEQ ID NO: 65125 - RNA, 32 nt, Homo Sapiens
aaccccuauggcgaccagagccagcccgggca

SEQ ID NO: 65126 - RNA, 31 nt, Homo Sapiens
aguuacugcucgacuguaccaagggcuggaa

SEQ ID NO: 65127 - RNA, 32 nt, Homo Sapiens
cauaauuguaaguuugcucuguuuuagccuuu

SEQ ID NO: 65128 - RNA, 32 nt, Homo Sapiens
aggcucgaaggcgccgcgggcuggggucggug

SEQ ID NO: 65129 - RNA, 32 nt, Homo Sapiens
acauugucaagcuuaugaagguuccaaucaga

SEQ ID NO: 65130 - RNA, 32 nt, Homo Sapiens
gugauacacauuuggaggagacguauccagca

SEQ ID NO: 65131 - RNA, 32 nt, Homo Sapiens
gaaggaggcggauacggcuggaccuuacccgg

SEQ ID NO: 65132 - RNA, 32 nt, Homo Sapiens
cucagguugcugugggaucucagugugccccu

SEQ ID NO: 65133 - RNA, 32 nt, Homo Sapiens
cauccuuuaccccuuuuccccauucacugugc

SEQ ID NO: 65134 - RNA, 32 nt, Homo Sapiens
aggaggaggaggcaaaguuagaguuggggcug

SEQ ID NO: 65135 - RNA, 32 nt, Homo Sapiens
cugguccggcacuucuuccgcggcccaggcug

SEQ ID NO: 65136 - RNA, 32 nt, Homo Sapiens
gccccuacccccuguugcgaagacggugacuu

SEQ ID NO: 65137 - RNA, 32 nt, Homo Sapiens
auuuuuauuuuuaauuugauaauuguagguca

SEQ ID NO: 65138 - RNA, 32 nt, Homo Sapiens
gcugcacccaggccacgugcugcccgacgagg

SEQ ID NO: 65139 - RNA, 32 nt, Homo Sapiens
cugaauuuuucuuuuccaucacaauguaagau

SEQ ID NO: 65140 - RNA, 32 nt, Homo Sapiens
uuaaccauaaaauggacaacugagaauucucc

SEQ ID NO: 65141 - RNA, 32 nt, Homo Sapiens
auugaggaauaauuuacagauaguaaaauuua

SEQ ID NO: 65142 - RNA, 32 nt, Homo Sapiens
caccucaaggccagccagggcccggccuccug

SEQ ID NO: 65143 - RNA, 32 nt, Homo Sapiens
aggugauugcaagacuaacaaggagacucaau

SEQ ID NO: 65144 - RNA, 32 nt, Homo Sapiens
uuagcggccgggcgcaguggcucacgccugua

SEQ ID NO: 65145 - RNA, 32 nt, Homo Sapiens
cuccuggacuuccaucugucaucaggagaaca

SEQ ID NO: 65146 - RNA, 32 nt, Homo Sapiens
aaacaaauuauaacacuguauuguaggauuua

SEQ ID NO: 65147 - RNA, 32 nt, Homo Sapiens
aucucugcugugaacacaccacuuccuuauua

SEQ ID NO: 65148 - RNA, 32 nt, Homo Sapiens
cccuuuuccccuccccucugaggugcugacuc

SEQ ID NO: 65149 - RNA, 32 nt, Homo Sapiens
aaacauaccuuuuuuguuuguuuggaagaucc

SEQ ID NO: 65150 - RNA, 32 nt, Homo Sapiens
ucuguuucccuuaaugauacaagucucuguac

SEQ ID NO: 65151 - RNA, 32 nt, Homo Sapiens
agucaguauaccauuuuaccuauaaaaugcaa

SEQ ID NO: 65152 - RNA, 32 nt, Homo Sapiens
gcauuuggggacgggucacccuuccuagagug

SEQ ID NO: 65153 - RNA, 32 nt, Homo Sapiens
aaguagcaaggcauaauguaauuuagcuaguu

SEQ ID NO: 65154 - RNA, 32 nt, Homo Sapiens
agaacuggaagcucguguuuccgguacugggu

SEQ ID NO: 65155 - RNA, 32 nt, Homo Sapiens
guauuuugauaaaauucacuuauuguaugugu

SEQ ID NO: 65156 - RNA, 32 nt, Homo Sapiens
gggacauugccacuucugcccuggaacucgug

SEQ ID NO: 65157 - RNA, 32 nt, Homo Sapiens
cccggaggcagacagucucccagagcugaggg

SEQ ID NO: 65158 - RNA, 32 nt, Homo Sapiens
caugccuagagcauucugaccucuucuuguuu

SEQ ID NO: 65159 - RNA, 32 nt, Homo Sapiens
uucuuuaauuccuuauugaaucuuaugugaua

SEQ ID NO: 65160 - RNA, 32 nt, Homo Sapiens
ucuuuauaaauuguaauuuaauagauuaucuc

SEQ ID NO: 65161 - RNA, 32 nt, Homo Sapiens
uugggugcuaagauccugaggagcucgagguu

SEQ ID NO: 65162 - RNA, 32 nt, Homo Sapiens
acaggaaauaaacugguuaaaacuacaugaug

SEQ ID NO: 65163 - RNA, 32 nt, Homo Sapiens
ucugcacccagggaccaugugcucuccacacc

SEQ ID NO: 65164 - RNA, 32 nt, Homo Sapiens
gaguaggguucaaccuuguugaacuaaucaua

SEQ ID NO: 65165 - RNA, 32 nt, Homo Sapiens
aaugaauacuaaaaucauaccacaagauacua

SEQ ID NO: 65166 - RNA, 32 nt, Homo Sapiens
ugcuucaauuuuauuuuuuuuaagaaaacaaa

SEQ ID NO: 65167 - RNA, 32 nt, Homo Sapiens
aucuuuuuauuuugauuuaugaagaacguacc

SEQ ID NO: 65168 - RNA, 32 nt, Homo Sapiens
gcagguggauaagagugaaauauuuuaaaaau

SEQ ID NO: 65169 - RNA, 28 nt, Homo Sapiens
caggaccagaggaccaggaugaugacaa

SEQ ID NO: 65170 - RNA, 32 nt, Homo Sapiens
gaaucuaaauuaaccacagagaauuacuauaa

SEQ ID NO: 65171 - RNA, 32 nt, Homo Sapiens
cuaaaauggacauuuucuuuuauuaucaguua

SEQ ID NO: 65172 - RNA, 32 nt, Homo Sapiens
uuuauuaauaaaauaugacauguguugaacaa

SEQ ID NO: 65173 - RNA, 32 nt, Homo Sapiens
uaagggacauuucuauaaaaauacuacaauag

SEQ ID NO: 65174 - RNA, 32 nt, Homo Sapiens
aguugucauuuucaaaaacuucuauauaggug

SEQ ID NO: 65175 - RNA, 32 nt, Homo Sapiens
ccgaggccgcucacacgaggcccgcagcgggg

SEQ ID NO: 65176 - RNA, 32 nt, Homo Sapiens
guguaauggaaauuuuucuguaauuuucuuac

SEQ ID NO: 65177 - RNA, 32 nt, Homo Sapiens
gacagucacagagggacaagaucaagaugcgc

SEQ ID NO: 65178 - RNA, 32 nt, Homo Sapiens
gaugguggccagaaauaaagggaccagcccuu

SEQ ID NO: 65179 - RNA, 32 nt, Homo Sapiens
ccagauaguuacgguuaaccacugcuuuggca

SEQ ID NO: 65180 - RNA, 32 nt, Homo Sapiens
gccacgggaagcccuuccugugccuucucagg

SEQ ID NO: 65181 - RNA, 32 nt, Homo Sapiens
ugggaaacccggcggaggagccaggcucccgg

SEQ ID NO: 65182 - RNA, 32 nt, Homo Sapiens
ugcugacuuuugugugaagaaucguguucuug

SEQ ID NO: 65183 - RNA, 32 nt, Homo Sapiens
cugaagaugcuuccgaagauuugaaaauagga

SEQ ID NO: 65184 - RNA, 32 nt, Homo Sapiens
cugccgcccucccgggcccccuccucggccca

SEQ ID NO: 65185 - RNA, 32 nt, Homo Sapiens
guaaacugcuggaagggggcgauggcuguggc

SEQ ID NO: 65186 - RNA, 32 nt, Homo Sapiens
uggucgcucccucuuuuuaucuguuggcagga

SEQ ID NO: 65187 - RNA, 32 nt, Homo Sapiens
aaaauaacgauaaaagacagugaaagaaaaua

SEQ ID NO: 65188 - RNA, 32 nt, Homo Sapiens
cggacugaacagagggagcuccagcucugugc

SEQ ID NO: 65189 - RNA, 32 nt, Homo Sapiens
uauguugaaguuaauuugaauugacugauuuu

SEQ ID NO: 65190 - RNA, 32 nt, Homo Sapiens
ucuauuuaccuaaacaauaaauguagagauua

SEQ ID NO: 65191 - RNA, 32 nt, Homo Sapiens
cuacauauuuucccucuuucugggauauuuac

SEQ ID NO: 65192 - RNA, 32 nt, Homo Sapiens
accuccugucccuccuaaaacacgccaacccc

SEQ ID NO: 65193 - RNA, 32 nt, Homo Sapiens
gucuccaggugaauguaauuuacuuccgagua

SEQ ID NO: 65194 - RNA, 32 nt, Homo Sapiens
acaucuuaauuuuguuauaaaaucucacaaac

SEQ ID NO: 65195 - RNA, 32 nt, Homo Sapiens
ggaagagauggggucuuacuauguuguccagg

SEQ ID NO: 65196 - RNA, 32 nt, Homo Sapiens
ccauuuggggcccccuccuucucugucagggc

SEQ ID NO: 65197 - RNA, 30 nt, Homo Sapiens
uaugaagucugugcaaaaagcuuuaaaaaa

SEQ ID NO: 65198 - RNA, 32 nt, Homo Sapiens
cauauuagggauguauacauuuaaucaccuaa

SEQ ID NO: 65199 - RNA, 32 nt, Homo Sapiens
gcagaagucggggccuuggaggcgugacuuuc

SEQ ID NO: 65200 - RNA, 32 nt, Homo Sapiens
cucacccucccucucuuccugcagggccuggg

SEQ ID NO: 65201 - RNA, 32 nt, Homo Sapiens
auuugcuucuaaaaaucagguauaaaguucag

SEQ ID NO: 65202 - RNA, 32 nt, Homo Sapiens
agguggaggggaggccaguguacauguaaaug

SEQ ID NO: 65203 - RNA, 32 nt, Homo Sapiens
augaauuuaagccccaagauacagcuaaauac

SEQ ID NO: 65204 - RNA, 32 nt, Homo Sapiens
guugcaaaugauaucauuaugaaaaauuaaua

SEQ ID NO: 65205 - RNA, 32 nt, Homo Sapiens
gcaaggccagcuucuuccugucguggcuugcg

SEQ ID NO: 65206 - RNA, 29 nt, Homo Sapiens
uauauauaaaguuaguaguucuaauaucc

SEQ ID NO: 65207 - RNA, 32 nt, Homo Sapiens
gccaucaaucagacaugaaaucucuggcucca

SEQ ID NO: 65208 - RNA, 32 nt, Homo Sapiens
guggagcaugagcagaaccgccgagggucacu

SEQ ID NO: 65209 - RNA, 32 nt, Homo Sapiens
uggagagugaggaggaggaggagccuuggucc

SEQ ID NO: 65210 - RNA, 32 nt, Homo Sapiens
guugucuucccaggucuuucucuucucaucaa

SEQ ID NO: 65211 - RNA, 32 nt, Homo Sapiens
aaauaagucugcucugcacucaaagcugaaga

SEQ ID NO: 65212 - RNA, 32 nt, Homo Sapiens
cuccaugaauccuaguuagggauugauaggaa

SEQ ID NO: 65213 - RNA, 31 nt, Homo Sapiens
agacaguaaaacaggggcagagccuggaauu

SEQ ID NO: 65214 - RNA, 32 nt, Homo Sapiens
gccugcucuuucuguuaugucauguuucauau

SEQ ID NO: 65215 - RNA, 32 nt, Homo Sapiens
uuuaaaucguaaaaaauguacauuugcccuuu

SEQ ID NO: 65216 - RNA, 32 nt, Homo Sapiens
uuauucaagugaaagaaagagaagggaauugc

SEQ ID NO: 65217 - RNA, 32 nt, Homo Sapiens
uugaaugauugggaugauacaucauugaacug

SEQ ID NO: 65218 - RNA, 32 nt, Homo Sapiens
uggcagugucuccauguaacuaguaaauuguc

SEQ ID NO: 65219 - RNA, 32 nt, Homo Sapiens
cugggggagguggaaggggcggggggcggggc

SEQ ID NO: 65220 - RNA, 32 nt, Homo Sapiens
agauugcuuuuauaaaaacaaacaaacaaaca

SEQ ID NO: 65221 - RNA, 32 nt, Homo Sapiens
uuuucaagccccaggcuggcugcuucagaagc

SEQ ID NO: 65222 - RNA, 32 nt, Homo Sapiens
auacuuacaguauuuucuuuuuguaggaguuu

SEQ ID NO: 65223 - RNA, 32 nt, Homo Sapiens
uauuacaccaucuuuauuuguaccuuaccguc

SEQ ID NO: 65224 - RNA, 32 nt, Homo Sapiens
cucugauccuuuugcccuuccuucccauaacg

SEQ ID NO: 65225 - RNA, 32 nt, Homo Sapiens
uugguucuccccucuggccccuggagagaagg

SEQ ID NO: 65226 - RNA, 32 nt, Homo Sapiens
gccaaaauauaaaguauauuuccuaguuucuu

SEQ ID NO: 65227 - RNA, 32 nt, Homo Sapiens
ccucugggcacgccugcuggccgacccacuga

SEQ ID NO: 65228 - RNA, 32 nt, Homo Sapiens
uugauuuuuuaaaaauacuguucagaaugcuu

SEQ ID NO: 65229 - RNA, 32 nt, Homo Sapiens
uauaguggaggggaggaaaggggggugauacc

SEQ ID NO: 65230 - RNA, 32 nt, Homo Sapiens
aggaccauuugccugcccuguucacacaaccc

SEQ ID NO: 65231 - RNA, 32 nt, Homo Sapiens
gguguccaaggagcagagaaaacuacuagaug

SEQ ID NO: 65232 - RNA, 32 nt, Homo Sapiens
uucugucucuacaguugugccaucuuccucca

SEQ ID NO: 65233 - RNA, 32 nt, Homo Sapiens
ugcccggagcagguacauccacagagcaaagg

SEQ ID NO: 65234 - RNA, 32 nt, Homo Sapiens
uuguucagaaaagaaggcugcaaaugacuucu

SEQ ID NO: 65235 - RNA, 32 nt, Homo Sapiens
agucaagaaugaauuauuuuucugacuaaagu

SEQ ID NO: 65236 - RNA, 32 nt, Homo Sapiens
aagagcaaguacaucaaaauguagaagguaaa

SEQ ID NO: 65237 - RNA, 32 nt, Homo Sapiens
cccugcugcauucucuguccaucugucuguuu

SEQ ID NO: 65238 - RNA, 32 nt, Homo Sapiens
aggcuuuagugaucuaagaucaugccacugca

SEQ ID NO: 65239 - RNA, 32 nt, Homo Sapiens
ucauguugugauucucuuuucuuaguggagug

SEQ ID NO: 65240 - RNA, 32 nt, Homo Sapiens
cagcaccagauaagcuucagugcucuccuuuc

SEQ ID NO: 65241 - RNA, 32 nt, Homo Sapiens
aagaggacgaggggcgcaaggcuuccuccggg

SEQ ID NO: 65242 - RNA, 32 nt, Homo Sapiens
ccuguaaagcaucuuaaagcagaaagcaaggc

SEQ ID NO: 65243 - RNA, 32 nt, Homo Sapiens
aggccugccagcgcuuucuggacuggcugugc

SEQ ID NO: 65244 - RNA, 32 nt, Homo Sapiens
cuugcuaacuuuccuuuuuuucuuuuuuuuuc

SEQ ID NO: 65245 - RNA, 32 nt, Homo Sapiens
accaugugcuucaaggcuagaggucuuggugg

SEQ ID NO: 65246 - RNA, 32 nt, Homo Sapiens
gagauccagccaaagagcugcccccaggggua

SEQ ID NO: 65247 - RNA, 31 nt, Homo Sapiens
guguuuuuguuuucucuuccaagggccgucc

SEQ ID NO: 65248 - RNA, 32 nt, Homo Sapiens
cagacauaagaaaaaauuaccuaaaugaagac

SEQ ID NO: 65249 - RNA, 32 nt, Homo Sapiens
acaggcugcccucuccuucucugcccccaccc

SEQ ID NO: 65250 - RNA, 32 nt, Homo Sapiens
ccaggcccugaacuuucucaggucucccucug

SEQ ID NO: 65251 - RNA, 32 nt, Homo Sapiens
cagccggguggcaccagcacucaggcuacugu

SEQ ID NO: 65252 - RNA, 32 nt, Homo Sapiens
aucuauugggauuuuucuuaaggauucaagga

SEQ ID NO: 65253 - RNA, 32 nt, Homo Sapiens
auuccugguguuucaucauauauacgacuaag

SEQ ID NO: 65254 - RNA, 32 nt, Homo Sapiens
gcuuuguacagucaaggcaguucuccauuuua

SEQ ID NO: 65255 - RNA, 32 nt, Homo Sapiens
ucgugccaccauagcuccugcugcugccucua

SEQ ID NO: 65256 - RNA, 29 nt, Homo Sapiens
ugggaguguagcuggacaccgagcaccau

SEQ ID NO: 65257 - RNA, 32 nt, Homo Sapiens
caggaguugcguguguuuuucuuaauugaaag

SEQ ID NO: 65258 - RNA, 30 nt, Homo Sapiens
ugcuuauuuuguacugcagaauuccaauaa

SEQ ID NO: 65259 - RNA, 32 nt, Homo Sapiens
gcgcccacccgcgacccagaugugugucgccu

SEQ ID NO: 65260 - RNA, 32 nt, Homo Sapiens
uguuuucuuuuuucuuuuuuuuuuuuucgaga

SEQ ID NO: 65261 - RNA, 32 nt, Homo Sapiens
gagagauggaggaaacaaucuagaagauaaaa

SEQ ID NO: 65262 - RNA, 30 nt, Homo Sapiens
ccugugagggagguggcggguccccacugu

SEQ ID NO: 65263 - RNA, 32 nt, Homo Sapiens
uuuuguaaaaauacaaaaauuaccugggccug

SEQ ID NO: 65264 - RNA, 32 nt, Homo Sapiens
gcuccggcucccacccagucccugcagccaag

SEQ ID NO: 65265 - RNA, 32 nt, Homo Sapiens
uuaaacacaucuugaaagauguagaagucccu

SEQ ID NO: 65266 - RNA, 32 nt, Homo Sapiens
gggacgggcaccggggcccggucggacauggg

SEQ ID NO: 65267 - RNA, 32 nt, Homo Sapiens
ucaugaugaauacuuucucaguuucuuuuucc

SEQ ID NO: 65268 - RNA, 32 nt, Homo Sapiens
accucuccugucauccguuuccaugccgugag

SEQ ID NO: 65269 - RNA, 32 nt, Homo Sapiens
gacagaggaaaggggcugucccagcccaagaa

SEQ ID NO: 65270 - RNA, 32 nt, Homo Sapiens
ucuuuaaaaaucuauuuuuagguaauguucua

SEQ ID NO: 65271 - RNA, 32 nt, Homo Sapiens
uuuuuuguuugguuggggaaguauugucuucu

SEQ ID NO: 65272 - RNA, 32 nt, Homo Sapiens
gcaacagaauuugaauaucuaggauaggauga

SEQ ID NO: 65273 - RNA, 32 nt, Homo Sapiens
gaaggugucugagcugagggccccaagccucc

SEQ ID NO: 65274 - RNA, 32 nt, Homo Sapiens
gaaauucuguucuuuucauguacuguugauga

SEQ ID NO: 65275 - RNA, 32 nt, Homo Sapiens
cacacucaagcacuuuggaacccauggaaucc

SEQ ID NO: 65276 - RNA, 30 nt, Homo Sapiens
acggugucgcccguguuuucguuggcgggu

SEQ ID NO: 65277 - RNA, 32 nt, Homo Sapiens
aaaccagaggcacaauguacuguggaaagccg

SEQ ID NO: 65278 - RNA, 32 nt, Homo Sapiens
caggggccggccugggggcugggagggccagg

SEQ ID NO: 65279 - RNA, 32 nt, Homo Sapiens
cgguccuuaccgagacccgcccggcccggcgg

SEQ ID NO: 65280 - RNA, 32 nt, Homo Sapiens
uucacacaagggucuguaacaauuguauaucu

SEQ ID NO: 65281 - RNA, 32 nt, Homo Sapiens
acccucgccccgcucucagccgccgcucugcc

SEQ ID NO: 65282 - RNA, 32 nt, Homo Sapiens
ccccauuccuuccucccccucgguaggaaaca

SEQ ID NO: 65283 - RNA, 32 nt, Homo Sapiens
ugaguacaguuaguaccgcacacguuagcacg

SEQ ID NO: 65284 - RNA, 32 nt, Homo Sapiens
aaacccaccugccucugccaggaacagccaac

SEQ ID NO: 65285 - RNA, 32 nt, Homo Sapiens
uccugaaucugugcaaaugugcagggaaauaa

SEQ ID NO: 65286 - RNA, 32 nt, Homo Sapiens
gacacagggugagaagagucagggccgcaccu

SEQ ID NO: 65287 - RNA, 32 nt, Homo Sapiens
ggggguucugucggccuuaauucauaaacacu

SEQ ID NO: 65288 - RNA, 32 nt, Homo Sapiens
uggaauuauaaaauauagguaaaaguacguaa

SEQ ID NO: 65289 - RNA, 32 nt, Homo Sapiens
aagucaccugucuacauagaccaaauggagca

SEQ ID NO: 65290 - RNA, 32 nt, Homo Sapiens
auauagggcugauguuagcaagacccuaaaaa

SEQ ID NO: 65291 - RNA, 32 nt, Homo Sapiens
gacccaagcccaggcccucccagagguccuag

SEQ ID NO: 65292 - RNA, 32 nt, Homo Sapiens
agcuggggccugacuaggaaaaguugggaguu

SEQ ID NO: 65293 - RNA, 32 nt, Homo Sapiens
ccuucucuugucaucucuguacacuacuuaua

SEQ ID NO: 65294 - RNA, 31 nt, Homo Sapiens
auuuuauaaagugaggacauaugauaaugau

SEQ ID NO: 65295 - RNA, 32 nt, Homo Sapiens
ugcuuuuguuccguggagaugcacuaacccag

SEQ ID NO: 65296 - RNA, 32 nt, Homo Sapiens
accagcagacugcauuccuaaucuucauuaug

SEQ ID NO: 65297 - RNA, 32 nt, Homo Sapiens
agccuccugucuccagagaaguucuccauuaa

SEQ ID NO: 65298 - RNA, 32 nt, Homo Sapiens
cccacuguucucuccacucucuccaggaaaaa

SEQ ID NO: 65299 - RNA, 32 nt, Homo Sapiens
cgaggcugcgguuuccgaggcccucuccagcc

SEQ ID NO: 65300 - RNA, 32 nt, Homo Sapiens
guuuuaaaaaucaagcuuuaaguacauggaca

SEQ ID NO: 65301 - RNA, 32 nt, Homo Sapiens
gcuaggauaaaacauuaagcggcuguuaaaag

SEQ ID NO: 65302 - RNA, 32 nt, Homo Sapiens
ggggacuggggaucccgccgccgggccgcagc

SEQ ID NO: 65303 - RNA, 31 nt, Homo Sapiens
ccgcgaccgccucuccugccccucgccggua

SEQ ID NO: 65304 - RNA, 32 nt, Homo Sapiens
cuuagcaguuuagggaacaauuuggcaauuuu

SEQ ID NO: 65305 - RNA, 32 nt, Homo Sapiens
gaaagacuguaauuaauguuguuuaauaaaaa

SEQ ID NO: 65306 - RNA, 32 nt, Homo Sapiens
aaaggugcuugacuaacaguaguugcagaaau

SEQ ID NO: 65307 - RNA, 32 nt, Homo Sapiens
uuauugagaauucuaauucuuuuacacagucu

SEQ ID NO: 65308 - RNA, 32 nt, Homo Sapiens
ugcaucaggcuuucuuuuuuuucuuuuuuuag

SEQ ID NO: 65309 - RNA, 32 nt, Homo Sapiens
ucauucccaagguuacuggauagaagccaacc

SEQ ID NO: 65310 - RNA, 32 nt, Homo Sapiens
ugucuccaacugcugcaccccaucccgacccu

SEQ ID NO: 65311 - RNA, 32 nt, Homo Sapiens
caccucccacccaagccacuagcaagacucca

SEQ ID NO: 65312 - RNA, 32 nt, Homo Sapiens
cgccgcggcgcgcgcgauccggcugacgcauc

SEQ ID NO: 65313 - RNA, 32 nt, Homo Sapiens
guuuacguuguauuuucuuacacugugucauu

SEQ ID NO: 65314 - RNA, 32 nt, Homo Sapiens
guauggaugauggggggaagggcggucgccuc

SEQ ID NO: 65315 - RNA, 32 nt, Homo Sapiens
aggcuuccgcggcuuuggggccgguugugaga

SEQ ID NO: 65316 - RNA, 32 nt, Homo Sapiens
gccuccucucagcucgccgaggaggcacgcua

SEQ ID NO: 65317 - RNA, 32 nt, Homo Sapiens
gucugcaucuucuucucagcugccuuuccgcc

SEQ ID NO: 65318 - RNA, 32 nt, Homo Sapiens
uagugguuccggcugcccuuucuaggugauug

SEQ ID NO: 65319 - RNA, 32 nt, Homo Sapiens
uaagacauuuuuccugauauguagagcagucu

SEQ ID NO: 65320 - RNA, 32 nt, Homo Sapiens
acaacugccccgagggaccagucuucauaccc

SEQ ID NO: 65321 - RNA, 32 nt, Homo Sapiens
gccuugucuguguauuucuauuuugcagcagu

SEQ ID NO: 65322 - RNA, 32 nt, Homo Sapiens
gcggccccaagcccggcccagcccccgaugcg

SEQ ID NO: 65323 - RNA, 32 nt, Homo Sapiens
agcuuuaaaucuuuaaauguauugaagcauug

SEQ ID NO: 65324 - RNA, 32 nt, Homo Sapiens
auagauauuuuucuggggggaaaucacaaguc

SEQ ID NO: 65325 - RNA, 32 nt, Homo Sapiens
aacuuuaggcaaacagggaauagucuagucac

SEQ ID NO: 65326 - RNA, 32 nt, Homo Sapiens
gaugcauugugcauaugaugcuugagaugguu

SEQ ID NO: 65327 - RNA, 32 nt, Homo Sapiens
cagcaccccuccccggcaucugccagcucagc

SEQ ID NO: 65328 - RNA, 32 nt, Homo Sapiens
caaagucuuucuuacacacucuauccucugca

SEQ ID NO: 65329 - RNA, 32 nt, Homo Sapiens
gcgagcacaacacacacaauccuuucuaacuu

SEQ ID NO: 65330 - RNA, 32 nt, Homo Sapiens
ucuggacccuuugcccuggaggaggcggaguu

SEQ ID NO: 65331 - RNA, 31 nt, Homo Sapiens
uguaaucccagcacuuugggaguccaaggug

SEQ ID NO: 65332 - RNA, 32 nt, Homo Sapiens
ggaaauacuuugcugcccuugccaucuuuuag

SEQ ID NO: 65333 - RNA, 32 nt, Homo Sapiens
gagguggcauauaaauaaauaaauaaaaaguc

SEQ ID NO: 65334 - RNA, 32 nt, Homo Sapiens
aacguccugccugugcagcugcagcaaagcca

SEQ ID NO: 65335 - RNA, 32 nt, Homo Sapiens
agggcagaaaggaaagccuaaagcuacagccu

SEQ ID NO: 65336 - RNA, 32 nt, Homo Sapiens
aauuuaugaucuuaagaaauuacuaguuguau

SEQ ID NO: 65337 - RNA, 32 nt, Homo Sapiens
gugcucugccgggaacucagugccaggaacuc

SEQ ID NO: 65338 - RNA, 32 nt, Homo Sapiens
aaacccuaggguuuccucugcccccuccuuuu

SEQ ID NO: 65339 - RNA, 32 nt, Homo Sapiens
cggaugccucaucgccaggggcgcgccgcagc

SEQ ID NO: 65340 - RNA, 32 nt, Homo Sapiens
gagcagccaugcugggcgcgcgggccugguug

SEQ ID NO: 65341 - RNA, 32 nt, Homo Sapiens
ucuuaaaaauuuaaagaaauauaaagcuggau

SEQ ID NO: 65342 - RNA, 32 nt, Homo Sapiens
gcugcccggccugcgccgcggagucccgagga

SEQ ID NO: 65343 - RNA, 32 nt, Homo Sapiens
cauuugagauauauuuauuuuacuaggagauc

SEQ ID NO: 65344 - RNA, 32 nt, Homo Sapiens
uucucucccacuuuuuuuuuucuaaauaaaau

SEQ ID NO: 65345 - RNA, 32 nt, Homo Sapiens
aucauuuucccauuuuacauggucaucauaau

SEQ ID NO: 65346 - RNA, 32 nt, Homo Sapiens
ucuguauagcgggacaggaugucacagaugua

SEQ ID NO: 65347 - RNA, 30 nt, Homo Sapiens
guugaguagaagcuugaaagauugacugag

SEQ ID NO: 65348 - RNA, 32 nt, Homo Sapiens
guacugagcucacguggacucccagugcgaag

SEQ ID NO: 65349 - RNA, 32 nt, Homo Sapiens
agccaccccucgccugagcugagccuggccac

SEQ ID NO: 65350 - RNA, 32 nt, Homo Sapiens
aucacucaaacacuugaguguucugucucccu

SEQ ID NO: 65351 - RNA, 32 nt, Homo Sapiens
uuaaaaguugcacuauugcaaaacggguguau

SEQ ID NO: 65352 - RNA, 32 nt, Homo Sapiens
uccuguccuuaaaauccucuuguccccggcau

SEQ ID NO: 65353 - RNA, 32 nt, Homo Sapiens
gaggagcugauauacuuggaaauauuagguuu

SEQ ID NO: 65354 - RNA, 32 nt, Homo Sapiens
agaucucgguggaacuucagaaacgcugggca

SEQ ID NO: 65355 - RNA, 32 nt, Homo Sapiens
uguucuuaauauauuucauuaugauugaaaaa

SEQ ID NO: 65356 - RNA, 30 nt, Homo Sapiens
caucaguggauuucaaacuggaugccauag

SEQ ID NO: 65357 - RNA, 32 nt, Homo Sapiens
aaaggccugggucuuucucauccugcuguaau

SEQ ID NO: 65358 - RNA, 31 nt, Homo Sapiens
aaaacugauguuuaaaaguccacuuuuaaaa

SEQ ID NO: 65359 - RNA, 32 nt, Homo Sapiens
cgagaugggggcucauuccggaggaggagcca

SEQ ID NO: 65360 - RNA, 32 nt, Homo Sapiens
uagaaaaaaguaauggauccaaugcacuugau

SEQ ID NO: 65361 - RNA, 32 nt, Homo Sapiens
ugguagucuuaggacccucugucaaagcuaaa

SEQ ID NO: 65362 - RNA, 32 nt, Homo Sapiens
uguucauaauuucuugaggcuuucaugucaca

SEQ ID NO: 65363 - RNA, 32 nt, Homo Sapiens
uguaaugauuuucaggucaaauuauggcuuca

SEQ ID NO: 65364 - RNA, 30 nt, Homo Sapiens
gaagcauuuggugguggcggcaguggagga

SEQ ID NO: 65365 - RNA, 32 nt, Homo Sapiens
auauuuauuacaaagccaaaacccaaaaauau

SEQ ID NO: 65366 - RNA, 32 nt, Homo Sapiens
cugauggccucugaccccggcaacagguggga

SEQ ID NO: 65367 - RNA, 32 nt, Homo Sapiens
caagugcuggggugggggcugguuauaaacga

SEQ ID NO: 65368 - RNA, 32 nt, Homo Sapiens
ggaaacaggagaucguggauccuccuucaaaa

SEQ ID NO: 65369 - RNA, 28 nt, Homo Sapiens
agcaucuaaaauaaacacacguggaugg

SEQ ID NO: 65370 - RNA, 32 nt, Homo Sapiens
cuccguuggccgccuccuggaccuccuggugc

SEQ ID NO: 65371 - RNA, 32 nt, Homo Sapiens
uaucuagauacuuagcaguugcuggccauuau

SEQ ID NO: 65372 - RNA, 32 nt, Homo Sapiens
ucauucugacuuuuuaacuguuuggcucacuu

SEQ ID NO: 65373 - RNA, 32 nt, Homo Sapiens
cccaaggcaggagagcaagagugaugaguccg

SEQ ID NO: 65374 - RNA, 32 nt, Homo Sapiens
ggcacaggcuccccggugcccgccccuccgcu

SEQ ID NO: 65375 - RNA, 32 nt, Homo Sapiens
gacaaguaauaaauuuggaucaacuucauuca

SEQ ID NO: 65376 - RNA, 31 nt, Homo Sapiens
aaugucgugaacaugaaaguacuucucaugu

SEQ ID NO: 65377 - RNA, 32 nt, Homo Sapiens
gaaauuauuucucccaauuaauucuguaauuc

SEQ ID NO: 65378 - RNA, 32 nt, Homo Sapiens
gauuauuuuaugucugcaauuuaugcuuguuu

SEQ ID NO: 65379 - RNA, 32 nt, Homo Sapiens
aguguguuagacagcaucaucuugcuugggcu

SEQ ID NO: 65380 - RNA, 32 nt, Homo Sapiens
uugugcaaaagagaugaagacuucucaauaug

SEQ ID NO: 65381 - RNA, 32 nt, Homo Sapiens
agccugaccaacguggugaaaccccgucucua

SEQ ID NO: 65382 - RNA, 32 nt, Homo Sapiens
agccuggccaacguagugaaaccccgucucua

SEQ ID NO: 65383 - RNA, 32 nt, Homo Sapiens
uguuacaaccacccuugccuguuuacauuaau

SEQ ID NO: 65384 - RNA, 32 nt, Homo Sapiens
uuagggacagcagcuuccuguacgaggaagcg

SEQ ID NO: 65385 - RNA, 32 nt, Homo Sapiens
ggagccagggaucggcgggaguugagagcugg

SEQ ID NO: 65386 - RNA, 32 nt, Homo Sapiens
gcccgccgcccgggccacugcaggggccgcua

SEQ ID NO: 65387 - RNA, 32 nt, Homo Sapiens
uaacaugguauauguauuguuauuaaaguaag

SEQ ID NO: 65388 - RNA, 32 nt, Homo Sapiens
aaggauuaaggggguuucugcuggcaccuaga

SEQ ID NO: 65389 - RNA, 32 nt, Homo Sapiens
gacaaggucucaguuugucacccaggcuggag

SEQ ID NO: 65390 - RNA, 32 nt, Homo Sapiens
aaguuuccaguuauguaucuuuuaagaguacu

SEQ ID NO: 65391 - RNA, 32 nt, Homo Sapiens
aaauuaaauaaauuauuauaaccuuucagaaa

SEQ ID NO: 65392 - RNA, 32 nt, Homo Sapiens
uuccuuuguuuuuucuuuuaacuggaauaauu

SEQ ID NO: 65393 - RNA, 32 nt, Homo Sapiens
ccgcugcccacagguggggaccugacggugaa

SEQ ID NO: 65394 - RNA, 32 nt, Homo Sapiens
gcugggaugcguuuuucuugguguugcaugcu

SEQ ID NO: 65395 - RNA, 32 nt, Homo Sapiens
ucuccuaucuugauuucacuggaauauaggcu

SEQ ID NO: 65396 - RNA, 32 nt, Homo Sapiens
cggaccucauccacggggaggugcugggcaag

SEQ ID NO: 65397 - RNA, 32 nt, Homo Sapiens
aagccuuuaaccccaacaauguguguaucuuu

SEQ ID NO: 65398 - RNA, 32 nt, Homo Sapiens
gccuuguacuguuuuaagcaguuuacauuuau

SEQ ID NO: 65399 - RNA, 32 nt, Homo Sapiens
cuggcucuggggcccucuccaccaccacucac

SEQ ID NO: 65400 - RNA, 29 nt, Homo Sapiens
cuccugguucugccccaccacaaaguuuu

SEQ ID NO: 65401 - RNA, 32 nt, Homo Sapiens
gugccugagauugaaaauauuguaacuuucag

SEQ ID NO: 65402 - RNA, 32 nt, Homo Sapiens
uccaaacuuaggauauaagagggcuuuuuaaa

SEQ ID NO: 65403 - RNA, 32 nt, Homo Sapiens
ggcguggagucuugaggccugcugagggcgug

SEQ ID NO: 65404 - RNA, 32 nt, Homo Sapiens
guuuccugcccauuugaccugucagcugcugg

SEQ ID NO: 65405 - RNA, 32 nt, Homo Sapiens
acaagguugugccggcagcucugggggaagga

SEQ ID NO: 65406 - RNA, 32 nt, Homo Sapiens
ugugacaguucuuucauguuuuccuaaaccaa

SEQ ID NO: 65407 - RNA, 32 nt, Homo Sapiens
agaugacgucgggucuccgcggccccggguua

SEQ ID NO: 65408 - RNA, 32 nt, Homo Sapiens
aggagcugcuaagcccagggaaugcacacacg

SEQ ID NO: 65409 - RNA, 32 nt, Homo Sapiens
uacauucuauaugcuuuuacuaaauauacaag

SEQ ID NO: 65410 - RNA, 32 nt, Homo Sapiens
gcuauucaaaaauaauaaaaauaaauguaagc

SEQ ID NO: 65411 - RNA, 32 nt, Homo Sapiens
aguccacucucuacacaggggcugaaguggau

SEQ ID NO: 65412 - RNA, 32 nt, Homo Sapiens
cugagauugugccgcugcacuccagccuggcg

SEQ ID NO: 65413 - RNA, 32 nt, Homo Sapiens
aacccccgugacuauccugugcucuuccuagg

SEQ ID NO: 65414 - RNA, 29 nt, Homo Sapiens
gacauugugacuugacuguggaagaugau

SEQ ID NO: 65415 - RNA, 32 nt, Homo Sapiens
ccuaaaaggaaagagugagaucuuucaaagaa

SEQ ID NO: 65416 - RNA, 32 nt, Homo Sapiens
ggacccccaucuccagggggccuucccagccu

SEQ ID NO: 65417 - RNA, 32 nt, Homo Sapiens
uauaaagcgauauacagaugaaaauuugagac

SEQ ID NO: 65418 - RNA, 32 nt, Homo Sapiens
uccucguguccaggaagcugcccaccgguccu

SEQ ID NO: 65419 - RNA, 32 nt, Homo Sapiens
aaauauguaaacaaaaauaaaaugguaaaaac

SEQ ID NO: 65420 - RNA, 32 nt, Homo Sapiens
uucccuacagaaaacccaaggagugaagggac

SEQ ID NO: 65421 - RNA, 32 nt, Homo Sapiens
gaagccacuccagccacuccuuccuggggcug

SEQ ID NO: 65422 - RNA, 32 nt, Homo Sapiens
acuggaaacaaugcuaccaucugauaagggua

SEQ ID NO: 65423 - RNA, 32 nt, Homo Sapiens
accaagggccccagcuggcccguucuacucac

SEQ ID NO: 65424 - RNA, 32 nt, Homo Sapiens
caggaggaucauuugaggucaggaguuugaga

SEQ ID NO: 65425 - RNA, 32 nt, Homo Sapiens
gcccgaagcucccuccucucccggcuccaccc

SEQ ID NO: 65426 - RNA, 32 nt, Homo Sapiens
guagggcauaaugaugaugggaauugugugau

SEQ ID NO: 65427 - RNA, 32 nt, Homo Sapiens
uggagcaaucccaaguuuaagggaaauauuuu

SEQ ID NO: 65428 - RNA, 32 nt, Homo Sapiens
ucugaguagugggaugaagucucaugcccucc

SEQ ID NO: 65429 - RNA, 32 nt, Homo Sapiens
aaauuaaauuuauauaccuggcuuagauaauu

SEQ ID NO: 65430 - RNA, 32 nt, Homo Sapiens
ggccaguuuucccaaggccaagagggccucaa

SEQ ID NO: 65431 - RNA, 32 nt, Homo Sapiens
cacuuguuuuugauuuuacaggcucauaggcg

SEQ ID NO: 65432 - RNA, 32 nt, Homo Sapiens
cccgggucaugguggugggccgagggcugcuc

SEQ ID NO: 65433 - RNA, 32 nt, Homo Sapiens
aucaagagggaagaggugaggaaggcccaccc

SEQ ID NO: 65434 - RNA, 32 nt, Homo Sapiens
cucugaaauccuuccuucucuuucccccuaag

SEQ ID NO: 65435 - RNA, 32 nt, Homo Sapiens
ugauggaaaguuucuuuuuucuuugcucugaa

SEQ ID NO: 65436 - RNA, 32 nt, Homo Sapiens
gccuuguacaagcacauaucauguagacauuu

SEQ ID NO: 65437 - RNA, 32 nt, Homo Sapiens
cuggaaggccccagcacccucaggguccugga

SEQ ID NO: 65438 - RNA, 32 nt, Homo Sapiens
uguuggacacuggggcuaugagcuugauguuc

SEQ ID NO: 65439 - RNA, 32 nt, Homo Sapiens
agggccucaaacuugaagucacuccuccaaug

SEQ ID NO: 65440 - RNA, 32 nt, Homo Sapiens
aauugaauguaagagaauucauauuggacaga

SEQ ID NO: 65441 - RNA, 32 nt, Homo Sapiens
cugacacccagcaaaauaaaccccagggaagg

SEQ ID NO: 65442 - RNA, 32 nt, Homo Sapiens
cagccccuuguccaccuucucuugaggccaca

SEQ ID NO: 65443 - RNA, 32 nt, Homo Sapiens
ggaacaauagagauuauaucauaacucugaag

SEQ ID NO: 65444 - RNA, 32 nt, Homo Sapiens
agagggcaaucuccgcugguaucucagaaguc

SEQ ID NO: 65445 - RNA, 32 nt, Homo Sapiens
gagcugaccugccuggcacccgcggcccucuc

SEQ ID NO: 65446 - RNA, 32 nt, Homo Sapiens
guuuaauaccugucauuuuguagaacgguuaa

SEQ ID NO: 65447 - RNA, 32 nt, Homo Sapiens
ggaccauccuggcaaccccgguguuuggcugg

SEQ ID NO: 65448 - RNA, 32 nt, Homo Sapiens
ggauggggaggaccuggcaggcagcuuccacg

SEQ ID NO: 65449 - RNA, 32 nt, Homo Sapiens
ugagcggcagguggcgggcucuucugagaaag

SEQ ID NO: 65450 - RNA, 30 nt, Homo Sapiens
agcugacugcauuuguaccaucuuauuucu

SEQ ID NO: 65451 - RNA, 32 nt, Homo Sapiens
uguacccaaguuaauuuauuuucaauguauaa

SEQ ID NO: 65452 - RNA, 32 nt, Homo Sapiens
cccauuccuuccuggggcgccuccccggccca

SEQ ID NO: 65453 - RNA, 32 nt, Homo Sapiens
gucuuacuuuuguaguuuuauauuauacaaua

SEQ ID NO: 65454 - RNA, 32 nt, Homo Sapiens
agcauguggaggaaaagugaaaccagccacgg

SEQ ID NO: 65455 - RNA, 32 nt, Homo Sapiens
aaggagcuggaaggccuccggaugcgugccag

SEQ ID NO: 65456 - RNA, 32 nt, Homo Sapiens
gccgggcaaggcugccuccaguccuaccaguu

SEQ ID NO: 65457 - RNA, 32 nt, Homo Sapiens
uucaauuccuaggguuuuuguuuuuguuuuug

SEQ ID NO: 65458 - RNA, 32 nt, Homo Sapiens
cuaugccagaauaaaaaauaucuauguuugua

SEQ ID NO: 65459 - RNA, 32 nt, Homo Sapiens
ccgagugugcagcugccgccacugccgggaag

SEQ ID NO: 65460 - RNA, 32 nt, Homo Sapiens
cuccuucuuagcacuuccugugccaagaaauc

SEQ ID NO: 65461 - RNA, 32 nt, Homo Sapiens
gccugucuugcucauucaugcagccucaacac

SEQ ID NO: 65462 - RNA, 32 nt, Homo Sapiens
guuggucccgcacgcaaccuuuguggagccau

SEQ ID NO: 65463 - RNA, 32 nt, Homo Sapiens
aggaccuccuucccccagccucaucaccgugc

SEQ ID NO: 65464 - RNA, 32 nt, Homo Sapiens
gcgcgcggcgcgagcgucacgccagacagcgg

SEQ ID NO: 65465 - RNA, 32 nt, Homo Sapiens
cccaacuggaaucagagggucuggcuggggug

SEQ ID NO: 65466 - RNA, 32 nt, Homo Sapiens
cgguuaaggacucuaaaguguugugucguguu

SEQ ID NO: 65467 - RNA, 32 nt, Homo Sapiens
uucaaguuuuuuuuuucuuuugcuuuguuacc

SEQ ID NO: 65468 - RNA, 32 nt, Homo Sapiens
cuccagcaggacuucaguauagguuggaaagc

SEQ ID NO: 65469 - RNA, 32 nt, Homo Sapiens
ugaacuugcauaauuauauacuccuuaauacu

SEQ ID NO: 65470 - RNA, 32 nt, Homo Sapiens
acuggccccagcgcugugguggggagcgguuu

SEQ ID NO: 65471 - RNA, 32 nt, Homo Sapiens
cuugccaagaaucacggccaguccuuaagugg

SEQ ID NO: 65472 - RNA, 32 nt, Homo Sapiens
agugcuggccuggucagcaugggcuggggcac

SEQ ID NO: 65473 - RNA, 32 nt, Homo Sapiens
gcucacacaauguuagcaaggacucaucucca

SEQ ID NO: 65474 - RNA, 32 nt, Homo Sapiens
auugacagauaugacucuuuuacauuauaccu

SEQ ID NO: 65475 - RNA, 32 nt, Homo Sapiens
uguguuuauuuuuuaacuuuguuauguuuucg

SEQ ID NO: 65476 - RNA, 32 nt, Homo Sapiens
ggguuuucaguauuuguaagcauuucagcaga

SEQ ID NO: 65477 - RNA, 32 nt, Homo Sapiens
ccggcucccagcugcuccagcaccccgggcuc

SEQ ID NO: 65478 - RNA, 32 nt, Homo Sapiens
cgucuaaguguuugggaagcagcaaagagcaa

SEQ ID NO: 65479 - RNA, 32 nt, Homo Sapiens
ggccccacucccuugcuggccccagcccugcu

SEQ ID NO: 65480 - RNA, 32 nt, Homo Sapiens
gccaaaaauauuaaaaaugccuuuuuuggaag

SEQ ID NO: 65481 - RNA, 32 nt, Homo Sapiens
acuagaaacagugaaaauagauaauagcuaua

SEQ ID NO: 65482 - RNA, 32 nt, Homo Sapiens
agacugggauugcauuugggguuucccgugug

SEQ ID NO: 65483 - RNA, 32 nt, Homo Sapiens
gggggaggggguacucauguggaugccuacuu

SEQ ID NO: 65484 - RNA, 32 nt, Homo Sapiens
uaccacaguuuugucacccauuagccauaaau

SEQ ID NO: 65485 - RNA, 32 nt, Homo Sapiens
auguauuuuguuauuuacccuaugaauacugg

SEQ ID NO: 65486 - RNA, 32 nt, Homo Sapiens
uggcuuggacucaugcaauaagaaauuuaccg

SEQ ID NO: 65487 - RNA, 32 nt, Homo Sapiens
aaaucauuguaagaccaaugugaauuuaaacc

SEQ ID NO: 65488 - RNA, 32 nt, Homo Sapiens
ccaguugggcuuuggccccuccagcaaccuug

SEQ ID NO: 65489 - RNA, 32 nt, Homo Sapiens
cauuuuaaaguacacaaagggcacaaucaaaa

SEQ ID NO: 65490 - RNA, 32 nt, Homo Sapiens
uucucuauaaauccauucuccucucccgugua

SEQ ID NO: 65491 - RNA, 32 nt, Homo Sapiens
cugcggcgcugggcuggcggcggcgaguccac

SEQ ID NO: 65492 - RNA, 32 nt, Homo Sapiens
uuuuguauuuaguagagacagaggucagcauc

SEQ ID NO: 65493 - RNA, 32 nt, Homo Sapiens
uggaaaugccuggccagggccagcggggcccg

SEQ ID NO: 65494 - RNA, 32 nt, Homo Sapiens
aaucauggaauuaaaucagggguuuacauucu

SEQ ID NO: 65495 - RNA, 32 nt, Homo Sapiens
guucugucuguuuccuccaugcuugagaacug

SEQ ID NO: 65496 - RNA, 30 nt, Homo Sapiens
aaauguaaguaauuauacuaagaccagauc

SEQ ID NO: 65497 - RNA, 32 nt, Homo Sapiens
uccaaaucccugaagcacuuugggaaugagaa

SEQ ID NO: 65498 - RNA, 32 nt, Homo Sapiens
acccgugagagguugugugaaugugaaaguuu

SEQ ID NO: 65499 - RNA, 32 nt, Homo Sapiens
aaagacauuuaaaccauauuuuggccuccgcc

SEQ ID NO: 65500 - RNA, 32 nt, Homo Sapiens
uguucuuguucccuguauccuaugggucuguu

SEQ ID NO: 65501 - RNA, 32 nt, Homo Sapiens
aaggagcugguucuguugcugcugcgggguaa

SEQ ID NO: 65502 - RNA, 32 nt, Homo Sapiens
cucuccgcguuccccgcccgacugccgugcag

SEQ ID NO: 65503 - RNA, 32 nt, Homo Sapiens
ugagcucuucugcccaggcgggcccccuggaa

SEQ ID NO: 65504 - RNA, 32 nt, Homo Sapiens
cucccacuuaacccccucccccaacucccgca

SEQ ID NO: 65505 - RNA, 32 nt, Homo Sapiens
agggagcuggagaacuuuuucaacuugaaccu

SEQ ID NO: 65506 - RNA, 32 nt, Homo Sapiens
uaucuuaaugcagacaaacaaacauaaaacuu

SEQ ID NO: 65507 - RNA, 32 nt, Homo Sapiens
uuuuuguccacguaucuuugggucuuugauaa

SEQ ID NO: 65508 - RNA, 32 nt, Homo Sapiens
ccgucgccagccccggcccgggcucgagaauc

SEQ ID NO: 65509 - RNA, 32 nt, Homo Sapiens
auguauugcagacaauguugcaaugacauugc

SEQ ID NO: 65510 - RNA, 32 nt, Homo Sapiens
uggagaaacacuuguuuugauuuuguuauacu

SEQ ID NO: 65511 - RNA, 32 nt, Homo Sapiens
uggcagcccagccccaggcucugugcagccua

SEQ ID NO: 65512 - RNA, 32 nt, Homo Sapiens
cacaugcccugccgugcuggacucaggacuga

SEQ ID NO: 65513 - RNA, 32 nt, Homo Sapiens
cucgccccccucuuccuuuaaucuucaggccu

SEQ ID NO: 65514 - RNA, 32 nt, Homo Sapiens
gggagauuccuccccacagaguuuuuauucag

SEQ ID NO: 65515 - RNA, 32 nt, Homo Sapiens
gugugaacccagggggccuuucccucuucccu

SEQ ID NO: 65516 - RNA, 32 nt, Homo Sapiens
gaauaguggugggggagggaaugccuuggacu

SEQ ID NO: 65517 - RNA, 32 nt, Homo Sapiens
ccugaugccggggccccugaccccugaucuac

SEQ ID NO: 65518 - RNA, 32 nt, Homo Sapiens
acaggagcugggagccccgucuccaggaaaag

SEQ ID NO: 65519 - RNA, 32 nt, Homo Sapiens
cccagcccuggccgcagccuaguccuuucucu

SEQ ID NO: 65520 - RNA, 32 nt, Homo Sapiens
ggcuaugcauauaauauguaaaugagucaggu

SEQ ID NO: 65521 - RNA, 32 nt, Homo Sapiens
cauuuucuuccauuuuacuccuuugccccuuc

SEQ ID NO: 65522 - RNA, 32 nt, Homo Sapiens
uuuauuuauuuuuuccuuccugugggauuucu

SEQ ID NO: 65523 - RNA, 32 nt, Homo Sapiens
aaaauggaucuuuucuugacucucccacaugc

SEQ ID NO: 65524 - RNA, 32 nt, Homo Sapiens
gggagaaggaccgcguuuaccuuuagaguuuu

SEQ ID NO: 65525 - RNA, 32 nt, Homo Sapiens
ucuccaagcgggggugggagggggucaggcug

SEQ ID NO: 65526 - RNA, 32 nt, Homo Sapiens
caaauaucccccacccaauaccuuugagguga

SEQ ID NO: 65527 - RNA, 32 nt, Homo Sapiens
ccuccugugugccugagcuccucccuuuucaa

SEQ ID NO: 65528 - RNA, 32 nt, Homo Sapiens
uaacuuacauuaucaaaaaauucuuugucuaa

SEQ ID NO: 65529 - RNA, 32 nt, Homo Sapiens
caagggggcuccugaugggugggggcaggagc

SEQ ID NO: 65530 - RNA, 32 nt, Homo Sapiens
aaaauggcuguugugaucacucagcucagcuu

SEQ ID NO: 65531 - RNA, 32 nt, Homo Sapiens
aaguccuccauggcggccccagccgggaaggc

SEQ ID NO: 65532 - RNA, 32 nt, Homo Sapiens
agcccaagguuccuccucuccuaccaagcagg

SEQ ID NO: 65533 - RNA, 32 nt, Homo Sapiens
ccacuccuaccuuuuuuguauuuuuaguagag

SEQ ID NO: 65534 - RNA, 32 nt, Homo Sapiens
ucauggagucugugucccaccugaugugguug

SEQ ID NO: 65535 - RNA, 32 nt, Homo Sapiens
ucacuucccucacugcccuacccaggcuuucu

SEQ ID NO: 65536 - RNA, 32 nt, Homo Sapiens
cuggacaagcucccaacugcagagucccagcc

SEQ ID NO: 65537 - RNA, 32 nt, Homo Sapiens
uggggcucacuggcuuccugugggaugacugg

SEQ ID NO: 65538 - RNA, 32 nt, Homo Sapiens
uucggucugguuccuuuggagagggcuggguu

SEQ ID NO: 65539 - RNA, 32 nt, Homo Sapiens
uuauaguuuaaaguacuucagaucauaaugau

SEQ ID NO: 65540 - RNA, 32 nt, Homo Sapiens
gaaacaauacucauaaugugaaguguuaauac

SEQ ID NO: 65541 - RNA, 32 nt, Homo Sapiens
ugguucgugcugugcucuggcaccaucagccu

SEQ ID NO: 65542 - RNA, 32 nt, Homo Sapiens
gcggcagaauaagggcugaggacccagaucug

SEQ ID NO: 65543 - RNA, 32 nt, Homo Sapiens
aauuuccacucccacacccucacuguuaugug

SEQ ID NO: 65544 - RNA, 32 nt, Homo Sapiens
aucacagacucuaauguuaaguauugugcuag

SEQ ID NO: 65545 - RNA, 32 nt, Homo Sapiens
uuuucacuucucccuaaauaaucuucacagau

SEQ ID NO: 65546 - RNA, 32 nt, Homo Sapiens
uuguauuguauuuuugugaucuguaaugaaaa

SEQ ID NO: 65547 - RNA, 32 nt, Homo Sapiens
guuacuuuuuaaaaauauaaauuuggccaggc

SEQ ID NO: 65548 - RNA, 31 nt, Homo Sapiens
gugugcaaguggguucuuggauauguguagu

SEQ ID NO: 65549 - RNA, 32 nt, Homo Sapiens
ccugggcaucguagugagacuccaucucuguc

SEQ ID NO: 65550 - RNA, 32 nt, Homo Sapiens
uucgaaggcgcaaaagaaaaagaaauuaaggc

SEQ ID NO: 65551 - RNA, 32 nt, Homo Sapiens
gagaaaggaaagacuucugugcucccgagaac

SEQ ID NO: 65552 - RNA, 32 nt, Homo Sapiens
caacagaugaagagaugaaugaaaaugugaua

SEQ ID NO: 65553 - RNA, 32 nt, Homo Sapiens
aacacacacacacauacacacacacacacaca

SEQ ID NO: 65554 - RNA, 32 nt, Homo Sapiens
cucgccccaugcacucgccgcgccgcgcagcc

SEQ ID NO: 65555 - RNA, 32 nt, Homo Sapiens
auauccuacaauugauauauugcuuuauucac

SEQ ID NO: 65556 - RNA, 32 nt, Homo Sapiens
cuuaggcauaaaucaucauccgguaugaggaa

SEQ ID NO: 65557 - RNA, 32 nt, Homo Sapiens
gccuccacaucaucuuuuuucuuaauauuuca

SEQ ID NO: 65558 - RNA, 32 nt, Homo Sapiens
ccccggggauuguggcgugacccggcagcggc

SEQ ID NO: 65559 - RNA, 32 nt, Homo Sapiens
ucaccugagcccaagcucauugcuucuuccug

SEQ ID NO: 65560 - RNA, 32 nt, Homo Sapiens
gguugaagauaaauaagguugcaaugucuaua

SEQ ID NO: 65561 - RNA, 32 nt, Homo Sapiens
cgagccggucccagcucuugcuccugccuguu

SEQ ID NO: 65562 - RNA, 32 nt, Homo Sapiens
uuucaauauaaaauguauuugugcaaauucua

SEQ ID NO: 65563 - RNA, 32 nt, Homo Sapiens
ugucuuaaaaacaacugaagggguuaaagucg

SEQ ID NO: 65564 - RNA, 32 nt, Homo Sapiens
cacguuuaauaaaaucagaacucuuaauuggc

SEQ ID NO: 65565 - RNA, 32 nt, Homo Sapiens
ugaaccucuaauggaaaaaggcacuccaaggu

SEQ ID NO: 65566 - RNA, 32 nt, Homo Sapiens
agaaauaaaaauacugaauaucuuugcucuua

SEQ ID NO: 65567 - RNA, 31 nt, Homo Sapiens
uguacucacccuguaccacaaacacauuaca

SEQ ID NO: 65568 - RNA, 32 nt, Homo Sapiens
gugagcccaagccgcggucccgggccggcacc

SEQ ID NO: 65569 - RNA, 32 nt, Homo Sapiens
ugccagcagcacccacggagugucucagcuuc

SEQ ID NO: 65570 - RNA, 32 nt, Homo Sapiens
acccauucuguggauaccacucagucucuuuc

SEQ ID NO: 65571 - RNA, 32 nt, Homo Sapiens
caccagccuuccagcccuuacggcccacgccg

SEQ ID NO: 65572 - RNA, 32 nt, Homo Sapiens
uggagggaggggugagauaggggcagauagga

SEQ ID NO: 65573 - RNA, 32 nt, Homo Sapiens
gggcgccccccgcuccccacuucgccagcgcc

SEQ ID NO: 65574 - RNA, 32 nt, Homo Sapiens
ucuguggugaauggguggccuaugaugaacgg

SEQ ID NO: 65575 - RNA, 32 nt, Homo Sapiens
ccagccggguggcaccagcacucaggcuacug

SEQ ID NO: 65576 - RNA, 32 nt, Homo Sapiens
aaaaaaucuugaugaaguguguauuuaaauuu

SEQ ID NO: 65577 - RNA, 32 nt, Homo Sapiens
uacaaaggggaagaguugaacagacaucaggg

SEQ ID NO: 65578 - RNA, 32 nt, Homo Sapiens
accucuucucagaccccgccugccccgaggcc

SEQ ID NO: 65579 - RNA, 32 nt, Homo Sapiens
uuguucacuuccuuuuuuuuuauuuuuuaaag

SEQ ID NO: 65580 - RNA, 31 nt, Homo Sapiens
caucagaaauaaaacuguaucugacauuuua

SEQ ID NO: 65581 - RNA, 32 nt, Homo Sapiens
gcuguauuuuuggcauaacuuuauuauaaaaa

SEQ ID NO: 65582 - RNA, 32 nt, Homo Sapiens
uccugguacuguauccucugacuuuauuuucc

SEQ ID NO: 65583 - RNA, 32 nt, Homo Sapiens
ccugauuuaagugucugagaaacaaaucuuug

SEQ ID NO: 65584 - RNA, 32 nt, Homo Sapiens
ggaccuuccaugaauguugccagcaauaaagu

SEQ ID NO: 65585 - RNA, 32 nt, Homo Sapiens
ucuucuuagcaauaaugcaugcauuugauuua

SEQ ID NO: 65586 - RNA, 32 nt, Homo Sapiens
ggccacggcggcggcccugggagcagaggugg

SEQ ID NO: 65587 - RNA, 32 nt, Homo Sapiens
gccgagccuccuggggcgcccgggcccgcgac

SEQ ID NO: 65588 - RNA, 32 nt, Homo Sapiens
gacacuccaaguggggcagcucuccguacaug

SEQ ID NO: 65589 - RNA, 32 nt, Homo Sapiens
ccaagagaccucuugauacaaacaauagaaaa

SEQ ID NO: 65590 - RNA, 32 nt, Homo Sapiens
agagugaccuaggcuauguuccugcuauucaa

SEQ ID NO: 65591 - RNA, 32 nt, Homo Sapiens
cacaugccgggcggcgggccccagucugagcg

SEQ ID NO: 65592 - RNA, 32 nt, Homo Sapiens
cgcuccuucccgcucccucacacaccgccuca

SEQ ID NO: 65593 - RNA, 32 nt, Homo Sapiens
cggagccgagccaugugucuuuacaccucgcu

SEQ ID NO: 65594 - RNA, 32 nt, Homo Sapiens
aaucugggcuuuuaaauuucucuucuuauucu

SEQ ID NO: 65595 - RNA, 32 nt, Homo Sapiens
augaacggcuguuuuucuacuuuguaauugug

SEQ ID NO: 65596 - RNA, 32 nt, Homo Sapiens
ccauggcucuggaggcugcugcugccuggauc

SEQ ID NO: 65597 - RNA, 32 nt, Homo Sapiens
gggcagcgggcucgacgagcucuguucuggug

SEQ ID NO: 65598 - RNA, 32 nt, Homo Sapiens
cuguuaccucugauuuccaguacuggaacuaa

SEQ ID NO: 65599 - RNA, 32 nt, Homo Sapiens
cucgcagcuccggcccggcggcgauggcgcgg

SEQ ID NO: 65600 - RNA, 32 nt, Homo Sapiens
uauauguauauauaaaugcauuauuacacaua

SEQ ID NO: 65601 - RNA, 32 nt, Homo Sapiens
ggaaugugggucugcaccuuguccccucauag

SEQ ID NO: 65602 - RNA, 31 nt, Homo Sapiens
ggcaagauggcggcgcuggggguggcggagg

SEQ ID NO: 65603 - RNA, 32 nt, Homo Sapiens
cuccacucauggcuguaucugcagcuuccagu

SEQ ID NO: 65604 - RNA, 32 nt, Homo Sapiens
gcccagcaggagauguaaggcuuccuguuguc

SEQ ID NO: 65605 - RNA, 32 nt, Homo Sapiens
aggcucugugaccaaggcaaccugcaaggagc

SEQ ID NO: 65606 - RNA, 32 nt, Homo Sapiens
cugccugaggugaugaaaacuccagcuagagg

SEQ ID NO: 65607 - RNA, 32 nt, Homo Sapiens
uaaauacuggccuggccugugccgccccugcc

SEQ ID NO: 65608 - RNA, 32 nt, Homo Sapiens
aggaacucaauaaagugcuuugaaaaugcuga

SEQ ID NO: 65609 - RNA, 32 nt, Homo Sapiens
aauggaaaucaucgaaaauucauuucacauua

SEQ ID NO: 65610 - RNA, 32 nt, Homo Sapiens
cuccugagggaagaggaguggaguagggggga

SEQ ID NO: 65611 - RNA, 32 nt, Homo Sapiens
cauuugaaguuccacaaugaacccaucagaga

SEQ ID NO: 65612 - RNA, 32 nt, Homo Sapiens
ggagguuccgccguucccagaggcuccuccug

SEQ ID NO: 65613 - RNA, 32 nt, Homo Sapiens
caauuuaguuucuugcagaaauaaauugcaag

SEQ ID NO: 65614 - RNA, 32 nt, Homo Sapiens
ccaugcccagcuaauuuuuuuauuuuuuugua

SEQ ID NO: 65615 - RNA, 32 nt, Homo Sapiens
gguagcugugcagcugcugcugaucaacaggc

SEQ ID NO: 65616 - RNA, 32 nt, Homo Sapiens
agagaucccugccugggacccuuuccuggggc

SEQ ID NO: 65617 - RNA, 32 nt, Homo Sapiens
uguguuauaacccaucugagccuccugcaacc

SEQ ID NO: 65618 - RNA, 31 nt, Homo Sapiens
uuucuuuuccauuucguuccaaauaaaucau

SEQ ID NO: 65619 - RNA, 32 nt, Homo Sapiens
uacccccacauccaccucccccuggccaccua

SEQ ID NO: 65620 - RNA, 32 nt, Homo Sapiens
gcaauaaauuuaucugauguugacuugaguaa

SEQ ID NO: 65621 - RNA, 32 nt, Homo Sapiens
guguguuuucuuugggaaaauaagugauuuuu

SEQ ID NO: 65622 - RNA, 29 nt, Homo Sapiens
ucagaauaaaguuguauuucaaauaucua

SEQ ID NO: 65623 - RNA, 30 nt, Homo Sapiens
cggggggcaccggugccgccccguguucuc

SEQ ID NO: 65624 - RNA, 32 nt, Homo Sapiens
uuuccggagcagcgcucuuucucuggcccgcg

SEQ ID NO: 65625 - RNA, 32 nt, Homo Sapiens
gcugccucgcaggggcugcgcgcacggcaaga

SEQ ID NO: 65626 - RNA, 32 nt, Homo Sapiens
cucucagcacaccaauguguggcaguucagcc

SEQ ID NO: 65627 - RNA, 32 nt, Homo Sapiens
aacucaaggcuuuaggaguagauuaucaaaag

SEQ ID NO: 65628 - RNA, 32 nt, Homo Sapiens
caugcaaugaacugacugguaagugacgucua

SEQ ID NO: 65629 - RNA, 32 nt, Homo Sapiens
acugcagucucugccucccagauggaaauccu

SEQ ID NO: 65630 - RNA, 32 nt, Homo Sapiens
aagagaacacuucaaggagacuucuacaucca

SEQ ID NO: 65631 - RNA, 32 nt, Homo Sapiens
ugaucaggaauacugaugugugguguuuuuuu

SEQ ID NO: 65632 - RNA, 32 nt, Homo Sapiens
ugcggcccuggucccgcgggaccugugggggc

SEQ ID NO: 65633 - RNA, 32 nt, Homo Sapiens
ucagagacagugcugccuccuccugagggagg

SEQ ID NO: 65634 - RNA, 32 nt, Homo Sapiens
caccacuggcaagggcuugguggcaggagaua

SEQ ID NO: 65635 - RNA, 32 nt, Homo Sapiens
gucagaauccucccucaaugguagguugaagg

SEQ ID NO: 65636 - RNA, 32 nt, Homo Sapiens
gccccgcgcgcggcgucgcucauugcuaugga

SEQ ID NO: 65637 - RNA, 32 nt, Homo Sapiens
ugugcucacaugccccccuguccagcgaggac

SEQ ID NO: 65638 - RNA, 32 nt, Homo Sapiens
aggaagacagauuuaaagugcccccaccccca

SEQ ID NO: 65639 - RNA, 32 nt, Homo Sapiens
ccccacugauccuugggacccaacgccgcauu

SEQ ID NO: 65640 - RNA, 32 nt, Homo Sapiens
ccugaacuccaaccagaauccaaauugguuag

SEQ ID NO: 65641 - RNA, 32 nt, Homo Sapiens
uauccgucacgggucuuccuguuuuguauuua

SEQ ID NO: 65642 - RNA, 32 nt, Homo Sapiens
cccuucaugcaugcgcggaggccgccugcuag

SEQ ID NO: 65643 - RNA, 32 nt, Homo Sapiens
uuggcccgcgggguuccccgggacgccugaga

SEQ ID NO: 65644 - RNA, 32 nt, Homo Sapiens
aaaauacaaaaauuagcccggugugguggugc

SEQ ID NO: 65645 - RNA, 32 nt, Homo Sapiens
uuuucugccauuguaaauacaaguaucaaaau

SEQ ID NO: 65646 - RNA, 32 nt, Homo Sapiens
ccaagaaaugugaggggccuucauccacugca

SEQ ID NO: 65647 - RNA, 27 nt, Homo Sapiens
uuuauguccuucuguguccuucaugua

SEQ ID NO: 65648 - RNA, 32 nt, Homo Sapiens
uccuauaaaugugauuuuuuuauauaaguuaa

SEQ ID NO: 65649 - RNA, 32 nt, Homo Sapiens
auuuuuaaaaagacaaauaaaaacaguguuuu

SEQ ID NO: 65650 - RNA, 32 nt, Homo Sapiens
cuaaauuguauauaaguuguguauauagagac

SEQ ID NO: 65651 - RNA, 32 nt, Homo Sapiens
cgugaaaagccuagguucugugcagcuuauca

SEQ ID NO: 65652 - RNA, 32 nt, Homo Sapiens
uccgggccucguugcggaggggacgcccgggc

SEQ ID NO: 65653 - RNA, 32 nt, Homo Sapiens
ugcagcuuggagcaaagaagaugaugucucac

SEQ ID NO: 65654 - RNA, 32 nt, Homo Sapiens
cucaggccccuggcagccgcccccugugcaga

SEQ ID NO: 65655 - RNA, 32 nt, Homo Sapiens
ucuaucuacugcucaugaaaucucuggauuua

SEQ ID NO: 65656 - RNA, 31 nt, Homo Sapiens
agauagaaauaaauagcuauauccauguacu

SEQ ID NO: 65657 - RNA, 32 nt, Homo Sapiens
auggugcuuuugguggaaauuuuuauuauuua

SEQ ID NO: 65658 - RNA, 32 nt, Homo Sapiens
uauuuacuuccaugcuucuccuuuucuuacuc

SEQ ID NO: 65659 - RNA, 32 nt, Homo Sapiens
uuacaggugugagccaccacaccuggcccaua

SEQ ID NO: 65660 - RNA, 32 nt, Homo Sapiens
cuguacagacugcccacacugcugaccugccu

SEQ ID NO: 65661 - RNA, 32 nt, Homo Sapiens
cuuuauaauggcaagccugcucuuuuuagugg

SEQ ID NO: 65662 - RNA, 30 nt, Homo Sapiens
ggugaucuggacugucccgacugggugcug

SEQ ID NO: 65663 - RNA, 32 nt, Homo Sapiens
ucugccaaggaccaugggugccgcgcugggga

SEQ ID NO: 65664 - RNA, 32 nt, Homo Sapiens
uacauggacugauguucauuuuaucuugggca

SEQ ID NO: 65665 - RNA, 32 nt, Homo Sapiens
augcgccgcccggucucccugccagcggagug

SEQ ID NO: 65666 - RNA, 32 nt, Homo Sapiens
cccagagcuuguccugcccucuucccagccag

SEQ ID NO: 65667 - RNA, 32 nt, Homo Sapiens
cuccccuucccuccccgccaagagcucugcca

SEQ ID NO: 65668 - RNA, 32 nt, Homo Sapiens
cuacaacucugaaagagaaaucaaugaagcaa

SEQ ID NO: 65669 - RNA, 32 nt, Homo Sapiens
gauggagggcaagagggacagauggcucuagc

SEQ ID NO: 65670 - RNA, 32 nt, Homo Sapiens
cauuuaagccacucagguaugcaauuuuucag

SEQ ID NO: 65671 - RNA, 30 nt, Homo Sapiens
augggguuucaccguguuagccaggauggu

SEQ ID NO: 65672 - RNA, 32 nt, Homo Sapiens
ugcugggcgggggcgggagcuggagccggagc

SEQ ID NO: 65673 - RNA, 32 nt, Homo Sapiens
uuauucagggucugagcagcaguaaaagucac

SEQ ID NO: 65674 - RNA, 32 nt, Homo Sapiens
gacuuuuacuuuugauuucccuaggauggaag

SEQ ID NO: 65675 - RNA, 32 nt, Homo Sapiens
uuucuuuucuguuuuucuuuaaucucccuuug

SEQ ID NO: 65676 - RNA, 30 nt, Homo Sapiens
gauuugagguggugcaugcaaguaacuagg

SEQ ID NO: 65677 - RNA, 32 nt, Homo Sapiens
gagucaauagaguaguuguuaaagguuuuaaa

SEQ ID NO: 65678 - RNA, 32 nt, Homo Sapiens
auggggaaaggcccccuggggcgaaggaagcg

SEQ ID NO: 65679 - RNA, 32 nt, Homo Sapiens
caugguauuauuaagggauuuaaaguuugggu

SEQ ID NO: 65680 - RNA, 32 nt, Homo Sapiens
gagggagaggcugagggugggguggcugugag

SEQ ID NO: 65681 - RNA, 32 nt, Homo Sapiens
gccuuggacuccugggcucaagccauccuccu

SEQ ID NO: 65682 - RNA, 32 nt, Homo Sapiens
gcacacuuucucaggaccuccugagaguguau

SEQ ID NO: 65683 - RNA, 32 nt, Homo Sapiens
uauggugguaucuaugugaaauccauuguucc

SEQ ID NO: 65684 - RNA, 32 nt, Homo Sapiens
caguucacaugcccaaagaugaacuggcccau

SEQ ID NO: 65685 - RNA, 32 nt, Homo Sapiens
uaaacuauuuuuguccuuaagaauauuagcau

SEQ ID NO: 65686 - RNA, 32 nt, Homo Sapiens
uagcuuuccugagacuguaucuaaugggcaag

SEQ ID NO: 65687 - RNA, 32 nt, Homo Sapiens
auggauuuuuuuuuuucuuuuuuuucuuuagu

SEQ ID NO: 65688 - RNA, 28 nt, Homo Sapiens
uguaaucgaugugggaagugcuuuaguc

SEQ ID NO: 65689 - RNA, 32 nt, Homo Sapiens
gaauucccgcggccugggccugcgccgcucag

SEQ ID NO: 65690 - RNA, 32 nt, Homo Sapiens
uuuacagaugcauggaaaacaaagucuccaag

SEQ ID NO: 65691 - RNA, 32 nt, Homo Sapiens
uaacauuuuggaaaagacuaaggagaaacgua

SEQ ID NO: 65692 - RNA, 32 nt, Homo Sapiens
ccgcacugaggcucgggcgcgcggggacaugu

SEQ ID NO: 65693 - RNA, 32 nt, Homo Sapiens
uuccccugcccccagaccuuuuauccacuuac

SEQ ID NO: 65694 - RNA, 32 nt, Homo Sapiens
gacccugugcccccggccgggcucucaugcgu

SEQ ID NO: 65695 - RNA, 32 nt, Homo Sapiens
aagggcagggaaguggagcaucaggacaaaua

SEQ ID NO: 65696 - RNA, 32 nt, Homo Sapiens
cuguucuuuaaucaaguaguuguaauauggac

SEQ ID NO: 65697 - RNA, 32 nt, Homo Sapiens
auacaaaugaauuauuugaauccacagaagug

SEQ ID NO: 65698 - RNA, 32 nt, Homo Sapiens
ucaaugugaaagauacauuaaauggacacaua

SEQ ID NO: 65699 - RNA, 32 nt, Homo Sapiens
gacagagccgguuuccguggcaacccucagcu

SEQ ID NO: 65700 - RNA, 32 nt, Homo Sapiens
ucaagauguuuaauguguuuaaagcugggaac

SEQ ID NO: 65701 - RNA, 32 nt, Homo Sapiens
aagcuggagucugucaauguccuacugagaca

SEQ ID NO: 65702 - RNA, 32 nt, Homo Sapiens
agggagaugcagucucauaacuaccccagucg

SEQ ID NO: 65703 - RNA, 32 nt, Homo Sapiens
cugccggucaggucggccgccccugacagcuc

SEQ ID NO: 65704 - RNA, 32 nt, Homo Sapiens
cacuggugggucucuguccaaaagagcacgac

SEQ ID NO: 65705 - RNA, 30 nt, Homo Sapiens
gggccaugggccgggucucagggcuugugc

SEQ ID NO: 65706 - RNA, 32 nt, Homo Sapiens
uguggcgggaggcgagacauguuggcaguagu

SEQ ID NO: 65707 - RNA, 30 nt, Homo Sapiens
cgugguagcaggcgcccggugccccggccg

SEQ ID NO: 65708 - RNA, 30 nt, Homo Sapiens
ugaggcgcaucgcugccgccgccgccgacg

SEQ ID NO: 65709 - RNA, 32 nt, Homo Sapiens
cagccgugaugaugaaagagugaagaaccgcc

SEQ ID NO: 65710 - RNA, 32 nt, Homo Sapiens
auccaggacugaccacguauaucaggggugac

SEQ ID NO: 65711 - RNA, 32 nt, Homo Sapiens
gcugggagccccggggaccccauggggugcug

SEQ ID NO: 65712 - RNA, 32 nt, Homo Sapiens
aaaguuuuuuaaacuacuagagucauuugaua

SEQ ID NO: 65713 - RNA, 32 nt, Homo Sapiens
uuguaacagaaaauuaaaauauacuccacuca

SEQ ID NO: 65714 - RNA, 32 nt, Homo Sapiens
gcaagggaugacugaucucagacugccaagug

SEQ ID NO: 65715 - RNA, 32 nt, Homo Sapiens
aaagcacuggggugggggagcaggagaaagcc

SEQ ID NO: 65716 - RNA, 32 nt, Homo Sapiens
caggugcaacaaaaacaagaaacaaaugugcc

SEQ ID NO: 65717 - RNA, 32 nt, Homo Sapiens
cgggcgagucucccgccuccucaggcccuagg

SEQ ID NO: 65718 - RNA, 32 nt, Homo Sapiens
uuuuauuaucuuacaugcuuguaucuucaguu

SEQ ID NO: 65719 - RNA, 32 nt, Homo Sapiens
uguugaaaucaucaauauucccaucauuaugg

SEQ ID NO: 65720 - RNA, 32 nt, Homo Sapiens
gggcgagaucacaggaccaaggugaaauuaaa

SEQ ID NO: 65721 - RNA, 32 nt, Homo Sapiens
ggcuggggaaagggaugggagccaggaaagau

SEQ ID NO: 65722 - RNA, 32 nt, Homo Sapiens
aucccugcuacucgggaggcugaaacaggaga

SEQ ID NO: 65723 - RNA, 32 nt, Homo Sapiens
uaauccuuacuuugcucuauucccccaacaua

SEQ ID NO: 65724 - RNA, 32 nt, Homo Sapiens
ugaugaucaggcagauuugaaaacagugacau

SEQ ID NO: 65725 - RNA, 30 nt, Homo Sapiens
gagguggggacaugggacgcagcggucgga

SEQ ID NO: 65726 - RNA, 32 nt, Homo Sapiens
gaaacaagccccugucccacgccgucugcacg

SEQ ID NO: 65727 - RNA, 32 nt, Homo Sapiens
gaggcugccggggcgcgggcugcugcgggaga

SEQ ID NO: 65728 - RNA, 32 nt, Homo Sapiens
cccgccccccgugcagagagccggcuccuggg

SEQ ID NO: 65729 - RNA, 32 nt, Homo Sapiens
uuuaauggacaauggcuguauuuuuuccaugu

SEQ ID NO: 65730 - RNA, 32 nt, Homo Sapiens
aguaacugccauuguuuguuuguuuuccuaau

SEQ ID NO: 65731 - RNA, 29 nt, Homo Sapiens
aaauacauauguaucuauauaagcauaug

SEQ ID NO: 65732 - RNA, 32 nt, Homo Sapiens
cccucugcgggccccgaggucugugcgggaau

SEQ ID NO: 65733 - RNA, 32 nt, Homo Sapiens
uguaaccauccauuggcuucucuucucuccuu

SEQ ID NO: 65734 - RNA, 32 nt, Homo Sapiens
uucaucccucgcgcccggguggaugcguggcu

SEQ ID NO: 65735 - RNA, 32 nt, Homo Sapiens
aguggaagcugauaauauauaggcaccuugua

SEQ ID NO: 65736 - RNA, 32 nt, Homo Sapiens
auuuaaacuuauuuuucuuaacuuuuaugggu

SEQ ID NO: 65737 - RNA, 32 nt, Homo Sapiens
ucuuauucuuuggcuccucauccaccgugaug

SEQ ID NO: 65738 - RNA, 32 nt, Homo Sapiens
ugcuaauguuuccauaguuuagguacucaaac

SEQ ID NO: 65739 - RNA, 32 nt, Homo Sapiens
ucuccucuccaagucucagauucccauuuaua

SEQ ID NO: 65740 - RNA, 32 nt, Homo Sapiens
gagagaacccaccauggugcugucuccugccg

SEQ ID NO: 65741 - RNA, 32 nt, Homo Sapiens
ucucaagaccucugaaaauauguuaagagcag

SEQ ID NO: 65742 - RNA, 32 nt, Homo Sapiens
aaaguggagguuacaacacaccuguggcccca

SEQ ID NO: 65743 - RNA, 32 nt, Homo Sapiens
gaugacgggacaaccucguguggagaacccag

SEQ ID NO: 65744 - RNA, 32 nt, Homo Sapiens
aaacuagcagaauguuuuuaaaacuuuuugcc

SEQ ID NO: 65745 - RNA, 32 nt, Homo Sapiens
aggcugccuggcuggaggcccgagccgauggc

SEQ ID NO: 65746 - RNA, 32 nt, Homo Sapiens
uucuggggcuggggggcggggcuggaggggaa

SEQ ID NO: 65747 - RNA, 32 nt, Homo Sapiens
aguccucaauuugguccauguccgaguccggc

SEQ ID NO: 65748 - RNA, 32 nt, Homo Sapiens
ccugugcacuguuagcuauggccacgggagcc

SEQ ID NO: 65749 - RNA, 32 nt, Homo Sapiens
cuccacacccucaugaggaaugccgagucuca

SEQ ID NO: 65750 - RNA, 32 nt, Homo Sapiens
aaauuggccugcaaagaggcugcugggagccc

SEQ ID NO: 65751 - RNA, 32 nt, Homo Sapiens
uguuguugucauuguuggugguuuuaagagag

SEQ ID NO: 65752 - RNA, 32 nt, Homo Sapiens
cccacuggcucuucuuaauuagaagugaccag

SEQ ID NO: 65753 - RNA, 32 nt, Homo Sapiens
aaugucauuauguagaaauauuauaaauccaa

SEQ ID NO: 65754 - RNA, 32 nt, Homo Sapiens
acagagcaggaguugccaaaacaaaggggauu

SEQ ID NO: 65755 - RNA, 32 nt, Homo Sapiens
cugaggggccucuuggaggaggagguguucau

SEQ ID NO: 65756 - RNA, 32 nt, Homo Sapiens
caauuaacuguuuauaauaacuguauacuaac

SEQ ID NO: 65757 - RNA, 32 nt, Homo Sapiens
caucagacaauuuuucgagugcccagcccucu

SEQ ID NO: 65758 - RNA, 32 nt, Homo Sapiens
ucucagccuccgacucccgucccuuucuucca

SEQ ID NO: 65759 - RNA, 32 nt, Homo Sapiens
gacccccuguucggggcuggggcccccaggaa

SEQ ID NO: 65760 - RNA, 32 nt, Homo Sapiens
agucugggcaaaauguauauaauccuguauau

SEQ ID NO: 65761 - RNA, 32 nt, Homo Sapiens
cgggccggccccaccugccucugcccagauuu

SEQ ID NO: 65762 - RNA, 32 nt, Homo Sapiens
gauauacagauuauaauuauaauuacauuauu

SEQ ID NO: 65763 - RNA, 32 nt, Homo Sapiens
agcggaggggugugucccacagcgacuuuccc

SEQ ID NO: 65764 - RNA, 32 nt, Homo Sapiens
acauaaugacaccugcagaaauguauucucug

SEQ ID NO: 65765 - RNA, 32 nt, Homo Sapiens
cauccuccgcgcgcacgagcucagucccuacu

SEQ ID NO: 65766 - RNA, 32 nt, Homo Sapiens
uccgcgggcggaagaggcggcggcggcggcag

SEQ ID NO: 65767 - RNA, 32 nt, Homo Sapiens
aucagaccugcccuaguaaucuuuuucuccag

SEQ ID NO: 65768 - RNA, 32 nt, Homo Sapiens
ggcauggacguucggggcaugcuggggcaagu

SEQ ID NO: 65769 - RNA, 32 nt, Homo Sapiens
cuugucggccccaccagugccucucccugcug

SEQ ID NO: 65770 - RNA, 32 nt, Homo Sapiens
cacaguccccugcagguggcagcccucuuuuc

SEQ ID NO: 65771 - RNA, 32 nt, Homo Sapiens
cauccucuuggaucucuucauguggcuuuucu

SEQ ID NO: 65772 - RNA, 32 nt, Homo Sapiens
cacagagccaggugcuuagggcuacccaugcc

SEQ ID NO: 65773 - RNA, 32 nt, Homo Sapiens
cacguccgcgggaagcugcagccccgggucac

SEQ ID NO: 65774 - RNA, 32 nt, Homo Sapiens
acgcuguucuagccggcccccucuccaggggu

SEQ ID NO: 65775 - RNA, 32 nt, Homo Sapiens
gacagagcuucuuuuguaaaucuuguaaaucu

SEQ ID NO: 65776 - RNA, 32 nt, Homo Sapiens
gcugaggcaucuguagcagcuguuucaaacac

SEQ ID NO: 65777 - RNA, 32 nt, Homo Sapiens
guaggaaucauucaagaucccuccucagugcc

SEQ ID NO: 65778 - RNA, 32 nt, Homo Sapiens
acuuugagcuguccugccuuucugaaccaaac

SEQ ID NO: 65779 - RNA, 32 nt, Homo Sapiens
auauaguguguuugggggaggggggacgcggg

SEQ ID NO: 65780 - RNA, 27 nt, Homo Sapiens
aaaugaaguaugucacauuugaagaug

SEQ ID NO: 65781 - RNA, 32 nt, Homo Sapiens
aaaauaauaauagaaauaaagcacacaauaaa

SEQ ID NO: 65782 - RNA, 32 nt, Homo Sapiens
auggaggagcaauuggucauggccuugguuuc

SEQ ID NO: 65783 - RNA, 32 nt, Homo Sapiens
acuaaaaagcauccugcugcugcggagcaauu

SEQ ID NO: 65784 - RNA, 32 nt, Homo Sapiens
ccaaagacuccaugggauggaccugagucagc

SEQ ID NO: 65785 - RNA, 32 nt, Homo Sapiens
ugcccaagcuccccggugcuaccuugccuuuc

SEQ ID NO: 65786 - RNA, 32 nt, Homo Sapiens
ugcagggacaguccccaccuucucuauagccg

SEQ ID NO: 65787 - RNA, 32 nt, Homo Sapiens
ggcagggcgugguggcucaugccuguaauccc

SEQ ID NO: 65788 - RNA, 32 nt, Homo Sapiens
agccgagcgggcccguuccgccggagcugagg

SEQ ID NO: 65789 - RNA, 32 nt, Homo Sapiens
cuaguuauacaagcaaaaucugcauaguaugu

SEQ ID NO: 65790 - RNA, 31 nt, Homo Sapiens
gggggcugcaccugccugccuuugccuaagg

SEQ ID NO: 65791 - RNA, 32 nt, Homo Sapiens
ugaguugauaaagauuguugaagagauccaaa

SEQ ID NO: 65792 - RNA, 32 nt, Homo Sapiens
uaaaaaauaagaauuuggcauuuuggaacuuu

SEQ ID NO: 65793 - RNA, 32 nt, Homo Sapiens
ugaaaggaagcagucuuggccaggcacggugg

SEQ ID NO: 65794 - RNA, 32 nt, Homo Sapiens
agauuuaaaaguauaugacauguauuuuguau

SEQ ID NO: 65795 - RNA, 32 nt, Homo Sapiens
gcaggacguuaggcccgggccccuggcacguc

SEQ ID NO: 65796 - RNA, 32 nt, Homo Sapiens
caauaaucacaauauaauaaguccugcaugua

SEQ ID NO: 65797 - RNA, 32 nt, Homo Sapiens
aaagaaaaggaaacauuaaccucuaaucagca

SEQ ID NO: 65798 - RNA, 31 nt, Homo Sapiens
gguacgagaucuagccugcccugccugccug

SEQ ID NO: 65799 - RNA, 32 nt, Homo Sapiens
uuaaaguuucugucuguaaaguguagcaucau

SEQ ID NO: 65800 - RNA, 32 nt, Homo Sapiens
ugaagaaagagaucuuucuuuuuuaaugaaaa

SEQ ID NO: 65801 - RNA, 32 nt, Homo Sapiens
ugcaucaucccaugaacaggcaagaucaaguc

SEQ ID NO: 65802 - RNA, 32 nt, Homo Sapiens
cugggaccuggcgggcggcccugaccgccuuc

SEQ ID NO: 65803 - RNA, 32 nt, Homo Sapiens
auuuaauaaaaauaaaguaaaauaugcaacuc

SEQ ID NO: 65804 - RNA, 32 nt, Homo Sapiens
auauuauacaucuuagagucuagggcagcagu

SEQ ID NO: 65805 - RNA, 32 nt, Homo Sapiens
auugacugccagcaguucagagcguuguauca

SEQ ID NO: 65806 - RNA, 32 nt, Homo Sapiens
uaucuuuaaugugguauuuucaauugcgugau

SEQ ID NO: 65807 - RNA, 32 nt, Homo Sapiens
ugcugcgaucccguucugcugcccguaauaaa

SEQ ID NO: 65808 - RNA, 32 nt, Homo Sapiens
gguagacaagggaugccugggcugacugggca

SEQ ID NO: 65809 - RNA, 32 nt, Homo Sapiens
uccagcagcugcuccugccugauucaacugua

SEQ ID NO: 65810 - RNA, 32 nt, Homo Sapiens
uugagucuaauagacuguuuugcaauaauuag

SEQ ID NO: 65811 - RNA, 32 nt, Homo Sapiens
ggaggcggggagagugcgggggcggaggcugg

SEQ ID NO: 65812 - RNA, 32 nt, Homo Sapiens
augucgcaagguggccguuacugucuuacuuc

SEQ ID NO: 65813 - RNA, 32 nt, Homo Sapiens
guuguuguuguuguuguuguuuuaaagcaguc

SEQ ID NO: 65814 - RNA, 32 nt, Homo Sapiens
gcccuggagcccuccccaggaugugagccagu

SEQ ID NO: 65815 - RNA, 32 nt, Homo Sapiens
agauuuaauuuucacaggcucaucugggagaa

SEQ ID NO: 65816 - RNA, 32 nt, Homo Sapiens
cuggauccauugcuuuuguuuacaauaggcac

SEQ ID NO: 65817 - RNA, 32 nt, Homo Sapiens
gacuuaccuguguugauugauuucauaugaug

SEQ ID NO: 65818 - RNA, 27 nt, Homo Sapiens
uguguccauuuugccugguauauaaca

SEQ ID NO: 65819 - RNA, 32 nt, Homo Sapiens
auauuaaguauuuacauguuccaaauauuuac

SEQ ID NO: 65820 - RNA, 31 nt, Homo Sapiens
aaaguuauuguaucccuuucaguguaccaag

SEQ ID NO: 65821 - RNA, 32 nt, Homo Sapiens
cacaaccccuggauauguuucauugucagauu

SEQ ID NO: 65822 - RNA, 32 nt, Homo Sapiens
gaggugcauaggacucggcagaaauggccucu

SEQ ID NO: 65823 - RNA, 32 nt, Homo Sapiens
ggcacuccccacuucaagaagcagcucugaga

SEQ ID NO: 65824 - RNA, 32 nt, Homo Sapiens
cagcuugauccugauuugguugaggcccagcg

SEQ ID NO: 65825 - RNA, 32 nt, Homo Sapiens
aagcauguggucuuauaguguuuggacagcug

SEQ ID NO: 65826 - RNA, 32 nt, Homo Sapiens
guguaaaaacaguucuguagauagaugguagu

SEQ ID NO: 65827 - RNA, 31 nt, Homo Sapiens
ggauuauuuggccccauuaagaauuaagagg

SEQ ID NO: 65828 - RNA, 32 nt, Homo Sapiens
uuaacacucuaacagagcugcagaccccugcc

SEQ ID NO: 65829 - RNA, 32 nt, Homo Sapiens
aaaaauggccuucaugugagugccaaauuuug

SEQ ID NO: 65830 - RNA, 32 nt, Homo Sapiens
ucuuguacaauguaaauuuuaagcaaaaaccu

SEQ ID NO: 65831 - RNA, 32 nt, Homo Sapiens
ucugcuguuacuuuucugcuaccacuauuuuu

SEQ ID NO: 65832 - RNA, 32 nt, Homo Sapiens
caagagauucucguuaguuacucuucagauua

SEQ ID NO: 65833 - RNA, 29 nt, Homo Sapiens
agaauucggggacugaugggaacugagcu

SEQ ID NO: 65834 - RNA, 32 nt, Homo Sapiens
ucgggcaguccgcgcgcccgcaacgcaggacc

SEQ ID NO: 65835 - RNA, 32 nt, Homo Sapiens
gcccugcacgggggugaccaucagugcccccc

SEQ ID NO: 65836 - RNA, 32 nt, Homo Sapiens
uuuuuugugaguuuuguggcaaaugaagcuug

SEQ ID NO: 65837 - RNA, 32 nt, Homo Sapiens
uguugcuuggcugggcggcugcgggauagggc

SEQ ID NO: 65838 - RNA, 32 nt, Homo Sapiens
ccucuaggccccacaucaacagugcacugcac

SEQ ID NO: 65839 - RNA, 32 nt, Homo Sapiens
uuauaaaaaaauuuacgucagaaagagauuuu

SEQ ID NO: 65840 - RNA, 32 nt, Homo Sapiens
ugggguccauccccuucccccaucccuaccac

SEQ ID NO: 65841 - RNA, 32 nt, Homo Sapiens
aagaugguuugcccauuuaaaaauaguguuau

SEQ ID NO: 65842 - RNA, 32 nt, Homo Sapiens
gagcugcgcggggcugcgcgccgccccugcuc

SEQ ID NO: 65843 - RNA, 30 nt, Homo Sapiens
gcugggugugguggcaugcaccuguagucc

SEQ ID NO: 65844 - RNA, 32 nt, Homo Sapiens
gaggucacuuacuauuucuuccuguuacaaau

SEQ ID NO: 65845 - RNA, 32 nt, Homo Sapiens
agucagacuucugagucagauuauguuauuua

SEQ ID NO: 65846 - RNA, 32 nt, Homo Sapiens
aauuuugugaauaaaauguuuuuauguauuuc

SEQ ID NO: 65847 - RNA, 32 nt, Homo Sapiens
aacaaguuuccaggcgaugcugaugcugccag

SEQ ID NO: 65848 - RNA, 32 nt, Homo Sapiens
cagcccucccaagucagacaccuccuucggag

SEQ ID NO: 65849 - RNA, 32 nt, Homo Sapiens
uguuauauccccagcaccaaaaauagugccuu

SEQ ID NO: 65850 - RNA, 32 nt, Homo Sapiens
aguuccaaacauuugcagaaaccauuaagcag

SEQ ID NO: 65851 - RNA, 32 nt, Homo Sapiens
gcgccuucggcauuggccgccgcgaugucagc

SEQ ID NO: 65852 - RNA, 32 nt, Homo Sapiens
gcaccauguggacuuuucugucccuacuguga

SEQ ID NO: 65853 - RNA, 32 nt, Homo Sapiens
acugauucaaccaguuggaucuggaaggggau

SEQ ID NO: 65854 - RNA, 32 nt, Homo Sapiens
cuccaucugcccggggccgcuaagggagcgca

SEQ ID NO: 65855 - RNA, 32 nt, Homo Sapiens
uucauugaauuugaaccauuuguaaaaucugu

SEQ ID NO: 65856 - RNA, 32 nt, Homo Sapiens
agagggucaggagaaaagcggaggaagcuggg

SEQ ID NO: 65857 - RNA, 32 nt, Homo Sapiens
guacuguacaaccauuauaucuguaaauaacu

SEQ ID NO: 65858 - RNA, 32 nt, Homo Sapiens
agccaagcggcgggcuggcggcgggcuccgac

SEQ ID NO: 65859 - RNA, 32 nt, Homo Sapiens
gaagcggaggcauaagcagagaggauucugga

SEQ ID NO: 65860 - RNA, 32 nt, Homo Sapiens
aaucucggcucacugcaacuucugccucccgg

SEQ ID NO: 65861 - RNA, 32 nt, Homo Sapiens
aauggauaaacaaaaauaaaauaccaucuacu

SEQ ID NO: 65862 - RNA, 32 nt, Homo Sapiens
ucauggaguuuguaaucugguuuuccacugaa

SEQ ID NO: 65863 - RNA, 32 nt, Homo Sapiens
ggagaaucgcuugaaccccggaggcggagguu

SEQ ID NO: 65864 - RNA, 32 nt, Homo Sapiens
uggggacgcgccggccguagcgagguccuuag

SEQ ID NO: 65865 - RNA, 32 nt, Homo Sapiens
augaauaagaucugggucgggcaugguggcac

SEQ ID NO: 65866 - RNA, 31 nt, Homo Sapiens
ggauguagaagcccugucagagcccugacua

SEQ ID NO: 65867 - RNA, 32 nt, Homo Sapiens
cuaaaugguaaucuggccggccugggagaaag

SEQ ID NO: 65868 - RNA, 32 nt, Homo Sapiens
gaaggccugagggaagcccacccgccccagag

SEQ ID NO: 65869 - RNA, 32 nt, Homo Sapiens
accuuagaugacccaagaugguuuucuggggu

SEQ ID NO: 65870 - RNA, 32 nt, Homo Sapiens
aggccuuggagcccacacaugggaucaagucc

SEQ ID NO: 65871 - RNA, 32 nt, Homo Sapiens
ucaguagccgcggcgcugcugcugggcugcug

SEQ ID NO: 65872 - RNA, 32 nt, Homo Sapiens
cuccgccuggcgggugcacccgggccggcgag

SEQ ID NO: 65873 - RNA, 32 nt, Homo Sapiens
ucuugccuggcaggugcccccgcugcuggccu

SEQ ID NO: 65874 - RNA, 32 nt, Homo Sapiens
cucuccagcgccauccugcccuggacaccacc

SEQ ID NO: 65875 - RNA, 32 nt, Homo Sapiens
guuaagccaggcuuuaaggaucugcaaaaaug

SEQ ID NO: 65876 - RNA, 32 nt, Homo Sapiens
ucuuacuacucuggucagucuccagcuaaccu

SEQ ID NO: 65877 - RNA, 32 nt, Homo Sapiens
ccugccugccuggccucggaggacccgcaugc

SEQ ID NO: 65878 - RNA, 32 nt, Homo Sapiens
cggaccuggacuagggccucggaggcuccucc

SEQ ID NO: 65879 - RNA, 32 nt, Homo Sapiens
cugguugcccccagcccccucccuccucccac

SEQ ID NO: 65880 - RNA, 32 nt, Homo Sapiens
accucccaggagcgcccuccccgcccucuccc

SEQ ID NO: 65881 - RNA, 32 nt, Homo Sapiens
cuuucucccuucccuucucccggucugcugau

SEQ ID NO: 65882 - RNA, 32 nt, Homo Sapiens
agucugaaguguuuuauaucaccaaucauaac

SEQ ID NO: 65883 - RNA, 32 nt, Homo Sapiens
accucaacccucaugcuguggagaaagucaga

SEQ ID NO: 65884 - RNA, 30 nt, Homo Sapiens
aggcgguuggcagugccgccuggcuuuugg

SEQ ID NO: 65885 - RNA, 32 nt, Homo Sapiens
uaugauuucaacauggauacauauuucaguuc

SEQ ID NO: 65886 - RNA, 32 nt, Homo Sapiens
uuggagaauugggccacagagguagugagcca

SEQ ID NO: 65887 - RNA, 32 nt, Homo Sapiens
aacaguccuggacuuucaaaaaccuugaauaa

SEQ ID NO: 65888 - RNA, 32 nt, Homo Sapiens
gggacuccgugucuucaaugguuuguuaguug

SEQ ID NO: 65889 - RNA, 32 nt, Homo Sapiens
aaagguuaaauccuaaucaucacaacagucuc

SEQ ID NO: 65890 - RNA, 32 nt, Homo Sapiens
gugacauaauuuccagugacuuguugauguga

SEQ ID NO: 65891 - RNA, 32 nt, Homo Sapiens
cuaucuuuuucuguauucuccucugaccagag

SEQ ID NO: 65892 - RNA, 32 nt, Homo Sapiens
ccuaaagagcauaauuagagacauaacauuca

SEQ ID NO: 65893 - RNA, 32 nt, Homo Sapiens
guucuagccaagguagauuuuacuuucaacuu

SEQ ID NO: 65894 - RNA, 31 nt, Homo Sapiens
ucaggccaggccaccaccacuggggagcggg

SEQ ID NO: 65895 - RNA, 32 nt, Homo Sapiens
ucguagcacgagccacucugaccaucaagauc

SEQ ID NO: 65896 - RNA, 32 nt, Homo Sapiens
ccggccccgcaugcuccacgucugcccuuugg

SEQ ID NO: 65897 - RNA, 32 nt, Homo Sapiens
ucugguuucuucauuuucuuccauuacuuagg

SEQ ID NO: 65898 - RNA, 32 nt, Homo Sapiens
auuuuaauauacguaugaaaugaaauauuugg

SEQ ID NO: 65899 - RNA, 32 nt, Homo Sapiens
aauggaauauaaauaucacaaaguuguuuaac

SEQ ID NO: 65900 - RNA, 32 nt, Homo Sapiens
auggcuguuucuguuuuccuuuucccugggca

SEQ ID NO: 65901 - RNA, 32 nt, Homo Sapiens
gacaaagaugacugaagaacuuuagcuaaaau

SEQ ID NO: 65902 - RNA, 32 nt, Homo Sapiens
uugcguucuuagaagucagauccagggagaaa

SEQ ID NO: 65903 - RNA, 32 nt, Homo Sapiens
uuaugaaagugaaaugcaaaugucuguuaucu

SEQ ID NO: 65904 - RNA, 32 nt, Homo Sapiens
agcuauacaguccuuacauuuuuucccuuggu

SEQ ID NO: 65905 - RNA, 32 nt, Homo Sapiens
uggacaaaguuaacagcaugagcauugaggag

SEQ ID NO: 65906 - RNA, 25 nt, Homo Sapiens
auggcgucccgcggccggcguccgg

SEQ ID NO: 65907 - RNA, 32 nt, Homo Sapiens
ucucuucugcguaggcguuggugcguccgccg

SEQ ID NO: 65908 - RNA, 32 nt, Homo Sapiens
ggaggggggcucccacucucuaccuucuuucc

SEQ ID NO: 65909 - RNA, 30 nt, Homo Sapiens
ggcugagagggcggcggcgggagcggagcg

SEQ ID NO: 65910 - RNA, 32 nt, Homo Sapiens
cgccuguaauucuagcacuuugggaggccaag

SEQ ID NO: 65911 - RNA, 32 nt, Homo Sapiens
ucaugaagacugggcuuccaauggggaggagg

SEQ ID NO: 65912 - RNA, 32 nt, Homo Sapiens
cuuacagccgcucgucagacuccagcagccaa

SEQ ID NO: 65913 - RNA, 32 nt, Homo Sapiens
gguucaaagaacuccggggaaacugggauaga

SEQ ID NO: 65914 - RNA, 32 nt, Homo Sapiens
gacaaacgagcggagggaagauaccuagaagc

SEQ ID NO: 65915 - RNA, 32 nt, Homo Sapiens
ccuaaucccaugaugccuggaaccuugauuac

SEQ ID NO: 65916 - RNA, 32 nt, Homo Sapiens
ucuuguuguuuauaugaaaacacucaaaauga

SEQ ID NO: 65917 - RNA, 32 nt, Homo Sapiens
uucuuaugaaugacucuagaaaaaucagaauc

SEQ ID NO: 65918 - RNA, 32 nt, Homo Sapiens
gcucucccugaacauccccaucaucacuggcg

SEQ ID NO: 65919 - RNA, 32 nt, Homo Sapiens
ggcugcugcacuggaaggcuauaggaaagaac

SEQ ID NO: 65920 - RNA, 32 nt, Homo Sapiens
cugucccucccucccccuagcaagguccaggc

SEQ ID NO: 65921 - RNA, 32 nt, Homo Sapiens
gcaggagcaaugccgccuggagacuauucgug

SEQ ID NO: 65922 - RNA, 32 nt, Homo Sapiens
guacugacugucagcaguggauaaaggagagg

SEQ ID NO: 65923 - RNA, 32 nt, Homo Sapiens
uagcuugcucccagcccccuccccaauuuggu

SEQ ID NO: 65924 - RNA, 30 nt, Homo Sapiens
aagugggguucccuguugccaguuagagag

SEQ ID NO: 65925 - RNA, 32 nt, Homo Sapiens
gaggcagucucacucugucacccaggcuggag

SEQ ID NO: 65926 - RNA, 32 nt, Homo Sapiens
gagacagucucgcucugucacccaggcuggag

SEQ ID NO: 65927 - RNA, 32 nt, Homo Sapiens
aaaauggaaaaauuauacugaacccauccaaa

SEQ ID NO: 65928 - RNA, 32 nt, Homo Sapiens
ccccuuucccccugcccccacccacggggccu

SEQ ID NO: 65929 - RNA, 32 nt, Homo Sapiens
ccugugccccgcccggccccugcccccuccaa

SEQ ID NO: 65930 - RNA, 32 nt, Homo Sapiens
aauucuggagggaaacaaacauucagaccaua

SEQ ID NO: 65931 - RNA, 32 nt, Homo Sapiens
uggcuacucugcagaagcgcgugcguuggucu

SEQ ID NO: 65932 - RNA, 32 nt, Homo Sapiens
auucauauauguacauaaaucugugaucccau

SEQ ID NO: 65933 - RNA, 32 nt, Homo Sapiens
uccauauaccauauuuuaauucuguuauagag

SEQ ID NO: 65934 - RNA, 32 nt, Homo Sapiens
guuuuuucuaggguugggagaauaguugagau

SEQ ID NO: 65935 - RNA, 32 nt, Homo Sapiens
agcgccugacucggcgggcccggagcaccgcc

SEQ ID NO: 65936 - RNA, 32 nt, Homo Sapiens
uauacguuaguuauuugcuauuauguagggaa

SEQ ID NO: 65937 - RNA, 31 nt, Homo Sapiens
gaccugcugccgggagaugcggcggcggccg

SEQ ID NO: 65938 - RNA, 32 nt, Homo Sapiens
cagcuuuuugauccucuacugugcaucuccuu

SEQ ID NO: 65939 - RNA, 32 nt, Homo Sapiens
cgagcaucucuucaccucuccuccucuugguc

SEQ ID NO: 65940 - RNA, 32 nt, Homo Sapiens
aauaauuuuuaacuuccaggaaauaaucugug

SEQ ID NO: 65941 - RNA, 32 nt, Homo Sapiens
cacacagaagcguggauugaagugagacagac

SEQ ID NO: 65942 - RNA, 32 nt, Homo Sapiens
aauauauaauuuaucuuaauuuuucuaacuuu

SEQ ID NO: 65943 - RNA, 32 nt, Homo Sapiens
aguacugcuggucuaagugcugaguuguaugu

SEQ ID NO: 65944 - RNA, 32 nt, Homo Sapiens
uuuugcuuuccuuauuccuuggcacugacuaa

SEQ ID NO: 65945 - RNA, 32 nt, Homo Sapiens
ugcaauuucaacauguaccauuaacugaaaau

SEQ ID NO: 65946 - RNA, 32 nt, Homo Sapiens
gugacacccacccacaaggaagucgugaaaaa

SEQ ID NO: 65947 - RNA, 32 nt, Homo Sapiens
gaugacaauuuaaggaagaaucuucugcccca

SEQ ID NO: 65948 - RNA, 32 nt, Homo Sapiens
guacaucaaacaauugaucaugugcuguaaag

SEQ ID NO: 65949 - RNA, 32 nt, Homo Sapiens
gggccugccccggccaccgcuuuaacgucgga

SEQ ID NO: 65950 - RNA, 32 nt, Homo Sapiens
ucucucuccacuucuucagugagcagccauga

SEQ ID NO: 65951 - RNA, 32 nt, Homo Sapiens
augcgccccccgccgccucucgggcugcgccg

SEQ ID NO: 65952 - RNA, 32 nt, Homo Sapiens
uggaggcucaccuggcagcugccgucucugcc

SEQ ID NO: 65953 - RNA, 32 nt, Homo Sapiens
cgggagggcgcggcccggguucccguuccccg

SEQ ID NO: 65954 - RNA, 32 nt, Homo Sapiens
cgguggguugagcugcgccuguaggcuguggg

SEQ ID NO: 65955 - RNA, 32 nt, Homo Sapiens
auauguugaugauggaagcuuuggauaaggaa

SEQ ID NO: 65956 - RNA, 32 nt, Homo Sapiens
cuuaggacuagaagauuagaaacuaccaaucc

SEQ ID NO: 65957 - RNA, 32 nt, Homo Sapiens
ucccacuccacuuuuccuucaagguaccaauc

SEQ ID NO: 65958 - RNA, 32 nt, Homo Sapiens
cagucccauuggugaggauauuaugacuuggu

SEQ ID NO: 65959 - RNA, 32 nt, Homo Sapiens
aggccgcguuugcggggccaaugagcgacucg

SEQ ID NO: 65960 - RNA, 30 nt, Homo Sapiens
ugaaaucaucaccacaaucaggauaguaga

SEQ ID NO: 65961 - RNA, 27 nt, Homo Sapiens
aauacucccuucuuccugcccccacac

SEQ ID NO: 65962 - RNA, 32 nt, Homo Sapiens
uucuggccaagcauggcggugcugugcaggca

SEQ ID NO: 65963 - RNA, 32 nt, Homo Sapiens
caaaccacaaacaaaauuaagauuuaaacugu

SEQ ID NO: 65964 - RNA, 32 nt, Homo Sapiens
guuuggaguauuuucuuaaaaaauucauugcu

SEQ ID NO: 65965 - RNA, 32 nt, Homo Sapiens
gccgaggcggguggaucagaaggucaggagau

SEQ ID NO: 65966 - RNA, 32 nt, Homo Sapiens
auuuucauuuguuuuucuuuaaauccuuuacu

SEQ ID NO: 65967 - RNA, 32 nt, Homo Sapiens
uguaaauuauuuauguuuuucuaaacaaauuu

SEQ ID NO: 65968 - RNA, 32 nt, Homo Sapiens
gcacuauggauuuugagcauuuagauuucuuu

SEQ ID NO: 65969 - RNA, 31 nt, Homo Sapiens
gucaggaaauaaaggggugugugucccuaag

SEQ ID NO: 65970 - RNA, 32 nt, Homo Sapiens
caacgccggugcgcggcuguguggggugcucc

SEQ ID NO: 65971 - RNA, 32 nt, Homo Sapiens
agugacagcugauguuaucagaaaaauccugu

SEQ ID NO: 65972 - RNA, 32 nt, Homo Sapiens
gccagccaaggugguuccugcuucacccacuc

SEQ ID NO: 65973 - RNA, 32 nt, Homo Sapiens
uccauccugggaaggaugugucugccccaggc

SEQ ID NO: 65974 - RNA, 32 nt, Homo Sapiens
agaccgcggacgucuguaaucucagaggcuug

SEQ ID NO: 65975 - RNA, 28 nt, Homo Sapiens
aggucugaagacuaacauuuugugaagu

SEQ ID NO: 65976 - RNA, 32 nt, Homo Sapiens
gagcagacagcagagaccauggagucucccuc

SEQ ID NO: 65977 - RNA, 32 nt, Homo Sapiens
caccuccguguucucguucucaucucugccgg

SEQ ID NO: 65978 - RNA, 32 nt, Homo Sapiens
gcuauauauagugaguuuuucuaaauuaaggg

SEQ ID NO: 65979 - RNA, 32 nt, Homo Sapiens
cagaaaacuaaaaaggaagaaaaaagaucccu

SEQ ID NO: 65980 - RNA, 32 nt, Homo Sapiens
guagaggcagaaaaaggaggauaaagauaaca

SEQ ID NO: 65981 - RNA, 32 nt, Homo Sapiens
gggggcagcacagccggcccccggcccacguu

SEQ ID NO: 65982 - RNA, 32 nt, Homo Sapiens
cuccguuugccuccccgcuuuggugaugcugu

SEQ ID NO: 65983 - RNA, 32 nt, Homo Sapiens
cuuuuaugacaauggagacagaggaauugugg

SEQ ID NO: 65984 - RNA, 32 nt, Homo Sapiens
uucacccgccucaucacccaagccaggcacca

SEQ ID NO: 65985 - RNA, 32 nt, Homo Sapiens
guggaauaaagaagcggggagaaggaucaggc

SEQ ID NO: 65986 - RNA, 32 nt, Homo Sapiens
caaauggcaacauggaauauuguccuccaugc

SEQ ID NO: 65987 - RNA, 32 nt, Homo Sapiens
gcucucaguggaggccgagagaucuggaaucg

SEQ ID NO: 65988 - RNA, 32 nt, Homo Sapiens
aaugcagcugcgcucuuagugcuugagagccc

SEQ ID NO: 65989 - RNA, 32 nt, Homo Sapiens
uuuaaauucuguacuuauaucuguaaaauagc

SEQ ID NO: 65990 - RNA, 32 nt, Homo Sapiens
uacauuuuaaacauuggcucgaaacuucagag

SEQ ID NO: 65991 - RNA, 32 nt, Homo Sapiens
gaagcacacgggggagcggcccuacaagugug

SEQ ID NO: 65992 - RNA, 32 nt, Homo Sapiens
ugcaagcuuggggcuccgucuggugcugcuua

SEQ ID NO: 65993 - RNA, 32 nt, Homo Sapiens
uuuguaaagggacugugccaucuuucuucucu

SEQ ID NO: 65994 - RNA, 32 nt, Homo Sapiens
aguugcuucacauuuuucaucaucuuuaagga

SEQ ID NO: 65995 - RNA, 32 nt, Homo Sapiens
accuucuggugugcccuuuggccacggacacu

SEQ ID NO: 65996 - RNA, 30 nt, Homo Sapiens
uugucugggaguggcauggggagccuucug

SEQ ID NO: 65997 - RNA, 32 nt, Homo Sapiens
agugcucgacgggcuaggaacuguccugcuug

SEQ ID NO: 65998 - RNA, 32 nt, Homo Sapiens
cuucagaacucccccgagccugcuccuuccca

SEQ ID NO: 65999 - RNA, 32 nt, Homo Sapiens
uuauguacaggacauguacugagacaaaaagg

SEQ ID NO: 66000 - RNA, 32 nt, Homo Sapiens
cugguggaggugcacagaggcuuuugagucag

SEQ ID NO: 66001 - RNA, 32 nt, Homo Sapiens
uccagcuccaagaugcugagccugaagcuccc

SEQ ID NO: 66002 - RNA, 30 nt, Homo Sapiens
ggacgauggugccccuugugccugcacugg

SEQ ID NO: 66003 - RNA, 32 nt, Homo Sapiens
ugaacuagagaaugcugagucuggaggagacg

SEQ ID NO: 66004 - RNA, 32 nt, Homo Sapiens
gugcgccggcgccccggacgccgcgauuuugc

SEQ ID NO: 66005 - RNA, 32 nt, Homo Sapiens
acagcugguacaugggaaagugcuaagagggc

SEQ ID NO: 66006 - RNA, 32 nt, Homo Sapiens
cauguauuuuuccacuuugaagauuuuugcaa

SEQ ID NO: 66007 - RNA, 32 nt, Homo Sapiens
agucugggauguaaagacaaaguaaaaccuga

SEQ ID NO: 66008 - RNA, 32 nt, Homo Sapiens
gaggccagugcucagguuugcaucauaaguga

SEQ ID NO: 66009 - RNA, 32 nt, Homo Sapiens
cauuucauaguuacagauuaaaucuacuugac

SEQ ID NO: 66010 - RNA, 32 nt, Homo Sapiens
cccucccacgccccccagcgcacauguagucc

SEQ ID NO: 66011 - RNA, 32 nt, Homo Sapiens
uuacugcuaccacuaacagguuguaaauagaa

SEQ ID NO: 66012 - RNA, 32 nt, Homo Sapiens
auagaauuugaaagaugcuuguaaugugaguu

SEQ ID NO: 66013 - RNA, 32 nt, Homo Sapiens
gagcggcucagguguccugucgugcucaccug

SEQ ID NO: 66014 - RNA, 32 nt, Homo Sapiens
uuuuugauuauuuguagagauagggucucacu

SEQ ID NO: 66015 - RNA, 32 nt, Homo Sapiens
agguuacccucuauuugcagcuuuuauguuua

SEQ ID NO: 66016 - RNA, 32 nt, Homo Sapiens
cccuggccgggcgcgguggcucaggccuguaa

SEQ ID NO: 66017 - RNA, 32 nt, Homo Sapiens
uaagcauuuuagcagccacacaaaaucucugg

SEQ ID NO: 66018 - RNA, 32 nt, Homo Sapiens
agcaggcggcucuggagccuaagcuggaccug

SEQ ID NO: 66019 - RNA, 32 nt, Homo Sapiens
uuuguccccacuugccugcaccgugccugacu

SEQ ID NO: 66020 - RNA, 32 nt, Homo Sapiens
ugggaccccgggaaccucuccugccggaagcc

SEQ ID NO: 66021 - RNA, 32 nt, Homo Sapiens
agaaaguguccaguagggcggaggcggaggcc

SEQ ID NO: 66022 - RNA, 32 nt, Homo Sapiens
ccugcccagacuagcugcaccuccucauuccc

SEQ ID NO: 66023 - RNA, 32 nt, Homo Sapiens
acugcuggccagaugcggggacaggcuggaau

SEQ ID NO: 66024 - RNA, 32 nt, Homo Sapiens
uuccucccggcugcaucuccaggccggacucu

SEQ ID NO: 66025 - RNA, 32 nt, Homo Sapiens
uucaugagcaauauuucuuucuuaauagaaug

SEQ ID NO: 66026 - RNA, 32 nt, Homo Sapiens
ggccagagagggaagacacagaugaugaagcu

SEQ ID NO: 66027 - RNA, 32 nt, Homo Sapiens
ggaaugugaaaauuauuuuuguuaaaacagga

SEQ ID NO: 66028 - RNA, 32 nt, Homo Sapiens
ggaccgggaagaugaacaacggcggcaaagcc

SEQ ID NO: 66029 - RNA, 32 nt, Homo Sapiens
cgcuggugacagggccaggguuaugcaggaag

SEQ ID NO: 66030 - RNA, 32 nt, Homo Sapiens
gucaugccuuggcguuucagcuccucguuguc

SEQ ID NO: 66031 - RNA, 32 nt, Homo Sapiens
ucagccuccugccauggugcagcccuccucuc

SEQ ID NO: 66032 - RNA, 32 nt, Homo Sapiens
accugaguugaccauccuuucuuuuuauagua

SEQ ID NO: 66033 - RNA, 32 nt, Homo Sapiens
ugcagggggcagagaccgcagcuaccugccgg

SEQ ID NO: 66034 - RNA, 32 nt, Homo Sapiens
gugacaggcagacacaugcuguuggccucaag

SEQ ID NO: 66035 - RNA, 32 nt, Homo Sapiens
ucuucugacauuuuauucagcauuccuaggua

SEQ ID NO: 66036 - RNA, 32 nt, Homo Sapiens
aagcuugcuccgcgccacugcccgccggcccg

SEQ ID NO: 66037 - RNA, 32 nt, Homo Sapiens
gggcaaacaaaauuaugugaauuguguuguuu

SEQ ID NO: 66038 - RNA, 32 nt, Homo Sapiens
gccacuucuaacuugugucacuuuacuugagg

SEQ ID NO: 66039 - RNA, 32 nt, Homo Sapiens
cggucuggagccucugggcuucugccuacaga

SEQ ID NO: 66040 - RNA, 32 nt, Homo Sapiens
agccagaacuccaccccggcgcccgcgccaug

SEQ ID NO: 66041 - RNA, 32 nt, Homo Sapiens
gcaggugcaggugcaggagggaggcggcucug

SEQ ID NO: 66042 - RNA, 32 nt, Homo Sapiens
auuagacagucaauuccauuaaaauaagaagu

SEQ ID NO: 66043 - RNA, 32 nt, Homo Sapiens
gccugcucguccaggauggccgcggccaaggc

SEQ ID NO: 66044 - RNA, 32 nt, Homo Sapiens
aggggcaguguuagagcagggcuggucauacc

SEQ ID NO: 66045 - RNA, 32 nt, Homo Sapiens
cuucuucccucuauuuauuuuuaugucaggug

SEQ ID NO: 66046 - RNA, 32 nt, Homo Sapiens
cggagcguccacuuccagggacaggcaguggu

SEQ ID NO: 66047 - RNA, 32 nt, Homo Sapiens
gcguucugucuccuccaugucaccacuacuuu

SEQ ID NO: 66048 - RNA, 32 nt, Homo Sapiens
guacggucaguucccuaugguuucuguagauc

SEQ ID NO: 66049 - RNA, 32 nt, Homo Sapiens
agaggaaauggcugcuucaucaucauccuccu

SEQ ID NO: 66050 - RNA, 32 nt, Homo Sapiens
agcuggacauacagaucagggaggcugucgug

SEQ ID NO: 66051 - RNA, 32 nt, Homo Sapiens
gcuaggaaucagagcucuguucccaucuccac

SEQ ID NO: 66052 - RNA, 32 nt, Homo Sapiens
gcccugguuuccuuuuucuuagcaaucuuuuc

SEQ ID NO: 66053 - RNA, 32 nt, Homo Sapiens
cuuucuacccuuucuuuuuuucuuuauauagu

SEQ ID NO: 66054 - RNA, 32 nt, Homo Sapiens
uuuauagcuacauauuuaccuugaauguuaca

SEQ ID NO: 66055 - RNA, 32 nt, Homo Sapiens
gguuucacuauguuggccaggcuggucucgaa

SEQ ID NO: 66056 - RNA, 32 nt, Homo Sapiens
gguuucaccauguuggucaggcuggucucgaa

SEQ ID NO: 66057 - RNA, 32 nt, Homo Sapiens
aggucaucuguuuuccucuuuuccucuccucu

SEQ ID NO: 66058 - RNA, 32 nt, Homo Sapiens
gugaagccuuuacuuguuacuacuucaacagu

SEQ ID NO: 66059 - RNA, 32 nt, Homo Sapiens
ucaagaaugacacagcugcugugcagcuccac

SEQ ID NO: 66060 - RNA, 32 nt, Homo Sapiens
gaagaguaccucuggaaggucacggacaucgg

SEQ ID NO: 66061 - RNA, 30 nt, Homo Sapiens
gcuggugucugugccggagccagcucauau

SEQ ID NO: 66062 - RNA, 32 nt, Homo Sapiens
agugaagaugagaauagauccuauguggagau

SEQ ID NO: 66063 - RNA, 32 nt, Homo Sapiens
uuaguucauuuuccuuuuuucuuuaaugaauc

SEQ ID NO: 66064 - RNA, 32 nt, Homo Sapiens
aauaccuauaaaauauaaaguaacauagcucu

SEQ ID NO: 66065 - RNA, 32 nt, Homo Sapiens
ugccgcugucccagcccagucccucucccgga

SEQ ID NO: 66066 - RNA, 32 nt, Homo Sapiens
cggggagcgcgccggggcugccccccgaauga

SEQ ID NO: 66067 - RNA, 32 nt, Homo Sapiens
ggcagguacugacuuccauagccaggaccuag

SEQ ID NO: 66068 - RNA, 27 nt, Homo Sapiens
uugaagugcuucuucagagaccuuucu

SEQ ID NO: 66069 - RNA, 32 nt, Homo Sapiens
auagaugccaauggaugacuugguugaaccug

SEQ ID NO: 66070 - RNA, 32 nt, Homo Sapiens
gugacucaagggcccaggauccucaggggggu

SEQ ID NO: 66071 - RNA, 32 nt, Homo Sapiens
gggauuacaucgaaaacaaaauagagguguuu

SEQ ID NO: 66072 - RNA, 32 nt, Homo Sapiens
uuccuuuuaaucaaaacuacccgcccccgccc

SEQ ID NO: 66073 - RNA, 32 nt, Homo Sapiens
ucuccuguaagaaaaugaauguuguggaaauu

SEQ ID NO: 66074 - RNA, 32 nt, Homo Sapiens
ugaaccccuaaaauuaucagacuuccuuuuuc

SEQ ID NO: 66075 - RNA, 32 nt, Homo Sapiens
aacuuuucugccggcccagaggccccagggcg

SEQ ID NO: 66076 - RNA, 32 nt, Homo Sapiens
uaaaauccaauauucguauauuuuaaauuauc

SEQ ID NO: 66077 - RNA, 32 nt, Homo Sapiens
ccaaucuguaaauuguguaguccauccuuucc

SEQ ID NO: 66078 - RNA, 32 nt, Homo Sapiens
ggaaugucaacuauuaacauggaggcggaggu

SEQ ID NO: 66079 - RNA, 32 nt, Homo Sapiens
gcagucgccgugaagauggcgucuaccagccg

SEQ ID NO: 66080 - RNA, 32 nt, Homo Sapiens
ggguggccggcgacaagauggcagcagcgugu

SEQ ID NO: 66081 - RNA, 31 nt, Homo Sapiens
accaccauggccugccugcccugccuccguc

SEQ ID NO: 66082 - RNA, 32 nt, Homo Sapiens
acuaggaaacaaaaugucuucaguaucuaaag

SEQ ID NO: 66083 - RNA, 32 nt, Homo Sapiens
aaagaaacuugacuaagagacaauauaagaac

SEQ ID NO: 66084 - RNA, 32 nt, Homo Sapiens
ucacuacugaguugaaucauggcuaucauuag

SEQ ID NO: 66085 - RNA, 32 nt, Homo Sapiens
cuaauaucaguuauuuuuccugauccacccuc

SEQ ID NO: 66086 - RNA, 32 nt, Homo Sapiens
cgcggcuucuucaugcuuuuucuucucaccau

SEQ ID NO: 66087 - RNA, 32 nt, Homo Sapiens
agcccugccuccagcccucaccucucucaccc

SEQ ID NO: 66088 - RNA, 32 nt, Homo Sapiens
cacagaauaaauuuauauuacacauuuuaaaa

SEQ ID NO: 66089 - RNA, 32 nt, Homo Sapiens
ucuacucccacuuuucggagacagugacuggu

SEQ ID NO: 66090 - RNA, 32 nt, Homo Sapiens
acggugagcaacguugggggcccgcaguacuu

SEQ ID NO: 66091 - RNA, 32 nt, Homo Sapiens
gguggcaggaggaggguggaggcuaagaacac

SEQ ID NO: 66092 - RNA, 32 nt, Homo Sapiens
gccugcgggccuuggcagcgccgccccugccc

SEQ ID NO: 66093 - RNA, 32 nt, Homo Sapiens
uuccagccccugccacccacagacacgggcug

SEQ ID NO: 66094 - RNA, 32 nt, Homo Sapiens
uggacgcgcgcccccuggcugcgagggcugcg

SEQ ID NO: 66095 - RNA, 32 nt, Homo Sapiens
acggaagggggaggagugcucaacggggaggg

SEQ ID NO: 66096 - RNA, 32 nt, Homo Sapiens
aaauguuaauuagaauaauuggaaucacuuuu

SEQ ID NO: 66097 - RNA, 32 nt, Homo Sapiens
aagcuaauauuuucccaccugucuuuuucugg

SEQ ID NO: 66098 - RNA, 32 nt, Homo Sapiens
aauuaguugcugucacaaaaggagggaaguag

SEQ ID NO: 66099 - RNA, 32 nt, Homo Sapiens
uaagagguugggcuuuggauagauagacagac

SEQ ID NO: 66100 - RNA, 32 nt, Homo Sapiens
gaacacguuucugcccaucuccaggucuuagu

SEQ ID NO: 66101 - RNA, 32 nt, Homo Sapiens
ccucgcucccggaccccacggcugcaaacuga

SEQ ID NO: 66102 - RNA, 28 nt, Homo Sapiens
aagauaguggcuacugauguucaagugg

SEQ ID NO: 66103 - RNA, 32 nt, Homo Sapiens
uggugggcgucguggccauggcggcggcuauc

SEQ ID NO: 66104 - RNA, 32 nt, Homo Sapiens
cucaaagaccucuggcugcaguguggacuuag

SEQ ID NO: 66105 - RNA, 32 nt, Homo Sapiens
gauuaagaaaaaauuaacauuauagauacucu

SEQ ID NO: 66106 - RNA, 32 nt, Homo Sapiens
cagagcguguggaccccaaacaagucugcgca

SEQ ID NO: 66107 - RNA, 32 nt, Homo Sapiens
gccagugcuuggagaugagaauugcugaagau

SEQ ID NO: 66108 - RNA, 32 nt, Homo Sapiens
uccucuuaauguuuauacugauuacuguuaca

SEQ ID NO: 66109 - RNA, 32 nt, Homo Sapiens
cccucgcgccgcgggucccgggaacacaggcg

SEQ ID NO: 66110 - RNA, 32 nt, Homo Sapiens
uuaauaaaguaguuauuuuauaggggauacuu

SEQ ID NO: 66111 - RNA, 31 nt, Homo Sapiens
uccuggcaccacuuccugcccccaccagugc

SEQ ID NO: 66112 - RNA, 32 nt, Homo Sapiens
cuuugcagauauauauuuuuuaaauggcacua

SEQ ID NO: 66113 - RNA, 32 nt, Homo Sapiens
cuuccuuucuggaguuugcagaguucagcaau

SEQ ID NO: 66114 - RNA, 32 nt, Homo Sapiens
gauuuuaaaaauugaguuaaagaugacugugu

SEQ ID NO: 66115 - RNA, 32 nt, Homo Sapiens
aaggagggucugcggcccgucugcaccacccu

SEQ ID NO: 66116 - RNA, 32 nt, Homo Sapiens
cauuucuuucccucugugaaaugauuggucag

SEQ ID NO: 66117 - RNA, 32 nt, Homo Sapiens
cauuuguaaggauaaacuuuucccacaaauuu

SEQ ID NO: 66118 - RNA, 32 nt, Homo Sapiens
auaaggagcaaacaaccaagaucccuugcaug

SEQ ID NO: 66119 - RNA, 32 nt, Homo Sapiens
guccuucuuguccacaccccuuauccccaggc

SEQ ID NO: 66120 - RNA, 32 nt, Homo Sapiens
caugucugccagcggaaacuucucgagcuccc

SEQ ID NO: 66121 - RNA, 31 nt, Homo Sapiens
caaaaaaguuugacuuuuguccaguaaauug

SEQ ID NO: 66122 - RNA, 32 nt, Homo Sapiens
gugcaauaaaauguauuuguuuguauuuugug

SEQ ID NO: 66123 - RNA, 32 nt, Homo Sapiens
ucgcgugugcaaucucccgcuaccucccgggg

SEQ ID NO: 66124 - RNA, 32 nt, Homo Sapiens
caacaccaggacuuaagacaaaugggacugau

SEQ ID NO: 66125 - RNA, 32 nt, Homo Sapiens
ggcucagaaaauaaaaacauccaguuugugga

SEQ ID NO: 66126 - RNA, 32 nt, Homo Sapiens
gaugcuugucuccugauccuuauucuuuaagu

SEQ ID NO: 66127 - RNA, 32 nt, Homo Sapiens
uucaaccaacugaguuuuuucuuuaagaaagg

SEQ ID NO: 66128 - RNA, 32 nt, Homo Sapiens
gaccucaaugugucaccuccuuucuaguuucc

SEQ ID NO: 66129 - RNA, 32 nt, Homo Sapiens
gcgguuccagccccgccgcgguuccggccccg

SEQ ID NO: 66130 - RNA, 32 nt, Homo Sapiens
aaaccuagaugguguagcccacuacacaccua

SEQ ID NO: 66131 - RNA, 32 nt, Homo Sapiens
uccugagcagggcccugcagccuggcuggcug

SEQ ID NO: 66132 - RNA, 32 nt, Homo Sapiens
cuuccaaacgcagguagccgaccugcaggagg

SEQ ID NO: 66133 - RNA, 32 nt, Homo Sapiens
gccuggagguucucccuggggguggcgggagg

SEQ ID NO: 66134 - RNA, 32 nt, Homo Sapiens
gauaaaacaucucucuucuccuucccaacuac

SEQ ID NO: 66135 - RNA, 32 nt, Homo Sapiens
gucuccuacaguuggcuucucucuuugauguu

SEQ ID NO: 66136 - RNA, 32 nt, Homo Sapiens
cuggacccaagcccaaggcccagccugggaca

SEQ ID NO: 66137 - RNA, 32 nt, Homo Sapiens
cagcuccgcggcggcguccggggucuccagua

SEQ ID NO: 66138 - RNA, 32 nt, Homo Sapiens
caucaaugucuugaaggaaauuacuguaucug

SEQ ID NO: 66139 - RNA, 32 nt, Homo Sapiens
uggcugcccaaccccauccagagcaucugcuu

SEQ ID NO: 66140 - RNA, 32 nt, Homo Sapiens
ccccagcccugggccugggcugccgacaccug

SEQ ID NO: 66141 - RNA, 32 nt, Homo Sapiens
aggaagaugaagacgaggaggaggcggcgagc

SEQ ID NO: 66142 - RNA, 32 nt, Homo Sapiens
uucucaguguauguaaaauuuauauuuuguuu

SEQ ID NO: 66143 - RNA, 32 nt, Homo Sapiens
agccaguuggugcuacugcuguggccagcugg

SEQ ID NO: 66144 - RNA, 32 nt, Homo Sapiens
ugccaggacucagcaguggccuggacaacagc

SEQ ID NO: 66145 - RNA, 32 nt, Homo Sapiens
gcccgcaggaagcaggaaugucuuggaaaccg

SEQ ID NO: 66146 - RNA, 32 nt, Homo Sapiens
aaauguggaccaguucccucagcccucauuaa

SEQ ID NO: 66147 - RNA, 32 nt, Homo Sapiens
agagugcucagagaccuccccacugcggcuag

SEQ ID NO: 66148 - RNA, 32 nt, Homo Sapiens
acgagucuuucauucggugugaacuuuucucu

SEQ ID NO: 66149 - RNA, 32 nt, Homo Sapiens
gcaugacaagcugcauauucagccucaguuuu

SEQ ID NO: 66150 - RNA, 32 nt, Homo Sapiens
guauggugguggcucaggugggaggaagagag

SEQ ID NO: 66151 - RNA, 32 nt, Homo Sapiens
cugagucucuucuggccaugggcccccggagc

SEQ ID NO: 66152 - RNA, 32 nt, Homo Sapiens
uggcgucaugcaaagucaugcaaaggcuggga

SEQ ID NO: 66153 - RNA, 31 nt, Homo Sapiens
uucuggcagaauaaacagguguuuuuaguuu

SEQ ID NO: 66154 - RNA, 32 nt, Homo Sapiens
aauuuguguauuauuguaucauaugcauucug

SEQ ID NO: 66155 - RNA, 32 nt, Homo Sapiens
gugcuccccuccccagaucuuaauuaaaccag

SEQ ID NO: 66156 - RNA, 32 nt, Homo Sapiens
gguuggcgcuggccuguguugcaggggacaag

SEQ ID NO: 66157 - RNA, 32 nt, Homo Sapiens
uccaacggcugcgcgcgcacuucggucgcggg

SEQ ID NO: 66158 - RNA, 32 nt, Homo Sapiens
aaguaaaguaagucauccaaggucacacagca

SEQ ID NO: 66159 - RNA, 32 nt, Homo Sapiens
uggccaggacagccuuccuuucccuuuccagc

SEQ ID NO: 66160 - RNA, 32 nt, Homo Sapiens
accucaaaagguuaaauuaaauacuagcaacu

SEQ ID NO: 66161 - RNA, 32 nt, Homo Sapiens
ccucucacccacaaaacaauguaaucccagcg

SEQ ID NO: 66162 - RNA, 32 nt, Homo Sapiens
uuggggguuguuuucuacauaauugugaaaac

SEQ ID NO: 66163 - RNA, 32 nt, Homo Sapiens
ucugggugggagaggauacugcgggcaccaga

SEQ ID NO: 66164 - RNA, 32 nt, Homo Sapiens
caagugaaggcacagacgcacgggacaggaga

SEQ ID NO: 66165 - RNA, 32 nt, Homo Sapiens
acauacuucuguguuuaaauuuucauucuuac

SEQ ID NO: 66166 - RNA, 32 nt, Homo Sapiens
caaugucaauggcaucaggagggcgccccaag

SEQ ID NO: 66167 - RNA, 32 nt, Homo Sapiens
aguguauuauagaaaaaauaaaaacuacaauc

SEQ ID NO: 66168 - RNA, 32 nt, Homo Sapiens
auugcagauguaaaaauagauaaacuauacac

SEQ ID NO: 66169 - RNA, 32 nt, Homo Sapiens
ggacuggcauuucagaaucagauucuucauuu

SEQ ID NO: 66170 - RNA, 32 nt, Homo Sapiens
ugugauugguuuucuuuuuguuuuaagcuaaa

SEQ ID NO: 66171 - RNA, 32 nt, Homo Sapiens
cagaugcagggcccuuggcucuggccucucac

SEQ ID NO: 66172 - RNA, 32 nt, Homo Sapiens
guaacucacaugccuucuaaacgugaacuaag

SEQ ID NO: 66173 - RNA, 32 nt, Homo Sapiens
ggggaggauguacguggccauguaugaagcca

SEQ ID NO: 66174 - RNA, 32 nt, Homo Sapiens
aggguggacagagggaggaucggucauggcag

SEQ ID NO: 66175 - RNA, 32 nt, Homo Sapiens
uuauaucugaagaacauacacuauuaauaaau

SEQ ID NO: 66176 - RNA, 32 nt, Homo Sapiens
cacuuuauuauuauuuuuucuguuuguuuugg

SEQ ID NO: 66177 - RNA, 32 nt, Homo Sapiens
caaaggccgcgugaacagccagcguggggcuc

SEQ ID NO: 66178 - RNA, 32 nt, Homo Sapiens
aaaugaugucauaagcgaucacuuccuauaug

SEQ ID NO: 66179 - RNA, 32 nt, Homo Sapiens
caagcucaggguuuuaagcugugcagugcacu

SEQ ID NO: 66180 - RNA, 32 nt, Homo Sapiens
cauaacagaaaaggcuaagcagaaaguaaauu

SEQ ID NO: 66181 - RNA, 32 nt, Homo Sapiens
gagauuucaaagauuaagauuauuuugauaac

SEQ ID NO: 66182 - RNA, 32 nt, Homo Sapiens
ucucuagacugucccaccuggaccaggcacca

SEQ ID NO: 66183 - RNA, 32 nt, Homo Sapiens
guuuucacugucacugagucaaaccuggauga

SEQ ID NO: 66184 - RNA, 32 nt, Homo Sapiens
gauuuuugacgugccuggcccugagcgaagca

SEQ ID NO: 66185 - RNA, 32 nt, Homo Sapiens
aagcauacaaaacacauaaucugggaugaguu

SEQ ID NO: 66186 - RNA, 32 nt, Homo Sapiens
gcgcgaggggcgggcuuucaggcucccggcgg

SEQ ID NO: 66187 - RNA, 32 nt, Homo Sapiens
aaggacgugguugccuggccugggcugcgccc

SEQ ID NO: 66188 - RNA, 32 nt, Homo Sapiens
ggaggugauguagcacuuccaagauggcacca

SEQ ID NO: 66189 - RNA, 32 nt, Homo Sapiens
uguuucuuuaacaaaaaguuauagaaauuucu

SEQ ID NO: 66190 - RNA, 32 nt, Homo Sapiens
gccuagauuucagaggauguauggaaacuccu

SEQ ID NO: 66191 - RNA, 32 nt, Homo Sapiens
aaaguuaagaacuuaaagauucuucacaacaa

SEQ ID NO: 66192 - RNA, 32 nt, Homo Sapiens
cagagacacugaggugucuugauuauggagga

SEQ ID NO: 66193 - RNA, 32 nt, Homo Sapiens
ccugccaccaaauuauuucuggauucucuuca

SEQ ID NO: 66194 - RNA, 32 nt, Homo Sapiens
ccgccccuccaagccacagaucaucuuuggau

SEQ ID NO: 66195 - RNA, 32 nt, Homo Sapiens
gccacaucuaccugcaagggccaggcaugguu

SEQ ID NO: 66196 - RNA, 32 nt, Homo Sapiens
cuuuugcguauauaauugcuuacagcuuuucu

SEQ ID NO: 66197 - RNA, 32 nt, Homo Sapiens
acccugucccggcuccgccccgcggcccuggc

SEQ ID NO: 66198 - RNA, 32 nt, Homo Sapiens
ccacaguggcccuuggaagcaggccgcagagu

SEQ ID NO: 66199 - RNA, 32 nt, Homo Sapiens
ggccuaggcagagcccccaucaccucaggcuu

SEQ ID NO: 66200 - RNA, 32 nt, Homo Sapiens
gccacaccaggcccagcuggccccacagcaaa

SEQ ID NO: 66201 - RNA, 32 nt, Homo Sapiens
gauuucagaauaaggaggagccugcaggaagc

SEQ ID NO: 66202 - RNA, 32 nt, Homo Sapiens
ucuguugaagccaugccacuacaggauacauu

SEQ ID NO: 66203 - RNA, 32 nt, Homo Sapiens
ggggcgggaggagagaggcagcucggcucggc

SEQ ID NO: 66204 - RNA, 32 nt, Homo Sapiens
agagggaagaaggaacaguggaggcgggacgc

SEQ ID NO: 66205 - RNA, 32 nt, Homo Sapiens
uuuucuacauacauuauuuucuuaauuguuag

SEQ ID NO: 66206 - RNA, 32 nt, Homo Sapiens
cgcaggcggacgggaacagggcgucacugagg

SEQ ID NO: 66207 - RNA, 32 nt, Homo Sapiens
accccagcugucugcgcgucugacucuugugg

SEQ ID NO: 66208 - RNA, 31 nt, Homo Sapiens
cuucaguaugacaugaaaucuuuguucaucu

SEQ ID NO: 66209 - RNA, 32 nt, Homo Sapiens
guuucugguucuuuccucuaacaccuuccaug

SEQ ID NO: 66210 - RNA, 32 nt, Homo Sapiens
guuccggggaccgaagggcgcggcacguaggg

SEQ ID NO: 66211 - RNA, 32 nt, Homo Sapiens
uggaguaguuuucagguauaggaaugagaugc

SEQ ID NO: 66212 - RNA, 32 nt, Homo Sapiens
agggcuguaaccuggugucugguagccccacu

SEQ ID NO: 66213 - RNA, 32 nt, Homo Sapiens
cuaucaucaaaauuauugucugauuauaugaa

SEQ ID NO: 66214 - RNA, 32 nt, Homo Sapiens
ccauacagguggcaauggaaaugggugagugg

SEQ ID NO: 66215 - RNA, 32 nt, Homo Sapiens
cuugaacuguggcuauauugaacuguuuugga

SEQ ID NO: 66216 - RNA, 32 nt, Homo Sapiens
cccgagccgggcgggacuaggguggugguugu

SEQ ID NO: 66217 - RNA, 32 nt, Homo Sapiens
ccuugguauaucugcgugcgcgcgucugcugg

SEQ ID NO: 66218 - RNA, 32 nt, Homo Sapiens
ggcagcuggggcggcccaggcugaagccaucu

SEQ ID NO: 66219 - RNA, 32 nt, Homo Sapiens
uagcccucagugguccucucccacgccggccc

SEQ ID NO: 66220 - RNA, 32 nt, Homo Sapiens
cugcuuuugggggccauaauuuucauucaaug

SEQ ID NO: 66221 - RNA, 32 nt, Homo Sapiens
gcacagaccgccuacagugcugccugggaacu

SEQ ID NO: 66222 - RNA, 32 nt, Homo Sapiens
auucuuguuauagugaagaagucucacaagau

SEQ ID NO: 66223 - RNA, 32 nt, Homo Sapiens
cucccucagaaaggcgcuucccuuuugcaugg

SEQ ID NO: 66224 - RNA, 32 nt, Homo Sapiens
caacagucugaccuuggcaguuccuuucugcc

SEQ ID NO: 66225 - RNA, 32 nt, Homo Sapiens
uccuuauuccaagaacuguauuuacugugguu

SEQ ID NO: 66226 - RNA, 32 nt, Homo Sapiens
gaucaaggaggggaaacguguacugauugcag

SEQ ID NO: 66227 - RNA, 32 nt, Homo Sapiens
cuugccuucugaaguggcacaaaccuguguuu

SEQ ID NO: 66228 - RNA, 32 nt, Homo Sapiens
aauuuguuuuucagagauuuaccacccaguuc

SEQ ID NO: 66229 - RNA, 32 nt, Homo Sapiens
uauauuuuuguacagauucugcaguuuaugau

SEQ ID NO: 66230 - RNA, 32 nt, Homo Sapiens
uccccugcuggcugggggcagcucccaggaua

SEQ ID NO: 66231 - RNA, 32 nt, Homo Sapiens
cuauuuuguaaauggagaaacaaucauaucuu

SEQ ID NO: 66232 - RNA, 32 nt, Homo Sapiens
ggcggcgcuccggacgcccuccccucaccgcg

SEQ ID NO: 66233 - RNA, 32 nt, Homo Sapiens
ucagagucaaggaaauuauuuugaacuguuua

SEQ ID NO: 66234 - RNA, 32 nt, Homo Sapiens
ucaggauggggaauugaugacaaugguuuaaa

SEQ ID NO: 66235 - RNA, 32 nt, Homo Sapiens
gacaaggaagcagagggaaaugggaggucuaa

SEQ ID NO: 66236 - RNA, 32 nt, Homo Sapiens
acuagggaaguaaauaagaauaugagagaaac

SEQ ID NO: 66237 - RNA, 32 nt, Homo Sapiens
cuaacacuuuugcucugcaggcagccuugccc

SEQ ID NO: 66238 - RNA, 32 nt, Homo Sapiens
uaaauacaugggauuguguaugucuauaugug

SEQ ID NO: 66239 - RNA, 32 nt, Homo Sapiens
aaauuaauuuaaauguguguuuaggaaguacu

SEQ ID NO: 66240 - RNA, 32 nt, Homo Sapiens
guuuguauaaaauaaacuaucucaagaaaguu

SEQ ID NO: 66241 - RNA, 32 nt, Homo Sapiens
gaggggcucuuauuauuuucucucuuuuuaaa

SEQ ID NO: 66242 - RNA, 32 nt, Homo Sapiens
auguucuaccccaagagacucccgaugucggc

SEQ ID NO: 66243 - RNA, 32 nt, Homo Sapiens
guacuugggaauguacuaucaggauuuuacag

SEQ ID NO: 66244 - RNA, 32 nt, Homo Sapiens
aucugccugcucacccggggccaccgcauggc

SEQ ID NO: 66245 - RNA, 32 nt, Homo Sapiens
ucagguucucaauaauaauauucaaguuuuag

SEQ ID NO: 66246 - RNA, 32 nt, Homo Sapiens
uuaguaucucaaagagaccuuuguacacccgu

SEQ ID NO: 66247 - RNA, 32 nt, Homo Sapiens
aagcacacccgugguugugaaaauaguauagc

SEQ ID NO: 66248 - RNA, 32 nt, Homo Sapiens
auaagggaaauugaaauugguuucuaauuaac

SEQ ID NO: 66249 - RNA, 32 nt, Homo Sapiens
uaacaaucaggcauuuuuaauuagauaaucca

SEQ ID NO: 66250 - RNA, 32 nt, Homo Sapiens
gugauagaaaacucgccuacuccacugcagaa

SEQ ID NO: 66251 - RNA, 32 nt, Homo Sapiens
ggaagagggagaugaagugcagcgagaagggc

SEQ ID NO: 66252 - RNA, 32 nt, Homo Sapiens
uuuuuaaauuauacauucaagguaguggccaa

SEQ ID NO: 66253 - RNA, 32 nt, Homo Sapiens
cgucauuguucaguagcaggcaaagagggagc

SEQ ID NO: 66254 - RNA, 32 nt, Homo Sapiens
gaacaaaauauuaauuaagguauagaugacug

SEQ ID NO: 66255 - RNA, 31 nt, Homo Sapiens
caugcugccuccguggcuccaaggugagggu

SEQ ID NO: 66256 - RNA, 32 nt, Homo Sapiens
uugccauuugaaaaacugcuuuucugaaguuu

SEQ ID NO: 66257 - RNA, 32 nt, Homo Sapiens
guuuuggaguuauuacuguguauuuuagaaau

SEQ ID NO: 66258 - RNA, 32 nt, Homo Sapiens
gcuaaggccaucucaggggcgugugcgcagga

SEQ ID NO: 66259 - RNA, 32 nt, Homo Sapiens
uugccuuuuguccuucugcuaugugaggauga

SEQ ID NO: 66260 - RNA, 32 nt, Homo Sapiens
aaguagggggcacauuuccauuauagcaaugu

SEQ ID NO: 66261 - RNA, 32 nt, Homo Sapiens
ugcagcuguggcggcugcuccuguaccgcgag

SEQ ID NO: 66262 - RNA, 32 nt, Homo Sapiens
ccucacugcggcuuauacaguacccuaaccug

SEQ ID NO: 66263 - RNA, 32 nt, Homo Sapiens
cauuugguuuaguuaaaugucuuacucuacug

SEQ ID NO: 66264 - RNA, 32 nt, Homo Sapiens
ugagguugauauugugauaaucuuaugucuuc

SEQ ID NO: 66265 - RNA, 32 nt, Homo Sapiens
aggaagaggaagacagagcucuuaccaggggg

SEQ ID NO: 66266 - RNA, 32 nt, Homo Sapiens
uuaaaauuguaauccuaacaaacaaaagaaau

SEQ ID NO: 66267 - RNA, 32 nt, Homo Sapiens
gagcauuucuucagguuucuauuguauuuuuu

SEQ ID NO: 66268 - RNA, 32 nt, Homo Sapiens
gugaccucagcaacggcagauuuuaauaauca

SEQ ID NO: 66269 - RNA, 32 nt, Homo Sapiens
gcucuaggcagacccugcgcccgcggguccuc

SEQ ID NO: 66270 - RNA, 30 nt, Homo Sapiens
cugagguggggcggccugucugcgucugcg

SEQ ID NO: 66271 - RNA, 32 nt, Homo Sapiens
gucgugcgaaaucuugguauucgcauuucaag

SEQ ID NO: 66272 - RNA, 32 nt, Homo Sapiens
agaacugcaggcccuggccuccccugccacca

SEQ ID NO: 66273 - RNA, 30 nt, Homo Sapiens
gauguguacugugcuguugaugaaguccuc

SEQ ID NO: 66274 - RNA, 32 nt, Homo Sapiens
gccguuuuggaaagauguugccuuuggagaag

SEQ ID NO: 66275 - RNA, 32 nt, Homo Sapiens
uuuugcaugguuccuuguauugcauuucuuug

SEQ ID NO: 66276 - RNA, 32 nt, Homo Sapiens
ucuaggccuugccccaccuccaucaaacgcag

SEQ ID NO: 66277 - RNA, 32 nt, Homo Sapiens
uuuaaaugucuuaaauuuguuuccugguggac

SEQ ID NO: 66278 - RNA, 32 nt, Homo Sapiens
guggggacggccaccacggcgccggcgcgcag

SEQ ID NO: 66279 - RNA, 32 nt, Homo Sapiens
gcuguggguggccuuagguccugcaagcaacu

SEQ ID NO: 66280 - RNA, 32 nt, Homo Sapiens
cccgggggcggcuuuggacagccccggcagcg

SEQ ID NO: 66281 - RNA, 32 nt, Homo Sapiens
gugaauguucuugaaagagggucacgggucaa

SEQ ID NO: 66282 - RNA, 32 nt, Homo Sapiens
cagccuugcagccccgcgcccggagcaucucc

SEQ ID NO: 66283 - RNA, 32 nt, Homo Sapiens
guuaaauuuagugcacucugucuuaaaaauac

SEQ ID NO: 66284 - RNA, 31 nt, Homo Sapiens
gugcgugugaacacucucaagaccugcuccg

SEQ ID NO: 66285 - RNA, 32 nt, Homo Sapiens
uuguaauccuguacaauugcaucacggguggg

SEQ ID NO: 66286 - RNA, 32 nt, Homo Sapiens
auaggcaggaggacagaggggcuggucucagg

SEQ ID NO: 66287 - RNA, 32 nt, Homo Sapiens
cauugcacuccagccucagcaacaagagugaa

SEQ ID NO: 66288 - RNA, 29 nt, Homo Sapiens
agcacuuugggaggcagaggcaggcagau

SEQ ID NO: 66289 - RNA, 32 nt, Homo Sapiens
acaaguuuccaacaaccuuguuuccaugagua

SEQ ID NO: 66290 - RNA, 32 nt, Homo Sapiens
aaggcacucacagaaucauaaucauggcuaaa

SEQ ID NO: 66291 - RNA, 32 nt, Homo Sapiens
cggcccugcugucugccuccccggcugauugg

SEQ ID NO: 66292 - RNA, 32 nt, Homo Sapiens
agacacucaggcggcagcauucccucccagcc

SEQ ID NO: 66293 - RNA, 32 nt, Homo Sapiens
gggucccggcgccgcgccaugugggcugcggc

SEQ ID NO: 66294 - RNA, 32 nt, Homo Sapiens
gggcugagauaaaagacuguuggggccaccug

SEQ ID NO: 66295 - RNA, 32 nt, Homo Sapiens
cgaagacaugucccaauucuuguuuaggauga

SEQ ID NO: 66296 - RNA, 32 nt, Homo Sapiens
uguagcucucuuccuuuuguuucucacccuuc

SEQ ID NO: 66297 - RNA, 32 nt, Homo Sapiens
guaguuuuacaaucaugcuauucuuacacuug

SEQ ID NO: 66298 - RNA, 32 nt, Homo Sapiens
auuagacaaaaaucauuuuuuuagaauguguu

SEQ ID NO: 66299 - RNA, 32 nt, Homo Sapiens
gaaaauaagacuaauaaauuguuaaaaguuuu

SEQ ID NO: 66300 - RNA, 32 nt, Homo Sapiens
gagcagaggaggaggaggcaugagugaggcgg

SEQ ID NO: 66301 - RNA, 32 nt, Homo Sapiens
ccaccagcucgcagcccuccuucggacccucg

SEQ ID NO: 66302 - RNA, 32 nt, Homo Sapiens
uaagaggaaaauuuucaugucuccaaaguuuu

SEQ ID NO: 66303 - RNA, 32 nt, Homo Sapiens
acaucaguaagucaauacaauuuuaucacucu

SEQ ID NO: 66304 - RNA, 31 nt, Homo Sapiens
caugcuucaaaaauaaaucauuuuuuaccac

SEQ ID NO: 66305 - RNA, 32 nt, Homo Sapiens
gcagagagaagcugguggaguccuguggcuuu

SEQ ID NO: 66306 - RNA, 32 nt, Homo Sapiens
gcgucccggaagcuccagccugaaccauguuu

SEQ ID NO: 66307 - RNA, 32 nt, Homo Sapiens
caggcuccuguccucagaucccgggaaccuca

SEQ ID NO: 66308 - RNA, 32 nt, Homo Sapiens
gcuggcucucaguccccgccucgcggggggug

SEQ ID NO: 66309 - RNA, 32 nt, Homo Sapiens
acaaacuaacugugccccuggggucccugaag

SEQ ID NO: 66310 - RNA, 32 nt, Homo Sapiens
agggucaguuuagggcauaauuaaagucaauu

SEQ ID NO: 66311 - RNA, 32 nt, Homo Sapiens
ccaagaguccgcacgugaccggucagggggaa

SEQ ID NO: 66312 - RNA, 32 nt, Homo Sapiens
gccaaacguucccgaggcgccaaggaguguag

SEQ ID NO: 66313 - RNA, 32 nt, Homo Sapiens
agcgaggcgcuggccggcagggggcgcugcgg

SEQ ID NO: 66314 - RNA, 32 nt, Homo Sapiens
gaaucccaggccugugagaaaagcaaaaauuc

SEQ ID NO: 66315 - RNA, 32 nt, Homo Sapiens
agagcuuguuuaggaaacugagaaacguacac

SEQ ID NO: 66316 - RNA, 32 nt, Homo Sapiens
cacugagccccgagacagagaaccugcccaca

SEQ ID NO: 66317 - RNA, 32 nt, Homo Sapiens
gcugugugucacggucccuggaugaacguuug

SEQ ID NO: 66318 - RNA, 32 nt, Homo Sapiens
uauuuuuuuuuuucuuuuucuuuuucccacca

SEQ ID NO: 66319 - RNA, 32 nt, Homo Sapiens
uguuaaaacaaaaacaaacaaacacguuugua

SEQ ID NO: 66320 - RNA, 32 nt, Homo Sapiens
acccuauacuugguuugcuacccuuaguauuu

SEQ ID NO: 66321 - RNA, 32 nt, Homo Sapiens
cugcugucucguguguuccagccacagaaccu

SEQ ID NO: 66322 - RNA, 32 nt, Homo Sapiens
ccauuucauugugaccuacuccuuucauaaau

SEQ ID NO: 66323 - RNA, 32 nt, Homo Sapiens
cuuaggucaggaguuugagaucagccuggcca

SEQ ID NO: 66324 - RNA, 32 nt, Homo Sapiens
uaauuuauuucccccuacccugcccgcucccu

SEQ ID NO: 66325 - RNA, 32 nt, Homo Sapiens
uaguuaacuuggucaucugauuuuauauugcc

SEQ ID NO: 66326 - RNA, 32 nt, Homo Sapiens
ccccugggaaagggcacggccugugcuccuga

SEQ ID NO: 66327 - RNA, 32 nt, Homo Sapiens
uguuguauuauaagagccauuuccugucucuc

SEQ ID NO: 66328 - RNA, 31 nt, Homo Sapiens
cagugggagccccacaucagacaggugugcu

SEQ ID NO: 66329 - RNA, 32 nt, Homo Sapiens
uugcaaggcugccccaggaagcacggaagacg

SEQ ID NO: 66330 - RNA, 32 nt, Homo Sapiens
cuguuguuccuaaucaucuccuccuuuucuuu

SEQ ID NO: 66331 - RNA, 32 nt, Homo Sapiens
aggcugaaggcacacgcucaaugccccacgug

SEQ ID NO: 66332 - RNA, 32 nt, Homo Sapiens
uguuuucaauaggaaaacaaaguucuagauag

SEQ ID NO: 66333 - RNA, 32 nt, Homo Sapiens
uauauaacuguaaaauauauguagcauauaua

SEQ ID NO: 66334 - RNA, 32 nt, Homo Sapiens
aaauaauuauaaauaucauuguacauagcaug

SEQ ID NO: 66335 - RNA, 32 nt, Homo Sapiens
aguugugggguuugguuucauguguuagauaa

SEQ ID NO: 66336 - RNA, 32 nt, Homo Sapiens
acagagaaaaagaggaaagugaagcuguguca

SEQ ID NO: 66337 - RNA, 32 nt, Homo Sapiens
aggccaugaacgugagcugugcacugcuguca

SEQ ID NO: 66338 - RNA, 32 nt, Homo Sapiens
uugcagggcauggggccaggcuccacucccaa

SEQ ID NO: 66339 - RNA, 32 nt, Homo Sapiens
ugagaaauuaaacccccugcuugcuugagaaa

SEQ ID NO: 66340 - RNA, 32 nt, Homo Sapiens
gaggugcuguacauucugcugcuggugguugg

SEQ ID NO: 66341 - RNA, 32 nt, Homo Sapiens
uacacgucugccucuggugaugagaugguuuc

SEQ ID NO: 66342 - RNA, 32 nt, Homo Sapiens
uuccgcacaggccugcugaacugggugcuuua

SEQ ID NO: 66343 - RNA, 32 nt, Homo Sapiens
uccuaugccggccgggggcgggggguggcggg

SEQ ID NO: 66344 - RNA, 32 nt, Homo Sapiens
gacauaccgauacacacacacacacacacaca

SEQ ID NO: 66345 - RNA, 32 nt, Homo Sapiens
aaagcacacgcaugcgccucagcaaauggcag

SEQ ID NO: 66346 - RNA, 32 nt, Homo Sapiens
augugaaguggagaggccgaggagcagccggc

SEQ ID NO: 66347 - RNA, 32 nt, Homo Sapiens
ugaagagauauguagaaggcacaauaugggca

SEQ ID NO: 66348 - RNA, 32 nt, Homo Sapiens
ccccaaccccaugacaggccccggugugugac

SEQ ID NO: 66349 - RNA, 32 nt, Homo Sapiens
aaguuucugaagauuuuauuaucauagauacu

SEQ ID NO: 66350 - RNA, 32 nt, Homo Sapiens
uauugaaacaaaucaauggcaguguuaaucca

SEQ ID NO: 66351 - RNA, 32 nt, Homo Sapiens
guuuuguguacuuuuauacugucucugaaaau

SEQ ID NO: 66352 - RNA, 32 nt, Homo Sapiens
cccagugcugucccggaacccccugcagcucu

SEQ ID NO: 66353 - RNA, 32 nt, Homo Sapiens
uggccagaaagcuaauucaucuggagaucaaa

SEQ ID NO: 66354 - RNA, 31 nt, Homo Sapiens
caccacucuggcuggcuuccaagggcacaaa

SEQ ID NO: 66355 - RNA, 32 nt, Homo Sapiens
uggccccaggacuaagaaguuuugugagcacc

SEQ ID NO: 66356 - RNA, 32 nt, Homo Sapiens
gcgccggucgggagcgcagcgcggcgcagcuc

SEQ ID NO: 66357 - RNA, 32 nt, Homo Sapiens
ccggcugcucagcgcgcuccgcggucauggag

SEQ ID NO: 66358 - RNA, 32 nt, Homo Sapiens
cuggagaaugcuggaggauccaaacagaaggg

SEQ ID NO: 66359 - RNA, 32 nt, Homo Sapiens
gcuccuaggauuucagcggucugugggccaga

SEQ ID NO: 66360 - RNA, 32 nt, Homo Sapiens
aaccacacaaugccaagauagaauuaauuuaa

SEQ ID NO: 66361 - RNA, 32 nt, Homo Sapiens
uuuuucuuggagccagcaauaauuaucacaau

SEQ ID NO: 66362 - RNA, 32 nt, Homo Sapiens
caagauuuaaaauuaaauuugaugguugaaua

SEQ ID NO: 66363 - RNA, 32 nt, Homo Sapiens
caauagugaauaauuaauauuuuuguuuggaa

SEQ ID NO: 66364 - RNA, 32 nt, Homo Sapiens
ugcgcugccaggggccugggggugggucucuu

SEQ ID NO: 66365 - RNA, 32 nt, Homo Sapiens
uuuugugaauugccagcgauguguguuuucug

SEQ ID NO: 66366 - RNA, 32 nt, Homo Sapiens
ucugccuuaccaaguguuuucuuacuacaaug

SEQ ID NO: 66367 - RNA, 32 nt, Homo Sapiens
gcuaugcucccucucccccgacuggcgucaca

SEQ ID NO: 66368 - RNA, 32 nt, Homo Sapiens
ccugcaaucuguggaugcccaggggaaggcau

SEQ ID NO: 66369 - RNA, 32 nt, Homo Sapiens
gguucacccagcucgaggaucccagguugaag

SEQ ID NO: 66370 - RNA, 32 nt, Homo Sapiens
agaguuuaauagguaagcucuguuacacuagg

SEQ ID NO: 66371 - RNA, 32 nt, Homo Sapiens
ggcggccguccucaucccggcgcuugagagga

SEQ ID NO: 66372 - RNA, 32 nt, Homo Sapiens
ugaauauagccaagcauagaaaaaaaaaaaaa

SEQ ID NO: 66373 - RNA, 32 nt, Homo Sapiens
auguucuuuagacacugcuaccugaaaacugu

SEQ ID NO: 66374 - RNA, 32 nt, Homo Sapiens
cuuccaaccggggacagucaccccccugcucg

SEQ ID NO: 66375 - RNA, 32 nt, Homo Sapiens
aggggcugcugcaugggaaaggugagcgggcu

SEQ ID NO: 66376 - RNA, 32 nt, Homo Sapiens
ugggccucugucgggggcggggcgguaggucc

SEQ ID NO: 66377 - RNA, 32 nt, Homo Sapiens
ucacgccuuagugacagucuccaggagaagac

SEQ ID NO: 66378 - RNA, 29 nt, Homo Sapiens
ccuacagccacuuuccuccugaauuucuu

SEQ ID NO: 66379 - RNA, 32 nt, Homo Sapiens
uucauaucuauuugcauuugauuucuagguca

SEQ ID NO: 66380 - RNA, 32 nt, Homo Sapiens
ucgccugugcagcccgcccacccacaggcuca

SEQ ID NO: 66381 - RNA, 32 nt, Homo Sapiens
agcgcagccauagacaacuagagcagcuggaa

SEQ ID NO: 66382 - RNA, 32 nt, Homo Sapiens
aguuuuuuuuuuuuuucuuuuuuuugauaagu

SEQ ID NO: 66383 - RNA, 32 nt, Homo Sapiens
ugagguguccagcuggucccaaaccuguaauc

SEQ ID NO: 66384 - RNA, 32 nt, Homo Sapiens
uaacaagaggcauuugugcacacacacagggc

SEQ ID NO: 66385 - RNA, 32 nt, Homo Sapiens
uuacagcccuccccaugcugugcccugccaua

SEQ ID NO: 66386 - RNA, 32 nt, Homo Sapiens
cuucgaugaugaugaugaugaugaugaugaua

SEQ ID NO: 66387 - RNA, 32 nt, Homo Sapiens
ccccacggaccacugcggccaaauuuccgcca

SEQ ID NO: 66388 - RNA, 32 nt, Homo Sapiens
ucuucugugcugggcgcuaugcaaggccgaag

SEQ ID NO: 66389 - RNA, 32 nt, Homo Sapiens
cucauuuuuuaaacuauguucuuuaaaucaac

SEQ ID NO: 66390 - RNA, 32 nt, Homo Sapiens
gaggaucuuggcaucacccaccaaaguuagcu

SEQ ID NO: 66391 - RNA, 32 nt, Homo Sapiens
aucaaggccccuuaaaaguaagugcaacuccc

SEQ ID NO: 66392 - RNA, 32 nt, Homo Sapiens
caagcagaagccaggggugcugcccucuccca

SEQ ID NO: 66393 - RNA, 27 nt, Homo Sapiens
ggacccgccagcuucagccuccagggc

SEQ ID NO: 66394 - RNA, 32 nt, Homo Sapiens
gaguuggguuaugugauuuaugcaaaauuguu

SEQ ID NO: 66395 - RNA, 32 nt, Homo Sapiens
gugaaaacacugggcucccuguuaaacgauga

SEQ ID NO: 66396 - RNA, 29 nt, Homo Sapiens
uucagcauauguaguacuucagaggaaga

SEQ ID NO: 66397 - RNA, 32 nt, Homo Sapiens
gaggaaaggagggaaggcaagauucuuucccc

SEQ ID NO: 66398 - RNA, 28 nt, Homo Sapiens
cagaggugaacaggaccaaggaacuaaa

SEQ ID NO: 66399 - RNA, 32 nt, Homo Sapiens
cuggguaauuuauagugaucuaaucucaagaa

SEQ ID NO: 66400 - RNA, 32 nt, Homo Sapiens
guuucuuuuuaaguauaguugacaaguguaua

SEQ ID NO: 66401 - RNA, 32 nt, Homo Sapiens
ugguggauaacugaagaugauuuuaaagauga

SEQ ID NO: 66402 - RNA, 32 nt, Homo Sapiens
aggaaaacuccuuguuauccuuguuuccuuag

SEQ ID NO: 66403 - RNA, 32 nt, Homo Sapiens
ggaacugaaguuuuuucuuaauuaucauguga

SEQ ID NO: 66404 - RNA, 32 nt, Homo Sapiens
uauacaaccauacauacuugcacauguguguu

SEQ ID NO: 66405 - RNA, 32 nt, Homo Sapiens
ccccuaacucuacugccuuccacauauugguu

SEQ ID NO: 66406 - RNA, 32 nt, Homo Sapiens
ggcaacauaaaacuuuuuaacucuuuauucuc

SEQ ID NO: 66407 - RNA, 32 nt, Homo Sapiens
uacgacaagcccgaguucuacacgccggauga

SEQ ID NO: 66408 - RNA, 32 nt, Homo Sapiens
ucacucccaagcccccuccuugucugugcauc

SEQ ID NO: 66409 - RNA, 32 nt, Homo Sapiens
gcccucacgcuggccuccauggagacuccagg

SEQ ID NO: 66410 - RNA, 32 nt, Homo Sapiens
cugcauagcucuuuuucuugagaggcucucca

SEQ ID NO: 66411 - RNA, 32 nt, Homo Sapiens
cugcagauggagcagcuuggacuuuauuuuuu

SEQ ID NO: 66412 - RNA, 32 nt, Homo Sapiens
guuuaaauaguuucuuuuuuuaaaaaaauggu

SEQ ID NO: 66413 - RNA, 32 nt, Homo Sapiens
auucucucuggaggaguggcauugucuggaca

SEQ ID NO: 66414 - RNA, 32 nt, Homo Sapiens
cgauaccacgcgccccgauacccggcgcagga

SEQ ID NO: 66415 - RNA, 32 nt, Homo Sapiens
cuucugugaacagucuuugucuccuccccacc

SEQ ID NO: 66416 - RNA, 32 nt, Homo Sapiens
ucccuuggagggcaaacaaaguggcagugggg

SEQ ID NO: 66417 - RNA, 32 nt, Homo Sapiens
agggaaucaaccccaucaacaaaguucaaauc

SEQ ID NO: 66418 - RNA, 30 nt, Homo Sapiens
augaguaaauaaaacuguguuuuaacuuug

SEQ ID NO: 66419 - RNA, 32 nt, Homo Sapiens
uugcggcgugaggaccccggcggcgccgcagu

SEQ ID NO: 66420 - RNA, 32 nt, Homo Sapiens
guccgaaucaguaggugaccccgccccuggau

SEQ ID NO: 66421 - RNA, 32 nt, Homo Sapiens
ggacgggccuggggggcgagaaaggcccccau

SEQ ID NO: 66422 - RNA, 32 nt, Homo Sapiens
gacaaguugagaagucuuaucuagucaggagg

SEQ ID NO: 66423 - RNA, 32 nt, Homo Sapiens
acuuuuugcccucaguuuggggccccucuggu

SEQ ID NO: 66424 - RNA, 32 nt, Homo Sapiens
ucacugccaaagccgaacacggcuucgggauu

SEQ ID NO: 66425 - RNA, 32 nt, Homo Sapiens
cuagcuggaggacaccugaguacucuuaaagc

SEQ ID NO: 66426 - RNA, 32 nt, Homo Sapiens
caccaaaaaaggaaacugagcaaauucauuuc

SEQ ID NO: 66427 - RNA, 32 nt, Homo Sapiens
cgcgacuucugacgaagugacaauggucuaug

SEQ ID NO: 66428 - RNA, 32 nt, Homo Sapiens
gucucaggagaaugugacauggggacucuuac

SEQ ID NO: 66429 - RNA, 32 nt, Homo Sapiens
gccgcggcugccgcgccgccgcugcaggauag

SEQ ID NO: 66430 - RNA, 32 nt, Homo Sapiens
cagcuccaacugaggaccucuccaacgggccc

SEQ ID NO: 66431 - RNA, 31 nt, Homo Sapiens
guucuaucuuguaauuaauuugguggguucu

SEQ ID NO: 66432 - RNA, 32 nt, Homo Sapiens
uuagaccuuuauccagcuagugccaaauaauu

SEQ ID NO: 66433 - RNA, 32 nt, Homo Sapiens
uuucuaaaaaaguuuagaaugugugucaauuu

SEQ ID NO: 66434 - RNA, 32 nt, Homo Sapiens
aggauauuuauauauuuucuuaaaacagcaga

SEQ ID NO: 66435 - RNA, 32 nt, Homo Sapiens
cagcugcccgucucuggccugggccccugccc

SEQ ID NO: 66436 - RNA, 32 nt, Homo Sapiens
cacugcacuccagccuggcgacaaagugagac

SEQ ID NO: 66437 - RNA, 32 nt, Homo Sapiens
cacuuggcccguccauagagccagggcugugu

SEQ ID NO: 66438 - RNA, 32 nt, Homo Sapiens
caauaauucauccugcuucaagauucaaauuc

SEQ ID NO: 66439 - RNA, 32 nt, Homo Sapiens
ugucaccugccagcaccaccacgccaggccuc

SEQ ID NO: 66440 - RNA, 32 nt, Homo Sapiens
cccgccucaauccuccugcugccugaauaacc

SEQ ID NO: 66441 - RNA, 32 nt, Homo Sapiens
gggauagugacuacuuuuuuuuuuuuuuuuuu

SEQ ID NO: 66442 - RNA, 32 nt, Homo Sapiens
agaccugcccccucccacacccgccccggguc

SEQ ID NO: 66443 - RNA, 32 nt, Homo Sapiens
cuggacaaauuccaauaaaaaauguacuugag

SEQ ID NO: 66444 - RNA, 32 nt, Homo Sapiens
augaauuauuggauuaaaaauaaacuuuuacu

SEQ ID NO: 66445 - RNA, 32 nt, Homo Sapiens
gacuaaacuauaagggcacuaacaugucaaua

SEQ ID NO: 66446 - RNA, 32 nt, Homo Sapiens
cccgagaacaagcagcacaaacagacgcucag

SEQ ID NO: 66447 - RNA, 32 nt, Homo Sapiens
agcuagagggagcaggcccaagggcagagcag

SEQ ID NO: 66448 - RNA, 32 nt, Homo Sapiens
aucuaaugauacuuuuuucauuagauuggucu

SEQ ID NO: 66449 - RNA, 32 nt, Homo Sapiens
ccaaggaaugaaaagucagaugcugaaaugca

SEQ ID NO: 66450 - RNA, 32 nt, Homo Sapiens
uccuccagaggagcuuccuccuccaggccuca

SEQ ID NO: 66451 - RNA, 32 nt, Homo Sapiens
gucaaaaacuaaaaugaagguuuggagcuguu

SEQ ID NO: 66452 - RNA, 32 nt, Homo Sapiens
uaaagagacugagaaagugcugguggugaagc

SEQ ID NO: 66453 - RNA, 32 nt, Homo Sapiens
caggcccugcccguggaccggaagcgaagcca

SEQ ID NO: 66454 - RNA, 32 nt, Homo Sapiens
gcucacagugugggagcagcuggacaccaggc

SEQ ID NO: 66455 - RNA, 32 nt, Homo Sapiens
cuguucuuaauuuuuggguuugacaaccacuu

SEQ ID NO: 66456 - RNA, 32 nt, Homo Sapiens
ucagaggaacaaaccaggggacacuuuguuag

SEQ ID NO: 66457 - RNA, 32 nt, Homo Sapiens
ugaaagguggucuguggaucugucugaauaga

SEQ ID NO: 66458 - RNA, 32 nt, Homo Sapiens
cugaauuccacuuuucugccugcucauuugcu

SEQ ID NO: 66459 - RNA, 32 nt, Homo Sapiens
uauuuauuucugugguuacugcuuuugcaguu

SEQ ID NO: 66460 - RNA, 32 nt, Homo Sapiens
ccguaguaacacauaaaguaaaugcuaccucu

SEQ ID NO: 66461 - RNA, 32 nt, Homo Sapiens
gucauuugacaacacaugugggagaggagguc

SEQ ID NO: 66462 - RNA, 32 nt, Homo Sapiens
gccuuugaaaaacaaauaauucugugugaauu

SEQ ID NO: 66463 - RNA, 32 nt, Homo Sapiens
ucuuuccccacuuuuagaaauuauguuaacua

SEQ ID NO: 66464 - RNA, 32 nt, Homo Sapiens
uauuuugacaauguuguaaguguuuaccaagc

SEQ ID NO: 66465 - RNA, 32 nt, Homo Sapiens
cucauuccccaccucuucccagccccacugcc

SEQ ID NO: 66466 - RNA, 30 nt, Homo Sapiens
cuccuaagucaccacucaaccaguggcugu

SEQ ID NO: 66467 - RNA, 32 nt, Homo Sapiens
aaagaacagaaauuacuuuaaaaaauaaacag

SEQ ID NO: 66468 - RNA, 32 nt, Homo Sapiens
guaaagccacuacuccugccuuuuugcuuagu

SEQ ID NO: 66469 - RNA, 32 nt, Homo Sapiens
gagaaucgcuugaaccuggaauacagagguuu

SEQ ID NO: 66470 - RNA, 32 nt, Homo Sapiens
ucaucaaugacagcaucuuaacagacauuucu

SEQ ID NO: 66471 - RNA, 32 nt, Homo Sapiens
guguauauucaccuaaugcccauuguguauug

SEQ ID NO: 66472 - RNA, 32 nt, Homo Sapiens
uccuccuuuguuguuucuuaauuuggaaacua

SEQ ID NO: 66473 - RNA, 27 nt, Homo Sapiens
cugguccacuugcucagcccccuguga

SEQ ID NO: 66474 - RNA, 32 nt, Homo Sapiens
uguuguaaauguuuaauuuacauguuugacug

SEQ ID NO: 66475 - RNA, 32 nt, Homo Sapiens
gaugauaauuuaauuuuucucaugucaaauac

SEQ ID NO: 66476 - RNA, 32 nt, Homo Sapiens
ugcugaggauagcagagcccccagccaucacu

SEQ ID NO: 66477 - RNA, 32 nt, Homo Sapiens
auugguggacauuuggaucguuucuacuucuu

SEQ ID NO: 66478 - RNA, 28 nt, Homo Sapiens
augauuaaaaagaaacauuugaggaugg

SEQ ID NO: 66479 - RNA, 32 nt, Homo Sapiens
gaugacagccacccucaccgcggcuggauggg

SEQ ID NO: 66480 - RNA, 32 nt, Homo Sapiens
cccaccucaggcucagccccagcccucagccc

SEQ ID NO: 66481 - RNA, 32 nt, Homo Sapiens
uugacagcacgcuuuacuuaguagccgguucc

SEQ ID NO: 66482 - RNA, 32 nt, Homo Sapiens
ucaccuuccucacuuauugcuaaucuccauuu

SEQ ID NO: 66483 - RNA, 32 nt, Homo Sapiens
cgccucccucuguuccucccaaggcuaaacuu

SEQ ID NO: 66484 - RNA, 32 nt, Homo Sapiens
ggcugcuccuggcuaaugcuuauuagaaaaug

SEQ ID NO: 66485 - RNA, 32 nt, Homo Sapiens
uaguacuacugauagcuaguauguuaaguuug

SEQ ID NO: 66486 - RNA, 32 nt, Homo Sapiens
uucuaguaguuuaugauauugcccucuuugua

SEQ ID NO: 66487 - RNA, 32 nt, Homo Sapiens
agagggggauggggcgggcgaggggugcacag

SEQ ID NO: 66488 - RNA, 32 nt, Homo Sapiens
acuguauuuuuagagcugaauuuuugacuaaa

SEQ ID NO: 66489 - RNA, 32 nt, Homo Sapiens
cauuaagaauaucuugaauguuguguauauau

SEQ ID NO: 66490 - RNA, 32 nt, Homo Sapiens
cccgucccugaugucacccccaccccaccagc

SEQ ID NO: 66491 - RNA, 32 nt, Homo Sapiens
uagggcucaucgcaguaccgcgcggaccccug

SEQ ID NO: 66492 - RNA, 32 nt, Homo Sapiens
ugaauuguuaacaccucuguugggaaaagccu

SEQ ID NO: 66493 - RNA, 32 nt, Homo Sapiens
cgucgccuccccccggccaccaggcccggcug

SEQ ID NO: 66494 - RNA, 32 nt, Homo Sapiens
acaacagccccggggcccggcccuagccagcu

SEQ ID NO: 66495 - RNA, 29 nt, Homo Sapiens
aggaaauaaaguuuaauaaaucuguaggu

SEQ ID NO: 66496 - RNA, 32 nt, Homo Sapiens
caaaagcgaugaugagggaggcagucaucacg

SEQ ID NO: 66497 - RNA, 32 nt, Homo Sapiens
uuuaugguuaugauuuggaauaaaaugugccu

SEQ ID NO: 66498 - RNA, 32 nt, Homo Sapiens
uggacgaagaggacccagcauaaagagcacag

SEQ ID NO: 66499 - RNA, 32 nt, Homo Sapiens
cacucaacagaggaaagaaauuccuaagggaa

SEQ ID NO: 66500 - RNA, 32 nt, Homo Sapiens
auuauuucaacacaauggaagagcacaguuaa

SEQ ID NO: 66501 - RNA, 32 nt, Homo Sapiens
uuuguaaaaagacauuguagauaauugaaugu

SEQ ID NO: 66502 - RNA, 32 nt, Homo Sapiens
uaauggcuuuugaaaaaguaaaguucaauaau

SEQ ID NO: 66503 - RNA, 32 nt, Homo Sapiens
caagcaaauaaucuacuucugguaaucugagg

SEQ ID NO: 66504 - RNA, 32 nt, Homo Sapiens
ggcuuacuacuucuagaagaaagcagagugcc

SEQ ID NO: 66505 - RNA, 32 nt, Homo Sapiens
aaugaagaacauuuuuaauauggcauguaaag

SEQ ID NO: 66506 - RNA, 32 nt, Homo Sapiens
ucggcgcucugacuucuaggagcacaagagag

SEQ ID NO: 66507 - RNA, 32 nt, Homo Sapiens
ggccagguuuaaaagacucagucuaggcuugc

SEQ ID NO: 66508 - RNA, 32 nt, Homo Sapiens
ccagccugcgcgcuccaccgccgcuauggucu

SEQ ID NO: 66509 - RNA, 32 nt, Homo Sapiens
uuaaacagagaaaaaauaaaaggggguaauag

SEQ ID NO: 66510 - RNA, 32 nt, Homo Sapiens
cuucucuaaaagauaauuguuuagaaaauaaa

SEQ ID NO: 66511 - RNA, 32 nt, Homo Sapiens
ccagcaacgaucucaugucucauuagagugca

SEQ ID NO: 66512 - RNA, 32 nt, Homo Sapiens
agaugaggcaggggcugcuggugcuggcgcug

SEQ ID NO: 66513 - RNA, 32 nt, Homo Sapiens
uaaacauaaagcauauaaauuaugacaauccu

SEQ ID NO: 66514 - RNA, 32 nt, Homo Sapiens
cuuauggguccaugaacacacuugugaccuua

SEQ ID NO: 66515 - RNA, 32 nt, Homo Sapiens
uucuaccugcccucaaggguguguauauugua

SEQ ID NO: 66516 - RNA, 32 nt, Homo Sapiens
uagccacugcgcccggcccgagaaaauacagu

SEQ ID NO: 66517 - RNA, 32 nt, Homo Sapiens
gaggugcuguuugcugcucaucuuggacaggg

SEQ ID NO: 66518 - RNA, 32 nt, Homo Sapiens
aggccaagaguuugaagcuggugcuugagguu

SEQ ID NO: 66519 - RNA, 32 nt, Homo Sapiens
ccagcacccccuccccaaagaccgggcaguuc

SEQ ID NO: 66520 - RNA, 32 nt, Homo Sapiens
gcgacuggcauacacaaggagcucucauuaug

SEQ ID NO: 66521 - RNA, 32 nt, Homo Sapiens
aacuguauugguccagcuugcucuucaguggg

SEQ ID NO: 66522 - RNA, 32 nt, Homo Sapiens
uauagagacagggucuuaccauuugccccagc

SEQ ID NO: 66523 - RNA, 30 nt, Homo Sapiens
gcuggaucugcgcacagcggcagggauugc

SEQ ID NO: 66524 - RNA, 31 nt, Homo Sapiens
aggcucuauugagccaagaccaaguccucaa

SEQ ID NO: 66525 - RNA, 32 nt, Homo Sapiens
aguugguugcugugacaaccuccaggaagagc

SEQ ID NO: 66526 - RNA, 32 nt, Homo Sapiens
aagaagaugauuaagaccccagaugaccugca

SEQ ID NO: 66527 - RNA, 32 nt, Homo Sapiens
cagccgggugugugucugcagcaccgugggcc

SEQ ID NO: 66528 - RNA, 32 nt, Homo Sapiens
auggcguggaggaggagggaggccgggcgguc

SEQ ID NO: 66529 - RNA, 32 nt, Homo Sapiens
cccacaacacuggguguuggagaaagggagag

SEQ ID NO: 66530 - RNA, 32 nt, Homo Sapiens
guuuuccucacagcaagcucgagaugugggaa

SEQ ID NO: 66531 - RNA, 29 nt, Homo Sapiens
cuuauaaauaugucuguguguugacuggu

SEQ ID NO: 66532 - RNA, 32 nt, Homo Sapiens
uugccgggcggccccaggcggcugggcacgca

SEQ ID NO: 66533 - RNA, 32 nt, Homo Sapiens
gcuaaaugauacugaggacaguugguaucagu

SEQ ID NO: 66534 - RNA, 32 nt, Homo Sapiens
uccucgccggaaagcugcuugccaaacgcccc

SEQ ID NO: 66535 - RNA, 32 nt, Homo Sapiens
caagaaaauaaccaccguguugugaaaaagug

SEQ ID NO: 66536 - RNA, 32 nt, Homo Sapiens
caagauguccaacuuccucuuuucucacaaua

SEQ ID NO: 66537 - RNA, 32 nt, Homo Sapiens
ccucagaauacggcucaguccuggggcaaugc

SEQ ID NO: 66538 - RNA, 32 nt, Homo Sapiens
ggcgugauggugggcaccucuaaucccagcua

SEQ ID NO: 66539 - RNA, 32 nt, Homo Sapiens
ucuacucauuggccagaaauggucagcuggcc

SEQ ID NO: 66540 - RNA, 32 nt, Homo Sapiens
gcugucaggagggcuuccugggaggugucucu

SEQ ID NO: 66541 - RNA, 32 nt, Homo Sapiens
cucccccaccagaaugggagccaggaguccca

SEQ ID NO: 66542 - RNA, 32 nt, Homo Sapiens
cccgcaacacugccgcugucucuucuucaccg

SEQ ID NO: 66543 - RNA, 32 nt, Homo Sapiens
augucaagcugauuuacuuuauucacauggag

SEQ ID NO: 66544 - RNA, 32 nt, Homo Sapiens
guagugauagaauauuguggcauugaaguagc

SEQ ID NO: 66545 - RNA, 32 nt, Homo Sapiens
ccacggggcgaccgagauggcggccuccgggg

SEQ ID NO: 66546 - RNA, 32 nt, Homo Sapiens
cuggaccuggcuggaaggaaaagaagcccuuu

SEQ ID NO: 66547 - RNA, 32 nt, Homo Sapiens
acuuggaacugaccacggccuggaggacuggc

SEQ ID NO: 66548 - RNA, 32 nt, Homo Sapiens
gugucacuauuucaagucagugcucaaaaagu

SEQ ID NO: 66549 - RNA, 32 nt, Homo Sapiens
gugggcggccugugugaaccugucgugcaaag

SEQ ID NO: 66550 - RNA, 32 nt, Homo Sapiens
guucguggaaagggugcugcuucccucugccu

SEQ ID NO: 66551 - RNA, 32 nt, Homo Sapiens
auauucuuaaguugccuauuaaagaaagugag

SEQ ID NO: 66552 - RNA, 30 nt, Homo Sapiens
gggagggcccauuccauccaucuuaggccc

SEQ ID NO: 66553 - RNA, 32 nt, Homo Sapiens
gcuagagugggaagagggggcuggccaugggg

SEQ ID NO: 66554 - RNA, 32 nt, Homo Sapiens
ucugacaccauguagaagcuaaaaguuuagag

SEQ ID NO: 66555 - RNA, 32 nt, Homo Sapiens
cuccugcuccggcuccuccaucuuggccucgg

SEQ ID NO: 66556 - RNA, 32 nt, Homo Sapiens
uccaaagaucgcuugaugcugcugcuuggugg

SEQ ID NO: 66557 - RNA, 32 nt, Homo Sapiens
auccuuccucagcacacccccaaccaauccac

SEQ ID NO: 66558 - RNA, 32 nt, Homo Sapiens
gcugugugacugcuuuaauaacuuuuucccag

SEQ ID NO: 66559 - RNA, 32 nt, Homo Sapiens
ugagggcggcggggcggcguugagcggcggcg

SEQ ID NO: 66560 - RNA, 32 nt, Homo Sapiens
accuguuuuuguccaucuguccaauuaccugu

SEQ ID NO: 66561 - RNA, 32 nt, Homo Sapiens
ucccgccaccaccgcgcgcgggacagauugau

SEQ ID NO: 66562 - RNA, 32 nt, Homo Sapiens
cuuaacucucccucauuugcuuugcccacagc

SEQ ID NO: 66563 - RNA, 32 nt, Homo Sapiens
cggauugguuaaaaaaugcuucauauuugaaa

SEQ ID NO: 66564 - RNA, 32 nt, Homo Sapiens
acagauggguguccccuggugccccuccacuc

SEQ ID NO: 66565 - RNA, 32 nt, Homo Sapiens
aauaauauuuuuccuuuguaauaaauugcuuu

SEQ ID NO: 66566 - RNA, 32 nt, Homo Sapiens
auaauaaaugucaauauuuacagaugcuguga

SEQ ID NO: 66567 - RNA, 32 nt, Homo Sapiens
ucuuaucuccccagccccgcccuucuccccac

SEQ ID NO: 66568 - RNA, 32 nt, Homo Sapiens
aauauuguuuaauggaaugaugagccugcaua

SEQ ID NO: 66569 - RNA, 32 nt, Homo Sapiens
gucgggacgugcggaggcucucacuuuccguc

SEQ ID NO: 66570 - RNA, 32 nt, Homo Sapiens
guuuagacaggagaaaguguauguaaacuacc

SEQ ID NO: 66571 - RNA, 31 nt, Homo Sapiens
ucauguugugguagaaaguccauuaaccaga

SEQ ID NO: 66572 - RNA, 32 nt, Homo Sapiens
cugaucggccgcgggucuugucgaccgcuagg

SEQ ID NO: 66573 - RNA, 32 nt, Homo Sapiens
uugucuacuuucuucuccauccugcuuuaaaa

SEQ ID NO: 66574 - RNA, 32 nt, Homo Sapiens
aauuuaggucucucgcaccacccaggcacaua

SEQ ID NO: 66575 - RNA, 32 nt, Homo Sapiens
cucccuccgcgccucccucccccucgagccgc

SEQ ID NO: 66576 - RNA, 32 nt, Homo Sapiens
ccuucuugcucuuccuuccccagcugcugggg

SEQ ID NO: 66577 - RNA, 32 nt, Homo Sapiens
cccuacaacuaucuucuguuuuuagaauucgu

SEQ ID NO: 66578 - RNA, 32 nt, Homo Sapiens
ugcugccccagcugacuguggcccccuccgug

SEQ ID NO: 66579 - RNA, 32 nt, Homo Sapiens
cggcggcggaccggccucuccucccgccucgc

SEQ ID NO: 66580 - RNA, 32 nt, Homo Sapiens
cccaggucaggaggcagcugucuggucagagg

SEQ ID NO: 66581 - RNA, 30 nt, Homo Sapiens
gguggugguggcggcggcggcggggagggu

SEQ ID NO: 66582 - RNA, 32 nt, Homo Sapiens
cacaggugugguguaauuuauaaaauuagaaa

SEQ ID NO: 66583 - RNA, 32 nt, Homo Sapiens
ucugugccccaggagaucccucucugccuugc

SEQ ID NO: 66584 - RNA, 32 nt, Homo Sapiens
acagggaaaaggagcacaggaugcagcuacuu

SEQ ID NO: 66585 - RNA, 32 nt, Homo Sapiens
ccuuacuccacggggagggcgccucacagcag

SEQ ID NO: 66586 - RNA, 32 nt, Homo Sapiens
uaauucauuugaguuuucuuaccuguuuacac

SEQ ID NO: 66587 - RNA, 32 nt, Homo Sapiens
acccgccaggugccaagaacuaugaacaggca

SEQ ID NO: 66588 - RNA, 32 nt, Homo Sapiens
uugaaucaguauuuuuccuuuugcacgcauua

SEQ ID NO: 66589 - RNA, 32 nt, Homo Sapiens
gucguccguggguuucccgccagccgcagucu

SEQ ID NO: 66590 - RNA, 32 nt, Homo Sapiens
guccagagguggccaagauagcgaggaaacag

SEQ ID NO: 66591 - RNA, 28 nt, Homo Sapiens
uggcggcgccgaggggucgacgcucagg

SEQ ID NO: 66592 - RNA, 32 nt, Homo Sapiens
uuuaucuucagucucuuguugguaucuaacuu

SEQ ID NO: 66593 - RNA, 32 nt, Homo Sapiens
aagugggaaaaagggauagucugcccuugaac

SEQ ID NO: 66594 - RNA, 32 nt, Homo Sapiens
aucccauccaacacacgguuuaauuuucaugg

SEQ ID NO: 66595 - RNA, 32 nt, Homo Sapiens
uuguuccuucuaggcugcccaagccccacuga

SEQ ID NO: 66596 - RNA, 32 nt, Homo Sapiens
cccaaagcugaagagaggucccugcccauguc

SEQ ID NO: 66597 - RNA, 32 nt, Homo Sapiens
ucaccccgcgcccuuuccugcccaccaggacu

SEQ ID NO: 66598 - RNA, 32 nt, Homo Sapiens
guggggcgggccugggccuggggcgcgaccuc

SEQ ID NO: 66599 - RNA, 32 nt, Homo Sapiens
ucuguuggggauuugaggugagaugagaaaga

SEQ ID NO: 66600 - RNA, 32 nt, Homo Sapiens
gcauuucuuggcaaugcuuagagcagccaaga

SEQ ID NO: 66601 - RNA, 32 nt, Homo Sapiens
uuuguagaaaauucauaacauauauaggccaa

SEQ ID NO: 66602 - RNA, 32 nt, Homo Sapiens
accgauuccagcugcgguuaauccagcuuggg

SEQ ID NO: 66603 - RNA, 32 nt, Homo Sapiens
ggagguggcccggccccuccccgcucccuucc

SEQ ID NO: 66604 - RNA, 32 nt, Homo Sapiens
cgcgucccaaggaaacaagcaccgcauaaaua

SEQ ID NO: 66605 - RNA, 32 nt, Homo Sapiens
uggaggaagugagcacaugucaugcuagccaa

SEQ ID NO: 66606 - RNA, 32 nt, Homo Sapiens
ggcuggagugcaguggcaugaucauaacucac

SEQ ID NO: 66607 - RNA, 32 nt, Homo Sapiens
agcagccaccccggccaccuccugaaacagug

SEQ ID NO: 66608 - RNA, 32 nt, Homo Sapiens
gccacuuggaccaagcuccagucaguugaugg

SEQ ID NO: 66609 - RNA, 32 nt, Homo Sapiens
cgccuauaaucccagcacuuugcgaggccaag

SEQ ID NO: 66610 - RNA, 32 nt, Homo Sapiens
uagccaacacuggggcuuuuguuugggguccu

SEQ ID NO: 66611 - RNA, 32 nt, Homo Sapiens
gugcuggagauuuugauuacuaaugucuuuga

SEQ ID NO: 66612 - RNA, 32 nt, Homo Sapiens
cacgaguccagcuuccucggagguguuuauug

SEQ ID NO: 66613 - RNA, 32 nt, Homo Sapiens
uuugcuuuuuaaaguuuuauucuugauuucuu

SEQ ID NO: 66614 - RNA, 32 nt, Homo Sapiens
ccugugugaugauaaacaccacugcuccgggu

SEQ ID NO: 66615 - RNA, 32 nt, Homo Sapiens
agggcggcggcuugaggcguugccaggagagg

SEQ ID NO: 66616 - RNA, 32 nt, Homo Sapiens
ggaaaacugacaucaaacacggcgacccgaca

SEQ ID NO: 66617 - RNA, 32 nt, Homo Sapiens
agcucaucagaaaaacauacuuugaaaagaug

SEQ ID NO: 66618 - RNA, 32 nt, Homo Sapiens
cacagauaugaguacuuuucgucaggguuugg

SEQ ID NO: 66619 - RNA, 32 nt, Homo Sapiens
ucuugaaauuucucuaccuccauccuugaauc

SEQ ID NO: 66620 - RNA, 32 nt, Homo Sapiens
uuaguaaauaaaugggcugaagauguuauccu

SEQ ID NO: 66621 - RNA, 32 nt, Homo Sapiens
cagggaagccaggugggaccagugugucuguc

SEQ ID NO: 66622 - RNA, 32 nt, Homo Sapiens
agcgugggagacggugggccuuguccccugcc

SEQ ID NO: 66623 - RNA, 32 nt, Homo Sapiens
uagccucaguucuuccucuccuucuuuguuug

SEQ ID NO: 66624 - RNA, 31 nt, Homo Sapiens
gaauagaacauauuuaauuauuuguuagcuu

SEQ ID NO: 66625 - RNA, 28 nt, Homo Sapiens
gggucuaaagauuauuacuggacgcauc

SEQ ID NO: 66626 - RNA, 32 nt, Homo Sapiens
ucuuauaaaaauuuaaaaagacacauuucuua

SEQ ID NO: 66627 - RNA, 32 nt, Homo Sapiens
gccagcuggugccucuuguuugggauaggcaa

SEQ ID NO: 66628 - RNA, 32 nt, Homo Sapiens
agagucacggaaucuguacugaagaugccauc

SEQ ID NO: 66629 - RNA, 32 nt, Homo Sapiens
gacccggugcgguggcucaugccuguaauccc

SEQ ID NO: 66630 - RNA, 32 nt, Homo Sapiens
ucgacucucugucuccuccccuccccccgcga

SEQ ID NO: 66631 - RNA, 32 nt, Homo Sapiens
gugcgguaguuuuuaaacuguuuguuuuuaaa

SEQ ID NO: 66632 - RNA, 32 nt, Homo Sapiens
uuucccaguaauuauuuucuuccuuucagaaa

SEQ ID NO: 66633 - RNA, 32 nt, Homo Sapiens
cugucccgccuguacaugggcacagccacccu

SEQ ID NO: 66634 - RNA, 32 nt, Homo Sapiens
cuaauuuauuauuuauacuugaauugugaccu

SEQ ID NO: 66635 - RNA, 32 nt, Homo Sapiens
acgacaucaggagaucgagaccauccuggcua

SEQ ID NO: 66636 - RNA, 32 nt, Homo Sapiens
uauucagcucuuuucagcuuucagaugccacu

SEQ ID NO: 66637 - RNA, 32 nt, Homo Sapiens
gagcaaguccggggccgaagugccaaggggca

SEQ ID NO: 66638 - RNA, 32 nt, Homo Sapiens
augcaugaauuuucuuguuuuuagaauuauuc

SEQ ID NO: 66639 - RNA, 32 nt, Homo Sapiens
aagagugccucugcuuucuccuccucuccucc

SEQ ID NO: 66640 - RNA, 32 nt, Homo Sapiens
aggacggcaaacaauuugaucugagcaucuug

SEQ ID NO: 66641 - RNA, 32 nt, Homo Sapiens
ugugauuuauaacuguuaauucuuacaucaac

SEQ ID NO: 66642 - RNA, 32 nt, Homo Sapiens
agaaguauuuuugucucuuagaaauacuugug

SEQ ID NO: 66643 - RNA, 32 nt, Homo Sapiens
ccagcgaagaauccggcugccccugggccagu

SEQ ID NO: 66644 - RNA, 32 nt, Homo Sapiens
ccagagccugcgcucucuagggcugggacgcc

SEQ ID NO: 66645 - RNA, 32 nt, Homo Sapiens
caaaaaccaauacaacaaaacgaguggcacga

SEQ ID NO: 66646 - RNA, 32 nt, Homo Sapiens
cucugcaggaccagccagcagccucugaugcu

SEQ ID NO: 66647 - RNA, 32 nt, Homo Sapiens
uucugacguuucuuaaugcaaacucuuugccu

SEQ ID NO: 66648 - RNA, 32 nt, Homo Sapiens
uacaucucagaauuggguuuccugauacacac

SEQ ID NO: 66649 - RNA, 32 nt, Homo Sapiens
gcuugcuuuuugcugagaaagcuuccugcccu

SEQ ID NO: 66650 - RNA, 32 nt, Homo Sapiens
ccagcuuguaaaugccauugacuucugaccug

SEQ ID NO: 66651 - RNA, 32 nt, Homo Sapiens
acacucugggguugaggcaacccccacgugga

SEQ ID NO: 66652 - RNA, 32 nt, Homo Sapiens
augcaaucccgauaagaaaugcucgggugucu

SEQ ID NO: 66653 - RNA, 32 nt, Homo Sapiens
ucagcucugcuguugggcugguguguggacag

SEQ ID NO: 66654 - RNA, 32 nt, Homo Sapiens
uugggucuuuauguuggugcugccaggucucu

SEQ ID NO: 66655 - RNA, 32 nt, Homo Sapiens
uuccuuucuaacuggauccagccuguuggagg

SEQ ID NO: 66656 - RNA, 32 nt, Homo Sapiens
gauuuaccaagccccgccuccccgcugccagu

SEQ ID NO: 66657 - RNA, 32 nt, Homo Sapiens
acugcggucgccggggcggggccgccaagggc

SEQ ID NO: 66658 - RNA, 32 nt, Homo Sapiens
accaggcacacaaagcugaggugcuggagaug

SEQ ID NO: 66659 - RNA, 32 nt, Homo Sapiens
gggucucuugauuccuaaccgcccccacauac

SEQ ID NO: 66660 - RNA, 32 nt, Homo Sapiens
uccguaugugguucugggucccagggagccuu

SEQ ID NO: 66661 - RNA, 32 nt, Homo Sapiens
cgucuauccccaggggaauccacacagcccgc

SEQ ID NO: 66662 - RNA, 32 nt, Homo Sapiens
aaugugcucuucuauaucuacuccucaauaaa

SEQ ID NO: 66663 - RNA, 32 nt, Homo Sapiens
cccaggcagcagcuccuccuccucuucugaug

SEQ ID NO: 66664 - RNA, 32 nt, Homo Sapiens
ggggucgccguggucgccgucugugacaagau

SEQ ID NO: 66665 - RNA, 32 nt, Homo Sapiens
caucucacggggcuacaucaagcuguugacag

SEQ ID NO: 66666 - RNA, 31 nt, Homo Sapiens
accaagucauugacuuugcucgaggcaccuu

SEQ ID NO: 66667 - RNA, 31 nt, Homo Sapiens
ccacagaaauuaacuuggagagccugagaaa

SEQ ID NO: 66668 - RNA, 32 nt, Homo Sapiens
uccugaaggggagggagaagggaggaagcucc

SEQ ID NO: 66669 - RNA, 32 nt, Homo Sapiens
uuacauggauuuaaauauauagauauaucacu

SEQ ID NO: 66670 - RNA, 32 nt, Homo Sapiens
acacaguugagcucaguaauccaccaucagua

SEQ ID NO: 66671 - RNA, 32 nt, Homo Sapiens
gucaggcugacggggaggaaccacugcaccac

SEQ ID NO: 66672 - RNA, 32 nt, Homo Sapiens
acgccaaguccucugccuccaccuguccaggg

SEQ ID NO: 66673 - RNA, 32 nt, Homo Sapiens
acugggucuuugaucgaccuugcuagauaaca

SEQ ID NO: 66674 - RNA, 32 nt, Homo Sapiens
uaguuuauuuucagaguccauuuuuucuuaug

SEQ ID NO: 66675 - RNA, 32 nt, Homo Sapiens
gaccagcaccucuggaggacaauggacaaaau

SEQ ID NO: 66676 - RNA, 32 nt, Homo Sapiens
cgccgucgucccggagcgccccgagcuggcgc

SEQ ID NO: 66677 - RNA, 32 nt, Homo Sapiens
uggcuaacugucaagucaugaugcagacuuca

SEQ ID NO: 66678 - RNA, 32 nt, Homo Sapiens
ggaguggagugucuccuggagagagugaggag

SEQ ID NO: 66679 - RNA, 32 nt, Homo Sapiens
ucuuuucuuuuuucuuuuuuuuuuuuuuugag

SEQ ID NO: 66680 - RNA, 32 nt, Homo Sapiens
auaugucuccucuccuucucacuaaggagcca

SEQ ID NO: 66681 - RNA, 30 nt, Homo Sapiens
gggugucugcuacuuccccaucuuuaaaau

SEQ ID NO: 66682 - RNA, 32 nt, Homo Sapiens
cagagccacuugacacccacccugcccaggcu

SEQ ID NO: 66683 - RNA, 32 nt, Homo Sapiens
gagacuagcucuuuugagaauucauaauuuaa

SEQ ID NO: 66684 - RNA, 31 nt, Homo Sapiens
uggcgccugcgccacugcccccgcgcggguc

SEQ ID NO: 66685 - RNA, 32 nt, Homo Sapiens
uuauaaagugauguucugaauaccauaaaaaa

SEQ ID NO: 66686 - RNA, 32 nt, Homo Sapiens
ccacagcgagcgccagcuccggccagccuggg

SEQ ID NO: 66687 - RNA, 32 nt, Homo Sapiens
uggacacaagauaccaaguccagauagugggg

SEQ ID NO: 66688 - RNA, 32 nt, Homo Sapiens
gggaggcagcgggucugcggccgccgagaugg

SEQ ID NO: 66689 - RNA, 32 nt, Homo Sapiens
cacucgccccacuuuguaguagcuucacugaa

SEQ ID NO: 66690 - RNA, 32 nt, Homo Sapiens
ccagcggcccuggcgcguggcuccugcauagc

SEQ ID NO: 66691 - RNA, 32 nt, Homo Sapiens
uggccacucccacacuuccccucccccaggag

SEQ ID NO: 66692 - RNA, 32 nt, Homo Sapiens
ugcuuccaguuucccuucagacuuagcugugu

SEQ ID NO: 66693 - RNA, 27 nt, Homo Sapiens
ugcugucacuucuucaccucuuccacu

SEQ ID NO: 66694 - RNA, 31 nt, Homo Sapiens
cuuuaucauuugauccuguaaauaaaaaaga

SEQ ID NO: 66695 - RNA, 32 nt, Homo Sapiens
cccgcccccacggcgaaggcccggggcaguua

SEQ ID NO: 66696 - RNA, 32 nt, Homo Sapiens
cuccccuccgccccgccccuuuuccucaggga

SEQ ID NO: 66697 - RNA, 32 nt, Homo Sapiens
uuccccagaucauccauuucguccucuuuguu

SEQ ID NO: 66698 - RNA, 31 nt, Homo Sapiens
gcuuuguucgcgcucucgccacacugcgcac

SEQ ID NO: 66699 - RNA, 32 nt, Homo Sapiens
agcaggcagaacucaucuagguaaauuacagu

SEQ ID NO: 66700 - RNA, 32 nt, Homo Sapiens
uuacagaagccaaaugcugccaucugagacug

SEQ ID NO: 66701 - RNA, 32 nt, Homo Sapiens
uaguucuguuuccuguagaaaaguggauaaag

SEQ ID NO: 66702 - RNA, 32 nt, Homo Sapiens
cagggccgcgguugugcagccguguggaucag

SEQ ID NO: 66703 - RNA, 32 nt, Homo Sapiens
gcaggaaggcagcuuggguggaggaagcaugc

SEQ ID NO: 66704 - RNA, 32 nt, Homo Sapiens
uauuuauguucuauucaucuuuugaauguuua

SEQ ID NO: 66705 - RNA, 32 nt, Homo Sapiens
uaagcauguauaacauucaaguaugucaucca

SEQ ID NO: 66706 - RNA, 32 nt, Homo Sapiens
cugaugucuuccugcauauuaaggaugaaucu

SEQ ID NO: 66707 - RNA, 32 nt, Homo Sapiens
gggugaaaucaucagaaagaaaaaucaaagua

SEQ ID NO: 66708 - RNA, 32 nt, Homo Sapiens
uguauacuauauguguuauacgcuguauuuuu

SEQ ID NO: 66709 - RNA, 32 nt, Homo Sapiens
ccaauaacgacugcggagaacuguagcgugca

SEQ ID NO: 66710 - RNA, 32 nt, Homo Sapiens
cacaaguucauggggacgugcacggggccgcc

SEQ ID NO: 66711 - RNA, 32 nt, Homo Sapiens
aaaaccacagaaacaaaacuuuacauuuagaa

SEQ ID NO: 66712 - RNA, 32 nt, Homo Sapiens
accaagagaggaaggagaagggucccgugaac

SEQ ID NO: 66713 - RNA, 32 nt, Homo Sapiens
cacugagguccacagaccuacugcacugaguu

SEQ ID NO: 66714 - RNA, 32 nt, Homo Sapiens
cucaggcccuucccuuccucggcucaggcaug

SEQ ID NO: 66715 - RNA, 32 nt, Homo Sapiens
gucagguuguuuugggggaaaagggggucaug

SEQ ID NO: 66716 - RNA, 32 nt, Homo Sapiens
agggguagcucggcugccggaagagaggggug

SEQ ID NO: 66717 - RNA, 32 nt, Homo Sapiens
uguuccggaggcugaggccaggaggaugggug

SEQ ID NO: 66718 - RNA, 32 nt, Homo Sapiens
ccgcgccuccuggccaggcagggcgccuggga

SEQ ID NO: 66719 - RNA, 32 nt, Homo Sapiens
gcuguggggcauaacgaugaggcgcuggccuu

SEQ ID NO: 66720 - RNA, 32 nt, Homo Sapiens
aaaguuaacuggauuguucccaccugcaugga

SEQ ID NO: 66721 - RNA, 32 nt, Homo Sapiens
agaagaaaaugaauggugcauaaugacccaau

SEQ ID NO: 66722 - RNA, 32 nt, Homo Sapiens
gccugggcggccuuggccucuaagggaaaacg

SEQ ID NO: 66723 - RNA, 32 nt, Homo Sapiens
gcuccagcccucggcgguggcggcggccguag

SEQ ID NO: 66724 - RNA, 32 nt, Homo Sapiens
ggaggcaagguucugaggggacaggcugaccu

SEQ ID NO: 66725 - RNA, 32 nt, Homo Sapiens
ccccugcaccccauuccuaccuuguagcucau

SEQ ID NO: 66726 - RNA, 30 nt, Homo Sapiens
agcaagugggguggcaugggagagaaggga

SEQ ID NO: 66727 - RNA, 32 nt, Homo Sapiens
augaacgcacaaaaccuaucccuugaccagau

SEQ ID NO: 66728 - RNA, 32 nt, Homo Sapiens
agcgucuugcuugcccagcgcgcgcuacuucu

SEQ ID NO: 66729 - RNA, 32 nt, Homo Sapiens
ugaaucucuguauauuugauucuuaacuaaaa

SEQ ID NO: 66730 - RNA, 32 nt, Homo Sapiens
gcaaguaaccaaugaccgucagauuccauuug

SEQ ID NO: 66731 - RNA, 32 nt, Homo Sapiens
uagaggccaugagaaggcagugggggucugcc

SEQ ID NO: 66732 - RNA, 32 nt, Homo Sapiens
uccuuggcugcugaguggugacaguagcccag

SEQ ID NO: 66733 - RNA, 31 nt, Homo Sapiens
guucacagcagagcaaaccaggcaaguuggg

SEQ ID NO: 66734 - RNA, 32 nt, Homo Sapiens
cugucccuggaaagauauagcauagugguucu

SEQ ID NO: 66735 - RNA, 32 nt, Homo Sapiens
guauggcaaccugguuuagcacuggcauccug

SEQ ID NO: 66736 - RNA, 32 nt, Homo Sapiens
aaaaugggaugaauucuuuguuuaugcacuuu

SEQ ID NO: 66737 - RNA, 32 nt, Homo Sapiens
acagggcugcgcacugccagggcagggacagu

SEQ ID NO: 66738 - RNA, 32 nt, Homo Sapiens
ggaaaauaacaugggccaggcauaaaaagcau

SEQ ID NO: 66739 - RNA, 32 nt, Homo Sapiens
agggaggcggcuggcccggcggcaggcucuca

SEQ ID NO: 66740 - RNA, 32 nt, Homo Sapiens
ccgcggagcccggcccgagagccgcguccacg

SEQ ID NO: 66741 - RNA, 32 nt, Homo Sapiens
aagccuuuuuuuucuuuuuggcugaguuauuc

SEQ ID NO: 66742 - RNA, 32 nt, Homo Sapiens
cacgcuggccccagccucagaccccacccagc

SEQ ID NO: 66743 - RNA, 32 nt, Homo Sapiens
gagcacgaacgaggugggaguucugucccccc

SEQ ID NO: 66744 - RNA, 32 nt, Homo Sapiens
ccaaagugaacauggguugcauguaacaggcg

SEQ ID NO: 66745 - RNA, 32 nt, Homo Sapiens
aguuaaugaagauacuggaggggaaaugcuga

SEQ ID NO: 66746 - RNA, 32 nt, Homo Sapiens
gcaaacucaacacaauuguaaguaaugauaca

SEQ ID NO: 66747 - RNA, 32 nt, Homo Sapiens
ccuacuccgcccuccgccccagcccgcgcgcu

SEQ ID NO: 66748 - RNA, 32 nt, Homo Sapiens
gacuaggggccgccaucuccauggccacggcc

SEQ ID NO: 66749 - RNA, 27 nt, Homo Sapiens
gucuggaagcucuucagccccugcagc

SEQ ID NO: 66750 - RNA, 32 nt, Homo Sapiens
gcuuuaggaagauaaaaaccuuacaaagaaug

SEQ ID NO: 66751 - RNA, 32 nt, Homo Sapiens
cacacagacacacgcacacacacacacaggag

SEQ ID NO: 66752 - RNA, 32 nt, Homo Sapiens
cccgggucuccauugugcguggguggcguguu

SEQ ID NO: 66753 - RNA, 32 nt, Homo Sapiens
caagauauaauggcuacagugcaacaaaaaug

SEQ ID NO: 66754 - RNA, 32 nt, Homo Sapiens
aaaaucaaaauauauaaaucaugcaucuccca

SEQ ID NO: 66755 - RNA, 32 nt, Homo Sapiens
cagaagcacccuguccccuccuccccaggccu

SEQ ID NO: 66756 - RNA, 32 nt, Homo Sapiens
agaccugucuguaugcugaacuuuguuaaaaa

SEQ ID NO: 66757 - RNA, 32 nt, Homo Sapiens
ucuacucuuuuuugauuagcuacauuaccuug

SEQ ID NO: 66758 - RNA, 32 nt, Homo Sapiens
cccaugggaaagggcuucaaggcaccaccagu

SEQ ID NO: 66759 - RNA, 32 nt, Homo Sapiens
uuucuccuuucuguccgugggcagcccagucc

SEQ ID NO: 66760 - RNA, 32 nt, Homo Sapiens
cccuggcugagagugccagcaagauguacuuc

SEQ ID NO: 66761 - RNA, 32 nt, Homo Sapiens
uccuguuuacagugccuauuccuggagcucgc

SEQ ID NO: 66762 - RNA, 32 nt, Homo Sapiens
guagacgauuuucucuuucgucuucauggugg

SEQ ID NO: 66763 - RNA, 32 nt, Homo Sapiens
aggcaggcgcgguggcacaugccuguaauccc

SEQ ID NO: 66764 - RNA, 32 nt, Homo Sapiens
ucgucacacaguuuguguauacggcaucuauu

SEQ ID NO: 66765 - RNA, 31 nt, Homo Sapiens
ggagcgcagcgcagcgcagccccaucagucc

SEQ ID NO: 66766 - RNA, 32 nt, Homo Sapiens
uggucucuaauuucccaagacuuguauuuuuu

SEQ ID NO: 66767 - RNA, 32 nt, Homo Sapiens
ccaggguaauugcgcagaggcaucugaugugu

SEQ ID NO: 66768 - RNA, 29 nt, Homo Sapiens
ccagucugaugucacagaggcaaaaucug

SEQ ID NO: 66769 - RNA, 32 nt, Homo Sapiens
acucacuuggcuccccucuccuccuuagccag

SEQ ID NO: 66770 - RNA, 30 nt, Homo Sapiens
aucuucggcgggcgagugggcucggccugu

SEQ ID NO: 66771 - RNA, 32 nt, Homo Sapiens
acuuauuacucaaugccugguacuuggccagc

SEQ ID NO: 66772 - RNA, 32 nt, Homo Sapiens
guccuacuuuagugagauaaaaagcacacucu

SEQ ID NO: 66773 - RNA, 32 nt, Homo Sapiens
auuuaaaauaaauaaacuuugggaaaaggugu

SEQ ID NO: 66774 - RNA, 32 nt, Homo Sapiens
accucgagggaagauggcggacgaggagaagc

SEQ ID NO: 66775 - RNA, 32 nt, Homo Sapiens
agaugcaucacuuaaaaauaaauaucagacaa

SEQ ID NO: 66776 - RNA, 32 nt, Homo Sapiens
ucuuuagaauuucaauagcuugcaguuguugg

SEQ ID NO: 66777 - RNA, 32 nt, Homo Sapiens
agacgggaucuugcuuugcugcugaggcuggu

SEQ ID NO: 66778 - RNA, 32 nt, Homo Sapiens
uauuucugucuccagucuaccacuuccaccaa

SEQ ID NO: 66779 - RNA, 32 nt, Homo Sapiens
cuuggagauuuuuuuucuugaauuucgcuguu

SEQ ID NO: 66780 - RNA, 32 nt, Homo Sapiens
auggaugugaauggaaucagaugugauuccaa

SEQ ID NO: 66781 - RNA, 32 nt, Homo Sapiens
gccgaagagaagcuuugagaccaagaaaugug

SEQ ID NO: 66782 - RNA, 32 nt, Homo Sapiens
uauauuuuguuuugauuuuuaaccuuucaaca

SEQ ID NO: 66783 - RNA, 32 nt, Homo Sapiens
aauaaaagauucuggaggaguuggagaagagu

SEQ ID NO: 66784 - RNA, 32 nt, Homo Sapiens
uauccauuucuuuuccuaguuacggaugauuu

SEQ ID NO: 66785 - RNA, 32 nt, Homo Sapiens
agcgacgcuggcggccgcgggcccaggccuca

SEQ ID NO: 66786 - RNA, 32 nt, Homo Sapiens
uuguuuuacccauguugggucagccugaaacu

SEQ ID NO: 66787 - RNA, 32 nt, Homo Sapiens
uucgguauauuuguauuuaaaugaagugagac

SEQ ID NO: 66788 - RNA, 32 nt, Homo Sapiens
uucuuuuccaaaaauacuucugcaacucauga

SEQ ID NO: 66789 - RNA, 32 nt, Homo Sapiens
cagcccggcagaggggcacacucuggagaccu

SEQ ID NO: 66790 - RNA, 32 nt, Homo Sapiens
acgcugacagaaacagaagcaaauuucccucc

SEQ ID NO: 66791 - RNA, 32 nt, Homo Sapiens
cccgaaaugcaaccugugcaggucuugccuuc

SEQ ID NO: 66792 - RNA, 32 nt, Homo Sapiens
uugaggcugucaucauggcuaggguucuuuua

SEQ ID NO: 66793 - RNA, 32 nt, Homo Sapiens
cuacauccucucugacagccacagcacuacau

SEQ ID NO: 66794 - RNA, 32 nt, Homo Sapiens
aaauaaucaaaauuauuuaaacuuugauuagu

SEQ ID NO: 66795 - RNA, 32 nt, Homo Sapiens
aaucggcggcuacccggcaccggcgccuggag

SEQ ID NO: 66796 - RNA, 32 nt, Homo Sapiens
uuaaguacuaauuuucuuuuuaucaaguagaa

SEQ ID NO: 66797 - RNA, 32 nt, Homo Sapiens
uuccugguuugguacaguaugguuucaugaaa

SEQ ID NO: 66798 - RNA, 32 nt, Homo Sapiens
cugguccucaaucccaagccaccugcacaccu

SEQ ID NO: 66799 - RNA, 32 nt, Homo Sapiens
ccuuucccauucucuuucucaggaauggcugu

SEQ ID NO: 66800 - RNA, 32 nt, Homo Sapiens
gauguuugcuguuaguuuuucauaaaugaucu

SEQ ID NO: 66801 - RNA, 32 nt, Homo Sapiens
uacuuguacuguaucaaauuccauacccucau

SEQ ID NO: 66802 - RNA, 32 nt, Homo Sapiens
aagaauuuuaucggcauuaauuuuucagugua

SEQ ID NO: 66803 - RNA, 32 nt, Homo Sapiens
uuucuuuuuuuuucuuuuuuuuguguuucuuu

SEQ ID NO: 66804 - RNA, 32 nt, Homo Sapiens
uuucuuuccuuccugcuccccgcccaccaaua

SEQ ID NO: 66805 - RNA, 32 nt, Homo Sapiens
cuuucugucuuggaauguaaacaucugauucu

SEQ ID NO: 66806 - RNA, 32 nt, Homo Sapiens
guucagggagcguuuucaagaaaauagcuaua

SEQ ID NO: 66807 - RNA, 32 nt, Homo Sapiens
aucuggaacaauuuuuugaacucuuucacuaa

SEQ ID NO: 66808 - RNA, 32 nt, Homo Sapiens
ccucaagggugcaucgugaaaacugaaaccaa

SEQ ID NO: 66809 - RNA, 32 nt, Homo Sapiens
gcuccugguggcgcccaggaucuuuugggucc

SEQ ID NO: 66810 - RNA, 30 nt, Homo Sapiens
ugguguuuggccgugccgcugucuaacuug

SEQ ID NO: 66811 - RNA, 32 nt, Homo Sapiens
ccacaaaaaagauggugaaaaggaaggguaau

SEQ ID NO: 66812 - RNA, 32 nt, Homo Sapiens
ccgagucagaucugcacuagcaaccagaacua

SEQ ID NO: 66813 - RNA, 32 nt, Homo Sapiens
cuuuaaaugaauuagaaacuauuugaggcuau

SEQ ID NO: 66814 - RNA, 32 nt, Homo Sapiens
auuaauuuuguggucauuguuucucuucgaua

SEQ ID NO: 66815 - RNA, 32 nt, Homo Sapiens
aaaaaauuuccaucuuauuucauuucuguaac

SEQ ID NO: 66816 - RNA, 32 nt, Homo Sapiens
cagauuccuuccccucccguccccucacgcuc

SEQ ID NO: 66817 - RNA, 32 nt, Homo Sapiens
uauuccaaaaacgaguuuauauuuucaaacgg

SEQ ID NO: 66818 - RNA, 31 nt, Homo Sapiens
auuugaagaaagaaaaaacagauuuuagggu

SEQ ID NO: 66819 - RNA, 32 nt, Homo Sapiens
caguacaaacucccaguucccagaaaagacuu

SEQ ID NO: 66820 - RNA, 32 nt, Homo Sapiens
cagaaaagaguagccugggcugucuggaaauc

SEQ ID NO: 66821 - RNA, 29 nt, Homo Sapiens
ugaucaauauguauccaugggacuuugaa

SEQ ID NO: 66822 - RNA, 32 nt, Homo Sapiens
cagcuggcccucggggaacccgcacacacagc

SEQ ID NO: 66823 - RNA, 32 nt, Homo Sapiens
uuuucuuaaaauuuauuuuaacuugacaguau

SEQ ID NO: 66824 - RNA, 32 nt, Homo Sapiens
ugacugcauaguauucacuuuaugaauauuua

SEQ ID NO: 66825 - RNA, 32 nt, Homo Sapiens
cacacugcccccucacuaucuuguuauccagu

SEQ ID NO: 66826 - RNA, 32 nt, Homo Sapiens
ggucucccaucccgaggccagcguuccugugc

SEQ ID NO: 66827 - RNA, 32 nt, Homo Sapiens
cccggggccccgaggccuuggccgcgucacag

SEQ ID NO: 66828 - RNA, 32 nt, Homo Sapiens
gguuauuuucuuucuaaaauaaguguuauuac

SEQ ID NO: 66829 - RNA, 32 nt, Homo Sapiens
aaaccaucccguccccauuccuccuccucucu

SEQ ID NO: 66830 - RNA, 32 nt, Homo Sapiens
gcuccuuccaggagcugaaauccaccugucuc

SEQ ID NO: 66831 - RNA, 32 nt, Homo Sapiens
agguauggaagacagccauguguagugaugga

SEQ ID NO: 66832 - RNA, 32 nt, Homo Sapiens
uccaacuguucaccgaagagugucucaaguuc

SEQ ID NO: 66833 - RNA, 32 nt, Homo Sapiens
aggcggcggcgguggcggcggcgguuagacau

SEQ ID NO: 66834 - RNA, 32 nt, Homo Sapiens
gcugguggccggcguugucgcgcacggcccgg

SEQ ID NO: 66835 - RNA, 32 nt, Homo Sapiens
aauuggaagaucugggacuugagaucuggguc

SEQ ID NO: 66836 - RNA, 32 nt, Homo Sapiens
gcucucuauuggcaugagagaacuuggaagcc

SEQ ID NO: 66837 - RNA, 32 nt, Homo Sapiens
cugugauacugaaaagcuguccugcugaagca

SEQ ID NO: 66838 - RNA, 32 nt, Homo Sapiens
auuugaaaggaagcaagugcugaauggaauuu

SEQ ID NO: 66839 - RNA, 32 nt, Homo Sapiens
aaugcucccuuggcauaaauagcaaucaauua

SEQ ID NO: 66840 - RNA, 30 nt, Homo Sapiens
cugagaucuguggccggcggcagcuggugc

SEQ ID NO: 66841 - RNA, 32 nt, Homo Sapiens
aacaauuagccgggcgugguggggugcgcuug

SEQ ID NO: 66842 - RNA, 32 nt, Homo Sapiens
uaaagguaugcugcuuaccaucaucuuaguga

SEQ ID NO: 66843 - RNA, 32 nt, Homo Sapiens
gaagauuccagaagguccuggucucccaugcc

SEQ ID NO: 66844 - RNA, 32 nt, Homo Sapiens
ucuacuaaaaauacaaaaacuagccaggugug

SEQ ID NO: 66845 - RNA, 32 nt, Homo Sapiens
uaguggaguuauuuuuaaaaagggaaucccag

SEQ ID NO: 66846 - RNA, 32 nt, Homo Sapiens
aaauuaacauggagucauuuauacagggacua

SEQ ID NO: 66847 - RNA, 32 nt, Homo Sapiens
agauucaagccucaagcuuccaaagcauuuuu

SEQ ID NO: 66848 - RNA, 32 nt, Homo Sapiens
augauuagugaacacuuuuuucaauauuuuuu

SEQ ID NO: 66849 - RNA, 32 nt, Homo Sapiens
ucggcgugcuuggcuugguugcuggaggucug

SEQ ID NO: 66850 - RNA, 32 nt, Homo Sapiens
acauacauauuugacaaagacuucugaauaaa

SEQ ID NO: 66851 - RNA, 32 nt, Homo Sapiens
cccacccacucccacaccuagcccagaaugcu

SEQ ID NO: 66852 - RNA, 32 nt, Homo Sapiens
gucucccuucuuugcuggcuuuauuauugacc

SEQ ID NO: 66853 - RNA, 32 nt, Homo Sapiens
cauuuagugucuaaguuuuacugauuuuaucu

SEQ ID NO: 66854 - RNA, 29 nt, Homo Sapiens
gcugcaaugcaaaaaaaaaaaaaaaaaaa

SEQ ID NO: 66855 - RNA, 30 nt, Homo Sapiens
ugaaaaccuuuaaagggggaaaaggaaagc

SEQ ID NO: 66856 - RNA, 32 nt, Homo Sapiens
guacguagaaauuuguagaaaagcagacuuag

SEQ ID NO: 66857 - RNA, 32 nt, Homo Sapiens
guucucuaagaagauaggauugguuuuagccc

SEQ ID NO: 66858 - RNA, 32 nt, Homo Sapiens
acccuauuugucgugugacauuuuaaguugua

SEQ ID NO: 66859 - RNA, 32 nt, Homo Sapiens
aauaaacauggacuuuuacaaaacccauaucg

SEQ ID NO: 66860 - RNA, 32 nt, Homo Sapiens
uccgaguucugcuuuauucucuagcaauccac

SEQ ID NO: 66861 - RNA, 32 nt, Homo Sapiens
cuaaauacaaauuuauuuagcucaugaugugu

SEQ ID NO: 66862 - RNA, 32 nt, Homo Sapiens
gcauccacaccucccaggauccagugcucccu

SEQ ID NO: 66863 - RNA, 32 nt, Homo Sapiens
gcugcuuuguauccagucuaagggagccuauu

SEQ ID NO: 66864 - RNA, 32 nt, Homo Sapiens
uauuuuuuuuuuucuuuuuuugauucagcuua

SEQ ID NO: 66865 - RNA, 32 nt, Homo Sapiens
cggccgggccccagcauggcugcccccacggc

SEQ ID NO: 66866 - RNA, 32 nt, Homo Sapiens
aauggcuucaaccucggaggcggagguugcag

SEQ ID NO: 66867 - RNA, 32 nt, Homo Sapiens
cuucucaaaguccuuauuaaguguaaacuucu

SEQ ID NO: 66868 - RNA, 32 nt, Homo Sapiens
gccauugcacuccagccugggcgacagaggaa

SEQ ID NO: 66869 - RNA, 32 nt, Homo Sapiens
guucaaagaggugaacauuaaaauauugagac

SEQ ID NO: 66870 - RNA, 32 nt, Homo Sapiens
caucuugauuuauaaacaaaaccuggaaaacc

SEQ ID NO: 66871 - RNA, 32 nt, Homo Sapiens
cugguagcugggucagggcacuggcgcccagu

SEQ ID NO: 66872 - RNA, 32 nt, Homo Sapiens
cuuuuaguaaauaaaaucaugauuccaagucu

SEQ ID NO: 66873 - RNA, 32 nt, Homo Sapiens
guuaacugcuggaagggacagaugcacugaua

SEQ ID NO: 66874 - RNA, 32 nt, Homo Sapiens
aauuaucagaaccuggucuggcugggacuuuc

SEQ ID NO: 66875 - RNA, 32 nt, Homo Sapiens
caguggaacuuuuuauacuggagauuaaaaaa

SEQ ID NO: 66876 - RNA, 32 nt, Homo Sapiens
agcgggcuggaagugcgggcuucugcagcagc

SEQ ID NO: 66877 - RNA, 32 nt, Homo Sapiens
cgcuccuuccagcuugccaaacccacagcuac

SEQ ID NO: 66878 - RNA, 32 nt, Homo Sapiens
uuucccagagacccggggagcuuucccagaga

SEQ ID NO: 66879 - RNA, 32 nt, Homo Sapiens
gauccguggcagggcugcugggccugugggug

SEQ ID NO: 66880 - RNA, 32 nt, Homo Sapiens
uaaagagaaaaauuaugguagcaucaagauca

SEQ ID NO: 66881 - RNA, 27 nt, Homo Sapiens
caauccucccacuucagccuccagagu

SEQ ID NO: 66882 - RNA, 32 nt, Homo Sapiens
ggcggcuggugcacaacgcucugcucuacaga

SEQ ID NO: 66883 - RNA, 32 nt, Homo Sapiens
ucacuauucuucaggcuucaguaaaucuuuuu

SEQ ID NO: 66884 - RNA, 32 nt, Homo Sapiens
cccugaguggaagugucuggcuccccguagag

SEQ ID NO: 66885 - RNA, 32 nt, Homo Sapiens
ugcaguuaaggguuaguuuacaaucagccaca

SEQ ID NO: 66886 - RNA, 32 nt, Homo Sapiens
uuucauacugaauccuguuugacuggguguuu

SEQ ID NO: 66887 - RNA, 32 nt, Homo Sapiens
aacuucaagcugugccuuggggcuuuguugga

SEQ ID NO: 66888 - RNA, 32 nt, Homo Sapiens
uugggagagucuuuuccaugcaugaagcaauu

SEQ ID NO: 66889 - RNA, 32 nt, Homo Sapiens
cuccgacuaugaaccagaugccuggagaacac

SEQ ID NO: 66890 - RNA, 32 nt, Homo Sapiens
ccuauauaauuaugacccagugaugucuuuug

SEQ ID NO: 66891 - RNA, 32 nt, Homo Sapiens
guauguuguaaggauggugaaucgucacuugg

SEQ ID NO: 66892 - RNA, 32 nt, Homo Sapiens
cugcucugccacguagagagccagcaaaggga

SEQ ID NO: 66893 - RNA, 32 nt, Homo Sapiens
ugaaggcagcggcuucuguucucccgcugcug

SEQ ID NO: 66894 - RNA, 32 nt, Homo Sapiens
cacuguggagauugugcuaugaagauaccugc

SEQ ID NO: 66895 - RNA, 30 nt, Homo Sapiens
uguugugggaaucuuggucauugaauguaa

SEQ ID NO: 66896 - RNA, 32 nt, Homo Sapiens
uuauccauugagaaauuccuuaaugaaacagu

SEQ ID NO: 66897 - RNA, 32 nt, Homo Sapiens
cugagcugacaguugugccgaggacugucacc

SEQ ID NO: 66898 - RNA, 32 nt, Homo Sapiens
uggccgcgggcgccauggagggggugcuguac

SEQ ID NO: 66899 - RNA, 30 nt, Homo Sapiens
aggacaugggggugugcagaaguucuguuc

SEQ ID NO: 66900 - RNA, 32 nt, Homo Sapiens
gccggcugaggcuucucccagcccgugggugg

SEQ ID NO: 66901 - RNA, 32 nt, Homo Sapiens
uuaaguaacugagucauuuuuaccacacaguc

SEQ ID NO: 66902 - RNA, 32 nt, Homo Sapiens
ucccgccucaauccuaaaagcaugucaacaau

SEQ ID NO: 66903 - RNA, 32 nt, Homo Sapiens
gaaaauuucgcaccacuugugaauuccuugaa

SEQ ID NO: 66904 - RNA, 32 nt, Homo Sapiens
caucccauccucugcccucuguuggcuguugu

SEQ ID NO: 66905 - RNA, 32 nt, Homo Sapiens
aaagcucacagcagcugccuacgccagguuug

SEQ ID NO: 66906 - RNA, 32 nt, Homo Sapiens
uaguauuuggaggaaucagggguuuggaagga

SEQ ID NO: 66907 - RNA, 29 nt, Homo Sapiens
gauaaaguuguaaauaauuuucuaagaca

SEQ ID NO: 66908 - RNA, 32 nt, Homo Sapiens
ggggcagcacugggcucaggcuucagcgcgac

SEQ ID NO: 66909 - RNA, 32 nt, Homo Sapiens
cuacggcggccgcgcgcuccaggccggucgcu

SEQ ID NO: 66910 - RNA, 29 nt, Homo Sapiens
cggcggcgcccgcagaggacgcugcuuuc

SEQ ID NO: 66911 - RNA, 32 nt, Homo Sapiens
gccuagcaccacauccccauguagaaguguug

SEQ ID NO: 66912 - RNA, 32 nt, Homo Sapiens
acgggcaccccgagauguaccaaccuuuucau

SEQ ID NO: 66913 - RNA, 32 nt, Homo Sapiens
ggaagcuuuguccuugcagucuucacaguaaa

SEQ ID NO: 66914 - RNA, 32 nt, Homo Sapiens
ugucucgugguugagcucgcaaaccugaaaac

SEQ ID NO: 66915 - RNA, 32 nt, Homo Sapiens
aacucagaauaaaggaaaucauagagaaacua

SEQ ID NO: 66916 - RNA, 32 nt, Homo Sapiens
ccaagagcccucacuuuugagggugagggaca

SEQ ID NO: 66917 - RNA, 32 nt, Homo Sapiens
caggcgcgguggcucacgcccauaaucccagc

SEQ ID NO: 66918 - RNA, 32 nt, Homo Sapiens
uuauguauaaaucauggaauuuaugcaaaaau

SEQ ID NO: 66919 - RNA, 32 nt, Homo Sapiens
gccgagcacgugaaggcggccggcgccaucuc

SEQ ID NO: 66920 - RNA, 32 nt, Homo Sapiens
gauugcuguagcagauucuguucugccugcug

SEQ ID NO: 66921 - RNA, 32 nt, Homo Sapiens
uucagaaaggaguagaauauaaacacauaauu

SEQ ID NO: 66922 - RNA, 32 nt, Homo Sapiens
ccaacaucucaauaaaacuuugaaagcaaaaa

SEQ ID NO: 66923 - RNA, 32 nt, Homo Sapiens
uucucacccagcugccucggcgcugccccggu

SEQ ID NO: 66924 - RNA, 32 nt, Homo Sapiens
ccuuauguccaaugucuguccuccucuucagg

SEQ ID NO: 66925 - RNA, 32 nt, Homo Sapiens
acccccggggucccggccuucucgggcugggg

SEQ ID NO: 66926 - RNA, 32 nt, Homo Sapiens
ucaucugcuggaacaggcgccauggggccugc

SEQ ID NO: 66927 - RNA, 32 nt, Homo Sapiens
gccccgccagguccccucuccuuucgcucucc

SEQ ID NO: 66928 - RNA, 32 nt, Homo Sapiens
acugauuucauuuucaauaaauguagguuugu

SEQ ID NO: 66929 - RNA, 32 nt, Homo Sapiens
uucuuuccuaagcacaucaauucguaguaaau

SEQ ID NO: 66930 - RNA, 32 nt, Homo Sapiens
uagucaggcuccugggagcccgcuggccccag

SEQ ID NO: 66931 - RNA, 32 nt, Homo Sapiens
aucuguucucugaaauucaaucaaaugaguca

SEQ ID NO: 66932 - RNA, 32 nt, Homo Sapiens
gguaacugugaauugcagaauaaauugaaaga

SEQ ID NO: 66933 - RNA, 32 nt, Homo Sapiens
gguuucaccguguuggccaggcuggucuggaa

SEQ ID NO: 66934 - RNA, 32 nt, Homo Sapiens
gccagcugucuccacuguggaguuacuauuuu

SEQ ID NO: 66935 - RNA, 32 nt, Homo Sapiens
gucucuuaaauugcagauacaaacccagagag

SEQ ID NO: 66936 - RNA, 32 nt, Homo Sapiens
cuccaaguuggaaaauagaguccaaauguaac

SEQ ID NO: 66937 - RNA, 32 nt, Homo Sapiens
gagaauaauguuacauguuuaauuguaauauu

SEQ ID NO: 66938 - RNA, 32 nt, Homo Sapiens
ugaacucccgggcuccucccaccuaagucucu

SEQ ID NO: 66939 - RNA, 32 nt, Homo Sapiens
gggggcgggggcgagcccguggagccgcccaa

SEQ ID NO: 66940 - RNA, 32 nt, Homo Sapiens
cagacauugggugggggguggggggugguuga

SEQ ID NO: 66941 - RNA, 32 nt, Homo Sapiens
aggggaagaaagacauaaagaaaagcgacaca

SEQ ID NO: 66942 - RNA, 32 nt, Homo Sapiens
ucagguguucagaucaagggaaacuacucuaa

SEQ ID NO: 66943 - RNA, 30 nt, Homo Sapiens
acauauuauaucccuacucuaaccuguuaa

SEQ ID NO: 66944 - RNA, 32 nt, Homo Sapiens
guuuuaugugugggaaagggacccgaagccca

SEQ ID NO: 66945 - RNA, 32 nt, Homo Sapiens
uuuuuuaaaacugauaauaaugcugaauuauc

SEQ ID NO: 66946 - RNA, 32 nt, Homo Sapiens
ugugcaccacuacuccuggauauuuuuuugug

SEQ ID NO: 66947 - RNA, 32 nt, Homo Sapiens
ccugagugcuguaucuauuacucuuuuacuuu

SEQ ID NO: 66948 - RNA, 32 nt, Homo Sapiens
caccgccugaccuggcugcugcucuugcuuca

SEQ ID NO: 66949 - RNA, 32 nt, Homo Sapiens
ggaagggaggggaagcacuuuaaagucugagc

SEQ ID NO: 66950 - RNA, 32 nt, Homo Sapiens
ccucccucacuuucuuccucucuccuuccuuu

SEQ ID NO: 66951 - RNA, 32 nt, Homo Sapiens
gcuucaauccuccaucauuaaugugaagcaaa

SEQ ID NO: 66952 - RNA, 32 nt, Homo Sapiens
acuaaugucccuccccucucccugccaaaagg

SEQ ID NO: 66953 - RNA, 32 nt, Homo Sapiens
gaauauauaugaugaaauucuuauguugaaua

SEQ ID NO: 66954 - RNA, 32 nt, Homo Sapiens
aauaaaacagagccaacaacaguauuuuaagg

SEQ ID NO: 66955 - RNA, 32 nt, Homo Sapiens
auaauuaauuuucaggguuuugaggcugaaca

SEQ ID NO: 66956 - RNA, 32 nt, Homo Sapiens
cuuaaaagaaaaaacaaacaaacaaaccaaaa

SEQ ID NO: 66957 - RNA, 32 nt, Homo Sapiens
aagcugcuuagccuuugucaaccaucaaagug

SEQ ID NO: 66958 - RNA, 32 nt, Homo Sapiens
ccuccucaugucuccuucuggcugccuggaag

SEQ ID NO: 66959 - RNA, 32 nt, Homo Sapiens
gccacuaaguauucuaaauacuuuucaauggc

SEQ ID NO: 66960 - RNA, 32 nt, Homo Sapiens
cgccccucaggccggggcgcgaccgcggaucc

SEQ ID NO: 66961 - RNA, 32 nt, Homo Sapiens
aaaggacucuaucucauccuccccucgacaag

SEQ ID NO: 66962 - RNA, 32 nt, Homo Sapiens
cgucuccagggccggaggagccgcggggcguc

SEQ ID NO: 66963 - RNA, 32 nt, Homo Sapiens
caggaacucgacucuccaacccuccugagcag

SEQ ID NO: 66964 - RNA, 32 nt, Homo Sapiens
uguuugccccgggaaaauuugccuggggaaua

SEQ ID NO: 66965 - RNA, 32 nt, Homo Sapiens
ugccuuugacuuccugacuguccccuggcugc

SEQ ID NO: 66966 - RNA, 32 nt, Homo Sapiens
ggcuggccucaaaguccugaccucaggugauc

SEQ ID NO: 66967 - RNA, 32 nt, Homo Sapiens
uuccguaucuucugccuccauguucccuccca

SEQ ID NO: 66968 - RNA, 32 nt, Homo Sapiens
cccgcacccgcaccgcggcuacuggcuugcgg

SEQ ID NO: 66969 - RNA, 32 nt, Homo Sapiens
aacccagcuuuuugucauucacuuccuuuugu

SEQ ID NO: 66970 - RNA, 32 nt, Homo Sapiens
cugcucucaauccugcucucaccaugagccuc

SEQ ID NO: 66971 - RNA, 32 nt, Homo Sapiens
gaaggaagauuccacacagggcaaaaggagug

SEQ ID NO: 66972 - RNA, 32 nt, Homo Sapiens
aggaggaggaggagguagggugugaaacagcc

SEQ ID NO: 66973 - RNA, 32 nt, Homo Sapiens
gagagcuuucauaaguaguucugaauucccaa

SEQ ID NO: 66974 - RNA, 32 nt, Homo Sapiens
ugagcagcuccauuaguccaaaacagagcuuu

SEQ ID NO: 66975 - RNA, 32 nt, Homo Sapiens
uuauuaaugaguuuuaaagauguaaaaccuaa

SEQ ID NO: 66976 - RNA, 32 nt, Homo Sapiens
uuagauuuuaucgacauuaugcaaagcuuaac

SEQ ID NO: 66977 - RNA, 32 nt, Homo Sapiens
uuacacaauauuaaaauguaaauguuucuuua

SEQ ID NO: 66978 - RNA, 32 nt, Homo Sapiens
cuccaccguauuacuccauuagcuuggagccu

SEQ ID NO: 66979 - RNA, 32 nt, Homo Sapiens
uccuggucacaaagucagaguggcugggccaa

SEQ ID NO: 66980 - RNA, 32 nt, Homo Sapiens
aggagccccacgugcacuccccggccugcauc

SEQ ID NO: 66981 - RNA, 32 nt, Homo Sapiens
cagcagacgcagaucggcuccgcgaggcgggu

SEQ ID NO: 66982 - RNA, 32 nt, Homo Sapiens
gggggaggcugcagucucggaggggggccucg

SEQ ID NO: 66983 - RNA, 32 nt, Homo Sapiens
cuuccaacuccagccucucaugggaugguaga

SEQ ID NO: 66984 - RNA, 32 nt, Homo Sapiens
cuggggcugggguggggguggcagggagcugg

SEQ ID NO: 66985 - RNA, 32 nt, Homo Sapiens
ggugccuccgagugugcgcgcgcucucgcuac

SEQ ID NO: 66986 - RNA, 32 nt, Homo Sapiens
uuaugaaaacaaauagagaaauaucaguaagu

SEQ ID NO: 66987 - RNA, 32 nt, Homo Sapiens
ccaccacggugucuccucccaccuccucugga

SEQ ID NO: 66988 - RNA, 32 nt, Homo Sapiens
uaacuuauugaugcucuauugugcaguagcau

SEQ ID NO: 66989 - RNA, 32 nt, Homo Sapiens
cucagauucuacuugcuucucuucuccacguu

SEQ ID NO: 66990 - RNA, 32 nt, Homo Sapiens
cugcugcccuucgauccuuccacacauggcca

SEQ ID NO: 66991 - RNA, 32 nt, Homo Sapiens
caguucacauucagcucagcagagcaagaccc

SEQ ID NO: 66992 - RNA, 32 nt, Homo Sapiens
uuuuagugcaaaagguuuaaauuuauaguugu

SEQ ID NO: 66993 - RNA, 32 nt, Homo Sapiens
agacagaaaaagaagaacucaaagauacacaa

SEQ ID NO: 66994 - RNA, 32 nt, Homo Sapiens
ccggagcacuuguuacgggagccccgggcugg

SEQ ID NO: 66995 - RNA, 32 nt, Homo Sapiens
aaauaaagcugauagcauauauucauaccugu

SEQ ID NO: 66996 - RNA, 32 nt, Homo Sapiens
acauuuauuugagaagacauuuuugugugugc

SEQ ID NO: 66997 - RNA, 32 nt, Homo Sapiens
cacugcacuccagcccgggcggcagagggaga

SEQ ID NO: 66998 - RNA, 32 nt, Homo Sapiens
uuaaugaggagaaaacacuuuguaaaggccaa

SEQ ID NO: 66999 - RNA, 32 nt, Homo Sapiens
ccgccaugcccgugaaaugauguuguugcugc

SEQ ID NO: 67000 - RNA, 32 nt, Homo Sapiens
gccgcucggccacguccaccggagcauccugc

SEQ ID NO: 67001 - RNA, 32 nt, Homo Sapiens
agaugaaaauacuacugcugagcauuuuugaa

SEQ ID NO: 67002 - RNA, 32 nt, Homo Sapiens
ucccucugccccagccccacccuuggccaucu

SEQ ID NO: 67003 - RNA, 32 nt, Homo Sapiens
uucugcuccccaguucuccccagccacugugg

SEQ ID NO: 67004 - RNA, 32 nt, Homo Sapiens
gaugauacuuacaauuuuuagcagguagcuuu

SEQ ID NO: 67005 - RNA, 32 nt, Homo Sapiens
gcagcaauuuucaguuauuccagauuaucuag

SEQ ID NO: 67006 - RNA, 27 nt, Homo Sapiens
ggguuuuguugaugcugguauaaugug

SEQ ID NO: 67007 - RNA, 32 nt, Homo Sapiens
uuaaaauauaucuauaucacuuuguugguaca

SEQ ID NO: 67008 - RNA, 32 nt, Homo Sapiens
ccugggacaaccuccuuauugaagggaagagg

SEQ ID NO: 67009 - RNA, 32 nt, Homo Sapiens
guaugagauccuguuauguuaagggaaaucca

SEQ ID NO: 67010 - RNA, 32 nt, Homo Sapiens
aagagauuuccacagaagcucugcggccguca

SEQ ID NO: 67011 - RNA, 32 nt, Homo Sapiens
ugccuguaauccgagcacuuugggaggccaag

SEQ ID NO: 67012 - RNA, 32 nt, Homo Sapiens
cuccaggcagggggcgcugggguguugcacuu

SEQ ID NO: 67013 - RNA, 32 nt, Homo Sapiens
guggccccugcuguccgcaucuccacaggggu

SEQ ID NO: 67014 - RNA, 32 nt, Homo Sapiens
cuuuguggggggcuuuugaggacccagcugcg

SEQ ID NO: 67015 - RNA, 32 nt, Homo Sapiens
gguccugggagaaugcagauacuguccgugga

SEQ ID NO: 67016 - RNA, 32 nt, Homo Sapiens
cagucccgguugaauguaauuuuuacaaaauu

SEQ ID NO: 67017 - RNA, 32 nt, Homo Sapiens
caucaguggcgaugacuuuauuugcggagcau

SEQ ID NO: 67018 - RNA, 32 nt, Homo Sapiens
gaaaauauugucuuaugugauuuuuuccccug

SEQ ID NO: 67019 - RNA, 32 nt, Homo Sapiens
uaaagcugccuugcugaacuccucucugcagg

SEQ ID NO: 67020 - RNA, 32 nt, Homo Sapiens
uagcagaugggaggaacugcugagagaagaug

SEQ ID NO: 67021 - RNA, 32 nt, Homo Sapiens
agguaaaugaauuaucgcagagaaaaaccaca

SEQ ID NO: 67022 - RNA, 32 nt, Homo Sapiens
acugggaaugucggcuuuggacccuccugauc

SEQ ID NO: 67023 - RNA, 32 nt, Homo Sapiens
gcuuaggacuaaaugaaagauacuaucucaug

SEQ ID NO: 67024 - RNA, 32 nt, Homo Sapiens
gugcaauauggacauguuugcaaaccauacca

SEQ ID NO: 67025 - RNA, 32 nt, Homo Sapiens
guuagccaggacuuguccccuggcagcugggc

SEQ ID NO: 67026 - RNA, 32 nt, Homo Sapiens
ggcagaggccacagucaccuccccacacagag

SEQ ID NO: 67027 - RNA, 32 nt, Homo Sapiens
uucuaggugaagcauacuccaguguuuuaggg

SEQ ID NO: 67028 - RNA, 31 nt, Homo Sapiens
ugcugcgugcgcugccugcucccgccugagg

SEQ ID NO: 67029 - RNA, 32 nt, Homo Sapiens
cuucaaacuacuuuauacuagugauaguuuga

SEQ ID NO: 67030 - RNA, 32 nt, Homo Sapiens
cacuuucuguuagcucccuccauccucugcgu

SEQ ID NO: 67031 - RNA, 32 nt, Homo Sapiens
caguugagaaacaaaaguuuggcauguuguca

SEQ ID NO: 67032 - RNA, 32 nt, Homo Sapiens
uaauauugaggcugcagcaggugcugggcugg

SEQ ID NO: 67033 - RNA, 32 nt, Homo Sapiens
aauauuuaguuauauuugauauuuugaaacug

SEQ ID NO: 67034 - RNA, 32 nt, Homo Sapiens
uuucaguggcuuaggaucugauugcucccuca

SEQ ID NO: 67035 - RNA, 32 nt, Homo Sapiens
cuucucuccaggcccugaacuuucucaggucu

SEQ ID NO: 67036 - RNA, 32 nt, Homo Sapiens
gaccgccugacagacagccccgggccagcggc

SEQ ID NO: 67037 - RNA, 32 nt, Homo Sapiens
gugcagggaggcaaggcccacauucuccuuca

SEQ ID NO: 67038 - RNA, 32 nt, Homo Sapiens
ucauccccaacgcuccucaccuagccccuguc

SEQ ID NO: 67039 - RNA, 32 nt, Homo Sapiens
uucaacagaagcugugcugccacggcaggccc

SEQ ID NO: 67040 - RNA, 32 nt, Homo Sapiens
augugacgucaggugagaagggagggcccguc

SEQ ID NO: 67041 - RNA, 32 nt, Homo Sapiens
cucagauauuuuguugcugaucaaauacuguu

SEQ ID NO: 67042 - RNA, 32 nt, Homo Sapiens
gcagggguccacuagcccuccauccucuacag

SEQ ID NO: 67043 - RNA, 32 nt, Homo Sapiens
uuugggucaggaggccaaagcugauguucagg

SEQ ID NO: 67044 - RNA, 32 nt, Homo Sapiens
ucuucuuccuuccccugaccuagguguagaga

SEQ ID NO: 67045 - RNA, 32 nt, Homo Sapiens
cauuucacuccagccugggcgacaagagugaa

SEQ ID NO: 67046 - RNA, 32 nt, Homo Sapiens
gguaggaggagcuuccugcuuugcaccaucug

SEQ ID NO: 67047 - RNA, 32 nt, Homo Sapiens
uuauucuccacuuuuucuuauuuuagauugcu

SEQ ID NO: 67048 - RNA, 32 nt, Homo Sapiens
cugggcugcagagacuggaccccgcccagcau

SEQ ID NO: 67049 - RNA, 32 nt, Homo Sapiens
aauccuggggacgggaagcucaguccucacag

SEQ ID NO: 67050 - RNA, 32 nt, Homo Sapiens
ugauaaaggcuuucuacauucuaauuuacuuu

SEQ ID NO: 67051 - RNA, 32 nt, Homo Sapiens
aaucucugcccuccccacccauggugguacug

SEQ ID NO: 67052 - RNA, 32 nt, Homo Sapiens
uuccccaacccuccccaggugggcagggcgga

SEQ ID NO: 67053 - RNA, 32 nt, Homo Sapiens
acauuaaaaguacugacaccugagaauuucug

SEQ ID NO: 67054 - RNA, 32 nt, Homo Sapiens
gcaauugcgcuccagccugggcgacaagagca

SEQ ID NO: 67055 - RNA, 32 nt, Homo Sapiens
uucccuucccccugcaagcgcccggauaaugu

SEQ ID NO: 67056 - RNA, 32 nt, Homo Sapiens
caguuuucuucuucuuuguuguucuucuagug

SEQ ID NO: 67057 - RNA, 32 nt, Homo Sapiens
gguggagcuggaccugccugcugcagucacgu

SEQ ID NO: 67058 - RNA, 32 nt, Homo Sapiens
aggagcaguuucucaguguucaucuuccauga

SEQ ID NO: 67059 - RNA, 32 nt, Homo Sapiens
ucucaccaacuuucuuauguguguucuuuuua

SEQ ID NO: 67060 - RNA, 32 nt, Homo Sapiens
auucccacaggaauauaaaaacaaagaaagag

SEQ ID NO: 67061 - RNA, 32 nt, Homo Sapiens
ccaccaaaccuguuagaacuggaccaaucaaa

SEQ ID NO: 67062 - RNA, 30 nt, Homo Sapiens
ucacgucugaacugcauccugagcgggcaa

SEQ ID NO: 67063 - RNA, 32 nt, Homo Sapiens
gccgcccugugcuaucaaggcuggauggaaag

SEQ ID NO: 67064 - RNA, 32 nt, Homo Sapiens
ccggagccuuuggaagucugugcccuugugcc

SEQ ID NO: 67065 - RNA, 32 nt, Homo Sapiens
agaagcccguuggcgagcucuggcaccugcaa

SEQ ID NO: 67066 - RNA, 32 nt, Homo Sapiens
uuucaguguaucccugcaguccuuccagauag

SEQ ID NO: 67067 - RNA, 32 nt, Homo Sapiens
ucugaugcucugacucaccucaucucuagguu

SEQ ID NO: 67068 - RNA, 32 nt, Homo Sapiens
agcuguggaaggcccuggcccagcggcucuug

SEQ ID NO: 67069 - RNA, 31 nt, Homo Sapiens
caguucagguacugccugggccucugaggca

SEQ ID NO: 67070 - RNA, 32 nt, Homo Sapiens
gggccagggucucacuguacaagugggcaggg

SEQ ID NO: 67071 - RNA, 32 nt, Homo Sapiens
ugcuuuuuacacaaccacaagcagaaauacca

SEQ ID NO: 67072 - RNA, 32 nt, Homo Sapiens
gccgaagugaauuguuggagaauguaaaccgc

SEQ ID NO: 67073 - RNA, 32 nt, Homo Sapiens
cauggcaaaaauuuagaauagccagggucugu

SEQ ID NO: 67074 - RNA, 32 nt, Homo Sapiens
ccacuuuggccucucugacgugacggcccaga

SEQ ID NO: 67075 - RNA, 32 nt, Homo Sapiens
ccccggggaggguggaaggccaggcguggggc

SEQ ID NO: 67076 - RNA, 32 nt, Homo Sapiens
auagauaaaaauuuuuaagggaauuuguuucu

SEQ ID NO: 67077 - RNA, 32 nt, Homo Sapiens
gguuauuauuuuuuauuuuuuaauccauucuu

SEQ ID NO: 67078 - RNA, 32 nt, Homo Sapiens
uguauucugccacaacaaccacugucuuuguu

SEQ ID NO: 67079 - RNA, 32 nt, Homo Sapiens
agcauucacuaggcgaggcgcuccaucggacu

SEQ ID NO: 67080 - RNA, 32 nt, Homo Sapiens
aaccucucaaggaaaaggacucagugcauaag

SEQ ID NO: 67081 - RNA, 32 nt, Homo Sapiens
aacugaauuugaacagcucaccacugugccua

SEQ ID NO: 67082 - RNA, 32 nt, Homo Sapiens
ucguucucucugcguugggaccgcggagggca

SEQ ID NO: 67083 - RNA, 29 nt, Homo Sapiens
uuucaaagaccaguauauuuucuagccca

SEQ ID NO: 67084 - RNA, 32 nt, Homo Sapiens
auagguuuguuguuuagaagacaccuucugag

SEQ ID NO: 67085 - RNA, 32 nt, Homo Sapiens
uauaggaugcuuaguuugccacuacacuucag

SEQ ID NO: 67086 - RNA, 32 nt, Homo Sapiens
auagcagauuguguaacaauuuuaaugcuauu

SEQ ID NO: 67087 - RNA, 32 nt, Homo Sapiens
gagucggccagacggcggggggcagcaggaac

SEQ ID NO: 67088 - RNA, 32 nt, Homo Sapiens
gugcccacaauggcugcagaucugcccgugga

SEQ ID NO: 67089 - RNA, 30 nt, Homo Sapiens
ccuguccccuaggcugcagaagcuugaaug

SEQ ID NO: 67090 - RNA, 32 nt, Homo Sapiens
uuagggauucuccccaccccagccccacaccu

SEQ ID NO: 67091 - RNA, 32 nt, Homo Sapiens
guuaauuuuugugggauguuguucccauucuu

SEQ ID NO: 67092 - RNA, 32 nt, Homo Sapiens
cugucucuggagaaacaaagacgcaggcauac

SEQ ID NO: 67093 - RNA, 32 nt, Homo Sapiens
agcacccucuccccgggaggcccuagcuuccg

SEQ ID NO: 67094 - RNA, 32 nt, Homo Sapiens
ccccaagggcuggggcggagcuggggucuggg

SEQ ID NO: 67095 - RNA, 31 nt, Homo Sapiens
ugcacggggcacugcccuggcucuggguaag

SEQ ID NO: 67096 - RNA, 32 nt, Homo Sapiens
agcagcggcccgaggcucccggagcaucgcgc

SEQ ID NO: 67097 - RNA, 32 nt, Homo Sapiens
ucauaugaaaucaauuuacacacggucuguaa

SEQ ID NO: 67098 - RNA, 32 nt, Homo Sapiens
caggcuaccaaguggaauauaauuuaucugcu

SEQ ID NO: 67099 - RNA, 32 nt, Homo Sapiens
ugauuaagagccccaaccagagacucagcaac

SEQ ID NO: 67100 - RNA, 32 nt, Homo Sapiens
cugacccuuucugcgaauguaacgagcaagca

SEQ ID NO: 67101 - RNA, 32 nt, Homo Sapiens
ugcaguugugaaagcaccaucaucauagagga

SEQ ID NO: 67102 - RNA, 32 nt, Homo Sapiens
gaccgccgcggcccgcgcuguaaccgcggcug

SEQ ID NO: 67103 - RNA, 32 nt, Homo Sapiens
cugaugauuuuuuaacaaaaaauauaugaauu

SEQ ID NO: 67104 - RNA, 30 nt, Homo Sapiens
cagacggcgcccgcucgcccaugccgagcu

SEQ ID NO: 67105 - RNA, 27 nt, Homo Sapiens
guccuaguuuucuucagccuuuucugg

SEQ ID NO: 67106 - RNA, 32 nt, Homo Sapiens
auaauagcuuugaaauacaauuagguuuuuga

SEQ ID NO: 67107 - RNA, 28 nt, Homo Sapiens
gcaaaguacaauuaacauuugagucugu

SEQ ID NO: 67108 - RNA, 32 nt, Homo Sapiens
auaacacuugcuuuuccaguuaauguggccau

SEQ ID NO: 67109 - RNA, 32 nt, Homo Sapiens
ggggugaaacuuauuuuuugugagauuuacaa

SEQ ID NO: 67110 - RNA, 32 nt, Homo Sapiens
auuuuugcaguagugugcuuugaaauguguaa

SEQ ID NO: 67111 - RNA, 32 nt, Homo Sapiens
caauacgcgugugaauuaugcgggaaaccuuu

SEQ ID NO: 67112 - RNA, 32 nt, Homo Sapiens
gcccuauucauaaaaugaaauguccaguaugg

SEQ ID NO: 67113 - RNA, 32 nt, Homo Sapiens
uuauuuuugaaacaaacauggauacuuccugg

SEQ ID NO: 67114 - RNA, 32 nt, Homo Sapiens
gucuccccaaaauacacugugaguucaaugau

SEQ ID NO: 67115 - RNA, 32 nt, Homo Sapiens
caagcugucuacacuucaucccauugugaauc

SEQ ID NO: 67116 - RNA, 32 nt, Homo Sapiens
gcugcggaggcuggcccggcuccuucgggcgu

SEQ ID NO: 67117 - RNA, 32 nt, Homo Sapiens
ugcugaccccaaaacccuuccacacuuuauua

SEQ ID NO: 67118 - RNA, 32 nt, Homo Sapiens
cuucaguugcuuaaucaaacuaaugauagucu

SEQ ID NO: 67119 - RNA, 32 nt, Homo Sapiens
guggcagggcuuugcuguucuucacucucagc

SEQ ID NO: 67120 - RNA, 32 nt, Homo Sapiens
uccugggcaccuguaacaugugaugcgcugcc

SEQ ID NO: 67121 - RNA, 32 nt, Homo Sapiens
uggccaggaugcugagccugcugcugcuggcg

SEQ ID NO: 67122 - RNA, 32 nt, Homo Sapiens
gaugaucuuucugcacugagacuguggaguuu

SEQ ID NO: 67123 - RNA, 32 nt, Homo Sapiens
uaauguggaaagggcucugauggagccaguua

SEQ ID NO: 67124 - RNA, 32 nt, Homo Sapiens
ccuucaccuuggaugccugggaacuuuuugua

SEQ ID NO: 67125 - RNA, 32 nt, Homo Sapiens
gggugagguucuuggccucagcuccucccugg

SEQ ID NO: 67126 - RNA, 32 nt, Homo Sapiens
acacaaaaaaucuuuuuuuaaucuuuuuaaaa

SEQ ID NO: 67127 - RNA, 32 nt, Homo Sapiens
gaccgcuugagcccacugagcagauauggugg

SEQ ID NO: 67128 - RNA, 32 nt, Homo Sapiens
aacagagaguagcaaggcugcagagaggccag

SEQ ID NO: 67129 - RNA, 32 nt, Homo Sapiens
ggcugcagauucaaauaggcaguucucuuauu

SEQ ID NO: 67130 - RNA, 32 nt, Homo Sapiens
ccuggccuucgucauuguguuugagguagccg

SEQ ID NO: 67131 - RNA, 32 nt, Homo Sapiens
uucaaacaccaauugcuuuaccugaacaaaug

SEQ ID NO: 67132 - RNA, 32 nt, Homo Sapiens
aacuuguauuuaaugaugguguaccuggugau

SEQ ID NO: 67133 - RNA, 32 nt, Homo Sapiens
ucggcuaggcggcuggaaacggcggcugccgc

SEQ ID NO: 67134 - RNA, 32 nt, Homo Sapiens
uggucaauaaaacgcuuccuaauagcaaaaaa

SEQ ID NO: 67135 - RNA, 32 nt, Homo Sapiens
gccuggguaacaugcuugggguccugguccuu

SEQ ID NO: 67136 - RNA, 32 nt, Homo Sapiens
auuccauugguguagacuuuagcaccauacuu

SEQ ID NO: 67137 - RNA, 32 nt, Homo Sapiens
gcaggcucccacaccccuccccagucuucucc

SEQ ID NO: 67138 - RNA, 32 nt, Homo Sapiens
gcaggcccccacaccccuccccagucuucuuc

SEQ ID NO: 67139 - RNA, 32 nt, Homo Sapiens
gugauccaccugccucggccucccagagugcu

SEQ ID NO: 67140 - RNA, 32 nt, Homo Sapiens
cuagggggucugggcugcuuggaaggagccau

SEQ ID NO: 67141 - RNA, 32 nt, Homo Sapiens
ugaggcccugucaugccuccccagugaggccu

SEQ ID NO: 67142 - RNA, 32 nt, Homo Sapiens
acuguugcaccaagccacugcaagagaaaccc

SEQ ID NO: 67143 - RNA, 32 nt, Homo Sapiens
cagcugaacccacccggcgccacgggacuuug

SEQ ID NO: 67144 - RNA, 32 nt, Homo Sapiens
cccagaagauaaagaggauagacaaccucuua

SEQ ID NO: 67145 - RNA, 32 nt, Homo Sapiens
agaaaaaaaaagacauauuaaccaaaagcugc

SEQ ID NO: 67146 - RNA, 32 nt, Homo Sapiens
cccaucucacacaacacacuuccacguaaugc

SEQ ID NO: 67147 - RNA, 32 nt, Homo Sapiens
cgggugagcccugcguggcccgcuggccuuuu

SEQ ID NO: 67148 - RNA, 32 nt, Homo Sapiens
auuaugaggcacccaaugauaggaaucuguga

SEQ ID NO: 67149 - RNA, 32 nt, Homo Sapiens
ucccugggcgaccugcaguuugcaauaugacu

SEQ ID NO: 67150 - RNA, 32 nt, Homo Sapiens
auguuuucaugcaucuuuuucuuaaaugcaag

SEQ ID NO: 67151 - RNA, 32 nt, Homo Sapiens
auguuuuuuuucugcuggaaacagacucgauu

SEQ ID NO: 67152 - RNA, 25 nt, Homo Sapiens
augaaggccgugcaggcagaucagg

SEQ ID NO: 67153 - RNA, 32 nt, Homo Sapiens
uucaggcaaaauuuaagauguaauuaucuuca

SEQ ID NO: 67154 - RNA, 32 nt, Homo Sapiens
aaaaauuuuuaaaccaucuguguuuacuaauu

SEQ ID NO: 67155 - RNA, 32 nt, Homo Sapiens
augcuuugauauuuuauuaagggacucugcag

SEQ ID NO: 67156 - RNA, 32 nt, Homo Sapiens
uagcuaucaaggaaauaaaaccaauuuugcca

SEQ ID NO: 67157 - RNA, 32 nt, Homo Sapiens
uuuagaagccuacuuugugaccaaggagcuca

SEQ ID NO: 67158 - RNA, 32 nt, Homo Sapiens
cucugauuucuagacugcuuugaaaaugcugu

SEQ ID NO: 67159 - RNA, 31 nt, Homo Sapiens
cgcagagcagggcuggcaggagugggccacu

SEQ ID NO: 67160 - RNA, 32 nt, Homo Sapiens
uucuucaaccuuucuuugucuuucuuaugggg

SEQ ID NO: 67161 - RNA, 32 nt, Homo Sapiens
caaucccaaaaauuauaaaacugaaacccaug

SEQ ID NO: 67162 - RNA, 32 nt, Homo Sapiens
uacauugugguuuaugcagcucugacaccagu

SEQ ID NO: 67163 - RNA, 32 nt, Homo Sapiens
uaaaggaaaccucuccaugaaaagcacagggc

SEQ ID NO: 67164 - RNA, 29 nt, Homo Sapiens
uucuucauaugccaguaccauaaacaaaa

SEQ ID NO: 67165 - RNA, 32 nt, Homo Sapiens
ggaaucauucuggaagauuucuuucuucacug

SEQ ID NO: 67166 - RNA, 32 nt, Homo Sapiens
auuauggagauaaguuagauucuugguaauac

SEQ ID NO: 67167 - RNA, 32 nt, Homo Sapiens
auugaugggcauuuggguugguuccaagucuu

SEQ ID NO: 67168 - RNA, 32 nt, Homo Sapiens
cuccagaagggaagggaguggagcaggcagug

SEQ ID NO: 67169 - RNA, 32 nt, Homo Sapiens
gagugagacagagggaaggcggggaucacucu

SEQ ID NO: 67170 - RNA, 32 nt, Homo Sapiens
ugcuagggcggagcugccuucuccucggcaca

SEQ ID NO: 67171 - RNA, 32 nt, Homo Sapiens
acgucgugggccgcaucgcccccugugacgag

SEQ ID NO: 67172 - RNA, 32 nt, Homo Sapiens
aaacuucuuugucugguuggguuccucauaaa

SEQ ID NO: 67173 - RNA, 32 nt, Homo Sapiens
uugguuugaaauuuauuccugguaugacuugu

SEQ ID NO: 67174 - RNA, 32 nt, Homo Sapiens
uuuugggggguggaauggaaagguauaagacu

SEQ ID NO: 67175 - RNA, 32 nt, Homo Sapiens
cagaucuuccuaggaaggcugggguggggaga

SEQ ID NO: 67176 - RNA, 32 nt, Homo Sapiens
cugaguuggucacacuucccacugauccaugg

SEQ ID NO: 67177 - RNA, 32 nt, Homo Sapiens
cuucggcccaagugguccccccggccuuaagc

SEQ ID NO: 67178 - RNA, 32 nt, Homo Sapiens
aaccugcagaaagagaugcagauguuggcuaa

SEQ ID NO: 67179 - RNA, 32 nt, Homo Sapiens
cugaagggccacagcucuucucuccuucucuc

SEQ ID NO: 67180 - RNA, 32 nt, Homo Sapiens
agcgugccugggugcccggccaugggcuguau

SEQ ID NO: 67181 - RNA, 30 nt, Homo Sapiens
uccucugcgccugcgccgccgggaugcugg

SEQ ID NO: 67182 - RNA, 32 nt, Homo Sapiens
gacugcauucguaucugagcagguuuucuaug

SEQ ID NO: 67183 - RNA, 32 nt, Homo Sapiens
acugcucauuuuacuuuuauuuuguguaauuu

SEQ ID NO: 67184 - RNA, 32 nt, Homo Sapiens
ucccuaagauuaugaaacugugaccagaucua

SEQ ID NO: 67185 - RNA, 32 nt, Homo Sapiens
gaaggugggugaagaacaauucacuucuucau

SEQ ID NO: 67186 - RNA, 32 nt, Homo Sapiens
guggggcugagcuuggaguacguguggucacc

SEQ ID NO: 67187 - RNA, 32 nt, Homo Sapiens
cugguugguuuuaagaaaauaguuucaagaag

SEQ ID NO: 67188 - RNA, 32 nt, Homo Sapiens
cguguccugugcugucggagacgcacaggaag

SEQ ID NO: 67189 - RNA, 32 nt, Homo Sapiens
gaacugcuggaacucacacaugcccugauaug

SEQ ID NO: 67190 - RNA, 32 nt, Homo Sapiens
cacccggaggaccccugcggcccccugccuag

SEQ ID NO: 67191 - RNA, 28 nt, Homo Sapiens
gacuuaguuuuucauauguguuuccuua

SEQ ID NO: 67192 - RNA, 32 nt, Homo Sapiens
gggcagacgggcggggguuggggcggagggag

SEQ ID NO: 67193 - RNA, 32 nt, Homo Sapiens
guguguuagacagcaucaucuugcuugggcuu

SEQ ID NO: 67194 - RNA, 32 nt, Homo Sapiens
agaaaaacaggccgagugaggugcuggaaagg

SEQ ID NO: 67195 - RNA, 32 nt, Homo Sapiens
ccuaacucaugcuggaaauuuauuuuucuaga

SEQ ID NO: 67196 - RNA, 32 nt, Homo Sapiens
caagggauaguucuagcccuucugccugugua

SEQ ID NO: 67197 - RNA, 32 nt, Homo Sapiens
ggucucaaacuccugaccucagaugauccacc

SEQ ID NO: 67198 - RNA, 32 nt, Homo Sapiens
caguucuggagcuuaauuuucuguggaucauu

SEQ ID NO: 67199 - RNA, 31 nt, Homo Sapiens
cugugacaauaaaaccugccccgugucugga

SEQ ID NO: 67200 - RNA, 32 nt, Homo Sapiens
agauggagaaacuguagaguuugaugugguuu

SEQ ID NO: 67201 - RNA, 32 nt, Homo Sapiens
caggaaaauggcaggcaggccuuggaccuuga

SEQ ID NO: 67202 - RNA, 32 nt, Homo Sapiens
uacuggaagcuguccuuccauccaccaagagc

SEQ ID NO: 67203 - RNA, 32 nt, Homo Sapiens
cagagcccgagcuccugcucccugggaaaagu

SEQ ID NO: 67204 - RNA, 32 nt, Homo Sapiens
gaccccagggcacauccccccauccucacccg

SEQ ID NO: 67205 - RNA, 29 nt, Homo Sapiens
ugaaaauaaaguuuugugcuuuggagaau

SEQ ID NO: 67206 - RNA, 32 nt, Homo Sapiens
cgcagggccccggcgagucacccaaugcugca

SEQ ID NO: 67207 - RNA, 32 nt, Homo Sapiens
uacucuaguggccaucuaccagugucacgcag

SEQ ID NO: 67208 - RNA, 32 nt, Homo Sapiens
uucucucauuuucuuuuguuuuccauugcaag

SEQ ID NO: 67209 - RNA, 32 nt, Homo Sapiens
acacauauguguguaugcaguuugucagguua

SEQ ID NO: 67210 - RNA, 32 nt, Homo Sapiens
ggggaaggaaaacaaacuucgccacucucucu

SEQ ID NO: 67211 - RNA, 32 nt, Homo Sapiens
agauuugaaacacuuuaaauggcccaugguag

SEQ ID NO: 67212 - RNA, 32 nt, Homo Sapiens
gagaccugcgcgcgcuccgcgaggccgacuuc

SEQ ID NO: 67213 - RNA, 32 nt, Homo Sapiens
gggaucccaaggcaggagagccaaagcuggag

SEQ ID NO: 67214 - RNA, 32 nt, Homo Sapiens
cucuugcucccaccccacccuugcccccagcc

SEQ ID NO: 67215 - RNA, 32 nt, Homo Sapiens
cugaaguugacaucugaugacaaagcaguugc

SEQ ID NO: 67216 - RNA, 32 nt, Homo Sapiens
gacagagacagagaaauaagcauuagagaccu

SEQ ID NO: 67217 - RNA, 32 nt, Homo Sapiens
ggaccgacugaggccuaggcgccggagccggc

SEQ ID NO: 67218 - RNA, 32 nt, Homo Sapiens
gaaggccgcggcggcgucccggcugcuaaggc

SEQ ID NO: 67219 - RNA, 32 nt, Homo Sapiens
gacuucgccuccccucacuggucuccccugug

SEQ ID NO: 67220 - RNA, 32 nt, Homo Sapiens
guauaaggacaaaaacaaccgcggacaucaca

SEQ ID NO: 67221 - RNA, 32 nt, Homo Sapiens
uaugaaaugaucugugcugaucuguucucuag

SEQ ID NO: 67222 - RNA, 32 nt, Homo Sapiens
ccaaagcugaaaauguguauacacuuaaacuu

SEQ ID NO: 67223 - RNA, 32 nt, Homo Sapiens
ugcucucuaauuuaucggcagcuucuguggau

SEQ ID NO: 67224 - RNA, 32 nt, Homo Sapiens
ucugcaauacaagcuugugauuuaugcuuacu

SEQ ID NO: 67225 - RNA, 32 nt, Homo Sapiens
aaaauuuuuugguaaggccuaguucauauaaa

SEQ ID NO: 67226 - RNA, 32 nt, Homo Sapiens
ccagggaauagcccuccucuccccaggaaacu

SEQ ID NO: 67227 - RNA, 32 nt, Homo Sapiens
ccacccgccgccuccaagcgggcccccuccug

SEQ ID NO: 67228 - RNA, 32 nt, Homo Sapiens
aaaguguguauauauguuugcaucuacauaua

SEQ ID NO: 67229 - RNA, 32 nt, Homo Sapiens
aagagguccuacugagguguggcaggaucaca

SEQ ID NO: 67230 - RNA, 32 nt, Homo Sapiens
cccgcucccacagcuuccugagggcuaauucu

SEQ ID NO: 67231 - RNA, 32 nt, Homo Sapiens
gacagagacaccugcaccuccccccacugcag

SEQ ID NO: 67232 - RNA, 32 nt, Homo Sapiens
cggaagaaccccgaucgcugaggagcaagggg

SEQ ID NO: 67233 - RNA, 32 nt, Homo Sapiens
cucccgcgucccgcccccuccucccccagcac

SEQ ID NO: 67234 - RNA, 32 nt, Homo Sapiens
uauuuguuguuuuuaacaacuaaucaagagug

SEQ ID NO: 67235 - RNA, 32 nt, Homo Sapiens
ggcguggggagcuuccugucgccuuggcuggg

SEQ ID NO: 67236 - RNA, 32 nt, Homo Sapiens
uuuucuuugaagaucugauucaaauacaccuu

SEQ ID NO: 67237 - RNA, 30 nt, Homo Sapiens
uggggccugugucagccgccggcccuccgc

SEQ ID NO: 67238 - RNA, 32 nt, Homo Sapiens
agaaaagaaauuggacagaacagaauaauaug

SEQ ID NO: 67239 - RNA, 29 nt, Homo Sapiens
gcuauauaguacaugucuauuuaacagca

SEQ ID NO: 67240 - RNA, 32 nt, Homo Sapiens
aguauuuccuucccuuuuaucuaauuuuuuau

SEQ ID NO: 67241 - RNA, 32 nt, Homo Sapiens
auacguaauguuucaucuguggauuugaugac

SEQ ID NO: 67242 - RNA, 32 nt, Homo Sapiens
aggcagcaaugccaggaugccuguguccaccu

SEQ ID NO: 67243 - RNA, 32 nt, Homo Sapiens
cgcgcgcucgccccgccgcuccugcugcagcc

SEQ ID NO: 67244 - RNA, 32 nt, Homo Sapiens
cuggccuggagucccuggcccgggcagcagcg

SEQ ID NO: 67245 - RNA, 32 nt, Homo Sapiens
guuucccuuuuugauuauugcauuguauuuua

SEQ ID NO: 67246 - RNA, 32 nt, Homo Sapiens
cgaugaguagggacuggcuggaggaagggggc

SEQ ID NO: 67247 - RNA, 32 nt, Homo Sapiens
uccuuccaguguuccuuagaacagacauuuag

SEQ ID NO: 67248 - RNA, 32 nt, Homo Sapiens
ggccugcucccucucaucuagcccaucauuuc

SEQ ID NO: 67249 - RNA, 32 nt, Homo Sapiens
ggcgugcuguggcugggccccgaggguggaaa

SEQ ID NO: 67250 - RNA, 32 nt, Homo Sapiens
agucuuuugugaaucauugccuuuuucuuuaa

SEQ ID NO: 67251 - RNA, 32 nt, Homo Sapiens
uugauuugaaauguggaggauuuugaaaccua

SEQ ID NO: 67252 - RNA, 32 nt, Homo Sapiens
gggggagaggggcgggcgccgcgcugccuucc

SEQ ID NO: 67253 - RNA, 32 nt, Homo Sapiens
ugggggcugcuggcagaccccgagggugccug

SEQ ID NO: 67254 - RNA, 32 nt, Homo Sapiens
uccacagugucuauucuggucugggaaauuuu

SEQ ID NO: 67255 - RNA, 32 nt, Homo Sapiens
cagcucugcccccaucguguuucucauuuccg

SEQ ID NO: 67256 - RNA, 32 nt, Homo Sapiens
uaguuuugcugacagagaaaaaucgucaguug

SEQ ID NO: 67257 - RNA, 32 nt, Homo Sapiens
uaugcuauaucaguuuuuacuuucucuaggga

SEQ ID NO: 67258 - RNA, 32 nt, Homo Sapiens
uuacuaguuauguguuauaccuuugaaggauu

SEQ ID NO: 67259 - RNA, 32 nt, Homo Sapiens
ugucagauccauguauuuuggagcauaaaaug

SEQ ID NO: 67260 - RNA, 32 nt, Homo Sapiens
aaauauacugaauuuauagaaagcaaguauuc

SEQ ID NO: 67261 - RNA, 32 nt, Homo Sapiens
ccaggggacaacuccaccuggacugaugggca

SEQ ID NO: 67262 - RNA, 32 nt, Homo Sapiens
ucggcggggucuuuaggauuugcagcuccagg

SEQ ID NO: 67263 - RNA, 32 nt, Homo Sapiens
acagauauuuuugucauuguuauuuucagaau

SEQ ID NO: 67264 - RNA, 32 nt, Homo Sapiens
agguaugaaaauaaaucaucuuugucugauua

SEQ ID NO: 67265 - RNA, 32 nt, Homo Sapiens
acgcgcgcgggaacugggggcugcuggaccag

SEQ ID NO: 67266 - RNA, 32 nt, Homo Sapiens
gcugugaagaucuggcacaagauagaauggua

SEQ ID NO: 67267 - RNA, 32 nt, Homo Sapiens
uggauuugcuguuugucuucugucucaugggu

SEQ ID NO: 67268 - RNA, 32 nt, Homo Sapiens
acuuuccuguaagggaggcucuauuaccccgu

SEQ ID NO: 67269 - RNA, 32 nt, Homo Sapiens
guaauacaaacuauauauaaucaucaaguaau

SEQ ID NO: 67270 - RNA, 32 nt, Homo Sapiens
aggcgucggggcccgcggcuggguggcgggua

SEQ ID NO: 67271 - RNA, 32 nt, Homo Sapiens
ggguggccgaggccggggcgcccccagccgau

SEQ ID NO: 67272 - RNA, 32 nt, Homo Sapiens
cacagccguuccugcuggccugccugcacggg

SEQ ID NO: 67273 - RNA, 32 nt, Homo Sapiens
ugauacuucuugcuucucaugaugcauguuuc

SEQ ID NO: 67274 - RNA, 31 nt, Homo Sapiens
ggugcucaagauucuggcagagccuggacuc

SEQ ID NO: 67275 - RNA, 32 nt, Homo Sapiens
aagugaagccccagcgagcggcugcagcgggg

SEQ ID NO: 67276 - RNA, 32 nt, Homo Sapiens
aagguagccagacuuccggaggacugaccauc

SEQ ID NO: 67277 - RNA, 32 nt, Homo Sapiens
agaugugacuacugagggcaguucugaguguu

SEQ ID NO: 67278 - RNA, 32 nt, Homo Sapiens
cacguuuccuucccuuauuucuaacguguaug

SEQ ID NO: 67279 - RNA, 32 nt, Homo Sapiens
aagacucuggccauggugacuggccaugugug

SEQ ID NO: 67280 - RNA, 29 nt, Homo Sapiens
ucuagucaagaugagugauaagccagacu

SEQ ID NO: 67281 - RNA, 32 nt, Homo Sapiens
uacuaaaguccuccugccagguaguucccacu

SEQ ID NO: 67282 - RNA, 32 nt, Homo Sapiens
uguuguauuuuaacucauaccuuuaaaggaau

SEQ ID NO: 67283 - RNA, 32 nt, Homo Sapiens
gaaaaaucaacgaacacucuguccucuauccc

SEQ ID NO: 67284 - RNA, 32 nt, Homo Sapiens
uaaaguugcauugacguuuuccuccccuuccu

SEQ ID NO: 67285 - RNA, 29 nt, Homo Sapiens
agacaggaaaguuuagaguuuucugggca

SEQ ID NO: 67286 - RNA, 32 nt, Homo Sapiens
uguacaagauggcacugccaucuuugagcaga

SEQ ID NO: 67287 - RNA, 32 nt, Homo Sapiens
uucaucaauagcaagcacuuuuuaagggagua

SEQ ID NO: 67288 - RNA, 32 nt, Homo Sapiens
uuuggcagaaaagccucuagagauaggucagg

SEQ ID NO: 67289 - RNA, 32 nt, Homo Sapiens
aaugaagaggaugaagucaaagucauuuucuc

SEQ ID NO: 67290 - RNA, 32 nt, Homo Sapiens
accagcaaucugccuuugaccauccucaaagc

SEQ ID NO: 67291 - RNA, 32 nt, Homo Sapiens
aaccagcccagucaggccccagccccguuucu

SEQ ID NO: 67292 - RNA, 32 nt, Homo Sapiens
uugucuuugcugccccucuccccuaccuggcc

SEQ ID NO: 67293 - RNA, 32 nt, Homo Sapiens
uaagcagguccgaccccucguucuuuacagcu

SEQ ID NO: 67294 - RNA, 32 nt, Homo Sapiens
uuucuuuguauuccucacccuagauuuguaua

SEQ ID NO: 67295 - RNA, 32 nt, Homo Sapiens
gauuguuuucagguuugccaccagagaugcaa

SEQ ID NO: 67296 - RNA, 32 nt, Homo Sapiens
accaccugacuucagcacaccauuacaaucgg

SEQ ID NO: 67297 - RNA, 32 nt, Homo Sapiens
caaacauuuuuccaggaagguggaaaaggaag

SEQ ID NO: 67298 - RNA, 32 nt, Homo Sapiens
cauacuucucaugguccacacccaucacacca

SEQ ID NO: 67299 - RNA, 32 nt, Homo Sapiens
cucagcgcaccaaguccccugccuggaucuca

SEQ ID NO: 67300 - RNA, 32 nt, Homo Sapiens
cucaggacuccagcccacugccacugggugac

SEQ ID NO: 67301 - RNA, 32 nt, Homo Sapiens
gacugugcugggaacauguaccacugagccug

SEQ ID NO: 67302 - RNA, 32 nt, Homo Sapiens
acugaguguugcacuuuuauuuagguagggag

SEQ ID NO: 67303 - RNA, 32 nt, Homo Sapiens
gccucagcagccgggggcgcucgcagcgggga

SEQ ID NO: 67304 - RNA, 32 nt, Homo Sapiens
uuuuaaauauccagauuccaagaacacacugg

SEQ ID NO: 67305 - RNA, 28 nt, Homo Sapiens
cggcaaguuacaggggccgccgacagau

SEQ ID NO: 67306 - RNA, 32 nt, Homo Sapiens
ccuuuauuacacaacuugcuggggguggagau

SEQ ID NO: 67307 - RNA, 32 nt, Homo Sapiens
cgccuccagcagccccaccugcccccagccuc

SEQ ID NO: 67308 - RNA, 32 nt, Homo Sapiens
uaugccagaauuucuuuuuccuccucccuaug

SEQ ID NO: 67309 - RNA, 32 nt, Homo Sapiens
cuggcagacauuaucagcacauucucuguugu

SEQ ID NO: 67310 - RNA, 32 nt, Homo Sapiens
gccccaucucacucuucaguuucccuccucuc

SEQ ID NO: 67311 - RNA, 32 nt, Homo Sapiens
uuuuagucuggaugaagugcuucaugccugua

SEQ ID NO: 67312 - RNA, 32 nt, Homo Sapiens
gcccaacuaauuuuuguauuuuuauagagaua

SEQ ID NO: 67313 - RNA, 32 nt, Homo Sapiens
auggggucucuccauguuggucaggcuggucu

SEQ ID NO: 67314 - RNA, 32 nt, Homo Sapiens
gcaaauuauggaaauguguauuuuauaugauu

SEQ ID NO: 67315 - RNA, 32 nt, Homo Sapiens
ccuuccugucuccucaagucaccuuauuauca

SEQ ID NO: 67316 - RNA, 32 nt, Homo Sapiens
gcccugauagauaacggaagugaggaagggug

SEQ ID NO: 67317 - RNA, 32 nt, Homo Sapiens
aggaggaggucgacgagcugcagacgacaaau

SEQ ID NO: 67318 - RNA, 32 nt, Homo Sapiens
auuccuuuuuauuucucugugggcuuuuguuu

SEQ ID NO: 67319 - RNA, 32 nt, Homo Sapiens
aguggucagucaacacuuauucaccaucaagc

SEQ ID NO: 67320 - RNA, 31 nt, Homo Sapiens
ggaacucugggccccauggaguuaugagcuc

SEQ ID NO: 67321 - RNA, 32 nt, Homo Sapiens
guauggaaaagaaaacagacaguuuaguucag

SEQ ID NO: 67322 - RNA, 32 nt, Homo Sapiens
aguuuugcuucuuuauaaacugucuguuaaaa

SEQ ID NO: 67323 - RNA, 32 nt, Homo Sapiens
ucuaucuauaauauuucauuauagaguccagu

SEQ ID NO: 67324 - RNA, 32 nt, Homo Sapiens
ccugggcgacagagcgagacucuguguauaaa

SEQ ID NO: 67325 - RNA, 32 nt, Homo Sapiens
uagcuuugagggcaaggcaaagugaggaaggg

SEQ ID NO: 67326 - RNA, 32 nt, Homo Sapiens
agcugagcaggggaugccugugcguggugccu

SEQ ID NO: 67327 - RNA, 32 nt, Homo Sapiens
ggacccucaagaaaagcggggaggcgggggga

SEQ ID NO: 67328 - RNA, 32 nt, Homo Sapiens
uaaagggcaccuagggguguugcuaaauuauu

SEQ ID NO: 67329 - RNA, 32 nt, Homo Sapiens
caugcuuuuuuauguaggacuagcuuaccuga

SEQ ID NO: 67330 - RNA, 27 nt, Homo Sapiens
cuucuggguuccuucagccccugcaag

SEQ ID NO: 67331 - RNA, 32 nt, Homo Sapiens
uaauuucuguuguuuuaagccacaaaguuugu

SEQ ID NO: 67332 - RNA, 32 nt, Homo Sapiens
aauucuuagaucugguguccagcauggaugaa

SEQ ID NO: 67333 - RNA, 32 nt, Homo Sapiens
gggccccucgccuuccuccccuggaccugggg

SEQ ID NO: 67334 - RNA, 32 nt, Homo Sapiens
caaagccgguuguacaggcggcagcucaggcu

SEQ ID NO: 67335 - RNA, 32 nt, Homo Sapiens
uccucgcggacugacuggacuccaucucccag

SEQ ID NO: 67336 - RNA, 32 nt, Homo Sapiens
caggaggaguaggagcaggagcagaagcagaa

SEQ ID NO: 67337 - RNA, 32 nt, Homo Sapiens
ccccugugccacucagcuccgccccgccgcgu

SEQ ID NO: 67338 - RNA, 32 nt, Homo Sapiens
aauuggacugacauacucuccucccuuguuga

SEQ ID NO: 67339 - RNA, 32 nt, Homo Sapiens
cagauggcgagccccaggggauggcccuggcu

SEQ ID NO: 67340 - RNA, 30 nt, Homo Sapiens
ggcccaacauguggcaugcaaugaagagaa

SEQ ID NO: 67341 - RNA, 32 nt, Homo Sapiens
aucauccuagguaggguuuaauccccaguaaa

SEQ ID NO: 67342 - RNA, 32 nt, Homo Sapiens
uaugggcaacugaagauggauaaagaaaaaug

SEQ ID NO: 67343 - RNA, 32 nt, Homo Sapiens
auagauauucacacucuaaauaugaggugugu

SEQ ID NO: 67344 - RNA, 32 nt, Homo Sapiens
uaauguggagagugucccaauuacaucucccu

SEQ ID NO: 67345 - RNA, 32 nt, Homo Sapiens
auguaucauggacccaauuuaacaucaucauu

SEQ ID NO: 67346 - RNA, 28 nt, Homo Sapiens
cucacaguuacaguuccaagaagaaaac

SEQ ID NO: 67347 - RNA, 32 nt, Homo Sapiens
ucucauacauggcuucuguuucugccgagaga

SEQ ID NO: 67348 - RNA, 32 nt, Homo Sapiens
gaucagugaaaagugguuuucuuaaugcagcc

SEQ ID NO: 67349 - RNA, 32 nt, Homo Sapiens
caacugguucauucugaaaacaacaacaacaa

SEQ ID NO: 67350 - RNA, 32 nt, Homo Sapiens
cacugcucacugacaucuuaauugccugcaga

SEQ ID NO: 67351 - RNA, 32 nt, Homo Sapiens
ggcaucugaauguccauucgccaggcauggag

SEQ ID NO: 67352 - RNA, 32 nt, Homo Sapiens
gaaugccagucaucaguaaaucuuaauacacu

SEQ ID NO: 67353 - RNA, 32 nt, Homo Sapiens
cggcgcccgcccagccccggacuguccgcgcu

SEQ ID NO: 67354 - RNA, 32 nt, Homo Sapiens
gcccucccuggccaugccuucuugccuuugga

SEQ ID NO: 67355 - RNA, 32 nt, Homo Sapiens
guugucacgucuucuuguuuucucuaaguuua

SEQ ID NO: 67356 - RNA, 32 nt, Homo Sapiens
acagaaguagaaugccauuggaugucaaaugg

SEQ ID NO: 67357 - RNA, 32 nt, Homo Sapiens
uuugcaaagggagcggugggcgaggcuguggu

SEQ ID NO: 67358 - RNA, 32 nt, Homo Sapiens
gagcccagcugucgguccccagcccugcccgg

SEQ ID NO: 67359 - RNA, 32 nt, Homo Sapiens
aggccuucagcuucuccuccgcgcucauccga

SEQ ID NO: 67360 - RNA, 32 nt, Homo Sapiens
auaggugaguuuuguauaaaucuuuuguguuu

SEQ ID NO: 67361 - RNA, 32 nt, Homo Sapiens
gccgugacuccuccuuucccccgccccgccuc

SEQ ID NO: 67362 - RNA, 32 nt, Homo Sapiens
auaaagauuauauauguaguuuccaaggaaga

SEQ ID NO: 67363 - RNA, 32 nt, Homo Sapiens
uggaggugugcaugccaccccauccccucccg

SEQ ID NO: 67364 - RNA, 32 nt, Homo Sapiens
ucccagcuacucuggaggcugaagcaggagaa

SEQ ID NO: 67365 - RNA, 32 nt, Homo Sapiens
ucccagcuacucuggaggcugaggcaggagga

SEQ ID NO: 67366 - RNA, 31 nt, Homo Sapiens
ccuacccaggccaccaccccgaaccccuccg

SEQ ID NO: 67367 - RNA, 32 nt, Homo Sapiens
guaugcauauguuuugucacacaauuuauagu

SEQ ID NO: 67368 - RNA, 32 nt, Homo Sapiens
agcaugauuuuggcaggaacauuuguacauau

SEQ ID NO: 67369 - RNA, 32 nt, Homo Sapiens
agcuggucacgacgauguuuucaccaagguca

SEQ ID NO: 67370 - RNA, 32 nt, Homo Sapiens
ccccaacuccagcagagcuugaccuccgcccu

SEQ ID NO: 67371 - RNA, 32 nt, Homo Sapiens
guggcguccuggagcccuccucagugcugaag

SEQ ID NO: 67372 - RNA, 32 nt, Homo Sapiens
aggaagcagggccagcagugagacuaugagcc

SEQ ID NO: 67373 - RNA, 32 nt, Homo Sapiens
aaagcuggcuuaucuuacuuguagaagagugu

SEQ ID NO: 67374 - RNA, 32 nt, Homo Sapiens
uuuaggacaucuuuugauaccuuuaaaagaac

SEQ ID NO: 67375 - RNA, 32 nt, Homo Sapiens
ccuccgcuugcuucuuuuuuuuccaauauuug

SEQ ID NO: 67376 - RNA, 32 nt, Homo Sapiens
uacgacaguugccucugggagcuccaacucag

SEQ ID NO: 67377 - RNA, 32 nt, Homo Sapiens
guuucaccuugccuuuguccaagccccaccua

SEQ ID NO: 67378 - RNA, 32 nt, Homo Sapiens
agaucgggaacaaaugaucuguggaugcauca

SEQ ID NO: 67379 - RNA, 32 nt, Homo Sapiens
ugagcggcuccgucccggggccccggaagcug

SEQ ID NO: 67380 - RNA, 32 nt, Homo Sapiens
gguccaacaaugaaacagaacagauauaucca

SEQ ID NO: 67381 - RNA, 32 nt, Homo Sapiens
gugcagccgcccgcccuccgguagaucugcgg

SEQ ID NO: 67382 - RNA, 32 nt, Homo Sapiens
ccugccugugcagcuguauuuagggcugcguu

SEQ ID NO: 67383 - RNA, 32 nt, Homo Sapiens
ugauuauaaaggaaaccaccauguaaccaauc

SEQ ID NO: 67384 - RNA, 32 nt, Homo Sapiens
uguaguguuauauuagccaaccccaaaggagc

SEQ ID NO: 67385 - RNA, 32 nt, Homo Sapiens
uuuccacugcugauuucuuuuucagagauaac

SEQ ID NO: 67386 - RNA, 32 nt, Homo Sapiens
aauaaucugaaaaacuauucagugguuacgaa

SEQ ID NO: 67387 - RNA, 32 nt, Homo Sapiens
gucauccccucccccaaccuuggccacuugag

SEQ ID NO: 67388 - RNA, 32 nt, Homo Sapiens
uuacucuucuauuucagggacuuagguaauuu

SEQ ID NO: 67389 - RNA, 32 nt, Homo Sapiens
aaugauuaacuccuuuauuauacauacacaug

SEQ ID NO: 67390 - RNA, 32 nt, Homo Sapiens
uucccuggguuuucugccccagccuccuccuu

SEQ ID NO: 67391 - RNA, 31 nt, Homo Sapiens
uauuggaaauaaaaaugguuugagcgucagu

SEQ ID NO: 67392 - RNA, 32 nt, Homo Sapiens
ugugagguggggucaggugagcagccaccaga

SEQ ID NO: 67393 - RNA, 32 nt, Homo Sapiens
uuugcucacagcaauucuccuucuacagagga

SEQ ID NO: 67394 - RNA, 32 nt, Homo Sapiens
ggagccaaggcgaggcccguggagccugagcu

SEQ ID NO: 67395 - RNA, 32 nt, Homo Sapiens
uugaaugcccucacuccaagacuggaugcugg

SEQ ID NO: 67396 - RNA, 32 nt, Homo Sapiens
aggacuuccuuccuccuccccugggcagggau

SEQ ID NO: 67397 - RNA, 32 nt, Homo Sapiens
ugaaagauccauuuuaggucuuuuucaagaau

SEQ ID NO: 67398 - RNA, 32 nt, Homo Sapiens
cucccucucggcgcgcccggcgcgaagccugc

SEQ ID NO: 67399 - RNA, 32 nt, Homo Sapiens
gcugagaacccaggcuccuccucccuuuggug

SEQ ID NO: 67400 - RNA, 32 nt, Homo Sapiens
uacaaugauucucagcaucaccuagggagcuu

SEQ ID NO: 67401 - RNA, 32 nt, Homo Sapiens
aucugucuaaauuuauauuuuaaauuauuaca

SEQ ID NO: 67402 - RNA, 32 nt, Homo Sapiens
gcccagaacuugccuccagucggccuuugcag

SEQ ID NO: 67403 - RNA, 32 nt, Homo Sapiens
uaagccucgggugggagcucagggccaccugu

SEQ ID NO: 67404 - RNA, 32 nt, Homo Sapiens
caugcauguuuugagaauggugaauguuuaau

SEQ ID NO: 67405 - RNA, 32 nt, Homo Sapiens
uucccauauugugucuuuuuuauguugcaugu

SEQ ID NO: 67406 - RNA, 32 nt, Homo Sapiens
gcgcuucggcccgggccgcucaggugcagagc

SEQ ID NO: 67407 - RNA, 32 nt, Homo Sapiens
aaaggaaauauguaaucuuuuuaugauuguug

SEQ ID NO: 67408 - RNA, 32 nt, Homo Sapiens
uagggcacccucagcaaaggggcaggugggga

SEQ ID NO: 67409 - RNA, 32 nt, Homo Sapiens
ugagcgcucccucguuucgaucuuuagaaaac

SEQ ID NO: 67410 - RNA, 32 nt, Homo Sapiens
gcuuucuggaagagauugcaucugaggaaauu

SEQ ID NO: 67411 - RNA, 32 nt, Homo Sapiens
gggaaggaaugcggccuggggagcugggcggc

SEQ ID NO: 67412 - RNA, 32 nt, Homo Sapiens
gccuagcggaagcugccuccucacccuaggug

SEQ ID NO: 67413 - RNA, 32 nt, Homo Sapiens
uaaaugaauauuaaaagcauggagaggaaaca

SEQ ID NO: 67414 - RNA, 32 nt, Homo Sapiens
ggugcggggccugcucccgccggcaccauggc

SEQ ID NO: 67415 - RNA, 32 nt, Homo Sapiens
cccuccgggcagagaccaccgcgccccucugc

SEQ ID NO: 67416 - RNA, 32 nt, Homo Sapiens
uaauuuguuucugcauauaugcacauacauac

SEQ ID NO: 67417 - RNA, 32 nt, Homo Sapiens
cccgguuccuuccugcuucacuccuccccacu

SEQ ID NO: 67418 - RNA, 32 nt, Homo Sapiens
gguuggguugauuguauguugaggaucuauua

SEQ ID NO: 67419 - RNA, 32 nt, Homo Sapiens
gcggcggcgacgcugccuccucaccggcgcag

SEQ ID NO: 67420 - RNA, 32 nt, Homo Sapiens
uuagucacucccuguuucuacucccagcucua

SEQ ID NO: 67421 - RNA, 32 nt, Homo Sapiens
cgggccugccauuugaggcagcgagccuccgu

SEQ ID NO: 67422 - RNA, 32 nt, Homo Sapiens
acgcacacguauguuuaucguggcacuauuca

SEQ ID NO: 67423 - RNA, 32 nt, Homo Sapiens
agucaucccagcccucugaaucuccugugcua

SEQ ID NO: 67424 - RNA, 32 nt, Homo Sapiens
aaguuuaaauuaacuaaaaauaugcauuuucu

SEQ ID NO: 67425 - RNA, 30 nt, Homo Sapiens
ucucgcuuccccggcggcggcaagggcagg

SEQ ID NO: 67426 - RNA, 32 nt, Homo Sapiens
aucucuagugauugcauauuauuuccauauca

SEQ ID NO: 67427 - RNA, 32 nt, Homo Sapiens
cguggcuuggggauuguacacgggaccagcuc

SEQ ID NO: 67428 - RNA, 32 nt, Homo Sapiens
gaucccgccaugagcaggcacaagacagcucc

SEQ ID NO: 67429 - RNA, 32 nt, Homo Sapiens
caaccacauucaauaaggaauugugggguucg

SEQ ID NO: 67430 - RNA, 32 nt, Homo Sapiens
cauucagucuucugccauuaggucugccuuau

SEQ ID NO: 67431 - RNA, 32 nt, Homo Sapiens
cacggucggcugauguuuuaauuuugcagaga

SEQ ID NO: 67432 - RNA, 32 nt, Homo Sapiens
gcccuguccgucuucacccauccccaagccua

SEQ ID NO: 67433 - RNA, 31 nt, Homo Sapiens
agggagccuguuggaauaucgagccagccuc

SEQ ID NO: 67434 - RNA, 32 nt, Homo Sapiens
auucaacuuucagucucuuuucugggggaaaa

SEQ ID NO: 67435 - RNA, 32 nt, Homo Sapiens
gccaggggcagucacggagcugcgggggaggc

SEQ ID NO: 67436 - RNA, 32 nt, Homo Sapiens
uguuauguugaauaauaauuagcauauaauug

SEQ ID NO: 67437 - RNA, 32 nt, Homo Sapiens
caacuuccugucccuuucaggggcuagacaca

SEQ ID NO: 67438 - RNA, 32 nt, Homo Sapiens
ccgagcccgagcccgcgcacccgcccgcgccg

SEQ ID NO: 67439 - RNA, 32 nt, Homo Sapiens
agccauugauucauucauccaguucaauaaau

SEQ ID NO: 67440 - RNA, 32 nt, Homo Sapiens
auugccaccucgcagccucuuccacuugcuca

SEQ ID NO: 67441 - RNA, 32 nt, Homo Sapiens
cuagacaaagugcugaugaugaauuccccuac

SEQ ID NO: 67442 - RNA, 32 nt, Homo Sapiens
uuauaaauauauucaggaguuggaauguugua

SEQ ID NO: 67443 - RNA, 32 nt, Homo Sapiens
agcuagagcaagggcagacaugugcugaacuc

SEQ ID NO: 67444 - RNA, 32 nt, Homo Sapiens
uaacuggaaggccuuccacuguggcaaaugga

SEQ ID NO: 67445 - RNA, 32 nt, Homo Sapiens
agaaggaggauacauuuguuuguguugcuccc

SEQ ID NO: 67446 - RNA, 32 nt, Homo Sapiens
ccuuaagucuuacuguuuugugcggugugucu

SEQ ID NO: 67447 - RNA, 32 nt, Homo Sapiens
gcucuggggccagaauggcuguccuugucgua

SEQ ID NO: 67448 - RNA, 32 nt, Homo Sapiens
gcgucagagcaaagagaagagauuauuaaaag

SEQ ID NO: 67449 - RNA, 32 nt, Homo Sapiens
ucaaccaugaccaagugcagaagguugaccag

SEQ ID NO: 67450 - RNA, 32 nt, Homo Sapiens
ggaaggaaacaaaagcaauuucaguaucucug

SEQ ID NO: 67451 - RNA, 32 nt, Homo Sapiens
cuggaaggcagagguugcagugagauugcacc

SEQ ID NO: 67452 - RNA, 32 nt, Homo Sapiens
ucacuagggguuuucuuaagggauaaaggccu

SEQ ID NO: 67453 - RNA, 32 nt, Homo Sapiens
auguauuaucaccagcagacacugccgggccu

SEQ ID NO: 67454 - RNA, 32 nt, Homo Sapiens
augcaacaaggugugguaugacuucaucccuc

SEQ ID NO: 67455 - RNA, 32 nt, Homo Sapiens
ucaagggcggcacgcuccggggcaucaucaag

SEQ ID NO: 67456 - RNA, 32 nt, Homo Sapiens
cagucuggccccagccucugugggcuuaacca

SEQ ID NO: 67457 - RNA, 32 nt, Homo Sapiens
acuaccagccccacccaccuuccuuccucuuc

SEQ ID NO: 67458 - RNA, 32 nt, Homo Sapiens
cagcggcugagagaggggugccaggcagggca

SEQ ID NO: 67459 - RNA, 32 nt, Homo Sapiens
ccgggacccggggucgggcggcugggaggagg

SEQ ID NO: 67460 - RNA, 32 nt, Homo Sapiens
uccuuuuucuuaguuagaauccaaauuugucu

SEQ ID NO: 67461 - RNA, 32 nt, Homo Sapiens
agaaagagaggcaaaaugagggcugcguggac

SEQ ID NO: 67462 - RNA, 32 nt, Homo Sapiens
uaugcuagaaauauuuaaaugaugugaaacaa

SEQ ID NO: 67463 - RNA, 32 nt, Homo Sapiens
ggugggggucauucagcucgaaugggucccag

SEQ ID NO: 67464 - RNA, 32 nt, Homo Sapiens
uaaauauaaauaauauaaagugcucugaauaa

SEQ ID NO: 67465 - RNA, 32 nt, Homo Sapiens
cuggagcccagccggagcggcggccccuccgc

SEQ ID NO: 67466 - RNA, 32 nt, Homo Sapiens
ucaacucuggggaugcgguggaucuggagagg

SEQ ID NO: 67467 - RNA, 32 nt, Homo Sapiens
aguuauucagaauuuuauuugaacacuggguu

SEQ ID NO: 67468 - RNA, 32 nt, Homo Sapiens
uugaaugcuguagaucuguaccuaguaccccu

SEQ ID NO: 67469 - RNA, 32 nt, Homo Sapiens
uuaagauuaucauuagaaaacaaauacgucaa

SEQ ID NO: 67470 - RNA, 32 nt, Homo Sapiens
cuaugcuaaggggacucgucuccaccucguaa

SEQ ID NO: 67471 - RNA, 32 nt, Homo Sapiens
uccccuuuuuaaaaugauuucuguucuaaugc

SEQ ID NO: 67472 - RNA, 32 nt, Homo Sapiens
cccaggagagccccauucccagccccuggucu

SEQ ID NO: 67473 - RNA, 32 nt, Homo Sapiens
cagcggccucccgcgccgcaaccuccuccucg

SEQ ID NO: 67474 - RNA, 32 nt, Homo Sapiens
uacuaaauaauggccugaaauugcaagagcau

SEQ ID NO: 67475 - RNA, 32 nt, Homo Sapiens
cuaaguuguuuaucucggcugcggcgggaacu

SEQ ID NO: 67476 - RNA, 32 nt, Homo Sapiens
ccucccagugguuuccugcccuucccucaucc

SEQ ID NO: 67477 - RNA, 32 nt, Homo Sapiens
gugggcugaugagaauucugggcuuuguuuug

SEQ ID NO: 67478 - RNA, 32 nt, Homo Sapiens
uuggccuggaggagaacacaugaaagaaagaa

SEQ ID NO: 67479 - RNA, 32 nt, Homo Sapiens
ccccaugugauaaauggguccagggcugauca

SEQ ID NO: 67480 - RNA, 32 nt, Homo Sapiens
gacuaaauuacucaucgucaaaauaaugucaa

SEQ ID NO: 67481 - RNA, 32 nt, Homo Sapiens
cucucuccaccugccucuggcuucucaggccu

SEQ ID NO: 67482 - RNA, 32 nt, Homo Sapiens
aaggugcuuucacauagcacagacauuaccag

SEQ ID NO: 67483 - RNA, 32 nt, Homo Sapiens
agggugcuggggaggagaaagagguguguuuc

SEQ ID NO: 67484 - RNA, 30 nt, Homo Sapiens
gugagaacuugcggcugcggcaggacgggg

SEQ ID NO: 67485 - RNA, 32 nt, Homo Sapiens
uuuuaaaugcaaaaacucagaaaaaaaaaaaa

SEQ ID NO: 67486 - RNA, 32 nt, Homo Sapiens
cuaucccgagggugcggcgugaagaggagccu

SEQ ID NO: 67487 - RNA, 32 nt, Homo Sapiens
gggagcuuuaauccucuuucugcuucacacua

SEQ ID NO: 67488 - RNA, 32 nt, Homo Sapiens
cugcgccgcgcgcccuccgccggcgccaacac

SEQ ID NO: 67489 - RNA, 32 nt, Homo Sapiens
ucugccucucaaacuccugaccucaaguaauc

SEQ ID NO: 67490 - RNA, 32 nt, Homo Sapiens
gucuguuuccugccaagguguuuucuguguau

SEQ ID NO: 67491 - RNA, 32 nt, Homo Sapiens
gguuaauucuguccaacaaacacacacgggua

SEQ ID NO: 67492 - RNA, 32 nt, Homo Sapiens
uaagugggauuugguuuagauaccaaagacac

SEQ ID NO: 67493 - RNA, 32 nt, Homo Sapiens
uuuacuguuacucuuuccccagccuucuuaag

SEQ ID NO: 67494 - RNA, 32 nt, Homo Sapiens
gagccuugagcccggugcuccucccucgcgca

SEQ ID NO: 67495 - RNA, 32 nt, Homo Sapiens
cgcggcguagccccgcucuccugagagcucgg

SEQ ID NO: 67496 - RNA, 32 nt, Homo Sapiens
acuauucuccucuuuaucacagaugaagugcc

SEQ ID NO: 67497 - RNA, 32 nt, Homo Sapiens
gcagagagcuggcuugagaguaguuauuauga

SEQ ID NO: 67498 - RNA, 32 nt, Homo Sapiens
uuccccugcccccucagucuuccacuuuuggg

SEQ ID NO: 67499 - RNA, 32 nt, Homo Sapiens
uguggagcuucugagaucuguggagguuuuuc

SEQ ID NO: 67500 - RNA, 32 nt, Homo Sapiens
aaguaucaacuggccaggcaggguggcucacg

SEQ ID NO: 67501 - RNA, 32 nt, Homo Sapiens
guacguuuugguuuuuuuuuguuguuuuuuuu

SEQ ID NO: 67502 - RNA, 32 nt, Homo Sapiens
aauguuggaugaugaaacauucauuuuuaccu

SEQ ID NO: 67503 - RNA, 32 nt, Homo Sapiens
acuugguuuugcuacauaauuauccaggaagg

SEQ ID NO: 67504 - RNA, 32 nt, Homo Sapiens
gcaaagggauaaaacuuagauggcagcuugua

SEQ ID NO: 67505 - RNA, 32 nt, Homo Sapiens
gcccucccagcugucgacccagaugggauguu

SEQ ID NO: 67506 - RNA, 32 nt, Homo Sapiens
cuuccuguggucaaagagcccuugaggaagca

SEQ ID NO: 67507 - RNA, 31 nt, Homo Sapiens
gugguagugugugccugucgucccagcuacu

SEQ ID NO: 67508 - RNA, 32 nt, Homo Sapiens
gagucaaagggagucugcauguaugggaacug

SEQ ID NO: 67509 - RNA, 32 nt, Homo Sapiens
uauacagucuucccacuucacuaaccaaauuc

SEQ ID NO: 67510 - RNA, 32 nt, Homo Sapiens
aguccucaucacaucugguugcuucaaagugu

SEQ ID NO: 67511 - RNA, 32 nt, Homo Sapiens
cuucagacagagaugcacccggagccuuugcu

SEQ ID NO: 67512 - RNA, 32 nt, Homo Sapiens
uugucuuuaaacagcaacuacagaaguggaag

SEQ ID NO: 67513 - RNA, 32 nt, Homo Sapiens
ccuucauaaaaagccaaaaucugacaaagaga

SEQ ID NO: 67514 - RNA, 32 nt, Homo Sapiens
auauuuccaaugaacgauguuagauuuuacac

SEQ ID NO: 67515 - RNA, 32 nt, Homo Sapiens
ggaaagcuggaacacaucccuccugcuucccc

SEQ ID NO: 67516 - RNA, 30 nt, Homo Sapiens
gaagucaggaaaagacguuuuuguaucaag

SEQ ID NO: 67517 - RNA, 32 nt, Homo Sapiens
agguuuauuuggguacauggcccgcaguggcu

SEQ ID NO: 67518 - RNA, 32 nt, Homo Sapiens
gggaggggagagcggguguggauuugucuuga

SEQ ID NO: 67519 - RNA, 32 nt, Homo Sapiens
aaguaaagcuauugccaaauauuuucauuugc

SEQ ID NO: 67520 - RNA, 32 nt, Homo Sapiens
ccuaguggggaagucuuccuuacucacagccu

SEQ ID NO: 67521 - RNA, 32 nt, Homo Sapiens
ccuucugccugcccucugaggagagcgagcca

SEQ ID NO: 67522 - RNA, 32 nt, Homo Sapiens
uuauuuaggauuuggauuucccuuauuucucu

SEQ ID NO: 67523 - RNA, 32 nt, Homo Sapiens
uggcucacaccuguaacccuagcacuuuggga

SEQ ID NO: 67524 - RNA, 32 nt, Homo Sapiens
guguggcugagagcgcacagagcgcacgugca

SEQ ID NO: 67525 - RNA, 32 nt, Homo Sapiens
augaccccauccccgccugcuuccucgcuccu

SEQ ID NO: 67526 - RNA, 32 nt, Homo Sapiens
uuaguucaacauuauacuaccuuuaaaaaggc

SEQ ID NO: 67527 - RNA, 32 nt, Homo Sapiens
uguuugugugugauccuucuccuggccccagg

SEQ ID NO: 67528 - RNA, 32 nt, Homo Sapiens
uucagcaaacacucacuaggugacagcggcca

SEQ ID NO: 67529 - RNA, 32 nt, Homo Sapiens
guguguuuaacaugugcagaaguagcuucucu

SEQ ID NO: 67530 - RNA, 32 nt, Homo Sapiens
agaaacugcugagacgagguggcagcggggac

SEQ ID NO: 67531 - RNA, 32 nt, Homo Sapiens
cuugaguuagcguuagcuaagcauacaaucag

SEQ ID NO: 67532 - RNA, 32 nt, Homo Sapiens
aaaguggugaagguacagcauauagcugcaug

SEQ ID NO: 67533 - RNA, 32 nt, Homo Sapiens
ugccucaggaggaaggacagccucagagcaug

SEQ ID NO: 67534 - RNA, 32 nt, Homo Sapiens
gucacgcuuuuaaauuuacagcucaucacaga

SEQ ID NO: 67535 - RNA, 32 nt, Homo Sapiens
cuuucuguaccccaagccagcacaagauugga

SEQ ID NO: 67536 - RNA, 32 nt, Homo Sapiens
cgcgggggcuccuaggggguuccuuccacagc

SEQ ID NO: 67537 - RNA, 32 nt, Homo Sapiens
cuggggcggggcggggggcuuugcaggccgcc

SEQ ID NO: 67538 - RNA, 28 nt, Homo Sapiens
ccaccaguauuuaccaggaaaacaaaga

SEQ ID NO: 67539 - RNA, 32 nt, Homo Sapiens
uaaugggagaggaggagaaucaaugggaugug

SEQ ID NO: 67540 - RNA, 32 nt, Homo Sapiens
uuuuuguuuuccucccucuccucuggcugcua

SEQ ID NO: 67541 - RNA, 32 nt, Homo Sapiens
agaaauuuaaaacuauauaacuucuaaacuuc

SEQ ID NO: 67542 - RNA, 32 nt, Homo Sapiens
gcuguuggugcugguuccgggaccacauuaug

SEQ ID NO: 67543 - RNA, 32 nt, Homo Sapiens
aaugacugcauucuuuggauuccuucagucua

SEQ ID NO: 67544 - RNA, 32 nt, Homo Sapiens
guucuuuuucuuccugucauaaccagcugccu

SEQ ID NO: 67545 - RNA, 32 nt, Homo Sapiens
ggcggcagcagcugcgguggcggcgcucucag

SEQ ID NO: 67546 - RNA, 32 nt, Homo Sapiens
cgggccauccagcccaguguuuucuuuagccc

SEQ ID NO: 67547 - RNA, 32 nt, Homo Sapiens
gucaucagcaacccaggaagaguggccucacc

SEQ ID NO: 67548 - RNA, 32 nt, Homo Sapiens
uugaauuuuuaaaaacguaauuuuaccaaucu

SEQ ID NO: 67549 - RNA, 32 nt, Homo Sapiens
cuuuuuaauuugauguaacuuuucuuauuuug

SEQ ID NO: 67550 - RNA, 32 nt, Homo Sapiens
acugggcccguggagcagcagugucagcauca

SEQ ID NO: 67551 - RNA, 32 nt, Homo Sapiens
aguuauuguuuccauuguuguuuacuuuaguu

SEQ ID NO: 67552 - RNA, 32 nt, Homo Sapiens
aaggggugucaugaauuccuuaaaaggacucu

SEQ ID NO: 67553 - RNA, 32 nt, Homo Sapiens
uguuuuugaggaaggggaguuggguacuucug

SEQ ID NO: 67554 - RNA, 32 nt, Homo Sapiens
gugagagugacgucaccuccuuuccagagcca

SEQ ID NO: 67555 - RNA, 32 nt, Homo Sapiens
aagaccuguugaccacaaagccuugucacuga

SEQ ID NO: 67556 - RNA, 32 nt, Homo Sapiens
uaauguuguagagcauuuuguagagugguuua

SEQ ID NO: 67557 - RNA, 32 nt, Homo Sapiens
ggggccucgagccccaggaugugcagaguucu

SEQ ID NO: 67558 - RNA, 32 nt, Homo Sapiens
uagucaaaaauauuuaaaaggagauucaacuu

SEQ ID NO: 67559 - RNA, 32 nt, Homo Sapiens
aguccggcugccuggggcgggcggcgcguguc

SEQ ID NO: 67560 - RNA, 32 nt, Homo Sapiens
ccagaugacagaggugccugguguuuggcaaa

SEQ ID NO: 67561 - RNA, 32 nt, Homo Sapiens
uacuuuguacaaauguaaauagauaaaguaac

SEQ ID NO: 67562 - RNA, 32 nt, Homo Sapiens
aagaugcauuaucauggcuguaaacacagguu

SEQ ID NO: 67563 - RNA, 28 nt, Homo Sapiens
gcugggguuacagguaugagccaccaca

SEQ ID NO: 67564 - RNA, 32 nt, Homo Sapiens
agcuggacuacgccgagacaacugggagaggc

SEQ ID NO: 67565 - RNA, 32 nt, Homo Sapiens
ggacccugccccgccccuccccccaggccccu

SEQ ID NO: 67566 - RNA, 32 nt, Homo Sapiens
uucuccgcagccgcugccccggacccugacga

SEQ ID NO: 67567 - RNA, 30 nt, Homo Sapiens
uggcugauuguugugcagccggcgccaugu

SEQ ID NO: 67568 - RNA, 32 nt, Homo Sapiens
auccgcgcgcgcugggccuccggcgccgcucg

SEQ ID NO: 67569 - RNA, 32 nt, Homo Sapiens
gguugacggcccugcuuggauccaccaccagg

SEQ ID NO: 67570 - RNA, 32 nt, Homo Sapiens
ugcauauauguauauauacauacacgcaaugu

SEQ ID NO: 67571 - RNA, 30 nt, Homo Sapiens
ggggcaguuuugguggaagaagcucgggca

SEQ ID NO: 67572 - RNA, 32 nt, Homo Sapiens
gcccuacugagcgcaggcccaggccccacuug

SEQ ID NO: 67573 - RNA, 32 nt, Homo Sapiens
guucuugaucugcuccuucuccugggugcgca

SEQ ID NO: 67574 - RNA, 32 nt, Homo Sapiens
aagaaacccagcuguaagaaacagcuucccuc

SEQ ID NO: 67575 - RNA, 32 nt, Homo Sapiens
ucccaggacuuccuaaugugcagcuaggguug

SEQ ID NO: 67576 - RNA, 32 nt, Homo Sapiens
uugugagccccggcccggcagugucccgacuc

SEQ ID NO: 67577 - RNA, 32 nt, Homo Sapiens
gucuccagcucugcauaugucuggccaggggg

SEQ ID NO: 67578 - RNA, 32 nt, Homo Sapiens
acaggcaauaaucaagucugcuguuuuggccu

SEQ ID NO: 67579 - RNA, 32 nt, Homo Sapiens
aaauacaguuuagcaagcaacagaaacauacu

SEQ ID NO: 67580 - RNA, 32 nt, Homo Sapiens
uuugauuuuaucacguucuuccuucacuugaa

SEQ ID NO: 67581 - RNA, 32 nt, Homo Sapiens
acaucagcccucaaaagaaaaugcugguagag

SEQ ID NO: 67582 - RNA, 32 nt, Homo Sapiens
guuccugcuuccaugauagaaggauaugaacu

SEQ ID NO: 67583 - RNA, 32 nt, Homo Sapiens
ggcucgggguccccagcuccgcguaaacugca

SEQ ID NO: 67584 - RNA, 32 nt, Homo Sapiens
caagcccugucuguucauucaaggcugguuca

SEQ ID NO: 67585 - RNA, 32 nt, Homo Sapiens
uucgcgcagcgguggcucgcaccugugggacc

SEQ ID NO: 67586 - RNA, 32 nt, Homo Sapiens
uuauuaauaauguuaaugauauugcugcaaau

SEQ ID NO: 67587 - RNA, 32 nt, Homo Sapiens
cggacugucuauuugccugcaguccagccuau

SEQ ID NO: 67588 - RNA, 32 nt, Homo Sapiens
caugcucagaggugcaagucagcuccaggggg

SEQ ID NO: 67589 - RNA, 32 nt, Homo Sapiens
ugggugguggucgcgcugugcuccacagacgg

SEQ ID NO: 67590 - RNA, 32 nt, Homo Sapiens
gauuuggaauccacauccuaaugcugccacaa

SEQ ID NO: 67591 - RNA, 32 nt, Homo Sapiens
ugaauguuauuuaccugaaauuaaucuuccuu

SEQ ID NO: 67592 - RNA, 32 nt, Homo Sapiens
ccccacuccauuggucacucuugcugcuuacc

SEQ ID NO: 67593 - RNA, 32 nt, Homo Sapiens
aauaaaacagugguccugaaaacucuugccaa

SEQ ID NO: 67594 - RNA, 32 nt, Homo Sapiens
uauuccuacugagaucacaaugaugcugccag

SEQ ID NO: 67595 - RNA, 32 nt, Homo Sapiens
uuguagaugauggguguuuuauuuucaaucgc

SEQ ID NO: 67596 - RNA, 32 nt, Homo Sapiens
gcugcggcuccgcucucgucgcaacgagaucu

SEQ ID NO: 67597 - RNA, 32 nt, Homo Sapiens
uugugauaucuauacuuacuuauuuuccucca

SEQ ID NO: 67598 - RNA, 32 nt, Homo Sapiens
aaaaacaaucuuauuccgagcauuccaguaac

SEQ ID NO: 67599 - RNA, 32 nt, Homo Sapiens
agaacaaaguccuggaggaagcagacaaugaa

SEQ ID NO: 67600 - RNA, 32 nt, Homo Sapiens
cagcacagcagcacccauccccugccagagcc

SEQ ID NO: 67601 - RNA, 32 nt, Homo Sapiens
cucagccuuccuucccucuccuugucucaugu

SEQ ID NO: 67602 - RNA, 28 nt, Homo Sapiens
caccgaguuacaggaaagggccagguaa

SEQ ID NO: 67603 - RNA, 32 nt, Homo Sapiens
ggaaaagaaaagucaaggguagggugggccuu

SEQ ID NO: 67604 - RNA, 32 nt, Homo Sapiens
ggccuuggggagcccaggauggagguggcggu

SEQ ID NO: 67605 - RNA, 32 nt, Homo Sapiens
gcccgggcgcaccccaccgcucccgggaccug

SEQ ID NO: 67606 - RNA, 32 nt, Homo Sapiens
cggcgguggcggugcaggaggccgggcagggg

SEQ ID NO: 67607 - RNA, 32 nt, Homo Sapiens
uggggcuccccucccaugaccaggcagugguc

SEQ ID NO: 67608 - RNA, 32 nt, Homo Sapiens
agauccacaaaacuaacaggauaauugggcaa

SEQ ID NO: 67609 - RNA, 32 nt, Homo Sapiens
cuccucccgccagcgcgcggccucgcuccucc

SEQ ID NO: 67610 - RNA, 32 nt, Homo Sapiens
guuccaguuucagagacuuugucuccaccucc

SEQ ID NO: 67611 - RNA, 32 nt, Homo Sapiens
augcuaauucacaaguuuuuuuugaagugaau

SEQ ID NO: 67612 - RNA, 32 nt, Homo Sapiens
cagagcccgcggcuguggggcagcuccagccc

SEQ ID NO: 67613 - RNA, 32 nt, Homo Sapiens
uauuuauguuuucuuuuaaucauuucauaacu

SEQ ID NO: 67614 - RNA, 32 nt, Homo Sapiens
gacagcugccagcacccaccuggcccuccucc

SEQ ID NO: 67615 - RNA, 32 nt, Homo Sapiens
cccaguguaaaaaugaaucgcguuuuaaguga

SEQ ID NO: 67616 - RNA, 32 nt, Homo Sapiens
aagaauucagaauaauuuugguaaauggauuc

SEQ ID NO: 67617 - RNA, 32 nt, Homo Sapiens
gccugccgcagaccgaagaccgcagggccagc

SEQ ID NO: 67618 - RNA, 32 nt, Homo Sapiens
ccugucaccccaccccaggccacccucuccca

SEQ ID NO: 67619 - RNA, 32 nt, Homo Sapiens
guccucguuuuauuuuugguuaaacuuaugaa

SEQ ID NO: 67620 - RNA, 32 nt, Homo Sapiens
ccggcaucuccagccagcccugugauagagau

SEQ ID NO: 67621 - RNA, 32 nt, Homo Sapiens
uucuucuuuucuucuuucauuucaguggcauu

SEQ ID NO: 67622 - RNA, 32 nt, Homo Sapiens
cuuuuuacagaaugaacuuaugcacugcuacu

SEQ ID NO: 67623 - RNA, 32 nt, Homo Sapiens
cugggcauucuauacuuaacuuggcaauuuga

SEQ ID NO: 67624 - RNA, 32 nt, Homo Sapiens
gggggaaaaguauuuuugagaaguuugucuug

SEQ ID NO: 67625 - RNA, 30 nt, Homo Sapiens
cugcugcugcuccugccgccgcugccgcca

SEQ ID NO: 67626 - RNA, 32 nt, Homo Sapiens
cugccaucugacacaaggccugucguggccuc

SEQ ID NO: 67627 - RNA, 32 nt, Homo Sapiens
gcagaaagccccaggauacuucucuccccggg

SEQ ID NO: 67628 - RNA, 32 nt, Homo Sapiens
aauuuauuuuagauuuaggagcaccaucaggu

SEQ ID NO: 67629 - RNA, 32 nt, Homo Sapiens
ggccgucgaccccgcugucgcgcugcgucugc

SEQ ID NO: 67630 - RNA, 32 nt, Homo Sapiens
uugugaugacuucuaggaagccucaggaaaga

SEQ ID NO: 67631 - RNA, 32 nt, Homo Sapiens
caaaugaaaaggaggcagauguuaccauuguc

SEQ ID NO: 67632 - RNA, 32 nt, Homo Sapiens
ucuauuuccuuccgauuaccuagauaccuccg

SEQ ID NO: 67633 - RNA, 32 nt, Homo Sapiens
ggggaggggagagaagguggucugcaccccac

SEQ ID NO: 67634 - RNA, 32 nt, Homo Sapiens
gcuucugggagacaccaaagggugaagcuauu

SEQ ID NO: 67635 - RNA, 32 nt, Homo Sapiens
ugcagaaugacuugggucuugcuggccccugg

SEQ ID NO: 67636 - RNA, 32 nt, Homo Sapiens
guagucuguaaguaacaaacauuuuguuuccu

SEQ ID NO: 67637 - RNA, 32 nt, Homo Sapiens
ugguaucuuuccugcccuuuuccuuuguguac

SEQ ID NO: 67638 - RNA, 32 nt, Homo Sapiens
uuccacccugcagauagcgaggaggcacccca

SEQ ID NO: 67639 - RNA, 32 nt, Homo Sapiens
uuacaggugugagccacugcacccggccaacu

SEQ ID NO: 67640 - RNA, 32 nt, Homo Sapiens
cauuaugcaaaguggaauaagccuaucacaaa

SEQ ID NO: 67641 - RNA, 32 nt, Homo Sapiens
uuuguaacuauuuaugaagaaauauuuuagcu

SEQ ID NO: 67642 - RNA, 31 nt, Homo Sapiens
aagacuucacggagccauucuguauacaagg

SEQ ID NO: 67643 - RNA, 30 nt, Homo Sapiens
aggcacaggccugucccgggucccggcagg

SEQ ID NO: 67644 - RNA, 32 nt, Homo Sapiens
cgaaccugcccagcugauguacuguuuuaugg

SEQ ID NO: 67645 - RNA, 32 nt, Homo Sapiens
ucuagcucuggaugguugaacuguagcauggc

SEQ ID NO: 67646 - RNA, 29 nt, Homo Sapiens
cauccugugacuucaugcuagaaauuuuc

SEQ ID NO: 67647 - RNA, 32 nt, Homo Sapiens
acuguaugaugaacaaaaguguuuacaugaug

SEQ ID NO: 67648 - RNA, 32 nt, Homo Sapiens
gagucgcgaggaagaggcggaaggcgccggaa

SEQ ID NO: 67649 - RNA, 32 nt, Homo Sapiens
aggcuggggacgccgcauccccgggugcggag

SEQ ID NO: 67650 - RNA, 32 nt, Homo Sapiens
aaguuguaaacauaaaauauauuaaaguuacu

SEQ ID NO: 67651 - RNA, 32 nt, Homo Sapiens
cccaaggugaacuggaagcagcuucuagagaa

SEQ ID NO: 67652 - RNA, 32 nt, Homo Sapiens
agcuggagcgcgcgcccgcugcucucuccagg

SEQ ID NO: 67653 - RNA, 32 nt, Homo Sapiens
aagccucuugucaucaacagccgugaccacuu

SEQ ID NO: 67654 - RNA, 32 nt, Homo Sapiens
gaauacagcauuaaaggugauuuuaaaagaaa

SEQ ID NO: 67655 - RNA, 32 nt, Homo Sapiens
ucuacuuuuccuguuuucucuuggggacuuuu

SEQ ID NO: 67656 - RNA, 32 nt, Homo Sapiens
uauuuugucagccucagcaacaaacauuuccu

SEQ ID NO: 67657 - RNA, 32 nt, Homo Sapiens
uauacaacgugagagaaugaaacuauagauca

SEQ ID NO: 67658 - RNA, 32 nt, Homo Sapiens
cgguagcucgaugauccucuuuugaucuugug

SEQ ID NO: 67659 - RNA, 32 nt, Homo Sapiens
uguuuuuuuuuuuuuucuuuuugaaacagggu

SEQ ID NO: 67660 - RNA, 32 nt, Homo Sapiens
auuacuucuuuuuuuucuuuuuaauaaaaacu

SEQ ID NO: 67661 - RNA, 32 nt, Homo Sapiens
cacacuuugcauuucaacacucagcccggaaa

SEQ ID NO: 67662 - RNA, 32 nt, Homo Sapiens
uaauguaccauauauauuaauagucaacaaau

SEQ ID NO: 67663 - RNA, 32 nt, Homo Sapiens
ccagccucuucagccucacacccauuccccug

SEQ ID NO: 67664 - RNA, 32 nt, Homo Sapiens
cucagguuaugaaugaauuagguuuucaacau

SEQ ID NO: 67665 - RNA, 32 nt, Homo Sapiens
ggacgucagcuucuccuggagcgcucgcucac

SEQ ID NO: 67666 - RNA, 32 nt, Homo Sapiens
gagcaccugauuccuuucugccugcagggggc

SEQ ID NO: 67667 - RNA, 32 nt, Homo Sapiens
accauucuauaaagguaaaugcuucagcaccg

SEQ ID NO: 67668 - RNA, 32 nt, Homo Sapiens
aaagauaccaaauaaacuucaguguuuucauc

SEQ ID NO: 67669 - RNA, 32 nt, Homo Sapiens
agacccaaaguguuuguaauucuucuuugucc

SEQ ID NO: 67670 - RNA, 32 nt, Homo Sapiens
gggccaaggucugggggugcuggaggccaugc

SEQ ID NO: 67671 - RNA, 32 nt, Homo Sapiens
acgaggcugccacuucccucucuccccuggcc

SEQ ID NO: 67672 - RNA, 32 nt, Homo Sapiens
gcagggggcgcggagcugggggugggagcugg

SEQ ID NO: 67673 - RNA, 32 nt, Homo Sapiens
cagguggcuguucuggcccagccccuucccau

SEQ ID NO: 67674 - RNA, 32 nt, Homo Sapiens
gcaaagaggugcggaggcaagcaagcuccaug

SEQ ID NO: 67675 - RNA, 32 nt, Homo Sapiens
uugccuuccucuaucugccccugcuccaucuc

SEQ ID NO: 67676 - RNA, 32 nt, Homo Sapiens
guugagaguccucccuccccaaccuccuccau

SEQ ID NO: 67677 - RNA, 32 nt, Homo Sapiens
gagcccgagcgcgggcgaugcaggcuccgcga

SEQ ID NO: 67678 - RNA, 32 nt, Homo Sapiens
gacuacaggcgcccaacaccacgccuggcuaa

SEQ ID NO: 67679 - RNA, 32 nt, Homo Sapiens
uggacccauuuauuauucacagauggggagaa

SEQ ID NO: 67680 - RNA, 32 nt, Homo Sapiens
agaauuuuaaacaauuccucuccaaccuccuu

SEQ ID NO: 67681 - RNA, 32 nt, Homo Sapiens
cauugccggcccacccacuguucaggcugaga

SEQ ID NO: 67682 - RNA, 32 nt, Homo Sapiens
auucaauuuacaccacaguuaaaggaacaccc

SEQ ID NO: 67683 - RNA, 32 nt, Homo Sapiens
uuuuucccagaaaggaaagauaccugcagccc

SEQ ID NO: 67684 - RNA, 32 nt, Homo Sapiens
uccauagaaagcaaaucaggguucuuggaaaa

SEQ ID NO: 67685 - RNA, 32 nt, Homo Sapiens
guauguaucucacauugaacuaaaauccacug

SEQ ID NO: 67686 - RNA, 32 nt, Homo Sapiens
ugggcauaauuauuuccccccaaaaaaggcac

SEQ ID NO: 67687 - RNA, 32 nt, Homo Sapiens
ccugaagaagcgaguguugaccaaugaccuag

SEQ ID NO: 67688 - RNA, 32 nt, Homo Sapiens
ucaccggagcucggggaggcgaggcgggagcc

SEQ ID NO: 67689 - RNA, 27 nt, Homo Sapiens
uaggcauccucccucagcccccacccc

SEQ ID NO: 67690 - RNA, 31 nt, Homo Sapiens
cuaauaagaaacacuuuacaaccugcucucu

SEQ ID NO: 67691 - RNA, 32 nt, Homo Sapiens
gcaccuaguauaauuucuuuguaauaugugaa

SEQ ID NO: 67692 - RNA, 32 nt, Homo Sapiens
uguucuccaaggccaaggucuucucuauauca

SEQ ID NO: 67693 - RNA, 32 nt, Homo Sapiens
cuggggccucggggggcgcggacccccaaccc

SEQ ID NO: 67694 - RNA, 32 nt, Homo Sapiens
ccccaucccccuccccaucaccuuuggugggg

SEQ ID NO: 67695 - RNA, 32 nt, Homo Sapiens
cagacgggcccagagcgcccaagccccuucag

SEQ ID NO: 67696 - RNA, 27 nt, Homo Sapiens
acagcacuugucugcagcccccucagg

SEQ ID NO: 67697 - RNA, 32 nt, Homo Sapiens
gcaauggcucuuucagcucggaggaagcuugg

SEQ ID NO: 67698 - RNA, 32 nt, Homo Sapiens
uuuuucugucuauuaugggaaacaucagacgu

SEQ ID NO: 67699 - RNA, 32 nt, Homo Sapiens
ucgcgcaggagccgggcugccucgagccgggg

SEQ ID NO: 67700 - RNA, 32 nt, Homo Sapiens
gauacuauagauaaaauccuauuuaagacaaa

SEQ ID NO: 67701 - RNA, 32 nt, Homo Sapiens
uuguugauagagugcaucagaauuucaaaagg

SEQ ID NO: 67702 - RNA, 32 nt, Homo Sapiens
gagcaaggaugacagugcugcagcccccaaaa

SEQ ID NO: 67703 - RNA, 32 nt, Homo Sapiens
caguuccacucuggaugggccugugacacccc

SEQ ID NO: 67704 - RNA, 32 nt, Homo Sapiens
ggagcggcuugcuuaccuccucauggcuuaca

SEQ ID NO: 67705 - RNA, 30 nt, Homo Sapiens
agcagaggcaggcguggggacacacucuuc

SEQ ID NO: 67706 - RNA, 32 nt, Homo Sapiens
cacaggccggccuccgcuucccgggaagacgg

SEQ ID NO: 67707 - RNA, 32 nt, Homo Sapiens
uacaguuaaagaagcaaucuccuuacuguguu

SEQ ID NO: 67708 - RNA, 32 nt, Homo Sapiens
ugaggaaacccagagggaccaagcgcugagac

SEQ ID NO: 67709 - RNA, 32 nt, Homo Sapiens
ucucaugcuucuucucauggggugggguuggg

SEQ ID NO: 67710 - RNA, 32 nt, Homo Sapiens
agacagagggagcagugaauagcaauagggug

SEQ ID NO: 67711 - RNA, 32 nt, Homo Sapiens
cagcggcagcgggucagucuggcucgagcugu

SEQ ID NO: 67712 - RNA, 32 nt, Homo Sapiens
ugugaauauauucuuuuaaauaaacauuuaca

SEQ ID NO: 67713 - RNA, 32 nt, Homo Sapiens
gcaucuggaaaacauaugaguguuauacccua

SEQ ID NO: 67714 - RNA, 32 nt, Homo Sapiens
aguuugagaauccagcagcccugggugccugg

SEQ ID NO: 67715 - RNA, 32 nt, Homo Sapiens
uuuggaugcugaugauagacuugcaucucaga

SEQ ID NO: 67716 - RNA, 32 nt, Homo Sapiens
augugaagucuugacacugccuccugggagca

SEQ ID NO: 67717 - RNA, 32 nt, Homo Sapiens
cugggagccggaggggcugaaagggaaaugga

SEQ ID NO: 67718 - RNA, 32 nt, Homo Sapiens
uaagucuuaagcuuguuggaaauaauguaccc

SEQ ID NO: 67719 - RNA, 32 nt, Homo Sapiens
aaaaacacuaauuauugacaugugcaucugua

SEQ ID NO: 67720 - RNA, 32 nt, Homo Sapiens
gggcagacaaaauaagagugagcuggucaggg

SEQ ID NO: 67721 - RNA, 32 nt, Homo Sapiens
accgaaauucucaggacacacccaggccucaa

SEQ ID NO: 67722 - RNA, 32 nt, Homo Sapiens
cuuaccuugaguuaaaggcaaagaaaaucuaa

SEQ ID NO: 67723 - RNA, 32 nt, Homo Sapiens
aaaagguguggaugacucuacugcguggaugg

SEQ ID NO: 67724 - RNA, 32 nt, Homo Sapiens
cggcccggacuacgaggcgcugccggcuggag

SEQ ID NO: 67725 - RNA, 32 nt, Homo Sapiens
aagguaccagcuuuucuguuucuuugaaccua

SEQ ID NO: 67726 - RNA, 32 nt, Homo Sapiens
auuacauguuaauccaucaucuucaaaggcua

SEQ ID NO: 67727 - RNA, 32 nt, Homo Sapiens
acacucuaguugcaggaaaagaagcucagggc

SEQ ID NO: 67728 - RNA, 32 nt, Homo Sapiens
ggaacagugauaggaauccuuucuuaaggguu

SEQ ID NO: 67729 - RNA, 32 nt, Homo Sapiens
caaaagcuggauacacauggagcuguuuggga

SEQ ID NO: 67730 - RNA, 31 nt, Homo Sapiens
gggcggggugggggguggccauagaccccuc

SEQ ID NO: 67731 - RNA, 32 nt, Homo Sapiens
cacauacccugugaagacaauacuaucuacaa

SEQ ID NO: 67732 - RNA, 32 nt, Homo Sapiens
cgaugaugcuguuucaccaaguauauuuugaa

SEQ ID NO: 67733 - RNA, 32 nt, Homo Sapiens
guggcgaggaagaugcuggggccgguagggcu

SEQ ID NO: 67734 - RNA, 32 nt, Homo Sapiens
ucaagcccuaauguugcuugagguggggcagu

SEQ ID NO: 67735 - RNA, 32 nt, Homo Sapiens
uuuaaaggaaaugcagccuagucuugagaaca

SEQ ID NO: 67736 - RNA, 32 nt, Homo Sapiens
ucuaaguuauucugacagaaaaugguaaguca

SEQ ID NO: 67737 - RNA, 32 nt, Homo Sapiens
uuguaaauuuaguguuuuuuuauuucuacugu

SEQ ID NO: 67738 - RNA, 32 nt, Homo Sapiens
guggaaguuacaccuggugcagcccucggcuc

SEQ ID NO: 67739 - RNA, 32 nt, Homo Sapiens
cacccuuucuggggcucugugguuccuggcgu

SEQ ID NO: 67740 - RNA, 32 nt, Homo Sapiens
gcggcggcggcgacgcugacaccucccaccau

SEQ ID NO: 67741 - RNA, 32 nt, Homo Sapiens
gaccugcucgcaggcaccccagcccuccaccu

SEQ ID NO: 67742 - RNA, 32 nt, Homo Sapiens
uguauucuagaguagggguggaggcggcccag

SEQ ID NO: 67743 - RNA, 32 nt, Homo Sapiens
uguucagacauuccauggugauuccugggaag

SEQ ID NO: 67744 - RNA, 32 nt, Homo Sapiens
ccaccugaaaauaaagaauagcacacucagug

SEQ ID NO: 67745 - RNA, 32 nt, Homo Sapiens
ugcccuuuacacaauggcaaggaaaaguacaa

SEQ ID NO: 67746 - RNA, 32 nt, Homo Sapiens
augcggaugcgaagguggcggccgagguggcg

SEQ ID NO: 67747 - RNA, 32 nt, Homo Sapiens
uuuccuggccccagaacuucccaaagaccugu

SEQ ID NO: 67748 - RNA, 32 nt, Homo Sapiens
ccugacgcuuccaggaagcuguagagagggac

SEQ ID NO: 67749 - RNA, 32 nt, Homo Sapiens
gggagagauugucugugagacucccuuuaggu

SEQ ID NO: 67750 - RNA, 32 nt, Homo Sapiens
cuuccacccuuuacuccccagagcagcuuggc

SEQ ID NO: 67751 - RNA, 32 nt, Homo Sapiens
ugccuacaaagucauaguaaaggucaggaguu

SEQ ID NO: 67752 - RNA, 32 nt, Homo Sapiens
acacuccccagggauuugugcauguccuucug

SEQ ID NO: 67753 - RNA, 32 nt, Homo Sapiens
agccucauuuccccagcuucccugauuucuuc

SEQ ID NO: 67754 - RNA, 31 nt, Homo Sapiens
gcacaaaaauaaaaacuuaucacuguauacc

SEQ ID NO: 67755 - RNA, 32 nt, Homo Sapiens
uugcuugugaccaaagaacuaauuuuacagca

SEQ ID NO: 67756 - RNA, 32 nt, Homo Sapiens
ggugagcagggccuccucuuccuccugguguu

SEQ ID NO: 67757 - RNA, 31 nt, Homo Sapiens
gaacuggcacagcgccugcccuaccugcagc

SEQ ID NO: 67758 - RNA, 32 nt, Homo Sapiens
cucuccccucucucccucccccuaacugcaug

SEQ ID NO: 67759 - RNA, 32 nt, Homo Sapiens
aggggcaggggcagcggcggcugggguugggg

SEQ ID NO: 67760 - RNA, 32 nt, Homo Sapiens
acgcaggggaggccggccggccugcacggggc

SEQ ID NO: 67761 - RNA, 32 nt, Homo Sapiens
uccaaugacaaugguacuggcauacacaggga

SEQ ID NO: 67762 - RNA, 32 nt, Homo Sapiens
cuguucugauugucagcaucugucccaugcug

SEQ ID NO: 67763 - RNA, 32 nt, Homo Sapiens
ggccccccuggagaugaccccggaggaggcca

SEQ ID NO: 67764 - RNA, 32 nt, Homo Sapiens
ggauaaaaauuccuaccuacucaucaguguuu

SEQ ID NO: 67765 - RNA, 32 nt, Homo Sapiens
auauauucaaggaaaacaccuccacuaccuca

SEQ ID NO: 67766 - RNA, 32 nt, Homo Sapiens
uuuuauuucuauuugugugaagauguuguuau

SEQ ID NO: 67767 - RNA, 32 nt, Homo Sapiens
uugguuuugauccuacacauuuagauacuagu

SEQ ID NO: 67768 - RNA, 32 nt, Homo Sapiens
aauauuaaaaauuaccauauuaugaaaaaaaa

SEQ ID NO: 67769 - RNA, 32 nt, Homo Sapiens
cacuacaacaaggcccauggcggugccaccuc

SEQ ID NO: 67770 - RNA, 32 nt, Homo Sapiens
aguucaaaaauaucuuuuuugcuaaaaacucu

SEQ ID NO: 67771 - RNA, 32 nt, Homo Sapiens
cuagauuguaaauuaaaaaucauaucuccaca

SEQ ID NO: 67772 - RNA, 32 nt, Homo Sapiens
gccauuuccugguugcccuuuuggaaugugau

SEQ ID NO: 67773 - RNA, 32 nt, Homo Sapiens
uuuaguuuagauuuuuauuuuaucucaaguau

SEQ ID NO: 67774 - RNA, 32 nt, Homo Sapiens
aacgugcuuugaaggccacauaaaaagcccua

SEQ ID NO: 67775 - RNA, 32 nt, Homo Sapiens
cugccgcauccacauguugaacggaguuuaaa

SEQ ID NO: 67776 - RNA, 32 nt, Homo Sapiens
ugcgcauacgcugggcguggacaggccgguga

SEQ ID NO: 67777 - RNA, 32 nt, Homo Sapiens
uugacauuucagugucaauguauuuuaagcuu

SEQ ID NO: 67778 - RNA, 32 nt, Homo Sapiens
cuagcucccaaucccacuuuggcacgauguua

SEQ ID NO: 67779 - RNA, 29 nt, Homo Sapiens
uugugauucuacuuccugccacuaaaauu

SEQ ID NO: 67780 - RNA, 32 nt, Homo Sapiens
caaguccuucaucaaaaacuacccaguggugu

SEQ ID NO: 67781 - RNA, 32 nt, Homo Sapiens
cuuuaucuaacuuaaagugacggaguagaagc

SEQ ID NO: 67782 - RNA, 32 nt, Homo Sapiens
uccaugugaaauguauucaacaauggaauauu

SEQ ID NO: 67783 - RNA, 32 nt, Homo Sapiens
ucucacgugugagcccagcaccccacuucccc

SEQ ID NO: 67784 - RNA, 32 nt, Homo Sapiens
ccaugaaccagaaaaugucugaagauguuaag

SEQ ID NO: 67785 - RNA, 32 nt, Homo Sapiens
agaucugugaagaaaugaaauaaaaugguauu

SEQ ID NO: 67786 - RNA, 32 nt, Homo Sapiens
guuuuauccacuuuucuuggauaaucaggagg

SEQ ID NO: 67787 - RNA, 32 nt, Homo Sapiens
ggcccggcucugccuccaagcugggcagcagg

SEQ ID NO: 67788 - RNA, 31 nt, Homo Sapiens
gcgaagauggcggcgcugggggugcuggagu

SEQ ID NO: 67789 - RNA, 32 nt, Homo Sapiens
gcggcggcggcugacggcuggaaggguaggcu

SEQ ID NO: 67790 - RNA, 32 nt, Homo Sapiens
aaaauuccucuuaaaugacucuggagauaccu

SEQ ID NO: 67791 - RNA, 32 nt, Homo Sapiens
cuccccgaccucgaggcccccggggaggggca

SEQ ID NO: 67792 - RNA, 32 nt, Homo Sapiens
uuaaagggagccccacugcugcuaccugggga

SEQ ID NO: 67793 - RNA, 32 nt, Homo Sapiens
gaaggggugcgggggugugcggugcccuagga

SEQ ID NO: 67794 - RNA, 32 nt, Homo Sapiens
gugcugcuuccuccccgugcagugcugggugu

SEQ ID NO: 67795 - RNA, 32 nt, Homo Sapiens
agucggcggcggcugcugcugccuguggcccg

SEQ ID NO: 67796 - RNA, 32 nt, Homo Sapiens
ucacugcaaacaacuggaauugagguugcaca

SEQ ID NO: 67797 - RNA, 32 nt, Homo Sapiens
acacaugcuaguuauuuaccugaugcccuugc

SEQ ID NO: 67798 - RNA, 30 nt, Homo Sapiens
gccgucuggcuuuugggggaacucgaggac

SEQ ID NO: 67799 - RNA, 32 nt, Homo Sapiens
agagggcacagcccuccucccaagggaaagug

SEQ ID NO: 67800 - RNA, 32 nt, Homo Sapiens
acgccgcgcgucguucucccgcccgcucgcuc

SEQ ID NO: 67801 - RNA, 32 nt, Homo Sapiens
aaggcuccagugcggcagagccucgugcaagc

SEQ ID NO: 67802 - RNA, 32 nt, Homo Sapiens
agugguuacccaugaggcaacacuaaguaucc

SEQ ID NO: 67803 - RNA, 32 nt, Homo Sapiens
ugucacucccagaccaccucccugcccugucc

SEQ ID NO: 67804 - RNA, 31 nt, Homo Sapiens
uggaacauuaagaaaaauguauauucccaau

SEQ ID NO: 67805 - RNA, 32 nt, Homo Sapiens
aaauacauaauaucaauaaaauguagcaagaa

SEQ ID NO: 67806 - RNA, 30 nt, Homo Sapiens
augugagagaagcuggcugcugaaaugacu

SEQ ID NO: 67807 - RNA, 32 nt, Homo Sapiens
uuuuaacuuagagcuuuuuuuuuuaauuuugu

SEQ ID NO: 67808 - RNA, 32 nt, Homo Sapiens
aaaaauauuuguguccagaacauggaaauaua

SEQ ID NO: 67809 - RNA, 31 nt, Homo Sapiens
cagauucgacggagaagccagucagcucccu

SEQ ID NO: 67810 - RNA, 32 nt, Homo Sapiens
cuuuaacugaguccauuuaacuugcuuucuuu

SEQ ID NO: 67811 - RNA, 31 nt, Homo Sapiens
gaggagcagccccaggaggggaccagagggg

SEQ ID NO: 67812 - RNA, 32 nt, Homo Sapiens
aaggccagcaugccuccaaggccgguccccug

SEQ ID NO: 67813 - RNA, 31 nt, Homo Sapiens
gaaugcucacggaggucugcccaugcaggca

SEQ ID NO: 67814 - RNA, 32 nt, Homo Sapiens
ggccggaaaaggacaaugguuuccaugucagc

SEQ ID NO: 67815 - RNA, 32 nt, Homo Sapiens
cuaugcccaggccugcuuccucuucuuccucu

SEQ ID NO: 67816 - RNA, 32 nt, Homo Sapiens
cugcccugguacugagguugggcugagacccu

SEQ ID NO: 67817 - RNA, 32 nt, Homo Sapiens
ggcuccccauccaaaaauguagcccucuuuag

SEQ ID NO: 67818 - RNA, 32 nt, Homo Sapiens
agacuuucaggagaccgugcaggcucugaagg

SEQ ID NO: 67819 - RNA, 30 nt, Homo Sapiens
uccuguuucagauggaccuaucagaaucuc

SEQ ID NO: 67820 - RNA, 30 nt, Homo Sapiens
uuccuuugcugugcugaagcuuuguuuaau

SEQ ID NO: 67821 - RNA, 32 nt, Homo Sapiens
cucccggauccaggcguccgggaucugcgcca

SEQ ID NO: 67822 - RNA, 32 nt, Homo Sapiens
ccuucugucaucuccagcaucagcugccaucc

SEQ ID NO: 67823 - RNA, 32 nt, Homo Sapiens
auaauaagcacuucuuuuuacuuguaucaaug

SEQ ID NO: 67824 - RNA, 32 nt, Homo Sapiens
agaugggcggggggaggggggcgggcggggug

SEQ ID NO: 67825 - RNA, 32 nt, Homo Sapiens
gugacccaccacccuuucuacacacacugggg

SEQ ID NO: 67826 - RNA, 32 nt, Homo Sapiens
ccugcaugugcucuagcaaggauaccaaggca

SEQ ID NO: 67827 - RNA, 32 nt, Homo Sapiens
ccguccgcgacgccgagacaaaccggacccgc

SEQ ID NO: 67828 - RNA, 32 nt, Homo Sapiens
augacuaaugaaagcaauuagcuugaacauuu

SEQ ID NO: 67829 - RNA, 32 nt, Homo Sapiens
cagguuaguuugggggugggggcuccugcacu

SEQ ID NO: 67830 - RNA, 32 nt, Homo Sapiens
aguguuugccuugccuccacccgccgaggggg

SEQ ID NO: 67831 - RNA, 32 nt, Homo Sapiens
cgugcccgccaaugcggcccagcccccggaga

SEQ ID NO: 67832 - RNA, 32 nt, Homo Sapiens
aucccugggguagggcaccacccccuccuggg

SEQ ID NO: 67833 - RNA, 32 nt, Homo Sapiens
uccgccaguguccggccgcgggccggccuuag

SEQ ID NO: 67834 - RNA, 32 nt, Homo Sapiens
uguuuaacaagauggagaggccaggcacgaug

SEQ ID NO: 67835 - RNA, 32 nt, Homo Sapiens
accucuucuuugauucccugggauaguggcuu

SEQ ID NO: 67836 - RNA, 32 nt, Homo Sapiens
gcuacucugguggagagcucuacuucagguuu

SEQ ID NO: 67837 - RNA, 32 nt, Homo Sapiens
ccucuuaauguaugauuacauggaucuuaaac

SEQ ID NO: 67838 - RNA, 32 nt, Homo Sapiens
ggcaaaugaagauaaaacaauguucgccaacc

SEQ ID NO: 67839 - RNA, 32 nt, Homo Sapiens
aauacgguacauuucuauuacaucagaaauau

SEQ ID NO: 67840 - RNA, 32 nt, Homo Sapiens
caaguaaucuguuuaaaucaguuucuagauuu

SEQ ID NO: 67841 - RNA, 32 nt, Homo Sapiens
uuuuugcccauauuuacuuccaucuuuggggu

SEQ ID NO: 67842 - RNA, 32 nt, Homo Sapiens
gucuucacucuuaggcacuuuggggguuugag

SEQ ID NO: 67843 - RNA, 32 nt, Homo Sapiens
cucccgccucuaccgccgcgggagcugcaucg

SEQ ID NO: 67844 - RNA, 32 nt, Homo Sapiens
gugguccgcccgccccggccucccagagugcu

SEQ ID NO: 67845 - RNA, 32 nt, Homo Sapiens
uuuacaguuuaguguaucugguuucuacaugg

SEQ ID NO: 67846 - RNA, 32 nt, Homo Sapiens
ugagcuggccaacgagcuccgcgggcugggac

SEQ ID NO: 67847 - RNA, 32 nt, Homo Sapiens
uguucuuguaaauacgugucgcucagaugucc

SEQ ID NO: 67848 - RNA, 32 nt, Homo Sapiens
gacccgggccccagccuccuugcguggcgaag

SEQ ID NO: 67849 - RNA, 32 nt, Homo Sapiens
ggagcuucuaaagaggugacugguauuuugua

SEQ ID NO: 67850 - RNA, 32 nt, Homo Sapiens
aaccguuuacaguguauuuaagaaagggaaag

SEQ ID NO: 67851 - RNA, 32 nt, Homo Sapiens
cagaacacucuccccgccccagccugauuccu

SEQ ID NO: 67852 - RNA, 32 nt, Homo Sapiens
gacacucuucccuccucccaccugccaccagg

SEQ ID NO: 67853 - RNA, 32 nt, Homo Sapiens
cuucugggagaugggugucacuuuuuaaacca

SEQ ID NO: 67854 - RNA, 32 nt, Homo Sapiens
gggcccuuggaaaaacaggaaaggagcaauga

SEQ ID NO: 67855 - RNA, 32 nt, Homo Sapiens
ugguaaauuauuuuaggaauuaugacaagcua

SEQ ID NO: 67856 - RNA, 32 nt, Homo Sapiens
ucugagcccgcacugccaccgcuccugcccca

SEQ ID NO: 67857 - RNA, 32 nt, Homo Sapiens
cgaccgaggagaacuucuuugagaucuaugau

SEQ ID NO: 67858 - RNA, 32 nt, Homo Sapiens
ccgcccucaccaaguagaaggcacaugugcuc

SEQ ID NO: 67859 - RNA, 32 nt, Homo Sapiens
ucgugguuggggugcuggacccagagugccua

SEQ ID NO: 67860 - RNA, 32 nt, Homo Sapiens
cuuuuauaaaggaaacauuuuaaaucccacaa

SEQ ID NO: 67861 - RNA, 32 nt, Homo Sapiens
auaccuguaggauauggcguugcugaaggaag

SEQ ID NO: 67862 - RNA, 32 nt, Homo Sapiens
auaaacacauacaaugaagaaaacagauaaca

SEQ ID NO: 67863 - RNA, 32 nt, Homo Sapiens
cucccuucuccuggucucuccucaaaagaauu

SEQ ID NO: 67864 - RNA, 32 nt, Homo Sapiens
aggagaagaauaaguguggaaauacuccucua

SEQ ID NO: 67865 - RNA, 32 nt, Homo Sapiens
cugcuuccgcggcggcgcugcccgcacauggg

SEQ ID NO: 67866 - RNA, 32 nt, Homo Sapiens
cccaacaaacuccagaacagcagaaagcgggu

SEQ ID NO: 67867 - RNA, 32 nt, Homo Sapiens
gcugaaguucauuugcugaugaacucgauaga

SEQ ID NO: 67868 - RNA, 32 nt, Homo Sapiens
auacacgccuucccuuccaucgcugcagagug

SEQ ID NO: 67869 - RNA, 32 nt, Homo Sapiens
uuaugcguggaagaaguagacacauuaaacga

SEQ ID NO: 67870 - RNA, 32 nt, Homo Sapiens
gggaguugaggucuuucuccucaggacaaggc

SEQ ID NO: 67871 - RNA, 32 nt, Homo Sapiens
cucuuucuuccgaucccacaggaagugccccu

SEQ ID NO: 67872 - RNA, 32 nt, Homo Sapiens
aagauucaugugauuaugcugcugaggaccag

SEQ ID NO: 67873 - RNA, 32 nt, Homo Sapiens
uagcccgagcccagcccuuccuggcuuuagag

SEQ ID NO: 67874 - RNA, 32 nt, Homo Sapiens
ccugaggcgggcgggcgguauagagcgggcgg

SEQ ID NO: 67875 - RNA, 32 nt, Homo Sapiens
guuuccuagacaagugcaccugggguuucagg

SEQ ID NO: 67876 - RNA, 32 nt, Homo Sapiens
ggucacaguggaagaggcgcccgcgcugcgcu

SEQ ID NO: 67877 - RNA, 32 nt, Homo Sapiens
cggcugccggacgggacgggaccggcuaggcu

SEQ ID NO: 67878 - RNA, 29 nt, Homo Sapiens
uucuugccauaaugguaaaggacugauug

SEQ ID NO: 67879 - RNA, 30 nt, Homo Sapiens
gaaagaugcgcggcguuggcuggcagaugc

SEQ ID NO: 67880 - RNA, 32 nt, Homo Sapiens
aggcagcccuucccagggacucgggauucuag

SEQ ID NO: 67881 - RNA, 32 nt, Homo Sapiens
agggauaauuuuucuuuuuuuuuuuuuuuuga

SEQ ID NO: 67882 - RNA, 32 nt, Homo Sapiens
gaagcagcauggacaagaaggcuggggcuggc

SEQ ID NO: 67883 - RNA, 32 nt, Homo Sapiens
uuuuaagaugguaaaaugguucucagggauuc

SEQ ID NO: 67884 - RNA, 32 nt, Homo Sapiens
uggagguugugaugugcugagaucgugccauu

SEQ ID NO: 67885 - RNA, 32 nt, Homo Sapiens
accccuuuugccucuggguuuggggagcggag

SEQ ID NO: 67886 - RNA, 32 nt, Homo Sapiens
agcauugggcuggcuguccgcugcugacugga

SEQ ID NO: 67887 - RNA, 32 nt, Homo Sapiens
cagauaucuacuggggccuggaggggccuggg

SEQ ID NO: 67888 - RNA, 32 nt, Homo Sapiens
gccuccugccuggccgcccagggcuggccgcg

SEQ ID NO: 67889 - RNA, 32 nt, Homo Sapiens
ugaagucuaaucucaagaauucaugccaugga

SEQ ID NO: 67890 - RNA, 32 nt, Homo Sapiens
agcugcccacugagggcucuuuucccugggau

SEQ ID NO: 67891 - RNA, 32 nt, Homo Sapiens
uuuuugguaguuaaaucagggaacauucuuuc

SEQ ID NO: 67892 - RNA, 32 nt, Homo Sapiens
cucgcuccuucugguauaugcaugucacugca

SEQ ID NO: 67893 - RNA, 31 nt, Homo Sapiens
uuagcaguuggccuggaacagaauuacugag

SEQ ID NO: 67894 - RNA, 32 nt, Homo Sapiens
guugacuuuucaaagaaaauuguacuugaauu

SEQ ID NO: 67895 - RNA, 32 nt, Homo Sapiens
aagguccucacaggugucuccauacuucgcca

SEQ ID NO: 67896 - RNA, 32 nt, Homo Sapiens
ccaucuuucuucaucuuucccauugaccacuu

SEQ ID NO: 67897 - RNA, 32 nt, Homo Sapiens
gagugcaguggugcaaucuuggcucauugcaa

SEQ ID NO: 67898 - RNA, 32 nt, Homo Sapiens
ggccuagcagugcccucgcugcgcgaucucag

SEQ ID NO: 67899 - RNA, 32 nt, Homo Sapiens
ccuggcccggucgcggucgcggcucuuuccag

SEQ ID NO: 67900 - RNA, 32 nt, Homo Sapiens
agcguccuggcucuuggcauuguccgucuuaa

SEQ ID NO: 67901 - RNA, 31 nt, Homo Sapiens
uuuaugcuguuuaugaaacaggcaagauaag

SEQ ID NO: 67902 - RNA, 32 nt, Homo Sapiens
cuggcagccgucugcccucauggccuuugcac

SEQ ID NO: 67903 - RNA, 32 nt, Homo Sapiens
gcauuucuagaaaaaaggagauaauguuuuua

SEQ ID NO: 67904 - RNA, 32 nt, Homo Sapiens
ccucucccuggcccucacccacuuaguuucuu

SEQ ID NO: 67905 - RNA, 32 nt, Homo Sapiens
guuuguaaagauuguucuguguaaauaugucu

SEQ ID NO: 67906 - RNA, 32 nt, Homo Sapiens
ucaaagacauuuccaacaaggaaaguugcuaa

SEQ ID NO: 67907 - RNA, 32 nt, Homo Sapiens
gcacauacaaauaggauguguugauguggacu

SEQ ID NO: 67908 - RNA, 32 nt, Homo Sapiens
cugaacuaaauacauaauugaccaacauuaag

SEQ ID NO: 67909 - RNA, 32 nt, Homo Sapiens
uauucuauggaugucauuauuuugaauuaaga

SEQ ID NO: 67910 - RNA, 32 nt, Homo Sapiens
agucacugaaaauuauuugccauacaguaacc

SEQ ID NO: 67911 - RNA, 32 nt, Homo Sapiens
uuuugagggaggaggcagagcgcgccgggccg

SEQ ID NO: 67912 - RNA, 32 nt, Homo Sapiens
gacccuugauucauucugaacccuccaaagga

SEQ ID NO: 67913 - RNA, 32 nt, Homo Sapiens
ugcucuggaaaaccggcccuugacuagaugga

SEQ ID NO: 67914 - RNA, 32 nt, Homo Sapiens
acgauuuuauccucucuccuuaaauguaucag

SEQ ID NO: 67915 - RNA, 32 nt, Homo Sapiens
cccccugccccggcccugcuccagaacccagc

SEQ ID NO: 67916 - RNA, 32 nt, Homo Sapiens
ucaccuccgcgcccggccaccaaaauggcgcc

SEQ ID NO: 67917 - RNA, 32 nt, Homo Sapiens
uuucagcagcauacaguuaggucuuguuuuua

SEQ ID NO: 67918 - RNA, 32 nt, Homo Sapiens
gucaaguaacuuaauaaaugagugaaugugaa

SEQ ID NO: 67919 - RNA, 32 nt, Homo Sapiens
cuaaaugugauacagaagaacaucucauccca

SEQ ID NO: 67920 - RNA, 32 nt, Homo Sapiens
ucaaccagggauuguuucuguuuaacuucuua

SEQ ID NO: 67921 - RNA, 32 nt, Homo Sapiens
gagagaaacauuacaaguguaaugaguguggc

SEQ ID NO: 67922 - RNA, 32 nt, Homo Sapiens
acaugacauaucuauaauuauaugaggcagau

SEQ ID NO: 67923 - RNA, 32 nt, Homo Sapiens
uuccucccgugccauuacugcaucauaauaca

SEQ ID NO: 67924 - RNA, 32 nt, Homo Sapiens
acuuguaaucccaacacuuuggaaggcugagg

SEQ ID NO: 67925 - RNA, 32 nt, Homo Sapiens
uagcugaaaaagaaaucaagaaagcaauccca

SEQ ID NO: 67926 - RNA, 32 nt, Homo Sapiens
ugggagccaguggucagacaccauuucaccug

SEQ ID NO: 67927 - RNA, 32 nt, Homo Sapiens
cgguuuccacuacuguguagacuccugcuucu

SEQ ID NO: 67928 - RNA, 32 nt, Homo Sapiens
ggcacauggaggaugcaagaaaaggaagagcc

SEQ ID NO: 67929 - RNA, 32 nt, Homo Sapiens
ccuuuuuguuuuuaauuauuccacagcaggug

SEQ ID NO: 67930 - RNA, 32 nt, Homo Sapiens
aaaauacaaaaauuaauugggcgugguggugg

SEQ ID NO: 67931 - RNA, 31 nt, Homo Sapiens
ggagugaugcgcuucgccuggaccgugcucc

SEQ ID NO: 67932 - RNA, 32 nt, Homo Sapiens
agaggcggccguggccuuggcccgaggagacu

SEQ ID NO: 67933 - RNA, 32 nt, Homo Sapiens
ccugugacuucucuccuccccuuugcucacug

SEQ ID NO: 67934 - RNA, 32 nt, Homo Sapiens
caggaaaugccuuguggaaacaggaaguccaa

SEQ ID NO: 67935 - RNA, 32 nt, Homo Sapiens
ucugaacuucguaaauuaguaacuuuuagcug

SEQ ID NO: 67936 - RNA, 32 nt, Homo Sapiens
aaaggaagauaaacuuuuuuuuuuuuuuuuuu

SEQ ID NO: 67937 - RNA, 32 nt, Homo Sapiens
ggcuuccggccgcggcggacacuucccugggc

SEQ ID NO: 67938 - RNA, 32 nt, Homo Sapiens
gcuugagccugccccagccccagccguagccc

SEQ ID NO: 67939 - RNA, 32 nt, Homo Sapiens
gguggccggcuuaguuaggagcuauggcuaaa

SEQ ID NO: 67940 - RNA, 32 nt, Homo Sapiens
cauuaaccucuuccucaccacuaggcuucugg

SEQ ID NO: 67941 - RNA, 32 nt, Homo Sapiens
cccucuccccgcgcccccgccagggagagaag

SEQ ID NO: 67942 - RNA, 32 nt, Homo Sapiens
uuuauuuuauuuuucuuuuugucgcugcacuu

SEQ ID NO: 67943 - RNA, 32 nt, Homo Sapiens
ucucagaaaaucacaucuaucacgguugguag

SEQ ID NO: 67944 - RNA, 32 nt, Homo Sapiens
auguuuugacuuccugacuauuaaaaauaaau

SEQ ID NO: 67945 - RNA, 32 nt, Homo Sapiens
uaagucgagcugcaagcugagccccggugaag

SEQ ID NO: 67946 - RNA, 32 nt, Homo Sapiens
cuuccuuccguucaccauuaugcugaauuuua

SEQ ID NO: 67947 - RNA, 32 nt, Homo Sapiens
gagguaacacuggggaggcggccgcgcugagc

SEQ ID NO: 67948 - RNA, 32 nt, Homo Sapiens
uuugaaugugcagcugcagcgggcgugaguug

SEQ ID NO: 67949 - RNA, 32 nt, Homo Sapiens
ggcccaucugucagcagcgucuucuagguccc

SEQ ID NO: 67950 - RNA, 32 nt, Homo Sapiens
guuccucugcuggaguucauccugcuagcugg

SEQ ID NO: 67951 - RNA, 32 nt, Homo Sapiens
ccaggugucggauaagagccugcuuggugcau

SEQ ID NO: 67952 - RNA, 32 nt, Homo Sapiens
caguuuacuuggaaauuguuaacauaggcuua

SEQ ID NO: 67953 - RNA, 32 nt, Homo Sapiens
gaaaagagaacaaacugcagguuuagaaaaau

SEQ ID NO: 67954 - RNA, 32 nt, Homo Sapiens
cagcuggagacggggccagcucggcggccugc

SEQ ID NO: 67955 - RNA, 32 nt, Homo Sapiens
aggcuaggccagcaggggcugcccgagucugu

SEQ ID NO: 67956 - RNA, 32 nt, Homo Sapiens
guaagcauaaaucuuugaggcaguuuauguau

SEQ ID NO: 67957 - RNA, 32 nt, Homo Sapiens
gcucgggcugucugcggacccugccgcgugca

SEQ ID NO: 67958 - RNA, 32 nt, Homo Sapiens
aucagagcccucgggaaggaggccugggcggg

SEQ ID NO: 67959 - RNA, 32 nt, Homo Sapiens
gguggacggcagagugccgcgacgacugccag

SEQ ID NO: 67960 - RNA, 32 nt, Homo Sapiens
uuggguuugagucaaggcagggaaaacuuggg

SEQ ID NO: 67961 - RNA, 32 nt, Homo Sapiens
ugcucucgacacuuagcuaaacacgacuauau

SEQ ID NO: 67962 - RNA, 32 nt, Homo Sapiens
cgguccccaucccaccaaaaccauuugacaag

SEQ ID NO: 67963 - RNA, 32 nt, Homo Sapiens
acucuuuuuguacagcugggggcaccuggaac

SEQ ID NO: 67964 - RNA, 32 nt, Homo Sapiens
cacaggcuuaggauggcacgugcuguaagauu

SEQ ID NO: 67965 - RNA, 32 nt, Homo Sapiens
ucacccagcucuuucuuaaugucuguguuggc

SEQ ID NO: 67966 - RNA, 32 nt, Homo Sapiens
acccugucaccauuuggucucugcuuccucuc

SEQ ID NO: 67967 - RNA, 32 nt, Homo Sapiens
ggccgaggucccgggggcggugccuugcgggc

SEQ ID NO: 67968 - RNA, 32 nt, Homo Sapiens
uccagcccaucccucugcagccugucaucccu

SEQ ID NO: 67969 - RNA, 32 nt, Homo Sapiens
accucucuccagcccacucuuccaaaauaaca

SEQ ID NO: 67970 - RNA, 32 nt, Homo Sapiens
ucccgaagcggccagcgccgggagcugcagcg

SEQ ID NO: 67971 - RNA, 32 nt, Homo Sapiens
uccgggaucccagcagccgccacgcccuggcc

SEQ ID NO: 67972 - RNA, 32 nt, Homo Sapiens
uguggcccuaaaauggugaaucagagcauauc

SEQ ID NO: 67973 - RNA, 32 nt, Homo Sapiens
gauguugaagcaauuuacucagucacaauuua

SEQ ID NO: 67974 - RNA, 32 nt, Homo Sapiens
cgauuucaugcaagucauugucacacuggcug

SEQ ID NO: 67975 - RNA, 32 nt, Homo Sapiens
cuaaaguuuccaucagaaggcucuuugaacug

SEQ ID NO: 67976 - RNA, 32 nt, Homo Sapiens
uccauauguucccuuuggguccuccagcuucc

SEQ ID NO: 67977 - RNA, 32 nt, Homo Sapiens
cuguugcccacuuuucaauaugaaggaggauc

SEQ ID NO: 67978 - RNA, 32 nt, Homo Sapiens
ucugucaguaugggaggauauaaacugcauca

SEQ ID NO: 67979 - RNA, 32 nt, Homo Sapiens
cucuucccaccgagccgagcuuacugugagug

SEQ ID NO: 67980 - RNA, 32 nt, Homo Sapiens
gggagacaaaaauaacugauccguugggugua

SEQ ID NO: 67981 - RNA, 32 nt, Homo Sapiens
uucuguuacugauauguaaguguggcaaugug

SEQ ID NO: 67982 - RNA, 32 nt, Homo Sapiens
aggcgccugggcugggggcggggaccaggcgg

SEQ ID NO: 67983 - RNA, 32 nt, Homo Sapiens
gaugguugccaccccuccugcuguaggaugga

SEQ ID NO: 67984 - RNA, 32 nt, Homo Sapiens
cuccacaaugaaaacaaauagugcaauguaag

SEQ ID NO: 67985 - RNA, 30 nt, Homo Sapiens
caacagccacuugcccgccacauucaaggu

SEQ ID NO: 67986 - RNA, 32 nt, Homo Sapiens
guaggucagaggucagcagugucuguggugua

SEQ ID NO: 67987 - RNA, 32 nt, Homo Sapiens
ucacaguuuagcauuguuauaaaccauuccau

SEQ ID NO: 67988 - RNA, 32 nt, Homo Sapiens
accccuccaucccaaccccugcaccacaggac

SEQ ID NO: 67989 - RNA, 32 nt, Homo Sapiens
gaugguuacucuuuuguaauucuuguccacuu

SEQ ID NO: 67990 - RNA, 32 nt, Homo Sapiens
uguucccuggggcuuuaacuccugcuagaaca

SEQ ID NO: 67991 - RNA, 32 nt, Homo Sapiens
aucagggggcugaguucccagcuccaugacag

SEQ ID NO: 67992 - RNA, 32 nt, Homo Sapiens
agauauguguguauauguaucaggaaaggcau

SEQ ID NO: 67993 - RNA, 32 nt, Homo Sapiens
caugaggcuacucggcuuggcccgcagguccu

SEQ ID NO: 67994 - RNA, 32 nt, Homo Sapiens
guccgggagaucugggaucucugguuguaucu

SEQ ID NO: 67995 - RNA, 32 nt, Homo Sapiens
uuaaugaaacauuguacaaauugucacucauu

SEQ ID NO: 67996 - RNA, 32 nt, Homo Sapiens
uggagccggaggaggaaggcggcggcgacgac

SEQ ID NO: 67997 - RNA, 32 nt, Homo Sapiens
gaguauacaauauauaaaaauauauauagugc

SEQ ID NO: 67998 - RNA, 32 nt, Homo Sapiens
aauuugaaaagaggaagaugcuaugaagaaaa

SEQ ID NO: 67999 - RNA, 32 nt, Homo Sapiens
aaaagugcugucagcaagucugaagaguuucc

SEQ ID NO: 68000 - RNA, 32 nt, Homo Sapiens
ccugcacucccacacgcccacccagcugugug

SEQ ID NO: 68001 - RNA, 31 nt, Homo Sapiens
ggcuuuugaaacacaacucagggcuuuugug

SEQ ID NO: 68002 - RNA, 32 nt, Homo Sapiens
cuggaguuccuccuccuucucacgcugacacu

SEQ ID NO: 68003 - RNA, 32 nt, Homo Sapiens
acaggcaggguuuggaacaguuuggagggcuc

SEQ ID NO: 68004 - RNA, 32 nt, Homo Sapiens
gauggaucaaggaaugggcuucugacagacau

SEQ ID NO: 68005 - RNA, 32 nt, Homo Sapiens
ggaaguugugaucaaguucaacuuuuugugcu

SEQ ID NO: 68006 - RNA, 32 nt, Homo Sapiens
gcugcaauauaauuuagcuauaaucguaguuu

SEQ ID NO: 68007 - RNA, 32 nt, Homo Sapiens
ugcuggcugccagcugcugcgccccccaugua

SEQ ID NO: 68008 - RNA, 32 nt, Homo Sapiens
uacugauauucuucuaaagaguaaaucucauc

SEQ ID NO: 68009 - RNA, 28 nt, Homo Sapiens
cuauugauguuuuucauuauaaauuugu

SEQ ID NO: 68010 - RNA, 32 nt, Homo Sapiens
gcccagaugccaucacaucccugauacugugu

SEQ ID NO: 68011 - RNA, 32 nt, Homo Sapiens
caccgaggaagacaugugguuugacgacgugg

SEQ ID NO: 68012 - RNA, 30 nt, Homo Sapiens
ugcagaugucugaccugcaggcggcugagg

SEQ ID NO: 68013 - RNA, 32 nt, Homo Sapiens
ugcugcuggugugaggucaucuccggagcguu

SEQ ID NO: 68014 - RNA, 32 nt, Homo Sapiens
augguaaaaacaugcauauuuacugcagaaaa

SEQ ID NO: 68015 - RNA, 32 nt, Homo Sapiens
cuugcucagacugucccggcggccggagugac

SEQ ID NO: 68016 - RNA, 32 nt, Homo Sapiens
cgucuuuccccucccaucuccucagaucggug

SEQ ID NO: 68017 - RNA, 32 nt, Homo Sapiens
gacguucagggucuuuccucuaccaggugagc

SEQ ID NO: 68018 - RNA, 32 nt, Homo Sapiens
agcugugcacuugccuuguugcugaaguucca

SEQ ID NO: 68019 - RNA, 32 nt, Homo Sapiens
cuuuucagugcaucccaccucccugucgcccc

SEQ ID NO: 68020 - RNA, 32 nt, Homo Sapiens
gguuucaccauguuggacaggcuggucuggaa

SEQ ID NO: 68021 - RNA, 32 nt, Homo Sapiens
ccagcucccuucccuccccguuguccuguccc

SEQ ID NO: 68022 - RNA, 32 nt, Homo Sapiens
gauaauuggcuacuuuuccauuguuuccuccu

SEQ ID NO: 68023 - RNA, 32 nt, Homo Sapiens
agaggcaggaggacagaggggcuggucucagg

SEQ ID NO: 68024 - RNA, 32 nt, Homo Sapiens
caauguuuuguuuucuuauaauuaaaaaguaa

SEQ ID NO: 68025 - RNA, 32 nt, Homo Sapiens
aauuuuagaaaagaggacagagccaugcaguc

SEQ ID NO: 68026 - RNA, 32 nt, Homo Sapiens
uuugaauuuuguacuuuucagaauauuaucgu

SEQ ID NO: 68027 - RNA, 32 nt, Homo Sapiens
gauuuaggaacaaaaauugggaggguuaaaga

SEQ ID NO: 68028 - RNA, 32 nt, Homo Sapiens
auuauaauaucugcuauuuuuaaaagacagcu

SEQ ID NO: 68029 - RNA, 32 nt, Homo Sapiens
ggaaaggcgggugcacaggacucggcccccuc

SEQ ID NO: 68030 - RNA, 32 nt, Homo Sapiens
guguugugagccaucaggacuccaucacucgu

SEQ ID NO: 68031 - RNA, 32 nt, Homo Sapiens
gauggggucucaccauguuacccaggcugguc

SEQ ID NO: 68032 - RNA, 32 nt, Homo Sapiens
uuuguaagaaaagaggagaauggagaaucuau

SEQ ID NO: 68033 - RNA, 32 nt, Homo Sapiens
ucaucuuugccacuucccucuucuuuguccag

SEQ ID NO: 68034 - RNA, 32 nt, Homo Sapiens
cuguguugacuucaauuuuggagcgcaguagc

SEQ ID NO: 68035 - RNA, 32 nt, Homo Sapiens
ugcgaggagcgugcccaagggcgaagguccag

SEQ ID NO: 68036 - RNA, 29 nt, Homo Sapiens
acaaaaugagugauguguguagagugcuu

SEQ ID NO: 68037 - RNA, 32 nt, Homo Sapiens
ccuuuuucuuucucuuuuuuuuuuuguauauu

SEQ ID NO: 68038 - RNA, 32 nt, Homo Sapiens
aucuuaucaaaauaaaauuauuaaugagauug

SEQ ID NO: 68039 - RNA, 32 nt, Homo Sapiens
agauguugcccauuuguaggugguaaaaucaa

SEQ ID NO: 68040 - RNA, 26 nt, Homo Sapiens
cagaaauaaaguuuaauuuuugcuug

SEQ ID NO: 68041 - RNA, 32 nt, Homo Sapiens
gacucccagucuguaugcacaaggcgggaugu

SEQ ID NO: 68042 - RNA, 32 nt, Homo Sapiens
aguaauuuuuggauaagguaugcugaagaauc

SEQ ID NO: 68043 - RNA, 32 nt, Homo Sapiens
gccgagacuggcggggguggacgcccgggccg

SEQ ID NO: 68044 - RNA, 32 nt, Homo Sapiens
agggcgcggcccggguucccguuccccgcgga

SEQ ID NO: 68045 - RNA, 32 nt, Homo Sapiens
ggaggaggcguggugggacugcggcugcauuu

SEQ ID NO: 68046 - RNA, 32 nt, Homo Sapiens
aauuauuugauuguuuuaauccuaaagcauaa

SEQ ID NO: 68047 - RNA, 32 nt, Homo Sapiens
uuggcagccuggcuuccaggccccacacagac

SEQ ID NO: 68048 - RNA, 32 nt, Homo Sapiens
uuucggugcgcucacggggccgugccaccguc

SEQ ID NO: 68049 - RNA, 32 nt, Homo Sapiens
ugagguggaggcggagggaggcggcggcggcg

SEQ ID NO: 68050 - RNA, 32 nt, Homo Sapiens
uguucuuugggaacugaaguauauccguugcc

SEQ ID NO: 68051 - RNA, 32 nt, Homo Sapiens
gauaguuucuccuagcucagacuuaaccauuu

SEQ ID NO: 68052 - RNA, 32 nt, Homo Sapiens
ucccucagccucaguuuucucaucuguaaagu

SEQ ID NO: 68053 - RNA, 32 nt, Homo Sapiens
uucuaaauuggaauaaaugacuuggucuuugc

SEQ ID NO: 68054 - RNA, 32 nt, Homo Sapiens
uacaagaacuugaaguuuuuuuuuuaauuuuu

SEQ ID NO: 68055 - RNA, 27 nt, Homo Sapiens
ccuuuuccuuucuucagccuaacccgc

SEQ ID NO: 68056 - RNA, 32 nt, Homo Sapiens
ugagcgcacgcgaggcggcgaggcggcaagcg

SEQ ID NO: 68057 - RNA, 32 nt, Homo Sapiens
gauucccaggggccuuuuuuuuuuuuuuuuuu

SEQ ID NO: 68058 - RNA, 32 nt, Homo Sapiens
ugcagacaaacgcagacagaagggaacuuaag

SEQ ID NO: 68059 - RNA, 32 nt, Homo Sapiens
uaacacucacugccaaggucuucagcuucacu

SEQ ID NO: 68060 - RNA, 32 nt, Homo Sapiens
gccuggaucccgggccguuauccaucuggagg

SEQ ID NO: 68061 - RNA, 32 nt, Homo Sapiens
ggagccugccaggcugacgugcaucccaccca

SEQ ID NO: 68062 - RNA, 32 nt, Homo Sapiens
ggggucaugcccuccucucccauugucccucu

SEQ ID NO: 68063 - RNA, 32 nt, Homo Sapiens
augugacaauaaaaaacuuauuuaaucaugaa

SEQ ID NO: 68064 - RNA, 32 nt, Homo Sapiens
ccaauuuuuuauucuuuauuucucaaauggaa

SEQ ID NO: 68065 - RNA, 32 nt, Homo Sapiens
uauggacuccguccuugaggaggaucucaugg

SEQ ID NO: 68066 - RNA, 32 nt, Homo Sapiens
ccaccccccuguacagaaugucugcuuugggu

SEQ ID NO: 68067 - RNA, 32 nt, Homo Sapiens
acuuuguuuuuccgcaauugaagguuguaugu

SEQ ID NO: 68068 - RNA, 32 nt, Homo Sapiens
ccugagaguucacuuuuacuuuucuuaaacuu

SEQ ID NO: 68069 - RNA, 31 nt, Homo Sapiens
agagugggaggaaggcggggaguccagguuc

SEQ ID NO: 68070 - RNA, 32 nt, Homo Sapiens
ucucccccucuguuaagucccucccccucgcc

SEQ ID NO: 68071 - RNA, 32 nt, Homo Sapiens
uuccauccugccccuucuucuacuccacggag

SEQ ID NO: 68072 - RNA, 32 nt, Homo Sapiens
cagcccaucuucucccgcuucuugcgcuccuu

SEQ ID NO: 68073 - RNA, 32 nt, Homo Sapiens
cauaaucuauagaacuaugaagauuacuggau

SEQ ID NO: 68074 - RNA, 32 nt, Homo Sapiens
gggauaauuuaaauuugaaaccuaaguuauau

SEQ ID NO: 68075 - RNA, 32 nt, Homo Sapiens
acugauuuuuaaauuuuaauuuguauuuuccc

SEQ ID NO: 68076 - RNA, 32 nt, Homo Sapiens
cugaugaugaguaugccuuagauggaaaauuu

SEQ ID NO: 68077 - RNA, 32 nt, Homo Sapiens
ugaagaaaaucuguucuuaauauauuucauua

SEQ ID NO: 68078 - RNA, 32 nt, Homo Sapiens
ggggaagagcacagcccucccgccccuucccc

SEQ ID NO: 68079 - RNA, 32 nt, Homo Sapiens
ugagcacuuugaauuuuuuuuaugucuaaaau

SEQ ID NO: 68080 - RNA, 32 nt, Homo Sapiens
caaaggaugggggaaagaaguagguucuguuu

SEQ ID NO: 68081 - RNA, 32 nt, Homo Sapiens
acaacuucgaggaaacauuuaaccaaagacca

SEQ ID NO: 68082 - RNA, 32 nt, Homo Sapiens
uuauuuuaaagucuuagcaauuucuauuacaa

SEQ ID NO: 68083 - RNA, 32 nt, Homo Sapiens
gugcaggaguuugacaguggccugcugcacug

SEQ ID NO: 68084 - RNA, 32 nt, Homo Sapiens
cugcuguguuuuuucuucagugauaaauaaaa

SEQ ID NO: 68085 - RNA, 32 nt, Homo Sapiens
ugugcauuaucuagauacuguaucaugacaaa

SEQ ID NO: 68086 - RNA, 32 nt, Homo Sapiens
gccgcuccagcccgaggcgccccgaccccgcg

SEQ ID NO: 68087 - RNA, 32 nt, Homo Sapiens
uaagaugaacugaguucuaaagaagauaacag

SEQ ID NO: 68088 - RNA, 32 nt, Homo Sapiens
cggccccgccccaguacagccugcugaagcag

SEQ ID NO: 68089 - RNA, 32 nt, Homo Sapiens
gacgcaguguuucaugggguccuguguggguc

SEQ ID NO: 68090 - RNA, 32 nt, Homo Sapiens
aagauacaaaaauuugcugagcgugguggugu

SEQ ID NO: 68091 - RNA, 32 nt, Homo Sapiens
auaggacaagcacagguuugugauccucagga

SEQ ID NO: 68092 - RNA, 32 nt, Homo Sapiens
guacuggcgaaugccucucccuccccccacau

SEQ ID NO: 68093 - RNA, 32 nt, Homo Sapiens
gucucuacaacuuugaauaaagggaaaugccc

SEQ ID NO: 68094 - RNA, 32 nt, Homo Sapiens
caauuacaacgcuuuccucuacuuuucuccaa

SEQ ID NO: 68095 - RNA, 32 nt, Homo Sapiens
agaggcgugucugugaagacagguaccaggau

SEQ ID NO: 68096 - RNA, 30 nt, Homo Sapiens
ccagacgucugugcugccugguuugcaucc

SEQ ID NO: 68097 - RNA, 32 nt, Homo Sapiens
aucacuucaaguggaaucauggcugcagucac

SEQ ID NO: 68098 - RNA, 32 nt, Homo Sapiens
uucuaauauaaugacuuauaugcugaauugaa

SEQ ID NO: 68099 - RNA, 32 nt, Homo Sapiens
uaucuucauuucuccuucuuacaguuuccuug

SEQ ID NO: 68100 - RNA, 32 nt, Homo Sapiens
gcgacugaaaauagaaugagcuugguuaagca

SEQ ID NO: 68101 - RNA, 32 nt, Homo Sapiens
cuggccucccgccgcugugcauugcagcauua

SEQ ID NO: 68102 - RNA, 32 nt, Homo Sapiens
uuuacacgccccagccggcgaccgguuccauc

SEQ ID NO: 68103 - RNA, 28 nt, Homo Sapiens
agccauuugucaauaaaccauuucuaag

SEQ ID NO: 68104 - RNA, 32 nt, Homo Sapiens
cuuucucaggaaauauuuugggaaauggggua

SEQ ID NO: 68105 - RNA, 29 nt, Homo Sapiens
gaccagccuggacaacauggcaagaccca

SEQ ID NO: 68106 - RNA, 32 nt, Homo Sapiens
gggacauauauuugaagaaauaaugguagaaa

SEQ ID NO: 68107 - RNA, 32 nt, Homo Sapiens
cagugcgggccagggaggaaaaccagagcaca

SEQ ID NO: 68108 - RNA, 32 nt, Homo Sapiens
gagcggccgggagcccgccgcgcugguagcga

SEQ ID NO: 68109 - RNA, 32 nt, Homo Sapiens
uccuguacauauauuuaagugacaaacacggu

SEQ ID NO: 68110 - RNA, 32 nt, Homo Sapiens
uuggcgggggcggagggcaggggaacgggauc

SEQ ID NO: 68111 - RNA, 32 nt, Homo Sapiens
caugcugucccuucauugaauuuuagaaugau

SEQ ID NO: 68112 - RNA, 32 nt, Homo Sapiens
uuguacagcugucauuugauaaagaagguuga

SEQ ID NO: 68113 - RNA, 32 nt, Homo Sapiens
cugacauagaaagacaaauacuacaugaucuc

SEQ ID NO: 68114 - RNA, 32 nt, Homo Sapiens
ugaaggagauguuugauguggaauaugaugaa

SEQ ID NO: 68115 - RNA, 32 nt, Homo Sapiens
caucuugccuuaucuuuuuuuauuacugugua

SEQ ID NO: 68116 - RNA, 32 nt, Homo Sapiens
agguuggcgggggcacgugugggccguggcuu

SEQ ID NO: 68117 - RNA, 32 nt, Homo Sapiens
gcuuaaaauuucugcagaaaacaaacagcuuc

SEQ ID NO: 68118 - RNA, 32 nt, Homo Sapiens
ccuggucccgcgcgccagcaugggagagcgag

SEQ ID NO: 68119 - RNA, 32 nt, Homo Sapiens
uuaaauuauccaaauuuuaggcaaauuauuau

SEQ ID NO: 68120 - RNA, 32 nt, Homo Sapiens
guugugucaggagauuugaggaacuucugacu

SEQ ID NO: 68121 - RNA, 32 nt, Homo Sapiens
ggcagcacuguccagcacgugccugcuccugu

SEQ ID NO: 68122 - RNA, 32 nt, Homo Sapiens
uuuauaguuuuggggaagaaaauaucaugggg

SEQ ID NO: 68123 - RNA, 32 nt, Homo Sapiens
ggagaccgugcagggccccggcgugucguggg

SEQ ID NO: 68124 - RNA, 32 nt, Homo Sapiens
uuauacuuaaagaaacaaaggaguugaaauaa

SEQ ID NO: 68125 - RNA, 32 nt, Homo Sapiens
cucagacccgcuuccuggggucgcgaacuucc

SEQ ID NO: 68126 - RNA, 32 nt, Homo Sapiens
caaauggaaaccgagggaacccugggucuugg

SEQ ID NO: 68127 - RNA, 32 nt, Homo Sapiens
gcucaucacugacuuuggagaagccaggggcc

SEQ ID NO: 68128 - RNA, 32 nt, Homo Sapiens
gucauccuggaggacauugugucagcagugaa

SEQ ID NO: 68129 - RNA, 32 nt, Homo Sapiens
ucagguuuccauuccuuggggacacacggcug

SEQ ID NO: 68130 - RNA, 32 nt, Homo Sapiens
ccaggcacucauauggcggggugggguccuag

SEQ ID NO: 68131 - RNA, 32 nt, Homo Sapiens
aucuauacaccuguguaaccaccaccaccugu

SEQ ID NO: 68132 - RNA, 32 nt, Homo Sapiens
uuuaggagaaaguaaguugcuuugcacggcuu

SEQ ID NO: 68133 - RNA, 32 nt, Homo Sapiens
auuggaauggauuuaaagcgucaauuccaaag

SEQ ID NO: 68134 - RNA, 32 nt, Homo Sapiens
cuugccauauccugccgggcagcaagcucuac

SEQ ID NO: 68135 - RNA, 32 nt, Homo Sapiens
aucauuccuuuuuauuuauauguauguguuua

SEQ ID NO: 68136 - RNA, 32 nt, Homo Sapiens
aaaguuauaguuuucuuacaaguuaaaaaaac

SEQ ID NO: 68137 - RNA, 32 nt, Homo Sapiens
acucaaaugcuaaacaggacacaggggucuga

SEQ ID NO: 68138 - RNA, 32 nt, Homo Sapiens
cucaacuucaggaggagcuggaugcuaagauc

SEQ ID NO: 68139 - RNA, 32 nt, Homo Sapiens
uaaucauugccaucgugugcuuguuucaucca

SEQ ID NO: 68140 - RNA, 32 nt, Homo Sapiens
gccauaaagaucuggaucucuugguggggacu

SEQ ID NO: 68141 - RNA, 32 nt, Homo Sapiens
ugauggccucccagcccugcuagguggccggc

SEQ ID NO: 68142 - RNA, 32 nt, Homo Sapiens
gccaggucuggugagaaaugggcccccauacc

SEQ ID NO: 68143 - RNA, 32 nt, Homo Sapiens
agcucugcaccaagcggaccuaggagacaugu

SEQ ID NO: 68144 - RNA, 32 nt, Homo Sapiens
aauuagaaaugaauuuggagugcuuuuuaugu

SEQ ID NO: 68145 - RNA, 32 nt, Homo Sapiens
aaguugcaggcuuggcagcugugggaccuggg

SEQ ID NO: 68146 - RNA, 32 nt, Homo Sapiens
auucguuuccaaaacuauugcuacuuugugug

SEQ ID NO: 68147 - RNA, 32 nt, Homo Sapiens
cuccugguguugcaaauagaagauucagcugg

SEQ ID NO: 68148 - RNA, 31 nt, Homo Sapiens
caggcuuugugcugagugcuguacauguauu

SEQ ID NO: 68149 - RNA, 32 nt, Homo Sapiens
gguucuuuguggaccuaggcaguuccugacug

SEQ ID NO: 68150 - RNA, 32 nt, Homo Sapiens
auaacuaguagcuuuucuuacuguuagugaac

SEQ ID NO: 68151 - RNA, 32 nt, Homo Sapiens
acuagaaggcaggcugccucagggccacacac

SEQ ID NO: 68152 - RNA, 32 nt, Homo Sapiens
agggccagcuccgggaccucuguccuccaguu

SEQ ID NO: 68153 - RNA, 32 nt, Homo Sapiens
agccaggaucaagaagcaguugaggcuagagg

SEQ ID NO: 68154 - RNA, 32 nt, Homo Sapiens
aacgaccgagaccgaagauuggcuacuguaaa

SEQ ID NO: 68155 - RNA, 31 nt, Homo Sapiens
ugagccucacggaggccaugcuccagaacau

SEQ ID NO: 68156 - RNA, 31 nt, Homo Sapiens
uacuacuaugauauacaagugcuguugagca

SEQ ID NO: 68157 - RNA, 32 nt, Homo Sapiens
uuagaauggcuguauuuacccaaugccuguac

SEQ ID NO: 68158 - RNA, 32 nt, Homo Sapiens
ucuacuaaaaauacaaaaauuauccgggcaug

SEQ ID NO: 68159 - RNA, 32 nt, Homo Sapiens
cagcugcaagguggggccggacuccccggcgu

SEQ ID NO: 68160 - RNA, 32 nt, Homo Sapiens
uaucuuggauguuuuagauugaaacagccuga

SEQ ID NO: 68161 - RNA, 32 nt, Homo Sapiens
agcaacaugaccaagggccaggagcugcugcu

SEQ ID NO: 68162 - RNA, 31 nt, Homo Sapiens
agcggauguggcgggugaucgagccacccug

SEQ ID NO: 68163 - RNA, 30 nt, Homo Sapiens
gucucaggcaggcccugcgccuccuaugcg

SEQ ID NO: 68164 - RNA, 32 nt, Homo Sapiens
gagccugggucgucuccagccucacucgcccu

SEQ ID NO: 68165 - RNA, 32 nt, Homo Sapiens
gccagggauggcgccagggcgguggccugugg

SEQ ID NO: 68166 - RNA, 32 nt, Homo Sapiens
ucagauguuuuuauuuuauauuauuauuauag

SEQ ID NO: 68167 - RNA, 32 nt, Homo Sapiens
gggauagagucuugcucuuucgccaaggcugg

SEQ ID NO: 68168 - RNA, 32 nt, Homo Sapiens
aagcccuggggcccggcccucucugcaucucu

SEQ ID NO: 68169 - RNA, 32 nt, Homo Sapiens
agacgccggggacagaggccugcccgggcgcg

SEQ ID NO: 68170 - RNA, 32 nt, Homo Sapiens
gacacagucucacuucauuacccaggcuggag

SEQ ID NO: 68171 - RNA, 28 nt, Homo Sapiens
gacaugaauuuugaacauuugauaaugc

SEQ ID NO: 68172 - RNA, 32 nt, Homo Sapiens
uucccugaacacacuguauaaacucuuuuuag

SEQ ID NO: 68173 - RNA, 32 nt, Homo Sapiens
cuuccccgaucucagugugaccucagaacacc

SEQ ID NO: 68174 - RNA, 32 nt, Homo Sapiens
ucuuacuuuccacuuucuaaauaccuuccaag

SEQ ID NO: 68175 - RNA, 32 nt, Homo Sapiens
cuauuuuaaaagauuaaagaaaggcagauguc

SEQ ID NO: 68176 - RNA, 32 nt, Homo Sapiens
ugaaggcacauauguucuuuuagguuccauga

SEQ ID NO: 68177 - RNA, 32 nt, Homo Sapiens
agaauuuucuucacaaauuucugacaacugau

SEQ ID NO: 68178 - RNA, 32 nt, Homo Sapiens
cagucccgggauuuuaggaagaagaaagaaga

SEQ ID NO: 68179 - RNA, 32 nt, Homo Sapiens
ucauuauaaaauguaaugcugaaggguuucuu

SEQ ID NO: 68180 - RNA, 32 nt, Homo Sapiens
uaaaucagauuuaugaaacauaacuuauaugc

SEQ ID NO: 68181 - RNA, 32 nt, Homo Sapiens
uggauuuuucauauuucuuauuaaaauuucug

SEQ ID NO: 68182 - RNA, 32 nt, Homo Sapiens
caaagaaauguguuauacuagauaauuuuuuu

SEQ ID NO: 68183 - RNA, 32 nt, Homo Sapiens
gggcugggggagagggaagguacagagagcgg

SEQ ID NO: 68184 - RNA, 32 nt, Homo Sapiens
gauuggccagcaaaaacugugggaagaugaac

SEQ ID NO: 68185 - RNA, 32 nt, Homo Sapiens
uaucaucuuugaaaaauaauucacucuugaag

SEQ ID NO: 68186 - RNA, 32 nt, Homo Sapiens
cugccaucuuccuagaaucccuuuaaauccuc

SEQ ID NO: 68187 - RNA, 29 nt, Homo Sapiens
caugagcuguguuucaggggccacuaaau

SEQ ID NO: 68188 - RNA, 32 nt, Homo Sapiens
uaaagaauucuugaaauucucuaauaaaaagc

SEQ ID NO: 68189 - RNA, 32 nt, Homo Sapiens
gauauuaaagcuggguacuaagaaauguuauu

SEQ ID NO: 68190 - RNA, 28 nt, Homo Sapiens
ccaauauacaaauaaaccaauggaaaag

SEQ ID NO: 68191 - RNA, 32 nt, Homo Sapiens
acacacccuuggaacaaaucugccccagaagu

SEQ ID NO: 68192 - RNA, 32 nt, Homo Sapiens
ugcagacccagcuggauggugggcucgugcug

SEQ ID NO: 68193 - RNA, 32 nt, Homo Sapiens
uacuggcggccgccuuccucugcgacagcggc

SEQ ID NO: 68194 - RNA, 32 nt, Homo Sapiens
ggagcaccuggccagcugucucauuuuaaauc

SEQ ID NO: 68195 - RNA, 32 nt, Homo Sapiens
cuucgagaggaugccauggccacacucagcug

SEQ ID NO: 68196 - RNA, 32 nt, Homo Sapiens
gaagauaugacggcguggaugccagaggugcu

SEQ ID NO: 68197 - RNA, 32 nt, Homo Sapiens
cccggccccacuuccaccuugcgcauuuggua

SEQ ID NO: 68198 - RNA, 32 nt, Homo Sapiens
ugccuuaaucuuuaucuuuguaaugccacaau

SEQ ID NO: 68199 - RNA, 32 nt, Homo Sapiens
uuuaggacaaagucagccagacaccuuguacu

SEQ ID NO: 68200 - RNA, 30 nt, Homo Sapiens
aagcgggcgcccgccgccgagccgucuccu

SEQ ID NO: 68201 - RNA, 32 nt, Homo Sapiens
uuuucccuuaagagacaaguccuuacuauauu

SEQ ID NO: 68202 - RNA, 32 nt, Homo Sapiens
cgggcucucccggcccugccucccagcaagua

SEQ ID NO: 68203 - RNA, 32 nt, Homo Sapiens
gcugccccgaacuuaaaugcuuuugaaaucuc

SEQ ID NO: 68204 - RNA, 32 nt, Homo Sapiens
ccccaccggggcccgggcgagcauggggggca

SEQ ID NO: 68205 - RNA, 32 nt, Homo Sapiens
agcuggccggaggcgcgccgcggagagccggc

SEQ ID NO: 68206 - RNA, 31 nt, Homo Sapiens
agcgccaugagacuccucccccgcuugcugc

SEQ ID NO: 68207 - RNA, 32 nt, Homo Sapiens
caggccugaaaagaaagugcucucucagaugg

SEQ ID NO: 68208 - RNA, 30 nt, Homo Sapiens
guuccacccucugugccgccgccgccuccu

SEQ ID NO: 68209 - RNA, 32 nt, Homo Sapiens
aacaugaggaaugauucacugaagaugaaaag

SEQ ID NO: 68210 - RNA, 32 nt, Homo Sapiens
ggcauuuccaagccccaccucccucuccaagu

SEQ ID NO: 68211 - RNA, 32 nt, Homo Sapiens
aauuugucaccauugaggaacaucaucaauug

SEQ ID NO: 68212 - RNA, 32 nt, Homo Sapiens
uccagggacaacgcugcugaaaaaggccugga

SEQ ID NO: 68213 - RNA, 32 nt, Homo Sapiens
guucuuuagcuacuugaauccgauuuacuucu

SEQ ID NO: 68214 - RNA, 32 nt, Homo Sapiens
uauuuaaguugaacacuugucaauguuuuauu

SEQ ID NO: 68215 - RNA, 32 nt, Homo Sapiens
cuggacccuaggucacggcaaucaacccccug

SEQ ID NO: 68216 - RNA, 32 nt, Homo Sapiens
aggaacaccuggcuccagccacguucacagac

SEQ ID NO: 68217 - RNA, 32 nt, Homo Sapiens
cccuuuuaggaacacaauguuguaccuuuauc

SEQ ID NO: 68218 - RNA, 32 nt, Homo Sapiens
agcugaugcuauuguacuugcacauuggagac

SEQ ID NO: 68219 - RNA, 32 nt, Homo Sapiens
accagaaauaaacuaaagauuagagcauguuc

SEQ ID NO: 68220 - RNA, 32 nt, Homo Sapiens
gcacuucuagccaguagcucugcacaaguuag

SEQ ID NO: 68221 - RNA, 32 nt, Homo Sapiens
ugugcaugaaacaaaguuucgacugcauuuug

SEQ ID NO: 68222 - RNA, 32 nt, Homo Sapiens
cgaccugguguugggucugaacaccccaacau

SEQ ID NO: 68223 - RNA, 32 nt, Homo Sapiens
guccagagaagcugggcuugagggaggcagca

SEQ ID NO: 68224 - RNA, 32 nt, Homo Sapiens
ucgaaccuugaccgacaugaacuguacacaga

SEQ ID NO: 68225 - RNA, 32 nt, Homo Sapiens
ccuagcugccccagcccagucuuucuccccgg

SEQ ID NO: 68226 - RNA, 32 nt, Homo Sapiens
ucagcuguguggucaaacaguagucuagaugu

SEQ ID NO: 68227 - RNA, 32 nt, Homo Sapiens
gcuaggcugacccuccugcuggugacggaagu

SEQ ID NO: 68228 - RNA, 32 nt, Homo Sapiens
uugccuagaucccuguauuccaaaaccugcug

SEQ ID NO: 68229 - RNA, 32 nt, Homo Sapiens
gaccgucggcacacugcuguuccuccaguucc

SEQ ID NO: 68230 - RNA, 31 nt, Homo Sapiens
uaugaugagccccagggcccauccugagguc

SEQ ID NO: 68231 - RNA, 32 nt, Homo Sapiens
acaaaugcccccaucccauggggguaauaaga

SEQ ID NO: 68232 - RNA, 32 nt, Homo Sapiens
ggaggagaggggcugcugugcaggggugugga

SEQ ID NO: 68233 - RNA, 32 nt, Homo Sapiens
gagaugagccccacguggagcucgggacggau

SEQ ID NO: 68234 - RNA, 32 nt, Homo Sapiens
augcuacuauuaugcucuguuuuaaagguuuu

SEQ ID NO: 68235 - RNA, 32 nt, Homo Sapiens
aaucuucacguuuuugcaaacuuugauuuuua

SEQ ID NO: 68236 - RNA, 32 nt, Homo Sapiens
ucuagccucggccagggcugcucugcucuccg

SEQ ID NO: 68237 - RNA, 29 nt, Homo Sapiens
uuuaagggacgucaguguuuaugccauuu

SEQ ID NO: 68238 - RNA, 32 nt, Homo Sapiens
cagaaaacagagacagaagacaaagagaaaga

SEQ ID NO: 68239 - RNA, 32 nt, Homo Sapiens
gacagucagggugaccccaccgccuaccucuc

SEQ ID NO: 68240 - RNA, 32 nt, Homo Sapiens
gacaugaauugaugauauuaguaauauuuaua

SEQ ID NO: 68241 - RNA, 32 nt, Homo Sapiens
cuguucgcucugcgaguggcucgccagcgaag

SEQ ID NO: 68242 - RNA, 32 nt, Homo Sapiens
gcguccacgcagccgccggccggccagcaccc

SEQ ID NO: 68243 - RNA, 32 nt, Homo Sapiens
ugguuaucacuuuaaguuuugacaccuagauu

SEQ ID NO: 68244 - RNA, 32 nt, Homo Sapiens
ugaacgugaugaugaucuguggccagugggag

SEQ ID NO: 68245 - RNA, 32 nt, Homo Sapiens
ugcugucuuuaacuuaaucaaugcccguaaca

SEQ ID NO: 68246 - RNA, 32 nt, Homo Sapiens
guugaggagacuggaggaaaagagagcugguc

SEQ ID NO: 68247 - RNA, 32 nt, Homo Sapiens
aagcugcguggcauuucagagauacuuauuuu

SEQ ID NO: 68248 - RNA, 32 nt, Homo Sapiens
agggaccacagugacuuauuuguaguuguuag

SEQ ID NO: 68249 - RNA, 32 nt, Homo Sapiens
accuguuuacuuugugcuaacagugccggagc

SEQ ID NO: 68250 - RNA, 32 nt, Homo Sapiens
gagguguuagcuugcuagugacuagcuuugga

SEQ ID NO: 68251 - RNA, 32 nt, Homo Sapiens
aaaacagaaaaccugaugcuggggacacagca

SEQ ID NO: 68252 - RNA, 32 nt, Homo Sapiens
gcugagaaagagaauucagugauauuucuccu

SEQ ID NO: 68253 - RNA, 32 nt, Homo Sapiens
gccgcccucacagugaaccaggccaugcggaa

SEQ ID NO: 68254 - RNA, 32 nt, Homo Sapiens
uaacaucuaaacaugcuucucauuuccagcca

SEQ ID NO: 68255 - RNA, 32 nt, Homo Sapiens
gggucuccuugaccaagcuggucucggcacau

SEQ ID NO: 68256 - RNA, 32 nt, Homo Sapiens
uaaggauagagcucuucaucucuguuagaaac

SEQ ID NO: 68257 - RNA, 32 nt, Homo Sapiens
auuuguugagaacuuguuuagaucaucacuau

SEQ ID NO: 68258 - RNA, 32 nt, Homo Sapiens
acgaggcgcccggccccuggccccagcacccu

SEQ ID NO: 68259 - RNA, 32 nt, Homo Sapiens
ccgaacugugcagcuccugcggcaccauuugu

SEQ ID NO: 68260 - RNA, 27 nt, Homo Sapiens
gggaacuccuucuucgccugcuggccu

SEQ ID NO: 68261 - RNA, 32 nt, Homo Sapiens
gccucgggacgccaguccgggaggcggccgga

SEQ ID NO: 68262 - RNA, 32 nt, Homo Sapiens
gaaucugaaaaauuauuucugacuuacuccau

SEQ ID NO: 68263 - RNA, 32 nt, Homo Sapiens
uguguccugcccuccgcccgaggcaaaacgua

SEQ ID NO: 68264 - RNA, 32 nt, Homo Sapiens
auccccacuacucaauacuaccucugaauguu

SEQ ID NO: 68265 - RNA, 27 nt, Homo Sapiens
ucccagcucuccuucagcccgccccaa

SEQ ID NO: 68266 - RNA, 32 nt, Homo Sapiens
accuagugccccagccgaaccugcccuggcuc

SEQ ID NO: 68267 - RNA, 32 nt, Homo Sapiens
guuuauaagagaauuucacaaacaaguaguuu

SEQ ID NO: 68268 - RNA, 32 nt, Homo Sapiens
uccaacaaggcaggaagggagaaggacagccc

SEQ ID NO: 68269 - RNA, 32 nt, Homo Sapiens
ccaccccccguccccauguccggccccucuag

SEQ ID NO: 68270 - RNA, 32 nt, Homo Sapiens
aguaucccauccccgcgacccccgcgcgcucc

SEQ ID NO: 68271 - RNA, 32 nt, Homo Sapiens
ucugauuuccgacgcgcacgcuaggggcccgg

SEQ ID NO: 68272 - RNA, 32 nt, Homo Sapiens
cccacaauucuuuugaaagaugguaaucuuuu

SEQ ID NO: 68273 - RNA, 32 nt, Homo Sapiens
uugucucugaagaugacuugugauuuuuuuuu

SEQ ID NO: 68274 - RNA, 32 nt, Homo Sapiens
gcgcuucgcaacguguccggcgcgcaguacau

SEQ ID NO: 68275 - RNA, 32 nt, Homo Sapiens
agaauuugagaggaggucccaacaucaucaca

SEQ ID NO: 68276 - RNA, 32 nt, Homo Sapiens
gaucgugcugccuuuguuaggcagauuuggag

SEQ ID NO: 68277 - RNA, 32 nt, Homo Sapiens
acagaaaaacuaaaagagugccccagauagcc

SEQ ID NO: 68278 - RNA, 32 nt, Homo Sapiens
uuuaugacacguauguacuagugaacaccguc

SEQ ID NO: 68279 - RNA, 32 nt, Homo Sapiens
aguagccaaugaggugcggggagggggccggg

SEQ ID NO: 68280 - RNA, 32 nt, Homo Sapiens
uugucagaaacacugaagccauuugccccagu

SEQ ID NO: 68281 - RNA, 32 nt, Homo Sapiens
cugaacgaaauggagaaacuggaaaagacccu

SEQ ID NO: 68282 - RNA, 32 nt, Homo Sapiens
uguugggucaguggagaugggugaggagcagc

SEQ ID NO: 68283 - RNA, 32 nt, Homo Sapiens
uccagccuggugcccgcccaccccgccaggcu

SEQ ID NO: 68284 - RNA, 32 nt, Homo Sapiens
aucugaagauucgaaugaaaagaaaugcaugu

SEQ ID NO: 68285 - RNA, 28 nt, Homo Sapiens
gcgucgcggcggccgccaggaagaaaca

SEQ ID NO: 68286 - RNA, 32 nt, Homo Sapiens
uauguuuuauuguagaccucacaauucuuuuu

SEQ ID NO: 68287 - RNA, 32 nt, Homo Sapiens
uggaggcugaaagaacacauggagagcagugu

SEQ ID NO: 68288 - RNA, 32 nt, Homo Sapiens
gcgcaggccuccuggaggaggaaguggaggcc

SEQ ID NO: 68289 - RNA, 32 nt, Homo Sapiens
gguggcaguggcccagccccagccucagggac

SEQ ID NO: 68290 - RNA, 32 nt, Homo Sapiens
ucacguucagcuucuuuuuauuugccuccuag

SEQ ID NO: 68291 - RNA, 32 nt, Homo Sapiens
uaauaauuuugaaauauuaaggucuugccaag

SEQ ID NO: 68292 - RNA, 32 nt, Homo Sapiens
caguggcccgucucaggcccugcucacucccg

SEQ ID NO: 68293 - RNA, 32 nt, Homo Sapiens
cgugcacccccgcuacgccccaccccgcgucu

SEQ ID NO: 68294 - RNA, 32 nt, Homo Sapiens
aucccacgcaguacaccccaaucucccaguuc

SEQ ID NO: 68295 - RNA, 32 nt, Homo Sapiens
ccuagccuugcagcugcagcagaaggagaaag

SEQ ID NO: 68296 - RNA, 32 nt, Homo Sapiens
cguucucugccgcccgcccacuccguuucccu

SEQ ID NO: 68297 - RNA, 32 nt, Homo Sapiens
auaauacccucuaauaaauaccucucugcuua

SEQ ID NO: 68298 - RNA, 32 nt, Homo Sapiens
cggccgguuuugguaggcccgggccgccgcca

SEQ ID NO: 68299 - RNA, 28 nt, Homo Sapiens
aguggaguggcuaaagggugaagaggua

SEQ ID NO: 68300 - RNA, 32 nt, Homo Sapiens
uugauauuuaauggaaaucaugcccaugaaua

SEQ ID NO: 68301 - RNA, 32 nt, Homo Sapiens
ugaguuuugucuuuuuccuuuagccuuagcag

SEQ ID NO: 68302 - RNA, 32 nt, Homo Sapiens
ccucucaauugucauugauacaugcauugcuc

SEQ ID NO: 68303 - RNA, 32 nt, Homo Sapiens
ccaaggauagguauuuuauagaugggcaacug

SEQ ID NO: 68304 - RNA, 32 nt, Homo Sapiens
uuaacugcuguauuuucauuucauuugugaaa

SEQ ID NO: 68305 - RNA, 32 nt, Homo Sapiens
uuccccauugcuccuuuccccauugcucaaug

SEQ ID NO: 68306 - RNA, 32 nt, Homo Sapiens
ugaacuggauuuuauaggcauuaaagacaagu

SEQ ID NO: 68307 - RNA, 32 nt, Homo Sapiens
agcaacuucgcgguguggugaacucucugagg

SEQ ID NO: 68308 - RNA, 32 nt, Homo Sapiens
gacuguuuuuaaaaaacuguuuggauuuuaau

SEQ ID NO: 68309 - RNA, 31 nt, Homo Sapiens
acccgcgggcacugccgacgcccccggggcu

SEQ ID NO: 68310 - RNA, 32 nt, Homo Sapiens
ccgcaccacccauccccgccucagggaaugca

SEQ ID NO: 68311 - RNA, 32 nt, Homo Sapiens
cgcccgccuucgccgcccggccucgagucccc

SEQ ID NO: 68312 - RNA, 32 nt, Homo Sapiens
gaaggugaugacuuaaauggcagggggugggg

SEQ ID NO: 68313 - RNA, 32 nt, Homo Sapiens
agaccagccugggcaacguagcaagaccuugc

SEQ ID NO: 68314 - RNA, 32 nt, Homo Sapiens
aagaaggggaguuuucugacaaaauggaggau

SEQ ID NO: 68315 - RNA, 32 nt, Homo Sapiens
ggguuuggggaagccucucagaggaggaggag

SEQ ID NO: 68316 - RNA, 32 nt, Homo Sapiens
cuuaaaauauccacaauauuccuugagugagu

SEQ ID NO: 68317 - RNA, 32 nt, Homo Sapiens
uggccaccgcgcccuccugcccacgggaggac

SEQ ID NO: 68318 - RNA, 32 nt, Homo Sapiens
gauguucuuuugcaaggcauagaacauuugua

SEQ ID NO: 68319 - RNA, 32 nt, Homo Sapiens
gucguugggcccggcgcgacccgcaggagcgu

SEQ ID NO: 68320 - RNA, 32 nt, Homo Sapiens
uacauguucuuccaucuccccagccaccugag

SEQ ID NO: 68321 - RNA, 32 nt, Homo Sapiens
uuccuaaugugaaaaccaucucucucaccacu

SEQ ID NO: 68322 - RNA, 32 nt, Homo Sapiens
acagcgucccauugagauuaugcugaugguug

SEQ ID NO: 68323 - RNA, 32 nt, Homo Sapiens
uggcaggcgacacguggaagaauacggaguuc

SEQ ID NO: 68324 - RNA, 32 nt, Homo Sapiens
aauagggcgggaaggcggugcagcaguggugg

SEQ ID NO: 68325 - RNA, 32 nt, Homo Sapiens
ccucuccuuccacuuucacagcuguccuuccc

SEQ ID NO: 68326 - RNA, 28 nt, Homo Sapiens
uucaauaaaaguuuaauugucuagugag

SEQ ID NO: 68327 - RNA, 32 nt, Homo Sapiens
gggccagcagugagacuaugagccaagcaaag

SEQ ID NO: 68328 - RNA, 32 nt, Homo Sapiens
uucccugccggcccgcgugccucccgccacgg

SEQ ID NO: 68329 - RNA, 32 nt, Homo Sapiens
ucuuuuuuuuuuuuuuuuuuuaagacggauuc

SEQ ID NO: 68330 - RNA, 32 nt, Homo Sapiens
ccaguccaagaaucuguuuaaauucagacuuc

SEQ ID NO: 68331 - RNA, 32 nt, Homo Sapiens
aauucugagauugagggcaggggcggagggcu

SEQ ID NO: 68332 - RNA, 32 nt, Homo Sapiens
acccgugcuuguuuccuuucucuuuuuguuug

SEQ ID NO: 68333 - RNA, 32 nt, Homo Sapiens
auuaugcacuguauuauaguuucuucgugugc

SEQ ID NO: 68334 - RNA, 32 nt, Homo Sapiens
aaacgagucuacguggacacgcaaguuucagc

SEQ ID NO: 68335 - RNA, 32 nt, Homo Sapiens
aaauuaaugcaaauuugagaugaacuaauaaa

SEQ ID NO: 68336 - RNA, 32 nt, Homo Sapiens
acuuugccacugugcccagcucuggcccagag

SEQ ID NO: 68337 - RNA, 32 nt, Homo Sapiens
uguuucccacccagcuaaaaaccguuguuugc

SEQ ID NO: 68338 - RNA, 32 nt, Homo Sapiens
gaaacaaugaaaggaacauuugaaagaaaaug

SEQ ID NO: 68339 - RNA, 32 nt, Homo Sapiens
gacacuccacacugccaggacacacccaggcg

SEQ ID NO: 68340 - RNA, 32 nt, Homo Sapiens
ugugaaucaaaaugaacacaacuuuuuccuuu

SEQ ID NO: 68341 - RNA, 32 nt, Homo Sapiens
aaagauguugucccuggggaacaguaacagga

SEQ ID NO: 68342 - RNA, 32 nt, Homo Sapiens
ggcggcggcggggcucacggcccgcgaugucu

SEQ ID NO: 68343 - RNA, 32 nt, Homo Sapiens
cugcccaucaccucccucuccccaacaucccc

SEQ ID NO: 68344 - RNA, 32 nt, Homo Sapiens
uccuggguaugccagaagaaaccuggaugaac

SEQ ID NO: 68345 - RNA, 32 nt, Homo Sapiens
ugcacgucuggcugcauucggaggaagaccug

SEQ ID NO: 68346 - RNA, 32 nt, Homo Sapiens
gcagccgcgggcccagggugcuguuggugucc

SEQ ID NO: 68347 - RNA, 32 nt, Homo Sapiens
gugcugcagaagguggugggacacccgagcug

SEQ ID NO: 68348 - RNA, 32 nt, Homo Sapiens
ccuugggagacggggcauugugagaauguaac

SEQ ID NO: 68349 - RNA, 32 nt, Homo Sapiens
acugugccaagccccaagaggauuacgcuucc

SEQ ID NO: 68350 - RNA, 32 nt, Homo Sapiens
aagggcuuuuuccgcagaaguauucagaagaa

SEQ ID NO: 68351 - RNA, 32 nt, Homo Sapiens
gagcgggagggaggcgggagucgggggaagac

SEQ ID NO: 68352 - RNA, 32 nt, Homo Sapiens
cagaccuucagccccagcuccagccacucacc

SEQ ID NO: 68353 - RNA, 32 nt, Homo Sapiens
caaggcagggguggaggggagggaccagcccg

SEQ ID NO: 68354 - RNA, 32 nt, Homo Sapiens
gcuuagaugauuaccacuugcuccucaauucu

SEQ ID NO: 68355 - RNA, 32 nt, Homo Sapiens
ggaggccaaggcaggcagaucgcuugagccca

SEQ ID NO: 68356 - RNA, 32 nt, Homo Sapiens
gacgcagcugggugcagaagcuguggggucgg

SEQ ID NO: 68357 - RNA, 31 nt, Homo Sapiens
guugugggggcgguggggaggucccagaggu

SEQ ID NO: 68358 - RNA, 32 nt, Homo Sapiens
uguauuuuccugaugugucacuuuuugauauc

SEQ ID NO: 68359 - RNA, 32 nt, Homo Sapiens
ugcuccguccacuccacgcaucgaccugguau

SEQ ID NO: 68360 - RNA, 32 nt, Homo Sapiens
uuaacaauuuaaaaaacguguuuaaagaauua

SEQ ID NO: 68361 - RNA, 32 nt, Homo Sapiens
aauguacacuggacaugaaaacaaagacuggu

SEQ ID NO: 68362 - RNA, 32 nt, Homo Sapiens
augaacagucuccucguguaucuccagagacu

SEQ ID NO: 68363 - RNA, 32 nt, Homo Sapiens
aaaacaaaaaagacaaaaccuaaaacugagcu

SEQ ID NO: 68364 - RNA, 32 nt, Homo Sapiens
uagacagaccucuguugagcagucagagucuu

SEQ ID NO: 68365 - RNA, 32 nt, Homo Sapiens
ucuaagggugguaaccacaggucgauuuuaau

SEQ ID NO: 68366 - RNA, 32 nt, Homo Sapiens
auuccgcggugcugggucuccgugccggggug

SEQ ID NO: 68367 - RNA, 32 nt, Homo Sapiens
ggucagugaauuaccacugccugugggccaaa

SEQ ID NO: 68368 - RNA, 32 nt, Homo Sapiens
gucacaaaaaaguuuguauaaagacauauuuu

SEQ ID NO: 68369 - RNA, 32 nt, Homo Sapiens
acaugggaugaagggagcacaaacauacugac

SEQ ID NO: 68370 - RNA, 32 nt, Homo Sapiens
gaggcaccaacccucagggagcccucagucug

SEQ ID NO: 68371 - RNA, 32 nt, Homo Sapiens
gcauuuccugucauuucggauccugcuauagg

SEQ ID NO: 68372 - RNA, 32 nt, Homo Sapiens
gaaauuacaaauauguguagaauauauuuaau

SEQ ID NO: 68373 - RNA, 30 nt, Homo Sapiens
ggcccugucugugccggccgugagcugcgg

SEQ ID NO: 68374 - RNA, 32 nt, Homo Sapiens
ugguuaauggacacagagaaccacugcuaaga

SEQ ID NO: 68375 - RNA, 32 nt, Homo Sapiens
uugucaugaaaagccauauaugggggacaugc

SEQ ID NO: 68376 - RNA, 29 nt, Homo Sapiens
ggcaagaaauaaacaugaccaauaucaau

SEQ ID NO: 68377 - RNA, 32 nt, Homo Sapiens
ccccuccccucccccguccugagcucccacuu

SEQ ID NO: 68378 - RNA, 32 nt, Homo Sapiens
cgggggagaggggacaccugcuuucagaaccg

SEQ ID NO: 68379 - RNA, 32 nt, Homo Sapiens
ggucugaccgccccgcugaggucucagaacag

SEQ ID NO: 68380 - RNA, 32 nt, Homo Sapiens
cuauuaaaaaaauaaauaggcagagcuaaacu

SEQ ID NO: 68381 - RNA, 32 nt, Homo Sapiens
ucuaggcccagcugaacccagguuaggggcag

SEQ ID NO: 68382 - RNA, 32 nt, Homo Sapiens
ugccaggaagcagguuggacagaaaccacuug

SEQ ID NO: 68383 - RNA, 32 nt, Homo Sapiens
gcagaagacaaggaaacugaagaagcuuuuua

SEQ ID NO: 68384 - RNA, 32 nt, Homo Sapiens
ggauucccugucacuaaacugcaccacuauac

SEQ ID NO: 68385 - RNA, 32 nt, Homo Sapiens
cuugugaaaacgcaaacaugaauaugguugga

SEQ ID NO: 68386 - RNA, 32 nt, Homo Sapiens
uuuaaaggccccacuaagggccauguuacuca

SEQ ID NO: 68387 - RNA, 32 nt, Homo Sapiens
ccuucaaucucuagugacaacacuuaauuucu

SEQ ID NO: 68388 - RNA, 32 nt, Homo Sapiens
aucuauguucaacagucaaaauguggaagcaa

SEQ ID NO: 68389 - RNA, 32 nt, Homo Sapiens
aacccgccgugaggugugagugugacgcaggg

SEQ ID NO: 68390 - RNA, 32 nt, Homo Sapiens
cuuaaauuauugcuuaaugguaucauauuaac

SEQ ID NO: 68391 - RNA, 32 nt, Homo Sapiens
uucuccugccccagccccagccccacccaccg

SEQ ID NO: 68392 - RNA, 32 nt, Homo Sapiens
uaauauuccuguuaaaggaaauuaaaguuugu

SEQ ID NO: 68393 - RNA, 32 nt, Homo Sapiens
aggaagaggagcuugagagucccuuggcuuug

SEQ ID NO: 68394 - RNA, 32 nt, Homo Sapiens
uugugauccagggaaugaaaagaaauuugacc

SEQ ID NO: 68395 - RNA, 32 nt, Homo Sapiens
agggugggcgggggcgggaggggcuagcgccc

SEQ ID NO: 68396 - RNA, 32 nt, Homo Sapiens
auaugcuuuugacuuuccuggacugauguaaa

SEQ ID NO: 68397 - RNA, 32 nt, Homo Sapiens
cacugccccagcccagccccagccucugcucu

SEQ ID NO: 68398 - RNA, 32 nt, Homo Sapiens
uaaaaaaugucuuuuuauuuugguuucagguu

SEQ ID NO: 68399 - RNA, 32 nt, Homo Sapiens
agccaguguucccucucuggugaugagcagug

SEQ ID NO: 68400 - RNA, 32 nt, Homo Sapiens
ccagauccgagaagccccggccaggcagcgau

SEQ ID NO: 68401 - RNA, 32 nt, Homo Sapiens
cuuuccuuuccacuuuuacccuguguucuuug

SEQ ID NO: 68402 - RNA, 32 nt, Homo Sapiens
ccgucugcuguuaauacuuccauccucuuccu

SEQ ID NO: 68403 - RNA, 32 nt, Homo Sapiens
uguaaacuauucuuguaauagcucauuauuuu

SEQ ID NO: 68404 - RNA, 32 nt, Homo Sapiens
cccuuagaucauauguggacuuauuaaaacua

SEQ ID NO: 68405 - RNA, 32 nt, Homo Sapiens
aagcugagccauauguacauaaucuagauuuu

SEQ ID NO: 68406 - RNA, 32 nt, Homo Sapiens
gggggacagggaggcaguagguccuggaaaag

SEQ ID NO: 68407 - RNA, 32 nt, Homo Sapiens
acuguuauauccucaacuuggauuuaugguaa

SEQ ID NO: 68408 - RNA, 32 nt, Homo Sapiens
aaggccaguuucugaucguccgccccgaggcu

SEQ ID NO: 68409 - RNA, 32 nt, Homo Sapiens
gagcuggcaccugugccuguaccuggagcugc

SEQ ID NO: 68410 - RNA, 27 nt, Homo Sapiens
ccauggagcaguauacagcaaacagca

SEQ ID NO: 68411 - RNA, 32 nt, Homo Sapiens
ccagagcaguugcuucaggcguuuucucccca

SEQ ID NO: 68412 - RNA, 32 nt, Homo Sapiens
guugguucaguauacacaaaucaauaaaugug

SEQ ID NO: 68413 - RNA, 32 nt, Homo Sapiens
acauacccaucugcaccgacgccugccccguc

SEQ ID NO: 68414 - RNA, 32 nt, Homo Sapiens
uuuuugaauuaacuuuuuuccauuaguauggu

SEQ ID NO: 68415 - RNA, 32 nt, Homo Sapiens
gcacgccugggccccagggccccuuugccggc

SEQ ID NO: 68416 - RNA, 32 nt, Homo Sapiens
auucuaguuuuaaaacugacugugaauuuuau

SEQ ID NO: 68417 - RNA, 32 nt, Homo Sapiens
uguguccacagugcucuuaccacugucuccuu

SEQ ID NO: 68418 - RNA, 32 nt, Homo Sapiens
caguaacucuguguacaaacauuuuaaugugg

SEQ ID NO: 68419 - RNA, 32 nt, Homo Sapiens
aucacccacaccggauggaaucucuagcuauu

SEQ ID NO: 68420 - RNA, 32 nt, Homo Sapiens
uccugcuugagcccugcuguauuugucugugu

SEQ ID NO: 68421 - RNA, 32 nt, Homo Sapiens
agccuugcgaacuuauacagucucagccacuc

SEQ ID NO: 68422 - RNA, 32 nt, Homo Sapiens
ucauaaaaaaaauuaauaaacuuuaguuguac

SEQ ID NO: 68423 - RNA, 32 nt, Homo Sapiens
cuccagagauguagcuauuaugcgcccgucua

SEQ ID NO: 68424 - RNA, 32 nt, Homo Sapiens
cccacggcccgagcgcccacggcagcaccaug

SEQ ID NO: 68425 - RNA, 32 nt, Homo Sapiens
ccauuguuugcacaacuuugugaauauauuaa

SEQ ID NO: 68426 - RNA, 32 nt, Homo Sapiens
gugugauaaaauguaaaauucucaugaagaac

SEQ ID NO: 68427 - RNA, 32 nt, Homo Sapiens
uggguacgucugggcccccacuuucaccaguu

SEQ ID NO: 68428 - RNA, 32 nt, Homo Sapiens
acauguauuuuuguuugcugaauggaugaaac

SEQ ID NO: 68429 - RNA, 32 nt, Homo Sapiens
ugaugaugaugaugaugauaacuagaacucca

SEQ ID NO: 68430 - RNA, 29 nt, Homo Sapiens
uccugucuucaugagugaaguuacuugcc

SEQ ID NO: 68431 - RNA, 32 nt, Homo Sapiens
uuaaaagaauaaauguuguuuugcaaauguaa

SEQ ID NO: 68432 - RNA, 29 nt, Homo Sapiens
aauaaaucguguuucacagaaaaaaaaaa

SEQ ID NO: 68433 - RNA, 32 nt, Homo Sapiens
cuggcugcggggcgaccgcgcgccggggccau

SEQ ID NO: 68434 - RNA, 32 nt, Homo Sapiens
uguguauaugaaaaacaauaaauacuaugcaa

SEQ ID NO: 68435 - RNA, 32 nt, Homo Sapiens
ccaacgccucccggaccggaccgccgagggga

SEQ ID NO: 68436 - RNA, 32 nt, Homo Sapiens
acaucuaaguguauggaugauacugaccacac

SEQ ID NO: 68437 - RNA, 32 nt, Homo Sapiens
ugggcccauuuucuuuccuucacaccgaugga

SEQ ID NO: 68438 - RNA, 32 nt, Homo Sapiens
ccccacccgcgcguggcggcgccggcucccua

SEQ ID NO: 68439 - RNA, 32 nt, Homo Sapiens
aaacuuacuuucuuagccacuccagguuuggg

SEQ ID NO: 68440 - RNA, 32 nt, Homo Sapiens
guaugggaacuacccaugaugauguaagagga

SEQ ID NO: 68441 - RNA, 31 nt, Homo Sapiens
acagaccuccggagaaagucagcucuugcca

SEQ ID NO: 68442 - RNA, 32 nt, Homo Sapiens
agaagacaaaaauacuaaugcauuugagaaag

SEQ ID NO: 68443 - RNA, 32 nt, Homo Sapiens
gugaauguuguccugugucaucugucagcuuc

SEQ ID NO: 68444 - RNA, 32 nt, Homo Sapiens
ugaucacuggaacggagugaccacugagaugc

SEQ ID NO: 68445 - RNA, 31 nt, Homo Sapiens
caaguuagcacaugaaggauagauaugcacu

SEQ ID NO: 68446 - RNA, 32 nt, Homo Sapiens
uccuaaaugcuguuuuguuuacuuucugucaa

SEQ ID NO: 68447 - RNA, 32 nt, Homo Sapiens
acaccuguaucccagcacuuugggaggccaag

SEQ ID NO: 68448 - RNA, 32 nt, Homo Sapiens
uguggcaguugcugucugcaguuuacaaugua

SEQ ID NO: 68449 - RNA, 32 nt, Homo Sapiens
uccgagcccccucccggggcuggaggggggca

SEQ ID NO: 68450 - RNA, 32 nt, Homo Sapiens
cccucugccuguccugccccccagacgaugac

SEQ ID NO: 68451 - RNA, 32 nt, Homo Sapiens
auagcacuuuuggaaccuauauuugugcuuga

SEQ ID NO: 68452 - RNA, 32 nt, Homo Sapiens
cuaaagaaguguuucucucccaucauccggau

SEQ ID NO: 68453 - RNA, 32 nt, Homo Sapiens
ugacuccugccuuccaggaucucaccauuuag

SEQ ID NO: 68454 - RNA, 32 nt, Homo Sapiens
ggcccaugagagaucggaaggcccaggaaaau

SEQ ID NO: 68455 - RNA, 32 nt, Homo Sapiens
uuucaaauguaaaaacagccuauuuauauaug

SEQ ID NO: 68456 - RNA, 32 nt, Homo Sapiens
cugcauuucuaguuucuauauagugcaauaga

SEQ ID NO: 68457 - RNA, 32 nt, Homo Sapiens
gaugaaauaaacggaaaagccucuuaggcugu

SEQ ID NO: 68458 - RNA, 32 nt, Homo Sapiens
agacggauguggcuucccagacacgcugcucu

SEQ ID NO: 68459 - RNA, 32 nt, Homo Sapiens
cacccacugcccagcaacucaaggcugggucu

SEQ ID NO: 68460 - RNA, 32 nt, Homo Sapiens
ugcgguugggagggaauggggcgugggggguu

SEQ ID NO: 68461 - RNA, 32 nt, Homo Sapiens
cucuucuggcagggggucuggugcuucccgga

SEQ ID NO: 68462 - RNA, 32 nt, Homo Sapiens
ccauuuuauuggcauggcugccuugauguaac

SEQ ID NO: 68463 - RNA, 32 nt, Homo Sapiens
auuucaaagacauguguauggggauuagaaag

SEQ ID NO: 68464 - RNA, 31 nt, Homo Sapiens
agcguagccacgucugcuccaagguggcuug

SEQ ID NO: 68465 - RNA, 32 nt, Homo Sapiens
aagaaauuucucucuuuuuucucuauaaauuc

SEQ ID NO: 68466 - RNA, 32 nt, Homo Sapiens
agacagccacagacagaaaacacgcuuagcag

SEQ ID NO: 68467 - RNA, 32 nt, Homo Sapiens
cccugcugccagccucccccguccccaacaug

SEQ ID NO: 68468 - RNA, 32 nt, Homo Sapiens
uaaaaauuccaccaggauuaaucucuaaaauu

SEQ ID NO: 68469 - RNA, 32 nt, Homo Sapiens
aggcugacauggagaauguuuacuuuucuauu

SEQ ID NO: 68470 - RNA, 32 nt, Homo Sapiens
gguuuccaucaaagcccucccugucugucugu

SEQ ID NO: 68471 - RNA, 32 nt, Homo Sapiens
acaacaacaacaaauucacggaaucuuuuaag

SEQ ID NO: 68472 - RNA, 32 nt, Homo Sapiens
ccacgugccagagccgcccacccggagccgcc

SEQ ID NO: 68473 - RNA, 32 nt, Homo Sapiens
uaggcgacgagacccaguggcuagaaguucac

SEQ ID NO: 68474 - RNA, 31 nt, Homo Sapiens
uggagguggcagugaaggauacagugguagu

SEQ ID NO: 68475 - RNA, 32 nt, Homo Sapiens
uagaaaacuaaauuacuauguauguuauaggc

SEQ ID NO: 68476 - RNA, 32 nt, Homo Sapiens
acugugaaaaauuuacugaaacauuaguuaag

SEQ ID NO: 68477 - RNA, 32 nt, Homo Sapiens
cuggcggguaccugagcugugcucucagggcc

SEQ ID NO: 68478 - RNA, 32 nt, Homo Sapiens
ucuuguacugaauaauagaucauuggucgugg

SEQ ID NO: 68479 - RNA, 32 nt, Homo Sapiens
aaauaaaagcuacaaugacaaguucucuguga

SEQ ID NO: 68480 - RNA, 32 nt, Homo Sapiens
uggcuaaccaggcuccgagagaucugagcuuc

SEQ ID NO: 68481 - RNA, 32 nt, Homo Sapiens
cugagaaccagcugcgcgcggagcggugcaau

SEQ ID NO: 68482 - RNA, 32 nt, Homo Sapiens
uuucauacccugaccucugaccucaccuacag

SEQ ID NO: 68483 - RNA, 32 nt, Homo Sapiens
gaaaggaggguggggcucaggggccucaagcu

SEQ ID NO: 68484 - RNA, 32 nt, Homo Sapiens
auggugaaaccccgucccuaauaaaaauacaa

SEQ ID NO: 68485 - RNA, 32 nt, Homo Sapiens
uucaaagacagagaagaccaaagcauugccug

SEQ ID NO: 68486 - RNA, 32 nt, Homo Sapiens
accauccucucuuuccuccccagggucuacug

SEQ ID NO: 68487 - RNA, 28 nt, Homo Sapiens
uucaagguuacaggaaaggcuguaagcc

SEQ ID NO: 68488 - RNA, 32 nt, Homo Sapiens
aggauaaugggaaagguagagaaggcggcucc

SEQ ID NO: 68489 - RNA, 32 nt, Homo Sapiens
gcuuuuaauguuuaacauuuucuagcauauuu

SEQ ID NO: 68490 - RNA, 32 nt, Homo Sapiens
gcuaaaguucucuggaggauguggcugcagag

SEQ ID NO: 68491 - RNA, 32 nt, Homo Sapiens
gauaccuggacauuaaagugcgauucccacuc

SEQ ID NO: 68492 - RNA, 32 nt, Homo Sapiens
ugcaugguaguaauaccauacacauaagggaa
